United States Patent Application Publication US 2006/0046253 A1 - sequence listing, part 10

SEQ ID NO: 115650 - DNA, 25 bp, Saccharomyces pastorianus
ttcagcatccatgggtacaacgtct

SEQ ID NO: 115651 - DNA, 25 bp, Saccharomyces pastorianus
atccatcaggcctgaattctccaaa

SEQ ID NO: 115652 - DNA, 25 bp, Saccharomyces pastorianus
ttttacctccaactttttcagcatc

SEQ ID NO: 115653 - DNA, 25 bp, Saccharomyces pastorianus
ttacctcctataccgaccagagatg

SEQ ID NO: 115654 - DNA, 25 bp, Saccharomyces pastorianus
aagagatagaccctcacgcctagat

SEQ ID NO: 115655 - DNA, 25 bp, Saccharomyces pastorianus
agttcgcgcaatacgccgttagtaa

SEQ ID NO: 115656 - DNA, 25 bp, Saccharomyces pastorianus
aggctattggtgtaacttcgttgtc

SEQ ID NO: 115657 - DNA, 25 bp, Saccharomyces pastorianus
aaatgacgcattttattcttccagc

SEQ ID NO: 115658 - DNA, 25 bp, Saccharomyces pastorianus
gaaagactgttaaagatggcccatt

SEQ ID NO: 115659 - DNA, 25 bp, Saccharomyces pastorianus
cagaagatgtggatgatgcgtcgac

SEQ ID NO: 115660 - DNA, 25 bp, Saccharomyces pastorianus
atgccgatgatgtttttactggtac

SEQ ID NO: 115661 - DNA, 25 bp, Saccharomyces pastorianus
caatctccaagtttaataatgccga

SEQ ID NO: 115662 - DNA, 25 bp, Saccharomyces pastorianus
aggtatttctattgatgatcatccg

SEQ ID NO: 115663 - DNA, 25 bp, Saccharomyces pastorianus
ttgaacctctttcccaatgaattgt

SEQ ID NO: 115664 - DNA, 25 bp, Saccharomyces pastorianus
gcaaacccaacataatcctagacga

SEQ ID NO: 115665 - DNA, 25 bp, Saccharomyces pastorianus
aacatcggactatccatgctggcaa

SEQ ID NO: 115666 - DNA, 25 bp, Saccharomyces pastorianus
gatcatccgtataatttgaacctct

SEQ ID NO: 115667 - DNA, 25 bp, Saccharomyces pastorianus
taaagatggcccattttataccgga

SEQ ID NO: 115668 - DNA, 25 bp, Saccharomyces pastorianus
gagcggtaaacgcaaacccaacata

SEQ ID NO: 115669 - DNA, 25 bp, Saccharomyces pastorianus
gtttgtccttttccacttgggcagc

SEQ ID NO: 115670 - DNA, 25 bp, Saccharomyces pastorianus
agaggaacccatacatacacagaga

SEQ ID NO: 115671 - DNA, 25 bp, Saccharomyces pastorianus
aagcgttttcaaacaactcctgttg

SEQ ID NO: 115672 - DNA, 25 bp, Saccharomyces pastorianus
gttgcagcatcatctggcttgtcga

SEQ ID NO: 115673 - DNA, 25 bp, Saccharomyces pastorianus
aagaagttgtttctgctgttgcagc

SEQ ID NO: 115674 - DNA, 25 bp, Saccharomyces pastorianus
agtagttcctcaatatcagcatcac

SEQ ID NO: 115675 - DNA, 25 bp, Saccharomyces pastorianus
gtcttttgatctcttttcctctttg

SEQ ID NO: 115676 - DNA, 25 bp, Saccharomyces pastorianus
actcctgttgtcttttaactcttct

SEQ ID NO: 115677 - DNA, 25 bp, Saccharomyces pastorianus
gagagcctattcttccagtagttcc

SEQ ID NO: 115678 - DNA, 25 bp, Saccharomyces pastorianus
ctggcttgtcgatcaggtcttttga

SEQ ID NO: 115679 - DNA, 25 bp, Saccharomyces pastorianus
atcagcatcactatctgggtccaac

SEQ ID NO: 115680 - DNA, 25 bp, Saccharomyces pastorianus
aagaaatatcgcatccagggaattg

SEQ ID NO: 115681 - DNA, 25 bp, Saccharomyces pastorianus
tgtaggtggttatttactcttaaga

SEQ ID NO: 115682 - DNA, 25 bp, Saccharomyces pastorianus
gtcaactatgactacaagcacttta

SEQ ID NO: 115683 - DNA, 25 bp, Saccharomyces pastorianus
acaggagttgtttgaaaacgctttg

SEQ ID NO: 115684 - DNA, 25 bp, Saccharomyces pastorianus
gaaaccaagggttggacccagatag

SEQ ID NO: 115685 - DNA, 25 bp, Saccharomyces pastorianus
gcaacagcagaaacaacttctttcg

SEQ ID NO: 115686 - DNA, 25 bp, Saccharomyces pastorianus
ggatacctggatggcaaaactagtc

SEQ ID NO: 115687 - DNA, 25 bp, Saccharomyces pastorianus
aagccagatgatgctgcaacagcag

SEQ ID NO: 115688 - DNA, 25 bp, Saccharomyces pastorianus
gtagcggaaacatgggtggatacct

SEQ ID NO: 115689 - DNA, 25 bp, Saccharomyces pastorianus
gaagcagttggctgcccaagtggaa

SEQ ID NO: 115690 - DNA, 25 bp, Saccharomyces pastorianus
aaagacctgatcgacaagccagatg

SEQ ID NO: 115691 - DNA, 25 bp, Saccharomyces pastorianus
aatccgccgaggtggaagacgtcca

SEQ ID NO: 115692 - DNA, 25 bp, Saccharomyces pastorianus
gaattcccggaagccgcaggcaaaa

SEQ ID NO: 115693 - DNA, 25 bp, Saccharomyces pastorianus
aagcggaaggaatcccctcaatgga

SEQ ID NO: 115694 - DNA, 25 bp, Saccharomyces pastorianus
gtaacactgtttgggcctgtggcgc

SEQ ID NO: 115695 - DNA, 25 bp, Saccharomyces pastorianus
gtccgcgggctgtggaaattctatc

SEQ ID NO: 115696 - DNA, 25 bp, Saccharomyces pastorianus
gacgaagcatatgcccgagagcaat

SEQ ID NO: 115697 - DNA, 25 bp, Saccharomyces pastorianus
taatgcccaatcaatctctaaccag

SEQ ID NO: 115698 - DNA, 25 bp, Saccharomyces pastorianus
ggttgttacagactctaatgcccaa

SEQ ID NO: 115699 - DNA, 25 bp, Saccharomyces pastorianus
gagcgctccacgtgaggccatttta

SEQ ID NO: 115700 - DNA, 25 bp, Saccharomyces pastorianus
atggctcacggctatggtaggttta

SEQ ID NO: 115701 - DNA, 25 bp, Saccharomyces pastorianus
gtaggaccactaccgttggacgtga

SEQ ID NO: 115702 - DNA, 25 bp, Saccharomyces pastorianus
ggacaaaactatgtagcgcatacta

SEQ ID NO: 115703 - DNA, 25 bp, Saccharomyces pastorianus
ctcattctctggctttagacttcaa

SEQ ID NO: 115704 - DNA, 25 bp, Saccharomyces pastorianus
ggctttagacttcaaatcgcggtgt

SEQ ID NO: 115705 - DNA, 25 bp, Saccharomyces pastorianus
gtagcgcatactatgtcagtcaggt

SEQ ID NO: 115706 - DNA, 25 bp, Saccharomyces pastorianus
tctcagtttgtttcgtttttcctca

SEQ ID NO: 115707 - DNA, 25 bp, Saccharomyces pastorianus
tactatgtcagtcaggtattgagaa

SEQ ID NO: 115708 - DNA, 25 bp, Saccharomyces pastorianus
tagacttcaaatcgcggtgtaaaaa

SEQ ID NO: 115709 - DNA, 25 bp, Saccharomyces pastorianus
tttttcctcattctctggctttaga

SEQ ID NO: 115710 - DNA, 25 bp, Saccharomyces pastorianus
ttgtttcgtttttcctcattctctg

SEQ ID NO: 115711 - DNA, 25 bp, Saccharomyces pastorianus
gtaaagaaatgccataccgtgattt

SEQ ID NO: 115712 - DNA, 25 bp, Saccharomyces pastorianus
gccataccgtgatttgattttgttt

SEQ ID NO: 115713 - DNA, 25 bp, Saccharomyces pastorianus
ggccctcatctattttctcggaaaa

SEQ ID NO: 115714 - DNA, 25 bp, Saccharomyces pastorianus
gaactactgccacgattttacaaaa

SEQ ID NO: 115715 - DNA, 25 bp, Saccharomyces pastorianus
aataacaggccctcatctattttct

SEQ ID NO: 115716 - DNA, 25 bp, Saccharomyces pastorianus
gaaactcagtgtccttcaaaatgac

SEQ ID NO: 115717 - DNA, 25 bp, Saccharomyces pastorianus
gatatttcgaaactcagtgtccttc

SEQ ID NO: 115718 - DNA, 25 bp, Saccharomyces pastorianus
catttcaagaactactgccacgatt

SEQ ID NO: 115719 - DNA, 25 bp, Saccharomyces pastorianus
gagcaatactaagcataccacttct

SEQ ID NO: 115720 - DNA, 25 bp, Saccharomyces pastorianus
taccacttctcatcacatggaactc

SEQ ID NO: 115721 - DNA, 25 bp, Saccharomyces pastorianus
ggtcgataagaccagactgtttatt

SEQ ID NO: 115722 - DNA, 25 bp, Saccharomyces pastorianus
ggatcattatccttacacttttatt

SEQ ID NO: 115723 - DNA, 25 bp, Saccharomyces pastorianus
ttctcggaaaacttggtggattttg

SEQ ID NO: 115724 - DNA, 25 bp, Saccharomyces pastorianus
caagccactcagaaggataaatcct

SEQ ID NO: 115725 - DNA, 25 bp, Saccharomyces pastorianus
actgcttctacacaagccactcaga

SEQ ID NO: 115726 - DNA, 25 bp, Saccharomyces pastorianus
cactcagaaggataaatcctctgaa

SEQ ID NO: 115727 - DNA, 25 bp, Saccharomyces pastorianus
tctacacaagccactcagaaggata

SEQ ID NO: 115728 - DNA, 25 bp, Saccharomyces pastorianus
gcttctacacaagccactcagaagg

SEQ ID NO: 115729 - DNA, 25 bp, Saccharomyces pastorianus
atgcaaccgatcaccactgcttcta

SEQ ID NO: 115730 - DNA, 25 bp, Saccharomyces pastorianus
agccactcagaaggataaatcctct

SEQ ID NO: 115731 - DNA, 25 bp, Saccharomyces pastorianus
ttctacacaagccactcagaaggat

SEQ ID NO: 115732 - DNA, 25 bp, Saccharomyces pastorianus
aggataaatcctctgaaaagaaaga

SEQ ID NO: 115733 - DNA, 25 bp, Saccharomyces pastorianus
ctgcttctacacaagccactcagaa

SEQ ID NO: 115734 - DNA, 25 bp, Saccharomyces pastorianus
tacacaagccactcagaaggataaa

SEQ ID NO: 115735 - DNA, 25 bp, Saccharomyces pastorianus
gcaccggcgacacaactagtttcaa

SEQ ID NO: 115736 - DNA, 25 bp, Saccharomyces pastorianus
gattattttcaaaccggcactgcca

SEQ ID NO: 115737 - DNA, 25 bp, Saccharomyces pastorianus
gatagtacggacttgatgcacgtga

SEQ ID NO: 115738 - DNA, 25 bp, Saccharomyces pastorianus
gtaacgattcgaagtgggcaccggc

SEQ ID NO: 115739 - DNA, 25 bp, Saccharomyces pastorianus
aatgcggacgttgagtacggtacaa

SEQ ID NO: 115740 - DNA, 25 bp, Saccharomyces pastorianus
acatagtgggatcctgcgggttttt

SEQ ID NO: 115741 - DNA, 25 bp, Saccharomyces pastorianus
ttaacggaagaccacccatgggtag

SEQ ID NO: 115742 - DNA, 25 bp, Saccharomyces pastorianus
actgccaccagcattcgaaacgaat

SEQ ID NO: 115743 - DNA, 25 bp, Saccharomyces pastorianus
aagatgcatcaaaccgttaacggaa

SEQ ID NO: 115744 - DNA, 25 bp, Saccharomyces pastorianus
tatttcgaattctgctgagcgtacg

SEQ ID NO: 115745 - DNA, 25 bp, Saccharomyces pastorianus
cgaaaagcttttccgtgactggttg

SEQ ID NO: 115746 - DNA, 25 bp, Saccharomyces pastorianus
atgagtctttgatatatcttttcct

SEQ ID NO: 115747 - DNA, 25 bp, Saccharomyces pastorianus
tatcttttccttgaaactagttgtg

SEQ ID NO: 115748 - DNA, 25 bp, Saccharomyces pastorianus
ctttgatatatcttttccttgaaac

SEQ ID NO: 115749 - DNA, 25 bp, Saccharomyces pastorianus
agtctttgatatatcttttccttga

SEQ ID NO: 115750 - DNA, 25 bp, Saccharomyces pastorianus
gtctttgatatatcttttccttgaa

SEQ ID NO: 115751 - DNA, 25 bp, Saccharomyces pastorianus
gcatcttaatgagtctttgatatat

SEQ ID NO: 115752 - DNA, 25 bp, Saccharomyces pastorianus
gatatatcttttccttgaaactagt

SEQ ID NO: 115753 - DNA, 25 bp, Saccharomyces pastorianus
tgatatatcttttccttgaaactag

SEQ ID NO: 115754 - DNA, 25 bp, Saccharomyces pastorianus
tcttttccttgaaactagttgtgtc

SEQ ID NO: 115755 - DNA, 25 bp, Saccharomyces pastorianus
gagtctttgatatatcttttccttg

SEQ ID NO: 115756 - DNA, 25 bp, Saccharomyces pastorianus
atgcatcttaatgagtctttgatat

SEQ ID NO: 115757 - DNA, 25 bp, Saccharomyces pastorianus
attggataggttgtcgcgcgaccag

SEQ ID NO: 115758 - DNA, 25 bp, Saccharomyces pastorianus
caatccgtttcagagttaccactac

SEQ ID NO: 115759 - DNA, 25 bp, Saccharomyces pastorianus
aatccgtctcggatgctttagactt

SEQ ID NO: 115760 - DNA, 25 bp, Saccharomyces pastorianus
gcaggtgaagaaggccccgctcaat

SEQ ID NO: 115761 - DNA, 25 bp, Saccharomyces pastorianus
gatggtactatctctgccttaggat

SEQ ID NO: 115762 - DNA, 25 bp, Saccharomyces pastorianus
aatgttacggaaaggccgcctcatt

SEQ ID NO: 115763 - DNA, 25 bp, Saccharomyces pastorianus
cccgcctattttggtggttatatct

SEQ ID NO: 115764 - DNA, 25 bp, Saccharomyces pastorianus
atcgaagaagctaccccatttatta

SEQ ID NO: 115765 - DNA, 25 bp, Saccharomyces pastorianus
gcgaccagaccatgctaactatttg

SEQ ID NO: 115766 - DNA, 25 bp, Saccharomyces pastorianus
tttaaattctgatgaccccgcctat

SEQ ID NO: 115767 - DNA, 25 bp, Saccharomyces pastorianus
tatttgtcctctctccaacgtgaag

SEQ ID NO: 115768 - DNA, 25 bp, Saccharomyces pastorianus
gtcagaactaccaactagacctagt

SEQ ID NO: 115769 - DNA, 25 bp, Saccharomyces pastorianus
aagcaatgatcgttctgcacccaaa

SEQ ID NO: 115770 - DNA, 25 bp, Saccharomyces pastorianus
gcgcgactcgccttcagaaaatgaa

SEQ ID NO: 115771 - DNA, 25 bp, Saccharomyces pastorianus
ggtgctgcccatagagccaatgaaa

SEQ ID NO: 115772 - DNA, 25 bp, Saccharomyces pastorianus
agcttcatcttacaagcgcgactcg

SEQ ID NO: 115773 - DNA, 25 bp, Saccharomyces pastorianus
aaagagcaatactcaggcgcttccg

SEQ ID NO: 115774 - DNA, 25 bp, Saccharomyces pastorianus
gaagtagggcacttagacccacagg

SEQ ID NO: 115775 - DNA, 25 bp, Saccharomyces pastorianus
aggcgcttccgcaaggtcccaaggg

SEQ ID NO: 115776 - DNA, 25 bp, Saccharomyces pastorianus
agggataaccgcttacgtgaagagt

SEQ ID NO: 115777 - DNA, 25 bp, Saccharomyces pastorianus
atacacgagatagcggtgctgccca

SEQ ID NO: 115778 - DNA, 25 bp, Saccharomyces pastorianus
caacgttcacaattacggtttcctg

SEQ ID NO: 115779 - DNA, 25 bp, Saccharomyces pastorianus
aaattgataaacttgccgtggcaga

SEQ ID NO: 115780 - DNA, 25 bp, Saccharomyces pastorianus
caccatttgatgttcctgttcatga

SEQ ID NO: 115781 - DNA, 25 bp, Saccharomyces pastorianus
tttcgccattttacctcatcatttg

SEQ ID NO: 115782 - DNA, 25 bp, Saccharomyces pastorianus
gagccaaatccgctttaagatctgg

SEQ ID NO: 115783 - DNA, 25 bp, Saccharomyces pastorianus
atcatttctaaatgtcagcctgacg

SEQ ID NO: 115784 - DNA, 25 bp, Saccharomyces pastorianus
catttttatcgcctttcgccatttt

SEQ ID NO: 115785 - DNA, 25 bp, Saccharomyces pastorianus
gacatgccacgctgtatacctaagg

SEQ ID NO: 115786 - DNA, 25 bp, Saccharomyces pastorianus
atacctaagggatcccgtcgctcga

SEQ ID NO: 115787 - DNA, 25 bp, Saccharomyces pastorianus
cgaccaggccaatccgaagtaattt

SEQ ID NO: 115788 - DNA, 25 bp, Saccharomyces pastorianus
tgatggttcactaacgttcgacccc

SEQ ID NO: 115789 - DNA, 25 bp, Saccharomyces pastorianus
gacgagttgatttcactggctacag

SEQ ID NO: 115790 - DNA, 25 bp, Saccharomyces pastorianus
taggttaaccatccctggcccatat

SEQ ID NO: 115791 - DNA, 25 bp, Saccharomyces pastorianus
tttccccaggtgatggtgccacctt

SEQ ID NO: 115792 - DNA, 25 bp, Saccharomyces pastorianus
gaatttccccaggtgatggtgccac

SEQ ID NO: 115793 - DNA, 25 bp, Saccharomyces pastorianus
cattacaccggtaccttggagaacg

SEQ ID NO: 115794 - DNA, 25 bp, Saccharomyces pastorianus
aagacaggtgacttggttaccattc

SEQ ID NO: 115795 - DNA, 25 bp, Saccharomyces pastorianus
aattgacagaatttccccaggtgat

SEQ ID NO: 115796 - DNA, 25 bp, Saccharomyces pastorianus
gtctgttggtgaaaaagctaggtta

SEQ ID NO: 115797 - DNA, 25 bp, Saccharomyces pastorianus
gctctccattccaatgtaacatcgg

SEQ ID NO: 115798 - DNA, 25 bp, Saccharomyces pastorianus
gggctctccattccaatgtaacatc

SEQ ID NO: 115799 - DNA, 25 bp, Saccharomyces pastorianus
gttaccattcattacaccggtacct

SEQ ID NO: 115800 - DNA, 25 bp, Saccharomyces pastorianus
gaaaaagctaggttaaccatccctg

SEQ ID NO: 115801 - DNA, 25 bp, Saccharomyces pastorianus
gctgttggccagatgcttattcaat

SEQ ID NO: 115802 - DNA, 25 bp, Saccharomyces pastorianus
ttactttgccagcagaccctgaata

SEQ ID NO: 115803 - DNA, 25 bp, Saccharomyces pastorianus
acaacattccttacttggtggactg

SEQ ID NO: 115804 - DNA, 25 bp, Saccharomyces pastorianus
aatccaccacatcccagtgaaagtt

SEQ ID NO: 115805 - DNA, 25 bp, Saccharomyces pastorianus
tagacgctacggtcgttcaattgaa

SEQ ID NO: 115806 - DNA, 25 bp, Saccharomyces pastorianus
tgtgccgctgatgacttagacgcta

SEQ ID NO: 115807 - DNA, 25 bp, Saccharomyces pastorianus
ggaggtaacgacgtcccatttggca

SEQ ID NO: 115808 - DNA, 25 bp, Saccharomyces pastorianus
atcgtcgttgcttctcgtaaacatg

SEQ ID NO: 115809 - DNA, 25 bp, Saccharomyces pastorianus
gaactttttgactaccacgatgctg

SEQ ID NO: 115810 - DNA, 25 bp, Saccharomyces pastorianus
ggtttcagcaagatcatcgtcgttg

SEQ ID NO: 115811 - DNA, 25 bp, Saccharomyces pastorianus
gatgatatcccacagttacttgatg

SEQ ID NO: 115812 - DNA, 25 bp, Saccharomyces pastorianus
agaggcccagaggatacgagagcaa

SEQ ID NO: 115813 - DNA, 25 bp, Saccharomyces pastorianus
ggaagtccctgcgagatcagcttag

SEQ ID NO: 115814 - DNA, 25 bp, Saccharomyces pastorianus
gaggacctggaattttaccagaaga

SEQ ID NO: 115815 - DNA, 25 bp, Saccharomyces pastorianus
aactacttagacgtcaaggcaatca

SEQ ID NO: 115816 - DNA, 25 bp, Saccharomyces pastorianus
gaccggcactagtttgggcagtaaa

SEQ ID NO: 115817 - DNA, 25 bp, Saccharomyces pastorianus
gatcagcttaggtctaatgctatta

SEQ ID NO: 115818 - DNA, 25 bp, Saccharomyces pastorianus
gtgagagaccgtgaaagttttacta

SEQ ID NO: 115819 - DNA, 25 bp, Saccharomyces pastorianus
aaaccactgaaattcgtgtcagaag

SEQ ID NO: 115820 - DNA, 25 bp, Saccharomyces pastorianus
gtaaagacatccagccctaaaccaa

SEQ ID NO: 115821 - DNA, 25 bp, Saccharomyces pastorianus
aaatatttagagaccggcactagtt

SEQ ID NO: 115822 - DNA, 25 bp, Saccharomyces pastorianus
agaacgattctaccactaatacaga

SEQ ID NO: 115823 - DNA, 25 bp, Saccharomyces pastorianus
tccagagtgctatcctgttggctat

SEQ ID NO: 115824 - DNA, 25 bp, Saccharomyces pastorianus
taaaactatcaagcgtccagagtgc

SEQ ID NO: 115825 - DNA, 25 bp, Saccharomyces pastorianus
aaacatcgacactattgccaaggaa

SEQ ID NO: 115826 - DNA, 25 bp, Saccharomyces pastorianus
gtacttccgtcagctgttaagccaa

SEQ ID NO: 115827 - DNA, 25 bp, Saccharomyces pastorianus
aacgctgcagaagcactggaccaaa

SEQ ID NO: 115828 - DNA, 25 bp, Saccharomyces pastorianus
ttgctcttttgtacttcggcgataa

SEQ ID NO: 115829 - DNA, 25 bp, Saccharomyces pastorianus
gccaaggccaaaggcgtcgtcagtt

SEQ ID NO: 115830 - DNA, 25 bp, Saccharomyces pastorianus
gagctaatcaactccttgaacttag

SEQ ID NO: 115831 - DNA, 25 bp, Saccharomyces pastorianus
aaaatgtctcagtacttccgtcagc

SEQ ID NO: 115832 - DNA, 25 bp, Saccharomyces pastorianus
atatgatacccatgcttgctctttt

SEQ ID NO: 115833 - DNA, 25 bp, Saccharomyces pastorianus
aagaagccggttctgaagccgttca

SEQ ID NO: 115834 - DNA, 25 bp, Saccharomyces pastorianus
cattgttggacagaatcgttgcttt

SEQ ID NO: 115835 - DNA, 25 bp, Saccharomyces pastorianus
tgctttgttactcggtgtgccacta

SEQ ID NO: 115836 - DNA, 25 bp, Saccharomyces pastorianus
tctatacttgccgaacaacagctaa

SEQ ID NO: 115837 - DNA, 25 bp, Saccharomyces pastorianus
attttccagaaatcaggccatcgtg

SEQ ID NO: 115838 - DNA, 25 bp, Saccharomyces pastorianus
cacaaaatccggaaaccttgcttgg

SEQ ID NO: 115839 - DNA, 25 bp, Saccharomyces pastorianus
ttggttttactagctcttttgtgag

SEQ ID NO: 115840 - DNA, 25 bp, Saccharomyces pastorianus
gactttgaccaccactgctttgtta

SEQ ID NO: 115841 - DNA, 25 bp, Saccharomyces pastorianus
tgtgccactatccttatctatactt

SEQ ID NO: 115842 - DNA, 25 bp, Saccharomyces pastorianus
gacgatgtcgttcaattagacgaac

SEQ ID NO: 115843 - DNA, 25 bp, Saccharomyces pastorianus
aggcttctgcaacaaacaacgacgt

SEQ ID NO: 115844 - DNA, 25 bp, Saccharomyces pastorianus
gtgatgctaataacatattggccca

SEQ ID NO: 115845 - DNA, 25 bp, Saccharomyces pastorianus
ttctgtttcaaatgagtcaacggca

SEQ ID NO: 115846 - DNA, 25 bp, Saccharomyces pastorianus
ggttttgtttctcagaccaactgcc

SEQ ID NO: 115847 - DNA, 25 bp, Saccharomyces pastorianus
cgttcaatgcaaatcttcgagtatt

SEQ ID NO: 115848 - DNA, 25 bp, Saccharomyces pastorianus
cctgcgtgtattgtttttctgtttc

SEQ ID NO: 115849 - DNA, 25 bp, Saccharomyces pastorianus
gagtcaacggcaacgatcgttcaat

SEQ ID NO: 115850 - DNA, 25 bp, Saccharomyces pastorianus
ggcaacgatcgttcaatgcaaatct

SEQ ID NO: 115851 - DNA, 25 bp, Saccharomyces pastorianus
tttgtttctcagaccaactgccgtt

SEQ ID NO: 115852 - DNA, 25 bp, Saccharomyces pastorianus
ttctcagaccaactgccgttccttt

SEQ ID NO: 115853 - DNA, 25 bp, Saccharomyces pastorianus
gcgtgtattgtttttctgtttcaaa

SEQ ID NO: 115854 - DNA, 25 bp, Saccharomyces pastorianus
ctttcctgcgtgtattgtttttctg

SEQ ID NO: 115855 - DNA, 25 bp, Saccharomyces pastorianus
tgccgttcctttcctgcgtgtattg

SEQ ID NO: 115856 - DNA, 25 bp, Saccharomyces pastorianus
gtgtatgaatcttatcgtgcaaatc

SEQ ID NO: 115857 - DNA, 25 bp, Saccharomyces pastorianus
aatagccaccaaacttatacacaat

SEQ ID NO: 115858 - DNA, 25 bp, Saccharomyces pastorianus
gatgatccctttacaaagttccaca

SEQ ID NO: 115859 - DNA, 25 bp, Saccharomyces pastorianus
gagggcttccagaaaaggataccag

SEQ ID NO: 115860 - DNA, 25 bp, Saccharomyces pastorianus
gtatgactctattaatgacgacaaa

SEQ ID NO: 115861 - DNA, 25 bp, Saccharomyces pastorianus
gactttggattctttctgggtggat

SEQ ID NO: 115862 - DNA, 25 bp, Saccharomyces pastorianus
tgcgtgctccctatgaagtactaaa

SEQ ID NO: 115863 - DNA, 25 bp, Saccharomyces pastorianus
tcgtgcaaatcatgcgcagttattt

SEQ ID NO: 115864 - DNA, 25 bp, Saccharomyces pastorianus
ttgggattcgccagaagctcttgat

SEQ ID NO: 115865 - DNA, 25 bp, Saccharomyces pastorianus
gatgacactccaattgcgaaacctt

SEQ ID NO: 115866 - DNA, 25 bp, Saccharomyces pastorianus
gaagatattagtgcgtgctccctat

SEQ ID NO: 115867 - DNA, 25 bp, Saccharomyces pastorianus
gatgatagaaatgccctcctaaccc

SEQ ID NO: 115868 - DNA, 25 bp, Saccharomyces pastorianus
tataccttgagactttgatgcacat

SEQ ID NO: 115869 - DNA, 25 bp, Saccharomyces pastorianus
acgattcttcgccagattactttca

SEQ ID NO: 115870 - DNA, 25 bp, Saccharomyces pastorianus
ggagctcagcactcacggcttgaaa

SEQ ID NO: 115871 - DNA, 25 bp, Saccharomyces pastorianus
tcacttccgagtctgctattgtaac

SEQ ID NO: 115872 - DNA, 25 bp, Saccharomyces pastorianus
aatatcttggacttcatgcgccagc

SEQ ID NO: 115873 - DNA, 25 bp, Saccharomyces pastorianus
gcccatcaagcttaatcacttccga

SEQ ID NO: 115874 - DNA, 25 bp, Saccharomyces pastorianus
ttcatgcgccagctgttggctgaat

SEQ ID NO: 115875 - DNA, 25 bp, Saccharomyces pastorianus
gagacgaaatgcttgggacaaccat

SEQ ID NO: 115876 - DNA, 25 bp, Saccharomyces pastorianus
gtcaccataccctctcaattaagat

SEQ ID NO: 115877 - DNA, 25 bp, Saccharomyces pastorianus
gtccaaagccgccagtagcataata

SEQ ID NO: 115878 - DNA, 25 bp, Saccharomyces pastorianus
accagaagagtttttgcccgcttgg

SEQ ID NO: 115879 - DNA, 25 bp, Saccharomyces pastorianus
atgaccttcttttaggtccgggcat

SEQ ID NO: 115880 - DNA, 25 bp, Saccharomyces pastorianus
cggttgctgctttattgctgcatta

SEQ ID NO: 115881 - DNA, 25 bp, Saccharomyces pastorianus
gtgcgcctttcttattggtttgtga

SEQ ID NO: 115882 - DNA, 25 bp, Saccharomyces pastorianus
actgccattttgaacggctcgcaat

SEQ ID NO: 115883 - DNA, 25 bp, Saccharomyces pastorianus
atatatgtttgcgttctggatcccc

SEQ ID NO: 115884 - DNA, 25 bp, Saccharomyces pastorianus
cccgctcatacgtttgttcaactga

SEQ ID NO: 115885 - DNA, 25 bp, Saccharomyces pastorianus
ttggtgtcgccaacgtcatgaatac

SEQ ID NO: 115886 - DNA, 25 bp, Saccharomyces pastorianus
gaataccgttctgattgccgatatg

SEQ ID NO: 115887 - DNA, 25 bp, Saccharomyces pastorianus
ttcgtcaactactgtggtgcgcctt

SEQ ID NO: 115888 - DNA, 25 bp, Saccharomyces pastorianus
aattctagttggctcatgcgttggt

SEQ ID NO: 115889 - DNA, 25 bp, Saccharomyces pastorianus
aactggtaccgccattgggcatgag

SEQ ID NO: 115890 - DNA, 25 bp, Saccharomyces pastorianus
caattctccaacactgttccatatg

SEQ ID NO: 115891 - DNA, 25 bp, Saccharomyces pastorianus
agtgctacctctaaccggaatggct

SEQ ID NO: 115892 - DNA, 25 bp, Saccharomyces pastorianus
tggcgtacctcccatgaatcaaatg

SEQ ID NO: 115893 - DNA, 25 bp, Saccharomyces pastorianus
aatatgtcgccaccaacacagcagt

SEQ ID NO: 115894 - DNA, 25 bp, Saccharomyces pastorianus
cagtcgttcatgtcaatggcccaaa

SEQ ID NO: 115895 - DNA, 25 bp, Saccharomyces pastorianus
tcaagcacctcctcagggaaatggt

SEQ ID NO: 115896 - DNA, 25 bp, Saccharomyces pastorianus
aatgcgccgatgcaacatgggtaca

SEQ ID NO: 115897 - DNA, 25 bp, Saccharomyces pastorianus
tgcaaataattatcccttccctcaa

SEQ ID NO: 115898 - DNA, 25 bp, Saccharomyces pastorianus
caaacggtatgccttatccaccata

SEQ ID NO: 115899 - DNA, 25 bp, Saccharomyces pastorianus
tcaagcgtgaatccagtgctacctc

SEQ ID NO: 115900 - DNA, 25 bp, Saccharomyces pastorianus
taagctcagctgatggtattttgcc

SEQ ID NO: 115901 - DNA, 25 bp, Saccharomyces pastorianus
agccgcatcatgctgttttgcaagc

SEQ ID NO: 115902 - DNA, 25 bp, Saccharomyces pastorianus
tgtgcccttcgctatttcactgaaa

SEQ ID NO: 115903 - DNA, 25 bp, Saccharomyces pastorianus
gacgtcattttatctgtgaacggaa

SEQ ID NO: 115904 - DNA, 25 bp, Saccharomyces pastorianus
accgaccgttttgtaatatttgcag

SEQ ID NO: 115905 - DNA, 25 bp, Saccharomyces pastorianus
gaattatcattacttccctactgca

SEQ ID NO: 115906 - DNA, 25 bp, Saccharomyces pastorianus
gaagagggacaacatcacgcacaaa

SEQ ID NO: 115907 - DNA, 25 bp, Saccharomyces pastorianus
attcatttagagaccggtgacgtca

SEQ ID NO: 115908 - DNA, 25 bp, Saccharomyces pastorianus
aatgactttcgacaatgtgcccttc

SEQ ID NO: 115909 - DNA, 25 bp, Saccharomyces pastorianus
gtacggtatatctgccacaaacttc

SEQ ID NO: 115910 - DNA, 25 bp, Saccharomyces pastorianus
gtattttgccatcagccatgttaga

SEQ ID NO: 115911 - DNA, 25 bp, Saccharomyces pastorianus
gaccaaaaccaaaacatgtctgttt

SEQ ID NO: 115912 - DNA, 25 bp, Saccharomyces pastorianus
agctcaacggctttctattcaataa

SEQ ID NO: 115913 - DNA, 25 bp, Saccharomyces pastorianus
tcacaaacggcaaagaggagaccaa

SEQ ID NO: 115914 - DNA, 25 bp, Saccharomyces pastorianus
atgtactcaaaccactacttaaagg

SEQ ID NO: 115915 - DNA, 25 bp, Saccharomyces pastorianus
aatattagcttgcatcacaaacggc

SEQ ID NO: 115916 - DNA, 25 bp, Saccharomyces pastorianus
acatgtctgttttcaatgtactcaa

SEQ ID NO: 115917 - DNA, 25 bp, Saccharomyces pastorianus
tagatcattaaaagccttaaccgga

SEQ ID NO: 115918 - DNA, 25 bp, Saccharomyces pastorianus
ggctttctattcaataacgtttcta

SEQ ID NO: 115919 - DNA, 25 bp, Saccharomyces pastorianus
ggaaggaaaattgcccatccagctt

SEQ ID NO: 115920 - DNA, 25 bp, Saccharomyces pastorianus
aattgcccatccagcttattcaaag

SEQ ID NO: 115921 - DNA, 25 bp, Saccharomyces pastorianus
agtttcaaagtgaagctcaacggct

SEQ ID NO: 115922 - DNA, 25 bp, Saccharomyces pastorianus
ggtcggtaaagccactttgttgaca

SEQ ID NO: 115923 - DNA, 25 bp, Saccharomyces pastorianus
attaggtctgatccagtattggcta

SEQ ID NO: 115924 - DNA, 25 bp, Saccharomyces pastorianus
tggaattgcgcctttggtcggtaaa

SEQ ID NO: 115925 - DNA, 25 bp, Saccharomyces pastorianus
gtctagcgtaccgtgaaaacaagtt

SEQ ID NO: 115926 - DNA, 25 bp, Saccharomyces pastorianus
aagcgtccaaactagacccaagaag

SEQ ID NO: 115927 - DNA, 25 bp, Saccharomyces pastorianus
gctgaagccgctaaagttcaccaaa

SEQ ID NO: 115928 - DNA, 25 bp, Saccharomyces pastorianus
gaatccgctgatttggctagaacta

SEQ ID NO: 115929 - DNA, 25 bp, Saccharomyces pastorianus
aattagcatgtctagcgtaccgtga

SEQ ID NO: 115930 - DNA, 25 bp, Saccharomyces pastorianus
ggtatttatgttggaattgcgcctt

SEQ ID NO: 115931 - DNA, 25 bp, Saccharomyces pastorianus
attacattattcgaagaatccgctg

SEQ ID NO: 115932 - DNA, 25 bp, Saccharomyces pastorianus
aacgattttgacaaggctttgaagc

SEQ ID NO: 115933 - DNA, 25 bp, Saccharomyces pastorianus
gcctgtacgattattgtgttgctta

SEQ ID NO: 115934 - DNA, 25 bp, Saccharomyces pastorianus
tgagtacatcgacggtaaagcctgt

SEQ ID NO: 115935 - DNA, 25 bp, Saccharomyces pastorianus
catccttcatcatttgtttcctttg

SEQ ID NO: 115936 - DNA, 25 bp, Saccharomyces pastorianus
caactgtcgctggatttctggcaga

SEQ ID NO: 115937 - DNA, 25 bp, Saccharomyces pastorianus
aacttttcctttctagactcaactg

SEQ ID NO: 115938 - DNA, 25 bp, Saccharomyces pastorianus
gaaacattttcctcggtgaataccg

SEQ ID NO: 115939 - DNA, 25 bp, Saccharomyces pastorianus
caaggattccatacgttctttgata

SEQ ID NO: 115940 - DNA, 25 bp, Saccharomyces pastorianus
gtttgttccaatagcaagtcgtgca

SEQ ID NO: 115941 - DNA, 25 bp, Saccharomyces pastorianus
gcaagtcgtgcacaatatctaacat

SEQ ID NO: 115942 - DNA, 25 bp, Saccharomyces pastorianus
gagacggatccttctttttcaaatg

SEQ ID NO: 115943 - DNA, 25 bp, Saccharomyces pastorianus
agttgatacttctgatgcattgttg

SEQ ID NO: 115944 - DNA, 25 bp, Saccharomyces pastorianus
actgccgtcacttggtcaacaaaaa

SEQ ID NO: 115945 - DNA, 25 bp, Saccharomyces pastorianus
ttcgccttatcctgtggagaccact

SEQ ID NO: 115946 - DNA, 25 bp, Saccharomyces pastorianus
gaagcctaattgcttgatcgccaga

SEQ ID NO: 115947 - DNA, 25 bp, Saccharomyces pastorianus
gggtgccagtaatagcctcgatgtt

SEQ ID NO: 115948 - DNA, 25 bp, Saccharomyces pastorianus
ttagggcaatctcacacacattatg

SEQ ID NO: 115949 - DNA, 25 bp, Saccharomyces pastorianus
gatcgccagaaaatcactgccgtca

SEQ ID NO: 115950 - DNA, 25 bp, Saccharomyces pastorianus
aggatcacagttacttcgccttatc

SEQ ID NO: 115951 - DNA, 25 bp, Saccharomyces pastorianus
gtcgataccatggatattacggcaa

SEQ ID NO: 115952 - DNA, 25 bp, Saccharomyces pastorianus
atggctaagccgtcacaatgtcaaa

SEQ ID NO: 115953 - DNA, 25 bp, Saccharomyces pastorianus
aatctggcacagttcctcattaacg

SEQ ID NO: 115954 - DNA, 25 bp, Saccharomyces pastorianus
gcctcgatgttgaagacggtgatgt

SEQ ID NO: 115955 - DNA, 25 bp, Saccharomyces pastorianus
tcagaggctctggatgtgtgcccat

SEQ ID NO: 115956 - DNA, 25 bp, Saccharomyces pastorianus
tcattcctgaaaacgttgtaacggc

SEQ ID NO: 115957 - DNA, 25 bp, Saccharomyces pastorianus
cttggatatcgggttgcagtacatg

SEQ ID NO: 115958 - DNA, 25 bp, Saccharomyces pastorianus
tatcaaagacgacccggcagccaat

SEQ ID NO: 115959 - DNA, 25 bp, Saccharomyces pastorianus
gcactggcccctatttgtaatgaag

SEQ ID NO: 115960 - DNA, 25 bp, Saccharomyces pastorianus
tgcagtacatggaagcttggctcag

SEQ ID NO: 115961 - DNA, 25 bp, Saccharomyces pastorianus
gtaacggctgctaatctgctggaaa

SEQ ID NO: 115962 - DNA, 25 bp, Saccharomyces pastorianus
actgtctaaggcaagtccattgggt

SEQ ID NO: 115963 - DNA, 25 bp, Saccharomyces pastorianus
gtgagattactaccgagggaattgt

SEQ ID NO: 115964 - DNA, 25 bp, Saccharomyces pastorianus
gttgtacgacgaaattgtgtccact

SEQ ID NO: 115965 - DNA, 25 bp, Saccharomyces pastorianus
gggtgacaagaacaaattcgcgctg

SEQ ID NO: 115966 - DNA, 25 bp, Saccharomyces pastorianus
acccgcttcctctttatcgaaagat

SEQ ID NO: 115967 - DNA, 25 bp, Saccharomyces pastorianus
gttgactctcaaggtaactggtata

SEQ ID NO: 115968 - DNA, 25 bp, Saccharomyces pastorianus
caagttgtgatttggaggcctcctt

SEQ ID NO: 115969 - DNA, 25 bp, Saccharomyces pastorianus
gaagattgttcgatttgcctatgta

SEQ ID NO: 115970 - DNA, 25 bp, Saccharomyces pastorianus
aagattggtcatgctctcatatccg

SEQ ID NO: 115971 - DNA, 25 bp, Saccharomyces pastorianus
gatacccctcttcgtgatggtgata

SEQ ID NO: 115972 - DNA, 25 bp, Saccharomyces pastorianus
gatcaaaccgtgtcaagcaattttc

SEQ ID NO: 115973 - DNA, 25 bp, Saccharomyces pastorianus
tcttaaatcaccaaaggctctcacc

SEQ ID NO: 115974 - DNA, 25 bp, Saccharomyces pastorianus
actggtggatcaacttagcgtctta

SEQ ID NO: 115975 - DNA, 25 bp, Saccharomyces pastorianus
agaagctttacagcgtttgcagaat

SEQ ID NO: 115976 - DNA, 25 bp, Saccharomyces pastorianus
aattttcatatcaccatgcgcacat

SEQ ID NO: 115977 - DNA, 25 bp, Saccharomyces pastorianus
ccaactttggattgatggcctttcc

SEQ ID NO: 115978 - DNA, 25 bp, Saccharomyces pastorianus
tggttcttgtggtgttacctctgta

SEQ ID NO: 115979 - DNA, 25 bp, Saccharomyces pastorianus
ccatcttcagatgttgcctgtgtga

SEQ ID NO: 115980 - DNA, 25 bp, Saccharomyces pastorianus
catatcaacatcctgttcttcttct

SEQ ID NO: 115981 - DNA, 25 bp, Saccharomyces pastorianus
gttcgatgtcttcagtcatttgcct

SEQ ID NO: 115982 - DNA, 25 bp, Saccharomyces pastorianus
ttcttcatcgccagtcatatcaaca

SEQ ID NO: 115983 - DNA, 25 bp, Saccharomyces pastorianus
tcttcttggatgtgctttggttctt

SEQ ID NO: 115984 - DNA, 25 bp, Saccharomyces pastorianus
agaggcactagttccatcttcagat

SEQ ID NO: 115985 - DNA, 25 bp, Saccharomyces pastorianus
gtgtgatcctcctctacaatttgaa

SEQ ID NO: 115986 - DNA, 25 bp, Saccharomyces pastorianus
aagggcatttccaagcgtgtgatcc

SEQ ID NO: 115987 - DNA, 25 bp, Saccharomyces pastorianus
aattctacgtctggatttttcatta

SEQ ID NO: 115988 - DNA, 25 bp, Saccharomyces pastorianus
ttttgtggttactcgatacctcatc

SEQ ID NO: 115989 - DNA, 25 bp, Saccharomyces pastorianus
tggaaatgcccttcgttacgttata

SEQ ID NO: 115990 - DNA, 25 bp, Saccharomyces pastorianus
taagtttctcacacaggcaacatct

SEQ ID NO: 115991 - DNA, 25 bp, Saccharomyces pastorianus
taacaccacaagaaccaaagcacat

SEQ ID NO: 115992 - DNA, 25 bp, Saccharomyces pastorianus
aaccgcggtggatgctcttcaaaaa

SEQ ID NO: 115993 - DNA, 25 bp, Saccharomyces pastorianus
agaccgctacagaggtaacaccaca

SEQ ID NO: 115994 - DNA, 25 bp, Saccharomyces pastorianus
ggatcacacgcttggaaatgccctt

SEQ ID NO: 115995 - DNA, 25 bp, Saccharomyces pastorianus
gatggaactagtgcctcttttcaaa

SEQ ID NO: 115996 - DNA, 25 bp, Saccharomyces pastorianus
cttgatggatttatgtgacgttgta

SEQ ID NO: 115997 - DNA, 25 bp, Saccharomyces pastorianus
attgtagaggaggatcacacgcttg

SEQ ID NO: 115998 - DNA, 25 bp, Saccharomyces pastorianus
aatatcagaattcaaacctacggtg

SEQ ID NO: 115999 - DNA, 25 bp, Saccharomyces pastorianus
cagaaagctttgtcgatatcggtca

SEQ ID NO: 116000 - DNA, 25 bp, Saccharomyces pastorianus
ggtatctacctctgaaaaccaaagt

SEQ ID NO: 116001 - DNA, 25 bp, Saccharomyces pastorianus
aaatttctggattatcatcgatgac

SEQ ID NO: 116002 - DNA, 25 bp, Saccharomyces pastorianus
gatatcggtcattctgacgaagcat

SEQ ID NO: 116003 - DNA, 25 bp, Saccharomyces pastorianus
gacgaagcattgagactactgaaag

SEQ ID NO: 116004 - DNA, 25 bp, Saccharomyces pastorianus
tgacgttgacaagaccagtgagcgc

SEQ ID NO: 116005 - DNA, 25 bp, Saccharomyces pastorianus
gtttctgtggaaaaggtatctacct

SEQ ID NO: 116006 - DNA, 25 bp, Saccharomyces pastorianus
accagtgagcgcgtttctgtggaaa

SEQ ID NO: 116007 - DNA, 25 bp, Saccharomyces pastorianus
gtacattggttgttatattggccat

SEQ ID NO: 116008 - DNA, 25 bp, Saccharomyces pastorianus
ttgggtggtcaagatgctacagaaa

SEQ ID NO: 116009 - DNA, 25 bp, Saccharomyces pastorianus
gaagttgccgaacacaatggcccag

SEQ ID NO: 116010 - DNA, 25 bp, Saccharomyces pastorianus
agagttggctctagaaacatcgtct

SEQ ID NO: 116011 - DNA, 25 bp, Saccharomyces pastorianus
gagaaaggtatcaccaaaccagtaa

SEQ ID NO: 116012 - DNA, 25 bp, Saccharomyces pastorianus
aattccagacattatggcttcttag

SEQ ID NO: 116013 - DNA, 25 bp, Saccharomyces pastorianus
gatgatgagcagagcggtacgcaca

SEQ ID NO: 116014 - DNA, 25 bp, Saccharomyces pastorianus
gagtagactgccacatgggttccac

SEQ ID NO: 116015 - DNA, 25 bp, Saccharomyces pastorianus
gtgcgtgtattaccaaaaggagcta

SEQ ID NO: 116016 - DNA, 25 bp, Saccharomyces pastorianus
gaggatgcaatgatcgcccaagaat

SEQ ID NO: 116017 - DNA, 25 bp, Saccharomyces pastorianus
agaaacatcgtctagcagttcagat

SEQ ID NO: 116018 - DNA, 25 bp, Saccharomyces pastorianus
tgggtcatctactacaagtgcgtgt

SEQ ID NO: 116019 - DNA, 25 bp, Saccharomyces pastorianus
gacacttgaagagtattctgggatt

SEQ ID NO: 116020 - DNA, 25 bp, Saccharomyces pastorianus
aaggtttagccgcttctgatgatga

SEQ ID NO: 116021 - DNA, 25 bp, Saccharomyces pastorianus
ttttctctccactctgtcaataaag

SEQ ID NO: 116022 - DNA, 25 bp, Saccharomyces pastorianus
ggcacctctcaaaaatatcttcttc

SEQ ID NO: 116023 - DNA, 25 bp, Saccharomyces pastorianus
ggaggtgttgccattcattgtaagt

SEQ ID NO: 116024 - DNA, 25 bp, Saccharomyces pastorianus
ggccagaatttatggcacctctcaa

SEQ ID NO: 116025 - DNA, 25 bp, Saccharomyces pastorianus
gactcactttagttttcactccatt

SEQ ID NO: 116026 - DNA, 25 bp, Saccharomyces pastorianus
aataatactaggttcccagtctgga

SEQ ID NO: 116027 - DNA, 25 bp, Saccharomyces pastorianus
gtggctgcgtgggtaactatcataa

SEQ ID NO: 116028 - DNA, 25 bp, Saccharomyces pastorianus
tcttctgtttcacccttattactag

SEQ ID NO: 116029 - DNA, 25 bp, Saccharomyces pastorianus
agctgctcttctcgctttgatatca

SEQ ID NO: 116030 - DNA, 25 bp, Saccharomyces pastorianus
tccatttttagttttccgctctcag

SEQ ID NO: 116031 - DNA, 25 bp, Saccharomyces pastorianus
ggtgcctttgttatcaatgggctct

SEQ ID NO: 116032 - DNA, 25 bp, Saccharomyces pastorianus
ctccagactgggaacctagtattat

SEQ ID NO: 116033 - DNA, 25 bp, Saccharomyces pastorianus
gattccattatatgtcgatcgtggt

SEQ ID NO: 116034 - DNA, 25 bp, Saccharomyces pastorianus
ggcaacacctcctttttaactaatg

SEQ ID NO: 116035 - DNA, 25 bp, Saccharomyces pastorianus
gttttttccaagcatgatctctcca

SEQ ID NO: 116036 - DNA, 25 bp, Saccharomyces pastorianus
taaattctggcctgtctttattgac

SEQ ID NO: 116037 - DNA, 25 bp, Saccharomyces pastorianus
ctttgaggctggttcagacgctgat

SEQ ID NO: 116038 - DNA, 25 bp, Saccharomyces pastorianus
attatgatagttacccacgcagcca

SEQ ID NO: 116039 - DNA, 25 bp, Saccharomyces pastorianus
cagtgccaaagagcccattgataac

SEQ ID NO: 116040 - DNA, 25 bp, Saccharomyces pastorianus
aatccgctcttggtatgaacttgtt

SEQ ID NO: 116041 - DNA, 25 bp, Saccharomyces pastorianus
aacccacagtggaggctttaaagat

SEQ ID NO: 116042 - DNA, 25 bp, Saccharomyces pastorianus
cggagcctgctactcatgaagttat

SEQ ID NO: 116043 - DNA, 25 bp, Saccharomyces pastorianus
gctcctgccgaacatactcatttat

SEQ ID NO: 116044 - DNA, 25 bp, Saccharomyces pastorianus
gacttcatccttatgctaatcctgt

SEQ ID NO: 116045 - DNA, 25 bp, Saccharomyces pastorianus
tgagatccatagaagcgcctccgtt

SEQ ID NO: 116046 - DNA, 25 bp, Saccharomyces pastorianus
atgctaatcctgtaccgaattccga

SEQ ID NO: 116047 - DNA, 25 bp, Saccharomyces pastorianus
aaaactgatgattgtgtatactcca

SEQ ID NO: 116048 - DNA, 25 bp, Saccharomyces pastorianus
gagcagaatacaacagaccataata

SEQ ID NO: 116049 - DNA, 25 bp, Saccharomyces pastorianus
tcctgtaccgaattccgacaatgga

SEQ ID NO: 116050 - DNA, 25 bp, Saccharomyces pastorianus
tacccaaaccctgtgagatccatag

SEQ ID NO: 116051 - DNA, 25 bp, Saccharomyces pastorianus
aagttagttctgtgtattttgatga

SEQ ID NO: 116052 - DNA, 25 bp, Saccharomyces pastorianus
tgtgtatactccaagcaattagaac

SEQ ID NO: 116053 - DNA, 25 bp, Saccharomyces pastorianus
taaaccaccaaatgctcctgccgaa

SEQ ID NO: 116054 - DNA, 25 bp, Saccharomyces pastorianus
aaggccttcaatttctatgagacca

SEQ ID NO: 116055 - DNA, 25 bp, Saccharomyces pastorianus
gagttcttactgtttatcggcctaa

SEQ ID NO: 116056 - DNA, 25 bp, Saccharomyces pastorianus
tttgtttttgattctgctgcctttg

SEQ ID NO: 116057 - DNA, 25 bp, Saccharomyces pastorianus
tagtcttctgaaaccattaccattt

SEQ ID NO: 116058 - DNA, 25 bp, Saccharomyces pastorianus
ttatcggcctaaataccagtccatg

SEQ ID NO: 116059 - DNA, 25 bp, Saccharomyces pastorianus
ctatctttctagtttgctgtttcga

SEQ ID NO: 116060 - DNA, 25 bp, Saccharomyces pastorianus
attaccatttaattcagctttcgga

SEQ ID NO: 116061 - DNA, 25 bp, Saccharomyces pastorianus
ttttgtttgggatcggctgggccac

SEQ ID NO: 116062 - DNA, 25 bp, Saccharomyces pastorianus
tgggccaccttagatttacctgtta

SEQ ID NO: 116063 - DNA, 25 bp, Saccharomyces pastorianus
ggaaccaattccacagcacatgtag

SEQ ID NO: 116064 - DNA, 25 bp, Saccharomyces pastorianus
accagtccatgtgtttctgaaacta

SEQ ID NO: 116065 - DNA, 25 bp, Saccharomyces pastorianus
tgagagccatctttgccaccattaa

SEQ ID NO: 116066 - DNA, 25 bp, Saccharomyces pastorianus
atggtccaatctcttctttggtcga

SEQ ID NO: 116067 - DNA, 25 bp, Saccharomyces pastorianus
cattccatctttggccgaggtcgaa

SEQ ID NO: 116068 - DNA, 25 bp, Saccharomyces pastorianus
atcgaattttctagcgccgttcaag

SEQ ID NO: 116069 - DNA, 25 bp, Saccharomyces pastorianus
gtcgacgccctatcaaacttgttga

SEQ ID NO: 116070 - DNA, 25 bp, Saccharomyces pastorianus
agagtcaactctcagtctggtaaag

SEQ ID NO: 116071 - DNA, 25 bp, Saccharomyces pastorianus
aagctgcttcttacatccatctatc

SEQ ID NO: 116072 - DNA, 25 bp, Saccharomyces pastorianus
taggttctggttcttctacgcaagc

SEQ ID NO: 116073 - DNA, 25 bp, Saccharomyces pastorianus
cattctggtgatgtgtccattccat

SEQ ID NO: 116074 - DNA, 25 bp, Saccharomyces pastorianus
aagaccatgctgactccttgggtag

SEQ ID NO: 116075 - DNA, 25 bp, Saccharomyces pastorianus
gtcggtgattcttcagtgagagcca

SEQ ID NO: 116076 - DNA, 25 bp, Saccharomyces pastorianus
aataatactctgtttaaccatgatt

SEQ ID NO: 116077 - DNA, 25 bp, Saccharomyces pastorianus
gtttaaccatgattgttccttgtct

SEQ ID NO: 116078 - DNA, 25 bp, Saccharomyces pastorianus
aaccatgattgttccttgtcttttt

SEQ ID NO: 116079 - DNA, 25 bp, Saccharomyces pastorianus
gctcagcaagagcaataatactctg

SEQ ID NO: 116080 - DNA, 25 bp, Saccharomyces pastorianus
gcaataatactctgtttaaccatga

SEQ ID NO: 116081 - DNA, 25 bp, Saccharomyces pastorianus
ttaaccatgattgttccttgtcttt

SEQ ID NO: 116082 - DNA, 25 bp, Saccharomyces pastorianus
gagcaataatactctgtttaaccat

SEQ ID NO: 116083 - DNA, 25 bp, Saccharomyces pastorianus
tttaaccatgattgttccttgtctt

SEQ ID NO: 116084 - DNA, 25 bp, Saccharomyces pastorianus
accatgattgttccttgtctttttg

SEQ ID NO: 116085 - DNA, 25 bp, Saccharomyces pastorianus
taaccatgattgttccttgtctttt

SEQ ID NO: 116086 - DNA, 25 bp, Saccharomyces pastorianus
ccatgattgttccttgtctttttgt

SEQ ID NO: 116087 - DNA, 25 bp, Saccharomyces pastorianus
acctttgcagttgtttccagctatt

SEQ ID NO: 116088 - DNA, 25 bp, Saccharomyces pastorianus
ttttcttcggtattgcaagcatgct

SEQ ID NO: 116089 - DNA, 25 bp, Saccharomyces pastorianus
tacttgctttggtgattctaacggc

SEQ ID NO: 116090 - DNA, 25 bp, Saccharomyces pastorianus
aattgcttactttgggtctgataat

SEQ ID NO: 116091 - DNA, 25 bp, Saccharomyces pastorianus
taacggcaaccatacttttcatttc

SEQ ID NO: 116092 - DNA, 25 bp, Saccharomyces pastorianus
aacaagagtcgaattacgtcctaat

SEQ ID NO: 116093 - DNA, 25 bp, Saccharomyces pastorianus
attgggatatttggcatacggctca

SEQ ID NO: 116094 - DNA, 25 bp, Saccharomyces pastorianus
gggcaatagccttccagagactaaa

SEQ ID NO: 116095 - DNA, 25 bp, Saccharomyces pastorianus
aattatgttgtccacacctttgcag

SEQ ID NO: 116096 - DNA, 25 bp, Saccharomyces pastorianus
tcgtttcagttataggatccctcgc

SEQ ID NO: 116097 - DNA, 25 bp, Saccharomyces pastorianus
ttaatccagctgttctattccatcg

SEQ ID NO: 116098 - DNA, 25 bp, Saccharomyces pastorianus
cagtcagaactatacctaccgggaa

SEQ ID NO: 116099 - DNA, 25 bp, Saccharomyces pastorianus
atgtacgtcattgccatctaggata

SEQ ID NO: 116100 - DNA, 25 bp, Saccharomyces pastorianus
tttactgccagctgatttcgtcaag

SEQ ID NO: 116101 - DNA, 25 bp, Saccharomyces pastorianus
gaaatcattgagtcagtgcacctga

SEQ ID NO: 116102 - DNA, 25 bp, Saccharomyces pastorianus
ttaggctccaggtccaacatgttat

SEQ ID NO: 116103 - DNA, 25 bp, Saccharomyces pastorianus
ggtattggcagcagctacattcaag

SEQ ID NO: 116104 - DNA, 25 bp, Saccharomyces pastorianus
tggtcacaaatctagtatcctcgag

SEQ ID NO: 116105 - DNA, 25 bp, Saccharomyces pastorianus
gcgttaggtgccttttttgctggaa

SEQ ID NO: 116106 - DNA, 25 bp, Saccharomyces pastorianus
aaacgcacttgccagtcaactagat

SEQ ID NO: 116107 - DNA, 25 bp, Saccharomyces pastorianus
gggctccacagacatcacagaattt

SEQ ID NO: 116108 - DNA, 25 bp, Saccharomyces pastorianus
tacattcaagtattgggctccacag

SEQ ID NO: 116109 - DNA, 25 bp, Saccharomyces pastorianus
gtactacaaacgatcgtcactcaag

SEQ ID NO: 116110 - DNA, 25 bp, Saccharomyces pastorianus
tatagatctggtcagccttcacctg

SEQ ID NO: 116111 - DNA, 25 bp, Saccharomyces pastorianus
ggacggtctcactgaacattctata

SEQ ID NO: 116112 - DNA, 25 bp, Saccharomyces pastorianus
tatcccttgctagtgtgctgtggta

SEQ ID NO: 116113 - DNA, 25 bp, Saccharomyces pastorianus
gaagaacctcaagataccctcctag

SEQ ID NO: 116114 - DNA, 25 bp, Saccharomyces pastorianus
gtatcgttccacctttgaatttctg

SEQ ID NO: 116115 - DNA, 25 bp, Saccharomyces pastorianus
ctgtcccgttgaaagatacctctat

SEQ ID NO: 116116 - DNA, 25 bp, Saccharomyces pastorianus
aaaggtcttggtatcacatgcccca

SEQ ID NO: 116117 - DNA, 25 bp, Saccharomyces pastorianus
taaacttacaattcgcagccatcaa

SEQ ID NO: 116118 - DNA, 25 bp, Saccharomyces pastorianus
acatgccccacaagaacgtatcgtt

SEQ ID NO: 116119 - DNA, 25 bp, Saccharomyces pastorianus
ggaacttagccagtgtatccgaaga

SEQ ID NO: 116120 - DNA, 25 bp, Saccharomyces pastorianus
agctggtcaggccaacgctcaaagc

SEQ ID NO: 116121 - DNA, 25 bp, Saccharomyces pastorianus
gttggcaggcaaccaggcgacaaat

SEQ ID NO: 116122 - DNA, 25 bp, Saccharomyces pastorianus
gctcctttcttggagacatctgcta

SEQ ID NO: 116123 - DNA, 25 bp, Saccharomyces pastorianus
ggtgccaactctgtgcctagaaata

SEQ ID NO: 116124 - DNA, 25 bp, Saccharomyces pastorianus
tagtaaggccggtcaagtttcaaat

SEQ ID NO: 116125 - DNA, 25 bp, Saccharomyces pastorianus
gacacaaactgatcgcaccaatata

SEQ ID NO: 116126 - DNA, 25 bp, Saccharomyces pastorianus
atagacaattccacgggccaagctg

SEQ ID NO: 116127 - DNA, 25 bp, Saccharomyces pastorianus
gtagcacaactgtcgtgaatgccag

SEQ ID NO: 116128 - DNA, 25 bp, Saccharomyces pastorianus
gtaacaccagtgaagcctccaagag

SEQ ID NO: 116129 - DNA, 25 bp, Saccharomyces pastorianus
gaggcgttttacactctagcacgtt

SEQ ID NO: 116130 - DNA, 25 bp, Saccharomyces pastorianus
acaggtctcttaccaggacgggttg

SEQ ID NO: 116131 - DNA, 25 bp, Saccharomyces pastorianus
cacatcagcaaacatttctaccgaa

SEQ ID NO: 116132 - DNA, 25 bp, Saccharomyces pastorianus
aaggttcacatcagcaaacatttct

SEQ ID NO: 116133 - DNA, 25 bp, Saccharomyces pastorianus
cgggaaacaaggttcacatcagcaa

SEQ ID NO: 116134 - DNA, 25 bp, Saccharomyces pastorianus
aacaaggttcacatcagcaaacatt

SEQ ID NO: 116135 - DNA, 25 bp, Saccharomyces pastorianus
agacgaaacaaagctggaataaggg

SEQ ID NO: 116136 - DNA, 25 bp, Saccharomyces pastorianus
ggttcacatcagcaaacatttctac

SEQ ID NO: 116137 - DNA, 25 bp, Saccharomyces pastorianus
gcaaacatttctaccgaaaatctgg

SEQ ID NO: 116138 - DNA, 25 bp, Saccharomyces pastorianus
ttcacatcagcaaacatttctaccg

SEQ ID NO: 116139 - DNA, 25 bp, Saccharomyces pastorianus
ggaaacaaggttcacatcagcaaac

SEQ ID NO: 116140 - DNA, 25 bp, Saccharomyces pastorianus
gcaaagacgaaacaaagctggaata

SEQ ID NO: 116141 - DNA, 25 bp, Saccharomyces pastorianus
catcagcaaacatttctaccgaaaa

SEQ ID NO: 116142 - DNA, 25 bp, Saccharomyces pastorianus
cacatcagcaaacatttctaccgaa

SEQ ID NO: 116143 - DNA, 25 bp, Saccharomyces pastorianus
aaggttcacatcagcaaacatttct

SEQ ID NO: 116144 - DNA, 25 bp, Saccharomyces pastorianus
cgggaaacaaggttcacatcagcaa

SEQ ID NO: 116145 - DNA, 25 bp, Saccharomyces pastorianus
aacaaggttcacatcagcaaacatt

SEQ ID NO: 116146 - DNA, 25 bp, Saccharomyces pastorianus
agacgaaacaaagctggaataaggg

SEQ ID NO: 116147 - DNA, 25 bp, Saccharomyces pastorianus
ggttcacatcagcaaacatttctac

SEQ ID NO: 116148 - DNA, 25 bp, Saccharomyces pastorianus
gcaaacatttctaccgaaaatctgg

SEQ ID NO: 116149 - DNA, 25 bp, Saccharomyces pastorianus
ttcacatcagcaaacatttctaccg

SEQ ID NO: 116150 - DNA, 25 bp, Saccharomyces pastorianus
ggaaacaaggttcacatcagcaaac

SEQ ID NO: 116151 - DNA, 25 bp, Saccharomyces pastorianus
gcaaagacgaaacaaagctggaata

SEQ ID NO: 116152 - DNA, 25 bp, Saccharomyces pastorianus
catcagcaaacatttctaccgaaaa

SEQ ID NO: 116153 - DNA, 25 bp, Saccharomyces pastorianus
catttccccgtatgccacttggtta

SEQ ID NO: 116154 - DNA, 25 bp, Saccharomyces pastorianus
cagtagagcggttcgccgtagtcgt

SEQ ID NO: 116155 - DNA, 25 bp, Saccharomyces pastorianus
aaatggaaccattctagctcacagt

SEQ ID NO: 116156 - DNA, 25 bp, Saccharomyces pastorianus
gccacttggttacagtagcagtaga

SEQ ID NO: 116157 - DNA, 25 bp, Saccharomyces pastorianus
attctagctcacagtctgcgccatc

SEQ ID NO: 116158 - DNA, 25 bp, Saccharomyces pastorianus
gaaccattctagctcacagtctgcg

SEQ ID NO: 116159 - DNA, 25 bp, Saccharomyces pastorianus
atggaaccattctagctcacagtct

SEQ ID NO: 116160 - DNA, 25 bp, Saccharomyces pastorianus
tatgccacttggttacagtagcagt

SEQ ID NO: 116161 - DNA, 25 bp, Saccharomyces pastorianus
agcagtagagcggttcgccgtagtc

SEQ ID NO: 116162 - DNA, 25 bp, Saccharomyces pastorianus
ccccgtatgccacttggttacagta

SEQ ID NO: 116163 - DNA, 25 bp, Saccharomyces pastorianus
cagtagcagtagagcggttcgccgt

SEQ ID NO: 116164 - DNA, 25 bp, Saccharomyces pastorianus
gtcgggaagtcctcaatagtcctca

SEQ ID NO: 116165 - DNA, 25 bp, Saccharomyces pastorianus
aagaacctactattggtgccgcatt

SEQ ID NO: 116166 - DNA, 25 bp, Saccharomyces pastorianus
ggcgaaaaagtaccatgtcctgaac

SEQ ID NO: 116167 - DNA, 25 bp, Saccharomyces pastorianus
gggctatggaagcaccagctgtaca

SEQ ID NO: 116168 - DNA, 25 bp, Saccharomyces pastorianus
gagaacctcttatatttcgaagcaa

SEQ ID NO: 116169 - DNA, 25 bp, Saccharomyces pastorianus
gctcaagctgctttggtagtttttg

SEQ ID NO: 116170 - DNA, 25 bp, Saccharomyces pastorianus
tactcggagaatctgctgtcgggaa

SEQ ID NO: 116171 - DNA, 25 bp, Saccharomyces pastorianus
atcgatctcgaatcaacgactgtag

SEQ ID NO: 116172 - DNA, 25 bp, Saccharomyces pastorianus
aaagctctactcatgatcgcacaat

SEQ ID NO: 116173 - DNA, 25 bp, Saccharomyces pastorianus
agagatttgctcctttagcgcctat

SEQ ID NO: 116174 - DNA, 25 bp, Saccharomyces pastorianus
gacatgatatcgttattgccttggt

SEQ ID NO: 116175 - DNA, 25 bp, Saccharomyces pastorianus
ccactgatgggtttagagctttcta

SEQ ID NO: 116176 - DNA, 25 bp, Saccharomyces pastorianus
aatttcggcccattgctttatcatt

SEQ ID NO: 116177 - DNA, 25 bp, Saccharomyces pastorianus
gtccatgtcgatatgtgctggctcg

SEQ ID NO: 116178 - DNA, 25 bp, Saccharomyces pastorianus
gggtccagaaagttgcgccatgcct

SEQ ID NO: 116179 - DNA, 25 bp, Saccharomyces pastorianus
gatactattggccacgtcttgaagc

SEQ ID NO: 116180 - DNA, 25 bp, Saccharomyces pastorianus
atgcctggatacatgtgccactatt

SEQ ID NO: 116181 - DNA, 25 bp, Saccharomyces pastorianus
gcattgccacaaatcatctggactt

SEQ ID NO: 116182 - DNA, 25 bp, Saccharomyces pastorianus
agttgtctcccattaaggtgccgga

SEQ ID NO: 116183 - DNA, 25 bp, Saccharomyces pastorianus
tacactgtttctcccactggaaaaa

SEQ ID NO: 116184 - DNA, 25 bp, Saccharomyces pastorianus
gtcacattatacattttcgcgaagg

SEQ ID NO: 116185 - DNA, 25 bp, Saccharomyces pastorianus
aatactttgtgggtatggccgctac

SEQ ID NO: 116186 - DNA, 25 bp, Saccharomyces pastorianus
catggaatgtagtgcactgactggt

SEQ ID NO: 116187 - DNA, 25 bp, Saccharomyces pastorianus
aacgctctgggatacagcgggacaa

SEQ ID NO: 116188 - DNA, 25 bp, Saccharomyces pastorianus
gcttgtggcaagacctctttactat

SEQ ID NO: 116189 - DNA, 25 bp, Saccharomyces pastorianus
atggttcccattgaagatgcgaaac

SEQ ID NO: 116190 - DNA, 25 bp, Saccharomyces pastorianus
caatatcatccgacagtgttcgaga

SEQ ID NO: 116191 - DNA, 25 bp, Saccharomyces pastorianus
gcattacgatattgtcctgacgcac

SEQ ID NO: 116192 - DNA, 25 bp, Saccharomyces pastorianus
aacgtttacgtccattctcatattc

SEQ ID NO: 116193 - DNA, 25 bp, Saccharomyces pastorianus
aatgctaccgatgaaatggttccca

SEQ ID NO: 116194 - DNA, 25 bp, Saccharomyces pastorianus
gcgaaacaagttgcaagggccattg

SEQ ID NO: 116195 - DNA, 25 bp, Saccharomyces pastorianus
tcactgattgcagagttgacggaat

SEQ ID NO: 116196 - DNA, 25 bp, Saccharomyces pastorianus
gcaccaatcgttcttgtaggcttga

SEQ ID NO: 116197 - DNA, 25 bp, Saccharomyces pastorianus
gcttcggaaggttcgcgataaactt

SEQ ID NO: 116198 - DNA, 25 bp, Saccharomyces pastorianus
tacgcgagtcgcaagcactactcat

SEQ ID NO: 116199 - DNA, 25 bp, Saccharomyces pastorianus
gatcaatgaattacgcgagtcgcaa

SEQ ID NO: 116200 - DNA, 25 bp, Saccharomyces pastorianus
atgacccagaaccattcaaaccaac

SEQ ID NO: 116201 - DNA, 25 bp, Saccharomyces pastorianus
gacggactgtatcaatcgatcaatg

SEQ ID NO: 116202 - DNA, 25 bp, Saccharomyces pastorianus
ccagttgaactgtcggtgtattcag

SEQ ID NO: 116203 - DNA, 25 bp, Saccharomyces pastorianus
ggcactggcgtccatccagttgaac

SEQ ID NO: 116204 - DNA, 25 bp, Saccharomyces pastorianus
tccaccgatttagacggactgtatc

SEQ ID NO: 116205 - DNA, 25 bp, Saccharomyces pastorianus
actactcatccttatgcttcggaag

SEQ ID NO: 116206 - DNA, 25 bp, Saccharomyces pastorianus
tagtataagcgctgacggcactggc

SEQ ID NO: 116207 - DNA, 25 bp, Saccharomyces pastorianus
tgtattcagtattgtccaccgattt

SEQ ID NO: 116208 - DNA, 25 bp, Saccharomyces pastorianus
gcttcggaaggttcgcgataaactt

SEQ ID NO: 116209 - DNA, 25 bp, Saccharomyces pastorianus
tacgcgagtcgcaagcactactcat

SEQ ID NO: 116210 - DNA, 25 bp, Saccharomyces pastorianus
gatcaatgaattacgcgagtcgcaa

SEQ ID NO: 116211 - DNA, 25 bp, Saccharomyces pastorianus
atgacccagaaccattcaaaccaac

SEQ ID NO: 116212 - DNA, 25 bp, Saccharomyces pastorianus
gacggactgtatcaatcgatcaatg

SEQ ID NO: 116213 - DNA, 25 bp, Saccharomyces pastorianus
ccagttgaactgtcggtgtattcag

SEQ ID NO: 116214 - DNA, 25 bp, Saccharomyces pastorianus
ggcactggcgtccatccagttgaac

SEQ ID NO: 116215 - DNA, 25 bp, Saccharomyces pastorianus
tccaccgatttagacggactgtatc

SEQ ID NO: 116216 - DNA, 25 bp, Saccharomyces pastorianus
actactcatccttatgcttcggaag

SEQ ID NO: 116217 - DNA, 25 bp, Saccharomyces pastorianus
tagtataagcgctgacggcactggc

SEQ ID NO: 116218 - DNA, 25 bp, Saccharomyces pastorianus
tgtattcagtattgtccaccgattt

SEQ ID NO: 116219 - DNA, 25 bp, Saccharomyces pastorianus
agccatcaaattaccacggaccaat

SEQ ID NO: 116220 - DNA, 25 bp, Saccharomyces pastorianus
gtacgtcttattgattacgcgtgta

SEQ ID NO: 116221 - DNA, 25 bp, Saccharomyces pastorianus
gatgcattgtctttagttgctactg

SEQ ID NO: 116222 - DNA, 25 bp, Saccharomyces pastorianus
acgcgtgtattaactttattccaag

SEQ ID NO: 116223 - DNA, 25 bp, Saccharomyces pastorianus
ttcaacacttacaaatccacaccaa

SEQ ID NO: 116224 - DNA, 25 bp, Saccharomyces pastorianus
tgatctcatctttaacttctggcga

SEQ ID NO: 116225 - DNA, 25 bp, Saccharomyces pastorianus
tgacgaagaagttcaaccaccggct

SEQ ID NO: 116226 - DNA, 25 bp, Saccharomyces pastorianus
agccactcttcgttcatatcctgaa

SEQ ID NO: 116227 - DNA, 25 bp, Saccharomyces pastorianus
tttgaagccgttttgatctcatctt

SEQ ID NO: 116228 - DNA, 25 bp, Saccharomyces pastorianus
gtcgaatcccatagatttcttcttg

SEQ ID NO: 116229 - DNA, 25 bp, Saccharomyces pastorianus
atcacttgataactttggttgggca

SEQ ID NO: 116230 - DNA, 25 bp, Saccharomyces pastorianus
ctgtgcaaaactaaccgatggtact

SEQ ID NO: 116231 - DNA, 25 bp, Saccharomyces pastorianus
gaggctcaaaactttctaagcggat

SEQ ID NO: 116232 - DNA, 25 bp, Saccharomyces pastorianus
ctcgagttccgatagcagtggcagt

SEQ ID NO: 116233 - DNA, 25 bp, Saccharomyces pastorianus
gtgacaatgggcagaactcgagttc

SEQ ID NO: 116234 - DNA, 25 bp, Saccharomyces pastorianus
cgaagtggacaatctgcgtgacaat

SEQ ID NO: 116235 - DNA, 25 bp, Saccharomyces pastorianus
gcagtggcagtaacgtgctttcaaa

SEQ ID NO: 116236 - DNA, 25 bp, Saccharomyces pastorianus
gagctatgatttacggtcttctcaa

SEQ ID NO: 116237 - DNA, 25 bp, Saccharomyces pastorianus
aattctctggcggaggtgtgcaata

SEQ ID NO: 116238 - DNA, 25 bp, Saccharomyces pastorianus
gagatcctactttttattttattca

SEQ ID NO: 116239 - DNA, 25 bp, Saccharomyces pastorianus
gcaaaaatatgcttctctgacagat

SEQ ID NO: 116240 - DNA, 25 bp, Saccharomyces pastorianus
gtcttctcaacctcctacaaagaga

SEQ ID NO: 116241 - DNA, 25 bp, Saccharomyces pastorianus
gcactggcctctaaattttacggca

SEQ ID NO: 116242 - DNA, 25 bp, Saccharomyces pastorianus
caacgcgaaaactgcaaggaagctt

SEQ ID NO: 116243 - DNA, 25 bp, Saccharomyces pastorianus
gaggatgcaccaactatcagaaccc

SEQ ID NO: 116244 - DNA, 25 bp, Saccharomyces pastorianus
gtatagctagtgaactgtcgacaat

SEQ ID NO: 116245 - DNA, 25 bp, Saccharomyces pastorianus
ggttattaaaatcgcactggcctct

SEQ ID NO: 116246 - DNA, 25 bp, Saccharomyces pastorianus
gaaccccaaatcatgagtatagcta

SEQ ID NO: 116247 - DNA, 25 bp, Saccharomyces pastorianus
tatgctcgaagttagggttctaccc

SEQ ID NO: 116248 - DNA, 25 bp, Saccharomyces pastorianus
gacgtggaattcacacattttctca

SEQ ID NO: 116249 - DNA, 25 bp, Saccharomyces pastorianus
gaaggagacgctagagcaatcgtaa

SEQ ID NO: 116250 - DNA, 25 bp, Saccharomyces pastorianus
ggttctacccttggatgaggatgca

SEQ ID NO: 116251 - DNA, 25 bp, Saccharomyces pastorianus
gagacatacattgcatctgccagtt

SEQ ID NO: 116252 - DNA, 25 bp, Saccharomyces pastorianus
ctccggaactcgactattttttgca

SEQ ID NO: 116253 - DNA, 25 bp, Saccharomyces pastorianus
tactgcgaaacctgttcatccaaag

SEQ ID NO: 116254 - DNA, 25 bp, Saccharomyces pastorianus
gatggcggattgtttcctgttaaca

SEQ ID NO: 116255 - DNA, 25 bp, Saccharomyces pastorianus
atcgtcaagtactctactgtggccg

SEQ ID NO: 116256 - DNA, 25 bp, Saccharomyces pastorianus
agtagatgttccttccaacgacagt

SEQ ID NO: 116257 - DNA, 25 bp, Saccharomyces pastorianus
ggcaaagttatcttacctcggatct

SEQ ID NO: 116258 - DNA, 25 bp, Saccharomyces pastorianus
ggactagctagttttatcaccatgt

SEQ ID NO: 116259 - DNA, 25 bp, Saccharomyces pastorianus
aatcacggttctttgtgtcgtccct

SEQ ID NO: 116260 - DNA, 25 bp, Saccharomyces pastorianus
gaactccttcttttgtcgtctttgt

SEQ ID NO: 116261 - DNA, 25 bp, Saccharomyces pastorianus
atcattgtcaccttagaactccttc

SEQ ID NO: 116262 - DNA, 25 bp, Saccharomyces pastorianus
acgacagtctctccgataacagtga

SEQ ID NO: 116263 - DNA, 25 bp, Saccharomyces pastorianus
agtagtcgtccaccgtatctaagga

SEQ ID NO: 116264 - DNA, 25 bp, Saccharomyces pastorianus
cttcaagtctcttccagatggcagg

SEQ ID NO: 116265 - DNA, 25 bp, Saccharomyces pastorianus
atgaaagctctgtctgctcttctaa

SEQ ID NO: 116266 - DNA, 25 bp, Saccharomyces pastorianus
atacttcccctagtgtgttgtacca

SEQ ID NO: 116267 - DNA, 25 bp, Saccharomyces pastorianus
ctctccgggttcagcatcgaatgaa

SEQ ID NO: 116268 - DNA, 25 bp, Saccharomyces pastorianus
tgcggtaactcctatcccattttta

SEQ ID NO: 116269 - DNA, 25 bp, Saccharomyces pastorianus
agaaatctcactagcagggaccctg

SEQ ID NO: 116270 - DNA, 25 bp, Saccharomyces pastorianus
agcgacttagacatgtccctcttat

SEQ ID NO: 116271 - DNA, 25 bp, Saccharomyces pastorianus
taaggaaccgctccatacgtaggaa

SEQ ID NO: 116272 - DNA, 25 bp, Saccharomyces pastorianus
gaagccagatgtatgccaccagtag

SEQ ID NO: 116273 - DNA, 25 bp, Saccharomyces pastorianus
gatattgcaaatgtcctggcttcgc

SEQ ID NO: 116274 - DNA, 25 bp, Saccharomyces pastorianus
gttaagtagctttgaggcccctaat

SEQ ID NO: 116275 - DNA, 25 bp, Saccharomyces pastorianus
gagcggtttcggtcatctatatgtc

SEQ ID NO: 116276 - DNA, 25 bp, Saccharomyces pastorianus
gggatgcccaagtttatcaacggtg

SEQ ID NO: 116277 - DNA, 25 bp, Saccharomyces pastorianus
attgaagacgacgaccttggtgatt

SEQ ID NO: 116278 - DNA, 25 bp, Saccharomyces pastorianus
tatcaacggtgttcggagcggtttc

SEQ ID NO: 116279 - DNA, 25 bp, Saccharomyces pastorianus
gatccgaatttccaggttatcaatt

SEQ ID NO: 116280 - DNA, 25 bp, Saccharomyces pastorianus
gtgcaaaatcgacttcatgaccagt

SEQ ID NO: 116281 - DNA, 25 bp, Saccharomyces pastorianus
gaagcctggttgtttcaagactgtt

SEQ ID NO: 116282 - DNA, 25 bp, Saccharomyces pastorianus
attatacctggcgagatactgaagc

SEQ ID NO: 116283 - DNA, 25 bp, Saccharomyces pastorianus
taaagcagaacgttccaccatggaa

SEQ ID NO: 116284 - DNA, 25 bp, Saccharomyces pastorianus
aagggcaccctagcggtaagttgat

SEQ ID NO: 116285 - DNA, 25 bp, Saccharomyces pastorianus
aacgtgacagctctggcatcgctat

SEQ ID NO: 116286 - DNA, 25 bp, Saccharomyces pastorianus
tgaatctaatgctccgctaactgct

SEQ ID NO: 116287 - DNA, 25 bp, Saccharomyces pastorianus
tatcacggcttgacaatacgagtat

SEQ ID NO: 116288 - DNA, 25 bp, Saccharomyces pastorianus
ggatatcccatccaagaacaggaat

SEQ ID NO: 116289 - DNA, 25 bp, Saccharomyces pastorianus
gcaaccatccaacaatgggcggtta

SEQ ID NO: 116290 - DNA, 25 bp, Saccharomyces pastorianus
gcgacatcgtttttcgaggcggcag

SEQ ID NO: 116291 - DNA, 25 bp, Saccharomyces pastorianus
ggtaatgatgacacctctaatcaga

SEQ ID NO: 116292 - DNA, 25 bp, Saccharomyces pastorianus
taactgctcaaactatactgcccac

SEQ ID NO: 116293 - DNA, 25 bp, Saccharomyces pastorianus
gatggtacgtacaatatcacggctt

SEQ ID NO: 116294 - DNA, 25 bp, Saccharomyces pastorianus
gattgccactggtagtaatacgcga

SEQ ID NO: 116295 - DNA, 25 bp, Saccharomyces pastorianus
aggcggcagtcgatggatatcccat

SEQ ID NO: 116296 - DNA, 25 bp, Saccharomyces pastorianus
tgataactttactaccgctttaggg

SEQ ID NO: 116297 - DNA, 25 bp, Saccharomyces pastorianus
gtacagattgccgaaattggtccta

SEQ ID NO: 116298 - DNA, 25 bp, Saccharomyces pastorianus
catatcacattttccacatggaccc

SEQ ID NO: 116299 - DNA, 25 bp, Saccharomyces pastorianus
actcgtctctcgcaatttgccaaag

SEQ ID NO: 116300 - DNA, 25 bp, Saccharomyces pastorianus
agaggtgttccaacttctttgacca

SEQ ID NO: 116301 - DNA, 25 bp, Saccharomyces pastorianus
gctatttccaaatgctgtcaggctg

SEQ ID NO: 116302 - DNA, 25 bp, Saccharomyces pastorianus
gggtgatttcattagcgttagacag

SEQ ID NO: 116303 - DNA, 25 bp, Saccharomyces pastorianus
gaggtaattacgtgatgccaaatct

SEQ ID NO: 116304 - DNA, 25 bp, Saccharomyces pastorianus
atccggtactacagatttggtggta

SEQ ID NO: 116305 - DNA, 25 bp, Saccharomyces pastorianus
aacatctcgtgacccaagcactcgt

SEQ ID NO: 116306 - DNA, 25 bp, Saccharomyces pastorianus
tggacccaccgcacagtttagttta

SEQ ID NO: 116307 - DNA, 25 bp, Saccharomyces pastorianus
agtaggtggctttggccttggcata

SEQ ID NO: 116308 - DNA, 25 bp, Saccharomyces pastorianus
tcgagcagcgccattgtcaatcaac

SEQ ID NO: 116309 - DNA, 25 bp, Saccharomyces pastorianus
cggtaatataccatcagcctgcgat

SEQ ID NO: 116310 - DNA, 25 bp, Saccharomyces pastorianus
gggcaattatcttcgctgcaaatcc

SEQ ID NO: 116311 - DNA, 25 bp, Saccharomyces pastorianus
gattgtgcatgctattttgcgacaa

SEQ ID NO: 116312 - DNA, 25 bp, Saccharomyces pastorianus
aaactatcggacgtgttcctcgagc

SEQ ID NO: 116313 - DNA, 25 bp, Saccharomyces pastorianus
gtcaatcaaccttgcctacggtaat

SEQ ID NO: 116314 - DNA, 25 bp, Saccharomyces pastorianus
gaaatacggtatgcctccagtaggt

SEQ ID NO: 116315 - DNA, 25 bp, Saccharomyces pastorianus
gaattcctgcccactttgaacaaag

SEQ ID NO: 116316 - DNA, 25 bp, Saccharomyces pastorianus
gaccttatcgcctgttattgactac

SEQ ID NO: 116317 - DNA, 25 bp, Saccharomyces pastorianus
gatattatcgcccttagccaagacg

SEQ ID NO: 116318 - DNA, 25 bp, Saccharomyces pastorianus
gcatcactccgttggatatctctag

SEQ ID NO: 116319 - DNA, 25 bp, Saccharomyces pastorianus
gagcaacgatttcctggtgtcaagt

SEQ ID NO: 116320 - DNA, 25 bp, Saccharomyces pastorianus
ggtgtcaagtttacggtcgccaaga

SEQ ID NO: 116321 - DNA, 25 bp, Saccharomyces pastorianus
atgagcaggcgcacgatgtcacaat

SEQ ID NO: 116322 - DNA, 25 bp, Saccharomyces pastorianus
gtcgcatggctgaagcgcaaccaga

SEQ ID NO: 116323 - DNA, 25 bp, Saccharomyces pastorianus
gaatgagcaagttcccaccgacgag

SEQ ID NO: 116324 - DNA, 25 bp, Saccharomyces pastorianus
tgccagactctgttagatgacgcca

SEQ ID NO: 116325 - DNA, 25 bp, Saccharomyces pastorianus
gctggcccgccaacatggtaagatt

SEQ ID NO: 116326 - DNA, 25 bp, Saccharomyces pastorianus
agacaagtcttatgggctggcccgc

SEQ ID NO: 116327 - DNA, 25 bp, Saccharomyces pastorianus
aattgcagctccagatggtcgctaa

SEQ ID NO: 116328 - DNA, 25 bp, Saccharomyces pastorianus
tggatactgttggaccaccagcgtc

SEQ ID NO: 116329 - DNA, 25 bp, Saccharomyces pastorianus
acagtctacaatcttggccatcgct

SEQ ID NO: 116330 - DNA, 25 bp, Saccharomyces pastorianus
aaggaactagtcaagcgtgccagaa

SEQ ID NO: 116331 - DNA, 25 bp, Saccharomyces pastorianus
ggccatcgctactgttgaaagggtc

SEQ ID NO: 116332 - DNA, 25 bp, Saccharomyces pastorianus
cgctgctgaaaacggattctccttt

SEQ ID NO: 116333 - DNA, 25 bp, Saccharomyces pastorianus
ggcattccatcatacatcgtttcct

SEQ ID NO: 116334 - DNA, 25 bp, Saccharomyces pastorianus
tttcctccaagatatcagtctccaa

SEQ ID NO: 116335 - DNA, 25 bp, Saccharomyces pastorianus
gagggtgccagatgccaatgcctat

SEQ ID NO: 116336 - DNA, 25 bp, Saccharomyces pastorianus
agaatgtcgatgtctcagtcgctgt

SEQ ID NO: 116337 - DNA, 25 bp, Saccharomyces pastorianus
gagacagtccttgaacgctacagca

SEQ ID NO: 116338 - DNA, 25 bp, Saccharomyces pastorianus
aaagccatcactgttgcggctaaga

SEQ ID NO: 116339 - DNA, 25 bp, Saccharomyces pastorianus
ggtgggaccatttgcatatccaata

SEQ ID NO: 116340 - DNA, 25 bp, Saccharomyces pastorianus
tttgttttgtatttgggctgggcac

SEQ ID NO: 116341 - DNA, 25 bp, Saccharomyces pastorianus
cctaccatcttttatcttaagcgat

SEQ ID NO: 116342 - DNA, 25 bp, Saccharomyces pastorianus
atgagtttcctaccatcttttatct

SEQ ID NO: 116343 - DNA, 25 bp, Saccharomyces pastorianus
gggcacacacttctaatagaccaaa

SEQ ID NO: 116344 - DNA, 25 bp, Saccharomyces pastorianus
gagtttcctaccatcttttatctta

SEQ ID NO: 116345 - DNA, 25 bp, Saccharomyces pastorianus
ggctgggcacacacttctaatagac

SEQ ID NO: 116346 - DNA, 25 bp, Saccharomyces pastorianus
ttgtatttgggctgggcacacactt

SEQ ID NO: 116347 - DNA, 25 bp, Saccharomyces pastorianus
tttgggctgggcacacacttctaat

SEQ ID NO: 116348 - DNA, 25 bp, Saccharomyces pastorianus
atcttttatcttaagcgatgaatct

SEQ ID NO: 116349 - DNA, 25 bp, Saccharomyces pastorianus
tgggctgggcacacacttctaatag

SEQ ID NO: 116350 - DNA, 25 bp, Saccharomyces pastorianus
gtttcctaccatcttttatcttaag

SEQ ID NO: 116351 - DNA, 25 bp, Saccharomyces pastorianus
aggcatttcatattactgcgatgga

SEQ ID NO: 116352 - DNA, 25 bp, Saccharomyces pastorianus
acgctattacgatctcctactaagg

SEQ ID NO: 116353 - DNA, 25 bp, Saccharomyces pastorianus
ttagctcaacaaacaacactcctgc

SEQ ID NO: 116354 - DNA, 25 bp, Saccharomyces pastorianus
aaggtggtagcaccgccaatgccaa

SEQ ID NO: 116355 - DNA, 25 bp, Saccharomyces pastorianus
gtctacgcctttctcaaccatatga

SEQ ID NO: 116356 - DNA, 25 bp, Saccharomyces pastorianus
agattcggactctaactcaaatgat

SEQ ID NO: 116357 - DNA, 25 bp, Saccharomyces pastorianus
tagacggctgacaccatcaacaagt

SEQ ID NO: 116358 - DNA, 25 bp, Saccharomyces pastorianus
attggcagcgaacagtctacgcctt

SEQ ID NO: 116359 - DNA, 25 bp, Saccharomyces pastorianus
gaagcgctaatagggctaggtcacc

SEQ ID NO: 116360 - DNA, 25 bp, Saccharomyces pastorianus
gaacaacaacttcctcattggcagc

SEQ ID NO: 116361 - DNA, 25 bp, Saccharomyces pastorianus
ggctaggtcacctcttcatagtaat

SEQ ID NO: 116362 - DNA, 25 bp, Saccharomyces pastorianus
ttgaaatcccagaaggtgttaccgt

SEQ ID NO: 116363 - DNA, 25 bp, Saccharomyces pastorianus
ttaccgtcagcattaagtccagaat

SEQ ID NO: 116364 - DNA, 25 bp, Saccharomyces pastorianus
gccgctttgagaaccgttaaatctt

SEQ ID NO: 116365 - DNA, 25 bp, Saccharomyces pastorianus
cttatctggtaactctgttgaagac

SEQ ID NO: 116366 - DNA, 25 bp, Saccharomyces pastorianus
cgtcttatctggtaactctgttgaa

SEQ ID NO: 116367 - DNA, 25 bp, Saccharomyces pastorianus
atcccagaaggtgttaccgtcagca

SEQ ID NO: 116368 - DNA, 25 bp, Saccharomyces pastorianus
gttgccgctttgagaaccgttaaat

SEQ ID NO: 116369 - DNA, 25 bp, Saccharomyces pastorianus
aatcgtcttatctggtaactctgtt

SEQ ID NO: 116370 - DNA, 25 bp, Saccharomyces pastorianus
ttactatcgaattctctactaacgt

SEQ ID NO: 116371 - DNA, 25 bp, Saccharomyces pastorianus
ggtgttaccgtcagcattaagtcca

SEQ ID NO: 116372 - DNA, 25 bp, Saccharomyces pastorianus
gaattctctactaacgtaaaggacg

SEQ ID NO: 116373 - DNA, 25 bp, Saccharomyces pastorianus
aggcgtcggtaattgggctccattg

SEQ ID NO: 116374 - DNA, 25 bp, Saccharomyces pastorianus
aaattgtcgccgctgatgactcttc

SEQ ID NO: 116375 - DNA, 25 bp, Saccharomyces pastorianus
aaaacggtagcttcagcggtggctc

SEQ ID NO: 116376 - DNA, 25 bp, Saccharomyces pastorianus
tgtccaagacacagtggccttctga

SEQ ID NO: 116377 - DNA, 25 bp, Saccharomyces pastorianus
aggacacctactacacttggcaagg

SEQ ID NO: 116378 - DNA, 25 bp, Saccharomyces pastorianus
aagcaggtgactctttacccttgac

SEQ ID NO: 116379 - DNA, 25 bp, Saccharomyces pastorianus
aacaatgccggtatttctgtcgaag

SEQ ID NO: 116380 - DNA, 25 bp, Saccharomyces pastorianus
tggttcttctgatggtgtcgcctac

SEQ ID NO: 116381 - DNA, 25 bp, Saccharomyces pastorianus
gttcttcaagttcaggcgtcggtaa

SEQ ID NO: 116382 - DNA, 25 bp, Saccharomyces pastorianus
gacggctacctgtaccgttcaaata

SEQ ID NO: 116383 - DNA, 25 bp, Saccharomyces pastorianus
gttgctatctgcaggaccgattacc

SEQ ID NO: 116384 - DNA, 25 bp, Saccharomyces pastorianus
atgtggtgtcacagagtcatccctg

SEQ ID NO: 116385 - DNA, 25 bp, Saccharomyces pastorianus
atgacggtcttgtaatggctactac

SEQ ID NO: 116386 - DNA, 25 bp, Saccharomyces pastorianus
gagcatgtacacaccatttctctat

SEQ ID NO: 116387 - DNA, 25 bp, Saccharomyces pastorianus
tacctaaagaagaagcccgtgcatt

SEQ ID NO: 116388 - DNA, 25 bp, Saccharomyces pastorianus
cagacctcaggtttttagcaccatc

SEQ ID NO: 116389 - DNA, 25 bp, Saccharomyces pastorianus
caaggccgattgtatgctatggtca

SEQ ID NO: 116390 - DNA, 25 bp, Saccharomyces pastorianus
ctgctcctgaacctgtatcggaaaa

SEQ ID NO: 116391 - DNA, 25 bp, Saccharomyces pastorianus
ttgaaccgcctacactgcaagagat

SEQ ID NO: 116392 - DNA, 25 bp, Saccharomyces pastorianus
gctacaccctctgatgaccatgaaa

SEQ ID NO: 116393 - DNA, 25 bp, Saccharomyces pastorianus
gaaaacgcgactgcagctgactcca

SEQ ID NO: 116394 - DNA, 25 bp, Saccharomyces pastorianus
gctactacactacatttaccaacac

SEQ ID NO: 116395 - DNA, 25 bp, Saccharomyces pastorianus
gtctcgtaccgagaaggacttcatt

SEQ ID NO: 116396 - DNA, 25 bp, Saccharomyces pastorianus
ggttctttgtcgctcaattccaaaa

SEQ ID NO: 116397 - DNA, 25 bp, Saccharomyces pastorianus
gcgaggaggtactatccacatacgt

SEQ ID NO: 116398 - DNA, 25 bp, Saccharomyces pastorianus
tgacttcgcaaccttcgaggacgaa

SEQ ID NO: 116399 - DNA, 25 bp, Saccharomyces pastorianus
cagaattttactggatgccccatgt

SEQ ID NO: 116400 - DNA, 25 bp, Saccharomyces pastorianus
tacgtacaacgtcgatgggttcttt

SEQ ID NO: 116401 - DNA, 25 bp, Saccharomyces pastorianus
gatcaatctgtcaaggtgtctcgta

SEQ ID NO: 116402 - DNA, 25 bp, Saccharomyces pastorianus
aaggtatcattcactctgacttcgc

SEQ ID NO: 116403 - DNA, 25 bp, Saccharomyces pastorianus
gaagcgtttactagttacagaggca

SEQ ID NO: 116404 - DNA, 25 bp, Saccharomyces pastorianus
agatcggtccatcttcgtttgatga

SEQ ID NO: 116405 - DNA, 25 bp, Saccharomyces pastorianus
gattgcaactcgaaacatggtggtg

SEQ ID NO: 116406 - DNA, 25 bp, Saccharomyces pastorianus
agagaaaccaatcctccttgggcct

SEQ ID NO: 116407 - DNA, 25 bp, Saccharomyces pastorianus
gggacaccacaagcatagttcttct

SEQ ID NO: 116408 - DNA, 25 bp, Saccharomyces pastorianus
gatccatctttatacgtaggtacct

SEQ ID NO: 116409 - DNA, 25 bp, Saccharomyces pastorianus
tcgcttctgctacctcaaatactag

SEQ ID NO: 116410 - DNA, 25 bp, Saccharomyces pastorianus
aagacaggcgccatcgatgtttttg

SEQ ID NO: 116411 - DNA, 25 bp, Saccharomyces pastorianus
gtcatagccgccatcaatcaaaaga

SEQ ID NO: 116412 - DNA, 25 bp, Saccharomyces pastorianus
attcaacccaattcaggatccgttc

SEQ ID NO: 116413 - DNA, 25 bp, Saccharomyces pastorianus
gaccacaaagagcagcgtcacctga

SEQ ID NO: 116414 - DNA, 25 bp, Saccharomyces pastorianus
tagtgtccagttatttgtctcgtcg

SEQ ID NO: 116415 - DNA, 25 bp, Saccharomyces pastorianus
atttgtctcgtcgtttcacaatgac

SEQ ID NO: 116416 - DNA, 25 bp, Saccharomyces pastorianus
ttcaggatccgttcacagacaacag

SEQ ID NO: 116417 - DNA, 25 bp, Saccharomyces pastorianus
ttgacagggcggttgaactagttgt

SEQ ID NO: 116418 - DNA, 25 bp, Saccharomyces pastorianus
ttctgaccagcgatacagacgggat

SEQ ID NO: 116419 - DNA, 25 bp, Saccharomyces pastorianus
taggaaggtctcttctgaccagcga

SEQ ID NO: 116420 - DNA, 25 bp, Saccharomyces pastorianus
gttccatttggtttatcagcagcat

SEQ ID NO: 116421 - DNA, 25 bp, Saccharomyces pastorianus
aactcgtttcggacactacacttga

SEQ ID NO: 116422 - DNA, 25 bp, Saccharomyces pastorianus
aataaatgggtttcctgctgtagat

SEQ ID NO: 116423 - DNA, 25 bp, Saccharomyces pastorianus
aggatgttgctccactggaagttga

SEQ ID NO: 116424 - DNA, 25 bp, Saccharomyces pastorianus
actacacttgacgtgggctttgaca

SEQ ID NO: 116425 - DNA, 25 bp, Saccharomyces pastorianus
ggacttggaactcgtttcggacact

SEQ ID NO: 116426 - DNA, 25 bp, Saccharomyces pastorianus
gggtgttatacttgcgacaattagt

SEQ ID NO: 116427 - DNA, 25 bp, Saccharomyces pastorianus
tatgacagcacccacagcaatgtat

SEQ ID NO: 116428 - DNA, 25 bp, Saccharomyces pastorianus
atatttatggattcaagccgcgatg

SEQ ID NO: 116429 - DNA, 25 bp, Saccharomyces pastorianus
caataagggcaagcaccgtgttggt

SEQ ID NO: 116430 - DNA, 25 bp, Saccharomyces pastorianus
tgaaccaggtcttgcacttggtgct

SEQ ID NO: 116431 - DNA, 25 bp, Saccharomyces pastorianus
ctggctttgctaaacactgcttgta

SEQ ID NO: 116432 - DNA, 25 bp, Saccharomyces pastorianus
gaaactatcccatcttagtgcattc

SEQ ID NO: 116433 - DNA, 25 bp, Saccharomyces pastorianus
gggatacccgatgccgttaaattat

SEQ ID NO: 116434 - DNA, 25 bp, Saccharomyces pastorianus
agggatggtccactgcaggtatata

SEQ ID NO: 116435 - DNA, 25 bp, Saccharomyces pastorianus
taccgagaaacgttatccctggctt

SEQ ID NO: 116436 - DNA, 25 bp, Saccharomyces pastorianus
gaatatcaaagcttcctggagtcag

SEQ ID NO: 116437 - DNA, 25 bp, Saccharomyces pastorianus
tagtttcatcaagcatcagttacac

SEQ ID NO: 116438 - DNA, 25 bp, Saccharomyces pastorianus
atttttcgccagtggtgagcacgga

SEQ ID NO: 116439 - DNA, 25 bp, Saccharomyces pastorianus
gcctgatgcatcttcccaagttaag

SEQ ID NO: 116440 - DNA, 25 bp, Saccharomyces pastorianus
ttacaggtcggtgctaaggctacaa

SEQ ID NO: 116441 - DNA, 25 bp, Saccharomyces pastorianus
tttggttacgatatcagcgccggtt

SEQ ID NO: 116442 - DNA, 25 bp, Saccharomyces pastorianus
agaggtgcctttgacttgtgtttga

SEQ ID NO: 116443 - DNA, 25 bp, Saccharomyces pastorianus
attcgccactagatatttgcctgat

SEQ ID NO: 116444 - DNA, 25 bp, Saccharomyces pastorianus
tgatcacttctttgactccaggcgt

SEQ ID NO: 116445 - DNA, 25 bp, Saccharomyces pastorianus
tggtgacttaactatggcccacgaa

SEQ ID NO: 116446 - DNA, 25 bp, Saccharomyces pastorianus
attgttaagacctggcgtcactctg

SEQ ID NO: 116447 - DNA, 25 bp, Saccharomyces pastorianus
taaggctaaggtgtccgattccggt

SEQ ID NO: 116448 - DNA, 25 bp, Saccharomyces pastorianus
catttctcgttatgccatggcttta

SEQ ID NO: 116449 - DNA, 25 bp, Saccharomyces pastorianus
attccggtattgtcactttggctta

SEQ ID NO: 116450 - DNA, 25 bp, Saccharomyces pastorianus
gagagactgttcacatgcctgagga

SEQ ID NO: 116451 - DNA, 25 bp, Saccharomyces pastorianus
aaaaactcctgctacgttgactgga

SEQ ID NO: 116452 - DNA, 25 bp, Saccharomyces pastorianus
ttatacataccgctcattcgcaagg

SEQ ID NO: 116453 - DNA, 25 bp, Saccharomyces pastorianus
gacttatcccgattgacacgcatta

SEQ ID NO: 116454 - DNA, 25 bp, Saccharomyces pastorianus
tgggtctcatcttccaacttatgga

SEQ ID NO: 116455 - DNA, 25 bp, Saccharomyces pastorianus
gaagtttcctcgactacgaagtcct

SEQ ID NO: 116456 - DNA, 25 bp, Saccharomyces pastorianus
gaatctatcatcgtcgccgaatgac

SEQ ID NO: 116457 - DNA, 25 bp, Saccharomyces pastorianus
gttgtccaagaactcaccgggcgaa

SEQ ID NO: 116458 - DNA, 25 bp, Saccharomyces pastorianus
aaaagtttgtctcaacccgcagatt

SEQ ID NO: 116459 - DNA, 25 bp, Saccharomyces pastorianus
gacagttctgtcaattcttcggaag

SEQ ID NO: 116460 - DNA, 25 bp, Saccharomyces pastorianus
cggcgtcattgattgtggcgtatat

SEQ ID NO: 116461 - DNA, 25 bp, Saccharomyces pastorianus
gggtgattccagttttattgccaaa

SEQ ID NO: 116462 - DNA, 25 bp, Saccharomyces pastorianus
gcaggcctactattttcagtgggac

SEQ ID NO: 116463 - DNA, 25 bp, Saccharomyces pastorianus
atgccctccactgagcagcaggata

SEQ ID NO: 116464 - DNA, 25 bp, Saccharomyces pastorianus
agctgtgtggtacatttcttacgga

SEQ ID NO: 116465 - DNA, 25 bp, Saccharomyces pastorianus
tgggcacagcttactgagcctgaaa

SEQ ID NO: 116466 - DNA, 25 bp, Saccharomyces pastorianus
aaaggtgttgctgcaggcctactat

SEQ ID NO: 116467 - DNA, 25 bp, Saccharomyces pastorianus
aacgctgctgtaatggatctgcaat

SEQ ID NO: 116468 - DNA, 25 bp, Saccharomyces pastorianus
gagctggtggactatcacgtattac

SEQ ID NO: 116469 - DNA, 25 bp, Saccharomyces pastorianus
gtattacatccgtaagattcgctca

SEQ ID NO: 116470 - DNA, 25 bp, Saccharomyces pastorianus
agattcgctcaaacacatgctcttt

SEQ ID NO: 116471 - DNA, 25 bp, Saccharomyces pastorianus
tcagtgggactttttgctgtcgtca

SEQ ID NO: 116472 - DNA, 25 bp, Saccharomyces pastorianus
gaaataatatctcagctggcctact

SEQ ID NO: 116473 - DNA, 25 bp, Saccharomyces pastorianus
ggatgtttcctgatgcgttcaatga

SEQ ID NO: 116474 - DNA, 25 bp, Saccharomyces pastorianus
ggagcaaagtttcatctgccttcaa

SEQ ID NO: 116475 - DNA, 25 bp, Saccharomyces pastorianus
aattcctcgagatctattgctgcta

SEQ ID NO: 116476 - DNA, 25 bp, Saccharomyces pastorianus
ttgctgctaataaatcacgccttgg

SEQ ID NO: 116477 - DNA, 25 bp, Saccharomyces pastorianus
gccctgtgggcaagtcgctgttaaa

SEQ ID NO: 116478 - DNA, 25 bp, Saccharomyces pastorianus
tggcctactccttatatctactttc

SEQ ID NO: 116479 - DNA, 25 bp, Saccharomyces pastorianus
acggataatgttacgaattcctcga

SEQ ID NO: 116480 - DNA, 25 bp, Saccharomyces pastorianus
gttacaatgagctcacaaatcctat

SEQ ID NO: 116481 - DNA, 25 bp, Saccharomyces pastorianus
aagcaggttctggtacaccgagaga

SEQ ID NO: 116482 - DNA, 25 bp, Saccharomyces pastorianus
tcacgccttggcaatcttttatcag

SEQ ID NO: 116483 - DNA, 25 bp, Saccharomyces pastorianus
aatgccactatatctcttttcgaaa

SEQ ID NO: 116484 - DNA, 25 bp, Saccharomyces pastorianus
gtcggtctacctgactttgaaggaa

SEQ ID NO: 116485 - DNA, 25 bp, Saccharomyces pastorianus
caagcgattaccgtgcaagtgcgtt

SEQ ID NO: 116486 - DNA, 25 bp, Saccharomyces pastorianus
agtaaacatatagccctcagaccgg

SEQ ID NO: 116487 - DNA, 25 bp, Saccharomyces pastorianus
gagatgctgttcctgagttactgat

SEQ ID NO: 116488 - DNA, 25 bp, Saccharomyces pastorianus
atgggccttaagtactcttgtcgaa

SEQ ID NO: 116489 - DNA, 25 bp, Saccharomyces pastorianus
gagcatttaccctacagtttactcc

SEQ ID NO: 116490 - DNA, 25 bp, Saccharomyces pastorianus
agtgaactgcctcttttgaacgatt

SEQ ID NO: 116491 - DNA, 25 bp, Saccharomyces pastorianus
gaccgggcgttgttccaagcgatta

SEQ ID NO: 116492 - DNA, 25 bp, Saccharomyces pastorianus
gaggaccatctattaacgagcccgc

SEQ ID NO: 116493 - DNA, 25 bp, Saccharomyces pastorianus
aaacggagcctcttcattatttgat

SEQ ID NO: 116494 - DNA, 25 bp, Saccharomyces pastorianus
aaggcctttggttgttgtgctcgcg

SEQ ID NO: 116495 - DNA, 25 bp, Saccharomyces pastorianus
ttatgtacaacagctcaccgtcagt

SEQ ID NO: 116496 - DNA, 25 bp, Saccharomyces pastorianus
aaggacatcatcatccagtcatcag

SEQ ID NO: 116497 - DNA, 25 bp, Saccharomyces pastorianus
tgtgctcgcgatctcaattgtattt

SEQ ID NO: 116498 - DNA, 25 bp, Saccharomyces pastorianus
gtattttttggctgtctcctggtcc

SEQ ID NO: 116499 - DNA, 25 bp, Saccharomyces pastorianus
taaccaactgcggaagctgctgcat

SEQ ID NO: 116500 - DNA, 25 bp, Saccharomyces pastorianus
ccagtacagaattccgggtgatttt

SEQ ID NO: 116501 - DNA, 25 bp, Saccharomyces pastorianus
taacgccatctacgcatcatatcaa

SEQ ID NO: 116502 - DNA, 25 bp, Saccharomyces pastorianus
agtgccggttgaatcccagtacaga

SEQ ID NO: 116503 - DNA, 25 bp, Saccharomyces pastorianus
gaaatgcggaaccactaaccaactg

SEQ ID NO: 116504 - DNA, 25 bp, Saccharomyces pastorianus
gctatgacatcaacacaaggccttt

SEQ ID NO: 116505 - DNA, 25 bp, Saccharomyces pastorianus
gtccggtgtatagttggttggtctt

SEQ ID NO: 116506 - DNA, 25 bp, Saccharomyces pastorianus
aaatggagttacgagctcctcaccc

SEQ ID NO: 116507 - DNA, 25 bp, Saccharomyces pastorianus
atacagtttcgatgggtttttccat

SEQ ID NO: 116508 - DNA, 25 bp, Saccharomyces pastorianus
aataccagctacgactagaacaata

SEQ ID NO: 116509 - DNA, 25 bp, Saccharomyces pastorianus
gtttataccaacaataccagctacg

SEQ ID NO: 116510 - DNA, 25 bp, Saccharomyces pastorianus
atgactccttttcccaacacttgta

SEQ ID NO: 116511 - DNA, 25 bp, Saccharomyces pastorianus
tgtaggagtgttcaaacagtttctt

SEQ ID NO: 116512 - DNA, 25 bp, Saccharomyces pastorianus
agcaacacaaaccagtccggtgtat

SEQ ID NO: 116513 - DNA, 25 bp, Saccharomyces pastorianus
gctcctcaccctttagtttgtttat

SEQ ID NO: 116514 - DNA, 25 bp, Saccharomyces pastorianus
aatgatgcatgtccgaaaacgctga

SEQ ID NO: 116515 - DNA, 25 bp, Saccharomyces pastorianus
gaaacctattggcacagcaacacaa

SEQ ID NO: 116516 - DNA, 25 bp, Saccharomyces pastorianus
tcaatcaacctaacctctcatgctt

SEQ ID NO: 116517 - DNA, 25 bp, Saccharomyces pastorianus
ctctcatgcttctccaagctgaaag

SEQ ID NO: 116518 - DNA, 25 bp, Saccharomyces pastorianus
tcttttttcaccgtcagggcggaat

SEQ ID NO: 116519 - DNA, 25 bp, Saccharomyces pastorianus
ttagcatcaatcaacctaacctctc

SEQ ID NO: 116520 - DNA, 25 bp, Saccharomyces pastorianus
atgcttctccaagctgaaagaagta

SEQ ID NO: 116521 - DNA, 25 bp, Saccharomyces pastorianus
tctgccaaaagaatgaaagtaggtt

SEQ ID NO: 116522 - DNA, 25 bp, Saccharomyces pastorianus
gttatcttttttcaccgtcagggcg

SEQ ID NO: 116523 - DNA, 25 bp, Saccharomyces pastorianus
gtgttgcaacatatatctgccaaaa

SEQ ID NO: 116524 - DNA, 25 bp, Saccharomyces pastorianus
gtacgtgttgcaacatatatctgcc

SEQ ID NO: 116525 - DNA, 25 bp, Saccharomyces pastorianus
aactcactctatgtacgtgttgcaa

SEQ ID NO: 116526 - DNA, 25 bp, Saccharomyces pastorianus
agaagtaaactcactctatgtacgt

SEQ ID NO: 116527 - DNA, 25 bp, Saccharomyces pastorianus
gcgaattccctctggtacaaaatct

SEQ ID NO: 116528 - DNA, 25 bp, Saccharomyces pastorianus
aatagagaccaacagcagccgctat

SEQ ID NO: 116529 - DNA, 25 bp, Saccharomyces pastorianus
aagatgtggctaggcgaattccctc

SEQ ID NO: 116530 - DNA, 25 bp, Saccharomyces pastorianus
gtagcacttacctcacatgacaaac

SEQ ID NO: 116531 - DNA, 25 bp, Saccharomyces pastorianus
aagtacagagatcaccatcccctat

SEQ ID NO: 116532 - DNA, 25 bp, Saccharomyces pastorianus
agatccacatcctcctttggagtga

SEQ ID NO: 116533 - DNA, 25 bp, Saccharomyces pastorianus
cattctaacgtgtccgtagcactta

SEQ ID NO: 116534 - DNA, 25 bp, Saccharomyces pastorianus
agttcaccaatcctaatattccttc

SEQ ID NO: 116535 - DNA, 25 bp, Saccharomyces pastorianus
aaatatgctgcaatcggttcgtgaa

SEQ ID NO: 116536 - DNA, 25 bp, Saccharomyces pastorianus
agccgtaacttgtcacttccaatag

SEQ ID NO: 116537 - DNA, 25 bp, Saccharomyces pastorianus
gatctccacacgcacaatttacata

SEQ ID NO: 116538 - DNA, 25 bp, Saccharomyces pastorianus
aatctagacttcaaccttttgaggg

SEQ ID NO: 116539 - DNA, 25 bp, Saccharomyces pastorianus
gcaaacatcttttcctttggcgaaa

SEQ ID NO: 116540 - DNA, 25 bp, Saccharomyces pastorianus
gttgaactattatctacctcaggcg

SEQ ID NO: 116541 - DNA, 25 bp, Saccharomyces pastorianus
ttaacgtcaccaatgatagctgatg

SEQ ID NO: 116542 - DNA, 25 bp, Saccharomyces pastorianus
tcaatatgatttttcctgtggactc

SEQ ID NO: 116543 - DNA, 25 bp, Saccharomyces pastorianus
tacctcaggcgttaacagatgttca

SEQ ID NO: 116544 - DNA, 25 bp, Saccharomyces pastorianus
gaaactgttgattcatttgtatccg

SEQ ID NO: 116545 - DNA, 25 bp, Saccharomyces pastorianus
agccggaaaatcaccatctgggttt

SEQ ID NO: 116546 - DNA, 25 bp, Saccharomyces pastorianus
aggtttagacctttacagcaatttg

SEQ ID NO: 116547 - DNA, 25 bp, Saccharomyces pastorianus
gatatgtacttagccctgagggata

SEQ ID NO: 116548 - DNA, 25 bp, Saccharomyces pastorianus
aaccttttgagggattgtttgcaca

SEQ ID NO: 116549 - DNA, 25 bp, Saccharomyces pastorianus
agttgatgaaaacccttttgccaat

SEQ ID NO: 116550 - DNA, 25 bp, Saccharomyces pastorianus
aaggccaaattcgttaatgaggaga

SEQ ID NO: 116551 - DNA, 25 bp, Saccharomyces pastorianus
ctaagctaccgcctaattttgatga

SEQ ID NO: 116552 - DNA, 25 bp, Saccharomyces pastorianus
aaagggatctggtggtattatgaca

SEQ ID NO: 116553 - DNA, 25 bp, Saccharomyces pastorianus
ggtacagtagcagacttcaacgaga

SEQ ID NO: 116554 - DNA, 25 bp, Saccharomyces pastorianus
aggaggaagaccaaactgcacaaag

SEQ ID NO: 116555 - DNA, 25 bp, Saccharomyces pastorianus
gccaatctttataattacgggtcgt

SEQ ID NO: 116556 - DNA, 25 bp, Saccharomyces pastorianus
ttgatctcacaactatacccttata

SEQ ID NO: 116557 - DNA, 25 bp, Saccharomyces pastorianus
gggttcatacacagatccgtggact

SEQ ID NO: 116558 - DNA, 25 bp, Saccharomyces pastorianus
tgaattggcccttcgatctaagcta

SEQ ID NO: 116559 - DNA, 25 bp, Saccharomyces pastorianus
taaagttctacagggcgctttctat

SEQ ID NO: 116560 - DNA, 25 bp, Saccharomyces pastorianus
aatgggattgtttgccttaggtaca

SEQ ID NO: 116561 - DNA, 25 bp, Saccharomyces pastorianus
gtaaatcgtctacgcttaagctatt

SEQ ID NO: 116562 - DNA, 25 bp, Saccharomyces pastorianus
ttgcagcaattgtacgtaaatcgtc

SEQ ID NO: 116563 - DNA, 25 bp, Saccharomyces pastorianus
gagtgatattctaccttgcagcaat

SEQ ID NO: 116564 - DNA, 25 bp, Saccharomyces pastorianus
aacttttgaagtgacaatcgcgcga

SEQ ID NO: 116565 - DNA, 25 bp, Saccharomyces pastorianus
gggacctagtgtggaaactgtaaca

SEQ ID NO: 116566 - DNA, 25 bp, Saccharomyces pastorianus
gcctaagatcaagatttctcgaaca

SEQ ID NO: 116567 - DNA, 25 bp, Saccharomyces pastorianus
ttacctgtatctaaccgaaagttca

SEQ ID NO: 116568 - DNA, 25 bp, Saccharomyces pastorianus
gggtatggttatatttcctcaacaa

SEQ ID NO: 116569 - DNA, 25 bp, Saccharomyces pastorianus
aatcgcgcgaagtttccagatctta

SEQ ID NO: 116570 - DNA, 25 bp, Saccharomyces pastorianus
actacagctgtccagagtgaagggt

SEQ ID NO: 116571 - DNA, 25 bp, Saccharomyces pastorianus
gaatccgtccctggtgtagtggaat

SEQ ID NO: 116572 - DNA, 25 bp, Saccharomyces pastorianus
gagatattggtggttcctcttctac

SEQ ID NO: 116573 - DNA, 25 bp, Saccharomyces pastorianus
tgacgtatcgtccatcattgtcgac

SEQ ID NO: 116574 - DNA, 25 bp, Saccharomyces pastorianus
atgatcctttcctctacgttaatgt

SEQ ID NO: 116575 - DNA, 25 bp, Saccharomyces pastorianus
gatttgcctttgacttcgccaagaa

SEQ ID NO: 116576 - DNA, 25 bp, Saccharomyces pastorianus
agggactatgctgtcttcgaaccag

SEQ ID NO: 116577 - DNA, 25 bp, Saccharomyces pastorianus
gtacgggaccatcttaggcaacatt

SEQ ID NO: 116578 - DNA, 25 bp, Saccharomyces pastorianus
aacattggcgctgctttgatcggtg

SEQ ID NO: 116579 - DNA, 25 bp, Saccharomyces pastorianus
attgtcgacaatgcctccatgcagg

SEQ ID NO: 116580 - DNA, 25 bp, Saccharomyces pastorianus
caatttgatgtcctagttacccctt

SEQ ID NO: 116581 - DNA, 25 bp, Saccharomyces pastorianus
cggtggccaaacctcatcaatttga

SEQ ID NO: 116582 - DNA, 25 bp, Saccharomyces pastorianus
agagtttgccattatttgtctgaaa

SEQ ID NO: 116583 - DNA, 25 bp, Saccharomyces pastorianus
ttgcccggcgaagtgttcacttgga

SEQ ID NO: 116584 - DNA, 25 bp, Saccharomyces pastorianus
atgggcctcccagatgaacaacata

SEQ ID NO: 116585 - DNA, 25 bp, Saccharomyces pastorianus
actgttctcatctgtacaagtactt

SEQ ID NO: 116586 - DNA, 25 bp, Saccharomyces pastorianus
gatcacaatgcgaagggccagtccc

SEQ ID NO: 116587 - DNA, 25 bp, Saccharomyces pastorianus
gaaatcacattacctgtcgcactgt

SEQ ID NO: 116588 - DNA, 25 bp, Saccharomyces pastorianus
gacgatattgacaccatgtaccatg

SEQ ID NO: 116589 - DNA, 25 bp, Saccharomyces pastorianus
gttgctaacatatgtcactcagagg

SEQ ID NO: 116590 - DNA, 25 bp, Saccharomyces pastorianus
aactgtttaggtgtcttgcccggcg

SEQ ID NO: 116591 - DNA, 25 bp, Saccharomyces pastorianus
aaccaactttgttcccagatcacaa

SEQ ID NO: 116592 - DNA, 25 bp, Saccharomyces pastorianus
gctgctccgattcgcgttacaacga

SEQ ID NO: 116593 - DNA, 25 bp, Saccharomyces pastorianus
gagatataccgtagcagtttcccac

SEQ ID NO: 116594 - DNA, 25 bp, Saccharomyces pastorianus
aagagaacttttcgtttttgcatga

SEQ ID NO: 116595 - DNA, 25 bp, Saccharomyces pastorianus
atttccgaaggccagggcgcttgat

SEQ ID NO: 116596 - DNA, 25 bp, Saccharomyces pastorianus
gtagcagtttcccacgacaagagaa

SEQ ID NO: 116597 - DNA, 25 bp, Saccharomyces pastorianus
gagtacagacgtttcgcatttccga

SEQ ID NO: 116598 - DNA, 25 bp, Saccharomyces pastorianus
gaatcctgcgaatcaaccgatactg

SEQ ID NO: 116599 - DNA, 25 bp, Saccharomyces pastorianus
ggtcgctaacgatgatttttgatga

SEQ ID NO: 116600 - DNA, 25 bp, Saccharomyces pastorianus
ggcgcttgatcagcagttcatcgag

SEQ ID NO: 116601 - DNA, 25 bp, Saccharomyces pastorianus
ataccgtctcatctactgacaaagg

SEQ ID NO: 116602 - DNA, 25 bp, Saccharomyces pastorianus
ggagccatttgttaatataccgtct

SEQ ID NO: 116603 - DNA, 25 bp, Saccharomyces pastorianus
tccatcttggtactaattccggaag

SEQ ID NO: 116604 - DNA, 25 bp, Saccharomyces pastorianus
ctggctgctattcacgctaagcgtg

SEQ ID NO: 116605 - DNA, 25 bp, Saccharomyces pastorianus
gtttgaagacactaatctggctgct

SEQ ID NO: 116606 - DNA, 25 bp, Saccharomyces pastorianus
gaagacactaatctggctgctattc

SEQ ID NO: 116607 - DNA, 25 bp, Saccharomyces pastorianus
agacactaatctggctgctattcac

SEQ ID NO: 116608 - DNA, 25 bp, Saccharomyces pastorianus
tattcacgctaagcgtgttactatc

SEQ ID NO: 116609 - DNA, 25 bp, Saccharomyces pastorianus
acactaatctggctgctattcacgc

SEQ ID NO: 116610 - DNA, 25 bp, Saccharomyces pastorianus
ggctgctattcacgctaagcgtgtt

SEQ ID NO: 116611 - DNA, 25 bp, Saccharomyces pastorianus
actaatctggctgctattcacgcta

SEQ ID NO: 116612 - DNA, 25 bp, Saccharomyces pastorianus
ttgaagacactaatctggctgctat

SEQ ID NO: 116613 - DNA, 25 bp, Saccharomyces pastorianus
atctggctgctattcacgctaagcg

SEQ ID NO: 116614 - DNA, 25 bp, Saccharomyces pastorianus
taatctggctgctattcacgctaag

SEQ ID NO: 116615 - DNA, 25 bp, Saccharomyces pastorianus
tggtgtcaagcgtatttctggtttg

SEQ ID NO: 116616 - DNA, 25 bp, Saccharomyces pastorianus
gtgtcaagcgtatttctggtttgat

SEQ ID NO: 116617 - DNA, 25 bp, Saccharomyces pastorianus
agcgtatttctggtttgatctacga

SEQ ID NO: 116618 - DNA, 25 bp, Saccharomyces pastorianus
aagcgtatttctggtttgatctacg

SEQ ID NO: 116619 - DNA, 25 bp, Saccharomyces pastorianus
caagcgtatttctggtttgatctac

SEQ ID NO: 116620 - DNA, 25 bp, Saccharomyces pastorianus
tcaagcgtatttctggtttgatcta

SEQ ID NO: 116621 - DNA, 25 bp, Saccharomyces pastorianus
gtcaagcgtatttctggtttgatct

SEQ ID NO: 116622 - DNA, 25 bp, Saccharomyces pastorianus
gcgtatttctggtttgatctacgaa

SEQ ID NO: 116623 - DNA, 25 bp, Saccharomyces pastorianus
ggtgtcaagcgtatttctggtttga

SEQ ID NO: 116624 - DNA, 25 bp, Saccharomyces pastorianus
tgtcaagcgtatttctggtttgatc

SEQ ID NO: 116625 - DNA, 25 bp, Saccharomyces pastorianus
ggatatagacactccacaatacagc

SEQ ID NO: 116626 - DNA, 25 bp, Saccharomyces pastorianus
ggctcgctctagaaagcatatcgta

SEQ ID NO: 116627 - DNA, 25 bp, Saccharomyces pastorianus
ggctaagcgtgttcgacaatgacat

SEQ ID NO: 116628 - DNA, 25 bp, Saccharomyces pastorianus
gctcctgttcactctattggattgt

SEQ ID NO: 116629 - DNA, 25 bp, Saccharomyces pastorianus
attggattgtcgctaactctggatt

SEQ ID NO: 116630 - DNA, 25 bp, Saccharomyces pastorianus
atttgatacataaggctcgctctag

SEQ ID NO: 116631 - DNA, 25 bp, Saccharomyces pastorianus
caatctatgccatttctggagtaat

SEQ ID NO: 116632 - DNA, 25 bp, Saccharomyces pastorianus
aggaattctcctacttagccagtga

SEQ ID NO: 116633 - DNA, 25 bp, Saccharomyces pastorianus
aggattccatgggtttctgcgtaaa

SEQ ID NO: 116634 - DNA, 25 bp, Saccharomyces pastorianus
agcattgtccacataatgccatggg

SEQ ID NO: 116635 - DNA, 25 bp, Saccharomyces pastorianus
actctggatttggacgatgtacact

SEQ ID NO: 116636 - DNA, 25 bp, Saccharomyces pastorianus
ggatacatcccagaaatgcatttat

SEQ ID NO: 116637 - DNA, 25 bp, Saccharomyces pastorianus
ttttcaattttcttggcatcatcca

SEQ ID NO: 116638 - DNA, 25 bp, Saccharomyces pastorianus
cgtcgccgtaagattgcaatggata

SEQ ID NO: 116639 - DNA, 25 bp, Saccharomyces pastorianus
agcactcatatctactacttcgcat

SEQ ID NO: 116640 - DNA, 25 bp, Saccharomyces pastorianus
tgaagaccctttctcgaatgtctgc

SEQ ID NO: 116641 - DNA, 25 bp, Saccharomyces pastorianus
atgcatttatcgtccttcttattag

SEQ ID NO: 116642 - DNA, 25 bp, Saccharomyces pastorianus
gatgacacctccattgaacaagact

SEQ ID NO: 116643 - DNA, 25 bp, Saccharomyces pastorianus
gactatttgtgcacggaagcactca

SEQ ID NO: 116644 - DNA, 25 bp, Saccharomyces pastorianus
tctgctaccttatgacgatgtgccg

SEQ ID NO: 116645 - DNA, 25 bp, Saccharomyces pastorianus
gcaatcaggatgcacgtcgccgtaa

SEQ ID NO: 116646 - DNA, 25 bp, Saccharomyces pastorianus
gaatgtctgcccaaatttttcaatt

SEQ ID NO: 116647 - DNA, 25 bp, Saccharomyces pastorianus
aaagaacctatcctcacaacaatcc

SEQ ID NO: 116648 - DNA, 25 bp, Saccharomyces pastorianus
ttagcgtattttctcgattgccctg

SEQ ID NO: 116649 - DNA, 25 bp, Saccharomyces pastorianus
tgcctattaccgctcacgaaaatga

SEQ ID NO: 116650 - DNA, 25 bp, Saccharomyces pastorianus
gcacccaatggcaagattcgagcta

SEQ ID NO: 116651 - DNA, 25 bp, Saccharomyces pastorianus
ttgtctcctatggtcttagcgtatt

SEQ ID NO: 116652 - DNA, 25 bp, Saccharomyces pastorianus
aggtggtgatgcttttgtctcctat

SEQ ID NO: 116653 - DNA, 25 bp, Saccharomyces pastorianus
gatcatattatgtgccctactaagg

SEQ ID NO: 116654 - DNA, 25 bp, Saccharomyces pastorianus
tggtcttgtactaaggcacccaatg

SEQ ID NO: 116655 - DNA, 25 bp, Saccharomyces pastorianus
gaacactccacatccacaggtattg

SEQ ID NO: 116656 - DNA, 25 bp, Saccharomyces pastorianus
gagctaaactttactttgcctatta

SEQ ID NO: 116657 - DNA, 25 bp, Saccharomyces pastorianus
ataagtttcagagtggtgggcccag

SEQ ID NO: 116658 - DNA, 25 bp, Saccharomyces pastorianus
aaaattctagttctcctgttcaaat

SEQ ID NO: 116659 - DNA, 25 bp, Saccharomyces pastorianus
ttatggcccgaatttattcctcctg

SEQ ID NO: 116660 - DNA, 25 bp, Saccharomyces pastorianus
atgatgttcatttgctttaccctcc

SEQ ID NO: 116661 - DNA, 25 bp, Saccharomyces pastorianus
tttaccctcctcatattatcgctgt

SEQ ID NO: 116662 - DNA, 25 bp, Saccharomyces pastorianus
aagtcttaaagcaaccgccatttca

SEQ ID NO: 116663 - DNA, 25 bp, Saccharomyces pastorianus
taagtgaagcccgtaccttatggcc

SEQ ID NO: 116664 - DNA, 25 bp, Saccharomyces pastorianus
attcattacgatttccattcatggg

SEQ ID NO: 116665 - DNA, 25 bp, Saccharomyces pastorianus
ttatcgctgttgcatgtttattcat

SEQ ID NO: 116666 - DNA, 25 bp, Saccharomyces pastorianus
ccacccttatcaatccttaaagcaa

SEQ ID NO: 116667 - DNA, 25 bp, Saccharomyces pastorianus
gaatgcccgcaatatatcagaactt

SEQ ID NO: 116668 - DNA, 25 bp, Saccharomyces pastorianus
aaggatcatcgttagcatctgcggc

SEQ ID NO: 116669 - DNA, 25 bp, Saccharomyces pastorianus
cgtgttggtgaaagggccagtccat

SEQ ID NO: 116670 - DNA, 25 bp, Saccharomyces pastorianus
tcgttcccttctgcaagtgatattg

SEQ ID NO: 116671 - DNA, 25 bp, Saccharomyces pastorianus
ccgtctctcctagatcgttacaaaa

SEQ ID NO: 116672 - DNA, 25 bp, Saccharomyces pastorianus
gatcgttacaaaaatcatgaggttt

SEQ ID NO: 116673 - DNA, 25 bp, Saccharomyces pastorianus
aaagggccagtccatatgttagttt

SEQ ID NO: 116674 - DNA, 25 bp, Saccharomyces pastorianus
gttgctgatttgttcatgttcttat

SEQ ID NO: 116675 - DNA, 25 bp, Saccharomyces pastorianus
ggccagtccatatgttagtttagca

SEQ ID NO: 116676 - DNA, 25 bp, Saccharomyces pastorianus
aagtgatattgttgctgatttgttc

SEQ ID NO: 116677 - DNA, 25 bp, Saccharomyces pastorianus
tatttaattttcgttcccttctgca

SEQ ID NO: 116678 - DNA, 25 bp, Saccharomyces pastorianus
tgggcagtggccgtctctcctagat

SEQ ID NO: 116679 - DNA, 25 bp, Saccharomyces pastorianus
tgttcttatgttcatgggcagtggc

SEQ ID NO: 116680 - DNA, 25 bp, Saccharomyces pastorianus
acgttgatctagttttggcagctga

SEQ ID NO: 116681 - DNA, 25 bp, Saccharomyces pastorianus
gtatctcgaggaagcttttccatta

SEQ ID NO: 116682 - DNA, 25 bp, Saccharomyces pastorianus
ggacattgacaagttgataccacta

SEQ ID NO: 116683 - DNA, 25 bp, Saccharomyces pastorianus
aaaacacattccacgatggcactaa

SEQ ID NO: 116684 - DNA, 25 bp, Saccharomyces pastorianus
gcataaacccacctgtaatcttgat

SEQ ID NO: 116685 - DNA, 25 bp, Saccharomyces pastorianus
aaaacactacttgatctcactcact

SEQ ID NO: 116686 - DNA, 25 bp, Saccharomyces pastorianus
gctgtcggcagaattttcacctcaa

SEQ ID NO: 116687 - DNA, 25 bp, Saccharomyces pastorianus
cggtaaagtctggatcgctggcgaa

SEQ ID NO: 116688 - DNA, 25 bp, Saccharomyces pastorianus
ggcagctgattgtgtgtatctcgag

SEQ ID NO: 116689 - DNA, 25 bp, Saccharomyces pastorianus
gaaatcagttgaccatctgctaagt

SEQ ID NO: 116690 - DNA, 25 bp, Saccharomyces pastorianus
gctggcgaactgttgtgcgagtaca

SEQ ID NO: 116691 - DNA, 25 bp, Saccharomyces pastorianus
aagaatttcatcgtcactttgaaaa

SEQ ID NO: 116692 - DNA, 25 bp, Saccharomyces pastorianus
aggaaaagcacaatgatgtcatcga

SEQ ID NO: 116693 - DNA, 25 bp, Saccharomyces pastorianus
ggctctattgtacacgaattcgaca

SEQ ID NO: 116694 - DNA, 25 bp, Saccharomyces pastorianus
aagggtacaccatccaggtaccaga

SEQ ID NO: 116695 - DNA, 25 bp, Saccharomyces pastorianus
aggtaccagatgttctccacttgaa

SEQ ID NO: 116696 - DNA, 25 bp, Saccharomyces pastorianus
ggattcagttcatcacgcaggtggc

SEQ ID NO: 116697 - DNA, 25 bp, Saccharomyces pastorianus
agttcatcacgcaggtggctctatt

SEQ ID NO: 116698 - DNA, 25 bp, Saccharomyces pastorianus
tcgacatcattaaagggtacaccat

SEQ ID NO: 116699 - DNA, 25 bp, Saccharomyces pastorianus
acgcaggtggctctattgtacacga

SEQ ID NO: 116700 - DNA, 25 bp, Saccharomyces pastorianus
agaacactccagatgtggaagctaa

SEQ ID NO: 116701 - DNA, 25 bp, Saccharomyces pastorianus
gaagttcttggattcagttcatcac

SEQ ID NO: 116702 - DNA, 25 bp, Saccharomyces pastorianus
aagcaaactctcttctgcagaattg

SEQ ID NO: 116703 - DNA, 25 bp, Saccharomyces pastorianus
agagattgaattacattgcgccatg

SEQ ID NO: 116704 - DNA, 25 bp, Saccharomyces pastorianus
gttaaattggtactcgctgcctgca

SEQ ID NO: 116705 - DNA, 25 bp, Saccharomyces pastorianus
gggcgaattgattgaatcccattct

SEQ ID NO: 116706 - DNA, 25 bp, Saccharomyces pastorianus
tctgactgacgaagtttgggcggtt

SEQ ID NO: 116707 - DNA, 25 bp, Saccharomyces pastorianus
aaaatgacaccctctggccataatt

SEQ ID NO: 116708 - DNA, 25 bp, Saccharomyces pastorianus
gttgcaggacaaggtgctggcccaa

SEQ ID NO: 116709 - DNA, 25 bp, Saccharomyces pastorianus
tgcacgtggcaaagaccccatttga

SEQ ID NO: 116710 - DNA, 25 bp, Saccharomyces pastorianus
gtgtcattattattacgcattcggc

SEQ ID NO: 116711 - DNA, 25 bp, Saccharomyces pastorianus
tgaacctacgaattacttggacaga

SEQ ID NO: 116712 - DNA, 25 bp, Saccharomyces pastorianus
gcttctggtcaattcagggctttaa

SEQ ID NO: 116713 - DNA, 25 bp, Saccharomyces pastorianus
tagcatcaaatttatcaccctcttc

SEQ ID NO: 116714 - DNA, 25 bp, Saccharomyces pastorianus
ttttttcttcccactattaatcttg

SEQ ID NO: 116715 - DNA, 25 bp, Saccharomyces pastorianus
attaatcttgttacccatagcatca

SEQ ID NO: 116716 - DNA, 25 bp, Saccharomyces pastorianus
gtcctgcaacccaattatggccaga

SEQ ID NO: 116717 - DNA, 25 bp, Saccharomyces pastorianus
tttctcaattcttgggccagcacct

SEQ ID NO: 116718 - DNA, 25 bp, Saccharomyces pastorianus
agagggtgtcattttcccatcctta

SEQ ID NO: 116719 - DNA, 25 bp, Saccharomyces pastorianus
aagaaacgtattcatcacccatctc

SEQ ID NO: 116720 - DNA, 25 bp, Saccharomyces pastorianus
tcttcattctctccttctttttctt

SEQ ID NO: 116721 - DNA, 25 bp, Saccharomyces pastorianus
tttttctttctcaattctgcagaag

SEQ ID NO: 116722 - DNA, 25 bp, Saccharomyces pastorianus
agagatgtactcgacttcaaattaa

SEQ ID NO: 116723 - DNA, 25 bp, Saccharomyces pastorianus
gcccaaacttcgtcagtcagattct

SEQ ID NO: 116724 - DNA, 25 bp, Saccharomyces pastorianus
caccagatcgcgtcttcggataaga

SEQ ID NO: 116725 - DNA, 25 bp, Saccharomyces pastorianus
gtattagatgccaccagatcgcgtc

SEQ ID NO: 116726 - DNA, 25 bp, Saccharomyces pastorianus
aatagcaggctataggcaatctaag

SEQ ID NO: 116727 - DNA, 25 bp, Saccharomyces pastorianus
gaggagtatgccaatcctatctata

SEQ ID NO: 116728 - DNA, 25 bp, Saccharomyces pastorianus
acctgctccggtacataggatattg

SEQ ID NO: 116729 - DNA, 25 bp, Saccharomyces pastorianus
ggcaatctaagggtgtccattcaga

SEQ ID NO: 116730 - DNA, 25 bp, Saccharomyces pastorianus
ggtgaaaaaagctgacatggtcgtt

SEQ ID NO: 116731 - DNA, 25 bp, Saccharomyces pastorianus
aaactcccagttgcattttgacaag

SEQ ID NO: 116732 - DNA, 25 bp, Saccharomyces pastorianus
tgaatcacagaatctacctgctccg

SEQ ID NO: 116733 - DNA, 25 bp, Saccharomyces pastorianus
tgacaagtttactcccaatccttat

SEQ ID NO: 116734 - DNA, 25 bp, Saccharomyces pastorianus
gacggtttacactacgttcaaatga

SEQ ID NO: 116735 - DNA, 25 bp, Saccharomyces pastorianus
actttgcagtttgtcatccaggaaa

SEQ ID NO: 116736 - DNA, 25 bp, Saccharomyces pastorianus
aacgggccgtagaaagactttgcag

SEQ ID NO: 116737 - DNA, 25 bp, Saccharomyces pastorianus
tggcagaaccttacctttgtcgaga

SEQ ID NO: 116738 - DNA, 25 bp, Saccharomyces pastorianus
gattacaatcctcaaacgggccgta

SEQ ID NO: 116739 - DNA, 25 bp, Saccharomyces pastorianus
tttgtcgagagtacagcctgtccaa

SEQ ID NO: 116740 - DNA, 25 bp, Saccharomyces pastorianus
tttagatcagcatcaagctctccca

SEQ ID NO: 116741 - DNA, 25 bp, Saccharomyces pastorianus
gatgacctaatttacactctgccac

SEQ ID NO: 116742 - DNA, 25 bp, Saccharomyces pastorianus
tatgcctggcggctttagatcagca

SEQ ID NO: 116743 - DNA, 25 bp, Saccharomyces pastorianus
tcacaaacttctacttatcctggtc

SEQ ID NO: 116744 - DNA, 25 bp, Saccharomyces pastorianus
tcctggtcaaggtatgccaactcca

SEQ ID NO: 116745 - DNA, 25 bp, Saccharomyces pastorianus
agctctcccacgtatccagaggaag

SEQ ID NO: 116746 - DNA, 25 bp, Saccharomyces pastorianus
taaagtgtgggatgtgcgctctccg

SEQ ID NO: 116747 - DNA, 25 bp, Saccharomyces pastorianus
cactgctcgtgtgtggtcgattgat

SEQ ID NO: 116748 - DNA, 25 bp, Saccharomyces pastorianus
gatggttcgatgttagcggcagcaa

SEQ ID NO: 116749 - DNA, 25 bp, Saccharomyces pastorianus
aagtcgtaattcatcctaaccaagg

SEQ ID NO: 116750 - DNA, 25 bp, Saccharomyces pastorianus
ggcatcgtccgatcattacgtgaga

SEQ ID NO: 116751 - DNA, 25 bp, Saccharomyces pastorianus
ggcaacatgttcagcggatcacact

SEQ ID NO: 116752 - DNA, 25 bp, Saccharomyces pastorianus
tgggattgcgcatttagtgccgaca

SEQ ID NO: 116753 - DNA, 25 bp, Saccharomyces pastorianus
gacgcatcccatctaaaaccggtaa

SEQ ID NO: 116754 - DNA, 25 bp, Saccharomyces pastorianus
atacctctctccagtctttatctat

SEQ ID NO: 116755 - DNA, 25 bp, Saccharomyces pastorianus
aattcagagcgcactccacatatat

SEQ ID NO: 116756 - DNA, 25 bp, Saccharomyces pastorianus
agtgccgacagtgcgtatctagtaa

SEQ ID NO: 116757 - DNA, 25 bp, Saccharomyces pastorianus
acatcgaattggcaacgtcatactt

SEQ ID NO: 116758 - DNA, 25 bp, Saccharomyces pastorianus
gagctacaccagtatatttcggaac

SEQ ID NO: 116759 - DNA, 25 bp, Saccharomyces pastorianus
ggtcttccccgaaacagatagtacg

SEQ ID NO: 116760 - DNA, 25 bp, Saccharomyces pastorianus
gtgtagtgatcttttgaactcatat

SEQ ID NO: 116761 - DNA, 25 bp, Saccharomyces pastorianus
gaaattgtcggagagtctatccaag

SEQ ID NO: 116762 - DNA, 25 bp, Saccharomyces pastorianus
gacgcttgtaattttttgactttat

SEQ ID NO: 116763 - DNA, 25 bp, Saccharomyces pastorianus
caagttgagtaaggttcttcgggat

SEQ ID NO: 116764 - DNA, 25 bp, Saccharomyces pastorianus
atggataccccatagaagatgcaag

SEQ ID NO: 116765 - DNA, 25 bp, Saccharomyces pastorianus
ttaattcgtgtaagggcttccctga

SEQ ID NO: 116766 - DNA, 25 bp, Saccharomyces pastorianus
tgtctagacgttttgattacaccaa

SEQ ID NO: 116767 - DNA, 25 bp, Saccharomyces pastorianus
aaggcgcttttcaaggacgcttgta

SEQ ID NO: 116768 - DNA, 25 bp, Saccharomyces pastorianus
tggtgctatcttcctaggcatgtat

SEQ ID NO: 116769 - DNA, 25 bp, Saccharomyces pastorianus
atttgtgcttgtcttgttcgagttc

SEQ ID NO: 116770 - DNA, 25 bp, Saccharomyces pastorianus
aaggacgcaagttcactctaccaat

SEQ ID NO: 116771 - DNA, 25 bp, Saccharomyces pastorianus
gagttcccgcagaagtcgttaagca

SEQ ID NO: 116772 - DNA, 25 bp, Saccharomyces pastorianus
atgctttcctcttccattggtgaaa

SEQ ID NO: 116773 - DNA, 25 bp, Saccharomyces pastorianus
gattgatacgacaacgcacatgctt

SEQ ID NO: 116774 - DNA, 25 bp, Saccharomyces pastorianus
tatatcagcaaactttactcacggg

SEQ ID NO: 116775 - DNA, 25 bp, Saccharomyces pastorianus
gtgggatcgcagcagctacaacgac

SEQ ID NO: 116776 - DNA, 25 bp, Saccharomyces pastorianus
aaccgcctcacttggaagcgttatt

SEQ ID NO: 116777 - DNA, 25 bp, Saccharomyces pastorianus
gctatctgcggttctattgcgggtg

SEQ ID NO: 116778 - DNA, 25 bp, Saccharomyces pastorianus
acagtttcctttatacgagtatcta

SEQ ID NO: 116779 - DNA, 25 bp, Saccharomyces pastorianus
tcattgtcagagtaagaggtccgct

SEQ ID NO: 116780 - DNA, 25 bp, Saccharomyces pastorianus
ggctgaatcaagaactcgtcaattt

SEQ ID NO: 116781 - DNA, 25 bp, Saccharomyces pastorianus
ggtgagtctttttctgtttgtaact

SEQ ID NO: 116782 - DNA, 25 bp, Saccharomyces pastorianus
gactacttacgatggcaaacctgct

SEQ ID NO: 116783 - DNA, 25 bp, Saccharomyces pastorianus
tcttctatccgttccttgattcaaa

SEQ ID NO: 116784 - DNA, 25 bp, Saccharomyces pastorianus
gagattgccactatgggtgagtctt

SEQ ID NO: 116785 - DNA, 25 bp, Saccharomyces pastorianus
aactctgtcgacttggaggagactg

SEQ ID NO: 116786 - DNA, 25 bp, Saccharomyces pastorianus
gtaacttcttcttacaaccattcaa

SEQ ID NO: 116787 - DNA, 25 bp, Saccharomyces pastorianus
attggcaagccttctttatcttcta

SEQ ID NO: 116788 - DNA, 25 bp, Saccharomyces pastorianus
ggttattgcgccatacgtagtgatt

SEQ ID NO: 116789 - DNA, 25 bp, Saccharomyces pastorianus
gaggtccgcttgctgtaaatattcc

SEQ ID NO: 116790 - DNA, 25 bp, Saccharomyces pastorianus
gaggcttcgttctacactgtattgt

SEQ ID NO: 116791 - DNA, 25 bp, Saccharomyces pastorianus
tacggctcaacgtgaattcgcattg

SEQ ID NO: 116792 - DNA, 25 bp, Saccharomyces pastorianus
aaaggccaaaatcattctccaccga

SEQ ID NO: 116793 - DNA, 25 bp, Saccharomyces pastorianus
tactatggtctaactgaggcttcgt

SEQ ID NO: 116794 - DNA, 25 bp, Saccharomyces pastorianus
ttagtgggttctgccttatcttcgc

SEQ ID NO: 116795 - DNA, 25 bp, Saccharomyces pastorianus
catacttatctttggccgctggttt

SEQ ID NO: 116796 - DNA, 25 bp, Saccharomyces pastorianus
atgttgattcacattccggtgtttt

SEQ ID NO: 116797 - DNA, 25 bp, Saccharomyces pastorianus
ccaccatttatgaagttgccccagg

SEQ ID NO: 116798 - DNA, 25 bp, Saccharomyces pastorianus
gagttgttcctggttatggccatgc

SEQ ID NO: 116799 - DNA, 25 bp, Saccharomyces pastorianus
tttagctggcccattacatggtcgt

SEQ ID NO: 116800 - DNA, 25 bp, Saccharomyces pastorianus
ggtgtgttaccccaattaatcatcg

SEQ ID NO: 116801 - DNA, 25 bp, Saccharomyces pastorianus
gatggatatcaattgacattttcaa

SEQ ID NO: 116802 - DNA, 25 bp, Saccharomyces pastorianus
tcaattgacattttcaaacaacaag

SEQ ID NO: 116803 - DNA, 25 bp, Saccharomyces pastorianus
gtctagcgggggtcatacttttcat

SEQ ID NO: 116804 - DNA, 25 bp, Saccharomyces pastorianus
aagtcgatagtatcggaaaagctcc

SEQ ID NO: 116805 - DNA, 25 bp, Saccharomyces pastorianus
atacttttcatttccgggcggctgc

SEQ ID NO: 116806 - DNA, 25 bp, Saccharomyces pastorianus
acgtgacgccttttagcacaaaaat

SEQ ID NO: 116807 - DNA, 25 bp, Saccharomyces pastorianus
gtgacgccttttagcacaaaaatgc

SEQ ID NO: 116808 - DNA, 25 bp, Saccharomyces pastorianus
gacgccttttagcacaaaaatgcaa

SEQ ID NO: 116809 - DNA, 25 bp, Saccharomyces pastorianus
ttttcatttccgggcggctgcggcg

SEQ ID NO: 116810 - DNA, 25 bp, Saccharomyces pastorianus
tacttttcatttccgggcggctgcg

SEQ ID NO: 116811 - DNA, 25 bp, Saccharomyces pastorianus
gctgcggcggaaaaaaacgtgacgc

SEQ ID NO: 116812 - DNA, 25 bp, Saccharomyces pastorianus
aaggcatcactatccctaatgttgt

SEQ ID NO: 116813 - DNA, 25 bp, Saccharomyces pastorianus
aactcgtacattatggtccatccat

SEQ ID NO: 116814 - DNA, 25 bp, Saccharomyces pastorianus
ataaattcgcaaatcctgctccact

SEQ ID NO: 116815 - DNA, 25 bp, Saccharomyces pastorianus
ttcggtgctatatacatcccttggt

SEQ ID NO: 116816 - DNA, 25 bp, Saccharomyces pastorianus
ggtgtgatagtagccttcattgcct

SEQ ID NO: 116817 - DNA, 25 bp, Saccharomyces pastorianus
actacgtttgtcctatccatgttca

SEQ ID NO: 116818 - DNA, 25 bp, Saccharomyces pastorianus
agaacactttcggtggtacagccct

SEQ ID NO: 116819 - DNA, 25 bp, Saccharomyces pastorianus
gaatccgaccttggaaatgcgctag

SEQ ID NO: 116820 - DNA, 25 bp, Saccharomyces pastorianus
aacgcttacgcaggtattgccacaa

SEQ ID NO: 116821 - DNA, 25 bp, Saccharomyces pastorianus
cttcttacttctatccattgcaaac

SEQ ID NO: 116822 - DNA, 25 bp, Saccharomyces pastorianus
ttattcttcctcttagcagtgacct

SEQ ID NO: 116823 - DNA, 25 bp, Saccharomyces pastorianus
cacaggaggtccatggttcacagat

SEQ ID NO: 116824 - DNA, 25 bp, Saccharomyces pastorianus
agaaccaatctccatcagcatgtag

SEQ ID NO: 116825 - DNA, 25 bp, Saccharomyces pastorianus
tgtacagcttacaaccctctgtgga

SEQ ID NO: 116826 - DNA, 25 bp, Saccharomyces pastorianus
gttaaccccttcaaatatcagatct

SEQ ID NO: 116827 - DNA, 25 bp, Saccharomyces pastorianus
catatcagagaacaccttccctaat

SEQ ID NO: 116828 - DNA, 25 bp, Saccharomyces pastorianus
gaagtcttagtgtacgacgacaagc

SEQ ID NO: 116829 - DNA, 25 bp, Saccharomyces pastorianus
gcatgactgctatagagtgacctta

SEQ ID NO: 116830 - DNA, 25 bp, Saccharomyces pastorianus
agtggccaatgtcgagttaacccct

SEQ ID NO: 116831 - DNA, 25 bp, Saccharomyces pastorianus
tattacagcggcacaagtggccaat

SEQ ID NO: 116832 - DNA, 25 bp, Saccharomyces pastorianus
tacttcaagatgtttccggcttcaa

SEQ ID NO: 116833 - DNA, 25 bp, Saccharomyces pastorianus
caccttccctaatggcttcaagaat

SEQ ID NO: 116834 - DNA, 25 bp, Saccharomyces pastorianus
ttcatcctccaaagccttattacct

SEQ ID NO: 116835 - DNA, 25 bp, Saccharomyces pastorianus
tcttcatcctccaaagccttattac

SEQ ID NO: 116836 - DNA, 25 bp, Saccharomyces pastorianus
cggctcgccctcaccttggttcatt

SEQ ID NO: 116837 - DNA, 25 bp, Saccharomyces pastorianus
aattcttcttcatcctccaaagcct

SEQ ID NO: 116838 - DNA, 25 bp, Saccharomyces pastorianus
ttcttcatcctccaaagccttatta

SEQ ID NO: 116839 - DNA, 25 bp, Saccharomyces pastorianus
aaaattcttcttcatcctccaaagc

SEQ ID NO: 116840 - DNA, 25 bp, Saccharomyces pastorianus
ttcttcttcatcctccaaagcctta

SEQ ID NO: 116841 - DNA, 25 bp, Saccharomyces pastorianus
tcttcttcatcctccaaagccttat

SEQ ID NO: 116842 - DNA, 25 bp, Saccharomyces pastorianus
aaagccttattacctgcctccggct

SEQ ID NO: 116843 - DNA, 25 bp, Saccharomyces pastorianus
attcttcttcatcctccaaagcctt

SEQ ID NO: 116844 - DNA, 25 bp, Saccharomyces pastorianus
aaattcttcttcatcctccaaagcc

SEQ ID NO: 116845 - DNA, 25 bp, Saccharomyces pastorianus
gatttatacaattactctaacttag

SEQ ID NO: 116846 - DNA, 25 bp, Saccharomyces pastorianus
aattccgaaggaatactccgcagta

SEQ ID NO: 116847 - DNA, 25 bp, Saccharomyces pastorianus
ggacttgaatcgaattccgaaggaa

SEQ ID NO: 116848 - DNA, 25 bp, Saccharomyces pastorianus
gaatactccgcagtattggagccat

SEQ ID NO: 116849 - DNA, 25 bp, Saccharomyces pastorianus
aaaagttgaaggatcctccgcctgc

SEQ ID NO: 116850 - DNA, 25 bp, Saccharomyces pastorianus
aagaaggtgcgaagacagtcaatcc

SEQ ID NO: 116851 - DNA, 25 bp, Saccharomyces pastorianus
gtattggagccatattttcagaata

SEQ ID NO: 116852 - DNA, 25 bp, Saccharomyces pastorianus
aacctgtggtatgttttgaagggca

SEQ ID NO: 116853 - DNA, 25 bp, Saccharomyces pastorianus
agagctctaaaaatttgtcgttcta

SEQ ID NO: 116854 - DNA, 25 bp, Saccharomyces pastorianus
gcacatttaaagtctagagctctaa

SEQ ID NO: 116855 - DNA, 25 bp, Saccharomyces pastorianus
gcgaagacagtcaatccggaaatta

SEQ ID NO: 116856 - DNA, 25 bp, Saccharomyces pastorianus
aaggtcaccgttgggaatgctctca

SEQ ID NO: 116857 - DNA, 25 bp, Saccharomyces pastorianus
taatgcgtctaactcacttggcgtg

SEQ ID NO: 116858 - DNA, 25 bp, Saccharomyces pastorianus
gaatgctctcactagtggcttgttc

SEQ ID NO: 116859 - DNA, 25 bp, Saccharomyces pastorianus
gaatccttttctttatacaacgcat

SEQ ID NO: 116860 - DNA, 25 bp, Saccharomyces pastorianus
tgggatttacccttctagatcttaa

SEQ ID NO: 116861 - DNA, 25 bp, Saccharomyces pastorianus
gtggcttgttctattaatgcgtcta

SEQ ID NO: 116862 - DNA, 25 bp, Saccharomyces pastorianus
atggtctttaccagctcagaaagtt

SEQ ID NO: 116863 - DNA, 25 bp, Saccharomyces pastorianus
tatcggccgtattgagaatcctttt

SEQ ID NO: 116864 - DNA, 25 bp, Saccharomyces pastorianus
ggcgtgctaacggacatactgttct

SEQ ID NO: 116865 - DNA, 25 bp, Saccharomyces pastorianus
ttcttcgttgctatcttctcttaaa

SEQ ID NO: 116866 - DNA, 25 bp, Saccharomyces pastorianus
ggcgttccaccattttttacacata

SEQ ID NO: 116867 - DNA, 25 bp, Saccharomyces pastorianus
aagtcccttctgatccgtacaatta

SEQ ID NO: 116868 - DNA, 25 bp, Saccharomyces pastorianus
acttcctgcaagttcctctgaaatt

SEQ ID NO: 116869 - DNA, 25 bp, Saccharomyces pastorianus
tttgtctcagcaatacacacttcca

SEQ ID NO: 116870 - DNA, 25 bp, Saccharomyces pastorianus
ggcctcaaggcattacacgttacga

SEQ ID NO: 116871 - DNA, 25 bp, Saccharomyces pastorianus
ttacgattttccaactgttcctgca

SEQ ID NO: 116872 - DNA, 25 bp, Saccharomyces pastorianus
aaagcaaattcatcacctaccacta

SEQ ID NO: 116873 - DNA, 25 bp, Saccharomyces pastorianus
aatcgcacgttgaacttgcaccttc

SEQ ID NO: 116874 - DNA, 25 bp, Saccharomyces pastorianus
gatgtctcacgccaacaatcggtaa

SEQ ID NO: 116875 - DNA, 25 bp, Saccharomyces pastorianus
acagcaaaagcctcaatcgcacgtt

SEQ ID NO: 116876 - DNA, 25 bp, Saccharomyces pastorianus
gaatcccgcgaaaggccgtatccag

SEQ ID NO: 116877 - DNA, 25 bp, Saccharomyces pastorianus
aaattcgtccaaccggagtcaactg

SEQ ID NO: 116878 - DNA, 25 bp, Saccharomyces pastorianus
taggatctgaaactgaacatgtgca

SEQ ID NO: 116879 - DNA, 25 bp, Saccharomyces pastorianus
tgatgattcgttacgggtagaccaa

SEQ ID NO: 116880 - DNA, 25 bp, Saccharomyces pastorianus
gtactcgacatcttatagggtccct

SEQ ID NO: 116881 - DNA, 25 bp, Saccharomyces pastorianus
taatgctaaaggtggcctagccaaa

SEQ ID NO: 116882 - DNA, 25 bp, Saccharomyces pastorianus
gacagccaccattgaaaagctacct

SEQ ID NO: 116883 - DNA, 25 bp, Saccharomyces pastorianus
agccctgagcagatgttcgaagata

SEQ ID NO: 116884 - DNA, 25 bp, Saccharomyces pastorianus
gggaccaaggactcatctatcgatg

SEQ ID NO: 116885 - DNA, 25 bp, Saccharomyces pastorianus
aacatgtgcaaagtacgcctgcggg

SEQ ID NO: 116886 - DNA, 25 bp, Saccharomyces pastorianus
attgctagataaggttcgtgtggtt

SEQ ID NO: 116887 - DNA, 25 bp, Saccharomyces pastorianus
taatggttcaccactaagccctgag

SEQ ID NO: 116888 - DNA, 25 bp, Saccharomyces pastorianus
gaattcagtgttatctgtttccatt

SEQ ID NO: 116889 - DNA, 25 bp, Saccharomyces pastorianus
aaaactccatcttcgatttgctctc

SEQ ID NO: 116890 - DNA, 25 bp, Saccharomyces pastorianus
gcatagcattacgaggccttccaaa

SEQ ID NO: 116891 - DNA, 25 bp, Saccharomyces pastorianus
atggcttgtgccagtaagtcctcat

SEQ ID NO: 116892 - DNA, 25 bp, Saccharomyces pastorianus
agtcttcctgttcccctaatgagga

SEQ ID NO: 116893 - DNA, 25 bp, Saccharomyces pastorianus
gcaaattcgtttacagttcgcctat

SEQ ID NO: 116894 - DNA, 25 bp, Saccharomyces pastorianus
atatgaacgtcgcagataccaccac

SEQ ID NO: 116895 - DNA, 25 bp, Saccharomyces pastorianus
ttccgcggtgtcagcgaaagctcga

SEQ ID NO: 116896 - DNA, 25 bp, Saccharomyces pastorianus
gctcgagcactaccgcagatatgaa

SEQ ID NO: 116897 - DNA, 25 bp, Saccharomyces pastorianus
gtgtcttccctctatcaagagtttg

SEQ ID NO: 116898 - DNA, 25 bp, Saccharomyces pastorianus
aatacatcttcctttacatctttcc

SEQ ID NO: 116899 - DNA, 25 bp, Saccharomyces pastorianus
aaacccctgctaggtctaagatcaa

SEQ ID NO: 116900 - DNA, 25 bp, Saccharomyces pastorianus
catcctaccagtatacttttcgtta

SEQ ID NO: 116901 - DNA, 25 bp, Saccharomyces pastorianus
caccggctatcaaaccatgggtagg

SEQ ID NO: 116902 - DNA, 25 bp, Saccharomyces pastorianus
gaacgaccaagccaggatgaagata

SEQ ID NO: 116903 - DNA, 25 bp, Saccharomyces pastorianus
tcaacaattgatgctaacgtcgaag

SEQ ID NO: 116904 - DNA, 25 bp, Saccharomyces pastorianus
gcgggtttccgataaatattgtaca

SEQ ID NO: 116905 - DNA, 25 bp, Saccharomyces pastorianus
aacgttagtgttcatcctaccagta

SEQ ID NO: 116906 - DNA, 25 bp, Saccharomyces pastorianus
atattgtacaattaggccccaccgg

SEQ ID NO: 116907 - DNA, 25 bp, Saccharomyces pastorianus
gaccatagtttcgatgctacatgaa

SEQ ID NO: 116908 - DNA, 25 bp, Saccharomyces pastorianus
aggtcatcaggtgggctgaacgtta

SEQ ID NO: 116909 - DNA, 25 bp, Saccharomyces pastorianus
cgatgtttcatcagcgggtttccga

SEQ ID NO: 116910 - DNA, 25 bp, Saccharomyces pastorianus
agataggcaatatagcgggctacat

SEQ ID NO: 116911 - DNA, 25 bp, Saccharomyces pastorianus
agacccgtcttgtccttgcaacaga

SEQ ID NO: 116912 - DNA, 25 bp, Saccharomyces pastorianus
gtgaccaacaggagccgcaaacatc

SEQ ID NO: 116913 - DNA, 25 bp, Saccharomyces pastorianus
ttccactacaagtcgatcgcggaca

SEQ ID NO: 116914 - DNA, 25 bp, Saccharomyces pastorianus
gtacgcccagcatagcatgatgttc

SEQ ID NO: 116915 - DNA, 25 bp, Saccharomyces pastorianus
atgatgttccccatcagtgaccaac

SEQ ID NO: 116916 - DNA, 25 bp, Saccharomyces pastorianus
gaagaaactcggtcgccgtcaagtt

SEQ ID NO: 116917 - DNA, 25 bp, Saccharomyces pastorianus
tacgcggccctcattgttcaagagt

SEQ ID NO: 116918 - DNA, 25 bp, Saccharomyces pastorianus
aggcgcaactctgtattgccggcaa

SEQ ID NO: 116919 - DNA, 25 bp, Saccharomyces pastorianus
atatcaagccttgtgccgtgaacat

SEQ ID NO: 116920 - DNA, 25 bp, Saccharomyces pastorianus
taccgcctgctttatcaactgacaa

SEQ ID NO: 116921 - DNA, 25 bp, Saccharomyces pastorianus
agactgtacttaatgtttccgctcc

SEQ ID NO: 116922 - DNA, 25 bp, Saccharomyces pastorianus
ttgatcacacttctaagccttcaga

SEQ ID NO: 116923 - DNA, 25 bp, Saccharomyces pastorianus
cgaccgctctcattttcatgattta

SEQ ID NO: 116924 - DNA, 25 bp, Saccharomyces pastorianus
atgttaagcagaattgtccccggaa

SEQ ID NO: 116925 - DNA, 25 bp, Saccharomyces pastorianus
gccacgggcatcacaaatcttacag

SEQ ID NO: 116926 - DNA, 25 bp, Saccharomyces pastorianus
gttgcttgtcgcgagtttattcagt

SEQ ID NO: 116927 - DNA, 25 bp, Saccharomyces pastorianus
gatggaagcgctcaaacagatcctt

SEQ ID NO: 116928 - DNA, 25 bp, Saccharomyces pastorianus
aagacggtccatcttgggtcgttgc

SEQ ID NO: 116929 - DNA, 25 bp, Saccharomyces pastorianus
cagagtgtgctgaacgggaccctac

SEQ ID NO: 116930 - DNA, 25 bp, Saccharomyces pastorianus
ttttttcagtactttgcccgttgca

SEQ ID NO: 116931 - DNA, 25 bp, Saccharomyces pastorianus
gagcagcccatcacagattacattg

SEQ ID NO: 116932 - DNA, 25 bp, Saccharomyces pastorianus
gggaccctacagtttttgatcacac

SEQ ID NO: 116933 - DNA, 25 bp, Saccharomyces pastorianus
gggattctcgcgttgagctacaata

SEQ ID NO: 116934 - DNA, 25 bp, Saccharomyces pastorianus
ttgcaattgaacaccgtcctgaatc

SEQ ID NO: 116935 - DNA, 25 bp, Saccharomyces pastorianus
cgggcgctttgttcaagtcttcaaa

SEQ ID NO: 116936 - DNA, 25 bp, Saccharomyces pastorianus
atgacctatgttacggtaccggtgc

SEQ ID NO: 116937 - DNA, 25 bp, Saccharomyces pastorianus
tagaaggctcacagggtctgatccc

SEQ ID NO: 116938 - DNA, 25 bp, Saccharomyces pastorianus
agaggcaaacatgacaccgcgggct

SEQ ID NO: 116939 - DNA, 25 bp, Saccharomyces pastorianus
gagaggtcccttcttaggtaataat

SEQ ID NO: 116940 - DNA, 25 bp, Saccharomyces pastorianus
aacccatgggttattcctcggcaat

SEQ ID NO: 116941 - DNA, 25 bp, Saccharomyces pastorianus
gtctgcagaatattccgcccaatag

SEQ ID NO: 116942 - DNA, 25 bp, Saccharomyces pastorianus
tggaatgcatgtcgacaccgctagg

SEQ ID NO: 116943 - DNA, 25 bp, Saccharomyces pastorianus
tgcatcctttggctggtctagacaa

SEQ ID NO: 116944 - DNA, 25 bp, Saccharomyces pastorianus
acgctacaatgtacggatccggttc

SEQ ID NO: 116945 - DNA, 25 bp, Saccharomyces pastorianus
gtacccaaaattcaagccttcgact

SEQ ID NO: 116946 - DNA, 25 bp, Saccharomyces pastorianus
gccttcgactctaacatggtccata

SEQ ID NO: 116947 - DNA, 25 bp, Saccharomyces pastorianus
cggtcttgactgctatatgtgcgga

SEQ ID NO: 116948 - DNA, 25 bp, Saccharomyces pastorianus
ggcctccgttggtttgagcatgtac

SEQ ID NO: 116949 - DNA, 25 bp, Saccharomyces pastorianus
ttcctcctcggaagacgcactagat

SEQ ID NO: 116950 - DNA, 25 bp, Saccharomyces pastorianus
ggtattgaaggtgcccttgccggat

SEQ ID NO: 116951 - DNA, 25 bp, Saccharomyces pastorianus
aaaacgcactgagggtcgccgaaga

SEQ ID NO: 116952 - DNA, 25 bp, Saccharomyces pastorianus
tgccggatttgcaatctctgctata

SEQ ID NO: 116953 - DNA, 25 bp, Saccharomyces pastorianus
ataagatcatcaccggtgcctgggc

SEQ ID NO: 116954 - DNA, 25 bp, Saccharomyces pastorianus
gtacgctcaattcattaccgtcggg

SEQ ID NO: 116955 - DNA, 25 bp, Saccharomyces pastorianus
aaaggctatcattcgttgcgctgtt

SEQ ID NO: 116956 - DNA, 25 bp, Saccharomyces pastorianus
tgcgctgttccccaaaatgagaatg

SEQ ID NO: 116957 - DNA, 25 bp, Saccharomyces pastorianus
gaaatctacgatgggttcactcaag

SEQ ID NO: 116958 - DNA, 25 bp, Saccharomyces pastorianus
tgtcccaagctggtaatcttttgaa

SEQ ID NO: 116959 - DNA, 25 bp, Saccharomyces pastorianus
atttcctgtctattgcacacactag

SEQ ID NO: 116960 - DNA, 25 bp, Saccharomyces pastorianus
ataacttcgtctacatgtccgatgt

SEQ ID NO: 116961 - DNA, 25 bp, Saccharomyces pastorianus
agccctatgaggttttgtcccaagc

SEQ ID NO: 116962 - DNA, 25 bp, Saccharomyces pastorianus
gatttagtccaacagtctccaaact

SEQ ID NO: 116963 - DNA, 25 bp, Saccharomyces pastorianus
atgtttcattactccaagccctatg

SEQ ID NO: 116964 - DNA, 25 bp, Saccharomyces pastorianus
aagaactaccaacttgcgtcagcaa

SEQ ID NO: 116965 - DNA, 25 bp, Saccharomyces pastorianus
acgtcaattgaaggcctctggtcaa

SEQ ID NO: 116966 - DNA, 25 bp, Saccharomyces pastorianus
ggatttcccgcgatttcaattatat

SEQ ID NO: 116967 - DNA, 25 bp, Saccharomyces pastorianus
gaggaagaccatcaacagctctcta

SEQ ID NO: 116968 - DNA, 25 bp, Saccharomyces pastorianus
aagtcctgaaggatttcccgcgatt

SEQ ID NO: 116969 - DNA, 25 bp, Saccharomyces pastorianus
aacagctctctaaacgccatgaaac

SEQ ID NO: 116970 - DNA, 25 bp, Saccharomyces pastorianus
aaagaatctgtttttggccacaaga

SEQ ID NO: 116971 - DNA, 25 bp, Saccharomyces pastorianus
ctacattgcacccaggtgtgtctga

SEQ ID NO: 116972 - DNA, 25 bp, Saccharomyces pastorianus
ggtgcaaaatacatactcagcgaag

SEQ ID NO: 116973 - DNA, 25 bp, Saccharomyces pastorianus
aggtgtgtctgagcgctctgacaaa

SEQ ID NO: 116974 - DNA, 25 bp, Saccharomyces pastorianus
cccacagggtcaaggttcaagtcct

SEQ ID NO: 116975 - DNA, 25 bp, Saccharomyces pastorianus
attggattctgggattactatcgaa

SEQ ID NO: 116976 - DNA, 25 bp, Saccharomyces pastorianus
agttgcaaatgtcaaaccatcttta

SEQ ID NO: 116977 - DNA, 25 bp, Saccharomyces pastorianus
cagcctccagtcaagtttctattgt

SEQ ID NO: 116978 - DNA, 25 bp, Saccharomyces pastorianus
gtacgcgttgataaagcttccactt

SEQ ID NO: 116979 - DNA, 25 bp, Saccharomyces pastorianus
gctcccattacagccgattgaaatt

SEQ ID NO: 116980 - DNA, 25 bp, Saccharomyces pastorianus
tgaatgcattgcttctacctcgaat

SEQ ID NO: 116981 - DNA, 25 bp, Saccharomyces pastorianus
ttattaatagtactcacctgctccc

SEQ ID NO: 116982 - DNA, 25 bp, Saccharomyces pastorianus
aataacgtccgttctctcgaatcta

SEQ ID NO: 116983 - DNA, 25 bp, Saccharomyces pastorianus
ttagacactcagcttattaccttat

SEQ ID NO: 116984 - DNA, 25 bp, Saccharomyces pastorianus
gaagtacctgatgtcaacgctctaa

SEQ ID NO: 116985 - DNA, 25 bp, Saccharomyces pastorianus
cggatttactgtcccttattaatag

SEQ ID NO: 116986 - DNA, 25 bp, Saccharomyces pastorianus
attaccttattacccagcagtctta

SEQ ID NO: 116987 - DNA, 25 bp, Saccharomyces pastorianus
gtaagatgcttgatgcagcctccag

SEQ ID NO: 116988 - DNA, 25 bp, Saccharomyces pastorianus
taaactctttggtctggatgactca

SEQ ID NO: 116989 - DNA, 25 bp, Saccharomyces pastorianus
ggatgactcagcgtgggacctcaat

SEQ ID NO: 116990 - DNA, 25 bp, Saccharomyces pastorianus
aatacgccgtctaatatcaactcag

SEQ ID NO: 116991 - DNA, 25 bp, Saccharomyces pastorianus
gagagttccaactccaatacgccgt

SEQ ID NO: 116992 - DNA, 25 bp, Saccharomyces pastorianus
tctccaacgttggttacagtgaact

SEQ ID NO: 116993 - DNA, 25 bp, Saccharomyces pastorianus
atcaactcagatgtggaacctatag

SEQ ID NO: 116994 - DNA, 25 bp, Saccharomyces pastorianus
gtgggacctcaatagctacaaagat

SEQ ID NO: 116995 - DNA, 25 bp, Saccharomyces pastorianus
gtgaactgcgaaaacctgagggtgt

SEQ ID NO: 116996 - DNA, 25 bp, Saccharomyces pastorianus
agaagcgacccaatctcataatctc

SEQ ID NO: 116997 - DNA, 25 bp, Saccharomyces pastorianus
aaacctttggcgataattctgatga

SEQ ID NO: 116998 - DNA, 25 bp, Saccharomyces pastorianus
aatggtgtcactggcaaactctcta

SEQ ID NO: 116999 - DNA, 25 bp, Saccharomyces pastorianus
tcttcctggaaccactatcatcaga

SEQ ID NO: 117000 - DNA, 25 bp, Saccharomyces pastorianus
tatcgccaaaggtttttctcccact

SEQ ID NO: 117001 - DNA, 25 bp, Saccharomyces pastorianus
atctaggtcatattcatcctctcca

SEQ ID NO: 117002 - DNA, 25 bp, Saccharomyces pastorianus
tcatcaaactttctcttcctggaac

SEQ ID NO: 117003 - DNA, 25 bp, Saccharomyces pastorianus
cattgtctgcgctacttttttgaat

SEQ ID NO: 117004 - DNA, 25 bp, Saccharomyces pastorianus
aaattccttatccttagcatccctt

SEQ ID NO: 117005 - DNA, 25 bp, Saccharomyces pastorianus
cttcattttgttcgccttcatcaaa

SEQ ID NO: 117006 - DNA, 25 bp, Saccharomyces pastorianus
gaatacgtacttctgctggtgcatt

SEQ ID NO: 117007 - DNA, 25 bp, Saccharomyces pastorianus
atcccttttctcgtcttcattttgt

SEQ ID NO: 117008 - DNA, 25 bp, Saccharomyces pastorianus
ctttttctttttgatgctatcctta

SEQ ID NO: 117009 - DNA, 25 bp, Saccharomyces pastorianus
gtcttggctccctgtaaattcctta

SEQ ID NO: 117010 - DNA, 25 bp, Saccharomyces pastorianus
agatcattttcgacaagacccctac

SEQ ID NO: 117011 - DNA, 25 bp, Saccharomyces pastorianus
tacagttcatatcagcatacctcct

SEQ ID NO: 117012 - DNA, 25 bp, Saccharomyces pastorianus
atgaattatccaggcggcgaggctt

SEQ ID NO: 117013 - DNA, 25 bp, Saccharomyces pastorianus
taaaagcgatgtcttcttcacctat

SEQ ID NO: 117014 - DNA, 25 bp, Saccharomyces pastorianus
cccttatctataatgacctcctttt

SEQ ID NO: 117015 - DNA, 25 bp, Saccharomyces pastorianus
atacctccttgcatgacaggtgtca

SEQ ID NO: 117016 - DNA, 25 bp, Saccharomyces pastorianus
ggcgaggctttaacttcttttaatg

SEQ ID NO: 117017 - DNA, 25 bp, Saccharomyces pastorianus
tttgatttcttgatcacccacgagc

SEQ ID NO: 117018 - DNA, 25 bp, Saccharomyces pastorianus
ggatttgacccaacctacattaaga

SEQ ID NO: 117019 - DNA, 25 bp, Saccharomyces pastorianus
aaatgtggccctcctttgatttctt

SEQ ID NO: 117020 - DNA, 25 bp, Saccharomyces pastorianus
gtgaatgttttgtctctactcaaac

SEQ ID NO: 117021 - DNA, 25 bp, Saccharomyces pastorianus
gatttcaaaaaagtattgtccttgc

SEQ ID NO: 117022 - DNA, 25 bp, Saccharomyces pastorianus
atctctctggaagattatgaggtac

SEQ ID NO: 117023 - DNA, 25 bp, Saccharomyces pastorianus
aaagaccatatctctctggaagatt

SEQ ID NO: 117024 - DNA, 25 bp, Saccharomyces pastorianus
tgcagaagggtggaagtgttttaaa

SEQ ID NO: 117025 - DNA, 25 bp, Saccharomyces pastorianus
accgattaggcaaaaaagtcagagt

SEQ ID NO: 117026 - DNA, 25 bp, Saccharomyces pastorianus
cttggtgaagatagtgtaggtgatt

SEQ ID NO: 117027 - DNA, 25 bp, Saccharomyces pastorianus
gttttaaaagaccatatctctctgg

SEQ ID NO: 117028 - DNA, 25 bp, Saccharomyces pastorianus
ttggcacccaaccaaacaaaattgt

SEQ ID NO: 117029 - DNA, 25 bp, Saccharomyces pastorianus
gtagttgtgaatgaccgattaggca

SEQ ID NO: 117030 - DNA, 25 bp, Saccharomyces pastorianus
ttgtccttgcaaattggcacccaac

SEQ ID NO: 117031 - DNA, 25 bp, Saccharomyces pastorianus
caaaattgtgttgcagaagggtgga

SEQ ID NO: 117032 - DNA, 25 bp, Saccharomyces pastorianus
ataggatttcactgaccatcccagt

SEQ ID NO: 117033 - DNA, 25 bp, Saccharomyces pastorianus
catcccagtgatttgtcactctcat

SEQ ID NO: 117034 - DNA, 25 bp, Saccharomyces pastorianus
aagactagtgccctttagctccagt

SEQ ID NO: 117035 - DNA, 25 bp, Saccharomyces pastorianus
agtattgtcaatgagggcgccgccg

SEQ ID NO: 117036 - DNA, 25 bp, Saccharomyces pastorianus
cacctttgttgtagagggcgccaca

SEQ ID NO: 117037 - DNA, 25 bp, Saccharomyces pastorianus
tcgttattccccaattttcaagaga

SEQ ID NO: 117038 - DNA, 25 bp, Saccharomyces pastorianus
gattaacgaccctcaagagtgtgca

SEQ ID NO: 117039 - DNA, 25 bp, Saccharomyces pastorianus
agggcgccacaaaggcacctgtaat

SEQ ID NO: 117040 - DNA, 25 bp, Saccharomyces pastorianus
gtagaaaatgcacccagcggacctt

SEQ ID NO: 117041 - DNA, 25 bp, Saccharomyces pastorianus
atgtttgatctgtttctgcttggct

SEQ ID NO: 117042 - DNA, 25 bp, Saccharomyces pastorianus
tgacggtcacatagcctcgttattc

SEQ ID NO: 117043 - DNA, 25 bp, Saccharomyces pastorianus
gtaaacaggatttcttcgaggtcga

SEQ ID NO: 117044 - DNA, 25 bp, Saccharomyces pastorianus
aactggatcagtgtccccagcggaa

SEQ ID NO: 117045 - DNA, 25 bp, Saccharomyces pastorianus
aacacatggtgtacgcccttgagac

SEQ ID NO: 117046 - DNA, 25 bp, Saccharomyces pastorianus
ttttcctccactacgacaatgcaag

SEQ ID NO: 117047 - DNA, 25 bp, Saccharomyces pastorianus
tcaggacttgcctggtgtgaagtac

SEQ ID NO: 117048 - DNA, 25 bp, Saccharomyces pastorianus
ccagcggaagggtgtcgtattacgt

SEQ ID NO: 117049 - DNA, 25 bp, Saccharomyces pastorianus
acgggaacgtggtatctgcatatat

SEQ ID NO: 117050 - DNA, 25 bp, Saccharomyces pastorianus
gagggccacgatgctcaagagcatt

SEQ ID NO: 117051 - DNA, 25 bp, Saccharomyces pastorianus
aggcgtgcagggtccgtttgactaa

SEQ ID NO: 117052 - DNA, 25 bp, Saccharomyces pastorianus
ttgtcgaggtttatgtccaacacat

SEQ ID NO: 117053 - DNA, 25 bp, Saccharomyces pastorianus
atatataccgggtgagggccacgat

SEQ ID NO: 117054 - DNA, 25 bp, Saccharomyces pastorianus
gggcgagttcgcacctaccaggaag

SEQ ID NO: 117055 - DNA, 25 bp, Saccharomyces pastorianus
tatcgcggtccgtatggaagggccc

SEQ ID NO: 117056 - DNA, 25 bp, Saccharomyces pastorianus
acatcgtgccattacccataaggga

SEQ ID NO: 117057 - DNA, 25 bp, Saccharomyces pastorianus
atatggtgggtcacaaactgggcga

SEQ ID NO: 117058 - DNA, 25 bp, Saccharomyces pastorianus
atccttcctcagttcgtgggactga

SEQ ID NO: 117059 - DNA, 25 bp, Saccharomyces pastorianus
ggccatgactaagggcactccaata

SEQ ID NO: 117060 - DNA, 25 bp, Saccharomyces pastorianus
gaagggccccaacatcgtgccatta

SEQ ID NO: 117061 - DNA, 25 bp, Saccharomyces pastorianus
ggagtacgtacctattgaaatatca

SEQ ID NO: 117062 - DNA, 25 bp, Saccharomyces pastorianus
caaccggcagctagacttttatcgc

SEQ ID NO: 117063 - DNA, 25 bp, Saccharomyces pastorianus
ttacccataagggaggccatgacta

SEQ ID NO: 117064 - DNA, 25 bp, Saccharomyces pastorianus
agctagacttttatcgcggtccgta

SEQ ID NO: 117065 - DNA, 25 bp, Saccharomyces pastorianus
accgatatcatgtcccgtggtagag

SEQ ID NO: 117066 - DNA, 25 bp, Saccharomyces pastorianus
gtcttctcaacaatatgtccatcgt

SEQ ID NO: 117067 - DNA, 25 bp, Saccharomyces pastorianus
acaacttatctgtgaatctcgctca

SEQ ID NO: 117068 - DNA, 25 bp, Saccharomyces pastorianus
aacttctcgcatcactcggaaagcg

SEQ ID NO: 117069 - DNA, 25 bp, Saccharomyces pastorianus
aaactatgacccaccaatgtcttct

SEQ ID NO: 117070 - DNA, 25 bp, Saccharomyces pastorianus
gagacggtaaatctgtccagccatt

SEQ ID NO: 117071 - DNA, 25 bp, Saccharomyces pastorianus
gaactcgattttaccctattggaat

SEQ ID NO: 117072 - DNA, 25 bp, Saccharomyces pastorianus
ctgtccagccattagaactcgattt

SEQ ID NO: 117073 - DNA, 25 bp, Saccharomyces pastorianus
gagctaacgaacttggttccgctta

SEQ ID NO: 117074 - DNA, 25 bp, Saccharomyces pastorianus
ggttccgcttataacttactagtag

SEQ ID NO: 117075 - DNA, 25 bp, Saccharomyces pastorianus
ggaaagcgcaggcattaccatctta

SEQ ID NO: 117076 - DNA, 25 bp, Saccharomyces pastorianus
aaggaggctccgacgatgacgaatt

SEQ ID NO: 117077 - DNA, 25 bp, Saccharomyces pastorianus
gcatacctattcatttatcccttac

SEQ ID NO: 117078 - DNA, 25 bp, Saccharomyces pastorianus
ggctgactatagcacggtggacctc

SEQ ID NO: 117079 - DNA, 25 bp, Saccharomyces pastorianus
taattctatggcatgggctgactat

SEQ ID NO: 117080 - DNA, 25 bp, Saccharomyces pastorianus
cacatctttatccaattcagcgtta

SEQ ID NO: 117081 - DNA, 25 bp, Saccharomyces pastorianus
taatgacagcactgatacgaccgcc

SEQ ID NO: 117082 - DNA, 25 bp, Saccharomyces pastorianus
gaagaacccgattattaccatcact

SEQ ID NO: 117083 - DNA, 25 bp, Saccharomyces pastorianus
ggtggacctcgacagtgttactaat

SEQ ID NO: 117084 - DNA, 25 bp, Saccharomyces pastorianus
tatatccgatcaccttgctactttg

SEQ ID NO: 117085 - DNA, 25 bp, Saccharomyces pastorianus
agatcaatgagctcactacctatag

SEQ ID NO: 117086 - DNA, 25 bp, Saccharomyces pastorianus
aatgggattttccaccacatcttta

SEQ ID NO: 117087 - DNA, 25 bp, Saccharomyces pastorianus
tgcaaaacttttgggcctgtggctt

SEQ ID NO: 117088 - DNA, 25 bp, Saccharomyces pastorianus
aggatcttggactgctttttcaaca

SEQ ID NO: 117089 - DNA, 25 bp, Saccharomyces pastorianus
aaatgaaatatctgccaccgctcaa

SEQ ID NO: 117090 - DNA, 25 bp, Saccharomyces pastorianus
gaagaccagtttctatcacgaggga

SEQ ID NO: 117091 - DNA, 25 bp, Saccharomyces pastorianus
taaggccacctttgttttcttcaca

SEQ ID NO: 117092 - DNA, 25 bp, Saccharomyces pastorianus
gactcgacgcacttacttgttagga

SEQ ID NO: 117093 - DNA, 25 bp, Saccharomyces pastorianus
taactcagatcctttcacatacgtc

SEQ ID NO: 117094 - DNA, 25 bp, Saccharomyces pastorianus
aacacagcccgtggttcaagtgcaa

SEQ ID NO: 117095 - DNA, 25 bp, Saccharomyces pastorianus
tacggtgccacggtgtcaattgact

SEQ ID NO: 117096 - DNA, 25 bp, Saccharomyces pastorianus
actgctctagctgtagtgtttctca

SEQ ID NO: 117097 - DNA, 25 bp, Saccharomyces pastorianus
gtgtttctcacatatggcgctgcat

SEQ ID NO: 117098 - DNA, 25 bp, Saccharomyces pastorianus
aaatcgcactgttagctgtcgccgg

SEQ ID NO: 117099 - DNA, 25 bp, Saccharomyces pastorianus
gatacctttgtacctgagcagttac

SEQ ID NO: 117100 - DNA, 25 bp, Saccharomyces pastorianus
tggaatcaagtctaccgctttggct

SEQ ID NO: 117101 - DNA, 25 bp, Saccharomyces pastorianus
taagcggtttacgtactatcctcaa

SEQ ID NO: 117102 - DNA, 25 bp, Saccharomyces pastorianus
attgtgttcacataccctttgttta

SEQ ID NO: 117103 - DNA, 25 bp, Saccharomyces pastorianus
atgaaggccatgtccgcgtctcaaa

SEQ ID NO: 117104 - DNA, 25 bp, Saccharomyces pastorianus
gagctggcctacaatgatacctttg

SEQ ID NO: 117105 - DNA, 25 bp, Saccharomyces pastorianus
ggccttgcatcgttacctattgtgt

SEQ ID NO: 117106 - DNA, 25 bp, Saccharomyces pastorianus
gaatgggcgttctatctttgcttcc

SEQ ID NO: 117107 - DNA, 25 bp, Saccharomyces pastorianus
tttactttacgtacgccttggcagt

SEQ ID NO: 117108 - DNA, 25 bp, Saccharomyces pastorianus
ggagcgttacttgggtttcctgcca

SEQ ID NO: 117109 - DNA, 25 bp, Saccharomyces pastorianus
tgattccagcaacggtaactcggcc

SEQ ID NO: 117110 - DNA, 25 bp, Saccharomyces pastorianus
aatctttcctttcttgcaacttcca

SEQ ID NO: 117111 - DNA, 25 bp, Saccharomyces pastorianus
acacaggtgctgattctttcgagga

SEQ ID NO: 117112 - DNA, 25 bp, Saccharomyces pastorianus
agctgttgcgctcaatgtagcacct

SEQ ID NO: 117113 - DNA, 25 bp, Saccharomyces pastorianus
ttaccaatgcacctacaccgaaaat

SEQ ID NO: 117114 - DNA, 25 bp, Saccharomyces pastorianus
aactctttcgacgtaaacacaggtg

SEQ ID NO: 117115 - DNA, 25 bp, Saccharomyces pastorianus
ttactgctgcttccaatgattccag

SEQ ID NO: 117116 - DNA, 25 bp, Saccharomyces pastorianus
agacgtatatctcttactgctgctt

SEQ ID NO: 117117 - DNA, 25 bp, Saccharomyces pastorianus
ggtatccatttcttaggcagccgag

SEQ ID NO: 117118 - DNA, 25 bp, Saccharomyces pastorianus
tgcccagaattgacctccctagtaa

SEQ ID NO: 117119 - DNA, 25 bp, Saccharomyces pastorianus
aatgtagcaccttgcatcatggctc

SEQ ID NO: 117120 - DNA, 25 bp, Saccharomyces pastorianus
aaagatttcgccacctttgcaaagg

SEQ ID NO: 117121 - DNA, 25 bp, Saccharomyces pastorianus
cttgtgtcctagttgtcagcgatat

SEQ ID NO: 117122 - DNA, 25 bp, Saccharomyces pastorianus
cgacacttccaagcgtatcatcagt

SEQ ID NO: 117123 - DNA, 25 bp, Saccharomyces pastorianus
taaattgtttggctctgttcctgga

SEQ ID NO: 117124 - DNA, 25 bp, Saccharomyces pastorianus
ggcctcagatgaaagcttgtgtcct

SEQ ID NO: 117125 - DNA, 25 bp, Saccharomyces pastorianus
tttaactcaagtcggttcaggccca

SEQ ID NO: 117126 - DNA, 25 bp, Saccharomyces pastorianus
ggtgccacaccattaatcagtttta

SEQ ID NO: 117127 - DNA, 25 bp, Saccharomyces pastorianus
gtggcaacctccgaactatttaaag

SEQ ID NO: 117128 - DNA, 25 bp, Saccharomyces pastorianus
gaatcttctaactttactgcacgtg

SEQ ID NO: 117129 - DNA, 25 bp, Saccharomyces pastorianus
tctttccctccaatattctacatga

SEQ ID NO: 117130 - DNA, 25 bp, Saccharomyces pastorianus
agcagcttgaggctttcaaccatca

SEQ ID NO: 117131 - DNA, 25 bp, Saccharomyces pastorianus
agggccaaccgtcagaatcctactg

SEQ ID NO: 117132 - DNA, 25 bp, Saccharomyces pastorianus
gatgtagaccgctctcaaatacttg

SEQ ID NO: 117133 - DNA, 25 bp, Saccharomyces pastorianus
aaaatagggacgtggttgcgctgct

SEQ ID NO: 117134 - DNA, 25 bp, Saccharomyces pastorianus
gtaaattctccatctgtcaacaagc

SEQ ID NO: 117135 - DNA, 25 bp, Saccharomyces pastorianus
tacttggtaccatttcgcaggcaga

SEQ ID NO: 117136 - DNA, 25 bp, Saccharomyces pastorianus
atgaatccctacaacgaacgtactc

SEQ ID NO: 117137 - DNA, 25 bp, Saccharomyces pastorianus
ggaaacatacacacgactactcaag

SEQ ID NO: 117138 - DNA, 25 bp, Saccharomyces pastorianus
gggtgagttcaagcaattctatgga

SEQ ID NO: 117139 - DNA, 25 bp, Saccharomyces pastorianus
gaagaaacacgcagggccaaccgtc

SEQ ID NO: 117140 - DNA, 25 bp, Saccharomyces pastorianus
aactgttgggtctttggctgtacga

SEQ ID NO: 117141 - DNA, 25 bp, Saccharomyces pastorianus
gtcaacaagccagtaccgagcatat

SEQ ID NO: 117142 - DNA, 25 bp, Saccharomyces pastorianus
acggttgctgccgaattgggaaaca

SEQ ID NO: 117143 - DNA, 25 bp, Saccharomyces pastorianus
gacatggccatccttaatgacttgc

SEQ ID NO: 117144 - DNA, 25 bp, Saccharomyces pastorianus
gctacagacgtccattgccgaaggt

SEQ ID NO: 117145 - DNA, 25 bp, Saccharomyces pastorianus
aggagctcaccgatgacgacatggc

SEQ ID NO: 117146 - DNA, 25 bp, Saccharomyces pastorianus
ggaactgcggacatatctattacat

SEQ ID NO: 117147 - DNA, 25 bp, Saccharomyces pastorianus
attccttctgaacatagtcgaccgc

SEQ ID NO: 117148 - DNA, 25 bp, Saccharomyces pastorianus
aaagtgctccgttaaagcctgtgac

SEQ ID NO: 117149 - DNA, 25 bp, Saccharomyces pastorianus
tagactggcctgcagtgctcacggt

SEQ ID NO: 117150 - DNA, 25 bp, Saccharomyces pastorianus
gacttgcatactttactgctacaga

SEQ ID NO: 117151 - DNA, 25 bp, Saccharomyces pastorianus
tcgagttcaatccagaattccttct

SEQ ID NO: 117152 - DNA, 25 bp, Saccharomyces pastorianus
taaccaccaacttcctaaagtgctc

SEQ ID NO: 117153 - DNA, 25 bp, Saccharomyces pastorianus
aatgaggtcagttttcccaataaca

SEQ ID NO: 117154 - DNA, 25 bp, Saccharomyces pastorianus
actgggttgcaaaatgggcgctgcc

SEQ ID NO: 117155 - DNA, 25 bp, Saccharomyces pastorianus
agaaccgcctctgataccagtgtta

SEQ ID NO: 117156 - DNA, 25 bp, Saccharomyces pastorianus
ataagaggtaatggccacaccgctg

SEQ ID NO: 117157 - DNA, 25 bp, Saccharomyces pastorianus
gatccattccatgacttcaattcaa

SEQ ID NO: 117158 - DNA, 25 bp, Saccharomyces pastorianus
acaccgctgcggtcgattggtggac

SEQ ID NO: 117159 - DNA, 25 bp, Saccharomyces pastorianus
gacagccataaacatctcgatgagc

SEQ ID NO: 117160 - DNA, 25 bp, Saccharomyces pastorianus
gaaatgttatttggtttcactccat

SEQ ID NO: 117161 - DNA, 25 bp, Saccharomyces pastorianus
ggtttcactccattcaaaggcgata

SEQ ID NO: 117162 - DNA, 25 bp, Saccharomyces pastorianus
gagacagactagtcaagacagccat

SEQ ID NO: 117163 - DNA, 25 bp, Saccharomyces pastorianus
aagtccaatggtctttgctgagaaa

SEQ ID NO: 117164 - DNA, 25 bp, Saccharomyces pastorianus
aaaggcattgcgtgggacaccgaca

SEQ ID NO: 117165 - DNA, 25 bp, Saccharomyces pastorianus
agcgataccccattcgatgagagta

SEQ ID NO: 117166 - DNA, 25 bp, Saccharomyces pastorianus
tcttttcgccatactattcctgata

SEQ ID NO: 117167 - DNA, 25 bp, Saccharomyces pastorianus
aaataagaccatattcccctgtggg

SEQ ID NO: 117168 - DNA, 25 bp, Saccharomyces pastorianus
gtgggacaccgacagccatagatat

SEQ ID NO: 117169 - DNA, 25 bp, Saccharomyces pastorianus
atttcccaatggctacactgacgat

SEQ ID NO: 117170 - DNA, 25 bp, Saccharomyces pastorianus
ttcccctgtgggttgatagcaaatt

SEQ ID NO: 117171 - DNA, 25 bp, Saccharomyces pastorianus
tgggattgcaactcttttcgccata

SEQ ID NO: 117172 - DNA, 25 bp, Saccharomyces pastorianus
gatacattcggcacaacgcttactg

SEQ ID NO: 117173 - DNA, 25 bp, Saccharomyces pastorianus
aatgcatccgatattgtaccgcccc

SEQ ID NO: 117174 - DNA, 25 bp, Saccharomyces pastorianus
tgctgcattgcccaacttctataag

SEQ ID NO: 117175 - DNA, 25 bp, Saccharomyces pastorianus
tctagcgcgacaccgagaagagctt

SEQ ID NO: 117176 - DNA, 25 bp, Saccharomyces pastorianus
tgagtcaagtatcgcattcccaaga

SEQ ID NO: 117177 - DNA, 25 bp, Saccharomyces pastorianus
tctcgccatccttttctaacagaag

SEQ ID NO: 117178 - DNA, 25 bp, Saccharomyces pastorianus
acacgcctgcgagtaaatcgtttca

SEQ ID NO: 117179 - DNA, 25 bp, Saccharomyces pastorianus
ataatcatacaagctcctctagcgc

SEQ ID NO: 117180 - DNA, 25 bp, Saccharomyces pastorianus
atgaaaatcagcatcctttccaggg

SEQ ID NO: 117181 - DNA, 25 bp, Saccharomyces pastorianus
gggaacacaccggagtacacgcctg

SEQ ID NO: 117182 - DNA, 25 bp, Saccharomyces pastorianus
agaagagcttcatcacggccgacta

SEQ ID NO: 117183 - DNA, 25 bp, Saccharomyces pastorianus
gaattcagggcaagtctcggtcgaa

SEQ ID NO: 117184 - DNA, 25 bp, Saccharomyces pastorianus
aagatcctatgggtacaccttcttc

SEQ ID NO: 117185 - DNA, 25 bp, Saccharomyces pastorianus
gactagaccttcagcaggccaagaa

SEQ ID NO: 117186 - DNA, 25 bp, Saccharomyces pastorianus
atcaagggaccaggcttactagcgc

SEQ ID NO: 117187 - DNA, 25 bp, Saccharomyces pastorianus
atggccgctactgttggttatccag

SEQ ID NO: 117188 - DNA, 25 bp, Saccharomyces pastorianus
ttactagcgccatactcaccagaga

SEQ ID NO: 117189 - DNA, 25 bp, Saccharomyces pastorianus
gctttagacactctatgtgcacgtt

SEQ ID NO: 117190 - DNA, 25 bp, Saccharomyces pastorianus
agaacatccactttagttgactatg

SEQ ID NO: 117191 - DNA, 25 bp, Saccharomyces pastorianus
aatcttcagcaagccaattgcctgg

SEQ ID NO: 117192 - DNA, 25 bp, Saccharomyces pastorianus
gagatatcaaggtttcccagaattt

SEQ ID NO: 117193 - DNA, 25 bp, Saccharomyces pastorianus
ttaggtgccaagtctacttctaaag

SEQ ID NO: 117194 - DNA, 25 bp, Saccharomyces pastorianus
tgattgcttccattgactcaaaggc

SEQ ID NO: 117195 - DNA, 25 bp, Saccharomyces pastorianus
ggtggttacagttcgatggccgcta

SEQ ID NO: 117196 - DNA, 25 bp, Saccharomyces pastorianus
taggcttgttctctgacgcaaagat

SEQ ID NO: 117197 - DNA, 25 bp, Saccharomyces pastorianus
cgagcaataatcctcctggcatatt

SEQ ID NO: 117198 - DNA, 25 bp, Saccharomyces pastorianus
gccgtcgtcgactttgaaactcaaa

SEQ ID NO: 117199 - DNA, 25 bp, Saccharomyces pastorianus
ggacggcttttatccaatctacatt

SEQ ID NO: 117200 - DNA, 25 bp, Saccharomyces pastorianus
agctgcagacaattttgccgtcgtc

SEQ ID NO: 117201 - DNA, 25 bp, Saccharomyces pastorianus
accagtattcagcaccgttaacaag

SEQ ID NO: 117202 - DNA, 25 bp, Saccharomyces pastorianus
ggcaataacgcttcaacaccttcat

SEQ ID NO: 117203 - DNA, 25 bp, Saccharomyces pastorianus
gatgacatgggcctcaaagttgatg

SEQ ID NO: 117204 - DNA, 25 bp, Saccharomyces pastorianus
atcggagggacaacgctagtgctaa

SEQ ID NO: 117205 - DNA, 25 bp, Saccharomyces pastorianus
aatagagccacaggtttccgacgcc

SEQ ID NO: 117206 - DNA, 25 bp, Saccharomyces pastorianus
atcagacctgaaacactacccaaga

SEQ ID NO: 117207 - DNA, 25 bp, Saccharomyces pastorianus
agcccgttgcgaatccaccaaagat

SEQ ID NO: 117208 - DNA, 25 bp, Saccharomyces pastorianus
ttgactgaacagattgcccgcgaga

SEQ ID NO: 117209 - DNA, 25 bp, Saccharomyces pastorianus
attccaccttacatgaaacctgcaa

SEQ ID NO: 117210 - DNA, 25 bp, Saccharomyces pastorianus
agaactctaggaagcgcgccggaaa

SEQ ID NO: 117211 - DNA, 25 bp, Saccharomyces pastorianus
gggtggtatacttctccagtattcc

SEQ ID NO: 117212 - DNA, 25 bp, Saccharomyces pastorianus
ggaaatctcgcaggccaacaaactg

SEQ ID NO: 117213 - DNA, 25 bp, Saccharomyces pastorianus
aatgctccctctgatatcaagcagc

SEQ ID NO: 117214 - DNA, 25 bp, Saccharomyces pastorianus
gtcgtgtggaaacaagccgtgccaa

SEQ ID NO: 117215 - DNA, 25 bp, Saccharomyces pastorianus
aggagagtctgcagattctcaccct

SEQ ID NO: 117216 - DNA, 25 bp, Saccharomyces pastorianus
tgcccgcgagaacgatatcagacag

SEQ ID NO: 117217 - DNA, 25 bp, Saccharomyces pastorianus
gattctcaccctcacagggaattta

SEQ ID NO: 117218 - DNA, 25 bp, Saccharomyces pastorianus
aagcagcaatcctctgggtccaaag

SEQ ID NO: 117219 - DNA, 25 bp, Saccharomyces pastorianus
gggattactgcatttgctttaccaa

SEQ ID NO: 117220 - DNA, 25 bp, Saccharomyces pastorianus
tactttgttctttggatggctcgtc

SEQ ID NO: 117221 - DNA, 25 bp, Saccharomyces pastorianus
gatatcttgcattttcacctttacc

SEQ ID NO: 117222 - DNA, 25 bp, Saccharomyces pastorianus
gctttagctgtcatcaactttggga

SEQ ID NO: 117223 - DNA, 25 bp, Saccharomyces pastorianus
tacctgttctgattggctagctgca

SEQ ID NO: 117224 - DNA, 25 bp, Saccharomyces pastorianus
gaatgttcccacacttattggagca

SEQ ID NO: 117225 - DNA, 25 bp, Saccharomyces pastorianus
gtgctggcattgttagtgactactt

SEQ ID NO: 117226 - DNA, 25 bp, Saccharomyces pastorianus
aatggatcgttaccccgatatggtt

SEQ ID NO: 117227 - DNA, 25 bp, Saccharomyces pastorianus
cttggcaagctatatacgtcgggtt

SEQ ID NO: 117228 - DNA, 25 bp, Saccharomyces pastorianus
tatacttctctatcgcaactgcaat

SEQ ID NO: 117229 - DNA, 25 bp, Saccharomyces pastorianus
tgatcggttgtatctgtgctggcat

SEQ ID NO: 117230 - DNA, 25 bp, Saccharomyces pastorianus
aaattgtgtcagcaggcctaaccgt

SEQ ID NO: 117231 - DNA, 25 bp, Saccharomyces pastorianus
tattctatggaccttgttctgcctg

SEQ ID NO: 117232 - DNA, 25 bp, Saccharomyces pastorianus
aaccgtcgtcgtatgtctatgattc

SEQ ID NO: 117233 - DNA, 25 bp, Saccharomyces pastorianus
taatgtcgtacgcagttccttcttt

SEQ ID NO: 117234 - DNA, 25 bp, Saccharomyces pastorianus
gcctggtgtttttatctttcccata

SEQ ID NO: 117235 - DNA, 25 bp, Saccharomyces pastorianus
atgcatcaccctgttactaatgtcg

SEQ ID NO: 117236 - DNA, 25 bp, Saccharomyces pastorianus
gtttaagtctccattatatgcccat

SEQ ID NO: 117237 - DNA, 25 bp, Saccharomyces pastorianus
atacactaccggttactgcaggaaa

SEQ ID NO: 117238 - DNA, 25 bp, Saccharomyces pastorianus
gctagcagttttgacacctgggttt

SEQ ID NO: 117239 - DNA, 25 bp, Saccharomyces pastorianus
tatgggatctagtaccgctttcaac

SEQ ID NO: 117240 - DNA, 25 bp, Saccharomyces pastorianus
gaatctcagtgtcttcctgcaatgt

SEQ ID NO: 117241 - DNA, 25 bp, Saccharomyces pastorianus
tactggtggctgcttcatgcatggc

SEQ ID NO: 117242 - DNA, 25 bp, Saccharomyces pastorianus
gacagatcccgagtggttccagaaa

SEQ ID NO: 117243 - DNA, 25 bp, Saccharomyces pastorianus
agaatctcttctccaaatagcccta

SEQ ID NO: 117244 - DNA, 25 bp, Saccharomyces pastorianus
gacaaagttgcttccagaatctctt

SEQ ID NO: 117245 - DNA, 25 bp, Saccharomyces pastorianus
atgggctcattggaactgttgttaa

SEQ ID NO: 117246 - DNA, 25 bp, Saccharomyces pastorianus
atcagtccttccgatcagatcaaag

SEQ ID NO: 117247 - DNA, 25 bp, Saccharomyces pastorianus
ctatggatatactactgcgtggcga

SEQ ID NO: 117248 - DNA, 25 bp, Saccharomyces pastorianus
gggagtacatatccgacctttcaac

SEQ ID NO: 117249 - DNA, 25 bp, Saccharomyces pastorianus
gttgttcctgacatattgtgcgttg

SEQ ID NO: 117250 - DNA, 25 bp, Saccharomyces pastorianus
caatgccctggcatgcagtgtggca

SEQ ID NO: 117251 - DNA, 25 bp, Saccharomyces pastorianus
gattttcgcattcaagcactgtcaa

SEQ ID NO: 117252 - DNA, 25 bp, Saccharomyces pastorianus
acagcggcttagtgatattcgataa

SEQ ID NO: 117253 - DNA, 25 bp, Saccharomyces pastorianus
atcacctgtgaaactcgaagctgtc

SEQ ID NO: 117254 - DNA, 25 bp, Saccharomyces pastorianus
actttttctgtctaccaatcgcaat

SEQ ID NO: 117255 - DNA, 25 bp, Saccharomyces pastorianus
cacacggacgtgtacggtaatcttt

SEQ ID NO: 117256 - DNA, 25 bp, Saccharomyces pastorianus
agcgaatgcgttatgtacagctatt

SEQ ID NO: 117257 - DNA, 25 bp, Saccharomyces pastorianus
ataatgctgcaattttcgcctatcc

SEQ ID NO: 117258 - DNA, 25 bp, Saccharomyces pastorianus
agtacaatctgttctacccagctat

SEQ ID NO: 117259 - DNA, 25 bp, Saccharomyces pastorianus
aaacattacatggacagcggcttag

SEQ ID NO: 117260 - DNA, 25 bp, Saccharomyces pastorianus
ataatacccgatgtcagcaagtccc

SEQ ID NO: 117261 - DNA, 25 bp, Saccharomyces pastorianus
tcgcctatccaagagtttttccatg

SEQ ID NO: 117262 - DNA, 25 bp, Saccharomyces pastorianus
acggaattactatcaatcacctgtg

SEQ ID NO: 117263 - DNA, 25 bp, Saccharomyces pastorianus
aggactagacatgctcaacgcgtgt

SEQ ID NO: 117264 - DNA, 25 bp, Saccharomyces pastorianus
agaactacctctttccctgaatgac

SEQ ID NO: 117265 - DNA, 25 bp, Saccharomyces pastorianus
attctggttcacttgccgtcgtatg

SEQ ID NO: 117266 - DNA, 25 bp, Saccharomyces pastorianus
ctattttcgtcgacaccgctagaaa

SEQ ID NO: 117267 - DNA, 25 bp, Saccharomyces pastorianus
tctccgatttagaatttgccacttt

SEQ ID NO: 117268 - DNA, 25 bp, Saccharomyces pastorianus
gaatgacacgtctatctccgattta

SEQ ID NO: 117269 - DNA, 25 bp, Saccharomyces pastorianus
tatgttgcggaccacctattttcgt

SEQ ID NO: 117270 - DNA, 25 bp, Saccharomyces pastorianus
aaggccccatctagtctaagcaatt

SEQ ID NO: 117271 - DNA, 25 bp, Saccharomyces pastorianus
gaaacgacagcagagaaggccccat

SEQ ID NO: 117272 - DNA, 25 bp, Saccharomyces pastorianus
ggtccaatttctcatgcccttgaat

SEQ ID NO: 117273 - DNA, 25 bp, Saccharomyces pastorianus
agattagctatcgaaggcccttatg

SEQ ID NO: 117274 - DNA, 25 bp, Saccharomyces pastorianus
gcttgcgtaactctagcttcaaaat

SEQ ID NO: 117275 - DNA, 25 bp, Saccharomyces pastorianus
cgctaccacatatgcttcttatatc

SEQ ID NO: 117276 - DNA, 25 bp, Saccharomyces pastorianus
tatcacagtcctatctcaagctaag

SEQ ID NO: 117277 - DNA, 25 bp, Saccharomyces pastorianus
aatttggttctatgtcctgctcaag

SEQ ID NO: 117278 - DNA, 25 bp, Saccharomyces pastorianus
gtcctgtggtttaccgcttgcgtaa

SEQ ID NO: 117279 - DNA, 25 bp, Saccharomyces pastorianus
tattcatactatttctcgctaccac

SEQ ID NO: 117280 - DNA, 25 bp, Saccharomyces pastorianus
ttccaacttggcttatctgtaacta

SEQ ID NO: 117281 - DNA, 25 bp, Saccharomyces pastorianus
tgatatcgtggaccgcttggagact

SEQ ID NO: 117282 - DNA, 25 bp, Saccharomyces pastorianus
gagatttttgcctgttctgttaata

SEQ ID NO: 117283 - DNA, 25 bp, Saccharomyces pastorianus
atgtcctgctcaagtatgccacggg

SEQ ID NO: 117284 - DNA, 25 bp, Saccharomyces pastorianus
gaaattgttcagaccgtcctgtggt

SEQ ID NO: 117285 - DNA, 25 bp, Saccharomyces pastorianus
taagcaggtggtgcagttccttaaa

SEQ ID NO: 117286 - DNA, 25 bp, Saccharomyces pastorianus
tgaggaggtttcactccagattacc

SEQ ID NO: 117287 - DNA, 25 bp, Saccharomyces pastorianus
aatatccgatcagtccagtacagct

SEQ ID NO: 117288 - DNA, 25 bp, Saccharomyces pastorianus
gcaagatttagttcaggtacttcct

SEQ ID NO: 117289 - DNA, 25 bp, Saccharomyces pastorianus
ttatcctttaagaacagcgtcactg

SEQ ID NO: 117290 - DNA, 25 bp, Saccharomyces pastorianus
gaagaacatcttttttacaggagca

SEQ ID NO: 117291 - DNA, 25 bp, Saccharomyces pastorianus
cagaatcaagctagccactctacaa

SEQ ID NO: 117292 - DNA, 25 bp, Saccharomyces pastorianus
ggctatatacttccagcaccgcaaa

SEQ ID NO: 117293 - DNA, 25 bp, Saccharomyces pastorianus
agcaccgcaaacgaggtaccattcg

SEQ ID NO: 117294 - DNA, 25 bp, Saccharomyces pastorianus
tatatcgtccgtatctgatcactgg

SEQ ID NO: 117295 - DNA, 25 bp, Saccharomyces pastorianus
agagctcaagcttcttttctattat

SEQ ID NO: 117296 - DNA, 25 bp, Saccharomyces pastorianus
atactggccattttgcgcttgaaac

SEQ ID NO: 117297 - DNA, 25 bp, Saccharomyces pastorianus
gatccagctaatgtcatatgccagt

SEQ ID NO: 117298 - DNA, 25 bp, Saccharomyces pastorianus
gtaccggccagaccgatattcaatt

SEQ ID NO: 117299 - DNA, 25 bp, Saccharomyces pastorianus
ccgccgcttatacgcttgatattgc

SEQ ID NO: 117300 - DNA, 25 bp, Saccharomyces pastorianus
tgatactatttttagcgttgccggg

SEQ ID NO: 117301 - DNA, 25 bp, Saccharomyces pastorianus
gagattcaaagattcctgtgctagt

SEQ ID NO: 117302 - DNA, 25 bp, Saccharomyces pastorianus
tattgcgctaattcagcgtaccggc

SEQ ID NO: 117303 - DNA, 25 bp, Saccharomyces pastorianus
tataaagttgtacccagcctttcaa

SEQ ID NO: 117304 - DNA, 25 bp, Saccharomyces pastorianus
ttagccttgaagtttccctccagaa

SEQ ID NO: 117305 - DNA, 25 bp, Saccharomyces pastorianus
ttatcccgtaccttgaagatccagc

SEQ ID NO: 117306 - DNA, 25 bp, Saccharomyces pastorianus
cagctatcgaatctgttgatcccgc

SEQ ID NO: 117307 - DNA, 25 bp, Saccharomyces pastorianus
atgcagattcattcccttgtgatat

SEQ ID NO: 117308 - DNA, 25 bp, Saccharomyces pastorianus
ataattggctcgtttcatccttcct

SEQ ID NO: 117309 - DNA, 25 bp, Saccharomyces pastorianus
atccttcctttgactactctcataa

SEQ ID NO: 117310 - DNA, 25 bp, Saccharomyces pastorianus
gctcaagtacggcacgtccatatgt

SEQ ID NO: 117311 - DNA, 25 bp, Saccharomyces pastorianus
ggacaataaatcctcactttggtta

SEQ ID NO: 117312 - DNA, 25 bp, Saccharomyces pastorianus
aaatcacatataatcgtttcgacac

SEQ ID NO: 117313 - DNA, 25 bp, Saccharomyces pastorianus
agaataatcattcctatatctacga

SEQ ID NO: 117314 - DNA, 25 bp, Saccharomyces pastorianus
aatgtcacccatggacatctggata

SEQ ID NO: 117315 - DNA, 25 bp, Saccharomyces pastorianus
caaccagctccctcagaaattttaa

SEQ ID NO: 117316 - DNA, 25 bp, Saccharomyces pastorianus
aaaaggcacgtctacctgctcaagt

SEQ ID NO: 117317 - DNA, 25 bp, Saccharomyces pastorianus
atattgcttctcctcatttcttaga

SEQ ID NO: 117318 - DNA, 25 bp, Saccharomyces pastorianus
gaaccaaccgttcatttgtacaccg

SEQ ID NO: 117319 - DNA, 25 bp, Saccharomyces pastorianus
caaggtctggatttgccgttcagca

SEQ ID NO: 117320 - DNA, 25 bp, Saccharomyces pastorianus
gttcgtggtgatgctactccaatta

SEQ ID NO: 117321 - DNA, 25 bp, Saccharomyces pastorianus
aggtctgctcgaacaaatcgcttga

SEQ ID NO: 117322 - DNA, 25 bp, Saccharomyces pastorianus
aagcccaccgttttgcatgaagata

SEQ ID NO: 117323 - DNA, 25 bp, Saccharomyces pastorianus
tcatcccgaatctcacatcaaattt

SEQ ID NO: 117324 - DNA, 25 bp, Saccharomyces pastorianus
tgttcttctgaagcgcggcgaggta

SEQ ID NO: 117325 - DNA, 25 bp, Saccharomyces pastorianus
gtttttaaggcctatcatcccgaat

SEQ ID NO: 117326 - DNA, 25 bp, Saccharomyces pastorianus
ttttgattcaactaagcccaccgtt

SEQ ID NO: 117327 - DNA, 25 bp, Saccharomyces pastorianus
gatactccggtctttgattgcactt

SEQ ID NO: 117328 - DNA, 25 bp, Saccharomyces pastorianus
gggcattgcttccaactggtaagat

SEQ ID NO: 117329 - DNA, 25 bp, Saccharomyces pastorianus
aaaaatctgcgtcgcctagatcatt

SEQ ID NO: 117330 - DNA, 25 bp, Saccharomyces pastorianus
tgagattttggtcccttacaccgaa

SEQ ID NO: 117331 - DNA, 25 bp, Saccharomyces pastorianus
aaacgagcagggtgctagccctgaa

SEQ ID NO: 117332 - DNA, 25 bp, Saccharomyces pastorianus
atgtctgacttctttatttgtgcaa

SEQ ID NO: 117333 - DNA, 25 bp, Saccharomyces pastorianus
acttccttcctgatatgtctgactt

SEQ ID NO: 117334 - DNA, 25 bp, Saccharomyces pastorianus
ctaaggaaacctatcgctgcaagct

SEQ ID NO: 117335 - DNA, 25 bp, Saccharomyces pastorianus
tgcaaatttatcaccagcatgcttg

SEQ ID NO: 117336 - DNA, 25 bp, Saccharomyces pastorianus
tgaacggaactttagtagccttttg

SEQ ID NO: 117337 - DNA, 25 bp, Saccharomyces pastorianus
ccgaagacgcggtgcaggtttattt

SEQ ID NO: 117338 - DNA, 25 bp, Saccharomyces pastorianus
atgggactgattgtcaggcattctt

SEQ ID NO: 117339 - DNA, 25 bp, Saccharomyces pastorianus
gaatcaggatttctttctctccact

SEQ ID NO: 117340 - DNA, 25 bp, Saccharomyces pastorianus
cagattaaagccagccatctccagt

SEQ ID NO: 117341 - DNA, 25 bp, Saccharomyces pastorianus
ctacccggttgaagttgctgaagcc

SEQ ID NO: 117342 - DNA, 25 bp, Saccharomyces pastorianus
tgaaacctacccggttgaagttgct

SEQ ID NO: 117343 - DNA, 25 bp, Saccharomyces pastorianus
ttccgcaaccaccactatagctcaa

SEQ ID NO: 117344 - DNA, 25 bp, Saccharomyces pastorianus
aaagccagccatctccagtgctcta

SEQ ID NO: 117345 - DNA, 25 bp, Saccharomyces pastorianus
ccggttgaagttgctgaagccgttt

SEQ ID NO: 117346 - DNA, 25 bp, Saccharomyces pastorianus
ggttgaagttgctgaagccgttttc

SEQ ID NO: 117347 - DNA, 25 bp, Saccharomyces pastorianus
cccggttgaagttgctgaagccgtt

SEQ ID NO: 117348 - DNA, 25 bp, Saccharomyces pastorianus
acccggttgaagttgctgaagccgt

SEQ ID NO: 117349 - DNA, 25 bp, Saccharomyces pastorianus
gaaacctacccggttgaagttgctg

SEQ ID NO: 117350 - DNA, 25 bp, Saccharomyces pastorianus
tacccggttgaagttgctgaagccg

SEQ ID NO: 117351 - DNA, 25 bp, Saccharomyces pastorianus
aaaacatggtcacgatattaatgag

SEQ ID NO: 117352 - DNA, 25 bp, Saccharomyces pastorianus
gaagagaatttctccgactttgtct

SEQ ID NO: 117353 - DNA, 25 bp, Saccharomyces pastorianus
tatcaccaaaaggacactagaaaat

SEQ ID NO: 117354 - DNA, 25 bp, Saccharomyces pastorianus
ggacactagaaaataagagattact

SEQ ID NO: 117355 - DNA, 25 bp, Saccharomyces pastorianus
agaatttctccgactttgtctttat

SEQ ID NO: 117356 - DNA, 25 bp, Saccharomyces pastorianus
gaatttctccgactttgtctttata

SEQ ID NO: 117357 - DNA, 25 bp, Saccharomyces pastorianus
gagaatttctccgactttgtcttta

SEQ ID NO: 117358 - DNA, 25 bp, Saccharomyces pastorianus
tctccgactttgtctttataaagtt

SEQ ID NO: 117359 - DNA, 25 bp, Saccharomyces pastorianus
aagagaatttctccgactttgtctt

SEQ ID NO: 117360 - DNA, 25 bp, Saccharomyces pastorianus
gaattcaaaaaacatggtcacgata

SEQ ID NO: 117361 - DNA, 25 bp, Saccharomyces pastorianus
tttctccgactttgtctttataaag

SEQ ID NO: 117362 - DNA, 25 bp, Saccharomyces pastorianus
aaaacatggtcacgatattaatgag

SEQ ID NO: 117363 - DNA, 25 bp, Saccharomyces pastorianus
tgtgaactcgatttatcagggcagt

SEQ ID NO: 117364 - DNA, 25 bp, Saccharomyces pastorianus
gaagagaatttctccgactttgtct

SEQ ID NO: 117365 - DNA, 25 bp, Saccharomyces pastorianus
tatcaccaaaaggacactagaaaat

SEQ ID NO: 117366 - DNA, 25 bp, Saccharomyces pastorianus
ggacactagaaaataagagattact

SEQ ID NO: 117367 - DNA, 25 bp, Saccharomyces pastorianus
gaatttctccgactttgtctttata

SEQ ID NO: 117368 - DNA, 25 bp, Saccharomyces pastorianus
tctccgactttgtctttataaagtt

SEQ ID NO: 117369 - DNA, 25 bp, Saccharomyces pastorianus
gagaatttctccgactttgtcttta

SEQ ID NO: 117370 - DNA, 25 bp, Saccharomyces pastorianus
gaattcaaaaaacatggtcacgata

SEQ ID NO: 117371 - DNA, 25 bp, Saccharomyces pastorianus
aatgagcttgttggcgacggtataa

SEQ ID NO: 117372 - DNA, 25 bp, Saccharomyces pastorianus
tttctccgactttgtctttataaag

SEQ ID NO: 117373 - DNA, 25 bp, Saccharomyces pastorianus
gagtacagtaacctagatctatcga

SEQ ID NO: 117374 - DNA, 25 bp, Saccharomyces pastorianus
tcaacaaatgcttgcgctcatccaa

SEQ ID NO: 117375 - DNA, 25 bp, Saccharomyces pastorianus
gaacccggcgatcagcaatctttga

SEQ ID NO: 117376 - DNA, 25 bp, Saccharomyces pastorianus
gctccgcatatgttgatatcaccag

SEQ ID NO: 117377 - DNA, 25 bp, Saccharomyces pastorianus
gctggctattccaagcatcttacta

SEQ ID NO: 117378 - DNA, 25 bp, Saccharomyces pastorianus
tatcaccagcggttaccaagtattt

SEQ ID NO: 117379 - DNA, 25 bp, Saccharomyces pastorianus
caactcctcctacgttaaacaatct

SEQ ID NO: 117380 - DNA, 25 bp, Saccharomyces pastorianus
gacattatgttcatccagttgcgaa

SEQ ID NO: 117381 - DNA, 25 bp, Saccharomyces pastorianus
aattgtactcattatgctccgcata

SEQ ID NO: 117382 - DNA, 25 bp, Saccharomyces pastorianus
gatctatcgacttataacggacctg

SEQ ID NO: 117383 - DNA, 25 bp, Saccharomyces pastorianus
acggacctgagccatataattctga

SEQ ID NO: 117384 - DNA, 25 bp, Saccharomyces pastorianus
aggtgcttccatcgctggtgctata

SEQ ID NO: 117385 - DNA, 25 bp, Saccharomyces pastorianus
cagcgactcggctctagtttaggga

SEQ ID NO: 117386 - DNA, 25 bp, Saccharomyces pastorianus
gttgtcggcattatgctgcatttct

SEQ ID NO: 117387 - DNA, 25 bp, Saccharomyces pastorianus
tgtcgatttcgtttgcggctttcaa

SEQ ID NO: 117388 - DNA, 25 bp, Saccharomyces pastorianus
ttctatcctcatccgaaagtctttg

SEQ ID NO: 117389 - DNA, 25 bp, Saccharomyces pastorianus
gtcactgggttactaatgtccgttt

SEQ ID NO: 117390 - DNA, 25 bp, Saccharomyces pastorianus
gtcgcttcttggtgtcctcggaatg

SEQ ID NO: 117391 - DNA, 25 bp, Saccharomyces pastorianus
ttctctgttttttcttgcgtggttt

SEQ ID NO: 117392 - DNA, 25 bp, Saccharomyces pastorianus
tggtgctatatggactcagcgtctg

SEQ ID NO: 117393 - DNA, 25 bp, Saccharomyces pastorianus
aaagtctttgtagtcgctgggtcgc

SEQ ID NO: 117394 - DNA, 25 bp, Saccharomyces pastorianus
gaagcaaagtctttccgcagaagaa

SEQ ID NO: 117395 - DNA, 25 bp, Saccharomyces pastorianus
acgagcatatttctgcgtcttctca

SEQ ID NO: 117396 - DNA, 25 bp, Saccharomyces pastorianus
gtgtcaccaacttcgggacatgttt

SEQ ID NO: 117397 - DNA, 25 bp, Saccharomyces pastorianus
cggtttgttgctagtgtgtttccat

SEQ ID NO: 117398 - DNA, 25 bp, Saccharomyces pastorianus
gagaagatgctagagcctgctccag

SEQ ID NO: 117399 - DNA, 25 bp, Saccharomyces pastorianus
taacgcattgccagggttgactagt

SEQ ID NO: 117400 - DNA, 25 bp, Saccharomyces pastorianus
gtcacaggtggtttgttctctggaa

SEQ ID NO: 117401 - DNA, 25 bp, Saccharomyces pastorianus
tgagaaccattcactccgttaacga

SEQ ID NO: 117402 - DNA, 25 bp, Saccharomyces pastorianus
gatgccgaggtttacgtcacaggtg

SEQ ID NO: 117403 - DNA, 25 bp, Saccharomyces pastorianus
agagtttgctagttctcgtcgtgac

SEQ ID NO: 117404 - DNA, 25 bp, Saccharomyces pastorianus
tcttctcacatgtcagcgattgctt

SEQ ID NO: 117405 - DNA, 25 bp, Saccharomyces pastorianus
aacatggctacggtttggcttacca

SEQ ID NO: 117406 - DNA, 25 bp, Saccharomyces pastorianus
gcaccctgacattcgtgacctaata

SEQ ID NO: 117407 - DNA, 25 bp, Saccharomyces pastorianus
gacggaatttgctgtatcgcaccct

SEQ ID NO: 117408 - DNA, 25 bp, Saccharomyces pastorianus
gtatcgccaacttcaggacatgtct

SEQ ID NO: 117409 - DNA, 25 bp, Saccharomyces pastorianus
tacgggtggcttgttttctggtaat

SEQ ID NO: 117410 - DNA, 25 bp, Saccharomyces pastorianus
gatgcagatgtctacgttacgggtg

SEQ ID NO: 117411 - DNA, 25 bp, Saccharomyces pastorianus
gcattgccaggattgaccagcttta

SEQ ID NO: 117412 - DNA, 25 bp, Saccharomyces pastorianus
tatttcagcatcttcacacgtttca

SEQ ID NO: 117413 - DNA, 25 bp, Saccharomyces pastorianus
gacgaggttatcatcccggaaacaa

SEQ ID NO: 117414 - DNA, 25 bp, Saccharomyces pastorianus
ttagaaccagcaccagtatcgccaa

SEQ ID NO: 117415 - DNA, 25 bp, Saccharomyces pastorianus
gatttgttgcaggtatctttccatt

SEQ ID NO: 117416 - DNA, 25 bp, Saccharomyces pastorianus
aaaacttggccacatttctttagca

SEQ ID NO: 117417 - DNA, 25 bp, Saccharomyces pastorianus
aatacccgagttttatggtggctat

SEQ ID NO: 117418 - DNA, 25 bp, Saccharomyces pastorianus
gatgttctgaacgatgacttccccg

SEQ ID NO: 117419 - DNA, 25 bp, Saccharomyces pastorianus
gaaggtcgctgtacaatgcaagata

SEQ ID NO: 117420 - DNA, 25 bp, Saccharomyces pastorianus
ggctcacttagtggcttttcaaaag

SEQ ID NO: 117421 - DNA, 25 bp, Saccharomyces pastorianus
gaagagtcttggaatcctgcaactt

SEQ ID NO: 117422 - DNA, 25 bp, Saccharomyces pastorianus
cacatcctgtgagttcgtcaacaac

SEQ ID NO: 117423 - DNA, 25 bp, Saccharomyces pastorianus
atgccgtcaatgcttactgtggttc

SEQ ID NO: 117424 - DNA, 25 bp, Saccharomyces pastorianus
aatccagtttatgtctttggtccgc

SEQ ID NO: 117425 - DNA, 25 bp, Saccharomyces pastorianus
gactggcgctacttataacactctt

SEQ ID NO: 117426 - DNA, 25 bp, Saccharomyces pastorianus
agaattgccaagttgatgccgtcaa

SEQ ID NO: 117427 - DNA, 25 bp, Saccharomyces pastorianus
ggtgccactctcgacaataccaaaa

SEQ ID NO: 117428 - DNA, 25 bp, Saccharomyces pastorianus
aaacacggatcttctaccagtttcg

SEQ ID NO: 117429 - DNA, 25 bp, Saccharomyces pastorianus
ttctaccagtttcgccccaagaaat

SEQ ID NO: 117430 - DNA, 25 bp, Saccharomyces pastorianus
gcaatagcagtaacagtgggaacgg

SEQ ID NO: 117431 - DNA, 25 bp, Saccharomyces pastorianus
gtttcgccccaagaaatggacattt

SEQ ID NO: 117432 - DNA, 25 bp, Saccharomyces pastorianus
tatcctataactgcggtaagacctt

SEQ ID NO: 117433 - DNA, 25 bp, Saccharomyces pastorianus
gcagtaataacattccaacaagcaa

SEQ ID NO: 117434 - DNA, 25 bp, Saccharomyces pastorianus
gagtatcaaggtgttctagcaatat

SEQ ID NO: 117435 - DNA, 25 bp, Saccharomyces pastorianus
agaaatggacatttttgattcacaa

SEQ ID NO: 117436 - DNA, 25 bp, Saccharomyces pastorianus
gctctaaatttcaacgtcattggga

SEQ ID NO: 117437 - DNA, 25 bp, Saccharomyces pastorianus
gtaagaccttaagcgggaaagacat

SEQ ID NO: 117438 - DNA, 25 bp, Saccharomyces pastorianus
aagggatatttcacaaaacacggat

SEQ ID NO: 117439 - DNA, 25 bp, Saccharomyces pastorianus
tcacacaccacatgcgtcactgtat

SEQ ID NO: 117440 - DNA, 25 bp, Saccharomyces pastorianus
gaatatcaaggtgttttggccatat

SEQ ID NO: 117441 - DNA, 25 bp, Saccharomyces pastorianus
agagacgtctcgcaaaatacaaatc

SEQ ID NO: 117442 - DNA, 25 bp, Saccharomyces pastorianus
ccgtctccccacaagaagtagatat

SEQ ID NO: 117443 - DNA, 25 bp, Saccharomyces pastorianus
aatcctgacaatttttctatgggca

SEQ ID NO: 117444 - DNA, 25 bp, Saccharomyces pastorianus
aacaatggttctgacaatagcaaca

SEQ ID NO: 117445 - DNA, 25 bp, Saccharomyces pastorianus
taattgcggcaaaactttaagtgga

SEQ ID NO: 117446 - DNA, 25 bp, Saccharomyces pastorianus
caaaatacaaatcttctacccgtct

SEQ ID NO: 117447 - DNA, 25 bp, Saccharomyces pastorianus
gaggatacacttaacccactagagt

SEQ ID NO: 117448 - DNA, 25 bp, Saccharomyces pastorianus
gggcattgttcccaatagtgtcgta

SEQ ID NO: 117449 - DNA, 25 bp, Saccharomyces pastorianus
agcagtggaaatgggaactcttata

SEQ ID NO: 117450 - DNA, 25 bp, Saccharomyces pastorianus
aatagtctcgctaatggcaaccaag

SEQ ID NO: 117451 - DNA, 25 bp, Saccharomyces pastorianus
aactcaacgtttgcagtgtcactaa

SEQ ID NO: 117452 - DNA, 25 bp, Saccharomyces pastorianus
attgcgacctccaattctaacggaa

SEQ ID NO: 117453 - DNA, 25 bp, Saccharomyces pastorianus
gatcctctatgggtaacgacaacaa

SEQ ID NO: 117454 - DNA, 25 bp, Saccharomyces pastorianus
gatatcaatgacagcaccactaact

SEQ ID NO: 117455 - DNA, 25 bp, Saccharomyces pastorianus
gcagcaagcattaagcgcggatatt

SEQ ID NO: 117456 - DNA, 25 bp, Saccharomyces pastorianus
ggatattaatccaactcctttcaat

SEQ ID NO: 117457 - DNA, 25 bp, Saccharomyces pastorianus
agctgccgcagtaggatcctctatg

SEQ ID NO: 117458 - DNA, 25 bp, Saccharomyces pastorianus
gcgtggaatttcgtcatctatttcg

SEQ ID NO: 117459 - DNA, 25 bp, Saccharomyces pastorianus
taacggaatgcgtggaatttcgtca

SEQ ID NO: 117460 - DNA, 25 bp, Saccharomyces pastorianus
ccaagtagctttggcggcagcggca

SEQ ID NO: 117461 - DNA, 25 bp, Saccharomyces pastorianus
atgctgcagattcgttcatcgtcct

SEQ ID NO: 117462 - DNA, 25 bp, Saccharomyces pastorianus
gaaaatacctcgctggtccaattgg

SEQ ID NO: 117463 - DNA, 25 bp, Saccharomyces pastorianus
gtggtctggctatggatcttcgtaa

SEQ ID NO: 117464 - DNA, 25 bp, Saccharomyces pastorianus
gaaaaacatcttctttgccgcatat

SEQ ID NO: 117465 - DNA, 25 bp, Saccharomyces pastorianus
caggcagctgctaaattctacgata

SEQ ID NO: 117466 - DNA, 25 bp, Saccharomyces pastorianus
atgcccagattgctgcgtttgtcaa

SEQ ID NO: 117467 - DNA, 25 bp, Saccharomyces pastorianus
cgaagagtatgttgcgctatccggt

SEQ ID NO: 117468 - DNA, 25 bp, Saccharomyces pastorianus
agttggccagcgacaacgtcgttag

SEQ ID NO: 117469 - DNA, 25 bp, Saccharomyces pastorianus
atccggtgttgtcacatctatcctt

SEQ ID NO: 117470 - DNA, 25 bp, Saccharomyces pastorianus
gaactcatctcttttggccaggcaa

SEQ ID NO: 117471 - DNA, 25 bp, Saccharomyces pastorianus
gaaagtgattcctgtaaccgttctt

SEQ ID NO: 117472 - DNA, 25 bp, Saccharomyces pastorianus
aattcgcatttcttcagtctagcca

SEQ ID NO: 117473 - DNA, 25 bp, Saccharomyces pastorianus
gatattcctggtcttggttatttgg

SEQ ID NO: 117474 - DNA, 25 bp, Saccharomyces pastorianus
gaactcctgccaccagatatgtttt

SEQ ID NO: 117475 - DNA, 25 bp, Saccharomyces pastorianus
aatccttgcaattgtgggtggtgac

SEQ ID NO: 117476 - DNA, 25 bp, Saccharomyces pastorianus
acctgtaccttttgtggaactcctg

SEQ ID NO: 117477 - DNA, 25 bp, Saccharomyces pastorianus
tggccaatgtcgttagtgagctact

SEQ ID NO: 117478 - DNA, 25 bp, Saccharomyces pastorianus
agctacttttgcaacgtgctcaaga

SEQ ID NO: 117479 - DNA, 25 bp, Saccharomyces pastorianus
gaacgctataaagaccgatccggtg

SEQ ID NO: 117480 - DNA, 25 bp, Saccharomyces pastorianus
acactaaactaaacctgccactatg

SEQ ID NO: 117481 - DNA, 25 bp, Saccharomyces pastorianus
gatgggacagagtttccttgtaaat

SEQ ID NO: 117482 - DNA, 25 bp, Saccharomyces pastorianus
tgatctcaatgcagactcgaccgga

SEQ ID NO: 117483 - DNA, 25 bp, Saccharomyces pastorianus
agaaatcttcgcatgtgaaaggtaa

SEQ ID NO: 117484 - DNA, 25 bp, Saccharomyces pastorianus
caagagcgtgaagcaatggccgtaa

SEQ ID NO: 117485 - DNA, 25 bp, Saccharomyces pastorianus
gatgaagcacgtaagactctagaag

SEQ ID NO: 117486 - DNA, 25 bp, Saccharomyces pastorianus
aaaaggttgtttctgatagcgacga

SEQ ID NO: 117487 - DNA, 25 bp, Saccharomyces pastorianus
ggcacaaaaactaatccaagagcgt

SEQ ID NO: 117488 - DNA, 25 bp, Saccharomyces pastorianus
aagagacttcaggatgaggcacaaa

SEQ ID NO: 117489 - DNA, 25 bp, Saccharomyces pastorianus
gtgattcagatctctccgacaaaga

SEQ ID NO: 117490 - DNA, 25 bp, Saccharomyces pastorianus
tggccgtaagcgaacatgatgtcaa

SEQ ID NO: 117491 - DNA, 25 bp, Saccharomyces pastorianus
ggatgaccgtgattcagatctctcc

SEQ ID NO: 117492 - DNA, 25 bp, Saccharomyces pastorianus
gtgaaaccaccatgaaaagtgcgtt

SEQ ID NO: 117493 - DNA, 25 bp, Saccharomyces pastorianus
gaagcacagatgagtgggtccgaaa

SEQ ID NO: 117494 - DNA, 25 bp, Saccharomyces pastorianus
gaaagatgcactgaagcaccgtaag

SEQ ID NO: 117495 - DNA, 25 bp, Saccharomyces pastorianus
gaggcagaacctgtatcacaattca

SEQ ID NO: 117496 - DNA, 25 bp, Saccharomyces pastorianus
tgcaatcgccatttttagtaggaca

SEQ ID NO: 117497 - DNA, 25 bp, Saccharomyces pastorianus
aagacgaaggaccagagcaccctac

SEQ ID NO: 117498 - DNA, 25 bp, Saccharomyces pastorianus
gctcccgtaccacatgtatctagag

SEQ ID NO: 117499 - DNA, 25 bp, Saccharomyces pastorianus
atttcttgtttttccctcatttgca

SEQ ID NO: 117500 - DNA, 25 bp, Saccharomyces pastorianus
gaagtaaacgctcccgaatacgaga

SEQ ID NO: 117501 - DNA, 25 bp, Saccharomyces pastorianus
ctaggtttgacatcggctcccgtac

SEQ ID NO: 117502 - DNA, 25 bp, Saccharomyces pastorianus
aagtaaatctgacaccctaggtttg

SEQ ID NO: 117503 - DNA, 25 bp, Saccharomyces pastorianus
attggacccgtgatatgaggcgcaa

SEQ ID NO: 117504 - DNA, 25 bp, Saccharomyces pastorianus
gaatttattccgactttcaccaagg

SEQ ID NO: 117505 - DNA, 25 bp, Saccharomyces pastorianus
gtaattcctattggtgtacttatca

SEQ ID NO: 117506 - DNA, 25 bp, Saccharomyces pastorianus
tcgatgaagcgcactccatgcacaa

SEQ ID NO: 117507 - DNA, 25 bp, Saccharomyces pastorianus
atgcccgttggaaccgtgtcattat

SEQ ID NO: 117508 - DNA, 25 bp, Saccharomyces pastorianus
aaagaatggcttcccttggtgtcga

SEQ ID NO: 117509 - DNA, 25 bp, Saccharomyces pastorianus
gaaactgttcctggatcctatgaat

SEQ ID NO: 117510 - DNA, 25 bp, Saccharomyces pastorianus
atgcccgtcatttttggcctcttaa

SEQ ID NO: 117511 - DNA, 25 bp, Saccharomyces pastorianus
catgactgaagaacaagccctggcc

SEQ ID NO: 117512 - DNA, 25 bp, Saccharomyces pastorianus
tggcctcttaacttgcatgactgaa

SEQ ID NO: 117513 - DNA, 25 bp, Saccharomyces pastorianus
aatcagggtcggtatcattcatgcc

SEQ ID NO: 117514 - DNA, 25 bp, Saccharomyces pastorianus
aatacatttcagattccaccactca

SEQ ID NO: 117515 - DNA, 25 bp, Saccharomyces pastorianus
aaagccgctagatgttgtaattcct

SEQ ID NO: 117516 - DNA, 25 bp, Saccharomyces pastorianus
ttttgactcaactacaggacgcgat

SEQ ID NO: 117517 - DNA, 25 bp, Saccharomyces pastorianus
gcttttcaataatgacttcccgtta

SEQ ID NO: 117518 - DNA, 25 bp, Saccharomyces pastorianus
aagtcgccgttggtctcaatgggaa

SEQ ID NO: 117519 - DNA, 25 bp, Saccharomyces pastorianus
gtgttggctgcacataccaagtttg

SEQ ID NO: 117520 - DNA, 25 bp, Saccharomyces pastorianus
aaacgacacggcagcgttcaaggat

SEQ ID NO: 117521 - DNA, 25 bp, Saccharomyces pastorianus
caggtgttttgcatgtttccgctaa

SEQ ID NO: 117522 - DNA, 25 bp, Saccharomyces pastorianus
gacgcgatgctggtttcgggatatt

SEQ ID NO: 117523 - DNA, 25 bp, Saccharomyces pastorianus
gagtggtgttcagaccgcatatata

SEQ ID NO: 117524 - DNA, 25 bp, Saccharomyces pastorianus
cagtgtttcactatcgtatatggct

SEQ ID NO: 117525 - DNA, 25 bp, Saccharomyces pastorianus
gttgcaaaatttctcctccagtgtt

SEQ ID NO: 117526 - DNA, 25 bp, Saccharomyces pastorianus
gtatatggcttttcccaatgcttca

SEQ ID NO: 117527 - DNA, 25 bp, Saccharomyces pastorianus
aattcaatgcggtttgggccgttca

SEQ ID NO: 117528 - DNA, 25 bp, Saccharomyces pastorianus
atacttggtgctgagttcgtcgaac

SEQ ID NO: 117529 - DNA, 25 bp, Saccharomyces pastorianus
attgggaaatggcttccccatcgct

SEQ ID NO: 117530 - DNA, 25 bp, Saccharomyces pastorianus
ttacttaccaagtgaggctcatccg

SEQ ID NO: 117531 - DNA, 25 bp, Saccharomyces pastorianus
gctggcctgttctgtaagcaactat

SEQ ID NO: 117532 - DNA, 25 bp, Saccharomyces pastorianus
ttgggacttttgatcattaccgctg

SEQ ID NO: 117533 - DNA, 25 bp, Saccharomyces pastorianus
gaggctcatccggatatttttacat

SEQ ID NO: 117534 - DNA, 25 bp, Saccharomyces pastorianus
cgctgccaccatcgtcaatgaaaaa

SEQ ID NO: 117535 - DNA, 25 bp, Saccharomyces pastorianus
atatcttacaaaagcgcttgcgcga

SEQ ID NO: 117536 - DNA, 25 bp, Saccharomyces pastorianus
aactatgggctcatgcttacttacc

SEQ ID NO: 117537 - DNA, 25 bp, Saccharomyces pastorianus
acgtatggtggtaatccgctggcct

SEQ ID NO: 117538 - DNA, 25 bp, Saccharomyces pastorianus
aagccagccgtcgataaatctgagt

SEQ ID NO: 117539 - DNA, 25 bp, Saccharomyces pastorianus
gatgaattatggctaagaactttac

SEQ ID NO: 117540 - DNA, 25 bp, Saccharomyces pastorianus
tggtctgatctattacgtcccgtca

SEQ ID NO: 117541 - DNA, 25 bp, Saccharomyces pastorianus
gaacaccaaatggactttatggtac

SEQ ID NO: 117542 - DNA, 25 bp, Saccharomyces pastorianus
tgatctattacgtcccgtcacttca

SEQ ID NO: 117543 - DNA, 25 bp, Saccharomyces pastorianus
ccgtcacttcattccaaactgttga

SEQ ID NO: 117544 - DNA, 25 bp, Saccharomyces pastorianus
ttgggctatcattcaaaatattcct

SEQ ID NO: 117545 - DNA, 25 bp, Saccharomyces pastorianus
aacgtttcagtcgatgataccacag

SEQ ID NO: 117546 - DNA, 25 bp, Saccharomyces pastorianus
tcaaaatattcctgagccacacgaa

SEQ ID NO: 117547 - DNA, 25 bp, Saccharomyces pastorianus
aaatctgagtcgtggtctgatctat

SEQ ID NO: 117548 - DNA, 25 bp, Saccharomyces pastorianus
tgaaacaattgatgaagacgactcc

SEQ ID NO: 117549 - DNA, 25 bp, Saccharomyces pastorianus
gacacgaaggtcacttccagtgcat

SEQ ID NO: 117550 - DNA, 25 bp, Saccharomyces pastorianus
agggaacaactgtcttcttcattga

SEQ ID NO: 117551 - DNA, 25 bp, Saccharomyces pastorianus
ggttctgagggtgaccaatcttcca

SEQ ID NO: 117552 - DNA, 25 bp, Saccharomyces pastorianus
ttgcgaacgctgtggtgagttaatc

SEQ ID NO: 117553 - DNA, 25 bp, Saccharomyces pastorianus
acgcaatcgctcacttcttgttatt

SEQ ID NO: 117554 - DNA, 25 bp, Saccharomyces pastorianus
caatcttccattcggttgttttgcg

SEQ ID NO: 117555 - DNA, 25 bp, Saccharomyces pastorianus
agcggaagctcagcagacgggcaat

SEQ ID NO: 117556 - DNA, 25 bp, Saccharomyces pastorianus
agaaaattatcgctgacccaccctg

SEQ ID NO: 117557 - DNA, 25 bp, Saccharomyces pastorianus
tggatactggtattgtgactcttgt

SEQ ID NO: 117558 - DNA, 25 bp, Saccharomyces pastorianus
cgtcttaaaatactgcccattcgaa

SEQ ID NO: 117559 - DNA, 25 bp, Saccharomyces pastorianus
atcgatacgaactcttcggcatcgc

SEQ ID NO: 117560 - DNA, 25 bp, Saccharomyces pastorianus
ccttatttgtgcttgttgggttgat

SEQ ID NO: 117561 - DNA, 25 bp, Saccharomyces pastorianus
tagcggcatcgttttggacaggttt

SEQ ID NO: 117562 - DNA, 25 bp, Saccharomyces pastorianus
tacaactggttcatggttctttagt

SEQ ID NO: 117563 - DNA, 25 bp, Saccharomyces pastorianus
ggtggtgcagccattccatatttgg

SEQ ID NO: 117564 - DNA, 25 bp, Saccharomyces pastorianus
agcgtacgcttttttaactctatct

SEQ ID NO: 117565 - DNA, 25 bp, Saccharomyces pastorianus
gaccattattcccaaacgcaagtat

SEQ ID NO: 117566 - DNA, 25 bp, Saccharomyces pastorianus
atttggctggagttattgcacacac

SEQ ID NO: 117567 - DNA, 25 bp, Saccharomyces pastorianus
atcctgctattttcttgtactcatt

SEQ ID NO: 117568 - DNA, 25 bp, Saccharomyces pastorianus
agctcagttttgtatttcgtcgtgt

SEQ ID NO: 117569 - DNA, 25 bp, Saccharomyces pastorianus
gcgagcccaggattttttgaacttt

SEQ ID NO: 117570 - DNA, 25 bp, Saccharomyces pastorianus
gttgtggtacgtttatcggaccatt

SEQ ID NO: 117571 - DNA, 25 bp, Saccharomyces pastorianus
gacgccacaaattcgaccatcgaaa

SEQ ID NO: 117572 - DNA, 25 bp, Saccharomyces pastorianus
acctttctcccttgatgagttcaat

SEQ ID NO: 117573 - DNA, 25 bp, Saccharomyces pastorianus
ttggtgcccataatcttacaggtgt

SEQ ID NO: 117574 - DNA, 25 bp, Saccharomyces pastorianus
gaggaggtttgttcgttcaatacag

SEQ ID NO: 117575 - DNA, 25 bp, Saccharomyces pastorianus
aaagtcattacccttcgacctgtgg

SEQ ID NO: 117576 - DNA, 25 bp, Saccharomyces pastorianus
gcgtcgttgagccacattctttaaa

SEQ ID NO: 117577 - DNA, 25 bp, Saccharomyces pastorianus
gatacgagcttatttttcttcaatg

SEQ ID NO: 117578 - DNA, 25 bp, Saccharomyces pastorianus
gctttctagtttcaatttggtgccc

SEQ ID NO: 117579 - DNA, 25 bp, Saccharomyces pastorianus
gacgtgggaatcttcgacgccacaa

SEQ ID NO: 117580 - DNA, 25 bp, Saccharomyces pastorianus
tcaatgttatcaatgcgggcgtcgt

SEQ ID NO: 117581 - DNA, 25 bp, Saccharomyces pastorianus
actattcgcagtttacacctttctc

SEQ ID NO: 117582 - DNA, 25 bp, Saccharomyces pastorianus
gaccaactgcccgatttagagagca

SEQ ID NO: 117583 - DNA, 25 bp, Saccharomyces pastorianus
attacttggaactcatcggcgtatt

SEQ ID NO: 117584 - DNA, 25 bp, Saccharomyces pastorianus
attacatgtgcgctagattacctaa

SEQ ID NO: 117585 - DNA, 25 bp, Saccharomyces pastorianus
gagagcatgggactcacccaacttt

SEQ ID NO: 117586 - DNA, 25 bp, Saccharomyces pastorianus
gaagtttttcacacagtccaatctg

SEQ ID NO: 117587 - DNA, 25 bp, Saccharomyces pastorianus
tcccgagagtcccttattatgctat

SEQ ID NO: 117588 - DNA, 25 bp, Saccharomyces pastorianus
attcttgtcaatattcaccacctac

SEQ ID NO: 117589 - DNA, 25 bp, Saccharomyces pastorianus
aaatccctcctgctaaattacttgg

SEQ ID NO: 117590 - DNA, 25 bp, Saccharomyces pastorianus
taatgagtacagaccccatcagtcc

SEQ ID NO: 117591 - DNA, 25 bp, Saccharomyces pastorianus
gcaagtacgaagcagacggctccaa

SEQ ID NO: 117592 - DNA, 25 bp, Saccharomyces pastorianus
ggtacacgacaaactcaccagcata

SEQ ID NO: 117593 - DNA, 25 bp, Saccharomyces pastorianus
tcaagacaagagacgcatgcccatt

SEQ ID NO: 117594 - DNA, 25 bp, Saccharomyces pastorianus
gcattgaatgccagccaaaggccat

SEQ ID NO: 117595 - DNA, 25 bp, Saccharomyces pastorianus
caagagacgcatgcccattagataa

SEQ ID NO: 117596 - DNA, 25 bp, Saccharomyces pastorianus
caaaggccatgacggacactgataa

SEQ ID NO: 117597 - DNA, 25 bp, Saccharomyces pastorianus
cacgctttccatttgcactgtatta

SEQ ID NO: 117598 - DNA, 25 bp, Saccharomyces pastorianus
aaagctcaaatcaaagtgcgccagt

SEQ ID NO: 117599 - DNA, 25 bp, Saccharomyces pastorianus
ttaagaaatggaccgcagtggcgtt

SEQ ID NO: 117600 - DNA, 25 bp, Saccharomyces pastorianus
caaagtgcgccagtggaaaccaaaa

SEQ ID NO: 117601 - DNA, 25 bp, Saccharomyces pastorianus
ctgtgctatttgcaggaaccatata

SEQ ID NO: 117602 - DNA, 25 bp, Saccharomyces pastorianus
cagtggcgttttggtcatgggatat

SEQ ID NO: 117603 - DNA, 25 bp, Saccharomyces pastorianus
gataatgaatgtgtagcagcctggg

SEQ ID NO: 117604 - DNA, 25 bp, Saccharomyces pastorianus
gatgattcagtacagctcttagcag

SEQ ID NO: 117605 - DNA, 25 bp, Saccharomyces pastorianus
aaaacaccggaattctgcctctatt

SEQ ID NO: 117606 - DNA, 25 bp, Saccharomyces pastorianus
aaagcctgacattggcagacctgga

SEQ ID NO: 117607 - DNA, 25 bp, Saccharomyces pastorianus
attgccaaggcaattccaggaaata

SEQ ID NO: 117608 - DNA, 25 bp, Saccharomyces pastorianus
acgattttagacaagcatggtgaca

SEQ ID NO: 117609 - DNA, 25 bp, Saccharomyces pastorianus
gctgtccaccaatgtcacgatttta

SEQ ID NO: 117610 - DNA, 25 bp, Saccharomyces pastorianus
tattctgtggaggtctggtttacga

SEQ ID NO: 117611 - DNA, 25 bp, Saccharomyces pastorianus
gagaagcttaaatcgcactaccaaa

SEQ ID NO: 117612 - DNA, 25 bp, Saccharomyces pastorianus
gacgccatcatgtgcggaagattat

SEQ ID NO: 117613 - DNA, 25 bp, Saccharomyces pastorianus
tattcacgaggatcagctgtccacc

SEQ ID NO: 117614 - DNA, 25 bp, Saccharomyces pastorianus
ggcccattgttacctcttgggttgt

SEQ ID NO: 117615 - DNA, 25 bp, Saccharomyces pastorianus
cgaagtccaagataaggttttgcaa

SEQ ID NO: 117616 - DNA, 25 bp, Saccharomyces pastorianus
taagatagcacaagacgaagtccaa

SEQ ID NO: 117617 - DNA, 25 bp, Saccharomyces pastorianus
ggttcaacctcagtaaagttgccaa

SEQ ID NO: 117618 - DNA, 25 bp, Saccharomyces pastorianus
tttagccctgacctggaggaagaac

SEQ ID NO: 117619 - DNA, 25 bp, Saccharomyces pastorianus
gtatggaacttaaggttcaacctca

SEQ ID NO: 117620 - DNA, 25 bp, Saccharomyces pastorianus
gaactagcacattctgtatggaact

SEQ ID NO: 117621 - DNA, 25 bp, Saccharomyces pastorianus
caaggctttaaatgtttggattcac

SEQ ID NO: 117622 - DNA, 25 bp, Saccharomyces pastorianus
gtgtagaatatttagccctgacctg

SEQ ID NO: 117623 - DNA, 25 bp, Saccharomyces pastorianus
ggaagaacatgtgcccttgattcaa

SEQ ID NO: 117624 - DNA, 25 bp, Saccharomyces pastorianus
aatgacgcgcaatcacagttagagc

SEQ ID NO: 117625 - DNA, 25 bp, Saccharomyces pastorianus
agttgccaaacggattcgcatggaa

SEQ ID NO: 117626 - DNA, 25 bp, Saccharomyces pastorianus
ttggttcttggccagctattggatt

SEQ ID NO: 117627 - DNA, 25 bp, Saccharomyces pastorianus
attgggtgtgctgcttttgctggcc

SEQ ID NO: 117628 - DNA, 25 bp, Saccharomyces pastorianus
ggtcccatacaaactacttagctca

SEQ ID NO: 117629 - DNA, 25 bp, Saccharomyces pastorianus
ttgctggccgtccttggttggttct

SEQ ID NO: 117630 - DNA, 25 bp, Saccharomyces pastorianus
taccaaataattatgcgcccaccac

SEQ ID NO: 117631 - DNA, 25 bp, Saccharomyces pastorianus
gagccggtccttcaaacaaatcagt

SEQ ID NO: 117632 - DNA, 25 bp, Saccharomyces pastorianus
gatatcgccctatacttgggtgata

SEQ ID NO: 117633 - DNA, 25 bp, Saccharomyces pastorianus
gcaacacttaacgaggccgctgaaa

SEQ ID NO: 117634 - DNA, 25 bp, Saccharomyces pastorianus
gaattccagtatcgcgtggtggttt

SEQ ID NO: 117635 - DNA, 25 bp, Saccharomyces pastorianus
aaagaatagaccctcctgcaacact

SEQ ID NO: 117636 - DNA, 25 bp, Saccharomyces pastorianus
cggttatttcgagcttcttgccaaa

SEQ ID NO: 117637 - DNA, 25 bp, Saccharomyces pastorianus
gggtctatctttcaggtgctctcta

SEQ ID NO: 117638 - DNA, 25 bp, Saccharomyces pastorianus
gttacgttcattgactggattcctt

SEQ ID NO: 117639 - DNA, 25 bp, Saccharomyces pastorianus
agattcccacctttcgtggtataag

SEQ ID NO: 117640 - DNA, 25 bp, Saccharomyces pastorianus
ggattccttttctttgcagcacact

SEQ ID NO: 117641 - DNA, 25 bp, Saccharomyces pastorianus
tctctatgctctaggcttttggata

SEQ ID NO: 117642 - DNA, 25 bp, Saccharomyces pastorianus
ggatatttctagacgcagtgctcta

SEQ ID NO: 117643 - DNA, 25 bp, Saccharomyces pastorianus
aggctccattgtcgtgttgatcatc

SEQ ID NO: 117644 - DNA, 25 bp, Saccharomyces pastorianus
ggcatggcaagctcgaaccgtttta

SEQ ID NO: 117645 - DNA, 25 bp, Saccharomyces pastorianus
ttatcgtcagatggtggtgccttcg

SEQ ID NO: 117646 - DNA, 25 bp, Saccharomyces pastorianus
atgttagcttatttcgcttcccctt

SEQ ID NO: 117647 - DNA, 25 bp, Saccharomyces pastorianus
ttattgcagggagctttatcgtcag

SEQ ID NO: 117648 - DNA, 25 bp, Saccharomyces pastorianus
taaactttgttcatgggctacctgc

SEQ ID NO: 117649 - DNA, 25 bp, Saccharomyces pastorianus
gtgcatctcaaaacacctttgtggt

SEQ ID NO: 117650 - DNA, 25 bp, Saccharomyces pastorianus
cgactatgtcaatcgcagttacgtt

SEQ ID NO: 117651 - DNA, 25 bp, Saccharomyces pastorianus
ggctccatcttgacatacgaaacct

SEQ ID NO: 117652 - DNA, 25 bp, Saccharomyces pastorianus
gggctgagccatatacaataaccat

SEQ ID NO: 117653 - DNA, 25 bp, Saccharomyces pastorianus
taacaacggatgcaaccccaaactg

SEQ ID NO: 117654 - DNA, 25 bp, Saccharomyces pastorianus
cagctcaattttacatggcgacgat

SEQ ID NO: 117655 - DNA, 25 bp, Saccharomyces pastorianus
gcagttacgttacatcacttgttga

SEQ ID NO: 117656 - DNA, 25 bp, Saccharomyces pastorianus
tagctgccccagcatcaaaaggata

SEQ ID NO: 117657 - DNA, 25 bp, Saccharomyces pastorianus
gcatgtctgtgactacggcgactat

SEQ ID NO: 117658 - DNA, 25 bp, Saccharomyces pastorianus
aagtatagggcccatggctccatct

SEQ ID NO: 117659 - DNA, 25 bp, Saccharomyces pastorianus
agctggtgggcattttggttcttta

SEQ ID NO: 117660 - DNA, 25 bp, Saccharomyces pastorianus
tgaaactattgtcccaatgcacgaa

SEQ ID NO: 117661 - DNA, 25 bp, Saccharomyces pastorianus
ctcgacgtgttgaccatggacttta

SEQ ID NO: 117662 - DNA, 25 bp, Saccharomyces pastorianus
tggcgagagttctcaattcctcgac

SEQ ID NO: 117663 - DNA, 25 bp, Saccharomyces pastorianus
gatactattttgtgtgatcctccat

SEQ ID NO: 117664 - DNA, 25 bp, Saccharomyces pastorianus
gtgatcctccatatggtatcagaga

SEQ ID NO: 117665 - DNA, 25 bp, Saccharomyces pastorianus
aaaccgtatgctctagattcattac

SEQ ID NO: 117666 - DNA, 25 bp, Saccharomyces pastorianus
tgcgtcgcgattatattccaaccaa

SEQ ID NO: 117667 - DNA, 25 bp, Saccharomyces pastorianus
tgatcttttacaatactcttccgaa

SEQ ID NO: 117668 - DNA, 25 bp, Saccharomyces pastorianus
gggtagcactttcaatggaccaagt

SEQ ID NO: 117669 - DNA, 25 bp, Saccharomyces pastorianus
tcttccgaaagattaccgattggcg

SEQ ID NO: 117670 - DNA, 25 bp, Saccharomyces pastorianus
gtaatgagctatattgaccgcacga

SEQ ID NO: 117671 - DNA, 25 bp, Saccharomyces pastorianus
atgtacatgtcatcccattttttgg

SEQ ID NO: 117672 - DNA, 25 bp, Saccharomyces pastorianus
acctccagcgggtagtcaatttact

SEQ ID NO: 117673 - DNA, 25 bp, Saccharomyces pastorianus
tgtaccattgggaggccactcatat

SEQ ID NO: 117674 - DNA, 25 bp, Saccharomyces pastorianus
gaagcaattccgtacagccaaaaac

SEQ ID NO: 117675 - DNA, 25 bp, Saccharomyces pastorianus
ttgaccgcacgaaaacactaataag

SEQ ID NO: 117676 - DNA, 25 bp, Saccharomyces pastorianus
gataagaccttcttctatacgaagc

SEQ ID NO: 117677 - DNA, 25 bp, Saccharomyces pastorianus
gaggccactcatattaacgttgacc

SEQ ID NO: 117678 - DNA, 25 bp, Saccharomyces pastorianus
tttctttcatctgtaccattgggag

SEQ ID NO: 117679 - DNA, 25 bp, Saccharomyces pastorianus
aacgttgaccactatatatgtacat

SEQ ID NO: 117680 - DNA, 25 bp, Saccharomyces pastorianus
gattggatgcaagaaccagtacata

SEQ ID NO: 117681 - DNA, 25 bp, Saccharomyces pastorianus
agatatttactatctggcgcagaca

SEQ ID NO: 117682 - DNA, 25 bp, Saccharomyces pastorianus
gagaataaagtcatgctaccgagat

SEQ ID NO: 117683 - DNA, 25 bp, Saccharomyces pastorianus
gcaagtatatctcttattcctgaat

SEQ ID NO: 117684 - DNA, 25 bp, Saccharomyces pastorianus
gaagttttccaacaagtacctcgag

SEQ ID NO: 117685 - DNA, 25 bp, Saccharomyces pastorianus
attcctgaattgtccgtagtactaa

SEQ ID NO: 117686 - DNA, 25 bp, Saccharomyces pastorianus
atactcctgtatctccataagtgac

SEQ ID NO: 117687 - DNA, 25 bp, Saccharomyces pastorianus
gatacttttctaccatcgtacatga

SEQ ID NO: 117688 - DNA, 25 bp, Saccharomyces pastorianus
aaaattgcacgattatactcctgta

SEQ ID NO: 117689 - DNA, 25 bp, Saccharomyces pastorianus
aggtgcttcgcacaactggaactaa

SEQ ID NO: 117690 - DNA, 25 bp, Saccharomyces pastorianus
aatttcgtcttatgatctctcccaa

SEQ ID NO: 117691 - DNA, 25 bp, Saccharomyces pastorianus
gagtacgttaacgatgtcgcgattt

SEQ ID NO: 117692 - DNA, 25 bp, Saccharomyces pastorianus
gtgttaacgggcagccttccataag

SEQ ID NO: 117693 - DNA, 25 bp, Saccharomyces pastorianus
ataatagcaccaacccttcagtgga

SEQ ID NO: 117694 - DNA, 25 bp, Saccharomyces pastorianus
ggaagctctttatcaaacggcatgg

SEQ ID NO: 117695 - DNA, 25 bp, Saccharomyces pastorianus
ggcagtctcctaatctccagaaagt

SEQ ID NO: 117696 - DNA, 25 bp, Saccharomyces pastorianus
aattccaatttagtcccatccttgg

SEQ ID NO: 117697 - DNA, 25 bp, Saccharomyces pastorianus
gagtattcagcaaatccacctaaca

SEQ ID NO: 117698 - DNA, 25 bp, Saccharomyces pastorianus
ataagcagcaactcttctcaatcac

SEQ ID NO: 117699 - DNA, 25 bp, Saccharomyces pastorianus
aactggccttaatcgtgggtattca

SEQ ID NO: 117700 - DNA, 25 bp, Saccharomyces pastorianus
gtctgcacaagacccttcgaattta

SEQ ID NO: 117701 - DNA, 25 bp, Saccharomyces pastorianus
gaatttatcaagtcaccacactctg

SEQ ID NO: 117702 - DNA, 25 bp, Saccharomyces pastorianus
tcagtggacactcggttcaacaagc

SEQ ID NO: 117703 - DNA, 25 bp, Saccharomyces pastorianus
gaacccacctgctaagaaggctaaa

SEQ ID NO: 117704 - DNA, 25 bp, Saccharomyces pastorianus
aacctgaaagtgaaccggccaagag

SEQ ID NO: 117705 - DNA, 25 bp, Saccharomyces pastorianus
atgaaataacgaacccacctgctaa

SEQ ID NO: 117706 - DNA, 25 bp, Saccharomyces pastorianus
ggatggttatccagtatactttcca

SEQ ID NO: 117707 - DNA, 25 bp, Saccharomyces pastorianus
aatccattttcattggccattcaag

SEQ ID NO: 117708 - DNA, 25 bp, Saccharomyces pastorianus
gttgcactgggatcatcggatggtt

SEQ ID NO: 117709 - DNA, 25 bp, Saccharomyces pastorianus
gccgaagatacagttacctccacag

SEQ ID NO: 117710 - DNA, 25 bp, Saccharomyces pastorianus
aaataacatcagtcgagggtccttt

SEQ ID NO: 117711 - DNA, 25 bp, Saccharomyces pastorianus
agggtcctttaacattcgagatatt

SEQ ID NO: 117712 - DNA, 25 bp, Saccharomyces pastorianus
caccgctaccacaacagatgatgat

SEQ ID NO: 117713 - DNA, 25 bp, Saccharomyces pastorianus
tatatcactgtctctagcgaagatg

SEQ ID NO: 117714 - DNA, 25 bp, Saccharomyces pastorianus
cgggcttgcccttagatcaatttat

SEQ ID NO: 117715 - DNA, 25 bp, Saccharomyces pastorianus
acgttacgatagagccagcgggcca

SEQ ID NO: 117716 - DNA, 25 bp, Saccharomyces pastorianus
cggcaaacgtgccaatttcctaatg

SEQ ID NO: 117717 - DNA, 25 bp, Saccharomyces pastorianus
ccctctgtttgtacttcaaccaatg

SEQ ID NO: 117718 - DNA, 25 bp, Saccharomyces pastorianus
aagggcagcgattctatagtaattc

SEQ ID NO: 117719 - DNA, 25 bp, Saccharomyces pastorianus
gtactttgacactttctggtttatc

SEQ ID NO: 117720 - DNA, 25 bp, Saccharomyces pastorianus
cggcaggtttcgatactacgctaag

SEQ ID NO: 117721 - DNA, 25 bp, Saccharomyces pastorianus
tcaaactgtgcttggattcctcagg

SEQ ID NO: 117722 - DNA, 25 bp, Saccharomyces pastorianus
tttcctaatgacaccactgctgaga

SEQ ID NO: 117723 - DNA, 25 bp, Saccharomyces pastorianus
gagcacttaacgtaacgggcttgcc

SEQ ID NO: 117724 - DNA, 25 bp, Saccharomyces pastorianus
agaaatctgacttcgtccaggcaag

SEQ ID NO: 117725 - DNA, 25 bp, Saccharomyces pastorianus
gataatatccttctgaattcccaag

SEQ ID NO: 117726 - DNA, 25 bp, Saccharomyces pastorianus
attgcgtcatccagagtcagtgtgc

SEQ ID NO: 117727 - DNA, 25 bp, Saccharomyces pastorianus
atgtcgaatcaagagcatccgtgag

SEQ ID NO: 117728 - DNA, 25 bp, Saccharomyces pastorianus
gaaggcgctgtatctgatagctaac

SEQ ID NO: 117729 - DNA, 25 bp, Saccharomyces pastorianus
ggtgaaccgccttacctaaatgagg

SEQ ID NO: 117730 - DNA, 25 bp, Saccharomyces pastorianus
ggagcaataccggtgagcactcatt

SEQ ID NO: 117731 - DNA, 25 bp, Saccharomyces pastorianus
gcgtgccacaatggtaggtactcca

SEQ ID NO: 117732 - DNA, 25 bp, Saccharomyces pastorianus
aagtcgacgtttggtctctagggat

SEQ ID NO: 117733 - DNA, 25 bp, Saccharomyces pastorianus
tacagacttcggtttttgtgtggaa

SEQ ID NO: 117734 - DNA, 25 bp, Saccharomyces pastorianus
gtgagcactcattgccgttaaacga

SEQ ID NO: 117735 - DNA, 25 bp, Saccharomyces pastorianus
aatttttgtcaatggcatgcagccc

SEQ ID NO: 117736 - DNA, 25 bp, Saccharomyces pastorianus
aaacattgctgatggtgtcgaacaa

SEQ ID NO: 117737 - DNA, 25 bp, Saccharomyces pastorianus
agctgaagcttctatcgacaaccta

SEQ ID NO: 117738 - DNA, 25 bp, Saccharomyces pastorianus
gcttccgccgccgtcagtgagaaga

SEQ ID NO: 117739 - DNA, 25 bp, Saccharomyces pastorianus
gccgcccaagatgtccaacaaaagt

SEQ ID NO: 117740 - DNA, 25 bp, Saccharomyces pastorianus
gaagcttctatcgacaacctaaaaa

SEQ ID NO: 117741 - DNA, 25 bp, Saccharomyces pastorianus
taaaaaatgaagctcctccagaagg

SEQ ID NO: 117742 - DNA, 25 bp, Saccharomyces pastorianus
aaagctgaaactgccgcccaagatg

SEQ ID NO: 117743 - DNA, 25 bp, Saccharomyces pastorianus
aaaagaagaccgaagctgccaacaa

SEQ ID NO: 117744 - DNA, 25 bp, Saccharomyces pastorianus
aactaagaagcaagcttccgccgcc

SEQ ID NO: 117745 - DNA, 25 bp, Saccharomyces pastorianus
gaatctttgcaaaacaagggccaag

SEQ ID NO: 117746 - DNA, 25 bp, Saccharomyces pastorianus
aagctcctccagaaggtgaacaggt

SEQ ID NO: 117747 - DNA, 25 bp, Saccharomyces pastorianus
catatacctgaaaagcttgagttac

SEQ ID NO: 117748 - DNA, 25 bp, Saccharomyces pastorianus
atgaggcaaaaaccggcagcagcag

SEQ ID NO: 117749 - DNA, 25 bp, Saccharomyces pastorianus
aagagctatatttgacgaactggta

SEQ ID NO: 117750 - DNA, 25 bp, Saccharomyces pastorianus
tacaaccgggattgtccgagattaa

SEQ ID NO: 117751 - DNA, 25 bp, Saccharomyces pastorianus
agcagtagtacctgacctgcaaccc

SEQ ID NO: 117752 - DNA, 25 bp, Saccharomyces pastorianus
tgcaaccccaggaaagtcggtcaga

SEQ ID NO: 117753 - DNA, 25 bp, Saccharomyces pastorianus
gcagcgatcccgtacaagaacaaaa

SEQ ID NO: 117754 - DNA, 25 bp, Saccharomyces pastorianus
gagatacaaacaatacaaccgggat

SEQ ID NO: 117755 - DNA, 25 bp, Saccharomyces pastorianus
atacgtataaatcatgtttcatctg

SEQ ID NO: 117756 - DNA, 25 bp, Saccharomyces pastorianus
gtcggtcagaactaatcatatacct

SEQ ID NO: 117757 - DNA, 25 bp, Saccharomyces pastorianus
aaggaaacgcaggtctaagaagatt

SEQ ID NO: 117758 - DNA, 25 bp, Saccharomyces pastorianus
tgccagttggtcgtacttgaggttt

SEQ ID NO: 117759 - DNA, 25 bp, Saccharomyces pastorianus
gctcaattgttctccatttgggtta

SEQ ID NO: 117760 - DNA, 25 bp, Saccharomyces pastorianus
tggtttcatcattttgctcaattgt

SEQ ID NO: 117761 - DNA, 25 bp, Saccharomyces pastorianus
attggtcggcgatgcatctgatact

SEQ ID NO: 117762 - DNA, 25 bp, Saccharomyces pastorianus
taatcggtttccctatcatttatag

SEQ ID NO: 117763 - DNA, 25 bp, Saccharomyces pastorianus
cttgaattgtccctctttgccaaca

SEQ ID NO: 117764 - DNA, 25 bp, Saccharomyces pastorianus
gaagacacctcaatttttggccaaa

SEQ ID NO: 117765 - DNA, 25 bp, Saccharomyces pastorianus
agccgattttgaggccgattttcaa

SEQ ID NO: 117766 - DNA, 25 bp, Saccharomyces pastorianus
tttttccagaaacttgcacccttga

SEQ ID NO: 117767 - DNA, 25 bp, Saccharomyces pastorianus
gatttacttctttcctgatctaatt

SEQ ID NO: 117768 - DNA, 25 bp, Saccharomyces pastorianus
aaggctggatattcccttagacggg

SEQ ID NO: 117769 - DNA, 25 bp, Saccharomyces pastorianus
gtagtcctagttcaaacaccagtgg

SEQ ID NO: 117770 - DNA, 25 bp, Saccharomyces pastorianus
gaaccttccatcgacagtttttgaa

SEQ ID NO: 117771 - DNA, 25 bp, Saccharomyces pastorianus
ttcgacttcgaagcagcgtctgagt

SEQ ID NO: 117772 - DNA, 25 bp, Saccharomyces pastorianus
ctggcttacaagatgctacggttca

SEQ ID NO: 117773 - DNA, 25 bp, Saccharomyces pastorianus
ggtggagccattgccggtattgtta

SEQ ID NO: 117774 - DNA, 25 bp, Saccharomyces pastorianus
attatcagccctattcgttcggtga

SEQ ID NO: 117775 - DNA, 25 bp, Saccharomyces pastorianus
actgctgccgcctcaaataatagat

SEQ ID NO: 117776 - DNA, 25 bp, Saccharomyces pastorianus
gaaatcgcacgaccaattagacttg

SEQ ID NO: 117777 - DNA, 25 bp, Saccharomyces pastorianus
aagtggtaaaccctgataatcctga

SEQ ID NO: 117778 - DNA, 25 bp, Saccharomyces pastorianus
gccaattctttacccgacatgatga

SEQ ID NO: 117779 - DNA, 25 bp, Saccharomyces pastorianus
aacgatcttctgaggtagctactgc

SEQ ID NO: 117780 - DNA, 25 bp, Saccharomyces pastorianus
acattttactgattgggctacctgg

SEQ ID NO: 117781 - DNA, 25 bp, Saccharomyces pastorianus
aatcggccgtaggtacattttactg

SEQ ID NO: 117782 - DNA, 25 bp, Saccharomyces pastorianus
ggtgctgcccatcataaactcaaat

SEQ ID NO: 117783 - DNA, 25 bp, Saccharomyces pastorianus
gccggtgtagcatgtttatcaacaa

SEQ ID NO: 117784 - DNA, 25 bp, Saccharomyces pastorianus
tgtggcgctggttatatgtgctata

SEQ ID NO: 117785 - DNA, 25 bp, Saccharomyces pastorianus
ggctacctggtatgactgtggcgct

SEQ ID NO: 117786 - DNA, 25 bp, Saccharomyces pastorianus
aggttctttagtcattgcgtctacg

SEQ ID NO: 117787 - DNA, 25 bp, Saccharomyces pastorianus
cattgcgtctacgtttctgactatg

SEQ ID NO: 117788 - DNA, 25 bp, Saccharomyces pastorianus
aggtacattttcattctttgccggt

SEQ ID NO: 117789 - DNA, 25 bp, Saccharomyces pastorianus
gctatagcgttccatttcctaggta

SEQ ID NO: 117790 - DNA, 25 bp, Saccharomyces pastorianus
tatgcagccttttatgccctcggta

SEQ ID NO: 117791 - DNA, 25 bp, Saccharomyces pastorianus
gaacatcatcatccggaagagccat

SEQ ID NO: 117792 - DNA, 25 bp, Saccharomyces pastorianus
gctccagtaccgttaaccagtaaat

SEQ ID NO: 117793 - DNA, 25 bp, Saccharomyces pastorianus
acaagtcatttcttttgagcactga

SEQ ID NO: 117794 - DNA, 25 bp, Saccharomyces pastorianus
gaagatttctagtatttgccaagag

SEQ ID NO: 117795 - DNA, 25 bp, Saccharomyces pastorianus
gtgattcagacaccttacaagtcat

SEQ ID NO: 117796 - DNA, 25 bp, Saccharomyces pastorianus
catagccaatctccatcaatttcaa

SEQ ID NO: 117797 - DNA, 25 bp, Saccharomyces pastorianus
aaaaaacacgctgctccagtaccgt

SEQ ID NO: 117798 - DNA, 25 bp, Saccharomyces pastorianus
gaggcagccaaatccagttacaaat

SEQ ID NO: 117799 - DNA, 25 bp, Saccharomyces pastorianus
ttcgccaaaacctaggacgcatagc

SEQ ID NO: 117800 - DNA, 25 bp, Saccharomyces pastorianus
aaagatcttccaacttccaagtctc

SEQ ID NO: 117801 - DNA, 25 bp, Saccharomyces pastorianus
aagcacaattcgttttctgaatcga

SEQ ID NO: 117802 - DNA, 25 bp, Saccharomyces pastorianus
atggctcttccggatgatgatgttc

SEQ ID NO: 117803 - DNA, 25 bp, Saccharomyces pastorianus
gctatgcgtcctaggttttggcgaa

SEQ ID NO: 117804 - DNA, 25 bp, Saccharomyces pastorianus
gatgttctcctttcaattacctttt

SEQ ID NO: 117805 - DNA, 25 bp, Saccharomyces pastorianus
gaattttgttccttggcattgataa

SEQ ID NO: 117806 - DNA, 25 bp, Saccharomyces pastorianus
aacggtactggagcagcgtgttttt

SEQ ID NO: 117807 - DNA, 25 bp, Saccharomyces pastorianus
gaaatttgttcctgtgtttagacct

SEQ ID NO: 117808 - DNA, 25 bp, Saccharomyces pastorianus
ttaccttttggtttctttgcaacag

SEQ ID NO: 117809 - DNA, 25 bp, Saccharomyces pastorianus
taattacgacctcttcgattttgca

SEQ ID NO: 117810 - DNA, 25 bp, Saccharomyces pastorianus
gtaacttgtctttttggcaatccgt

SEQ ID NO: 117811 - DNA, 25 bp, Saccharomyces pastorianus
aattctgcttgatctgttgctctta

SEQ ID NO: 117812 - DNA, 25 bp, Saccharomyces pastorianus
gcaacagttctttctctattttatt

SEQ ID NO: 117813 - DNA, 25 bp, Saccharomyces pastorianus
taccgcggcgctgatattattaaat

SEQ ID NO: 117814 - DNA, 25 bp, Saccharomyces pastorianus
aataacgtctatcccatttaacttg

SEQ ID NO: 117815 - DNA, 25 bp, Saccharomyces pastorianus
gttaatccaaggtgccatcagtagt

SEQ ID NO: 117816 - DNA, 25 bp, Saccharomyces pastorianus
gattggcctatggtgccagcatgtt

SEQ ID NO: 117817 - DNA, 25 bp, Saccharomyces pastorianus
aaagcgttgcctttgtgagctgtca

SEQ ID NO: 117818 - DNA, 25 bp, Saccharomyces pastorianus
ggattcaatatttaccgcggcgctg

SEQ ID NO: 117819 - DNA, 25 bp, Saccharomyces pastorianus
gtctcattggcttccgaatatctag

SEQ ID NO: 117820 - DNA, 25 bp, Saccharomyces pastorianus
gaatacgctattgtctcattggctt

SEQ ID NO: 117821 - DNA, 25 bp, Saccharomyces pastorianus
aggctggctactatcgaatgcggat

SEQ ID NO: 117822 - DNA, 25 bp, Saccharomyces pastorianus
tgcggatactttgaaacagccctgt

SEQ ID NO: 117823 - DNA, 25 bp, Saccharomyces pastorianus
acagccctgtccaaatatgttgatg

SEQ ID NO: 117824 - DNA, 25 bp, Saccharomyces pastorianus
ttgaagtactccaaacctgctttgc

SEQ ID NO: 117825 - DNA, 25 bp, Saccharomyces pastorianus
cgcattcccaagttcatttcctaat

SEQ ID NO: 117826 - DNA, 25 bp, Saccharomyces pastorianus
ttgattccatgtgctattgacctag

SEQ ID NO: 117827 - DNA, 25 bp, Saccharomyces pastorianus
tttgcttcattccagattctttcca

SEQ ID NO: 117828 - DNA, 25 bp, Saccharomyces pastorianus
acgcattcagcggtggtcaagtgtc

SEQ ID NO: 117829 - DNA, 25 bp, Saccharomyces pastorianus
gcaagaattcgttaaggcgttccag

SEQ ID NO: 117830 - DNA, 25 bp, Saccharomyces pastorianus
gaaactgtgtatcgagactctgcaa

SEQ ID NO: 117831 - DNA, 25 bp, Saccharomyces pastorianus
aacgcagagctcaggtggacgaaga

SEQ ID NO: 117832 - DNA, 25 bp, Saccharomyces pastorianus
tttgcctccattcaaattgctaccg

SEQ ID NO: 117833 - DNA, 25 bp, Saccharomyces pastorianus
tgtccgccgacctacatagagaatt

SEQ ID NO: 117834 - DNA, 25 bp, Saccharomyces pastorianus
attcatggtcccacataagttggtt

SEQ ID NO: 117835 - DNA, 25 bp, Saccharomyces pastorianus
gagcacgattgttccgatgtcggta

SEQ ID NO: 117836 - DNA, 25 bp, Saccharomyces pastorianus
attttgagtgaatcgctcgcgagac

SEQ ID NO: 117837 - DNA, 25 bp, Saccharomyces pastorianus
gactcgcgattgtatcatggtagca

SEQ ID NO: 117838 - DNA, 25 bp, Saccharomyces pastorianus
gattgtcccaaagggtactcatcat

SEQ ID NO: 117839 - DNA, 25 bp, Saccharomyces pastorianus
gcattgttggtcgaggttaaatccc

SEQ ID NO: 117840 - DNA, 25 bp, Saccharomyces pastorianus
ggaaatccttgcctggttcaatgac

SEQ ID NO: 117841 - DNA, 25 bp, Saccharomyces pastorianus
aaggctctggaggatgttactggac

SEQ ID NO: 117842 - DNA, 25 bp, Saccharomyces pastorianus
ttcaagggatcgatctgactcgcga

SEQ ID NO: 117843 - DNA, 25 bp, Saccharomyces pastorianus
gaccatgtacctcccatatcaaggg

SEQ ID NO: 117844 - DNA, 25 bp, Saccharomyces pastorianus
agatctcatctcatggtttactaca

SEQ ID NO: 117845 - DNA, 25 bp, Saccharomyces pastorianus
actacagtggccaatttcgcttgtt

SEQ ID NO: 117846 - DNA, 25 bp, Saccharomyces pastorianus
tgtgcagcgatacaatcagttacgt

SEQ ID NO: 117847 - DNA, 25 bp, Saccharomyces pastorianus
aaacgatggtctttcaccagtctca

SEQ ID NO: 117848 - DNA, 25 bp, Saccharomyces pastorianus
ccatccattctgcaaagggtttaga

SEQ ID NO: 117849 - DNA, 25 bp, Saccharomyces pastorianus
caggcattacaaactaccggtccgg

SEQ ID NO: 117850 - DNA, 25 bp, Saccharomyces pastorianus
gagactggtcagtaaatcatcacca

SEQ ID NO: 117851 - DNA, 25 bp, Saccharomyces pastorianus
taaaactatctaccatccattctgc

SEQ ID NO: 117852 - DNA, 25 bp, Saccharomyces pastorianus
ggagcatgtccaatttcccaatgga

SEQ ID NO: 117853 - DNA, 25 bp, Saccharomyces pastorianus
tcaccagtctcagcaggcattacaa

SEQ ID NO: 117854 - DNA, 25 bp, Saccharomyces pastorianus
acctacttccaatccttaagtgatg

SEQ ID NO: 117855 - DNA, 25 bp, Saccharomyces pastorianus
tgaaccgatctgtatgtgacgttaa

SEQ ID NO: 117856 - DNA, 25 bp, Saccharomyces pastorianus
tttcccaatggatacaaacgccctt

SEQ ID NO: 117857 - DNA, 25 bp, Saccharomyces pastorianus
gttggaacgtacttgcaattggcta

SEQ ID NO: 117858 - DNA, 25 bp, Saccharomyces pastorianus
gaagcaatcatttttacagcggagg

SEQ ID NO: 117859 - DNA, 25 bp, Saccharomyces pastorianus
agtacagtagcaggacacggtttag

SEQ ID NO: 117860 - DNA, 25 bp, Saccharomyces pastorianus
aggaccatggagctatattcgaact

SEQ ID NO: 117861 - DNA, 25 bp, Saccharomyces pastorianus
atgttactagcctccaacctagaag

SEQ ID NO: 117862 - DNA, 25 bp, Saccharomyces pastorianus
atcggtttgacccatatgagaattc

SEQ ID NO: 117863 - DNA, 25 bp, Saccharomyces pastorianus
aggcggattccatgactgctggtgc

SEQ ID NO: 117864 - DNA, 25 bp, Saccharomyces pastorianus
caaaattgttgattctcctcaccct

SEQ ID NO: 117865 - DNA, 25 bp, Saccharomyces pastorianus
aacaagatcattgagccgctgcaaa

SEQ ID NO: 117866 - DNA, 25 bp, Saccharomyces pastorianus
ttccgcgttaccaagaacttagcac

SEQ ID NO: 117867 - DNA, 25 bp, Saccharomyces pastorianus
atcgtcacaacatctttccgcgtta

SEQ ID NO: 117868 - DNA, 25 bp, Saccharomyces pastorianus
tgcgatacattgttggcggcattgt

SEQ ID NO: 117869 - DNA, 25 bp, Saccharomyces pastorianus
attcctacgcgaagattgcccattg

SEQ ID NO: 117870 - DNA, 25 bp, Saccharomyces pastorianus
aacgcacgtcgtgcaactcatgctg

SEQ ID NO: 117871 - DNA, 25 bp, Saccharomyces pastorianus
gtaagcttgtctaaccaggtcacca

SEQ ID NO: 117872 - DNA, 25 bp, Saccharomyces pastorianus
gaagggcgaaccattttgcagaaat

SEQ ID NO: 117873 - DNA, 25 bp, Saccharomyces pastorianus
accagggcatactccgcgaatagaa

SEQ ID NO: 117874 - DNA, 25 bp, Saccharomyces pastorianus
agcgttttaccacccagaaagctgg

SEQ ID NO: 117875 - DNA, 25 bp, Saccharomyces pastorianus
aaaagatgggcattcctacgcgaag

SEQ ID NO: 117876 - DNA, 25 bp, Saccharomyces pastorianus
aaaggtggcctcattcgacaaaaga

SEQ ID NO: 117877 - DNA, 25 bp, Saccharomyces pastorianus
gctagaacccgggatgcgatacatt

SEQ ID NO: 117878 - DNA, 25 bp, Saccharomyces pastorianus
gattgcccattgacgagtacatcaa

SEQ ID NO: 117879 - DNA, 25 bp, Saccharomyces pastorianus
atgcatgttgttgcacatatcgaga

SEQ ID NO: 117880 - DNA, 25 bp, Saccharomyces pastorianus
attactgaagaagcttcccagcata

SEQ ID NO: 117881 - DNA, 25 bp, Saccharomyces pastorianus
ggagggtttacatgacccaagcaaa

SEQ ID NO: 117882 - DNA, 25 bp, Saccharomyces pastorianus
tctagcttgggcaattgctgaacat

SEQ ID NO: 117883 - DNA, 25 bp, Saccharomyces pastorianus
atgatggttttggtctagcttgggc

SEQ ID NO: 117884 - DNA, 25 bp, Saccharomyces pastorianus
aaaagctaagctatcattacaggaa

SEQ ID NO: 117885 - DNA, 25 bp, Saccharomyces pastorianus
ggatgtttcgctttgtttgcaactc

SEQ ID NO: 117886 - DNA, 25 bp, Saccharomyces pastorianus
gtttgcaactcactttcatgaattg

SEQ ID NO: 117887 - DNA, 25 bp, Saccharomyces pastorianus
gatgaggacatcacgttgttataca

SEQ ID NO: 117888 - DNA, 25 bp, Saccharomyces pastorianus
atcagtcttttggtattcatgttgc

SEQ ID NO: 117889 - DNA, 25 bp, Saccharomyces pastorianus
actagggcgtggtactagtacttat

SEQ ID NO: 117890 - DNA, 25 bp, Saccharomyces pastorianus
gagacctatcgccatcttcgaatag

SEQ ID NO: 117891 - DNA, 25 bp, Saccharomyces pastorianus
gcttttagagccttattgcctttag

SEQ ID NO: 117892 - DNA, 25 bp, Saccharomyces pastorianus
gaacgattccacgtcaatatttgat

SEQ ID NO: 117893 - DNA, 25 bp, Saccharomyces pastorianus
catatggttctctccattctttaca

SEQ ID NO: 117894 - DNA, 25 bp, Saccharomyces pastorianus
atcccatccatagttctgataccgg

SEQ ID NO: 117895 - DNA, 25 bp, Saccharomyces pastorianus
tttccagtgatctagagacccctga

SEQ ID NO: 117896 - DNA, 25 bp, Saccharomyces pastorianus
aattcgttcggacctaacatctctt

SEQ ID NO: 117897 - DNA, 25 bp, Saccharomyces pastorianus
gataccggagatactctttccagtg

SEQ ID NO: 117898 - DNA, 25 bp, Saccharomyces pastorianus
aacgaagccgatctcgccgatgatg

SEQ ID NO: 117899 - DNA, 25 bp, Saccharomyces pastorianus
gatgactcatctttgtacccaattc

SEQ ID NO: 117900 - DNA, 25 bp, Saccharomyces pastorianus
taacatctcttgtttatcccatcca

SEQ ID NO: 117901 - DNA, 25 bp, Saccharomyces pastorianus
aactgtgaattcttcgggccaactt

SEQ ID NO: 117902 - DNA, 25 bp, Saccharomyces pastorianus
gaactggtcaaacctcgtactaagc

SEQ ID NO: 117903 - DNA, 25 bp, Saccharomyces pastorianus
ttacgttctcaacagcttctgtgta

SEQ ID NO: 117904 - DNA, 25 bp, Saccharomyces pastorianus
gtaccaactggatacgtctagggtt

SEQ ID NO: 117905 - DNA, 25 bp, Saccharomyces pastorianus
taccgacttgcctggatttccaata

SEQ ID NO: 117906 - DNA, 25 bp, Saccharomyces pastorianus
tactaagcccttagttcttccgaag

SEQ ID NO: 117907 - DNA, 25 bp, Saccharomyces pastorianus
agacgtggttcaacaatcctaagta

SEQ ID NO: 117908 - DNA, 25 bp, Saccharomyces pastorianus
cattcgtctacaattgagcctatta

SEQ ID NO: 117909 - DNA, 25 bp, Saccharomyces pastorianus
gggccaactttatgtaccgacttgc

SEQ ID NO: 117910 - DNA, 25 bp, Saccharomyces pastorianus
ttccgaagctcgattggtcgtctat

SEQ ID NO: 117911 - DNA, 25 bp, Saccharomyces pastorianus
agatgataccccaattaacttcctt

SEQ ID NO: 117912 - DNA, 25 bp, Saccharomyces pastorianus
gtcaataagagcgacctcatgctat

SEQ ID NO: 117913 - DNA, 25 bp, Saccharomyces pastorianus
gagattcatcaactcattgctggag

SEQ ID NO: 117914 - DNA, 25 bp, Saccharomyces pastorianus
gatccgtgtggaagaacgattacaa

SEQ ID NO: 117915 - DNA, 25 bp, Saccharomyces pastorianus
gcgatttgcaggcatttgctcggca

SEQ ID NO: 117916 - DNA, 25 bp, Saccharomyces pastorianus
agcgacctcatgctatacctgagaa

SEQ ID NO: 117917 - DNA, 25 bp, Saccharomyces pastorianus
gctggagttagcatatctacaattg

SEQ ID NO: 117918 - DNA, 25 bp, Saccharomyces pastorianus
aactgaaggctaggctgtggatccg

SEQ ID NO: 117919 - DNA, 25 bp, Saccharomyces pastorianus
acaacaggtgttgtcctctgaggac

SEQ ID NO: 117920 - DNA, 25 bp, Saccharomyces pastorianus
catttgctcggcatgccggtagaga

SEQ ID NO: 117921 - DNA, 25 bp, Saccharomyces pastorianus
atgccggtagagatgtggtcaataa

SEQ ID NO: 117922 - DNA, 25 bp, Saccharomyces pastorianus
gacgatgaagatagagcccaactga

SEQ ID NO: 117923 - DNA, 25 bp, Saccharomyces pastorianus
agtctccaatcaaggttgtcggctt

SEQ ID NO: 117924 - DNA, 25 bp, Saccharomyces pastorianus
attgtcggtgctgttctaaaggcca

SEQ ID NO: 117925 - DNA, 25 bp, Saccharomyces pastorianus
atggtggtgctcacggtgtcatcaa

SEQ ID NO: 117926 - DNA, 25 bp, Saccharomyces pastorianus
agtctgctaacttgatggccggtca

SEQ ID NO: 117927 - DNA, 25 bp, Saccharomyces pastorianus
atccatcggtggtgaagtcttcatt

SEQ ID NO: 117928 - DNA, 25 bp, Saccharomyces pastorianus
gaagcttccaccagatacgttagag

SEQ ID NO: 117929 - DNA, 25 bp, Saccharomyces pastorianus
tctattgttggttcttacgtcggta

SEQ ID NO: 117930 - DNA, 25 bp, Saccharomyces pastorianus
aagtcgtcaagtccatctctattgt

SEQ ID NO: 117931 - DNA, 25 bp, Saccharomyces pastorianus
agctggtgccaagtgttgttctgat

SEQ ID NO: 117932 - DNA, 25 bp, Saccharomyces pastorianus
tgaagtcgccccagttttgtgtgct

SEQ ID NO: 117933 - DNA, 25 bp, Saccharomyces pastorianus
ggcttgtctaccttgccagaaattt

SEQ ID NO: 117934 - DNA, 25 bp, Saccharomyces pastorianus
aatgacaccagttgtcgtggtcgtc

SEQ ID NO: 117935 - DNA, 25 bp, Saccharomyces pastorianus
ggctcattcttctagtatactcatg

SEQ ID NO: 117936 - DNA, 25 bp, Saccharomyces pastorianus
tattgttcgcactaccggcaaactc

SEQ ID NO: 117937 - DNA, 25 bp, Saccharomyces pastorianus
atgcgcgtctcaccttcaaggtcat

SEQ ID NO: 117938 - DNA, 25 bp, Saccharomyces pastorianus
caaactcgcgtctcgcaagtcttgg

SEQ ID NO: 117939 - DNA, 25 bp, Saccharomyces pastorianus
atggtcgctctattgttcgcactac

SEQ ID NO: 117940 - DNA, 25 bp, Saccharomyces pastorianus
cactcaggttctttcggcaacttaa

SEQ ID NO: 117941 - DNA, 25 bp, Saccharomyces pastorianus
tcaaggtcatggtcgctctattgtt

SEQ ID NO: 117942 - DNA, 25 bp, Saccharomyces pastorianus
ttgtcgtggtcgtcatcatcgcaac

SEQ ID NO: 117943 - DNA, 25 bp, Saccharomyces pastorianus
tgttgcaaatgcactcaggttcttt

SEQ ID NO: 117944 - DNA, 25 bp, Saccharomyces pastorianus
caagtcttggctcattcttctagta

SEQ ID NO: 117945 - DNA, 25 bp, Saccharomyces pastorianus
tttttgcgcctgcattttccaaggt

SEQ ID NO: 117946 - DNA, 25 bp, Saccharomyces pastorianus
gacgaccacgacaactggtgtcatt

SEQ ID NO: 117947 - DNA, 25 bp, Saccharomyces pastorianus
gttgcgatgatgacgaccacgacaa

SEQ ID NO: 117948 - DNA, 25 bp, Saccharomyces pastorianus
aattgcacaatcatgctgactctgt

SEQ ID NO: 117949 - DNA, 25 bp, Saccharomyces pastorianus
tttccaaggtttaccctgcgctaag

SEQ ID NO: 117950 - DNA, 25 bp, Saccharomyces pastorianus
tggagaagccataagaatgccggtt

SEQ ID NO: 117951 - DNA, 25 bp, Saccharomyces pastorianus
gtatttggctttgcggcgccgaaaa

SEQ ID NO: 117952 - DNA, 25 bp, Saccharomyces pastorianus
aatcatgctgactctgtggcggacc

SEQ ID NO: 117953 - DNA, 25 bp, Saccharomyces pastorianus
aaaacgagtttacgcaattgcacaa

SEQ ID NO: 117954 - DNA, 25 bp, Saccharomyces pastorianus
atatgatgtatttggctttgcggcg

SEQ ID NO: 117955 - DNA, 25 bp, Saccharomyces pastorianus
ctgtgcccggcggagttttttgcgc

SEQ ID NO: 117956 - DNA, 25 bp, Saccharomyces pastorianus
taaaatctccactagcctcattttc

SEQ ID NO: 117957 - DNA, 25 bp, Saccharomyces pastorianus
gaatcaagcatcatgagcactccct

SEQ ID NO: 117958 - DNA, 25 bp, Saccharomyces pastorianus
agtttccagacaggcagtttccaca

SEQ ID NO: 117959 - DNA, 25 bp, Saccharomyces pastorianus
aaacacgccaatgtcaggtgccgaa

SEQ ID NO: 117960 - DNA, 25 bp, Saccharomyces pastorianus
ctcattttcgacaggcagtttccag

SEQ ID NO: 117961 - DNA, 25 bp, Saccharomyces pastorianus
agcactccctttctaggcgagacag

SEQ ID NO: 117962 - DNA, 25 bp, Saccharomyces pastorianus
ttttctagccaaatctccgaggtat

SEQ ID NO: 117963 - DNA, 25 bp, Saccharomyces pastorianus
ggataactcgctgcactttatattg

SEQ ID NO: 117964 - DNA, 25 bp, Saccharomyces pastorianus
gtttccacactttgcaagatcctac

SEQ ID NO: 117965 - DNA, 25 bp, Saccharomyces pastorianus
gatcctactaatgttttccgggcag

SEQ ID NO: 117966 - DNA, 25 bp, Saccharomyces pastorianus
ggtaaatgtgctgactccaatgaaa

SEQ ID NO: 117967 - DNA, 25 bp, Saccharomyces pastorianus
aatacctcggagatttggctagaaa

SEQ ID NO: 117968 - DNA, 25 bp, Saccharomyces pastorianus
tgatactgaatacctcggagatttg

SEQ ID NO: 117969 - DNA, 25 bp, Saccharomyces pastorianus
tttgatactgaatacctcggagatt

SEQ ID NO: 117970 - DNA, 25 bp, Saccharomyces pastorianus
acctcggagatttggctagaaaatt

SEQ ID NO: 117971 - DNA, 25 bp, Saccharomyces pastorianus
aattcaaatgtacaatttcctggaa

SEQ ID NO: 117972 - DNA, 25 bp, Saccharomyces pastorianus
caaatgtacaatttcctggaattat

SEQ ID NO: 117973 - DNA, 25 bp, Saccharomyces pastorianus
aatttcctggaattatgatattcgt

SEQ ID NO: 117974 - DNA, 25 bp, Saccharomyces pastorianus
gtcccattttgatactgaatacctc

SEQ ID NO: 117975 - DNA, 25 bp, Saccharomyces pastorianus
cattttgatactgaatacctcggag

SEQ ID NO: 117976 - DNA, 25 bp, Saccharomyces pastorianus
tattgtacaatataaagtgcagcga

SEQ ID NO: 117977 - DNA, 25 bp, Saccharomyces pastorianus
tatgatattcgttttattgtacaat

SEQ ID NO: 117978 - DNA, 25 bp, Saccharomyces pastorianus
gccggctccactatcgagattgaaa

SEQ ID NO: 117979 - DNA, 25 bp, Saccharomyces pastorianus
gtacatccatttcactctcttatga

SEQ ID NO: 117980 - DNA, 25 bp, Saccharomyces pastorianus
gcagaaagtttacaggcatcccaag

SEQ ID NO: 117981 - DNA, 25 bp, Saccharomyces pastorianus
ggcgataagccaaccacgcaaatta

SEQ ID NO: 117982 - DNA, 25 bp, Saccharomyces pastorianus
tgaagtttactgacgctggcgataa

SEQ ID NO: 117983 - DNA, 25 bp, Saccharomyces pastorianus
gaataccgatactttccatacgcgc

SEQ ID NO: 117984 - DNA, 25 bp, Saccharomyces pastorianus
ggaaatcgcctctgaccatttgaaa

SEQ ID NO: 117985 - DNA, 25 bp, Saccharomyces pastorianus
aggccaccttcaagattatctgcag

SEQ ID NO: 117986 - DNA, 25 bp, Saccharomyces pastorianus
gagccattttactcctttcaaattg

SEQ ID NO: 117987 - DNA, 25 bp, Saccharomyces pastorianus
tacgcgcttgatttagaggccggct

SEQ ID NO: 117988 - DNA, 25 bp, Saccharomyces pastorianus
gcaagtatggctcttctccaatgat

SEQ ID NO: 117989 - DNA, 25 bp, Saccharomyces pastorianus
acacctcccattcaggaagttgtat

SEQ ID NO: 117990 - DNA, 25 bp, Saccharomyces pastorianus
gtcgtcttcgatgaatttgttaagc

SEQ ID NO: 117991 - DNA, 25 bp, Saccharomyces pastorianus
ggcacgctttaaagcatgatctcga

SEQ ID NO: 117992 - DNA, 25 bp, Saccharomyces pastorianus
gagtctgcgttagctagaatatcaa

SEQ ID NO: 117993 - DNA, 25 bp, Saccharomyces pastorianus
gtagaattcttgtagggcacgcttt

SEQ ID NO: 117994 - DNA, 25 bp, Saccharomyces pastorianus
tcactactcagggacacttcaagac

SEQ ID NO: 117995 - DNA, 25 bp, Saccharomyces pastorianus
agtcgaagatgctcgtgccaccatg

SEQ ID NO: 117996 - DNA, 25 bp, Saccharomyces pastorianus
tgtgaatttgtaggcgttggtcccg

SEQ ID NO: 117997 - DNA, 25 bp, Saccharomyces pastorianus
gaagcattgatgttatcccacccaa

SEQ ID NO: 117998 - DNA, 25 bp, Saccharomyces pastorianus
aaggtgagcattcttcagtcgaaga

SEQ ID NO: 117999 - DNA, 25 bp, Saccharomyces pastorianus
gtcccgagggtaaagagtctgcgtt

SEQ ID NO: 118000 - DNA, 25 bp, Saccharomyces pastorianus
actgctaggtttattggttgttcca

SEQ ID NO: 118001 - DNA, 25 bp, Saccharomyces pastorianus
gggacattaggactgctaggtttat

SEQ ID NO: 118002 - DNA, 25 bp, Saccharomyces pastorianus
gggaaagctattcctccacaccaac

SEQ ID NO: 118003 - DNA, 25 bp, Saccharomyces pastorianus
caaaacagacaacaaagacgaggaa

SEQ ID NO: 118004 - DNA, 25 bp, Saccharomyces pastorianus
aaagcgcaaagccaaaaacagtcga

SEQ ID NO: 118005 - DNA, 25 bp, Saccharomyces pastorianus
gcaaagccaaaaacagtcgacatca

SEQ ID NO: 118006 - DNA, 25 bp, Saccharomyces pastorianus
aacagtcgacatcaaaacagacaac

SEQ ID NO: 118007 - DNA, 25 bp, Saccharomyces pastorianus
gccattgggacattaggactgctag

SEQ ID NO: 118008 - DNA, 25 bp, Saccharomyces pastorianus
tccacaccaactagccattgggaca

SEQ ID NO: 118009 - DNA, 25 bp, Saccharomyces pastorianus
tgctgcttatcatttcatggggaaa

SEQ ID NO: 118010 - DNA, 25 bp, Saccharomyces pastorianus
ggactgctaggtttattggttgttc

SEQ ID NO: 118011 - DNA, 25 bp, Saccharomyces pastorianus
atcacgtcatgtccttcagtattgt

SEQ ID NO: 118012 - DNA, 25 bp, Saccharomyces pastorianus
tttgatcaacgtttcgaatcctccc

SEQ ID NO: 118013 - DNA, 25 bp, Saccharomyces pastorianus
tatggttatccaagccgccaaatgg

SEQ ID NO: 118014 - DNA, 25 bp, Saccharomyces pastorianus
aagccatttattgatcacgtcatgt

SEQ ID NO: 118015 - DNA, 25 bp, Saccharomyces pastorianus
cgtccggtattgtcgtttgatcaac

SEQ ID NO: 118016 - DNA, 25 bp, Saccharomyces pastorianus
ggccctaggtttgttatgactgtca

SEQ ID NO: 118017 - DNA, 25 bp, Saccharomyces pastorianus
gctagtgcataattttggtgtacca

SEQ ID NO: 118018 - DNA, 25 bp, Saccharomyces pastorianus
aacaacaagctgctgcggaggcaaa

SEQ ID NO: 118019 - DNA, 25 bp, Saccharomyces pastorianus
atatgagatctcacacagtactaag

SEQ ID NO: 118020 - DNA, 25 bp, Saccharomyces pastorianus
ataatgttctattctttgaggccag

SEQ ID NO: 118021 - DNA, 25 bp, Saccharomyces pastorianus
gtttcgccaaacgtcgtaagagctc

SEQ ID NO: 118022 - DNA, 25 bp, Saccharomyces pastorianus
cgatgaacctgcaagaccactggga

SEQ ID NO: 118023 - DNA, 25 bp, Saccharomyces pastorianus
aaatacctctaacgctggtgatgac

SEQ ID NO: 118024 - DNA, 25 bp, Saccharomyces pastorianus
tatagcggccaatgcggccacgaat

SEQ ID NO: 118025 - DNA, 25 bp, Saccharomyces pastorianus
cgtttgtatcctatttcatctctca

SEQ ID NO: 118026 - DNA, 25 bp, Saccharomyces pastorianus
gataagggcctgttaccgggattag

SEQ ID NO: 118027 - DNA, 25 bp, Saccharomyces pastorianus
ggttcactgcccattgttttaagct

SEQ ID NO: 118028 - DNA, 25 bp, Saccharomyces pastorianus
aagcctaccgcttcgtggttcaagc

SEQ ID NO: 118029 - DNA, 25 bp, Saccharomyces pastorianus
aaatgggttaattctcctgcttata

SEQ ID NO: 118030 - DNA, 25 bp, Saccharomyces pastorianus
aatacaggcaactctgggcctacaa

SEQ ID NO: 118031 - DNA, 25 bp, Saccharomyces pastorianus
acccacgagggctaacgttgctata

SEQ ID NO: 118032 - DNA, 25 bp, Saccharomyces pastorianus
gatgacgagcctggtgccgatgaac

SEQ ID NO: 118033 - DNA, 25 bp, Saccharomyces pastorianus
gcacaatatgtttccagcactcaca

SEQ ID NO: 118034 - DNA, 25 bp, Saccharomyces pastorianus
gggacatatactattgggccacaaa

SEQ ID NO: 118035 - DNA, 25 bp, Saccharomyces pastorianus
atcttggagacggacttgctgctat

SEQ ID NO: 118036 - DNA, 25 bp, Saccharomyces pastorianus
tgggttcgctgccaaatatttgaag

SEQ ID NO: 118037 - DNA, 25 bp, Saccharomyces pastorianus
gaaaagagctcggttgatacatcaa

SEQ ID NO: 118038 - DNA, 25 bp, Saccharomyces pastorianus
ttatcaactctcaaacagggtccgc

SEQ ID NO: 118039 - DNA, 25 bp, Saccharomyces pastorianus
agagaactaacgagccattggacaa

SEQ ID NO: 118040 - DNA, 25 bp, Saccharomyces pastorianus
aacagggtccgctgcatggtcgtgc

SEQ ID NO: 118041 - DNA, 25 bp, Saccharomyces pastorianus
tgtttccagcactcacaaagacact

SEQ ID NO: 118042 - DNA, 25 bp, Saccharomyces pastorianus
aaagacactgtcgttgcaaggctac

SEQ ID NO: 118043 - DNA, 25 bp, Saccharomyces pastorianus
gacttgctgctatctgggttcgctg

SEQ ID NO: 118044 - DNA, 25 bp, Saccharomyces pastorianus
ttacttgacaagaccattgcccagc

SEQ ID NO: 118045 - DNA, 25 bp, Saccharomyces pastorianus
aatcgggtctgaatttgcgcaactg

SEQ ID NO: 118046 - DNA, 25 bp, Saccharomyces pastorianus
agactctttgtccaggttaacagca

SEQ ID NO: 118047 - DNA, 25 bp, Saccharomyces pastorianus
ctcatctcagatttccacagttagt

SEQ ID NO: 118048 - DNA, 25 bp, Saccharomyces pastorianus
gatcctttgatatcgacacactaaa

SEQ ID NO: 118049 - DNA, 25 bp, Saccharomyces pastorianus
aaatcatacctctacttcgacaaac

SEQ ID NO: 118050 - DNA, 25 bp, Saccharomyces pastorianus
ttgcccagcacacccaatgaggata

SEQ ID NO: 118051 - DNA, 25 bp, Saccharomyces pastorianus
aatcttactattctgcggcaacgag

SEQ ID NO: 118052 - DNA, 25 bp, Saccharomyces pastorianus
gaaacgtgccctggagagactagta

SEQ ID NO: 118053 - DNA, 25 bp, Saccharomyces pastorianus
ggtggccactataagaactcatctc

SEQ ID NO: 118054 - DNA, 25 bp, Saccharomyces pastorianus
agcagacatggttcttgatccggac

SEQ ID NO: 118055 - DNA, 25 bp, Saccharomyces pastorianus
tgccatcgcgatttcataagaccat

SEQ ID NO: 118056 - DNA, 25 bp, Saccharomyces pastorianus
ttgaactaccattatgtccctactg

SEQ ID NO: 118057 - DNA, 25 bp, Saccharomyces pastorianus
ggttacacatgcagagtttgactta

SEQ ID NO: 118058 - DNA, 25 bp, Saccharomyces pastorianus
cacatgttccgcagattttgatcaa

SEQ ID NO: 118059 - DNA, 25 bp, Saccharomyces pastorianus
aagtggctcctgtgtctgaaattgt

SEQ ID NO: 118060 - DNA, 25 bp, Saccharomyces pastorianus
acattttttggcgaggccctgccat

SEQ ID NO: 118061 - DNA, 25 bp, Saccharomyces pastorianus
gacgtggccagtctcgtagctaaaa

SEQ ID NO: 118062 - DNA, 25 bp, Saccharomyces pastorianus
tatggtaccttcacatgttccgcag

SEQ ID NO: 118063 - DNA, 25 bp, Saccharomyces pastorianus
aaacctgttgggattctgtgatgac

SEQ ID NO: 118064 - DNA, 25 bp, Saccharomyces pastorianus
agtgcaatgtcacggttcattcgcc

SEQ ID NO: 118065 - DNA, 25 bp, Saccharomyces pastorianus
actgcatcttgtgtgacttgccatt

SEQ ID NO: 118066 - DNA, 25 bp, Saccharomyces pastorianus
gcagacaggcaccattgtcaacgat

SEQ ID NO: 118067 - DNA, 25 bp, Saccharomyces pastorianus
gcaattctggtagcaatgacacgtt

SEQ ID NO: 118068 - DNA, 25 bp, Saccharomyces pastorianus
gagtatcattcccaaagacttcttt

SEQ ID NO: 118069 - DNA, 25 bp, Saccharomyces pastorianus
attccagctggcactgatcctgggt

SEQ ID NO: 118070 - DNA, 25 bp, Saccharomyces pastorianus
acgttaagtgaatccactcccggtg

SEQ ID NO: 118071 - DNA, 25 bp, Saccharomyces pastorianus
aacaagggccaaattctcacacagg

SEQ ID NO: 118072 - DNA, 25 bp, Saccharomyces pastorianus
aagaggttgagctccttcgagtacg

SEQ ID NO: 118073 - DNA, 25 bp, Saccharomyces pastorianus
gaccgctggccgcaacaaatgatga

SEQ ID NO: 118074 - DNA, 25 bp, Saccharomyces pastorianus
atttcaagaatgaccgcaagcgcag

SEQ ID NO: 118075 - DNA, 25 bp, Saccharomyces pastorianus
ctgggtcctgcggtgctaatttcaa

SEQ ID NO: 118076 - DNA, 25 bp, Saccharomyces pastorianus
gcttgggttgtccagcaaggccaaa

SEQ ID NO: 118077 - DNA, 25 bp, Saccharomyces pastorianus
aagaatcccgtcgtggtgcgatagg

SEQ ID NO: 118078 - DNA, 25 bp, Saccharomyces pastorianus
agtgccgttatccttacatatcgaa

SEQ ID NO: 118079 - DNA, 25 bp, Saccharomyces pastorianus
ggtactgcggttggctagttactaa

SEQ ID NO: 118080 - DNA, 25 bp, Saccharomyces pastorianus
gtccctaggtccaatgctctattat

SEQ ID NO: 118081 - DNA, 25 bp, Saccharomyces pastorianus
tggagctctggcctgattggacaaa

SEQ ID NO: 118082 - DNA, 25 bp, Saccharomyces pastorianus
gtctacagggatgccagtgccgtta

SEQ ID NO: 118083 - DNA, 25 bp, Saccharomyces pastorianus
aagctatgcagtgccaactttcgca

SEQ ID NO: 118084 - DNA, 25 bp, Saccharomyces pastorianus
agataacatttccaccgacttacaa

SEQ ID NO: 118085 - DNA, 25 bp, Saccharomyces pastorianus
tcatcaacccgttaatcttaccgta

SEQ ID NO: 118086 - DNA, 25 bp, Saccharomyces pastorianus
gaccactttttctttctaggcgatt

SEQ ID NO: 118087 - DNA, 25 bp, Saccharomyces pastorianus
gattattcgtccaccacaacgttaa

SEQ ID NO: 118088 - DNA, 25 bp, Saccharomyces pastorianus
atctctcattaaaacagcgggacat

SEQ ID NO: 118089 - DNA, 25 bp, Saccharomyces pastorianus
acgctggatatctacaaatggcccg

SEQ ID NO: 118090 - DNA, 25 bp, Saccharomyces pastorianus
ggcgtctttaagagacatcgtctta

SEQ ID NO: 118091 - DNA, 25 bp, Saccharomyces pastorianus
attcttgatattttcggtttccatg

SEQ ID NO: 118092 - DNA, 25 bp, Saccharomyces pastorianus
tgcgggtctcctagctttagagtac

SEQ ID NO: 118093 - DNA, 25 bp, Saccharomyces pastorianus
gaatgtcgtgcggaagtaattgcca

SEQ ID NO: 118094 - DNA, 25 bp, Saccharomyces pastorianus
attgatagatcaacggtgacaccgg

SEQ ID NO: 118095 - DNA, 25 bp, Saccharomyces pastorianus
tggacagttagctggcccatttgaa

SEQ ID NO: 118096 - DNA, 25 bp, Saccharomyces pastorianus
gtgacaccggatttggcgtctttaa

SEQ ID NO: 118097 - DNA, 25 bp, Saccharomyces pastorianus
atatgatgaaactccacagggtatg

SEQ ID NO: 118098 - DNA, 25 bp, Saccharomyces pastorianus
ggtttccatgatgtcgaatctcaag

SEQ ID NO: 118099 - DNA, 25 bp, Saccharomyces pastorianus
atagttgggcatggcagctctgtaa

SEQ ID NO: 118100 - DNA, 25 bp, Saccharomyces pastorianus
agtatgcctgtgttgcaaacctgga

SEQ ID NO: 118101 - DNA, 25 bp, Saccharomyces pastorianus
tgttgatattcccaacggcattccg

SEQ ID NO: 118102 - DNA, 25 bp, Saccharomyces pastorianus
gcgtctgccagagagtgagtctctt

SEQ ID NO: 118103 - DNA, 25 bp, Saccharomyces pastorianus
aataatgttgttctgtctaccgcca

SEQ ID NO: 118104 - DNA, 25 bp, Saccharomyces pastorianus
gctctgtaagatctctgctgaaagt

SEQ ID NO: 118105 - DNA, 25 bp, Saccharomyces pastorianus
gaagctgcaggacacaagatttgaa

SEQ ID NO: 118106 - DNA, 25 bp, Saccharomyces pastorianus
aacctggaggttaaatgagcgtcat

SEQ ID NO: 118107 - DNA, 25 bp, Saccharomyces pastorianus
tgagcgtcattacggcgcatggcaa

SEQ ID NO: 118108 - DNA, 25 bp, Saccharomyces pastorianus
gtctaccgccaacaaaatcagtcaa

SEQ ID NO: 118109 - DNA, 25 bp, Saccharomyces pastorianus
agaaggctaatgagcgtctgccaga

SEQ ID NO: 118110 - DNA, 25 bp, Saccharomyces pastorianus
gtaaagtcaccgcacctgaagggtc

SEQ ID NO: 118111 - DNA, 25 bp, Saccharomyces pastorianus
taccctccagagcaacttgacactt

SEQ ID NO: 118112 - DNA, 25 bp, Saccharomyces pastorianus
tgaagggtccgtttaccacgaatgg

SEQ ID NO: 118113 - DNA, 25 bp, Saccharomyces pastorianus
gagaggacctgcattaagagcttac

SEQ ID NO: 118114 - DNA, 25 bp, Saccharomyces pastorianus
gaaacttacgcatcttcatggtatc

SEQ ID NO: 118115 - DNA, 25 bp, Saccharomyces pastorianus
aagccacactgggattcctatatta

SEQ ID NO: 118116 - DNA, 25 bp, Saccharomyces pastorianus
gagctagtcattgttggaggtgttc

SEQ ID NO: 118117 - DNA, 25 bp, Saccharomyces pastorianus
aagaattggttgcatcccttactcc

SEQ ID NO: 118118 - DNA, 25 bp, Saccharomyces pastorianus
ggtgttcgtactgaaatgggtcaac

SEQ ID NO: 118119 - DNA, 25 bp, Saccharomyces pastorianus
agagcttactctcgttactttaacg

SEQ ID NO: 118120 - DNA, 25 bp, Saccharomyces pastorianus
atcccttactccttgtttgatgggt

SEQ ID NO: 118121 - DNA, 25 bp, Saccharomyces pastorianus
ttgggccaggtcacataatcgtagt

SEQ ID NO: 118122 - DNA, 25 bp, Saccharomyces pastorianus
gagaggatcgatttgcgtctaccaa

SEQ ID NO: 118123 - DNA, 25 bp, Saccharomyces pastorianus
ggagcaacggcgacatgctacagaa

SEQ ID NO: 118124 - DNA, 25 bp, Saccharomyces pastorianus
aacatatcccactaggccgttgggc

SEQ ID NO: 118125 - DNA, 25 bp, Saccharomyces pastorianus
cgtattccggctccagcgatgtcaa

SEQ ID NO: 118126 - DNA, 25 bp, Saccharomyces pastorianus
gcgatagtgacttttacgagcataa

SEQ ID NO: 118127 - DNA, 25 bp, Saccharomyces pastorianus
agaggagcccatgcgagaacatatc

SEQ ID NO: 118128 - DNA, 25 bp, Saccharomyces pastorianus
cgagttctgattccgaagatcgttc

SEQ ID NO: 118129 - DNA, 25 bp, Saccharomyces pastorianus
aggaatttggtattgtctgcactca

SEQ ID NO: 118130 - DNA, 25 bp, Saccharomyces pastorianus
aagatcgttcactttcgtattccgg

SEQ ID NO: 118131 - DNA, 25 bp, Saccharomyces pastorianus
gcgtctaccaatccgtttgctaata

SEQ ID NO: 118132 - DNA, 25 bp, Saccharomyces pastorianus
cactgcccgactacatcaagttaga

SEQ ID NO: 118133 - DNA, 25 bp, Saccharomyces pastorianus
ctagtaagtttgtttgcgggcctga

SEQ ID NO: 118134 - DNA, 25 bp, Saccharomyces pastorianus
taagcatcaacgagtcactgcccga

SEQ ID NO: 118135 - DNA, 25 bp, Saccharomyces pastorianus
gctggacccagaatgcgctagtaag

SEQ ID NO: 118136 - DNA, 25 bp, Saccharomyces pastorianus
aaatactattacaccctgcacgtga

SEQ ID NO: 118137 - DNA, 25 bp, Saccharomyces pastorianus
gagttctcgatgaccttttttacca

SEQ ID NO: 118138 - DNA, 25 bp, Saccharomyces pastorianus
atacccgtatttgacatttcccaag

SEQ ID NO: 118139 - DNA, 25 bp, Saccharomyces pastorianus
gacaacttggacgttcttctacata

SEQ ID NO: 118140 - DNA, 25 bp, Saccharomyces pastorianus
gaaatatatgtcaactcggcccaag

SEQ ID NO: 118141 - DNA, 25 bp, Saccharomyces pastorianus
agactccgatttatcatttcaccac

SEQ ID NO: 118142 - DNA, 25 bp, Saccharomyces pastorianus
attcacgccatgtggatactcatcc

SEQ ID NO: 118143 - DNA, 25 bp, Saccharomyces pastorianus
gtttttcactagttgtggctcctga

SEQ ID NO: 118144 - DNA, 25 bp, Saccharomyces pastorianus
atcttgcgggcttatttctaatacg

SEQ ID NO: 118145 - DNA, 25 bp, Saccharomyces pastorianus
ggagcttcatttgttacttcttgtt

SEQ ID NO: 118146 - DNA, 25 bp, Saccharomyces pastorianus
tctttttcttgggttgccgacatcc

SEQ ID NO: 118147 - DNA, 25 bp, Saccharomyces pastorianus
gtggctcctgattttgtcatgaatg

SEQ ID NO: 118148 - DNA, 25 bp, Saccharomyces pastorianus
agtagcacttgtccaattattccaa

SEQ ID NO: 118149 - DNA, 25 bp, Saccharomyces pastorianus
tgaattgttctgaactagtcccaga

SEQ ID NO: 118150 - DNA, 25 bp, Saccharomyces pastorianus
gaggctatcgaatcttgcgggctta

SEQ ID NO: 118151 - DNA, 25 bp, Saccharomyces pastorianus
cttatttctaatacgctggcttttc

SEQ ID NO: 118152 - DNA, 25 bp, Saccharomyces pastorianus
atctggtgatagcaccgaggctatc

SEQ ID NO: 118153 - DNA, 25 bp, Saccharomyces pastorianus
gtccaattattccaatcccatacat

SEQ ID NO: 118154 - DNA, 25 bp, Saccharomyces pastorianus
ggttgcgttctatttaacgacgagc

SEQ ID NO: 118155 - DNA, 25 bp, Saccharomyces pastorianus
ggtaaatacatctccgatgctgaga

SEQ ID NO: 118156 - DNA, 25 bp, Saccharomyces pastorianus
tacgtgttaaaaccacagcgggaag

SEQ ID NO: 118157 - DNA, 25 bp, Saccharomyces pastorianus
aagtttcgcaataaaggccccagat

SEQ ID NO: 118158 - DNA, 25 bp, Saccharomyces pastorianus
aaaggccccagatttactcactcaa

SEQ ID NO: 118159 - DNA, 25 bp, Saccharomyces pastorianus
tcttacaacgaaccaatcatcagtg

SEQ ID NO: 118160 - DNA, 25 bp, Saccharomyces pastorianus
agtgagccctctaaatacgtgttaa

SEQ ID NO: 118161 - DNA, 25 bp, Saccharomyces pastorianus
gggtacacaaccactgattacacgt

SEQ ID NO: 118162 - DNA, 25 bp, Saccharomyces pastorianus
cgtcactgggatgcatatattctca

SEQ ID NO: 118163 - DNA, 25 bp, Saccharomyces pastorianus
gaggctggcattaagtgagccctct

SEQ ID NO: 118164 - DNA, 25 bp, Saccharomyces pastorianus
atcccttggatgatacgaagcttgg

SEQ ID NO: 118165 - DNA, 25 bp, Saccharomyces pastorianus
tactgtcgctaattcctattgtagg

SEQ ID NO: 118166 - DNA, 25 bp, Saccharomyces pastorianus
agcaacactgttggtgcagctaaat

SEQ ID NO: 118167 - DNA, 25 bp, Saccharomyces pastorianus
aacaggccaaagattttcagtacga

SEQ ID NO: 118168 - DNA, 25 bp, Saccharomyces pastorianus
tgtccgccggtctactagagttaat

SEQ ID NO: 118169 - DNA, 25 bp, Saccharomyces pastorianus
aaagaacctttacctatttgcagag

SEQ ID NO: 118170 - DNA, 25 bp, Saccharomyces pastorianus
tcagtacgagcattacgcaagtttc

SEQ ID NO: 118171 - DNA, 25 bp, Saccharomyces pastorianus
cctattgtaggaccaatcttggcaa

SEQ ID NO: 118172 - DNA, 25 bp, Saccharomyces pastorianus
gagttaatacccttcttcacaatag

SEQ ID NO: 118173 - DNA, 25 bp, Saccharomyces pastorianus
tcatatgtttcggtatgtccgccgg

SEQ ID NO: 118174 - DNA, 25 bp, Saccharomyces pastorianus
ttacttcactaacattactgtcgct

SEQ ID NO: 118175 - DNA, 25 bp, Saccharomyces pastorianus
gtcaccatatctagcaacactgttg

SEQ ID NO: 118176 - DNA, 25 bp, Saccharomyces pastorianus
tacgggtgcttttttcttcaactca

SEQ ID NO: 118177 - DNA, 25 bp, Saccharomyces pastorianus
ttttctaactcggacttggctggat

SEQ ID NO: 118178 - DNA, 25 bp, Saccharomyces pastorianus
atgcatgcggcgactcattaggtac

SEQ ID NO: 118179 - DNA, 25 bp, Saccharomyces pastorianus
ggtccgaacgatcatcatcactgaa

SEQ ID NO: 118180 - DNA, 25 bp, Saccharomyces pastorianus
aggagcggctgcactaaccgggtat

SEQ ID NO: 118181 - DNA, 25 bp, Saccharomyces pastorianus
gtatcacgggtctactagcaggaga

SEQ ID NO: 118182 - DNA, 25 bp, Saccharomyces pastorianus
ggcagtctctgttaagtttcttgtg

SEQ ID NO: 118183 - DNA, 25 bp, Saccharomyces pastorianus
ttaaggacgttgctctctgtatcac

SEQ ID NO: 118184 - DNA, 25 bp, Saccharomyces pastorianus
agacccatttaacggatctcgcgat

SEQ ID NO: 118185 - DNA, 25 bp, Saccharomyces pastorianus
taagatggtcaaccttactcccagt

SEQ ID NO: 118186 - DNA, 25 bp, Saccharomyces pastorianus
gaggtttagagagccctaccaacgg

SEQ ID NO: 118187 - DNA, 25 bp, Saccharomyces pastorianus
gaccattcgatgtttttgtgggaac

SEQ ID NO: 118188 - DNA, 25 bp, Saccharomyces pastorianus
ggtgtttaaacaggtagtcgctagt

SEQ ID NO: 118189 - DNA, 25 bp, Saccharomyces pastorianus
gatccaaattatggcgaccttgaat

SEQ ID NO: 118190 - DNA, 25 bp, Saccharomyces pastorianus
ggttcggctgcctatatcaagagtg

SEQ ID NO: 118191 - DNA, 25 bp, Saccharomyces pastorianus
tgttgattctcatggctttgtaaaa

SEQ ID NO: 118192 - DNA, 25 bp, Saccharomyces pastorianus
acaccggtccatggagaaactggta

SEQ ID NO: 118193 - DNA, 25 bp, Saccharomyces pastorianus
gggctcttggtgtgctactttatac

SEQ ID NO: 118194 - DNA, 25 bp, Saccharomyces pastorianus
gaacaatggactatgctgcacctga

SEQ ID NO: 118195 - DNA, 25 bp, Saccharomyces pastorianus
ttattacattgaaacaccggtccat

SEQ ID NO: 118196 - DNA, 25 bp, Saccharomyces pastorianus
attaatcgatttcggttcggctgcc

SEQ ID NO: 118197 - DNA, 25 bp, Saccharomyces pastorianus
tgaagtccttggtggttcctcttac

SEQ ID NO: 118198 - DNA, 25 bp, Saccharomyces pastorianus
aaacgatgtctgcaatgctcgcaat

SEQ ID NO: 118199 - DNA, 25 bp, Saccharomyces pastorianus
gagggaattctctcgttacctggag

SEQ ID NO: 118200 - DNA, 25 bp, Saccharomyces pastorianus
ttaagtgtaagactgccgagcatac

SEQ ID NO: 118201 - DNA, 25 bp, Saccharomyces pastorianus
gagttacaggtttggctacctcact

SEQ ID NO: 118202 - DNA, 25 bp, Saccharomyces pastorianus
cgatgcgttagcttctataccagaa

SEQ ID NO: 118203 - DNA, 25 bp, Saccharomyces pastorianus
gtattacgctagatggactgcttaa

SEQ ID NO: 118204 - DNA, 25 bp, Saccharomyces pastorianus
tctcgttacctggagttggacctaa

SEQ ID NO: 118205 - DNA, 25 bp, Saccharomyces pastorianus
attcgcattggttggacacggttac

SEQ ID NO: 118206 - DNA, 25 bp, Saccharomyces pastorianus
tgattgccggcatatgcgtcgatgt

SEQ ID NO: 118207 - DNA, 25 bp, Saccharomyces pastorianus
ctacctcactcactgtggtacgaaa

SEQ ID NO: 118208 - DNA, 25 bp, Saccharomyces pastorianus
gcgtcgatgttcatgtccataggct

SEQ ID NO: 118209 - DNA, 25 bp, Saccharomyces pastorianus
gcgtctaatcagttgggtttaccca

SEQ ID NO: 118210 - DNA, 25 bp, Saccharomyces pastorianus
gttagccatggagaccttaatctta

SEQ ID NO: 118211 - DNA, 25 bp, Saccharomyces pastorianus
gatcattaagcagctcttaccggga

SEQ ID NO: 118212 - DNA, 25 bp, Saccharomyces pastorianus
ggattattttgtacatacgtgctat

SEQ ID NO: 118213 - DNA, 25 bp, Saccharomyces pastorianus
ggtatgcttattcgtatctctaaga

SEQ ID NO: 118214 - DNA, 25 bp, Saccharomyces pastorianus
gattcgctagttgttaattttctgc

SEQ ID NO: 118215 - DNA, 25 bp, Saccharomyces pastorianus
tgcaaggtcagatagttagccatgg

SEQ ID NO: 118216 - DNA, 25 bp, Saccharomyces pastorianus
aaccgatggtgcttccaatgttatt

SEQ ID NO: 118217 - DNA, 25 bp, Saccharomyces pastorianus
gggcatctttgattacgtatggtac

SEQ ID NO: 118218 - DNA, 25 bp, Saccharomyces pastorianus
ggccgtatttggatcgttgtgtcta

SEQ ID NO: 118219 - DNA, 25 bp, Saccharomyces pastorianus
ctaactaagatcctaaccggtaatg

SEQ ID NO: 118220 - DNA, 25 bp, Saccharomyces pastorianus
gaaaggcgagggttccacccatcta

SEQ ID NO: 118221 - DNA, 25 bp, Saccharomyces pastorianus
gaagcgttcaatctttgtaggtaac

SEQ ID NO: 118222 - DNA, 25 bp, Saccharomyces pastorianus
gatccgctacaggtagggttaccaa

SEQ ID NO: 118223 - DNA, 25 bp, Saccharomyces pastorianus
gctcatccagctccgcatgataaga

SEQ ID NO: 118224 - DNA, 25 bp, Saccharomyces pastorianus
gaaacattttgaaccatgtggcgat

SEQ ID NO: 118225 - DNA, 25 bp, Saccharomyces pastorianus
actactattgggaccggcttggata

SEQ ID NO: 118226 - DNA, 25 bp, Saccharomyces pastorianus
gagttgattcagttgctcatccagc

SEQ ID NO: 118227 - DNA, 25 bp, Saccharomyces pastorianus
gctgtcgttttccaagatcatcact

SEQ ID NO: 118228 - DNA, 25 bp, Saccharomyces pastorianus
gggttaccaaaagatcgatagcatt

SEQ ID NO: 118229 - DNA, 25 bp, Saccharomyces pastorianus
ggctgatagagccactttgggccaa

SEQ ID NO: 118230 - DNA, 25 bp, Saccharomyces pastorianus
tctgctcgaatttgaatgctgtcgt

SEQ ID NO: 118231 - DNA, 25 bp, Saccharomyces pastorianus
aaatgaaaagccagctccagtcaga

SEQ ID NO: 118232 - DNA, 25 bp, Saccharomyces pastorianus
tcaagctgttaatgccaagaagaga

SEQ ID NO: 118233 - DNA, 25 bp, Saccharomyces pastorianus
agctccagtcagaacccacatgaga

SEQ ID NO: 118234 - DNA, 25 bp, Saccharomyces pastorianus
aaaagccagctccagtcagaaccca

SEQ ID NO: 118235 - DNA, 25 bp, Saccharomyces pastorianus
tgaaaagccagctccagtcagaacc

SEQ ID NO: 118236 - DNA, 25 bp, Saccharomyces pastorianus
atgtctcaagctgttaatgccaaga

SEQ ID NO: 118237 - DNA, 25 bp, Saccharomyces pastorianus
ctccagtcagaacccacatgagaaa

SEQ ID NO: 118238 - DNA, 25 bp, Saccharomyces pastorianus
gtctcaagctgttaatgccaagaag

SEQ ID NO: 118239 - DNA, 25 bp, Saccharomyces pastorianus
tgccaagttggctgccccagaaaat

SEQ ID NO: 118240 - DNA, 25 bp, Saccharomyces pastorianus
tgttaatgccaagaagagagttttt

SEQ ID NO: 118241 - DNA, 25 bp, Saccharomyces pastorianus
tgccccagaaaatgaaaagccagct

SEQ ID NO: 118242 - DNA, 25 bp, Saccharomyces pastorianus
cgtcgtcggtatctacaacggtaag

SEQ ID NO: 118243 - DNA, 25 bp, Saccharomyces pastorianus
ccaagccagccggtttcatgaagaa

SEQ ID NO: 118244 - DNA, 25 bp, Saccharomyces pastorianus
gaaacatgatcattgttccagaaat

SEQ ID NO: 118245 - DNA, 25 bp, Saccharomyces pastorianus
gttccgtcgtcggtatctacaacgg

SEQ ID NO: 118246 - DNA, 25 bp, Saccharomyces pastorianus
ccactgaagatttcgtcaagttggc

SEQ ID NO: 118247 - DNA, 25 bp, Saccharomyces pastorianus
gttagaagaagatttgcccgtggta

SEQ ID NO: 118248 - DNA, 25 bp, Saccharomyces pastorianus
gtggtatgacttccaagccagccgg

SEQ ID NO: 118249 - DNA, 25 bp, Saccharomyces pastorianus
atcagaccagaaatgttgggtcact

SEQ ID NO: 118250 - DNA, 25 bp, Saccharomyces pastorianus
atttgcccgtggtatgacttccaag

SEQ ID NO: 118251 - DNA, 25 bp, Saccharomyces pastorianus
aagatttgcccgtggtatgacttcc

SEQ ID NO: 118252 - DNA, 25 bp, Saccharomyces pastorianus
aaatgtccactgaagatttcgtcaa

SEQ ID NO: 118253 - DNA, 25 bp, Saccharomyces pastorianus
cgctttggaaggtaagtctgttgac

SEQ ID NO: 118254 - DNA, 25 bp, Saccharomyces pastorianus
aaagttggctgctgttccagctgct

SEQ ID NO: 118255 - DNA, 25 bp, Saccharomyces pastorianus
tagctgcttacctattattgaacgc

SEQ ID NO: 118256 - DNA, 25 bp, Saccharomyces pastorianus
gctgcttacctattattgaacgctg

SEQ ID NO: 118257 - DNA, 25 bp, Saccharomyces pastorianus
gtaacgaaaagttggctgctgttcc

SEQ ID NO: 118258 - DNA, 25 bp, Saccharomyces pastorianus
cttacctattattgaacgctgctgg

SEQ ID NO: 118259 - DNA, 25 bp, Saccharomyces pastorianus
gaaaagttggctgctgttccagctg

SEQ ID NO: 118260 - DNA, 25 bp, Saccharomyces pastorianus
ggaaggtaagtctgttgacgaatta

SEQ ID NO: 118261 - DNA, 25 bp, Saccharomyces pastorianus
agttggctgctgttccagctgctgg

SEQ ID NO: 118262 - DNA, 25 bp, Saccharomyces pastorianus
tgcttacctattattgaacgctgct

SEQ ID NO: 118263 - DNA, 25 bp, Saccharomyces pastorianus
tgtccgctttggaaggtaagtctgt

SEQ ID NO: 118264 - DNA, 25 bp, Saccharomyces pastorianus
tcctccgttttgtccgctttggaag

SEQ ID NO: 118265 - DNA, 25 bp, Saccharomyces pastorianus
agctgctggtccagcttctgctggc

SEQ ID NO: 118266 - DNA, 25 bp, Saccharomyces pastorianus
attaaggctattttggaatccgtcg

SEQ ID NO: 118267 - DNA, 25 bp, Saccharomyces pastorianus
tggtccagcttctgctggcggtgct

SEQ ID NO: 118268 - DNA, 25 bp, Saccharomyces pastorianus
ggaatccgtcggtatcgaaatcgaa

SEQ ID NO: 118269 - DNA, 25 bp, Saccharomyces pastorianus
agatgccaccaagattaaggctatt

SEQ ID NO: 118270 - DNA, 25 bp, Saccharomyces pastorianus
tgccaccaagattaaggctattttg

SEQ ID NO: 118271 - DNA, 25 bp, Saccharomyces pastorianus
ttattgaacgctgctggtaacaccc

SEQ ID NO: 118272 - DNA, 25 bp, Saccharomyces pastorianus
ccagcttctgctggcggtgctgctg

SEQ ID NO: 118273 - DNA, 25 bp, Saccharomyces pastorianus
tgctggtccagcttctgctggcggt

SEQ ID NO: 118274 - DNA, 25 bp, Saccharomyces pastorianus
aaaagttggctgctgttccagctgc

SEQ ID NO: 118275 - DNA, 25 bp, Saccharomyces pastorianus
aatcactgttgttaagccggactca

SEQ ID NO: 118276 - DNA, 25 bp, Saccharomyces pastorianus
gtggaggcccaaagtcacagactaa

SEQ ID NO: 118277 - DNA, 25 bp, Saccharomyces pastorianus
accatttggtgtgtcgacgctgatt

SEQ ID NO: 118278 - DNA, 25 bp, Saccharomyces pastorianus
acgttatgtcgctggtgtgcaacaa

SEQ ID NO: 118279 - DNA, 25 bp, Saccharomyces pastorianus
ttaaccagtacgtcacccaaatcga

SEQ ID NO: 118280 - DNA, 25 bp, Saccharomyces pastorianus
ggagtatctcacacgttatgtcgct

SEQ ID NO: 118281 - DNA, 25 bp, Saccharomyces pastorianus
gacactagaattacgccttccaaag

SEQ ID NO: 118282 - DNA, 25 bp, Saccharomyces pastorianus
ctcgcatgtggtgttgtcattttct

SEQ ID NO: 118283 - DNA, 25 bp, Saccharomyces pastorianus
tgattgccggcttcgacccgagaga

SEQ ID NO: 118284 - DNA, 25 bp, Saccharomyces pastorianus
tgaacccaagctttaccagaccgag

SEQ ID NO: 118285 - DNA, 25 bp, Saccharomyces pastorianus
tatatactcttcgtggtccgctcag

SEQ ID NO: 118286 - DNA, 25 bp, Saccharomyces pastorianus
ggacgtagaggagatcctccccaaa

SEQ ID NO: 118287 - DNA, 25 bp, Saccharomyces pastorianus
atgtccaagttatcgcgcaaatcaa

SEQ ID NO: 118288 - DNA, 25 bp, Saccharomyces pastorianus
gatgaacgatccacttgggtgagtt

SEQ ID NO: 118289 - DNA, 25 bp, Saccharomyces pastorianus
gagatcctccccaaaacacgaggag

SEQ ID NO: 118290 - DNA, 25 bp, Saccharomyces pastorianus
ctgttgttgagctcgatgttggtgt

SEQ ID NO: 118291 - DNA, 25 bp, Saccharomyces pastorianus
tggtgttccatgacaaacttttgtg

SEQ ID NO: 118292 - DNA, 25 bp, Saccharomyces pastorianus
ggtagtaccgttatacacagtgact

SEQ ID NO: 118293 - DNA, 25 bp, Saccharomyces pastorianus
ggtgagttcgtcatcgtttgtttcc

SEQ ID NO: 118294 - DNA, 25 bp, Saccharomyces pastorianus
agagttcctgaatctaggtggcgaa

SEQ ID NO: 118295 - DNA, 25 bp, Saccharomyces pastorianus
gtttcctcctccttaatattttgca

SEQ ID NO: 118296 - DNA, 25 bp, Saccharomyces pastorianus
ggtggcgaactatcttggtgttcca

SEQ ID NO: 118297 - DNA, 25 bp, Saccharomyces pastorianus
aaacgcaatctaccatcggactatg

SEQ ID NO: 118298 - DNA, 25 bp, Saccharomyces pastorianus
ttttcctctttatcaaccgtgggag

SEQ ID NO: 118299 - DNA, 25 bp, Saccharomyces pastorianus
acatctctccactacgcgaagaagg

SEQ ID NO: 118300 - DNA, 25 bp, Saccharomyces pastorianus
ggaggacatccgacaacgccagtct

SEQ ID NO: 118301 - DNA, 25 bp, Saccharomyces pastorianus
tggaaatcctggctcagcagcaacg

SEQ ID NO: 118302 - DNA, 25 bp, Saccharomyces pastorianus
caaaattttgttcccgtactctctg

SEQ ID NO: 118303 - DNA, 25 bp, Saccharomyces pastorianus
gaaggtactcatcgcatcaatcgct

SEQ ID NO: 118304 - DNA, 25 bp, Saccharomyces pastorianus
atcaatcgctcgtcgttacaaacgc

SEQ ID NO: 118305 - DNA, 25 bp, Saccharomyces pastorianus
aatcatcaacagacgacatctctcc

SEQ ID NO: 118306 - DNA, 25 bp, Saccharomyces pastorianus
aatcgagcatcaacatctcttccac

SEQ ID NO: 118307 - DNA, 25 bp, Saccharomyces pastorianus
ggcctacagaattgtcgttttcctc

SEQ ID NO: 118308 - DNA, 25 bp, Saccharomyces pastorianus
ttatcactgcaccatctacaagacg

SEQ ID NO: 118309 - DNA, 25 bp, Saccharomyces pastorianus
tatagccaagacctttttccttcat

SEQ ID NO: 118310 - DNA, 25 bp, Saccharomyces pastorianus
tgctgagccaggatttccacgtatt

SEQ ID NO: 118311 - DNA, 25 bp, Saccharomyces pastorianus
gcgtgtttaccaccatatatacgtg

SEQ ID NO: 118312 - DNA, 25 bp, Saccharomyces pastorianus
tttcaaatactgcaggtccttatca

SEQ ID NO: 118313 - DNA, 25 bp, Saccharomyces pastorianus
aaaacagcatacctttcatcttcct

SEQ ID NO: 118314 - DNA, 25 bp, Saccharomyces pastorianus
gtatacttatattttgtctgccgtt

SEQ ID NO: 118315 - DNA, 25 bp, Saccharomyces pastorianus
ttcatcttccttgcgttgctgctga

SEQ ID NO: 118316 - DNA, 25 bp, Saccharomyces pastorianus
ttgtctgccgttatatatagccaag

SEQ ID NO: 118317 - DNA, 25 bp, Saccharomyces pastorianus
tgttcaactttccacggtaaaatcg

SEQ ID NO: 118318 - DNA, 25 bp, Saccharomyces pastorianus
tttttccttcatgggttgttcaact

SEQ ID NO: 118319 - DNA, 25 bp, Saccharomyces pastorianus
gggcaccgatgctcaagaagtcgaa

SEQ ID NO: 118320 - DNA, 25 bp, Saccharomyces pastorianus
aacacatctaccataagccgtgaga

SEQ ID NO: 118321 - DNA, 25 bp, Saccharomyces pastorianus
cattgagggagcttgtcgacgacat

SEQ ID NO: 118322 - DNA, 25 bp, Saccharomyces pastorianus
tggacagtttcaagagggcaccgat

SEQ ID NO: 118323 - DNA, 25 bp, Saccharomyces pastorianus
actgtggtggttctctatcaaggat

SEQ ID NO: 118324 - DNA, 25 bp, Saccharomyces pastorianus
gtcgacgacattatgccttctttag

SEQ ID NO: 118325 - DNA, 25 bp, Saccharomyces pastorianus
aagcaagaacgaaagccgccacatt

SEQ ID NO: 118326 - DNA, 25 bp, Saccharomyces pastorianus
cgggatgtcacccaggtgccaaaat

SEQ ID NO: 118327 - DNA, 25 bp, Saccharomyces pastorianus
ggatacttaatccttctacattgag

SEQ ID NO: 118328 - DNA, 25 bp, Saccharomyces pastorianus
ccgccacattgctcacttattgaag

SEQ ID NO: 118329 - DNA, 25 bp, Saccharomyces pastorianus
gagatttgctcttgcgggatgtcac

SEQ ID NO: 118330 - DNA, 25 bp, Saccharomyces pastorianus
aagccaggcaatctaacttggacaa

SEQ ID NO: 118331 - DNA, 25 bp, Saccharomyces pastorianus
gtgacatcacgatcaacaaagggtt

SEQ ID NO: 118332 - DNA, 25 bp, Saccharomyces pastorianus
agacacttgatctttggcaacccca

SEQ ID NO: 118333 - DNA, 25 bp, Saccharomyces pastorianus
gatcttcctatatactctacggttg

SEQ ID NO: 118334 - DNA, 25 bp, Saccharomyces pastorianus
gaattggtcgtcaaatctgcaagag

SEQ ID NO: 118335 - DNA, 25 bp, Saccharomyces pastorianus
ttacctgtcacatccgaagatcttc

SEQ ID NO: 118336 - DNA, 25 bp, Saccharomyces pastorianus
gaatgattctaaccacagatcctct

SEQ ID NO: 118337 - DNA, 25 bp, Saccharomyces pastorianus
aacgagttccaagagatggtccaga

SEQ ID NO: 118338 - DNA, 25 bp, Saccharomyces pastorianus
aaacttatcgacagcagacacttga

SEQ ID NO: 118339 - DNA, 25 bp, Saccharomyces pastorianus
catggccgctctgtcaaatttgaat

SEQ ID NO: 118340 - DNA, 25 bp, Saccharomyces pastorianus
aaagtcctggagttgatcagcaaaa

SEQ ID NO: 118341 - DNA, 25 bp, Saccharomyces pastorianus
tcatcctcggcttcaaaggcatctt

SEQ ID NO: 118342 - DNA, 25 bp, Saccharomyces pastorianus
tgaggttcctttgatattccgtgct

SEQ ID NO: 118343 - DNA, 25 bp, Saccharomyces pastorianus
ttctgcttcttcatcttctgaatcc

SEQ ID NO: 118344 - DNA, 25 bp, Saccharomyces pastorianus
taataacactttgcctgctatgcca

SEQ ID NO: 118345 - DNA, 25 bp, Saccharomyces pastorianus
gcttctgcttacttcacatctggag

SEQ ID NO: 118346 - DNA, 25 bp, Saccharomyces pastorianus
ttacgggctcgttcaaattgatggt

SEQ ID NO: 118347 - DNA, 25 bp, Saccharomyces pastorianus
atgtcttctgtattctccggtgggc

SEQ ID NO: 118348 - DNA, 25 bp, Saccharomyces pastorianus
ttctcctatgggaaccggaatcgcc

SEQ ID NO: 118349 - DNA, 25 bp, Saccharomyces pastorianus
agcttgctaaaatctgccgcatctg

SEQ ID NO: 118350 - DNA, 25 bp, Saccharomyces pastorianus
ggaatcgccacccaacaaagttgtg

SEQ ID NO: 118351 - DNA, 25 bp, Saccharomyces pastorianus
ctccggtgggctagtctacgaatat

SEQ ID NO: 118352 - DNA, 25 bp, Saccharomyces pastorianus
gagaacccgccagacaatcctattt

SEQ ID NO: 118353 - DNA, 25 bp, Saccharomyces pastorianus
aatactccatttcaacagcagccag

SEQ ID NO: 118354 - DNA, 25 bp, Saccharomyces pastorianus
gtgagtacatcaggaccgtcagcta

SEQ ID NO: 118355 - DNA, 25 bp, Saccharomyces pastorianus
gaaaacggtgtcgatagcgtggaaa

SEQ ID NO: 118356 - DNA, 25 bp, Saccharomyces pastorianus
gaccgtcagctattaagttatccaa

SEQ ID NO: 118357 - DNA, 25 bp, Saccharomyces pastorianus
gagatgctacacaatttggtcgatg

SEQ ID NO: 118358 - DNA, 25 bp, Saccharomyces pastorianus
gaatctgagttttccgatacaaagg

SEQ ID NO: 118359 - DNA, 25 bp, Saccharomyces pastorianus
acttcaaaccaatcggcgctgtcag

SEQ ID NO: 118360 - DNA, 25 bp, Saccharomyces pastorianus
gaattgggagttaccacagcgccta

SEQ ID NO: 118361 - DNA, 25 bp, Saccharomyces pastorianus
aagccttgcctttgattgttaatac

SEQ ID NO: 118362 - DNA, 25 bp, Saccharomyces pastorianus
ggccgcaaaccgaaatccaagcgcg

SEQ ID NO: 118363 - DNA, 25 bp, Saccharomyces pastorianus
gtatcctttgtaggctcgtgctcca

SEQ ID NO: 118364 - DNA, 25 bp, Saccharomyces pastorianus
tgctggagattcaattggtttaacc

SEQ ID NO: 118365 - DNA, 25 bp, Saccharomyces pastorianus
gcttcggcgagctatttgctcacga

SEQ ID NO: 118366 - DNA, 25 bp, Saccharomyces pastorianus
ataaggtgtacccagagtcgcgcaa

SEQ ID NO: 118367 - DNA, 25 bp, Saccharomyces pastorianus
tttgctcacgagctctgctggagat

SEQ ID NO: 118368 - DNA, 25 bp, Saccharomyces pastorianus
gagtcgcgcaaaatagcagcattga

SEQ ID NO: 118369 - DNA, 25 bp, Saccharomyces pastorianus
gatgagagcccacttgtgcagagcc

SEQ ID NO: 118370 - DNA, 25 bp, Saccharomyces pastorianus
tgtgcagagccttgtatcctttgta

SEQ ID NO: 118371 - DNA, 25 bp, Saccharomyces pastorianus
tcgtgctccatcaacctacttttgc

SEQ ID NO: 118372 - DNA, 25 bp, Saccharomyces pastorianus
tacttttgcctttcctcaacggcat

SEQ ID NO: 118373 - DNA, 25 bp, Saccharomyces pastorianus
ggtgcagaacacagtgagtgccgat

SEQ ID NO: 118374 - DNA, 25 bp, Saccharomyces pastorianus
gagacagcagctttggatgaacccc

SEQ ID NO: 118375 - DNA, 25 bp, Saccharomyces pastorianus
agcagctttggatgaacccctactt

SEQ ID NO: 118376 - DNA, 25 bp, Saccharomyces pastorianus
cttcctttccacaaaaatcaagcct

SEQ ID NO: 118377 - DNA, 25 bp, Saccharomyces pastorianus
aagcagagctacagtcatcttcctt

SEQ ID NO: 118378 - DNA, 25 bp, Saccharomyces pastorianus
gacagcagctttggatgaaccccta

SEQ ID NO: 118379 - DNA, 25 bp, Saccharomyces pastorianus
gtcatcttcctttccacaaaaatca

SEQ ID NO: 118380 - DNA, 25 bp, Saccharomyces pastorianus
tacagtcatcttcctttccacaaaa

SEQ ID NO: 118381 - DNA, 25 bp, Saccharomyces pastorianus
gaacccctacttacagtaaaagcag

SEQ ID NO: 118382 - DNA, 25 bp, Saccharomyces pastorianus
ttggatgaacccctacttacagtaa

SEQ ID NO: 118383 - DNA, 25 bp, Saccharomyces pastorianus
agagctacagtcatcttcctttcca

SEQ ID NO: 118384 - DNA, 25 bp, Saccharomyces pastorianus
agctttggatgaacccctacttaca

SEQ ID NO: 118385 - DNA, 25 bp, Saccharomyces pastorianus
gttgacgttcgtgaaacctttgact

SEQ ID NO: 118386 - DNA, 25 bp, Saccharomyces pastorianus
gaatttgccgagtgaggtgatcaac

SEQ ID NO: 118387 - DNA, 25 bp, Saccharomyces pastorianus
gaagacgtcactgaaacactaactg

SEQ ID NO: 118388 - DNA, 25 bp, Saccharomyces pastorianus
ggtgatcaacaatcgtgctggcatc

SEQ ID NO: 118389 - DNA, 25 bp, Saccharomyces pastorianus
tcagaaagcatttcctctctaggaa

SEQ ID NO: 118390 - DNA, 25 bp, Saccharomyces pastorianus
gagagtggattcgagggtttcaaac

SEQ ID NO: 118391 - DNA, 25 bp, Saccharomyces pastorianus
aaaagatcgtttcaactgttgacgt

SEQ ID NO: 118392 - DNA, 25 bp, Saccharomyces pastorianus
ctggctcagcagaagcggtttcaga

SEQ ID NO: 118393 - DNA, 25 bp, Saccharomyces pastorianus
aatgttatctcttcttctgttggta

SEQ ID NO: 118394 - DNA, 25 bp, Saccharomyces pastorianus
ggagagtacaattctatgcttcaat

SEQ ID NO: 118395 - DNA, 25 bp, Saccharomyces pastorianus
tcaaatgtgatgtctctggctcagc

SEQ ID NO: 118396 - DNA, 25 bp, Saccharomyces pastorianus
aaggaatctgctaccgtttctgcaa

SEQ ID NO: 118397 - DNA, 25 bp, Saccharomyces pastorianus
ggaaaacctttgctatatgccgaaa

SEQ ID NO: 118398 - DNA, 25 bp, Saccharomyces pastorianus
gtattacgttatgacttaggcggaa

SEQ ID NO: 118399 - DNA, 25 bp, Saccharomyces pastorianus
gttacaacccgcttcaagtattacg

SEQ ID NO: 118400 - DNA, 25 bp, Saccharomyces pastorianus
ataaaaagccagctcatctgcagct

SEQ ID NO: 118401 - DNA, 25 bp, Saccharomyces pastorianus
gggtaccattcttgttttcactgat

SEQ ID NO: 118402 - DNA, 25 bp, Saccharomyces pastorianus
gggctacaacccatcgagccaaaga

SEQ ID NO: 118403 - DNA, 25 bp, Saccharomyces pastorianus
gatccgatcaaattggacccgagga

SEQ ID NO: 118404 - DNA, 25 bp, Saccharomyces pastorianus
gaagtagtgtctgtcgataacggca

SEQ ID NO: 118405 - DNA, 25 bp, Saccharomyces pastorianus
taagcactgtgccaagaccgggcta

SEQ ID NO: 118406 - DNA, 25 bp, Saccharomyces pastorianus
tttcttgatgacgacacattccaaa

SEQ ID NO: 118407 - DNA, 25 bp, Saccharomyces pastorianus
aaaatgtacctagattcccgtccat

SEQ ID NO: 118408 - DNA, 25 bp, Saccharomyces pastorianus
tttggattactagcatttctggtca

SEQ ID NO: 118409 - DNA, 25 bp, Saccharomyces pastorianus
tctattgttcactatggcccattgg

SEQ ID NO: 118410 - DNA, 25 bp, Saccharomyces pastorianus
ctggctcgatgtctgaagttttcaa

SEQ ID NO: 118411 - DNA, 25 bp, Saccharomyces pastorianus
gcgtattccgctttaatcaactgtc

SEQ ID NO: 118412 - DNA, 25 bp, Saccharomyces pastorianus
gaaggctcaagggaagtctctggat

SEQ ID NO: 118413 - DNA, 25 bp, Saccharomyces pastorianus
tctggtcaaatctggctcgatgtct

SEQ ID NO: 118414 - DNA, 25 bp, Saccharomyces pastorianus
ttatatcgaccgtgctggtaggcca

SEQ ID NO: 118415 - DNA, 25 bp, Saccharomyces pastorianus
ttatctgtgtgccttaatcatgtta

SEQ ID NO: 118416 - DNA, 25 bp, Saccharomyces pastorianus
gttgagcatcaacctgtcacatatc

SEQ ID NO: 118417 - DNA, 25 bp, Saccharomyces pastorianus
gccacgtgcattgtctggttgagca

SEQ ID NO: 118418 - DNA, 25 bp, Saccharomyces pastorianus
attcgcgtcgcgtgggcgccgaaaa

SEQ ID NO: 118419 - DNA, 25 bp, Saccharomyces pastorianus
aaagggcttatcacggcacatctga

SEQ ID NO: 118420 - DNA, 25 bp, Saccharomyces pastorianus
acctttgttgcagtcgaattctcgt

SEQ ID NO: 118421 - DNA, 25 bp, Saccharomyces pastorianus
agtcgaattctcgtggctgtacgca

SEQ ID NO: 118422 - DNA, 25 bp, Saccharomyces pastorianus
gtgggcgccgaaaagggcttatcac

SEQ ID NO: 118423 - DNA, 25 bp, Saccharomyces pastorianus
gtggctgtacgcaatttctcttatc

SEQ ID NO: 118424 - DNA, 25 bp, Saccharomyces pastorianus
aatttctcttatcctaccgtgtgaa

SEQ ID NO: 118425 - DNA, 25 bp, Saccharomyces pastorianus
tctcttatcctaccgtgtgaaacaa

SEQ ID NO: 118426 - DNA, 25 bp, Saccharomyces pastorianus
ggcttatcacggcacatctgaagaa

SEQ ID NO: 118427 - DNA, 25 bp, Saccharomyces pastorianus
gtgtgaaacaattcgcgtcgcgtgg

SEQ ID NO: 118428 - DNA, 25 bp, Saccharomyces pastorianus
tctaacacctttgttgcagtcgaat

SEQ ID NO: 118429 - DNA, 25 bp, Saccharomyces pastorianus
gcgtcctcagactactctcaaagag

SEQ ID NO: 118430 - DNA, 25 bp, Saccharomyces pastorianus
gatagccacatcaacagcatgtcct

SEQ ID NO: 118431 - DNA, 25 bp, Saccharomyces pastorianus
agcatgtcctcctacaacgataaag

SEQ ID NO: 118432 - DNA, 25 bp, Saccharomyces pastorianus
taccaggcgtcggttttgctccgaa

SEQ ID NO: 118433 - DNA, 25 bp, Saccharomyces pastorianus
aaagaactactcctgctggtccaga

SEQ ID NO: 118434 - DNA, 25 bp, Saccharomyces pastorianus
gtgccacagcacagaaatccggtac

SEQ ID NO: 118435 - DNA, 25 bp, Saccharomyces pastorianus
ttagtgtatccccaacaacgactac

SEQ ID NO: 118436 - DNA, 25 bp, Saccharomyces pastorianus
gtcataccgcacagaaatccttcga

SEQ ID NO: 118437 - DNA, 25 bp, Saccharomyces pastorianus
acagccgctggtcctgcaaatataa

SEQ ID NO: 118438 - DNA, 25 bp, Saccharomyces pastorianus
aatataaggccgtacgctggtcagc

SEQ ID NO: 118439 - DNA, 25 bp, Saccharomyces pastorianus
atcatccagtgcatcattagcgtcc

SEQ ID NO: 118440 - DNA, 25 bp, Saccharomyces pastorianus
gggtctcgatattgaagattactca

SEQ ID NO: 118441 - DNA, 25 bp, Saccharomyces pastorianus
ttgtgcgtaatagcgctctttttct

SEQ ID NO: 118442 - DNA, 25 bp, Saccharomyces pastorianus
aacttgccgagtatcgttgaggtaa

SEQ ID NO: 118443 - DNA, 25 bp, Saccharomyces pastorianus
tgacggcagtaatacccatattaat

SEQ ID NO: 118444 - DNA, 25 bp, Saccharomyces pastorianus
gttatgctgaaaccacatggcggtg

SEQ ID NO: 118445 - DNA, 25 bp, Saccharomyces pastorianus
aatgacgaagagagcaacttgccga

SEQ ID NO: 118446 - DNA, 25 bp, Saccharomyces pastorianus
acagcttcatgacacttctgcagaa

SEQ ID NO: 118447 - DNA, 25 bp, Saccharomyces pastorianus
aaggccagtgccgagaacacgctat

SEQ ID NO: 118448 - DNA, 25 bp, Saccharomyces pastorianus
gaataaagcaacacactaccagaag

SEQ ID NO: 118449 - DNA, 25 bp, Saccharomyces pastorianus
gaagtgagcactattttcagggaaa

SEQ ID NO: 118450 - DNA, 25 bp, Saccharomyces pastorianus
gaaacctatccgcaataaggccagt

SEQ ID NO: 118451 - DNA, 25 bp, Saccharomyces pastorianus
acggcgtcacacattcgttggatga

SEQ ID NO: 118452 - DNA, 25 bp, Saccharomyces pastorianus
ggatgcctttgttcaaatcgtcaaa

SEQ ID NO: 118453 - DNA, 25 bp, Saccharomyces pastorianus
gagattgaatccagctgacagacca

SEQ ID NO: 118454 - DNA, 25 bp, Saccharomyces pastorianus
atactttactgtgcggttattctcc

SEQ ID NO: 118455 - DNA, 25 bp, Saccharomyces pastorianus
gaccaactgctacggaattgctgga

SEQ ID NO: 118456 - DNA, 25 bp, Saccharomyces pastorianus
atgtacagcttcgagatacccggta

SEQ ID NO: 118457 - DNA, 25 bp, Saccharomyces pastorianus
atgaaagtcttctggacggcgtcac

SEQ ID NO: 118458 - DNA, 25 bp, Saccharomyces pastorianus
ggatgatttacgtctgcaatctcag

SEQ ID NO: 118459 - DNA, 25 bp, Saccharomyces pastorianus
gatgccaagcgtttcatcttgaagg

SEQ ID NO: 118460 - DNA, 25 bp, Saccharomyces pastorianus
gttattctccttttattgccgaaag

SEQ ID NO: 118461 - DNA, 25 bp, Saccharomyces pastorianus
ggtaaccttccatatgccatattgg

SEQ ID NO: 118462 - DNA, 25 bp, Saccharomyces pastorianus
gtccagaattttgacccctaatttg

SEQ ID NO: 118463 - DNA, 25 bp, Saccharomyces pastorianus
aaattgggtctgctcaaacccagct

SEQ ID NO: 118464 - DNA, 25 bp, Saccharomyces pastorianus
gaacacctcattttaccgaacaaat

SEQ ID NO: 118465 - DNA, 25 bp, Saccharomyces pastorianus
gttgcagaagcgctcagagctgcca

SEQ ID NO: 118466 - DNA, 25 bp, Saccharomyces pastorianus
agtagccccttctcaatcgaattga

SEQ ID NO: 118467 - DNA, 25 bp, Saccharomyces pastorianus
agcttcaccaaattctacctttagt

SEQ ID NO: 118468 - DNA, 25 bp, Saccharomyces pastorianus
atattatccagtccatctagcttca

SEQ ID NO: 118469 - DNA, 25 bp, Saccharomyces pastorianus
atgcaacagtaatttccagcgacga

SEQ ID NO: 118470 - DNA, 25 bp, Saccharomyces pastorianus
aacgtataactcctgctattgcaaa

SEQ ID NO: 118471 - DNA, 25 bp, Saccharomyces pastorianus
ggaaccttcaacgtggtccagaatt

SEQ ID NO: 118472 - DNA, 25 bp, Saccharomyces pastorianus
gacatcatgtcctaggctgagcgtt

SEQ ID NO: 118473 - DNA, 25 bp, Saccharomyces pastorianus
gataatgtttacttcttcttccatt

SEQ ID NO: 118474 - DNA, 25 bp, Saccharomyces pastorianus
atcttaggaattctgcttcctttat

SEQ ID NO: 118475 - DNA, 25 bp, Saccharomyces pastorianus
ggaattcacaaaaggagagtcgata

SEQ ID NO: 118476 - DNA, 25 bp, Saccharomyces pastorianus
gcattatcaatcttaggaattctgc

SEQ ID NO: 118477 - DNA, 25 bp, Saccharomyces pastorianus
ggagagtcgatatatctacatatta

SEQ ID NO: 118478 - DNA, 25 bp, Saccharomyces pastorianus
cttcctttatatgtgattgctgttc

SEQ ID NO: 118479 - DNA, 25 bp, Saccharomyces pastorianus
ggaagttcttcttgagtatatagga

SEQ ID NO: 118480 - DNA, 25 bp, Saccharomyces pastorianus
attgctgttccttaatcattatgtc

SEQ ID NO: 118481 - DNA, 25 bp, Saccharomyces pastorianus
acaaaatatgctggaagttcttctt

SEQ ID NO: 118482 - DNA, 25 bp, Saccharomyces pastorianus
ggaatttcatcgttgttacaggtta

SEQ ID NO: 118483 - DNA, 25 bp, Saccharomyces pastorianus
cttaatcattatgtcaccttcctat

SEQ ID NO: 118484 - DNA, 25 bp, Saccharomyces pastorianus
tgttgggtcaagtcgatcagcctac

SEQ ID NO: 118485 - DNA, 25 bp, Saccharomyces pastorianus
atgagaacaacgtcaacctctacac

SEQ ID NO: 118486 - DNA, 25 bp, Saccharomyces pastorianus
agtagatctacttcccacaagaaca

SEQ ID NO: 118487 - DNA, 25 bp, Saccharomyces pastorianus
gtgatatcacgacacagaccaccgt

SEQ ID NO: 118488 - DNA, 25 bp, Saccharomyces pastorianus
tacaccatctcctacgtggtatacg

SEQ ID NO: 118489 - DNA, 25 bp, Saccharomyces pastorianus
cagcctacgaatttttgatcacaaa

SEQ ID NO: 118490 - DNA, 25 bp, Saccharomyces pastorianus
cacaagaacaacttcccctgatata

SEQ ID NO: 118491 - DNA, 25 bp, Saccharomyces pastorianus
gttgtgcaaacgactttcacttcca

SEQ ID NO: 118492 - DNA, 25 bp, Saccharomyces pastorianus
gaacgttctcagacttgtcctattt

SEQ ID NO: 118493 - DNA, 25 bp, Saccharomyces pastorianus
tacattctccaaaccagcagacgtg

SEQ ID NO: 118494 - DNA, 25 bp, Saccharomyces pastorianus
gtggccacatacttcatttgtcgtg

SEQ ID NO: 118495 - DNA, 25 bp, Saccharomyces pastorianus
aagggctggcttgcagtttcctgtc

SEQ ID NO: 118496 - DNA, 25 bp, Saccharomyces pastorianus
gaaaagctcatggatttacaggtaa

SEQ ID NO: 118497 - DNA, 25 bp, Saccharomyces pastorianus
atcagggctacaattgcttcaggtg

SEQ ID NO: 118498 - DNA, 25 bp, Saccharomyces pastorianus
ttacaggtaaatccggcgctaaaga

SEQ ID NO: 118499 - DNA, 25 bp, Saccharomyces pastorianus
gttacctgaaaaggcacgctaccgg

SEQ ID NO: 118500 - DNA, 25 bp, Saccharomyces pastorianus
accggccgaacaagagtaggatcca

SEQ ID NO: 118501 - DNA, 25 bp, Saccharomyces pastorianus
tgcagtttcctgtcggtaggattaa

SEQ ID NO: 118502 - DNA, 25 bp, Saccharomyces pastorianus
aattgcttcaggtggtgttttgcct

SEQ ID NO: 118503 - DNA, 25 bp, Saccharomyces pastorianus
gttagattctttgatcagggctaca

SEQ ID NO: 118504 - DNA, 25 bp, Saccharomyces pastorianus
ccggcgctaaagacagtggttcatt

SEQ ID NO: 118505 - DNA, 25 bp, Saccharomyces pastorianus
taagatctcaatcttcttcagcaag

SEQ ID NO: 118506 - DNA, 25 bp, Saccharomyces pastorianus
tcgtcttcggaaattccttcggcta

SEQ ID NO: 118507 - DNA, 25 bp, Saccharomyces pastorianus
attccacctctagttgtttatctgc

SEQ ID NO: 118508 - DNA, 25 bp, Saccharomyces pastorianus
gcgcgttcaagctatcatattccga

SEQ ID NO: 118509 - DNA, 25 bp, Saccharomyces pastorianus
ttattgctggaatggtaccctggat

SEQ ID NO: 118510 - DNA, 25 bp, Saccharomyces pastorianus
gcctccggaatgtgaaacctgtttt

SEQ ID NO: 118511 - DNA, 25 bp, Saccharomyces pastorianus
agaaagtctttacgccggatcttca

SEQ ID NO: 118512 - DNA, 25 bp, Saccharomyces pastorianus
tttgaatattactttgcctccggaa

SEQ ID NO: 118513 - DNA, 25 bp, Saccharomyces pastorianus
ggcagctactaattctggatcacat

SEQ ID NO: 118514 - DNA, 25 bp, Saccharomyces pastorianus
ttcggctactgcaacccttgagaaa

SEQ ID NO: 118515 - DNA, 25 bp, Saccharomyces pastorianus
aaccttcttcggttgcgatgctaat

SEQ ID NO: 118516 - DNA, 25 bp, Saccharomyces pastorianus
tcctgaattcatgggctgcgtcggc

SEQ ID NO: 118517 - DNA, 25 bp, Saccharomyces pastorianus
gggtattactttggttgctcagtcc

SEQ ID NO: 118518 - DNA, 25 bp, Saccharomyces pastorianus
atcgattaccggtgtagcatactct

SEQ ID NO: 118519 - DNA, 25 bp, Saccharomyces pastorianus
gaaagattcataatcctcttgagag

SEQ ID NO: 118520 - DNA, 25 bp, Saccharomyces pastorianus
tatcggtgatgcaggttctatacct

SEQ ID NO: 118521 - DNA, 25 bp, Saccharomyces pastorianus
gattctttgattgcgcaacctataa

SEQ ID NO: 118522 - DNA, 25 bp, Saccharomyces pastorianus
gataggcccataatttcatcgatta

SEQ ID NO: 118523 - DNA, 25 bp, Saccharomyces pastorianus
gtgcatttggttgttgattctttga

SEQ ID NO: 118524 - DNA, 25 bp, Saccharomyces pastorianus
gcaattgtttacatggtcatcggga

SEQ ID NO: 118525 - DNA, 25 bp, Saccharomyces pastorianus
accagagtaagtccgtcgcttgtga

SEQ ID NO: 118526 - DNA, 25 bp, Saccharomyces pastorianus
ggtagaaaccagcttccattagcaa

SEQ ID NO: 118527 - DNA, 25 bp, Saccharomyces pastorianus
tttaaaaccagttgacgaggcggat

SEQ ID NO: 118528 - DNA, 25 bp, Saccharomyces pastorianus
gaccttgtgctgaattatcccgtag

SEQ ID NO: 118529 - DNA, 25 bp, Saccharomyces pastorianus
ttttgaggcgcctgtggtgatgcca

SEQ ID NO: 118530 - DNA, 25 bp, Saccharomyces pastorianus
gtgatcctgcactggatgacaacca

SEQ ID NO: 118531 - DNA, 25 bp, Saccharomyces pastorianus
gcaactgtttcttagctttctgtgt

SEQ ID NO: 118532 - DNA, 25 bp, Saccharomyces pastorianus
ggcagctactaagccattggagcga

SEQ ID NO: 118533 - DNA, 25 bp, Saccharomyces pastorianus
tctccattccctttgcattgttgca

SEQ ID NO: 118534 - DNA, 25 bp, Saccharomyces pastorianus
ctatcagtgatatcggtctccattc

SEQ ID NO: 118535 - DNA, 25 bp, Saccharomyces pastorianus
gaacatgtttgtcctgatcgtacta

SEQ ID NO: 118536 - DNA, 25 bp, Saccharomyces pastorianus
gttacgattggtgccgaccttgtgc

SEQ ID NO: 118537 - DNA, 25 bp, Saccharomyces pastorianus
caagggtgacttactcgttacgatt

SEQ ID NO: 118538 - DNA, 25 bp, Saccharomyces pastorianus
atatcagggacagggctcagtatta

SEQ ID NO: 118539 - DNA, 25 bp, Saccharomyces pastorianus
aacagtgtctctctaatatttgcga

SEQ ID NO: 118540 - DNA, 25 bp, Saccharomyces pastorianus
ggaccataatgcctcacccaaatag

SEQ ID NO: 118541 - DNA, 25 bp, Saccharomyces pastorianus
agcgatatgttttgcgcaaggccat

SEQ ID NO: 118542 - DNA, 25 bp, Saccharomyces pastorianus
gctgcagtgtcagaagttgcccaat

SEQ ID NO: 118543 - DNA, 25 bp, Saccharomyces pastorianus
aagcacagtctacgctgcagtgtca

SEQ ID NO: 118544 - DNA, 25 bp, Saccharomyces pastorianus
aaagcgatgctcaagccaattggga

SEQ ID NO: 118545 - DNA, 25 bp, Saccharomyces pastorianus
gagcggtaccaatcacactattagg

SEQ ID NO: 118546 - DNA, 25 bp, Saccharomyces pastorianus
tgtggataacaagcctctcattgcg

SEQ ID NO: 118547 - DNA, 25 bp, Saccharomyces pastorianus
gggcttcgagttggtttcaaacaat

SEQ ID NO: 118548 - DNA, 25 bp, Saccharomyces pastorianus
gatcatacgtataccgttgttgcag

SEQ ID NO: 118549 - DNA, 25 bp, Saccharomyces pastorianus
aatgcggccatggtagaacttctat

SEQ ID NO: 118550 - DNA, 25 bp, Saccharomyces pastorianus
tgcaattctactatcactgacgggt

SEQ ID NO: 118551 - DNA, 25 bp, Saccharomyces pastorianus
gcaatctgatgccaacaactctaat

SEQ ID NO: 118552 - DNA, 25 bp, Saccharomyces pastorianus
ttaagtcctgactctgaagaccgct

SEQ ID NO: 118553 - DNA, 25 bp, Saccharomyces pastorianus
gaacctggtgctacccaaatactgg

SEQ ID NO: 118554 - DNA, 25 bp, Saccharomyces pastorianus
gtgaaacatcttcccattctgacga

SEQ ID NO: 118555 - DNA, 25 bp, Saccharomyces pastorianus
tatatgattccttgtccagtactcc

SEQ ID NO: 118556 - DNA, 25 bp, Saccharomyces pastorianus
gatcctttctacttccaaacaaaca

SEQ ID NO: 118557 - DNA, 25 bp, Saccharomyces pastorianus
actctaggatccacttctgttttga

SEQ ID NO: 118558 - DNA, 25 bp, Saccharomyces pastorianus
ggtactgtgttcattgcatttgctg

SEQ ID NO: 118559 - DNA, 25 bp, Saccharomyces pastorianus
taaagaagtaccgtcctcccagtgt

SEQ ID NO: 118560 - DNA, 25 bp, Saccharomyces pastorianus
atctatgtttatttcacccaccgaa

SEQ ID NO: 118561 - DNA, 25 bp, Saccharomyces pastorianus
tagaccctagactttctgtggtatt

SEQ ID NO: 118562 - DNA, 25 bp, Saccharomyces pastorianus
aaactcccaggtttcactgggcact

SEQ ID NO: 118563 - DNA, 25 bp, Saccharomyces pastorianus
aatcaagttggaattcagtcgaaaa

SEQ ID NO: 118564 - DNA, 25 bp, Saccharomyces pastorianus
gattcgttgcaagagggccatttta

SEQ ID NO: 118565 - DNA, 25 bp, Saccharomyces pastorianus
tttgcaaaaagtatgatgttccgat

SEQ ID NO: 118566 - DNA, 25 bp, Saccharomyces pastorianus
agggccattttacaattggataagg

SEQ ID NO: 118567 - DNA, 25 bp, Saccharomyces pastorianus
gaaattagaacagcgtatccaaact

SEQ ID NO: 118568 - DNA, 25 bp, Saccharomyces pastorianus
gtttcactgggcacttccaaaatca

SEQ ID NO: 118569 - DNA, 25 bp, Saccharomyces pastorianus
gcgtatccaaactagttccattcag

SEQ ID NO: 118570 - DNA, 25 bp, Saccharomyces pastorianus
gaagatgaagccaccattcacaaga

SEQ ID NO: 118571 - DNA, 25 bp, Saccharomyces pastorianus
aggaagaattattgccggaaagtca

SEQ ID NO: 118572 - DNA, 25 bp, Saccharomyces pastorianus
atcattaacaagcttggcgccctga

SEQ ID NO: 118573 - DNA, 25 bp, Saccharomyces pastorianus
acgcctgtaacagcatcattaacaa

SEQ ID NO: 118574 - DNA, 25 bp, Saccharomyces pastorianus
agaaaagtgctgtttgccgcttaca

SEQ ID NO: 118575 - DNA, 25 bp, Saccharomyces pastorianus
ccacacgttgggaaacctgattcgt

SEQ ID NO: 118576 - DNA, 25 bp, Saccharomyces pastorianus
gtttgccgcttacaaggttgagcat

SEQ ID NO: 118577 - DNA, 25 bp, Saccharomyces pastorianus
ggcgccctgaagacaaatttcgaaa

SEQ ID NO: 118578 - DNA, 25 bp, Saccharomyces pastorianus
ctttgctcgtttcaagctgagaata

SEQ ID NO: 118579 - DNA, 25 bp, Saccharomyces pastorianus
acctgattcgtgcagaacttctgaa

SEQ ID NO: 118580 - DNA, 25 bp, Saccharomyces pastorianus
aaggttgagcatcccttctttgctc

SEQ ID NO: 118581 - DNA, 25 bp, Saccharomyces pastorianus
gctaaagattgaccccgacaccaaa

SEQ ID NO: 118582 - DNA, 25 bp, Saccharomyces pastorianus
attcgaactgttccttctgggtgaa

SEQ ID NO: 118583 - DNA, 25 bp, Saccharomyces pastorianus
tggctcccaaactactcaactaaag

SEQ ID NO: 118584 - DNA, 25 bp, Saccharomyces pastorianus
tttttattaacagccaccacagtcg

SEQ ID NO: 118585 - DNA, 25 bp, Saccharomyces pastorianus
tccgcgggatcataacattacgtta

SEQ ID NO: 118586 - DNA, 25 bp, Saccharomyces pastorianus
aggttgattatgttctcccgtcaaa

SEQ ID NO: 118587 - DNA, 25 bp, Saccharomyces pastorianus
actgtgtatcctgattttacgctta

SEQ ID NO: 118588 - DNA, 25 bp, Saccharomyces pastorianus
aaggcttatgtgattcgttctcaac

SEQ ID NO: 118589 - DNA, 25 bp, Saccharomyces pastorianus
taattcgttgactgcccataggttt

SEQ ID NO: 118590 - DNA, 25 bp, Saccharomyces pastorianus
atagttcagctggtgggttccttta

SEQ ID NO: 118591 - DNA, 25 bp, Saccharomyces pastorianus
gttctcaacaaacgcccattatgca

SEQ ID NO: 118592 - DNA, 25 bp, Saccharomyces pastorianus
aacgcattagggtctctcgatttgg

SEQ ID NO: 118593 - DNA, 25 bp, Saccharomyces pastorianus
gttcctttaacgcttcacctgataa

SEQ ID NO: 118594 - DNA, 25 bp, Saccharomyces pastorianus
gggccttctatcagcagcatcaata

SEQ ID NO: 118595 - DNA, 25 bp, Saccharomyces pastorianus
ctttgtttacgctatggcctttgtt

SEQ ID NO: 118596 - DNA, 25 bp, Saccharomyces pastorianus
tcgcatgttcgatgtccttttttct

SEQ ID NO: 118597 - DNA, 25 bp, Saccharomyces pastorianus
atgagaaaactatcctcgtcccact

SEQ ID NO: 118598 - DNA, 25 bp, Saccharomyces pastorianus
ctactctactcctctactgattgga

SEQ ID NO: 118599 - DNA, 25 bp, Saccharomyces pastorianus
gattgccaccgtgattggtttctta

SEQ ID NO: 118600 - DNA, 25 bp, Saccharomyces pastorianus
atcaatttgtagcacctccatcgaa

SEQ ID NO: 118601 - DNA, 25 bp, Saccharomyces pastorianus
aatctttaactcctgggccttctat

SEQ ID NO: 118602 - DNA, 25 bp, Saccharomyces pastorianus
acttttgcctattacactactctac

SEQ ID NO: 118603 - DNA, 25 bp, Saccharomyces pastorianus
aactgtgctgttgggttcatttgct

SEQ ID NO: 118604 - DNA, 25 bp, Saccharomyces pastorianus
aaagcatcttctcccatacgtgtta

SEQ ID NO: 118605 - DNA, 25 bp, Saccharomyces pastorianus
aacccacaattgatgcaggctgcgc

SEQ ID NO: 118606 - DNA, 25 bp, Saccharomyces pastorianus
gtggattgccagatcttggttcttt

SEQ ID NO: 118607 - DNA, 25 bp, Saccharomyces pastorianus
gagcggctgctcattcatccctgaa

SEQ ID NO: 118608 - DNA, 25 bp, Saccharomyces pastorianus
gatgtcgatgcaagtcagggtgcta

SEQ ID NO: 118609 - DNA, 25 bp, Saccharomyces pastorianus
aacatggcaggcaatctttttggtg

SEQ ID NO: 118610 - DNA, 25 bp, Saccharomyces pastorianus
aggctactctagattgggttttgct

SEQ ID NO: 118611 - DNA, 25 bp, Saccharomyces pastorianus
gaataacccagcactcagaaacatg

SEQ ID NO: 118612 - DNA, 25 bp, Saccharomyces pastorianus
aggctttgcttcaggcggaggaact

SEQ ID NO: 118613 - DNA, 25 bp, Saccharomyces pastorianus
gagcaatccaggtgcaatgcagaat

SEQ ID NO: 118614 - DNA, 25 bp, Saccharomyces pastorianus
ttattacgccaatagagcggctgct

SEQ ID NO: 118615 - DNA, 25 bp, Saccharomyces pastorianus
tggtggagcaggtgcccaatctaca

SEQ ID NO: 118616 - DNA, 25 bp, Saccharomyces pastorianus
gaagtacttttcaacaatagcttac

SEQ ID NO: 118617 - DNA, 25 bp, Saccharomyces pastorianus
gactaacgaagtacttttcaacaat

SEQ ID NO: 118618 - DNA, 25 bp, Saccharomyces pastorianus
acttttcaacaatagcttacactga

SEQ ID NO: 118619 - DNA, 25 bp, Saccharomyces pastorianus
aatagcttacactgaaactcgcgga

SEQ ID NO: 118620 - DNA, 25 bp, Saccharomyces pastorianus
caacaatagcttacactgaaactcg

SEQ ID NO: 118621 - DNA, 25 bp, Saccharomyces pastorianus
tacttttcaacaatagcttacactg

SEQ ID NO: 118622 - DNA, 25 bp, Saccharomyces pastorianus
agtacttttcaacaatagcttacac

SEQ ID NO: 118623 - DNA, 25 bp, Saccharomyces pastorianus
acgaagtacttttcaacaatagctt

SEQ ID NO: 118624 - DNA, 25 bp, Saccharomyces pastorianus
acaatagcttacactgaaactcgcg

SEQ ID NO: 118625 - DNA, 25 bp, Saccharomyces pastorianus
taacgaagtacttttcaacaatagc

SEQ ID NO: 118626 - DNA, 25 bp, Saccharomyces pastorianus
caatagcttacactgaaactcgcgg

SEQ ID NO: 118627 - DNA, 25 bp, Saccharomyces pastorianus
tagacatcggtttagctttggcttc

SEQ ID NO: 118628 - DNA, 25 bp, Saccharomyces pastorianus
gttccatggtattcttccaggcttc

SEQ ID NO: 118629 - DNA, 25 bp, Saccharomyces pastorianus
gaagattcttcatctggattttcct

SEQ ID NO: 118630 - DNA, 25 bp, Saccharomyces pastorianus
tcttcttctgcaactacttcttctg

SEQ ID NO: 118631 - DNA, 25 bp, Saccharomyces pastorianus
gccatctggtgttttagacatcggt

SEQ ID NO: 118632 - DNA, 25 bp, Saccharomyces pastorianus
agtgaaactacttcttctgccgtcg

SEQ ID NO: 118633 - DNA, 25 bp, Saccharomyces pastorianus
gctgttgcttcctccagtgaaacta

SEQ ID NO: 118634 - DNA, 25 bp, Saccharomyces pastorianus
tcttccagtgaagcttcttcttctg

SEQ ID NO: 118635 - DNA, 25 bp, Saccharomyces pastorianus
aagttcaagccactagcactgtttc

SEQ ID NO: 118636 - DNA, 25 bp, Saccharomyces pastorianus
tcttccaggcttctaccagaattgg

SEQ ID NO: 118637 - DNA, 25 bp, Saccharomyces pastorianus
tactgaagcttcttctgctgctact

SEQ ID NO: 118638 - DNA, 25 bp, Saccharomyces pastorianus
gagaatatgagttacgaccacgttt

SEQ ID NO: 118639 - DNA, 25 bp, Saccharomyces pastorianus
gctcctaatctacaaactgctgctg

SEQ ID NO: 118640 - DNA, 25 bp, Saccharomyces pastorianus
actgctgctgtttttgttgcgttta

SEQ ID NO: 118641 - DNA, 25 bp, Saccharomyces pastorianus
cagggtttcgccatacacatatttt

SEQ ID NO: 118642 - DNA, 25 bp, Saccharomyces pastorianus
caaccatactctttgtttccaactt

SEQ ID NO: 118643 - DNA, 25 bp, Saccharomyces pastorianus
actcgactcttggtttatggctgat

SEQ ID NO: 118644 - DNA, 25 bp, Saccharomyces pastorianus
atatgcttttcgctgcttattactc

SEQ ID NO: 118645 - DNA, 25 bp, Saccharomyces pastorianus
tttaacaacgctggctggagtgccg

SEQ ID NO: 118646 - DNA, 25 bp, Saccharomyces pastorianus
gaatacggtggctatctacataata

SEQ ID NO: 118647 - DNA, 25 bp, Saccharomyces pastorianus
gagatggttcctggtcaacctctga

SEQ ID NO: 118648 - DNA, 25 bp, Saccharomyces pastorianus
aagaacactttcacagtctgcgctt

SEQ ID NO: 118649 - DNA, 25 bp, Saccharomyces pastorianus
actgctctcttgaagttcttgggaa

SEQ ID NO: 118650 - DNA, 25 bp, Saccharomyces pastorianus
cttgaagttcttgggaagagccgaa

SEQ ID NO: 118651 - DNA, 25 bp, Saccharomyces pastorianus
ggacatttcaatattggtgcttata

SEQ ID NO: 118652 - DNA, 25 bp, Saccharomyces pastorianus
gaagagccgaaaaaattggacattt

SEQ ID NO: 118653 - DNA, 25 bp, Saccharomyces pastorianus
aatactttcttccatactactgctc

SEQ ID NO: 118654 - DNA, 25 bp, Saccharomyces pastorianus
attggtgcttatacattactactaa

SEQ ID NO: 118655 - DNA, 25 bp, Saccharomyces pastorianus
gtgcttatacattactactaacaag

SEQ ID NO: 118656 - DNA, 25 bp, Saccharomyces pastorianus
actactgctctcttgaagttcttgg

SEQ ID NO: 118657 - DNA, 25 bp, Saccharomyces pastorianus
tcacaatactttcttccatactact

SEQ ID NO: 118658 - DNA, 25 bp, Saccharomyces pastorianus
gtatcattcacaatactttcttcca

SEQ ID NO: 118659 - DNA, 25 bp, Saccharomyces pastorianus
tttaaaccgttttgtgtatcattca

SEQ ID NO: 118660 - DNA, 25 bp, Saccharomyces pastorianus
ggcattcgaaaagtcatacgcaaat

SEQ ID NO: 118661 - DNA, 25 bp, Saccharomyces pastorianus
agaatcctctttggcggtaaacttg

SEQ ID NO: 118662 - DNA, 25 bp, Saccharomyces pastorianus
gttcttccatatcccaatcactgaa

SEQ ID NO: 118663 - DNA, 25 bp, Saccharomyces pastorianus
aatgaagaatcctctttggcggtaa

SEQ ID NO: 118664 - DNA, 25 bp, Saccharomyces pastorianus
aaaaagttcttccatatcccaatca

SEQ ID NO: 118665 - DNA, 25 bp, Saccharomyces pastorianus
tgatacattactacacgacgtgcta

SEQ ID NO: 118666 - DNA, 25 bp, Saccharomyces pastorianus
catacgcaaatgactacttgatgaa

SEQ ID NO: 118667 - DNA, 25 bp, Saccharomyces pastorianus
gtagcatcatcgatcaatgaagaat

SEQ ID NO: 118668 - DNA, 25 bp, Saccharomyces pastorianus
tttggcggtaaacttgacaagcgat

SEQ ID NO: 118669 - DNA, 25 bp, Saccharomyces pastorianus
tagagaaggcttcgaaaactttgtt

SEQ ID NO: 118670 - DNA, 25 bp, Saccharomyces pastorianus
acttgacaagcgatgtagagaaggc

SEQ ID NO: 118671 - DNA, 25 bp, Saccharomyces pastorianus
gaggctatttcggagcacgcaagat

SEQ ID NO: 118672 - DNA, 25 bp, Saccharomyces pastorianus
ggaaaagatcctagccatcccgaat

SEQ ID NO: 118673 - DNA, 25 bp, Saccharomyces pastorianus
agacaaggccaattgcgcccttgct

SEQ ID NO: 118674 - DNA, 25 bp, Saccharomyces pastorianus
tcaaaacctatttggtgtttcagtt

SEQ ID NO: 118675 - DNA, 25 bp, Saccharomyces pastorianus
gccatcccgaatttagaggttcagt

SEQ ID NO: 118676 - DNA, 25 bp, Saccharomyces pastorianus
gaggttcagtcagaaaaatactcga

SEQ ID NO: 118677 - DNA, 25 bp, Saccharomyces pastorianus
aaaccaaagcagacaaggccaattg

SEQ ID NO: 118678 - DNA, 25 bp, Saccharomyces pastorianus
ggttcacggcctacttgatgctcta

SEQ ID NO: 118679 - DNA, 25 bp, Saccharomyces pastorianus
ccttgctctcgaggctatttcggag

SEQ ID NO: 118680 - DNA, 25 bp, Saccharomyces pastorianus
gagcacgcaagatctgtgtacgaat

SEQ ID NO: 118681 - DNA, 25 bp, Saccharomyces pastorianus
tccaaaggagaacccgatccgcagg

SEQ ID NO: 118682 - DNA, 25 bp, Saccharomyces pastorianus
atcctacccattatatttcctgcat

SEQ ID NO: 118683 - DNA, 25 bp, Saccharomyces pastorianus
atttttgaagtgatcgaaccgctgg

SEQ ID NO: 118684 - DNA, 25 bp, Saccharomyces pastorianus
agaaactcaacagcgtaaggtgcaa

SEQ ID NO: 118685 - DNA, 25 bp, Saccharomyces pastorianus
caattctggttcgtggaatagggca

SEQ ID NO: 118686 - DNA, 25 bp, Saccharomyces pastorianus
tcgaaccgctggaatttattaaagt

SEQ ID NO: 118687 - DNA, 25 bp, Saccharomyces pastorianus
agatccttacatgcttgttgagcaa

SEQ ID NO: 118688 - DNA, 25 bp, Saccharomyces pastorianus
taacttctcagttagagctagatac

SEQ ID NO: 118689 - DNA, 25 bp, Saccharomyces pastorianus
gagcaagcaatcaattctggttcgt

SEQ ID NO: 118690 - DNA, 25 bp, Saccharomyces pastorianus
aattcatgctatggcattcaaggca

SEQ ID NO: 118691 - DNA, 25 bp, Saccharomyces pastorianus
gaaaatgccgaagtcatcctaccca

SEQ ID NO: 118692 - DNA, 25 bp, Saccharomyces pastorianus
gaaacagtttcaacacagcaagtga

SEQ ID NO: 118693 - DNA, 25 bp, Saccharomyces pastorianus
gaaattgtttcttcccatgaaagca

SEQ ID NO: 118694 - DNA, 25 bp, Saccharomyces pastorianus
ggcatatctttacctgcttttacca

SEQ ID NO: 118695 - DNA, 25 bp, Saccharomyces pastorianus
gcatggctctcattactaattatgg

SEQ ID NO: 118696 - DNA, 25 bp, Saccharomyces pastorianus
gaagcattctgattttctactgaag

SEQ ID NO: 118697 - DNA, 25 bp, Saccharomyces pastorianus
taataactacggcacttccccaaag

SEQ ID NO: 118698 - DNA, 25 bp, Saccharomyces pastorianus
aaagatgtccttgtggtcagttacc

SEQ ID NO: 118699 - DNA, 25 bp, Saccharomyces pastorianus
cgagatagacttcgatattaccgcc

SEQ ID NO: 118700 - DNA, 25 bp, Saccharomyces pastorianus
tgttaacacatgcattctcctctaa

SEQ ID NO: 118701 - DNA, 25 bp, Saccharomyces pastorianus
gtacactgtgagttctactgagtca

SEQ ID NO: 118702 - DNA, 25 bp, Saccharomyces pastorianus
attctcctctaattatgctcctgta

SEQ ID NO: 118703 - DNA, 25 bp, Saccharomyces pastorianus
gatggctctgttatcgtcactgaaa

SEQ ID NO: 118704 - DNA, 25 bp, Saccharomyces pastorianus
aagtaatcacacgtcaggaacctga

SEQ ID NO: 118705 - DNA, 25 bp, Saccharomyces pastorianus
gaatcaaatcactacaagcccgcaa

SEQ ID NO: 118706 - DNA, 25 bp, Saccharomyces pastorianus
tctcgacaccgaatcccgtaaatat

SEQ ID NO: 118707 - DNA, 25 bp, Saccharomyces pastorianus
aagcccgcaatgatcaccgcgataa

SEQ ID NO: 118708 - DNA, 25 bp, Saccharomyces pastorianus
ggaggtgaactctacttttacagat

SEQ ID NO: 118709 - DNA, 25 bp, Saccharomyces pastorianus
gaacacctgaattccttagttggat

SEQ ID NO: 118710 - DNA, 25 bp, Saccharomyces pastorianus
actaaacctccgctcatataacgaa

SEQ ID NO: 118711 - DNA, 25 bp, Saccharomyces pastorianus
tacacagactccaaactttttccac

SEQ ID NO: 118712 - DNA, 25 bp, Saccharomyces pastorianus
gatattctaattttggccctacccg

SEQ ID NO: 118713 - DNA, 25 bp, Saccharomyces pastorianus
gactgcaaactaaactgcgcgcata

SEQ ID NO: 118714 - DNA, 25 bp, Saccharomyces pastorianus
atcatcctaatactacacatctacc

SEQ ID NO: 118715 - DNA, 25 bp, Saccharomyces pastorianus
cacaagcaaagacagcatccgggtt

SEQ ID NO: 118716 - DNA, 25 bp, Saccharomyces pastorianus
ccgtgtccttgtccaaagaatcaag

SEQ ID NO: 118717 - DNA, 25 bp, Saccharomyces pastorianus
aggcccgggctttactgatgctaat

SEQ ID NO: 118718 - DNA, 25 bp, Saccharomyces pastorianus
gattccacagtttggtggttctacc

SEQ ID NO: 118719 - DNA, 25 bp, Saccharomyces pastorianus
gcatccgggttgtatttacctgaaa

SEQ ID NO: 118720 - DNA, 25 bp, Saccharomyces pastorianus
gtctgctaaatctatcgttccattg

SEQ ID NO: 118721 - DNA, 25 bp, Saccharomyces pastorianus
gttgttcctcaagttaaagttggtg

SEQ ID NO: 118722 - DNA, 25 bp, Saccharomyces pastorianus
gaagttaaaccaagctgaagttgtt

SEQ ID NO: 118723 - DNA, 25 bp, Saccharomyces pastorianus
aatggtaataaggttgttcctcaag

SEQ ID NO: 118724 - DNA, 25 bp, Saccharomyces pastorianus
tggtggttctaccattaaattgggt

SEQ ID NO: 118725 - DNA, 25 bp, Saccharomyces pastorianus
atcgttccattgatggaccgtgtcc

SEQ ID NO: 118726 - DNA, 25 bp, Saccharomyces pastorianus
attggctatatctacgtttatcgct

SEQ ID NO: 118727 - DNA, 25 bp, Saccharomyces pastorianus
acgtttatcgctactgctgcagtgg

SEQ ID NO: 118728 - DNA, 25 bp, Saccharomyces pastorianus
gaatagttctgccttgagccaacaa

SEQ ID NO: 118729 - DNA, 25 bp, Saccharomyces pastorianus
gctgcagtggcatcttactttacca

SEQ ID NO: 118730 - DNA, 25 bp, Saccharomyces pastorianus
ggtgctgcatacaaagtatttggga

SEQ ID NO: 118731 - DNA, 25 bp, Saccharomyces pastorianus
atatctacgtttatcgctactgctg

SEQ ID NO: 118732 - DNA, 25 bp, Saccharomyces pastorianus
ggttcaacctcacgtattggctata

SEQ ID NO: 118733 - DNA, 25 bp, Saccharomyces pastorianus
aagttcaaactcagatgctatggga

SEQ ID NO: 118734 - DNA, 25 bp, Saccharomyces pastorianus
gggaagacggttcaacctcacgtat

SEQ ID NO: 118735 - DNA, 25 bp, Saccharomyces pastorianus
gccttgagccaacaaaaaagcggtg

SEQ ID NO: 118736 - DNA, 25 bp, Saccharomyces pastorianus
tggcatcttactttaccacgaaacc

SEQ ID NO: 118737 - DNA, 25 bp, Saccharomyces pastorianus
aaatgactacggatactgccataag

SEQ ID NO: 118738 - DNA, 25 bp, Saccharomyces pastorianus
tacaatcgatttacagccggaggat

SEQ ID NO: 118739 - DNA, 25 bp, Saccharomyces pastorianus
gtggcatattgggtgatcatcctcc

SEQ ID NO: 118740 - DNA, 25 bp, Saccharomyces pastorianus
gtaccacggaaaaggacatccctca

SEQ ID NO: 118741 - DNA, 25 bp, Saccharomyces pastorianus
ggaccctagggctacaatcgattta

SEQ ID NO: 118742 - DNA, 25 bp, Saccharomyces pastorianus
gactgcctatccgaatcttttaatt

SEQ ID NO: 118743 - DNA, 25 bp, Saccharomyces pastorianus
gaaggtaaacctattttgcctgaag

SEQ ID NO: 118744 - DNA, 25 bp, Saccharomyces pastorianus
ggcagagtctgtctattggacccta

SEQ ID NO: 118745 - DNA, 25 bp, Saccharomyces pastorianus
gattttatcatcgttaccagagagt

SEQ ID NO: 118746 - DNA, 25 bp, Saccharomyces pastorianus
tgaggccacggaaatgccatttaga

SEQ ID NO: 118747 - DNA, 25 bp, Saccharomyces pastorianus
gccggaggatgctacgaaattcgac

SEQ ID NO: 118748 - DNA, 25 bp, Saccharomyces pastorianus
ggaatcttccaaatctgatgacgaa

SEQ ID NO: 118749 - DNA, 25 bp, Saccharomyces pastorianus
aaagactatctaccctctgacattg

SEQ ID NO: 118750 - DNA, 25 bp, Saccharomyces pastorianus
gctatcctcctccttacaaagaaaa

SEQ ID NO: 118751 - DNA, 25 bp, Saccharomyces pastorianus
gatgacgaagcttcttacgtcccat

SEQ ID NO: 118752 - DNA, 25 bp, Saccharomyces pastorianus
ttgaatatctctactcccatggaag

SEQ ID NO: 118753 - DNA, 25 bp, Saccharomyces pastorianus
atacgcgggctccaaagactgtcaa

SEQ ID NO: 118754 - DNA, 25 bp, Saccharomyces pastorianus
agactgtcaagaacactcctcattt

SEQ ID NO: 118755 - DNA, 25 bp, Saccharomyces pastorianus
ggttgagagcaaatcccactgacaa

SEQ ID NO: 118756 - DNA, 25 bp, Saccharomyces pastorianus
gcggcccttttgactaatgaacttg

SEQ ID NO: 118757 - DNA, 25 bp, Saccharomyces pastorianus
ggctacaacaacaacgactacggac

SEQ ID NO: 118758 - DNA, 25 bp, Saccharomyces pastorianus
tgagggtcctgatcctgcagcaaaa

SEQ ID NO: 118759 - DNA, 25 bp, Saccharomyces pastorianus
gtcataagttcctatacacggctgg

SEQ ID NO: 118760 - DNA, 25 bp, Saccharomyces pastorianus
atgtagcagcattgacgggcgagtt

SEQ ID NO: 118761 - DNA, 25 bp, Saccharomyces pastorianus
taaatggtttcgcatgccactctgt

SEQ ID NO: 118762 - DNA, 25 bp, Saccharomyces pastorianus
aactcctctcgattgatcgttggta

SEQ ID NO: 118763 - DNA, 25 bp, Saccharomyces pastorianus
tttcatgctggaacctacaaacccg

SEQ ID NO: 118764 - DNA, 25 bp, Saccharomyces pastorianus
aaacgccgcaattgaccgaactatt

SEQ ID NO: 118765 - DNA, 25 bp, Saccharomyces pastorianus
gttgctgtggagttcttcgatgatc

SEQ ID NO: 118766 - DNA, 25 bp, Saccharomyces pastorianus
gtggttaagattgcctgttctgaca

SEQ ID NO: 118767 - DNA, 25 bp, Saccharomyces pastorianus
acacggctggctctgatggcataat

SEQ ID NO: 118768 - DNA, 25 bp, Saccharomyces pastorianus
ttctatgtctggcaacttctgatga

SEQ ID NO: 118769 - DNA, 25 bp, Saccharomyces pastorianus
agagatgtcgctcttttaccgaaag

SEQ ID NO: 118770 - DNA, 25 bp, Saccharomyces pastorianus
aacagaatcccgctgctttacaaga

SEQ ID NO: 118771 - DNA, 25 bp, Saccharomyces pastorianus
aagtattttgcagcaggcccaacag

SEQ ID NO: 118772 - DNA, 25 bp, Saccharomyces pastorianus
tatgcttccgctttggaaacactag

SEQ ID NO: 118773 - DNA, 25 bp, Saccharomyces pastorianus
gagcttatatcaggaaggccaccgc

SEQ ID NO: 118774 - DNA, 25 bp, Saccharomyces pastorianus
atagagctgctgcactagcgaagtt

SEQ ID NO: 118775 - DNA, 25 bp, Saccharomyces pastorianus
agcgaagttaatgtctttccctgaa

SEQ ID NO: 118776 - DNA, 25 bp, Saccharomyces pastorianus
gaaacactagatgcggccagaacca

SEQ ID NO: 118777 - DNA, 25 bp, Saccharomyces pastorianus
tttccctgaagctatcgcagattgt

SEQ ID NO: 118778 - DNA, 25 bp, Saccharomyces pastorianus
caaagattccaacctggtaccagta

SEQ ID NO: 118779 - DNA, 25 bp, Saccharomyces pastorianus
aggccaccgcacaaattgctgttaa

SEQ ID NO: 118780 - DNA, 25 bp, Saccharomyces pastorianus
ggcggaggcgtatgttaaccctgaa

SEQ ID NO: 118781 - DNA, 25 bp, Saccharomyces pastorianus
ggtatccttatcaaatcactctctc

SEQ ID NO: 118782 - DNA, 25 bp, Saccharomyces pastorianus
gcagacatcaactagttctcgagtg

SEQ ID NO: 118783 - DNA, 25 bp, Saccharomyces pastorianus
ctaccctcatcctcatagatttagt

SEQ ID NO: 118784 - DNA, 25 bp, Saccharomyces pastorianus
gcgccgtggtatttccgctcgggaa

SEQ ID NO: 118785 - DNA, 25 bp, Saccharomyces pastorianus
tcccgcattgcatcaaagcttatcg

SEQ ID NO: 118786 - DNA, 25 bp, Saccharomyces pastorianus
atcactctctccctagtgttggaag

SEQ ID NO: 118787 - DNA, 25 bp, Saccharomyces pastorianus
ataagtgacgcaactccggttccga

SEQ ID NO: 118788 - DNA, 25 bp, Saccharomyces pastorianus
gccttctgctcctggttacaatttt

SEQ ID NO: 118789 - DNA, 25 bp, Saccharomyces pastorianus
ttctttgcatgtcatcattgggata

SEQ ID NO: 118790 - DNA, 25 bp, Saccharomyces pastorianus
gtgttggaagggtttcactcgcctt

SEQ ID NO: 118791 - DNA, 25 bp, Saccharomyces pastorianus
caatttttgcctagtactccttcct

SEQ ID NO: 118792 - DNA, 25 bp, Saccharomyces pastorianus
tagctacagacatcagtgacaacga

SEQ ID NO: 118793 - DNA, 25 bp, Saccharomyces pastorianus
gcaagcatttaagcgccataacgtt

SEQ ID NO: 118794 - DNA, 25 bp, Saccharomyces pastorianus
ggacaaatttttcgccaatccaaca

SEQ ID NO: 118795 - DNA, 25 bp, Saccharomyces pastorianus
tcaagtttagtaggatccccttcac

SEQ ID NO: 118796 - DNA, 25 bp, Saccharomyces pastorianus
gagattccaattatctagctacaga

SEQ ID NO: 118797 - DNA, 25 bp, Saccharomyces pastorianus
gaccaggagccgacaaacatattag

SEQ ID NO: 118798 - DNA, 25 bp, Saccharomyces pastorianus
gaagcctaggcgaaaaaccaattca

SEQ ID NO: 118799 - DNA, 25 bp, Saccharomyces pastorianus
acccacctggaaatctccaatcgaa

SEQ ID NO: 118800 - DNA, 25 bp, Saccharomyces pastorianus
gacattatccaaatatcgacagcta

SEQ ID NO: 118801 - DNA, 25 bp, Saccharomyces pastorianus
agtaacactacttcccacgattcat

SEQ ID NO: 118802 - DNA, 25 bp, Saccharomyces pastorianus
agaaggctcaactgttagaccagga

SEQ ID NO: 118803 - DNA, 25 bp, Saccharomyces pastorianus
gccctcaatgtaagagttgtggtga

SEQ ID NO: 118804 - DNA, 25 bp, Saccharomyces pastorianus
aaatgtgatcacagcaccggaagcc

SEQ ID NO: 118805 - DNA, 25 bp, Saccharomyces pastorianus
cttccaagctgttctggcggtgaaa

SEQ ID NO: 118806 - DNA, 25 bp, Saccharomyces pastorianus
gcaaatgcgaaaccacgtgcacttg

SEQ ID NO: 118807 - DNA, 25 bp, Saccharomyces pastorianus
ggcgaatgttgtaaggactcttgtc

SEQ ID NO: 118808 - DNA, 25 bp, Saccharomyces pastorianus
atgcgaaaccacgtgcacttgtgaa

SEQ ID NO: 118809 - DNA, 25 bp, Saccharomyces pastorianus
atatgtgactgtgaaggcgaatgtt

SEQ ID NO: 118810 - DNA, 25 bp, Saccharomyces pastorianus
attgtgggagcacctgccttccaag

SEQ ID NO: 118811 - DNA, 25 bp, Saccharomyces pastorianus
gactcttgtcattgtgggagcacct

SEQ ID NO: 118812 - DNA, 25 bp, Saccharomyces pastorianus
gcaccggaagccctcaatgtaagag

SEQ ID NO: 118813 - DNA, 25 bp, Saccharomyces pastorianus
ctgttctggcggtgaaaagtgcaaa

SEQ ID NO: 118814 - DNA, 25 bp, Saccharomyces pastorianus
tcttcccattacatctagagaccta

SEQ ID NO: 118815 - DNA, 25 bp, Saccharomyces pastorianus
gagacctagcagacttagatggcct

SEQ ID NO: 118816 - DNA, 25 bp, Saccharomyces pastorianus
gcagcggcagccacgacaacaacaa

SEQ ID NO: 118817 - DNA, 25 bp, Saccharomyces pastorianus
ggattctttcgtccatcttaccgag

SEQ ID NO: 118818 - DNA, 25 bp, Saccharomyces pastorianus
aagtgcctacagctaagcttggcta

SEQ ID NO: 118819 - DNA, 25 bp, Saccharomyces pastorianus
tattccacatcaaaacggcctcatg

SEQ ID NO: 118820 - DNA, 25 bp, Saccharomyces pastorianus
aagcaaaccagaagctgccaacgcc

SEQ ID NO: 118821 - DNA, 25 bp, Saccharomyces pastorianus
agaactgtcccaacgctacgagtag

SEQ ID NO: 118822 - DNA, 25 bp, Saccharomyces pastorianus
atgacacacgggattctttcgtcca

SEQ ID NO: 118823 - DNA, 25 bp, Saccharomyces pastorianus
ggacaggaagggtatcacacaatat

SEQ ID NO: 118824 - DNA, 25 bp, Saccharomyces pastorianus
catgagcggcaccaacaattcacat

SEQ ID NO: 118825 - DNA, 25 bp, Saccharomyces pastorianus
atacaatggctttttcccaaagtag

SEQ ID NO: 118826 - DNA, 25 bp, Saccharomyces pastorianus
tttaatcttttcttggtctaataca

SEQ ID NO: 118827 - DNA, 25 bp, Saccharomyces pastorianus
gacacatctacttttaatcttttct

SEQ ID NO: 118828 - DNA, 25 bp, Saccharomyces pastorianus
tggcttaatttgacacatctacttt

SEQ ID NO: 118829 - DNA, 25 bp, Saccharomyces pastorianus
gtaccctgtcctactttactgggca

SEQ ID NO: 118830 - DNA, 25 bp, Saccharomyces pastorianus
gtagaaggcttcttactccaaccgt

SEQ ID NO: 118831 - DNA, 25 bp, Saccharomyces pastorianus
tggtctaatacaatggctttttccc

SEQ ID NO: 118832 - DNA, 25 bp, Saccharomyces pastorianus
cggggcaaacatacttgtggcttaa

SEQ ID NO: 118833 - DNA, 25 bp, Saccharomyces pastorianus
gggcattgattttttaattcttgtc

SEQ ID NO: 118834 - DNA, 25 bp, Saccharomyces pastorianus
gtcctactttactgggcattgattt

SEQ ID NO: 118835 - DNA, 25 bp, Saccharomyces pastorianus
tggctttttcccaaagtagaaggct

SEQ ID NO: 118836 - DNA, 25 bp, Saccharomyces pastorianus
tagacgaaaacgttcctttgcaaag

SEQ ID NO: 118837 - DNA, 25 bp, Saccharomyces pastorianus
gaacttggcatcatcggagacctct

SEQ ID NO: 118838 - DNA, 25 bp, Saccharomyces pastorianus
gagtctcaacgagcagtggctgcta

SEQ ID NO: 118839 - DNA, 25 bp, Saccharomyces pastorianus
attgccaccacgattccattgatag

SEQ ID NO: 118840 - DNA, 25 bp, Saccharomyces pastorianus
aacttcttcagttatccgacgttga

SEQ ID NO: 118841 - DNA, 25 bp, Saccharomyces pastorianus
aatgctattcaggtatttgcggatc

SEQ ID NO: 118842 - DNA, 25 bp, Saccharomyces pastorianus
taacgaggtgtatccgttgctgcaa

SEQ ID NO: 118843 - DNA, 25 bp, Saccharomyces pastorianus
acgattgctgctaagttctttaact

SEQ ID NO: 118844 - DNA, 25 bp, Saccharomyces pastorianus
gtggctgctatctttgctaacattg

SEQ ID NO: 118845 - DNA, 25 bp, Saccharomyces pastorianus
aggcactattagctctgacgaactt

SEQ ID NO: 118846 - DNA, 25 bp, Saccharomyces pastorianus
ttcaggaccagagttttcagcggca

SEQ ID NO: 118847 - DNA, 25 bp, Saccharomyces pastorianus
ataatgatgttcaccgctggtaccg

SEQ ID NO: 118848 - DNA, 25 bp, Saccharomyces pastorianus
ttggcattggtatgcggccccgaaa

SEQ ID NO: 118849 - DNA, 25 bp, Saccharomyces pastorianus
atggttacaccatcttcccaaggga

SEQ ID NO: 118850 - DNA, 25 bp, Saccharomyces pastorianus
cttcaagcttcaaacagggtccagt

SEQ ID NO: 118851 - DNA, 25 bp, Saccharomyces pastorianus
atgcggccccgaaagttatattaat

SEQ ID NO: 118852 - DNA, 25 bp, Saccharomyces pastorianus
agatctcgcgattgtttatacatgg

SEQ ID NO: 118853 - DNA, 25 bp, Saccharomyces pastorianus
gtaccggaatagttactgcgttgca

SEQ ID NO: 118854 - DNA, 25 bp, Saccharomyces pastorianus
gaagccctacccatacaaaggtctg

SEQ ID NO: 118855 - DNA, 25 bp, Saccharomyces pastorianus
taaacaactgggacccttgtatcct

SEQ ID NO: 118856 - DNA, 25 bp, Saccharomyces pastorianus
tcccaatttatttaccagccttatg

SEQ ID NO: 118857 - DNA, 25 bp, Saccharomyces pastorianus
actgcgttgcaactacttttgactg

SEQ ID NO: 118858 - DNA, 25 bp, Saccharomyces pastorianus
aaatcatcgagacatagttccattg

SEQ ID NO: 118859 - DNA, 25 bp, Saccharomyces pastorianus
ctcatccatgcacgctacattataa

SEQ ID NO: 118860 - DNA, 25 bp, Saccharomyces pastorianus
gaatatttctgtgatgtcgatcctg

SEQ ID NO: 118861 - DNA, 25 bp, Saccharomyces pastorianus
gatatggtacccaaacacccaacta

SEQ ID NO: 118862 - DNA, 25 bp, Saccharomyces pastorianus
acattcctggtatagattgtgtcaa

SEQ ID NO: 118863 - DNA, 25 bp, Saccharomyces pastorianus
aagatgtccccgtgtgtattgtaat

SEQ ID NO: 118864 - DNA, 25 bp, Saccharomyces pastorianus
tgtcgatcctgagtacatcactgat

SEQ ID NO: 118865 - DNA, 25 bp, Saccharomyces pastorianus
aacatgacacatgcccgtttagaac

SEQ ID NO: 118866 - DNA, 25 bp, Saccharomyces pastorianus
attcccggaagctgtatggtctcat

SEQ ID NO: 118867 - DNA, 25 bp, Saccharomyces pastorianus
aagctcaactgacaaggtggcaaga

SEQ ID NO: 118868 - DNA, 25 bp, Saccharomyces pastorianus
ttaccggttggtttgcatgacattc

SEQ ID NO: 118869 - DNA, 25 bp, Saccharomyces pastorianus
ctcagacttccttctggcaggtaag

SEQ ID NO: 118870 - DNA, 25 bp, Saccharomyces pastorianus
ggaaaagcatccttcaattcttgca

SEQ ID NO: 118871 - DNA, 25 bp, Saccharomyces pastorianus
tcttttgcatcctcagcgggtgtca

SEQ ID NO: 118872 - DNA, 25 bp, Saccharomyces pastorianus
catccgtcgtctttgaaatatcctc

SEQ ID NO: 118873 - DNA, 25 bp, Saccharomyces pastorianus
ggaatttaggtccacatccgtcgtc

SEQ ID NO: 118874 - DNA, 25 bp, Saccharomyces pastorianus
ataccttccttttcttccatgattt

SEQ ID NO: 118875 - DNA, 25 bp, Saccharomyces pastorianus
tggattctctttagatggctcctcc

SEQ ID NO: 118876 - DNA, 25 bp, Saccharomyces pastorianus
aagtgtcattatcctttttcccatc

SEQ ID NO: 118877 - DNA, 25 bp, Saccharomyces pastorianus
gaggacttgttcaccttttcttcaa

SEQ ID NO: 118878 - DNA, 25 bp, Saccharomyces pastorianus
gattccggaacattactcttttcaa

SEQ ID NO: 118879 - DNA, 25 bp, Saccharomyces pastorianus
aaccttaggtgtaccatccttggca

SEQ ID NO: 118880 - DNA, 25 bp, Saccharomyces pastorianus
gaacccctggatactacaccaacta

SEQ ID NO: 118881 - DNA, 25 bp, Saccharomyces pastorianus
gtcggtgatgactctttagaaagcc

SEQ ID NO: 118882 - DNA, 25 bp, Saccharomyces pastorianus
aaaggacctgccagagcttacggac

SEQ ID NO: 118883 - DNA, 25 bp, Saccharomyces pastorianus
cttacggacagagctggtcggtcat

SEQ ID NO: 118884 - DNA, 25 bp, Saccharomyces pastorianus
attcgtttggcgttcaagtcggtga

SEQ ID NO: 118885 - DNA, 25 bp, Saccharomyces pastorianus
gcttaccggagaaactttgcgtcag

SEQ ID NO: 118886 - DNA, 25 bp, Saccharomyces pastorianus
ggtcggtcattacaggacacagcaa

SEQ ID NO: 118887 - DNA, 25 bp, Saccharomyces pastorianus
gaagatgtgccacctcagttaccaa

SEQ ID NO: 118888 - DNA, 25 bp, Saccharomyces pastorianus
gaaaaattcaagaccccagcaacct

SEQ ID NO: 118889 - DNA, 25 bp, Saccharomyces pastorianus
acaaaatctggtgagtcggctggaa

SEQ ID NO: 118890 - DNA, 25 bp, Saccharomyces pastorianus
agaagattcgtggtcgcaatttgta

SEQ ID NO: 118891 - DNA, 25 bp, Saccharomyces pastorianus
gggaggcagagcacaaaccttctca

SEQ ID NO: 118892 - DNA, 25 bp, Saccharomyces pastorianus
acctccggagttgcccaaattgtat

SEQ ID NO: 118893 - DNA, 25 bp, Saccharomyces pastorianus
taacagtaccatttctacagcaagg

SEQ ID NO: 118894 - DNA, 25 bp, Saccharomyces pastorianus
aagcggaagtacagcacctgctaca

SEQ ID NO: 118895 - DNA, 25 bp, Saccharomyces pastorianus
actcttcctcgagacatagttcgca

SEQ ID NO: 118896 - DNA, 25 bp, Saccharomyces pastorianus
ttgccgattggctaacgagacaact

SEQ ID NO: 118897 - DNA, 25 bp, Saccharomyces pastorianus
gcagaccagaagtaaacctccggag

SEQ ID NO: 118898 - DNA, 25 bp, Saccharomyces pastorianus
aaccttctcaagacaacttcatcac

SEQ ID NO: 118899 - DNA, 25 bp, Saccharomyces pastorianus
gcagataacgttcgttcgcactctt

SEQ ID NO: 118900 - DNA, 25 bp, Saccharomyces pastorianus
cataaaatcattgtacccgtccgat

SEQ ID NO: 118901 - DNA, 25 bp, Saccharomyces pastorianus
ataagttcactgtctctttgccgat

SEQ ID NO: 118902 - DNA, 25 bp, Saccharomyces pastorianus
ttgctaataccattcttaggcctgt

SEQ ID NO: 118903 - DNA, 25 bp, Saccharomyces pastorianus
aaatagttctattgctcgttataca

SEQ ID NO: 118904 - DNA, 25 bp, Saccharomyces pastorianus
ataataggccgcatagtcccaggct

SEQ ID NO: 118905 - DNA, 25 bp, Saccharomyces pastorianus
ttaggcctgtatgcattcgatctct

SEQ ID NO: 118906 - DNA, 25 bp, Saccharomyces pastorianus
gtcgcacatgcatagcttttttgct

SEQ ID NO: 118907 - DNA, 25 bp, Saccharomyces pastorianus
attcgatctcttcctatacgtttat

SEQ ID NO: 118908 - DNA, 25 bp, Saccharomyces pastorianus
ttaactctgctattgacgcgaatga

SEQ ID NO: 118909 - DNA, 25 bp, Saccharomyces pastorianus
gattgcatggataccttaattggcc

SEQ ID NO: 118910 - DNA, 25 bp, Saccharomyces pastorianus
acgatccacagccactctaaaagat

SEQ ID NO: 118911 - DNA, 25 bp, Saccharomyces pastorianus
cacttcaatatatctgtcgcacatg

SEQ ID NO: 118912 - DNA, 25 bp, Saccharomyces pastorianus
gagtatttttgttatccacgatcca

SEQ ID NO: 118913 - DNA, 25 bp, Saccharomyces pastorianus
tccaagctttcaaggaatctccact

SEQ ID NO: 118914 - DNA, 25 bp, Saccharomyces pastorianus
aagctttcaaggaatctccactata

SEQ ID NO: 118915 - DNA, 25 bp, Saccharomyces pastorianus
aggcgcagctgcaggtgcggcctcc

SEQ ID NO: 118916 - DNA, 25 bp, Saccharomyces pastorianus
aaacggtgccttcttcgttgcaggt

SEQ ID NO: 118917 - DNA, 25 bp, Saccharomyces pastorianus
tgcaggtgttgcgtttattcaatct

SEQ ID NO: 118918 - DNA, 25 bp, Saccharomyces pastorianus
aatctccactatacacaattgcact

SEQ ID NO: 118919 - DNA, 25 bp, Saccharomyces pastorianus
gtgccttcttcgttgcaggtgttgc

SEQ ID NO: 118920 - DNA, 25 bp, Saccharomyces pastorianus
aggaatctccactatacacaattgc

SEQ ID NO: 118921 - DNA, 25 bp, Saccharomyces pastorianus
gtttgctatgccaggcgcagctgca

SEQ ID NO: 118922 - DNA, 25 bp, Saccharomyces pastorianus
ttcttcgttgcaggtgttgcgttta

SEQ ID NO: 118923 - DNA, 25 bp, Saccharomyces pastorianus
gcactaaacggtgccttcttcgttg

SEQ ID NO: 118924 - DNA, 25 bp, Saccharomyces pastorianus
gccgatgcagttaggcagtacgcaa

SEQ ID NO: 118925 - DNA, 25 bp, Saccharomyces pastorianus
gctaacggacaagcagatccagcta

SEQ ID NO: 118926 - DNA, 25 bp, Saccharomyces pastorianus
gatccagctacttacattcacagaa

SEQ ID NO: 118927 - DNA, 25 bp, Saccharomyces pastorianus
attcctactgtctcaatggttgtca

SEQ ID NO: 118928 - DNA, 25 bp, Saccharomyces pastorianus
agaagatcgttccaaatgctaatac

SEQ ID NO: 118929 - DNA, 25 bp, Saccharomyces pastorianus
aaatgactcgtgttccaacggatga

SEQ ID NO: 118930 - DNA, 25 bp, Saccharomyces pastorianus
tgattactactaatgtcctggcccg

SEQ ID NO: 118931 - DNA, 25 bp, Saccharomyces pastorianus
gacgacttcagagagggtagatcca

SEQ ID NO: 118932 - DNA, 25 bp, Saccharomyces pastorianus
tactaatgtcctggcccgtggtatt

SEQ ID NO: 118933 - DNA, 25 bp, Saccharomyces pastorianus
gtagaaccggtagattcggcagaaa

SEQ ID NO: 118934 - DNA, 25 bp, Saccharomyces pastorianus
tatcttgcatggtgatttacagaca

SEQ ID NO: 118935 - DNA, 25 bp, Saccharomyces pastorianus
ttaaatgttgccgtcgaggcccaat

SEQ ID NO: 118936 - DNA, 25 bp, Saccharomyces pastorianus
ttgaaaaggcctgtcatgccgcctc

SEQ ID NO: 118937 - DNA, 25 bp, Saccharomyces pastorianus
ccaagcctcataccgcatggtttta

SEQ ID NO: 118938 - DNA, 25 bp, Saccharomyces pastorianus
gacattggttaactcagacttatac

SEQ ID NO: 118939 - DNA, 25 bp, Saccharomyces pastorianus
aatacatgactgcactaactctggt

SEQ ID NO: 118940 - DNA, 25 bp, Saccharomyces pastorianus
gctgccatctggtttcaatgccaaa

SEQ ID NO: 118941 - DNA, 25 bp, Saccharomyces pastorianus
aattacttcctctaagttccagtga

SEQ ID NO: 118942 - DNA, 25 bp, Saccharomyces pastorianus
gaggcccaatgcagatatgacttta

SEQ ID NO: 118943 - DNA, 25 bp, Saccharomyces pastorianus
aaacttaccgcaattcagactacaa

SEQ ID NO: 118944 - DNA, 25 bp, Saccharomyces pastorianus
ggaacccattatgcgtctatcaaag

SEQ ID NO: 118945 - DNA, 25 bp, Saccharomyces pastorianus
acttcagaggagagggctgccatct

SEQ ID NO: 118946 - DNA, 25 bp, Saccharomyces pastorianus
gtcctgggtgctataccgttgaatt

SEQ ID NO: 118947 - DNA, 25 bp, Saccharomyces pastorianus
acaagttactcccaaagatcccatg

SEQ ID NO: 118948 - DNA, 25 bp, Saccharomyces pastorianus
atacctgttcaagtgcggcttcgaa

SEQ ID NO: 118949 - DNA, 25 bp, Saccharomyces pastorianus
aaggtcacttttgctcgaaacacag

SEQ ID NO: 118950 - DNA, 25 bp, Saccharomyces pastorianus
gcttgttatttcgatacctgttcaa

SEQ ID NO: 118951 - DNA, 25 bp, Saccharomyces pastorianus
gcggcttcgaaattcatcggtgact

SEQ ID NO: 118952 - DNA, 25 bp, Saccharomyces pastorianus
gcttgtaatggcttaacgagctgca

SEQ ID NO: 118953 - DNA, 25 bp, Saccharomyces pastorianus
agaaatcagattccgggaccgtcct

SEQ ID NO: 118954 - DNA, 25 bp, Saccharomyces pastorianus
aaggtcttctagtaactctagcgtg

SEQ ID NO: 118955 - DNA, 25 bp, Saccharomyces pastorianus
ggataaaagcacataccacgctaag

SEQ ID NO: 118956 - DNA, 25 bp, Saccharomyces pastorianus
aactctagcgtgacatcgacgggtc

SEQ ID NO: 118957 - DNA, 25 bp, Saccharomyces pastorianus
taagatcgctgtagccctcctttat

SEQ ID NO: 118958 - DNA, 25 bp, Saccharomyces pastorianus
tcttcatctttaccaccagtatcgt

SEQ ID NO: 118959 - DNA, 25 bp, Saccharomyces pastorianus
atcatcctcctcatcgttatcttca

SEQ ID NO: 118960 - DNA, 25 bp, Saccharomyces pastorianus
ttaccaccagtatcgttcttcttat

SEQ ID NO: 118961 - DNA, 25 bp, Saccharomyces pastorianus
aattagtcctatttaagatcgctgt

SEQ ID NO: 118962 - DNA, 25 bp, Saccharomyces pastorianus
ttttccttcatcgtcgtcgtcgtcg

SEQ ID NO: 118963 - DNA, 25 bp, Saccharomyces pastorianus
gtatcgttcttcttattatcatcct

SEQ ID NO: 118964 - DNA, 25 bp, Saccharomyces pastorianus
ccaccagtatcgttcttcttattat

SEQ ID NO: 118965 - DNA, 25 bp, Saccharomyces pastorianus
tatttaagatcgctgtagccctcct

SEQ ID NO: 118966 - DNA, 25 bp, Saccharomyces pastorianus
gtagccctcctttatcttctttctt

SEQ ID NO: 118967 - DNA, 25 bp, Saccharomyces pastorianus
ttcttttttccttcatcgtcgtcgt

SEQ ID NO: 118968 - DNA, 25 bp, Saccharomyces pastorianus
gaagttccgctagcattcatgattg

SEQ ID NO: 118969 - DNA, 25 bp, Saccharomyces pastorianus
ggagtttgctccacatctgatctga

SEQ ID NO: 118970 - DNA, 25 bp, Saccharomyces pastorianus
gttgctttcttttcgctggactgtc

SEQ ID NO: 118971 - DNA, 25 bp, Saccharomyces pastorianus
aaccctggctctggtgtattactta

SEQ ID NO: 118972 - DNA, 25 bp, Saccharomyces pastorianus
gcctgctcagctccagagagagtat

SEQ ID NO: 118973 - DNA, 25 bp, Saccharomyces pastorianus
gatgaacctatattggcctgctcag

SEQ ID NO: 118974 - DNA, 25 bp, Saccharomyces pastorianus
atttgtttgtcattgcgtctctgca

SEQ ID NO: 118975 - DNA, 25 bp, Saccharomyces pastorianus
agaatttgtgtcaggcattgccgat

SEQ ID NO: 118976 - DNA, 25 bp, Saccharomyces pastorianus
gatctgagactacccaactttggat

SEQ ID NO: 118977 - DNA, 25 bp, Saccharomyces pastorianus
gtattacttacaactgccccagaag

SEQ ID NO: 118978 - DNA, 25 bp, Saccharomyces pastorianus
gagagtattcgaagcaacccctttc

SEQ ID NO: 118979 - DNA, 25 bp, Saccharomyces pastorianus
acttctgtgcctcatgcggtggaca

SEQ ID NO: 118980 - DNA, 25 bp, Saccharomyces pastorianus
agagaatcaggtggcattggcgact

SEQ ID NO: 118981 - DNA, 25 bp, Saccharomyces pastorianus
agaggatcgccatgtcgcattgaat

SEQ ID NO: 118982 - DNA, 25 bp, Saccharomyces pastorianus
gataactatatttctccatttgcaa

SEQ ID NO: 118983 - DNA, 25 bp, Saccharomyces pastorianus
gacggcaagccaaagcacttctgtg

SEQ ID NO: 118984 - DNA, 25 bp, Saccharomyces pastorianus
taagatgcgcagtttccgttgactc

SEQ ID NO: 118985 - DNA, 25 bp, Saccharomyces pastorianus
agatattctgtagccagccccttat

SEQ ID NO: 118986 - DNA, 25 bp, Saccharomyces pastorianus
gttgaagcagcataacgtccgcatt

SEQ ID NO: 118987 - DNA, 25 bp, Saccharomyces pastorianus
ggtggcggttctgcggataactata

SEQ ID NO: 118988 - DNA, 25 bp, Saccharomyces pastorianus
atatttcctctaccaaaagacggca

SEQ ID NO: 118989 - DNA, 25 bp, Saccharomyces pastorianus
gactggcgattttgccgtccaaaat

SEQ ID NO: 118990 - DNA, 25 bp, Saccharomyces pastorianus
ggtggatccaaaagcagtgtcatta

SEQ ID NO: 118991 - DNA, 25 bp, Saccharomyces pastorianus
cggatccagataccaaaagggctat

SEQ ID NO: 118992 - DNA, 25 bp, Saccharomyces pastorianus
agaagaactttatcgatatcgtacc

SEQ ID NO: 118993 - DNA, 25 bp, Saccharomyces pastorianus
attggtatcaatccagcacctctgt

SEQ ID NO: 118994 - DNA, 25 bp, Saccharomyces pastorianus
gagagattgtcttatccatcgtcct

SEQ ID NO: 118995 - DNA, 25 bp, Saccharomyces pastorianus
cgggatcggctgatagtttctttca

SEQ ID NO: 118996 - DNA, 25 bp, Saccharomyces pastorianus
ttcaaaagctttacgctggagcgga

SEQ ID NO: 118997 - DNA, 25 bp, Saccharomyces pastorianus
gcaacccgcttattatcagcagaaa

SEQ ID NO: 118998 - DNA, 25 bp, Saccharomyces pastorianus
aaaattctgattctgcaacccgctt

SEQ ID NO: 118999 - DNA, 25 bp, Saccharomyces pastorianus
taagctttcgcatgaggtggatcca

SEQ ID NO: 119000 - DNA, 25 bp, Saccharomyces pastorianus
ttactgttaatcttcctgagtctaa

SEQ ID NO: 119001 - DNA, 25 bp, Saccharomyces pastorianus
aacgaagttatctagtccgaacaga

SEQ ID NO: 119002 - DNA, 25 bp, Saccharomyces pastorianus
taaaaggtcgactggcaccacgggt

SEQ ID NO: 119003 - DNA, 25 bp, Saccharomyces pastorianus
agaatgtacgaagcccggaacgcaa

SEQ ID NO: 119004 - DNA, 25 bp, Saccharomyces pastorianus
gaactcgcttgctcgtcatatgcaa

SEQ ID NO: 119005 - DNA, 25 bp, Saccharomyces pastorianus
gatctttcatcatcgcctaggataa

SEQ ID NO: 119006 - DNA, 25 bp, Saccharomyces pastorianus
aattgtttcctatcccgctgaacaa

SEQ ID NO: 119007 - DNA, 25 bp, Saccharomyces pastorianus
gggtagtcatatccctcaattaact

SEQ ID NO: 119008 - DNA, 25 bp, Saccharomyces pastorianus
tgatctatcccaagagaactcgctt

SEQ ID NO: 119009 - DNA, 25 bp, Saccharomyces pastorianus
aaactttccatgtcgccagaaggta

SEQ ID NO: 119010 - DNA, 25 bp, Saccharomyces pastorianus
gcaacaagattactagcacccacag

SEQ ID NO: 119011 - DNA, 25 bp, Saccharomyces pastorianus
catgcagtaaaaccacgccaattgt

SEQ ID NO: 119012 - DNA, 25 bp, Saccharomyces pastorianus
gggtccgctccacaaatatgaatac

SEQ ID NO: 119013 - DNA, 25 bp, Saccharomyces pastorianus
accgcacaggcttacttcaaatcaa

SEQ ID NO: 119014 - DNA, 25 bp, Saccharomyces pastorianus
aagacaagggcctccgtatcaaagg

SEQ ID NO: 119015 - DNA, 25 bp, Saccharomyces pastorianus
gcaaaactgcctttgtgggtccgct

SEQ ID NO: 119016 - DNA, 25 bp, Saccharomyces pastorianus
caagctaattttgggtggcctccga

SEQ ID NO: 119017 - DNA, 25 bp, Saccharomyces pastorianus
gatcgcaggagccagcatacttgat

SEQ ID NO: 119018 - DNA, 25 bp, Saccharomyces pastorianus
gcatgagtttgatggccaggtcacc

SEQ ID NO: 119019 - DNA, 25 bp, Saccharomyces pastorianus
aacgcgaatcgtggcattgtcattg

SEQ ID NO: 119020 - DNA, 25 bp, Saccharomyces pastorianus
ggcctccgacttcgaggtatttcta

SEQ ID NO: 119021 - DNA, 25 bp, Saccharomyces pastorianus
gttatagtaccagtgcaaccgcaca

SEQ ID NO: 119022 - DNA, 25 bp, Saccharomyces pastorianus
aacgcatttcgatgggatctggtga

SEQ ID NO: 119023 - DNA, 25 bp, Saccharomyces pastorianus
tatgactactccctagacttatggt

SEQ ID NO: 119024 - DNA, 25 bp, Saccharomyces pastorianus
agattacaacgttcgtgtcgcttcg

SEQ ID NO: 119025 - DNA, 25 bp, Saccharomyces pastorianus
gacatccagtattatttcacgcaat

SEQ ID NO: 119026 - DNA, 25 bp, Saccharomyces pastorianus
ctgtcactccatgggcataatgcac

SEQ ID NO: 119027 - DNA, 25 bp, Saccharomyces pastorianus
gtacgggttgcacttaccatctgaa

SEQ ID NO: 119028 - DNA, 25 bp, Saccharomyces pastorianus
gattgcgttagactactgtcactcc

SEQ ID NO: 119029 - DNA, 25 bp, Saccharomyces pastorianus
gagaccaaattagctgttcctgaag

SEQ ID NO: 119030 - DNA, 25 bp, Saccharomyces pastorianus
ggcggagttctaccatccaggtgta

SEQ ID NO: 119031 - DNA, 25 bp, Saccharomyces pastorianus
atgctagcagctattgtcttcaaaa

SEQ ID NO: 119032 - DNA, 25 bp, Saccharomyces pastorianus
gtggacacactttataacctctgag

SEQ ID NO: 119033 - DNA, 25 bp, Saccharomyces pastorianus
aagggtcgtctaatccagatcaact

SEQ ID NO: 119034 - DNA, 25 bp, Saccharomyces pastorianus
gttactgttctttacggacctgatc

SEQ ID NO: 119035 - DNA, 25 bp, Saccharomyces pastorianus
aatggcgacgaaactcctcggaaca

SEQ ID NO: 119036 - DNA, 25 bp, Saccharomyces pastorianus
ggaggtggtccataaagcacttcaa

SEQ ID NO: 119037 - DNA, 25 bp, Saccharomyces pastorianus
aggcacttccagacacgtacgatta

SEQ ID NO: 119038 - DNA, 25 bp, Saccharomyces pastorianus
gaaagagcgcaacctactccaacgg

SEQ ID NO: 119039 - DNA, 25 bp, Saccharomyces pastorianus
aactattccattgtctgggacgaga

SEQ ID NO: 119040 - DNA, 25 bp, Saccharomyces pastorianus
gagagtagacatcgctaccgtcggc

SEQ ID NO: 119041 - DNA, 25 bp, Saccharomyces pastorianus
ttacccagttgctcttctgaaaatg

SEQ ID NO: 119042 - DNA, 25 bp, Saccharomyces pastorianus
aaatggctctctcagcgttcaatat

SEQ ID NO: 119043 - DNA, 25 bp, Saccharomyces pastorianus
attacgagcatctctatcccaatgg

SEQ ID NO: 119044 - DNA, 25 bp, Saccharomyces pastorianus
ggaacacgcctcacgacagtataat

SEQ ID NO: 119045 - DNA, 25 bp, Saccharomyces pastorianus
gaggttaccattccagaacctccat

SEQ ID NO: 119046 - DNA, 25 bp, Saccharomyces pastorianus
cctccattaaccacaagatttacag

SEQ ID NO: 119047 - DNA, 25 bp, Saccharomyces pastorianus
gttaccattccagaacctccattaa

SEQ ID NO: 119048 - DNA, 25 bp, Saccharomyces pastorianus
ccagaacctccattaaccacaagat

SEQ ID NO: 119049 - DNA, 25 bp, Saccharomyces pastorianus
attccagaacctccattaaccacaa

SEQ ID NO: 119050 - DNA, 25 bp, Saccharomyces pastorianus
taagaacgactttatcatggttaaa

SEQ ID NO: 119051 - DNA, 25 bp, Saccharomyces pastorianus
taagaaattgccaagaaagactcac

SEQ ID NO: 119052 - DNA, 25 bp, Saccharomyces pastorianus
cactacggtgaaattaagaacgact

SEQ ID NO: 119053 - DNA, 25 bp, Saccharomyces pastorianus
ttatcatggttaaaggttgtatccc

SEQ ID NO: 119054 - DNA, 25 bp, Saccharomyces pastorianus
gaacctccattaaccacaagattta

SEQ ID NO: 119055 - DNA, 25 bp, Saccharomyces pastorianus
ggctttggaagaagtcagcttgaag

SEQ ID NO: 119056 - DNA, 25 bp, Saccharomyces pastorianus
tgtcaccaagggtcacggtttcgaa

SEQ ID NO: 119057 - DNA, 25 bp, Saccharomyces pastorianus
ggttgtatcccaggtaacagaaaga

SEQ ID NO: 119058 - DNA, 25 bp, Saccharomyces pastorianus
tggcatccagcccacgttatgtgga

SEQ ID NO: 119059 - DNA, 25 bp, Saccharomyces pastorianus
gattgacactgcttctaagttcggt

SEQ ID NO: 119060 - DNA, 25 bp, Saccharomyces pastorianus
gtggtttcgtccactacggtgaaat

SEQ ID NO: 119061 - DNA, 25 bp, Saccharomyces pastorianus
tgccagagctggtcaaagaggttac

SEQ ID NO: 119062 - DNA, 25 bp, Saccharomyces pastorianus
ggttgactgggctcgtgaacatttc

SEQ ID NO: 119063 - DNA, 25 bp, Saccharomyces pastorianus
ttgtacaccaacacttctagaaagg

SEQ ID NO: 119064 - DNA, 25 bp, Saccharomyces pastorianus
tccaattgaacggtggttccatctc

SEQ ID NO: 119065 - DNA, 25 bp, Saccharomyces pastorianus
tcgaaaagactgttgctgtcgacag

SEQ ID NO: 119066 - DNA, 25 bp, Saccharomyces pastorianus
ggtttcgaaggtgttacccacagat

SEQ ID NO: 119067 - DNA, 25 bp, Saccharomyces pastorianus
gtgtggctttaccatcaggttctaa

SEQ ID NO: 119068 - DNA, 25 bp, Saccharomyces pastorianus
gcctgccattctcttgacagagttg

SEQ ID NO: 119069 - DNA, 25 bp, Saccharomyces pastorianus
aactggtgtgccgaacccgaacatg

SEQ ID NO: 119070 - DNA, 25 bp, Saccharomyces pastorianus
gccacctgatctatctttgatcgtg

SEQ ID NO: 119071 - DNA, 25 bp, Saccharomyces pastorianus
tttgtatttgctatctatctgggtg

SEQ ID NO: 119072 - DNA, 25 bp, Saccharomyces pastorianus
tacttcccaggtggttccattgcaa

SEQ ID NO: 119073 - DNA, 25 bp, Saccharomyces pastorianus
taatcaaggtgccttgccacctgat

SEQ ID NO: 119074 - DNA, 25 bp, Saccharomyces pastorianus
taagttgtccgattacatccctggc

SEQ ID NO: 119075 - DNA, 25 bp, Saccharomyces pastorianus
gactacattttctctttgttgaccg

SEQ ID NO: 119076 - DNA, 25 bp, Saccharomyces pastorianus
atgaacctcctgctggtgtggcttt

SEQ ID NO: 119077 - DNA, 25 bp, Saccharomyces pastorianus
ttgttgaccggttatcctgatgaac

SEQ ID NO: 119078 - DNA, 25 bp, Saccharomyces pastorianus
gatagcggcaacgtccatagacaat

SEQ ID NO: 119079 - DNA, 25 bp, Saccharomyces pastorianus
ggtacttccatttcgaacagtgcaa

SEQ ID NO: 119080 - DNA, 25 bp, Saccharomyces pastorianus
aagtgcaatcgcaatccaattctcc

SEQ ID NO: 119081 - DNA, 25 bp, Saccharomyces pastorianus
gaatgcactccattaatccagcaaa

SEQ ID NO: 119082 - DNA, 25 bp, Saccharomyces pastorianus
ccatcaatctatgtctcgggtgtca

SEQ ID NO: 119083 - DNA, 25 bp, Saccharomyces pastorianus
ccctctagctttgacgattcactaa

SEQ ID NO: 119084 - DNA, 25 bp, Saccharomyces pastorianus
ttacccactttgattgaatgcactc

SEQ ID NO: 119085 - DNA, 25 bp, Saccharomyces pastorianus
aagcgaaaacttacagccgccggcg

SEQ ID NO: 119086 - DNA, 25 bp, Saccharomyces pastorianus
gtgcaactcctaatttacacgggtt

SEQ ID NO: 119087 - DNA, 25 bp, Saccharomyces pastorianus
ggcgaatttatttaccgctgcccat

SEQ ID NO: 119088 - DNA, 25 bp, Saccharomyces pastorianus
tcgggtgtcatctatttacttcaac

SEQ ID NO: 119089 - DNA, 25 bp, Saccharomyces pastorianus
gaattgtcatgctcctctagttgcg

SEQ ID NO: 119090 - DNA, 25 bp, Saccharomyces pastorianus
ccaccggattctcttgttgcaataa

SEQ ID NO: 119091 - DNA, 25 bp, Saccharomyces pastorianus
tagttgcggattaccagccaccgac

SEQ ID NO: 119092 - DNA, 25 bp, Saccharomyces pastorianus
tccagtgaacaatgcgccaccggat

SEQ ID NO: 119093 - DNA, 25 bp, Saccharomyces pastorianus
gtccgcaaatgaagctgtggtctct

SEQ ID NO: 119094 - DNA, 25 bp, Saccharomyces pastorianus
tggcgcactatccaagtctatcttg

SEQ ID NO: 119095 - DNA, 25 bp, Saccharomyces pastorianus
gttagcatcgtatatcgtatcgtca

SEQ ID NO: 119096 - DNA, 25 bp, Saccharomyces pastorianus
gacaaaccagggtctttccattctg

SEQ ID NO: 119097 - DNA, 25 bp, Saccharomyces pastorianus
atcagcaatcggatcctgttcaggg

SEQ ID NO: 119098 - DNA, 25 bp, Saccharomyces pastorianus
agatcgtcagctttggaattgtcat

SEQ ID NO: 119099 - DNA, 25 bp, Saccharomyces pastorianus
ggagagttggcgtttccagtgaaca

SEQ ID NO: 119100 - DNA, 25 bp, Saccharomyces pastorianus
tctgagcgaagcctttatttggcaa

SEQ ID NO: 119101 - DNA, 25 bp, Saccharomyces pastorianus
cttcttcttattctatgtcgtccaa

SEQ ID NO: 119102 - DNA, 25 bp, Saccharomyces pastorianus
ccaccacagctctttctaatatgac

SEQ ID NO: 119103 - DNA, 25 bp, Saccharomyces pastorianus
gaaacttcacaagaggtcacttctt

SEQ ID NO: 119104 - DNA, 25 bp, Saccharomyces pastorianus
atgtgtttgtttgtgctgcattcct

SEQ ID NO: 119105 - DNA, 25 bp, Saccharomyces pastorianus
ctatattcacggacaaccaggcata

SEQ ID NO: 119106 - DNA, 25 bp, Saccharomyces pastorianus
ggagtttatacagtttgcattcaga

SEQ ID NO: 119107 - DNA, 25 bp, Saccharomyces pastorianus
gagtggcaagttttgttacaccaac

SEQ ID NO: 119108 - DNA, 25 bp, Saccharomyces pastorianus
gacagtcttcgttgaatgagtttca

SEQ ID NO: 119109 - DNA, 25 bp, Saccharomyces pastorianus
tttcttacagaaccctcctacaaag

SEQ ID NO: 119110 - DNA, 25 bp, Saccharomyces pastorianus
atgacattaaacctcctgttactcc

SEQ ID NO: 119111 - DNA, 25 bp, Saccharomyces pastorianus
acaaacctgagagttctgataacga

SEQ ID NO: 119112 - DNA, 25 bp, Saccharomyces pastorianus
taacgtatttgaaatcgttcaccaa

SEQ ID NO: 119113 - DNA, 25 bp, Saccharomyces pastorianus
gttaggcgaatgctacacaactgga

SEQ ID NO: 119114 - DNA, 25 bp, Saccharomyces pastorianus
gagagttctgataacgaatcacctg

SEQ ID NO: 119115 - DNA, 25 bp, Saccharomyces pastorianus
gaatcacctgaattgatcaaaacta

SEQ ID NO: 119116 - DNA, 25 bp, Saccharomyces pastorianus
gttctgataacgaatcacctgaatt

SEQ ID NO: 119117 - DNA, 25 bp, Saccharomyces pastorianus
agctcagaaaacactaacgtatttg

SEQ ID NO: 119118 - DNA, 25 bp, Saccharomyces pastorianus
ttgaaatcgttcaccaaaaggatga

SEQ ID NO: 119119 - DNA, 25 bp, Saccharomyces pastorianus
acacgttaggcgaatgctacacaac

SEQ ID NO: 119120 - DNA, 25 bp, Saccharomyces pastorianus
gaattgatcaaaactagctcagaaa

SEQ ID NO: 119121 - DNA, 25 bp, Saccharomyces pastorianus
gctatgtgtcttcttcccattcaaa

SEQ ID NO: 119122 - DNA, 25 bp, Saccharomyces pastorianus
tgacgcctactccataactattata

SEQ ID NO: 119123 - DNA, 25 bp, Saccharomyces pastorianus
tgctgacgaaagttgtgttcctctt

SEQ ID NO: 119124 - DNA, 25 bp, Saccharomyces pastorianus
agtagtggccactgttgttcgtaac

SEQ ID NO: 119125 - DNA, 25 bp, Saccharomyces pastorianus
aaccacgctacattggcacactata

SEQ ID NO: 119126 - DNA, 25 bp, Saccharomyces pastorianus
aattctgtcgtttattctcttcctt

SEQ ID NO: 119127 - DNA, 25 bp, Saccharomyces pastorianus
attggcacactatatcctgacgctc

SEQ ID NO: 119128 - DNA, 25 bp, Saccharomyces pastorianus
tgacgcctgcgctatatattctgac

SEQ ID NO: 119129 - DNA, 25 bp, Saccharomyces pastorianus
tccttcttccagttccattacttaa

SEQ ID NO: 119130 - DNA, 25 bp, Saccharomyces pastorianus
aaagctagctgcatgcaaccacgct

SEQ ID NO: 119131 - DNA, 25 bp, Saccharomyces pastorianus
ggtgttcgctccgagcacgaaaatt

SEQ ID NO: 119132 - DNA, 25 bp, Saccharomyces pastorianus
ttttggagcaggtctgactcaacta

SEQ ID NO: 119133 - DNA, 25 bp, Saccharomyces pastorianus
tcttgcgaaccgaccggtcgctgcg

SEQ ID NO: 119134 - DNA, 25 bp, Saccharomyces pastorianus
gacgactacagcaagacattactct

SEQ ID NO: 119135 - DNA, 25 bp, Saccharomyces pastorianus
ggccagatcatatgatgaaacggaa

SEQ ID NO: 119136 - DNA, 25 bp, Saccharomyces pastorianus
tattgccaaccgtcttgcgaaccga

SEQ ID NO: 119137 - DNA, 25 bp, Saccharomyces pastorianus
gcaggaaactcctattgccaaccgt

SEQ ID NO: 119138 - DNA, 25 bp, Saccharomyces pastorianus
acattactctggtcatttacgcctg

SEQ ID NO: 119139 - DNA, 25 bp, Saccharomyces pastorianus
gatcatgcgtccacgcgcttctgtg

SEQ ID NO: 119140 - DNA, 25 bp, Saccharomyces pastorianus
gcctggcgcccagaatgtacaagcg

SEQ ID NO: 119141 - DNA, 25 bp, Saccharomyces pastorianus
aaggcggtcagcaggaaactcctat

SEQ ID NO: 119142 - DNA, 25 bp, Saccharomyces pastorianus
gcttctgtggcgacggacgactaca

SEQ ID NO: 119143 - DNA, 25 bp, Saccharomyces pastorianus
gtacaagcgcagacggccagatcat

SEQ ID NO: 119144 - DNA, 25 bp, Saccharomyces pastorianus
atttcctattggtcgggtaacagat

SEQ ID NO: 119145 - DNA, 25 bp, Saccharomyces pastorianus
gattatttatttcctattggtcggg

SEQ ID NO: 119146 - DNA, 25 bp, Saccharomyces pastorianus
gctcgccccttttatttttgattat

SEQ ID NO: 119147 - DNA, 25 bp, Saccharomyces pastorianus
ttcctattggtcgggtaacagattt

SEQ ID NO: 119148 - DNA, 25 bp, Saccharomyces pastorianus
tgattatttatttcctattggtcgg

SEQ ID NO: 119149 - DNA, 25 bp, Saccharomyces pastorianus
tttgattatttatttcctattggtc

SEQ ID NO: 119150 - DNA, 25 bp, Saccharomyces pastorianus
tttcctattggtcgggtaacagatt

SEQ ID NO: 119151 - DNA, 25 bp, Saccharomyces pastorianus
tatttcctattggtcgggtaacaga

SEQ ID NO: 119152 - DNA, 25 bp, Saccharomyces pastorianus
ttgattatttatttcctattggtcg

SEQ ID NO: 119153 - DNA, 25 bp, Saccharomyces pastorianus
tcctattggtcgggtaacagatttt

SEQ ID NO: 119154 - DNA, 25 bp, Saccharomyces pastorianus
cagctcgccccttttatttttgatt

SEQ ID NO: 119155 - DNA, 25 bp, Saccharomyces pastorianus
gaagtcgtcgtctcaaaagattatg

SEQ ID NO: 119156 - DNA, 25 bp, Saccharomyces pastorianus
atgaaaattctactacgcgaccctc

SEQ ID NO: 119157 - DNA, 25 bp, Saccharomyces pastorianus
ttatcccaagattcaatacccgacg

SEQ ID NO: 119158 - DNA, 25 bp, Saccharomyces pastorianus
gcgaccctccaagtcgtcaaaggga

SEQ ID NO: 119159 - DNA, 25 bp, Saccharomyces pastorianus
tgaaatacacgaggataccgcttat

SEQ ID NO: 119160 - DNA, 25 bp, Saccharomyces pastorianus
tatacatgatctacaggtttccaag

SEQ ID NO: 119161 - DNA, 25 bp, Saccharomyces pastorianus
gataccgcttatctaatggccactt

SEQ ID NO: 119162 - DNA, 25 bp, Saccharomyces pastorianus
accgcaattgagagaagtcgtcgtc

SEQ ID NO: 119163 - DNA, 25 bp, Saccharomyces pastorianus
aaatcgtcacctttacttgacatta

SEQ ID NO: 119164 - DNA, 25 bp, Saccharomyces pastorianus
gaaggccttcagaaaaacttgtgga

SEQ ID NO: 119165 - DNA, 25 bp, Saccharomyces pastorianus
acttgtggatgctactactgtgatt

SEQ ID NO: 119166 - DNA, 25 bp, Saccharomyces pastorianus
ctggaacccagctgattttgacaaa

SEQ ID NO: 119167 - DNA, 25 bp, Saccharomyces pastorianus
gcttattgtaccaacgttcttgtga

SEQ ID NO: 119168 - DNA, 25 bp, Saccharomyces pastorianus
catggagccaggtgagttcattcat

SEQ ID NO: 119169 - DNA, 25 bp, Saccharomyces pastorianus
aatcattatgagtgcctggaaccca

SEQ ID NO: 119170 - DNA, 25 bp, Saccharomyces pastorianus
gagaaggatccggtaagccccgcct

SEQ ID NO: 119171 - DNA, 25 bp, Saccharomyces pastorianus
gccatgccatattttttcacagttc

SEQ ID NO: 119172 - DNA, 25 bp, Saccharomyces pastorianus
gggagtaccatttaacattgcatca

SEQ ID NO: 119173 - DNA, 25 bp, Saccharomyces pastorianus
acaaaatggctttgccgccatgcca

SEQ ID NO: 119174 - DNA, 25 bp, Saccharomyces pastorianus
gggcccgtttatggatttcaatgga

SEQ ID NO: 119175 - DNA, 25 bp, Saccharomyces pastorianus
ccgcctttcatgcttattgtaccaa

SEQ ID NO: 119176 - DNA, 25 bp, Saccharomyces pastorianus
gtgcgatgacgactatactggacaa

SEQ ID NO: 119177 - DNA, 25 bp, Saccharomyces pastorianus
gggaaggtatcatcacgtaaactaa

SEQ ID NO: 119178 - DNA, 25 bp, Saccharomyces pastorianus
aagaccttcttggtcgttagtagtg

SEQ ID NO: 119179 - DNA, 25 bp, Saccharomyces pastorianus
tttgttttttccgtccatagtcatc

SEQ ID NO: 119180 - DNA, 25 bp, Saccharomyces pastorianus
tcacgtaaactaaaacgcagctggg

SEQ ID NO: 119181 - DNA, 25 bp, Saccharomyces pastorianus
gatacctctagtaaagaccttcttg

SEQ ID NO: 119182 - DNA, 25 bp, Saccharomyces pastorianus
aatgattcttttgcatagatcaaga

SEQ ID NO: 119183 - DNA, 25 bp, Saccharomyces pastorianus
agtgcctgttctatctggcctaaat

SEQ ID NO: 119184 - DNA, 25 bp, Saccharomyces pastorianus
gggtggtgcaaaaagactcaacgta

SEQ ID NO: 119185 - DNA, 25 bp, Saccharomyces pastorianus
ttcaccttcatcaatgattcttttg

SEQ ID NO: 119186 - DNA, 25 bp, Saccharomyces pastorianus
aagactcaacgtaccagtgcctgtt

SEQ ID NO: 119187 - DNA, 25 bp, Saccharomyces pastorianus
tatctggcctaaattcaccttcatc

SEQ ID NO: 119188 - DNA, 25 bp, Saccharomyces pastorianus
gagacgatatccaaattaacccggg

SEQ ID NO: 119189 - DNA, 25 bp, Saccharomyces pastorianus
agtgtcacaatctgctcccgtagaa

SEQ ID NO: 119190 - DNA, 25 bp, Saccharomyces pastorianus
aacgagctgctggaagaactgctaa

SEQ ID NO: 119191 - DNA, 25 bp, Saccharomyces pastorianus
gcctatgcctactttatccaacaat

SEQ ID NO: 119192 - DNA, 25 bp, Saccharomyces pastorianus
aatcatttaacggtgcaatctcaaa

SEQ ID NO: 119193 - DNA, 25 bp, Saccharomyces pastorianus
gtttcatccaaattcactaccatac

SEQ ID NO: 119194 - DNA, 25 bp, Saccharomyces pastorianus
gcggatgatttctctgcagatgcaa

SEQ ID NO: 119195 - DNA, 25 bp, Saccharomyces pastorianus
ttaacccgggagcaactacaagtgt

SEQ ID NO: 119196 - DNA, 25 bp, Saccharomyces pastorianus
gaatttcaattcaacgcctatgcct

SEQ ID NO: 119197 - DNA, 25 bp, Saccharomyces pastorianus
gcatgtgatacatccgcaagacatt

SEQ ID NO: 119198 - DNA, 25 bp, Saccharomyces pastorianus
attaggtgtcctacggtgtttgaat

SEQ ID NO: 119199 - DNA, 25 bp, Saccharomyces pastorianus
gggttctgaattgcttctttaccat

SEQ ID NO: 119200 - DNA, 25 bp, Saccharomyces pastorianus
gacgaatacactatcaccgaattta

SEQ ID NO: 119201 - DNA, 25 bp, Saccharomyces pastorianus
tcggtttgaaccctgacattttaga

SEQ ID NO: 119202 - DNA, 25 bp, Saccharomyces pastorianus
aatttgacgcacaacgcggtgaaat

SEQ ID NO: 119203 - DNA, 25 bp, Saccharomyces pastorianus
gaaccagactttgctcttaatgtga

SEQ ID NO: 119204 - DNA, 25 bp, Saccharomyces pastorianus
cactaaagttgttagccttgcgttt

SEQ ID NO: 119205 - DNA, 25 bp, Saccharomyces pastorianus
taagtgatcccgttgacttgggttc

SEQ ID NO: 119206 - DNA, 25 bp, Saccharomyces pastorianus
gatatattcaatcaggccagacaat

SEQ ID NO: 119207 - DNA, 25 bp, Saccharomyces pastorianus
attatcaatacaaacgcacgcgcta

SEQ ID NO: 119208 - DNA, 25 bp, Saccharomyces pastorianus
gattcttggaactaacgacatctca

SEQ ID NO: 119209 - DNA, 25 bp, Saccharomyces pastorianus
attacgtgtcactcaaagtcttgat

SEQ ID NO: 119210 - DNA, 25 bp, Saccharomyces pastorianus
gacgctaggcgctacaatatccagt

SEQ ID NO: 119211 - DNA, 25 bp, Saccharomyces pastorianus
tgttcaagtcaccttccacgggaat

SEQ ID NO: 119212 - DNA, 25 bp, Saccharomyces pastorianus
tctacagttattgaagcagcggcac

SEQ ID NO: 119213 - DNA, 25 bp, Saccharomyces pastorianus
aaggtcctttgcttatcaggatcca

SEQ ID NO: 119214 - DNA, 25 bp, Saccharomyces pastorianus
gcaagaagtcatagccgccgagctt

SEQ ID NO: 119215 - DNA, 25 bp, Saccharomyces pastorianus
tttgacgcagtttgtccggtaccta

SEQ ID NO: 119216 - DNA, 25 bp, Saccharomyces pastorianus
ctcatctttatcatcaccttctgaa

SEQ ID NO: 119217 - DNA, 25 bp, Saccharomyces pastorianus
tatgaatgccaccatgcatcgttct

SEQ ID NO: 119218 - DNA, 25 bp, Saccharomyces pastorianus
catctgagaacgttgaaggtccttt

SEQ ID NO: 119219 - DNA, 25 bp, Saccharomyces pastorianus
aaagacaactcaatcgtgctaagcg

SEQ ID NO: 119220 - DNA, 25 bp, Saccharomyces pastorianus
gggatagcactctgaaacgtgttca

SEQ ID NO: 119221 - DNA, 25 bp, Saccharomyces pastorianus
gaatcatccatcatacgttcaaaag

SEQ ID NO: 119222 - DNA, 25 bp, Saccharomyces pastorianus
gaggctataaggctggaacaatcac

SEQ ID NO: 119223 - DNA, 25 bp, Saccharomyces pastorianus
gaacaatcacaattgcggtccaaga

SEQ ID NO: 119224 - DNA, 25 bp, Saccharomyces pastorianus
gagttcaattgttatccaccacaca

SEQ ID NO: 119225 - DNA, 25 bp, Saccharomyces pastorianus
gatgccgatgaaagtccagccagcg

SEQ ID NO: 119226 - DNA, 25 bp, Saccharomyces pastorianus
aagaagggcttcactctgggaaaag

SEQ ID NO: 119227 - DNA, 25 bp, Saccharomyces pastorianus
gtacgcagtactcatcttcaagaca

SEQ ID NO: 119228 - DNA, 25 bp, Saccharomyces pastorianus
aagtaattgcggagcttcctgagga

SEQ ID NO: 119229 - DNA, 25 bp, Saccharomyces pastorianus
agccagcgcaagtgctgtcacagat

SEQ ID NO: 119230 - DNA, 25 bp, Saccharomyces pastorianus
gaatcacagatcactcaaagggagg

SEQ ID NO: 119231 - DNA, 25 bp, Saccharomyces pastorianus
gcttcctgaggagttgctaaaaaat

SEQ ID NO: 119232 - DNA, 25 bp, Saccharomyces pastorianus
atgcagttttgaagagactctccaa

SEQ ID NO: 119233 - DNA, 25 bp, Saccharomyces pastorianus
gataagtggttctgcgttgactaga

SEQ ID NO: 119234 - DNA, 25 bp, Saccharomyces pastorianus
gatcagcctgttacgaatgacaacg

SEQ ID NO: 119235 - DNA, 25 bp, Saccharomyces pastorianus
aatgacaacgaggtgccatccatgc

SEQ ID NO: 119236 - DNA, 25 bp, Saccharomyces pastorianus
gatccgagcgcagaacttagttact

SEQ ID NO: 119237 - DNA, 25 bp, Saccharomyces pastorianus
ggtgccatccatgctattttacaag

SEQ ID NO: 119238 - DNA, 25 bp, Saccharomyces pastorianus
tgggaattgccccaacatccagttc

SEQ ID NO: 119239 - DNA, 25 bp, Saccharomyces pastorianus
aaatttatcgcatctcagctccttg

SEQ ID NO: 119240 - DNA, 25 bp, Saccharomyces pastorianus
agttcccaaataatcacgctcatgc

SEQ ID NO: 119241 - DNA, 25 bp, Saccharomyces pastorianus
aagcgggaggtcaaccactggcata

SEQ ID NO: 119242 - DNA, 25 bp, Saccharomyces pastorianus
acggatgttcccaagtgtctcatat

SEQ ID NO: 119243 - DNA, 25 bp, Saccharomyces pastorianus
aattctaccaacctcgattcagtga

SEQ ID NO: 119244 - DNA, 25 bp, Saccharomyces pastorianus
ttctacatctccacaacgttcaaaa

SEQ ID NO: 119245 - DNA, 25 bp, Saccharomyces pastorianus
atggacgctatgtcggctgccacaa

SEQ ID NO: 119246 - DNA, 25 bp, Saccharomyces pastorianus
ttattcaatccaagcaggttcccca

SEQ ID NO: 119247 - DNA, 25 bp, Saccharomyces pastorianus
catcggtgcatctagtttacggcta

SEQ ID NO: 119248 - DNA, 25 bp, Saccharomyces pastorianus
gggaagatttcctcttcagccattg

SEQ ID NO: 119249 - DNA, 25 bp, Saccharomyces pastorianus
taatggatgctgacttgccgggagt

SEQ ID NO: 119250 - DNA, 25 bp, Saccharomyces pastorianus
tgaaggttccatcacgacctcaatt

SEQ ID NO: 119251 - DNA, 25 bp, Saccharomyces pastorianus
tggatatgttatcgccttctccatc

SEQ ID NO: 119252 - DNA, 25 bp, Saccharomyces pastorianus
aaatcttcattcacgcagcagggta

SEQ ID NO: 119253 - DNA, 25 bp, Saccharomyces pastorianus
agattttcccataccggctattgaa

SEQ ID NO: 119254 - DNA, 25 bp, Saccharomyces pastorianus
gttctgctcttgaagttttcgcttc

SEQ ID NO: 119255 - DNA, 25 bp, Saccharomyces pastorianus
ttccctttagcaccagaagtcatga

SEQ ID NO: 119256 - DNA, 25 bp, Saccharomyces pastorianus
ttctgcacctgctcttgttcttgtt

SEQ ID NO: 119257 - DNA, 25 bp, Saccharomyces pastorianus
atgtctctactatttttcgttgcta

SEQ ID NO: 119258 - DNA, 25 bp, Saccharomyces pastorianus
ttcttccatcaggttctttgccttg

SEQ ID NO: 119259 - DNA, 25 bp, Saccharomyces pastorianus
ttgccttgttttgcctttgttttgt

SEQ ID NO: 119260 - DNA, 25 bp, Saccharomyces pastorianus
acatgtgtatctgggttctgcacct

SEQ ID NO: 119261 - DNA, 25 bp, Saccharomyces pastorianus
aatatctggttgtgctttcttccat

SEQ ID NO: 119262 - DNA, 25 bp, Saccharomyces pastorianus
tcttcggcgttctcaaactcatatt

SEQ ID NO: 119263 - DNA, 25 bp, Saccharomyces pastorianus
ttcttgttcttgttcatcgctagtc

SEQ ID NO: 119264 - DNA, 25 bp, Saccharomyces pastorianus
aactcatattgttcaatgtctctac

SEQ ID NO: 119265 - DNA, 25 bp, Saccharomyces pastorianus
gcaccaggcttaattacgcgttagt

SEQ ID NO: 119266 - DNA, 25 bp, Saccharomyces pastorianus
agatagtgcagacgcgggtacttcc

SEQ ID NO: 119267 - DNA, 25 bp, Saccharomyces pastorianus
aatatcacatactttgcgcaccagg

SEQ ID NO: 119268 - DNA, 25 bp, Saccharomyces pastorianus
gtatatgaccataacgacgacggac

SEQ ID NO: 119269 - DNA, 25 bp, Saccharomyces pastorianus
aataagcgtcgtgtcggcataaccg

SEQ ID NO: 119270 - DNA, 25 bp, Saccharomyces pastorianus
gttagtatgcctttgttgccaccga

SEQ ID NO: 119271 - DNA, 25 bp, Saccharomyces pastorianus
aacactgatgctattgtcgtcgcct

SEQ ID NO: 119272 - DNA, 25 bp, Saccharomyces pastorianus
gtcgtcgcctaccaagaagcaacag

SEQ ID NO: 119273 - DNA, 25 bp, Saccharomyces pastorianus
aggccacggctgtcgaaacactgat

SEQ ID NO: 119274 - DNA, 25 bp, Saccharomyces pastorianus
gtgccggcgacatctgctggagaac

SEQ ID NO: 119275 - DNA, 25 bp, Saccharomyces pastorianus
ggacaagacacttcccgaactggag

SEQ ID NO: 119276 - DNA, 25 bp, Saccharomyces pastorianus
cgggctttcgactcgttcaagaatg

SEQ ID NO: 119277 - DNA, 25 bp, Saccharomyces pastorianus
gaagcggaccatccacattgtgggc

SEQ ID NO: 119278 - DNA, 25 bp, Saccharomyces pastorianus
gaacatgcagacttttgcgcctttc

SEQ ID NO: 119279 - DNA, 25 bp, Saccharomyces pastorianus
ttttttaccaatgcgcacagccaaa

SEQ ID NO: 119280 - DNA, 25 bp, Saccharomyces pastorianus
gtgtcctccgcaaaatcagctgttt

SEQ ID NO: 119281 - DNA, 25 bp, Saccharomyces pastorianus
aaatctcctctgctacatgaacatg

SEQ ID NO: 119282 - DNA, 25 bp, Saccharomyces pastorianus
attaatcaccacatccacgagtttg

SEQ ID NO: 119283 - DNA, 25 bp, Saccharomyces pastorianus
acattccgcaattgacccttgaaga

SEQ ID NO: 119284 - DNA, 25 bp, Saccharomyces pastorianus
gcgcctttcctgatcagcaatgtga

SEQ ID NO: 119285 - DNA, 25 bp, Saccharomyces pastorianus
atggtggacccgttcgcacgaagat

SEQ ID NO: 119286 - DNA, 25 bp, Saccharomyces pastorianus
acttggtcaacgttgaggctccgga

SEQ ID NO: 119287 - DNA, 25 bp, Saccharomyces pastorianus
tacacttacctatggactggactcc

SEQ ID NO: 119288 - DNA, 25 bp, Saccharomyces pastorianus
gcgaggttatgtatttcttgcccaa

SEQ ID NO: 119289 - DNA, 25 bp, Saccharomyces pastorianus
aataattaccttcatcaccgtctta

SEQ ID NO: 119290 - DNA, 25 bp, Saccharomyces pastorianus
gatcagtgcctatatgttcaaccaa

SEQ ID NO: 119291 - DNA, 25 bp, Saccharomyces pastorianus
tttgctgctttgacaaccgtgttca

SEQ ID NO: 119292 - DNA, 25 bp, Saccharomyces pastorianus
atgttctccatcatatcttccagga

SEQ ID NO: 119293 - DNA, 25 bp, Saccharomyces pastorianus
atctgggcaaccttgtcaacttttt

SEQ ID NO: 119294 - DNA, 25 bp, Saccharomyces pastorianus
gtatttccactgatactggctcaga

SEQ ID NO: 119295 - DNA, 25 bp, Saccharomyces pastorianus
gaccacagcgtgatcagtatttcca

SEQ ID NO: 119296 - DNA, 25 bp, Saccharomyces pastorianus
aacattggccgcgttggttgtcgta

SEQ ID NO: 119297 - DNA, 25 bp, Saccharomyces pastorianus
aattcttgcggtctcatttgtatcc

SEQ ID NO: 119298 - DNA, 25 bp, Saccharomyces pastorianus
gttaaaaaatgcagtccctccttcg

SEQ ID NO: 119299 - DNA, 25 bp, Saccharomyces pastorianus
gacagctgtaattaccgatctactc

SEQ ID NO: 119300 - DNA, 25 bp, Saccharomyces pastorianus
gaagatgtctatgtttctccattga

SEQ ID NO: 119301 - DNA, 25 bp, Saccharomyces pastorianus
atgacacctatctttcgtattcttc

SEQ ID NO: 119302 - DNA, 25 bp, Saccharomyces pastorianus
tattcttccaccgaagcgtgctaaa

SEQ ID NO: 119303 - DNA, 25 bp, Saccharomyces pastorianus
gacagatggctacttggatgatgat

SEQ ID NO: 119304 - DNA, 25 bp, Saccharomyces pastorianus
ggcatgagagccacccagttaaaga

SEQ ID NO: 119305 - DNA, 25 bp, Saccharomyces pastorianus
gcccatttttgttgcttatttctgt

SEQ ID NO: 119306 - DNA, 25 bp, Saccharomyces pastorianus
agtccctccttcgaacagtatgata

SEQ ID NO: 119307 - DNA, 25 bp, Saccharomyces pastorianus
gaagatgtccattttaaagtcccta

SEQ ID NO: 119308 - DNA, 25 bp, Saccharomyces pastorianus
agaattcacgttcgctaaaactgca

SEQ ID NO: 119309 - DNA, 25 bp, Saccharomyces pastorianus
agaccaccaccgacaaagtatgcaa

SEQ ID NO: 119310 - DNA, 25 bp, Saccharomyces pastorianus
atccgcatgggatcttactgaattc

SEQ ID NO: 119311 - DNA, 25 bp, Saccharomyces pastorianus
gagggctttgtgctgaaaaccaacg

SEQ ID NO: 119312 - DNA, 25 bp, Saccharomyces pastorianus
agacgacggcggcatcaaggactac

SEQ ID NO: 119313 - DNA, 25 bp, Saccharomyces pastorianus
gggagtcgctcgagaaacagccaaa

SEQ ID NO: 119314 - DNA, 25 bp, Saccharomyces pastorianus
ggatctgtcctaacggaggtgacaa

SEQ ID NO: 119315 - DNA, 25 bp, Saccharomyces pastorianus
tgagacggacaacgccgacatgcca

SEQ ID NO: 119316 - DNA, 25 bp, Saccharomyces pastorianus
gaaggaccacgtcatcgcaaagatt

SEQ ID NO: 119317 - DNA, 25 bp, Saccharomyces pastorianus
aatacttcatcgaggccgtggaaaa

SEQ ID NO: 119318 - DNA, 25 bp, Saccharomyces pastorianus
ctaacaccaataacaatcgccaact

SEQ ID NO: 119319 - DNA, 25 bp, Saccharomyces pastorianus
aagttatcctgtcgaagcacggtaa

SEQ ID NO: 119320 - DNA, 25 bp, Saccharomyces pastorianus
acaataggtagtgggcctggcagta

SEQ ID NO: 119321 - DNA, 25 bp, Saccharomyces pastorianus
gacgagggcgtaggttcttataatt

SEQ ID NO: 119322 - DNA, 25 bp, Saccharomyces pastorianus
gatagcacgagctcacttagaaagc

SEQ ID NO: 119323 - DNA, 25 bp, Saccharomyces pastorianus
ggcagtattgtgctggatttcccat

SEQ ID NO: 119324 - DNA, 25 bp, Saccharomyces pastorianus
aaacggcaactgttccaatggagaa

SEQ ID NO: 119325 - DNA, 25 bp, Saccharomyces pastorianus
gcgtaggcttatctaactccaacag

SEQ ID NO: 119326 - DNA, 25 bp, Saccharomyces pastorianus
taacggtccatcaagcgtaggctta

SEQ ID NO: 119327 - DNA, 25 bp, Saccharomyces pastorianus
gctggatttcccatcatttttggta

SEQ ID NO: 119328 - DNA, 25 bp, Saccharomyces pastorianus
cattgtcttcgttatcggagttgca

SEQ ID NO: 119329 - DNA, 25 bp, Saccharomyces pastorianus
atcatttttggtagggtgcgtattc

SEQ ID NO: 119330 - DNA, 25 bp, Saccharomyces pastorianus
ttagaaagccacctaacggtccatc

SEQ ID NO: 119331 - DNA, 25 bp, Saccharomyces pastorianus
ggcagaatatgctttccgccacaaa

SEQ ID NO: 119332 - DNA, 25 bp, Saccharomyces pastorianus
atgtggctagctgttttccccatag

SEQ ID NO: 119333 - DNA, 25 bp, Saccharomyces pastorianus
ttactaagatctttcccagccaatg

SEQ ID NO: 119334 - DNA, 25 bp, Saccharomyces pastorianus
ggctcagctctatattttgcatcat

SEQ ID NO: 119335 - DNA, 25 bp, Saccharomyces pastorianus
atcttgaacgtgtgtcttgctggtg

SEQ ID NO: 119336 - DNA, 25 bp, Saccharomyces pastorianus
ggttgtcctgcaaacatcttctaag

SEQ ID NO: 119337 - DNA, 25 bp, Saccharomyces pastorianus
ggcaacctcgtcaagatgcgggcaa

SEQ ID NO: 119338 - DNA, 25 bp, Saccharomyces pastorianus
agcgctattcctaccactttagtga

SEQ ID NO: 119339 - DNA, 25 bp, Saccharomyces pastorianus
actttagtgactgcgccaacggaaa

SEQ ID NO: 119340 - DNA, 25 bp, Saccharomyces pastorianus
ggctctttcattcaggcggctaaaa

SEQ ID NO: 119341 - DNA, 25 bp, Saccharomyces pastorianus
agacaaaattgcaggcttcctccac

SEQ ID NO: 119342 - DNA, 25 bp, Saccharomyces pastorianus
ataggacgaattgtcccacacaaat

SEQ ID NO: 119343 - DNA, 25 bp, Saccharomyces pastorianus
tgcctggaaagctattacacaattg

SEQ ID NO: 119344 - DNA, 25 bp, Saccharomyces pastorianus
ttgtaaccacaaactcatcaatagg

SEQ ID NO: 119345 - DNA, 25 bp, Saccharomyces pastorianus
ccacacaaataatgaatcccgctaa

SEQ ID NO: 119346 - DNA, 25 bp, Saccharomyces pastorianus
gccggcaaacccttcctcaatttat

SEQ ID NO: 119347 - DNA, 25 bp, Saccharomyces pastorianus
gaatgtacactggattacccctaat

SEQ ID NO: 119348 - DNA, 25 bp, Saccharomyces pastorianus
gaatcccgctaaaaacgcattgaat

SEQ ID NO: 119349 - DNA, 25 bp, Saccharomyces pastorianus
gctctgtttttagaaatgcctggaa

SEQ ID NO: 119350 - DNA, 25 bp, Saccharomyces pastorianus
aatgtatcaattagcttcagtttag

SEQ ID NO: 119351 - DNA, 25 bp, Saccharomyces pastorianus
gcttcagtttaggatatttttcaat

SEQ ID NO: 119352 - DNA, 25 bp, Saccharomyces pastorianus
ataaactcggcaaaagctctgtttt

SEQ ID NO: 119353 - DNA, 25 bp, Saccharomyces pastorianus
gtgtaatagctttccaggcatttct

SEQ ID NO: 119354 - DNA, 25 bp, Saccharomyces pastorianus
attcaatgcgtttttagcgggattc

SEQ ID NO: 119355 - DNA, 25 bp, Saccharomyces pastorianus
gtacattcattatcttgatccgtga

SEQ ID NO: 119356 - DNA, 25 bp, Saccharomyces pastorianus
tgatacattctgtttctttttggta

SEQ ID NO: 119357 - DNA, 25 bp, Saccharomyces pastorianus
aagtaaccagcacgtcatctgcagt

SEQ ID NO: 119358 - DNA, 25 bp, Saccharomyces pastorianus
gatccgtgataattttccattcaat

SEQ ID NO: 119359 - DNA, 25 bp, Saccharomyces pastorianus
gggacaattcgtcctattgatgagt

SEQ ID NO: 119360 - DNA, 25 bp, Saccharomyces pastorianus
gggtaatccagtgtacattcattat

SEQ ID NO: 119361 - DNA, 25 bp, Saccharomyces pastorianus
agacttctaagagggcatattttgc

SEQ ID NO: 119362 - DNA, 25 bp, Saccharomyces pastorianus
cgggattcattatttgtgtgggaca

SEQ ID NO: 119363 - DNA, 25 bp, Saccharomyces pastorianus
aacagagcttttgccgagtttattg

SEQ ID NO: 119364 - DNA, 25 bp, Saccharomyces pastorianus
ttgttggtgttgtcgttgttctaat

SEQ ID NO: 119365 - DNA, 25 bp, Saccharomyces pastorianus
ataggtcagttcatttgttggtgtt

SEQ ID NO: 119366 - DNA, 25 bp, Saccharomyces pastorianus
tagagttaatatgggcgtggctcct

SEQ ID NO: 119367 - DNA, 25 bp, Saccharomyces pastorianus
aagaaggacgcagccctagtagggt

SEQ ID NO: 119368 - DNA, 25 bp, Saccharomyces pastorianus
ggctcctccttctactgtgatttat

SEQ ID NO: 119369 - DNA, 25 bp, Saccharomyces pastorianus
gaatgatacattttacgacgaagtc

SEQ ID NO: 119370 - DNA, 25 bp, Saccharomyces pastorianus
gtggcccctctagtgtatgaagaag

SEQ ID NO: 119371 - DNA, 25 bp, Saccharomyces pastorianus
aatggaaacaatacaatgccggtaa

SEQ ID NO: 119372 - DNA, 25 bp, Saccharomyces pastorianus
gatttatcaacctattcaacaacct

SEQ ID NO: 119373 - DNA, 25 bp, Saccharomyces pastorianus
tagggtggcccctctagtgtatgaa

SEQ ID NO: 119374 - DNA, 25 bp, Saccharomyces pastorianus
tacaatgccggtaaatgagggtttt

SEQ ID NO: 119375 - DNA, 25 bp, Saccharomyces pastorianus
gctcatgttacttcacaatctccaa

SEQ ID NO: 119376 - DNA, 25 bp, Saccharomyces pastorianus
ggaaacagttacaatactccctcct

SEQ ID NO: 119377 - DNA, 25 bp, Saccharomyces pastorianus
actggtagcaacaacgctcatgtta

SEQ ID NO: 119378 - DNA, 25 bp, Saccharomyces pastorianus
atcagcgattatggcgagaactact

SEQ ID NO: 119379 - DNA, 25 bp, Saccharomyces pastorianus
aaatgcggccaatactggtagcaac

SEQ ID NO: 119380 - DNA, 25 bp, Saccharomyces pastorianus
aatttcgaaggtagcagccctcagc

SEQ ID NO: 119381 - DNA, 25 bp, Saccharomyces pastorianus
aattcgtttatccaaaatgcggcca

SEQ ID NO: 119382 - DNA, 25 bp, Saccharomyces pastorianus
tagaagtccatatccaaccgaaaat

SEQ ID NO: 119383 - DNA, 25 bp, Saccharomyces pastorianus
atactccctcctctaatcatagaag

SEQ ID NO: 119384 - DNA, 25 bp, Saccharomyces pastorianus
agccctcagccgcaatatgatgcta

SEQ ID NO: 119385 - DNA, 25 bp, Saccharomyces pastorianus
atctccaatttttgacatcagcgat

SEQ ID NO: 119386 - DNA, 25 bp, Saccharomyces pastorianus
gcagaccagcatcagagggaccgta

SEQ ID NO: 119387 - DNA, 25 bp, Saccharomyces pastorianus
taggacacattcatacggcggtaca

SEQ ID NO: 119388 - DNA, 25 bp, Saccharomyces pastorianus
gagagcaacatcctcattcaccaaa

SEQ ID NO: 119389 - DNA, 25 bp, Saccharomyces pastorianus
ggacaacaccaattacagctgcaag

SEQ ID NO: 119390 - DNA, 25 bp, Saccharomyces pastorianus
gctattttccatcagcttggttcat

SEQ ID NO: 119391 - DNA, 25 bp, Saccharomyces pastorianus
ggaagagtctgttccctctaaaagc

SEQ ID NO: 119392 - DNA, 25 bp, Saccharomyces pastorianus
cagagtcctttactgcataacgaag

SEQ ID NO: 119393 - DNA, 25 bp, Saccharomyces pastorianus
aaagagatccatccgcgaactgaag

SEQ ID NO: 119394 - DNA, 25 bp, Saccharomyces pastorianus
aaagcgcctatttcaccaggaacat

SEQ ID NO: 119395 - DNA, 25 bp, Saccharomyces pastorianus
aatgcggtaaggtcaccctaatcat

SEQ ID NO: 119396 - DNA, 25 bp, Saccharomyces pastorianus
gaagccgtgcgacaagatccagagt

SEQ ID NO: 119397 - DNA, 25 bp, Saccharomyces pastorianus
cagtgtcttcggagacaccaacacc

SEQ ID NO: 119398 - DNA, 25 bp, Saccharomyces pastorianus
ataccgccttaatagatgcatcccc

SEQ ID NO: 119399 - DNA, 25 bp, Saccharomyces pastorianus
atgattattgttgtcctttatgtag

SEQ ID NO: 119400 - DNA, 25 bp, Saccharomyces pastorianus
actggtagcatgattattgttgtcc

SEQ ID NO: 119401 - DNA, 25 bp, Saccharomyces pastorianus
aagatgccgcttgggttgcggaacc

SEQ ID NO: 119402 - DNA, 25 bp, Saccharomyces pastorianus
taatagatgcatccccagtgtcttc

SEQ ID NO: 119403 - DNA, 25 bp, Saccharomyces pastorianus
tattgacagtagcaaataccgcctt

SEQ ID NO: 119404 - DNA, 25 bp, Saccharomyces pastorianus
gttgcggaaccagaacccaaggaat

SEQ ID NO: 119405 - DNA, 25 bp, Saccharomyces pastorianus
caacaccccacatattactggtagc

SEQ ID NO: 119406 - DNA, 25 bp, Saccharomyces pastorianus
gatgcatccccagtgtcttcggaga

SEQ ID NO: 119407 - DNA, 25 bp, Saccharomyces pastorianus
gatttatgaaagatgccgcttgggt

SEQ ID NO: 119408 - DNA, 25 bp, Saccharomyces pastorianus
tacagcagcggatcacaatacaaat

SEQ ID NO: 119409 - DNA, 25 bp, Saccharomyces pastorianus
aagtgagtcctatcttacagcagcg

SEQ ID NO: 119410 - DNA, 25 bp, Saccharomyces pastorianus
gaaattcccataccagcaatgagtg

SEQ ID NO: 119411 - DNA, 25 bp, Saccharomyces pastorianus
ccccggaaacgattagtggcattga

SEQ ID NO: 119412 - DNA, 25 bp, Saccharomyces pastorianus
gtaaaagtgttccacgaccctctat

SEQ ID NO: 119413 - DNA, 25 bp, Saccharomyces pastorianus
gctccttggagcgtaaagatcgtaa

SEQ ID NO: 119414 - DNA, 25 bp, Saccharomyces pastorianus
gcaacacacccctcggtaaaatcaa

SEQ ID NO: 119415 - DNA, 25 bp, Saccharomyces pastorianus
ggatttcccgttcagagaacactgc

SEQ ID NO: 119416 - DNA, 25 bp, Saccharomyces pastorianus
aaatttgactctcattgcagctcct

SEQ ID NO: 119417 - DNA, 25 bp, Saccharomyces pastorianus
gcatccttttgccagtcaatggata

SEQ ID NO: 119418 - DNA, 25 bp, Saccharomyces pastorianus
aaatcattcccatgaggctcaaaat

SEQ ID NO: 119419 - DNA, 25 bp, Saccharomyces pastorianus
gtgtcgcttacttttgacagcacat

SEQ ID NO: 119420 - DNA, 25 bp, Saccharomyces pastorianus
ggaaaattccccttatgaattgcat

SEQ ID NO: 119421 - DNA, 25 bp, Saccharomyces pastorianus
gaaatactggttacggaggttcatt

SEQ ID NO: 119422 - DNA, 25 bp, Saccharomyces pastorianus
ggaaaactactttcgctgtgtacat

SEQ ID NO: 119423 - DNA, 25 bp, Saccharomyces pastorianus
aaaggcacgatctatttcaatacaa

SEQ ID NO: 119424 - DNA, 25 bp, Saccharomyces pastorianus
gctgtgtacatagacgatccgtgga

SEQ ID NO: 119425 - DNA, 25 bp, Saccharomyces pastorianus
ggaggttcattagaccctggtttat

SEQ ID NO: 119426 - DNA, 25 bp, Saccharomyces pastorianus
aatagaaatatcacccaggcaggat

SEQ ID NO: 119427 - DNA, 25 bp, Saccharomyces pastorianus
gaccctggtttattgtcgatggaaa

SEQ ID NO: 119428 - DNA, 25 bp, Saccharomyces pastorianus
gaatccaagataccgccattttctt

SEQ ID NO: 119429 - DNA, 25 bp, Saccharomyces pastorianus
tacataccagggaacgtgtcgctta

SEQ ID NO: 119430 - DNA, 25 bp, Saccharomyces pastorianus
aatattagcgccttggttgcataca

SEQ ID NO: 119431 - DNA, 25 bp, Saccharomyces pastorianus
gaaatattcagatcgctgcatttag

SEQ ID NO: 119432 - DNA, 25 bp, Saccharomyces pastorianus
atttgataacgctgaccacgaatgt

SEQ ID NO: 119433 - DNA, 25 bp, Saccharomyces pastorianus
aacgcaattttgctgcttctgagca

SEQ ID NO: 119434 - DNA, 25 bp, Saccharomyces pastorianus
gaccacgaatgtagttctggcacag

SEQ ID NO: 119435 - DNA, 25 bp, Saccharomyces pastorianus
gctgcatttagttagatcattgggt

SEQ ID NO: 119436 - DNA, 25 bp, Saccharomyces pastorianus
gaaaagcttgattgcccatgataat

SEQ ID NO: 119437 - DNA, 25 bp, Saccharomyces pastorianus
gttctggcacagaggaattctcaga

SEQ ID NO: 119438 - DNA, 25 bp, Saccharomyces pastorianus
agggcgagtactatgacgatgatga

SEQ ID NO: 119439 - DNA, 25 bp, Saccharomyces pastorianus
agaagacggctcaagcggatctgaa

SEQ ID NO: 119440 - DNA, 25 bp, Saccharomyces pastorianus
gcatacattgctagtaatctaccaa

SEQ ID NO: 119441 - DNA, 25 bp, Saccharomyces pastorianus
taggtagtaccgatgctccactatt

SEQ ID NO: 119442 - DNA, 25 bp, Saccharomyces pastorianus
tgccagattagatccagcctacatc

SEQ ID NO: 119443 - DNA, 25 bp, Saccharomyces pastorianus
gccagctgctaaccaagtcgaaata

SEQ ID NO: 119444 - DNA, 25 bp, Saccharomyces pastorianus
gaagacatcttgagtgtgccaacaa

SEQ ID NO: 119445 - DNA, 25 bp, Saccharomyces pastorianus
acatccattactacctcaagacgaa

SEQ ID NO: 119446 - DNA, 25 bp, Saccharomyces pastorianus
tatttgatgcattggcctgccagat

SEQ ID NO: 119447 - DNA, 25 bp, Saccharomyces pastorianus
gtcttgccaaaatctgtgaatcccg

SEQ ID NO: 119448 - DNA, 25 bp, Saccharomyces pastorianus
aacccggacacgttgttattagctg

SEQ ID NO: 119449 - DNA, 25 bp, Saccharomyces pastorianus
ggtaataagcttacgccagctgcta

SEQ ID NO: 119450 - DNA, 25 bp, Saccharomyces pastorianus
aggatggttctcgtgcagtggatat

SEQ ID NO: 119451 - DNA, 25 bp, Saccharomyces pastorianus
ggttgaagcgtattctccgttaggt

SEQ ID NO: 119452 - DNA, 25 bp, Saccharomyces pastorianus
gattttggcaagacaacataacctc

SEQ ID NO: 119453 - DNA, 25 bp, Saccharomyces pastorianus
tttccttcgatatgttattgatagc

SEQ ID NO: 119454 - DNA, 25 bp, Saccharomyces pastorianus
gatcgggattcacagattttggcaa

SEQ ID NO: 119455 - DNA, 25 bp, Saccharomyces pastorianus
cagctaataacaacgtgtccgggtt

SEQ ID NO: 119456 - DNA, 25 bp, Saccharomyces pastorianus
gaatacttcgaaaggagaccaattt

SEQ ID NO: 119457 - DNA, 25 bp, Saccharomyces pastorianus
ctgttcgttttgattcgatcgggat

SEQ ID NO: 119458 - DNA, 25 bp, Saccharomyces pastorianus
tgatagcttcaaagtcctcagtaga

SEQ ID NO: 119459 - DNA, 25 bp, Saccharomyces pastorianus
acctctttggacgtgccagctaata

SEQ ID NO: 119460 - DNA, 25 bp, Saccharomyces pastorianus
gaccaatttggatgtacaacccttt

SEQ ID NO: 119461 - DNA, 25 bp, Saccharomyces pastorianus
aacataacctctttggacgtgccag

SEQ ID NO: 119462 - DNA, 25 bp, Saccharomyces pastorianus
gacaaagtaaatattttcctgttcg

SEQ ID NO: 119463 - DNA, 25 bp, Saccharomyces pastorianus
gagagcttttgagtcgtgatgattc

SEQ ID NO: 119464 - DNA, 25 bp, Saccharomyces pastorianus
tttcaatgagggtaacactgcaact

SEQ ID NO: 119465 - DNA, 25 bp, Saccharomyces pastorianus
gaaaccatcagtgaggtccaggaag

SEQ ID NO: 119466 - DNA, 25 bp, Saccharomyces pastorianus
agtcgtgatgattcagggcttacaa

SEQ ID NO: 119467 - DNA, 25 bp, Saccharomyces pastorianus
atatggttactcactgttttcggtt

SEQ ID NO: 119468 - DNA, 25 bp, Saccharomyces pastorianus
cactgcaactccatatttcctagta

SEQ ID NO: 119469 - DNA, 25 bp, Saccharomyces pastorianus
gtttaaatccattgagcccttacca

SEQ ID NO: 119470 - DNA, 25 bp, Saccharomyces pastorianus
agaggaggtcttcaatttcaatgag

SEQ ID NO: 119471 - DNA, 25 bp, Saccharomyces pastorianus
cggtttttattcatcgcggcgaggc

SEQ ID NO: 119472 - DNA, 25 bp, Saccharomyces pastorianus
gatacgcggatacagagaacccttt

SEQ ID NO: 119473 - DNA, 25 bp, Saccharomyces pastorianus
cagagaaccctttattgttggcaaa

SEQ ID NO: 119474 - DNA, 25 bp, Saccharomyces pastorianus
acttcgtgttggctcataggtaccc

SEQ ID NO: 119475 - DNA, 25 bp, Saccharomyces pastorianus
ggaccgtgttattcgtgtagatcaa

SEQ ID NO: 119476 - DNA, 25 bp, Saccharomyces pastorianus
tagagcatctagacaccgctatcaa

SEQ ID NO: 119477 - DNA, 25 bp, Saccharomyces pastorianus
aatccttaacttctactatccaaca

SEQ ID NO: 119478 - DNA, 25 bp, Saccharomyces pastorianus
caggctgcatttttggaccgtgtta

SEQ ID NO: 119479 - DNA, 25 bp, Saccharomyces pastorianus
ataggtaccctcacttgaagcctgt

SEQ ID NO: 119480 - DNA, 25 bp, Saccharomyces pastorianus
gagcatgctcccaagtgtcagaatt

SEQ ID NO: 119481 - DNA, 25 bp, Saccharomyces pastorianus
gcatgattcgtatatggcagttcca

SEQ ID NO: 119482 - DNA, 25 bp, Saccharomyces pastorianus
gcgaaacttggccaatcaattcaat

SEQ ID NO: 119483 - DNA, 25 bp, Saccharomyces pastorianus
gaatttatcagatgctcaggctgca

SEQ ID NO: 119484 - DNA, 25 bp, Saccharomyces pastorianus
agggcactacaatggccaattgcga

SEQ ID NO: 119485 - DNA, 25 bp, Saccharomyces pastorianus
gaaggtcattgagacattctacccc

SEQ ID NO: 119486 - DNA, 25 bp, Saccharomyces pastorianus
cttggagccgcattagtcaacgaat

SEQ ID NO: 119487 - DNA, 25 bp, Saccharomyces pastorianus
acagatggactgcacttttccggaa

SEQ ID NO: 119488 - DNA, 25 bp, Saccharomyces pastorianus
ggtgatgcttggcaacaactgctaa

SEQ ID NO: 119489 - DNA, 25 bp, Saccharomyces pastorianus
atgctcagcaggtccccaaagtgtc

SEQ ID NO: 119490 - DNA, 25 bp, Saccharomyces pastorianus
tcggatacttccgtaccaacgagaa

SEQ ID NO: 119491 - DNA, 25 bp, Saccharomyces pastorianus
tgggtgctaacgatgcatgctcagc

SEQ ID NO: 119492 - DNA, 25 bp, Saccharomyces pastorianus
aagggtacacttctagatgggcgtt

SEQ ID NO: 119493 - DNA, 25 bp, Saccharomyces pastorianus
aaatgttcccttcgtggctttgaat

SEQ ID NO: 119494 - DNA, 25 bp, Saccharomyces pastorianus
atgaagtcttaccatatccgtccta

SEQ ID NO: 119495 - DNA, 25 bp, Saccharomyces pastorianus
gccatttattccgatgccttagcaa

SEQ ID NO: 119496 - DNA, 25 bp, Saccharomyces pastorianus
tactggtgtgttgaagcgatactta

SEQ ID NO: 119497 - DNA, 25 bp, Saccharomyces pastorianus
ttaacggaacaagatctcaacgctg

SEQ ID NO: 119498 - DNA, 25 bp, Saccharomyces pastorianus
aaattcggacacttatatgtcgagc

SEQ ID NO: 119499 - DNA, 25 bp, Saccharomyces pastorianus
aatcaggttcccagctagtcataga

SEQ ID NO: 119500 - DNA, 25 bp, Saccharomyces pastorianus
gcgatacttaagaaagctccccaac

SEQ ID NO: 119501 - DNA, 25 bp, Saccharomyces pastorianus
aaggttacacggtacagtcactgga

SEQ ID NO: 119502 - DNA, 25 bp, Saccharomyces pastorianus
gaatgacgctttataatttggcttt

SEQ ID NO: 119503 - DNA, 25 bp, Saccharomyces pastorianus
gctttagtttttgctccaggtttga

SEQ ID NO: 119504 - DNA, 25 bp, Saccharomyces pastorianus
ggaagaccttccaagggaacattat

SEQ ID NO: 119505 - DNA, 25 bp, Saccharomyces pastorianus
atatgtcgagcaagagcgctttaaa

SEQ ID NO: 119506 - DNA, 25 bp, Saccharomyces pastorianus
gatctcaacgctgttactggtgtgt

SEQ ID NO: 119507 - DNA, 25 bp, Saccharomyces pastorianus
gtcagcatatgctatttccgcaagc

SEQ ID NO: 119508 - DNA, 25 bp, Saccharomyces pastorianus
aatgtctgccgcatgtgcggtttta

SEQ ID NO: 119509 - DNA, 25 bp, Saccharomyces pastorianus
gttccagtagctaccgtcgctatta

SEQ ID NO: 119510 - DNA, 25 bp, Saccharomyces pastorianus
gctgtcagactgcttggcgcttatg

SEQ ID NO: 119511 - DNA, 25 bp, Saccharomyces pastorianus
tattattgcctccagtatggcggaa

SEQ ID NO: 119512 - DNA, 25 bp, Saccharomyces pastorianus
aaatctctgtcgctcaaaagttgga

SEQ ID NO: 119513 - DNA, 25 bp, Saccharomyces pastorianus
atcagactctgacttgccggtaatg

SEQ ID NO: 119514 - DNA, 25 bp, Saccharomyces pastorianus
ggctgctcacttgccaggtatggtg

SEQ ID NO: 119515 - DNA, 25 bp, Saccharomyces pastorianus
gtgacaatagtctctgctcatagaa

SEQ ID NO: 119516 - DNA, 25 bp, Saccharomyces pastorianus
gaacgctgcgctgttggctgtcaga

SEQ ID NO: 119517 - DNA, 25 bp, Saccharomyces pastorianus
gtgtgcccgtaaaaggttcttgtct

SEQ ID NO: 119518 - DNA, 25 bp, Saccharomyces pastorianus
ttttagggcagtaccagcaaacgct

SEQ ID NO: 119519 - DNA, 25 bp, Saccharomyces pastorianus
aacgccagtatttttcctgcggata

SEQ ID NO: 119520 - DNA, 25 bp, Saccharomyces pastorianus
ttatcgaggactgggtataaccctt

SEQ ID NO: 119521 - DNA, 25 bp, Saccharomyces pastorianus
gctagtttagttttgacacccgtgg

SEQ ID NO: 119522 - DNA, 25 bp, Saccharomyces pastorianus
ttgcctggtttgcaacctacgaaat

SEQ ID NO: 119523 - DNA, 25 bp, Saccharomyces pastorianus
aggaagcgctggattggcattcaac

SEQ ID NO: 119524 - DNA, 25 bp, Saccharomyces pastorianus
ggcaaatcctgatctctggtggagt

SEQ ID NO: 119525 - DNA, 25 bp, Saccharomyces pastorianus
aaagcttcggtggtgttgcctggtt

SEQ ID NO: 119526 - DNA, 25 bp, Saccharomyces pastorianus
gtggcaagggcaatcgggcactttt

SEQ ID NO: 119527 - DNA, 25 bp, Saccharomyces pastorianus
gtcgttgaaagataggcactccctt

SEQ ID NO: 119528 - DNA, 25 bp, Saccharomyces pastorianus
gcactcccttgatgacccaaaaaga

SEQ ID NO: 119529 - DNA, 25 bp, Saccharomyces pastorianus
tggatggcacattatgcctacccca

SEQ ID NO: 119530 - DNA, 25 bp, Saccharomyces pastorianus
attgcacatcgcctcgaagctaaat

SEQ ID NO: 119531 - DNA, 25 bp, Saccharomyces pastorianus
gtgaatggacatttactgctcgaac

SEQ ID NO: 119532 - DNA, 25 bp, Saccharomyces pastorianus
atttcattgatacattgcccacaga

SEQ ID NO: 119533 - DNA, 25 bp, Saccharomyces pastorianus
tccgagctttcgaggtttgactata

SEQ ID NO: 119534 - DNA, 25 bp, Saccharomyces pastorianus
gatctgctggatgtttcacggtatt

SEQ ID NO: 119535 - DNA, 25 bp, Saccharomyces pastorianus
cgcagcctggtctggttgacataat

SEQ ID NO: 119536 - DNA, 25 bp, Saccharomyces pastorianus
gaaggagatgcaaccgcagcctggt

SEQ ID NO: 119537 - DNA, 25 bp, Saccharomyces pastorianus
gtactagaaatgtcggagccccggt

SEQ ID NO: 119538 - DNA, 25 bp, Saccharomyces pastorianus
agatttattccatccgagctttcga

SEQ ID NO: 119539 - DNA, 25 bp, Saccharomyces pastorianus
tcggagccccggtagagacttttgt

SEQ ID NO: 119540 - DNA, 25 bp, Saccharomyces pastorianus
aagattttgtgcacccttcaataga

SEQ ID NO: 119541 - DNA, 25 bp, Saccharomyces pastorianus
tcacttttgtctcatcccaaggatg

SEQ ID NO: 119542 - DNA, 25 bp, Saccharomyces pastorianus
atatgcttccaaggtcacgtgcact

SEQ ID NO: 119543 - DNA, 25 bp, Saccharomyces pastorianus
gaggcttccagaactgtcatcgaat

SEQ ID NO: 119544 - DNA, 25 bp, Saccharomyces pastorianus
aacattgagtgcagagtccctttct

SEQ ID NO: 119545 - DNA, 25 bp, Saccharomyces pastorianus
gtcatcgaattcctcatactacacg

SEQ ID NO: 119546 - DNA, 25 bp, Saccharomyces pastorianus
gaataaggacaccatgccgcatgca

SEQ ID NO: 119547 - DNA, 25 bp, Saccharomyces pastorianus
aatgggctttctgtaccgagatcct

SEQ ID NO: 119548 - DNA, 25 bp, Saccharomyces pastorianus
atgcactgtttcctagcccaataga

SEQ ID NO: 119549 - DNA, 25 bp, Saccharomyces pastorianus
aatttagcggccatcgtacaaccct

SEQ ID NO: 119550 - DNA, 25 bp, Saccharomyces pastorianus
tccctttctcccagacttagtaaat

SEQ ID NO: 119551 - DNA, 25 bp, Saccharomyces pastorianus
tttacagtagccaaaaacctcctcg

SEQ ID NO: 119552 - DNA, 25 bp, Saccharomyces pastorianus
cttccgattgaaggttgctttacag

SEQ ID NO: 119553 - DNA, 25 bp, Saccharomyces pastorianus
atcaccttcaatgaacgagaccgtg

SEQ ID NO: 119554 - DNA, 25 bp, Saccharomyces pastorianus
gttcccgatctgtatcctattatct

SEQ ID NO: 119555 - DNA, 25 bp, Saccharomyces pastorianus
tggaaatttcaggtccgataccatc

SEQ ID NO: 119556 - DNA, 25 bp, Saccharomyces pastorianus
gggacgtttgctgcactaaagattt

SEQ ID NO: 119557 - DNA, 25 bp, Saccharomyces pastorianus
taggtttcccggtatatcttccgat

SEQ ID NO: 119558 - DNA, 25 bp, Saccharomyces pastorianus
ttataattgttgttcgttcccgatc

SEQ ID NO: 119559 - DNA, 25 bp, Saccharomyces pastorianus
ggctaacatcacaagattcccattc

SEQ ID NO: 119560 - DNA, 25 bp, Saccharomyces pastorianus
gaacgagaccgtgtatttgccggta

SEQ ID NO: 119561 - DNA, 25 bp, Saccharomyces pastorianus
atggtcgttaatccgttgacaaaga

SEQ ID NO: 119562 - DNA, 25 bp, Saccharomyces pastorianus
aatccaactgccctacttttatctt

SEQ ID NO: 119563 - DNA, 25 bp, Saccharomyces pastorianus
gcccctgatattgccggtcaagata

SEQ ID NO: 119564 - DNA, 25 bp, Saccharomyces pastorianus
aagagatgcctctgagcgagtcatt

SEQ ID NO: 119565 - DNA, 25 bp, Saccharomyces pastorianus
acgctgtttctgtttgtccaaatct

SEQ ID NO: 119566 - DNA, 25 bp, Saccharomyces pastorianus
tttaggtttaactccatctgccaat

SEQ ID NO: 119567 - DNA, 25 bp, Saccharomyces pastorianus
tatcttgtccgacttgaactctggt

SEQ ID NO: 119568 - DNA, 25 bp, Saccharomyces pastorianus
gagtatcctgaccttactttagaaa

SEQ ID NO: 119569 - DNA, 25 bp, Saccharomyces pastorianus
gtttgccctggcgttgttcaatcta

SEQ ID NO: 119570 - DNA, 25 bp, Saccharomyces pastorianus
aacaggtgacttggctggtactgct

SEQ ID NO: 119571 - DNA, 25 bp, Saccharomyces pastorianus
gatctttgaagctgtccatggctct

SEQ ID NO: 119572 - DNA, 25 bp, Saccharomyces pastorianus
gagccatcggcagaccaagagttat

SEQ ID NO: 119573 - DNA, 25 bp, Saccharomyces pastorianus
gggagatcctgaacaagccaccaac

SEQ ID NO: 119574 - DNA, 25 bp, Saccharomyces pastorianus
attctagagtcgacgctggcgtatc

SEQ ID NO: 119575 - DNA, 25 bp, Saccharomyces pastorianus
tacatcctcacaatggcagcactat

SEQ ID NO: 119576 - DNA, 25 bp, Saccharomyces pastorianus
gtacgcaagtgaaactccgctgatg

SEQ ID NO: 119577 - DNA, 25 bp, Saccharomyces pastorianus
gcagcaaagcagatcgcatcgttga

SEQ ID NO: 119578 - DNA, 25 bp, Saccharomyces pastorianus
attgcgttcgcaatttttcgatggt

SEQ ID NO: 119579 - DNA, 25 bp, Saccharomyces pastorianus
aaaaaatgttcgtcgccttctgtcg

SEQ ID NO: 119580 - DNA, 25 bp, Saccharomyces pastorianus
ggaacctttcacatccagagacaca

SEQ ID NO: 119581 - DNA, 25 bp, Saccharomyces pastorianus
cagcactatcgccatattcatactt

SEQ ID NO: 119582 - DNA, 25 bp, Saccharomyces pastorianus
ggcgtatctacaaacaattcctgac

SEQ ID NO: 119583 - DNA, 25 bp, Saccharomyces pastorianus
gactgatcgaaaatccctacatcct

SEQ ID NO: 119584 - DNA, 25 bp, Saccharomyces pastorianus
gttcaactgtcttacaaagctcgta

SEQ ID NO: 119585 - DNA, 25 bp, Saccharomyces pastorianus
gccttcagcaccagcattagctatt

SEQ ID NO: 119586 - DNA, 25 bp, Saccharomyces pastorianus
tgtagccaaagccttactaaaccgt

SEQ ID NO: 119587 - DNA, 25 bp, Saccharomyces pastorianus
cgattcgtcctccagaatctggtat

SEQ ID NO: 119588 - DNA, 25 bp, Saccharomyces pastorianus
gaatatcgcattttgtggcggcctg

SEQ ID NO: 119589 - DNA, 25 bp, Saccharomyces pastorianus
tgtttcttaacatcctcggcaccgt

SEQ ID NO: 119590 - DNA, 25 bp, Saccharomyces pastorianus
accagcattagctattccagctgct

SEQ ID NO: 119591 - DNA, 25 bp, Saccharomyces pastorianus
gcatcttcgacccatgtttcttaac

SEQ ID NO: 119592 - DNA, 25 bp, Saccharomyces pastorianus
gggctgagaccgtttcctcttcact

SEQ ID NO: 119593 - DNA, 25 bp, Saccharomyces pastorianus
ttccacgggcttaatcatgaaggat

SEQ ID NO: 119594 - DNA, 25 bp, Saccharomyces pastorianus
catatcaagtcgtgtagcgattcgt

SEQ ID NO: 119595 - DNA, 25 bp, Saccharomyces pastorianus
ttatcccaccaccacgtgatatgaa

SEQ ID NO: 119596 - DNA, 25 bp, Saccharomyces pastorianus
gcatcgttcccgcaattttacaaaa

SEQ ID NO: 119597 - DNA, 25 bp, Saccharomyces pastorianus
atcgcaaatgcatccataacagctg

SEQ ID NO: 119598 - DNA, 25 bp, Saccharomyces pastorianus
aggtgcgagcgttttggcgcaaatt

SEQ ID NO: 119599 - DNA, 25 bp, Saccharomyces pastorianus
tttttccagtgagcattatcccacc

SEQ ID NO: 119600 - DNA, 25 bp, Saccharomyces pastorianus
atattcttatcgttggtggcagttc

SEQ ID NO: 119601 - DNA, 25 bp, Saccharomyces pastorianus
gaatcaacatttggaggccctcttt

SEQ ID NO: 119602 - DNA, 25 bp, Saccharomyces pastorianus
aaggctatcgttcaaagtatcgcaa

SEQ ID NO: 119603 - DNA, 25 bp, Saccharomyces pastorianus
acgtgatatgaatcccgctctaata

SEQ ID NO: 119604 - DNA, 25 bp, Saccharomyces pastorianus
ctctttgttgagttcggcatcgttc

SEQ ID NO: 119605 - DNA, 25 bp, Saccharomyces pastorianus
gtaaatgcccctgacaagactgaag

SEQ ID NO: 119606 - DNA, 25 bp, Saccharomyces pastorianus
ccggttgcatctttcatcgcaggaa

SEQ ID NO: 119607 - DNA, 25 bp, Saccharomyces pastorianus
ttgccgtcgttgaatctccaggtta

SEQ ID NO: 119608 - DNA, 25 bp, Saccharomyces pastorianus
gtactgattttattgacgccttgaa

SEQ ID NO: 119609 - DNA, 25 bp, Saccharomyces pastorianus
atcgcaggaactgttgctggtcaaa

SEQ ID NO: 119610 - DNA, 25 bp, Saccharomyces pastorianus
aggagtaagccgatgccggttgcat

SEQ ID NO: 119611 - DNA, 25 bp, Saccharomyces pastorianus
tccagatcgggaactttgacatacg

SEQ ID NO: 119612 - DNA, 25 bp, Saccharomyces pastorianus
aggccgaaatcgaagctgctcaatt

SEQ ID NO: 119613 - DNA, 25 bp, Saccharomyces pastorianus
tagttgggcccaactgccctggtat

SEQ ID NO: 119614 - DNA, 25 bp, Saccharomyces pastorianus
ctgaccttggtcaatcactggttat

SEQ ID NO: 119615 - DNA, 25 bp, Saccharomyces pastorianus
tagaatgggtcactccggtgcaatt

SEQ ID NO: 119616 - DNA, 25 bp, Saccharomyces pastorianus
tggtgatgcttttcccggtactgat

SEQ ID NO: 119617 - DNA, 25 bp, Saccharomyces pastorianus
cgattctatcgcactattgaggcta

SEQ ID NO: 119618 - DNA, 25 bp, Saccharomyces pastorianus
tcaagactctaacaggtgaccattt

SEQ ID NO: 119619 - DNA, 25 bp, Saccharomyces pastorianus
ttaccttagggtttgatcttgacga

SEQ ID NO: 119620 - DNA, 25 bp, Saccharomyces pastorianus
gtgaccatttgtcgagagccatcgg

SEQ ID NO: 119621 - DNA, 25 bp, Saccharomyces pastorianus
accacacagaatgacacccttgagg

SEQ ID NO: 119622 - DNA, 25 bp, Saccharomyces pastorianus
gccgattttatcaaagcctttacct

SEQ ID NO: 119623 - DNA, 25 bp, Saccharomyces pastorianus
gagccatcggtcgtattgccggtaa

SEQ ID NO: 119624 - DNA, 25 bp, Saccharomyces pastorianus
tttggtcgagcacttgaagctgcaa

SEQ ID NO: 119625 - DNA, 25 bp, Saccharomyces pastorianus
ggaaacctcgcttcacttcagctag

SEQ ID NO: 119626 - DNA, 25 bp, Saccharomyces pastorianus
gaaagatcatggttccaccacacag

SEQ ID NO: 119627 - DNA, 25 bp, Saccharomyces pastorianus
aaatttatcctcctttggtcgagca

SEQ ID NO: 119628 - DNA, 25 bp, Saccharomyces pastorianus
tggtcatcaaccactacggtcttag

SEQ ID NO: 119629 - DNA, 25 bp, Saccharomyces pastorianus
gaatcatctaacagaacgtcgtcat

SEQ ID NO: 119630 - DNA, 25 bp, Saccharomyces pastorianus
gaagtgaagcgaggtttcccctggt

SEQ ID NO: 119631 - DNA, 25 bp, Saccharomyces pastorianus
atcgtcctcatcgatgctttcggta

SEQ ID NO: 119632 - DNA, 25 bp, Saccharomyces pastorianus
tattttgttaccctgcgttttgcta

SEQ ID NO: 119633 - DNA, 25 bp, Saccharomyces pastorianus
gctgtgttattgtcggaatcatcta

SEQ ID NO: 119634 - DNA, 25 bp, Saccharomyces pastorianus
ccctgcgttttgctagctgaagtga

SEQ ID NO: 119635 - DNA, 25 bp, Saccharomyces pastorianus
tctacctcttcttttgctgtgttat

SEQ ID NO: 119636 - DNA, 25 bp, Saccharomyces pastorianus
acttacaggtgtcacagtagccttt

SEQ ID NO: 119637 - DNA, 25 bp, Saccharomyces pastorianus
ccatcttgtccacttacaggtgtca

SEQ ID NO: 119638 - DNA, 25 bp, Saccharomyces pastorianus
ttagattcgtgcattttccggctac

SEQ ID NO: 119639 - DNA, 25 bp, Saccharomyces pastorianus
ggcggctgcgtttaaacgggtccat

SEQ ID NO: 119640 - DNA, 25 bp, Saccharomyces pastorianus
gagattacttccactttcgtaccga

SEQ ID NO: 119641 - DNA, 25 bp, Saccharomyces pastorianus
ggcgttcatcatgggaatttcgcat

SEQ ID NO: 119642 - DNA, 25 bp, Saccharomyces pastorianus
taactcccaattccatgacatcaga

SEQ ID NO: 119643 - DNA, 25 bp, Saccharomyces pastorianus
tcaccacccacctggatgtatatga

SEQ ID NO: 119644 - DNA, 25 bp, Saccharomyces pastorianus
aaccgtttcttctcttatcaataca

SEQ ID NO: 119645 - DNA, 25 bp, Saccharomyces pastorianus
gacaaacttaaactggacacctctg

SEQ ID NO: 119646 - DNA, 25 bp, Saccharomyces pastorianus
gggtccataactccactaactttag

SEQ ID NO: 119647 - DNA, 25 bp, Saccharomyces pastorianus
acacctctgagttccacgttagtaa

SEQ ID NO: 119648 - DNA, 25 bp, Saccharomyces pastorianus
ttaagattccttgtaccgctagttc

SEQ ID NO: 119649 - DNA, 25 bp, Saccharomyces pastorianus
gctagttccactactcgtgacaaac

SEQ ID NO: 119650 - DNA, 25 bp, Saccharomyces pastorianus
ccccagttgtcatcaccatttataa

SEQ ID NO: 119651 - DNA, 25 bp, Saccharomyces pastorianus
gacttcattgcctttatggaatctc

SEQ ID NO: 119652 - DNA, 25 bp, Saccharomyces pastorianus
gcaaaagtttctgatttcctacaaa

SEQ ID NO: 119653 - DNA, 25 bp, Saccharomyces pastorianus
atactcctattgatgcctttctgaa

SEQ ID NO: 119654 - DNA, 25 bp, Saccharomyces pastorianus
ttaccagcactgagttcccgaatga

SEQ ID NO: 119655 - DNA, 25 bp, Saccharomyces pastorianus
aacgagattgagaccctttgtaacg

SEQ ID NO: 119656 - DNA, 25 bp, Saccharomyces pastorianus
aacggtgaccgtgaatctacaaaga

SEQ ID NO: 119657 - DNA, 25 bp, Saccharomyces pastorianus
tctcaaaacaagcttaccggattcc

SEQ ID NO: 119658 - DNA, 25 bp, Saccharomyces pastorianus
tttgtaacggagcaaccccaaggcg

SEQ ID NO: 119659 - DNA, 25 bp, Saccharomyces pastorianus
aaatcgccatcaaaacggtgaccgt

SEQ ID NO: 119660 - DNA, 25 bp, Saccharomyces pastorianus
ggagtctttacgagttcatacattt

SEQ ID NO: 119661 - DNA, 25 bp, Saccharomyces pastorianus
actttggactttgccgagagaactc

SEQ ID NO: 119662 - DNA, 25 bp, Saccharomyces pastorianus
aatgaaggcttggtccctcgaggac

SEQ ID NO: 119663 - DNA, 25 bp, Saccharomyces pastorianus
gatagcatcccctcaagaaacagtg

SEQ ID NO: 119664 - DNA, 25 bp, Saccharomyces pastorianus
agactaaacctaccttcagagattt

SEQ ID NO: 119665 - DNA, 25 bp, Saccharomyces pastorianus
ggtatcgtcccaggcgaacggtacg

SEQ ID NO: 119666 - DNA, 25 bp, Saccharomyces pastorianus
gctggatgtaccctctggatagcat

SEQ ID NO: 119667 - DNA, 25 bp, Saccharomyces pastorianus
acgtaggcgatcagtttgcaccggt

SEQ ID NO: 119668 - DNA, 25 bp, Saccharomyces pastorianus
ttataaccctgaatctcctatccaa

SEQ ID NO: 119669 - DNA, 25 bp, Saccharomyces pastorianus
aacactttagagtcttttgccccat

SEQ ID NO: 119670 - DNA, 25 bp, Saccharomyces pastorianus
caaccctctgaaaccttacacgtag

SEQ ID NO: 119671 - DNA, 25 bp, Saccharomyces pastorianus
ggaaagatcttggtgttcgttcatt

SEQ ID NO: 119672 - DNA, 25 bp, Saccharomyces pastorianus
aagcagcacctatttaagtaccaag

SEQ ID NO: 119673 - DNA, 25 bp, Saccharomyces pastorianus
aggatctggttctctagcggcaatg

SEQ ID NO: 119674 - DNA, 25 bp, Saccharomyces pastorianus
aagttggcctctgatgcaatccagg

SEQ ID NO: 119675 - DNA, 25 bp, Saccharomyces pastorianus
gctactacctttctctaggatctgg

SEQ ID NO: 119676 - DNA, 25 bp, Saccharomyces pastorianus
ttacattccttatatacctcgagag

SEQ ID NO: 119677 - DNA, 25 bp, Saccharomyces pastorianus
atggttctactgacgtgggctacta

SEQ ID NO: 119678 - DNA, 25 bp, Saccharomyces pastorianus
agaccctacgggatctcatttgttc

SEQ ID NO: 119679 - DNA, 25 bp, Saccharomyces pastorianus
aagagtggtctcagctttacaaatg

SEQ ID NO: 119680 - DNA, 25 bp, Saccharomyces pastorianus
catttgttctccattcatgcgcatg

SEQ ID NO: 119681 - DNA, 25 bp, Saccharomyces pastorianus
gattgttgcaggtgtagaccctacg

SEQ ID NO: 119682 - DNA, 25 bp, Saccharomyces pastorianus
cagttacgcagttgatcgggtctaa

SEQ ID NO: 119683 - DNA, 25 bp, Saccharomyces pastorianus
aacagcaaacaccagtaacgatatg

SEQ ID NO: 119684 - DNA, 25 bp, Saccharomyces pastorianus
aaccaaggccatggtgccaccaata

SEQ ID NO: 119685 - DNA, 25 bp, Saccharomyces pastorianus
gcatatttaacttcttacaacagca

SEQ ID NO: 119686 - DNA, 25 bp, Saccharomyces pastorianus
gcaaatcggcataaggatcaagggt

SEQ ID NO: 119687 - DNA, 25 bp, Saccharomyces pastorianus
aattcctgtgaatagtgccgatggt

SEQ ID NO: 119688 - DNA, 25 bp, Saccharomyces pastorianus
tcgatgaagccgtggaaattcctgt

SEQ ID NO: 119689 - DNA, 25 bp, Saccharomyces pastorianus
aacgatatggttattcgagcaaatc

SEQ ID NO: 119690 - DNA, 25 bp, Saccharomyces pastorianus
ggtgccaccaataaattgcatattt

SEQ ID NO: 119691 - DNA, 25 bp, Saccharomyces pastorianus
gagttcatgaatgttgtcatcgatg

SEQ ID NO: 119692 - DNA, 25 bp, Saccharomyces pastorianus
aagatgtggagaagggcacgccctt

SEQ ID NO: 119693 - DNA, 25 bp, Saccharomyces pastorianus
gaacaaagttaaaaccaaggccatg

SEQ ID NO: 119694 - DNA, 25 bp, Saccharomyces pastorianus
attccttggtcagactttgacatat

SEQ ID NO: 119695 - DNA, 25 bp, Saccharomyces pastorianus
ccttggcattccttggtcagacttt

SEQ ID NO: 119696 - DNA, 25 bp, Saccharomyces pastorianus
ggcattccttggtcagactttgaca

SEQ ID NO: 119697 - DNA, 25 bp, Saccharomyces pastorianus
gggccaccttggcattccttggtca

SEQ ID NO: 119698 - DNA, 25 bp, Saccharomyces pastorianus
tggcattccttggtcagactttgac

SEQ ID NO: 119699 - DNA, 25 bp, Saccharomyces pastorianus
ttggcattccttggtcagactttga

SEQ ID NO: 119700 - DNA, 25 bp, Saccharomyces pastorianus
gccaccttggcattccttggtcaga

SEQ ID NO: 119701 - DNA, 25 bp, Saccharomyces pastorianus
accttggcattccttggtcagactt

SEQ ID NO: 119702 - DNA, 25 bp, Saccharomyces pastorianus
aaatgcgggccaccttggcattcct

SEQ ID NO: 119703 - DNA, 25 bp, Saccharomyces pastorianus
gcattccttggtcagactttgacat

SEQ ID NO: 119704 - DNA, 25 bp, Saccharomyces pastorianus
atgcgggccaccttggcattccttg

SEQ ID NO: 119705 - DNA, 25 bp, Saccharomyces pastorianus
gcagtcccaagagaagccactaggt

SEQ ID NO: 119706 - DNA, 25 bp, Saccharomyces pastorianus
actaggttgatgaccataccgcaat

SEQ ID NO: 119707 - DNA, 25 bp, Saccharomyces pastorianus
gcacacgaaaactagcaggatggca

SEQ ID NO: 119708 - DNA, 25 bp, Saccharomyces pastorianus
gacatgtacatgatggcagtcccaa

SEQ ID NO: 119709 - DNA, 25 bp, Saccharomyces pastorianus
gtgaggcccaaaacggagaatacca

SEQ ID NO: 119710 - DNA, 25 bp, Saccharomyces pastorianus
aaaaacacaatacctgcagaccagt

SEQ ID NO: 119711 - DNA, 25 bp, Saccharomyces pastorianus
atggcagcattggtgttcagcgtac

SEQ ID NO: 119712 - DNA, 25 bp, Saccharomyces pastorianus
gaataccagggcaataatgcacacg

SEQ ID NO: 119713 - DNA, 25 bp, Saccharomyces pastorianus
gcagaccagtacctcaaagacatgt

SEQ ID NO: 119714 - DNA, 25 bp, Saccharomyces pastorianus
aattcgacaaagtgtgaggcccaaa

SEQ ID NO: 119715 - DNA, 25 bp, Saccharomyces pastorianus
gttcagcgtaccagtattcacacca

SEQ ID NO: 119716 - DNA, 25 bp, Saccharomyces pastorianus
agattttggcaagcccactgttttt

SEQ ID NO: 119717 - DNA, 25 bp, Saccharomyces pastorianus
atgtcttacacacgagtagatcatc

SEQ ID NO: 119718 - DNA, 25 bp, Saccharomyces pastorianus
aatggcttgtcatctgaggcagatt

SEQ ID NO: 119719 - DNA, 25 bp, Saccharomyces pastorianus
gcccactgtttttcgcaaattatgt

SEQ ID NO: 119720 - DNA, 25 bp, Saccharomyces pastorianus
acacgagtagatcatcccattggaa

SEQ ID NO: 119721 - DNA, 25 bp, Saccharomyces pastorianus
tgtactacatgcagccattcactac

SEQ ID NO: 119722 - DNA, 25 bp, Saccharomyces pastorianus
gaggcagattttggcaagcccactg

SEQ ID NO: 119723 - DNA, 25 bp, Saccharomyces pastorianus
gatcatcccattggaaaaatggctt

SEQ ID NO: 119724 - DNA, 25 bp, Saccharomyces pastorianus
caagcccactgtttttcgcaaatta

SEQ ID NO: 119725 - DNA, 25 bp, Saccharomyces pastorianus
gtttttcgcaaattatgtactacat

SEQ ID NO: 119726 - DNA, 25 bp, Saccharomyces pastorianus
aaaaatggcttgtcatctgaggcag

SEQ ID NO: 119727 - DNA, 25 bp, Saccharomyces pastorianus
aaaccgcggataatcatggtccagt

SEQ ID NO: 119728 - DNA, 25 bp, Saccharomyces pastorianus
gcctgaattgttggaggcccttaat

SEQ ID NO: 119729 - DNA, 25 bp, Saccharomyces pastorianus
tgctggctgcatatgtttaacaccc

SEQ ID NO: 119730 - DNA, 25 bp, Saccharomyces pastorianus
ggattgtccccaaaggtggcgttga

SEQ ID NO: 119731 - DNA, 25 bp, Saccharomyces pastorianus
ttacgagacgactgcccaacgagaa

SEQ ID NO: 119732 - DNA, 25 bp, Saccharomyces pastorianus
ggtccagtacgttctgagacagcac

SEQ ID NO: 119733 - DNA, 25 bp, Saccharomyces pastorianus
gtttaacacccgacaagaagcaagt

SEQ ID NO: 119734 - DNA, 25 bp, Saccharomyces pastorianus
gaagtagcaaaacacccgccaagaa

SEQ ID NO: 119735 - DNA, 25 bp, Saccharomyces pastorianus
agacgagcctaattacgagacgact

SEQ ID NO: 119736 - DNA, 25 bp, Saccharomyces pastorianus
gtttactcacccgttacaggtgcaa

SEQ ID NO: 119737 - DNA, 25 bp, Saccharomyces pastorianus
tctcatgattacttcttctgcacac

SEQ ID NO: 119738 - DNA, 25 bp, Saccharomyces pastorianus
gcgagcccaatctaaaggacgttat

SEQ ID NO: 119739 - DNA, 25 bp, Saccharomyces pastorianus
gccgaattggatcctagcgagccca

SEQ ID NO: 119740 - DNA, 25 bp, Saccharomyces pastorianus
atttggagatccttacttgcacaac

SEQ ID NO: 119741 - DNA, 25 bp, Saccharomyces pastorianus
attgttgctaattacctgtcagact

SEQ ID NO: 119742 - DNA, 25 bp, Saccharomyces pastorianus
gagttcttcagcagattggttttca

SEQ ID NO: 119743 - DNA, 25 bp, Saccharomyces pastorianus
tgagttagaatttttgggccaggaa

SEQ ID NO: 119744 - DNA, 25 bp, Saccharomyces pastorianus
tactggtatgaacaattggtctatc

SEQ ID NO: 119745 - DNA, 25 bp, Saccharomyces pastorianus
actatgggactggttatgccaagtt

SEQ ID NO: 119746 - DNA, 25 bp, Saccharomyces pastorianus
tcaactatttattcatctccaacat

SEQ ID NO: 119747 - DNA, 25 bp, Saccharomyces pastorianus
ccttacttgcacaacaccattggta

SEQ ID NO: 119748 - DNA, 25 bp, Saccharomyces pastorianus
atagcacggtggctgagttcttcag

SEQ ID NO: 119749 - DNA, 25 bp, Saccharomyces pastorianus
ttctttgctattgaccacactttaa

SEQ ID NO: 119750 - DNA, 25 bp, Saccharomyces pastorianus
cagaatgtcacatcatatgctcata

SEQ ID NO: 119751 - DNA, 25 bp, Saccharomyces pastorianus
aacgcttcgaattacatttatttgt

SEQ ID NO: 119752 - DNA, 25 bp, Saccharomyces pastorianus
ttcggaacttttcacttgttcaaag

SEQ ID NO: 119753 - DNA, 25 bp, Saccharomyces pastorianus
tggattcatagattacaacccagat

SEQ ID NO: 119754 - DNA, 25 bp, Saccharomyces pastorianus
tcatatgctcatattcctggaatag

SEQ ID NO: 119755 - DNA, 25 bp, Saccharomyces pastorianus
ttaactaccatagaaaacgcttcga

SEQ ID NO: 119756 - DNA, 25 bp, Saccharomyces pastorianus
tgggagactgtattgcattttttat

SEQ ID NO: 119757 - DNA, 25 bp, Saccharomyces pastorianus
ttgggtgtctgtattttcggaactt

SEQ ID NO: 119758 - DNA, 25 bp, Saccharomyces pastorianus
ggaagagcttaccaacagttttgaa

SEQ ID NO: 119759 - DNA, 25 bp, Saccharomyces pastorianus
gatttgctaatctgcgtgactctac

SEQ ID NO: 119760 - DNA, 25 bp, Saccharomyces pastorianus
caaaaccccagtcactttagccaag

SEQ ID NO: 119761 - DNA, 25 bp, Saccharomyces pastorianus
cccagtcactttagccaaggtcatc

SEQ ID NO: 119762 - DNA, 25 bp, Saccharomyces pastorianus
tggtgtcacccaagtccgtgtcgaa

SEQ ID NO: 119763 - DNA, 25 bp, Saccharomyces pastorianus
ccccagtcactttagccaaggtcat

SEQ ID NO: 119764 - DNA, 25 bp, Saccharomyces pastorianus
gtggtgtcacccaagtccgtgtcga

SEQ ID NO: 119765 - DNA, 25 bp, Saccharomyces pastorianus
ggtgtcacccaagtccgtgtcgaat

SEQ ID NO: 119766 - DNA, 25 bp, Saccharomyces pastorianus
gataacaaaaccccagtcactttag

SEQ ID NO: 119767 - DNA, 25 bp, Saccharomyces pastorianus
accccagtcactttagccaaggtca

SEQ ID NO: 119768 - DNA, 25 bp, Saccharomyces pastorianus
gtgtcacccaagtccgtgtcgaatt

SEQ ID NO: 119769 - DNA, 25 bp, Saccharomyces pastorianus
tcttctcatcctgaaggcttcttga

SEQ ID NO: 119770 - DNA, 25 bp, Saccharomyces pastorianus
agtaggttatttcactctggataaa

SEQ ID NO: 119771 - DNA, 25 bp, Saccharomyces pastorianus
gggacgttgtcaagaacagtccatg

SEQ ID NO: 119772 - DNA, 25 bp, Saccharomyces pastorianus
aaatccatcttctcatcctgaaggc

SEQ ID NO: 119773 - DNA, 25 bp, Saccharomyces pastorianus
gaaaggtcagatttctcagaaaacg

SEQ ID NO: 119774 - DNA, 25 bp, Saccharomyces pastorianus
atctgtcatggaacataacttcggg

SEQ ID NO: 119775 - DNA, 25 bp, Saccharomyces pastorianus
gagagtacgacttctaaggttattt

SEQ ID NO: 119776 - DNA, 25 bp, Saccharomyces pastorianus
atcaacccagaaagtgaagtcgttt

SEQ ID NO: 119777 - DNA, 25 bp, Saccharomyces pastorianus
ggcttcttgaaggacatcaacccag

SEQ ID NO: 119778 - DNA, 25 bp, Saccharomyces pastorianus
agtctcacacacagtttctttcaaa

SEQ ID NO: 119779 - DNA, 25 bp, Saccharomyces pastorianus
caatgggttcctatctcttcaaaat

SEQ ID NO: 119780 - DNA, 25 bp, Saccharomyces pastorianus
gtatcgatatatctaccattcctta

SEQ ID NO: 119781 - DNA, 25 bp, Saccharomyces pastorianus
cgccttttcttttcgatgtagtatt

SEQ ID NO: 119782 - DNA, 25 bp, Saccharomyces pastorianus
ggaatataaaccatactccgatgat

SEQ ID NO: 119783 - DNA, 25 bp, Saccharomyces pastorianus
atggattcaaactctgtatcgatat

SEQ ID NO: 119784 - DNA, 25 bp, Saccharomyces pastorianus
aggaaacttttcaccatccactgaa

SEQ ID NO: 119785 - DNA, 25 bp, Saccharomyces pastorianus
gcaacgtcttgcataacatgggcat

SEQ ID NO: 119786 - DNA, 25 bp, Saccharomyces pastorianus
acatgggcattatttccacttgcaa

SEQ ID NO: 119787 - DNA, 25 bp, Saccharomyces pastorianus
ataacgttaatctacatggattcaa

SEQ ID NO: 119788 - DNA, 25 bp, Saccharomyces pastorianus
taccattccttagcaacgtcttgca

SEQ ID NO: 119789 - DNA, 25 bp, Saccharomyces pastorianus
acattatatcgccttttcttttcga

SEQ ID NO: 119790 - DNA, 25 bp, Saccharomyces pastorianus
atttccacttgcaagggttccaaag

SEQ ID NO: 119791 - DNA, 25 bp, Saccharomyces pastorianus
ggctcgctcttatacatttgttatc

SEQ ID NO: 119792 - DNA, 25 bp, Saccharomyces pastorianus
gaagggctattatctatcatccaac

SEQ ID NO: 119793 - DNA, 25 bp, Saccharomyces pastorianus
actggcttttgtgcgtttttgtatc

SEQ ID NO: 119794 - DNA, 25 bp, Saccharomyces pastorianus
gtcaaccttgaatatcccgttggat

SEQ ID NO: 119795 - DNA, 25 bp, Saccharomyces pastorianus
ttgttatcaacatcgccctggaaag

SEQ ID NO: 119796 - DNA, 25 bp, Saccharomyces pastorianus
atactccaatcgatcccagtttaag

SEQ ID NO: 119797 - DNA, 25 bp, Saccharomyces pastorianus
gtccattggcgggaaattctccagg

SEQ ID NO: 119798 - DNA, 25 bp, Saccharomyces pastorianus
tttggacggcgtacaaccttggctg

SEQ ID NO: 119799 - DNA, 25 bp, Saccharomyces pastorianus
gtcctattcgctcactgacaatgta

SEQ ID NO: 119800 - DNA, 25 bp, Saccharomyces pastorianus
gtcacagattgggatttgtcaacct

SEQ ID NO: 119801 - DNA, 25 bp, Saccharomyces pastorianus
aattgaatgggtcctattcgctcac

SEQ ID NO: 119802 - DNA, 25 bp, Saccharomyces pastorianus
atggattcgtcatcttgcccgatat

SEQ ID NO: 119803 - DNA, 25 bp, Saccharomyces pastorianus
gttatacctggtcgcgatcgtgtac

SEQ ID NO: 119804 - DNA, 25 bp, Saccharomyces pastorianus
gtacagggacgacatcaaatctttg

SEQ ID NO: 119805 - DNA, 25 bp, Saccharomyces pastorianus
atgactataatgtaaacccggacga

SEQ ID NO: 119806 - DNA, 25 bp, Saccharomyces pastorianus
tatccaagagatgtgtaccagcgaa

SEQ ID NO: 119807 - DNA, 25 bp, Saccharomyces pastorianus
gcgttgggtttcttaggtcctgaag

SEQ ID NO: 119808 - DNA, 25 bp, Saccharomyces pastorianus
gaggctccggaatgacagtactgtt

SEQ ID NO: 119809 - DNA, 25 bp, Saccharomyces pastorianus
gaagacgcttacttatgtcattggt

SEQ ID NO: 119810 - DNA, 25 bp, Saccharomyces pastorianus
tgatggtatcgcaaccagtcctgaa

SEQ ID NO: 119811 - DNA, 25 bp, Saccharomyces pastorianus
acccggacgagctaagagttttcat

SEQ ID NO: 119812 - DNA, 25 bp, Saccharomyces pastorianus
atagttgtgccctttatccaagaga

SEQ ID NO: 119813 - DNA, 25 bp, Saccharomyces pastorianus
accgtaccgccatctcaaagtgaag

SEQ ID NO: 119814 - DNA, 25 bp, Saccharomyces pastorianus
ttatgccaccaaactctccaagttt

SEQ ID NO: 119815 - DNA, 25 bp, Saccharomyces pastorianus
atgacaatatctaccgcaacttaca

SEQ ID NO: 119816 - DNA, 25 bp, Saccharomyces pastorianus
agagctaactagaatacccggtgaa

SEQ ID NO: 119817 - DNA, 25 bp, Saccharomyces pastorianus
gcccgcagaggatgccctacgaaga

SEQ ID NO: 119818 - DNA, 25 bp, Saccharomyces pastorianus
ggtacaccaaagacagactcgttta

SEQ ID NO: 119819 - DNA, 25 bp, Saccharomyces pastorianus
caacaattttatatggcccgcagag

SEQ ID NO: 119820 - DNA, 25 bp, Saccharomyces pastorianus
gggagctgtgggacccaacaatttt

SEQ ID NO: 119821 - DNA, 25 bp, Saccharomyces pastorianus
gacagagttgttggattatgccacc

SEQ ID NO: 119822 - DNA, 25 bp, Saccharomyces pastorianus
caccaacgttcgacaagggagctgt

SEQ ID NO: 119823 - DNA, 25 bp, Saccharomyces pastorianus
actgatgaggccttgtttgaaaacg

SEQ ID NO: 119824 - DNA, 25 bp, Saccharomyces pastorianus
catttttcctattcagaggaccata

SEQ ID NO: 119825 - DNA, 25 bp, Saccharomyces pastorianus
ggtgcaaccatttattatccttgat

SEQ ID NO: 119826 - DNA, 25 bp, Saccharomyces pastorianus
agatatttctgcaagctctccaaac

SEQ ID NO: 119827 - DNA, 25 bp, Saccharomyces pastorianus
taggtattccaccaattgagttaga

SEQ ID NO: 119828 - DNA, 25 bp, Saccharomyces pastorianus
gcaagctctccaaacttgggtggta

SEQ ID NO: 119829 - DNA, 25 bp, Saccharomyces pastorianus
ttattgttgctttctcatttttcct

SEQ ID NO: 119830 - DNA, 25 bp, Saccharomyces pastorianus
ggaccatatgctaaacaagttactg

SEQ ID NO: 119831 - DNA, 25 bp, Saccharomyces pastorianus
ctagcatttggttacatggtgcaac

SEQ ID NO: 119832 - DNA, 25 bp, Saccharomyces pastorianus
aggaattttctaacgctgcaagtgg

SEQ ID NO: 119833 - DNA, 25 bp, Saccharomyces pastorianus
tgtcactcctttgccttctaaaaaa

SEQ ID NO: 119834 - DNA, 25 bp, Saccharomyces pastorianus
ttgcgagaagatggtgtcactcctt

SEQ ID NO: 119835 - DNA, 25 bp, Saccharomyces pastorianus
ctgcgagcagcgtttcaattgagtg

SEQ ID NO: 119836 - DNA, 25 bp, Saccharomyces pastorianus
attgtccaaacgttcggttgcatag

SEQ ID NO: 119837 - DNA, 25 bp, Saccharomyces pastorianus
gattgattgtaattcgaacccacta

SEQ ID NO: 119838 - DNA, 25 bp, Saccharomyces pastorianus
ggtagcgtcaccataggcaagagta

SEQ ID NO: 119839 - DNA, 25 bp, Saccharomyces pastorianus
gatttctccaccatgaagctgattg

SEQ ID NO: 119840 - DNA, 25 bp, Saccharomyces pastorianus
gcgacaagaacgtgctatctgaatc

SEQ ID NO: 119841 - DNA, 25 bp, Saccharomyces pastorianus
aatgatcatcggtttgtgtgcaagc

SEQ ID NO: 119842 - DNA, 25 bp, Saccharomyces pastorianus
tgatttgtaccttcatattgtccaa

SEQ ID NO: 119843 - DNA, 25 bp, Saccharomyces pastorianus
tggagacagttttagcatcgatgaa

SEQ ID NO: 119844 - DNA, 25 bp, Saccharomyces pastorianus
actgttaatgctgggtgacgtcgaa

SEQ ID NO: 119845 - DNA, 25 bp, Saccharomyces pastorianus
agtaaagccacgatcgatttctcca

SEQ ID NO: 119846 - DNA, 25 bp, Saccharomyces pastorianus
ggacctccggcttctttagcagatg

SEQ ID NO: 119847 - DNA, 25 bp, Saccharomyces pastorianus
aataccctgacaccacaaatgactg

SEQ ID NO: 119848 - DNA, 25 bp, Saccharomyces pastorianus
aggcggttcattcgctgaaactact

SEQ ID NO: 119849 - DNA, 25 bp, Saccharomyces pastorianus
ggtcgtgatgcacttttagcttcaa

SEQ ID NO: 119850 - DNA, 25 bp, Saccharomyces pastorianus
ttaggccagtcgcagatacctcagt

SEQ ID NO: 119851 - DNA, 25 bp, Saccharomyces pastorianus
acctccttcggcatttttaggccag

SEQ ID NO: 119852 - DNA, 25 bp, Saccharomyces pastorianus
agaatactcaagcaccttcgcaagc

SEQ ID NO: 119853 - DNA, 25 bp, Saccharomyces pastorianus
gttaccatcgacgacgagtgctgca

SEQ ID NO: 119854 - DNA, 25 bp, Saccharomyces pastorianus
agctacatcaacatccggaggcggt

SEQ ID NO: 119855 - DNA, 25 bp, Saccharomyces pastorianus
gctagataagccctcagttttactg

SEQ ID NO: 119856 - DNA, 25 bp, Saccharomyces pastorianus
agcagatgcgttggcagcagcttta

SEQ ID NO: 119857 - DNA, 25 bp, Saccharomyces pastorianus
agtgactctttctaagcatcgcgaa

SEQ ID NO: 119858 - DNA, 25 bp, Saccharomyces pastorianus
gcatcgcgaattaatgactactttt

SEQ ID NO: 119859 - DNA, 25 bp, Saccharomyces pastorianus
gaggcatcttaactgcagccacaat

SEQ ID NO: 119860 - DNA, 25 bp, Saccharomyces pastorianus
tgtacgcccaaaagtagtgactctt

SEQ ID NO: 119861 - DNA, 25 bp, Saccharomyces pastorianus
tcacccttgccctaagcagaagacg

SEQ ID NO: 119862 - DNA, 25 bp, Saccharomyces pastorianus
attaatttacctgacgccggccgag

SEQ ID NO: 119863 - DNA, 25 bp, Saccharomyces pastorianus
caggaaacccggatgacggcattaa

SEQ ID NO: 119864 - DNA, 25 bp, Saccharomyces pastorianus
tattcttaccttgtacgcccaaaag

SEQ ID NO: 119865 - DNA, 25 bp, Saccharomyces pastorianus
gtcacgagcttaccattcaaattat

SEQ ID NO: 119866 - DNA, 25 bp, Saccharomyces pastorianus
agatgagaaactcggtcacccttgc

SEQ ID NO: 119867 - DNA, 25 bp, Saccharomyces pastorianus
atatgtacggatgtatggtcccaaa

SEQ ID NO: 119868 - DNA, 25 bp, Saccharomyces pastorianus
agctgctcgtcatttaaccggtttg

SEQ ID NO: 119869 - DNA, 25 bp, Saccharomyces pastorianus
tcagttggtgggttcagagcctcca

SEQ ID NO: 119870 - DNA, 25 bp, Saccharomyces pastorianus
tatggtgtcatcatggcaggcgccc

SEQ ID NO: 119871 - DNA, 25 bp, Saccharomyces pastorianus
cagatttttacaacgttccagtgga

SEQ ID NO: 119872 - DNA, 25 bp, Saccharomyces pastorianus
atttctggcgcttctgatgaaacat

SEQ ID NO: 119873 - DNA, 25 bp, Saccharomyces pastorianus
ggtggtgaagaacaactcagcctat

SEQ ID NO: 119874 - DNA, 25 bp, Saccharomyces pastorianus
gacttatccagcgacattttgtctc

SEQ ID NO: 119875 - DNA, 25 bp, Saccharomyces pastorianus
gacggccttgatgaccagtttctaa

SEQ ID NO: 119876 - DNA, 25 bp, Saccharomyces pastorianus
ttgggagtaccaatcacccctattg

SEQ ID NO: 119877 - DNA, 25 bp, Saccharomyces pastorianus
agagcctccatctataacgcgcttt

SEQ ID NO: 119878 - DNA, 25 bp, Saccharomyces pastorianus
aggcttaaccctatacattatcaag

SEQ ID NO: 119879 - DNA, 25 bp, Saccharomyces pastorianus
gaatcacttacaagaacgtccctaa

SEQ ID NO: 119880 - DNA, 25 bp, Saccharomyces pastorianus
acatctgaccggtgaatttgaaaaa

SEQ ID NO: 119881 - DNA, 25 bp, Saccharomyces pastorianus
attggagtttgttgcgtctcctgca

SEQ ID NO: 119882 - DNA, 25 bp, Saccharomyces pastorianus
tggttggctagaaaacttgccggta

SEQ ID NO: 119883 - DNA, 25 bp, Saccharomyces pastorianus
tggccccacctgaggtgcaagttga

SEQ ID NO: 119884 - DNA, 25 bp, Saccharomyces pastorianus
gttgacgagcaactaatgcaccaat

SEQ ID NO: 119885 - DNA, 25 bp, Saccharomyces pastorianus
agaacgtccctaattggcatagaga

SEQ ID NO: 119886 - DNA, 25 bp, Saccharomyces pastorianus
gaagttcatcctctatctttttata

SEQ ID NO: 119887 - DNA, 25 bp, Saccharomyces pastorianus
agtccgtgtgtgtgaaaatattccc

SEQ ID NO: 119888 - DNA, 25 bp, Saccharomyces pastorianus
taagttcgatgtctgggataccgca

SEQ ID NO: 119889 - DNA, 25 bp, Saccharomyces pastorianus
gactacctttgtgaagagacatctg

SEQ ID NO: 119890 - DNA, 25 bp, Saccharomyces pastorianus
aagccacggaagttgtgccatccag

SEQ ID NO: 119891 - DNA, 25 bp, Saccharomyces pastorianus
gcttgtgctaacatcgcgatatcct

SEQ ID NO: 119892 - DNA, 25 bp, Saccharomyces pastorianus
tactactttgtatcacgcttgtgct

SEQ ID NO: 119893 - DNA, 25 bp, Saccharomyces pastorianus
atgactttggcttttacgaccttcg

SEQ ID NO: 119894 - DNA, 25 bp, Saccharomyces pastorianus
ggttcatatttggtctcttcatcgc

SEQ ID NO: 119895 - DNA, 25 bp, Saccharomyces pastorianus
ggcgcagcatccatattccaagata

SEQ ID NO: 119896 - DNA, 25 bp, Saccharomyces pastorianus
ggttactttaagtccgccatacgag

SEQ ID NO: 119897 - DNA, 25 bp, Saccharomyces pastorianus
ctgtatggctttttcctggttcata

SEQ ID NO: 119898 - DNA, 25 bp, Saccharomyces pastorianus
acgagccttcggcaacagcattaag

SEQ ID NO: 119899 - DNA, 25 bp, Saccharomyces pastorianus
gaactcaggttgcagctggtctgta

SEQ ID NO: 119900 - DNA, 25 bp, Saccharomyces pastorianus
acgaccttcgctatttccaagataa

SEQ ID NO: 119901 - DNA, 25 bp, Saccharomyces pastorianus
gaagagaccaaatatgaaccaggaa

SEQ ID NO: 119902 - DNA, 25 bp, Saccharomyces pastorianus
aggatatcgcgatgttagcacaagc

SEQ ID NO: 119903 - DNA, 25 bp, Saccharomyces pastorianus
ttttctccaggatatcgcgatgtta

SEQ ID NO: 119904 - DNA, 25 bp, Saccharomyces pastorianus
gataattgcttttcttcgtcgtcaa

SEQ ID NO: 119905 - DNA, 25 bp, Saccharomyces pastorianus
ttcttcgtcgtcaatattactggat

SEQ ID NO: 119906 - DNA, 25 bp, Saccharomyces pastorianus
gttttcattttctccaggatatcgc

SEQ ID NO: 119907 - DNA, 25 bp, Saccharomyces pastorianus
gtaagcaagcgatgaagagaccaaa

SEQ ID NO: 119908 - DNA, 25 bp, Saccharomyces pastorianus
ggaaaaagccatacagaccagctgc

SEQ ID NO: 119909 - DNA, 25 bp, Saccharomyces pastorianus
cacaacttccgtggctttgttttca

SEQ ID NO: 119910 - DNA, 25 bp, Saccharomyces pastorianus
attactggatggcacaacttccgtg

SEQ ID NO: 119911 - DNA, 25 bp, Saccharomyces pastorianus
agcacaagcgtgatacaaagtagta

SEQ ID NO: 119912 - DNA, 25 bp, Saccharomyces pastorianus
gttatgccaggtgacaatgttgaaa

SEQ ID NO: 119913 - DNA, 25 bp, Saccharomyces pastorianus
gaatgtgatttgatccatcctaccc

SEQ ID NO: 119914 - DNA, 25 bp, Saccharomyces pastorianus
aaggaattggactctgctatggcag

SEQ ID NO: 119915 - DNA, 25 bp, Saccharomyces pastorianus
gatcattctatgcaagttatgccag

SEQ ID NO: 119916 - DNA, 25 bp, Saccharomyces pastorianus
tggtcttagctaagccaggtaccgt

SEQ ID NO: 119917 - DNA, 25 bp, Saccharomyces pastorianus
gccaggtaccgttaaagcccataca

SEQ ID NO: 119918 - DNA, 25 bp, Saccharomyces pastorianus
gattctagcctctttgtacatttta

SEQ ID NO: 119919 - DNA, 25 bp, Saccharomyces pastorianus
tagacattctgggtttggtgaaaac

SEQ ID NO: 119920 - DNA, 25 bp, Saccharomyces pastorianus
aattgttggtcacaactctacccca

SEQ ID NO: 119921 - DNA, 25 bp, Saccharomyces pastorianus
gacaatgccggtgttttacttagag

SEQ ID NO: 119922 - DNA, 25 bp, Saccharomyces pastorianus
tgatccatcctaccccattagaagt

SEQ ID NO: 119923 - DNA, 25 bp, Saccharomyces pastorianus
aataatccgccgcaaatggtaccaa

SEQ ID NO: 119924 - DNA, 25 bp, Saccharomyces pastorianus
tgctaacaggcgtagttttccccaa

SEQ ID NO: 119925 - DNA, 25 bp, Saccharomyces pastorianus
agctcaggagccgatacgttacaca

SEQ ID NO: 119926 - DNA, 25 bp, Saccharomyces pastorianus
gatgtcccatatggtaccagctcag

SEQ ID NO: 119927 - DNA, 25 bp, Saccharomyces pastorianus
aacctgtcgtacctgcggaatacta

SEQ ID NO: 119928 - DNA, 25 bp, Saccharomyces pastorianus
gaattttacctaccagaagctcctc

SEQ ID NO: 119929 - DNA, 25 bp, Saccharomyces pastorianus
aatcttccatctaacgttccattat

SEQ ID NO: 119930 - DNA, 25 bp, Saccharomyces pastorianus
gccgggcaggcaatgctcatatgtt

SEQ ID NO: 119931 - DNA, 25 bp, Saccharomyces pastorianus
ttttccccaaggcatgcagcagaat

SEQ ID NO: 119932 - DNA, 25 bp, Saccharomyces pastorianus
aaaacaaggtgtgcccaatcttcca

SEQ ID NO: 119933 - DNA, 25 bp, Saccharomyces pastorianus
atcaacgggcagatgcttcacctat

SEQ ID NO: 119934 - DNA, 25 bp, Saccharomyces pastorianus
agcgttttatcagaatcgcaagaac

SEQ ID NO: 119935 - DNA, 25 bp, Saccharomyces pastorianus
gcaagaacaactagccaataaccct

SEQ ID NO: 119936 - DNA, 25 bp, Saccharomyces pastorianus
gaaccagcagatgaggatcctgaag

SEQ ID NO: 119937 - DNA, 25 bp, Saccharomyces pastorianus
atagcaaacctgtacttccgtggga

SEQ ID NO: 119938 - DNA, 25 bp, Saccharomyces pastorianus
atagagatcaagagcttcagtggtt

SEQ ID NO: 119939 - DNA, 25 bp, Saccharomyces pastorianus
gcgagtttactgcatctgacgttaa

SEQ ID NO: 119940 - DNA, 25 bp, Saccharomyces pastorianus
aatagaggatacaagccctccctct

SEQ ID NO: 119941 - DNA, 25 bp, Saccharomyces pastorianus
aggtaaatttcaccggctggataag

SEQ ID NO: 119942 - DNA, 25 bp, Saccharomyces pastorianus
atgtcccaagaaagtagcgttttat

SEQ ID NO: 119943 - DNA, 25 bp, Saccharomyces pastorianus
acctgtacttccgtgggattacaag

SEQ ID NO: 119944 - DNA, 25 bp, Saccharomyces pastorianus
ctccctctgccaattcgagagataa

SEQ ID NO: 119945 - DNA, 25 bp, Saccharomyces pastorianus
cgtaagcgagaagcattggtccgta

SEQ ID NO: 119946 - DNA, 25 bp, Saccharomyces pastorianus
ttggtccgtagcaggcgaattttca

SEQ ID NO: 119947 - DNA, 25 bp, Saccharomyces pastorianus
atcgaggctcaattagatgcttttg

SEQ ID NO: 119948 - DNA, 25 bp, Saccharomyces pastorianus
tttcagcggccttaacagattgtac

SEQ ID NO: 119949 - DNA, 25 bp, Saccharomyces pastorianus
aacacaacatttttccgcaacctat

SEQ ID NO: 119950 - DNA, 25 bp, Saccharomyces pastorianus
aatgaacgtatcaaaatcgcctgcc

SEQ ID NO: 119951 - DNA, 25 bp, Saccharomyces pastorianus
attatcaggtgttctcgcaggtgga

SEQ ID NO: 119952 - DNA, 25 bp, Saccharomyces pastorianus
gatgcttttcaaccttaccattatt

SEQ ID NO: 119953 - DNA, 25 bp, Saccharomyces pastorianus
gaagccggcttatgactatttgaga

SEQ ID NO: 119954 - DNA, 25 bp, Saccharomyces pastorianus
gagaatattgccttgtggcccgaag

SEQ ID NO: 119955 - DNA, 25 bp, Saccharomyces pastorianus
ggttggtctaggtgccagatatgat

SEQ ID NO: 119956 - DNA, 25 bp, Saccharomyces pastorianus
gattctgccatggacccaggcaaga

SEQ ID NO: 119957 - DNA, 25 bp, Saccharomyces pastorianus
gactctgttgaggatcgtatttctg

SEQ ID NO: 119958 - DNA, 25 bp, Saccharomyces pastorianus
gaacaagctcaagaccgttgctata

SEQ ID NO: 119959 - DNA, 25 bp, Saccharomyces pastorianus
aagtccaggtgcataaattgtttat

SEQ ID NO: 119960 - DNA, 25 bp, Saccharomyces pastorianus
gaatccttacgtcgaagaacaagct

SEQ ID NO: 119961 - DNA, 25 bp, Saccharomyces pastorianus
cgaattttatcgtgaccctgagaaa

SEQ ID NO: 119962 - DNA, 25 bp, Saccharomyces pastorianus
attggatcaatgaacgctcagagaa

SEQ ID NO: 119963 - DNA, 25 bp, Saccharomyces pastorianus
agttgatccattttggaatccttac

SEQ ID NO: 119964 - DNA, 25 bp, Saccharomyces pastorianus
ggatacttctgatttccatgaaagc

SEQ ID NO: 119965 - DNA, 25 bp, Saccharomyces pastorianus
aagccggtaactcaggactaacatt

SEQ ID NO: 119966 - DNA, 25 bp, Saccharomyces pastorianus
gactaacattgacatgtgcgaacca

SEQ ID NO: 119967 - DNA, 25 bp, Saccharomyces pastorianus
caaaagatttcgctggttgagagaa

SEQ ID NO: 119968 - DNA, 25 bp, Saccharomyces pastorianus
tacaaactacctaccaatgacaaag

SEQ ID NO: 119969 - DNA, 25 bp, Saccharomyces pastorianus
aacattgaacagtggcgacagctaa

SEQ ID NO: 119970 - DNA, 25 bp, Saccharomyces pastorianus
gaactccttaagctatggaaccaag

SEQ ID NO: 119971 - DNA, 25 bp, Saccharomyces pastorianus
ataactcagagctagcttacgaaat

SEQ ID NO: 119972 - DNA, 25 bp, Saccharomyces pastorianus
gagttgatactgttccataagctac

SEQ ID NO: 119973 - DNA, 25 bp, Saccharomyces pastorianus
ttccggtttttcgacattattgaag

SEQ ID NO: 119974 - DNA, 25 bp, Saccharomyces pastorianus
gaaataatttcagtaggttccggtg

SEQ ID NO: 119975 - DNA, 25 bp, Saccharomyces pastorianus
ttccggtgttactgaactccttaag

SEQ ID NO: 119976 - DNA, 25 bp, Saccharomyces pastorianus
ttcggaaactttgcgatcaatttat

SEQ ID NO: 119977 - DNA, 25 bp, Saccharomyces pastorianus
gacattcgtcaaagaacagcactat

SEQ ID NO: 119978 - DNA, 25 bp, Saccharomyces pastorianus
aatgccaatataactaccgtcgaaa

SEQ ID NO: 119979 - DNA, 25 bp, Saccharomyces pastorianus
gatgactatctaatttcggagggtg

SEQ ID NO: 119980 - DNA, 25 bp, Saccharomyces pastorianus
atacggatgaggtcggttcagaact

SEQ ID NO: 119981 - DNA, 25 bp, Saccharomyces pastorianus
aacaacataccccactctggagaga

SEQ ID NO: 119982 - DNA, 25 bp, Saccharomyces pastorianus
tgaaggtctaattttgccaaatatc

SEQ ID NO: 119983 - DNA, 25 bp, Saccharomyces pastorianus
aatgcggacgtaactagccagccta

SEQ ID NO: 119984 - DNA, 25 bp, Saccharomyces pastorianus
gttcagaactagatgattccgacga

SEQ ID NO: 119985 - DNA, 25 bp, Saccharomyces pastorianus
gagaacttaatgctgtgcttatatg

SEQ ID NO: 119986 - DNA, 25 bp, Saccharomyces pastorianus
caactaataattcaggtgctacctt

SEQ ID NO: 119987 - DNA, 25 bp, Saccharomyces pastorianus
gtgctaccttgaacacaaatactag

SEQ ID NO: 119988 - DNA, 25 bp, Saccharomyces pastorianus
cccagcgtaaattctagcgagttca

SEQ ID NO: 119989 - DNA, 25 bp, Saccharomyces pastorianus
atagcgttactttaagcaatgatca

SEQ ID NO: 119990 - DNA, 25 bp, Saccharomyces pastorianus
agcagaagatttgtatatccagtat

SEQ ID NO: 119991 - DNA, 25 bp, Saccharomyces pastorianus
caagcagctgtcttcagaaagagaa

SEQ ID NO: 119992 - DNA, 25 bp, Saccharomyces pastorianus
aaactctgtcagaagaaatcgagca

SEQ ID NO: 119993 - DNA, 25 bp, Saccharomyces pastorianus
gagcaattgaacaagcagctgtctt

SEQ ID NO: 119994 - DNA, 25 bp, Saccharomyces pastorianus
atatccagtattcatccaaacacga

SEQ ID NO: 119995 - DNA, 25 bp, Saccharomyces pastorianus
aaaaatagtaacattcaggctgaac

SEQ ID NO: 119996 - DNA, 25 bp, Saccharomyces pastorianus
gaaaaccttatttctcttcaaaatg

SEQ ID NO: 119997 - DNA, 25 bp, Saccharomyces pastorianus
cattcaggctgaacacatcaaagaa

SEQ ID NO: 119998 - DNA, 25 bp, Saccharomyces pastorianus
atccgacaggataacaacattaaca

SEQ ID NO: 119999 - DNA, 25 bp, Saccharomyces pastorianus
gaattgaagatttcatccgacagga

SEQ ID NO: 120000 - DNA, 25 bp, Saccharomyces pastorianus
atggtggtgctaatcacctggccga

SEQ ID NO: 120001 - DNA, 25 bp, Saccharomyces pastorianus
aatactgccgaagctatcaaaagat

SEQ ID NO: 120002 - DNA, 25 bp, Saccharomyces pastorianus
gaaggcaccaaatactcttgtagag

SEQ ID NO: 120003 - DNA, 25 bp, Saccharomyces pastorianus
gtgggcttgatgtttacgcacataa

SEQ ID NO: 120004 - DNA, 25 bp, Saccharomyces pastorianus
tgtagagactctttctggtgatttc

SEQ ID NO: 120005 - DNA, 25 bp, Saccharomyces pastorianus
ctacggttccgtcactgattactaa

SEQ ID NO: 120006 - DNA, 25 bp, Saccharomyces pastorianus
ggacctctagtaagatcttcatata

SEQ ID NO: 120007 - DNA, 25 bp, Saccharomyces pastorianus
acctggccgagacggttcgcaaaat

SEQ ID NO: 120008 - DNA, 25 bp, Saccharomyces pastorianus
acatcaataatgctgggtctaggag

SEQ ID NO: 120009 - DNA, 25 bp, Saccharomyces pastorianus
ttgtattgtgcatctggacctctag

SEQ ID NO: 120010 - DNA, 25 bp, Saccharomyces pastorianus
gaatcactaacaccacatgtcagag

SEQ ID NO: 120011 - DNA, 25 bp, Saccharomyces pastorianus
atgccacaggaaacagggctgcttt

SEQ ID NO: 120012 - DNA, 25 bp, Saccharomyces pastorianus
tcccacgccttcatcaaggttatga

SEQ ID NO: 120013 - DNA, 25 bp, Saccharomyces pastorianus
atggcctgcaagctgctatttcata

SEQ ID NO: 120014 - DNA, 25 bp, Saccharomyces pastorianus
tcgggtacagtgttggatcttccat

SEQ ID NO: 120015 - DNA, 25 bp, Saccharomyces pastorianus
tcgatttcgaaactcaagggccaat

SEQ ID NO: 120016 - DNA, 25 bp, Saccharomyces pastorianus
accaaacttctgcagatgctgtcga

SEQ ID NO: 120017 - DNA, 25 bp, Saccharomyces pastorianus
gacagatcaaattctcagcagcaga

SEQ ID NO: 120018 - DNA, 25 bp, Saccharomyces pastorianus
ttgactcttgtcattcgggtacagt

SEQ ID NO: 120019 - DNA, 25 bp, Saccharomyces pastorianus
cagggctgctttgattggttcttta

SEQ ID NO: 120020 - DNA, 25 bp, Saccharomyces pastorianus
ggatcttccatatacctattctact

SEQ ID NO: 120021 - DNA, 25 bp, Saccharomyces pastorianus
aaatacaggtgcaatgtcccacgcc

SEQ ID NO: 120022 - DNA, 25 bp, Saccharomyces pastorianus
gatgatttggttttggtcactccaa

SEQ ID NO: 120023 - DNA, 25 bp, Saccharomyces pastorianus
gcttgtcctggacccaacttatgtg

SEQ ID NO: 120024 - DNA, 25 bp, Saccharomyces pastorianus
gaaatcggtgccattgagaattctt

SEQ ID NO: 120025 - DNA, 25 bp, Saccharomyces pastorianus
agcaacctgcttctattttcaacaa

SEQ ID NO: 120026 - DNA, 25 bp, Saccharomyces pastorianus
aatgctttggagaccaagcctgcca

SEQ ID NO: 120027 - DNA, 25 bp, Saccharomyces pastorianus
gagaattctttgcttgtcctggacc

SEQ ID NO: 120028 - DNA, 25 bp, Saccharomyces pastorianus
tagacgtaactgtcccaatcaacag

SEQ ID NO: 120029 - DNA, 25 bp, Saccharomyces pastorianus
aaaacatcctgcctgacttgagtag

SEQ ID NO: 120030 - DNA, 25 bp, Saccharomyces pastorianus
acactaattgctactttggccgaat

SEQ ID NO: 120031 - DNA, 25 bp, Saccharomyces pastorianus
tgactcatgccaagattccagcctt

SEQ ID NO: 120032 - DNA, 25 bp, Saccharomyces pastorianus
aagattccagccttcacttatgaaa

SEQ ID NO: 120033 - DNA, 25 bp, Saccharomyces pastorianus
aacagtgtatttttctgacgtggca

SEQ ID NO: 120034 - DNA, 25 bp, Saccharomyces pastorianus
caatccgttcaaatcgtgcatgcta

SEQ ID NO: 120035 - DNA, 25 bp, Saccharomyces pastorianus
tcgacgaagaagtcactcctcatct

SEQ ID NO: 120036 - DNA, 25 bp, Saccharomyces pastorianus
ctcatcttcaaattcgttcttacgc

SEQ ID NO: 120037 - DNA, 25 bp, Saccharomyces pastorianus
gtgcatgctaatagtttttccaaca

SEQ ID NO: 120038 - DNA, 25 bp, Saccharomyces pastorianus
ttgtaataaacgtccagccacccat

SEQ ID NO: 120039 - DNA, 25 bp, Saccharomyces pastorianus
gattgcctttctcaatgccaccaaa

SEQ ID NO: 120040 - DNA, 25 bp, Saccharomyces pastorianus
ctgacgtggcattagctaagtggct

SEQ ID NO: 120041 - DNA, 25 bp, Saccharomyces pastorianus
aatgccaccaaagggaatttcgacg

SEQ ID NO: 120042 - DNA, 25 bp, Saccharomyces pastorianus
gaacaacaggcagctcgttacacaa

SEQ ID NO: 120043 - DNA, 25 bp, Saccharomyces pastorianus
aatgcagtagccacgcttacgttta

SEQ ID NO: 120044 - DNA, 25 bp, Saccharomyces pastorianus
tggacaccagttcagcagcattaag

SEQ ID NO: 120045 - DNA, 25 bp, Saccharomyces pastorianus
gacgctaagaagtttcctctcgggt

SEQ ID NO: 120046 - DNA, 25 bp, Saccharomyces pastorianus
taacgagctgcctgttgttctagtg

SEQ ID NO: 120047 - DNA, 25 bp, Saccharomyces pastorianus
agaagaaactgctctcctttgacgc

SEQ ID NO: 120048 - DNA, 25 bp, Saccharomyces pastorianus
agcattcacgagctgggcttcaata

SEQ ID NO: 120049 - DNA, 25 bp, Saccharomyces pastorianus
atatacctcatgaactgccttatgg

SEQ ID NO: 120050 - DNA, 25 bp, Saccharomyces pastorianus
gaacttctgcccatattttacgttg

SEQ ID NO: 120051 - DNA, 25 bp, Saccharomyces pastorianus
ggacgtttattacaagccacttagc

SEQ ID NO: 120052 - DNA, 25 bp, Saccharomyces pastorianus
ccagaacccattgttgactcactaa

SEQ ID NO: 120053 - DNA, 25 bp, Saccharomyces pastorianus
taactgaccctcacaatatcggtgc

SEQ ID NO: 120054 - DNA, 25 bp, Saccharomyces pastorianus
gccacttagctaatgccacgtcaga

SEQ ID NO: 120055 - DNA, 25 bp, Saccharomyces pastorianus
ttcaaggctcttgcggttgccataa

SEQ ID NO: 120056 - DNA, 25 bp, Saccharomyces pastorianus
gctggtcgctaatcgttgagtgcat

SEQ ID NO: 120057 - DNA, 25 bp, Saccharomyces pastorianus
aggcactttccagagcggtggtaga

SEQ ID NO: 120058 - DNA, 25 bp, Saccharomyces pastorianus
ggattgctctcggtcaagcttttaa

SEQ ID NO: 120059 - DNA, 25 bp, Saccharomyces pastorianus
tgatacattctctggccaagcattc

SEQ ID NO: 120060 - DNA, 25 bp, Saccharomyces pastorianus
gaacaggccgtacgcagttgtcgaa

SEQ ID NO: 120061 - DNA, 25 bp, Saccharomyces pastorianus
acgtccacacaggtatagggtttct

SEQ ID NO: 120062 - DNA, 25 bp, Saccharomyces pastorianus
tcacaccactgaagactgcgggatt

SEQ ID NO: 120063 - DNA, 25 bp, Saccharomyces pastorianus
gtggtagatctttcgaacaggccgt

SEQ ID NO: 120064 - DNA, 25 bp, Saccharomyces pastorianus
taagagaagctacctcgcccaatgg

SEQ ID NO: 120065 - DNA, 25 bp, Saccharomyces pastorianus
agaattaccctccacgttgattgtc

SEQ ID NO: 120066 - DNA, 25 bp, Saccharomyces pastorianus
gtagtgcatcattctatacgtgtca

SEQ ID NO: 120067 - DNA, 25 bp, Saccharomyces pastorianus
aagctgcagcatacgatatatatac

SEQ ID NO: 120068 - DNA, 25 bp, Saccharomyces pastorianus
gatgaccaggtagtgcatcattcta

SEQ ID NO: 120069 - DNA, 25 bp, Saccharomyces pastorianus
gacaccgattatttaaagctgcagc

SEQ ID NO: 120070 - DNA, 25 bp, Saccharomyces pastorianus
gtgttcttatgtagtgacaccgatt

SEQ ID NO: 120071 - DNA, 25 bp, Saccharomyces pastorianus
gcatcattctatacgtgtcattctg

SEQ ID NO: 120072 - DNA, 25 bp, Saccharomyces pastorianus
tatatgtatacctatgaatgtcagt

SEQ ID NO: 120073 - DNA, 25 bp, Saccharomyces pastorianus
ataggtggcaagtggtattccgtaa

SEQ ID NO: 120074 - DNA, 25 bp, Saccharomyces pastorianus
cattctgaacgaggcgcgctttcct

SEQ ID NO: 120075 - DNA, 25 bp, Saccharomyces pastorianus
gaatgtcagtaagtatgtatacgaa

SEQ ID NO: 120076 - DNA, 25 bp, Saccharomyces pastorianus
gtgtcattctgaacgaggcgcgctt

SEQ ID NO: 120077 - DNA, 25 bp, Saccharomyces pastorianus
ctggtgcctccgaaaggatccataa

SEQ ID NO: 120078 - DNA, 25 bp, Saccharomyces pastorianus
ggctaccggcgttacattgaaacaa

SEQ ID NO: 120079 - DNA, 25 bp, Saccharomyces pastorianus
atggccccggatgaagctgatactt

SEQ ID NO: 120080 - DNA, 25 bp, Saccharomyces pastorianus
tagaccgatcatcagttccctgtat

SEQ ID NO: 120081 - DNA, 25 bp, Saccharomyces pastorianus
aacttgattgagtctggctaccggc

SEQ ID NO: 120082 - DNA, 25 bp, Saccharomyces pastorianus
agttccctgtatgagatggccccgg

SEQ ID NO: 120083 - DNA, 25 bp, Saccharomyces pastorianus
ggcacacatccgttatcacggtatt

SEQ ID NO: 120084 - DNA, 25 bp, Saccharomyces pastorianus
gtaaagagtcaagctgtcccagaga

SEQ ID NO: 120085 - DNA, 25 bp, Saccharomyces pastorianus
tgggagggattttctacctggtgcc

SEQ ID NO: 120086 - DNA, 25 bp, Saccharomyces pastorianus
ggtacgcaatacctccatttattgg

SEQ ID NO: 120087 - DNA, 25 bp, Saccharomyces pastorianus
tcaactcgtgcaattcatcatctgg

SEQ ID NO: 120088 - DNA, 25 bp, Saccharomyces pastorianus
gttattatctctttacgccgttaca

SEQ ID NO: 120089 - DNA, 25 bp, Saccharomyces pastorianus
aacagtttgtggacttattgggcga

SEQ ID NO: 120090 - DNA, 25 bp, Saccharomyces pastorianus
aaagagccctaacttggctgctttc

SEQ ID NO: 120091 - DNA, 25 bp, Saccharomyces pastorianus
ttacgccgttacatcaagacttcaa

SEQ ID NO: 120092 - DNA, 25 bp, Saccharomyces pastorianus
ggcgattattttgctctgtactgta

SEQ ID NO: 120093 - DNA, 25 bp, Saccharomyces pastorianus
aatgtacgcaagcttatctgaatac

SEQ ID NO: 120094 - DNA, 25 bp, Saccharomyces pastorianus
tttcactaaggcacccaaaaagagc

SEQ ID NO: 120095 - DNA, 25 bp, Saccharomyces pastorianus
catttcctgaacttgtaacaccggt

SEQ ID NO: 120096 - DNA, 25 bp, Saccharomyces pastorianus
ggctgctttcgattttgagcacaac

SEQ ID NO: 120097 - DNA, 25 bp, Saccharomyces pastorianus
aaccaaaacagcactttcatccaag

SEQ ID NO: 120098 - DNA, 25 bp, Saccharomyces pastorianus
cacctttaggttcttatgttgcagt

SEQ ID NO: 120099 - DNA, 25 bp, Saccharomyces pastorianus
atggtgcttcacaattgctgttaga

SEQ ID NO: 120100 - DNA, 25 bp, Saccharomyces pastorianus
atgcatgcaagagctcgtggtccaa

SEQ ID NO: 120101 - DNA, 25 bp, Saccharomyces pastorianus
tggtgtactacctgcaaaagtgctg

SEQ ID NO: 120102 - DNA, 25 bp, Saccharomyces pastorianus
gtgtaatcgcgtatggtgcttcaca

SEQ ID NO: 120103 - DNA, 25 bp, Saccharomyces pastorianus
acaggtgagtgtttacaggcttaca

SEQ ID NO: 120104 - DNA, 25 bp, Saccharomyces pastorianus
gtccaagggctgttttgacacgtca

SEQ ID NO: 120105 - DNA, 25 bp, Saccharomyces pastorianus
ttggccccatttactatcaaaagtt

SEQ ID NO: 120106 - DNA, 25 bp, Saccharomyces pastorianus
tacaggcttacatcttttttggccc

SEQ ID NO: 120107 - DNA, 25 bp, Saccharomyces pastorianus
ttgacacgtcaaccaactgagggta

SEQ ID NO: 120108 - DNA, 25 bp, Saccharomyces pastorianus
gatcaaggtttcaactattccggta

SEQ ID NO: 120109 - DNA, 25 bp, Saccharomyces pastorianus
gcagcaaaactgttattccaggaat

SEQ ID NO: 120110 - DNA, 25 bp, Saccharomyces pastorianus
tcgtaagaagtcagaaccccaggtt

SEQ ID NO: 120111 - DNA, 25 bp, Saccharomyces pastorianus
ccatgacgtgttgaaattgcctaaa

SEQ ID NO: 120112 - DNA, 25 bp, Saccharomyces pastorianus
atatggagtcaagccaatcggtact

SEQ ID NO: 120113 - DNA, 25 bp, Saccharomyces pastorianus
agtgggttatgggagtcgcttctat

SEQ ID NO: 120114 - DNA, 25 bp, Saccharomyces pastorianus
atatgggagatcctgccactgtgaa

SEQ ID NO: 120115 - DNA, 25 bp, Saccharomyces pastorianus
ataacttactcccatgcagctaaag

SEQ ID NO: 120116 - DNA, 25 bp, Saccharomyces pastorianus
tttaaaatcattccgtccaccatat

SEQ ID NO: 120117 - DNA, 25 bp, Saccharomyces pastorianus
tattctgatgcttacgtcggtgtta

SEQ ID NO: 120118 - DNA, 25 bp, Saccharomyces pastorianus
aaaagatttcccaccattaccatga

SEQ ID NO: 120119 - DNA, 25 bp, Saccharomyces pastorianus
attctggagaccctgttgagtatac

SEQ ID NO: 120120 - DNA, 25 bp, Saccharomyces pastorianus
gttattccgattctttgaacgtcga

SEQ ID NO: 120121 - DNA, 25 bp, Saccharomyces pastorianus
taggtctaaaaagatactgctgtag

SEQ ID NO: 120122 - DNA, 25 bp, Saccharomyces pastorianus
cagtcagatgtttctcatgcggtaa

SEQ ID NO: 120123 - DNA, 25 bp, Saccharomyces pastorianus
tgtagaagaatgattctaacccacg

SEQ ID NO: 120124 - DNA, 25 bp, Saccharomyces pastorianus
tcccagtcagatgtttctcatgcgg

SEQ ID NO: 120125 - DNA, 25 bp, Saccharomyces pastorianus
ctgcattgtcaagattaggtctaaa

SEQ ID NO: 120126 - DNA, 25 bp, Saccharomyces pastorianus
cagatgtttctcatgcggtaaagtt

SEQ ID NO: 120127 - DNA, 25 bp, Saccharomyces pastorianus
ggtgacaagtgggaaagctacttaa

SEQ ID NO: 120128 - DNA, 25 bp, Saccharomyces pastorianus
gacaagtgggaaagctacttaaact

SEQ ID NO: 120129 - DNA, 25 bp, Saccharomyces pastorianus
ggtactgcattgtcaagattaggtc

SEQ ID NO: 120130 - DNA, 25 bp, Saccharomyces pastorianus
gatactgctgtagaagaatgattct

SEQ ID NO: 120131 - DNA, 25 bp, Saccharomyces pastorianus
tgtcccagtcagatgtttctcatgc

SEQ ID NO: 120132 - DNA, 25 bp, Saccharomyces pastorianus
acagctgttttattccttaacgttg

SEQ ID NO: 120133 - DNA, 25 bp, Saccharomyces pastorianus
acactcggcatgtccaaattactat

SEQ ID NO: 120134 - DNA, 25 bp, Saccharomyces pastorianus
agaaggatcgttgtccagaggtatt

SEQ ID NO: 120135 - DNA, 25 bp, Saccharomyces pastorianus
gataaattgacctccacagctgttt

SEQ ID NO: 120136 - DNA, 25 bp, Saccharomyces pastorianus
gtcttgctcgtcaacattccattaa

SEQ ID NO: 120137 - DNA, 25 bp, Saccharomyces pastorianus
gagactggagtcttgctcgtcaaca

SEQ ID NO: 120138 - DNA, 25 bp, Saccharomyces pastorianus
gtaactcaaggtaccaggcaatcaa

SEQ ID NO: 120139 - DNA, 25 bp, Saccharomyces pastorianus
agaggtatttctatctgcagttagt

SEQ ID NO: 120140 - DNA, 25 bp, Saccharomyces pastorianus
gagaactgtatcaaacccttcaagt

SEQ ID NO: 120141 - DNA, 25 bp, Saccharomyces pastorianus
ggtgcaaagtgttatcgttcagatt

SEQ ID NO: 120142 - DNA, 25 bp, Saccharomyces pastorianus
ggaagatccgaagatttcaaggcat

SEQ ID NO: 120143 - DNA, 25 bp, Saccharomyces pastorianus
gttttggcattagctattcctgaag

SEQ ID NO: 120144 - DNA, 25 bp, Saccharomyces pastorianus
gtatgtacaggttcatgggactcaa

SEQ ID NO: 120145 - DNA, 25 bp, Saccharomyces pastorianus
agagtcactggtgtgcgctcgagtc

SEQ ID NO: 120146 - DNA, 25 bp, Saccharomyces pastorianus
aagctatctagacaaccaaggcgtt

SEQ ID NO: 120147 - DNA, 25 bp, Saccharomyces pastorianus
atggagtacaataccgcgcaatcgc

SEQ ID NO: 120148 - DNA, 25 bp, Saccharomyces pastorianus
tgtgcgctcgagtccagatgggtta

SEQ ID NO: 120149 - DNA, 25 bp, Saccharomyces pastorianus
gaacacattcgctagctgtggatca

SEQ ID NO: 120150 - DNA, 25 bp, Saccharomyces pastorianus
aaggtcggactgttctattgctact

SEQ ID NO: 120151 - DNA, 25 bp, Saccharomyces pastorianus
cgcgcaatcgccacaaactttaaaa

SEQ ID NO: 120152 - DNA, 25 bp, Saccharomyces pastorianus
tatgggatagcagatctccgtccgc

SEQ ID NO: 120153 - DNA, 25 bp, Saccharomyces pastorianus
tccgtccgctgtacaaagcttttac

SEQ ID NO: 120154 - DNA, 25 bp, Saccharomyces pastorianus
atcaattaggccacttgtttcaaat

SEQ ID NO: 120155 - DNA, 25 bp, Saccharomyces pastorianus
aagagcgctgatgagtactccctgt

SEQ ID NO: 120156 - DNA, 25 bp, Saccharomyces pastorianus
caagagggacgatctggtggccaaa

SEQ ID NO: 120157 - DNA, 25 bp, Saccharomyces pastorianus
gagtactccctgtacgacatgtact

SEQ ID NO: 120158 - DNA, 25 bp, Saccharomyces pastorianus
gccagtgtcttcagagcttgatatt

SEQ ID NO: 120159 - DNA, 25 bp, Saccharomyces pastorianus
tcgactggaagtcattgccaacaga

SEQ ID NO: 120160 - DNA, 25 bp, Saccharomyces pastorianus
gatcaatgagttccttgctaacaag

SEQ ID NO: 120161 - DNA, 25 bp, Saccharomyces pastorianus
gaagacatctccaactgccatcaaa

SEQ ID NO: 120162 - DNA, 25 bp, Saccharomyces pastorianus
tatggaccaattgccagtgtcttca

SEQ ID NO: 120163 - DNA, 25 bp, Saccharomyces pastorianus
gaagaaattactggacgccctcaaa

SEQ ID NO: 120164 - DNA, 25 bp, Saccharomyces pastorianus
gttataacagttctccagcctacac

SEQ ID NO: 120165 - DNA, 25 bp, Saccharomyces pastorianus
attcaagcgctgtatcgagaacgga

SEQ ID NO: 120166 - DNA, 25 bp, Saccharomyces pastorianus
ggcactggccatgttgaagaaatca

SEQ ID NO: 120167 - DNA, 25 bp, Saccharomyces pastorianus
attgagacaggctttggaatcccat

SEQ ID NO: 120168 - DNA, 25 bp, Saccharomyces pastorianus
attgatatctttcgtgtccataccc

SEQ ID NO: 120169 - DNA, 25 bp, Saccharomyces pastorianus
gaagtcaaagctttacgatcccaac

SEQ ID NO: 120170 - DNA, 25 bp, Saccharomyces pastorianus
gagcatttaacaaaggcactggcca

SEQ ID NO: 120171 - DNA, 25 bp, Saccharomyces pastorianus
tacgatcccaacttgacacggagat

SEQ ID NO: 120172 - DNA, 25 bp, Saccharomyces pastorianus
ggaaagctttgtatcgctttggacc

SEQ ID NO: 120173 - DNA, 25 bp, Saccharomyces pastorianus
aagcagcacatcttacagatcggaa

SEQ ID NO: 120174 - DNA, 25 bp, Saccharomyces pastorianus
aactacgtcacgaagccattatact

SEQ ID NO: 120175 - DNA, 25 bp, Saccharomyces pastorianus
acaggccggcttgatctcgaataat

SEQ ID NO: 120176 - DNA, 25 bp, Saccharomyces pastorianus
tgcaattgcatctgtcatagaggta

SEQ ID NO: 120177 - DNA, 25 bp, Saccharomyces pastorianus
agcatcaaaagttgccggccatatg

SEQ ID NO: 120178 - DNA, 25 bp, Saccharomyces pastorianus
ccccgatttcgaagatgtcgttgat

SEQ ID NO: 120179 - DNA, 25 bp, Saccharomyces pastorianus
gaggaagactgccaccagtaaacct

SEQ ID NO: 120180 - DNA, 25 bp, Saccharomyces pastorianus
aacagtatgacacatccagtcgcaa

SEQ ID NO: 120181 - DNA, 25 bp, Saccharomyces pastorianus
caatttcacagcttggttgggccaa

SEQ ID NO: 120182 - DNA, 25 bp, Saccharomyces pastorianus
agatgacaatccagttcccgcagat

SEQ ID NO: 120183 - DNA, 25 bp, Saccharomyces pastorianus
gtaggtcctgatgtgaccacagcaa

SEQ ID NO: 120184 - DNA, 25 bp, Saccharomyces pastorianus
tatggagtttttcgtaggtcctgat

SEQ ID NO: 120185 - DNA, 25 bp, Saccharomyces pastorianus
tccagtcgcaatttacagaacaggt

SEQ ID NO: 120186 - DNA, 25 bp, Saccharomyces pastorianus
ggctggattacctaccaacttttag

SEQ ID NO: 120187 - DNA, 25 bp, Saccharomyces pastorianus
agtaatgctgcatcgtgtaccgaaa

SEQ ID NO: 120188 - DNA, 25 bp, Saccharomyces pastorianus
gaggctcttcattatctccggataa

SEQ ID NO: 120189 - DNA, 25 bp, Saccharomyces pastorianus
agtagacagttcatccctcaataag

SEQ ID NO: 120190 - DNA, 25 bp, Saccharomyces pastorianus
gcaacaaaccgctcttatctattaa

SEQ ID NO: 120191 - DNA, 25 bp, Saccharomyces pastorianus
aataatcaacatccgcgatctcgtt

SEQ ID NO: 120192 - DNA, 25 bp, Saccharomyces pastorianus
gttccacggatgatgctgtttcgtt

SEQ ID NO: 120193 - DNA, 25 bp, Saccharomyces pastorianus
aaagctttctaggtcgtcttcttca

SEQ ID NO: 120194 - DNA, 25 bp, Saccharomyces pastorianus
gaatcgcccacaatgttgaagcttt

SEQ ID NO: 120195 - DNA, 25 bp, Saccharomyces pastorianus
tgatgtaaacgctactgcctcaaat

SEQ ID NO: 120196 - DNA, 25 bp, Saccharomyces pastorianus
acagacatcattaccttcacaacta

SEQ ID NO: 120197 - DNA, 25 bp, Saccharomyces pastorianus
aacttggcacttttggaggatcatc

SEQ ID NO: 120198 - DNA, 25 bp, Saccharomyces pastorianus
aagatctccattgcggctggtgcat

SEQ ID NO: 120199 - DNA, 25 bp, Saccharomyces pastorianus
tacggtcgggaccatgcttaacact

SEQ ID NO: 120200 - DNA, 25 bp, Saccharomyces pastorianus
gtatgtagactagcacccggtggtt

SEQ ID NO: 120201 - DNA, 25 bp, Saccharomyces pastorianus
gcctaccttcgctattggtcatata

SEQ ID NO: 120202 - DNA, 25 bp, Saccharomyces pastorianus
aaaatacaactggtgcctaccttcg

SEQ ID NO: 120203 - DNA, 25 bp, Saccharomyces pastorianus
agaaacgctctttggaatggtggct

SEQ ID NO: 120204 - DNA, 25 bp, Saccharomyces pastorianus
gcttaacactccctttgacgtggta

SEQ ID NO: 120205 - DNA, 25 bp, Saccharomyces pastorianus
gcaagacgtcaagtccagctatctt

SEQ ID NO: 120206 - DNA, 25 bp, Saccharomyces pastorianus
aatggtggctacttcggtgttatct

SEQ ID NO: 120207 - DNA, 25 bp, Saccharomyces pastorianus
gtgagaaattccatgcccgtagcaa

SEQ ID NO: 120208 - DNA, 25 bp, Saccharomyces pastorianus
aagctgcagttattgttccatttga

SEQ ID NO: 120209 - DNA, 25 bp, Saccharomyces pastorianus
caagaaatcgaactgctgaggcaac

SEQ ID NO: 120210 - DNA, 25 bp, Saccharomyces pastorianus
gtttgataggctacgatccgtggga

SEQ ID NO: 120211 - DNA, 25 bp, Saccharomyces pastorianus
gattgctgaggaactgacgcattac

SEQ ID NO: 120212 - DNA, 25 bp, Saccharomyces pastorianus
tccaatgactccatgaccacgcagg

SEQ ID NO: 120213 - DNA, 25 bp, Saccharomyces pastorianus
gatgagggccatgacattagacagt

SEQ ID NO: 120214 - DNA, 25 bp, Saccharomyces pastorianus
gatccgtgggatttactgagcaaga

SEQ ID NO: 120215 - DNA, 25 bp, Saccharomyces pastorianus
ataactctaacgtcgcaacaggcac

SEQ ID NO: 120216 - DNA, 25 bp, Saccharomyces pastorianus
gaggcaacagtttcgggccacgtat

SEQ ID NO: 120217 - DNA, 25 bp, Saccharomyces pastorianus
gacgatgcaactccgtccaatgact

SEQ ID NO: 120218 - DNA, 25 bp, Saccharomyces pastorianus
gacgcattacttcgatactgctaat

SEQ ID NO: 120219 - DNA, 25 bp, Saccharomyces pastorianus
gcgtggcaccagagcagaacaacta

SEQ ID NO: 120220 - DNA, 25 bp, Saccharomyces pastorianus
ataacaaagtctgccgtatcgaagc

SEQ ID NO: 120221 - DNA, 25 bp, Saccharomyces pastorianus
gtcgccgcacaagattctttgacag

SEQ ID NO: 120222 - DNA, 25 bp, Saccharomyces pastorianus
ggtgacagatcccttgcagatgatt

SEQ ID NO: 120223 - DNA, 25 bp, Saccharomyces pastorianus
agctaacgactcttctgcgacaaga

SEQ ID NO: 120224 - DNA, 25 bp, Saccharomyces pastorianus
tgcgacaagaagctggagacctcca

SEQ ID NO: 120225 - DNA, 25 bp, Saccharomyces pastorianus
atctaccactcaggaccaatgcaaa

SEQ ID NO: 120226 - DNA, 25 bp, Saccharomyces pastorianus
gattacgtcatgtatggtaccgctt

SEQ ID NO: 120227 - DNA, 25 bp, Saccharomyces pastorianus
gagacctccacaggctggtgacaga

SEQ ID NO: 120228 - DNA, 25 bp, Saccharomyces pastorianus
ctcggaagttgatcccggtcgttat

SEQ ID NO: 120229 - DNA, 25 bp, Saccharomyces pastorianus
aatgttgaattgtttcccgtcgccg

SEQ ID NO: 120230 - DNA, 25 bp, Saccharomyces pastorianus
tttgacagtgactattgcatcctct

SEQ ID NO: 120231 - DNA, 25 bp, Saccharomyces pastorianus
attagaccacacttaatggccaccg

SEQ ID NO: 120232 - DNA, 25 bp, Saccharomyces pastorianus
gcagaggccccttgttgaagatgaa

SEQ ID NO: 120233 - DNA, 25 bp, Saccharomyces pastorianus
agtcctctcgcacatctggtacaag

SEQ ID NO: 120234 - DNA, 25 bp, Saccharomyces pastorianus
accagatagcagtgtcgccggagga

SEQ ID NO: 120235 - DNA, 25 bp, Saccharomyces pastorianus
agagttcgtctaatacctcactggc

SEQ ID NO: 120236 - DNA, 25 bp, Saccharomyces pastorianus
gtgaccactggtaaagctcttcttt

SEQ ID NO: 120237 - DNA, 25 bp, Saccharomyces pastorianus
cttcatccgccaattcttcgagaat

SEQ ID NO: 120238 - DNA, 25 bp, Saccharomyces pastorianus
ggacgaatcatcgatgtgaccactg

SEQ ID NO: 120239 - DNA, 25 bp, Saccharomyces pastorianus
caaagatacctaccggtgccgaatt

SEQ ID NO: 120240 - DNA, 25 bp, Saccharomyces pastorianus
aagacataactctgggcttccttca

SEQ ID NO: 120241 - DNA, 25 bp, Saccharomyces pastorianus
gatgaattgaactctagaagcccga

SEQ ID NO: 120242 - DNA, 25 bp, Saccharomyces pastorianus
cccgtcctgatataccacttattaa

SEQ ID NO: 120243 - DNA, 25 bp, Saccharomyces pastorianus
gttgggttcgtttctctgattagat

SEQ ID NO: 120244 - DNA, 25 bp, Saccharomyces pastorianus
agctattctcctcgagtcaggtgta

SEQ ID NO: 120245 - DNA, 25 bp, Saccharomyces pastorianus
ggtggatttcgcctctataaagcaa

SEQ ID NO: 120246 - DNA, 25 bp, Saccharomyces pastorianus
tggtgtcttgctccgaatcgtgaac

SEQ ID NO: 120247 - DNA, 25 bp, Saccharomyces pastorianus
aatctattgacactcgttgggttcg

SEQ ID NO: 120248 - DNA, 25 bp, Saccharomyces pastorianus
gattttaccgtccataactaccaag

SEQ ID NO: 120249 - DNA, 25 bp, Saccharomyces pastorianus
tgccgaattccatctctactgaggt

SEQ ID NO: 120250 - DNA, 25 bp, Saccharomyces pastorianus
gtattactcttcatgtttctgctgg

SEQ ID NO: 120251 - DNA, 25 bp, Saccharomyces pastorianus
ggtcccaaccaattcgaaggcattt

SEQ ID NO: 120252 - DNA, 25 bp, Saccharomyces pastorianus
gattgtataagaccttccgcattcc

SEQ ID NO: 120253 - DNA, 25 bp, Saccharomyces pastorianus
aaattgacctcgtttgattgctctc

SEQ ID NO: 120254 - DNA, 25 bp, Saccharomyces pastorianus
aaacttggttggtactgtcgatgac

SEQ ID NO: 120255 - DNA, 25 bp, Saccharomyces pastorianus
tgattgctctcaggtttccaacaac

SEQ ID NO: 120256 - DNA, 25 bp, Saccharomyces pastorianus
ggaagaagaaacaccgccgcttggc

SEQ ID NO: 120257 - DNA, 25 bp, Saccharomyces pastorianus
attttctgccacttcaagctctgaa

SEQ ID NO: 120258 - DNA, 25 bp, Saccharomyces pastorianus
ctgaattctttactgtgggcggcac

SEQ ID NO: 120259 - DNA, 25 bp, Saccharomyces pastorianus
caatattctgaggttctgggacact

SEQ ID NO: 120260 - DNA, 25 bp, Saccharomyces pastorianus
aatcgctaatttctatcatgccggc

SEQ ID NO: 120261 - DNA, 25 bp, Saccharomyces pastorianus
gttgtcgacgtccaattttctgcca

SEQ ID NO: 120262 - DNA, 25 bp, Saccharomyces pastorianus
gaacttccgacaagcctatatgggt

SEQ ID NO: 120263 - DNA, 25 bp, Saccharomyces pastorianus
gccgcttggcatccagttattgaaa

SEQ ID NO: 120264 - DNA, 25 bp, Saccharomyces pastorianus
aagatagtcgtgaacggccatctcc

SEQ ID NO: 120265 - DNA, 25 bp, Saccharomyces pastorianus
ggagaagccgttaactcgctagcca

SEQ ID NO: 120266 - DNA, 25 bp, Saccharomyces pastorianus
cagccaatatagctccctttgaatt

SEQ ID NO: 120267 - DNA, 25 bp, Saccharomyces pastorianus
caaatcctttatcgactactgtctg

SEQ ID NO: 120268 - DNA, 25 bp, Saccharomyces pastorianus
caaggtcaaccatacagtgtcacat

SEQ ID NO: 120269 - DNA, 25 bp, Saccharomyces pastorianus
ggacgtcattctatatggctccaga

SEQ ID NO: 120270 - DNA, 25 bp, Saccharomyces pastorianus
gaaatttccatgctcttccgagaag

SEQ ID NO: 120271 - DNA, 25 bp, Saccharomyces pastorianus
gaacggccatctccaagacaaatga

SEQ ID NO: 120272 - DNA, 25 bp, Saccharomyces pastorianus
ggattttaacatttactcctgaatt

SEQ ID NO: 120273 - DNA, 25 bp, Saccharomyces pastorianus
gtgggcgatcgttggatgctattta

SEQ ID NO: 120274 - DNA, 25 bp, Saccharomyces pastorianus
gtatggtcacttggattaacgattt

SEQ ID NO: 120275 - DNA, 25 bp, Saccharomyces pastorianus
tccatttttcaatttacacttggaa

SEQ ID NO: 120276 - DNA, 25 bp, Saccharomyces pastorianus
agcgaatatttttgatccatttttc

SEQ ID NO: 120277 - DNA, 25 bp, Saccharomyces pastorianus
ggctccttctcctagaatgcctaat

SEQ ID NO: 120278 - DNA, 25 bp, Saccharomyces pastorianus
tttccaaccattttcatccaattga

SEQ ID NO: 120279 - DNA, 25 bp, Saccharomyces pastorianus
aaatttgcatatttccaaccatttt

SEQ ID NO: 120280 - DNA, 25 bp, Saccharomyces pastorianus
gaatgcctaatgtctcgatcctatc

SEQ ID NO: 120281 - DNA, 25 bp, Saccharomyces pastorianus
tgatcaacatctcgtacactgttta

SEQ ID NO: 120282 - DNA, 25 bp, Saccharomyces pastorianus
cgatcctatcttttaaatttgcata

SEQ ID NO: 120283 - DNA, 25 bp, Saccharomyces pastorianus
acacttggaaacagagccaccggct

SEQ ID NO: 120284 - DNA, 25 bp, Saccharomyces pastorianus
ttcatccaattgatcaacatctcgt

SEQ ID NO: 120285 - DNA, 25 bp, Saccharomyces pastorianus
taatgtctcgatcctatcttttaaa

SEQ ID NO: 120286 - DNA, 25 bp, Saccharomyces pastorianus
gtacgggcttctgttatggtgtcaa

SEQ ID NO: 120287 - DNA, 25 bp, Saccharomyces pastorianus
gaaaatggttttcctcgagagagca

SEQ ID NO: 120288 - DNA, 25 bp, Saccharomyces pastorianus
aatgttggccactcttctaataaat

SEQ ID NO: 120289 - DNA, 25 bp, Saccharomyces pastorianus
gagacaacgcacctagctatgctga

SEQ ID NO: 120290 - DNA, 25 bp, Saccharomyces pastorianus
aaaagggaatgcacctcctgtttca

SEQ ID NO: 120291 - DNA, 25 bp, Saccharomyces pastorianus
atgtcgaggcacagacttcaacagc

SEQ ID NO: 120292 - DNA, 25 bp, Saccharomyces pastorianus
aaggttcagcttcatgtcgttgtac

SEQ ID NO: 120293 - DNA, 25 bp, Saccharomyces pastorianus
gagagagcatcgacccagagagtac

SEQ ID NO: 120294 - DNA, 25 bp, Saccharomyces pastorianus
taacctttccgacagagttccaaat

SEQ ID NO: 120295 - DNA, 25 bp, Saccharomyces pastorianus
gatccactgttgaatctcgtacctc

SEQ ID NO: 120296 - DNA, 25 bp, Saccharomyces pastorianus
gtcgttgtactcatccttaaatggt

SEQ ID NO: 120297 - DNA, 25 bp, Saccharomyces pastorianus
tatagtcaaatcttctccattacag

SEQ ID NO: 120298 - DNA, 25 bp, Saccharomyces pastorianus
atgggaatccataccgcccaagttt

SEQ ID NO: 120299 - DNA, 25 bp, Saccharomyces pastorianus
tgtggcatgtttacagccggagatg

SEQ ID NO: 120300 - DNA, 25 bp, Saccharomyces pastorianus
gtgatcaacgctactcgctggaaga

SEQ ID NO: 120301 - DNA, 25 bp, Saccharomyces pastorianus
cagatcattggctcatcacgaaaat

SEQ ID NO: 120302 - DNA, 25 bp, Saccharomyces pastorianus
gagttgcccgaaacagactgtgatc

SEQ ID NO: 120303 - DNA, 25 bp, Saccharomyces pastorianus
aaacgcaactcctgcaatggacact

SEQ ID NO: 120304 - DNA, 25 bp, Saccharomyces pastorianus
taggatttcgtggaggtctaccatg

SEQ ID NO: 120305 - DNA, 25 bp, Saccharomyces pastorianus
tcgcccactgcccaatagaatgaat

SEQ ID NO: 120306 - DNA, 25 bp, Saccharomyces pastorianus
tggacactttccttgatgcgaagaa

SEQ ID NO: 120307 - DNA, 25 bp, Saccharomyces pastorianus
gtctaccatggaggttgcccagtga

SEQ ID NO: 120308 - DNA, 25 bp, Saccharomyces pastorianus
ttaacagaactgcaccgtacgctca

SEQ ID NO: 120309 - DNA, 25 bp, Saccharomyces pastorianus
gttctatggtggttcaatcactact

SEQ ID NO: 120310 - DNA, 25 bp, Saccharomyces pastorianus
aatcactactgaagagttctcgctg

SEQ ID NO: 120311 - DNA, 25 bp, Saccharomyces pastorianus
aacgagctgcgtcttttattaaaag

SEQ ID NO: 120312 - DNA, 25 bp, Saccharomyces pastorianus
aatgcactaagcttattttcttcag

SEQ ID NO: 120313 - DNA, 25 bp, Saccharomyces pastorianus
gattcatcagctgtcatgccaaggc

SEQ ID NO: 120314 - DNA, 25 bp, Saccharomyces pastorianus
tgccaaggccattgattacccacaa

SEQ ID NO: 120315 - DNA, 25 bp, Saccharomyces pastorianus
gcaccgtacgctcagaatattttct

SEQ ID NO: 120316 - DNA, 25 bp, Saccharomyces pastorianus
aaagatctcgcaacccatttaacag

SEQ ID NO: 120317 - DNA, 25 bp, Saccharomyces pastorianus
gttctcgctggactcatttgataat

SEQ ID NO: 120318 - DNA, 25 bp, Saccharomyces pastorianus
atagggtttgcgtttaagatgccaa

SEQ ID NO: 120319 - DNA, 25 bp, Saccharomyces pastorianus
actggttcattacatcttgttggcg

SEQ ID NO: 120320 - DNA, 25 bp, Saccharomyces pastorianus
tttggtacattgatggtgctcacac

SEQ ID NO: 120321 - DNA, 25 bp, Saccharomyces pastorianus
aacgctatacgatgaacctgctgat

SEQ ID NO: 120322 - DNA, 25 bp, Saccharomyces pastorianus
acagcgctgacctcgtttccatgaa

SEQ ID NO: 120323 - DNA, 25 bp, Saccharomyces pastorianus
gttatgctggcttctgagatcttgc

SEQ ID NO: 120324 - DNA, 25 bp, Saccharomyces pastorianus
gagatcttgcatacgtccaatatat

SEQ ID NO: 120325 - DNA, 25 bp, Saccharomyces pastorianus
agatcttgctcttcaatcaacaaag

SEQ ID NO: 120326 - DNA, 25 bp, Saccharomyces pastorianus
gagatgccaacgctcttgtgaataa

SEQ ID NO: 120327 - DNA, 25 bp, Saccharomyces pastorianus
ctgtactcatctgtttcgccagaaa

SEQ ID NO: 120328 - DNA, 25 bp, Saccharomyces pastorianus
tggaaatcaggctcatacagcgctg

SEQ ID NO: 120329 - DNA, 25 bp, Saccharomyces pastorianus
atggtagctgcatcaacatggttca

SEQ ID NO: 120330 - DNA, 25 bp, Saccharomyces pastorianus
attaaacgatataccgcgcggcaca

SEQ ID NO: 120331 - DNA, 25 bp, Saccharomyces pastorianus
ttacgagggagctcaatcttttatg

SEQ ID NO: 120332 - DNA, 25 bp, Saccharomyces pastorianus
tacgcggaggttccttagaaagaat

SEQ ID NO: 120333 - DNA, 25 bp, Saccharomyces pastorianus
atggatattcctcgagagcacatat

SEQ ID NO: 120334 - DNA, 25 bp, Saccharomyces pastorianus
gatcttttcttcttaaattacgagg

SEQ ID NO: 120335 - DNA, 25 bp, Saccharomyces pastorianus
attgtctataggtacgatactccgg

SEQ ID NO: 120336 - DNA, 25 bp, Saccharomyces pastorianus
ttgtctcaagtacgcggaggttcct

SEQ ID NO: 120337 - DNA, 25 bp, Saccharomyces pastorianus
taggtacgatactccggaacgttct

SEQ ID NO: 120338 - DNA, 25 bp, Saccharomyces pastorianus
aaagctcgacaacagcaatgcctaa

SEQ ID NO: 120339 - DNA, 25 bp, Saccharomyces pastorianus
ggcatctctagtgtattgtctcaag

SEQ ID NO: 120340 - DNA, 25 bp, Saccharomyces pastorianus
gcggcacaggcatctctagtgtatt

SEQ ID NO: 120341 - DNA, 25 bp, Saccharomyces pastorianus
gacttggtgtcgaaacttgtgttta

SEQ ID NO: 120342 - DNA, 25 bp, Saccharomyces pastorianus
ttctcccgagaaacctttgtctgat

SEQ ID NO: 120343 - DNA, 25 bp, Saccharomyces pastorianus
caaagacactgaatatcctgcgata

SEQ ID NO: 120344 - DNA, 25 bp, Saccharomyces pastorianus
gtctgatttgggtctcttatcctat

SEQ ID NO: 120345 - DNA, 25 bp, Saccharomyces pastorianus
taagctccatgacttcgatgaccac

SEQ ID NO: 120346 - DNA, 25 bp, Saccharomyces pastorianus
tcaccatctggtgggatatttttcc

SEQ ID NO: 120347 - DNA, 25 bp, Saccharomyces pastorianus
tatagagcctattggtcggacactc

SEQ ID NO: 120348 - DNA, 25 bp, Saccharomyces pastorianus
ataggtacaatcgacttaaagccaa

SEQ ID NO: 120349 - DNA, 25 bp, Saccharomyces pastorianus
tcggacactctcataacgctattag

SEQ ID NO: 120350 - DNA, 25 bp, Saccharomyces pastorianus
atccgcggatggttacaatgttgca

SEQ ID NO: 120351 - DNA, 25 bp, Saccharomyces pastorianus
tactttccaaacttttcctagatca

SEQ ID NO: 120352 - DNA, 25 bp, Saccharomyces pastorianus
gagattattgcctttactgcgccat

SEQ ID NO: 120353 - DNA, 25 bp, Saccharomyces pastorianus
tatggcggtgcccttagaaatgacg

SEQ ID NO: 120354 - DNA, 25 bp, Saccharomyces pastorianus
gaacaaggttcactagcttctttga

SEQ ID NO: 120355 - DNA, 25 bp, Saccharomyces pastorianus
atcgacttggatctggaccgttcat

SEQ ID NO: 120356 - DNA, 25 bp, Saccharomyces pastorianus
ttggacaaggttacccatcgtcggt

SEQ ID NO: 120357 - DNA, 25 bp, Saccharomyces pastorianus
aaccgcgctaatccaatgcacgaag

SEQ ID NO: 120358 - DNA, 25 bp, Saccharomyces pastorianus
attgtcgtggcaggatcatttccct

SEQ ID NO: 120359 - DNA, 25 bp, Saccharomyces pastorianus
atgttggccatcaaataccctgacg

SEQ ID NO: 120360 - DNA, 25 bp, Saccharomyces pastorianus
gcacttcctcttcacgatgagatta

SEQ ID NO: 120361 - DNA, 25 bp, Saccharomyces pastorianus
gtgtgcattggacccgaatttatct

SEQ ID NO: 120362 - DNA, 25 bp, Saccharomyces pastorianus
atcgtcggtattttcttttggctgt

SEQ ID NO: 120363 - DNA, 25 bp, Saccharomyces pastorianus
gacgacaccactaccttttttgtca

SEQ ID NO: 120364 - DNA, 25 bp, Saccharomyces pastorianus
ggcctctggatctgtaaccccagaa

SEQ ID NO: 120365 - DNA, 25 bp, Saccharomyces pastorianus
actatcacgtccactttgctgctaa

SEQ ID NO: 120366 - DNA, 25 bp, Saccharomyces pastorianus
ttttcgctcttttaaccttcgcaag

SEQ ID NO: 120367 - DNA, 25 bp, Saccharomyces pastorianus
taaccttcgcaagttctgtgtcagc

SEQ ID NO: 120368 - DNA, 25 bp, Saccharomyces pastorianus
gtttctacaactaccactttagcgc

SEQ ID NO: 120369 - DNA, 25 bp, Saccharomyces pastorianus
aagagactaccatatcgtacgccga

SEQ ID NO: 120370 - DNA, 25 bp, Saccharomyces pastorianus
ttttttgtcacctcaacggtctact

SEQ ID NO: 120371 - DNA, 25 bp, Saccharomyces pastorianus
atgcttcaatccgttgtctttttcg

SEQ ID NO: 120372 - DNA, 25 bp, Saccharomyces pastorianus
acgagctggttcacctcaacttcag

SEQ ID NO: 120373 - DNA, 25 bp, Saccharomyces pastorianus
agaatccacccatgaaattacctcc

SEQ ID NO: 120374 - DNA, 25 bp, Saccharomyces pastorianus
ggttgcgtcccaatcacaaagtttg

SEQ ID NO: 120375 - DNA, 25 bp, Saccharomyces pastorianus
ttgtctccatcatctactgcagcaa

SEQ ID NO: 120376 - DNA, 25 bp, Saccharomyces pastorianus
tcaccccaaatacgactactcaata

SEQ ID NO: 120377 - DNA, 25 bp, Saccharomyces pastorianus
tactgcagcaagtgtcagtgacgaa

SEQ ID NO: 120378 - DNA, 25 bp, Saccharomyces pastorianus
gaacaggcttcaacttccaatggtt

SEQ ID NO: 120379 - DNA, 25 bp, Saccharomyces pastorianus
gtacgttacagtcaccccaaatacg

SEQ ID NO: 120380 - DNA, 25 bp, Saccharomyces pastorianus
aatacgttactgtcaccggtgcacc

SEQ ID NO: 120381 - DNA, 25 bp, Saccharomyces pastorianus
accggtgcaccttctgttaccacta

SEQ ID NO: 120382 - DNA, 25 bp, Saccharomyces pastorianus
atgactccactactttgtctccatc

SEQ ID NO: 120383 - DNA, 25 bp, Saccharomyces pastorianus
ttaccactacctctccaggtaaagt

SEQ ID NO: 120384 - DNA, 25 bp, Saccharomyces pastorianus
agtttgtcactgtcaccaatgagcc

SEQ ID NO: 120385 - DNA, 25 bp, Saccharomyces pastorianus
gttctgaaacggatcctctttggga

SEQ ID NO: 120386 - DNA, 25 bp, Saccharomyces pastorianus
atggtgtatccgcagttgatgatgt

SEQ ID NO: 120387 - DNA, 25 bp, Saccharomyces pastorianus
agggtgcattgtcgatacgccatca

SEQ ID NO: 120388 - DNA, 25 bp, Saccharomyces pastorianus
tcttgatacagccttaagtccttat

SEQ ID NO: 120389 - DNA, 25 bp, Saccharomyces pastorianus
tcaagtcaggagatcagggtgcatt

SEQ ID NO: 120390 - DNA, 25 bp, Saccharomyces pastorianus
ccaagtaacctacagcacgctatta

SEQ ID NO: 120391 - DNA, 25 bp, Saccharomyces pastorianus
tccccgtcactataactccaagtaa

SEQ ID NO: 120392 - DNA, 25 bp, Saccharomyces pastorianus
aagtccttatgctattggtgttgat

SEQ ID NO: 120393 - DNA, 25 bp, Saccharomyces pastorianus
gtacttttacggctctcttgataca

SEQ ID NO: 120394 - DNA, 25 bp, Saccharomyces pastorianus
attatagccataacgttcgcagaaa

SEQ ID NO: 120395 - DNA, 25 bp, Saccharomyces pastorianus
ttggctgaactgcaccatatcattg

SEQ ID NO: 120396 - DNA, 25 bp, Saccharomyces pastorianus
gatcgtgttggtaactttagctccc

SEQ ID NO: 120397 - DNA, 25 bp, Saccharomyces pastorianus
ttagctcccctagatgtgcttggac

SEQ ID NO: 120398 - DNA, 25 bp, Saccharomyces pastorianus
tatttgctcttgtggaactggcgtt

SEQ ID NO: 120399 - DNA, 25 bp, Saccharomyces pastorianus
gaagtttacttgatccggagaccaa

SEQ ID NO: 120400 - DNA, 25 bp, Saccharomyces pastorianus
gttttcaccctatccaaagagtcat

SEQ ID NO: 120401 - DNA, 25 bp, Saccharomyces pastorianus
attcctctaaggtggcagcgttttc

SEQ ID NO: 120402 - DNA, 25 bp, Saccharomyces pastorianus
ctggcgtttcaggagtcattatcaa

SEQ ID NO: 120403 - DNA, 25 bp, Saccharomyces pastorianus
agattttcattgcactttggaccca

SEQ ID NO: 120404 - DNA, 25 bp, Saccharomyces pastorianus
tttaagtaccctctagattcctcta

SEQ ID NO: 120405 - DNA, 25 bp, Saccharomyces pastorianus
ttcgatgcaaggtcgctcggtagat

SEQ ID NO: 120406 - DNA, 25 bp, Saccharomyces pastorianus
ggagctagcaggagttcccaatgtt

SEQ ID NO: 120407 - DNA, 25 bp, Saccharomyces pastorianus
attcgctgaggatagcttagctgca

SEQ ID NO: 120408 - DNA, 25 bp, Saccharomyces pastorianus
aatcgaatttttgggcgtgttgcct

SEQ ID NO: 120409 - DNA, 25 bp, Saccharomyces pastorianus
tagctcatggcttcgaacaagtggg

SEQ ID NO: 120410 - DNA, 25 bp, Saccharomyces pastorianus
taggcacaaatcaatcggttcaaaa

SEQ ID NO: 120411 - DNA, 25 bp, Saccharomyces pastorianus
aacgtgtttgtctatttaccagcag

SEQ ID NO: 120412 - DNA, 25 bp, Saccharomyces pastorianus
aaacgaactatctctcaagggcatt

SEQ ID NO: 120413 - DNA, 25 bp, Saccharomyces pastorianus
gtttacgctaacaatttgggcatgc

SEQ ID NO: 120414 - DNA, 25 bp, Saccharomyces pastorianus
gatgtacatttcacacagatggctt

SEQ ID NO: 120415 - DNA, 25 bp, Saccharomyces pastorianus
gccttcttcagtgcattattcgctg

SEQ ID NO: 120416 - DNA, 25 bp, Saccharomyces pastorianus
gggcatgctaaccaaactagctcat

SEQ ID NO: 120417 - DNA, 25 bp, Saccharomyces pastorianus
aactagctcatgtgacagtaccaaa

SEQ ID NO: 120418 - DNA, 25 bp, Saccharomyces pastorianus
gatgagtaaacagccactcgtccca

SEQ ID NO: 120419 - DNA, 25 bp, Saccharomyces pastorianus
gattcgcctgcagtggaacaagtag

SEQ ID NO: 120420 - DNA, 25 bp, Saccharomyces pastorianus
aatccacagattatttcactacaga

SEQ ID NO: 120421 - DNA, 25 bp, Saccharomyces pastorianus
gttcgttctgctaaacagccattga

SEQ ID NO: 120422 - DNA, 25 bp, Saccharomyces pastorianus
ttgcaccatttttccctacaaagag

SEQ ID NO: 120423 - DNA, 25 bp, Saccharomyces pastorianus
tgaaagttcgtgattcgcctgcagt

SEQ ID NO: 120424 - DNA, 25 bp, Saccharomyces pastorianus
gataccaactagcttaattcctgaa

SEQ ID NO: 120425 - DNA, 25 bp, Saccharomyces pastorianus
taaaaattccattaggtcagcctgc

SEQ ID NO: 120426 - DNA, 25 bp, Saccharomyces pastorianus
gtcccatattcctttgcaccatttt

SEQ ID NO: 120427 - DNA, 25 bp, Saccharomyces pastorianus
gaatactctactgatgacgacgaaa

SEQ ID NO: 120428 - DNA, 25 bp, Saccharomyces pastorianus
tcagcctgcacctgaaactgttggt

SEQ ID NO: 120429 - DNA, 25 bp, Saccharomyces pastorianus
gacgaccattccctgagagttaaag

SEQ ID NO: 120430 - DNA, 25 bp, Saccharomyces pastorianus
ggaaacatcgcgtcaaaacaaaggt

SEQ ID NO: 120431 - DNA, 25 bp, Saccharomyces pastorianus
gattatcactctttgcacaggcatt

SEQ ID NO: 120432 - DNA, 25 bp, Saccharomyces pastorianus
tatgccctaaggttctatcacaatg

SEQ ID NO: 120433 - DNA, 25 bp, Saccharomyces pastorianus
gactaggcctagtgttcttgaagag

SEQ ID NO: 120434 - DNA, 25 bp, Saccharomyces pastorianus
actactgattgcaaggtttcccaag

SEQ ID NO: 120435 - DNA, 25 bp, Saccharomyces pastorianus
aggaagtctcttcggtatatatcag

SEQ ID NO: 120436 - DNA, 25 bp, Saccharomyces pastorianus
acggaagcatccacaaagttgaaca

SEQ ID NO: 120437 - DNA, 25 bp, Saccharomyces pastorianus
agattttgtgacgaccattccctga

SEQ ID NO: 120438 - DNA, 25 bp, Saccharomyces pastorianus
atcaccaagggtatatgtactgcaa

SEQ ID NO: 120439 - DNA, 25 bp, Saccharomyces pastorianus
gtttcccaagggttgccaagaatca

SEQ ID NO: 120440 - DNA, 25 bp, Saccharomyces pastorianus
tgacccgctacttcattttgacata

SEQ ID NO: 120441 - DNA, 25 bp, Saccharomyces pastorianus
aaagtactccatcagtctgctgcat

SEQ ID NO: 120442 - DNA, 25 bp, Saccharomyces pastorianus
gatgcgatttacgatgatgactgga

SEQ ID NO: 120443 - DNA, 25 bp, Saccharomyces pastorianus
ggaattgattgatgacccgctactt

SEQ ID NO: 120444 - DNA, 25 bp, Saccharomyces pastorianus
gttagagcaagcataccctgaaaaa

SEQ ID NO: 120445 - DNA, 25 bp, Saccharomyces pastorianus
tagaagaacatgctctccggcgggt

SEQ ID NO: 120446 - DNA, 25 bp, Saccharomyces pastorianus
gggatggtatagagccctccttact

SEQ ID NO: 120447 - DNA, 25 bp, Saccharomyces pastorianus
tccggcgggtctacctaatagatca

SEQ ID NO: 120448 - DNA, 25 bp, Saccharomyces pastorianus
gaacgttttgttcggaccaacattg

SEQ ID NO: 120449 - DNA, 25 bp, Saccharomyces pastorianus
gagccctccttactttcaattaata

SEQ ID NO: 120450 - DNA, 25 bp, Saccharomyces pastorianus
tagcgaatgggcgtcatggactcaa

SEQ ID NO: 120451 - DNA, 25 bp, Saccharomyces pastorianus
gaattaggagaaactttgacggatg

SEQ ID NO: 120452 - DNA, 25 bp, Saccharomyces pastorianus
atcgctacagtctggtccacttaat

SEQ ID NO: 120453 - DNA, 25 bp, Saccharomyces pastorianus
ttaaaaacttgaggcgtgtagctaa

SEQ ID NO: 120454 - DNA, 25 bp, Saccharomyces pastorianus
aatgatgggttcctcgattaccacg

SEQ ID NO: 120455 - DNA, 25 bp, Saccharomyces pastorianus
gaaggccctgggatttgagctaccc

SEQ ID NO: 120456 - DNA, 25 bp, Saccharomyces pastorianus
gggatttgagctacccaagagagaa

SEQ ID NO: 120457 - DNA, 25 bp, Saccharomyces pastorianus
gtctggtccacttaatagcgagtta

SEQ ID NO: 120458 - DNA, 25 bp, Saccharomyces pastorianus
agctgagagcgatgattgaagagtt

SEQ ID NO: 120459 - DNA, 25 bp, Saccharomyces pastorianus
gtaagaacaggtcatcgctacagtc

SEQ ID NO: 120460 - DNA, 25 bp, Saccharomyces pastorianus
aaaaagggcattccaattatttgat

SEQ ID NO: 120461 - DNA, 25 bp, Saccharomyces pastorianus
gggttcctcgattaccacgagttga

SEQ ID NO: 120462 - DNA, 25 bp, Saccharomyces pastorianus
tttactttgctgctattgtcagcga

SEQ ID NO: 120463 - DNA, 25 bp, Saccharomyces pastorianus
tatgcagctgagtagaagtcatcct

SEQ ID NO: 120464 - DNA, 25 bp, Saccharomyces pastorianus
gatgatgacaaagacccctgctggg

SEQ ID NO: 120465 - DNA, 25 bp, Saccharomyces pastorianus
acccctgctgggatgacatattaaa

SEQ ID NO: 120466 - DNA, 25 bp, Saccharomyces pastorianus
gcgattgaccacatctttaggcatt

SEQ ID NO: 120467 - DNA, 25 bp, Saccharomyces pastorianus
ttgggatacacagcgtgccttcgat

SEQ ID NO: 120468 - DNA, 25 bp, Saccharomyces pastorianus
gccttcgatggccaacttacatata

SEQ ID NO: 120469 - DNA, 25 bp, Saccharomyces pastorianus
gagtgccatttattgattctaccac

SEQ ID NO: 120470 - DNA, 25 bp, Saccharomyces pastorianus
gattctaccacgaactatgcagctg

SEQ ID NO: 120471 - DNA, 25 bp, Saccharomyces pastorianus
tcgtttcctaaatcagagtgccatt

SEQ ID NO: 120472 - DNA, 25 bp, Saccharomyces pastorianus
atacgttaattctgcgattgaccac

SEQ ID NO: 120473 - DNA, 25 bp, Saccharomyces pastorianus
gaaggtacttcagcagaccgtgaaa

SEQ ID NO: 120474 - DNA, 25 bp, Saccharomyces pastorianus
attggagccaacttcattttctctc

SEQ ID NO: 120475 - DNA, 25 bp, Saccharomyces pastorianus
gcagttgctgctacgattggagcca

SEQ ID NO: 120476 - DNA, 25 bp, Saccharomyces pastorianus
agaccagatactttagatcctgctt

SEQ ID NO: 120477 - DNA, 25 bp, Saccharomyces pastorianus
gaggccggcagattagaaattttca

SEQ ID NO: 120478 - DNA, 25 bp, Saccharomyces pastorianus
acgaaccttgcatcatttttatgga

SEQ ID NO: 120479 - DNA, 25 bp, Saccharomyces pastorianus
gaatttgacttcgaggctgctgtaa

SEQ ID NO: 120480 - DNA, 25 bp, Saccharomyces pastorianus
tctctccagcgtctggtattgtgga

SEQ ID NO: 120481 - DNA, 25 bp, Saccharomyces pastorianus
gatcctgctttgttgaggcccggta

SEQ ID NO: 120482 - DNA, 25 bp, Saccharomyces pastorianus
aactgaagcaggttttttcgccata

SEQ ID NO: 120483 - DNA, 25 bp, Saccharomyces pastorianus
aattccattgccaaatgaggccggc

SEQ ID NO: 120484 - DNA, 25 bp, Saccharomyces pastorianus
gatgccatagtagatcccaaatgcc

SEQ ID NO: 120485 - DNA, 25 bp, Saccharomyces pastorianus
aacgaaaccttgttcatcagagcca

SEQ ID NO: 120486 - DNA, 25 bp, Saccharomyces pastorianus
ccaaatgccaaatctctgctcatag

SEQ ID NO: 120487 - DNA, 25 bp, Saccharomyces pastorianus
tcaagatgtctgttctcggtactca

SEQ ID NO: 120488 - DNA, 25 bp, Saccharomyces pastorianus
tcctggagtccatcttggtgacgaa

SEQ ID NO: 120489 - DNA, 25 bp, Saccharomyces pastorianus
aacttgaatgcttacatggacgcta

SEQ ID NO: 120490 - DNA, 25 bp, Saccharomyces pastorianus
atctgccgctattggtgctgatgcc

SEQ ID NO: 120491 - DNA, 25 bp, Saccharomyces pastorianus
agggtctctcttatttcctggagtc

SEQ ID NO: 120492 - DNA, 25 bp, Saccharomyces pastorianus
ggccattatgttgtggagcctaaaa

SEQ ID NO: 120493 - DNA, 25 bp, Saccharomyces pastorianus
aggtgaaacactggccaacgtttat

SEQ ID NO: 120494 - DNA, 25 bp, Saccharomyces pastorianus
attggttccagatgtcgtgttgcag

SEQ ID NO: 120495 - DNA, 25 bp, Saccharomyces pastorianus
aaaggaaggctctagtgtactggga

SEQ ID NO: 120496 - DNA, 25 bp, Saccharomyces pastorianus
gattttgttacttgcattgaggtct

SEQ ID NO: 120497 - DNA, 25 bp, Saccharomyces pastorianus
catccgaagttggtggtgataccgt

SEQ ID NO: 120498 - DNA, 25 bp, Saccharomyces pastorianus
ctgaggcttcgcgagaaggtgcatt

SEQ ID NO: 120499 - DNA, 25 bp, Saccharomyces pastorianus
gacatccccttcacaatatatttcg

SEQ ID NO: 120500 - DNA, 25 bp, Saccharomyces pastorianus
gagctagtctcagatttcaacttag

SEQ ID NO: 120501 - DNA, 25 bp, Saccharomyces pastorianus
gatctccctcacataaacgtttttt

SEQ ID NO: 120502 - DNA, 25 bp, Saccharomyces pastorianus
ctatgttaatgatggatctccctca

SEQ ID NO: 120503 - DNA, 25 bp, Saccharomyces pastorianus
aatggctacatattcggcgcatccg

SEQ ID NO: 120504 - DNA, 25 bp, Saccharomyces pastorianus
aatcatacggagaattaccctttag

SEQ ID NO: 120505 - DNA, 25 bp, Saccharomyces pastorianus
atcatttgaggttttgtccgtggat

SEQ ID NO: 120506 - DNA, 25 bp, Saccharomyces pastorianus
ctaaccgtttcttcagtttcagtgt

SEQ ID NO: 120507 - DNA, 25 bp, Saccharomyces pastorianus
ctatcctgccctcacaattataaat

SEQ ID NO: 120508 - DNA, 25 bp, Saccharomyces pastorianus
attctggaacagactctaaccgttt

SEQ ID NO: 120509 - DNA, 25 bp, Saccharomyces pastorianus
tcacctcaagttgggagcgtggcct

SEQ ID NO: 120510 - DNA, 25 bp, Saccharomyces pastorianus
tatacttcaagtcatcagctgttaa

SEQ ID NO: 120511 - DNA, 25 bp, Saccharomyces pastorianus
gttagcgaagatggtctgactgcat

SEQ ID NO: 120512 - DNA, 25 bp, Saccharomyces pastorianus
gacaacctgttaccaacgttgctgg

SEQ ID NO: 120513 - DNA, 25 bp, Saccharomyces pastorianus
agcgtggcctcttcttgaaatcatg

SEQ ID NO: 120514 - DNA, 25 bp, Saccharomyces pastorianus
gactgcatcaacattcttttcaatt

SEQ ID NO: 120515 - DNA, 25 bp, Saccharomyces pastorianus
attttttctctctaatcacctcaag

SEQ ID NO: 120516 - DNA, 25 bp, Saccharomyces pastorianus
aaaaccttatcatcttcatcttcaa

SEQ ID NO: 120517 - DNA, 25 bp, Saccharomyces pastorianus
aaacgatgtcatttctagcccagaa

SEQ ID NO: 120518 - DNA, 25 bp, Saccharomyces pastorianus
acatcatcgtgcaatacgcttttga

SEQ ID NO: 120519 - DNA, 25 bp, Saccharomyces pastorianus
aagtaattctcgatccgcctaaaat

SEQ ID NO: 120520 - DNA, 25 bp, Saccharomyces pastorianus
gagactttgccctcaacagtatcag

SEQ ID NO: 120521 - DNA, 25 bp, Saccharomyces pastorianus
aggtaccatatgtcgtctgccctga

SEQ ID NO: 120522 - DNA, 25 bp, Saccharomyces pastorianus
gaatacaccacgtctggatgcagta

SEQ ID NO: 120523 - DNA, 25 bp, Saccharomyces pastorianus
gactttgttttcgtcaacaacacca

SEQ ID NO: 120524 - DNA, 25 bp, Saccharomyces pastorianus
gagatcatccattgtgtctgaaagc

SEQ ID NO: 120525 - DNA, 25 bp, Saccharomyces pastorianus
ggatgcagtacatactctgaccaat

SEQ ID NO: 120526 - DNA, 25 bp, Saccharomyces pastorianus
aaggctattgcactgctgcggagac

SEQ ID NO: 120527 - DNA, 25 bp, Saccharomyces pastorianus
tgccctgacgacacagagactttgt

SEQ ID NO: 120528 - DNA, 25 bp, Saccharomyces pastorianus
gtcaaggccttgaagaggctgacta

SEQ ID NO: 120529 - DNA, 25 bp, Saccharomyces pastorianus
gctgactaaggaggaagggtactac

SEQ ID NO: 120530 - DNA, 25 bp, Saccharomyces pastorianus
ggaggaggtccttgatgacacaaaa

SEQ ID NO: 120531 - DNA, 25 bp, Saccharomyces pastorianus
gaagacaagtcagttgacccatatg

SEQ ID NO: 120532 - DNA, 25 bp, Saccharomyces pastorianus
aagattattacctactttatatgag

SEQ ID NO: 120533 - DNA, 25 bp, Saccharomyces pastorianus
aaagatcaggaagcacatgtggcaa

SEQ ID NO: 120534 - DNA, 25 bp, Saccharomyces pastorianus
cagttgacccatatgacttgaagaa

SEQ ID NO: 120535 - DNA, 25 bp, Saccharomyces pastorianus
tgtcagtgatgcaagatccgctatt

SEQ ID NO: 120536 - DNA, 25 bp, Saccharomyces pastorianus
ttggatataaaagtcaaggccttga

SEQ ID NO: 120537 - DNA, 25 bp, Saccharomyces pastorianus
gcacatgtggcaaaacttaaagaag

SEQ ID NO: 120538 - DNA, 25 bp, Saccharomyces pastorianus
ggtaccgaagatgtcagtgatgcaa

SEQ ID NO: 120539 - DNA, 25 bp, Saccharomyces pastorianus
aaactttatcacatgggcgatgact

SEQ ID NO: 120540 - DNA, 25 bp, Saccharomyces pastorianus
acgtgtctgtccgtacaattgttta

SEQ ID NO: 120541 - DNA, 25 bp, Saccharomyces pastorianus
aacaggcacacaaggtaactacggt

SEQ ID NO: 120542 - DNA, 25 bp, Saccharomyces pastorianus
agaagctttccaactcatatatcaa

SEQ ID NO: 120543 - DNA, 25 bp, Saccharomyces pastorianus
gcagagtatactcaacactgatgtt

SEQ ID NO: 120544 - DNA, 25 bp, Saccharomyces pastorianus
tgatctttaccttttttccacgtgt

SEQ ID NO: 120545 - DNA, 25 bp, Saccharomyces pastorianus
acaattgtttaactcctggtggata

SEQ ID NO: 120546 - DNA, 25 bp, Saccharomyces pastorianus
agccaccatatgcagttcctattga

SEQ ID NO: 120547 - DNA, 25 bp, Saccharomyces pastorianus
taactacggtctgggtcccttagag

SEQ ID NO: 120548 - DNA, 25 bp, Saccharomyces pastorianus
tctgacaagctttcctcaaagtatg

SEQ ID NO: 120549 - DNA, 25 bp, Saccharomyces pastorianus
ttatcgatgactggttgctgttgca

SEQ ID NO: 120550 - DNA, 25 bp, Saccharomyces pastorianus
aaagcccatagtatcgcttccgata

SEQ ID NO: 120551 - DNA, 25 bp, Saccharomyces pastorianus
ttgataccaacgtcaacactgctgc

SEQ ID NO: 120552 - DNA, 25 bp, Saccharomyces pastorianus
atcatgtcccgtatactgcaagtag

SEQ ID NO: 120553 - DNA, 25 bp, Saccharomyces pastorianus
cctggccatcaccatacattggtta

SEQ ID NO: 120554 - DNA, 25 bp, Saccharomyces pastorianus
aaagttattagagcgcctggccatc

SEQ ID NO: 120555 - DNA, 25 bp, Saccharomyces pastorianus
ttgcgatgctaatggtgactctaac

SEQ ID NO: 120556 - DNA, 25 bp, Saccharomyces pastorianus
gctaaccctgatatggttccccaaa

SEQ ID NO: 120557 - DNA, 25 bp, Saccharomyces pastorianus
gtctattacgtctactaccacatgc

SEQ ID NO: 120558 - DNA, 25 bp, Saccharomyces pastorianus
attgctgcctgtaccatggattcaa

SEQ ID NO: 120559 - DNA, 25 bp, Saccharomyces pastorianus
gatgccgacgctgattgcgatgcta

SEQ ID NO: 120560 - DNA, 25 bp, Saccharomyces pastorianus
aaagtagatgccgatgccgacgctg

SEQ ID NO: 120561 - DNA, 25 bp, Saccharomyces pastorianus
gctaccgtctcgttgatccatgaat

SEQ ID NO: 120562 - DNA, 25 bp, Saccharomyces pastorianus
atgtactacgcggagccagaattaa

SEQ ID NO: 120563 - DNA, 25 bp, Saccharomyces pastorianus
agggtcttttgctatctcgcagtag

SEQ ID NO: 120564 - DNA, 25 bp, Saccharomyces pastorianus
gcatgtatgcgtatgttttcttttt

SEQ ID NO: 120565 - DNA, 25 bp, Saccharomyces pastorianus
cgttggtgcttattcgctaccgtct

SEQ ID NO: 120566 - DNA, 25 bp, Saccharomyces pastorianus
tatggtttttccagttttctagaag

SEQ ID NO: 120567 - DNA, 25 bp, Saccharomyces pastorianus
tgtgacgccggatccccgcgtataa

SEQ ID NO: 120568 - DNA, 25 bp, Saccharomyces pastorianus
tttatcttgtacgtgcatgtatgcg

SEQ ID NO: 120569 - DNA, 25 bp, Saccharomyces pastorianus
gtgtgcctggttatcccaatactac

SEQ ID NO: 120570 - DNA, 25 bp, Saccharomyces pastorianus
tatctcgcagtagcgtgtgcctggt

SEQ ID NO: 120571 - DNA, 25 bp, Saccharomyces pastorianus
gtataatccgtgtcacgctaaagga

SEQ ID NO: 120572 - DNA, 25 bp, Saccharomyces pastorianus
gaggccaatacttgttttcttgtgc

SEQ ID NO: 120573 - DNA, 25 bp, Saccharomyces pastorianus
tcgattctaacgttaccccaaggca

SEQ ID NO: 120574 - DNA, 25 bp, Saccharomyces pastorianus
ttggcacgggtcatgaatttcccat

SEQ ID NO: 120575 - DNA, 25 bp, Saccharomyces pastorianus
gttaatggcccatagagcacccata

SEQ ID NO: 120576 - DNA, 25 bp, Saccharomyces pastorianus
atttcatcgaagactctccggagat

SEQ ID NO: 120577 - DNA, 25 bp, Saccharomyces pastorianus
ggagatacctctacctacgttaatg

SEQ ID NO: 120578 - DNA, 25 bp, Saccharomyces pastorianus
gatgcaatattgtgtctcagcgtca

SEQ ID NO: 120579 - DNA, 25 bp, Saccharomyces pastorianus
aggcgattacatcatctctggttca

SEQ ID NO: 120580 - DNA, 25 bp, Saccharomyces pastorianus
catctctggttcacatgacactaca

SEQ ID NO: 120581 - DNA, 25 bp, Saccharomyces pastorianus
gacctggatgtggatttcgattcta

SEQ ID NO: 120582 - DNA, 25 bp, Saccharomyces pastorianus
aggttaacacattggccatcaggta

SEQ ID NO: 120583 - DNA, 25 bp, Saccharomyces pastorianus
gcaacaattaatttccgcgatggac

SEQ ID NO: 120584 - DNA, 25 bp, Saccharomyces pastorianus
ggttctggatctcatggtgaagact

SEQ ID NO: 120585 - DNA, 25 bp, Saccharomyces pastorianus
ggtttaccatacgaaccattcgcat

SEQ ID NO: 120586 - DNA, 25 bp, Saccharomyces pastorianus
gttgatggccttggtttgtattcct

SEQ ID NO: 120587 - DNA, 25 bp, Saccharomyces pastorianus
tttgccatgtggttcgcactaacat

SEQ ID NO: 120588 - DNA, 25 bp, Saccharomyces pastorianus
tatgacggttgcactttttgccatg

SEQ ID NO: 120589 - DNA, 25 bp, Saccharomyces pastorianus
gcacactgcatcctatttacgttta

SEQ ID NO: 120590 - DNA, 25 bp, Saccharomyces pastorianus
ttgaattgtgtttcgcacactgcat

SEQ ID NO: 120591 - DNA, 25 bp, Saccharomyces pastorianus
gatggacgccgatgacgctgaagaa

SEQ ID NO: 120592 - DNA, 25 bp, Saccharomyces pastorianus
ggcacatgctcaattgtctagtgtt

SEQ ID NO: 120593 - DNA, 25 bp, Saccharomyces pastorianus
gaaccactaccatcgactgaagcag

SEQ ID NO: 120594 - DNA, 25 bp, Saccharomyces pastorianus
gtcatcccacctttgattttggtta

SEQ ID NO: 120595 - DNA, 25 bp, Saccharomyces pastorianus
agctttgccatttgcactcggtatc

SEQ ID NO: 120596 - DNA, 25 bp, Saccharomyces pastorianus
tgattaacgccactccaactatggt

SEQ ID NO: 120597 - DNA, 25 bp, Saccharomyces pastorianus
agtcacaatgttctcagctttgcca

SEQ ID NO: 120598 - DNA, 25 bp, Saccharomyces pastorianus
tacaacgcggtgtcctcaaaggtaa

SEQ ID NO: 120599 - DNA, 25 bp, Saccharomyces pastorianus
aatcaatcgctaaacgtcgccgtta

SEQ ID NO: 120600 - DNA, 25 bp, Saccharomyces pastorianus
aaacaaatctcatcctatgtccacg

SEQ ID NO: 120601 - DNA, 25 bp, Saccharomyces pastorianus
aaggtaagtctctcggtgtgcaaac

SEQ ID NO: 120602 - DNA, 25 bp, Saccharomyces pastorianus
aactgcgtcgtgtggtgttgcgtta

SEQ ID NO: 120603 - DNA, 25 bp, Saccharomyces pastorianus
aaagttgatcttgggccgtttggtg

SEQ ID NO: 120604 - DNA, 25 bp, Saccharomyces pastorianus
agggtatttctgtgtttgactctaa

SEQ ID NO: 120605 - DNA, 25 bp, Saccharomyces pastorianus
atcacattgcatgacccacgtgtgg

SEQ ID NO: 120606 - DNA, 25 bp, Saccharomyces pastorianus
aagtgggtattatcagcgctggtca

SEQ ID NO: 120607 - DNA, 25 bp, Saccharomyces pastorianus
tacttctccgatgtacaccataaca

SEQ ID NO: 120608 - DNA, 25 bp, Saccharomyces pastorianus
cgtgtgggagcgtcttctaaagtta

SEQ ID NO: 120609 - DNA, 25 bp, Saccharomyces pastorianus
ttatgctcgggttctcacgatggta

SEQ ID NO: 120610 - DNA, 25 bp, Saccharomyces pastorianus
ataagaacttcgtttcctctctgga

SEQ ID NO: 120611 - DNA, 25 bp, Saccharomyces pastorianus
gagcaagtgatcttcgattctacag

SEQ ID NO: 120612 - DNA, 25 bp, Saccharomyces pastorianus
acaacatcgtactcgttgctttcca

SEQ ID NO: 120613 - DNA, 25 bp, Saccharomyces pastorianus
gtatgggacgtcaggtctacttctc

SEQ ID NO: 120614 - DNA, 25 bp, Saccharomyces pastorianus
ttagaatcccatacagctcctgttg

SEQ ID NO: 120615 - DNA, 25 bp, Saccharomyces pastorianus
acttgttagcatgtgggtccagcgc

SEQ ID NO: 120616 - DNA, 25 bp, Saccharomyces pastorianus
aaggatgaccacgttaaggaccatg

SEQ ID NO: 120617 - DNA, 25 bp, Saccharomyces pastorianus
gtttggctgccaataatctattaag

SEQ ID NO: 120618 - DNA, 25 bp, Saccharomyces pastorianus
attagtttgcgttgtgatgattcca

SEQ ID NO: 120619 - DNA, 25 bp, Saccharomyces pastorianus
gatgattccaattccatgggttttt

SEQ ID NO: 120620 - DNA, 25 bp, Saccharomyces pastorianus
tcagcgttttaatgtacttctctac

SEQ ID NO: 120621 - DNA, 25 bp, Saccharomyces pastorianus
gtttgatcgcgaggacgggcaacat

SEQ ID NO: 120622 - DNA, 25 bp, Saccharomyces pastorianus
gagtagtgtattcccattgtttacc

SEQ ID NO: 120623 - DNA, 25 bp, Saccharomyces pastorianus
gtcacaattcggttatgccgccatg

SEQ ID NO: 120624 - DNA, 25 bp, Saccharomyces pastorianus
ttaactatggcatcctgtttggctg

SEQ ID NO: 120625 - DNA, 25 bp, Saccharomyces pastorianus
gtgaaaggctatctctgcgcaggac

SEQ ID NO: 120626 - DNA, 25 bp, Saccharomyces pastorianus
tctacatgctatccgccattaacta

SEQ ID NO: 120627 - DNA, 25 bp, Saccharomyces pastorianus
tcatttcggtcgtagaagatcttcc

SEQ ID NO: 120628 - DNA, 25 bp, Saccharomyces pastorianus
aagcctaaggttacaaccgattcag

SEQ ID NO: 120629 - DNA, 25 bp, Saccharomyces pastorianus
actatcgatgagctttttcaactga

SEQ ID NO: 120630 - DNA, 25 bp, Saccharomyces pastorianus
catcatgttggtcatttcggtcgta

SEQ ID NO: 120631 - DNA, 25 bp, Saccharomyces pastorianus
ggaagagtttaacagtcatcatgtt

SEQ ID NO: 120632 - DNA, 25 bp, Saccharomyces pastorianus
aacagaaaccacaccaacttctact

SEQ ID NO: 120633 - DNA, 25 bp, Saccharomyces pastorianus
tcaactgaagccaagtgtaactttg

SEQ ID NO: 120634 - DNA, 25 bp, Saccharomyces pastorianus
gttgctaccattgcccaagaaactt

SEQ ID NO: 120635 - DNA, 25 bp, Saccharomyces pastorianus
aaccgattcagatggttggtgcaca

SEQ ID NO: 120636 - DNA, 25 bp, Saccharomyces pastorianus
aacttctactgtgccagttgctacc

SEQ ID NO: 120637 - DNA, 25 bp, Saccharomyces pastorianus
aatatttcttccaacagacctgctg

SEQ ID NO: 120638 - DNA, 25 bp, Saccharomyces pastorianus
tggtttctgtttcttcttcatcatc

SEQ ID NO: 120639 - DNA, 25 bp, Saccharomyces pastorianus
atgacttatgcttcgtcgtcttcgt

SEQ ID NO: 120640 - DNA, 25 bp, Saccharomyces pastorianus
tatctctggtatcagcaggtctgtt

SEQ ID NO: 120641 - DNA, 25 bp, Saccharomyces pastorianus
tcgtcttcactttccaaagcagcaa

SEQ ID NO: 120642 - DNA, 25 bp, Saccharomyces pastorianus
gacttttaaagtttcttgggcaatg

SEQ ID NO: 120643 - DNA, 25 bp, Saccharomyces pastorianus
gcaatggtagcaactggcacagtag

SEQ ID NO: 120644 - DNA, 25 bp, Saccharomyces pastorianus
aatgtgcaccaaccatctgaatcgg

SEQ ID NO: 120645 - DNA, 25 bp, Saccharomyces pastorianus
gcttgtccgcaacaatatctctggt

SEQ ID NO: 120646 - DNA, 25 bp, Saccharomyces pastorianus
agcagcaaatgcgttgaaaccaaga

SEQ ID NO: 120647 - DNA, 25 bp, Saccharomyces pastorianus
gaagttggtgtggtttctgtttctt

SEQ ID NO: 120648 - DNA, 25 bp, Saccharomyces pastorianus
tacccttcttcttggcttcaaatgt

SEQ ID NO: 120649 - DNA, 25 bp, Saccharomyces pastorianus
ggtaatggttcaatccttgctgata

SEQ ID NO: 120650 - DNA, 25 bp, Saccharomyces pastorianus
gtaacctctgatgtggtcagtccaa

SEQ ID NO: 120651 - DNA, 25 bp, Saccharomyces pastorianus
tttgggtgacagtaaccgcctacca

SEQ ID NO: 120652 - DNA, 25 bp, Saccharomyces pastorianus
ggcatgcccaccaagtgaactatta

SEQ ID NO: 120653 - DNA, 25 bp, Saccharomyces pastorianus
tgggtggtagttttcagtccccagg

SEQ ID NO: 120654 - DNA, 25 bp, Saccharomyces pastorianus
catctacgggttgcgtccatcggac

SEQ ID NO: 120655 - DNA, 25 bp, Saccharomyces pastorianus
agtacggatattaaggcatgcccac

SEQ ID NO: 120656 - DNA, 25 bp, Saccharomyces pastorianus
atactgtaggccctgctactgctaa

SEQ ID NO: 120657 - DNA, 25 bp, Saccharomyces pastorianus
atgaagcgatcattcccacattgac

SEQ ID NO: 120658 - DNA, 25 bp, Saccharomyces pastorianus
aagtattctcggactgggtggtagt

SEQ ID NO: 120659 - DNA, 25 bp, Saccharomyces pastorianus
accggaccccaagtcgctattagat

SEQ ID NO: 120660 - DNA, 25 bp, Saccharomyces pastorianus
tggatttagccaaggtgcaggtctt

SEQ ID NO: 120661 - DNA, 25 bp, Saccharomyces pastorianus
aagagcataatacccaacctgaagt

SEQ ID NO: 120662 - DNA, 25 bp, Saccharomyces pastorianus
tttgtcccaaactcgaaaccattcg

SEQ ID NO: 120663 - DNA, 25 bp, Saccharomyces pastorianus
ccaggtaccctctctacatgtaagg

SEQ ID NO: 120664 - DNA, 25 bp, Saccharomyces pastorianus
actgatgaacaacagcccgctttga

SEQ ID NO: 120665 - DNA, 25 bp, Saccharomyces pastorianus
gacattgttggttcatcctggagcc

SEQ ID NO: 120666 - DNA, 25 bp, Saccharomyces pastorianus
gcattgtacgagtcatggcccgata

SEQ ID NO: 120667 - DNA, 25 bp, Saccharomyces pastorianus
atcctggagcccattttgtcccaaa

SEQ ID NO: 120668 - DNA, 25 bp, Saccharomyces pastorianus
atcccgaatctttcaattcctttca

SEQ ID NO: 120669 - DNA, 25 bp, Saccharomyces pastorianus
ggaattcaacacttcagcgactagt

SEQ ID NO: 120670 - DNA, 25 bp, Saccharomyces pastorianus
aaccattcgtatcccaagtttgcaa

SEQ ID NO: 120671 - DNA, 25 bp, Saccharomyces pastorianus
gttactttggccagtcagggaaaga

SEQ ID NO: 120672 - DNA, 25 bp, Saccharomyces pastorianus
ggtggtgtctacgtattcgttcatc

SEQ ID NO: 120673 - DNA, 25 bp, Saccharomyces pastorianus
ccgaatccaattgcccgacattaat

SEQ ID NO: 120674 - DNA, 25 bp, Saccharomyces pastorianus
tcgttcatctctcgcttcaaagtaa

SEQ ID NO: 120675 - DNA, 25 bp, Saccharomyces pastorianus
tatggtaaaagttggcgctgttgcg

SEQ ID NO: 120676 - DNA, 25 bp, Saccharomyces pastorianus
cagactgataatgaaccgagacgat

SEQ ID NO: 120677 - DNA, 25 bp, Saccharomyces pastorianus
atcttttccaatctgctgcatgcaa

SEQ ID NO: 120678 - DNA, 25 bp, Saccharomyces pastorianus
ataacactactagaactgggtggta

SEQ ID NO: 120679 - DNA, 25 bp, Saccharomyces pastorianus
agagccattgaaaactatcccgaat

SEQ ID NO: 120680 - DNA, 25 bp, Saccharomyces pastorianus
agaaatacctgccaatagagccatt

SEQ ID NO: 120681 - DNA, 25 bp, Saccharomyces pastorianus
agagttctgtctcatcttttccaat

SEQ ID NO: 120682 - DNA, 25 bp, Saccharomyces pastorianus
ttcctctagcgggatttcctctttt

SEQ ID NO: 120683 - DNA, 25 bp, Saccharomyces pastorianus
actgcagatttcttcaggtcgatca

SEQ ID NO: 120684 - DNA, 25 bp, Saccharomyces pastorianus
gcgaaggtgcacgttctggtattac

SEQ ID NO: 120685 - DNA, 25 bp, Saccharomyces pastorianus
cttcttctaactttgcagtgggcga

SEQ ID NO: 120686 - DNA, 25 bp, Saccharomyces pastorianus
gtcgatcatataaccttttcttttt

SEQ ID NO: 120687 - DNA, 25 bp, Saccharomyces pastorianus
atgtctgctgaatatgcctttcttc

SEQ ID NO: 120688 - DNA, 25 bp, Saccharomyces pastorianus
gtattacacccttcgctcttaaaat

SEQ ID NO: 120689 - DNA, 25 bp, Saccharomyces pastorianus
ggttcattctgcattatgtctgctg

SEQ ID NO: 120690 - DNA, 25 bp, Saccharomyces pastorianus
cgaaggcgttatcttgtactgcaga

SEQ ID NO: 120691 - DNA, 25 bp, Saccharomyces pastorianus
tatgcctttcttctcagtgatgttt

SEQ ID NO: 120692 - DNA, 25 bp, Saccharomyces pastorianus
aaatatcgttccattcactgtcttc

SEQ ID NO: 120693 - DNA, 25 bp, Saccharomyces pastorianus
ggacgttcagcagattgaatccatt

SEQ ID NO: 120694 - DNA, 25 bp, Saccharomyces pastorianus
ttgaatccattcttgccgacttgca

SEQ ID NO: 120695 - DNA, 25 bp, Saccharomyces pastorianus
ttgcagaagtactacgacgcgtttc

SEQ ID NO: 120696 - DNA, 25 bp, Saccharomyces pastorianus
aatgtaagaggtccactcaccagcc

SEQ ID NO: 120697 - DNA, 25 bp, Saccharomyces pastorianus
caatgggccaacacgtttgcataaa

SEQ ID NO: 120698 - DNA, 25 bp, Saccharomyces pastorianus
atccccaatgaatagccacacatca

SEQ ID NO: 120699 - DNA, 25 bp, Saccharomyces pastorianus
gaggattttactttggacgttcagc

SEQ ID NO: 120700 - DNA, 25 bp, Saccharomyces pastorianus
tgggcaaacaagtgtccagttctaa

SEQ ID NO: 120701 - DNA, 25 bp, Saccharomyces pastorianus
gacgcgtttctacaacttttacaga

SEQ ID NO: 120702 - DNA, 25 bp, Saccharomyces pastorianus
gtatatcaatgtctcaatgggccaa

SEQ ID NO: 120703 - DNA, 25 bp, Saccharomyces pastorianus
tggcgcatagacaagatgttccgaa

SEQ ID NO: 120704 - DNA, 25 bp, Saccharomyces pastorianus
gaaggccgtgatgaatgcttggaat

SEQ ID NO: 120705 - DNA, 25 bp, Saccharomyces pastorianus
aaacctgacagtgccaaggagctaa

SEQ ID NO: 120706 - DNA, 25 bp, Saccharomyces pastorianus
attggcatcccaaaacctgacagtg

SEQ ID NO: 120707 - DNA, 25 bp, Saccharomyces pastorianus
actcgattgttcatattcctgcttc

SEQ ID NO: 120708 - DNA, 25 bp, Saccharomyces pastorianus
agaagctcaaaaagtcgcctcctca

SEQ ID NO: 120709 - DNA, 25 bp, Saccharomyces pastorianus
tcactatatcctggctctatgaatg

SEQ ID NO: 120710 - DNA, 25 bp, Saccharomyces pastorianus
ttattgtgcttctggcaaacgcggg

SEQ ID NO: 120711 - DNA, 25 bp, Saccharomyces pastorianus
tcgcctcctcacatggatattcaaa

SEQ ID NO: 120712 - DNA, 25 bp, Saccharomyces pastorianus
cctgcttccatcaatgtgccatata

SEQ ID NO: 120713 - DNA, 25 bp, Saccharomyces pastorianus
acgcgtttgccttagatcctttaga

SEQ ID NO: 120714 - DNA, 25 bp, Saccharomyces pastorianus
tattcaaacacctcactatatcctg

SEQ ID NO: 120715 - DNA, 25 bp, Saccharomyces pastorianus
ggacagtttctgcaagatcgcctac

SEQ ID NO: 120716 - DNA, 25 bp, Saccharomyces pastorianus
aggattaccagatgccaactacaat

SEQ ID NO: 120717 - DNA, 25 bp, Saccharomyces pastorianus
acactggtatctatcctggttctat

SEQ ID NO: 120718 - DNA, 25 bp, Saccharomyces pastorianus
gaacctagtcgaacaccccaatgat

SEQ ID NO: 120719 - DNA, 25 bp, Saccharomyces pastorianus
agatcgcctacattggtcctgagaa

SEQ ID NO: 120720 - DNA, 25 bp, Saccharomyces pastorianus
agaacatttacaacgaaggctccaa

SEQ ID NO: 120721 - DNA, 25 bp, Saccharomyces pastorianus
aatttgctaaaccacctcacgataa

SEQ ID NO: 120722 - DNA, 25 bp, Saccharomyces pastorianus
agatctatacttttgaccaggtcag

SEQ ID NO: 120723 - DNA, 25 bp, Saccharomyces pastorianus
agagttggctcgatcttatgggtac

SEQ ID NO: 120724 - DNA, 25 bp, Saccharomyces pastorianus
tattccggtgaatagtgcccctggc

SEQ ID NO: 120725 - DNA, 25 bp, Saccharomyces pastorianus
tagtacaggtattctctcgaggaca

SEQ ID NO: 120726 - DNA, 25 bp, Saccharomyces pastorianus
cagtgaggaccaatcagacgaggat

SEQ ID NO: 120727 - DNA, 25 bp, Saccharomyces pastorianus
tccaccggtaaagcccttgatagtt

SEQ ID NO: 120728 - DNA, 25 bp, Saccharomyces pastorianus
tgatcacatgaaggccaagcaacgt

SEQ ID NO: 120729 - DNA, 25 bp, Saccharomyces pastorianus
ggatgaaactcatcatggtcagaaa

SEQ ID NO: 120730 - DNA, 25 bp, Saccharomyces pastorianus
atcagatttgataagtccaccggta

SEQ ID NO: 120731 - DNA, 25 bp, Saccharomyces pastorianus
agatctcgagcgtgaaattctcaag

SEQ ID NO: 120732 - DNA, 25 bp, Saccharomyces pastorianus
gtctaacctctatcaggacatcaga

SEQ ID NO: 120733 - DNA, 25 bp, Saccharomyces pastorianus
gacgaggatgctggattctttgaag

SEQ ID NO: 120734 - DNA, 25 bp, Saccharomyces pastorianus
atatccctgggctggaaataccgag

SEQ ID NO: 120735 - DNA, 25 bp, Saccharomyces pastorianus
acacgctccagtagaacaatcatcc

SEQ ID NO: 120736 - DNA, 25 bp, Saccharomyces pastorianus
ggtaccacgagtccgaaatatccct

SEQ ID NO: 120737 - DNA, 25 bp, Saccharomyces pastorianus
gacgctctgaatatattgcttactt

SEQ ID NO: 120738 - DNA, 25 bp, Saccharomyces pastorianus
gaaggtcattcctgaacagcgacag

SEQ ID NO: 120739 - DNA, 25 bp, Saccharomyces pastorianus
gtaagcttgtcgtttttgatgcaga

SEQ ID NO: 120740 - DNA, 25 bp, Saccharomyces pastorianus
agggtccttttagtagacgctctga

SEQ ID NO: 120741 - DNA, 25 bp, Saccharomyces pastorianus
aactctcgcgcctattgttgatttt

SEQ ID NO: 120742 - DNA, 25 bp, Saccharomyces pastorianus
aaagtttcagcgctcatgccaatga

SEQ ID NO: 120743 - DNA, 25 bp, Saccharomyces pastorianus
gatacacttggctctttacttagaa

SEQ ID NO: 120744 - DNA, 25 bp, Saccharomyces pastorianus
gtgtactcaggtgcaagaactctcg

SEQ ID NO: 120745 - DNA, 25 bp, Saccharomyces pastorianus
aaaagcattgcccttgattggttag

SEQ ID NO: 120746 - DNA, 25 bp, Saccharomyces pastorianus
tgacatttccaaatttctgcgggac

SEQ ID NO: 120747 - DNA, 25 bp, Saccharomyces pastorianus
tctgcgggacacttttagtattacc

SEQ ID NO: 120748 - DNA, 25 bp, Saccharomyces pastorianus
aggagattttctccgatccagaaaa

SEQ ID NO: 120749 - DNA, 25 bp, Saccharomyces pastorianus
tcgagcagcctttctttagaagata

SEQ ID NO: 120750 - DNA, 25 bp, Saccharomyces pastorianus
tgaactgtattttaagcatcccaaa

SEQ ID NO: 120751 - DNA, 25 bp, Saccharomyces pastorianus
aaatgcagttgcaacatcttaggca

SEQ ID NO: 120752 - DNA, 25 bp, Saccharomyces pastorianus
gatacctttgccaatttaatcgaga

SEQ ID NO: 120753 - DNA, 25 bp, Saccharomyces pastorianus
gaaaacttcgttgttcataacttgg

SEQ ID NO: 120754 - DNA, 25 bp, Saccharomyces pastorianus
gtacatttgctaagatgccgattgc

SEQ ID NO: 120755 - DNA, 25 bp, Saccharomyces pastorianus
tttacctgatgttatgcctgagcaa

SEQ ID NO: 120756 - DNA, 25 bp, Saccharomyces pastorianus
aaaacaggcaccacatgtagcgcaa

SEQ ID NO: 120757 - DNA, 25 bp, Saccharomyces pastorianus
tagaagaaggctataccccgacttt

SEQ ID NO: 120758 - DNA, 25 bp, Saccharomyces pastorianus
atgtagcgcaacctttttacctgat

SEQ ID NO: 120759 - DNA, 25 bp, Saccharomyces pastorianus
agcaccttttagctcttcagttgga

SEQ ID NO: 120760 - DNA, 25 bp, Saccharomyces pastorianus
gcctagagatttccaagcacctttt

SEQ ID NO: 120761 - DNA, 25 bp, Saccharomyces pastorianus
agcctgcttttattcatatcacgtg

SEQ ID NO: 120762 - DNA, 25 bp, Saccharomyces pastorianus
acgcttggctgtaactatctggtgt

SEQ ID NO: 120763 - DNA, 25 bp, Saccharomyces pastorianus
tcggaacatagctcctacacggata

SEQ ID NO: 120764 - DNA, 25 bp, Saccharomyces pastorianus
tattcgccaatctctctctattgtt

SEQ ID NO: 120765 - DNA, 25 bp, Saccharomyces pastorianus
gtggaccctataccgcaaatactta

SEQ ID NO: 120766 - DNA, 25 bp, Saccharomyces pastorianus
ataacgacgactatcctgaacttga

SEQ ID NO: 120767 - DNA, 25 bp, Saccharomyces pastorianus
acggacacatttgacttcttcaggt

SEQ ID NO: 120768 - DNA, 25 bp, Saccharomyces pastorianus
aaagggttctttcggatcagctcct

SEQ ID NO: 120769 - DNA, 25 bp, Saccharomyces pastorianus
aggccattagctactttcaaaacgg

SEQ ID NO: 120770 - DNA, 25 bp, Saccharomyces pastorianus
aaagcctatcccagtggtatacgat

SEQ ID NO: 120771 - DNA, 25 bp, Saccharomyces pastorianus
caagaacttaccagtcaccgttgaa

SEQ ID NO: 120772 - DNA, 25 bp, Saccharomyces pastorianus
accctaccactgacttaccaagaga

SEQ ID NO: 120773 - DNA, 25 bp, Saccharomyces pastorianus
gcaccggcggtcaaagttccgtgat

SEQ ID NO: 120774 - DNA, 25 bp, Saccharomyces pastorianus
agattcttcgaatgctaggcgtgaa

SEQ ID NO: 120775 - DNA, 25 bp, Saccharomyces pastorianus
agagtcttactcgtgataatgttca

SEQ ID NO: 120776 - DNA, 25 bp, Saccharomyces pastorianus
gaggcatccggtgaatgggttccaa

SEQ ID NO: 120777 - DNA, 25 bp, Saccharomyces pastorianus
gatgaccttgttgcagcttcctgac

SEQ ID NO: 120778 - DNA, 25 bp, Saccharomyces pastorianus
taacttggcagcattcgatagtaat

SEQ ID NO: 120779 - DNA, 25 bp, Saccharomyces pastorianus
aacaacggagtctgtaggtggcacc

SEQ ID NO: 120780 - DNA, 25 bp, Saccharomyces pastorianus
agttccgtgatgaccttgttgcagc

SEQ ID NO: 120781 - DNA, 25 bp, Saccharomyces pastorianus
aagcctgttcttaatgcttccactg

SEQ ID NO: 120782 - DNA, 25 bp, Saccharomyces pastorianus
aaatcctgtacgagctgtttttcca

SEQ ID NO: 120783 - DNA, 25 bp, Saccharomyces pastorianus
atgaatcctttactcgatgcgtctt

SEQ ID NO: 120784 - DNA, 25 bp, Saccharomyces pastorianus
tttccaggattagtactttcaacca

SEQ ID NO: 120785 - DNA, 25 bp, Saccharomyces pastorianus
ctattgtttcctggcttgaagcctg

SEQ ID NO: 120786 - DNA, 25 bp, Saccharomyces pastorianus
agaggcatcctcttcagtgcagatg

SEQ ID NO: 120787 - DNA, 25 bp, Saccharomyces pastorianus
gatgcgtctttatcgtccatttttt

SEQ ID NO: 120788 - DNA, 25 bp, Saccharomyces pastorianus
gttgtccctgtacggtatctacgaa

SEQ ID NO: 120789 - DNA, 25 bp, Saccharomyces pastorianus
tcgccctttattgcctctatggagg

SEQ ID NO: 120790 - DNA, 25 bp, Saccharomyces pastorianus
aagatggcataagctcgccctttat

SEQ ID NO: 120791 - DNA, 25 bp, Saccharomyces pastorianus
gcttccactgtcattgtaaatcctg

SEQ ID NO: 120792 - DNA, 25 bp, Saccharomyces pastorianus
aaactttaccactttgatggctgct

SEQ ID NO: 120793 - DNA, 25 bp, Saccharomyces pastorianus
gacgccgcccatgatcgtagataat

SEQ ID NO: 120794 - DNA, 25 bp, Saccharomyces pastorianus
aaagaggcccgatacctgtttcaca

SEQ ID NO: 120795 - DNA, 25 bp, Saccharomyces pastorianus
aaggaccccattgtcgtgatggtaa

SEQ ID NO: 120796 - DNA, 25 bp, Saccharomyces pastorianus
aggtatccgataagacgacgccgcc

SEQ ID NO: 120797 - DNA, 25 bp, Saccharomyces pastorianus
agagcaaatatctccgacaatcttt

SEQ ID NO: 120798 - DNA, 25 bp, Saccharomyces pastorianus
agcccaaggtggtacgaatcaatcc

SEQ ID NO: 120799 - DNA, 25 bp, Saccharomyces pastorianus
aagaaatcagcagcggcaagcccaa

SEQ ID NO: 120800 - DNA, 25 bp, Saccharomyces pastorianus
gatggctgctttttcatcaattaaa

SEQ ID NO: 120801 - DNA, 25 bp, Saccharomyces pastorianus
atggagtcttccaaggtatccgata

SEQ ID NO: 120802 - DNA, 25 bp, Saccharomyces pastorianus
gggcatgatcataccaacggagatt

SEQ ID NO: 120803 - DNA, 25 bp, Saccharomyces pastorianus
gtgtcaaactcttgggtcactttaa

SEQ ID NO: 120804 - DNA, 25 bp, Saccharomyces pastorianus
aacgttgtgtcaaactcttgggtca

SEQ ID NO: 120805 - DNA, 25 bp, Saccharomyces pastorianus
gcccgccgccattcgaggaaaaata

SEQ ID NO: 120806 - DNA, 25 bp, Saccharomyces pastorianus
tggttatgtaacttcgccgcccgcc

SEQ ID NO: 120807 - DNA, 25 bp, Saccharomyces pastorianus
aaaattggcgatacgcttcaacgtt

SEQ ID NO: 120808 - DNA, 25 bp, Saccharomyces pastorianus
gcgatacgcttcaacgttgtgtcaa

SEQ ID NO: 120809 - DNA, 25 bp, Saccharomyces pastorianus
gtcactttaaagaaaacccagcata

SEQ ID NO: 120810 - DNA, 25 bp, Saccharomyces pastorianus
gaaaacccagcatacattaatatag

SEQ ID NO: 120811 - DNA, 25 bp, Saccharomyces pastorianus
tgctacgatgcataaatacgataaa

SEQ ID NO: 120812 - DNA, 25 bp, Saccharomyces pastorianus
atgctggttatgtaacttcgccgcc

SEQ ID NO: 120813 - DNA, 25 bp, Saccharomyces pastorianus
tagagcaatgctggttatgtaactt

SEQ ID NO: 120814 - DNA, 25 bp, Saccharomyces pastorianus
atttactcggcagcttctacgtaag

SEQ ID NO: 120815 - DNA, 25 bp, Saccharomyces pastorianus
ctaggcatcggcttttggatcggat

SEQ ID NO: 120816 - DNA, 25 bp, Saccharomyces pastorianus
atgatacttgcggtgttcggcggca

SEQ ID NO: 120817 - DNA, 25 bp, Saccharomyces pastorianus
tatagtcgcgcaatccgtgtcgtta

SEQ ID NO: 120818 - DNA, 25 bp, Saccharomyces pastorianus
cattgtgtattcctggtttggcgtc

SEQ ID NO: 120819 - DNA, 25 bp, Saccharomyces pastorianus
tcgtgccattcacactgggatgcta

SEQ ID NO: 120820 - DNA, 25 bp, Saccharomyces pastorianus
gagatgcttctagtggtaccgatca

SEQ ID NO: 120821 - DNA, 25 bp, Saccharomyces pastorianus
ttcccaaaatttctaagccgcgtcg

SEQ ID NO: 120822 - DNA, 25 bp, Saccharomyces pastorianus
tatgttctaatcttcctggcgtata

SEQ ID NO: 120823 - DNA, 25 bp, Saccharomyces pastorianus
aaaagcaatcgctctcgaggccaga

SEQ ID NO: 120824 - DNA, 25 bp, Saccharomyces pastorianus
agtcgtattggctttggtttgctct

SEQ ID NO: 120825 - DNA, 25 bp, Saccharomyces pastorianus
tgtttagcttatcgaactctcaata

SEQ ID NO: 120826 - DNA, 25 bp, Saccharomyces pastorianus
gtttagcttatcgaactctcaatac

SEQ ID NO: 120827 - DNA, 25 bp, Saccharomyces pastorianus
tatcgaactctcaatacacctgcca

SEQ ID NO: 120828 - DNA, 25 bp, Saccharomyces pastorianus
cttatcgaactctcaatacacctgc

SEQ ID NO: 120829 - DNA, 25 bp, Saccharomyces pastorianus
tctcaatacacctgccaagactaca

SEQ ID NO: 120830 - DNA, 25 bp, Saccharomyces pastorianus
gaactctcaatacacctgccaagac

SEQ ID NO: 120831 - DNA, 25 bp, Saccharomyces pastorianus
atgtttagcttatcgaactctcaat

SEQ ID NO: 120832 - DNA, 25 bp, Saccharomyces pastorianus
tcgaactctcaatacacctgccaag

SEQ ID NO: 120833 - DNA, 25 bp, Saccharomyces pastorianus
ttagcttatcgaactctcaatacac

SEQ ID NO: 120834 - DNA, 25 bp, Saccharomyces pastorianus
gcttatcgaactctcaatacacctg

SEQ ID NO: 120835 - DNA, 25 bp, Saccharomyces pastorianus
ttatcgaactctcaatacacctgcc

SEQ ID NO: 120836 - DNA, 25 bp, Saccharomyces pastorianus
ggtcctttagacacagctattcttt

SEQ ID NO: 120837 - DNA, 25 bp, Saccharomyces pastorianus
agttgatcctgagaccctaccaaag

SEQ ID NO: 120838 - DNA, 25 bp, Saccharomyces pastorianus
gtaatagggctcacaacatccctgc

SEQ ID NO: 120839 - DNA, 25 bp, Saccharomyces pastorianus
tacccaatttcacccagaggcaaaa

SEQ ID NO: 120840 - DNA, 25 bp, Saccharomyces pastorianus
gccagtgccacattacatctcaaaa

SEQ ID NO: 120841 - DNA, 25 bp, Saccharomyces pastorianus
tgccatggatttgactaccggccag

SEQ ID NO: 120842 - DNA, 25 bp, Saccharomyces pastorianus
atgccaagctacaatttccaacgtc

SEQ ID NO: 120843 - DNA, 25 bp, Saccharomyces pastorianus
aatggaccaggcaacccagaactat

SEQ ID NO: 120844 - DNA, 25 bp, Saccharomyces pastorianus
gtgccaatgtaactgttttccccta

SEQ ID NO: 120845 - DNA, 25 bp, Saccharomyces pastorianus
gggatttgtctaggccatcaactct

SEQ ID NO: 120846 - DNA, 25 bp, Saccharomyces pastorianus
aaccctgtttatgactgtatcccta

SEQ ID NO: 120847 - DNA, 25 bp, Saccharomyces pastorianus
atattgtaaccgtgtttgacctggc

SEQ ID NO: 120848 - DNA, 25 bp, Saccharomyces pastorianus
cactaaaggatgttcagaggcaaat

SEQ ID NO: 120849 - DNA, 25 bp, Saccharomyces pastorianus
ggctcccttggccaatacatctgag

SEQ ID NO: 120850 - DNA, 25 bp, Saccharomyces pastorianus
gatgagttttcacgcagtatacaag

SEQ ID NO: 120851 - DNA, 25 bp, Saccharomyces pastorianus
ggccaatacatctgagactaactca

SEQ ID NO: 120852 - DNA, 25 bp, Saccharomyces pastorianus
gaagcttcggaggaaccacaggctc

SEQ ID NO: 120853 - DNA, 25 bp, Saccharomyces pastorianus
ccgtgtttgacctggcaaatgaaat

SEQ ID NO: 120854 - DNA, 25 bp, Saccharomyces pastorianus
aactggaagcttcggaggaaccaca

SEQ ID NO: 120855 - DNA, 25 bp, Saccharomyces pastorianus
tgagttttcacgcagtatacaagca

SEQ ID NO: 120856 - DNA, 25 bp, Saccharomyces pastorianus
ttcggaggaaccacaggctcccttg

SEQ ID NO: 120857 - DNA, 25 bp, Saccharomyces pastorianus
gtaaccgtgtttgacctggcaaatg

SEQ ID NO: 120858 - DNA, 25 bp, Saccharomyces pastorianus
atcgaccatacttttgaaccattga

SEQ ID NO: 120859 - DNA, 25 bp, Saccharomyces pastorianus
agactgacgggcactttgacttaat

SEQ ID NO: 120860 - DNA, 25 bp, Saccharomyces pastorianus
cgagaattcatacgcctctacgtta

SEQ ID NO: 120861 - DNA, 25 bp, Saccharomyces pastorianus
ggaaattttcatcgttaatgcccaa

SEQ ID NO: 120862 - DNA, 25 bp, Saccharomyces pastorianus
gcccatgatggtggcgtagacataa

SEQ ID NO: 120863 - DNA, 25 bp, Saccharomyces pastorianus
gaactcgcaaaatggcttcgtattg

SEQ ID NO: 120864 - DNA, 25 bp, Saccharomyces pastorianus
ggaacattcacctcactagtatcac

SEQ ID NO: 120865 - DNA, 25 bp, Saccharomyces pastorianus
tgagaaaaaccggtggcgcccatga

SEQ ID NO: 120866 - DNA, 25 bp, Saccharomyces pastorianus
ttatcaataacatcacgcttcctct

SEQ ID NO: 120867 - DNA, 25 bp, Saccharomyces pastorianus
agtatgcattatgtgttcccctcat

SEQ ID NO: 120868 - DNA, 25 bp, Saccharomyces pastorianus
gcttcctctgatatatttacgtgtt

SEQ ID NO: 120869 - DNA, 25 bp, Saccharomyces pastorianus
tcgctttcggtactttagtcggcat

SEQ ID NO: 120870 - DNA, 25 bp, Saccharomyces pastorianus
acggccgattaccaacactatatta

SEQ ID NO: 120871 - DNA, 25 bp, Saccharomyces pastorianus
gttctggaagcgttttctccttact

SEQ ID NO: 120872 - DNA, 25 bp, Saccharomyces pastorianus
ttacttcctgtttgctgtggccaga

SEQ ID NO: 120873 - DNA, 25 bp, Saccharomyces pastorianus
atatcttttttgtgtcctgggaacg

SEQ ID NO: 120874 - DNA, 25 bp, Saccharomyces pastorianus
actctactcactctatttatcgtca

SEQ ID NO: 120875 - DNA, 25 bp, Saccharomyces pastorianus
aacaggtgccattatctctaacaag

SEQ ID NO: 120876 - DNA, 25 bp, Saccharomyces pastorianus
aaatgtctgcggcatacccgggaga

SEQ ID NO: 120877 - DNA, 25 bp, Saccharomyces pastorianus
atgggttcctggctatttgagcgat

SEQ ID NO: 120878 - DNA, 25 bp, Saccharomyces pastorianus
aacgtcgcaattgcaactctactca

SEQ ID NO: 120879 - DNA, 25 bp, Saccharomyces pastorianus
gaatttctgctaatgacgcctacac

SEQ ID NO: 120880 - DNA, 25 bp, Saccharomyces pastorianus
ggagacgtcgatttgaaaccaggaa

SEQ ID NO: 120881 - DNA, 25 bp, Saccharomyces pastorianus
atactttggataccagtctctccga

SEQ ID NO: 120882 - DNA, 25 bp, Saccharomyces pastorianus
atctaatgactcttccaatgcaaat

SEQ ID NO: 120883 - DNA, 25 bp, Saccharomyces pastorianus
gagcatacgggcactggcacttata

SEQ ID NO: 120884 - DNA, 25 bp, Saccharomyces pastorianus
gtgttttcaccacaggagacgtcga

SEQ ID NO: 120885 - DNA, 25 bp, Saccharomyces pastorianus
gtctctccgaacgaagtgctactga

SEQ ID NO: 120886 - DNA, 25 bp, Saccharomyces pastorianus
tcaacactaggatatcttcggaaaa

SEQ ID NO: 120887 - DNA, 25 bp, Saccharomyces pastorianus
ttttctggtcttgcatcaacactag

SEQ ID NO: 120888 - DNA, 25 bp, Saccharomyces pastorianus
ggactggaacaattcacatctaatg

SEQ ID NO: 120889 - DNA, 25 bp, Saccharomyces pastorianus
gtgaatcacttcgaagggatgtccg

SEQ ID NO: 120890 - DNA, 25 bp, Saccharomyces pastorianus
aatcgactgactactaaggaggcat

SEQ ID NO: 120891 - DNA, 25 bp, Saccharomyces pastorianus
ttctgattctgaatccgattctgat

SEQ ID NO: 120892 - DNA, 25 bp, Saccharomyces pastorianus
gaaataaggatgcattttacatttt

SEQ ID NO: 120893 - DNA, 25 bp, Saccharomyces pastorianus
gattccaaggattctaaaaaagcta

SEQ ID NO: 120894 - DNA, 25 bp, Saccharomyces pastorianus
cgatgatgaagattccaaggattct

SEQ ID NO: 120895 - DNA, 25 bp, Saccharomyces pastorianus
tttaataattggtgacccctcgcgt

SEQ ID NO: 120896 - DNA, 25 bp, Saccharomyces pastorianus
cattttaataattggtgacccctcg

SEQ ID NO: 120897 - DNA, 25 bp, Saccharomyces pastorianus
ctgattctgaatccgattctgatga

SEQ ID NO: 120898 - DNA, 25 bp, Saccharomyces pastorianus
taataattggtgacccctcgcgttc

SEQ ID NO: 120899 - DNA, 25 bp, Saccharomyces pastorianus
aaggatgcattttacattttaataa

SEQ ID NO: 120900 - DNA, 25 bp, Saccharomyces pastorianus
ataattatccaatgcttaacctatt

SEQ ID NO: 120901 - DNA, 25 bp, Saccharomyces pastorianus
aattatccaatgcttaacctatttc

SEQ ID NO: 120902 - DNA, 25 bp, Saccharomyces pastorianus
ttctgattctgaatccgattctgat

SEQ ID NO: 120903 - DNA, 25 bp, Saccharomyces pastorianus
gattccaaggattctaaaaaagcta

SEQ ID NO: 120904 - DNA, 25 bp, Saccharomyces pastorianus
gcaaaggctgcttctgattctgaat

SEQ ID NO: 120905 - DNA, 25 bp, Saccharomyces pastorianus
atgctgataccgcaaaggctgcttc

SEQ ID NO: 120906 - DNA, 25 bp, Saccharomyces pastorianus
taaggatgcattttacattttaata

SEQ ID NO: 120907 - DNA, 25 bp, Saccharomyces pastorianus
cgatgatgaagattccaaggattct

SEQ ID NO: 120908 - DNA, 25 bp, Saccharomyces pastorianus
tttaataattggtgacccctcgcgt

SEQ ID NO: 120909 - DNA, 25 bp, Saccharomyces pastorianus
ctgattctgaatccgattctgatga

SEQ ID NO: 120910 - DNA, 25 bp, Saccharomyces pastorianus
cattttaataattggtgacccctcg

SEQ ID NO: 120911 - DNA, 25 bp, Saccharomyces pastorianus
taataattggtgacccctcgcgttc

SEQ ID NO: 120912 - DNA, 25 bp, Saccharomyces pastorianus
aattatccaatgcttaacctatttc

SEQ ID NO: 120913 - DNA, 25 bp, Saccharomyces pastorianus
agcagtttctgcagttagtcatcaa

SEQ ID NO: 120914 - DNA, 25 bp, Saccharomyces pastorianus
gaacgcgaaatttgggcctctgtca

SEQ ID NO: 120915 - DNA, 25 bp, Saccharomyces pastorianus
tggagacaactatgtttaccaacct

SEQ ID NO: 120916 - DNA, 25 bp, Saccharomyces pastorianus
gcgcgttgtcccttctttgaaaaca

SEQ ID NO: 120917 - DNA, 25 bp, Saccharomyces pastorianus
agttgttggtattgcaaagcttccc

SEQ ID NO: 120918 - DNA, 25 bp, Saccharomyces pastorianus
aagcagctcagggatacgacagcaa

SEQ ID NO: 120919 - DNA, 25 bp, Saccharomyces pastorianus
gggcctctgtcaccgatagaagttt

SEQ ID NO: 120920 - DNA, 25 bp, Saccharomyces pastorianus
gaaattgcacttccgtatactttgt

SEQ ID NO: 120921 - DNA, 25 bp, Saccharomyces pastorianus
aaatgattccttttcttgtgagttt

SEQ ID NO: 120922 - DNA, 25 bp, Saccharomyces pastorianus
aaagcttcccattgcctatggatat

SEQ ID NO: 120923 - DNA, 25 bp, Saccharomyces pastorianus
gcaacttgaccctgttttgttacca

SEQ ID NO: 120924 - DNA, 25 bp, Saccharomyces pastorianus
gacgctgctgcaggaaccaacaaaa

SEQ ID NO: 120925 - DNA, 25 bp, Saccharomyces pastorianus
ataggcagcgagaccggcgtttttt

SEQ ID NO: 120926 - DNA, 25 bp, Saccharomyces pastorianus
tgctcttttcttttcgttacttcgg

SEQ ID NO: 120927 - DNA, 25 bp, Saccharomyces pastorianus
ggcgcgcgtcaatcggcgataatca

SEQ ID NO: 120928 - DNA, 25 bp, Saccharomyces pastorianus
gacttattttactgcttcttctccg

SEQ ID NO: 120929 - DNA, 25 bp, Saccharomyces pastorianus
atgatacgtttttgtggcgcgcgtc

SEQ ID NO: 120930 - DNA, 25 bp, Saccharomyces pastorianus
gaccgcatagacgaacaccgttgca

SEQ ID NO: 120931 - DNA, 25 bp, Saccharomyces pastorianus
aagtccagttatcttcattacgaag

SEQ ID NO: 120932 - DNA, 25 bp, Saccharomyces pastorianus
gataatcagcaacgcgtctgacgct

SEQ ID NO: 120933 - DNA, 25 bp, Saccharomyces pastorianus
gagtccttgtgtcttaacgaccgca

SEQ ID NO: 120934 - DNA, 25 bp, Saccharomyces pastorianus
gatactaaaccctcttgagtccttg

SEQ ID NO: 120935 - DNA, 25 bp, Saccharomyces pastorianus
atgcatgcccatttcgataggaaaa

SEQ ID NO: 120936 - DNA, 25 bp, Saccharomyces pastorianus
ttaagcccgttaccgtaaatgtcat

SEQ ID NO: 120937 - DNA, 25 bp, Saccharomyces pastorianus
cccgttaccgtaaatgtcattcgat

SEQ ID NO: 120938 - DNA, 25 bp, Saccharomyces pastorianus
gcatgcccatttcgataggaaaatc

SEQ ID NO: 120939 - DNA, 25 bp, Saccharomyces pastorianus
atgtcattcgatactgtttacagtt

SEQ ID NO: 120940 - DNA, 25 bp, Saccharomyces pastorianus
gcccgttaccgtaaatgtcattcga

SEQ ID NO: 120941 - DNA, 25 bp, Saccharomyces pastorianus
gttaccgtaaatgtcattcgatact

SEQ ID NO: 120942 - DNA, 25 bp, Saccharomyces pastorianus
gcccatttcgataggaaaatcttga

SEQ ID NO: 120943 - DNA, 25 bp, Saccharomyces pastorianus
taagcccgttaccgtaaatgtcatt

SEQ ID NO: 120944 - DNA, 25 bp, Saccharomyces pastorianus
agcccgttaccgtaaatgtcattcg

SEQ ID NO: 120945 - DNA, 25 bp, Saccharomyces pastorianus
aaatgtcattcgatactgtttacag

SEQ ID NO: 120946 - DNA, 25 bp, Saccharomyces pastorianus
ccttttggcgttgattcttttgtct

SEQ ID NO: 120947 - DNA, 25 bp, Saccharomyces pastorianus
gatgagcccactggaatccaacagt

SEQ ID NO: 120948 - DNA, 25 bp, Saccharomyces pastorianus
attcattcttcgtttccgatgagcc

SEQ ID NO: 120949 - DNA, 25 bp, Saccharomyces pastorianus
taaacagatcgaccttcaagccaac

SEQ ID NO: 120950 - DNA, 25 bp, Saccharomyces pastorianus
ttgggagaagctcacaattccagta

SEQ ID NO: 120951 - DNA, 25 bp, Saccharomyces pastorianus
gaatctcatagtcagttcgtcgcga

SEQ ID NO: 120952 - DNA, 25 bp, Saccharomyces pastorianus
tggagctccaccgaatgattcattc

SEQ ID NO: 120953 - DNA, 25 bp, Saccharomyces pastorianus
tgtctggaactgtaagccgcttgtt

SEQ ID NO: 120954 - DNA, 25 bp, Saccharomyces pastorianus
gctaccatctttgccactgaaataa

SEQ ID NO: 120955 - DNA, 25 bp, Saccharomyces pastorianus
cagttcgtcgcgaggctcattaaat

SEQ ID NO: 120956 - DNA, 25 bp, Saccharomyces pastorianus
tgatgtgccacttttattgcctaaa

SEQ ID NO: 120957 - DNA, 25 bp, Saccharomyces pastorianus
gctcacccgtttccagtagtgaatt

SEQ ID NO: 120958 - DNA, 25 bp, Saccharomyces pastorianus
cccgtttccagtagtgaattttcat

SEQ ID NO: 120959 - DNA, 25 bp, Saccharomyces pastorianus
tttctgtacgaaggcaatataagct

SEQ ID NO: 120960 - DNA, 25 bp, Saccharomyces pastorianus
atgctggttcccatgcataactcac

SEQ ID NO: 120961 - DNA, 25 bp, Saccharomyces pastorianus
aacggccgcttatcacttactgtcg

SEQ ID NO: 120962 - DNA, 25 bp, Saccharomyces pastorianus
gccagctccggtcttagaaagggta

SEQ ID NO: 120963 - DNA, 25 bp, Saccharomyces pastorianus
aaaccgggtgtatactatacactca

SEQ ID NO: 120964 - DNA, 25 bp, Saccharomyces pastorianus
tactatacactcatacatccgctca

SEQ ID NO: 120965 - DNA, 25 bp, Saccharomyces pastorianus
tcgccagctccggtcttagaaaggg

SEQ ID NO: 120966 - DNA, 25 bp, Saccharomyces pastorianus
gcttatcacttactgtcgccagctc

SEQ ID NO: 120967 - DNA, 25 bp, Saccharomyces pastorianus
tagtgaattttcattttctgtacga

SEQ ID NO: 120968 - DNA, 25 bp, Saccharomyces pastorianus
gctccattaacgaagcttgctaaaa

SEQ ID NO: 120969 - DNA, 25 bp, Saccharomyces pastorianus
ggaagaaacttctcaagctttaaca

SEQ ID NO: 120970 - DNA, 25 bp, Saccharomyces pastorianus
gttggcattgaattactagcaggca

SEQ ID NO: 120971 - DNA, 25 bp, Saccharomyces pastorianus
caggcatagtgttctttgacggcga

SEQ ID NO: 120972 - DNA, 25 bp, Saccharomyces pastorianus
tattgtaccaaatcatgctccatta

SEQ ID NO: 120973 - DNA, 25 bp, Saccharomyces pastorianus
gctttaacaagcgatggttggttca

SEQ ID NO: 120974 - DNA, 25 bp, Saccharomyces pastorianus
gaacggtgaatatatcgcactcgag

SEQ ID NO: 120975 - DNA, 25 bp, Saccharomyces pastorianus
aagctgtttattctgatcttttgaa

SEQ ID NO: 120976 - DNA, 25 bp, Saccharomyces pastorianus
agaaattagagtccgtttacagatc

SEQ ID NO: 120977 - DNA, 25 bp, Saccharomyces pastorianus
gtgtttatgccgaccaatctaagac

SEQ ID NO: 120978 - DNA, 25 bp, Saccharomyces pastorianus
ggttttgttacgtccgctcagaaat

SEQ ID NO: 120979 - DNA, 25 bp, Saccharomyces pastorianus
ggacatgattctacctattgctaag

SEQ ID NO: 120980 - DNA, 25 bp, Saccharomyces pastorianus
gaattactgttgattatgccttcaa

SEQ ID NO: 120981 - DNA, 25 bp, Saccharomyces pastorianus
ttcgtcaagtaaccaattctacagg

SEQ ID NO: 120982 - DNA, 25 bp, Saccharomyces pastorianus
tggtaagctcataagggaacccgaa

SEQ ID NO: 120983 - DNA, 25 bp, Saccharomyces pastorianus
ccaaggctacgcattcatcgaattt

SEQ ID NO: 120984 - DNA, 25 bp, Saccharomyces pastorianus
aaaccttgcagattcgatagatagc

SEQ ID NO: 120985 - DNA, 25 bp, Saccharomyces pastorianus
gtgatgacgttgacaggctgttgaa

SEQ ID NO: 120986 - DNA, 25 bp, Saccharomyces pastorianus
gaactcttcattcagatcaaccctg

SEQ ID NO: 120987 - DNA, 25 bp, Saccharomyces pastorianus
gaacaatcagttagtcgccaacaac

SEQ ID NO: 120988 - DNA, 25 bp, Saccharomyces pastorianus
cgaccgactgataaaggttcgtcaa

SEQ ID NO: 120989 - DNA, 25 bp, Saccharomyces pastorianus
gttctacaagcttaccaaggctacg

SEQ ID NO: 120990 - DNA, 25 bp, Saccharomyces pastorianus
ttcggattatccattggccaagccc

SEQ ID NO: 120991 - DNA, 25 bp, Saccharomyces pastorianus
gtgaacgttatgctgcccaagattt

SEQ ID NO: 120992 - DNA, 25 bp, Saccharomyces pastorianus
tgacctttggaactcggtgtacgct

SEQ ID NO: 120993 - DNA, 25 bp, Saccharomyces pastorianus
aatgatggcaacgatattccggtag

SEQ ID NO: 120994 - DNA, 25 bp, Saccharomyces pastorianus
aggtacggcttactgacgggttcat

SEQ ID NO: 120995 - DNA, 25 bp, Saccharomyces pastorianus
tagagcaccaagcttgtgacctttg

SEQ ID NO: 120996 - DNA, 25 bp, Saccharomyces pastorianus
gaaacccacggcactattctataat

SEQ ID NO: 120997 - DNA, 25 bp, Saccharomyces pastorianus
ttggccaagccctggaattatccat

SEQ ID NO: 120998 - DNA, 25 bp, Saccharomyces pastorianus
agttctacatcatctttatcgccgt

SEQ ID NO: 120999 - DNA, 25 bp, Saccharomyces pastorianus
acgacagtgtcgcatattctaagta

SEQ ID NO: 121000 - DNA, 25 bp, Saccharomyces pastorianus
ttatcgccgttatttgatttccaaa

SEQ ID NO: 121001 - DNA, 25 bp, Saccharomyces pastorianus
gggtagtgtaccttttcgtggacat

SEQ ID NO: 121002 - DNA, 25 bp, Saccharomyces pastorianus
tttaccaagatgtcgagttgctctc

SEQ ID NO: 121003 - DNA, 25 bp, Saccharomyces pastorianus
gccaccatgttacgagctctctata

SEQ ID NO: 121004 - DNA, 25 bp, Saccharomyces pastorianus
atagtgagtgttcccactggtgcag

SEQ ID NO: 121005 - DNA, 25 bp, Saccharomyces pastorianus
agtacagtcaccaccactggaaagt

SEQ ID NO: 121006 - DNA, 25 bp, Saccharomyces pastorianus
ggcatctaacggtgctagtagctct

SEQ ID NO: 121007 - DNA, 25 bp, Saccharomyces pastorianus
gtgttgacaccacatagcacaagag

SEQ ID NO: 121008 - DNA, 25 bp, Saccharomyces pastorianus
gaagaagttcctcccatttaccaag

SEQ ID NO: 121009 - DNA, 25 bp, Saccharomyces pastorianus
gctcgaacctggtcctaacgtacag

SEQ ID NO: 121010 - DNA, 25 bp, Saccharomyces pastorianus
aaagatcccttaccacagtacagtc

SEQ ID NO: 121011 - DNA, 25 bp, Saccharomyces pastorianus
gggcctgaagatataacaccggtga

SEQ ID NO: 121012 - DNA, 25 bp, Saccharomyces pastorianus
tacctctaagattcacgcccgtggt

SEQ ID NO: 121013 - DNA, 25 bp, Saccharomyces pastorianus
gcttggacggtctggtgagttatca

SEQ ID NO: 121014 - DNA, 25 bp, Saccharomyces pastorianus
tgacggccaggttgctagtgactac

SEQ ID NO: 121015 - DNA, 25 bp, Saccharomyces pastorianus
ggctgccaagtttgttacatctaca

SEQ ID NO: 121016 - DNA, 25 bp, Saccharomyces pastorianus
gctgaagtgggtatttctacctcta

SEQ ID NO: 121017 - DNA, 25 bp, Saccharomyces pastorianus
ttatgaagggtgtcgactcctctgg

SEQ ID NO: 121018 - DNA, 25 bp, Saccharomyces pastorianus
cgactcctctggtgtttactggaat

SEQ ID NO: 121019 - DNA, 25 bp, Saccharomyces pastorianus
ttttatccttggatttggctgccaa

SEQ ID NO: 121020 - DNA, 25 bp, Saccharomyces pastorianus
gagacataccgacgctattgtaacg

SEQ ID NO: 121021 - DNA, 25 bp, Saccharomyces pastorianus
tgcaaagactaactacccagctggt

SEQ ID NO: 121022 - DNA, 25 bp, Saccharomyces pastorianus
gaaggcggagtgactatccacgcta

SEQ ID NO: 121023 - DNA, 25 bp, Saccharomyces pastorianus
accttgcgaaccacggtgattgatc

SEQ ID NO: 121024 - DNA, 25 bp, Saccharomyces pastorianus
acctgtataggtatttcatcattga

SEQ ID NO: 121025 - DNA, 25 bp, Saccharomyces pastorianus
gatcttctatcaggagagttaaccc

SEQ ID NO: 121026 - DNA, 25 bp, Saccharomyces pastorianus
aatcagactttgacgaggatgacaa

SEQ ID NO: 121027 - DNA, 25 bp, Saccharomyces pastorianus
actcctgattctagctcaaactcta

SEQ ID NO: 121028 - DNA, 25 bp, Saccharomyces pastorianus
gaacaataataatggctccgcagcc

SEQ ID NO: 121029 - DNA, 25 bp, Saccharomyces pastorianus
gaacaacacgaaatccatctacctg

SEQ ID NO: 121030 - DNA, 25 bp, Saccharomyces pastorianus
ttagacgaaatgaccaccttgcgaa

SEQ ID NO: 121031 - DNA, 25 bp, Saccharomyces pastorianus
tgggcggctttatcgtttacgtcaa

SEQ ID NO: 121032 - DNA, 25 bp, Saccharomyces pastorianus
taaacataagtcctctctaagggaa

SEQ ID NO: 121033 - DNA, 25 bp, Saccharomyces pastorianus
ttgcatttcttttgatgggcggctt

SEQ ID NO: 121034 - DNA, 25 bp, Saccharomyces pastorianus
ttgggaccaccggattatcattcac

SEQ ID NO: 121035 - DNA, 25 bp, Saccharomyces pastorianus
ttagcttgtagaggttccggctgcg

SEQ ID NO: 121036 - DNA, 25 bp, Saccharomyces pastorianus
agggtacagttcctcgatccgggat

SEQ ID NO: 121037 - DNA, 25 bp, Saccharomyces pastorianus
acaggtaagctagtcatttccaatg

SEQ ID NO: 121038 - DNA, 25 bp, Saccharomyces pastorianus
aatgaacgttgtcgtaccccatgtg

SEQ ID NO: 121039 - DNA, 25 bp, Saccharomyces pastorianus
gtgccctattctttgtcacatataa

SEQ ID NO: 121040 - DNA, 25 bp, Saccharomyces pastorianus
gttttggtcgatcccaggacaggta

SEQ ID NO: 121041 - DNA, 25 bp, Saccharomyces pastorianus
ttacttcagtgcttggtcttgggac

SEQ ID NO: 121042 - DNA, 25 bp, Saccharomyces pastorianus
ttcttcccttacaaaagcctcttgg

SEQ ID NO: 121043 - DNA, 25 bp, Saccharomyces pastorianus
gaccggattcttttatcttcactgc

SEQ ID NO: 121044 - DNA, 25 bp, Saccharomyces pastorianus
aaatgtctcctatcatgcagcgcag

SEQ ID NO: 121045 - DNA, 25 bp, Saccharomyces pastorianus
gaatttgttattcgctgacacctgc

SEQ ID NO: 121046 - DNA, 25 bp, Saccharomyces pastorianus
gttccatgctgtagtcacaacctta

SEQ ID NO: 121047 - DNA, 25 bp, Saccharomyces pastorianus
gactatgagtctccaattccacagg

SEQ ID NO: 121048 - DNA, 25 bp, Saccharomyces pastorianus
atttgattcagaccgctaagctact

SEQ ID NO: 121049 - DNA, 25 bp, Saccharomyces pastorianus
gctgcgttatcttcatcaggtaatg

SEQ ID NO: 121050 - DNA, 25 bp, Saccharomyces pastorianus
tttatcactccagaaacaggtccat

SEQ ID NO: 121051 - DNA, 25 bp, Saccharomyces pastorianus
gacgcatggcttgacagatggtact

SEQ ID NO: 121052 - DNA, 25 bp, Saccharomyces pastorianus
atataccagcgtggttatccttgcc

SEQ ID NO: 121053 - DNA, 25 bp, Saccharomyces pastorianus
gatggtactgagtgcctacaacatt

SEQ ID NO: 121054 - DNA, 25 bp, Saccharomyces pastorianus
gggtcacgagcatagcagcagtata

SEQ ID NO: 121055 - DNA, 25 bp, Saccharomyces pastorianus
gttatccttgccctcaactaagaga

SEQ ID NO: 121056 - DNA, 25 bp, Saccharomyces pastorianus
aattcccaaaacaagactgctgctt

SEQ ID NO: 121057 - DNA, 25 bp, Saccharomyces pastorianus
catccattgaggacaaagctgataa

SEQ ID NO: 121058 - DNA, 25 bp, Saccharomyces pastorianus
ttgctgaacgtggtgaaaggctaac

SEQ ID NO: 121059 - DNA, 25 bp, Saccharomyces pastorianus
atccatatgtgcctccagaggagag

SEQ ID NO: 121060 - DNA, 25 bp, Saccharomyces pastorianus
gactgctgctttgagacaagagatt

SEQ ID NO: 121061 - DNA, 25 bp, Saccharomyces pastorianus
ataacttggctatctccgcacaagg

SEQ ID NO: 121062 - DNA, 25 bp, Saccharomyces pastorianus
aagagattgatgacacggtgggaat

SEQ ID NO: 121063 - DNA, 25 bp, Saccharomyces pastorianus
gagagtaactcaggcgcaaacccaa

SEQ ID NO: 121064 - DNA, 25 bp, Saccharomyces pastorianus
agctgataacttggctatctccgca

SEQ ID NO: 121065 - DNA, 25 bp, Saccharomyces pastorianus
gaatgtgtctattcttagttgttat

SEQ ID NO: 121066 - DNA, 25 bp, Saccharomyces pastorianus
tgaaaggctaacatccattgaggac

SEQ ID NO: 121067 - DNA, 25 bp, Saccharomyces pastorianus
atggtggccaactttctcaaatgca

SEQ ID NO: 121068 - DNA, 25 bp, Saccharomyces pastorianus
gaacaatactcaatctcatcagacg

SEQ ID NO: 121069 - DNA, 25 bp, Saccharomyces pastorianus
ttcaatctttactttcttcttcacc

SEQ ID NO: 121070 - DNA, 25 bp, Saccharomyces pastorianus
ggtaacttgcagtcattgcagcagc

SEQ ID NO: 121071 - DNA, 25 bp, Saccharomyces pastorianus
gtgccacctcaacatatgtactcta

SEQ ID NO: 121072 - DNA, 25 bp, Saccharomyces pastorianus
gctagggcagcaagttcatcaacag

SEQ ID NO: 121073 - DNA, 25 bp, Saccharomyces pastorianus
agcagaataacttggtgccgaccca

SEQ ID NO: 121074 - DNA, 25 bp, Saccharomyces pastorianus
gccatcaaatgcgtctactgttaat

SEQ ID NO: 121075 - DNA, 25 bp, Saccharomyces pastorianus
atcagacgtatattcagcagcaaca

SEQ ID NO: 121076 - DNA, 25 bp, Saccharomyces pastorianus
ttttgtcacctcagaatgctgctaa

SEQ ID NO: 121077 - DNA, 25 bp, Saccharomyces pastorianus
acagcagcagcaatttccattcact

SEQ ID NO: 121078 - DNA, 25 bp, Saccharomyces pastorianus
tagctaacgagaagatgcagataat

SEQ ID NO: 121079 - DNA, 25 bp, Saccharomyces pastorianus
gagcctgcaatgatctataaaatct

SEQ ID NO: 121080 - DNA, 25 bp, Saccharomyces pastorianus
catgtaaaatttatcgagcctgcaa

SEQ ID NO: 121081 - DNA, 25 bp, Saccharomyces pastorianus
gatgcagataatttgggttttgaat

SEQ ID NO: 121082 - DNA, 25 bp, Saccharomyces pastorianus
tcgagcctgcaatgatctataaaat

SEQ ID NO: 121083 - DNA, 25 bp, Saccharomyces pastorianus
gatctataaaatcttagctaacgag

SEQ ID NO: 121084 - DNA, 25 bp, Saccharomyces pastorianus
aatttatcgagcctgcaatgatcta

SEQ ID NO: 121085 - DNA, 25 bp, Saccharomyces pastorianus
gttaccatgtaaaatttatcgagcc

SEQ ID NO: 121086 - DNA, 25 bp, Saccharomyces pastorianus
gtaaaatttatcgagcctgcaatga

SEQ ID NO: 121087 - DNA, 25 bp, Saccharomyces pastorianus
ttatcgagcctgcaatgatctataa

SEQ ID NO: 121088 - DNA, 25 bp, Saccharomyces pastorianus
ttcctattttgaattctaccttttg

SEQ ID NO: 121089 - DNA, 25 bp, Saccharomyces pastorianus
tagctaacgagaagatgcagataat

SEQ ID NO: 121090 - DNA, 25 bp, Saccharomyces pastorianus
tgggttttgaattcctattttgaat

SEQ ID NO: 121091 - DNA, 25 bp, Saccharomyces pastorianus
gatgcagataatttgggttttgaat

SEQ ID NO: 121092 - DNA, 25 bp, Saccharomyces pastorianus
atttatcgagcctgcaatgatctat

SEQ ID NO: 121093 - DNA, 25 bp, Saccharomyces pastorianus
tcctattttgaattctaccttttgt

SEQ ID NO: 121094 - DNA, 25 bp, Saccharomyces pastorianus
tcgagcctgcaatgatctataaaat

SEQ ID NO: 121095 - DNA, 25 bp, Saccharomyces pastorianus
taatgttaactctttttctaatagg

SEQ ID NO: 121096 - DNA, 25 bp, Saccharomyces pastorianus
gatctataaaatcttagctaacgag

SEQ ID NO: 121097 - DNA, 25 bp, Saccharomyces pastorianus
gtaaaatttatcgagcctgcaatga

SEQ ID NO: 121098 - DNA, 25 bp, Saccharomyces pastorianus
gttaccatgtaaaatttatcgagcc

SEQ ID NO: 121099 - DNA, 25 bp, Saccharomyces pastorianus
gggcaacttacttttgttttctcat

SEQ ID NO: 121100 - DNA, 25 bp, Saccharomyces pastorianus
aatacgctagagatgggaacactgc

SEQ ID NO: 121101 - DNA, 25 bp, Saccharomyces pastorianus
gagtacagcctcctagactatataa

SEQ ID NO: 121102 - DNA, 25 bp, Saccharomyces pastorianus
ggaacactgcagagtacagcctcct

SEQ ID NO: 121103 - DNA, 25 bp, Saccharomyces pastorianus
gctaacgattcagcaatcccagaaa

SEQ ID NO: 121104 - DNA, 25 bp, Saccharomyces pastorianus
ttgccggcaaggaagtcaagcacta

SEQ ID NO: 121105 - DNA, 25 bp, Saccharomyces pastorianus
agaataccacgcctatggaaaggaa

SEQ ID NO: 121106 - DNA, 25 bp, Saccharomyces pastorianus
aaatgccaaagctgatcaacgaatc

SEQ ID NO: 121107 - DNA, 25 bp, Saccharomyces pastorianus
gatggagtgattgacgacgttctga

SEQ ID NO: 121108 - DNA, 25 bp, Saccharomyces pastorianus
aatcagattacctgtcaatatgcca

SEQ ID NO: 121109 - DNA, 25 bp, Saccharomyces pastorianus
gaacggcatcatcatcgccaataag

SEQ ID NO: 121110 - DNA, 25 bp, Saccharomyces pastorianus
aatatgccagattatcccacacttc

SEQ ID NO: 121111 - DNA, 25 bp, Saccharomyces pastorianus
gaggttgaaggttctttctgctcgt

SEQ ID NO: 121112 - DNA, 25 bp, Saccharomyces pastorianus
cccagcgcgcaccattggaagagat

SEQ ID NO: 121113 - DNA, 25 bp, Saccharomyces pastorianus
acctaaggcgattgtcaaggctctt

SEQ ID NO: 121114 - DNA, 25 bp, Saccharomyces pastorianus
ttctgctcgtgaacagtcgctagac

SEQ ID NO: 121115 - DNA, 25 bp, Saccharomyces pastorianus
gcccgccatcagattggaattgtat

SEQ ID NO: 121116 - DNA, 25 bp, Saccharomyces pastorianus
gaaggccatgctttcgcaacagatt

SEQ ID NO: 121117 - DNA, 25 bp, Saccharomyces pastorianus
gtggtctccaatgcatcagacaaga

SEQ ID NO: 121118 - DNA, 25 bp, Saccharomyces pastorianus
ggaattgccaacaaccgggacgagt

SEQ ID NO: 121119 - DNA, 25 bp, Saccharomyces pastorianus
tttccggcggtgttgtggtctccaa

SEQ ID NO: 121120 - DNA, 25 bp, Saccharomyces pastorianus
ggacgagtacaagcccattttgcaa

SEQ ID NO: 121121 - DNA, 25 bp, Saccharomyces pastorianus
ggctcttttgaagttgttggaacct

SEQ ID NO: 121122 - DNA, 25 bp, Saccharomyces pastorianus
gaccatttaggaaacttctcggaca

SEQ ID NO: 121123 - DNA, 25 bp, Saccharomyces pastorianus
ggtcttccaaaagttattctcgaca

SEQ ID NO: 121124 - DNA, 25 bp, Saccharomyces pastorianus
gacgccgattcatgagatgcttgat

SEQ ID NO: 121125 - DNA, 25 bp, Saccharomyces pastorianus
gacattgagataatatttcccttag

SEQ ID NO: 121126 - DNA, 25 bp, Saccharomyces pastorianus
gaaatggcgtgtttggtcttccaaa

SEQ ID NO: 121127 - DNA, 25 bp, Saccharomyces pastorianus
acagtttggcttacacatgatggtt

SEQ ID NO: 121128 - DNA, 25 bp, Saccharomyces pastorianus
ggatgtgtcagcatactttctaaga

SEQ ID NO: 121129 - DNA, 25 bp, Saccharomyces pastorianus
tagaacgtaccaggagacgccgatt

SEQ ID NO: 121130 - DNA, 25 bp, Saccharomyces pastorianus
aatgggcttcaacgatagtaactgt

SEQ ID NO: 121131 - DNA, 25 bp, Saccharomyces pastorianus
agttatctattttcctcaggtctct

SEQ ID NO: 121132 - DNA, 25 bp, Saccharomyces pastorianus
aactgtttccgcaatatggtgctgt

SEQ ID NO: 121133 - DNA, 25 bp, Saccharomyces pastorianus
ttcacagtagcatctgttctgccgg

SEQ ID NO: 121134 - DNA, 25 bp, Saccharomyces pastorianus
aacatcagcgtctattgccttgaca

SEQ ID NO: 121135 - DNA, 25 bp, Saccharomyces pastorianus
gtgtctgccctttatatcaccaaga

SEQ ID NO: 121136 - DNA, 25 bp, Saccharomyces pastorianus
gctactttatggcagcagctacact

SEQ ID NO: 121137 - DNA, 25 bp, Saccharomyces pastorianus
gcaaactccagtgtgtatcctaaaa

SEQ ID NO: 121138 - DNA, 25 bp, Saccharomyces pastorianus
gatgaccatgtatccaaactcaccc

SEQ ID NO: 121139 - DNA, 25 bp, Saccharomyces pastorianus
gagacgtactacacccaatgtgatg

SEQ ID NO: 121140 - DNA, 25 bp, Saccharomyces pastorianus
gtggtattttctattgtgtctgccc

SEQ ID NO: 121141 - DNA, 25 bp, Saccharomyces pastorianus
gcagcggttgggagtgctactttat

SEQ ID NO: 121142 - DNA, 25 bp, Saccharomyces pastorianus
gttctgccggcattctatggtatga

SEQ ID NO: 121143 - DNA, 25 bp, Saccharomyces pastorianus
gttaccatctacacgttgggattca

SEQ ID NO: 121144 - DNA, 25 bp, Saccharomyces pastorianus
gaaaaatgtcttcacttcatcaaga

SEQ ID NO: 121145 - DNA, 25 bp, Saccharomyces pastorianus
aaatgtcttcacttcatcaagagtt

SEQ ID NO: 121146 - DNA, 25 bp, Saccharomyces pastorianus
agcattctcattggtttcgaaaaat

SEQ ID NO: 121147 - DNA, 25 bp, Saccharomyces pastorianus
gagcattctcattggtttcgaaaaa

SEQ ID NO: 121148 - DNA, 25 bp, Saccharomyces pastorianus
aaaaatgtcttcacttcatcaagag

SEQ ID NO: 121149 - DNA, 25 bp, Saccharomyces pastorianus
attctcattggtttcgaaaaatgtc

SEQ ID NO: 121150 - DNA, 25 bp, Saccharomyces pastorianus
aatgtcttcacttcatcaagagttt

SEQ ID NO: 121151 - DNA, 25 bp, Saccharomyces pastorianus
gcattctcattggtttcgaaaaatg

SEQ ID NO: 121152 - DNA, 25 bp, Saccharomyces pastorianus
cgaaaaatgtcttcacttcatcaag

SEQ ID NO: 121153 - DNA, 25 bp, Saccharomyces pastorianus
tctcattggtttcgaaaaatgtctt

SEQ ID NO: 121154 - DNA, 25 bp, Saccharomyces pastorianus
aaaatgtcttcacttcatcaagagt

SEQ ID NO: 121155 - DNA, 25 bp, Saccharomyces pastorianus
gtattgctactacatagtgcggctc

SEQ ID NO: 121156 - DNA, 25 bp, Saccharomyces pastorianus
atagtgcggctcacctttaacaagc

SEQ ID NO: 121157 - DNA, 25 bp, Saccharomyces pastorianus
tttcaatcacatcttctacacacaa

SEQ ID NO: 121158 - DNA, 25 bp, Saccharomyces pastorianus
ttcactctcccacgaaattgacgat

SEQ ID NO: 121159 - DNA, 25 bp, Saccharomyces pastorianus
aaactacacgcacgatttttcactc

SEQ ID NO: 121160 - DNA, 25 bp, Saccharomyces pastorianus
ggagacaatctctaccggaattttt

SEQ ID NO: 121161 - DNA, 25 bp, Saccharomyces pastorianus
agaccccactatatcttacttctgg

SEQ ID NO: 121162 - DNA, 25 bp, Saccharomyces pastorianus
gaaacctttaccaactttactcatg

SEQ ID NO: 121163 - DNA, 25 bp, Saccharomyces pastorianus
tttactcatgcctgttggccatcaa

SEQ ID NO: 121164 - DNA, 25 bp, Saccharomyces pastorianus
tacacacaactatatcccgcatatg

SEQ ID NO: 121165 - DNA, 25 bp, Saccharomyces pastorianus
gatacgttccagtgagcaagactca

SEQ ID NO: 121166 - DNA, 25 bp, Saccharomyces pastorianus
attacaggccctaaagacacaccgt

SEQ ID NO: 121167 - DNA, 25 bp, Saccharomyces pastorianus
gtattagtgcgtttcccgtagacga

SEQ ID NO: 121168 - DNA, 25 bp, Saccharomyces pastorianus
gtggttgcgtgacgaaacgtttaca

SEQ ID NO: 121169 - DNA, 25 bp, Saccharomyces pastorianus
cgctgtggcagcagaactttgggat

SEQ ID NO: 121170 - DNA, 25 bp, Saccharomyces pastorianus
aattctattgtcattgcagtcatta

SEQ ID NO: 121171 - DNA, 25 bp, Saccharomyces pastorianus
tgcagtcattacttggcgaaccaaa

SEQ ID NO: 121172 - DNA, 25 bp, Saccharomyces pastorianus
agctgctacagctacttagttctac

SEQ ID NO: 121173 - DNA, 25 bp, Saccharomyces pastorianus
aataacagatctccgctgaacgctg

SEQ ID NO: 121174 - DNA, 25 bp, Saccharomyces pastorianus
tatcctttccatccgccaatgatta

SEQ ID NO: 121175 - DNA, 25 bp, Saccharomyces pastorianus
ggcaacatttgtttggacatcctga

SEQ ID NO: 121176 - DNA, 25 bp, Saccharomyces pastorianus
gacacaccgtatagtggacttaaat

SEQ ID NO: 121177 - DNA, 25 bp, Saccharomyces pastorianus
ggacctttgtccataacgacgtgga

SEQ ID NO: 121178 - DNA, 25 bp, Saccharomyces pastorianus
atctttgggccactgggtagattct

SEQ ID NO: 121179 - DNA, 25 bp, Saccharomyces pastorianus
tcctttggaaacagatctttgggcc

SEQ ID NO: 121180 - DNA, 25 bp, Saccharomyces pastorianus
ggtcttttgattcatgatgcgttta

SEQ ID NO: 121181 - DNA, 25 bp, Saccharomyces pastorianus
ggcaatggctataacagctcccgtt

SEQ ID NO: 121182 - DNA, 25 bp, Saccharomyces pastorianus
aatggttcagagatcgtatacgagg

SEQ ID NO: 121183 - DNA, 25 bp, Saccharomyces pastorianus
tatccctgtggattggacctttgtc

SEQ ID NO: 121184 - DNA, 25 bp, Saccharomyces pastorianus
cgcctcacacattggtcttttgatt

SEQ ID NO: 121185 - DNA, 25 bp, Saccharomyces pastorianus
gagagccacaaggaactagacttac

SEQ ID NO: 121186 - DNA, 25 bp, Saccharomyces pastorianus
gtacattaataagtgacgccgacga

SEQ ID NO: 121187 - DNA, 25 bp, Saccharomyces pastorianus
gatgcgtttaatgctagtatcaaaa

SEQ ID NO: 121188 - DNA, 25 bp, Saccharomyces pastorianus
acagtccttccgctagaattgtggt

SEQ ID NO: 121189 - DNA, 25 bp, Saccharomyces pastorianus
aattcttgaccaaggctgttctaga

SEQ ID NO: 121190 - DNA, 25 bp, Saccharomyces pastorianus
gagcgtgaacaattggacagtcctt

SEQ ID NO: 121191 - DNA, 25 bp, Saccharomyces pastorianus
gatgttgctgctgtgttgaaaacgt

SEQ ID NO: 121192 - DNA, 25 bp, Saccharomyces pastorianus
gtcttctctcgttatgctatttctg

SEQ ID NO: 121193 - DNA, 25 bp, Saccharomyces pastorianus
tacttacttagcctttaacagacag

SEQ ID NO: 121194 - DNA, 25 bp, Saccharomyces pastorianus
tattgaccgttgtgttcatccagaa

SEQ ID NO: 121195 - DNA, 25 bp, Saccharomyces pastorianus
acggaaaacgtgtccttgtcacaga

SEQ ID NO: 121196 - DNA, 25 bp, Saccharomyces pastorianus
gacagattcctcatattgaccgttg

SEQ ID NO: 121197 - DNA, 25 bp, Saccharomyces pastorianus
gaccttattgctgacatgatgacca

SEQ ID NO: 121198 - DNA, 25 bp, Saccharomyces pastorianus
ggaaacatccacttcatctttcatg

SEQ ID NO: 121199 - DNA, 25 bp, Saccharomyces pastorianus
gtgacgaccagaatatcatgcgatc

SEQ ID NO: 121200 - DNA, 25 bp, Saccharomyces pastorianus
cctttgcgtccccaatatcgaaagt

SEQ ID NO: 121201 - DNA, 25 bp, Saccharomyces pastorianus
gaaatgcgtatgttcaattcgacca

SEQ ID NO: 121202 - DNA, 25 bp, Saccharomyces pastorianus
gttctctcagaaaacggcagcaccg

SEQ ID NO: 121203 - DNA, 25 bp, Saccharomyces pastorianus
aatcacggcgaaccattaactccac

SEQ ID NO: 121204 - DNA, 25 bp, Saccharomyces pastorianus
tcaaatactctatcgctcaaggcgg

SEQ ID NO: 121205 - DNA, 25 bp, Saccharomyces pastorianus
atgggccacaggatttatcaactat

SEQ ID NO: 121206 - DNA, 25 bp, Saccharomyces pastorianus
gaagtttcaagtcttcaacgaccta

SEQ ID NO: 121207 - DNA, 25 bp, Saccharomyces pastorianus
gcctaggttcgcaaaagggtcgcaa

SEQ ID NO: 121208 - DNA, 25 bp, Saccharomyces pastorianus
aggccctccaattcgttaagtctat

SEQ ID NO: 121209 - DNA, 25 bp, Saccharomyces pastorianus
aattcgaccatccaagtgactcagt

SEQ ID NO: 121210 - DNA, 25 bp, Saccharomyces pastorianus
aagacggcgcagaaactgccgctac

SEQ ID NO: 121211 - DNA, 25 bp, Saccharomyces pastorianus
agtaatccttcctcatactcgcatt

SEQ ID NO: 121212 - DNA, 25 bp, Saccharomyces pastorianus
tggcagattttgaaccggcttcttt

SEQ ID NO: 121213 - DNA, 25 bp, Saccharomyces pastorianus
gaaccggcttctttgcaattaatgc

SEQ ID NO: 121214 - DNA, 25 bp, Saccharomyces pastorianus
gactgcagcagattatcccatgggt

SEQ ID NO: 121215 - DNA, 25 bp, Saccharomyces pastorianus
atgacgataataccccacttaagaa

SEQ ID NO: 121216 - DNA, 25 bp, Saccharomyces pastorianus
atctgccgctgctacaagcacgaag

SEQ ID NO: 121217 - DNA, 25 bp, Saccharomyces pastorianus
ttctcccgaggttagcagctcgata

SEQ ID NO: 121218 - DNA, 25 bp, Saccharomyces pastorianus
gaggaatctgctctttttccaacag

SEQ ID NO: 121219 - DNA, 25 bp, Saccharomyces pastorianus
aacagatcagtttttcagtaatcct

SEQ ID NO: 121220 - DNA, 25 bp, Saccharomyces pastorianus
gacaatgccctttcgttggcagatt

SEQ ID NO: 121221 - DNA, 25 bp, Saccharomyces pastorianus
gatcattcaggcttccaaacgtggg

SEQ ID NO: 121222 - DNA, 25 bp, Saccharomyces pastorianus
agtccatttagctcttcatttatca

SEQ ID NO: 121223 - DNA, 25 bp, Saccharomyces pastorianus
aaattccaaaatctgacacggttca

SEQ ID NO: 121224 - DNA, 25 bp, Saccharomyces pastorianus
aatgatttgcccagtactatggaag

SEQ ID NO: 121225 - DNA, 25 bp, Saccharomyces pastorianus
aaaggatttgccatttccagattag

SEQ ID NO: 121226 - DNA, 25 bp, Saccharomyces pastorianus
agggaattaaatctctgcacctttt

SEQ ID NO: 121227 - DNA, 25 bp, Saccharomyces pastorianus
gccaacccaagttcgagcagaagta

SEQ ID NO: 121228 - DNA, 25 bp, Saccharomyces pastorianus
atattccagccgatcaaattccaaa

SEQ ID NO: 121229 - DNA, 25 bp, Saccharomyces pastorianus
gtttatgaatgaactgccaacccaa

SEQ ID NO: 121230 - DNA, 25 bp, Saccharomyces pastorianus
aactttaggtgatggagggccgcat

SEQ ID NO: 121231 - DNA, 25 bp, Saccharomyces pastorianus
gaatccgggttgacttcaaactcat

SEQ ID NO: 121232 - DNA, 25 bp, Saccharomyces pastorianus
cagataacagatgacgtcggcgaat

SEQ ID NO: 121233 - DNA, 25 bp, Saccharomyces pastorianus
gtctgcaaaaactactctgattctg

SEQ ID NO: 121234 - DNA, 25 bp, Saccharomyces pastorianus
ttctctcgatgttgaaagtctgcaa

SEQ ID NO: 121235 - DNA, 25 bp, Saccharomyces pastorianus
taccaaacttactctactggcattg

SEQ ID NO: 121236 - DNA, 25 bp, Saccharomyces pastorianus
gaaatcggctatcaatttacctccc

SEQ ID NO: 121237 - DNA, 25 bp, Saccharomyces pastorianus
atggcgcctctcaagatatttctac

SEQ ID NO: 121238 - DNA, 25 bp, Saccharomyces pastorianus
agttttcgtggaggttgccaataca

SEQ ID NO: 121239 - DNA, 25 bp, Saccharomyces pastorianus
ggaatgaagctttatttaccgcaaa

SEQ ID NO: 121240 - DNA, 25 bp, Saccharomyces pastorianus
atttctgaatggctatccagcttag

SEQ ID NO: 121241 - DNA, 25 bp, Saccharomyces pastorianus
acttttcattgcctctttcatggcg

SEQ ID NO: 121242 - DNA, 25 bp, Saccharomyces pastorianus
tttgctgcggatgtatcctatgcaa

SEQ ID NO: 121243 - DNA, 25 bp, Saccharomyces pastorianus
tgtgcaataacgaaggccctaaact

SEQ ID NO: 121244 - DNA, 25 bp, Saccharomyces pastorianus
gttaacagggatctcgcctttttat

SEQ ID NO: 121245 - DNA, 25 bp, Saccharomyces pastorianus
gaatgcatactgtcgtaggcactcc

SEQ ID NO: 121246 - DNA, 25 bp, Saccharomyces pastorianus
gaatcgtcttggcagactttggtat

SEQ ID NO: 121247 - DNA, 25 bp, Saccharomyces pastorianus
tactgcgctccagaagttggattca

SEQ ID NO: 121248 - DNA, 25 bp, Saccharomyces pastorianus
atctttggtctttgggtgtcattac

SEQ ID NO: 121249 - DNA, 25 bp, Saccharomyces pastorianus
gtaggcactccggaatactgcgctc

SEQ ID NO: 121250 - DNA, 25 bp, Saccharomyces pastorianus
ggaagttacccaaaagcgttatcat

SEQ ID NO: 121251 - DNA, 25 bp, Saccharomyces pastorianus
gaaccgtgcactagaatcgtcttgg

SEQ ID NO: 121252 - DNA, 25 bp, Saccharomyces pastorianus
tgttatgtacgccagaaccgtgcac

SEQ ID NO: 121253 - DNA, 25 bp, Saccharomyces pastorianus
aagaccttttgcaaactgacgtagt

SEQ ID NO: 121254 - DNA, 25 bp, Saccharomyces pastorianus
tattgcccatgttccaaactcagac

SEQ ID NO: 121255 - DNA, 25 bp, Saccharomyces pastorianus
gacttcgtttggtattctattgccc

SEQ ID NO: 121256 - DNA, 25 bp, Saccharomyces pastorianus
aatccaaattcatctcttacgttga

SEQ ID NO: 121257 - DNA, 25 bp, Saccharomyces pastorianus
aagtccctaaaacgtcttcagccag

SEQ ID NO: 121258 - DNA, 25 bp, Saccharomyces pastorianus
aaacggctatgccagtcttactccg

SEQ ID NO: 121259 - DNA, 25 bp, Saccharomyces pastorianus
ggaatcccagggtatccatggttac

SEQ ID NO: 121260 - DNA, 25 bp, Saccharomyces pastorianus
attgccgacgatctcatcgattacg

SEQ ID NO: 121261 - DNA, 25 bp, Saccharomyces pastorianus
tagttattttggtcaagggtcctat

SEQ ID NO: 121262 - DNA, 25 bp, Saccharomyces pastorianus
actcttcttcatccttgacaggata

SEQ ID NO: 121263 - DNA, 25 bp, Saccharomyces pastorianus
cttactccgctgctgcaggatttaa

SEQ ID NO: 121264 - DNA, 25 bp, Saccharomyces pastorianus
agagacattgcccagattcccgaaa

SEQ ID NO: 121265 - DNA, 25 bp, Saccharomyces pastorianus
gtggtgccgcgaacagtagtgctaa

SEQ ID NO: 121266 - DNA, 25 bp, Saccharomyces pastorianus
aaattttgacggactcgctagcacc

SEQ ID NO: 121267 - DNA, 25 bp, Saccharomyces pastorianus
atgttaatataaccccaccaccgat

SEQ ID NO: 121268 - DNA, 25 bp, Saccharomyces pastorianus
gacgtgcctaatttgaatgagctga

SEQ ID NO: 121269 - DNA, 25 bp, Saccharomyces pastorianus
gtatctgacatctttggagaagctg

SEQ ID NO: 121270 - DNA, 25 bp, Saccharomyces pastorianus
tgagacctaacctagccaacttggc

SEQ ID NO: 121271 - DNA, 25 bp, Saccharomyces pastorianus
gatgtcactgtgatattggacttga

SEQ ID NO: 121272 - DNA, 25 bp, Saccharomyces pastorianus
atcgtaatgagcgacgtgcctaatt

SEQ ID NO: 121273 - DNA, 25 bp, Saccharomyces pastorianus
ggcgcatgaacctaaacagcatccg

SEQ ID NO: 121274 - DNA, 25 bp, Saccharomyces pastorianus
acagcatccggttatgacttcttca

SEQ ID NO: 121275 - DNA, 25 bp, Saccharomyces pastorianus
gtatcaaacgttgtccacagtagtt

SEQ ID NO: 121276 - DNA, 25 bp, Saccharomyces pastorianus
acgcccacaattcgatctattgcaa

SEQ ID NO: 121277 - DNA, 25 bp, Saccharomyces pastorianus
aaagcctttatttcagtgtgcccca

SEQ ID NO: 121278 - DNA, 25 bp, Saccharomyces pastorianus
aacttggccacatttgcacgcaata

SEQ ID NO: 121279 - DNA, 25 bp, Saccharomyces pastorianus
gagtacgttccctacatcgaaaagt

SEQ ID NO: 121280 - DNA, 25 bp, Saccharomyces pastorianus
ttcgtcccaaccctaaggatattca

SEQ ID NO: 121281 - DNA, 25 bp, Saccharomyces pastorianus
cgagccgattcgtcaactttacaaa

SEQ ID NO: 121282 - DNA, 25 bp, Saccharomyces pastorianus
aagtgtttccattaatcccaccgat

SEQ ID NO: 121283 - DNA, 25 bp, Saccharomyces pastorianus
gaaacgtggataatatgcctctaaa

SEQ ID NO: 121284 - DNA, 25 bp, Saccharomyces pastorianus
tgcagactttatttccgcagagttt

SEQ ID NO: 121285 - DNA, 25 bp, Saccharomyces pastorianus
taataagcctgacggcacagtggcg

SEQ ID NO: 121286 - DNA, 25 bp, Saccharomyces pastorianus
gcactaatgagggttttcgtcccaa

SEQ ID NO: 121287 - DNA, 25 bp, Saccharomyces pastorianus
aaatacttatgttactgccgctgcc

SEQ ID NO: 121288 - DNA, 25 bp, Saccharomyces pastorianus
attcacgtagctcttctgaactggc

SEQ ID NO: 121289 - DNA, 25 bp, Saccharomyces pastorianus
gagaatcaaacccaagttcccaaga

SEQ ID NO: 121290 - DNA, 25 bp, Saccharomyces pastorianus
tcttctgctgaatctttatccgaca

SEQ ID NO: 121291 - DNA, 25 bp, Saccharomyces pastorianus
gcatctctttctacatttgcaagct

SEQ ID NO: 121292 - DNA, 25 bp, Saccharomyces pastorianus
caaggctttctaagcttttgccgaa

SEQ ID NO: 121293 - DNA, 25 bp, Saccharomyces pastorianus
gttaatagtgcagctgcttcttctg

SEQ ID NO: 121294 - DNA, 25 bp, Saccharomyces pastorianus
ttatccgacatcaattccagtcagg

SEQ ID NO: 121295 - DNA, 25 bp, Saccharomyces pastorianus
agattcttctctgtcgcataatgca

SEQ ID NO: 121296 - DNA, 25 bp, Saccharomyces pastorianus
aaaaagggttcctctgcatctcttt

SEQ ID NO: 121297 - DNA, 25 bp, Saccharomyces pastorianus
atctttatcagttttatccacccca

SEQ ID NO: 121298 - DNA, 25 bp, Saccharomyces pastorianus
gtctagaaccggaacctaccatgat

SEQ ID NO: 121299 - DNA, 25 bp, Saccharomyces pastorianus
attgtatccattgcaagacctgtga

SEQ ID NO: 121300 - DNA, 25 bp, Saccharomyces pastorianus
agaccgtccttcagcgggaaacttg

SEQ ID NO: 121301 - DNA, 25 bp, Saccharomyces pastorianus
gtgcgtaatattagaccgtccttca

SEQ ID NO: 121302 - DNA, 25 bp, Saccharomyces pastorianus
agaataccccaagcctgatggtgtg

SEQ ID NO: 121303 - DNA, 25 bp, Saccharomyces pastorianus
tgttgaatcgaggttctgcccagca

SEQ ID NO: 121304 - DNA, 25 bp, Saccharomyces pastorianus
atcgcctgtgggtacgagactgcaa

SEQ ID NO: 121305 - DNA, 25 bp, Saccharomyces pastorianus
gaacctgcttccaagtacaaaccga

SEQ ID NO: 121306 - DNA, 25 bp, Saccharomyces pastorianus
gacctgtgatattaaggcgcccaga

SEQ ID NO: 121307 - DNA, 25 bp, Saccharomyces pastorianus
gcccagcaggtgtctacgaattcgt

SEQ ID NO: 121308 - DNA, 25 bp, Saccharomyces pastorianus
gatatattgacctccgtgtctagaa

SEQ ID NO: 121309 - DNA, 25 bp, Saccharomyces pastorianus
gggcacccgcttttacaatctggtt

SEQ ID NO: 121310 - DNA, 25 bp, Saccharomyces pastorianus
ggtgcacaaccctaaaactcatata

SEQ ID NO: 121311 - DNA, 25 bp, Saccharomyces pastorianus
gatgcaatcggtagccgggcacccg

SEQ ID NO: 121312 - DNA, 25 bp, Saccharomyces pastorianus
ccaagttttcacaagagggtatcga

SEQ ID NO: 121313 - DNA, 25 bp, Saccharomyces pastorianus
gtcatggtacctcatttaccgggta

SEQ ID NO: 121314 - DNA, 25 bp, Saccharomyces pastorianus
aatttctatgcttaatcacccaaaa

SEQ ID NO: 121315 - DNA, 25 bp, Saccharomyces pastorianus
acatggagagcctagttacagcgaa

SEQ ID NO: 121316 - DNA, 25 bp, Saccharomyces pastorianus
ttgggtctacagaaaagtctttgct

SEQ ID NO: 121317 - DNA, 25 bp, Saccharomyces pastorianus
gagaattcaaatcctttgggtctac

SEQ ID NO: 121318 - DNA, 25 bp, Saccharomyces pastorianus
tacgctgagcctgagaactttttag

SEQ ID NO: 121319 - DNA, 25 bp, Saccharomyces pastorianus
acaatctggttctaaagttctcgtg

SEQ ID NO: 121320 - DNA, 25 bp, Saccharomyces pastorianus
cattttcgccaaagcctgtgagatc

SEQ ID NO: 121321 - DNA, 25 bp, Saccharomyces pastorianus
tgaccaagctaatctaccgccaagt

SEQ ID NO: 121322 - DNA, 25 bp, Saccharomyces pastorianus
ttggtgggccactacaaggagataa

SEQ ID NO: 121323 - DNA, 25 bp, Saccharomyces pastorianus
atcacattccttaccatttgcgaga

SEQ ID NO: 121324 - DNA, 25 bp, Saccharomyces pastorianus
aacctggttccgagcatcaagatga

SEQ ID NO: 121325 - DNA, 25 bp, Saccharomyces pastorianus
gagtctacgaatgaacctggttccg

SEQ ID NO: 121326 - DNA, 25 bp, Saccharomyces pastorianus
aggcgggccatgaccaagctaatct

SEQ ID NO: 121327 - DNA, 25 bp, Saccharomyces pastorianus
agttgcaagctatccaggcgggcca

SEQ ID NO: 121328 - DNA, 25 bp, Saccharomyces pastorianus
atacgaggctacctgtttctgagga

SEQ ID NO: 121329 - DNA, 25 bp, Saccharomyces pastorianus
accgccaagtggtcgaggatcgctt

SEQ ID NO: 121330 - DNA, 25 bp, Saccharomyces pastorianus
gcgagaatccgcaaggtcatgaaga

SEQ ID NO: 121331 - DNA, 25 bp, Saccharomyces pastorianus
gcggaaccccgtggatcgaattgat

SEQ ID NO: 121332 - DNA, 25 bp, Saccharomyces pastorianus
gagtacaattctcatcaccatcatt

SEQ ID NO: 121333 - DNA, 25 bp, Saccharomyces pastorianus
gagaatcccaactatctttctcact

SEQ ID NO: 121334 - DNA, 25 bp, Saccharomyces pastorianus
attcagatgccttaagcggaacccc

SEQ ID NO: 121335 - DNA, 25 bp, Saccharomyces pastorianus
attacgcatcctaatgctggtccta

SEQ ID NO: 121336 - DNA, 25 bp, Saccharomyces pastorianus
agtgccacatcgacatctacatcat

SEQ ID NO: 121337 - DNA, 25 bp, Saccharomyces pastorianus
gagtttgacagaccccaagctacta

SEQ ID NO: 121338 - DNA, 25 bp, Saccharomyces pastorianus
aatgctggtcctacaagtgccacat

SEQ ID NO: 121339 - DNA, 25 bp, Saccharomyces pastorianus
aaaggcgttcttgccttgggtgcaa

SEQ ID NO: 121340 - DNA, 25 bp, Saccharomyces pastorianus
taattcaagcccaaatctcattcct

SEQ ID NO: 121341 - DNA, 25 bp, Saccharomyces pastorianus
tctcaagttcccattcttttttcca

SEQ ID NO: 121342 - DNA, 25 bp, Saccharomyces pastorianus
tatttccgaggctattctggctaca

SEQ ID NO: 121343 - DNA, 25 bp, Saccharomyces pastorianus
aaacatttcataaagctcaccgccc

SEQ ID NO: 121344 - DNA, 25 bp, Saccharomyces pastorianus
tgctatcagagcattggcctcaatt

SEQ ID NO: 121345 - DNA, 25 bp, Saccharomyces pastorianus
gactgttttggcgattcatacaaga

SEQ ID NO: 121346 - DNA, 25 bp, Saccharomyces pastorianus
gagaaccttgtcaatatcagcacgt

SEQ ID NO: 121347 - DNA, 25 bp, Saccharomyces pastorianus
tctggctacagatatggcattgcat

SEQ ID NO: 121348 - DNA, 25 bp, Saccharomyces pastorianus
gcctcaattgctatctatctccaaa

SEQ ID NO: 121349 - DNA, 25 bp, Saccharomyces pastorianus
gcatacctcattactctcgaattta

SEQ ID NO: 121350 - DNA, 25 bp, Saccharomyces pastorianus
tcaccgcccagaacaagactgtttt

SEQ ID NO: 121351 - DNA, 25 bp, Saccharomyces pastorianus
tatcaaagaccatccgcatattcca

SEQ ID NO: 121352 - DNA, 25 bp, Saccharomyces pastorianus
gattgcgctcttttggaaacatttc

SEQ ID NO: 121353 - DNA, 25 bp, Saccharomyces pastorianus
agaacggctttcttcatttcgtgca

SEQ ID NO: 121354 - DNA, 25 bp, Saccharomyces pastorianus
gggaccgattcgtaaaccgcatcat

SEQ ID NO: 121355 - DNA, 25 bp, Saccharomyces pastorianus
gatctgcggcttttgaatactgttg

SEQ ID NO: 121356 - DNA, 25 bp, Saccharomyces pastorianus
atttcgtgcagttccgggaccgatt

SEQ ID NO: 121357 - DNA, 25 bp, Saccharomyces pastorianus
gtaaaccgcatcatcatccatttca

SEQ ID NO: 121358 - DNA, 25 bp, Saccharomyces pastorianus
atactgttgcattcaagaacggctt

SEQ ID NO: 121359 - DNA, 25 bp, Saccharomyces pastorianus
gcaggaaggcaaaccctaccggacg

SEQ ID NO: 121360 - DNA, 25 bp, Saccharomyces pastorianus
ctaccggacgtattagtcacgattt

SEQ ID NO: 121361 - DNA, 25 bp, Saccharomyces pastorianus
ggtttgtatcttgtatcagggtgtt

SEQ ID NO: 121362 - DNA, 25 bp, Saccharomyces pastorianus
gtgtttgtagtatattgccatcgta

SEQ ID NO: 121363 - DNA, 25 bp, Saccharomyces pastorianus
gtcaatcttattgatctgcggcttt

SEQ ID NO: 121364 - DNA, 25 bp, Saccharomyces pastorianus
gtaattgaggtttgcatgctagaaa

SEQ ID NO: 121365 - DNA, 25 bp, Saccharomyces pastorianus
agacgatgtcattatcactgatact

SEQ ID NO: 121366 - DNA, 25 bp, Saccharomyces pastorianus
gtatttgacggagattccacaacag

SEQ ID NO: 121367 - DNA, 25 bp, Saccharomyces pastorianus
gttacccagtaacagatccatacta

SEQ ID NO: 121368 - DNA, 25 bp, Saccharomyces pastorianus
gaccaggtagtattcgccaactgca

SEQ ID NO: 121369 - DNA, 25 bp, Saccharomyces pastorianus
aattgggttcttcgatttcacctcg

SEQ ID NO: 121370 - DNA, 25 bp, Saccharomyces pastorianus
gaatccatagatgaggcagcacaga

SEQ ID NO: 121371 - DNA, 25 bp, Saccharomyces pastorianus
ttgcaagcaaagtccttttcaggat

SEQ ID NO: 121372 - DNA, 25 bp, Saccharomyces pastorianus
tgcagctacccaaggattatcccgg

SEQ ID NO: 121373 - DNA, 25 bp, Saccharomyces pastorianus
agatggttttgctgtaattgggttc

SEQ ID NO: 121374 - DNA, 25 bp, Saccharomyces pastorianus
cttcgatttcacctcgtttgataaa

SEQ ID NO: 121375 - DNA, 25 bp, Saccharomyces pastorianus
ttcacgatggtctagctagaggttt

SEQ ID NO: 121376 - DNA, 25 bp, Saccharomyces pastorianus
agatcgaccgtgaaggtaacgccag

SEQ ID NO: 121377 - DNA, 25 bp, Saccharomyces pastorianus
ctggtttgggtaagatcgaccgtga

SEQ ID NO: 121378 - DNA, 25 bp, Saccharomyces pastorianus
aaccgctttggttcacgatggtcta

SEQ ID NO: 121379 - DNA, 25 bp, Saccharomyces pastorianus
tggttcacgatggtctagctagagg

SEQ ID NO: 121380 - DNA, 25 bp, Saccharomyces pastorianus
tgttgttgaacaaactgccgaagtt

SEQ ID NO: 121381 - DNA, 25 bp, Saccharomyces pastorianus
cgatggtctagctagaggtttgaga

SEQ ID NO: 121382 - DNA, 25 bp, Saccharomyces pastorianus
gttgaacaaactgccgaagttacta

SEQ ID NO: 121383 - DNA, 25 bp, Saccharomyces pastorianus
ctttggttcacgatggtctagctag

SEQ ID NO: 121384 - DNA, 25 bp, Saccharomyces pastorianus
tcgaccgtgaaggtaacgccagaaa

SEQ ID NO: 121385 - DNA, 25 bp, Saccharomyces pastorianus
acaaactgccgaagttactatcgaa

SEQ ID NO: 121386 - DNA, 25 bp, Saccharomyces pastorianus
ggcgtcatatatacaaccatgcctt

SEQ ID NO: 121387 - DNA, 25 bp, Saccharomyces pastorianus
gaagctatggaaatggccctgctaa

SEQ ID NO: 121388 - DNA, 25 bp, Saccharomyces pastorianus
tttattctcggtgctggcagcggaa

SEQ ID NO: 121389 - DNA, 25 bp, Saccharomyces pastorianus
gttaactcctccttctttgatgtaa

SEQ ID NO: 121390 - DNA, 25 bp, Saccharomyces pastorianus
gtagtcaccgcagccaaagttttat

SEQ ID NO: 121391 - DNA, 25 bp, Saccharomyces pastorianus
tgaaatacaggctagcggcgttgct

SEQ ID NO: 121392 - DNA, 25 bp, Saccharomyces pastorianus
aatggacattgatgccgctctagaa

SEQ ID NO: 121393 - DNA, 25 bp, Saccharomyces pastorianus
tattatacccaatacacatccacgc

SEQ ID NO: 121394 - DNA, 25 bp, Saccharomyces pastorianus
gccctgctaagggaatcgtcttcag

SEQ ID NO: 121395 - DNA, 25 bp, Saccharomyces pastorianus
gtatatttccggtgcgagtgataat

SEQ ID NO: 121396 - DNA, 25 bp, Saccharomyces pastorianus
atcgaccacagaacaaggcccacgt

SEQ ID NO: 121397 - DNA, 25 bp, Saccharomyces pastorianus
attatggatcctcatgtcggcacac

SEQ ID NO: 121398 - DNA, 25 bp, Saccharomyces pastorianus
gtagtagccggtcgcgaagacattt

SEQ ID NO: 121399 - DNA, 25 bp, Saccharomyces pastorianus
tattggccgtcgcaggtactataga

SEQ ID NO: 121400 - DNA, 25 bp, Saccharomyces pastorianus
aagcatacaccaccattgaatccat

SEQ ID NO: 121401 - DNA, 25 bp, Saccharomyces pastorianus
gacatttcgagcctttacttgagag

SEQ ID NO: 121402 - DNA, 25 bp, Saccharomyces pastorianus
taccgggacgaaactcttcctgaag

SEQ ID NO: 121403 - DNA, 25 bp, Saccharomyces pastorianus
gatggtttggtacctatcaacttat

SEQ ID NO: 121404 - DNA, 25 bp, Saccharomyces pastorianus
aactattgcgttccacggaggttca

SEQ ID NO: 121405 - DNA, 25 bp, Saccharomyces pastorianus
gtaatatcgggtgttccactcggaa

SEQ ID NO: 121406 - DNA, 25 bp, Saccharomyces pastorianus
gatggctatgacgtttgcagcgata

SEQ ID NO: 121407 - DNA, 25 bp, Saccharomyces pastorianus
gacttcgattccgaaacctggacta

SEQ ID NO: 121408 - DNA, 25 bp, Saccharomyces pastorianus
gtaattctttgcatagtacaaccac

SEQ ID NO: 121409 - DNA, 25 bp, Saccharomyces pastorianus
tctgccttacaaattcctgagctac

SEQ ID NO: 121410 - DNA, 25 bp, Saccharomyces pastorianus
ttcaccgactaccatccaattaaat

SEQ ID NO: 121411 - DNA, 25 bp, Saccharomyces pastorianus
tggataactctagaattcccttgtt

SEQ ID NO: 121412 - DNA, 25 bp, Saccharomyces pastorianus
aagattacctttatcaccaacacca

SEQ ID NO: 121413 - DNA, 25 bp, Saccharomyces pastorianus
agtctttactttctgattccggatc

SEQ ID NO: 121414 - DNA, 25 bp, Saccharomyces pastorianus
tacaaccacaggtacatctgcctta

SEQ ID NO: 121415 - DNA, 25 bp, Saccharomyces pastorianus
aacaggacatatacggctcttcacc

SEQ ID NO: 121416 - DNA, 25 bp, Saccharomyces pastorianus
attcccttgttagcttcgagatcag

SEQ ID NO: 121417 - DNA, 25 bp, Saccharomyces pastorianus
taaccaggatacatcatcgtcatct

SEQ ID NO: 121418 - DNA, 25 bp, Saccharomyces pastorianus
atcgtcatctttatcatcatcattg

SEQ ID NO: 121419 - DNA, 25 bp, Saccharomyces pastorianus
gaaggtgctactttgattaccggtg

SEQ ID NO: 121420 - DNA, 25 bp, Saccharomyces pastorianus
gcgggtacggtctggataaacactt

SEQ ID NO: 121421 - DNA, 25 bp, Saccharomyces pastorianus
ttaataccgccttaaaagtggctga

SEQ ID NO: 121422 - DNA, 25 bp, Saccharomyces pastorianus
agcaagggttacttcattaagccaa

SEQ ID NO: 121423 - DNA, 25 bp, Saccharomyces pastorianus
tcaaagccgcttctgaatccatcaa

SEQ ID NO: 121424 - DNA, 25 bp, Saccharomyces pastorianus
ggcgacccattcgatgaatctactt

SEQ ID NO: 121425 - DNA, 25 bp, Saccharomyces pastorianus
acgggttggctgctggtattcacac

SEQ ID NO: 121426 - DNA, 25 bp, Saccharomyces pastorianus
gttcaatgcatctggtttgggcagg

SEQ ID NO: 121427 - DNA, 25 bp, Saccharomyces pastorianus
atctactttccaaggtgcacaaacc

SEQ ID NO: 121428 - DNA, 25 bp, Saccharomyces pastorianus
gaatccatcaaggtgggcgacccat

SEQ ID NO: 121429 - DNA, 25 bp, Saccharomyces pastorianus
ttaagccaactgtctttggtgacgt

SEQ ID NO: 121430 - DNA, 25 bp, Saccharomyces pastorianus
atctctgaaactggtatcacctccg

SEQ ID NO: 121431 - DNA, 25 bp, Saccharomyces pastorianus
agccaaggccttggttgctcaaggt

SEQ ID NO: 121432 - DNA, 25 bp, Saccharomyces pastorianus
aagcgaagctgtttggtacggtcca

SEQ ID NO: 121433 - DNA, 25 bp, Saccharomyces pastorianus
aatacattgctggtgctcgtccatg

SEQ ID NO: 121434 - DNA, 25 bp, Saccharomyces pastorianus
actccagaagctattgccgtctttg

SEQ ID NO: 121435 - DNA, 25 bp, Saccharomyces pastorianus
atcacctccgaacaagtcgctgata

SEQ ID NO: 121436 - DNA, 25 bp, Saccharomyces pastorianus
gtctttgaaactgctcgttccaccg

SEQ ID NO: 121437 - DNA, 25 bp, Saccharomyces pastorianus
tatcgcaagtttcatcaaggtctct

SEQ ID NO: 121438 - DNA, 25 bp, Saccharomyces pastorianus
caacgaatactctactttctccgaa

SEQ ID NO: 121439 - DNA, 25 bp, Saccharomyces pastorianus
atttccagtgctaaggtcaacttca

SEQ ID NO: 121440 - DNA, 25 bp, Saccharomyces pastorianus
tttgccatgtgccacccaaaatgaa

SEQ ID NO: 121441 - DNA, 25 bp, Saccharomyces pastorianus
aattttccaatcttctcttacttag

SEQ ID NO: 121442 - DNA, 25 bp, Saccharomyces pastorianus
tttattgccccaccgcactgaaaat

SEQ ID NO: 121443 - DNA, 25 bp, Saccharomyces pastorianus
gaatatcgaggccatccaatcagat

SEQ ID NO: 121444 - DNA, 25 bp, Saccharomyces pastorianus
gttattaagatcaggcccgtttcca

SEQ ID NO: 121445 - DNA, 25 bp, Saccharomyces pastorianus
ttccggcgcattggttctgcgataa

SEQ ID NO: 121446 - DNA, 25 bp, Saccharomyces pastorianus
agctgataacagcttctctctgctg

SEQ ID NO: 121447 - DNA, 25 bp, Saccharomyces pastorianus
ttgctgctacttcttacgctttctt

SEQ ID NO: 121448 - DNA, 25 bp, Saccharomyces pastorianus
aagaagccggcctttgctgctactt

SEQ ID NO: 121449 - DNA, 25 bp, Saccharomyces pastorianus
tttcttcttccgcaatttttcagtg

SEQ ID NO: 121450 - DNA, 25 bp, Saccharomyces pastorianus
gcttctctctgctgattggacgtgg

SEQ ID NO: 121451 - DNA, 25 bp, Saccharomyces pastorianus
ctgaaaatgcatgggccggttccgg

SEQ ID NO: 121452 - DNA, 25 bp, Saccharomyces pastorianus
atgacattccatcttgggtggacaa

SEQ ID NO: 121453 - DNA, 25 bp, Saccharomyces pastorianus
ttcaagacgagatgcataagtattc

SEQ ID NO: 121454 - DNA, 25 bp, Saccharomyces pastorianus
gggcgacagtatttcaagacgagat

SEQ ID NO: 121455 - DNA, 25 bp, Saccharomyces pastorianus
attccatcttgggtggacaatttta

SEQ ID NO: 121456 - DNA, 25 bp, Saccharomyces pastorianus
gacagtatttcaagacgagatgcat

SEQ ID NO: 121457 - DNA, 25 bp, Saccharomyces pastorianus
gggtggacaattttatggtataatc

SEQ ID NO: 121458 - DNA, 25 bp, Saccharomyces pastorianus
tatggtataatcaagcgtatttaga

SEQ ID NO: 121459 - DNA, 25 bp, Saccharomyces pastorianus
agtttgggcgacagtatttcaagac

SEQ ID NO: 121460 - DNA, 25 bp, Saccharomyces pastorianus
ttcatcctcaatcccgcgatgctaa

SEQ ID NO: 121461 - DNA, 25 bp, Saccharomyces pastorianus
ataagtattctcttcatcctcaatc

SEQ ID NO: 121462 - DNA, 25 bp, Saccharomyces pastorianus
agcgtatttagaagtttgggcgaca

SEQ ID NO: 121463 - DNA, 25 bp, Saccharomyces pastorianus
gatactgcttttgtactcagctgca

SEQ ID NO: 121464 - DNA, 25 bp, Saccharomyces pastorianus
aatgacggaggtgccaagcctttga

SEQ ID NO: 121465 - DNA, 25 bp, Saccharomyces pastorianus
gacaggtttccttctaagccataca

SEQ ID NO: 121466 - DNA, 25 bp, Saccharomyces pastorianus
ttccggccgctacaataatgcttag

SEQ ID NO: 121467 - DNA, 25 bp, Saccharomyces pastorianus
gaactatattgattgctacggcccc

SEQ ID NO: 121468 - DNA, 25 bp, Saccharomyces pastorianus
atgcttagtgactcgatgccacacg

SEQ ID NO: 121469 - DNA, 25 bp, Saccharomyces pastorianus
ggacttggcatttttgtcgcagcaa

SEQ ID NO: 121470 - DNA, 25 bp, Saccharomyces pastorianus
tcgttgttcgtggtacatgggcatc

SEQ ID NO: 121471 - DNA, 25 bp, Saccharomyces pastorianus
gatgacagctttcacagtcggaact

SEQ ID NO: 121472 - DNA, 25 bp, Saccharomyces pastorianus
ggtcttgcagcctctttggttaata

SEQ ID NO: 121473 - DNA, 25 bp, Saccharomyces pastorianus
ggattttgtgcagccgtgacgacag

SEQ ID NO: 121474 - DNA, 25 bp, Saccharomyces pastorianus
tatcctttcaaaggcttggcacctc

SEQ ID NO: 121475 - DNA, 25 bp, Saccharomyces pastorianus
tcgatatcgaatagtttaccaccgt

SEQ ID NO: 121476 - DNA, 25 bp, Saccharomyces pastorianus
aagaccttggtgttcgtgtggcatc

SEQ ID NO: 121477 - DNA, 25 bp, Saccharomyces pastorianus
taagcattattgtagcggccggaaa

SEQ ID NO: 121478 - DNA, 25 bp, Saccharomyces pastorianus
atgcccatgtaccacgaacaacgat

SEQ ID NO: 121479 - DNA, 25 bp, Saccharomyces pastorianus
ctgcaatacccaaacctatcgatat

SEQ ID NO: 121480 - DNA, 25 bp, Saccharomyces pastorianus
gtgtggcatcgagtcactaagcatt

SEQ ID NO: 121481 - DNA, 25 bp, Saccharomyces pastorianus
aaatgctgcttttcggagatccttt

SEQ ID NO: 121482 - DNA, 25 bp, Saccharomyces pastorianus
cctccgtcatttactctagattcaa

SEQ ID NO: 121483 - DNA, 25 bp, Saccharomyces pastorianus
gacaaaaatgccaagtccgctcaac

SEQ ID NO: 121484 - DNA, 25 bp, Saccharomyces pastorianus
aaagtgctccatgcatacgttgctg

SEQ ID NO: 121485 - DNA, 25 bp, Saccharomyces pastorianus
tggcggccgttcatgaatcaccaaa

SEQ ID NO: 121486 - DNA, 25 bp, Saccharomyces pastorianus
gatatcggcaacactgcgctatcag

SEQ ID NO: 121487 - DNA, 25 bp, Saccharomyces pastorianus
aaactgcttcttgaggattccatga

SEQ ID NO: 121488 - DNA, 25 bp, Saccharomyces pastorianus
tgaaactactcacctactcgatatt

SEQ ID NO: 121489 - DNA, 25 bp, Saccharomyces pastorianus
atttagtcgcgttagcacacctgat

SEQ ID NO: 121490 - DNA, 25 bp, Saccharomyces pastorianus
gctatcagcagcatacgctcttgta

SEQ ID NO: 121491 - DNA, 25 bp, Saccharomyces pastorianus
aagtctttcacatgttgctactgcc

SEQ ID NO: 121492 - DNA, 25 bp, Saccharomyces pastorianus
ggtgatatatgcctctctttgtata

SEQ ID NO: 121493 - DNA, 25 bp, Saccharomyces pastorianus
tgattccccaagacagcgtgaacgc

SEQ ID NO: 121494 - DNA, 25 bp, Saccharomyces pastorianus
attctcggtacacatattgcttttg

SEQ ID NO: 121495 - DNA, 25 bp, Saccharomyces pastorianus
cacatccgtttttgtcgttgaccaa

SEQ ID NO: 121496 - DNA, 25 bp, Saccharomyces pastorianus
tacagcttcacatctacaacacaat

SEQ ID NO: 121497 - DNA, 25 bp, Saccharomyces pastorianus
agtggctcattatctgtggtttgct

SEQ ID NO: 121498 - DNA, 25 bp, Saccharomyces pastorianus
tggaagtcccatcattaacccctag

SEQ ID NO: 121499 - DNA, 25 bp, Saccharomyces pastorianus
aagtctgccaatccacttggttttg

SEQ ID NO: 121500 - DNA, 25 bp, Saccharomyces pastorianus
ttatctgtggtttgctgtggacctc

SEQ ID NO: 121501 - DNA, 25 bp, Saccharomyces pastorianus
aagcggctgaattgagtggctcatt

SEQ ID NO: 121502 - DNA, 25 bp, Saccharomyces pastorianus
gtggacctcctatttttgttgacaa

SEQ ID NO: 121503 - DNA, 25 bp, Saccharomyces pastorianus
ggcggccaaatgttaaggaacttct

SEQ ID NO: 121504 - DNA, 25 bp, Saccharomyces pastorianus
ggaacttctacatgaagcggctgaa

SEQ ID NO: 121505 - DNA, 25 bp, Saccharomyces pastorianus
ttgttttccattgcgggcggccaaa

SEQ ID NO: 121506 - DNA, 25 bp, Saccharomyces pastorianus
aaggcactgttgtggcaactacttt

SEQ ID NO: 121507 - DNA, 25 bp, Saccharomyces pastorianus
atttctttcctgttaagcttatatc

SEQ ID NO: 121508 - DNA, 25 bp, Saccharomyces pastorianus
taagcttatatcagcactaacaaac

SEQ ID NO: 121509 - DNA, 25 bp, Saccharomyces pastorianus
gtctttattcatttctttcctgtta

SEQ ID NO: 121510 - DNA, 25 bp, Saccharomyces pastorianus
atgccttcgagaatatgtctttatt

SEQ ID NO: 121511 - DNA, 25 bp, Saccharomyces pastorianus
atatgccttcgagaatatgtcttta

SEQ ID NO: 121512 - DNA, 25 bp, Saccharomyces pastorianus
aactatatgccttcgagaatatgtc

SEQ ID NO: 121513 - DNA, 25 bp, Saccharomyces pastorianus
gagatacttcaactatatgccttcg

SEQ ID NO: 121514 - DNA, 25 bp, Saccharomyces pastorianus
atgtctttattcatttctttcctgt

SEQ ID NO: 121515 - DNA, 25 bp, Saccharomyces pastorianus
acttcaactatatgccttcgagaat

SEQ ID NO: 121516 - DNA, 25 bp, Saccharomyces pastorianus
attcatttctttcctgttaagctta

SEQ ID NO: 121517 - DNA, 25 bp, Saccharomyces pastorianus
gatacttcaactatatgccttcgag

SEQ ID NO: 121518 - DNA, 25 bp, Saccharomyces pastorianus
gacatggtgctctatttgactatcc

SEQ ID NO: 121519 - DNA, 25 bp, Saccharomyces pastorianus
ggctgggatgaacattacttgccaa

SEQ ID NO: 121520 - DNA, 25 bp, Saccharomyces pastorianus
agtggacttcgtttctgagactggt

SEQ ID NO: 121521 - DNA, 25 bp, Saccharomyces pastorianus
gaccgctccttttcgatggattaat

SEQ ID NO: 121522 - DNA, 25 bp, Saccharomyces pastorianus
aaatgaagtcaacgccagcgactat

SEQ ID NO: 121523 - DNA, 25 bp, Saccharomyces pastorianus
gggtgttaacgcaaattcttcctat

SEQ ID NO: 121524 - DNA, 25 bp, Saccharomyces pastorianus
aaagcatggtttcgaagtggacttc

SEQ ID NO: 121525 - DNA, 25 bp, Saccharomyces pastorianus
gccctgggagttgacgacatcttga

SEQ ID NO: 121526 - DNA, 25 bp, Saccharomyces pastorianus
taaggcgttagcgaggatcaagacc

SEQ ID NO: 121527 - DNA, 25 bp, Saccharomyces pastorianus
atccctgggatgactactctattac

SEQ ID NO: 121528 - DNA, 25 bp, Saccharomyces pastorianus
tctttgcatctgctggacatggtgc

SEQ ID NO: 121529 - DNA, 25 bp, Saccharomyces pastorianus
ggcactttgagtaccattagcacgt

SEQ ID NO: 121530 - DNA, 25 bp, Saccharomyces pastorianus
tggtgataactctcggatcctatgc

SEQ ID NO: 121531 - DNA, 25 bp, Saccharomyces pastorianus
ggcaaacgttttcgccactttattg

SEQ ID NO: 121532 - DNA, 25 bp, Saccharomyces pastorianus
gaattttcgctggtttcctaagata

SEQ ID NO: 121533 - DNA, 25 bp, Saccharomyces pastorianus
gattggcatatttaccatggtgcaa

SEQ ID NO: 121534 - DNA, 25 bp, Saccharomyces pastorianus
tattttgtttgtggtgctgtgtgcg

SEQ ID NO: 121535 - DNA, 25 bp, Saccharomyces pastorianus
gggcaagtggacactaccatgtcta

SEQ ID NO: 121536 - DNA, 25 bp, Saccharomyces pastorianus
tttccattgggtactttcttggcaa

SEQ ID NO: 121537 - DNA, 25 bp, Saccharomyces pastorianus
attgtttctgcgttaatatccggat

SEQ ID NO: 121538 - DNA, 25 bp, Saccharomyces pastorianus
atatccggattttgcggcactttga

SEQ ID NO: 121539 - DNA, 25 bp, Saccharomyces pastorianus
cacttttctacggacgttccaattg

SEQ ID NO: 121540 - DNA, 25 bp, Saccharomyces pastorianus
aagaatgtcgaaacggctcgctcca

SEQ ID NO: 121541 - DNA, 25 bp, Saccharomyces pastorianus
ggattgaactaaattaccgttgtga

SEQ ID NO: 121542 - DNA, 25 bp, Saccharomyces pastorianus
gctcgctccactatcgatggtttaa

SEQ ID NO: 121543 - DNA, 25 bp, Saccharomyces pastorianus
gggcccatctccaatgggtatgact

SEQ ID NO: 121544 - DNA, 25 bp, Saccharomyces pastorianus
tggaacccactttgatgaatctcga

SEQ ID NO: 121545 - DNA, 25 bp, Saccharomyces pastorianus
gataacacaacttccagcgacttaa

SEQ ID NO: 121546 - DNA, 25 bp, Saccharomyces pastorianus
tgaagtttgttacactccttcctgg

SEQ ID NO: 121547 - DNA, 25 bp, Saccharomyces pastorianus
gaaccaggttcccacaatgagggat

SEQ ID NO: 121548 - DNA, 25 bp, Saccharomyces pastorianus
ggtttaattgaatctctagggtgga

SEQ ID NO: 121549 - DNA, 25 bp, Saccharomyces pastorianus
atgggtatgactgaaccaggttccc

SEQ ID NO: 121550 - DNA, 25 bp, Saccharomyces pastorianus
ctcgacaaaggttggttattaacag

SEQ ID NO: 121551 - DNA, 25 bp, Saccharomyces pastorianus
aaggttggcctctggatgaaaatgg

SEQ ID NO: 121552 - DNA, 25 bp, Saccharomyces pastorianus
taggtacctagtgagcgggataaac

SEQ ID NO: 121553 - DNA, 25 bp, Saccharomyces pastorianus
gaatccatatcgactataggtacct

SEQ ID NO: 121554 - DNA, 25 bp, Saccharomyces pastorianus
gggataaacaggacttacattgctc

SEQ ID NO: 121555 - DNA, 25 bp, Saccharomyces pastorianus
ggaagtcggatttgatgccacgcaa

SEQ ID NO: 121556 - DNA, 25 bp, Saccharomyces pastorianus
taaccagtacctaggcttaccagca

SEQ ID NO: 121557 - DNA, 25 bp, Saccharomyces pastorianus
ttacattgctcctgatcctaacaac

SEQ ID NO: 121558 - DNA, 25 bp, Saccharomyces pastorianus
gcttgtccttaaatttgctccatta

SEQ ID NO: 121559 - DNA, 25 bp, Saccharomyces pastorianus
agcatttgatgagcttgtccttaaa

SEQ ID NO: 121560 - DNA, 25 bp, Saccharomyces pastorianus
ggaaacctagttgaagatcagctaa

SEQ ID NO: 121561 - DNA, 25 bp, Saccharomyces pastorianus
aatatgtgagcccataccaggcctt

SEQ ID NO: 121562 - DNA, 25 bp, Saccharomyces pastorianus
ggattgcagaagctcctaacctgaa

SEQ ID NO: 121563 - DNA, 25 bp, Saccharomyces pastorianus
ttctaacgtcgtttctgtcgcagag

SEQ ID NO: 121564 - DNA, 25 bp, Saccharomyces pastorianus
tggcgtcggttcagaccatgtcgat

SEQ ID NO: 121565 - DNA, 25 bp, Saccharomyces pastorianus
tgagccaacctcaacggtagacagg

SEQ ID NO: 121566 - DNA, 25 bp, Saccharomyces pastorianus
aacctgaagctctgtgtaaccgctg

SEQ ID NO: 121567 - DNA, 25 bp, Saccharomyces pastorianus
gttttgctggttctttacgaaggtg

SEQ ID NO: 121568 - DNA, 25 bp, Saccharomyces pastorianus
tcacggtcaccgaagttactggttc

SEQ ID NO: 121569 - DNA, 25 bp, Saccharomyces pastorianus
gaaattgtcattactacgccctttt

SEQ ID NO: 121570 - DNA, 25 bp, Saccharomyces pastorianus
cagggatacgagttggttactacca

SEQ ID NO: 121571 - DNA, 25 bp, Saccharomyces pastorianus
gcagagcacgttatggccacaattt

SEQ ID NO: 121572 - DNA, 25 bp, Saccharomyces pastorianus
gttactaccattgacaaggaccctg

SEQ ID NO: 121573 - DNA, 25 bp, Saccharomyces pastorianus
ttaccatcaactgtccattgcacaa

SEQ ID NO: 121574 - DNA, 25 bp, Saccharomyces pastorianus
agtctggtaaattggctggctatgg

SEQ ID NO: 121575 - DNA, 25 bp, Saccharomyces pastorianus
agtggcacatctctggatgctcaaa

SEQ ID NO: 121576 - DNA, 25 bp, Saccharomyces pastorianus
aaaagaccatccctggaggactatg

SEQ ID NO: 121577 - DNA, 25 bp, Saccharomyces pastorianus
gttactgtactacgactaccaggaa

SEQ ID NO: 121578 - DNA, 25 bp, Saccharomyces pastorianus
gttgctcagtcagatgttgttacca

SEQ ID NO: 121579 - DNA, 25 bp, Saccharomyces pastorianus
gttgccgaggcagtcaagtctggta

SEQ ID NO: 121580 - DNA, 25 bp, Saccharomyces pastorianus
gaacgaggccagcaagcttttcaat

SEQ ID NO: 121581 - DNA, 25 bp, Saccharomyces pastorianus
aaagtttgattaccgtccacaggat

SEQ ID NO: 121582 - DNA, 25 bp, Saccharomyces pastorianus
taccgctagaggtgctatttgtgtc

SEQ ID NO: 121583 - DNA, 25 bp, Saccharomyces pastorianus
ggtgcatacttggtgaataccgcta

SEQ ID NO: 121584 - DNA, 25 bp, Saccharomyces pastorianus
aacttccttcggtatgttcctacat

SEQ ID NO: 121585 - DNA, 25 bp, Saccharomyces pastorianus
tcttttaggttttcttgtggcctcg

SEQ ID NO: 121586 - DNA, 25 bp, Saccharomyces pastorianus
ggtgaaatatacgtatcggccgccc

SEQ ID NO: 121587 - DNA, 25 bp, Saccharomyces pastorianus
ttcgccctttgttccatttcatcat

SEQ ID NO: 121588 - DNA, 25 bp, Saccharomyces pastorianus
tagctccgctaaagccttctttgaa

SEQ ID NO: 121589 - DNA, 25 bp, Saccharomyces pastorianus
atcgatctggatactgggtgttccg

SEQ ID NO: 121590 - DNA, 25 bp, Saccharomyces pastorianus
aagctttaggtgcatctggccaact

SEQ ID NO: 121591 - DNA, 25 bp, Saccharomyces pastorianus
atttcatcattcttcacctggttct

SEQ ID NO: 121592 - DNA, 25 bp, Saccharomyces pastorianus
gaggacgaggtcttcacttggcttt

SEQ ID NO: 121593 - DNA, 25 bp, Saccharomyces pastorianus
gaaacaactcattgcttctaagcca

SEQ ID NO: 121594 - DNA, 25 bp, Saccharomyces pastorianus
acctggttctgtatttgtatgtcac

SEQ ID NO: 121595 - DNA, 25 bp, Saccharomyces pastorianus
atgagagtatcctgtctagaccctt

SEQ ID NO: 121596 - DNA, 25 bp, Saccharomyces pastorianus
aactgaaggctatcttatcttggga

SEQ ID NO: 121597 - DNA, 25 bp, Saccharomyces pastorianus
gggtgctcatatttgtcgtgagttt

SEQ ID NO: 121598 - DNA, 25 bp, Saccharomyces pastorianus
tatcgggttgtctgtgcatgagcac

SEQ ID NO: 121599 - DNA, 25 bp, Saccharomyces pastorianus
gagacggcactaccatggaagaaat

SEQ ID NO: 121600 - DNA, 25 bp, Saccharomyces pastorianus
ttcaagcctcagttggagaatttca

SEQ ID NO: 121601 - DNA, 25 bp, Saccharomyces pastorianus
gatttctaccaatacttcaagcctc

SEQ ID NO: 121602 - DNA, 25 bp, Saccharomyces pastorianus
gcacggtgtcttgagagacggcact

SEQ ID NO: 121603 - DNA, 25 bp, Saccharomyces pastorianus
tacaggcgactatggtgctgagcca

SEQ ID NO: 121604 - DNA, 25 bp, Saccharomyces pastorianus
gtctagacccttctatatcgggttg

SEQ ID NO: 121605 - DNA, 25 bp, Saccharomyces pastorianus
tgggtttgaaaccattcctaacatc

SEQ ID NO: 121606 - DNA, 25 bp, Saccharomyces pastorianus
aagggtcgaatgtccactttctcta

SEQ ID NO: 121607 - DNA, 25 bp, Saccharomyces pastorianus
gataaatcgccccacattaatgtct

SEQ ID NO: 121608 - DNA, 25 bp, Saccharomyces pastorianus
gagatgggcctgaatatctgtattc

SEQ ID NO: 121609 - DNA, 25 bp, Saccharomyces pastorianus
ctgtattcactaccctgattcgtat

SEQ ID NO: 121610 - DNA, 25 bp, Saccharomyces pastorianus
ctcgttaaggatttcagcggtacaa

SEQ ID NO: 121611 - DNA, 25 bp, Saccharomyces pastorianus
tgtctctttcctatacatactgtga

SEQ ID NO: 121612 - DNA, 25 bp, Saccharomyces pastorianus
tgggtcattgggtctcttcttcaaa

SEQ ID NO: 121613 - DNA, 25 bp, Saccharomyces pastorianus
atgacgacgatttccatatccaaaa

SEQ ID NO: 121614 - DNA, 25 bp, Saccharomyces pastorianus
gatgtttccgacatatcgctatcga

SEQ ID NO: 121615 - DNA, 25 bp, Saccharomyces pastorianus
attgatgacgaactttccgccaacg

SEQ ID NO: 121616 - DNA, 25 bp, Saccharomyces pastorianus
caaagcacgttagcggttttattat

SEQ ID NO: 121617 - DNA, 25 bp, Saccharomyces pastorianus
gctgcatatttgaatgtggccgctc

SEQ ID NO: 121618 - DNA, 25 bp, Saccharomyces pastorianus
tgaaaactgaattacaaaccgctag

SEQ ID NO: 121619 - DNA, 25 bp, Saccharomyces pastorianus
gttcttagcagatcgcaaacagatg

SEQ ID NO: 121620 - DNA, 25 bp, Saccharomyces pastorianus
ggctatccgttcttcattgaaaact

SEQ ID NO: 121621 - DNA, 25 bp, Saccharomyces pastorianus
gcaaacagatgctttttatacccaa

SEQ ID NO: 121622 - DNA, 25 bp, Saccharomyces pastorianus
gctggtatatcatatgctgcatatt

SEQ ID NO: 121623 - DNA, 25 bp, Saccharomyces pastorianus
atatttgaatgtggccgctcaggct

SEQ ID NO: 121624 - DNA, 25 bp, Saccharomyces pastorianus
gaatgtggccgctcaggctatccgt

SEQ ID NO: 121625 - DNA, 25 bp, Saccharomyces pastorianus
aaaccgctagtgttcttagcagatc

SEQ ID NO: 121626 - DNA, 25 bp, Saccharomyces pastorianus
tcaggctatccgttcttcattgaaa

SEQ ID NO: 121627 - DNA, 25 bp, Saccharomyces pastorianus
tctgcctggaggaaagctggtatat

SEQ ID NO: 121628 - DNA, 25 bp, Saccharomyces pastorianus
gaaaaatctgtcgaacatctcctga

SEQ ID NO: 121629 - DNA, 25 bp, Saccharomyces pastorianus
cgcgcacaggctaagtacgatcaga

SEQ ID NO: 121630 - DNA, 25 bp, Saccharomyces pastorianus
acagcaataaccagtctccagagac

SEQ ID NO: 121631 - DNA, 25 bp, Saccharomyces pastorianus
gactattgttagcatcgcgcacagg

SEQ ID NO: 121632 - DNA, 25 bp, Saccharomyces pastorianus
gaatgttattgtccttggccatgat

SEQ ID NO: 121633 - DNA, 25 bp, Saccharomyces pastorianus
atgcgaatccaacaagtgctttatc

SEQ ID NO: 121634 - DNA, 25 bp, Saccharomyces pastorianus
gaacatctcctgaaagacgcggcaa

SEQ ID NO: 121635 - DNA, 25 bp, Saccharomyces pastorianus
ggccatctgaccaacaactgcaaat

SEQ ID NO: 121636 - DNA, 25 bp, Saccharomyces pastorianus
tcctcacggcaccttactaagtgga

SEQ ID NO: 121637 - DNA, 25 bp, Saccharomyces pastorianus
agaaagcggctcctgggccatctga

SEQ ID NO: 121638 - DNA, 25 bp, Saccharomyces pastorianus
gatacggtaattggtcctcacggca

SEQ ID NO: 121639 - DNA, 25 bp, Saccharomyces pastorianus
taatagtcaagtttgggtcccttcg

SEQ ID NO: 121640 - DNA, 25 bp, Saccharomyces pastorianus
tgccctctaggatccctatatacaa

SEQ ID NO: 121641 - DNA, 25 bp, Saccharomyces pastorianus
ccattttttgatccggagtcgccaa

SEQ ID NO: 121642 - DNA, 25 bp, Saccharomyces pastorianus
gtcaccgtagaaaacacaccgatag

SEQ ID NO: 121643 - DNA, 25 bp, Saccharomyces pastorianus
tcccttaccttatgacgaaaccgat

SEQ ID NO: 121644 - DNA, 25 bp, Saccharomyces pastorianus
gatagtaaaggttttccagactccg

SEQ ID NO: 121645 - DNA, 25 bp, Saccharomyces pastorianus
gatttccaggagagagtcgccatta

SEQ ID NO: 121646 - DNA, 25 bp, Saccharomyces pastorianus
agactccttcattacatctcggcat

SEQ ID NO: 121647 - DNA, 25 bp, Saccharomyces pastorianus
agaagaacccgattgaggcctccca

SEQ ID NO: 121648 - DNA, 25 bp, Saccharomyces pastorianus
gatactaagtagtgttcctccctta

SEQ ID NO: 121649 - DNA, 25 bp, Saccharomyces pastorianus
aatggaatcattaccggtccttgcc

SEQ ID NO: 121650 - DNA, 25 bp, Saccharomyces pastorianus
gcatctgtttgccttaagctgaact

SEQ ID NO: 121651 - DNA, 25 bp, Saccharomyces pastorianus
gattgaatgatacatcgccaagcag

SEQ ID NO: 121652 - DNA, 25 bp, Saccharomyces pastorianus
tggtggctacgaattggcaaactaa

SEQ ID NO: 121653 - DNA, 25 bp, Saccharomyces pastorianus
gatatcgtcacattccgttgtttaa

SEQ ID NO: 121654 - DNA, 25 bp, Saccharomyces pastorianus
gggtacaaggatttctgccactgaa

SEQ ID NO: 121655 - DNA, 25 bp, Saccharomyces pastorianus
ttcataccgatgacgagccgacaat

SEQ ID NO: 121656 - DNA, 25 bp, Saccharomyces pastorianus
tgccactgaagcatccactaagagt

SEQ ID NO: 121657 - DNA, 25 bp, Saccharomyces pastorianus
aatggtagtgatcctgttactgtta

SEQ ID NO: 121658 - DNA, 25 bp, Saccharomyces pastorianus
tacacagttattgcccagattgaat

SEQ ID NO: 121659 - DNA, 25 bp, Saccharomyces pastorianus
gacagcaacttaatctggcaatgtt

SEQ ID NO: 121660 - DNA, 25 bp, Saccharomyces pastorianus
gacaatgcccatctcaatcgataag

SEQ ID NO: 121661 - DNA, 25 bp, Saccharomyces pastorianus
cactgacgttgccactgggtgataa

SEQ ID NO: 121662 - DNA, 25 bp, Saccharomyces pastorianus
gaaacatagctatccacagacataa

SEQ ID NO: 121663 - DNA, 25 bp, Saccharomyces pastorianus
gatgagactataccactgacgttgc

SEQ ID NO: 121664 - DNA, 25 bp, Saccharomyces pastorianus
ggcaatgaacttcgttcaccatcaa

SEQ ID NO: 121665 - DNA, 25 bp, Saccharomyces pastorianus
gcaatgagaataatccttcccaagt

SEQ ID NO: 121666 - DNA, 25 bp, Saccharomyces pastorianus
aggatcctctcaccgatgagactat

SEQ ID NO: 121667 - DNA, 25 bp, Saccharomyces pastorianus
cacccgctaaaatttgccctgatga

SEQ ID NO: 121668 - DNA, 25 bp, Saccharomyces pastorianus
aggttacatacaggatcctctcacc

SEQ ID NO: 121669 - DNA, 25 bp, Saccharomyces pastorianus
tacccagttttataacgccgccaag

SEQ ID NO: 121670 - DNA, 25 bp, Saccharomyces pastorianus
gacacagactatgcactaaggcgaa

SEQ ID NO: 121671 - DNA, 25 bp, Saccharomyces pastorianus
aatcagcctacccagttttataacg

SEQ ID NO: 121672 - DNA, 25 bp, Saccharomyces pastorianus
atcgaccaccgtgatggacattctg

SEQ ID NO: 121673 - DNA, 25 bp, Saccharomyces pastorianus
atttcagctggcttcaaatcgacca

SEQ ID NO: 121674 - DNA, 25 bp, Saccharomyces pastorianus
agaataactttagaccgccaccaca

SEQ ID NO: 121675 - DNA, 25 bp, Saccharomyces pastorianus
gtggaatccagcgttgttagactag

SEQ ID NO: 121676 - DNA, 25 bp, Saccharomyces pastorianus
gattatccgccaatgtacaaatgtg

SEQ ID NO: 121677 - DNA, 25 bp, Saccharomyces pastorianus
catcgcctctggttttcaaattaat

SEQ ID NO: 121678 - DNA, 25 bp, Saccharomyces pastorianus
gaaggagaccgacttaggcgacaaa

SEQ ID NO: 121679 - DNA, 25 bp, Saccharomyces pastorianus
attaaccaaccaagaccaccaagag

SEQ ID NO: 121680 - DNA, 25 bp, Saccharomyces pastorianus
aagggttctatgcacgatgtcgtca

SEQ ID NO: 121681 - DNA, 25 bp, Saccharomyces pastorianus
gcaagaccaggtgactcattatact

SEQ ID NO: 121682 - DNA, 25 bp, Saccharomyces pastorianus
tagtaacactccttaccagatctca

SEQ ID NO: 121683 - DNA, 25 bp, Saccharomyces pastorianus
ctcctggacaacgttatggtgctta

SEQ ID NO: 121684 - DNA, 25 bp, Saccharomyces pastorianus
aacttcactgttttcctaggtcata

SEQ ID NO: 121685 - DNA, 25 bp, Saccharomyces pastorianus
ttcatcaccgggtatattggcctgc

SEQ ID NO: 121686 - DNA, 25 bp, Saccharomyces pastorianus
aaaatttgcttatgtcgctcctgga

SEQ ID NO: 121687 - DNA, 25 bp, Saccharomyces pastorianus
atattggcctgcctgtctatatcat

SEQ ID NO: 121688 - DNA, 25 bp, Saccharomyces pastorianus
ctgttttgtggcttggcgtacatga

SEQ ID NO: 121689 - DNA, 25 bp, Saccharomyces pastorianus
aatgctttaatactctccgtgctgt

SEQ ID NO: 121690 - DNA, 25 bp, Saccharomyces pastorianus
gtctatatcatttcttgggcaggtt

SEQ ID NO: 121691 - DNA, 25 bp, Saccharomyces pastorianus
aagcctgccgtgctcaagggattga

SEQ ID NO: 121692 - DNA, 25 bp, Saccharomyces pastorianus
gaacgtgtcttcaggatcagcaaag

SEQ ID NO: 121693 - DNA, 25 bp, Saccharomyces pastorianus
aagtctaccgacgtggatttgtaca

SEQ ID NO: 121694 - DNA, 25 bp, Saccharomyces pastorianus
aaacgttgtggctactgccgagcta

SEQ ID NO: 121695 - DNA, 25 bp, Saccharomyces pastorianus
gtgtcagttatttctcgttggttac

SEQ ID NO: 121696 - DNA, 25 bp, Saccharomyces pastorianus
tctaattccctcgatgtctttacaa

SEQ ID NO: 121697 - DNA, 25 bp, Saccharomyces pastorianus
tggttactactgttgtggcagccct

SEQ ID NO: 121698 - DNA, 25 bp, Saccharomyces pastorianus
gagagcctccaaacaaaacgttgtg

SEQ ID NO: 121699 - DNA, 25 bp, Saccharomyces pastorianus
ggtgagcagacccaaggccagcaat

SEQ ID NO: 121700 - DNA, 25 bp, Saccharomyces pastorianus
gcggtatggcagttatcgttagttc

SEQ ID NO: 121701 - DNA, 25 bp, Saccharomyces pastorianus
tacaactgccccattcgtggaagca

SEQ ID NO: 121702 - DNA, 25 bp, Saccharomyces pastorianus
gccagcaatctccacaagacgatat

SEQ ID NO: 121703 - DNA, 25 bp, Saccharomyces pastorianus
gggtatttctggattcattcaccaa

SEQ ID NO: 121704 - DNA, 25 bp, Saccharomyces pastorianus
tttctgggatgtcgtgctctttcac

SEQ ID NO: 121705 - DNA, 25 bp, Saccharomyces pastorianus
ttacctcacccaagatttaacgcag

SEQ ID NO: 121706 - DNA, 25 bp, Saccharomyces pastorianus
aagagatcaggtgacccttgaggaa

SEQ ID NO: 121707 - DNA, 25 bp, Saccharomyces pastorianus
ggaagacctatctgccatcgaagaa

SEQ ID NO: 121708 - DNA, 25 bp, Saccharomyces pastorianus
caagatgcaggaccccttgaaggtg

SEQ ID NO: 121709 - DNA, 25 bp, Saccharomyces pastorianus
tcatttacagtggtgtctgggaact

SEQ ID NO: 121710 - DNA, 25 bp, Saccharomyces pastorianus
gaaactttaagagcgttctacttga

SEQ ID NO: 121711 - DNA, 25 bp, Saccharomyces pastorianus
cagcaacttgtgtagtgggcgactc

SEQ ID NO: 121712 - DNA, 25 bp, Saccharomyces pastorianus
agacgaaaggtcttggctaccacac

SEQ ID NO: 121713 - DNA, 25 bp, Saccharomyces pastorianus
tgggcgactcgttgttcatttacag

SEQ ID NO: 121714 - DNA, 25 bp, Saccharomyces pastorianus
gtgcaaatttcttaacctggtctat

SEQ ID NO: 121715 - DNA, 25 bp, Saccharomyces pastorianus
atctcaaatcaattacctcacccaa

SEQ ID NO: 121716 - DNA, 25 bp, Saccharomyces pastorianus
ttgccggctctcaaggtcaattcga

SEQ ID NO: 121717 - DNA, 25 bp, Saccharomyces pastorianus
agatcggttatgatgccgcttccaa

SEQ ID NO: 121718 - DNA, 25 bp, Saccharomyces pastorianus
cacgttgcggctaccatgaactaat

SEQ ID NO: 121719 - DNA, 25 bp, Saccharomyces pastorianus
tagtcaccgctttgaaccctaagat

SEQ ID NO: 121720 - DNA, 25 bp, Saccharomyces pastorianus
tataagatacttagggtccgggcca

SEQ ID NO: 121721 - DNA, 25 bp, Saccharomyces pastorianus
ttcaagccagtcatgatcgccaatc

SEQ ID NO: 121722 - DNA, 25 bp, Saccharomyces pastorianus
taaacacccttgcttgttctctttt

SEQ ID NO: 121723 - DNA, 25 bp, Saccharomyces pastorianus
taagttcgaggctttggctgctcac

SEQ ID NO: 121724 - DNA, 25 bp, Saccharomyces pastorianus
ttccaaggtcgccaagaatgctcat

SEQ ID NO: 121725 - DNA, 25 bp, Saccharomyces pastorianus
ggttcctcaatcatgcctggtaaag

SEQ ID NO: 121726 - DNA, 25 bp, Saccharomyces pastorianus
tcaaaccgcccctaataagttcgag

SEQ ID NO: 121727 - DNA, 25 bp, Saccharomyces pastorianus
ctcttctaatacaatttcagcgttt

SEQ ID NO: 121728 - DNA, 25 bp, Saccharomyces pastorianus
tcccctttccgtgatgcgggtaata

SEQ ID NO: 121729 - DNA, 25 bp, Saccharomyces pastorianus
ggtgtactctcttattcgttatcat

SEQ ID NO: 121730 - DNA, 25 bp, Saccharomyces pastorianus
gatgcgggtaatactaggtccctta

SEQ ID NO: 121731 - DNA, 25 bp, Saccharomyces pastorianus
atttgctgctaaacttcttaaagag

SEQ ID NO: 121732 - DNA, 25 bp, Saccharomyces pastorianus
gtttttaaaccgatatttgctgcta

SEQ ID NO: 121733 - DNA, 25 bp, Saccharomyces pastorianus
agacagttattctcttctaatacaa

SEQ ID NO: 121734 - DNA, 25 bp, Saccharomyces pastorianus
tcatttctgaaaattcccctttccg

SEQ ID NO: 121735 - DNA, 25 bp, Saccharomyces pastorianus
agtcctcgaagatttagtagttctt

SEQ ID NO: 121736 - DNA, 25 bp, Saccharomyces pastorianus
tagtagttcttttcctttgcttttg

SEQ ID NO: 121737 - DNA, 25 bp, Saccharomyces pastorianus
gagatttgctcttctggtgtactct

SEQ ID NO: 121738 - DNA, 25 bp, Saccharomyces pastorianus
ggtaagtttccaacaaaatctcagg

SEQ ID NO: 121739 - DNA, 25 bp, Saccharomyces pastorianus
agcgttgcagccaattcacaatcaa

SEQ ID NO: 121740 - DNA, 25 bp, Saccharomyces pastorianus
ggtatattctatgactctgatggca

SEQ ID NO: 121741 - DNA, 25 bp, Saccharomyces pastorianus
agaacccgtatctgaagcgttgcag

SEQ ID NO: 121742 - DNA, 25 bp, Saccharomyces pastorianus
gggcaatcaatacttttatacctgt

SEQ ID NO: 121743 - DNA, 25 bp, Saccharomyces pastorianus
aattggcttcattggacaacctgag

SEQ ID NO: 121744 - DNA, 25 bp, Saccharomyces pastorianus
tacagttcgtcgttgcctattagaa

SEQ ID NO: 121745 - DNA, 25 bp, Saccharomyces pastorianus
tacctgttgcgtagatgttatgcca

SEQ ID NO: 121746 - DNA, 25 bp, Saccharomyces pastorianus
gaatcaggcatagactcgaacacaa

SEQ ID NO: 121747 - DNA, 25 bp, Saccharomyces pastorianus
gagcacagaactctacttcaagtga

SEQ ID NO: 121748 - DNA, 25 bp, Saccharomyces pastorianus
gagagttgtacccttatcaaatgaa

SEQ ID NO: 121749 - DNA, 25 bp, Saccharomyces pastorianus
atattgataccggtcccggacgacg

SEQ ID NO: 121750 - DNA, 25 bp, Saccharomyces pastorianus
gacgacgcggatacaccgactttta

SEQ ID NO: 121751 - DNA, 25 bp, Saccharomyces pastorianus
aagagtactcaatgtctgccgaatt

SEQ ID NO: 121752 - DNA, 25 bp, Saccharomyces pastorianus
tgccgaattgggactgccttcaata

SEQ ID NO: 121753 - DNA, 25 bp, Saccharomyces pastorianus
ggtctctaaagtatgtccctgaaaa

SEQ ID NO: 121754 - DNA, 25 bp, Saccharomyces pastorianus
ttaaatattcacacgggtctctaaa

SEQ ID NO: 121755 - DNA, 25 bp, Saccharomyces pastorianus
gaaatttcatcaatgtgtccgatta

SEQ ID NO: 121756 - DNA, 25 bp, Saccharomyces pastorianus
gaaattcactgtaaggccaaggccc

SEQ ID NO: 121757 - DNA, 25 bp, Saccharomyces pastorianus
taacgtttatacctcctgatggaaa

SEQ ID NO: 121758 - DNA, 25 bp, Saccharomyces pastorianus
caaataccctactttactacttcag

SEQ ID NO: 121759 - DNA, 25 bp, Saccharomyces pastorianus
aaggacctgtccaaatcaaatttca

SEQ ID NO: 121760 - DNA, 25 bp, Saccharomyces pastorianus
agggcttactgtcgttactttaatg

SEQ ID NO: 121761 - DNA, 25 bp, Saccharomyces pastorianus
aatgggctatgttcacgctttgacc

SEQ ID NO: 121762 - DNA, 25 bp, Saccharomyces pastorianus
aatgcgttcgtaatgggctttgcca

SEQ ID NO: 121763 - DNA, 25 bp, Saccharomyces pastorianus
agaaggctccgtttaccgtgaatgg

SEQ ID NO: 121764 - DNA, 25 bp, Saccharomyces pastorianus
gatttcctgcatcgcgggtagtaaa

SEQ ID NO: 121765 - DNA, 25 bp, Saccharomyces pastorianus
aagaggtcctgcattaagggcttac

SEQ ID NO: 121766 - DNA, 25 bp, Saccharomyces pastorianus
gtagcagacggttccttagagccta

SEQ ID NO: 121767 - DNA, 25 bp, Saccharomyces pastorianus
taaatccccgtgtcttgaagacctg

SEQ ID NO: 121768 - DNA, 25 bp, Saccharomyces pastorianus
gggactcctatgtgaaccatgattt

SEQ ID NO: 121769 - DNA, 25 bp, Saccharomyces pastorianus
catggtgccacgaagctatgcttga

SEQ ID NO: 121770 - DNA, 25 bp, Saccharomyces pastorianus
aaacttactcatcgtcatggtgcca

SEQ ID NO: 121771 - DNA, 25 bp, Saccharomyces pastorianus
atagttacctttatgtatgcggcgt

SEQ ID NO: 121772 - DNA, 25 bp, Saccharomyces pastorianus
gcatatgcggttttgacagtttcaa

SEQ ID NO: 121773 - DNA, 25 bp, Saccharomyces pastorianus
tagatatcgccattgcattgatcaa

SEQ ID NO: 121774 - DNA, 25 bp, Saccharomyces pastorianus
attagcgatgtatcccctagtgctg

SEQ ID NO: 121775 - DNA, 25 bp, Saccharomyces pastorianus
atcttgcacacaaagctgcgatcga

SEQ ID NO: 121776 - DNA, 25 bp, Saccharomyces pastorianus
ggtatttttccttgcatatgcggtt

SEQ ID NO: 121777 - DNA, 25 bp, Saccharomyces pastorianus
tgaatcaacctccaatgtgctcgaa

SEQ ID NO: 121778 - DNA, 25 bp, Saccharomyces pastorianus
gccgagttcttttcactattgcaat

SEQ ID NO: 121779 - DNA, 25 bp, Saccharomyces pastorianus
tatgcggcgtttgtttccattggat

SEQ ID NO: 121780 - DNA, 25 bp, Saccharomyces pastorianus
aaaagttcatttactccagagcata

SEQ ID NO: 121781 - DNA, 25 bp, Saccharomyces pastorianus
gaagtatgacaagctctgccgagtt

SEQ ID NO: 121782 - DNA, 25 bp, Saccharomyces pastorianus
accccatcatgctctttcgaaaatt

SEQ ID NO: 121783 - DNA, 25 bp, Saccharomyces pastorianus
gagaaagcttaccatatcaacccca

SEQ ID NO: 121784 - DNA, 25 bp, Saccharomyces pastorianus
ctagcagtgcctcatctttaatttc

SEQ ID NO: 121785 - DNA, 25 bp, Saccharomyces pastorianus
atcacgggtcctaacagcaataacg

SEQ ID NO: 121786 - DNA, 25 bp, Saccharomyces pastorianus
taccaatttggtcagcagcagtcaa

SEQ ID NO: 121787 - DNA, 25 bp, Saccharomyces pastorianus
cgcaacggcgcattacctcaatggg

SEQ ID NO: 121788 - DNA, 25 bp, Saccharomyces pastorianus
ttcaaatagcacatccattccttcg

SEQ ID NO: 121789 - DNA, 25 bp, Saccharomyces pastorianus
gataacagcgttttcagccggaata

SEQ ID NO: 121790 - DNA, 25 bp, Saccharomyces pastorianus
attaaccatggaatgttcccctcgc

SEQ ID NO: 121791 - DNA, 25 bp, Saccharomyces pastorianus
tggtgttctacccttcattaatcaa

SEQ ID NO: 121792 - DNA, 25 bp, Saccharomyces pastorianus
gagctcactctctgataacagcgtt

SEQ ID NO: 121793 - DNA, 25 bp, Saccharomyces pastorianus
acgcacgttgcgtagagcttatatc

SEQ ID NO: 121794 - DNA, 25 bp, Saccharomyces pastorianus
aaagccgactttcacgcctttggat

SEQ ID NO: 121795 - DNA, 25 bp, Saccharomyces pastorianus
gagtgggctttataaatccgtatca

SEQ ID NO: 121796 - DNA, 25 bp, Saccharomyces pastorianus
aaccttcaggttcatactatgcgtt

SEQ ID NO: 121797 - DNA, 25 bp, Saccharomyces pastorianus
aaatggctgctgataaacgcgatgc

SEQ ID NO: 121798 - DNA, 25 bp, Saccharomyces pastorianus
gatgactgtgccgatgaagccaaaa

SEQ ID NO: 121799 - DNA, 25 bp, Saccharomyces pastorianus
gagcttatatcattggccctagatc

SEQ ID NO: 121800 - DNA, 25 bp, Saccharomyces pastorianus
acgacttgccggacttcttaaatga

SEQ ID NO: 121801 - DNA, 25 bp, Saccharomyces pastorianus
caatattgacgacttgccggacttc

SEQ ID NO: 121802 - DNA, 25 bp, Saccharomyces pastorianus
ttagtcggcacagtggacgcacgtt

SEQ ID NO: 121803 - DNA, 25 bp, Saccharomyces pastorianus
ttggcgacatatcaatgagcagcat

SEQ ID NO: 121804 - DNA, 25 bp, Saccharomyces pastorianus
accactccacatggctcattgagag

SEQ ID NO: 121805 - DNA, 25 bp, Saccharomyces pastorianus
acactcaatttctttggattccaaa

SEQ ID NO: 121806 - DNA, 25 bp, Saccharomyces pastorianus
aagcgatggcaacaatgaccccgta

SEQ ID NO: 121807 - DNA, 25 bp, Saccharomyces pastorianus
gacccctattgcacttgttctgaaa

SEQ ID NO: 121808 - DNA, 25 bp, Saccharomyces pastorianus
aaggaatcatgcgagacccctattg

SEQ ID NO: 121809 - DNA, 25 bp, Saccharomyces pastorianus
ttaatatctctaagcaccactccac

SEQ ID NO: 121810 - DNA, 25 bp, Saccharomyces pastorianus
gaacacccaaatttacctcattctg

SEQ ID NO: 121811 - DNA, 25 bp, Saccharomyces pastorianus
gacgaattttctcaggacatgctct

SEQ ID NO: 121812 - DNA, 25 bp, Saccharomyces pastorianus
gacatgctcttggattattcccaca

SEQ ID NO: 121813 - DNA, 25 bp, Saccharomyces pastorianus
aatggactcgaagatttgcccttaa

SEQ ID NO: 121814 - DNA, 25 bp, Saccharomyces pastorianus
gtgcagttttttcctcgagattcaa

SEQ ID NO: 121815 - DNA, 25 bp, Saccharomyces pastorianus
gaatttaacggcaacgccgccagtg

SEQ ID NO: 121816 - DNA, 25 bp, Saccharomyces pastorianus
aaggaatctaactctgcctctgggt

SEQ ID NO: 121817 - DNA, 25 bp, Saccharomyces pastorianus
aattgctaacttttccgctatcgta

SEQ ID NO: 121818 - DNA, 25 bp, Saccharomyces pastorianus
gcatagcccggacagatcgacttat

SEQ ID NO: 121819 - DNA, 25 bp, Saccharomyces pastorianus
gcctctgggtttgcctttgcaagta

SEQ ID NO: 121820 - DNA, 25 bp, Saccharomyces pastorianus
tacccgattgtcgatgagtcagaat

SEQ ID NO: 121821 - DNA, 25 bp, Saccharomyces pastorianus
taacgatgcctttgccaatgtcgca

SEQ ID NO: 121822 - DNA, 25 bp, Saccharomyces pastorianus
tcgttttcaaacgttgctttcgagc

SEQ ID NO: 121823 - DNA, 25 bp, Saccharomyces pastorianus
gccagtgcagttgctgctgctagta

SEQ ID NO: 121824 - DNA, 25 bp, Saccharomyces pastorianus
cgacttatgccgatgacttttctca

SEQ ID NO: 121825 - DNA, 25 bp, Saccharomyces pastorianus
gaagacgaggtcttccctctttcgt

SEQ ID NO: 121826 - DNA, 25 bp, Saccharomyces pastorianus
gggctggagtcatttgggtgacttt

SEQ ID NO: 121827 - DNA, 25 bp, Saccharomyces pastorianus
ctcttttcaccggagtttctgatca

SEQ ID NO: 121828 - DNA, 25 bp, Saccharomyces pastorianus
caccggagtttctgatcaaatcgat

SEQ ID NO: 121829 - DNA, 25 bp, Saccharomyces pastorianus
ttctgatcaaatcgatcaatcttct

SEQ ID NO: 121830 - DNA, 25 bp, Saccharomyces pastorianus
ttcaccggagtttctgatcaaatcg

SEQ ID NO: 121831 - DNA, 25 bp, Saccharomyces pastorianus
cacccttcttgtaggagatctttgg

SEQ ID NO: 121832 - DNA, 25 bp, Saccharomyces pastorianus
ggagtttctgatcaaatcgatcaat

SEQ ID NO: 121833 - DNA, 25 bp, Saccharomyces pastorianus
accggagtttctgatcaaatcgatc

SEQ ID NO: 121834 - DNA, 25 bp, Saccharomyces pastorianus
cttttcaccggagtttctgatcaaa

SEQ ID NO: 121835 - DNA, 25 bp, Saccharomyces pastorianus
acccttcttgtaggagatctttggg

SEQ ID NO: 121836 - DNA, 25 bp, Saccharomyces pastorianus
agcacccttcttgtaggagatcttt

SEQ ID NO: 121837 - DNA, 25 bp, Saccharomyces pastorianus
gggctggagtcatttgggtgacttt

SEQ ID NO: 121838 - DNA, 25 bp, Saccharomyces pastorianus
gtttctgatcaaatcgatcaatctt

SEQ ID NO: 121839 - DNA, 25 bp, Saccharomyces pastorianus
atcgatcaatcttctttcatatggg

SEQ ID NO: 121840 - DNA, 25 bp, Saccharomyces pastorianus
ctcttttcaccggagtttctgatca

SEQ ID NO: 121841 - DNA, 25 bp, Saccharomyces pastorianus
cgagaggcagcaatgatgttgttca

SEQ ID NO: 121842 - DNA, 25 bp, Saccharomyces pastorianus
ttcaccggagtttctgatcaaatcg

SEQ ID NO: 121843 - DNA, 25 bp, Saccharomyces pastorianus
cacccttcttgtaggagatctttgg

SEQ ID NO: 121844 - DNA, 25 bp, Saccharomyces pastorianus
accggagtttctgatcaaatcgatc

SEQ ID NO: 121845 - DNA, 25 bp, Saccharomyces pastorianus
cttttcaccggagtttctgatcaaa

SEQ ID NO: 121846 - DNA, 25 bp, Saccharomyces pastorianus
agcacccttcttgtaggagatcttt

SEQ ID NO: 121847 - DNA, 25 bp, Saccharomyces pastorianus
aacttggttctgttggaggcagcac

SEQ ID NO: 121848 - DNA, 25 bp, Saccharomyces pastorianus
aaagaggaccactacgaatcgctaa

SEQ ID NO: 121849 - DNA, 25 bp, Saccharomyces pastorianus
ggacgcgtcactaccaaaggcagat

SEQ ID NO: 121850 - DNA, 25 bp, Saccharomyces pastorianus
gtcgatcttttcgttcatgatgcaa

SEQ ID NO: 121851 - DNA, 25 bp, Saccharomyces pastorianus
agaatcactgaactgcaagcggaaa

SEQ ID NO: 121852 - DNA, 25 bp, Saccharomyces pastorianus
gcgccgctaacgagctgattcagaa

SEQ ID NO: 121853 - DNA, 25 bp, Saccharomyces pastorianus
gaggcgcagaagctagaacacgact

SEQ ID NO: 121854 - DNA, 25 bp, Saccharomyces pastorianus
ggaaaggaccatatccaggaacaat

SEQ ID NO: 121855 - DNA, 25 bp, Saccharomyces pastorianus
acaaagagaatatcagcgccgctaa

SEQ ID NO: 121856 - DNA, 25 bp, Saccharomyces pastorianus
ggcactttttcctacaatgtcgatc

SEQ ID NO: 121857 - DNA, 25 bp, Saccharomyces pastorianus
ggagcaagtgtccacggcatcgtta

SEQ ID NO: 121858 - DNA, 25 bp, Saccharomyces pastorianus
agggcaatgatgacggcactttttc

SEQ ID NO: 121859 - DNA, 25 bp, Saccharomyces pastorianus
gatcgcttgcgcacagtacaattat

SEQ ID NO: 121860 - DNA, 25 bp, Saccharomyces pastorianus
tggccacttttgcagctgactcgaa

SEQ ID NO: 121861 - DNA, 25 bp, Saccharomyces pastorianus
gtacaattatttacgagcctccctc

SEQ ID NO: 121862 - DNA, 25 bp, Saccharomyces pastorianus
aaacaacattgcatggaggccccag

SEQ ID NO: 121863 - DNA, 25 bp, Saccharomyces pastorianus
atggaacttccttggaggaccctga

SEQ ID NO: 121864 - DNA, 25 bp, Saccharomyces pastorianus
gtctggagccactgcggatactata

SEQ ID NO: 121865 - DNA, 25 bp, Saccharomyces pastorianus
tgaggctggagccatcaccgtatga

SEQ ID NO: 121866 - DNA, 25 bp, Saccharomyces pastorianus
atgactgccaggtgctctattggga

SEQ ID NO: 121867 - DNA, 25 bp, Saccharomyces pastorianus
tggtggcgctggatccggtttaaac

SEQ ID NO: 121868 - DNA, 25 bp, Saccharomyces pastorianus
gcaatgttttgctctcgtgcggaga

SEQ ID NO: 121869 - DNA, 25 bp, Saccharomyces pastorianus
atggcatcccacaaagcgcaatgtt

SEQ ID NO: 121870 - DNA, 25 bp, Saccharomyces pastorianus
aaggatctttcgcacagactactca

SEQ ID NO: 121871 - DNA, 25 bp, Saccharomyces pastorianus
atgtgtcggttacgccataggctac

SEQ ID NO: 121872 - DNA, 25 bp, Saccharomyces pastorianus
agcaggctatcgctttatcctttaa

SEQ ID NO: 121873 - DNA, 25 bp, Saccharomyces pastorianus
tgttcaatgtgctagccatctgggc

SEQ ID NO: 121874 - DNA, 25 bp, Saccharomyces pastorianus
taattcacctatcattgcctcattt

SEQ ID NO: 121875 - DNA, 25 bp, Saccharomyces pastorianus
ggtgtttcaccttattcgcatacta

SEQ ID NO: 121876 - DNA, 25 bp, Saccharomyces pastorianus
agtactattagtcgcaattgccgtc

SEQ ID NO: 121877 - DNA, 25 bp, Saccharomyces pastorianus
ggcacccttgaatctcttcgaagaa

SEQ ID NO: 121878 - DNA, 25 bp, Saccharomyces pastorianus
acctgagtgctctatttgccggaat

SEQ ID NO: 121879 - DNA, 25 bp, Saccharomyces pastorianus
ttgccggaattctgtactgtttgtt

SEQ ID NO: 121880 - DNA, 25 bp, Saccharomyces pastorianus
aattccgacattatatacaccccta

SEQ ID NO: 121881 - DNA, 25 bp, Saccharomyces pastorianus
gctgtatgacgatagggccggtttc

SEQ ID NO: 121882 - DNA, 25 bp, Saccharomyces pastorianus
gatgctatctacttacgattttccc

SEQ ID NO: 121883 - DNA, 25 bp, Saccharomyces pastorianus
cgttccattgggtatgatgcggcta

SEQ ID NO: 121884 - DNA, 25 bp, Saccharomyces pastorianus
gattttccctatcgcttggacggaa

SEQ ID NO: 121885 - DNA, 25 bp, Saccharomyces pastorianus
atactccacgtgaagtgacgccttg

SEQ ID NO: 121886 - DNA, 25 bp, Saccharomyces pastorianus
gtgtcgcaggtaaaatcccaccaat

SEQ ID NO: 121887 - DNA, 25 bp, Saccharomyces pastorianus
attgtggcgccatgtacgaggcaat

SEQ ID NO: 121888 - DNA, 25 bp, Saccharomyces pastorianus
aaagttcgctgggatcgctatactc

SEQ ID NO: 121889 - DNA, 25 bp, Saccharomyces pastorianus
attaatgtcctcttaactcgtggcg

SEQ ID NO: 121890 - DNA, 25 bp, Saccharomyces pastorianus
aactcgtggcgtgcgtggtctgtat

SEQ ID NO: 121891 - DNA, 25 bp, Saccharomyces pastorianus
gctggtgtaattttgggccgttcca

SEQ ID NO: 121892 - DNA, 25 bp, Saccharomyces pastorianus
gtttctgtattgacgatggacccac

SEQ ID NO: 121893 - DNA, 25 bp, Saccharomyces pastorianus
atgctttattcgttctgtggcgcta

SEQ ID NO: 121894 - DNA, 25 bp, Saccharomyces pastorianus
aactttgataacaggtgcacacttg

SEQ ID NO: 121895 - DNA, 25 bp, Saccharomyces pastorianus
gtctcggtgtcactattttcactat

SEQ ID NO: 121896 - DNA, 25 bp, Saccharomyces pastorianus
gtggcgctatgggacaatgctttat

SEQ ID NO: 121897 - DNA, 25 bp, Saccharomyces pastorianus
aagagtgtacgtttccagcaatggg

SEQ ID NO: 121898 - DNA, 25 bp, Saccharomyces pastorianus
ttgatggattgaccaacgccaccca

SEQ ID NO: 121899 - DNA, 25 bp, Saccharomyces pastorianus
tgatgtttacactgaacctcttcgt

SEQ ID NO: 121900 - DNA, 25 bp, Saccharomyces pastorianus
gaacctcttcgtgatattgtggaat

SEQ ID NO: 121901 - DNA, 25 bp, Saccharomyces pastorianus
caatgggataatgccgtttctgtat

SEQ ID NO: 121902 - DNA, 25 bp, Saccharomyces pastorianus
gtagctctcttggtaagtctcggtg

SEQ ID NO: 121903 - DNA, 25 bp, Saccharomyces pastorianus
gtcattgaattctgtccgaagctta

SEQ ID NO: 121904 - DNA, 25 bp, Saccharomyces pastorianus
ttatttctgaatacgggctgcctga

SEQ ID NO: 121905 - DNA, 25 bp, Saccharomyces pastorianus
acgggctgcctgagtgttttatatc

SEQ ID NO: 121906 - DNA, 25 bp, Saccharomyces pastorianus
agacttatgcaagctgtatttccag

SEQ ID NO: 121907 - DNA, 25 bp, Saccharomyces pastorianus
ggagctacctggtgtgtattcagat

SEQ ID NO: 121908 - DNA, 25 bp, Saccharomyces pastorianus
tcagatgacgagctgctaagccaat

SEQ ID NO: 121909 - DNA, 25 bp, Saccharomyces pastorianus
gatttggccttcaactacataacat

SEQ ID NO: 121910 - DNA, 25 bp, Saccharomyces pastorianus
atgctgcccattcctagtaaaccaa

SEQ ID NO: 121911 - DNA, 25 bp, Saccharomyces pastorianus
gctctatatgtggacgcttaccgaa

SEQ ID NO: 121912 - DNA, 25 bp, Saccharomyces pastorianus
ctagacgaaatcttgcttccagcaa

SEQ ID NO: 121913 - DNA, 25 bp, Saccharomyces pastorianus
gagccctcagcttctcaagtgaaag

SEQ ID NO: 121914 - DNA, 25 bp, Saccharomyces pastorianus
gaaaaactagctgaactgactgtaa

SEQ ID NO: 121915 - DNA, 25 bp, Saccharomyces pastorianus
gagcggtcctaaattcccagatata

SEQ ID NO: 121916 - DNA, 25 bp, Saccharomyces pastorianus
gtctttggttcgagcggtcctaaat

SEQ ID NO: 121917 - DNA, 25 bp, Saccharomyces pastorianus
ggatgatgtcgattctttctcattt

SEQ ID NO: 121918 - DNA, 25 bp, Saccharomyces pastorianus
agggcccgataaacgatactcggat

SEQ ID NO: 121919 - DNA, 25 bp, Saccharomyces pastorianus
ggatggttctagattcggtattcaa

SEQ ID NO: 121920 - DNA, 25 bp, Saccharomyces pastorianus
agaggagtgcttaaaaccatcaggg

SEQ ID NO: 121921 - DNA, 25 bp, Saccharomyces pastorianus
ttcggaaatgaaccacagcttagat

SEQ ID NO: 121922 - DNA, 25 bp, Saccharomyces pastorianus
gatttttcgccggtgcacaaaagta

SEQ ID NO: 121923 - DNA, 25 bp, Saccharomyces pastorianus
tatgccattgattatgtaacccagg

SEQ ID NO: 121924 - DNA, 25 bp, Saccharomyces pastorianus
aattattccattccaacgttgttgt

SEQ ID NO: 121925 - DNA, 25 bp, Saccharomyces pastorianus
ttggatgccccagctgctatcagaa

SEQ ID NO: 121926 - DNA, 25 bp, Saccharomyces pastorianus
caaggacttgactaagttattatat

SEQ ID NO: 121927 - DNA, 25 bp, Saccharomyces pastorianus
ggatgccccagctgctatcagaact

SEQ ID NO: 121928 - DNA, 25 bp, Saccharomyces pastorianus
cggcttcagtttggacgaaccaact

SEQ ID NO: 121929 - DNA, 25 bp, Saccharomyces pastorianus
tccggcttcagtttggacgaaccaa

SEQ ID NO: 121930 - DNA, 25 bp, Saccharomyces pastorianus
tgctttgttgacttccggcttcagt

SEQ ID NO: 121931 - DNA, 25 bp, Saccharomyces pastorianus
tacaaattgttggatgccccagctg

SEQ ID NO: 121932 - DNA, 25 bp, Saccharomyces pastorianus
aaactgctttgttgacttccggctt

SEQ ID NO: 121933 - DNA, 25 bp, Saccharomyces pastorianus
tgaaactgctttgttgacttccggc

SEQ ID NO: 121934 - DNA, 25 bp, Saccharomyces pastorianus
gacttccggcttcagtttggacgaa

SEQ ID NO: 121935 - DNA, 25 bp, Saccharomyces pastorianus
agacaagactgtcaaggacttgact

SEQ ID NO: 121936 - DNA, 25 bp, Saccharomyces pastorianus
tggagtaccttctttgctttcagca

SEQ ID NO: 121937 - DNA, 25 bp, Saccharomyces pastorianus
gcatccacattatctagaccagctt

SEQ ID NO: 121938 - DNA, 25 bp, Saccharomyces pastorianus
ttcagcttcagcatcggcagaaacg

SEQ ID NO: 121939 - DNA, 25 bp, Saccharomyces pastorianus
tagttctttctcaaacgcgtctaca

SEQ ID NO: 121940 - DNA, 25 bp, Saccharomyces pastorianus
aaggatagttcacccaaggcttctg

SEQ ID NO: 121941 - DNA, 25 bp, Saccharomyces pastorianus
tacactgctgtcctttgtctttttc

SEQ ID NO: 121942 - DNA, 25 bp, Saccharomyces pastorianus
ttctgctatgtcgtcagtaggctct

SEQ ID NO: 121943 - DNA, 25 bp, Saccharomyces pastorianus
tgtagggtcgaatcctaactcagca

SEQ ID NO: 121944 - DNA, 25 bp, Saccharomyces pastorianus
aatcatctgggatcaccttcttagt

SEQ ID NO: 121945 - DNA, 25 bp, Saccharomyces pastorianus
agtaggctctttttcagcttcagca

SEQ ID NO: 121946 - DNA, 25 bp, Saccharomyces pastorianus
ggcagaaacgctcttggacttcttc

SEQ ID NO: 121947 - DNA, 25 bp, Saccharomyces pastorianus
ggcctaccttattcagagttattat

SEQ ID NO: 121948 - DNA, 25 bp, Saccharomyces pastorianus
gaactagctaaagctggtctagata

SEQ ID NO: 121949 - DNA, 25 bp, Saccharomyces pastorianus
gaagttggcctaccttattcagagt

SEQ ID NO: 121950 - DNA, 25 bp, Saccharomyces pastorianus
accagatccgtctcttctattaaaa

SEQ ID NO: 121951 - DNA, 25 bp, Saccharomyces pastorianus
gctaattccagcattcaacaagaag

SEQ ID NO: 121952 - DNA, 25 bp, Saccharomyces pastorianus
tgctgaaagcaaagaaggtactcca

SEQ ID NO: 121953 - DNA, 25 bp, Saccharomyces pastorianus
gacagcagtgtagacgcgtttgaga

SEQ ID NO: 121954 - DNA, 25 bp, Saccharomyces pastorianus
gtcaaacagactgttctttatggtc

SEQ ID NO: 121955 - DNA, 25 bp, Saccharomyces pastorianus
ggtctagataatgtggatgctgaaa

SEQ ID NO: 121956 - DNA, 25 bp, Saccharomyces pastorianus
cttcgcagaattaggtacgtccggt

SEQ ID NO: 121957 - DNA, 25 bp, Saccharomyces pastorianus
aggtactccaagtgctaattccagc

SEQ ID NO: 121958 - DNA, 25 bp, Saccharomyces pastorianus
agtaattggtgacctcggctcctgc

SEQ ID NO: 121959 - DNA, 25 bp, Saccharomyces pastorianus
acaggcatcaactcagcgaactaca

SEQ ID NO: 121960 - DNA, 25 bp, Saccharomyces pastorianus
gacaagataacgctacttccagagt

SEQ ID NO: 121961 - DNA, 25 bp, Saccharomyces pastorianus
acggcgatgctcctagaagacactc

SEQ ID NO: 121962 - DNA, 25 bp, Saccharomyces pastorianus
tcctccaactcagcaggttcaatag

SEQ ID NO: 121963 - DNA, 25 bp, Saccharomyces pastorianus
attgtacgttgccatatactccacc

SEQ ID NO: 121964 - DNA, 25 bp, Saccharomyces pastorianus
gtaaatgtcgatgcggtttctatga

SEQ ID NO: 121965 - DNA, 25 bp, Saccharomyces pastorianus
gtttacatgatcctgcgtcaagaca

SEQ ID NO: 121966 - DNA, 25 bp, Saccharomyces pastorianus
gagcttctttaacctacgccataaa

SEQ ID NO: 121967 - DNA, 25 bp, Saccharomyces pastorianus
gttctcttcagacggtttaccagta

SEQ ID NO: 121968 - DNA, 25 bp, Saccharomyces pastorianus
ggctcctgctctcaagctgatataa

SEQ ID NO: 121969 - DNA, 25 bp, Saccharomyces pastorianus
ggataggtcgattattattacaact

SEQ ID NO: 121970 - DNA, 25 bp, Saccharomyces pastorianus
ttatcgacgaagtccacatgttgga

SEQ ID NO: 121971 - DNA, 25 bp, Saccharomyces pastorianus
tgccccaatcgtcatgatggccaca

SEQ ID NO: 121972 - DNA, 25 bp, Saccharomyces pastorianus
gaagttgaactgtcatccgatgcct

SEQ ID NO: 121973 - DNA, 25 bp, Saccharomyces pastorianus
aatctccgttgctcagcaaattgca

SEQ ID NO: 121974 - DNA, 25 bp, Saccharomyces pastorianus
ggttacctctcgatcttttggatag

SEQ ID NO: 121975 - DNA, 25 bp, Saccharomyces pastorianus
gttcctggtgtattatttatcgacg

SEQ ID NO: 121976 - DNA, 25 bp, Saccharomyces pastorianus
gatggccacaaatagaggagtttcc

SEQ ID NO: 121977 - DNA, 25 bp, Saccharomyces pastorianus
tcagggcaacgttcaaatatccatt

SEQ ID NO: 121978 - DNA, 25 bp, Saccharomyces pastorianus
gcgctagatctgttaagtatgttca

SEQ ID NO: 121979 - DNA, 25 bp, Saccharomyces pastorianus
tccgatgccttagatctattgacca

SEQ ID NO: 121980 - DNA, 25 bp, Saccharomyces pastorianus
gatgatagtactgacgatgccgatg

SEQ ID NO: 121981 - DNA, 25 bp, Saccharomyces pastorianus
tagaagttgtcaacgccgacacagt

SEQ ID NO: 121982 - DNA, 25 bp, Saccharomyces pastorianus
aaaactgatttgcatctaccgaaga

SEQ ID NO: 121983 - DNA, 25 bp, Saccharomyces pastorianus
gattacgttgcctcactcaatgaat

SEQ ID NO: 121984 - DNA, 25 bp, Saccharomyces pastorianus
gatcacatcaactgggagcacatca

SEQ ID NO: 121985 - DNA, 25 bp, Saccharomyces pastorianus
gaatttcttttgagcgccatgacga

SEQ ID NO: 121986 - DNA, 25 bp, Saccharomyces pastorianus
accctttgaccttgacctgaatgag

SEQ ID NO: 121987 - DNA, 25 bp, Saccharomyces pastorianus
gacgatggcttcgaagtcactagaa

SEQ ID NO: 121988 - DNA, 25 bp, Saccharomyces pastorianus
gaagtacatggaaccctttgacctt

SEQ ID NO: 121989 - DNA, 25 bp, Saccharomyces pastorianus
aacaatctgccgaccatgatgatag

SEQ ID NO: 121990 - DNA, 25 bp, Saccharomyces pastorianus
gagaatcggcgttcttcaagctaga

SEQ ID NO: 121991 - DNA, 25 bp, Saccharomyces pastorianus
taacaatcttgattcattctccccg

SEQ ID NO: 121992 - DNA, 25 bp, Saccharomyces pastorianus
gtcttcctcgaagaatggcggcaaa

SEQ ID NO: 121993 - DNA, 25 bp, Saccharomyces pastorianus
gcatcaacaggctccctattatttt

SEQ ID NO: 121994 - DNA, 25 bp, Saccharomyces pastorianus
aggtaatcatatcgtcctttcctcc

SEQ ID NO: 121995 - DNA, 25 bp, Saccharomyces pastorianus
atagttactaccagtatcctcttcc

SEQ ID NO: 121996 - DNA, 25 bp, Saccharomyces pastorianus
gattctgctgactttcaagcacgga

SEQ ID NO: 121997 - DNA, 25 bp, Saccharomyces pastorianus
agtatcctttgaatgtgagcccctc

SEQ ID NO: 121998 - DNA, 25 bp, Saccharomyces pastorianus
gagtctgatatttcggtcaacacca

SEQ ID NO: 121999 - DNA, 25 bp, Saccharomyces pastorianus
gttttctccgtcaacgacagttgct

SEQ ID NO: 122000 - DNA, 25 bp, Saccharomyces pastorianus
ttttaccacagtatcagcaggcatt

SEQ ID NO: 122001 - DNA, 25 bp, Saccharomyces pastorianus
cgagatccatgccaagtacttcctt

SEQ ID NO: 122002 - DNA, 25 bp, Saccharomyces pastorianus
agatatagaccactcctccataata

SEQ ID NO: 122003 - DNA, 25 bp, Saccharomyces pastorianus
gtccaagatctttactttctctcga

SEQ ID NO: 122004 - DNA, 25 bp, Saccharomyces pastorianus
gtatcatcagaacacgcaatccagt

SEQ ID NO: 122005 - DNA, 25 bp, Saccharomyces pastorianus
ggtattattccagatgcgctcagtt

SEQ ID NO: 122006 - DNA, 25 bp, Saccharomyces pastorianus
aaatcgcactgcgtcatcgttacag

SEQ ID NO: 122007 - DNA, 25 bp, Saccharomyces pastorianus
gatgcgctcagtttccagaatttca

SEQ ID NO: 122008 - DNA, 25 bp, Saccharomyces pastorianus
tactctttagcagatcgtctcagca

SEQ ID NO: 122009 - DNA, 25 bp, Saccharomyces pastorianus
cgtctcagcattatgttgtcccaga

SEQ ID NO: 122010 - DNA, 25 bp, Saccharomyces pastorianus
agcagcaacccctttggtattattc

SEQ ID NO: 122011 - DNA, 25 bp, Saccharomyces pastorianus
taatcctggttctatgtcttcttca

SEQ ID NO: 122012 - DNA, 25 bp, Saccharomyces pastorianus
gggccggtgccagcgaaaactcaaa

SEQ ID NO: 122013 - DNA, 25 bp, Saccharomyces pastorianus
tttactacttgttttgtcgtgagac

SEQ ID NO: 122014 - DNA, 25 bp, Saccharomyces pastorianus
tcgagaaacaattcgctgttgttgc

SEQ ID NO: 122015 - DNA, 25 bp, Saccharomyces pastorianus
gaattttatggagagattcccagaa

SEQ ID NO: 122016 - DNA, 25 bp, Saccharomyces pastorianus
gtctacttttaatgcagaaaccgct

SEQ ID NO: 122017 - DNA, 25 bp, Saccharomyces pastorianus
gtcgtgagactacaattttacgctt

SEQ ID NO: 122018 - DNA, 25 bp, Saccharomyces pastorianus
agattcccagaatacaaagatgttg

SEQ ID NO: 122019 - DNA, 25 bp, Saccharomyces pastorianus
acgcttctgccgagtatggtcaatt

SEQ ID NO: 122020 - DNA, 25 bp, Saccharomyces pastorianus
agaaaccgctgataacttggaagat

SEQ ID NO: 122021 - DNA, 25 bp, Saccharomyces pastorianus
tccaagttacgtttgactaagtttg

SEQ ID NO: 122022 - DNA, 25 bp, Saccharomyces pastorianus
gactataactttggtactttgttga

SEQ ID NO: 122023 - DNA, 25 bp, Saccharomyces pastorianus
actttgttgaggacagacgcttctg

SEQ ID NO: 122024 - DNA, 25 bp, Saccharomyces pastorianus
atgacttcttgacttcgggccaaca

SEQ ID NO: 122025 - DNA, 25 bp, Saccharomyces pastorianus
ggcggtaacgacttccagcaacaaa

SEQ ID NO: 122026 - DNA, 25 bp, Saccharomyces pastorianus
aagggaatttccctcaacgccagca

SEQ ID NO: 122027 - DNA, 25 bp, Saccharomyces pastorianus
caatcctctaatatcggcagcggta

SEQ ID NO: 122028 - DNA, 25 bp, Saccharomyces pastorianus
gccagcagccacagtctaatctagg

SEQ ID NO: 122029 - DNA, 25 bp, Saccharomyces pastorianus
ggtggtggcacttatacccaaactt

SEQ ID NO: 122030 - DNA, 25 bp, Saccharomyces pastorianus
agacgcgatctgtctgggtcaggaa

SEQ ID NO: 122031 - DNA, 25 bp, Saccharomyces pastorianus
caaggtcgtacaagaggtgctcaaa

SEQ ID NO: 122032 - DNA, 25 bp, Saccharomyces pastorianus
aacaaactactgactacactgccgg

SEQ ID NO: 122033 - DNA, 25 bp, Saccharomyces pastorianus
gtgctcaaagtaaccgctaccaatc

SEQ ID NO: 122034 - DNA, 25 bp, Saccharomyces pastorianus
gttgcacggcaacgatcatgatgaa

SEQ ID NO: 122035 - DNA, 25 bp, Saccharomyces pastorianus
acggcgaattgcgtttgctcaacga

SEQ ID NO: 122036 - DNA, 25 bp, Saccharomyces pastorianus
attggacccaagactatttgacctt

SEQ ID NO: 122037 - DNA, 25 bp, Saccharomyces pastorianus
atggcctacaagatcccagttcgga

SEQ ID NO: 122038 - DNA, 25 bp, Saccharomyces pastorianus
agaaggtctttgacgctaacggcga

SEQ ID NO: 122039 - DNA, 25 bp, Saccharomyces pastorianus
gttcggagctagatacatctgcgtt

SEQ ID NO: 122040 - DNA, 25 bp, Saccharomyces pastorianus
attctgcaggccacaaaagtcgact

SEQ ID NO: 122041 - DNA, 25 bp, Saccharomyces pastorianus
ggaaactgctgcaagagcgtcgctt

SEQ ID NO: 122042 - DNA, 25 bp, Saccharomyces pastorianus
gaaatgggatgtcactctgcggcca

SEQ ID NO: 122043 - DNA, 25 bp, Saccharomyces pastorianus
gggtatgttcttcaactccaagcaa

SEQ ID NO: 122044 - DNA, 25 bp, Saccharomyces pastorianus
gacaccgcaacactttttggagcat

SEQ ID NO: 122045 - DNA, 25 bp, Saccharomyces pastorianus
tgccaagaaagccaacccgttgttt

SEQ ID NO: 122046 - DNA, 25 bp, Saccharomyces pastorianus
ggtgggaccaaggtcaaatagtctt

SEQ ID NO: 122047 - DNA, 25 bp, Saccharomyces pastorianus
agatgtatctagctccgaactggga

SEQ ID NO: 122048 - DNA, 25 bp, Saccharomyces pastorianus
acaacgggttggctttcttggcaag

SEQ ID NO: 122049 - DNA, 25 bp, Saccharomyces pastorianus
aagcgacgctcttgcagcagtttcc

SEQ ID NO: 122050 - DNA, 25 bp, Saccharomyces pastorianus
cagcagtttccgtgggtgggaccaa

SEQ ID NO: 122051 - DNA, 25 bp, Saccharomyces pastorianus
ggtttacgctcattaggtatagctt

SEQ ID NO: 122052 - DNA, 25 bp, Saccharomyces pastorianus
ggtatagcttcttcaacgcagatgt

SEQ ID NO: 122053 - DNA, 25 bp, Saccharomyces pastorianus
gccatccctttgactgtacattaaa

SEQ ID NO: 122054 - DNA, 25 bp, Saccharomyces pastorianus
gttggctttcttggcaagcgacgct

SEQ ID NO: 122055 - DNA, 25 bp, Saccharomyces pastorianus
ttaaatcgtcgactacttcctccag

SEQ ID NO: 122056 - DNA, 25 bp, Saccharomyces pastorianus
tccgaactgggatcttgtaggccat

SEQ ID NO: 122057 - DNA, 25 bp, Saccharomyces pastorianus
ttgacgctatgtccgtcgatgactt

SEQ ID NO: 122058 - DNA, 25 bp, Saccharomyces pastorianus
tgaaatggaagaagacgttttggtt

SEQ ID NO: 122059 - DNA, 25 bp, Saccharomyces pastorianus
tgacagagctaagtcttgcggtgtt

SEQ ID NO: 122060 - DNA, 25 bp, Saccharomyces pastorianus
cgttttggttaaccaaatcttgatg

SEQ ID NO: 122061 - DNA, 25 bp, Saccharomyces pastorianus
ctaagtcttgcggtgttgacgctat

SEQ ID NO: 122062 - DNA, 25 bp, Saccharomyces pastorianus
acatgtccatctgtatcttcggtga

SEQ ID NO: 122063 - DNA, 25 bp, Saccharomyces pastorianus
aagaccaaacatgtccatctgtatc

SEQ ID NO: 122064 - DNA, 25 bp, Saccharomyces pastorianus
catgtccatctgtatcttcggtgat

SEQ ID NO: 122065 - DNA, 25 bp, Saccharomyces pastorianus
agtcttgcggtgttgacgctatgtc

SEQ ID NO: 122066 - DNA, 25 bp, Saccharomyces pastorianus
ccaaacatgtccatctgtatcttcg

SEQ ID NO: 122067 - DNA, 25 bp, Saccharomyces pastorianus
gtgttgacgctatgtccgtcgatga

SEQ ID NO: 122068 - DNA, 25 bp, Saccharomyces pastorianus
ggacggtcccataaagttgaaggct

SEQ ID NO: 122069 - DNA, 25 bp, Saccharomyces pastorianus
tgatgaagaacccaccttccttatc

SEQ ID NO: 122070 - DNA, 25 bp, Saccharomyces pastorianus
gaccaagcccataggatcatcatat

SEQ ID NO: 122071 - DNA, 25 bp, Saccharomyces pastorianus
gaaatttctttcatggcgagtgtta

SEQ ID NO: 122072 - DNA, 25 bp, Saccharomyces pastorianus
agccacctatctacttcaacttgtg

SEQ ID NO: 122073 - DNA, 25 bp, Saccharomyces pastorianus
atgcatgtttggtgccgtagtctat

SEQ ID NO: 122074 - DNA, 25 bp, Saccharomyces pastorianus
gaagcactatctaagttccgtgaga

SEQ ID NO: 122075 - DNA, 25 bp, Saccharomyces pastorianus
cgtagtctatcttggagccacctat

SEQ ID NO: 122076 - DNA, 25 bp, Saccharomyces pastorianus
aattgccaccaagctattagaagac

SEQ ID NO: 122077 - DNA, 25 bp, Saccharomyces pastorianus
tcaacttgtgtttcttacgagagac

SEQ ID NO: 122078 - DNA, 25 bp, Saccharomyces pastorianus
tgcgaacactttagcgatttcctcc

SEQ ID NO: 122079 - DNA, 25 bp, Saccharomyces pastorianus
aagggcgtcgactctagcagcggca

SEQ ID NO: 122080 - DNA, 25 bp, Saccharomyces pastorianus
tcacttacggccaatttgcttgtat

SEQ ID NO: 122081 - DNA, 25 bp, Saccharomyces pastorianus
gttctacaattgcttcctttatcgg

SEQ ID NO: 122082 - DNA, 25 bp, Saccharomyces pastorianus
gtggttggtgctgtcctattataca

SEQ ID NO: 122083 - DNA, 25 bp, Saccharomyces pastorianus
gtgaaatactgtctctagccaagtt

SEQ ID NO: 122084 - DNA, 25 bp, Saccharomyces pastorianus
gaagtggttcattccatgtcgaatt

SEQ ID NO: 122085 - DNA, 25 bp, Saccharomyces pastorianus
gaagatggcccaattcctatcatgg

SEQ ID NO: 122086 - DNA, 25 bp, Saccharomyces pastorianus
atcagctggtaagttggcttccacc

SEQ ID NO: 122087 - DNA, 25 bp, Saccharomyces pastorianus
aaacaacactttgctcacttacggc

SEQ ID NO: 122088 - DNA, 25 bp, Saccharomyces pastorianus
caggactgttgctgtttgcacgggt

SEQ ID NO: 122089 - DNA, 25 bp, Saccharomyces pastorianus
aacatcgacacacttgtgcgcgcta

SEQ ID NO: 122090 - DNA, 25 bp, Saccharomyces pastorianus
gaagcgctctttgacactgaatgat

SEQ ID NO: 122091 - DNA, 25 bp, Saccharomyces pastorianus
tctgtctttagatatcgcctcgcaa

SEQ ID NO: 122092 - DNA, 25 bp, Saccharomyces pastorianus
catggtgctatcacggatgatccga

SEQ ID NO: 122093 - DNA, 25 bp, Saccharomyces pastorianus
gattgagattactacctgtgcttat

SEQ ID NO: 122094 - DNA, 25 bp, Saccharomyces pastorianus
tggtatcagtgttcattttgtctcc

SEQ ID NO: 122095 - DNA, 25 bp, Saccharomyces pastorianus
gtctcctcgtggacaagccaattta

SEQ ID NO: 122096 - DNA, 25 bp, Saccharomyces pastorianus
tatgcgatggtcataccgtggcgaa

SEQ ID NO: 122097 - DNA, 25 bp, Saccharomyces pastorianus
gatcaagacctttgctatcatgtta

SEQ ID NO: 122098 - DNA, 25 bp, Saccharomyces pastorianus
tgcacgcttctatattccaaatggg

SEQ ID NO: 122099 - DNA, 25 bp, Saccharomyces pastorianus
atatctgtgcgaattgcctatccat

SEQ ID NO: 122100 - DNA, 25 bp, Saccharomyces pastorianus
gtttataacatcctttgcacgcttc

SEQ ID NO: 122101 - DNA, 25 bp, Saccharomyces pastorianus
gaagcaaagggacctcctcatcgaa

SEQ ID NO: 122102 - DNA, 25 bp, Saccharomyces pastorianus
ccatgaagaaattccccacccattt

SEQ ID NO: 122103 - DNA, 25 bp, Saccharomyces pastorianus
taataatgcagcctcttctttacca

SEQ ID NO: 122104 - DNA, 25 bp, Saccharomyces pastorianus
acagcagcaagttccgatggctaca

SEQ ID NO: 122105 - DNA, 25 bp, Saccharomyces pastorianus
tcctgaaccgttactacagcagcaa

SEQ ID NO: 122106 - DNA, 25 bp, Saccharomyces pastorianus
gcaggtccaaagttcgcagccacaa

SEQ ID NO: 122107 - DNA, 25 bp, Saccharomyces pastorianus
aacttgagacaacagcagccgcagc

SEQ ID NO: 122108 - DNA, 25 bp, Saccharomyces pastorianus
taatcaagcatctgtacctccacaa

SEQ ID NO: 122109 - DNA, 25 bp, Saccharomyces pastorianus
atgagatctaatccacaacagccgc

SEQ ID NO: 122110 - DNA, 25 bp, Saccharomyces pastorianus
gcagccgcagcagcaggtccaaagt

SEQ ID NO: 122111 - DNA, 25 bp, Saccharomyces pastorianus
tggctacaaccagggctactcagta

SEQ ID NO: 122112 - DNA, 25 bp, Saccharomyces pastorianus
ttcgtcctcttcttgtatacttcct

SEQ ID NO: 122113 - DNA, 25 bp, Saccharomyces pastorianus
gttttgcaacgacaatttcatccaa

SEQ ID NO: 122114 - DNA, 25 bp, Saccharomyces pastorianus
gaacttttgacagaacctacaccag

SEQ ID NO: 122115 - DNA, 25 bp, Saccharomyces pastorianus
tggaaacagacgctccttatggaga

SEQ ID NO: 122116 - DNA, 25 bp, Saccharomyces pastorianus
aacgaggcccttgtcacaaagcaaa

SEQ ID NO: 122117 - DNA, 25 bp, Saccharomyces pastorianus
gcaacgcaccaactgctgatacaga

SEQ ID NO: 122118 - DNA, 25 bp, Saccharomyces pastorianus
aaccaaggcctgatggaacttttga

SEQ ID NO: 122119 - DNA, 25 bp, Saccharomyces pastorianus
tatacttccttcaacaccaacgagg

SEQ ID NO: 122120 - DNA, 25 bp, Saccharomyces pastorianus
gcggatctacatgataccggatttt

SEQ ID NO: 122121 - DNA, 25 bp, Saccharomyces pastorianus
ggataattcgaaacctaggccaagg

SEQ ID NO: 122122 - DNA, 25 bp, Saccharomyces pastorianus
aaaatggatatagccctgtcagaat

SEQ ID NO: 122123 - DNA, 25 bp, Saccharomyces pastorianus
tagcccagtgctgacaattcttact

SEQ ID NO: 122124 - DNA, 25 bp, Saccharomyces pastorianus
gagcaacatctctacggaacagcgt

SEQ ID NO: 122125 - DNA, 25 bp, Saccharomyces pastorianus
taggatcggatgcttccacgctaaa

SEQ ID NO: 122126 - DNA, 25 bp, Saccharomyces pastorianus
aaacggtggctgttcgtgggctact

SEQ ID NO: 122127 - DNA, 25 bp, Saccharomyces pastorianus
acccgtctcagacagcgaggtttat

SEQ ID NO: 122128 - DNA, 25 bp, Saccharomyces pastorianus
gatctctttgttggtaactgtccct

SEQ ID NO: 122129 - DNA, 25 bp, Saccharomyces pastorianus
tgtagatctacgcacgaccacaaat

SEQ ID NO: 122130 - DNA, 25 bp, Saccharomyces pastorianus
tgggctactcagacattagggccaa

SEQ ID NO: 122131 - DNA, 25 bp, Saccharomyces pastorianus
gagatatctgtccattccaacaaga

SEQ ID NO: 122132 - DNA, 25 bp, Saccharomyces pastorianus
gaacttcatgtccatgcttcaggaa

SEQ ID NO: 122133 - DNA, 25 bp, Saccharomyces pastorianus
taactgtccctctgtaaatagccca

SEQ ID NO: 122134 - DNA, 25 bp, Saccharomyces pastorianus
gattgcctttttggaaagccagtta

SEQ ID NO: 122135 - DNA, 25 bp, Saccharomyces pastorianus
tcctgcaatgggaactcctttttat

SEQ ID NO: 122136 - DNA, 25 bp, Saccharomyces pastorianus
ggaaacctttccaagcctggtagat

SEQ ID NO: 122137 - DNA, 25 bp, Saccharomyces pastorianus
aatgattattttctcctgcaatggg

SEQ ID NO: 122138 - DNA, 25 bp, Saccharomyces pastorianus
gttcacaccttaaattcgtcatcgc

SEQ ID NO: 122139 - DNA, 25 bp, Saccharomyces pastorianus
aagccagttattttgcacaacgcaa

SEQ ID NO: 122140 - DNA, 25 bp, Saccharomyces pastorianus
ttgtccaaccaattggcgacctgga

SEQ ID NO: 122141 - DNA, 25 bp, Saccharomyces pastorianus
ttcgtcatcgcggaactaaattcat

SEQ ID NO: 122142 - DNA, 25 bp, Saccharomyces pastorianus
gaaggtaacatcaacgttgtccaac

SEQ ID NO: 122143 - DNA, 25 bp, Saccharomyces pastorianus
tttgagcgatgaggtgtgttcacac

SEQ ID NO: 122144 - DNA, 25 bp, Saccharomyces pastorianus
agaccacagctatcatcatttccta

SEQ ID NO: 122145 - DNA, 25 bp, Saccharomyces pastorianus
gagaccaactcagccatgaatcgca

SEQ ID NO: 122146 - DNA, 25 bp, Saccharomyces pastorianus
ggacaacctcaaggtcaagcccaga

SEQ ID NO: 122147 - DNA, 25 bp, Saccharomyces pastorianus
taaaagaggccctatttattctcca

SEQ ID NO: 122148 - DNA, 25 bp, Saccharomyces pastorianus
gtatagcgaaactcaaaccgtcaat

SEQ ID NO: 122149 - DNA, 25 bp, Saccharomyces pastorianus
atgcacaaccacatcctcaatataa

SEQ ID NO: 122150 - DNA, 25 bp, Saccharomyces pastorianus
gtaaggcacaactgaaaaccgctga

SEQ ID NO: 122151 - DNA, 25 bp, Saccharomyces pastorianus
gaacaatgctgattcttccagtaat

SEQ ID NO: 122152 - DNA, 25 bp, Saccharomyces pastorianus
aaatgcagatggatggccccgcagt

SEQ ID NO: 122153 - DNA, 25 bp, Saccharomyces pastorianus
aatcgcaaaccgcttatcaacaagg

SEQ ID NO: 122154 - DNA, 25 bp, Saccharomyces pastorianus
tcaggagtcttggtgcttgagttgc

SEQ ID NO: 122155 - DNA, 25 bp, Saccharomyces pastorianus
ccgtcaattgaggagttctgtgcta

SEQ ID NO: 122156 - DNA, 25 bp, Saccharomyces pastorianus
ggtcttcattacactccctgtatag

SEQ ID NO: 122157 - DNA, 25 bp, Saccharomyces pastorianus
gccttgagcaacatgggtcttcatt

SEQ ID NO: 122158 - DNA, 25 bp, Saccharomyces pastorianus
aaacggaatctttggagcttacagc

SEQ ID NO: 122159 - DNA, 25 bp, Saccharomyces pastorianus
ggttttcaggttatccttacactgg

SEQ ID NO: 122160 - DNA, 25 bp, Saccharomyces pastorianus
gttgtacaccgaatggaaccttcta

SEQ ID NO: 122161 - DNA, 25 bp, Saccharomyces pastorianus
gacggcctactccatggtgtttcaa

SEQ ID NO: 122162 - DNA, 25 bp, Saccharomyces pastorianus
tggctacttgccctcaactaaaaat

SEQ ID NO: 122163 - DNA, 25 bp, Saccharomyces pastorianus
tggtgtttcaaacccttgtcaaaca

SEQ ID NO: 122164 - DNA, 25 bp, Saccharomyces pastorianus
ggaaccttctatatagccttgagca

SEQ ID NO: 122165 - DNA, 25 bp, Saccharomyces pastorianus
gcaacgaagcttttcatcctaacga

SEQ ID NO: 122166 - DNA, 25 bp, Saccharomyces pastorianus
ggtcttttatgcgatgacggcctac

SEQ ID NO: 122167 - DNA, 25 bp, Saccharomyces pastorianus
taagaaggctgtgtcgcctggtaga

SEQ ID NO: 122168 - DNA, 25 bp, Saccharomyces pastorianus
ggtgctgctgtaactactgttttaa

SEQ ID NO: 122169 - DNA, 25 bp, Saccharomyces pastorianus
aacatcttccacaaaatcgcgaacg

SEQ ID NO: 122170 - DNA, 25 bp, Saccharomyces pastorianus
gacaacgctgcattgattacactga

SEQ ID NO: 122171 - DNA, 25 bp, Saccharomyces pastorianus
gcacaaaacgacaacatcttccaca

SEQ ID NO: 122172 - DNA, 25 bp, Saccharomyces pastorianus
ttcggttcgttccttggtgctgctg

SEQ ID NO: 122173 - DNA, 25 bp, Saccharomyces pastorianus
taccaaggtgccattttcggttcgt

SEQ ID NO: 122174 - DNA, 25 bp, Saccharomyces pastorianus
aaactctgctgatggcttcgttata

SEQ ID NO: 122175 - DNA, 25 bp, Saccharomyces pastorianus
agggttcattttaccaaggtgccat

SEQ ID NO: 122176 - DNA, 25 bp, Saccharomyces pastorianus
gcaagttcaaactctgctgatggct

SEQ ID NO: 122177 - DNA, 25 bp, Saccharomyces pastorianus
ggtggtccgcttaataaaaagtcat

SEQ ID NO: 122178 - DNA, 25 bp, Saccharomyces pastorianus
agaagcagccttctcaatgcaaaag

SEQ ID NO: 122179 - DNA, 25 bp, Saccharomyces pastorianus
tgaccatttttctacattgttcaaa

SEQ ID NO: 122180 - DNA, 25 bp, Saccharomyces pastorianus
ttgtatggcaatccctagattcggt

SEQ ID NO: 122181 - DNA, 25 bp, Saccharomyces pastorianus
tagattcggtggacggctcctgcga

SEQ ID NO: 122182 - DNA, 25 bp, Saccharomyces pastorianus
cgcctttggactcctacgattgaga

SEQ ID NO: 122183 - DNA, 25 bp, Saccharomyces pastorianus
tttgccggtaactttagtgcagcag

SEQ ID NO: 122184 - DNA, 25 bp, Saccharomyces pastorianus
agctgctacacaacaaattctcgat

SEQ ID NO: 122185 - DNA, 25 bp, Saccharomyces pastorianus
tacacattggttacggactttggtt

SEQ ID NO: 122186 - DNA, 25 bp, Saccharomyces pastorianus
gaacgaatcaccgactcagttgacc

SEQ ID NO: 122187 - DNA, 25 bp, Saccharomyces pastorianus
catgcatttgggtctgtttttgaac

SEQ ID NO: 122188 - DNA, 25 bp, Saccharomyces pastorianus
gaagttttacgtgatgccatgcatt

SEQ ID NO: 122189 - DNA, 25 bp, Saccharomyces pastorianus
ctacatttctcattgcattcgcatc

SEQ ID NO: 122190 - DNA, 25 bp, Saccharomyces pastorianus
ttctgattcaccagctgtacagcaa

SEQ ID NO: 122191 - DNA, 25 bp, Saccharomyces pastorianus
gtcaataacctatacttttctacat

SEQ ID NO: 122192 - DNA, 25 bp, Saccharomyces pastorianus
atcagtggccatcggttctgtgctg

SEQ ID NO: 122193 - DNA, 25 bp, Saccharomyces pastorianus
gccatgtccagcacattcagtggat

SEQ ID NO: 122194 - DNA, 25 bp, Saccharomyces pastorianus
agctgtacagcaacacaagcttcag

SEQ ID NO: 122195 - DNA, 25 bp, Saccharomyces pastorianus
gtggattctgattcaccagctgtac

SEQ ID NO: 122196 - DNA, 25 bp, Saccharomyces pastorianus
tctcattgcattcgcatcagtggcc

SEQ ID NO: 122197 - DNA, 25 bp, Saccharomyces pastorianus
aagcttcagcttgctcatgagcagg

SEQ ID NO: 122198 - DNA, 25 bp, Saccharomyces pastorianus
atgagagcagtcactagaaacaaaa

SEQ ID NO: 122199 - DNA, 25 bp, Saccharomyces pastorianus
atcggttctgtgctgccatgtccag

SEQ ID NO: 122200 - DNA, 25 bp, Saccharomyces pastorianus
agatggtgttgcattggccactcca

SEQ ID NO: 122201 - DNA, 25 bp, Saccharomyces pastorianus
ccccattagtccctgctattttaat

SEQ ID NO: 122202 - DNA, 25 bp, Saccharomyces pastorianus
taatgacaccaatttgtcctcgctc

SEQ ID NO: 122203 - DNA, 25 bp, Saccharomyces pastorianus
agcatattcattatcagcaggtgga

SEQ ID NO: 122204 - DNA, 25 bp, Saccharomyces pastorianus
aactttctgttgatggtattcctca

SEQ ID NO: 122205 - DNA, 25 bp, Saccharomyces pastorianus
ttgtcattccgaccactgattttgc

SEQ ID NO: 122206 - DNA, 25 bp, Saccharomyces pastorianus
ggtcagggatttattgtgtcgccaa

SEQ ID NO: 122207 - DNA, 25 bp, Saccharomyces pastorianus
ctcatctcactaacctggacatttt

SEQ ID NO: 122208 - DNA, 25 bp, Saccharomyces pastorianus
acatagatggtactcagcttccgac

SEQ ID NO: 122209 - DNA, 25 bp, Saccharomyces pastorianus
gtggatctattgtttccccattagt

SEQ ID NO: 122210 - DNA, 25 bp, Saccharomyces pastorianus
gcaactcatctattgtgacccatgc

SEQ ID NO: 122211 - DNA, 25 bp, Saccharomyces pastorianus
gaaggcgatgccaatactgaagatt

SEQ ID NO: 122212 - DNA, 25 bp, Saccharomyces pastorianus
gatacagacgtcaccgacacgcaag

SEQ ID NO: 122213 - DNA, 25 bp, Saccharomyces pastorianus
gctctctccaaacttttctcaggaa

SEQ ID NO: 122214 - DNA, 25 bp, Saccharomyces pastorianus
gacgagggcgacaaaactgcacaca

SEQ ID NO: 122215 - DNA, 25 bp, Saccharomyces pastorianus
gagttgtactatgagggccctgaga

SEQ ID NO: 122216 - DNA, 25 bp, Saccharomyces pastorianus
taaacccgccgatcaaaacgctaag

SEQ ID NO: 122217 - DNA, 25 bp, Saccharomyces pastorianus
cttcccctaaaacagctatttcgca

SEQ ID NO: 122218 - DNA, 25 bp, Saccharomyces pastorianus
ttttggctcatggttttcttggttg

SEQ ID NO: 122219 - DNA, 25 bp, Saccharomyces pastorianus
gcgttaggacgcttttttggctcat

SEQ ID NO: 122220 - DNA, 25 bp, Saccharomyces pastorianus
atttcgcaagatggttctgcttttg

SEQ ID NO: 122221 - DNA, 25 bp, Saccharomyces pastorianus
gtatgaacatgctccattgaacgaa

SEQ ID NO: 122222 - DNA, 25 bp, Saccharomyces pastorianus
tgcaattgctacatctgcgggcggc

SEQ ID NO: 122223 - DNA, 25 bp, Saccharomyces pastorianus
aggactgtttacctgggcagcttgc

SEQ ID NO: 122224 - DNA, 25 bp, Saccharomyces pastorianus
gatgaacgtgtcttcaccgaaagca

SEQ ID NO: 122225 - DNA, 25 bp, Saccharomyces pastorianus
gggcagcttgcctaaggatgttaaa

SEQ ID NO: 122226 - DNA, 25 bp, Saccharomyces pastorianus
gattttgtcggcgattccctaagag

SEQ ID NO: 122227 - DNA, 25 bp, Saccharomyces pastorianus
ttgttacaacagtctgctgctgctg

SEQ ID NO: 122228 - DNA, 25 bp, Saccharomyces pastorianus
aaatgcgctcgccttggcagtcagt

SEQ ID NO: 122229 - DNA, 25 bp, Saccharomyces pastorianus
cagtcagtaatggtgcctcaagaaa

SEQ ID NO: 122230 - DNA, 25 bp, Saccharomyces pastorianus
gatcgatacgtctgttttgtaacat

SEQ ID NO: 122231 - DNA, 25 bp, Saccharomyces pastorianus
taagtctaacccctatttcaaagat

SEQ ID NO: 122232 - DNA, 25 bp, Saccharomyces pastorianus
tgcagttcgtggaggtttattacaa

SEQ ID NO: 122233 - DNA, 25 bp, Saccharomyces pastorianus
aagagtatacatttattgcaagtcg

SEQ ID NO: 122234 - DNA, 25 bp, Saccharomyces pastorianus
gaggtttcaaggtcagaacatctgt

SEQ ID NO: 122235 - DNA, 25 bp, Saccharomyces pastorianus
cataacgataacaagggcctgcaca

SEQ ID NO: 122236 - DNA, 25 bp, Saccharomyces pastorianus
gttctgcagtgattgctatttggta

SEQ ID NO: 122237 - DNA, 25 bp, Saccharomyces pastorianus
gttgcagctaacagacctttggttt

SEQ ID NO: 122238 - DNA, 25 bp, Saccharomyces pastorianus
tatctgttgcagctccgcaaccagc

SEQ ID NO: 122239 - DNA, 25 bp, Saccharomyces pastorianus
tttttacagactctccgcctaacta

SEQ ID NO: 122240 - DNA, 25 bp, Saccharomyces pastorianus
aacatctgtcaaaaagttctgcagt

SEQ ID NO: 122241 - DNA, 25 bp, Saccharomyces pastorianus
aaccagctcttgttgcagctaacag

SEQ ID NO: 122242 - DNA, 25 bp, Saccharomyces pastorianus
tgtttttgcacatgaaaccgtcccc

SEQ ID NO: 122243 - DNA, 25 bp, Saccharomyces pastorianus
ccgcctaactatgccaaggatgttt

SEQ ID NO: 122244 - DNA, 25 bp, Saccharomyces pastorianus
aatcgccgccgttgttgtcgctgtt

SEQ ID NO: 122245 - DNA, 25 bp, Saccharomyces pastorianus
tattgctgtcgattccattactctt

SEQ ID NO: 122246 - DNA, 25 bp, Saccharomyces pastorianus
aggaacatcttcttgttttacactt

SEQ ID NO: 122247 - DNA, 25 bp, Saccharomyces pastorianus
aatgacttccgctttctccatatct

SEQ ID NO: 122248 - DNA, 25 bp, Saccharomyces pastorianus
gttttacactttcttcctgtacact

SEQ ID NO: 122249 - DNA, 25 bp, Saccharomyces pastorianus
tatcgagctctccacagatacagcg

SEQ ID NO: 122250 - DNA, 25 bp, Saccharomyces pastorianus
ctgtggacccactagcaatgacttc

SEQ ID NO: 122251 - DNA, 25 bp, Saccharomyces pastorianus
attactcttctctttactcctatat

SEQ ID NO: 122252 - DNA, 25 bp, Saccharomyces pastorianus
ccggagtcatctggagtatcgagct

SEQ ID NO: 122253 - DNA, 25 bp, Saccharomyces pastorianus
agatacagcgagtttcgccttcctc

SEQ ID NO: 122254 - DNA, 25 bp, Saccharomyces pastorianus
agggcctttaggcactattgctgtc

SEQ ID NO: 122255 - DNA, 25 bp, Saccharomyces pastorianus
gattcgtggaaaaccagcatttcgt

SEQ ID NO: 122256 - DNA, 25 bp, Saccharomyces pastorianus
ccctaacctcaatatcttcttctga

SEQ ID NO: 122257 - DNA, 25 bp, Saccharomyces pastorianus
aatcttctacgggttcggcgcaaga

SEQ ID NO: 122258 - DNA, 25 bp, Saccharomyces pastorianus
gatggacgacctgactagagagtta

SEQ ID NO: 122259 - DNA, 25 bp, Saccharomyces pastorianus
gggtatctgctattttggagttcat

SEQ ID NO: 122260 - DNA, 25 bp, Saccharomyces pastorianus
ccgacaaaccagtaaagcccagatt

SEQ ID NO: 122261 - DNA, 25 bp, Saccharomyces pastorianus
agggcaacagaactcgtcgaagcaa

SEQ ID NO: 122262 - DNA, 25 bp, Saccharomyces pastorianus
accggactcggtaacaaatgatgat

SEQ ID NO: 122263 - DNA, 25 bp, Saccharomyces pastorianus
aaggagtgctgatataggtaccgac

SEQ ID NO: 122264 - DNA, 25 bp, Saccharomyces pastorianus
gaaaactgatgaacccatcctaccc

SEQ ID NO: 122265 - DNA, 25 bp, Saccharomyces pastorianus
tgaaagaaagcctacgaccatcgaa

SEQ ID NO: 122266 - DNA, 25 bp, Saccharomyces pastorianus
gttcatggaggtatatcgcccgatt

SEQ ID NO: 122267 - DNA, 25 bp, Saccharomyces pastorianus
aagcgggctggttacagacttactg

SEQ ID NO: 122268 - DNA, 25 bp, Saccharomyces pastorianus
gacccagaccctcaagtaactgatt

SEQ ID NO: 122269 - DNA, 25 bp, Saccharomyces pastorianus
tttgaactgttaaagccgcgtgcat

SEQ ID NO: 122270 - DNA, 25 bp, Saccharomyces pastorianus
gtttgtcacaatcttttcagcacca

SEQ ID NO: 122271 - DNA, 25 bp, Saccharomyces pastorianus
aacggatattcctgaaagcgggctg

SEQ ID NO: 122272 - DNA, 25 bp, Saccharomyces pastorianus
ggaacgttcttgatttttgtgctaa

SEQ ID NO: 122273 - DNA, 25 bp, Saccharomyces pastorianus
tatcgcccgatttacatgacatgaa

SEQ ID NO: 122274 - DNA, 25 bp, Saccharomyces pastorianus
gacttactgtggagtgacccagacc

SEQ ID NO: 122275 - DNA, 25 bp, Saccharomyces pastorianus
aacgggtatgatgtgtagctttgaa

SEQ ID NO: 122276 - DNA, 25 bp, Saccharomyces pastorianus
gataagatcttttgcgttcatggag

SEQ ID NO: 122277 - DNA, 25 bp, Saccharomyces pastorianus
ggaccgttttaagttcacgccatgt

SEQ ID NO: 122278 - DNA, 25 bp, Saccharomyces pastorianus
acgccatgtggcttctgttttatta

SEQ ID NO: 122279 - DNA, 25 bp, Saccharomyces pastorianus
gtacctgctgcgcaaggctagaaga

SEQ ID NO: 122280 - DNA, 25 bp, Saccharomyces pastorianus
gaggttcgattttgatgcatccaga

SEQ ID NO: 122281 - DNA, 25 bp, Saccharomyces pastorianus
gcgtaccacattccagatttgataa

SEQ ID NO: 122282 - DNA, 25 bp, Saccharomyces pastorianus
gatacaccatcaaggtacctgctgc

SEQ ID NO: 122283 - DNA, 25 bp, Saccharomyces pastorianus
tggcttcgccattccatttgcagag

SEQ ID NO: 122284 - DNA, 25 bp, Saccharomyces pastorianus
gggtactttcagaccaggtttcgat

SEQ ID NO: 122285 - DNA, 25 bp, Saccharomyces pastorianus
ggaaatctttccttttatacatcag

SEQ ID NO: 122286 - DNA, 25 bp, Saccharomyces pastorianus
tgcagagcgtgtcggcgtaccacat

SEQ ID NO: 122287 - DNA, 25 bp, Saccharomyces pastorianus
gaataattatatccctcctcctgat

SEQ ID NO: 122288 - DNA, 25 bp, Saccharomyces pastorianus
atggttcctactatgatgcagacta

SEQ ID NO: 122289 - DNA, 25 bp, Saccharomyces pastorianus
aagtattcgctatcctcattctaag

SEQ ID NO: 122290 - DNA, 25 bp, Saccharomyces pastorianus
gattccgtagtgagaaaccctattc

SEQ ID NO: 122291 - DNA, 25 bp, Saccharomyces pastorianus
ggctaccgatcctgtatttgctaga

SEQ ID NO: 122292 - DNA, 25 bp, Saccharomyces pastorianus
gggtcaaccagacttgatcattcca

SEQ ID NO: 122293 - DNA, 25 bp, Saccharomyces pastorianus
ggcttgaaggccaaacatctcacat

SEQ ID NO: 122294 - DNA, 25 bp, Saccharomyces pastorianus
caaacattttgggtcgattccgtag

SEQ ID NO: 122295 - DNA, 25 bp, Saccharomyces pastorianus
gggatgtttccttcaatggttccta

SEQ ID NO: 122296 - DNA, 25 bp, Saccharomyces pastorianus
gaatgggcccacaaagactgttcca

SEQ ID NO: 122297 - DNA, 25 bp, Saccharomyces pastorianus
gtgcaaacgaacttggctaccgatc

SEQ ID NO: 122298 - DNA, 25 bp, Saccharomyces pastorianus
tagtagcacctgagatgcccctaac

SEQ ID NO: 122299 - DNA, 25 bp, Saccharomyces pastorianus
gttccctttatgtttcggattgtct

SEQ ID NO: 122300 - DNA, 25 bp, Saccharomyces pastorianus
acatccgggatcttggtgccttgct

SEQ ID NO: 122301 - DNA, 25 bp, Saccharomyces pastorianus
ggaatggtacctcctctaatgggat

SEQ ID NO: 122302 - DNA, 25 bp, Saccharomyces pastorianus
gactgcatggaaaaatccgctccta

SEQ ID NO: 122303 - DNA, 25 bp, Saccharomyces pastorianus
gagatactctatcctaatgttccct

SEQ ID NO: 122304 - DNA, 25 bp, Saccharomyces pastorianus
taaacgcccgtgtgtcgttgagata

SEQ ID NO: 122305 - DNA, 25 bp, Saccharomyces pastorianus
ttcttggtgcttcaaatatcgcgtt

SEQ ID NO: 122306 - DNA, 25 bp, Saccharomyces pastorianus
ggcaattcccacactttaatacgtt

SEQ ID NO: 122307 - DNA, 25 bp, Saccharomyces pastorianus
ctggctaacgttctgggctttcaaa

SEQ ID NO: 122308 - DNA, 25 bp, Saccharomyces pastorianus
atggctagtgtattgcacctaccgg

SEQ ID NO: 122309 - DNA, 25 bp, Saccharomyces pastorianus
gcacctaccggcaattttaatccta

SEQ ID NO: 122310 - DNA, 25 bp, Saccharomyces pastorianus
aagcgggccatacactaactttgca

SEQ ID NO: 122311 - DNA, 25 bp, Saccharomyces pastorianus
tctttcctaggacgctttccaaatt

SEQ ID NO: 122312 - DNA, 25 bp, Saccharomyces pastorianus
ttccaaatttaacggccacgacgat

SEQ ID NO: 122313 - DNA, 25 bp, Saccharomyces pastorianus
atcagcctatcgatcccttggatga

SEQ ID NO: 122314 - DNA, 25 bp, Saccharomyces pastorianus
tccttcgatctggacgttattaaag

SEQ ID NO: 122315 - DNA, 25 bp, Saccharomyces pastorianus
aacaagtgaggatccaaccgggctc

SEQ ID NO: 122316 - DNA, 25 bp, Saccharomyces pastorianus
gcagttttacggtccaagcgggcca

SEQ ID NO: 122317 - DNA, 25 bp, Saccharomyces pastorianus
gggcctcaaacacaaacgattctaa

SEQ ID NO: 122318 - DNA, 25 bp, Saccharomyces pastorianus
aggccatgatgcgtcgcgtggtctt

SEQ ID NO: 122319 - DNA, 25 bp, Saccharomyces pastorianus
gtggtcttgcattgaactccttcga

SEQ ID NO: 122320 - DNA, 25 bp, Saccharomyces pastorianus
tagtagcgggtaatttctttcctag

SEQ ID NO: 122321 - DNA, 25 bp, Saccharomyces pastorianus
gatatgaccctgtcaaacaactttg

SEQ ID NO: 122322 - DNA, 25 bp, Saccharomyces pastorianus
ggaacccaatcgcttatggaaacgt

SEQ ID NO: 122323 - DNA, 25 bp, Saccharomyces pastorianus
gctggcctccttttttgcatattat

SEQ ID NO: 122324 - DNA, 25 bp, Saccharomyces pastorianus
agattccttatttcactctcagcat

SEQ ID NO: 122325 - DNA, 25 bp, Saccharomyces pastorianus
gttattaatgcatctgggtccccac

SEQ ID NO: 122326 - DNA, 25 bp, Saccharomyces pastorianus
gaagattcctcaaaagtctttcact

SEQ ID NO: 122327 - DNA, 25 bp, Saccharomyces pastorianus
atagtacccttatcagctggaaata

SEQ ID NO: 122328 - DNA, 25 bp, Saccharomyces pastorianus
gggtccccaccagatagagttttga

SEQ ID NO: 122329 - DNA, 25 bp, Saccharomyces pastorianus
caaagtagcaatccactcttagagg

SEQ ID NO: 122330 - DNA, 25 bp, Saccharomyces pastorianus
tccttctccgaaatagtacccttat

SEQ ID NO: 122331 - DNA, 25 bp, Saccharomyces pastorianus
atcaattttacggacttatttggcg

SEQ ID NO: 122332 - DNA, 25 bp, Saccharomyces pastorianus
gaagttctgcgtgtttctaatacta

SEQ ID NO: 122333 - DNA, 25 bp, Saccharomyces pastorianus
ggatactactgttgggattcccatt

SEQ ID NO: 122334 - DNA, 25 bp, Saccharomyces pastorianus
agaaaacccttattctctgccttcg

SEQ ID NO: 122335 - DNA, 25 bp, Saccharomyces pastorianus
tgccttcgtgaaacagctgcttata

SEQ ID NO: 122336 - DNA, 25 bp, Saccharomyces pastorianus
gtattttcttaacttactcctggat

SEQ ID NO: 122337 - DNA, 25 bp, Saccharomyces pastorianus
tatattcattgttgggctgggcgtg

SEQ ID NO: 122338 - DNA, 25 bp, Saccharomyces pastorianus
agacttggcatactggttcgccgat

SEQ ID NO: 122339 - DNA, 25 bp, Saccharomyces pastorianus
gtcactcttcgcaatcactgcaaaa

SEQ ID NO: 122340 - DNA, 25 bp, Saccharomyces pastorianus
gcttccagtacttttgtgtcgacaa

SEQ ID NO: 122341 - DNA, 25 bp, Saccharomyces pastorianus
gattcccattctttggttgtgctta

SEQ ID NO: 122342 - DNA, 25 bp, Saccharomyces pastorianus
atgtttgtctttcctatcttactga

SEQ ID NO: 122343 - DNA, 25 bp, Saccharomyces pastorianus
acctcttcaccctatttcagattat

SEQ ID NO: 122344 - DNA, 25 bp, Saccharomyces pastorianus
gtattgcgatggataagctgcttgt

SEQ ID NO: 122345 - DNA, 25 bp, Saccharomyces pastorianus
atgggattcgatcttcaaattccaa

SEQ ID NO: 122346 - DNA, 25 bp, Saccharomyces pastorianus
ttgtgtccaagaaagcccttcctaa

SEQ ID NO: 122347 - DNA, 25 bp, Saccharomyces pastorianus
taacggtgcttccaagttcaaaaat

SEQ ID NO: 122348 - DNA, 25 bp, Saccharomyces pastorianus
gttaaccctgatattagagaccata

SEQ ID NO: 122349 - DNA, 25 bp, Saccharomyces pastorianus
gaacgttaacgtcctgtattgcgat

SEQ ID NO: 122350 - DNA, 25 bp, Saccharomyces pastorianus
gtggctagatatcaaggacctcttc

SEQ ID NO: 122351 - DNA, 25 bp, Saccharomyces pastorianus
agaagctattacatccctatgggat

SEQ ID NO: 122352 - DNA, 25 bp, Saccharomyces pastorianus
acagctgacgtgaatccgattgaaa

SEQ ID NO: 122353 - DNA, 25 bp, Saccharomyces pastorianus
cgaaatgcttaacgccagaggaaca

SEQ ID NO: 122354 - DNA, 25 bp, Saccharomyces pastorianus
attcatcaatcccaatgacccgaag

SEQ ID NO: 122355 - DNA, 25 bp, Saccharomyces pastorianus
aaaaaggcagcgtaccatcgtcaac

SEQ ID NO: 122356 - DNA, 25 bp, Saccharomyces pastorianus
ttctggatatagacccttattcatc

SEQ ID NO: 122357 - DNA, 25 bp, Saccharomyces pastorianus
atttgaagccttttcatccacctaa

SEQ ID NO: 122358 - DNA, 25 bp, Saccharomyces pastorianus
ggaacacgaacatactgcaccactt

SEQ ID NO: 122359 - DNA, 25 bp, Saccharomyces pastorianus
aatgaacctctatcaccatggattt

SEQ ID NO: 122360 - DNA, 25 bp, Saccharomyces pastorianus
accatggatttcctctgccactgga

SEQ ID NO: 122361 - DNA, 25 bp, Saccharomyces pastorianus
aaaacaagtgagacgcttcagcgga

SEQ ID NO: 122362 - DNA, 25 bp, Saccharomyces pastorianus
gacaccggaagtacgttatacgaat

SEQ ID NO: 122363 - DNA, 25 bp, Saccharomyces pastorianus
agtaccatccacctcacatttaaag

SEQ ID NO: 122364 - DNA, 25 bp, Saccharomyces pastorianus
gggagaatatacctagtgaactact

SEQ ID NO: 122365 - DNA, 25 bp, Saccharomyces pastorianus
gatcttgtcgattctctattaactg

SEQ ID NO: 122366 - DNA, 25 bp, Saccharomyces pastorianus
atgaggctgatggtagctcctccca

SEQ ID NO: 122367 - DNA, 25 bp, Saccharomyces pastorianus
tatgctcagggtacaaattgctcgt

SEQ ID NO: 122368 - DNA, 25 bp, Saccharomyces pastorianus
acgttaagatctccatttgctatgc

SEQ ID NO: 122369 - DNA, 25 bp, Saccharomyces pastorianus
gcattatatcgctaccaacaggtgt

SEQ ID NO: 122370 - DNA, 25 bp, Saccharomyces pastorianus
tcaactatctacgaagatcttgtcg

SEQ ID NO: 122371 - DNA, 25 bp, Saccharomyces pastorianus
tatgcggatgcaatggagacaacgg

SEQ ID NO: 122372 - DNA, 25 bp, Saccharomyces pastorianus
attgctcaaagaattatgctcaggg

SEQ ID NO: 122373 - DNA, 25 bp, Saccharomyces pastorianus
tgatggcgtttcagtaagggtcgac

SEQ ID NO: 122374 - DNA, 25 bp, Saccharomyces pastorianus
gctatgctaaattctgcctactcaa

SEQ ID NO: 122375 - DNA, 25 bp, Saccharomyces pastorianus
ggtagctcctcccaaatatttgatg

SEQ ID NO: 122376 - DNA, 25 bp, Saccharomyces pastorianus
gaaagtactaggtccatttgccaaa

SEQ ID NO: 122377 - DNA, 25 bp, Saccharomyces pastorianus
gctagtctctaagcagaaactttcc

SEQ ID NO: 122378 - DNA, 25 bp, Saccharomyces pastorianus
atttgaaccagctttctcgagctac

SEQ ID NO: 122379 - DNA, 25 bp, Saccharomyces pastorianus
tacgactgtgtatttggatcacccc

SEQ ID NO: 122380 - DNA, 25 bp, Saccharomyces pastorianus
gtttttgccaaggaactctgatttg

SEQ ID NO: 122381 - DNA, 25 bp, Saccharomyces pastorianus
tccttacgtctatggagtggactac

SEQ ID NO: 122382 - DNA, 25 bp, Saccharomyces pastorianus
gcatgaatccacaacaacgaccaaa

SEQ ID NO: 122383 - DNA, 25 bp, Saccharomyces pastorianus
gcgggaacaccatacaatttgccat

SEQ ID NO: 122384 - DNA, 25 bp, Saccharomyces pastorianus
atttgccatgcaatttccttacgtc

SEQ ID NO: 122385 - DNA, 25 bp, Saccharomyces pastorianus
ggaatgcttttttaactatgaacca

SEQ ID NO: 122386 - DNA, 25 bp, Saccharomyces pastorianus
gaaaaacgcccaaagctacggtgtg

SEQ ID NO: 122387 - DNA, 25 bp, Saccharomyces pastorianus
agaacctctccagcggtattattca

SEQ ID NO: 122388 - DNA, 25 bp, Saccharomyces pastorianus
atcatcacaagcagactccattttc

SEQ ID NO: 122389 - DNA, 25 bp, Saccharomyces pastorianus
gaatccattcagtcgccttatttat

SEQ ID NO: 122390 - DNA, 25 bp, Saccharomyces pastorianus
gaggttgaagtcgacatcccagaac

SEQ ID NO: 122391 - DNA, 25 bp, Saccharomyces pastorianus
atatcgatactagtgctgccttgga

SEQ ID NO: 122392 - DNA, 25 bp, Saccharomyces pastorianus
aagggattgctactacctcttctaa

SEQ ID NO: 122393 - DNA, 25 bp, Saccharomyces pastorianus
agtctgaagcgcgtggcaacttgct

SEQ ID NO: 122394 - DNA, 25 bp, Saccharomyces pastorianus
acaacaacactacatccacggtcat

SEQ ID NO: 122395 - DNA, 25 bp, Saccharomyces pastorianus
gtcatcttctctggccttgcagaaa

SEQ ID NO: 122396 - DNA, 25 bp, Saccharomyces pastorianus
ttttcttcaagatcgttccaaactg

SEQ ID NO: 122397 - DNA, 25 bp, Saccharomyces pastorianus
agatttcacccgaattggccactgt

SEQ ID NO: 122398 - DNA, 25 bp, Saccharomyces pastorianus
aattggagagccatggtgccgccat

SEQ ID NO: 122399 - DNA, 25 bp, Saccharomyces pastorianus
gtacttctttgattaccttgccatc

SEQ ID NO: 122400 - DNA, 25 bp, Saccharomyces pastorianus
ttacctgttcgtcgtaaggcttact

SEQ ID NO: 122401 - DNA, 25 bp, Saccharomyces pastorianus
gggcgatatcacttggttacctgtt

SEQ ID NO: 122402 - DNA, 25 bp, Saccharomyces pastorianus
ggttacgataccatttctgttgata

SEQ ID NO: 122403 - DNA, 25 bp, Saccharomyces pastorianus
ggctacaacttcactattgggccat

SEQ ID NO: 122404 - DNA, 25 bp, Saccharomyces pastorianus
acacgcttgaagtttcaggctcctg

SEQ ID NO: 122405 - DNA, 25 bp, Saccharomyces pastorianus
attgggccatacgattacacgcttg

SEQ ID NO: 122406 - DNA, 25 bp, Saccharomyces pastorianus
gttggaccggtcaatatactctaga

SEQ ID NO: 122407 - DNA, 25 bp, Saccharomyces pastorianus
tgataaggtggtccctccattttac

SEQ ID NO: 122408 - DNA, 25 bp, Saccharomyces pastorianus
aggctcctgtatctctgcaattaca

SEQ ID NO: 122409 - DNA, 25 bp, Saccharomyces pastorianus
gctgaaatctcatctaataaaggaa

SEQ ID NO: 122410 - DNA, 25 bp, Saccharomyces pastorianus
cacctcacgctgaaatctcatctaa

SEQ ID NO: 122411 - DNA, 25 bp, Saccharomyces pastorianus
ggaagaattactttggcatgcttta

SEQ ID NO: 122412 - DNA, 25 bp, Saccharomyces pastorianus
acctcacgctgaaatctcatctaat

SEQ ID NO: 122413 - DNA, 25 bp, Saccharomyces pastorianus
ctcacgctgaaatctcatctaataa

SEQ ID NO: 122414 - DNA, 25 bp, Saccharomyces pastorianus
ttcacctcacgctgaaatctcatct

SEQ ID NO: 122415 - DNA, 25 bp, Saccharomyces pastorianus
aagaattactttggcatgctttatc

SEQ ID NO: 122416 - DNA, 25 bp, Saccharomyces pastorianus
gaattactttggcatgctttatctc

SEQ ID NO: 122417 - DNA, 25 bp, Saccharomyces pastorianus
atggttcacctcacgctgaaatctc

SEQ ID NO: 122418 - DNA, 25 bp, Saccharomyces pastorianus
attactttggcatgctttatctccg

SEQ ID NO: 122419 - DNA, 25 bp, Saccharomyces pastorianus
tggttcacctcacgctgaaatctca

SEQ ID NO: 122420 - DNA, 25 bp, Saccharomyces pastorianus
gcaagaatgctaggcgttcgtctaa

SEQ ID NO: 122421 - DNA, 25 bp, Saccharomyces pastorianus
gagaattttctatcaaaccgcagtt

SEQ ID NO: 122422 - DNA, 25 bp, Saccharomyces pastorianus
gagtatgcaattcacactgacggag

SEQ ID NO: 122423 - DNA, 25 bp, Saccharomyces pastorianus
gtgaccactgataataggcgcaata

SEQ ID NO: 122424 - DNA, 25 bp, Saccharomyces pastorianus
actgcgtcgagcacctctgaaagaa

SEQ ID NO: 122425 - DNA, 25 bp, Saccharomyces pastorianus
gatatcactacagctacaccagttg

SEQ ID NO: 122426 - DNA, 25 bp, Saccharomyces pastorianus
gggtcttccaacaccagttttgcaa

SEQ ID NO: 122427 - DNA, 25 bp, Saccharomyces pastorianus
aaccgcagttttccgatgacgttat

SEQ ID NO: 122428 - DNA, 25 bp, Saccharomyces pastorianus
aacagaatcatttgcccagcgtgaa

SEQ ID NO: 122429 - DNA, 25 bp, Saccharomyces pastorianus
tataccacgtcctgccatggcaaga

SEQ ID NO: 122430 - DNA, 25 bp, Saccharomyces pastorianus
ttaagcattgtatcgactgcgtcga

SEQ ID NO: 122431 - DNA, 25 bp, Saccharomyces pastorianus
ttttgtttgactgcctagccggaaa

SEQ ID NO: 122432 - DNA, 25 bp, Saccharomyces pastorianus
atgctcctgtatgatttgtattcta

SEQ ID NO: 122433 - DNA, 25 bp, Saccharomyces pastorianus
gttatgggcgattcgttgccaccaa

SEQ ID NO: 122434 - DNA, 25 bp, Saccharomyces pastorianus
gacatataccgctcatcattcaaac

SEQ ID NO: 122435 - DNA, 25 bp, Saccharomyces pastorianus
gactggagtcaatcctacgttgaag

SEQ ID NO: 122436 - DNA, 25 bp, Saccharomyces pastorianus
gcttcatactgaatggttcctcaaa

SEQ ID NO: 122437 - DNA, 25 bp, Saccharomyces pastorianus
gaaattccttggcatatgctcctgt

SEQ ID NO: 122438 - DNA, 25 bp, Saccharomyces pastorianus
gatggctttttgtacataactcttg

SEQ ID NO: 122439 - DNA, 25 bp, Saccharomyces pastorianus
gctattatgtctttatcggtcaacg

SEQ ID NO: 122440 - DNA, 25 bp, Saccharomyces pastorianus
tttaccacctcttttgagaaccagg

SEQ ID NO: 122441 - DNA, 25 bp, Saccharomyces pastorianus
gataagttcatcaagaccgcgacat

SEQ ID NO: 122442 - DNA, 25 bp, Saccharomyces pastorianus
ctgcccaagtactgtacgctggaat

SEQ ID NO: 122443 - DNA, 25 bp, Saccharomyces pastorianus
agaaaactgcttaactccacgattg

SEQ ID NO: 122444 - DNA, 25 bp, Saccharomyces pastorianus
gattctctcttttccactcatgagt

SEQ ID NO: 122445 - DNA, 25 bp, Saccharomyces pastorianus
tagagaaatattccccattcgaccc

SEQ ID NO: 122446 - DNA, 25 bp, Saccharomyces pastorianus
gtgttccaaagcatgatctacctcc

SEQ ID NO: 122447 - DNA, 25 bp, Saccharomyces pastorianus
gtatccaaagtatcaacagctctcg

SEQ ID NO: 122448 - DNA, 25 bp, Saccharomyces pastorianus
ttcatttcagtaatcttctcatcga

SEQ ID NO: 122449 - DNA, 25 bp, Saccharomyces pastorianus
ggagttgacattgtatacttgccaa

SEQ ID NO: 122450 - DNA, 25 bp, Saccharomyces pastorianus
atgtggccgttctaccttgaataaa

SEQ ID NO: 122451 - DNA, 25 bp, Saccharomyces pastorianus
gagtttttagtttcgctatcccatg

SEQ ID NO: 122452 - DNA, 25 bp, Saccharomyces pastorianus
aaagcgttgtgttgctgtgttccaa

SEQ ID NO: 122453 - DNA, 25 bp, Saccharomyces pastorianus
gcaacatcgcgaaagctacagcaca

SEQ ID NO: 122454 - DNA, 25 bp, Saccharomyces pastorianus
gcaacaggtcctccataatggtatc

SEQ ID NO: 122455 - DNA, 25 bp, Saccharomyces pastorianus
gaattgaggccaccagaatctcctt

SEQ ID NO: 122456 - DNA, 25 bp, Saccharomyces pastorianus
atctcatgcgatacggtcaccgaag

SEQ ID NO: 122457 - DNA, 25 bp, Saccharomyces pastorianus
aaaacctgcctgcaccaacgatggt

SEQ ID NO: 122458 - DNA, 25 bp, Saccharomyces pastorianus
atctgaggtcaacaaggcaagcgta

SEQ ID NO: 122459 - DNA, 25 bp, Saccharomyces pastorianus
tatagcggcatattcagtgacatct

SEQ ID NO: 122460 - DNA, 25 bp, Saccharomyces pastorianus
taaagcagcccaaagtccagaacat

SEQ ID NO: 122461 - DNA, 25 bp, Saccharomyces pastorianus
aaagcggtccgaagcaacaggtcct

SEQ ID NO: 122462 - DNA, 25 bp, Saccharomyces pastorianus
tgcaaacatcccatcaagtctcaaa

SEQ ID NO: 122463 - DNA, 25 bp, Saccharomyces pastorianus
gatttagctttctttccttgtactc

SEQ ID NO: 122464 - DNA, 25 bp, Saccharomyces pastorianus
tttgatctgcaacctcatcacatca

SEQ ID NO: 122465 - DNA, 25 bp, Saccharomyces pastorianus
taacgccagtagagtcgttgacttt

SEQ ID NO: 122466 - DNA, 25 bp, Saccharomyces pastorianus
agaccagtgccgactttgggcaatt

SEQ ID NO: 122467 - DNA, 25 bp, Saccharomyces pastorianus
atggcggagccacatcctaaagtct

SEQ ID NO: 122468 - DNA, 25 bp, Saccharomyces pastorianus
gtcgttgactttgatctgcaacctc

SEQ ID NO: 122469 - DNA, 25 bp, Saccharomyces pastorianus
acccactagaccagtgccgactttg

SEQ ID NO: 122470 - DNA, 25 bp, Saccharomyces pastorianus
ggagccacatcctaaagtcttgaat

SEQ ID NO: 122471 - DNA, 25 bp, Saccharomyces pastorianus
gacatcttcaataacgccagtagag

SEQ ID NO: 122472 - DNA, 25 bp, Saccharomyces pastorianus
ttgactttgatctgcaacctcatca

SEQ ID NO: 122473 - DNA, 25 bp, Saccharomyces pastorianus
cagtgccgactttgggcaatttttt

SEQ ID NO: 122474 - DNA, 25 bp, Saccharomyces pastorianus
taaagtcttgaatttgacatcttca

SEQ ID NO: 122475 - DNA, 25 bp, Saccharomyces pastorianus
cactgtcgggtgcttgttgaataca

SEQ ID NO: 122476 - DNA, 25 bp, Saccharomyces pastorianus
catatacagtggtgcgtccgctggc

SEQ ID NO: 122477 - DNA, 25 bp, Saccharomyces pastorianus
gaattcacagttcaagacacccatt

SEQ ID NO: 122478 - DNA, 25 bp, Saccharomyces pastorianus
ccttcagtgctgttagtttaccgtg

SEQ ID NO: 122479 - DNA, 25 bp, Saccharomyces pastorianus
ttcggaagcttttgccggcggctaa

SEQ ID NO: 122480 - DNA, 25 bp, Saccharomyces pastorianus
tcgtcgcgccttttgaactagtgaa

SEQ ID NO: 122481 - DNA, 25 bp, Saccharomyces pastorianus
gatccaaagaagttccgggccgctg

SEQ ID NO: 122482 - DNA, 25 bp, Saccharomyces pastorianus
ggtgttttgtcacttttcaatgggt

SEQ ID NO: 122483 - DNA, 25 bp, Saccharomyces pastorianus
gttggtagttttcacgaacgtcatg

SEQ ID NO: 122484 - DNA, 25 bp, Saccharomyces pastorianus
ggaagccactatctggagacacgtt

SEQ ID NO: 122485 - DNA, 25 bp, Saccharomyces pastorianus
atttgcgccaaaggtcatgagactt

SEQ ID NO: 122486 - DNA, 25 bp, Saccharomyces pastorianus
atgccagcgtgcttgtgtaggcgta

SEQ ID NO: 122487 - DNA, 25 bp, Saccharomyces pastorianus
gttttcacctctatgagcatgccag

SEQ ID NO: 122488 - DNA, 25 bp, Saccharomyces pastorianus
tagaccggcgtttagaaccattgcg

SEQ ID NO: 122489 - DNA, 25 bp, Saccharomyces pastorianus
acggccatgctgttttagtttcact

SEQ ID NO: 122490 - DNA, 25 bp, Saccharomyces pastorianus
agagtttgcttcactggttgactgc

SEQ ID NO: 122491 - DNA, 25 bp, Saccharomyces pastorianus
taacagcggcggatccgtcaacaga

SEQ ID NO: 122492 - DNA, 25 bp, Saccharomyces pastorianus
gactgcacagtcgatgatttacgcg

SEQ ID NO: 122493 - DNA, 25 bp, Saccharomyces pastorianus
gaaagcttgcgatctacgagttgat

SEQ ID NO: 122494 - DNA, 25 bp, Saccharomyces pastorianus
gatggaatccgcaaacggccatgct

SEQ ID NO: 122495 - DNA, 25 bp, Saccharomyces pastorianus
aaccattgcgcgttcattgaaggat

SEQ ID NO: 122496 - DNA, 25 bp, Saccharomyces pastorianus
attctgaaaccactatccaccatta

SEQ ID NO: 122497 - DNA, 25 bp, Saccharomyces pastorianus
gaattcgtatctcattcaccagtga

SEQ ID NO: 122498 - DNA, 25 bp, Saccharomyces pastorianus
ttttgctagcgatccagcgatgcga

SEQ ID NO: 122499 - DNA, 25 bp, Saccharomyces pastorianus
ttttcttgggtttggcatatgcagc

SEQ ID NO: 122500 - DNA, 25 bp, Saccharomyces pastorianus
atgcctgtcttcttttttatcgatc

SEQ ID NO: 122501 - DNA, 25 bp, Saccharomyces pastorianus
agccatttgtgctcgtactggtttt

SEQ ID NO: 122502 - DNA, 25 bp, Saccharomyces pastorianus
tacttatagcatagcgcctggtgaa

SEQ ID NO: 122503 - DNA, 25 bp, Saccharomyces pastorianus
tatgcagcggtaccactctatagag

SEQ ID NO: 122504 - DNA, 25 bp, Saccharomyces pastorianus
gaggtttacgttctgcctggtgaaa

SEQ ID NO: 122505 - DNA, 25 bp, Saccharomyces pastorianus
taatgctgctattttatccccagaa

SEQ ID NO: 122506 - DNA, 25 bp, Saccharomyces pastorianus
accgacgataaactcattcctgtag

SEQ ID NO: 122507 - DNA, 25 bp, Saccharomyces pastorianus
gtgaaacagccctcgctttttataa

SEQ ID NO: 122508 - DNA, 25 bp, Saccharomyces pastorianus
tacaacagtggctcttgcggtactt

SEQ ID NO: 122509 - DNA, 25 bp, Saccharomyces pastorianus
atttatgacttcaatgcccaagctg

SEQ ID NO: 122510 - DNA, 25 bp, Saccharomyces pastorianus
gatttaccggacactcttgagttta

SEQ ID NO: 122511 - DNA, 25 bp, Saccharomyces pastorianus
tgcttcttctacaccttattcgaat

SEQ ID NO: 122512 - DNA, 25 bp, Saccharomyces pastorianus
gactctggaacagttggcaagcaca

SEQ ID NO: 122513 - DNA, 25 bp, Saccharomyces pastorianus
ttttgactcctacaacagtggctct

SEQ ID NO: 122514 - DNA, 25 bp, Saccharomyces pastorianus
aatgcgggcaactttttgactccta

SEQ ID NO: 122515 - DNA, 25 bp, Saccharomyces pastorianus
gaatcaacgactactactcggcctt

SEQ ID NO: 122516 - DNA, 25 bp, Saccharomyces pastorianus
gttcttactgatttaccggacactc

SEQ ID NO: 122517 - DNA, 25 bp, Saccharomyces pastorianus
gttctactgtttttggcgagcgaag

SEQ ID NO: 122518 - DNA, 25 bp, Saccharomyces pastorianus
aatgtaggcctttccactgaagagc

SEQ ID NO: 122519 - DNA, 25 bp, Saccharomyces pastorianus
ctcattcctctcataacaacagcag

SEQ ID NO: 122520 - DNA, 25 bp, Saccharomyces pastorianus
gctgcatctgctactgaagacactc

SEQ ID NO: 122521 - DNA, 25 bp, Saccharomyces pastorianus
acagatgtgtcttccaaaaaccccg

SEQ ID NO: 122522 - DNA, 25 bp, Saccharomyces pastorianus
gatgagcaacagcagctctggtcct

SEQ ID NO: 122523 - DNA, 25 bp, Saccharomyces pastorianus
aatatgccatctaacggactttttg

SEQ ID NO: 122524 - DNA, 25 bp, Saccharomyces pastorianus
tggcccatcgtggtctaagattcta

SEQ ID NO: 122525 - DNA, 25 bp, Saccharomyces pastorianus
gcaaaccattgcctgactatttgat

SEQ ID NO: 122526 - DNA, 25 bp, Saccharomyces pastorianus
atccattgtggatgccgctgttgcg

SEQ ID NO: 122527 - DNA, 25 bp, Saccharomyces pastorianus
tagatttatatggtcccggtggtaa

SEQ ID NO: 122528 - DNA, 25 bp, Saccharomyces pastorianus
aaaacttatctcagcatccttcatc

SEQ ID NO: 122529 - DNA, 25 bp, Saccharomyces pastorianus
ttctctcaatctccaaattcgtcaa

SEQ ID NO: 122530 - DNA, 25 bp, Saccharomyces pastorianus
ggaaccactgtgaatactcaactat

SEQ ID NO: 122531 - DNA, 25 bp, Saccharomyces pastorianus
acaacttcggcttccaatagcgata

SEQ ID NO: 122532 - DNA, 25 bp, Saccharomyces pastorianus
attggatggcctggtaagtaacacc

SEQ ID NO: 122533 - DNA, 25 bp, Saccharomyces pastorianus
tagttttgacttatatccgtttgtt

SEQ ID NO: 122534 - DNA, 25 bp, Saccharomyces pastorianus
caattgcataaactgtcgtctaggg

SEQ ID NO: 122535 - DNA, 25 bp, Saccharomyces pastorianus
atagttttacgagcatgtttgacaa

SEQ ID NO: 122536 - DNA, 25 bp, Saccharomyces pastorianus
ggcaacattgccctggttataaatc

SEQ ID NO: 122537 - DNA, 25 bp, Saccharomyces pastorianus
ggataggcttattacttgtgacgaa

SEQ ID NO: 122538 - DNA, 25 bp, Saccharomyces pastorianus
cgacggcgtaccaactatcaattac

SEQ ID NO: 122539 - DNA, 25 bp, Saccharomyces pastorianus
aacactaggtgttgtcggaaccact

SEQ ID NO: 122540 - DNA, 25 bp, Saccharomyces pastorianus
acaactaactgatctcgacggcgta

SEQ ID NO: 122541 - DNA, 25 bp, Saccharomyces pastorianus
agttgattaaatctccctatgggaa

SEQ ID NO: 122542 - DNA, 25 bp, Saccharomyces pastorianus
catggactcacttgccattcgaaca

SEQ ID NO: 122543 - DNA, 25 bp, Saccharomyces pastorianus
ggcggtgacacctatccaaggagaa

SEQ ID NO: 122544 - DNA, 25 bp, Saccharomyces pastorianus
ggagtcgttcgtctatcaaatatta

SEQ ID NO: 122545 - DNA, 25 bp, Saccharomyces pastorianus
ggatgagtcaaggtacaccagcgaa

SEQ ID NO: 122546 - DNA, 25 bp, Saccharomyces pastorianus
ggagatcagatgcaaggctttctaa

SEQ ID NO: 122547 - DNA, 25 bp, Saccharomyces pastorianus
taaggatgcaggtcaattcgatttt

SEQ ID NO: 122548 - DNA, 25 bp, Saccharomyces pastorianus
tacaccagcgaattacgagttgatt

SEQ ID NO: 122549 - DNA, 25 bp, Saccharomyces pastorianus
ttatgtcccacctttcaggaggaga

SEQ ID NO: 122550 - DNA, 25 bp, Saccharomyces pastorianus
cgaaatgtttgtgcccatggactca

SEQ ID NO: 122551 - DNA, 25 bp, Saccharomyces pastorianus
atcaaagccccattttctctgtaga

SEQ ID NO: 122552 - DNA, 25 bp, Saccharomyces pastorianus
attgaccaatggtatcactgccgac

SEQ ID NO: 122553 - DNA, 25 bp, Saccharomyces pastorianus
aaggttccttatattctgattttga

SEQ ID NO: 122554 - DNA, 25 bp, Saccharomyces pastorianus
tatcactgccgaccaaatcattgcc

SEQ ID NO: 122555 - DNA, 25 bp, Saccharomyces pastorianus
agtacgctcaagatatcggtgtttt

SEQ ID NO: 122556 - DNA, 25 bp, Saccharomyces pastorianus
aatcattgcctatctggagacacat

SEQ ID NO: 122557 - DNA, 25 bp, Saccharomyces pastorianus
tggagacacatgcacatcctcaaat

SEQ ID NO: 122558 - DNA, 25 bp, Saccharomyces pastorianus
ttgcctcctaccgtcgtagatcaaa

SEQ ID NO: 122559 - DNA, 25 bp, Saccharomyces pastorianus
tggaccccaactgtaaggagccttt

SEQ ID NO: 122560 - DNA, 25 bp, Saccharomyces pastorianus
gatatacccgatggctcattgattg

SEQ ID NO: 122561 - DNA, 25 bp, Saccharomyces pastorianus
taattcacctctgcaaattgctgtt

SEQ ID NO: 122562 - DNA, 25 bp, Saccharomyces pastorianus
gaagacggcgccaacgggaaatcca

SEQ ID NO: 122563 - DNA, 25 bp, Saccharomyces pastorianus
agtcaattaccttaagccctacagt

SEQ ID NO: 122564 - DNA, 25 bp, Saccharomyces pastorianus
aaatcactcggcagctttctacgat

SEQ ID NO: 122565 - DNA, 25 bp, Saccharomyces pastorianus
gcagcactgggccaattgattcttt

SEQ ID NO: 122566 - DNA, 25 bp, Saccharomyces pastorianus
tattcatctcaaacactcgcaacaa

SEQ ID NO: 122567 - DNA, 25 bp, Saccharomyces pastorianus
gatagcgtcatcatattcatctcaa

SEQ ID NO: 122568 - DNA, 25 bp, Saccharomyces pastorianus
attgattcttttgctggctaccata

SEQ ID NO: 122569 - DNA, 25 bp, Saccharomyces pastorianus
attctcgagctaccctatatcatga

SEQ ID NO: 122570 - DNA, 25 bp, Saccharomyces pastorianus
gattctgcctgtctactatgatgag

SEQ ID NO: 122571 - DNA, 25 bp, Saccharomyces pastorianus
aatagtacttccattctcgagctac

SEQ ID NO: 122572 - DNA, 25 bp, Saccharomyces pastorianus
aattgcatggtagcagtcccaacct

SEQ ID NO: 122573 - DNA, 25 bp, Saccharomyces pastorianus
cgaacgctcccggtgattggttgat

SEQ ID NO: 122574 - DNA, 25 bp, Saccharomyces pastorianus
ggttctgtttcgatgcacgctagat

SEQ ID NO: 122575 - DNA, 25 bp, Saccharomyces pastorianus
ggattatcatacagcttgccaggaa

SEQ ID NO: 122576 - DNA, 25 bp, Saccharomyces pastorianus
gcacgctagattactcgaaccacaa

SEQ ID NO: 122577 - DNA, 25 bp, Saccharomyces pastorianus
gtacccggtagagtcttgaacgttg

SEQ ID NO: 122578 - DNA, 25 bp, Saccharomyces pastorianus
attgacctctagaagggcacgtcga

SEQ ID NO: 122579 - DNA, 25 bp, Saccharomyces pastorianus
gtggctggtggaaaatcatccggat

SEQ ID NO: 122580 - DNA, 25 bp, Saccharomyces pastorianus
ctagttcctttaactccatgggaga

SEQ ID NO: 122581 - DNA, 25 bp, Saccharomyces pastorianus
aaacgttcttgttcgagatcttgga

SEQ ID NO: 122582 - DNA, 25 bp, Saccharomyces pastorianus
tttgtggccgatgtggtatttttcc

SEQ ID NO: 122583 - DNA, 25 bp, Saccharomyces pastorianus
ttcaaaggactgtagtacccggtag

SEQ ID NO: 122584 - DNA, 25 bp, Saccharomyces pastorianus
gtatttttccaatcaccacctagtt

SEQ ID NO: 122585 - DNA, 25 bp, Saccharomyces pastorianus
taatgctattggtgccggtaccaag

SEQ ID NO: 122586 - DNA, 25 bp, Saccharomyces pastorianus
gggagcaattagatgacctttctga

SEQ ID NO: 122587 - DNA, 25 bp, Saccharomyces pastorianus
agggtttactacatcgtgcattctc

SEQ ID NO: 122588 - DNA, 25 bp, Saccharomyces pastorianus
gaaaactatgtttgctgacccaagt

SEQ ID NO: 122589 - DNA, 25 bp, Saccharomyces pastorianus
ttacttattcaactggtgggagcaa

SEQ ID NO: 122590 - DNA, 25 bp, Saccharomyces pastorianus
tgacccaagttacaagtttacgcct

SEQ ID NO: 122591 - DNA, 25 bp, Saccharomyces pastorianus
tacatggcaccaagcaatgaaccgt

SEQ ID NO: 122592 - DNA, 25 bp, Saccharomyces pastorianus
gtgcattctccgtctttattttcaa

SEQ ID NO: 122593 - DNA, 25 bp, Saccharomyces pastorianus
ttaagggcgctattactgcggcggt

SEQ ID NO: 122594 - DNA, 25 bp, Saccharomyces pastorianus
actgcggcggtgagaaaactagatc

SEQ ID NO: 122595 - DNA, 25 bp, Saccharomyces pastorianus
taactttccctgatctttggactaa

SEQ ID NO: 122596 - DNA, 25 bp, Saccharomyces pastorianus
gaccattcatcactgactttgcgtg

SEQ ID NO: 122597 - DNA, 25 bp, Saccharomyces pastorianus
gaggcatctccaagtctttacattg

SEQ ID NO: 122598 - DNA, 25 bp, Saccharomyces pastorianus
tagtatgcttcgaccattcatcact

SEQ ID NO: 122599 - DNA, 25 bp, Saccharomyces pastorianus
taccgagtgtagtttatcgttgctt

SEQ ID NO: 122600 - DNA, 25 bp, Saccharomyces pastorianus
aagcgggtccagtacagttatcaaa

SEQ ID NO: 122601 - DNA, 25 bp, Saccharomyces pastorianus
tcgtgttttccccaactctaaatat

SEQ ID NO: 122602 - DNA, 25 bp, Saccharomyces pastorianus
aatttatgcatcgtgttttccccaa

SEQ ID NO: 122603 - DNA, 25 bp, Saccharomyces pastorianus
acttgagaaagttgccccatttatt

SEQ ID NO: 122604 - DNA, 25 bp, Saccharomyces pastorianus
tatgctctttttgaactgctggtaa

SEQ ID NO: 122605 - DNA, 25 bp, Saccharomyces pastorianus
attgaatctggtctagttcctcacg

SEQ ID NO: 122606 - DNA, 25 bp, Saccharomyces pastorianus
ttcctcacgctaacctatcgttgat

SEQ ID NO: 122607 - DNA, 25 bp, Saccharomyces pastorianus
gtctgctttatgaccatgtcggcaa

SEQ ID NO: 122608 - DNA, 25 bp, Saccharomyces pastorianus
tacaccaggccaaacttttacgatt

SEQ ID NO: 122609 - DNA, 25 bp, Saccharomyces pastorianus
tctcccaacgttaactatcctgaca

SEQ ID NO: 122610 - DNA, 25 bp, Saccharomyces pastorianus
agcttgccacttttccagattcaag

SEQ ID NO: 122611 - DNA, 25 bp, Saccharomyces pastorianus
atcaaatccgcattcttccaagtat

SEQ ID NO: 122612 - DNA, 25 bp, Saccharomyces pastorianus
taaacacatcgagaccacagcttgc

SEQ ID NO: 122613 - DNA, 25 bp, Saccharomyces pastorianus
gagcgtctagtagcacatcttcatc

SEQ ID NO: 122614 - DNA, 25 bp, Saccharomyces pastorianus
aaagctgtaacatcccatctgcgaa

SEQ ID NO: 122615 - DNA, 25 bp, Saccharomyces pastorianus
gaagtaactcttgcttaacgcgtgt

SEQ ID NO: 122616 - DNA, 25 bp, Saccharomyces pastorianus
gcttaacgcgtgtttcctcattttt

SEQ ID NO: 122617 - DNA, 25 bp, Saccharomyces pastorianus
aatatgtcctgcacattctcgagtg

SEQ ID NO: 122618 - DNA, 25 bp, Saccharomyces pastorianus
aacgtatgccgttctgtctctggga

SEQ ID NO: 122619 - DNA, 25 bp, Saccharomyces pastorianus
actgatgcatcaggcccataaagac

SEQ ID NO: 122620 - DNA, 25 bp, Saccharomyces pastorianus
ggcaatacgacattcttttaagctt

SEQ ID NO: 122621 - DNA, 25 bp, Saccharomyces pastorianus
agacgatggctcacaatcgccaatt

SEQ ID NO: 122622 - DNA, 25 bp, Saccharomyces pastorianus
aagagtctcttgcatggcaatacga

SEQ ID NO: 122623 - DNA, 25 bp, Saccharomyces pastorianus
aataacgcgttactactctcaccca

SEQ ID NO: 122624 - DNA, 25 bp, Saccharomyces pastorianus
ggacttgtattatggtatctttgat

SEQ ID NO: 122625 - DNA, 25 bp, Saccharomyces pastorianus
tgaaggaccattggctcaacctgca

SEQ ID NO: 122626 - DNA, 25 bp, Saccharomyces pastorianus
tactctcacccatactgatgcatca

SEQ ID NO: 122627 - DNA, 25 bp, Saccharomyces pastorianus
ggctcaacctgcaaagcttacagaa

SEQ ID NO: 122628 - DNA, 25 bp, Saccharomyces pastorianus
ctgtctctgggatccggcttaactg

SEQ ID NO: 122629 - DNA, 25 bp, Saccharomyces pastorianus
gacaggtgcttagtggtttctgcca

SEQ ID NO: 122630 - DNA, 25 bp, Saccharomyces pastorianus
gagtatacgcagcaattgcagcact

SEQ ID NO: 122631 - DNA, 25 bp, Saccharomyces pastorianus
tagaacaaggccctgtgcggacaaa

SEQ ID NO: 122632 - DNA, 25 bp, Saccharomyces pastorianus
gcaattgcagcactacttcgaagta

SEQ ID NO: 122633 - DNA, 25 bp, Saccharomyces pastorianus
gatatctccaataagcatcagcgac

SEQ ID NO: 122634 - DNA, 25 bp, Saccharomyces pastorianus
tggatctcagcacctattttctggg

SEQ ID NO: 122635 - DNA, 25 bp, Saccharomyces pastorianus
cagtgaccaagccaatctcgttaga

SEQ ID NO: 122636 - DNA, 25 bp, Saccharomyces pastorianus
ggtagatcccttggttgagatccga

SEQ ID NO: 122637 - DNA, 25 bp, Saccharomyces pastorianus
aaggagtgtctggatctcagcacct

SEQ ID NO: 122638 - DNA, 25 bp, Saccharomyces pastorianus
gtttctgccatcgtttattttacca

SEQ ID NO: 122639 - DNA, 25 bp, Saccharomyces pastorianus
gaaggcaagtacgatatctccaata

SEQ ID NO: 122640 - DNA, 25 bp, Saccharomyces pastorianus
gaccactgtttttggaggacgctta

SEQ ID NO: 122641 - DNA, 25 bp, Saccharomyces pastorianus
gggtgaaccaccaagatccacaagt

SEQ ID NO: 122642 - DNA, 25 bp, Saccharomyces pastorianus
aagactggaatccacctttgggatt

SEQ ID NO: 122643 - DNA, 25 bp, Saccharomyces pastorianus
aggtgtccaagtgcctgcaaaacca

SEQ ID NO: 122644 - DNA, 25 bp, Saccharomyces pastorianus
gttgcgttaactgtgtctgggagat

SEQ ID NO: 122645 - DNA, 25 bp, Saccharomyces pastorianus
acaagaacccgataactgttgcatg

SEQ ID NO: 122646 - DNA, 25 bp, Saccharomyces pastorianus
tctgctatcagaagtttgttcccta

SEQ ID NO: 122647 - DNA, 25 bp, Saccharomyces pastorianus
aaatgtccctgttgagttacgtgaa

SEQ ID NO: 122648 - DNA, 25 bp, Saccharomyces pastorianus
gggcctctgcccaagagtgtattgg

SEQ ID NO: 122649 - DNA, 25 bp, Saccharomyces pastorianus
tcctgtctacgttaaagcctttgca

SEQ ID NO: 122650 - DNA, 25 bp, Saccharomyces pastorianus
gaacaacctcatgatttatctgcta

SEQ ID NO: 122651 - DNA, 25 bp, Saccharomyces pastorianus
gcacctcatctctaaactatttagc

SEQ ID NO: 122652 - DNA, 25 bp, Saccharomyces pastorianus
tacatgcgatatttaagagccgaat

SEQ ID NO: 122653 - DNA, 25 bp, Saccharomyces pastorianus
gctacctctatcgttcagtatttca

SEQ ID NO: 122654 - DNA, 25 bp, Saccharomyces pastorianus
atttagcctcatcgacagtttcata

SEQ ID NO: 122655 - DNA, 25 bp, Saccharomyces pastorianus
tatacaacgttgttctctgcacctc

SEQ ID NO: 122656 - DNA, 25 bp, Saccharomyces pastorianus
gttcagtatttcacctcttttacga

SEQ ID NO: 122657 - DNA, 25 bp, Saccharomyces pastorianus
gctttacccggtctggcgtcaaaag

SEQ ID NO: 122658 - DNA, 25 bp, Saccharomyces pastorianus
cagtttcatatgtcgtttttgttat

SEQ ID NO: 122659 - DNA, 25 bp, Saccharomyces pastorianus
gacctcttaacagtggacctcttag

SEQ ID NO: 122660 - DNA, 25 bp, Saccharomyces pastorianus
gaagttcgtggaggacctcttaaca

SEQ ID NO: 122661 - DNA, 25 bp, Saccharomyces pastorianus
tagagttcattccatgcgctttacc

SEQ ID NO: 122662 - DNA, 25 bp, Saccharomyces pastorianus
ttaccagttttcacggaccgtggag

SEQ ID NO: 122663 - DNA, 25 bp, Saccharomyces pastorianus
tcacactcgcactcggatgaaatct

SEQ ID NO: 122664 - DNA, 25 bp, Saccharomyces pastorianus
atatccatagacattatcactcccc

SEQ ID NO: 122665 - DNA, 25 bp, Saccharomyces pastorianus
gggcatacccgtggatgatgctgaa

SEQ ID NO: 122666 - DNA, 25 bp, Saccharomyces pastorianus
ggttgtactgtttgcttccatatcc

SEQ ID NO: 122667 - DNA, 25 bp, Saccharomyces pastorianus
aactcaacctatctccactattttg

SEQ ID NO: 122668 - DNA, 25 bp, Saccharomyces pastorianus
gctcccatagcatctgaactgacat

SEQ ID NO: 122669 - DNA, 25 bp, Saccharomyces pastorianus
tgaaggttcagctgcctcggaacag

SEQ ID NO: 122670 - DNA, 25 bp, Saccharomyces pastorianus
tgaactgacatttatcgccccaact

SEQ ID NO: 122671 - DNA, 25 bp, Saccharomyces pastorianus
gaattgttattccttctcttctaca

SEQ ID NO: 122672 - DNA, 25 bp, Saccharomyces pastorianus
aagattcaacatgggctagtccaca

SEQ ID NO: 122673 - DNA, 25 bp, Saccharomyces pastorianus
actgcttcacttctcgtggtggaaa

SEQ ID NO: 122674 - DNA, 25 bp, Saccharomyces pastorianus
tccccaaccaacaacgaagagctgt

SEQ ID NO: 122675 - DNA, 25 bp, Saccharomyces pastorianus
gacttggctaatttggattctttgg

SEQ ID NO: 122676 - DNA, 25 bp, Saccharomyces pastorianus
gaggtagaaatcctggaacaccaat

SEQ ID NO: 122677 - DNA, 25 bp, Saccharomyces pastorianus
aagagctgtttcaacgtcaccgaag

SEQ ID NO: 122678 - DNA, 25 bp, Saccharomyces pastorianus
gagtagaactaaattctttcccata

SEQ ID NO: 122679 - DNA, 25 bp, Saccharomyces pastorianus
aacagacgctctaatgctctcatta

SEQ ID NO: 122680 - DNA, 25 bp, Saccharomyces pastorianus
ggatcttccgtttatttactgcttc

SEQ ID NO: 122681 - DNA, 25 bp, Saccharomyces pastorianus
ataacaaccgttgcctattaccaca

SEQ ID NO: 122682 - DNA, 25 bp, Saccharomyces pastorianus
gttcattctaatgggatcttccgtt

SEQ ID NO: 122683 - DNA, 25 bp, Saccharomyces pastorianus
gatactgaactgatacgcgatttga

SEQ ID NO: 122684 - DNA, 25 bp, Saccharomyces pastorianus
atgatgggtactaccgtcggtgtct

SEQ ID NO: 122685 - DNA, 25 bp, Saccharomyces pastorianus
tacattgctggttcagcgggtacct

SEQ ID NO: 122686 - DNA, 25 bp, Saccharomyces pastorianus
gtctgcacaggcatcctatttggtg

SEQ ID NO: 122687 - DNA, 25 bp, Saccharomyces pastorianus
acagcagccttcgaattgggacaaa

SEQ ID NO: 122688 - DNA, 25 bp, Saccharomyces pastorianus
gtgaaagtagtccaatgtcccatcc

SEQ ID NO: 122689 - DNA, 25 bp, Saccharomyces pastorianus
gcgggtacctttgggctatttatgt

SEQ ID NO: 122690 - DNA, 25 bp, Saccharomyces pastorianus
aattatgcgcaacagcagccttcga

SEQ ID NO: 122691 - DNA, 25 bp, Saccharomyces pastorianus
aatgtcccatcctaacctgaaccta

SEQ ID NO: 122692 - DNA, 25 bp, Saccharomyces pastorianus
ctcctcttccacaaaattatgcgca

SEQ ID NO: 122693 - DNA, 25 bp, Saccharomyces pastorianus
tttgccatcgcaactcaaggcccag

SEQ ID NO: 122694 - DNA, 25 bp, Saccharomyces pastorianus
ggcccaggtcctgatggtgtagtta

SEQ ID NO: 122695 - DNA, 25 bp, Saccharomyces pastorianus
ggttacgtaacaatgactctttcct

SEQ ID NO: 122696 - DNA, 25 bp, Saccharomyces pastorianus
gtcttgctacattttactggttacg

SEQ ID NO: 122697 - DNA, 25 bp, Saccharomyces pastorianus
ttacttactcggtactcctaattag

SEQ ID NO: 122698 - DNA, 25 bp, Saccharomyces pastorianus
ctttcctgcactactggtgtgtatt

SEQ ID NO: 122699 - DNA, 25 bp, Saccharomyces pastorianus
ggtactcctaattagtcttgctaca

SEQ ID NO: 122700 - DNA, 25 bp, Saccharomyces pastorianus
tattactgctatgccctgcgactct

SEQ ID NO: 122701 - DNA, 25 bp, Saccharomyces pastorianus
gtaacaatgactctttcctgcacta

SEQ ID NO: 122702 - DNA, 25 bp, Saccharomyces pastorianus
tggtgtgtattactgctatgccctg

SEQ ID NO: 122703 - DNA, 25 bp, Saccharomyces pastorianus
ggccctcatagcctggtgtgacagt

SEQ ID NO: 122704 - DNA, 25 bp, Saccharomyces pastorianus
agaccacgtgaccaaggctttttgg

SEQ ID NO: 122705 - DNA, 25 bp, Saccharomyces pastorianus
gactctctggctgtgggccctcata

SEQ ID NO: 122706 - DNA, 25 bp, Saccharomyces pastorianus
gttagatgttcgctacgtctggaat

SEQ ID NO: 122707 - DNA, 25 bp, Saccharomyces pastorianus
gtgagcaatcattcgaccaaccata

SEQ ID NO: 122708 - DNA, 25 bp, Saccharomyces pastorianus
atgagttactgtattgcgttcggta

SEQ ID NO: 122709 - DNA, 25 bp, Saccharomyces pastorianus
gttcatgtcgactcctgtgagcaat

SEQ ID NO: 122710 - DNA, 25 bp, Saccharomyces pastorianus
aaatccgaaagcgtcagtgccgctt

SEQ ID NO: 122711 - DNA, 25 bp, Saccharomyces pastorianus
agtgccgcttcgaaatcatctaatc

SEQ ID NO: 122712 - DNA, 25 bp, Saccharomyces pastorianus
tgacgagatataccaacttgcatgt

SEQ ID NO: 122713 - DNA, 25 bp, Saccharomyces pastorianus
gaataggtgggttcatgtcgactcc

SEQ ID NO: 122714 - DNA, 25 bp, Saccharomyces pastorianus
gttagtaaacgctatatcctccaaa

SEQ ID NO: 122715 - DNA, 25 bp, Saccharomyces pastorianus
tatcctccaaaacgagctgtccaga

SEQ ID NO: 122716 - DNA, 25 bp, Saccharomyces pastorianus
atcactagatttcctcgttataacg

SEQ ID NO: 122717 - DNA, 25 bp, Saccharomyces pastorianus
gaagaccagcttaagtcacgtgaaa

SEQ ID NO: 122718 - DNA, 25 bp, Saccharomyces pastorianus
ttcggcatcttagcaggcttctttg

SEQ ID NO: 122719 - DNA, 25 bp, Saccharomyces pastorianus
gtgtccatcatattggcgctcgtat

SEQ ID NO: 122720 - DNA, 25 bp, Saccharomyces pastorianus
atgttggtgggttctggatctttcc

SEQ ID NO: 122721 - DNA, 25 bp, Saccharomyces pastorianus
ttgaagccaagcaaggactttccgc

SEQ ID NO: 122722 - DNA, 25 bp, Saccharomyces pastorianus
gactttccgcacttgattgtttcga

SEQ ID NO: 122723 - DNA, 25 bp, Saccharomyces pastorianus
taagccactttacggttttggtgag

SEQ ID NO: 122724 - DNA, 25 bp, Saccharomyces pastorianus
ggaactataaccctagaacctacat

SEQ ID NO: 122725 - DNA, 25 bp, Saccharomyces pastorianus
ttgctgtcgctatcctgagattgat

SEQ ID NO: 122726 - DNA, 25 bp, Saccharomyces pastorianus
gaacctacatggattacttgatcgt

SEQ ID NO: 122727 - DNA, 25 bp, Saccharomyces pastorianus
atgagacgcggctcctattatgtgt

SEQ ID NO: 122728 - DNA, 25 bp, Saccharomyces pastorianus
gcttccactgaaaacggtgtcaagt

SEQ ID NO: 122729 - DNA, 25 bp, Saccharomyces pastorianus
aagctatcatgccacgttctaaact

SEQ ID NO: 122730 - DNA, 25 bp, Saccharomyces pastorianus
ttggaccctgaaatcgctgctaaac

SEQ ID NO: 122731 - DNA, 25 bp, Saccharomyces pastorianus
atccaaggccgacaggatggccaag

SEQ ID NO: 122732 - DNA, 25 bp, Saccharomyces pastorianus
gggttctacaattctgacgatgagg

SEQ ID NO: 122733 - DNA, 25 bp, Saccharomyces pastorianus
tagacatgccaagcaaggtgaatct

SEQ ID NO: 122734 - DNA, 25 bp, Saccharomyces pastorianus
ttttggcgaccaagatgctttgaca

SEQ ID NO: 122735 - DNA, 25 bp, Saccharomyces pastorianus
gttctgatgttgtttttggcgacca

SEQ ID NO: 122736 - DNA, 25 bp, Saccharomyces pastorianus
gctgtttccttatcaaagcatttat

SEQ ID NO: 122737 - DNA, 25 bp, Saccharomyces pastorianus
aaacagaaccgtgctgctcgtaaga

SEQ ID NO: 122738 - DNA, 25 bp, Saccharomyces pastorianus
tgctaaactgcaggctcttgaagaa

SEQ ID NO: 122739 - DNA, 25 bp, Saccharomyces pastorianus
gacagtttctccgtataacagcatt

SEQ ID NO: 122740 - DNA, 25 bp, Saccharomyces pastorianus
gttggtcaattctatgccttttatg

SEQ ID NO: 122741 - DNA, 25 bp, Saccharomyces pastorianus
gtcgtttcaatcctgtcgtactaca

SEQ ID NO: 122742 - DNA, 25 bp, Saccharomyces pastorianus
gcagtataaccagtacgttccctta

SEQ ID NO: 122743 - DNA, 25 bp, Saccharomyces pastorianus
ttcaccgtgatttctgtcgtttcaa

SEQ ID NO: 122744 - DNA, 25 bp, Saccharomyces pastorianus
gactattgcagttccatggtgtttc

SEQ ID NO: 122745 - DNA, 25 bp, Saccharomyces pastorianus
ctatggcattgctcgctatgggcta

SEQ ID NO: 122746 - DNA, 25 bp, Saccharomyces pastorianus
gctatgggctattttttcaccgtga

SEQ ID NO: 122747 - DNA, 25 bp, Saccharomyces pastorianus
ctaggcatggtttctgctatggcat

SEQ ID NO: 122748 - DNA, 25 bp, Saccharomyces pastorianus
aaagatgctgcatgctgcccgtaaa

SEQ ID NO: 122749 - DNA, 25 bp, Saccharomyces pastorianus
ttattcctgcttttgggcccgatgg

SEQ ID NO: 122750 - DNA, 25 bp, Saccharomyces pastorianus
gagtgatccaactttcaagtcgtta

SEQ ID NO: 122751 - DNA, 25 bp, Saccharomyces pastorianus
gatgttgttgaagcgggccacgtta

SEQ ID NO: 122752 - DNA, 25 bp, Saccharomyces pastorianus
gattgccgcactacaagtaactcta

SEQ ID NO: 122753 - DNA, 25 bp, Saccharomyces pastorianus
agaactgcagttcacagccgataaa

SEQ ID NO: 122754 - DNA, 25 bp, Saccharomyces pastorianus
gatctccattgcatgggttttgcat

SEQ ID NO: 122755 - DNA, 25 bp, Saccharomyces pastorianus
tactacaatttgctctatcgtgaag

SEQ ID NO: 122756 - DNA, 25 bp, Saccharomyces pastorianus
tgttgactcgtcctctgaaccaaag

SEQ ID NO: 122757 - DNA, 25 bp, Saccharomyces pastorianus
aaaagtctcgatggctatgatctcc

SEQ ID NO: 122758 - DNA, 25 bp, Saccharomyces pastorianus
gtctcctaacgcacgaggcatgttg

SEQ ID NO: 122759 - DNA, 25 bp, Saccharomyces pastorianus
ttggtttacttccatggtctcctaa

SEQ ID NO: 122760 - DNA, 25 bp, Saccharomyces pastorianus
gactgggcacatatatagacctttt

SEQ ID NO: 122761 - DNA, 25 bp, Saccharomyces pastorianus
ggccctgccattaggtgttctattg

SEQ ID NO: 122762 - DNA, 25 bp, Saccharomyces pastorianus
aaaagccagcaattttccaagtcct

SEQ ID NO: 122763 - DNA, 25 bp, Saccharomyces pastorianus
tattgacgcttctagttgtggttct

SEQ ID NO: 122764 - DNA, 25 bp, Saccharomyces pastorianus
cggagaacatatttggccctgccat

SEQ ID NO: 122765 - DNA, 25 bp, Saccharomyces pastorianus
gtactggtgtctatatcttcgtcgt

SEQ ID NO: 122766 - DNA, 25 bp, Saccharomyces pastorianus
ttgtggttctttctggctggctgac

SEQ ID NO: 122767 - DNA, 25 bp, Saccharomyces pastorianus
gattggtacttcttattcactggag

SEQ ID NO: 122768 - DNA, 25 bp, Saccharomyces pastorianus
gctggcaactagatattcacctgtg

SEQ ID NO: 122769 - DNA, 25 bp, Saccharomyces pastorianus
ggctgacctactatcacgttcatga

SEQ ID NO: 122770 - DNA, 25 bp, Saccharomyces pastorianus
gttatgggcatgattccttttgtca

SEQ ID NO: 122771 - DNA, 25 bp, Saccharomyces pastorianus
tttacgttgtcgtccaaaagccagc

SEQ ID NO: 122772 - DNA, 25 bp, Saccharomyces pastorianus
ctcccagaggacttctattgttaga

SEQ ID NO: 122773 - DNA, 25 bp, Saccharomyces pastorianus
gagatcctcgtaaattccagcatca

SEQ ID NO: 122774 - DNA, 25 bp, Saccharomyces pastorianus
agagacattccaatgcccttggtta

SEQ ID NO: 122775 - DNA, 25 bp, Saccharomyces pastorianus
cagcatcaagggtttggtactctat

SEQ ID NO: 122776 - DNA, 25 bp, Saccharomyces pastorianus
cttagttgctagaatcttggcccta

SEQ ID NO: 122777 - DNA, 25 bp, Saccharomyces pastorianus
gtgccaacgccttagtggacttagt

SEQ ID NO: 122778 - DNA, 25 bp, Saccharomyces pastorianus
agaaaagaattcacctcccagagga

SEQ ID NO: 122779 - DNA, 25 bp, Saccharomyces pastorianus
aaccagatcaggtcgagcttatcag

SEQ ID NO: 122780 - DNA, 25 bp, Saccharomyces pastorianus
tccacttcattcaagagatcctcgt

SEQ ID NO: 122781 - DNA, 25 bp, Saccharomyces pastorianus
cccttggttacctcaggtgttgaca

SEQ ID NO: 122782 - DNA, 25 bp, Saccharomyces pastorianus
aagaatctaccgtgtccaaagagac

SEQ ID NO: 122783 - DNA, 25 bp, Saccharomyces pastorianus
gtatggaaaccccattctaatttca

SEQ ID NO: 122784 - DNA, 25 bp, Saccharomyces pastorianus
ggagacaaactcctacgttgaagat

SEQ ID NO: 122785 - DNA, 25 bp, Saccharomyces pastorianus
taaataggcttgttcgttccgtggc

SEQ ID NO: 122786 - DNA, 25 bp, Saccharomyces pastorianus
gaggagcgcgaaatctcaaactgaa

SEQ ID NO: 122787 - DNA, 25 bp, Saccharomyces pastorianus
ggtcttcctgatttccaagttttcg

SEQ ID NO: 122788 - DNA, 25 bp, Saccharomyces pastorianus
atgacgatcttcagcattttcctac

SEQ ID NO: 122789 - DNA, 25 bp, Saccharomyces pastorianus
ttttcctacctataaagagctgcga

SEQ ID NO: 122790 - DNA, 25 bp, Saccharomyces pastorianus
gataatggccttatttcgtttgtaa

SEQ ID NO: 122791 - DNA, 25 bp, Saccharomyces pastorianus
gaagagaaaggcgtacccacctcac

SEQ ID NO: 122792 - DNA, 25 bp, Saccharomyces pastorianus
ttcgttccgtggctgtaccaaagaa

SEQ ID NO: 122793 - DNA, 25 bp, Saccharomyces pastorianus
tgcgatctatgttttcctcacttga

SEQ ID NO: 122794 - DNA, 25 bp, Saccharomyces pastorianus
tattgcgcgctcaagcggccctata

SEQ ID NO: 122795 - DNA, 25 bp, Saccharomyces pastorianus
agtgtacaatcaagctcacccgagc

SEQ ID NO: 122796 - DNA, 25 bp, Saccharomyces pastorianus
cagcctatcttttgcgtttactttc

SEQ ID NO: 122797 - DNA, 25 bp, Saccharomyces pastorianus
ggtgacaaatatgtcgcctcacctc

SEQ ID NO: 122798 - DNA, 25 bp, Saccharomyces pastorianus
ctctctaccatctcggtaacttgaa

SEQ ID NO: 122799 - DNA, 25 bp, Saccharomyces pastorianus
gaatgaaggcagtcagcctatcttt

SEQ ID NO: 122800 - DNA, 25 bp, Saccharomyces pastorianus
tcactcaccgatattgcgcgctcaa

SEQ ID NO: 122801 - DNA, 25 bp, Saccharomyces pastorianus
aagcatcgttgctgcagtgtacaat

SEQ ID NO: 122802 - DNA, 25 bp, Saccharomyces pastorianus
gcctcacctcctagtcgaatgaagg

SEQ ID NO: 122803 - DNA, 25 bp, Saccharomyces pastorianus
atggatggatcttacctcactcacc

SEQ ID NO: 122804 - DNA, 25 bp, Saccharomyces pastorianus
atactgcacacctattacttcttga

SEQ ID NO: 122805 - DNA, 25 bp, Saccharomyces pastorianus
ggcaactagcaaaatctgtcatctc

SEQ ID NO: 122806 - DNA, 25 bp, Saccharomyces pastorianus
ggcaaagtatttggcgccagcatat

SEQ ID NO: 122807 - DNA, 25 bp, Saccharomyces pastorianus
ccgctgtcatttatgccatttccaa

SEQ ID NO: 122808 - DNA, 25 bp, Saccharomyces pastorianus
gcaaaggctaactctatcatcaatg

SEQ ID NO: 122809 - DNA, 25 bp, Saccharomyces pastorianus
attgctgacttttttgggtttcact

SEQ ID NO: 122810 - DNA, 25 bp, Saccharomyces pastorianus
aaggcagtcttggattcgtgggtta

SEQ ID NO: 122811 - DNA, 25 bp, Saccharomyces pastorianus
tagaatcgactctgtctctcaacta

SEQ ID NO: 122812 - DNA, 25 bp, Saccharomyces pastorianus
gtctccgacgttttaaatgcctcga

SEQ ID NO: 122813 - DNA, 25 bp, Saccharomyces pastorianus
gtcatctccagagttcagtcagaat

SEQ ID NO: 122814 - DNA, 25 bp, Saccharomyces pastorianus
gatatgaagcttccttgcgtcaatt

SEQ ID NO: 122815 - DNA, 25 bp, Saccharomyces pastorianus
catcaatgccattccaggtaataat

SEQ ID NO: 122816 - DNA, 25 bp, Saccharomyces pastorianus
atttgcaatgttgactctctctcca

SEQ ID NO: 122817 - DNA, 25 bp, Saccharomyces pastorianus
tctttttggctgaccctatggtaca

SEQ ID NO: 122818 - DNA, 25 bp, Saccharomyces pastorianus
accaatatacttgtcgcccttgttg

SEQ ID NO: 122819 - DNA, 25 bp, Saccharomyces pastorianus
tattccgccaactattttcctttca

SEQ ID NO: 122820 - DNA, 25 bp, Saccharomyces pastorianus
tatcattctacccacttatttatcg

SEQ ID NO: 122821 - DNA, 25 bp, Saccharomyces pastorianus
gaggctttcgaccacaatcgacgta

SEQ ID NO: 122822 - DNA, 25 bp, Saccharomyces pastorianus
gtaaagtcttcgctgattatcacat

SEQ ID NO: 122823 - DNA, 25 bp, Saccharomyces pastorianus
gttgctgtcctatcatcgaggcttt

SEQ ID NO: 122824 - DNA, 25 bp, Saccharomyces pastorianus
aaggacgaaagtcgaccctctattg

SEQ ID NO: 122825 - DNA, 25 bp, Saccharomyces pastorianus
tattatggcttcgatcctattccgc

SEQ ID NO: 122826 - DNA, 25 bp, Saccharomyces pastorianus
aacaactgcatctgattccatatgg

SEQ ID NO: 122827 - DNA, 25 bp, Saccharomyces pastorianus
tgtcaccctcaattattttcataga

SEQ ID NO: 122828 - DNA, 25 bp, Saccharomyces pastorianus
agcaacgaatttgccatgggcgatt

SEQ ID NO: 122829 - DNA, 25 bp, Saccharomyces pastorianus
gaccgaaataatacgcttgacagca

SEQ ID NO: 122830 - DNA, 25 bp, Saccharomyces pastorianus
gtgctactgcacaatcggaagaccg

SEQ ID NO: 122831 - DNA, 25 bp, Saccharomyces pastorianus
ggttttctggttctgatcttacgtc

SEQ ID NO: 122832 - DNA, 25 bp, Saccharomyces pastorianus
gaaactatacattcctttaccagat

SEQ ID NO: 122833 - DNA, 25 bp, Saccharomyces pastorianus
gaacttcttattcagtggtcctccc

SEQ ID NO: 122834 - DNA, 25 bp, Saccharomyces pastorianus
gactctatgttaacagctcgctctg

SEQ ID NO: 122835 - DNA, 25 bp, Saccharomyces pastorianus
gcagagtacttgtcttaggagcaac

SEQ ID NO: 122836 - DNA, 25 bp, Saccharomyces pastorianus
gagcgtgtcgtcagaatctctacaa

SEQ ID NO: 122837 - DNA, 25 bp, Saccharomyces pastorianus
tggtcctccctatctagtgctactg

SEQ ID NO: 122838 - DNA, 25 bp, Saccharomyces pastorianus
ttccagccaggccttgcaaagatga

SEQ ID NO: 122839 - DNA, 25 bp, Saccharomyces pastorianus
cacttaggctgggtgcaatggcata

SEQ ID NO: 122840 - DNA, 25 bp, Saccharomyces pastorianus
acaaatcgaggtattccagccaggc

SEQ ID NO: 122841 - DNA, 25 bp, Saccharomyces pastorianus
cgagttttcaagtcgactatgcctt

SEQ ID NO: 122842 - DNA, 25 bp, Saccharomyces pastorianus
gattgtcgccttttgcattatttga

SEQ ID NO: 122843 - DNA, 25 bp, Saccharomyces pastorianus
gttatgaagcaatcattcccacgat

SEQ ID NO: 122844 - DNA, 25 bp, Saccharomyces pastorianus
gtacttcccaatactctgcttagaa

SEQ ID NO: 122845 - DNA, 25 bp, Saccharomyces pastorianus
gaatccccaaagactagcgcactta

SEQ ID NO: 122846 - DNA, 25 bp, Saccharomyces pastorianus
gaccgttcttatccgtttcaaatat

SEQ ID NO: 122847 - DNA, 25 bp, Saccharomyces pastorianus
aattaagcccactgtcgtgtacttc

SEQ ID NO: 122848 - DNA, 25 bp, Saccharomyces pastorianus
tgacgtcttacgatcttttacagat

SEQ ID NO: 122849 - DNA, 25 bp, Saccharomyces pastorianus
gaaatcattctccagacccaatagg

SEQ ID NO: 122850 - DNA, 25 bp, Saccharomyces pastorianus
tatctaagctggtggaagtggttcc

SEQ ID NO: 122851 - DNA, 25 bp, Saccharomyces pastorianus
acgcggcgacaatgacttgttttat

SEQ ID NO: 122852 - DNA, 25 bp, Saccharomyces pastorianus
aagagatcatcaagtgttccacaag

SEQ ID NO: 122853 - DNA, 25 bp, Saccharomyces pastorianus
gtgttccacaagtaaacgcggcgac

SEQ ID NO: 122854 - DNA, 25 bp, Saccharomyces pastorianus
cgctattgatgataaggtcctgaaa

SEQ ID NO: 122855 - DNA, 25 bp, Saccharomyces pastorianus
aagggcccaagaacggacatgcaga

SEQ ID NO: 122856 - DNA, 25 bp, Saccharomyces pastorianus
gtggttccataatcaaatgacttcg

SEQ ID NO: 122857 - DNA, 25 bp, Saccharomyces pastorianus
tagtattcacagacgctattgatga

SEQ ID NO: 122858 - DNA, 25 bp, Saccharomyces pastorianus
gacttcgaaatacacttatgatgga

SEQ ID NO: 122859 - DNA, 25 bp, Saccharomyces pastorianus
aatggcaatcccaaccacattagga

SEQ ID NO: 122860 - DNA, 25 bp, Saccharomyces pastorianus
tactctatatgctgtgcgtgccaac

SEQ ID NO: 122861 - DNA, 25 bp, Saccharomyces pastorianus
atgcatttttgcaggcacagccgct

SEQ ID NO: 122862 - DNA, 25 bp, Saccharomyces pastorianus
acgggaacgctattccgcggaacag

SEQ ID NO: 122863 - DNA, 25 bp, Saccharomyces pastorianus
agtacattccccagataaggccgtg

SEQ ID NO: 122864 - DNA, 25 bp, Saccharomyces pastorianus
ttgtacaccttgttctctggtccaa

SEQ ID NO: 122865 - DNA, 25 bp, Saccharomyces pastorianus
ggaactacaaagtgttgcccggatt

SEQ ID NO: 122866 - DNA, 25 bp, Saccharomyces pastorianus
taggctggtcgctagacgaaccgca

SEQ ID NO: 122867 - DNA, 25 bp, Saccharomyces pastorianus
atgctgccgcgaaggcttttagttc

SEQ ID NO: 122868 - DNA, 25 bp, Saccharomyces pastorianus
taacttcgagcctggtgttgtacac

SEQ ID NO: 122869 - DNA, 25 bp, Saccharomyces pastorianus
aaaaggactgctggcctggacatga

SEQ ID NO: 122870 - DNA, 25 bp, Saccharomyces pastorianus
gtgccaacgatttcccgtataactt

SEQ ID NO: 122871 - DNA, 25 bp, Saccharomyces pastorianus
gaaagcctacctaaaagactccata

SEQ ID NO: 122872 - DNA, 25 bp, Saccharomyces pastorianus
gcagaacatgcgatatccactacca

SEQ ID NO: 122873 - DNA, 25 bp, Saccharomyces pastorianus
gatgacacccaatacaccaatactg

SEQ ID NO: 122874 - DNA, 25 bp, Saccharomyces pastorianus
gttcaaggtctacctgaattctcag

SEQ ID NO: 122875 - DNA, 25 bp, Saccharomyces pastorianus
acatcggctccctttggtgataata

SEQ ID NO: 122876 - DNA, 25 bp, Saccharomyces pastorianus
gagaacttctgtttgatctggaact

SEQ ID NO: 122877 - DNA, 25 bp, Saccharomyces pastorianus
gggcataccaattacagcagaacat

SEQ ID NO: 122878 - DNA, 25 bp, Saccharomyces pastorianus
gaagcgttctgcgatacatacaaca

SEQ ID NO: 122879 - DNA, 25 bp, Saccharomyces pastorianus
atacgtcgctgaggccactggtaat

SEQ ID NO: 122880 - DNA, 25 bp, Saccharomyces pastorianus
catacaacatcactgcttcaaacgc

SEQ ID NO: 122881 - DNA, 25 bp, Saccharomyces pastorianus
atcccttattggctgaactgctaat

SEQ ID NO: 122882 - DNA, 25 bp, Saccharomyces pastorianus
acgattcatgtatcctgcagttttg

SEQ ID NO: 122883 - DNA, 25 bp, Saccharomyces pastorianus
cattctttgaggacatctttggatc

SEQ ID NO: 122884 - DNA, 25 bp, Saccharomyces pastorianus
gagattaccataccattctttgagg

SEQ ID NO: 122885 - DNA, 25 bp, Saccharomyces pastorianus
ttgggcggcgaaattgaagcttcct

SEQ ID NO: 122886 - DNA, 25 bp, Saccharomyces pastorianus
tctttagacagatcttgggcggcga

SEQ ID NO: 122887 - DNA, 25 bp, Saccharomyces pastorianus
aagcttcctcccgtgacaataatgt

SEQ ID NO: 122888 - DNA, 25 bp, Saccharomyces pastorianus
gaatgattctcccagcatggatcaa

SEQ ID NO: 122889 - DNA, 25 bp, Saccharomyces pastorianus
ggtgatgttcaaaagcttaagccaa

SEQ ID NO: 122890 - DNA, 25 bp, Saccharomyces pastorianus
ctggcggattctaagcacgtactga

SEQ ID NO: 122891 - DNA, 25 bp, Saccharomyces pastorianus
gacacattcttagatcagccacaag

SEQ ID NO: 122892 - DNA, 25 bp, Saccharomyces pastorianus
tggtttataactgtgctggcggatt

SEQ ID NO: 122893 - DNA, 25 bp, Saccharomyces pastorianus
tgtacttaaccgacaaaaaggctgg

SEQ ID NO: 122894 - DNA, 25 bp, Saccharomyces pastorianus
tctactgtttggctctatgcgaagg

SEQ ID NO: 122895 - DNA, 25 bp, Saccharomyces pastorianus
gcgaaagcgccatatctgacgtgaa

SEQ ID NO: 122896 - DNA, 25 bp, Saccharomyces pastorianus
tcctgggttctatctatggtatgaa

SEQ ID NO: 122897 - DNA, 25 bp, Saccharomyces pastorianus
gcgaagggaatcagacatttgcata

SEQ ID NO: 122898 - DNA, 25 bp, Saccharomyces pastorianus
gcgtatttaactgtcaccattttgg

SEQ ID NO: 122899 - DNA, 25 bp, Saccharomyces pastorianus
tgctgttagggataagatacgccat

SEQ ID NO: 122900 - DNA, 25 bp, Saccharomyces pastorianus
aaggtgttgctaaccatatgcaagg

SEQ ID NO: 122901 - DNA, 25 bp, Saccharomyces pastorianus
gatacgccataggaatgctttcgtt

SEQ ID NO: 122902 - DNA, 25 bp, Saccharomyces pastorianus
gaggcgctctattcctgggttctat

SEQ ID NO: 122903 - DNA, 25 bp, Saccharomyces pastorianus
gctttcgttgggaggcgctctattc

SEQ ID NO: 122904 - DNA, 25 bp, Saccharomyces pastorianus
gaagagctattgaagatgccatcga

SEQ ID NO: 122905 - DNA, 25 bp, Saccharomyces pastorianus
gatgccatcgaatcggctccagtgg

SEQ ID NO: 122906 - DNA, 25 bp, Saccharomyces pastorianus
ttcaatcccataaggtcattttccc

SEQ ID NO: 122907 - DNA, 25 bp, Saccharomyces pastorianus
tactcctgaatttcccaaatgtgga

SEQ ID NO: 122908 - DNA, 25 bp, Saccharomyces pastorianus
gctaagactcttcttcgttaccaaa

SEQ ID NO: 122909 - DNA, 25 bp, Saccharomyces pastorianus
agaggaggcacaggcattggtacct

SEQ ID NO: 122910 - DNA, 25 bp, Saccharomyces pastorianus
ggctccagtggttcttttcatgaaa

SEQ ID NO: 122911 - DNA, 25 bp, Saccharomyces pastorianus
tgacccggccaaatttgcggcttat

SEQ ID NO: 122912 - DNA, 25 bp, Saccharomyces pastorianus
ggaaatcaaggcgttgacccggcca

SEQ ID NO: 122913 - DNA, 25 bp, Saccharomyces pastorianus
cagaatggccaactattccacagtt

SEQ ID NO: 122914 - DNA, 25 bp, Saccharomyces pastorianus
cacgctctggtgaattggccgattt

SEQ ID NO: 122915 - DNA, 25 bp, Saccharomyces pastorianus
gagaagtcttgttgaactcgaccga

SEQ ID NO: 122916 - DNA, 25 bp, Saccharomyces pastorianus
gaactcgaccgatttagctacggat

SEQ ID NO: 122917 - DNA, 25 bp, Saccharomyces pastorianus
gtatttcatactgtatcttccccta

SEQ ID NO: 122918 - DNA, 25 bp, Saccharomyces pastorianus
tggttacttgcccttttagagctaa

SEQ ID NO: 122919 - DNA, 25 bp, Saccharomyces pastorianus
gtatcttcccctatttacgcaggaa

SEQ ID NO: 122920 - DNA, 25 bp, Saccharomyces pastorianus
gaagtctgttgctaagctgttgaaa

SEQ ID NO: 122921 - DNA, 25 bp, Saccharomyces pastorianus
tagagctaacttccaacctgaacca

SEQ ID NO: 122922 - DNA, 25 bp, Saccharomyces pastorianus
gttcatgataaccacagtacctata

SEQ ID NO: 122923 - DNA, 25 bp, Saccharomyces pastorianus
gctacggattctatttctcatttat

SEQ ID NO: 122924 - DNA, 25 bp, Saccharomyces pastorianus
taactgggtcggtgggaaactgatt

SEQ ID NO: 122925 - DNA, 25 bp, Saccharomyces pastorianus
aactaggctcgcagtatttcatact

SEQ ID NO: 122926 - DNA, 25 bp, Saccharomyces pastorianus
taggtctagacaatgcaggcaaaac

SEQ ID NO: 122927 - DNA, 25 bp, Saccharomyces pastorianus
ggtggtcaagaatcactgagatcaa

SEQ ID NO: 122928 - DNA, 25 bp, Saccharomyces pastorianus
aataagcgcattgactggagaaggt

SEQ ID NO: 122929 - DNA, 25 bp, Saccharomyces pastorianus
ccacgaccctacagtcagttgtaat

SEQ ID NO: 122930 - DNA, 25 bp, Saccharomyces pastorianus
attagacgaatgttccacgacccta

SEQ ID NO: 122931 - DNA, 25 bp, Saccharomyces pastorianus
gtggcgacaatacccgttgacagta

SEQ ID NO: 122932 - DNA, 25 bp, Saccharomyces pastorianus
acccatcttgatgctggccaataaa

SEQ ID NO: 122933 - DNA, 25 bp, Saccharomyces pastorianus
aaaggaatactctctggcgttcaaa

SEQ ID NO: 122934 - DNA, 25 bp, Saccharomyces pastorianus
ggaaaagatacagcctacggtagga

SEQ ID NO: 122935 - DNA, 25 bp, Saccharomyces pastorianus
attgaaggtgtacccatcttgatgc

SEQ ID NO: 122936 - DNA, 25 bp, Saccharomyces pastorianus
gcaaaacgacgttcttggagacatt

SEQ ID NO: 122937 - DNA, 25 bp, Saccharomyces pastorianus
gaagcaaccatcaatcagaccatac

SEQ ID NO: 122938 - DNA, 25 bp, Saccharomyces pastorianus
aattactattctccaccataggacc

SEQ ID NO: 122939 - DNA, 25 bp, Saccharomyces pastorianus
aatagcctctcagatgggtgatgac

SEQ ID NO: 122940 - DNA, 25 bp, Saccharomyces pastorianus
cagagacggtgccatgttccctaat

SEQ ID NO: 122941 - DNA, 25 bp, Saccharomyces pastorianus
tggtggaggctgtactttggtcaaa

SEQ ID NO: 122942 - DNA, 25 bp, Saccharomyces pastorianus
gtgacaccggtttagaaatagcctc

SEQ ID NO: 122943 - DNA, 25 bp, Saccharomyces pastorianus
acacttcttgggtgctgtggctaga

SEQ ID NO: 122944 - DNA, 25 bp, Saccharomyces pastorianus
aactacgatgtatttggcttaccaa

SEQ ID NO: 122945 - DNA, 25 bp, Saccharomyces pastorianus
gcagcaatggctttggcgcacaatg

SEQ ID NO: 122946 - DNA, 25 bp, Saccharomyces pastorianus
ataggacctcacacttcttgggtgc

SEQ ID NO: 122947 - DNA, 25 bp, Saccharomyces pastorianus
taatggctcatttctacgatgctaa

SEQ ID NO: 122948 - DNA, 25 bp, Saccharomyces pastorianus
tccgcaaacagactagcagctcatt

SEQ ID NO: 122949 - DNA, 25 bp, Saccharomyces pastorianus
acagaagcaacaagagtcctctcag

SEQ ID NO: 122950 - DNA, 25 bp, Saccharomyces pastorianus
gatatccggatcttcgcagttatta

SEQ ID NO: 122951 - DNA, 25 bp, Saccharomyces pastorianus
gacctgaacggatctctcgatatta

SEQ ID NO: 122952 - DNA, 25 bp, Saccharomyces pastorianus
gttaaccacattgatccaggacatt

SEQ ID NO: 122953 - DNA, 25 bp, Saccharomyces pastorianus
aattgtggcagggatgtgtccgcaa

SEQ ID NO: 122954 - DNA, 25 bp, Saccharomyces pastorianus
tgggatactgaataacctgttaacc

SEQ ID NO: 122955 - DNA, 25 bp, Saccharomyces pastorianus
gagtcctctcagtatattcactgtg

SEQ ID NO: 122956 - DNA, 25 bp, Saccharomyces pastorianus
ggacattgtagctcgggaaaccact

SEQ ID NO: 122957 - DNA, 25 bp, Saccharomyces pastorianus
gcagttattatttcgacctgaacgg

SEQ ID NO: 122958 - DNA, 25 bp, Saccharomyces pastorianus
gatctctcgatattaatggactaca

SEQ ID NO: 122959 - DNA, 25 bp, Saccharomyces pastorianus
agcagtttgactcgcatattctaga

SEQ ID NO: 122960 - DNA, 25 bp, Saccharomyces pastorianus
gatttcaccgacgttaaaagctatg

SEQ ID NO: 122961 - DNA, 25 bp, Saccharomyces pastorianus
gacgatgatgagattccagagtttg

SEQ ID NO: 122962 - DNA, 25 bp, Saccharomyces pastorianus
aaagctatgattgagggacccttca

SEQ ID NO: 122963 - DNA, 25 bp, Saccharomyces pastorianus
gctgcgatgatttcaccgacgttaa

SEQ ID NO: 122964 - DNA, 25 bp, Saccharomyces pastorianus
aaaggccgaatagagctcaagcagt

SEQ ID NO: 122965 - DNA, 25 bp, Saccharomyces pastorianus
gactcgcatattctagaaaaggctg

SEQ ID NO: 122966 - DNA, 25 bp, Saccharomyces pastorianus
gagatatcacgatctgctgcgatga

SEQ ID NO: 122967 - DNA, 25 bp, Saccharomyces pastorianus
atgtctcaagatttcgttacgttag

SEQ ID NO: 122968 - DNA, 25 bp, Saccharomyces pastorianus
gagctcaagcagtttgactcgcata

SEQ ID NO: 122969 - DNA, 25 bp, Saccharomyces pastorianus
taatttgaagtacagcggcgttagc

SEQ ID NO: 122970 - DNA, 25 bp, Saccharomyces pastorianus
acgacggtaccatatctgccaaaga

SEQ ID NO: 122971 - DNA, 25 bp, Saccharomyces pastorianus
aaagaaatctgccagctgctcatct

SEQ ID NO: 122972 - DNA, 25 bp, Saccharomyces pastorianus
atgactcaggtgtgctcttttcaac

SEQ ID NO: 122973 - DNA, 25 bp, Saccharomyces pastorianus
tggcccgttattttctcagatgact

SEQ ID NO: 122974 - DNA, 25 bp, Saccharomyces pastorianus
aaatttggtctttctggccttagct

SEQ ID NO: 122975 - DNA, 25 bp, Saccharomyces pastorianus
tattcgtgtccttaacaactaccgc

SEQ ID NO: 122976 - DNA, 25 bp, Saccharomyces pastorianus
tagctagggcttcttttgtgtcatc

SEQ ID NO: 122977 - DNA, 25 bp, Saccharomyces pastorianus
aaagtcttcatatctaggccgtcgt

SEQ ID NO: 122978 - DNA, 25 bp, Saccharomyces pastorianus
gtctaccctcaagatatgtccgtta

SEQ ID NO: 122979 - DNA, 25 bp, Saccharomyces pastorianus
aggccgtcgtcattttgttttgaga

SEQ ID NO: 122980 - DNA, 25 bp, Saccharomyces pastorianus
tcatcttcattgttctggcccgtta

SEQ ID NO: 122981 - DNA, 25 bp, Saccharomyces pastorianus
aaaggcgttagctcgtaaagctgtc

SEQ ID NO: 122982 - DNA, 25 bp, Saccharomyces pastorianus
tgacttaggcaaaggaagacgtctt

SEQ ID NO: 122983 - DNA, 25 bp, Saccharomyces pastorianus
agacgtctttgtgttgaatttgcga

SEQ ID NO: 122984 - DNA, 25 bp, Saccharomyces pastorianus
atgccgttacctccgatgaaatttt

SEQ ID NO: 122985 - DNA, 25 bp, Saccharomyces pastorianus
cataaaaacgctttgatgggcttaa

SEQ ID NO: 122986 - DNA, 25 bp, Saccharomyces pastorianus
taaagctgtcgtggaatttgctaca

SEQ ID NO: 122987 - DNA, 25 bp, Saccharomyces pastorianus
agaagaagcaacgacgcccaccaat

SEQ ID NO: 122988 - DNA, 25 bp, Saccharomyces pastorianus
gcgattgagaactctaacgtcgtaa

SEQ ID NO: 122989 - DNA, 25 bp, Saccharomyces pastorianus
aaaatacaagttcatgggtccagat

SEQ ID NO: 122990 - DNA, 25 bp, Saccharomyces pastorianus
aaagtggtgttgtcaagcaagcaaa

SEQ ID NO: 122991 - DNA, 25 bp, Saccharomyces pastorianus
gttgaattgtcatgccgttacctcc

SEQ ID NO: 122992 - DNA, 25 bp, Saccharomyces pastorianus
tttaagcttgctttaccacttgtta

SEQ ID NO: 122993 - DNA, 25 bp, Saccharomyces pastorianus
gtctaacttacaaatacccggcaag

SEQ ID NO: 122994 - DNA, 25 bp, Saccharomyces pastorianus
aagcttcaggaatcaccgcaggtgc

SEQ ID NO: 122995 - DNA, 25 bp, Saccharomyces pastorianus
ccgctgctgcggtgtcaggaaacaa

SEQ ID NO: 122996 - DNA, 25 bp, Saccharomyces pastorianus
tgctacatggtatcattccgcggga

SEQ ID NO: 122997 - DNA, 25 bp, Saccharomyces pastorianus
gcaggtgccgctgcaaatgcgttag

SEQ ID NO: 122998 - DNA, 25 bp, Saccharomyces pastorianus
ttgatttatggtccgttggctgcat

SEQ ID NO: 122999 - DNA, 25 bp, Saccharomyces pastorianus
attttggaagttcttggcactcccg

SEQ ID NO: 123000 - DNA, 25 bp, Saccharomyces pastorianus
gaactgataggattacagcccatat

SEQ ID NO: 123001 - DNA, 25 bp, Saccharomyces pastorianus
gttcttggcactcccgatcaaaaaa

SEQ ID NO: 123002 - DNA, 25 bp, Saccharomyces pastorianus
taaccgtagaattctggccgcggca

SEQ ID NO: 123003 - DNA, 25 bp, Saccharomyces pastorianus
gttgttctattgtgaggcctgtact

SEQ ID NO: 123004 - DNA, 25 bp, Saccharomyces pastorianus
gatgaccgcgacaggattaccacga

SEQ ID NO: 123005 - DNA, 25 bp, Saccharomyces pastorianus
acaaactacgtttatcccagacaca

SEQ ID NO: 123006 - DNA, 25 bp, Saccharomyces pastorianus
gcaggcaaatgttatctcggcgtga

SEQ ID NO: 123007 - DNA, 25 bp, Saccharomyces pastorianus
tgaaacctatcatctctattcccag

SEQ ID NO: 123008 - DNA, 25 bp, Saccharomyces pastorianus
gctgctttcatcttaagtgtgccaa

SEQ ID NO: 123009 - DNA, 25 bp, Saccharomyces pastorianus
gaacccacccaagtaagtgactctg

SEQ ID NO: 123010 - DNA, 25 bp, Saccharomyces pastorianus
tatcaccttttttctctaccaatag

SEQ ID NO: 123011 - DNA, 25 bp, Saccharomyces pastorianus
agggcatactcgcttcatagtcatt

SEQ ID NO: 123012 - DNA, 25 bp, Saccharomyces pastorianus
gtgaacaacattcgtacttcctcag

SEQ ID NO: 123013 - DNA, 25 bp, Saccharomyces pastorianus
tattcccagataacaggcttgccac

SEQ ID NO: 123014 - DNA, 25 bp, Saccharomyces pastorianus
ggaccccataatacgagagctactc

SEQ ID NO: 123015 - DNA, 25 bp, Saccharomyces pastorianus
gagagctactccacagaattcgaca

SEQ ID NO: 123016 - DNA, 25 bp, Saccharomyces pastorianus
acattctaacacactgacctgtcaa

SEQ ID NO: 123017 - DNA, 25 bp, Saccharomyces pastorianus
gaaaaggtacactcactcgtgctgc

SEQ ID NO: 123018 - DNA, 25 bp, Saccharomyces pastorianus
tgctgccgcatatttgctcaaactg

SEQ ID NO: 123019 - DNA, 25 bp, Saccharomyces pastorianus
aatccagcccattgagcgcagttat

SEQ ID NO: 123020 - DNA, 25 bp, Saccharomyces pastorianus
tagcggtaatctcatcaagtcccac

SEQ ID NO: 123021 - DNA, 25 bp, Saccharomyces pastorianus
aaggaaggcgcacagctctacagct

SEQ ID NO: 123022 - DNA, 25 bp, Saccharomyces pastorianus
agcgcagttataccagcaccagaaa

SEQ ID NO: 123023 - DNA, 25 bp, Saccharomyces pastorianus
gaattcgacaatccagcccattgag

SEQ ID NO: 123024 - DNA, 25 bp, Saccharomyces pastorianus
ggtttgccaggaaggatgctctaaa

SEQ ID NO: 123025 - DNA, 25 bp, Saccharomyces pastorianus
atccaagccttgtctcaattggctg

SEQ ID NO: 123026 - DNA, 25 bp, Saccharomyces pastorianus
agccttgtctcaattggctgcccaa

SEQ ID NO: 123027 - DNA, 25 bp, Saccharomyces pastorianus
ttgtctgctaacaacaaagttggtg

SEQ ID NO: 123028 - DNA, 25 bp, Saccharomyces pastorianus
gctgctcaacacaacacttctgtat

SEQ ID NO: 123029 - DNA, 25 bp, Saccharomyces pastorianus
tgtcaccattgacaacgtcgccgaa

SEQ ID NO: 123030 - DNA, 25 bp, Saccharomyces pastorianus
aaggcaggctcttctgccggtgcca

SEQ ID NO: 123031 - DNA, 25 bp, Saccharomyces pastorianus
gatttgttcccaggtattatctctc

SEQ ID NO: 123032 - DNA, 25 bp, Saccharomyces pastorianus
aagcttaacaagaaggcaggctctt

SEQ ID NO: 123033 - DNA, 25 bp, Saccharomyces pastorianus
gtcaattagctaagttgcacgctgt

SEQ ID NO: 123034 - DNA, 25 bp, Saccharomyces pastorianus
ggatgaagctattccagagttagtt

SEQ ID NO: 123035 - DNA, 25 bp, Saccharomyces pastorianus
taagttgcacgctgtcaccattgac

SEQ ID NO: 123036 - DNA, 25 bp, Saccharomyces pastorianus
gaataaagtctctgtctacccattg

SEQ ID NO: 123037 - DNA, 25 bp, Saccharomyces pastorianus
gggcaatagcctgtttgaactgata

SEQ ID NO: 123038 - DNA, 25 bp, Saccharomyces pastorianus
tagccattttaaatccaccgtcttt

SEQ ID NO: 123039 - DNA, 25 bp, Saccharomyces pastorianus
aatttatcgactttctctggcgtca

SEQ ID NO: 123040 - DNA, 25 bp, Saccharomyces pastorianus
gcttgcatgtggtttgccattctaa

SEQ ID NO: 123041 - DNA, 25 bp, Saccharomyces pastorianus
tcgagtggtcattcctatcttacat

SEQ ID NO: 123042 - DNA, 25 bp, Saccharomyces pastorianus
ccattgtctcttcttgttaccatta

SEQ ID NO: 123043 - DNA, 25 bp, Saccharomyces pastorianus
gaactgatatttttgctttcacttt

SEQ ID NO: 123044 - DNA, 25 bp, Saccharomyces pastorianus
ttctctggcgtcaagtttatcactg

SEQ ID NO: 123045 - DNA, 25 bp, Saccharomyces pastorianus
agtttatcactggatgcttgcatgt

SEQ ID NO: 123046 - DNA, 25 bp, Saccharomyces pastorianus
tgaatctactgtttttcgagtggtc

SEQ ID NO: 123047 - DNA, 25 bp, Saccharomyces pastorianus
tgctctcataacttttctggccaga

SEQ ID NO: 123048 - DNA, 25 bp, Saccharomyces pastorianus
ggagatttttcccagtcaaggtgac

SEQ ID NO: 123049 - DNA, 25 bp, Saccharomyces pastorianus
atggttataccttgttgctctcata

SEQ ID NO: 123050 - DNA, 25 bp, Saccharomyces pastorianus
tgagttgacttgctggatcccatta

SEQ ID NO: 123051 - DNA, 25 bp, Saccharomyces pastorianus
atatatttcatctcgtgtaggctgg

SEQ ID NO: 123052 - DNA, 25 bp, Saccharomyces pastorianus
aaatctccgcaggtcaatacagcag

SEQ ID NO: 123053 - DNA, 25 bp, Saccharomyces pastorianus
gagcacctactctggtttggttgat

SEQ ID NO: 123054 - DNA, 25 bp, Saccharomyces pastorianus
cagagttcccaccagatacttttat

SEQ ID NO: 123055 - DNA, 25 bp, Saccharomyces pastorianus
taagaccccatcctgctttgaaaag

SEQ ID NO: 123056 - DNA, 25 bp, Saccharomyces pastorianus
ggaaacgttcgcctaggtcaaatga

SEQ ID NO: 123057 - DNA, 25 bp, Saccharomyces pastorianus
aaagcattttccaacgcaagcggtg

SEQ ID NO: 123058 - DNA, 25 bp, Saccharomyces pastorianus
tgaaaggtcttttactaacgcggca

SEQ ID NO: 123059 - DNA, 25 bp, Saccharomyces pastorianus
aagtcacaggcaagcaatgtccaat

SEQ ID NO: 123060 - DNA, 25 bp, Saccharomyces pastorianus
gaggaagttccatttaggccctggt

SEQ ID NO: 123061 - DNA, 25 bp, Saccharomyces pastorianus
tgctgtattttgttacttgcccgac

SEQ ID NO: 123062 - DNA, 25 bp, Saccharomyces pastorianus
gccacctgtcccagaatcattattt

SEQ ID NO: 123063 - DNA, 25 bp, Saccharomyces pastorianus
agacagtcaatctggtatcagcgaa

SEQ ID NO: 123064 - DNA, 25 bp, Saccharomyces pastorianus
agattcaatctcttactaccctgat

SEQ ID NO: 123065 - DNA, 25 bp, Saccharomyces pastorianus
taggccctggtattttgcaatgcga

SEQ ID NO: 123066 - DNA, 25 bp, Saccharomyces pastorianus
tgcccgaccttgtgctatattataa

SEQ ID NO: 123067 - DNA, 25 bp, Saccharomyces pastorianus
gagggtgttaccttattgccacctg

SEQ ID NO: 123068 - DNA, 25 bp, Saccharomyces pastorianus
gaaactctgctttgaaaacttctag

SEQ ID NO: 123069 - DNA, 25 bp, Saccharomyces pastorianus
tttgctatcaactcgactccaatat

SEQ ID NO: 123070 - DNA, 25 bp, Saccharomyces pastorianus
gcggacaacaactgcgccaaggaaa

SEQ ID NO: 123071 - DNA, 25 bp, Saccharomyces pastorianus
cttggttggctggtactgcttcgaa

SEQ ID NO: 123072 - DNA, 25 bp, Saccharomyces pastorianus
aataatagcagtgccgccaagaata

SEQ ID NO: 123073 - DNA, 25 bp, Saccharomyces pastorianus
gagaatatcaccaaatccaagctaa

SEQ ID NO: 123074 - DNA, 25 bp, Saccharomyces pastorianus
gctcttgcatgctgggttctaaaat

SEQ ID NO: 123075 - DNA, 25 bp, Saccharomyces pastorianus
ggtactgcttcgaatcttatcttag

SEQ ID NO: 123076 - DNA, 25 bp, Saccharomyces pastorianus
agaactgttgttccaggtgttgatg

SEQ ID NO: 123077 - DNA, 25 bp, Saccharomyces pastorianus
aatatcttggagctcttgcatgctg

SEQ ID NO: 123078 - DNA, 25 bp, Saccharomyces pastorianus
ggatagactacgatcaggcgcgcaa

SEQ ID NO: 123079 - DNA, 25 bp, Saccharomyces pastorianus
tgatactgccgggaactgtgttcaa

SEQ ID NO: 123080 - DNA, 25 bp, Saccharomyces pastorianus
aaatggttctgttcattgccgctaa

SEQ ID NO: 123081 - DNA, 25 bp, Saccharomyces pastorianus
tacgatcgcaacaatccactgagga

SEQ ID NO: 123082 - DNA, 25 bp, Saccharomyces pastorianus
tgccgctaatcccaattattgctgt

SEQ ID NO: 123083 - DNA, 25 bp, Saccharomyces pastorianus
aatagtgcgctgagtccaaaattga

SEQ ID NO: 123084 - DNA, 25 bp, Saccharomyces pastorianus
tgcgccacttgtggtgacacctgga

SEQ ID NO: 123085 - DNA, 25 bp, Saccharomyces pastorianus
gaaattccacttcgatcgttttgta

SEQ ID NO: 123086 - DNA, 25 bp, Saccharomyces pastorianus
gtatcccgaaatctggtgtcacgcc

SEQ ID NO: 123087 - DNA, 25 bp, Saccharomyces pastorianus
aaagtcgtcttggtgggcctttgca

SEQ ID NO: 123088 - DNA, 25 bp, Saccharomyces pastorianus
tgctgttcagtagccagtatcccga

SEQ ID NO: 123089 - DNA, 25 bp, Saccharomyces pastorianus
ggtcaaccaaaagagtgcgccactt

SEQ ID NO: 123090 - DNA, 25 bp, Saccharomyces pastorianus
ggcgctagtagctctggtcgtagaa

SEQ ID NO: 123091 - DNA, 25 bp, Saccharomyces pastorianus
gggcgttgtacctattaaagacgtg

SEQ ID NO: 123092 - DNA, 25 bp, Saccharomyces pastorianus
tacccagcccagtgaccaagagaga

SEQ ID NO: 123093 - DNA, 25 bp, Saccharomyces pastorianus
aaatattggattggtgtgggagcac

SEQ ID NO: 123094 - DNA, 25 bp, Saccharomyces pastorianus
attaaatgatgcatgggccactagt

SEQ ID NO: 123095 - DNA, 25 bp, Saccharomyces pastorianus
gggatgctaaaccaatcgaggtact

SEQ ID NO: 123096 - DNA, 25 bp, Saccharomyces pastorianus
tgggagcacaacctagcgaaacagt

SEQ ID NO: 123097 - DNA, 25 bp, Saccharomyces pastorianus
gacgtgaagcttgattttgatagaa

SEQ ID NO: 123098 - DNA, 25 bp, Saccharomyces pastorianus
ggctaattcccgtaaggcgagggat

SEQ ID NO: 123099 - DNA, 25 bp, Saccharomyces pastorianus
gggccactagtaagaacagcaatgt

SEQ ID NO: 123100 - DNA, 25 bp, Saccharomyces pastorianus
gtacgaataaggttagccagatttg

SEQ ID NO: 123101 - DNA, 25 bp, Saccharomyces pastorianus
taggaacctacgtgccggtacccag

SEQ ID NO: 123102 - DNA, 25 bp, Saccharomyces pastorianus
gattttcagcaatcagaggagcttt

SEQ ID NO: 123103 - DNA, 25 bp, Saccharomyces pastorianus
aactataccgtaagactcataagca

SEQ ID NO: 123104 - DNA, 25 bp, Saccharomyces pastorianus
ttggataagggtttcttaggcgcgt

SEQ ID NO: 123105 - DNA, 25 bp, Saccharomyces pastorianus
ggacaccaattgctcttcaattcgg

SEQ ID NO: 123106 - DNA, 25 bp, Saccharomyces pastorianus
gaacgaaccccaaatggcattagat

SEQ ID NO: 123107 - DNA, 25 bp, Saccharomyces pastorianus
ttgttcttcagcaaggattttcagc

SEQ ID NO: 123108 - DNA, 25 bp, Saccharomyces pastorianus
aggagctttggatttgattttgaac

SEQ ID NO: 123109 - DNA, 25 bp, Saccharomyces pastorianus
gtgttatcctcgaaactgactctaa

SEQ ID NO: 123110 - DNA, 25 bp, Saccharomyces pastorianus
tgactctaacactattgcatccaga

SEQ ID NO: 123111 - DNA, 25 bp, Saccharomyces pastorianus
aatcttcgaggatcatttagtcctt

SEQ ID NO: 123112 - DNA, 25 bp, Saccharomyces pastorianus
atagatctgatgaaggacaccaatt

SEQ ID NO: 123113 - DNA, 25 bp, Saccharomyces pastorianus
aaataaaggccacggatcctgtctt

SEQ ID NO: 123114 - DNA, 25 bp, Saccharomyces pastorianus
ggatcctgtctttatgaggctataa

SEQ ID NO: 123115 - DNA, 25 bp, Saccharomyces pastorianus
gattggtttcgtcactacttacaag

SEQ ID NO: 123116 - DNA, 25 bp, Saccharomyces pastorianus
aagtattggcactaccttggagcaa

SEQ ID NO: 123117 - DNA, 25 bp, Saccharomyces pastorianus
aaacttggttatgatgctgtctttc

SEQ ID NO: 123118 - DNA, 25 bp, Saccharomyces pastorianus
gagactgacccgagttggcaaatct

SEQ ID NO: 123119 - DNA, 25 bp, Saccharomyces pastorianus
aagcatttgacgatcttcgcgacag

SEQ ID NO: 123120 - DNA, 25 bp, Saccharomyces pastorianus
gatgctgtctttcagaagcactccg

SEQ ID NO: 123121 - DNA, 25 bp, Saccharomyces pastorianus
atcgtcttgtggaaatgcttcttct

SEQ ID NO: 123122 - DNA, 25 bp, Saccharomyces pastorianus
gaggctataatccaatctttgctag

SEQ ID NO: 123123 - DNA, 25 bp, Saccharomyces pastorianus
aagcactccgacctttctgatgagt

SEQ ID NO: 123124 - DNA, 25 bp, Saccharomyces pastorianus
agatatcatttcctgccgaattcca

SEQ ID NO: 123125 - DNA, 25 bp, Saccharomyces pastorianus
gtatccagtacatgatcgcggttcc

SEQ ID NO: 123126 - DNA, 25 bp, Saccharomyces pastorianus
gagagccctgataaagtcgacctta

SEQ ID NO: 123127 - DNA, 25 bp, Saccharomyces pastorianus
gaattccatgcgcaaactgcagtag

SEQ ID NO: 123128 - DNA, 25 bp, Saccharomyces pastorianus
ggtcctctgtataattatgccgata

SEQ ID NO: 123129 - DNA, 25 bp, Saccharomyces pastorianus
tcgcggttccgctgattactggtaa

SEQ ID NO: 123130 - DNA, 25 bp, Saccharomyces pastorianus
tactggtaatctcacagctactgat

SEQ ID NO: 123131 - DNA, 25 bp, Saccharomyces pastorianus
gtatcgaagatactcatctcactca

SEQ ID NO: 123132 - DNA, 25 bp, Saccharomyces pastorianus
aggcatctgcgcgaacattttgtag

SEQ ID NO: 123133 - DNA, 25 bp, Saccharomyces pastorianus
ggtcgataggaaacgctcttctcat

SEQ ID NO: 123134 - DNA, 25 bp, Saccharomyces pastorianus
tagataaatccggtcctctgtataa

SEQ ID NO: 123135 - DNA, 25 bp, Saccharomyces pastorianus
gcttttccaccaattgcagagggta

SEQ ID NO: 123136 - DNA, 25 bp, Saccharomyces pastorianus
tattatcgccgctagcagatgtttt

SEQ ID NO: 123137 - DNA, 25 bp, Saccharomyces pastorianus
cagatgttttgcacgctgctatagg

SEQ ID NO: 123138 - DNA, 25 bp, Saccharomyces pastorianus
aatgtcgctgactatgggttgcaag

SEQ ID NO: 123139 - DNA, 25 bp, Saccharomyces pastorianus
tattagggcatcagcttttccacca

SEQ ID NO: 123140 - DNA, 25 bp, Saccharomyces pastorianus
tgccacaagagcttctgttgataat

SEQ ID NO: 123141 - DNA, 25 bp, Saccharomyces pastorianus
atagccattggcgtttctggtgcag

SEQ ID NO: 123142 - DNA, 25 bp, Saccharomyces pastorianus
gtgcagttcagcatttagcgggaat

SEQ ID NO: 123143 - DNA, 25 bp, Saccharomyces pastorianus
ttaacaatgatcctgatgcccctat

SEQ ID NO: 123144 - DNA, 25 bp, Saccharomyces pastorianus
aactgatattcctccttgtgactta

SEQ ID NO: 123145 - DNA, 25 bp, Saccharomyces pastorianus
gatgcccctatatttaatgtcgctg

SEQ ID NO: 123146 - DNA, 25 bp, Saccharomyces pastorianus
gagagatgccctttcaatggtcaaa

SEQ ID NO: 123147 - DNA, 25 bp, Saccharomyces pastorianus
tggtaagttccgtcatcgaaacaaa

SEQ ID NO: 123148 - DNA, 25 bp, Saccharomyces pastorianus
aaatgaggttcacatctcgggcacc

SEQ ID NO: 123149 - DNA, 25 bp, Saccharomyces pastorianus
tcgggcacctcttcagaagcaggaa

SEQ ID NO: 123150 - DNA, 25 bp, Saccharomyces pastorianus
gcatacgccgggattggcatctatt

SEQ ID NO: 123151 - DNA, 25 bp, Saccharomyces pastorianus
tgttaaaacgcctatccctaagagt

SEQ ID NO: 123152 - DNA, 25 bp, Saccharomyces pastorianus
aggccacagagttccaacatttcag

SEQ ID NO: 123153 - DNA, 25 bp, Saccharomyces pastorianus
aagagtggcctttctccaattgaga

SEQ ID NO: 123154 - DNA, 25 bp, Saccharomyces pastorianus
ttaaatgctactcaccaagaccact

SEQ ID NO: 123155 - DNA, 25 bp, Saccharomyces pastorianus
atcagtatcgtgaatccatcctcaa

SEQ ID NO: 123156 - DNA, 25 bp, Saccharomyces pastorianus
gaaagtccccaacgtgatttcaata

SEQ ID NO: 123157 - DNA, 25 bp, Saccharomyces pastorianus
ttgccggtctgcattcagatggagt

SEQ ID NO: 123158 - DNA, 25 bp, Saccharomyces pastorianus
aaaactcctgacctggagcaggcac

SEQ ID NO: 123159 - DNA, 25 bp, Saccharomyces pastorianus
gagcgctcacggctttgatgataag

SEQ ID NO: 123160 - DNA, 25 bp, Saccharomyces pastorianus
agcaggcacgctcattttcaagaaa

SEQ ID NO: 123161 - DNA, 25 bp, Saccharomyces pastorianus
ataaacaacttccagctaccaagct

SEQ ID NO: 123162 - DNA, 25 bp, Saccharomyces pastorianus
agttgtccaaaacggtgcttcatcc

SEQ ID NO: 123163 - DNA, 25 bp, Saccharomyces pastorianus
gaaggcttcacgttgcaactggttt

SEQ ID NO: 123164 - DNA, 25 bp, Saccharomyces pastorianus
gatatcatgacacaccagctatggt

SEQ ID NO: 123165 - DNA, 25 bp, Saccharomyces pastorianus
aatccttcgtatgggacttggcaaa

SEQ ID NO: 123166 - DNA, 25 bp, Saccharomyces pastorianus
ttgactgggatgctccgaggaccaa

SEQ ID NO: 123167 - DNA, 25 bp, Saccharomyces pastorianus
gaagatctttggtgtttgccccata

SEQ ID NO: 123168 - DNA, 25 bp, Saccharomyces pastorianus
gatgctcagccttcctggaaaagta

SEQ ID NO: 123169 - DNA, 25 bp, Saccharomyces pastorianus
gggttgcgcaaacaatcacttatcc

SEQ ID NO: 123170 - DNA, 25 bp, Saccharomyces pastorianus
cccaaagactattcagcggtgcatt

SEQ ID NO: 123171 - DNA, 25 bp, Saccharomyces pastorianus
ttacagactcgaaggcggtctcagg

SEQ ID NO: 123172 - DNA, 25 bp, Saccharomyces pastorianus
agaattcggtgtcaattcctccgat

SEQ ID NO: 123173 - DNA, 25 bp, Saccharomyces pastorianus
ggtgttgttccatatgtagcactaa

SEQ ID NO: 123174 - DNA, 25 bp, Saccharomyces pastorianus
ggctacttacccgttggacttgatc

SEQ ID NO: 123175 - DNA, 25 bp, Saccharomyces pastorianus
gggatctggcaattactaagcgaaa

SEQ ID NO: 123176 - DNA, 25 bp, Saccharomyces pastorianus
gatttcaagttctcgcaatgggcgg

SEQ ID NO: 123177 - DNA, 25 bp, Saccharomyces pastorianus
atggccaacgagtcttggtgttgtt

SEQ ID NO: 123178 - DNA, 25 bp, Saccharomyces pastorianus
tcacttatccctttgatctgctaag

SEQ ID NO: 123179 - DNA, 25 bp, Saccharomyces pastorianus
ggagggttgcacaaaatccttcaat

SEQ ID NO: 123180 - DNA, 25 bp, Saccharomyces pastorianus
ttcgaggccctcaacgctgaagaca

SEQ ID NO: 123181 - DNA, 25 bp, Saccharomyces pastorianus
gaaccaatagcaattgcctccgaac

SEQ ID NO: 123182 - DNA, 25 bp, Saccharomyces pastorianus
gttaatgagatctacaccccaattt

SEQ ID NO: 123183 - DNA, 25 bp, Saccharomyces pastorianus
aagcgaacctggtgccgtgttgaac

SEQ ID NO: 123184 - DNA, 25 bp, Saccharomyces pastorianus
tgacgcccgaatatcatccacaaag

SEQ ID NO: 123185 - DNA, 25 bp, Saccharomyces pastorianus
tggcgtacttccaaccatgcaggaa

SEQ ID NO: 123186 - DNA, 25 bp, Saccharomyces pastorianus
gagtcacccaaacgctgccttagag

SEQ ID NO: 123187 - DNA, 25 bp, Saccharomyces pastorianus
agtcccacctgggtatggcgtactt

SEQ ID NO: 123188 - DNA, 25 bp, Saccharomyces pastorianus
tccgaacctaacttcactgcaatat

SEQ ID NO: 123189 - DNA, 25 bp, Saccharomyces pastorianus
tgatgatgccagtcatggtcccaac

SEQ ID NO: 123190 - DNA, 25 bp, Saccharomyces pastorianus
ttgttcgtcgattatgcacgctcca

SEQ ID NO: 123191 - DNA, 25 bp, Saccharomyces pastorianus
tactccctcccgaatgtgcatatag

SEQ ID NO: 123192 - DNA, 25 bp, Saccharomyces pastorianus
tattcaacggcagcttcctcttata

SEQ ID NO: 123193 - DNA, 25 bp, Saccharomyces pastorianus
acgctccacttactcctgaaataaa

SEQ ID NO: 123194 - DNA, 25 bp, Saccharomyces pastorianus
aacgtcaatcttgttgccctattta

SEQ ID NO: 123195 - DNA, 25 bp, Saccharomyces pastorianus
actctattatcttttcgccggttat

SEQ ID NO: 123196 - DNA, 25 bp, Saccharomyces pastorianus
ctgcatcagacagaggatcccgtat

SEQ ID NO: 123197 - DNA, 25 bp, Saccharomyces pastorianus
tgtacctccatcaatgcagcatttt

SEQ ID NO: 123198 - DNA, 25 bp, Saccharomyces pastorianus
ggtttgttcgagaccttcaacactg

SEQ ID NO: 123199 - DNA, 25 bp, Saccharomyces pastorianus
gcaactgcgcgctgtggtaaagcta

SEQ ID NO: 123200 - DNA, 25 bp, Saccharomyces pastorianus
atggagatcaagtcccaactctatt

SEQ ID NO: 123201 - DNA, 25 bp, Saccharomyces pastorianus
tacaggtctggatactacagcccca

SEQ ID NO: 123202 - DNA, 25 bp, Saccharomyces pastorianus
gttaaccgtggtagttcagttgtcg

SEQ ID NO: 123203 - DNA, 25 bp, Saccharomyces pastorianus
gtcctccttattacaagttcctttg

SEQ ID NO: 123204 - DNA, 25 bp, Saccharomyces pastorianus
gattacgttgctttagtgcatccag

SEQ ID NO: 123205 - DNA, 25 bp, Saccharomyces pastorianus
tgccggattccgttaagattcaaag

SEQ ID NO: 123206 - DNA, 25 bp, Saccharomyces pastorianus
taggcgttgaggtcttccgtcaaac

SEQ ID NO: 123207 - DNA, 25 bp, Saccharomyces pastorianus
gttccaacccaaactactgatcaag

SEQ ID NO: 123208 - DNA, 25 bp, Saccharomyces pastorianus
ggagatgctattcccatcgttcata

SEQ ID NO: 123209 - DNA, 25 bp, Saccharomyces pastorianus
accgtagaggtctgctagttccaac

SEQ ID NO: 123210 - DNA, 25 bp, Saccharomyces pastorianus
ataccactattgctggtacgcgtat

SEQ ID NO: 123211 - DNA, 25 bp, Saccharomyces pastorianus
agtattttccgcttgcaagatgccc

SEQ ID NO: 123212 - DNA, 25 bp, Saccharomyces pastorianus
gaggcttcttttaattatgcaatat

SEQ ID NO: 123213 - DNA, 25 bp, Saccharomyces pastorianus
gaatattgcttcacatacagtaaaa

SEQ ID NO: 123214 - DNA, 25 bp, Saccharomyces pastorianus
ctcttgttccaaatactctgtcgta

SEQ ID NO: 123215 - DNA, 25 bp, Saccharomyces pastorianus
tactctgtcgtattgcttcttgtaa

SEQ ID NO: 123216 - DNA, 25 bp, Saccharomyces pastorianus
ctgtcgtattgcttcttgtaattat

SEQ ID NO: 123217 - DNA, 25 bp, Saccharomyces pastorianus
atgctcttgttccaaatactctgtc

SEQ ID NO: 123218 - DNA, 25 bp, Saccharomyces pastorianus
aattatactataagaccaacgaggg

SEQ ID NO: 123219 - DNA, 25 bp, Saccharomyces pastorianus
gggtaatgctcatccatcgggattt

SEQ ID NO: 123220 - DNA, 25 bp, Saccharomyces pastorianus
gaccaacgagggatgaggcttcttt

SEQ ID NO: 123221 - DNA, 25 bp, Saccharomyces pastorianus
aaaacgggtaatgctcatccatcgg

SEQ ID NO: 123222 - DNA, 25 bp, Saccharomyces pastorianus
cgagggatgaggcttcttttaatta

SEQ ID NO: 123223 - DNA, 25 bp, Saccharomyces pastorianus
gctgtcatagtgcagttattacgat

SEQ ID NO: 123224 - DNA, 25 bp, Saccharomyces pastorianus
aagagttttgcatctactaagcttg

SEQ ID NO: 123225 - DNA, 25 bp, Saccharomyces pastorianus
aaagaactatgcgagatgctacccc

SEQ ID NO: 123226 - DNA, 25 bp, Saccharomyces pastorianus
aacttcttggtcgtccctgatgttt

SEQ ID NO: 123227 - DNA, 25 bp, Saccharomyces pastorianus
cctgatgtttgggactttgataatg

SEQ ID NO: 123228 - DNA, 25 bp, Saccharomyces pastorianus
acgtgttcctttgagggctgtcata

SEQ ID NO: 123229 - DNA, 25 bp, Saccharomyces pastorianus
gcgctgattgtgataaaggtcctat

SEQ ID NO: 123230 - DNA, 25 bp, Saccharomyces pastorianus
aggtcctatcggaataatatgtcag

SEQ ID NO: 123231 - DNA, 25 bp, Saccharomyces pastorianus
agcaggtgcacagcgaattcaagtt

SEQ ID NO: 123232 - DNA, 25 bp, Saccharomyces pastorianus
cagcgagagcaacttcttggtcgtc

SEQ ID NO: 123233 - DNA, 25 bp, Saccharomyces pastorianus
ataaacttaccagagcaggtgcaca

SEQ ID NO: 123234 - DNA, 25 bp, Saccharomyces pastorianus
agagcacatacacccaataatcacc

SEQ ID NO: 123235 - DNA, 25 bp, Saccharomyces pastorianus
gtcattgtccttggcgagggtgtaa

SEQ ID NO: 123236 - DNA, 25 bp, Saccharomyces pastorianus
agagttgagtcttctgatatccagg

SEQ ID NO: 123237 - DNA, 25 bp, Saccharomyces pastorianus
gataagcccgaacatatttctcaag

SEQ ID NO: 123238 - DNA, 25 bp, Saccharomyces pastorianus
aataatcaccgaggccgctaagact

SEQ ID NO: 123239 - DNA, 25 bp, Saccharomyces pastorianus
aagacgacgtgctaccagttgaatt

SEQ ID NO: 123240 - DNA, 25 bp, Saccharomyces pastorianus
gactgagcttgttcgtgcttatgta

SEQ ID NO: 123241 - DNA, 25 bp, Saccharomyces pastorianus
attatgcaacagaccctaaaaccgg

SEQ ID NO: 123242 - DNA, 25 bp, Saccharomyces pastorianus
gatatccaggaagccttgtcaagat

SEQ ID NO: 123243 - DNA, 25 bp, Saccharomyces pastorianus
tatgattcgtttggctgaggcgcac

SEQ ID NO: 123244 - DNA, 25 bp, Saccharomyces pastorianus
gatgggtgacgattcgagatccgat

SEQ ID NO: 123245 - DNA, 25 bp, Saccharomyces pastorianus
gcctacagaagttttatcgtgttta

SEQ ID NO: 123246 - DNA, 25 bp, Saccharomyces pastorianus
agcctaaactttgctctaaagccta

SEQ ID NO: 123247 - DNA, 25 bp, Saccharomyces pastorianus
taccagtgggttagtttctaaagca

SEQ ID NO: 123248 - DNA, 25 bp, Saccharomyces pastorianus
tatggcgcatatggtattcagttga

SEQ ID NO: 123249 - DNA, 25 bp, Saccharomyces pastorianus
aagagggtcttcaaccaccaactgt

SEQ ID NO: 123250 - DNA, 25 bp, Saccharomyces pastorianus
gatagggttttattctgtcggtgaa

SEQ ID NO: 123251 - DNA, 25 bp, Saccharomyces pastorianus
atcagtgtattcgaacctttataag

SEQ ID NO: 123252 - DNA, 25 bp, Saccharomyces pastorianus
tgttgcccagttcaaatcagtgtat

SEQ ID NO: 123253 - DNA, 25 bp, Saccharomyces pastorianus
aatcttttgtcatcaaaggctttat

SEQ ID NO: 123254 - DNA, 25 bp, Saccharomyces pastorianus
aagcaggatccaaaattataccagt

SEQ ID NO: 123255 - DNA, 25 bp, Saccharomyces pastorianus
gaacctttataagcagagcctaaac

SEQ ID NO: 123256 - DNA, 25 bp, Saccharomyces pastorianus
gtgtcctaagaagttctccccaatt

SEQ ID NO: 123257 - DNA, 25 bp, Saccharomyces pastorianus
tggtatgccagctgccttcttgact

SEQ ID NO: 123258 - DNA, 25 bp, Saccharomyces pastorianus
tctaggtttgactcttcagtttata

SEQ ID NO: 123259 - DNA, 25 bp, Saccharomyces pastorianus
ttttgtatcgacgacgacgcaggca

SEQ ID NO: 123260 - DNA, 25 bp, Saccharomyces pastorianus
atgggagcttttaactgccggtgcc

SEQ ID NO: 123261 - DNA, 25 bp, Saccharomyces pastorianus
gtaacggtgaactcccacagcaaaa

SEQ ID NO: 123262 - DNA, 25 bp, Saccharomyces pastorianus
ctctggccgcctatgaattattcaa

SEQ ID NO: 123263 - DNA, 25 bp, Saccharomyces pastorianus
ggtatatttcatgctatccgaacta

SEQ ID NO: 123264 - DNA, 25 bp, Saccharomyces pastorianus
caaaggtggtggagcccgtgtccta

SEQ ID NO: 123265 - DNA, 25 bp, Saccharomyces pastorianus
cttcttgactactccttttgatgtt

SEQ ID NO: 123266 - DNA, 25 bp, Saccharomyces pastorianus
aatttgggttcactctggccgccta

SEQ ID NO: 123267 - DNA, 25 bp, Saccharomyces pastorianus
gggtgtagctgtagtctatgccttc

SEQ ID NO: 123268 - DNA, 25 bp, Saccharomyces pastorianus
ttcactcctaatttggtcttgtaat

SEQ ID NO: 123269 - DNA, 25 bp, Saccharomyces pastorianus
atttctaatacccactttctatgcg

SEQ ID NO: 123270 - DNA, 25 bp, Saccharomyces pastorianus
gatcctgtgattactagaccctatg

SEQ ID NO: 123271 - DNA, 25 bp, Saccharomyces pastorianus
ttactagaccctatgcgattgcatt

SEQ ID NO: 123272 - DNA, 25 bp, Saccharomyces pastorianus
ggatagctcactcgatgtagttagt

SEQ ID NO: 123273 - DNA, 25 bp, Saccharomyces pastorianus
tggtggaaacattcttggcaatact

SEQ ID NO: 123274 - DNA, 25 bp, Saccharomyces pastorianus
gcgattgcattaacttcactcctaa

SEQ ID NO: 123275 - DNA, 25 bp, Saccharomyces pastorianus
tccaaccgtggtgaagagctacaat

SEQ ID NO: 123276 - DNA, 25 bp, Saccharomyces pastorianus
agtctatgccttccagttcttattt

SEQ ID NO: 123277 - DNA, 25 bp, Saccharomyces pastorianus
atgaatgctttcaaccagatgacag

SEQ ID NO: 123278 - DNA, 25 bp, Saccharomyces pastorianus
tagactccgcgaagttactaaccat

SEQ ID NO: 123279 - DNA, 25 bp, Saccharomyces pastorianus
ccgcttcatgggtttttcttagata

SEQ ID NO: 123280 - DNA, 25 bp, Saccharomyces pastorianus
atttcccagcagagaaggtagccag

SEQ ID NO: 123281 - DNA, 25 bp, Saccharomyces pastorianus
attttcactgttgaaccatcatcct

SEQ ID NO: 123282 - DNA, 25 bp, Saccharomyces pastorianus
gtaagaagagaataactgccgcatt

SEQ ID NO: 123283 - DNA, 25 bp, Saccharomyces pastorianus
gaagattgtaaacctccgagtactg

SEQ ID NO: 123284 - DNA, 25 bp, Saccharomyces pastorianus
gaagaatattcgatagactccgcga

SEQ ID NO: 123285 - DNA, 25 bp, Saccharomyces pastorianus
gtagccaggaatcagtaccgggaaa

SEQ ID NO: 123286 - DNA, 25 bp, Saccharomyces pastorianus
gttactaaccataatacgcgagtgt

SEQ ID NO: 123287 - DNA, 25 bp, Saccharomyces pastorianus
atgtcgtatatttctacactccacc

SEQ ID NO: 123288 - DNA, 25 bp, Saccharomyces pastorianus
gccgcattattaaccgatgtcgtat

SEQ ID NO: 123289 - DNA, 25 bp, Saccharomyces pastorianus
ggtccttaaccgaggaacaagtgca

SEQ ID NO: 123290 - DNA, 25 bp, Saccharomyces pastorianus
gattttgccaatgatcagctcgaag

SEQ ID NO: 123291 - DNA, 25 bp, Saccharomyces pastorianus
aagaccatggagtggcccggtgatt

SEQ ID NO: 123292 - DNA, 25 bp, Saccharomyces pastorianus
gctcgaagacttgtaccggctcaaa

SEQ ID NO: 123293 - DNA, 25 bp, Saccharomyces pastorianus
tacccggtgcatcaagaatactcca

SEQ ID NO: 123294 - DNA, 25 bp, Saccharomyces pastorianus
ttggaaactctacccggtgcatcaa

SEQ ID NO: 123295 - DNA, 25 bp, Saccharomyces pastorianus
aaacagcttgtccagatcccgaaag

SEQ ID NO: 123296 - DNA, 25 bp, Saccharomyces pastorianus
aatctgaacaattcaaggctcttga

SEQ ID NO: 123297 - DNA, 25 bp, Saccharomyces pastorianus
gaatactccaaactgtctcatcaaa

SEQ ID NO: 123298 - DNA, 25 bp, Saccharomyces pastorianus
gatatagttaaatcgccccaaaaat

SEQ ID NO: 123299 - DNA, 25 bp, Saccharomyces pastorianus
gaagttgctatccagagattttata

SEQ ID NO: 123300 - DNA, 25 bp, Saccharomyces pastorianus
tgtcaatcaggttcccgcaatacaa

SEQ ID NO: 123301 - DNA, 25 bp, Saccharomyces pastorianus
aaaatccagggatggctgggcgccc

SEQ ID NO: 123302 - DNA, 25 bp, Saccharomyces pastorianus
aggccggcgctagtataaattcaat

SEQ ID NO: 123303 - DNA, 25 bp, Saccharomyces pastorianus
tggccaatctgccatcatggagctt

SEQ ID NO: 123304 - DNA, 25 bp, Saccharomyces pastorianus
agcaacttcagtacacggcgttaac

SEQ ID NO: 123305 - DNA, 25 bp, Saccharomyces pastorianus
ggactgggaccgctaatggcaaaat

SEQ ID NO: 123306 - DNA, 25 bp, Saccharomyces pastorianus
gacaacttttgccaaccaagtcatg

SEQ ID NO: 123307 - DNA, 25 bp, Saccharomyces pastorianus
gagtgctaccaattcgcagagtatc

SEQ ID NO: 123308 - DNA, 25 bp, Saccharomyces pastorianus
ttgacgaacgtcatcatcacaggat

SEQ ID NO: 123309 - DNA, 25 bp, Saccharomyces pastorianus
tgggcgcccttacaatggccaatct

SEQ ID NO: 123310 - DNA, 25 bp, Saccharomyces pastorianus
aggatctacctctctgatcgaaggt

SEQ ID NO: 123311 - DNA, 25 bp, Saccharomyces pastorianus
gaagttatccaagagacacgctgaa

SEQ ID NO: 123312 - DNA, 25 bp, Saccharomyces pastorianus
gagacatgatcgaagctcactacag

SEQ ID NO: 123313 - DNA, 25 bp, Saccharomyces pastorianus
gggaattccaagtcggtccatgtac

SEQ ID NO: 123314 - DNA, 25 bp, Saccharomyces pastorianus
gtgccggtaaggtttatgccagaga

SEQ ID NO: 123315 - DNA, 25 bp, Saccharomyces pastorianus
ggatggccagatactttttgcacag

SEQ ID NO: 123316 - DNA, 25 bp, Saccharomyces pastorianus
tgaaaccgcttccatgactgccttt

SEQ ID NO: 123317 - DNA, 25 bp, Saccharomyces pastorianus
aactgtttgcggtgctattgacaat

SEQ ID NO: 123318 - DNA, 25 bp, Saccharomyces pastorianus
gaggtagctcaattagaatcccaag

SEQ ID NO: 123319 - DNA, 25 bp, Saccharomyces pastorianus
acagagcttgtttgtatgccggatt

SEQ ID NO: 123320 - DNA, 25 bp, Saccharomyces pastorianus
atcaagatctcattccatccaaagc

SEQ ID NO: 123321 - DNA, 25 bp, Saccharomyces pastorianus
aacatcgacccatacttggttacag

SEQ ID NO: 123322 - DNA, 25 bp, Saccharomyces pastorianus
ttctaccagagagcatcgacgttct

SEQ ID NO: 123323 - DNA, 25 bp, Saccharomyces pastorianus
aagatcattatccaagtcgccttga

SEQ ID NO: 123324 - DNA, 25 bp, Saccharomyces pastorianus
gcgtcaagacatcagcaacctcaag

SEQ ID NO: 123325 - DNA, 25 bp, Saccharomyces pastorianus
aagtgtccagattgtgcatatccat

SEQ ID NO: 123326 - DNA, 25 bp, Saccharomyces pastorianus
gcccaccgtgcagagcttgagcgaa

SEQ ID NO: 123327 - DNA, 25 bp, Saccharomyces pastorianus
cttgaacgacatcactcacgtggtc

SEQ ID NO: 123328 - DNA, 25 bp, Saccharomyces pastorianus
gcatatccatcatcctgcaatgttg

SEQ ID NO: 123329 - DNA, 25 bp, Saccharomyces pastorianus
tcacgtggtcgagcttctaccagag

SEQ ID NO: 123330 - DNA, 25 bp, Saccharomyces pastorianus
aattggactccaagttgctgtgctg

SEQ ID NO: 123331 - DNA, 25 bp, Saccharomyces pastorianus
agaattgacctccttcgatgaatac

SEQ ID NO: 123332 - DNA, 25 bp, Saccharomyces pastorianus
gtcgacaacggtttctggtccgata

SEQ ID NO: 123333 - DNA, 25 bp, Saccharomyces pastorianus
aacgtcgatgacctgaatctggcta

SEQ ID NO: 123334 - DNA, 25 bp, Saccharomyces pastorianus
ttttggatgcctctgcttcaagccg

SEQ ID NO: 123335 - DNA, 25 bp, Saccharomyces pastorianus
gtcgcctttttagaactaacttctg

SEQ ID NO: 123336 - DNA, 25 bp, Saccharomyces pastorianus
cagtctctcagccaagctcaagaaa

SEQ ID NO: 123337 - DNA, 25 bp, Saccharomyces pastorianus
ttgccaatgccgctcttttggatgc

SEQ ID NO: 123338 - DNA, 25 bp, Saccharomyces pastorianus
ttgtcatcccatctctttcgccagt

SEQ ID NO: 123339 - DNA, 25 bp, Saccharomyces pastorianus
aagaaagaactctgacgcaaacgtc

SEQ ID NO: 123340 - DNA, 25 bp, Saccharomyces pastorianus
taacttctgacgtttctcaaccttt

SEQ ID NO: 123341 - DNA, 25 bp, Saccharomyces pastorianus
tgacgcaaacgtcgatgacctgaat

SEQ ID NO: 123342 - DNA, 25 bp, Saccharomyces pastorianus
gtttctcaaccttttgtcatcccat

SEQ ID NO: 123343 - DNA, 25 bp, Saccharomyces pastorianus
atgacctgaatctggctattgccaa

SEQ ID NO: 123344 - DNA, 25 bp, Saccharomyces pastorianus
gacctaacggcagctttagacacaa

SEQ ID NO: 123345 - DNA, 25 bp, Saccharomyces pastorianus
gcaccccatatacatgacctaacgg

SEQ ID NO: 123346 - DNA, 25 bp, Saccharomyces pastorianus
tttagacacaacagctccccagaaa

SEQ ID NO: 123347 - DNA, 25 bp, Saccharomyces pastorianus
tatacatgacctaacggcagcttta

SEQ ID NO: 123348 - DNA, 25 bp, Saccharomyces pastorianus
aaatgcatcaccatacttacgcacc

SEQ ID NO: 123349 - DNA, 25 bp, Saccharomyces pastorianus
cagctccccagaaaaaatgtccaaa

SEQ ID NO: 123350 - DNA, 25 bp, Saccharomyces pastorianus
gacacaacagctccccagaaaaaat

SEQ ID NO: 123351 - DNA, 25 bp, Saccharomyces pastorianus
ttctcttccatcttgtaatatataa

SEQ ID NO: 123352 - DNA, 25 bp, Saccharomyces pastorianus
ggtggttaacctttctcttccatct

SEQ ID NO: 123353 - DNA, 25 bp, Saccharomyces pastorianus
catacttacgcaccccatatacatg

SEQ ID NO: 123354 - DNA, 25 bp, Saccharomyces pastorianus
aacctttctcttccatcttgtaata

SEQ ID NO: 123355 - DNA, 25 bp, Saccharomyces pastorianus
gggtagcacagaacacgccgatgat

SEQ ID NO: 123356 - DNA, 25 bp, Saccharomyces pastorianus
ggatgtacttgctaagcaccggcta

SEQ ID NO: 123357 - DNA, 25 bp, Saccharomyces pastorianus
aggtattcgtgttgcgtactccaaa

SEQ ID NO: 123358 - DNA, 25 bp, Saccharomyces pastorianus
ggtgcgcaacggttcactaacgaat

SEQ ID NO: 123359 - DNA, 25 bp, Saccharomyces pastorianus
gagctcacctgagtcgaaattccga

SEQ ID NO: 123360 - DNA, 25 bp, Saccharomyces pastorianus
aaaggttactgctgctgagccggtt

SEQ ID NO: 123361 - DNA, 25 bp, Saccharomyces pastorianus
gactggacctacactacgcggtata

SEQ ID NO: 123362 - DNA, 25 bp, Saccharomyces pastorianus
ggataacgatcaaaagctgcccctt

SEQ ID NO: 123363 - DNA, 25 bp, Saccharomyces pastorianus
gtgagggtctacgacaccaggattt

SEQ ID NO: 123364 - DNA, 25 bp, Saccharomyces pastorianus
atggcatatcaatccttaacgtcaa

SEQ ID NO: 123365 - DNA, 25 bp, Saccharomyces pastorianus
tcacgacccaaaagctgccttgaga

SEQ ID NO: 123366 - DNA, 25 bp, Saccharomyces pastorianus
ggtcttcttacaacaggaacaagtc

SEQ ID NO: 123367 - DNA, 25 bp, Saccharomyces pastorianus
acggtcttcttacaacaggaacaag

SEQ ID NO: 123368 - DNA, 25 bp, Saccharomyces pastorianus
agcgacggtcttcttacaacaggaa

SEQ ID NO: 123369 - DNA, 25 bp, Saccharomyces pastorianus
tcttcttacaacaggaacaagtcca

SEQ ID NO: 123370 - DNA, 25 bp, Saccharomyces pastorianus
tccaaataccagcagcacctctctt

SEQ ID NO: 123371 - DNA, 25 bp, Saccharomyces pastorianus
gacggtcttcttacaacaggaacaa

SEQ ID NO: 123372 - DNA, 25 bp, Saccharomyces pastorianus
aggaacaagtccaaataccagcagc

SEQ ID NO: 123373 - DNA, 25 bp, Saccharomyces pastorianus
gcgacggtcttcttacaacaggaac

SEQ ID NO: 123374 - DNA, 25 bp, Saccharomyces pastorianus
cagcgacggtcttcttacaacagga

SEQ ID NO: 123375 - DNA, 25 bp, Saccharomyces pastorianus
cggtcttcttacaacaggaacaagt

SEQ ID NO: 123376 - DNA, 25 bp, Saccharomyces pastorianus
cgacggtcttcttacaacaggaaca

SEQ ID NO: 123377 - DNA, 25 bp, Saccharomyces pastorianus
cagcagcagtggagacagtgtaagc

SEQ ID NO: 123378 - DNA, 25 bp, Saccharomyces pastorianus
agtgataccaaccttcttagttctt

SEQ ID NO: 123379 - DNA, 25 bp, Saccharomyces pastorianus
tcttgacggtcttcttaccacagaa

SEQ ID NO: 123380 - DNA, 25 bp, Saccharomyces pastorianus
ctctcaatcttctgatggtagatct

SEQ ID NO: 123381 - DNA, 25 bp, Saccharomyces pastorianus
gacggtcttcttaccacagaaagaa

SEQ ID NO: 123382 - DNA, 25 bp, Saccharomyces pastorianus
gaaagaacaatcgtatctagcgtgt

SEQ ID NO: 123383 - DNA, 25 bp, Saccharomyces pastorianus
taacggacaccgtacttaccagtga

SEQ ID NO: 123384 - DNA, 25 bp, Saccharomyces pastorianus
gtacttaccagtgataccaaccttc

SEQ ID NO: 123385 - DNA, 25 bp, Saccharomyces pastorianus
tatctagcgtgttgttggatttcca

SEQ ID NO: 123386 - DNA, 25 bp, Saccharomyces pastorianus
gagacagtgtaagcaccaccagcga

SEQ ID NO: 123387 - DNA, 25 bp, Saccharomyces pastorianus
aaccatttctctcaatcttctgatg

SEQ ID NO: 123388 - DNA, 25 bp, Saccharomyces pastorianus
tagacgatggctcttcggaaatctt

SEQ ID NO: 123389 - DNA, 25 bp, Saccharomyces pastorianus
tggcgttattcgaaaaccctacaat

SEQ ID NO: 123390 - DNA, 25 bp, Saccharomyces pastorianus
ggaaatcttggaggacgaacatgtc

SEQ ID NO: 123391 - DNA, 25 bp, Saccharomyces pastorianus
tattgccttggagaacggagatctt

SEQ ID NO: 123392 - DNA, 25 bp, Saccharomyces pastorianus
gatgttaaccgaagactatccgtcg

SEQ ID NO: 123393 - DNA, 25 bp, Saccharomyces pastorianus
acgcatgcacgtattgccttggaga

SEQ ID NO: 123394 - DNA, 25 bp, Saccharomyces pastorianus
atgctattctgttttgtattcgatg

SEQ ID NO: 123395 - DNA, 25 bp, Saccharomyces pastorianus
gactatccgtcgatttctcatttaa

SEQ ID NO: 123396 - DNA, 25 bp, Saccharomyces pastorianus
aaagtgtaccaaacgcatgcacgta

SEQ ID NO: 123397 - DNA, 25 bp, Saccharomyces pastorianus
gagcaaaacttgacggagttcatat

SEQ ID NO: 123398 - DNA, 25 bp, Saccharomyces pastorianus
actagtcggcaattatcactacttc

SEQ ID NO: 123399 - DNA, 25 bp, Saccharomyces pastorianus
gatgattgctttacagatacactcc

SEQ ID NO: 123400 - DNA, 25 bp, Saccharomyces pastorianus
aatcaagagcagaacgcgacgaatt

SEQ ID NO: 123401 - DNA, 25 bp, Saccharomyces pastorianus
gactgctcttcttattagactgttg

SEQ ID NO: 123402 - DNA, 25 bp, Saccharomyces pastorianus
caatcgttaggtgctcaatcttcat

SEQ ID NO: 123403 - DNA, 25 bp, Saccharomyces pastorianus
gaagacacaatcatgcggtaatatt

SEQ ID NO: 123404 - DNA, 25 bp, Saccharomyces pastorianus
tgagttatcgtcgaagtttcccaaa

SEQ ID NO: 123405 - DNA, 25 bp, Saccharomyces pastorianus
tataccgccagacgacagtgatact

SEQ ID NO: 123406 - DNA, 25 bp, Saccharomyces pastorianus
ttgatcacgttggacaggttgtact

SEQ ID NO: 123407 - DNA, 25 bp, Saccharomyces pastorianus
aacagcgcctcttggaaattagaca

SEQ ID NO: 123408 - DNA, 25 bp, Saccharomyces pastorianus
tattaagccatactcaacagcgcct

SEQ ID NO: 123409 - DNA, 25 bp, Saccharomyces pastorianus
ggactatgagctcttgcaatcgtta

SEQ ID NO: 123410 - DNA, 25 bp, Saccharomyces pastorianus
ctagcattcctatatatcctctcag

SEQ ID NO: 123411 - DNA, 25 bp, Saccharomyces pastorianus
tatgcgggtccatcttacacactat

SEQ ID NO: 123412 - DNA, 25 bp, Saccharomyces pastorianus
tcagtctcacgtttctatgcgggtc

SEQ ID NO: 123413 - DNA, 25 bp, Saccharomyces pastorianus
gttccactcttgttgtcaacggcaa

SEQ ID NO: 123414 - DNA, 25 bp, Saccharomyces pastorianus
ggcaatgtacgttaactcgggccat

SEQ ID NO: 123415 - DNA, 25 bp, Saccharomyces pastorianus
actagtttctttgctatgccatgcc

SEQ ID NO: 123416 - DNA, 25 bp, Saccharomyces pastorianus
atgggtatgttaggcgttccactct

SEQ ID NO: 123417 - DNA, 25 bp, Saccharomyces pastorianus
tacggctctgatagatccgcatcta

SEQ ID NO: 123418 - DNA, 25 bp, Saccharomyces pastorianus
atgatctcatcgcaatgttcccttt

SEQ ID NO: 123419 - DNA, 25 bp, Saccharomyces pastorianus
aattttccacctctgtttctaacat

SEQ ID NO: 123420 - DNA, 25 bp, Saccharomyces pastorianus
tatgtggactctacggctagcattc

SEQ ID NO: 123421 - DNA, 25 bp, Saccharomyces pastorianus
aattcggcggctctaaacttatatg

SEQ ID NO: 123422 - DNA, 25 bp, Saccharomyces pastorianus
tgaaaggagctgcactcggtctacg

SEQ ID NO: 123423 - DNA, 25 bp, Saccharomyces pastorianus
gcccgagttaacgtacattgccgtt

SEQ ID NO: 123424 - DNA, 25 bp, Saccharomyces pastorianus
gtatttcttgaaccaatggcccgag

SEQ ID NO: 123425 - DNA, 25 bp, Saccharomyces pastorianus
ggatctatcagagccgtactcgata

SEQ ID NO: 123426 - DNA, 25 bp, Saccharomyces pastorianus
cataccgcgggcatggcatagcaaa

SEQ ID NO: 123427 - DNA, 25 bp, Saccharomyces pastorianus
taaactgatattgccgttgactgaa

SEQ ID NO: 123428 - DNA, 25 bp, Saccharomyces pastorianus
gaatgctagccgtagagtccacata

SEQ ID NO: 123429 - DNA, 25 bp, Saccharomyces pastorianus
gaacgcctaacatacccattggttg

SEQ ID NO: 123430 - DNA, 25 bp, Saccharomyces pastorianus
ggatgttccgctactacttgaatga

SEQ ID NO: 123431 - DNA, 25 bp, Saccharomyces pastorianus
ggacccgcatagaaacgtgagactg

SEQ ID NO: 123432 - DNA, 25 bp, Saccharomyces pastorianus
aaagcagccttacgaggccaaggcc

SEQ ID NO: 123433 - DNA, 25 bp, Saccharomyces pastorianus
ggaaggctctaacgccagaggaaaa

SEQ ID NO: 123434 - DNA, 25 bp, Saccharomyces pastorianus
gtggaaggctctaacgccagaggaa

SEQ ID NO: 123435 - DNA, 25 bp, Saccharomyces pastorianus
agcagccttacgaggccaaggccca

SEQ ID NO: 123436 - DNA, 25 bp, Saccharomyces pastorianus
aacgccagaggaaaagcagccttac

SEQ ID NO: 123437 - DNA, 25 bp, Saccharomyces pastorianus
ttacgaggccaaggcccaggccgat

SEQ ID NO: 123438 - DNA, 25 bp, Saccharomyces pastorianus
ggcccaggccgataagaagagatat

SEQ ID NO: 123439 - DNA, 25 bp, Saccharomyces pastorianus
gccagaggaaaagcagccttacgag

SEQ ID NO: 123440 - DNA, 25 bp, Saccharomyces pastorianus
agaagtggaaggctctaacgccaga

SEQ ID NO: 123441 - DNA, 25 bp, Saccharomyces pastorianus
ctaacgccagaggaaaagcagcctt

SEQ ID NO: 123442 - DNA, 25 bp, Saccharomyces pastorianus
ggccgataagaagagatatgaatcc

SEQ ID NO: 123443 - DNA, 25 bp, Saccharomyces pastorianus
gtttttgctcaattgactaccctat

SEQ ID NO: 123444 - DNA, 25 bp, Saccharomyces pastorianus
gatgtatcgcacgacgttaaatact

SEQ ID NO: 123445 - DNA, 25 bp, Saccharomyces pastorianus
gctcaattgactaccctatacatag

SEQ ID NO: 123446 - DNA, 25 bp, Saccharomyces pastorianus
attagtggcgccgaattctaccctc

SEQ ID NO: 123447 - DNA, 25 bp, Saccharomyces pastorianus
agtaaagcacagtcgcaatggccac

SEQ ID NO: 123448 - DNA, 25 bp, Saccharomyces pastorianus
taaagaaggactgttttgggacgtg

SEQ ID NO: 123449 - DNA, 25 bp, Saccharomyces pastorianus
gatacttttcgaatcacccgccttt

SEQ ID NO: 123450 - DNA, 25 bp, Saccharomyces pastorianus
gtatttattactggtaccgactgtt

SEQ ID NO: 123451 - DNA, 25 bp, Saccharomyces pastorianus
gttaaatactgttcaagtgtcacaa

SEQ ID NO: 123452 - DNA, 25 bp, Saccharomyces pastorianus
gtcgcgcgcgatacttttcgaatca

SEQ ID NO: 123453 - DNA, 25 bp, Saccharomyces pastorianus
gtaccgactgttaaagaaggactgt

SEQ ID NO: 123454 - DNA, 25 bp, Saccharomyces pastorianus
attcatgccggatttttcaagtgtc

SEQ ID NO: 123455 - DNA, 25 bp, Saccharomyces pastorianus
agacgacgagcctgtttgccttcaa

SEQ ID NO: 123456 - DNA, 25 bp, Saccharomyces pastorianus
gcttctttccaaccaaccgtatagt

SEQ ID NO: 123457 - DNA, 25 bp, Saccharomyces pastorianus
acatccgttcctaaacgaggtgcgg

SEQ ID NO: 123458 - DNA, 25 bp, Saccharomyces pastorianus
gcgtgactccatgcaccagatattt

SEQ ID NO: 123459 - DNA, 25 bp, Saccharomyces pastorianus
gatctgcgattttggtctcgctagg

SEQ ID NO: 123460 - DNA, 25 bp, Saccharomyces pastorianus
atgctcgaaagcctgttttcatggg

SEQ ID NO: 123461 - DNA, 25 bp, Saccharomyces pastorianus
tgctacaagatggtacagggcgcct

SEQ ID NO: 123462 - DNA, 25 bp, Saccharomyces pastorianus
atgggctgtagggtgcattcttgca

SEQ ID NO: 123463 - DNA, 25 bp, Saccharomyces pastorianus
ttcaagtgtcattccactgtgcagc

SEQ ID NO: 123464 - DNA, 25 bp, Saccharomyces pastorianus
ggtcctttcgacttcacctatgaat

SEQ ID NO: 123465 - DNA, 25 bp, Saccharomyces pastorianus
atgtgtcttatcaatcataccgccc

SEQ ID NO: 123466 - DNA, 25 bp, Saccharomyces pastorianus
tgttgccgttggattcatctgttca

SEQ ID NO: 123467 - DNA, 25 bp, Saccharomyces pastorianus
atgaactgtattttttccgcaacaa

SEQ ID NO: 123468 - DNA, 25 bp, Saccharomyces pastorianus
tcagctgggctgacttatgtaaaca

SEQ ID NO: 123469 - DNA, 25 bp, Saccharomyces pastorianus
atctgttcagtttgcctatgtgtct

SEQ ID NO: 123470 - DNA, 25 bp, Saccharomyces pastorianus
agccaaaccatggatctgtagattt

SEQ ID NO: 123471 - DNA, 25 bp, Saccharomyces pastorianus
aggctacttgttcttacgtgcggga

SEQ ID NO: 123472 - DNA, 25 bp, Saccharomyces pastorianus
tagcaggtgccatgtcagctgggct

SEQ ID NO: 123473 - DNA, 25 bp, Saccharomyces pastorianus
gcaatgtttattgatccgtcgttaa

SEQ ID NO: 123474 - DNA, 25 bp, Saccharomyces pastorianus
aggacatcatgctatttaacaggga

SEQ ID NO: 123475 - DNA, 25 bp, Saccharomyces pastorianus
aaatgtcctgcttgtgattctcaat

SEQ ID NO: 123476 - DNA, 25 bp, Saccharomyces pastorianus
tccctccattggcatataaagtctt

SEQ ID NO: 123477 - DNA, 25 bp, Saccharomyces pastorianus
gcaggaatgtcctttctctctagtc

SEQ ID NO: 123478 - DNA, 25 bp, Saccharomyces pastorianus
gcagctcttagcatggtaggaccaa

SEQ ID NO: 123479 - DNA, 25 bp, Saccharomyces pastorianus
aaaagtggcaccattggcgggagca

SEQ ID NO: 123480 - DNA, 25 bp, Saccharomyces pastorianus
aacccaataacctcatcgctaattc

SEQ ID NO: 123481 - DNA, 25 bp, Saccharomyces pastorianus
aaggcagtgccagacaatgctccaa

SEQ ID NO: 123482 - DNA, 25 bp, Saccharomyces pastorianus
taaagtcttggctacactggaaata

SEQ ID NO: 123483 - DNA, 25 bp, Saccharomyces pastorianus
tgaaaaaagcgcctatccctccatt

SEQ ID NO: 123484 - DNA, 25 bp, Saccharomyces pastorianus
ttatccgtttgcatgacagacttga

SEQ ID NO: 123485 - DNA, 25 bp, Saccharomyces pastorianus
ctagtccacgtcttttgttcatttg

SEQ ID NO: 123486 - DNA, 25 bp, Saccharomyces pastorianus
tgttcatttggttagcaatcaacgc

SEQ ID NO: 123487 - DNA, 25 bp, Saccharomyces pastorianus
gctgaagccaagttccaatcggata

SEQ ID NO: 123488 - DNA, 25 bp, Saccharomyces pastorianus
atctttcttggattgggctctttca

SEQ ID NO: 123489 - DNA, 25 bp, Saccharomyces pastorianus
aactcccttctttcctgacaagatt

SEQ ID NO: 123490 - DNA, 25 bp, Saccharomyces pastorianus
attcttaccgagcattaactaccca

SEQ ID NO: 123491 - DNA, 25 bp, Saccharomyces pastorianus
ggatatcccgctatacacaaagctg

SEQ ID NO: 123492 - DNA, 25 bp, Saccharomyces pastorianus
cgccttatgccccagaagttaatta

SEQ ID NO: 123493 - DNA, 25 bp, Saccharomyces pastorianus
tgaagtctatggtgtggaccctacc

SEQ ID NO: 123494 - DNA, 25 bp, Saccharomyces pastorianus
ggaccctaccaacgagtcaggtgaa

SEQ ID NO: 123495 - DNA, 25 bp, Saccharomyces pastorianus
gaaattgcgcattctcgcatcagaa

SEQ ID NO: 123496 - DNA, 25 bp, Saccharomyces pastorianus
aataacttcggttctgttgccacta

SEQ ID NO: 123497 - DNA, 25 bp, Saccharomyces pastorianus
gtaggagaatccactttggcaagtt

SEQ ID NO: 123498 - DNA, 25 bp, Saccharomyces pastorianus
gatttcaaaagggatccgccacact

SEQ ID NO: 123499 - DNA, 25 bp, Saccharomyces pastorianus
gacgctgtctccatgcgacatgtgt

SEQ ID NO: 123500 - DNA, 25 bp, Saccharomyces pastorianus
taccactttgtatacgacgctgtct

SEQ ID NO: 123501 - DNA, 25 bp, Saccharomyces pastorianus
gatccgccacactacatggtgagat

SEQ ID NO: 123502 - DNA, 25 bp, Saccharomyces pastorianus
cacgaggttgttgttgttgacgatg

SEQ ID NO: 123503 - DNA, 25 bp, Saccharomyces pastorianus
ttggcggatgtcttatcaataacaa

SEQ ID NO: 123504 - DNA, 25 bp, Saccharomyces pastorianus
cattgcctatgaggaggcggcctta

SEQ ID NO: 123505 - DNA, 25 bp, Saccharomyces pastorianus
ccacgctgtgttgtcggtgagaacg

SEQ ID NO: 123506 - DNA, 25 bp, Saccharomyces pastorianus
gaagtgttctcggtcgtggtcacaa

SEQ ID NO: 123507 - DNA, 25 bp, Saccharomyces pastorianus
tccatgcgacatgtgtacaggtgcc

SEQ ID NO: 123508 - DNA, 25 bp, Saccharomyces pastorianus
gtcgtggtcacaacatgagatttca

SEQ ID NO: 123509 - DNA, 25 bp, Saccharomyces pastorianus
tttcctgctacttacgctaggagct

SEQ ID NO: 123510 - DNA, 25 bp, Saccharomyces pastorianus
ctaccgggaattactatgcaaaaca

SEQ ID NO: 123511 - DNA, 25 bp, Saccharomyces pastorianus
agaaaagggcctcttgttgctgcct

SEQ ID NO: 123512 - DNA, 25 bp, Saccharomyces pastorianus
caacccaggtgcaggcgtactttaa

SEQ ID NO: 123513 - DNA, 25 bp, Saccharomyces pastorianus
gtgatcttcggctcggccgacaaat

SEQ ID NO: 123514 - DNA, 25 bp, Saccharomyces pastorianus
tcttttgttgttcttcctcgtattg

SEQ ID NO: 123515 - DNA, 25 bp, Saccharomyces pastorianus
agtgtgcggttatcggaaccggctc

SEQ ID NO: 123516 - DNA, 25 bp, Saccharomyces pastorianus
tatcggccgcgtggaactaccggga

SEQ ID NO: 123517 - DNA, 25 bp, Saccharomyces pastorianus
aaatcccctggatatcattggcctg

SEQ ID NO: 123518 - DNA, 25 bp, Saccharomyces pastorianus
atcattggcctgtcgaggtatcggc

SEQ ID NO: 123519 - DNA, 25 bp, Saccharomyces pastorianus
ttgttcccgtttagagcaacccagg

SEQ ID NO: 123520 - DNA, 25 bp, Saccharomyces pastorianus
aattgccctttatttcatccattat

SEQ ID NO: 123521 - DNA, 25 bp, Saccharomyces pastorianus
agtggactacctttgacgcatgata

SEQ ID NO: 123522 - DNA, 25 bp, Saccharomyces pastorianus
aggttgcctattccttctgttaata

SEQ ID NO: 123523 - DNA, 25 bp, Saccharomyces pastorianus
gacggcaagagacctaccacagctg

SEQ ID NO: 123524 - DNA, 25 bp, Saccharomyces pastorianus
atcatcacattcctcatataccaaa

SEQ ID NO: 123525 - DNA, 25 bp, Saccharomyces pastorianus
atattgtcaaaccactgtctcacac

SEQ ID NO: 123526 - DNA, 25 bp, Saccharomyces pastorianus
acgacccttcaacgagacatcatta

SEQ ID NO: 123527 - DNA, 25 bp, Saccharomyces pastorianus
aactgcgacatcttctcctgggaaa

SEQ ID NO: 123528 - DNA, 25 bp, Saccharomyces pastorianus
cctctattaccttctctgcaagatt

SEQ ID NO: 123529 - DNA, 25 bp, Saccharomyces pastorianus
gagacatcattacctcaacgtcgct

SEQ ID NO: 123530 - DNA, 25 bp, Saccharomyces pastorianus
accacagctgtcatctcaactaaat

SEQ ID NO: 123531 - DNA, 25 bp, Saccharomyces pastorianus
atgagactctcgtgaagcttacctt

SEQ ID NO: 123532 - DNA, 25 bp, Saccharomyces pastorianus
gaagtgctgcgaaagggctgcccaa

SEQ ID NO: 123533 - DNA, 25 bp, Saccharomyces pastorianus
gaacctcgtcgcttcatcaatgaga

SEQ ID NO: 123534 - DNA, 25 bp, Saccharomyces pastorianus
gtgccaatgtgtacaatcgccaaca

SEQ ID NO: 123535 - DNA, 25 bp, Saccharomyces pastorianus
aagacttccagttcataatctcggg

SEQ ID NO: 123536 - DNA, 25 bp, Saccharomyces pastorianus
agggctgcccaatttagcatctcaa

SEQ ID NO: 123537 - DNA, 25 bp, Saccharomyces pastorianus
tacagtttcaagttcgagcggttac

SEQ ID NO: 123538 - DNA, 25 bp, Saccharomyces pastorianus
agtctacggcggatgtggaatttct

SEQ ID NO: 123539 - DNA, 25 bp, Saccharomyces pastorianus
aacaatcctcgctgcattgagcatg

SEQ ID NO: 123540 - DNA, 25 bp, Saccharomyces pastorianus
gtgaagcttaccttggagtccaatt

SEQ ID NO: 123541 - DNA, 25 bp, Saccharomyces pastorianus
tgaaatttgcatcccgttcatagat

SEQ ID NO: 123542 - DNA, 25 bp, Saccharomyces pastorianus
ggatgtcacggtttccagtacaatc

SEQ ID NO: 123543 - DNA, 25 bp, Saccharomyces pastorianus
ggatctggtcactaaggagccgttg

SEQ ID NO: 123544 - DNA, 25 bp, Saccharomyces pastorianus
gagttgatcggttcttcgttcaaaa

SEQ ID NO: 123545 - DNA, 25 bp, Saccharomyces pastorianus
ttacgccagtttcccctaacatgtt

SEQ ID NO: 123546 - DNA, 25 bp, Saccharomyces pastorianus
agagggcttccaacagactagctga

SEQ ID NO: 123547 - DNA, 25 bp, Saccharomyces pastorianus
ggagccgttgatcacaccgaaaaga

SEQ ID NO: 123548 - DNA, 25 bp, Saccharomyces pastorianus
gacgcctgggttaaacttatctatt

SEQ ID NO: 123549 - DNA, 25 bp, Saccharomyces pastorianus
tagaacccgctaccaagccagatat

SEQ ID NO: 123550 - DNA, 25 bp, Saccharomyces pastorianus
gactagctgagatctaccgcaatag

SEQ ID NO: 123551 - DNA, 25 bp, Saccharomyces pastorianus
ggagttttcagacgaccttgacgat

SEQ ID NO: 123552 - DNA, 25 bp, Saccharomyces pastorianus
aagcattttactcggatctggtcac

SEQ ID NO: 123553 - DNA, 25 bp, Saccharomyces pastorianus
ccccatttagccttttgacatttga

SEQ ID NO: 123554 - DNA, 25 bp, Saccharomyces pastorianus
ttaatccattacatgacggctcatt

SEQ ID NO: 123555 - DNA, 25 bp, Saccharomyces pastorianus
atatgctctcgctgcaatacaagaa

SEQ ID NO: 123556 - DNA, 25 bp, Saccharomyces pastorianus
attatttacataacggcccactaga

SEQ ID NO: 123557 - DNA, 25 bp, Saccharomyces pastorianus
agcatattcagcgatcgtttctatt

SEQ ID NO: 123558 - DNA, 25 bp, Saccharomyces pastorianus
attattcagcgcttatcatgtcaac

SEQ ID NO: 123559 - DNA, 25 bp, Saccharomyces pastorianus
atgtgggctggttcatagcatattc

SEQ ID NO: 123560 - DNA, 25 bp, Saccharomyces pastorianus
tagccgtcaggcttactatgaaagt

SEQ ID NO: 123561 - DNA, 25 bp, Saccharomyces pastorianus
aatgatgatgtattgccgccgttag

SEQ ID NO: 123562 - DNA, 25 bp, Saccharomyces pastorianus
gcaatattcctgctcgtagtaatga

SEQ ID NO: 123563 - DNA, 25 bp, Saccharomyces pastorianus
gagtcgtcagggtataagcgttcct

SEQ ID NO: 123564 - DNA, 25 bp, Saccharomyces pastorianus
gcaatcaaaactacgctcgagctct

SEQ ID NO: 123565 - DNA, 25 bp, Saccharomyces pastorianus
agaagttcagcatctaccactcgta

SEQ ID NO: 123566 - DNA, 25 bp, Saccharomyces pastorianus
tgcctacattcctggtgtgacaagc

SEQ ID NO: 123567 - DNA, 25 bp, Saccharomyces pastorianus
atattttgcctattgcctacattcc

SEQ ID NO: 123568 - DNA, 25 bp, Saccharomyces pastorianus
aactctcaacgtgccgggaaacaga

SEQ ID NO: 123569 - DNA, 25 bp, Saccharomyces pastorianus
ataaccttaggttcttccatcttgg

SEQ ID NO: 123570 - DNA, 25 bp, Saccharomyces pastorianus
aacctcataactgctattcgtgcta

SEQ ID NO: 123571 - DNA, 25 bp, Saccharomyces pastorianus
gtcacactctgttcaatacgtcact

SEQ ID NO: 123572 - DNA, 25 bp, Saccharomyces pastorianus
gaatcgatacgcgagagcacccagg

SEQ ID NO: 123573 - DNA, 25 bp, Saccharomyces pastorianus
ctaccactcgtacaagggcttctaa

SEQ ID NO: 123574 - DNA, 25 bp, Saccharomyces pastorianus
ggcggatgatctttcacacatggca

SEQ ID NO: 123575 - DNA, 25 bp, Saccharomyces pastorianus
aaggcaataagcatcgcaccaccta

SEQ ID NO: 123576 - DNA, 25 bp, Saccharomyces pastorianus
gtggatgggcacttgtcacatgtta

SEQ ID NO: 123577 - DNA, 25 bp, Saccharomyces pastorianus
cagggcatgatgcagttgaatcgca

SEQ ID NO: 123578 - DNA, 25 bp, Saccharomyces pastorianus
aatcaacgaggttttctcatttgaa

SEQ ID NO: 123579 - DNA, 25 bp, Saccharomyces pastorianus
acggtgaaccccacaatcaacgagg

SEQ ID NO: 123580 - DNA, 25 bp, Saccharomyces pastorianus
tgaatcgcaaacaacacatccgtcg

SEQ ID NO: 123581 - DNA, 25 bp, Saccharomyces pastorianus
aacacaatattctcctgaagcgcaa

SEQ ID NO: 123582 - DNA, 25 bp, Saccharomyces pastorianus
agaagccttggaggagctcgacatt

SEQ ID NO: 123583 - DNA, 25 bp, Saccharomyces pastorianus
gtcgctgcctctagttgcagaagtt

SEQ ID NO: 123584 - DNA, 25 bp, Saccharomyces pastorianus
gaatcggactgtttcgcacagtatg

SEQ ID NO: 123585 - DNA, 25 bp, Saccharomyces pastorianus
aaactactcagttgtgaatcggact

SEQ ID NO: 123586 - DNA, 25 bp, Saccharomyces pastorianus
taacagcggtggtatgttccgtatt

SEQ ID NO: 123587 - DNA, 25 bp, Saccharomyces pastorianus
aagggccaaccttgtaaagatgaag

SEQ ID NO: 123588 - DNA, 25 bp, Saccharomyces pastorianus
tttgtgcccgaaccaggtgatcagc

SEQ ID NO: 123589 - DNA, 25 bp, Saccharomyces pastorianus
gtcaggacttctcttgatatgctcg

SEQ ID NO: 123590 - DNA, 25 bp, Saccharomyces pastorianus
tctcttgatatgctcggctctgaaa

SEQ ID NO: 123591 - DNA, 25 bp, Saccharomyces pastorianus
gttccgtattttccataagagtgct

SEQ ID NO: 123592 - DNA, 25 bp, Saccharomyces pastorianus
taagagtgctaattttggcgacaaa

SEQ ID NO: 123593 - DNA, 25 bp, Saccharomyces pastorianus
acgtgccacgagtgtgggacacact

SEQ ID NO: 123594 - DNA, 25 bp, Saccharomyces pastorianus
taaactctgttttgtgcccgaacca

SEQ ID NO: 123595 - DNA, 25 bp, Saccharomyces pastorianus
ccttaccatcatctgatccgggaaa

SEQ ID NO: 123596 - DNA, 25 bp, Saccharomyces pastorianus
gatgaagacgccgttaccgttccct

SEQ ID NO: 123597 - DNA, 25 bp, Saccharomyces pastorianus
gttaccgagactaaacgacttgttg

SEQ ID NO: 123598 - DNA, 25 bp, Saccharomyces pastorianus
gctagtgttttgttgcctcaattgc

SEQ ID NO: 123599 - DNA, 25 bp, Saccharomyces pastorianus
tgttgcctcaattgcgtacgggatg

SEQ ID NO: 123600 - DNA, 25 bp, Saccharomyces pastorianus
gacggatcccatgacagtaatgttt

SEQ ID NO: 123601 - DNA, 25 bp, Saccharomyces pastorianus
gagttgttatcttcgattgctgaaa

SEQ ID NO: 123602 - DNA, 25 bp, Saccharomyces pastorianus
atggcatgtggatcaggctattgtt

SEQ ID NO: 123603 - DNA, 25 bp, Saccharomyces pastorianus
gacagtaatgtttttctaccagaat

SEQ ID NO: 123604 - DNA, 25 bp, Saccharomyces pastorianus
agatgtacgagctgacggatcccat

SEQ ID NO: 123605 - DNA, 25 bp, Saccharomyces pastorianus
gttgtcattcgttttggtcgcaaaa

SEQ ID NO: 123606 - DNA, 25 bp, Saccharomyces pastorianus
gatcaggctattgttaccgagacta

SEQ ID NO: 123607 - DNA, 25 bp, Saccharomyces pastorianus
gaacaaagggctggtggtctctcca

SEQ ID NO: 123608 - DNA, 25 bp, Saccharomyces pastorianus
gcgccatcacaatcaagttctcgta

SEQ ID NO: 123609 - DNA, 25 bp, Saccharomyces pastorianus
ttggaatcacaatcgcaaacgctga

SEQ ID NO: 123610 - DNA, 25 bp, Saccharomyces pastorianus
gttgacacatgatttgactcctatt

SEQ ID NO: 123611 - DNA, 25 bp, Saccharomyces pastorianus
atgagtacattaccactgtctcctt

SEQ ID NO: 123612 - DNA, 25 bp, Saccharomyces pastorianus
ggcctcaacggcacaaaacttattc

SEQ ID NO: 123613 - DNA, 25 bp, Saccharomyces pastorianus
aaaactccacattagcatcaccgtc

SEQ ID NO: 123614 - DNA, 25 bp, Saccharomyces pastorianus
gtggtggtccggtatcgaaatctta

SEQ ID NO: 123615 - DNA, 25 bp, Saccharomyces pastorianus
ggttgaaccaatcgcgatctggcct

SEQ ID NO: 123616 - DNA, 25 bp, Saccharomyces pastorianus
aagaaggttatcctcttccacgtca

SEQ ID NO: 123617 - DNA, 25 bp, Saccharomyces pastorianus
gatgtcatcgtcctttatatccacg

SEQ ID NO: 123618 - DNA, 25 bp, Saccharomyces pastorianus
acttcctagcttattaactgccttc

SEQ ID NO: 123619 - DNA, 25 bp, Saccharomyces pastorianus
acaacctggtcgtgagtgatagctc

SEQ ID NO: 123620 - DNA, 25 bp, Saccharomyces pastorianus
agacctaacaaacggtagcggctca

SEQ ID NO: 123621 - DNA, 25 bp, Saccharomyces pastorianus
gaactggtccatgtttctaacgatc

SEQ ID NO: 123622 - DNA, 25 bp, Saccharomyces pastorianus
gatcattatccgaatccaatacttg

SEQ ID NO: 123623 - DNA, 25 bp, Saccharomyces pastorianus
gtgatagctctatgggagacctaac

SEQ ID NO: 123624 - DNA, 25 bp, Saccharomyces pastorianus
ggccttcaaagggacattgcagaac

SEQ ID NO: 123625 - DNA, 25 bp, Saccharomyces pastorianus
ttagacgtattaaagcgctggcgaa

SEQ ID NO: 123626 - DNA, 25 bp, Saccharomyces pastorianus
taaaatgcccaagctcactgagagt

SEQ ID NO: 123627 - DNA, 25 bp, Saccharomyces pastorianus
ataccttagagatgatgcgcttttg

SEQ ID NO: 123628 - DNA, 25 bp, Saccharomyces pastorianus
gaatccagctcgaaatcccataact

SEQ ID NO: 123629 - DNA, 25 bp, Saccharomyces pastorianus
gcgctggcgaaatgtaactggtgtt

SEQ ID NO: 123630 - DNA, 25 bp, Saccharomyces pastorianus
atctatctaaacatcctgctctttc

SEQ ID NO: 123631 - DNA, 25 bp, Saccharomyces pastorianus
gtaaatcccctattactatcgctgt

SEQ ID NO: 123632 - DNA, 25 bp, Saccharomyces pastorianus
tgggcttaccgatgcaagtcactac

SEQ ID NO: 123633 - DNA, 25 bp, Saccharomyces pastorianus
gtggatccgcagcttattgctaatg

SEQ ID NO: 123634 - DNA, 25 bp, Saccharomyces pastorianus
agatccctattaccgcagcgaaagt

SEQ ID NO: 123635 - DNA, 25 bp, Saccharomyces pastorianus
aatggctgcatccatactgattggt

SEQ ID NO: 123636 - DNA, 25 bp, Saccharomyces pastorianus
gcaagtcactacttctgctgaatat

SEQ ID NO: 123637 - DNA, 25 bp, Saccharomyces pastorianus
atcgctgttgtttccatctatctaa

SEQ ID NO: 123638 - DNA, 25 bp, Saccharomyces pastorianus
atatacccaggttttgttcgcatct

SEQ ID NO: 123639 - DNA, 25 bp, Saccharomyces pastorianus
gagtggtgcacagaacctaacttat

SEQ ID NO: 123640 - DNA, 25 bp, Saccharomyces pastorianus
gtgggccaaaccttgcaagttactg

SEQ ID NO: 123641 - DNA, 25 bp, Saccharomyces pastorianus
gacgctaagttcaacaggcttcagt

SEQ ID NO: 123642 - DNA, 25 bp, Saccharomyces pastorianus
tagactttcagggtaaaaggcacca

SEQ ID NO: 123643 - DNA, 25 bp, Saccharomyces pastorianus
gtaagcattaaaaacccaaggccat

SEQ ID NO: 123644 - DNA, 25 bp, Saccharomyces pastorianus
atactacctgctcattagactttca

SEQ ID NO: 123645 - DNA, 25 bp, Saccharomyces pastorianus
agaagctgcttctcttatactacct

SEQ ID NO: 123646 - DNA, 25 bp, Saccharomyces pastorianus
aacaggcttcagtataatctatatt

SEQ ID NO: 123647 - DNA, 25 bp, Saccharomyces pastorianus
tctcgcaccacaaggccggtttatt

SEQ ID NO: 123648 - DNA, 25 bp, Saccharomyces pastorianus
tcgtcctttttcttgtattaggcgt

SEQ ID NO: 123649 - DNA, 25 bp, Saccharomyces pastorianus
tatattacaagcctctctcgcacca

SEQ ID NO: 123650 - DNA, 25 bp, Saccharomyces pastorianus
gccggtttattgtacaaagacctct

SEQ ID NO: 123651 - DNA, 25 bp, Saccharomyces pastorianus
aaagacctcttcttcagaagctgct

SEQ ID NO: 123652 - DNA, 25 bp, Saccharomyces pastorianus
aagaccctccccagttacagaattg

SEQ ID NO: 123653 - DNA, 25 bp, Saccharomyces pastorianus
acttcctcatcacttcaaactgtat

SEQ ID NO: 123654 - DNA, 25 bp, Saccharomyces pastorianus
gtgtattctgccctcaacaaaggat

SEQ ID NO: 123655 - DNA, 25 bp, Saccharomyces pastorianus
ataactttttcacgcccatttgtgt

SEQ ID NO: 123656 - DNA, 25 bp, Saccharomyces pastorianus
ggccccatttatctaatctctttga

SEQ ID NO: 123657 - DNA, 25 bp, Saccharomyces pastorianus
tcgtgcaatagctttcacaaccatt

SEQ ID NO: 123658 - DNA, 25 bp, Saccharomyces pastorianus
aaaggatgtccagacttcctcatca

SEQ ID NO: 123659 - DNA, 25 bp, Saccharomyces pastorianus
ggaaacacgaatgctccaactccat

SEQ ID NO: 123660 - DNA, 25 bp, Saccharomyces pastorianus
atgtctccatcagaatccttcaata

SEQ ID NO: 123661 - DNA, 25 bp, Saccharomyces pastorianus
aactgtatccatgggaactcctggc

SEQ ID NO: 123662 - DNA, 25 bp, Saccharomyces pastorianus
agtcaaaaatttcctcatgccttcc

SEQ ID NO: 123663 - DNA, 25 bp, Saccharomyces pastorianus
tgcacgaaattccataggtcgtaat

SEQ ID NO: 123664 - DNA, 25 bp, Saccharomyces pastorianus
ggacatcctttgttgagggcagaat

SEQ ID NO: 123665 - DNA, 25 bp, Saccharomyces pastorianus
gattactttgcaattctgtaactgg

SEQ ID NO: 123666 - DNA, 25 bp, Saccharomyces pastorianus
gattctgatggagacattttacgca

SEQ ID NO: 123667 - DNA, 25 bp, Saccharomyces pastorianus
ggagacattttacgcagaagaacaa

SEQ ID NO: 123668 - DNA, 25 bp, Saccharomyces pastorianus
ggaagtctggacatcctttgttgag

SEQ ID NO: 123669 - DNA, 25 bp, Saccharomyces pastorianus
atggagttggagcattcgtgtttcc

SEQ ID NO: 123670 - DNA, 25 bp, Saccharomyces pastorianus
gcattcgtgtttccatgcagaaaga

SEQ ID NO: 123671 - DNA, 25 bp, Saccharomyces pastorianus
tgagggcagaatacacaaatgggcg

SEQ ID NO: 123672 - DNA, 25 bp, Saccharomyces pastorianus
gtgagaaacttgaacattgacaatg

SEQ ID NO: 123673 - DNA, 25 bp, Saccharomyces pastorianus
cgtggaaagcttgaacagtagtgtg

SEQ ID NO: 123674 - DNA, 25 bp, Saccharomyces pastorianus
gacggccttagctttgtagataaag

SEQ ID NO: 123675 - DNA, 25 bp, Saccharomyces pastorianus
aatacccgaggattgatacttccag

SEQ ID NO: 123676 - DNA, 25 bp, Saccharomyces pastorianus
gatacataccgaacgagttttccga

SEQ ID NO: 123677 - DNA, 25 bp, Saccharomyces pastorianus
aaaagagagcctgttcatcccgaaa

SEQ ID NO: 123678 - DNA, 25 bp, Saccharomyces pastorianus
tggatacacttctaccgcaaacggt

SEQ ID NO: 123679 - DNA, 25 bp, Saccharomyces pastorianus
ggcgaacaccggattttaatgacga

SEQ ID NO: 123680 - DNA, 25 bp, Saccharomyces pastorianus
gggccgataatagtgtttctacgct

SEQ ID NO: 123681 - DNA, 25 bp, Saccharomyces pastorianus
gtgtttctacgcttacaaatgcatt

SEQ ID NO: 123682 - DNA, 25 bp, Saccharomyces pastorianus
gttcatcccgaaatacgaggtatac

SEQ ID NO: 123683 - DNA, 25 bp, Saccharomyces pastorianus
gagttttccgaagttagcttgttag

SEQ ID NO: 123684 - DNA, 25 bp, Saccharomyces pastorianus
atgcattgtacaccgaatacttgaa

SEQ ID NO: 123685 - DNA, 25 bp, Saccharomyces pastorianus
ttctgcgttggttcaggtcaaacat

SEQ ID NO: 123686 - DNA, 25 bp, Saccharomyces pastorianus
gggccggtttatcaatgggtactat

SEQ ID NO: 123687 - DNA, 25 bp, Saccharomyces pastorianus
gctaggttctcagtgtaggctgcac

SEQ ID NO: 123688 - DNA, 25 bp, Saccharomyces pastorianus
cttactctggtggttctgtaaattt

SEQ ID NO: 123689 - DNA, 25 bp, Saccharomyces pastorianus
tattacgtcgactcagacggtacaa

SEQ ID NO: 123690 - DNA, 25 bp, Saccharomyces pastorianus
cactaggaaggagggcccaaccatt

SEQ ID NO: 123691 - DNA, 25 bp, Saccharomyces pastorianus
agtagattctcgtgccactgccggc

SEQ ID NO: 123692 - DNA, 25 bp, Saccharomyces pastorianus
gctgctgcccatagagatgcttact

SEQ ID NO: 123693 - DNA, 25 bp, Saccharomyces pastorianus
gcaattgggttgcttctcaaactgt

SEQ ID NO: 123694 - DNA, 25 bp, Saccharomyces pastorianus
ttgcatatggtgttctagactctaa

SEQ ID NO: 123695 - DNA, 25 bp, Saccharomyces pastorianus
aggaacgtatatctgtcgcagccgc

SEQ ID NO: 123696 - DNA, 25 bp, Saccharomyces pastorianus
cgattattctgcaggttcgaaccaa

SEQ ID NO: 123697 - DNA, 25 bp, Saccharomyces pastorianus
gtttttgttaattcagcctcatcaa

SEQ ID NO: 123698 - DNA, 25 bp, Saccharomyces pastorianus
ggatgacttcaatggtactttcgat

SEQ ID NO: 123699 - DNA, 25 bp, Saccharomyces pastorianus
ggaaccaattgattatcccttacaa

SEQ ID NO: 123700 - DNA, 25 bp, Saccharomyces pastorianus
gaactgagccttttcatcggcaata

SEQ ID NO: 123701 - DNA, 25 bp, Saccharomyces pastorianus
cggcaatatgtgtggcttgaactat

SEQ ID NO: 123702 - DNA, 25 bp, Saccharomyces pastorianus
gagttgctatctgtcatagtcgact

SEQ ID NO: 123703 - DNA, 25 bp, Saccharomyces pastorianus
atcaaattcctcaacgtccaatcaa

SEQ ID NO: 123704 - DNA, 25 bp, Saccharomyces pastorianus
gggctgtcaaatacttgttccaaaa

SEQ ID NO: 123705 - DNA, 25 bp, Saccharomyces pastorianus
acaaatcgtgttgcttctcggttta

SEQ ID NO: 123706 - DNA, 25 bp, Saccharomyces pastorianus
aatgtgtctcgcgattattctgcag

SEQ ID NO: 123707 - DNA, 25 bp, Saccharomyces pastorianus
gagaaggccctaaatcatgtccgag

SEQ ID NO: 123708 - DNA, 25 bp, Saccharomyces pastorianus
cgatcctgacagacctatttgtgaa

SEQ ID NO: 123709 - DNA, 25 bp, Saccharomyces pastorianus
gcatgtgttaccaatatttcagaat

SEQ ID NO: 123710 - DNA, 25 bp, Saccharomyces pastorianus
aaaatgcctgaatgtgtcttcttca

SEQ ID NO: 123711 - DNA, 25 bp, Saccharomyces pastorianus
taattcaccccgatacagcaaaata

SEQ ID NO: 123712 - DNA, 25 bp, Saccharomyces pastorianus
acgaaatgggattctgtcctctggg

SEQ ID NO: 123713 - DNA, 25 bp, Saccharomyces pastorianus
acatgaccggattttgtcctttagg

SEQ ID NO: 123714 - DNA, 25 bp, Saccharomyces pastorianus
ggagttcttgtcctagacggcatat

SEQ ID NO: 123715 - DNA, 25 bp, Saccharomyces pastorianus
tctacacatagatcccgctagcaag

SEQ ID NO: 123716 - DNA, 25 bp, Saccharomyces pastorianus
aaatttgaacctttcctcaggcaag

SEQ ID NO: 123717 - DNA, 25 bp, Saccharomyces pastorianus
gacattggcttcgagggttgtgcaa

SEQ ID NO: 123718 - DNA, 25 bp, Saccharomyces pastorianus
ttgtcccatcttggaggatacccta

SEQ ID NO: 123719 - DNA, 25 bp, Saccharomyces pastorianus
atcttggaggataccctacagtgta

SEQ ID NO: 123720 - DNA, 25 bp, Saccharomyces pastorianus
tacagtgtaaaagcctccttagctt

SEQ ID NO: 123721 - DNA, 25 bp, Saccharomyces pastorianus
acattaagagaagtcggctgcaaat

SEQ ID NO: 123722 - DNA, 25 bp, Saccharomyces pastorianus
taccctacagtgtaaaagcctcctt

SEQ ID NO: 123723 - DNA, 25 bp, Saccharomyces pastorianus
gacactttgtcccatcttggaggat

SEQ ID NO: 123724 - DNA, 25 bp, Saccharomyces pastorianus
gagaagtcggctgcaaatttccatg

SEQ ID NO: 123725 - DNA, 25 bp, Saccharomyces pastorianus
ctccatgatagtttaagtgttacag

SEQ ID NO: 123726 - DNA, 25 bp, Saccharomyces pastorianus
aaatttccatgcagacactttgtcc

SEQ ID NO: 123727 - DNA, 25 bp, Saccharomyces pastorianus
gaagtcggctgcaaatttccatgca

SEQ ID NO: 123728 - DNA, 25 bp, Saccharomyces pastorianus
atgcagacactttgtcccatcttgg

SEQ ID NO: 123729 - DNA, 25 bp, Saccharomyces pastorianus
gggttgcaacacttccaggcggaag

SEQ ID NO: 123730 - DNA, 25 bp, Saccharomyces pastorianus
cagatgatcggagaacggctaccaa

SEQ ID NO: 123731 - DNA, 25 bp, Saccharomyces pastorianus
atagtgatggctacgatggctctgt

SEQ ID NO: 123732 - DNA, 25 bp, Saccharomyces pastorianus
tgaacccctgagtggtagcgagcca

SEQ ID NO: 123733 - DNA, 25 bp, Saccharomyces pastorianus
gatgataccgctattgtgtccatga

SEQ ID NO: 123734 - DNA, 25 bp, Saccharomyces pastorianus
gaagatctatcaggtttcccggaat

SEQ ID NO: 123735 - DNA, 25 bp, Saccharomyces pastorianus
ctcacccttttccaattcagatggt

SEQ ID NO: 123736 - DNA, 25 bp, Saccharomyces pastorianus
gacgatggccctaagaatactccct

SEQ ID NO: 123737 - DNA, 25 bp, Saccharomyces pastorianus
agagcaacttttccggcaatcttgg

SEQ ID NO: 123738 - DNA, 25 bp, Saccharomyces pastorianus
gatggctctgtaatagttgcacgaa

SEQ ID NO: 123739 - DNA, 25 bp, Saccharomyces pastorianus
gaggtgggctttttctacagatgat

SEQ ID NO: 123740 - DNA, 25 bp, Saccharomyces pastorianus
gtgaggaaccactttattttcaacg

SEQ ID NO: 123741 - DNA, 25 bp, Saccharomyces pastorianus
agtttccaccgcttcttatagatta

SEQ ID NO: 123742 - DNA, 25 bp, Saccharomyces pastorianus
cgcccgtgatttgaagtttgaacca

SEQ ID NO: 123743 - DNA, 25 bp, Saccharomyces pastorianus
taaattttcaccagtttccaccgct

SEQ ID NO: 123744 - DNA, 25 bp, Saccharomyces pastorianus
agatgctccaaagggatctactgat

SEQ ID NO: 123745 - DNA, 25 bp, Saccharomyces pastorianus
ttttgctgattgtccggttgttcca

SEQ ID NO: 123746 - DNA, 25 bp, Saccharomyces pastorianus
aatgcccatgtctacgcccgtgatt

SEQ ID NO: 123747 - DNA, 25 bp, Saccharomyces pastorianus
ggcacattgcattttaggtatcggt

SEQ ID NO: 123748 - DNA, 25 bp, Saccharomyces pastorianus
aacgtagaaagctctggtgccatga

SEQ ID NO: 123749 - DNA, 25 bp, Saccharomyces pastorianus
agggcagacaatctaccacttttgc

SEQ ID NO: 123750 - DNA, 25 bp, Saccharomyces pastorianus
ggttgttccagctgatcctgatatt

SEQ ID NO: 123751 - DNA, 25 bp, Saccharomyces pastorianus
aagaaggccccgtactgaggataga

SEQ ID NO: 123752 - DNA, 25 bp, Saccharomyces pastorianus
tctgccgttgattccaagcttgttg

SEQ ID NO: 123753 - DNA, 25 bp, Saccharomyces pastorianus
aatggttgatgactctgccgttgat

SEQ ID NO: 123754 - DNA, 25 bp, Saccharomyces pastorianus
gattaatagctgaccccatcaacag

SEQ ID NO: 123755 - DNA, 25 bp, Saccharomyces pastorianus
aacaagttctccaccatttattcct

SEQ ID NO: 123756 - DNA, 25 bp, Saccharomyces pastorianus
ttatatggccctagaagttctggaa

SEQ ID NO: 123757 - DNA, 25 bp, Saccharomyces pastorianus
tacgatcttttgagcaagttcgcaa

SEQ ID NO: 123758 - DNA, 25 bp, Saccharomyces pastorianus
gcaggttatttcgatgacttcacaa

SEQ ID NO: 123759 - DNA, 25 bp, Saccharomyces pastorianus
tacgctaattctatggtcggttcgc

SEQ ID NO: 123760 - DNA, 25 bp, Saccharomyces pastorianus
gtcattgggctgtatgctttttgaa

SEQ ID NO: 123761 - DNA, 25 bp, Saccharomyces pastorianus
tacaccttttagtggttcttctact

SEQ ID NO: 123762 - DNA, 25 bp, Saccharomyces pastorianus
gaagttatcccatagacaagcatct

SEQ ID NO: 123763 - DNA, 25 bp, Saccharomyces pastorianus
ttcactggttttgttgttgcccaag

SEQ ID NO: 123764 - DNA, 25 bp, Saccharomyces pastorianus
ggtgtccatttactgggccgcagat

SEQ ID NO: 123765 - DNA, 25 bp, Saccharomyces pastorianus
gataggttcaaggttttcactggtt

SEQ ID NO: 123766 - DNA, 25 bp, Saccharomyces pastorianus
ctgggccgcagattggtaatgcaat

SEQ ID NO: 123767 - DNA, 25 bp, Saccharomyces pastorianus
gacaagcatctcagagcggtaatac

SEQ ID NO: 123768 - DNA, 25 bp, Saccharomyces pastorianus
gaatcttccatttgaagctactagg

SEQ ID NO: 123769 - DNA, 25 bp, Saccharomyces pastorianus
ccactaatgagatggctgccttaag

SEQ ID NO: 123770 - DNA, 25 bp, Saccharomyces pastorianus
ggatcagttgcacggtgtccattta

SEQ ID NO: 123771 - DNA, 25 bp, Saccharomyces pastorianus
ctaatgccgtgatagctgcaatgga

SEQ ID NO: 123772 - DNA, 25 bp, Saccharomyces pastorianus
gggacggtaatcgacggccataaga

SEQ ID NO: 123773 - DNA, 25 bp, Saccharomyces pastorianus
gaacctggtttcttagtctttgaca

SEQ ID NO: 123774 - DNA, 25 bp, Saccharomyces pastorianus
ctatgttacgacttttaccaggtgc

SEQ ID NO: 123775 - DNA, 25 bp, Saccharomyces pastorianus
gaataatctccaccgtcgtgttttg

SEQ ID NO: 123776 - DNA, 25 bp, Saccharomyces pastorianus
tgatgttcgaactttccaatccctc

SEQ ID NO: 123777 - DNA, 25 bp, Saccharomyces pastorianus
aatattacgccccagtgttcttgat

SEQ ID NO: 123778 - DNA, 25 bp, Saccharomyces pastorianus
ttttctaccatggtgtctgtggctg

SEQ ID NO: 123779 - DNA, 25 bp, Saccharomyces pastorianus
atggtcgtcttctttgccgctagaa

SEQ ID NO: 123780 - DNA, 25 bp, Saccharomyces pastorianus
acaccattgttatccttgcaggcaa

SEQ ID NO: 123781 - DNA, 25 bp, Saccharomyces pastorianus
gctctctactgctgctgttgaacaa

SEQ ID NO: 123782 - DNA, 25 bp, Saccharomyces pastorianus
atttccaccatgtattctactttcc

SEQ ID NO: 123783 - DNA, 25 bp, Saccharomyces pastorianus
caatccctccttgaactttagatgg

SEQ ID NO: 123784 - DNA, 25 bp, Saccharomyces pastorianus
gtctggaatccagccttcgacatta

SEQ ID NO: 123785 - DNA, 25 bp, Saccharomyces pastorianus
gtggaagaacgtaaccctgaggaat

SEQ ID NO: 123786 - DNA, 25 bp, Saccharomyces pastorianus
gtccaattccaatcaaagcagcatt

SEQ ID NO: 123787 - DNA, 25 bp, Saccharomyces pastorianus
aaggattcacttgctaaaaccgaca

SEQ ID NO: 123788 - DNA, 25 bp, Saccharomyces pastorianus
gccaatcactggaaaggtcggtatt

SEQ ID NO: 123789 - DNA, 25 bp, Saccharomyces pastorianus
ttactgatagttccatcgcgtatag

SEQ ID NO: 123790 - DNA, 25 bp, Saccharomyces pastorianus
tcggtattgcccctcttgaaatcaa

SEQ ID NO: 123791 - DNA, 25 bp, Saccharomyces pastorianus
atgggccatgtcttcccactggaaa

SEQ ID NO: 123792 - DNA, 25 bp, Saccharomyces pastorianus
gtaaccgaaactggcgatgacatta

SEQ ID NO: 123793 - DNA, 25 bp, Saccharomyces pastorianus
ggcagactcgggattggacaatgaa

SEQ ID NO: 123794 - DNA, 25 bp, Saccharomyces pastorianus
cttcgacattactccacatgagctt

SEQ ID NO: 123795 - DNA, 25 bp, Saccharomyces pastorianus
atttgcccaaactagctgaatacgc

SEQ ID NO: 123796 - DNA, 25 bp, Saccharomyces pastorianus
accaaggtatggctctgtttatttc

SEQ ID NO: 123797 - DNA, 25 bp, Saccharomyces pastorianus
tacgcttatatcactgacggcgcgg

SEQ ID NO: 123798 - DNA, 25 bp, Saccharomyces pastorianus
agtcaaagacatcgctagttccaaa

SEQ ID NO: 123799 - DNA, 25 bp, Saccharomyces pastorianus
ttattggcagttacctcacttttca

SEQ ID NO: 123800 - DNA, 25 bp, Saccharomyces pastorianus
tttagagtatgcctactgctgccac

SEQ ID NO: 123801 - DNA, 25 bp, Saccharomyces pastorianus
aaatgttcatgctcacttccttaga

SEQ ID NO: 123802 - DNA, 25 bp, Saccharomyces pastorianus
cagtctctctgcattgatctagtca

SEQ ID NO: 123803 - DNA, 25 bp, Saccharomyces pastorianus
gatgaagcgtttcagtctctctgca

SEQ ID NO: 123804 - DNA, 25 bp, Saccharomyces pastorianus
gacggcgcggcttctaaaaacgaca

SEQ ID NO: 123805 - DNA, 25 bp, Saccharomyces pastorianus
aattcattcatttacctccatctac

SEQ ID NO: 123806 - DNA, 25 bp, Saccharomyces pastorianus
gggcctactgtcgttacctaattga

SEQ ID NO: 123807 - DNA, 25 bp, Saccharomyces pastorianus
aggaccttgttattgctgattgcgc

SEQ ID NO: 123808 - DNA, 25 bp, Saccharomyces pastorianus
ctgattgcgcccgtaatgaactaaa

SEQ ID NO: 123809 - DNA, 25 bp, Saccharomyces pastorianus
tggtgtgatacttgcacgtcttcat

SEQ ID NO: 123810 - DNA, 25 bp, Saccharomyces pastorianus
ggcagacggcacattggaacgcaaa

SEQ ID NO: 123811 - DNA, 25 bp, Saccharomyces pastorianus
acgtcttcattttgctaccaagctg

SEQ ID NO: 123812 - DNA, 25 bp, Saccharomyces pastorianus
agccgcattgggatgcctacgtgaa

SEQ ID NO: 123813 - DNA, 25 bp, Saccharomyces pastorianus
gagaggtcccgcattaagggcctac

SEQ ID NO: 123814 - DNA, 25 bp, Saccharomyces pastorianus
gagtttgctgcgtcacaggtagtaa

SEQ ID NO: 123815 - DNA, 25 bp, Saccharomyces pastorianus
gaaatagttgtagccctcaaccctt

SEQ ID NO: 123816 - DNA, 25 bp, Saccharomyces pastorianus
gattctttggtgacgatctttgcaa

SEQ ID NO: 123817 - DNA, 25 bp, Saccharomyces pastorianus
aactgggttacttctctttgatggc

SEQ ID NO: 123818 - DNA, 25 bp, Saccharomyces pastorianus
ggcttctccgataggcttggtgtca

SEQ ID NO: 123819 - DNA, 25 bp, Saccharomyces pastorianus
ctatgttcttgtcttggtcgtccaa

SEQ ID NO: 123820 - DNA, 25 bp, Saccharomyces pastorianus
ttcttgctccctcaattgtttcaat

SEQ ID NO: 123821 - DNA, 25 bp, Saccharomyces pastorianus
tatcgtgcggtttaatgggccaggt

SEQ ID NO: 123822 - DNA, 25 bp, Saccharomyces pastorianus
tgctcttcttccttcataatttctt

SEQ ID NO: 123823 - DNA, 25 bp, Saccharomyces pastorianus
tggagcagccgcatctatgttcttg

SEQ ID NO: 123824 - DNA, 25 bp, Saccharomyces pastorianus
aatttttgcttagcggatgcctcat

SEQ ID NO: 123825 - DNA, 25 bp, Saccharomyces pastorianus
atgcggttttacgtctggagcagcc

SEQ ID NO: 123826 - DNA, 25 bp, Saccharomyces pastorianus
aactcatccttgacgctcacaatgg

SEQ ID NO: 123827 - DNA, 25 bp, Saccharomyces pastorianus
tcacaatggcgttctcttcttgctg

SEQ ID NO: 123828 - DNA, 25 bp, Saccharomyces pastorianus
gaaatagtcgacaagcgcccacaaa

SEQ ID NO: 123829 - DNA, 25 bp, Saccharomyces pastorianus
agtggcgccaaatttatcccaattc

SEQ ID NO: 123830 - DNA, 25 bp, Saccharomyces pastorianus
gtggctcttctatttccaaggttaa

SEQ ID NO: 123831 - DNA, 25 bp, Saccharomyces pastorianus
ggaaagtttttgacctgcgttgaag

SEQ ID NO: 123832 - DNA, 25 bp, Saccharomyces pastorianus
gaccttggtcaggttcctgcaggaa

SEQ ID NO: 123833 - DNA, 25 bp, Saccharomyces pastorianus
attactcttgcacaactggctttgg

SEQ ID NO: 123834 - DNA, 25 bp, Saccharomyces pastorianus
gatgatctccgaaggcgttattggc

SEQ ID NO: 123835 - DNA, 25 bp, Saccharomyces pastorianus
gaatcgttcgaagcgcttgctgaga

SEQ ID NO: 123836 - DNA, 25 bp, Saccharomyces pastorianus
tgaagtccaacgctgatatccctga

SEQ ID NO: 123837 - DNA, 25 bp, Saccharomyces pastorianus
aggagaggtctacccctacgaatcg

SEQ ID NO: 123838 - DNA, 25 bp, Saccharomyces pastorianus
gaagttccggaatacagtggcgcca

SEQ ID NO: 123839 - DNA, 25 bp, Saccharomyces pastorianus
gaggcggccaacgtggaaactacca

SEQ ID NO: 123840 - DNA, 25 bp, Saccharomyces pastorianus
ttgacacctttggacaagcttctgc

SEQ ID NO: 123841 - DNA, 25 bp, Saccharomyces pastorianus
aagatttcactctagaggccgcggt

SEQ ID NO: 123842 - DNA, 25 bp, Saccharomyces pastorianus
agagcactcctcaagacaccaatgt

SEQ ID NO: 123843 - DNA, 25 bp, Saccharomyces pastorianus
gacagaaaccgctactgctagtatg

SEQ ID NO: 123844 - DNA, 25 bp, Saccharomyces pastorianus
aatagatcaagtaatcgccctcctc

SEQ ID NO: 123845 - DNA, 25 bp, Saccharomyces pastorianus
aaaacgactcgtacagcagaccagc

SEQ ID NO: 123846 - DNA, 25 bp, Saccharomyces pastorianus
aatagtggcgcctatcagaaccaaa

SEQ ID NO: 123847 - DNA, 25 bp, Saccharomyces pastorianus
ccatctccacttctactgaaactaa

SEQ ID NO: 123848 - DNA, 25 bp, Saccharomyces pastorianus
aaatcgtcttttttcgacaccatct

SEQ ID NO: 123849 - DNA, 25 bp, Saccharomyces pastorianus
aatccaaccgcaatttcaaagtcga

SEQ ID NO: 123850 - DNA, 25 bp, Saccharomyces pastorianus
aaactggttggctggtctgctgtac

SEQ ID NO: 123851 - DNA, 25 bp, Saccharomyces pastorianus
aacattttttcttcttgccatctca

SEQ ID NO: 123852 - DNA, 25 bp, Saccharomyces pastorianus
gtgaaatcttggtctggcagaagct

SEQ ID NO: 123853 - DNA, 25 bp, Saccharomyces pastorianus
gttttggttctgataggcgccacta

SEQ ID NO: 123854 - DNA, 25 bp, Saccharomyces pastorianus
ggtgtcaacgttcaacattttttct

SEQ ID NO: 123855 - DNA, 25 bp, Saccharomyces pastorianus
gaccgcggcctctagagtgaaatct

SEQ ID NO: 123856 - DNA, 25 bp, Saccharomyces pastorianus
aggcgccactattattttggtagtt

SEQ ID NO: 123857 - DNA, 25 bp, Saccharomyces pastorianus
tctgctgtacgagtcgttttggttc

SEQ ID NO: 123858 - DNA, 25 bp, Saccharomyces pastorianus
tctgtttcccctataatttccacgc

SEQ ID NO: 123859 - DNA, 25 bp, Saccharomyces pastorianus
ttggtagtttccacgttggccgcct

SEQ ID NO: 123860 - DNA, 25 bp, Saccharomyces pastorianus
gaagcttgtccaaaggtgtcaacgt

SEQ ID NO: 123861 - DNA, 25 bp, Saccharomyces pastorianus
atgggtctctgccatcttttgagat

SEQ ID NO: 123862 - DNA, 25 bp, Saccharomyces pastorianus
agtccaagcgtgtcgaagctcaact

SEQ ID NO: 123863 - DNA, 25 bp, Saccharomyces pastorianus
agacctattattggtgcttcagata

SEQ ID NO: 123864 - DNA, 25 bp, Saccharomyces pastorianus
aagtctggtgaagatcctacctctc

SEQ ID NO: 123865 - DNA, 25 bp, Saccharomyces pastorianus
aacttggcagacaccattttggata

SEQ ID NO: 123866 - DNA, 25 bp, Saccharomyces pastorianus
tacctctcgtggttcttcggtacaa

SEQ ID NO: 123867 - DNA, 25 bp, Saccharomyces pastorianus
gtaaccttagcgcagtacctacaaa

SEQ ID NO: 123868 - DNA, 25 bp, Saccharomyces pastorianus
gttggaacccttacctgatgggtct

SEQ ID NO: 123869 - DNA, 25 bp, Saccharomyces pastorianus
gcagctttaaacgatctaccagtga

SEQ ID NO: 123870 - DNA, 25 bp, Saccharomyces pastorianus
agtatgcccctgtgagtaaccttag

SEQ ID NO: 123871 - DNA, 25 bp, Saccharomyces pastorianus
agtcactctttgcagctttaaacga

SEQ ID NO: 123872 - DNA, 25 bp, Saccharomyces pastorianus
aaacaggccgcttatgtggctgcgt

SEQ ID NO: 123873 - DNA, 25 bp, Saccharomyces pastorianus
aaccttgaaacaggccgcttatgtg

SEQ ID NO: 123874 - DNA, 25 bp, Saccharomyces pastorianus
atgtggctgcgtttctttgggtttc

SEQ ID NO: 123875 - DNA, 25 bp, Saccharomyces pastorianus
tcaacaggaagtctccgaagaggag

SEQ ID NO: 123876 - DNA, 25 bp, Saccharomyces pastorianus
gaaaaccttgaaacaggccgcttat

SEQ ID NO: 123877 - DNA, 25 bp, Saccharomyces pastorianus
gtttggtctacctcaacaggaagtc

SEQ ID NO: 123878 - DNA, 25 bp, Saccharomyces pastorianus
gagaaaaccttgaaacaggccgctt

SEQ ID NO: 123879 - DNA, 25 bp, Saccharomyces pastorianus
aggccgcttatgtggctgcgtttct

SEQ ID NO: 123880 - DNA, 25 bp, Saccharomyces pastorianus
acctcaacaggaagtctccgaagag

SEQ ID NO: 123881 - DNA, 25 bp, Saccharomyces pastorianus
atgtttggtctacctcaacaggaag

SEQ ID NO: 123882 - DNA, 25 bp, Saccharomyces pastorianus
tgcgtttctttgggtttccccaatg

SEQ ID NO: 123883 - DNA, 25 bp, Saccharomyces pastorianus
aagcctccttcttttatcggctgga

SEQ ID NO: 123884 - DNA, 25 bp, Saccharomyces pastorianus
attagcttcgcttttcaggttctcc

SEQ ID NO: 123885 - DNA, 25 bp, Saccharomyces pastorianus
ttcttcagattccaatgcgtcttct

SEQ ID NO: 123886 - DNA, 25 bp, Saccharomyces pastorianus
aatatctgaagactcggccttgctg

SEQ ID NO: 123887 - DNA, 25 bp, Saccharomyces pastorianus
tggatctgtgatttcttcgtctact

SEQ ID NO: 123888 - DNA, 25 bp, Saccharomyces pastorianus
tactcgtcgattgttctttccttga

SEQ ID NO: 123889 - DNA, 25 bp, Saccharomyces pastorianus
gacggattaacttctcctttggatc

SEQ ID NO: 123890 - DNA, 25 bp, Saccharomyces pastorianus
aggttctccagatattgctttgcaa

SEQ ID NO: 123891 - DNA, 25 bp, Saccharomyces pastorianus
aaatctttttcttcagcgttcctat

SEQ ID NO: 123892 - DNA, 25 bp, Saccharomyces pastorianus
gctgttcagcaacgtcttcttttaa

SEQ ID NO: 123893 - DNA, 25 bp, Saccharomyces pastorianus
acttctagttgttcatcttcgtttg

SEQ ID NO: 123894 - DNA, 25 bp, Saccharomyces pastorianus
gttgctaggtgaattatctggcgct

SEQ ID NO: 123895 - DNA, 25 bp, Saccharomyces pastorianus
cagactcggtagatggattgcaaat

SEQ ID NO: 123896 - DNA, 25 bp, Saccharomyces pastorianus
gagccctctttcaatgacatttcgg

SEQ ID NO: 123897 - DNA, 25 bp, Saccharomyces pastorianus
ttggatcacatctctttacgctatt

SEQ ID NO: 123898 - DNA, 25 bp, Saccharomyces pastorianus
ttgccaaagaacacagactcggtag

SEQ ID NO: 123899 - DNA, 25 bp, Saccharomyces pastorianus
agaggcacctttgtttttctgcgag

SEQ ID NO: 123900 - DNA, 25 bp, Saccharomyces pastorianus
gattctcactttataacaggctccg

SEQ ID NO: 123901 - DNA, 25 bp, Saccharomyces pastorianus
atctggcgctaaaggtgtagttacc

SEQ ID NO: 123902 - DNA, 25 bp, Saccharomyces pastorianus
gaaattgctacaaccattttggatc

SEQ ID NO: 123903 - DNA, 25 bp, Saccharomyces pastorianus
taacaggctccgataatggtaatat

SEQ ID NO: 123904 - DNA, 25 bp, Saccharomyces pastorianus
atggtattttacctgagccctcttt

SEQ ID NO: 123905 - DNA, 25 bp, Saccharomyces pastorianus
attccgggtgtccatctaagagtca

SEQ ID NO: 123906 - DNA, 25 bp, Saccharomyces pastorianus
tattgtgctgtggtcacggccatca

SEQ ID NO: 123907 - DNA, 25 bp, Saccharomyces pastorianus
tattagctgaacacggtatcgccgg

SEQ ID NO: 123908 - DNA, 25 bp, Saccharomyces pastorianus
gcaatggcgctaattctgcgtctga

SEQ ID NO: 123909 - DNA, 25 bp, Saccharomyces pastorianus
gggattgatttttaacgctctattt

SEQ ID NO: 123910 - DNA, 25 bp, Saccharomyces pastorianus
gcctagctcgggttgtattactcta

SEQ ID NO: 123911 - DNA, 25 bp, Saccharomyces pastorianus
cggccatcatttgcttcgtattagg

SEQ ID NO: 123912 - DNA, 25 bp, Saccharomyces pastorianus
aaaactcctcattgtcatcagctac

SEQ ID NO: 123913 - DNA, 25 bp, Saccharomyces pastorianus
gtattactctatatggctctttgat

SEQ ID NO: 123914 - DNA, 25 bp, Saccharomyces pastorianus
aaattgcctatatcggtgcctctgc

SEQ ID NO: 123915 - DNA, 25 bp, Saccharomyces pastorianus
tgcgtctgagacaaatcctactgag

SEQ ID NO: 123916 - DNA, 25 bp, Saccharomyces pastorianus
gagaattcatcaacttcatcctcgc

SEQ ID NO: 123917 - DNA, 25 bp, Saccharomyces pastorianus
attttatgtttgctgagggtacctc

SEQ ID NO: 123918 - DNA, 25 bp, Saccharomyces pastorianus
tgaaccccgcaatggccaaaactaa

SEQ ID NO: 123919 - DNA, 25 bp, Saccharomyces pastorianus
catcctcgctggtgggttagatata

SEQ ID NO: 123920 - DNA, 25 bp, Saccharomyces pastorianus
cctgttacgttgttggtgccatcca

SEQ ID NO: 123921 - DNA, 25 bp, Saccharomyces pastorianus
gtacctcacctttagatgctttttc

SEQ ID NO: 123922 - DNA, 25 bp, Saccharomyces pastorianus
aggaattcatagacccttcaataac

SEQ ID NO: 123923 - DNA, 25 bp, Saccharomyces pastorianus
cagagctatctcaattgggcaatac

SEQ ID NO: 123924 - DNA, 25 bp, Saccharomyces pastorianus
gagccacaagtactctcggataatt

SEQ ID NO: 123925 - DNA, 25 bp, Saccharomyces pastorianus
ttttcagtggtgttattagctcagg

SEQ ID NO: 123926 - DNA, 25 bp, Saccharomyces pastorianus
tatggccacgaggtagcagagctat

SEQ ID NO: 123927 - DNA, 25 bp, Saccharomyces pastorianus
gattagccgctgaactgagagccca

SEQ ID NO: 123928 - DNA, 25 bp, Saccharomyces pastorianus
gtaccaatatttgctacagggtttg

SEQ ID NO: 123929 - DNA, 25 bp, Saccharomyces pastorianus
aaagccgcccattgtagtaccaata

SEQ ID NO: 123930 - DNA, 25 bp, Saccharomyces pastorianus
gaaggtaaatcggacccagatgtta

SEQ ID NO: 123931 - DNA, 25 bp, Saccharomyces pastorianus
taccacgcgaagaccctaggttcaa

SEQ ID NO: 123932 - DNA, 25 bp, Saccharomyces pastorianus
aaatgaagttcgcaaattaccacgc

SEQ ID NO: 123933 - DNA, 25 bp, Saccharomyces pastorianus
tccccgcccataataaggtcgaagc

SEQ ID NO: 123934 - DNA, 25 bp, Saccharomyces pastorianus
gggtattaccagaatgatcctagaa

SEQ ID NO: 123935 - DNA, 25 bp, Saccharomyces pastorianus
gaagcggttcaacaccacggaaggt

SEQ ID NO: 123936 - DNA, 25 bp, Saccharomyces pastorianus
aactgagagcccatgttgctgaaat

SEQ ID NO: 123937 - DNA, 25 bp, Saccharomyces pastorianus
atatccgccttttgaaaattcgatg

SEQ ID NO: 123938 - DNA, 25 bp, Saccharomyces pastorianus
tgtaaacatttcaccaagctcctct

SEQ ID NO: 123939 - DNA, 25 bp, Saccharomyces pastorianus
aatcttgttgatttggccggttccg

SEQ ID NO: 123940 - DNA, 25 bp, Saccharomyces pastorianus
aagacatataccgttcaggaactca

SEQ ID NO: 123941 - DNA, 25 bp, Saccharomyces pastorianus
agcatcaaatgagcattcctcccgt

SEQ ID NO: 123942 - DNA, 25 bp, Saccharomyces pastorianus
caccaagctcctctcatattaatga

SEQ ID NO: 123943 - DNA, 25 bp, Saccharomyces pastorianus
aaattaagatccaccgctagcacag

SEQ ID NO: 123944 - DNA, 25 bp, Saccharomyces pastorianus
acctactgcaatattcactcactgg

SEQ ID NO: 123945 - DNA, 25 bp, Saccharomyces pastorianus
taagttgcttaggtgacgttattca

SEQ ID NO: 123946 - DNA, 25 bp, Saccharomyces pastorianus
attcatgctttaggtcagccggata

SEQ ID NO: 123947 - DNA, 25 bp, Saccharomyces pastorianus
ctcccgttcacacagtattttcata

SEQ ID NO: 123948 - DNA, 25 bp, Saccharomyces pastorianus
ggagcacactcgtatggcacactaa

SEQ ID NO: 123949 - DNA, 25 bp, Saccharomyces pastorianus
tatgtactgattttccttcggcttc

SEQ ID NO: 123950 - DNA, 25 bp, Saccharomyces pastorianus
ttatccttagtgtctactctgtgct

SEQ ID NO: 123951 - DNA, 25 bp, Saccharomyces pastorianus
ttcttcagcatcactttgttcgtta

SEQ ID NO: 123952 - DNA, 25 bp, Saccharomyces pastorianus
gcatctgtttattacctttccttat

SEQ ID NO: 123953 - DNA, 25 bp, Saccharomyces pastorianus
ccggctcattacttaactcttggtt

SEQ ID NO: 123954 - DNA, 25 bp, Saccharomyces pastorianus
gcttcatcaccttccattattgtat

SEQ ID NO: 123955 - DNA, 25 bp, Saccharomyces pastorianus
cggcttctctatcactttattcata

SEQ ID NO: 123956 - DNA, 25 bp, Saccharomyces pastorianus
ttattgtatctttttccggctcatt

SEQ ID NO: 123957 - DNA, 25 bp, Saccharomyces pastorianus
ttggttgccactattccttttttca

SEQ ID NO: 123958 - DNA, 25 bp, Saccharomyces pastorianus
aattctgcattctttctggttcttt

SEQ ID NO: 123959 - DNA, 25 bp, Saccharomyces pastorianus
ttttttcacgcccaaattctgcatt

SEQ ID NO: 123960 - DNA, 25 bp, Saccharomyces pastorianus
gatagctcaaaaaggtgccgtgaaa

SEQ ID NO: 123961 - DNA, 25 bp, Saccharomyces pastorianus
ttctgctgcagtaaatgctatttta

SEQ ID NO: 123962 - DNA, 25 bp, Saccharomyces pastorianus
gaaagcatacgacaggaaggacccc

SEQ ID NO: 123963 - DNA, 25 bp, Saccharomyces pastorianus
gatattattccaattgcttccggag

SEQ ID NO: 123964 - DNA, 25 bp, Saccharomyces pastorianus
gacagcgctcagaaagatagctcaa

SEQ ID NO: 123965 - DNA, 25 bp, Saccharomyces pastorianus
aatagctctagcgatgaatcatcta

SEQ ID NO: 123966 - DNA, 25 bp, Saccharomyces pastorianus
ttaacgccattttagcaactcaagt

SEQ ID NO: 123967 - DNA, 25 bp, Saccharomyces pastorianus
gtccttgagaaggagacagcgctca

SEQ ID NO: 123968 - DNA, 25 bp, Saccharomyces pastorianus
ggaaggaccccatcatggctagaaa

SEQ ID NO: 123969 - DNA, 25 bp, Saccharomyces pastorianus
atggttctactggattttctgctgc

SEQ ID NO: 123970 - DNA, 25 bp, Saccharomyces pastorianus
gaagaggacgacgacttcccaagaa

SEQ ID NO: 123971 - DNA, 25 bp, Saccharomyces pastorianus
gtagatcccttcgatgttcatgaat

SEQ ID NO: 123972 - DNA, 25 bp, Saccharomyces pastorianus
agacacctgaccaagtggcgaactt

SEQ ID NO: 123973 - DNA, 25 bp, Saccharomyces pastorianus
atcatcctaatgtagccacgttggc

SEQ ID NO: 123974 - DNA, 25 bp, Saccharomyces pastorianus
atcaacacatttatccgcccattta

SEQ ID NO: 123975 - DNA, 25 bp, Saccharomyces pastorianus
cgcccatttagtagcatctttcatc

SEQ ID NO: 123976 - DNA, 25 bp, Saccharomyces pastorianus
gttaactcatgcactggattcctct

SEQ ID NO: 123977 - DNA, 25 bp, Saccharomyces pastorianus
gattcctctctgtgggagctggcgt

SEQ ID NO: 123978 - DNA, 25 bp, Saccharomyces pastorianus
ggaactatgattctttgctcaatgc

SEQ ID NO: 123979 - DNA, 25 bp, Saccharomyces pastorianus
gagctggcgtcattgatggaacatt

SEQ ID NO: 123980 - DNA, 25 bp, Saccharomyces pastorianus
tgaatcggaccctgagttaactcat

SEQ ID NO: 123981 - DNA, 25 bp, Saccharomyces pastorianus
ccgtgattcccttcatctataattt

SEQ ID NO: 123982 - DNA, 25 bp, Saccharomyces pastorianus
tggttatcaggcagtactatctaca

SEQ ID NO: 123983 - DNA, 25 bp, Saccharomyces pastorianus
ggcagtttgttcgtcaatctctagg

SEQ ID NO: 123984 - DNA, 25 bp, Saccharomyces pastorianus
ttccaccattggctcatgtagtatc

SEQ ID NO: 123985 - DNA, 25 bp, Saccharomyces pastorianus
aatgacagcggcacttcgttatatt

SEQ ID NO: 123986 - DNA, 25 bp, Saccharomyces pastorianus
ggtctcgttacaccaactgtgatgg

SEQ ID NO: 123987 - DNA, 25 bp, Saccharomyces pastorianus
tgatggacattcacacctcggagat

SEQ ID NO: 123988 - DNA, 25 bp, Saccharomyces pastorianus
gaccagatcacatttgtcggattat

SEQ ID NO: 123989 - DNA, 25 bp, Saccharomyces pastorianus
gaacttctatttggtttctcttcag

SEQ ID NO: 123990 - DNA, 25 bp, Saccharomyces pastorianus
ttctcttcagtagcaacgaccattg

SEQ ID NO: 123991 - DNA, 25 bp, Saccharomyces pastorianus
taacaaattggttggctccgtacaa

SEQ ID NO: 123992 - DNA, 25 bp, Saccharomyces pastorianus
aatctctaggattagctgcccagga

SEQ ID NO: 123993 - DNA, 25 bp, Saccharomyces pastorianus
tagccctagctgataacattctacg

SEQ ID NO: 123994 - DNA, 25 bp, Saccharomyces pastorianus
ggttatttccatcggtttaatcagt

SEQ ID NO: 123995 - DNA, 25 bp, Saccharomyces pastorianus
caacataggcacagctccagagtaa

SEQ ID NO: 123996 - DNA, 25 bp, Saccharomyces pastorianus
atgtagacaagctcaagccgctgtt

SEQ ID NO: 123997 - DNA, 25 bp, Saccharomyces pastorianus
tggcatggccactagttttgttcac

SEQ ID NO: 123998 - DNA, 25 bp, Saccharomyces pastorianus
cagtgttggccgttggtatcagagc

SEQ ID NO: 123999 - DNA, 25 bp, Saccharomyces pastorianus
tgccatctttttggctaagaccctg

SEQ ID NO: 124000 - DNA, 25 bp, Saccharomyces pastorianus
gttttgttcacactggactttttga

SEQ ID NO: 124001 - DNA, 25 bp, Saccharomyces pastorianus
gaactttgtgttcactttcactgcc

SEQ ID NO: 124002 - DNA, 25 bp, Saccharomyces pastorianus
gattactcaaggttccggtaccaga

SEQ ID NO: 124003 - DNA, 25 bp, Saccharomyces pastorianus
actactgtatgtttgcttgtgcata

SEQ ID NO: 124004 - DNA, 25 bp, Saccharomyces pastorianus
aagagattttctgcgattgcctacg

SEQ ID NO: 124005 - DNA, 25 bp, Saccharomyces pastorianus
gattgcctacgggatcacgaacgag

SEQ ID NO: 124006 - DNA, 25 bp, Saccharomyces pastorianus
atcgaccgatggcaaacacttctga

SEQ ID NO: 124007 - DNA, 25 bp, Saccharomyces pastorianus
gaggtcgggccatcaagccggttta

SEQ ID NO: 124008 - DNA, 25 bp, Saccharomyces pastorianus
tggtgacggaaccacgctactacgt

SEQ ID NO: 124009 - DNA, 25 bp, Saccharomyces pastorianus
agcacccgcggacagtagtagtata

SEQ ID NO: 124010 - DNA, 25 bp, Saccharomyces pastorianus
agacaaattcgtttcccaactgctg

SEQ ID NO: 124011 - DNA, 25 bp, Saccharomyces pastorianus
cagtcgaatcgctgcgtcaggacaa

SEQ ID NO: 124012 - DNA, 25 bp, Saccharomyces pastorianus
gtggcaatgccaccgctgaagaaag

SEQ ID NO: 124013 - DNA, 25 bp, Saccharomyces pastorianus
agcacaggtgttgtgtcagcccaat

SEQ ID NO: 124014 - DNA, 25 bp, Saccharomyces pastorianus
ctactacgtcgtgggcattctggag

SEQ ID NO: 124015 - DNA, 25 bp, Saccharomyces pastorianus
ttcaaggcttgacgactggtacagt

SEQ ID NO: 124016 - DNA, 25 bp, Saccharomyces pastorianus
gcggtagtccaaatccttttcgatg

SEQ ID NO: 124017 - DNA, 25 bp, Saccharomyces pastorianus
gtgcattttacgttactgctggtgt

SEQ ID NO: 124018 - DNA, 25 bp, Saccharomyces pastorianus
ttcgctgtactggactttgatcttt

SEQ ID NO: 124019 - DNA, 25 bp, Saccharomyces pastorianus
ctggcccatcaacaactcgaagtat

SEQ ID NO: 124020 - DNA, 25 bp, Saccharomyces pastorianus
atggatattcgtcatgtacgtctta

SEQ ID NO: 124021 - DNA, 25 bp, Saccharomyces pastorianus
ttccctgtgctcagatcattcgtaa

SEQ ID NO: 124022 - DNA, 25 bp, Saccharomyces pastorianus
ggtgtgtatgctagcttgacccata

SEQ ID NO: 124023 - DNA, 25 bp, Saccharomyces pastorianus
gatatgtaacgccaaaattcccctc

SEQ ID NO: 124024 - DNA, 25 bp, Saccharomyces pastorianus
gtacgtcttatacggaggcgttcaa

SEQ ID NO: 124025 - DNA, 25 bp, Saccharomyces pastorianus
tttctatgtctacatgggtcccact

SEQ ID NO: 124026 - DNA, 25 bp, Saccharomyces pastorianus
ttttgatcccgcgttcaagaaagaa

SEQ ID NO: 124027 - DNA, 25 bp, Saccharomyces pastorianus
agaccctattctattgagtactaaa

SEQ ID NO: 124028 - DNA, 25 bp, Saccharomyces pastorianus
gcggacgccgatgaggaacacttaa

SEQ ID NO: 124029 - DNA, 25 bp, Saccharomyces pastorianus
tgtcaaactaggcaatgtctggtct

SEQ ID NO: 124030 - DNA, 25 bp, Saccharomyces pastorianus
gagttgtagcattatctccggcttt

SEQ ID NO: 124031 - DNA, 25 bp, Saccharomyces pastorianus
acgggtggattagtcaggtctttat

SEQ ID NO: 124032 - DNA, 25 bp, Saccharomyces pastorianus
ttgactccggagctcatataaatgt

SEQ ID NO: 124033 - DNA, 25 bp, Saccharomyces pastorianus
ggtggataccaatcttgactccgga

SEQ ID NO: 124034 - DNA, 25 bp, Saccharomyces pastorianus
attctaaacaaggtgcggacgccga

SEQ ID NO: 124035 - DNA, 25 bp, Saccharomyces pastorianus
gaaacacaactacatcatccgataa

SEQ ID NO: 124036 - DNA, 25 bp, Saccharomyces pastorianus
tagtgattcgacgtctaacagcccc

SEQ ID NO: 124037 - DNA, 25 bp, Saccharomyces pastorianus
gcttacagaatgatagcgccgttaa

SEQ ID NO: 124038 - DNA, 25 bp, Saccharomyces pastorianus
accagtcttacataatttctctcca

SEQ ID NO: 124039 - DNA, 25 bp, Saccharomyces pastorianus
tagggtttcaacatctcacaatcag

SEQ ID NO: 124040 - DNA, 25 bp, Saccharomyces pastorianus
gtggaacaagcatgtctgcagacag

SEQ ID NO: 124041 - DNA, 25 bp, Saccharomyces pastorianus
cagggaattctccttcaataacata

SEQ ID NO: 124042 - DNA, 25 bp, Saccharomyces pastorianus
agtacctttcaatggcaatggctta

SEQ ID NO: 124043 - DNA, 25 bp, Saccharomyces pastorianus
attattcgacgactatcacctagaa

SEQ ID NO: 124044 - DNA, 25 bp, Saccharomyces pastorianus
gccaatgatcacttttacagggaat

SEQ ID NO: 124045 - DNA, 25 bp, Saccharomyces pastorianus
tgccaaccacacttttctgtacgaa

SEQ ID NO: 124046 - DNA, 25 bp, Saccharomyces pastorianus
ggagaaactggaccccaacaatatt

SEQ ID NO: 124047 - DNA, 25 bp, Saccharomyces pastorianus
gaattatcacgcttgacaaacggta

SEQ ID NO: 124048 - DNA, 25 bp, Saccharomyces pastorianus
cggtgagtacggtggctactttcaa

SEQ ID NO: 124049 - DNA, 25 bp, Saccharomyces pastorianus
ggtgatactccaacttatactattc

SEQ ID NO: 124050 - DNA, 25 bp, Saccharomyces pastorianus
tatagcctctcaatccttgcaaatt

SEQ ID NO: 124051 - DNA, 25 bp, Saccharomyces pastorianus
tgatatctggtacatgcctgactat

SEQ ID NO: 124052 - DNA, 25 bp, Saccharomyces pastorianus
ggcggtccatttcaacaagccgtgt

SEQ ID NO: 124053 - DNA, 25 bp, Saccharomyces pastorianus
aaccaagtaatgctatatccgtgac

SEQ ID NO: 124054 - DNA, 25 bp, Saccharomyces pastorianus
gtgtctgctgtctcaactttgaacg

SEQ ID NO: 124055 - DNA, 25 bp, Saccharomyces pastorianus
tccgtgacatgcgatccaagtgact

SEQ ID NO: 124056 - DNA, 25 bp, Saccharomyces pastorianus
tgctaaagccttacatcctgatggt

SEQ ID NO: 124057 - DNA, 25 bp, Saccharomyces pastorianus
tgaacacttatactggcggtccatt

SEQ ID NO: 124058 - DNA, 25 bp, Saccharomyces pastorianus
ctacttgggaagatgctggttacac

SEQ ID NO: 124059 - DNA, 25 bp, Saccharomyces pastorianus
atgagtatggtatctttgctcaaaa

SEQ ID NO: 124060 - DNA, 25 bp, Saccharomyces pastorianus
ggtatctttgctcaaaagattattg

SEQ ID NO: 124061 - DNA, 25 bp, Saccharomyces pastorianus
acgttatgagtatggtatctttgct

SEQ ID NO: 124062 - DNA, 25 bp, Saccharomyces pastorianus
gtctacgttatgagtatggtatctt

SEQ ID NO: 124063 - DNA, 25 bp, Saccharomyces pastorianus
ggtctacgttatgagtatggtatct

SEQ ID NO: 124064 - DNA, 25 bp, Saccharomyces pastorianus
gttatgagtatggtatctttgctca

SEQ ID NO: 124065 - DNA, 25 bp, Saccharomyces pastorianus
atggtatctttgctcaaaagattat

SEQ ID NO: 124066 - DNA, 25 bp, Saccharomyces pastorianus
atggtctacgttatgagtatggtat

SEQ ID NO: 124067 - DNA, 25 bp, Saccharomyces pastorianus
tatgagtatggtatctttgctcaaa

SEQ ID NO: 124068 - DNA, 25 bp, Saccharomyces pastorianus
gagtatggtatctttgctcaaaaga

SEQ ID NO: 124069 - DNA, 25 bp, Saccharomyces pastorianus
gtatggtatctttgctcaaaagatt

SEQ ID NO: 124070 - DNA, 25 bp, Saccharomyces pastorianus
taaggtttatcggtgactccgttgc

SEQ ID NO: 124071 - DNA, 25 bp, Saccharomyces pastorianus
gaatctgtttccagcccaattgaac

SEQ ID NO: 124072 - DNA, 25 bp, Saccharomyces pastorianus
tttgcctgcaggtaagtcattggtg

SEQ ID NO: 124073 - DNA, 25 bp, Saccharomyces pastorianus
ttgccgccattggtatcccggtaaa

SEQ ID NO: 124074 - DNA, 25 bp, Saccharomyces pastorianus
tgataaattcactgacggcggcctg

SEQ ID NO: 124075 - DNA, 25 bp, Saccharomyces pastorianus
aagacagcgccgtggtatcttccaa

SEQ ID NO: 124076 - DNA, 25 bp, Saccharomyces pastorianus
ggcggcctgtttactctgtttgtaa

SEQ ID NO: 124077 - DNA, 25 bp, Saccharomyces pastorianus
gcaaggacttatcccctgcaataaa

SEQ ID NO: 124078 - DNA, 25 bp, Saccharomyces pastorianus
aaagcctccctagctcaatatgaag

SEQ ID NO: 124079 - DNA, 25 bp, Saccharomyces pastorianus
gagtcactgttaagcactttgcctg

SEQ ID NO: 124080 - DNA, 25 bp, Saccharomyces pastorianus
ggcttagtcagctcggctaaacttg

SEQ ID NO: 124081 - DNA, 25 bp, Saccharomyces pastorianus
atccaatttgtctacgacgaagctg

SEQ ID NO: 124082 - DNA, 25 bp, Saccharomyces pastorianus
ttatgaagtctcttttcccgatgac

SEQ ID NO: 124083 - DNA, 25 bp, Saccharomyces pastorianus
gcagccgtagctgtggaaagttcga

SEQ ID NO: 124084 - DNA, 25 bp, Saccharomyces pastorianus
gaagctgataaactgggcacaccaa

SEQ ID NO: 124085 - DNA, 25 bp, Saccharomyces pastorianus
aatttcggcagattcctagatccta

SEQ ID NO: 124086 - DNA, 25 bp, Saccharomyces pastorianus
agctcagctgctatacgtcaaggtc

SEQ ID NO: 124087 - DNA, 25 bp, Saccharomyces pastorianus
atacgtcaaggtcggctataaagcc

SEQ ID NO: 124088 - DNA, 25 bp, Saccharomyces pastorianus
tcccgatgacttggacgatttcaat

SEQ ID NO: 124089 - DNA, 25 bp, Saccharomyces pastorianus
accatatgactacttgggatttcaa

SEQ ID NO: 124090 - DNA, 25 bp, Saccharomyces pastorianus
cgcgggcggcaaactaatccaattt

SEQ ID NO: 124091 - DNA, 25 bp, Saccharomyces pastorianus
agtcaaaccatagagctcagctgct

SEQ ID NO: 124092 - DNA, 25 bp, Saccharomyces pastorianus
attatcattttctttgctgtccaat

SEQ ID NO: 124093 - DNA, 25 bp, Saccharomyces pastorianus
gttgataggcgcatgcattggcata

SEQ ID NO: 124094 - DNA, 25 bp, Saccharomyces pastorianus
aaagacttttgcacacctcatcaaa

SEQ ID NO: 124095 - DNA, 25 bp, Saccharomyces pastorianus
atggcgttggctatcctctaaagaa

SEQ ID NO: 124096 - DNA, 25 bp, Saccharomyces pastorianus
gagccctccatataacctgatgtat

SEQ ID NO: 124097 - DNA, 25 bp, Saccharomyces pastorianus
aatacagttccgtatgctggtgccg

SEQ ID NO: 124098 - DNA, 25 bp, Saccharomyces pastorianus
aacgcaaaattcacctgtcctgatg

SEQ ID NO: 124099 - DNA, 25 bp, Saccharomyces pastorianus
tgtcctgatgctgtgacctactata

SEQ ID NO: 124100 - DNA, 25 bp, Saccharomyces pastorianus
caacgggcttggttttatcagctat

SEQ ID NO: 124101 - DNA, 25 bp, Saccharomyces pastorianus
ctactataatgcttccgttgtctgg

SEQ ID NO: 124102 - DNA, 25 bp, Saccharomyces pastorianus
tttatcggcaggcttttcaacgggc

SEQ ID NO: 124103 - DNA, 25 bp, Saccharomyces pastorianus
attgccattggaatagggcctcaag

SEQ ID NO: 124104 - DNA, 25 bp, Saccharomyces pastorianus
aagctagcaggagtgtgccgtacca

SEQ ID NO: 124105 - DNA, 25 bp, Saccharomyces pastorianus
gaggcagcagcacttaacgtctgat

SEQ ID NO: 124106 - DNA, 25 bp, Saccharomyces pastorianus
actcgggccttgcaatacaatcatc

SEQ ID NO: 124107 - DNA, 25 bp, Saccharomyces pastorianus
ttctctcatccctcttttagtggaa

SEQ ID NO: 124108 - DNA, 25 bp, Saccharomyces pastorianus
gtgacggcacggtaacaacttttcg

SEQ ID NO: 124109 - DNA, 25 bp, Saccharomyces pastorianus
caacaaaagcgtcattggtgggttt

SEQ ID NO: 124110 - DNA, 25 bp, Saccharomyces pastorianus
aacttttcgtacgtggcatacgcaa

SEQ ID NO: 124111 - DNA, 25 bp, Saccharomyces pastorianus
gaaagcagcatctcaattgccattg

SEQ ID NO: 124112 - DNA, 25 bp, Saccharomyces pastorianus
gtgccgtaccacattctttgcaggg

SEQ ID NO: 124113 - DNA, 25 bp, Saccharomyces pastorianus
aggtaatgagacaaccggcggcgca

SEQ ID NO: 124114 - DNA, 25 bp, Saccharomyces pastorianus
atttgcctatctctagaccactgcg

SEQ ID NO: 124115 - DNA, 25 bp, Saccharomyces pastorianus
ctctagaccactgcgcctaaatgat

SEQ ID NO: 124116 - DNA, 25 bp, Saccharomyces pastorianus
tatctaagttcgttttctccctgaa

SEQ ID NO: 124117 - DNA, 25 bp, Saccharomyces pastorianus
ggcttggaatattttgtgcgatgta

SEQ ID NO: 124118 - DNA, 25 bp, Saccharomyces pastorianus
cagagtgctctaatcgatttgccta

SEQ ID NO: 124119 - DNA, 25 bp, Saccharomyces pastorianus
gatgtatctaagttcgttttctccc

SEQ ID NO: 124120 - DNA, 25 bp, Saccharomyces pastorianus
aaaggttttcaactaaatgtcagag

SEQ ID NO: 124121 - DNA, 25 bp, Saccharomyces pastorianus
gtgctctaatcgatttgcctatctc

SEQ ID NO: 124122 - DNA, 25 bp, Saccharomyces pastorianus
aatcgatttgcctatctctagacca

SEQ ID NO: 124123 - DNA, 25 bp, Saccharomyces pastorianus
ttcaactaaatgtcagagtgctcta

SEQ ID NO: 124124 - DNA, 25 bp, Saccharomyces pastorianus
ggaatattttgtgcgatgtatctaa

SEQ ID NO: 124125 - DNA, 25 bp, Saccharomyces pastorianus
aatacttttacgatgccttagctac

SEQ ID NO: 124126 - DNA, 25 bp, Saccharomyces pastorianus
gttcctgggaaatacttttacgatg

SEQ ID NO: 124127 - DNA, 25 bp, Saccharomyces pastorianus
ggttcctatactgaagactctctaa

SEQ ID NO: 124128 - DNA, 25 bp, Saccharomyces pastorianus
cttttacgatgccttagctaccaac

SEQ ID NO: 124129 - DNA, 25 bp, Saccharomyces pastorianus
ccaacagtgttaatggttcctatac

SEQ ID NO: 124130 - DNA, 25 bp, Saccharomyces pastorianus
gtaactgattccagactttctttgg

SEQ ID NO: 124131 - DNA, 25 bp, Saccharomyces pastorianus
gatgccttagctaccaacagtgtta

SEQ ID NO: 124132 - DNA, 25 bp, Saccharomyces pastorianus
ctttggatagttttcttgaggtgat

SEQ ID NO: 124133 - DNA, 25 bp, Saccharomyces pastorianus
gattccagactttctttggatagtt

SEQ ID NO: 124134 - DNA, 25 bp, Saccharomyces pastorianus
aagtattcactgttcctgggaaata

SEQ ID NO: 124135 - DNA, 25 bp, Saccharomyces pastorianus
gattaaagtattcactgttcctggg

SEQ ID NO: 124136 - DNA, 25 bp, Saccharomyces pastorianus
gatggtaatgtggttctttcctcca

SEQ ID NO: 124137 - DNA, 25 bp, Saccharomyces pastorianus
gaaggaattgtacagtgccgtcacc

SEQ ID NO: 124138 - DNA, 25 bp, Saccharomyces pastorianus
tatcccataggctgtacgaatctct

SEQ ID NO: 124139 - DNA, 25 bp, Saccharomyces pastorianus
tgccgtcaccgttgaattcctttga

SEQ ID NO: 124140 - DNA, 25 bp, Saccharomyces pastorianus
gcagggtttccatccaagacagtat

SEQ ID NO: 124141 - DNA, 25 bp, Saccharomyces pastorianus
gcctacatgtaacaccctcgatggt

SEQ ID NO: 124142 - DNA, 25 bp, Saccharomyces pastorianus
aactgctctcagtgtgtgttggaag

SEQ ID NO: 124143 - DNA, 25 bp, Saccharomyces pastorianus
gaattcctttgatcggtccttctat

SEQ ID NO: 124144 - DNA, 25 bp, Saccharomyces pastorianus
gacataccaggctattcttttgtaa

SEQ ID NO: 124145 - DNA, 25 bp, Saccharomyces pastorianus
tttcctccacatataattcccttga

SEQ ID NO: 124146 - DNA, 25 bp, Saccharomyces pastorianus
aacagcggcagcgagcatggtgatt

SEQ ID NO: 124147 - DNA, 25 bp, Saccharomyces pastorianus
ggtttatcggatactttctcaagtt

SEQ ID NO: 124148 - DNA, 25 bp, Saccharomyces pastorianus
gtctaggcaactcaagggcctaatt

SEQ ID NO: 124149 - DNA, 25 bp, Saccharomyces pastorianus
gatttccaagttgttgatcttcgaa

SEQ ID NO: 124150 - DNA, 25 bp, Saccharomyces pastorianus
ctcaagggcctaattgaaaatcaga

SEQ ID NO: 124151 - DNA, 25 bp, Saccharomyces pastorianus
ttatcggatactttctcaagttctc

SEQ ID NO: 124152 - DNA, 25 bp, Saccharomyces pastorianus
tcataacgtctaggcaactcaaggg

SEQ ID NO: 124153 - DNA, 25 bp, Saccharomyces pastorianus
gtaagtttcataacgtctaggcaac

SEQ ID NO: 124154 - DNA, 25 bp, Saccharomyces pastorianus
tcgaagagaagattttgcacgtgat

SEQ ID NO: 124155 - DNA, 25 bp, Saccharomyces pastorianus
aggaaggatttccaagttgttgatc

SEQ ID NO: 124156 - DNA, 25 bp, Saccharomyces pastorianus
ccaagttgttgatcttcgaagagaa

SEQ ID NO: 124157 - DNA, 25 bp, Saccharomyces pastorianus
gattttgcacgtgatcatattacaa

SEQ ID NO: 124158 - DNA, 25 bp, Saccharomyces pastorianus
tttctcatgaccacctgaatacttc

SEQ ID NO: 124159 - DNA, 25 bp, Saccharomyces pastorianus
ctgcaatattgtgctttgtcccatt

SEQ ID NO: 124160 - DNA, 25 bp, Saccharomyces pastorianus
gcatggtttttgaccttcgcattaa

SEQ ID NO: 124161 - DNA, 25 bp, Saccharomyces pastorianus
tttggcaatagtcgcgaggatcctt

SEQ ID NO: 124162 - DNA, 25 bp, Saccharomyces pastorianus
gtcccattggtgctttacttcttta

SEQ ID NO: 124163 - DNA, 25 bp, Saccharomyces pastorianus
tgaactatccctggcaattgctatt

SEQ ID NO: 124164 - DNA, 25 bp, Saccharomyces pastorianus
aagtctgtcggagtttttctcggca

SEQ ID NO: 124165 - DNA, 25 bp, Saccharomyces pastorianus
agatttatttctccatgggcaatga

SEQ ID NO: 124166 - DNA, 25 bp, Saccharomyces pastorianus
gacgcaatgtttcactatggcttca

SEQ ID NO: 124167 - DNA, 25 bp, Saccharomyces pastorianus
gggccgttgctagaagttccaattt

SEQ ID NO: 124168 - DNA, 25 bp, Saccharomyces pastorianus
ttttctcggcataccactgggaatt

SEQ ID NO: 124169 - DNA, 25 bp, Saccharomyces pastorianus
ggtgcggagttatctcaatttgctt

SEQ ID NO: 124170 - DNA, 25 bp, Saccharomyces pastorianus
gcccggtcgactctttgatttcgat

SEQ ID NO: 124171 - DNA, 25 bp, Saccharomyces pastorianus
tttggacttatgctgtagcggcttg

SEQ ID NO: 124172 - DNA, 25 bp, Saccharomyces pastorianus
aacggcatcatggtagtttcggagc

SEQ ID NO: 124173 - DNA, 25 bp, Saccharomyces pastorianus
cttcttcttgtctcagcgtgttata

SEQ ID NO: 124174 - DNA, 25 bp, Saccharomyces pastorianus
atctcaatttgcttctgattttaga

SEQ ID NO: 124175 - DNA, 25 bp, Saccharomyces pastorianus
tagtttcggagccagattcgccatt

SEQ ID NO: 124176 - DNA, 25 bp, Saccharomyces pastorianus
agattcgccattttccaactctaat

SEQ ID NO: 124177 - DNA, 25 bp, Saccharomyces pastorianus
tagaagctattctatgcccggtcga

SEQ ID NO: 124178 - DNA, 25 bp, Saccharomyces pastorianus
tctcagcgtgttatatttggactta

SEQ ID NO: 124179 - DNA, 25 bp, Saccharomyces pastorianus
gatttcgatcccaaacggcatcatg

SEQ ID NO: 124180 - DNA, 25 bp, Saccharomyces pastorianus
aataccaatatgtccgatccggctt

SEQ ID NO: 124181 - DNA, 25 bp, Saccharomyces pastorianus
gttcactttccggatcaagggcatt

SEQ ID NO: 124182 - DNA, 25 bp, Saccharomyces pastorianus
aaccttatcgttacactcatcatct

SEQ ID NO: 124183 - DNA, 25 bp, Saccharomyces pastorianus
aagggcggtatcatcagcaagcata

SEQ ID NO: 124184 - DNA, 25 bp, Saccharomyces pastorianus
tttggttcaacatctctatgctcca

SEQ ID NO: 124185 - DNA, 25 bp, Saccharomyces pastorianus
gaaagcagcagtattccatcatcta

SEQ ID NO: 124186 - DNA, 25 bp, Saccharomyces pastorianus
atcaccatccactccaatagttgaa

SEQ ID NO: 124187 - DNA, 25 bp, Saccharomyces pastorianus
ttttcaccgtcgtcgtcagaatgga

SEQ ID NO: 124188 - DNA, 25 bp, Saccharomyces pastorianus
aaaagtatttgaagcgcctcgtacg

SEQ ID NO: 124189 - DNA, 25 bp, Saccharomyces pastorianus
aatcagactctcaaaattccctttc

SEQ ID NO: 124190 - DNA, 25 bp, Saccharomyces pastorianus
ggcttcgaagcccaattctttggtt

SEQ ID NO: 124191 - DNA, 25 bp, Saccharomyces pastorianus
gcaggttaagttctctggtcgttct

SEQ ID NO: 124192 - DNA, 25 bp, Saccharomyces pastorianus
ttgaggcgacataagttgttagcac

SEQ ID NO: 124193 - DNA, 25 bp, Saccharomyces pastorianus
aggttaagttctctggtcgttctgg

SEQ ID NO: 124194 - DNA, 25 bp, Saccharomyces pastorianus
gacataagttgttagcacagcgaac

SEQ ID NO: 124195 - DNA, 25 bp, Saccharomyces pastorianus
gttagcacagcgaacatggttgcag

SEQ ID NO: 124196 - DNA, 25 bp, Saccharomyces pastorianus
cacagcgaacatggttgcaggttaa

SEQ ID NO: 124197 - DNA, 25 bp, Saccharomyces pastorianus
aaatggtattgaggcgacataagtt

SEQ ID NO: 124198 - DNA, 25 bp, Saccharomyces pastorianus
aacatggttgcaggttaagttctct

SEQ ID NO: 124199 - DNA, 25 bp, Saccharomyces pastorianus
gttgcaggttaagttctctggtcgt

SEQ ID NO: 124200 - DNA, 25 bp, Saccharomyces pastorianus
aggcgacataagttgttagcacagc

SEQ ID NO: 124201 - DNA, 25 bp, Saccharomyces pastorianus
agttgttagcacagcgaacatggtt

SEQ ID NO: 124202 - DNA, 25 bp, Saccharomyces pastorianus
aatcatgccgttttgtgtgctacat

SEQ ID NO: 124203 - DNA, 25 bp, Saccharomyces pastorianus
atatcttgccaatacttcacttgag

SEQ ID NO: 124204 - DNA, 25 bp, Saccharomyces pastorianus
ttctccttcctttcaaataattgca

SEQ ID NO: 124205 - DNA, 25 bp, Saccharomyces pastorianus
tcgttctgggagagtatttacgtta

SEQ ID NO: 124206 - DNA, 25 bp, Saccharomyces pastorianus
aagtcacgttagaatgcaatttatc

SEQ ID NO: 124207 - DNA, 25 bp, Saccharomyces pastorianus
ggattggtaaatccctttgctagca

SEQ ID NO: 124208 - DNA, 25 bp, Saccharomyces pastorianus
tgtgctacatatctgtttcccacta

SEQ ID NO: 124209 - DNA, 25 bp, Saccharomyces pastorianus
ggaatcaattaagcataatcatgcc

SEQ ID NO: 124210 - DNA, 25 bp, Saccharomyces pastorianus
aataattgcaccaatatcttgccaa

SEQ ID NO: 124211 - DNA, 25 bp, Saccharomyces pastorianus
tttgctagcaaggtactgtcagaat

SEQ ID NO: 124212 - DNA, 25 bp, Saccharomyces pastorianus
gtttcccactatataaagtcacgtt

SEQ ID NO: 124213 - DNA, 25 bp, Saccharomyces pastorianus
gttttctccaaattcagaaccggtg

SEQ ID NO: 124214 - DNA, 25 bp, Saccharomyces pastorianus
ataacgtcctatgtcatgggctggc

SEQ ID NO: 124215 - DNA, 25 bp, Saccharomyces pastorianus
gtttccaatggccaagttttctcca

SEQ ID NO: 124216 - DNA, 25 bp, Saccharomyces pastorianus
tataactccattgacgctgaagcga

SEQ ID NO: 124217 - DNA, 25 bp, Saccharomyces pastorianus
attacggcagtatcgaatccataaa

SEQ ID NO: 124218 - DNA, 25 bp, Saccharomyces pastorianus
aaggtttcatcccaggttacggcat

SEQ ID NO: 124219 - DNA, 25 bp, Saccharomyces pastorianus
ggcatctccctactgaaggcaattc

SEQ ID NO: 124220 - DNA, 25 bp, Saccharomyces pastorianus
atccttcctccaaaatacggtcact

SEQ ID NO: 124221 - DNA, 25 bp, Saccharomyces pastorianus
ttatcagcagttattctcccatcag

SEQ ID NO: 124222 - DNA, 25 bp, Saccharomyces pastorianus
attctcccatcagaagtggcgttta

SEQ ID NO: 124223 - DNA, 25 bp, Saccharomyces pastorianus
atggattcttgtttagccggtgtag

SEQ ID NO: 124224 - DNA, 25 bp, Saccharomyces pastorianus
gggagcgcaggtgctattatagatc

SEQ ID NO: 124225 - DNA, 25 bp, Saccharomyces pastorianus
tctgctcaatgaaatgccaaaggtg

SEQ ID NO: 124226 - DNA, 25 bp, Saccharomyces pastorianus
gaactatcctgatgtcagggccttt

SEQ ID NO: 124227 - DNA, 25 bp, Saccharomyces pastorianus
ggtatgaacctttattgcgagaata

SEQ ID NO: 124228 - DNA, 25 bp, Saccharomyces pastorianus
taattaatccgcagtacttggtaaa

SEQ ID NO: 124229 - DNA, 25 bp, Saccharomyces pastorianus
tacagttattcgcagaggtgtcacg

SEQ ID NO: 124230 - DNA, 25 bp, Saccharomyces pastorianus
gattgtcttaagactaccgtactta

SEQ ID NO: 124231 - DNA, 25 bp, Saccharomyces pastorianus
gccaaaggtgatgggcagcttgata

SEQ ID NO: 124232 - DNA, 25 bp, Saccharomyces pastorianus
cagggccttttctacaaattgtctt

SEQ ID NO: 124233 - DNA, 25 bp, Saccharomyces pastorianus
gactgtacattataggaattctgcc

SEQ ID NO: 124234 - DNA, 25 bp, Saccharomyces pastorianus
ttttcacgtcagtggctacagcatt

SEQ ID NO: 124235 - DNA, 25 bp, Saccharomyces pastorianus
gtctctaacttatcctgggacgcat

SEQ ID NO: 124236 - DNA, 25 bp, Saccharomyces pastorianus
gaattccagccggtggtattgccac

SEQ ID NO: 124237 - DNA, 25 bp, Saccharomyces pastorianus
aagttgattgctcactctgtggcca

SEQ ID NO: 124238 - DNA, 25 bp, Saccharomyces pastorianus
aggctctaacttctacgcttataac

SEQ ID NO: 124239 - DNA, 25 bp, Saccharomyces pastorianus
ctttggtcccatttgacggtagatc

SEQ ID NO: 124240 - DNA, 25 bp, Saccharomyces pastorianus
gtagactactacaaggctcatcact

SEQ ID NO: 124241 - DNA, 25 bp, Saccharomyces pastorianus
atcacttgaactacactttggtccc

SEQ ID NO: 124242 - DNA, 25 bp, Saccharomyces pastorianus
acctatgctgactctttcgagggtt

SEQ ID NO: 124243 - DNA, 25 bp, Saccharomyces pastorianus
gatggttccggtactatttccctat

SEQ ID NO: 124244 - DNA, 25 bp, Saccharomyces pastorianus
gacgcattcattaccaacaccaagt

SEQ ID NO: 124245 - DNA, 25 bp, Saccharomyces pastorianus
atttccctattgaacgtcgctaagc

SEQ ID NO: 124246 - DNA, 25 bp, Saccharomyces pastorianus
atgtttcttgtcattacctctctta

SEQ ID NO: 124247 - DNA, 25 bp, Saccharomyces pastorianus
agctctcagcaccattgtcaatagt

SEQ ID NO: 124248 - DNA, 25 bp, Saccharomyces pastorianus
attcctcctctagctttactttgga

SEQ ID NO: 124249 - DNA, 25 bp, Saccharomyces pastorianus
agcgccggttactcttttattcttg

SEQ ID NO: 124250 - DNA, 25 bp, Saccharomyces pastorianus
attatcatcgtcttctgcctcatta

SEQ ID NO: 124251 - DNA, 25 bp, Saccharomyces pastorianus
gcctcgaattcttttcccatattga

SEQ ID NO: 124252 - DNA, 25 bp, Saccharomyces pastorianus
agtttctaggcccttttgcacaaga

SEQ ID NO: 124253 - DNA, 25 bp, Saccharomyces pastorianus
acccgcttccttctgatttgatgaa

SEQ ID NO: 124254 - DNA, 25 bp, Saccharomyces pastorianus
tatgagattgcgtgcctcgaattct

SEQ ID NO: 124255 - DNA, 25 bp, Saccharomyces pastorianus
ggactttcttgcaactgcttttggt

SEQ ID NO: 124256 - DNA, 25 bp, Saccharomyces pastorianus
agatttggacgctacaccttcatta

SEQ ID NO: 124257 - DNA, 25 bp, Saccharomyces pastorianus
acactaggtatttcgcaggctcttt

SEQ ID NO: 124258 - DNA, 25 bp, Saccharomyces pastorianus
accaaggttactctgtggacaggtt

SEQ ID NO: 124259 - DNA, 25 bp, Saccharomyces pastorianus
gtagatacgccaactccagaattcc

SEQ ID NO: 124260 - DNA, 25 bp, Saccharomyces pastorianus
taccaccaagggatgttccacaggc

SEQ ID NO: 124261 - DNA, 25 bp, Saccharomyces pastorianus
gtgacggtgctttccaattgacagt

SEQ ID NO: 124262 - DNA, 25 bp, Saccharomyces pastorianus
gcgagtatttggttgcacgaactac

SEQ ID NO: 124263 - DNA, 25 bp, Saccharomyces pastorianus
tgatcagtgacccaaactttgcgac

SEQ ID NO: 124264 - DNA, 25 bp, Saccharomyces pastorianus
cacaggctctgcttgacaggtgggt

SEQ ID NO: 124265 - DNA, 25 bp, Saccharomyces pastorianus
caaccttggaactacttgggattat

SEQ ID NO: 124266 - DNA, 25 bp, Saccharomyces pastorianus
acaggtttttgcatcacaggtcaga

SEQ ID NO: 124267 - DNA, 25 bp, Saccharomyces pastorianus
aaattccccgcaactaaacatagag

SEQ ID NO: 124268 - DNA, 25 bp, Saccharomyces pastorianus
cttccacttttacgagattgctcac

SEQ ID NO: 124269 - DNA, 25 bp, Saccharomyces pastorianus
aagttgttatccacatacgcgctat

SEQ ID NO: 124270 - DNA, 25 bp, Saccharomyces pastorianus
gcccctcgagatgtttattgccaat

SEQ ID NO: 124271 - DNA, 25 bp, Saccharomyces pastorianus
gacttttcactgtttatccgacgct

SEQ ID NO: 124272 - DNA, 25 bp, Saccharomyces pastorianus
agtccaattagatgcgccaacctta

SEQ ID NO: 124273 - DNA, 25 bp, Saccharomyces pastorianus
gagatctgcgaaatccgtcctgtat

SEQ ID NO: 124274 - DNA, 25 bp, Saccharomyces pastorianus
cgctcattcgggactgtttacggta

SEQ ID NO: 124275 - DNA, 25 bp, Saccharomyces pastorianus
atgggatcactgactaacctgctag

SEQ ID NO: 124276 - DNA, 25 bp, Saccharomyces pastorianus
caattttgttatcacttgggcccct

SEQ ID NO: 124277 - DNA, 25 bp, Saccharomyces pastorianus
gatcctgttgactttcctttcatta

SEQ ID NO: 124278 - DNA, 25 bp, Saccharomyces pastorianus
agtatcgcattcgttgtatccgctg

SEQ ID NO: 124279 - DNA, 25 bp, Saccharomyces pastorianus
agggaatatgctgctatgccgactt

SEQ ID NO: 124280 - DNA, 25 bp, Saccharomyces pastorianus
taaaagcacctgttcatatagcaag

SEQ ID NO: 124281 - DNA, 25 bp, Saccharomyces pastorianus
aacagcccatagcatcggttgatga

SEQ ID NO: 124282 - DNA, 25 bp, Saccharomyces pastorianus
gaaggtgggactccaacagcccata

SEQ ID NO: 124283 - DNA, 25 bp, Saccharomyces pastorianus
atatggctgcaggatcttccaggga

SEQ ID NO: 124284 - DNA, 25 bp, Saccharomyces pastorianus
tatgccgacttctaccacgaataag

SEQ ID NO: 124285 - DNA, 25 bp, Saccharomyces pastorianus
ctagacttgtctccgattataatat

SEQ ID NO: 124286 - DNA, 25 bp, Saccharomyces pastorianus
ggtgaccggtagaggaactgttcca

SEQ ID NO: 124287 - DNA, 25 bp, Saccharomyces pastorianus
aatgcgaacttcttgacggtagaga

SEQ ID NO: 124288 - DNA, 25 bp, Saccharomyces pastorianus
gatgatagtttgtcggccattaaaa

SEQ ID NO: 124289 - DNA, 25 bp, Saccharomyces pastorianus
gaatactccctcatactagacttgt

SEQ ID NO: 124290 - DNA, 25 bp, Saccharomyces pastorianus
gaatgatattatctacatgcattag

SEQ ID NO: 124291 - DNA, 25 bp, Saccharomyces pastorianus
caggacttaaggaaatgtgcggaat

SEQ ID NO: 124292 - DNA, 25 bp, Saccharomyces pastorianus
ccccaggagtttctgcaatatcata

SEQ ID NO: 124293 - DNA, 25 bp, Saccharomyces pastorianus
cattagagaaaaagtgcccagtgtg

SEQ ID NO: 124294 - DNA, 25 bp, Saccharomyces pastorianus
aatgcattcgtgataatatgggtac

SEQ ID NO: 124295 - DNA, 25 bp, Saccharomyces pastorianus
tatgggtacaagaactattaacgaa

SEQ ID NO: 124296 - DNA, 25 bp, Saccharomyces pastorianus
aaatgtgcggaattgcaggttaaaa

SEQ ID NO: 124297 - DNA, 25 bp, Saccharomyces pastorianus
gaaaactgtctaggattcttacagg

SEQ ID NO: 124298 - DNA, 25 bp, Saccharomyces pastorianus
gtctgatattttggatgagattgtc

SEQ ID NO: 124299 - DNA, 25 bp, Saccharomyces pastorianus
gtctaggattcttacaggacttaag

SEQ ID NO: 124300 - DNA, 25 bp, Saccharomyces pastorianus
tgaagaaatatgaccaatgcattcg

SEQ ID NO: 124301 - DNA, 25 bp, Saccharomyces pastorianus
tctgccagggtttgatcggactaaa

SEQ ID NO: 124302 - DNA, 25 bp, Saccharomyces pastorianus
aagctacaatgttatacgggcactg

SEQ ID NO: 124303 - DNA, 25 bp, Saccharomyces pastorianus
atctacctgtgatgattcccaatag

SEQ ID NO: 124304 - DNA, 25 bp, Saccharomyces pastorianus
ggttaatcgtctagtctgccagggt

SEQ ID NO: 124305 - DNA, 25 bp, Saccharomyces pastorianus
gagatttctaattctgacctttaca

SEQ ID NO: 124306 - DNA, 25 bp, Saccharomyces pastorianus
acgggcactgtgcaattaagtcatg

SEQ ID NO: 124307 - DNA, 25 bp, Saccharomyces pastorianus
actagcttagcatcgtttttgtttc

SEQ ID NO: 124308 - DNA, 25 bp, Saccharomyces pastorianus
gaagcgtttcgagacctggttaatc

SEQ ID NO: 124309 - DNA, 25 bp, Saccharomyces pastorianus
cgaacggcatcgttgatgttttcaa

SEQ ID NO: 124310 - DNA, 25 bp, Saccharomyces pastorianus
atatcaaagcgctaatctacctgtg

SEQ ID NO: 124311 - DNA, 25 bp, Saccharomyces pastorianus
ggaaaagctacatttgccgtacata

SEQ ID NO: 124312 - DNA, 25 bp, Saccharomyces pastorianus
acacattatgggacattggcatcaa

SEQ ID NO: 124313 - DNA, 25 bp, Saccharomyces pastorianus
catcgagtgatggttttgcaattgc

SEQ ID NO: 124314 - DNA, 25 bp, Saccharomyces pastorianus
ggcatcaagtttcaagcaccatcct

SEQ ID NO: 124315 - DNA, 25 bp, Saccharomyces pastorianus
aaagtctgggcttttttgccacaca

SEQ ID NO: 124316 - DNA, 25 bp, Saccharomyces pastorianus
gccaggtggcttacaaagtgatttc

SEQ ID NO: 124317 - DNA, 25 bp, Saccharomyces pastorianus
aagtgtgctacatcatgtcgcgaca

SEQ ID NO: 124318 - DNA, 25 bp, Saccharomyces pastorianus
gaagcgactaggaacgttacatttt

SEQ ID NO: 124319 - DNA, 25 bp, Saccharomyces pastorianus
tgaagttgtctctgtgccaggtggc

SEQ ID NO: 124320 - DNA, 25 bp, Saccharomyces pastorianus
gctcttttggtatgcatgttgcgtc

SEQ ID NO: 124321 - DNA, 25 bp, Saccharomyces pastorianus
taacgcgcagattgccgctgataat

SEQ ID NO: 124322 - DNA, 25 bp, Saccharomyces pastorianus
gacatggctaccaataggtcattat

SEQ ID NO: 124323 - DNA, 25 bp, Saccharomyces pastorianus
catctcaatcttctctttccaatat

SEQ ID NO: 124324 - DNA, 25 bp, Saccharomyces pastorianus
gaaatcatctccatctcaatcttct

SEQ ID NO: 124325 - DNA, 25 bp, Saccharomyces pastorianus
ggaggagtccagtcatgtgcagcaa

SEQ ID NO: 124326 - DNA, 25 bp, Saccharomyces pastorianus
tgcagcaactacaaccagggtctca

SEQ ID NO: 124327 - DNA, 25 bp, Saccharomyces pastorianus
ttctaacattaattctgctccaagg

SEQ ID NO: 124328 - DNA, 25 bp, Saccharomyces pastorianus
attcatcgcgagctcaaagtccaat

SEQ ID NO: 124329 - DNA, 25 bp, Saccharomyces pastorianus
acattggtcctgagatggcccttaa

SEQ ID NO: 124330 - DNA, 25 bp, Saccharomyces pastorianus
gctaaagcagcaccagattcaacag

SEQ ID NO: 124331 - DNA, 25 bp, Saccharomyces pastorianus
aagtcagcaggcacattcatcgcga

SEQ ID NO: 124332 - DNA, 25 bp, Saccharomyces pastorianus
agaaatgggcaagcgtcggctccaa

SEQ ID NO: 124333 - DNA, 25 bp, Saccharomyces pastorianus
gtcggctccaagaccaaaccagaaa

SEQ ID NO: 124334 - DNA, 25 bp, Saccharomyces pastorianus
aaatggtttgacgaagagcgaaaat

SEQ ID NO: 124335 - DNA, 25 bp, Saccharomyces pastorianus
aaagtctgtggaacctaagccaaag

SEQ ID NO: 124336 - DNA, 25 bp, Saccharomyces pastorianus
atcacatccggaagaagaacacgcg

SEQ ID NO: 124337 - DNA, 25 bp, Saccharomyces pastorianus
tctgaatctgatatggacgatgcca

SEQ ID NO: 124338 - DNA, 25 bp, Saccharomyces pastorianus
gaaggaacctagcacagactctaaa

SEQ ID NO: 124339 - DNA, 25 bp, Saccharomyces pastorianus
atacctctaatatcatcacatccgg

SEQ ID NO: 124340 - DNA, 25 bp, Saccharomyces pastorianus
acgattatgacgctgaagtagcaaa

SEQ ID NO: 124341 - DNA, 25 bp, Saccharomyces pastorianus
tgatatggacgatgccaagttagac

SEQ ID NO: 124342 - DNA, 25 bp, Saccharomyces pastorianus
atggtactgttgaagattctgaatc

SEQ ID NO: 124343 - DNA, 25 bp, Saccharomyces pastorianus
gtcataataaatccgaaaagtctgt

SEQ ID NO: 124344 - DNA, 25 bp, Saccharomyces pastorianus
gaacacgcggcaaagtaattgacta

SEQ ID NO: 124345 - DNA, 25 bp, Saccharomyces pastorianus
agtaatgctcaacccaagtagccat

SEQ ID NO: 124346 - DNA, 25 bp, Saccharomyces pastorianus
gaagagctcatttgtacatatccat

SEQ ID NO: 124347 - DNA, 25 bp, Saccharomyces pastorianus
acagtatcctctgcctttgcggctt

SEQ ID NO: 124348 - DNA, 25 bp, Saccharomyces pastorianus
tttgcggcttccagtagttctactg

SEQ ID NO: 124349 - DNA, 25 bp, Saccharomyces pastorianus
gatcttctgcaagtcctagggtcaa

SEQ ID NO: 124350 - DNA, 25 bp, Saccharomyces pastorianus
ggattttcccacaggatcttctgca

SEQ ID NO: 124351 - DNA, 25 bp, Saccharomyces pastorianus
tattcttgttcttttgtcccagcaa

SEQ ID NO: 124352 - DNA, 25 bp, Saccharomyces pastorianus
aatcttttcatgttcctattcttgt

SEQ ID NO: 124353 - DNA, 25 bp, Saccharomyces pastorianus
ttataagagcaaccatctcatcccc

SEQ ID NO: 124354 - DNA, 25 bp, Saccharomyces pastorianus
aactgagaccatccacgttgtgggc

SEQ ID NO: 124355 - DNA, 25 bp, Saccharomyces pastorianus
ttgtgggcaccaccactcacagtat

SEQ ID NO: 124356 - DNA, 25 bp, Saccharomyces pastorianus
ataacttttcgtctttcggcattgg

SEQ ID NO: 124357 - DNA, 25 bp, Saccharomyces pastorianus
ttctgccttagacgagctgctgaaa

SEQ ID NO: 124358 - DNA, 25 bp, Saccharomyces pastorianus
attatcttcaatttcgtcaggcgac

SEQ ID NO: 124359 - DNA, 25 bp, Saccharomyces pastorianus
ggatttcctcgaactactgcgcaag

SEQ ID NO: 124360 - DNA, 25 bp, Saccharomyces pastorianus
agtgggatttttggtaccgtctctg

SEQ ID NO: 124361 - DNA, 25 bp, Saccharomyces pastorianus
atgtacccgaatccaccatattaga

SEQ ID NO: 124362 - DNA, 25 bp, Saccharomyces pastorianus
agaggctactacctacattgctcaa

SEQ ID NO: 124363 - DNA, 25 bp, Saccharomyces pastorianus
ggatgatctcataacgcgtctgata

SEQ ID NO: 124364 - DNA, 25 bp, Saccharomyces pastorianus
aaatctgaatctaccctaggccgag

SEQ ID NO: 124365 - DNA, 25 bp, Saccharomyces pastorianus
atgtggttgctcgatggatttcctc

SEQ ID NO: 124366 - DNA, 25 bp, Saccharomyces pastorianus
gcatgacgccagcttgaatctagtg

SEQ ID NO: 124367 - DNA, 25 bp, Saccharomyces pastorianus
aaaatctcaatttaccatcccatcc

SEQ ID NO: 124368 - DNA, 25 bp, Saccharomyces pastorianus
ttgcctgcgagctatgggttggtac

SEQ ID NO: 124369 - DNA, 25 bp, Saccharomyces pastorianus
ttctctaaaccacctgatacttcta

SEQ ID NO: 124370 - DNA, 25 bp, Saccharomyces pastorianus
gatagactcatgacccagctagaat

SEQ ID NO: 124371 - DNA, 25 bp, Saccharomyces pastorianus
tttcatttaaatcagctcccatacc

SEQ ID NO: 124372 - DNA, 25 bp, Saccharomyces pastorianus
atccggcactgcataatgtttcacc

SEQ ID NO: 124373 - DNA, 25 bp, Saccharomyces pastorianus
tagagattatttaccgccagcttct

SEQ ID NO: 124374 - DNA, 25 bp, Saccharomyces pastorianus
taccagatctccaaccttttttcaa

SEQ ID NO: 124375 - DNA, 25 bp, Saccharomyces pastorianus
gaatgtgcaaattcacccagacttg

SEQ ID NO: 124376 - DNA, 25 bp, Saccharomyces pastorianus
gaatctccatgttcatcaacagcta

SEQ ID NO: 124377 - DNA, 25 bp, Saccharomyces pastorianus
aggagcctattctttcaccaaattc

SEQ ID NO: 124378 - DNA, 25 bp, Saccharomyces pastorianus
gtacatcgtatatgaatatgccatt

SEQ ID NO: 124379 - DNA, 25 bp, Saccharomyces pastorianus
gtcagaacaggcttttctgtccctt

SEQ ID NO: 124380 - DNA, 25 bp, Saccharomyces pastorianus
gtatgtttggctttttcttttcctg

SEQ ID NO: 124381 - DNA, 25 bp, Saccharomyces pastorianus
tcttttcctggattccggctgtcaa

SEQ ID NO: 124382 - DNA, 25 bp, Saccharomyces pastorianus
tattgtttcctttgctctgtccgtg

SEQ ID NO: 124383 - DNA, 25 bp, Saccharomyces pastorianus
tttctgtcccttcctcctattgttt

SEQ ID NO: 124384 - DNA, 25 bp, Saccharomyces pastorianus
ggattccggctgtcaaatactacta

SEQ ID NO: 124385 - DNA, 25 bp, Saccharomyces pastorianus
atatggttgtatgtttggctttttc

SEQ ID NO: 124386 - DNA, 25 bp, Saccharomyces pastorianus
gctactctcatctttttctattcta

SEQ ID NO: 124387 - DNA, 25 bp, Saccharomyces pastorianus
tttgctctgtccgtggctactctca

SEQ ID NO: 124388 - DNA, 25 bp, Saccharomyces pastorianus
ctacgaatagagtcagaacaggctt

SEQ ID NO: 124389 - DNA, 25 bp, Saccharomyces pastorianus
atgttcttgcaaatttccttgactg

SEQ ID NO: 124390 - DNA, 25 bp, Saccharomyces pastorianus
tgatattgttactgtcgtccgtgtc

SEQ ID NO: 124391 - DNA, 25 bp, Saccharomyces pastorianus
ttttcgctgatgttgctactttggc

SEQ ID NO: 124392 - DNA, 25 bp, Saccharomyces pastorianus
aaaacttcggtgctatgaacggtat

SEQ ID NO: 124393 - DNA, 25 bp, Saccharomyces pastorianus
ggattaccttgactactatgttctt

SEQ ID NO: 124394 - DNA, 25 bp, Saccharomyces pastorianus
gattgttttcatcgctattttcgct

SEQ ID NO: 124395 - DNA, 25 bp, Saccharomyces pastorianus
ggttgattttcattaccagagctgc

SEQ ID NO: 124396 - DNA, 25 bp, Saccharomyces pastorianus
gctactttggctattgcttacgata

SEQ ID NO: 124397 - DNA, 25 bp, Saccharomyces pastorianus
ttttggcagtcggttcatggattac

SEQ ID NO: 124398 - DNA, 25 bp, Saccharomyces pastorianus
tgcttacgataatgctccttactct

SEQ ID NO: 124399 - DNA, 25 bp, Saccharomyces pastorianus
acgaaatgtccacttctgaagcctt

SEQ ID NO: 124400 - DNA, 25 bp, Saccharomyces pastorianus
aaggccagagattgcttaacaacga

SEQ ID NO: 124401 - DNA, 25 bp, Saccharomyces pastorianus
atcaccagttgggaaacttaccact

SEQ ID NO: 124402 - DNA, 25 bp, Saccharomyces pastorianus
aacggtcatggataaggtggccaca

SEQ ID NO: 124403 - DNA, 25 bp, Saccharomyces pastorianus
gtactgtgacttcaaaatcttgcaa

SEQ ID NO: 124404 - DNA, 25 bp, Saccharomyces pastorianus
gaccagagaattttaacccagagat

SEQ ID NO: 124405 - DNA, 25 bp, Saccharomyces pastorianus
aaaattcaacgagctgtccaacaga

SEQ ID NO: 124406 - DNA, 25 bp, Saccharomyces pastorianus
acttaccactggaatgtccggactt

SEQ ID NO: 124407 - DNA, 25 bp, Saccharomyces pastorianus
gagattggaccattgaatcaccagt

SEQ ID NO: 124408 - DNA, 25 bp, Saccharomyces pastorianus
ggtggccacagaatgggatcctgaa

SEQ ID NO: 124409 - DNA, 25 bp, Saccharomyces pastorianus
aagagcctattcatgggaccagaga

SEQ ID NO: 124410 - DNA, 25 bp, Saccharomyces pastorianus
ttcccacaaccattccacagatagt

SEQ ID NO: 124411 - DNA, 25 bp, Saccharomyces pastorianus
tattcccagattccatcaggtcgta

SEQ ID NO: 124412 - DNA, 25 bp, Saccharomyces pastorianus
gaccaattgcctgtgttgactgaag

SEQ ID NO: 124413 - DNA, 25 bp, Saccharomyces pastorianus
ggatcttcacttgaaaccggttgtt

SEQ ID NO: 124414 - DNA, 25 bp, Saccharomyces pastorianus
acgctgatgtgtttggtaacgctac

SEQ ID NO: 124415 - DNA, 25 bp, Saccharomyces pastorianus
aactcatctgccgttatcactgatg

SEQ ID NO: 124416 - DNA, 25 bp, Saccharomyces pastorianus
gtcgtacctaaccaaattcgtcgat

SEQ ID NO: 124417 - DNA, 25 bp, Saccharomyces pastorianus
tgttggcccgttttgactcttcaaa

SEQ ID NO: 124418 - DNA, 25 bp, Saccharomyces pastorianus
aaccgctaaggtcactgatgttatc

SEQ ID NO: 124419 - DNA, 25 bp, Saccharomyces pastorianus
agttactctctctgagcttctaaga

SEQ ID NO: 124420 - DNA, 25 bp, Saccharomyces pastorianus
tgaagaccaccctgaactgactgaa

SEQ ID NO: 124421 - DNA, 25 bp, Saccharomyces pastorianus
gatgtcattgttgccatattcccag

SEQ ID NO: 124422 - DNA, 25 bp, Saccharomyces pastorianus
tctccttaatcatcttcccatttat

SEQ ID NO: 124423 - DNA, 25 bp, Saccharomyces pastorianus
tttgctccaatatgtcagggtatgc

SEQ ID NO: 124424 - DNA, 25 bp, Saccharomyces pastorianus
ggatgacacattatctgccttttgc

SEQ ID NO: 124425 - DNA, 25 bp, Saccharomyces pastorianus
tctaactaattttgccatggcctcc

SEQ ID NO: 124426 - DNA, 25 bp, Saccharomyces pastorianus
tcatgggcgggatatatcactcgat

SEQ ID NO: 124427 - DNA, 25 bp, Saccharomyces pastorianus
gtattttccctttcatttcctggat

SEQ ID NO: 124428 - DNA, 25 bp, Saccharomyces pastorianus
atgggaatggccaaccttacataaa

SEQ ID NO: 124429 - DNA, 25 bp, Saccharomyces pastorianus
catggatttctactgtctccttaat

SEQ ID NO: 124430 - DNA, 25 bp, Saccharomyces pastorianus
atggcctcctctaataacgcgttag

SEQ ID NO: 124431 - DNA, 25 bp, Saccharomyces pastorianus
caatgcttgttttcggatttgtgct

SEQ ID NO: 124432 - DNA, 25 bp, Saccharomyces pastorianus
atgggatctcccttcaatacatgga

SEQ ID NO: 124433 - DNA, 25 bp, Saccharomyces pastorianus
ccaaaccttccttgttgctacagaa

SEQ ID NO: 124434 - DNA, 25 bp, Saccharomyces pastorianus
agaatccctttacactggtcagttt

SEQ ID NO: 124435 - DNA, 25 bp, Saccharomyces pastorianus
aagggcacggtgacgcagctgtatt

SEQ ID NO: 124436 - DNA, 25 bp, Saccharomyces pastorianus
tggaccgcactatttcatgctttgg

SEQ ID NO: 124437 - DNA, 25 bp, Saccharomyces pastorianus
aattccattgcatagagctgcgtcg

SEQ ID NO: 124438 - DNA, 25 bp, Saccharomyces pastorianus
agatgattctggatggacacctttc

SEQ ID NO: 124439 - DNA, 25 bp, Saccharomyces pastorianus
ggtcagtttctttccaagcacatga

SEQ ID NO: 124440 - DNA, 25 bp, Saccharomyces pastorianus
gacacctttccatattgcttgttca

SEQ ID NO: 124441 - DNA, 25 bp, Saccharomyces pastorianus
acgacagacctctaaagcctgatct

SEQ ID NO: 124442 - DNA, 25 bp, Saccharomyces pastorianus
agctgcgtcggtgggttctttgaaa

SEQ ID NO: 124443 - DNA, 25 bp, Saccharomyces pastorianus
acatgcttgcacttggcggttggta

SEQ ID NO: 124444 - DNA, 25 bp, Saccharomyces pastorianus
agtcaaagttgctgaagccgttttc

SEQ ID NO: 124445 - DNA, 25 bp, Saccharomyces pastorianus
cagattaaagccagccatctctagt

SEQ ID NO: 124446 - DNA, 25 bp, Saccharomyces pastorianus
cctacccagtcaaagttgctgaagc

SEQ ID NO: 124447 - DNA, 25 bp, Saccharomyces pastorianus
cggtattgccccagaccaagtgacc

SEQ ID NO: 124448 - DNA, 25 bp, Saccharomyces pastorianus
aaacctacccagtcaaagttgctga

SEQ ID NO: 124449 - DNA, 25 bp, Saccharomyces pastorianus
acccagtcaaagttgctgaagccgt

SEQ ID NO: 124450 - DNA, 25 bp, Saccharomyces pastorianus
ccagtcaaagttgctgaagccgttt

SEQ ID NO: 124451 - DNA, 25 bp, Saccharomyces pastorianus
aacctacccagtcaaagttgctgaa

SEQ ID NO: 124452 - DNA, 25 bp, Saccharomyces pastorianus
cccagtcaaagttgctgaagccgtt

SEQ ID NO: 124453 - DNA, 25 bp, Saccharomyces pastorianus
ctgaaacctacccagtcaaagttgc

SEQ ID NO: 124454 - DNA, 25 bp, Saccharomyces pastorianus
cagtcaaagttgctgaagccgtttt

SEQ ID NO: 124455 - DNA, 25 bp, Saccharomyces pastorianus
ttgcataccaagtgcctttctctat

SEQ ID NO: 124456 - DNA, 25 bp, Saccharomyces pastorianus
ggatacgccgtttttcatggtgaca

SEQ ID NO: 124457 - DNA, 25 bp, Saccharomyces pastorianus
ttgggcgctcagtcgattgtggcta

SEQ ID NO: 124458 - DNA, 25 bp, Saccharomyces pastorianus
tccttattgttgtcctttgtgtgct

SEQ ID NO: 124459 - DNA, 25 bp, Saccharomyces pastorianus
tacgattgcgtctcttgcataccaa

SEQ ID NO: 124460 - DNA, 25 bp, Saccharomyces pastorianus
agtgttgacagttttcgcttcccat

SEQ ID NO: 124461 - DNA, 25 bp, Saccharomyces pastorianus
gtctattttctactgagagcgctgt

SEQ ID NO: 124462 - DNA, 25 bp, Saccharomyces pastorianus
tattcgatgcctttaatgcgtccac

SEQ ID NO: 124463 - DNA, 25 bp, Saccharomyces pastorianus
agatggtcgtggacacactacctct

SEQ ID NO: 124464 - DNA, 25 bp, Saccharomyces pastorianus
gtagccaattttatcggcgcgtcgc

SEQ ID NO: 124465 - DNA, 25 bp, Saccharomyces pastorianus
gaacatgttcgttatctgccgttat

SEQ ID NO: 124466 - DNA, 25 bp, Saccharomyces pastorianus
gcaattgaaagtttcgttaccacca

SEQ ID NO: 124467 - DNA, 25 bp, Saccharomyces pastorianus
tacagaatcccggttaaaagtagct

SEQ ID NO: 124468 - DNA, 25 bp, Saccharomyces pastorianus
agcagtcatcgctaaaagactcatt

SEQ ID NO: 124469 - DNA, 25 bp, Saccharomyces pastorianus
aaaactgcataaggattacgtgaac

SEQ ID NO: 124470 - DNA, 25 bp, Saccharomyces pastorianus
gatgatgccgttcgaaaagctgaga

SEQ ID NO: 124471 - DNA, 25 bp, Saccharomyces pastorianus
tcgttaccaccaccaactacagaat

SEQ ID NO: 124472 - DNA, 25 bp, Saccharomyces pastorianus
gcttgctacgaacctgaatttaact

SEQ ID NO: 124473 - DNA, 25 bp, Saccharomyces pastorianus
gggtcccaaataacgatttgcaatt

SEQ ID NO: 124474 - DNA, 25 bp, Saccharomyces pastorianus
ggaactatcagaggcagtattctaa

SEQ ID NO: 124475 - DNA, 25 bp, Saccharomyces pastorianus
ttacgtgaacaagcttcatgaccaa

SEQ ID NO: 124476 - DNA, 25 bp, Saccharomyces pastorianus
cgaacctgaatttaactcctgaaag

SEQ ID NO: 124477 - DNA, 25 bp, Saccharomyces pastorianus
ggcacagaacatggatactacagat

SEQ ID NO: 124478 - DNA, 25 bp, Saccharomyces pastorianus
gacaatcgcagacaagtttcacagg

SEQ ID NO: 124479 - DNA, 25 bp, Saccharomyces pastorianus
ggttgtattcccttaatagcccaat

SEQ ID NO: 124480 - DNA, 25 bp, Saccharomyces pastorianus
agtactgtccgttccttcttcattg

SEQ ID NO: 124481 - DNA, 25 bp, Saccharomyces pastorianus
acagtacctgagacttattgagcta

SEQ ID NO: 124482 - DNA, 25 bp, Saccharomyces pastorianus
ccaaggtagttgtcgaaatcgtcaa

SEQ ID NO: 124483 - DNA, 25 bp, Saccharomyces pastorianus
tgtttggtggagtactgtccgttcc

SEQ ID NO: 124484 - DNA, 25 bp, Saccharomyces pastorianus
aagactatgacccaattttgatgtt

SEQ ID NO: 124485 - DNA, 25 bp, Saccharomyces pastorianus
gattccaccttagagcagttgcaga

SEQ ID NO: 124486 - DNA, 25 bp, Saccharomyces pastorianus
gctactctcaaactatgattccacc

SEQ ID NO: 124487 - DNA, 25 bp, Saccharomyces pastorianus
gatggctacatccaattgagcagat

SEQ ID NO: 124488 - DNA, 25 bp, Saccharomyces pastorianus
tgctcaagcttgtaactggatctgg

SEQ ID NO: 124489 - DNA, 25 bp, Saccharomyces pastorianus
tgttttcgcttctgttggtgttaca

SEQ ID NO: 124490 - DNA, 25 bp, Saccharomyces pastorianus
gttttgccatggaaatcaccttctt

SEQ ID NO: 124491 - DNA, 25 bp, Saccharomyces pastorianus
aagaacgggtcttctaagggtgctg

SEQ ID NO: 124492 - DNA, 25 bp, Saccharomyces pastorianus
caggtgctattgatttctactacgg

SEQ ID NO: 124493 - DNA, 25 bp, Saccharomyces pastorianus
tgggttccaccaaacaagagaggta

SEQ ID NO: 124494 - DNA, 25 bp, Saccharomyces pastorianus
gctgtttggtcttttcttacttcta

SEQ ID NO: 124495 - DNA, 25 bp, Saccharomyces pastorianus
tggtgttacaagattgtggccaaat

SEQ ID NO: 124496 - DNA, 25 bp, Saccharomyces pastorianus
gtttctttactccatttatttcagg

SEQ ID NO: 124497 - DNA, 25 bp, Saccharomyces pastorianus
gtcttttcttacttctacgtcttct

SEQ ID NO: 124498 - DNA, 25 bp, Saccharomyces pastorianus
gaaatcaccttcttgggttccacca

SEQ ID NO: 124499 - DNA, 25 bp, Saccharomyces pastorianus
cagattatgtctcgcgttggatcgc

SEQ ID NO: 124500 - DNA, 25 bp, Saccharomyces pastorianus
gattcttcactaacattccagcagg

SEQ ID NO: 124501 - DNA, 25 bp, Saccharomyces pastorianus
gtaccagtgccagtgccgataacaa

SEQ ID NO: 124502 - DNA, 25 bp, Saccharomyces pastorianus
tacagatgtcgactatggctcctta

SEQ ID NO: 124503 - DNA, 25 bp, Saccharomyces pastorianus
ggataaccctcgttgcatttattgc

SEQ ID NO: 124504 - DNA, 25 bp, Saccharomyces pastorianus
gttggatcgccactcatgtagtaat

SEQ ID NO: 124505 - DNA, 25 bp, Saccharomyces pastorianus
tgtagtaatctctccattgaacgct

SEQ ID NO: 124506 - DNA, 25 bp, Saccharomyces pastorianus
atagttccctccctgatgttgatct

SEQ ID NO: 124507 - DNA, 25 bp, Saccharomyces pastorianus
gccgggtacagttggcactactagg

SEQ ID NO: 124508 - DNA, 25 bp, Saccharomyces pastorianus
tagctgctacctcgatcaacaatag

SEQ ID NO: 124509 - DNA, 25 bp, Saccharomyces pastorianus
tggtggaatagactctccctcaatc

SEQ ID NO: 124510 - DNA, 25 bp, Saccharomyces pastorianus
gttaacaccacacaatctgtttcta

SEQ ID NO: 124511 - DNA, 25 bp, Saccharomyces pastorianus
gtccatggttgcactttgccagcaa

SEQ ID NO: 124512 - DNA, 25 bp, Saccharomyces pastorianus
tagtaatgccggtccatggttgcac

SEQ ID NO: 124513 - DNA, 25 bp, Saccharomyces pastorianus
aaagccaattcgttcagcgtagatt

SEQ ID NO: 124514 - DNA, 25 bp, Saccharomyces pastorianus
gtgtcttttcagacttatctctttg

SEQ ID NO: 124515 - DNA, 25 bp, Saccharomyces pastorianus
gaacattagtaatgccggtccatgg

SEQ ID NO: 124516 - DNA, 25 bp, Saccharomyces pastorianus
aactccactttgacgaaagccaatt

SEQ ID NO: 124517 - DNA, 25 bp, Saccharomyces pastorianus
caatctgtttctaaaagtgtctttt

SEQ ID NO: 124518 - DNA, 25 bp, Saccharomyces pastorianus
tgccagcaactccactttgacgaaa

SEQ ID NO: 124519 - DNA, 25 bp, Saccharomyces pastorianus
taccggcacattagagtttgagttg

SEQ ID NO: 124520 - DNA, 25 bp, Saccharomyces pastorianus
gatttgagtaattctaccggcacat

SEQ ID NO: 124521 - DNA, 25 bp, Saccharomyces pastorianus
tgagcaactcgactggtaccctaga

SEQ ID NO: 124522 - DNA, 25 bp, Saccharomyces pastorianus
ctggtctcgttttgctactaacaca

SEQ ID NO: 124523 - DNA, 25 bp, Saccharomyces pastorianus
taacacaactctaactaaggccaat

SEQ ID NO: 124524 - DNA, 25 bp, Saccharomyces pastorianus
cttacaatgtcgatttgagcaactc

SEQ ID NO: 124525 - DNA, 25 bp, Saccharomyces pastorianus
aaggccaattcttacaatgtcgatt

SEQ ID NO: 124526 - DNA, 25 bp, Saccharomyces pastorianus
aacattagtaatgctggcccctggt

SEQ ID NO: 124527 - DNA, 25 bp, Saccharomyces pastorianus
tatcactttggttcaagggtttaga

SEQ ID NO: 124528 - DNA, 25 bp, Saccharomyces pastorianus
ttaacaccacacaaaccatatccaa

SEQ ID NO: 124529 - DNA, 25 bp, Saccharomyces pastorianus
acaaaccatatccaaatccgtcttc

SEQ ID NO: 124530 - DNA, 25 bp, Saccharomyces pastorianus
tcttccccgacttatcactttggtt

SEQ ID NO: 124531 - DNA, 25 bp, Saccharomyces pastorianus
gactggtaccctagagtttgagttg

SEQ ID NO: 124532 - DNA, 25 bp, Saccharomyces pastorianus
gcactgcatatatcaatgtccccgt

SEQ ID NO: 124533 - DNA, 25 bp, Saccharomyces pastorianus
gggattccaattgctgtgggcgtaa

SEQ ID NO: 124534 - DNA, 25 bp, Saccharomyces pastorianus
ggtcagagatccttcctatagtttt

SEQ ID NO: 124535 - DNA, 25 bp, Saccharomyces pastorianus
gtccccgtcattttcagcggcgaaa

SEQ ID NO: 124536 - DNA, 25 bp, Saccharomyces pastorianus
caggatcttaaaccctgccaagaaa

SEQ ID NO: 124537 - DNA, 25 bp, Saccharomyces pastorianus
acagctcaagtgaagcttccacgat

SEQ ID NO: 124538 - DNA, 25 bp, Saccharomyces pastorianus
tttatgtatccactgacgctatcgc

SEQ ID NO: 124539 - DNA, 25 bp, Saccharomyces pastorianus
gtcaaacttatcatcgagcacagaa

SEQ ID NO: 124540 - DNA, 25 bp, Saccharomyces pastorianus
aatagccctgatattttggtgtaaa

SEQ ID NO: 124541 - DNA, 25 bp, Saccharomyces pastorianus
gagatcagcttctacgtcaaactta

SEQ ID NO: 124542 - DNA, 25 bp, Saccharomyces pastorianus
ggcagggtacacaccagcatacaga

SEQ ID NO: 124543 - DNA, 25 bp, Saccharomyces pastorianus
tattggcctgcacgttggatatacc

SEQ ID NO: 124544 - DNA, 25 bp, Saccharomyces pastorianus
tataccgagggtggcgaacgacaga

SEQ ID NO: 124545 - DNA, 25 bp, Saccharomyces pastorianus
ataccacacaattccacgctaggga

SEQ ID NO: 124546 - DNA, 25 bp, Saccharomyces pastorianus
ggtacctatcgctatcttcgtgaaa

SEQ ID NO: 124547 - DNA, 25 bp, Saccharomyces pastorianus
gacagatagcaacgataccacacaa

SEQ ID NO: 124548 - DNA, 25 bp, Saccharomyces pastorianus
tcaagcaataatcgcggttttaggt

SEQ ID NO: 124549 - DNA, 25 bp, Saccharomyces pastorianus
agtttgtccgtaacaatcctgatac

SEQ ID NO: 124550 - DNA, 25 bp, Saccharomyces pastorianus
gaatttctccacagtttttcaagca

SEQ ID NO: 124551 - DNA, 25 bp, Saccharomyces pastorianus
aactacagtcacagctttagcagaa

SEQ ID NO: 124552 - DNA, 25 bp, Saccharomyces pastorianus
acgctagggacttcactacgtgagt

SEQ ID NO: 124553 - DNA, 25 bp, Saccharomyces pastorianus
gacctccgcacctacaatgagtgag

SEQ ID NO: 124554 - DNA, 25 bp, Saccharomyces pastorianus
tttgtttcttgcgaatgcggaaccg

SEQ ID NO: 124555 - DNA, 25 bp, Saccharomyces pastorianus
gcgagacatcctggccattatttat

SEQ ID NO: 124556 - DNA, 25 bp, Saccharomyces pastorianus
gttctgcagcttattcatgttctca

SEQ ID NO: 124557 - DNA, 25 bp, Saccharomyces pastorianus
cgctcttgcttaatcttatccagtt

SEQ ID NO: 124558 - DNA, 25 bp, Saccharomyces pastorianus
atacccttcctgcttgcaatgtcaa

SEQ ID NO: 124559 - DNA, 25 bp, Saccharomyces pastorianus
gcaatgatagcaagcgcgagcccag

SEQ ID NO: 124560 - DNA, 25 bp, Saccharomyces pastorianus
agcccagctctgaatcgcttgatat

SEQ ID NO: 124561 - DNA, 25 bp, Saccharomyces pastorianus
atcaggttctgtagatgttccgaaa

SEQ ID NO: 124562 - DNA, 25 bp, Saccharomyces pastorianus
ttcctcttcttttacaacaactgct

SEQ ID NO: 124563 - DNA, 25 bp, Saccharomyces pastorianus
gcggagcttcttaaactgcgagaca

SEQ ID NO: 124564 - DNA, 25 bp, Saccharomyces pastorianus
caatgtttgttgatttcttttccca

SEQ ID NO: 124565 - DNA, 25 bp, Saccharomyces pastorianus
gccgtttttaacttctgtagcgaca

SEQ ID NO: 124566 - DNA, 25 bp, Saccharomyces pastorianus
gccctacgctggtttttccaagaat

SEQ ID NO: 124567 - DNA, 25 bp, Saccharomyces pastorianus
agcgacagcacggagttttcagttc

SEQ ID NO: 124568 - DNA, 25 bp, Saccharomyces pastorianus
tggagtggtgaaaagccctacgctg

SEQ ID NO: 124569 - DNA, 25 bp, Saccharomyces pastorianus
gttggctactcttattatttccttg

SEQ ID NO: 124570 - DNA, 25 bp, Saccharomyces pastorianus
aaaagttttacgaggcattggcatt

SEQ ID NO: 124571 - DNA, 25 bp, Saccharomyces pastorianus
taaggcttcttacgacatgtttttc

SEQ ID NO: 124572 - DNA, 25 bp, Saccharomyces pastorianus
gagaactccattcccttggagtggt

SEQ ID NO: 124573 - DNA, 25 bp, Saccharomyces pastorianus
ttcggtaactatgcaaactctgatg

SEQ ID NO: 124574 - DNA, 25 bp, Saccharomyces pastorianus
atttccttgactggtactgtattca

SEQ ID NO: 124575 - DNA, 25 bp, Saccharomyces pastorianus
ggtaccggtacttatggtgccatca

SEQ ID NO: 124576 - DNA, 25 bp, Saccharomyces pastorianus
atcctggagagactacatgctgtaa

SEQ ID NO: 124577 - DNA, 25 bp, Saccharomyces pastorianus
agcgagtttgtcgttgcatctccaa

SEQ ID NO: 124578 - DNA, 25 bp, Saccharomyces pastorianus
acacttcaggcgagttaaattctac

SEQ ID NO: 124579 - DNA, 25 bp, Saccharomyces pastorianus
gagagagcaatcgtagatcacagat

SEQ ID NO: 124580 - DNA, 25 bp, Saccharomyces pastorianus
acacctataggtgatatcctggaga

SEQ ID NO: 124581 - DNA, 25 bp, Saccharomyces pastorianus
ggcttaaaatcattcccagatccaa

SEQ ID NO: 124582 - DNA, 25 bp, Saccharomyces pastorianus
caactcctttatttgctagtgcggg

SEQ ID NO: 124583 - DNA, 25 bp, Saccharomyces pastorianus
gggcttctacgggatacacttcagg

SEQ ID NO: 124584 - DNA, 25 bp, Saccharomyces pastorianus
tcaaatgtcagaataccctaggtaa

SEQ ID NO: 124585 - DNA, 25 bp, Saccharomyces pastorianus
ataggtatcctgatggttcggtgga

SEQ ID NO: 124586 - DNA, 25 bp, Saccharomyces pastorianus
gattcaggcgcatggatcttgacca

SEQ ID NO: 124587 - DNA, 25 bp, Saccharomyces pastorianus
ggaagctcaccctgcagaggaatct

SEQ ID NO: 124588 - DNA, 25 bp, Saccharomyces pastorianus
gtacgatctttcacgcagacatgcg

SEQ ID NO: 124589 - DNA, 25 bp, Saccharomyces pastorianus
gaccatgaccatcgaatgagctatt

SEQ ID NO: 124590 - DNA, 25 bp, Saccharomyces pastorianus
gagtagtgaacgttcgtacgatctt

SEQ ID NO: 124591 - DNA, 25 bp, Saccharomyces pastorianus
gaggccggtgccgatgtgcctttat

SEQ ID NO: 124592 - DNA, 25 bp, Saccharomyces pastorianus
tacttctcttcctactgttattctt

SEQ ID NO: 124593 - DNA, 25 bp, Saccharomyces pastorianus
tgttattcttcccagcaatcattca

SEQ ID NO: 124594 - DNA, 25 bp, Saccharomyces pastorianus
cactattgaacgtacttctcttcct

SEQ ID NO: 124595 - DNA, 25 bp, Saccharomyces pastorianus
gcacagcctccagcatatgatgaag

SEQ ID NO: 124596 - DNA, 25 bp, Saccharomyces pastorianus
aatcattcacgcttgctacgttgta

SEQ ID NO: 124597 - DNA, 25 bp, Saccharomyces pastorianus
ccgtagaccgtgacctggaagctca

SEQ ID NO: 124598 - DNA, 25 bp, Saccharomyces pastorianus
gcacccggtaattctcttgatatag

SEQ ID NO: 124599 - DNA, 25 bp, Saccharomyces pastorianus
tgccatgacaaacgcacccggtaat

SEQ ID NO: 124600 - DNA, 25 bp, Saccharomyces pastorianus
tctcgatattgttgggcggtgtctc

SEQ ID NO: 124601 - DNA, 25 bp, Saccharomyces pastorianus
acctccaacactaatcatgttgttg

SEQ ID NO: 124602 - DNA, 25 bp, Saccharomyces pastorianus
ctttattaacatatggttcaccaac

SEQ ID NO: 124603 - DNA, 25 bp, Saccharomyces pastorianus
gaaagaacctacctgtcttggttgt

SEQ ID NO: 124604 - DNA, 25 bp, Saccharomyces pastorianus
gtcttggttgtccatctcgatattg

SEQ ID NO: 124605 - DNA, 25 bp, Saccharomyces pastorianus
tgccccaccgggaaagacgatatgt

SEQ ID NO: 124606 - DNA, 25 bp, Saccharomyces pastorianus
gggaaagacgatatgtgtgccagtt

SEQ ID NO: 124607 - DNA, 25 bp, Saccharomyces pastorianus
gcggtgtctccactactttattaac

SEQ ID NO: 124608 - DNA, 25 bp, Saccharomyces pastorianus
ttttgatactcaaattcgtgcccca

SEQ ID NO: 124609 - DNA, 25 bp, Saccharomyces pastorianus
atgatgacagtctagctcctataga

SEQ ID NO: 124610 - DNA, 25 bp, Saccharomyces pastorianus
gctcttgttggcctcatagatgcag

SEQ ID NO: 124611 - DNA, 25 bp, Saccharomyces pastorianus
aaagttgacggcgaatgcctcatag

SEQ ID NO: 124612 - DNA, 25 bp, Saccharomyces pastorianus
aaggaattcatctgcaaggcacagt

SEQ ID NO: 124613 - DNA, 25 bp, Saccharomyces pastorianus
gcgaatgcctcatagcaagcctaaa

SEQ ID NO: 124614 - DNA, 25 bp, Saccharomyces pastorianus
aaggcacagttacttcgaggcagcg

SEQ ID NO: 124615 - DNA, 25 bp, Saccharomyces pastorianus
taaccaatgttttcaaccgcataag

SEQ ID NO: 124616 - DNA, 25 bp, Saccharomyces pastorianus
accatgtcagccaccttgaaagact

SEQ ID NO: 124617 - DNA, 25 bp, Saccharomyces pastorianus
agaacacactatcgtgcaccatgtc

SEQ ID NO: 124618 - DNA, 25 bp, Saccharomyces pastorianus
agctgcatacagtacaccatacaag

SEQ ID NO: 124619 - DNA, 25 bp, Saccharomyces pastorianus
tcgaggcagcgagattgctcttgtt

SEQ ID NO: 124620 - DNA, 25 bp, Saccharomyces pastorianus
ttccgcctcagcagacttggagatc

SEQ ID NO: 124621 - DNA, 25 bp, Saccharomyces pastorianus
gcagacttggagatcggcgaacaaa

SEQ ID NO: 124622 - DNA, 25 bp, Saccharomyces pastorianus
cgcacatcctaacctctattttgaa

SEQ ID NO: 124623 - DNA, 25 bp, Saccharomyces pastorianus
gaaataacacacaattccgcctcag

SEQ ID NO: 124624 - DNA, 25 bp, Saccharomyces pastorianus
ttggagatcggcgaacaaactcata

SEQ ID NO: 124625 - DNA, 25 bp, Saccharomyces pastorianus
tcagcagacttggagatcggcgaac

SEQ ID NO: 124626 - DNA, 25 bp, Saccharomyces pastorianus
aattccgcctcagcagacttggaga

SEQ ID NO: 124627 - DNA, 25 bp, Saccharomyces pastorianus
ttttgaaaggtcaaggcaactgcaa

SEQ ID NO: 124628 - DNA, 25 bp, Saccharomyces pastorianus
atatcgcacatcctaacctctattt

SEQ ID NO: 124629 - DNA, 25 bp, Saccharomyces pastorianus
gaacaaactcatatcgcacatccta

SEQ ID NO: 124630 - DNA, 25 bp, Saccharomyces pastorianus
acatcctaacctctattttgaaagg

SEQ ID NO: 124631 - DNA, 25 bp, Saccharomyces pastorianus
accaaatgcattcgttttaccaggg

SEQ ID NO: 124632 - DNA, 25 bp, Saccharomyces pastorianus
taagtacacatccagcaagcactcg

SEQ ID NO: 124633 - DNA, 25 bp, Saccharomyces pastorianus
gaaggctcctatatattctcttttg

SEQ ID NO: 124634 - DNA, 25 bp, Saccharomyces pastorianus
gaagctgcttataaggaccctagtg

SEQ ID NO: 124635 - DNA, 25 bp, Saccharomyces pastorianus
atactgttactggagctcatgctat

SEQ ID NO: 124636 - DNA, 25 bp, Saccharomyces pastorianus
ccgaagctgattacattggcctgat

SEQ ID NO: 124637 - DNA, 25 bp, Saccharomyces pastorianus
ggcatgttttcaaccacaggagtca

SEQ ID NO: 124638 - DNA, 25 bp, Saccharomyces pastorianus
aatgatccaactgcttcaccaaatg

SEQ ID NO: 124639 - DNA, 25 bp, Saccharomyces pastorianus
gacaactcactactggacgggatca

SEQ ID NO: 124640 - DNA, 25 bp, Saccharomyces pastorianus
ggattgccactgttttagcacacga

SEQ ID NO: 124641 - DNA, 25 bp, Saccharomyces pastorianus
gggtaaggtctttatattcagctct

SEQ ID NO: 124642 - DNA, 25 bp, Saccharomyces pastorianus
tatccagaatggttcgcagggtcaa

SEQ ID NO: 124643 - DNA, 25 bp, Saccharomyces pastorianus
tgaaaggcggatttgacccgaaaat

SEQ ID NO: 124644 - DNA, 25 bp, Saccharomyces pastorianus
tattgaggcaccacaactacccatt

SEQ ID NO: 124645 - DNA, 25 bp, Saccharomyces pastorianus
gagctggtgttaatgtcggtatcca

SEQ ID NO: 124646 - DNA, 25 bp, Saccharomyces pastorianus
attcctggtcaaactaatggctctg

SEQ ID NO: 124647 - DNA, 25 bp, Saccharomyces pastorianus
actttatattttacagccggtgcat

SEQ ID NO: 124648 - DNA, 25 bp, Saccharomyces pastorianus
gaccggaatggacctttattttgat

SEQ ID NO: 124649 - DNA, 25 bp, Saccharomyces pastorianus
ggttctccatttttggccactaaga

SEQ ID NO: 124650 - DNA, 25 bp, Saccharomyces pastorianus
catcctgacaaaggtggttctccat

SEQ ID NO: 124651 - DNA, 25 bp, Saccharomyces pastorianus
atggctctgcgaacgttactgttga

SEQ ID NO: 124652 - DNA, 25 bp, Saccharomyces pastorianus
aaaatccactactgccttcttgaaa

SEQ ID NO: 124653 - DNA, 25 bp, Saccharomyces pastorianus
aataatctttgctttcgggtacgag

SEQ ID NO: 124654 - DNA, 25 bp, Saccharomyces pastorianus
ggtttctgatgttctagatgccttt

SEQ ID NO: 124655 - DNA, 25 bp, Saccharomyces pastorianus
acacatcagtgccagtaactcctat

SEQ ID NO: 124656 - DNA, 25 bp, Saccharomyces pastorianus
ttaagaactttatcgcaggacactg

SEQ ID NO: 124657 - DNA, 25 bp, Saccharomyces pastorianus
ttctggacctttctgcacggataaa

SEQ ID NO: 124658 - DNA, 25 bp, Saccharomyces pastorianus
tcgactttcatggtactaaggtttc

SEQ ID NO: 124659 - DNA, 25 bp, Saccharomyces pastorianus
tttcgggtacgagagtccatcaaaa

SEQ ID NO: 124660 - DNA, 25 bp, Saccharomyces pastorianus
acttcttatcccaatatcgactttc

SEQ ID NO: 124661 - DNA, 25 bp, Saccharomyces pastorianus
atccaaggaggcgagctagctgcta

SEQ ID NO: 124662 - DNA, 25 bp, Saccharomyces pastorianus
gtaactcctattatgccggtcttaa

SEQ ID NO: 124663 - DNA, 25 bp, Saccharomyces pastorianus
ggacactgacaacgaattgcttttt

SEQ ID NO: 124664 - DNA, 25 bp, Saccharomyces pastorianus
tgccttctaatctcctatacaacga

SEQ ID NO: 124665 - DNA, 25 bp, Saccharomyces pastorianus
ccttgtcatatccttctactgatgt

SEQ ID NO: 124666 - DNA, 25 bp, Saccharomyces pastorianus
cgatcgattgagacccttgtcatat

SEQ ID NO: 124667 - DNA, 25 bp, Saccharomyces pastorianus
ggtttgtttgatacggccggtcaag

SEQ ID NO: 124668 - DNA, 25 bp, Saccharomyces pastorianus
gtcgtcggtacgcagattgatctaa

SEQ ID NO: 124669 - DNA, 25 bp, Saccharomyces pastorianus
catgcctggtcgtcggtacgcagat

SEQ ID NO: 124670 - DNA, 25 bp, Saccharomyces pastorianus
gtgctgttgggaaaacgtgccttct

SEQ ID NO: 124671 - DNA, 25 bp, Saccharomyces pastorianus
gctaaagtgtgttgttgtcggtgat

SEQ ID NO: 124672 - DNA, 25 bp, Saccharomyces pastorianus
aactatgcggtgactgtgatgattg

SEQ ID NO: 124673 - DNA, 25 bp, Saccharomyces pastorianus
attgtccaggtgtaccatgcctggt

SEQ ID NO: 124674 - DNA, 25 bp, Saccharomyces pastorianus
atgaagctatcgtggccgccttgga

SEQ ID NO: 124675 - DNA, 25 bp, Saccharomyces pastorianus
gacaatcatattgcatacccattaa

SEQ ID NO: 124676 - DNA, 25 bp, Saccharomyces pastorianus
aaaggctctttgtgctacttcataa

SEQ ID NO: 124677 - DNA, 25 bp, Saccharomyces pastorianus
aatacaggcaattttctccacatat

SEQ ID NO: 124678 - DNA, 25 bp, Saccharomyces pastorianus
ggaaaatactacgtcgacttcgaca

SEQ ID NO: 124679 - DNA, 25 bp, Saccharomyces pastorianus
gacctaatgggctggagacgataca

SEQ ID NO: 124680 - DNA, 25 bp, Saccharomyces pastorianus
aaggtatttcgatcattcttgccaa

SEQ ID NO: 124681 - DNA, 25 bp, Saccharomyces pastorianus
tcgggatccagattgcagttgcgca

SEQ ID NO: 124682 - DNA, 25 bp, Saccharomyces pastorianus
gaagctgttgtacggcaatatcgat

SEQ ID NO: 124683 - DNA, 25 bp, Saccharomyces pastorianus
gttgcgcaagcttcgtttcaagtca

SEQ ID NO: 124684 - DNA, 25 bp, Saccharomyces pastorianus
gaaacgccgctggaaaaggctcttt

SEQ ID NO: 124685 - DNA, 25 bp, Saccharomyces pastorianus
aagtcagtgggctccttcaggaaaa

SEQ ID NO: 124686 - DNA, 25 bp, Saccharomyces pastorianus
gagtgaggaatctagctctgctaat

SEQ ID NO: 124687 - DNA, 25 bp, Saccharomyces pastorianus
aagcgccaataatgacggagttact

SEQ ID NO: 124688 - DNA, 25 bp, Saccharomyces pastorianus
gccgtcgtagcctccaagggtatag

SEQ ID NO: 124689 - DNA, 25 bp, Saccharomyces pastorianus
gctctgctaataacacgaccacaac

SEQ ID NO: 124690 - DNA, 25 bp, Saccharomyces pastorianus
agaggctctgtttactgtgtctcag

SEQ ID NO: 124691 - DNA, 25 bp, Saccharomyces pastorianus
aaggcgccgttttgtaacgctgaga

SEQ ID NO: 124692 - DNA, 25 bp, Saccharomyces pastorianus
gcctcgcatactctatcgaattcga

SEQ ID NO: 124693 - DNA, 25 bp, Saccharomyces pastorianus
gagattttccaagctatacctcagg

SEQ ID NO: 124694 - DNA, 25 bp, Saccharomyces pastorianus
atagtggtgcttctatgtcgcaggt

SEQ ID NO: 124695 - DNA, 25 bp, Saccharomyces pastorianus
gagagagcctctaaatctggaagat

SEQ ID NO: 124696 - DNA, 25 bp, Saccharomyces pastorianus
ctggacacaacccactgagcaaagt

SEQ ID NO: 124697 - DNA, 25 bp, Saccharomyces pastorianus
ctgaaacatacatcgctgctggaga

SEQ ID NO: 124698 - DNA, 25 bp, Saccharomyces pastorianus
gtaagactgaactcaccaggctctg

SEQ ID NO: 124699 - DNA, 25 bp, Saccharomyces pastorianus
gatggcttcactgcagtactaacaa

SEQ ID NO: 124700 - DNA, 25 bp, Saccharomyces pastorianus
agttgccactggttctttagacacc

SEQ ID NO: 124701 - DNA, 25 bp, Saccharomyces pastorianus
gcgcaaaaccctcgtacatatcaat

SEQ ID NO: 124702 - DNA, 25 bp, Saccharomyces pastorianus
gggaaacaccatctaccttggtcag

SEQ ID NO: 124703 - DNA, 25 bp, Saccharomyces pastorianus
gatttaaaaacacctcttcgcgcaa

SEQ ID NO: 124704 - DNA, 25 bp, Saccharomyces pastorianus
accttggtcagttctggtgcggacg

SEQ ID NO: 124705 - DNA, 25 bp, Saccharomyces pastorianus
taaggcgttgaatgctcacaaggac

SEQ ID NO: 124706 - DNA, 25 bp, Saccharomyces pastorianus
ctctgccgttagcttgagccaaaat

SEQ ID NO: 124707 - DNA, 25 bp, Saccharomyces pastorianus
ttcaagatgggctttccacaccagt

SEQ ID NO: 124708 - DNA, 25 bp, Saccharomyces pastorianus
gaaagattatgtaccatcgccaaca

SEQ ID NO: 124709 - DNA, 25 bp, Saccharomyces pastorianus
tattccacacgaatccactaggaga

SEQ ID NO: 124710 - DNA, 25 bp, Saccharomyces pastorianus
aattgaagccgtcctaacattttgg

SEQ ID NO: 124711 - DNA, 25 bp, Saccharomyces pastorianus
accctcagacaggtttcttagtagc

SEQ ID NO: 124712 - DNA, 25 bp, Saccharomyces pastorianus
tatgcaggtttacttacttccagaa

SEQ ID NO: 124713 - DNA, 25 bp, Saccharomyces pastorianus
acattgataacgctattccacacga

SEQ ID NO: 124714 - DNA, 25 bp, Saccharomyces pastorianus
aacattttggaacgccaaccctcag

SEQ ID NO: 124715 - DNA, 25 bp, Saccharomyces pastorianus
gcagacaaattcattgccaacattg

SEQ ID NO: 124716 - DNA, 25 bp, Saccharomyces pastorianus
atcgccaacagtactatagacttac

SEQ ID NO: 124717 - DNA, 25 bp, Saccharomyces pastorianus
gctacagcaattgaagcggtcttta

SEQ ID NO: 124718 - DNA, 25 bp, Saccharomyces pastorianus
acgaatatcgtgagttagcagacaa

SEQ ID NO: 124719 - DNA, 25 bp, Saccharomyces pastorianus
aggagtaccaatccaagattatcgt

SEQ ID NO: 124720 - DNA, 25 bp, Saccharomyces pastorianus
tgctccaagaccattggatttgttg

SEQ ID NO: 124721 - DNA, 25 bp, Saccharomyces pastorianus
gtaccaatccaagattatcgttttc

SEQ ID NO: 124722 - DNA, 25 bp, Saccharomyces pastorianus
ggagtaccaatccaagattatcgtt

SEQ ID NO: 124723 - DNA, 25 bp, Saccharomyces pastorianus
gattatcgttttcccaagagacggt

SEQ ID NO: 124724 - DNA, 25 bp, Saccharomyces pastorianus
gaagaaccacttcagaaagcactgg

SEQ ID NO: 124725 - DNA, 25 bp, Saccharomyces pastorianus
aaggagtaccaatccaagattatcg

SEQ ID NO: 124726 - DNA, 25 bp, Saccharomyces pastorianus
attggatttgttgagacctgttgtc

SEQ ID NO: 124727 - DNA, 25 bp, Saccharomyces pastorianus
gagtaccaatccaagattatcgttt

SEQ ID NO: 124728 - DNA, 25 bp, Saccharomyces pastorianus
agtaccaatccaagattatcgtttt

SEQ ID NO: 124729 - DNA, 25 bp, Saccharomyces pastorianus
aaaggagtaccaatccaagattatc

SEQ ID NO: 124730 - DNA, 25 bp, Saccharomyces pastorianus
agttgctactgctgtatcgaaaagt

SEQ ID NO: 124731 - DNA, 25 bp, Saccharomyces pastorianus
tactcaaaatgaggcagttgctact

SEQ ID NO: 124732 - DNA, 25 bp, Saccharomyces pastorianus
tgaaaggaaccattactaatcttgg

SEQ ID NO: 124733 - DNA, 25 bp, Saccharomyces pastorianus
aagactagtaacgacagtgagagta

SEQ ID NO: 124734 - DNA, 25 bp, Saccharomyces pastorianus
actgctgtatcgaaaagtagctcac

SEQ ID NO: 124735 - DNA, 25 bp, Saccharomyces pastorianus
agaaggcgtgatgaagatgataaca

SEQ ID NO: 124736 - DNA, 25 bp, Saccharomyces pastorianus
gcatagcagcgatgaaggtgataaa

SEQ ID NO: 124737 - DNA, 25 bp, Saccharomyces pastorianus
gccagctttgttgtatctagtgcaa

SEQ ID NO: 124738 - DNA, 25 bp, Saccharomyces pastorianus
tgtatctagtgcaagttcgagtaaa

SEQ ID NO: 124739 - DNA, 25 bp, Saccharomyces pastorianus
ggaagccagctttgttgtatctagt

SEQ ID NO: 124740 - DNA, 25 bp, Saccharomyces pastorianus
ctcacctctatacaggtggtttgta

SEQ ID NO: 124741 - DNA, 25 bp, Saccharomyces pastorianus
ttaataggcccgtgattcccaacga

SEQ ID NO: 124742 - DNA, 25 bp, Saccharomyces pastorianus
cattcgaggattttgcttggctgac

SEQ ID NO: 124743 - DNA, 25 bp, Saccharomyces pastorianus
aaattccctaacttcgatctttctg

SEQ ID NO: 124744 - DNA, 25 bp, Saccharomyces pastorianus
gaacacaaatttctatccctgcaga

SEQ ID NO: 124745 - DNA, 25 bp, Saccharomyces pastorianus
tacgcccataggtgttttgcaggac

SEQ ID NO: 124746 - DNA, 25 bp, Saccharomyces pastorianus
aaatggcatttggtttcctagaggc

SEQ ID NO: 124747 - DNA, 25 bp, Saccharomyces pastorianus
aagccgttacacgtacacgcagaga

SEQ ID NO: 124748 - DNA, 25 bp, Saccharomyces pastorianus
gagcaggaccttatatcttttggtt

SEQ ID NO: 124749 - DNA, 25 bp, Saccharomyces pastorianus
gtgaagtcacacattttggctggaa

SEQ ID NO: 124750 - DNA, 25 bp, Saccharomyces pastorianus
gtttcctagaggcataccggacatt

SEQ ID NO: 124751 - DNA, 25 bp, Saccharomyces pastorianus
atacacttggtctgtttctgctacg

SEQ ID NO: 124752 - DNA, 25 bp, Saccharomyces pastorianus
gcatcactaggagacaagggcttac

SEQ ID NO: 124753 - DNA, 25 bp, Saccharomyces pastorianus
tccgcgatcgaggtgtgcactacat

SEQ ID NO: 124754 - DNA, 25 bp, Saccharomyces pastorianus
gtgtgcactacatgcggagaatcat

SEQ ID NO: 124755 - DNA, 25 bp, Saccharomyces pastorianus
accacgtgaagatagcagggcatgc

SEQ ID NO: 124756 - DNA, 25 bp, Saccharomyces pastorianus
cgaaataagctattcaaccacgtga

SEQ ID NO: 124757 - DNA, 25 bp, Saccharomyces pastorianus
aaaactggcagaatcgtcttctgaa

SEQ ID NO: 124758 - DNA, 25 bp, Saccharomyces pastorianus
ggttggataatctctccgatctcga

SEQ ID NO: 124759 - DNA, 25 bp, Saccharomyces pastorianus
caagggcttacaaacggatgacgat

SEQ ID NO: 124760 - DNA, 25 bp, Saccharomyces pastorianus
agcattgcaagctgaactcgctgaa

SEQ ID NO: 124761 - DNA, 25 bp, Saccharomyces pastorianus
ggatgatcttttagcatcactagga

SEQ ID NO: 124762 - DNA, 25 bp, Saccharomyces pastorianus
taaatccacaaaaagcactccgtcc

SEQ ID NO: 124763 - DNA, 25 bp, Saccharomyces pastorianus
acaacggtcaatatggtgccgacaa

SEQ ID NO: 124764 - DNA, 25 bp, Saccharomyces pastorianus
ttctactcaagtggccaacaaggtc

SEQ ID NO: 124765 - DNA, 25 bp, Saccharomyces pastorianus
caacaaccatcaccgtcaggacaat

SEQ ID NO: 124766 - DNA, 25 bp, Saccharomyces pastorianus
aataacggtggatttggcggtccag

SEQ ID NO: 124767 - DNA, 25 bp, Saccharomyces pastorianus
aggtgtcgaacaaccattctaagtt

SEQ ID NO: 124768 - DNA, 25 bp, Saccharomyces pastorianus
gaactggtgctccaaacaacggtca

SEQ ID NO: 124769 - DNA, 25 bp, Saccharomyces pastorianus
gtgcgtacgctggatctaaggtgtc

SEQ ID NO: 124770 - DNA, 25 bp, Saccharomyces pastorianus
atacggcaactcaaacttcggaggt

SEQ ID NO: 124771 - DNA, 25 bp, Saccharomyces pastorianus
gaggtgctcctcaaggtggacacaa

SEQ ID NO: 124772 - DNA, 25 bp, Saccharomyces pastorianus
tggtgccgacaatggtaaccccaac

SEQ ID NO: 124773 - DNA, 25 bp, Saccharomyces pastorianus
taggtggtgcattccttgccaacaa

SEQ ID NO: 124774 - DNA, 25 bp, Saccharomyces pastorianus
tggactcgaaactctacctaagggc

SEQ ID NO: 124775 - DNA, 25 bp, Saccharomyces pastorianus
cagactgtgagctagaatggttcca

SEQ ID NO: 124776 - DNA, 25 bp, Saccharomyces pastorianus
agcaaatcgtcgcaggcactgaaga

SEQ ID NO: 124777 - DNA, 25 bp, Saccharomyces pastorianus
ggtgtggacaaccatccagcaatgc

SEQ ID NO: 124778 - DNA, 25 bp, Saccharomyces pastorianus
gtttcaccaagcactatcagcacgg

SEQ ID NO: 124779 - DNA, 25 bp, Saccharomyces pastorianus
gctctactgctactgtaaccaagtg

SEQ ID NO: 124780 - DNA, 25 bp, Saccharomyces pastorianus
acgagagccaagaccacactggtaa

SEQ ID NO: 124781 - DNA, 25 bp, Saccharomyces pastorianus
gataggtacatctacagcgtccagg

SEQ ID NO: 124782 - DNA, 25 bp, Saccharomyces pastorianus
caatgcacctccatcatgaactaat

SEQ ID NO: 124783 - DNA, 25 bp, Saccharomyces pastorianus
acaacgccgatccagagaccaaaaa

SEQ ID NO: 124784 - DNA, 25 bp, Saccharomyces pastorianus
aagaggagagttgccaccacagccg

SEQ ID NO: 124785 - DNA, 25 bp, Saccharomyces pastorianus
attgctcgtgtaatccaaggcgtcc

SEQ ID NO: 124786 - DNA, 25 bp, Saccharomyces pastorianus
ttttggagccatgtcagtgctggga

SEQ ID NO: 124787 - DNA, 25 bp, Saccharomyces pastorianus
ctagccatggctgatcgaattataa

SEQ ID NO: 124788 - DNA, 25 bp, Saccharomyces pastorianus
ctacgatgtctttccaggcaaatat

SEQ ID NO: 124789 - DNA, 25 bp, Saccharomyces pastorianus
gcaccgatgttcttcaccaagtata

SEQ ID NO: 124790 - DNA, 25 bp, Saccharomyces pastorianus
tagcggaaacggtaccattcatgat

SEQ ID NO: 124791 - DNA, 25 bp, Saccharomyces pastorianus
gaatttgactatcgcacacttccaa

SEQ ID NO: 124792 - DNA, 25 bp, Saccharomyces pastorianus
ggaaataaattctatcgcaccgatg

SEQ ID NO: 124793 - DNA, 25 bp, Saccharomyces pastorianus
ggagagaatcccattgctcgtgtaa

SEQ ID NO: 124794 - DNA, 25 bp, Saccharomyces pastorianus
agtatagtgataccccgattcaaaa

SEQ ID NO: 124795 - DNA, 25 bp, Saccharomyces pastorianus
gcatcgccgagatgacggccgtgat

SEQ ID NO: 124796 - DNA, 25 bp, Saccharomyces pastorianus
aaccggcacctgtcgaagcagaaat

SEQ ID NO: 124797 - DNA, 25 bp, Saccharomyces pastorianus
gagttaccataatcttcgagactat

SEQ ID NO: 124798 - DNA, 25 bp, Saccharomyces pastorianus
gaaactacttccattatcacataaa

SEQ ID NO: 124799 - DNA, 25 bp, Saccharomyces pastorianus
tatactcacatgaaccaccattgga

SEQ ID NO: 124800 - DNA, 25 bp, Saccharomyces pastorianus
aagagactatatcaaccacctaaag

SEQ ID NO: 124801 - DNA, 25 bp, Saccharomyces pastorianus
gagaaaccgtcaaatccaatccgct

SEQ ID NO: 124802 - DNA, 25 bp, Saccharomyces pastorianus
ctctaaagcctacatgcactccaga

SEQ ID NO: 124803 - DNA, 25 bp, Saccharomyces pastorianus
aatccgctccacaagttttatactc

SEQ ID NO: 124804 - DNA, 25 bp, Saccharomyces pastorianus
gagaacatcttcatcaaaccttcca

SEQ ID NO: 124805 - DNA, 25 bp, Saccharomyces pastorianus
attgaactaagccagcagcaaccgg

SEQ ID NO: 124806 - DNA, 25 bp, Saccharomyces pastorianus
ttttcccacgtcatttccagacaaa

SEQ ID NO: 124807 - DNA, 25 bp, Saccharomyces pastorianus
ttgctgcgtatttgtcactggacca

SEQ ID NO: 124808 - DNA, 25 bp, Saccharomyces pastorianus
gaaaaacgtcttctttgctgcgtat

SEQ ID NO: 124809 - DNA, 25 bp, Saccharomyces pastorianus
actgcattcgtaagtgccaaatcgc

SEQ ID NO: 124810 - DNA, 25 bp, Saccharomyces pastorianus
acttggcaaggtttttagctgtaca

SEQ ID NO: 124811 - DNA, 25 bp, Saccharomyces pastorianus
tctaactggtgttggttgttcggcc

SEQ ID NO: 124812 - DNA, 25 bp, Saccharomyces pastorianus
aagtgatcccggtgaccatccttac

SEQ ID NO: 124813 - DNA, 25 bp, Saccharomyces pastorianus
aacctttgaaccacttgcaagctgc

SEQ ID NO: 124814 - DNA, 25 bp, Saccharomyces pastorianus
gtgggttggttatggatcttcgcaa

SEQ ID NO: 124815 - DNA, 25 bp, Saccharomyces pastorianus
acgttgcattgtctggtgtggtcac

SEQ ID NO: 124816 - DNA, 25 bp, Saccharomyces pastorianus
gaactcgtcagtgttggccagacta

SEQ ID NO: 124817 - DNA, 25 bp, Saccharomyces pastorianus
gggacgctgcagactcgttcatagt

SEQ ID NO: 124818 - DNA, 25 bp, Saccharomyces pastorianus
cggaccaactctataatcagccttg

SEQ ID NO: 124819 - DNA, 25 bp, Saccharomyces pastorianus
agatcactcactaatgcttgctgga

SEQ ID NO: 124820 - DNA, 25 bp, Saccharomyces pastorianus
ggtctagaatttgatccggtttcca

SEQ ID NO: 124821 - DNA, 25 bp, Saccharomyces pastorianus
gaacaagtccttccgggctatttga

SEQ ID NO: 124822 - DNA, 25 bp, Saccharomyces pastorianus
gccttgatccgctgagtgagatgct

SEQ ID NO: 124823 - DNA, 25 bp, Saccharomyces pastorianus
attcgccagtatcagcgggtctaga

SEQ ID NO: 124824 - DNA, 25 bp, Saccharomyces pastorianus
gcaccccttatttcaacgttatgga

SEQ ID NO: 124825 - DNA, 25 bp, Saccharomyces pastorianus
tagtttggtgtccacttctatgggc

SEQ ID NO: 124826 - DNA, 25 bp, Saccharomyces pastorianus
gaaggacctgtcatgctgctataca

SEQ ID NO: 124827 - DNA, 25 bp, Saccharomyces pastorianus
gatggaaacgtcctgatccttggtg

SEQ ID NO: 124828 - DNA, 25 bp, Saccharomyces pastorianus
ttgctacggctttggatcagtgact

SEQ ID NO: 124829 - DNA, 25 bp, Saccharomyces pastorianus
ggcccatgccggttataagtgtgtt

SEQ ID NO: 124830 - DNA, 25 bp, Saccharomyces pastorianus
acgaagggtgtttcctatgtggatt

SEQ ID NO: 124831 - DNA, 25 bp, Saccharomyces pastorianus
gatccatggaacctactatgtgcca

SEQ ID NO: 124832 - DNA, 25 bp, Saccharomyces pastorianus
gggcagatcaattgttgcctctggt

SEQ ID NO: 124833 - DNA, 25 bp, Saccharomyces pastorianus
tagtgctaccttatcgatggcccat

SEQ ID NO: 124834 - DNA, 25 bp, Saccharomyces pastorianus
gggtaacattgagcagatccatgga

SEQ ID NO: 124835 - DNA, 25 bp, Saccharomyces pastorianus
aggatgaacgacatggaacgcaacc

SEQ ID NO: 124836 - DNA, 25 bp, Saccharomyces pastorianus
caatttgcgtctcccagttaaagaa

SEQ ID NO: 124837 - DNA, 25 bp, Saccharomyces pastorianus
aaatgttgccaatttgcgtctccca

SEQ ID NO: 124838 - DNA, 25 bp, Saccharomyces pastorianus
gtgcagactactttgccataccatt

SEQ ID NO: 124839 - DNA, 25 bp, Saccharomyces pastorianus
tgcctctggtggacggtgcagacta

SEQ ID NO: 124840 - DNA, 25 bp, Saccharomyces pastorianus
tgcccatcgaaacgaccctgagaat

SEQ ID NO: 124841 - DNA, 25 bp, Saccharomyces pastorianus
atggcaatggcagcactgaccagat

SEQ ID NO: 124842 - DNA, 25 bp, Saccharomyces pastorianus
accttcggtggtagtaatgactctg

SEQ ID NO: 124843 - DNA, 25 bp, Saccharomyces pastorianus
tgaccagatatcagggccagcatcg

SEQ ID NO: 124844 - DNA, 25 bp, Saccharomyces pastorianus
ttttgtgggcgtggtgcccatcgaa

SEQ ID NO: 124845 - DNA, 25 bp, Saccharomyces pastorianus
tagacagtactcttcgtacaccttc

SEQ ID NO: 124846 - DNA, 25 bp, Saccharomyces pastorianus
atggtcacacattgagtcatcgtat

SEQ ID NO: 124847 - DNA, 25 bp, Saccharomyces pastorianus
tacgctgacgctgtgtacggcaagt

SEQ ID NO: 124848 - DNA, 25 bp, Saccharomyces pastorianus
ggttgcgttgaatggtattacccag

SEQ ID NO: 124849 - DNA, 25 bp, Saccharomyces pastorianus
atatttacccgagatatggtcacac

SEQ ID NO: 124850 - DNA, 25 bp, Saccharomyces pastorianus
gaagagtatctctgcaggctgccta

SEQ ID NO: 124851 - DNA, 25 bp, Saccharomyces pastorianus
ggtttattgcatccgtctgagtgaa

SEQ ID NO: 124852 - DNA, 25 bp, Saccharomyces pastorianus
tggtgggcctatggttcgcagtact

SEQ ID NO: 124853 - DNA, 25 bp, Saccharomyces pastorianus
ggttcgcagtactgggacactacta

SEQ ID NO: 124854 - DNA, 25 bp, Saccharomyces pastorianus
gggacactactaatactactgggtt

SEQ ID NO: 124855 - DNA, 25 bp, Saccharomyces pastorianus
gtatcattaactttttggaacgcaa

SEQ ID NO: 124856 - DNA, 25 bp, Saccharomyces pastorianus
atatgatgatctccccatcagtggt

SEQ ID NO: 124857 - DNA, 25 bp, Saccharomyces pastorianus
gtaccgggtcagcatttgccgataa

SEQ ID NO: 124858 - DNA, 25 bp, Saccharomyces pastorianus
atactaattgcctgcggtgatatca

SEQ ID NO: 124859 - DNA, 25 bp, Saccharomyces pastorianus
atcgtaactttgtctcacctggaaa

SEQ ID NO: 124860 - DNA, 25 bp, Saccharomyces pastorianus
aataccgactcttttaatggcagtg

SEQ ID NO: 124861 - DNA, 25 bp, Saccharomyces pastorianus
tactgggttgtcttctagcaaagca

SEQ ID NO: 124862 - DNA, 25 bp, Saccharomyces pastorianus
agagagcataactagccccacaatt

SEQ ID NO: 124863 - DNA, 25 bp, Saccharomyces pastorianus
gatctgttgctggtagcgacttata

SEQ ID NO: 124864 - DNA, 25 bp, Saccharomyces pastorianus
gttccattatggttgcgtaggcctg

SEQ ID NO: 124865 - DNA, 25 bp, Saccharomyces pastorianus
ttcggatatcaggtacagtttcctt

SEQ ID NO: 124866 - DNA, 25 bp, Saccharomyces pastorianus
ttgtcccttcgagtggttccattat

SEQ ID NO: 124867 - DNA, 25 bp, Saccharomyces pastorianus
tggcttgtgataatccggcttgtcc

SEQ ID NO: 124868 - DNA, 25 bp, Saccharomyces pastorianus
cgtaggcctgaaacaagctcccaag

SEQ ID NO: 124869 - DNA, 25 bp, Saccharomyces pastorianus
aaagggcctgtagggatctgttgct

SEQ ID NO: 124870 - DNA, 25 bp, Saccharomyces pastorianus
aagatctcttcgactgatgcaaaca

SEQ ID NO: 124871 - DNA, 25 bp, Saccharomyces pastorianus
aggaatgtatcttatgggccaatgg

SEQ ID NO: 124872 - DNA, 25 bp, Saccharomyces pastorianus
agtttccttagcactttggatcatt

SEQ ID NO: 124873 - DNA, 25 bp, Saccharomyces pastorianus
aatgccgtcgatgggaatcttatct

SEQ ID NO: 124874 - DNA, 25 bp, Saccharomyces pastorianus
taaaaactcattaccaccagctctg

SEQ ID NO: 124875 - DNA, 25 bp, Saccharomyces pastorianus
caagtttagctttatccacgggtgt

SEQ ID NO: 124876 - DNA, 25 bp, Saccharomyces pastorianus
aacgagcaccattccttatttatct

SEQ ID NO: 124877 - DNA, 25 bp, Saccharomyces pastorianus
gttaccagcgttgagattttcccaa

SEQ ID NO: 124878 - DNA, 25 bp, Saccharomyces pastorianus
ggacaaaatgaacctggccctttag

SEQ ID NO: 124879 - DNA, 25 bp, Saccharomyces pastorianus
ggtccttgcttccaaatctgttata

SEQ ID NO: 124880 - DNA, 25 bp, Saccharomyces pastorianus
agccgcgagctgttgattctcaaga

SEQ ID NO: 124881 - DNA, 25 bp, Saccharomyces pastorianus
tggccctttagttttccatttgaat

SEQ ID NO: 124882 - DNA, 25 bp, Saccharomyces pastorianus
aaaattcatcatcctccttaatgcc

SEQ ID NO: 124883 - DNA, 25 bp, Saccharomyces pastorianus
gattttctgttggaacatcctctaa

SEQ ID NO: 124884 - DNA, 25 bp, Saccharomyces pastorianus
gttgatcggtttactatcttccatt

SEQ ID NO: 124885 - DNA, 25 bp, Saccharomyces pastorianus
tgctcctgcattgggttttctttaa

SEQ ID NO: 124886 - DNA, 25 bp, Saccharomyces pastorianus
taatgcatggcggtagcgttatcaa

SEQ ID NO: 124887 - DNA, 25 bp, Saccharomyces pastorianus
ttaccatattgttctactgctcctg

SEQ ID NO: 124888 - DNA, 25 bp, Saccharomyces pastorianus
gactacttgctggtcaacacatggc

SEQ ID NO: 124889 - DNA, 25 bp, Saccharomyces pastorianus
ggtgttatcttgacaattgccggat

SEQ ID NO: 124890 - DNA, 25 bp, Saccharomyces pastorianus
gattgtcgttatatccgtggcactc

SEQ ID NO: 124891 - DNA, 25 bp, Saccharomyces pastorianus
tcttctacggatgacgtcacgtcga

SEQ ID NO: 124892 - DNA, 25 bp, Saccharomyces pastorianus
gcggatcttcattaatcgggttgct

SEQ ID NO: 124893 - DNA, 25 bp, Saccharomyces pastorianus
gtagcccttgtagcgattcatggaa

SEQ ID NO: 124894 - DNA, 25 bp, Saccharomyces pastorianus
aggtaggaatactgccgtcttcttc

SEQ ID NO: 124895 - DNA, 25 bp, Saccharomyces pastorianus
aagcccactgaccacggaaagacag

SEQ ID NO: 124896 - DNA, 25 bp, Saccharomyces pastorianus
gatgacgatttatcttcgagcttaa

SEQ ID NO: 124897 - DNA, 25 bp, Saccharomyces pastorianus
ggatcctcccaaatttgagtggaat

SEQ ID NO: 124898 - DNA, 25 bp, Saccharomyces pastorianus
aaaggagcgacagctttggacaatg

SEQ ID NO: 124899 - DNA, 25 bp, Saccharomyces pastorianus
tattaaatgtatccgcaagcccact

SEQ ID NO: 124900 - DNA, 25 bp, Saccharomyces pastorianus
gaacacttagagcttttacaactac

SEQ ID NO: 124901 - DNA, 25 bp, Saccharomyces pastorianus
aagtgttagtaaatctgcgttggaa

SEQ ID NO: 124902 - DNA, 25 bp, Saccharomyces pastorianus
acagggattcttggatcctcccaaa

SEQ ID NO: 124903 - DNA, 25 bp, Saccharomyces pastorianus
aaatgaggcgttacaacatttgcaa

SEQ ID NO: 124904 - DNA, 25 bp, Saccharomyces pastorianus
atatacccctactttacaaaatgat

SEQ ID NO: 124905 - DNA, 25 bp, Saccharomyces pastorianus
aatggagtgcggtagttcagatgac

SEQ ID NO: 124906 - DNA, 25 bp, Saccharomyces pastorianus
gacacatggccacaataatatctga

SEQ ID NO: 124907 - DNA, 25 bp, Saccharomyces pastorianus
tactacgccattcccttaatgaggg

SEQ ID NO: 124908 - DNA, 25 bp, Saccharomyces pastorianus
gaattcatcttcatccttatcatgt

SEQ ID NO: 124909 - DNA, 25 bp, Saccharomyces pastorianus
aagaggcctcgctgaattcatcttc

SEQ ID NO: 124910 - DNA, 25 bp, Saccharomyces pastorianus
tattgctactctacctgcagacgat

SEQ ID NO: 124911 - DNA, 25 bp, Saccharomyces pastorianus
aatctggatttctacagccgacgct

SEQ ID NO: 124912 - DNA, 25 bp, Saccharomyces pastorianus
gtggtcatcgctgcctagtgaagat

SEQ ID NO: 124913 - DNA, 25 bp, Saccharomyces pastorianus
gaccggattcgtgatatggctagac

SEQ ID NO: 124914 - DNA, 25 bp, Saccharomyces pastorianus
gaagatccctctatgctagtagcaa

SEQ ID NO: 124915 - DNA, 25 bp, Saccharomyces pastorianus
gccgacgctggatgttattgctact

SEQ ID NO: 124916 - DNA, 25 bp, Saccharomyces pastorianus
aaaggttcaataggccgtgttatgt

SEQ ID NO: 124917 - DNA, 25 bp, Saccharomyces pastorianus
atcagttcaaacaggctattgccca

SEQ ID NO: 124918 - DNA, 25 bp, Saccharomyces pastorianus
gcatccagtgataaacttgacgcca

SEQ ID NO: 124919 - DNA, 25 bp, Saccharomyces pastorianus
gcatacagagtggttcaatgtgcct

SEQ ID NO: 124920 - DNA, 25 bp, Saccharomyces pastorianus
ggagctaccatcagtactaagactt

SEQ ID NO: 124921 - DNA, 25 bp, Saccharomyces pastorianus
ttccagatcctaaggtgccaaccct

SEQ ID NO: 124922 - DNA, 25 bp, Saccharomyces pastorianus
tgcccatttcattatcaagcttaca

SEQ ID NO: 124923 - DNA, 25 bp, Saccharomyces pastorianus
gccaacccttcgcacttataaagat

SEQ ID NO: 124924 - DNA, 25 bp, Saccharomyces pastorianus
aatgtgcctgtattggagctaccat

SEQ ID NO: 124925 - DNA, 25 bp, Saccharomyces pastorianus
aactaccagatatcgaaagcgctat

SEQ ID NO: 124926 - DNA, 25 bp, Saccharomyces pastorianus
gataaaagtcactcacacaagcctt

SEQ ID NO: 124927 - DNA, 25 bp, Saccharomyces pastorianus
gaatggcaaaccacatgcaagcatc

SEQ ID NO: 124928 - DNA, 25 bp, Saccharomyces pastorianus
tatttccaccaattcggtagttcat

SEQ ID NO: 124929 - DNA, 25 bp, Saccharomyces pastorianus
ggcaatttagctccagtaccatgat

SEQ ID NO: 124930 - DNA, 25 bp, Saccharomyces pastorianus
tatggcttcgcctagtaccgataat

SEQ ID NO: 124931 - DNA, 25 bp, Saccharomyces pastorianus
aactcgcttaaattccatgccaacg

SEQ ID NO: 124932 - DNA, 25 bp, Saccharomyces pastorianus
gagtgattttggcagaccaccgaac

SEQ ID NO: 124933 - DNA, 25 bp, Saccharomyces pastorianus
aactgaatatgccacatgccaccaa

SEQ ID NO: 124934 - DNA, 25 bp, Saccharomyces pastorianus
gtttaaacaatcacgttcccacaca

SEQ ID NO: 124935 - DNA, 25 bp, Saccharomyces pastorianus
acgttcccacacaaaggcaatttag

SEQ ID NO: 124936 - DNA, 25 bp, Saccharomyces pastorianus
agtccctgctcctagtttaaacaat

SEQ ID NO: 124937 - DNA, 25 bp, Saccharomyces pastorianus
tgccaccaacccaaacaatactttt

SEQ ID NO: 124938 - DNA, 25 bp, Saccharomyces pastorianus
ggtacaagtacaaccttttcactca

SEQ ID NO: 124939 - DNA, 25 bp, Saccharomyces pastorianus
ttggcacttctaattatcatgtggg

SEQ ID NO: 124940 - DNA, 25 bp, Saccharomyces pastorianus
aatatcggtcgcattcatttgtttg

SEQ ID NO: 124941 - DNA, 25 bp, Saccharomyces pastorianus
ggcactgtgcagaccattattgaag

SEQ ID NO: 124942 - DNA, 25 bp, Saccharomyces pastorianus
acttctgtagatcaccaatggcgga

SEQ ID NO: 124943 - DNA, 25 bp, Saccharomyces pastorianus
tgtaagcaacatggcgtcaagatta

SEQ ID NO: 124944 - DNA, 25 bp, Saccharomyces pastorianus
gctaaagtttgccttttaggtgatg

SEQ ID NO: 124945 - DNA, 25 bp, Saccharomyces pastorianus
gaacactaatgatggcactgtgcag

SEQ ID NO: 124946 - DNA, 25 bp, Saccharomyces pastorianus
caacctgaaggttctaaagctaaag

SEQ ID NO: 124947 - DNA, 25 bp, Saccharomyces pastorianus
gattgattcatttggcacttctaat

SEQ ID NO: 124948 - DNA, 25 bp, Saccharomyces pastorianus
gtcgcattcatttgtttgggtaact

SEQ ID NO: 124949 - DNA, 25 bp, Saccharomyces pastorianus
ggatgaatccaacattaatagccta

SEQ ID NO: 124950 - DNA, 25 bp, Saccharomyces pastorianus
ttcatctgatattcgtaagctggct

SEQ ID NO: 124951 - DNA, 25 bp, Saccharomyces pastorianus
agaagtgcatgattctcctttcctt

SEQ ID NO: 124952 - DNA, 25 bp, Saccharomyces pastorianus
aattagacttggtactggcttcatc

SEQ ID NO: 124953 - DNA, 25 bp, Saccharomyces pastorianus
aagacggccaatacggaccaaatat

SEQ ID NO: 124954 - DNA, 25 bp, Saccharomyces pastorianus
gctgagaggccggtacgttacgtta

SEQ ID NO: 124955 - DNA, 25 bp, Saccharomyces pastorianus
cacacatattcttctctaccaatga

SEQ ID NO: 124956 - DNA, 25 bp, Saccharomyces pastorianus
aattcactttgaaccgtcgctgtac

SEQ ID NO: 124957 - DNA, 25 bp, Saccharomyces pastorianus
atgactagtgtccaaacgaacgaag

SEQ ID NO: 124958 - DNA, 25 bp, Saccharomyces pastorianus
tgaacattctacaccatcaatcggg

SEQ ID NO: 124959 - DNA, 25 bp, Saccharomyces pastorianus
gacagcacccttttgtttgctgaga

SEQ ID NO: 124960 - DNA, 25 bp, Saccharomyces pastorianus
tgaggaacccactctaaccacgatg

SEQ ID NO: 124961 - DNA, 25 bp, Saccharomyces pastorianus
ttgtctctccatttggacttttgtt

SEQ ID NO: 124962 - DNA, 25 bp, Saccharomyces pastorianus
gggttcagtttcactgcatgctctg

SEQ ID NO: 124963 - DNA, 25 bp, Saccharomyces pastorianus
gtactctacttctataaacgtgatg

SEQ ID NO: 124964 - DNA, 25 bp, Saccharomyces pastorianus
atgctctgctttttgtctctccatt

SEQ ID NO: 124965 - DNA, 25 bp, Saccharomyces pastorianus
gttatccatgattactccgggttta

SEQ ID NO: 124966 - DNA, 25 bp, Saccharomyces pastorianus
gggcatacctactatggttgaaatc

SEQ ID NO: 124967 - DNA, 25 bp, Saccharomyces pastorianus
ttataactctaaacacggtgtggaa

SEQ ID NO: 124968 - DNA, 25 bp, Saccharomyces pastorianus
tcctaagctcaatcagttatccatg

SEQ ID NO: 124969 - DNA, 25 bp, Saccharomyces pastorianus
ggacttttgttgtactctacttcta

SEQ ID NO: 124970 - DNA, 25 bp, Saccharomyces pastorianus
aaagatactctattcctaagctcaa

SEQ ID NO: 124971 - DNA, 25 bp, Saccharomyces pastorianus
gaacggtattgtgctttataactct

SEQ ID NO: 124972 - DNA, 25 bp, Saccharomyces pastorianus
cagtatccagagtcatgaaacagct

SEQ ID NO: 124973 - DNA, 25 bp, Saccharomyces pastorianus
gacctgccagatgacttaaattcaa

SEQ ID NO: 124974 - DNA, 25 bp, Saccharomyces pastorianus
tttattccagtaaagcggcatgtgg

SEQ ID NO: 124975 - DNA, 25 bp, Saccharomyces pastorianus
gatgaacaagagtatcggatcaatg

SEQ ID NO: 124976 - DNA, 25 bp, Saccharomyces pastorianus
agacaatgtgaaccttactagaagt

SEQ ID NO: 124977 - DNA, 25 bp, Saccharomyces pastorianus
ttcactatctccaacagtatccaga

SEQ ID NO: 124978 - DNA, 25 bp, Saccharomyces pastorianus
agaagttttcactatctccaacagt

SEQ ID NO: 124979 - DNA, 25 bp, Saccharomyces pastorianus
gcggcatgtggaagacctgccagat

SEQ ID NO: 124980 - DNA, 25 bp, Saccharomyces pastorianus
gccatggtggagatttttcgatgaa

SEQ ID NO: 124981 - DNA, 25 bp, Saccharomyces pastorianus
gagattattgtagatccttacaaaa

SEQ ID NO: 124982 - DNA, 25 bp, Saccharomyces pastorianus
agccgataggccatggtggagattt

SEQ ID NO: 124983 - DNA, 25 bp, Saccharomyces pastorianus
agtaacttggactgccgagcgggtc

SEQ ID NO: 124984 - DNA, 25 bp, Saccharomyces pastorianus
cagtatccggtctggaaatggctca

SEQ ID NO: 124985 - DNA, 25 bp, Saccharomyces pastorianus
gatgcagtttggtttgggccaccaa

SEQ ID NO: 124986 - DNA, 25 bp, Saccharomyces pastorianus
gtggcatctggcgttaagttcgttg

SEQ ID NO: 124987 - DNA, 25 bp, Saccharomyces pastorianus
tgttttcgaaacagcgcgtagcact

SEQ ID NO: 124988 - DNA, 25 bp, Saccharomyces pastorianus
gaagccaaggccctagtggcatctg

SEQ ID NO: 124989 - DNA, 25 bp, Saccharomyces pastorianus
atacaggccgcacaagagtactcta

SEQ ID NO: 124990 - DNA, 25 bp, Saccharomyces pastorianus
gttcgttgccgaaggtgctaacatg

SEQ ID NO: 124991 - DNA, 25 bp, Saccharomyces pastorianus
caaaggcagctaacctgggcggcgt

SEQ ID NO: 124992 - DNA, 25 bp, Saccharomyces pastorianus
caaacaccttgccatcattggtcaa

SEQ ID NO: 124993 - DNA, 25 bp, Saccharomyces pastorianus
tacacccgaggctatttctgttttc

SEQ ID NO: 124994 - DNA, 25 bp, Saccharomyces pastorianus
ggttcggcctagtttactatacgca

SEQ ID NO: 124995 - DNA, 25 bp, Saccharomyces pastorianus
gtgcatcatctgtgagacgggcatt

SEQ ID NO: 124996 - DNA, 25 bp, Saccharomyces pastorianus
tgtggtgtctttatccgattcgaag

SEQ ID NO: 124997 - DNA, 25 bp, Saccharomyces pastorianus
gtgaaattggctacctattcggcgc

SEQ ID NO: 124998 - DNA, 25 bp, Saccharomyces pastorianus
gacgggcattacttctgagcaaatt

SEQ ID NO: 124999 - DNA, 25 bp, Saccharomyces pastorianus
aaacgtgtgacaatctccggaagtg

SEQ ID NO: 125000 - DNA, 25 bp, Saccharomyces pastorianus
aagtacgttgcaggagcacgcccat

SEQ ID NO: 125001 - DNA, 25 bp, Saccharomyces pastorianus
aaattcacgatatcgcttccgccaa

SEQ ID NO: 125002 - DNA, 25 bp, Saccharomyces pastorianus
ttccgccaagatccgtttcaagtcg

SEQ ID NO: 125003 - DNA, 25 bp, Saccharomyces pastorianus
gtggctcacttatcaggccggaggc

SEQ ID NO: 125004 - DNA, 25 bp, Saccharomyces pastorianus
taaggacacagacgtgcccgcagga

SEQ ID NO: 125005 - DNA, 25 bp, Saccharomyces pastorianus
tcaagagctgctagacaatcggatg

SEQ ID NO: 125006 - DNA, 25 bp, Saccharomyces pastorianus
aacacagtgcagaagactcctacaa

SEQ ID NO: 125007 - DNA, 25 bp, Saccharomyces pastorianus
aagagctggcttttttgaacggagg

SEQ ID NO: 125008 - DNA, 25 bp, Saccharomyces pastorianus
gacaaactggccaactctatttcat

SEQ ID NO: 125009 - DNA, 25 bp, Saccharomyces pastorianus
agacaatcggatgctcttgagccag

SEQ ID NO: 125010 - DNA, 25 bp, Saccharomyces pastorianus
actctatttcatccatggacaggga

SEQ ID NO: 125011 - DNA, 25 bp, Saccharomyces pastorianus
atcgtctggacggtaaaattgccaa

SEQ ID NO: 125012 - DNA, 25 bp, Saccharomyces pastorianus
ggccttgaattttaccaatcgtctg

SEQ ID NO: 125013 - DNA, 25 bp, Saccharomyces pastorianus
gggatcgtttagtgaaggccttgaa

SEQ ID NO: 125014 - DNA, 25 bp, Saccharomyces pastorianus
tctcgtgccaagtacattcaaaata

SEQ ID NO: 125015 - DNA, 25 bp, Saccharomyces pastorianus
ggagatcccagaagtttttgactct

SEQ ID NO: 125016 - DNA, 25 bp, Saccharomyces pastorianus
aatttgtgcttactgcggccgtcgt

SEQ ID NO: 125017 - DNA, 25 bp, Saccharomyces pastorianus
aacgaaagagaatcccctaatccat

SEQ ID NO: 125018 - DNA, 25 bp, Saccharomyces pastorianus
agatcgcatcttagagcaacctctg

SEQ ID NO: 125019 - DNA, 25 bp, Saccharomyces pastorianus
tgaaatttgtgcttactgcggccgt

SEQ ID NO: 125020 - DNA, 25 bp, Saccharomyces pastorianus
ccctaatccatttgaccgcattata

SEQ ID NO: 125021 - DNA, 25 bp, Saccharomyces pastorianus
gggctgataaataatgccaagcaca

SEQ ID NO: 125022 - DNA, 25 bp, Saccharomyces pastorianus
agataccagggctgataaataatgc

SEQ ID NO: 125023 - DNA, 25 bp, Saccharomyces pastorianus
gagcaacctctgaaatttgtgctta

SEQ ID NO: 125024 - DNA, 25 bp, Saccharomyces pastorianus
ttactgcggccgtcgtgctcttgac

SEQ ID NO: 125025 - DNA, 25 bp, Saccharomyces pastorianus
aagagaatcccctaatccatttgac

SEQ ID NO: 125026 - DNA, 25 bp, Saccharomyces pastorianus
ttgaccgcattatagatcgcatctt

SEQ ID NO: 125027 - DNA, 25 bp, Saccharomyces pastorianus
acgagacccattgatgattccacat

SEQ ID NO: 125028 - DNA, 25 bp, Saccharomyces pastorianus
gaaaccgcatgattgggatgatcgc

SEQ ID NO: 125029 - DNA, 25 bp, Saccharomyces pastorianus
gggctgataaagaattccaagtaca

SEQ ID NO: 125030 - DNA, 25 bp, Saccharomyces pastorianus
gagacccattgatgattccacatcc

SEQ ID NO: 125031 - DNA, 25 bp, Saccharomyces pastorianus
gcgaaaccgcatgattgggatgatc

SEQ ID NO: 125032 - DNA, 25 bp, Saccharomyces pastorianus
aaccgcatgattgggatgatcgcat

SEQ ID NO: 125033 - DNA, 25 bp, Saccharomyces pastorianus
gcagggctgataaagaattccaagt

SEQ ID NO: 125034 - DNA, 25 bp, Saccharomyces pastorianus
agacccattgatgattccacatcca

SEQ ID NO: 125035 - DNA, 25 bp, Saccharomyces pastorianus
gaattccaagtacaaaggtccaggc

SEQ ID NO: 125036 - DNA, 25 bp, Saccharomyces pastorianus
gaacgagacccattgatgattccac

SEQ ID NO: 125037 - DNA, 25 bp, Saccharomyces pastorianus
atagcagggctgataaagaattcca

SEQ ID NO: 125038 - DNA, 25 bp, Saccharomyces pastorianus
gtgaagctcagtgatcgggatgaac

SEQ ID NO: 125039 - DNA, 25 bp, Saccharomyces pastorianus
acgagacccattgatgattccacat

SEQ ID NO: 125040 - DNA, 25 bp, Saccharomyces pastorianus
ggatgatcgcatccgaatcccagat

SEQ ID NO: 125041 - DNA, 25 bp, Saccharomyces pastorianus
gcgaaaccgcatgattgggatgatc

SEQ ID NO: 125042 - DNA, 25 bp, Saccharomyces pastorianus
aaccgcatgattgggatgatcgcat

SEQ ID NO: 125043 - DNA, 25 bp, Saccharomyces pastorianus
atcgggatgaacgagacccattgat

SEQ ID NO: 125044 - DNA, 25 bp, Saccharomyces pastorianus
gcagggctgataaagaattccaagt

SEQ ID NO: 125045 - DNA, 25 bp, Saccharomyces pastorianus
agacccattgatgattccacatcca

SEQ ID NO: 125046 - DNA, 25 bp, Saccharomyces pastorianus
gaattccaagtacaaaggtccaggc

SEQ ID NO: 125047 - DNA, 25 bp, Saccharomyces pastorianus
gaacgagacccattgatgattccac

SEQ ID NO: 125048 - DNA, 25 bp, Saccharomyces pastorianus
gaatcccagatcctgaggcggtgaa

SEQ ID NO: 125049 - DNA, 25 bp, Saccharomyces pastorianus
cagccaagtcttattcccaataatt

SEQ ID NO: 125050 - DNA, 25 bp, Saccharomyces pastorianus
gtctctcatcagccaagtcttattc

SEQ ID NO: 125051 - DNA, 25 bp, Saccharomyces pastorianus
cggtctctcatcagccaagtcttat

SEQ ID NO: 125052 - DNA, 25 bp, Saccharomyces pastorianus
catcagccaagtcttattcccaata

SEQ ID NO: 125053 - DNA, 25 bp, Saccharomyces pastorianus
tcatcagccaagtcttattcccaat

SEQ ID NO: 125054 - DNA, 25 bp, Saccharomyces pastorianus
ggtctctcatcagccaagtcttatt

SEQ ID NO: 125055 - DNA, 25 bp, Saccharomyces pastorianus
atcagccaagtcttattcccaataa

SEQ ID NO: 125056 - DNA, 25 bp, Saccharomyces pastorianus
tcagccaagtcttattcccaataat

SEQ ID NO: 125057 - DNA, 25 bp, Saccharomyces pastorianus
tctcatcagccaagtcttattccca

SEQ ID NO: 125058 - DNA, 25 bp, Saccharomyces pastorianus
tctctcatcagccaagtcttattcc

SEQ ID NO: 125059 - DNA, 25 bp, Saccharomyces pastorianus
agacatcactcttcaacatcgacga

SEQ ID NO: 125060 - DNA, 25 bp, Saccharomyces pastorianus
cagccgccagacacacgatagtatg

SEQ ID NO: 125061 - DNA, 25 bp, Saccharomyces pastorianus
atgtcacccaccacaactatgaata

SEQ ID NO: 125062 - DNA, 25 bp, Saccharomyces pastorianus
tttcggatgtcctgcctaaacggag

SEQ ID NO: 125063 - DNA, 25 bp, Saccharomyces pastorianus
aaacggaggaccacttcatcaagtt

SEQ ID NO: 125064 - DNA, 25 bp, Saccharomyces pastorianus
acgacttcatcgacagccaaatcat

SEQ ID NO: 125065 - DNA, 25 bp, Saccharomyces pastorianus
gtagcgagatcttcacacttttggt

SEQ ID NO: 125066 - DNA, 25 bp, Saccharomyces pastorianus
tccagaatcatccatactcttcagg

SEQ ID NO: 125067 - DNA, 25 bp, Saccharomyces pastorianus
aacaacatttcaccaatcaccaaga

SEQ ID NO: 125068 - DNA, 25 bp, Saccharomyces pastorianus
aatacaccgaatcatcacaacagcc

SEQ ID NO: 125069 - DNA, 25 bp, Saccharomyces pastorianus
agtatggcttctttctcaagttctc

SEQ ID NO: 125070 - DNA, 25 bp, Saccharomyces pastorianus
tcaactctgtgaagccgcaatttaa

SEQ ID NO: 125071 - DNA, 25 bp, Saccharomyces pastorianus
atggaggacactttactgactttta

SEQ ID NO: 125072 - DNA, 25 bp, Saccharomyces pastorianus
agctgtttcaacaaggtgcgcccct

SEQ ID NO: 125073 - DNA, 25 bp, Saccharomyces pastorianus
gagttgtacatgttgttccctaatt

SEQ ID NO: 125074 - DNA, 25 bp, Saccharomyces pastorianus
atcagcctcagcagtcttcgaagaa

SEQ ID NO: 125075 - DNA, 25 bp, Saccharomyces pastorianus
ccctctgtatacttttcaactctgt

SEQ ID NO: 125076 - DNA, 25 bp, Saccharomyces pastorianus
catggattgcgaccctgtgacacaa

SEQ ID NO: 125077 - DNA, 25 bp, Saccharomyces pastorianus
acttcccagctggtcaaagtgctag

SEQ ID NO: 125078 - DNA, 25 bp, Saccharomyces pastorianus
atatccgacgtttttgccaactcca

SEQ ID NO: 125079 - DNA, 25 bp, Saccharomyces pastorianus
gctaatgaattccagccctactatt

SEQ ID NO: 125080 - DNA, 25 bp, Saccharomyces pastorianus
gagcttttcactatatccgacgttt

SEQ ID NO: 125081 - DNA, 25 bp, Saccharomyces pastorianus
tgtgcagtccacacttttctaatga

SEQ ID NO: 125082 - DNA, 25 bp, Saccharomyces pastorianus
tcttggatttctacggagggcccga

SEQ ID NO: 125083 - DNA, 25 bp, Saccharomyces pastorianus
attgcgaacggcgaatcccggagat

SEQ ID NO: 125084 - DNA, 25 bp, Saccharomyces pastorianus
tgtttccgtcccattttagccaaga

SEQ ID NO: 125085 - DNA, 25 bp, Saccharomyces pastorianus
gattgtactccgaggcgagcgcaaa

SEQ ID NO: 125086 - DNA, 25 bp, Saccharomyces pastorianus
gaatgcctactttccacgtggatgt

SEQ ID NO: 125087 - DNA, 25 bp, Saccharomyces pastorianus
gatgaaagccacgtgcagcctaagt

SEQ ID NO: 125088 - DNA, 25 bp, Saccharomyces pastorianus
gcagtgagtccatgtgcagtccaca

SEQ ID NO: 125089 - DNA, 25 bp, Saccharomyces pastorianus
aagaactaccattcgacaggcacga

SEQ ID NO: 125090 - DNA, 25 bp, Saccharomyces pastorianus
aaaccgggcgtattgagccctcgtg

SEQ ID NO: 125091 - DNA, 25 bp, Saccharomyces pastorianus
tccgtcctgccctagatagtctaga

SEQ ID NO: 125092 - DNA, 25 bp, Saccharomyces pastorianus
aaccatcaacctgtccaagaagtaa

SEQ ID NO: 125093 - DNA, 25 bp, Saccharomyces pastorianus
tactctacgtgtgggaactcctatt

SEQ ID NO: 125094 - DNA, 25 bp, Saccharomyces pastorianus
gttgctagatccgattggctgctat

SEQ ID NO: 125095 - DNA, 25 bp, Saccharomyces pastorianus
gcagacgtcatctatcatttatttg

SEQ ID NO: 125096 - DNA, 25 bp, Saccharomyces pastorianus
tgtgaaaaccgaccctactacaaag

SEQ ID NO: 125097 - DNA, 25 bp, Saccharomyces pastorianus
tctagaagatccctccggtcaacaa

SEQ ID NO: 125098 - DNA, 25 bp, Saccharomyces pastorianus
gctccagagtatgccgtgatgttat

SEQ ID NO: 125099 - DNA, 25 bp, Saccharomyces pastorianus
gatacattatactccttggtttcaa

SEQ ID NO: 125100 - DNA, 25 bp, Saccharomyces pastorianus
ggaactcctatttgcgctgtgaaaa

SEQ ID NO: 125101 - DNA, 25 bp, Saccharomyces pastorianus
tggtgttgccgtccgtctagaagat

SEQ ID NO: 125102 - DNA, 25 bp, Saccharomyces pastorianus
aagaagggccaaaccgctgctggtg

SEQ ID NO: 125103 - DNA, 25 bp, Saccharomyces pastorianus
aacgcctccgaagccattaaatctg

SEQ ID NO: 125104 - DNA, 25 bp, Saccharomyces pastorianus
gctttattgtcttccggtaacgtca

SEQ ID NO: 125105 - DNA, 25 bp, Saccharomyces pastorianus
gaaagactcggaagttgtacctgat

SEQ ID NO: 125106 - DNA, 25 bp, Saccharomyces pastorianus
gaacaactcaggaaaacgcctccga

SEQ ID NO: 125107 - DNA, 25 bp, Saccharomyces pastorianus
atttggctcttggtgatgatgacga

SEQ ID NO: 125108 - DNA, 25 bp, Saccharomyces pastorianus
gaagaaacgcaagaatccaccgcaa

SEQ ID NO: 125109 - DNA, 25 bp, Saccharomyces pastorianus
agttgccggtctggccaagaaggat

SEQ ID NO: 125110 - DNA, 25 bp, Saccharomyces pastorianus
gttgtacctgatgacgaactcaaag

SEQ ID NO: 125111 - DNA, 25 bp, Saccharomyces pastorianus
gtaacgtcaaagttgccggtctggc

SEQ ID NO: 125112 - DNA, 25 bp, Saccharomyces pastorianus
gaatccaccgcaagccatgaaaatg

SEQ ID NO: 125113 - DNA, 25 bp, Saccharomyces pastorianus
gaaagaagacgtgccgctttattgt

SEQ ID NO: 125114 - DNA, 25 bp, Saccharomyces pastorianus
agatgacacttccagagaagcaagt

SEQ ID NO: 125115 - DNA, 25 bp, Saccharomyces pastorianus
cagagaagcaagtgcaagtgctgaa

SEQ ID NO: 125116 - DNA, 25 bp, Saccharomyces pastorianus
cttccagagaagcaagtgcaagtgc

SEQ ID NO: 125117 - DNA, 25 bp, Saccharomyces pastorianus
atgacacttccagagaagcaagtgc

SEQ ID NO: 125118 - DNA, 25 bp, Saccharomyces pastorianus
aagcaagtgcaagtgctgaaggtgc

SEQ ID NO: 125119 - DNA, 25 bp, Saccharomyces pastorianus
agtgcaagtgctgaaggtgctgagg

SEQ ID NO: 125120 - DNA, 25 bp, Saccharomyces pastorianus
cagatgacacttccagagaagcaag

SEQ ID NO: 125121 - DNA, 25 bp, Saccharomyces pastorianus
acttccagagaagcaagtgcaagtg

SEQ ID NO: 125122 - DNA, 25 bp, Saccharomyces pastorianus
ttccagagaagcaagtgcaagtgct

SEQ ID NO: 125123 - DNA, 25 bp, Saccharomyces pastorianus
agcaagtgcaagtgctgaaggtgct

SEQ ID NO: 125124 - DNA, 25 bp, Saccharomyces pastorianus
gacacttccagagaagcaagtgcaa

SEQ ID NO: 125125 - DNA, 25 bp, Saccharomyces pastorianus
aaagcctgtaggatcgacgttaata

SEQ ID NO: 125126 - DNA, 25 bp, Saccharomyces pastorianus
cccgttagcatctccgaatttgaat

SEQ ID NO: 125127 - DNA, 25 bp, Saccharomyces pastorianus
aacattgcatccattgaggcgattc

SEQ ID NO: 125128 - DNA, 25 bp, Saccharomyces pastorianus
tgaggaacgagctgcaccctgctga

SEQ ID NO: 125129 - DNA, 25 bp, Saccharomyces pastorianus
tccacatcgcgccaagaagttctca

SEQ ID NO: 125130 - DNA, 25 bp, Saccharomyces pastorianus
gttctcgctcaaactctaaggttac

SEQ ID NO: 125131 - DNA, 25 bp, Saccharomyces pastorianus
ggaccgacgcccaaaaagcctgtag

SEQ ID NO: 125132 - DNA, 25 bp, Saccharomyces pastorianus
aggcgattcatgatgctcctcaata

SEQ ID NO: 125133 - DNA, 25 bp, Saccharomyces pastorianus
aagactattccaagctttcgagaag

SEQ ID NO: 125134 - DNA, 25 bp, Saccharomyces pastorianus
ttatctacgcttcctacagacagta

SEQ ID NO: 125135 - DNA, 25 bp, Saccharomyces pastorianus
ggaaacaggctctctacaataacaa

SEQ ID NO: 125136 - DNA, 25 bp, Saccharomyces pastorianus
catcatattgcttgttgtaatcatc

SEQ ID NO: 125137 - DNA, 25 bp, Saccharomyces pastorianus
gtgaaagattaacgtccattgaaga

SEQ ID NO: 125138 - DNA, 25 bp, Saccharomyces pastorianus
aaagccgataacctagcggtctctg

SEQ ID NO: 125139 - DNA, 25 bp, Saccharomyces pastorianus
gtaatcatcatattgcttgttgtaa

SEQ ID NO: 125140 - DNA, 25 bp, Saccharomyces pastorianus
gtgccaatagggtcagaaaagccat

SEQ ID NO: 125141 - DNA, 25 bp, Saccharomyces pastorianus
aatgaagatgtgtctggctttagta

SEQ ID NO: 125142 - DNA, 25 bp, Saccharomyces pastorianus
tagggtcagaaaagccatgtggtac

SEQ ID NO: 125143 - DNA, 25 bp, Saccharomyces pastorianus
ataacctagcggtctctgcccaagg

SEQ ID NO: 125144 - DNA, 25 bp, Saccharomyces pastorianus
ggtctctgcccaaggctttaagagg

SEQ ID NO: 125145 - DNA, 25 bp, Saccharomyces pastorianus
gtgtctggctttagtaatcatcata

SEQ ID NO: 125146 - DNA, 25 bp, Saccharomyces pastorianus
aagccatgtggtacaaggatctaaa

SEQ ID NO: 125147 - DNA, 25 bp, Saccharomyces pastorianus
aagtcaaggactgcggaactacaag

SEQ ID NO: 125148 - DNA, 25 bp, Saccharomyces pastorianus
gaacgaccccagaatgtacagtcta

SEQ ID NO: 125149 - DNA, 25 bp, Saccharomyces pastorianus
gtctaagtcaaggactgcggaacta

SEQ ID NO: 125150 - DNA, 25 bp, Saccharomyces pastorianus
gactgcggaactacaagctgtaagt

SEQ ID NO: 125151 - DNA, 25 bp, Saccharomyces pastorianus
caaggactgcggaactacaagctgt

SEQ ID NO: 125152 - DNA, 25 bp, Saccharomyces pastorianus
aggactgcggaactacaagctgtaa

SEQ ID NO: 125153 - DNA, 25 bp, Saccharomyces pastorianus
gaccccagaatgtacagtctaagtc

SEQ ID NO: 125154 - DNA, 25 bp, Saccharomyces pastorianus
cagaatgtacagtctaagtcaagga

SEQ ID NO: 125155 - DNA, 25 bp, Saccharomyces pastorianus
acgaccccagaatgtacagtctaag

SEQ ID NO: 125156 - DNA, 25 bp, Saccharomyces pastorianus
agctgtaagtacagaaagccacaga

SEQ ID NO: 125157 - DNA, 25 bp, Saccharomyces pastorianus
gcggaactacaagctgtaagtacag

SEQ ID NO: 125158 - DNA, 25 bp, Saccharomyces pastorianus
atttgccttttcacaggctgaagag

SEQ ID NO: 125159 - DNA, 25 bp, Saccharomyces pastorianus
ggccgcacgttcagcaatttcaaaa

SEQ ID NO: 125160 - DNA, 25 bp, Saccharomyces pastorianus
gaaaggctgctttggtaactaatca

SEQ ID NO: 125161 - DNA, 25 bp, Saccharomyces pastorianus
ggttaaacacacgtatggatctggt

SEQ ID NO: 125162 - DNA, 25 bp, Saccharomyces pastorianus
ggctaactttgatcgttttaccaat

SEQ ID NO: 125163 - DNA, 25 bp, Saccharomyces pastorianus
ggatctggtgtattttggctaactt

SEQ ID NO: 125164 - DNA, 25 bp, Saccharomyces pastorianus
ttcttcccaatttatgcttctatat

SEQ ID NO: 125165 - DNA, 25 bp, Saccharomyces pastorianus
aattcaccttaattgccattcctgg

SEQ ID NO: 125166 - DNA, 25 bp, Saccharomyces pastorianus
ccattcctggttccctcttattttg

SEQ ID NO: 125167 - DNA, 25 bp, Saccharomyces pastorianus
gcttctatatttcctcatgctaaca

SEQ ID NO: 125168 - DNA, 25 bp, Saccharomyces pastorianus
acaatatcagcgactctaggccgca

SEQ ID NO: 125169 - DNA, 25 bp, Saccharomyces pastorianus
gttccagaaactatccacacattac

SEQ ID NO: 125170 - DNA, 25 bp, Saccharomyces pastorianus
aagattatttgctaactgtggcgaa

SEQ ID NO: 125171 - DNA, 25 bp, Saccharomyces pastorianus
acattggtatgagttgccgtttatt

SEQ ID NO: 125172 - DNA, 25 bp, Saccharomyces pastorianus
taggctttgccttggaaccagaatt

SEQ ID NO: 125173 - DNA, 25 bp, Saccharomyces pastorianus
gaagctagacgaagccgcaaatcta

SEQ ID NO: 125174 - DNA, 25 bp, Saccharomyces pastorianus
tgatatgaataccttagcgctcgtc

SEQ ID NO: 125175 - DNA, 25 bp, Saccharomyces pastorianus
tatatgttgccgtgtatctccacta

SEQ ID NO: 125176 - DNA, 25 bp, Saccharomyces pastorianus
tagcgctcgtcattgatgggaagtc

SEQ ID NO: 125177 - DNA, 25 bp, Saccharomyces pastorianus
aaacgagcatcaattgtcaacacat

SEQ ID NO: 125178 - DNA, 25 bp, Saccharomyces pastorianus
atgcatctgagggtttgcggacgtt

SEQ ID NO: 125179 - DNA, 25 bp, Saccharomyces pastorianus
atgggaagtcattaggctttgcctt

SEQ ID NO: 125180 - DNA, 25 bp, Saccharomyces pastorianus
atcattctagccttaagttcttcag

SEQ ID NO: 125181 - DNA, 25 bp, Saccharomyces pastorianus
aagaagattccctcgctagacagga

SEQ ID NO: 125182 - DNA, 25 bp, Saccharomyces pastorianus
gaacgagaccttatctggcattgat

SEQ ID NO: 125183 - DNA, 25 bp, Saccharomyces pastorianus
gtttatacacgttgcagaccactgc

SEQ ID NO: 125184 - DNA, 25 bp, Saccharomyces pastorianus
gtcgtatatctttcggacctatcag

SEQ ID NO: 125185 - DNA, 25 bp, Saccharomyces pastorianus
aactctgtgaatccactggtgggtt

SEQ ID NO: 125186 - DNA, 25 bp, Saccharomyces pastorianus
ttgcgtccctttcatcgtcgtatat

SEQ ID NO: 125187 - DNA, 25 bp, Saccharomyces pastorianus
gcagaccactgcaggacatttcaga

SEQ ID NO: 125188 - DNA, 25 bp, Saccharomyces pastorianus
tggcgtctgattgaaccaggcgact

SEQ ID NO: 125189 - DNA, 25 bp, Saccharomyces pastorianus
accaggcgacttactgacttgggaa

SEQ ID NO: 125190 - DNA, 25 bp, Saccharomyces pastorianus
aaattcactgatgcatggcgtctga

SEQ ID NO: 125191 - DNA, 25 bp, Saccharomyces pastorianus
aaaataatgcctccaacaccggcta

SEQ ID NO: 125192 - DNA, 25 bp, Saccharomyces pastorianus
acatcgcagcgctattggtctttta

SEQ ID NO: 125193 - DNA, 25 bp, Saccharomyces pastorianus
ctacccgtcatcatatgcagtcgat

SEQ ID NO: 125194 - DNA, 25 bp, Saccharomyces pastorianus
gaaaggcgtagactacccgtcatca

SEQ ID NO: 125195 - DNA, 25 bp, Saccharomyces pastorianus
gaacgcttcaaggtacatcgacgac

SEQ ID NO: 125196 - DNA, 25 bp, Saccharomyces pastorianus
gatcagccacttgtcaaaagtcact

SEQ ID NO: 125197 - DNA, 25 bp, Saccharomyces pastorianus
aaagtcactctagtatccacactaa

SEQ ID NO: 125198 - DNA, 25 bp, Saccharomyces pastorianus
ccttctatgcttttatttcccgata

SEQ ID NO: 125199 - DNA, 25 bp, Saccharomyces pastorianus
tgccagtcctgattttcgtaaccaa

SEQ ID NO: 125200 - DNA, 25 bp, Saccharomyces pastorianus
gtacatcgacgacatcatctctaga

SEQ ID NO: 125201 - DNA, 25 bp, Saccharomyces pastorianus
gatgtatttagactgccggagaagc

SEQ ID NO: 125202 - DNA, 25 bp, Saccharomyces pastorianus
actattatatcgaaactcccgtaca

SEQ ID NO: 125203 - DNA, 25 bp, Saccharomyces pastorianus
gattttggatctgctgcgtatgtca

SEQ ID NO: 125204 - DNA, 25 bp, Saccharomyces pastorianus
gctgcgtatgtcaaaagcggaccat

SEQ ID NO: 125205 - DNA, 25 bp, Saccharomyces pastorianus
tattttgaaccgttgcgtaccgaag

SEQ ID NO: 125206 - DNA, 25 bp, Saccharomyces pastorianus
gatccaaattatggccacgttgaac

SEQ ID NO: 125207 - DNA, 25 bp, Saccharomyces pastorianus
aaacatctacacgaccagggtattg

SEQ ID NO: 125208 - DNA, 25 bp, Saccharomyces pastorianus
ggacaatagattatgctgcccctga

SEQ ID NO: 125209 - DNA, 25 bp, Saccharomyces pastorianus
tatgagggccaaccacaggatattt

SEQ ID NO: 125210 - DNA, 25 bp, Saccharomyces pastorianus
atgctgcccctgaagtcttaggagg

SEQ ID NO: 125211 - DNA, 25 bp, Saccharomyces pastorianus
tactcaagcaggttgtagcgggaat

SEQ ID NO: 125212 - DNA, 25 bp, Saccharomyces pastorianus
agcggaccatttgatgtttttgttg

SEQ ID NO: 125213 - DNA, 25 bp, Saccharomyces pastorianus
ttggttatcattttgctgagctggt

SEQ ID NO: 125214 - DNA, 25 bp, Saccharomyces pastorianus
gtatttgatcccgatgacgaccttt

SEQ ID NO: 125215 - DNA, 25 bp, Saccharomyces pastorianus
gagtataagccaatcgttagccaaa

SEQ ID NO: 125216 - DNA, 25 bp, Saccharomyces pastorianus
gcgcggtttcctccactgtgttgga

SEQ ID NO: 125217 - DNA, 25 bp, Saccharomyces pastorianus
tcctgcgttggatatcacactccat

SEQ ID NO: 125218 - DNA, 25 bp, Saccharomyces pastorianus
gattcacagtttaccttaccaggcg

SEQ ID NO: 125219 - DNA, 25 bp, Saccharomyces pastorianus
tacgtcggtgggtattgatggcctt

SEQ ID NO: 125220 - DNA, 25 bp, Saccharomyces pastorianus
gaccttttgcctatgcccatcaaag

SEQ ID NO: 125221 - DNA, 25 bp, Saccharomyces pastorianus
cgggtttgtttattgtggattcgca

SEQ ID NO: 125222 - DNA, 25 bp, Saccharomyces pastorianus
gcccatcaaagtttgcaaccacatt

SEQ ID NO: 125223 - DNA, 25 bp, Saccharomyces pastorianus
ttataatatcccatgcgcggtttcc

SEQ ID NO: 125224 - DNA, 25 bp, Saccharomyces pastorianus
gaagaacgacataccaagcattgtt

SEQ ID NO: 125225 - DNA, 25 bp, Saccharomyces pastorianus
taagaagaacgacataccaagcatt

SEQ ID NO: 125226 - DNA, 25 bp, Saccharomyces pastorianus
aaactaccaactcattactgaagaa

SEQ ID NO: 125227 - DNA, 25 bp, Saccharomyces pastorianus
acgacataccaagcattgtttctac

SEQ ID NO: 125228 - DNA, 25 bp, Saccharomyces pastorianus
gacataccaagcattgtttctactg

SEQ ID NO: 125229 - DNA, 25 bp, Saccharomyces pastorianus
cataccaagcattgtttctactgga

SEQ ID NO: 125230 - DNA, 25 bp, Saccharomyces pastorianus
gagaaaactaccaactcattactga

SEQ ID NO: 125231 - DNA, 25 bp, Saccharomyces pastorianus
ctaccaactcattactgaagaaagt

SEQ ID NO: 125232 - DNA, 25 bp, Saccharomyces pastorianus
ttgtttctactggatatttttttgc

SEQ ID NO: 125233 - DNA, 25 bp, Saccharomyces pastorianus
gaaaactaccaactcattactgaag

SEQ ID NO: 125234 - DNA, 25 bp, Saccharomyces pastorianus
gaacgacataccaagcattgtttct

SEQ ID NO: 125235 - DNA, 25 bp, Saccharomyces pastorianus
gaatctctgtcggtattgaagacac

SEQ ID NO: 125236 - DNA, 25 bp, Saccharomyces pastorianus
aagggtggtgctgaagctgcttcca

SEQ ID NO: 125237 - DNA, 25 bp, Saccharomyces pastorianus
agggtggtgctgaagctgcttccaa

SEQ ID NO: 125238 - DNA, 25 bp, Saccharomyces pastorianus
ggttagaatctctgtcggtattgaa

SEQ ID NO: 125239 - DNA, 25 bp, Saccharomyces pastorianus
acttggttagaatctctgtcggtat

SEQ ID NO: 125240 - DNA, 25 bp, Saccharomyces pastorianus
cggtattgaagacactgacgatctt

SEQ ID NO: 125241 - DNA, 25 bp, Saccharomyces pastorianus
ggaggccagagaggcctctggtgtt

SEQ ID NO: 125242 - DNA, 25 bp, Saccharomyces pastorianus
cctctggtgtttttgacgacttggt

SEQ ID NO: 125243 - DNA, 25 bp, Saccharomyces pastorianus
cagaatcaagggtggtgctgaagct

SEQ ID NO: 125244 - DNA, 25 bp, Saccharomyces pastorianus
ttgacgacttggttagaatctctgt

SEQ ID NO: 125245 - DNA, 25 bp, Saccharomyces pastorianus
tctctgtcggtattgaagacactga

SEQ ID NO: 125246 - DNA, 25 bp, Saccharomyces pastorianus
gaatctctgtcggtattgaagacac

SEQ ID NO: 125247 - DNA, 25 bp, Saccharomyces pastorianus
agggtggtgctgaagctgcttccaa

SEQ ID NO: 125248 - DNA, 25 bp, Saccharomyces pastorianus
ggttagaatctctgtcggtattgaa

SEQ ID NO: 125249 - DNA, 25 bp, Saccharomyces pastorianus
tgaagctgcttccaagttcgcctcc

SEQ ID NO: 125250 - DNA, 25 bp, Saccharomyces pastorianus
acttggttagaatctctgtcggtat

SEQ ID NO: 125251 - DNA, 25 bp, Saccharomyces pastorianus
gaatcccttggtggtatcgaatctc

SEQ ID NO: 125252 - DNA, 25 bp, Saccharomyces pastorianus
gaatctctattggaagtgcccgctg

SEQ ID NO: 125253 - DNA, 25 bp, Saccharomyces pastorianus
cggtattgaagacactgacgatctt

SEQ ID NO: 125254 - DNA, 25 bp, Saccharomyces pastorianus
cctctggtgtttttgacgacttggt

SEQ ID NO: 125255 - DNA, 25 bp, Saccharomyces pastorianus
ttgacgacttggttagaatctctgt

SEQ ID NO: 125256 - DNA, 25 bp, Saccharomyces pastorianus
aatcaagggtggtgctgaagctgct

SEQ ID NO: 125257 - DNA, 25 bp, Saccharomyces pastorianus
atgcggtctctatcggtgatgtgta

SEQ ID NO: 125258 - DNA, 25 bp, Saccharomyces pastorianus
gaaacctccttcactaacgatttgt

SEQ ID NO: 125259 - DNA, 25 bp, Saccharomyces pastorianus
gactttgcatctacgtgtcagacaa

SEQ ID NO: 125260 - DNA, 25 bp, Saccharomyces pastorianus
ctttcgatgcttggttgactcacag

SEQ ID NO: 125261 - DNA, 25 bp, Saccharomyces pastorianus
aacggtcactcagacgttgtgctcg

SEQ ID NO: 125262 - DNA, 25 bp, Saccharomyces pastorianus
gaacttcggtgcagacatcgttgtc

SEQ ID NO: 125263 - DNA, 25 bp, Saccharomyces pastorianus
acaaaacgccattggtgctatccca

SEQ ID NO: 125264 - DNA, 25 bp, Saccharomyces pastorianus
tacgagcgtctgcagttcttacaaa

SEQ ID NO: 125265 - DNA, 25 bp, Saccharomyces pastorianus
cggtgtcctggccactaataacaag

SEQ ID NO: 125266 - DNA, 25 bp, Saccharomyces pastorianus
gtcgccaacgctcacggtgtggaaa

SEQ ID NO: 125267 - DNA, 25 bp, Saccharomyces pastorianus
gacgtgatcttggttgtcgacaaca

SEQ ID NO: 125268 - DNA, 25 bp, Saccharomyces pastorianus
gttcgaactaaatgagtgggagcac

SEQ ID NO: 125269 - DNA, 25 bp, Saccharomyces pastorianus
tctgtggtaccaattggatggatac

SEQ ID NO: 125270 - DNA, 25 bp, Saccharomyces pastorianus
tggatacgatgatgaagctttgagc

SEQ ID NO: 125271 - DNA, 25 bp, Saccharomyces pastorianus
attgtctggctataatctgtggtac

SEQ ID NO: 125272 - DNA, 25 bp, Saccharomyces pastorianus
gatttaaccaaatcatccgaaatag

SEQ ID NO: 125273 - DNA, 25 bp, Saccharomyces pastorianus
agctttgagcgaaagtttgcggttc

SEQ ID NO: 125274 - DNA, 25 bp, Saccharomyces pastorianus
gaaatagcgtttctccaatggaaga

SEQ ID NO: 125275 - DNA, 25 bp, Saccharomyces pastorianus
aatcatccgaaatagcgtttctcca

SEQ ID NO: 125276 - DNA, 25 bp, Saccharomyces pastorianus
gaaaaaattctgcaaattggtacta

SEQ ID NO: 125277 - DNA, 25 bp, Saccharomyces pastorianus
gaaagtttgcggttcgaactaaatg

SEQ ID NO: 125278 - DNA, 25 bp, Saccharomyces pastorianus
aattggtactagattgtctggctat

SEQ ID NO: 125279 - DNA, 25 bp, Saccharomyces pastorianus
gctgccacggaacctgaaccaaaaa

SEQ ID NO: 125280 - DNA, 25 bp, Saccharomyces pastorianus
gtcgcaaagggtcttgccaataata

SEQ ID NO: 125281 - DNA, 25 bp, Saccharomyces pastorianus
atgcatgacccaagaatgataatga

SEQ ID NO: 125282 - DNA, 25 bp, Saccharomyces pastorianus
taataagcgtccatctgtcacaaca

SEQ ID NO: 125283 - DNA, 25 bp, Saccharomyces pastorianus
gaagatcaccggttaaactcgataa

SEQ ID NO: 125284 - DNA, 25 bp, Saccharomyces pastorianus
tgcacctccctctaaagctaaagac

SEQ ID NO: 125285 - DNA, 25 bp, Saccharomyces pastorianus
ctgccgaatcgactcaagtagatgt

SEQ ID NO: 125286 - DNA, 25 bp, Saccharomyces pastorianus
aagacgtagccgaagatcaccggtt

SEQ ID NO: 125287 - DNA, 25 bp, Saccharomyces pastorianus
gggtcttgccaataatagtcaactg

SEQ ID NO: 125288 - DNA, 25 bp, Saccharomyces pastorianus
atctgtcacaacaacgcgacctgca

SEQ ID NO: 125289 - DNA, 25 bp, Saccharomyces pastorianus
aagacaactgccgaatcgactcaag

SEQ ID NO: 125290 - DNA, 25 bp, Saccharomyces pastorianus
aacttatgcattctcgtcgtcatta

SEQ ID NO: 125291 - DNA, 25 bp, Saccharomyces pastorianus
aattagaaccaatctccgacgaatt

SEQ ID NO: 125292 - DNA, 25 bp, Saccharomyces pastorianus
cggcaatataccagttttcccgaca

SEQ ID NO: 125293 - DNA, 25 bp, Saccharomyces pastorianus
atagttccatttttaccagtgtttg

SEQ ID NO: 125294 - DNA, 25 bp, Saccharomyces pastorianus
tatctgccgggacagagctggtatt

SEQ ID NO: 125295 - DNA, 25 bp, Saccharomyces pastorianus
gttaacgatattccttctacactag

SEQ ID NO: 125296 - DNA, 25 bp, Saccharomyces pastorianus
ttggaaattaagcacgtcattacgt

SEQ ID NO: 125297 - DNA, 25 bp, Saccharomyces pastorianus
aaatgtaccggatctgaattcagct

SEQ ID NO: 125298 - DNA, 25 bp, Saccharomyces pastorianus
gctggtattcactagaggctttcaa

SEQ ID NO: 125299 - DNA, 25 bp, Saccharomyces pastorianus
gacaaattctactttttgcgcgaag

SEQ ID NO: 125300 - DNA, 25 bp, Saccharomyces pastorianus
agagcgactaaactactgcacgaaa

SEQ ID NO: 125301 - DNA, 25 bp, Saccharomyces pastorianus
atatcaccttggacctctgggtcat

SEQ ID NO: 125302 - DNA, 25 bp, Saccharomyces pastorianus
caccttggacctctgggtcattgaa

SEQ ID NO: 125303 - DNA, 25 bp, Saccharomyces pastorianus
agtgttagctgggttcatagcagct

SEQ ID NO: 125304 - DNA, 25 bp, Saccharomyces pastorianus
ttcatatcaccttggacctctgggt

SEQ ID NO: 125305 - DNA, 25 bp, Saccharomyces pastorianus
gtatcagtgaaaccaacgaaagatg

SEQ ID NO: 125306 - DNA, 25 bp, Saccharomyces pastorianus
gtgcttcatatcaccttggacctct

SEQ ID NO: 125307 - DNA, 25 bp, Saccharomyces pastorianus
cttagcgtcgaaaacagtgttagct

SEQ ID NO: 125308 - DNA, 25 bp, Saccharomyces pastorianus
aatctttcagtatcagtgaaaccaa

SEQ ID NO: 125309 - DNA, 25 bp, Saccharomyces pastorianus
aaacagtgttagctgggttcatagc

SEQ ID NO: 125310 - DNA, 25 bp, Saccharomyces pastorianus
ggacctctgggtcattgaagtttct

SEQ ID NO: 125311 - DNA, 25 bp, Saccharomyces pastorianus
gtcgaaaacagtgttagctgggttc

SEQ ID NO: 125312 - DNA, 25 bp, Saccharomyces pastorianus
ggacgacttgcaacaaagcattgaa

SEQ ID NO: 125313 - DNA, 25 bp, Saccharomyces pastorianus
aggtttccttggacgacttgcaaca

SEQ ID NO: 125314 - DNA, 25 bp, Saccharomyces pastorianus
ttgctaacgtcaaggccatcgaaat

SEQ ID NO: 125315 - DNA, 25 bp, Saccharomyces pastorianus
gtttccttggacgacttgcaacaaa

SEQ ID NO: 125316 - DNA, 25 bp, Saccharomyces pastorianus
tgctaacgtcaaggccatcgaaatg

SEQ ID NO: 125317 - DNA, 25 bp, Saccharomyces pastorianus
gtcaaggccatcgaaatggaaggtt

SEQ ID NO: 125318 - DNA, 25 bp, Saccharomyces pastorianus
cttggacgacttgcaacaaagcatt

SEQ ID NO: 125319 - DNA, 25 bp, Saccharomyces pastorianus
taacgtcaaggccatcgaaatggaa

SEQ ID NO: 125320 - DNA, 25 bp, Saccharomyces pastorianus
ggccatcgaaatggaaggtttgacc

SEQ ID NO: 125321 - DNA, 25 bp, Saccharomyces pastorianus
ttccttggacgacttgcaacaaagc

SEQ ID NO: 125322 - DNA, 25 bp, Saccharomyces pastorianus
gacttgcaacaaagcattgaagaag

SEQ ID NO: 125323 - DNA, 25 bp, Saccharomyces pastorianus
gggtgctcaccaatttatcccaatt

SEQ ID NO: 125324 - DNA, 25 bp, Saccharomyces pastorianus
ggacgacttgcaacaaagcattgaa

SEQ ID NO: 125325 - DNA, 25 bp, Saccharomyces pastorianus
aggtttccttggacgacttgcaaca

SEQ ID NO: 125326 - DNA, 25 bp, Saccharomyces pastorianus
ttgctaacgtcaaggccatcgaaat

SEQ ID NO: 125327 - DNA, 25 bp, Saccharomyces pastorianus
tatcccaattggtttcggtatcaag

SEQ ID NO: 125328 - DNA, 25 bp, Saccharomyces pastorianus
gtttccttggacgacttgcaacaaa

SEQ ID NO: 125329 - DNA, 25 bp, Saccharomyces pastorianus
cttggacgacttgcaacaaagcatt

SEQ ID NO: 125330 - DNA, 25 bp, Saccharomyces pastorianus
taacgtcaaggccatcgaaatggaa

SEQ ID NO: 125331 - DNA, 25 bp, Saccharomyces pastorianus
ggccatcgaaatggaaggtttgacc

SEQ ID NO: 125332 - DNA, 25 bp, Saccharomyces pastorianus
ttccttggacgacttgcaacaaagc

SEQ ID NO: 125333 - DNA, 25 bp, Saccharomyces pastorianus
gacttgcaacaaagcattgaagaag

SEQ ID NO: 125334 - DNA, 25 bp, Saccharomyces pastorianus
caattaaacgcttctttggctgaca

SEQ ID NO: 125335 - DNA, 25 bp, Saccharomyces pastorianus
aattaaacgcttctttggctgacaa

SEQ ID NO: 125336 - DNA, 25 bp, Saccharomyces pastorianus
gaaacaattaaacgcttctttggct

SEQ ID NO: 125337 - DNA, 25 bp, Saccharomyces pastorianus
ttgaaacaattaaacgcttctttgg

SEQ ID NO: 125338 - DNA, 25 bp, Saccharomyces pastorianus
tgaaacaattaaacgcttctttggc

SEQ ID NO: 125339 - DNA, 25 bp, Saccharomyces pastorianus
attaaacgcttctttggctgacaag

SEQ ID NO: 125340 - DNA, 25 bp, Saccharomyces pastorianus
aacaattaaacgcttctttggctga

SEQ ID NO: 125341 - DNA, 25 bp, Saccharomyces pastorianus
acaattaaacgcttctttggctgac

SEQ ID NO: 125342 - DNA, 25 bp, Saccharomyces pastorianus
tttgaaacaattaaacgcttctttg

SEQ ID NO: 125343 - DNA, 25 bp, Saccharomyces pastorianus
aaacaattaaacgcttctttggctg

SEQ ID NO: 125344 - DNA, 25 bp, Saccharomyces pastorianus
tgaaactttgaaacaattaaacgct

SEQ ID NO: 125345 - DNA, 25 bp, Saccharomyces pastorianus
cgacgactgcgaaatctgcgggaaa

SEQ ID NO: 125346 - DNA, 25 bp, Saccharomyces pastorianus
tacattcctgatcactctatatggg

SEQ ID NO: 125347 - DNA, 25 bp, Saccharomyces pastorianus
gaggattcttcgcaagatcttgttc

SEQ ID NO: 125348 - DNA, 25 bp, Saccharomyces pastorianus
agacttgcctcgaaaacttggccca

SEQ ID NO: 125349 - DNA, 25 bp, Saccharomyces pastorianus
aatgtcttctgttcttgagcaccaa

SEQ ID NO: 125350 - DNA, 25 bp, Saccharomyces pastorianus
ggaaaatgtacagcgccaccaagat

SEQ ID NO: 125351 - DNA, 25 bp, Saccharomyces pastorianus
gttaggtccaagagttcctctcaga

SEQ ID NO: 125352 - DNA, 25 bp, Saccharomyces pastorianus
aaatgtcaccatggctttcaccaga

SEQ ID NO: 125353 - DNA, 25 bp, Saccharomyces pastorianus
agtgtagatctcaaaactccccttg

SEQ ID NO: 125354 - DNA, 25 bp, Saccharomyces pastorianus
cttggcccagaaacccgatgaatat

SEQ ID NO: 125355 - DNA, 25 bp, Saccharomyces pastorianus
gggtggtctatacacaccgacgact

SEQ ID NO: 125356 - DNA, 25 bp, Saccharomyces pastorianus
gaagcgtccttgtttaacgatgaca

SEQ ID NO: 125357 - DNA, 25 bp, Saccharomyces pastorianus
aataccatatgctcctctagggttc

SEQ ID NO: 125358 - DNA, 25 bp, Saccharomyces pastorianus
aatccgagtaggttcttagcaatgc

SEQ ID NO: 125359 - DNA, 25 bp, Saccharomyces pastorianus
aagccctcgactgcgttgttaatac

SEQ ID NO: 125360 - DNA, 25 bp, Saccharomyces pastorianus
gcatttatttttagtggcttctcca

SEQ ID NO: 125361 - DNA, 25 bp, Saccharomyces pastorianus
ggcttctccataaaatggccgtcga

SEQ ID NO: 125362 - DNA, 25 bp, Saccharomyces pastorianus
gtcgcttttaccctattatcattca

SEQ ID NO: 125363 - DNA, 25 bp, Saccharomyces pastorianus
ttaaagtgtctaaccaagccctcga

SEQ ID NO: 125364 - DNA, 25 bp, Saccharomyces pastorianus
agaagagccagcatttccttacttt

SEQ ID NO: 125365 - DNA, 25 bp, Saccharomyces pastorianus
aatagctctggagtcgcttttaccc

SEQ ID NO: 125366 - DNA, 25 bp, Saccharomyces pastorianus
ggccgtcgaacagcaatcataaact

SEQ ID NO: 125367 - DNA, 25 bp, Saccharomyces pastorianus
gatggtactcatgtagctgcctcat

SEQ ID NO: 125368 - DNA, 25 bp, Saccharomyces pastorianus
aatcctagtgccgaccttatctgag

SEQ ID NO: 125369 - DNA, 25 bp, Saccharomyces pastorianus
aacacacgtatattccatcctgggt

SEQ ID NO: 125370 - DNA, 25 bp, Saccharomyces pastorianus
tagctgcctcatacgagaccggaaa

SEQ ID NO: 125371 - DNA, 25 bp, Saccharomyces pastorianus
tatggagggcccacgtgcttgtatc

SEQ ID NO: 125372 - DNA, 25 bp, Saccharomyces pastorianus
aaggctccgaatccgtagtctcatg

SEQ ID NO: 125373 - DNA, 25 bp, Saccharomyces pastorianus
ggtagcttctgcagtgtcacaaggc

SEQ ID NO: 125374 - DNA, 25 bp, Saccharomyces pastorianus
aggacccttctattcactcaataag

SEQ ID NO: 125375 - DNA, 25 bp, Saccharomyces pastorianus
gtatccgacagccacgtattttttg

SEQ ID NO: 125376 - DNA, 25 bp, Saccharomyces pastorianus
ggcatctagttcttcatatacggca

SEQ ID NO: 125377 - DNA, 25 bp, Saccharomyces pastorianus
aatggccttgaccacgacagcagat

SEQ ID NO: 125378 - DNA, 25 bp, Saccharomyces pastorianus
ataggcggtgttgcggaagagacaa

SEQ ID NO: 125379 - DNA, 25 bp, Saccharomyces pastorianus
gcaagactaggaacgactgtgaaaa

SEQ ID NO: 125380 - DNA, 25 bp, Saccharomyces pastorianus
gtggtgcaagactaggaacgactgt

SEQ ID NO: 125381 - DNA, 25 bp, Saccharomyces pastorianus
ggaagagacaaaggaaactcatttc

SEQ ID NO: 125382 - DNA, 25 bp, Saccharomyces pastorianus
actttgggttataggcggtgttgcg

SEQ ID NO: 125383 - DNA, 25 bp, Saccharomyces pastorianus
gactaggaacgactgtgaaaaaact

SEQ ID NO: 125384 - DNA, 25 bp, Saccharomyces pastorianus
taagtggtgcaagactaggaacgac

SEQ ID NO: 125385 - DNA, 25 bp, Saccharomyces pastorianus
tggtgcaagactaggaacgactgtg

SEQ ID NO: 125386 - DNA, 25 bp, Saccharomyces pastorianus
gtgcaagactaggaacgactgtgaa

SEQ ID NO: 125387 - DNA, 25 bp, Saccharomyces pastorianus
taggaacgactgtgaaaaaactttg

SEQ ID NO: 125388 - DNA, 25 bp, Saccharomyces pastorianus
ggtgcaagactaggaacgactgtga

SEQ ID NO: 125389 - DNA, 25 bp, Saccharomyces pastorianus
agctaattgaatcttctttgttcat

SEQ ID NO: 125390 - DNA, 25 bp, Saccharomyces pastorianus
agaatcaatgataaaaccacagctg

SEQ ID NO: 125391 - DNA, 25 bp, Saccharomyces pastorianus
ggaggtttttatgccgccgctagta

SEQ ID NO: 125392 - DNA, 25 bp, Saccharomyces pastorianus
gcaacggcttgataaatctagcaat

SEQ ID NO: 125393 - DNA, 25 bp, Saccharomyces pastorianus
aacaatcttgccgatgtgaaattaa

SEQ ID NO: 125394 - DNA, 25 bp, Saccharomyces pastorianus
gtcaacgatcgtttgaacaagtcat

SEQ ID NO: 125395 - DNA, 25 bp, Saccharomyces pastorianus
tcttctttgttcattgacattgcta

SEQ ID NO: 125396 - DNA, 25 bp, Saccharomyces pastorianus
ctgcatttgaacaatcttgccgatg

SEQ ID NO: 125397 - DNA, 25 bp, Saccharomyces pastorianus
gggcgccaaactatctaaaattgtc

SEQ ID NO: 125398 - DNA, 25 bp, Saccharomyces pastorianus
cgaggaggtttttatgccgccgcta

SEQ ID NO: 125399 - DNA, 25 bp, Saccharomyces pastorianus
accacagctgaagaattgcaacggc

SEQ ID NO: 125400 - DNA, 25 bp, Saccharomyces pastorianus
aagtttcaagcgtcactgcagcaat

SEQ ID NO: 125401 - DNA, 25 bp, Saccharomyces pastorianus
gggactcagttttgatctgtcagct

SEQ ID NO: 125402 - DNA, 25 bp, Saccharomyces pastorianus
tgacctgttttatgcattgaatgac

SEQ ID NO: 125403 - DNA, 25 bp, Saccharomyces pastorianus
gttttcaaacttcgtgccattttag

SEQ ID NO: 125404 - DNA, 25 bp, Saccharomyces pastorianus
tatatgactacacaggacagccgga

SEQ ID NO: 125405 - DNA, 25 bp, Saccharomyces pastorianus
agcgtagtaatttgcgatcctccaa

SEQ ID NO: 125406 - DNA, 25 bp, Saccharomyces pastorianus
gtcagctatgtgaggatatccgttc

SEQ ID NO: 125407 - DNA, 25 bp, Saccharomyces pastorianus
aatcgtcgtaataaggccactgttt

SEQ ID NO: 125408 - DNA, 25 bp, Saccharomyces pastorianus
gacgatgacgttaacctcagtaaac

SEQ ID NO: 125409 - DNA, 25 bp, Saccharomyces pastorianus
gaagatatgctcattgcccggtttt

SEQ ID NO: 125410 - DNA, 25 bp, Saccharomyces pastorianus
gacgctgctattgaattaccgattg

SEQ ID NO: 125411 - DNA, 25 bp, Saccharomyces pastorianus
agccgaccagttactcaagcatgtg

SEQ ID NO: 125412 - DNA, 25 bp, Saccharomyces pastorianus
tagctctttctctgagccactaaag

SEQ ID NO: 125413 - DNA, 25 bp, Saccharomyces pastorianus
aaggaggactttaccgacgctgatt

SEQ ID NO: 125414 - DNA, 25 bp, Saccharomyces pastorianus
aattatcgagtgtctgtcgcgcaca

SEQ ID NO: 125415 - DNA, 25 bp, Saccharomyces pastorianus
gtctctaggtgccactgtagttgaa

SEQ ID NO: 125416 - DNA, 25 bp, Saccharomyces pastorianus
tacgctcagcgacatttggtctcta

SEQ ID NO: 125417 - DNA, 25 bp, Saccharomyces pastorianus
gagttcatctaagcctttgacggac

SEQ ID NO: 125418 - DNA, 25 bp, Saccharomyces pastorianus
tctaaattcagtcttgcagcggctc

SEQ ID NO: 125419 - DNA, 25 bp, Saccharomyces pastorianus
gcatgtgtggatcaactctaccgaa

SEQ ID NO: 125420 - DNA, 25 bp, Saccharomyces pastorianus
tgaaaatgatacctactacccacct

SEQ ID NO: 125421 - DNA, 25 bp, Saccharomyces pastorianus
gtctgtcgcgcacaactgttgataa

SEQ ID NO: 125422 - DNA, 25 bp, Saccharomyces pastorianus
atccggatatgtttaggtggctcta

SEQ ID NO: 125423 - DNA, 25 bp, Saccharomyces pastorianus
gacgattttggcgactttaacagac

SEQ ID NO: 125424 - DNA, 25 bp, Saccharomyces pastorianus
acatttggttttctggtgttctctc

SEQ ID NO: 125425 - DNA, 25 bp, Saccharomyces pastorianus
tgaaagtcctttaatcccagctgat

SEQ ID NO: 125426 - DNA, 25 bp, Saccharomyces pastorianus
agctgatatcgtccttccagaggat

SEQ ID NO: 125427 - DNA, 25 bp, Saccharomyces pastorianus
ggctctatggtagtccttcagatat

SEQ ID NO: 125428 - DNA, 25 bp, Saccharomyces pastorianus
ggacgatcctaaagcaaccccattg

SEQ ID NO: 125429 - DNA, 25 bp, Saccharomyces pastorianus
atttcctcctttttgtcgtgacgat

SEQ ID NO: 125430 - DNA, 25 bp, Saccharomyces pastorianus
aaacactcatgtcacggacgatcct

SEQ ID NO: 125431 - DNA, 25 bp, Saccharomyces pastorianus
gagtttgcatcataccagagttatt

SEQ ID NO: 125432 - DNA, 25 bp, Saccharomyces pastorianus
aaggatctcctgacaaccctgaaag

SEQ ID NO: 125433 - DNA, 25 bp, Saccharomyces pastorianus
gaccaagctgccacttttgaagact

SEQ ID NO: 125434 - DNA, 25 bp, Saccharomyces pastorianus
tgatgaggattctgacgccgacgaa

SEQ ID NO: 125435 - DNA, 25 bp, Saccharomyces pastorianus
atgagccaacatccttactacagag

SEQ ID NO: 125436 - DNA, 25 bp, Saccharomyces pastorianus
taactctaccggtatcgttcaatga

SEQ ID NO: 125437 - DNA, 25 bp, Saccharomyces pastorianus
gagtattctcatattcttgaccaag

SEQ ID NO: 125438 - DNA, 25 bp, Saccharomyces pastorianus
gtgatcagttctccacaggtggaaa

SEQ ID NO: 125439 - DNA, 25 bp, Saccharomyces pastorianus
gacgagagccttattgtgatcagtt

SEQ ID NO: 125440 - DNA, 25 bp, Saccharomyces pastorianus
acgccgacgaatttttcgacgcaga

SEQ ID NO: 125441 - DNA, 25 bp, Saccharomyces pastorianus
ggagactccagctaatgcgaaacca

SEQ ID NO: 125442 - DNA, 25 bp, Saccharomyces pastorianus
ggtctctggtctgttttaaagtcta

SEQ ID NO: 125443 - DNA, 25 bp, Saccharomyces pastorianus
aatcgtcccaagattggtctctggt

SEQ ID NO: 125444 - DNA, 25 bp, Saccharomyces pastorianus
tcacatgacgttacatccaagcggt

SEQ ID NO: 125445 - DNA, 25 bp, Saccharomyces pastorianus
cactcggtatgttatctattggcgg

SEQ ID NO: 125446 - DNA, 25 bp, Saccharomyces pastorianus
aacacgtatcttgaaattcttagaa

SEQ ID NO: 125447 - DNA, 25 bp, Saccharomyces pastorianus
gaatctctgacactcggtatgttat

SEQ ID NO: 125448 - DNA, 25 bp, Saccharomyces pastorianus
gatatctcgtattctagagctttag

SEQ ID NO: 125449 - DNA, 25 bp, Saccharomyces pastorianus
attcttagaatctctgacactcggt

SEQ ID NO: 125450 - DNA, 25 bp, Saccharomyces pastorianus
gggctggaaagcaaacacgtatctt

SEQ ID NO: 125451 - DNA, 25 bp, Saccharomyces pastorianus
tacatccaagcggtttttattaagg

SEQ ID NO: 125452 - DNA, 25 bp, Saccharomyces pastorianus
tatctttcagatccgatatctcgta

SEQ ID NO: 125453 - DNA, 25 bp, Saccharomyces pastorianus
agctagatgctctctttagtattat

SEQ ID NO: 125454 - DNA, 25 bp, Saccharomyces pastorianus
atgttatctattggcggttacaagc

SEQ ID NO: 125455 - DNA, 25 bp, Saccharomyces pastorianus
agatgagcacttttgggcggataat

SEQ ID NO: 125456 - DNA, 25 bp, Saccharomyces pastorianus
gtggagcgctcgataatccgtttga

SEQ ID NO: 125457 - DNA, 25 bp, Saccharomyces pastorianus
tgttgacttcaaccaagctttcgaa

SEQ ID NO: 125458 - DNA, 25 bp, Saccharomyces pastorianus
aagatcataagttccccattcgaga

SEQ ID NO: 125459 - DNA, 25 bp, Saccharomyces pastorianus
taacgacattcctactattgcagat

SEQ ID NO: 125460 - DNA, 25 bp, Saccharomyces pastorianus
ggagctcaagttttctgatatcatt

SEQ ID NO: 125461 - DNA, 25 bp, Saccharomyces pastorianus
gaagcataccagaggcgacgttagt

SEQ ID NO: 125462 - DNA, 25 bp, Saccharomyces pastorianus
gagtctgttcagtcataggaagcat

SEQ ID NO: 125463 - DNA, 25 bp, Saccharomyces pastorianus
atgacatggacggtgttgacttcaa

SEQ ID NO: 125464 - DNA, 25 bp, Saccharomyces pastorianus
agctctaatgacagtgaaacccaca

SEQ ID NO: 125465 - DNA, 25 bp, Saccharomyces pastorianus
aaaaagcacagtttctgccaaccat

SEQ ID NO: 125466 - DNA, 25 bp, Saccharomyces pastorianus
atgctggtgtcatcgctaatcctaa

SEQ ID NO: 125467 - DNA, 25 bp, Saccharomyces pastorianus
tggtgtcatcgctaatcctaagggt

SEQ ID NO: 125468 - DNA, 25 bp, Saccharomyces pastorianus
tcatcgctaatcctaagggtgaaat

SEQ ID NO: 125469 - DNA, 25 bp, Saccharomyces pastorianus
acaatgctggtgtcatcgctaatcc

SEQ ID NO: 125470 - DNA, 25 bp, Saccharomyces pastorianus
ctggtgtcatcgctaatcctaaggg

SEQ ID NO: 125471 - DNA, 25 bp, Saccharomyces pastorianus
tgctggtgtcatcgctaatcctaag

SEQ ID NO: 125472 - DNA, 25 bp, Saccharomyces pastorianus
ggtgtcatcgctaatcctaagggtg

SEQ ID NO: 125473 - DNA, 25 bp, Saccharomyces pastorianus
tcgctaatcctaagggtgaaatgaa

SEQ ID NO: 125474 - DNA, 25 bp, Saccharomyces pastorianus
gtgtcatcgctaatcctaagggtga

SEQ ID NO: 125475 - DNA, 25 bp, Saccharomyces pastorianus
tgtcatcgctaatcctaagggtgaa

SEQ ID NO: 125476 - DNA, 25 bp, Saccharomyces pastorianus
aatgctggtgtcatcgctaatccta

SEQ ID NO: 125477 - DNA, 25 bp, Saccharomyces pastorianus
ctaggtgatatggttatggccaccg

SEQ ID NO: 125478 - DNA, 25 bp, Saccharomyces pastorianus
cattatcgccgtcaaaggctctggt

SEQ ID NO: 125479 - DNA, 25 bp, Saccharomyces pastorianus
tggtgtcatcgctaatcctaagggt

SEQ ID NO: 125480 - DNA, 25 bp, Saccharomyces pastorianus
cttgtacattatcgccgtcaaaggc

SEQ ID NO: 125481 - DNA, 25 bp, Saccharomyces pastorianus
atcgccgtcaaaggctctggttcca

SEQ ID NO: 125482 - DNA, 25 bp, Saccharomyces pastorianus
aatgctggtgtcatcgctaatccta

SEQ ID NO: 125483 - DNA, 25 bp, Saccharomyces pastorianus
agacaatgctggtgtcatcgctaat

SEQ ID NO: 125484 - DNA, 25 bp, Saccharomyces pastorianus
acattatcgccgtcaaaggctctgg

SEQ ID NO: 125485 - DNA, 25 bp, Saccharomyces pastorianus
attatcgccgtcaaaggctctggtt

SEQ ID NO: 125486 - DNA, 25 bp, Saccharomyces pastorianus
gtcatcgctaatcctaagggtgaaa

SEQ ID NO: 125487 - DNA, 25 bp, Saccharomyces pastorianus
tacattatcgccgtcaaaggctctg

SEQ ID NO: 125488 - DNA, 25 bp, Saccharomyces pastorianus
cccattgtctgtaattttttctacg

SEQ ID NO: 125489 - DNA, 25 bp, Saccharomyces pastorianus
gagacatcagattccgataattccg

SEQ ID NO: 125490 - DNA, 25 bp, Saccharomyces pastorianus
aatgacctggttaattcacgaatgg

SEQ ID NO: 125491 - DNA, 25 bp, Saccharomyces pastorianus
aagaacatattgtatcagggtcgat

SEQ ID NO: 125492 - DNA, 25 bp, Saccharomyces pastorianus
taacagcgggtgtttctttcaacaa

SEQ ID NO: 125493 - DNA, 25 bp, Saccharomyces pastorianus
ggacattatttcctacaacgatatc

SEQ ID NO: 125494 - DNA, 25 bp, Saccharomyces pastorianus
cagggtcgatagtttctatattcat

SEQ ID NO: 125495 - DNA, 25 bp, Saccharomyces pastorianus
attttcgaactctttcccattgtct

SEQ ID NO: 125496 - DNA, 25 bp, Saccharomyces pastorianus
atcaacttactgtctaatgtactga

SEQ ID NO: 125497 - DNA, 25 bp, Saccharomyces pastorianus
ggattctgaattcattttccccatt

SEQ ID NO: 125498 - DNA, 25 bp, Saccharomyces pastorianus
gggatgagctattccaatctttgag

SEQ ID NO: 125499 - DNA, 25 bp, Saccharomyces pastorianus
ttcacgcgccaatggtttttgcaac

SEQ ID NO: 125500 - DNA, 25 bp, Saccharomyces pastorianus
ttagctagtaggatccaagatgcat

SEQ ID NO: 125501 - DNA, 25 bp, Saccharomyces pastorianus
gaattgagtttctttcacgcgccaa

SEQ ID NO: 125502 - DNA, 25 bp, Saccharomyces pastorianus
gtatgattggcttgtgtctcagaac

SEQ ID NO: 125503 - DNA, 25 bp, Saccharomyces pastorianus
gattattccactatcatatgtatga

SEQ ID NO: 125504 - DNA, 25 bp, Saccharomyces pastorianus
aacgtatcttagtttatgacctagt

SEQ ID NO: 125505 - DNA, 25 bp, Saccharomyces pastorianus
aactagcttgtcaatatgtggcaaa

SEQ ID NO: 125506 - DNA, 25 bp, Saccharomyces pastorianus
tttaccgtttagctacatcgaattt

SEQ ID NO: 125507 - DNA, 25 bp, Saccharomyces pastorianus
gaatctgctgaaattctttaccgtt

SEQ ID NO: 125508 - DNA, 25 bp, Saccharomyces pastorianus
atatactctgggtctattattcaag

SEQ ID NO: 125509 - DNA, 25 bp, Saccharomyces pastorianus
acagtgtgtcaccattaagccagaa

SEQ ID NO: 125510 - DNA, 25 bp, Saccharomyces pastorianus
gaggtcgctggtattgaactggtta

SEQ ID NO: 125511 - DNA, 25 bp, Saccharomyces pastorianus
tgacggctcaaagatagacccaatt

SEQ ID NO: 125512 - DNA, 25 bp, Saccharomyces pastorianus
ttaaagatgccctaccatcagtcac

SEQ ID NO: 125513 - DNA, 25 bp, Saccharomyces pastorianus
gaacgctattagaggcttgccagaa

SEQ ID NO: 125514 - DNA, 25 bp, Saccharomyces pastorianus
gtttggaagccaccgacgatgtttt

SEQ ID NO: 125515 - DNA, 25 bp, Saccharomyces pastorianus
aaagcagttgctgattggcctgtat

SEQ ID NO: 125516 - DNA, 25 bp, Saccharomyces pastorianus
gaatctgctgttcaagctggacaag

SEQ ID NO: 125517 - DNA, 25 bp, Saccharomyces pastorianus
agacctgtagatccgacattgccaa

SEQ ID NO: 125518 - DNA, 25 bp, Saccharomyces pastorianus
gatactatcgactttgaagccattg

SEQ ID NO: 125519 - DNA, 25 bp, Saccharomyces pastorianus
gaaccgaccaagacgtgttaatcat

SEQ ID NO: 125520 - DNA, 25 bp, Saccharomyces pastorianus
gatgttgttatcacctccgatgagg

SEQ ID NO: 125521 - DNA, 25 bp, Saccharomyces pastorianus
aaaagttctatctctttgggatgaa

SEQ ID NO: 125522 - DNA, 25 bp, Saccharomyces pastorianus
ttacggtcatattctagcttccact

SEQ ID NO: 125523 - DNA, 25 bp, Saccharomyces pastorianus
gtcaagtttaccgtggattcaaagt

SEQ ID NO: 125524 - DNA, 25 bp, Saccharomyces pastorianus
ggagttttccttcttcgatgggcct

SEQ ID NO: 125525 - DNA, 25 bp, Saccharomyces pastorianus
tattgttccaagatacgctaccatg

SEQ ID NO: 125526 - DNA, 25 bp, Saccharomyces pastorianus
aatgacccagctgtgaccattggtt

SEQ ID NO: 125527 - DNA, 25 bp, Saccharomyces pastorianus
gattcggttgggatacacacggtgt

SEQ ID NO: 125528 - DNA, 25 bp, Saccharomyces pastorianus
tatgccttattctactgggctaacc

SEQ ID NO: 125529 - DNA, 25 bp, Saccharomyces pastorianus
gtatccatcctttatggagtccaca

SEQ ID NO: 125530 - DNA, 25 bp, Saccharomyces pastorianus
accatgacaggccaccacgtggaaa

SEQ ID NO: 125531 - DNA, 25 bp, Saccharomyces pastorianus
agatgcctttcatacttcattagaa

SEQ ID NO: 125532 - DNA, 25 bp, Saccharomyces pastorianus
tataaagcgatgtattcaaacgctg

SEQ ID NO: 125533 - DNA, 25 bp, Saccharomyces pastorianus
gatgtattcaaacgctgttgaaaag

SEQ ID NO: 125534 - DNA, 25 bp, Saccharomyces pastorianus
aagcgatgtattcaaacgctgttga

SEQ ID NO: 125535 - DNA, 25 bp, Saccharomyces pastorianus
agcgatgtattcaaacgctgttgaa

SEQ ID NO: 125536 - DNA, 25 bp, Saccharomyces pastorianus
ataaagcgatgtattcaaacgctgt

SEQ ID NO: 125537 - DNA, 25 bp, Saccharomyces pastorianus
aaagcgatgtattcaaacgctgttg

SEQ ID NO: 125538 - DNA, 25 bp, Saccharomyces pastorianus
cgatgtattcaaacgctgttgaaaa

SEQ ID NO: 125539 - DNA, 25 bp, Saccharomyces pastorianus
tgtattcaaacgctgttgaaaagaa

SEQ ID NO: 125540 - DNA, 25 bp, Saccharomyces pastorianus
gcgatgtattcaaacgctgttgaaa

SEQ ID NO: 125541 - DNA, 25 bp, Saccharomyces pastorianus
ttttataaagcgatgtattcaaacg

SEQ ID NO: 125542 - DNA, 25 bp, Saccharomyces pastorianus
taaagcgatgtattcaaacgctgtt

SEQ ID NO: 125543 - DNA, 25 bp, Saccharomyces pastorianus
tattgtgacgaatgttgcggtttac

SEQ ID NO: 125544 - DNA, 25 bp, Saccharomyces pastorianus
ggatgagccatttttggatttcccc

SEQ ID NO: 125545 - DNA, 25 bp, Saccharomyces pastorianus
gtctgacgtgcgataacattacatc

SEQ ID NO: 125546 - DNA, 25 bp, Saccharomyces pastorianus
ttcatatgggcggtgggccacaaca

SEQ ID NO: 125547 - DNA, 25 bp, Saccharomyces pastorianus
agcaattgcctgatactttaacatt

SEQ ID NO: 125548 - DNA, 25 bp, Saccharomyces pastorianus
gacttgtttcaaggcactttaacga

SEQ ID NO: 125549 - DNA, 25 bp, Saccharomyces pastorianus
aataacattcactatcctctgacgc

SEQ ID NO: 125550 - DNA, 25 bp, Saccharomyces pastorianus
ctctgacgctaaatgtttgctcttc

SEQ ID NO: 125551 - DNA, 25 bp, Saccharomyces pastorianus
atcaacagcgatagcgaaccgagta

SEQ ID NO: 125552 - DNA, 25 bp, Saccharomyces pastorianus
cggccattatgtttccctatgtaaa

SEQ ID NO: 125553 - DNA, 25 bp, Saccharomyces pastorianus
aattggctgggattgtcgttcatat

SEQ ID NO: 125554 - DNA, 25 bp, Saccharomyces pastorianus
ttggtatgggcatcacagggacatg

SEQ ID NO: 125555 - DNA, 25 bp, Saccharomyces pastorianus
gggatgtttcatcatttcaggaact

SEQ ID NO: 125556 - DNA, 25 bp, Saccharomyces pastorianus
tgttggagctgggatgtttcatcat

SEQ ID NO: 125557 - DNA, 25 bp, Saccharomyces pastorianus
aaggcgtgccaacaacgaatttgta

SEQ ID NO: 125558 - DNA, 25 bp, Saccharomyces pastorianus
gccaacaacgaatttgtagtgacaa

SEQ ID NO: 125559 - DNA, 25 bp, Saccharomyces pastorianus
agcaacgtctggaaaggcgtgccaa

SEQ ID NO: 125560 - DNA, 25 bp, Saccharomyces pastorianus
ggtatatttggtatgggcatcacag

SEQ ID NO: 125561 - DNA, 25 bp, Saccharomyces pastorianus
aacatgcctctggataaaagaagcc

SEQ ID NO: 125562 - DNA, 25 bp, Saccharomyces pastorianus
catttcaggaactaaagcaacgtct

SEQ ID NO: 125563 - DNA, 25 bp, Saccharomyces pastorianus
gccagcaagtagtggacagcttagt

SEQ ID NO: 125564 - DNA, 25 bp, Saccharomyces pastorianus
gtagtgacaaacatgcctctggata

SEQ ID NO: 125565 - DNA, 25 bp, Saccharomyces pastorianus
acaagcccaaaattagcagtgagga

SEQ ID NO: 125566 - DNA, 25 bp, Saccharomyces pastorianus
ttcttcggaatcactatttttacac

SEQ ID NO: 125567 - DNA, 25 bp, Saccharomyces pastorianus
aactcagatgacacgattcttcgga

SEQ ID NO: 125568 - DNA, 25 bp, Saccharomyces pastorianus
attcgaaataaaggactggccaaca

SEQ ID NO: 125569 - DNA, 25 bp, Saccharomyces pastorianus
aggactggccaacaataatgttagt

SEQ ID NO: 125570 - DNA, 25 bp, Saccharomyces pastorianus
gattttttaataggtctttctctat

SEQ ID NO: 125571 - DNA, 25 bp, Saccharomyces pastorianus
gtcacacattttatagacgactata

SEQ ID NO: 125572 - DNA, 25 bp, Saccharomyces pastorianus
gcagtgaggaagtcacacattttat

SEQ ID NO: 125573 - DNA, 25 bp, Saccharomyces pastorianus
tagtgaacagaaacgacaagcccaa

SEQ ID NO: 125574 - DNA, 25 bp, Saccharomyces pastorianus
taggtctttctctattaatgtaata

SEQ ID NO: 125575 - DNA, 25 bp, Saccharomyces pastorianus
cacttataacatgtagaattgccat

SEQ ID NO: 125576 - DNA, 25 bp, Saccharomyces pastorianus
gtttcttcgaattacaccatagctt

SEQ ID NO: 125577 - DNA, 25 bp, Saccharomyces pastorianus
tttatgggctactttcaccgcaatc

SEQ ID NO: 125578 - DNA, 25 bp, Saccharomyces pastorianus
atctcctttgccgtgggttaccagt

SEQ ID NO: 125579 - DNA, 25 bp, Saccharomyces pastorianus
agattgctgcgggaagtgccaccgt

SEQ ID NO: 125580 - DNA, 25 bp, Saccharomyces pastorianus
gtacgtcgaacgcatcatcaactaa

SEQ ID NO: 125581 - DNA, 25 bp, Saccharomyces pastorianus
taccagttgggtacgtcgaacgcat

SEQ ID NO: 125582 - DNA, 25 bp, Saccharomyces pastorianus
atagcggcacaatgctgtcacgcag

SEQ ID NO: 125583 - DNA, 25 bp, Saccharomyces pastorianus
gtattgggtttaggacctgctccaa

SEQ ID NO: 125584 - DNA, 25 bp, Saccharomyces pastorianus
cgcgtgcttcatacaacccaattat

SEQ ID NO: 125585 - DNA, 25 bp, Saccharomyces pastorianus
ctcagctactttactgcgttctaaa

SEQ ID NO: 125586 - DNA, 25 bp, Saccharomyces pastorianus
tagacatattgctacaaaccccgcg

SEQ ID NO: 125587 - DNA, 25 bp, Saccharomyces pastorianus
ttgtccgcacacaatttgaatagtg

SEQ ID NO: 125588 - DNA, 25 bp, Saccharomyces pastorianus
atgatggcttggaacagggcttgaa

SEQ ID NO: 125589 - DNA, 25 bp, Saccharomyces pastorianus
gatctataaatctttgagtcactct

SEQ ID NO: 125590 - DNA, 25 bp, Saccharomyces pastorianus
aacagggcttgaatcgttctttaag

SEQ ID NO: 125591 - DNA, 25 bp, Saccharomyces pastorianus
atcgttctttaagcggactggattt

SEQ ID NO: 125592 - DNA, 25 bp, Saccharomyces pastorianus
gaatcgttctttaagcggactggat

SEQ ID NO: 125593 - DNA, 25 bp, Saccharomyces pastorianus
tggcttggaacagggcttgaatcgt

SEQ ID NO: 125594 - DNA, 25 bp, Saccharomyces pastorianus
gtcactctggactagatgatggctt

SEQ ID NO: 125595 - DNA, 25 bp, Saccharomyces pastorianus
gtgccgacttgatctataaatcttt

SEQ ID NO: 125596 - DNA, 25 bp, Saccharomyces pastorianus
caatttgaatagtgccgacttgatc

SEQ ID NO: 125597 - DNA, 25 bp, Saccharomyces pastorianus
aaatctttgagtcactctggactag

SEQ ID NO: 125598 - DNA, 25 bp, Saccharomyces pastorianus
ggcggctccatgaataggtcacaat

SEQ ID NO: 125599 - DNA, 25 bp, Saccharomyces pastorianus
aattctcaatacaattccgcggacc

SEQ ID NO: 125600 - DNA, 25 bp, Saccharomyces pastorianus
cagggacaattctccatgcaaccaa

SEQ ID NO: 125601 - DNA, 25 bp, Saccharomyces pastorianus
tgttttgtgctcgtacttagggcta

SEQ ID NO: 125602 - DNA, 25 bp, Saccharomyces pastorianus
aagtttgttacaggcccatgcagca

SEQ ID NO: 125603 - DNA, 25 bp, Saccharomyces pastorianus
tcaggccgttaacaattcttccaac

SEQ ID NO: 125604 - DNA, 25 bp, Saccharomyces pastorianus
aaatgacatctgctcatcctttgca

SEQ ID NO: 125605 - DNA, 25 bp, Saccharomyces pastorianus
tagcgccagctcaacaccaaaaatt

SEQ ID NO: 125606 - DNA, 25 bp, Saccharomyces pastorianus
aaatgttcagtcagctgcgcaacaa

SEQ ID NO: 125607 - DNA, 25 bp, Saccharomyces pastorianus
aagctactttaacaccatcctcaag

SEQ ID NO: 125608 - DNA, 25 bp, Saccharomyces pastorianus
gaattccatccggttattctgccaa

SEQ ID NO: 125609 - DNA, 25 bp, Saccharomyces pastorianus
ggaaactctgtgaacgccgtggatt

SEQ ID NO: 125610 - DNA, 25 bp, Saccharomyces pastorianus
cagtcgctgctgcaagaactttaca

SEQ ID NO: 125611 - DNA, 25 bp, Saccharomyces pastorianus
atagattgttatgagctcgctggtg

SEQ ID NO: 125612 - DNA, 25 bp, Saccharomyces pastorianus
gttgatcaagagcagcatgggcaat

SEQ ID NO: 125613 - DNA, 25 bp, Saccharomyces pastorianus
gtatgcccaagaccagtcggtagca

SEQ ID NO: 125614 - DNA, 25 bp, Saccharomyces pastorianus
gctagctgctactgatgcagtcgct

SEQ ID NO: 125615 - DNA, 25 bp, Saccharomyces pastorianus
tagcgagcagctaagcgaacactgt

SEQ ID NO: 125616 - DNA, 25 bp, Saccharomyces pastorianus
aaagggctttgtcagctagctgcta

SEQ ID NO: 125617 - DNA, 25 bp, Saccharomyces pastorianus
gctcgctggtgagtggtatgcccaa

SEQ ID NO: 125618 - DNA, 25 bp, Saccharomyces pastorianus
agttccggagaggtgctaatttcaa

SEQ ID NO: 125619 - DNA, 25 bp, Saccharomyces pastorianus
gatctaaaggctcttgacggtcaat

SEQ ID NO: 125620 - DNA, 25 bp, Saccharomyces pastorianus
aatgatcctatcgttgatgctagct

SEQ ID NO: 125621 - DNA, 25 bp, Saccharomyces pastorianus
aaccaaagtagctaccccaagcatt

SEQ ID NO: 125622 - DNA, 25 bp, Saccharomyces pastorianus
ggttgcaactactccaaagtctcta

SEQ ID NO: 125623 - DNA, 25 bp, Saccharomyces pastorianus
aagtctctagccgtcgaggagttaa

SEQ ID NO: 125624 - DNA, 25 bp, Saccharomyces pastorianus
aggcacttctccttcacataatgaa

SEQ ID NO: 125625 - DNA, 25 bp, Saccharomyces pastorianus
acaaatgaacgcttttacagggacg

SEQ ID NO: 125626 - DNA, 25 bp, Saccharomyces pastorianus
aaccagtgaccctgctcaagtaagc

SEQ ID NO: 125627 - DNA, 25 bp, Saccharomyces pastorianus
gtaactccaaagctgaaccaaccaa

SEQ ID NO: 125628 - DNA, 25 bp, Saccharomyces pastorianus
gatgctagcttgtcaaaaggtccaa

SEQ ID NO: 125629 - DNA, 25 bp, Saccharomyces pastorianus
aagcaccaattccattttgcctgtt

SEQ ID NO: 125630 - DNA, 25 bp, Saccharomyces pastorianus
gaagaagcgcacaatgccttgaaaa

SEQ ID NO: 125631 - DNA, 25 bp, Saccharomyces pastorianus
tggtatcacgtaccgcgagaatatc

SEQ ID NO: 125632 - DNA, 25 bp, Saccharomyces pastorianus
tgctggtatcacgtaccgcgagaat

SEQ ID NO: 125633 - DNA, 25 bp, Saccharomyces pastorianus
attgctggtatcacgtaccgcgaga

SEQ ID NO: 125634 - DNA, 25 bp, Saccharomyces pastorianus
ctggtatcacgtaccgcgagaatat

SEQ ID NO: 125635 - DNA, 25 bp, Saccharomyces pastorianus
gctggtatcacgtaccgcgagaata

SEQ ID NO: 125636 - DNA, 25 bp, Saccharomyces pastorianus
cgattgctggtatcacgtaccgcga

SEQ ID NO: 125637 - DNA, 25 bp, Saccharomyces pastorianus
gcgattgctggtatcacgtaccgcg

SEQ ID NO: 125638 - DNA, 25 bp, Saccharomyces pastorianus
gattgctggtatcacgtaccgcgag

SEQ ID NO: 125639 - DNA, 25 bp, Saccharomyces pastorianus
gttcctcgcaagaggataagatgat

SEQ ID NO: 125640 - DNA, 25 bp, Saccharomyces pastorianus
tgcgattgctggtatcacgtaccgc

SEQ ID NO: 125641 - DNA, 25 bp, Saccharomyces pastorianus
ttgctggtatcacgtaccgcgagaa

SEQ ID NO: 125642 - DNA, 25 bp, Saccharomyces pastorianus
aatcaagggctccaaactgtctctg

SEQ ID NO: 125643 - DNA, 25 bp, Saccharomyces pastorianus
ttgctattgctggtacaggccaaat

SEQ ID NO: 125644 - DNA, 25 bp, Saccharomyces pastorianus
tatgggaccaagatattgctattgc

SEQ ID NO: 125645 - DNA, 25 bp, Saccharomyces pastorianus
atgacgctaacttgttaggcgcaga

SEQ ID NO: 125646 - DNA, 25 bp, Saccharomyces pastorianus
atgattgacgacctcatccatttca

SEQ ID NO: 125647 - DNA, 25 bp, Saccharomyces pastorianus
gaatctggtaatcccgtcaatgacg

SEQ ID NO: 125648 - DNA, 25 bp, Saccharomyces pastorianus
ggcgcagaagtcctaatcaagggct

SEQ ID NO: 125649 - DNA, 25 bp, Saccharomyces pastorianus
aactgtctctgggtgaggctttcaa

SEQ ID NO: 125650 - DNA, 25 bp, Saccharomyces pastorianus
gaacgtgccaaatcgctgttgaaat

SEQ ID NO: 125651 - DNA, 25 bp, Saccharomyces pastorianus
gaccatttctgtcactgatactgaa

SEQ ID NO: 125652 - DNA, 25 bp, Saccharomyces pastorianus
gacctcatccatttcactttgaaac

SEQ ID NO: 125653 - DNA, 25 bp, Saccharomyces pastorianus
aaagaaaactctgctgttgccgcca

SEQ ID NO: 125654 - DNA, 25 bp, Saccharomyces pastorianus
tacattgtatcttctttgccaggtt

SEQ ID NO: 125655 - DNA, 25 bp, Saccharomyces pastorianus
agagacttccaatcttacattgtat

SEQ ID NO: 125656 - DNA, 25 bp, Saccharomyces pastorianus
cttctttgccaggttctaccgataa

SEQ ID NO: 125657 - DNA, 25 bp, Saccharomyces pastorianus
gtagccactgagcataatccttccg

SEQ ID NO: 125658 - DNA, 25 bp, Saccharomyces pastorianus
acacagcctctgtcggtgttgtctt

SEQ ID NO: 125659 - DNA, 25 bp, Saccharomyces pastorianus
ctaacggtatagttgtagccactga

SEQ ID NO: 125660 - DNA, 25 bp, Saccharomyces pastorianus
ggcattgtcttccaatatctccaga

SEQ ID NO: 125661 - DNA, 25 bp, Saccharomyces pastorianus
aaggccgaagtaacgcaattatcta

SEQ ID NO: 125662 - DNA, 25 bp, Saccharomyces pastorianus
caagaggtctttggctacagctgta

SEQ ID NO: 125663 - DNA, 25 bp, Saccharomyces pastorianus
gtgctgccaacgaaaacccttataa

SEQ ID NO: 125664 - DNA, 25 bp, Saccharomyces pastorianus
acgacctgatgcatttcactctgaa

SEQ ID NO: 125665 - DNA, 25 bp, Saccharomyces pastorianus
agaagtgcttgctaagggctccaaa

SEQ ID NO: 125666 - DNA, 25 bp, Saccharomyces pastorianus
atcgccatcgctggtactggtcaaa

SEQ ID NO: 125667 - DNA, 25 bp, Saccharomyces pastorianus
ttatttcgtcgccaaattagccgct

SEQ ID NO: 125668 - DNA, 25 bp, Saccharomyces pastorianus
aaatctttggctcctacaacgcttt

SEQ ID NO: 125669 - DNA, 25 bp, Saccharomyces pastorianus
gaaattgcacttgggacagctatac

SEQ ID NO: 125670 - DNA, 25 bp, Saccharomyces pastorianus
tgccaacgacgctaacctgttaggt

SEQ ID NO: 125671 - DNA, 25 bp, Saccharomyces pastorianus
agatcgatgccgtaaccgttaaaga

SEQ ID NO: 125672 - DNA, 25 bp, Saccharomyces pastorianus
aagagacgacactttgcccaaggct

SEQ ID NO: 125673 - DNA, 25 bp, Saccharomyces pastorianus
agattgaccatttccgtgactgaca

SEQ ID NO: 125674 - DNA, 25 bp, Saccharomyces pastorianus
tgactctttcaaccatttttcgcta

SEQ ID NO: 125675 - DNA, 25 bp, Saccharomyces pastorianus
tgataatacgtcgtggaacttcacc

SEQ ID NO: 125676 - DNA, 25 bp, Saccharomyces pastorianus
agctcgttgtttgagagtcctccaa

SEQ ID NO: 125677 - DNA, 25 bp, Saccharomyces pastorianus
gagattatccaaacaatgagctatt

SEQ ID NO: 125678 - DNA, 25 bp, Saccharomyces pastorianus
aatctcctaccatttgccaacaatt

SEQ ID NO: 125679 - DNA, 25 bp, Saccharomyces pastorianus
aaattcagcctgacactgctggtgt

SEQ ID NO: 125680 - DNA, 25 bp, Saccharomyces pastorianus
cgattgtttgcctaagaatgtcttt

SEQ ID NO: 125681 - DNA, 25 bp, Saccharomyces pastorianus
ggaagatgctgcaatctcctaccat

SEQ ID NO: 125682 - DNA, 25 bp, Saccharomyces pastorianus
gtcctccaaactactccagattata

SEQ ID NO: 125683 - DNA, 25 bp, Saccharomyces pastorianus
aacgattattcgattgtttgcctaa

SEQ ID NO: 125684 - DNA, 25 bp, Saccharomyces pastorianus
gagaccttatggaagatgctgcaat

SEQ ID NO: 125685 - DNA, 25 bp, Saccharomyces pastorianus
cagtgccgtggtattagctcgttgt

SEQ ID NO: 125686 - DNA, 25 bp, Saccharomyces pastorianus
gaaatctactgatgacacgccttca

SEQ ID NO: 125687 - DNA, 25 bp, Saccharomyces pastorianus
ggaacagatccttttaatgcttaat

SEQ ID NO: 125688 - DNA, 25 bp, Saccharomyces pastorianus
ctcgttcattgtcttttggtttgga

SEQ ID NO: 125689 - DNA, 25 bp, Saccharomyces pastorianus
gaactactggatgttgctattatgc

SEQ ID NO: 125690 - DNA, 25 bp, Saccharomyces pastorianus
gtaagtccataattctcgttcattg

SEQ ID NO: 125691 - DNA, 25 bp, Saccharomyces pastorianus
gaatgccgacgatgatggcgtttcg

SEQ ID NO: 125692 - DNA, 25 bp, Saccharomyces pastorianus
gatgcatttgcctatcatggataat

SEQ ID NO: 125693 - DNA, 25 bp, Saccharomyces pastorianus
aagggattccttgactgtatatgaa

SEQ ID NO: 125694 - DNA, 25 bp, Saccharomyces pastorianus
tgacacgccttcaattccatcaaaa

SEQ ID NO: 125695 - DNA, 25 bp, Saccharomyces pastorianus
gatcgaacccttgattacttgtttt

SEQ ID NO: 125696 - DNA, 25 bp, Saccharomyces pastorianus
tataaattacctgatcgaacccttg

SEQ ID NO: 125697 - DNA, 25 bp, Saccharomyces pastorianus
aaaattaagctctggttgcgccttt

SEQ ID NO: 125698 - DNA, 25 bp, Saccharomyces pastorianus
aagaaacgactgaatctcccgcaga

SEQ ID NO: 125699 - DNA, 25 bp, Saccharomyces pastorianus
gaatctttccctaactttgacgaca

SEQ ID NO: 125700 - DNA, 25 bp, Saccharomyces pastorianus
tctcccgcagaaactactaccggaa

SEQ ID NO: 125701 - DNA, 25 bp, Saccharomyces pastorianus
ggttgcgcctttattgatgtgtcaa

SEQ ID NO: 125702 - DNA, 25 bp, Saccharomyces pastorianus
gtgtcaagaaatgaccctgccaaag

SEQ ID NO: 125703 - DNA, 25 bp, Saccharomyces pastorianus
acacttgttaatcgaatctttccct

SEQ ID NO: 125704 - DNA, 25 bp, Saccharomyces pastorianus
aaacttattcttgcctgtgtggaaa

SEQ ID NO: 125705 - DNA, 25 bp, Saccharomyces pastorianus
aaggctactccaagcgctgaagaaa

SEQ ID NO: 125706 - DNA, 25 bp, Saccharomyces pastorianus
tattgatgcgaatgccaaggctact

SEQ ID NO: 125707 - DNA, 25 bp, Saccharomyces pastorianus
gacgacattcgttcgaagaacatcg

SEQ ID NO: 125708 - DNA, 25 bp, Saccharomyces pastorianus
aggtcttggtttgcatgctgttcag

SEQ ID NO: 125709 - DNA, 25 bp, Saccharomyces pastorianus
gagtctgaaggacctcaaaccaaga

SEQ ID NO: 125710 - DNA, 25 bp, Saccharomyces pastorianus
gggtgtatccaaatggcctgtctat

SEQ ID NO: 125711 - DNA, 25 bp, Saccharomyces pastorianus
aagactaccacgtgacgcgaacgaa

SEQ ID NO: 125712 - DNA, 25 bp, Saccharomyces pastorianus
gtgatgataagcttcctggcctaat

SEQ ID NO: 125713 - DNA, 25 bp, Saccharomyces pastorianus
gatagtttctttccaccatctgaag

SEQ ID NO: 125714 - DNA, 25 bp, Saccharomyces pastorianus
gaggcggctacagagaaactatctt

SEQ ID NO: 125715 - DNA, 25 bp, Saccharomyces pastorianus
gaaactatcttctgaaaccccagct

SEQ ID NO: 125716 - DNA, 25 bp, Saccharomyces pastorianus
aaacacaggcggatttttcattact

SEQ ID NO: 125717 - DNA, 25 bp, Saccharomyces pastorianus
gattggtttactcaacctgttcttt

SEQ ID NO: 125718 - DNA, 25 bp, Saccharomyces pastorianus
gaaaccccagctctagagtctgaag

SEQ ID NO: 125719 - DNA, 25 bp, Saccharomyces pastorianus
gtttccaatcactgttcgtcattta

SEQ ID NO: 125720 - DNA, 25 bp, Saccharomyces pastorianus
tataccctaaattgcatcagatgga

SEQ ID NO: 125721 - DNA, 25 bp, Saccharomyces pastorianus
ccaaaaagtcagtgttcgccgccaa

SEQ ID NO: 125722 - DNA, 25 bp, Saccharomyces pastorianus
aagagatctcgcctattccacagga

SEQ ID NO: 125723 - DNA, 25 bp, Saccharomyces pastorianus
agaatgtcagtttgaccgagcctat

SEQ ID NO: 125724 - DNA, 25 bp, Saccharomyces pastorianus
gtcgattctcatgtaagatcccatc

SEQ ID NO: 125725 - DNA, 25 bp, Saccharomyces pastorianus
gaccgagcctattctttctagattt

SEQ ID NO: 125726 - DNA, 25 bp, Saccharomyces pastorianus
gattggctacatttgttgtcgattc

SEQ ID NO: 125727 - DNA, 25 bp, Saccharomyces pastorianus
gattcctttgttgatgcccaaaaag

SEQ ID NO: 125728 - DNA, 25 bp, Saccharomyces pastorianus
tcaaccttgcctttagctcagaatg

SEQ ID NO: 125729 - DNA, 25 bp, Saccharomyces pastorianus
gtatttctacaggttcgtttccaat

SEQ ID NO: 125730 - DNA, 25 bp, Saccharomyces pastorianus
gaagttaccggcatctacaaaaata

SEQ ID NO: 125731 - DNA, 25 bp, Saccharomyces pastorianus
gggcaatacagctaacgaaggcgaa

SEQ ID NO: 125732 - DNA, 25 bp, Saccharomyces pastorianus
atagagcggtcttggcaactggtca

SEQ ID NO: 125733 - DNA, 25 bp, Saccharomyces pastorianus
gattccccgtttttgcaacaattat

SEQ ID NO: 125734 - DNA, 25 bp, Saccharomyces pastorianus
aattatcaaagggttacgctccagg

SEQ ID NO: 125735 - DNA, 25 bp, Saccharomyces pastorianus
aattatatcatcgatggcaccgtct

SEQ ID NO: 125736 - DNA, 25 bp, Saccharomyces pastorianus
ttaaaactgcagtcgcgtgctcatt

SEQ ID NO: 125737 - DNA, 25 bp, Saccharomyces pastorianus
ggcaccgtctatctacggtcataga

SEQ ID NO: 125738 - DNA, 25 bp, Saccharomyces pastorianus
tccaggccgtctaccaagacataga

SEQ ID NO: 125739 - DNA, 25 bp, Saccharomyces pastorianus
gttacgctccaggaagctcccggaa

SEQ ID NO: 125740 - DNA, 25 bp, Saccharomyces pastorianus
aaaacattctattcgtggtgatatc

SEQ ID NO: 125741 - DNA, 25 bp, Saccharomyces pastorianus
aacctttacacaactgcaagcatcc

SEQ ID NO: 125742 - DNA, 25 bp, Saccharomyces pastorianus
ggtgccaagactattattttcccta

SEQ ID NO: 125743 - DNA, 25 bp, Saccharomyces pastorianus
gcattgtcctgaaggtgctacacct

SEQ ID NO: 125744 - DNA, 25 bp, Saccharomyces pastorianus
gggaggttgctcactttatgtagaa

SEQ ID NO: 125745 - DNA, 25 bp, Saccharomyces pastorianus
gacccaacagttgcgatgaccggtg

SEQ ID NO: 125746 - DNA, 25 bp, Saccharomyces pastorianus
caagacttgcttattcattcgccaa

SEQ ID NO: 125747 - DNA, 25 bp, Saccharomyces pastorianus
ccttcctttccctagcattgaataa

SEQ ID NO: 125748 - DNA, 25 bp, Saccharomyces pastorianus
tgaaaaggcgtctatccacttgcat

SEQ ID NO: 125749 - DNA, 25 bp, Saccharomyces pastorianus
gggttggaacctttagctgctgatt

SEQ ID NO: 125750 - DNA, 25 bp, Saccharomyces pastorianus
gtggtccatctgcaggtgtcactat

SEQ ID NO: 125751 - DNA, 25 bp, Saccharomyces pastorianus
ctgtggccgctaaaagatctggtgc

SEQ ID NO: 125752 - DNA, 25 bp, Saccharomyces pastorianus
gacgatgaccgcctttggctgaaaa

SEQ ID NO: 125753 - DNA, 25 bp, Saccharomyces pastorianus
gagacttctggaggtcactgacgat

SEQ ID NO: 125754 - DNA, 25 bp, Saccharomyces pastorianus
gaactcgtcggttcaccattaacag

SEQ ID NO: 125755 - DNA, 25 bp, Saccharomyces pastorianus
gataagctggcttacatcagagtaa

SEQ ID NO: 125756 - DNA, 25 bp, Saccharomyces pastorianus
gcatgttgacgataagctggcttac

SEQ ID NO: 125757 - DNA, 25 bp, Saccharomyces pastorianus
gatacattttcttcgtccatcagta

SEQ ID NO: 125758 - DNA, 25 bp, Saccharomyces pastorianus
gtcggttcaccattaacagtgtcaa

SEQ ID NO: 125759 - DNA, 25 bp, Saccharomyces pastorianus
atatctactgatgaactcgtcggtt

SEQ ID NO: 125760 - DNA, 25 bp, Saccharomyces pastorianus
tcttcgtccatcagtacatacatat

SEQ ID NO: 125761 - DNA, 25 bp, Saccharomyces pastorianus
agaatcttccagtttgagacttctg

SEQ ID NO: 125762 - DNA, 25 bp, Saccharomyces pastorianus
gaatattcattcctgcatgttgacg

SEQ ID NO: 125763 - DNA, 25 bp, Saccharomyces pastorianus
aagtactcagtaagtgccggtccct

SEQ ID NO: 125764 - DNA, 25 bp, Saccharomyces pastorianus
agatgacctgcttgctggccacgat

SEQ ID NO: 125765 - DNA, 25 bp, Saccharomyces pastorianus
ccggtccctttgcatttattttcat

SEQ ID NO: 125766 - DNA, 25 bp, Saccharomyces pastorianus
aacagaacaggtccaagctactcat

SEQ ID NO: 125767 - DNA, 25 bp, Saccharomyces pastorianus
atcaccacatgcttgcccaggaaaa

SEQ ID NO: 125768 - DNA, 25 bp, Saccharomyces pastorianus
tagcgcatgctatttccaaaattag

SEQ ID NO: 125769 - DNA, 25 bp, Saccharomyces pastorianus
acgttttctcaaatatcgggtctct

SEQ ID NO: 125770 - DNA, 25 bp, Saccharomyces pastorianus
atatacagatcaacctacgaccacc

SEQ ID NO: 125771 - DNA, 25 bp, Saccharomyces pastorianus
gaccaccgatgttccagatgcatta

SEQ ID NO: 125772 - DNA, 25 bp, Saccharomyces pastorianus
gaagacgccaatgacttatccagtt

SEQ ID NO: 125773 - DNA, 25 bp, Saccharomyces pastorianus
tcgggtctcttttacagcacacaaa

SEQ ID NO: 125774 - DNA, 25 bp, Saccharomyces pastorianus
aaacttggaccgaatatcagctaga

SEQ ID NO: 125775 - DNA, 25 bp, Saccharomyces pastorianus
agacgacgatcctcaatccgaattt

SEQ ID NO: 125776 - DNA, 25 bp, Saccharomyces pastorianus
aattatttgagactgcttgtgacca

SEQ ID NO: 125777 - DNA, 25 bp, Saccharomyces pastorianus
ccaaccgccggaattctaatgacaa

SEQ ID NO: 125778 - DNA, 25 bp, Saccharomyces pastorianus
gttggcgatggtagtgtcttcgact

SEQ ID NO: 125779 - DNA, 25 bp, Saccharomyces pastorianus
acgcccgacggatctggagctaaat

SEQ ID NO: 125780 - DNA, 25 bp, Saccharomyces pastorianus
gaaactcgcctttgattttccttgt

SEQ ID NO: 125781 - DNA, 25 bp, Saccharomyces pastorianus
tgggtttactttggcgcatatggat

SEQ ID NO: 125782 - DNA, 25 bp, Saccharomyces pastorianus
agtaatgaatacaacgcccgacgga

SEQ ID NO: 125783 - DNA, 25 bp, Saccharomyces pastorianus
aacaggacgctcagtgcttggtgaa

SEQ ID NO: 125784 - DNA, 25 bp, Saccharomyces pastorianus
tgtgaccagtgtaccgaggctgatt

SEQ ID NO: 125785 - DNA, 25 bp, Saccharomyces pastorianus
caatccattgactttttggttggta

SEQ ID NO: 125786 - DNA, 25 bp, Saccharomyces pastorianus
gaagaaacaacagcgagacctccta

SEQ ID NO: 125787 - DNA, 25 bp, Saccharomyces pastorianus
aacagcgagacctcctaaaggataa

SEQ ID NO: 125788 - DNA, 25 bp, Saccharomyces pastorianus
ttgacaggacatacccaaagactac

SEQ ID NO: 125789 - DNA, 25 bp, Saccharomyces pastorianus
ataccgcgattgcttatggcagatt

SEQ ID NO: 125790 - DNA, 25 bp, Saccharomyces pastorianus
gcttatggcagattttactagtatg

SEQ ID NO: 125791 - DNA, 25 bp, Saccharomyces pastorianus
ctttacgccaataccacgatacatt

SEQ ID NO: 125792 - DNA, 25 bp, Saccharomyces pastorianus
tgaagaatctttacgccaataccac

SEQ ID NO: 125793 - DNA, 25 bp, Saccharomyces pastorianus
gactacagcgagacgaaattgcatt

SEQ ID NO: 125794 - DNA, 25 bp, Saccharomyces pastorianus
cacgatacattgtgtcaatccattg

SEQ ID NO: 125795 - DNA, 25 bp, Saccharomyces pastorianus
gagcaagagcagcatataccgcgat

SEQ ID NO: 125796 - DNA, 25 bp, Saccharomyces pastorianus
acgacgtcttccgaatctgtagtag

SEQ ID NO: 125797 - DNA, 25 bp, Saccharomyces pastorianus
ataatggctctgagggtgttggtac

SEQ ID NO: 125798 - DNA, 25 bp, Saccharomyces pastorianus
aatgacctctataaccagaattcta

SEQ ID NO: 125799 - DNA, 25 bp, Saccharomyces pastorianus
gatcctgtgttacagccattcatat

SEQ ID NO: 125800 - DNA, 25 bp, Saccharomyces pastorianus
gggaatttttcagatgcctcagttg

SEQ ID NO: 125801 - DNA, 25 bp, Saccharomyces pastorianus
gaatgactgtttcaagctgagtaaa

SEQ ID NO: 125802 - DNA, 25 bp, Saccharomyces pastorianus
gaacaactcgtacaattagatcctg

SEQ ID NO: 125803 - DNA, 25 bp, Saccharomyces pastorianus
gatgcctcagttgaaaatgacctct

SEQ ID NO: 125804 - DNA, 25 bp, Saccharomyces pastorianus
cagaattctactttaacgacgtctt

SEQ ID NO: 125805 - DNA, 25 bp, Saccharomyces pastorianus
gaacctgtcacaaatgcattagatg

SEQ ID NO: 125806 - DNA, 25 bp, Saccharomyces pastorianus
cgcagaaacttgctccacattttga

SEQ ID NO: 125807 - DNA, 25 bp, Saccharomyces pastorianus
aagcattgtctattttctggcagtg

SEQ ID NO: 125808 - DNA, 25 bp, Saccharomyces pastorianus
ataccagggaactcctctatcaagg

SEQ ID NO: 125809 - DNA, 25 bp, Saccharomyces pastorianus
gagaagaatgctgcctcagccaata

SEQ ID NO: 125810 - DNA, 25 bp, Saccharomyces pastorianus
agtcagcggcgctttgaaccgggaa

SEQ ID NO: 125811 - DNA, 25 bp, Saccharomyces pastorianus
gatcctgctcgaaaacattccaaaa

SEQ ID NO: 125812 - DNA, 25 bp, Saccharomyces pastorianus
catcattatttctttgaaggccggg

SEQ ID NO: 125813 - DNA, 25 bp, Saccharomyces pastorianus
gagttgacgcacttactcgatcctg

SEQ ID NO: 125814 - DNA, 25 bp, Saccharomyces pastorianus
gaagtgctgtcgtttcttgaatata

SEQ ID NO: 125815 - DNA, 25 bp, Saccharomyces pastorianus
atatcacctaagtagcagcctgcta

SEQ ID NO: 125816 - DNA, 25 bp, Saccharomyces pastorianus
ggtgctctaacattgattactctca

SEQ ID NO: 125817 - DNA, 25 bp, Saccharomyces pastorianus
caagcttatgttgtgccctcaaatc

SEQ ID NO: 125818 - DNA, 25 bp, Saccharomyces pastorianus
agcgatgatgccgacagctcattaa

SEQ ID NO: 125819 - DNA, 25 bp, Saccharomyces pastorianus
agctgctctctccatctaaaaggtt

SEQ ID NO: 125820 - DNA, 25 bp, Saccharomyces pastorianus
atcacttcgcacaagggttcagcag

SEQ ID NO: 125821 - DNA, 25 bp, Saccharomyces pastorianus
tttcgtacacccttgagacctattt

SEQ ID NO: 125822 - DNA, 25 bp, Saccharomyces pastorianus
gatcacttaagtttcggagcggtag

SEQ ID NO: 125823 - DNA, 25 bp, Saccharomyces pastorianus
gtcaatccttttttacttcttcaga

SEQ ID NO: 125824 - DNA, 25 bp, Saccharomyces pastorianus
gagacctatttcaaaccaatcgact

SEQ ID NO: 125825 - DNA, 25 bp, Saccharomyces pastorianus
aaaatgtatctcagtcggcgctatc

SEQ ID NO: 125826 - DNA, 25 bp, Saccharomyces pastorianus
aattcttcatccatgggaagccccg

SEQ ID NO: 125827 - DNA, 25 bp, Saccharomyces pastorianus
ggtgactaactccaagtttcgtaca

SEQ ID NO: 125828 - DNA, 25 bp, Saccharomyces pastorianus
atcttctacaggttcatcgctcaaa

SEQ ID NO: 125829 - DNA, 25 bp, Saccharomyces pastorianus
agagccgacaacacgatgccttctg

SEQ ID NO: 125830 - DNA, 25 bp, Saccharomyces pastorianus
atgccttctgcagtctgatgtcata

SEQ ID NO: 125831 - DNA, 25 bp, Saccharomyces pastorianus
gaacggtcagccaattcatggaaac

SEQ ID NO: 125832 - DNA, 25 bp, Saccharomyces pastorianus
gcaaatacctccttgttctaactga

SEQ ID NO: 125833 - DNA, 25 bp, Saccharomyces pastorianus
tgtaagtgctggtgcctagcttcag

SEQ ID NO: 125834 - DNA, 25 bp, Saccharomyces pastorianus
gaaccatcgagacctttattccaga

SEQ ID NO: 125835 - DNA, 25 bp, Saccharomyces pastorianus
ctagcttcagctaatggctctattt

SEQ ID NO: 125836 - DNA, 25 bp, Saccharomyces pastorianus
catgggacttgctggatttaaaatt

SEQ ID NO: 125837 - DNA, 25 bp, Saccharomyces pastorianus
aatgctttcgtttggatggttctag

SEQ ID NO: 125838 - DNA, 25 bp, Saccharomyces pastorianus
gaggtttattttttgcatgggactt

SEQ ID NO: 125839 - DNA, 25 bp, Saccharomyces pastorianus
tttgaacgccaagctaacccaggag

SEQ ID NO: 125840 - DNA, 25 bp, Saccharomyces pastorianus
gtgaaaaccacccaacacttgcaac

SEQ ID NO: 125841 - DNA, 25 bp, Saccharomyces pastorianus
gtatcaaccaactgttactcgaaga

SEQ ID NO: 125842 - DNA, 25 bp, Saccharomyces pastorianus
aaggactcattagatttccctgaaa

SEQ ID NO: 125843 - DNA, 25 bp, Saccharomyces pastorianus
ttgatatcgacttcatcatcttctc

SEQ ID NO: 125844 - DNA, 25 bp, Saccharomyces pastorianus
gtaaaatcatccaccaagaccatta

SEQ ID NO: 125845 - DNA, 25 bp, Saccharomyces pastorianus
tagactcttcaatcaccttgtttaa

SEQ ID NO: 125846 - DNA, 25 bp, Saccharomyces pastorianus
cattgctaaatgtgccagaaggcgt

SEQ ID NO: 125847 - DNA, 25 bp, Saccharomyces pastorianus
ataggtacggtgttgacaaggactc

SEQ ID NO: 125848 - DNA, 25 bp, Saccharomyces pastorianus
acaatgatgcttctgtctctagaag

SEQ ID NO: 125849 - DNA, 25 bp, Saccharomyces pastorianus
aagcgtgtggcaccgacattgatat

SEQ ID NO: 125850 - DNA, 25 bp, Saccharomyces pastorianus
atcatcttctcccttttctaatgga

SEQ ID NO: 125851 - DNA, 25 bp, Saccharomyces pastorianus
atacatttaatactggaggcgccat

SEQ ID NO: 125852 - DNA, 25 bp, Saccharomyces pastorianus
acgtccttcaatgctttaccacaag

SEQ ID NO: 125853 - DNA, 25 bp, Saccharomyces pastorianus
gactactttcaatactggtggtgct

SEQ ID NO: 125854 - DNA, 25 bp, Saccharomyces pastorianus
acatccttcaatgctgtaccacaga

SEQ ID NO: 125855 - DNA, 25 bp, Saccharomyces pastorianus
acttcgttcagctctcaagctcaaa

SEQ ID NO: 125856 - DNA, 25 bp, Saccharomyces pastorianus
gagaactggtggtgctttgaataca

SEQ ID NO: 125857 - DNA, 25 bp, Saccharomyces pastorianus
accagttcactggtggagccatgaa

SEQ ID NO: 125858 - DNA, 25 bp, Saccharomyces pastorianus
cgcaatcccaattcggtttgacttt

SEQ ID NO: 125859 - DNA, 25 bp, Saccharomyces pastorianus
aagctcaaaacactggcggattccg

SEQ ID NO: 125860 - DNA, 25 bp, Saccharomyces pastorianus
ggtggtgttatgcaacagccccaaa

SEQ ID NO: 125861 - DNA, 25 bp, Saccharomyces pastorianus
gagcaatgatgcctcaaacgtcctt

SEQ ID NO: 125862 - DNA, 25 bp, Saccharomyces pastorianus
gtatcactcttggaacgttaccgaa

SEQ ID NO: 125863 - DNA, 25 bp, Saccharomyces pastorianus
gtttattgagcctgttcgtgacaaa

SEQ ID NO: 125864 - DNA, 25 bp, Saccharomyces pastorianus
cttcccgtgatcctgggttgagaga

SEQ ID NO: 125865 - DNA, 25 bp, Saccharomyces pastorianus
gtggatgtgccaactggttgattca

SEQ ID NO: 125866 - DNA, 25 bp, Saccharomyces pastorianus
aagcggtatcatcaagtctatcaag

SEQ ID NO: 125867 - DNA, 25 bp, Saccharomyces pastorianus
agaagccttgaattacacactggta

SEQ ID NO: 125868 - DNA, 25 bp, Saccharomyces pastorianus
aaaacttcaccaaatctccatctag

SEQ ID NO: 125869 - DNA, 25 bp, Saccharomyces pastorianus
tgacttcatggctgaatcacaggac

SEQ ID NO: 125870 - DNA, 25 bp, Saccharomyces pastorianus
tgattcagggaaaagcggtctcgtt

SEQ ID NO: 125871 - DNA, 25 bp, Saccharomyces pastorianus
gtctcgttcctgcacagtttattga

SEQ ID NO: 125872 - DNA, 25 bp, Saccharomyces pastorianus
aatataaaggtgcttcccgtgatcc

SEQ ID NO: 125873 - DNA, 25 bp, Saccharomyces pastorianus
gatgtttttcttgccggcgcaggac

SEQ ID NO: 125874 - DNA, 25 bp, Saccharomyces pastorianus
acacgatgtttttcttgccggcgca

SEQ ID NO: 125875 - DNA, 25 bp, Saccharomyces pastorianus
ttcttgccggcgcaggacaattgtc

SEQ ID NO: 125876 - DNA, 25 bp, Saccharomyces pastorianus
ccggcgcaggacaattgtctctacc

SEQ ID NO: 125877 - DNA, 25 bp, Saccharomyces pastorianus
gagacacacgatgtttttcttgccg

SEQ ID NO: 125878 - DNA, 25 bp, Saccharomyces pastorianus
gctgctctagagacacacgatgttt

SEQ ID NO: 125879 - DNA, 25 bp, Saccharomyces pastorianus
atgcaaagctgctctagagacacac

SEQ ID NO: 125880 - DNA, 25 bp, Saccharomyces pastorianus
gacacacgatgtttttcttgccggc

SEQ ID NO: 125881 - DNA, 25 bp, Saccharomyces pastorianus
ttgccggcgcaggacaattgtctct

SEQ ID NO: 125882 - DNA, 25 bp, Saccharomyces pastorianus
acgatgtttttcttgccggcgcagg

SEQ ID NO: 125883 - DNA, 25 bp, Saccharomyces pastorianus
aaagctgctctagagacacacgatg

SEQ ID NO: 125884 - DNA, 25 bp, Saccharomyces pastorianus
atttccaccgcacgttagaatgcaa

SEQ ID NO: 125885 - DNA, 25 bp, Saccharomyces pastorianus
tgaagtaggccattcactgctgggc

SEQ ID NO: 125886 - DNA, 25 bp, Saccharomyces pastorianus
atgcaaacggtgtcaatcacgattt

SEQ ID NO: 125887 - DNA, 25 bp, Saccharomyces pastorianus
tatgtgccacgccagcagttggaag

SEQ ID NO: 125888 - DNA, 25 bp, Saccharomyces pastorianus
acgatttataggtccccataggcgg

SEQ ID NO: 125889 - DNA, 25 bp, Saccharomyces pastorianus
aagtgtcgacttttcgcaccatttc

SEQ ID NO: 125890 - DNA, 25 bp, Saccharomyces pastorianus
agttggaagccctgtcaagtgtcga

SEQ ID NO: 125891 - DNA, 25 bp, Saccharomyces pastorianus
gagagccccaggaatagcgaggcta

SEQ ID NO: 125892 - DNA, 25 bp, Saccharomyces pastorianus
actgctgggcagttatgtgccacgc

SEQ ID NO: 125893 - DNA, 25 bp, Saccharomyces pastorianus
gtacatggttacctaggcggtaaag

SEQ ID NO: 125894 - DNA, 25 bp, Saccharomyces pastorianus
aggcggtaaagtgtcgctcgccgat

SEQ ID NO: 125895 - DNA, 25 bp, Saccharomyces pastorianus
gcgtgtattcagttattggccttat

SEQ ID NO: 125896 - DNA, 25 bp, Saccharomyces pastorianus
attattgccgctatatggttattta

SEQ ID NO: 125897 - DNA, 25 bp, Saccharomyces pastorianus
aacgcacgccgttcataatggatgt

SEQ ID NO: 125898 - DNA, 25 bp, Saccharomyces pastorianus
ggagaatcttgcgaacgtctcaata

SEQ ID NO: 125899 - DNA, 25 bp, Saccharomyces pastorianus
gaggatctaaaatatactaccgcca

SEQ ID NO: 125900 - DNA, 25 bp, Saccharomyces pastorianus
tatggaaggagcaacgcacgccgtt

SEQ ID NO: 125901 - DNA, 25 bp, Saccharomyces pastorianus
aattggtggtattatcaggtcggat

SEQ ID NO: 125902 - DNA, 25 bp, Saccharomyces pastorianus
ggccttattagttcaagttctggac

SEQ ID NO: 125903 - DNA, 25 bp, Saccharomyces pastorianus
aaagggcaattctggctgttaacgc

SEQ ID NO: 125904 - DNA, 25 bp, Saccharomyces pastorianus
taggtgcgccttctattccggagaa

SEQ ID NO: 125905 - DNA, 25 bp, Saccharomyces pastorianus
tcggatgaacatcgtatggattctt

SEQ ID NO: 125906 - DNA, 25 bp, Saccharomyces pastorianus
tatgacgaggaaaccaatggggacc

SEQ ID NO: 125907 - DNA, 25 bp, Saccharomyces pastorianus
cagattagaggaaggtgattatgac

SEQ ID NO: 125908 - DNA, 25 bp, Saccharomyces pastorianus
aggaaggtgattatgacgaggaaac

SEQ ID NO: 125909 - DNA, 25 bp, Saccharomyces pastorianus
gtgattatgacgaggaaaccaatgg

SEQ ID NO: 125910 - DNA, 25 bp, Saccharomyces pastorianus
gattagaggaaggtgattatgacga

SEQ ID NO: 125911 - DNA, 25 bp, Saccharomyces pastorianus
agtacagattagaggaaggtgatta

SEQ ID NO: 125912 - DNA, 25 bp, Saccharomyces pastorianus
ggtgattatgacgaggaaaccaatg

SEQ ID NO: 125913 - DNA, 25 bp, Saccharomyces pastorianus
aggtgattatgacgaggaaaccaat

SEQ ID NO: 125914 - DNA, 25 bp, Saccharomyces pastorianus
gtacagattagaggaaggtgattat

SEQ ID NO: 125915 - DNA, 25 bp, Saccharomyces pastorianus
gaaggtgattatgacgaggaaacca

SEQ ID NO: 125916 - DNA, 25 bp, Saccharomyces pastorianus
tgattatgacgaggaaaccaatggg

SEQ ID NO: 125917 - DNA, 25 bp, Saccharomyces pastorianus
tcggcgatctctctttgttggataa

SEQ ID NO: 125918 - DNA, 25 bp, Saccharomyces pastorianus
atgttcgggttgctgtggaaactac

SEQ ID NO: 125919 - DNA, 25 bp, Saccharomyces pastorianus
gcaggattcgatacggctaccgtgt

SEQ ID NO: 125920 - DNA, 25 bp, Saccharomyces pastorianus
gtggcgtttccagattaagtgactt

SEQ ID NO: 125921 - DNA, 25 bp, Saccharomyces pastorianus
ggcgtacgcatcgaattgctggatt

SEQ ID NO: 125922 - DNA, 25 bp, Saccharomyces pastorianus
atcactgatgactttagcgcgcgaa

SEQ ID NO: 125923 - DNA, 25 bp, Saccharomyces pastorianus
agggccacgttaaatatctgctttc

SEQ ID NO: 125924 - DNA, 25 bp, Saccharomyces pastorianus
taccgtgtttgccttttcaattgaa

SEQ ID NO: 125925 - DNA, 25 bp, Saccharomyces pastorianus
ttcaacataagaagggcgccgctat

SEQ ID NO: 125926 - DNA, 25 bp, Saccharomyces pastorianus
ggagctcacgggaagttgaatcact

SEQ ID NO: 125927 - DNA, 25 bp, Saccharomyces pastorianus
aacgtggagagctggcctgtaagta

SEQ ID NO: 125928 - DNA, 25 bp, Saccharomyces pastorianus
gtattttggctgatagattggttaa

SEQ ID NO: 125929 - DNA, 25 bp, Saccharomyces pastorianus
tgcccatgtccaaattctgaatcgt

SEQ ID NO: 125930 - DNA, 25 bp, Saccharomyces pastorianus
attctgaatcgtatagcctcctttt

SEQ ID NO: 125931 - DNA, 25 bp, Saccharomyces pastorianus
cttgcacctttggtattttggctga

SEQ ID NO: 125932 - DNA, 25 bp, Saccharomyces pastorianus
gattggttaaaacttctgatccaaa

SEQ ID NO: 125933 - DNA, 25 bp, Saccharomyces pastorianus
gcactggtcgtcatagtatgctttt

SEQ ID NO: 125934 - DNA, 25 bp, Saccharomyces pastorianus
atagtatgcttttttgcccatgtcc

SEQ ID NO: 125935 - DNA, 25 bp, Saccharomyces pastorianus
tttttagcccttgcacctttggtat

SEQ ID NO: 125936 - DNA, 25 bp, Saccharomyces pastorianus
gatcaccagagcactggtcgtcata

SEQ ID NO: 125937 - DNA, 25 bp, Saccharomyces pastorianus
gaatcgtatagcctcctttttagcc

SEQ ID NO: 125938 - DNA, 25 bp, Saccharomyces pastorianus
tatagcctcctttttagcccttgca

SEQ ID NO: 125939 - DNA, 25 bp, Saccharomyces pastorianus
actttttgtttgctgtcccaaatat

SEQ ID NO: 125940 - DNA, 25 bp, Saccharomyces pastorianus
cagcatgacttgctttaccttagca

SEQ ID NO: 125941 - DNA, 25 bp, Saccharomyces pastorianus
gatattggtttccttactcctttat

SEQ ID NO: 125942 - DNA, 25 bp, Saccharomyces pastorianus
ttatccctcctataacttgaaggct

SEQ ID NO: 125943 - DNA, 25 bp, Saccharomyces pastorianus
aacttctctatattcctacattcag

SEQ ID NO: 125944 - DNA, 25 bp, Saccharomyces pastorianus
atttcagcaaaatttatccctccta

SEQ ID NO: 125945 - DNA, 25 bp, Saccharomyces pastorianus
ggatcattaatgttttctgctctac

SEQ ID NO: 125946 - DNA, 25 bp, Saccharomyces pastorianus
taccttagcatccttgaatcgttca

SEQ ID NO: 125947 - DNA, 25 bp, Saccharomyces pastorianus
aatatgtttcccactattatcagga

SEQ ID NO: 125948 - DNA, 25 bp, Saccharomyces pastorianus
ttgaaggctctcgtatggatcacca

SEQ ID NO: 125949 - DNA, 25 bp, Saccharomyces pastorianus
tccttactcctttatcagcatgact

SEQ ID NO: 125950 - DNA, 25 bp, Saccharomyces pastorianus
gttccctcaacagctattgtttcca

SEQ ID NO: 125951 - DNA, 25 bp, Saccharomyces pastorianus
tattttgtcacacgttccctcaaca

SEQ ID NO: 125952 - DNA, 25 bp, Saccharomyces pastorianus
gtgtccaatcttttcttttgatact

SEQ ID NO: 125953 - DNA, 25 bp, Saccharomyces pastorianus
ggtttagcagcatatgtcttttcta

SEQ ID NO: 125954 - DNA, 25 bp, Saccharomyces pastorianus
gagaaggttcgctatatggtattga

SEQ ID NO: 125955 - DNA, 25 bp, Saccharomyces pastorianus
gtcaacactttatacactgtgtctg

SEQ ID NO: 125956 - DNA, 25 bp, Saccharomyces pastorianus
aagttgtcggatatgctaatgatac

SEQ ID NO: 125957 - DNA, 25 bp, Saccharomyces pastorianus
acactgtgtctgaagctttggaaac

SEQ ID NO: 125958 - DNA, 25 bp, Saccharomyces pastorianus
ttgtgcttgaaggtggacgtttaac

SEQ ID NO: 125959 - DNA, 25 bp, Saccharomyces pastorianus
caggtgttttttcggattgttctat

SEQ ID NO: 125960 - DNA, 25 bp, Saccharomyces pastorianus
ggagacttttggtccattgtgtcca

SEQ ID NO: 125961 - DNA, 25 bp, Saccharomyces pastorianus
gaaccctcacaacagagtattcaca

SEQ ID NO: 125962 - DNA, 25 bp, Saccharomyces pastorianus
catgatcacgagaaaggccgccgct

SEQ ID NO: 125963 - DNA, 25 bp, Saccharomyces pastorianus
ttccgagcgccatgatcacgagaaa

SEQ ID NO: 125964 - DNA, 25 bp, Saccharomyces pastorianus
ttgaaccctcacaacagagtattca

SEQ ID NO: 125965 - DNA, 25 bp, Saccharomyces pastorianus
aacagagtattcacaattaggcaac

SEQ ID NO: 125966 - DNA, 25 bp, Saccharomyces pastorianus
agagtattcacaattaggcaacctg

SEQ ID NO: 125967 - DNA, 25 bp, Saccharomyces pastorianus
agtattcacaattaggcaacctgtt

SEQ ID NO: 125968 - DNA, 25 bp, Saccharomyces pastorianus
cccttgaaccctcacaacagagtat

SEQ ID NO: 125969 - DNA, 25 bp, Saccharomyces pastorianus
ccgagcgccatgatcacgagaaagg

SEQ ID NO: 125970 - DNA, 25 bp, Saccharomyces pastorianus
ttttccgagcgccatgatcacgaga

SEQ ID NO: 125971 - DNA, 25 bp, Saccharomyces pastorianus
tttccgagcgccatgatcacgagaa

SEQ ID NO: 125972 - DNA, 25 bp, Saccharomyces pastorianus
tgaaaaggcaggctttcccaagggt

SEQ ID NO: 125973 - DNA, 25 bp, Saccharomyces pastorianus
gtgggctgcacagtagtcatcaagc

SEQ ID NO: 125974 - DNA, 25 bp, Saccharomyces pastorianus
catgccaacacaccaaagcttggta

SEQ ID NO: 125975 - DNA, 25 bp, Saccharomyces pastorianus
gcccctttcatagtctttgaggatg

SEQ ID NO: 125976 - DNA, 25 bp, Saccharomyces pastorianus
tagactttacgttcactcatccata

SEQ ID NO: 125977 - DNA, 25 bp, Saccharomyces pastorianus
atgtgtgtgcgcaaatagactttac

SEQ ID NO: 125978 - DNA, 25 bp, Saccharomyces pastorianus
gatcaagccttggaacaagccatgg

SEQ ID NO: 125979 - DNA, 25 bp, Saccharomyces pastorianus
gaggatgccgatttggatcaagcct

SEQ ID NO: 125980 - DNA, 25 bp, Saccharomyces pastorianus
agtagtcatcaagccagactctcaa

SEQ ID NO: 125981 - DNA, 25 bp, Saccharomyces pastorianus
gccgctgctttagctgtgggctgca

SEQ ID NO: 125982 - DNA, 25 bp, Saccharomyces pastorianus
tctcaaacgccgctatctgctttag

SEQ ID NO: 125983 - DNA, 25 bp, Saccharomyces pastorianus
tactttataagtatgggccgtcatt

SEQ ID NO: 125984 - DNA, 25 bp, Saccharomyces pastorianus
tttatactttataagtatgggccgt

SEQ ID NO: 125985 - DNA, 25 bp, Saccharomyces pastorianus
tattatcccgtttatactttataag

SEQ ID NO: 125986 - DNA, 25 bp, Saccharomyces pastorianus
ttatactttataagtatgggccgtc

SEQ ID NO: 125987 - DNA, 25 bp, Saccharomyces pastorianus
atcccgtttatactttataagtatg

SEQ ID NO: 125988 - DNA, 25 bp, Saccharomyces pastorianus
tcccgtttatactttataagtatgg

SEQ ID NO: 125989 - DNA, 25 bp, Saccharomyces pastorianus
gtttatactttataagtatgggccg

SEQ ID NO: 125990 - DNA, 25 bp, Saccharomyces pastorianus
actttataagtatgggccgtcatta

SEQ ID NO: 125991 - DNA, 25 bp, Saccharomyces pastorianus
gctattatcccgtttatactttata

SEQ ID NO: 125992 - DNA, 25 bp, Saccharomyces pastorianus
tatactttataagtatgggccgtca

SEQ ID NO: 125993 - DNA, 25 bp, Saccharomyces pastorianus
tatcccgtttatactttataagtat

SEQ ID NO: 125994 - DNA, 25 bp, Saccharomyces pastorianus
caatggtcctagtcgggcttcgttt

SEQ ID NO: 125995 - DNA, 25 bp, Saccharomyces pastorianus
gcctctgtctttgttcttatttggt

SEQ ID NO: 125996 - DNA, 25 bp, Saccharomyces pastorianus
atgtcgcatccgtttttgcaggcaa

SEQ ID NO: 125997 - DNA, 25 bp, Saccharomyces pastorianus
ggtatataccacttcagcttagttg

SEQ ID NO: 125998 - DNA, 25 bp, Saccharomyces pastorianus
tttggttggactgctcgagtgcatt

SEQ ID NO: 125999 - DNA, 25 bp, Saccharomyces pastorianus
tagggtgcgtacttgcttatggctt

SEQ ID NO: 126000 - DNA, 25 bp, Saccharomyces pastorianus
ttgccagttatctcggaagtttctt

SEQ ID NO: 126001 - DNA, 25 bp, Saccharomyces pastorianus
cggaagcttttttaatcgtggcaat

SEQ ID NO: 126002 - DNA, 25 bp, Saccharomyces pastorianus
ctttcgtcctagctgtctttaacat

SEQ ID NO: 126003 - DNA, 25 bp, Saccharomyces pastorianus
cgctgttgcttatggttgtttctac

SEQ ID NO: 126004 - DNA, 25 bp, Saccharomyces pastorianus
atttggctacatgctacccaacgta

SEQ ID NO: 126005 - DNA, 25 bp, Saccharomyces pastorianus
gaaaacacggtgttatcggcagtag

SEQ ID NO: 126006 - DNA, 25 bp, Saccharomyces pastorianus
aacacggtgttatcggcagtaggtg

SEQ ID NO: 126007 - DNA, 25 bp, Saccharomyces pastorianus
tgtaatttcggccacttattattgc

SEQ ID NO: 126008 - DNA, 25 bp, Saccharomyces pastorianus
tgtgaggcttcaacgaagtggaaat

SEQ ID NO: 126009 - DNA, 25 bp, Saccharomyces pastorianus
aatttcggccacttattattgcatc

SEQ ID NO: 126010 - DNA, 25 bp, Saccharomyces pastorianus
tttcggccacttattattgcatcag

SEQ ID NO: 126011 - DNA, 25 bp, Saccharomyces pastorianus
ttcggccacttattattgcatcagt

SEQ ID NO: 126012 - DNA, 25 bp, Saccharomyces pastorianus
tcaacgaagtggaaatgggccatat

SEQ ID NO: 126013 - DNA, 25 bp, Saccharomyces pastorianus
gaaattatctcaagattgctctttt

SEQ ID NO: 126014 - DNA, 25 bp, Saccharomyces pastorianus
ggccacttattattgcatcagtgat

SEQ ID NO: 126015 - DNA, 25 bp, Saccharomyces pastorianus
gcatcagtgatgacagatattatga

SEQ ID NO: 126016 - DNA, 25 bp, Saccharomyces pastorianus
aacacggtgttatcggcagtaggtg

SEQ ID NO: 126017 - DNA, 25 bp, Saccharomyces pastorianus
gaaaacacggtgttatcggcagtag

SEQ ID NO: 126018 - DNA, 25 bp, Saccharomyces pastorianus
tgtgaggcttcaacgaagtggaaat

SEQ ID NO: 126019 - DNA, 25 bp, Saccharomyces pastorianus
tttcggccacttattattgcatcag

SEQ ID NO: 126020 - DNA, 25 bp, Saccharomyces pastorianus
tcaacgaagtggaaatgggccatat

SEQ ID NO: 126021 - DNA, 25 bp, Saccharomyces pastorianus
gaaattatctcaagattgctctttt

SEQ ID NO: 126022 - DNA, 25 bp, Saccharomyces pastorianus
gatattatgaaactgcagcgatgtg

SEQ ID NO: 126023 - DNA, 25 bp, Saccharomyces pastorianus
ggccacttattattgcatcagtgat

SEQ ID NO: 126024 - DNA, 25 bp, Saccharomyces pastorianus
gtaatttcggccacttattattgca

SEQ ID NO: 126025 - DNA, 25 bp, Saccharomyces pastorianus
atatctgggatatgccttgcggaga

SEQ ID NO: 126026 - DNA, 25 bp, Saccharomyces pastorianus
gcatcagtgatgacagatattatga

SEQ ID NO: 126027 - DNA, 25 bp, Saccharomyces pastorianus
gaacagtcccaaacgttatcatcgg

SEQ ID NO: 126028 - DNA, 25 bp, Saccharomyces pastorianus
acgttatcatcggtggtacttccag

SEQ ID NO: 126029 - DNA, 25 bp, Saccharomyces pastorianus
tttctccatcttaccacgttgtaga

SEQ ID NO: 126030 - DNA, 25 bp, Saccharomyces pastorianus
gaacagtcacccatgattgtattta

SEQ ID NO: 126031 - DNA, 25 bp, Saccharomyces pastorianus
gaaagctttgttgactaattcgtac

SEQ ID NO: 126032 - DNA, 25 bp, Saccharomyces pastorianus
aattcgtacacgttttctccatctt

SEQ ID NO: 126033 - DNA, 25 bp, Saccharomyces pastorianus
gtacttccagaggtggttatactga

SEQ ID NO: 126034 - DNA, 25 bp, Saccharomyces pastorianus
gatgaacttctagattctttcaaaa

SEQ ID NO: 126035 - DNA, 25 bp, Saccharomyces pastorianus
gaattggataggcacgaacacacaa

SEQ ID NO: 126036 - DNA, 25 bp, Saccharomyces pastorianus
gtatttagcaagactggctgcccat

SEQ ID NO: 126037 - DNA, 25 bp, Saccharomyces pastorianus
agactggctgcccatatagcaaaaa

SEQ ID NO: 126038 - DNA, 25 bp, Saccharomyces pastorianus
gaacaagctgctgaaaaactaagaa

SEQ ID NO: 126039 - DNA, 25 bp, Saccharomyces pastorianus
acctcgcctcgattttaaagcaact

SEQ ID NO: 126040 - DNA, 25 bp, Saccharomyces pastorianus
gagtaatagttggtttcacatgcat

SEQ ID NO: 126041 - DNA, 25 bp, Saccharomyces pastorianus
gtgaaggaggacctcgcctcgattt

SEQ ID NO: 126042 - DNA, 25 bp, Saccharomyces pastorianus
atttctacccacctttactgagatc

SEQ ID NO: 126043 - DNA, 25 bp, Saccharomyces pastorianus
ggctcctttgaatgcgactggtgat

SEQ ID NO: 126044 - DNA, 25 bp, Saccharomyces pastorianus
gatttaacttcggaacaagctgctg

SEQ ID NO: 126045 - DNA, 25 bp, Saccharomyces pastorianus
aatgggtatccatcaggctcctttg

SEQ ID NO: 126046 - DNA, 25 bp, Saccharomyces pastorianus
acccacctttactgagatcagctac

SEQ ID NO: 126047 - DNA, 25 bp, Saccharomyces pastorianus
atgcgactggtgatgaattgagtaa

SEQ ID NO: 126048 - DNA, 25 bp, Saccharomyces pastorianus
tagttggtttcacatgcatttctac

SEQ ID NO: 126049 - DNA, 25 bp, Saccharomyces pastorianus
gcttggtgcttagaatccatcccta

SEQ ID NO: 126050 - DNA, 25 bp, Saccharomyces pastorianus
aagcccacagctccattgtatgatc

SEQ ID NO: 126051 - DNA, 25 bp, Saccharomyces pastorianus
gtttcgtcatatgttttagccccaa

SEQ ID NO: 126052 - DNA, 25 bp, Saccharomyces pastorianus
atccatccctagtgaagtttcgcaa

SEQ ID NO: 126053 - DNA, 25 bp, Saccharomyces pastorianus
attatgctgccgttaggctcgatca

SEQ ID NO: 126054 - DNA, 25 bp, Saccharomyces pastorianus
tactgatttgtttgccgattacgtc

SEQ ID NO: 126055 - DNA, 25 bp, Saccharomyces pastorianus
aagcattgactgacgatctctccag

SEQ ID NO: 126056 - DNA, 25 bp, Saccharomyces pastorianus
gaatcaacgtatattttccccaatg

SEQ ID NO: 126057 - DNA, 25 bp, Saccharomyces pastorianus
gtacagccatgggttgttccaactt

SEQ ID NO: 126058 - DNA, 25 bp, Saccharomyces pastorianus
gctcgatcaacctattttaccacag

SEQ ID NO: 126059 - DNA, 25 bp, Saccharomyces pastorianus
aaaatgctatctatgtcctggtaac

SEQ ID NO: 126060 - DNA, 25 bp, Saccharomyces pastorianus
agcctggtagatacattgatgctat

SEQ ID NO: 126061 - DNA, 25 bp, Saccharomyces pastorianus
actggaaagattgtgtaaccttgaa

SEQ ID NO: 126062 - DNA, 25 bp, Saccharomyces pastorianus
gatgctatcaatcaagagaactgga

SEQ ID NO: 126063 - DNA, 25 bp, Saccharomyces pastorianus
ggttttgcaattgagcctggtagat

SEQ ID NO: 126064 - DNA, 25 bp, Saccharomyces pastorianus
gatttcttgtctgctggttacgaag

SEQ ID NO: 126065 - DNA, 25 bp, Saccharomyces pastorianus
gtacagagccaacttatcaatttta

SEQ ID NO: 126066 - DNA, 25 bp, Saccharomyces pastorianus
aatgctaagccaagtcaaatcaata

SEQ ID NO: 126067 - DNA, 25 bp, Saccharomyces pastorianus
tggttacgaagcaagacaaggtttt

SEQ ID NO: 126068 - DNA, 25 bp, Saccharomyces pastorianus
aaggcttttcatcccgattccaata

SEQ ID NO: 126069 - DNA, 25 bp, Saccharomyces pastorianus
gacgcttattgtcaaggcttttcat

SEQ ID NO: 126070 - DNA, 25 bp, Saccharomyces pastorianus
ttataccggtgatttcttgtctgct

SEQ ID NO: 126071 - DNA, 25 bp, Saccharomyces pastorianus
aagccatatggagacactattgagt

SEQ ID NO: 126072 - DNA, 25 bp, Saccharomyces pastorianus
gagaaattgctacctttaactctac

SEQ ID NO: 126073 - DNA, 25 bp, Saccharomyces pastorianus
gccaacggtcttaggctccaaaaat

SEQ ID NO: 126074 - DNA, 25 bp, Saccharomyces pastorianus
tttcaatctgaacaagccatatgga

SEQ ID NO: 126075 - DNA, 25 bp, Saccharomyces pastorianus
gactgctggtgaagcgacgccaata

SEQ ID NO: 126076 - DNA, 25 bp, Saccharomyces pastorianus
cagtatactgtgaacgttgcccaaa

SEQ ID NO: 126077 - DNA, 25 bp, Saccharomyces pastorianus
gtcgacaaaaacatgattcctacgg

SEQ ID NO: 126078 - DNA, 25 bp, Saccharomyces pastorianus
gattcctacgggtaatatcgtcgat

SEQ ID NO: 126079 - DNA, 25 bp, Saccharomyces pastorianus
tttaactctacaaagccaacggtct

SEQ ID NO: 126080 - DNA, 25 bp, Saccharomyces pastorianus
ccaggtgatctattggtaaccatac

SEQ ID NO: 126081 - DNA, 25 bp, Saccharomyces pastorianus
cggagattatggtgcgttcaaaaaa

SEQ ID NO: 126082 - DNA, 25 bp, Saccharomyces pastorianus
atgcattctgcaaagcttctggtat

SEQ ID NO: 126083 - DNA, 25 bp, Saccharomyces pastorianus
attccagagatggtaccccgatcag

SEQ ID NO: 126084 - DNA, 25 bp, Saccharomyces pastorianus
gactactgagaatccttttggttac

SEQ ID NO: 126085 - DNA, 25 bp, Saccharomyces pastorianus
cagatttcaagccacgtttgccaat

SEQ ID NO: 126086 - DNA, 25 bp, Saccharomyces pastorianus
gacaatcagttgttcttggctatga

SEQ ID NO: 126087 - DNA, 25 bp, Saccharomyces pastorianus
gggcgccagcattgttgacctgaaa

SEQ ID NO: 126088 - DNA, 25 bp, Saccharomyces pastorianus
tataggcgccacgatcggcaggtat

SEQ ID NO: 126089 - DNA, 25 bp, Saccharomyces pastorianus
aaaaggtcatattgcagccctgcaa

SEQ ID NO: 126090 - DNA, 25 bp, Saccharomyces pastorianus
tgtcgaggccagattttccgctgaa

SEQ ID NO: 126091 - DNA, 25 bp, Saccharomyces pastorianus
gatagggccaaacgcgaactgaaat

SEQ ID NO: 126092 - DNA, 25 bp, Saccharomyces pastorianus
ttttgaacttgacggctaaaccaga

SEQ ID NO: 126093 - DNA, 25 bp, Saccharomyces pastorianus
gtgctttgcctatttggaatttcgt

SEQ ID NO: 126094 - DNA, 25 bp, Saccharomyces pastorianus
ggtactatggtactgccgttagcca

SEQ ID NO: 126095 - DNA, 25 bp, Saccharomyces pastorianus
gtctgcccggcttaattgttgttat

SEQ ID NO: 126096 - DNA, 25 bp, Saccharomyces pastorianus
aagtcttactttcccagcgtcgaag

SEQ ID NO: 126097 - DNA, 25 bp, Saccharomyces pastorianus
tggcaattattcttggtctgcccgg

SEQ ID NO: 126098 - DNA, 25 bp, Saccharomyces pastorianus
gcttgtaaaactattgcccctgata

SEQ ID NO: 126099 - DNA, 25 bp, Saccharomyces pastorianus
gccgttagccatttgctttactatt

SEQ ID NO: 126100 - DNA, 25 bp, Saccharomyces pastorianus
ggcactttctgtttttccatgcaat

SEQ ID NO: 126101 - DNA, 25 bp, Saccharomyces pastorianus
gtatcaaaacctacacccgtaatca

SEQ ID NO: 126102 - DNA, 25 bp, Saccharomyces pastorianus
gaatttcgtactaccttcatatgcg

SEQ ID NO: 126103 - DNA, 25 bp, Saccharomyces pastorianus
atcagagacttatgtggcactttct

SEQ ID NO: 126104 - DNA, 25 bp, Saccharomyces pastorianus
ggttgctttaatttctgtcatcttg

SEQ ID NO: 126105 - DNA, 25 bp, Saccharomyces pastorianus
agcatggtattttccttgtaagtta

SEQ ID NO: 126106 - DNA, 25 bp, Saccharomyces pastorianus
gctttcctgacttttggtttcacta

SEQ ID NO: 126107 - DNA, 25 bp, Saccharomyces pastorianus
ttatgggccctggtcagatgctggt

SEQ ID NO: 126108 - DNA, 25 bp, Saccharomyces pastorianus
aagagtaattcttccattccccatg

SEQ ID NO: 126109 - DNA, 25 bp, Saccharomyces pastorianus
ctcgcgttccggtatacaagacgtt

SEQ ID NO: 126110 - DNA, 25 bp, Saccharomyces pastorianus
gtagattcagacaccctttatgggc

SEQ ID NO: 126111 - DNA, 25 bp, Saccharomyces pastorianus
atgaattggatacttcctcgcgttc

SEQ ID NO: 126112 - DNA, 25 bp, Saccharomyces pastorianus
acattggtgcgattgtggctttcct

SEQ ID NO: 126113 - DNA, 25 bp, Saccharomyces pastorianus
aattcttgctttctgcgggatgcca

SEQ ID NO: 126114 - DNA, 25 bp, Saccharomyces pastorianus
agatgcttcgttcttgtttcaaaat

SEQ ID NO: 126115 - DNA, 25 bp, Saccharomyces pastorianus
taaaagagtggttctcctccaaggg

SEQ ID NO: 126116 - DNA, 25 bp, Saccharomyces pastorianus
cttaaaagagtggttctcctccaag

SEQ ID NO: 126117 - DNA, 25 bp, Saccharomyces pastorianus
gagtggttctcctccaagggacgca

SEQ ID NO: 126118 - DNA, 25 bp, Saccharomyces pastorianus
gttctcctccaagggacgcacgagt

SEQ ID NO: 126119 - DNA, 25 bp, Saccharomyces pastorianus
ggacgcacgagtggtgtacccaggg

SEQ ID NO: 126120 - DNA, 25 bp, Saccharomyces pastorianus
agtggttctcctccaagggacgcac

SEQ ID NO: 126121 - DNA, 25 bp, Saccharomyces pastorianus
tctcctccaagggacgcacgagtgg

SEQ ID NO: 126122 - DNA, 25 bp, Saccharomyces pastorianus
tggttctcctccaagggacgcacga

SEQ ID NO: 126123 - DNA, 25 bp, Saccharomyces pastorianus
aagagtggttctcctccaagggacg

SEQ ID NO: 126124 - DNA, 25 bp, Saccharomyces pastorianus
tccaagggacgcacgagtggtgtac

SEQ ID NO: 126125 - DNA, 25 bp, Saccharomyces pastorianus
aagggacgcacgagtggtgtaccca

SEQ ID NO: 126126 - DNA, 25 bp, Saccharomyces pastorianus
atcattattggaccccgccggtgct

SEQ ID NO: 126127 - DNA, 25 bp, Saccharomyces pastorianus
ggataatacttctggaccaatcggt

SEQ ID NO: 126128 - DNA, 25 bp, Saccharomyces pastorianus
aatacttctggaccaatcggtgata

SEQ ID NO: 126129 - DNA, 25 bp, Saccharomyces pastorianus
actgtatggataatacttctggacc

SEQ ID NO: 126130 - DNA, 25 bp, Saccharomyces pastorianus
ggtgataccatcttccttatttatg

SEQ ID NO: 126131 - DNA, 25 bp, Saccharomyces pastorianus
tcggtgataccatcttccttattta

SEQ ID NO: 126132 - DNA, 25 bp, Saccharomyces pastorianus
cttccttatttatggtattattatc

SEQ ID NO: 126133 - DNA, 25 bp, Saccharomyces pastorianus
attatcattattggaccccgccggt

SEQ ID NO: 126134 - DNA, 25 bp, Saccharomyces pastorianus
ggaccaatcggtgataccatcttcc

SEQ ID NO: 126135 - DNA, 25 bp, Saccharomyces pastorianus
ttattatcattattggaccccgccg

SEQ ID NO: 126136 - DNA, 25 bp, Saccharomyces pastorianus
cttctggaccaatcggtgataccat

SEQ ID NO: 126137 - DNA, 25 bp, Saccharomyces pastorianus
gaccaatcggtgataccatcttcct

SEQ ID NO: 126138 - DNA, 25 bp, Saccharomyces pastorianus
ctggaccaatcggtgataccatctt

SEQ ID NO: 126139 - DNA, 25 bp, Saccharomyces pastorianus
ggataatacttctggaccaatcggt

SEQ ID NO: 126140 - DNA, 25 bp, Saccharomyces pastorianus
aatacttctggaccaatcggtgata

SEQ ID NO: 126141 - DNA, 25 bp, Saccharomyces pastorianus
gataccatcttccttatttatggta

SEQ ID NO: 126142 - DNA, 25 bp, Saccharomyces pastorianus
actgtatggataatacttctggacc

SEQ ID NO: 126143 - DNA, 25 bp, Saccharomyces pastorianus
ggtgataccatcttccttatttatg

SEQ ID NO: 126144 - DNA, 25 bp, Saccharomyces pastorianus
tcggtgataccatcttccttattta

SEQ ID NO: 126145 - DNA, 25 bp, Saccharomyces pastorianus
cttccttatttatggtattattatc

SEQ ID NO: 126146 - DNA, 25 bp, Saccharomyces pastorianus
cttctggaccaatcggtgataccat

SEQ ID NO: 126147 - DNA, 25 bp, Saccharomyces pastorianus
caatcggtgataccatcttccttat

SEQ ID NO: 126148 - DNA, 25 bp, Saccharomyces pastorianus
agcaagtcttgttgagattgaaccc

SEQ ID NO: 126149 - DNA, 25 bp, Saccharomyces pastorianus
tacgccaaggtctttgctgctgaaa

SEQ ID NO: 126150 - DNA, 25 bp, Saccharomyces pastorianus
aagtcttgttgagattgaaccctta

SEQ ID NO: 126151 - DNA, 25 bp, Saccharomyces pastorianus
aagaaggctgaaaagactggtacca

SEQ ID NO: 126152 - DNA, 25 bp, Saccharomyces pastorianus
caagcaagtcttgttgagattgaac

SEQ ID NO: 126153 - DNA, 25 bp, Saccharomyces pastorianus
aagcaagtcttgttgagattgaacc

SEQ ID NO: 126154 - DNA, 25 bp, Saccharomyces pastorianus
caagtcttgttgagattgaaccctt

SEQ ID NO: 126155 - DNA, 25 bp, Saccharomyces pastorianus
gcaagtcttgttgagattgaaccct

SEQ ID NO: 126156 - DNA, 25 bp, Saccharomyces pastorianus
agtcttgttgagattgaacccttac

SEQ ID NO: 126157 - DNA, 25 bp, Saccharomyces pastorianus
cttgttgagattgaacccttacgcc

SEQ ID NO: 126158 - DNA, 25 bp, Saccharomyces pastorianus
ttccaagaaggctgaaaagactggt

SEQ ID NO: 126159 - DNA, 25 bp, Saccharomyces pastorianus
taaccgcactatttaataccctaga

SEQ ID NO: 126160 - DNA, 25 bp, Saccharomyces pastorianus
caaacgttgcgccatcggaggaaga

SEQ ID NO: 126161 - DNA, 25 bp, Saccharomyces pastorianus
tgatttggattcaaagccccttccg

SEQ ID NO: 126162 - DNA, 25 bp, Saccharomyces pastorianus
gtgctacaagtagtaccggatgcta

SEQ ID NO: 126163 - DNA, 25 bp, Saccharomyces pastorianus
cgaacgcctattttgctcaggacag

SEQ ID NO: 126164 - DNA, 25 bp, Saccharomyces pastorianus
gacgttgtcaactgcgctgaacgaa

SEQ ID NO: 126165 - DNA, 25 bp, Saccharomyces pastorianus
aatgtgcagctagtaacgcctcaaa

SEQ ID NO: 126166 - DNA, 25 bp, Saccharomyces pastorianus
actgtttctattttcatgctgccaa

SEQ ID NO: 126167 - DNA, 25 bp, Saccharomyces pastorianus
gtattacgtcaaatcttgccagtga

SEQ ID NO: 126168 - DNA, 25 bp, Saccharomyces pastorianus
ggacccatacctaccacattaataa

SEQ ID NO: 126169 - DNA, 25 bp, Saccharomyces pastorianus
acatgaccgtgctaagcgttactat

SEQ ID NO: 126170 - DNA, 25 bp, Saccharomyces pastorianus
taacgttcgtcgtcagggttcacaa

SEQ ID NO: 126171 - DNA, 25 bp, Saccharomyces pastorianus
gttccattgaaacgtggtcctgcaa

SEQ ID NO: 126172 - DNA, 25 bp, Saccharomyces pastorianus
aagggccagtgtagcatccaatgaa

SEQ ID NO: 126173 - DNA, 25 bp, Saccharomyces pastorianus
tgttccctcaataactgctcaatcg

SEQ ID NO: 126174 - DNA, 25 bp, Saccharomyces pastorianus
aagcgtaggagctctctggcaacat

SEQ ID NO: 126175 - DNA, 25 bp, Saccharomyces pastorianus
cataagcagtctatttgttccctca

SEQ ID NO: 126176 - DNA, 25 bp, Saccharomyces pastorianus
aaaaccaatgcatgcttactcccaa

SEQ ID NO: 126177 - DNA, 25 bp, Saccharomyces pastorianus
attcagctcggataatgaccctctt

SEQ ID NO: 126178 - DNA, 25 bp, Saccharomyces pastorianus
atgggcgcatgttcatctaacgttc

SEQ ID NO: 126179 - DNA, 25 bp, Saccharomyces pastorianus
ggctaagcagcctttcctatacaag

SEQ ID NO: 126180 - DNA, 25 bp, Saccharomyces pastorianus
gaaataactacttaccatcactcgc

SEQ ID NO: 126181 - DNA, 25 bp, Saccharomyces pastorianus
ggatgggttactttctactatacga

SEQ ID NO: 126182 - DNA, 25 bp, Saccharomyces pastorianus
aatggtatagtcacctggttcgaca

SEQ ID NO: 126183 - DNA, 25 bp, Saccharomyces pastorianus
gggtttgattattcgccatttgttc

SEQ ID NO: 126184 - DNA, 25 bp, Saccharomyces pastorianus
tgatctttcccgacaagtgctccat

SEQ ID NO: 126185 - DNA, 25 bp, Saccharomyces pastorianus
ggtagaaggcggtctgatctttccc

SEQ ID NO: 126186 - DNA, 25 bp, Saccharomyces pastorianus
agagacctgttgagttctccactgg

SEQ ID NO: 126187 - DNA, 25 bp, Saccharomyces pastorianus
atttgttccgttggtcttacacgag

SEQ ID NO: 126188 - DNA, 25 bp, Saccharomyces pastorianus
acggattcagcgacaagatcacctt

SEQ ID NO: 126189 - DNA, 25 bp, Saccharomyces pastorianus
ctggttcgacattgttttccctgca

SEQ ID NO: 126190 - DNA, 25 bp, Saccharomyces pastorianus
tggacaccgttctttacgctagaga

SEQ ID NO: 126191 - DNA, 25 bp, Saccharomyces pastorianus
aagtgctccattcatttggccggtt

SEQ ID NO: 126192 - DNA, 25 bp, Saccharomyces pastorianus
tattggtgcgatgtggactcatgta

SEQ ID NO: 126193 - DNA, 25 bp, Saccharomyces pastorianus
atgtcttgatggcaactgtaatcct

SEQ ID NO: 126194 - DNA, 25 bp, Saccharomyces pastorianus
tgactacattctcctattcaatttg

SEQ ID NO: 126195 - DNA, 25 bp, Saccharomyces pastorianus
ttaagctcggttcccttatacagag

SEQ ID NO: 126196 - DNA, 25 bp, Saccharomyces pastorianus
atggcttggtttagctttgcattcc

SEQ ID NO: 126197 - DNA, 25 bp, Saccharomyces pastorianus
gttacagattggttccatcatcaag

SEQ ID NO: 126198 - DNA, 25 bp, Saccharomyces pastorianus
tattctgtatgtaactgtccctaag

SEQ ID NO: 126199 - DNA, 25 bp, Saccharomyces pastorianus
aaatattgcatcttccagctccaaa

SEQ ID NO: 126200 - DNA, 25 bp, Saccharomyces pastorianus
attgataatgttccatgtgcccaaa

SEQ ID NO: 126201 - DNA, 25 bp, Saccharomyces pastorianus
gctccaaaacccaatcaagcgttgt

SEQ ID NO: 126202 - DNA, 25 bp, Saccharomyces pastorianus
tttgcattcctccttttagacagtg

SEQ ID NO: 126203 - DNA, 25 bp, Saccharomyces pastorianus
ttcattgccgggaaagggtgccacc

SEQ ID NO: 126204 - DNA, 25 bp, Saccharomyces pastorianus
gcctttatcgtcttgggtgctagta

SEQ ID NO: 126205 - DNA, 25 bp, Saccharomyces pastorianus
gtcaccacacccatgttaaacggta

SEQ ID NO: 126206 - DNA, 25 bp, Saccharomyces pastorianus
aaggcaaatcttggctgcaaccgca

SEQ ID NO: 126207 - DNA, 25 bp, Saccharomyces pastorianus
gatgacaattggtgctaccctttcc

SEQ ID NO: 126208 - DNA, 25 bp, Saccharomyces pastorianus
tgcaaccgcagtttttgtcaccaca

SEQ ID NO: 126209 - DNA, 25 bp, Saccharomyces pastorianus
ttccccattgcgctattgatatttg

SEQ ID NO: 126210 - DNA, 25 bp, Saccharomyces pastorianus
aaatgccactgggtaacgccactaa

SEQ ID NO: 126211 - DNA, 25 bp, Saccharomyces pastorianus
gctaccctttcctatttagtcgatt

SEQ ID NO: 126212 - DNA, 25 bp, Saccharomyces pastorianus
aactgggtgggctttcacaatgctg

SEQ ID NO: 126213 - DNA, 25 bp, Saccharomyces pastorianus
ggaacagccctctttggatatgcag

SEQ ID NO: 126214 - DNA, 25 bp, Saccharomyces pastorianus
tttttcaaacagcaacctcacatct

SEQ ID NO: 126215 - DNA, 25 bp, Saccharomyces pastorianus
agatggtataagaatgccggtttgg

SEQ ID NO: 126216 - DNA, 25 bp, Saccharomyces pastorianus
tccaccaagatgcaccgtaccattg

SEQ ID NO: 126217 - DNA, 25 bp, Saccharomyces pastorianus
ggtcaagacttccaagagaaccaag

SEQ ID NO: 126218 - DNA, 25 bp, Saccharomyces pastorianus
gaatgccggtttgggattcaagacc

SEQ ID NO: 126219 - DNA, 25 bp, Saccharomyces pastorianus
gtaccgtcgtctccaccaagatgca

SEQ ID NO: 126220 - DNA, 25 bp, Saccharomyces pastorianus
gtcgtctccaccaagatgcaccgta

SEQ ID NO: 126221 - DNA, 25 bp, Saccharomyces pastorianus
atccaaaggtcaagacttccaagag

SEQ ID NO: 126222 - DNA, 25 bp, Saccharomyces pastorianus
tcaacaatccaaaggtcaagacttc

SEQ ID NO: 126223 - DNA, 25 bp, Saccharomyces pastorianus
tatttttcaaacagcaacctcacat

SEQ ID NO: 126224 - DNA, 25 bp, Saccharomyces pastorianus
caccaagatgcaccgtaccattgtc

SEQ ID NO: 126225 - DNA, 25 bp, Saccharomyces pastorianus
agatggtataagaatgccggtttgg

SEQ ID NO: 126226 - DNA, 25 bp, Saccharomyces pastorianus
ggtcaagacttccaagagaaccaag

SEQ ID NO: 126227 - DNA, 25 bp, Saccharomyces pastorianus
gaatgccggtttgggattcaagacc

SEQ ID NO: 126228 - DNA, 25 bp, Saccharomyces pastorianus
gtaagatcttgaccggtaccgtcgt

SEQ ID NO: 126229 - DNA, 25 bp, Saccharomyces pastorianus
gtaccgtcgtctccaccaagatgca

SEQ ID NO: 126230 - DNA, 25 bp, Saccharomyces pastorianus
gtcgtctccaccaagatgcaccgta

SEQ ID NO: 126231 - DNA, 25 bp, Saccharomyces pastorianus
acagcaacctcacatcttcaacaat

SEQ ID NO: 126232 - DNA, 25 bp, Saccharomyces pastorianus
atccaaaggtcaagacttccaagag

SEQ ID NO: 126233 - DNA, 25 bp, Saccharomyces pastorianus
tcaacaatccaaaggtcaagacttc

SEQ ID NO: 126234 - DNA, 25 bp, Saccharomyces pastorianus
tatttttcaaacagcaacctcacat

SEQ ID NO: 126235 - DNA, 25 bp, Saccharomyces pastorianus
caccaagatgcaccgtaccattgtc

SEQ ID NO: 126236 - DNA, 25 bp, Saccharomyces pastorianus
tgatgacgatgctattgccgctgct

SEQ ID NO: 126237 - DNA, 25 bp, Saccharomyces pastorianus
gaagacaaaccccacgattcattag

SEQ ID NO: 126238 - DNA, 25 bp, Saccharomyces pastorianus
cttgcagctttgaagcctggcatga

SEQ ID NO: 126239 - DNA, 25 bp, Saccharomyces pastorianus
gattcattaggtatacagctcgatg

SEQ ID NO: 126240 - DNA, 25 bp, Saccharomyces pastorianus
acagctcgatgataattcccagaac

SEQ ID NO: 126241 - DNA, 25 bp, Saccharomyces pastorianus
gctgcttcttcatccctgggagaca

SEQ ID NO: 126242 - DNA, 25 bp, Saccharomyces pastorianus
agaactcaatggtacctgctccatc

SEQ ID NO: 126243 - DNA, 25 bp, Saccharomyces pastorianus
aaagacatcattaactggaccattg

SEQ ID NO: 126244 - DNA, 25 bp, Saccharomyces pastorianus
gctccatcagcaacaagcacacatt

SEQ ID NO: 126245 - DNA, 25 bp, Saccharomyces pastorianus
gggcggtacgagatcacgtattcaa

SEQ ID NO: 126246 - DNA, 25 bp, Saccharomyces pastorianus
gtagattgggatgaacttgcagctt

SEQ ID NO: 126247 - DNA, 25 bp, Saccharomyces pastorianus
gtctagatcaccagaaccatgaccc

SEQ ID NO: 126248 - DNA, 25 bp, Saccharomyces pastorianus
ggtatttaaggcaaacagcgcataa

SEQ ID NO: 126249 - DNA, 25 bp, Saccharomyces pastorianus
tttctcaatctgacatagtcgtgga

SEQ ID NO: 126250 - DNA, 25 bp, Saccharomyces pastorianus
atgccttcaggtcataacgataaaa

SEQ ID NO: 126251 - DNA, 25 bp, Saccharomyces pastorianus
gaatcatcttcgaatgtggatcatg

SEQ ID NO: 126252 - DNA, 25 bp, Saccharomyces pastorianus
gtgttggtgtggacgatgatcatca

SEQ ID NO: 126253 - DNA, 25 bp, Saccharomyces pastorianus
tgtcggcgtaggtctagatcaccag

SEQ ID NO: 126254 - DNA, 25 bp, Saccharomyces pastorianus
gtggatcatgccaactccaatgaac

SEQ ID NO: 126255 - DNA, 25 bp, Saccharomyces pastorianus
accatgaccctcaattgcatacgaa

SEQ ID NO: 126256 - DNA, 25 bp, Saccharomyces pastorianus
tcaatctatggcgatggctgccgtc

SEQ ID NO: 126257 - DNA, 25 bp, Saccharomyces pastorianus
ggatctggaaaacaaacactcgaaa

SEQ ID NO: 126258 - DNA, 25 bp, Saccharomyces pastorianus
ggatcttggatattcgaccgctaaa

SEQ ID NO: 126259 - DNA, 25 bp, Saccharomyces pastorianus
gcctcctaatgtccccaagaaagat

SEQ ID NO: 126260 - DNA, 25 bp, Saccharomyces pastorianus
aagggaaattctgtccattctggtc

SEQ ID NO: 126261 - DNA, 25 bp, Saccharomyces pastorianus
tgagaaactagttgctgccgacagc

SEQ ID NO: 126262 - DNA, 25 bp, Saccharomyces pastorianus
gacttcaatgttatccatgggacta

SEQ ID NO: 126263 - DNA, 25 bp, Saccharomyces pastorianus
ggaacatttcccgaacctgaagtgc

SEQ ID NO: 126264 - DNA, 25 bp, Saccharomyces pastorianus
ttttattcgtaaactagtggcagac

SEQ ID NO: 126265 - DNA, 25 bp, Saccharomyces pastorianus
atgtcgtaaagccttgatactcaac

SEQ ID NO: 126266 - DNA, 25 bp, Saccharomyces pastorianus
gtccattctggtcactatgttgttt

SEQ ID NO: 126267 - DNA, 25 bp, Saccharomyces pastorianus
gggactaaatcccaacttatgtcgt

SEQ ID NO: 126268 - DNA, 25 bp, Saccharomyces pastorianus
cgctaaaccgtacgctttaactgca

SEQ ID NO: 126269 - DNA, 25 bp, Saccharomyces pastorianus
ttaacaccggaaaccaagacgctga

SEQ ID NO: 126270 - DNA, 25 bp, Saccharomyces pastorianus
tttaacaccggaaaccaagacgctg

SEQ ID NO: 126271 - DNA, 25 bp, Saccharomyces pastorianus
ccaagacgctgagagcgctatgaat

SEQ ID NO: 126272 - DNA, 25 bp, Saccharomyces pastorianus
tgcgcgccctatttaacaccggaaa

SEQ ID NO: 126273 - DNA, 25 bp, Saccharomyces pastorianus
aacaccggaaaccaagacgctgaga

SEQ ID NO: 126274 - DNA, 25 bp, Saccharomyces pastorianus
gaaaccaagacgctgagagcgctat

SEQ ID NO: 126275 - DNA, 25 bp, Saccharomyces pastorianus
gtgcgcgccctatttaacaccggaa

SEQ ID NO: 126276 - DNA, 25 bp, Saccharomyces pastorianus
aaccaagacgctgagagcgctatga

SEQ ID NO: 126277 - DNA, 25 bp, Saccharomyces pastorianus
ccggaaaccaagacgctgagagcgc

SEQ ID NO: 126278 - DNA, 25 bp, Saccharomyces pastorianus
acaccggaaaccaagacgctgagag

SEQ ID NO: 126279 - DNA, 25 bp, Saccharomyces pastorianus
accggaaaccaagacgctgagagcg

SEQ ID NO: 126280 - DNA, 25 bp, Saccharomyces pastorianus
tttaacaccggaaaccaagacgctg

SEQ ID NO: 126281 - DNA, 25 bp, Saccharomyces pastorianus
tgcgcgccctatttaacaccggaaa

SEQ ID NO: 126282 - DNA, 25 bp, Saccharomyces pastorianus
aacaccggaaaccaagacgctgaga

SEQ ID NO: 126283 - DNA, 25 bp, Saccharomyces pastorianus
gaatggcgtattccagcatatggat

SEQ ID NO: 126284 - DNA, 25 bp, Saccharomyces pastorianus
gtgcgcgccctatttaacaccggaa

SEQ ID NO: 126285 - DNA, 25 bp, Saccharomyces pastorianus
gcgctatgaatggcgtattccagca

SEQ ID NO: 126286 - DNA, 25 bp, Saccharomyces pastorianus
atgaatggcgtattccagcatatgg

SEQ ID NO: 126287 - DNA, 25 bp, Saccharomyces pastorianus
tatgaatggcgtattccagcatatg

SEQ ID NO: 126288 - DNA, 25 bp, Saccharomyces pastorianus
agagcgctatgaatggcgtattcca

SEQ ID NO: 126289 - DNA, 25 bp, Saccharomyces pastorianus
gagagcgctatgaatggcgtattcc

SEQ ID NO: 126290 - DNA, 25 bp, Saccharomyces pastorianus
cggaaaccaagacgctgagagcgct

SEQ ID NO: 126291 - DNA, 25 bp, Saccharomyces pastorianus
gacttagagtgtttgtctgtctggc

SEQ ID NO: 126292 - DNA, 25 bp, Saccharomyces pastorianus
gcaggctgtcctgatacttttgcag

SEQ ID NO: 126293 - DNA, 25 bp, Saccharomyces pastorianus
aactgctccatttgttacactaatt

SEQ ID NO: 126294 - DNA, 25 bp, Saccharomyces pastorianus
gttgaattacctcattgccatcata

SEQ ID NO: 126295 - DNA, 25 bp, Saccharomyces pastorianus
gtctgtctggctatctcgaagtaca

SEQ ID NO: 126296 - DNA, 25 bp, Saccharomyces pastorianus
tgttatgggccaccgaatcattaat

SEQ ID NO: 126297 - DNA, 25 bp, Saccharomyces pastorianus
tgatacttttgcagcctctttacca

SEQ ID NO: 126298 - DNA, 25 bp, Saccharomyces pastorianus
gaagtacaacatgtccattatgcag

SEQ ID NO: 126299 - DNA, 25 bp, Saccharomyces pastorianus
gatgagtaccccttagtagttgaat

SEQ ID NO: 126300 - DNA, 25 bp, Saccharomyces pastorianus
taaaggcaagagtgcaggctgtcct

SEQ ID NO: 126301 - DNA, 25 bp, Saccharomyces pastorianus
gcaactgacaactgctccatttgtt

SEQ ID NO: 126302 - DNA, 25 bp, Saccharomyces pastorianus
tatctgtccgcatgagggctgtgga

SEQ ID NO: 126303 - DNA, 25 bp, Saccharomyces pastorianus
aaaaatcatatctgtccgcatgagg

SEQ ID NO: 126304 - DNA, 25 bp, Saccharomyces pastorianus
tctgtccgcatgagggctgtggaca

SEQ ID NO: 126305 - DNA, 25 bp, Saccharomyces pastorianus
gtagacatgataactgtaatcagca

SEQ ID NO: 126306 - DNA, 25 bp, Saccharomyces pastorianus
aatcatatctgtccgcatgagggct

SEQ ID NO: 126307 - DNA, 25 bp, Saccharomyces pastorianus
atcagcattatcgaactcatgcaaa

SEQ ID NO: 126308 - DNA, 25 bp, Saccharomyces pastorianus
catatctgtccgcatgagggctgtg

SEQ ID NO: 126309 - DNA, 25 bp, Saccharomyces pastorianus
tggacagaggtttagtagacatgat

SEQ ID NO: 126310 - DNA, 25 bp, Saccharomyces pastorianus
tgtaatcagcattatcgaactcatg

SEQ ID NO: 126311 - DNA, 25 bp, Saccharomyces pastorianus
gctgtggacagaggtttagtagaca

SEQ ID NO: 126312 - DNA, 25 bp, Saccharomyces pastorianus
tatcgaactcatgcaaacaagaaga

SEQ ID NO: 126313 - DNA, 25 bp, Saccharomyces pastorianus
ttttctccggaaaacaagcgaacag

SEQ ID NO: 126314 - DNA, 25 bp, Saccharomyces pastorianus
ctcccagataactcttatgcctgaa

SEQ ID NO: 126315 - DNA, 25 bp, Saccharomyces pastorianus
taccaaaccctgatacccttgatga

SEQ ID NO: 126316 - DNA, 25 bp, Saccharomyces pastorianus
tatgcctgaaatgttctcttttaac

SEQ ID NO: 126317 - DNA, 25 bp, Saccharomyces pastorianus
aaaaacgtcaccgatactgccattg

SEQ ID NO: 126318 - DNA, 25 bp, Saccharomyces pastorianus
aagtgcgctttcgattttttctccg

SEQ ID NO: 126319 - DNA, 25 bp, Saccharomyces pastorianus
gtgaatttcccatcaatttcgaatg

SEQ ID NO: 126320 - DNA, 25 bp, Saccharomyces pastorianus
cggtaaatcagatccatatggctca

SEQ ID NO: 126321 - DNA, 25 bp, Saccharomyces pastorianus
aacttgatgtcaactattctagcta

SEQ ID NO: 126322 - DNA, 25 bp, Saccharomyces pastorianus
aatttcgaatgttcgccctcccaga

SEQ ID NO: 126323 - DNA, 25 bp, Saccharomyces pastorianus
acgagtgacgggactatttcaagat

SEQ ID NO: 126324 - DNA, 25 bp, Saccharomyces pastorianus
atgcgatgcggaatccttctttcaa

SEQ ID NO: 126325 - DNA, 25 bp, Saccharomyces pastorianus
ataatgttgtcccatctgcgattca

SEQ ID NO: 126326 - DNA, 25 bp, Saccharomyces pastorianus
tatggttggccttttacttcggata

SEQ ID NO: 126327 - DNA, 25 bp, Saccharomyces pastorianus
tttacgctattaaatcccctcgaca

SEQ ID NO: 126328 - DNA, 25 bp, Saccharomyces pastorianus
aagattgaccttgacttccacagac

SEQ ID NO: 126329 - DNA, 25 bp, Saccharomyces pastorianus
tcttattgtgtgttgcgttttcggc

SEQ ID NO: 126330 - DNA, 25 bp, Saccharomyces pastorianus
aagactgatttgctctttggcccaa

SEQ ID NO: 126331 - DNA, 25 bp, Saccharomyces pastorianus
agggcaggcccttgagagctcttat

SEQ ID NO: 126332 - DNA, 25 bp, Saccharomyces pastorianus
tggttagcagctatcgcaggcttga

SEQ ID NO: 126333 - DNA, 25 bp, Saccharomyces pastorianus
tttcggcgtcattgcttttgttgca

SEQ ID NO: 126334 - DNA, 25 bp, Saccharomyces pastorianus
gacgcatttatgatccagagctaat

SEQ ID NO: 126335 - DNA, 25 bp, Saccharomyces pastorianus
tggcgttgaatctatcacgtcggat

SEQ ID NO: 126336 - DNA, 25 bp, Saccharomyces pastorianus
aaggtctacattacggtggtcctgc

SEQ ID NO: 126337 - DNA, 25 bp, Saccharomyces pastorianus
aataaccgcgtctatgactattcaa

SEQ ID NO: 126338 - DNA, 25 bp, Saccharomyces pastorianus
tactcctccatattcatttccaaat

SEQ ID NO: 126339 - DNA, 25 bp, Saccharomyces pastorianus
gtattcattcatttcttcggtgtaa

SEQ ID NO: 126340 - DNA, 25 bp, Saccharomyces pastorianus
gtcctgctgcgctagtaattggtta

SEQ ID NO: 126341 - DNA, 25 bp, Saccharomyces pastorianus
ttgggactggtcttttggtagctaa

SEQ ID NO: 126342 - DNA, 25 bp, Saccharomyces pastorianus
acatcttggtttctttcgtgacgta

SEQ ID NO: 126343 - DNA, 25 bp, Saccharomyces pastorianus
gatggcggtaacctatccgacttta

SEQ ID NO: 126344 - DNA, 25 bp, Saccharomyces pastorianus
gtgacgtacttcatgatccaagctg

SEQ ID NO: 126345 - DNA, 25 bp, Saccharomyces pastorianus
atgaagtcgcgccatgttgtcatga

SEQ ID NO: 126346 - DNA, 25 bp, Saccharomyces pastorianus
ggttatcacagattcgttcaccgac

SEQ ID NO: 126347 - DNA, 25 bp, Saccharomyces pastorianus
aggacctgttttctgtccatacaga

SEQ ID NO: 126348 - DNA, 25 bp, Saccharomyces pastorianus
gatttgcaagcgatgtcacgaattc

SEQ ID NO: 126349 - DNA, 25 bp, Saccharomyces pastorianus
ggcaatgtctcgttcattataagca

SEQ ID NO: 126350 - DNA, 25 bp, Saccharomyces pastorianus
taagcatatcgatccagcaagacaa

SEQ ID NO: 126351 - DNA, 25 bp, Saccharomyces pastorianus
tacgacatggactagtgcgctggat

SEQ ID NO: 126352 - DNA, 25 bp, Saccharomyces pastorianus
atgacttaatttgttcttgcgatgg

SEQ ID NO: 126353 - DNA, 25 bp, Saccharomyces pastorianus
gacttgtcacaactgggtgtatcga

SEQ ID NO: 126354 - DNA, 25 bp, Saccharomyces pastorianus
atgaatgaagcagccaccaacgatg

SEQ ID NO: 126355 - DNA, 25 bp, Saccharomyces pastorianus
agccgtgcttcatatatagacttgt

SEQ ID NO: 126356 - DNA, 25 bp, Saccharomyces pastorianus
ggtgcttcgcgacttattttatttg

SEQ ID NO: 126357 - DNA, 25 bp, Saccharomyces pastorianus
agagagatctccttacgaaccaata

SEQ ID NO: 126358 - DNA, 25 bp, Saccharomyces pastorianus
gaaacttaccatatcggagtccagt

SEQ ID NO: 126359 - DNA, 25 bp, Saccharomyces pastorianus
ggttgtaaatggtaccgctgttagg

SEQ ID NO: 126360 - DNA, 25 bp, Saccharomyces pastorianus
aaattcggccccacagaaagctaat

SEQ ID NO: 126361 - DNA, 25 bp, Saccharomyces pastorianus
acagggcttgcactttaacttttga

SEQ ID NO: 126362 - DNA, 25 bp, Saccharomyces pastorianus
tcggagtccagtggtttccaaaact

SEQ ID NO: 126363 - DNA, 25 bp, Saccharomyces pastorianus
gataaattacgcacctctaagtttt

SEQ ID NO: 126364 - DNA, 25 bp, Saccharomyces pastorianus
aggcgaagtcacctgtcagagaaat

SEQ ID NO: 126365 - DNA, 25 bp, Saccharomyces pastorianus
gacgaactgtctgtttctattagct

SEQ ID NO: 126366 - DNA, 25 bp, Saccharomyces pastorianus
gtctgcttctggcataaacgaactg

SEQ ID NO: 126367 - DNA, 25 bp, Saccharomyces pastorianus
catcagcagtatggtcaaggttcat

SEQ ID NO: 126368 - DNA, 25 bp, Saccharomyces pastorianus
gttccaatcctttgacgttctcaag

SEQ ID NO: 126369 - DNA, 25 bp, Saccharomyces pastorianus
aatcctttgacgttctcaaggaact

SEQ ID NO: 126370 - DNA, 25 bp, Saccharomyces pastorianus
aaggaactacttttggcctatctcg

SEQ ID NO: 126371 - DNA, 25 bp, Saccharomyces pastorianus
tttgacgttctcaaggaactacttt

SEQ ID NO: 126372 - DNA, 25 bp, Saccharomyces pastorianus
ataattcgttccaatcctttgacgt

SEQ ID NO: 126373 - DNA, 25 bp, Saccharomyces pastorianus
aaagcttttctctaacgacataatt

SEQ ID NO: 126374 - DNA, 25 bp, Saccharomyces pastorianus
gacataattcgttccaatcctttga

SEQ ID NO: 126375 - DNA, 25 bp, Saccharomyces pastorianus
agcttttctctaacgacataattcg

SEQ ID NO: 126376 - DNA, 25 bp, Saccharomyces pastorianus
attcgttccaatcctttgacgttct

SEQ ID NO: 126377 - DNA, 25 bp, Saccharomyces pastorianus
tccaatcctttgacgttctcaagga

SEQ ID NO: 126378 - DNA, 25 bp, Saccharomyces pastorianus
gttctcaaggaactacttttggcct

SEQ ID NO: 126379 - DNA, 25 bp, Saccharomyces pastorianus
tccaatgctcaagctaacgtttcag

SEQ ID NO: 126380 - DNA, 25 bp, Saccharomyces pastorianus
ctcaagctaacgtttcagcttccgc

SEQ ID NO: 126381 - DNA, 25 bp, Saccharomyces pastorianus
caatgctcaagctaacgtttcagct

SEQ ID NO: 126382 - DNA, 25 bp, Saccharomyces pastorianus
gctcaagctaacgtttcagcttccg

SEQ ID NO: 126383 - DNA, 25 bp, Saccharomyces pastorianus
ccaatgctcaagctaacgtttcagc

SEQ ID NO: 126384 - DNA, 25 bp, Saccharomyces pastorianus
ctcttcttctaagaagtctaagggt

SEQ ID NO: 126385 - DNA, 25 bp, Saccharomyces pastorianus
tttcagcttccgctagctcttcttc

SEQ ID NO: 126386 - DNA, 25 bp, Saccharomyces pastorianus
tcttcctcttcttctaagaagtcta

SEQ ID NO: 126387 - DNA, 25 bp, Saccharomyces pastorianus
atgctcaagctaacgtttcagcttc

SEQ ID NO: 126388 - DNA, 25 bp, Saccharomyces pastorianus
cctccaatgctcaagctaacgtttc

SEQ ID NO: 126389 - DNA, 25 bp, Saccharomyces pastorianus
aatgctcaagctaacgtttcagctt

SEQ ID NO: 126390 - DNA, 25 bp, Saccharomyces pastorianus
gtcaatctttgtctatcgtctccaa

SEQ ID NO: 126391 - DNA, 25 bp, Saccharomyces pastorianus
acgatgaattatccaaggccgcttt

SEQ ID NO: 126392 - DNA, 25 bp, Saccharomyces pastorianus
atcttccgcttcttctagtggtgat

SEQ ID NO: 126393 - DNA, 25 bp, Saccharomyces pastorianus
gttactggtaacttctcaaccttag

SEQ ID NO: 126394 - DNA, 25 bp, Saccharomyces pastorianus
gcaaactgttaacgcttccttaggt

SEQ ID NO: 126395 - DNA, 25 bp, Saccharomyces pastorianus
gttaagctatcctctacttctactg

SEQ ID NO: 126396 - DNA, 25 bp, Saccharomyces pastorianus
tagtggtgatgcctccaatgctcaa

SEQ ID NO: 126397 - DNA, 25 bp, Saccharomyces pastorianus
aggccgctttcagtaacttgactac

SEQ ID NO: 126398 - DNA, 25 bp, Saccharomyces pastorianus
aggtggtgctaacttcgactcttct

SEQ ID NO: 126399 - DNA, 25 bp, Saccharomyces pastorianus
gactcttcttctagtaacttctcct

SEQ ID NO: 126400 - DNA, 25 bp, Saccharomyces pastorianus
actgaatcatccaagagctctgcta

SEQ ID NO: 126401 - DNA, 25 bp, Saccharomyces pastorianus
aagaccattctttcgctttactaga

SEQ ID NO: 126402 - DNA, 25 bp, Saccharomyces pastorianus
attctggaatactctacttccccta

SEQ ID NO: 126403 - DNA, 25 bp, Saccharomyces pastorianus
ttttgcgaacgcctcaacctttaga

SEQ ID NO: 126404 - DNA, 25 bp, Saccharomyces pastorianus
gcctcaacctttagatcctttggat

SEQ ID NO: 126405 - DNA, 25 bp, Saccharomyces pastorianus
aaaagaaaccgatcgcaagcgcgtt

SEQ ID NO: 126406 - DNA, 25 bp, Saccharomyces pastorianus
ggagattcttccttatttttgcgaa

SEQ ID NO: 126407 - DNA, 25 bp, Saccharomyces pastorianus
gattatgaacgttccaaggcctata

SEQ ID NO: 126408 - DNA, 25 bp, Saccharomyces pastorianus
gcaagcgcgtttatacttccagaag

SEQ ID NO: 126409 - DNA, 25 bp, Saccharomyces pastorianus
gctggatgctggttcattctggaat

SEQ ID NO: 126410 - DNA, 25 bp, Saccharomyces pastorianus
gaaggcaagattacctcctactggt

SEQ ID NO: 126411 - DNA, 25 bp, Saccharomyces pastorianus
taaagcctcaatcacttccacagaa

SEQ ID NO: 126412 - DNA, 25 bp, Saccharomyces pastorianus
gaacaagcgccccaaacaaaataat

SEQ ID NO: 126413 - DNA, 25 bp, Saccharomyces pastorianus
attcagatccttcacattttttgag

SEQ ID NO: 126414 - DNA, 25 bp, Saccharomyces pastorianus
gaagcagctaccgatgaacaagatc

SEQ ID NO: 126415 - DNA, 25 bp, Saccharomyces pastorianus
aaaattgcccactcctgaaggttca

SEQ ID NO: 126416 - DNA, 25 bp, Saccharomyces pastorianus
gtctatggacctgaatactgtttta

SEQ ID NO: 126417 - DNA, 25 bp, Saccharomyces pastorianus
gcgatactgggaacaagcgccccaa

SEQ ID NO: 126418 - DNA, 25 bp, Saccharomyces pastorianus
ggaacttagaaactacactgagcat

SEQ ID NO: 126419 - DNA, 25 bp, Saccharomyces pastorianus
actgagcattctacaccatttctga

SEQ ID NO: 126420 - DNA, 25 bp, Saccharomyces pastorianus
gtttgacctataattcagatccttc

SEQ ID NO: 126421 - DNA, 25 bp, Saccharomyces pastorianus
aaggttcaacattcagcgatactgg

SEQ ID NO: 126422 - DNA, 25 bp, Saccharomyces pastorianus
taaagcaccttctatcatctatcca

SEQ ID NO: 126423 - DNA, 25 bp, Saccharomyces pastorianus
aatagtgattcagaggcgtttttga

SEQ ID NO: 126424 - DNA, 25 bp, Saccharomyces pastorianus
gtcgactcccaatcttatttacttg

SEQ ID NO: 126425 - DNA, 25 bp, Saccharomyces pastorianus
gtagtaagactgaggatgcatcaaa

SEQ ID NO: 126426 - DNA, 25 bp, Saccharomyces pastorianus
aaggatacggaagacggactacaag

SEQ ID NO: 126427 - DNA, 25 bp, Saccharomyces pastorianus
gacggactacaagataaaactgcag

SEQ ID NO: 126428 - DNA, 25 bp, Saccharomyces pastorianus
gagacgatttggaaatatccgtgtg

SEQ ID NO: 126429 - DNA, 25 bp, Saccharomyces pastorianus
gaaagctttagaatcatatcgtcaa

SEQ ID NO: 126430 - DNA, 25 bp, Saccharomyces pastorianus
aggttcgaccagctttttcttgaat

SEQ ID NO: 126431 - DNA, 25 bp, Saccharomyces pastorianus
tatccgtgtggaaaactgtaactgc

SEQ ID NO: 126432 - DNA, 25 bp, Saccharomyces pastorianus
gacgaagacatggtcgactcccaat

SEQ ID NO: 126433 - DNA, 25 bp, Saccharomyces pastorianus
aaagatgctgatgctgccaaaaagg

SEQ ID NO: 126434 - DNA, 25 bp, Saccharomyces pastorianus
agaatgttacagagccctttatcgg

SEQ ID NO: 126435 - DNA, 25 bp, Saccharomyces pastorianus
agaagcaatcccaacgctttcctta

SEQ ID NO: 126436 - DNA, 25 bp, Saccharomyces pastorianus
cgctttccttaacaaccacatttat

SEQ ID NO: 126437 - DNA, 25 bp, Saccharomyces pastorianus
gcagatttctggctaacaaggattt

SEQ ID NO: 126438 - DNA, 25 bp, Saccharomyces pastorianus
agatgataccagattcctacaggaa

SEQ ID NO: 126439 - DNA, 25 bp, Saccharomyces pastorianus
tatgccataaaatatccctgatcag

SEQ ID NO: 126440 - DNA, 25 bp, Saccharomyces pastorianus
cactattattgatgactcactcgat

SEQ ID NO: 126441 - DNA, 25 bp, Saccharomyces pastorianus
ggaccgcatgcttcaaaatggtatc

SEQ ID NO: 126442 - DNA, 25 bp, Saccharomyces pastorianus
tggaagacgcttccgtggaccgcat

SEQ ID NO: 126443 - DNA, 25 bp, Saccharomyces pastorianus
cctttatcggctcaaaactccagaa

SEQ ID NO: 126444 - DNA, 25 bp, Saccharomyces pastorianus
gtaacgccattcctgacatagtata

SEQ ID NO: 126445 - DNA, 25 bp, Saccharomyces pastorianus
gacgatctattgtcctatgtagaat

SEQ ID NO: 126446 - DNA, 25 bp, Saccharomyces pastorianus
tgcccatccatcagcaataaacatg

SEQ ID NO: 126447 - DNA, 25 bp, Saccharomyces pastorianus
gtggaaatgatgcagacaacactgt

SEQ ID NO: 126448 - DNA, 25 bp, Saccharomyces pastorianus
gcttcatcatgaaactaactcctta

SEQ ID NO: 126449 - DNA, 25 bp, Saccharomyces pastorianus
gactttgaagcttcatcatgaaact

SEQ ID NO: 126450 - DNA, 25 bp, Saccharomyces pastorianus
aaacatgcttactgaaatcgccggg

SEQ ID NO: 126451 - DNA, 25 bp, Saccharomyces pastorianus
taacggtatgaacaggccagacgat

SEQ ID NO: 126452 - DNA, 25 bp, Saccharomyces pastorianus
gacaacactgttggataacggtatg

SEQ ID NO: 126453 - DNA, 25 bp, Saccharomyces pastorianus
agggttagaaactgcccatccatca

SEQ ID NO: 126454 - DNA, 25 bp, Saccharomyces pastorianus
aggccagacgatctattgtcctatg

SEQ ID NO: 126455 - DNA, 25 bp, Saccharomyces pastorianus
gggataaccaatctaatctgataaa

SEQ ID NO: 126456 - DNA, 25 bp, Saccharomyces pastorianus
atgccaatggtaacatctgtctgga

SEQ ID NO: 126457 - DNA, 25 bp, Saccharomyces pastorianus
gctctaactctatcgaaggtcctat

SEQ ID NO: 126458 - DNA, 25 bp, Saccharomyces pastorianus
tcctttagtaccagaaatcgctcat

SEQ ID NO: 126459 - DNA, 25 bp, Saccharomyces pastorianus
taaaggatcaatggtctcccgctct

SEQ ID NO: 126460 - DNA, 25 bp, Saccharomyces pastorianus
agacgctaatcctgacgatccttta

SEQ ID NO: 126461 - DNA, 25 bp, Saccharomyces pastorianus
taatcctgacgatcctttagtacca

SEQ ID NO: 126462 - DNA, 25 bp, Saccharomyces pastorianus
aggtcctattatccatctgttcttt

SEQ ID NO: 126463 - DNA, 25 bp, Saccharomyces pastorianus
tctacaagactgacagacccaagta

SEQ ID NO: 126464 - DNA, 25 bp, Saccharomyces pastorianus
aatcgctcatatctacaagactgac

SEQ ID NO: 126465 - DNA, 25 bp, Saccharomyces pastorianus
tgttctttgttaacagacgctaatc

SEQ ID NO: 126466 - DNA, 25 bp, Saccharomyces pastorianus
atgggacctgccgattccccatatg

SEQ ID NO: 126467 - DNA, 25 bp, Saccharomyces pastorianus
gggatatccgtttcaacgtgctgat

SEQ ID NO: 126468 - DNA, 25 bp, Saccharomyces pastorianus
aacgcactaagcactatctcagtat

SEQ ID NO: 126469 - DNA, 25 bp, Saccharomyces pastorianus
agtccttcaagattcagtgacgttt

SEQ ID NO: 126470 - DNA, 25 bp, Saccharomyces pastorianus
gcctaaatgagctttcttcttctaa

SEQ ID NO: 126471 - DNA, 25 bp, Saccharomyces pastorianus
atcacgcatgtggaggtttgtcagt

SEQ ID NO: 126472 - DNA, 25 bp, Saccharomyces pastorianus
tgacgtttttattcctacacaagtt

SEQ ID NO: 126473 - DNA, 25 bp, Saccharomyces pastorianus
agttccattgttatgtttagcctaa

SEQ ID NO: 126474 - DNA, 25 bp, Saccharomyces pastorianus
agacacctttgctggttgcttgtga

SEQ ID NO: 126475 - DNA, 25 bp, Saccharomyces pastorianus
agccatctatggagcactttttacc

SEQ ID NO: 126476 - DNA, 25 bp, Saccharomyces pastorianus
gaaacgtactagcactcattcagta

SEQ ID NO: 126477 - DNA, 25 bp, Saccharomyces pastorianus
ggaatcaggtctttaaacgcactaa

SEQ ID NO: 126478 - DNA, 25 bp, Saccharomyces pastorianus
agaagaacctgttatctagccccgg

SEQ ID NO: 126479 - DNA, 25 bp, Saccharomyces pastorianus
tcgagacaaatagagccggctacat

SEQ ID NO: 126480 - DNA, 25 bp, Saccharomyces pastorianus
aagacccatcttcaacttatcacag

SEQ ID NO: 126481 - DNA, 25 bp, Saccharomyces pastorianus
ggaacttggttctagacatgattca

SEQ ID NO: 126482 - DNA, 25 bp, Saccharomyces pastorianus
aaacagggaatttctcatggaggaa

SEQ ID NO: 126483 - DNA, 25 bp, Saccharomyces pastorianus
aaacccgtatatttgcctgaagata

SEQ ID NO: 126484 - DNA, 25 bp, Saccharomyces pastorianus
cggctacatgatacggcagcactta

SEQ ID NO: 126485 - DNA, 25 bp, Saccharomyces pastorianus
gattgagtttgagaccttacttaca

SEQ ID NO: 126486 - DNA, 25 bp, Saccharomyces pastorianus
tatctagccccggagaggtttaact

SEQ ID NO: 126487 - DNA, 25 bp, Saccharomyces pastorianus
attgctttccagttgttaaatgcat

SEQ ID NO: 126488 - DNA, 25 bp, Saccharomyces pastorianus
tttttattctacttcgacacctcga

SEQ ID NO: 126489 - DNA, 25 bp, Saccharomyces pastorianus
gcctataccccagttttcaatcatt

SEQ ID NO: 126490 - DNA, 25 bp, Saccharomyces pastorianus
ggagtttattaattctctgccgaac

SEQ ID NO: 126491 - DNA, 25 bp, Saccharomyces pastorianus
gactgcaatcagacaacgaaggtaa

SEQ ID NO: 126492 - DNA, 25 bp, Saccharomyces pastorianus
ctctgccgaacctagtgtcattaat

SEQ ID NO: 126493 - DNA, 25 bp, Saccharomyces pastorianus
tccgctcaggatagtacagaaacgc

SEQ ID NO: 126494 - DNA, 25 bp, Saccharomyces pastorianus
gaaaacagcgcatggatcccgcaat

SEQ ID NO: 126495 - DNA, 25 bp, Saccharomyces pastorianus
catttgaatgtaaaatccgctcagg

SEQ ID NO: 126496 - DNA, 25 bp, Saccharomyces pastorianus
gaaaacctttcatcagatagggaga

SEQ ID NO: 126497 - DNA, 25 bp, Saccharomyces pastorianus
aataatgtcgtgagcctatacccca

SEQ ID NO: 126498 - DNA, 25 bp, Saccharomyces pastorianus
ggatcccgcaattcggtatatgaaa

SEQ ID NO: 126499 - DNA, 25 bp, Saccharomyces pastorianus
gcaacgattgcgcttcattgataga

SEQ ID NO: 126500 - DNA, 25 bp, Saccharomyces pastorianus
agagcctattgctgttgactgcgaa

SEQ ID NO: 126501 - DNA, 25 bp, Saccharomyces pastorianus
attccatcatagattcgtctctcag

SEQ ID NO: 126502 - DNA, 25 bp, Saccharomyces pastorianus
aaagggcacatgtaagctctgcaga

SEQ ID NO: 126503 - DNA, 25 bp, Saccharomyces pastorianus
aagctctgcagagatgattccatca

SEQ ID NO: 126504 - DNA, 25 bp, Saccharomyces pastorianus
gaatggtcagctgatcttgagtcga

SEQ ID NO: 126505 - DNA, 25 bp, Saccharomyces pastorianus
gattccatcatcaccgcaaagaaaa

SEQ ID NO: 126506 - DNA, 25 bp, Saccharomyces pastorianus
gatcatcgatggaccctcaaatgtt

SEQ ID NO: 126507 - DNA, 25 bp, Saccharomyces pastorianus
tcgattttccactgtctccagtaaa

SEQ ID NO: 126508 - DNA, 25 bp, Saccharomyces pastorianus
tgcgccgttcttccaagatatcagt

SEQ ID NO: 126509 - DNA, 25 bp, Saccharomyces pastorianus
gaaattatcgctctctcggaatcaa

SEQ ID NO: 126510 - DNA, 25 bp, Saccharomyces pastorianus
gatatactgttcgattttccactgt

SEQ ID NO: 126511 - DNA, 25 bp, Saccharomyces pastorianus
ggaatacgcctctggttcaaagact

SEQ ID NO: 126512 - DNA, 25 bp, Saccharomyces pastorianus
gctttgttgattctagtcctctcaa

SEQ ID NO: 126513 - DNA, 25 bp, Saccharomyces pastorianus
ttggctttgttgattctagtcctct

SEQ ID NO: 126514 - DNA, 25 bp, Saccharomyces pastorianus
gacgttgtcgtatttggctttgttg

SEQ ID NO: 126515 - DNA, 25 bp, Saccharomyces pastorianus
ctagtcctctcaattgaactcctga

SEQ ID NO: 126516 - DNA, 25 bp, Saccharomyces pastorianus
attctagtcctctcaattgaactcc

SEQ ID NO: 126517 - DNA, 25 bp, Saccharomyces pastorianus
ctctggttcaaagactagtgacgtt

SEQ ID NO: 126518 - DNA, 25 bp, Saccharomyces pastorianus
gtaacgggaatacgcctctggttca

SEQ ID NO: 126519 - DNA, 25 bp, Saccharomyces pastorianus
actagtgacgttgtcgtatttggct

SEQ ID NO: 126520 - DNA, 25 bp, Saccharomyces pastorianus
tacgcctctggttcaaagactagtg

SEQ ID NO: 126521 - DNA, 25 bp, Saccharomyces pastorianus
gtcgtatttggctttgttgattcta

SEQ ID NO: 126522 - DNA, 25 bp, Saccharomyces pastorianus
tttagacccatggtggaaccctagt

SEQ ID NO: 126523 - DNA, 25 bp, Saccharomyces pastorianus
gatgaagctgccatcagcagactaa

SEQ ID NO: 126524 - DNA, 25 bp, Saccharomyces pastorianus
agcaaagtattgttagccgtctaaa

SEQ ID NO: 126525 - DNA, 25 bp, Saccharomyces pastorianus
gtgttttcccagtttaccagtatgc

SEQ ID NO: 126526 - DNA, 25 bp, Saccharomyces pastorianus
agtggaccttgattccttcaaaaag

SEQ ID NO: 126527 - DNA, 25 bp, Saccharomyces pastorianus
gattaaatccattgtgttttcccag

SEQ ID NO: 126528 - DNA, 25 bp, Saccharomyces pastorianus
gcgggtggtgttgctttgaatcttt

SEQ ID NO: 126529 - DNA, 25 bp, Saccharomyces pastorianus
aatgcgaggttttcttggtcagttt

SEQ ID NO: 126530 - DNA, 25 bp, Saccharomyces pastorianus
tcaacctgctttggaagtggacctt

SEQ ID NO: 126531 - DNA, 25 bp, Saccharomyces pastorianus
gtggcaagtggcaatcatcaacgaa

SEQ ID NO: 126532 - DNA, 25 bp, Saccharomyces pastorianus
cagggtagtatgtcaccgacgcaaa

SEQ ID NO: 126533 - DNA, 25 bp, Saccharomyces pastorianus
ggtgcttccagaaccacggatatca

SEQ ID NO: 126534 - DNA, 25 bp, Saccharomyces pastorianus
aatatacatttatcacggtgcttcc

SEQ ID NO: 126535 - DNA, 25 bp, Saccharomyces pastorianus
atatgagcatcatcctgaactaagg

SEQ ID NO: 126536 - DNA, 25 bp, Saccharomyces pastorianus
aagtcaccgaaggtaaccccatatg

SEQ ID NO: 126537 - DNA, 25 bp, Saccharomyces pastorianus
gatttgaaaaatgcacctccctatg

SEQ ID NO: 126538 - DNA, 25 bp, Saccharomyces pastorianus
catcaaactgctacctttccagtta

SEQ ID NO: 126539 - DNA, 25 bp, Saccharomyces pastorianus
gaaggtcttcattggctaatatctc

SEQ ID NO: 126540 - DNA, 25 bp, Saccharomyces pastorianus
ccaagcagccggatggtatgaccat

SEQ ID NO: 126541 - DNA, 25 bp, Saccharomyces pastorianus
ggaccgccaccgatgagaatactca

SEQ ID NO: 126542 - DNA, 25 bp, Saccharomyces pastorianus
gtaagaccatccaaactattgccct

SEQ ID NO: 126543 - DNA, 25 bp, Saccharomyces pastorianus
taagtctccgtctttagttgttgcc

SEQ ID NO: 126544 - DNA, 25 bp, Saccharomyces pastorianus
gtggctatgtgatccatgacgtgga

SEQ ID NO: 126545 - DNA, 25 bp, Saccharomyces pastorianus
gctttatcacgacagaatcttcctc

SEQ ID NO: 126546 - DNA, 25 bp, Saccharomyces pastorianus
ggtaacgaaacttctgctgcgtatt

SEQ ID NO: 126547 - DNA, 25 bp, Saccharomyces pastorianus
gtgaggatggtccaacgcaccaacc

SEQ ID NO: 126548 - DNA, 25 bp, Saccharomyces pastorianus
gaaactctggctcacttgagggcta

SEQ ID NO: 126549 - DNA, 25 bp, Saccharomyces pastorianus
gagggctattccaaacatgcatgta

SEQ ID NO: 126550 - DNA, 25 bp, Saccharomyces pastorianus
gaagtctccatttctatagatgcag

SEQ ID NO: 126551 - DNA, 25 bp, Saccharomyces pastorianus
ggtcgaacaccatctgttgtggctt

SEQ ID NO: 126552 - DNA, 25 bp, Saccharomyces pastorianus
gaatcctgatattatcctggtgtca

SEQ ID NO: 126553 - DNA, 25 bp, Saccharomyces pastorianus
atcttcctcaattggagcattcctc

SEQ ID NO: 126554 - DNA, 25 bp, Saccharomyces pastorianus
tgctgcgtattattctgctatcaaa

SEQ ID NO: 126555 - DNA, 25 bp, Saccharomyces pastorianus
tcatgggtccgctttgaaggcagat

SEQ ID NO: 126556 - DNA, 25 bp, Saccharomyces pastorianus
acaacagggtactgctggtgttcat

SEQ ID NO: 126557 - DNA, 25 bp, Saccharomyces pastorianus
gaagactgttgtggaacccggtcaa

SEQ ID NO: 126558 - DNA, 25 bp, Saccharomyces pastorianus
gctaggccagggtatctcaaatgct

SEQ ID NO: 126559 - DNA, 25 bp, Saccharomyces pastorianus
ggagacctcttccttagcgggacat

SEQ ID NO: 126560 - DNA, 25 bp, Saccharomyces pastorianus
tgacggaaagacctcgtactcgttc

SEQ ID NO: 126561 - DNA, 25 bp, Saccharomyces pastorianus
aactttgccgccacttataacgagg

SEQ ID NO: 126562 - DNA, 25 bp, Saccharomyces pastorianus
tatggaatccatttctagcgctttg

SEQ ID NO: 126563 - DNA, 25 bp, Saccharomyces pastorianus
ggctttcccatttccgattcatata

SEQ ID NO: 126564 - DNA, 25 bp, Saccharomyces pastorianus
caagagggtgtttcttcggagacct

SEQ ID NO: 126565 - DNA, 25 bp, Saccharomyces pastorianus
tggaaatcacttccggtccgctagg

SEQ ID NO: 126566 - DNA, 25 bp, Saccharomyces pastorianus
agaccattgctgatgctacgaaaat

SEQ ID NO: 126567 - DNA, 25 bp, Saccharomyces pastorianus
gttcgtaacctagctttcgtggaat

SEQ ID NO: 126568 - DNA, 25 bp, Saccharomyces pastorianus
gcagaaacctcttaagcggactaag

SEQ ID NO: 126569 - DNA, 25 bp, Saccharomyces pastorianus
ataagacgcctgaagcataagctga

SEQ ID NO: 126570 - DNA, 25 bp, Saccharomyces pastorianus
caccgaacaaagtccttcttataca

SEQ ID NO: 126571 - DNA, 25 bp, Saccharomyces pastorianus
caagcggcactactgagcaactatt

SEQ ID NO: 126572 - DNA, 25 bp, Saccharomyces pastorianus
cgtggaatacgagaccattgctgat

SEQ ID NO: 126573 - DNA, 25 bp, Saccharomyces pastorianus
aaatcagattagttagcgttcgtaa

SEQ ID NO: 126574 - DNA, 25 bp, Saccharomyces pastorianus
gtcgcaaatacttggcaatgaggct

SEQ ID NO: 126575 - DNA, 25 bp, Saccharomyces pastorianus
gaatcagttaggctccacttacaag

SEQ ID NO: 126576 - DNA, 25 bp, Saccharomyces pastorianus
atgacgaaacgtacaaccttgatat

SEQ ID NO: 126577 - DNA, 25 bp, Saccharomyces pastorianus
gataagctctataaacctgcaggaa

SEQ ID NO: 126578 - DNA, 25 bp, Saccharomyces pastorianus
gaaactattacgatattggcgataa

SEQ ID NO: 126579 - DNA, 25 bp, Saccharomyces pastorianus
ggcgataagctctataaacctgcag

SEQ ID NO: 126580 - DNA, 25 bp, Saccharomyces pastorianus
taaacctgcaggaaatccccaatat

SEQ ID NO: 126581 - DNA, 25 bp, Saccharomyces pastorianus
taataaatgccgttgacggtaagaa

SEQ ID NO: 126582 - DNA, 25 bp, Saccharomyces pastorianus
attggcgataagctctataaacctg

SEQ ID NO: 126583 - DNA, 25 bp, Saccharomyces pastorianus
atccccaatattatcaacggttaat

SEQ ID NO: 126584 - DNA, 25 bp, Saccharomyces pastorianus
tattatcaacggttaataaatgccg

SEQ ID NO: 126585 - DNA, 25 bp, Saccharomyces pastorianus
taagctctataaacctgcaggaaat

SEQ ID NO: 126586 - DNA, 25 bp, Saccharomyces pastorianus
ggaaatccccaatattatcaacggt

SEQ ID NO: 126587 - DNA, 25 bp, Saccharomyces pastorianus
tacgatattggcgataagctctata

SEQ ID NO: 126588 - DNA, 25 bp, Saccharomyces pastorianus
ttcagggatgtacaaatagcaagat

SEQ ID NO: 126589 - DNA, 25 bp, Saccharomyces pastorianus
acaccacttggtctcattcagggat

SEQ ID NO: 126590 - DNA, 25 bp, Saccharomyces pastorianus
atagcaagatttagacgtgtagcgg

SEQ ID NO: 126591 - DNA, 25 bp, Saccharomyces pastorianus
gcgggtctgccaaatgtagatgaca

SEQ ID NO: 126592 - DNA, 25 bp, Saccharomyces pastorianus
tggtctcattcagggatgtacaaat

SEQ ID NO: 126593 - DNA, 25 bp, Saccharomyces pastorianus
cacttggtctcattcagggatgtac

SEQ ID NO: 126594 - DNA, 25 bp, Saccharomyces pastorianus
aaggatcgtatacaccacttggtct

SEQ ID NO: 126595 - DNA, 25 bp, Saccharomyces pastorianus
aggtcgtcagggattctgccaaaaa

SEQ ID NO: 126596 - DNA, 25 bp, Saccharomyces pastorianus
gtatacaccacttggtctcattcag

SEQ ID NO: 126597 - DNA, 25 bp, Saccharomyces pastorianus
acgtgtagcgggtctgccaaatgta

SEQ ID NO: 126598 - DNA, 25 bp, Saccharomyces pastorianus
atttagacgtgtagcgggtctgcca

SEQ ID NO: 126599 - DNA, 25 bp, Saccharomyces pastorianus
ataatccgctgtggaatcctagcag

SEQ ID NO: 126600 - DNA, 25 bp, Saccharomyces pastorianus
aaaaagcgttcggtatggatgacta

SEQ ID NO: 126601 - DNA, 25 bp, Saccharomyces pastorianus
gggaagtcacgaccggctatttatc

SEQ ID NO: 126602 - DNA, 25 bp, Saccharomyces pastorianus
aagtgtagttatccggagatcccaa

SEQ ID NO: 126603 - DNA, 25 bp, Saccharomyces pastorianus
gcgaagcgatttgcttccacagggt

SEQ ID NO: 126604 - DNA, 25 bp, Saccharomyces pastorianus
aacgaccccaaattcaagctctgaa

SEQ ID NO: 126605 - DNA, 25 bp, Saccharomyces pastorianus
gttttctgtcgattcaacgacccca

SEQ ID NO: 126606 - DNA, 25 bp, Saccharomyces pastorianus
cgttgtggacgctaattctggtggt

SEQ ID NO: 126607 - DNA, 25 bp, Saccharomyces pastorianus
gatgacctagtcgttgtggacgcta

SEQ ID NO: 126608 - DNA, 25 bp, Saccharomyces pastorianus
ggctatttatcaccaattcaatgtc

SEQ ID NO: 126609 - DNA, 25 bp, Saccharomyces pastorianus
ggatgactatctatctctgttagac

SEQ ID NO: 126610 - DNA, 25 bp, Saccharomyces pastorianus
gattttgatgataatggcgccataa

SEQ ID NO: 126611 - DNA, 25 bp, Saccharomyces pastorianus
gctaaactagatcctaaaaccgcgg

SEQ ID NO: 126612 - DNA, 25 bp, Saccharomyces pastorianus
ggtgcctgcaagtatagacgatgac

SEQ ID NO: 126613 - DNA, 25 bp, Saccharomyces pastorianus
gaatccatggtacccgaaaacaaga

SEQ ID NO: 126614 - DNA, 25 bp, Saccharomyces pastorianus
gcagaagtttttcacaacgtcgaat

SEQ ID NO: 126615 - DNA, 25 bp, Saccharomyces pastorianus
ggtagtcaaatgtcctcaaatgcca

SEQ ID NO: 126616 - DNA, 25 bp, Saccharomyces pastorianus
tggtgagccaaacattgcagaagtt

SEQ ID NO: 126617 - DNA, 25 bp, Saccharomyces pastorianus
taagggtatcgctgctggtgatgat

SEQ ID NO: 126618 - DNA, 25 bp, Saccharomyces pastorianus
aacagcgagcttccaagatatcata

SEQ ID NO: 126619 - DNA, 25 bp, Saccharomyces pastorianus
agagccagacgacgctgctttggaa

SEQ ID NO: 126620 - DNA, 25 bp, Saccharomyces pastorianus
gatcagaacttgaaggtgcctgcaa

SEQ ID NO: 126621 - DNA, 25 bp, Saccharomyces pastorianus
gttcccttcagagatgagtcggtca

SEQ ID NO: 126622 - DNA, 25 bp, Saccharomyces pastorianus
aatgagcatcctgtaattggtaaaa

SEQ ID NO: 126623 - DNA, 25 bp, Saccharomyces pastorianus
gtagctttggctctctggaatggaa

SEQ ID NO: 126624 - DNA, 25 bp, Saccharomyces pastorianus
atggacctatcgaatctcagcacgg

SEQ ID NO: 126625 - DNA, 25 bp, Saccharomyces pastorianus
gccacctcctaagttatcaatggtt

SEQ ID NO: 126626 - DNA, 25 bp, Saccharomyces pastorianus
ctcagcacggattacaactgtactt

SEQ ID NO: 126627 - DNA, 25 bp, Saccharomyces pastorianus
tttgatcttagaccgtagcgttaaa

SEQ ID NO: 126628 - DNA, 25 bp, Saccharomyces pastorianus
gatgatactgatagcgacggatcca

SEQ ID NO: 126629 - DNA, 25 bp, Saccharomyces pastorianus
gagtacagatttccaactgccgcca

SEQ ID NO: 126630 - DNA, 25 bp, Saccharomyces pastorianus
ggataatgtcccctctgcaagagag

SEQ ID NO: 126631 - DNA, 25 bp, Saccharomyces pastorianus
gcgacggatccaagagctattttaa

SEQ ID NO: 126632 - DNA, 25 bp, Saccharomyces pastorianus
tgtagtgctaaaccggaaaggcgaa

SEQ ID NO: 126633 - DNA, 25 bp, Saccharomyces pastorianus
ggcgaaacattgcaagactggttta

SEQ ID NO: 126634 - DNA, 25 bp, Saccharomyces pastorianus
actgccatcattgtagtgctaaacc

SEQ ID NO: 126635 - DNA, 25 bp, Saccharomyces pastorianus
aaccggaaaggcgaaacattgcaag

SEQ ID NO: 126636 - DNA, 25 bp, Saccharomyces pastorianus
aaaggcgaaacattgcaagactggt

SEQ ID NO: 126637 - DNA, 25 bp, Saccharomyces pastorianus
cattgtagtgctaaaccggaaaggc

SEQ ID NO: 126638 - DNA, 25 bp, Saccharomyces pastorianus
gccatcattgtagtgctaaaccgga

SEQ ID NO: 126639 - DNA, 25 bp, Saccharomyces pastorianus
gtgctaaaccggaaaggcgaaacat

SEQ ID NO: 126640 - DNA, 25 bp, Saccharomyces pastorianus
catcattgtagtgctaaaccggaaa

SEQ ID NO: 126641 - DNA, 25 bp, Saccharomyces pastorianus
aacattgcaagactggtttaataaa

SEQ ID NO: 126642 - DNA, 25 bp, Saccharomyces pastorianus
tgccatcattgtagtgctaaaccgg

SEQ ID NO: 126643 - DNA, 25 bp, Saccharomyces pastorianus
gaaaccctgtcattgaacgtcttcg

SEQ ID NO: 126644 - DNA, 25 bp, Saccharomyces pastorianus
taatggtgaacccaacgctggcctg

SEQ ID NO: 126645 - DNA, 25 bp, Saccharomyces pastorianus
gacgatgtctttcgatcataagcca

SEQ ID NO: 126646 - DNA, 25 bp, Saccharomyces pastorianus
gtggctaactgtggtgattcgcgat

SEQ ID NO: 126647 - DNA, 25 bp, Saccharomyces pastorianus
aacgtcttcgcagtattcgatggtc

SEQ ID NO: 126648 - DNA, 25 bp, Saccharomyces pastorianus
attcgcgatgtattctttcctccaa

SEQ ID NO: 126649 - DNA, 25 bp, Saccharomyces pastorianus
ttcgaaatttctaagcggcggccgc

SEQ ID NO: 126650 - DNA, 25 bp, Saccharomyces pastorianus
caacagttcgtgtggatctacagca

SEQ ID NO: 126651 - DNA, 25 bp, Saccharomyces pastorianus
gtttcgaaaaccaccattacacatc

SEQ ID NO: 126652 - DNA, 25 bp, Saccharomyces pastorianus
actggctctcagtagggcatttagt

SEQ ID NO: 126653 - DNA, 25 bp, Saccharomyces pastorianus
taatggtggtactgtctctcttgga

SEQ ID NO: 126654 - DNA, 25 bp, Saccharomyces pastorianus
tagatccgcaggatggcctggtatt

SEQ ID NO: 126655 - DNA, 25 bp, Saccharomyces pastorianus
gttcccttcagactaacaccaaatt

SEQ ID NO: 126656 - DNA, 25 bp, Saccharomyces pastorianus
gtcccagaaattgttcccttcagac

SEQ ID NO: 126657 - DNA, 25 bp, Saccharomyces pastorianus
gttcttcatgtagacttcgactgtt

SEQ ID NO: 126658 - DNA, 25 bp, Saccharomyces pastorianus
gatcttacgccgtcatggcaatggt

SEQ ID NO: 126659 - DNA, 25 bp, Saccharomyces pastorianus
aatttcctccaatcttgtaccaatg

SEQ ID NO: 126660 - DNA, 25 bp, Saccharomyces pastorianus
gttggccatatattaggtctaggtg

SEQ ID NO: 126661 - DNA, 25 bp, Saccharomyces pastorianus
ggcagcacaccgcagcagatggaaa

SEQ ID NO: 126662 - DNA, 25 bp, Saccharomyces pastorianus
gcaaaaggttacctgtcccagaaat

SEQ ID NO: 126663 - DNA, 25 bp, Saccharomyces pastorianus
gccaggaatacgtacgccagatctt

SEQ ID NO: 126664 - DNA, 25 bp, Saccharomyces pastorianus
tagaaaactttcctgatccaatcaa

SEQ ID NO: 126665 - DNA, 25 bp, Saccharomyces pastorianus
caccttgaagggtctatacattctt

SEQ ID NO: 126666 - DNA, 25 bp, Saccharomyces pastorianus
gatttcctcaacatatccgttctga

SEQ ID NO: 126667 - DNA, 25 bp, Saccharomyces pastorianus
acaaccccttcttgcttgttatgaa

SEQ ID NO: 126668 - DNA, 25 bp, Saccharomyces pastorianus
gaatctttacgaacaggccttgact

SEQ ID NO: 126669 - DNA, 25 bp, Saccharomyces pastorianus
ggatccatcttcttctcaggagtac

SEQ ID NO: 126670 - DNA, 25 bp, Saccharomyces pastorianus
gcagctggtgcaaagcatgtgtcga

SEQ ID NO: 126671 - DNA, 25 bp, Saccharomyces pastorianus
gcccttgccttattgttggagtaca

SEQ ID NO: 126672 - DNA, 25 bp, Saccharomyces pastorianus
tcttttatactggttcacttcggag

SEQ ID NO: 126673 - DNA, 25 bp, Saccharomyces pastorianus
aacctgctaagtttcagcttactgc

SEQ ID NO: 126674 - DNA, 25 bp, Saccharomyces pastorianus
ttactgcacattttgagaacaccat

SEQ ID NO: 126675 - DNA, 25 bp, Saccharomyces pastorianus
gttgggcaagactgagcttctcaaa

SEQ ID NO: 126676 - DNA, 25 bp, Saccharomyces pastorianus
ttcaaactttctatctcacccaaat

SEQ ID NO: 126677 - DNA, 25 bp, Saccharomyces pastorianus
catcatggactgtaattctcggacg

SEQ ID NO: 126678 - DNA, 25 bp, Saccharomyces pastorianus
gtggcatcttattttctctacatag

SEQ ID NO: 126679 - DNA, 25 bp, Saccharomyces pastorianus
ataccgtgtgaaccagctaagtcct

SEQ ID NO: 126680 - DNA, 25 bp, Saccharomyces pastorianus
ggcactctgccaaattccacaaagg

SEQ ID NO: 126681 - DNA, 25 bp, Saccharomyces pastorianus
gaggaactttgctcaaataccgtgt

SEQ ID NO: 126682 - DNA, 25 bp, Saccharomyces pastorianus
gcgaatctttgttaagtggcatctt

SEQ ID NO: 126683 - DNA, 25 bp, Saccharomyces pastorianus
atattttctcactttcaacctccaa

SEQ ID NO: 126684 - DNA, 25 bp, Saccharomyces pastorianus
aattctcggacgtctagcctgtcta

SEQ ID NO: 126685 - DNA, 25 bp, Saccharomyces pastorianus
actggcaaccctttcgtgcgaataa

SEQ ID NO: 126686 - DNA, 25 bp, Saccharomyces pastorianus
gaatcagagaagttttccggcactc

SEQ ID NO: 126687 - DNA, 25 bp, Saccharomyces pastorianus
gaaaattcctcggttaatgctcgcg

SEQ ID NO: 126688 - DNA, 25 bp, Saccharomyces pastorianus
atttgcccaaagttatcacgttttg

SEQ ID NO: 126689 - DNA, 25 bp, Saccharomyces pastorianus
cgtgccgccgtgctattaaagttta

SEQ ID NO: 126690 - DNA, 25 bp, Saccharomyces pastorianus
atagcctccgaatcattaatgcatt

SEQ ID NO: 126691 - DNA, 25 bp, Saccharomyces pastorianus
gttttggctagatattgcggccgca

SEQ ID NO: 126692 - DNA, 25 bp, Saccharomyces pastorianus
atggtcgttttgagtacagggcaat

SEQ ID NO: 126693 - DNA, 25 bp, Saccharomyces pastorianus
atggttagacctttcgaacaattca

SEQ ID NO: 126694 - DNA, 25 bp, Saccharomyces pastorianus
gttgcctcaggcagagttggagttt

SEQ ID NO: 126695 - DNA, 25 bp, Saccharomyces pastorianus
tgcggccgcatcaatttctgaagct

SEQ ID NO: 126696 - DNA, 25 bp, Saccharomyces pastorianus
gaacaattcagcgtccgaacaaatt

SEQ ID NO: 126697 - DNA, 25 bp, Saccharomyces pastorianus
aacattcttcactttagcccaattg

SEQ ID NO: 126698 - DNA, 25 bp, Saccharomyces pastorianus
gtatttgctcaaagtcaaccctatt

SEQ ID NO: 126699 - DNA, 25 bp, Saccharomyces pastorianus
agtcctgaacaactttctaccttgt

SEQ ID NO: 126700 - DNA, 25 bp, Saccharomyces pastorianus
tgattgggatgcttgttacacacag

SEQ ID NO: 126701 - DNA, 25 bp, Saccharomyces pastorianus
actccatttggtcttaagtcctgaa

SEQ ID NO: 126702 - DNA, 25 bp, Saccharomyces pastorianus
gtaaattccgttttgctctattgat

SEQ ID NO: 126703 - DNA, 25 bp, Saccharomyces pastorianus
gaacaatcatctgaagcggttgctg

SEQ ID NO: 126704 - DNA, 25 bp, Saccharomyces pastorianus
ttgttaccttttcttactccatttg

SEQ ID NO: 126705 - DNA, 25 bp, Saccharomyces pastorianus
gcggttgctgtctcttttgaattga

SEQ ID NO: 126706 - DNA, 25 bp, Saccharomyces pastorianus
accttgttacttgaagtcggcttcg

SEQ ID NO: 126707 - DNA, 25 bp, Saccharomyces pastorianus
agtgccacttactttgatcaactgg

SEQ ID NO: 126708 - DNA, 25 bp, Saccharomyces pastorianus
gtgaagcccctggatatttttgatc

SEQ ID NO: 126709 - DNA, 25 bp, Saccharomyces pastorianus
aaatcttttctaccttctctagcag

SEQ ID NO: 126710 - DNA, 25 bp, Saccharomyces pastorianus
gacagcttaccttcaacagatttgg

SEQ ID NO: 126711 - DNA, 25 bp, Saccharomyces pastorianus
aaacgacgtgattcctcaagaacat

SEQ ID NO: 126712 - DNA, 25 bp, Saccharomyces pastorianus
gaccagaggcgatttcacgtataat

SEQ ID NO: 126713 - DNA, 25 bp, Saccharomyces pastorianus
ggatggtcgtctcacgaacgtgata

SEQ ID NO: 126714 - DNA, 25 bp, Saccharomyces pastorianus
gtctgttcattgtcatactgggtac

SEQ ID NO: 126715 - DNA, 25 bp, Saccharomyces pastorianus
catattcctacggttgtctgttcat

SEQ ID NO: 126716 - DNA, 25 bp, Saccharomyces pastorianus
tagcttaatcaggttgacggtcaaa

SEQ ID NO: 126717 - DNA, 25 bp, Saccharomyces pastorianus
gatttggtttttactggcattggat

SEQ ID NO: 126718 - DNA, 25 bp, Saccharomyces pastorianus
tagcagttgaggcttccgcacacag

SEQ ID NO: 126719 - DNA, 25 bp, Saccharomyces pastorianus
gcacacagttggtctgagcttacta

SEQ ID NO: 126720 - DNA, 25 bp, Saccharomyces pastorianus
cacaggcgtttcctcggaatttacg

SEQ ID NO: 126721 - DNA, 25 bp, Saccharomyces pastorianus
tttcagtcgatgtctctaacaccac

SEQ ID NO: 126722 - DNA, 25 bp, Saccharomyces pastorianus
ttttgtcccgtgtccttgaagatag

SEQ ID NO: 126723 - DNA, 25 bp, Saccharomyces pastorianus
atggaccaatggacctcatcatata

SEQ ID NO: 126724 - DNA, 25 bp, Saccharomyces pastorianus
gtagaaaatccgtacttggtcacta

SEQ ID NO: 126725 - DNA, 25 bp, Saccharomyces pastorianus
ttccgcagttgtacaaggttaccgt

SEQ ID NO: 126726 - DNA, 25 bp, Saccharomyces pastorianus
attttgcagtccgaagtacctagaa

SEQ ID NO: 126727 - DNA, 25 bp, Saccharomyces pastorianus
gggatgttattacttcaacgtcaac

SEQ ID NO: 126728 - DNA, 25 bp, Saccharomyces pastorianus
atttcattttcaacatcctcttcag

SEQ ID NO: 126729 - DNA, 25 bp, Saccharomyces pastorianus
tggtcactacaattccccattgttt

SEQ ID NO: 126730 - DNA, 25 bp, Saccharomyces pastorianus
caagttttacatgagattccgcagt

SEQ ID NO: 126731 - DNA, 25 bp, Saccharomyces pastorianus
aatacgcatatattgccgttgggtc

SEQ ID NO: 126732 - DNA, 25 bp, Saccharomyces pastorianus
acgggccgcaagatcagacgatatt

SEQ ID NO: 126733 - DNA, 25 bp, Saccharomyces pastorianus
ggtggattcttaaacgcctttgaca

SEQ ID NO: 126734 - DNA, 25 bp, Saccharomyces pastorianus
gtaaccaactatccagttaaccctg

SEQ ID NO: 126735 - DNA, 25 bp, Saccharomyces pastorianus
tttcggaagtttagcgtgttctcct

SEQ ID NO: 126736 - DNA, 25 bp, Saccharomyces pastorianus
atatccttgttactgagctccttaa

SEQ ID NO: 126737 - DNA, 25 bp, Saccharomyces pastorianus
gtgttctcctgctgatgttgattta

SEQ ID NO: 126738 - DNA, 25 bp, Saccharomyces pastorianus
tgctagctatagacgacttcctgaa

SEQ ID NO: 126739 - DNA, 25 bp, Saccharomyces pastorianus
aagggctttgtcactttacactaga

SEQ ID NO: 126740 - DNA, 25 bp, Saccharomyces pastorianus
gaaatgcgtctcatatccttgttac

SEQ ID NO: 126741 - DNA, 25 bp, Saccharomyces pastorianus
ctttgagacccgttttgcaagggat

SEQ ID NO: 126742 - DNA, 25 bp, Saccharomyces pastorianus
atcaatcttaccaaccttatcgaac

SEQ ID NO: 126743 - DNA, 25 bp, Saccharomyces pastorianus
cgctgcgcgaacactttctaatgat

SEQ ID NO: 126744 - DNA, 25 bp, Saccharomyces pastorianus
acattttgactaatccgttggaggc

SEQ ID NO: 126745 - DNA, 25 bp, Saccharomyces pastorianus
aagagatacgcttcaccgaacgact

SEQ ID NO: 126746 - DNA, 25 bp, Saccharomyces pastorianus
gaaagcaacgccttattttgacgat

SEQ ID NO: 126747 - DNA, 25 bp, Saccharomyces pastorianus
tcaatcacatagaccttcccaaaat

SEQ ID NO: 126748 - DNA, 25 bp, Saccharomyces pastorianus
atacgcgcacctgggatattcaatc

SEQ ID NO: 126749 - DNA, 25 bp, Saccharomyces pastorianus
tttgatgctgccacaagcgtttaca

SEQ ID NO: 126750 - DNA, 25 bp, Saccharomyces pastorianus
tagatcaatttgacgctgcgcgaac

SEQ ID NO: 126751 - DNA, 25 bp, Saccharomyces pastorianus
gcgtttacactgagccaaccgaaat

SEQ ID NO: 126752 - DNA, 25 bp, Saccharomyces pastorianus
aactcatcggatgcctcgttagtct

SEQ ID NO: 126753 - DNA, 25 bp, Saccharomyces pastorianus
gatgctacaagataaggataactat

SEQ ID NO: 126754 - DNA, 25 bp, Saccharomyces pastorianus
aaaattgtttcgaagactcctcatt

SEQ ID NO: 126755 - DNA, 25 bp, Saccharomyces pastorianus
aggttctacgagagatctgccaatt

SEQ ID NO: 126756 - DNA, 25 bp, Saccharomyces pastorianus
gtttcgaagactcctcatttcgttt

SEQ ID NO: 126757 - DNA, 25 bp, Saccharomyces pastorianus
aattgggccctctgttcgcaaacat

SEQ ID NO: 126758 - DNA, 25 bp, Saccharomyces pastorianus
aagactcctcatttcgtttacaaga

SEQ ID NO: 126759 - DNA, 25 bp, Saccharomyces pastorianus
tcgtttacaagaaaacagcttcaag

SEQ ID NO: 126760 - DNA, 25 bp, Saccharomyces pastorianus
ggataactatatcaaaacactgatg

SEQ ID NO: 126761 - DNA, 25 bp, Saccharomyces pastorianus
cctctgttcgcaaacatcaacttct

SEQ ID NO: 126762 - DNA, 25 bp, Saccharomyces pastorianus
aggtgggttaagaatgatgctacaa

SEQ ID NO: 126763 - DNA, 25 bp, Saccharomyces pastorianus
agcttcaagaggcaattgggccctc

SEQ ID NO: 126764 - DNA, 25 bp, Saccharomyces pastorianus
gacgatgaattttctcctgctactc

SEQ ID NO: 126765 - DNA, 25 bp, Saccharomyces pastorianus
gggtcctggcattttagaactgaac

SEQ ID NO: 126766 - DNA, 25 bp, Saccharomyces pastorianus
aatccaatatgggtcctggcatttt

SEQ ID NO: 126767 - DNA, 25 bp, Saccharomyces pastorianus
aacacatttacatctcagcctaata

SEQ ID NO: 126768 - DNA, 25 bp, Saccharomyces pastorianus
gtattactaaccacatttcaaaggg

SEQ ID NO: 126769 - DNA, 25 bp, Saccharomyces pastorianus
gaccaattgagcgaccacgttatag

SEQ ID NO: 126770 - DNA, 25 bp, Saccharomyces pastorianus
gagacatgtgattgactatctgaac

SEQ ID NO: 126771 - DNA, 25 bp, Saccharomyces pastorianus
tcaaagggtagaatgcacgcacaag

SEQ ID NO: 126772 - DNA, 25 bp, Saccharomyces pastorianus
tcctgctactccaccggagaatgtt

SEQ ID NO: 126773 - DNA, 25 bp, Saccharomyces pastorianus
gcaagaaaatctcctacataagcag

SEQ ID NO: 126774 - DNA, 25 bp, Saccharomyces pastorianus
gagaatgttcttgaaggtccttaca

SEQ ID NO: 126775 - DNA, 25 bp, Saccharomyces pastorianus
aagttggtctaactctttggctggg

SEQ ID NO: 126776 - DNA, 25 bp, Saccharomyces pastorianus
atatttggtcactagctcgatgtct

SEQ ID NO: 126777 - DNA, 25 bp, Saccharomyces pastorianus
gagacctttggcgtttactctaaga

SEQ ID NO: 126778 - DNA, 25 bp, Saccharomyces pastorianus
atgaccccttactgggcgcacgcag

SEQ ID NO: 126779 - DNA, 25 bp, Saccharomyces pastorianus
aacgatcccaaatccacaacagttt

SEQ ID NO: 126780 - DNA, 25 bp, Saccharomyces pastorianus
gcgcacgcagtgtatcaatttgtaa

SEQ ID NO: 126781 - DNA, 25 bp, Saccharomyces pastorianus
agtggctcgaaatcattcttacaaa

SEQ ID NO: 126782 - DNA, 25 bp, Saccharomyces pastorianus
agacgctgcggctctcaagaaagat

SEQ ID NO: 126783 - DNA, 25 bp, Saccharomyces pastorianus
gaaagatacgctactatgacccctt

SEQ ID NO: 126784 - DNA, 25 bp, Saccharomyces pastorianus
gctcatttggtggtctgattcccac

SEQ ID NO: 126785 - DNA, 25 bp, Saccharomyces pastorianus
cttttggctacatacagtggctcga

SEQ ID NO: 126786 - DNA, 25 bp, Saccharomyces pastorianus
gaatccaactatgagtccattaagg

SEQ ID NO: 126787 - DNA, 25 bp, Saccharomyces pastorianus
atgacttttatgcaacagcttcaag

SEQ ID NO: 126788 - DNA, 25 bp, Saccharomyces pastorianus
gcgaaacgtggcttcaacttggtat

SEQ ID NO: 126789 - DNA, 25 bp, Saccharomyces pastorianus
taatgttggccaatcacactccatt

SEQ ID NO: 126790 - DNA, 25 bp, Saccharomyces pastorianus
gtccattaaggaattgtgtgcgcag

SEQ ID NO: 126791 - DNA, 25 bp, Saccharomyces pastorianus
tttttactaccagcagtcaatttcg

SEQ ID NO: 126792 - DNA, 25 bp, Saccharomyces pastorianus
ttctagccattgacattgcggagga

SEQ ID NO: 126793 - DNA, 25 bp, Saccharomyces pastorianus
aatactgtgttatcactggtgcaag

SEQ ID NO: 126794 - DNA, 25 bp, Saccharomyces pastorianus
gtgtgcgcagttaccaatcaccgtt

SEQ ID NO: 126795 - DNA, 25 bp, Saccharomyces pastorianus
catgtcgttgtaaagattctagcca

SEQ ID NO: 126796 - DNA, 25 bp, Saccharomyces pastorianus
gtcaatttcgacaagtatggtgcta

SEQ ID NO: 126797 - DNA, 25 bp, Saccharomyces pastorianus
gaccatttgtttaatttcactctct

SEQ ID NO: 126798 - DNA, 25 bp, Saccharomyces pastorianus
gttaagtctacaacaccatacgtta

SEQ ID NO: 126799 - DNA, 25 bp, Saccharomyces pastorianus
aagagctacttaactattcagaaat

SEQ ID NO: 126800 - DNA, 25 bp, Saccharomyces pastorianus
tttttcctgcgattgtttgaccatt

SEQ ID NO: 126801 - DNA, 25 bp, Saccharomyces pastorianus
tcatcctatgttgcggttttgggta

SEQ ID NO: 126802 - DNA, 25 bp, Saccharomyces pastorianus
cgttcataagcacggatcatcctat

SEQ ID NO: 126803 - DNA, 25 bp, Saccharomyces pastorianus
gagtaacgaaacacccatctttgaa

SEQ ID NO: 126804 - DNA, 25 bp, Saccharomyces pastorianus
atacccacaacaaatctaccaaacg

SEQ ID NO: 126805 - DNA, 25 bp, Saccharomyces pastorianus
ctgcacccaggatggcactcaaaaa

SEQ ID NO: 126806 - DNA, 25 bp, Saccharomyces pastorianus
aagagaactctgcacccaggatggc

SEQ ID NO: 126807 - DNA, 25 bp, Saccharomyces pastorianus
aagtttctcgatagcgttcataagc

SEQ ID NO: 126808 - DNA, 25 bp, Saccharomyces pastorianus
tcttgtttcacttgattgtgagctc

SEQ ID NO: 126809 - DNA, 25 bp, Saccharomyces pastorianus
gagctccaaaagcttgctcttaagc

SEQ ID NO: 126810 - DNA, 25 bp, Saccharomyces pastorianus
cacttgattgtgagctccaaaagct

SEQ ID NO: 126811 - DNA, 25 bp, Saccharomyces pastorianus
ttgtgagctccaaaagcttgctctt

SEQ ID NO: 126812 - DNA, 25 bp, Saccharomyces pastorianus
tgattgtgagctccaaaagcttgct

SEQ ID NO: 126813 - DNA, 25 bp, Saccharomyces pastorianus
aaagcttgctcttaagctgtcaaag

SEQ ID NO: 126814 - DNA, 25 bp, Saccharomyces pastorianus
ttgtttcacttgattgtgagctcca

SEQ ID NO: 126815 - DNA, 25 bp, Saccharomyces pastorianus
caaaagcttgctcttaagctgtcaa

SEQ ID NO: 126816 - DNA, 25 bp, Saccharomyces pastorianus
gtttcacttgattgtgagctccaaa

SEQ ID NO: 126817 - DNA, 25 bp, Saccharomyces pastorianus
gtgagctccaaaagcttgctcttaa

SEQ ID NO: 126818 - DNA, 25 bp, Saccharomyces pastorianus
gctccaaaagcttgctcttaagctg

SEQ ID NO: 126819 - DNA, 25 bp, Saccharomyces pastorianus
gttataggaaaaccaatctgtcaga

SEQ ID NO: 126820 - DNA, 25 bp, Saccharomyces pastorianus
attgtgctgcaaagatcgttatagg

SEQ ID NO: 126821 - DNA, 25 bp, Saccharomyces pastorianus
ttatgtacaaggtagtatcagctat

SEQ ID NO: 126822 - DNA, 25 bp, Saccharomyces pastorianus
gtatcagctataacaggactattct

SEQ ID NO: 126823 - DNA, 25 bp, Saccharomyces pastorianus
aacaggactattcttaccggcttat

SEQ ID NO: 126824 - DNA, 25 bp, Saccharomyces pastorianus
cattgttctatgacgattcaacgga

SEQ ID NO: 126825 - DNA, 25 bp, Saccharomyces pastorianus
ggactattcttaccggcttatggaa

SEQ ID NO: 126826 - DNA, 25 bp, Saccharomyces pastorianus
caatctgtcagaaacattgttctat

SEQ ID NO: 126827 - DNA, 25 bp, Saccharomyces pastorianus
taccggcttatggaaattatttcac

SEQ ID NO: 126828 - DNA, 25 bp, Saccharomyces pastorianus
attatttcacagattgtgctgcaaa

SEQ ID NO: 126829 - DNA, 25 bp, Saccharomyces pastorianus
gttctatgacgattcaacggaaaga

SEQ ID NO: 126830 - DNA, 25 bp, Saccharomyces pastorianus
gaattggtcccaaatccccaatgaa

SEQ ID NO: 126831 - DNA, 25 bp, Saccharomyces pastorianus
atagcggagttttcttcagcaattt

SEQ ID NO: 126832 - DNA, 25 bp, Saccharomyces pastorianus
gacttaatagtcacctctgaaaatt

SEQ ID NO: 126833 - DNA, 25 bp, Saccharomyces pastorianus
tacctaatgcgatacgtcttcctta

SEQ ID NO: 126834 - DNA, 25 bp, Saccharomyces pastorianus
gcaaatattgcttctacactcagtt

SEQ ID NO: 126835 - DNA, 25 bp, Saccharomyces pastorianus
ctcagttttctaccccatcatgaaa

SEQ ID NO: 126836 - DNA, 25 bp, Saccharomyces pastorianus
aaccgtatacacatcctttattctc

SEQ ID NO: 126837 - DNA, 25 bp, Saccharomyces pastorianus
cgatacgtcttccttactgtaagca

SEQ ID NO: 126838 - DNA, 25 bp, Saccharomyces pastorianus
agattcgtctctattggcagcagta

SEQ ID NO: 126839 - DNA, 25 bp, Saccharomyces pastorianus
tttattctctatccaaacgttgtcg

SEQ ID NO: 126840 - DNA, 25 bp, Saccharomyces pastorianus
ggcaatctgccccattacaaaagac

SEQ ID NO: 126841 - DNA, 25 bp, Saccharomyces pastorianus
ccggacatttcctgtagacgacgat

SEQ ID NO: 126842 - DNA, 25 bp, Saccharomyces pastorianus
gacgacgatgagtttgttctggcat

SEQ ID NO: 126843 - DNA, 25 bp, Saccharomyces pastorianus
acgatgagtttgttctggcattagc

SEQ ID NO: 126844 - DNA, 25 bp, Saccharomyces pastorianus
gatgagtttgttctggcattagcta

SEQ ID NO: 126845 - DNA, 25 bp, Saccharomyces pastorianus
cctgtagacgacgatgagtttgttc

SEQ ID NO: 126846 - DNA, 25 bp, Saccharomyces pastorianus
ggacatttcctgtagacgacgatga

SEQ ID NO: 126847 - DNA, 25 bp, Saccharomyces pastorianus
tgagtttgttctggcattagctatg

SEQ ID NO: 126848 - DNA, 25 bp, Saccharomyces pastorianus
cgacgatgagtttgttctggcatta

SEQ ID NO: 126849 - DNA, 25 bp, Saccharomyces pastorianus
gacatttcctgtagacgacgatgag

SEQ ID NO: 126850 - DNA, 25 bp, Saccharomyces pastorianus
tttcctgtagacgacgatgagtttg

SEQ ID NO: 126851 - DNA, 25 bp, Saccharomyces pastorianus
catttcctgtagacgacgatgagtt

SEQ ID NO: 126852 - DNA, 25 bp, Saccharomyces pastorianus
ccggacatttcctgtagacgacgat

SEQ ID NO: 126853 - DNA, 25 bp, Saccharomyces pastorianus
gacgacgatgagtttgttctggcat

SEQ ID NO: 126854 - DNA, 25 bp, Saccharomyces pastorianus
acgatgagtttgttctggcattagc

SEQ ID NO: 126855 - DNA, 25 bp, Saccharomyces pastorianus
gatgagtttgttctggcattagcta

SEQ ID NO: 126856 - DNA, 25 bp, Saccharomyces pastorianus
ggacatttcctgtagacgacgatga

SEQ ID NO: 126857 - DNA, 25 bp, Saccharomyces pastorianus
atgtgtctgtctgaatacttccgga

SEQ ID NO: 126858 - DNA, 25 bp, Saccharomyces pastorianus
tgagtttgttctggcattagctatg

SEQ ID NO: 126859 - DNA, 25 bp, Saccharomyces pastorianus
cgacgatgagtttgttctggcatta

SEQ ID NO: 126860 - DNA, 25 bp, Saccharomyces pastorianus
gacatttcctgtagacgacgatgag

SEQ ID NO: 126861 - DNA, 25 bp, Saccharomyces pastorianus
ttcctgtagacgacgatgagtttgt

SEQ ID NO: 126862 - DNA, 25 bp, Saccharomyces pastorianus
catttcctgtagacgacgatgagtt

SEQ ID NO: 126863 - DNA, 25 bp, Saccharomyces pastorianus
taactttttagcattagccacgtct

SEQ ID NO: 126864 - DNA, 25 bp, Saccharomyces pastorianus
tgaggcgggaattttcagacggttc

SEQ ID NO: 126865 - DNA, 25 bp, Saccharomyces pastorianus
gagggatctttatatgccttttgat

SEQ ID NO: 126866 - DNA, 25 bp, Saccharomyces pastorianus
aaattactccttgtccatggtcctc

SEQ ID NO: 126867 - DNA, 25 bp, Saccharomyces pastorianus
aaatccaacagctgagggcatcctc

SEQ ID NO: 126868 - DNA, 25 bp, Saccharomyces pastorianus
tgtgaacactttacttacgcaactt

SEQ ID NO: 126869 - DNA, 25 bp, Saccharomyces pastorianus
gtccatggtcctccgggaacaggta

SEQ ID NO: 126870 - DNA, 25 bp, Saccharomyces pastorianus
gaattgtcttgtgcacgcatctttt

SEQ ID NO: 126871 - DNA, 25 bp, Saccharomyces pastorianus
gacggttccgataccattgatacta

SEQ ID NO: 126872 - DNA, 25 bp, Saccharomyces pastorianus
ggtataattctttttcacgcaacat

SEQ ID NO: 126873 - DNA, 25 bp, Saccharomyces pastorianus
gggcatcctccacattctaaaggtt

SEQ ID NO: 126874 - DNA, 25 bp, Saccharomyces pastorianus
aagcacattgacttcgctccaactt

SEQ ID NO: 126875 - DNA, 25 bp, Saccharomyces pastorianus
ggactctgaaaagcacattgacttc

SEQ ID NO: 126876 - DNA, 25 bp, Saccharomyces pastorianus
actctgaaaagcacattgacttcgc

SEQ ID NO: 126877 - DNA, 25 bp, Saccharomyces pastorianus
gctagaaaggctgaagcttccggtg

SEQ ID NO: 126878 - DNA, 25 bp, Saccharomyces pastorianus
ttgacttcgctccaacttctccatt

SEQ ID NO: 126879 - DNA, 25 bp, Saccharomyces pastorianus
aaaagcacattgacttcgctccaac

SEQ ID NO: 126880 - DNA, 25 bp, Saccharomyces pastorianus
aaagcacattgacttcgctccaact

SEQ ID NO: 126881 - DNA, 25 bp, Saccharomyces pastorianus
tagaaaggctgaagcttccggtgaa

SEQ ID NO: 126882 - DNA, 25 bp, Saccharomyces pastorianus
agaaacgctgctagaaaggctgaag

SEQ ID NO: 126883 - DNA, 25 bp, Saccharomyces pastorianus
gaaaagcacattgacttcgctccaa

SEQ ID NO: 126884 - DNA, 25 bp, Saccharomyces pastorianus
gcacattgacttcgctccaacttct

SEQ ID NO: 126885 - DNA, 25 bp, Saccharomyces pastorianus
gcctttttcccagccgttagaacat

SEQ ID NO: 126886 - DNA, 25 bp, Saccharomyces pastorianus
aaacctcctttgatgtgttggccca

SEQ ID NO: 126887 - DNA, 25 bp, Saccharomyces pastorianus
aaccgaggaaaagcaccgctgccaa

SEQ ID NO: 126888 - DNA, 25 bp, Saccharomyces pastorianus
caccttttttactggaggcaaggat

SEQ ID NO: 126889 - DNA, 25 bp, Saccharomyces pastorianus
gttagaacatgctcagaaccgagga

SEQ ID NO: 126890 - DNA, 25 bp, Saccharomyces pastorianus
ttttacacctgtacatctccaccat

SEQ ID NO: 126891 - DNA, 25 bp, Saccharomyces pastorianus
ggatgcgtttgaatatcgccttttt

SEQ ID NO: 126892 - DNA, 25 bp, Saccharomyces pastorianus
tgttagtctgacagttttacacctg

SEQ ID NO: 126893 - DNA, 25 bp, Saccharomyces pastorianus
tggtatatatctcttgacctcaata

SEQ ID NO: 126894 - DNA, 25 bp, Saccharomyces pastorianus
catcttgcattcactttggtatata

SEQ ID NO: 126895 - DNA, 25 bp, Saccharomyces pastorianus
accgctactagtggccgtgctggaa

SEQ ID NO: 126896 - DNA, 25 bp, Saccharomyces pastorianus
atggtgccgtccatctttctactta

SEQ ID NO: 126897 - DNA, 25 bp, Saccharomyces pastorianus
cgtccatctttctacttacttgaag

SEQ ID NO: 126898 - DNA, 25 bp, Saccharomyces pastorianus
ggtgccgtccatctttctacttact

SEQ ID NO: 126899 - DNA, 25 bp, Saccharomyces pastorianus
tggtgccgtccatctttctacttac

SEQ ID NO: 126900 - DNA, 25 bp, Saccharomyces pastorianus
agcatggtgccgtccatctttctac

SEQ ID NO: 126901 - DNA, 25 bp, Saccharomyces pastorianus
gcatggtgccgtccatctttctact

SEQ ID NO: 126902 - DNA, 25 bp, Saccharomyces pastorianus
ccgtccatctttctacttacttgaa

SEQ ID NO: 126903 - DNA, 25 bp, Saccharomyces pastorianus
gccgtccatctttctacttacttga

SEQ ID NO: 126904 - DNA, 25 bp, Saccharomyces pastorianus
aagcatggtgccgtccatctttcta

SEQ ID NO: 126905 - DNA, 25 bp, Saccharomyces pastorianus
tgccgtccatctttctacttacttg

SEQ ID NO: 126906 - DNA, 25 bp, Saccharomyces pastorianus
gtgccgtccatctttctacttactt

SEQ ID NO: 126907 - DNA, 25 bp, Saccharomyces pastorianus
gtccagcagattcagataggtgtaa

SEQ ID NO: 126908 - DNA, 25 bp, Saccharomyces pastorianus
tggcacttgctttatttgcggataa

SEQ ID NO: 126909 - DNA, 25 bp, Saccharomyces pastorianus
ataggttatcaccatactccgtaca

SEQ ID NO: 126910 - DNA, 25 bp, Saccharomyces pastorianus
actccttggagtgatctagacaacc

SEQ ID NO: 126911 - DNA, 25 bp, Saccharomyces pastorianus
tccgtacacgaactgtccaacttgt

SEQ ID NO: 126912 - DNA, 25 bp, Saccharomyces pastorianus
gtgtaccaggcaaattcactccttg

SEQ ID NO: 126913 - DNA, 25 bp, Saccharomyces pastorianus
ccaggcaacctggataagacactct

SEQ ID NO: 126914 - DNA, 25 bp, Saccharomyces pastorianus
gacaaccaaaattgccaggcaacct

SEQ ID NO: 126915 - DNA, 25 bp, Saccharomyces pastorianus
aagcatccattggttcagggatata

SEQ ID NO: 126916 - DNA, 25 bp, Saccharomyces pastorianus
gataagtcaagcatccattggttca

SEQ ID NO: 126917 - DNA, 25 bp, Saccharomyces pastorianus
gtccaacttgtccagcagattcaga

SEQ ID NO: 126918 - DNA, 25 bp, Saccharomyces pastorianus
gagccaaacgtgaatttctattgca

SEQ ID NO: 126919 - DNA, 25 bp, Saccharomyces pastorianus
gttttgaacctctatgatagtccga

SEQ ID NO: 126920 - DNA, 25 bp, Saccharomyces pastorianus
agaattttaccatcatcctctgcta

SEQ ID NO: 126921 - DNA, 25 bp, Saccharomyces pastorianus
ctatggattttgtcgaggaacaccc

SEQ ID NO: 126922 - DNA, 25 bp, Saccharomyces pastorianus
gaatttggcaccattgatccagata

SEQ ID NO: 126923 - DNA, 25 bp, Saccharomyces pastorianus
ccatcatcctctgctatctaaatat

SEQ ID NO: 126924 - DNA, 25 bp, Saccharomyces pastorianus
aactatgacgttttccaatttatgg

SEQ ID NO: 126925 - DNA, 25 bp, Saccharomyces pastorianus
gaaacgctatggacttcaactatgg

SEQ ID NO: 126926 - DNA, 25 bp, Saccharomyces pastorianus
gtattcttcctaaggaccgtgtagt

SEQ ID NO: 126927 - DNA, 25 bp, Saccharomyces pastorianus
ttggatatccctataccttccttaa

SEQ ID NO: 126928 - DNA, 25 bp, Saccharomyces pastorianus
ggtggaatcctatcataacatgtgt

SEQ ID NO: 126929 - DNA, 25 bp, Saccharomyces pastorianus
gcggcgtaaatgatgaggcgaaata

SEQ ID NO: 126930 - DNA, 25 bp, Saccharomyces pastorianus
agccaaagatgcgtgccgttgcagt

SEQ ID NO: 126931 - DNA, 25 bp, Saccharomyces pastorianus
agttagctagcaacctggcgttcgg

SEQ ID NO: 126932 - DNA, 25 bp, Saccharomyces pastorianus
gatcgccataagagatctgccaatt

SEQ ID NO: 126933 - DNA, 25 bp, Saccharomyces pastorianus
ctggcgttcggcgatcgccataaga

SEQ ID NO: 126934 - DNA, 25 bp, Saccharomyces pastorianus
aatacagccaaagatgcgtgccgtt

SEQ ID NO: 126935 - DNA, 25 bp, Saccharomyces pastorianus
agctagcaacctggcgttcggcgat

SEQ ID NO: 126936 - DNA, 25 bp, Saccharomyces pastorianus
ttcggcgatcgccataagagatctg

SEQ ID NO: 126937 - DNA, 25 bp, Saccharomyces pastorianus
aagatgcgtgccgttgcagttagct

SEQ ID NO: 126938 - DNA, 25 bp, Saccharomyces pastorianus
tgcagttagctagcaacctggcgtt

SEQ ID NO: 126939 - DNA, 25 bp, Saccharomyces pastorianus
gcgtgccgttgcagttagctagcaa

SEQ ID NO: 126940 - DNA, 25 bp, Saccharomyces pastorianus
accgctcaatcgtctgctaatggtg

SEQ ID NO: 126941 - DNA, 25 bp, Saccharomyces pastorianus
ggcgtcatccacaaatttaacagct

SEQ ID NO: 126942 - DNA, 25 bp, Saccharomyces pastorianus
gttgatcggtgtggtctcattgaca

SEQ ID NO: 126943 - DNA, 25 bp, Saccharomyces pastorianus
gctaatggtgcgactccaatgtcaa

SEQ ID NO: 126944 - DNA, 25 bp, Saccharomyces pastorianus
aaacatgtcacaagaacctcccaat

SEQ ID NO: 126945 - DNA, 25 bp, Saccharomyces pastorianus
catttttcacgtataccccagtagt

SEQ ID NO: 126946 - DNA, 25 bp, Saccharomyces pastorianus
tatggatcgtacaaccgccggagtc

SEQ ID NO: 126947 - DNA, 25 bp, Saccharomyces pastorianus
agacatgtcgccatttcatttctgt

SEQ ID NO: 126948 - DNA, 25 bp, Saccharomyces pastorianus
agtagttcactagcaaggactcttg

SEQ ID NO: 126949 - DNA, 25 bp, Saccharomyces pastorianus
tgtcaaagtcatcctcttcaacatc

SEQ ID NO: 126950 - DNA, 25 bp, Saccharomyces pastorianus
gactcttgccaagttagttgctaca

SEQ ID NO: 126951 - DNA, 25 bp, Saccharomyces pastorianus
gggacaacgctagatcttttacaag

SEQ ID NO: 126952 - DNA, 25 bp, Saccharomyces pastorianus
atcggtgttctcaatattcaatcta

SEQ ID NO: 126953 - DNA, 25 bp, Saccharomyces pastorianus
tattttgtcccaacgtcgtttgata

SEQ ID NO: 126954 - DNA, 25 bp, Saccharomyces pastorianus
aagatttgcacatcggtgttctcaa

SEQ ID NO: 126955 - DNA, 25 bp, Saccharomyces pastorianus
aaactcctcattacaagatttgcac

SEQ ID NO: 126956 - DNA, 25 bp, Saccharomyces pastorianus
agcccttatcatgggcctttataaa

SEQ ID NO: 126957 - DNA, 25 bp, Saccharomyces pastorianus
gaacctctattaaactcctcattac

SEQ ID NO: 126958 - DNA, 25 bp, Saccharomyces pastorianus
atcccgtgttatctctattcaaggc

SEQ ID NO: 126959 - DNA, 25 bp, Saccharomyces pastorianus
taaagtatctttgggacaacgctag

SEQ ID NO: 126960 - DNA, 25 bp, Saccharomyces pastorianus
gatcttttacaagcttagaacctct

SEQ ID NO: 126961 - DNA, 25 bp, Saccharomyces pastorianus
attcaaggcgaggagcccttatcat

SEQ ID NO: 126962 - DNA, 25 bp, Saccharomyces pastorianus
gtctgtcatgtgtgcacgcccaaaa

SEQ ID NO: 126963 - DNA, 25 bp, Saccharomyces pastorianus
aacttctagacatgcatccattgtg

SEQ ID NO: 126964 - DNA, 25 bp, Saccharomyces pastorianus
gcctggtccaggtagtgctgctaca

SEQ ID NO: 126965 - DNA, 25 bp, Saccharomyces pastorianus
aacacataccgttgtcgcaattgat

SEQ ID NO: 126966 - DNA, 25 bp, Saccharomyces pastorianus
attgctgccccacgttcaagtgaac

SEQ ID NO: 126967 - DNA, 25 bp, Saccharomyces pastorianus
taattcgtaccttttgctggttttg

SEQ ID NO: 126968 - DNA, 25 bp, Saccharomyces pastorianus
tatcatctaaactctattcccgtgg

SEQ ID NO: 126969 - DNA, 25 bp, Saccharomyces pastorianus
agacgccatcgcagtgtctgtcatg

SEQ ID NO: 126970 - DNA, 25 bp, Saccharomyces pastorianus
atccattgtggagatgctgtctact

SEQ ID NO: 126971 - DNA, 25 bp, Saccharomyces pastorianus
aaactatcagctgttcctatgaccc

SEQ ID NO: 126972 - DNA, 25 bp, Saccharomyces pastorianus
ttccccggcgacatgaactgtttta

SEQ ID NO: 126973 - DNA, 25 bp, Saccharomyces pastorianus
cgctggctgctttagaactttgtat

SEQ ID NO: 126974 - DNA, 25 bp, Saccharomyces pastorianus
acatgttaaggaggcaactaccaga

SEQ ID NO: 126975 - DNA, 25 bp, Saccharomyces pastorianus
ggcttacatatccatcctacaaaac

SEQ ID NO: 126976 - DNA, 25 bp, Saccharomyces pastorianus
aacacttaacgaggacattcaagga

SEQ ID NO: 126977 - DNA, 25 bp, Saccharomyces pastorianus
taccagatagtagttgtcctccaaa

SEQ ID NO: 126978 - DNA, 25 bp, Saccharomyces pastorianus
gaccctaccactcttttcaaaagat

SEQ ID NO: 126979 - DNA, 25 bp, Saccharomyces pastorianus
gtagttgtcctccaaaggataccga

SEQ ID NO: 126980 - DNA, 25 bp, Saccharomyces pastorianus
tcaagtcctcggtcctaagtttgaa

SEQ ID NO: 126981 - DNA, 25 bp, Saccharomyces pastorianus
ggtttacaggcatcaagtcctcggt

SEQ ID NO: 126982 - DNA, 25 bp, Saccharomyces pastorianus
aaatcgatgacaacgctggctgctt

SEQ ID NO: 126983 - DNA, 25 bp, Saccharomyces pastorianus
gtgacttcaaaacagatatgggctt

SEQ ID NO: 126984 - DNA, 25 bp, Saccharomyces pastorianus
tcaagacgatcatctgactccgctg

SEQ ID NO: 126985 - DNA, 25 bp, Saccharomyces pastorianus
gtatccaaactgaagtccgctcagc

SEQ ID NO: 126986 - DNA, 25 bp, Saccharomyces pastorianus
gtggtctacacggtgcaacttcgaa

SEQ ID NO: 126987 - DNA, 25 bp, Saccharomyces pastorianus
acggtcgtacattgatttcctaaca

SEQ ID NO: 126988 - DNA, 25 bp, Saccharomyces pastorianus
tgcaccgcgattcattgtatccaat

SEQ ID NO: 126989 - DNA, 25 bp, Saccharomyces pastorianus
gggactggaacactttaccggcatc

SEQ ID NO: 126990 - DNA, 25 bp, Saccharomyces pastorianus
ttctatctttcaacatggactcctc

SEQ ID NO: 126991 - DNA, 25 bp, Saccharomyces pastorianus
actcctcgccagaagactctttaat

SEQ ID NO: 126992 - DNA, 25 bp, Saccharomyces pastorianus
gaaagctaattactcaccagaccct

SEQ ID NO: 126993 - DNA, 25 bp, Saccharomyces pastorianus
gtccgctcagctttccaaaataggt

SEQ ID NO: 126994 - DNA, 25 bp, Saccharomyces pastorianus
tttaccggcatcagattcttctctt

SEQ ID NO: 126995 - DNA, 25 bp, Saccharomyces pastorianus
aaatattggctaaagtgtttcaaat

SEQ ID NO: 126996 - DNA, 25 bp, Saccharomyces pastorianus
tacaaagtactatgccatgggaagt

SEQ ID NO: 126997 - DNA, 25 bp, Saccharomyces pastorianus
ggagactactccttatcataatgct

SEQ ID NO: 126998 - DNA, 25 bp, Saccharomyces pastorianus
gtgtttcaaattggttctacgatac

SEQ ID NO: 126999 - DNA, 25 bp, Saccharomyces pastorianus
caaattggttctacgatactgggag

SEQ ID NO: 127000 - DNA, 25 bp, Saccharomyces pastorianus
gttctacgatactgggagactactc

SEQ ID NO: 127001 - DNA, 25 bp, Saccharomyces pastorianus
gaacaaataatcttcctacaaagta

SEQ ID NO: 127002 - DNA, 25 bp, Saccharomyces pastorianus
gactactccttatcataatgctttt

SEQ ID NO: 127003 - DNA, 25 bp, Saccharomyces pastorianus
atcataatgctttttgtcaagtagt

SEQ ID NO: 127004 - DNA, 25 bp, Saccharomyces pastorianus
gatactgggagactactccttatca

SEQ ID NO: 127005 - DNA, 25 bp, Saccharomyces pastorianus
tcttcctacaaagtactatgccatg

SEQ ID NO: 127006 - DNA, 25 bp, Saccharomyces pastorianus
gctagcccaaattctgactctgaag

SEQ ID NO: 127007 - DNA, 25 bp, Saccharomyces pastorianus
agaacttcagaatcccgttgtcttg

SEQ ID NO: 127008 - DNA, 25 bp, Saccharomyces pastorianus
ctgggtcttttgacgctggacggta

SEQ ID NO: 127009 - DNA, 25 bp, Saccharomyces pastorianus
gctacctccaagcttttgtcagtaa

SEQ ID NO: 127010 - DNA, 25 bp, Saccharomyces pastorianus
ggtcaacttgttgctgcattcttca

SEQ ID NO: 127011 - DNA, 25 bp, Saccharomyces pastorianus
ggaatgcgctatcgaatatctgaag

SEQ ID NO: 127012 - DNA, 25 bp, Saccharomyces pastorianus
tgaagacggtcaccaccacaacaat

SEQ ID NO: 127013 - DNA, 25 bp, Saccharomyces pastorianus
gggaaacctaactctacagtcttag

SEQ ID NO: 127014 - DNA, 25 bp, Saccharomyces pastorianus
aaacacgacagtaacgctagcccaa

SEQ ID NO: 127015 - DNA, 25 bp, Saccharomyces pastorianus
aatagtgcatcagcagtcgcttgcg

SEQ ID NO: 127016 - DNA, 25 bp, Saccharomyces pastorianus
gaaccacaacgccagattcttgaag

SEQ ID NO: 127017 - DNA, 25 bp, Saccharomyces pastorianus
aggacacctgtagagctagccagaa

SEQ ID NO: 127018 - DNA, 25 bp, Saccharomyces pastorianus
ggattgtattggatgacgccactaa

SEQ ID NO: 127019 - DNA, 25 bp, Saccharomyces pastorianus
agaagatcgttttatccttctcatg

SEQ ID NO: 127020 - DNA, 25 bp, Saccharomyces pastorianus
aatgcaacaagaggctttacgtcgg

SEQ ID NO: 127021 - DNA, 25 bp, Saccharomyces pastorianus
atccttctcatgttattcaagtatg

SEQ ID NO: 127022 - DNA, 25 bp, Saccharomyces pastorianus
gaaattaaaacatcctccttcttct

SEQ ID NO: 127023 - DNA, 25 bp, Saccharomyces pastorianus
gctttacgtcggaagttgtctgagt

SEQ ID NO: 127024 - DNA, 25 bp, Saccharomyces pastorianus
aaggccttctggtctaacattgaaa

SEQ ID NO: 127025 - DNA, 25 bp, Saccharomyces pastorianus
gaatttgcagatcagaccgctaatg

SEQ ID NO: 127026 - DNA, 25 bp, Saccharomyces pastorianus
agttcgcgcatatgctaaggccttc

SEQ ID NO: 127027 - DNA, 25 bp, Saccharomyces pastorianus
gagattgtcccctattcgaattaga

SEQ ID NO: 127028 - DNA, 25 bp, Saccharomyces pastorianus
gagacagaatatccgggccccaatg

SEQ ID NO: 127029 - DNA, 25 bp, Saccharomyces pastorianus
gcagtctatgcagccgaaaaatact

SEQ ID NO: 127030 - DNA, 25 bp, Saccharomyces pastorianus
gccggtgtacccgaacatttcgaag

SEQ ID NO: 127031 - DNA, 25 bp, Saccharomyces pastorianus
gtatcgatcggtacggatgcagtct

SEQ ID NO: 127032 - DNA, 25 bp, Saccharomyces pastorianus
aaagacccgcgcagatgcttgcttg

SEQ ID NO: 127033 - DNA, 25 bp, Saccharomyces pastorianus
tgcttgggtgcaggtatgttccaca

SEQ ID NO: 127034 - DNA, 25 bp, Saccharomyces pastorianus
attgcatccagtggcgccggtgtac

SEQ ID NO: 127035 - DNA, 25 bp, Saccharomyces pastorianus
gaagaggccttcctaaagacccgcg

SEQ ID NO: 127036 - DNA, 25 bp, Saccharomyces pastorianus
tgcggtcaagattcccgtcattgca

SEQ ID NO: 127037 - DNA, 25 bp, Saccharomyces pastorianus
cagttgttatttctgtcgaccctaa

SEQ ID NO: 127038 - DNA, 25 bp, Saccharomyces pastorianus
gacaatctcgaaagcatacggtgct

SEQ ID NO: 127039 - DNA, 25 bp, Saccharomyces pastorianus
cggtcgttcacgtgattgacgttga

SEQ ID NO: 127040 - DNA, 25 bp, Saccharomyces pastorianus
gttacgaagtacaactggtgaaatc

SEQ ID NO: 127041 - DNA, 25 bp, Saccharomyces pastorianus
taacatatcaggcacgtcgagattg

SEQ ID NO: 127042 - DNA, 25 bp, Saccharomyces pastorianus
ttgacgttgaaagtggtaacctaca

SEQ ID NO: 127043 - DNA, 25 bp, Saccharomyces pastorianus
tggtgaaatcaccaaaggattttaa

SEQ ID NO: 127044 - DNA, 25 bp, Saccharomyces pastorianus
ttttaacatatcaggcacgtcgaga

SEQ ID NO: 127045 - DNA, 25 bp, Saccharomyces pastorianus
gagcatttaggttacgaagtacaac

SEQ ID NO: 127046 - DNA, 25 bp, Saccharomyces pastorianus
tgcaattgagcatttaggttacgaa

SEQ ID NO: 127047 - DNA, 25 bp, Saccharomyces pastorianus
aggattttaacatatcaggcacgtc

SEQ ID NO: 127048 - DNA, 25 bp, Saccharomyces pastorianus
atgccggtcgttcacgtgattgacg

SEQ ID NO: 127049 - DNA, 25 bp, Saccharomyces pastorianus
tgaaagtggtaacctacagtcacta

SEQ ID NO: 127050 - DNA, 25 bp, Saccharomyces pastorianus
gcaaaagctaagtacggttcagaat

SEQ ID NO: 127051 - DNA, 25 bp, Saccharomyces pastorianus
aattgcaaaagctaagtacggttca

SEQ ID NO: 127052 - DNA, 25 bp, Saccharomyces pastorianus
ttttgctgcattctgaattcagaaa

SEQ ID NO: 127053 - DNA, 25 bp, Saccharomyces pastorianus
gaaaatgacggttggaaaattgcaa

SEQ ID NO: 127054 - DNA, 25 bp, Saccharomyces pastorianus
acggttcagaatttattgcggcagt

SEQ ID NO: 127055 - DNA, 25 bp, Saccharomyces pastorianus
aagctaagtacggttcagaatttat

SEQ ID NO: 127056 - DNA, 25 bp, Saccharomyces pastorianus
tattgcggcagtcaacaagaataat

SEQ ID NO: 127057 - DNA, 25 bp, Saccharomyces pastorianus
tttattgcggcagtcaacaagaata

SEQ ID NO: 127058 - DNA, 25 bp, Saccharomyces pastorianus
tcagaatttattgcggcagtcaaca

SEQ ID NO: 127059 - DNA, 25 bp, Saccharomyces pastorianus
ggttcagaatttattgcggcagtca

SEQ ID NO: 127060 - DNA, 25 bp, Saccharomyces pastorianus
gtacggttcagaatttattgcggca

SEQ ID NO: 127061 - DNA, 25 bp, Saccharomyces pastorianus
agctgctgagagaggcctttttctg

SEQ ID NO: 127062 - DNA, 25 bp, Saccharomyces pastorianus
aagattatggatgaagctgctgaga

SEQ ID NO: 127063 - DNA, 25 bp, Saccharomyces pastorianus
gacaaattattatcgtgaggaacag

SEQ ID NO: 127064 - DNA, 25 bp, Saccharomyces pastorianus
gcaattgctcaagttccagacaaat

SEQ ID NO: 127065 - DNA, 25 bp, Saccharomyces pastorianus
taagcaattgctcaagttccagaca

SEQ ID NO: 127066 - DNA, 25 bp, Saccharomyces pastorianus
gctcaagttccagacaaattattat

SEQ ID NO: 127067 - DNA, 25 bp, Saccharomyces pastorianus
tgctgtcttcagagctgataagcaa

SEQ ID NO: 127068 - DNA, 25 bp, Saccharomyces pastorianus
gaagctgctgagagaggcctttttc

SEQ ID NO: 127069 - DNA, 25 bp, Saccharomyces pastorianus
gttccagacaaattattatcgtgag

SEQ ID NO: 127070 - DNA, 25 bp, Saccharomyces pastorianus
tgagagaggcctttttctggaggat

SEQ ID NO: 127071 - DNA, 25 bp, Saccharomyces pastorianus
tcttcagagctgataagcaattgct

SEQ ID NO: 127072 - DNA, 25 bp, Saccharomyces pastorianus
aaagccacattctgattcggatatt

SEQ ID NO: 127073 - DNA, 25 bp, Saccharomyces pastorianus
gggtccaactattgcgcctgcaaat

SEQ ID NO: 127074 - DNA, 25 bp, Saccharomyces pastorianus
aaaggccctatcatcggaaatcaag

SEQ ID NO: 127075 - DNA, 25 bp, Saccharomyces pastorianus
ttcggtgtaccgctagaatcactta

SEQ ID NO: 127076 - DNA, 25 bp, Saccharomyces pastorianus
ggactaatatataacctccccgacg

SEQ ID NO: 127077 - DNA, 25 bp, Saccharomyces pastorianus
gcgccaatgcatatacgttatcgat

SEQ ID NO: 127078 - DNA, 25 bp, Saccharomyces pastorianus
aagacatggtccctgcgatagtgcg

SEQ ID NO: 127079 - DNA, 25 bp, Saccharomyces pastorianus
agtgttttaccaaaggccctatcat

SEQ ID NO: 127080 - DNA, 25 bp, Saccharomyces pastorianus
aggatcctgcaaacatttccatgat

SEQ ID NO: 127081 - DNA, 25 bp, Saccharomyces pastorianus
gtcgctgcctgatagtgttttacca

SEQ ID NO: 127082 - DNA, 25 bp, Saccharomyces pastorianus
gacgttaagggctcttgtctttcat

SEQ ID NO: 127083 - DNA, 25 bp, Saccharomyces pastorianus
cgaagtcgtcgcacgatggtggcac

SEQ ID NO: 127084 - DNA, 25 bp, Saccharomyces pastorianus
gtccaggagctctccaagcaatata

SEQ ID NO: 127085 - DNA, 25 bp, Saccharomyces pastorianus
atggtggcaccgacgatttggcgca

SEQ ID NO: 127086 - DNA, 25 bp, Saccharomyces pastorianus
tcagggttccacaaattcatcctta

SEQ ID NO: 127087 - DNA, 25 bp, Saccharomyces pastorianus
gtgccacagtaagtgcgaagtcgtc

SEQ ID NO: 127088 - DNA, 25 bp, Saccharomyces pastorianus
gacgatttggcgcacctttttagca

SEQ ID NO: 127089 - DNA, 25 bp, Saccharomyces pastorianus
cacctttttagcacgccagagatca

SEQ ID NO: 127090 - DNA, 25 bp, Saccharomyces pastorianus
agcactttttcaacattcagggttc

SEQ ID NO: 127091 - DNA, 25 bp, Saccharomyces pastorianus
gattcgatggcaagatggctcaagt

SEQ ID NO: 127092 - DNA, 25 bp, Saccharomyces pastorianus
cttgcagaaaatgtactccgagatt

SEQ ID NO: 127093 - DNA, 25 bp, Saccharomyces pastorianus
gaagaaaccagctagtgccacagta

SEQ ID NO: 127094 - DNA, 25 bp, Saccharomyces pastorianus
gaagagttttctcaagtcgcaaagt

SEQ ID NO: 127095 - DNA, 25 bp, Saccharomyces pastorianus
gttattgacttatccggtactcagg

SEQ ID NO: 127096 - DNA, 25 bp, Saccharomyces pastorianus
aacttctcagttttcccaggacatc

SEQ ID NO: 127097 - DNA, 25 bp, Saccharomyces pastorianus
gtactcaggtagacggtgcccgtgt

SEQ ID NO: 127098 - DNA, 25 bp, Saccharomyces pastorianus
gctttgtctggcgagatttccaagt

SEQ ID NO: 127099 - DNA, 25 bp, Saccharomyces pastorianus
aaggtggtcctcacaaccatactat

SEQ ID NO: 127100 - DNA, 25 bp, Saccharomyces pastorianus
gattctgccgttaagctcgctgaaa

SEQ ID NO: 127101 - DNA, 25 bp, Saccharomyces pastorianus
acggtgcccgtgtggagacaatttt

SEQ ID NO: 127102 - DNA, 25 bp, Saccharomyces pastorianus
ctatcggtgcaatggcagtggcatt

SEQ ID NO: 127103 - DNA, 25 bp, Saccharomyces pastorianus
aatctagtgaagtcgctgctttgtc

SEQ ID NO: 127104 - DNA, 25 bp, Saccharomyces pastorianus
aaagcaagcgatgtctccagaattc

SEQ ID NO: 127105 - DNA, 25 bp, Saccharomyces pastorianus
tccgttatctgctggttcttagtcc

SEQ ID NO: 127106 - DNA, 25 bp, Saccharomyces pastorianus
cgttatctgctggttcttagtccac

SEQ ID NO: 127107 - DNA, 25 bp, Saccharomyces pastorianus
gttcttagtccactgtctgttctgt

SEQ ID NO: 127108 - DNA, 25 bp, Saccharomyces pastorianus
ctgctggttcttagtccactgtctg

SEQ ID NO: 127109 - DNA, 25 bp, Saccharomyces pastorianus
ccccttctgtccaagagatagaata

SEQ ID NO: 127110 - DNA, 25 bp, Saccharomyces pastorianus
ttatctgctggttcttagtccactg

SEQ ID NO: 127111 - DNA, 25 bp, Saccharomyces pastorianus
gctggttcttagtccactgtctgtt

SEQ ID NO: 127112 - DNA, 25 bp, Saccharomyces pastorianus
ccttctgtccaagagatagaatata

SEQ ID NO: 127113 - DNA, 25 bp, Saccharomyces pastorianus
atctgctggttcttagtccactgtc

SEQ ID NO: 127114 - DNA, 25 bp, Saccharomyces pastorianus
tcttagtccactgtctgttctgtcc

SEQ ID NO: 127115 - DNA, 25 bp, Saccharomyces pastorianus
tggttcttagtccactgtctgttct

SEQ ID NO: 127116 - DNA, 25 bp, Saccharomyces pastorianus
atcacatttgaatcacggtctggat

SEQ ID NO: 127117 - DNA, 25 bp, Saccharomyces pastorianus
attttacacacatctcacgcagcaa

SEQ ID NO: 127118 - DNA, 25 bp, Saccharomyces pastorianus
caatgattcccaatgatgttacttc

SEQ ID NO: 127119 - DNA, 25 bp, Saccharomyces pastorianus
ttgtggcatttcttgggctatttat

SEQ ID NO: 127120 - DNA, 25 bp, Saccharomyces pastorianus
gtgtctttagcaatttaagcgcaaa

SEQ ID NO: 127121 - DNA, 25 bp, Saccharomyces pastorianus
agcacgagttttcagttcattggat

SEQ ID NO: 127122 - DNA, 25 bp, Saccharomyces pastorianus
acgcagcaaagcaaggttcaaggtt

SEQ ID NO: 127123 - DNA, 25 bp, Saccharomyces pastorianus
ccatggttggctgtttttgtggcat

SEQ ID NO: 127124 - DNA, 25 bp, Saccharomyces pastorianus
ataccacctacatacgacgaagctg

SEQ ID NO: 127125 - DNA, 25 bp, Saccharomyces pastorianus
ggctatttatcaccctgaagagtat

SEQ ID NO: 127126 - DNA, 25 bp, Saccharomyces pastorianus
gacgaagctgctgctgatatggccc

SEQ ID NO: 127127 - DNA, 25 bp, Saccharomyces pastorianus
tggcttggaagctagtgtttcagat

SEQ ID NO: 127128 - DNA, 25 bp, Saccharomyces pastorianus
ggtcttatggctatgtggacatttc

SEQ ID NO: 127129 - DNA, 25 bp, Saccharomyces pastorianus
caaacgccaataatgctcacatatt

SEQ ID NO: 127130 - DNA, 25 bp, Saccharomyces pastorianus
gtggacatttcattttctcgacatt

SEQ ID NO: 127131 - DNA, 25 bp, Saccharomyces pastorianus
ggtcctggaataccaatgaaatcat

SEQ ID NO: 127132 - DNA, 25 bp, Saccharomyces pastorianus
taccaagtttttctcaaacgccaat

SEQ ID NO: 127133 - DNA, 25 bp, Saccharomyces pastorianus
gctcacatattggtcgaaattgcta

SEQ ID NO: 127134 - DNA, 25 bp, Saccharomyces pastorianus
tgtttcagatgaatggtaccaagtt

SEQ ID NO: 127135 - DNA, 25 bp, Saccharomyces pastorianus
ttctcgacattggattagggcgctg

SEQ ID NO: 127136 - DNA, 25 bp, Saccharomyces pastorianus
agagccatggtcttatggctatgtg

SEQ ID NO: 127137 - DNA, 25 bp, Saccharomyces pastorianus
cgacattggattagggcgctggctt

SEQ ID NO: 127138 - DNA, 25 bp, Saccharomyces pastorianus
gagaaaattaatagcaccaaagagg

SEQ ID NO: 127139 - DNA, 25 bp, Saccharomyces pastorianus
aaactgaagggagccaccgctacca

SEQ ID NO: 127140 - DNA, 25 bp, Saccharomyces pastorianus
taccaccatgaccatcataataaaa

SEQ ID NO: 127141 - DNA, 25 bp, Saccharomyces pastorianus
aacgagaaaattaatagcaccaaag

SEQ ID NO: 127142 - DNA, 25 bp, Saccharomyces pastorianus
aggaaaactgaagggagccaccgct

SEQ ID NO: 127143 - DNA, 25 bp, Saccharomyces pastorianus
gaaaactgaagggagccaccgctac

SEQ ID NO: 127144 - DNA, 25 bp, Saccharomyces pastorianus
tgaagggagccaccgctaccaccat

SEQ ID NO: 127145 - DNA, 25 bp, Saccharomyces pastorianus
accaccatgaccatcataataaaaa

SEQ ID NO: 127146 - DNA, 25 bp, Saccharomyces pastorianus
ctaccaccatgaccatcataataaa

SEQ ID NO: 127147 - DNA, 25 bp, Saccharomyces pastorianus
gaggaaaactgaagggagccaccgc

SEQ ID NO: 127148 - DNA, 25 bp, Saccharomyces pastorianus
gctaccaccatgaccatcataataa

SEQ ID NO: 127149 - DNA, 25 bp, Saccharomyces pastorianus
ggcacatcagttagcattgggtcag

SEQ ID NO: 127150 - DNA, 25 bp, Saccharomyces pastorianus
cgtgacaccgaaaatttgccagatt

SEQ ID NO: 127151 - DNA, 25 bp, Saccharomyces pastorianus
ggcgggcttgattaacgatgattca

SEQ ID NO: 127152 - DNA, 25 bp, Saccharomyces pastorianus
aatagatacaccttccgtgacaccg

SEQ ID NO: 127153 - DNA, 25 bp, Saccharomyces pastorianus
taaaggcaatgaacgcccgtcctat

SEQ ID NO: 127154 - DNA, 25 bp, Saccharomyces pastorianus
gaaaagcattccagagacattgata

SEQ ID NO: 127155 - DNA, 25 bp, Saccharomyces pastorianus
actaaggaggcagcgatggcaatta

SEQ ID NO: 127156 - DNA, 25 bp, Saccharomyces pastorianus
ttgccagattggtttttagaagatg

SEQ ID NO: 127157 - DNA, 25 bp, Saccharomyces pastorianus
atgcgtgccgtagctcggttagaaa

SEQ ID NO: 127158 - DNA, 25 bp, Saccharomyces pastorianus
gagacattgatattgctactgttga

SEQ ID NO: 127159 - DNA, 25 bp, Saccharomyces pastorianus
tgaacgcccgtcctattaagaaggt

SEQ ID NO: 127160 - DNA, 25 bp, Saccharomyces pastorianus
aaacctcaattttggattttgtcag

SEQ ID NO: 127161 - DNA, 25 bp, Saccharomyces pastorianus
gattttgtcaggacggaagacccaa

SEQ ID NO: 127162 - DNA, 25 bp, Saccharomyces pastorianus
gacggaagacccaataagcatgctt

SEQ ID NO: 127163 - DNA, 25 bp, Saccharomyces pastorianus
ggctggacccaagattactggatcc

SEQ ID NO: 127164 - DNA, 25 bp, Saccharomyces pastorianus
aaggcaccaaagaggctggacccaa

SEQ ID NO: 127165 - DNA, 25 bp, Saccharomyces pastorianus
ggagtccaagatttataatcccgaa

SEQ ID NO: 127166 - DNA, 25 bp, Saccharomyces pastorianus
gtgtgtaaaggtttcaaggcaccaa

SEQ ID NO: 127167 - DNA, 25 bp, Saccharomyces pastorianus
ttgggttttccaacaattgtttgag

SEQ ID NO: 127168 - DNA, 25 bp, Saccharomyces pastorianus
gggcaacaaaatatggagtccaaga

SEQ ID NO: 127169 - DNA, 25 bp, Saccharomyces pastorianus
agttgaagccacaaaaccacccgca

SEQ ID NO: 127170 - DNA, 25 bp, Saccharomyces pastorianus
aatttactgtatcatgaaacctcaa

SEQ ID NO: 127171 - DNA, 25 bp, Saccharomyces pastorianus
gccgatgcccaatgttataactttt

SEQ ID NO: 127172 - DNA, 25 bp, Saccharomyces pastorianus
ttgcatccaaactctgtcctgtcaa

SEQ ID NO: 127173 - DNA, 25 bp, Saccharomyces pastorianus
aatgaagccgatgcccaatgttata

SEQ ID NO: 127174 - DNA, 25 bp, Saccharomyces pastorianus
tcgttcatcctttaagattattcag

SEQ ID NO: 127175 - DNA, 25 bp, Saccharomyces pastorianus
ctgtcctgtcaactccttaattatt

SEQ ID NO: 127176 - DNA, 25 bp, Saccharomyces pastorianus
atggccacttcttagaaaaatcgaa

SEQ ID NO: 127177 - DNA, 25 bp, Saccharomyces pastorianus
atacagtgttgcatgatggtgctcc

SEQ ID NO: 127178 - DNA, 25 bp, Saccharomyces pastorianus
actccttaattattggtgttgatat

SEQ ID NO: 127179 - DNA, 25 bp, Saccharomyces pastorianus
gaaaagtatggccacttcttagaaa

SEQ ID NO: 127180 - DNA, 25 bp, Saccharomyces pastorianus
aagacttggaaagctgatacagtgt

SEQ ID NO: 127181 - DNA, 25 bp, Saccharomyces pastorianus
gaaggttgttattgatctgtgtgct

SEQ ID NO: 127182 - DNA, 25 bp, Saccharomyces pastorianus
gttcttgttttgtactatgccccat

SEQ ID NO: 127183 - DNA, 25 bp, Saccharomyces pastorianus
gaaaacggtcacttcgacgtcgacg

SEQ ID NO: 127184 - DNA, 25 bp, Saccharomyces pastorianus
gccacatccgacgttttgattgcta

SEQ ID NO: 127185 - DNA, 25 bp, Saccharomyces pastorianus
aagattcctctgtcttccaattggt

SEQ ID NO: 127186 - DNA, 25 bp, Saccharomyces pastorianus
gaagtccgaatctgttgtgtaccaa

SEQ ID NO: 127187 - DNA, 25 bp, Saccharomyces pastorianus
tatttgccatccacgacatgactga

SEQ ID NO: 127188 - DNA, 25 bp, Saccharomyces pastorianus
gatccttggactctttattcgactt

SEQ ID NO: 127189 - DNA, 25 bp, Saccharomyces pastorianus
tccccaatcgtgaagtcccaagaga

SEQ ID NO: 127190 - DNA, 25 bp, Saccharomyces pastorianus
aagaactagctgatacctacgccaa

SEQ ID NO: 127191 - DNA, 25 bp, Saccharomyces pastorianus
aacaatcgtcttatacccaggtggt

SEQ ID NO: 127192 - DNA, 25 bp, Saccharomyces pastorianus
tcttgaaaggtgatgcctccccaat

SEQ ID NO: 127193 - DNA, 25 bp, Saccharomyces pastorianus
gcgcccatataaatatccgctatca

SEQ ID NO: 127194 - DNA, 25 bp, Saccharomyces pastorianus
atacaactctatcatacacaagatg

SEQ ID NO: 127195 - DNA, 25 bp, Saccharomyces pastorianus
aaatatccgctatcaacagaacccc

SEQ ID NO: 127196 - DNA, 25 bp, Saccharomyces pastorianus
atcatacacaagatgtcattcgacg

SEQ ID NO: 127197 - DNA, 25 bp, Saccharomyces pastorianus
aacaccaccactaatacaactctat

SEQ ID NO: 127198 - DNA, 25 bp, Saccharomyces pastorianus
accaccactaatacaactctatcat

SEQ ID NO: 127199 - DNA, 25 bp, Saccharomyces pastorianus
aactcagcttccgtaaaccacaaca

SEQ ID NO: 127200 - DNA, 25 bp, Saccharomyces pastorianus
catacacaagatgtcattcgacgac

SEQ ID NO: 127201 - DNA, 25 bp, Saccharomyces pastorianus
gtaaaccacaacaccaccactaata

SEQ ID NO: 127202 - DNA, 25 bp, Saccharomyces pastorianus
atcagtgcccaactcagcttccgta

SEQ ID NO: 127203 - DNA, 25 bp, Saccharomyces pastorianus
agtgcccaactcagcttccgtaaac

SEQ ID NO: 127204 - DNA, 25 bp, Saccharomyces pastorianus
caccccgcattataagtggtgtgcc

SEQ ID NO: 127205 - DNA, 25 bp, Saccharomyces pastorianus
gcaccccgcattataagtggtgtgc

SEQ ID NO: 127206 - DNA, 25 bp, Saccharomyces pastorianus
aattttagacgcggcgcttgcaccc

SEQ ID NO: 127207 - DNA, 25 bp, Saccharomyces pastorianus
tgcaccccgcattataagtggtgtg

SEQ ID NO: 127208 - DNA, 25 bp, Saccharomyces pastorianus
cttgcaccccgcattataagtggtg

SEQ ID NO: 127209 - DNA, 25 bp, Saccharomyces pastorianus
gcttgcaccccgcattataagtggt

SEQ ID NO: 127210 - DNA, 25 bp, Saccharomyces pastorianus
ttgcaccccgcattataagtggtgt

SEQ ID NO: 127211 - DNA, 25 bp, Saccharomyces pastorianus
aaaattttagacgcggcgcttgcac

SEQ ID NO: 127212 - DNA, 25 bp, Saccharomyces pastorianus
accccgcattataagtggtgtgccg

SEQ ID NO: 127213 - DNA, 25 bp, Saccharomyces pastorianus
aaaaattttagacgcggcgcttgca

SEQ ID NO: 127214 - DNA, 25 bp, Saccharomyces pastorianus
gcggcgcttgcaccccgcattataa

SEQ ID NO: 127215 - DNA, 25 bp, Saccharomyces pastorianus
aatgagctcaagcacttgcctacta

SEQ ID NO: 127216 - DNA, 25 bp, Saccharomyces pastorianus
gccgcttgccgcgatattgatcaag

SEQ ID NO: 127217 - DNA, 25 bp, Saccharomyces pastorianus
agatctatgctgagacacgccttag

SEQ ID NO: 127218 - DNA, 25 bp, Saccharomyces pastorianus
gagatctgcgtatttagccgccgtg

SEQ ID NO: 127219 - DNA, 25 bp, Saccharomyces pastorianus
ggtgcgcgcgatttctaggagatct

SEQ ID NO: 127220 - DNA, 25 bp, Saccharomyces pastorianus
tacacctttccagttgtcatccgaa

SEQ ID NO: 127221 - DNA, 25 bp, Saccharomyces pastorianus
ttgcttttgcaacagtacaggtcca

SEQ ID NO: 127222 - DNA, 25 bp, Saccharomyces pastorianus
acgtgtctcagggatgttcttgggt

SEQ ID NO: 127223 - DNA, 25 bp, Saccharomyces pastorianus
aatactaccccggtttcagatctat

SEQ ID NO: 127224 - DNA, 25 bp, Saccharomyces pastorianus
ttgacgactcgacaggtctacgtga

SEQ ID NO: 127225 - DNA, 25 bp, Saccharomyces pastorianus
gtcatccgaagtgctgtcgcatatt

SEQ ID NO: 127226 - DNA, 25 bp, Saccharomyces pastorianus
acatctgacgacctgtttgggtttc

SEQ ID NO: 127227 - DNA, 25 bp, Saccharomyces pastorianus
atttccgtatatgctctgttaactt

SEQ ID NO: 127228 - DNA, 25 bp, Saccharomyces pastorianus
agatcatactttctccatggagcaa

SEQ ID NO: 127229 - DNA, 25 bp, Saccharomyces pastorianus
gacggagcgcggtgttttactagcc

SEQ ID NO: 127230 - DNA, 25 bp, Saccharomyces pastorianus
gaagtccaagattcccgatgatttg

SEQ ID NO: 127231 - DNA, 25 bp, Saccharomyces pastorianus
aaaggtcttcctatgattccggcgt

SEQ ID NO: 127232 - DNA, 25 bp, Saccharomyces pastorianus
tttgggtttctagcacgtcgtacac

SEQ ID NO: 127233 - DNA, 25 bp, Saccharomyces pastorianus
agtatcacccggacgagttggccaa

SEQ ID NO: 127234 - DNA, 25 bp, Saccharomyces pastorianus
acgtcgtacactggcctttatgaag

SEQ ID NO: 127235 - DNA, 25 bp, Saccharomyces pastorianus
ggttcactttctcataccctgtaga

SEQ ID NO: 127236 - DNA, 25 bp, Saccharomyces pastorianus
aaaggtctagctccaccaaaggaag

SEQ ID NO: 127237 - DNA, 25 bp, Saccharomyces pastorianus
ttccttgttggactgcttaccgata

SEQ ID NO: 127238 - DNA, 25 bp, Saccharomyces pastorianus
tttcagtttgattgtacctccagga

SEQ ID NO: 127239 - DNA, 25 bp, Saccharomyces pastorianus
catcctgggacccttccttgttgga

SEQ ID NO: 127240 - DNA, 25 bp, Saccharomyces pastorianus
gactgcttaccgataaaacgcataa

SEQ ID NO: 127241 - DNA, 25 bp, Saccharomyces pastorianus
aatccacgttttttagtatgttcag

SEQ ID NO: 127242 - DNA, 25 bp, Saccharomyces pastorianus
gcggtttcaagatcagttttcagtt

SEQ ID NO: 127243 - DNA, 25 bp, Saccharomyces pastorianus
ggattatcactaggtggcctgtccg

SEQ ID NO: 127244 - DNA, 25 bp, Saccharomyces pastorianus
tgatgctatcattgcctgtgctaaa

SEQ ID NO: 127245 - DNA, 25 bp, Saccharomyces pastorianus
ggcctgtccgcggtttcaagatcag

SEQ ID NO: 127246 - DNA, 25 bp, Saccharomyces pastorianus
tcttctttttgcttttgatgctatc

SEQ ID NO: 127247 - DNA, 25 bp, Saccharomyces pastorianus
attgcctgtgctaaactgtttggat

SEQ ID NO: 127248 - DNA, 25 bp, Saccharomyces pastorianus
gtcggcgatgcattggaccaattca

SEQ ID NO: 127249 - DNA, 25 bp, Saccharomyces pastorianus
agtacttcgttcgttccaagagctg

SEQ ID NO: 127250 - DNA, 25 bp, Saccharomyces pastorianus
gaggaatcatccactgaactcgctt

SEQ ID NO: 127251 - DNA, 25 bp, Saccharomyces pastorianus
aagccgctaccgtcaatgttgcaga

SEQ ID NO: 127252 - DNA, 25 bp, Saccharomyces pastorianus
aattcatgatatccctaccacctgt

SEQ ID NO: 127253 - DNA, 25 bp, Saccharomyces pastorianus
taacctgattttagccgcattgaga

SEQ ID NO: 127254 - DNA, 25 bp, Saccharomyces pastorianus
gaaattgtcgctaacgaagccgcta

SEQ ID NO: 127255 - DNA, 25 bp, Saccharomyces pastorianus
gtgataacgttaccggtgaagccaa

SEQ ID NO: 127256 - DNA, 25 bp, Saccharomyces pastorianus
tgtccttcggaggtgacactaacct

SEQ ID NO: 127257 - DNA, 25 bp, Saccharomyces pastorianus
taccacctgttcctcaacaagaaga

SEQ ID NO: 127258 - DNA, 25 bp, Saccharomyces pastorianus
tgcagaaggtactttggccgccaag

SEQ ID NO: 127259 - DNA, 25 bp, Saccharomyces pastorianus
aaagacgctacctctcaagaaaatg

SEQ ID NO: 127260 - DNA, 25 bp, Saccharomyces pastorianus
gaaagatggctttgaatcggcagta

SEQ ID NO: 127261 - DNA, 25 bp, Saccharomyces pastorianus
ataacagcaatggtcctcaaaggag

SEQ ID NO: 127262 - DNA, 25 bp, Saccharomyces pastorianus
ttaccaaggacgcaacgctcgtaat

SEQ ID NO: 127263 - DNA, 25 bp, Saccharomyces pastorianus
gtaataacgccggtatgcctcagaa

SEQ ID NO: 127264 - DNA, 25 bp, Saccharomyces pastorianus
taatcatcaccacagtcatcaccat

SEQ ID NO: 127265 - DNA, 25 bp, Saccharomyces pastorianus
taaggtccaaactctccaaggatgg

SEQ ID NO: 127266 - DNA, 25 bp, Saccharomyces pastorianus
ttatccagtccaaccagtgttaatg

SEQ ID NO: 127267 - DNA, 25 bp, Saccharomyces pastorianus
aaaagatccggttccaagaatggtg

SEQ ID NO: 127268 - DNA, 25 bp, Saccharomyces pastorianus
aaaactgcagcatcgtcgacatcgt

SEQ ID NO: 127269 - DNA, 25 bp, Saccharomyces pastorianus
cttgaccgtcgacaattacttaagg

SEQ ID NO: 127270 - DNA, 25 bp, Saccharomyces pastorianus
tggtggacacttgggacatgtgttt

SEQ ID NO: 127271 - DNA, 25 bp, Saccharomyces pastorianus
atgttgtgcaaggtgtggtggacac

SEQ ID NO: 127272 - DNA, 25 bp, Saccharomyces pastorianus
gaaggctggaaacagttgctaaact

SEQ ID NO: 127273 - DNA, 25 bp, Saccharomyces pastorianus
cacttgggacatgtgtttgaaggtg

SEQ ID NO: 127274 - DNA, 25 bp, Saccharomyces pastorianus
gcgagggtggagatatgttgtgcaa

SEQ ID NO: 127275 - DNA, 25 bp, Saccharomyces pastorianus
acagttgctaaacttgcccaaggac

SEQ ID NO: 127276 - DNA, 25 bp, Saccharomyces pastorianus
tttgaaggtgaaggctggaaacagt

SEQ ID NO: 127277 - DNA, 25 bp, Saccharomyces pastorianus
taaacttgcccaaggacaccagaca

SEQ ID NO: 127278 - DNA, 25 bp, Saccharomyces pastorianus
gttgctaaacttgcccaaggacacc

SEQ ID NO: 127279 - DNA, 25 bp, Saccharomyces pastorianus
gaaacagttgctaaacttgcccaag

SEQ ID NO: 127280 - DNA, 25 bp, Saccharomyces pastorianus
gctaaacttgcccaaggacaccaga

SEQ ID NO: 127281 - DNA, 25 bp, Saccharomyces pastorianus
ggagcaggctgtacgctataactgt

SEQ ID NO: 127282 - DNA, 25 bp, Saccharomyces pastorianus
gaagaaacattgtactgacgcagta

SEQ ID NO: 127283 - DNA, 25 bp, Saccharomyces pastorianus
gaagtggaacgatgccctgacacca

SEQ ID NO: 127284 - DNA, 25 bp, Saccharomyces pastorianus
ttcgacgctcgtagtggatggcccg

SEQ ID NO: 127285 - DNA, 25 bp, Saccharomyces pastorianus
gaaaggcccaacaccggtgcgtatt

SEQ ID NO: 127286 - DNA, 25 bp, Saccharomyces pastorianus
gtatttacacaccaacgagtccggt

SEQ ID NO: 127287 - DNA, 25 bp, Saccharomyces pastorianus
ttcgagcaaggccaagttcgacgct

SEQ ID NO: 127288 - DNA, 25 bp, Saccharomyces pastorianus
actgtacgcaggacttttccaggga

SEQ ID NO: 127289 - DNA, 25 bp, Saccharomyces pastorianus
aactgcgacagaccgttgtattcga

SEQ ID NO: 127290 - DNA, 25 bp, Saccharomyces pastorianus
gatggcccgcattctacgaagaggt

SEQ ID NO: 127291 - DNA, 25 bp, Saccharomyces pastorianus
tgccctgacaccattgcagctgatg

SEQ ID NO: 127292 - DNA, 25 bp, Saccharomyces pastorianus
ggacagcacgaatccttcaattttt

SEQ ID NO: 127293 - DNA, 25 bp, Saccharomyces pastorianus
actccagttcattctcagctttggc

SEQ ID NO: 127294 - DNA, 25 bp, Saccharomyces pastorianus
tggcaagttcctacctgggcaataa

SEQ ID NO: 127295 - DNA, 25 bp, Saccharomyces pastorianus
ggtggttcctcctttggagcactgg

SEQ ID NO: 127296 - DNA, 25 bp, Saccharomyces pastorianus
cagctttggcttccatggcaagttc

SEQ ID NO: 127297 - DNA, 25 bp, Saccharomyces pastorianus
ggagcactggcttctatggcaagct

SEQ ID NO: 127298 - DNA, 25 bp, Saccharomyces pastorianus
agggacaatctggtggtgctttttc

SEQ ID NO: 127299 - DNA, 25 bp, Saccharomyces pastorianus
tatggcaagctcttttatgcattcc

SEQ ID NO: 127300 - DNA, 25 bp, Saccharomyces pastorianus
atttttctggcaacttttctcaaca

SEQ ID NO: 127301 - DNA, 25 bp, Saccharomyces pastorianus
tacggcggaaaccagaactccaatg

SEQ ID NO: 127302 - DNA, 25 bp, Saccharomyces pastorianus
atggctcaatcttacttaggtggtg

SEQ ID NO: 127303 - DNA, 25 bp, Saccharomyces pastorianus
cactcataccgatggatggtgtctg

SEQ ID NO: 127304 - DNA, 25 bp, Saccharomyces pastorianus
taaaattctggccactcataccgat

SEQ ID NO: 127305 - DNA, 25 bp, Saccharomyces pastorianus
agtgtaatacacaaaagggttctat

SEQ ID NO: 127306 - DNA, 25 bp, Saccharomyces pastorianus
ccgatggatggtgtctggtagaaaa

SEQ ID NO: 127307 - DNA, 25 bp, Saccharomyces pastorianus
gcaggtcgagcctagattgacagac

SEQ ID NO: 127308 - DNA, 25 bp, Saccharomyces pastorianus
tgcctgcaggtcgagcctagattga

SEQ ID NO: 127309 - DNA, 25 bp, Saccharomyces pastorianus
gaatctcgctgggtgaaaaagttaa

SEQ ID NO: 127310 - DNA, 25 bp, Saccharomyces pastorianus
aaagggttctattcacgtcagtgtt

SEQ ID NO: 127311 - DNA, 25 bp, Saccharomyces pastorianus
cgagcctagattgacagacgaaata

SEQ ID NO: 127312 - DNA, 25 bp, Saccharomyces pastorianus
gaaataagaatctcgctgggtgaaa

SEQ ID NO: 127313 - DNA, 25 bp, Saccharomyces pastorianus
ttctggccactcataccgatggatg

SEQ ID NO: 127314 - DNA, 25 bp, Saccharomyces pastorianus
gcttgctacagaaatccaaattatt

SEQ ID NO: 127315 - DNA, 25 bp, Saccharomyces pastorianus
gaccaagcttgctacagaaatccaa

SEQ ID NO: 127316 - DNA, 25 bp, Saccharomyces pastorianus
caaatggagacggtagaagtttaat

SEQ ID NO: 127317 - DNA, 25 bp, Saccharomyces pastorianus
ttttacgatctacgctttttgaaat

SEQ ID NO: 127318 - DNA, 25 bp, Saccharomyces pastorianus
tatggttttaccaaatggagacggt

SEQ ID NO: 127319 - DNA, 25 bp, Saccharomyces pastorianus
aggatctactaaaacgctgaccaag

SEQ ID NO: 127320 - DNA, 25 bp, Saccharomyces pastorianus
aaaacgctgaccaagcttgctacag

SEQ ID NO: 127321 - DNA, 25 bp, Saccharomyces pastorianus
acgctgaccaagcttgctacagaaa

SEQ ID NO: 127322 - DNA, 25 bp, Saccharomyces pastorianus
caggaaaattggtgaatgacagtat

SEQ ID NO: 127323 - DNA, 25 bp, Saccharomyces pastorianus
gatctacgctttttgaaattatggt

SEQ ID NO: 127324 - DNA, 25 bp, Saccharomyces pastorianus
gtattttatttttacgatctacgct

SEQ ID NO: 127325 - DNA, 25 bp, Saccharomyces pastorianus
gaagagtctcccatagtttcaacca

SEQ ID NO: 127326 - DNA, 25 bp, Saccharomyces pastorianus
gaagatcctgatttgcctccacaag

SEQ ID NO: 127327 - DNA, 25 bp, Saccharomyces pastorianus
gagtgactttcctcaaggcgttggc

SEQ ID NO: 127328 - DNA, 25 bp, Saccharomyces pastorianus
aagcgcagagcccacactggtagtg

SEQ ID NO: 127329 - DNA, 25 bp, Saccharomyces pastorianus
tccgtctttgagttctttccaaggg

SEQ ID NO: 127330 - DNA, 25 bp, Saccharomyces pastorianus
ggaaccccgtaggatatccgatgtg

SEQ ID NO: 127331 - DNA, 25 bp, Saccharomyces pastorianus
aggcgttggcatatcacaggaatac

SEQ ID NO: 127332 - DNA, 25 bp, Saccharomyces pastorianus
actggtagtgaaacttccgtctttg

SEQ ID NO: 127333 - DNA, 25 bp, Saccharomyces pastorianus
ttactactgctaataatcggcgctc

SEQ ID NO: 127334 - DNA, 25 bp, Saccharomyces pastorianus
ggcgctcagtcttatctttgtatgc

SEQ ID NO: 127335 - DNA, 25 bp, Saccharomyces pastorianus
acgccagtgggttgggcctatacca

SEQ ID NO: 127336 - DNA, 25 bp, Saccharomyces pastorianus
gttattacttgtaaggctcggtaag

SEQ ID NO: 127337 - DNA, 25 bp, Saccharomyces pastorianus
tttcactaccagtgtgggctctgcg

SEQ ID NO: 127338 - DNA, 25 bp, Saccharomyces pastorianus
ttcccttggaaagaactcaaagacg

SEQ ID NO: 127339 - DNA, 25 bp, Saccharomyces pastorianus
ggagattggtttggatttttatcct

SEQ ID NO: 127340 - DNA, 25 bp, Saccharomyces pastorianus
aagacggaagtttcactaccagtgt

SEQ ID NO: 127341 - DNA, 25 bp, Saccharomyces pastorianus
aaggctctctttggtataggcccaa

SEQ ID NO: 127342 - DNA, 25 bp, Saccharomyces pastorianus
atgttttctccgacgctgctgttat

SEQ ID NO: 127343 - DNA, 25 bp, Saccharomyces pastorianus
ccgacgctgctgttattacttgtaa

SEQ ID NO: 127344 - DNA, 25 bp, Saccharomyces pastorianus
gtaaggttaccttagaaggctctct

SEQ ID NO: 127345 - DNA, 25 bp, Saccharomyces pastorianus
gtataggcccaacccactggcgttt

SEQ ID NO: 127346 - DNA, 25 bp, Saccharomyces pastorianus
gggctctgcgctttttgatattgga

SEQ ID NO: 127347 - DNA, 25 bp, Saccharomyces pastorianus
gtgatgttaaacaccaggtttttca

SEQ ID NO: 127348 - DNA, 25 bp, Saccharomyces pastorianus
atgtaggccctcgtatagtctcttt

SEQ ID NO: 127349 - DNA, 25 bp, Saccharomyces pastorianus
tagtagtttatgtaggccctcgtat

SEQ ID NO: 127350 - DNA, 25 bp, Saccharomyces pastorianus
attgcttccagccttctagtagttt

SEQ ID NO: 127351 - DNA, 25 bp, Saccharomyces pastorianus
taggccctcgtatagtctcttttca

SEQ ID NO: 127352 - DNA, 25 bp, Saccharomyces pastorianus
tgatcatattggtgatgttaaacac

SEQ ID NO: 127353 - DNA, 25 bp, Saccharomyces pastorianus
tccagccttctagtagtttatgtag

SEQ ID NO: 127354 - DNA, 25 bp, Saccharomyces pastorianus
gcttccagccttctagtagtttatg

SEQ ID NO: 127355 - DNA, 25 bp, Saccharomyces pastorianus
ttatgtaggccctcgtatagtctct

SEQ ID NO: 127356 - DNA, 25 bp, Saccharomyces pastorianus
gtttttcaacccgtattgcttccag

SEQ ID NO: 127357 - DNA, 25 bp, Saccharomyces pastorianus
gccctcgtatagtctcttttcaggt

SEQ ID NO: 127358 - DNA, 25 bp, Saccharomyces pastorianus
tactgaagaggaggtcgactacgtc

SEQ ID NO: 127359 - DNA, 25 bp, Saccharomyces pastorianus
ttctcacaagatttacggtccaaag

SEQ ID NO: 127360 - DNA, 25 bp, Saccharomyces pastorianus
tagtcaaaggtctattatccgctga

SEQ ID NO: 127361 - DNA, 25 bp, Saccharomyces pastorianus
ttagaacctttactatccggtggtg

SEQ ID NO: 127362 - DNA, 25 bp, Saccharomyces pastorianus
tatccagggtgtgttaacgtttctt

SEQ ID NO: 127363 - DNA, 25 bp, Saccharomyces pastorianus
tagcccattcttccatcagatttgg

SEQ ID NO: 127364 - DNA, 25 bp, Saccharomyces pastorianus
taccacgttgaacggatctccagat

SEQ ID NO: 127365 - DNA, 25 bp, Saccharomyces pastorianus
attatccgctgaacataccacgttg

SEQ ID NO: 127366 - DNA, 25 bp, Saccharomyces pastorianus
gtttctttcgcctacgtggaaggag

SEQ ID NO: 127367 - DNA, 25 bp, Saccharomyces pastorianus
gaaccttcttatgttttacatgcgc

SEQ ID NO: 127368 - DNA, 25 bp, Saccharomyces pastorianus
aggatgatgcattagcccattcttc

SEQ ID NO: 127369 - DNA, 25 bp, Saccharomyces pastorianus
ttctctctggaaacgcataccgata

SEQ ID NO: 127370 - DNA, 25 bp, Saccharomyces pastorianus
gcataccgatattcaggctgctgca

SEQ ID NO: 127371 - DNA, 25 bp, Saccharomyces pastorianus
gttagacgacaacttctctctggaa

SEQ ID NO: 127372 - DNA, 25 bp, Saccharomyces pastorianus
cctcctgcagcaggcgtgaagttag

SEQ ID NO: 127373 - DNA, 25 bp, Saccharomyces pastorianus
agtgcccgtgcgagtgcatccggta

SEQ ID NO: 127374 - DNA, 25 bp, Saccharomyces pastorianus
gtagtagcttctggtagcactgcaa

SEQ ID NO: 127375 - DNA, 25 bp, Saccharomyces pastorianus
gcactgcaatgagccatgcttatca

SEQ ID NO: 127376 - DNA, 25 bp, Saccharomyces pastorianus
tccagcggccacatatagggcttgt

SEQ ID NO: 127377 - DNA, 25 bp, Saccharomyces pastorianus
gtaagcaggagattctattcccctc

SEQ ID NO: 127378 - DNA, 25 bp, Saccharomyces pastorianus
ggtaccaccccagatgctgtagtag

SEQ ID NO: 127379 - DNA, 25 bp, Saccharomyces pastorianus
tcaagtttacaacgttccagcggcc

SEQ ID NO: 127380 - DNA, 25 bp, Saccharomyces pastorianus
taaagatgcttcgtacgcgtactta

SEQ ID NO: 127381 - DNA, 25 bp, Saccharomyces pastorianus
aactaaagcattgacgccagagcgt

SEQ ID NO: 127382 - DNA, 25 bp, Saccharomyces pastorianus
aaaccgtgttaggaaatgctcagaa

SEQ ID NO: 127383 - DNA, 25 bp, Saccharomyces pastorianus
aacccactgctgaatttccggtgga

SEQ ID NO: 127384 - DNA, 25 bp, Saccharomyces pastorianus
ggaaatacctccatgagtactgaca

SEQ ID NO: 127385 - DNA, 25 bp, Saccharomyces pastorianus
gaagaacttccaaatactccgcgaa

SEQ ID NO: 127386 - DNA, 25 bp, Saccharomyces pastorianus
gttcaagagtctcctagtggaccat

SEQ ID NO: 127387 - DNA, 25 bp, Saccharomyces pastorianus
aatctatgttttgcctcagagtagc

SEQ ID NO: 127388 - DNA, 25 bp, Saccharomyces pastorianus
tgggtttcccctagcaaaattgact

SEQ ID NO: 127389 - DNA, 25 bp, Saccharomyces pastorianus
aaaacctaccgaactgttagatgat

SEQ ID NO: 127390 - DNA, 25 bp, Saccharomyces pastorianus
cgccagagcgtaatactgtgtcttt

SEQ ID NO: 127391 - DNA, 25 bp, Saccharomyces pastorianus
acgagaagggcgtattcattagatt

SEQ ID NO: 127392 - DNA, 25 bp, Saccharomyces pastorianus
acgccaaaggtattcggctatccgc

SEQ ID NO: 127393 - DNA, 25 bp, Saccharomyces pastorianus
ggagaccctttatcacggttatagg

SEQ ID NO: 127394 - DNA, 25 bp, Saccharomyces pastorianus
tagaagactttcaatcagacccaga

SEQ ID NO: 127395 - DNA, 25 bp, Saccharomyces pastorianus
tatcacggttataggatcttcaaac

SEQ ID NO: 127396 - DNA, 25 bp, Saccharomyces pastorianus
tcaatcagacccagaaagacatgtt

SEQ ID NO: 127397 - DNA, 25 bp, Saccharomyces pastorianus
gatgctaacaattggagacccttta

SEQ ID NO: 127398 - DNA, 25 bp, Saccharomyces pastorianus
ttcggctatccgctcgtgataaaaa

SEQ ID NO: 127399 - DNA, 25 bp, Saccharomyces pastorianus
gaaagacatgttggcactggtgtaa

SEQ ID NO: 127400 - DNA, 25 bp, Saccharomyces pastorianus
caaaacctgtaactctagaagactt

SEQ ID NO: 127401 - DNA, 25 bp, Saccharomyces pastorianus
tccgctcgtgataaaaatgatgcta

SEQ ID NO: 127402 - DNA, 25 bp, Saccharomyces pastorianus
attcactccactttttcccaaatat

SEQ ID NO: 127403 - DNA, 25 bp, Saccharomyces pastorianus
aagcaaaactgctggcaacgccggt

SEQ ID NO: 127404 - DNA, 25 bp, Saccharomyces pastorianus
atctggccagattcgaatcctactg

SEQ ID NO: 127405 - DNA, 25 bp, Saccharomyces pastorianus
ctggtgcttacttgtacctgtcaaa

SEQ ID NO: 127406 - DNA, 25 bp, Saccharomyces pastorianus
gaatcctactgttgaaccgacgaaa

SEQ ID NO: 127407 - DNA, 25 bp, Saccharomyces pastorianus
cgattactgccgtgggtcaattctc

SEQ ID NO: 127408 - DNA, 25 bp, Saccharomyces pastorianus
gcaacgccggttgctgaggcaaatg

SEQ ID NO: 127409 - DNA, 25 bp, Saccharomyces pastorianus
catttcttggacgttcactgcagga

SEQ ID NO: 127410 - DNA, 25 bp, Saccharomyces pastorianus
gggtcaattctccacattagtttac

SEQ ID NO: 127411 - DNA, 25 bp, Saccharomyces pastorianus
tattgtcattgctttccactataac

SEQ ID NO: 127412 - DNA, 25 bp, Saccharomyces pastorianus
ggtagcatcaacatcatctggccag

SEQ ID NO: 127413 - DNA, 25 bp, Saccharomyces pastorianus
tacctagacctaatagagaatagtg

SEQ ID NO: 127414 - DNA, 25 bp, Saccharomyces pastorianus
gaatagtggaaagaacaatggcaaa

SEQ ID NO: 127415 - DNA, 25 bp, Saccharomyces pastorianus
attcgtactcattacttcaaaaatc

SEQ ID NO: 127416 - DNA, 25 bp, Saccharomyces pastorianus
gagctgcaaaattagatgcaataga

SEQ ID NO: 127417 - DNA, 25 bp, Saccharomyces pastorianus
aacaatggcaaaatattcgtactca

SEQ ID NO: 127418 - DNA, 25 bp, Saccharomyces pastorianus
aaatattcgtactcattacttcaaa

SEQ ID NO: 127419 - DNA, 25 bp, Saccharomyces pastorianus
aacgtgaaatatacctagacctaat

SEQ ID NO: 127420 - DNA, 25 bp, Saccharomyces pastorianus
gcaatagaaacactacttattacag

SEQ ID NO: 127421 - DNA, 25 bp, Saccharomyces pastorianus
gaaatatacctagacctaatagaga

SEQ ID NO: 127422 - DNA, 25 bp, Saccharomyces pastorianus
actacttattacagatagtgtacta

SEQ ID NO: 127423 - DNA, 25 bp, Saccharomyces pastorianus
tggcaaaatattcgtactcattact

SEQ ID NO: 127424 - DNA, 25 bp, Saccharomyces pastorianus
agtgcccatcatgcggccattataa

SEQ ID NO: 127425 - DNA, 25 bp, Saccharomyces pastorianus
agaagaaattaagccgagacaagag

SEQ ID NO: 127426 - DNA, 25 bp, Saccharomyces pastorianus
tagaccaaagagtcctatatcctgg

SEQ ID NO: 127427 - DNA, 25 bp, Saccharomyces pastorianus
agagataccaaatacaccaaggatt

SEQ ID NO: 127428 - DNA, 25 bp, Saccharomyces pastorianus
tcatatatggaaaacgcataccgct

SEQ ID NO: 127429 - DNA, 25 bp, Saccharomyces pastorianus
gagtcctatatcctggtagaagaga

SEQ ID NO: 127430 - DNA, 25 bp, Saccharomyces pastorianus
gattcaccatttgaataagtgccca

SEQ ID NO: 127431 - DNA, 25 bp, Saccharomyces pastorianus
gacaagaggaggaactttccgaact

SEQ ID NO: 127432 - DNA, 25 bp, Saccharomyces pastorianus
gagagccaatacactgtgtatgtat

SEQ ID NO: 127433 - DNA, 25 bp, Saccharomyces pastorianus
ggaaaacgcataccgctaaagaaga

SEQ ID NO: 127434 - DNA, 25 bp, Saccharomyces pastorianus
gaataagtgcccatcatgcggccat

SEQ ID NO: 127435 - DNA, 25 bp, Saccharomyces pastorianus
gctaggaaatccttcactgcaggtt

SEQ ID NO: 127436 - DNA, 25 bp, Saccharomyces pastorianus
tccaccgttggttgagagaaaagct

SEQ ID NO: 127437 - DNA, 25 bp, Saccharomyces pastorianus
gctacaacaagatcataaggacact

SEQ ID NO: 127438 - DNA, 25 bp, Saccharomyces pastorianus
acaaaattgtgcctaccactgcaat

SEQ ID NO: 127439 - DNA, 25 bp, Saccharomyces pastorianus
ggtaaacaattagcatttcacaaaa

SEQ ID NO: 127440 - DNA, 25 bp, Saccharomyces pastorianus
ttgtgcctaccactgcaattgggtg

SEQ ID NO: 127441 - DNA, 25 bp, Saccharomyces pastorianus
aaacaactgggatctatccaccgtt

SEQ ID NO: 127442 - DNA, 25 bp, Saccharomyces pastorianus
ttcactgcaggttccaggccaaaaa

SEQ ID NO: 127443 - DNA, 25 bp, Saccharomyces pastorianus
gggatctatccaccgttggttgaga

SEQ ID NO: 127444 - DNA, 25 bp, Saccharomyces pastorianus
atggtattctactagcagttcctaa

SEQ ID NO: 127445 - DNA, 25 bp, Saccharomyces pastorianus
tggttggtaccgctaggaaatcctt

SEQ ID NO: 127446 - DNA, 25 bp, Saccharomyces pastorianus
atctgtcccttgcatcaggtttgaa

SEQ ID NO: 127447 - DNA, 25 bp, Saccharomyces pastorianus
ggccaaagtcctattctactgagaa

SEQ ID NO: 127448 - DNA, 25 bp, Saccharomyces pastorianus
atgtagatgctcactctggtgtctt

SEQ ID NO: 127449 - DNA, 25 bp, Saccharomyces pastorianus
agggcatttggtattcttgctcaat

SEQ ID NO: 127450 - DNA, 25 bp, Saccharomyces pastorianus
gatcctcgttatatggctcagcgta

SEQ ID NO: 127451 - DNA, 25 bp, Saccharomyces pastorianus
attgatcactgatagggccatcggt

SEQ ID NO: 127452 - DNA, 25 bp, Saccharomyces pastorianus
gtagcacctggcgtattgactgaac

SEQ ID NO: 127453 - DNA, 25 bp, Saccharomyces pastorianus
tcagcgtaagtttgccatggaccat

SEQ ID NO: 127454 - DNA, 25 bp, Saccharomyces pastorianus
agtcattcccggttatggtcatgct

SEQ ID NO: 127455 - DNA, 25 bp, Saccharomyces pastorianus
ggccatcggtgcttccattgaaagg

SEQ ID NO: 127456 - DNA, 25 bp, Saccharomyces pastorianus
atcttgtgggctcagcactatcatc

SEQ ID NO: 127457 - DNA, 25 bp, Saccharomyces pastorianus
atcgccccagaggaatatatcaaag

SEQ ID NO: 127458 - DNA, 25 bp, Saccharomyces pastorianus
tggcaatgagaactggtagacaatt

SEQ ID NO: 127459 - DNA, 25 bp, Saccharomyces pastorianus
aaatattcaccttagtggaggcgtt

SEQ ID NO: 127460 - DNA, 25 bp, Saccharomyces pastorianus
gttagatcccgttccgtacagaaga

SEQ ID NO: 127461 - DNA, 25 bp, Saccharomyces pastorianus
ttagtggaggcgtttgcggttcatc

SEQ ID NO: 127462 - DNA, 25 bp, Saccharomyces pastorianus
gtttgcggttcatcgccgtacatcg

SEQ ID NO: 127463 - DNA, 25 bp, Saccharomyces pastorianus
actgcttacgcacgatggtgtgcta

SEQ ID NO: 127464 - DNA, 25 bp, Saccharomyces pastorianus
tacagactttggtaacagcgaatgt

SEQ ID NO: 127465 - DNA, 25 bp, Saccharomyces pastorianus
gatcccgttccgtacagaagaatta

SEQ ID NO: 127466 - DNA, 25 bp, Saccharomyces pastorianus
gcctgagaacttactgcttacgcac

SEQ ID NO: 127467 - DNA, 25 bp, Saccharomyces pastorianus
gagtttgatccaagacccgtagata

SEQ ID NO: 127468 - DNA, 25 bp, Saccharomyces pastorianus
agtatggtcgctgtcaagaagtcct

SEQ ID NO: 127469 - DNA, 25 bp, Saccharomyces pastorianus
actctttttgcaggcttcatgaagc

SEQ ID NO: 127470 - DNA, 25 bp, Saccharomyces pastorianus
tgcatttcttcttcattacaccata

SEQ ID NO: 127471 - DNA, 25 bp, Saccharomyces pastorianus
ttgccgccggaaaactagaatatat

SEQ ID NO: 127472 - DNA, 25 bp, Saccharomyces pastorianus
aagcgtagaacatccgaatcagcag

SEQ ID NO: 127473 - DNA, 25 bp, Saccharomyces pastorianus
tattgtgcaggtggcgatctattca

SEQ ID NO: 127474 - DNA, 25 bp, Saccharomyces pastorianus
ataaatatccagaaggcgctcccac

SEQ ID NO: 127475 - DNA, 25 bp, Saccharomyces pastorianus
aacaagaatcctcctactctttttg

SEQ ID NO: 127476 - DNA, 25 bp, Saccharomyces pastorianus
gatctattcactttggtcgttgccg

SEQ ID NO: 127477 - DNA, 25 bp, Saccharomyces pastorianus
gcagattgtttcttcaagcagctta

SEQ ID NO: 127478 - DNA, 25 bp, Saccharomyces pastorianus
agtggcgctttaaatggtcctgaaa

SEQ ID NO: 127479 - DNA, 25 bp, Saccharomyces pastorianus
gacgagccatcagagtctggtgttg

SEQ ID NO: 127480 - DNA, 25 bp, Saccharomyces pastorianus
ggtgagagcaaatcctctaccaaaa

SEQ ID NO: 127481 - DNA, 25 bp, Saccharomyces pastorianus
caaagtctgagagcaagtttcccac

SEQ ID NO: 127482 - DNA, 25 bp, Saccharomyces pastorianus
gaaaattacggcgactccctgatca

SEQ ID NO: 127483 - DNA, 25 bp, Saccharomyces pastorianus
gaggataaggctagcgaaccaatta

SEQ ID NO: 127484 - DNA, 25 bp, Saccharomyces pastorianus
ggacgaaatcccctcagtatataat

SEQ ID NO: 127485 - DNA, 25 bp, Saccharomyces pastorianus
gactccctgatcaaagacgagccat

SEQ ID NO: 127486 - DNA, 25 bp, Saccharomyces pastorianus
taagcattttttcaacttggacgaa

SEQ ID NO: 127487 - DNA, 25 bp, Saccharomyces pastorianus
gtttcccaccggaatcctagaattg

SEQ ID NO: 127488 - DNA, 25 bp, Saccharomyces pastorianus
tgcttttatatttcagggacttaca

SEQ ID NO: 127489 - DNA, 25 bp, Saccharomyces pastorianus
aagcgtgtgtcgaaaccagggacga

SEQ ID NO: 127490 - DNA, 25 bp, Saccharomyces pastorianus
gatccaggtgaaggcaactacaata

SEQ ID NO: 127491 - DNA, 25 bp, Saccharomyces pastorianus
gtaagttccaagttttgagtgagca

SEQ ID NO: 127492 - DNA, 25 bp, Saccharomyces pastorianus
atggctaagctcatgggcaatacga

SEQ ID NO: 127493 - DNA, 25 bp, Saccharomyces pastorianus
cgactcgcccagctattttattaag

SEQ ID NO: 127494 - DNA, 25 bp, Saccharomyces pastorianus
agagcactcggattctatgtatgaa

SEQ ID NO: 127495 - DNA, 25 bp, Saccharomyces pastorianus
agttacttagttgttgatccaggtg

SEQ ID NO: 127496 - DNA, 25 bp, Saccharomyces pastorianus
tgaaacatccggaatgcacgacatt

SEQ ID NO: 127497 - DNA, 25 bp, Saccharomyces pastorianus
cggtcatatgagtgaaccggaatat

SEQ ID NO: 127498 - DNA, 25 bp, Saccharomyces pastorianus
taaccgatacggagctacaagttgg

SEQ ID NO: 127499 - DNA, 25 bp, Saccharomyces pastorianus
gcacgacattgatccttctgacgat

SEQ ID NO: 127500 - DNA, 25 bp, Saccharomyces pastorianus
atacgtacgttagtgaaacatccgg

SEQ ID NO: 127501 - DNA, 25 bp, Saccharomyces pastorianus
gccttatcatccagattctcagttg

SEQ ID NO: 127502 - DNA, 25 bp, Saccharomyces pastorianus
atgtcctatcattctccgtttatat

SEQ ID NO: 127503 - DNA, 25 bp, Saccharomyces pastorianus
tggccctactatcactaacagctag

SEQ ID NO: 127504 - DNA, 25 bp, Saccharomyces pastorianus
gttgcatacgcatttgttccaatgg

SEQ ID NO: 127505 - DNA, 25 bp, Saccharomyces pastorianus
gccttttcttccacatttatcatta

SEQ ID NO: 127506 - DNA, 25 bp, Saccharomyces pastorianus
gcccatgtttgggtcgttgcatacg

SEQ ID NO: 127507 - DNA, 25 bp, Saccharomyces pastorianus
tacaggaattcctcagccttatcat

SEQ ID NO: 127508 - DNA, 25 bp, Saccharomyces pastorianus
gtatgcagatttcggaccaggtcca

SEQ ID NO: 127509 - DNA, 25 bp, Saccharomyces pastorianus
tcgtatttttctgcattaggccaag

SEQ ID NO: 127510 - DNA, 25 bp, Saccharomyces pastorianus
agattgagacggttcttgccttttc

SEQ ID NO: 127511 - DNA, 25 bp, Saccharomyces pastorianus
tatattatctttgtccttgcccatg

SEQ ID NO: 127512 - DNA, 25 bp, Saccharomyces pastorianus
ttgcgctagtaatcttgatacatga

SEQ ID NO: 127513 - DNA, 25 bp, Saccharomyces pastorianus
ggaatatactaggagttctcttcaa

SEQ ID NO: 127514 - DNA, 25 bp, Saccharomyces pastorianus
gcgctagtaatcttgatacatgatt

SEQ ID NO: 127515 - DNA, 25 bp, Saccharomyces pastorianus
gatacatgattcgagaaaagcaaca

SEQ ID NO: 127516 - DNA, 25 bp, Saccharomyces pastorianus
acttgcgctagtaatcttgatacat

SEQ ID NO: 127517 - DNA, 25 bp, Saccharomyces pastorianus
aggagttctcttcaaggatagagga

SEQ ID NO: 127518 - DNA, 25 bp, Saccharomyces pastorianus
gattcgagaaaagcaacaatattat

SEQ ID NO: 127519 - DNA, 25 bp, Saccharomyces pastorianus
tactaggagttctcttcaaggatag

SEQ ID NO: 127520 - DNA, 25 bp, Saccharomyces pastorianus
gtaatcttgatacatgattcgagaa

SEQ ID NO: 127521 - DNA, 25 bp, Saccharomyces pastorianus
cggaatatactaggagttctcttca

SEQ ID NO: 127522 - DNA, 25 bp, Saccharomyces pastorianus
ccacttgcgctagtaatcttgatac

SEQ ID NO: 127523 - DNA, 25 bp, Saccharomyces pastorianus
agtcgctatcgaaaatataatatct

SEQ ID NO: 127524 - DNA, 25 bp, Saccharomyces pastorianus
tatctatgcttatctatattgagaa

SEQ ID NO: 127525 - DNA, 25 bp, Saccharomyces pastorianus
gcttatctatattgagaaatggatg

SEQ ID NO: 127526 - DNA, 25 bp, Saccharomyces pastorianus
atctatgcttatctatattgagaaa

SEQ ID NO: 127527 - DNA, 25 bp, Saccharomyces pastorianus
atatctatgcttatctatattgaga

SEQ ID NO: 127528 - DNA, 25 bp, Saccharomyces pastorianus
cctaataataaagtcgctatcgaaa

SEQ ID NO: 127529 - DNA, 25 bp, Saccharomyces pastorianus
tctatgcttatctatattgagaaat

SEQ ID NO: 127530 - DNA, 25 bp, Saccharomyces pastorianus
atgcttatctatattgagaaatgga

SEQ ID NO: 127531 - DNA, 25 bp, Saccharomyces pastorianus
ctatgcttatctatattgagaaatg

SEQ ID NO: 127532 - DNA, 25 bp, Saccharomyces pastorianus
gtcgctatcgaaaatataatatcta

SEQ ID NO: 127533 - DNA, 25 bp, Saccharomyces pastorianus
gctatcgaaaatataatatctatgc

SEQ ID NO: 127534 - DNA, 25 bp, Saccharomyces pastorianus
gtctaggaatccccataatggaatc

SEQ ID NO: 127535 - DNA, 25 bp, Saccharomyces pastorianus
tatgagaaatgggtgaatgttgaga

SEQ ID NO: 127536 - DNA, 25 bp, Saccharomyces pastorianus
agggtctaggaatccccataatgga

SEQ ID NO: 127537 - DNA, 25 bp, Saccharomyces pastorianus
atgagaaatgggtgaatgttgagat

SEQ ID NO: 127538 - DNA, 25 bp, Saccharomyces pastorianus
tcctcgagggtctaggaatccccat

SEQ ID NO: 127539 - DNA, 25 bp, Saccharomyces pastorianus
cctcgagggtctaggaatccccata

SEQ ID NO: 127540 - DNA, 25 bp, Saccharomyces pastorianus
ggtctaggaatccccataatggaat

SEQ ID NO: 127541 - DNA, 25 bp, Saccharomyces pastorianus
ctaggaatccccataatggaatcta

SEQ ID NO: 127542 - DNA, 25 bp, Saccharomyces pastorianus
ctcgagggtctaggaatccccataa

SEQ ID NO: 127543 - DNA, 25 bp, Saccharomyces pastorianus
gggtctaggaatccccataatggaa

SEQ ID NO: 127544 - DNA, 25 bp, Saccharomyces pastorianus
gagggtctaggaatccccataatgg

SEQ ID NO: 127545 - DNA, 25 bp, Saccharomyces pastorianus
gtgaatgttgagataattgttggga

SEQ ID NO: 127546 - DNA, 25 bp, Saccharomyces pastorianus
gggtgaatgttgagataattgttgg

SEQ ID NO: 127547 - DNA, 25 bp, Saccharomyces pastorianus
agaaatgggtgaatgttgagataat

SEQ ID NO: 127548 - DNA, 25 bp, Saccharomyces pastorianus
tcctcaaggatataggaatcctcaa

SEQ ID NO: 127549 - DNA, 25 bp, Saccharomyces pastorianus
aatgggtgaatgttgagataattgt

SEQ ID NO: 127550 - DNA, 25 bp, Saccharomyces pastorianus
caaaatggaatatatatttctacat

SEQ ID NO: 127551 - DNA, 25 bp, Saccharomyces pastorianus
tgggtgaatgttgagataattgttg

SEQ ID NO: 127552 - DNA, 25 bp, Saccharomyces pastorianus
atgggtgaatgttgagataattgtt

SEQ ID NO: 127553 - DNA, 25 bp, Saccharomyces pastorianus
gaaatgggtgaatgttgagataatt

SEQ ID NO: 127554 - DNA, 25 bp, Saccharomyces pastorianus
aaatgggtgaatgttgagataattg

SEQ ID NO: 127555 - DNA, 25 bp, Saccharomyces pastorianus
gagaaatgggtgaatgttgagataa

SEQ ID NO: 127556 - DNA, 25 bp, Saccharomyces pastorianus
ggaaactcgttccttggcggctttg

SEQ ID NO: 127557 - DNA, 25 bp, Saccharomyces pastorianus
taaagtactagatcctactggcggg

SEQ ID NO: 127558 - DNA, 25 bp, Saccharomyces pastorianus
ggctttgcagtttcttatgccctaa

SEQ ID NO: 127559 - DNA, 25 bp, Saccharomyces pastorianus
tatgtgggaacattgctgcaggcgc

SEQ ID NO: 127560 - DNA, 25 bp, Saccharomyces pastorianus
ttcacagtccggtcttcaatatgat

SEQ ID NO: 127561 - DNA, 25 bp, Saccharomyces pastorianus
atgtgtattctacgatgcggtgccc

SEQ ID NO: 127562 - DNA, 25 bp, Saccharomyces pastorianus
cattcccagatctttgcgactttga

SEQ ID NO: 127563 - DNA, 25 bp, Saccharomyces pastorianus
tgtctagcattagcgcatcgtttcg

SEQ ID NO: 127564 - DNA, 25 bp, Saccharomyces pastorianus
accgaggtacgatccaattgctaaa

SEQ ID NO: 127565 - DNA, 25 bp, Saccharomyces pastorianus
gaacggacgaacctatgaccatttc

SEQ ID NO: 127566 - DNA, 25 bp, Saccharomyces pastorianus
ggtgccctcggaagcatatcggtaa

SEQ ID NO: 127567 - DNA, 25 bp, Saccharomyces pastorianus
ataatgattgataagcctgttctgc

SEQ ID NO: 127568 - DNA, 25 bp, Saccharomyces pastorianus
tagtcagcgtccctaggcgttccgt

SEQ ID NO: 127569 - DNA, 25 bp, Saccharomyces pastorianus
gttgaggaacgtatgggctccagta

SEQ ID NO: 127570 - DNA, 25 bp, Saccharomyces pastorianus
gaacgtatgggctccagtagtagaa

SEQ ID NO: 127571 - DNA, 25 bp, Saccharomyces pastorianus
aagcctgttctgcaggagcttactg

SEQ ID NO: 127572 - DNA, 25 bp, Saccharomyces pastorianus
ggcgttccgttaagactataatgat

SEQ ID NO: 127573 - DNA, 25 bp, Saccharomyces pastorianus
tgatgggcctagtcagcgtccctag

SEQ ID NO: 127574 - DNA, 25 bp, Saccharomyces pastorianus
tccctaggcgttccgttaagactat

SEQ ID NO: 127575 - DNA, 25 bp, Saccharomyces pastorianus
ttgctattagatcatgttgaggaac

SEQ ID NO: 127576 - DNA, 25 bp, Saccharomyces pastorianus
agaatgatgggcctagtcagcgtcc

SEQ ID NO: 127577 - DNA, 25 bp, Saccharomyces pastorianus
tatgggctccagtagtagaatgatg

SEQ ID NO: 127578 - DNA, 25 bp, Saccharomyces pastorianus
ctagagggttcaatgcacttatgct

SEQ ID NO: 127579 - DNA, 25 bp, Saccharomyces pastorianus
aattgccaaggctatctttgacagg

SEQ ID NO: 127580 - DNA, 25 bp, Saccharomyces pastorianus
gacaggaggattctctcatcaccat

SEQ ID NO: 127581 - DNA, 25 bp, Saccharomyces pastorianus
gaagctgttccagagagcccaagag

SEQ ID NO: 127582 - DNA, 25 bp, Saccharomyces pastorianus
cttgctaattgcagtcagccgtgat

SEQ ID NO: 127583 - DNA, 25 bp, Saccharomyces pastorianus
tcaaccagacggtgaggctatcttt

SEQ ID NO: 127584 - DNA, 25 bp, Saccharomyces pastorianus
gaagatgcggctcctgaaacaaaag

SEQ ID NO: 127585 - DNA, 25 bp, Saccharomyces pastorianus
acttatgctgtgtacctgcatggta

SEQ ID NO: 127586 - DNA, 25 bp, Saccharomyces pastorianus
acccaaggtgtgatatgccaacgtc

SEQ ID NO: 127587 - DNA, 25 bp, Saccharomyces pastorianus
gagagactgcaatccacgaacccga

SEQ ID NO: 127588 - DNA, 25 bp, Saccharomyces pastorianus
atcaccatgctacggacgatgtgga

SEQ ID NO: 127589 - DNA, 25 bp, Saccharomyces pastorianus
gaacaagggctccagattgactaga

SEQ ID NO: 127590 - DNA, 25 bp, Saccharomyces pastorianus
accacatggcctggatatgcacatt

SEQ ID NO: 127591 - DNA, 25 bp, Saccharomyces pastorianus
attgtgatgttcttcattgcggaga

SEQ ID NO: 127592 - DNA, 25 bp, Saccharomyces pastorianus
gaatttttcgctttcttcacttatg

SEQ ID NO: 127593 - DNA, 25 bp, Saccharomyces pastorianus
ccacgtccaggttagcaagtctatc

SEQ ID NO: 127594 - DNA, 25 bp, Saccharomyces pastorianus
gaacgatacgctatcaagcttttta

SEQ ID NO: 127595 - DNA, 25 bp, Saccharomyces pastorianus
gcagtgtttgcagtctttggcttta

SEQ ID NO: 127596 - DNA, 25 bp, Saccharomyces pastorianus
aggctttagggcttaatccaccaca

SEQ ID NO: 127597 - DNA, 25 bp, Saccharomyces pastorianus
cttatgcttctgatgtaggttggac

SEQ ID NO: 127598 - DNA, 25 bp, Saccharomyces pastorianus
ttcaagctgaatttaaccacgtcca

SEQ ID NO: 127599 - DNA, 25 bp, Saccharomyces pastorianus
actagatatgccttagctcctgtat

SEQ ID NO: 127600 - DNA, 25 bp, Saccharomyces pastorianus
gccacatcctgcatgtttattcgaa

SEQ ID NO: 127601 - DNA, 25 bp, Saccharomyces pastorianus
gtttattcgaataccaaattagctc

SEQ ID NO: 127602 - DNA, 25 bp, Saccharomyces pastorianus
aaattagctcatcttcgttatttca

SEQ ID NO: 127603 - DNA, 25 bp, Saccharomyces pastorianus
cctgcatgtttattcgaataccaaa

SEQ ID NO: 127604 - DNA, 25 bp, Saccharomyces pastorianus
ttcgaataccaaattagctcatctt

SEQ ID NO: 127605 - DNA, 25 bp, Saccharomyces pastorianus
gatcccgactcttattccgatccct

SEQ ID NO: 127606 - DNA, 25 bp, Saccharomyces pastorianus
aataccaaattagctcatcttcgtt

SEQ ID NO: 127607 - DNA, 25 bp, Saccharomyces pastorianus
accaaattagctcatcttcgttatt

SEQ ID NO: 127608 - DNA, 25 bp, Saccharomyces pastorianus
acatcctgcatgtttattcgaatac

SEQ ID NO: 127609 - DNA, 25 bp, Saccharomyces pastorianus
ttccgccacatcctgcatgtttatt

SEQ ID NO: 127610 - DNA, 25 bp, Saccharomyces pastorianus
atcctgcatgtttattcgaatacca

SEQ ID NO: 127611 - DNA, 25 bp, Saccharomyces pastorianus
gccacatcctgcatgtttattcgaa

SEQ ID NO: 127612 - DNA, 25 bp, Saccharomyces pastorianus
gtttattcgaataccaaattagctc

SEQ ID NO: 127613 - DNA, 25 bp, Saccharomyces pastorianus
agctcatcttcgttatttcatcatc

SEQ ID NO: 127614 - DNA, 25 bp, Saccharomyces pastorianus
agtaagcaaagccatatcccgatcc

SEQ ID NO: 127615 - DNA, 25 bp, Saccharomyces pastorianus
catcctgcatgtttattcgaatacc

SEQ ID NO: 127616 - DNA, 25 bp, Saccharomyces pastorianus
cctgcatgtttattcgaataccaaa

SEQ ID NO: 127617 - DNA, 25 bp, Saccharomyces pastorianus
aaattagctcatcttcgttatttca

SEQ ID NO: 127618 - DNA, 25 bp, Saccharomyces pastorianus
gatcccgactcttattccgatccct

SEQ ID NO: 127619 - DNA, 25 bp, Saccharomyces pastorianus
gaataccaaattagctcatcttcgt

SEQ ID NO: 127620 - DNA, 25 bp, Saccharomyces pastorianus
accaaattagctcatcttcgttatt

SEQ ID NO: 127621 - DNA, 25 bp, Saccharomyces pastorianus
ttccgccacatcctgcatgtttatt

SEQ ID NO: 127622 - DNA, 25 bp, Saccharomyces pastorianus
aaaaccgctgcagcaacccttgtta

SEQ ID NO: 127623 - DNA, 25 bp, Saccharomyces pastorianus
ttgcgtctccctgcgcgatttgctg

SEQ ID NO: 127624 - DNA, 25 bp, Saccharomyces pastorianus
atggaaaaccgctgcagcaaccctt

SEQ ID NO: 127625 - DNA, 25 bp, Saccharomyces pastorianus
ggatccatctgacttactttccttg

SEQ ID NO: 127626 - DNA, 25 bp, Saccharomyces pastorianus
ttgttacatacagtcggatccatct

SEQ ID NO: 127627 - DNA, 25 bp, Saccharomyces pastorianus
gcaacccttgttacatacagtcgga

SEQ ID NO: 127628 - DNA, 25 bp, Saccharomyces pastorianus
gctgcagcaacccttgttacataca

SEQ ID NO: 127629 - DNA, 25 bp, Saccharomyces pastorianus
agtcggatccatctgacttactttc

SEQ ID NO: 127630 - DNA, 25 bp, Saccharomyces pastorianus
tctccctgcgcgatttgctggccat

SEQ ID NO: 127631 - DNA, 25 bp, Saccharomyces pastorianus
atctgacttactttccttgcgtctc

SEQ ID NO: 127632 - DNA, 25 bp, Saccharomyces pastorianus
gcagcaacccttgttacatacagtc

SEQ ID NO: 127633 - DNA, 25 bp, Saccharomyces pastorianus
cagggatacattgagccgttccaaa

SEQ ID NO: 127634 - DNA, 25 bp, Saccharomyces pastorianus
gggcgaaacatcaccatcatcaaga

SEQ ID NO: 127635 - DNA, 25 bp, Saccharomyces pastorianus
aactgagactctaccgggcgaaaca

SEQ ID NO: 127636 - DNA, 25 bp, Saccharomyces pastorianus
gatgcttatgaaccaactccgcgaa

SEQ ID NO: 127637 - DNA, 25 bp, Saccharomyces pastorianus
tgagccgttccaaaataccgaaatt

SEQ ID NO: 127638 - DNA, 25 bp, Saccharomyces pastorianus
gcgaaccccagagcagcgaagaagt

SEQ ID NO: 127639 - DNA, 25 bp, Saccharomyces pastorianus
agcagcatacaagctagcgctactg

SEQ ID NO: 127640 - DNA, 25 bp, Saccharomyces pastorianus
acaaccttttgtgtgatatttgcgg

SEQ ID NO: 127641 - DNA, 25 bp, Saccharomyces pastorianus
gggccatattttccacagggataca

SEQ ID NO: 127642 - DNA, 25 bp, Saccharomyces pastorianus
gaaatagccgctatgccatcttcgt

SEQ ID NO: 127643 - DNA, 25 bp, Saccharomyces pastorianus
caatgatgggactgggatgcttatg

SEQ ID NO: 127644 - DNA, 25 bp, Saccharomyces pastorianus
gtctctaacgtattttgggatcctg

SEQ ID NO: 127645 - DNA, 25 bp, Saccharomyces pastorianus
ccaggtgtattggaccctcgaatat

SEQ ID NO: 127646 - DNA, 25 bp, Saccharomyces pastorianus
tggacaatacccaatacaccacggt

SEQ ID NO: 127647 - DNA, 25 bp, Saccharomyces pastorianus
aaagctgctacccatatgtggccag

SEQ ID NO: 127648 - DNA, 25 bp, Saccharomyces pastorianus
gttatgtaccgaacgtagatgcctt

SEQ ID NO: 127649 - DNA, 25 bp, Saccharomyces pastorianus
gagaactccattttacttcgacgaa

SEQ ID NO: 127650 - DNA, 25 bp, Saccharomyces pastorianus
tacggagacctttcccaaccattgg

SEQ ID NO: 127651 - DNA, 25 bp, Saccharomyces pastorianus
ggtgatataccattcaaagctgcta

SEQ ID NO: 127652 - DNA, 25 bp, Saccharomyces pastorianus
aactgttcagtctgcatttgacggt

SEQ ID NO: 127653 - DNA, 25 bp, Saccharomyces pastorianus
gaccacagttaattctcggttatgt

SEQ ID NO: 127654 - DNA, 25 bp, Saccharomyces pastorianus
atgaggaattccatccaggtgtatt

SEQ ID NO: 127655 - DNA, 25 bp, Saccharomyces pastorianus
gccctcttggctacggcaatatcaa

SEQ ID NO: 127656 - DNA, 25 bp, Saccharomyces pastorianus
gtcgtcatacgctcactacagataa

SEQ ID NO: 127657 - DNA, 25 bp, Saccharomyces pastorianus
aagcggaattgtctcggtcgtcata

SEQ ID NO: 127658 - DNA, 25 bp, Saccharomyces pastorianus
tagatgctaatgacatgcccggaga

SEQ ID NO: 127659 - DNA, 25 bp, Saccharomyces pastorianus
gcattggcatgtttctgttttcata

SEQ ID NO: 127660 - DNA, 25 bp, Saccharomyces pastorianus
gcacagtatcttggaggcgtagcat

SEQ ID NO: 127661 - DNA, 25 bp, Saccharomyces pastorianus
gctatcgttcttgcttccatgaata

SEQ ID NO: 127662 - DNA, 25 bp, Saccharomyces pastorianus
tttgcttcagatatggtgcccaagt

SEQ ID NO: 127663 - DNA, 25 bp, Saccharomyces pastorianus
ggtactaatacgtgcagacccacta

SEQ ID NO: 127664 - DNA, 25 bp, Saccharomyces pastorianus
ggccgttaacgcatggtggtctata

SEQ ID NO: 127665 - DNA, 25 bp, Saccharomyces pastorianus
aaagtcgtcttttctgcacagtatc

SEQ ID NO: 127666 - DNA, 25 bp, Saccharomyces pastorianus
accgtgtcggtttcaccaatgcata

SEQ ID NO: 127667 - DNA, 25 bp, Saccharomyces pastorianus
gatttttgtatcacattacccattg

SEQ ID NO: 127668 - DNA, 25 bp, Saccharomyces pastorianus
gtgctatcatttgtttgcttgcaat

SEQ ID NO: 127669 - DNA, 25 bp, Saccharomyces pastorianus
gagagttgcacattttcaggaacac

SEQ ID NO: 127670 - DNA, 25 bp, Saccharomyces pastorianus
gtgtgttccacctaggatatggcta

SEQ ID NO: 127671 - DNA, 25 bp, Saccharomyces pastorianus
gacgaattgcccattagaagtgcta

SEQ ID NO: 127672 - DNA, 25 bp, Saccharomyces pastorianus
ggattaattatgtcgaccgtgtcgg

SEQ ID NO: 127673 - DNA, 25 bp, Saccharomyces pastorianus
cggtttggtgggatctatgttcagt

SEQ ID NO: 127674 - DNA, 25 bp, Saccharomyces pastorianus
gtcggaaacgatttgaccgtgtcta

SEQ ID NO: 127675 - DNA, 25 bp, Saccharomyces pastorianus
gcgcaattagattctttcaagcctt

SEQ ID NO: 127676 - DNA, 25 bp, Saccharomyces pastorianus
gttacattgtaggtatggtccccaa

SEQ ID NO: 127677 - DNA, 25 bp, Saccharomyces pastorianus
tactaacatttcctttccataattt

SEQ ID NO: 127678 - DNA, 25 bp, Saccharomyces pastorianus
tcttcgagagagacgacggttctaa

SEQ ID NO: 127679 - DNA, 25 bp, Saccharomyces pastorianus
gggtactactttgagcttagttcaa

SEQ ID NO: 127680 - DNA, 25 bp, Saccharomyces pastorianus
ttattcagcgctttggtatatgttg

SEQ ID NO: 127681 - DNA, 25 bp, Saccharomyces pastorianus
gagcttagttcaaaaggacattaat

SEQ ID NO: 127682 - DNA, 25 bp, Saccharomyces pastorianus
tttccataatttattcagcgctttg

SEQ ID NO: 127683 - DNA, 25 bp, Saccharomyces pastorianus
gggtatgttatttattcttcaattt

SEQ ID NO: 127684 - DNA, 25 bp, Saccharomyces pastorianus
gatgctgctaactatgtcttcgaga

SEQ ID NO: 127685 - DNA, 25 bp, Saccharomyces pastorianus
gagagacgacggttctaagggtact

SEQ ID NO: 127686 - DNA, 25 bp, Saccharomyces pastorianus
gtatatgttgaagcagatgctgcta

SEQ ID NO: 127687 - DNA, 25 bp, Saccharomyces pastorianus
tacttactttacaattacgcgttat

SEQ ID NO: 127688 - DNA, 25 bp, Saccharomyces pastorianus
ttctcgaaaatgtccatcgtcggcc

SEQ ID NO: 127689 - DNA, 25 bp, Saccharomyces pastorianus
gaattcactgaacatacttctgcta

SEQ ID NO: 127690 - DNA, 25 bp, Saccharomyces pastorianus
atacttctgctaataacaatcgtta

SEQ ID NO: 127691 - DNA, 25 bp, Saccharomyces pastorianus
actcaagctcgtttcttccatgcta

SEQ ID NO: 127692 - DNA, 25 bp, Saccharomyces pastorianus
gagatggccaaaccactgggtataa

SEQ ID NO: 127693 - DNA, 25 bp, Saccharomyces pastorianus
aaatgtccatcgtcggccgcattgg

SEQ ID NO: 127694 - DNA, 25 bp, Saccharomyces pastorianus
gtttcttccatgctactaccaagaa

SEQ ID NO: 127695 - DNA, 25 bp, Saccharomyces pastorianus
tatagtatcgcttcgcaaccaagaa

SEQ ID NO: 127696 - DNA, 25 bp, Saccharomyces pastorianus
cactgggtataatatcaccgttttc

SEQ ID NO: 127697 - DNA, 25 bp, Saccharomyces pastorianus
gccgcattggctctgaattcactga

SEQ ID NO: 127698 - DNA, 25 bp, Saccharomyces pastorianus
atgtttttacgtactcaagctcgtt

SEQ ID NO: 127699 - DNA, 25 bp, Saccharomyces pastorianus
ggtatcactgccgttcacgttaaga

SEQ ID NO: 127700 - DNA, 25 bp, Saccharomyces pastorianus
tgccgttcacgttaagatcagagct

SEQ ID NO: 127701 - DNA, 25 bp, Saccharomyces pastorianus
ctgcccaagatgttgccgctaagtg

SEQ ID NO: 127702 - DNA, 25 bp, Saccharomyces pastorianus
gcccaagatgttgccgctaagtgta

SEQ ID NO: 127703 - DNA, 25 bp, Saccharomyces pastorianus
tcactgccgttcacgttaagatcag

SEQ ID NO: 127704 - DNA, 25 bp, Saccharomyces pastorianus
agtcggtatcactgccgttcacgtt

SEQ ID NO: 127705 - DNA, 25 bp, Saccharomyces pastorianus
gtatcactgccgttcacgttaagat

SEQ ID NO: 127706 - DNA, 25 bp, Saccharomyces pastorianus
ccgttcacgttaagatcagagctac

SEQ ID NO: 127707 - DNA, 25 bp, Saccharomyces pastorianus
aagatgttgccgctaagtgtaagga

SEQ ID NO: 127708 - DNA, 25 bp, Saccharomyces pastorianus
cgctaagtgtaaggaagtcggtatc

SEQ ID NO: 127709 - DNA, 25 bp, Saccharomyces pastorianus
gttgccgctaagtgtaaggaagtcg

SEQ ID NO: 127710 - DNA, 25 bp, Saccharomyces pastorianus
aagataagcattcggtttcaggtaa

SEQ ID NO: 127711 - DNA, 25 bp, Saccharomyces pastorianus
ttcactaagttagacgcaggttaca

SEQ ID NO: 127712 - DNA, 25 bp, Saccharomyces pastorianus
ggagatgcgctgttatcacgactac

SEQ ID NO: 127713 - DNA, 25 bp, Saccharomyces pastorianus
gcaaaaggtcgcaatatctcaacat

SEQ ID NO: 127714 - DNA, 25 bp, Saccharomyces pastorianus
ggatacagcagagcctcatgagata

SEQ ID NO: 127715 - DNA, 25 bp, Saccharomyces pastorianus
ataacgccatttcgatcttcaatct

SEQ ID NO: 127716 - DNA, 25 bp, Saccharomyces pastorianus
taaccttagacatcagcggcttagt

SEQ ID NO: 127717 - DNA, 25 bp, Saccharomyces pastorianus
tcacgactacaatacgcttttaacc

SEQ ID NO: 127718 - DNA, 25 bp, Saccharomyces pastorianus
gctactgaagcagctctgtaccgaa

SEQ ID NO: 127719 - DNA, 25 bp, Saccharomyces pastorianus
ggaagacatacctgtcccagaaaag

SEQ ID NO: 127720 - DNA, 25 bp, Saccharomyces pastorianus
atgtttgggcacctatgcgagctaa

SEQ ID NO: 127721 - DNA, 25 bp, Saccharomyces pastorianus
actagtccaataagtcgtgcgcctc

SEQ ID NO: 127722 - DNA, 25 bp, Saccharomyces pastorianus
gatcgagttctatttctgcattact

SEQ ID NO: 127723 - DNA, 25 bp, Saccharomyces pastorianus
ttgcctccgcgccagatgcaatgag

SEQ ID NO: 127724 - DNA, 25 bp, Saccharomyces pastorianus
aacccagatggaaggccgttgctgc

SEQ ID NO: 127725 - DNA, 25 bp, Saccharomyces pastorianus
gttgctgccatttcagcatgctatt

SEQ ID NO: 127726 - DNA, 25 bp, Saccharomyces pastorianus
gacacgaagcacagctcgaagacac

SEQ ID NO: 127727 - DNA, 25 bp, Saccharomyces pastorianus
gaagacactcccagcatgaacaata

SEQ ID NO: 127728 - DNA, 25 bp, Saccharomyces pastorianus
atgctatttctcaaggcactcctac

SEQ ID NO: 127729 - DNA, 25 bp, Saccharomyces pastorianus
tattactacgccaagatcgagttct

SEQ ID NO: 127730 - DNA, 25 bp, Saccharomyces pastorianus
gaatgatccgttggcagctttggct

SEQ ID NO: 127731 - DNA, 25 bp, Saccharomyces pastorianus
gaaatcttctttccaaagcgcttca

SEQ ID NO: 127732 - DNA, 25 bp, Saccharomyces pastorianus
aaagcaggacgaaatttggacgaca

SEQ ID NO: 127733 - DNA, 25 bp, Saccharomyces pastorianus
aaggaactaacacgctctgttgaaa

SEQ ID NO: 127734 - DNA, 25 bp, Saccharomyces pastorianus
gacgacagcaaaaacagtggccaat

SEQ ID NO: 127735 - DNA, 25 bp, Saccharomyces pastorianus
ggaacatcctactcctgtaaaaatg

SEQ ID NO: 127736 - DNA, 25 bp, Saccharomyces pastorianus
aaacttatacatcagcaggctaccg

SEQ ID NO: 127737 - DNA, 25 bp, Saccharomyces pastorianus
atgatgaactagaagctcgcgctaa

SEQ ID NO: 127738 - DNA, 25 bp, Saccharomyces pastorianus
aggctaccggacttatcttgacgaa

SEQ ID NO: 127739 - DNA, 25 bp, Saccharomyces pastorianus
agagcatacgatccgaaagccctga

SEQ ID NO: 127740 - DNA, 25 bp, Saccharomyces pastorianus
gaatatcctttttacgcacagaaca

SEQ ID NO: 127741 - DNA, 25 bp, Saccharomyces pastorianus
agtggccaatgcagtcgaagtttcc

SEQ ID NO: 127742 - DNA, 25 bp, Saccharomyces pastorianus
gtgtattttcccattaccaaaagca

SEQ ID NO: 127743 - DNA, 25 bp, Saccharomyces pastorianus
atgcctatagtaatattcctcctca

SEQ ID NO: 127744 - DNA, 25 bp, Saccharomyces pastorianus
gttggccaaccaactcatgggcata

SEQ ID NO: 127745 - DNA, 25 bp, Saccharomyces pastorianus
ctatttcatctatcgatggctctat

SEQ ID NO: 127746 - DNA, 25 bp, Saccharomyces pastorianus
gctctataagaccatttgggcctga

SEQ ID NO: 127747 - DNA, 25 bp, Saccharomyces pastorianus
agtttggctctcaatggtctctcat

SEQ ID NO: 127748 - DNA, 25 bp, Saccharomyces pastorianus
atgcagctcgcaatggatggaaatt

SEQ ID NO: 127749 - DNA, 25 bp, Saccharomyces pastorianus
aatattcctcctcaacaaagaccgg

SEQ ID NO: 127750 - DNA, 25 bp, Saccharomyces pastorianus
gaacgaccaaacatcaatgcctata

SEQ ID NO: 127751 - DNA, 25 bp, Saccharomyces pastorianus
gggcctgattttcatcgtgatacct

SEQ ID NO: 127752 - DNA, 25 bp, Saccharomyces pastorianus
tgttcgtgaatctcaactctttcca

SEQ ID NO: 127753 - DNA, 25 bp, Saccharomyces pastorianus
tagtgctcctttaaccactttacca

SEQ ID NO: 127754 - DNA, 25 bp, Saccharomyces pastorianus
atcgagaacccatatctagatacca

SEQ ID NO: 127755 - DNA, 25 bp, Saccharomyces pastorianus
gaaaatgtccgaatactagaaagtt

SEQ ID NO: 127756 - DNA, 25 bp, Saccharomyces pastorianus
tttgcaaagaacatcgagaacccat

SEQ ID NO: 127757 - DNA, 25 bp, Saccharomyces pastorianus
tactaaaccttacagaggacaccgg

SEQ ID NO: 127758 - DNA, 25 bp, Saccharomyces pastorianus
gcattcaaatcaaaaactgggtttc

SEQ ID NO: 127759 - DNA, 25 bp, Saccharomyces pastorianus
gaagaataccagtttatctcgcatt

SEQ ID NO: 127760 - DNA, 25 bp, Saccharomyces pastorianus
aaaaacaataacaatcgctccagaa

SEQ ID NO: 127761 - DNA, 25 bp, Saccharomyces pastorianus
gataccaagggcctagagaatctaa

SEQ ID NO: 127762 - DNA, 25 bp, Saccharomyces pastorianus
atcggcggatgggttggtatttaat

SEQ ID NO: 127763 - DNA, 25 bp, Saccharomyces pastorianus
taccagtttatctcgcattcaaatc

SEQ ID NO: 127764 - DNA, 25 bp, Saccharomyces pastorianus
atcgctccagaattagcggacctct

SEQ ID NO: 127765 - DNA, 25 bp, Saccharomyces pastorianus
gagggctactgctgtggaactactg

SEQ ID NO: 127766 - DNA, 25 bp, Saccharomyces pastorianus
tgactgcagcgggaagagccttctt

SEQ ID NO: 127767 - DNA, 25 bp, Saccharomyces pastorianus
gagactatttcaagctcggcagtta

SEQ ID NO: 127768 - DNA, 25 bp, Saccharomyces pastorianus
ggaactactgatagacccttggatg

SEQ ID NO: 127769 - DNA, 25 bp, Saccharomyces pastorianus
gacaccgatgtatatggctccagag

SEQ ID NO: 127770 - DNA, 25 bp, Saccharomyces pastorianus
tcgaataccgcaactacccaataga

SEQ ID NO: 127771 - DNA, 25 bp, Saccharomyces pastorianus
gacgaccttggtctaacttggataa

SEQ ID NO: 127772 - DNA, 25 bp, Saccharomyces pastorianus
ggtgtttggttcaagaccccactat

SEQ ID NO: 127773 - DNA, 25 bp, Saccharomyces pastorianus
aatctggcgtggtgcatcgcgacat

SEQ ID NO: 127774 - DNA, 25 bp, Saccharomyces pastorianus
tggcatatttgcaccaatctggcgt

SEQ ID NO: 127775 - DNA, 25 bp, Saccharomyces pastorianus
atgtaccacgttgctgcaggtcgaa

SEQ ID NO: 127776 - DNA, 25 bp, Saccharomyces pastorianus
ggtatactccggtaacacttttgag

SEQ ID NO: 127777 - DNA, 25 bp, Saccharomyces pastorianus
gtgtatatatgtttgctgctcctga

SEQ ID NO: 127778 - DNA, 25 bp, Saccharomyces pastorianus
gcaatattctagtcaaggcgttcca

SEQ ID NO: 127779 - DNA, 25 bp, Saccharomyces pastorianus
cgcttttattcgactttctgtgcaa

SEQ ID NO: 127780 - DNA, 25 bp, Saccharomyces pastorianus
atattgctccaatttgccgttcgat

SEQ ID NO: 127781 - DNA, 25 bp, Saccharomyces pastorianus
ggtgcagaaaccgtgattccaaatg

SEQ ID NO: 127782 - DNA, 25 bp, Saccharomyces pastorianus
tgtggattttgacccgacgttcgaa

SEQ ID NO: 127783 - DNA, 25 bp, Saccharomyces pastorianus
caccaacatttgctaacgcttcaga

SEQ ID NO: 127784 - DNA, 25 bp, Saccharomyces pastorianus
gctcactattttttggtatactccg

SEQ ID NO: 127785 - DNA, 25 bp, Saccharomyces pastorianus
aggcgttccaaaattctgctgttta

SEQ ID NO: 127786 - DNA, 25 bp, Saccharomyces pastorianus
aaagcacccgatctactcttgaaat

SEQ ID NO: 127787 - DNA, 25 bp, Saccharomyces pastorianus
cttttcggtattcttcttgggcaca

SEQ ID NO: 127788 - DNA, 25 bp, Saccharomyces pastorianus
ttgggcacagtatcattgcacacct

SEQ ID NO: 127789 - DNA, 25 bp, Saccharomyces pastorianus
gggcacagtatcattgcacacctca

SEQ ID NO: 127790 - DNA, 25 bp, Saccharomyces pastorianus
ttcttcttgggcacagtatcattgc

SEQ ID NO: 127791 - DNA, 25 bp, Saccharomyces pastorianus
gtatcattgcacacctcacagttga

SEQ ID NO: 127792 - DNA, 25 bp, Saccharomyces pastorianus
tcggtattcttcttgggcacagtat

SEQ ID NO: 127793 - DNA, 25 bp, Saccharomyces pastorianus
atcattgcacacctcacagttgaac

SEQ ID NO: 127794 - DNA, 25 bp, Saccharomyces pastorianus
acagtatcattgcacacctcacagt

SEQ ID NO: 127795 - DNA, 25 bp, Saccharomyces pastorianus
ggtattcttcttgggcacagtatca

SEQ ID NO: 127796 - DNA, 25 bp, Saccharomyces pastorianus
tttcggtattcttcttgggcacagt

SEQ ID NO: 127797 - DNA, 25 bp, Saccharomyces pastorianus
cattgcacacctcacagttgaacgt

SEQ ID NO: 127798 - DNA, 25 bp, Saccharomyces pastorianus
ttgatcacaggcttctccactttct

SEQ ID NO: 127799 - DNA, 25 bp, Saccharomyces pastorianus
ttgcccctttatccttcatggtttt

SEQ ID NO: 127800 - DNA, 25 bp, Saccharomyces pastorianus
ttcgaggtcttttccactttctctg

SEQ ID NO: 127801 - DNA, 25 bp, Saccharomyces pastorianus
actttctttgcaggagttgccactg

SEQ ID NO: 127802 - DNA, 25 bp, Saccharomyces pastorianus
aattttgtacaacgacttgcccttg

SEQ ID NO: 127803 - DNA, 25 bp, Saccharomyces pastorianus
tgcatacctgatttgcccctcagaa

SEQ ID NO: 127804 - DNA, 25 bp, Saccharomyces pastorianus
actttctctgccttcttgatcacag

SEQ ID NO: 127805 - DNA, 25 bp, Saccharomyces pastorianus
attccgattattcctttgcatacct

SEQ ID NO: 127806 - DNA, 25 bp, Saccharomyces pastorianus
gacttgcccttgtgaagctcgattc

SEQ ID NO: 127807 - DNA, 25 bp, Saccharomyces pastorianus
gaatccacaaccagacttttcaaga

SEQ ID NO: 127808 - DNA, 25 bp, Saccharomyces pastorianus
aagctcgattccgttcgaggtcttt

SEQ ID NO: 127809 - DNA, 25 bp, Saccharomyces pastorianus
gccaccgaattcgtcaagttcatca

SEQ ID NO: 127810 - DNA, 25 bp, Saccharomyces pastorianus
aggagagctgccaccgaattcgtca

SEQ ID NO: 127811 - DNA, 25 bp, Saccharomyces pastorianus
gaacgggctttacgatgttcctcgt

SEQ ID NO: 127812 - DNA, 25 bp, Saccharomyces pastorianus
cgaattcgtcaagttcatcaatcca

SEQ ID NO: 127813 - DNA, 25 bp, Saccharomyces pastorianus
acgatgttcctcgtatcctggaaga

SEQ ID NO: 127814 - DNA, 25 bp, Saccharomyces pastorianus
accatttggtggcattactttccct

SEQ ID NO: 127815 - DNA, 25 bp, Saccharomyces pastorianus
attactttccctgctgacccagaag

SEQ ID NO: 127816 - DNA, 25 bp, Saccharomyces pastorianus
ttggtggcattactttccctgctga

SEQ ID NO: 127817 - DNA, 25 bp, Saccharomyces pastorianus
gacccagaagccaggagagctgcca

SEQ ID NO: 127818 - DNA, 25 bp, Saccharomyces pastorianus
gttcctcgtatcctggaagacatta

SEQ ID NO: 127819 - DNA, 25 bp, Saccharomyces pastorianus
gtgatgggcaaattcaccatattcc

SEQ ID NO: 127820 - DNA, 25 bp, Saccharomyces pastorianus
gacgtcctcattctcttacattgag

SEQ ID NO: 127821 - DNA, 25 bp, Saccharomyces pastorianus
caatcgcaatttactggaggcactt

SEQ ID NO: 127822 - DNA, 25 bp, Saccharomyces pastorianus
ggaggcacttttgtcatttttgcat

SEQ ID NO: 127823 - DNA, 25 bp, Saccharomyces pastorianus
aatttatcagagagcttccccaacc

SEQ ID NO: 127824 - DNA, 25 bp, Saccharomyces pastorianus
gttgattacctgattactcacaatg

SEQ ID NO: 127825 - DNA, 25 bp, Saccharomyces pastorianus
caggtttagttgattcattcgctca

SEQ ID NO: 127826 - DNA, 25 bp, Saccharomyces pastorianus
tattccttattacccacttacaatc

SEQ ID NO: 127827 - DNA, 25 bp, Saccharomyces pastorianus
ttccccaaccgattttatcgacaga

SEQ ID NO: 127828 - DNA, 25 bp, Saccharomyces pastorianus
attttatttccaccgttatgcaaag

SEQ ID NO: 127829 - DNA, 25 bp, Saccharomyces pastorianus
atttttgcattggacgtcctcattc

SEQ ID NO: 127830 - DNA, 25 bp, Saccharomyces pastorianus
atttccaatgataacgtccctgacg

SEQ ID NO: 127831 - DNA, 25 bp, Saccharomyces pastorianus
gagacagatttaaatgacccgacaa

SEQ ID NO: 127832 - DNA, 25 bp, Saccharomyces pastorianus
tgacccatcatcgagccaacaagtg

SEQ ID NO: 127833 - DNA, 25 bp, Saccharomyces pastorianus
agtcacaggtagcttttggaacaga

SEQ ID NO: 127834 - DNA, 25 bp, Saccharomyces pastorianus
gaaagtgttcgggttactcataaca

SEQ ID NO: 127835 - DNA, 25 bp, Saccharomyces pastorianus
gaaacttcgaatattgttcccaaga

SEQ ID NO: 127836 - DNA, 25 bp, Saccharomyces pastorianus
tgatatttcacgtattgttgccgct

SEQ ID NO: 127837 - DNA, 25 bp, Saccharomyces pastorianus
tggaactctcgatgataagggctat

SEQ ID NO: 127838 - DNA, 25 bp, Saccharomyces pastorianus
agcttagtctcaatggtcttctcga

SEQ ID NO: 127839 - DNA, 25 bp, Saccharomyces pastorianus
gactgatcctaactatactagctta

SEQ ID NO: 127840 - DNA, 25 bp, Saccharomyces pastorianus
taagacctaacgcttttgcacactt

SEQ ID NO: 127841 - DNA, 25 bp, Saccharomyces pastorianus
cagtttgtcactgctagctggtaaa

SEQ ID NO: 127842 - DNA, 25 bp, Saccharomyces pastorianus
atgtgataccccattgcgtgggtta

SEQ ID NO: 127843 - DNA, 25 bp, Saccharomyces pastorianus
aaccgaagtacttcccatatcaagt

SEQ ID NO: 127844 - DNA, 25 bp, Saccharomyces pastorianus
gcgtgggttatattataccgcattc

SEQ ID NO: 127845 - DNA, 25 bp, Saccharomyces pastorianus
gaaagttgttttacctgccaagact

SEQ ID NO: 127846 - DNA, 25 bp, Saccharomyces pastorianus
ttgtacccgatagccaacgaactaa

SEQ ID NO: 127847 - DNA, 25 bp, Saccharomyces pastorianus
gttatgtcttgtatgtgatacccca

SEQ ID NO: 127848 - DNA, 25 bp, Saccharomyces pastorianus
gatacgacgaagagcatttttcttg

SEQ ID NO: 127849 - DNA, 25 bp, Saccharomyces pastorianus
aagtgaacctatattgttatgccaa

SEQ ID NO: 127850 - DNA, 25 bp, Saccharomyces pastorianus
tacaatatgtgctactccttgtggg

SEQ ID NO: 127851 - DNA, 25 bp, Saccharomyces pastorianus
ctgccaagactgtcagaaaccttta

SEQ ID NO: 127852 - DNA, 25 bp, Saccharomyces pastorianus
aaggctctcggtaaatattatcatg

SEQ ID NO: 127853 - DNA, 25 bp, Saccharomyces pastorianus
acatgataatggttcgttttacgag

SEQ ID NO: 127854 - DNA, 25 bp, Saccharomyces pastorianus
aagcaatttgcaactttctcaagat

SEQ ID NO: 127855 - DNA, 25 bp, Saccharomyces pastorianus
tttgccaagctttatccggattttc

SEQ ID NO: 127856 - DNA, 25 bp, Saccharomyces pastorianus
tgttcaggaccggtttcgcaaagaa

SEQ ID NO: 127857 - DNA, 25 bp, Saccharomyces pastorianus
ggccattccccttcgatgtttcaaa

SEQ ID NO: 127858 - DNA, 25 bp, Saccharomyces pastorianus
gaatgaagtgactagtgccaaaact

SEQ ID NO: 127859 - DNA, 25 bp, Saccharomyces pastorianus
gaaatgaaatgtggccattcccctt

SEQ ID NO: 127860 - DNA, 25 bp, Saccharomyces pastorianus
gctgcatcaaaaaggctcaacattg

SEQ ID NO: 127861 - DNA, 25 bp, Saccharomyces pastorianus
gctcaacattgttcaggaccggttt

SEQ ID NO: 127862 - DNA, 25 bp, Saccharomyces pastorianus
aaacaaatcctaaacttgcagcaag

SEQ ID NO: 127863 - DNA, 25 bp, Saccharomyces pastorianus
agtttcggaactatacaggaagcaa

SEQ ID NO: 127864 - DNA, 25 bp, Saccharomyces pastorianus
agccggtcattcttgtagcatactc

SEQ ID NO: 127865 - DNA, 25 bp, Saccharomyces pastorianus
aacccaccgctgcttactaatgaag

SEQ ID NO: 127866 - DNA, 25 bp, Saccharomyces pastorianus
atgctcccggctcaaacgtggatat

SEQ ID NO: 127867 - DNA, 25 bp, Saccharomyces pastorianus
gaaggcaggcctttgcagtttcaag

SEQ ID NO: 127868 - DNA, 25 bp, Saccharomyces pastorianus
gtatatctcattgtcccatttccaa

SEQ ID NO: 127869 - DNA, 25 bp, Saccharomyces pastorianus
aaatgatcgataccaatgctcccgg

SEQ ID NO: 127870 - DNA, 25 bp, Saccharomyces pastorianus
aaaactttcagtctccgagtgccta

SEQ ID NO: 127871 - DNA, 25 bp, Saccharomyces pastorianus
taaaggttggtctaggcaccgacgt

SEQ ID NO: 127872 - DNA, 25 bp, Saccharomyces pastorianus
cgagtgcctatttcttgctacaatg

SEQ ID NO: 127873 - DNA, 25 bp, Saccharomyces pastorianus
acagcgtcgctgtggtatatctcat

SEQ ID NO: 127874 - DNA, 25 bp, Saccharomyces pastorianus
acagatgccgaagcgcgtgtgatta

SEQ ID NO: 127875 - DNA, 25 bp, Saccharomyces pastorianus
ttctgatcattggaaagtatcgcta

SEQ ID NO: 127876 - DNA, 25 bp, Saccharomyces pastorianus
attattcatgacttgggttccgatt

SEQ ID NO: 127877 - DNA, 25 bp, Saccharomyces pastorianus
tcatgacttgggttccgatttactt

SEQ ID NO: 127878 - DNA, 25 bp, Saccharomyces pastorianus
aagcataattgatggtgctcatgca

SEQ ID NO: 127879 - DNA, 25 bp, Saccharomyces pastorianus
acctggtggaaactatttctcgcca

SEQ ID NO: 127880 - DNA, 25 bp, Saccharomyces pastorianus
aacctggccagctaacctggtggaa

SEQ ID NO: 127881 - DNA, 25 bp, Saccharomyces pastorianus
ggtgctcatgcattgaaacttaaaa

SEQ ID NO: 127882 - DNA, 25 bp, Saccharomyces pastorianus
gagatcagttgtgctaaaagcataa

SEQ ID NO: 127883 - DNA, 25 bp, Saccharomyces pastorianus
ggtcgtatggattcgaatgagatca

SEQ ID NO: 127884 - DNA, 25 bp, Saccharomyces pastorianus
tggaaactatttctcgccaaattat

SEQ ID NO: 127885 - DNA, 25 bp, Saccharomyces pastorianus
gatggtgctcatgcattgaaactta

SEQ ID NO: 127886 - DNA, 25 bp, Saccharomyces pastorianus
tgaagaaggatgaaattatccggag

SEQ ID NO: 127887 - DNA, 25 bp, Saccharomyces pastorianus
gatgaaattatccggagacccgttt

SEQ ID NO: 127888 - DNA, 25 bp, Saccharomyces pastorianus
agaaggatgaaattatccggagacc

SEQ ID NO: 127889 - DNA, 25 bp, Saccharomyces pastorianus
aaggatgaaattatccggagacccg

SEQ ID NO: 127890 - DNA, 25 bp, Saccharomyces pastorianus
tatgaagaaggatgaaattatccgg

SEQ ID NO: 127891 - DNA, 25 bp, Saccharomyces pastorianus
gaagaaggatgaaattatccggaga

SEQ ID NO: 127892 - DNA, 25 bp, Saccharomyces pastorianus
aagaaggatgaaattatccggagac

SEQ ID NO: 127893 - DNA, 25 bp, Saccharomyces pastorianus
atgaagaaggatgaaattatccgga

SEQ ID NO: 127894 - DNA, 25 bp, Saccharomyces pastorianus
gaaggatgaaattatccggagaccc

SEQ ID NO: 127895 - DNA, 25 bp, Saccharomyces pastorianus
aggatgaaattatccggagacccgt

SEQ ID NO: 127896 - DNA, 25 bp, Saccharomyces pastorianus
ggatgaaattatccggagacccgtt

SEQ ID NO: 127897 - DNA, 25 bp, Saccharomyces pastorianus
ttgccaagattcagactccgatcgc

SEQ ID NO: 127898 - DNA, 25 bp, Saccharomyces pastorianus
tattgctgtctgtgctttgttttcc

SEQ ID NO: 127899 - DNA, 25 bp, Saccharomyces pastorianus
aaggtctggcctatggtgctagtag

SEQ ID NO: 127900 - DNA, 25 bp, Saccharomyces pastorianus
ttaccagtagactctgctatcgcaa

SEQ ID NO: 127901 - DNA, 25 bp, Saccharomyces pastorianus
atcttacgtcgtgccagttcaaaaa

SEQ ID NO: 127902 - DNA, 25 bp, Saccharomyces pastorianus
tgccagttcactcccataatgacta

SEQ ID NO: 127903 - DNA, 25 bp, Saccharomyces pastorianus
ttgaccggtcaacatcttttagaat

SEQ ID NO: 127904 - DNA, 25 bp, Saccharomyces pastorianus
attagacaagctatacactggcccc

SEQ ID NO: 127905 - DNA, 25 bp, Saccharomyces pastorianus
gactactggaggaaacttccgcttt

SEQ ID NO: 127906 - DNA, 25 bp, Saccharomyces pastorianus
aatgaagcgtatttggacccagttg

SEQ ID NO: 127907 - DNA, 25 bp, Saccharomyces pastorianus
agatcctcgctgtgggtcataatga

SEQ ID NO: 127908 - DNA, 25 bp, Saccharomyces pastorianus
agagaccagagtggcatccatgaac

SEQ ID NO: 127909 - DNA, 25 bp, Saccharomyces pastorianus
aatgctacccgaattgagcgaacat

SEQ ID NO: 127910 - DNA, 25 bp, Saccharomyces pastorianus
attcttcatgttggccattctacag

SEQ ID NO: 127911 - DNA, 25 bp, Saccharomyces pastorianus
gctttcgaatgcttctagtatggtt

SEQ ID NO: 127912 - DNA, 25 bp, Saccharomyces pastorianus
gttaactctcgtggaattggtacaa

SEQ ID NO: 127913 - DNA, 25 bp, Saccharomyces pastorianus
aaacttgttcttttgctttcgaatg

SEQ ID NO: 127914 - DNA, 25 bp, Saccharomyces pastorianus
ttatcgcctatttatgtcatcatga

SEQ ID NO: 127915 - DNA, 25 bp, Saccharomyces pastorianus
cggcgtattgccttgtcagagcgag

SEQ ID NO: 127916 - DNA, 25 bp, Saccharomyces pastorianus
gaatttctggactttctactacagt

SEQ ID NO: 127917 - DNA, 25 bp, Saccharomyces pastorianus
agaggttgaccctgcttctttctaa

SEQ ID NO: 127918 - DNA, 25 bp, Saccharomyces pastorianus
ggtgttttacgcacttcatggacat

SEQ ID NO: 127919 - DNA, 25 bp, Saccharomyces pastorianus
taatgctacgaatgttcctccgaat

SEQ ID NO: 127920 - DNA, 25 bp, Saccharomyces pastorianus
tgaccgccctaagtgcgtacattga

SEQ ID NO: 127921 - DNA, 25 bp, Saccharomyces pastorianus
aaacgtctctgtgtttggcactcaa

SEQ ID NO: 127922 - DNA, 25 bp, Saccharomyces pastorianus
tttgaggccatcactcagctgagat

SEQ ID NO: 127923 - DNA, 25 bp, Saccharomyces pastorianus
gaatgcagtggaacggcttttgagt

SEQ ID NO: 127924 - DNA, 25 bp, Saccharomyces pastorianus
aagaacattgatagtcccgtgaccg

SEQ ID NO: 127925 - DNA, 25 bp, Saccharomyces pastorianus
gagagtcatgcaaataagtaccgtt

SEQ ID NO: 127926 - DNA, 25 bp, Saccharomyces pastorianus
tctatgcatagttttgtccctgata

SEQ ID NO: 127927 - DNA, 25 bp, Saccharomyces pastorianus
gaagcgagcccttgcacgcaaagag

SEQ ID NO: 127928 - DNA, 25 bp, Saccharomyces pastorianus
gggccaaacggcaactccaatacaa

SEQ ID NO: 127929 - DNA, 25 bp, Saccharomyces pastorianus
gaggcgacgcaacagcggtatctct

SEQ ID NO: 127930 - DNA, 25 bp, Saccharomyces pastorianus
gaaggcatcaagttcagggcagcaa

SEQ ID NO: 127931 - DNA, 25 bp, Saccharomyces pastorianus
gaaggaccaatcacattcgaattta

SEQ ID NO: 127932 - DNA, 25 bp, Saccharomyces pastorianus
gaagccttgttccaggtagagagtt

SEQ ID NO: 127933 - DNA, 25 bp, Saccharomyces pastorianus
tcacggcattgcatttgcgagagct

SEQ ID NO: 127934 - DNA, 25 bp, Saccharomyces pastorianus
ttgcgagagcttttacggatatttc

SEQ ID NO: 127935 - DNA, 25 bp, Saccharomyces pastorianus
tacccttgcattcagtggcgaacag

SEQ ID NO: 127936 - DNA, 25 bp, Saccharomyces pastorianus
gatatttctgaagccttgttccagg

SEQ ID NO: 127937 - DNA, 25 bp, Saccharomyces pastorianus
gtggcgaacagctctgaaatagaca

SEQ ID NO: 127938 - DNA, 25 bp, Saccharomyces pastorianus
ggcagcaacaattacccttgcattc

SEQ ID NO: 127939 - DNA, 25 bp, Saccharomyces pastorianus
aattcaggaggcaattctatggaga

SEQ ID NO: 127940 - DNA, 25 bp, Saccharomyces pastorianus
aatgcattggacagaggttcacggc

SEQ ID NO: 127941 - DNA, 25 bp, Saccharomyces pastorianus
ttggtttcgattcccatcaactgga

SEQ ID NO: 127942 - DNA, 25 bp, Saccharomyces pastorianus
caggcttggcacttattatcggtat

SEQ ID NO: 127943 - DNA, 25 bp, Saccharomyces pastorianus
atcgtggtcccatttagcatcaact

SEQ ID NO: 127944 - DNA, 25 bp, Saccharomyces pastorianus
aatctacgtgggttacaggcttggc

SEQ ID NO: 127945 - DNA, 25 bp, Saccharomyces pastorianus
atcaactggatagtgtggcccttta

SEQ ID NO: 127946 - DNA, 25 bp, Saccharomyces pastorianus
ggctgccaaccaatcgagacatttt

SEQ ID NO: 127947 - DNA, 25 bp, Saccharomyces pastorianus
aaacaccaaatcgagcttcactgca

SEQ ID NO: 127948 - DNA, 25 bp, Saccharomyces pastorianus
agaaagcccgtcatgagccaatcat

SEQ ID NO: 127949 - DNA, 25 bp, Saccharomyces pastorianus
gtcatcattactggcacacttgggc

SEQ ID NO: 127950 - DNA, 25 bp, Saccharomyces pastorianus
tgatttaactttcgcattttcccac

SEQ ID NO: 127951 - DNA, 25 bp, Saccharomyces pastorianus
gacgacgcacctactgatttaactt

SEQ ID NO: 127952 - DNA, 25 bp, Saccharomyces pastorianus
acgttgcctccatcgaacaaactgt

SEQ ID NO: 127953 - DNA, 25 bp, Saccharomyces pastorianus
gttgcctccatcgaacaaactgtca

SEQ ID NO: 127954 - DNA, 25 bp, Saccharomyces pastorianus
ctttactacatgtgctgacaaccaa

SEQ ID NO: 127955 - DNA, 25 bp, Saccharomyces pastorianus
gctgacaaccaaaacaccgttcaat

SEQ ID NO: 127956 - DNA, 25 bp, Saccharomyces pastorianus
gaagaacctttactacatgtgctga

SEQ ID NO: 127957 - DNA, 25 bp, Saccharomyces pastorianus
tactacatgtgctgacaaccaaaac

SEQ ID NO: 127958 - DNA, 25 bp, Saccharomyces pastorianus
aacctttactacatgtgctgacaac

SEQ ID NO: 127959 - DNA, 25 bp, Saccharomyces pastorianus
gagaagaacctttactacatgtgct

SEQ ID NO: 127960 - DNA, 25 bp, Saccharomyces pastorianus
agaacctttactacatgtgctgaca

SEQ ID NO: 127961 - DNA, 25 bp, Saccharomyces pastorianus
tgcctccatcgaacaaactgtcact

SEQ ID NO: 127962 - DNA, 25 bp, Saccharomyces pastorianus
gtgctgacaaccaaaacaccgttca

SEQ ID NO: 127963 - DNA, 25 bp, Saccharomyces pastorianus
acgttgcctccatcgaacaaactgt

SEQ ID NO: 127964 - DNA, 25 bp, Saccharomyces pastorianus
acatcactatctctaacgctgttgg

SEQ ID NO: 127965 - DNA, 25 bp, Saccharomyces pastorianus
gttgcctccatcgaacaaactgtca

SEQ ID NO: 127966 - DNA, 25 bp, Saccharomyces pastorianus
ctttactacatgtgctgacaaccaa

SEQ ID NO: 127967 - DNA, 25 bp, Saccharomyces pastorianus
gcaaatcgaagacccatctgctgat

SEQ ID NO: 127968 - DNA, 25 bp, Saccharomyces pastorianus
gctgacaaccaaaacaccgttcaat

SEQ ID NO: 127969 - DNA, 25 bp, Saccharomyces pastorianus
gaagaacctttactacatgtgctga

SEQ ID NO: 127970 - DNA, 25 bp, Saccharomyces pastorianus
gagaagaacctttactacatgtgct

SEQ ID NO: 127971 - DNA, 25 bp, Saccharomyces pastorianus
gaacctttactacatgtgctgacaa

SEQ ID NO: 127972 - DNA, 25 bp, Saccharomyces pastorianus
tgcctccatcgaacaaactgtcact

SEQ ID NO: 127973 - DNA, 25 bp, Saccharomyces pastorianus
gtgctgacaaccaaaacaccgttca

SEQ ID NO: 127974 - DNA, 25 bp, Saccharomyces pastorianus
gctttcactccagaagaaagattga

SEQ ID NO: 127975 - DNA, 25 bp, Saccharomyces pastorianus
atctttcgttgctttcactccagaa

SEQ ID NO: 127976 - DNA, 25 bp, Saccharomyces pastorianus
ttcgttgctttcactccagaagaaa

SEQ ID NO: 127977 - DNA, 25 bp, Saccharomyces pastorianus
agagtcaccccatctttcgttgctt

SEQ ID NO: 127978 - DNA, 25 bp, Saccharomyces pastorianus
tcgttgctttcactccagaagaaag

SEQ ID NO: 127979 - DNA, 25 bp, Saccharomyces pastorianus
gagtcaccccatctttcgttgcttt

SEQ ID NO: 127980 - DNA, 25 bp, Saccharomyces pastorianus
ctttcgttgctttcactccagaaga

SEQ ID NO: 127981 - DNA, 25 bp, Saccharomyces pastorianus
gttgctttcactccagaagaaagat

SEQ ID NO: 127982 - DNA, 25 bp, Saccharomyces pastorianus
tttcgttgctttcactccagaagaa

SEQ ID NO: 127983 - DNA, 25 bp, Saccharomyces pastorianus
tctttcgttgctttcactccagaag

SEQ ID NO: 127984 - DNA, 25 bp, Saccharomyces pastorianus
gtcaccccatctttcgttgctttca

SEQ ID NO: 127985 - DNA, 25 bp, Saccharomyces pastorianus
ggacttaccagagcgtaccaagtta

SEQ ID NO: 127986 - DNA, 25 bp, Saccharomyces pastorianus
attcttgaactctcaggacttacca

SEQ ID NO: 127987 - DNA, 25 bp, Saccharomyces pastorianus
gttggaggcccagtcagctaaagaa

SEQ ID NO: 127988 - DNA, 25 bp, Saccharomyces pastorianus
ttgcctctttgataagcactggtca

SEQ ID NO: 127989 - DNA, 25 bp, Saccharomyces pastorianus
gaaaccgttccatatgtcttgagac

SEQ ID NO: 127990 - DNA, 25 bp, Saccharomyces pastorianus
aagcaactttgcctctttgataagc

SEQ ID NO: 127991 - DNA, 25 bp, Saccharomyces pastorianus
gcaaacaatttgagagcggacacac

SEQ ID NO: 127992 - DNA, 25 bp, Saccharomyces pastorianus
gcactggtcaattcaattcttctca

SEQ ID NO: 127993 - DNA, 25 bp, Saccharomyces pastorianus
gacaatggcgaacatgattcagcag

SEQ ID NO: 127994 - DNA, 25 bp, Saccharomyces pastorianus
gtctcccgtgagacagttgggtaga

SEQ ID NO: 127995 - DNA, 25 bp, Saccharomyces pastorianus
gaaattggtcctaattctacaaaga

SEQ ID NO: 127996 - DNA, 25 bp, Saccharomyces pastorianus
aaagaacataaacgtgggatcacat

SEQ ID NO: 127997 - DNA, 25 bp, Saccharomyces pastorianus
ttcaacaccgccaattaacttattt

SEQ ID NO: 127998 - DNA, 25 bp, Saccharomyces pastorianus
agaacataaacgtgggatcacatac

SEQ ID NO: 127999 - DNA, 25 bp, Saccharomyces pastorianus
caacaccgccaattaacttatttcg

SEQ ID NO: 128000 - DNA, 25 bp, Saccharomyces pastorianus
caccgccaattaacttatttcgtag

SEQ ID NO: 128001 - DNA, 25 bp, Saccharomyces pastorianus
tcaacaccgccaattaacttatttc

SEQ ID NO: 128002 - DNA, 25 bp, Saccharomyces pastorianus
atgagcactgcttcaacaccgccaa

SEQ ID NO: 128003 - DNA, 25 bp, Saccharomyces pastorianus
gaaagaacataaacgtgggatcaca

SEQ ID NO: 128004 - DNA, 25 bp, Saccharomyces pastorianus
agcactgcttcaacaccgccaatta

SEQ ID NO: 128005 - DNA, 25 bp, Saccharomyces pastorianus
taaacgtgggatcacatacacaatg

SEQ ID NO: 128006 - DNA, 25 bp, Saccharomyces pastorianus
gccaattaacttatttcgtagaaag

SEQ ID NO: 128007 - DNA, 25 bp, Saccharomyces pastorianus
ggaggtatcaggttgagcttctcta

SEQ ID NO: 128008 - DNA, 25 bp, Saccharomyces pastorianus
ttaggcgttagaggctcaaacagta

SEQ ID NO: 128009 - DNA, 25 bp, Saccharomyces pastorianus
gttgagcttctctaaaaatccatta

SEQ ID NO: 128010 - DNA, 25 bp, Saccharomyces pastorianus
tgaactctcacggtcatggcaacgg

SEQ ID NO: 128011 - DNA, 25 bp, Saccharomyces pastorianus
atatggtagtcaactacctcacccc

SEQ ID NO: 128012 - DNA, 25 bp, Saccharomyces pastorianus
cactagagcattggcagaattatat

SEQ ID NO: 128013 - DNA, 25 bp, Saccharomyces pastorianus
ctctcacggtcatggcaacggtcat

SEQ ID NO: 128014 - DNA, 25 bp, Saccharomyces pastorianus
gaggctcaaacagtaggagtaaatc

SEQ ID NO: 128015 - DNA, 25 bp, Saccharomyces pastorianus
tgaggatgttagctttgccactaga

SEQ ID NO: 128016 - DNA, 25 bp, Saccharomyces pastorianus
aatccattaggcgttagaggctcaa

SEQ ID NO: 128017 - DNA, 25 bp, Saccharomyces pastorianus
gttagctttgccactagagcattgg

SEQ ID NO: 128018 - DNA, 25 bp, Saccharomyces pastorianus
ggacgctggcaagtcacttttgcta

SEQ ID NO: 128019 - DNA, 25 bp, Saccharomyces pastorianus
gctcctaacgggtcttcaatattca

SEQ ID NO: 128020 - DNA, 25 bp, Saccharomyces pastorianus
ggagtaatacattccgcgacttctc

SEQ ID NO: 128021 - DNA, 25 bp, Saccharomyces pastorianus
agagcgtttcgaatgttccttccaa

SEQ ID NO: 128022 - DNA, 25 bp, Saccharomyces pastorianus
acttctctaccgcattatcacttat

SEQ ID NO: 128023 - DNA, 25 bp, Saccharomyces pastorianus
ggaatgcttcctcaactgctaatat

SEQ ID NO: 128024 - DNA, 25 bp, Saccharomyces pastorianus
gaatgccacctcagaaggacgctgg

SEQ ID NO: 128025 - DNA, 25 bp, Saccharomyces pastorianus
aactgctaatattcctctttttcaa

SEQ ID NO: 128026 - DNA, 25 bp, Saccharomyces pastorianus
ggtaattcttcatttggtgcatctt

SEQ ID NO: 128027 - DNA, 25 bp, Saccharomyces pastorianus
ttacaagagcctccgatgtcatcta

SEQ ID NO: 128028 - DNA, 25 bp, Saccharomyces pastorianus
tcatcagtctaatctgttgcctcca

SEQ ID NO: 128029 - DNA, 25 bp, Saccharomyces pastorianus
aacgcttatgctgccgaagttggta

SEQ ID NO: 128030 - DNA, 25 bp, Saccharomyces pastorianus
ggttctggcggcaattcccaaaatc

SEQ ID NO: 128031 - DNA, 25 bp, Saccharomyces pastorianus
aatcatcaccgtcacagcagacaga

SEQ ID NO: 128032 - DNA, 25 bp, Saccharomyces pastorianus
tagaggaagacgcaccgggctacaa

SEQ ID NO: 128033 - DNA, 25 bp, Saccharomyces pastorianus
taattctactcattcagccgagcac

SEQ ID NO: 128034 - DNA, 25 bp, Saccharomyces pastorianus
gcaagattaccatgacgacgagcaa

SEQ ID NO: 128035 - DNA, 25 bp, Saccharomyces pastorianus
agaaccaaccttggtggtgccgacg

SEQ ID NO: 128036 - DNA, 25 bp, Saccharomyces pastorianus
ccagaaaccacttcctattcaattc

SEQ ID NO: 128037 - DNA, 25 bp, Saccharomyces pastorianus
aagacatcatcagtacggttccgat

SEQ ID NO: 128038 - DNA, 25 bp, Saccharomyces pastorianus
atttccctagtttgattgacccaca

SEQ ID NO: 128039 - DNA, 25 bp, Saccharomyces pastorianus
taaagacaccaacacctctagttct

SEQ ID NO: 128040 - DNA, 25 bp, Saccharomyces pastorianus
gaatatgaacgagtccatttccaaa

SEQ ID NO: 128041 - DNA, 25 bp, Saccharomyces pastorianus
cttaccaaaagaacagcccgaatca

SEQ ID NO: 128042 - DNA, 25 bp, Saccharomyces pastorianus
tcagtactacaaagccgaccgaata

SEQ ID NO: 128043 - DNA, 25 bp, Saccharomyces pastorianus
aattcagattctgctcaacgcaaaa

SEQ ID NO: 128044 - DNA, 25 bp, Saccharomyces pastorianus
gaacgagtccatttccaaagatggt

SEQ ID NO: 128045 - DNA, 25 bp, Saccharomyces pastorianus
ggaaaccaaggctaaaaacattctg

SEQ ID NO: 128046 - DNA, 25 bp, Saccharomyces pastorianus
tgctcaacgcaaaaagtctttcagt

SEQ ID NO: 128047 - DNA, 25 bp, Saccharomyces pastorianus
gtggtaagcccggttcctatgattc

SEQ ID NO: 128048 - DNA, 25 bp, Saccharomyces pastorianus
aaacattctgttaccttggaggaag

SEQ ID NO: 128049 - DNA, 25 bp, Saccharomyces pastorianus
agcccgaatcaacgtccaagaattt

SEQ ID NO: 128050 - DNA, 25 bp, Saccharomyces pastorianus
ggttcctatgattccaattcagatt

SEQ ID NO: 128051 - DNA, 25 bp, Saccharomyces pastorianus
tgtgaaaaccacatctcctaccaat

SEQ ID NO: 128052 - DNA, 25 bp, Saccharomyces pastorianus
gttagccatggtcactctggttcaa

SEQ ID NO: 128053 - DNA, 25 bp, Saccharomyces pastorianus
gctgctgcacaggatcattccagta

SEQ ID NO: 128054 - DNA, 25 bp, Saccharomyces pastorianus
atggtcattccagtgctaccacttc

SEQ ID NO: 128055 - DNA, 25 bp, Saccharomyces pastorianus
ctgttactcacacgcatggtcattc

SEQ ID NO: 128056 - DNA, 25 bp, Saccharomyces pastorianus
ctgtcactcacacacatggtcatgc

SEQ ID NO: 128057 - DNA, 25 bp, Saccharomyces pastorianus
aagcgaatactggtccatcagccac

SEQ ID NO: 128058 - DNA, 25 bp, Saccharomyces pastorianus
tctggttcaagcactggtcctaaat

SEQ ID NO: 128059 - DNA, 25 bp, Saccharomyces pastorianus
atcagccactgcaactacacatgga

SEQ ID NO: 128060 - DNA, 25 bp, Saccharomyces pastorianus
tcataaccacagcacttccaaagct

SEQ ID NO: 128061 - DNA, 25 bp, Saccharomyces pastorianus
acatggtcatgccagtgtgaaaacc

SEQ ID NO: 128062 - DNA, 25 bp, Saccharomyces pastorianus
taatgctaccgtcaatcctctgaga

SEQ ID NO: 128063 - DNA, 25 bp, Saccharomyces pastorianus
tatcacgaatgagctcccactttta

SEQ ID NO: 128064 - DNA, 25 bp, Saccharomyces pastorianus
ggcacaatttctcggccattcattt

SEQ ID NO: 128065 - DNA, 25 bp, Saccharomyces pastorianus
ggaattgcaacaacagctggcccat

SEQ ID NO: 128066 - DNA, 25 bp, Saccharomyces pastorianus
cttacagcgtcagcctcttgaggaa

SEQ ID NO: 128067 - DNA, 25 bp, Saccharomyces pastorianus
tgatctctgcttccatatcacgaat

SEQ ID NO: 128068 - DNA, 25 bp, Saccharomyces pastorianus
actccagatctggtgcccaattgaa

SEQ ID NO: 128069 - DNA, 25 bp, Saccharomyces pastorianus
agttcacagatatatcctctctcct

SEQ ID NO: 128070 - DNA, 25 bp, Saccharomyces pastorianus
taaattcaatataacctcctcgctc

SEQ ID NO: 128071 - DNA, 25 bp, Saccharomyces pastorianus
ggccccggagcgagtgttgcaacta

SEQ ID NO: 128072 - DNA, 25 bp, Saccharomyces pastorianus
agacgtgtcctccttcgatgtaaag

SEQ ID NO: 128073 - DNA, 25 bp, Saccharomyces pastorianus
acgggaactatactctattcttaga

SEQ ID NO: 128074 - DNA, 25 bp, Saccharomyces pastorianus
tttagattctgactcaggcgcatcc

SEQ ID NO: 128075 - DNA, 25 bp, Saccharomyces pastorianus
tactttgatattgaactgccagatt

SEQ ID NO: 128076 - DNA, 25 bp, Saccharomyces pastorianus
caaaatgtttgctaggcttttctaa

SEQ ID NO: 128077 - DNA, 25 bp, Saccharomyces pastorianus
agagcctgagtgtcctccatataaa

SEQ ID NO: 128078 - DNA, 25 bp, Saccharomyces pastorianus
atcactatttccttactttgccaat

SEQ ID NO: 128079 - DNA, 25 bp, Saccharomyces pastorianus
attcgtggcgcttttaacctcaata

SEQ ID NO: 128080 - DNA, 25 bp, Saccharomyces pastorianus
aatagttcccgtgcaattcgtggcg

SEQ ID NO: 128081 - DNA, 25 bp, Saccharomyces pastorianus
aaagactttgaaggctatcctagca

SEQ ID NO: 128082 - DNA, 25 bp, Saccharomyces pastorianus
ggcgcatccccaacagtaatactga

SEQ ID NO: 128083 - DNA, 25 bp, Saccharomyces pastorianus
gaggttagcccggatcactatttcc

SEQ ID NO: 128084 - DNA, 25 bp, Saccharomyces pastorianus
tcggcgcaatgatgagttgctcttt

SEQ ID NO: 128085 - DNA, 25 bp, Saccharomyces pastorianus
cattgatgattctatggcggagata

SEQ ID NO: 128086 - DNA, 25 bp, Saccharomyces pastorianus
gggtcatatagctaaagaactttat

SEQ ID NO: 128087 - DNA, 25 bp, Saccharomyces pastorianus
gaatcttcgaagatgaatccagaaa

SEQ ID NO: 128088 - DNA, 25 bp, Saccharomyces pastorianus
gaggccaatggtgaaattctatccg

SEQ ID NO: 128089 - DNA, 25 bp, Saccharomyces pastorianus
ttgctctttaactaatgaagggccc

SEQ ID NO: 128090 - DNA, 25 bp, Saccharomyces pastorianus
taaaggatggtgaattcggcgcaat

SEQ ID NO: 128091 - DNA, 25 bp, Saccharomyces pastorianus
ccatttggcccaaaagggtcatata

SEQ ID NO: 128092 - DNA, 25 bp, Saccharomyces pastorianus
aagttcttagtttgagaatcttcga

SEQ ID NO: 128093 - DNA, 25 bp, Saccharomyces pastorianus
gtctcaattcactttgatggcaaaa

SEQ ID NO: 128094 - DNA, 25 bp, Saccharomyces pastorianus
aattctatccgtgtctcaattcact

SEQ ID NO: 128095 - DNA, 25 bp, Saccharomyces pastorianus
ggcctttgctttgtactgtttttga

SEQ ID NO: 128096 - DNA, 25 bp, Saccharomyces pastorianus
aatggcgacgcacgctatgcaacta

SEQ ID NO: 128097 - DNA, 25 bp, Saccharomyces pastorianus
agcagctttcgttgttcttgccaaa

SEQ ID NO: 128098 - DNA, 25 bp, Saccharomyces pastorianus
gaagcggcgcttctatgggtacaaa

SEQ ID NO: 128099 - DNA, 25 bp, Saccharomyces pastorianus
attaacgtcttaacacctatcagga

SEQ ID NO: 128100 - DNA, 25 bp, Saccharomyces pastorianus
tgctgcttacacatctgaaccgaat

SEQ ID NO: 128101 - DNA, 25 bp, Saccharomyces pastorianus
agtggccaatatactgctgacagtc

SEQ ID NO: 128102 - DNA, 25 bp, Saccharomyces pastorianus
tatgcaactaatgaccccaatgggc

SEQ ID NO: 128103 - DNA, 25 bp, Saccharomyces pastorianus
ttaggtattttgtgtctggccctac

SEQ ID NO: 128104 - DNA, 25 bp, Saccharomyces pastorianus
atgtacttctgtgccgaattgatcg

SEQ ID NO: 128105 - DNA, 25 bp, Saccharomyces pastorianus
attgatcgtttgtatgctatggcta

SEQ ID NO: 128106 - DNA, 25 bp, Saccharomyces pastorianus
cgcctatggaaatagaggtaataag

SEQ ID NO: 128107 - DNA, 25 bp, Saccharomyces pastorianus
tccacgcctatggaaatagaggtaa

SEQ ID NO: 128108 - DNA, 25 bp, Saccharomyces pastorianus
cctatggaaatagaggtaataagaa

SEQ ID NO: 128109 - DNA, 25 bp, Saccharomyces pastorianus
acgcctatggaaatagaggtaataa

SEQ ID NO: 128110 - DNA, 25 bp, Saccharomyces pastorianus
taataagaaaaccaacttcacattg

SEQ ID NO: 128111 - DNA, 25 bp, Saccharomyces pastorianus
gtaataagaaaaccaacttcacatt

SEQ ID NO: 128112 - DNA, 25 bp, Saccharomyces pastorianus
ggtaataagaaaaccaacttcacat

SEQ ID NO: 128113 - DNA, 25 bp, Saccharomyces pastorianus
ccacgcctatggaaatagaggtaat

SEQ ID NO: 128114 - DNA, 25 bp, Saccharomyces pastorianus
cacgcctatggaaatagaggtaata

SEQ ID NO: 128115 - DNA, 25 bp, Saccharomyces pastorianus
aataagaaaaccaacttcacattgg

SEQ ID NO: 128116 - DNA, 25 bp, Saccharomyces pastorianus
gatagaaaccttaccgagttcgaca

SEQ ID NO: 128117 - DNA, 25 bp, Saccharomyces pastorianus
gagcattcatgtaaatcgcgtggaa

SEQ ID NO: 128118 - DNA, 25 bp, Saccharomyces pastorianus
ttaccgagttcgacagtactgacac

SEQ ID NO: 128119 - DNA, 25 bp, Saccharomyces pastorianus
cagtactgacactagtctgtgcata

SEQ ID NO: 128120 - DNA, 25 bp, Saccharomyces pastorianus
aggtctaccgacaattttcacaatt

SEQ ID NO: 128121 - DNA, 25 bp, Saccharomyces pastorianus
aacggcgaaccgagcattcatgtaa

SEQ ID NO: 128122 - DNA, 25 bp, Saccharomyces pastorianus
tggagacagattatgcaagagcaaa

SEQ ID NO: 128123 - DNA, 25 bp, Saccharomyces pastorianus
gaaagaagcagcaggtctaccgaca

SEQ ID NO: 128124 - DNA, 25 bp, Saccharomyces pastorianus
tagtctgtgcataaacggcgaaccg

SEQ ID NO: 128125 - DNA, 25 bp, Saccharomyces pastorianus
aaaacgcatgaacagcaatcaggaa

SEQ ID NO: 128126 - DNA, 25 bp, Saccharomyces pastorianus
aaaatcgaatacttgcgtcaaagat

SEQ ID NO: 128127 - DNA, 25 bp, Saccharomyces pastorianus
gttcaacaaggtctcagttctgcct

SEQ ID NO: 128128 - DNA, 25 bp, Saccharomyces pastorianus
attcacatcctggttacgactgttg

SEQ ID NO: 128129 - DNA, 25 bp, Saccharomyces pastorianus
ttggctactaccagtgaacgtgtta

SEQ ID NO: 128130 - DNA, 25 bp, Saccharomyces pastorianus
aatagtgccacttcatactatgaac

SEQ ID NO: 128131 - DNA, 25 bp, Saccharomyces pastorianus
gcgagattacaagggcgctaaactg

SEQ ID NO: 128132 - DNA, 25 bp, Saccharomyces pastorianus
tcagttctgcctcaatacgcaaagg

SEQ ID NO: 128133 - DNA, 25 bp, Saccharomyces pastorianus
gtggtcgatcccttgaaaagtctgg

SEQ ID NO: 128134 - DNA, 25 bp, Saccharomyces pastorianus
tatccaaacccaggatttgaaccag

SEQ ID NO: 128135 - DNA, 25 bp, Saccharomyces pastorianus
tatgtcgcaattgtggtcgatccct

SEQ ID NO: 128136 - DNA, 25 bp, Saccharomyces pastorianus
gaattgaaccgagcgctatttgaaa

SEQ ID NO: 128137 - DNA, 25 bp, Saccharomyces pastorianus
aactgaatgttgttggctggttcca

SEQ ID NO: 128138 - DNA, 25 bp, Saccharomyces pastorianus
tgggtcctaatttcattctgcacag

SEQ ID NO: 128139 - DNA, 25 bp, Saccharomyces pastorianus
gtcacccgaagtcttttatttcaat

SEQ ID NO: 128140 - DNA, 25 bp, Saccharomyces pastorianus
aagagcacttgacgtttggtccgtg

SEQ ID NO: 128141 - DNA, 25 bp, Saccharomyces pastorianus
ggaattgttggtagcgacccctact

SEQ ID NO: 128142 - DNA, 25 bp, Saccharomyces pastorianus
ggcgtatactggaagtttcatcttt

SEQ ID NO: 128143 - DNA, 25 bp, Saccharomyces pastorianus
aattgattgattttggcgcttccag

SEQ ID NO: 128144 - DNA, 25 bp, Saccharomyces pastorianus
gcccaaatgaggcatcgcttcgaat

SEQ ID NO: 128145 - DNA, 25 bp, Saccharomyces pastorianus
aaagatcttgtgacacggcctgcta

SEQ ID NO: 128146 - DNA, 25 bp, Saccharomyces pastorianus
ggcctgctaccgatgacagcaataa

SEQ ID NO: 128147 - DNA, 25 bp, Saccharomyces pastorianus
ttgttccggaagaggtgtgtcatct

SEQ ID NO: 128148 - DNA, 25 bp, Saccharomyces pastorianus
ttccactatccattgtcttcacaga

SEQ ID NO: 128149 - DNA, 25 bp, Saccharomyces pastorianus
gagaggatgttcactactcgtgtat

SEQ ID NO: 128150 - DNA, 25 bp, Saccharomyces pastorianus
aaaacactcctttactacgtcattg

SEQ ID NO: 128151 - DNA, 25 bp, Saccharomyces pastorianus
gatgagattgcatgcacctccacag

SEQ ID NO: 128152 - DNA, 25 bp, Saccharomyces pastorianus
aggacactgaaagcacggcccatat

SEQ ID NO: 128153 - DNA, 25 bp, Saccharomyces pastorianus
agaagattcggtctcttcactgtcc

SEQ ID NO: 128154 - DNA, 25 bp, Saccharomyces pastorianus
ggaaacaacttcttcgccagtctca

SEQ ID NO: 128155 - DNA, 25 bp, Saccharomyces pastorianus
acgaatcctctcgatgacacgtatt

SEQ ID NO: 128156 - DNA, 25 bp, Saccharomyces pastorianus
agatctcgacgttgttctcggcgaa

SEQ ID NO: 128157 - DNA, 25 bp, Saccharomyces pastorianus
tatcggtcacaatattccagtcacg

SEQ ID NO: 128158 - DNA, 25 bp, Saccharomyces pastorianus
aagcatccactgacttggtttccag

SEQ ID NO: 128159 - DNA, 25 bp, Saccharomyces pastorianus
tcaactggatcattctctctcatga

SEQ ID NO: 128160 - DNA, 25 bp, Saccharomyces pastorianus
cattttgtcatactcggttcgtggt

SEQ ID NO: 128161 - DNA, 25 bp, Saccharomyces pastorianus
agaatttatcaccaccacgagtcat

SEQ ID NO: 128162 - DNA, 25 bp, Saccharomyces pastorianus
gcgggatcttatcattatttgccat

SEQ ID NO: 128163 - DNA, 25 bp, Saccharomyces pastorianus
attgccaaagccgtagtacatcagg

SEQ ID NO: 128164 - DNA, 25 bp, Saccharomyces pastorianus
tgcccctttgtgataggattcacgt

SEQ ID NO: 128165 - DNA, 25 bp, Saccharomyces pastorianus
tgccgtacagtttcttcaggcgtat

SEQ ID NO: 128166 - DNA, 25 bp, Saccharomyces pastorianus
gcattatcgtggcatattttggcta

SEQ ID NO: 128167 - DNA, 25 bp, Saccharomyces pastorianus
ggaactgacctccagaatggctgaa

SEQ ID NO: 128168 - DNA, 25 bp, Saccharomyces pastorianus
gttagtccaattcccagagttacag

SEQ ID NO: 128169 - DNA, 25 bp, Saccharomyces pastorianus
ctgcccctagggaaattgactttat

SEQ ID NO: 128170 - DNA, 25 bp, Saccharomyces pastorianus
gggaaccaagcctctaaattgctaa

SEQ ID NO: 128171 - DNA, 25 bp, Saccharomyces pastorianus
gccttgcgcgatttgaaccttcaat

SEQ ID NO: 128172 - DNA, 25 bp, Saccharomyces pastorianus
gttaccttcattcacgaaagttggc

SEQ ID NO: 128173 - DNA, 25 bp, Saccharomyces pastorianus
acagcacccttactcgaggcaatag

SEQ ID NO: 128174 - DNA, 25 bp, Saccharomyces pastorianus
attaatgagcccatcgtagccgcgt

SEQ ID NO: 128175 - DNA, 25 bp, Saccharomyces pastorianus
gagagcatcgcattcgtcattgcta

SEQ ID NO: 128176 - DNA, 25 bp, Saccharomyces pastorianus
gatcctgttctagaaaacgccttgc

SEQ ID NO: 128177 - DNA, 25 bp, Saccharomyces pastorianus
tacaacatcttctacgtcatcgcaa

SEQ ID NO: 128178 - DNA, 25 bp, Saccharomyces pastorianus
attcaaccaatatgccactaccgag

SEQ ID NO: 128179 - DNA, 25 bp, Saccharomyces pastorianus
tgagccgagcccagcaataaagtta

SEQ ID NO: 128180 - DNA, 25 bp, Saccharomyces pastorianus
tagccgcgtcatcgataatagtacc

SEQ ID NO: 128181 - DNA, 25 bp, Saccharomyces pastorianus
atcgaaactgatccccattaatgag

SEQ ID NO: 128182 - DNA, 25 bp, Saccharomyces pastorianus
taccatgcagttggacaaggcgccc

SEQ ID NO: 128183 - DNA, 25 bp, Saccharomyces pastorianus
ccattgtagttgacgttgaaggcac

SEQ ID NO: 128184 - DNA, 25 bp, Saccharomyces pastorianus
gattgtgggaacctcatccgtgaga

SEQ ID NO: 128185 - DNA, 25 bp, Saccharomyces pastorianus
ttgttccgttcctattggtgtggaa

SEQ ID NO: 128186 - DNA, 25 bp, Saccharomyces pastorianus
gcttataagtctctggatgaccttc

SEQ ID NO: 128187 - DNA, 25 bp, Saccharomyces pastorianus
aatgcatcatcttggcgtctgctgg

SEQ ID NO: 128188 - DNA, 25 bp, Saccharomyces pastorianus
atccgtgagaagatctgctcagcta

SEQ ID NO: 128189 - DNA, 25 bp, Saccharomyces pastorianus
aaaatctccgtaccaatgcatcatc

SEQ ID NO: 128190 - DNA, 25 bp, Saccharomyces pastorianus
actatatgttgcctttcggagcgtg

SEQ ID NO: 128191 - DNA, 25 bp, Saccharomyces pastorianus
attacgcagcgattccattcggata

SEQ ID NO: 128192 - DNA, 25 bp, Saccharomyces pastorianus
tcggagcgtgctttgatgagaactt

SEQ ID NO: 128193 - DNA, 25 bp, Saccharomyces pastorianus
gtatccggactacgactgcaaggtt

SEQ ID NO: 128194 - DNA, 25 bp, Saccharomyces pastorianus
aaaagtatccggactacgactgcaa

SEQ ID NO: 128195 - DNA, 25 bp, Saccharomyces pastorianus
gggccctgaaactctacatattggt

SEQ ID NO: 128196 - DNA, 25 bp, Saccharomyces pastorianus
gaaaatcgaaattggcggtaataca

SEQ ID NO: 128197 - DNA, 25 bp, Saccharomyces pastorianus
gaccagattcaattcaaacctttgt

SEQ ID NO: 128198 - DNA, 25 bp, Saccharomyces pastorianus
gccctgaaactctacatattggtgg

SEQ ID NO: 128199 - DNA, 25 bp, Saccharomyces pastorianus
tttgcaaactcttggtgaccagatt

SEQ ID NO: 128200 - DNA, 25 bp, Saccharomyces pastorianus
gcaaactcttggtgaccagattcaa

SEQ ID NO: 128201 - DNA, 25 bp, Saccharomyces pastorianus
ggtgaccagattcaattcaaacctt

SEQ ID NO: 128202 - DNA, 25 bp, Saccharomyces pastorianus
atgggccctgaaactctacatattg

SEQ ID NO: 128203 - DNA, 25 bp, Saccharomyces pastorianus
ctgatcgaagaaaagtatccggact

SEQ ID NO: 128204 - DNA, 25 bp, Saccharomyces pastorianus
aattgatttggatctagccaaacga

SEQ ID NO: 128205 - DNA, 25 bp, Saccharomyces pastorianus
ggatctagccaaacgatattatcag

SEQ ID NO: 128206 - DNA, 25 bp, Saccharomyces pastorianus
atctagccaaacgatattatcagag

SEQ ID NO: 128207 - DNA, 25 bp, Saccharomyces pastorianus
aaaaggtgtcggttgtgaaattgat

SEQ ID NO: 128208 - DNA, 25 bp, Saccharomyces pastorianus
gggctgcaagaatgggttttaggaa

SEQ ID NO: 128209 - DNA, 25 bp, Saccharomyces pastorianus
aaacgatattatcagagggctgcaa

SEQ ID NO: 128210 - DNA, 25 bp, Saccharomyces pastorianus
gatttggatctagccaaacgatatt

SEQ ID NO: 128211 - DNA, 25 bp, Saccharomyces pastorianus
tattacgaaaaaggtgtcggttgtg

SEQ ID NO: 128212 - DNA, 25 bp, Saccharomyces pastorianus
cgatattatcagagggctgcaagaa

SEQ ID NO: 128213 - DNA, 25 bp, Saccharomyces pastorianus
gtgtcggttgtgaaattgatttgga

SEQ ID NO: 128214 - DNA, 25 bp, Saccharomyces pastorianus
cagagggctgcaagaatgggtttta

SEQ ID NO: 128215 - DNA, 25 bp, Saccharomyces pastorianus
atgaattcagtgttttgccgccaga

SEQ ID NO: 128216 - DNA, 25 bp, Saccharomyces pastorianus
tggccacctgccatgtatttaatgg

SEQ ID NO: 128217 - DNA, 25 bp, Saccharomyces pastorianus
ttgccgccagaaatccagaacctat

SEQ ID NO: 128218 - DNA, 25 bp, Saccharomyces pastorianus
aagggtgactctccacaaacattat

SEQ ID NO: 128219 - DNA, 25 bp, Saccharomyces pastorianus
cagaacctattatttgcgaacggca

SEQ ID NO: 128220 - DNA, 25 bp, Saccharomyces pastorianus
catgctaccgtgcaggtgtatgctt

SEQ ID NO: 128221 - DNA, 25 bp, Saccharomyces pastorianus
ggatccatcaccgaccaaagaacaa

SEQ ID NO: 128222 - DNA, 25 bp, Saccharomyces pastorianus
gatgagccatttatacggtctgaac

SEQ ID NO: 128223 - DNA, 25 bp, Saccharomyces pastorianus
aaagggccttccaatactaccagca

SEQ ID NO: 128224 - DNA, 25 bp, Saccharomyces pastorianus
gagtactctttagcgcaatggaaat

SEQ ID NO: 128225 - DNA, 25 bp, Saccharomyces pastorianus
accagcatggcgcagaagtttgttc

SEQ ID NO: 128226 - DNA, 25 bp, Saccharomyces pastorianus
attccagctgatcaacaacccattg

SEQ ID NO: 128227 - DNA, 25 bp, Saccharomyces pastorianus
acaacccattgtcgacttcttgaaa

SEQ ID NO: 128228 - DNA, 25 bp, Saccharomyces pastorianus
gattgtttacatgacctcgtcgcat

SEQ ID NO: 128229 - DNA, 25 bp, Saccharomyces pastorianus
gccaactttggcttctcaggttaat

SEQ ID NO: 128230 - DNA, 25 bp, Saccharomyces pastorianus
ggtcatccatgctaatatcgctaca

SEQ ID NO: 128231 - DNA, 25 bp, Saccharomyces pastorianus
tcaagagggtggtaactggctgaca

SEQ ID NO: 128232 - DNA, 25 bp, Saccharomyces pastorianus
gaatgtcagccatgaaattccagct

SEQ ID NO: 128233 - DNA, 25 bp, Saccharomyces pastorianus
aggttaatacctccgctgagaatgt

SEQ ID NO: 128234 - DNA, 25 bp, Saccharomyces pastorianus
gaagaactggctcgcgtaacaccat

SEQ ID NO: 128235 - DNA, 25 bp, Saccharomyces pastorianus
tctcaaggtgctacttatcctccaa

SEQ ID NO: 128236 - DNA, 25 bp, Saccharomyces pastorianus
gtaacaccattgaccccaaaggagt

SEQ ID NO: 128237 - DNA, 25 bp, Saccharomyces pastorianus
gtgacagcgacgaccagcaaagcca

SEQ ID NO: 128238 - DNA, 25 bp, Saccharomyces pastorianus
ccagattgaattcttttgctcctcc

SEQ ID NO: 128239 - DNA, 25 bp, Saccharomyces pastorianus
tttatggtatgacaccaggcgcctc

SEQ ID NO: 128240 - DNA, 25 bp, Saccharomyces pastorianus
gcttttgctcctatacaacctggta

SEQ ID NO: 128241 - DNA, 25 bp, Saccharomyces pastorianus
aaggcacgtgtcttgattgcttccg

SEQ ID NO: 128242 - DNA, 25 bp, Saccharomyces pastorianus
tcaatctagctctattccttcacaa

SEQ ID NO: 128243 - DNA, 25 bp, Saccharomyces pastorianus
atgggcgactataatgctcaatcta

SEQ ID NO: 128244 - DNA, 25 bp, Saccharomyces pastorianus
taacccatatgccactgcaacagtt

SEQ ID NO: 128245 - DNA, 25 bp, Saccharomyces pastorianus
aatcattaccggcacaaaatcctgt

SEQ ID NO: 128246 - DNA, 25 bp, Saccharomyces pastorianus
gatggcgtcaccttttgttaacaaa

SEQ ID NO: 128247 - DNA, 25 bp, Saccharomyces pastorianus
taagaacgttcctgtactaccaact

SEQ ID NO: 128248 - DNA, 25 bp, Saccharomyces pastorianus
gtttgctggactgtttcagctggta

SEQ ID NO: 128249 - DNA, 25 bp, Saccharomyces pastorianus
gctcatgttccaaactacgctgtta

SEQ ID NO: 128250 - DNA, 25 bp, Saccharomyces pastorianus
gatttactgttatacttcgggcctt

SEQ ID NO: 128251 - DNA, 25 bp, Saccharomyces pastorianus
atatattcggttttcatccgcggcc

SEQ ID NO: 128252 - DNA, 25 bp, Saccharomyces pastorianus
gagtgtttctgacatcacaatggat

SEQ ID NO: 128253 - DNA, 25 bp, Saccharomyces pastorianus
atattttgggccagctcatgttcca

SEQ ID NO: 128254 - DNA, 25 bp, Saccharomyces pastorianus
gttggacccgaaccagatttactgt

SEQ ID NO: 128255 - DNA, 25 bp, Saccharomyces pastorianus
ggaaattcattccaacctggccaaa

SEQ ID NO: 128256 - DNA, 25 bp, Saccharomyces pastorianus
ctatggctgagttatgtgcggttaa

SEQ ID NO: 128257 - DNA, 25 bp, Saccharomyces pastorianus
tatacttcgggccttcgttggattt

SEQ ID NO: 128258 - DNA, 25 bp, Saccharomyces pastorianus
gaaacgattgtcgatctgaccaaaa

SEQ ID NO: 128259 - DNA, 25 bp, Saccharomyces pastorianus
gacgccgatgagaaccctcagaaga

SEQ ID NO: 128260 - DNA, 25 bp, Saccharomyces pastorianus
atgtcccagaatcttccaatcacat

SEQ ID NO: 128261 - DNA, 25 bp, Saccharomyces pastorianus
tcaaaaaccagagctttaaaggccg

SEQ ID NO: 128262 - DNA, 25 bp, Saccharomyces pastorianus
aaggatgataaagcaatggagcccc

SEQ ID NO: 128263 - DNA, 25 bp, Saccharomyces pastorianus
acaagtatcattgcagacgccgatg

SEQ ID NO: 128264 - DNA, 25 bp, Saccharomyces pastorianus
gaacaatgagacgaatggagtccaa

SEQ ID NO: 128265 - DNA, 25 bp, Saccharomyces pastorianus
agatcgaaagagatgatgtcccaga

SEQ ID NO: 128266 - DNA, 25 bp, Saccharomyces pastorianus
ggagccccctaatgaaaaaccgcat

SEQ ID NO: 128267 - DNA, 25 bp, Saccharomyces pastorianus
acatcccacctccagaatctggtgt

SEQ ID NO: 128268 - DNA, 25 bp, Saccharomyces pastorianus
gaatctggtgtcttaaagggcggta

SEQ ID NO: 128269 - DNA, 25 bp, Saccharomyces pastorianus
ttaaaggccgttacaagtatcattg

SEQ ID NO: 128270 - DNA, 25 bp, Saccharomyces pastorianus
cgcttggttggtgttcgctaacaag

SEQ ID NO: 128271 - DNA, 25 bp, Saccharomyces pastorianus
tggtttatccaagccacgtgtgcta

SEQ ID NO: 128272 - DNA, 25 bp, Saccharomyces pastorianus
acgccgcttggttggtgttcgctaa

SEQ ID NO: 128273 - DNA, 25 bp, Saccharomyces pastorianus
aaacgccgcttggttggtgttcgct

SEQ ID NO: 128274 - DNA, 25 bp, Saccharomyces pastorianus
catggtttatccaagccacgtgtgc

SEQ ID NO: 128275 - DNA, 25 bp, Saccharomyces pastorianus
gtttatccaagccacgtgtgctacc

SEQ ID NO: 128276 - DNA, 25 bp, Saccharomyces pastorianus
ttatccaagccacgtgtgctacctc

SEQ ID NO: 128277 - DNA, 25 bp, Saccharomyces pastorianus
ttggttggtgttcgctaacaagcaa

SEQ ID NO: 128278 - DNA, 25 bp, Saccharomyces pastorianus
aaggtgttatctttgttgtcgattc

SEQ ID NO: 128279 - DNA, 25 bp, Saccharomyces pastorianus
tccatggtttatccaagccacgtgt

SEQ ID NO: 128280 - DNA, 25 bp, Saccharomyces pastorianus
gtgttatctttgttgtcgattctaa

SEQ ID NO: 128281 - DNA, 25 bp, Saccharomyces pastorianus
ttaaaactagaggatgtaacaccta

SEQ ID NO: 128282 - DNA, 25 bp, Saccharomyces pastorianus
aactagaggatgtaacacctaatga

SEQ ID NO: 128283 - DNA, 25 bp, Saccharomyces pastorianus
atgtaacacctaatgaagagttaag

SEQ ID NO: 128284 - DNA, 25 bp, Saccharomyces pastorianus
ggatgtaacacctaatgaagagtta

SEQ ID NO: 128285 - DNA, 25 bp, Saccharomyces pastorianus
ctagaggatgtaacacctaatgaag

SEQ ID NO: 128286 - DNA, 25 bp, Saccharomyces pastorianus
taaggcaaaagattctttgtttcaa

SEQ ID NO: 128287 - DNA, 25 bp, Saccharomyces pastorianus
gagttaaggcaaaagattctttgtt

SEQ ID NO: 128288 - DNA, 25 bp, Saccharomyces pastorianus
aaactagaggatgtaacacctaatg

SEQ ID NO: 128289 - DNA, 25 bp, Saccharomyces pastorianus
gaggatgtaacacctaatgaagagt

SEQ ID NO: 128290 - DNA, 25 bp, Saccharomyces pastorianus
aaaactagaggatgtaacacctaat

SEQ ID NO: 128291 - DNA, 25 bp, Saccharomyces pastorianus
actagaggatgtaacacctaatgaa

SEQ ID NO: 128292 - DNA, 25 bp, Saccharomyces pastorianus
aatgacttgactttcctgttggatg

SEQ ID NO: 128293 - DNA, 25 bp, Saccharomyces pastorianus
gtttatatcaatctttccgagcaat

SEQ ID NO: 128294 - DNA, 25 bp, Saccharomyces pastorianus
agtcctcgtgtggattggccgataa

SEQ ID NO: 128295 - DNA, 25 bp, Saccharomyces pastorianus
aatgctgacttttttgtgaggttcg

SEQ ID NO: 128296 - DNA, 25 bp, Saccharomyces pastorianus
cggctgcatttgtcacaccagaaat

SEQ ID NO: 128297 - DNA, 25 bp, Saccharomyces pastorianus
ttccaggcaagctaagtcctcgtgt

SEQ ID NO: 128298 - DNA, 25 bp, Saccharomyces pastorianus
aagattggcgtctgcttccaggcaa

SEQ ID NO: 128299 - DNA, 25 bp, Saccharomyces pastorianus
tattcgaaggatataccggctgcat

SEQ ID NO: 128300 - DNA, 25 bp, Saccharomyces pastorianus
ttagagtcacttgtcggtcccaaat

SEQ ID NO: 128301 - DNA, 25 bp, Saccharomyces pastorianus
gaggttcgttgctcgtatgttgaat

SEQ ID NO: 128302 - DNA, 25 bp, Saccharomyces pastorianus
cagagttcatcagtgctgtcgctaa

SEQ ID NO: 128303 - DNA, 25 bp, Saccharomyces pastorianus
aaatcggccttgtctgatagtgata

SEQ ID NO: 128304 - DNA, 25 bp, Saccharomyces pastorianus
agatcctgttaccactgctacattg

SEQ ID NO: 128305 - DNA, 25 bp, Saccharomyces pastorianus
aacacatctgtttcttactccaaat

SEQ ID NO: 128306 - DNA, 25 bp, Saccharomyces pastorianus
ggatgttgccactttaatcaaggaa

SEQ ID NO: 128307 - DNA, 25 bp, Saccharomyces pastorianus
aaggaagtccatggcgaattcgaaa

SEQ ID NO: 128308 - DNA, 25 bp, Saccharomyces pastorianus
agttttatgattccaattaccctga

SEQ ID NO: 128309 - DNA, 25 bp, Saccharomyces pastorianus
tagctgactctactggtgacgttaa

SEQ ID NO: 128310 - DNA, 25 bp, Saccharomyces pastorianus
cacttatgatgctttctgtccaatt

SEQ ID NO: 128311 - DNA, 25 bp, Saccharomyces pastorianus
gacgttaagcatgccgtttcttcat

SEQ ID NO: 128312 - DNA, 25 bp, Saccharomyces pastorianus
agagccttcatctcgtatcatgacg

SEQ ID NO: 128313 - DNA, 25 bp, Saccharomyces pastorianus
taccctgaatttcctgttttaagag

SEQ ID NO: 128314 - DNA, 25 bp, Saccharomyces pastorianus
gattctgatggctacgttactgatg

SEQ ID NO: 128315 - DNA, 25 bp, Saccharomyces pastorianus
cgtcgctacttttgtacgtgagtgc

SEQ ID NO: 128316 - DNA, 25 bp, Saccharomyces pastorianus
aacgttctttctaagtgtgccggct

SEQ ID NO: 128317 - DNA, 25 bp, Saccharomyces pastorianus
gaaacattccttgctggtctaattg

SEQ ID NO: 128318 - DNA, 25 bp, Saccharomyces pastorianus
gtctgacagggcaactttttcggtt

SEQ ID NO: 128319 - DNA, 25 bp, Saccharomyces pastorianus
aaagttgaatttgtgcgccgagtat

SEQ ID NO: 128320 - DNA, 25 bp, Saccharomyces pastorianus
ttagtggcctctgtcaacgcagaac

SEQ ID NO: 128321 - DNA, 25 bp, Saccharomyces pastorianus
ttgctcgttctttaggcttagtggc

SEQ ID NO: 128322 - DNA, 25 bp, Saccharomyces pastorianus
tttttcggttgattccagggatact

SEQ ID NO: 128323 - DNA, 25 bp, Saccharomyces pastorianus
gaatattccttctttcttgtctacg

SEQ ID NO: 128324 - DNA, 25 bp, Saccharomyces pastorianus
tattggtacccgtgaaacattcctt

SEQ ID NO: 128325 - DNA, 25 bp, Saccharomyces pastorianus
acttcctcatcaacacttcgatata

SEQ ID NO: 128326 - DNA, 25 bp, Saccharomyces pastorianus
gagtaccaacatccactgagtgcta

SEQ ID NO: 128327 - DNA, 25 bp, Saccharomyces pastorianus
atgtatttcgtctatgttcgcggcc

SEQ ID NO: 128328 - DNA, 25 bp, Saccharomyces pastorianus
gactccgctttactaagattctgca

SEQ ID NO: 128329 - DNA, 25 bp, Saccharomyces pastorianus
gtggtaaactacttcggctcaagaa

SEQ ID NO: 128330 - DNA, 25 bp, Saccharomyces pastorianus
taccagttggtcaccggtttattgt

SEQ ID NO: 128331 - DNA, 25 bp, Saccharomyces pastorianus
ttcatatctctaaacttcctcatca

SEQ ID NO: 128332 - DNA, 25 bp, Saccharomyces pastorianus
gtaataaatagcagcccgggtcact

SEQ ID NO: 128333 - DNA, 25 bp, Saccharomyces pastorianus
gatgatatgaccaacgactccgctt

SEQ ID NO: 128334 - DNA, 25 bp, Saccharomyces pastorianus
gtcacttcgggatgaattcaggcca

SEQ ID NO: 128335 - DNA, 25 bp, Saccharomyces pastorianus
aatggtttcttggagtcttcttgtt

SEQ ID NO: 128336 - DNA, 25 bp, Saccharomyces pastorianus
gctccacaaggcctcacatagtgat

SEQ ID NO: 128337 - DNA, 25 bp, Saccharomyces pastorianus
tcactattctatgcgtcgtccgaat

SEQ ID NO: 128338 - DNA, 25 bp, Saccharomyces pastorianus
tctgcgctgttagtatttcactgtt

SEQ ID NO: 128339 - DNA, 25 bp, Saccharomyces pastorianus
catagtgatactttctgcgctgtta

SEQ ID NO: 128340 - DNA, 25 bp, Saccharomyces pastorianus
ctttctgcgctgttagtatttcact

SEQ ID NO: 128341 - DNA, 25 bp, Saccharomyces pastorianus
gttttcactattctatgcgtcgtcc

SEQ ID NO: 128342 - DNA, 25 bp, Saccharomyces pastorianus
agtgatactttctgcgctgttagta

SEQ ID NO: 128343 - DNA, 25 bp, Saccharomyces pastorianus
attttatgcctattttctgctccac

SEQ ID NO: 128344 - DNA, 25 bp, Saccharomyces pastorianus
tatgcctattttctgctccacaagg

SEQ ID NO: 128345 - DNA, 25 bp, Saccharomyces pastorianus
gtatttcactgttttcactattcta

SEQ ID NO: 128346 - DNA, 25 bp, Saccharomyces pastorianus
atcatgcagcatcatattttatgcc

SEQ ID NO: 128347 - DNA, 25 bp, Saccharomyces pastorianus
atgaaggatttgaaggttcattatg

SEQ ID NO: 128348 - DNA, 25 bp, Saccharomyces pastorianus
aggatttgaaggttcattatgatcc

SEQ ID NO: 128349 - DNA, 25 bp, Saccharomyces pastorianus
ggatttgaaggttcattatgatcct

SEQ ID NO: 128350 - DNA, 25 bp, Saccharomyces pastorianus
tgatgaaggatttgaaggttcatta

SEQ ID NO: 128351 - DNA, 25 bp, Saccharomyces pastorianus
gaaggatttgaaggttcattatgat

SEQ ID NO: 128352 - DNA, 25 bp, Saccharomyces pastorianus
tgaaggatttgaaggttcattatga

SEQ ID NO: 128353 - DNA, 25 bp, Saccharomyces pastorianus
gatgaaggatttgaaggttcattat

SEQ ID NO: 128354 - DNA, 25 bp, Saccharomyces pastorianus
aaggatttgaaggttcattatgatc

SEQ ID NO: 128355 - DNA, 25 bp, Saccharomyces pastorianus
atgatgaaggatttgaaggttcatt

SEQ ID NO: 128356 - DNA, 25 bp, Saccharomyces pastorianus
atgacggtttaaatgcacaaaaaag

SEQ ID NO: 128357 - DNA, 25 bp, Saccharomyces pastorianus
aacttgctctaatcgattatgacgg

SEQ ID NO: 128358 - DNA, 25 bp, Saccharomyces pastorianus
tttgtcgacaaacttgctctaatcg

SEQ ID NO: 128359 - DNA, 25 bp, Saccharomyces pastorianus
cttgctctaatcgattatgacggtt

SEQ ID NO: 128360 - DNA, 25 bp, Saccharomyces pastorianus
gattatgacggtttaaatgcacaaa

SEQ ID NO: 128361 - DNA, 25 bp, Saccharomyces pastorianus
gacaaacttgctctaatcgattatg

SEQ ID NO: 128362 - DNA, 25 bp, Saccharomyces pastorianus
tgcacaaaaaagaaggttagattac

SEQ ID NO: 128363 - DNA, 25 bp, Saccharomyces pastorianus
gtcgacaaacttgctctaatcgatt

SEQ ID NO: 128364 - DNA, 25 bp, Saccharomyces pastorianus
agattacgatgaaaaggacctttat

SEQ ID NO: 128365 - DNA, 25 bp, Saccharomyces pastorianus
gctctaatcgattatgacggtttaa

SEQ ID NO: 128366 - DNA, 25 bp, Saccharomyces pastorianus
gttagattacgatgaaaaggacctt

SEQ ID NO: 128367 - DNA, 25 bp, Saccharomyces pastorianus
aatgatatagacgtaggcacagaca

SEQ ID NO: 128368 - DNA, 25 bp, Saccharomyces pastorianus
gagacagctcaattcaagcaggcat

SEQ ID NO: 128369 - DNA, 25 bp, Saccharomyces pastorianus
ctattcggataataccgcatgattt

SEQ ID NO: 128370 - DNA, 25 bp, Saccharomyces pastorianus
gtgtgcatcgatcatttcgtcacgt

SEQ ID NO: 128371 - DNA, 25 bp, Saccharomyces pastorianus
atgctggatgattctttatgcttta

SEQ ID NO: 128372 - DNA, 25 bp, Saccharomyces pastorianus
ggaattccaaggatactattcggat

SEQ ID NO: 128373 - DNA, 25 bp, Saccharomyces pastorianus
ctttatgctttatattggacacaca

SEQ ID NO: 128374 - DNA, 25 bp, Saccharomyces pastorianus
attccgacctcggtactatgatgaa

SEQ ID NO: 128375 - DNA, 25 bp, Saccharomyces pastorianus
ttcgtcacgttgagtgcattccgac

SEQ ID NO: 128376 - DNA, 25 bp, Saccharomyces pastorianus
aggcacagacaatgtttgcgccctt

SEQ ID NO: 128377 - DNA, 25 bp, Saccharomyces pastorianus
ggacacacatggagttttgttgata

SEQ ID NO: 128378 - DNA, 25 bp, Saccharomyces pastorianus
ataacagcatttccaactcttccaa

SEQ ID NO: 128379 - DNA, 25 bp, Saccharomyces pastorianus
aaacgatcactctcatagtggcaga

SEQ ID NO: 128380 - DNA, 25 bp, Saccharomyces pastorianus
aacgtagagcatcgaacttccatcc

SEQ ID NO: 128381 - DNA, 25 bp, Saccharomyces pastorianus
gggcgagacgctgtcactcaataat

SEQ ID NO: 128382 - DNA, 25 bp, Saccharomyces pastorianus
gtctaatgtcattcaaccaactata

SEQ ID NO: 128383 - DNA, 25 bp, Saccharomyces pastorianus
taccgagaccttcccataaaagaca

SEQ ID NO: 128384 - DNA, 25 bp, Saccharomyces pastorianus
gatataacccttctacttatgttga

SEQ ID NO: 128385 - DNA, 25 bp, Saccharomyces pastorianus
tacgatgaggatccactaccgagac

SEQ ID NO: 128386 - DNA, 25 bp, Saccharomyces pastorianus
tgtatggctccagatataacccttc

SEQ ID NO: 128387 - DNA, 25 bp, Saccharomyces pastorianus
catcctcctccttatcaaaagtcta

SEQ ID NO: 128388 - DNA, 25 bp, Saccharomyces pastorianus
agtaaacgtctcgtcgatatcggag

SEQ ID NO: 128389 - DNA, 25 bp, Saccharomyces pastorianus
gccacctcttccaatagcaaatttt

SEQ ID NO: 128390 - DNA, 25 bp, Saccharomyces pastorianus
gatagccgccaaagcattgccattg

SEQ ID NO: 128391 - DNA, 25 bp, Saccharomyces pastorianus
gttgtcctcgtttgcattgatagta

SEQ ID NO: 128392 - DNA, 25 bp, Saccharomyces pastorianus
tatttttaggcttcttgaacgtgga

SEQ ID NO: 128393 - DNA, 25 bp, Saccharomyces pastorianus
tgaagaaaatgtttcctgccccacc

SEQ ID NO: 128394 - DNA, 25 bp, Saccharomyces pastorianus
tagcaaatttttccggtgcgctttt

SEQ ID NO: 128395 - DNA, 25 bp, Saccharomyces pastorianus
gcttttgcccttgagcttattttta

SEQ ID NO: 128396 - DNA, 25 bp, Saccharomyces pastorianus
gatagtatcctcatcctcgatattg

SEQ ID NO: 128397 - DNA, 25 bp, Saccharomyces pastorianus
gaacgtggacttgatagccgccaaa

SEQ ID NO: 128398 - DNA, 25 bp, Saccharomyces pastorianus
agtcaccacaaacaggttgtcctcg

SEQ ID NO: 128399 - DNA, 25 bp, Saccharomyces pastorianus
aattatgtttccagcgccacctctt

SEQ ID NO: 128400 - DNA, 25 bp, Saccharomyces pastorianus
atgtcaccaccgttatcgatggcaa

SEQ ID NO: 128401 - DNA, 25 bp, Saccharomyces pastorianus
atgggaatggtagctcgtttaacga

SEQ ID NO: 128402 - DNA, 25 bp, Saccharomyces pastorianus
agatgggaatggtagctcgtttaac

SEQ ID NO: 128403 - DNA, 25 bp, Saccharomyces pastorianus
ggaatttatgtcaccaccgttatcg

SEQ ID NO: 128404 - DNA, 25 bp, Saccharomyces pastorianus
accaccgttatcgatggcaacaaag

SEQ ID NO: 128405 - DNA, 25 bp, Saccharomyces pastorianus
caatgttggtgataatagcgctttc

SEQ ID NO: 128406 - DNA, 25 bp, Saccharomyces pastorianus
ttccaatgttggtgataatagcgct

SEQ ID NO: 128407 - DNA, 25 bp, Saccharomyces pastorianus
ttcaaaagtgacaaagctaacgtta

SEQ ID NO: 128408 - DNA, 25 bp, Saccharomyces pastorianus
tggtagctcgtttaacgagttcaaa

SEQ ID NO: 128409 - DNA, 25 bp, Saccharomyces pastorianus
gctaacgttaatttttccaatgttg

SEQ ID NO: 128410 - DNA, 25 bp, Saccharomyces pastorianus
atttatgtcaccaccgttatcgatg

SEQ ID NO: 128411 - DNA, 25 bp, Saccharomyces pastorianus
ttcttccaccggagtactcgataag

SEQ ID NO: 128412 - DNA, 25 bp, Saccharomyces pastorianus
gcaattacgccattgtcgcgacaaa

SEQ ID NO: 128413 - DNA, 25 bp, Saccharomyces pastorianus
aattatagcggatcatttctcggga

SEQ ID NO: 128414 - DNA, 25 bp, Saccharomyces pastorianus
accatcgaacagtgggtcgccgata

SEQ ID NO: 128415 - DNA, 25 bp, Saccharomyces pastorianus
gaacatgtccttgagcttcaacctt

SEQ ID NO: 128416 - DNA, 25 bp, Saccharomyces pastorianus
gtatctcaggatttgttgtcttcca

SEQ ID NO: 128417 - DNA, 25 bp, Saccharomyces pastorianus
ttttagatgttcttttccggcacca

SEQ ID NO: 128418 - DNA, 25 bp, Saccharomyces pastorianus
atggtgcccctgagttcaacatgat

SEQ ID NO: 128419 - DNA, 25 bp, Saccharomyces pastorianus
gatcaatcctatctaatctggcaaa

SEQ ID NO: 128420 - DNA, 25 bp, Saccharomyces pastorianus
aatcgcgtgaactcgggatcttcaa

SEQ ID NO: 128421 - DNA, 25 bp, Saccharomyces pastorianus
agagctcattttcctgcaattacgc

SEQ ID NO: 128422 - DNA, 25 bp, Saccharomyces pastorianus
gacattaacggagaacgtggcgata

SEQ ID NO: 128423 - DNA, 25 bp, Saccharomyces pastorianus
gcaatctcacaaggacattaacgga

SEQ ID NO: 128424 - DNA, 25 bp, Saccharomyces pastorianus
gaagtagtaccaatgatacagaaat

SEQ ID NO: 128425 - DNA, 25 bp, Saccharomyces pastorianus
taaaagtcccttagagttatcgcat

SEQ ID NO: 128426 - DNA, 25 bp, Saccharomyces pastorianus
ttgccgatgaagtagtaccaatgat

SEQ ID NO: 128427 - DNA, 25 bp, Saccharomyces pastorianus
tgaaaattgccgatgaagtagtacc

SEQ ID NO: 128428 - DNA, 25 bp, Saccharomyces pastorianus
ggcggtgctgcggtccttgcaatct

SEQ ID NO: 128429 - DNA, 25 bp, Saccharomyces pastorianus
aatcctcagccaaaatgaaggtggt

SEQ ID NO: 128430 - DNA, 25 bp, Saccharomyces pastorianus
tgcggtccttgcaatctcacaagga

SEQ ID NO: 128431 - DNA, 25 bp, Saccharomyces pastorianus
agagttatcgcatcaagatttagag

SEQ ID NO: 128432 - DNA, 25 bp, Saccharomyces pastorianus
aagtcccttagagttatcgcatcaa

SEQ ID NO: 128433 - DNA, 25 bp, Saccharomyces pastorianus
ttcttttctaacttggcacggtcca

SEQ ID NO: 128434 - DNA, 25 bp, Saccharomyces pastorianus
gttcctaactaatgttatcgcatgc

SEQ ID NO: 128435 - DNA, 25 bp, Saccharomyces pastorianus
atcgcatgcattcaatgggttgatc

SEQ ID NO: 128436 - DNA, 25 bp, Saccharomyces pastorianus
cacggtccaaggcttctcttttaat

SEQ ID NO: 128437 - DNA, 25 bp, Saccharomyces pastorianus
atgggttgatctttccgattgtttc

SEQ ID NO: 128438 - DNA, 25 bp, Saccharomyces pastorianus
atgttatcgcatgcattcaatgggt

SEQ ID NO: 128439 - DNA, 25 bp, Saccharomyces pastorianus
tttaattctcttgtcttcctttatt

SEQ ID NO: 128440 - DNA, 25 bp, Saccharomyces pastorianus
aaaagtgcaatatgttcctaactaa

SEQ ID NO: 128441 - DNA, 25 bp, Saccharomyces pastorianus
ggcttctcttttaattctcttgtct

SEQ ID NO: 128442 - DNA, 25 bp, Saccharomyces pastorianus
ttatttttctacaccaatgtctaaa

SEQ ID NO: 128443 - DNA, 25 bp, Saccharomyces pastorianus
gatctttccgattgtttcttttcta

SEQ ID NO: 128444 - DNA, 25 bp, Saccharomyces pastorianus
aactctccagttaccagctcgatga

SEQ ID NO: 128445 - DNA, 25 bp, Saccharomyces pastorianus
actctccagttaccagctcgatgat

SEQ ID NO: 128446 - DNA, 25 bp, Saccharomyces pastorianus
gggaaactctccagttaccagctcg

SEQ ID NO: 128447 - DNA, 25 bp, Saccharomyces pastorianus
tccagttaccagctcgatgatcatt

SEQ ID NO: 128448 - DNA, 25 bp, Saccharomyces pastorianus
tctccagttaccagctcgatgatca

SEQ ID NO: 128449 - DNA, 25 bp, Saccharomyces pastorianus
ccagttaccagctcgatgatcatta

SEQ ID NO: 128450 - DNA, 25 bp, Saccharomyces pastorianus
agttaccagctcgatgatcattaag

SEQ ID NO: 128451 - DNA, 25 bp, Saccharomyces pastorianus
gaaactctccagttaccagctcgat

SEQ ID NO: 128452 - DNA, 25 bp, Saccharomyces pastorianus
cagttaccagctcgatgatcattaa

SEQ ID NO: 128453 - DNA, 25 bp, Saccharomyces pastorianus
aaactctccagttaccagctcgatg

SEQ ID NO: 128454 - DNA, 25 bp, Saccharomyces pastorianus
taccagctcgatgatcattaagccc

SEQ ID NO: 128455 - DNA, 25 bp, Saccharomyces pastorianus
actctccagttaccagctcgatgat

SEQ ID NO: 128456 - DNA, 25 bp, Saccharomyces pastorianus
gggaaactctccagttaccagctcg

SEQ ID NO: 128457 - DNA, 25 bp, Saccharomyces pastorianus
tccagttaccagctcgatgatcatt

SEQ ID NO: 128458 - DNA, 25 bp, Saccharomyces pastorianus
tctccagttaccagctcgatgatca

SEQ ID NO: 128459 - DNA, 25 bp, Saccharomyces pastorianus
ccagttaccagctcgatgatcatta

SEQ ID NO: 128460 - DNA, 25 bp, Saccharomyces pastorianus
agttaccagctcgatgatcattaag

SEQ ID NO: 128461 - DNA, 25 bp, Saccharomyces pastorianus
ggtgtatcgttatgcccacctaggg

SEQ ID NO: 128462 - DNA, 25 bp, Saccharomyces pastorianus
gaaactctccagttaccagctcgat

SEQ ID NO: 128463 - DNA, 25 bp, Saccharomyces pastorianus
ccatcaggtgtatcgttatgcccac

SEQ ID NO: 128464 - DNA, 25 bp, Saccharomyces pastorianus
taccagctcgatgatcattaagccc

SEQ ID NO: 128465 - DNA, 25 bp, Saccharomyces pastorianus
aactctccagttaccagctcgatga

SEQ ID NO: 128466 - DNA, 25 bp, Saccharomyces pastorianus
tgatgcatcctcagcggaacttcta

SEQ ID NO: 128467 - DNA, 25 bp, Saccharomyces pastorianus
gtatcgctgatgatgcatcctcagc

SEQ ID NO: 128468 - DNA, 25 bp, Saccharomyces pastorianus
gatgcatcctcagcggaacttctag

SEQ ID NO: 128469 - DNA, 25 bp, Saccharomyces pastorianus
gatgatgcatcctcagcggaacttc

SEQ ID NO: 128470 - DNA, 25 bp, Saccharomyces pastorianus
agcggaacttctaggccgtgtggac

SEQ ID NO: 128471 - DNA, 25 bp, Saccharomyces pastorianus
aagatgttatagcattaagtatcgc

SEQ ID NO: 128472 - DNA, 25 bp, Saccharomyces pastorianus
ttaagtatcgctgatgatgcatcct

SEQ ID NO: 128473 - DNA, 25 bp, Saccharomyces pastorianus
tcctcagcggaacttctaggccgtg

SEQ ID NO: 128474 - DNA, 25 bp, Saccharomyces pastorianus
aagtatcgctgatgatgcatcctca

SEQ ID NO: 128475 - DNA, 25 bp, Saccharomyces pastorianus
ctcagcggaacttctaggccgtgtg

SEQ ID NO: 128476 - DNA, 25 bp, Saccharomyces pastorianus
tgatgatgcatcctcagcggaactt

SEQ ID NO: 128477 - DNA, 25 bp, Saccharomyces pastorianus
gtgccgaaaccacatttttacaaga

SEQ ID NO: 128478 - DNA, 25 bp, Saccharomyces pastorianus
gatgcatcctcagcggaacttctag

SEQ ID NO: 128479 - DNA, 25 bp, Saccharomyces pastorianus
agcggaacttctaggccgtgtggac

SEQ ID NO: 128480 - DNA, 25 bp, Saccharomyces pastorianus
aagatgttatagcattaagtatcgc

SEQ ID NO: 128481 - DNA, 25 bp, Saccharomyces pastorianus
atgatgcatcctcagcggaacttct

SEQ ID NO: 128482 - DNA, 25 bp, Saccharomyces pastorianus
agtatcgctgatgatgcatcctcag

SEQ ID NO: 128483 - DNA, 25 bp, Saccharomyces pastorianus
ttaagtatcgctgatgatgcatcct

SEQ ID NO: 128484 - DNA, 25 bp, Saccharomyces pastorianus
tcctcagcggaacttctaggccgtg

SEQ ID NO: 128485 - DNA, 25 bp, Saccharomyces pastorianus
ctcagcggaacttctaggccgtgtg

SEQ ID NO: 128486 - DNA, 25 bp, Saccharomyces pastorianus
tgatgatgcatcctcagcggaactt

SEQ ID NO: 128487 - DNA, 25 bp, Saccharomyces pastorianus
ggcaaaggtgccgaaaccacatttt

SEQ ID NO: 128488 - DNA, 25 bp, Saccharomyces pastorianus
gaacatattccgttggctttacaga

SEQ ID NO: 128489 - DNA, 25 bp, Saccharomyces pastorianus
agatggctcatattgttaacactat

SEQ ID NO: 128490 - DNA, 25 bp, Saccharomyces pastorianus
tacctacgcatgctcctaaatacga

SEQ ID NO: 128491 - DNA, 25 bp, Saccharomyces pastorianus
acatccggttgatcaatgtgtctcc

SEQ ID NO: 128492 - DNA, 25 bp, Saccharomyces pastorianus
ggaagagcttacctgctttcaatga

SEQ ID NO: 128493 - DNA, 25 bp, Saccharomyces pastorianus
aggagagcagcgactaccatgcaaa

SEQ ID NO: 128494 - DNA, 25 bp, Saccharomyces pastorianus
aattattttaccgattcagcagtta

SEQ ID NO: 128495 - DNA, 25 bp, Saccharomyces pastorianus
gatgcaactatctctactgtgtgga

SEQ ID NO: 128496 - DNA, 25 bp, Saccharomyces pastorianus
aatggataccgaggcacatccggtt

SEQ ID NO: 128497 - DNA, 25 bp, Saccharomyces pastorianus
atgtgtctccgttttactaaatgtt

SEQ ID NO: 128498 - DNA, 25 bp, Saccharomyces pastorianus
gctttacagaaccacaaacccgtat

SEQ ID NO: 128499 - DNA, 25 bp, Saccharomyces pastorianus
aagggtcatcgagcacaatttaaga

SEQ ID NO: 128500 - DNA, 25 bp, Saccharomyces pastorianus
gttcaaaaaacctatgagcccgtct

SEQ ID NO: 128501 - DNA, 25 bp, Saccharomyces pastorianus
atatacgctaaagttaatcgcccag

SEQ ID NO: 128502 - DNA, 25 bp, Saccharomyces pastorianus
aatcgcccagccaaaatcgtgaatt

SEQ ID NO: 128503 - DNA, 25 bp, Saccharomyces pastorianus
gtaaaccagggcatcatatacgcta

SEQ ID NO: 128504 - DNA, 25 bp, Saccharomyces pastorianus
tgagcccgtcttaaatgaggatgat

SEQ ID NO: 128505 - DNA, 25 bp, Saccharomyces pastorianus
gcacattgtatatttcttagtcctt

SEQ ID NO: 128506 - DNA, 25 bp, Saccharomyces pastorianus
gagccagacggaaacatacatcagt

SEQ ID NO: 128507 - DNA, 25 bp, Saccharomyces pastorianus
ggaaacctgttttatcgcacattgt

SEQ ID NO: 128508 - DNA, 25 bp, Saccharomyces pastorianus
ttagtcctttcaccttacggcaatt

SEQ ID NO: 128509 - DNA, 25 bp, Saccharomyces pastorianus
aattgctggacctaacggagagcca

SEQ ID NO: 128510 - DNA, 25 bp, Saccharomyces pastorianus
ttggttagagacaccttcaacgcct

SEQ ID NO: 128511 - DNA, 25 bp, Saccharomyces pastorianus
gactactctccgatgaatttctttt

SEQ ID NO: 128512 - DNA, 25 bp, Saccharomyces pastorianus
gggacgcccgacaatcaaaatatct

SEQ ID NO: 128513 - DNA, 25 bp, Saccharomyces pastorianus
ttcaacgccttcagatggaggttca

SEQ ID NO: 128514 - DNA, 25 bp, Saccharomyces pastorianus
gagcatcaagttacagtggccttat

SEQ ID NO: 128515 - DNA, 25 bp, Saccharomyces pastorianus
tcggaccctccgttacaaattatga

SEQ ID NO: 128516 - DNA, 25 bp, Saccharomyces pastorianus
ggaggttcatcggtctctagtaata

SEQ ID NO: 128517 - DNA, 25 bp, Saccharomyces pastorianus
ctaagggttctgattccgctattaa

SEQ ID NO: 128518 - DNA, 25 bp, Saccharomyces pastorianus
atatgcgttgacagtccagcgttgc

SEQ ID NO: 128519 - DNA, 25 bp, Saccharomyces pastorianus
agtccagcgttgcacgagcatcaag

SEQ ID NO: 128520 - DNA, 25 bp, Saccharomyces pastorianus
ggccttatctcggaagtgtcttcaa

SEQ ID NO: 128521 - DNA, 25 bp, Saccharomyces pastorianus
tctaccggatgtcgctaatactgtt

SEQ ID NO: 128522 - DNA, 25 bp, Saccharomyces pastorianus
tgtttacattcttctctgtgaggcg

SEQ ID NO: 128523 - DNA, 25 bp, Saccharomyces pastorianus
atgttaactcaagcctggttgccta

SEQ ID NO: 128524 - DNA, 25 bp, Saccharomyces pastorianus
gtgtactccttagaaatcatgctca

SEQ ID NO: 128525 - DNA, 25 bp, Saccharomyces pastorianus
gtttgctactgattcctataaggtt

SEQ ID NO: 128526 - DNA, 25 bp, Saccharomyces pastorianus
taatactgatcgtgacctctaccgg

SEQ ID NO: 128527 - DNA, 25 bp, Saccharomyces pastorianus
ttgcctaagtaagttgcagtcgtta

SEQ ID NO: 128528 - DNA, 25 bp, Saccharomyces pastorianus
atcatgctcaagttccaaggattta

SEQ ID NO: 128529 - DNA, 25 bp, Saccharomyces pastorianus
atactgttagaatcgtccttatttg

SEQ ID NO: 128530 - DNA, 25 bp, Saccharomyces pastorianus
tcgttactcaacatagacctactgg

SEQ ID NO: 128531 - DNA, 25 bp, Saccharomyces pastorianus
tggttgcctacctgaagtttgctac

SEQ ID NO: 128532 - DNA, 25 bp, Saccharomyces pastorianus
atactgtacgcatgcttgagctagc

SEQ ID NO: 128533 - DNA, 25 bp, Saccharomyces pastorianus
tgaagatacaccttccgtttctgac

SEQ ID NO: 128534 - DNA, 25 bp, Saccharomyces pastorianus
aagccgactcaatggccagtgacgc

SEQ ID NO: 128535 - DNA, 25 bp, Saccharomyces pastorianus
gagctagctgcatactttacaaagg

SEQ ID NO: 128536 - DNA, 25 bp, Saccharomyces pastorianus
aaggcaaaactatccccaattcatc

SEQ ID NO: 128537 - DNA, 25 bp, Saccharomyces pastorianus
cattgaattggaacgccgctcatta

SEQ ID NO: 128538 - DNA, 25 bp, Saccharomyces pastorianus
aaattcgatatttgtgcagccacct

SEQ ID NO: 128539 - DNA, 25 bp, Saccharomyces pastorianus
ttccgtttctgacccattaacaggt

SEQ ID NO: 128540 - DNA, 25 bp, Saccharomyces pastorianus
caggcctcatattttgccggtgaat

SEQ ID NO: 128541 - DNA, 25 bp, Saccharomyces pastorianus
gactttgatccttatgctaaattcg

SEQ ID NO: 128542 - DNA, 25 bp, Saccharomyces pastorianus
acaagtggctatgtcccaacatttc

SEQ ID NO: 128543 - DNA, 25 bp, Saccharomyces pastorianus
gtgaacttcctgctcaattaggtta

SEQ ID NO: 128544 - DNA, 25 bp, Saccharomyces pastorianus
aagaattctaaactgcctgctgtcc

SEQ ID NO: 128545 - DNA, 25 bp, Saccharomyces pastorianus
agaccagtgatctcaaagccacttg

SEQ ID NO: 128546 - DNA, 25 bp, Saccharomyces pastorianus
gagcaaggcgaaattacctctccag

SEQ ID NO: 128547 - DNA, 25 bp, Saccharomyces pastorianus
ttgatgccgctgttcaagccttgag

SEQ ID NO: 128548 - DNA, 25 bp, Saccharomyces pastorianus
ctatagacgatgaaactccagcagt

SEQ ID NO: 128549 - DNA, 25 bp, Saccharomyces pastorianus
atacattcctagtacgccctgtgaa

SEQ ID NO: 128550 - DNA, 25 bp, Saccharomyces pastorianus
ggctgcttctgctttcttggagcaa

SEQ ID NO: 128551 - DNA, 25 bp, Saccharomyces pastorianus
taccagaccagatggatgcctccaa

SEQ ID NO: 128552 - DNA, 25 bp, Saccharomyces pastorianus
tagttgccgctggtgcctttgatgc

SEQ ID NO: 128553 - DNA, 25 bp, Saccharomyces pastorianus
ttacctctccagcacaggaagttga

SEQ ID NO: 128554 - DNA, 25 bp, Saccharomyces pastorianus
tacaggaaacgtttataatttacag

SEQ ID NO: 128555 - DNA, 25 bp, Saccharomyces pastorianus
ccggacggtaacacttttgatatct

SEQ ID NO: 128556 - DNA, 25 bp, Saccharomyces pastorianus
acagccggacggtaacacttttgat

SEQ ID NO: 128557 - DNA, 25 bp, Saccharomyces pastorianus
gacggtaacacttttgatatcttca

SEQ ID NO: 128558 - DNA, 25 bp, Saccharomyces pastorianus
gttccactcaatttacaggaaacgt

SEQ ID NO: 128559 - DNA, 25 bp, Saccharomyces pastorianus
cggtaacacttttgatatcttcaag

SEQ ID NO: 128560 - DNA, 25 bp, Saccharomyces pastorianus
gtatcacggaagactacggtttact

SEQ ID NO: 128561 - DNA, 25 bp, Saccharomyces pastorianus
cggtttactgattgcaaaagaattg

SEQ ID NO: 128562 - DNA, 25 bp, Saccharomyces pastorianus
cacggaagactacggtttactgatt

SEQ ID NO: 128563 - DNA, 25 bp, Saccharomyces pastorianus
cactcaatttacaggaaacgtttat

SEQ ID NO: 128564 - DNA, 25 bp, Saccharomyces pastorianus
agccggacggtaacacttttgatat

SEQ ID NO: 128565 - DNA, 25 bp, Saccharomyces pastorianus
gtaaggcgatactttcgtacgctcc

SEQ ID NO: 128566 - DNA, 25 bp, Saccharomyces pastorianus
aaggtgtttgcgcatcaacggccgt

SEQ ID NO: 128567 - DNA, 25 bp, Saccharomyces pastorianus
ttgagccccacctactataagtgta

SEQ ID NO: 128568 - DNA, 25 bp, Saccharomyces pastorianus
gagcccgcttatcttaagatctctg

SEQ ID NO: 128569 - DNA, 25 bp, Saccharomyces pastorianus
gttgcccttaggtgatatcgagccc

SEQ ID NO: 128570 - DNA, 25 bp, Saccharomyces pastorianus
tcgtacgctcctggattttcagata

SEQ ID NO: 128571 - DNA, 25 bp, Saccharomyces pastorianus
aatggcccaatgacctttatgcttt

SEQ ID NO: 128572 - DNA, 25 bp, Saccharomyces pastorianus
attacaccttgatttattgccagca

SEQ ID NO: 128573 - DNA, 25 bp, Saccharomyces pastorianus
gcttcaatcgcctgtgactaatcga

SEQ ID NO: 128574 - DNA, 25 bp, Saccharomyces pastorianus
tattgtgtgctacttggctgtggta

SEQ ID NO: 128575 - DNA, 25 bp, Saccharomyces pastorianus
ggttaacaccggttttgagcataca

SEQ ID NO: 128576 - DNA, 25 bp, Saccharomyces pastorianus
tacagcccaacgtcaccaagttaca

SEQ ID NO: 128577 - DNA, 25 bp, Saccharomyces pastorianus
gtctccagcctattccccaacatca

SEQ ID NO: 128578 - DNA, 25 bp, Saccharomyces pastorianus
tcctattccccaacatcaccttctt

SEQ ID NO: 128579 - DNA, 25 bp, Saccharomyces pastorianus
atcaccatcctattccccaacatca

SEQ ID NO: 128580 - DNA, 25 bp, Saccharomyces pastorianus
cacctctccaaactatagccctact

SEQ ID NO: 128581 - DNA, 25 bp, Saccharomyces pastorianus
atcgccttcatactctccaacatca

SEQ ID NO: 128582 - DNA, 25 bp, Saccharomyces pastorianus
tacatcgccttcatactctccaaca

SEQ ID NO: 128583 - DNA, 25 bp, Saccharomyces pastorianus
aagcgacagccctacgtgtccttct

SEQ ID NO: 128584 - DNA, 25 bp, Saccharomyces pastorianus
acagcccaacgtcaccaagttacag

SEQ ID NO: 128585 - DNA, 25 bp, Saccharomyces pastorianus
tacgtgtccttcttattctcctaca

SEQ ID NO: 128586 - DNA, 25 bp, Saccharomyces pastorianus
ttacagcccaacgtctccagcctat

SEQ ID NO: 128587 - DNA, 25 bp, Saccharomyces pastorianus
aggatctcctgcatattctccaaag

SEQ ID NO: 128588 - DNA, 25 bp, Saccharomyces pastorianus
gatctcctgcatattctccaaagca

SEQ ID NO: 128589 - DNA, 25 bp, Saccharomyces pastorianus
aggctacagcccaggatctcctgca

SEQ ID NO: 128590 - DNA, 25 bp, Saccharomyces pastorianus
aactatagccctacttcaccttctt

SEQ ID NO: 128591 - DNA, 25 bp, Saccharomyces pastorianus
caggatctcctgcatattctccaaa

SEQ ID NO: 128592 - DNA, 25 bp, Saccharomyces pastorianus
tctcctgcatattctccaaagcaag

SEQ ID NO: 128593 - DNA, 25 bp, Saccharomyces pastorianus
actatagccctacttcaccttctta

SEQ ID NO: 128594 - DNA, 25 bp, Saccharomyces pastorianus
tacagcccaggatctcctgcatatt

SEQ ID NO: 128595 - DNA, 25 bp, Saccharomyces pastorianus
tgcatattctccaaagcaagacgaa

SEQ ID NO: 128596 - DNA, 25 bp, Saccharomyces pastorianus
atctccaggctacagcccaggatct

SEQ ID NO: 128597 - DNA, 25 bp, Saccharomyces pastorianus
aacatctccaggctacagcccagga

SEQ ID NO: 128598 - DNA, 25 bp, Saccharomyces pastorianus
cacgtctccatttggtgcttatggt

SEQ ID NO: 128599 - DNA, 25 bp, Saccharomyces pastorianus
tacagcgtacggtggtgctgattat

SEQ ID NO: 128600 - DNA, 25 bp, Saccharomyces pastorianus
gtggcgtcacaccatacagtaacga

SEQ ID NO: 128601 - DNA, 25 bp, Saccharomyces pastorianus
agcacctacatctcccggatttgga

SEQ ID NO: 128602 - DNA, 25 bp, Saccharomyces pastorianus
atcggtaccggtgcatttgatgtga

SEQ ID NO: 128603 - DNA, 25 bp, Saccharomyces pastorianus
atgacgctatggctggaggatttac

SEQ ID NO: 128604 - DNA, 25 bp, Saccharomyces pastorianus
ttcgggttcaaatgacgctatggct

SEQ ID NO: 128605 - DNA, 25 bp, Saccharomyces pastorianus
aagtggtttggtcaatgcagatctt

SEQ ID NO: 128606 - DNA, 25 bp, Saccharomyces pastorianus
tcacctctggttgattcgggttcaa

SEQ ID NO: 128607 - DNA, 25 bp, Saccharomyces pastorianus
ggatttggagtctcctcaccaggct

SEQ ID NO: 128608 - DNA, 25 bp, Saccharomyces pastorianus
gattatggtgaagccacgtctccat

SEQ ID NO: 128609 - DNA, 25 bp, Saccharomyces pastorianus
taacgccgtggcgattgcgtatatt

SEQ ID NO: 128610 - DNA, 25 bp, Saccharomyces pastorianus
gagtgggtttgcacttctattcgca

SEQ ID NO: 128611 - DNA, 25 bp, Saccharomyces pastorianus
gctaatctagcgctggcatttaata

SEQ ID NO: 128612 - DNA, 25 bp, Saccharomyces pastorianus
gctggcatttaatactcgtttcgac

SEQ ID NO: 128613 - DNA, 25 bp, Saccharomyces pastorianus
gtgggtaatcactttctcgatcagt

SEQ ID NO: 128614 - DNA, 25 bp, Saccharomyces pastorianus
cactttctcgatcagtattgttaga

SEQ ID NO: 128615 - DNA, 25 bp, Saccharomyces pastorianus
aggaagctttatccgcttttctgtt

SEQ ID NO: 128616 - DNA, 25 bp, Saccharomyces pastorianus
atattatttacattgcacacgatga

SEQ ID NO: 128617 - DNA, 25 bp, Saccharomyces pastorianus
gaggaatccgttaagcaaactgaaa

SEQ ID NO: 128618 - DNA, 25 bp, Saccharomyces pastorianus
acacgatgaatttgctggtaaacct

SEQ ID NO: 128619 - DNA, 25 bp, Saccharomyces pastorianus
atggccatctgcgttaacgccgtgg

SEQ ID NO: 128620 - DNA, 25 bp, Saccharomyces pastorianus
atcggctgtcattctgcatacacta

SEQ ID NO: 128621 - DNA, 25 bp, Saccharomyces pastorianus
cacagtgccgccttatgttttagag

SEQ ID NO: 128622 - DNA, 25 bp, Saccharomyces pastorianus
agtttgcatctaccatcggctgtca

SEQ ID NO: 128623 - DNA, 25 bp, Saccharomyces pastorianus
aagacttcaggataagggcaccgtt

SEQ ID NO: 128624 - DNA, 25 bp, Saccharomyces pastorianus
ttacacgtttgtgcctaccacagtg

SEQ ID NO: 128625 - DNA, 25 bp, Saccharomyces pastorianus
gggcaccgttgatggaaatgttaca

SEQ ID NO: 128626 - DNA, 25 bp, Saccharomyces pastorianus
cttatgttttagaggcgcagtttga

SEQ ID NO: 128627 - DNA, 25 bp, Saccharomyces pastorianus
gttcaccactagactatccaaaatt

SEQ ID NO: 128628 - DNA, 25 bp, Saccharomyces pastorianus
gaggcgcagtttgataaattaagac

SEQ ID NO: 128629 - DNA, 25 bp, Saccharomyces pastorianus
aatacttacacgtttgtgcctacca

SEQ ID NO: 128630 - DNA, 25 bp, Saccharomyces pastorianus
gtcattctgcatacactagagacca

SEQ ID NO: 128631 - DNA, 25 bp, Saccharomyces pastorianus
tgcagcagagcatgtcacttcagtc

SEQ ID NO: 128632 - DNA, 25 bp, Saccharomyces pastorianus
tatgagcaccatttccaggaatcca

SEQ ID NO: 128633 - DNA, 25 bp, Saccharomyces pastorianus
tatttccagctagggagccatcacg

SEQ ID NO: 128634 - DNA, 25 bp, Saccharomyces pastorianus
gatgatcgatgttccaatgacgcta

SEQ ID NO: 128635 - DNA, 25 bp, Saccharomyces pastorianus
ctgtgatcatctctttttgtgcgga

SEQ ID NO: 128636 - DNA, 25 bp, Saccharomyces pastorianus
gtcacttcagtcttggtggccatga

SEQ ID NO: 128637 - DNA, 25 bp, Saccharomyces pastorianus
aacgttgttgaatctaccgggctat

SEQ ID NO: 128638 - DNA, 25 bp, Saccharomyces pastorianus
gtgcggattttctagtcggtacgat

SEQ ID NO: 128639 - DNA, 25 bp, Saccharomyces pastorianus
tggagggtgtcatgtctctagctat

SEQ ID NO: 128640 - DNA, 25 bp, Saccharomyces pastorianus
caggaatccacatcactctttgagt

SEQ ID NO: 128641 - DNA, 25 bp, Saccharomyces pastorianus
atcggttcctctttacaaattgcct

SEQ ID NO: 128642 - DNA, 25 bp, Saccharomyces pastorianus
tttcttggcaattataccgttggca

SEQ ID NO: 128643 - DNA, 25 bp, Saccharomyces pastorianus
ctaccccactattaactgttgcgaa

SEQ ID NO: 128644 - DNA, 25 bp, Saccharomyces pastorianus
gcgtcacccctgaattttctattag

SEQ ID NO: 128645 - DNA, 25 bp, Saccharomyces pastorianus
gcaatccaaagcacactgcatggag

SEQ ID NO: 128646 - DNA, 25 bp, Saccharomyces pastorianus
accgttggcagctatcttggctaat

SEQ ID NO: 128647 - DNA, 25 bp, Saccharomyces pastorianus
actatctcacacactgacatttctt

SEQ ID NO: 128648 - DNA, 25 bp, Saccharomyces pastorianus
taactgttgcgaacagtcatcccgc

SEQ ID NO: 128649 - DNA, 25 bp, Saccharomyces pastorianus
tggagagcagctgtgtatgatttac

SEQ ID NO: 128650 - DNA, 25 bp, Saccharomyces pastorianus
atggatgcaactaccccactattaa

SEQ ID NO: 128651 - DNA, 25 bp, Saccharomyces pastorianus
tattagtatttgttcctttaggtct

SEQ ID NO: 128652 - DNA, 25 bp, Saccharomyces pastorianus
gtatattttgaaagcgtcacccctg

SEQ ID NO: 128653 - DNA, 25 bp, Saccharomyces pastorianus
tttgattgcaatggcatttttctat

SEQ ID NO: 128654 - DNA, 25 bp, Saccharomyces pastorianus
attttgattgcaatggcatttttct

SEQ ID NO: 128655 - DNA, 25 bp, Saccharomyces pastorianus
gattgcaatggcatttttctattat

SEQ ID NO: 128656 - DNA, 25 bp, Saccharomyces pastorianus
ttttgattgcaatggcatttttcta

SEQ ID NO: 128657 - DNA, 25 bp, Saccharomyces pastorianus
tgcaatggcatttttctattatcca

SEQ ID NO: 128658 - DNA, 25 bp, Saccharomyces pastorianus
tgattgcaatggcatttttctatta

SEQ ID NO: 128659 - DNA, 25 bp, Saccharomyces pastorianus
tatattttgattgcaatggcatttt

SEQ ID NO: 128660 - DNA, 25 bp, Saccharomyces pastorianus
tattttgattgcaatggcatttttc

SEQ ID NO: 128661 - DNA, 25 bp, Saccharomyces pastorianus
ttgcaatggcatttttctattatcc

SEQ ID NO: 128662 - DNA, 25 bp, Saccharomyces pastorianus
gtatattttgattgcaatggcattt

SEQ ID NO: 128663 - DNA, 25 bp, Saccharomyces pastorianus
attgcaatggcatttttctattatc

SEQ ID NO: 128664 - DNA, 25 bp, Saccharomyces pastorianus
tggagcaggtgctgcatttggttct

SEQ ID NO: 128665 - DNA, 25 bp, Saccharomyces pastorianus
agaccgctaaacgttctgtttcaga

SEQ ID NO: 128666 - DNA, 25 bp, Saccharomyces pastorianus
accagaagtagatcctgttccatat

SEQ ID NO: 128667 - DNA, 25 bp, Saccharomyces pastorianus
gttagagttgactgcgatcgccaaa

SEQ ID NO: 128668 - DNA, 25 bp, Saccharomyces pastorianus
aagacctggcagattggatcaatta

SEQ ID NO: 128669 - DNA, 25 bp, Saccharomyces pastorianus
ggagcatttcgcagaagctatgaag

SEQ ID NO: 128670 - DNA, 25 bp, Saccharomyces pastorianus
gtttctctggtgctgatttactcta

SEQ ID NO: 128671 - DNA, 25 bp, Saccharomyces pastorianus
gatcgccaaagccactcaaggtttc

SEQ ID NO: 128672 - DNA, 25 bp, Saccharomyces pastorianus
tgtgttcgtgattggtgccaccaat

SEQ ID NO: 128673 - DNA, 25 bp, Saccharomyces pastorianus
ggtactacggctacggacaatgcta

SEQ ID NO: 128674 - DNA, 25 bp, Saccharomyces pastorianus
ttcagatgctgaattgcgtcgttat

SEQ ID NO: 128675 - DNA, 25 bp, Saccharomyces pastorianus
gtgttaccaattgctgattcgatcg

SEQ ID NO: 128676 - DNA, 25 bp, Saccharomyces pastorianus
aattagaagacggagcatgcaggat

SEQ ID NO: 128677 - DNA, 25 bp, Saccharomyces pastorianus
gctattaattctaacaccatggaca

SEQ ID NO: 128678 - DNA, 25 bp, Saccharomyces pastorianus
aggctgggtgatttagttacaattc

SEQ ID NO: 128679 - DNA, 25 bp, Saccharomyces pastorianus
gctactagaatttctgtgttaccaa

SEQ ID NO: 128680 - DNA, 25 bp, Saccharomyces pastorianus
ttacaattcatccttgccccgatat

SEQ ID NO: 128681 - DNA, 25 bp, Saccharomyces pastorianus
gcaggataaaccgtgtagttcgtaa

SEQ ID NO: 128682 - DNA, 25 bp, Saccharomyces pastorianus
acaatttacgtattaggctgggtga

SEQ ID NO: 128683 - DNA, 25 bp, Saccharomyces pastorianus
ctgtcttaattgtgttgatcgatga

SEQ ID NO: 128684 - DNA, 25 bp, Saccharomyces pastorianus
cctcgggtgtcgaccctcgtgagga

SEQ ID NO: 128685 - DNA, 25 bp, Saccharomyces pastorianus
gccccgatatcaaatacgctactag

SEQ ID NO: 128686 - DNA, 25 bp, Saccharomyces pastorianus
gtccacttccatttgattcctaaga

SEQ ID NO: 128687 - DNA, 25 bp, Saccharomyces pastorianus
cttcgataagttgggcagctacaca

SEQ ID NO: 128688 - DNA, 25 bp, Saccharomyces pastorianus
atcaagaagtcgaccacgtccactt

SEQ ID NO: 128689 - DNA, 25 bp, Saccharomyces pastorianus
ggacacttataatgtgttgcagaat

SEQ ID NO: 128690 - DNA, 25 bp, Saccharomyces pastorianus
ggtggccagcccaagaaacggactt

SEQ ID NO: 128691 - DNA, 25 bp, Saccharomyces pastorianus
ggcaatgaagttggacacttataat

SEQ ID NO: 128692 - DNA, 25 bp, Saccharomyces pastorianus
gccagcccaagaaacggacttcgat

SEQ ID NO: 128693 - DNA, 25 bp, Saccharomyces pastorianus
gaataatggtaaaattgcgcatcaa

SEQ ID NO: 128694 - DNA, 25 bp, Saccharomyces pastorianus
ttgcgcatcaagaagtcgaccacgt

SEQ ID NO: 128695 - DNA, 25 bp, Saccharomyces pastorianus
tttgattgtagggtggccagcccaa

SEQ ID NO: 128696 - DNA, 25 bp, Saccharomyces pastorianus
aacggacttcgataagttgggcagc

SEQ ID NO: 128697 - DNA, 25 bp, Saccharomyces pastorianus
aaaaatgtctgctcctgctaggctt

SEQ ID NO: 128698 - DNA, 25 bp, Saccharomyces pastorianus
gctaggcttgatgttgcctgtattt

SEQ ID NO: 128699 - DNA, 25 bp, Saccharomyces pastorianus
tcctgctaggcttgatgttgcctgt

SEQ ID NO: 128700 - DNA, 25 bp, Saccharomyces pastorianus
ctgctcctgctaggcttgatgttgc

SEQ ID NO: 128701 - DNA, 25 bp, Saccharomyces pastorianus
caacaaaaatgtctgctcctgctag

SEQ ID NO: 128702 - DNA, 25 bp, Saccharomyces pastorianus
gtctgctcctgctaggcttgatgtt

SEQ ID NO: 128703 - DNA, 25 bp, Saccharomyces pastorianus
aaatgtctgctcctgctaggcttga

SEQ ID NO: 128704 - DNA, 25 bp, Saccharomyces pastorianus
tcggcaccgtacctaacaacaacaa

SEQ ID NO: 128705 - DNA, 25 bp, Saccharomyces pastorianus
atgtctgctcctgctaggcttgatg

SEQ ID NO: 128706 - DNA, 25 bp, Saccharomyces pastorianus
acaaaaatgtctgctcctgctaggc

SEQ ID NO: 128707 - DNA, 25 bp, Saccharomyces pastorianus
gcttgatgttgcctgtattttttgc

SEQ ID NO: 128708 - DNA, 25 bp, Saccharomyces pastorianus
gacatattcattgcgctctgtcatt

SEQ ID NO: 128709 - DNA, 25 bp, Saccharomyces pastorianus
gacaatgtgagccttgacgaaccaa

SEQ ID NO: 128710 - DNA, 25 bp, Saccharomyces pastorianus
caacacccggtgtatttatgttatt

SEQ ID NO: 128711 - DNA, 25 bp, Saccharomyces pastorianus
gttcactacggtacccataattatg

SEQ ID NO: 128712 - DNA, 25 bp, Saccharomyces pastorianus
agctccacctatcaattatgctagg

SEQ ID NO: 128713 - DNA, 25 bp, Saccharomyces pastorianus
gctctgtcattgttcactacggtac

SEQ ID NO: 128714 - DNA, 25 bp, Saccharomyces pastorianus
atgagactgtgtacgttgtggacga

SEQ ID NO: 128715 - DNA, 25 bp, Saccharomyces pastorianus
aagatgttataccagctccacctat

SEQ ID NO: 128716 - DNA, 25 bp, Saccharomyces pastorianus
gaaaccgatgctttagggaatacaa

SEQ ID NO: 128717 - DNA, 25 bp, Saccharomyces pastorianus
gttccagccactccattgacatatt

SEQ ID NO: 128718 - DNA, 25 bp, Saccharomyces pastorianus
tgaagtcctttcaacacccggtgta

SEQ ID NO: 128719 - DNA, 25 bp, Saccharomyces pastorianus
tggcactgtttacattccaactgaa

SEQ ID NO: 128720 - DNA, 25 bp, Saccharomyces pastorianus
actagataccactccagttgcgaaa

SEQ ID NO: 128721 - DNA, 25 bp, Saccharomyces pastorianus
aactgaacagattgatcctaactct

SEQ ID NO: 128722 - DNA, 25 bp, Saccharomyces pastorianus
gtaggtcaacttaaccttggtgaag

SEQ ID NO: 128723 - DNA, 25 bp, Saccharomyces pastorianus
gttgcgaaatcagaattacccgatg

SEQ ID NO: 128724 - DNA, 25 bp, Saccharomyces pastorianus
acccgatgatgctttagtaggtcaa

SEQ ID NO: 128725 - DNA, 25 bp, Saccharomyces pastorianus
aaaatattcttcttggctacgacca

SEQ ID NO: 128726 - DNA, 25 bp, Saccharomyces pastorianus
ttcttccagaacatactagccgagt

SEQ ID NO: 128727 - DNA, 25 bp, Saccharomyces pastorianus
aaccttggtgaagttggcactgttt

SEQ ID NO: 128728 - DNA, 25 bp, Saccharomyces pastorianus
gaggacgcgcaagaattcttccaga

SEQ ID NO: 128729 - DNA, 25 bp, Saccharomyces pastorianus
tggctacgaccaagaggacgcgcaa

SEQ ID NO: 128730 - DNA, 25 bp, Saccharomyces pastorianus
ggaagctttatgtggacgctgtcca

SEQ ID NO: 128731 - DNA, 25 bp, Saccharomyces pastorianus
aaccctgaatcgaacattcctactt

SEQ ID NO: 128732 - DNA, 25 bp, Saccharomyces pastorianus
aatggccgcgtaaaggctctcgaac

SEQ ID NO: 128733 - DNA, 25 bp, Saccharomyces pastorianus
tcctgtatgagattagagccctata

SEQ ID NO: 128734 - DNA, 25 bp, Saccharomyces pastorianus
aatttcgcggattcggcagattatg

SEQ ID NO: 128735 - DNA, 25 bp, Saccharomyces pastorianus
tccgttagcttgttaaaccctgaat

SEQ ID NO: 128736 - DNA, 25 bp, Saccharomyces pastorianus
gtccactctatcattgccttatcga

SEQ ID NO: 128737 - DNA, 25 bp, Saccharomyces pastorianus
gatttaacttcctctaatttcgcgg

SEQ ID NO: 128738 - DNA, 25 bp, Saccharomyces pastorianus
agccctatatactccatttctactg

SEQ ID NO: 128739 - DNA, 25 bp, Saccharomyces pastorianus
aaatttatttcggaagccctggcat

SEQ ID NO: 128740 - DNA, 25 bp, Saccharomyces pastorianus
aagccctggcatttacctcattggt

SEQ ID NO: 128741 - DNA, 25 bp, Saccharomyces pastorianus
atgccccatattatgtgaacctggt

SEQ ID NO: 128742 - DNA, 25 bp, Saccharomyces pastorianus
gcatctcttaaaacatttcagtgga

SEQ ID NO: 128743 - DNA, 25 bp, Saccharomyces pastorianus
tttcaaaactttgagttggccatat

SEQ ID NO: 128744 - DNA, 25 bp, Saccharomyces pastorianus
aacatttcagtggaatggaccatgt

SEQ ID NO: 128745 - DNA, 25 bp, Saccharomyces pastorianus
gagttggccatataggcatctctta

SEQ ID NO: 128746 - DNA, 25 bp, Saccharomyces pastorianus
ggaatggaccatgtaacgtcaacca

SEQ ID NO: 128747 - DNA, 25 bp, Saccharomyces pastorianus
ggccatataggcatctcttaaaaca

SEQ ID NO: 128748 - DNA, 25 bp, Saccharomyces pastorianus
taggcatctcttaaaacatttcagt

SEQ ID NO: 128749 - DNA, 25 bp, Saccharomyces pastorianus
ccccatattatgtgaacctggttcc

SEQ ID NO: 128750 - DNA, 25 bp, Saccharomyces pastorianus
aatggaccatgtaacgtcaaccagc

SEQ ID NO: 128751 - DNA, 25 bp, Saccharomyces pastorianus
aaactttgagttggccatataggca

SEQ ID NO: 128752 - DNA, 25 bp, Saccharomyces pastorianus
gaagtttgcccacggaatgtaataa

SEQ ID NO: 128753 - DNA, 25 bp, Saccharomyces pastorianus
tgtccctacaccatctaagttattg

SEQ ID NO: 128754 - DNA, 25 bp, Saccharomyces pastorianus
cactactggtgtgcccgggaaaaat

SEQ ID NO: 128755 - DNA, 25 bp, Saccharomyces pastorianus
tggcactagcgataatctctgcgat

SEQ ID NO: 128756 - DNA, 25 bp, Saccharomyces pastorianus
tcacaagtgtatgagcaggcatttc

SEQ ID NO: 128757 - DNA, 25 bp, Saccharomyces pastorianus
agttattggctcctgacatcatacc

SEQ ID NO: 128758 - DNA, 25 bp, Saccharomyces pastorianus
atatgtttattgatgtccctacacc

SEQ ID NO: 128759 - DNA, 25 bp, Saccharomyces pastorianus
gcgataatctctgcgatggagcata

SEQ ID NO: 128760 - DNA, 25 bp, Saccharomyces pastorianus
taaaaacactactggtgtgcccggg

SEQ ID NO: 128761 - DNA, 25 bp, Saccharomyces pastorianus
ggagcataatcatctgcaaacacta

SEQ ID NO: 128762 - DNA, 25 bp, Saccharomyces pastorianus
gcatttcagaagtttgcccacggaa

SEQ ID NO: 128763 - DNA, 25 bp, Saccharomyces pastorianus
tgcttcagtcctcggagaactgact

SEQ ID NO: 128764 - DNA, 25 bp, Saccharomyces pastorianus
ggtgcttaccgaatcatcagtacat

SEQ ID NO: 128765 - DNA, 25 bp, Saccharomyces pastorianus
tcgtatggtgcatcaaaaggagcaa

SEQ ID NO: 128766 - DNA, 25 bp, Saccharomyces pastorianus
atcatttcctacttttgctcaggta

SEQ ID NO: 128767 - DNA, 25 bp, Saccharomyces pastorianus
gaatcatcagtacatttgcagaaga

SEQ ID NO: 128768 - DNA, 25 bp, Saccharomyces pastorianus
gtggcagatattcaatcatttccta

SEQ ID NO: 128769 - DNA, 25 bp, Saccharomyces pastorianus
aattaacattgcttcagtcctcgga

SEQ ID NO: 128770 - DNA, 25 bp, Saccharomyces pastorianus
cataaacttaataggtgcttaccga

SEQ ID NO: 128771 - DNA, 25 bp, Saccharomyces pastorianus
ataatgctggtgttgctcacatcaa

SEQ ID NO: 128772 - DNA, 25 bp, Saccharomyces pastorianus
ggaggtagaacaattgatcgacata

SEQ ID NO: 128773 - DNA, 25 bp, Saccharomyces pastorianus
agaactgactcctgcaaggctgaca

SEQ ID NO: 128774 - DNA, 25 bp, Saccharomyces pastorianus
tggagcttgggaaaccgttctggat

SEQ ID NO: 128775 - DNA, 25 bp, Saccharomyces pastorianus
atcattgatcttgctaggaaccgaa

SEQ ID NO: 128776 - DNA, 25 bp, Saccharomyces pastorianus
gaaaccgttctggatctggacaata

SEQ ID NO: 128777 - DNA, 25 bp, Saccharomyces pastorianus
ttaggtgtgggactgcttactgtac

SEQ ID NO: 128778 - DNA, 25 bp, Saccharomyces pastorianus
gaatgatgtcgttacacgttctgaa

SEQ ID NO: 128779 - DNA, 25 bp, Saccharomyces pastorianus
gctagacaacaatttccaattccct

SEQ ID NO: 128780 - DNA, 25 bp, Saccharomyces pastorianus
atgaatattcaaacggcaaccgcag

SEQ ID NO: 128781 - DNA, 25 bp, Saccharomyces pastorianus
ataagccgccaaacctgggaggtat

SEQ ID NO: 128782 - DNA, 25 bp, Saccharomyces pastorianus
atgcccatggaggaagttgccctag

SEQ ID NO: 128783 - DNA, 25 bp, Saccharomyces pastorianus
tgacacttctccactgctaacaaaa

SEQ ID NO: 128784 - DNA, 25 bp, Saccharomyces pastorianus
atcttcattagtcgataagccgcca

SEQ ID NO: 128785 - DNA, 25 bp, Saccharomyces pastorianus
acatgattgcccgtacatttctgag

SEQ ID NO: 128786 - DNA, 25 bp, Saccharomyces pastorianus
attcaaagcctacctatcggatcac

SEQ ID NO: 128787 - DNA, 25 bp, Saccharomyces pastorianus
ggttcatttcctcaaaggttgttga

SEQ ID NO: 128788 - DNA, 25 bp, Saccharomyces pastorianus
agattcatttgcacgttagttccta

SEQ ID NO: 128789 - DNA, 25 bp, Saccharomyces pastorianus
aatattcggtcaatatcgtgccggg

SEQ ID NO: 128790 - DNA, 25 bp, Saccharomyces pastorianus
gttagttcctaacgcagcttcaaac

SEQ ID NO: 128791 - DNA, 25 bp, Saccharomyces pastorianus
accggtgtttgtagttagcgcagaa

SEQ ID NO: 128792 - DNA, 25 bp, Saccharomyces pastorianus
ggaggatcatagcaaaccggtgttt

SEQ ID NO: 128793 - DNA, 25 bp, Saccharomyces pastorianus
aggattatctcttctcattgctgga

SEQ ID NO: 128794 - DNA, 25 bp, Saccharomyces pastorianus
gtacatttctgagtctgttgtcgaa

SEQ ID NO: 128795 - DNA, 25 bp, Saccharomyces pastorianus
ggtaaggcatttttctaattctcta

SEQ ID NO: 128796 - DNA, 25 bp, Saccharomyces pastorianus
gtggaccgctgttcagtgtttagaa

SEQ ID NO: 128797 - DNA, 25 bp, Saccharomyces pastorianus
gaagtttcttcctttatgacgtata

SEQ ID NO: 128798 - DNA, 25 bp, Saccharomyces pastorianus
agagattggcccgaagtttcttcct

SEQ ID NO: 128799 - DNA, 25 bp, Saccharomyces pastorianus
ggaaaaggttcattgctgctagcga

SEQ ID NO: 128800 - DNA, 25 bp, Saccharomyces pastorianus
cacatcggctattgatatctggtca

SEQ ID NO: 128801 - DNA, 25 bp, Saccharomyces pastorianus
ttattattttcacctgatggccaga

SEQ ID NO: 128802 - DNA, 25 bp, Saccharomyces pastorianus
gtaccattgccacagaaatttcatt

SEQ ID NO: 128803 - DNA, 25 bp, Saccharomyces pastorianus
tatctggtcagtaggcgttatattc

SEQ ID NO: 128804 - DNA, 25 bp, Saccharomyces pastorianus
aaatttcattttgcacagggatctg

SEQ ID NO: 128805 - DNA, 25 bp, Saccharomyces pastorianus
aacattcagggccttagggacacct

SEQ ID NO: 128806 - DNA, 25 bp, Saccharomyces pastorianus
ataccggccccacatgagatactga

SEQ ID NO: 128807 - DNA, 25 bp, Saccharomyces pastorianus
caatgataaatgtctttcttgaaag

SEQ ID NO: 128808 - DNA, 25 bp, Saccharomyces pastorianus
gtttctctggatttttcgattgctg

SEQ ID NO: 128809 - DNA, 25 bp, Saccharomyces pastorianus
gagcccatgaaagccaaagccttgc

SEQ ID NO: 128810 - DNA, 25 bp, Saccharomyces pastorianus
ctggatttttcgattgctgtgtgaa

SEQ ID NO: 128811 - DNA, 25 bp, Saccharomyces pastorianus
taaaggtgcacgagattgcctagaa

SEQ ID NO: 128812 - DNA, 25 bp, Saccharomyces pastorianus
aacgggtatggaaataatggacttg

SEQ ID NO: 128813 - DNA, 25 bp, Saccharomyces pastorianus
gcacgagattgcctagaaagcgtaa

SEQ ID NO: 128814 - DNA, 25 bp, Saccharomyces pastorianus
aagccttgctagaaaattgtgcatc

SEQ ID NO: 128815 - DNA, 25 bp, Saccharomyces pastorianus
gagttcagagcccatgaaagccaaa

SEQ ID NO: 128816 - DNA, 25 bp, Saccharomyces pastorianus
aatggacttggaatgtttctctgga

SEQ ID NO: 128817 - DNA, 25 bp, Saccharomyces pastorianus
gaaagaatggttcaaaacgggtatg

SEQ ID NO: 128818 - DNA, 25 bp, Saccharomyces pastorianus
gatgcgaaacgtcttgataactcta

SEQ ID NO: 128819 - DNA, 25 bp, Saccharomyces pastorianus
aatacccctatataaggagttcaga

SEQ ID NO: 128820 - DNA, 25 bp, Saccharomyces pastorianus
gcagaggtttgtcagtaagtttgtt

SEQ ID NO: 128821 - DNA, 25 bp, Saccharomyces pastorianus
tcaagagattttcccgaagaaacgt

SEQ ID NO: 128822 - DNA, 25 bp, Saccharomyces pastorianus
aaatgtacccgatatttctgcaggt

SEQ ID NO: 128823 - DNA, 25 bp, Saccharomyces pastorianus
cgcagaacaaattcgtccacaaaga

SEQ ID NO: 128824 - DNA, 25 bp, Saccharomyces pastorianus
gatacaaggcttacataccatgaaa

SEQ ID NO: 128825 - DNA, 25 bp, Saccharomyces pastorianus
atcccatggaggaagaaatacccct

SEQ ID NO: 128826 - DNA, 25 bp, Saccharomyces pastorianus
gtcttgataactctaaggacgcaga

SEQ ID NO: 128827 - DNA, 25 bp, Saccharomyces pastorianus
taagtttgtttccacaccaccagta

SEQ ID NO: 128828 - DNA, 25 bp, Saccharomyces pastorianus
tattccagttagatacaaggcttac

SEQ ID NO: 128829 - DNA, 25 bp, Saccharomyces pastorianus
gtggactatgtcattatcggtggta

SEQ ID NO: 128830 - DNA, 25 bp, Saccharomyces pastorianus
aaattacacaaatccacagccgcac

SEQ ID NO: 128831 - DNA, 25 bp, Saccharomyces pastorianus
acaatattcaagtggattcgcgcta

SEQ ID NO: 128832 - DNA, 25 bp, Saccharomyces pastorianus
gtgaaggccctctttgttcaaactg

SEQ ID NO: 128833 - DNA, 25 bp, Saccharomyces pastorianus
tatcaaagacgttagccccaaatta

SEQ ID NO: 128834 - DNA, 25 bp, Saccharomyces pastorianus
ttggtgacaaacaggcgaacggtat

SEQ ID NO: 128835 - DNA, 25 bp, Saccharomyces pastorianus
gagcagaagatccattatttgtact

SEQ ID NO: 128836 - DNA, 25 bp, Saccharomyces pastorianus
gtggattcgcgctattatttaacta

SEQ ID NO: 128837 - DNA, 25 bp, Saccharomyces pastorianus
gccaaaggtgcgctggtaacttaca

SEQ ID NO: 128838 - DNA, 25 bp, Saccharomyces pastorianus
gttcaaactgtctagcaaggtctgg

SEQ ID NO: 128839 - DNA, 25 bp, Saccharomyces pastorianus
gcacgccgttttggctgaacgtatg

SEQ ID NO: 128840 - DNA, 25 bp, Saccharomyces pastorianus
gacgaggatactccccaattggaaa

SEQ ID NO: 128841 - DNA, 25 bp, Saccharomyces pastorianus
gatcgatgacgaggatactccccaa

SEQ ID NO: 128842 - DNA, 25 bp, Saccharomyces pastorianus
agagattattccgagtgattctttt

SEQ ID NO: 128843 - DNA, 25 bp, Saccharomyces pastorianus
atggtgttggaagtgaacctgtttc

SEQ ID NO: 128844 - DNA, 25 bp, Saccharomyces pastorianus
acggcaatcaatagatcatggtgtt

SEQ ID NO: 128845 - DNA, 25 bp, Saccharomyces pastorianus
tcccatggttgatgtgaagatcgat

SEQ ID NO: 128846 - DNA, 25 bp, Saccharomyces pastorianus
gcttcaaagcaaaggatacagattt

SEQ ID NO: 128847 - DNA, 25 bp, Saccharomyces pastorianus
gatcccttcccatggttgatgtgaa

SEQ ID NO: 128848 - DNA, 25 bp, Saccharomyces pastorianus
gtgaaaaaagatcccttcccatggt

SEQ ID NO: 128849 - DNA, 25 bp, Saccharomyces pastorianus
tataatagtcaaggcttcaaagcaa

SEQ ID NO: 128850 - DNA, 25 bp, Saccharomyces pastorianus
gtgaacctgtttcaacaatagagat

SEQ ID NO: 128851 - DNA, 25 bp, Saccharomyces pastorianus
ggtttattctggactaatcctgaca

SEQ ID NO: 128852 - DNA, 25 bp, Saccharomyces pastorianus
gggtaaattgccatgcttagccatt

SEQ ID NO: 128853 - DNA, 25 bp, Saccharomyces pastorianus
gatttcagctaactctgtctatggt

SEQ ID NO: 128854 - DNA, 25 bp, Saccharomyces pastorianus
gcatacttcccttaccttttgataa

SEQ ID NO: 128855 - DNA, 25 bp, Saccharomyces pastorianus
gaagctgccaaatatgtctccactc

SEQ ID NO: 128856 - DNA, 25 bp, Saccharomyces pastorianus
tagccatttcttcatctgttactgc

SEQ ID NO: 128857 - DNA, 25 bp, Saccharomyces pastorianus
aagcacgatgccgttgtggtttacg

SEQ ID NO: 128858 - DNA, 25 bp, Saccharomyces pastorianus
ctgttactgcttatggtcgtaccat

SEQ ID NO: 128859 - DNA, 25 bp, Saccharomyces pastorianus
ggtgacactgattccgttatggtaa

SEQ ID NO: 128860 - DNA, 25 bp, Saccharomyces pastorianus
tatggatcttggtacggaagctgcc

SEQ ID NO: 128861 - DNA, 25 bp, Saccharomyces pastorianus
tctccactctattcaaacatccgat

SEQ ID NO: 128862 - DNA, 25 bp, Saccharomyces pastorianus
ggttttcctccattcagtgatcaat

SEQ ID NO: 128863 - DNA, 25 bp, Saccharomyces pastorianus
aagtatgcgttttactctccgtact

SEQ ID NO: 128864 - DNA, 25 bp, Saccharomyces pastorianus
gatgaagctttgaaccacccttggt

SEQ ID NO: 128865 - DNA, 25 bp, Saccharomyces pastorianus
atgtctgtttatgtggttttcctcc

SEQ ID NO: 128866 - DNA, 25 bp, Saccharomyces pastorianus
gcgcccgaagtcctcacaaagaaag

SEQ ID NO: 128867 - DNA, 25 bp, Saccharomyces pastorianus
ggcgcgaaaatccaagtcaagtcca

SEQ ID NO: 128868 - DNA, 25 bp, Saccharomyces pastorianus
acacactttgtggtacaccttctta

SEQ ID NO: 128869 - DNA, 25 bp, Saccharomyces pastorianus
tcttttggtcctaaatcctgatgaa

SEQ ID NO: 128870 - DNA, 25 bp, Saccharomyces pastorianus
tacaccttcttatgtagcgcccgaa

SEQ ID NO: 128871 - DNA, 25 bp, Saccharomyces pastorianus
gtcaagtccaactaggcccatggga

SEQ ID NO: 128872 - DNA, 25 bp, Saccharomyces pastorianus
agcaacaaagctcggtctcattaga

SEQ ID NO: 128873 - DNA, 25 bp, Saccharomyces pastorianus
actgagtgagcctgacatctcgact

SEQ ID NO: 128874 - DNA, 25 bp, Saccharomyces pastorianus
gcaacgaagtaataagcccagctca

SEQ ID NO: 128875 - DNA, 25 bp, Saccharomyces pastorianus
aagcccagctcagaatacacttgtc

SEQ ID NO: 128876 - DNA, 25 bp, Saccharomyces pastorianus
gatgtaactgactcttcattcaaaa

SEQ ID NO: 128877 - DNA, 25 bp, Saccharomyces pastorianus
gtcgtgcgacgttatactgagtgag

SEQ ID NO: 128878 - DNA, 25 bp, Saccharomyces pastorianus
agaatacacttgtctgggccatctg

SEQ ID NO: 128879 - DNA, 25 bp, Saccharomyces pastorianus
tctggtgaacttaatacccggaaag

SEQ ID NO: 128880 - DNA, 25 bp, Saccharomyces pastorianus
gtctgggccatctggtgaacttaat

SEQ ID NO: 128881 - DNA, 25 bp, Saccharomyces pastorianus
aatcggtagaagtaggtcgtgcgac

SEQ ID NO: 128882 - DNA, 25 bp, Saccharomyces pastorianus
agcactctggtgatgtaactgactc

SEQ ID NO: 128883 - DNA, 25 bp, Saccharomyces pastorianus
atagaaacgttactacaatcggtag

SEQ ID NO: 128884 - DNA, 25 bp, Saccharomyces pastorianus
gaaactccgaatcaggatgccacat

SEQ ID NO: 128885 - DNA, 25 bp, Saccharomyces pastorianus
ttgatgccatgaaagctgtcgctga

SEQ ID NO: 128886 - DNA, 25 bp, Saccharomyces pastorianus
gcttttagacttcaacacggcgcta

SEQ ID NO: 128887 - DNA, 25 bp, Saccharomyces pastorianus
gaggcttataacaacagatcgcttt

SEQ ID NO: 128888 - DNA, 25 bp, Saccharomyces pastorianus
atgctgaaccttattgatgacgtaa

SEQ ID NO: 128889 - DNA, 25 bp, Saccharomyces pastorianus
aaacgtaccagtcccgaggcattga

SEQ ID NO: 128890 - DNA, 25 bp, Saccharomyces pastorianus
taatcggtctggatactcaacaagt

SEQ ID NO: 128891 - DNA, 25 bp, Saccharomyces pastorianus
atttgactacgcataattcctacga

SEQ ID NO: 128892 - DNA, 25 bp, Saccharomyces pastorianus
taatggttggctctacgtttacgaa

SEQ ID NO: 128893 - DNA, 25 bp, Saccharomyces pastorianus
gatgccacatacgactctgcattag

SEQ ID NO: 128894 - DNA, 25 bp, Saccharomyces pastorianus
aaaactgcattttcgtatttcttcg

SEQ ID NO: 128895 - DNA, 25 bp, Saccharomyces pastorianus
tcagcgaacattctccactgattta

SEQ ID NO: 128896 - DNA, 25 bp, Saccharomyces pastorianus
gtatgtttctatttcttcagcgaac

SEQ ID NO: 128897 - DNA, 25 bp, Saccharomyces pastorianus
ggatggtcgagtaacctgtgtaaga

SEQ ID NO: 128898 - DNA, 25 bp, Saccharomyces pastorianus
tccaagtggttaggaagctgggact

SEQ ID NO: 128899 - DNA, 25 bp, Saccharomyces pastorianus
gttgtatgtttctatttcttcagcg

SEQ ID NO: 128900 - DNA, 25 bp, Saccharomyces pastorianus
cactgatttatgctactggatggtc

SEQ ID NO: 128901 - DNA, 25 bp, Saccharomyces pastorianus
ttgcaattcactattactatccgat

SEQ ID NO: 128902 - DNA, 25 bp, Saccharomyces pastorianus
agctgggacttttattgcaattcac

SEQ ID NO: 128903 - DNA, 25 bp, Saccharomyces pastorianus
cctgtgtaagaggtccaagtggtta

SEQ ID NO: 128904 - DNA, 25 bp, Saccharomyces pastorianus
tatttcttcagcgaacattctccac

SEQ ID NO: 128905 - DNA, 25 bp, Saccharomyces pastorianus
gctactggatggtcgagtaacctgt

SEQ ID NO: 128906 - DNA, 25 bp, Saccharomyces pastorianus
aacttactgatgtcaaccctgtcta

SEQ ID NO: 128907 - DNA, 25 bp, Saccharomyces pastorianus
cccactcagacttttaccatacaaa

SEQ ID NO: 128908 - DNA, 25 bp, Saccharomyces pastorianus
tgctcttcgggactacatattgtac

SEQ ID NO: 128909 - DNA, 25 bp, Saccharomyces pastorianus
gaatggtctagtgctcgtcaattgc

SEQ ID NO: 128910 - DNA, 25 bp, Saccharomyces pastorianus
tcggctgccattcttgaagcttttg

SEQ ID NO: 128911 - DNA, 25 bp, Saccharomyces pastorianus
agttgcactcctaatgattctccac

SEQ ID NO: 128912 - DNA, 25 bp, Saccharomyces pastorianus
gcttcaacaaacatgctcttcggga

SEQ ID NO: 128913 - DNA, 25 bp, Saccharomyces pastorianus
cctattaggactggctgttgcggaa

SEQ ID NO: 128914 - DNA, 25 bp, Saccharomyces pastorianus
agaccgcctaattggatcatcgaaa

SEQ ID NO: 128915 - DNA, 25 bp, Saccharomyces pastorianus
gaaagttcatacagttgcactccta

SEQ ID NO: 128916 - DNA, 25 bp, Saccharomyces pastorianus
tattaagtgtactccagaccgccta

SEQ ID NO: 128917 - DNA, 25 bp, Saccharomyces pastorianus
gatactctatcatctgcaatgggta

SEQ ID NO: 128918 - DNA, 25 bp, Saccharomyces pastorianus
gaggcatttctcaattatccgacaa

SEQ ID NO: 128919 - DNA, 25 bp, Saccharomyces pastorianus
cactcactccctatgtggcgaagaa

SEQ ID NO: 128920 - DNA, 25 bp, Saccharomyces pastorianus
gaaagtgtgccaggatcccgtgaaa

SEQ ID NO: 128921 - DNA, 25 bp, Saccharomyces pastorianus
tgatattaattccattcttcgctct

SEQ ID NO: 128922 - DNA, 25 bp, Saccharomyces pastorianus
aatcaacgtcatcccattggttttc

SEQ ID NO: 128923 - DNA, 25 bp, Saccharomyces pastorianus
gaaaagggcggagctttcctgccga

SEQ ID NO: 128924 - DNA, 25 bp, Saccharomyces pastorianus
aaacgcctttaagcgcacgacagaa

SEQ ID NO: 128925 - DNA, 25 bp, Saccharomyces pastorianus
tcgaaatccctgagcccattaagaa

SEQ ID NO: 128926 - DNA, 25 bp, Saccharomyces pastorianus
gcgtggacgacgacttgattttatc

SEQ ID NO: 128927 - DNA, 25 bp, Saccharomyces pastorianus
attctcctagaatgtccccatatta

SEQ ID NO: 128928 - DNA, 25 bp, Saccharomyces pastorianus
aagcatatgacgactcggaagtagt

SEQ ID NO: 128929 - DNA, 25 bp, Saccharomyces pastorianus
aaatgaagcatatgacgactcggaa

SEQ ID NO: 128930 - DNA, 25 bp, Saccharomyces pastorianus
taaatgaagcatatgacgactcgga

SEQ ID NO: 128931 - DNA, 25 bp, Saccharomyces pastorianus
atgacgactcggaagtagttggtga

SEQ ID NO: 128932 - DNA, 25 bp, Saccharomyces pastorianus
aagagcatcacaatctgcatggatg

SEQ ID NO: 128933 - DNA, 25 bp, Saccharomyces pastorianus
aaagagcatcacaatctgcatggat

SEQ ID NO: 128934 - DNA, 25 bp, Saccharomyces pastorianus
ggaaagagcatcacaatctgcatgg

SEQ ID NO: 128935 - DNA, 25 bp, Saccharomyces pastorianus
aagtagttggtgaggaaagagcatc

SEQ ID NO: 128936 - DNA, 25 bp, Saccharomyces pastorianus
gaggaaagagcatcacaatctgcat

SEQ ID NO: 128937 - DNA, 25 bp, Saccharomyces pastorianus
gaaagagcatcacaatctgcatgga

SEQ ID NO: 128938 - DNA, 25 bp, Saccharomyces pastorianus
aatgaagcatatgacgactcggaag

SEQ ID NO: 128939 - DNA, 25 bp, Saccharomyces pastorianus
atttcacggttctttgattggttgc

SEQ ID NO: 128940 - DNA, 25 bp, Saccharomyces pastorianus
tgccggtcatgctggtaatccaaca

SEQ ID NO: 128941 - DNA, 25 bp, Saccharomyces pastorianus
attcctaatctgttgcgaaacctag

SEQ ID NO: 128942 - DNA, 25 bp, Saccharomyces pastorianus
gggtcaaactcacttataattctcc

SEQ ID NO: 128943 - DNA, 25 bp, Saccharomyces pastorianus
ataattctccatcttctgctttgag

SEQ ID NO: 128944 - DNA, 25 bp, Saccharomyces pastorianus
gattggttgcatcccatattcaaaa

SEQ ID NO: 128945 - DNA, 25 bp, Saccharomyces pastorianus
aagacgataatactcctgccggtca

SEQ ID NO: 128946 - DNA, 25 bp, Saccharomyces pastorianus
gaacctgctggttttacgcacaaac

SEQ ID NO: 128947 - DNA, 25 bp, Saccharomyces pastorianus
ataactgatggcactcttctgaggg

SEQ ID NO: 128948 - DNA, 25 bp, Saccharomyces pastorianus
atcgtcgacatctaatacaccatcc

SEQ ID NO: 128949 - DNA, 25 bp, Saccharomyces pastorianus
tgtatcaaaattcctccacatcgtc

SEQ ID NO: 128950 - DNA, 25 bp, Saccharomyces pastorianus
aatcacagttgcagccacaaccgca

SEQ ID NO: 128951 - DNA, 25 bp, Saccharomyces pastorianus
aacccagatgtttcaatcgcaatca

SEQ ID NO: 128952 - DNA, 25 bp, Saccharomyces pastorianus
gacaacccagatgtttcaatcgcaa

SEQ ID NO: 128953 - DNA, 25 bp, Saccharomyces pastorianus
atcgcaatcacagttgcagccacaa

SEQ ID NO: 128954 - DNA, 25 bp, Saccharomyces pastorianus
tttactaacctcacgtcgcaagcac

SEQ ID NO: 128955 - DNA, 25 bp, Saccharomyces pastorianus
gtttcaatcgcaatcacagttgcag

SEQ ID NO: 128956 - DNA, 25 bp, Saccharomyces pastorianus
cagatgtttcaatcgcaatcacagt

SEQ ID NO: 128957 - DNA, 25 bp, Saccharomyces pastorianus
ggatttactaacctcacgtcgcaag

SEQ ID NO: 128958 - DNA, 25 bp, Saccharomyces pastorianus
atttactaacctcacgtcgcaagca

SEQ ID NO: 128959 - DNA, 25 bp, Saccharomyces pastorianus
caccacagacaacccagatgtttca

SEQ ID NO: 128960 - DNA, 25 bp, Saccharomyces pastorianus
aagcaccacagacaacccagatgtt

SEQ ID NO: 128961 - DNA, 25 bp, Saccharomyces pastorianus
gcaggccgccgcagatgctagaaga

SEQ ID NO: 128962 - DNA, 25 bp, Saccharomyces pastorianus
gagacaaaagcaggccgccgcagat

SEQ ID NO: 128963 - DNA, 25 bp, Saccharomyces pastorianus
tcagacgccgaactcttgagacaaa

SEQ ID NO: 128964 - DNA, 25 bp, Saccharomyces pastorianus
cagacgccgaactcttgagacaaaa

SEQ ID NO: 128965 - DNA, 25 bp, Saccharomyces pastorianus
cgccgaactcttgagacaaaagcag

SEQ ID NO: 128966 - DNA, 25 bp, Saccharomyces pastorianus
gacgccgaactcttgagacaaaagc

SEQ ID NO: 128967 - DNA, 25 bp, Saccharomyces pastorianus
tgagacaaaagcaggccgccgcaga

SEQ ID NO: 128968 - DNA, 25 bp, Saccharomyces pastorianus
ttgagacaaaagcaggccgccgcag

SEQ ID NO: 128969 - DNA, 25 bp, Saccharomyces pastorianus
gaactcttgagacaaaagcaggccg

SEQ ID NO: 128970 - DNA, 25 bp, Saccharomyces pastorianus
actcttgagacaaaagcaggccgcc

SEQ ID NO: 128971 - DNA, 25 bp, Saccharomyces pastorianus
tcttgagacaaaagcaggccgccgc

SEQ ID NO: 128972 - DNA, 25 bp, Saccharomyces pastorianus
aagcccttgttctctggtgaaagcg

SEQ ID NO: 128973 - DNA, 25 bp, Saccharomyces pastorianus
gatcccgatactcttgacttgttaa

SEQ ID NO: 128974 - DNA, 25 bp, Saccharomyces pastorianus
tgaagaccatgttttccccaatatc

SEQ ID NO: 128975 - DNA, 25 bp, Saccharomyces pastorianus
aactctgaagtatcacccttgcgaa

SEQ ID NO: 128976 - DNA, 25 bp, Saccharomyces pastorianus
caggtcgacgtgtggtcaagcgctt

SEQ ID NO: 128977 - DNA, 25 bp, Saccharomyces pastorianus
accggatcagcctaatgtgtcttac

SEQ ID NO: 128978 - DNA, 25 bp, Saccharomyces pastorianus
ccgaactcatgtttggtgccactaa

SEQ ID NO: 128979 - DNA, 25 bp, Saccharomyces pastorianus
agttgggccatgttccacttgtgga

SEQ ID NO: 128980 - DNA, 25 bp, Saccharomyces pastorianus
cgcttgtgtcattgctgagttgctt

SEQ ID NO: 128981 - DNA, 25 bp, Saccharomyces pastorianus
gtggatccgacaactttttctttca

SEQ ID NO: 128982 - DNA, 25 bp, Saccharomyces pastorianus
gttcaaggtactatagggctcccga

SEQ ID NO: 128983 - DNA, 25 bp, Saccharomyces pastorianus
acagattcgatttcctggttcacca

SEQ ID NO: 128984 - DNA, 25 bp, Saccharomyces pastorianus
tccaggttgagcttgtggccaccac

SEQ ID NO: 128985 - DNA, 25 bp, Saccharomyces pastorianus
aagcggcgacaagttactgtaacga

SEQ ID NO: 128986 - DNA, 25 bp, Saccharomyces pastorianus
gttagtctccatatacgattccaat

SEQ ID NO: 128987 - DNA, 25 bp, Saccharomyces pastorianus
gaacgcatgtcatcgtatggagtct

SEQ ID NO: 128988 - DNA, 25 bp, Saccharomyces pastorianus
aacgacgtgtaccaaagtgatccga

SEQ ID NO: 128989 - DNA, 25 bp, Saccharomyces pastorianus
gtggccaccacatacaaactcaatg

SEQ ID NO: 128990 - DNA, 25 bp, Saccharomyces pastorianus
gaaggcagaaatatcatcacccatt

SEQ ID NO: 128991 - DNA, 25 bp, Saccharomyces pastorianus
ggaactccaagctgattctgaattt

SEQ ID NO: 128992 - DNA, 25 bp, Saccharomyces pastorianus
tagaaaaggcactcctccaggttga

SEQ ID NO: 128993 - DNA, 25 bp, Saccharomyces pastorianus
gaagagcttctattgtacttgtaca

SEQ ID NO: 128994 - DNA, 25 bp, Saccharomyces pastorianus
gtccaggaagtcgagcatgtcaagc

SEQ ID NO: 128995 - DNA, 25 bp, Saccharomyces pastorianus
catgcaatatttgtcgtccaacctc

SEQ ID NO: 128996 - DNA, 25 bp, Saccharomyces pastorianus
gaattggacggcaatgacgctaccc

SEQ ID NO: 128997 - DNA, 25 bp, Saccharomyces pastorianus
gagttatgtgtttcggacaatccag

SEQ ID NO: 128998 - DNA, 25 bp, Saccharomyces pastorianus
gacgaagtacagttattctcttatc

SEQ ID NO: 128999 - DNA, 25 bp, Saccharomyces pastorianus
agttcttcattgattctcctcattc

SEQ ID NO: 129000 - DNA, 25 bp, Saccharomyces pastorianus
gtcaaaaatctctcgggaacctact

SEQ ID NO: 129001 - DNA, 25 bp, Saccharomyces pastorianus
gaggaaccatttttgatcgccactg

SEQ ID NO: 129002 - DNA, 25 bp, Saccharomyces pastorianus
gcaatgacgctaccccaatgataat

SEQ ID NO: 129003 - DNA, 25 bp, Saccharomyces pastorianus
tcgtccaacctcctgatgttatata

SEQ ID NO: 129004 - DNA, 25 bp, Saccharomyces pastorianus
actgaccatgctacattttccgaat

SEQ ID NO: 129005 - DNA, 25 bp, Saccharomyces pastorianus
ttctcctacgttgaacctgtcttag

SEQ ID NO: 129006 - DNA, 25 bp, Saccharomyces pastorianus
tcctacgttgaacctgtcttagttg

SEQ ID NO: 129007 - DNA, 25 bp, Saccharomyces pastorianus
gtcttagttgcttctgccaagggtc

SEQ ID NO: 129008 - DNA, 25 bp, Saccharomyces pastorianus
ggtactgatgatgtccgtctagctc

SEQ ID NO: 129009 - DNA, 25 bp, Saccharomyces pastorianus
ccattgttctcctacgttgaacctg

SEQ ID NO: 129010 - DNA, 25 bp, Saccharomyces pastorianus
gctccagaattgaaccaagctatct

SEQ ID NO: 129011 - DNA, 25 bp, Saccharomyces pastorianus
attgttctcctacgttgaacctgtc

SEQ ID NO: 129012 - DNA, 25 bp, Saccharomyces pastorianus
tcttagttgcttctgccaagggtct

SEQ ID NO: 129013 - DNA, 25 bp, Saccharomyces pastorianus
cttagttgcttctgccaagggtcta

SEQ ID NO: 129014 - DNA, 25 bp, Saccharomyces pastorianus
atgatgtccgtctagctccagaatt

SEQ ID NO: 129015 - DNA, 25 bp, Saccharomyces pastorianus
agctatctggaagagaggtgtcaag

SEQ ID NO: 129016 - DNA, 25 bp, Saccharomyces pastorianus
actcgactgcgccaactaacaagaa

SEQ ID NO: 129017 - DNA, 25 bp, Saccharomyces pastorianus
ttaaaaattcattacccgcagatga

SEQ ID NO: 129018 - DNA, 25 bp, Saccharomyces pastorianus
gcatctaggtaaaacgcttttgcgt

SEQ ID NO: 129019 - DNA, 25 bp, Saccharomyces pastorianus
gaatgggatgattcgtatcattaaa

SEQ ID NO: 129020 - DNA, 25 bp, Saccharomyces pastorianus
aaactaagtggcaactactcgactg

SEQ ID NO: 129021 - DNA, 25 bp, Saccharomyces pastorianus
agatgaagcgactattgcaataatt

SEQ ID NO: 129022 - DNA, 25 bp, Saccharomyces pastorianus
aactaatccggctattcaatatttg

SEQ ID NO: 129023 - DNA, 25 bp, Saccharomyces pastorianus
aagaggataactattcttcttcata

SEQ ID NO: 129024 - DNA, 25 bp, Saccharomyces pastorianus
gcaatgaagcatacagttgacgatt

SEQ ID NO: 129025 - DNA, 25 bp, Saccharomyces pastorianus
aacgcttttgcgtaggaaggcaatg

SEQ ID NO: 129026 - DNA, 25 bp, Saccharomyces pastorianus
ttacccgcagatgaaatactaactt

SEQ ID NO: 129027 - DNA, 25 bp, Saccharomyces pastorianus
gtaatgatccgaacttggggaacct

SEQ ID NO: 129028 - DNA, 25 bp, Saccharomyces pastorianus
tgatccgaacttggggaaccttgat

SEQ ID NO: 129029 - DNA, 25 bp, Saccharomyces pastorianus
attgatggtaatgatccgaacttgg

SEQ ID NO: 129030 - DNA, 25 bp, Saccharomyces pastorianus
ggaaattgatggtaatgatccgaac

SEQ ID NO: 129031 - DNA, 25 bp, Saccharomyces pastorianus
aattgatggtaatgatccgaacttg

SEQ ID NO: 129032 - DNA, 25 bp, Saccharomyces pastorianus
ttgatggtaatgatccgaacttggg

SEQ ID NO: 129033 - DNA, 25 bp, Saccharomyces pastorianus
atgatccgaacttggggaaccttga

SEQ ID NO: 129034 - DNA, 25 bp, Saccharomyces pastorianus
gaaattgatggtaatgatccgaact

SEQ ID NO: 129035 - DNA, 25 bp, Saccharomyces pastorianus
taatgatccgaacttggggaacctt

SEQ ID NO: 129036 - DNA, 25 bp, Saccharomyces pastorianus
tccgaacttggggaaccttgataag

SEQ ID NO: 129037 - DNA, 25 bp, Saccharomyces pastorianus
aaattgatggtaatgatccgaactt

SEQ ID NO: 129038 - DNA, 25 bp, Saccharomyces pastorianus
aacacagttgaatgttcgccctgaa

SEQ ID NO: 129039 - DNA, 25 bp, Saccharomyces pastorianus
gtctctatctctaacagagctctct

SEQ ID NO: 129040 - DNA, 25 bp, Saccharomyces pastorianus
tacgttggatagtttcattcactac

SEQ ID NO: 129041 - DNA, 25 bp, Saccharomyces pastorianus
atttgggcgcttctgaaactcatct

SEQ ID NO: 129042 - DNA, 25 bp, Saccharomyces pastorianus
agaatgggctgtatttgggcgcttc

SEQ ID NO: 129043 - DNA, 25 bp, Saccharomyces pastorianus
ggagagttgttaaccaccttatgga

SEQ ID NO: 129044 - DNA, 25 bp, Saccharomyces pastorianus
gtcatgattgctttactacgttgga

SEQ ID NO: 129045 - DNA, 25 bp, Saccharomyces pastorianus
gggatgcctcttacgactataatga

SEQ ID NO: 129046 - DNA, 25 bp, Saccharomyces pastorianus
gaaattgggcagttcttcatacaaa

SEQ ID NO: 129047 - DNA, 25 bp, Saccharomyces pastorianus
gttatgttacacagttggacagcca

SEQ ID NO: 129048 - DNA, 25 bp, Saccharomyces pastorianus
aaactcatctttcctgatggagcgt

SEQ ID NO: 129049 - DNA, 25 bp, Saccharomyces pastorianus
catagttgtggagtcgttcggctta

SEQ ID NO: 129050 - DNA, 25 bp, Saccharomyces pastorianus
actccagccgctattgcagaatttg

SEQ ID NO: 129051 - DNA, 25 bp, Saccharomyces pastorianus
gcagcagaacagcaaccgcagctaa

SEQ ID NO: 129052 - DNA, 25 bp, Saccharomyces pastorianus
ggttgttattcgattttgccgataa

SEQ ID NO: 129053 - DNA, 25 bp, Saccharomyces pastorianus
aaatccactacgcaaagctgggtca

SEQ ID NO: 129054 - DNA, 25 bp, Saccharomyces pastorianus
acttactgtcgttagtggtggctct

SEQ ID NO: 129055 - DNA, 25 bp, Saccharomyces pastorianus
gttgaatcgttatccgctttgcaag

SEQ ID NO: 129056 - DNA, 25 bp, Saccharomyces pastorianus
gtcaatctacctttggagatctgat

SEQ ID NO: 129057 - DNA, 25 bp, Saccharomyces pastorianus
gttccatcagtgttctttgtgagga

SEQ ID NO: 129058 - DNA, 25 bp, Saccharomyces pastorianus
gatcaagagcatcttcgtctcgatt

SEQ ID NO: 129059 - DNA, 25 bp, Saccharomyces pastorianus
gaagtattgctttgagttccatcag

SEQ ID NO: 129060 - DNA, 25 bp, Saccharomyces pastorianus
gatagttcgctggatgtaatactac

SEQ ID NO: 129061 - DNA, 25 bp, Saccharomyces pastorianus
aagtagatagttcgctggatgtaat

SEQ ID NO: 129062 - DNA, 25 bp, Saccharomyces pastorianus
tgaagaagtagatagttcgctggat

SEQ ID NO: 129063 - DNA, 25 bp, Saccharomyces pastorianus
gggaaggtacggaaatgaatattga

SEQ ID NO: 129064 - DNA, 25 bp, Saccharomyces pastorianus
taataaaaataagggcgcagaacag

SEQ ID NO: 129065 - DNA, 25 bp, Saccharomyces pastorianus
agaagtagatagttcgctggatgta

SEQ ID NO: 129066 - DNA, 25 bp, Saccharomyces pastorianus
ggattatcagggaaggtacggaaat

SEQ ID NO: 129067 - DNA, 25 bp, Saccharomyces pastorianus
tagatagttcgctggatgtaatact

SEQ ID NO: 129068 - DNA, 25 bp, Saccharomyces pastorianus
gaaaaacaaattgagttccttggtg

SEQ ID NO: 129069 - DNA, 25 bp, Saccharomyces pastorianus
gtagatagttcgctggatgtaatac

SEQ ID NO: 129070 - DNA, 25 bp, Saccharomyces pastorianus
gagttccttggtgaagaaatttgaa

SEQ ID NO: 129071 - DNA, 25 bp, Saccharomyces pastorianus
gatagttcgctggatgtaatactac

SEQ ID NO: 129072 - DNA, 25 bp, Saccharomyces pastorianus
aagtagatagttcgctggatgtaat

SEQ ID NO: 129073 - DNA, 25 bp, Saccharomyces pastorianus
tgaagaagtagatagttcgctggat

SEQ ID NO: 129074 - DNA, 25 bp, Saccharomyces pastorianus
taataaaaataagggcgcagaacag

SEQ ID NO: 129075 - DNA, 25 bp, Saccharomyces pastorianus
gggaaggtacggaaatgaatattga

SEQ ID NO: 129076 - DNA, 25 bp, Saccharomyces pastorianus
atactacagacattgatagccaaca

SEQ ID NO: 129077 - DNA, 25 bp, Saccharomyces pastorianus
ggattatcagggaaggtacggaaat

SEQ ID NO: 129078 - DNA, 25 bp, Saccharomyces pastorianus
gaagacaatgccaagattcataaat

SEQ ID NO: 129079 - DNA, 25 bp, Saccharomyces pastorianus
gaaaaacaaattgagttccttggtg

SEQ ID NO: 129080 - DNA, 25 bp, Saccharomyces pastorianus
gtagatagttcgctggatgtaatac

SEQ ID NO: 129081 - DNA, 25 bp, Saccharomyces pastorianus
gagttccttggtgaagaaatttgaa

SEQ ID NO: 129082 - DNA, 25 bp, Saccharomyces pastorianus
atcccctacattgggtattctggaa

SEQ ID NO: 129083 - DNA, 25 bp, Saccharomyces pastorianus
taccggtggtggaacatctcctatt

SEQ ID NO: 129084 - DNA, 25 bp, Saccharomyces pastorianus
gttatcctgtaacttcaaggcctca

SEQ ID NO: 129085 - DNA, 25 bp, Saccharomyces pastorianus
agcgctccctatatagatgctccaa

SEQ ID NO: 129086 - DNA, 25 bp, Saccharomyces pastorianus
gtcaccgggcgattttgccgatagt

SEQ ID NO: 129087 - DNA, 25 bp, Saccharomyces pastorianus
aacagaatcaatggccacgtccgta

SEQ ID NO: 129088 - DNA, 25 bp, Saccharomyces pastorianus
tattatttccatgatcccgcgttat

SEQ ID NO: 129089 - DNA, 25 bp, Saccharomyces pastorianus
ataagtccctaccacaagtgttatt

SEQ ID NO: 129090 - DNA, 25 bp, Saccharomyces pastorianus
gatgctccaatcgatccagaattac

SEQ ID NO: 129091 - DNA, 25 bp, Saccharomyces pastorianus
aaggcacgattctcgacagcagcag

SEQ ID NO: 129092 - DNA, 25 bp, Saccharomyces pastorianus
agaattacatactgccttccattgg

SEQ ID NO: 129093 - DNA, 25 bp, Saccharomyces pastorianus
gctactgcacgagaccgtatttgat

SEQ ID NO: 129094 - DNA, 25 bp, Saccharomyces pastorianus
caaaaatggcgataccgcacttcat

SEQ ID NO: 129095 - DNA, 25 bp, Saccharomyces pastorianus
ttcatacactagaagaactttccct

SEQ ID NO: 129096 - DNA, 25 bp, Saccharomyces pastorianus
cgattcgcaatcacaaacagtaatt

SEQ ID NO: 129097 - DNA, 25 bp, Saccharomyces pastorianus
aagatcaaggatttttccccacagt

SEQ ID NO: 129098 - DNA, 25 bp, Saccharomyces pastorianus
gaactttccctaggattttccagct

SEQ ID NO: 129099 - DNA, 25 bp, Saccharomyces pastorianus
gagaagttccttattccacaattca

SEQ ID NO: 129100 - DNA, 25 bp, Saccharomyces pastorianus
ggatttttccccacagtatagaatt

SEQ ID NO: 129101 - DNA, 25 bp, Saccharomyces pastorianus
aatcaacaacaccttctgcagttta

SEQ ID NO: 129102 - DNA, 25 bp, Saccharomyces pastorianus
aggattttccagctactgcacgaga

SEQ ID NO: 129103 - DNA, 25 bp, Saccharomyces pastorianus
gtatttgatatcgattcgcaatcac

SEQ ID NO: 129104 - DNA, 25 bp, Saccharomyces pastorianus
tacaacgatcttcatgaacagcatg

SEQ ID NO: 129105 - DNA, 25 bp, Saccharomyces pastorianus
gcctgtttctccttcggattacata

SEQ ID NO: 129106 - DNA, 25 bp, Saccharomyces pastorianus
agctcagactaatgatgacttcgaa

SEQ ID NO: 129107 - DNA, 25 bp, Saccharomyces pastorianus
ggtacgaatcaacatgtcaattctt

SEQ ID NO: 129108 - DNA, 25 bp, Saccharomyces pastorianus
tgtcaattcttcaaacacggacttg

SEQ ID NO: 129109 - DNA, 25 bp, Saccharomyces pastorianus
gatgaaaacggcgaagctcagacta

SEQ ID NO: 129110 - DNA, 25 bp, Saccharomyces pastorianus
aacacggacttgaatatccacgtta

SEQ ID NO: 129111 - DNA, 25 bp, Saccharomyces pastorianus
ggctagcatatacaacgatcttcat

SEQ ID NO: 129112 - DNA, 25 bp, Saccharomyces pastorianus
aatggtaatcatgtcgcctgtttct

SEQ ID NO: 129113 - DNA, 25 bp, Saccharomyces pastorianus
gacttcgaaattttatctcgtctac

SEQ ID NO: 129114 - DNA, 25 bp, Saccharomyces pastorianus
taacctatccatctcaaattgccac

SEQ ID NO: 129115 - DNA, 25 bp, Saccharomyces pastorianus
agagcattcgcgaagatatcttaga

SEQ ID NO: 129116 - DNA, 25 bp, Saccharomyces pastorianus
aagtagcgccagtgtctgaaatcgt

SEQ ID NO: 129117 - DNA, 25 bp, Saccharomyces pastorianus
ggaaaggcctccatatatccttaac

SEQ ID NO: 129118 - DNA, 25 bp, Saccharomyces pastorianus
gatatcacattctttggcgaagcac

SEQ ID NO: 129119 - DNA, 25 bp, Saccharomyces pastorianus
aaatgtggctggacgattccgcata

SEQ ID NO: 129120 - DNA, 25 bp, Saccharomyces pastorianus
gttccccaagtcctgattaatcgtg

SEQ ID NO: 129121 - DNA, 25 bp, Saccharomyces pastorianus
ggcgttctcaaaccagatatcacat

SEQ ID NO: 129122 - DNA, 25 bp, Saccharomyces pastorianus
atcgtaaacatggttccttcccacg

SEQ ID NO: 129123 - DNA, 25 bp, Saccharomyces pastorianus
atccttaactcatatggcgttctca

SEQ ID NO: 129124 - DNA, 25 bp, Saccharomyces pastorianus
gattaatcgtgatcccgtcaagcac

SEQ ID NO: 129125 - DNA, 25 bp, Saccharomyces pastorianus
gcacgcagaatttgatttatctctt

SEQ ID NO: 129126 - DNA, 25 bp, Saccharomyces pastorianus
agtattgtccatatcaactcgcaag

SEQ ID NO: 129127 - DNA, 25 bp, Saccharomyces pastorianus
aaagatcaagcgcttatcggcacca

SEQ ID NO: 129128 - DNA, 25 bp, Saccharomyces pastorianus
tatcttatcaagttgctaggctttg

SEQ ID NO: 129129 - DNA, 25 bp, Saccharomyces pastorianus
gatgatccccaagacgttttcaatt

SEQ ID NO: 129130 - DNA, 25 bp, Saccharomyces pastorianus
gtttcaacttcattagggatcccgg

SEQ ID NO: 129131 - DNA, 25 bp, Saccharomyces pastorianus
tttagacacttacctccccgaggat

SEQ ID NO: 129132 - DNA, 25 bp, Saccharomyces pastorianus
gatcccggacttcagatcttctgag

SEQ ID NO: 129133 - DNA, 25 bp, Saccharomyces pastorianus
acgacccctctgttttctataatat

SEQ ID NO: 129134 - DNA, 25 bp, Saccharomyces pastorianus
ttatcggcaccatcaacagtattgt

SEQ ID NO: 129135 - DNA, 25 bp, Saccharomyces pastorianus
aaacatttattctccattgcatagt

SEQ ID NO: 129136 - DNA, 25 bp, Saccharomyces pastorianus
tatatttatacacgacccctctgtt

SEQ ID NO: 129137 - DNA, 25 bp, Saccharomyces pastorianus
gctttccaaaatactggtgccttga

SEQ ID NO: 129138 - DNA, 25 bp, Saccharomyces pastorianus
aaaacaacgtgccataactcctggg

SEQ ID NO: 129139 - DNA, 25 bp, Saccharomyces pastorianus
tacctaaccagttcaccgggtgata

SEQ ID NO: 129140 - DNA, 25 bp, Saccharomyces pastorianus
gtgcaaactgaatcgctctgccgac

SEQ ID NO: 129141 - DNA, 25 bp, Saccharomyces pastorianus
gtgatatcattaccgttgacccaca

SEQ ID NO: 129142 - DNA, 25 bp, Saccharomyces pastorianus
ggtgccttgacattacaattccggt

SEQ ID NO: 129143 - DNA, 25 bp, Saccharomyces pastorianus
tgcaggtcccagtccaaattaaatc

SEQ ID NO: 129144 - DNA, 25 bp, Saccharomyces pastorianus
gttgacccacaatccggtgccaaaa

SEQ ID NO: 129145 - DNA, 25 bp, Saccharomyces pastorianus
taatccggcgctatacagtgacact

SEQ ID NO: 129146 - DNA, 25 bp, Saccharomyces pastorianus
tagagtccttgggagtgggcccatt

SEQ ID NO: 129147 - DNA, 25 bp, Saccharomyces pastorianus
aactcctgggcaatcgtgctgtcta

SEQ ID NO: 129148 - DNA, 25 bp, Saccharomyces pastorianus
gagaagcatttataggcccaaggat

SEQ ID NO: 129149 - DNA, 25 bp, Saccharomyces pastorianus
attggcttgttactggtcattacgc

SEQ ID NO: 129150 - DNA, 25 bp, Saccharomyces pastorianus
gaggagtgcttcaccgtacagacca

SEQ ID NO: 129151 - DNA, 25 bp, Saccharomyces pastorianus
gaagggtcgacacccaatccagata

SEQ ID NO: 129152 - DNA, 25 bp, Saccharomyces pastorianus
ggtagattcctctgtggcggcagca

SEQ ID NO: 129153 - DNA, 25 bp, Saccharomyces pastorianus
gtcattacgcccgagttatgcagga

SEQ ID NO: 129154 - DNA, 25 bp, Saccharomyces pastorianus
atgtgaaccgtgtcgctaagcattt

SEQ ID NO: 129155 - DNA, 25 bp, Saccharomyces pastorianus
aagttcgtcaagttcggcaagctga

SEQ ID NO: 129156 - DNA, 25 bp, Saccharomyces pastorianus
agcggctaccggcaaagtttgacaa

SEQ ID NO: 129157 - DNA, 25 bp, Saccharomyces pastorianus
gaatcacaatctttggacgaccctg

SEQ ID NO: 129158 - DNA, 25 bp, Saccharomyces pastorianus
gagaatttccaaatacccgaggagt

SEQ ID NO: 129159 - DNA, 25 bp, Saccharomyces pastorianus
gcataccatctaacttgctcgaaga

SEQ ID NO: 129160 - DNA, 25 bp, Saccharomyces pastorianus
aaccgtccgtgggaaattcaagcat

SEQ ID NO: 129161 - DNA, 25 bp, Saccharomyces pastorianus
atgatgctgctcaagcggcttacga

SEQ ID NO: 129162 - DNA, 25 bp, Saccharomyces pastorianus
ttttaagtcactatgcgccagctgg

SEQ ID NO: 129163 - DNA, 25 bp, Saccharomyces pastorianus
aaatcgcggcaagcttcaggtctgg

SEQ ID NO: 129164 - DNA, 25 bp, Saccharomyces pastorianus
gtcctgctgcaaatggtagaaccgt

SEQ ID NO: 129165 - DNA, 25 bp, Saccharomyces pastorianus
gtctgcgaagcgaattgaagtccac

SEQ ID NO: 129166 - DNA, 25 bp, Saccharomyces pastorianus
aatgggttcgctaatgatgctgctc

SEQ ID NO: 129167 - DNA, 25 bp, Saccharomyces pastorianus
tataataacgctccgggtctgcgaa

SEQ ID NO: 129168 - DNA, 25 bp, Saccharomyces pastorianus
gaagacccttcacaaggtcctgctg

SEQ ID NO: 129169 - DNA, 25 bp, Saccharomyces pastorianus
ggctctacaaagtggaatttccgtc

SEQ ID NO: 129170 - DNA, 25 bp, Saccharomyces pastorianus
gaatgaattacttgcatctttgcct

SEQ ID NO: 129171 - DNA, 25 bp, Saccharomyces pastorianus
agacgttattattgcaacacctggt

SEQ ID NO: 129172 - DNA, 25 bp, Saccharomyces pastorianus
gatgatgaccaacccagacgttatt

SEQ ID NO: 129173 - DNA, 25 bp, Saccharomyces pastorianus
aaagattccgttagccactagtgaa

SEQ ID NO: 129174 - DNA, 25 bp, Saccharomyces pastorianus
gaagcgtcctcttgactggtggtga

SEQ ID NO: 129175 - DNA, 25 bp, Saccharomyces pastorianus
gaaatgctttttctatccagtaaaa

SEQ ID NO: 129176 - DNA, 25 bp, Saccharomyces pastorianus
tgttaaggctggtttggttaatcca

SEQ ID NO: 129177 - DNA, 25 bp, Saccharomyces pastorianus
gagtacgttgttttcgatgaagctg

SEQ ID NO: 129178 - DNA, 25 bp, Saccharomyces pastorianus
aacgttttcaaggattttgccagag

SEQ ID NO: 129179 - DNA, 25 bp, Saccharomyces pastorianus
gcaacacctggtagatttttacatc

SEQ ID NO: 129180 - DNA, 25 bp, Saccharomyces pastorianus
tgttgttttctgctactctacctaa

SEQ ID NO: 129181 - DNA, 25 bp, Saccharomyces pastorianus
gccattgttctttcaggtggttcaa

SEQ ID NO: 129182 - DNA, 25 bp, Saccharomyces pastorianus
aacaaccgcccttgtggaatcgtat

SEQ ID NO: 129183 - DNA, 25 bp, Saccharomyces pastorianus
caggactgccttccagattagagaa

SEQ ID NO: 129184 - DNA, 25 bp, Saccharomyces pastorianus
acaacctggcgtgggcgagctgtta

SEQ ID NO: 129185 - DNA, 25 bp, Saccharomyces pastorianus
ctttctcgtcgtggttatgcattta

SEQ ID NO: 129186 - DNA, 25 bp, Saccharomyces pastorianus
gagacgttactaggcatttgattga

SEQ ID NO: 129187 - DNA, 25 bp, Saccharomyces pastorianus
aatactgtgcaatcggctgatgttg

SEQ ID NO: 129188 - DNA, 25 bp, Saccharomyces pastorianus
gaagttccctgtataaggccattgt

SEQ ID NO: 129189 - DNA, 25 bp, Saccharomyces pastorianus
gttcaagtatgtacccaggactgcc

SEQ ID NO: 129190 - DNA, 25 bp, Saccharomyces pastorianus
ggtggtgccgttttagctagtatca

SEQ ID NO: 129191 - DNA, 25 bp, Saccharomyces pastorianus
gagttttacacaatgacccttcaag

SEQ ID NO: 129192 - DNA, 25 bp, Saccharomyces pastorianus
aaaagagtgttggagtccctcacca

SEQ ID NO: 129193 - DNA, 25 bp, Saccharomyces pastorianus
gaaagtgaaacctctaacagcagca

SEQ ID NO: 129194 - DNA, 25 bp, Saccharomyces pastorianus
gagtccctcaccaagaacgaactgg

SEQ ID NO: 129195 - DNA, 25 bp, Saccharomyces pastorianus
aactttcatattttccagtgttcga

SEQ ID NO: 129196 - DNA, 25 bp, Saccharomyces pastorianus
gcagcaaaacccttaacacaattat

SEQ ID NO: 129197 - DNA, 25 bp, Saccharomyces pastorianus
gttttagacgaatcctttcctgcaa

SEQ ID NO: 129198 - DNA, 25 bp, Saccharomyces pastorianus
ctactttttaggagacagcgtcgag

SEQ ID NO: 129199 - DNA, 25 bp, Saccharomyces pastorianus
gaatcctatgacttggaactcgata

SEQ ID NO: 129200 - DNA, 25 bp, Saccharomyces pastorianus
gatgggaattccaaacgagtttgcc

SEQ ID NO: 129201 - DNA, 25 bp, Saccharomyces pastorianus
tgttcaatggcggagcttattcgaa

SEQ ID NO: 129202 - DNA, 25 bp, Saccharomyces pastorianus
gcagtttctaagtttcctgcagaaa

SEQ ID NO: 129203 - DNA, 25 bp, Saccharomyces pastorianus
gagcttatgaacagcgttacgccca

SEQ ID NO: 129204 - DNA, 25 bp, Saccharomyces pastorianus
gaaaagctcgacatccaggttggtt

SEQ ID NO: 129205 - DNA, 25 bp, Saccharomyces pastorianus
tacatctcccgcaattccaaaatat

SEQ ID NO: 129206 - DNA, 25 bp, Saccharomyces pastorianus
ctaattattgttctaccactcacca

SEQ ID NO: 129207 - DNA, 25 bp, Saccharomyces pastorianus
aaagagccttccattcgtcacgacg

SEQ ID NO: 129208 - DNA, 25 bp, Saccharomyces pastorianus
actcaccaatttctatccagtctga

SEQ ID NO: 129209 - DNA, 25 bp, Saccharomyces pastorianus
gtttccagtttcgtaagctttcatg

SEQ ID NO: 129210 - DNA, 25 bp, Saccharomyces pastorianus
aaaccagtgccttcggcgattacat

SEQ ID NO: 129211 - DNA, 25 bp, Saccharomyces pastorianus
gcaagtatcttcacattcattctaa

SEQ ID NO: 129212 - DNA, 25 bp, Saccharomyces pastorianus
aagtctccccattttttatcatatt

SEQ ID NO: 129213 - DNA, 25 bp, Saccharomyces pastorianus
gcgttacgcccaatagtctcaataa

SEQ ID NO: 129214 - DNA, 25 bp, Saccharomyces pastorianus
taagcatcacttggtcactgaggag

SEQ ID NO: 129215 - DNA, 25 bp, Saccharomyces pastorianus
tgtgccacggcgttaattacctgca

SEQ ID NO: 129216 - DNA, 25 bp, Saccharomyces pastorianus
gtagtgttccaatacccttacgaag

SEQ ID NO: 129217 - DNA, 25 bp, Saccharomyces pastorianus
tgaagttgaccctacatctggcgat

SEQ ID NO: 129218 - DNA, 25 bp, Saccharomyces pastorianus
ggaatcgtgggctctgacccttatt

SEQ ID NO: 129219 - DNA, 25 bp, Saccharomyces pastorianus
tgtgtcgtcactaaagatggcatct

SEQ ID NO: 129220 - DNA, 25 bp, Saccharomyces pastorianus
aattacctgcactctatgggcttag

SEQ ID NO: 129221 - DNA, 25 bp, Saccharomyces pastorianus
gcagatgtgtggtctatcgctatta

SEQ ID NO: 129222 - DNA, 25 bp, Saccharomyces pastorianus
gaaacaaacatcctacgatccaaga

SEQ ID NO: 129223 - DNA, 25 bp, Saccharomyces pastorianus
aactgattgactttgggagcgctgt

SEQ ID NO: 129224 - DNA, 25 bp, Saccharomyces pastorianus
aggctactgccaagacattcacgga

SEQ ID NO: 129225 - DNA, 25 bp, Saccharomyces pastorianus
tcatcaacttcgctgtcttcattat

SEQ ID NO: 129226 - DNA, 25 bp, Saccharomyces pastorianus
tcatcttcatcaacttcgctgtctt

SEQ ID NO: 129227 - DNA, 25 bp, Saccharomyces pastorianus
cattatttaggccaactaagttgaa

SEQ ID NO: 129228 - DNA, 25 bp, Saccharomyces pastorianus
aaaatattcaatggagctgctcacc

SEQ ID NO: 129229 - DNA, 25 bp, Saccharomyces pastorianus
taaggaaactccattacactcatct

SEQ ID NO: 129230 - DNA, 25 bp, Saccharomyces pastorianus
ttcaatggagctgctcaccactcat

SEQ ID NO: 129231 - DNA, 25 bp, Saccharomyces pastorianus
aacttcgctgtcttcattatttagg

SEQ ID NO: 129232 - DNA, 25 bp, Saccharomyces pastorianus
gaaactccattacactcatcttcat

SEQ ID NO: 129233 - DNA, 25 bp, Saccharomyces pastorianus
agttgaagaatttatcggctaaaat

SEQ ID NO: 129234 - DNA, 25 bp, Saccharomyces pastorianus
gctgtcttcattatttaggccaact

SEQ ID NO: 129235 - DNA, 25 bp, Saccharomyces pastorianus
attacactcatcttcatcaacttcg

SEQ ID NO: 129236 - DNA, 25 bp, Saccharomyces pastorianus
gattcggtcaaatgtttttcccaga

SEQ ID NO: 129237 - DNA, 25 bp, Saccharomyces pastorianus
aacaacagttgcttaccacattcca

SEQ ID NO: 129238 - DNA, 25 bp, Saccharomyces pastorianus
caagagtctgctggtgttgctgatt

SEQ ID NO: 129239 - DNA, 25 bp, Saccharomyces pastorianus
accttacttccacgttagtgtcatc

SEQ ID NO: 129240 - DNA, 25 bp, Saccharomyces pastorianus
ggttctaaaggccttgttccacaga

SEQ ID NO: 129241 - DNA, 25 bp, Saccharomyces pastorianus
tgccttaggttgtggtttcgtcgaa

SEQ ID NO: 129242 - DNA, 25 bp, Saccharomyces pastorianus
gtatctccatctctggtgctttgaa

SEQ ID NO: 129243 - DNA, 25 bp, Saccharomyces pastorianus
aagtcgctcaagaacactggtctga

SEQ ID NO: 129244 - DNA, 25 bp, Saccharomyces pastorianus
gaaacatgtggctctgtcgaagact

SEQ ID NO: 129245 - DNA, 25 bp, Saccharomyces pastorianus
tgatttgatcaccacctgcgcaggt

SEQ ID NO: 129246 - DNA, 25 bp, Saccharomyces pastorianus
ctgctgccatccaaagagtcggttt

SEQ ID NO: 129247 - DNA, 25 bp, Saccharomyces pastorianus
gagggctatcagaagacgttttcga

SEQ ID NO: 129248 - DNA, 25 bp, Saccharomyces pastorianus
tcgagactggatgctttaacaaggc

SEQ ID NO: 129249 - DNA, 25 bp, Saccharomyces pastorianus
aagcatgaagatttgtcgttagaac

SEQ ID NO: 129250 - DNA, 25 bp, Saccharomyces pastorianus
ggtgcccaattttcaaggtcctatg

SEQ ID NO: 129251 - DNA, 25 bp, Saccharomyces pastorianus
ggaagattgtcttccgttgctcgga

SEQ ID NO: 129252 - DNA, 25 bp, Saccharomyces pastorianus
gagacaccaaaataccattcacgct

SEQ ID NO: 129253 - DNA, 25 bp, Saccharomyces pastorianus
aaaattcttggatctgagggctatc

SEQ ID NO: 129254 - DNA, 25 bp, Saccharomyces pastorianus
ggtcctatgatttaacgagacacca

SEQ ID NO: 129255 - DNA, 25 bp, Saccharomyces pastorianus
gtcttccgttgctcggagtgtataa

SEQ ID NO: 129256 - DNA, 25 bp, Saccharomyces pastorianus
aaatgaaccgtgtggtgcccaattt

SEQ ID NO: 129257 - DNA, 25 bp, Saccharomyces pastorianus
gacgttttcgagactggatgcttta

SEQ ID NO: 129258 - DNA, 25 bp, Saccharomyces pastorianus
ggacagcatttccagtgttgtatct

SEQ ID NO: 129259 - DNA, 25 bp, Saccharomyces pastorianus
gagcctttactgtcattggatgtta

SEQ ID NO: 129260 - DNA, 25 bp, Saccharomyces pastorianus
agcaaaatcatccagtaaccgtagt

SEQ ID NO: 129261 - DNA, 25 bp, Saccharomyces pastorianus
gtcacttcaagataatagcgccgca

SEQ ID NO: 129262 - DNA, 25 bp, Saccharomyces pastorianus
tcggcaaacgtaccgtctactgcta

SEQ ID NO: 129263 - DNA, 25 bp, Saccharomyces pastorianus
acgatatctctctcttgaagaacag

SEQ ID NO: 129264 - DNA, 25 bp, Saccharomyces pastorianus
gtctactgctactaccggtaaaagg

SEQ ID NO: 129265 - DNA, 25 bp, Saccharomyces pastorianus
acgttgactctaacatggacagcat

SEQ ID NO: 129266 - DNA, 25 bp, Saccharomyces pastorianus
ggatgttacaccaatctcaatgttt

SEQ ID NO: 129267 - DNA, 25 bp, Saccharomyces pastorianus
gagcaacaccaagaggagcctttac

SEQ ID NO: 129268 - DNA, 25 bp, Saccharomyces pastorianus
acgggtcgtgccaagagttctagtc

SEQ ID NO: 129269 - DNA, 25 bp, Saccharomyces pastorianus
atgacgaagctggtgatgagaaatt

SEQ ID NO: 129270 - DNA, 25 bp, Saccharomyces pastorianus
actcatcccatcacaaaagctaaat

SEQ ID NO: 129271 - DNA, 25 bp, Saccharomyces pastorianus
gatatacgggcaaatattgggttaa

SEQ ID NO: 129272 - DNA, 25 bp, Saccharomyces pastorianus
gaaaataaccttgaatatcacccac

SEQ ID NO: 129273 - DNA, 25 bp, Saccharomyces pastorianus
ctaaatattggagatatacgggcaa

SEQ ID NO: 129274 - DNA, 25 bp, Saccharomyces pastorianus
aagagcaatggaagatgggcgttat

SEQ ID NO: 129275 - DNA, 25 bp, Saccharomyces pastorianus
agcagcacgcagaaaaagggaggaa

SEQ ID NO: 129276 - DNA, 25 bp, Saccharomyces pastorianus
ggatactcatcccatcacaaaagct

SEQ ID NO: 129277 - DNA, 25 bp, Saccharomyces pastorianus
aatggttcgtcagggatactcatcc

SEQ ID NO: 129278 - DNA, 25 bp, Saccharomyces pastorianus
atatcacccacaatggttcgtcagg

SEQ ID NO: 129279 - DNA, 25 bp, Saccharomyces pastorianus
gtttgagaccagatcaaagagcaat

SEQ ID NO: 129280 - DNA, 25 bp, Saccharomyces pastorianus
gatagcatcttcagttatcggtgaa

SEQ ID NO: 129281 - DNA, 25 bp, Saccharomyces pastorianus
attgctggaatcacatgccactgcc

SEQ ID NO: 129282 - DNA, 25 bp, Saccharomyces pastorianus
actgccggcaacaaggaatccttag

SEQ ID NO: 129283 - DNA, 25 bp, Saccharomyces pastorianus
gaggctcatcctgaaatttcgaccg

SEQ ID NO: 129284 - DNA, 25 bp, Saccharomyces pastorianus
atgagttttatgatgccgcggaatt

SEQ ID NO: 129285 - DNA, 25 bp, Saccharomyces pastorianus
gcgaaatttatcagcgctacaaagg

SEQ ID NO: 129286 - DNA, 25 bp, Saccharomyces pastorianus
tacggcaagtactctcggtcaaatt

SEQ ID NO: 129287 - DNA, 25 bp, Saccharomyces pastorianus
aacagaacgtctagcatctattgat

SEQ ID NO: 129288 - DNA, 25 bp, Saccharomyces pastorianus
acgacagccagtatgtccaggacga

SEQ ID NO: 129289 - DNA, 25 bp, Saccharomyces pastorianus
aagaccatagttgctgtcactacag

SEQ ID NO: 129290 - DNA, 25 bp, Saccharomyces pastorianus
acaggaatcagatactacggcaagt

SEQ ID NO: 129291 - DNA, 25 bp, Saccharomyces pastorianus
atatctgcaacatggactgagtcac

SEQ ID NO: 129292 - DNA, 25 bp, Saccharomyces pastorianus
agagttgcgaaacccttcaacccat

SEQ ID NO: 129293 - DNA, 25 bp, Saccharomyces pastorianus
gtattccgaactattagaccaggct

SEQ ID NO: 129294 - DNA, 25 bp, Saccharomyces pastorianus
gtacagatttttcaccgagcaggtt

SEQ ID NO: 129295 - DNA, 25 bp, Saccharomyces pastorianus
gaccaggctgcaacgtttgaagatt

SEQ ID NO: 129296 - DNA, 25 bp, Saccharomyces pastorianus
gagaactctatatgttgcggcattt

SEQ ID NO: 129297 - DNA, 25 bp, Saccharomyces pastorianus
ccgttctgaaatcgatggtgggcaa

SEQ ID NO: 129298 - DNA, 25 bp, Saccharomyces pastorianus
gacgttaccagttactttcaatgag

SEQ ID NO: 129299 - DNA, 25 bp, Saccharomyces pastorianus
caatgagcctacatctcttttacaa

SEQ ID NO: 129300 - DNA, 25 bp, Saccharomyces pastorianus
catcttcatacgcatctactacaaa

SEQ ID NO: 129301 - DNA, 25 bp, Saccharomyces pastorianus
agattagtctttgggccgttctgaa

SEQ ID NO: 129302 - DNA, 25 bp, Saccharomyces pastorianus
ggcacattaagttgcgtccaaatga

SEQ ID NO: 129303 - DNA, 25 bp, Saccharomyces pastorianus
atgggcctacggatgacggaacgaa

SEQ ID NO: 129304 - DNA, 25 bp, Saccharomyces pastorianus
gaacgttgtcaatcacacaaccggt

SEQ ID NO: 129305 - DNA, 25 bp, Saccharomyces pastorianus
acacaaccggtgatcattgcaagtt

SEQ ID NO: 129306 - DNA, 25 bp, Saccharomyces pastorianus
aagcacttaggattatggcacatta

SEQ ID NO: 129307 - DNA, 25 bp, Saccharomyces pastorianus
gctgcatcagcagggaatgggccta

SEQ ID NO: 129308 - DNA, 25 bp, Saccharomyces pastorianus
taacgccttttgctatcacgctgaa

SEQ ID NO: 129309 - DNA, 25 bp, Saccharomyces pastorianus
gtggatcctaggtggacactggaat

SEQ ID NO: 129310 - DNA, 25 bp, Saccharomyces pastorianus
gagaaaactagaaccgctgcatcag

SEQ ID NO: 129311 - DNA, 25 bp, Saccharomyces pastorianus
aagatggcgatctctcgttggagaa

SEQ ID NO: 129312 - DNA, 25 bp, Saccharomyces pastorianus
taggtattctcattggtaatccaca

SEQ ID NO: 129313 - DNA, 25 bp, Saccharomyces pastorianus
aatttggtccgatcattattggtgc

SEQ ID NO: 129314 - DNA, 25 bp, Saccharomyces pastorianus
gatgctgttgatgcctatgagttga

SEQ ID NO: 129315 - DNA, 25 bp, Saccharomyces pastorianus
ggctccgtaggtgttattcttctaa

SEQ ID NO: 129316 - DNA, 25 bp, Saccharomyces pastorianus
acgatgatgcggattctttgctaga

SEQ ID NO: 129317 - DNA, 25 bp, Saccharomyces pastorianus
gtaccataggtacgttccctgagta

SEQ ID NO: 129318 - DNA, 25 bp, Saccharomyces pastorianus
gatgacgttgtcagctcaagcgagg

SEQ ID NO: 129319 - DNA, 25 bp, Saccharomyces pastorianus
gggtttcgaagctagtgggctcatt

SEQ ID NO: 129320 - DNA, 25 bp, Saccharomyces pastorianus
tcaattacctgaccccaagacaaat

SEQ ID NO: 129321 - DNA, 25 bp, Saccharomyces pastorianus
cgcagcgttgcatggattgggtttc

SEQ ID NO: 129322 - DNA, 25 bp, Saccharomyces pastorianus
gaattcagtaaatgcgcagcgttgc

SEQ ID NO: 129323 - DNA, 25 bp, Saccharomyces pastorianus
gggcagaagatttccaatgttccaa

SEQ ID NO: 129324 - DNA, 25 bp, Saccharomyces pastorianus
gttacctcgtcaccgcaaagaattt

SEQ ID NO: 129325 - DNA, 25 bp, Saccharomyces pastorianus
ataaccaaacacctcctatggtcgc

SEQ ID NO: 129326 - DNA, 25 bp, Saccharomyces pastorianus
gagtagcccctctatgtgatgcaaa

SEQ ID NO: 129327 - DNA, 25 bp, Saccharomyces pastorianus
gaaaatatacgttacctcgtcaccg

SEQ ID NO: 129328 - DNA, 25 bp, Saccharomyces pastorianus
gagctcaacctgctgtacataatga

SEQ ID NO: 129329 - DNA, 25 bp, Saccharomyces pastorianus
ggagttccgaactttctacagggat

SEQ ID NO: 129330 - DNA, 25 bp, Saccharomyces pastorianus
gacgggatcttcgagagtagcccct

SEQ ID NO: 129331 - DNA, 25 bp, Saccharomyces pastorianus
tttaccgtactatccccacgaggag

SEQ ID NO: 129332 - DNA, 25 bp, Saccharomyces pastorianus
tacagggatctaccaatcaagggaa

SEQ ID NO: 129333 - DNA, 25 bp, Saccharomyces pastorianus
gaacaattttgtccatgcattatgc

SEQ ID NO: 129334 - DNA, 25 bp, Saccharomyces pastorianus
ttgattttggtctagccgaggctca

SEQ ID NO: 129335 - DNA, 25 bp, Saccharomyces pastorianus
gctagctccgactataatccatttt

SEQ ID NO: 129336 - DNA, 25 bp, Saccharomyces pastorianus
gttgctcccaactatacttttgaag

SEQ ID NO: 129337 - DNA, 25 bp, Saccharomyces pastorianus
ttattatctatctaccattcccaca

SEQ ID NO: 129338 - DNA, 25 bp, Saccharomyces pastorianus
ttcaatctttttgttgctcccaact

SEQ ID NO: 129339 - DNA, 25 bp, Saccharomyces pastorianus
tattgccacattaaattgcgcctat

SEQ ID NO: 129340 - DNA, 25 bp, Saccharomyces pastorianus
cattcggttactttggctacggctt

SEQ ID NO: 129341 - DNA, 25 bp, Saccharomyces pastorianus
gttcaccaattctctttagctacta

SEQ ID NO: 129342 - DNA, 25 bp, Saccharomyces pastorianus
gctactatgccaattttcaacctgt

SEQ ID NO: 129343 - DNA, 25 bp, Saccharomyces pastorianus
attggtcttttcgtgctttcagaac

SEQ ID NO: 129344 - DNA, 25 bp, Saccharomyces pastorianus
taagcggtctcatttcattcggtta

SEQ ID NO: 129345 - DNA, 25 bp, Saccharomyces pastorianus
ctaagatccgtgtcccattgaatca

SEQ ID NO: 129346 - DNA, 25 bp, Saccharomyces pastorianus
tcgtgtggtcatgcattttgtggta

SEQ ID NO: 129347 - DNA, 25 bp, Saccharomyces pastorianus
aattatgtcccgcagattcttgtaa

SEQ ID NO: 129348 - DNA, 25 bp, Saccharomyces pastorianus
ctcaactaaagggttcggctcatcc

SEQ ID NO: 129349 - DNA, 25 bp, Saccharomyces pastorianus
atgtcccgcagattcttgtaagaag

SEQ ID NO: 129350 - DNA, 25 bp, Saccharomyces pastorianus
tgcccaaaaagaaactagctcaact

SEQ ID NO: 129351 - DNA, 25 bp, Saccharomyces pastorianus
gaacgtttattgcatcgtgtggtca

SEQ ID NO: 129352 - DNA, 25 bp, Saccharomyces pastorianus
taggtgtttcgccaggattgacaat

SEQ ID NO: 129353 - DNA, 25 bp, Saccharomyces pastorianus
attatggccccaaattatgtcccgc

SEQ ID NO: 129354 - DNA, 25 bp, Saccharomyces pastorianus
aaagggttcggctcatccggataat

SEQ ID NO: 129355 - DNA, 25 bp, Saccharomyces pastorianus
gctcatccggataattatggcccca

SEQ ID NO: 129356 - DNA, 25 bp, Saccharomyces pastorianus
gcattttgtggtaggtgtttcgcca

SEQ ID NO: 129357 - DNA, 25 bp, Saccharomyces pastorianus
aactgctgcagaattgggccattga

SEQ ID NO: 129358 - DNA, 25 bp, Saccharomyces pastorianus
ggaagagttttccatcgtggcacat

SEQ ID NO: 129359 - DNA, 25 bp, Saccharomyces pastorianus
agaggccttgagacttcaccgagaa

SEQ ID NO: 129360 - DNA, 25 bp, Saccharomyces pastorianus
aatggcactcttcactgagttcaga

SEQ ID NO: 129361 - DNA, 25 bp, Saccharomyces pastorianus
tacccgaaggttatagcgcgtcatt

SEQ ID NO: 129362 - DNA, 25 bp, Saccharomyces pastorianus
tattcctgtttgttgcttgtgtggc

SEQ ID NO: 129363 - DNA, 25 bp, Saccharomyces pastorianus
cgatgctgatgaggaacgacacact

SEQ ID NO: 129364 - DNA, 25 bp, Saccharomyces pastorianus
cttaagtcgtttgtggagtggccca

SEQ ID NO: 129365 - DNA, 25 bp, Saccharomyces pastorianus
gcgcgtcatttgatactacgccaaa

SEQ ID NO: 129366 - DNA, 25 bp, Saccharomyces pastorianus
aattcgaagctagggcagccagcct

SEQ ID NO: 129367 - DNA, 25 bp, Saccharomyces pastorianus
tggcccagcgttgagcgatgctgat

SEQ ID NO: 129368 - DNA, 25 bp, Saccharomyces pastorianus
ctttacttgatttgctcgcgtctaa

SEQ ID NO: 129369 - DNA, 25 bp, Saccharomyces pastorianus
acatgactctttctgattgcgtcct

SEQ ID NO: 129370 - DNA, 25 bp, Saccharomyces pastorianus
gagcctggctatctttggaatctta

SEQ ID NO: 129371 - DNA, 25 bp, Saccharomyces pastorianus
atttttcatcggttgagccaacaga

SEQ ID NO: 129372 - DNA, 25 bp, Saccharomyces pastorianus
gcgaagtggaagatgccttggcaaa

SEQ ID NO: 129373 - DNA, 25 bp, Saccharomyces pastorianus
ttatctgattgctatcctcaacgct

SEQ ID NO: 129374 - DNA, 25 bp, Saccharomyces pastorianus
aagagtggcttacctttacttgatt

SEQ ID NO: 129375 - DNA, 25 bp, Saccharomyces pastorianus
taaacgaaccgtcaagccgcaaaat

SEQ ID NO: 129376 - DNA, 25 bp, Saccharomyces pastorianus
gcgtcctttttcaatattcaccttt

SEQ ID NO: 129377 - DNA, 25 bp, Saccharomyces pastorianus
aacaccttatattctcttggtagac

SEQ ID NO: 129378 - DNA, 25 bp, Saccharomyces pastorianus
aacgcttcttatcctgaccatgatt

SEQ ID NO: 129379 - DNA, 25 bp, Saccharomyces pastorianus
gtttatcgccacttatatgcattaa

SEQ ID NO: 129380 - DNA, 25 bp, Saccharomyces pastorianus
tactggcaatgcgattgcatccaga

SEQ ID NO: 129381 - DNA, 25 bp, Saccharomyces pastorianus
attcggtcctcattatatcgaaatg

SEQ ID NO: 129382 - DNA, 25 bp, Saccharomyces pastorianus
gccacttatatgcattaatcaacct

SEQ ID NO: 129383 - DNA, 25 bp, Saccharomyces pastorianus
caacagagctggaggagttcgagaa

SEQ ID NO: 129384 - DNA, 25 bp, Saccharomyces pastorianus
gagaatgtttatcgccacttatatg

SEQ ID NO: 129385 - DNA, 25 bp, Saccharomyces pastorianus
tgcatccagaggtttattcgcagca

SEQ ID NO: 129386 - DNA, 25 bp, Saccharomyces pastorianus
atcaaccttcattggtccgtattcg

SEQ ID NO: 129387 - DNA, 25 bp, Saccharomyces pastorianus
gagttcgagaatgtttatcgccact

SEQ ID NO: 129388 - DNA, 25 bp, Saccharomyces pastorianus
aatgcgattgcatccagaggtttat

SEQ ID NO: 129389 - DNA, 25 bp, Saccharomyces pastorianus
tccgtattcggtcctcattatatcg

SEQ ID NO: 129390 - DNA, 25 bp, Saccharomyces pastorianus
tggactgacgccagaaaatgttggt

SEQ ID NO: 129391 - DNA, 25 bp, Saccharomyces pastorianus
ttagctggtggactgacgccagaaa

SEQ ID NO: 129392 - DNA, 25 bp, Saccharomyces pastorianus
tggtgatgcgcttagattaaatggc

SEQ ID NO: 129393 - DNA, 25 bp, Saccharomyces pastorianus
gactgacgccagaaaatgttggtga

SEQ ID NO: 129394 - DNA, 25 bp, Saccharomyces pastorianus
agctggtggactgacgccagaaaat

SEQ ID NO: 129395 - DNA, 25 bp, Saccharomyces pastorianus
gacaaatggtgtaaaagactctaac

SEQ ID NO: 129396 - DNA, 25 bp, Saccharomyces pastorianus
aatgttggtgatgcgcttagattaa

SEQ ID NO: 129397 - DNA, 25 bp, Saccharomyces pastorianus
atgtaagcggaggtgtggagacaaa

SEQ ID NO: 129398 - DNA, 25 bp, Saccharomyces pastorianus
gatgcgcttagattaaatggcgtta

SEQ ID NO: 129399 - DNA, 25 bp, Saccharomyces pastorianus
atggtgtaaaagactctaacaaaat

SEQ ID NO: 129400 - DNA, 25 bp, Saccharomyces pastorianus
aaatggcgttattggtgttgatgta

SEQ ID NO: 129401 - DNA, 25 bp, Saccharomyces pastorianus
taatttcacaggtagttctggtcca

SEQ ID NO: 129402 - DNA, 25 bp, Saccharomyces pastorianus
ctgggtattatatgtgtgcccaata

SEQ ID NO: 129403 - DNA, 25 bp, Saccharomyces pastorianus
atgtgctctagattccgatgctgac

SEQ ID NO: 129404 - DNA, 25 bp, Saccharomyces pastorianus
attccgatgctgacttgctgggtat

SEQ ID NO: 129405 - DNA, 25 bp, Saccharomyces pastorianus
aagtttgcggcttgcagagcacaga

SEQ ID NO: 129406 - DNA, 25 bp, Saccharomyces pastorianus
tatatgtgtgcccaatagaaagaga

SEQ ID NO: 129407 - DNA, 25 bp, Saccharomyces pastorianus
gaggccgcagaatgtgctctagatt

SEQ ID NO: 129408 - DNA, 25 bp, Saccharomyces pastorianus
gatgctgacttgctgggtattatat

SEQ ID NO: 129409 - DNA, 25 bp, Saccharomyces pastorianus
gcagagcacagaggccgcagaatgt

SEQ ID NO: 129410 - DNA, 25 bp, Saccharomyces pastorianus
tcacaggtagttctggtccattggt

SEQ ID NO: 129411 - DNA, 25 bp, Saccharomyces pastorianus
ggtccattggtgaaagtttgcggct

SEQ ID NO: 129412 - DNA, 25 bp, Saccharomyces pastorianus
tcccaggcctcttgtgataaacttt

SEQ ID NO: 129413 - DNA, 25 bp, Saccharomyces pastorianus
tagcaaatggttctttcggctcccg

SEQ ID NO: 129414 - DNA, 25 bp, Saccharomyces pastorianus
aagtgccacttttcacacggacgaa

SEQ ID NO: 129415 - DNA, 25 bp, Saccharomyces pastorianus
tccgcttccaagtcctgaaactata

SEQ ID NO: 129416 - DNA, 25 bp, Saccharomyces pastorianus
ttctttacagattttggccgactaa

SEQ ID NO: 129417 - DNA, 25 bp, Saccharomyces pastorianus
accttgttcctagtggcgctaatgg

SEQ ID NO: 129418 - DNA, 25 bp, Saccharomyces pastorianus
gctaaacacgtttactccgaatcct

SEQ ID NO: 129419 - DNA, 25 bp, Saccharomyces pastorianus
aaatatgctcgattgccctagcaaa

SEQ ID NO: 129420 - DNA, 25 bp, Saccharomyces pastorianus
cggcgctaaactgttcacgtgagga

SEQ ID NO: 129421 - DNA, 25 bp, Saccharomyces pastorianus
agagattacctgacaacttttcccg

SEQ ID NO: 129422 - DNA, 25 bp, Saccharomyces pastorianus
tagatgaagcctctacggcgctaaa

SEQ ID NO: 129423 - DNA, 25 bp, Saccharomyces pastorianus
gcggactacatgtggcacattcata

SEQ ID NO: 129424 - DNA, 25 bp, Saccharomyces pastorianus
tcgaattactttaaatgcggactac

SEQ ID NO: 129425 - DNA, 25 bp, Saccharomyces pastorianus
gtctgtgtcggaatggtcgaattac

SEQ ID NO: 129426 - DNA, 25 bp, Saccharomyces pastorianus
atccgtctgtgtcggaatggtcgaa

SEQ ID NO: 129427 - DNA, 25 bp, Saccharomyces pastorianus
gtggcacattcatacttgaaaataa

SEQ ID NO: 129428 - DNA, 25 bp, Saccharomyces pastorianus
aaatgcggactacatgtggcacatt

SEQ ID NO: 129429 - DNA, 25 bp, Saccharomyces pastorianus
actttaaatgcggactacatgtggc

SEQ ID NO: 129430 - DNA, 25 bp, Saccharomyces pastorianus
atgcggactacatgtggcacattca

SEQ ID NO: 129431 - DNA, 25 bp, Saccharomyces pastorianus
acatgtggcacattcatacttgaaa

SEQ ID NO: 129432 - DNA, 25 bp, Saccharomyces pastorianus
gccatagatccgtctgtgtcggaat

SEQ ID NO: 129433 - DNA, 25 bp, Saccharomyces pastorianus
tagatccgtctgtgtcggaatggtc

SEQ ID NO: 129434 - DNA, 25 bp, Saccharomyces pastorianus
gattattgcgatttttcagttttgc

SEQ ID NO: 129435 - DNA, 25 bp, Saccharomyces pastorianus
atcgctaggtctcctggcagagtaa

SEQ ID NO: 129436 - DNA, 25 bp, Saccharomyces pastorianus
ttagcggttgtagatgcatttttcc

SEQ ID NO: 129437 - DNA, 25 bp, Saccharomyces pastorianus
gcatttttccaaacataccatgtca

SEQ ID NO: 129438 - DNA, 25 bp, Saccharomyces pastorianus
atgtcaaacctgattttatcgctag

SEQ ID NO: 129439 - DNA, 25 bp, Saccharomyces pastorianus
cattaccttaacaaatgcggaccct

SEQ ID NO: 129440 - DNA, 25 bp, Saccharomyces pastorianus
gtggatatgctttgcgcagttaaaa

SEQ ID NO: 129441 - DNA, 25 bp, Saccharomyces pastorianus
agttctccggtcagagatttaccaa

SEQ ID NO: 129442 - DNA, 25 bp, Saccharomyces pastorianus
gagatttaccaaggtctttcgaaca

SEQ ID NO: 129443 - DNA, 25 bp, Saccharomyces pastorianus
gttccaatattcagttctccggtca

SEQ ID NO: 129444 - DNA, 25 bp, Saccharomyces pastorianus
gcggaccctaaatttgctcagcgaa

SEQ ID NO: 129445 - DNA, 25 bp, Saccharomyces pastorianus
gaatctggtcggaattatgctgcac

SEQ ID NO: 129446 - DNA, 25 bp, Saccharomyces pastorianus
tatactatgttggtcttggcttaat

SEQ ID NO: 129447 - DNA, 25 bp, Saccharomyces pastorianus
gtaagacaatcttccttcctaagcc

SEQ ID NO: 129448 - DNA, 25 bp, Saccharomyces pastorianus
ctgtggtgttacacaacctgtctca

SEQ ID NO: 129449 - DNA, 25 bp, Saccharomyces pastorianus
atcctatatatgtcaccgaaccttc

SEQ ID NO: 129450 - DNA, 25 bp, Saccharomyces pastorianus
gtcatttatgctttctttctgtggt

SEQ ID NO: 129451 - DNA, 25 bp, Saccharomyces pastorianus
gcgtcaagatctgcggtgtactttt

SEQ ID NO: 129452 - DNA, 25 bp, Saccharomyces pastorianus
ctaagccccgtatctatactcaata

SEQ ID NO: 129453 - DNA, 25 bp, Saccharomyces pastorianus
ccttccatccgctaatgttatctta

SEQ ID NO: 129454 - DNA, 25 bp, Saccharomyces pastorianus
gacattcatgtggaaggcttcccca

SEQ ID NO: 129455 - DNA, 25 bp, Saccharomyces pastorianus
gtgtgtattacctcttccatgtaag

SEQ ID NO: 129456 - DNA, 25 bp, Saccharomyces pastorianus
ctccacttctgatgtcaccagaatt

SEQ ID NO: 129457 - DNA, 25 bp, Saccharomyces pastorianus
ccaagctactcaaaagcgtactcac

SEQ ID NO: 129458 - DNA, 25 bp, Saccharomyces pastorianus
atctgctatcagaccagctggccaa

SEQ ID NO: 129459 - DNA, 25 bp, Saccharomyces pastorianus
tgctatcagaccagctggccaagct

SEQ ID NO: 129460 - DNA, 25 bp, Saccharomyces pastorianus
tgatgtcaccagaattatcaactct

SEQ ID NO: 129461 - DNA, 25 bp, Saccharomyces pastorianus
ccaatctgctatcagaccagctggc

SEQ ID NO: 129462 - DNA, 25 bp, Saccharomyces pastorianus
tggccaagctactcaaaagcgtact

SEQ ID NO: 129463 - DNA, 25 bp, Saccharomyces pastorianus
atcatctccacttctgatgtcacca

SEQ ID NO: 129464 - DNA, 25 bp, Saccharomyces pastorianus
tatcagaccagctggccaagctact

SEQ ID NO: 129465 - DNA, 25 bp, Saccharomyces pastorianus
acatcatctccacttctgatgtcac

SEQ ID NO: 129466 - DNA, 25 bp, Saccharomyces pastorianus
atctccacttctgatgtcaccagaa

SEQ ID NO: 129467 - DNA, 25 bp, Saccharomyces pastorianus
aagctgctttcacaagttggaccaa

SEQ ID NO: 129468 - DNA, 25 bp, Saccharomyces pastorianus
caagaaattgagagccggtaagggt

SEQ ID NO: 129469 - DNA, 25 bp, Saccharomyces pastorianus
gtcaaggccttgagaaatgttccag

SEQ ID NO: 129470 - DNA, 25 bp, Saccharomyces pastorianus
ggtgctcacttaggtagatctgtta

SEQ ID NO: 129471 - DNA, 25 bp, Saccharomyces pastorianus
actgctaacgttgcttctttgaact

SEQ ID NO: 129472 - DNA, 25 bp, Saccharomyces pastorianus
agaccaaggaagctgttgctgcttt

SEQ ID NO: 129473 - DNA, 25 bp, Saccharomyces pastorianus
agaaatcccattggttgtctccact

SEQ ID NO: 129474 - DNA, 25 bp, Saccharomyces pastorianus
ttccaggtgttgaaactgctaacgt

SEQ ID NO: 129475 - DNA, 25 bp, Saccharomyces pastorianus
tctgttatctggaccgaagctgctt

SEQ ID NO: 129476 - DNA, 25 bp, Saccharomyces pastorianus
gttgtctccactgacttggaatcta

SEQ ID NO: 129477 - DNA, 25 bp, Saccharomyces pastorianus
ggtaccggtcgtgccgtcgctcgta

SEQ ID NO: 129478 - DNA, 25 bp, Saccharomyces pastorianus
ctgacttctgatatgccgttaattt

SEQ ID NO: 129479 - DNA, 25 bp, Saccharomyces pastorianus
tgtatggataaatttcgtatacccc

SEQ ID NO: 129480 - DNA, 25 bp, Saccharomyces pastorianus
gccaccggttcgaaaatcaacttca

SEQ ID NO: 129481 - DNA, 25 bp, Saccharomyces pastorianus
gtgaagagcttgaggttttatctgt

SEQ ID NO: 129482 - DNA, 25 bp, Saccharomyces pastorianus
gtcaacttgatcgattttgcacgtt

SEQ ID NO: 129483 - DNA, 25 bp, Saccharomyces pastorianus
tatgccgttaattttcgatgaagta

SEQ ID NO: 129484 - DNA, 25 bp, Saccharomyces pastorianus
aaaagctgctaatgttaaagtcaac

SEQ ID NO: 129485 - DNA, 25 bp, Saccharomyces pastorianus
tcgattttgcacgttgtgttactaa

SEQ ID NO: 129486 - DNA, 25 bp, Saccharomyces pastorianus
taaagggttcttacgaggtgtgaag

SEQ ID NO: 129487 - DNA, 25 bp, Saccharomyces pastorianus
aatacgagcttattttcgacgctga

SEQ ID NO: 129488 - DNA, 25 bp, Saccharomyces pastorianus
agattcgaatagtttcacctccgcc

SEQ ID NO: 129489 - DNA, 25 bp, Saccharomyces pastorianus
catttgcgccaaaaagagtcggaag

SEQ ID NO: 129490 - DNA, 25 bp, Saccharomyces pastorianus
gaaagatcttaatgtacctgagacg

SEQ ID NO: 129491 - DNA, 25 bp, Saccharomyces pastorianus
ggatacctctcacgaaattcatgat

SEQ ID NO: 129492 - DNA, 25 bp, Saccharomyces pastorianus
ggcagaaaggcgagtacatatttaa

SEQ ID NO: 129493 - DNA, 25 bp, Saccharomyces pastorianus
aaactttcttccgtcttacatggca

SEQ ID NO: 129494 - DNA, 25 bp, Saccharomyces pastorianus
gggtgcataacaacattgaaagatc

SEQ ID NO: 129495 - DNA, 25 bp, Saccharomyces pastorianus
gaaattcatgataaaatacccgata

SEQ ID NO: 129496 - DNA, 25 bp, Saccharomyces pastorianus
acattaagagagcagcagcagcatt

SEQ ID NO: 129497 - DNA, 25 bp, Saccharomyces pastorianus
gagtcggaagggtgcataacaacat

SEQ ID NO: 129498 - DNA, 25 bp, Saccharomyces pastorianus
atacccgatacattaagagagcagc

SEQ ID NO: 129499 - DNA, 25 bp, Saccharomyces pastorianus
tcttccgtcttacatggcagaaagg

SEQ ID NO: 129500 - DNA, 25 bp, Saccharomyces pastorianus
ataaattgtgcctctggtatagcga

SEQ ID NO: 129501 - DNA, 25 bp, Saccharomyces pastorianus
actttatcacaatccctaaggcaag

SEQ ID NO: 129502 - DNA, 25 bp, Saccharomyces pastorianus
tattcagcctgccaccataaattgt

SEQ ID NO: 129503 - DNA, 25 bp, Saccharomyces pastorianus
ggtatagcgacacttcctagttcat

SEQ ID NO: 129504 - DNA, 25 bp, Saccharomyces pastorianus
gggaatatcccctagcagttgaact

SEQ ID NO: 129505 - DNA, 25 bp, Saccharomyces pastorianus
tgtcgcctaagtccacttatcagga

SEQ ID NO: 129506 - DNA, 25 bp, Saccharomyces pastorianus
aacgttaaagcctgtttcttctgca

SEQ ID NO: 129507 - DNA, 25 bp, Saccharomyces pastorianus
gatattgatactattcagcctgcca

SEQ ID NO: 129508 - DNA, 25 bp, Saccharomyces pastorianus
gttcatataaccgacatactttcaa

SEQ ID NO: 129509 - DNA, 25 bp, Saccharomyces pastorianus
acctcaacagtttgtgccacatagc

SEQ ID NO: 129510 - DNA, 25 bp, Saccharomyces pastorianus
tttcttctgcaacatactatcctca

SEQ ID NO: 129511 - DNA, 25 bp, Saccharomyces pastorianus
aaactctttctgcaactctttatca

SEQ ID NO: 129512 - DNA, 25 bp, Saccharomyces pastorianus
gttccagtccatcttttttaacaca

SEQ ID NO: 129513 - DNA, 25 bp, Saccharomyces pastorianus
ccccgaattatatcagcaacgcaca

SEQ ID NO: 129514 - DNA, 25 bp, Saccharomyces pastorianus
gaatttgcaggatcctttcttgaaa

SEQ ID NO: 129515 - DNA, 25 bp, Saccharomyces pastorianus
gtcccatgatgcatcgaatacgtct

SEQ ID NO: 129516 - DNA, 25 bp, Saccharomyces pastorianus
cataatgcgcgtttgggttccagtc

SEQ ID NO: 129517 - DNA, 25 bp, Saccharomyces pastorianus
attctcactgcaaccaattctaggg

SEQ ID NO: 129518 - DNA, 25 bp, Saccharomyces pastorianus
ggctgccatcttgactctggtaaaa

SEQ ID NO: 129519 - DNA, 25 bp, Saccharomyces pastorianus
aaaatcaagagcctcgtcccatgat

SEQ ID NO: 129520 - DNA, 25 bp, Saccharomyces pastorianus
gactcttggtgattcatcgtcacaa

SEQ ID NO: 129521 - DNA, 25 bp, Saccharomyces pastorianus
gctttggatggctcgcattcagtaa

SEQ ID NO: 129522 - DNA, 25 bp, Saccharomyces pastorianus
ccaagttgttgttgtcagcgcaaca

SEQ ID NO: 129523 - DNA, 25 bp, Saccharomyces pastorianus
aacaggtcattctcgtgtactgata

SEQ ID NO: 129524 - DNA, 25 bp, Saccharomyces pastorianus
gcggctaatccaatcaaactttgct

SEQ ID NO: 129525 - DNA, 25 bp, Saccharomyces pastorianus
ggcgcgcggtattgatgtccaacaa

SEQ ID NO: 129526 - DNA, 25 bp, Saccharomyces pastorianus
tcattaactatgacctaccagaaat

SEQ ID NO: 129527 - DNA, 25 bp, Saccharomyces pastorianus
ctgatatcgacggatgtttgggcgc

SEQ ID NO: 129528 - DNA, 25 bp, Saccharomyces pastorianus
gtagattggttatctcagcggctaa

SEQ ID NO: 129529 - DNA, 25 bp, Saccharomyces pastorianus
aactttgctgtagtctccatgcatg

SEQ ID NO: 129530 - DNA, 25 bp, Saccharomyces pastorianus
agtggaaattcgatactctgtgtga

SEQ ID NO: 129531 - DNA, 25 bp, Saccharomyces pastorianus
aaattacatccatcgtatcggtaga

SEQ ID NO: 129532 - DNA, 25 bp, Saccharomyces pastorianus
atacgattctttgaccattacacaa

SEQ ID NO: 129533 - DNA, 25 bp, Saccharomyces pastorianus
taagtctttgaaattaccataccgt

SEQ ID NO: 129534 - DNA, 25 bp, Saccharomyces pastorianus
agaagccggttctcacggtaaggat

SEQ ID NO: 129535 - DNA, 25 bp, Saccharomyces pastorianus
gcaattgccaattcactatgtcggt

SEQ ID NO: 129536 - DNA, 25 bp, Saccharomyces pastorianus
aatgctgccgctaaaaagtacgatt

SEQ ID NO: 129537 - DNA, 25 bp, Saccharomyces pastorianus
gtacactgtttgaattccactttgg

SEQ ID NO: 129538 - DNA, 25 bp, Saccharomyces pastorianus
ggtgaaccagaatttttaccattcg

SEQ ID NO: 129539 - DNA, 25 bp, Saccharomyces pastorianus
agctttgtgctgtatcttggagaac

SEQ ID NO: 129540 - DNA, 25 bp, Saccharomyces pastorianus
gtctcttgctccaattgtactgatt

SEQ ID NO: 129541 - DNA, 25 bp, Saccharomyces pastorianus
actatgtcggttactcctcttgttt

SEQ ID NO: 129542 - DNA, 25 bp, Saccharomyces pastorianus
gaacaattcgtcatcactgaacctg

SEQ ID NO: 129543 - DNA, 25 bp, Saccharomyces pastorianus
atcgttggtatcgtttccggtgaat

SEQ ID NO: 129544 - DNA, 25 bp, Saccharomyces pastorianus
gacatcgttaccgtcggccaatgta

SEQ ID NO: 129545 - DNA, 25 bp, Saccharomyces pastorianus
cgtaccattgtcatcagaagggctt

SEQ ID NO: 129546 - DNA, 25 bp, Saccharomyces pastorianus
aagggcttacttgcattacattcca

SEQ ID NO: 129547 - DNA, 25 bp, Saccharomyces pastorianus
gttggtgacatcgttaccgtcggcc

SEQ ID NO: 129548 - DNA, 25 bp, Saccharomyces pastorianus
ctccaagactgttagattcaacgtt

SEQ ID NO: 129549 - DNA, 25 bp, Saccharomyces pastorianus
acacaagaacgttccagttcacgtt

SEQ ID NO: 129550 - DNA, 25 bp, Saccharomyces pastorianus
catcgttaccgtcggccaatgtaga

SEQ ID NO: 129551 - DNA, 25 bp, Saccharomyces pastorianus
ttccagttcacgtttccccagcttt

SEQ ID NO: 129552 - DNA, 25 bp, Saccharomyces pastorianus
cagctttccgtgtccaagttggtga

SEQ ID NO: 129553 - DNA, 25 bp, Saccharomyces pastorianus
tggtgacatcgttaccgtcggccaa

SEQ ID NO: 129554 - DNA, 25 bp, Saccharomyces pastorianus
ttggtgacatcgttaccgtcggcca

SEQ ID NO: 129555 - DNA, 25 bp, Saccharomyces pastorianus
gtatagctacctacaagcccggata

SEQ ID NO: 129556 - DNA, 25 bp, Saccharomyces pastorianus
gtatgttgagcattcctgtttctga

SEQ ID NO: 129557 - DNA, 25 bp, Saccharomyces pastorianus
aagtgtggttcaaagcgaggttcta

SEQ ID NO: 129558 - DNA, 25 bp, Saccharomyces pastorianus
gcatgagcggaactagatcccgtat

SEQ ID NO: 129559 - DNA, 25 bp, Saccharomyces pastorianus
gatcccgtatacagtgccgctataa

SEQ ID NO: 129560 - DNA, 25 bp, Saccharomyces pastorianus
aagaggcacaccaatatcaagggat

SEQ ID NO: 129561 - DNA, 25 bp, Saccharomyces pastorianus
gatatcctcgaactggtcttgaact

SEQ ID NO: 129562 - DNA, 25 bp, Saccharomyces pastorianus
gagaattagcgataatcctaccttc

SEQ ID NO: 129563 - DNA, 25 bp, Saccharomyces pastorianus
attggactgtcgtcagtgaacgcat

SEQ ID NO: 129564 - DNA, 25 bp, Saccharomyces pastorianus
aagtggctgctagaacgattgaaac

SEQ ID NO: 129565 - DNA, 25 bp, Saccharomyces pastorianus
acagctacctaaaacgtcctattca

SEQ ID NO: 129566 - DNA, 25 bp, Saccharomyces pastorianus
acttttgtggccagtagttctctgc

SEQ ID NO: 129567 - DNA, 25 bp, Saccharomyces pastorianus
aaggctttccaactctaacagggat

SEQ ID NO: 129568 - DNA, 25 bp, Saccharomyces pastorianus
gcaattccaggcctcatcgaataaa

SEQ ID NO: 129569 - DNA, 25 bp, Saccharomyces pastorianus
gattttgagccattcgatgcgagtc

SEQ ID NO: 129570 - DNA, 25 bp, Saccharomyces pastorianus
gagtcattggactgtctcgcagaat

SEQ ID NO: 129571 - DNA, 25 bp, Saccharomyces pastorianus
gctatgacgcactacaatactacaa

SEQ ID NO: 129572 - DNA, 25 bp, Saccharomyces pastorianus
ggagctaatggttctttccataaac

SEQ ID NO: 129573 - DNA, 25 bp, Saccharomyces pastorianus
actacaacagtagcgccatggcatc

SEQ ID NO: 129574 - DNA, 25 bp, Saccharomyces pastorianus
gatgcgagtcattatacaaccctgt

SEQ ID NO: 129575 - DNA, 25 bp, Saccharomyces pastorianus
tctgctcgctaccattgaggttatt

SEQ ID NO: 129576 - DNA, 25 bp, Saccharomyces pastorianus
taaaccttccctcgatatacttatc

SEQ ID NO: 129577 - DNA, 25 bp, Saccharomyces pastorianus
aagcaagtacttgcactcttggaaa

SEQ ID NO: 129578 - DNA, 25 bp, Saccharomyces pastorianus
aagatgcacaactggctgtcaggcc

SEQ ID NO: 129579 - DNA, 25 bp, Saccharomyces pastorianus
gtcaggccgtatccgttgaagcgca

SEQ ID NO: 129580 - DNA, 25 bp, Saccharomyces pastorianus
gcgtccgatagttcacaaagcttta

SEQ ID NO: 129581 - DNA, 25 bp, Saccharomyces pastorianus
tagagggttatttctctcctagaaa

SEQ ID NO: 129582 - DNA, 25 bp, Saccharomyces pastorianus
ttacccgctaacagtcagctggtta

SEQ ID NO: 129583 - DNA, 25 bp, Saccharomyces pastorianus
gatggaccatcaagatcactcagaa

SEQ ID NO: 129584 - DNA, 25 bp, Saccharomyces pastorianus
ttgaagcgcaattcctcttcaggga

SEQ ID NO: 129585 - DNA, 25 bp, Saccharomyces pastorianus
atctatcaagtctgttgtttccggg

SEQ ID NO: 129586 - DNA, 25 bp, Saccharomyces pastorianus
gaggaacaaagaccattacccgcta

SEQ ID NO: 129587 - DNA, 25 bp, Saccharomyces pastorianus
ggcagtgtgacaccagcaaacatat

SEQ ID NO: 129588 - DNA, 25 bp, Saccharomyces pastorianus
aagacatgttgactatctgtcacat

SEQ ID NO: 129589 - DNA, 25 bp, Saccharomyces pastorianus
caccgccggcggataatgatagcta

SEQ ID NO: 129590 - DNA, 25 bp, Saccharomyces pastorianus
gatgttgatctagtaaatgctgcta

SEQ ID NO: 129591 - DNA, 25 bp, Saccharomyces pastorianus
taattcttcaagcaattcttcagat

SEQ ID NO: 129592 - DNA, 25 bp, Saccharomyces pastorianus
aaattgctaggaaggtcagacgacc

SEQ ID NO: 129593 - DNA, 25 bp, Saccharomyces pastorianus
gctgctaggttagaaaatgcctcat

SEQ ID NO: 129594 - DNA, 25 bp, Saccharomyces pastorianus
gatcaatgggccttcttgatgaata

SEQ ID NO: 129595 - DNA, 25 bp, Saccharomyces pastorianus
gatgaatatattgaccctaccaaga

SEQ ID NO: 129596 - DNA, 25 bp, Saccharomyces pastorianus
gatagctacttaattccacaagatg

SEQ ID NO: 129597 - DNA, 25 bp, Saccharomyces pastorianus
tatcaggaacactcaacctccgttt

SEQ ID NO: 129598 - DNA, 25 bp, Saccharomyces pastorianus
gggccttcagtatcgatggctgttc

SEQ ID NO: 129599 - DNA, 25 bp, Saccharomyces pastorianus
gttcagagctatgttcagtcggcat

SEQ ID NO: 129600 - DNA, 25 bp, Saccharomyces pastorianus
tgggaacacaagacctgagccgtat

SEQ ID NO: 129601 - DNA, 25 bp, Saccharomyces pastorianus
ggccatttacggaaattctgcaacc

SEQ ID NO: 129602 - DNA, 25 bp, Saccharomyces pastorianus
ggaacaagctcgaatacccaatggt

SEQ ID NO: 129603 - DNA, 25 bp, Saccharomyces pastorianus
gtcagtttagttccatgattgtgca

SEQ ID NO: 129604 - DNA, 25 bp, Saccharomyces pastorianus
ttcagttggcctcaaattgttcttt

SEQ ID NO: 129605 - DNA, 25 bp, Saccharomyces pastorianus
ctctaaccaatcaaaagcccatctg

SEQ ID NO: 129606 - DNA, 25 bp, Saccharomyces pastorianus
aggtctagctagttattcccagttg

SEQ ID NO: 129607 - DNA, 25 bp, Saccharomyces pastorianus
atcaggcttcgcattgtcagtttag

SEQ ID NO: 129608 - DNA, 25 bp, Saccharomyces pastorianus
gcgatgtctatttcagctctaacca

SEQ ID NO: 129609 - DNA, 25 bp, Saccharomyces pastorianus
atctcgaaggttgctttggtttgac

SEQ ID NO: 129610 - DNA, 25 bp, Saccharomyces pastorianus
caacactatgagactggtgcacagt

SEQ ID NO: 129611 - DNA, 25 bp, Saccharomyces pastorianus
gatccttgaagatcccctatcaaat

SEQ ID NO: 129612 - DNA, 25 bp, Saccharomyces pastorianus
gctgcagttcccgttcaaagatcaa

SEQ ID NO: 129613 - DNA, 25 bp, Saccharomyces pastorianus
gacagcctcaccaatcagatgatga

SEQ ID NO: 129614 - DNA, 25 bp, Saccharomyces pastorianus
aaactatatcaagcgacagcctcac

SEQ ID NO: 129615 - DNA, 25 bp, Saccharomyces pastorianus
tagacagtctagtgctgcagttccc

SEQ ID NO: 129616 - DNA, 25 bp, Saccharomyces pastorianus
gtttagatgaatcattgcaccgcaa

SEQ ID NO: 129617 - DNA, 25 bp, Saccharomyces pastorianus
ggagatgatgggtcactttccattt

SEQ ID NO: 129618 - DNA, 25 bp, Saccharomyces pastorianus
gagcctgctcaaataatgggttata

SEQ ID NO: 129619 - DNA, 25 bp, Saccharomyces pastorianus
aaccaatatcgaatgtctagacagt

SEQ ID NO: 129620 - DNA, 25 bp, Saccharomyces pastorianus
tggtgcacagttttcaaacacagag

SEQ ID NO: 129621 - DNA, 25 bp, Saccharomyces pastorianus
cttggaattacaagtacacgaaatt

SEQ ID NO: 129622 - DNA, 25 bp, Saccharomyces pastorianus
actctttgtctactttggctcatca

SEQ ID NO: 129623 - DNA, 25 bp, Saccharomyces pastorianus
aactctttgtctactttggctcatc

SEQ ID NO: 129624 - DNA, 25 bp, Saccharomyces pastorianus
tgttttcgctgaattgaccaatatg

SEQ ID NO: 129625 - DNA, 25 bp, Saccharomyces pastorianus
tgcgggtaccattgcaggcagtgac

SEQ ID NO: 129626 - DNA, 25 bp, Saccharomyces pastorianus
tgaccaatatggatgaagttcacgg

SEQ ID NO: 129627 - DNA, 25 bp, Saccharomyces pastorianus
gaagttcacggtggttcaccatggg

SEQ ID NO: 129628 - DNA, 25 bp, Saccharomyces pastorianus
ttcgctgaattgaccaatatggatg

SEQ ID NO: 129629 - DNA, 25 bp, Saccharomyces pastorianus
acaagtacacgaaattcaaggcaag

SEQ ID NO: 129630 - DNA, 25 bp, Saccharomyces pastorianus
gaatgttttcgctgaattgaccaat

SEQ ID NO: 129631 - DNA, 25 bp, Saccharomyces pastorianus
ctctttgtctactttggctcatcac

SEQ ID NO: 129632 - DNA, 25 bp, Saccharomyces pastorianus
cttggaattacaagtacacgaaatt

SEQ ID NO: 129633 - DNA, 25 bp, Saccharomyces pastorianus
aactctttgtctactttggctcatc

SEQ ID NO: 129634 - DNA, 25 bp, Saccharomyces pastorianus
tgttttcgctgaattgaccaatatg

SEQ ID NO: 129635 - DNA, 25 bp, Saccharomyces pastorianus
tgcgggtaccattgcaggcagtgac

SEQ ID NO: 129636 - DNA, 25 bp, Saccharomyces pastorianus
aggcagtgacggttcaagatctcct

SEQ ID NO: 129637 - DNA, 25 bp, Saccharomyces pastorianus
tgaccaatatggatgaagttcacgg

SEQ ID NO: 129638 - DNA, 25 bp, Saccharomyces pastorianus
gaagttcacggtggttcaccatggg

SEQ ID NO: 129639 - DNA, 25 bp, Saccharomyces pastorianus
acaagtacacgaaattcaaggcaag

SEQ ID NO: 129640 - DNA, 25 bp, Saccharomyces pastorianus
acggtatcatttttgtcccattggg

SEQ ID NO: 129641 - DNA, 25 bp, Saccharomyces pastorianus
gaatgttttcgctgaattgaccaat

SEQ ID NO: 129642 - DNA, 25 bp, Saccharomyces pastorianus
ctctttgtctactttggctcatcac

SEQ ID NO: 129643 - DNA, 25 bp, Saccharomyces pastorianus
atatggtcacgttgctgccaccgca

SEQ ID NO: 129644 - DNA, 25 bp, Saccharomyces pastorianus
tcacgttgctgccaccgcagaggca

SEQ ID NO: 129645 - DNA, 25 bp, Saccharomyces pastorianus
cgcagaggcagaaaagaagggaatt

SEQ ID NO: 129646 - DNA, 25 bp, Saccharomyces pastorianus
aaagaagggaattgaagccgctgga

SEQ ID NO: 129647 - DNA, 25 bp, Saccharomyces pastorianus
actatatggtcacgttgctgccacc

SEQ ID NO: 129648 - DNA, 25 bp, Saccharomyces pastorianus
ttgctgccaccgcagaggcagaaaa

SEQ ID NO: 129649 - DNA, 25 bp, Saccharomyces pastorianus
ctatcatcatttacacactatatgg

SEQ ID NO: 129650 - DNA, 25 bp, Saccharomyces pastorianus
tttacacactatatggtcacgttgc

SEQ ID NO: 129651 - DNA, 25 bp, Saccharomyces pastorianus
atggtcacgttgctgccaccgcaga

SEQ ID NO: 129652 - DNA, 25 bp, Saccharomyces pastorianus
acactatatggtcacgttgctgcca

SEQ ID NO: 129653 - DNA, 25 bp, Saccharomyces pastorianus
acacactatatggtcacgttgctgc

SEQ ID NO: 129654 - DNA, 25 bp, Saccharomyces pastorianus
gagcgaagcagtaaacacgatccat

SEQ ID NO: 129655 - DNA, 25 bp, Saccharomyces pastorianus
gtatagcacatccacaacccttcaa

SEQ ID NO: 129656 - DNA, 25 bp, Saccharomyces pastorianus
acgatttggagcgaagcagtaaaca

SEQ ID NO: 129657 - DNA, 25 bp, Saccharomyces pastorianus
ctcagagagctcacaattcggaaaa

SEQ ID NO: 129658 - DNA, 25 bp, Saccharomyces pastorianus
gctcacaattcggaaaacgatttgg

SEQ ID NO: 129659 - DNA, 25 bp, Saccharomyces pastorianus
gcagtaaacacgatccatttgaaac

SEQ ID NO: 129660 - DNA, 25 bp, Saccharomyces pastorianus
gagagctcacaattcggaaaacgat

SEQ ID NO: 129661 - DNA, 25 bp, Saccharomyces pastorianus
gaaacgtatagcacatccacaaccc

SEQ ID NO: 129662 - DNA, 25 bp, Saccharomyces pastorianus
gaagcagtaaacacgatccatttga

SEQ ID NO: 129663 - DNA, 25 bp, Saccharomyces pastorianus
aaaactcagagagctcacaattcgg

SEQ ID NO: 129664 - DNA, 25 bp, Saccharomyces pastorianus
gatccatttgaaacgtatagcacat

SEQ ID NO: 129665 - DNA, 25 bp, Saccharomyces pastorianus
aattggtgctgaatggggtctcgcc

SEQ ID NO: 129666 - DNA, 25 bp, Saccharomyces pastorianus
acaagtgtggaaagaggcgctattt

SEQ ID NO: 129667 - DNA, 25 bp, Saccharomyces pastorianus
taggtgctgaactttacaagtgtgg

SEQ ID NO: 129668 - DNA, 25 bp, Saccharomyces pastorianus
atcatttttggatttgtgtcagcct

SEQ ID NO: 129669 - DNA, 25 bp, Saccharomyces pastorianus
cgtcgtctatattccggttattaat

SEQ ID NO: 129670 - DNA, 25 bp, Saccharomyces pastorianus
gataaagtgtttttgcataaaccaa

SEQ ID NO: 129671 - DNA, 25 bp, Saccharomyces pastorianus
gtctatattccggttattaatgata

SEQ ID NO: 129672 - DNA, 25 bp, Saccharomyces pastorianus
agcccagtcaaggaatttttcagaa

SEQ ID NO: 129673 - DNA, 25 bp, Saccharomyces pastorianus
ttggatttgtgtcagccttccccgt

SEQ ID NO: 129674 - DNA, 25 bp, Saccharomyces pastorianus
tccccgtcgtctatattccggttat

SEQ ID NO: 129675 - DNA, 25 bp, Saccharomyces pastorianus
gccattgcattcacaattgcattct

SEQ ID NO: 129676 - DNA, 25 bp, Saccharomyces pastorianus
agtgtgatgctcaggcattcttcga

SEQ ID NO: 129677 - DNA, 25 bp, Saccharomyces pastorianus
gtgaacttttcacatggtcaggcat

SEQ ID NO: 129678 - DNA, 25 bp, Saccharomyces pastorianus
aatatgcttgtctttatggcccaat

SEQ ID NO: 129679 - DNA, 25 bp, Saccharomyces pastorianus
tggttggcagccattgcaggtttga

SEQ ID NO: 129680 - DNA, 25 bp, Saccharomyces pastorianus
ttaagggccttggtagtgtgctctc

SEQ ID NO: 129681 - DNA, 25 bp, Saccharomyces pastorianus
ctgccccgctatggatattcatgta

SEQ ID NO: 129682 - DNA, 25 bp, Saccharomyces pastorianus
ggcattatgctttcacacattcgat

SEQ ID NO: 129683 - DNA, 25 bp, Saccharomyces pastorianus
tgggtcgcactatctccaataggaa

SEQ ID NO: 129684 - DNA, 25 bp, Saccharomyces pastorianus
aaacccactggacaagatcgacttg

SEQ ID NO: 129685 - DNA, 25 bp, Saccharomyces pastorianus
ttcttcgagagttatctggctgccc

SEQ ID NO: 129686 - DNA, 25 bp, Saccharomyces pastorianus
agattaatgtgttccttggctcaac

SEQ ID NO: 129687 - DNA, 25 bp, Saccharomyces pastorianus
acagatgattgaggcttttggaggt

SEQ ID NO: 129688 - DNA, 25 bp, Saccharomyces pastorianus
tttggaggtgggaagtcccgctaca

SEQ ID NO: 129689 - DNA, 25 bp, Saccharomyces pastorianus
tacattgttaatttcggtcacggta

SEQ ID NO: 129690 - DNA, 25 bp, Saccharomyces pastorianus
ggaagtcccgctacattgttaattt

SEQ ID NO: 129691 - DNA, 25 bp, Saccharomyces pastorianus
tcacggtacccaccctttcatggat

SEQ ID NO: 129692 - DNA, 25 bp, Saccharomyces pastorianus
gctacattgttaatttcggtcacgg

SEQ ID NO: 129693 - DNA, 25 bp, Saccharomyces pastorianus
gtacccaccctttcatggatccaga

SEQ ID NO: 129694 - DNA, 25 bp, Saccharomyces pastorianus
tgggaagtcccgctacattgttaat

SEQ ID NO: 129695 - DNA, 25 bp, Saccharomyces pastorianus
gttaaacagatgattgaggcttttg

SEQ ID NO: 129696 - DNA, 25 bp, Saccharomyces pastorianus
aagtcccgctacattgttaatttcg

SEQ ID NO: 129697 - DNA, 25 bp, Saccharomyces pastorianus
tggttctatagaggtaatatcaaag

SEQ ID NO: 129698 - DNA, 25 bp, Saccharomyces pastorianus
aaggtagctaccaaatcagtctccg

SEQ ID NO: 129699 - DNA, 25 bp, Saccharomyces pastorianus
gaaatcaacttccacaaacgtcacc

SEQ ID NO: 129700 - DNA, 25 bp, Saccharomyces pastorianus
gacgggcaaagatagtgctgtacac

SEQ ID NO: 129701 - DNA, 25 bp, Saccharomyces pastorianus
ttatacagccactatagcaactgct

SEQ ID NO: 129702 - DNA, 25 bp, Saccharomyces pastorianus
gaagcatttgtctttcgctgaaaac

SEQ ID NO: 129703 - DNA, 25 bp, Saccharomyces pastorianus
gccccagaatttccctaaggtagct

SEQ ID NO: 129704 - DNA, 25 bp, Saccharomyces pastorianus
gcaactgctgctgaaacatcaaagg

SEQ ID NO: 129705 - DNA, 25 bp, Saccharomyces pastorianus
agacagcacagacagcacagccggt

SEQ ID NO: 129706 - DNA, 25 bp, Saccharomyces pastorianus
gtcaccttacattttaacgcacaga

SEQ ID NO: 129707 - DNA, 25 bp, Saccharomyces pastorianus
tctccgcagactccaaagttcataa

SEQ ID NO: 129708 - DNA, 25 bp, Saccharomyces pastorianus
cacagaatctccaacagcatcgaag

SEQ ID NO: 129709 - DNA, 25 bp, Saccharomyces pastorianus
ttcatacctcacacatgcaacgatt

SEQ ID NO: 129710 - DNA, 25 bp, Saccharomyces pastorianus
gcagacaccttactgaatacgtcat

SEQ ID NO: 129711 - DNA, 25 bp, Saccharomyces pastorianus
ttagacgaactaccttacccaatat

SEQ ID NO: 129712 - DNA, 25 bp, Saccharomyces pastorianus
taaatctgcttctttagctacgccc

SEQ ID NO: 129713 - DNA, 25 bp, Saccharomyces pastorianus
ggttcattcggaagatgccctttta

SEQ ID NO: 129714 - DNA, 25 bp, Saccharomyces pastorianus
gcaacgattctaccaagagcttcaa

SEQ ID NO: 129715 - DNA, 25 bp, Saccharomyces pastorianus
ggaccaacggatagagaccccagaa

SEQ ID NO: 129716 - DNA, 25 bp, Saccharomyces pastorianus
gatagcgcagttcaagatgttcgta

SEQ ID NO: 129717 - DNA, 25 bp, Saccharomyces pastorianus
gcaacttcgtgctctatttcaatat

SEQ ID NO: 129718 - DNA, 25 bp, Saccharomyces pastorianus
gtatacctttatgacctatggcaaa

SEQ ID NO: 129719 - DNA, 25 bp, Saccharomyces pastorianus
taatgaacatgctgaccaaaccgat

SEQ ID NO: 129720 - DNA, 25 bp, Saccharomyces pastorianus
tgactcatgtgtttggttggcggaa

SEQ ID NO: 129721 - DNA, 25 bp, Saccharomyces pastorianus
aatgagctattcttgaggatttcta

SEQ ID NO: 129722 - DNA, 25 bp, Saccharomyces pastorianus
gaaagcactagtcatacaaccagag

SEQ ID NO: 129723 - DNA, 25 bp, Saccharomyces pastorianus
aaacgaaatcgtaagtccacatgaa

SEQ ID NO: 129724 - DNA, 25 bp, Saccharomyces pastorianus
catggtgagtcaactgaacttggtc

SEQ ID NO: 129725 - DNA, 25 bp, Saccharomyces pastorianus
tcggtttcaaaccactttatcgttg

SEQ ID NO: 129726 - DNA, 25 bp, Saccharomyces pastorianus
tttgaactggcgttgatggacaagt

SEQ ID NO: 129727 - DNA, 25 bp, Saccharomyces pastorianus
agcgggatcacaaacgacagggaat

SEQ ID NO: 129728 - DNA, 25 bp, Saccharomyces pastorianus
gaacttggtcaaataacccactcaa

SEQ ID NO: 129729 - DNA, 25 bp, Saccharomyces pastorianus
ggaaacttcctatcatacaaaattg

SEQ ID NO: 129730 - DNA, 25 bp, Saccharomyces pastorianus
gtatcgttacctaatggacatattc

SEQ ID NO: 129731 - DNA, 25 bp, Saccharomyces pastorianus
ggatcatcactattagcacctatag

SEQ ID NO: 129732 - DNA, 25 bp, Saccharomyces pastorianus
gtatcgaataagtacctcatatctt

SEQ ID NO: 129733 - DNA, 25 bp, Saccharomyces pastorianus
gaggaccccatagtatcgaataagt

SEQ ID NO: 129734 - DNA, 25 bp, Saccharomyces pastorianus
ttacatcgatgaggacgactggagt

SEQ ID NO: 129735 - DNA, 25 bp, Saccharomyces pastorianus
ctaaaattatatatgctctgagcgc

SEQ ID NO: 129736 - DNA, 25 bp, Saccharomyces pastorianus
ttagcacctatagaggaccccatag

SEQ ID NO: 129737 - DNA, 25 bp, Saccharomyces pastorianus
aagtacctcatatcttacatcgatg

SEQ ID NO: 129738 - DNA, 25 bp, Saccharomyces pastorianus
gcaatttctgcgttgattccgttag

SEQ ID NO: 129739 - DNA, 25 bp, Saccharomyces pastorianus
gattccgttaggatcatcactatta

SEQ ID NO: 129740 - DNA, 25 bp, Saccharomyces pastorianus
atgctctgagcgcaatttctgcgtt

SEQ ID NO: 129741 - DNA, 25 bp, Saccharomyces pastorianus
tctgcgttgattccgttaggatcat

SEQ ID NO: 129742 - DNA, 25 bp, Saccharomyces pastorianus
atatggatgctcctttgtgcctaag

SEQ ID NO: 129743 - DNA, 25 bp, Saccharomyces pastorianus
gtgcctaagtggtacaatgtctttt

SEQ ID NO: 129744 - DNA, 25 bp, Saccharomyces pastorianus
ttttttcataccactactgtcggag

SEQ ID NO: 129745 - DNA, 25 bp, Saccharomyces pastorianus
caatgtcttttgtacgccctggaaa

SEQ ID NO: 129746 - DNA, 25 bp, Saccharomyces pastorianus
gacatggatcatctggacgtcatca

SEQ ID NO: 129747 - DNA, 25 bp, Saccharomyces pastorianus
gaaatacttcaatttggttacgcca

SEQ ID NO: 129748 - DNA, 25 bp, Saccharomyces pastorianus
gagggtcagaaatggccgattacgt

SEQ ID NO: 129749 - DNA, 25 bp, Saccharomyces pastorianus
gccgattacgtagtcgacctttttg

SEQ ID NO: 129750 - DNA, 25 bp, Saccharomyces pastorianus
atatgtttctaccaactcacgactg

SEQ ID NO: 129751 - DNA, 25 bp, Saccharomyces pastorianus
taaaggttgccccaacgatggcctt

SEQ ID NO: 129752 - DNA, 25 bp, Saccharomyces pastorianus
tgagcctaaccactatttcaactcc

SEQ ID NO: 129753 - DNA, 25 bp, Saccharomyces pastorianus
aatttcttcaatctaagggatgtac

SEQ ID NO: 129754 - DNA, 25 bp, Saccharomyces pastorianus
ccaggttttggtagcatcgaggaaa

SEQ ID NO: 129755 - DNA, 25 bp, Saccharomyces pastorianus
caaagttcctgattcgtacaagccc

SEQ ID NO: 129756 - DNA, 25 bp, Saccharomyces pastorianus
agggatgtactgttatcaccactaa

SEQ ID NO: 129757 - DNA, 25 bp, Saccharomyces pastorianus
aatagactccgtcaaagttcctgat

SEQ ID NO: 129758 - DNA, 25 bp, Saccharomyces pastorianus
tcccttctgtattccatctgacaaa

SEQ ID NO: 129759 - DNA, 25 bp, Saccharomyces pastorianus
atcaccactaaggtaccaggttttg

SEQ ID NO: 129760 - DNA, 25 bp, Saccharomyces pastorianus
aattctaatcccttctgtattccat

SEQ ID NO: 129761 - DNA, 25 bp, Saccharomyces pastorianus
gccatggtttatcaggatttgacaa

SEQ ID NO: 129762 - DNA, 25 bp, Saccharomyces pastorianus
taatttccaattcaatagtacgtaa

SEQ ID NO: 129763 - DNA, 25 bp, Saccharomyces pastorianus
ttccatctgacaaacctaatttcca

SEQ ID NO: 129764 - DNA, 25 bp, Saccharomyces pastorianus
agactcaccctacgctggtggcgtt

SEQ ID NO: 129765 - DNA, 25 bp, Saccharomyces pastorianus
ttcactttccaactgattatccatt

SEQ ID NO: 129766 - DNA, 25 bp, Saccharomyces pastorianus
ttgttgtctatttgctctcttttaa

SEQ ID NO: 129767 - DNA, 25 bp, Saccharomyces pastorianus
atcctttggtccctgaaattgctca

SEQ ID NO: 129768 - DNA, 25 bp, Saccharomyces pastorianus
aaagttttgttgtctatttgctctc

SEQ ID NO: 129769 - DNA, 25 bp, Saccharomyces pastorianus
ttttgtctattcactttccaactga

SEQ ID NO: 129770 - DNA, 25 bp, Saccharomyces pastorianus
ggtccctgaaattgctcaaatctac

SEQ ID NO: 129771 - DNA, 25 bp, Saccharomyces pastorianus
tttaacagatgctaatcccgacgat

SEQ ID NO: 129772 - DNA, 25 bp, Saccharomyces pastorianus
attatccattcaagccaccgaaggt

SEQ ID NO: 129773 - DNA, 25 bp, Saccharomyces pastorianus
atgctaatcccgacgatcctttggt

SEQ ID NO: 129774 - DNA, 25 bp, Saccharomyces pastorianus
attcgagtggtaatatctgccttga

SEQ ID NO: 129775 - DNA, 25 bp, Saccharomyces pastorianus
gcctcgatgaggatattttttacag

SEQ ID NO: 129776 - DNA, 25 bp, Saccharomyces pastorianus
aacgttccttcgctgaaagtagtga

SEQ ID NO: 129777 - DNA, 25 bp, Saccharomyces pastorianus
aagcgatcaagaagaaggcctcgat

SEQ ID NO: 129778 - DNA, 25 bp, Saccharomyces pastorianus
tgatattatgcatgaccagggtccc

SEQ ID NO: 129779 - DNA, 25 bp, Saccharomyces pastorianus
ttcactaccaagaaaaccgctgatg

SEQ ID NO: 129780 - DNA, 25 bp, Saccharomyces pastorianus
gtgaacactgaagactggctaacta

SEQ ID NO: 129781 - DNA, 25 bp, Saccharomyces pastorianus
gacagtgaacttgacttcgctgaag

SEQ ID NO: 129782 - DNA, 25 bp, Saccharomyces pastorianus
gactctgtcttagttaaggcatctg

SEQ ID NO: 129783 - DNA, 25 bp, Saccharomyces pastorianus
gatttcagcgattcaactagtgacg

SEQ ID NO: 129784 - DNA, 25 bp, Saccharomyces pastorianus
gaccagggtcccgtgaacactgaag

SEQ ID NO: 129785 - DNA, 25 bp, Saccharomyces pastorianus
gacgatgaacctaagctggacgcaa

SEQ ID NO: 129786 - DNA, 25 bp, Saccharomyces pastorianus
cttcgaaggcgtcatatttactact

SEQ ID NO: 129787 - DNA, 25 bp, Saccharomyces pastorianus
aagtcttggaagtgctttcccacga

SEQ ID NO: 129788 - DNA, 25 bp, Saccharomyces pastorianus
cctggcttatctatgatgctaaaca

SEQ ID NO: 129789 - DNA, 25 bp, Saccharomyces pastorianus
atcataccacttactattctgttat

SEQ ID NO: 129790 - DNA, 25 bp, Saccharomyces pastorianus
cagaagactctgttgctaataaatt

SEQ ID NO: 129791 - DNA, 25 bp, Saccharomyces pastorianus
gaactcttgcaattttctatttcga

SEQ ID NO: 129792 - DNA, 25 bp, Saccharomyces pastorianus
gatgctatcgttgatatcgcattga

SEQ ID NO: 129793 - DNA, 25 bp, Saccharomyces pastorianus
ttattgaccaaccaaccagagcagg

SEQ ID NO: 129794 - DNA, 25 bp, Saccharomyces pastorianus
gaagttggaacaagctcatccgaat

SEQ ID NO: 129795 - DNA, 25 bp, Saccharomyces pastorianus
ttcccacgatccgattattcacgtt

SEQ ID NO: 129796 - DNA, 25 bp, Saccharomyces pastorianus
gaccgaatgcggattatcataccac

SEQ ID NO: 129797 - DNA, 25 bp, Saccharomyces pastorianus
gggtttgactccatctcaaattggt

SEQ ID NO: 129798 - DNA, 25 bp, Saccharomyces pastorianus
atgagaatcttgaagtccaacggtt

SEQ ID NO: 129799 - DNA, 25 bp, Saccharomyces pastorianus
ttggctagatactacagaactgttg

SEQ ID NO: 129800 - DNA, 25 bp, Saccharomyces pastorianus
agaactgttgctgtcttaccaccaa

SEQ ID NO: 129801 - DNA, 25 bp, Saccharomyces pastorianus
gctcgtgtcatcactggtaacaaga

SEQ ID NO: 129802 - DNA, 25 bp, Saccharomyces pastorianus
ggtgttacccaagctcgtgtcatca

SEQ ID NO: 129803 - DNA, 25 bp, Saccharomyces pastorianus
gttgctgtcttaccaccaaactgga

SEQ ID NO: 129804 - DNA, 25 bp, Saccharomyces pastorianus
gtacgccagaaagggtttgactcca

SEQ ID NO: 129805 - DNA, 25 bp, Saccharomyces pastorianus
aggacaaagacgctaagttcagatt

SEQ ID NO: 129806 - DNA, 25 bp, Saccharomyces pastorianus
gagagatgctcacggtgttacccaa

SEQ ID NO: 129807 - DNA, 25 bp, Saccharomyces pastorianus
attggtgtcttgttgagagatgctc

SEQ ID NO: 129808 - DNA, 25 bp, Saccharomyces pastorianus
tgcaatgacaagtttcatcatcata

SEQ ID NO: 129809 - DNA, 25 bp, Saccharomyces pastorianus
tatctggaccaccattatagatttg

SEQ ID NO: 129810 - DNA, 25 bp, Saccharomyces pastorianus
cgttggtgttttatatgcaatgaca

SEQ ID NO: 129811 - DNA, 25 bp, Saccharomyces pastorianus
gctcgcacttttggcatgagagtat

SEQ ID NO: 129812 - DNA, 25 bp, Saccharomyces pastorianus
cgaagctcgcacttttggcatgaga

SEQ ID NO: 129813 - DNA, 25 bp, Saccharomyces pastorianus
aaacgaagctcgcacttttggcatg

SEQ ID NO: 129814 - DNA, 25 bp, Saccharomyces pastorianus
tttcatcatcataaactggtttgtt

SEQ ID NO: 129815 - DNA, 25 bp, Saccharomyces pastorianus
gaccaccattatagatttgaccttt

SEQ ID NO: 129816 - DNA, 25 bp, Saccharomyces pastorianus
ggattcatataaggttaggcgacaa

SEQ ID NO: 129817 - DNA, 25 bp, Saccharomyces pastorianus
tgaccttttcgttggtgttttatat

SEQ ID NO: 129818 - DNA, 25 bp, Saccharomyces pastorianus
gcatgagagtattttgtggcaccaa

SEQ ID NO: 129819 - DNA, 25 bp, Saccharomyces pastorianus
tgaccagaggtatgtccgatgatct

SEQ ID NO: 129820 - DNA, 25 bp, Saccharomyces pastorianus
aagcattgtctttgattattgacga

SEQ ID NO: 129821 - DNA, 25 bp, Saccharomyces pastorianus
tgaatacgaccgacaaagccttctg

SEQ ID NO: 129822 - DNA, 25 bp, Saccharomyces pastorianus
gatgaaaccagcgaaatttacctaa

SEQ ID NO: 129823 - DNA, 25 bp, Saccharomyces pastorianus
gagagtgccatcgaagtctgttcat

SEQ ID NO: 129824 - DNA, 25 bp, Saccharomyces pastorianus
aaaaacccgcaattagctatagatt

SEQ ID NO: 129825 - DNA, 25 bp, Saccharomyces pastorianus
aaaatttgccaatgaattcctgaaa

SEQ ID NO: 129826 - DNA, 25 bp, Saccharomyces pastorianus
gtatgtccgatgatctgcaaattga

SEQ ID NO: 129827 - DNA, 25 bp, Saccharomyces pastorianus
gcaaattgacaacctgcaggatatt

SEQ ID NO: 129828 - DNA, 25 bp, Saccharomyces pastorianus
gtctgttcatcgaaacttggtttat

SEQ ID NO: 129829 - DNA, 25 bp, Saccharomyces pastorianus
aagccttctgccttttctgcaaaag

SEQ ID NO: 129830 - DNA, 25 bp, Saccharomyces pastorianus
gccatcagggttcaagagttatcat

SEQ ID NO: 129831 - DNA, 25 bp, Saccharomyces pastorianus
gatcagttattatgcctaggttttg

SEQ ID NO: 129832 - DNA, 25 bp, Saccharomyces pastorianus
ggcttgaaattcctcaactctttag

SEQ ID NO: 129833 - DNA, 25 bp, Saccharomyces pastorianus
ggattccaactcatatgatgtcact

SEQ ID NO: 129834 - DNA, 25 bp, Saccharomyces pastorianus
gatgtcactcaaaacgtgctgaaag

SEQ ID NO: 129835 - DNA, 25 bp, Saccharomyces pastorianus
gtctataaatgattatcacctcggt

SEQ ID NO: 129836 - DNA, 25 bp, Saccharomyces pastorianus
gaaggatcatttcgattggtttatg

SEQ ID NO: 129837 - DNA, 25 bp, Saccharomyces pastorianus
cttattagccaaagggaatgctcca

SEQ ID NO: 129838 - DNA, 25 bp, Saccharomyces pastorianus
aagaattttagcaagcggccagaaa

SEQ ID NO: 129839 - DNA, 25 bp, Saccharomyces pastorianus
ataagttccaacgatgccatcaggg

SEQ ID NO: 129840 - DNA, 25 bp, Saccharomyces pastorianus
gcaagcggccagaaaacttattagc

SEQ ID NO: 129841 - DNA, 25 bp, Saccharomyces pastorianus
gttcaaacctcccagactctaataa

SEQ ID NO: 129842 - DNA, 25 bp, Saccharomyces pastorianus
gaaggtgctgtttccggtatgtcac

SEQ ID NO: 129843 - DNA, 25 bp, Saccharomyces pastorianus
aatgggttgctgagcgacacatcaa

SEQ ID NO: 129844 - DNA, 25 bp, Saccharomyces pastorianus
aagcggacattctgttaattcctca

SEQ ID NO: 129845 - DNA, 25 bp, Saccharomyces pastorianus
ggcaataaactcaacaggcgctcca

SEQ ID NO: 129846 - DNA, 25 bp, Saccharomyces pastorianus
tttcaacataattcggcgtccgtcg

SEQ ID NO: 129847 - DNA, 25 bp, Saccharomyces pastorianus
tgcgtcatcgccatcagctttagaa

SEQ ID NO: 129848 - DNA, 25 bp, Saccharomyces pastorianus
aggcgctccagcgagatctattata

SEQ ID NO: 129849 - DNA, 25 bp, Saccharomyces pastorianus
attacaccatctcctgtggcaataa

SEQ ID NO: 129850 - DNA, 25 bp, Saccharomyces pastorianus
tagactcaaattcctctgcgtcatc

SEQ ID NO: 129851 - DNA, 25 bp, Saccharomyces pastorianus
tggaccttccgactggtggttcaaa

SEQ ID NO: 129852 - DNA, 25 bp, Saccharomyces pastorianus
caacctaccgttggattatgctcaa

SEQ ID NO: 129853 - DNA, 25 bp, Saccharomyces pastorianus
gaaccgaatgatcctgtgtcacaat

SEQ ID NO: 129854 - DNA, 25 bp, Saccharomyces pastorianus
tggatgattcttgctgtcatcgaat

SEQ ID NO: 129855 - DNA, 25 bp, Saccharomyces pastorianus
gaattatttccccaatgaaccgaat

SEQ ID NO: 129856 - DNA, 25 bp, Saccharomyces pastorianus
gcttatttctccaaaattcctccaa

SEQ ID NO: 129857 - DNA, 25 bp, Saccharomyces pastorianus
aacgagcaatcttttccacaactgg

SEQ ID NO: 129858 - DNA, 25 bp, Saccharomyces pastorianus
ttaaaacctgttgtcgtgggcaaat

SEQ ID NO: 129859 - DNA, 25 bp, Saccharomyces pastorianus
taaatcttgtatacacttcctcaaa

SEQ ID NO: 129860 - DNA, 25 bp, Saccharomyces pastorianus
tagatgaagcgtttctctcctacaa

SEQ ID NO: 129861 - DNA, 25 bp, Saccharomyces pastorianus
ggcgtatagaggtggcaactgtcat

SEQ ID NO: 129862 - DNA, 25 bp, Saccharomyces pastorianus
aactgtcatgctgtgctccaattta

SEQ ID NO: 129863 - DNA, 25 bp, Saccharomyces pastorianus
tcttccttctgttccgggctttgaa

SEQ ID NO: 129864 - DNA, 25 bp, Saccharomyces pastorianus
gacaatctgacggtcaagatactaa

SEQ ID NO: 129865 - DNA, 25 bp, Saccharomyces pastorianus
tgttccgggctttgaaaatctttca

SEQ ID NO: 129866 - DNA, 25 bp, Saccharomyces pastorianus
gtgtctgaccgcctggaacacgtat

SEQ ID NO: 129867 - DNA, 25 bp, Saccharomyces pastorianus
cagtagtggacaatctgacggtcaa

SEQ ID NO: 129868 - DNA, 25 bp, Saccharomyces pastorianus
gaccgcctggaacacgtatggattt

SEQ ID NO: 129869 - DNA, 25 bp, Saccharomyces pastorianus
gatactaataattggttcgctcttc

SEQ ID NO: 129870 - DNA, 25 bp, Saccharomyces pastorianus
ttgttgcgatagatgggagcccagt

SEQ ID NO: 129871 - DNA, 25 bp, Saccharomyces pastorianus
taataattggttcgctcttccttct

SEQ ID NO: 129872 - DNA, 25 bp, Saccharomyces pastorianus
cacgtatggatttcgttgttgcgat

SEQ ID NO: 129873 - DNA, 25 bp, Saccharomyces pastorianus
atgggagcccagtagtggacaatct

SEQ ID NO: 129874 - DNA, 25 bp, Saccharomyces pastorianus
aattctccgcctgattatgggttta

SEQ ID NO: 129875 - DNA, 25 bp, Saccharomyces pastorianus
ttcccttattttgatctgtgcgtgc

SEQ ID NO: 129876 - DNA, 25 bp, Saccharomyces pastorianus
ggttgcttcacaatgtttttctcag

SEQ ID NO: 129877 - DNA, 25 bp, Saccharomyces pastorianus
gttctgttgcgtcatttggttcaca

SEQ ID NO: 129878 - DNA, 25 bp, Saccharomyces pastorianus
gcgtgcctgttgttgttatttagtc

SEQ ID NO: 129879 - DNA, 25 bp, Saccharomyces pastorianus
atttagtcggttcactttggcgcca

SEQ ID NO: 129880 - DNA, 25 bp, Saccharomyces pastorianus
gaggactcacaatctatctacgaat

SEQ ID NO: 129881 - DNA, 25 bp, Saccharomyces pastorianus
ttttatacttgtctgcactgctaac

SEQ ID NO: 129882 - DNA, 25 bp, Saccharomyces pastorianus
ctaagcatccgcattgttcatcaac

SEQ ID NO: 129883 - DNA, 25 bp, Saccharomyces pastorianus
ggttcacaatcaacttcagcgtcat

SEQ ID NO: 129884 - DNA, 25 bp, Saccharomyces pastorianus
gaatcgttttatccttgtttcgcgg

SEQ ID NO: 129885 - DNA, 25 bp, Saccharomyces pastorianus
aatccaaatgattcgggcatggaga

SEQ ID NO: 129886 - DNA, 25 bp, Saccharomyces pastorianus
gattatgacaatccaaatgattcgg

SEQ ID NO: 129887 - DNA, 25 bp, Saccharomyces pastorianus
tgagaagttaaaagtagccataaaa

SEQ ID NO: 129888 - DNA, 25 bp, Saccharomyces pastorianus
aagtaacggcttatgattatgacaa

SEQ ID NO: 129889 - DNA, 25 bp, Saccharomyces pastorianus
aaaagtaacggcttatgattatgac

SEQ ID NO: 129890 - DNA, 25 bp, Saccharomyces pastorianus
atccctgaatggaaattctacaata

SEQ ID NO: 129891 - DNA, 25 bp, Saccharomyces pastorianus
actatgagaagttaaaagtagccat

SEQ ID NO: 129892 - DNA, 25 bp, Saccharomyces pastorianus
gacaatccaaatgattcgggcatgg

SEQ ID NO: 129893 - DNA, 25 bp, Saccharomyces pastorianus
atgacaatccaaatgattcgggcat

SEQ ID NO: 129894 - DNA, 25 bp, Saccharomyces pastorianus
tcgggcatggagaagttgttgaatc

SEQ ID NO: 129895 - DNA, 25 bp, Saccharomyces pastorianus
atgattcgggcatggagaagttgtt

SEQ ID NO: 129896 - DNA, 25 bp, Saccharomyces pastorianus
gtgcttggctatctatcatcagtgt

SEQ ID NO: 129897 - DNA, 25 bp, Saccharomyces pastorianus
caactttgccttcttattcatcgat

SEQ ID NO: 129898 - DNA, 25 bp, Saccharomyces pastorianus
tcatcgattcattaggtgcttggct

SEQ ID NO: 129899 - DNA, 25 bp, Saccharomyces pastorianus
aaatggcccgatctgatttttggta

SEQ ID NO: 129900 - DNA, 25 bp, Saccharomyces pastorianus
ggataactgttcaatccccgacgat

SEQ ID NO: 129901 - DNA, 25 bp, Saccharomyces pastorianus
agagcccaaacattgcatgctgtcc

SEQ ID NO: 129902 - DNA, 25 bp, Saccharomyces pastorianus
tgcttccaccttactttgaactagc

SEQ ID NO: 129903 - DNA, 25 bp, Saccharomyces pastorianus
gacgatgcttcgagctttgcagacg

SEQ ID NO: 129904 - DNA, 25 bp, Saccharomyces pastorianus
gcatctgttttgttagctgtcggac

SEQ ID NO: 129905 - DNA, 25 bp, Saccharomyces pastorianus
aggaattttcgcgtctcatttcata

SEQ ID NO: 129906 - DNA, 25 bp, Saccharomyces pastorianus
atattatggctgaggcccctttacg

SEQ ID NO: 129907 - DNA, 25 bp, Saccharomyces pastorianus
tgggtatcccagcagacatatactt

SEQ ID NO: 129908 - DNA, 25 bp, Saccharomyces pastorianus
ctgcctacttagattccgaacaacg

SEQ ID NO: 129909 - DNA, 25 bp, Saccharomyces pastorianus
gattgatgagccatctgcctactta

SEQ ID NO: 129910 - DNA, 25 bp, Saccharomyces pastorianus
acgcaagagcccctgaatctttgtt

SEQ ID NO: 129911 - DNA, 25 bp, Saccharomyces pastorianus
attccttccaagaatgctcacgcaa

SEQ ID NO: 129912 - DNA, 25 bp, Saccharomyces pastorianus
aattgcaccaaagttcccaggtact

SEQ ID NO: 129913 - DNA, 25 bp, Saccharomyces pastorianus
gttcccaggtactgtcagacaattg

SEQ ID NO: 129914 - DNA, 25 bp, Saccharomyces pastorianus
aactgcgtttattgtcgagcacgat

SEQ ID NO: 129915 - DNA, 25 bp, Saccharomyces pastorianus
atcgtcttggcattgggtatcccag

SEQ ID NO: 129916 - DNA, 25 bp, Saccharomyces pastorianus
ggatccaaactccttcagaccaaga

SEQ ID NO: 129917 - DNA, 25 bp, Saccharomyces pastorianus
gacaattcctaaatccacagtttca

SEQ ID NO: 129918 - DNA, 25 bp, Saccharomyces pastorianus
agatcagaaccgtcctgctgtccat

SEQ ID NO: 129919 - DNA, 25 bp, Saccharomyces pastorianus
aatcctaatgatccgctagctaatg

SEQ ID NO: 129920 - DNA, 25 bp, Saccharomyces pastorianus
attcaagcactgttggctagcccta

SEQ ID NO: 129921 - DNA, 25 bp, Saccharomyces pastorianus
tgctgtccattcaagcactgttggc

SEQ ID NO: 129922 - DNA, 25 bp, Saccharomyces pastorianus
gttggctagccctaatcctaatgat

SEQ ID NO: 129923 - DNA, 25 bp, Saccharomyces pastorianus
atgtcttgatgtgcttaaaactaat

SEQ ID NO: 129924 - DNA, 25 bp, Saccharomyces pastorianus
ggtgccaaagctaaggctcgcgaat

SEQ ID NO: 129925 - DNA, 25 bp, Saccharomyces pastorianus
gatccgctagctaatgacgtcgctg

SEQ ID NO: 129926 - DNA, 25 bp, Saccharomyces pastorianus
gttgggccgtatatgtcttgatgtg

SEQ ID NO: 129927 - DNA, 25 bp, Saccharomyces pastorianus
caatattgataggttgggccgtata

SEQ ID NO: 129928 - DNA, 25 bp, Saccharomyces pastorianus
aatgacgtcgctgaagattggataa

SEQ ID NO: 129929 - DNA, 25 bp, Saccharomyces pastorianus
ggttacgcggtgattttgacctcta

SEQ ID NO: 129930 - DNA, 25 bp, Saccharomyces pastorianus
aaagagcccatttcactggacactc

SEQ ID NO: 129931 - DNA, 25 bp, Saccharomyces pastorianus
gtattcgcacaacctgcctattggg

SEQ ID NO: 129932 - DNA, 25 bp, Saccharomyces pastorianus
tgccaagattcaccattgactgtat

SEQ ID NO: 129933 - DNA, 25 bp, Saccharomyces pastorianus
agtacttttcgttggcgtgctgttc

SEQ ID NO: 129934 - DNA, 25 bp, Saccharomyces pastorianus
cggaccctagcaggcccagaataaa

SEQ ID NO: 129935 - DNA, 25 bp, Saccharomyces pastorianus
tgctgttctgcctactgccaagatt

SEQ ID NO: 129936 - DNA, 25 bp, Saccharomyces pastorianus
gtcagccactcacaagagaccatag

SEQ ID NO: 129937 - DNA, 25 bp, Saccharomyces pastorianus
acactcattttgatggcgtcagcca

SEQ ID NO: 129938 - DNA, 25 bp, Saccharomyces pastorianus
aattttacaagggtgcggcgcgtgt

SEQ ID NO: 129939 - DNA, 25 bp, Saccharomyces pastorianus
atacgtccccttacagatttcaaag

SEQ ID NO: 129940 - DNA, 25 bp, Saccharomyces pastorianus
aaatctaaaggtccgtcaatcatta

SEQ ID NO: 129941 - DNA, 25 bp, Saccharomyces pastorianus
gctacgtgggtctctggattcaatt

SEQ ID NO: 129942 - DNA, 25 bp, Saccharomyces pastorianus
ggtcgtccctctttggattatgaga

SEQ ID NO: 129943 - DNA, 25 bp, Saccharomyces pastorianus
gtcacaggctaacaggtataacgat

SEQ ID NO: 129944 - DNA, 25 bp, Saccharomyces pastorianus
aactcgagaagctctgggctacgtg

SEQ ID NO: 129945 - DNA, 25 bp, Saccharomyces pastorianus
tcagatgttgatggcgcttgttatg

SEQ ID NO: 129946 - DNA, 25 bp, Saccharomyces pastorianus
tagttgatcgaacgctacagccaaa

SEQ ID NO: 129947 - DNA, 25 bp, Saccharomyces pastorianus
gcccacatgccaacttgtattctta

SEQ ID NO: 129948 - DNA, 25 bp, Saccharomyces pastorianus
tacagaatgtctgccgactttggtc

SEQ ID NO: 129949 - DNA, 25 bp, Saccharomyces pastorianus
cctgaatgtaggtttgccaaggatt

SEQ ID NO: 129950 - DNA, 25 bp, Saccharomyces pastorianus
gaaattcctgctgatatgatcttat

SEQ ID NO: 129951 - DNA, 25 bp, Saccharomyces pastorianus
ataaacgctggtgtcactccaacca

SEQ ID NO: 129952 - DNA, 25 bp, Saccharomyces pastorianus
gataccaagattatgataaacgctg

SEQ ID NO: 129953 - DNA, 25 bp, Saccharomyces pastorianus
tatgataaacgctggtgtcactcca

SEQ ID NO: 129954 - DNA, 25 bp, Saccharomyces pastorianus
aaacgctggtgtcactccaaccaaa

SEQ ID NO: 129955 - DNA, 25 bp, Saccharomyces pastorianus
gattatgataaacgctggtgtcact

SEQ ID NO: 129956 - DNA, 25 bp, Saccharomyces pastorianus
tgataaacgctggtgtcactccaac

SEQ ID NO: 129957 - DNA, 25 bp, Saccharomyces pastorianus
gataaacgctggtgtcactccaacc

SEQ ID NO: 129958 - DNA, 25 bp, Saccharomyces pastorianus
atgataaacgctggtgtcactccaa

SEQ ID NO: 129959 - DNA, 25 bp, Saccharomyces pastorianus
ttatgataaacgctggtgtcactcc

SEQ ID NO: 129960 - DNA, 25 bp, Saccharomyces pastorianus
agattatgataaacgctggtgtcac

SEQ ID NO: 129961 - DNA, 25 bp, Saccharomyces pastorianus
ataccaagattatgataaacgctgg

SEQ ID NO: 129962 - DNA, 25 bp, Saccharomyces pastorianus
ggagcccctctgaacctaaatgcgg

SEQ ID NO: 129963 - DNA, 25 bp, Saccharomyces pastorianus
aagaactcagtcaattccggatcat

SEQ ID NO: 129964 - DNA, 25 bp, Saccharomyces pastorianus
atgccgcgccggtaatgttatttat

SEQ ID NO: 129965 - DNA, 25 bp, Saccharomyces pastorianus
ttccggatcatcacaaactcatact

SEQ ID NO: 129966 - DNA, 25 bp, Saccharomyces pastorianus
gacaacttgtgggtatcttgagaga

SEQ ID NO: 129967 - DNA, 25 bp, Saccharomyces pastorianus
gtaatgagccttccaattccaacgt

SEQ ID NO: 129968 - DNA, 25 bp, Saccharomyces pastorianus
gtttcaaggcggtttagacattatc

SEQ ID NO: 129969 - DNA, 25 bp, Saccharomyces pastorianus
aatgcgggttttcgagacaacttgt

SEQ ID NO: 129970 - DNA, 25 bp, Saccharomyces pastorianus
gactaaattggtcaatgccgcgccg

SEQ ID NO: 129971 - DNA, 25 bp, Saccharomyces pastorianus
gccaactttccctcaactttatata

SEQ ID NO: 129972 - DNA, 25 bp, Saccharomyces pastorianus
aacgtctctttcttatccattgatg

SEQ ID NO: 129973 - DNA, 25 bp, Saccharomyces pastorianus
attgccacaactgaattgcctccaa

SEQ ID NO: 129974 - DNA, 25 bp, Saccharomyces pastorianus
cgcttccgaaattgccacaactgaa

SEQ ID NO: 129975 - DNA, 25 bp, Saccharomyces pastorianus
aaaactctcctgacaaggcttgcca

SEQ ID NO: 129976 - DNA, 25 bp, Saccharomyces pastorianus
tggaggcttataaaaccgcttccga

SEQ ID NO: 129977 - DNA, 25 bp, Saccharomyces pastorianus
aggtctagctttgaatttctccgtc

SEQ ID NO: 129978 - DNA, 25 bp, Saccharomyces pastorianus
aaaggcaaccaactcctctttggag

SEQ ID NO: 129979 - DNA, 25 bp, Saccharomyces pastorianus
ctgaattttccagcggagatgcaag

SEQ ID NO: 129980 - DNA, 25 bp, Saccharomyces pastorianus
gaatttctccgtcttctattacgaa

SEQ ID NO: 129981 - DNA, 25 bp, Saccharomyces pastorianus
ggacaacttgaccttatggacctct

SEQ ID NO: 129982 - DNA, 25 bp, Saccharomyces pastorianus
aaggcttgccacttggccaaacaag

SEQ ID NO: 129983 - DNA, 25 bp, Saccharomyces pastorianus
ggacctctgatatttctgaatctgg

SEQ ID NO: 129984 - DNA, 25 bp, Saccharomyces pastorianus
aagattctgtttacctagctaaatt

SEQ ID NO: 129985 - DNA, 25 bp, Saccharomyces pastorianus
gaagattctgtttacctagctaaat

SEQ ID NO: 129986 - DNA, 25 bp, Saccharomyces pastorianus
ctgtttacctagctaaattagctga

SEQ ID NO: 129987 - DNA, 25 bp, Saccharomyces pastorianus
taaattagctgaacaagccgaacgt

SEQ ID NO: 129988 - DNA, 25 bp, Saccharomyces pastorianus
aacatgaaggccgttgcttcatcag

SEQ ID NO: 129989 - DNA, 25 bp, Saccharomyces pastorianus
agctaaattagctgaacaagccgaa

SEQ ID NO: 129990 - DNA, 25 bp, Saccharomyces pastorianus
tgcttcatcaggtcaagagttatct

SEQ ID NO: 129991 - DNA, 25 bp, Saccharomyces pastorianus
ttctgtttacctagctaaattagct

SEQ ID NO: 129992 - DNA, 25 bp, Saccharomyces pastorianus
atcaggtcaagagttatctgtcgaa

SEQ ID NO: 129993 - DNA, 25 bp, Saccharomyces pastorianus
aactcgtgaagattctgtttaccta

SEQ ID NO: 129994 - DNA, 25 bp, Saccharomyces pastorianus
gattctgtttacctagctaaattag

SEQ ID NO: 129995 - DNA, 25 bp, Saccharomyces pastorianus
actctttgctacagtttcggtctaa

SEQ ID NO: 129996 - DNA, 25 bp, Saccharomyces pastorianus
gacagaaaccttctcactgagggtg

SEQ ID NO: 129997 - DNA, 25 bp, Saccharomyces pastorianus
cagccagctctgattcctaatatta

SEQ ID NO: 129998 - DNA, 25 bp, Saccharomyces pastorianus
ccagctcctggacttttgttttaga

SEQ ID NO: 129999 - DNA, 25 bp, Saccharomyces pastorianus
ggatgctgaatctacaaccactatt

SEQ ID NO: 130000 - DNA, 25 bp, Saccharomyces pastorianus
ggtgggctatttgaacgttgactac

SEQ ID NO: 130001 - DNA, 25 bp, Saccharomyces pastorianus
tgatgaactagtcgaggccagctcc

SEQ ID NO: 130002 - DNA, 25 bp, Saccharomyces pastorianus
gaaactgtcgcttcttcagtacagc

SEQ ID NO: 130003 - DNA, 25 bp, Saccharomyces pastorianus
tagttcaggattactgtcggatgct

SEQ ID NO: 130004 - DNA, 25 bp, Saccharomyces pastorianus
gattttcacttcattctgaggagga

SEQ ID NO: 130005 - DNA, 25 bp, Saccharomyces pastorianus
ggcataaccagacgcagttcattct

SEQ ID NO: 130006 - DNA, 25 bp, Saccharomyces pastorianus
gaagcttcagtactcaaatgcacct

SEQ ID NO: 130007 - DNA, 25 bp, Saccharomyces pastorianus
aactctatcttagcagacacctctg

SEQ ID NO: 130008 - DNA, 25 bp, Saccharomyces pastorianus
tttctgctgtttccaattcggtaag

SEQ ID NO: 130009 - DNA, 25 bp, Saccharomyces pastorianus
gaattccgtccggagcaaactctat

SEQ ID NO: 130010 - DNA, 25 bp, Saccharomyces pastorianus
attctgacgaaagcacaactgtaca

SEQ ID NO: 130011 - DNA, 25 bp, Saccharomyces pastorianus
aacgttgccgctgttaaggtcatat

SEQ ID NO: 130012 - DNA, 25 bp, Saccharomyces pastorianus
gaagtatttacacctattgccaact

SEQ ID NO: 130013 - DNA, 25 bp, Saccharomyces pastorianus
ggtgtttcttatttggagacgcatt

SEQ ID NO: 130014 - DNA, 25 bp, Saccharomyces pastorianus
cattgcgccgatttatcagatcttt

SEQ ID NO: 130015 - DNA, 25 bp, Saccharomyces pastorianus
gaatgactacactcgaagcttcagt

SEQ ID NO: 130016 - DNA, 25 bp, Saccharomyces pastorianus
gacacctctgtagcgttatcagcta

SEQ ID NO: 130017 - DNA, 25 bp, Saccharomyces pastorianus
ggttttattgtactgttccactgct

SEQ ID NO: 130018 - DNA, 25 bp, Saccharomyces pastorianus
gagagttcgcgatgctttacgcttt

SEQ ID NO: 130019 - DNA, 25 bp, Saccharomyces pastorianus
aagccgcacaagcattctgttttct

SEQ ID NO: 130020 - DNA, 25 bp, Saccharomyces pastorianus
attccgattgacgattgctacctat

SEQ ID NO: 130021 - DNA, 25 bp, Saccharomyces pastorianus
ttctgctccggaagctgacttgaat

SEQ ID NO: 130022 - DNA, 25 bp, Saccharomyces pastorianus
gaccttctgcagagagatcgtactt

SEQ ID NO: 130023 - DNA, 25 bp, Saccharomyces pastorianus
aataaactatggatcccacgctctc

SEQ ID NO: 130024 - DNA, 25 bp, Saccharomyces pastorianus
tccactgctttcatagatcaaccac

SEQ ID NO: 130025 - DNA, 25 bp, Saccharomyces pastorianus
ttggtttggaacaaggcgtgccctt

SEQ ID NO: 130026 - DNA, 25 bp, Saccharomyces pastorianus
taataatattgacccaccttctgct

SEQ ID NO: 130027 - DNA, 25 bp, Saccharomyces pastorianus
tgctacctatactctgggaccacaa

SEQ ID NO: 130028 - DNA, 25 bp, Saccharomyces pastorianus
acccaccattgcctatagattcgat

SEQ ID NO: 130029 - DNA, 25 bp, Saccharomyces pastorianus
gtggatgaactgtcaaacgacccaa

SEQ ID NO: 130030 - DNA, 25 bp, Saccharomyces pastorianus
gactgacaagtatggctctgcgagg

SEQ ID NO: 130031 - DNA, 25 bp, Saccharomyces pastorianus
aagcatatagagcaaacccaccatt

SEQ ID NO: 130032 - DNA, 25 bp, Saccharomyces pastorianus
acagcttacttcttcacgtgtgaga

SEQ ID NO: 130033 - DNA, 25 bp, Saccharomyces pastorianus
caaccttatcccttagacgcaaatg

SEQ ID NO: 130034 - DNA, 25 bp, Saccharomyces pastorianus
gattgatgatgtttcacggtccgta

SEQ ID NO: 130035 - DNA, 25 bp, Saccharomyces pastorianus
gatgattgacgacactagcacagaa

SEQ ID NO: 130036 - DNA, 25 bp, Saccharomyces pastorianus
aaatggactcctcttgaagctgctt

SEQ ID NO: 130037 - DNA, 25 bp, Saccharomyces pastorianus
gagatttctatgctttccattgttt

SEQ ID NO: 130038 - DNA, 25 bp, Saccharomyces pastorianus
gtttacgagcaacaaccttatccct

SEQ ID NO: 130039 - DNA, 25 bp, Saccharomyces pastorianus
tgctcctgattggtttgattattac

SEQ ID NO: 130040 - DNA, 25 bp, Saccharomyces pastorianus
gagtcacttccgatcgacttgagaa

SEQ ID NO: 130041 - DNA, 25 bp, Saccharomyces pastorianus
gatacgtccaaaatccagtttccta

SEQ ID NO: 130042 - DNA, 25 bp, Saccharomyces pastorianus
aaaaattactggcaggctggttctg

SEQ ID NO: 130043 - DNA, 25 bp, Saccharomyces pastorianus
aatcctcatattgctcctgattggt

SEQ ID NO: 130044 - DNA, 25 bp, Saccharomyces pastorianus
gatcgacttgagaaggccactgaga

SEQ ID NO: 130045 - DNA, 25 bp, Saccharomyces pastorianus
atgcgcgaaaatacttctgcactat

SEQ ID NO: 130046 - DNA, 25 bp, Saccharomyces pastorianus
aatattgtagagtcacttccgatcg

SEQ ID NO: 130047 - DNA, 25 bp, Saccharomyces pastorianus
aggctggttctgcatgcgcgaaaat

SEQ ID NO: 130048 - DNA, 25 bp, Saccharomyces pastorianus
gacgagttttataacaatcctcata

SEQ ID NO: 130049 - DNA, 25 bp, Saccharomyces pastorianus
tgtgaagtagatgaaaccccggtaa

SEQ ID NO: 130050 - DNA, 25 bp, Saccharomyces pastorianus
agaagtgctgatgcgtgtccacaag

SEQ ID NO: 130051 - DNA, 25 bp, Saccharomyces pastorianus
aagtgctgatgcgtgtccacaagaa

SEQ ID NO: 130052 - DNA, 25 bp, Saccharomyces pastorianus
ttatcgcctggaaaacaggtagtat

SEQ ID NO: 130053 - DNA, 25 bp, Saccharomyces pastorianus
gatagtttatttgggagctaacaga

SEQ ID NO: 130054 - DNA, 25 bp, Saccharomyces pastorianus
tgaacattacttccaaatttgcaac

SEQ ID NO: 130055 - DNA, 25 bp, Saccharomyces pastorianus
cacaagaaattatcgcctggaaaac

SEQ ID NO: 130056 - DNA, 25 bp, Saccharomyces pastorianus
tatttgggagctaacagaatcgaaa

SEQ ID NO: 130057 - DNA, 25 bp, Saccharomyces pastorianus
tgctgatgcgtgtccacaagaaatt

SEQ ID NO: 130058 - DNA, 25 bp, Saccharomyces pastorianus
cgtgtccacaagaaattatcgcctg

SEQ ID NO: 130059 - DNA, 25 bp, Saccharomyces pastorianus
ggagctaacagaatcgaaattggaa

SEQ ID NO: 130060 - DNA, 25 bp, Saccharomyces pastorianus
gaagaagtgctgatgcgtgtccaca

SEQ ID NO: 130061 - DNA, 25 bp, Saccharomyces pastorianus
agttgggaccttgttcacagataat

SEQ ID NO: 130062 - DNA, 25 bp, Saccharomyces pastorianus
ttctagacgagtgcaagttgggacc

SEQ ID NO: 130063 - DNA, 25 bp, Saccharomyces pastorianus
tttaaaggacgtggattctgcacca

SEQ ID NO: 130064 - DNA, 25 bp, Saccharomyces pastorianus
gcacagatcatttcacagacgagga

SEQ ID NO: 130065 - DNA, 25 bp, Saccharomyces pastorianus
taccccatacgctatccaatattta

SEQ ID NO: 130066 - DNA, 25 bp, Saccharomyces pastorianus
aagcgatacgtggacatctacccca

SEQ ID NO: 130067 - DNA, 25 bp, Saccharomyces pastorianus
ggagacaggtttcttggtgcttaaa

SEQ ID NO: 130068 - DNA, 25 bp, Saccharomyces pastorianus
aaaagacaccgaagatctccgaggt

SEQ ID NO: 130069 - DNA, 25 bp, Saccharomyces pastorianus
gacacgttgtatgattttggcatct

SEQ ID NO: 130070 - DNA, 25 bp, Saccharomyces pastorianus
gttacagagccagtgcgttcgtatg

SEQ ID NO: 130071 - DNA, 25 bp, Saccharomyces pastorianus
caagaagacgcaaggcagctttttt

SEQ ID NO: 130072 - DNA, 25 bp, Saccharomyces pastorianus
gtattgttggtttagccggtgtgca

SEQ ID NO: 130073 - DNA, 25 bp, Saccharomyces pastorianus
atttctgggaacacttggttgtata

SEQ ID NO: 130074 - DNA, 25 bp, Saccharomyces pastorianus
aaagagcccatcaaattcgaaattc

SEQ ID NO: 130075 - DNA, 25 bp, Saccharomyces pastorianus
gaacacttggttgtataaagagctg

SEQ ID NO: 130076 - DNA, 25 bp, Saccharomyces pastorianus
tgactacaacagaaaaagagcccat

SEQ ID NO: 130077 - DNA, 25 bp, Saccharomyces pastorianus
gagcccatcaaattcgaaattcata

SEQ ID NO: 130078 - DNA, 25 bp, Saccharomyces pastorianus
gaaaatttctgggaacacttggttg

SEQ ID NO: 130079 - DNA, 25 bp, Saccharomyces pastorianus
atcgtcaaggttcgtattgttggtt

SEQ ID NO: 130080 - DNA, 25 bp, Saccharomyces pastorianus
aaattcatatcgtcaaggttcgtat

SEQ ID NO: 130081 - DNA, 25 bp, Saccharomyces pastorianus
ttggtttagccggtgtgcattttaa

SEQ ID NO: 130082 - DNA, 25 bp, Saccharomyces pastorianus
tagccggtgtgcattttaagaaaat

SEQ ID NO: 130083 - DNA, 25 bp, Saccharomyces pastorianus
aacttcatcgaagcctttgccaatt

SEQ ID NO: 130084 - DNA, 25 bp, Saccharomyces pastorianus
ggcgggaagcttacgctgcacagaa

SEQ ID NO: 130085 - DNA, 25 bp, Saccharomyces pastorianus
acataaactcgccatctgtggagaa

SEQ ID NO: 130086 - DNA, 25 bp, Saccharomyces pastorianus
aaatcagttggtcatgctcgtcgtg

SEQ ID NO: 130087 - DNA, 25 bp, Saccharomyces pastorianus
ggtcgaaaactacatccaagcgcaa

SEQ ID NO: 130088 - DNA, 25 bp, Saccharomyces pastorianus
cttaccacctctcaatgttgcaaaa

SEQ ID NO: 130089 - DNA, 25 bp, Saccharomyces pastorianus
aggaagcttctagagctccagccgg

SEQ ID NO: 130090 - DNA, 25 bp, Saccharomyces pastorianus
gcgacgacgacgagaatcatccctt

SEQ ID NO: 130091 - DNA, 25 bp, Saccharomyces pastorianus
atctgcctatcctcagcaagagctt

SEQ ID NO: 130092 - DNA, 25 bp, Saccharomyces pastorianus
gaagggtttcttttctgttcagaca

SEQ ID NO: 130093 - DNA, 25 bp, Saccharomyces pastorianus
tagcgtcagcgtgcattctgtgaac

SEQ ID NO: 130094 - DNA, 25 bp, Saccharomyces pastorianus
gagtcacttccatctgaattcaaca

SEQ ID NO: 130095 - DNA, 25 bp, Saccharomyces pastorianus
gtaccagccgacaaaccattagatg

SEQ ID NO: 130096 - DNA, 25 bp, Saccharomyces pastorianus
cttgtgaaaggtgcccatgctgctt

SEQ ID NO: 130097 - DNA, 25 bp, Saccharomyces pastorianus
catgctgcttttgtaccaaccttat

SEQ ID NO: 130098 - DNA, 25 bp, Saccharomyces pastorianus
ttacgccttgcacagtttaggttgc

SEQ ID NO: 130099 - DNA, 25 bp, Saccharomyces pastorianus
cgactggttaggtatccgtaatgcc

SEQ ID NO: 130100 - DNA, 25 bp, Saccharomyces pastorianus
gttgtccctggatcacaaatgttag

SEQ ID NO: 130101 - DNA, 25 bp, Saccharomyces pastorianus
ataccgctggtttggttatcggtgc

SEQ ID NO: 130102 - DNA, 25 bp, Saccharomyces pastorianus
agtggacaggattcaaggccccttt

SEQ ID NO: 130103 - DNA, 25 bp, Saccharomyces pastorianus
agcgttactcccgttatgacaattt

SEQ ID NO: 130104 - DNA, 25 bp, Saccharomyces pastorianus
ggcgttcccgaatatgttggtcata

SEQ ID NO: 130105 - DNA, 25 bp, Saccharomyces pastorianus
attccaagcggaagatctgcctttg

SEQ ID NO: 130106 - DNA, 25 bp, Saccharomyces pastorianus
atggtgttgaattccttgacttaga

SEQ ID NO: 130107 - DNA, 25 bp, Saccharomyces pastorianus
ctatcatttttactgtgcgaaccat

SEQ ID NO: 130108 - DNA, 25 bp, Saccharomyces pastorianus
gagagctacacgatattgccttgaa

SEQ ID NO: 130109 - DNA, 25 bp, Saccharomyces pastorianus
aaagtgatccttcaagacctgccta

SEQ ID NO: 130110 - DNA, 25 bp, Saccharomyces pastorianus
agatcattggttcccatcatgactt

SEQ ID NO: 130111 - DNA, 25 bp, Saccharomyces pastorianus
agccactgacagtattcctatcatt

SEQ ID NO: 130112 - DNA, 25 bp, Saccharomyces pastorianus
gaccatttggctaattactctgctg

SEQ ID NO: 130113 - DNA, 25 bp, Saccharomyces pastorianus
attgctccgcagaagctgagttcca

SEQ ID NO: 130114 - DNA, 25 bp, Saccharomyces pastorianus
gatctgcctttgtgtgtttaacctt

SEQ ID NO: 130115 - DNA, 25 bp, Saccharomyces pastorianus
aaatttctctttctttgctcctcat

SEQ ID NO: 130116 - DNA, 25 bp, Saccharomyces pastorianus
ttcatccagcccttttcatagtaga

SEQ ID NO: 130117 - DNA, 25 bp, Saccharomyces pastorianus
accacgctaggttaaggacgcacaa

SEQ ID NO: 130118 - DNA, 25 bp, Saccharomyces pastorianus
atgttttacactcttcatgcgcgag

SEQ ID NO: 130119 - DNA, 25 bp, Saccharomyces pastorianus
ggacgcacaacactcttaatggtag

SEQ ID NO: 130120 - DNA, 25 bp, Saccharomyces pastorianus
gaagttcttatagttcccaaggcat

SEQ ID NO: 130121 - DNA, 25 bp, Saccharomyces pastorianus
gacaactcctcaataaggtccgacg

SEQ ID NO: 130122 - DNA, 25 bp, Saccharomyces pastorianus
gtccttacaatggtgtacttacgca

SEQ ID NO: 130123 - DNA, 25 bp, Saccharomyces pastorianus
gtatcagacataccaaagttccaaa

SEQ ID NO: 130124 - DNA, 25 bp, Saccharomyces pastorianus
attggtgatgagtgcccatctggat

SEQ ID NO: 130125 - DNA, 25 bp, Saccharomyces pastorianus
gtacttacgcactggatcgagaaca

SEQ ID NO: 130126 - DNA, 25 bp, Saccharomyces pastorianus
gaatgcctgacatcaaagtcgagct

SEQ ID NO: 130127 - DNA, 25 bp, Saccharomyces pastorianus
gtttatctggttaatctatgcgacg

SEQ ID NO: 130128 - DNA, 25 bp, Saccharomyces pastorianus
ttttgaaaagatatccgtgtccaca

SEQ ID NO: 130129 - DNA, 25 bp, Saccharomyces pastorianus
gagaggaagtaagcgccattggtca

SEQ ID NO: 130130 - DNA, 25 bp, Saccharomyces pastorianus
gaagacgaaactccagccaatatat

SEQ ID NO: 130131 - DNA, 25 bp, Saccharomyces pastorianus
ttacttggtccaaagactgcgattt

SEQ ID NO: 130132 - DNA, 25 bp, Saccharomyces pastorianus
tggtcacaagttcccaaaagtcgtt

SEQ ID NO: 130133 - DNA, 25 bp, Saccharomyces pastorianus
gttggaggcaataacgcagtttatc

SEQ ID NO: 130134 - DNA, 25 bp, Saccharomyces pastorianus
gtgaccgagtaattgactttctttg

SEQ ID NO: 130135 - DNA, 25 bp, Saccharomyces pastorianus
gaatagcgcaacttcacaagaggat

SEQ ID NO: 130136 - DNA, 25 bp, Saccharomyces pastorianus
cacataacatggctctcaggaatta

SEQ ID NO: 130137 - DNA, 25 bp, Saccharomyces pastorianus
aactttgtgacaacttctggattga

SEQ ID NO: 130138 - DNA, 25 bp, Saccharomyces pastorianus
aggaccaagctttatcaaacgccca

SEQ ID NO: 130139 - DNA, 25 bp, Saccharomyces pastorianus
tagtcacccctggtaacactgagga

SEQ ID NO: 130140 - DNA, 25 bp, Saccharomyces pastorianus
ggtacgcaaacgcaagattggctat

SEQ ID NO: 130141 - DNA, 25 bp, Saccharomyces pastorianus
catgaagacattatcctcaagtggt

SEQ ID NO: 130142 - DNA, 25 bp, Saccharomyces pastorianus
tgggcccaagaccaggtaactaaag

SEQ ID NO: 130143 - DNA, 25 bp, Saccharomyces pastorianus
tgtcaacaaaagaccggcctcgggt

SEQ ID NO: 130144 - DNA, 25 bp, Saccharomyces pastorianus
aagattggctatttctattgctaga

SEQ ID NO: 130145 - DNA, 25 bp, Saccharomyces pastorianus
tatgcagttgacttgggcagagcca

SEQ ID NO: 130146 - DNA, 25 bp, Saccharomyces pastorianus
aaacgcccacttcttattggatgtt

SEQ ID NO: 130147 - DNA, 25 bp, Saccharomyces pastorianus
tcgggtgcagagatatccagattca

SEQ ID NO: 130148 - DNA, 25 bp, Saccharomyces pastorianus
atgttctgaatggtatcgcgccggg

SEQ ID NO: 130149 - DNA, 25 bp, Saccharomyces pastorianus
agagagcatttgatcctgggtttga

SEQ ID NO: 130150 - DNA, 25 bp, Saccharomyces pastorianus
tccgaggacattattgaaggtagag

SEQ ID NO: 130151 - DNA, 25 bp, Saccharomyces pastorianus
gatcctgggtttgatttggcaaatt

SEQ ID NO: 130152 - DNA, 25 bp, Saccharomyces pastorianus
tttgatcctgggtttgatttggcaa

SEQ ID NO: 130153 - DNA, 25 bp, Saccharomyces pastorianus
gcatttgatcctgggtttgatttgg

SEQ ID NO: 130154 - DNA, 25 bp, Saccharomyces pastorianus
gacattattgaaggtagagagcatt

SEQ ID NO: 130155 - DNA, 25 bp, Saccharomyces pastorianus
tcctgggtttgatttggcaaattat

SEQ ID NO: 130156 - DNA, 25 bp, Saccharomyces pastorianus
gagcatttgatcctgggtttgattt

SEQ ID NO: 130157 - DNA, 25 bp, Saccharomyces pastorianus
gagagcatttgatcctgggtttgat

SEQ ID NO: 130158 - DNA, 25 bp, Saccharomyces pastorianus
cattccgaggacattattgaaggta

SEQ ID NO: 130159 - DNA, 25 bp, Saccharomyces pastorianus
tttggcaaattattaggagaggttt

SEQ ID NO: 130160 - DNA, 25 bp, Saccharomyces pastorianus
ttaaagccatagcatttaacggaac

SEQ ID NO: 130161 - DNA, 25 bp, Saccharomyces pastorianus
gatagctattaaagccatagcattt

SEQ ID NO: 130162 - DNA, 25 bp, Saccharomyces pastorianus
ctgatagctattaaagccatagcat

SEQ ID NO: 130163 - DNA, 25 bp, Saccharomyces pastorianus
ctattaaagccatagcatttaacgg

SEQ ID NO: 130164 - DNA, 25 bp, Saccharomyces pastorianus
atgctgatagctattaaagccatag

SEQ ID NO: 130165 - DNA, 25 bp, Saccharomyces pastorianus
gctattaaagccatagcatttaacg

SEQ ID NO: 130166 - DNA, 25 bp, Saccharomyces pastorianus
taaagccatagcatttaacggaact

SEQ ID NO: 130167 - DNA, 25 bp, Saccharomyces pastorianus
gctgatagctattaaagccatagca

SEQ ID NO: 130168 - DNA, 25 bp, Saccharomyces pastorianus
attaaagccatagcatttaacggaa

SEQ ID NO: 130169 - DNA, 25 bp, Saccharomyces pastorianus
tgctgatagctattaaagccatagc

SEQ ID NO: 130170 - DNA, 25 bp, Saccharomyces pastorianus
tattaaagccatagcatttaacgga

SEQ ID NO: 130171 - DNA, 25 bp, Saccharomyces pastorianus
ttagatccgataacgacgcctttac

SEQ ID NO: 130172 - DNA, 25 bp, Saccharomyces pastorianus
gataacatttctaacctcgagcaaa

SEQ ID NO: 130173 - DNA, 25 bp, Saccharomyces pastorianus
gatcgcctacaaaccagattaccgg

SEQ ID NO: 130174 - DNA, 25 bp, Saccharomyces pastorianus
gatgagtgcaagtccgtatcggtga

SEQ ID NO: 130175 - DNA, 25 bp, Saccharomyces pastorianus
tttacatgttacgttcccattccaa

SEQ ID NO: 130176 - DNA, 25 bp, Saccharomyces pastorianus
gtgacttcgttgactgtatccttag

SEQ ID NO: 130177 - DNA, 25 bp, Saccharomyces pastorianus
agtatccttatcagcacctttttat

SEQ ID NO: 130178 - DNA, 25 bp, Saccharomyces pastorianus
gattaccggacaattcaagacagat

SEQ ID NO: 130179 - DNA, 25 bp, Saccharomyces pastorianus
aaagggcatcctattccattcaaaa

SEQ ID NO: 130180 - DNA, 25 bp, Saccharomyces pastorianus
aattctaatcttctacctcagctaa

SEQ ID NO: 130181 - DNA, 25 bp, Saccharomyces pastorianus
gattgttctctcgttaagtcagatg

SEQ ID NO: 130182 - DNA, 25 bp, Saccharomyces pastorianus
tacagtcagaagtcgatccacaaac

SEQ ID NO: 130183 - DNA, 25 bp, Saccharomyces pastorianus
gatggtctcccattattacgaggca

SEQ ID NO: 130184 - DNA, 25 bp, Saccharomyces pastorianus
gaagctgctggatcttactaagggt

SEQ ID NO: 130185 - DNA, 25 bp, Saccharomyces pastorianus
gaactcattcgtcgcgctggtagat

SEQ ID NO: 130186 - DNA, 25 bp, Saccharomyces pastorianus
gatgatcttgaattaccgacaactt

SEQ ID NO: 130187 - DNA, 25 bp, Saccharomyces pastorianus
ggatttgctactcttactcaacatg

SEQ ID NO: 130188 - DNA, 25 bp, Saccharomyces pastorianus
gaaggcttcacctctacgaatgagt

SEQ ID NO: 130189 - DNA, 25 bp, Saccharomyces pastorianus
gtcccatttcaatgactactggtct

SEQ ID NO: 130190 - DNA, 25 bp, Saccharomyces pastorianus
gcattttccactatttggtgtccaa

SEQ ID NO: 130191 - DNA, 25 bp, Saccharomyces pastorianus
gacgcatatttgttgcacttttcct

SEQ ID NO: 130192 - DNA, 25 bp, Saccharomyces pastorianus
gatggtatcgccaaatgacgcatat

SEQ ID NO: 130193 - DNA, 25 bp, Saccharomyces pastorianus
tttttgctgcaaatgtcgtctaaat

SEQ ID NO: 130194 - DNA, 25 bp, Saccharomyces pastorianus
agcgtttcaaatatgggatcctcta

SEQ ID NO: 130195 - DNA, 25 bp, Saccharomyces pastorianus
aggagtgctctgattcttttggata

SEQ ID NO: 130196 - DNA, 25 bp, Saccharomyces pastorianus
tggatatcttactcgatggaactga

SEQ ID NO: 130197 - DNA, 25 bp, Saccharomyces pastorianus
aggacattgtcatatttttgctgca

SEQ ID NO: 130198 - DNA, 25 bp, Saccharomyces pastorianus
gaaggttctcagactatcacacgat

SEQ ID NO: 130199 - DNA, 25 bp, Saccharomyces pastorianus
agttttttccactgagcttacctca

SEQ ID NO: 130200 - DNA, 25 bp, Saccharomyces pastorianus
gagcccgagttaatagcagtttcct

SEQ ID NO: 130201 - DNA, 25 bp, Saccharomyces pastorianus
gatttccttgtaccagcgtttcaaa

SEQ ID NO: 130202 - DNA, 25 bp, Saccharomyces pastorianus
gcagtttccttgttagatattgtat

SEQ ID NO: 130203 - DNA, 25 bp, Saccharomyces pastorianus
atttttgatgacaatgctgcccatt

SEQ ID NO: 130204 - DNA, 25 bp, Saccharomyces pastorianus
acgatctcacataagctggtcggat

SEQ ID NO: 130205 - DNA, 25 bp, Saccharomyces pastorianus
aaaatatagctgagcgtttgccacc

SEQ ID NO: 130206 - DNA, 25 bp, Saccharomyces pastorianus
tgtttctaatccatctagcatttta

SEQ ID NO: 130207 - DNA, 25 bp, Saccharomyces pastorianus
ttgaaagtagtcatgatggccgtat

SEQ ID NO: 130208 - DNA, 25 bp, Saccharomyces pastorianus
ttactggcccttccatctaatgata

SEQ ID NO: 130209 - DNA, 25 bp, Saccharomyces pastorianus
gctattcccaggctttgtgaatcta

SEQ ID NO: 130210 - DNA, 25 bp, Saccharomyces pastorianus
aagctgcgaagaacttttggccaaa

SEQ ID NO: 130211 - DNA, 25 bp, Saccharomyces pastorianus
gttaaactatatccccgagagagcc

SEQ ID NO: 130212 - DNA, 25 bp, Saccharomyces pastorianus
gaagcttctttcaagtttatgggac

SEQ ID NO: 130213 - DNA, 25 bp, Saccharomyces pastorianus
gcatatttgaggctattcccaggct

SEQ ID NO: 130214 - DNA, 25 bp, Saccharomyces pastorianus
gcgtttgccaccctttacaacagaa

SEQ ID NO: 130215 - DNA, 25 bp, Saccharomyces pastorianus
attggccttgaaactctggctacag

SEQ ID NO: 130216 - DNA, 25 bp, Saccharomyces pastorianus
gtaaggtactatgttccttctccat

SEQ ID NO: 130217 - DNA, 25 bp, Saccharomyces pastorianus
atgttccttctccatatcaagtaag

SEQ ID NO: 130218 - DNA, 25 bp, Saccharomyces pastorianus
ataactatatccttctgttgcctca

SEQ ID NO: 130219 - DNA, 25 bp, Saccharomyces pastorianus
agaatgtaacatttggatcccggga

SEQ ID NO: 130220 - DNA, 25 bp, Saccharomyces pastorianus
atatctttgaacatattggccttga

SEQ ID NO: 130221 - DNA, 25 bp, Saccharomyces pastorianus
atgcctctatgtctgttaggtcaca

SEQ ID NO: 130222 - DNA, 25 bp, Saccharomyces pastorianus
aagattgacatcctcattatcgccg

SEQ ID NO: 130223 - DNA, 25 bp, Saccharomyces pastorianus
acctttgatgacttatgcctctatg

SEQ ID NO: 130224 - DNA, 25 bp, Saccharomyces pastorianus
gatcccgggaattttacctttgatg

SEQ ID NO: 130225 - DNA, 25 bp, Saccharomyces pastorianus
aagctggtcacctaaatttcagaat

SEQ ID NO: 130226 - DNA, 25 bp, Saccharomyces pastorianus
acagctttttcttgtagattggcaa

SEQ ID NO: 130227 - DNA, 25 bp, Saccharomyces pastorianus
taactggaggttctgctatgaatgc

SEQ ID NO: 130228 - DNA, 25 bp, Saccharomyces pastorianus
tatatctaccaaaacaccagcaccg

SEQ ID NO: 130229 - DNA, 25 bp, Saccharomyces pastorianus
gaatccctctcaaaattataaccag

SEQ ID NO: 130230 - DNA, 25 bp, Saccharomyces pastorianus
gaattactattggatcttgccgacg

SEQ ID NO: 130231 - DNA, 25 bp, Saccharomyces pastorianus
gaaattgcagagtatcacatcagat

SEQ ID NO: 130232 - DNA, 25 bp, Saccharomyces pastorianus
acaccagcaccggtagcttatagat

SEQ ID NO: 130233 - DNA, 25 bp, Saccharomyces pastorianus
taggattcctggttattccgcagac

SEQ ID NO: 130234 - DNA, 25 bp, Saccharomyces pastorianus
gcctgccatacccatatcggaaaat

SEQ ID NO: 130235 - DNA, 25 bp, Saccharomyces pastorianus
gaggcaagagacattcagttacatt

SEQ ID NO: 130236 - DNA, 25 bp, Saccharomyces pastorianus
gatcttgccgacgattttgttacta

SEQ ID NO: 130237 - DNA, 25 bp, Saccharomyces pastorianus
aatgtccctaattcatcacagcaac

SEQ ID NO: 130238 - DNA, 25 bp, Saccharomyces pastorianus
taggagaagacaacaggctgcgcaa

SEQ ID NO: 130239 - DNA, 25 bp, Saccharomyces pastorianus
aggaattgatgttccaagccgcaaa

SEQ ID NO: 130240 - DNA, 25 bp, Saccharomyces pastorianus
aaatccaaattcaagcaacccagct

SEQ ID NO: 130241 - DNA, 25 bp, Saccharomyces pastorianus
gctgcgcaagcctacaataatactt

SEQ ID NO: 130242 - DNA, 25 bp, Saccharomyces pastorianus
taatacgggcactggtaacgctgat

SEQ ID NO: 130243 - DNA, 25 bp, Saccharomyces pastorianus
gtatatgatgcccttacactgaata

SEQ ID NO: 130244 - DNA, 25 bp, Saccharomyces pastorianus
tatggtactgcaaccgagacagttg

SEQ ID NO: 130245 - DNA, 25 bp, Saccharomyces pastorianus
gaaatggccgctaagttcaggacat

SEQ ID NO: 130246 - DNA, 25 bp, Saccharomyces pastorianus
cccagcttctattcctactgaaaat

SEQ ID NO: 130247 - DNA, 25 bp, Saccharomyces pastorianus
aacgctgatgcgatcacaggagctc

SEQ ID NO: 130248 - DNA, 25 bp, Saccharomyces pastorianus
gaacgtctcgtggaaagccttgacc

SEQ ID NO: 130249 - DNA, 25 bp, Saccharomyces pastorianus
aagccttgaccgttgcgtcgttact

SEQ ID NO: 130250 - DNA, 25 bp, Saccharomyces pastorianus
gtctcgtggaaagccttgaccgttg

SEQ ID NO: 130251 - DNA, 25 bp, Saccharomyces pastorianus
acgtctcgtggaaagccttgaccgt

SEQ ID NO: 130252 - DNA, 25 bp, Saccharomyces pastorianus
ggaaagccttgaccgttgcgtcgtt

SEQ ID NO: 130253 - DNA, 25 bp, Saccharomyces pastorianus
tcgtggaaagccttgaccgttgcgt

SEQ ID NO: 130254 - DNA, 25 bp, Saccharomyces pastorianus
ttcgaacgtctcgtggaaagccttg

SEQ ID NO: 130255 - DNA, 25 bp, Saccharomyces pastorianus
aacgtctcgtggaaagccttgaccg

SEQ ID NO: 130256 - DNA, 25 bp, Saccharomyces pastorianus
ctcgtggaaagccttgaccgttgcg

SEQ ID NO: 130257 - DNA, 25 bp, Saccharomyces pastorianus
gtggaaagccttgaccgttgcgtcg

SEQ ID NO: 130258 - DNA, 25 bp, Saccharomyces pastorianus
tcgaacgtctcgtggaaagccttga

SEQ ID NO: 130259 - DNA, 25 bp, Saccharomyces pastorianus
gtaggacggcatctttacaaacttt

SEQ ID NO: 130260 - DNA, 25 bp, Saccharomyces pastorianus
ggttcatccatataccttaactttg

SEQ ID NO: 130261 - DNA, 25 bp, Saccharomyces pastorianus
gaaccaagcataatacccgcgttaa

SEQ ID NO: 130262 - DNA, 25 bp, Saccharomyces pastorianus
taactttgtactggtccgcttctaa

SEQ ID NO: 130263 - DNA, 25 bp, Saccharomyces pastorianus
aaaggtgttgccattctaggagtag

SEQ ID NO: 130264 - DNA, 25 bp, Saccharomyces pastorianus
tagcgcatcgagaaggtccgtatct

SEQ ID NO: 130265 - DNA, 25 bp, Saccharomyces pastorianus
taatcccatcctagagaatcctgcc

SEQ ID NO: 130266 - DNA, 25 bp, Saccharomyces pastorianus
gaaagattttcccattgcccggcga

SEQ ID NO: 130267 - DNA, 25 bp, Saccharomyces pastorianus
aagtattatccacgcttgggacctt

SEQ ID NO: 130268 - DNA, 25 bp, Saccharomyces pastorianus
tgggaccttttggattcgaatcacg

SEQ ID NO: 130269 - DNA, 25 bp, Saccharomyces pastorianus
gaaagattcttctgggttcatccat

SEQ ID NO: 130270 - DNA, 25 bp, Saccharomyces pastorianus
tcatgggaagctaaccggtaagcaa

SEQ ID NO: 130271 - DNA, 25 bp, Saccharomyces pastorianus
acgagtatatggaagaggatgacgc

SEQ ID NO: 130272 - DNA, 25 bp, Saccharomyces pastorianus
gctaaccggtaagcaaatgtttgaa

SEQ ID NO: 130273 - DNA, 25 bp, Saccharomyces pastorianus
tgacgcgagtgtagatgacgtagcc

SEQ ID NO: 130274 - DNA, 25 bp, Saccharomyces pastorianus
tcatcatgggaagctaaccggtaag

SEQ ID NO: 130275 - DNA, 25 bp, Saccharomyces pastorianus
gcacaggcgacgagtatatggaaga

SEQ ID NO: 130276 - DNA, 25 bp, Saccharomyces pastorianus
aaggctcatcatgggaagctaaccg

SEQ ID NO: 130277 - DNA, 25 bp, Saccharomyces pastorianus
gctcatcatgggaagctaaccggta

SEQ ID NO: 130278 - DNA, 25 bp, Saccharomyces pastorianus
taaccggtaagcaaatgtttgaaca

SEQ ID NO: 130279 - DNA, 25 bp, Saccharomyces pastorianus
atgaaggctcatcatgggaagctaa

SEQ ID NO: 130280 - DNA, 25 bp, Saccharomyces pastorianus
gaagctaaccggtaagcaaatgttt

SEQ ID NO: 130281 - DNA, 25 bp, Saccharomyces pastorianus
gttgtctttggtgaagttgttgacg

SEQ ID NO: 130282 - DNA, 25 bp, Saccharomyces pastorianus
gttgagtccttgggttctccttccg

SEQ ID NO: 130283 - DNA, 25 bp, Saccharomyces pastorianus
gaaggttgagtccttgggttctcct

SEQ ID NO: 130284 - DNA, 25 bp, Saccharomyces pastorianus
tgaagttgttgacggttacgacatc

SEQ ID NO: 130285 - DNA, 25 bp, Saccharomyces pastorianus
ggtccatactcctacggttctcaat

SEQ ID NO: 130286 - DNA, 25 bp, Saccharomyces pastorianus
gtccatactcctacggttctcaatt

SEQ ID NO: 130287 - DNA, 25 bp, Saccharomyces pastorianus
tctttggtgaagttgttgacggtta

SEQ ID NO: 130288 - DNA, 25 bp, Saccharomyces pastorianus
tggtgaagttgttgacggttacgac

SEQ ID NO: 130289 - DNA, 25 bp, Saccharomyces pastorianus
tccatactcctacggttctcaattc

SEQ ID NO: 130290 - DNA, 25 bp, Saccharomyces pastorianus
gacatcgttaagaaggttgagtcct

SEQ ID NO: 130291 - DNA, 25 bp, Saccharomyces pastorianus
tacgacatcgttaagaaggttgagt

SEQ ID NO: 130292 - DNA, 25 bp, Saccharomyces pastorianus
gaagacccattgttagatttcaaaa

SEQ ID NO: 130293 - DNA, 25 bp, Saccharomyces pastorianus
gaaaatcttggctccattagcagaa

SEQ ID NO: 130294 - DNA, 25 bp, Saccharomyces pastorianus
tcaaaatggttgtcctttcccacaa

SEQ ID NO: 130295 - DNA, 25 bp, Saccharomyces pastorianus
aaattaggctgtcattctgctccaa

SEQ ID NO: 130296 - DNA, 25 bp, Saccharomyces pastorianus
gatgggcacaccgaatgtatctctt

SEQ ID NO: 130297 - DNA, 25 bp, Saccharomyces pastorianus
tattggtgccgctggttctggtgtc

SEQ ID NO: 130298 - DNA, 25 bp, Saccharomyces pastorianus
aagaatacgtctgcgacgcctacaa

SEQ ID NO: 130299 - DNA, 25 bp, Saccharomyces pastorianus
cctttcccacaacaccattattggt

SEQ ID NO: 130300 - DNA, 25 bp, Saccharomyces pastorianus
gaatgtatctctttgaggttcaaga

SEQ ID NO: 130301 - DNA, 25 bp, Saccharomyces pastorianus
tggaacaaccagacagacctcaacc

SEQ ID NO: 130302 - DNA, 25 bp, Saccharomyces pastorianus
agagtcgctgtttccgatgggcaca

SEQ ID NO: 130303 - DNA, 25 bp, Saccharomyces pastorianus
ttggtgcctcttctagatcagctgg

SEQ ID NO: 130304 - DNA, 25 bp, Saccharomyces pastorianus
gtatttccaattgttccactgcagg

SEQ ID NO: 130305 - DNA, 25 bp, Saccharomyces pastorianus
agatgtgccattgattgttcctgtt

SEQ ID NO: 130306 - DNA, 25 bp, Saccharomyces pastorianus
ttctgttgttggcaaatcaccctca

SEQ ID NO: 130307 - DNA, 25 bp, Saccharomyces pastorianus
ggtgctactggttccgttggtcaac

SEQ ID NO: 130308 - DNA, 25 bp, Saccharomyces pastorianus
tgatgctttgaccactactactttg

SEQ ID NO: 130309 - DNA, 25 bp, Saccharomyces pastorianus
tgacatcgtcttttccggattggat

SEQ ID NO: 130310 - DNA, 25 bp, Saccharomyces pastorianus
agctggtatcgccattgtttccaat

SEQ ID NO: 130311 - DNA, 25 bp, Saccharomyces pastorianus
ggttgcaccattgaagcctttgatt

SEQ ID NO: 130312 - DNA, 25 bp, Saccharomyces pastorianus
tgttcctgttgtcaatcctgagcat

SEQ ID NO: 130313 - DNA, 25 bp, Saccharomyces pastorianus
ttggatgctgactatgctggcgcta

SEQ ID NO: 130314 - DNA, 25 bp, Saccharomyces pastorianus
aacgaatttgacagtgccatcatac

SEQ ID NO: 130315 - DNA, 25 bp, Saccharomyces pastorianus
gaattccaagtcaccctagataata

SEQ ID NO: 130316 - DNA, 25 bp, Saccharomyces pastorianus
ataaggaatcatctggtgtgcaaaa

SEQ ID NO: 130317 - DNA, 25 bp, Saccharomyces pastorianus
gggattctaacctggtgaccaagaa

SEQ ID NO: 130318 - DNA, 25 bp, Saccharomyces pastorianus
ttacccgttatacaatgtttcctcg

SEQ ID NO: 130319 - DNA, 25 bp, Saccharomyces pastorianus
tatccgcccataatgatgaattcca

SEQ ID NO: 130320 - DNA, 25 bp, Saccharomyces pastorianus
aacttttccatataatgttatctca

SEQ ID NO: 130321 - DNA, 25 bp, Saccharomyces pastorianus
atgagaatagttttgtcgtgaataa

SEQ ID NO: 130322 - DNA, 25 bp, Saccharomyces pastorianus
atgttatctcattatccgcccataa

SEQ ID NO: 130323 - DNA, 25 bp, Saccharomyces pastorianus
gacagtgccatcatacaatcagtac

SEQ ID NO: 130324 - DNA, 25 bp, Saccharomyces pastorianus
tgatgaattccaagtcaccctagat

SEQ ID NO: 130325 - DNA, 25 bp, Saccharomyces pastorianus
gactaattgtgtgcgcagattctga

SEQ ID NO: 130326 - DNA, 25 bp, Saccharomyces pastorianus
gacgataaaatcttcgcttgggatt

SEQ ID NO: 130327 - DNA, 25 bp, Saccharomyces pastorianus
aaaggttctgcttctcaaagagacc

SEQ ID NO: 130328 - DNA, 25 bp, Saccharomyces pastorianus
agattctgacaagtccctcctagtt

SEQ ID NO: 130329 - DNA, 25 bp, Saccharomyces pastorianus
atcctcggtcatgtctctatgttga

SEQ ID NO: 130330 - DNA, 25 bp, Saccharomyces pastorianus
aagactctgacggtcatcaattcat

SEQ ID NO: 130331 - DNA, 25 bp, Saccharomyces pastorianus
atggctctttggtcataagcatttt

SEQ ID NO: 130332 - DNA, 25 bp, Saccharomyces pastorianus
tccctcctagttttcgatgtcgaca

SEQ ID NO: 130333 - DNA, 25 bp, Saccharomyces pastorianus
agaacttgtctaccttcgattatag

SEQ ID NO: 130334 - DNA, 25 bp, Saccharomyces pastorianus
aatgatcagcatttagcaccaacaa

SEQ ID NO: 130335 - DNA, 25 bp, Saccharomyces pastorianus
atttcgcattatccccaatgtttca

SEQ ID NO: 130336 - DNA, 25 bp, Saccharomyces pastorianus
gaaatcgtacgaattttctcgtgac

SEQ ID NO: 130337 - DNA, 25 bp, Saccharomyces pastorianus
tcaatgcctggcgttcagtgatagt

SEQ ID NO: 130338 - DNA, 25 bp, Saccharomyces pastorianus
gctgcagttctccttgacattatgt

SEQ ID NO: 130339 - DNA, 25 bp, Saccharomyces pastorianus
aataactcgtctgatcaccatttgc

SEQ ID NO: 130340 - DNA, 25 bp, Saccharomyces pastorianus
atcaccatttgcatccaggtcgtag

SEQ ID NO: 130341 - DNA, 25 bp, Saccharomyces pastorianus
tcctgctatgtatgctctggtgatt

SEQ ID NO: 130342 - DNA, 25 bp, Saccharomyces pastorianus
atagagctgctcaacgaattattcg

SEQ ID NO: 130343 - DNA, 25 bp, Saccharomyces pastorianus
aagagcgttccaacggagttgagac

SEQ ID NO: 130344 - DNA, 25 bp, Saccharomyces pastorianus
aacaagaaacgagtgctgctgcagt

SEQ ID NO: 130345 - DNA, 25 bp, Saccharomyces pastorianus
gactttagactatactgtcctgcta

SEQ ID NO: 130346 - DNA, 25 bp, Saccharomyces pastorianus
aagattttgcccactgtatccctta

SEQ ID NO: 130347 - DNA, 25 bp, Saccharomyces pastorianus
agatcgctagacgagaccctgttag

SEQ ID NO: 130348 - DNA, 25 bp, Saccharomyces pastorianus
gtcgtaccaaatcctccaaagttca

SEQ ID NO: 130349 - DNA, 25 bp, Saccharomyces pastorianus
atgctgccgatggaataacgccgcc

SEQ ID NO: 130350 - DNA, 25 bp, Saccharomyces pastorianus
tggcgaaccagctatcgctcatcaa

SEQ ID NO: 130351 - DNA, 25 bp, Saccharomyces pastorianus
aggtctacccatacgaggaacatat

SEQ ID NO: 130352 - DNA, 25 bp, Saccharomyces pastorianus
ttggctttagattgcctgtcaaaat

SEQ ID NO: 130353 - DNA, 25 bp, Saccharomyces pastorianus
gaatttgatccgcaaaccacgaata

SEQ ID NO: 130354 - DNA, 25 bp, Saccharomyces pastorianus
cactaagggcaagctgtcgtaccaa

SEQ ID NO: 130355 - DNA, 25 bp, Saccharomyces pastorianus
agaccctgttagtgaatccacccga

SEQ ID NO: 130356 - DNA, 25 bp, Saccharomyces pastorianus
cacccgattctttagcctctaatga

SEQ ID NO: 130357 - DNA, 25 bp, Saccharomyces pastorianus
gctcatcaagatagtgttcccacca

SEQ ID NO: 130358 - DNA, 25 bp, Saccharomyces pastorianus
aaatcgcttctggataagaggcaaa

SEQ ID NO: 130359 - DNA, 25 bp, Saccharomyces pastorianus
gacaaacaaatcgaccaggcttatg

SEQ ID NO: 130360 - DNA, 25 bp, Saccharomyces pastorianus
gaaagcccaattgattccactagtg

SEQ ID NO: 130361 - DNA, 25 bp, Saccharomyces pastorianus
gtcaaacgtattcgcgtacccaaga

SEQ ID NO: 130362 - DNA, 25 bp, Saccharomyces pastorianus
agatgaccccgattgggtcaccggt

SEQ ID NO: 130363 - DNA, 25 bp, Saccharomyces pastorianus
agagaatccccaatgaaagcgtatt

SEQ ID NO: 130364 - DNA, 25 bp, Saccharomyces pastorianus
gcagcttcaaataatgtgagcacag

SEQ ID NO: 130365 - DNA, 25 bp, Saccharomyces pastorianus
agcacaggaaccacgtctcaaatag

SEQ ID NO: 130366 - DNA, 25 bp, Saccharomyces pastorianus
gacgacgaaataagcgcagagttaa

SEQ ID NO: 130367 - DNA, 25 bp, Saccharomyces pastorianus
ggattaataagattggtccattgtt

SEQ ID NO: 130368 - DNA, 25 bp, Saccharomyces pastorianus
acaaaaggctgcaaactcaagttta

SEQ ID NO: 130369 - DNA, 25 bp, Saccharomyces pastorianus
gtgggcccttattatctaggctatt

SEQ ID NO: 130370 - DNA, 25 bp, Saccharomyces pastorianus
ttatctcaggagaacgggcccagtg

SEQ ID NO: 130371 - DNA, 25 bp, Saccharomyces pastorianus
gacagtatatcgtgtgggcccttat

SEQ ID NO: 130372 - DNA, 25 bp, Saccharomyces pastorianus
acgatgcatctactatactaccaaa

SEQ ID NO: 130373 - DNA, 25 bp, Saccharomyces pastorianus
attatacccgatagcttgcaatttg

SEQ ID NO: 130374 - DNA, 25 bp, Saccharomyces pastorianus
tacgggatggcggactaccgagaac

SEQ ID NO: 130375 - DNA, 25 bp, Saccharomyces pastorianus
gggcccagtgttcaaacacctgaca

SEQ ID NO: 130376 - DNA, 25 bp, Saccharomyces pastorianus
gacaaaacttatgaccctgaggtaa

SEQ ID NO: 130377 - DNA, 25 bp, Saccharomyces pastorianus
tcaatacctttctagcatttgtgga

SEQ ID NO: 130378 - DNA, 25 bp, Saccharomyces pastorianus
taggccctttgtacacagatgtttg

SEQ ID NO: 130379 - DNA, 25 bp, Saccharomyces pastorianus
tattataccgaaactaggccctttg

SEQ ID NO: 130380 - DNA, 25 bp, Saccharomyces pastorianus
aagtgttgagacgattaggcgtcaa

SEQ ID NO: 130381 - DNA, 25 bp, Saccharomyces pastorianus
tgtcgaagtgttgagacgattaggc

SEQ ID NO: 130382 - DNA, 25 bp, Saccharomyces pastorianus
gaatctcaaggttttgaaaaggaca

SEQ ID NO: 130383 - DNA, 25 bp, Saccharomyces pastorianus
gcgtcaagtccttagaccccaatga

SEQ ID NO: 130384 - DNA, 25 bp, Saccharomyces pastorianus
aagattgtcgaagtgttgagacgat

SEQ ID NO: 130385 - DNA, 25 bp, Saccharomyces pastorianus
gtgttgagacgattaggcgtcaagt

SEQ ID NO: 130386 - DNA, 25 bp, Saccharomyces pastorianus
gttgagacgattaggcgtcaagtcc

SEQ ID NO: 130387 - DNA, 25 bp, Saccharomyces pastorianus
caagattgtcgaagtgttgagacga

SEQ ID NO: 130388 - DNA, 25 bp, Saccharomyces pastorianus
tccttagaccccaatgacaacaaca

SEQ ID NO: 130389 - DNA, 25 bp, Saccharomyces pastorianus
tcgaagtgttgagacgattaggcgt

SEQ ID NO: 130390 - DNA, 25 bp, Saccharomyces pastorianus
gattgtcgaagtgttgagacgatta

SEQ ID NO: 130391 - DNA, 25 bp, Saccharomyces pastorianus
taaagtctgcattgatttcgctaca

SEQ ID NO: 130392 - DNA, 25 bp, Saccharomyces pastorianus
gtagcacaacactatttacgggata

SEQ ID NO: 130393 - DNA, 25 bp, Saccharomyces pastorianus
gcccacctggaacaccttacgaggg

SEQ ID NO: 130394 - DNA, 25 bp, Saccharomyces pastorianus
gattataccacacaggaacttccta

SEQ ID NO: 130395 - DNA, 25 bp, Saccharomyces pastorianus
aggtgccatttgtttagatattctt

SEQ ID NO: 130396 - DNA, 25 bp, Saccharomyces pastorianus
gatttcgctacaggcgctactacaa

SEQ ID NO: 130397 - DNA, 25 bp, Saccharomyces pastorianus
gaaggatgatcctgcagctcacatt

SEQ ID NO: 130398 - DNA, 25 bp, Saccharomyces pastorianus
gggtggcaaatttgtcgtggatatc

SEQ ID NO: 130399 - DNA, 25 bp, Saccharomyces pastorianus
atcgaagtacctatggagtatccat

SEQ ID NO: 130400 - DNA, 25 bp, Saccharomyces pastorianus
gcagctcacattactcttgaatttg

SEQ ID NO: 130401 - DNA, 25 bp, Saccharomyces pastorianus
gctactacaatctccagagcctaac

SEQ ID NO: 130402 - DNA, 25 bp, Saccharomyces pastorianus
aaacttgatcatatcctcgctatca

SEQ ID NO: 130403 - DNA, 25 bp, Saccharomyces pastorianus
ggaagccattcctattctcaatatg

SEQ ID NO: 130404 - DNA, 25 bp, Saccharomyces pastorianus
gaaagcctaaatgcgatccctggtt

SEQ ID NO: 130405 - DNA, 25 bp, Saccharomyces pastorianus
gaacgcttcagcattggatctctaa

SEQ ID NO: 130406 - DNA, 25 bp, Saccharomyces pastorianus
caggcttttagcttattcaacttca

SEQ ID NO: 130407 - DNA, 25 bp, Saccharomyces pastorianus
gatccctggttgtttgtttccaatg

SEQ ID NO: 130408 - DNA, 25 bp, Saccharomyces pastorianus
taccagtgggtgatgcttttctaga

SEQ ID NO: 130409 - DNA, 25 bp, Saccharomyces pastorianus
aattaccagccctgtgacaattggc

SEQ ID NO: 130410 - DNA, 25 bp, Saccharomyces pastorianus
aggtctgacatagcggatcttatta

SEQ ID NO: 130411 - DNA, 25 bp, Saccharomyces pastorianus
acgacattctttgtttcctaatgac

SEQ ID NO: 130412 - DNA, 25 bp, Saccharomyces pastorianus
gacaattggcaacttattctcatta

SEQ ID NO: 130413 - DNA, 25 bp, Saccharomyces pastorianus
tttgggtacttatctactgcactta

SEQ ID NO: 130414 - DNA, 25 bp, Saccharomyces pastorianus
gcacgatcattttttgtctttactt

SEQ ID NO: 130415 - DNA, 25 bp, Saccharomyces pastorianus
agagaatcatgcaatcctatttaga

SEQ ID NO: 130416 - DNA, 25 bp, Saccharomyces pastorianus
cgttctctgcactaacatttcgaat

SEQ ID NO: 130417 - DNA, 25 bp, Saccharomyces pastorianus
aaaagtccattttcgttctctgcac

SEQ ID NO: 130418 - DNA, 25 bp, Saccharomyces pastorianus
gaagaacaaacaactccctgcaaag

SEQ ID NO: 130419 - DNA, 25 bp, Saccharomyces pastorianus
tatctactgcacttatacgggttaa

SEQ ID NO: 130420 - DNA, 25 bp, Saccharomyces pastorianus
ggtgtccctactcaaaaccattgat

SEQ ID NO: 130421 - DNA, 25 bp, Saccharomyces pastorianus
ttctcagtacgatttggtgtcccta

SEQ ID NO: 130422 - DNA, 25 bp, Saccharomyces pastorianus
gaatatcacatttgtttctcagtac

SEQ ID NO: 130423 - DNA, 25 bp, Saccharomyces pastorianus
gacaatgtttcatcgctatccgtat

SEQ ID NO: 130424 - DNA, 25 bp, Saccharomyces pastorianus
gaacagtattcatcaaatggcaagc

SEQ ID NO: 130425 - DNA, 25 bp, Saccharomyces pastorianus
atcagtaagttttccgcacagttgg

SEQ ID NO: 130426 - DNA, 25 bp, Saccharomyces pastorianus
taagttttccgcacagttggagaat

SEQ ID NO: 130427 - DNA, 25 bp, Saccharomyces pastorianus
gatgtgcttttattagatattgtag

SEQ ID NO: 130428 - DNA, 25 bp, Saccharomyces pastorianus
tcagtaagttttccgcacagttgga

SEQ ID NO: 130429 - DNA, 25 bp, Saccharomyces pastorianus
aagaagccggatatcagtaagtttt

SEQ ID NO: 130430 - DNA, 25 bp, Saccharomyces pastorianus
tatcagtaagttttccgcacagttg

SEQ ID NO: 130431 - DNA, 25 bp, Saccharomyces pastorianus
gtattcatcaaatggcaagcttctt

SEQ ID NO: 130432 - DNA, 25 bp, Saccharomyces pastorianus
aagttttccgcacagttggagaata

SEQ ID NO: 130433 - DNA, 25 bp, Saccharomyces pastorianus
gtaagttttccgcacagttggagaa

SEQ ID NO: 130434 - DNA, 25 bp, Saccharomyces pastorianus
atatcagtaagttttccgcacagtt

SEQ ID NO: 130435 - DNA, 25 bp, Saccharomyces pastorianus
gtacttccgtttgtagttggataca

SEQ ID NO: 130436 - DNA, 25 bp, Saccharomyces pastorianus
gaggttagagcaatctttagcccat

SEQ ID NO: 130437 - DNA, 25 bp, Saccharomyces pastorianus
ttcgctacgtaggatttagtaaact

SEQ ID NO: 130438 - DNA, 25 bp, Saccharomyces pastorianus
agttggatacaagaatggcctagaa

SEQ ID NO: 130439 - DNA, 25 bp, Saccharomyces pastorianus
atggcctagaaaaagttcgctacgt

SEQ ID NO: 130440 - DNA, 25 bp, Saccharomyces pastorianus
gcccattcaggtgttatagaagaca

SEQ ID NO: 130441 - DNA, 25 bp, Saccharomyces pastorianus
gtgaatacggaacgcttcgcttcta

SEQ ID NO: 130442 - DNA, 25 bp, Saccharomyces pastorianus
gtaaactgggaaatgaccctaatgg

SEQ ID NO: 130443 - DNA, 25 bp, Saccharomyces pastorianus
gaaagcattcatctgtgaatacgga

SEQ ID NO: 130444 - DNA, 25 bp, Saccharomyces pastorianus
atctttagcccattcaggtgttata

SEQ ID NO: 130445 - DNA, 25 bp, Saccharomyces pastorianus
aacgcttcgcttctacaaatcatga

SEQ ID NO: 130446 - DNA, 25 bp, Saccharomyces pastorianus
gagaggctaccacaaatatcagatc

SEQ ID NO: 130447 - DNA, 25 bp, Saccharomyces pastorianus
attagacgaggatcatgaatttttg

SEQ ID NO: 130448 - DNA, 25 bp, Saccharomyces pastorianus
ttatcggtcggagaggctaccacaa

SEQ ID NO: 130449 - DNA, 25 bp, Saccharomyces pastorianus
aatttttgagtgcttatcggtcgga

SEQ ID NO: 130450 - DNA, 25 bp, Saccharomyces pastorianus
acacaaatgtgctttcaaatgctga

SEQ ID NO: 130451 - DNA, 25 bp, Saccharomyces pastorianus
agatgaactacttaatgaattggat

SEQ ID NO: 130452 - DNA, 25 bp, Saccharomyces pastorianus
ggataaacacacaactgtcgatagc

SEQ ID NO: 130453 - DNA, 25 bp, Saccharomyces pastorianus
atcagatcatttaaaacaggtcaag

SEQ ID NO: 130454 - DNA, 25 bp, Saccharomyces pastorianus
tagacagatactacacaaatgtgct

SEQ ID NO: 130455 - DNA, 25 bp, Saccharomyces pastorianus
gacaaaagtagtggcgaggaaaatt

SEQ ID NO: 130456 - DNA, 25 bp, Saccharomyces pastorianus
acacaactgtcgatagcgatgacaa

SEQ ID NO: 130457 - DNA, 25 bp, Saccharomyces pastorianus
tataaaaaagccgtcaccctggatt

SEQ ID NO: 130458 - DNA, 25 bp, Saccharomyces pastorianus
ttcaagtccagaacgcctacagatg

SEQ ID NO: 130459 - DNA, 25 bp, Saccharomyces pastorianus
ggtttggcactaaacttcaagtcca

SEQ ID NO: 130460 - DNA, 25 bp, Saccharomyces pastorianus
gttaacctttttagcaccttgatga

SEQ ID NO: 130461 - DNA, 25 bp, Saccharomyces pastorianus
gtcaccctggatttatacggcgaag

SEQ ID NO: 130462 - DNA, 25 bp, Saccharomyces pastorianus
atacacaacaggcatctccattact

SEQ ID NO: 130463 - DNA, 25 bp, Saccharomyces pastorianus
ggatctatccccaaagaacgcgagg

SEQ ID NO: 130464 - DNA, 25 bp, Saccharomyces pastorianus
atagtaccgaatcacccagacaatg

SEQ ID NO: 130465 - DNA, 25 bp, Saccharomyces pastorianus
gaattcaccaattccacagcataca

SEQ ID NO: 130466 - DNA, 25 bp, Saccharomyces pastorianus
atagtgcaggctttacagatgtaac

SEQ ID NO: 130467 - DNA, 25 bp, Saccharomyces pastorianus
gtcacaggttactaaatctcgagga

SEQ ID NO: 130468 - DNA, 25 bp, Saccharomyces pastorianus
attcagatgctgttaacgaagataa

SEQ ID NO: 130469 - DNA, 25 bp, Saccharomyces pastorianus
ggattccatagttattgtcacgaat

SEQ ID NO: 130470 - DNA, 25 bp, Saccharomyces pastorianus
tcttggattccatagttattgtcac

SEQ ID NO: 130471 - DNA, 25 bp, Saccharomyces pastorianus
agcgctacatgaatattcagatgct

SEQ ID NO: 130472 - DNA, 25 bp, Saccharomyces pastorianus
gaccagagcaacacaagtttgaaaa

SEQ ID NO: 130473 - DNA, 25 bp, Saccharomyces pastorianus
ggcgacgaccagagcaacacaagtt

SEQ ID NO: 130474 - DNA, 25 bp, Saccharomyces pastorianus
agccttatctcccaggaatcaataa

SEQ ID NO: 130475 - DNA, 25 bp, Saccharomyces pastorianus
ggaatcaataaaagcgctacatgaa

SEQ ID NO: 130476 - DNA, 25 bp, Saccharomyces pastorianus
tgactttgttgtcagaccaccctct

SEQ ID NO: 130477 - DNA, 25 bp, Saccharomyces pastorianus
aaaagcactgctgactttgttgtca

SEQ ID NO: 130478 - DNA, 25 bp, Saccharomyces pastorianus
ttaacgaagataagggcgacgacca

SEQ ID NO: 130479 - DNA, 25 bp, Saccharomyces pastorianus
gatctcgcagaggaaacactgaaaa

SEQ ID NO: 130480 - DNA, 25 bp, Saccharomyces pastorianus
gatttgttcaagtgttatcttctga

SEQ ID NO: 130481 - DNA, 25 bp, Saccharomyces pastorianus
aattggccgatctcgcagaggaaac

SEQ ID NO: 130482 - DNA, 25 bp, Saccharomyces pastorianus
cttctgaaaaggacggtattctaga

SEQ ID NO: 130483 - DNA, 25 bp, Saccharomyces pastorianus
gtattctagaattggccgatctcgc

SEQ ID NO: 130484 - DNA, 25 bp, Saccharomyces pastorianus
tggccgatctcgcagaggaaacact

SEQ ID NO: 130485 - DNA, 25 bp, Saccharomyces pastorianus
gtcaacgctaatacggccaccggaa

SEQ ID NO: 130486 - DNA, 25 bp, Saccharomyces pastorianus
tcaagtgttatcttctgaaaaggac

SEQ ID NO: 130487 - DNA, 25 bp, Saccharomyces pastorianus
tagaattggccgatctcgcagagga

SEQ ID NO: 130488 - DNA, 25 bp, Saccharomyces pastorianus
gaaaatattcagagcaaacaagttt

SEQ ID NO: 130489 - DNA, 25 bp, Saccharomyces pastorianus
caagtttgaactaggccttgtccct

SEQ ID NO: 130490 - DNA, 25 bp, Saccharomyces pastorianus
tatggcggcgacaagtaatcctttt

SEQ ID NO: 130491 - DNA, 25 bp, Saccharomyces pastorianus
gccttctactacgtcagcatttgga

SEQ ID NO: 130492 - DNA, 25 bp, Saccharomyces pastorianus
atcaatgttaatccgccttctacta

SEQ ID NO: 130493 - DNA, 25 bp, Saccharomyces pastorianus
aaaccgtcagcatttggagcaccag

SEQ ID NO: 130494 - DNA, 25 bp, Saccharomyces pastorianus
caacaggttttggtgctatggcggc

SEQ ID NO: 130495 - DNA, 25 bp, Saccharomyces pastorianus
attcacgtcgggtgctaagcctaat

SEQ ID NO: 130496 - DNA, 25 bp, Saccharomyces pastorianus
ggaatgccccagtttggtaccaata

SEQ ID NO: 130497 - DNA, 25 bp, Saccharomyces pastorianus
gtggtatcaaccctttcacaaataa

SEQ ID NO: 130498 - DNA, 25 bp, Saccharomyces pastorianus
tttggagcaccgtcatttggatcaa

SEQ ID NO: 130499 - DNA, 25 bp, Saccharomyces pastorianus
tggcaatacgtcaattagcgctttt

SEQ ID NO: 130500 - DNA, 25 bp, Saccharomyces pastorianus
ggaaccaccacttcagcatttggaa

SEQ ID NO: 130501 - DNA, 25 bp, Saccharomyces pastorianus
atccgagactaaaggtggcccaata

SEQ ID NO: 130502 - DNA, 25 bp, Saccharomyces pastorianus
tttcaaccatttcaacccggacttg

SEQ ID NO: 130503 - DNA, 25 bp, Saccharomyces pastorianus
caaggaccccgttgatctatagaaa

SEQ ID NO: 130504 - DNA, 25 bp, Saccharomyces pastorianus
tggaaatacgaactcaaccccgact

SEQ ID NO: 130505 - DNA, 25 bp, Saccharomyces pastorianus
gagaacccatagaattcgacttaaa

SEQ ID NO: 130506 - DNA, 25 bp, Saccharomyces pastorianus
aggtggcccaatacattgtgaaaca

SEQ ID NO: 130507 - DNA, 25 bp, Saccharomyces pastorianus
cggacttgaataaaaggccgccaag

SEQ ID NO: 130508 - DNA, 25 bp, Saccharomyces pastorianus
aacctcttgatttgatgtttctgaa

SEQ ID NO: 130509 - DNA, 25 bp, Saccharomyces pastorianus
ttgtgaaacaaggaccccgttgatc

SEQ ID NO: 130510 - DNA, 25 bp, Saccharomyces pastorianus
caaccccgactatagcaaaggcttt

SEQ ID NO: 130511 - DNA, 25 bp, Saccharomyces pastorianus
ggccgccaagagaacccatagaatt

SEQ ID NO: 130512 - DNA, 25 bp, Saccharomyces pastorianus
gacaaaaattcttctccatcgccta

SEQ ID NO: 130513 - DNA, 25 bp, Saccharomyces pastorianus
atccacggtggcttctaatattata

SEQ ID NO: 130514 - DNA, 25 bp, Saccharomyces pastorianus
gtcttctacagaatctctacctact

SEQ ID NO: 130515 - DNA, 25 bp, Saccharomyces pastorianus
gccaagcttgggactaaacggtcaa

SEQ ID NO: 130516 - DNA, 25 bp, Saccharomyces pastorianus
tagcgactcctgcttcttcagaaga

SEQ ID NO: 130517 - DNA, 25 bp, Saccharomyces pastorianus
gcctactgcatctacctcttcaatg

SEQ ID NO: 130518 - DNA, 25 bp, Saccharomyces pastorianus
atcttcgtcaacgtcaggatcgtca

SEQ ID NO: 130519 - DNA, 25 bp, Saccharomyces pastorianus
gtggatttcaaagtcaaccccgaag

SEQ ID NO: 130520 - DNA, 25 bp, Saccharomyces pastorianus
gatgacgcagatatggccaagcttg

SEQ ID NO: 130521 - DNA, 25 bp, Saccharomyces pastorianus
atctctacctacttcttccaagaaa

SEQ ID NO: 130522 - DNA, 25 bp, Saccharomyces pastorianus
ggatcgtcaaccacaacggtagcga

SEQ ID NO: 130523 - DNA, 25 bp, Saccharomyces pastorianus
gttgctgaaaatgtacgatcctata

SEQ ID NO: 130524 - DNA, 25 bp, Saccharomyces pastorianus
aattgcctaagttttctgccgagga

SEQ ID NO: 130525 - DNA, 25 bp, Saccharomyces pastorianus
gtactggtacaaggccaacctcaaa

SEQ ID NO: 130526 - DNA, 25 bp, Saccharomyces pastorianus
tgcaaattatcttccattcaactgg

SEQ ID NO: 130527 - DNA, 25 bp, Saccharomyces pastorianus
atgagaaacaacaccactctacacc

SEQ ID NO: 130528 - DNA, 25 bp, Saccharomyces pastorianus
gatatacagctgtattctggcttaa

SEQ ID NO: 130529 - DNA, 25 bp, Saccharomyces pastorianus
aagcggctttgaatcagtttaccaa

SEQ ID NO: 130530 - DNA, 25 bp, Saccharomyces pastorianus
gcagtcatcaatttatgcgtcttgg

SEQ ID NO: 130531 - DNA, 25 bp, Saccharomyces pastorianus
gtcttggatacttccgttgctgaaa

SEQ ID NO: 130532 - DNA, 25 bp, Saccharomyces pastorianus
atcgattctttgcaagcggctttga

SEQ ID NO: 130533 - DNA, 25 bp, Saccharomyces pastorianus
gctaatgatgtctcactggacttct

SEQ ID NO: 130534 - DNA, 25 bp, Saccharomyces pastorianus
caactttgatcagtataagcgccaa

SEQ ID NO: 130535 - DNA, 25 bp, Saccharomyces pastorianus
gtatctacaagtgatccaactttga

SEQ ID NO: 130536 - DNA, 25 bp, Saccharomyces pastorianus
tctcaaagcttcgatggcgaaccat

SEQ ID NO: 130537 - DNA, 25 bp, Saccharomyces pastorianus
agtctcaaagcttcgatggcgaacc

SEQ ID NO: 130538 - DNA, 25 bp, Saccharomyces pastorianus
aattgaacagtctcaaagcttcgat

SEQ ID NO: 130539 - DNA, 25 bp, Saccharomyces pastorianus
caaagcttcgatggcgaaccatcaa

SEQ ID NO: 130540 - DNA, 25 bp, Saccharomyces pastorianus
gatggcgaaccatcaagcaaatttg

SEQ ID NO: 130541 - DNA, 25 bp, Saccharomyces pastorianus
gtctcaaagcttcgatggcgaacca

SEQ ID NO: 130542 - DNA, 25 bp, Saccharomyces pastorianus
gaacagtctcaaagcttcgatggcg

SEQ ID NO: 130543 - DNA, 25 bp, Saccharomyces pastorianus
ctcaaagcttcgatggcgaaccatc

SEQ ID NO: 130544 - DNA, 25 bp, Saccharomyces pastorianus
gcttcgatggcgaaccatcaagcaa

SEQ ID NO: 130545 - DNA, 25 bp, Saccharomyces pastorianus
aaaccagatttcaacgacgccagga

SEQ ID NO: 130546 - DNA, 25 bp, Saccharomyces pastorianus
gatccgatcgcctctttattaattg

SEQ ID NO: 130547 - DNA, 25 bp, Saccharomyces pastorianus
gaacacccgagcttggtgggctata

SEQ ID NO: 130548 - DNA, 25 bp, Saccharomyces pastorianus
gcgtgggtacaagttgagcctcaaa

SEQ ID NO: 130549 - DNA, 25 bp, Saccharomyces pastorianus
acacactggccaatttttgatccga

SEQ ID NO: 130550 - DNA, 25 bp, Saccharomyces pastorianus
aaattccacttgttggtgccgggct

SEQ ID NO: 130551 - DNA, 25 bp, Saccharomyces pastorianus
cattaggttctgttggcgttgttat

SEQ ID NO: 130552 - DNA, 25 bp, Saccharomyces pastorianus
atacaactcctagattttggcccac

SEQ ID NO: 130553 - DNA, 25 bp, Saccharomyces pastorianus
agagtcaggcagttccgggcattca

SEQ ID NO: 130554 - DNA, 25 bp, Saccharomyces pastorianus
tgccgggctacttctatgaacacaa

SEQ ID NO: 130555 - DNA, 25 bp, Saccharomyces pastorianus
tccttgattttacttagcgctctgc

SEQ ID NO: 130556 - DNA, 25 bp, Saccharomyces pastorianus
atgcaatttccttttgacgcccaaa

SEQ ID NO: 130557 - DNA, 25 bp, Saccharomyces pastorianus
acagcaaccttcatcgatgtcttca

SEQ ID NO: 130558 - DNA, 25 bp, Saccharomyces pastorianus
tccctatccttttttgaaccagcag

SEQ ID NO: 130559 - DNA, 25 bp, Saccharomyces pastorianus
gtcgtcagcatatgcgcaagcgcaa

SEQ ID NO: 130560 - DNA, 25 bp, Saccharomyces pastorianus
ggccaatgcaaggtggtctgtattc

SEQ ID NO: 130561 - DNA, 25 bp, Saccharomyces pastorianus
gatgtcttcattaaactccgcgtat

SEQ ID NO: 130562 - DNA, 25 bp, Saccharomyces pastorianus
cgccgatggcgctattacgaatata

SEQ ID NO: 130563 - DNA, 25 bp, Saccharomyces pastorianus
ggtctttccgccttataatgcacaa

SEQ ID NO: 130564 - DNA, 25 bp, Saccharomyces pastorianus
taacgcagcgatctcttcttcaaat

SEQ ID NO: 130565 - DNA, 25 bp, Saccharomyces pastorianus
aattccagcgaatgacgtctgccat

SEQ ID NO: 130566 - DNA, 25 bp, Saccharomyces pastorianus
atccaacgtggctaggtgaccagca

SEQ ID NO: 130567 - DNA, 25 bp, Saccharomyces pastorianus
tgatcattacaattggtgggttcca

SEQ ID NO: 130568 - DNA, 25 bp, Saccharomyces pastorianus
atgccaagccctgtttcaatcaaaa

SEQ ID NO: 130569 - DNA, 25 bp, Saccharomyces pastorianus
ccaagtgctggtgagacgtattcgc

SEQ ID NO: 130570 - DNA, 25 bp, Saccharomyces pastorianus
tttgggtctgtttggtcacctacca

SEQ ID NO: 130571 - DNA, 25 bp, Saccharomyces pastorianus
tcgtttagcttcgttggtgttacca

SEQ ID NO: 130572 - DNA, 25 bp, Saccharomyces pastorianus
atgcactctacgagacgatgtcagc

SEQ ID NO: 130573 - DNA, 25 bp, Saccharomyces pastorianus
gcaagcaggagcgatattccttcaa

SEQ ID NO: 130574 - DNA, 25 bp, Saccharomyces pastorianus
aaaggacccaggacacctgctaaag

SEQ ID NO: 130575 - DNA, 25 bp, Saccharomyces pastorianus
tattttctgggcctttttgggtctg

SEQ ID NO: 130576 - DNA, 25 bp, Saccharomyces pastorianus
aaaggcgttccgatgtaagtgcaaa

SEQ ID NO: 130577 - DNA, 25 bp, Saccharomyces pastorianus
atgatgacgaagatgccaagccctg

SEQ ID NO: 130578 - DNA, 25 bp, Saccharomyces pastorianus
aaccacagactcaaggacccataag

SEQ ID NO: 130579 - DNA, 25 bp, Saccharomyces pastorianus
gaagtctacgccatgataccaagtt

SEQ ID NO: 130580 - DNA, 25 bp, Saccharomyces pastorianus
aattcgagcatctgatcaattcaac

SEQ ID NO: 130581 - DNA, 25 bp, Saccharomyces pastorianus
ggactattccttgttaattggcatt

SEQ ID NO: 130582 - DNA, 25 bp, Saccharomyces pastorianus
gaagattctgtagatcctctgcccc

SEQ ID NO: 130583 - DNA, 25 bp, Saccharomyces pastorianus
gacgacttacaattggcggataccg

SEQ ID NO: 130584 - DNA, 25 bp, Saccharomyces pastorianus
aagacttttttgacacagctgaaaa

SEQ ID NO: 130585 - DNA, 25 bp, Saccharomyces pastorianus
caagttggtgagtgccatacctcca

SEQ ID NO: 130586 - DNA, 25 bp, Saccharomyces pastorianus
ggataccgcatctattgaggagcaa

SEQ ID NO: 130587 - DNA, 25 bp, Saccharomyces pastorianus
tacctccaagagactacgccaatag

SEQ ID NO: 130588 - DNA, 25 bp, Saccharomyces pastorianus
acgccaataggttttacgaattcat

SEQ ID NO: 130589 - DNA, 25 bp, Saccharomyces pastorianus
acatgctaactggtattcgtgtcgc

SEQ ID NO: 130590 - DNA, 25 bp, Saccharomyces pastorianus
atgaaacctttaactccggcagact

SEQ ID NO: 130591 - DNA, 25 bp, Saccharomyces pastorianus
ccccttcttctcagtatgcatttaa

SEQ ID NO: 130592 - DNA, 25 bp, Saccharomyces pastorianus
gggaacttcgtgcattattcggctt

SEQ ID NO: 130593 - DNA, 25 bp, Saccharomyces pastorianus
gaagcttgcctttgattatcacgga

SEQ ID NO: 130594 - DNA, 25 bp, Saccharomyces pastorianus
gcagtgtcacgttgttctggcataa

SEQ ID NO: 130595 - DNA, 25 bp, Saccharomyces pastorianus
taaggactactgtcccgaagtcttt

SEQ ID NO: 130596 - DNA, 25 bp, Saccharomyces pastorianus
ggaaatgaattgaccccttcttctc

SEQ ID NO: 130597 - DNA, 25 bp, Saccharomyces pastorianus
tattcggcttagaccctgctgatta

SEQ ID NO: 130598 - DNA, 25 bp, Saccharomyces pastorianus
aataacttatttccaccacacttag

SEQ ID NO: 130599 - DNA, 25 bp, Saccharomyces pastorianus
gtcagtgaaggccatgtcaacttta

SEQ ID NO: 130600 - DNA, 25 bp, Saccharomyces pastorianus
aacgatacctcttttttgaatatgg

SEQ ID NO: 130601 - DNA, 25 bp, Saccharomyces pastorianus
gatttcctgatgttgtatttacgca

SEQ ID NO: 130602 - DNA, 25 bp, Saccharomyces pastorianus
atgattcgcatcaaactgtttctac

SEQ ID NO: 130603 - DNA, 25 bp, Saccharomyces pastorianus
gattgtatccgcaagagttttctgg

SEQ ID NO: 130604 - DNA, 25 bp, Saccharomyces pastorianus
tcgttcagcacatttcctatcggat

SEQ ID NO: 130605 - DNA, 25 bp, Saccharomyces pastorianus
tttcctatcggataccggcctagaa

SEQ ID NO: 130606 - DNA, 25 bp, Saccharomyces pastorianus
tgtccctggtttatccgcaaatgaa

SEQ ID NO: 130607 - DNA, 25 bp, Saccharomyces pastorianus
tgccaagttatttttcaccaatgtt

SEQ ID NO: 130608 - DNA, 25 bp, Saccharomyces pastorianus
gcgaattctattttacttcccacac

SEQ ID NO: 130609 - DNA, 25 bp, Saccharomyces pastorianus
gcagtgacagacttgcctcgttcag

SEQ ID NO: 130610 - DNA, 25 bp, Saccharomyces pastorianus
gataatggtatgcttgtccctggtt

SEQ ID NO: 130611 - DNA, 25 bp, Saccharomyces pastorianus
tgccggcctccactgtgaacaacaa

SEQ ID NO: 130612 - DNA, 25 bp, Saccharomyces pastorianus
agcggcaactatactttttatgggt

SEQ ID NO: 130613 - DNA, 25 bp, Saccharomyces pastorianus
gatgttcaagccatattcagtcaat

SEQ ID NO: 130614 - DNA, 25 bp, Saccharomyces pastorianus
gtgaacaacaagcagccatcgcatt

SEQ ID NO: 130615 - DNA, 25 bp, Saccharomyces pastorianus
atgttgatttctttcggactcgatc

SEQ ID NO: 130616 - DNA, 25 bp, Saccharomyces pastorianus
aaaatatcaagagctctgccggcct

SEQ ID NO: 130617 - DNA, 25 bp, Saccharomyces pastorianus
gaagactttttatcaacgtcaaaca

SEQ ID NO: 130618 - DNA, 25 bp, Saccharomyces pastorianus
cgatcatccttccaatcgcgaagat

SEQ ID NO: 130619 - DNA, 25 bp, Saccharomyces pastorianus
agaaaagccagatagcggcaactat

SEQ ID NO: 130620 - DNA, 25 bp, Saccharomyces pastorianus
aagcagccatcgcattccatagaat

SEQ ID NO: 130621 - DNA, 25 bp, Saccharomyces pastorianus
gaagagtctaaacgatccctggaag

SEQ ID NO: 130622 - DNA, 25 bp, Saccharomyces pastorianus
agaagatggtctttcctttgtggat

SEQ ID NO: 130623 - DNA, 25 bp, Saccharomyces pastorianus
tcctttgtggatatcgttttgtcga

SEQ ID NO: 130624 - DNA, 25 bp, Saccharomyces pastorianus
gggaagcacgcatcagaaaacatct

SEQ ID NO: 130625 - DNA, 25 bp, Saccharomyces pastorianus
aacatctcactctctttctcaagac

SEQ ID NO: 130626 - DNA, 25 bp, Saccharomyces pastorianus
agggttccaatcgttgaagatcgtc

SEQ ID NO: 130627 - DNA, 25 bp, Saccharomyces pastorianus
gaaattattcggtctttgtcagatg

SEQ ID NO: 130628 - DNA, 25 bp, Saccharomyces pastorianus
ggaacacattcacaaactggtactc

SEQ ID NO: 130629 - DNA, 25 bp, Saccharomyces pastorianus
ttttgtcgaaagcagcatcggcgct

SEQ ID NO: 130630 - DNA, 25 bp, Saccharomyces pastorianus
gcatcctacggctatttttctgttg

SEQ ID NO: 130631 - DNA, 25 bp, Saccharomyces pastorianus
aggatagtgtcaccgaatgttcgaa

SEQ ID NO: 130632 - DNA, 25 bp, Saccharomyces pastorianus
aagacctgcatcctacggctatttt

SEQ ID NO: 130633 - DNA, 25 bp, Saccharomyces pastorianus
tatttccactcgacatgttatcatg

SEQ ID NO: 130634 - DNA, 25 bp, Saccharomyces pastorianus
ggaaaccgttactggcgtttatgat

SEQ ID NO: 130635 - DNA, 25 bp, Saccharomyces pastorianus
gaaacttcacaagatatggccttca

SEQ ID NO: 130636 - DNA, 25 bp, Saccharomyces pastorianus
gattatactgatccgcataccaata

SEQ ID NO: 130637 - DNA, 25 bp, Saccharomyces pastorianus
gacgaaggctctgtagacaacactt

SEQ ID NO: 130638 - DNA, 25 bp, Saccharomyces pastorianus
gatatggccttcaaatgtccaattt

SEQ ID NO: 130639 - DNA, 25 bp, Saccharomyces pastorianus
atacaggcataagcaactctaactt

SEQ ID NO: 130640 - DNA, 25 bp, Saccharomyces pastorianus
aaatctaatagtggcaaggtcggtt

SEQ ID NO: 130641 - DNA, 25 bp, Saccharomyces pastorianus
aagtgccctaaatattcacgctgat

SEQ ID NO: 130642 - DNA, 25 bp, Saccharomyces pastorianus
gagtgactctcaatgggcagccttc

SEQ ID NO: 130643 - DNA, 25 bp, Saccharomyces pastorianus
taagggatcacaaaacacagcaaat

SEQ ID NO: 130644 - DNA, 25 bp, Saccharomyces pastorianus
gtcttctcacaggaccaacaagttt

SEQ ID NO: 130645 - DNA, 25 bp, Saccharomyces pastorianus
ggatatggtcggttcttacacacaa

SEQ ID NO: 130646 - DNA, 25 bp, Saccharomyces pastorianus
ttaataaaggccagtgctctccacc

SEQ ID NO: 130647 - DNA, 25 bp, Saccharomyces pastorianus
gcaactaaggcaggtcttctcacag

SEQ ID NO: 130648 - DNA, 25 bp, Saccharomyces pastorianus
ggcctgcctctgtttgaaggctcag

SEQ ID NO: 130649 - DNA, 25 bp, Saccharomyces pastorianus
aattctttatcttcctctctttttg

SEQ ID NO: 130650 - DNA, 25 bp, Saccharomyces pastorianus
aactctaattcagcgattccattgt

SEQ ID NO: 130651 - DNA, 25 bp, Saccharomyces pastorianus
gaaaaactaactctcaatgctctga

SEQ ID NO: 130652 - DNA, 25 bp, Saccharomyces pastorianus
aacctctatgcatctcttaaggctg

SEQ ID NO: 130653 - DNA, 25 bp, Saccharomyces pastorianus
actgttcccctcctattaagagaca

SEQ ID NO: 130654 - DNA, 25 bp, Saccharomyces pastorianus
atatttctggcgttgaatcttttca

SEQ ID NO: 130655 - DNA, 25 bp, Saccharomyces pastorianus
gcagacgaccccttcagcaaaaaag

SEQ ID NO: 130656 - DNA, 25 bp, Saccharomyces pastorianus
aagcagatgggccatacgggaccat

SEQ ID NO: 130657 - DNA, 25 bp, Saccharomyces pastorianus
agccaaccttccacatcaaaaacat

SEQ ID NO: 130658 - DNA, 25 bp, Saccharomyces pastorianus
tgggaatgacgtggtgctcaatgaa

SEQ ID NO: 130659 - DNA, 25 bp, Saccharomyces pastorianus
ggaggcgggctagacgaactacttt

SEQ ID NO: 130660 - DNA, 25 bp, Saccharomyces pastorianus
aagtactcagcaaagttgccacggt

SEQ ID NO: 130661 - DNA, 25 bp, Saccharomyces pastorianus
agttgccacggtatctagggcacaa

SEQ ID NO: 130662 - DNA, 25 bp, Saccharomyces pastorianus
gaaactctgccgaggaaaccacaca

SEQ ID NO: 130663 - DNA, 25 bp, Saccharomyces pastorianus
attcattttctttaccgcctacgag

SEQ ID NO: 130664 - DNA, 25 bp, Saccharomyces pastorianus
ggtatccacaccgaatcattcacag

SEQ ID NO: 130665 - DNA, 25 bp, Saccharomyces pastorianus
actactttgtgatgcagacgacccc

SEQ ID NO: 130666 - DNA, 25 bp, Saccharomyces pastorianus
agtgtattcaaaggcccgtcgggca

SEQ ID NO: 130667 - DNA, 25 bp, Saccharomyces pastorianus
agtggctagcagtgctggctcagaa

SEQ ID NO: 130668 - DNA, 25 bp, Saccharomyces pastorianus
aaccatttacgttcatccaaagtgt

SEQ ID NO: 130669 - DNA, 25 bp, Saccharomyces pastorianus
gcataacttctggtacgagcacaat

SEQ ID NO: 130670 - DNA, 25 bp, Saccharomyces pastorianus
gcagaaattgcccattccttagaaa

SEQ ID NO: 130671 - DNA, 25 bp, Saccharomyces pastorianus
gagtgccagtgggttattctacctt

SEQ ID NO: 130672 - DNA, 25 bp, Saccharomyces pastorianus
aacgaccatctggacgacatgaacc

SEQ ID NO: 130673 - DNA, 25 bp, Saccharomyces pastorianus
gtcgggcatcgagcataacttctgg

SEQ ID NO: 130674 - DNA, 25 bp, Saccharomyces pastorianus
aggaagccctatcgacattactcag

SEQ ID NO: 130675 - DNA, 25 bp, Saccharomyces pastorianus
gtgaaagagacccaggaagccctat

SEQ ID NO: 130676 - DNA, 25 bp, Saccharomyces pastorianus
ttactcaggaactcgaatgcttatt

SEQ ID NO: 130677 - DNA, 25 bp, Saccharomyces pastorianus
tagataccaacgttgccacatcgac

SEQ ID NO: 130678 - DNA, 25 bp, Saccharomyces pastorianus
caggcgctaccgcagcaattagata

SEQ ID NO: 130679 - DNA, 25 bp, Saccharomyces pastorianus
gccaggtcacaccaacgatttatct

SEQ ID NO: 130680 - DNA, 25 bp, Saccharomyces pastorianus
ctacgtcgcagcctctaggaaattg

SEQ ID NO: 130681 - DNA, 25 bp, Saccharomyces pastorianus
gactttaccaccttcagttatggca

SEQ ID NO: 130682 - DNA, 25 bp, Saccharomyces pastorianus
ttctcatatcgtcccagtgttgatt

SEQ ID NO: 130683 - DNA, 25 bp, Saccharomyces pastorianus
tttcattttcaccacgactttacca

SEQ ID NO: 130684 - DNA, 25 bp, Saccharomyces pastorianus
agctttccatgagttgggcattcca

SEQ ID NO: 130685 - DNA, 25 bp, Saccharomyces pastorianus
tgagctacagttaccacgtgtcaga

SEQ ID NO: 130686 - DNA, 25 bp, Saccharomyces pastorianus
gggcattccagttattccaaatcct

SEQ ID NO: 130687 - DNA, 25 bp, Saccharomyces pastorianus
acaagctatcaacttccctacggtt

SEQ ID NO: 130688 - DNA, 25 bp, Saccharomyces pastorianus
tatgccaccgctactggtgctggtg

SEQ ID NO: 130689 - DNA, 25 bp, Saccharomyces pastorianus
ttctacccaggagtcgggtttcgat

SEQ ID NO: 130690 - DNA, 25 bp, Saccharomyces pastorianus
gcaccacatgcgaaaaatggctatg

SEQ ID NO: 130691 - DNA, 25 bp, Saccharomyces pastorianus
atgcaacgctccattttggcaaggt

SEQ ID NO: 130692 - DNA, 25 bp, Saccharomyces pastorianus
tgctgccaaccattctacccaggag

SEQ ID NO: 130693 - DNA, 25 bp, Saccharomyces pastorianus
tgccgctgtttccacactgaatagg

SEQ ID NO: 130694 - DNA, 25 bp, Saccharomyces pastorianus
gtcgggtttcgattacgaaggcctg

SEQ ID NO: 130695 - DNA, 25 bp, Saccharomyces pastorianus
acactgaataggctgtccacgacag

SEQ ID NO: 130696 - DNA, 25 bp, Saccharomyces pastorianus
gaaaaatggctatgccaccgctact

SEQ ID NO: 130697 - DNA, 25 bp, Saccharomyces pastorianus
tggcaaggttcggtaactcctctgc

SEQ ID NO: 130698 - DNA, 25 bp, Saccharomyces pastorianus
actgccacagcgtcatcaacaaatg

SEQ ID NO: 130699 - DNA, 25 bp, Saccharomyces pastorianus
gacacttctaggtcatatttggaca

SEQ ID NO: 130700 - DNA, 25 bp, Saccharomyces pastorianus
gaattctgtcagtcatacttcccag

SEQ ID NO: 130701 - DNA, 25 bp, Saccharomyces pastorianus
tgtcaggaaaatatggccccaaata

SEQ ID NO: 130702 - DNA, 25 bp, Saccharomyces pastorianus
gaatctggttgggaatactacctac

SEQ ID NO: 130703 - DNA, 25 bp, Saccharomyces pastorianus
gttctggaactgttattgccgttta

SEQ ID NO: 130704 - DNA, 25 bp, Saccharomyces pastorianus
tcagttcaaaacgttctgccagaat

SEQ ID NO: 130705 - DNA, 25 bp, Saccharomyces pastorianus
gcgtcttgccgtctttaacagaatt

SEQ ID NO: 130706 - DNA, 25 bp, Saccharomyces pastorianus
gccagaattctctgtattccagtcg

SEQ ID NO: 130707 - DNA, 25 bp, Saccharomyces pastorianus
gagtacgtacttttgcgagatctat

SEQ ID NO: 130708 - DNA, 25 bp, Saccharomyces pastorianus
ttgagtcctcatattccgacaatgt

SEQ ID NO: 130709 - DNA, 25 bp, Saccharomyces pastorianus
aaatttgcacagagcgtcttgccgt

SEQ ID NO: 130710 - DNA, 25 bp, Saccharomyces pastorianus
gattatatcaaaccagccactgctg

SEQ ID NO: 130711 - DNA, 25 bp, Saccharomyces pastorianus
acaaggtttggctctgtccctaggt

SEQ ID NO: 130712 - DNA, 25 bp, Saccharomyces pastorianus
gtgattcctcatggcttccacaaat

SEQ ID NO: 130713 - DNA, 25 bp, Saccharomyces pastorianus
gacacaggtgtcattttcggtaata

SEQ ID NO: 130714 - DNA, 25 bp, Saccharomyces pastorianus
gtcgtcctttggtgaagatgcccta

SEQ ID NO: 130715 - DNA, 25 bp, Saccharomyces pastorianus
gccactgctgacgatgaacatttcc

SEQ ID NO: 130716 - DNA, 25 bp, Saccharomyces pastorianus
tccctaggtgacagagtggcattga

SEQ ID NO: 130717 - DNA, 25 bp, Saccharomyces pastorianus
aaagtttcctctgctgacacaggtg

SEQ ID NO: 130718 - DNA, 25 bp, Saccharomyces pastorianus
tgtaatctgtatgcgaagtcgtcct

SEQ ID NO: 130719 - DNA, 25 bp, Saccharomyces pastorianus
gtgcaatttgcaactcttggtgatt

SEQ ID NO: 130720 - DNA, 25 bp, Saccharomyces pastorianus
atgccctagccaacttgtgtatcga

SEQ ID NO: 130721 - DNA, 25 bp, Saccharomyces pastorianus
gacttggccgtcaaggtttctgata

SEQ ID NO: 130722 - DNA, 25 bp, Saccharomyces pastorianus
ggacccctgctttgaaagcccaata

SEQ ID NO: 130723 - DNA, 25 bp, Saccharomyces pastorianus
gagaatgccttacactatttagaga

SEQ ID NO: 130724 - DNA, 25 bp, Saccharomyces pastorianus
caaatgtcttggttcctgcggttaa

SEQ ID NO: 130725 - DNA, 25 bp, Saccharomyces pastorianus
aatcctagcagttttctccattttc

SEQ ID NO: 130726 - DNA, 25 bp, Saccharomyces pastorianus
gtgttgtctgccaatccaaatgtct

SEQ ID NO: 130727 - DNA, 25 bp, Saccharomyces pastorianus
tagcgtgcttggaataccgtcatgc

SEQ ID NO: 130728 - DNA, 25 bp, Saccharomyces pastorianus
gaagtcatcttcgagaccgcattag

SEQ ID NO: 130729 - DNA, 25 bp, Saccharomyces pastorianus
gcattagccctaactgtgttgtctg

SEQ ID NO: 130730 - DNA, 25 bp, Saccharomyces pastorianus
tgatggaactgctttcgaccacgac

SEQ ID NO: 130731 - DNA, 25 bp, Saccharomyces pastorianus
aggtcagcgaacatttacttcccga

SEQ ID NO: 130732 - DNA, 25 bp, Saccharomyces pastorianus
ggtggtgagggtatcaatgaattac

SEQ ID NO: 130733 - DNA, 25 bp, Saccharomyces pastorianus
ctgacatgtaggagaaacaggacta

SEQ ID NO: 130734 - DNA, 25 bp, Saccharomyces pastorianus
aggactaaattactaactgcgggtg

SEQ ID NO: 130735 - DNA, 25 bp, Saccharomyces pastorianus
gcaatccaacatcgttcatcgtcaa

SEQ ID NO: 130736 - DNA, 25 bp, Saccharomyces pastorianus
aagtcaagcaatccaacatcgttca

SEQ ID NO: 130737 - DNA, 25 bp, Saccharomyces pastorianus
gtcggaattttcaagatcatcagat

SEQ ID NO: 130738 - DNA, 25 bp, Saccharomyces pastorianus
aatgttcgtcggaattttcaagatc

SEQ ID NO: 130739 - DNA, 25 bp, Saccharomyces pastorianus
aaattactaactgcgggtggtgagg

SEQ ID NO: 130740 - DNA, 25 bp, Saccharomyces pastorianus
catattgcctaacatttgtcctcaa

SEQ ID NO: 130741 - DNA, 25 bp, Saccharomyces pastorianus
tgtcctcaatgtggcaaaggttttg

SEQ ID NO: 130742 - DNA, 25 bp, Saccharomyces pastorianus
aaagacattatgatacactgacatg

SEQ ID NO: 130743 - DNA, 25 bp, Saccharomyces pastorianus
cagaagcaatagtggatgtatcatt

SEQ ID NO: 130744 - DNA, 25 bp, Saccharomyces pastorianus
accagcactcataccggcagaaaat

SEQ ID NO: 130745 - DNA, 25 bp, Saccharomyces pastorianus
gcattaccaaaaccaccgaagtcca

SEQ ID NO: 130746 - DNA, 25 bp, Saccharomyces pastorianus
tagtcaaggcggtaacataaaggtt

SEQ ID NO: 130747 - DNA, 25 bp, Saccharomyces pastorianus
aaaaaaccagcactcataccggcag

SEQ ID NO: 130748 - DNA, 25 bp, Saccharomyces pastorianus
aaaccaccgaagtccagcaaaagca

SEQ ID NO: 130749 - DNA, 25 bp, Saccharomyces pastorianus
tggaggatcaggatgctgcatttat

SEQ ID NO: 130750 - DNA, 25 bp, Saccharomyces pastorianus
gcaaaccccaagatcgtagaaatag

SEQ ID NO: 130751 - DNA, 25 bp, Saccharomyces pastorianus
tgcatttatcaaacaggctacagaa

SEQ ID NO: 130752 - DNA, 25 bp, Saccharomyces pastorianus
taaggaataggcaaaacaggttaca

SEQ ID NO: 130753 - DNA, 25 bp, Saccharomyces pastorianus
agcaaaagcaaaccccaagatcgta

SEQ ID NO: 130754 - DNA, 25 bp, Saccharomyces pastorianus
tttgactctcccttgtttttgatag

SEQ ID NO: 130755 - DNA, 25 bp, Saccharomyces pastorianus
tagcgcacgttgactggactacgaa

SEQ ID NO: 130756 - DNA, 25 bp, Saccharomyces pastorianus
tggcatgccatcacatcatttctaa

SEQ ID NO: 130757 - DNA, 25 bp, Saccharomyces pastorianus
ttcatctgtcccgtcttaaaggagg

SEQ ID NO: 130758 - DNA, 25 bp, Saccharomyces pastorianus
gaatgcacgtccctatttataaaag

SEQ ID NO: 130759 - DNA, 25 bp, Saccharomyces pastorianus
aaaccatcagggagttagcgcacgt

SEQ ID NO: 130760 - DNA, 25 bp, Saccharomyces pastorianus
gaacgcacccctggattgctttaga

SEQ ID NO: 130761 - DNA, 25 bp, Saccharomyces pastorianus
gatgagttgccatttgatgtcaagt

SEQ ID NO: 130762 - DNA, 25 bp, Saccharomyces pastorianus
catactgccccgtaaatacttcaat

SEQ ID NO: 130763 - DNA, 25 bp, Saccharomyces pastorianus
agaaaatcctccttattcactggca

SEQ ID NO: 130764 - DNA, 25 bp, Saccharomyces pastorianus
tcatttccatccgatcttcatctgt

SEQ ID NO: 130765 - DNA, 25 bp, Saccharomyces pastorianus
gaaactcactaacaagggaagaact

SEQ ID NO: 130766 - DNA, 25 bp, Saccharomyces pastorianus
attcctgatgaaaagctgctaacta

SEQ ID NO: 130767 - DNA, 25 bp, Saccharomyces pastorianus
gtgcgtttctatcgaaaaaccttcg

SEQ ID NO: 130768 - DNA, 25 bp, Saccharomyces pastorianus
tgcccgcgccactacaaactgtagt

SEQ ID NO: 130769 - DNA, 25 bp, Saccharomyces pastorianus
gtgaagaaaccatcgacaagaatta

SEQ ID NO: 130770 - DNA, 25 bp, Saccharomyces pastorianus
aaatagattcgctgcaagtttgtga

SEQ ID NO: 130771 - DNA, 25 bp, Saccharomyces pastorianus
gtagtgccacatggaaacgttgtat

SEQ ID NO: 130772 - DNA, 25 bp, Saccharomyces pastorianus
agatgttatggctcggagagttttg

SEQ ID NO: 130773 - DNA, 25 bp, Saccharomyces pastorianus
gccgattaccccataaaaaagtgcg

SEQ ID NO: 130774 - DNA, 25 bp, Saccharomyces pastorianus
caattgatagaaggtgcccgcgcca

SEQ ID NO: 130775 - DNA, 25 bp, Saccharomyces pastorianus
ttatgaagcgtctagccgattaccc

SEQ ID NO: 130776 - DNA, 25 bp, Saccharomyces pastorianus
gatgggcgccttactttaaagtttg

SEQ ID NO: 130777 - DNA, 25 bp, Saccharomyces pastorianus
attgagttactcctttgatttggaa

SEQ ID NO: 130778 - DNA, 25 bp, Saccharomyces pastorianus
aaaaccatcacttgtccttgaaaga

SEQ ID NO: 130779 - DNA, 25 bp, Saccharomyces pastorianus
gatgattccacttgctgatatgttg

SEQ ID NO: 130780 - DNA, 25 bp, Saccharomyces pastorianus
gtagcgacgtccttcgagtttgata

SEQ ID NO: 130781 - DNA, 25 bp, Saccharomyces pastorianus
agaacttgaaaatgagcgctacttg

SEQ ID NO: 130782 - DNA, 25 bp, Saccharomyces pastorianus
gaattttcacgtgtagcgacgtcct

SEQ ID NO: 130783 - DNA, 25 bp, Saccharomyces pastorianus
tgagcgctacttgaaatcgatgatt

SEQ ID NO: 130784 - DNA, 25 bp, Saccharomyces pastorianus
gaacgcgttaattttttgggatgat

SEQ ID NO: 130785 - DNA, 25 bp, Saccharomyces pastorianus
gcaacgctaatttaacttacgactc

SEQ ID NO: 130786 - DNA, 25 bp, Saccharomyces pastorianus
aaagaagccgatgggcgccttactt

SEQ ID NO: 130787 - DNA, 25 bp, Saccharomyces pastorianus
tggcaactttcttattaaaaggtca

SEQ ID NO: 130788 - DNA, 25 bp, Saccharomyces pastorianus
tgtcgtgctaccaaatcatgaagaa

SEQ ID NO: 130789 - DNA, 25 bp, Saccharomyces pastorianus
taaaaggtcaaattagaaatggcga

SEQ ID NO: 130790 - DNA, 25 bp, Saccharomyces pastorianus
aagatgctaagcttgtcgtgctacc

SEQ ID NO: 130791 - DNA, 25 bp, Saccharomyces pastorianus
gctaagcttgtcgtgctaccaaatc

SEQ ID NO: 130792 - DNA, 25 bp, Saccharomyces pastorianus
atgctaagcttgtcgtgctaccaaa

SEQ ID NO: 130793 - DNA, 25 bp, Saccharomyces pastorianus
agaaatggcgaaactgttagagtgg

SEQ ID NO: 130794 - DNA, 25 bp, Saccharomyces pastorianus
aagcttgtcgtgctaccaaatcatg

SEQ ID NO: 130795 - DNA, 25 bp, Saccharomyces pastorianus
gatgctaagcttgtcgtgctaccaa

SEQ ID NO: 130796 - DNA, 25 bp, Saccharomyces pastorianus
gagtggtggttaaagatgctaagct

SEQ ID NO: 130797 - DNA, 25 bp, Saccharomyces pastorianus
gcttgtcgtgctaccaaatcatgaa

SEQ ID NO: 130798 - DNA, 25 bp, Saccharomyces pastorianus
cacctccaggttacgtcttaagcga

SEQ ID NO: 130799 - DNA, 25 bp, Saccharomyces pastorianus
gtcttaagcgagtctggtggccaat

SEQ ID NO: 130800 - DNA, 25 bp, Saccharomyces pastorianus
aaggaccgcctactgtatatggaaa

SEQ ID NO: 130801 - DNA, 25 bp, Saccharomyces pastorianus
gccagctttatgttcttaggtccta

SEQ ID NO: 130802 - DNA, 25 bp, Saccharomyces pastorianus
aagacgaggccattgctgctatttc

SEQ ID NO: 130803 - DNA, 25 bp, Saccharomyces pastorianus
aagccttatgctgtcgttttatttg

SEQ ID NO: 130804 - DNA, 25 bp, Saccharomyces pastorianus
gctgtacgtcttcaaagggctggtt

SEQ ID NO: 130805 - DNA, 25 bp, Saccharomyces pastorianus
gaaggtaagctgaccgattccctag

SEQ ID NO: 130806 - DNA, 25 bp, Saccharomyces pastorianus
tcttaggtcctactggtactggtaa

SEQ ID NO: 130807 - DNA, 25 bp, Saccharomyces pastorianus
gattccctaggccatcatgttgatt

SEQ ID NO: 130808 - DNA, 25 bp, Saccharomyces pastorianus
gctgctatttctgatgctgtacgtc

SEQ ID NO: 130809 - DNA, 25 bp, Saccharomyces pastorianus
tgataacaaaaacgcatcctctatt

SEQ ID NO: 130810 - DNA, 25 bp, Saccharomyces pastorianus
gttgcaccctgtagatatggcttct

SEQ ID NO: 130811 - DNA, 25 bp, Saccharomyces pastorianus
ggagcaaccgctagtggatacgcag

SEQ ID NO: 130812 - DNA, 25 bp, Saccharomyces pastorianus
aaagcagtcacaaattcccacgctg

SEQ ID NO: 130813 - DNA, 25 bp, Saccharomyces pastorianus
gagtgttttgtcctctatcaaatca

SEQ ID NO: 130814 - DNA, 25 bp, Saccharomyces pastorianus
gaaatgtattggttccgttgttgaa

SEQ ID NO: 130815 - DNA, 25 bp, Saccharomyces pastorianus
gatacgcaggacgtgttatcggaga

SEQ ID NO: 130816 - DNA, 25 bp, Saccharomyces pastorianus
cagtaaggcgttcaagcagcaggtt

SEQ ID NO: 130817 - DNA, 25 bp, Saccharomyces pastorianus
cctctatttatatgacctcaccagc

SEQ ID NO: 130818 - DNA, 25 bp, Saccharomyces pastorianus
cagcaggttgagttcgccaattatg

SEQ ID NO: 130819 - DNA, 25 bp, Saccharomyces pastorianus
gggtgtagtcactgctatgaagatt

SEQ ID NO: 130820 - DNA, 25 bp, Saccharomyces pastorianus
gccttctctccaacctatttggaaa

SEQ ID NO: 130821 - DNA, 25 bp, Saccharomyces pastorianus
gaacttccactaatacagtcgcctt

SEQ ID NO: 130822 - DNA, 25 bp, Saccharomyces pastorianus
gttcctcttctacttctctaaataa

SEQ ID NO: 130823 - DNA, 25 bp, Saccharomyces pastorianus
tatgatccctttgcaaccaccgtaa

SEQ ID NO: 130824 - DNA, 25 bp, Saccharomyces pastorianus
agcgctggtgcagcattaggcgtta

SEQ ID NO: 130825 - DNA, 25 bp, Saccharomyces pastorianus
aaggtgcaaattccaggtctgaaca

SEQ ID NO: 130826 - DNA, 25 bp, Saccharomyces pastorianus
tgaaaagtctcaacctacctcaact

SEQ ID NO: 130827 - DNA, 25 bp, Saccharomyces pastorianus
actctgagacccgtgcaaaacatta

SEQ ID NO: 130828 - DNA, 25 bp, Saccharomyces pastorianus
gaaaagtccttcagcgtcgtatgat

SEQ ID NO: 130829 - DNA, 25 bp, Saccharomyces pastorianus
tacacctcaatcagttagttatcga

SEQ ID NO: 130830 - DNA, 25 bp, Saccharomyces pastorianus
acagaccccaaattgctgatcctaa

SEQ ID NO: 130831 - DNA, 25 bp, Saccharomyces pastorianus
ataatcagccgtttgaccactttaa

SEQ ID NO: 130832 - DNA, 25 bp, Saccharomyces pastorianus
gatctgtttaatatgtgcaacccat

SEQ ID NO: 130833 - DNA, 25 bp, Saccharomyces pastorianus
aacattcgcattacgtttgcaccgt

SEQ ID NO: 130834 - DNA, 25 bp, Saccharomyces pastorianus
ttttttgtcccctatcgaaggatga

SEQ ID NO: 130835 - DNA, 25 bp, Saccharomyces pastorianus
aattacgcaaccatcaaactaaggg

SEQ ID NO: 130836 - DNA, 25 bp, Saccharomyces pastorianus
tgtgataagatgaaccccgcttctc

SEQ ID NO: 130837 - DNA, 25 bp, Saccharomyces pastorianus
gaaggattcaaaggccaccctatgt

SEQ ID NO: 130838 - DNA, 25 bp, Saccharomyces pastorianus
gaagaggttgctaccgaaacactaa

SEQ ID NO: 130839 - DNA, 25 bp, Saccharomyces pastorianus
tgtgccttctgttccggaaaacgat

SEQ ID NO: 130840 - DNA, 25 bp, Saccharomyces pastorianus
gaagtcatgtttaccgatcgcatag

SEQ ID NO: 130841 - DNA, 25 bp, Saccharomyces pastorianus
gcatgcattcccttgtgagcttgaa

SEQ ID NO: 130842 - DNA, 25 bp, Saccharomyces pastorianus
acaggcagcggatattctactttat

SEQ ID NO: 130843 - DNA, 25 bp, Saccharomyces pastorianus
gttttgagcttaagcacgcctgaaa

SEQ ID NO: 130844 - DNA, 25 bp, Saccharomyces pastorianus
tgatccgaatcacgactctgtaatt

SEQ ID NO: 130845 - DNA, 25 bp, Saccharomyces pastorianus
acacgttcctgttggcgatgatcaa

SEQ ID NO: 130846 - DNA, 25 bp, Saccharomyces pastorianus
gaaagaccaggcgtatcgaatttaa

SEQ ID NO: 130847 - DNA, 25 bp, Saccharomyces pastorianus
gatcaatcgcagcatttggaactaa

SEQ ID NO: 130848 - DNA, 25 bp, Saccharomyces pastorianus
taaatctacacacgttcctgttggc

SEQ ID NO: 130849 - DNA, 25 bp, Saccharomyces pastorianus
gaaccaacctatttgcatagtgtcg

SEQ ID NO: 130850 - DNA, 25 bp, Saccharomyces pastorianus
aaacctgtaactatgttggcacaaa

SEQ ID NO: 130851 - DNA, 25 bp, Saccharomyces pastorianus
gataggttctactacgaccctgtag

SEQ ID NO: 130852 - DNA, 25 bp, Saccharomyces pastorianus
gactgggcttattttcgtatcctgt

SEQ ID NO: 130853 - DNA, 25 bp, Saccharomyces pastorianus
gtgccgattttaagctgaattccga

SEQ ID NO: 130854 - DNA, 25 bp, Saccharomyces pastorianus
atgtcgaataagcaggcggttctga

SEQ ID NO: 130855 - DNA, 25 bp, Saccharomyces pastorianus
gattcagccaactgggtgtttccac

SEQ ID NO: 130856 - DNA, 25 bp, Saccharomyces pastorianus
gcgcttcatagtaatgctacggtat

SEQ ID NO: 130857 - DNA, 25 bp, Saccharomyces pastorianus
gcaacgtgccgattttaagctgaat

SEQ ID NO: 130858 - DNA, 25 bp, Saccharomyces pastorianus
gtaatgctacggtatttagtatgat

SEQ ID NO: 130859 - DNA, 25 bp, Saccharomyces pastorianus
aagcaggcggttctgaagttaatca

SEQ ID NO: 130860 - DNA, 25 bp, Saccharomyces pastorianus
taaaaggtggataagcacagtgcaa

SEQ ID NO: 130861 - DNA, 25 bp, Saccharomyces pastorianus
tatgattcagccaactgggtgtttc

SEQ ID NO: 130862 - DNA, 25 bp, Saccharomyces pastorianus
cacagtgcaacgtgccgattttaag

SEQ ID NO: 130863 - DNA, 25 bp, Saccharomyces pastorianus
aagctgaattccgaagcgcttcata

SEQ ID NO: 130864 - DNA, 25 bp, Saccharomyces pastorianus
attcaatatccggtggagtccactt

SEQ ID NO: 130865 - DNA, 25 bp, Saccharomyces pastorianus
ggagtccacttcttcaacatcaatg

SEQ ID NO: 130866 - DNA, 25 bp, Saccharomyces pastorianus
gacttgaaatctgaaatcccatgtg

SEQ ID NO: 130867 - DNA, 25 bp, Saccharomyces pastorianus
tcacctgcaatagcccgcgtagaaa

SEQ ID NO: 130868 - DNA, 25 bp, Saccharomyces pastorianus
tagaacgacactggccgagctgaat

SEQ ID NO: 130869 - DNA, 25 bp, Saccharomyces pastorianus
atcccatgtgattcaatatccggtg

SEQ ID NO: 130870 - DNA, 25 bp, Saccharomyces pastorianus
gaggaagagttatgccccaaggaat

SEQ ID NO: 130871 - DNA, 25 bp, Saccharomyces pastorianus
gagctgaatgccatcgctaaaccgg

SEQ ID NO: 130872 - DNA, 25 bp, Saccharomyces pastorianus
tagcccgcgtagaaaaaagccttga

SEQ ID NO: 130873 - DNA, 25 bp, Saccharomyces pastorianus
agccttgaccaaaaattcccaatcg

SEQ ID NO: 130874 - DNA, 25 bp, Saccharomyces pastorianus
gctaaaccggcgagcattggaggaa

SEQ ID NO: 130875 - DNA, 25 bp, Saccharomyces pastorianus
gtccaaaaagctgccggagatacga

SEQ ID NO: 130876 - DNA, 25 bp, Saccharomyces pastorianus
gagattagaagatccaaaggtccaa

SEQ ID NO: 130877 - DNA, 25 bp, Saccharomyces pastorianus
cgaataattcatgggacagagctca

SEQ ID NO: 130878 - DNA, 25 bp, Saccharomyces pastorianus
ataattcatgggacagagctcaaat

SEQ ID NO: 130879 - DNA, 25 bp, Saccharomyces pastorianus
aggtccaaaaagctgccggagatac

SEQ ID NO: 130880 - DNA, 25 bp, Saccharomyces pastorianus
attcatgggacagagctcaaattat

SEQ ID NO: 130881 - DNA, 25 bp, Saccharomyces pastorianus
aaaaagctgccggagatacgaataa

SEQ ID NO: 130882 - DNA, 25 bp, Saccharomyces pastorianus
caaaggtccaaaaagctgccggaga

SEQ ID NO: 130883 - DNA, 25 bp, Saccharomyces pastorianus
gctgccggagatacgaataattcat

SEQ ID NO: 130884 - DNA, 25 bp, Saccharomyces pastorianus
aagctgccggagatacgaataattc

SEQ ID NO: 130885 - DNA, 25 bp, Saccharomyces pastorianus
ttcatgggacagagctcaaattatg

SEQ ID NO: 130886 - DNA, 25 bp, Saccharomyces pastorianus
gctgcatttttactggcgatacact

SEQ ID NO: 130887 - DNA, 25 bp, Saccharomyces pastorianus
gattacttgtattaggacgccctgc

SEQ ID NO: 130888 - DNA, 25 bp, Saccharomyces pastorianus
aggactgcccaaaggttacgataat

SEQ ID NO: 130889 - DNA, 25 bp, Saccharomyces pastorianus
gtggtgttaattactgctatctatt

SEQ ID NO: 130890 - DNA, 25 bp, Saccharomyces pastorianus
agagcctcctgaagttctgcctgag

SEQ ID NO: 130891 - DNA, 25 bp, Saccharomyces pastorianus
tctatcttagaaactgtgggcaggc

SEQ ID NO: 130892 - DNA, 25 bp, Saccharomyces pastorianus
cgatacactatttaccgctggttgc

SEQ ID NO: 130893 - DNA, 25 bp, Saccharomyces pastorianus
aatcgtggctaatcgatccagcaga

SEQ ID NO: 130894 - DNA, 25 bp, Saccharomyces pastorianus
tacacctgggtgacttagagattac

SEQ ID NO: 130895 - DNA, 25 bp, Saccharomyces pastorianus
atccaacaacagatgagcgctgcat

SEQ ID NO: 130896 - DNA, 25 bp, Saccharomyces pastorianus
gagactctatctgttattatgtgaa

SEQ ID NO: 130897 - DNA, 25 bp, Saccharomyces pastorianus
aagcgccgcaacaaatcaacaggga

SEQ ID NO: 130898 - DNA, 25 bp, Saccharomyces pastorianus
agatctgtacatggaggctaactta

SEQ ID NO: 130899 - DNA, 25 bp, Saccharomyces pastorianus
gaattcaaactaaccagcgccaaat

SEQ ID NO: 130900 - DNA, 25 bp, Saccharomyces pastorianus
gaagccgtcatgaatttgtcgaaac

SEQ ID NO: 130901 - DNA, 25 bp, Saccharomyces pastorianus
atgagaccataatcgcaacgttagt

SEQ ID NO: 130902 - DNA, 25 bp, Saccharomyces pastorianus
gcaacgttagtccattcagatctgt

SEQ ID NO: 130903 - DNA, 25 bp, Saccharomyces pastorianus
aaaggctacgatatggtcgcaatgt

SEQ ID NO: 130904 - DNA, 25 bp, Saccharomyces pastorianus
taatatgccccagtttaggttacaa

SEQ ID NO: 130905 - DNA, 25 bp, Saccharomyces pastorianus
ggtcgcaatgtcaggcacaagttta

SEQ ID NO: 130906 - DNA, 25 bp, Saccharomyces pastorianus
attaccactatattctagcgatgag

SEQ ID NO: 130907 - DNA, 25 bp, Saccharomyces pastorianus
gatgatgagatcaagcgccgcaaca

SEQ ID NO: 130908 - DNA, 25 bp, Saccharomyces pastorianus
aaggcggcattctcaagtgggctat

SEQ ID NO: 130909 - DNA, 25 bp, Saccharomyces pastorianus
gtgggctatcgagaagcaccaactt

SEQ ID NO: 130910 - DNA, 25 bp, Saccharomyces pastorianus
ataggccgcctttttctaattagag

SEQ ID NO: 130911 - DNA, 25 bp, Saccharomyces pastorianus
ggtaacaccgaggattgcatgcgaa

SEQ ID NO: 130912 - DNA, 25 bp, Saccharomyces pastorianus
tacggacgagtgtcgagccctcatc

SEQ ID NO: 130913 - DNA, 25 bp, Saccharomyces pastorianus
agccctcatctctcttttaaacgag

SEQ ID NO: 130914 - DNA, 25 bp, Saccharomyces pastorianus
tgattgctttcgaactgtgctttga

SEQ ID NO: 130915 - DNA, 25 bp, Saccharomyces pastorianus
aattgagacccctgatctttattgg

SEQ ID NO: 130916 - DNA, 25 bp, Saccharomyces pastorianus
gcaagctggactattctacggacga

SEQ ID NO: 130917 - DNA, 25 bp, Saccharomyces pastorianus
agaaatattcttcctactgctcaga

SEQ ID NO: 130918 - DNA, 25 bp, Saccharomyces pastorianus
gcaccaacttggcagtcctagaaga

SEQ ID NO: 130919 - DNA, 25 bp, Saccharomyces pastorianus
tatgttccaaacatggctacaagat

SEQ ID NO: 130920 - DNA, 25 bp, Saccharomyces pastorianus
aatctcaattacttctttggctcag

SEQ ID NO: 130921 - DNA, 25 bp, Saccharomyces pastorianus
aacgatagtctcactttgggcgata

SEQ ID NO: 130922 - DNA, 25 bp, Saccharomyces pastorianus
gactcctagaagctttgccacgagc

SEQ ID NO: 130923 - DNA, 25 bp, Saccharomyces pastorianus
gcgtatccactaaccaatcacaaga

SEQ ID NO: 130924 - DNA, 25 bp, Saccharomyces pastorianus
tgaggatgcagccagaaattcttcg

SEQ ID NO: 130925 - DNA, 25 bp, Saccharomyces pastorianus
cactttgggcgataaggctgatgaa

SEQ ID NO: 130926 - DNA, 25 bp, Saccharomyces pastorianus
tatcactgttgatgccttaagagat

SEQ ID NO: 130927 - DNA, 25 bp, Saccharomyces pastorianus
gggtcaggtaataactcgactccta

SEQ ID NO: 130928 - DNA, 25 bp, Saccharomyces pastorianus
tgatgagtttttaaccttgtaccaa

SEQ ID NO: 130929 - DNA, 25 bp, Saccharomyces pastorianus
ggtgggcaatattatactgccacaa

SEQ ID NO: 130930 - DNA, 25 bp, Saccharomyces pastorianus
ctccacttatggctacactgttttg

SEQ ID NO: 130931 - DNA, 25 bp, Saccharomyces pastorianus
ggttcttcggttgagttatctccaa

SEQ ID NO: 130932 - DNA, 25 bp, Saccharomyces pastorianus
gatatttggcaacttgacgcccgat

SEQ ID NO: 130933 - DNA, 25 bp, Saccharomyces pastorianus
ttcaataacgccaaacctcaaagat

SEQ ID NO: 130934 - DNA, 25 bp, Saccharomyces pastorianus
agcccctgagttgttgaaattcaat

SEQ ID NO: 130935 - DNA, 25 bp, Saccharomyces pastorianus
agcaacagcgcgtatttggatgatt

SEQ ID NO: 130936 - DNA, 25 bp, Saccharomyces pastorianus
ggaagcactattcccaagttagttc

SEQ ID NO: 130937 - DNA, 25 bp, Saccharomyces pastorianus
aacttagaaaccgtgatcctggtga

SEQ ID NO: 130938 - DNA, 25 bp, Saccharomyces pastorianus
ttgttcggttatacggtggagcgca

SEQ ID NO: 130939 - DNA, 25 bp, Saccharomyces pastorianus
aagttagttcactccacttatggct

SEQ ID NO: 130940 - DNA, 25 bp, Saccharomyces pastorianus
actgtaactactatccattgggaga

SEQ ID NO: 130941 - DNA, 25 bp, Saccharomyces pastorianus
ttcgtcgatgtaattttagggtcta

SEQ ID NO: 130942 - DNA, 25 bp, Saccharomyces pastorianus
ggacgattcagatgtcaccctggag

SEQ ID NO: 130943 - DNA, 25 bp, Saccharomyces pastorianus
tctaccactgttaggagctgcacta

SEQ ID NO: 130944 - DNA, 25 bp, Saccharomyces pastorianus
agctgcactaattgctctatccaga

SEQ ID NO: 130945 - DNA, 25 bp, Saccharomyces pastorianus
ataatggcacactttttctacagaa

SEQ ID NO: 130946 - DNA, 25 bp, Saccharomyces pastorianus
agattacagacatcatttcgtcgat

SEQ ID NO: 130947 - DNA, 25 bp, Saccharomyces pastorianus
aagaatcttcccacccattgatgat

SEQ ID NO: 130948 - DNA, 25 bp, Saccharomyces pastorianus
cattgatgatcctcttccgttcaaa

SEQ ID NO: 130949 - DNA, 25 bp, Saccharomyces pastorianus
aaaatggtggcctttctaccactgt

SEQ ID NO: 130950 - DNA, 25 bp, Saccharomyces pastorianus
caccctggaggaagcagtgacccat

SEQ ID NO: 130951 - DNA, 25 bp, Saccharomyces pastorianus
agtgacccatcagaggatcccggat

SEQ ID NO: 130952 - DNA, 25 bp, Saccharomyces pastorianus
gatctcactatatcgcatccttatg

SEQ ID NO: 130953 - DNA, 25 bp, Saccharomyces pastorianus
tgcgacaactgaacgtgtaaataac

SEQ ID NO: 130954 - DNA, 25 bp, Saccharomyces pastorianus
atagttttgtctgtgccatctttaa

SEQ ID NO: 130955 - DNA, 25 bp, Saccharomyces pastorianus
cagttttacattaacgatctcacta

SEQ ID NO: 130956 - DNA, 25 bp, Saccharomyces pastorianus
atctcactatatcgcatccttatgc

SEQ ID NO: 130957 - DNA, 25 bp, Saccharomyces pastorianus
agttttgtctgtgccatctttaacc

SEQ ID NO: 130958 - DNA, 25 bp, Saccharomyces pastorianus
tgaacgtgtaaataacaacatgttg

SEQ ID NO: 130959 - DNA, 25 bp, Saccharomyces pastorianus
gcatccttatgcgacaactgaacgt

SEQ ID NO: 130960 - DNA, 25 bp, Saccharomyces pastorianus
ccttatgcgacaactgaacgtgtaa

SEQ ID NO: 130961 - DNA, 25 bp, Saccharomyces pastorianus
ttttgtctgtgccatctttaaccat

SEQ ID NO: 130962 - DNA, 25 bp, Saccharomyces pastorianus
catgttgtttgtttatagttttgtc

SEQ ID NO: 130963 - DNA, 25 bp, Saccharomyces pastorianus
ctactagtagaagacgaagaccagt

SEQ ID NO: 130964 - DNA, 25 bp, Saccharomyces pastorianus
agtagaagacgaagaccagtcatta

SEQ ID NO: 130965 - DNA, 25 bp, Saccharomyces pastorianus
aaattactactagtagaagacgaag

SEQ ID NO: 130966 - DNA, 25 bp, Saccharomyces pastorianus
tcaagaaaaaaattactactagtag

SEQ ID NO: 130967 - DNA, 25 bp, Saccharomyces pastorianus
aattactactagtagaagacgaaga

SEQ ID NO: 130968 - DNA, 25 bp, Saccharomyces pastorianus
actactagtagaagacgaagaccag

SEQ ID NO: 130969 - DNA, 25 bp, Saccharomyces pastorianus
actagtagaagacgaagaccagtca

SEQ ID NO: 130970 - DNA, 25 bp, Saccharomyces pastorianus
ttactactagtagaagacgaagacc

SEQ ID NO: 130971 - DNA, 25 bp, Saccharomyces pastorianus
attactactagtagaagacgaagac

SEQ ID NO: 130972 - DNA, 25 bp, Saccharomyces pastorianus
tactactagtagaagacgaagacca

SEQ ID NO: 130973 - DNA, 25 bp, Saccharomyces pastorianus
tactagtagaagacgaagaccagtc

SEQ ID NO: 130974 - DNA, 25 bp, Saccharomyces pastorianus
tgccggttggtgtattcttgaggaa

SEQ ID NO: 130975 - DNA, 25 bp, Saccharomyces pastorianus
ttactaaatgagtccggcgcctttg

SEQ ID NO: 130976 - DNA, 25 bp, Saccharomyces pastorianus
gccggttgttggtgtggttttcaat

SEQ ID NO: 130977 - DNA, 25 bp, Saccharomyces pastorianus
gttgtacatctctaggtttagctga

SEQ ID NO: 130978 - DNA, 25 bp, Saccharomyces pastorianus
aacggccctacatttattgttgatc

SEQ ID NO: 130979 - DNA, 25 bp, Saccharomyces pastorianus
ttaaaccaactattccatgcttcca

SEQ ID NO: 130980 - DNA, 25 bp, Saccharomyces pastorianus
gcgagcggcatgcttgatgcttatt

SEQ ID NO: 130981 - DNA, 25 bp, Saccharomyces pastorianus
tcacggttacccctatagttgtaca

SEQ ID NO: 130982 - DNA, 25 bp, Saccharomyces pastorianus
gttgatcccatcgatggtactacta

SEQ ID NO: 130983 - DNA, 25 bp, Saccharomyces pastorianus
acatatgctacgtagcgagcggcat

SEQ ID NO: 130984 - DNA, 25 bp, Saccharomyces pastorianus
gtgtggttttcaatcctcacttaaa

SEQ ID NO: 130985 - DNA, 25 bp, Saccharomyces pastorianus
ggccttgaaaaggagcagactaaaa

SEQ ID NO: 130986 - DNA, 25 bp, Saccharomyces pastorianus
aggagcagactaaaagtttgcacga

SEQ ID NO: 130987 - DNA, 25 bp, Saccharomyces pastorianus
ggagcagactaaaagtttgcacgat

SEQ ID NO: 130988 - DNA, 25 bp, Saccharomyces pastorianus
gactaaaagtttgcacgatgatata

SEQ ID NO: 130989 - DNA, 25 bp, Saccharomyces pastorianus
cagactaaaagtttgcacgatgata

SEQ ID NO: 130990 - DNA, 25 bp, Saccharomyces pastorianus
agcagactaaaagtttgcacgatga

SEQ ID NO: 130991 - DNA, 25 bp, Saccharomyces pastorianus
agactaaaagtttgcacgatgatat

SEQ ID NO: 130992 - DNA, 25 bp, Saccharomyces pastorianus
gagcagactaaaagtttgcacgatg

SEQ ID NO: 130993 - DNA, 25 bp, Saccharomyces pastorianus
taaaagtttgcacgatgatataata

SEQ ID NO: 130994 - DNA, 25 bp, Saccharomyces pastorianus
aaaggagcagactaaaagtttgcac

SEQ ID NO: 130995 - DNA, 25 bp, Saccharomyces pastorianus
ctaaaagtttgcacgatgatataat

SEQ ID NO: 130996 - DNA, 25 bp, Saccharomyces pastorianus
gaacgctggcggtaatggaagcaat

SEQ ID NO: 130997 - DNA, 25 bp, Saccharomyces pastorianus
ttagccgtggccaagatcgttaaag

SEQ ID NO: 130998 - DNA, 25 bp, Saccharomyces pastorianus
aaatcaatgcctgagccactgggac

SEQ ID NO: 130999 - DNA, 25 bp, Saccharomyces pastorianus
atcttgctaaacaatgtcccgcact

SEQ ID NO: 131000 - DNA, 25 bp, Saccharomyces pastorianus
taacagaagatttagccgtggccaa

SEQ ID NO: 131001 - DNA, 25 bp, Saccharomyces pastorianus
gagcccagaaatttatcttgctaaa

SEQ ID NO: 131002 - DNA, 25 bp, Saccharomyces pastorianus
gtttgaattacaaggattgccgtca

SEQ ID NO: 131003 - DNA, 25 bp, Saccharomyces pastorianus
ctgttatacatgaagctgctcgcga

SEQ ID NO: 131004 - DNA, 25 bp, Saccharomyces pastorianus
gaggaaaacatagcaaaaccgtctt

SEQ ID NO: 131005 - DNA, 25 bp, Saccharomyces pastorianus
agattttacaaagcgctcacactta

SEQ ID NO: 131006 - DNA, 25 bp, Saccharomyces pastorianus
aatgtcccgcactcaaaaaattttg

SEQ ID NO: 131007 - DNA, 25 bp, Saccharomyces pastorianus
tgcattccaccaatagttgtatgat

SEQ ID NO: 131008 - DNA, 25 bp, Saccharomyces pastorianus
acggaggttctgtggattagctatt

SEQ ID NO: 131009 - DNA, 25 bp, Saccharomyces pastorianus
gggtcagtcttcaagatagttcctt

SEQ ID NO: 131010 - DNA, 25 bp, Saccharomyces pastorianus
tcctcaagtgccatcgtttcaaaac

SEQ ID NO: 131011 - DNA, 25 bp, Saccharomyces pastorianus
ggccaagtggatgggtcagtcttca

SEQ ID NO: 131012 - DNA, 25 bp, Saccharomyces pastorianus
ttatcagatgggtcactctatgagg

SEQ ID NO: 131013 - DNA, 25 bp, Saccharomyces pastorianus
gattggccaacgacttttatcagat

SEQ ID NO: 131014 - DNA, 25 bp, Saccharomyces pastorianus
cgaggaatttggctctcctcaagtg

SEQ ID NO: 131015 - DNA, 25 bp, Saccharomyces pastorianus
gtggtttaaaccctcgcatggaaag

SEQ ID NO: 131016 - DNA, 25 bp, Saccharomyces pastorianus
tcgtttcaaaacgttggtggccaag

SEQ ID NO: 131017 - DNA, 25 bp, Saccharomyces pastorianus
atcatcgatcgagaattacagctag

SEQ ID NO: 131018 - DNA, 25 bp, Saccharomyces pastorianus
caatttggataccttcgtccaagag

SEQ ID NO: 131019 - DNA, 25 bp, Saccharomyces pastorianus
gaaaaacactacgtcaatttggata

SEQ ID NO: 131020 - DNA, 25 bp, Saccharomyces pastorianus
gtcaatttggataccttcgtccaag

SEQ ID NO: 131021 - DNA, 25 bp, Saccharomyces pastorianus
gtccaagagcaaaaacggaggaagt

SEQ ID NO: 131022 - DNA, 25 bp, Saccharomyces pastorianus
cggaggaagtaataatgacgaaaca

SEQ ID NO: 131023 - DNA, 25 bp, Saccharomyces pastorianus
actacgtcaatttggataccttcgt

SEQ ID NO: 131024 - DNA, 25 bp, Saccharomyces pastorianus
cactacgtcaatttggataccttcg

SEQ ID NO: 131025 - DNA, 25 bp, Saccharomyces pastorianus
tacgtcaatttggataccttcgtcc

SEQ ID NO: 131026 - DNA, 25 bp, Saccharomyces pastorianus
ccttcgtccaagagcaaaaacggag

SEQ ID NO: 131027 - DNA, 25 bp, Saccharomyces pastorianus
aaacactacgtcaatttggatacct

SEQ ID NO: 131028 - DNA, 25 bp, Saccharomyces pastorianus
acgtcaatttggataccttcgtcca

SEQ ID NO: 131029 - DNA, 25 bp, Saccharomyces pastorianus
gttcttgtgccttactgttcaataa

SEQ ID NO: 131030 - DNA, 25 bp, Saccharomyces pastorianus
gtttgggcaggaaacaccaccattt

SEQ ID NO: 131031 - DNA, 25 bp, Saccharomyces pastorianus
atggatcctggaagttcttgtgcct

SEQ ID NO: 131032 - DNA, 25 bp, Saccharomyces pastorianus
atatccagcctgcagaaagtgccac

SEQ ID NO: 131033 - DNA, 25 bp, Saccharomyces pastorianus
cttttctacccttccatgtcaataa

SEQ ID NO: 131034 - DNA, 25 bp, Saccharomyces pastorianus
aaggaactgccttgggatctacaca

SEQ ID NO: 131035 - DNA, 25 bp, Saccharomyces pastorianus
actccctacacaatacgttatactc

SEQ ID NO: 131036 - DNA, 25 bp, Saccharomyces pastorianus
aagttcacggctccaagcgtggtat

SEQ ID NO: 131037 - DNA, 25 bp, Saccharomyces pastorianus
cgagtgagttgtacgaaggcgccaa

SEQ ID NO: 131038 - DNA, 25 bp, Saccharomyces pastorianus
gatagcgctcttataccaaccaaag

SEQ ID NO: 131039 - DNA, 25 bp, Saccharomyces pastorianus
gatctacacaccattgtacctgttt

SEQ ID NO: 131040 - DNA, 25 bp, Saccharomyces pastorianus
acaagctttgttcgcattgcaagaa

SEQ ID NO: 131041 - DNA, 25 bp, Saccharomyces pastorianus
gcgtgaagtgcgctttagtaagaac

SEQ ID NO: 131042 - DNA, 25 bp, Saccharomyces pastorianus
tgtagaagccttgtctttctctgta

SEQ ID NO: 131043 - DNA, 25 bp, Saccharomyces pastorianus
gaacgattgaccgtaaatgaacctc

SEQ ID NO: 131044 - DNA, 25 bp, Saccharomyces pastorianus
aacatgtggctgtttctgtagaagc

SEQ ID NO: 131045 - DNA, 25 bp, Saccharomyces pastorianus
taaaggccaaccgtacgtgcttaat

SEQ ID NO: 131046 - DNA, 25 bp, Saccharomyces pastorianus
attatatgccctttaacaatgacag

SEQ ID NO: 131047 - DNA, 25 bp, Saccharomyces pastorianus
atgacggagcaattctgtgctactt

SEQ ID NO: 131048 - DNA, 25 bp, Saccharomyces pastorianus
cttgtctttctctgtattcctttaa

SEQ ID NO: 131049 - DNA, 25 bp, Saccharomyces pastorianus
gtccgataaacatgccacagtagta

SEQ ID NO: 131050 - DNA, 25 bp, Saccharomyces pastorianus
aatgaacctcagatgtccgataaac

SEQ ID NO: 131051 - DNA, 25 bp, Saccharomyces pastorianus
aattgcaggaaccttcatcgctgtc

SEQ ID NO: 131052 - DNA, 25 bp, Saccharomyces pastorianus
aggtcaagcgcttatcgtagccttt

SEQ ID NO: 131053 - DNA, 25 bp, Saccharomyces pastorianus
cggattctagtgagtcttcgctgga

SEQ ID NO: 131054 - DNA, 25 bp, Saccharomyces pastorianus
gtcgtatctacgtcaactatggcta

SEQ ID NO: 131055 - DNA, 25 bp, Saccharomyces pastorianus
gtaaaggtatctccacgccatttga

SEQ ID NO: 131056 - DNA, 25 bp, Saccharomyces pastorianus
ttcttgcctcgttctcaaaggtcaa

SEQ ID NO: 131057 - DNA, 25 bp, Saccharomyces pastorianus
tatcgtagccttttagagaccccaa

SEQ ID NO: 131058 - DNA, 25 bp, Saccharomyces pastorianus
aagactatcagtcgcgcgttcgatc

SEQ ID NO: 131059 - DNA, 25 bp, Saccharomyces pastorianus
ttcgatctcagtaacgtcctccaat

SEQ ID NO: 131060 - DNA, 25 bp, Saccharomyces pastorianus
agcctattttagacttcttgcctcg

SEQ ID NO: 131061 - DNA, 25 bp, Saccharomyces pastorianus
ataagtcacacgctctgggtcatag

SEQ ID NO: 131062 - DNA, 25 bp, Saccharomyces pastorianus
gtagttcctaacaacgaagtcagca

SEQ ID NO: 131063 - DNA, 25 bp, Saccharomyces pastorianus
gaagccagttttgaactccattact

SEQ ID NO: 131064 - DNA, 25 bp, Saccharomyces pastorianus
gtaccgcctatttgaagccagtttt

SEQ ID NO: 131065 - DNA, 25 bp, Saccharomyces pastorianus
gacgtccttaatggtgatggtgaat

SEQ ID NO: 131066 - DNA, 25 bp, Saccharomyces pastorianus
atgttaattcagcactcggctcttt

SEQ ID NO: 131067 - DNA, 25 bp, Saccharomyces pastorianus
tgtcaaacacatgtaccgcctattt

SEQ ID NO: 131068 - DNA, 25 bp, Saccharomyces pastorianus
gaatgagctatttcaagacgtcctt

SEQ ID NO: 131069 - DNA, 25 bp, Saccharomyces pastorianus
cttttgtcgacaacacttctcaagc

SEQ ID NO: 131070 - DNA, 25 bp, Saccharomyces pastorianus
agtaccctaccaatagacctattag

SEQ ID NO: 131071 - DNA, 25 bp, Saccharomyces pastorianus
gatgcgaaaagctcggcagactcga

SEQ ID NO: 131072 - DNA, 25 bp, Saccharomyces pastorianus
ctccattactttggctactcataag

SEQ ID NO: 131073 - DNA, 25 bp, Saccharomyces pastorianus
gcaatgagcgatgatggatcttcat

SEQ ID NO: 131074 - DNA, 25 bp, Saccharomyces pastorianus
tgatggatcttcatcgagtgaagat

SEQ ID NO: 131075 - DNA, 25 bp, Saccharomyces pastorianus
atcgagtgaagatgagcattatagt

SEQ ID NO: 131076 - DNA, 25 bp, Saccharomyces pastorianus
atggtgcaatgagcgatgatggatc

SEQ ID NO: 131077 - DNA, 25 bp, Saccharomyces pastorianus
cagaagaacagggtgaaggtcaagg

SEQ ID NO: 131078 - DNA, 25 bp, Saccharomyces pastorianus
gtgcaatgagcgatgatggatcttc

SEQ ID NO: 131079 - DNA, 25 bp, Saccharomyces pastorianus
aaggtcaagggaaagatggtgcaat

SEQ ID NO: 131080 - DNA, 25 bp, Saccharomyces pastorianus
gatgagcattatagtgatgtaccag

SEQ ID NO: 131081 - DNA, 25 bp, Saccharomyces pastorianus
gcattatagtgatgtaccagaggat

SEQ ID NO: 131082 - DNA, 25 bp, Saccharomyces pastorianus
gagcattatagtgatgtaccagagg

SEQ ID NO: 131083 - DNA, 25 bp, Saccharomyces pastorianus
aagctagagcagaagaacagggtga

SEQ ID NO: 131084 - DNA, 25 bp, Saccharomyces pastorianus
gaaggctatcaaactgactgaatta

SEQ ID NO: 131085 - DNA, 25 bp, Saccharomyces pastorianus
gcaatgagcgatgatggatcttcat

SEQ ID NO: 131086 - DNA, 25 bp, Saccharomyces pastorianus
tgatggatcttcatcgagtgaagat

SEQ ID NO: 131087 - DNA, 25 bp, Saccharomyces pastorianus
atggtgcaatgagcgatgatggatc

SEQ ID NO: 131088 - DNA, 25 bp, Saccharomyces pastorianus
agaaaattcgcaaccaactccacgt

SEQ ID NO: 131089 - DNA, 25 bp, Saccharomyces pastorianus
gtgcaatgagcgatgatggatcttc

SEQ ID NO: 131090 - DNA, 25 bp, Saccharomyces pastorianus
aaggtcaagggaaagatggtgcaat

SEQ ID NO: 131091 - DNA, 25 bp, Saccharomyces pastorianus
gatgagcattatagtgatgtaccag

SEQ ID NO: 131092 - DNA, 25 bp, Saccharomyces pastorianus
gcattatagtgatgtaccagaggat

SEQ ID NO: 131093 - DNA, 25 bp, Saccharomyces pastorianus
ggaacctaagccttcagaaaattcg

SEQ ID NO: 131094 - DNA, 25 bp, Saccharomyces pastorianus
aagctagagcagaagaacagggtga

SEQ ID NO: 131095 - DNA, 25 bp, Saccharomyces pastorianus
aagatctgatgaagacgatcaggat

SEQ ID NO: 131096 - DNA, 25 bp, Saccharomyces pastorianus
ggttttccacatcgaaaagatctga

SEQ ID NO: 131097 - DNA, 25 bp, Saccharomyces pastorianus
ccatgttccagaatattttcccacc

SEQ ID NO: 131098 - DNA, 25 bp, Saccharomyces pastorianus
ttccatgttccagaatattttccca

SEQ ID NO: 131099 - DNA, 25 bp, Saccharomyces pastorianus
tgttaaatgggttttccacatcgaa

SEQ ID NO: 131100 - DNA, 25 bp, Saccharomyces pastorianus
tgggttttccacatcgaaaagatct

SEQ ID NO: 131101 - DNA, 25 bp, Saccharomyces pastorianus
tttccacatcgaaaagatctgatga

SEQ ID NO: 131102 - DNA, 25 bp, Saccharomyces pastorianus
agtgttaaatgggttttccacatcg

SEQ ID NO: 131103 - DNA, 25 bp, Saccharomyces pastorianus
taaatgggttttccacatcgaaaag

SEQ ID NO: 131104 - DNA, 25 bp, Saccharomyces pastorianus
catgttccagaatattttcccacct

SEQ ID NO: 131105 - DNA, 25 bp, Saccharomyces pastorianus
aatgggttttccacatcgaaaagat

SEQ ID NO: 131106 - DNA, 25 bp, Saccharomyces pastorianus
ttacttttcaagtattggactattc

SEQ ID NO: 131107 - DNA, 25 bp, Saccharomyces pastorianus
agtgccgaatttgcatcgaaaagaa

SEQ ID NO: 131108 - DNA, 25 bp, Saccharomyces pastorianus
gatgatgtattaaatcctccattgc

SEQ ID NO: 131109 - DNA, 25 bp, Saccharomyces pastorianus
aaagatagctagaactccacaaggt

SEQ ID NO: 131110 - DNA, 25 bp, Saccharomyces pastorianus
tagaactccacaaggtcctactgtt

SEQ ID NO: 131111 - DNA, 25 bp, Saccharomyces pastorianus
caaggtcctactgttacttttcaag

SEQ ID NO: 131112 - DNA, 25 bp, Saccharomyces pastorianus
catcttttcatgttcactcaatctg

SEQ ID NO: 131113 - DNA, 25 bp, Saccharomyces pastorianus
ttaggcgcctatacatcagaatctg

SEQ ID NO: 131114 - DNA, 25 bp, Saccharomyces pastorianus
taatctaagtaaaacagtgccgaat

SEQ ID NO: 131115 - DNA, 25 bp, Saccharomyces pastorianus
gcgccactattttattgacattcga

SEQ ID NO: 131116 - DNA, 25 bp, Saccharomyces pastorianus
gggaaatttctatgcgccactattt

SEQ ID NO: 131117 - DNA, 25 bp, Saccharomyces pastorianus
actggtttcacaaaagggcgcaaat

SEQ ID NO: 131118 - DNA, 25 bp, Saccharomyces pastorianus
gcttgtgtgttttccattataagtg

SEQ ID NO: 131119 - DNA, 25 bp, Saccharomyces pastorianus
tagtgtacaagatatcgcctaatac

SEQ ID NO: 131120 - DNA, 25 bp, Saccharomyces pastorianus
ggcgcaaatgactgcagcccagaag

SEQ ID NO: 131121 - DNA, 25 bp, Saccharomyces pastorianus
taatgcaattaaggagtgcccgatt

SEQ ID NO: 131122 - DNA, 25 bp, Saccharomyces pastorianus
aagtgtattaagaactggtttcaca

SEQ ID NO: 131123 - DNA, 25 bp, Saccharomyces pastorianus
ggaaatggacatgcttttgttaaaa

SEQ ID NO: 131124 - DNA, 25 bp, Saccharomyces pastorianus
tcgcctaatacaacagataatgcaa

SEQ ID NO: 131125 - DNA, 25 bp, Saccharomyces pastorianus
gcccagaagggaaatggacatgctt

SEQ ID NO: 131126 - DNA, 25 bp, Saccharomyces pastorianus
gttttgagaatatggaacccggtga

SEQ ID NO: 131127 - DNA, 25 bp, Saccharomyces pastorianus
gactagaatgcttgtgtgttttcca

SEQ ID NO: 131128 - DNA, 25 bp, Saccharomyces pastorianus
gatggaatctcgacttaggcgaagt

SEQ ID NO: 131129 - DNA, 25 bp, Saccharomyces pastorianus
tgaagatccggttaaggcacttaat

SEQ ID NO: 131130 - DNA, 25 bp, Saccharomyces pastorianus
tcacgcatcaactctataacattct

SEQ ID NO: 131131 - DNA, 25 bp, Saccharomyces pastorianus
ggcactacttggtgtatcgttgcga

SEQ ID NO: 131132 - DNA, 25 bp, Saccharomyces pastorianus
aaacggactcacttaggcactactt

SEQ ID NO: 131133 - DNA, 25 bp, Saccharomyces pastorianus
ataacattcttagactcttctgaaa

SEQ ID NO: 131134 - DNA, 25 bp, Saccharomyces pastorianus
aggcgtttggtttgtgttcccatga

SEQ ID NO: 131135 - DNA, 25 bp, Saccharomyces pastorianus
gaaaggtaagccctctctagagaat

SEQ ID NO: 131136 - DNA, 25 bp, Saccharomyces pastorianus
ttgtgttcccatgaagatccggtta

SEQ ID NO: 131137 - DNA, 25 bp, Saccharomyces pastorianus
cgaagtgttagatgattctgaccta

SEQ ID NO: 131138 - DNA, 25 bp, Saccharomyces pastorianus
gatactatcgtggaggcgtttggtt

SEQ ID NO: 131139 - DNA, 25 bp, Saccharomyces pastorianus
atgatcgtatttcgtcgctttccta

SEQ ID NO: 131140 - DNA, 25 bp, Saccharomyces pastorianus
gacaaccggcatccaggagtctttt

SEQ ID NO: 131141 - DNA, 25 bp, Saccharomyces pastorianus
ataacagcagccacattgatgatga

SEQ ID NO: 131142 - DNA, 25 bp, Saccharomyces pastorianus
ggcgatcattatcttttacatctta

SEQ ID NO: 131143 - DNA, 25 bp, Saccharomyces pastorianus
tgttggaatcacaaaggcgatcatt

SEQ ID NO: 131144 - DNA, 25 bp, Saccharomyces pastorianus
ttggccaaagagaggttcgaagaac

SEQ ID NO: 131145 - DNA, 25 bp, Saccharomyces pastorianus
ttttacatcacattcgacaaccggc

SEQ ID NO: 131146 - DNA, 25 bp, Saccharomyces pastorianus
cgaagaacaactgaggtcacctaat

SEQ ID NO: 131147 - DNA, 25 bp, Saccharomyces pastorianus
tttcctacgtgccttttacatcaca

SEQ ID NO: 131148 - DNA, 25 bp, Saccharomyces pastorianus
ccaggagtcttttgttggaatcaca

SEQ ID NO: 131149 - DNA, 25 bp, Saccharomyces pastorianus
atagcaatagagtcattcgtaagca

SEQ ID NO: 131150 - DNA, 25 bp, Saccharomyces pastorianus
gacgatattcatgattttagtcaaa

SEQ ID NO: 131151 - DNA, 25 bp, Saccharomyces pastorianus
ctcggttctttggatgatttggaat

SEQ ID NO: 131152 - DNA, 25 bp, Saccharomyces pastorianus
agtttcatgttcaatattggacgat

SEQ ID NO: 131153 - DNA, 25 bp, Saccharomyces pastorianus
aatgggaaattgcattgctcggttc

SEQ ID NO: 131154 - DNA, 25 bp, Saccharomyces pastorianus
aaattgcattgctcggttctttgga

SEQ ID NO: 131155 - DNA, 25 bp, Saccharomyces pastorianus
tggtttcgttttttgtgaaggatat

SEQ ID NO: 131156 - DNA, 25 bp, Saccharomyces pastorianus
ttgcattgctcggttctttggatga

SEQ ID NO: 131157 - DNA, 25 bp, Saccharomyces pastorianus
ggatattaaggtcgagttgtttgta

SEQ ID NO: 131158 - DNA, 25 bp, Saccharomyces pastorianus
attggacgatattcatgattttagt

SEQ ID NO: 131159 - DNA, 25 bp, Saccharomyces pastorianus
gcattgctcggttctttggatgatt

SEQ ID NO: 131160 - DNA, 25 bp, Saccharomyces pastorianus
tgctcggttctttggatgatttgga

SEQ ID NO: 131161 - DNA, 25 bp, Saccharomyces pastorianus
gaaaaacctcactatgtattgttga

SEQ ID NO: 131162 - DNA, 25 bp, Saccharomyces pastorianus
ggtataacatttttccctcttgtgg

SEQ ID NO: 131163 - DNA, 25 bp, Saccharomyces pastorianus
ttcagtgaacggacatcccaatttg

SEQ ID NO: 131164 - DNA, 25 bp, Saccharomyces pastorianus
atcccgagtttcattgatgtccaag

SEQ ID NO: 131165 - DNA, 25 bp, Saccharomyces pastorianus
atctcatgatgacgcctatttattt

SEQ ID NO: 131166 - DNA, 25 bp, Saccharomyces pastorianus
tcttgtggaccctattgaccttaaa

SEQ ID NO: 131167 - DNA, 25 bp, Saccharomyces pastorianus
gttcaagcatacaatcccgagtttc

SEQ ID NO: 131168 - DNA, 25 bp, Saccharomyces pastorianus
aatgctgggaatacgactggaagtc

SEQ ID NO: 131169 - DNA, 25 bp, Saccharomyces pastorianus
acagacattctaacgtcaccttcaa

SEQ ID NO: 131170 - DNA, 25 bp, Saccharomyces pastorianus
gttcagcaccaaatgtttgatcctg

SEQ ID NO: 131171 - DNA, 25 bp, Saccharomyces pastorianus
tcgaatagttggttcctgttcaagc

SEQ ID NO: 131172 - DNA, 25 bp, Saccharomyces pastorianus
gtattttttcacacgaacggcacaa

SEQ ID NO: 131173 - DNA, 25 bp, Saccharomyces pastorianus
atgagagtcctgttatccttcactg

SEQ ID NO: 131174 - DNA, 25 bp, Saccharomyces pastorianus
gtcttcaaacacatttcttcaacaa

SEQ ID NO: 131175 - DNA, 25 bp, Saccharomyces pastorianus
tatccttcactgtcttcaaacacat

SEQ ID NO: 131176 - DNA, 25 bp, Saccharomyces pastorianus
tttttcatcgagtattttttcacac

SEQ ID NO: 131177 - DNA, 25 bp, Saccharomyces pastorianus
aacggcacaagtagccttcaactgt

SEQ ID NO: 131178 - DNA, 25 bp, Saccharomyces pastorianus
gatacccttccaaaagtgcgatgag

SEQ ID NO: 131179 - DNA, 25 bp, Saccharomyces pastorianus
gtgcgatgagagtcctgttatcctt

SEQ ID NO: 131180 - DNA, 25 bp, Saccharomyces pastorianus
ttcaacaaagtcatcgtcatcatct

SEQ ID NO: 131181 - DNA, 25 bp, Saccharomyces pastorianus
gaatcgcttttcatgatacccttcc

SEQ ID NO: 131182 - DNA, 25 bp, Saccharomyces pastorianus
gtagtgatttcaactgaatcgcttt

SEQ ID NO: 131183 - DNA, 25 bp, Saccharomyces pastorianus
gatgactcattgaatagcctgaagg

SEQ ID NO: 131184 - DNA, 25 bp, Saccharomyces pastorianus
aatcctaccgttgaagtcgcttccg

SEQ ID NO: 131185 - DNA, 25 bp, Saccharomyces pastorianus
attgcactcaagaatacataccgtt

SEQ ID NO: 131186 - DNA, 25 bp, Saccharomyces pastorianus
gtggagactgccaaggattctgaaa

SEQ ID NO: 131187 - DNA, 25 bp, Saccharomyces pastorianus
tagcttccgctgcatacataaacga

SEQ ID NO: 131188 - DNA, 25 bp, Saccharomyces pastorianus
attcgatcaagatagcttccgctgc

SEQ ID NO: 131189 - DNA, 25 bp, Saccharomyces pastorianus
aagtaattgatagtctcctgcccat

SEQ ID NO: 131190 - DNA, 25 bp, Saccharomyces pastorianus
caaagctaccttattgagtccacaa

SEQ ID NO: 131191 - DNA, 25 bp, Saccharomyces pastorianus
gacagctcttaagtgtagaacctca

SEQ ID NO: 131192 - DNA, 25 bp, Saccharomyces pastorianus
attggaggagatcgtcacacttaat

SEQ ID NO: 131193 - DNA, 25 bp, Saccharomyces pastorianus
gcttccggcaattttgaacccagag

SEQ ID NO: 131194 - DNA, 25 bp, Saccharomyces pastorianus
acgctgctgatataactgatggaaa

SEQ ID NO: 131195 - DNA, 25 bp, Saccharomyces pastorianus
ttcaagacacgtcaactgtagcaaa

SEQ ID NO: 131196 - DNA, 25 bp, Saccharomyces pastorianus
atgacaccatagaacacgctgctga

SEQ ID NO: 131197 - DNA, 25 bp, Saccharomyces pastorianus
tgagaacaacactgcgaatgaccaa

SEQ ID NO: 131198 - DNA, 25 bp, Saccharomyces pastorianus
gatgtgctcaaaatatacgctcaaa

SEQ ID NO: 131199 - DNA, 25 bp, Saccharomyces pastorianus
tgtaagttttgttttacctgacgag

SEQ ID NO: 131200 - DNA, 25 bp, Saccharomyces pastorianus
tcttgagtattctgacgatattgca

SEQ ID NO: 131201 - DNA, 25 bp, Saccharomyces pastorianus
gtgcagcttacattcttgatcgatg

SEQ ID NO: 131202 - DNA, 25 bp, Saccharomyces pastorianus
gaatgaccaatactcgtctattttg

SEQ ID NO: 131203 - DNA, 25 bp, Saccharomyces pastorianus
aacgctatatttctttcttctgaac

SEQ ID NO: 131204 - DNA, 25 bp, Saccharomyces pastorianus
gaagcggagcaaattgacacatcca

SEQ ID NO: 131205 - DNA, 25 bp, Saccharomyces pastorianus
gacactttgatcacaccagcggtta

SEQ ID NO: 131206 - DNA, 25 bp, Saccharomyces pastorianus
ggaagcgtcctcagcaacaattgtt

SEQ ID NO: 131207 - DNA, 25 bp, Saccharomyces pastorianus
atcgcagaaatgagacttccgtcga

SEQ ID NO: 131208 - DNA, 25 bp, Saccharomyces pastorianus
gaaccttggtttatgttgtctcttg

SEQ ID NO: 131209 - DNA, 25 bp, Saccharomyces pastorianus
tcatccttccattctgctgtagaaa

SEQ ID NO: 131210 - DNA, 25 bp, Saccharomyces pastorianus
catcttaggtatgtgcgtttcgaaa

SEQ ID NO: 131211 - DNA, 25 bp, Saccharomyces pastorianus
aaacggcaacgtatctgagagtgac

SEQ ID NO: 131212 - DNA, 25 bp, Saccharomyces pastorianus
agacgacaatatttcatccttccat

SEQ ID NO: 131213 - DNA, 25 bp, Saccharomyces pastorianus
attgcgtcgttgatggacactttga

SEQ ID NO: 131214 - DNA, 25 bp, Saccharomyces pastorianus
ataccgcgccaaatattagggagct

SEQ ID NO: 131215 - DNA, 25 bp, Saccharomyces pastorianus
gttctctgtcttacaaggtcatcat

SEQ ID NO: 131216 - DNA, 25 bp, Saccharomyces pastorianus
gaacatccagattattactccagga

SEQ ID NO: 131217 - DNA, 25 bp, Saccharomyces pastorianus
tatttgcttgattttcttctttaga

SEQ ID NO: 131218 - DNA, 25 bp, Saccharomyces pastorianus
ttttttccgctttctcaatgttaca

SEQ ID NO: 131219 - DNA, 25 bp, Saccharomyces pastorianus
gaaatcatcaccatccactatcaag

SEQ ID NO: 131220 - DNA, 25 bp, Saccharomyces pastorianus
ggaaccgttcaaaatagtgtcttgt

SEQ ID NO: 131221 - DNA, 25 bp, Saccharomyces pastorianus
agtgtcttgtccaatcatattaagg

SEQ ID NO: 131222 - DNA, 25 bp, Saccharomyces pastorianus
aaaaatcaccgaattgcagctgcaa

SEQ ID NO: 131223 - DNA, 25 bp, Saccharomyces pastorianus
aatattataaaagatgcccgccgta

SEQ ID NO: 131224 - DNA, 25 bp, Saccharomyces pastorianus
agggtctcatatgggactggttgat

SEQ ID NO: 131225 - DNA, 25 bp, Saccharomyces pastorianus
gatgcccgccgtaaagactcgaata

SEQ ID NO: 131226 - DNA, 25 bp, Saccharomyces pastorianus
tagtcaccgatacggagggtctcat

SEQ ID NO: 131227 - DNA, 25 bp, Saccharomyces pastorianus
tgaacgaatacctggccactctgga

SEQ ID NO: 131228 - DNA, 25 bp, Saccharomyces pastorianus
caaatggcagttttcgctatgtcga

SEQ ID NO: 131229 - DNA, 25 bp, Saccharomyces pastorianus
tcgatgatctgagcgccagcgtata

SEQ ID NO: 131230 - DNA, 25 bp, Saccharomyces pastorianus
acgcttgacgcggatgctttaacaa

SEQ ID NO: 131231 - DNA, 25 bp, Saccharomyces pastorianus
ggattctgtgcagccgctcgatgat

SEQ ID NO: 131232 - DNA, 25 bp, Saccharomyces pastorianus
aatgcttcaaacaactgccgggtct

SEQ ID NO: 131233 - DNA, 25 bp, Saccharomyces pastorianus
ctcgtctcacgaacatattccggaa

SEQ ID NO: 131234 - DNA, 25 bp, Saccharomyces pastorianus
ctcacgtctattttgcttcctaaag

SEQ ID NO: 131235 - DNA, 25 bp, Saccharomyces pastorianus
gaatttgacggcatacacccaagag

SEQ ID NO: 131236 - DNA, 25 bp, Saccharomyces pastorianus
ttcccatagcggcagcgtgaacgaa

SEQ ID NO: 131237 - DNA, 25 bp, Saccharomyces pastorianus
aggagtttcttctgtcacagacgct

SEQ ID NO: 131238 - DNA, 25 bp, Saccharomyces pastorianus
gaaccggatccattcagtaccattg

SEQ ID NO: 131239 - DNA, 25 bp, Saccharomyces pastorianus
ggttttgccgattcaagattcacac

SEQ ID NO: 131240 - DNA, 25 bp, Saccharomyces pastorianus
agtttttggcctcattttcgctaga

SEQ ID NO: 131241 - DNA, 25 bp, Saccharomyces pastorianus
attgaagccagggtgcatccagaac

SEQ ID NO: 131242 - DNA, 25 bp, Saccharomyces pastorianus
gaacctcttcctaaagtggatccaa

SEQ ID NO: 131243 - DNA, 25 bp, Saccharomyces pastorianus
tagggttgttcccattccggagcaa

SEQ ID NO: 131244 - DNA, 25 bp, Saccharomyces pastorianus
aaattcgtaccggtgatggctccag

SEQ ID NO: 131245 - DNA, 25 bp, Saccharomyces pastorianus
attttcgctagatccaaaggtccct

SEQ ID NO: 131246 - DNA, 25 bp, Saccharomyces pastorianus
tgatggctccagactagttcgtaga

SEQ ID NO: 131247 - DNA, 25 bp, Saccharomyces pastorianus
gatgatttgccccatatcgcgatac

SEQ ID NO: 131248 - DNA, 25 bp, Saccharomyces pastorianus
taaacatgaccatagcggacgccgg

SEQ ID NO: 131249 - DNA, 25 bp, Saccharomyces pastorianus
tatccgtgggtgaaatttgcctcaa

SEQ ID NO: 131250 - DNA, 25 bp, Saccharomyces pastorianus
aatacgcggactatgttccaaaaag

SEQ ID NO: 131251 - DNA, 25 bp, Saccharomyces pastorianus
aatgcaataccaggcaatatctagt

SEQ ID NO: 131252 - DNA, 25 bp, Saccharomyces pastorianus
ataactcatatccatctggcaagga

SEQ ID NO: 131253 - DNA, 25 bp, Saccharomyces pastorianus
ttgccagcagtttggcacctgtcta

SEQ ID NO: 131254 - DNA, 25 bp, Saccharomyces pastorianus
atgtatcgacaattaccgtgtttta

SEQ ID NO: 131255 - DNA, 25 bp, Saccharomyces pastorianus
cttccaacttaatctttgccagcag

SEQ ID NO: 131256 - DNA, 25 bp, Saccharomyces pastorianus
ggagctgttgatgaactcacaatat

SEQ ID NO: 131257 - DNA, 25 bp, Saccharomyces pastorianus
ggagacaaacagttcctacgtcaaa

SEQ ID NO: 131258 - DNA, 25 bp, Saccharomyces pastorianus
gacgaaaggagatgcttccaactta

SEQ ID NO: 131259 - DNA, 25 bp, Saccharomyces pastorianus
tgtctacccgttgaaatcattgtta

SEQ ID NO: 131260 - DNA, 25 bp, Saccharomyces pastorianus
tcacaggagggagctggccttacaa

SEQ ID NO: 131261 - DNA, 25 bp, Saccharomyces pastorianus
tcagacgttgattagaagactccat

SEQ ID NO: 131262 - DNA, 25 bp, Saccharomyces pastorianus
acatcattctgtggctaattcttat

SEQ ID NO: 131263 - DNA, 25 bp, Saccharomyces pastorianus
tattccccgacttaaaggttcacat

SEQ ID NO: 131264 - DNA, 25 bp, Saccharomyces pastorianus
acgtgattgttgcatctgttcagac

SEQ ID NO: 131265 - DNA, 25 bp, Saccharomyces pastorianus
agcactgcagatgacttccagctgg

SEQ ID NO: 131266 - DNA, 25 bp, Saccharomyces pastorianus
gaggcaaaattcacgtcagtcaaaa

SEQ ID NO: 131267 - DNA, 25 bp, Saccharomyces pastorianus
ttaaatcgttgatcctggttcacag

SEQ ID NO: 131268 - DNA, 25 bp, Saccharomyces pastorianus
attggtgtatcattagccactggtg

SEQ ID NO: 131269 - DNA, 25 bp, Saccharomyces pastorianus
attggctttagtgcgactttcgaaa

SEQ ID NO: 131270 - DNA, 25 bp, Saccharomyces pastorianus
aaatccctgttattggctttagtgc

SEQ ID NO: 131271 - DNA, 25 bp, Saccharomyces pastorianus
ttgacgtattaccaccaatgcctac

SEQ ID NO: 131272 - DNA, 25 bp, Saccharomyces pastorianus
gaggagtcttctgtaatggctgcaa

SEQ ID NO: 131273 - DNA, 25 bp, Saccharomyces pastorianus
taacaacttgcaatcacctttcttt

SEQ ID NO: 131274 - DNA, 25 bp, Saccharomyces pastorianus
gcaattccatcatttatctggtctg

SEQ ID NO: 131275 - DNA, 25 bp, Saccharomyces pastorianus
aatgagatgagttccgcccgcaatg

SEQ ID NO: 131276 - DNA, 25 bp, Saccharomyces pastorianus
agcatcatcctttacaactgtcaga

SEQ ID NO: 131277 - DNA, 25 bp, Saccharomyces pastorianus
taaaggcatatatggcccgcttccc

SEQ ID NO: 131278 - DNA, 25 bp, Saccharomyces pastorianus
ttatccattgatggccattcggcag

SEQ ID NO: 131279 - DNA, 25 bp, Saccharomyces pastorianus
ggatttagctgtccttcaggcagaa

SEQ ID NO: 131280 - DNA, 25 bp, Saccharomyces pastorianus
ttcgccatactatctgaggagtctt

SEQ ID NO: 131281 - DNA, 25 bp, Saccharomyces pastorianus
aaactcttgggcgatcatgcgctaa

SEQ ID NO: 131282 - DNA, 25 bp, Saccharomyces pastorianus
taccgccgaggctgcaaaagacaag

SEQ ID NO: 131283 - DNA, 25 bp, Saccharomyces pastorianus
agattggcacctaatggccccggaa

SEQ ID NO: 131284 - DNA, 25 bp, Saccharomyces pastorianus
ttgattcgatgacatccacacctgt

SEQ ID NO: 131285 - DNA, 25 bp, Saccharomyces pastorianus
aaagttccccatttcatgtttgagg

SEQ ID NO: 131286 - DNA, 25 bp, Saccharomyces pastorianus
tgagctctctatgaaacttttaagt

SEQ ID NO: 131287 - DNA, 25 bp, Saccharomyces pastorianus
agtgatccgggcttcacaaagttcc

SEQ ID NO: 131288 - DNA, 25 bp, Saccharomyces pastorianus
gaaggtttcttcacggcatctgaac

SEQ ID NO: 131289 - DNA, 25 bp, Saccharomyces pastorianus
gaggaagcatctagccaaccttgga

SEQ ID NO: 131290 - DNA, 25 bp, Saccharomyces pastorianus
ggaatgcacccgcaacatttgaagt

SEQ ID NO: 131291 - DNA, 25 bp, Saccharomyces pastorianus
gacgatatatctccagagtctcttg

SEQ ID NO: 131292 - DNA, 25 bp, Saccharomyces pastorianus
gaggcattcttgcaaattttttcaa

SEQ ID NO: 131293 - DNA, 25 bp, Saccharomyces pastorianus
aatgtggaccatgcaggcgatgaga

SEQ ID NO: 131294 - DNA, 25 bp, Saccharomyces pastorianus
gagacatgctggatgatccgaacat

SEQ ID NO: 131295 - DNA, 25 bp, Saccharomyces pastorianus
ctgttgctaaatgtgctgtgtaata

SEQ ID NO: 131296 - DNA, 25 bp, Saccharomyces pastorianus
gactctgtgcaaagaatatccctct

SEQ ID NO: 131297 - DNA, 25 bp, Saccharomyces pastorianus
aggattctttccatgaggcactata

SEQ ID NO: 131298 - DNA, 25 bp, Saccharomyces pastorianus
agaatatccctctgctagagcgttc

SEQ ID NO: 131299 - DNA, 25 bp, Saccharomyces pastorianus
aaatgctgcttaacctcagtcctta

SEQ ID NO: 131300 - DNA, 25 bp, Saccharomyces pastorianus
gagcgttcctttttgagatatctaa

SEQ ID NO: 131301 - DNA, 25 bp, Saccharomyces pastorianus
gattgggttaaatccaccagtggga

SEQ ID NO: 131302 - DNA, 25 bp, Saccharomyces pastorianus
gtccttaatcaaaacaacacggtgg

SEQ ID NO: 131303 - DNA, 25 bp, Saccharomyces pastorianus
gaggcactatatgttttcactgtga

SEQ ID NO: 131304 - DNA, 25 bp, Saccharomyces pastorianus
cccgacttactactgaactctattg

SEQ ID NO: 131305 - DNA, 25 bp, Saccharomyces pastorianus
taccttttggacgaatcgcccgact

SEQ ID NO: 131306 - DNA, 25 bp, Saccharomyces pastorianus
gctatgtcagaaatggtcctcgcat

SEQ ID NO: 131307 - DNA, 25 bp, Saccharomyces pastorianus
catgcccgcatttttgcctaaatta

SEQ ID NO: 131308 - DNA, 25 bp, Saccharomyces pastorianus
gtgccatatcatcacttggtagtgt

SEQ ID NO: 131309 - DNA, 25 bp, Saccharomyces pastorianus
gactccgtaggacacatcattaggt

SEQ ID NO: 131310 - DNA, 25 bp, Saccharomyces pastorianus
ggacatgaacccagttccaactgac

SEQ ID NO: 131311 - DNA, 25 bp, Saccharomyces pastorianus
atgcaaaccttacgagacttcgccg

SEQ ID NO: 131312 - DNA, 25 bp, Saccharomyces pastorianus
agccctggcgtttcaacacatggat

SEQ ID NO: 131313 - DNA, 25 bp, Saccharomyces pastorianus
aagattttgggaggccggagcttca

SEQ ID NO: 131314 - DNA, 25 bp, Saccharomyces pastorianus
tgaaatcctggacctgctgctatgt

SEQ ID NO: 131315 - DNA, 25 bp, Saccharomyces pastorianus
aaatggctgtagaactcgcacgtaa

SEQ ID NO: 131316 - DNA, 25 bp, Saccharomyces pastorianus
aaactaggattgaatgatgcggcca

SEQ ID NO: 131317 - DNA, 25 bp, Saccharomyces pastorianus
gtccaagcagcttgcatgactgttc

SEQ ID NO: 131318 - DNA, 25 bp, Saccharomyces pastorianus
gtaaggattttgctaacaccagaaa

SEQ ID NO: 131319 - DNA, 25 bp, Saccharomyces pastorianus
gatgcggccataacggatgaattca

SEQ ID NO: 131320 - DNA, 25 bp, Saccharomyces pastorianus
gaattcaatatggacaggcgttaca

SEQ ID NO: 131321 - DNA, 25 bp, Saccharomyces pastorianus
tactggctccagtgaagtccaagca

SEQ ID NO: 131322 - DNA, 25 bp, Saccharomyces pastorianus
ggaactccgagaataaaaatgccat

SEQ ID NO: 131323 - DNA, 25 bp, Saccharomyces pastorianus
gagaggttcccaggcgatactggct

SEQ ID NO: 131324 - DNA, 25 bp, Saccharomyces pastorianus
tggcaaaccatattaaagagcatcg

SEQ ID NO: 131325 - DNA, 25 bp, Saccharomyces pastorianus
gatattagtccagcaaaggcaggca

SEQ ID NO: 131326 - DNA, 25 bp, Saccharomyces pastorianus
ctatgtcctctgtttatgggcaaaa

SEQ ID NO: 131327 - DNA, 25 bp, Saccharomyces pastorianus
aaagagcctttagttctatcgaaag

SEQ ID NO: 131328 - DNA, 25 bp, Saccharomyces pastorianus
gccattgagtctgctaagcgtgaaa

SEQ ID NO: 131329 - DNA, 25 bp, Saccharomyces pastorianus
gacaagttccttgcagccattgagt

SEQ ID NO: 131330 - DNA, 25 bp, Saccharomyces pastorianus
ggacactccctttataacacgtatt

SEQ ID NO: 131331 - DNA, 25 bp, Saccharomyces pastorianus
ggaaggaatgctattctgaatctaa

SEQ ID NO: 131332 - DNA, 25 bp, Saccharomyces pastorianus
aagccactttgaaagcgtcaaccga

SEQ ID NO: 131333 - DNA, 25 bp, Saccharomyces pastorianus
aaaagatcgtttgtatcctctccgg

SEQ ID NO: 131334 - DNA, 25 bp, Saccharomyces pastorianus
atcctctccggttagcaatagtgca

SEQ ID NO: 131335 - DNA, 25 bp, Saccharomyces pastorianus
gataaggttgatccagttctgggcc

SEQ ID NO: 131336 - DNA, 25 bp, Saccharomyces pastorianus
gaatttcactatgtcctctgtttat

SEQ ID NO: 131337 - DNA, 25 bp, Saccharomyces pastorianus
tgcccttggtgggtattgtgcaaaa

SEQ ID NO: 131338 - DNA, 25 bp, Saccharomyces pastorianus
gctgcattgctctatatgatcccat

SEQ ID NO: 131339 - DNA, 25 bp, Saccharomyces pastorianus
tattacgtattatttcccgattggg

SEQ ID NO: 131340 - DNA, 25 bp, Saccharomyces pastorianus
aatttcgactcgcttaatgccgttg

SEQ ID NO: 131341 - DNA, 25 bp, Saccharomyces pastorianus
ggacgtaatctaatcgccaacattt

SEQ ID NO: 131342 - DNA, 25 bp, Saccharomyces pastorianus
aaaagaaccgatttcgcgcacatct

SEQ ID NO: 131343 - DNA, 25 bp, Saccharomyces pastorianus
gggtcaaggcatgcaatctctagga

SEQ ID NO: 131344 - DNA, 25 bp, Saccharomyces pastorianus
tagcagctcagtcggcagtatctac

SEQ ID NO: 131345 - DNA, 25 bp, Saccharomyces pastorianus
tatctatttggaattcccctggctc

SEQ ID NO: 131346 - DNA, 25 bp, Saccharomyces pastorianus
gcacatctcttctcaagttgggttg

SEQ ID NO: 131347 - DNA, 25 bp, Saccharomyces pastorianus
tggctctcatcctaagttggttctt

SEQ ID NO: 131348 - DNA, 25 bp, Saccharomyces pastorianus
gagctttcgccacaagatgttgatt

SEQ ID NO: 131349 - DNA, 25 bp, Saccharomyces pastorianus
gatactcatcggtatgcaactctga

SEQ ID NO: 131350 - DNA, 25 bp, Saccharomyces pastorianus
ggaggatatcgctaggcttcctacc

SEQ ID NO: 131351 - DNA, 25 bp, Saccharomyces pastorianus
gtatctgtgactagccgaggctcag

SEQ ID NO: 131352 - DNA, 25 bp, Saccharomyces pastorianus
taaaggcacctcacatcacagaaga

SEQ ID NO: 131353 - DNA, 25 bp, Saccharomyces pastorianus
gaacgatttctctaccatcaagggt

SEQ ID NO: 131354 - DNA, 25 bp, Saccharomyces pastorianus
gaggcactagcagaattggctcaca

SEQ ID NO: 131355 - DNA, 25 bp, Saccharomyces pastorianus
ggaacctgacctttactatcatgat

SEQ ID NO: 131356 - DNA, 25 bp, Saccharomyces pastorianus
gctcagttcccacaatttaccaaga

SEQ ID NO: 131357 - DNA, 25 bp, Saccharomyces pastorianus
tatcagaaactcctgagctttcgcc

SEQ ID NO: 131358 - DNA, 25 bp, Saccharomyces pastorianus
cgtccatgaaccaaatccgtactta

SEQ ID NO: 131359 - DNA, 25 bp, Saccharomyces pastorianus
ggaataaaaattcgctatcgtctgt

SEQ ID NO: 131360 - DNA, 25 bp, Saccharomyces pastorianus
aaaaattcgctatcgtctgtcaact

SEQ ID NO: 131361 - DNA, 25 bp, Saccharomyces pastorianus
aaattcgctatcgtctgtcaactaa

SEQ ID NO: 131362 - DNA, 25 bp, Saccharomyces pastorianus
attcgctatcgtctgtcaactaata

SEQ ID NO: 131363 - DNA, 25 bp, Saccharomyces pastorianus
aataaaaattcgctatcgtctgtca

SEQ ID NO: 131364 - DNA, 25 bp, Saccharomyces pastorianus
ttcgctatcgtctgtcaactaatag

SEQ ID NO: 131365 - DNA, 25 bp, Saccharomyces pastorianus
aaaattcgctatcgtctgtcaacta

SEQ ID NO: 131366 - DNA, 25 bp, Saccharomyces pastorianus
aattcgctatcgtctgtcaactaat

SEQ ID NO: 131367 - DNA, 25 bp, Saccharomyces pastorianus
aaatctatattttcttgattaggaa

SEQ ID NO: 131368 - DNA, 25 bp, Saccharomyces pastorianus
ataaaaattcgctatcgtctgtcaa

SEQ ID NO: 131369 - DNA, 25 bp, Saccharomyces pastorianus
aaatcatggaaagaagtgttggaat

SEQ ID NO: 131370 - DNA, 25 bp, Saccharomyces pastorianus
gctaggccaataccccgatgttttg

SEQ ID NO: 131371 - DNA, 25 bp, Saccharomyces pastorianus
aatgcaatcaaaacccacgagccaa

SEQ ID NO: 131372 - DNA, 25 bp, Saccharomyces pastorianus
ttcaaattgactcaccaggtttctt

SEQ ID NO: 131373 - DNA, 25 bp, Saccharomyces pastorianus
agcttgtcaactttggtatggtcca

SEQ ID NO: 131374 - DNA, 25 bp, Saccharomyces pastorianus
aaggtactgttgtcttcttagataa

SEQ ID NO: 131375 - DNA, 25 bp, Saccharomyces pastorianus
actgttgattagactgctaggccaa

SEQ ID NO: 131376 - DNA, 25 bp, Saccharomyces pastorianus
gtgacactggtccataccttcaata

SEQ ID NO: 131377 - DNA, 25 bp, Saccharomyces pastorianus
gtctggctctatatggtgctgcaag

SEQ ID NO: 131378 - DNA, 25 bp, Saccharomyces pastorianus
gaacctgccgcaaaactgttgatta

SEQ ID NO: 131379 - DNA, 25 bp, Saccharomyces pastorianus
gagccaacaaccgtggtcacatatt

SEQ ID NO: 131380 - DNA, 25 bp, Saccharomyces pastorianus
gaaatgcttctggtatcacccaaga

SEQ ID NO: 131381 - DNA, 25 bp, Saccharomyces pastorianus
tgtggagggtccgttgaacaaccta

SEQ ID NO: 131382 - DNA, 25 bp, Saccharomyces pastorianus
ttgttaaaaacatcgtctctggtgt

SEQ ID NO: 131383 - DNA, 25 bp, Saccharomyces pastorianus
gttgctggtactaagccatttatat

SEQ ID NO: 131384 - DNA, 25 bp, Saccharomyces pastorianus
cattccgaaaagtatccgcggtgtt

SEQ ID NO: 131385 - DNA, 25 bp, Saccharomyces pastorianus
gatgggcgaaattccaagttttgtt

SEQ ID NO: 131386 - DNA, 25 bp, Saccharomyces pastorianus
atgctgatccaaaaagctcaacttt

SEQ ID NO: 131387 - DNA, 25 bp, Saccharomyces pastorianus
tatgccaacactaaaatttctgctg

SEQ ID NO: 131388 - DNA, 25 bp, Saccharomyces pastorianus
aacaatcttgttgagcacttaaact

SEQ ID NO: 131389 - DNA, 25 bp, Saccharomyces pastorianus
cgcggtgttgatggagttcactaca

SEQ ID NO: 131390 - DNA, 25 bp, Saccharomyces pastorianus
ggaccgaagtaacattcatttctga

SEQ ID NO: 131391 - DNA, 25 bp, Saccharomyces pastorianus
gaatgggactgaacaagctttacaa

SEQ ID NO: 131392 - DNA, 25 bp, Saccharomyces pastorianus
gacattaataatggccttccaaggc

SEQ ID NO: 131393 - DNA, 25 bp, Saccharomyces pastorianus
ggccttccaaggcatgaagcctcat

SEQ ID NO: 131394 - DNA, 25 bp, Saccharomyces pastorianus
aagaagttattccagaatctgatga

SEQ ID NO: 131395 - DNA, 25 bp, Saccharomyces pastorianus
atgaagcctcatcacgcagctaagg

SEQ ID NO: 131396 - DNA, 25 bp, Saccharomyces pastorianus
agaggaagaccctgcgatttcgaca

SEQ ID NO: 131397 - DNA, 25 bp, Saccharomyces pastorianus
agaccctgcgatttcgacattaata

SEQ ID NO: 131398 - DNA, 25 bp, Saccharomyces pastorianus
gatcgtacgattacttttaaagagg

SEQ ID NO: 131399 - DNA, 25 bp, Saccharomyces pastorianus
gaaatcacctatgaagatcgtacga

SEQ ID NO: 131400 - DNA, 25 bp, Saccharomyces pastorianus
gaagaagtcgaaatcacctatgaag

SEQ ID NO: 131401 - DNA, 25 bp, Saccharomyces pastorianus
atgaagaagaatcctcagctgatga

SEQ ID NO: 131402 - DNA, 25 bp, Saccharomyces pastorianus
atgaagagtctggtgattctgagga

SEQ ID NO: 131403 - DNA, 25 bp, Saccharomyces pastorianus
ccttcaacttctctacatctggagt

SEQ ID NO: 131404 - DNA, 25 bp, Saccharomyces pastorianus
gcaagacggcagctcgacaaacgtg

SEQ ID NO: 131405 - DNA, 25 bp, Saccharomyces pastorianus
aatacgtacaatgcgggaactccct

SEQ ID NO: 131406 - DNA, 25 bp, Saccharomyces pastorianus
gcagctctaatttcttcatttgggt

SEQ ID NO: 131407 - DNA, 25 bp, Saccharomyces pastorianus
agaggcgctacttcagacccctgat

SEQ ID NO: 131408 - DNA, 25 bp, Saccharomyces pastorianus
gacaaacgtgccatgcgcaacgaaa

SEQ ID NO: 131409 - DNA, 25 bp, Saccharomyces pastorianus
aagattctgagatgactgccaagca

SEQ ID NO: 131410 - DNA, 25 bp, Saccharomyces pastorianus
attgaccactggcaacgaacgtttg

SEQ ID NO: 131411 - DNA, 25 bp, Saccharomyces pastorianus
acgaacgtttgcaagcagctctaat

SEQ ID NO: 131412 - DNA, 25 bp, Saccharomyces pastorianus
aatcttgctatatcaggcgacgggt

SEQ ID NO: 131413 - DNA, 25 bp, Saccharomyces pastorianus
gaggtttcatatatcccgcttttag

SEQ ID NO: 131414 - DNA, 25 bp, Saccharomyces pastorianus
tttactggtgctcgcgctattagaa

SEQ ID NO: 131415 - DNA, 25 bp, Saccharomyces pastorianus
ggctgttttctactgaaggattaca

SEQ ID NO: 131416 - DNA, 25 bp, Saccharomyces pastorianus
acctgaaagaaggtgctcctctgaa

SEQ ID NO: 131417 - DNA, 25 bp, Saccharomyces pastorianus
aaagggctgttttctactgaaggat

SEQ ID NO: 131418 - DNA, 25 bp, Saccharomyces pastorianus
agtactctactaggtatgcactcga

SEQ ID NO: 131419 - DNA, 25 bp, Saccharomyces pastorianus
atgcttcgctttactggtgctcgcg

SEQ ID NO: 131420 - DNA, 25 bp, Saccharomyces pastorianus
aaggtgctcctctgaaagggctgtt

SEQ ID NO: 131421 - DNA, 25 bp, Saccharomyces pastorianus
gctcctctgaaagggctgttttcta

SEQ ID NO: 131422 - DNA, 25 bp, Saccharomyces pastorianus
tactaggtatgcactcgagcacctg

SEQ ID NO: 131423 - DNA, 25 bp, Saccharomyces pastorianus
ggtatgcactcgagcacctgaaaga

SEQ ID NO: 131424 - DNA, 25 bp, Saccharomyces pastorianus
tgctcgcgctattagaaagtactct

SEQ ID NO: 131425 - DNA, 25 bp, Saccharomyces pastorianus
ttcatgggccagttactgcgggatt

SEQ ID NO: 131426 - DNA, 25 bp, Saccharomyces pastorianus
tttcgacggccaagatgatcacaat

SEQ ID NO: 131427 - DNA, 25 bp, Saccharomyces pastorianus
tatactactgatttcgacggccaag

SEQ ID NO: 131428 - DNA, 25 bp, Saccharomyces pastorianus
agatgtttatttgggtgtgcgctac

SEQ ID NO: 131429 - DNA, 25 bp, Saccharomyces pastorianus
aaaagcccattcctatcataatcgt

SEQ ID NO: 131430 - DNA, 25 bp, Saccharomyces pastorianus
tcctcagctgccattagaaacgaca

SEQ ID NO: 131431 - DNA, 25 bp, Saccharomyces pastorianus
ctgcgggattaggttctagtacatt

SEQ ID NO: 131432 - DNA, 25 bp, Saccharomyces pastorianus
gaggatccggtgatagcaatgcccc

SEQ ID NO: 131433 - DNA, 25 bp, Saccharomyces pastorianus
gggtgtgcgctacaatgagcccaat

SEQ ID NO: 131434 - DNA, 25 bp, Saccharomyces pastorianus
tcaacgattaggtctcggaggatcc

SEQ ID NO: 131435 - DNA, 25 bp, Saccharomyces pastorianus
ataagtcactttctcaacgattagg

SEQ ID NO: 131436 - DNA, 25 bp, Saccharomyces pastorianus
aagaatcctttcctagacgatgtga

SEQ ID NO: 131437 - DNA, 25 bp, Saccharomyces pastorianus
ataacccgtttagaaatgccacagt

SEQ ID NO: 131438 - DNA, 25 bp, Saccharomyces pastorianus
gaggatgaaccccagcgaaacgcag

SEQ ID NO: 131439 - DNA, 25 bp, Saccharomyces pastorianus
cagcagggtgctttttattctggtt

SEQ ID NO: 131440 - DNA, 25 bp, Saccharomyces pastorianus
taggccattttctgttaataacccg

SEQ ID NO: 131441 - DNA, 25 bp, Saccharomyces pastorianus
aacagtagtacctctagtaggccat

SEQ ID NO: 131442 - DNA, 25 bp, Saccharomyces pastorianus
gagacctctttcctcaaagaatcct

SEQ ID NO: 131443 - DNA, 25 bp, Saccharomyces pastorianus
gacgatgtgagttctgcaaccgatt

SEQ ID NO: 131444 - DNA, 25 bp, Saccharomyces pastorianus
attatcattcccaaacattccagag

SEQ ID NO: 131445 - DNA, 25 bp, Saccharomyces pastorianus
aaaccaatctcgtaccaattcattt

SEQ ID NO: 131446 - DNA, 25 bp, Saccharomyces pastorianus
ggtagtttatcaccaccttcgagac

SEQ ID NO: 131447 - DNA, 25 bp, Saccharomyces pastorianus
gataagcatttttgtattccactgt

SEQ ID NO: 131448 - DNA, 25 bp, Saccharomyces pastorianus
aactgatcaatcttttgggactttg

SEQ ID NO: 131449 - DNA, 25 bp, Saccharomyces pastorianus
gtaattatcgttcataatggccaaa

SEQ ID NO: 131450 - DNA, 25 bp, Saccharomyces pastorianus
gtattgttaaactaccacttcggat

SEQ ID NO: 131451 - DNA, 25 bp, Saccharomyces pastorianus
aatcccagaggaattgttgcccatc

SEQ ID NO: 131452 - DNA, 25 bp, Saccharomyces pastorianus
tattccactgtatacggaggatagt

SEQ ID NO: 131453 - DNA, 25 bp, Saccharomyces pastorianus
gatacagatgacgtgcttcagtgaa

SEQ ID NO: 131454 - DNA, 25 bp, Saccharomyces pastorianus
gacttgatgctattactgcaactga

SEQ ID NO: 131455 - DNA, 25 bp, Saccharomyces pastorianus
ggtgatgagatgctattctaccatt

SEQ ID NO: 131456 - DNA, 25 bp, Saccharomyces pastorianus
gaattgttgcccatcttttacgaaa

SEQ ID NO: 131457 - DNA, 25 bp, Saccharomyces pastorianus
acatgggaaatggtcaacttgatac

SEQ ID NO: 131458 - DNA, 25 bp, Saccharomyces pastorianus
agatattttcttcatcgcactcaaa

SEQ ID NO: 131459 - DNA, 25 bp, Saccharomyces pastorianus
aataataatccacacgtacccacag

SEQ ID NO: 131460 - DNA, 25 bp, Saccharomyces pastorianus
ttccgttgtctaaatcccgatcagg

SEQ ID NO: 131461 - DNA, 25 bp, Saccharomyces pastorianus
atattggaacaagacgccctagctc

SEQ ID NO: 131462 - DNA, 25 bp, Saccharomyces pastorianus
gcattccatctcgtcaaaattcggt

SEQ ID NO: 131463 - DNA, 25 bp, Saccharomyces pastorianus
aattcggtgtcaactcctaaactct

SEQ ID NO: 131464 - DNA, 25 bp, Saccharomyces pastorianus
agtagggctgcctggatcgagcaat

SEQ ID NO: 131465 - DNA, 25 bp, Saccharomyces pastorianus
agccgaccgggatcaagactacaga

SEQ ID NO: 131466 - DNA, 25 bp, Saccharomyces pastorianus
agtagcactacaggttcgaacggaa

SEQ ID NO: 131467 - DNA, 25 bp, Saccharomyces pastorianus
gatggaggataactgcttcttcaaa

SEQ ID NO: 131468 - DNA, 25 bp, Saccharomyces pastorianus
gcaaaagttgcagccttccgttgtc

SEQ ID NO: 131469 - DNA, 25 bp, Saccharomyces pastorianus
catcgtgaatgagttgccctttata

SEQ ID NO: 131470 - DNA, 25 bp, Saccharomyces pastorianus
aaagtctacagacggcttatctccc

SEQ ID NO: 131471 - DNA, 25 bp, Saccharomyces pastorianus
ttttatcttggattggcgcttcctt

SEQ ID NO: 131472 - DNA, 25 bp, Saccharomyces pastorianus
taggcgcacgtatcccacaactaat

SEQ ID NO: 131473 - DNA, 25 bp, Saccharomyces pastorianus
aagaaggtccgccattacagcagcc

SEQ ID NO: 131474 - DNA, 25 bp, Saccharomyces pastorianus
gcatatccgctaaatgtaggctcca

SEQ ID NO: 131475 - DNA, 25 bp, Saccharomyces pastorianus
ttatctcccttcctatttgctacta

SEQ ID NO: 131476 - DNA, 25 bp, Saccharomyces pastorianus
agcagccttggctatagctcatact

SEQ ID NO: 131477 - DNA, 25 bp, Saccharomyces pastorianus
gctactacactactctgcaatatca

SEQ ID NO: 131478 - DNA, 25 bp, Saccharomyces pastorianus
ataagtacagctagcgcatatccgc

SEQ ID NO: 131479 - DNA, 25 bp, Saccharomyces pastorianus
cagccagctgggtacaattttatct

SEQ ID NO: 131480 - DNA, 25 bp, Saccharomyces pastorianus
ggcatctggcctactgtatctaatt

SEQ ID NO: 131481 - DNA, 25 bp, Saccharomyces pastorianus
atgtcgtgctcaaacggcatctggc

SEQ ID NO: 131482 - DNA, 25 bp, Saccharomyces pastorianus
acctctgttatttcattgtttccac

SEQ ID NO: 131483 - DNA, 25 bp, Saccharomyces pastorianus
tatctaatttgtgcggatcattatc

SEQ ID NO: 131484 - DNA, 25 bp, Saccharomyces pastorianus
aaatctgtcgatgggctatcgccat

SEQ ID NO: 131485 - DNA, 25 bp, Saccharomyces pastorianus
ttgtttccacaaataattgagactt

SEQ ID NO: 131486 - DNA, 25 bp, Saccharomyces pastorianus
gggcaaagctaacagggcaattgtt

SEQ ID NO: 131487 - DNA, 25 bp, Saccharomyces pastorianus
attatccttcttcacctctgttatt

SEQ ID NO: 131488 - DNA, 25 bp, Saccharomyces pastorianus
gcctactgtatctaatttgtgcgga

SEQ ID NO: 131489 - DNA, 25 bp, Saccharomyces pastorianus
tgggctatcgccatattttttgctg

SEQ ID NO: 131490 - DNA, 25 bp, Saccharomyces pastorianus
ccatattttttgctggcttggttat

SEQ ID NO: 131491 - DNA, 25 bp, Saccharomyces pastorianus
aaggtgagcacagtctaaacatttc

SEQ ID NO: 131492 - DNA, 25 bp, Saccharomyces pastorianus
gagtgaaatcacttctttacaagag

SEQ ID NO: 131493 - DNA, 25 bp, Saccharomyces pastorianus
gacccgtcgtttaagattggacaca

SEQ ID NO: 131494 - DNA, 25 bp, Saccharomyces pastorianus
tagtgcttgcttgtgtgaggatgaa

SEQ ID NO: 131495 - DNA, 25 bp, Saccharomyces pastorianus
atcatgactatgaatacccgcttag

SEQ ID NO: 131496 - DNA, 25 bp, Saccharomyces pastorianus
gaagaggtccctatttcgaacgccg

SEQ ID NO: 131497 - DNA, 25 bp, Saccharomyces pastorianus
attgctttttacaggagatcagacg

SEQ ID NO: 131498 - DNA, 25 bp, Saccharomyces pastorianus
gatcgtgattactacaatagccatg

SEQ ID NO: 131499 - DNA, 25 bp, Saccharomyces pastorianus
aaacatttcacttccagacgatgat

SEQ ID NO: 131500 - DNA, 25 bp, Saccharomyces pastorianus
ttcgaacgccgcttaagcttcaaaa

SEQ ID NO: 131501 - DNA, 25 bp, Saccharomyces pastorianus
aaacagttgcccttttagtgcttgc

SEQ ID NO: 131502 - DNA, 25 bp, Saccharomyces pastorianus
aatcaaagagactcccagttgggct

SEQ ID NO: 131503 - DNA, 25 bp, Saccharomyces pastorianus
taatggctcagctaactcaattgga

SEQ ID NO: 131504 - DNA, 25 bp, Saccharomyces pastorianus
aaacgcacagtgagtctaaaactat

SEQ ID NO: 131505 - DNA, 25 bp, Saccharomyces pastorianus
agactcccagttgggctcaagggaa

SEQ ID NO: 131506 - DNA, 25 bp, Saccharomyces pastorianus
atggttctcagtcttctgcaaaaga

SEQ ID NO: 131507 - DNA, 25 bp, Saccharomyces pastorianus
gtctgatgagatggatttacaacta

SEQ ID NO: 131508 - DNA, 25 bp, Saccharomyces pastorianus
ggatgaacggataactgatcttcaa

SEQ ID NO: 131509 - DNA, 25 bp, Saccharomyces pastorianus
tgagcttgaaaccaaattcagcgaa

SEQ ID NO: 131510 - DNA, 25 bp, Saccharomyces pastorianus
aagttagcatcattaatggctcagc

SEQ ID NO: 131511 - DNA, 25 bp, Saccharomyces pastorianus
aaaggttgcacaagagaagtactct

SEQ ID NO: 131512 - DNA, 25 bp, Saccharomyces pastorianus
attcagcgaaaatggttctcagtct

SEQ ID NO: 131513 - DNA, 25 bp, Saccharomyces pastorianus
acgagcgctggaggcaaatgttatg

SEQ ID NO: 131514 - DNA, 25 bp, Saccharomyces pastorianus
gcacggcattaatataacatgtaca

SEQ ID NO: 131515 - DNA, 25 bp, Saccharomyces pastorianus
tgcgcacggcattaatataacatgt

SEQ ID NO: 131516 - DNA, 25 bp, Saccharomyces pastorianus
tgaaacgagcgctggaggcaaatgt

SEQ ID NO: 131517 - DNA, 25 bp, Saccharomyces pastorianus
agcgctggaggcaaatgttatgcat

SEQ ID NO: 131518 - DNA, 25 bp, Saccharomyces pastorianus
gcgctggaggcaaatgttatgcatt

SEQ ID NO: 131519 - DNA, 25 bp, Saccharomyces pastorianus
ggaggcaaatgttatgcattttcta

SEQ ID NO: 131520 - DNA, 25 bp, Saccharomyces pastorianus
aaaatggaatgaaacgagcgctgga

SEQ ID NO: 131521 - DNA, 25 bp, Saccharomyces pastorianus
aaacgagcgctggaggcaaatgtta

SEQ ID NO: 131522 - DNA, 25 bp, Saccharomyces pastorianus
atgcgcacggcattaatataacatg

SEQ ID NO: 131523 - DNA, 25 bp, Saccharomyces pastorianus
gcaaatgttatgcattttctaatag

SEQ ID NO: 131524 - DNA, 25 bp, Saccharomyces pastorianus
gttcaagaattgttacaccacccca

SEQ ID NO: 131525 - DNA, 25 bp, Saccharomyces pastorianus
tcgcaaatctgcgtactttatacaa

SEQ ID NO: 131526 - DNA, 25 bp, Saccharomyces pastorianus
gattgtcttaggtatttccattcta

SEQ ID NO: 131527 - DNA, 25 bp, Saccharomyces pastorianus
ggttcaccttggaagacactgctaa

SEQ ID NO: 131528 - DNA, 25 bp, Saccharomyces pastorianus
ggtttaccacgcaatggttcacctt

SEQ ID NO: 131529 - DNA, 25 bp, Saccharomyces pastorianus
aagccaaacttgctggtattttcgc

SEQ ID NO: 131530 - DNA, 25 bp, Saccharomyces pastorianus
ttaatcgtattctcacaagggctgt

SEQ ID NO: 131531 - DNA, 25 bp, Saccharomyces pastorianus
aatcgataccatttccacttgtttt

SEQ ID NO: 131532 - DNA, 25 bp, Saccharomyces pastorianus
tttagcattgttcacgggtcatccg

SEQ ID NO: 131533 - DNA, 25 bp, Saccharomyces pastorianus
ccgctataccttgcagttgagattg

SEQ ID NO: 131534 - DNA, 25 bp, Saccharomyces pastorianus
ggtgtcattgatattcaggttctac

SEQ ID NO: 131535 - DNA, 25 bp, Saccharomyces pastorianus
agatatgtttgctttgacggagatg

SEQ ID NO: 131536 - DNA, 25 bp, Saccharomyces pastorianus
gcaactagtagatcacgtggctctt

SEQ ID NO: 131537 - DNA, 25 bp, Saccharomyces pastorianus
aataacggtgatggcgacgacgacg

SEQ ID NO: 131538 - DNA, 25 bp, Saccharomyces pastorianus
gaacttacggccaaacttgtcagaa

SEQ ID NO: 131539 - DNA, 25 bp, Saccharomyces pastorianus
ttcaggtactgcagccagcgttcaa

SEQ ID NO: 131540 - DNA, 25 bp, Saccharomyces pastorianus
ataatcgtaatctttttgtggtgaa

SEQ ID NO: 131541 - DNA, 25 bp, Saccharomyces pastorianus
ggtacgtccaaaatcaaaggcgcac

SEQ ID NO: 131542 - DNA, 25 bp, Saccharomyces pastorianus
gcagccagcgttcaaccactaaaaa

SEQ ID NO: 131543 - DNA, 25 bp, Saccharomyces pastorianus
tagacacagtagaagcgcaactagt

SEQ ID NO: 131544 - DNA, 25 bp, Saccharomyces pastorianus
gaaatgcagcctttttaatcactag

SEQ ID NO: 131545 - DNA, 25 bp, Saccharomyces pastorianus
ttctttttctcgttgttcaggtact

SEQ ID NO: 131546 - DNA, 25 bp, Saccharomyces pastorianus
aatactcttcttcccacatctaaaa

SEQ ID NO: 131547 - DNA, 25 bp, Saccharomyces pastorianus
gacacaattcaggacgatgctttct

SEQ ID NO: 131548 - DNA, 25 bp, Saccharomyces pastorianus
atttactattaatgcctcggacgtt

SEQ ID NO: 131549 - DNA, 25 bp, Saccharomyces pastorianus
aagtgaaccacgtctatcatctctc

SEQ ID NO: 131550 - DNA, 25 bp, Saccharomyces pastorianus
gaactgggtacaactcctattcgta

SEQ ID NO: 131551 - DNA, 25 bp, Saccharomyces pastorianus
attcctcctcatttgacacaattca

SEQ ID NO: 131552 - DNA, 25 bp, Saccharomyces pastorianus
tgctttctgaatatggtatctccac

SEQ ID NO: 131553 - DNA, 25 bp, Saccharomyces pastorianus
atctctcctgcggacgttcaatata

SEQ ID NO: 131554 - DNA, 25 bp, Saccharomyces pastorianus
tgaagtctggaacattcctcctcat

SEQ ID NO: 131555 - DNA, 25 bp, Saccharomyces pastorianus
gatattcccgctaatctgatgatta

SEQ ID NO: 131556 - DNA, 25 bp, Saccharomyces pastorianus
tgcccttgttagtactatacccatg

SEQ ID NO: 131557 - DNA, 25 bp, Saccharomyces pastorianus
ggatggcgtcacatcttctgaagaa

SEQ ID NO: 131558 - DNA, 25 bp, Saccharomyces pastorianus
tactggaagatattgacgcggcgtt

SEQ ID NO: 131559 - DNA, 25 bp, Saccharomyces pastorianus
gcccagttgcaaggacttttcgtta

SEQ ID NO: 131560 - DNA, 25 bp, Saccharomyces pastorianus
aagatgcaccacacgatgcgttgaa

SEQ ID NO: 131561 - DNA, 25 bp, Saccharomyces pastorianus
gaacggcaaatggtactctgacagg

SEQ ID NO: 131562 - DNA, 25 bp, Saccharomyces pastorianus
gctttatccaggctttagcgggcga

SEQ ID NO: 131563 - DNA, 25 bp, Saccharomyces pastorianus
tagcggtttactgaatgccctggat

SEQ ID NO: 131564 - DNA, 25 bp, Saccharomyces pastorianus
ttggatatcaccgtaagtaccgccc

SEQ ID NO: 131565 - DNA, 25 bp, Saccharomyces pastorianus
gaacaaggttttcattctagcgtaa

SEQ ID NO: 131566 - DNA, 25 bp, Saccharomyces pastorianus
gtaacgcaactccataccaggtaga

SEQ ID NO: 131567 - DNA, 25 bp, Saccharomyces pastorianus
tcccggatctggtaagactagcttt

SEQ ID NO: 131568 - DNA, 25 bp, Saccharomyces pastorianus
ggcggaaacgctccaagaccagtaa

SEQ ID NO: 131569 - DNA, 25 bp, Saccharomyces pastorianus
aaaagctgctatggcaaaatcccaa

SEQ ID NO: 131570 - DNA, 25 bp, Saccharomyces pastorianus
gagacttaacctaatcgttgatcca

SEQ ID NO: 131571 - DNA, 25 bp, Saccharomyces pastorianus
ccgacaggatcaaggctatgccaca

SEQ ID NO: 131572 - DNA, 25 bp, Saccharomyces pastorianus
atttaacggctctccaatcgatgga

SEQ ID NO: 131573 - DNA, 25 bp, Saccharomyces pastorianus
tgatccaaaccaacgcccagtcaaa

SEQ ID NO: 131574 - DNA, 25 bp, Saccharomyces pastorianus
gcccagtcaaaagtttagccgacag

SEQ ID NO: 131575 - DNA, 25 bp, Saccharomyces pastorianus
tccaatcgatggaggcagatcaaga

SEQ ID NO: 131576 - DNA, 25 bp, Saccharomyces pastorianus
gaaaagcctgcaaagaaaagtctag

SEQ ID NO: 131577 - DNA, 25 bp, Saccharomyces pastorianus
gctgttgaaagatttaacggctctc

SEQ ID NO: 131578 - DNA, 25 bp, Saccharomyces pastorianus
aaacggtgaattggccagaagggct

SEQ ID NO: 131579 - DNA, 25 bp, Saccharomyces pastorianus
gtagccaacgtaggagccttccaaa

SEQ ID NO: 131580 - DNA, 25 bp, Saccharomyces pastorianus
gacgaaatcattggctctaacaaag

SEQ ID NO: 131581 - DNA, 25 bp, Saccharomyces pastorianus
aaatactagggcacctccaaacgca

SEQ ID NO: 131582 - DNA, 25 bp, Saccharomyces pastorianus
ggcacctccaaacgcagtcgctaga

SEQ ID NO: 131583 - DNA, 25 bp, Saccharomyces pastorianus
actagagaggtcaaggtcaacgtcg

SEQ ID NO: 131584 - DNA, 25 bp, Saccharomyces pastorianus
gttggtagccaacgtaggagccttc

SEQ ID NO: 131585 - DNA, 25 bp, Saccharomyces pastorianus
gaagaggccctatcagaaaaaatac

SEQ ID NO: 131586 - DNA, 25 bp, Saccharomyces pastorianus
gtggtactcgtggtaacggtccaag

SEQ ID NO: 131587 - DNA, 25 bp, Saccharomyces pastorianus
aagctcttggacaccactagagagg

SEQ ID NO: 131588 - DNA, 25 bp, Saccharomyces pastorianus
aggaagtaatagagcccgtgtcggt

SEQ ID NO: 131589 - DNA, 25 bp, Saccharomyces pastorianus
gagccttccaaacagaagaggccct

SEQ ID NO: 131590 - DNA, 25 bp, Saccharomyces pastorianus
cattggtccactttaggttctgacc

SEQ ID NO: 131591 - DNA, 25 bp, Saccharomyces pastorianus
tttcgaccattggtccactttaggt

SEQ ID NO: 131592 - DNA, 25 bp, Saccharomyces pastorianus
cgaccattggtccactttaggttct

SEQ ID NO: 131593 - DNA, 25 bp, Saccharomyces pastorianus
gttttcgaccattggtccactttag

SEQ ID NO: 131594 - DNA, 25 bp, Saccharomyces pastorianus
ttggtccactttaggttctgaccca

SEQ ID NO: 131595 - DNA, 25 bp, Saccharomyces pastorianus
tccactttaggttctgacccattgg

SEQ ID NO: 131596 - DNA, 25 bp, Saccharomyces pastorianus
ccattggtccactttaggttctgac

SEQ ID NO: 131597 - DNA, 25 bp, Saccharomyces pastorianus
gtccactttaggttctgacccattg

SEQ ID NO: 131598 - DNA, 25 bp, Saccharomyces pastorianus
accattggtccactttaggttctga

SEQ ID NO: 131599 - DNA, 25 bp, Saccharomyces pastorianus
gaccattggtccactttaggttctg

SEQ ID NO: 131600 - DNA, 25 bp, Saccharomyces pastorianus
tggtccactttaggttctgacccat

SEQ ID NO: 131601 - DNA, 25 bp, Saccharomyces pastorianus
gcacctggtgcgaagaaaattacta

SEQ ID NO: 131602 - DNA, 25 bp, Saccharomyces pastorianus
ccgcgctttgggtcattttagtgta

SEQ ID NO: 131603 - DNA, 25 bp, Saccharomyces pastorianus
atgtactgggagatgcacctggtgc

SEQ ID NO: 131604 - DNA, 25 bp, Saccharomyces pastorianus
ggcatataaaacgtgctcctcggaa

SEQ ID NO: 131605 - DNA, 25 bp, Saccharomyces pastorianus
gaatgaggccctaaagaccgcgctt

SEQ ID NO: 131606 - DNA, 25 bp, Saccharomyces pastorianus
tagttatatttccaagtgaccttaa

SEQ ID NO: 131607 - DNA, 25 bp, Saccharomyces pastorianus
agagaaatctggctgtgaacacaaa

SEQ ID NO: 131608 - DNA, 25 bp, Saccharomyces pastorianus
gacggttggtgagctaactatacat

SEQ ID NO: 131609 - DNA, 25 bp, Saccharomyces pastorianus
gcgttgcatactgtaatttctcatc

SEQ ID NO: 131610 - DNA, 25 bp, Saccharomyces pastorianus
aaggcggtattgaatgctgtcataa

SEQ ID NO: 131611 - DNA, 25 bp, Saccharomyces pastorianus
aggtgcttctacagtttcgtcgaga

SEQ ID NO: 131612 - DNA, 25 bp, Saccharomyces pastorianus
cagcatatgcttctgcgatgggcag

SEQ ID NO: 131613 - DNA, 25 bp, Saccharomyces pastorianus
ttctttgcagtgtaggtttcggtca

SEQ ID NO: 131614 - DNA, 25 bp, Saccharomyces pastorianus
gtgcctggtttttcgtatatttttg

SEQ ID NO: 131615 - DNA, 25 bp, Saccharomyces pastorianus
gggcatcatgtatagcctgcacaaa

SEQ ID NO: 131616 - DNA, 25 bp, Saccharomyces pastorianus
gatgggcagcgttccatggacttgt

SEQ ID NO: 131617 - DNA, 25 bp, Saccharomyces pastorianus
atattcacttttttcgccatgtaca

SEQ ID NO: 131618 - DNA, 25 bp, Saccharomyces pastorianus
ttgtgtggaatttctccccttgaac

SEQ ID NO: 131619 - DNA, 25 bp, Saccharomyces pastorianus
catgtacaccatggactctttggga

SEQ ID NO: 131620 - DNA, 25 bp, Saccharomyces pastorianus
tgcctccaattttgattgcctcaac

SEQ ID NO: 131621 - DNA, 25 bp, Saccharomyces pastorianus
atctgagcactattaacaccattgg

SEQ ID NO: 131622 - DNA, 25 bp, Saccharomyces pastorianus
gcaaatcactggctttaatgctttt

SEQ ID NO: 131623 - DNA, 25 bp, Saccharomyces pastorianus
gattgcgtcccttatgacagagatt

SEQ ID NO: 131624 - DNA, 25 bp, Saccharomyces pastorianus
gttcaatttttatcctagctgcaat

SEQ ID NO: 131625 - DNA, 25 bp, Saccharomyces pastorianus
gtgggcttttattcggctatgatac

SEQ ID NO: 131626 - DNA, 25 bp, Saccharomyces pastorianus
gatatttgttcgcactttctgctat

SEQ ID NO: 131627 - DNA, 25 bp, Saccharomyces pastorianus
gcgtccctctatctctgagtgaaat

SEQ ID NO: 131628 - DNA, 25 bp, Saccharomyces pastorianus
tttttggctctattctggcatttcc

SEQ ID NO: 131629 - DNA, 25 bp, Saccharomyces pastorianus
tgataacttccagtacaagcgtcgg

SEQ ID NO: 131630 - DNA, 25 bp, Saccharomyces pastorianus
ggatcgctgttggagtgtctgccca

SEQ ID NO: 131631 - DNA, 25 bp, Saccharomyces pastorianus
gaagaattactctcgcaatctgctg

SEQ ID NO: 131632 - DNA, 25 bp, Saccharomyces pastorianus
caagcgtcggatcattttttggctc

SEQ ID NO: 131633 - DNA, 25 bp, Saccharomyces pastorianus
attggtttcctatgtgattgcgtcc

SEQ ID NO: 131634 - DNA, 25 bp, Saccharomyces pastorianus
gtaccaattcgtcctttaacactag

SEQ ID NO: 131635 - DNA, 25 bp, Saccharomyces pastorianus
agtctccatttagcgtacactcagg

SEQ ID NO: 131636 - DNA, 25 bp, Saccharomyces pastorianus
gacctatttcaatgatcctgaccag

SEQ ID NO: 131637 - DNA, 25 bp, Saccharomyces pastorianus
atgttgatccatacggtcagtctcc

SEQ ID NO: 131638 - DNA, 25 bp, Saccharomyces pastorianus
tcaaaatcgtttggttctactccgg

SEQ ID NO: 131639 - DNA, 25 bp, Saccharomyces pastorianus
agcattatctgccaattcctcgaat

SEQ ID NO: 131640 - DNA, 25 bp, Saccharomyces pastorianus
accggagaactcatcagacctacag

SEQ ID NO: 131641 - DNA, 25 bp, Saccharomyces pastorianus
tacactcaggttctttgcccaaaca

SEQ ID NO: 131642 - DNA, 25 bp, Saccharomyces pastorianus
gacaatggcgacttaactgctactg

SEQ ID NO: 131643 - DNA, 25 bp, Saccharomyces pastorianus
gacgttatcgccaatatctacttcg

SEQ ID NO: 131644 - DNA, 25 bp, Saccharomyces pastorianus
gttcctccggatgttattgctagta

SEQ ID NO: 131645 - DNA, 25 bp, Saccharomyces pastorianus
tgtcatcagagagtatcagtgtccc

SEQ ID NO: 131646 - DNA, 25 bp, Saccharomyces pastorianus
ttggtgtcactttagctgaatcgtt

SEQ ID NO: 131647 - DNA, 25 bp, Saccharomyces pastorianus
acgactttaaagaggcctccgctgt

SEQ ID NO: 131648 - DNA, 25 bp, Saccharomyces pastorianus
gctgtcttcgagaccatactcatat

SEQ ID NO: 131649 - DNA, 25 bp, Saccharomyces pastorianus
tcacgtcccaagtttttggaaacag

SEQ ID NO: 131650 - DNA, 25 bp, Saccharomyces pastorianus
gtagcagcaacaacactaatgcggg

SEQ ID NO: 131651 - DNA, 25 bp, Saccharomyces pastorianus
agaaatggcttcactggcagagttt

SEQ ID NO: 131652 - DNA, 25 bp, Saccharomyces pastorianus
aggtcaccaacttcactttccagaa

SEQ ID NO: 131653 - DNA, 25 bp, Saccharomyces pastorianus
catcgccccacgcagagtttaaaaa

SEQ ID NO: 131654 - DNA, 25 bp, Saccharomyces pastorianus
gaaatccttctccaaatccgcaaaa

SEQ ID NO: 131655 - DNA, 25 bp, Saccharomyces pastorianus
actttccagaagtgcccaaccaacg

SEQ ID NO: 131656 - DNA, 25 bp, Saccharomyces pastorianus
tctcttgcatccttggtaaacatca

SEQ ID NO: 131657 - DNA, 25 bp, Saccharomyces pastorianus
gccatttcggaagccatcgaggaca

SEQ ID NO: 131658 - DNA, 25 bp, Saccharomyces pastorianus
gatcattatgaattctatgccggag

SEQ ID NO: 131659 - DNA, 25 bp, Saccharomyces pastorianus
gccggagttgatgatgatttctctt

SEQ ID NO: 131660 - DNA, 25 bp, Saccharomyces pastorianus
taaacatcaaatcctggtccagtat

SEQ ID NO: 131661 - DNA, 25 bp, Saccharomyces pastorianus
tcgttgtccgccatttcggaagcca

SEQ ID NO: 131662 - DNA, 25 bp, Saccharomyces pastorianus
agccatcgaggacaggatcattatg

SEQ ID NO: 131663 - DNA, 25 bp, Saccharomyces pastorianus
aattctatgccggagttgatgatga

SEQ ID NO: 131664 - DNA, 25 bp, Saccharomyces pastorianus
ggtaaacatcaaatcctggtccagt

SEQ ID NO: 131665 - DNA, 25 bp, Saccharomyces pastorianus
gttttcttagcctcgttgtccgcca

SEQ ID NO: 131666 - DNA, 25 bp, Saccharomyces pastorianus
tgatttctcttgcatccttggtaaa

SEQ ID NO: 131667 - DNA, 25 bp, Saccharomyces pastorianus
tcagctgctggtcaactccatgaga

SEQ ID NO: 131668 - DNA, 25 bp, Saccharomyces pastorianus
atgtagtttctgtgcggtatccacc

SEQ ID NO: 131669 - DNA, 25 bp, Saccharomyces pastorianus
gagtgtcacccctaacttatatgat

SEQ ID NO: 131670 - DNA, 25 bp, Saccharomyces pastorianus
accacctgcggtgactatatggcat

SEQ ID NO: 131671 - DNA, 25 bp, Saccharomyces pastorianus
gaacaggctacttgagtgacccgtc

SEQ ID NO: 131672 - DNA, 25 bp, Saccharomyces pastorianus
gttcacgatggcattatctttctgt

SEQ ID NO: 131673 - DNA, 25 bp, Saccharomyces pastorianus
gtgttatggctacccctaaggctat

SEQ ID NO: 131674 - DNA, 25 bp, Saccharomyces pastorianus
ggttggattttatgcgaacgcctca

SEQ ID NO: 131675 - DNA, 25 bp, Saccharomyces pastorianus
ggccactttcagttctcattattac

SEQ ID NO: 131676 - DNA, 25 bp, Saccharomyces pastorianus
gccttctacgtctacattggttcga

SEQ ID NO: 131677 - DNA, 25 bp, Saccharomyces pastorianus
gttattttctattgccttctacgtc

SEQ ID NO: 131678 - DNA, 25 bp, Saccharomyces pastorianus
gctgcatctttatactaccaattta

SEQ ID NO: 131679 - DNA, 25 bp, Saccharomyces pastorianus
gctgacagaagtttacaggactaca

SEQ ID NO: 131680 - DNA, 25 bp, Saccharomyces pastorianus
gaacataaaccttttgctgcatctt

SEQ ID NO: 131681 - DNA, 25 bp, Saccharomyces pastorianus
cacttttttcaaggctgacagaagt

SEQ ID NO: 131682 - DNA, 25 bp, Saccharomyces pastorianus
gccaaactgtatatttcggcgattt

SEQ ID NO: 131683 - DNA, 25 bp, Saccharomyces pastorianus
aggagctcacaaatgtccacctgat

SEQ ID NO: 131684 - DNA, 25 bp, Saccharomyces pastorianus
tggttctcacgctacgcaagattat

SEQ ID NO: 131685 - DNA, 25 bp, Saccharomyces pastorianus
tgaagggtgcaaaactatgatcgat

SEQ ID NO: 131686 - DNA, 25 bp, Saccharomyces pastorianus
gaaaagaatttaccaggcaggtcaa

SEQ ID NO: 131687 - DNA, 25 bp, Saccharomyces pastorianus
ttagaggttgtaggtgccgctcctg

SEQ ID NO: 131688 - DNA, 25 bp, Saccharomyces pastorianus
tggttaccattcgtttgttccaaca

SEQ ID NO: 131689 - DNA, 25 bp, Saccharomyces pastorianus
acgagtttagcgtttgcatctccaa

SEQ ID NO: 131690 - DNA, 25 bp, Saccharomyces pastorianus
aacagagccgactagtacatgtaga

SEQ ID NO: 131691 - DNA, 25 bp, Saccharomyces pastorianus
gtaacaggttcggtggatttcaata

SEQ ID NO: 131692 - DNA, 25 bp, Saccharomyces pastorianus
ggtctacacgatataccccgggaga

SEQ ID NO: 131693 - DNA, 25 bp, Saccharomyces pastorianus
gtgcagctattgcttgatgagccaa

SEQ ID NO: 131694 - DNA, 25 bp, Saccharomyces pastorianus
gtttgatcacaagatggtctacacg

SEQ ID NO: 131695 - DNA, 25 bp, Saccharomyces pastorianus
tggtgtcgcgaacatatcatttcaa

SEQ ID NO: 131696 - DNA, 25 bp, Saccharomyces pastorianus
gagattattttacggagtgcagcta

SEQ ID NO: 131697 - DNA, 25 bp, Saccharomyces pastorianus
ggacatcgtgattttcgacagcaag

SEQ ID NO: 131698 - DNA, 25 bp, Saccharomyces pastorianus
tggaaattaaccacagaccaatctg

SEQ ID NO: 131699 - DNA, 25 bp, Saccharomyces pastorianus
aagaatctatccaggccgacaattt

SEQ ID NO: 131700 - DNA, 25 bp, Saccharomyces pastorianus
gatagcatggcatcctgactacagg

SEQ ID NO: 131701 - DNA, 25 bp, Saccharomyces pastorianus
aattaccaacgagtctatcacaagt

SEQ ID NO: 131702 - DNA, 25 bp, Saccharomyces pastorianus
tgctcttttggcgactccgaataag

SEQ ID NO: 131703 - DNA, 25 bp, Saccharomyces pastorianus
gcggaagtttatcgccttttgggat

SEQ ID NO: 131704 - DNA, 25 bp, Saccharomyces pastorianus
ttattgggatcccttcattctgagg

SEQ ID NO: 131705 - DNA, 25 bp, Saccharomyces pastorianus
tagtgaccccacttcaaacgaaatc

SEQ ID NO: 131706 - DNA, 25 bp, Saccharomyces pastorianus
atgatccgtctcaatctacttggtt

SEQ ID NO: 131707 - DNA, 25 bp, Saccharomyces pastorianus
gattgctgatggttgctcttttggc

SEQ ID NO: 131708 - DNA, 25 bp, Saccharomyces pastorianus
aaaatatactctactatggcggaag

SEQ ID NO: 131709 - DNA, 25 bp, Saccharomyces pastorianus
gatgttagcagccttgaaagcctag

SEQ ID NO: 131710 - DNA, 25 bp, Saccharomyces pastorianus
gataccatcatagaactcctcaaca

SEQ ID NO: 131711 - DNA, 25 bp, Saccharomyces pastorianus
ctttttgctgaggttctggtggcta

SEQ ID NO: 131712 - DNA, 25 bp, Saccharomyces pastorianus
ggttctggtggctatgggtatattt

SEQ ID NO: 131713 - DNA, 25 bp, Saccharomyces pastorianus
gcgattctctttgactttttgctga

SEQ ID NO: 131714 - DNA, 25 bp, Saccharomyces pastorianus
gcgactacatttttttccaaggcga

SEQ ID NO: 131715 - DNA, 25 bp, Saccharomyces pastorianus
tggctatgggtatatttatcgcaga

SEQ ID NO: 131716 - DNA, 25 bp, Saccharomyces pastorianus
gcagaatctgaaattagttgccgca

SEQ ID NO: 131717 - DNA, 25 bp, Saccharomyces pastorianus
agaggcatatgggtcgttttcaaat

SEQ ID NO: 131718 - DNA, 25 bp, Saccharomyces pastorianus
gtatcattcggcgattctctttgac

SEQ ID NO: 131719 - DNA, 25 bp, Saccharomyces pastorianus
tttccaaggcgaaatgcagtatttc

SEQ ID NO: 131720 - DNA, 25 bp, Saccharomyces pastorianus
gcatatgggtcgttttcaaattgga

SEQ ID NO: 131721 - DNA, 25 bp, Saccharomyces pastorianus
tagttgccgcagatagcgactacat

SEQ ID NO: 131722 - DNA, 25 bp, Saccharomyces pastorianus
gaataccgtttactgcacgaagcaa

SEQ ID NO: 131723 - DNA, 25 bp, Saccharomyces pastorianus
acagttgtaatcttcccattctttt

SEQ ID NO: 131724 - DNA, 25 bp, Saccharomyces pastorianus
tttaatctctgacacgttgacatcg

SEQ ID NO: 131725 - DNA, 25 bp, Saccharomyces pastorianus
gccactgtgttcctttttgagttca

SEQ ID NO: 131726 - DNA, 25 bp, Saccharomyces pastorianus
acattttgatctatccgtagccctt

SEQ ID NO: 131727 - DNA, 25 bp, Saccharomyces pastorianus
attattataccgttccactttgcca

SEQ ID NO: 131728 - DNA, 25 bp, Saccharomyces pastorianus
cattcttttttgcacctggagatca

SEQ ID NO: 131729 - DNA, 25 bp, Saccharomyces pastorianus
gtcattggactcgttaacctcttta

SEQ ID NO: 131730 - DNA, 25 bp, Saccharomyces pastorianus
gatgtttgttgatagaatcctcccc

SEQ ID NO: 131731 - DNA, 25 bp, Saccharomyces pastorianus
agcccttcttcctgtactggtaaga

SEQ ID NO: 131732 - DNA, 25 bp, Saccharomyces pastorianus
agacttcacattgtttacctctcta

SEQ ID NO: 131733 - DNA, 25 bp, Saccharomyces pastorianus
aagcttcttccttcatccagaaata

SEQ ID NO: 131734 - DNA, 25 bp, Saccharomyces pastorianus
tgcctatggtgcaaagcttcttcct

SEQ ID NO: 131735 - DNA, 25 bp, Saccharomyces pastorianus
gttagtgtgagcacgcacctcgaaa

SEQ ID NO: 131736 - DNA, 25 bp, Saccharomyces pastorianus
aactcgcatactcttaaccaatcaa

SEQ ID NO: 131737 - DNA, 25 bp, Saccharomyces pastorianus
aggccgaatctactttgggaccatc

SEQ ID NO: 131738 - DNA, 25 bp, Saccharomyces pastorianus
aacattaacttcgtggcggcagcaa

SEQ ID NO: 131739 - DNA, 25 bp, Saccharomyces pastorianus
ttgattcagctagcgttagccatga

SEQ ID NO: 131740 - DNA, 25 bp, Saccharomyces pastorianus
aaccaatcaacctcttcatattcga

SEQ ID NO: 131741 - DNA, 25 bp, Saccharomyces pastorianus
gaatgtgtatttccaaggccgaatc

SEQ ID NO: 131742 - DNA, 25 bp, Saccharomyces pastorianus
gttggaatccaacatgctcattgat

SEQ ID NO: 131743 - DNA, 25 bp, Saccharomyces pastorianus
gagcacgtgaaatccttgcctatgg

SEQ ID NO: 131744 - DNA, 25 bp, Saccharomyces pastorianus
ggcatatatcccgacaaatggcttt

SEQ ID NO: 131745 - DNA, 25 bp, Saccharomyces pastorianus
gatacttaaaagtggctcctcagca

SEQ ID NO: 131746 - DNA, 25 bp, Saccharomyces pastorianus
ggtgatatttggtcgtcacatattt

SEQ ID NO: 131747 - DNA, 25 bp, Saccharomyces pastorianus
ttaacgcaactggattcaactcaag

SEQ ID NO: 131748 - DNA, 25 bp, Saccharomyces pastorianus
gaatcgctggcaactcttgcattaa

SEQ ID NO: 131749 - DNA, 25 bp, Saccharomyces pastorianus
aaggcatgccttagcttcatcttta

SEQ ID NO: 131750 - DNA, 25 bp, Saccharomyces pastorianus
ggaaagtttgggatcctgtcataaa

SEQ ID NO: 131751 - DNA, 25 bp, Saccharomyces pastorianus
gtgggaagtatctacctagttcaga

SEQ ID NO: 131752 - DNA, 25 bp, Saccharomyces pastorianus
atttcaattatttggccagcctaga

SEQ ID NO: 131753 - DNA, 25 bp, Saccharomyces pastorianus
aaatggcttttgttgatcctatcac

SEQ ID NO: 131754 - DNA, 25 bp, Saccharomyces pastorianus
gttgatcctatcacttgccaaatat

SEQ ID NO: 131755 - DNA, 25 bp, Saccharomyces pastorianus
gagattctgatgacgtgcatcccca

SEQ ID NO: 131756 - DNA, 25 bp, Saccharomyces pastorianus
atttgatggccgaggtcaagcctga

SEQ ID NO: 131757 - DNA, 25 bp, Saccharomyces pastorianus
ttgcccatatacctgaattcatcct

SEQ ID NO: 131758 - DNA, 25 bp, Saccharomyces pastorianus
gtgacggctctacgatttctgtaaa

SEQ ID NO: 131759 - DNA, 25 bp, Saccharomyces pastorianus
aaggccaagtacaccgttttcagat

SEQ ID NO: 131760 - DNA, 25 bp, Saccharomyces pastorianus
cagaggcttaagtaggtccagttca

SEQ ID NO: 131761 - DNA, 25 bp, Saccharomyces pastorianus
agtagatacccagttcctgacttgc

SEQ ID NO: 131762 - DNA, 25 bp, Saccharomyces pastorianus
atgcgtgactcatttgtacgtctga

SEQ ID NO: 131763 - DNA, 25 bp, Saccharomyces pastorianus
gaacctcccagctttacacatagag

SEQ ID NO: 131764 - DNA, 25 bp, Saccharomyces pastorianus
aatcagcgtagcttgcactactaga

SEQ ID NO: 131765 - DNA, 25 bp, Saccharomyces pastorianus
tataccccacgtgaatttgaaccat

SEQ ID NO: 131766 - DNA, 25 bp, Saccharomyces pastorianus
aggtcttcatcggtgcattcagcat

SEQ ID NO: 131767 - DNA, 25 bp, Saccharomyces pastorianus
gatctggatgatctgtctactttga

SEQ ID NO: 131768 - DNA, 25 bp, Saccharomyces pastorianus
aaccacaccatgaaaggcatcgctc

SEQ ID NO: 131769 - DNA, 25 bp, Saccharomyces pastorianus
gaaaccatctatccatgcataccaa

SEQ ID NO: 131770 - DNA, 25 bp, Saccharomyces pastorianus
gacggattccattgatattcctgta

SEQ ID NO: 131771 - DNA, 25 bp, Saccharomyces pastorianus
tagaaagttcagctactgcttcccc

SEQ ID NO: 131772 - DNA, 25 bp, Saccharomyces pastorianus
aaacgcgggaggctccaacgacgat

SEQ ID NO: 131773 - DNA, 25 bp, Saccharomyces pastorianus
atcaatggccactgtcaaacgaact

SEQ ID NO: 131774 - DNA, 25 bp, Saccharomyces pastorianus
ggatatgcaacgtctttcaagggtg

SEQ ID NO: 131775 - DNA, 25 bp, Saccharomyces pastorianus
gtctactttgaattacaccatggtt

SEQ ID NO: 131776 - DNA, 25 bp, Saccharomyces pastorianus
ggcatcgctcaagcatcatagcttt

SEQ ID NO: 131777 - DNA, 25 bp, Saccharomyces pastorianus
caatggtatattgactcactcaaat

SEQ ID NO: 131778 - DNA, 25 bp, Saccharomyces pastorianus
tttgcctgcaggaatttatagactg

SEQ ID NO: 131779 - DNA, 25 bp, Saccharomyces pastorianus
aacagttaaatcctaggatccgcat

SEQ ID NO: 131780 - DNA, 25 bp, Saccharomyces pastorianus
tccgcatggtttatgatgatgtgca

SEQ ID NO: 131781 - DNA, 25 bp, Saccharomyces pastorianus
aagagagcttactttggatgagaat

SEQ ID NO: 131782 - DNA, 25 bp, Saccharomyces pastorianus
tggctgcaaccacggaagtctttat

SEQ ID NO: 131783 - DNA, 25 bp, Saccharomyces pastorianus
ggaatggtttgttccagatcttttt

SEQ ID NO: 131784 - DNA, 25 bp, Saccharomyces pastorianus
aagacgatggtaccgtggctgcaac

SEQ ID NO: 131785 - DNA, 25 bp, Saccharomyces pastorianus
ggaagtctttatagtaagcacggat

SEQ ID NO: 131786 - DNA, 25 bp, Saccharomyces pastorianus
agtaagcacggatattgcttctgct

SEQ ID NO: 131787 - DNA, 25 bp, Saccharomyces pastorianus
tagactgcaattctccatcaatggt

SEQ ID NO: 131788 - DNA, 25 bp, Saccharomyces pastorianus
gtggactatcacctgttctaaattc

SEQ ID NO: 131789 - DNA, 25 bp, Saccharomyces pastorianus
tgacacgttcaacacgctaccgtta

SEQ ID NO: 131790 - DNA, 25 bp, Saccharomyces pastorianus
ttcggctcccaactattgtggtgaa

SEQ ID NO: 131791 - DNA, 25 bp, Saccharomyces pastorianus
taggcacgttagtaggcccaccgat

SEQ ID NO: 131792 - DNA, 25 bp, Saccharomyces pastorianus
ttagtgaaggcctactctgttcttt

SEQ ID NO: 131793 - DNA, 25 bp, Saccharomyces pastorianus
ttgagttgttggacccactggacag

SEQ ID NO: 131794 - DNA, 25 bp, Saccharomyces pastorianus
cgttagcagccatcgtcacaggaaa

SEQ ID NO: 131795 - DNA, 25 bp, Saccharomyces pastorianus
tagttacagtgttttcggctcccaa

SEQ ID NO: 131796 - DNA, 25 bp, Saccharomyces pastorianus
cactggacagtaccgctttgaaaca

SEQ ID NO: 131797 - DNA, 25 bp, Saccharomyces pastorianus
gatgtacccgacttcggcttaatta

SEQ ID NO: 131798 - DNA, 25 bp, Saccharomyces pastorianus
tggtcggatcctacagattcatcga

SEQ ID NO: 131799 - DNA, 25 bp, Saccharomyces pastorianus
ggcgtcgttggcatctaatgttcaa

SEQ ID NO: 131800 - DNA, 25 bp, Saccharomyces pastorianus
gatcgtccactctgggaaacggcaa

SEQ ID NO: 131801 - DNA, 25 bp, Saccharomyces pastorianus
gagagcccctcaatggccaaggtta

SEQ ID NO: 131802 - DNA, 25 bp, Saccharomyces pastorianus
aaatcgtcaaggtcgctgaggtcgc

SEQ ID NO: 131803 - DNA, 25 bp, Saccharomyces pastorianus
tagaggctacaagcgtactccttta

SEQ ID NO: 131804 - DNA, 25 bp, Saccharomyces pastorianus
gtacaagcatgcattccactagctc

SEQ ID NO: 131805 - DNA, 25 bp, Saccharomyces pastorianus
aagactctcttcctcttcgagaagg

SEQ ID NO: 131806 - DNA, 25 bp, Saccharomyces pastorianus
tagttcttccgcagatagaggctac

SEQ ID NO: 131807 - DNA, 25 bp, Saccharomyces pastorianus
gttactcgcatcaacactagttctt

SEQ ID NO: 131808 - DNA, 25 bp, Saccharomyces pastorianus
aatcggatactacacattcgctgaa

SEQ ID NO: 131809 - DNA, 25 bp, Saccharomyces pastorianus
cactagctctttcaactcttacgaa

SEQ ID NO: 131810 - DNA, 25 bp, Saccharomyces pastorianus
atgttcgctgattttgtatggcgag

SEQ ID NO: 131811 - DNA, 25 bp, Saccharomyces pastorianus
gcgagaggcattttttacgccttgg

SEQ ID NO: 131812 - DNA, 25 bp, Saccharomyces pastorianus
gctgattttgtatggcgagaggcat

SEQ ID NO: 131813 - DNA, 25 bp, Saccharomyces pastorianus
ttgtttcattctttctagttaacca

SEQ ID NO: 131814 - DNA, 25 bp, Saccharomyces pastorianus
tcattctttctagttaaccatcggg

SEQ ID NO: 131815 - DNA, 25 bp, Saccharomyces pastorianus
cattttttacgccttggtatatcat

SEQ ID NO: 131816 - DNA, 25 bp, Saccharomyces pastorianus
tacgccttggtatatcattggtgtt

SEQ ID NO: 131817 - DNA, 25 bp, Saccharomyces pastorianus
ttgtatggcgagaggcattttttac

SEQ ID NO: 131818 - DNA, 25 bp, Saccharomyces pastorianus
accatcggggagaatctgctgttga

SEQ ID NO: 131819 - DNA, 25 bp, Saccharomyces pastorianus
agaggcattttttacgccttggtat

SEQ ID NO: 131820 - DNA, 25 bp, Saccharomyces pastorianus
gccttggtatatcattggtgttatt

SEQ ID NO: 131821 - DNA, 25 bp, Saccharomyces pastorianus
ggttgagtctgctattttgcgtctt

SEQ ID NO: 131822 - DNA, 25 bp, Saccharomyces pastorianus
tttaccttatttcttgccactagtc

SEQ ID NO: 131823 - DNA, 25 bp, Saccharomyces pastorianus
gagttcctacctttactatcttcaa

SEQ ID NO: 131824 - DNA, 25 bp, Saccharomyces pastorianus
gtgtctataccacccttttgaaata

SEQ ID NO: 131825 - DNA, 25 bp, Saccharomyces pastorianus
aattctttcatcgacatcctcattt

SEQ ID NO: 131826 - DNA, 25 bp, Saccharomyces pastorianus
gtttgctctttatttgacgccagat

SEQ ID NO: 131827 - DNA, 25 bp, Saccharomyces pastorianus
gagtgcttcctcctttttggtaggt

SEQ ID NO: 131828 - DNA, 25 bp, Saccharomyces pastorianus
taggtaacactttagcactgctggg

SEQ ID NO: 131829 - DNA, 25 bp, Saccharomyces pastorianus
gttcgtggcaaatttggcggctaac

SEQ ID NO: 131830 - DNA, 25 bp, Saccharomyces pastorianus
aacgctgctttgtcgtataccacag

SEQ ID NO: 131831 - DNA, 25 bp, Saccharomyces pastorianus
ataccacagtggcttcgtcaacaat

SEQ ID NO: 131832 - DNA, 25 bp, Saccharomyces pastorianus
acatcttgctgtggtgtgtgtggat

SEQ ID NO: 131833 - DNA, 25 bp, Saccharomyces pastorianus
ctggctgctctaaacgtgtggtacg

SEQ ID NO: 131834 - DNA, 25 bp, Saccharomyces pastorianus
acagcatcgctgtgctattaggagt

SEQ ID NO: 131835 - DNA, 25 bp, Saccharomyces pastorianus
gtcaaccttttaaactgtccacatt

SEQ ID NO: 131836 - DNA, 25 bp, Saccharomyces pastorianus
tggaatagtatttcagcacccgttc

SEQ ID NO: 131837 - DNA, 25 bp, Saccharomyces pastorianus
gggacaaattcgcagtcaacctttt

SEQ ID NO: 131838 - DNA, 25 bp, Saccharomyces pastorianus
gtacggtctctctgatggcgaagat

SEQ ID NO: 131839 - DNA, 25 bp, Saccharomyces pastorianus
agaagagtttcgcaacctggctgct

SEQ ID NO: 131840 - DNA, 25 bp, Saccharomyces pastorianus
gatgaacactcttgtgcacaccaga

SEQ ID NO: 131841 - DNA, 25 bp, Saccharomyces pastorianus
aaaaattgctaatacttccgccgct

SEQ ID NO: 131842 - DNA, 25 bp, Saccharomyces pastorianus
aagacactaggtttggaggacgcat

SEQ ID NO: 131843 - DNA, 25 bp, Saccharomyces pastorianus
acagttattttccactttcgataga

SEQ ID NO: 131844 - DNA, 25 bp, Saccharomyces pastorianus
caattttcgccctccaaatggaata

SEQ ID NO: 131845 - DNA, 25 bp, Saccharomyces pastorianus
taccggacattttcattacgcctac

SEQ ID NO: 131846 - DNA, 25 bp, Saccharomyces pastorianus
gaagatgtctgtcatttgcgccaac

SEQ ID NO: 131847 - DNA, 25 bp, Saccharomyces pastorianus
agtggtattcccgaattcacaccgg

SEQ ID NO: 131848 - DNA, 25 bp, Saccharomyces pastorianus
aacacgactctcagccatttattaa

SEQ ID NO: 131849 - DNA, 25 bp, Saccharomyces pastorianus
gcggaccccaatttatcttttgaat

SEQ ID NO: 131850 - DNA, 25 bp, Saccharomyces pastorianus
gtttctattgagacacatgccgcta

SEQ ID NO: 131851 - DNA, 25 bp, Saccharomyces pastorianus
gaagcagccgtacgtttttgtaaag

SEQ ID NO: 131852 - DNA, 25 bp, Saccharomyces pastorianus
acctcggtattccaaagatcgccta

SEQ ID NO: 131853 - DNA, 25 bp, Saccharomyces pastorianus
tgttaccagtaatccgtccgaattt

SEQ ID NO: 131854 - DNA, 25 bp, Saccharomyces pastorianus
agtatggccgctgcatttaatcttc

SEQ ID NO: 131855 - DNA, 25 bp, Saccharomyces pastorianus
gtacagctagaaccacacctttttg

SEQ ID NO: 131856 - DNA, 25 bp, Saccharomyces pastorianus
gaatctttcctttcaaagcatgcgc

SEQ ID NO: 131857 - DNA, 25 bp, Saccharomyces pastorianus
aggactccaggaagttccggcgtat

SEQ ID NO: 131858 - DNA, 25 bp, Saccharomyces pastorianus
acagaacttctcttgacgacgttaa

SEQ ID NO: 131859 - DNA, 25 bp, Saccharomyces pastorianus
tgacttaggacatctcaacggccac

SEQ ID NO: 131860 - DNA, 25 bp, Saccharomyces pastorianus
aaatgggttgctgttgttcctgact

SEQ ID NO: 131861 - DNA, 25 bp, Saccharomyces pastorianus
aataaggatgcatttggcccctgct

SEQ ID NO: 131862 - DNA, 25 bp, Saccharomyces pastorianus
aagcatgcgctttatttagcaccat

SEQ ID NO: 131863 - DNA, 25 bp, Saccharomyces pastorianus
gcttcgtatttaactcccttacttg

SEQ ID NO: 131864 - DNA, 25 bp, Saccharomyces pastorianus
gaaaattctacttccggagatccat

SEQ ID NO: 131865 - DNA, 25 bp, Saccharomyces pastorianus
gaatccaaaagggtccagttagagg

SEQ ID NO: 131866 - DNA, 25 bp, Saccharomyces pastorianus
tttggacttgtctcgttctaacggt

SEQ ID NO: 131867 - DNA, 25 bp, Saccharomyces pastorianus
tgacttggttaaatctttgggtttg

SEQ ID NO: 131868 - DNA, 25 bp, Saccharomyces pastorianus
tggacttgtctcgttctaacggtgt

SEQ ID NO: 131869 - DNA, 25 bp, Saccharomyces pastorianus
tctgacttggttaaatctttgggtt

SEQ ID NO: 131870 - DNA, 25 bp, Saccharomyces pastorianus
ccagaagtctctgctttggacttgt

SEQ ID NO: 131871 - DNA, 25 bp, Saccharomyces pastorianus
ttgtctcgttctaacggtgttttga

SEQ ID NO: 131872 - DNA, 25 bp, Saccharomyces pastorianus
ctgctttggacttgtctcgttctaa

SEQ ID NO: 131873 - DNA, 25 bp, Saccharomyces pastorianus
tccaaaagggtccagttagaggtat

SEQ ID NO: 131874 - DNA, 25 bp, Saccharomyces pastorianus
aagtctctgctttggacttgtctcg

SEQ ID NO: 131875 - DNA, 25 bp, Saccharomyces pastorianus
gacttgtctcgttctaacggtgttt

SEQ ID NO: 131876 - DNA, 25 bp, Saccharomyces pastorianus
attaaacgagttaccagaggcagac

SEQ ID NO: 131877 - DNA, 25 bp, Saccharomyces pastorianus
cgctccgtaaggatctaccagaatt

SEQ ID NO: 131878 - DNA, 25 bp, Saccharomyces pastorianus
gaattacctattcagtgagtcacta

SEQ ID NO: 131879 - DNA, 25 bp, Saccharomyces pastorianus
agaccaacccagcattacgcggtga

SEQ ID NO: 131880 - DNA, 25 bp, Saccharomyces pastorianus
ggttactatgccatctcagattcca

SEQ ID NO: 131881 - DNA, 25 bp, Saccharomyces pastorianus
gatagcacatcggtgaagtcattga

SEQ ID NO: 131882 - DNA, 25 bp, Saccharomyces pastorianus
gaggcagacatcagcgtactaggta

SEQ ID NO: 131883 - DNA, 25 bp, Saccharomyces pastorianus
aatgacatgtatgacctttcgctcc

SEQ ID NO: 131884 - DNA, 25 bp, Saccharomyces pastorianus
agagactatcttatcaatcacgtgt

SEQ ID NO: 131885 - DNA, 25 bp, Saccharomyces pastorianus
aatcacgtgttgcagttttggaaaa

SEQ ID NO: 131886 - DNA, 25 bp, Saccharomyces pastorianus
tacgcggtgacattgcattaactat

SEQ ID NO: 131887 - DNA, 25 bp, Saccharomyces pastorianus
tacaaaatcccagcttggttcttga

SEQ ID NO: 131888 - DNA, 25 bp, Saccharomyces pastorianus
caaaatcccagcttggttcttgaac

SEQ ID NO: 131889 - DNA, 25 bp, Saccharomyces pastorianus
ctcactacaaaatcccagcttggtt

SEQ ID NO: 131890 - DNA, 25 bp, Saccharomyces pastorianus
aatcccagcttggttcttgaaccgt

SEQ ID NO: 131891 - DNA, 25 bp, Saccharomyces pastorianus
acaaaatcccagcttggttcttgaa

SEQ ID NO: 131892 - DNA, 25 bp, Saccharomyces pastorianus
caactcactacaaaatcccagcttg

SEQ ID NO: 131893 - DNA, 25 bp, Saccharomyces pastorianus
actacaaaatcccagcttggttctt

SEQ ID NO: 131894 - DNA, 25 bp, Saccharomyces pastorianus
ctacaaaatcccagcttggttcttg

SEQ ID NO: 131895 - DNA, 25 bp, Saccharomyces pastorianus
aaatcccagcttggttcttgaaccg

SEQ ID NO: 131896 - DNA, 25 bp, Saccharomyces pastorianus
aactcactacaaaatcccagcttgg

SEQ ID NO: 131897 - DNA, 25 bp, Saccharomyces pastorianus
tcactacaaaatcccagcttggttc

SEQ ID NO: 131898 - DNA, 25 bp, Saccharomyces pastorianus
aagttatttggatcttgcaggcaga

SEQ ID NO: 131899 - DNA, 25 bp, Saccharomyces pastorianus
gaatatacctcagacgagaaaccat

SEQ ID NO: 131900 - DNA, 25 bp, Saccharomyces pastorianus
aatggacagcagtaatatcgaggtt

SEQ ID NO: 131901 - DNA, 25 bp, Saccharomyces pastorianus
catactcaatggattcgttaacagt

SEQ ID NO: 131902 - DNA, 25 bp, Saccharomyces pastorianus
tttcgtccaattctacgccgacttg

SEQ ID NO: 131903 - DNA, 25 bp, Saccharomyces pastorianus
ggccctgcatatgtaccgcagttat

SEQ ID NO: 131904 - DNA, 25 bp, Saccharomyces pastorianus
caaatacgaactcggccctgcatat

SEQ ID NO: 131905 - DNA, 25 bp, Saccharomyces pastorianus
tatgtaccgcagttattcactccga

SEQ ID NO: 131906 - DNA, 25 bp, Saccharomyces pastorianus
actatgccaattgagatgccagaca

SEQ ID NO: 131907 - DNA, 25 bp, Saccharomyces pastorianus
gttattcactccgacgcgtttcgtc

SEQ ID NO: 131908 - DNA, 25 bp, Saccharomyces pastorianus
tatcgaggttgggatcaaccgcgga

SEQ ID NO: 131909 - DNA, 25 bp, Saccharomyces pastorianus
gctggaaagagtggatgaaatacat

SEQ ID NO: 131910 - DNA, 25 bp, Saccharomyces pastorianus
tatgaacaccgtccgcgacacatac

SEQ ID NO: 131911 - DNA, 25 bp, Saccharomyces pastorianus
gtccgcgacacatactatcggaaag

SEQ ID NO: 131912 - DNA, 25 bp, Saccharomyces pastorianus
tcggaaagtgtggaataagctggaa

SEQ ID NO: 131913 - DNA, 25 bp, Saccharomyces pastorianus
acatactatcggaaagtgtggaata

SEQ ID NO: 131914 - DNA, 25 bp, Saccharomyces pastorianus
accgtccgcgacacatactatcgga

SEQ ID NO: 131915 - DNA, 25 bp, Saccharomyces pastorianus
agcatatatgaacaccgtccgcgac

SEQ ID NO: 131916 - DNA, 25 bp, Saccharomyces pastorianus
gaagcatatatgaacaccgtccgcg

SEQ ID NO: 131917 - DNA, 25 bp, Saccharomyces pastorianus
ccgcgacacatactatcggaaagtg

SEQ ID NO: 131918 - DNA, 25 bp, Saccharomyces pastorianus
tatatgaacaccgtccgcgacacat

SEQ ID NO: 131919 - DNA, 25 bp, Saccharomyces pastorianus
gcatatatgaacaccgtccgcgaca

SEQ ID NO: 131920 - DNA, 25 bp, Saccharomyces pastorianus
atggagcaatccactcgtgttcaac

SEQ ID NO: 131921 - DNA, 25 bp, Saccharomyces pastorianus
tcccaacggatggtaaaaaagctag

SEQ ID NO: 131922 - DNA, 25 bp, Saccharomyces pastorianus
ggatcacgctatggcggcaaaagaa

SEQ ID NO: 131923 - DNA, 25 bp, Saccharomyces pastorianus
ttctggatcacgctatggcggcaaa

SEQ ID NO: 131924 - DNA, 25 bp, Saccharomyces pastorianus
agaattctggatcacgctatggcgg

SEQ ID NO: 131925 - DNA, 25 bp, Saccharomyces pastorianus
aaatcgttattgaaagccatggagc

SEQ ID NO: 131926 - DNA, 25 bp, Saccharomyces pastorianus
accacttcatcccaacggatggtaa

SEQ ID NO: 131927 - DNA, 25 bp, Saccharomyces pastorianus
aatccactcgtgttcaacaaggaga

SEQ ID NO: 131928 - DNA, 25 bp, Saccharomyces pastorianus
gagcaatccactcgtgttcaacaag

SEQ ID NO: 131929 - DNA, 25 bp, Saccharomyces pastorianus
tcgtgttcaacaaggagaagacagt

SEQ ID NO: 131930 - DNA, 25 bp, Saccharomyces pastorianus
gaaagccatggagcaatccactcgt

SEQ ID NO: 131931 - DNA, 25 bp, Saccharomyces pastorianus
gtgtcaaatctgtcaaggctatccc

SEQ ID NO: 131932 - DNA, 25 bp, Saccharomyces pastorianus
gggcgcaattctccggtaactacta

SEQ ID NO: 131933 - DNA, 25 bp, Saccharomyces pastorianus
ggtacggagaccgaagaatccatca

SEQ ID NO: 131934 - DNA, 25 bp, Saccharomyces pastorianus
tattgctccaccatcggtcgaggat

SEQ ID NO: 131935 - DNA, 25 bp, Saccharomyces pastorianus
tactatggtagtactgtcgcttccg

SEQ ID NO: 131936 - DNA, 25 bp, Saccharomyces pastorianus
gctatcccagagttaaatgccaggt

SEQ ID NO: 131937 - DNA, 25 bp, Saccharomyces pastorianus
aatgccaggtttttgtttattgctc

SEQ ID NO: 131938 - DNA, 25 bp, Saccharomyces pastorianus
atgctgagacaggtgcccatgacaa

SEQ ID NO: 131939 - DNA, 25 bp, Saccharomyces pastorianus
cgccgctcaagctgaattggcatat

SEQ ID NO: 131940 - DNA, 25 bp, Saccharomyces pastorianus
tgtcgcttccgtcaaacaagtcagt

SEQ ID NO: 131941 - DNA, 25 bp, Saccharomyces pastorianus
caacaagaggttaagcgccgctcaa

SEQ ID NO: 131942 - DNA, 25 bp, Saccharomyces pastorianus
tctttcgggtttagtgtttcatcca

SEQ ID NO: 131943 - DNA, 25 bp, Saccharomyces pastorianus
ggtaaatctacactgttgaagaaat

SEQ ID NO: 131944 - DNA, 25 bp, Saccharomyces pastorianus
gtcctatcgtaatttctggcccaag

SEQ ID NO: 131945 - DNA, 25 bp, Saccharomyces pastorianus
atttctggcccaagtggtacaggta

SEQ ID NO: 131946 - DNA, 25 bp, Saccharomyces pastorianus
gttcgctgaatacccagattctttc

SEQ ID NO: 131947 - DNA, 25 bp, Saccharomyces pastorianus
atgtcccgtcctatcgtaatttctg

SEQ ID NO: 131948 - DNA, 25 bp, Saccharomyces pastorianus
tggcccaagtggtacaggtaaatct

SEQ ID NO: 131949 - DNA, 25 bp, Saccharomyces pastorianus
tgaatacccagattctttcgggttt

SEQ ID NO: 131950 - DNA, 25 bp, Saccharomyces pastorianus
gaagaaattgttcgctgaataccca

SEQ ID NO: 131951 - DNA, 25 bp, Saccharomyces pastorianus
ctatcgtaatttctggcccaagtgg

SEQ ID NO: 131952 - DNA, 25 bp, Saccharomyces pastorianus
ggtttagtgtttcatccactactag

SEQ ID NO: 131953 - DNA, 25 bp, Saccharomyces pastorianus
ttatgttaattacaccgcaacctgt

SEQ ID NO: 131954 - DNA, 25 bp, Saccharomyces pastorianus
cagcggtttgcctgatattgatgtc

SEQ ID NO: 131955 - DNA, 25 bp, Saccharomyces pastorianus
gttgcagtttgttaccggtactagt

SEQ ID NO: 131956 - DNA, 25 bp, Saccharomyces pastorianus
gcgtggttcactattattggcaatc

SEQ ID NO: 131957 - DNA, 25 bp, Saccharomyces pastorianus
ggcagttagatccttcgacgctgaa

SEQ ID NO: 131958 - DNA, 25 bp, Saccharomyces pastorianus
ggtttctatgcccttatatccaaag

SEQ ID NO: 131959 - DNA, 25 bp, Saccharomyces pastorianus
ggagttattaatcagcggtttgcct

SEQ ID NO: 131960 - DNA, 25 bp, Saccharomyces pastorianus
catatgagacattgcgtggttcact

SEQ ID NO: 131961 - DNA, 25 bp, Saccharomyces pastorianus
gaaagactaccatcatcacatacct

SEQ ID NO: 131962 - DNA, 25 bp, Saccharomyces pastorianus
agaacgtgccaagttgttgcagttt

SEQ ID NO: 131963 - DNA, 25 bp, Saccharomyces pastorianus
gaactaagcggtgtcaacggtgttt

SEQ ID NO: 131964 - DNA, 25 bp, Saccharomyces pastorianus
aaagagcaatcagagaatatagaat

SEQ ID NO: 131965 - DNA, 25 bp, Saccharomyces pastorianus
gaatatagaattatatcttcttgaa

SEQ ID NO: 131966 - DNA, 25 bp, Saccharomyces pastorianus
aagagcaatcagagaatatagaatt

SEQ ID NO: 131967 - DNA, 25 bp, Saccharomyces pastorianus
aatatagaattatatcttcttgaag

SEQ ID NO: 131968 - DNA, 25 bp, Saccharomyces pastorianus
agagcaatcagagaatatagaatta

SEQ ID NO: 131969 - DNA, 25 bp, Saccharomyces pastorianus
gagcaatcagagaatatagaattat

SEQ ID NO: 131970 - DNA, 25 bp, Saccharomyces pastorianus
atagaattatatcttcttgaagaaa

SEQ ID NO: 131971 - DNA, 25 bp, Saccharomyces pastorianus
gaaagagcaatcagagaatatagaa

SEQ ID NO: 131972 - DNA, 25 bp, Saccharomyces pastorianus
atatagaattatatcttcttgaaga

SEQ ID NO: 131973 - DNA, 25 bp, Saccharomyces pastorianus
tagaattatatcttcttgaagaaaa

SEQ ID NO: 131974 - DNA, 25 bp, Saccharomyces pastorianus
agcaatcagagaatatagaattata

SEQ ID NO: 131975 - DNA, 25 bp, Saccharomyces pastorianus
aattgtctcgaatgtcctgagcatg

SEQ ID NO: 131976 - DNA, 25 bp, Saccharomyces pastorianus
gatatattctctcattccagaccgt

SEQ ID NO: 131977 - DNA, 25 bp, Saccharomyces pastorianus
gtgttgcaagcttatcgaccaaatt

SEQ ID NO: 131978 - DNA, 25 bp, Saccharomyces pastorianus
ggctatgagcctaaaagttctattt

SEQ ID NO: 131979 - DNA, 25 bp, Saccharomyces pastorianus
ttgagtgtgaaccaggctatgagcc

SEQ ID NO: 131980 - DNA, 25 bp, Saccharomyces pastorianus
gggttacgttgcaatgtcatttaga

SEQ ID NO: 131981 - DNA, 25 bp, Saccharomyces pastorianus
gagcatggaatatgttcttctttta

SEQ ID NO: 131982 - DNA, 25 bp, Saccharomyces pastorianus
tatggtattattccttttccaaaat

SEQ ID NO: 131983 - DNA, 25 bp, Saccharomyces pastorianus
gttctttatttatcaccctaggcgt

SEQ ID NO: 131984 - DNA, 25 bp, Saccharomyces pastorianus
gatgatattatctggctgccattag

SEQ ID NO: 131985 - DNA, 25 bp, Saccharomyces pastorianus
ctctcattccagaccgtcatgggaa

SEQ ID NO: 131986 - DNA, 25 bp, Saccharomyces pastorianus
attgggtccctatgaagaaactctt

SEQ ID NO: 131987 - DNA, 25 bp, Saccharomyces pastorianus
tgactacaccattcaggccattgag

SEQ ID NO: 131988 - DNA, 25 bp, Saccharomyces pastorianus
gcaagccctatacatctcgatgcaa

SEQ ID NO: 131989 - DNA, 25 bp, Saccharomyces pastorianus
catgtgggtgtctatttgcgtttac

SEQ ID NO: 131990 - DNA, 25 bp, Saccharomyces pastorianus
atagactctttgtgcagtttgctgc

SEQ ID NO: 131991 - DNA, 25 bp, Saccharomyces pastorianus
gaatttcactctttctgggacaaaa

SEQ ID NO: 131992 - DNA, 25 bp, Saccharomyces pastorianus
ttaaccgcaagtttgttggcatcga

SEQ ID NO: 131993 - DNA, 25 bp, Saccharomyces pastorianus
aacgttagtgtttgccatccttgga

SEQ ID NO: 131994 - DNA, 25 bp, Saccharomyces pastorianus
ggataattcctttaggcaagcccta

SEQ ID NO: 131995 - DNA, 25 bp, Saccharomyces pastorianus
gcagtttgctgcttatttttcaaca

SEQ ID NO: 131996 - DNA, 25 bp, Saccharomyces pastorianus
aggagaatatctggccacattgcgg

SEQ ID NO: 131997 - DNA, 25 bp, Saccharomyces pastorianus
tcgaatcaggcgcaggtcatggttt

SEQ ID NO: 131998 - DNA, 25 bp, Saccharomyces pastorianus
gcaggtcatggtttagattcatctt

SEQ ID NO: 131999 - DNA, 25 bp, Saccharomyces pastorianus
aatcaggcgcaggtcatggtttaga

SEQ ID NO: 132000 - DNA, 25 bp, Saccharomyces pastorianus
agattcatcttaccgattatcgtgc

SEQ ID NO: 132001 - DNA, 25 bp, Saccharomyces pastorianus
gattatcgtgctcggtttactgtgc

SEQ ID NO: 132002 - DNA, 25 bp, Saccharomyces pastorianus
atattcgaatcaggcgcaggtcatg

SEQ ID NO: 132003 - DNA, 25 bp, Saccharomyces pastorianus
atcttaccgattatcgtgctcggtt

SEQ ID NO: 132004 - DNA, 25 bp, Saccharomyces pastorianus
ggaatattcgaatcaggcgcaggtc

SEQ ID NO: 132005 - DNA, 25 bp, Saccharomyces pastorianus
gtcatggtttagattcatcttaccg

SEQ ID NO: 132006 - DNA, 25 bp, Saccharomyces pastorianus
ttcatcttaccgattatcgtgctcg

SEQ ID NO: 132007 - DNA, 25 bp, Saccharomyces pastorianus
aggcgcaggtcatggtttagattca

SEQ ID NO: 132008 - DNA, 25 bp, Saccharomyces pastorianus
tttgaggctgccaatgcttccgaga

SEQ ID NO: 132009 - DNA, 25 bp, Saccharomyces pastorianus
tgaggctgccaatgcttccgagaag

SEQ ID NO: 132010 - DNA, 25 bp, Saccharomyces pastorianus
agccctcgtctgtttgaggctgcca

SEQ ID NO: 132011 - DNA, 25 bp, Saccharomyces pastorianus
gtctgtttgaggctgccaatgcttc

SEQ ID NO: 132012 - DNA, 25 bp, Saccharomyces pastorianus
gaggctgccaatgcttccgagaagg

SEQ ID NO: 132013 - DNA, 25 bp, Saccharomyces pastorianus
ttctacaagaactcagccctcgtct

SEQ ID NO: 132014 - DNA, 25 bp, Saccharomyces pastorianus
aagaactcagccctcgtctgtttga

SEQ ID NO: 132015 - DNA, 25 bp, Saccharomyces pastorianus
ggctgccaatgcttccgagaagggc

SEQ ID NO: 132016 - DNA, 25 bp, Saccharomyces pastorianus
gccaatgcttccgagaagggcaagc

SEQ ID NO: 132017 - DNA, 25 bp, Saccharomyces pastorianus
aactcagccctcgtctgtttgaggc

SEQ ID NO: 132018 - DNA, 25 bp, Saccharomyces pastorianus
ctcgtctgtttgaggctgccaatgc

SEQ ID NO: 132019 - DNA, 25 bp, Saccharomyces pastorianus
aaaaaaccacacagagccgttctag

SEQ ID NO: 132020 - DNA, 25 bp, Saccharomyces pastorianus
acctttggcacaaagggtcgtcacg

SEQ ID NO: 132021 - DNA, 25 bp, Saccharomyces pastorianus
agagcaagagctcactgtcaccttt

SEQ ID NO: 132022 - DNA, 25 bp, Saccharomyces pastorianus
gctggcacaaacattcaaaaaacca

SEQ ID NO: 132023 - DNA, 25 bp, Saccharomyces pastorianus
cacagagccgttctagaacaggtat

SEQ ID NO: 132024 - DNA, 25 bp, Saccharomyces pastorianus
gggaccacggtcttcatcagaaata

SEQ ID NO: 132025 - DNA, 25 bp, Saccharomyces pastorianus
aaaccacacagagccgttctagaac

SEQ ID NO: 132026 - DNA, 25 bp, Saccharomyces pastorianus
gctcactgtcacctttggcacaaag

SEQ ID NO: 132027 - DNA, 25 bp, Saccharomyces pastorianus
gaacaggtatctgggaccacggtct

SEQ ID NO: 132028 - DNA, 25 bp, Saccharomyces pastorianus
aggtatctgggaccacggtcttcat

SEQ ID NO: 132029 - DNA, 25 bp, Saccharomyces pastorianus
aagagctcactgtcacctttggcac

SEQ ID NO: 132030 - DNA, 25 bp, Saccharomyces pastorianus
ggcacaagataatccttcgttcctg

SEQ ID NO: 132031 - DNA, 25 bp, Saccharomyces pastorianus
ttcgttcctgccactcgatattgaa

SEQ ID NO: 132032 - DNA, 25 bp, Saccharomyces pastorianus
gatgaaatctcatctgccacaattt

SEQ ID NO: 132033 - DNA, 25 bp, Saccharomyces pastorianus
gtcccttctagttcatcggaatctt

SEQ ID NO: 132034 - DNA, 25 bp, Saccharomyces pastorianus
gcaacaggtttctggatcgacggta

SEQ ID NO: 132035 - DNA, 25 bp, Saccharomyces pastorianus
gaagtggcaccggatgaaatctcat

SEQ ID NO: 132036 - DNA, 25 bp, Saccharomyces pastorianus
gatcgacggtaaccacaccagaggt

SEQ ID NO: 132037 - DNA, 25 bp, Saccharomyces pastorianus
tgaagttatgttccacggcaagcaa

SEQ ID NO: 132038 - DNA, 25 bp, Saccharomyces pastorianus
gacgcaatgtcatatcccatcatat

SEQ ID NO: 132039 - DNA, 25 bp, Saccharomyces pastorianus
aaagcaaccgcgattgcacgcagta

SEQ ID NO: 132040 - DNA, 25 bp, Saccharomyces pastorianus
ttttgatactcatctactcgagccc

SEQ ID NO: 132041 - DNA, 25 bp, Saccharomyces pastorianus
atatcgatcacactatctcctgaga

SEQ ID NO: 132042 - DNA, 25 bp, Saccharomyces pastorianus
aatgtctactggtgtcgcaagcttt

SEQ ID NO: 132043 - DNA, 25 bp, Saccharomyces pastorianus
taaatggtggctgctctgtgatccc

SEQ ID NO: 132044 - DNA, 25 bp, Saccharomyces pastorianus
atacgcgttcttcagagagctcgtc

SEQ ID NO: 132045 - DNA, 25 bp, Saccharomyces pastorianus
ctactgtgacgctactttcaggatt

SEQ ID NO: 132046 - DNA, 25 bp, Saccharomyces pastorianus
gtcactactcggatcaaggccagaa

SEQ ID NO: 132047 - DNA, 25 bp, Saccharomyces pastorianus
aggcgcccctatcaaaatgtctact

SEQ ID NO: 132048 - DNA, 25 bp, Saccharomyces pastorianus
aaaggcgtatcactgtccattttta

SEQ ID NO: 132049 - DNA, 25 bp, Saccharomyces pastorianus
tttccattaagtccatcaggctcca

SEQ ID NO: 132050 - DNA, 25 bp, Saccharomyces pastorianus
gaggagttcatttgtcactactgtg

SEQ ID NO: 132051 - DNA, 25 bp, Saccharomyces pastorianus
attcgttcaaaaatgccctctacca

SEQ ID NO: 132052 - DNA, 25 bp, Saccharomyces pastorianus
aggatcgccttgaaactactgagac

SEQ ID NO: 132053 - DNA, 25 bp, Saccharomyces pastorianus
gaataaccttaacaaagcacgctgt

SEQ ID NO: 132054 - DNA, 25 bp, Saccharomyces pastorianus
acacattcgatataccatctccaga

SEQ ID NO: 132055 - DNA, 25 bp, Saccharomyces pastorianus
accgaggcagagttgagttgtctaa

SEQ ID NO: 132056 - DNA, 25 bp, Saccharomyces pastorianus
ttaccaaagctaaacgtgtccgccg

SEQ ID NO: 132057 - DNA, 25 bp, Saccharomyces pastorianus
taaaaagctttctgctgacgccact

SEQ ID NO: 132058 - DNA, 25 bp, Saccharomyces pastorianus
gaagtaagcgtagtgtagtcctaaa

SEQ ID NO: 132059 - DNA, 25 bp, Saccharomyces pastorianus
aacagcgaatccatcacttacacat

SEQ ID NO: 132060 - DNA, 25 bp, Saccharomyces pastorianus
ggactagtgcctccatcgggtagat

SEQ ID NO: 132061 - DNA, 25 bp, Saccharomyces pastorianus
acgtgtccgccgcattaaaaagctt

SEQ ID NO: 132062 - DNA, 25 bp, Saccharomyces pastorianus
atttgccaaggctagattgaccgag

SEQ ID NO: 132063 - DNA, 25 bp, Saccharomyces pastorianus
gacgatgagcaagccaaaccggaaa

SEQ ID NO: 132064 - DNA, 25 bp, Saccharomyces pastorianus
aaaaacatgagcatgctgccccgaa

SEQ ID NO: 132065 - DNA, 25 bp, Saccharomyces pastorianus
ggatggctatcctagagtctctaca

SEQ ID NO: 132066 - DNA, 25 bp, Saccharomyces pastorianus
atgctgccccgaatgataagttgag

SEQ ID NO: 132067 - DNA, 25 bp, Saccharomyces pastorianus
agcatccagatgacagccagcatat

SEQ ID NO: 132068 - DNA, 25 bp, Saccharomyces pastorianus
aatcagacggagagcccttgcggga

SEQ ID NO: 132069 - DNA, 25 bp, Saccharomyces pastorianus
gatgagctagtatctgtcgttgcaa

SEQ ID NO: 132070 - DNA, 25 bp, Saccharomyces pastorianus
tgatgacgctctcgaccaagatgat

SEQ ID NO: 132071 - DNA, 25 bp, Saccharomyces pastorianus
cgaaataccacattttgtcgacgaa

SEQ ID NO: 132072 - DNA, 25 bp, Saccharomyces pastorianus
gtgtaagcactagtcagcaccatcc

SEQ ID NO: 132073 - DNA, 25 bp, Saccharomyces pastorianus
aatgggctcatatcctacagcagga

SEQ ID NO: 132074 - DNA, 25 bp, Saccharomyces pastorianus
attccatttgcggaagtggaggtga

SEQ ID NO: 132075 - DNA, 25 bp, Saccharomyces pastorianus
tgggaattccatttgcggaagtgga

SEQ ID NO: 132076 - DNA, 25 bp, Saccharomyces pastorianus
atacttttctctcgtagttgggaat

SEQ ID NO: 132077 - DNA, 25 bp, Saccharomyces pastorianus
tctctcgtagttgggaattccattt

SEQ ID NO: 132078 - DNA, 25 bp, Saccharomyces pastorianus
gaaggagcagaatacttttctctcg

SEQ ID NO: 132079 - DNA, 25 bp, Saccharomyces pastorianus
gcagaatacttttctctcgtagttg

SEQ ID NO: 132080 - DNA, 25 bp, Saccharomyces pastorianus
ggagcagaatacttttctctcgtag

SEQ ID NO: 132081 - DNA, 25 bp, Saccharomyces pastorianus
agttgggaattccatttgcggaagt

SEQ ID NO: 132082 - DNA, 25 bp, Saccharomyces pastorianus
ttttctctcgtagttgggaattcca

SEQ ID NO: 132083 - DNA, 25 bp, Saccharomyces pastorianus
cgtagttgggaattccatttgcgga

SEQ ID NO: 132084 - DNA, 25 bp, Saccharomyces pastorianus
gaatacttttctctcgtagttggga

SEQ ID NO: 132085 - DNA, 25 bp, Saccharomyces pastorianus
gtcatctacaaccaattccatatcg

SEQ ID NO: 132086 - DNA, 25 bp, Saccharomyces pastorianus
tccttcattttagccttaggcgcgg

SEQ ID NO: 132087 - DNA, 25 bp, Saccharomyces pastorianus
tggaaaacctgttacgtcgttgtca

SEQ ID NO: 132088 - DNA, 25 bp, Saccharomyces pastorianus
cattccattagatatgtggtcccta

SEQ ID NO: 132089 - DNA, 25 bp, Saccharomyces pastorianus
tggtccctaactattcttcaatcta

SEQ ID NO: 132090 - DNA, 25 bp, Saccharomyces pastorianus
gtcgttgtcaactaaactacttgtt

SEQ ID NO: 132091 - DNA, 25 bp, Saccharomyces pastorianus
aatcagatgctggtcatggcgtaaa

SEQ ID NO: 132092 - DNA, 25 bp, Saccharomyces pastorianus
gaaaaatactctcaaaccgtcatgt

SEQ ID NO: 132093 - DNA, 25 bp, Saccharomyces pastorianus
tattacctgtggacctgataagaac

SEQ ID NO: 132094 - DNA, 25 bp, Saccharomyces pastorianus
taggcgcgggagtatttaccagtat

SEQ ID NO: 132095 - DNA, 25 bp, Saccharomyces pastorianus
actacttgttgaacgatcagcggtt

SEQ ID NO: 132096 - DNA, 25 bp, Saccharomyces pastorianus
agatcgccgaggcaaactctactgc

SEQ ID NO: 132097 - DNA, 25 bp, Saccharomyces pastorianus
tctactgcgcctattatggccgaag

SEQ ID NO: 132098 - DNA, 25 bp, Saccharomyces pastorianus
aacgatggattgtcactggagggaa

SEQ ID NO: 132099 - DNA, 25 bp, Saccharomyces pastorianus
gatcaggagggtattcgtggtctat

SEQ ID NO: 132100 - DNA, 25 bp, Saccharomyces pastorianus
tacaactttctttccctaagcatag

SEQ ID NO: 132101 - DNA, 25 bp, Saccharomyces pastorianus
gtattttcaattgctcattcaacag

SEQ ID NO: 132102 - DNA, 25 bp, Saccharomyces pastorianus
attgacgtaatcaacgccctatttg

SEQ ID NO: 132103 - DNA, 25 bp, Saccharomyces pastorianus
acagccctttgatgtagcaagacta

SEQ ID NO: 132104 - DNA, 25 bp, Saccharomyces pastorianus
tatatccttgactattgcaccacag

SEQ ID NO: 132105 - DNA, 25 bp, Saccharomyces pastorianus
accacagtccctacatacaattgac

SEQ ID NO: 132106 - DNA, 25 bp, Saccharomyces pastorianus
gcatagatacttggttcacaggatt

SEQ ID NO: 132107 - DNA, 25 bp, Saccharomyces pastorianus
ttgggaaggctatttacaagattgt

SEQ ID NO: 132108 - DNA, 25 bp, Saccharomyces pastorianus
attacgtacgctgggtcagtttgat

SEQ ID NO: 132109 - DNA, 25 bp, Saccharomyces pastorianus
aagtatgcaatgatcaggattcttt

SEQ ID NO: 132110 - DNA, 25 bp, Saccharomyces pastorianus
tcaatatcaaaaacttgggaaggct

SEQ ID NO: 132111 - DNA, 25 bp, Saccharomyces pastorianus
aaggctggtttatgaaagtatgcaa

SEQ ID NO: 132112 - DNA, 25 bp, Saccharomyces pastorianus
ggacatgcataataattcaatatca

SEQ ID NO: 132113 - DNA, 25 bp, Saccharomyces pastorianus
atgatcaggattctttattacgtac

SEQ ID NO: 132114 - DNA, 25 bp, Saccharomyces pastorianus
tttgagttgcacacttactctgggt

SEQ ID NO: 132115 - DNA, 25 bp, Saccharomyces pastorianus
agttgcacacttactctgggtatat

SEQ ID NO: 132116 - DNA, 25 bp, Saccharomyces pastorianus
gcacacttactctgggtatataaaa

SEQ ID NO: 132117 - DNA, 25 bp, Saccharomyces pastorianus
tctttattacgtacgctgggtcagt

SEQ ID NO: 132118 - DNA, 25 bp, Saccharomyces pastorianus
gtagcacatcccttacctgaaaaga

SEQ ID NO: 132119 - DNA, 25 bp, Saccharomyces pastorianus
gatgagcacccatctataagatatg

SEQ ID NO: 132120 - DNA, 25 bp, Saccharomyces pastorianus
gtatacgtgatgacggaccaggaat

SEQ ID NO: 132121 - DNA, 25 bp, Saccharomyces pastorianus
aaacataacggacccaactgcctgg

SEQ ID NO: 132122 - DNA, 25 bp, Saccharomyces pastorianus
gttgaaaagccgacagtataccatt

SEQ ID NO: 132123 - DNA, 25 bp, Saccharomyces pastorianus
atatgacatgaatggcacatcgcct

SEQ ID NO: 132124 - DNA, 25 bp, Saccharomyces pastorianus
agggtttatgccttcgtatacgtga

SEQ ID NO: 132125 - DNA, 25 bp, Saccharomyces pastorianus
accattgtaaggtgttccagttcaa

SEQ ID NO: 132126 - DNA, 25 bp, Saccharomyces pastorianus
aagaccaagtggacctcaggaagag

SEQ ID NO: 132127 - DNA, 25 bp, Saccharomyces pastorianus
atggcacatcgcctgccgaagaaaa

SEQ ID NO: 132128 - DNA, 25 bp, Saccharomyces pastorianus
agatatgtagcacatcccttacctg

SEQ ID NO: 132129 - DNA, 25 bp, Saccharomyces pastorianus
agatcacgttctccgcaaatcaagt

SEQ ID NO: 132130 - DNA, 25 bp, Saccharomyces pastorianus
aaagtcagtagctcatcttcgctca

SEQ ID NO: 132131 - DNA, 25 bp, Saccharomyces pastorianus
caagctcaggcggtggtggtttatt

SEQ ID NO: 132132 - DNA, 25 bp, Saccharomyces pastorianus
aaaccggtcgtaacttcagcacact

SEQ ID NO: 132133 - DNA, 25 bp, Saccharomyces pastorianus
tctcctactgctaccgatataaact

SEQ ID NO: 132134 - DNA, 25 bp, Saccharomyces pastorianus
aagagtaaatcgagatccccgtcac

SEQ ID NO: 132135 - DNA, 25 bp, Saccharomyces pastorianus
agtgcgagtgcgtcgagatcacgtt

SEQ ID NO: 132136 - DNA, 25 bp, Saccharomyces pastorianus
acacagatcagttgtccgttccagg

SEQ ID NO: 132137 - DNA, 25 bp, Saccharomyces pastorianus
gatggtaatgctgcactgggtgcta

SEQ ID NO: 132138 - DNA, 25 bp, Saccharomyces pastorianus
gctgtcgatccaatccaagtcagat

SEQ ID NO: 132139 - DNA, 25 bp, Saccharomyces pastorianus
aaatcaaaaccaagctctcctactg

SEQ ID NO: 132140 - DNA, 25 bp, Saccharomyces pastorianus
gatgctagcattccaactatctcaa

SEQ ID NO: 132141 - DNA, 25 bp, Saccharomyces pastorianus
aaagcctgggttcagccattctaaa

SEQ ID NO: 132142 - DNA, 25 bp, Saccharomyces pastorianus
tagattcactatgttatgccccaga

SEQ ID NO: 132143 - DNA, 25 bp, Saccharomyces pastorianus
aatgacgccgatcatgattcatcaa

SEQ ID NO: 132144 - DNA, 25 bp, Saccharomyces pastorianus
aagagtcatcacaggtggtgctcct

SEQ ID NO: 132145 - DNA, 25 bp, Saccharomyces pastorianus
aaatactagcggtccaaagcctggg

SEQ ID NO: 132146 - DNA, 25 bp, Saccharomyces pastorianus
gagcacactctatggagtcgggctt

SEQ ID NO: 132147 - DNA, 25 bp, Saccharomyces pastorianus
aataccaccgggacagaggcatttg

SEQ ID NO: 132148 - DNA, 25 bp, Saccharomyces pastorianus
tgtccgtgaaatccttaacctctaa

SEQ ID NO: 132149 - DNA, 25 bp, Saccharomyces pastorianus
atgccccagaagctaatggtgctaa

SEQ ID NO: 132150 - DNA, 25 bp, Saccharomyces pastorianus
tggtgctcctccaaggcatgtggct

SEQ ID NO: 132151 - DNA, 25 bp, Saccharomyces pastorianus
ggaagccaattctcattgggtgctt

SEQ ID NO: 132152 - DNA, 25 bp, Saccharomyces pastorianus
aatggcgcccagttggattctctga

SEQ ID NO: 132153 - DNA, 25 bp, Saccharomyces pastorianus
gacgattattctcttttctctagtt

SEQ ID NO: 132154 - DNA, 25 bp, Saccharomyces pastorianus
aatatcgacgcggatgcatcttatc

SEQ ID NO: 132155 - DNA, 25 bp, Saccharomyces pastorianus
gggagcaccgacttgttatgatctt

SEQ ID NO: 132156 - DNA, 25 bp, Saccharomyces pastorianus
aacggtactattcctaatctcaaca

SEQ ID NO: 132157 - DNA, 25 bp, Saccharomyces pastorianus
tggcggtctaactcacagtagtgat

SEQ ID NO: 132158 - DNA, 25 bp, Saccharomyces pastorianus
aactggattctggtatttcttcaaa

SEQ ID NO: 132159 - DNA, 25 bp, Saccharomyces pastorianus
ataggcaaggcgtacatggcgtgac

SEQ ID NO: 132160 - DNA, 25 bp, Saccharomyces pastorianus
gtagtgatgatgaccgcgctgatga

SEQ ID NO: 132161 - DNA, 25 bp, Saccharomyces pastorianus
ggaccaacagttgcgtgcggaaaaa

SEQ ID NO: 132162 - DNA, 25 bp, Saccharomyces pastorianus
tggtactccaactagatcaactctc

SEQ ID NO: 132163 - DNA, 25 bp, Saccharomyces pastorianus
aagagagcatatctagtggttctag

SEQ ID NO: 132164 - DNA, 25 bp, Saccharomyces pastorianus
gatcctacgcgtggtagtctgccat

SEQ ID NO: 132165 - DNA, 25 bp, Saccharomyces pastorianus
ggcatagatggaaaaagtcaggcaa

SEQ ID NO: 132166 - DNA, 25 bp, Saccharomyces pastorianus
atggactcggtgacaaattttttct

SEQ ID NO: 132167 - DNA, 25 bp, Saccharomyces pastorianus
aattttttctggaatgacacctata

SEQ ID NO: 132168 - DNA, 25 bp, Saccharomyces pastorianus
gttctagaactagtgatcctacgcg

SEQ ID NO: 132169 - DNA, 25 bp, Saccharomyces pastorianus
gcgtggtagtctgccatcttccagt

SEQ ID NO: 132170 - DNA, 25 bp, Saccharomyces pastorianus
ctccaactagatcaactctcaaggg

SEQ ID NO: 132171 - DNA, 25 bp, Saccharomyces pastorianus
gacacctataatgctggtactccaa

SEQ ID NO: 132172 - DNA, 25 bp, Saccharomyces pastorianus
gaactagtgatcctacgcgtggtag

SEQ ID NO: 132173 - DNA, 25 bp, Saccharomyces pastorianus
aatacggaagttggccagttcttag

SEQ ID NO: 132174 - DNA, 25 bp, Saccharomyces pastorianus
gggacaccaaacacacatcagattt

SEQ ID NO: 132175 - DNA, 25 bp, Saccharomyces pastorianus
ttagggcccaaattggctggaccac

SEQ ID NO: 132176 - DNA, 25 bp, Saccharomyces pastorianus
gaacaatttacaaggcaatcacgaa

SEQ ID NO: 132177 - DNA, 25 bp, Saccharomyces pastorianus
gtcaacatatatgcatacgccaata

SEQ ID NO: 132178 - DNA, 25 bp, Saccharomyces pastorianus
agcgcagtcgacgtcaacatatatg

SEQ ID NO: 132179 - DNA, 25 bp, Saccharomyces pastorianus
atggtcacagcgcagtcgacgtcaa

SEQ ID NO: 132180 - DNA, 25 bp, Saccharomyces pastorianus
aattggctggaccacgcatggtcac

SEQ ID NO: 132181 - DNA, 25 bp, Saccharomyces pastorianus
gaacctgagcgaagtcactgatttg

SEQ ID NO: 132182 - DNA, 25 bp, Saccharomyces pastorianus
atggtatcatttagggcccaaattg

SEQ ID NO: 132183 - DNA, 25 bp, Saccharomyces pastorianus
agctacatggtcatatgtcttgaac

SEQ ID NO: 132184 - DNA, 25 bp, Saccharomyces pastorianus
aaaaggcttctccatatggtcacca

SEQ ID NO: 132185 - DNA, 25 bp, Saccharomyces pastorianus
gaggctcaatctaatggctggcagt

SEQ ID NO: 132186 - DNA, 25 bp, Saccharomyces pastorianus
ttttggtctctacgtcggatcatga

SEQ ID NO: 132187 - DNA, 25 bp, Saccharomyces pastorianus
aaaacgatccagcttcgcaggtaag

SEQ ID NO: 132188 - DNA, 25 bp, Saccharomyces pastorianus
cgggtggtttagtcacttcaagaca

SEQ ID NO: 132189 - DNA, 25 bp, Saccharomyces pastorianus
gcagataacgacattccttttgaaa

SEQ ID NO: 132190 - DNA, 25 bp, Saccharomyces pastorianus
gaattgatcatgctggtcaccaaaa

SEQ ID NO: 132191 - DNA, 25 bp, Saccharomyces pastorianus
gccatttctaccctcaaggcgaaaa

SEQ ID NO: 132192 - DNA, 25 bp, Saccharomyces pastorianus
tacctttcttgggtctctttgcaga

SEQ ID NO: 132193 - DNA, 25 bp, Saccharomyces pastorianus
aggaagatcttatcgctacgcacca

SEQ ID NO: 132194 - DNA, 25 bp, Saccharomyces pastorianus
gtagacttactcatgggtggcggca

SEQ ID NO: 132195 - DNA, 25 bp, Saccharomyces pastorianus
atccaccttatgataactgcccatt

SEQ ID NO: 132196 - DNA, 25 bp, Saccharomyces pastorianus
gaatttgtggaggtcaccagcctac

SEQ ID NO: 132197 - DNA, 25 bp, Saccharomyces pastorianus
tattgctgctgctttgtttttgcca

SEQ ID NO: 132198 - DNA, 25 bp, Saccharomyces pastorianus
agacattggttaccatcatccacct

SEQ ID NO: 132199 - DNA, 25 bp, Saccharomyces pastorianus
ggtcaccagcctacagagagtattt

SEQ ID NO: 132200 - DNA, 25 bp, Saccharomyces pastorianus
gatttcactttccaaggttactctt

SEQ ID NO: 132201 - DNA, 25 bp, Saccharomyces pastorianus
gtgacgatcccaacactatggcaaa

SEQ ID NO: 132202 - DNA, 25 bp, Saccharomyces pastorianus
cggctttaccgtttctattcatgaa

SEQ ID NO: 132203 - DNA, 25 bp, Saccharomyces pastorianus
ggcaaacgtccatggatttcatcaa

SEQ ID NO: 132204 - DNA, 25 bp, Saccharomyces pastorianus
aacctgatgagttttctttcgaacg

SEQ ID NO: 132205 - DNA, 25 bp, Saccharomyces pastorianus
actgcccattggacaaggaggtcta

SEQ ID NO: 132206 - DNA, 25 bp, Saccharomyces pastorianus
aatatattccgagttccatctccgc

SEQ ID NO: 132207 - DNA, 25 bp, Saccharomyces pastorianus
gttctcctcctaacattgaattcca

SEQ ID NO: 132208 - DNA, 25 bp, Saccharomyces pastorianus
atatcactccatcttttgctaacaa

SEQ ID NO: 132209 - DNA, 25 bp, Saccharomyces pastorianus
gcaagcgaagactccgaagccatgg

SEQ ID NO: 132210 - DNA, 25 bp, Saccharomyces pastorianus
gatgccccgatcgacactaaaacaa

SEQ ID NO: 132211 - DNA, 25 bp, Saccharomyces pastorianus
aagcttgttacgtcactttggtgag

SEQ ID NO: 132212 - DNA, 25 bp, Saccharomyces pastorianus
agtcaccaaagctgtttcttccgaa

SEQ ID NO: 132213 - DNA, 25 bp, Saccharomyces pastorianus
atctccgctgcatttgattttacct

SEQ ID NO: 132214 - DNA, 25 bp, Saccharomyces pastorianus
attgcaggtgcggttattgttctcc

SEQ ID NO: 132215 - DNA, 25 bp, Saccharomyces pastorianus
gatctatatcccctgaacaacaagt

SEQ ID NO: 132216 - DNA, 25 bp, Saccharomyces pastorianus
aaggctctgaaagctgccgctgaaa

SEQ ID NO: 132217 - DNA, 25 bp, Saccharomyces pastorianus
agctctggcaaatttcccatctttt

SEQ ID NO: 132218 - DNA, 25 bp, Saccharomyces pastorianus
atcacttgatctgtcagctctggca

SEQ ID NO: 132219 - DNA, 25 bp, Saccharomyces pastorianus
ctttgatccaaggactggtgtgcct

SEQ ID NO: 132220 - DNA, 25 bp, Saccharomyces pastorianus
ttatgattttcctaatgctcctcca

SEQ ID NO: 132221 - DNA, 25 bp, Saccharomyces pastorianus
gtaccgtctcctaccgtagatatat

SEQ ID NO: 132222 - DNA, 25 bp, Saccharomyces pastorianus
gccactcagcgtccacaagatatga

SEQ ID NO: 132223 - DNA, 25 bp, Saccharomyces pastorianus
tgttttccactccattttaccatca

SEQ ID NO: 132224 - DNA, 25 bp, Saccharomyces pastorianus
caaacttatttggtggtcgatggtc

SEQ ID NO: 132225 - DNA, 25 bp, Saccharomyces pastorianus
gcggtatttaccttgatttcagtca

SEQ ID NO: 132226 - DNA, 25 bp, Saccharomyces pastorianus
acacaaatgggttatccgccactca

SEQ ID NO: 132227 - DNA, 25 bp, Saccharomyces pastorianus
aaatcaaaacacagcctccaacggg

SEQ ID NO: 132228 - DNA, 25 bp, Saccharomyces pastorianus
tcccgtcgctgttattggcgaattg

SEQ ID NO: 132229 - DNA, 25 bp, Saccharomyces pastorianus
gagattaaatgactgccaagcgttt

SEQ ID NO: 132230 - DNA, 25 bp, Saccharomyces pastorianus
aagtcccgtcgctgttattggcgaa

SEQ ID NO: 132231 - DNA, 25 bp, Saccharomyces pastorianus
gactaagtcccgtcgctgttattgg

SEQ ID NO: 132232 - DNA, 25 bp, Saccharomyces pastorianus
taagtggactaagtcccgtcgctgt

SEQ ID NO: 132233 - DNA, 25 bp, Saccharomyces pastorianus
gttttgtaagaaacatggcattcct

SEQ ID NO: 132234 - DNA, 25 bp, Saccharomyces pastorianus
tggcgaattggttaacgatgacgaa

SEQ ID NO: 132235 - DNA, 25 bp, Saccharomyces pastorianus
gatgacgaacaaggaactatgatga

SEQ ID NO: 132236 - DNA, 25 bp, Saccharomyces pastorianus
tcgatttgtgtaaactaagtggact

SEQ ID NO: 132237 - DNA, 25 bp, Saccharomyces pastorianus
aatgactgccaagcgttttgtaaga

SEQ ID NO: 132238 - DNA, 25 bp, Saccharomyces pastorianus
cggtgtcgatttgtgtaaactaagt

SEQ ID NO: 132239 - DNA, 25 bp, Saccharomyces pastorianus
aaaaccagggcacatctgtcccttg

SEQ ID NO: 132240 - DNA, 25 bp, Saccharomyces pastorianus
cagggcacatctgtcccttgagagc

SEQ ID NO: 132241 - DNA, 25 bp, Saccharomyces pastorianus
tttttaaaaccagggcacatctgtc

SEQ ID NO: 132242 - DNA, 25 bp, Saccharomyces pastorianus
aaccagggcacatctgtcccttgag

SEQ ID NO: 132243 - DNA, 25 bp, Saccharomyces pastorianus
gcagactcttcctctacgccaaaat

SEQ ID NO: 132244 - DNA, 25 bp, Saccharomyces pastorianus
aaaccagggcacatctgtcccttga

SEQ ID NO: 132245 - DNA, 25 bp, Saccharomyces pastorianus
accagggcacatctgtcccttgaga

SEQ ID NO: 132246 - DNA, 25 bp, Saccharomyces pastorianus
taaaaccagggcacatctgtccctt

SEQ ID NO: 132247 - DNA, 25 bp, Saccharomyces pastorianus
ttgcagactcttcctctacgccaaa

SEQ ID NO: 132248 - DNA, 25 bp, Saccharomyces pastorianus
ccagggcacatctgtcccttgagag

SEQ ID NO: 132249 - DNA, 25 bp, Saccharomyces pastorianus
atcatttttaaaaccagggcacatc

SEQ ID NO: 132250 - DNA, 25 bp, Saccharomyces pastorianus
cagggcacatctgtcccttgagagc

SEQ ID NO: 132251 - DNA, 25 bp, Saccharomyces pastorianus
tttttaaaaccagggcacatctgtc

SEQ ID NO: 132252 - DNA, 25 bp, Saccharomyces pastorianus
gcagactcttcctctacgccaaaat

SEQ ID NO: 132253 - DNA, 25 bp, Saccharomyces pastorianus
aaaccagggcacatctgtcccttga

SEQ ID NO: 132254 - DNA, 25 bp, Saccharomyces pastorianus
acttgtagggctcttgcagactctt

SEQ ID NO: 132255 - DNA, 25 bp, Saccharomyces pastorianus
accagggcacatctgtcccttgaga

SEQ ID NO: 132256 - DNA, 25 bp, Saccharomyces pastorianus
taaaaccagggcacatctgtccctt

SEQ ID NO: 132257 - DNA, 25 bp, Saccharomyces pastorianus
cttcctctacgccaaaatcattttt

SEQ ID NO: 132258 - DNA, 25 bp, Saccharomyces pastorianus
ttgcagactcttcctctacgccaaa

SEQ ID NO: 132259 - DNA, 25 bp, Saccharomyces pastorianus
atctgtcccttgagagccgctgatg

SEQ ID NO: 132260 - DNA, 25 bp, Saccharomyces pastorianus
atcatttttaaaaccagggcacatc

SEQ ID NO: 132261 - DNA, 25 bp, Saccharomyces pastorianus
gagtgataatggaccttccactatg

SEQ ID NO: 132262 - DNA, 25 bp, Saccharomyces pastorianus
gaatgagtgataatggaccttccac

SEQ ID NO: 132263 - DNA, 25 bp, Saccharomyces pastorianus
gtgataatggaccttccactatgag

SEQ ID NO: 132264 - DNA, 25 bp, Saccharomyces pastorianus
gataatggaccttccactatgagaa

SEQ ID NO: 132265 - DNA, 25 bp, Saccharomyces pastorianus
atgagtgataatggaccttccacta

SEQ ID NO: 132266 - DNA, 25 bp, Saccharomyces pastorianus
tgtgcctatacgaatgagtgataat

SEQ ID NO: 132267 - DNA, 25 bp, Saccharomyces pastorianus
tctgtgcctatacgaatgagtgata

SEQ ID NO: 132268 - DNA, 25 bp, Saccharomyces pastorianus
tggaccttccactatgagaacaggc

SEQ ID NO: 132269 - DNA, 25 bp, Saccharomyces pastorianus
atggaccttccactatgagaacagg

SEQ ID NO: 132270 - DNA, 25 bp, Saccharomyces pastorianus
aatggaccttccactatgagaacag

SEQ ID NO: 132271 - DNA, 25 bp, Saccharomyces pastorianus
ataatggaccttccactatgagaac

SEQ ID NO: 132272 - DNA, 25 bp, Saccharomyces pastorianus
gggtttcttccgaagaattgctgaa

SEQ ID NO: 132273 - DNA, 25 bp, Saccharomyces pastorianus
tacttggacatatcttctttgaatt

SEQ ID NO: 132274 - DNA, 25 bp, Saccharomyces pastorianus
gaaggaggaatctaatttgcggaaa

SEQ ID NO: 132275 - DNA, 25 bp, Saccharomyces pastorianus
caccttcgacgaaatttccaagatc

SEQ ID NO: 132276 - DNA, 25 bp, Saccharomyces pastorianus
acgatttcgcgtatgataagacaga

SEQ ID NO: 132277 - DNA, 25 bp, Saccharomyces pastorianus
gtatttcccgtacaaacaatatccg

SEQ ID NO: 132278 - DNA, 25 bp, Saccharomyces pastorianus
aagatcctcgaaactataccttccg

SEQ ID NO: 132279 - DNA, 25 bp, Saccharomyces pastorianus
agtcttcagtgcgaaaatttttcca

SEQ ID NO: 132280 - DNA, 25 bp, Saccharomyces pastorianus
gagcttgttatttttccccaatgaa

SEQ ID NO: 132281 - DNA, 25 bp, Saccharomyces pastorianus
cagaacttggttgcggtgatgaaac

SEQ ID NO: 132282 - DNA, 25 bp, Saccharomyces pastorianus
gagtttattaatttcaccttcgacg

SEQ ID NO: 132283 - DNA, 25 bp, Saccharomyces pastorianus
atgcctttgaggatttaccagaata

SEQ ID NO: 132284 - DNA, 25 bp, Saccharomyces pastorianus
aatgagagatcatcgacaccttgta

SEQ ID NO: 132285 - DNA, 25 bp, Saccharomyces pastorianus
gaacttggacctcagatgccatctt

SEQ ID NO: 132286 - DNA, 25 bp, Saccharomyces pastorianus
tgggacaagactccccgaacttgga

SEQ ID NO: 132287 - DNA, 25 bp, Saccharomyces pastorianus
aagaccatttcaaacaattgcgtga

SEQ ID NO: 132288 - DNA, 25 bp, Saccharomyces pastorianus
cttatccagggagcaagcgttaatg

SEQ ID NO: 132289 - DNA, 25 bp, Saccharomyces pastorianus
gatgccatcttattgaacatacttt

SEQ ID NO: 132290 - DNA, 25 bp, Saccharomyces pastorianus
ggatcaagcctcttattacgaagat

SEQ ID NO: 132291 - DNA, 25 bp, Saccharomyces pastorianus
gatagtttgcatgatctgacgataa

SEQ ID NO: 132292 - DNA, 25 bp, Saccharomyces pastorianus
aaatcattcgatctaaccacactag

SEQ ID NO: 132293 - DNA, 25 bp, Saccharomyces pastorianus
ttatgtcactatggaggtttctcgt

SEQ ID NO: 132294 - DNA, 25 bp, Saccharomyces pastorianus
atggacaattcctcagatctgaaat

SEQ ID NO: 132295 - DNA, 25 bp, Saccharomyces pastorianus
tatttagcgcagtcgaggtcgttaa

SEQ ID NO: 132296 - DNA, 25 bp, Saccharomyces pastorianus
agattatacgctcttttggaaaagg

SEQ ID NO: 132297 - DNA, 25 bp, Saccharomyces pastorianus
ggatagcgacaaattcactgcccct

SEQ ID NO: 132298 - DNA, 25 bp, Saccharomyces pastorianus
gatctgaaatccttgataagcggta

SEQ ID NO: 132299 - DNA, 25 bp, Saccharomyces pastorianus
ttaagggtactgcagtcgcatccta

SEQ ID NO: 132300 - DNA, 25 bp, Saccharomyces pastorianus
tgtggatactacaactcttcatatg

SEQ ID NO: 132301 - DNA, 25 bp, Saccharomyces pastorianus
gaccgattgcaaagtgtcccaaggg

SEQ ID NO: 132302 - DNA, 25 bp, Saccharomyces pastorianus
gcagtcgcatcctaagcaaacatat

SEQ ID NO: 132303 - DNA, 25 bp, Saccharomyces pastorianus
gtcgaagtaccatgacttttttggg

SEQ ID NO: 132304 - DNA, 25 bp, Saccharomyces pastorianus
aagctgatttatactgaccgattgc

SEQ ID NO: 132305 - DNA, 25 bp, Saccharomyces pastorianus
tagggaagtccatagtttctctact

SEQ ID NO: 132306 - DNA, 25 bp, Saccharomyces pastorianus
taataggcgctgacctgagcacaat

SEQ ID NO: 132307 - DNA, 25 bp, Saccharomyces pastorianus
tataacgccagattcgtcctcagtt

SEQ ID NO: 132308 - DNA, 25 bp, Saccharomyces pastorianus
ccctcgacaggttcatagatacttt

SEQ ID NO: 132309 - DNA, 25 bp, Saccharomyces pastorianus
gaagcttgactacatcacagagttt

SEQ ID NO: 132310 - DNA, 25 bp, Saccharomyces pastorianus
gattcgtcctcagttgcaatcgaag

SEQ ID NO: 132311 - DNA, 25 bp, Saccharomyces pastorianus
gaatttcgtcattgctaaaggagcc

SEQ ID NO: 132312 - DNA, 25 bp, Saccharomyces pastorianus
gaagcaaaacctcaatcaccacaat

SEQ ID NO: 132313 - DNA, 25 bp, Saccharomyces pastorianus
tagtttctctacttttgcgatgtaa

SEQ ID NO: 132314 - DNA, 25 bp, Saccharomyces pastorianus
taaaaagacgttgaccctcgacagg

SEQ ID NO: 132315 - DNA, 25 bp, Saccharomyces pastorianus
ggattattcccgatgagacgagttt

SEQ ID NO: 132316 - DNA, 25 bp, Saccharomyces pastorianus
tgagatatttgaagcatgtctccag

SEQ ID NO: 132317 - DNA, 25 bp, Saccharomyces pastorianus
agatatttgaagcatgtctccagaa

SEQ ID NO: 132318 - DNA, 25 bp, Saccharomyces pastorianus
tatttgaagcatgtctccagaagat

SEQ ID NO: 132319 - DNA, 25 bp, Saccharomyces pastorianus
atgagatatttgaagcatgtctcca

SEQ ID NO: 132320 - DNA, 25 bp, Saccharomyces pastorianus
gatatttgaagcatgtctccagaag

SEQ ID NO: 132321 - DNA, 25 bp, Saccharomyces pastorianus
atatttgaagcatgtctccagaaga

SEQ ID NO: 132322 - DNA, 25 bp, Saccharomyces pastorianus
atttgaagcatgtctccagaagatt

SEQ ID NO: 132323 - DNA, 25 bp, Saccharomyces pastorianus
tgtctccagaagatttaagaacggt

SEQ ID NO: 132324 - DNA, 25 bp, Saccharomyces pastorianus
gcatgtctccagaagatttaagaac

SEQ ID NO: 132325 - DNA, 25 bp, Saccharomyces pastorianus
gagatatttgaagcatgtctccaga

SEQ ID NO: 132326 - DNA, 25 bp, Saccharomyces pastorianus
gaagcatgtctccagaagatttaag

SEQ ID NO: 132327 - DNA, 25 bp, Saccharomyces pastorianus
ggcatggagccgctatcagaacgat

SEQ ID NO: 132328 - DNA, 25 bp, Saccharomyces pastorianus
aggaacctgaccttaacactgttgt

SEQ ID NO: 132329 - DNA, 25 bp, Saccharomyces pastorianus
gatggcccatttcacaaagacgtac

SEQ ID NO: 132330 - DNA, 25 bp, Saccharomyces pastorianus
gcaggaaattcttacgcggttttga

SEQ ID NO: 132331 - DNA, 25 bp, Saccharomyces pastorianus
tgttgtccatacagccgcacttgaa

SEQ ID NO: 132332 - DNA, 25 bp, Saccharomyces pastorianus
cttggcattgtctttgaggttccga

SEQ ID NO: 132333 - DNA, 25 bp, Saccharomyces pastorianus
tcagaacgatttacgtcacctggcc

SEQ ID NO: 132334 - DNA, 25 bp, Saccharomyces pastorianus
gtaatagccgtctacatcctaatca

SEQ ID NO: 132335 - DNA, 25 bp, Saccharomyces pastorianus
tgcatggccatcacttccagataat

SEQ ID NO: 132336 - DNA, 25 bp, Saccharomyces pastorianus
agctgtattatcgtaccctaccaag

SEQ ID NO: 132337 - DNA, 25 bp, Saccharomyces pastorianus
gtaatcaactcactggaccacatga

SEQ ID NO: 132338 - DNA, 25 bp, Saccharomyces pastorianus
gaaaattctcaaaatcttcggacaa

SEQ ID NO: 132339 - DNA, 25 bp, Saccharomyces pastorianus
aaaaatgctggctcgcaggcaaagg

SEQ ID NO: 132340 - DNA, 25 bp, Saccharomyces pastorianus
agaagctgttgcgtggttggactca

SEQ ID NO: 132341 - DNA, 25 bp, Saccharomyces pastorianus
gcgtggttggactcagtatggttta

SEQ ID NO: 132342 - DNA, 25 bp, Saccharomyces pastorianus
agatgagcgttgtgcagttcaagaa

SEQ ID NO: 132343 - DNA, 25 bp, Saccharomyces pastorianus
attggaaatggctccttctttagaa

SEQ ID NO: 132344 - DNA, 25 bp, Saccharomyces pastorianus
tgaccttaacgggtaaactatcgag

SEQ ID NO: 132345 - DNA, 25 bp, Saccharomyces pastorianus
tggagccaccattgaacaaatctgt

SEQ ID NO: 132346 - DNA, 25 bp, Saccharomyces pastorianus
gataatatattctcactacgttcaa

SEQ ID NO: 132347 - DNA, 25 bp, Saccharomyces pastorianus
actacgttcaacactctttgaggtt

SEQ ID NO: 132348 - DNA, 25 bp, Saccharomyces pastorianus
tataaaatcgcaccccaacaatctg

SEQ ID NO: 132349 - DNA, 25 bp, Saccharomyces pastorianus
aaaggctatctgtcctgtcgatgta

SEQ ID NO: 132350 - DNA, 25 bp, Saccharomyces pastorianus
gtcctgtcgatgtactctaccaagg

SEQ ID NO: 132351 - DNA, 25 bp, Saccharomyces pastorianus
gctcccgtctctgatggtaggttga

SEQ ID NO: 132352 - DNA, 25 bp, Saccharomyces pastorianus
gggtgaccaggcacatccaaagatt

SEQ ID NO: 132353 - DNA, 25 bp, Saccharomyces pastorianus
gataccagaatcaggctcttcttca

SEQ ID NO: 132354 - DNA, 25 bp, Saccharomyces pastorianus
agctgaactttgcagatcgttttaa

SEQ ID NO: 132355 - DNA, 25 bp, Saccharomyces pastorianus
gtacgatgtcggtgattccactatc

SEQ ID NO: 132356 - DNA, 25 bp, Saccharomyces pastorianus
ctgataacttacatcttccgatcct

SEQ ID NO: 132357 - DNA, 25 bp, Saccharomyces pastorianus
tccttcctccgcttaatggtgacaa

SEQ ID NO: 132358 - DNA, 25 bp, Saccharomyces pastorianus
tctaccaaggagtcgtttaccaact

SEQ ID NO: 132359 - DNA, 25 bp, Saccharomyces pastorianus
gacaaatccgcgttaaagctgaact

SEQ ID NO: 132360 - DNA, 25 bp, Saccharomyces pastorianus
agaagcattctttcacgacgtgcca

SEQ ID NO: 132361 - DNA, 25 bp, Saccharomyces pastorianus
tgccacctttggttctctacagaag

SEQ ID NO: 132362 - DNA, 25 bp, Saccharomyces pastorianus
gatgggtgaccaatacgtgcgaaac

SEQ ID NO: 132363 - DNA, 25 bp, Saccharomyces pastorianus
agcttcctggcaagattatctccac

SEQ ID NO: 132364 - DNA, 25 bp, Saccharomyces pastorianus
atagtcggctttttagcttcctggc

SEQ ID NO: 132365 - DNA, 25 bp, Saccharomyces pastorianus
acaagctcatatatcgttcggttag

SEQ ID NO: 132366 - DNA, 25 bp, Saccharomyces pastorianus
tttgcaacccataacagccagcttt

SEQ ID NO: 132367 - DNA, 25 bp, Saccharomyces pastorianus
gaaaccctggagaaactatcccctg

SEQ ID NO: 132368 - DNA, 25 bp, Saccharomyces pastorianus
ataagctgctacctggtccccaaag

SEQ ID NO: 132369 - DNA, 25 bp, Saccharomyces pastorianus
gatgccactttatcttcggaaaccc

SEQ ID NO: 132370 - DNA, 25 bp, Saccharomyces pastorianus
gataacccgttgcatatagtcggct

SEQ ID NO: 132371 - DNA, 25 bp, Saccharomyces pastorianus
gagtacaaaatatccgacaacgatg

SEQ ID NO: 132372 - DNA, 25 bp, Saccharomyces pastorianus
acgagttgctattcgattggagggc

SEQ ID NO: 132373 - DNA, 25 bp, Saccharomyces pastorianus
ttgatcaattgacgagttgctattc

SEQ ID NO: 132374 - DNA, 25 bp, Saccharomyces pastorianus
ggagggcaatttagaagctattaca

SEQ ID NO: 132375 - DNA, 25 bp, Saccharomyces pastorianus
ttcaagttttgtattatccacggca

SEQ ID NO: 132376 - DNA, 25 bp, Saccharomyces pastorianus
ggtataaagatcaggtttccgacaa

SEQ ID NO: 132377 - DNA, 25 bp, Saccharomyces pastorianus
tatccacggcaatgaccctgtgaaa

SEQ ID NO: 132378 - DNA, 25 bp, Saccharomyces pastorianus
ttttacatcatgtgacaagcaggtg

SEQ ID NO: 132379 - DNA, 25 bp, Saccharomyces pastorianus
aagcaggtgtccaaattcaagtttt

SEQ ID NO: 132380 - DNA, 25 bp, Saccharomyces pastorianus
tgccgagaggcatttgatcaattga

SEQ ID NO: 132381 - DNA, 25 bp, Saccharomyces pastorianus
tcaggtttccgacaataaggcattg

SEQ ID NO: 132382 - DNA, 25 bp, Saccharomyces pastorianus
ggcaccttttcttggcgtcctggga

SEQ ID NO: 132383 - DNA, 25 bp, Saccharomyces pastorianus
atcggatcttagtaatagttctgct

SEQ ID NO: 132384 - DNA, 25 bp, Saccharomyces pastorianus
gtcgaaggaaaaattggtctccatg

SEQ ID NO: 132385 - DNA, 25 bp, Saccharomyces pastorianus
aatcaagagggaggcgatggttcta

SEQ ID NO: 132386 - DNA, 25 bp, Saccharomyces pastorianus
gggccgaaatatcggatcttagtaa

SEQ ID NO: 132387 - DNA, 25 bp, Saccharomyces pastorianus
tataacagtagttggagtgtccgtt

SEQ ID NO: 132388 - DNA, 25 bp, Saccharomyces pastorianus
ggatgtggtattagcataaatcaag

SEQ ID NO: 132389 - DNA, 25 bp, Saccharomyces pastorianus
tcaagagggcaccttttcttggcgt

SEQ ID NO: 132390 - DNA, 25 bp, Saccharomyces pastorianus
tggagtgtccgttaatcaagagggc

SEQ ID NO: 132391 - DNA, 25 bp, Saccharomyces pastorianus
gcgtcctgggactttttatatgaaa

SEQ ID NO: 132392 - DNA, 25 bp, Saccharomyces pastorianus
atagttctgctattggatgtggtat

SEQ ID NO: 132393 - DNA, 25 bp, Saccharomyces pastorianus
tcatgattcctgacgtcgaccaatt

SEQ ID NO: 132394 - DNA, 25 bp, Saccharomyces pastorianus
gagactaccgccaacgttaataagg

SEQ ID NO: 132395 - DNA, 25 bp, Saccharomyces pastorianus
gcaggaaatctgcacgccgcgaaac

SEQ ID NO: 132396 - DNA, 25 bp, Saccharomyces pastorianus
cacagaattttcttccacgctaaaa

SEQ ID NO: 132397 - DNA, 25 bp, Saccharomyces pastorianus
gggtgctccgatttttacttgtcat

SEQ ID NO: 132398 - DNA, 25 bp, Saccharomyces pastorianus
gctacttcgcctactaatgttggta

SEQ ID NO: 132399 - DNA, 25 bp, Saccharomyces pastorianus
cgcctgtttaactctttgtgactat

SEQ ID NO: 132400 - DNA, 25 bp, Saccharomyces pastorianus
gaacttgtccagtagtcacttcatg

SEQ ID NO: 132401 - DNA, 25 bp, Saccharomyces pastorianus
caacgcgttttgagtctttgtacaa

SEQ ID NO: 132402 - DNA, 25 bp, Saccharomyces pastorianus
tcgattcttctgaacgtcaacgcgt

SEQ ID NO: 132403 - DNA, 25 bp, Saccharomyces pastorianus
ttgtcatcaactagtctacgcctgt

SEQ ID NO: 132404 - DNA, 25 bp, Saccharomyces pastorianus
ttctgcttctggaaaggtgcaaaat

SEQ ID NO: 132405 - DNA, 25 bp, Saccharomyces pastorianus
aattctgcttctggaaaggtgcaaa

SEQ ID NO: 132406 - DNA, 25 bp, Saccharomyces pastorianus
tataattctgcttctggaaaggtgc

SEQ ID NO: 132407 - DNA, 25 bp, Saccharomyces pastorianus
tagtatcagatccataataaaccaa

SEQ ID NO: 132408 - DNA, 25 bp, Saccharomyces pastorianus
gctggatataattctgcttctggaa

SEQ ID NO: 132409 - DNA, 25 bp, Saccharomyces pastorianus
ggatataattctgcttctggaaagg

SEQ ID NO: 132410 - DNA, 25 bp, Saccharomyces pastorianus
atgactgctggatataattctgctt

SEQ ID NO: 132411 - DNA, 25 bp, Saccharomyces pastorianus
ctgctggatataattctgcttctgg

SEQ ID NO: 132412 - DNA, 25 bp, Saccharomyces pastorianus
gactgctggatataattctgcttct

SEQ ID NO: 132413 - DNA, 25 bp, Saccharomyces pastorianus
gcttctggaaaggtgcaaaatagta

SEQ ID NO: 132414 - DNA, 25 bp, Saccharomyces pastorianus
ggtgcaaaatagtatcagatccata

SEQ ID NO: 132415 - DNA, 25 bp, Saccharomyces pastorianus
gatactattttgcacctttccagaa

SEQ ID NO: 132416 - DNA, 25 bp, Saccharomyces pastorianus
ttgcacctttccagaagcagaatta

SEQ ID NO: 132417 - DNA, 25 bp, Saccharomyces pastorianus
ttggctcttgcactatcctctggtt

SEQ ID NO: 132418 - DNA, 25 bp, Saccharomyces pastorianus
ttgcactatcctctggttggtttat

SEQ ID NO: 132419 - DNA, 25 bp, Saccharomyces pastorianus
tactattttgcacctttccagaagc

SEQ ID NO: 132420 - DNA, 25 bp, Saccharomyces pastorianus
ggttggtttattatggatctgatac

SEQ ID NO: 132421 - DNA, 25 bp, Saccharomyces pastorianus
cctctggttggtttattatggatct

SEQ ID NO: 132422 - DNA, 25 bp, Saccharomyces pastorianus
ttccagaagcagaattatatccagc

SEQ ID NO: 132423 - DNA, 25 bp, Saccharomyces pastorianus
ggatctgatactattttgcaccttt

SEQ ID NO: 132424 - DNA, 25 bp, Saccharomyces pastorianus
tattttgcacctttccagaagcaga

SEQ ID NO: 132425 - DNA, 25 bp, Saccharomyces pastorianus
gcactatcctctggttggtttatta

SEQ ID NO: 132426 - DNA, 25 bp, Saccharomyces pastorianus
tcctgcaagtatcacaactaaatgt

SEQ ID NO: 132427 - DNA, 25 bp, Saccharomyces pastorianus
ctttctaggttttttgtgccatatc

SEQ ID NO: 132428 - DNA, 25 bp, Saccharomyces pastorianus
ggttcaaaatcgcaccttgtcttca

SEQ ID NO: 132429 - DNA, 25 bp, Saccharomyces pastorianus
aaaatcgcaccttgtcttcactctc

SEQ ID NO: 132430 - DNA, 25 bp, Saccharomyces pastorianus
ttgtcttcactctcctgcaagtatc

SEQ ID NO: 132431 - DNA, 25 bp, Saccharomyces pastorianus
ttcactctcctgcaagtatcacaac

SEQ ID NO: 132432 - DNA, 25 bp, Saccharomyces pastorianus
tcacaactaaatgtttttcttttct

SEQ ID NO: 132433 - DNA, 25 bp, Saccharomyces pastorianus
tctaggttttttgtgccatatctta

SEQ ID NO: 132434 - DNA, 25 bp, Saccharomyces pastorianus
actctcctgcaagtatcacaactaa

SEQ ID NO: 132435 - DNA, 25 bp, Saccharomyces pastorianus
tttctttctaggttttttgtgccat

SEQ ID NO: 132436 - DNA, 25 bp, Saccharomyces pastorianus
ttcaaaatcgcaccttgtcttcact

SEQ ID NO: 132437 - DNA, 25 bp, Saccharomyces pastorianus
aaactagctaaactttcctctgtga

SEQ ID NO: 132438 - DNA, 25 bp, Saccharomyces pastorianus
ggcggtaaaatcgaatgcacatctg

SEQ ID NO: 132439 - DNA, 25 bp, Saccharomyces pastorianus
agcttggaactaccacttttggcaa

SEQ ID NO: 132440 - DNA, 25 bp, Saccharomyces pastorianus
gatttcttccccaagttgaggcaaa

SEQ ID NO: 132441 - DNA, 25 bp, Saccharomyces pastorianus
aagctaaacttttcgaatgtcaccg

SEQ ID NO: 132442 - DNA, 25 bp, Saccharomyces pastorianus
agagcttgccaaaattgatttcttc

SEQ ID NO: 132443 - DNA, 25 bp, Saccharomyces pastorianus
tgataaaattgacctcccagagcta

SEQ ID NO: 132444 - DNA, 25 bp, Saccharomyces pastorianus
acagtgctccgaagaacatttttat

SEQ ID NO: 132445 - DNA, 25 bp, Saccharomyces pastorianus
tttacatcaccaaaagccggtcgtt

SEQ ID NO: 132446 - DNA, 25 bp, Saccharomyces pastorianus
tttcctctgtgaacagttctctaga

SEQ ID NO: 132447 - DNA, 25 bp, Saccharomyces pastorianus
aaagccggtcgttcgatcataagag

SEQ ID NO: 132448 - DNA, 25 bp, Saccharomyces pastorianus
gaccgaatattctagatcacaacat

SEQ ID NO: 132449 - DNA, 25 bp, Saccharomyces pastorianus
ggttaacactaatgcaacgatccct

SEQ ID NO: 132450 - DNA, 25 bp, Saccharomyces pastorianus
aaatcatccgctgcagttgaaccta

SEQ ID NO: 132451 - DNA, 25 bp, Saccharomyces pastorianus
gttaattaaatcatccgctgcagtt

SEQ ID NO: 132452 - DNA, 25 bp, Saccharomyces pastorianus
gaatagcatgttgaaccagttgaac

SEQ ID NO: 132453 - DNA, 25 bp, Saccharomyces pastorianus
gaaccagttgaacacaatcttaaga

SEQ ID NO: 132454 - DNA, 25 bp, Saccharomyces pastorianus
tttattcttgtttctgcagttaatt

SEQ ID NO: 132455 - DNA, 25 bp, Saccharomyces pastorianus
gaaaacacaaacattcttcactagt

SEQ ID NO: 132456 - DNA, 25 bp, Saccharomyces pastorianus
gttgaacctaatggtggaccgaata

SEQ ID NO: 132457 - DNA, 25 bp, Saccharomyces pastorianus
cttcactagtatttctgttattcaa

SEQ ID NO: 132458 - DNA, 25 bp, Saccharomyces pastorianus
atccgctgcagttgaacctaatggt

SEQ ID NO: 132459 - DNA, 25 bp, Saccharomyces pastorianus
tctcttagtctttccttccaagatg

SEQ ID NO: 132460 - DNA, 25 bp, Saccharomyces pastorianus
gagtgccattgtcattactttcaac

SEQ ID NO: 132461 - DNA, 25 bp, Saccharomyces pastorianus
cactcattccctgcagaactttaat

SEQ ID NO: 132462 - DNA, 25 bp, Saccharomyces pastorianus
gatagattttgcctccgatagtggg

SEQ ID NO: 132463 - DNA, 25 bp, Saccharomyces pastorianus
ttttcagcatccttgccactagttt

SEQ ID NO: 132464 - DNA, 25 bp, Saccharomyces pastorianus
gagtcagatgtatctttctccacga

SEQ ID NO: 132465 - DNA, 25 bp, Saccharomyces pastorianus
tttgggctcttttttctcttagtct

SEQ ID NO: 132466 - DNA, 25 bp, Saccharomyces pastorianus
tgtactcgtttgttgcttttcagca

SEQ ID NO: 132467 - DNA, 25 bp, Saccharomyces pastorianus
ttatacagatcctcacgttcttgca

SEQ ID NO: 132468 - DNA, 25 bp, Saccharomyces pastorianus
gaaatcccgttccacagttgttggt

SEQ ID NO: 132469 - DNA, 25 bp, Saccharomyces pastorianus
gttcttgcacgatttgttcatcact

SEQ ID NO: 132470 - DNA, 25 bp, Saccharomyces pastorianus
gagtcaagcgctactatcgttaccc

SEQ ID NO: 132471 - DNA, 25 bp, Saccharomyces pastorianus
actgctactgctaaggatcttgcta

SEQ ID NO: 132472 - DNA, 25 bp, Saccharomyces pastorianus
gagagttcttctagggatgcccaat

SEQ ID NO: 132473 - DNA, 25 bp, Saccharomyces pastorianus
aattacacgggtgcggctgattcta

SEQ ID NO: 132474 - DNA, 25 bp, Saccharomyces pastorianus
ggtcatcaagttcttctgcaagcac

SEQ ID NO: 132475 - DNA, 25 bp, Saccharomyces pastorianus
tctactatcgagaccacttctgtta

SEQ ID NO: 132476 - DNA, 25 bp, Saccharomyces pastorianus
actaccgctggtattttcactaacg

SEQ ID NO: 132477 - DNA, 25 bp, Saccharomyces pastorianus
tgttaaaagcttatctcccactcag

SEQ ID NO: 132478 - DNA, 25 bp, Saccharomyces pastorianus
tagtgctgaagcttctaccgcggag

SEQ ID NO: 132479 - DNA, 25 bp, Saccharomyces pastorianus
gctgttcatggtgcttcttctacta

SEQ ID NO: 132480 - DNA, 25 bp, Saccharomyces pastorianus
aaaacctcttctgttgtgcgaactt

SEQ ID NO: 132481 - DNA, 25 bp, Saccharomyces pastorianus
gtcaccttaagtgcgtttttgcctg

SEQ ID NO: 132482 - DNA, 25 bp, Saccharomyces pastorianus
accttaagtgcgtttttgcctgtga

SEQ ID NO: 132483 - DNA, 25 bp, Saccharomyces pastorianus
aatgatggacgcatctacgtcacct

SEQ ID NO: 132484 - DNA, 25 bp, Saccharomyces pastorianus
gatggacgcatctacgtcaccttaa

SEQ ID NO: 132485 - DNA, 25 bp, Saccharomyces pastorianus
cttaagtgcgtttttgcctgtgaga

SEQ ID NO: 132486 - DNA, 25 bp, Saccharomyces pastorianus
ttggtatcgtgtttaaatgatggac

SEQ ID NO: 132487 - DNA, 25 bp, Saccharomyces pastorianus
tgcgtttttgcctgtgagattttta

SEQ ID NO: 132488 - DNA, 25 bp, Saccharomyces pastorianus
aagtgcgtttttgcctgtgagattt

SEQ ID NO: 132489 - DNA, 25 bp, Saccharomyces pastorianus
tctacgtcaccttaagtgcgttttt

SEQ ID NO: 132490 - DNA, 25 bp, Saccharomyces pastorianus
gcatctacgtcaccttaagtgcgtt

SEQ ID NO: 132491 - DNA, 25 bp, Saccharomyces pastorianus
ggacgcatctacgtcaccttaagtg

SEQ ID NO: 132492 - DNA, 25 bp, Saccharomyces pastorianus
cctttgtttcgcagtcatccagaag

SEQ ID NO: 132493 - DNA, 25 bp, Saccharomyces pastorianus
aattctggatgcctttatgccttat

SEQ ID NO: 132494 - DNA, 25 bp, Saccharomyces pastorianus
aaggtcatccttgtccattgtacac

SEQ ID NO: 132495 - DNA, 25 bp, Saccharomyces pastorianus
accttgattggttcactagtggcta

SEQ ID NO: 132496 - DNA, 25 bp, Saccharomyces pastorianus
gacaatgctattctacctgtttcga

SEQ ID NO: 132497 - DNA, 25 bp, Saccharomyces pastorianus
gaaccccggtctttgtacggatgag

SEQ ID NO: 132498 - DNA, 25 bp, Saccharomyces pastorianus
tgatgatgtcacttcttttcctttg

SEQ ID NO: 132499 - DNA, 25 bp, Saccharomyces pastorianus
ctcaggctctttggcttatcttaaa

SEQ ID NO: 132500 - DNA, 25 bp, Saccharomyces pastorianus
gatacacatctggaaggcccatttg

SEQ ID NO: 132501 - DNA, 25 bp, Saccharomyces pastorianus
ggctattgaatctggcttgccaatt

SEQ ID NO: 132502 - DNA, 25 bp, Saccharomyces pastorianus
agtcatctgggcctacgttacaaga

SEQ ID NO: 132503 - DNA, 25 bp, Saccharomyces pastorianus
gtcatctgcaccttgtaaaacacat

SEQ ID NO: 132504 - DNA, 25 bp, Saccharomyces pastorianus
gcctgccaacaccatatctatatgt

SEQ ID NO: 132505 - DNA, 25 bp, Saccharomyces pastorianus
ttcagcattttaggttgcccagccg

SEQ ID NO: 132506 - DNA, 25 bp, Saccharomyces pastorianus
gaggaaggcctatgaatcccactta

SEQ ID NO: 132507 - DNA, 25 bp, Saccharomyces pastorianus
gggctcgacccaaaaacaactatca

SEQ ID NO: 132508 - DNA, 25 bp, Saccharomyces pastorianus
aaggtgcttcgaaggatcttttcag

SEQ ID NO: 132509 - DNA, 25 bp, Saccharomyces pastorianus
gatccaaatctcgaagtaggtgcaa

SEQ ID NO: 132510 - DNA, 25 bp, Saccharomyces pastorianus
aatacatctacaaagcctgccaaca

SEQ ID NO: 132511 - DNA, 25 bp, Saccharomyces pastorianus
ttgcccagccggtttaagaagtaag

SEQ ID NO: 132512 - DNA, 25 bp, Saccharomyces pastorianus
aatcactgttcctgtgtcatctgca

SEQ ID NO: 132513 - DNA, 25 bp, Saccharomyces pastorianus
catggtagaattgcccatcatctgg

SEQ ID NO: 132514 - DNA, 25 bp, Saccharomyces pastorianus
gacccattcaccaacgacgtatcaa

SEQ ID NO: 132515 - DNA, 25 bp, Saccharomyces pastorianus
accttcacttgtatacacttatgtt

SEQ ID NO: 132516 - DNA, 25 bp, Saccharomyces pastorianus
gtatacacttatgttaatactacag

SEQ ID NO: 132517 - DNA, 25 bp, Saccharomyces pastorianus
ccgccgaataagaaaacagacccat

SEQ ID NO: 132518 - DNA, 25 bp, Saccharomyces pastorianus
agacaaacttctcccaaaatgtatt

SEQ ID NO: 132519 - DNA, 25 bp, Saccharomyces pastorianus
agaaaacagacccattcaccaacga

SEQ ID NO: 132520 - DNA, 25 bp, Saccharomyces pastorianus
acaccatgctcaccttcacttgtat

SEQ ID NO: 132521 - DNA, 25 bp, Saccharomyces pastorianus
atgctcaccttcacttgtatacact

SEQ ID NO: 132522 - DNA, 25 bp, Saccharomyces pastorianus
gacgtatcaagttacttcacccaca

SEQ ID NO: 132523 - DNA, 25 bp, Saccharomyces pastorianus
gtcagacagacaaacttctcccaaa

SEQ ID NO: 132524 - DNA, 25 bp, Saccharomyces pastorianus
gctcaccttcacttgtatacactta

SEQ ID NO: 132525 - DNA, 25 bp, Saccharomyces pastorianus
gtgcttttcagtcctgagattcgtg

SEQ ID NO: 132526 - DNA, 25 bp, Saccharomyces pastorianus
aggtgcttttcagtcctgagattcg

SEQ ID NO: 132527 - DNA, 25 bp, Saccharomyces pastorianus
tgaggtgcttttcagtcctgagatt

SEQ ID NO: 132528 - DNA, 25 bp, Saccharomyces pastorianus
tgacccactccctagaaacagttta

SEQ ID NO: 132529 - DNA, 25 bp, Saccharomyces pastorianus
gaggtgcttttcagtcctgagattc

SEQ ID NO: 132530 - DNA, 25 bp, Saccharomyces pastorianus
ggtgcttttcagtcctgagattcgt

SEQ ID NO: 132531 - DNA, 25 bp, Saccharomyces pastorianus
accttgaaggcagccgcagttaagg

SEQ ID NO: 132532 - DNA, 25 bp, Saccharomyces pastorianus
ttgacccactccctagaaacagttt

SEQ ID NO: 132533 - DNA, 25 bp, Saccharomyces pastorianus
ttgaggtgcttttcagtcctgagat

SEQ ID NO: 132534 - DNA, 25 bp, Saccharomyces pastorianus
tgcttttcagtcctgagattcgtga

SEQ ID NO: 132535 - DNA, 25 bp, Saccharomyces pastorianus
caaccttgaaggcagccgcagttaa

SEQ ID NO: 132536 - DNA, 25 bp, Saccharomyces pastorianus
gtaagaccgagaagaaggattggaa

SEQ ID NO: 132537 - DNA, 25 bp, Saccharomyces pastorianus
gccatgtcgatttcgactgcatgca

SEQ ID NO: 132538 - DNA, 25 bp, Saccharomyces pastorianus
gtcccaccttctaggagaggtattt

SEQ ID NO: 132539 - DNA, 25 bp, Saccharomyces pastorianus
catgtcgatttcgactgcatgcaac

SEQ ID NO: 132540 - DNA, 25 bp, Saccharomyces pastorianus
tatttggtgcagctgggatgatggc

SEQ ID NO: 132541 - DNA, 25 bp, Saccharomyces pastorianus
gtgcagctgggatgatggcttgtat

SEQ ID NO: 132542 - DNA, 25 bp, Saccharomyces pastorianus
atcttgggtcccaccttctaggaga

SEQ ID NO: 132543 - DNA, 25 bp, Saccharomyces pastorianus
tgggtcccaccttctaggagaggta

SEQ ID NO: 132544 - DNA, 25 bp, Saccharomyces pastorianus
caccttctaggagaggtatttcttc

SEQ ID NO: 132545 - DNA, 25 bp, Saccharomyces pastorianus
gggtcccaccttctaggagaggtat

SEQ ID NO: 132546 - DNA, 25 bp, Saccharomyces pastorianus
cttgggtcccaccttctaggagagg

SEQ ID NO: 132547 - DNA, 25 bp, Saccharomyces pastorianus
tggtaagattatctatggtcttggt

SEQ ID NO: 132548 - DNA, 25 bp, Saccharomyces pastorianus
ctttgctttttatgggctttgatta

SEQ ID NO: 132549 - DNA, 25 bp, Saccharomyces pastorianus
acttcgttggtaagattatctatgg

SEQ ID NO: 132550 - DNA, 25 bp, Saccharomyces pastorianus
ggctttgctttttatgggctttgat

SEQ ID NO: 132551 - DNA, 25 bp, Saccharomyces pastorianus
cgaagaggcccgtgtttccattgcc

SEQ ID NO: 132552 - DNA, 25 bp, Saccharomyces pastorianus
tgagagacacgaagaggcccgtgtt

SEQ ID NO: 132553 - DNA, 25 bp, Saccharomyces pastorianus
acgaagaggcccgtgtttccattgc

SEQ ID NO: 132554 - DNA, 25 bp, Saccharomyces pastorianus
gggctttgctttttatgggctttga

SEQ ID NO: 132555 - DNA, 25 bp, Saccharomyces pastorianus
caatacttcgttggtaagattatct

SEQ ID NO: 132556 - DNA, 25 bp, Saccharomyces pastorianus
atgggctttgattatcatcattggt

SEQ ID NO: 132557 - DNA, 25 bp, Saccharomyces pastorianus
ttttatgggctttgattatcatcat

SEQ ID NO: 132558 - DNA, 25 bp, Saccharomyces pastorianus
tggtaagattatctatggtcttggt

SEQ ID NO: 132559 - DNA, 25 bp, Saccharomyces pastorianus
ctttgctttttatgggctttgatta

SEQ ID NO: 132560 - DNA, 25 bp, Saccharomyces pastorianus
gcttttgtctgagatagctcccaca

SEQ ID NO: 132561 - DNA, 25 bp, Saccharomyces pastorianus
gaacttcggttcttacaagcatagc

SEQ ID NO: 132562 - DNA, 25 bp, Saccharomyces pastorianus
cgaagaggcccgtgtttccattgcc

SEQ ID NO: 132563 - DNA, 25 bp, Saccharomyces pastorianus
tgagagacacgaagaggcccgtgtt

SEQ ID NO: 132564 - DNA, 25 bp, Saccharomyces pastorianus
acgaagaggcccgtgtttccattgc

SEQ ID NO: 132565 - DNA, 25 bp, Saccharomyces pastorianus
gggctttgctttttatgggctttga

SEQ ID NO: 132566 - DNA, 25 bp, Saccharomyces pastorianus
caatacttcgttggtaagattatct

SEQ ID NO: 132567 - DNA, 25 bp, Saccharomyces pastorianus
atgggctttgattatcatcattggt

SEQ ID NO: 132568 - DNA, 25 bp, Saccharomyces pastorianus
ttttatgggctttgattatcatcat

SEQ ID NO: 132569 - DNA, 25 bp, Saccharomyces pastorianus
aacgggaactataactttctgctgg

SEQ ID NO: 132570 - DNA, 25 bp, Saccharomyces pastorianus
actttctgctggacgttccatttcc

SEQ ID NO: 132571 - DNA, 25 bp, Saccharomyces pastorianus
ataactttctgctggacgttccatt

SEQ ID NO: 132572 - DNA, 25 bp, Saccharomyces pastorianus
ggaactataactttctgctggacgt

SEQ ID NO: 132573 - DNA, 25 bp, Saccharomyces pastorianus
aactataactttctgctggacgttc

SEQ ID NO: 132574 - DNA, 25 bp, Saccharomyces pastorianus
ctataactttctgctggacgttcca

SEQ ID NO: 132575 - DNA, 25 bp, Saccharomyces pastorianus
cgggaactataactttctgctggac

SEQ ID NO: 132576 - DNA, 25 bp, Saccharomyces pastorianus
aactttctgctggacgttccatttc

SEQ ID NO: 132577 - DNA, 25 bp, Saccharomyces pastorianus
tctgctggacgttccatttccccat

SEQ ID NO: 132578 - DNA, 25 bp, Saccharomyces pastorianus
tataactttctgctggacgttccat

SEQ ID NO: 132579 - DNA, 25 bp, Saccharomyces pastorianus
ccatccccttacaacgcatagtaaa

SEQ ID NO: 132580 - DNA, 25 bp, Saccharomyces pastorianus
gccttcaccacaattcgatcgttaa

SEQ ID NO: 132581 - DNA, 25 bp, Saccharomyces pastorianus
gagtatgcaatgtaccgcctgatca

SEQ ID NO: 132582 - DNA, 25 bp, Saccharomyces pastorianus
atctattttatatgcccgttttccg

SEQ ID NO: 132583 - DNA, 25 bp, Saccharomyces pastorianus
tacgtgtacgcctgaatgtcgggat

SEQ ID NO: 132584 - DNA, 25 bp, Saccharomyces pastorianus
atcatcagctgatcgcttcagtgcg

SEQ ID NO: 132585 - DNA, 25 bp, Saccharomyces pastorianus
gtcgcaacactctccagtatattgt

SEQ ID NO: 132586 - DNA, 25 bp, Saccharomyces pastorianus
tggagtctttttcattagtctgcac

SEQ ID NO: 132587 - DNA, 25 bp, Saccharomyces pastorianus
gtttgacatgcctacgttcttcgtg

SEQ ID NO: 132588 - DNA, 25 bp, Saccharomyces pastorianus
tccgcttttaaatctcttgtcgcaa

SEQ ID NO: 132589 - DNA, 25 bp, Saccharomyces pastorianus
gaaggtttccgcctgataacgattt

SEQ ID NO: 132590 - DNA, 25 bp, Saccharomyces pastorianus
tttttccggttcttcgtttgacatg

SEQ ID NO: 132591 - DNA, 25 bp, Saccharomyces pastorianus
aaatgattgtgactccatgaataac

SEQ ID NO: 132592 - DNA, 25 bp, Saccharomyces pastorianus
tagcatggcagcgacgctatcgcaa

SEQ ID NO: 132593 - DNA, 25 bp, Saccharomyces pastorianus
aaccagcgcggttattgatcaagaa

SEQ ID NO: 132594 - DNA, 25 bp, Saccharomyces pastorianus
cagtgcaaagtgtaatatcgcccaa

SEQ ID NO: 132595 - DNA, 25 bp, Saccharomyces pastorianus
atatcgcccaaaaagcatgcaattg

SEQ ID NO: 132596 - DNA, 25 bp, Saccharomyces pastorianus
gatctgtttgaacccaagcgcgtta

SEQ ID NO: 132597 - DNA, 25 bp, Saccharomyces pastorianus
gaatgagtctatttcagtcatgaaa

SEQ ID NO: 132598 - DNA, 25 bp, Saccharomyces pastorianus
ttcgataacatcaacacactctcat

SEQ ID NO: 132599 - DNA, 25 bp, Saccharomyces pastorianus
gacgctatcgcaaatcaagagtact

SEQ ID NO: 132600 - DNA, 25 bp, Saccharomyces pastorianus
gaatctgacaactgcaaccagcgcg

SEQ ID NO: 132601 - DNA, 25 bp, Saccharomyces pastorianus
gagaacgctatatcccttttgaaga

SEQ ID NO: 132602 - DNA, 25 bp, Saccharomyces pastorianus
gatagaagctccaatagcatcagta

SEQ ID NO: 132603 - DNA, 25 bp, Saccharomyces pastorianus
atacgggtcaagatagaagctccaa

SEQ ID NO: 132604 - DNA, 25 bp, Saccharomyces pastorianus
cagtaaaaatggcaactctcaggtt

SEQ ID NO: 132605 - DNA, 25 bp, Saccharomyces pastorianus
gatgtcacactgttcctaatgagga

SEQ ID NO: 132606 - DNA, 25 bp, Saccharomyces pastorianus
aactctcaggttggatgtcacactg

SEQ ID NO: 132607 - DNA, 25 bp, Saccharomyces pastorianus
cactgtagctgtgcgatgcagagga

SEQ ID NO: 132608 - DNA, 25 bp, Saccharomyces pastorianus
atgccagcggaaaaccaaaatacgg

SEQ ID NO: 132609 - DNA, 25 bp, Saccharomyces pastorianus
aggttggatgtcacactgttcctaa

SEQ ID NO: 132610 - DNA, 25 bp, Saccharomyces pastorianus
gaggaactgaacatcactgtagctg

SEQ ID NO: 132611 - DNA, 25 bp, Saccharomyces pastorianus
aacatcactgtagctgtgcgatgca

SEQ ID NO: 132612 - DNA, 25 bp, Saccharomyces pastorianus
gaagctccaatagcatcagtaaaaa

SEQ ID NO: 132613 - DNA, 25 bp, Saccharomyces pastorianus
acaacggtgtgtgtgctgtgaagct

SEQ ID NO: 132614 - DNA, 25 bp, Saccharomyces pastorianus
gaggattttcgtacacaacggtgtg

SEQ ID NO: 132615 - DNA, 25 bp, Saccharomyces pastorianus
tcttctgcagaggattttcgtacac

SEQ ID NO: 132616 - DNA, 25 bp, Saccharomyces pastorianus
tgctgtgaagctgtctgcttcctta

SEQ ID NO: 132617 - DNA, 25 bp, Saccharomyces pastorianus
agtggcatatacactcttctgcaga

SEQ ID NO: 132618 - DNA, 25 bp, Saccharomyces pastorianus
tacactcttctgcagaggattttcg

SEQ ID NO: 132619 - DNA, 25 bp, Saccharomyces pastorianus
aagctgtctgcttccttacttggct

SEQ ID NO: 132620 - DNA, 25 bp, Saccharomyces pastorianus
tctgcagaggattttcgtacacaac

SEQ ID NO: 132621 - DNA, 25 bp, Saccharomyces pastorianus
gctgtctgcttccttacttggctgt

SEQ ID NO: 132622 - DNA, 25 bp, Saccharomyces pastorianus
tgtgtgtgctgtgaagctgtctgct

SEQ ID NO: 132623 - DNA, 25 bp, Saccharomyces pastorianus
ggcatatacactcttctgcagagga

SEQ ID NO: 132624 - DNA, 25 bp, Saccharomyces pastorianus
gcattacgtactgcggtgcggaagt

SEQ ID NO: 132625 - DNA, 25 bp, Saccharomyces pastorianus
gaagtgtggatgagtggcatataca

SEQ ID NO: 132626 - DNA, 25 bp, Saccharomyces pastorianus
acgtactgcggtgcggaagtgtgga

SEQ ID NO: 132627 - DNA, 25 bp, Saccharomyces pastorianus
ttttcgctttcacgataccgcatta

SEQ ID NO: 132628 - DNA, 25 bp, Saccharomyces pastorianus
ttcacgataccgcattacgtactgc

SEQ ID NO: 132629 - DNA, 25 bp, Saccharomyces pastorianus
ttttttcgctttcacgataccgcat

SEQ ID NO: 132630 - DNA, 25 bp, Saccharomyces pastorianus
agtgagccgcataaaatggcatgtc

SEQ ID NO: 132631 - DNA, 25 bp, Saccharomyces pastorianus
gctttcacgataccgcattacgtac

SEQ ID NO: 132632 - DNA, 25 bp, Saccharomyces pastorianus
cttttgttagaagtgagccgcataa

SEQ ID NO: 132633 - DNA, 25 bp, Saccharomyces pastorianus
gccgcataaaatggcatgtcggcac

SEQ ID NO: 132634 - DNA, 25 bp, Saccharomyces pastorianus
ttcgctttcacgataccgcattacg

SEQ ID NO: 132635 - DNA, 25 bp, Saccharomyces pastorianus
acaacggtgtgtgtgctgtgaagct

SEQ ID NO: 132636 - DNA, 25 bp, Saccharomyces pastorianus
tttgcttgcttgtgcgtcatggtca

SEQ ID NO: 132637 - DNA, 25 bp, Saccharomyces pastorianus
gaggattttcgtacacaacggtgtg

SEQ ID NO: 132638 - DNA, 25 bp, Saccharomyces pastorianus
tcttctgcagaggattttcgtacac

SEQ ID NO: 132639 - DNA, 25 bp, Saccharomyces pastorianus
ccttacttggctgtttgcttgcttg

SEQ ID NO: 132640 - DNA, 25 bp, Saccharomyces pastorianus
gtctgcttccttacttggctgtttg

SEQ ID NO: 132641 - DNA, 25 bp, Saccharomyces pastorianus
tgcttgtgcgtcatggtcacttttg

SEQ ID NO: 132642 - DNA, 25 bp, Saccharomyces pastorianus
aagctgtctgcttccttacttggct

SEQ ID NO: 132643 - DNA, 25 bp, Saccharomyces pastorianus
tctgcagaggattttcgtacacaac

SEQ ID NO: 132644 - DNA, 25 bp, Saccharomyces pastorianus
tgtgtgtgctgtgaagctgtctgct

SEQ ID NO: 132645 - DNA, 25 bp, Saccharomyces pastorianus
gtggcatatacactcttctgcagag

SEQ ID NO: 132646 - DNA, 25 bp, Saccharomyces pastorianus
cgtctatcttgttctgtctggtata

SEQ ID NO: 132647 - DNA, 25 bp, Saccharomyces pastorianus
gtccttctcgtctatcttgttctgt

SEQ ID NO: 132648 - DNA, 25 bp, Saccharomyces pastorianus
ttctcgtctatcttgttctgtctgg

SEQ ID NO: 132649 - DNA, 25 bp, Saccharomyces pastorianus
tacatacatatacgtacattgtttc

SEQ ID NO: 132650 - DNA, 25 bp, Saccharomyces pastorianus
tatcttgttctgtctggtatagagt

SEQ ID NO: 132651 - DNA, 25 bp, Saccharomyces pastorianus
ggtatagagtaatacttacatacat

SEQ ID NO: 132652 - DNA, 25 bp, Saccharomyces pastorianus
gttctgtctggtatagagtaatact

SEQ ID NO: 132653 - DNA, 25 bp, Saccharomyces pastorianus
ctcgtctatcttgttctgtctggta

SEQ ID NO: 132654 - DNA, 25 bp, Saccharomyces pastorianus
gtgtccttctcgtctatcttgttct

SEQ ID NO: 132655 - DNA, 25 bp, Saccharomyces pastorianus
tcttgttctgtctggtatagagtaa

SEQ ID NO: 132656 - DNA, 25 bp, Saccharomyces pastorianus
atgtgtccttctcgtctatcttgtt

SEQ ID NO: 132657 - DNA, 25 bp, Saccharomyces pastorianus
tcaagccctatgttccagattttaa

SEQ ID NO: 132658 - DNA, 25 bp, Saccharomyces pastorianus
gctattccagctggtaactttccaa

SEQ ID NO: 132659 - DNA, 25 bp, Saccharomyces pastorianus
aagactcgtgctttcgttcttctcg

SEQ ID NO: 132660 - DNA, 25 bp, Saccharomyces pastorianus
acgttgcttacggtgttctttctca

SEQ ID NO: 132661 - DNA, 25 bp, Saccharomyces pastorianus
aagtatcgctggaacgttgcttacg

SEQ ID NO: 132662 - DNA, 25 bp, Saccharomyces pastorianus
ggtgttctttctcacaagactcgtg

SEQ ID NO: 132663 - DNA, 25 bp, Saccharomyces pastorianus
tttccaaggaatcttcaagccctat

SEQ ID NO: 132664 - DNA, 25 bp, Saccharomyces pastorianus
tgaccgcatcttgttttgcgtgcca

SEQ ID NO: 132665 - DNA, 25 bp, Saccharomyces pastorianus
gttggcaacagggtgaccgcatctt

SEQ ID NO: 132666 - DNA, 25 bp, Saccharomyces pastorianus
cgttcaaccctaccacagtaagtat

SEQ ID NO: 132667 - DNA, 25 bp, Saccharomyces pastorianus
aatactcccagcgtagagttctacg

SEQ ID NO: 132668 - DNA, 25 bp, Saccharomyces pastorianus
tgtcatctggcacatctacgaacct

SEQ ID NO: 132669 - DNA, 25 bp, Saccharomyces pastorianus
tcctgcattctcctttgaaaagcac

SEQ ID NO: 132670 - DNA, 25 bp, Saccharomyces pastorianus
gggtctcgattctcgcgaaagctaa

SEQ ID NO: 132671 - DNA, 25 bp, Saccharomyces pastorianus
aagcacatggcttggatggctgaag

SEQ ID NO: 132672 - DNA, 25 bp, Saccharomyces pastorianus
gaattacaatgtcatcggcttgccc

SEQ ID NO: 132673 - DNA, 25 bp, Saccharomyces pastorianus
gttcagaacaggctcacactttcct

SEQ ID NO: 132674 - DNA, 25 bp, Saccharomyces pastorianus
tagactctcccgcaggatgaattac

SEQ ID NO: 132675 - DNA, 25 bp, Saccharomyces pastorianus
cggcttgccccattatgtcatctgg

SEQ ID NO: 132676 - DNA, 25 bp, Saccharomyces pastorianus
ggcatacatgagagatccaaacggt

SEQ ID NO: 132677 - DNA, 25 bp, Saccharomyces pastorianus
gacagaagcattcggtagactctcc

SEQ ID NO: 132678 - DNA, 25 bp, Saccharomyces pastorianus
ctacgaaccttccagtgacgactta

SEQ ID NO: 132679 - DNA, 25 bp, Saccharomyces pastorianus
gtttgtgccaatgactgatgacttt

SEQ ID NO: 132680 - DNA, 25 bp, Saccharomyces pastorianus
agcaaaggccacagtccggaatttt

SEQ ID NO: 132681 - DNA, 25 bp, Saccharomyces pastorianus
caagtttttcttcatggacgacaaa

SEQ ID NO: 132682 - DNA, 25 bp, Saccharomyces pastorianus
acgggtattttcatcattcagttgg

SEQ ID NO: 132683 - DNA, 25 bp, Saccharomyces pastorianus
gatctattttgtctcaatttgccgt

SEQ ID NO: 132684 - DNA, 25 bp, Saccharomyces pastorianus
gggtgtcgagcattttttcaagttt

SEQ ID NO: 132685 - DNA, 25 bp, Saccharomyces pastorianus
gttgaccctaacattattgctcgat

SEQ ID NO: 132686 - DNA, 25 bp, Saccharomyces pastorianus
ttggtgatggtcaagccactgtctc

SEQ ID NO: 132687 - DNA, 25 bp, Saccharomyces pastorianus
cactgtctccggtttgttactatcg

SEQ ID NO: 132688 - DNA, 25 bp, Saccharomyces pastorianus
aggaatttgctccatcattattgaa

SEQ ID NO: 132689 - DNA, 25 bp, Saccharomyces pastorianus
aatttgccgttcatattgccacttt

SEQ ID NO: 132690 - DNA, 25 bp, Saccharomyces pastorianus
gcattacaagtaacacctcctgaac

SEQ ID NO: 132691 - DNA, 25 bp, Saccharomyces pastorianus
gcccttgccaagttctatgtctatt

SEQ ID NO: 132692 - DNA, 25 bp, Saccharomyces pastorianus
atggaggtgccttagccatcgtcac

SEQ ID NO: 132693 - DNA, 25 bp, Saccharomyces pastorianus
ccatcgtcaccaaaactggctttga

SEQ ID NO: 132694 - DNA, 25 bp, Saccharomyces pastorianus
aaggtctagctggtatctctgcgga

SEQ ID NO: 132695 - DNA, 25 bp, Saccharomyces pastorianus
acataaatcggatatccctgctcca

SEQ ID NO: 132696 - DNA, 25 bp, Saccharomyces pastorianus
tgatttactccgctgaacgtgtttc

SEQ ID NO: 132697 - DNA, 25 bp, Saccharomyces pastorianus
atggctgtcaacagttctctggctg

SEQ ID NO: 132698 - DNA, 25 bp, Saccharomyces pastorianus
gaagcgttgatgttcattcttttct

SEQ ID NO: 132699 - DNA, 25 bp, Saccharomyces pastorianus
gattttcgctgttattgcatcctgg

SEQ ID NO: 132700 - DNA, 25 bp, Saccharomyces pastorianus
aacattcgtcacttgtacagcgctg

SEQ ID NO: 132701 - DNA, 25 bp, Saccharomyces pastorianus
aaagagcttttcgaaggtctgagaa

SEQ ID NO: 132702 - DNA, 25 bp, Saccharomyces pastorianus
taagataatctcactggcggccatc

SEQ ID NO: 132703 - DNA, 25 bp, Saccharomyces pastorianus
gaaagcggctttgatgagctagcta

SEQ ID NO: 132704 - DNA, 25 bp, Saccharomyces pastorianus
ggcgtcatacctctatttttacttt

SEQ ID NO: 132705 - DNA, 25 bp, Saccharomyces pastorianus
agtcaaaggttggagggcgtcatac

SEQ ID NO: 132706 - DNA, 25 bp, Saccharomyces pastorianus
tagatcattcaccatacaagaccat

SEQ ID NO: 132707 - DNA, 25 bp, Saccharomyces pastorianus
tttactttgcggtactgagggccaa

SEQ ID NO: 132708 - DNA, 25 bp, Saccharomyces pastorianus
ggcggccatcccagatggatttcaa

SEQ ID NO: 132709 - DNA, 25 bp, Saccharomyces pastorianus
tgagctgtggatgagaacgttgcat

SEQ ID NO: 132710 - DNA, 25 bp, Saccharomyces pastorianus
atatcggaattcattggtgagctgt

SEQ ID NO: 132711 - DNA, 25 bp, Saccharomyces pastorianus
atgccatacctcaaaattcggttac

SEQ ID NO: 132712 - DNA, 25 bp, Saccharomyces pastorianus
ttgcgaccataccattgtagtgttg

SEQ ID NO: 132713 - DNA, 25 bp, Saccharomyces pastorianus
gacgacgccacatgcacaggtaaat

SEQ ID NO: 132714 - DNA, 25 bp, Saccharomyces pastorianus
tccagctggttaaatgcctcttttg

SEQ ID NO: 132715 - DNA, 25 bp, Saccharomyces pastorianus
gtggctccgaaactggatactattt

SEQ ID NO: 132716 - DNA, 25 bp, Saccharomyces pastorianus
cgaaagattttatgccaccgatggc

SEQ ID NO: 132717 - DNA, 25 bp, Saccharomyces pastorianus
gtaccgccaatacaatcttttgccg

SEQ ID NO: 132718 - DNA, 25 bp, Saccharomyces pastorianus
atttctttattaacttccagctggt

SEQ ID NO: 132719 - DNA, 25 bp, Saccharomyces pastorianus
gacaatttactcctttgacttcaga

SEQ ID NO: 132720 - DNA, 25 bp, Saccharomyces pastorianus
cacacgtttattttctttgcctact

SEQ ID NO: 132721 - DNA, 25 bp, Saccharomyces pastorianus
gggaggatttgcttgacgacgccac

SEQ ID NO: 132722 - DNA, 25 bp, Saccharomyces pastorianus
atctacgactctaatgtggctccga

SEQ ID NO: 132723 - DNA, 25 bp, Saccharomyces pastorianus
tagcattatccaattgtacgcgaat

SEQ ID NO: 132724 - DNA, 25 bp, Saccharomyces pastorianus
ataggtcttccagcttatatgagtg

SEQ ID NO: 132725 - DNA, 25 bp, Saccharomyces pastorianus
tttacatgccgttgtgaagccactg

SEQ ID NO: 132726 - DNA, 25 bp, Saccharomyces pastorianus
tgagaacccgctttccaattaggac

SEQ ID NO: 132727 - DNA, 25 bp, Saccharomyces pastorianus
agattgtatattctcggtgttcata

SEQ ID NO: 132728 - DNA, 25 bp, Saccharomyces pastorianus
gagtaccctgaatgtccgtacttgg

SEQ ID NO: 132729 - DNA, 25 bp, Saccharomyces pastorianus
attttagaggcctattccttcccag

SEQ ID NO: 132730 - DNA, 25 bp, Saccharomyces pastorianus
ttcccagcactttcatcgattaacc

SEQ ID NO: 132731 - DNA, 25 bp, Saccharomyces pastorianus
gacgtccatagaatatccatcagag

SEQ ID NO: 132732 - DNA, 25 bp, Saccharomyces pastorianus
tcgattatcagacctttcttgtgca

SEQ ID NO: 132733 - DNA, 25 bp, Saccharomyces pastorianus
acttatcacagagacccttttatgg

SEQ ID NO: 132734 - DNA, 25 bp, Saccharomyces pastorianus
gaaattgaggctactgcgccaattg

SEQ ID NO: 132735 - DNA, 25 bp, Saccharomyces pastorianus
aacgacgttgaaattgaggctactg

SEQ ID NO: 132736 - DNA, 25 bp, Saccharomyces pastorianus
aacaaacaccagagtcaaacgacgt

SEQ ID NO: 132737 - DNA, 25 bp, Saccharomyces pastorianus
gccaattgatgacaatacagacgat

SEQ ID NO: 132738 - DNA, 25 bp, Saccharomyces pastorianus
ttgaaattgaggctactgcgccaat

SEQ ID NO: 132739 - DNA, 25 bp, Saccharomyces pastorianus
gctactgcgccaattgatgacaata

SEQ ID NO: 132740 - DNA, 25 bp, Saccharomyces pastorianus
attgaggctactgcgccaattgatg

SEQ ID NO: 132741 - DNA, 25 bp, Saccharomyces pastorianus
actgcgccaattgatgacaatacag

SEQ ID NO: 132742 - DNA, 25 bp, Saccharomyces pastorianus
aacaccagagtcaaacgacgttgaa

SEQ ID NO: 132743 - DNA, 25 bp, Saccharomyces pastorianus
gacgttgaaattgaggctactgcgc

SEQ ID NO: 132744 - DNA, 25 bp, Saccharomyces pastorianus
ggctactgcgccaattgatgacaat

SEQ ID NO: 132745 - DNA, 25 bp, Saccharomyces pastorianus
agctctggcgttgggtagacatctt

SEQ ID NO: 132746 - DNA, 25 bp, Saccharomyces pastorianus
gaattatttgttctggctggccttt

SEQ ID NO: 132747 - DNA, 25 bp, Saccharomyces pastorianus
aaatagtcatcgatgccatgcaggg

SEQ ID NO: 132748 - DNA, 25 bp, Saccharomyces pastorianus
gttccaaaactgtgatcttttcgtc

SEQ ID NO: 132749 - DNA, 25 bp, Saccharomyces pastorianus
gctggcctttgattgccatcaacaa

SEQ ID NO: 132750 - DNA, 25 bp, Saccharomyces pastorianus
agtgtatcgtcgctggaatctgcta

SEQ ID NO: 132751 - DNA, 25 bp, Saccharomyces pastorianus
ggcgcctattcacagagaacttctt

SEQ ID NO: 132752 - DNA, 25 bp, Saccharomyces pastorianus
tgactgtacattgagcgatctggcg

SEQ ID NO: 132753 - DNA, 25 bp, Saccharomyces pastorianus
agatctggtgccaaagctctggcgt

SEQ ID NO: 132754 - DNA, 25 bp, Saccharomyces pastorianus
atccggcatgccagatattttcttt

SEQ ID NO: 132755 - DNA, 25 bp, Saccharomyces pastorianus
gtaggtataccacagggcgcctatt

SEQ ID NO: 132756 - DNA, 25 bp, Saccharomyces pastorianus
tgtatatccaatagcgacgcctcaa

SEQ ID NO: 132757 - DNA, 25 bp, Saccharomyces pastorianus
ataatgagctctggtcacactttga

SEQ ID NO: 132758 - DNA, 25 bp, Saccharomyces pastorianus
gctccttatccggtgtattctatga

SEQ ID NO: 132759 - DNA, 25 bp, Saccharomyces pastorianus
tggcaagtgctcaaaatccgtctat

SEQ ID NO: 132760 - DNA, 25 bp, Saccharomyces pastorianus
aatagtgcaagctctgctacctcta

SEQ ID NO: 132761 - DNA, 25 bp, Saccharomyces pastorianus
atacgctaattctcagtacactcca

SEQ ID NO: 132762 - DNA, 25 bp, Saccharomyces pastorianus
tattacaattcttctgcttctgcat

SEQ ID NO: 132763 - DNA, 25 bp, Saccharomyces pastorianus
tacaagcactaactcaggcaccatg

SEQ ID NO: 132764 - DNA, 25 bp, Saccharomyces pastorianus
aacatcctttgcctactgtatatcc

SEQ ID NO: 132765 - DNA, 25 bp, Saccharomyces pastorianus
aggcaccatgctatcaaatcctgca

SEQ ID NO: 132766 - DNA, 25 bp, Saccharomyces pastorianus
gcagaaccttctggtgctacaagca

SEQ ID NO: 132767 - DNA, 25 bp, Saccharomyces pastorianus
tacggcgaatccaccttatatcact

SEQ ID NO: 132768 - DNA, 25 bp, Saccharomyces pastorianus
aactttgatgtatacggcgaatcca

SEQ ID NO: 132769 - DNA, 25 bp, Saccharomyces pastorianus
gctctggatacccaatcactcaatt

SEQ ID NO: 132770 - DNA, 25 bp, Saccharomyces pastorianus
aatctcctgataacactaacgctac

SEQ ID NO: 132771 - DNA, 25 bp, Saccharomyces pastorianus
tccactcccctgaatactgttattt

SEQ ID NO: 132772 - DNA, 25 bp, Saccharomyces pastorianus
aatcactcaatttgctcccgcatta

SEQ ID NO: 132773 - DNA, 25 bp, Saccharomyces pastorianus
ctaacgctactggtatgaatacaca

SEQ ID NO: 132774 - DNA, 25 bp, Saccharomyces pastorianus
tttgctcccgcattaccatcaacaa

SEQ ID NO: 132775 - DNA, 25 bp, Saccharomyces pastorianus
cactaccaacggtaatggtcctaat

SEQ ID NO: 132776 - DNA, 25 bp, Saccharomyces pastorianus
ctgaatactgttatttccacgaata

SEQ ID NO: 132777 - DNA, 25 bp, Saccharomyces pastorianus
acaataaaagcaactcttccactcc

SEQ ID NO: 132778 - DNA, 25 bp, Saccharomyces pastorianus
gccgtcattacggatggaacttctg

SEQ ID NO: 132779 - DNA, 25 bp, Saccharomyces pastorianus
tcgtcgaaaatcaagctacctcctt

SEQ ID NO: 132780 - DNA, 25 bp, Saccharomyces pastorianus
gagtggtagtactgattccgccgtc

SEQ ID NO: 132781 - DNA, 25 bp, Saccharomyces pastorianus
tgacgctttgcttattcttcaagca

SEQ ID NO: 132782 - DNA, 25 bp, Saccharomyces pastorianus
gctacctcctttgaagaatcaccag

SEQ ID NO: 132783 - DNA, 25 bp, Saccharomyces pastorianus
gagtcagagcaagacacctccattt

SEQ ID NO: 132784 - DNA, 25 bp, Saccharomyces pastorianus
ggtgcgagaaataacccttcttcgt

SEQ ID NO: 132785 - DNA, 25 bp, Saccharomyces pastorianus
accagtttgatttgccacctactat

SEQ ID NO: 132786 - DNA, 25 bp, Saccharomyces pastorianus
acgccgggtctaatgctaatgctac

SEQ ID NO: 132787 - DNA, 25 bp, Saccharomyces pastorianus
actatgggccattcaagttttgagt

SEQ ID NO: 132788 - DNA, 25 bp, Saccharomyces pastorianus
gaaagaccttatttgatcgtatcag

SEQ ID NO: 132789 - DNA, 25 bp, Saccharomyces pastorianus
aagaagagcgccactgtcaaaaaag

SEQ ID NO: 132790 - DNA, 25 bp, Saccharomyces pastorianus
caagaagagcgccactgtcaaaaaa

SEQ ID NO: 132791 - DNA, 25 bp, Saccharomyces pastorianus
cttccaagaagagcgccactgtcaa

SEQ ID NO: 132792 - DNA, 25 bp, Saccharomyces pastorianus
caaatcaaagaccttccaagaagag

SEQ ID NO: 132793 - DNA, 25 bp, Saccharomyces pastorianus
gaccttccaagaagagcgccactgt

SEQ ID NO: 132794 - DNA, 25 bp, Saccharomyces pastorianus
gagcgccactgtcaaaaaagttgat

SEQ ID NO: 132795 - DNA, 25 bp, Saccharomyces pastorianus
gaagagcgccactgtcaaaaaagtt

SEQ ID NO: 132796 - DNA, 25 bp, Saccharomyces pastorianus
aagaccttccaagaagagcgccact

SEQ ID NO: 132797 - DNA, 25 bp, Saccharomyces pastorianus
gcgccactgtcaaaaaagttgatga

SEQ ID NO: 132798 - DNA, 25 bp, Saccharomyces pastorianus
agagcgccactgtcaaaaaagttga

SEQ ID NO: 132799 - DNA, 25 bp, Saccharomyces pastorianus
gaaacaaatcaaagaccttccaaga

SEQ ID NO: 132800 - DNA, 25 bp, Saccharomyces pastorianus
atggttatcctgtggcggacattac

SEQ ID NO: 132801 - DNA, 25 bp, Saccharomyces pastorianus
gataccgctaccttagcctataatg

SEQ ID NO: 132802 - DNA, 25 bp, Saccharomyces pastorianus
gattctttccttgagttttacgcgg

SEQ ID NO: 132803 - DNA, 25 bp, Saccharomyces pastorianus
tctttctagccatcatcggaggtgt

SEQ ID NO: 132804 - DNA, 25 bp, Saccharomyces pastorianus
tattcgaaattgttagcccacctat

SEQ ID NO: 132805 - DNA, 25 bp, Saccharomyces pastorianus
tatcagttcaggtcatctttctagc

SEQ ID NO: 132806 - DNA, 25 bp, Saccharomyces pastorianus
agcttctgtgctgccatatcagcta

SEQ ID NO: 132807 - DNA, 25 bp, Saccharomyces pastorianus
ttaactgccttgagcagcttctgtg

SEQ ID NO: 132808 - DNA, 25 bp, Saccharomyces pastorianus
atcgtgagaattgcggcaccaccaa

SEQ ID NO: 132809 - DNA, 25 bp, Saccharomyces pastorianus
ggtagcgccaccttctattaatata

SEQ ID NO: 132810 - DNA, 25 bp, Saccharomyces pastorianus
ggtgcgagtattgggccttacgaaa

SEQ ID NO: 132811 - DNA, 25 bp, Saccharomyces pastorianus
catttgcctgttgatttggaagctg

SEQ ID NO: 132812 - DNA, 25 bp, Saccharomyces pastorianus
aaacttggtctccatgttaacctat

SEQ ID NO: 132813 - DNA, 25 bp, Saccharomyces pastorianus
gttttgtctttttcatcgctccaca

SEQ ID NO: 132814 - DNA, 25 bp, Saccharomyces pastorianus
gtcagttttatataaccctccaatc

SEQ ID NO: 132815 - DNA, 25 bp, Saccharomyces pastorianus
gaatgctggtgaagccatcttttta

SEQ ID NO: 132816 - DNA, 25 bp, Saccharomyces pastorianus
caggtcctctggtaacggtaagtca

SEQ ID NO: 132817 - DNA, 25 bp, Saccharomyces pastorianus
gcctttaaagttcgacaggtcctct

SEQ ID NO: 132818 - DNA, 25 bp, Saccharomyces pastorianus
gatggtccaagtatcttaatcacta

SEQ ID NO: 132819 - DNA, 25 bp, Saccharomyces pastorianus
aacagttccctgatgacgtgggttt

SEQ ID NO: 132820 - DNA, 25 bp, Saccharomyces pastorianus
ttgaaagctgaacccggttttgtct

SEQ ID NO: 132821 - DNA, 25 bp, Saccharomyces pastorianus
gtatggctgcttctgacaacgtagt

SEQ ID NO: 132822 - DNA, 25 bp, Saccharomyces pastorianus
taccacctgctcctggttacgagaa

SEQ ID NO: 132823 - DNA, 25 bp, Saccharomyces pastorianus
aacttctgcgggtgccgacctacca

SEQ ID NO: 132824 - DNA, 25 bp, Saccharomyces pastorianus
taaagagaatgcattggctattggt

SEQ ID NO: 132825 - DNA, 25 bp, Saccharomyces pastorianus
tgccctggcctaacttctgcgggtg

SEQ ID NO: 132826 - DNA, 25 bp, Saccharomyces pastorianus
taaatcagtgaacaaaggtcattcc

SEQ ID NO: 132827 - DNA, 25 bp, Saccharomyces pastorianus
tggcctaacttctgcgggtgccgac

SEQ ID NO: 132828 - DNA, 25 bp, Saccharomyces pastorianus
gtcatcaatgccgaaaataaagaga

SEQ ID NO: 132829 - DNA, 25 bp, Saccharomyces pastorianus
acgattgtagtcatcaatgccgaaa

SEQ ID NO: 132830 - DNA, 25 bp, Saccharomyces pastorianus
agaaaggtacgattgtagtcatcaa

SEQ ID NO: 132831 - DNA, 25 bp, Saccharomyces pastorianus
gaatgcattggctattggtgaattg

SEQ ID NO: 132832 - DNA, 25 bp, Saccharomyces pastorianus
ctgctcctggttacgagaaaggtac

SEQ ID NO: 132833 - DNA, 25 bp, Saccharomyces pastorianus
caatccttcaagatgggccgcatat

SEQ ID NO: 132834 - DNA, 25 bp, Saccharomyces pastorianus
ctatgcctaaactaacagcctttgt

SEQ ID NO: 132835 - DNA, 25 bp, Saccharomyces pastorianus
aaggtcaaaccgtctcactatactt

SEQ ID NO: 132836 - DNA, 25 bp, Saccharomyces pastorianus
ggaaactatttctctcctagtgaac

SEQ ID NO: 132837 - DNA, 25 bp, Saccharomyces pastorianus
agcatagctgccacacgatcgataa

SEQ ID NO: 132838 - DNA, 25 bp, Saccharomyces pastorianus
attcttttagcatacacttcccatg

SEQ ID NO: 132839 - DNA, 25 bp, Saccharomyces pastorianus
aaaaggctgcacactcatatggtaa

SEQ ID NO: 132840 - DNA, 25 bp, Saccharomyces pastorianus
acgtcctatgcgataagttgtggtc

SEQ ID NO: 132841 - DNA, 25 bp, Saccharomyces pastorianus
agaatcttatgcttcctttctactc

SEQ ID NO: 132842 - DNA, 25 bp, Saccharomyces pastorianus
aacctttcagatactgctgctttaa

SEQ ID NO: 132843 - DNA, 25 bp, Saccharomyces pastorianus
taaatgacttcggttaccaccaaga

SEQ ID NO: 132844 - DNA, 25 bp, Saccharomyces pastorianus
acgatctttcgttcgagaagggaga

SEQ ID NO: 132845 - DNA, 25 bp, Saccharomyces pastorianus
gcgatttgaatgactcgatcagttt

SEQ ID NO: 132846 - DNA, 25 bp, Saccharomyces pastorianus
gaaaccacccctactatgcaaaatg

SEQ ID NO: 132847 - DNA, 25 bp, Saccharomyces pastorianus
gctcctcacgtgtaccatgaagtat

SEQ ID NO: 132848 - DNA, 25 bp, Saccharomyces pastorianus
tattgccaaagttgagtcactcggt

SEQ ID NO: 132849 - DNA, 25 bp, Saccharomyces pastorianus
tttgaaggtgaagctcctcacgtgt

SEQ ID NO: 132850 - DNA, 25 bp, Saccharomyces pastorianus
aaacgtcaacggcaattcgaagaag

SEQ ID NO: 132851 - DNA, 25 bp, Saccharomyces pastorianus
acagctagagctcatgaccaattaa

SEQ ID NO: 132852 - DNA, 25 bp, Saccharomyces pastorianus
gacttaaacgcagttttggcggaag

SEQ ID NO: 132853 - DNA, 25 bp, Saccharomyces pastorianus
gagtcactcggtggaagcgatttga

SEQ ID NO: 132854 - DNA, 25 bp, Saccharomyces pastorianus
atggtacttacgtacccgagagaag

SEQ ID NO: 132855 - DNA, 25 bp, Saccharomyces pastorianus
gttacctatatcgaaaagtcaattg

SEQ ID NO: 132856 - DNA, 25 bp, Saccharomyces pastorianus
tcctgttcaagagactgacatttca

SEQ ID NO: 132857 - DNA, 25 bp, Saccharomyces pastorianus
gatttacttgtctctgaagatatta

SEQ ID NO: 132858 - DNA, 25 bp, Saccharomyces pastorianus
tggtattcccgccaaacaagctcaa

SEQ ID NO: 132859 - DNA, 25 bp, Saccharomyces pastorianus
gacatttcaaaattagttacctata

SEQ ID NO: 132860 - DNA, 25 bp, Saccharomyces pastorianus
tcccgccaaacaagctcaaaatgat

SEQ ID NO: 132861 - DNA, 25 bp, Saccharomyces pastorianus
aagaatggtattcccgccaaacaag

SEQ ID NO: 132862 - DNA, 25 bp, Saccharomyces pastorianus
attgaagtggatttacttgtctctg

SEQ ID NO: 132863 - DNA, 25 bp, Saccharomyces pastorianus
attcccgccaaacaagctcaaaatg

SEQ ID NO: 132864 - DNA, 25 bp, Saccharomyces pastorianus
agtggatttacttgtctctgaagat

SEQ ID NO: 132865 - DNA, 25 bp, Saccharomyces pastorianus
gatattaagaatggtattcccgcca

SEQ ID NO: 132866 - DNA, 25 bp, Saccharomyces pastorianus
ggcagcaggcaaattactcggagca

SEQ ID NO: 132867 - DNA, 25 bp, Saccharomyces pastorianus
aactttcgtgtcagggttcttcatg

SEQ ID NO: 132868 - DNA, 25 bp, Saccharomyces pastorianus
gcgaaaatcattcctttgcataaca

SEQ ID NO: 132869 - DNA, 25 bp, Saccharomyces pastorianus
taagctgtcatagtgatcctgattt

SEQ ID NO: 132870 - DNA, 25 bp, Saccharomyces pastorianus
taagcgagactcacaggtaggttat

SEQ ID NO: 132871 - DNA, 25 bp, Saccharomyces pastorianus
aactagccgggaatacatgtcgcag

SEQ ID NO: 132872 - DNA, 25 bp, Saccharomyces pastorianus
attgagccccaatggcttctcgaag

SEQ ID NO: 132873 - DNA, 25 bp, Saccharomyces pastorianus
aggcaaagtttcatcacccatacgg

SEQ ID NO: 132874 - DNA, 25 bp, Saccharomyces pastorianus
gtcgcaggtaacatccattgagccc

SEQ ID NO: 132875 - DNA, 25 bp, Saccharomyces pastorianus
tggaatacatccctcgagttcattg

SEQ ID NO: 132876 - DNA, 25 bp, Saccharomyces pastorianus
cttctcgaagtagcgcctcattttt

SEQ ID NO: 132877 - DNA, 25 bp, Saccharomyces pastorianus
gagaaacataactacttttgggtgt

SEQ ID NO: 132878 - DNA, 25 bp, Saccharomyces pastorianus
agtgagaaacataactacttttggg

SEQ ID NO: 132879 - DNA, 25 bp, Saccharomyces pastorianus
atagaaagtttagaccctagccctg

SEQ ID NO: 132880 - DNA, 25 bp, Saccharomyces pastorianus
gtccaaatttttgggacgcgaatga

SEQ ID NO: 132881 - DNA, 25 bp, Saccharomyces pastorianus
gtgagaaacataactacttttgggt

SEQ ID NO: 132882 - DNA, 25 bp, Saccharomyces pastorianus
tagaaagtttagaccctagccctgt

SEQ ID NO: 132883 - DNA, 25 bp, Saccharomyces pastorianus
cctagccctgtccttcacaaagttt

SEQ ID NO: 132884 - DNA, 25 bp, Saccharomyces pastorianus
caaatttttgggacgcgaatgaaga

SEQ ID NO: 132885 - DNA, 25 bp, Saccharomyces pastorianus
ccaaatttttgggacgcgaatgaag

SEQ ID NO: 132886 - DNA, 25 bp, Saccharomyces pastorianus
gaagaattgtgatggcttagttcat

SEQ ID NO: 132887 - DNA, 25 bp, Saccharomyces pastorianus
tttttgggacgcgaatgaagaattg

SEQ ID NO: 132888 - DNA, 25 bp, Saccharomyces pastorianus
taattgccagcggtgctgcttccat

SEQ ID NO: 132889 - DNA, 25 bp, Saccharomyces pastorianus
agaacattagatccacatgatgtgg

SEQ ID NO: 132890 - DNA, 25 bp, Saccharomyces pastorianus
gaggtaggtccaacgatgctcatac

SEQ ID NO: 132891 - DNA, 25 bp, Saccharomyces pastorianus
aattcgccaactaattgccagcggt

SEQ ID NO: 132892 - DNA, 25 bp, Saccharomyces pastorianus
aaaggcgtgctttgacttcaccaga

SEQ ID NO: 132893 - DNA, 25 bp, Saccharomyces pastorianus
atacttcctatttgaccgcgaaaag

SEQ ID NO: 132894 - DNA, 25 bp, Saccharomyces pastorianus
tgaaatacccataaatacttcctat

SEQ ID NO: 132895 - DNA, 25 bp, Saccharomyces pastorianus
gtgagacaaggccaacatatctttg

SEQ ID NO: 132896 - DNA, 25 bp, Saccharomyces pastorianus
ctgcttccatcgatgactatcctga

SEQ ID NO: 132897 - DNA, 25 bp, Saccharomyces pastorianus
gatggcttagttcatatttcagaaa

SEQ ID NO: 132898 - DNA, 25 bp, Saccharomyces pastorianus
aaaaatatcgctctccatgaaaaat

SEQ ID NO: 132899 - DNA, 25 bp, Saccharomyces pastorianus
tcctatcatcgcagtcacttttgta

SEQ ID NO: 132900 - DNA, 25 bp, Saccharomyces pastorianus
taatggttacctccctggatggcac

SEQ ID NO: 132901 - DNA, 25 bp, Saccharomyces pastorianus
agcgcatccttgactgcactaatgg

SEQ ID NO: 132902 - DNA, 25 bp, Saccharomyces pastorianus
atagtgaattcccactgaccagctt

SEQ ID NO: 132903 - DNA, 25 bp, Saccharomyces pastorianus
ttccagatccttgttactgatgccg

SEQ ID NO: 132904 - DNA, 25 bp, Saccharomyces pastorianus
ttgagcatacaacctcctatcatcg

SEQ ID NO: 132905 - DNA, 25 bp, Saccharomyces pastorianus
ggatggcactacaggaacaccgtgt

SEQ ID NO: 132906 - DNA, 25 bp, Saccharomyces pastorianus
gaacaccgtgttcattgagcataca

SEQ ID NO: 132907 - DNA, 25 bp, Saccharomyces pastorianus
atgccgaggtggttgttcagcgcat

SEQ ID NO: 132908 - DNA, 25 bp, Saccharomyces pastorianus
atcttggcagacatctatcggcgat

SEQ ID NO: 132909 - DNA, 25 bp, Saccharomyces pastorianus
acaccaagcaatttccctggattct

SEQ ID NO: 132910 - DNA, 25 bp, Saccharomyces pastorianus
attattgggtccaaggccattcaag

SEQ ID NO: 132911 - DNA, 25 bp, Saccharomyces pastorianus
gaggcttttgaaaaatatttggatc

SEQ ID NO: 132912 - DNA, 25 bp, Saccharomyces pastorianus
gggtccaaggccattcaaggaaagg

SEQ ID NO: 132913 - DNA, 25 bp, Saccharomyces pastorianus
tcaaggaaaggaacgaggcttttga

SEQ ID NO: 132914 - DNA, 25 bp, Saccharomyces pastorianus
tattgggtccaaggccattcaagga

SEQ ID NO: 132915 - DNA, 25 bp, Saccharomyces pastorianus
gtccaaggccattcaaggaaaggaa

SEQ ID NO: 132916 - DNA, 25 bp, Saccharomyces pastorianus
tttggatccaaagagcaataccgaa

SEQ ID NO: 132917 - DNA, 25 bp, Saccharomyces pastorianus
caaggccattcaaggaaaggaacga

SEQ ID NO: 132918 - DNA, 25 bp, Saccharomyces pastorianus
tgggtccaaggccattcaaggaaag

SEQ ID NO: 132919 - DNA, 25 bp, Saccharomyces pastorianus
ccattcaaggaaaggaacgaggctt

SEQ ID NO: 132920 - DNA, 25 bp, Saccharomyces pastorianus
atttggatccaaagagcaataccga

SEQ ID NO: 132921 - DNA, 25 bp, Saccharomyces pastorianus
aatgccatggttacatccctaggaa

SEQ ID NO: 132922 - DNA, 25 bp, Saccharomyces pastorianus
aagattggctacctgtcgtttgatc

SEQ ID NO: 132923 - DNA, 25 bp, Saccharomyces pastorianus
gaggctgcattaatcgctgccagac

SEQ ID NO: 132924 - DNA, 25 bp, Saccharomyces pastorianus
gacaaggtgctttaggctatgccca

SEQ ID NO: 132925 - DNA, 25 bp, Saccharomyces pastorianus
aaagactgaatctggatccccttct

SEQ ID NO: 132926 - DNA, 25 bp, Saccharomyces pastorianus
caggacatgccgtttgtggttggtt

SEQ ID NO: 132927 - DNA, 25 bp, Saccharomyces pastorianus
gagctacattttccatcggtgacta

SEQ ID NO: 132928 - DNA, 25 bp, Saccharomyces pastorianus
ggccgtgtttctgaggagctacatt

SEQ ID NO: 132929 - DNA, 25 bp, Saccharomyces pastorianus
aatgatcatggctcttggtggccgt

SEQ ID NO: 132930 - DNA, 25 bp, Saccharomyces pastorianus
aaatatgcggatccacttctgaaag

SEQ ID NO: 132931 - DNA, 25 bp, Saccharomyces pastorianus
aaattggctacgcttactccaggtt

SEQ ID NO: 132932 - DNA, 25 bp, Saccharomyces pastorianus
gaatatacctagacgtgaactcaaa

SEQ ID NO: 132933 - DNA, 25 bp, Saccharomyces pastorianus
gatcgagaataagctcaccccacgg

SEQ ID NO: 132934 - DNA, 25 bp, Saccharomyces pastorianus
gtttaatgctcgaaagtcctaacta

SEQ ID NO: 132935 - DNA, 25 bp, Saccharomyces pastorianus
ttaactgagcacaaaagccctaatc

SEQ ID NO: 132936 - DNA, 25 bp, Saccharomyces pastorianus
caccccacggactgatcaatttgaa

SEQ ID NO: 132937 - DNA, 25 bp, Saccharomyces pastorianus
tgttgtcccttgacgatgactccat

SEQ ID NO: 132938 - DNA, 25 bp, Saccharomyces pastorianus
gagatccgtgccttcgataaactat

SEQ ID NO: 132939 - DNA, 25 bp, Saccharomyces pastorianus
ggaagccaacgcagtgtcctttgac

SEQ ID NO: 132940 - DNA, 25 bp, Saccharomyces pastorianus
taatacgtcccattcttggtaaagt

SEQ ID NO: 132941 - DNA, 25 bp, Saccharomyces pastorianus
gtcctttgacacaacattttctgat

SEQ ID NO: 132942 - DNA, 25 bp, Saccharomyces pastorianus
gtgctcgatatagttcctggctcaa

SEQ ID NO: 132943 - DNA, 25 bp, Saccharomyces pastorianus
gatgatgatatcgatgctagcagct

SEQ ID NO: 132944 - DNA, 25 bp, Saccharomyces pastorianus
gagcctcagcatcctttaagacata

SEQ ID NO: 132945 - DNA, 25 bp, Saccharomyces pastorianus
ctcagcagtctgactcacttcaaaa

SEQ ID NO: 132946 - DNA, 25 bp, Saccharomyces pastorianus
aaggatgcttccatgttagatgtca

SEQ ID NO: 132947 - DNA, 25 bp, Saccharomyces pastorianus
gaggcagctagcaacactacgatta

SEQ ID NO: 132948 - DNA, 25 bp, Saccharomyces pastorianus
ttactgggtcttttacgggatggag

SEQ ID NO: 132949 - DNA, 25 bp, Saccharomyces pastorianus
atacctccatattcaaaccatgcgg

SEQ ID NO: 132950 - DNA, 25 bp, Saccharomyces pastorianus
gtttccagttgacatcacttggcaa

SEQ ID NO: 132951 - DNA, 25 bp, Saccharomyces pastorianus
tggattatcagccatctcagcagtc

SEQ ID NO: 132952 - DNA, 25 bp, Saccharomyces pastorianus
cgaaggcgatatccacgatgcagat

SEQ ID NO: 132953 - DNA, 25 bp, Saccharomyces pastorianus
aactaatgaggcttccctggcgtac

SEQ ID NO: 132954 - DNA, 25 bp, Saccharomyces pastorianus
atcatcacctacttctgttacgtat

SEQ ID NO: 132955 - DNA, 25 bp, Saccharomyces pastorianus
agtcctctgcgaagaatcatgcctt

SEQ ID NO: 132956 - DNA, 25 bp, Saccharomyces pastorianus
aagagcttttcaagaccgccaacgg

SEQ ID NO: 132957 - DNA, 25 bp, Saccharomyces pastorianus
atcacctccattgcatcagtatatc

SEQ ID NO: 132958 - DNA, 25 bp, Saccharomyces pastorianus
tgaggacagtaacgttcaccgccaa

SEQ ID NO: 132959 - DNA, 25 bp, Saccharomyces pastorianus
aagcgggtttcctgaagatcctgca

SEQ ID NO: 132960 - DNA, 25 bp, Saccharomyces pastorianus
gacagtatccgtttcgagcagttca

SEQ ID NO: 132961 - DNA, 25 bp, Saccharomyces pastorianus
gttacgtatgatgacaccgcggcta

SEQ ID NO: 132962 - DNA, 25 bp, Saccharomyces pastorianus
tagccctgggtgtattgtcttcaaa

SEQ ID NO: 132963 - DNA, 25 bp, Saccharomyces pastorianus
ggtcctgattctttgggtagttcta

SEQ ID NO: 132964 - DNA, 25 bp, Saccharomyces pastorianus
agatcctgcatctacaccgtatgta

SEQ ID NO: 132965 - DNA, 25 bp, Saccharomyces pastorianus
gcgagaagcctcaccaatgtaccgt

SEQ ID NO: 132966 - DNA, 25 bp, Saccharomyces pastorianus
agcctcaccaatgtaccgttcaggg

SEQ ID NO: 132967 - DNA, 25 bp, Saccharomyces pastorianus
tactggcgagaagcctcaccaatgt

SEQ ID NO: 132968 - DNA, 25 bp, Saccharomyces pastorianus
gaagcctcaccaatgtaccgttcag

SEQ ID NO: 132969 - DNA, 25 bp, Saccharomyces pastorianus
gagaagcctcaccaatgtaccgttc

SEQ ID NO: 132970 - DNA, 25 bp, Saccharomyces pastorianus
aggcacgtaagaacgcatactggcg

SEQ ID NO: 132971 - DNA, 25 bp, Saccharomyces pastorianus
gcatactggcgagaagcctcaccaa

SEQ ID NO: 132972 - DNA, 25 bp, Saccharomyces pastorianus
agaacgcatactggcgagaagcctc

SEQ ID NO: 132973 - DNA, 25 bp, Saccharomyces pastorianus
tggcgagaagcctcaccaatgtacc

SEQ ID NO: 132974 - DNA, 25 bp, Saccharomyces pastorianus
acgtaagaacgcatactggcgagaa

SEQ ID NO: 132975 - DNA, 25 bp, Saccharomyces pastorianus
aaaaggcacgtaagaacgcatactg

SEQ ID NO: 132976 - DNA, 25 bp, Saccharomyces pastorianus
tggtgactccagtgccaacgggaat

SEQ ID NO: 132977 - DNA, 25 bp, Saccharomyces pastorianus
tttacgtgctgtacctacggaggag

SEQ ID NO: 132978 - DNA, 25 bp, Saccharomyces pastorianus
aagcatcaaatggaccttggtgact

SEQ ID NO: 132979 - DNA, 25 bp, Saccharomyces pastorianus
ggagtccaagacttttgcacaggaa

SEQ ID NO: 132980 - DNA, 25 bp, Saccharomyces pastorianus
agctgtaggtgccttgatcgtttac

SEQ ID NO: 132981 - DNA, 25 bp, Saccharomyces pastorianus
gagtttgccaccagaactttggaaa

SEQ ID NO: 132982 - DNA, 25 bp, Saccharomyces pastorianus
gggaatgccaatggtgcgtccgctc

SEQ ID NO: 132983 - DNA, 25 bp, Saccharomyces pastorianus
gattagtctgacaccaacaccaaac

SEQ ID NO: 132984 - DNA, 25 bp, Saccharomyces pastorianus
tccgctcctaatggaccaacgatta

SEQ ID NO: 132985 - DNA, 25 bp, Saccharomyces pastorianus
gggcttatcggtaacaagtctgatt

SEQ ID NO: 132986 - DNA, 25 bp, Saccharomyces pastorianus
tctatcaaaaggtcagcaagcatca

SEQ ID NO: 132987 - DNA, 25 bp, Saccharomyces pastorianus
tgcgggccaggaacgttacagagcc

SEQ ID NO: 132988 - DNA, 25 bp, Saccharomyces pastorianus
ctgcgggccaggaacgttacagagc

SEQ ID NO: 132989 - DNA, 25 bp, Saccharomyces pastorianus
atggcaagaggatcaaggcgcagat

SEQ ID NO: 132990 - DNA, 25 bp, Saccharomyces pastorianus
actgcgggccaggaacgttacagag

SEQ ID NO: 132991 - DNA, 25 bp, Saccharomyces pastorianus
atactgcgggccaggaacgttacag

SEQ ID NO: 132992 - DNA, 25 bp, Saccharomyces pastorianus
tactgcgggccaggaacgttacaga

SEQ ID NO: 132993 - DNA, 25 bp, Saccharomyces pastorianus
gatactgcgggccaggaacgttaca

SEQ ID NO: 132994 - DNA, 25 bp, Saccharomyces pastorianus
gcgggccaggaacgttacagagcca

SEQ ID NO: 132995 - DNA, 25 bp, Saccharomyces pastorianus
ttttcttccaatactgccattacgg

SEQ ID NO: 132996 - DNA, 25 bp, Saccharomyces pastorianus
ggatacaacatctcaaccttctgtg

SEQ ID NO: 132997 - DNA, 25 bp, Saccharomyces pastorianus
aaaatttaggtcatggtcctccatc

SEQ ID NO: 132998 - DNA, 25 bp, Saccharomyces pastorianus
cgttgccttttccactgtatgatga

SEQ ID NO: 132999 - DNA, 25 bp, Saccharomyces pastorianus
aaatcaagagtacttccgccgttgc

SEQ ID NO: 133000 - DNA, 25 bp, Saccharomyces pastorianus
gtaaatcttcctacaattctgagtt

SEQ ID NO: 133001 - DNA, 25 bp, Saccharomyces pastorianus
gaacaagagtctgccatgctcaaaa

SEQ ID NO: 133002 - DNA, 25 bp, Saccharomyces pastorianus
gaagaaacgtctaagccattgcaac

SEQ ID NO: 133003 - DNA, 25 bp, Saccharomyces pastorianus
gatcccgaacaagtatcagtccagt

SEQ ID NO: 133004 - DNA, 25 bp, Saccharomyces pastorianus
gaatactccttcaaatagacacgat

SEQ ID NO: 133005 - DNA, 25 bp, Saccharomyces pastorianus
gaacaactattcgttccccaggaat

SEQ ID NO: 133006 - DNA, 25 bp, Saccharomyces pastorianus
aggacccggattctgcagtcgctaa

SEQ ID NO: 133007 - DNA, 25 bp, Saccharomyces pastorianus
tatgaggacccggtactcgaggacc

SEQ ID NO: 133008 - DNA, 25 bp, Saccharomyces pastorianus
agcccgccctgaagtcaaacgagga

SEQ ID NO: 133009 - DNA, 25 bp, Saccharomyces pastorianus
ggctgagcccgaatcattagtcgtt

SEQ ID NO: 133010 - DNA, 25 bp, Saccharomyces pastorianus
tcaatcgttggctcggacggcagaa

SEQ ID NO: 133011 - DNA, 25 bp, Saccharomyces pastorianus
attagtcgttcccattcacgtacaa

SEQ ID NO: 133012 - DNA, 25 bp, Saccharomyces pastorianus
gacggcagaatacaacatcggctat

SEQ ID NO: 133013 - DNA, 25 bp, Saccharomyces pastorianus
agacgtcctcaaaaatcggctccag

SEQ ID NO: 133014 - DNA, 25 bp, Saccharomyces pastorianus
ggcaagaagatcagtgccccttcga

SEQ ID NO: 133015 - DNA, 25 bp, Saccharomyces pastorianus
gaaaacatgccacacccagtgatag

SEQ ID NO: 133016 - DNA, 25 bp, Saccharomyces pastorianus
gacgccacagcggtcaataatgttg

SEQ ID NO: 133017 - DNA, 25 bp, Saccharomyces pastorianus
gggacggatccattttgcaatataa

SEQ ID NO: 133018 - DNA, 25 bp, Saccharomyces pastorianus
tgtcaagttgggtgtctactcgcaa

SEQ ID NO: 133019 - DNA, 25 bp, Saccharomyces pastorianus
gtcgtttcgcatgatttcagattat

SEQ ID NO: 133020 - DNA, 25 bp, Saccharomyces pastorianus
cgatatggactcacgtattgccctt

SEQ ID NO: 133021 - DNA, 25 bp, Saccharomyces pastorianus
gtccgtgacaagtactctaacatct

SEQ ID NO: 133022 - DNA, 25 bp, Saccharomyces pastorianus
ttctcgtgtcgtctttgctttatta

SEQ ID NO: 133023 - DNA, 25 bp, Saccharomyces pastorianus
atctggccgtgtttctagacatacc

SEQ ID NO: 133024 - DNA, 25 bp, Saccharomyces pastorianus
tattgcccttgtcggaccaaatggt

SEQ ID NO: 133025 - DNA, 25 bp, Saccharomyces pastorianus
aaccgttcaaatggctaccttgtca

SEQ ID NO: 133026 - DNA, 25 bp, Saccharomyces pastorianus
gagagcaacccatccgaaaacttgt

SEQ ID NO: 133027 - DNA, 25 bp, Saccharomyces pastorianus
atctgctctagaatttgtccgtgac

SEQ ID NO: 133028 - DNA, 25 bp, Saccharomyces pastorianus
ggccaagagagatgctaagaaagct

SEQ ID NO: 133029 - DNA, 25 bp, Saccharomyces pastorianus
gcgtcaaaggccaagagagatgcta

SEQ ID NO: 133030 - DNA, 25 bp, Saccharomyces pastorianus
aagccgctgccggtaaaaccatcag

SEQ ID NO: 133031 - DNA, 25 bp, Saccharomyces pastorianus
gccggtaaaaccatcagaaagctag

SEQ ID NO: 133032 - DNA, 25 bp, Saccharomyces pastorianus
aagagaggctaagaaagccgctgcc

SEQ ID NO: 133033 - DNA, 25 bp, Saccharomyces pastorianus
tgcgtcaaaggccaagagagatgct

SEQ ID NO: 133034 - DNA, 25 bp, Saccharomyces pastorianus
agccgctgccggtaaaaccatcaga

SEQ ID NO: 133035 - DNA, 25 bp, Saccharomyces pastorianus
aaaccatcagaaagctaggtagaaa

SEQ ID NO: 133036 - DNA, 25 bp, Saccharomyces pastorianus
gaggctaagaaagccgctgccggta

SEQ ID NO: 133037 - DNA, 25 bp, Saccharomyces pastorianus
ccgctgccggtaaaaccatcagaaa

SEQ ID NO: 133038 - DNA, 25 bp, Saccharomyces pastorianus
gtcaaaggccaagagagatgctaag

SEQ ID NO: 133039 - DNA, 25 bp, Saccharomyces pastorianus
gtatttcgtctgcattgttcgtttt

SEQ ID NO: 133040 - DNA, 25 bp, Saccharomyces pastorianus
gggcgatcagcaggccattgcaatc

SEQ ID NO: 133041 - DNA, 25 bp, Saccharomyces pastorianus
tccaatttctttgctgctcgtatta

SEQ ID NO: 133042 - DNA, 25 bp, Saccharomyces pastorianus
aagagcttacaataccttgccgtgc

SEQ ID NO: 133043 - DNA, 25 bp, Saccharomyces pastorianus
ataacaacgttctggcattgccttt

SEQ ID NO: 133044 - DNA, 25 bp, Saccharomyces pastorianus
atggtcctttcatctgtagtggcca

SEQ ID NO: 133045 - DNA, 25 bp, Saccharomyces pastorianus
ggcgttgctaattttcgatctttga

SEQ ID NO: 133046 - DNA, 25 bp, Saccharomyces pastorianus
gcgaggtcctcttctttggcggaaa

SEQ ID NO: 133047 - DNA, 25 bp, Saccharomyces pastorianus
ttgctgctagtcttttccttcatta

SEQ ID NO: 133048 - DNA, 25 bp, Saccharomyces pastorianus
tgacgatcattctcattgcctatgg

SEQ ID NO: 133049 - DNA, 25 bp, Saccharomyces pastorianus
gagaattcggctgactaactttaaa

SEQ ID NO: 133050 - DNA, 25 bp, Saccharomyces pastorianus
atcacatacctcattgttatcacaa

SEQ ID NO: 133051 - DNA, 25 bp, Saccharomyces pastorianus
gtttatggctgcgtctttgcaacaa

SEQ ID NO: 133052 - DNA, 25 bp, Saccharomyces pastorianus
caacaattgcagaactcggagtcga

SEQ ID NO: 133053 - DNA, 25 bp, Saccharomyces pastorianus
taactcaaatagtcctctacagcag

SEQ ID NO: 133054 - DNA, 25 bp, Saccharomyces pastorianus
agatgtcgcgcaatgcatcgtactc

SEQ ID NO: 133055 - DNA, 25 bp, Saccharomyces pastorianus
atcgtactcctcatcgtttatggct

SEQ ID NO: 133056 - DNA, 25 bp, Saccharomyces pastorianus
gagtgtctcaagaccttcttcaaga

SEQ ID NO: 133057 - DNA, 25 bp, Saccharomyces pastorianus
atcaagtgactctacttcacctata

SEQ ID NO: 133058 - DNA, 25 bp, Saccharomyces pastorianus
atatcgtccgcaaactttaactcaa

SEQ ID NO: 133059 - DNA, 25 bp, Saccharomyces pastorianus
gtcgaattcgtttatctcaaatcac

SEQ ID NO: 133060 - DNA, 25 bp, Saccharomyces pastorianus
tcctatagattcaccgagtgtctca

SEQ ID NO: 133061 - DNA, 25 bp, Saccharomyces pastorianus
aagacggtcaaggacaccacaccag

SEQ ID NO: 133062 - DNA, 25 bp, Saccharomyces pastorianus
tagtcatctggacgtgcatggtcga

SEQ ID NO: 133063 - DNA, 25 bp, Saccharomyces pastorianus
atattttacggacttcgtgtctcct

SEQ ID NO: 133064 - DNA, 25 bp, Saccharomyces pastorianus
attaaacggcggcacattcgactca

SEQ ID NO: 133065 - DNA, 25 bp, Saccharomyces pastorianus
tattgcgatgtttgattcacttgcc

SEQ ID NO: 133066 - DNA, 25 bp, Saccharomyces pastorianus
aactcgagcggttcagctactatta

SEQ ID NO: 133067 - DNA, 25 bp, Saccharomyces pastorianus
attcgactcaatgctggaggcactg

SEQ ID NO: 133068 - DNA, 25 bp, Saccharomyces pastorianus
gctactattagtgctcctaacagct

SEQ ID NO: 133069 - DNA, 25 bp, Saccharomyces pastorianus
gtggaccaattcaacatgacgccca

SEQ ID NO: 133070 - DNA, 25 bp, Saccharomyces pastorianus
agagccgagacaaactggtgacagt

SEQ ID NO: 133071 - DNA, 25 bp, Saccharomyces pastorianus
tcctaacagctttacttccgacata

SEQ ID NO: 133072 - DNA, 25 bp, Saccharomyces pastorianus
aagagctgcctcagtatcttccagt

SEQ ID NO: 133073 - DNA, 25 bp, Saccharomyces pastorianus
aaaacctctgatacaatgtttcaat

SEQ ID NO: 133074 - DNA, 25 bp, Saccharomyces pastorianus
aatatggaaccatcaggacaaaata

SEQ ID NO: 133075 - DNA, 25 bp, Saccharomyces pastorianus
gtaaaactttcaagacaccgctttg

SEQ ID NO: 133076 - DNA, 25 bp, Saccharomyces pastorianus
gtatatccaatatggaaccatcagg

SEQ ID NO: 133077 - DNA, 25 bp, Saccharomyces pastorianus
gaatactctttgcaatgcctgcggt

SEQ ID NO: 133078 - DNA, 25 bp, Saccharomyces pastorianus
gggaatactctttgcaatgcctgcg

SEQ ID NO: 133079 - DNA, 25 bp, Saccharomyces pastorianus
cctgcggtcttttccagaaattaca

SEQ ID NO: 133080 - DNA, 25 bp, Saccharomyces pastorianus
atgtcgtccacgtccctggccaatt

SEQ ID NO: 133081 - DNA, 25 bp, Saccharomyces pastorianus
aactttcaagacaccgctttggagg

SEQ ID NO: 133082 - DNA, 25 bp, Saccharomyces pastorianus
tgcctcagtatcttccagtatatcc

SEQ ID NO: 133083 - DNA, 25 bp, Saccharomyces pastorianus
aataagtctcggctaccacggaaga

SEQ ID NO: 133084 - DNA, 25 bp, Saccharomyces pastorianus
gtctggaagaaataccggctcccac

SEQ ID NO: 133085 - DNA, 25 bp, Saccharomyces pastorianus
tggtttaaaatcacgctcaagcatc

SEQ ID NO: 133086 - DNA, 25 bp, Saccharomyces pastorianus
gactgaccaccgtcgatgaacacag

SEQ ID NO: 133087 - DNA, 25 bp, Saccharomyces pastorianus
aaggtactaagatgttgcctccaaa

SEQ ID NO: 133088 - DNA, 25 bp, Saccharomyces pastorianus
acaatcaatgctcgccttcaaggta

SEQ ID NO: 133089 - DNA, 25 bp, Saccharomyces pastorianus
gaaaaatccgcctgagtctggttta

SEQ ID NO: 133090 - DNA, 25 bp, Saccharomyces pastorianus
agatacagtcgaccggtttgtagcc

SEQ ID NO: 133091 - DNA, 25 bp, Saccharomyces pastorianus
tgtccttgaccaacttttcacagac

SEQ ID NO: 133092 - DNA, 25 bp, Saccharomyces pastorianus
gaaagagaacactcctctgtccttg

SEQ ID NO: 133093 - DNA, 25 bp, Saccharomyces pastorianus
ggatcttacacaggacgaacaggtt

SEQ ID NO: 133094 - DNA, 25 bp, Saccharomyces pastorianus
gaagaagtttgatcgcctgtctctc

SEQ ID NO: 133095 - DNA, 25 bp, Saccharomyces pastorianus
gagtactattcaagctgggaacagc

SEQ ID NO: 133096 - DNA, 25 bp, Saccharomyces pastorianus
aaaggattgctagcgccatctgacc

SEQ ID NO: 133097 - DNA, 25 bp, Saccharomyces pastorianus
aataacttcccacagtcccagtaga

SEQ ID NO: 133098 - DNA, 25 bp, Saccharomyces pastorianus
atttttcagcgtgctattaggtgcc

SEQ ID NO: 133099 - DNA, 25 bp, Saccharomyces pastorianus
gcccagtgtgtttggctgcaagttt

SEQ ID NO: 133100 - DNA, 25 bp, Saccharomyces pastorianus
agaacgctactacttgtgatgatga

SEQ ID NO: 133101 - DNA, 25 bp, Saccharomyces pastorianus
tttaaacgtcgaattcttgcttgta

SEQ ID NO: 133102 - DNA, 25 bp, Saccharomyces pastorianus
cgattcagatactctcgtatttggg

SEQ ID NO: 133103 - DNA, 25 bp, Saccharomyces pastorianus
aattctacgatgattttggcccaag

SEQ ID NO: 133104 - DNA, 25 bp, Saccharomyces pastorianus
ctgagttcatcagtcttgtacggaa

SEQ ID NO: 133105 - DNA, 25 bp, Saccharomyces pastorianus
tccacaatggctggtaaggcacttg

SEQ ID NO: 133106 - DNA, 25 bp, Saccharomyces pastorianus
aatactgacgaactggaccaatatg

SEQ ID NO: 133107 - DNA, 25 bp, Saccharomyces pastorianus
attgcccacaagtttgccagtgcta

SEQ ID NO: 133108 - DNA, 25 bp, Saccharomyces pastorianus
aaagcaatgctgtttattgcccaca

SEQ ID NO: 133109 - DNA, 25 bp, Saccharomyces pastorianus
atctctaggtacttaattgctgtga

SEQ ID NO: 133110 - DNA, 25 bp, Saccharomyces pastorianus
tattgtatttattggccagggttta

SEQ ID NO: 133111 - DNA, 25 bp, Saccharomyces pastorianus
tattcactggtacacgcgacaatgc

SEQ ID NO: 133112 - DNA, 25 bp, Saccharomyces pastorianus
tgccagtgctagaaggtcaccagaa

SEQ ID NO: 133113 - DNA, 25 bp, Saccharomyces pastorianus
atgtgggctatgtcgaaatttgaac

SEQ ID NO: 133114 - DNA, 25 bp, Saccharomyces pastorianus
gagtttttgaagagctaatcctagg

SEQ ID NO: 133115 - DNA, 25 bp, Saccharomyces pastorianus
aaggcacttggtgtcatgtgggcta

SEQ ID NO: 133116 - DNA, 25 bp, Saccharomyces pastorianus
agtttcaagccgtaggcgaggccta

SEQ ID NO: 133117 - DNA, 25 bp, Saccharomyces pastorianus
ttttgggcatcaagcctgaggccac

SEQ ID NO: 133118 - DNA, 25 bp, Saccharomyces pastorianus
ggacaagcatcctgatgacccagat

SEQ ID NO: 133119 - DNA, 25 bp, Saccharomyces pastorianus
aggcgaggcctaccaagtcttaagt

SEQ ID NO: 133120 - DNA, 25 bp, Saccharomyces pastorianus
ctgatgacccagatgctcaagcaaa

SEQ ID NO: 133121 - DNA, 25 bp, Saccharomyces pastorianus
agggcttcgttccaagtatgaccag

SEQ ID NO: 133122 - DNA, 25 bp, Saccharomyces pastorianus
aaggctatggaaacacatccggaca

SEQ ID NO: 133123 - DNA, 25 bp, Saccharomyces pastorianus
gtcttaagtgatccagggcttcgtt

SEQ ID NO: 133124 - DNA, 25 bp, Saccharomyces pastorianus
tgaggccacgcccactgaaatcaaa

SEQ ID NO: 133125 - DNA, 25 bp, Saccharomyces pastorianus
tcaagcaaagtttcaagccgtaggc

SEQ ID NO: 133126 - DNA, 25 bp, Saccharomyces pastorianus
tgaaatcaaaaaggcctatcgtaga

SEQ ID NO: 133127 - DNA, 25 bp, Saccharomyces pastorianus
ctatctacgatccatttgacttctc

SEQ ID NO: 133128 - DNA, 25 bp, Saccharomyces pastorianus
ttcaagatatgtgacctccacggga

SEQ ID NO: 133129 - DNA, 25 bp, Saccharomyces pastorianus
aaacgtgctctatacaatttcggta

SEQ ID NO: 133130 - DNA, 25 bp, Saccharomyces pastorianus
tttgacttctctatgggacgaatcc

SEQ ID NO: 133131 - DNA, 25 bp, Saccharomyces pastorianus
tccaacatagggatatcacaggctt

SEQ ID NO: 133132 - DNA, 25 bp, Saccharomyces pastorianus
gacctccacgggaagaatccaacat

SEQ ID NO: 133133 - DNA, 25 bp, Saccharomyces pastorianus
gaaaatcgatcagtctttgtccaaa

SEQ ID NO: 133134 - DNA, 25 bp, Saccharomyces pastorianus
ggatatcacaggcttatcggcaaag

SEQ ID NO: 133135 - DNA, 25 bp, Saccharomyces pastorianus
aagctccacatttaaacgtgctcta

SEQ ID NO: 133136 - DNA, 25 bp, Saccharomyces pastorianus
gaacgatataatgaagtccggtgca

SEQ ID NO: 133137 - DNA, 25 bp, Saccharomyces pastorianus
gtccggtgcaaatccactagaattt

SEQ ID NO: 133138 - DNA, 25 bp, Saccharomyces pastorianus
aaaaattcaaaatggtatgcaacct

SEQ ID NO: 133139 - DNA, 25 bp, Saccharomyces pastorianus
agatgaatgccaccacaggcataaa

SEQ ID NO: 133140 - DNA, 25 bp, Saccharomyces pastorianus
caaaacttcggatgttcaagatgaa

SEQ ID NO: 133141 - DNA, 25 bp, Saccharomyces pastorianus
tacagtttctaaccaaaaaggcaag

SEQ ID NO: 133142 - DNA, 25 bp, Saccharomyces pastorianus
tacacaaaacttcggatgttcaaga

SEQ ID NO: 133143 - DNA, 25 bp, Saccharomyces pastorianus
taacagtgttacagtttctaaccaa

SEQ ID NO: 133144 - DNA, 25 bp, Saccharomyces pastorianus
gttcaagatgaatgccaccacaggc

SEQ ID NO: 133145 - DNA, 25 bp, Saccharomyces pastorianus
ggcaaggttctacacaaaacttcgg

SEQ ID NO: 133146 - DNA, 25 bp, Saccharomyces pastorianus
ggatgttcaagatgaatgccaccac

SEQ ID NO: 133147 - DNA, 25 bp, Saccharomyces pastorianus
ggttctacacaaaacttcggatgtt

SEQ ID NO: 133148 - DNA, 25 bp, Saccharomyces pastorianus
gccaccacaggcataaaaattcaaa

SEQ ID NO: 133149 - DNA, 25 bp, Saccharomyces pastorianus
gagcgcgaagagtactgggacaaca

SEQ ID NO: 133150 - DNA, 25 bp, Saccharomyces pastorianus
taatattcccaatagccacaatggt

SEQ ID NO: 133151 - DNA, 25 bp, Saccharomyces pastorianus
tgccgggcactaacatggacatttt

SEQ ID NO: 133152 - DNA, 25 bp, Saccharomyces pastorianus
gtaatgactgtaatggtgtggccaa

SEQ ID NO: 133153 - DNA, 25 bp, Saccharomyces pastorianus
acacgtaacgactatgagcgcgaag

SEQ ID NO: 133154 - DNA, 25 bp, Saccharomyces pastorianus
acagcaagaacttccccattttaag

SEQ ID NO: 133155 - DNA, 25 bp, Saccharomyces pastorianus
gatgccagcaaagtggatcctcgcg

SEQ ID NO: 133156 - DNA, 25 bp, Saccharomyces pastorianus
caagggttataacgctggctgtaca

SEQ ID NO: 133157 - DNA, 25 bp, Saccharomyces pastorianus
attacttttcaaattcctcctcatt

SEQ ID NO: 133158 - DNA, 25 bp, Saccharomyces pastorianus
tgcattcattattctacacgtaacg

SEQ ID NO: 133159 - DNA, 25 bp, Saccharomyces pastorianus
ggatcctcgcggcaagttagaattt

SEQ ID NO: 133160 - DNA, 25 bp, Saccharomyces pastorianus
ggatgaaagccctataaacgttaat

SEQ ID NO: 133161 - DNA, 25 bp, Saccharomyces pastorianus
aaattctaattccatttgcgccacc

SEQ ID NO: 133162 - DNA, 25 bp, Saccharomyces pastorianus
cagtgaatttaatggtggacccgga

SEQ ID NO: 133163 - DNA, 25 bp, Saccharomyces pastorianus
ctgccaagaatcacacttccgtaga

SEQ ID NO: 133164 - DNA, 25 bp, Saccharomyces pastorianus
gcggcacctgtaaaatattttgctg

SEQ ID NO: 133165 - DNA, 25 bp, Saccharomyces pastorianus
gaatatcccgaagctaagtcacctg

SEQ ID NO: 133166 - DNA, 25 bp, Saccharomyces pastorianus
tcaaaatcattacctacaaccccag

SEQ ID NO: 133167 - DNA, 25 bp, Saccharomyces pastorianus
gagtgttcactttgatcaggcggca

SEQ ID NO: 133168 - DNA, 25 bp, Saccharomyces pastorianus
gaagctaagtcacctggcaatgata

SEQ ID NO: 133169 - DNA, 25 bp, Saccharomyces pastorianus
gctggtcaaaaattgccgctgccaa

SEQ ID NO: 133170 - DNA, 25 bp, Saccharomyces pastorianus
aaagaattttctccgcagggaatga

SEQ ID NO: 133171 - DNA, 25 bp, Saccharomyces pastorianus
tctgcagacggttcaataaggtgtt

SEQ ID NO: 133172 - DNA, 25 bp, Saccharomyces pastorianus
catacggcgactgtaagaactgtct

SEQ ID NO: 133173 - DNA, 25 bp, Saccharomyces pastorianus
agtcagtgcttctgcagacggttca

SEQ ID NO: 133174 - DNA, 25 bp, Saccharomyces pastorianus
ttttaagaggacatacggcgactgt

SEQ ID NO: 133175 - DNA, 25 bp, Saccharomyces pastorianus
gggacgctaacacttactttctgaa

SEQ ID NO: 133176 - DNA, 25 bp, Saccharomyces pastorianus
gtctatatatcttgagtggacatac

SEQ ID NO: 133177 - DNA, 25 bp, Saccharomyces pastorianus
tgaagcactttttcgatcacacgca

SEQ ID NO: 133178 - DNA, 25 bp, Saccharomyces pastorianus
ggtcacagagccctagtcggtttat

SEQ ID NO: 133179 - DNA, 25 bp, Saccharomyces pastorianus
gagccctagtcggtttattgggatt

SEQ ID NO: 133180 - DNA, 25 bp, Saccharomyces pastorianus
actttttcgatcacacgcagttgaa

SEQ ID NO: 133181 - DNA, 25 bp, Saccharomyces pastorianus
cacgcagttgaatacaatcaccgca

SEQ ID NO: 133182 - DNA, 25 bp, Saccharomyces pastorianus
taatgtagccgtcgatggttctgtg

SEQ ID NO: 133183 - DNA, 25 bp, Saccharomyces pastorianus
gcttggtctcattattatccctgga

SEQ ID NO: 133184 - DNA, 25 bp, Saccharomyces pastorianus
tttgcggcagccaggagttcacgaa

SEQ ID NO: 133185 - DNA, 25 bp, Saccharomyces pastorianus
gtggaaacaccagcagacctgcaat

SEQ ID NO: 133186 - DNA, 25 bp, Saccharomyces pastorianus
cagcgttttgtgttacctatagcca

SEQ ID NO: 133187 - DNA, 25 bp, Saccharomyces pastorianus
gtgaatctaccctctgtagagccaa

SEQ ID NO: 133188 - DNA, 25 bp, Saccharomyces pastorianus
tgtgctgttcgtgtttcaatatcca

SEQ ID NO: 133189 - DNA, 25 bp, Saccharomyces pastorianus
acttcactcagcatattctcgtcga

SEQ ID NO: 133190 - DNA, 25 bp, Saccharomyces pastorianus
gcaatgggtagcatgggccgttcac

SEQ ID NO: 133191 - DNA, 25 bp, Saccharomyces pastorianus
taggttgtacaatagggccgtctct

SEQ ID NO: 133192 - DNA, 25 bp, Saccharomyces pastorianus
tgccgagctgagagtagttgccaat

SEQ ID NO: 133193 - DNA, 25 bp, Saccharomyces pastorianus
gaagagcccaatatgcggttattat

SEQ ID NO: 133194 - DNA, 25 bp, Saccharomyces pastorianus
cccttggattgattgcttgcttttg

SEQ ID NO: 133195 - DNA, 25 bp, Saccharomyces pastorianus
aaatgagacggtatagtatcctgag

SEQ ID NO: 133196 - DNA, 25 bp, Saccharomyces pastorianus
gatgtggtcgcattacttcagttaa

SEQ ID NO: 133197 - DNA, 25 bp, Saccharomyces pastorianus
agtatcctgaggtcatttttctccc

SEQ ID NO: 133198 - DNA, 25 bp, Saccharomyces pastorianus
ttgcctcttgtataagatgtggtcg

SEQ ID NO: 133199 - DNA, 25 bp, Saccharomyces pastorianus
aaactgttagaaagcattgcctctt

SEQ ID NO: 133200 - DNA, 25 bp, Saccharomyces pastorianus
agttacggctatgtgaagattttga

SEQ ID NO: 133201 - DNA, 25 bp, Saccharomyces pastorianus
aatagttctttcagaagagcccaat

SEQ ID NO: 133202 - DNA, 25 bp, Saccharomyces pastorianus
atgacttgaaccagtttgtttttca

SEQ ID NO: 133203 - DNA, 25 bp, Saccharomyces pastorianus
aggtcatttttctcccttggattga

SEQ ID NO: 133204 - DNA, 25 bp, Saccharomyces pastorianus
accggatcccgcagatgattcatcg

SEQ ID NO: 133205 - DNA, 25 bp, Saccharomyces pastorianus
ctggttctaccactgatgatgacaa

SEQ ID NO: 133206 - DNA, 25 bp, Saccharomyces pastorianus
gatgcggatatgttgtctcctacac

SEQ ID NO: 133207 - DNA, 25 bp, Saccharomyces pastorianus
acaagactgtcttttcatccagcag

SEQ ID NO: 133208 - DNA, 25 bp, Saccharomyces pastorianus
aaacaactttcgttctgaagccatt

SEQ ID NO: 133209 - DNA, 25 bp, Saccharomyces pastorianus
agataatgtagacccgctgcatcgt

SEQ ID NO: 133210 - DNA, 25 bp, Saccharomyces pastorianus
tgaagccattactccgagaccgaag

SEQ ID NO: 133211 - DNA, 25 bp, Saccharomyces pastorianus
gttccaacatatcctccaaagacgt

SEQ ID NO: 133212 - DNA, 25 bp, Saccharomyces pastorianus
tgaatcgcacccctaattccaaaaa

SEQ ID NO: 133213 - DNA, 25 bp, Saccharomyces pastorianus
aaagacgtttcaccggatccgatct

SEQ ID NO: 133214 - DNA, 25 bp, Saccharomyces pastorianus
cttctgatgatggttctaggtgcac

SEQ ID NO: 133215 - DNA, 25 bp, Saccharomyces pastorianus
cctcccatcccgagaatgacagtaa

SEQ ID NO: 133216 - DNA, 25 bp, Saccharomyces pastorianus
acgggaacaaagtcacctacactct

SEQ ID NO: 133217 - DNA, 25 bp, Saccharomyces pastorianus
cttggaggcgctacttggtgctaca

SEQ ID NO: 133218 - DNA, 25 bp, Saccharomyces pastorianus
cagtgatctagcatccttggaggcg

SEQ ID NO: 133219 - DNA, 25 bp, Saccharomyces pastorianus
acacggacgctgacacagatgcaga

SEQ ID NO: 133220 - DNA, 25 bp, Saccharomyces pastorianus
gaagacagacagcaacgggaacaaa

SEQ ID NO: 133221 - DNA, 25 bp, Saccharomyces pastorianus
tgcagaaaatcttgacccttccagc

SEQ ID NO: 133222 - DNA, 25 bp, Saccharomyces pastorianus
aactgctccaaaccataggccatga

SEQ ID NO: 133223 - DNA, 25 bp, Saccharomyces pastorianus
gacatagacgacacggacgctgaca

SEQ ID NO: 133224 - DNA, 25 bp, Saccharomyces pastorianus
aagagcaagacctccggccccagtg

SEQ ID NO: 133225 - DNA, 25 bp, Saccharomyces pastorianus
ccttccagccaatccaagagcaaga

SEQ ID NO: 133226 - DNA, 25 bp, Saccharomyces pastorianus
atcatcgatgtctgttgtgctccca

SEQ ID NO: 133227 - DNA, 25 bp, Saccharomyces pastorianus
aatttcttcgcggatcatcgatgtc

SEQ ID NO: 133228 - DNA, 25 bp, Saccharomyces pastorianus
ggacgagtttgtaatcttagcctgt

SEQ ID NO: 133229 - DNA, 25 bp, Saccharomyces pastorianus
ttgtgtggacttggttcatctcggc

SEQ ID NO: 133230 - DNA, 25 bp, Saccharomyces pastorianus
ggattgtttgacttcccaagattgt

SEQ ID NO: 133231 - DNA, 25 bp, Saccharomyces pastorianus
gtgacagtagaaccgtactcgccac

SEQ ID NO: 133232 - DNA, 25 bp, Saccharomyces pastorianus
agggtcaacggtaacttggcgctct

SEQ ID NO: 133233 - DNA, 25 bp, Saccharomyces pastorianus
ggacattctcgagcattctctagat

SEQ ID NO: 133234 - DNA, 25 bp, Saccharomyces pastorianus
agtatagtggttgtcgcgctgctga

SEQ ID NO: 133235 - DNA, 25 bp, Saccharomyces pastorianus
agtgacatgtgttccggacattctc

SEQ ID NO: 133236 - DNA, 25 bp, Saccharomyces pastorianus
tattgtggcagctgatggcttcgta

SEQ ID NO: 133237 - DNA, 25 bp, Saccharomyces pastorianus
gcatggacgaagaaacctccaaact

SEQ ID NO: 133238 - DNA, 25 bp, Saccharomyces pastorianus
tgggcgttccacaagccttagaaac

SEQ ID NO: 133239 - DNA, 25 bp, Saccharomyces pastorianus
ttaacgtatgtatccgccgcttcaa

SEQ ID NO: 133240 - DNA, 25 bp, Saccharomyces pastorianus
ggtacgttcagcacattgatattcg

SEQ ID NO: 133241 - DNA, 25 bp, Saccharomyces pastorianus
tcaaccgcaagagagtttgtattta

SEQ ID NO: 133242 - DNA, 25 bp, Saccharomyces pastorianus
gatattcggcttttgttgggcactt

SEQ ID NO: 133243 - DNA, 25 bp, Saccharomyces pastorianus
tatccgccgcttcaataggtacgtt

SEQ ID NO: 133244 - DNA, 25 bp, Saccharomyces pastorianus
caagccttagaaaccgacacgagca

SEQ ID NO: 133245 - DNA, 25 bp, Saccharomyces pastorianus
actagagagttcatgggcgttccac

SEQ ID NO: 133246 - DNA, 25 bp, Saccharomyces pastorianus
gaaaccgacacgagcatggacgaag

SEQ ID NO: 133247 - DNA, 25 bp, Saccharomyces pastorianus
tgggcacttgacatttcaaccgcaa

SEQ ID NO: 133248 - DNA, 25 bp, Saccharomyces pastorianus
tatctccagggccataaaagtacga

SEQ ID NO: 133249 - DNA, 25 bp, Saccharomyces pastorianus
ggtgcggccgccttcaccctgatta

SEQ ID NO: 133250 - DNA, 25 bp, Saccharomyces pastorianus
aaatggccagattttatggtgcggc

SEQ ID NO: 133251 - DNA, 25 bp, Saccharomyces pastorianus
agattttatggtgcggccgccttca

SEQ ID NO: 133252 - DNA, 25 bp, Saccharomyces pastorianus
gcagggttcttcaaatggccagatt

SEQ ID NO: 133253 - DNA, 25 bp, Saccharomyces pastorianus
ttaccatgaggcttatctccagggc

SEQ ID NO: 133254 - DNA, 25 bp, Saccharomyces pastorianus
gtatgtattttgtcctagttcagtg

SEQ ID NO: 133255 - DNA, 25 bp, Saccharomyces pastorianus
ccctgattaccatgaggcttatctc

SEQ ID NO: 133256 - DNA, 25 bp, Saccharomyces pastorianus
tccagggccataaaagtacgaaaat

SEQ ID NO: 133257 - DNA, 25 bp, Saccharomyces pastorianus
gaggcttatctccagggccataaaa

SEQ ID NO: 133258 - DNA, 25 bp, Saccharomyces pastorianus
gaaacgcagggttcttcaaatggcc

SEQ ID NO: 133259 - DNA, 25 bp, Saccharomyces pastorianus
tatgagtgcggcttgggtgtaacca

SEQ ID NO: 133260 - DNA, 25 bp, Saccharomyces pastorianus
tggataccctgatgcacagtacctt

SEQ ID NO: 133261 - DNA, 25 bp, Saccharomyces pastorianus
atcctccttcggcacagaaatatca

SEQ ID NO: 133262 - DNA, 25 bp, Saccharomyces pastorianus
acagtaccttctaggtgacgcctac

SEQ ID NO: 133263 - DNA, 25 bp, Saccharomyces pastorianus
agaactgccatttgctatgagtgcg

SEQ ID NO: 133264 - DNA, 25 bp, Saccharomyces pastorianus
ctttgtttgtggtgctccttttgaa

SEQ ID NO: 133265 - DNA, 25 bp, Saccharomyces pastorianus
gcggttaactttttgacttttgctg

SEQ ID NO: 133266 - DNA, 25 bp, Saccharomyces pastorianus
gttgcgaagggctacatctatggct

SEQ ID NO: 133267 - DNA, 25 bp, Saccharomyces pastorianus
tttgctgcaactaagaaccatcctg

SEQ ID NO: 133268 - DNA, 25 bp, Saccharomyces pastorianus
agagcatttcttttattctccgctg

SEQ ID NO: 133269 - DNA, 25 bp, Saccharomyces pastorianus
gcggcggctttagggcatactgaat

SEQ ID NO: 133270 - DNA, 25 bp, Saccharomyces pastorianus
tatggctgacacgtgtggtacgctg

SEQ ID NO: 133271 - DNA, 25 bp, Saccharomyces pastorianus
cgatactggtatcgcctgatgctgg

SEQ ID NO: 133272 - DNA, 25 bp, Saccharomyces pastorianus
ggaggttatcgctattgtcacacat

SEQ ID NO: 133273 - DNA, 25 bp, Saccharomyces pastorianus
aagggtggcttctttagcggacaag

SEQ ID NO: 133274 - DNA, 25 bp, Saccharomyces pastorianus
gaaactgcgggttgtgatcatgtta

SEQ ID NO: 133275 - DNA, 25 bp, Saccharomyces pastorianus
acacggtacctgttgatttggattt

SEQ ID NO: 133276 - DNA, 25 bp, Saccharomyces pastorianus
ggatatcagccctacgattgcagaa

SEQ ID NO: 133277 - DNA, 25 bp, Saccharomyces pastorianus
tgaagtttcgcgaatgctgcttgtc

SEQ ID NO: 133278 - DNA, 25 bp, Saccharomyces pastorianus
catggtatattttctggctcagcta

SEQ ID NO: 133279 - DNA, 25 bp, Saccharomyces pastorianus
gaattgtttgcaccaacacggtacc

SEQ ID NO: 133280 - DNA, 25 bp, Saccharomyces pastorianus
tcactgcgaagctgattgccaatct

SEQ ID NO: 133281 - DNA, 25 bp, Saccharomyces pastorianus
acagtattaagttgttagctggtaa

SEQ ID NO: 133282 - DNA, 25 bp, Saccharomyces pastorianus
gcttatttcccaaaggcttggtgta

SEQ ID NO: 133283 - DNA, 25 bp, Saccharomyces pastorianus
acatcctgggcttgctgagcttatt

SEQ ID NO: 133284 - DNA, 25 bp, Saccharomyces pastorianus
gtaactcacatcctgggcttgctga

SEQ ID NO: 133285 - DNA, 25 bp, Saccharomyces pastorianus
caaaggcttggtgtaccgttatcta

SEQ ID NO: 133286 - DNA, 25 bp, Saccharomyces pastorianus
ggcttgctgagcttatttcccaaag

SEQ ID NO: 133287 - DNA, 25 bp, Saccharomyces pastorianus
aggcttggtgtaccgttatctaaag

SEQ ID NO: 133288 - DNA, 25 bp, Saccharomyces pastorianus
gctggtaactcacatcctgggcttg

SEQ ID NO: 133289 - DNA, 25 bp, Saccharomyces pastorianus
ttagctggtaactcacatcctgggc

SEQ ID NO: 133290 - DNA, 25 bp, Saccharomyces pastorianus
gttgttagctggtaactcacatcct

SEQ ID NO: 133291 - DNA, 25 bp, Saccharomyces pastorianus
ttggtgtaccgttatctaaagtggg

SEQ ID NO: 133292 - DNA, 25 bp, Saccharomyces pastorianus
ttgatttttccggaagttgtacagg

SEQ ID NO: 133293 - DNA, 25 bp, Saccharomyces pastorianus
cctaatggtagttcttcaatggttt

SEQ ID NO: 133294 - DNA, 25 bp, Saccharomyces pastorianus
ggatgcggcaaatacaggtgatgaa

SEQ ID NO: 133295 - DNA, 25 bp, Saccharomyces pastorianus
gaccctgaagacagaatacgcgctg

SEQ ID NO: 133296 - DNA, 25 bp, Saccharomyces pastorianus
tgaagccacgacaggatcaattaca

SEQ ID NO: 133297 - DNA, 25 bp, Saccharomyces pastorianus
gttggaggaaattctagaccctgaa

SEQ ID NO: 133298 - DNA, 25 bp, Saccharomyces pastorianus
atgaccagtgatgaagccacgacag

SEQ ID NO: 133299 - DNA, 25 bp, Saccharomyces pastorianus
atacgcgctgaacaagcgttgagac

SEQ ID NO: 133300 - DNA, 25 bp, Saccharomyces pastorianus
aattacaacatcagaccatcagaag

SEQ ID NO: 133301 - DNA, 25 bp, Saccharomyces pastorianus
aggaaaaagtcatctcgttggagga

SEQ ID NO: 133302 - DNA, 25 bp, Saccharomyces pastorianus
gaagacccttttacaaaggctgcga

SEQ ID NO: 133303 - DNA, 25 bp, Saccharomyces pastorianus
gaaaaccctccaccatatattcttg

SEQ ID NO: 133304 - DNA, 25 bp, Saccharomyces pastorianus
cttgctcgccccaacgaagataata

SEQ ID NO: 133305 - DNA, 25 bp, Saccharomyces pastorianus
gggcggtcaatatcacggtacttta

SEQ ID NO: 133306 - DNA, 25 bp, Saccharomyces pastorianus
acaccgaatggacgtttcaagccca

SEQ ID NO: 133307 - DNA, 25 bp, Saccharomyces pastorianus
atggctacaaagcaggctcacaaga

SEQ ID NO: 133308 - DNA, 25 bp, Saccharomyces pastorianus
tggcactatattatcacaggacctg

SEQ ID NO: 133309 - DNA, 25 bp, Saccharomyces pastorianus
ggatactccttacaagggcggtcaa

SEQ ID NO: 133310 - DNA, 25 bp, Saccharomyces pastorianus
aggacctgcggatactccttacaag

SEQ ID NO: 133311 - DNA, 25 bp, Saccharomyces pastorianus
ttaactttcccgtctgattatccat

SEQ ID NO: 133312 - DNA, 25 bp, Saccharomyces pastorianus
gattatccatacaaaccaccggcta

SEQ ID NO: 133313 - DNA, 25 bp, Saccharomyces pastorianus
caaaccaccggctatcagaatgata

SEQ ID NO: 133314 - DNA, 25 bp, Saccharomyces pastorianus
gaaaccgaatcctctatttctaaca

SEQ ID NO: 133315 - DNA, 25 bp, Saccharomyces pastorianus
aactggctacaattgtccaggatga

SEQ ID NO: 133316 - DNA, 25 bp, Saccharomyces pastorianus
actaactcaagttcacatccagaaa

SEQ ID NO: 133317 - DNA, 25 bp, Saccharomyces pastorianus
aaactcccataaattcgatatcaga

SEQ ID NO: 133318 - DNA, 25 bp, Saccharomyces pastorianus
tcaacgtcggaaacttcttctccta

SEQ ID NO: 133319 - DNA, 25 bp, Saccharomyces pastorianus
attccgtatcaaacaaaactcccat

SEQ ID NO: 133320 - DNA, 25 bp, Saccharomyces pastorianus
gcaacggaactaactattctacagt

SEQ ID NO: 133321 - DNA, 25 bp, Saccharomyces pastorianus
gaggatgctttcgattccgtatcaa

SEQ ID NO: 133322 - DNA, 25 bp, Saccharomyces pastorianus
caaagcggacgccaaattttctaat

SEQ ID NO: 133323 - DNA, 25 bp, Saccharomyces pastorianus
agagccaattccaaagtcaacgtcg

SEQ ID NO: 133324 - DNA, 25 bp, Saccharomyces pastorianus
tcttctcctaaaaacaccaaagcgg

SEQ ID NO: 133325 - DNA, 25 bp, Saccharomyces pastorianus
agttgtgaccagctgctgtacttgg

SEQ ID NO: 133326 - DNA, 25 bp, Saccharomyces pastorianus
accagctgctgtacttgggtcgcgc

SEQ ID NO: 133327 - DNA, 25 bp, Saccharomyces pastorianus
agctgctgtacttgggtcgcgctgc

SEQ ID NO: 133328 - DNA, 25 bp, Saccharomyces pastorianus
ctagctcggtttagttgtgaccagc

SEQ ID NO: 133329 - DNA, 25 bp, Saccharomyces pastorianus
cgtccactagctcggtttagttgtg

SEQ ID NO: 133330 - DNA, 25 bp, Saccharomyces pastorianus
tgctgtacttgggtcgcgctgcctc

SEQ ID NO: 133331 - DNA, 25 bp, Saccharomyces pastorianus
tgtgaccagctgctgtacttgggtc

SEQ ID NO: 133332 - DNA, 25 bp, Saccharomyces pastorianus
cactagctcggtttagttgtgacca

SEQ ID NO: 133333 - DNA, 25 bp, Saccharomyces pastorianus
gtttagttgtgaccagctgctgtac

SEQ ID NO: 133334 - DNA, 25 bp, Saccharomyces pastorianus
tgcctcctccacacgggtctatgac

SEQ ID NO: 133335 - DNA, 25 bp, Saccharomyces pastorianus
ctcggtttagttgtgaccagctgct

SEQ ID NO: 133336 - DNA, 25 bp, Saccharomyces pastorianus
atgctggtgtcatcgctaatcctaa

SEQ ID NO: 133337 - DNA, 25 bp, Saccharomyces pastorianus
tggtgtcatcgctaatcctaagggt

SEQ ID NO: 133338 - DNA, 25 bp, Saccharomyces pastorianus
tcatcgctaatcctaagggtgaaat

SEQ ID NO: 133339 - DNA, 25 bp, Saccharomyces pastorianus
acaatgctggtgtcatcgctaatcc

SEQ ID NO: 133340 - DNA, 25 bp, Saccharomyces pastorianus
ctggtgtcatcgctaatcctaaggg

SEQ ID NO: 133341 - DNA, 25 bp, Saccharomyces pastorianus
tgctggtgtcatcgctaatcctaag

SEQ ID NO: 133342 - DNA, 25 bp, Saccharomyces pastorianus
ggtgtcatcgctaatcctaagggtg

SEQ ID NO: 133343 - DNA, 25 bp, Saccharomyces pastorianus
tcgctaatcctaagggtgaaatgaa

SEQ ID NO: 133344 - DNA, 25 bp, Saccharomyces pastorianus
gtgtcatcgctaatcctaagggtga

SEQ ID NO: 133345 - DNA, 25 bp, Saccharomyces pastorianus
tgtcatcgctaatcctaagggtgaa

SEQ ID NO: 133346 - DNA, 25 bp, Saccharomyces pastorianus
aatgctggtgtcatcgctaatccta

SEQ ID NO: 133347 - DNA, 25 bp, Saccharomyces pastorianus
aagagtaagatcaccacgcacgttt

SEQ ID NO: 133348 - DNA, 25 bp, Saccharomyces pastorianus
aaagagtaagatcaccacgcacgtt

SEQ ID NO: 133349 - DNA, 25 bp, Saccharomyces pastorianus
cgaaagagtaagatcaccacgcacg

SEQ ID NO: 133350 - DNA, 25 bp, Saccharomyces pastorianus
gaaagagtaagatcaccacgcacgt

SEQ ID NO: 133351 - DNA, 25 bp, Saccharomyces pastorianus
agagtaagatcaccacgcacgttta

SEQ ID NO: 133352 - DNA, 25 bp, Saccharomyces pastorianus
agtaagatcaccacgcacgtttagg

SEQ ID NO: 133353 - DNA, 25 bp, Saccharomyces pastorianus
gagtaagatcaccacgcacgtttag

SEQ ID NO: 133354 - DNA, 25 bp, Saccharomyces pastorianus
gtaagatcaccacgcacgtttaggg

SEQ ID NO: 133355 - DNA, 25 bp, Saccharomyces pastorianus
agggcgaaagagtaagatcaccacg

SEQ ID NO: 133356 - DNA, 25 bp, Saccharomyces pastorianus
aaaccattctattcaccttgcgaaa

SEQ ID NO: 133357 - DNA, 25 bp, Saccharomyces pastorianus
cactttgctactaaaaccattctat

SEQ ID NO: 133358 - DNA, 25 bp, Saccharomyces pastorianus
atacccttctgctacactattaaca

SEQ ID NO: 133359 - DNA, 25 bp, Saccharomyces pastorianus
gcagacatacttaggttcgcggaga

SEQ ID NO: 133360 - DNA, 25 bp, Saccharomyces pastorianus
aaaccacaccacacaataaacaatg

SEQ ID NO: 133361 - DNA, 25 bp, Saccharomyces pastorianus
tagaatacccttctgctacactatt

SEQ ID NO: 133362 - DNA, 25 bp, Saccharomyces pastorianus
agaatgtgcgtcaaaccacaccaca

SEQ ID NO: 133363 - DNA, 25 bp, Saccharomyces pastorianus
ggagacttatacaccaacacgtcag

SEQ ID NO: 133364 - DNA, 25 bp, Saccharomyces pastorianus
ctgctacactattaacacagaatgt

SEQ ID NO: 133365 - DNA, 25 bp, Saccharomyces pastorianus
gagattgtagaatacccttctgcta

SEQ ID NO: 133366 - DNA, 25 bp, Saccharomyces pastorianus
ataaacaatgcactttgctactaaa

SEQ ID NO: 133367 - DNA, 25 bp, Saccharomyces pastorianus
gggaaatttcaacagcagacatact

SEQ ID NO: 133368 - DNA, 25 bp, Saccharomyces pastorianus
gttcgcggagattgtagaataccct

SEQ ID NO: 133369 - DNA, 25 bp, Saccharomyces pastorianus
gttcttcagcaaatactgttagcga

SEQ ID NO: 133370 - DNA, 25 bp, Saccharomyces pastorianus
gaaacatctgatgatatgttctcaa

SEQ ID NO: 133371 - DNA, 25 bp, Saccharomyces pastorianus
gaccatagtatgacagaaacatctg

SEQ ID NO: 133372 - DNA, 25 bp, Saccharomyces pastorianus
gatgatatgttctcaaattctggta

SEQ ID NO: 133373 - DNA, 25 bp, Saccharomyces pastorianus
attatccaatgagagtgaccatagt

SEQ ID NO: 133374 - DNA, 25 bp, Saccharomyces pastorianus
gaggatgtcgtcttcacaaagagga

SEQ ID NO: 133375 - DNA, 25 bp, Saccharomyces pastorianus
gattgttcttcagcaaatactgtta

SEQ ID NO: 133376 - DNA, 25 bp, Saccharomyces pastorianus
ggatgtattctgtaaatgatgtgca

SEQ ID NO: 133377 - DNA, 25 bp, Saccharomyces pastorianus
actgttagcgaaggtagattgaatg

SEQ ID NO: 133378 - DNA, 25 bp, Saccharomyces pastorianus
gtcttcacaaagaggatgtattctg

SEQ ID NO: 133379 - DNA, 25 bp, Saccharomyces pastorianus
gatgaccaagaggatgtcgtcttca

SEQ ID NO: 133380 - DNA, 25 bp, Saccharomyces pastorianus
gagcaatgacactaaggccaatgga

SEQ ID NO: 133381 - DNA, 25 bp, Saccharomyces pastorianus
tggatttaactcaattagcctagat

SEQ ID NO: 133382 - DNA, 25 bp, Saccharomyces pastorianus
ggcgcgttatatagcagtgatgacc

SEQ ID NO: 133383 - DNA, 25 bp, Saccharomyces pastorianus
aaggctttgtcatttgttgggattt

SEQ ID NO: 133384 - DNA, 25 bp, Saccharomyces pastorianus
ggtataaattcttttgccgttaatg

SEQ ID NO: 133385 - DNA, 25 bp, Saccharomyces pastorianus
aatgaattccatgatcccttcttac

SEQ ID NO: 133386 - DNA, 25 bp, Saccharomyces pastorianus
ttcttactggccttagttggctcaa

SEQ ID NO: 133387 - DNA, 25 bp, Saccharomyces pastorianus
atcctgcgacggtaaaccagtttgt

SEQ ID NO: 133388 - DNA, 25 bp, Saccharomyces pastorianus
gtaatcatcacgttgcacagagctt

SEQ ID NO: 133389 - DNA, 25 bp, Saccharomyces pastorianus
ttgggacattcaatcctgcgacggt

SEQ ID NO: 133390 - DNA, 25 bp, Saccharomyces pastorianus
accaaatggcatttcgctgcttgat

SEQ ID NO: 133391 - DNA, 25 bp, Saccharomyces pastorianus
aagcctggcccattagtattaccaa

SEQ ID NO: 133392 - DNA, 25 bp, Saccharomyces pastorianus
aaggacccatgaaagatcgcgatct

SEQ ID NO: 133393 - DNA, 25 bp, Saccharomyces pastorianus
agctacgacggaaacctcaaatttg

SEQ ID NO: 133394 - DNA, 25 bp, Saccharomyces pastorianus
aaatatggatgacctgacgctgcat

SEQ ID NO: 133395 - DNA, 25 bp, Saccharomyces pastorianus
gtgaactatccaacagtccgcagaa

SEQ ID NO: 133396 - DNA, 25 bp, Saccharomyces pastorianus
ggagatccataccttcaaataaaat

SEQ ID NO: 133397 - DNA, 25 bp, Saccharomyces pastorianus
gtgagacgacgataacgccgcaaaa

SEQ ID NO: 133398 - DNA, 25 bp, Saccharomyces pastorianus
aaatgtcgggactgcaggtcatcga

SEQ ID NO: 133399 - DNA, 25 bp, Saccharomyces pastorianus
gcatcgggcactgagccgtagccaa

SEQ ID NO: 133400 - DNA, 25 bp, Saccharomyces pastorianus
gatcgcgatctttaacagtcgctga

SEQ ID NO: 133401 - DNA, 25 bp, Saccharomyces pastorianus
cgtagccaacccattagtaagcctg

SEQ ID NO: 133402 - DNA, 25 bp, Saccharomyces pastorianus
ttatttcgtggttcttgcatctcat

SEQ ID NO: 133403 - DNA, 25 bp, Saccharomyces pastorianus
gaacccatttctatttcaaagcacg

SEQ ID NO: 133404 - DNA, 25 bp, Saccharomyces pastorianus
gtcttctttttggaatgctgccttt

SEQ ID NO: 133405 - DNA, 25 bp, Saccharomyces pastorianus
attgaaaaacgctgtctccggtgtc

SEQ ID NO: 133406 - DNA, 25 bp, Saccharomyces pastorianus
gattttgaccacgtaccggagaaca

SEQ ID NO: 133407 - DNA, 25 bp, Saccharomyces pastorianus
gttccgatagtagcgaatccttaga

SEQ ID NO: 133408 - DNA, 25 bp, Saccharomyces pastorianus
gaagatgcattcaccaggtataact

SEQ ID NO: 133409 - DNA, 25 bp, Saccharomyces pastorianus
tgtgaccttgtactgtcttcttttt

SEQ ID NO: 133410 - DNA, 25 bp, Saccharomyces pastorianus
aagttactatcttctgtccttgagc

SEQ ID NO: 133411 - DNA, 25 bp, Saccharomyces pastorianus
aaaacagtgggcacgcctgcatttt

SEQ ID NO: 133412 - DNA, 25 bp, Saccharomyces pastorianus
gcctgcattttttgctcccgaaatg

SEQ ID NO: 133413 - DNA, 25 bp, Saccharomyces pastorianus
agatattcccgacgttggcttatta

SEQ ID NO: 133414 - DNA, 25 bp, Saccharomyces pastorianus
cccgacgttggcttattatgtgact

SEQ ID NO: 133415 - DNA, 25 bp, Saccharomyces pastorianus
tgttcttttcaaattttaaagccag

SEQ ID NO: 133416 - DNA, 25 bp, Saccharomyces pastorianus
gatcagaagggtgatgaggccaaca

SEQ ID NO: 133417 - DNA, 25 bp, Saccharomyces pastorianus
tagtaaaagacaattggtgacactt

SEQ ID NO: 133418 - DNA, 25 bp, Saccharomyces pastorianus
ggagttgatttgcagggcccaccaa

SEQ ID NO: 133419 - DNA, 25 bp, Saccharomyces pastorianus
ggcccaccaagttgtggaagatggt

SEQ ID NO: 133420 - DNA, 25 bp, Saccharomyces pastorianus
tgaggccaacagatattcccgacgt

SEQ ID NO: 133421 - DNA, 25 bp, Saccharomyces pastorianus
tttgcagggcccaccaagttgtgga

SEQ ID NO: 133422 - DNA, 25 bp, Saccharomyces pastorianus
gacttgttgtggtcagatccagata

SEQ ID NO: 133423 - DNA, 25 bp, Saccharomyces pastorianus
gttggcttattatgtgacttgttgt

SEQ ID NO: 133424 - DNA, 25 bp, Saccharomyces pastorianus
tgttcgaaagccagatctatattca

SEQ ID NO: 133425 - DNA, 25 bp, Saccharomyces pastorianus
gactcacaaccagttgacgttgata

SEQ ID NO: 133426 - DNA, 25 bp, Saccharomyces pastorianus
gttcgaaagccagatctatattcat

SEQ ID NO: 133427 - DNA, 25 bp, Saccharomyces pastorianus
ttatgttcgaaagccagatctatat

SEQ ID NO: 133428 - DNA, 25 bp, Saccharomyces pastorianus
aagaggatctaaacctggtcaacaa

SEQ ID NO: 133429 - DNA, 25 bp, Saccharomyces pastorianus
accagttgacgttgataatatcatc

SEQ ID NO: 133430 - DNA, 25 bp, Saccharomyces pastorianus
acttatgttcgaaagccagatctat

SEQ ID NO: 133431 - DNA, 25 bp, Saccharomyces pastorianus
aacctggtcaacaagttgatctaga

SEQ ID NO: 133432 - DNA, 25 bp, Saccharomyces pastorianus
atgttcgaaagccagatctatattc

SEQ ID NO: 133433 - DNA, 25 bp, Saccharomyces pastorianus
cttatgttcgaaagccagatctata

SEQ ID NO: 133434 - DNA, 25 bp, Saccharomyces pastorianus
ttcgaaagccagatctatattcata

SEQ ID NO: 133435 - DNA, 25 bp, Saccharomyces pastorianus
ttcattttgtcacgaggctggccac

SEQ ID NO: 133436 - DNA, 25 bp, Saccharomyces pastorianus
ggagaaattcattaacctactactg

SEQ ID NO: 133437 - DNA, 25 bp, Saccharomyces pastorianus
ggcagataaaactacgagcactatt

SEQ ID NO: 133438 - DNA, 25 bp, Saccharomyces pastorianus
gcactattcagggagtaaccagcaa

SEQ ID NO: 133439 - DNA, 25 bp, Saccharomyces pastorianus
agtgttcttgacatggtactgcgga

SEQ ID NO: 133440 - DNA, 25 bp, Saccharomyces pastorianus
aaaagacgatcaaaaatatgccctg

SEQ ID NO: 133441 - DNA, 25 bp, Saccharomyces pastorianus
ggctaagttgatcatttcaaagcaa

SEQ ID NO: 133442 - DNA, 25 bp, Saccharomyces pastorianus
gatggatcacaattacaagttgagt

SEQ ID NO: 133443 - DNA, 25 bp, Saccharomyces pastorianus
aggctggccacacaagagcacactg

SEQ ID NO: 133444 - DNA, 25 bp, Saccharomyces pastorianus
acctactactgggattgcatgaaag

SEQ ID NO: 133445 - DNA, 25 bp, Saccharomyces pastorianus
aatatgccctgataccgattaaagc

SEQ ID NO: 133446 - DNA, 25 bp, Saccharomyces pastorianus
gttggtattttttcgatgactcgct

SEQ ID NO: 133447 - DNA, 25 bp, Saccharomyces pastorianus
aaacattctctgttctttctgttcc

SEQ ID NO: 133448 - DNA, 25 bp, Saccharomyces pastorianus
aggacagtacgcatctaggctacaa

SEQ ID NO: 133449 - DNA, 25 bp, Saccharomyces pastorianus
gggacactatacttcatacgtttat

SEQ ID NO: 133450 - DNA, 25 bp, Saccharomyces pastorianus
gtttccgggaattcaccaaatgcga

SEQ ID NO: 133451 - DNA, 25 bp, Saccharomyces pastorianus
agatttttgcttaccgacttcagtg

SEQ ID NO: 133452 - DNA, 25 bp, Saccharomyces pastorianus
gtgtttgtccaatatccttacttct

SEQ ID NO: 133453 - DNA, 25 bp, Saccharomyces pastorianus
atgactcgctttatcgtcctataac

SEQ ID NO: 133454 - DNA, 25 bp, Saccharomyces pastorianus
gtgcgataattgaccttttccaagg

SEQ ID NO: 133455 - DNA, 25 bp, Saccharomyces pastorianus
gggccaagtaccaccatttagatac

SEQ ID NO: 133456 - DNA, 25 bp, Saccharomyces pastorianus
agatcttacaccatattgggcgaga

SEQ ID NO: 133457 - DNA, 25 bp, Saccharomyces pastorianus
aagtgaggttgtcgaatctgctaaa

SEQ ID NO: 133458 - DNA, 25 bp, Saccharomyces pastorianus
aacaagccttaagtgaggttgtcga

SEQ ID NO: 133459 - DNA, 25 bp, Saccharomyces pastorianus
gaatctgctaaagagcggttcggca

SEQ ID NO: 133460 - DNA, 25 bp, Saccharomyces pastorianus
acgtgccacaagagtgtctgccttt

SEQ ID NO: 133461 - DNA, 25 bp, Saccharomyces pastorianus
gcaggcttacgcatttagttcagaa

SEQ ID NO: 133462 - DNA, 25 bp, Saccharomyces pastorianus
gaatgcgcagaaatatggtctagtt

SEQ ID NO: 133463 - DNA, 25 bp, Saccharomyces pastorianus
tggacgcatgccaggatataaccat

SEQ ID NO: 133464 - DNA, 25 bp, Saccharomyces pastorianus
cggttcggcaggcttacgcatttag

SEQ ID NO: 133465 - DNA, 25 bp, Saccharomyces pastorianus
ggtctagttatgtggacgcatgcca

SEQ ID NO: 133466 - DNA, 25 bp, Saccharomyces pastorianus
agagtgtctgcctttgctccaagaa

SEQ ID NO: 133467 - DNA, 25 bp, Saccharomyces pastorianus
gcctttgctccaagaatgcgcagaa

SEQ ID NO: 133468 - DNA, 25 bp, Saccharomyces pastorianus
aaagtgctacagacgacgatgtcgg

SEQ ID NO: 133469 - DNA, 25 bp, Saccharomyces pastorianus
ttttaagtttgaacgcggcagtaca

SEQ ID NO: 133470 - DNA, 25 bp, Saccharomyces pastorianus
actttactgctaaaactgcgtattc

SEQ ID NO: 133471 - DNA, 25 bp, Saccharomyces pastorianus
gtttggttgagaatcctgtggcaat

SEQ ID NO: 133472 - DNA, 25 bp, Saccharomyces pastorianus
gaacatttgcttggtgctttggaga

SEQ ID NO: 133473 - DNA, 25 bp, Saccharomyces pastorianus
gcaaggccgtatagtgaaccttcag

SEQ ID NO: 133474 - DNA, 25 bp, Saccharomyces pastorianus
atgatacctggtaactgttgtttgg

SEQ ID NO: 133475 - DNA, 25 bp, Saccharomyces pastorianus
gtagcaagctgaactccacatatgg

SEQ ID NO: 133476 - DNA, 25 bp, Saccharomyces pastorianus
ggcagtacagttaagccagttttaa

SEQ ID NO: 133477 - DNA, 25 bp, Saccharomyces pastorianus
gaagtttttgcaccaacgatgatac

SEQ ID NO: 133478 - DNA, 25 bp, Saccharomyces pastorianus
ggtgggttcctaccgagtatagcaa

SEQ ID NO: 133479 - DNA, 25 bp, Saccharomyces pastorianus
attctatgtctgatcccggtactac

SEQ ID NO: 133480 - DNA, 25 bp, Saccharomyces pastorianus
ggtgatggtgcctctaatcaaggtc

SEQ ID NO: 133481 - DNA, 25 bp, Saccharomyces pastorianus
tacggtatgggtaccgccgcttcaa

SEQ ID NO: 133482 - DNA, 25 bp, Saccharomyces pastorianus
gcaaaggtcctctcgttctagaata

SEQ ID NO: 133483 - DNA, 25 bp, Saccharomyces pastorianus
aattatggaatttgcccgtcgtgtt

SEQ ID NO: 133484 - DNA, 25 bp, Saccharomyces pastorianus
aagatcctccgcgatgactgaatat

SEQ ID NO: 133485 - DNA, 25 bp, Saccharomyces pastorianus
taaggactggtgtctatccggcaaa

SEQ ID NO: 133486 - DNA, 25 bp, Saccharomyces pastorianus
ggtacagaaactccaaccctaagag

SEQ ID NO: 133487 - DNA, 25 bp, Saccharomyces pastorianus
aggtacggtggccattctatgtctg

SEQ ID NO: 133488 - DNA, 25 bp, Saccharomyces pastorianus
gttgaattagctgatgctgctcctc

SEQ ID NO: 133489 - DNA, 25 bp, Saccharomyces pastorianus
acggtatggatattctagctgtcta

SEQ ID NO: 133490 - DNA, 25 bp, Saccharomyces pastorianus
ggatcccgagtcatgtttggcaaac

SEQ ID NO: 133491 - DNA, 25 bp, Saccharomyces pastorianus
ggcacatgcgtcagcaacaaggatt

SEQ ID NO: 133492 - DNA, 25 bp, Saccharomyces pastorianus
tgccaagttacaagattccccagat

SEQ ID NO: 133493 - DNA, 25 bp, Saccharomyces pastorianus
ttaccacgcagcttccgagggaaat

SEQ ID NO: 133494 - DNA, 25 bp, Saccharomyces pastorianus
atcgccttatcgtggtagattctat

SEQ ID NO: 133495 - DNA, 25 bp, Saccharomyces pastorianus
ggtgcttctgcattatttgcctcgg

SEQ ID NO: 133496 - DNA, 25 bp, Saccharomyces pastorianus
gatgtctcatactttgtgtgttacc

SEQ ID NO: 133497 - DNA, 25 bp, Saccharomyces pastorianus
ttgcctcggcagatggtaggaaacc

SEQ ID NO: 133498 - DNA, 25 bp, Saccharomyces pastorianus
aaggcactttcaggcccgagaggat

SEQ ID NO: 133499 - DNA, 25 bp, Saccharomyces pastorianus
gaaggttatgaattggatcccgagt

SEQ ID NO: 133500 - DNA, 25 bp, Saccharomyces pastorianus
ttctggagattatcgccttatcgtg

SEQ ID NO: 133501 - DNA, 25 bp, Saccharomyces pastorianus
agaactatggtattaatgcctcaga

SEQ ID NO: 133502 - DNA, 25 bp, Saccharomyces pastorianus
atgtctgttacaggaactgagatcg

SEQ ID NO: 133503 - DNA, 25 bp, Saccharomyces pastorianus
gtagatgaattacagaactatggta

SEQ ID NO: 133504 - DNA, 25 bp, Saccharomyces pastorianus
tatggtattaatgcctcagatcttc

SEQ ID NO: 133505 - DNA, 25 bp, Saccharomyces pastorianus
ggtattaatgcctcagatcttcaaa

SEQ ID NO: 133506 - DNA, 25 bp, Saccharomyces pastorianus
actatggtattaatgcctcagatct

SEQ ID NO: 133507 - DNA, 25 bp, Saccharomyces pastorianus
caggaactgagatcgatagtgatac

SEQ ID NO: 133508 - DNA, 25 bp, Saccharomyces pastorianus
gtctgttacaggaactgagatcgat

SEQ ID NO: 133509 - DNA, 25 bp, Saccharomyces pastorianus
gagatcgatagtgatacagcaaaaa

SEQ ID NO: 133510 - DNA, 25 bp, Saccharomyces pastorianus
gcaaaaaatattcttagtgtagatg

SEQ ID NO: 133511 - DNA, 25 bp, Saccharomyces pastorianus
tattaatgcctcagatcttcaaaaa

SEQ ID NO: 133512 - DNA, 25 bp, Saccharomyces pastorianus
aaactgcagctacttcttgtcagaa

SEQ ID NO: 133513 - DNA, 25 bp, Saccharomyces pastorianus
tacgctaagtcggtcaggtcctata

SEQ ID NO: 133514 - DNA, 25 bp, Saccharomyces pastorianus
ctataactatggttgctgcggcgga

SEQ ID NO: 133515 - DNA, 25 bp, Saccharomyces pastorianus
taaggccaggccagatgctatgttg

SEQ ID NO: 133516 - DNA, 25 bp, Saccharomyces pastorianus
acgcactcggtgtaactggttttga

SEQ ID NO: 133517 - DNA, 25 bp, Saccharomyces pastorianus
ggcaggaccctcagaatttgaacag

SEQ ID NO: 133518 - DNA, 25 bp, Saccharomyces pastorianus
gctattatcacgctgtggcaggacc

SEQ ID NO: 133519 - DNA, 25 bp, Saccharomyces pastorianus
gatttgggcccgacgataacggcta

SEQ ID NO: 133520 - DNA, 25 bp, Saccharomyces pastorianus
atacaggttacgatcgcgtcttttt

SEQ ID NO: 133521 - DNA, 25 bp, Saccharomyces pastorianus
ggatcaggatttggccgcatcacaa

SEQ ID NO: 133522 - DNA, 25 bp, Saccharomyces pastorianus
tataggctccactcagtacgctaag

SEQ ID NO: 133523 - DNA, 25 bp, Saccharomyces pastorianus
ggatctttgacattcttgatatcac

SEQ ID NO: 133524 - DNA, 25 bp, Saccharomyces pastorianus
gggatttgccatttgcgtaacgttt

SEQ ID NO: 133525 - DNA, 25 bp, Saccharomyces pastorianus
tatggtcaagacaccaagcccatcg

SEQ ID NO: 133526 - DNA, 25 bp, Saccharomyces pastorianus
gctaattaccttgttgggtggcttt

SEQ ID NO: 133527 - DNA, 25 bp, Saccharomyces pastorianus
gtggctttcccattagtgggttgct

SEQ ID NO: 133528 - DNA, 25 bp, Saccharomyces pastorianus
gggttgctcattacaatcggcgcat

SEQ ID NO: 133529 - DNA, 25 bp, Saccharomyces pastorianus
aaaacgccggactcaaattctaatg

SEQ ID NO: 133530 - DNA, 25 bp, Saccharomyces pastorianus
tttaacgtttctatgccctgtgatg

SEQ ID NO: 133531 - DNA, 25 bp, Saccharomyces pastorianus
atatttgccatgagcctttccagta

SEQ ID NO: 133532 - DNA, 25 bp, Saccharomyces pastorianus
tttcagttttgatttggttcccaga

SEQ ID NO: 133533 - DNA, 25 bp, Saccharomyces pastorianus
taatggcggttctacaagatcctcc

SEQ ID NO: 133534 - DNA, 25 bp, Saccharomyces pastorianus
tatcactggctagtactacatggga

SEQ ID NO: 133535 - DNA, 25 bp, Saccharomyces pastorianus
tcagcacaatttagccaaaaagttt

SEQ ID NO: 133536 - DNA, 25 bp, Saccharomyces pastorianus
gaatcttatcactggctagtactac

SEQ ID NO: 133537 - DNA, 25 bp, Saccharomyces pastorianus
ggaaattcagcacaatttagccaaa

SEQ ID NO: 133538 - DNA, 25 bp, Saccharomyces pastorianus
gaagctcaggaaattcagcacaatt

SEQ ID NO: 133539 - DNA, 25 bp, Saccharomyces pastorianus
tacgctctacctgaatcttatcact

SEQ ID NO: 133540 - DNA, 25 bp, Saccharomyces pastorianus
acctgaatcttatcactggctagta

SEQ ID NO: 133541 - DNA, 25 bp, Saccharomyces pastorianus
gctctacctgaatcttatcactggc

SEQ ID NO: 133542 - DNA, 25 bp, Saccharomyces pastorianus
tacatgggaagatgagtgaagctca

SEQ ID NO: 133543 - DNA, 25 bp, Saccharomyces pastorianus
tagctacgctctacctgaatcttat

SEQ ID NO: 133544 - DNA, 25 bp, Saccharomyces pastorianus
actggctagtactacatgggaagat

SEQ ID NO: 133545 - DNA, 25 bp, Saccharomyces pastorianus
aattgaacacggtattgtcaccaac

SEQ ID NO: 133546 - DNA, 25 bp, Saccharomyces pastorianus
cacggtattgtcaccaactgggacg

SEQ ID NO: 133547 - DNA, 25 bp, Saccharomyces pastorianus
ttacccaattgaacacggtattgtc

SEQ ID NO: 133548 - DNA, 25 bp, Saccharomyces pastorianus
gaacacggtattgtcaccaactggg

SEQ ID NO: 133549 - DNA, 25 bp, Saccharomyces pastorianus
cggtattgtcaccaactgggacgat

SEQ ID NO: 133550 - DNA, 25 bp, Saccharomyces pastorianus
tcataccttctacaacgaattgaga

SEQ ID NO: 133551 - DNA, 25 bp, Saccharomyces pastorianus
aacacggtattgtcaccaactggga

SEQ ID NO: 133552 - DNA, 25 bp, Saccharomyces pastorianus
ggcatcataccttctacaacgaatt

SEQ ID NO: 133553 - DNA, 25 bp, Saccharomyces pastorianus
ttgaacacggtattgtcaccaactg

SEQ ID NO: 133554 - DNA, 25 bp, Saccharomyces pastorianus
ctggcatcataccttctacaacgaa

SEQ ID NO: 133555 - DNA, 25 bp, Saccharomyces pastorianus
gcatcataccttctacaacgaattg

SEQ ID NO: 133556 - DNA, 25 bp, Saccharomyces pastorianus
gtcgttccaatttacgctggtttct

SEQ ID NO: 133557 - DNA, 25 bp, Saccharomyces pastorianus
tccggtagaactactggtattgttt

SEQ ID NO: 133558 - DNA, 25 bp, Saccharomyces pastorianus
cttccggtagaactactggtattgt

SEQ ID NO: 133559 - DNA, 25 bp, Saccharomyces pastorianus
tactcacgtcgttccaatttacgct

SEQ ID NO: 133560 - DNA, 25 bp, Saccharomyces pastorianus
tcacgtcgttccaatttacgctggt

SEQ ID NO: 133561 - DNA, 25 bp, Saccharomyces pastorianus
cacgtcgttccaatttacgctggtt

SEQ ID NO: 133562 - DNA, 25 bp, Saccharomyces pastorianus
tccaatttacgctggtttctctcta

SEQ ID NO: 133563 - DNA, 25 bp, Saccharomyces pastorianus
aatttacgctggtttctctctacct

SEQ ID NO: 133564 - DNA, 25 bp, Saccharomyces pastorianus
cgttccaatttacgctggtttctct

SEQ ID NO: 133565 - DNA, 25 bp, Saccharomyces pastorianus
tttacgctggtttctctctacctca

SEQ ID NO: 133566 - DNA, 25 bp, Saccharomyces pastorianus
ttacgctggtttctctctacctcac

SEQ ID NO: 133567 - DNA, 25 bp, Saccharomyces pastorianus
gtactccgtctggattggtggttct

SEQ ID NO: 133568 - DNA, 25 bp, Saccharomyces pastorianus
tctgccggtattgaccaaactactt

SEQ ID NO: 133569 - DNA, 25 bp, Saccharomyces pastorianus
gaatctgccggtattgaccaaacta

SEQ ID NO: 133570 - DNA, 25 bp, Saccharomyces pastorianus
tgccggtattgaccaaactacttac

SEQ ID NO: 133571 - DNA, 25 bp, Saccharomyces pastorianus
aatctgccggtattgaccaaactac

SEQ ID NO: 133572 - DNA, 25 bp, Saccharomyces pastorianus
ctgccggtattgaccaaactactta

SEQ ID NO: 133573 - DNA, 25 bp, Saccharomyces pastorianus
aaagaaagtactccgtctggattgg

SEQ ID NO: 133574 - DNA, 25 bp, Saccharomyces pastorianus
agaaagaaagtactccgtctggatt

SEQ ID NO: 133575 - DNA, 25 bp, Saccharomyces pastorianus
atctgccggtattgaccaaactact

SEQ ID NO: 133576 - DNA, 25 bp, Saccharomyces pastorianus
ggaatctgccggtattgaccaaact

SEQ ID NO: 133577 - DNA, 25 bp, Saccharomyces pastorianus
gaaagaaagtactccgtctggattg

SEQ ID NO: 133578 - DNA, 25 bp, Saccharomyces pastorianus
cattcccgcagcaattttcgagaga

SEQ ID NO: 133579 - DNA, 25 bp, Saccharomyces pastorianus
ggaattcatttttctctcatttcat

SEQ ID NO: 133580 - DNA, 25 bp, Saccharomyces pastorianus
gattatttatggctggacgcaaaca

SEQ ID NO: 133581 - DNA, 25 bp, Saccharomyces pastorianus
gaaaggaaatggctccgctgctacc

SEQ ID NO: 133582 - DNA, 25 bp, Saccharomyces pastorianus
gctccgctgctaccgttaattgaaa

SEQ ID NO: 133583 - DNA, 25 bp, Saccharomyces pastorianus
tagacaggtttcactgccagctagt

SEQ ID NO: 133584 - DNA, 25 bp, Saccharomyces pastorianus
ctggccctcacacggattatttatg

SEQ ID NO: 133585 - DNA, 25 bp, Saccharomyces pastorianus
tagcggagtacgtaacgcctgacgc

SEQ ID NO: 133586 - DNA, 25 bp, Saccharomyces pastorianus
gtgcacttgtcattagaagctcatt

SEQ ID NO: 133587 - DNA, 25 bp, Saccharomyces pastorianus
gtacagatgttcaggatattcgcac

SEQ ID NO: 133588 - DNA, 25 bp, Saccharomyces pastorianus
gcctgacgcgtatccaacaatgaac

SEQ ID NO: 133589 - DNA, 25 bp, Saccharomyces pastorianus
ggttctatagtcactgtagtatcca

SEQ ID NO: 133590 - DNA, 25 bp, Saccharomyces pastorianus
cttagggaacgccattgaggttagt

SEQ ID NO: 133591 - DNA, 25 bp, Saccharomyces pastorianus
gaatcagctaagagactggatcaga

SEQ ID NO: 133592 - DNA, 25 bp, Saccharomyces pastorianus
gtaggaaacttagggaacgccattg

SEQ ID NO: 133593 - DNA, 25 bp, Saccharomyces pastorianus
gaacgccattgaggttagtgaagat

SEQ ID NO: 133594 - DNA, 25 bp, Saccharomyces pastorianus
tcagattcgtctccataaggcaaaa

SEQ ID NO: 133595 - DNA, 25 bp, Saccharomyces pastorianus
ttcgtctccataaggcaaaaccaat

SEQ ID NO: 133596 - DNA, 25 bp, Saccharomyces pastorianus
tgtagtatccagtgccaaattttct

SEQ ID NO: 133597 - DNA, 25 bp, Saccharomyces pastorianus
attggttttctatcaagtcactcct

SEQ ID NO: 133598 - DNA, 25 bp, Saccharomyces pastorianus
gtgccaaattttctggtaaatactt

SEQ ID NO: 133599 - DNA, 25 bp, Saccharomyces pastorianus
gaagatggttctatagtcactgtag

SEQ ID NO: 133600 - DNA, 25 bp, Saccharomyces pastorianus
aagtgctgggagaactattcttcca

SEQ ID NO: 133601 - DNA, 25 bp, Saccharomyces pastorianus
ggcattaatgcatgagttacaactt

SEQ ID NO: 133602 - DNA, 25 bp, Saccharomyces pastorianus
taaatgatgtcgatgcagcccaaaa

SEQ ID NO: 133603 - DNA, 25 bp, Saccharomyces pastorianus
gtggaatcatcaaacgacttcttgg

SEQ ID NO: 133604 - DNA, 25 bp, Saccharomyces pastorianus
ttaatccaccacaaagccctaataa

SEQ ID NO: 133605 - DNA, 25 bp, Saccharomyces pastorianus
gatgatgatttcgaccctcgaggaa

SEQ ID NO: 133606 - DNA, 25 bp, Saccharomyces pastorianus
gatatgcaagacctaccagaaaatg

SEQ ID NO: 133607 - DNA, 25 bp, Saccharomyces pastorianus
agaataaagcatgccttccaggaga

SEQ ID NO: 133608 - DNA, 25 bp, Saccharomyces pastorianus
gggagtcgcattacaaaccaccgtc

SEQ ID NO: 133609 - DNA, 25 bp, Saccharomyces pastorianus
ataacagttgggtgccgaagtggtt

SEQ ID NO: 133610 - DNA, 25 bp, Saccharomyces pastorianus
gagatgctgctcttgtcgatcatgg

SEQ ID NO: 133611 - DNA, 25 bp, Saccharomyces pastorianus
agaacaatccgcaacacctgaaaca

SEQ ID NO: 133612 - DNA, 25 bp, Saccharomyces pastorianus
acaatcaccgttatcttcggacgtt

SEQ ID NO: 133613 - DNA, 25 bp, Saccharomyces pastorianus
gacttgaatcgggactcgcagttaa

SEQ ID NO: 133614 - DNA, 25 bp, Saccharomyces pastorianus
gcacatagattacagtttacccaga

SEQ ID NO: 133615 - DNA, 25 bp, Saccharomyces pastorianus
ggctacgctgtgtctttgtattgac

SEQ ID NO: 133616 - DNA, 25 bp, Saccharomyces pastorianus
aatgtgcacgaatttggctacgctg

SEQ ID NO: 133617 - DNA, 25 bp, Saccharomyces pastorianus
gaagctttctctgcacaaaatccaa

SEQ ID NO: 133618 - DNA, 25 bp, Saccharomyces pastorianus
tatggctgcttggaaaactgtggtt

SEQ ID NO: 133619 - DNA, 25 bp, Saccharomyces pastorianus
caaaatggctcagtacaggctagta

SEQ ID NO: 133620 - DNA, 25 bp, Saccharomyces pastorianus
aaagtactcgatccggaaagacctg

SEQ ID NO: 133621 - DNA, 25 bp, Saccharomyces pastorianus
aaaactgtggttttatcacggctat

SEQ ID NO: 133622 - DNA, 25 bp, Saccharomyces pastorianus
tcgtagggactatatcaccagactg

SEQ ID NO: 133623 - DNA, 25 bp, Saccharomyces pastorianus
aaattttacaacatcgtcgaccaag

SEQ ID NO: 133624 - DNA, 25 bp, Saccharomyces pastorianus
gttttcagatgaaccggcaagactt

SEQ ID NO: 133625 - DNA, 25 bp, Saccharomyces pastorianus
ttgggtacgaagtcctacgaacaat

SEQ ID NO: 133626 - DNA, 25 bp, Saccharomyces pastorianus
tactcaggtgattagattcggaaca

SEQ ID NO: 133627 - DNA, 25 bp, Saccharomyces pastorianus
ggcaagacttaaccagatttcaaat

SEQ ID NO: 133628 - DNA, 25 bp, Saccharomyces pastorianus
taattcaaattcttcgaactcccta

SEQ ID NO: 133629 - DNA, 25 bp, Saccharomyces pastorianus
acgacgaatttgtcagactttacga

SEQ ID NO: 133630 - DNA, 25 bp, Saccharomyces pastorianus
gtcgaccaagtctgcatgttcttta

SEQ ID NO: 133631 - DNA, 25 bp, Saccharomyces pastorianus
agggaagccaccataaagtatcgta

SEQ ID NO: 133632 - DNA, 25 bp, Saccharomyces pastorianus
ggtagtaacgatactgactcgatta

SEQ ID NO: 133633 - DNA, 25 bp, Saccharomyces pastorianus
aagtagcactacatgcgggccggct

SEQ ID NO: 133634 - DNA, 25 bp, Saccharomyces pastorianus
aaatgtcgattatcacgccctaggt

SEQ ID NO: 133635 - DNA, 25 bp, Saccharomyces pastorianus
acgccctaggtggaaacttggatga

SEQ ID NO: 133636 - DNA, 25 bp, Saccharomyces pastorianus
gccggctacaggaagaggttgctat

SEQ ID NO: 133637 - DNA, 25 bp, Saccharomyces pastorianus
aagctacggcgtcgaaatggcaatc

SEQ ID NO: 133638 - DNA, 25 bp, Saccharomyces pastorianus
gtcgatggctaagacgggcgccaca

SEQ ID NO: 133639 - DNA, 25 bp, Saccharomyces pastorianus
ggagtgagccggttagaattacaaa

SEQ ID NO: 133640 - DNA, 25 bp, Saccharomyces pastorianus
tcgggaacccggtcaagacaagtcg

SEQ ID NO: 133641 - DNA, 25 bp, Saccharomyces pastorianus
gaaatggcaatcatcatcacccgcc

SEQ ID NO: 133642 - DNA, 25 bp, Saccharomyces pastorianus
gagcctattgataagttcgggaacc

SEQ ID NO: 133643 - DNA, 25 bp, Saccharomyces pastorianus
caagaggtgtctaggtcgatggcta

SEQ ID NO: 133644 - DNA, 25 bp, Saccharomyces pastorianus
gccgggagtggcacacacctatata

SEQ ID NO: 133645 - DNA, 25 bp, Saccharomyces pastorianus
actaacactatgctgcgctgcttca

SEQ ID NO: 133646 - DNA, 25 bp, Saccharomyces pastorianus
gtgctgttattattgttgctctgta

SEQ ID NO: 133647 - DNA, 25 bp, Saccharomyces pastorianus
gactctgttcgtgctcatagttatg

SEQ ID NO: 133648 - DNA, 25 bp, Saccharomyces pastorianus
caagtgtgcgactcatagtgctgtt

SEQ ID NO: 133649 - DNA, 25 bp, Saccharomyces pastorianus
tagttatgttcactaccgtgcaccg

SEQ ID NO: 133650 - DNA, 25 bp, Saccharomyces pastorianus
atcgggcaatattttctgggcgctc

SEQ ID NO: 133651 - DNA, 25 bp, Saccharomyces pastorianus
gctggttatcagtatcggtgtcatc

SEQ ID NO: 133652 - DNA, 25 bp, Saccharomyces pastorianus
atcgaggtcgttgttgcctgggcca

SEQ ID NO: 133653 - DNA, 25 bp, Saccharomyces pastorianus
tgctctgtattgtggtggctgttaa

SEQ ID NO: 133654 - DNA, 25 bp, Saccharomyces pastorianus
gagtacaggtcccagatttctttgt

SEQ ID NO: 133655 - DNA, 25 bp, Saccharomyces pastorianus
gtcatcgaaggaggacgagcaggaa

SEQ ID NO: 133656 - DNA, 25 bp, Saccharomyces pastorianus
tcgaaggaggacgagcaggaagtgt

SEQ ID NO: 133657 - DNA, 25 bp, Saccharomyces pastorianus
aggaggacgagcaggaagtgtccaa

SEQ ID NO: 133658 - DNA, 25 bp, Saccharomyces pastorianus
ggaggacgagcaggaagtgtccaag

SEQ ID NO: 133659 - DNA, 25 bp, Saccharomyces pastorianus
agtggtcatcgaaggaggacgagca

SEQ ID NO: 133660 - DNA, 25 bp, Saccharomyces pastorianus
taaagtggtcatcgaaggaggacga

SEQ ID NO: 133661 - DNA, 25 bp, Saccharomyces pastorianus
catcgaaggaggacgagcaggaagt

SEQ ID NO: 133662 - DNA, 25 bp, Saccharomyces pastorianus
ataaagtggtcatcgaaggaggacg

SEQ ID NO: 133663 - DNA, 25 bp, Saccharomyces pastorianus
gtggtcatcgaaggaggacgagcag

SEQ ID NO: 133664 - DNA, 25 bp, Saccharomyces pastorianus
aagtggtcatcgaaggaggacgagc

SEQ ID NO: 133665 - DNA, 25 bp, Saccharomyces pastorianus
tggtcatcgaaggaggacgagcagg

SEQ ID NO: 133666 - DNA, 25 bp, Saccharomyces pastorianus
tacccgctcatccaaatgcacattg

SEQ ID NO: 133667 - DNA, 25 bp, Saccharomyces pastorianus
gtcaggacgttatttcgcgctgcaa

SEQ ID NO: 133668 - DNA, 25 bp, Saccharomyces pastorianus
tgatataggacttctctctcttttt

SEQ ID NO: 133669 - DNA, 25 bp, Saccharomyces pastorianus
cttttccatagagttccacaggatg

SEQ ID NO: 133670 - DNA, 25 bp, Saccharomyces pastorianus
gctgcaagttccttacttttccata

SEQ ID NO: 133671 - DNA, 25 bp, Saccharomyces pastorianus
gcgatttgttcgttatatgcctcat

SEQ ID NO: 133672 - DNA, 25 bp, Saccharomyces pastorianus
ttttggagcgtactcccatctgtta

SEQ ID NO: 133673 - DNA, 25 bp, Saccharomyces pastorianus
ttgtgttaccctcttgttaggtatt

SEQ ID NO: 133674 - DNA, 25 bp, Saccharomyces pastorianus
atgcctcattccgtaagtgtgatca

SEQ ID NO: 133675 - DNA, 25 bp, Saccharomyces pastorianus
ggaaagcagaacatattacccttct

SEQ ID NO: 133676 - DNA, 25 bp, Saccharomyces pastorianus
tgtccaggtggagtgcgatttgttc

SEQ ID NO: 133677 - DNA, 25 bp, Saccharomyces pastorianus
atactgggctttttcacctctgtaa

SEQ ID NO: 133678 - DNA, 25 bp, Saccharomyces pastorianus
gattaacccaatatcgcgtcttttc

SEQ ID NO: 133679 - DNA, 25 bp, Saccharomyces pastorianus
acctctgtaacattggtacgctcgc

SEQ ID NO: 133680 - DNA, 25 bp, Saccharomyces pastorianus
tcgaccttgtttaccgtagctgaac

SEQ ID NO: 133681 - DNA, 25 bp, Saccharomyces pastorianus
tcttgatgcgttggttggctccgaa

SEQ ID NO: 133682 - DNA, 25 bp, Saccharomyces pastorianus
tgtggtgtgacttttttcctgttca

SEQ ID NO: 133683 - DNA, 25 bp, Saccharomyces pastorianus
ttttcaacctgtttggcacctggga

SEQ ID NO: 133684 - DNA, 25 bp, Saccharomyces pastorianus
gagaaactcctcttgtgtcttacca

SEQ ID NO: 133685 - DNA, 25 bp, Saccharomyces pastorianus
gatattagcttgtcgaccttgttta

SEQ ID NO: 133686 - DNA, 25 bp, Saccharomyces pastorianus
aaagtgatctagtctcctctacagt

SEQ ID NO: 133687 - DNA, 25 bp, Saccharomyces pastorianus
tagcagcggaggtgatttcttcttc

SEQ ID NO: 133688 - DNA, 25 bp, Saccharomyces pastorianus
aaaaccgtagctgcattagctctat

SEQ ID NO: 133689 - DNA, 25 bp, Saccharomyces pastorianus
tagtcccttcttcgtgctggacgaa

SEQ ID NO: 133690 - DNA, 25 bp, Saccharomyces pastorianus
gaattggccggtggtaacgcttctt

SEQ ID NO: 133691 - DNA, 25 bp, Saccharomyces pastorianus
agaaggcaccgtaatccagatctcc

SEQ ID NO: 133692 - DNA, 25 bp, Saccharomyces pastorianus
tggacgcagccctagacattactaa

SEQ ID NO: 133693 - DNA, 25 bp, Saccharomyces pastorianus
tgctattaattcctaccagcctagt

SEQ ID NO: 133694 - DNA, 25 bp, Saccharomyces pastorianus
taacgtccagagaattgctgcctat

SEQ ID NO: 133695 - DNA, 25 bp, Saccharomyces pastorianus
gtttgaaaaatctgacgctctcgtt

SEQ ID NO: 133696 - DNA, 25 bp, Saccharomyces pastorianus
gaatcaaatatcatgccactccgcc

SEQ ID NO: 133697 - DNA, 25 bp, Saccharomyces pastorianus
gtgagcgaccatttagacgcaatct

SEQ ID NO: 133698 - DNA, 25 bp, Saccharomyces pastorianus
gacgcaatctacagggaacttacta

SEQ ID NO: 133699 - DNA, 25 bp, Saccharomyces pastorianus
atctcattcgtactcggtgtgcgga

SEQ ID NO: 133700 - DNA, 25 bp, Saccharomyces pastorianus
cgaacccacaatccgcatacgtgaa

SEQ ID NO: 133701 - DNA, 25 bp, Saccharomyces pastorianus
tcaagtcctatagaggcgttaccaa

SEQ ID NO: 133702 - DNA, 25 bp, Saccharomyces pastorianus
taatttccagaaacggtgacactag

SEQ ID NO: 133703 - DNA, 25 bp, Saccharomyces pastorianus
ggattcggcgagtcgaatttcacaa

SEQ ID NO: 133704 - DNA, 25 bp, Saccharomyces pastorianus
attatcggtcctaacggatctggta

SEQ ID NO: 133705 - DNA, 25 bp, Saccharomyces pastorianus
aacaaactggtggagctgatgagaa

SEQ ID NO: 133706 - DNA, 25 bp, Saccharomyces pastorianus
aaattttctagtgttccagggtgat

SEQ ID NO: 133707 - DNA, 25 bp, Saccharomyces pastorianus
atggatgctatctcattcgtactcg

SEQ ID NO: 133708 - DNA, 25 bp, Saccharomyces pastorianus
ttaccaaggtaggattcggcgagtc

SEQ ID NO: 133709 - DNA, 25 bp, Saccharomyces pastorianus
gattatgataacgagggcgctgcct

SEQ ID NO: 133710 - DNA, 25 bp, Saccharomyces pastorianus
cacttggtccagttttggttgctat

SEQ ID NO: 133711 - DNA, 25 bp, Saccharomyces pastorianus
gaaatgcagcaaagtctcgtcaaga

SEQ ID NO: 133712 - DNA, 25 bp, Saccharomyces pastorianus
gcatacgtatattttggtctaacga

SEQ ID NO: 133713 - DNA, 25 bp, Saccharomyces pastorianus
attaaggccacttcaaaattatcta

SEQ ID NO: 133714 - DNA, 25 bp, Saccharomyces pastorianus
agaagcggtcaacatctagatgcac

SEQ ID NO: 133715 - DNA, 25 bp, Saccharomyces pastorianus
ggtcctattccatttatatgaaaag

SEQ ID NO: 133716 - DNA, 25 bp, Saccharomyces pastorianus
aacatctagatgcaccacttggtcc

SEQ ID NO: 133717 - DNA, 25 bp, Saccharomyces pastorianus
aagtctcgtcaagagttgcaaatac

SEQ ID NO: 133718 - DNA, 25 bp, Saccharomyces pastorianus
attctgtgctttatggtcctattcc

SEQ ID NO: 133719 - DNA, 25 bp, Saccharomyces pastorianus
ggtctaacgatattctgtgctttat

SEQ ID NO: 133720 - DNA, 25 bp, Saccharomyces pastorianus
tggttgctatagttttatttgtcac

SEQ ID NO: 133721 - DNA, 25 bp, Saccharomyces pastorianus
catcgctgatgggttttgtgtgtct

SEQ ID NO: 133722 - DNA, 25 bp, Saccharomyces pastorianus
gcgtacaatatccattcgcttttga

SEQ ID NO: 133723 - DNA, 25 bp, Saccharomyces pastorianus
taagaagccagcagtttcccatctt

SEQ ID NO: 133724 - DNA, 25 bp, Saccharomyces pastorianus
ggatgcagtccttctcaatgacaat

SEQ ID NO: 133725 - DNA, 25 bp, Saccharomyces pastorianus
gttgacccagaaatctgtcgcaata

SEQ ID NO: 133726 - DNA, 25 bp, Saccharomyces pastorianus
tctttctacacacttccaggacatt

SEQ ID NO: 133727 - DNA, 25 bp, Saccharomyces pastorianus
ttggtcgtggttcaagcatcgctga

SEQ ID NO: 133728 - DNA, 25 bp, Saccharomyces pastorianus
ggaggcaacggtatttctttctaca

SEQ ID NO: 133729 - DNA, 25 bp, Saccharomyces pastorianus
aacccggatattattgcagaagcgt

SEQ ID NO: 133730 - DNA, 25 bp, Saccharomyces pastorianus
gaacatttacttcgaacggaggcaa

SEQ ID NO: 133731 - DNA, 25 bp, Saccharomyces pastorianus
ttgtgtgtctttggcagtaactgaa

SEQ ID NO: 133732 - DNA, 25 bp, Saccharomyces pastorianus
agtgcttcaatagccaagatggact

SEQ ID NO: 133733 - DNA, 25 bp, Saccharomyces pastorianus
tatcgaaatgagactagaggcccta

SEQ ID NO: 133734 - DNA, 25 bp, Saccharomyces pastorianus
gactggcggcgattacaaagtattt

SEQ ID NO: 133735 - DNA, 25 bp, Saccharomyces pastorianus
agagggttcacggaagtgcttcaat

SEQ ID NO: 133736 - DNA, 25 bp, Saccharomyces pastorianus
ctgattccaagcagttctctagctc

SEQ ID NO: 133737 - DNA, 25 bp, Saccharomyces pastorianus
ggaagttcttggataccacgtccac

SEQ ID NO: 133738 - DNA, 25 bp, Saccharomyces pastorianus
tttaccaacctacggaaatactgat

SEQ ID NO: 133739 - DNA, 25 bp, Saccharomyces pastorianus
aaaacgtttgctctttgtgctgcat

SEQ ID NO: 133740 - DNA, 25 bp, Saccharomyces pastorianus
agttctctagctccaacagtatcaa

SEQ ID NO: 133741 - DNA, 25 bp, Saccharomyces pastorianus
gtaacacgggacagatgtatctttc

SEQ ID NO: 133742 - DNA, 25 bp, Saccharomyces pastorianus
gaacagtatactgcagccattaact

SEQ ID NO: 133743 - DNA, 25 bp, Saccharomyces pastorianus
ccgcctacctagaatgcctgagata

SEQ ID NO: 133744 - DNA, 25 bp, Saccharomyces pastorianus
ttcccagggaattggttggtcgatc

SEQ ID NO: 133745 - DNA, 25 bp, Saccharomyces pastorianus
gataacaaagtacttagccaccgaa

SEQ ID NO: 133746 - DNA, 25 bp, Saccharomyces pastorianus
tactcaaatcattccgcaacttcaa

SEQ ID NO: 133747 - DNA, 25 bp, Saccharomyces pastorianus
ttagcgtggtcagataaaacattga

SEQ ID NO: 133748 - DNA, 25 bp, Saccharomyces pastorianus
attgtatggtcttttccgcctacct

SEQ ID NO: 133749 - DNA, 25 bp, Saccharomyces pastorianus
acgaggactttagaaattggatact

SEQ ID NO: 133750 - DNA, 25 bp, Saccharomyces pastorianus
atcattccgcaacttcaatttttag

SEQ ID NO: 133751 - DNA, 25 bp, Saccharomyces pastorianus
gggcataacaacaaacttttacgag

SEQ ID NO: 133752 - DNA, 25 bp, Saccharomyces pastorianus
tcaatttttaggcttcaatctttag

SEQ ID NO: 133753 - DNA, 25 bp, Saccharomyces pastorianus
tggtcgatcccccagttaatatgga

SEQ ID NO: 133754 - DNA, 25 bp, Saccharomyces pastorianus
atcgacaattcccatgcttgctggc

SEQ ID NO: 133755 - DNA, 25 bp, Saccharomyces pastorianus
tcccatgcttgctggcaacaaggat

SEQ ID NO: 133756 - DNA, 25 bp, Saccharomyces pastorianus
gagaccatgactccagtccaagcat

SEQ ID NO: 133757 - DNA, 25 bp, Saccharomyces pastorianus
agtccaagcatcgacaattcccatg

SEQ ID NO: 133758 - DNA, 25 bp, Saccharomyces pastorianus
agtcattggaatgggataatctcgg

SEQ ID NO: 133759 - DNA, 25 bp, Saccharomyces pastorianus
gactggatgttatgggttttgagac

SEQ ID NO: 133760 - DNA, 25 bp, Saccharomyces pastorianus
ggttttgagaccatgactccagtcc

SEQ ID NO: 133761 - DNA, 25 bp, Saccharomyces pastorianus
aattcccatgcttgctggcaacaag

SEQ ID NO: 133762 - DNA, 25 bp, Saccharomyces pastorianus
atgactccagtccaagcatcgacaa

SEQ ID NO: 133763 - DNA, 25 bp, Saccharomyces pastorianus
gaatgggataatctcgggttttctt

SEQ ID NO: 133764 - DNA, 25 bp, Saccharomyces pastorianus
ttgctggcaacaaggatgtagtagt

SEQ ID NO: 133765 - DNA, 25 bp, Saccharomyces pastorianus
atgattcatatcttgaacgaaagta

SEQ ID NO: 133766 - DNA, 25 bp, Saccharomyces pastorianus
gtatcaatcgtccacaaaaggtcaa

SEQ ID NO: 133767 - DNA, 25 bp, Saccharomyces pastorianus
caaaaggtcaacaaattgattcctt

SEQ ID NO: 133768 - DNA, 25 bp, Saccharomyces pastorianus
atcaatcgtccacaaaaggtcaaca

SEQ ID NO: 133769 - DNA, 25 bp, Saccharomyces pastorianus
agtaagtatcaatcgtccacaaaag

SEQ ID NO: 133770 - DNA, 25 bp, Saccharomyces pastorianus
gtccacaaaaggtcaacaaattgat

SEQ ID NO: 133771 - DNA, 25 bp, Saccharomyces pastorianus
atcgtccacaaaaggtcaacaaatt

SEQ ID NO: 133772 - DNA, 25 bp, Saccharomyces pastorianus
gattccttaaaaaatgttgcgagac

SEQ ID NO: 133773 - DNA, 25 bp, Saccharomyces pastorianus
taagtatcaatcgtccacaaaaggt

SEQ ID NO: 133774 - DNA, 25 bp, Saccharomyces pastorianus
gaaagtaagtatcaatcgtccacaa

SEQ ID NO: 133775 - DNA, 25 bp, Saccharomyces pastorianus
ccttaaaaaatgttgcgagacaatg

SEQ ID NO: 133776 - DNA, 25 bp, Saccharomyces pastorianus
caaagaaatttgtatgctgctctta

SEQ ID NO: 133777 - DNA, 25 bp, Saccharomyces pastorianus
tcctctatcagggagctatatttca

SEQ ID NO: 133778 - DNA, 25 bp, Saccharomyces pastorianus
atgctgctcttaaatatctcctcta

SEQ ID NO: 133779 - DNA, 25 bp, Saccharomyces pastorianus
ggtatatcgagacagattcatgtta

SEQ ID NO: 133780 - DNA, 25 bp, Saccharomyces pastorianus
gaaagcacaagatttctctaattta

SEQ ID NO: 133781 - DNA, 25 bp, Saccharomyces pastorianus
atttacttcctttctcagacgagct

SEQ ID NO: 133782 - DNA, 25 bp, Saccharomyces pastorianus
gctcttaaatatctcctctatcagg

SEQ ID NO: 133783 - DNA, 25 bp, Saccharomyces pastorianus
atggagttattggatttacttcctt

SEQ ID NO: 133784 - DNA, 25 bp, Saccharomyces pastorianus
gcaagaaacactatcccaaatggag

SEQ ID NO: 133785 - DNA, 25 bp, Saccharomyces pastorianus
agacgagctatctgctagaaagaaa

SEQ ID NO: 133786 - DNA, 25 bp, Saccharomyces pastorianus
gataatgctggtatatcgagacaga

SEQ ID NO: 133787 - DNA, 25 bp, Saccharomyces pastorianus
aaacaacctccaacacaggcttatt

SEQ ID NO: 133788 - DNA, 25 bp, Saccharomyces pastorianus
tcacggtctgaataggcactactat

SEQ ID NO: 133789 - DNA, 25 bp, Saccharomyces pastorianus
tcatccagggtttggctgttggcta

SEQ ID NO: 133790 - DNA, 25 bp, Saccharomyces pastorianus
ctgttggctatcttctgttgatgtt

SEQ ID NO: 133791 - DNA, 25 bp, Saccharomyces pastorianus
tttagattgattgacacgggcgcat

SEQ ID NO: 133792 - DNA, 25 bp, Saccharomyces pastorianus
aatggtcgttggctggtaccactct

SEQ ID NO: 133793 - DNA, 25 bp, Saccharomyces pastorianus
gaacagtggcaatcaggtcttaaga

SEQ ID NO: 133794 - DNA, 25 bp, Saccharomyces pastorianus
gacacgggcgcattgataaataact

SEQ ID NO: 133795 - DNA, 25 bp, Saccharomyces pastorianus
gttgtcatcgatgcttttagattga

SEQ ID NO: 133796 - DNA, 25 bp, Saccharomyces pastorianus
agaagcacctttccgaaacagcaga

SEQ ID NO: 133797 - DNA, 25 bp, Saccharomyces pastorianus
acattcaagccttaattcacggtct

SEQ ID NO: 133798 - DNA, 25 bp, Saccharomyces pastorianus
tatggatttgaccacgtctgcagtg

SEQ ID NO: 133799 - DNA, 25 bp, Saccharomyces pastorianus
atcactggtaccctgggtctacaaa

SEQ ID NO: 133800 - DNA, 25 bp, Saccharomyces pastorianus
ggataccactggtctagacgctttg

SEQ ID NO: 133801 - DNA, 25 bp, Saccharomyces pastorianus
ataggctacttcactcaacatcatg

SEQ ID NO: 133802 - DNA, 25 bp, Saccharomyces pastorianus
gatgtccaaatccttcccaggtaaa

SEQ ID NO: 133803 - DNA, 25 bp, Saccharomyces pastorianus
gatatctctgttattgactctgttt

SEQ ID NO: 133804 - DNA, 25 bp, Saccharomyces pastorianus
gacgtcatctaggttcatttggtat

SEQ ID NO: 133805 - DNA, 25 bp, Saccharomyces pastorianus
agcattcgctgcattgtgtttaaat

SEQ ID NO: 133806 - DNA, 25 bp, Saccharomyces pastorianus
aaaaatctcgtgtagcattcgctgc

SEQ ID NO: 133807 - DNA, 25 bp, Saccharomyces pastorianus
tgcccttgtaggtgccaatggttgt

SEQ ID NO: 133808 - DNA, 25 bp, Saccharomyces pastorianus
tggattccagaattgcccttgtagg

SEQ ID NO: 133809 - DNA, 25 bp, Saccharomyces pastorianus
gctactttaaccacttgtccggaat

SEQ ID NO: 133810 - DNA, 25 bp, Saccharomyces pastorianus
agtattgaccctatcgtcacggatt

SEQ ID NO: 133811 - DNA, 25 bp, Saccharomyces pastorianus
gaccctatcgtcacggattacgcag

SEQ ID NO: 133812 - DNA, 25 bp, Saccharomyces pastorianus
ggattacgcagtgggctactttaac

SEQ ID NO: 133813 - DNA, 25 bp, Saccharomyces pastorianus
ccacttgtccggaataacttttgat

SEQ ID NO: 133814 - DNA, 25 bp, Saccharomyces pastorianus
aaaagctgcttctagtattgaccct

SEQ ID NO: 133815 - DNA, 25 bp, Saccharomyces pastorianus
ggcaagcatcggttcgcaagtgaga

SEQ ID NO: 133816 - DNA, 25 bp, Saccharomyces pastorianus
ccggaataacttttgatgctgttca

SEQ ID NO: 133817 - DNA, 25 bp, Saccharomyces pastorianus
gttcgcaagtgagaaaagctgcttc

SEQ ID NO: 133818 - DNA, 25 bp, Saccharomyces pastorianus
atcgtcacggattacgcagtgggct

SEQ ID NO: 133819 - DNA, 25 bp, Saccharomyces pastorianus
tgcttctagtattgaccctatcgtc

SEQ ID NO: 133820 - DNA, 25 bp, Saccharomyces pastorianus
cgttattggcgtgcattttctcagt

SEQ ID NO: 133821 - DNA, 25 bp, Saccharomyces pastorianus
ctcgttattggcgtgcattttctca

SEQ ID NO: 133822 - DNA, 25 bp, Saccharomyces pastorianus
tggcgtgcattttctcagttttagg

SEQ ID NO: 133823 - DNA, 25 bp, Saccharomyces pastorianus
gttattggcgtgcattttctcagtt

SEQ ID NO: 133824 - DNA, 25 bp, Saccharomyces pastorianus
tattggcgtgcattttctcagtttt

SEQ ID NO: 133825 - DNA, 25 bp, Saccharomyces pastorianus
gcgtgcattttctcagttttaggtt

SEQ ID NO: 133826 - DNA, 25 bp, Saccharomyces pastorianus
ttggcgtgcattttctcagttttag

SEQ ID NO: 133827 - DNA, 25 bp, Saccharomyces pastorianus
ggcgtgcattttctcagttttaggt

SEQ ID NO: 133828 - DNA, 25 bp, Saccharomyces pastorianus
gtgcattttctcagttttaggtttg

SEQ ID NO: 133829 - DNA, 25 bp, Saccharomyces pastorianus
attggcgtgcattttctcagtttta

SEQ ID NO: 133830 - DNA, 25 bp, Saccharomyces pastorianus
gcattttctcagttttaggtttgat

SEQ ID NO: 133831 - DNA, 25 bp, Saccharomyces pastorianus
tgattttactgttttcctctttcct

SEQ ID NO: 133832 - DNA, 25 bp, Saccharomyces pastorianus
ctggctttatgatatgttgtttaac

SEQ ID NO: 133833 - DNA, 25 bp, Saccharomyces pastorianus
tcctctttcctacaattaatctctt

SEQ ID NO: 133834 - DNA, 25 bp, Saccharomyces pastorianus
ttaatctctttttctggctttatga

SEQ ID NO: 133835 - DNA, 25 bp, Saccharomyces pastorianus
taaattgattttactgttttcctct

SEQ ID NO: 133836 - DNA, 25 bp, Saccharomyces pastorianus
tgttttcctctttcctacaattaat

SEQ ID NO: 133837 - DNA, 25 bp, Saccharomyces pastorianus
gttgtttaacttcaccaataattag

SEQ ID NO: 133838 - DNA, 25 bp, Saccharomyces pastorianus
ctctttttctggctttatgatatgt

SEQ ID NO: 133839 - DNA, 25 bp, Saccharomyces pastorianus
acaattaatctctttttctggcttt

SEQ ID NO: 133840 - DNA, 25 bp, Saccharomyces pastorianus
ttactgttttcctctttcctacaat

SEQ ID NO: 133841 - DNA, 25 bp, Saccharomyces pastorianus
gatatgttgtttaacttcaccaata

SEQ ID NO: 133842 - DNA, 25 bp, Saccharomyces pastorianus
gaccctccttggttatttggcgttg

SEQ ID NO: 133843 - DNA, 25 bp, Saccharomyces pastorianus
gaggttcctcataactctttcattc

SEQ ID NO: 133844 - DNA, 25 bp, Saccharomyces pastorianus
attcacaagataactacgaccctcc

SEQ ID NO: 133845 - DNA, 25 bp, Saccharomyces pastorianus
tttcattccttggtattcccgaaga

SEQ ID NO: 133846 - DNA, 25 bp, Saccharomyces pastorianus
atggtaacagcgaacactcccgaca

SEQ ID NO: 133847 - DNA, 25 bp, Saccharomyces pastorianus
gagggaatctcaagccattcacaag

SEQ ID NO: 133848 - DNA, 25 bp, Saccharomyces pastorianus
acccaatcagccgatcgctttaaaa

SEQ ID NO: 133849 - DNA, 25 bp, Saccharomyces pastorianus
aaaatcattgtctcacagagccccg

SEQ ID NO: 133850 - DNA, 25 bp, Saccharomyces pastorianus
gacaaacattgccacagacctacaa

SEQ ID NO: 133851 - DNA, 25 bp, Saccharomyces pastorianus
attacaatcgctactactcacagac

SEQ ID NO: 133852 - DNA, 25 bp, Saccharomyces pastorianus
atttggcgttgaggctacccaatca

SEQ ID NO: 133853 - DNA, 25 bp, Saccharomyces pastorianus
tagtttgagcacgaatggagccatc

SEQ ID NO: 133854 - DNA, 25 bp, Saccharomyces pastorianus
tgactccgggcgatttaggtaccct

SEQ ID NO: 133855 - DNA, 25 bp, Saccharomyces pastorianus
gtagggcctatccagagcagttcaa

SEQ ID NO: 133856 - DNA, 25 bp, Saccharomyces pastorianus
ggttcggtgcctacatggaagactt

SEQ ID NO: 133857 - DNA, 25 bp, Saccharomyces pastorianus
agaccgtcgtttcaagagtcctgat

SEQ ID NO: 133858 - DNA, 25 bp, Saccharomyces pastorianus
gaaattcaagattgccaggcctttg

SEQ ID NO: 133859 - DNA, 25 bp, Saccharomyces pastorianus
taggtacccttcaagatgctaataa

SEQ ID NO: 133860 - DNA, 25 bp, Saccharomyces pastorianus
atatgaacactcttgccggtggcaa

SEQ ID NO: 133861 - DNA, 25 bp, Saccharomyces pastorianus
gacagttaggtcttcgtagggccta

SEQ ID NO: 133862 - DNA, 25 bp, Saccharomyces pastorianus
tcctgatgaatctgtcgagcaatta

SEQ ID NO: 133863 - DNA, 25 bp, Saccharomyces pastorianus
gccaggcctttgagtgtacccggat

SEQ ID NO: 133864 - DNA, 25 bp, Saccharomyces pastorianus
ggcctagaatcagagttgcccacta

SEQ ID NO: 133865 - DNA, 25 bp, Saccharomyces pastorianus
gaggtcaccgcatccattgggaaga

SEQ ID NO: 133866 - DNA, 25 bp, Saccharomyces pastorianus
tagcgtttttgatcatgcctgccaa

SEQ ID NO: 133867 - DNA, 25 bp, Saccharomyces pastorianus
attccttcactgtggaggcactgaa

SEQ ID NO: 133868 - DNA, 25 bp, Saccharomyces pastorianus
gttcattgaatcattggctcgtctc

SEQ ID NO: 133869 - DNA, 25 bp, Saccharomyces pastorianus
gagataccctcataatggcctagaa

SEQ ID NO: 133870 - DNA, 25 bp, Saccharomyces pastorianus
tgatttcgtcagaggccatttccat

SEQ ID NO: 133871 - DNA, 25 bp, Saccharomyces pastorianus
cttgcccaatggtttgaacgttgtt

SEQ ID NO: 133872 - DNA, 25 bp, Saccharomyces pastorianus
aactgcctccggtagtcacgcataa

SEQ ID NO: 133873 - DNA, 25 bp, Saccharomyces pastorianus
attggcgctgagaagaccttacggg

SEQ ID NO: 133874 - DNA, 25 bp, Saccharomyces pastorianus
gaaaccggatggtatcttgcccaat

SEQ ID NO: 133875 - DNA, 25 bp, Saccharomyces pastorianus
ccgttcacctacagagatcttggca

SEQ ID NO: 133876 - DNA, 25 bp, Saccharomyces pastorianus
ataacgactagcgagatccggaagc

SEQ ID NO: 133877 - DNA, 25 bp, Saccharomyces pastorianus
aacgctctactccaatcactagatg

SEQ ID NO: 133878 - DNA, 25 bp, Saccharomyces pastorianus
atgatccccagaacaaatcgcttaa

SEQ ID NO: 133879 - DNA, 25 bp, Saccharomyces pastorianus
gaggaggtatcccagttagacttca

SEQ ID NO: 133880 - DNA, 25 bp, Saccharomyces pastorianus
aagactccacaactcaaactactga

SEQ ID NO: 133881 - DNA, 25 bp, Saccharomyces pastorianus
ggaggcggtttccatatgatcccca

SEQ ID NO: 133882 - DNA, 25 bp, Saccharomyces pastorianus
tgattccgaactaaacgctctactc

SEQ ID NO: 133883 - DNA, 25 bp, Saccharomyces pastorianus
taggagtcttccaggtgtggtcaga

SEQ ID NO: 133884 - DNA, 25 bp, Saccharomyces pastorianus
aatcgcttaagcacaatcctgacgg

SEQ ID NO: 133885 - DNA, 25 bp, Saccharomyces pastorianus
ggacacaatgacttaatcgggaact

SEQ ID NO: 133886 - DNA, 25 bp, Saccharomyces pastorianus
aactcgtaccttgacaacaacagca

SEQ ID NO: 133887 - DNA, 25 bp, Saccharomyces pastorianus
gatttccagaatactatccacaata

SEQ ID NO: 133888 - DNA, 25 bp, Saccharomyces pastorianus
agtagcggacccatggatttccaga

SEQ ID NO: 133889 - DNA, 25 bp, Saccharomyces pastorianus
attagacggcggtctaccaattata

SEQ ID NO: 133890 - DNA, 25 bp, Saccharomyces pastorianus
tggatatgggtgactccatctccca

SEQ ID NO: 133891 - DNA, 25 bp, Saccharomyces pastorianus
acctgagccacgctggcgtggatat

SEQ ID NO: 133892 - DNA, 25 bp, Saccharomyces pastorianus
gcaatacaggaccactaacgactct

SEQ ID NO: 133893 - DNA, 25 bp, Saccharomyces pastorianus
tactatccacaatatgcaatacagg

SEQ ID NO: 133894 - DNA, 25 bp, Saccharomyces pastorianus
gcactaaattccagggaacaagccc

SEQ ID NO: 133895 - DNA, 25 bp, Saccharomyces pastorianus
ggaccactaacgactctgacctgag

SEQ ID NO: 133896 - DNA, 25 bp, Saccharomyces pastorianus
cgaacgtaggagtagcggacccatg

SEQ ID NO: 133897 - DNA, 25 bp, Saccharomyces pastorianus
gaccccacggactatcgatttttag

SEQ ID NO: 133898 - DNA, 25 bp, Saccharomyces pastorianus
ggcacaccgtggatgatgacttccg

SEQ ID NO: 133899 - DNA, 25 bp, Saccharomyces pastorianus
gaagtcgcgctcaacgcaaacatct

SEQ ID NO: 133900 - DNA, 25 bp, Saccharomyces pastorianus
gaatcggcattagccgccgaagtcg

SEQ ID NO: 133901 - DNA, 25 bp, Saccharomyces pastorianus
gtattacatgcaatcccgctaccat

SEQ ID NO: 133902 - DNA, 25 bp, Saccharomyces pastorianus
gccgccggagtacccgtattacatg

SEQ ID NO: 133903 - DNA, 25 bp, Saccharomyces pastorianus
gaggatcccggcgaatcggcattag

SEQ ID NO: 133904 - DNA, 25 bp, Saccharomyces pastorianus
attcccaagtacatggcacaccgtg

SEQ ID NO: 133905 - DNA, 25 bp, Saccharomyces pastorianus
tatcgatttttagggctcgggcatt

SEQ ID NO: 133906 - DNA, 25 bp, Saccharomyces pastorianus
ggatgatgacttccggcacttagac

SEQ ID NO: 133907 - DNA, 25 bp, Saccharomyces pastorianus
tcgggcattcggtcatcggagacga

SEQ ID NO: 133908 - DNA, 25 bp, Saccharomyces pastorianus
ggattattccttagtcattggtatt

SEQ ID NO: 133909 - DNA, 25 bp, Saccharomyces pastorianus
cagtgtgatcaagcagcctaccgtt

SEQ ID NO: 133910 - DNA, 25 bp, Saccharomyces pastorianus
agcctaccgttgttacaccaagaca

SEQ ID NO: 133911 - DNA, 25 bp, Saccharomyces pastorianus
aaagctctatttcaagttctaaaag

SEQ ID NO: 133912 - DNA, 25 bp, Saccharomyces pastorianus
gaatcacctattcatgttcgcgaat

SEQ ID NO: 133913 - DNA, 25 bp, Saccharomyces pastorianus
aatgttccatgatttgcccacgact

SEQ ID NO: 133914 - DNA, 25 bp, Saccharomyces pastorianus
ttggaacgacacattatttttggcc

SEQ ID NO: 133915 - DNA, 25 bp, Saccharomyces pastorianus
atgatttgcccacgactttggctaa

SEQ ID NO: 133916 - DNA, 25 bp, Saccharomyces pastorianus
ggaatcattgatttcattcgaacgt

SEQ ID NO: 133917 - DNA, 25 bp, Saccharomyces pastorianus
aagagcttctgtttggaacgacaca

SEQ ID NO: 133918 - DNA, 25 bp, Saccharomyces pastorianus
cattcgaacgtttacatgggacaaa

SEQ ID NO: 133919 - DNA, 25 bp, Saccharomyces pastorianus
atcgcattttgcttgagtacttctg

SEQ ID NO: 133920 - DNA, 25 bp, Saccharomyces pastorianus
gcagaagctgctcctgccaaaacag

SEQ ID NO: 133921 - DNA, 25 bp, Saccharomyces pastorianus
atagtgacgttataatccgcgaaga

SEQ ID NO: 133922 - DNA, 25 bp, Saccharomyces pastorianus
caacctgtccttcggaacacatttt

SEQ ID NO: 133923 - DNA, 25 bp, Saccharomyces pastorianus
gatctgcgtatttgtggaaacccct

SEQ ID NO: 133924 - DNA, 25 bp, Saccharomyces pastorianus
ttgtttatccaacctgtccttcgga

SEQ ID NO: 133925 - DNA, 25 bp, Saccharomyces pastorianus
atcacaaacgcattcccaagcaaat

SEQ ID NO: 133926 - DNA, 25 bp, Saccharomyces pastorianus
atttctccctcagtttctacaactt

SEQ ID NO: 133927 - DNA, 25 bp, Saccharomyces pastorianus
atccgcgaagatgaaccaagttcct

SEQ ID NO: 133928 - DNA, 25 bp, Saccharomyces pastorianus
gagataggaccccacaagaatcaca

SEQ ID NO: 133929 - DNA, 25 bp, Saccharomyces pastorianus
ggatccttctgttaacatttctccc

SEQ ID NO: 133930 - DNA, 25 bp, Saccharomyces pastorianus
gtcgtttcctcggatggatacctat

SEQ ID NO: 133931 - DNA, 25 bp, Saccharomyces pastorianus
gtatccggaactcttcgaaactggc

SEQ ID NO: 133932 - DNA, 25 bp, Saccharomyces pastorianus
tgcgtctttgaaacttcccgttgaa

SEQ ID NO: 133933 - DNA, 25 bp, Saccharomyces pastorianus
aggatgatacgttactcttctcaaa

SEQ ID NO: 133934 - DNA, 25 bp, Saccharomyces pastorianus
gagcctgttatgaagatggtcccca

SEQ ID NO: 133935 - DNA, 25 bp, Saccharomyces pastorianus
agagtcctaccatgagcctgttatg

SEQ ID NO: 133936 - DNA, 25 bp, Saccharomyces pastorianus
gggtcagattttccccatcaaagtt

SEQ ID NO: 133937 - DNA, 25 bp, Saccharomyces pastorianus
ataccaccagtatcgatgcgctgag

SEQ ID NO: 133938 - DNA, 25 bp, Saccharomyces pastorianus
tacatcgttgttggaatcctcgcgc

SEQ ID NO: 133939 - DNA, 25 bp, Saccharomyces pastorianus
gcaattccgcaagtacagagtccta

SEQ ID NO: 133940 - DNA, 25 bp, Saccharomyces pastorianus
tacaactttgttatggacccggaga

SEQ ID NO: 133941 - DNA, 25 bp, Saccharomyces pastorianus
aagaatttactccatatcattcagt

SEQ ID NO: 133942 - DNA, 25 bp, Saccharomyces pastorianus
gatagccagtacttggcggttaccg

SEQ ID NO: 133943 - DNA, 25 bp, Saccharomyces pastorianus
cagtacttggcggttaccggctctt

SEQ ID NO: 133944 - DNA, 25 bp, Saccharomyces pastorianus
tagccagtacttggcggttaccggc

SEQ ID NO: 133945 - DNA, 25 bp, Saccharomyces pastorianus
atagccagtacttggcggttaccgg

SEQ ID NO: 133946 - DNA, 25 bp, Saccharomyces pastorianus
ttcagtgaagatagccagtacttgg

SEQ ID NO: 133947 - DNA, 25 bp, Saccharomyces pastorianus
tacttggcggttaccggctcttcca

SEQ ID NO: 133948 - DNA, 25 bp, Saccharomyces pastorianus
gaagatagccagtacttggcggtta

SEQ ID NO: 133949 - DNA, 25 bp, Saccharomyces pastorianus
cattcagtgaagatagccagtactt

SEQ ID NO: 133950 - DNA, 25 bp, Saccharomyces pastorianus
agatagccagtacttggcggttacc

SEQ ID NO: 133951 - DNA, 25 bp, Saccharomyces pastorianus
atcattcagtgaagatagccagtac

SEQ ID NO: 133952 - DNA, 25 bp, Saccharomyces pastorianus
tgtatttcccttggaacgtcgaaag

SEQ ID NO: 133953 - DNA, 25 bp, Saccharomyces pastorianus
actagccctcgttgggataggcgat

SEQ ID NO: 133954 - DNA, 25 bp, Saccharomyces pastorianus
gtgtatccatcaccaccaaaagtta

SEQ ID NO: 133955 - DNA, 25 bp, Saccharomyces pastorianus
tccttcggtagccaacagctattta

SEQ ID NO: 133956 - DNA, 25 bp, Saccharomyces pastorianus
actttccctacttctattctgagtg

SEQ ID NO: 133957 - DNA, 25 bp, Saccharomyces pastorianus
ttatctgtgaggtgactttccctac

SEQ ID NO: 133958 - DNA, 25 bp, Saccharomyces pastorianus
gagatgttgttctccacctcgttac

SEQ ID NO: 133959 - DNA, 25 bp, Saccharomyces pastorianus
gataggcgatcaacctgcgctttca

SEQ ID NO: 133960 - DNA, 25 bp, Saccharomyces pastorianus
aaagctcatgccaccacaacaatat

SEQ ID NO: 133961 - DNA, 25 bp, Saccharomyces pastorianus
agtctcgattggtggtacttttaca

SEQ ID NO: 133962 - DNA, 25 bp, Saccharomyces pastorianus
cttatggctatgtctccttcggtag

SEQ ID NO: 133963 - DNA, 25 bp, Saccharomyces pastorianus
caaggtttaaaggatctcagttcat

SEQ ID NO: 133964 - DNA, 25 bp, Saccharomyces pastorianus
gcaaaattggttccatgcgaaggta

SEQ ID NO: 133965 - DNA, 25 bp, Saccharomyces pastorianus
ctcagttcattgtagtctcgcttaa

SEQ ID NO: 133966 - DNA, 25 bp, Saccharomyces pastorianus
gcattgttgcaatttcgaccagcgc

SEQ ID NO: 133967 - DNA, 25 bp, Saccharomyces pastorianus
aaggtcgttgattgctttgtcattg

SEQ ID NO: 133968 - DNA, 25 bp, Saccharomyces pastorianus
gtttgattgaattgtccggtgggca

SEQ ID NO: 133969 - DNA, 25 bp, Saccharomyces pastorianus
aaagaaggtatgtttgccaatgcta

SEQ ID NO: 133970 - DNA, 25 bp, Saccharomyces pastorianus
ggatgaagttgatgctgctcttgat

SEQ ID NO: 133971 - DNA, 25 bp, Saccharomyces pastorianus
gctaatagggtcttcaggacgagat

SEQ ID NO: 133972 - DNA, 25 bp, Saccharomyces pastorianus
ttgctgaccttttaccaaattcatt

SEQ ID NO: 133973 - DNA, 25 bp, Saccharomyces pastorianus
tcgaccagcgcctatgtatattttg

SEQ ID NO: 133974 - DNA, 25 bp, Saccharomyces pastorianus
gcaggaatcggagtcagaacgtaaa

SEQ ID NO: 133975 - DNA, 25 bp, Saccharomyces pastorianus
gatacgaggtgttgaagacgacctt

SEQ ID NO: 133976 - DNA, 25 bp, Saccharomyces pastorianus
gtacgatagcgataaaggatccaag

SEQ ID NO: 133977 - DNA, 25 bp, Saccharomyces pastorianus
aactattggcgaaagagctggagga

SEQ ID NO: 133978 - DNA, 25 bp, Saccharomyces pastorianus
aaattggtccatgacttgaacaaat

SEQ ID NO: 133979 - DNA, 25 bp, Saccharomyces pastorianus
aacacgaatttcttgaggattttga

SEQ ID NO: 133980 - DNA, 25 bp, Saccharomyces pastorianus
aagacgctattgcaaaaccatttga

SEQ ID NO: 133981 - DNA, 25 bp, Saccharomyces pastorianus
cttgaggattttgatctggtgacaa

SEQ ID NO: 133982 - DNA, 25 bp, Saccharomyces pastorianus
atcgatttggatacttacagagaaa

SEQ ID NO: 133983 - DNA, 25 bp, Saccharomyces pastorianus
gacgaccttgtaacagtccagacag

SEQ ID NO: 133984 - DNA, 25 bp, Saccharomyces pastorianus
gcaattgagctcagaactagattct

SEQ ID NO: 133985 - DNA, 25 bp, Saccharomyces pastorianus
ggtggtgggtcaacttttccagata

SEQ ID NO: 133986 - DNA, 25 bp, Saccharomyces pastorianus
cgtgttaccatcatacctcttgata

SEQ ID NO: 133987 - DNA, 25 bp, Saccharomyces pastorianus
tactgctttgcaaacttgtgccgga

SEQ ID NO: 133988 - DNA, 25 bp, Saccharomyces pastorianus
taatattcgctatgctactgctttg

SEQ ID NO: 133989 - DNA, 25 bp, Saccharomyces pastorianus
tcaagattctcagacggccactcag

SEQ ID NO: 133990 - DNA, 25 bp, Saccharomyces pastorianus
gaggccaataagttcacaagtgctt

SEQ ID NO: 133991 - DNA, 25 bp, Saccharomyces pastorianus
attaccttccatccaaagatccgtg

SEQ ID NO: 133992 - DNA, 25 bp, Saccharomyces pastorianus
gaatatgggtttgatccatcacgaa

SEQ ID NO: 133993 - DNA, 25 bp, Saccharomyces pastorianus
gataaactacgagcccgactagtcg

SEQ ID NO: 133994 - DNA, 25 bp, Saccharomyces pastorianus
gatccgtgctagaagtatcaccctt

SEQ ID NO: 133995 - DNA, 25 bp, Saccharomyces pastorianus
ttacgcaagcgtgttaccatcatac

SEQ ID NO: 133996 - DNA, 25 bp, Saccharomyces pastorianus
ggcttctaccatctctagaggtgct

SEQ ID NO: 133997 - DNA, 25 bp, Saccharomyces pastorianus
cttctaccatctctagaggtgctgt

SEQ ID NO: 133998 - DNA, 25 bp, Saccharomyces pastorianus
gcttctaccatctctagaggtgctg

SEQ ID NO: 133999 - DNA, 25 bp, Saccharomyces pastorianus
ttctaccatctctagaggtgctgtt

SEQ ID NO: 134000 - DNA, 25 bp, Saccharomyces pastorianus
accatctctagaggtgctgtttctg

SEQ ID NO: 134001 - DNA, 25 bp, Saccharomyces pastorianus
taccatctctagaggtgctgtttct

SEQ ID NO: 134002 - DNA, 25 bp, Saccharomyces pastorianus
tctaccatctctagaggtgctgttt

SEQ ID NO: 134003 - DNA, 25 bp, Saccharomyces pastorianus
cggtttgattgccgccagaagaact

SEQ ID NO: 134004 - DNA, 25 bp, Saccharomyces pastorianus
gattgccgccagaagaactggtttg

SEQ ID NO: 134005 - DNA, 25 bp, Saccharomyces pastorianus
ctaccatctctagaggtgctgtttc

SEQ ID NO: 134006 - DNA, 25 bp, Saccharomyces pastorianus
catctctagaggtgctgtttctggt

SEQ ID NO: 134007 - DNA, 25 bp, Saccharomyces pastorianus
gtaaacttgctctctaatttctcca

SEQ ID NO: 134008 - DNA, 25 bp, Saccharomyces pastorianus
atctccagttgcgtttctagatcgc

SEQ ID NO: 134009 - DNA, 25 bp, Saccharomyces pastorianus
gtaccagtttcttcgacacattcaa

SEQ ID NO: 134010 - DNA, 25 bp, Saccharomyces pastorianus
taatcggtcgttcagcatcttttca

SEQ ID NO: 134011 - DNA, 25 bp, Saccharomyces pastorianus
tcgacttatcagagaccttacccaa

SEQ ID NO: 134012 - DNA, 25 bp, Saccharomyces pastorianus
atatttcagtttttccatctccagt

SEQ ID NO: 134013 - DNA, 25 bp, Saccharomyces pastorianus
ttctccactagttgtatgcccgagt

SEQ ID NO: 134014 - DNA, 25 bp, Saccharomyces pastorianus
gtctggacagcatcattcacgcatt

SEQ ID NO: 134015 - DNA, 25 bp, Saccharomyces pastorianus
ggtcagcttgactaactcttggatt

SEQ ID NO: 134016 - DNA, 25 bp, Saccharomyces pastorianus
ggattatcgcttggctttcttcaat

SEQ ID NO: 134017 - DNA, 25 bp, Saccharomyces pastorianus
atgtacttttcggagatctctctcg

SEQ ID NO: 134018 - DNA, 25 bp, Saccharomyces pastorianus
ggaagcttacattaccaaatcatct

SEQ ID NO: 134019 - DNA, 25 bp, Saccharomyces pastorianus
aactggcagaatcgattcgtcttga

SEQ ID NO: 134020 - DNA, 25 bp, Saccharomyces pastorianus
aactggctccgtttcatggaattga

SEQ ID NO: 134021 - DNA, 25 bp, Saccharomyces pastorianus
aagatacctttctgcaacgaatgaa

SEQ ID NO: 134022 - DNA, 25 bp, Saccharomyces pastorianus
atttctgagaggaaccgtctggtaa

SEQ ID NO: 134023 - DNA, 25 bp, Saccharomyces pastorianus
aacgaatgaatactgcggatacttt

SEQ ID NO: 134024 - DNA, 25 bp, Saccharomyces pastorianus
taattgtacctctaaattcgatcct

SEQ ID NO: 134025 - DNA, 25 bp, Saccharomyces pastorianus
gattcttttcttaccgaaatggcta

SEQ ID NO: 134026 - DNA, 25 bp, Saccharomyces pastorianus
agagaatcattccaactggctccgt

SEQ ID NO: 134027 - DNA, 25 bp, Saccharomyces pastorianus
ggacgtcagaggtctccatttggaa

SEQ ID NO: 134028 - DNA, 25 bp, Saccharomyces pastorianus
gatcaatacgatccagcctatatag

SEQ ID NO: 134029 - DNA, 25 bp, Saccharomyces pastorianus
gccgttttcaaagtaacgactgctt

SEQ ID NO: 134030 - DNA, 25 bp, Saccharomyces pastorianus
ggccgttttcaaagtaacgactgct

SEQ ID NO: 134031 - DNA, 25 bp, Saccharomyces pastorianus
ttcaaagtaacgactgctttgctgg

SEQ ID NO: 134032 - DNA, 25 bp, Saccharomyces pastorianus
gttttcaaagtaacgactgctttgc

SEQ ID NO: 134033 - DNA, 25 bp, Saccharomyces pastorianus
agtaacgactgctttgctggcttgc

SEQ ID NO: 134034 - DNA, 25 bp, Saccharomyces pastorianus
taacgactgctttgctggcttgcgt

SEQ ID NO: 134035 - DNA, 25 bp, Saccharomyces pastorianus
aaagtaacgactgctttgctggctt

SEQ ID NO: 134036 - DNA, 25 bp, Saccharomyces pastorianus
aacgactgctttgctggcttgcgtg

SEQ ID NO: 134037 - DNA, 25 bp, Saccharomyces pastorianus
aagtaacgactgctttgctggcttg

SEQ ID NO: 134038 - DNA, 25 bp, Saccharomyces pastorianus
caaagtaacgactgctttgctggct

SEQ ID NO: 134039 - DNA, 25 bp, Saccharomyces pastorianus
gtaacgactgctttgctggcttgcg

SEQ ID NO: 134040 - DNA, 25 bp, Saccharomyces pastorianus
ataattccttccttgttttgtctct

SEQ ID NO: 134041 - DNA, 25 bp, Saccharomyces pastorianus
tcccgattttctcccgttattagag

SEQ ID NO: 134042 - DNA, 25 bp, Saccharomyces pastorianus
tgatgtactctaaaattcttggcgg

SEQ ID NO: 134043 - DNA, 25 bp, Saccharomyces pastorianus
gcagctgcctgacaatactactgta

SEQ ID NO: 134044 - DNA, 25 bp, Saccharomyces pastorianus
gatttttcctataattccttccttg

SEQ ID NO: 134045 - DNA, 25 bp, Saccharomyces pastorianus
aagtagaactaatatctcccgatat

SEQ ID NO: 134046 - DNA, 25 bp, Saccharomyces pastorianus
atatgggccatattgtcttgattgc

SEQ ID NO: 134047 - DNA, 25 bp, Saccharomyces pastorianus
actactgtattaactccaaatggtg

SEQ ID NO: 134048 - DNA, 25 bp, Saccharomyces pastorianus
aatggtaacatcattccgcagctgc

SEQ ID NO: 134049 - DNA, 25 bp, Saccharomyces pastorianus
gaagaatggcaatactactccgaag

SEQ ID NO: 134050 - DNA, 25 bp, Saccharomyces pastorianus
gaaatccttgattcagataccggga

SEQ ID NO: 134051 - DNA, 25 bp, Saccharomyces pastorianus
gcgatgtctatgttgtagagcctga

SEQ ID NO: 134052 - DNA, 25 bp, Saccharomyces pastorianus
acctgcttcggtttggaacatgacg

SEQ ID NO: 134053 - DNA, 25 bp, Saccharomyces pastorianus
agagcctgatggaagtgaaacacta

SEQ ID NO: 134054 - DNA, 25 bp, Saccharomyces pastorianus
gataccttggataaaccttcagtaa

SEQ ID NO: 134055 - DNA, 25 bp, Saccharomyces pastorianus
tgttttggagaatacctgcttcggt

SEQ ID NO: 134056 - DNA, 25 bp, Saccharomyces pastorianus
gtttggcaaatctgttggtagcgca

SEQ ID NO: 134057 - DNA, 25 bp, Saccharomyces pastorianus
gaaaacttcatcagtcagtgtaaac

SEQ ID NO: 134058 - DNA, 25 bp, Saccharomyces pastorianus
gaagcctaagacttggttcctgctg

SEQ ID NO: 134059 - DNA, 25 bp, Saccharomyces pastorianus
gttcctgctggcctttatttggata

SEQ ID NO: 134060 - DNA, 25 bp, Saccharomyces pastorianus
tattgggcagtatatcatttctatt

SEQ ID NO: 134061 - DNA, 25 bp, Saccharomyces pastorianus
aaacactaatttcgccagatacctt

SEQ ID NO: 134062 - DNA, 25 bp, Saccharomyces pastorianus
ttacgagtgttttcatagctgcaaa

SEQ ID NO: 134063 - DNA, 25 bp, Saccharomyces pastorianus
attctagtaatacagcggcgagctc

SEQ ID NO: 134064 - DNA, 25 bp, Saccharomyces pastorianus
cgacagttcatacacttccttcaaa

SEQ ID NO: 134065 - DNA, 25 bp, Saccharomyces pastorianus
aatggccgccaagtaagatctaatg

SEQ ID NO: 134066 - DNA, 25 bp, Saccharomyces pastorianus
gcagcagttattcacccggaggcac

SEQ ID NO: 134067 - DNA, 25 bp, Saccharomyces pastorianus
aaggcggttgaatctgcagcagtta

SEQ ID NO: 134068 - DNA, 25 bp, Saccharomyces pastorianus
tacgccagccactgcttgcaaaaaa

SEQ ID NO: 134069 - DNA, 25 bp, Saccharomyces pastorianus
gccccgaaaactgccctgaaataat

SEQ ID NO: 134070 - DNA, 25 bp, Saccharomyces pastorianus
gaaaaaggaccctcctcaatcaagc

SEQ ID NO: 134071 - DNA, 25 bp, Saccharomyces pastorianus
gcacactcttcttcacattttagta

SEQ ID NO: 134072 - DNA, 25 bp, Saccharomyces pastorianus
agaagaatcgctatcctcagatgat

SEQ ID NO: 134073 - DNA, 25 bp, Saccharomyces pastorianus
gtaaatacaacgttcaacagcttta

SEQ ID NO: 134074 - DNA, 25 bp, Saccharomyces pastorianus
gttattgggccacactttcatgacc

SEQ ID NO: 134075 - DNA, 25 bp, Saccharomyces pastorianus
aatcatactgtggacttgaagaact

SEQ ID NO: 134076 - DNA, 25 bp, Saccharomyces pastorianus
gagcaatatcggaatgtgtgtagtc

SEQ ID NO: 134077 - DNA, 25 bp, Saccharomyces pastorianus
aatcaagttgtgaagctggtcaata

SEQ ID NO: 134078 - DNA, 25 bp, Saccharomyces pastorianus
gagggttctgagtttaatcatactg

SEQ ID NO: 134079 - DNA, 25 bp, Saccharomyces pastorianus
acactttcatgacccttcgaatgtt

SEQ ID NO: 134080 - DNA, 25 bp, Saccharomyces pastorianus
gacttagcggatcccaaaaatatgg

SEQ ID NO: 134081 - DNA, 25 bp, Saccharomyces pastorianus
aattaacacctattacgtactcttg

SEQ ID NO: 134082 - DNA, 25 bp, Saccharomyces pastorianus
ggccaatttggttattgggccacac

SEQ ID NO: 134083 - DNA, 25 bp, Saccharomyces pastorianus
ggagcaattaatcaagttggccaat

SEQ ID NO: 134084 - DNA, 25 bp, Saccharomyces pastorianus
gagagatacaattttacaagaacga

SEQ ID NO: 134085 - DNA, 25 bp, Saccharomyces pastorianus
gtgctatccaatttcttttctttat

SEQ ID NO: 134086 - DNA, 25 bp, Saccharomyces pastorianus
tgatgacctcagaatattacaaact

SEQ ID NO: 134087 - DNA, 25 bp, Saccharomyces pastorianus
ttgttccacggaagacgcaaagggc

SEQ ID NO: 134088 - DNA, 25 bp, Saccharomyces pastorianus
atttggaccaacattgttccacgga

SEQ ID NO: 134089 - DNA, 25 bp, Saccharomyces pastorianus
atcgcttgctcttttatttgtgcta

SEQ ID NO: 134090 - DNA, 25 bp, Saccharomyces pastorianus
gcccatctaaaagagcaatgcgttc

SEQ ID NO: 134091 - DNA, 25 bp, Saccharomyces pastorianus
aatgttttgcattatcgcttgctct

SEQ ID NO: 134092 - DNA, 25 bp, Saccharomyces pastorianus
tacgattatttaacagcccatctaa

SEQ ID NO: 134093 - DNA, 25 bp, Saccharomyces pastorianus
gacgcaaagggcaataactaaccta

SEQ ID NO: 134094 - DNA, 25 bp, Saccharomyces pastorianus
tgctcttttatttgtgctatccaat

SEQ ID NO: 134095 - DNA, 25 bp, Saccharomyces pastorianus
gagctatgctttctacattacttga

SEQ ID NO: 134096 - DNA, 25 bp, Saccharomyces pastorianus
attccacaatctttgagggataggt

SEQ ID NO: 134097 - DNA, 25 bp, Saccharomyces pastorianus
atccacttgtggaggcaccaaagga

SEQ ID NO: 134098 - DNA, 25 bp, Saccharomyces pastorianus
ggttcaaccaactcttcagatccaa

SEQ ID NO: 134099 - DNA, 25 bp, Saccharomyces pastorianus
tcgataacgaaattccagatctgtt

SEQ ID NO: 134100 - DNA, 25 bp, Saccharomyces pastorianus
ttacataaggatagcgaatgcgcat

SEQ ID NO: 134101 - DNA, 25 bp, Saccharomyces pastorianus
gagtaatgtctctgcattgttagca

SEQ ID NO: 134102 - DNA, 25 bp, Saccharomyces pastorianus
gagtataacgcgttcggttcaacca

SEQ ID NO: 134103 - DNA, 25 bp, Saccharomyces pastorianus
gtaatatcaaacactagagctatgc

SEQ ID NO: 134104 - DNA, 25 bp, Saccharomyces pastorianus
tgttagcatattccaatccacttgt

SEQ ID NO: 134105 - DNA, 25 bp, Saccharomyces pastorianus
aaactagcgaattatctggtgatga

SEQ ID NO: 134106 - DNA, 25 bp, Saccharomyces pastorianus
tcttccttttcttctcctagagtat

SEQ ID NO: 134107 - DNA, 25 bp, Saccharomyces pastorianus
tgatcagtctccaagtcttcctttt

SEQ ID NO: 134108 - DNA, 25 bp, Saccharomyces pastorianus
aaggagatggctctgacaatcacga

SEQ ID NO: 134109 - DNA, 25 bp, Saccharomyces pastorianus
tctcctagagtatcgtctggtaacg

SEQ ID NO: 134110 - DNA, 25 bp, Saccharomyces pastorianus
tggcgcttaactctaataccagcct

SEQ ID NO: 134111 - DNA, 25 bp, Saccharomyces pastorianus
gctcaggaactattagaacccgttt

SEQ ID NO: 134112 - DNA, 25 bp, Saccharomyces pastorianus
tgatgtgtccagtgcacagcagcgt

SEQ ID NO: 134113 - DNA, 25 bp, Saccharomyces pastorianus
gaacagtggtctacaatactacccc

SEQ ID NO: 134114 - DNA, 25 bp, Saccharomyces pastorianus
tttatccgaacgtgaaatggcgctt

SEQ ID NO: 134115 - DNA, 25 bp, Saccharomyces pastorianus
ggttgcggacccatggatatatcaa

SEQ ID NO: 134116 - DNA, 25 bp, Saccharomyces pastorianus
gttatgaaagcttcctcagacatga

SEQ ID NO: 134117 - DNA, 25 bp, Saccharomyces pastorianus
tgacttggctgttcccgctgagacc

SEQ ID NO: 134118 - DNA, 25 bp, Saccharomyces pastorianus
tagtcccagccctatgattgaacca

SEQ ID NO: 134119 - DNA, 25 bp, Saccharomyces pastorianus
taaagtggacgagtcccgaccttag

SEQ ID NO: 134120 - DNA, 25 bp, Saccharomyces pastorianus
aagaaggaagatgcgctcctccctt

SEQ ID NO: 134121 - DNA, 25 bp, Saccharomyces pastorianus
ggagctagaaccagaactacaccaa

SEQ ID NO: 134122 - DNA, 25 bp, Saccharomyces pastorianus
tacaccaagatcaagacgccattgc

SEQ ID NO: 134123 - DNA, 25 bp, Saccharomyces pastorianus
gctccgactacagcggttccaagaa

SEQ ID NO: 134124 - DNA, 25 bp, Saccharomyces pastorianus
acgacggcagctgacttggctgttc

SEQ ID NO: 134125 - DNA, 25 bp, Saccharomyces pastorianus
gtatgcaagataccacattcaatga

SEQ ID NO: 134126 - DNA, 25 bp, Saccharomyces pastorianus
gattgaaccacaaccggagctagaa

SEQ ID NO: 134127 - DNA, 25 bp, Saccharomyces pastorianus
tcaagacgccattgcaagtgaagtg

SEQ ID NO: 134128 - DNA, 25 bp, Saccharomyces pastorianus
agcggtagtagttaccatcgttaca

SEQ ID NO: 134129 - DNA, 25 bp, Saccharomyces pastorianus
gcagatgatctggaaagcggactcg

SEQ ID NO: 134130 - DNA, 25 bp, Saccharomyces pastorianus
gagcagttagaaggcggagcaccca

SEQ ID NO: 134131 - DNA, 25 bp, Saccharomyces pastorianus
agtggttttaggagtttatgcgtat

SEQ ID NO: 134132 - DNA, 25 bp, Saccharomyces pastorianus
aaagcgcgtcacacaattttagttg

SEQ ID NO: 134133 - DNA, 25 bp, Saccharomyces pastorianus
gtatactagccttccgaacactgaa

SEQ ID NO: 134134 - DNA, 25 bp, Saccharomyces pastorianus
tagacaacatgacagtcccaataag

SEQ ID NO: 134135 - DNA, 25 bp, Saccharomyces pastorianus
gcggagcacccataagtagcacttc

SEQ ID NO: 134136 - DNA, 25 bp, Saccharomyces pastorianus
caataagacagtttcatgggcagat

SEQ ID NO: 134137 - DNA, 25 bp, Saccharomyces pastorianus
gtagcacttctaacaaagcaggatc

SEQ ID NO: 134138 - DNA, 25 bp, Saccharomyces pastorianus
gttaccatcgttacatttttgatag

SEQ ID NO: 134139 - DNA, 25 bp, Saccharomyces pastorianus
gcaagcctattggattggcccaatt

SEQ ID NO: 134140 - DNA, 25 bp, Saccharomyces pastorianus
ctcaggtgttgtataccctccttgt

SEQ ID NO: 134141 - DNA, 25 bp, Saccharomyces pastorianus
aagtatggcgttctcaggtgttgta

SEQ ID NO: 134142 - DNA, 25 bp, Saccharomyces pastorianus
tatggcgttctcaggtgttgtatac

SEQ ID NO: 134143 - DNA, 25 bp, Saccharomyces pastorianus
gtgaatatggtggtgatgtcgcaat

SEQ ID NO: 134144 - DNA, 25 bp, Saccharomyces pastorianus
tggtgatgtcgcaatgtggttaagt

SEQ ID NO: 134145 - DNA, 25 bp, Saccharomyces pastorianus
ggattggcccaattgctgccaaatt

SEQ ID NO: 134146 - DNA, 25 bp, Saccharomyces pastorianus
gcgttctcaggtgttgtataccctc

SEQ ID NO: 134147 - DNA, 25 bp, Saccharomyces pastorianus
atggcgcaagcctattggattggcc

SEQ ID NO: 134148 - DNA, 25 bp, Saccharomyces pastorianus
attggattggcccaattgctgccaa

SEQ ID NO: 134149 - DNA, 25 bp, Saccharomyces pastorianus
caatgtggttaagtatggcgttctc

SEQ ID NO: 134150 - DNA, 25 bp, Saccharomyces pastorianus
gtttcgtcggaatcttaggtctctt

SEQ ID NO: 134151 - DNA, 25 bp, Saccharomyces pastorianus
gaacatttttgcctacctgtttcgt

SEQ ID NO: 134152 - DNA, 25 bp, Saccharomyces pastorianus
ctgttgccatgtcgtataagccttg

SEQ ID NO: 134153 - DNA, 25 bp, Saccharomyces pastorianus
ttttgtgcaaaaatccctcgctggt

SEQ ID NO: 134154 - DNA, 25 bp, Saccharomyces pastorianus
gctggttctggtctattgtttgtac

SEQ ID NO: 134155 - DNA, 25 bp, Saccharomyces pastorianus
attctccatccaactttctagtgtg

SEQ ID NO: 134156 - DNA, 25 bp, Saccharomyces pastorianus
taagccttggtcagtcgagtacgat

SEQ ID NO: 134157 - DNA, 25 bp, Saccharomyces pastorianus
atacgtattcggcagcattctccat

SEQ ID NO: 134158 - DNA, 25 bp, Saccharomyces pastorianus
gtggtctactttgggcaggttttca

SEQ ID NO: 134159 - DNA, 25 bp, Saccharomyces pastorianus
ggaccggaacttgttggatcttcaa

SEQ ID NO: 134160 - DNA, 25 bp, Saccharomyces pastorianus
taggtctcttactagcttctgttgc

SEQ ID NO: 134161 - DNA, 25 bp, Saccharomyces pastorianus
tctggagaaaactactgataacatt

SEQ ID NO: 134162 - DNA, 25 bp, Saccharomyces pastorianus
tggtgctttaaaaatcagacactgc

SEQ ID NO: 134163 - DNA, 25 bp, Saccharomyces pastorianus
gagattctcattgattatttataca

SEQ ID NO: 134164 - DNA, 25 bp, Saccharomyces pastorianus
aatcatacaatagggaggctctact

SEQ ID NO: 134165 - DNA, 25 bp, Saccharomyces pastorianus
gaagacggcgtcatttcggtggaaa

SEQ ID NO: 134166 - DNA, 25 bp, Saccharomyces pastorianus
tttacggtaggccaaaaatcataca

SEQ ID NO: 134167 - DNA, 25 bp, Saccharomyces pastorianus
gaaattctttttgaagccagaacag

SEQ ID NO: 134168 - DNA, 25 bp, Saccharomyces pastorianus
aatattaacatctactggtgcttta

SEQ ID NO: 134169 - DNA, 25 bp, Saccharomyces pastorianus
gaataaacaacagatccgcctaaaa

SEQ ID NO: 134170 - DNA, 25 bp, Saccharomyces pastorianus
acaaatgattgatgaagacggcgtc

SEQ ID NO: 134171 - DNA, 25 bp, Saccharomyces pastorianus
acaaaacgctagcaactggaaggcg

SEQ ID NO: 134172 - DNA, 25 bp, Saccharomyces pastorianus
agaaaattcactctccgcaacaaat

SEQ ID NO: 134173 - DNA, 25 bp, Saccharomyces pastorianus
ttcgacaaccgccagtttgcaaatt

SEQ ID NO: 134174 - DNA, 25 bp, Saccharomyces pastorianus
aatccattcgttctcatcatctaac

SEQ ID NO: 134175 - DNA, 25 bp, Saccharomyces pastorianus
taatggcacaccctaattctgctgc

SEQ ID NO: 134176 - DNA, 25 bp, Saccharomyces pastorianus
taatgctaatcacttctcgccatac

SEQ ID NO: 134177 - DNA, 25 bp, Saccharomyces pastorianus
gagtcatacccgtcatttttcttta

SEQ ID NO: 134178 - DNA, 25 bp, Saccharomyces pastorianus
tatgagccgcaacgctagtatttcc

SEQ ID NO: 134179 - DNA, 25 bp, Saccharomyces pastorianus
aatgaatcttttgtgcctcgtatgc

SEQ ID NO: 134180 - DNA, 25 bp, Saccharomyces pastorianus
gcagcatattggtcaaggcccatat

SEQ ID NO: 134181 - DNA, 25 bp, Saccharomyces pastorianus
gcaccttctttcaattctcaaacta

SEQ ID NO: 134182 - DNA, 25 bp, Saccharomyces pastorianus
tatgcctgccatgaataccgctaga

SEQ ID NO: 134183 - DNA, 25 bp, Saccharomyces pastorianus
atgcagattcgttgagagttataag

SEQ ID NO: 134184 - DNA, 25 bp, Saccharomyces pastorianus
gatttactcttgattctcacgcatc

SEQ ID NO: 134185 - DNA, 25 bp, Saccharomyces pastorianus
ttgtgttttgtcttcctcttttcct

SEQ ID NO: 134186 - DNA, 25 bp, Saccharomyces pastorianus
aggattttactctttatggttatag

SEQ ID NO: 134187 - DNA, 25 bp, Saccharomyces pastorianus
taaattttgtgttttgtcttcctct

SEQ ID NO: 134188 - DNA, 25 bp, Saccharomyces pastorianus
ttgccatcctctgtcgccattgaag

SEQ ID NO: 134189 - DNA, 25 bp, Saccharomyces pastorianus
ttgattctcacgcatctcaggccac

SEQ ID NO: 134190 - DNA, 25 bp, Saccharomyces pastorianus
tcaggccacctggacactgtacatg

SEQ ID NO: 134191 - DNA, 25 bp, Saccharomyces pastorianus
ttttcctgtcctctttttttgccat

SEQ ID NO: 134192 - DNA, 25 bp, Saccharomyces pastorianus
gtcgccattgaagtcgaactttata

SEQ ID NO: 134193 - DNA, 25 bp, Saccharomyces pastorianus
taggtttcattctaaaatcaagcat

SEQ ID NO: 134194 - DNA, 25 bp, Saccharomyces pastorianus
gcaagactcagtagctattaaacca

SEQ ID NO: 134195 - DNA, 25 bp, Saccharomyces pastorianus
atctgtaccgacgttttagctcgtg

SEQ ID NO: 134196 - DNA, 25 bp, Saccharomyces pastorianus
atcaattatgacgttccaggatcgt

SEQ ID NO: 134197 - DNA, 25 bp, Saccharomyces pastorianus
taacgtagatgtgattcatgcagaa

SEQ ID NO: 134198 - DNA, 25 bp, Saccharomyces pastorianus
ggcgtcaatctggtcatcaattatg

SEQ ID NO: 134199 - DNA, 25 bp, Saccharomyces pastorianus
aaagctatcacattctatactaagc

SEQ ID NO: 134200 - DNA, 25 bp, Saccharomyces pastorianus
gggcggtcaggtaaagctatcacat

SEQ ID NO: 134201 - DNA, 25 bp, Saccharomyces pastorianus
acttcaaaggcgtcaatctggtcat

SEQ ID NO: 134202 - DNA, 25 bp, Saccharomyces pastorianus
ttagctcgtggtattgacttcaaag

SEQ ID NO: 134203 - DNA, 25 bp, Saccharomyces pastorianus
gtgtttgatctgtaccgacgtttta

SEQ ID NO: 134204 - DNA, 25 bp, Saccharomyces pastorianus
agcagattactactgtgcctaagat

SEQ ID NO: 134205 - DNA, 25 bp, Saccharomyces pastorianus
aaaggcctctgcaagttgcactctt

SEQ ID NO: 134206 - DNA, 25 bp, Saccharomyces pastorianus
gtgacgatattttgagcgcctgtag

SEQ ID NO: 134207 - DNA, 25 bp, Saccharomyces pastorianus
gcattcttaattccgctggttcagc

SEQ ID NO: 134208 - DNA, 25 bp, Saccharomyces pastorianus
gagcgcctgtagagagccatcgttg

SEQ ID NO: 134209 - DNA, 25 bp, Saccharomyces pastorianus
gagacgttttggcatgtggtcccac

SEQ ID NO: 134210 - DNA, 25 bp, Saccharomyces pastorianus
gtgaatgtattcctgttgctttgaa

SEQ ID NO: 134211 - DNA, 25 bp, Saccharomyces pastorianus
gggttaatcatttcgcctacaaaag

SEQ ID NO: 134212 - DNA, 25 bp, Saccharomyces pastorianus
atgtggtcccacagggtctggtaag

SEQ ID NO: 134213 - DNA, 25 bp, Saccharomyces pastorianus
ctgagcctaccccaattcaatgtga

SEQ ID NO: 134214 - DNA, 25 bp, Saccharomyces pastorianus
gtaaagcgatgttttccgcgaccat

SEQ ID NO: 134215 - DNA, 25 bp, Saccharomyces pastorianus
aagctctcgatctctccaaagttaa

SEQ ID NO: 134216 - DNA, 25 bp, Saccharomyces pastorianus
ctagcagttcgtagattctccaatc

SEQ ID NO: 134217 - DNA, 25 bp, Saccharomyces pastorianus
cttttgccaatgaataaccgccctt

SEQ ID NO: 134218 - DNA, 25 bp, Saccharomyces pastorianus
ggaaagtccttcgaggaaacctatg

SEQ ID NO: 134219 - DNA, 25 bp, Saccharomyces pastorianus
tcaaaatttaccttccattagggat

SEQ ID NO: 134220 - DNA, 25 bp, Saccharomyces pastorianus
tccataaccggtggaacgtcctatt

SEQ ID NO: 134221 - DNA, 25 bp, Saccharomyces pastorianus
gttatgcagcaatgacaaagtcgtt

SEQ ID NO: 134222 - DNA, 25 bp, Saccharomyces pastorianus
gaattacaaaactccataaccggtg

SEQ ID NO: 134223 - DNA, 25 bp, Saccharomyces pastorianus
gattctccaatcaacctgaaagtca

SEQ ID NO: 134224 - DNA, 25 bp, Saccharomyces pastorianus
gattttagaaatccacttttgccaa

SEQ ID NO: 134225 - DNA, 25 bp, Saccharomyces pastorianus
gtcctattttttccactctaacaat

SEQ ID NO: 134226 - DNA, 25 bp, Saccharomyces pastorianus
ggaaacctatgatttcacgtccaat

SEQ ID NO: 134227 - DNA, 25 bp, Saccharomyces pastorianus
gtctctgttaggtcaaatgtgcgct

SEQ ID NO: 134228 - DNA, 25 bp, Saccharomyces pastorianus
caaagtcaatcttcgaaatcggctt

SEQ ID NO: 134229 - DNA, 25 bp, Saccharomyces pastorianus
atcagcagtagcgttttcatcgttg

SEQ ID NO: 134230 - DNA, 25 bp, Saccharomyces pastorianus
tcgaaatcggctttttcacgaacaa

SEQ ID NO: 134231 - DNA, 25 bp, Saccharomyces pastorianus
gaacaaaatgttcaactacgccgtt

SEQ ID NO: 134232 - DNA, 25 bp, Saccharomyces pastorianus
atactattgttattgctcatcagca

SEQ ID NO: 134233 - DNA, 25 bp, Saccharomyces pastorianus
catcgttgggacagtttacattttt

SEQ ID NO: 134234 - DNA, 25 bp, Saccharomyces pastorianus
accgcggcctgtatcatcgttggga

SEQ ID NO: 134235 - DNA, 25 bp, Saccharomyces pastorianus
gctttggcctgcagacataacacaa

SEQ ID NO: 134236 - DNA, 25 bp, Saccharomyces pastorianus
gatatgtttaatgctttggcctgca

SEQ ID NO: 134237 - DNA, 25 bp, Saccharomyces pastorianus
tacgccgttggactgtctctgttag

SEQ ID NO: 134238 - DNA, 25 bp, Saccharomyces pastorianus
agccctagtatatctatggaacctg

SEQ ID NO: 134239 - DNA, 25 bp, Saccharomyces pastorianus
gacatgacaaccacattgccgagtt

SEQ ID NO: 134240 - DNA, 25 bp, Saccharomyces pastorianus
gagtttgaagccacctctgcaaaac

SEQ ID NO: 134241 - DNA, 25 bp, Saccharomyces pastorianus
gatccgcttgagcaaagccctagta

SEQ ID NO: 134242 - DNA, 25 bp, Saccharomyces pastorianus
gatattgacattccattctccatca

SEQ ID NO: 134243 - DNA, 25 bp, Saccharomyces pastorianus
tcaaagggagggtcatgccacagaa

SEQ ID NO: 134244 - DNA, 25 bp, Saccharomyces pastorianus
aatggtcgctcgtcggatgtagaca

SEQ ID NO: 134245 - DNA, 25 bp, Saccharomyces pastorianus
acaatcttgatttggcttccctcga

SEQ ID NO: 134246 - DNA, 25 bp, Saccharomyces pastorianus
gttcttttgggcctaaatggtcgct

SEQ ID NO: 134247 - DNA, 25 bp, Saccharomyces pastorianus
aaggccgacagcattgacaatcttg

SEQ ID NO: 134248 - DNA, 25 bp, Saccharomyces pastorianus
gttgcagatctggacgttcttttgg

SEQ ID NO: 134249 - DNA, 25 bp, Saccharomyces pastorianus
tgttttgatctccaactatacccaa

SEQ ID NO: 134250 - DNA, 25 bp, Saccharomyces pastorianus
tgatcaacaagctttggcacgtgtt

SEQ ID NO: 134251 - DNA, 25 bp, Saccharomyces pastorianus
taggttcaacgatcctgaaggccaa

SEQ ID NO: 134252 - DNA, 25 bp, Saccharomyces pastorianus
aaagcaggtgggtgtggtatcaatt

SEQ ID NO: 134253 - DNA, 25 bp, Saccharomyces pastorianus
tacccaaaccttggacctcattgaa

SEQ ID NO: 134254 - DNA, 25 bp, Saccharomyces pastorianus
agctttggcacgtgtttggagagac

SEQ ID NO: 134255 - DNA, 25 bp, Saccharomyces pastorianus
gttcatcttcctcttaagttctaaa

SEQ ID NO: 134256 - DNA, 25 bp, Saccharomyces pastorianus
gaaggccaagagttcatcttcctct

SEQ ID NO: 134257 - DNA, 25 bp, Saccharomyces pastorianus
tgaaacacacgaaacataccttgta

SEQ ID NO: 134258 - DNA, 25 bp, Saccharomyces pastorianus
ctacagtgctgtacggttggatggt

SEQ ID NO: 134259 - DNA, 25 bp, Saccharomyces pastorianus
tgccgggttcaaaagccagggacgt

SEQ ID NO: 134260 - DNA, 25 bp, Saccharomyces pastorianus
ttacgggtacgctaacttgatctgg

SEQ ID NO: 134261 - DNA, 25 bp, Saccharomyces pastorianus
tgtcgttgcgctgcatactttattc

SEQ ID NO: 134262 - DNA, 25 bp, Saccharomyces pastorianus
caatgggcaattgtggctcttgggt

SEQ ID NO: 134263 - DNA, 25 bp, Saccharomyces pastorianus
aagcgcctgaggactgttcaagcaa

SEQ ID NO: 134264 - DNA, 25 bp, Saccharomyces pastorianus
aaattttcgctgtccatcatcgttg

SEQ ID NO: 134265 - DNA, 25 bp, Saccharomyces pastorianus
atcatcgttgtcgttgcgctgcata

SEQ ID NO: 134266 - DNA, 25 bp, Saccharomyces pastorianus
taacttgatctggatacccgtttgt

SEQ ID NO: 134267 - DNA, 25 bp, Saccharomyces pastorianus
atattggatatgtccaagcgcctga

SEQ ID NO: 134268 - DNA, 25 bp, Saccharomyces pastorianus
agagatgagcactcggagcgcaata

SEQ ID NO: 134269 - DNA, 25 bp, Saccharomyces pastorianus
agtgttcctgaattgatttccgttt

SEQ ID NO: 134270 - DNA, 25 bp, Saccharomyces pastorianus
ggcacagtcgtcttatttcttgaat

SEQ ID NO: 134271 - DNA, 25 bp, Saccharomyces pastorianus
gagacaagtcatagccccacaaaag

SEQ ID NO: 134272 - DNA, 25 bp, Saccharomyces pastorianus
gctattatatgtggtgggtctggta

SEQ ID NO: 134273 - DNA, 25 bp, Saccharomyces pastorianus
aacacagttttactctttccagcga

SEQ ID NO: 134274 - DNA, 25 bp, Saccharomyces pastorianus
tacacggcggaaacacggttagacg

SEQ ID NO: 134275 - DNA, 25 bp, Saccharomyces pastorianus
gacagcaatgacaatacgccagaga

SEQ ID NO: 134276 - DNA, 25 bp, Saccharomyces pastorianus
tgttttcatgtggtcctccctcgtt

SEQ ID NO: 134277 - DNA, 25 bp, Saccharomyces pastorianus
ccctctgtacccgaagaatgttatt

SEQ ID NO: 134278 - DNA, 25 bp, Saccharomyces pastorianus
cctccctcgttattacaattgtcta

SEQ ID NO: 134279 - DNA, 25 bp, Saccharomyces pastorianus
gaagacctttcgatttctaatttca

SEQ ID NO: 134280 - DNA, 25 bp, Saccharomyces pastorianus
tctcaaggcacgaatatagctatta

SEQ ID NO: 134281 - DNA, 25 bp, Saccharomyces pastorianus
tttgccctaccactatttaggcatt

SEQ ID NO: 134282 - DNA, 25 bp, Saccharomyces pastorianus
gagctttcggaaggagaaccccatc

SEQ ID NO: 134283 - DNA, 25 bp, Saccharomyces pastorianus
gttttttgcagtcttgattccattt

SEQ ID NO: 134284 - DNA, 25 bp, Saccharomyces pastorianus
cccaatctacggtctatctcaaaag

SEQ ID NO: 134285 - DNA, 25 bp, Saccharomyces pastorianus
tgagttacaccttgatcccgctgaa

SEQ ID NO: 134286 - DNA, 25 bp, Saccharomyces pastorianus
tggtctatctcattggattggctct

SEQ ID NO: 134287 - DNA, 25 bp, Saccharomyces pastorianus
gaatcccctctcataacgttggtta

SEQ ID NO: 134288 - DNA, 25 bp, Saccharomyces pastorianus
gattccattttattaccattactct

SEQ ID NO: 134289 - DNA, 25 bp, Saccharomyces pastorianus
gacattccgagacacattttgccaa

SEQ ID NO: 134290 - DNA, 25 bp, Saccharomyces pastorianus
atccagatcgtcgtcagcttttaaa

SEQ ID NO: 134291 - DNA, 25 bp, Saccharomyces pastorianus
attactctttgactacccaatctac

SEQ ID NO: 134292 - DNA, 25 bp, Saccharomyces pastorianus
agatcctgcaattcacttaggtata

SEQ ID NO: 134293 - DNA, 25 bp, Saccharomyces pastorianus
aaccagaatgtaccggccaaagatt

SEQ ID NO: 134294 - DNA, 25 bp, Saccharomyces pastorianus
tgcgaccggtccaagctttttagaa

SEQ ID NO: 134295 - DNA, 25 bp, Saccharomyces pastorianus
acgtgcgtgacgtttctaaagccca

SEQ ID NO: 134296 - DNA, 25 bp, Saccharomyces pastorianus
gtgaaggtttattctgctgtcaaga

SEQ ID NO: 134297 - DNA, 25 bp, Saccharomyces pastorianus
gaattttataattactgtggcccat

SEQ ID NO: 134298 - DNA, 25 bp, Saccharomyces pastorianus
gagttaattcattccaaggtaggtg

SEQ ID NO: 134299 - DNA, 25 bp, Saccharomyces pastorianus
acatggcataaatacctcctcaggt

SEQ ID NO: 134300 - DNA, 25 bp, Saccharomyces pastorianus
gacatcttgaacgaggaattccctc

SEQ ID NO: 134301 - DNA, 25 bp, Saccharomyces pastorianus
aaagcccacctagttgcaattgaaa

SEQ ID NO: 134302 - DNA, 25 bp, Saccharomyces pastorianus
aaaggattgcatagttgacaccgcg

SEQ ID NO: 134303 - DNA, 25 bp, Saccharomyces pastorianus
gggcaagatagctacaggtgaacct

SEQ ID NO: 134304 - DNA, 25 bp, Saccharomyces pastorianus
aatgccatcgaagcggagcaagctg

SEQ ID NO: 134305 - DNA, 25 bp, Saccharomyces pastorianus
tgaaacaggcgcttgtgcagacaac

SEQ ID NO: 134306 - DNA, 25 bp, Saccharomyces pastorianus
aagctcgaggtggtcaatatgcaaa

SEQ ID NO: 134307 - DNA, 25 bp, Saccharomyces pastorianus
atagatacgattccatctgcgtctg

SEQ ID NO: 134308 - DNA, 25 bp, Saccharomyces pastorianus
catatctcctaatggtatacctggc

SEQ ID NO: 134309 - DNA, 25 bp, Saccharomyces pastorianus
aaagatgacaatgctgttccagcgt

SEQ ID NO: 134310 - DNA, 25 bp, Saccharomyces pastorianus
tctgcgtctgagattcttgccaaaa

SEQ ID NO: 134311 - DNA, 25 bp, Saccharomyces pastorianus
ggaatccggtaatgcgcaggacaat

SEQ ID NO: 134312 - DNA, 25 bp, Saccharomyces pastorianus
gtgacacgattgctgaactgaaaca

SEQ ID NO: 134313 - DNA, 25 bp, Saccharomyces pastorianus
aactattgatagcaacgcctccatt

SEQ ID NO: 134314 - DNA, 25 bp, Saccharomyces pastorianus
aataccgccgccaatgagatcagtg

SEQ ID NO: 134315 - DNA, 25 bp, Saccharomyces pastorianus
gatcgtaagacattgttcgactcag

SEQ ID NO: 134316 - DNA, 25 bp, Saccharomyces pastorianus
aagacattgttcgactcagcagtat

SEQ ID NO: 134317 - DNA, 25 bp, Saccharomyces pastorianus
ttgttcgactcagcagtatcctttt

SEQ ID NO: 134318 - DNA, 25 bp, Saccharomyces pastorianus
gactcagcagtatcctttttaaagg

SEQ ID NO: 134319 - DNA, 25 bp, Saccharomyces pastorianus
gttcgactcagcagtatccttttta

SEQ ID NO: 134320 - DNA, 25 bp, Saccharomyces pastorianus
cattgttcgactcagcagtatcctt

SEQ ID NO: 134321 - DNA, 25 bp, Saccharomyces pastorianus
tcgactcagcagtatcctttttaaa

SEQ ID NO: 134322 - DNA, 25 bp, Saccharomyces pastorianus
gacattgttcgactcagcagtatcc

SEQ ID NO: 134323 - DNA, 25 bp, Saccharomyces pastorianus
gacgtggtcagtaaagatcgtaaga

SEQ ID NO: 134324 - DNA, 25 bp, Saccharomyces pastorianus
atgagtgacgtggtcagtaaagatc

SEQ ID NO: 134325 - DNA, 25 bp, Saccharomyces pastorianus
gtaagacattgttcgactcagcagt

SEQ ID NO: 134326 - DNA, 25 bp, Saccharomyces pastorianus
cgatatgctttttggcgagaatgat

SEQ ID NO: 134327 - DNA, 25 bp, Saccharomyces pastorianus
aaatgactcagctgaggtgaggcaa

SEQ ID NO: 134328 - DNA, 25 bp, Saccharomyces pastorianus
aagagacattcgtttgcggtacttc

SEQ ID NO: 134329 - DNA, 25 bp, Saccharomyces pastorianus
tcgtttgcggtacttctgcatgaaa

SEQ ID NO: 134330 - DNA, 25 bp, Saccharomyces pastorianus
gctgaagctacccaagacgatgatt

SEQ ID NO: 134331 - DNA, 25 bp, Saccharomyces pastorianus
aaaccgcggaggaagccagtcaact

SEQ ID NO: 134332 - DNA, 25 bp, Saccharomyces pastorianus
tcttctactttcttgtactatatga

SEQ ID NO: 134333 - DNA, 25 bp, Saccharomyces pastorianus
gcatgttttcgattatttcttctac

SEQ ID NO: 134334 - DNA, 25 bp, Saccharomyces pastorianus
gatacaagcactcaagcttacgaag

SEQ ID NO: 134335 - DNA, 25 bp, Saccharomyces pastorianus
tactatatgatgtgaaaaccgcgga

SEQ ID NO: 134336 - DNA, 25 bp, Saccharomyces pastorianus
gggtccctggttctgaaaataagag

SEQ ID NO: 134337 - DNA, 25 bp, Saccharomyces pastorianus
cactaaaatgtgctgagcggcaatt

SEQ ID NO: 134338 - DNA, 25 bp, Saccharomyces pastorianus
gaatcagtatacaacttagcactaa

SEQ ID NO: 134339 - DNA, 25 bp, Saccharomyces pastorianus
tgtgctgagcggcaattgacctcca

SEQ ID NO: 134340 - DNA, 25 bp, Saccharomyces pastorianus
aagttcccgtctttgattcaagagg

SEQ ID NO: 134341 - DNA, 25 bp, Saccharomyces pastorianus
ttaatgaaaagttcccgtctttgat

SEQ ID NO: 134342 - DNA, 25 bp, Saccharomyces pastorianus
gcggcaattgacctccatggaattt

SEQ ID NO: 134343 - DNA, 25 bp, Saccharomyces pastorianus
catggaattttcgaacctttacaag

SEQ ID NO: 134344 - DNA, 25 bp, Saccharomyces pastorianus
tcccgtctttgattcaagaggaaga

SEQ ID NO: 134345 - DNA, 25 bp, Saccharomyces pastorianus
gaaaagttcccgtctttgattcaag

SEQ ID NO: 134346 - DNA, 25 bp, Saccharomyces pastorianus
gacctccatggaattttcgaacctt

SEQ ID NO: 134347 - DNA, 25 bp, Saccharomyces pastorianus
tgagcggcaattgacctccatggaa

SEQ ID NO: 134348 - DNA, 25 bp, Saccharomyces pastorianus
aatatatcccaagtccactttcttc

SEQ ID NO: 134349 - DNA, 25 bp, Saccharomyces pastorianus
caccaattcttttaacttctgccag

SEQ ID NO: 134350 - DNA, 25 bp, Saccharomyces pastorianus
tttaaaactctctccttcaccaatt

SEQ ID NO: 134351 - DNA, 25 bp, Saccharomyces pastorianus
gcgattacttcttccatattccaag

SEQ ID NO: 134352 - DNA, 25 bp, Saccharomyces pastorianus
ggcaacgtcatagtaccgaatatct

SEQ ID NO: 134353 - DNA, 25 bp, Saccharomyces pastorianus
tggaccagttactcacagacttgat

SEQ ID NO: 134354 - DNA, 25 bp, Saccharomyces pastorianus
gaatttgtaggttctccttcattaa

SEQ ID NO: 134355 - DNA, 25 bp, Saccharomyces pastorianus
gggtcttttacgctactaaatcagt

SEQ ID NO: 134356 - DNA, 25 bp, Saccharomyces pastorianus
cactttcttcaacaaaacctccagg

SEQ ID NO: 134357 - DNA, 25 bp, Saccharomyces pastorianus
ggatcagtcaattctgctgccaaat

SEQ ID NO: 134358 - DNA, 25 bp, Saccharomyces pastorianus
gggaaatatcgaacccagacttcct

SEQ ID NO: 134359 - DNA, 25 bp, Saccharomyces pastorianus
atttcaaatctacctaatgtctcag

SEQ ID NO: 134360 - DNA, 25 bp, Saccharomyces pastorianus
tttcttcgccagcagcactaatgaa

SEQ ID NO: 134361 - DNA, 25 bp, Saccharomyces pastorianus
ggcttcgatatttcttacaccttta

SEQ ID NO: 134362 - DNA, 25 bp, Saccharomyces pastorianus
gatgtggcacttaagtatcctgaat

SEQ ID NO: 134363 - DNA, 25 bp, Saccharomyces pastorianus
tggcagaaatggctcaaacggtaat

SEQ ID NO: 134364 - DNA, 25 bp, Saccharomyces pastorianus
aacttttcacattcattgaccacaa

SEQ ID NO: 134365 - DNA, 25 bp, Saccharomyces pastorianus
acatatctgtggtggatgtggcact

SEQ ID NO: 134366 - DNA, 25 bp, Saccharomyces pastorianus
gatatgtgctcttttgtttttcaac

SEQ ID NO: 134367 - DNA, 25 bp, Saccharomyces pastorianus
taatgggtccataacagatcaattg

SEQ ID NO: 134368 - DNA, 25 bp, Saccharomyces pastorianus
acaattctatcattttcttcgccag

SEQ ID NO: 134369 - DNA, 25 bp, Saccharomyces pastorianus
atatctttgtcattttcttgggcaa

SEQ ID NO: 134370 - DNA, 25 bp, Saccharomyces pastorianus
agcaagttcaacaagtcgtcatgga

SEQ ID NO: 134371 - DNA, 25 bp, Saccharomyces pastorianus
gtccatgattggcagactaatccag

SEQ ID NO: 134372 - DNA, 25 bp, Saccharomyces pastorianus
aatgattccgaagtcactcgtgaag

SEQ ID NO: 134373 - DNA, 25 bp, Saccharomyces pastorianus
tgaccgcagctgacactgttatatt

SEQ ID NO: 134374 - DNA, 25 bp, Saccharomyces pastorianus
gattacttgttcgtggtaccatcga

SEQ ID NO: 134375 - DNA, 25 bp, Saccharomyces pastorianus
taggtatcaacctgaccgcagctga

SEQ ID NO: 134376 - DNA, 25 bp, Saccharomyces pastorianus
cagaaatctttgttttcctcctaag

SEQ ID NO: 134377 - DNA, 25 bp, Saccharomyces pastorianus
tattacactggatggttcctcaaag

SEQ ID NO: 134378 - DNA, 25 bp, Saccharomyces pastorianus
gccaaacgaggcaagtcacagtgta

SEQ ID NO: 134379 - DNA, 25 bp, Saccharomyces pastorianus
gaccgtcgagatttggtccatgatt

SEQ ID NO: 134380 - DNA, 25 bp, Saccharomyces pastorianus
atagggcacataggttgggccaaac

SEQ ID NO: 134381 - DNA, 25 bp, Saccharomyces pastorianus
aagttcttggttctagtcatgttac

SEQ ID NO: 134382 - DNA, 25 bp, Saccharomyces pastorianus
aataatgaactgtttgacccgttga

SEQ ID NO: 134383 - DNA, 25 bp, Saccharomyces pastorianus
aggcattatccgatattccagcaat

SEQ ID NO: 134384 - DNA, 25 bp, Saccharomyces pastorianus
ctccggtcaccattgaagttcttgg

SEQ ID NO: 134385 - DNA, 25 bp, Saccharomyces pastorianus
gacccgttgataagtcaggcattat

SEQ ID NO: 134386 - DNA, 25 bp, Saccharomyces pastorianus
caagagctactcgaggttactagaa

SEQ ID NO: 134387 - DNA, 25 bp, Saccharomyces pastorianus
caggtgaaccctcgttgaatgaatt

SEQ ID NO: 134388 - DNA, 25 bp, Saccharomyces pastorianus
ttagagtttctactacacccttact

SEQ ID NO: 134389 - DNA, 25 bp, Saccharomyces pastorianus
acatgcctatgaacgtgagtatctg

SEQ ID NO: 134390 - DNA, 25 bp, Saccharomyces pastorianus
cttccgagggcgtaatggcttcatt

SEQ ID NO: 134391 - DNA, 25 bp, Saccharomyces pastorianus
gttactagaaatgcaccttccgagg

SEQ ID NO: 134392 - DNA, 25 bp, Saccharomyces pastorianus
gatgaagaagatttcgccgcctttg

SEQ ID NO: 134393 - DNA, 25 bp, Saccharomyces pastorianus
ccgcctttgaagaacaggatgacaa

SEQ ID NO: 134394 - DNA, 25 bp, Saccharomyces pastorianus
ctgttgttactgttaatggagacga

SEQ ID NO: 134395 - DNA, 25 bp, Saccharomyces pastorianus
tggcaataacggtgaagacgaagac

SEQ ID NO: 134396 - DNA, 25 bp, Saccharomyces pastorianus
ggatgatcaaactcatgccgatact

SEQ ID NO: 134397 - DNA, 25 bp, Saccharomyces pastorianus
atgccgatactgttgttactgttaa

SEQ ID NO: 134398 - DNA, 25 bp, Saccharomyces pastorianus
tgacgatgaggactttaatcccgat

SEQ ID NO: 134399 - DNA, 25 bp, Saccharomyces pastorianus
gaggactttaatcccgatgtcgaga

SEQ ID NO: 134400 - DNA, 25 bp, Saccharomyces pastorianus
acaacgacaacgacatgaaaacaac

SEQ ID NO: 134401 - DNA, 25 bp, Saccharomyces pastorianus
ggaaatcgaggatcttgatgaagaa

SEQ ID NO: 134402 - DNA, 25 bp, Saccharomyces pastorianus
actcatgccgatactgttgttactg

SEQ ID NO: 134403 - DNA, 25 bp, Saccharomyces pastorianus
gaacctattcagagcgtaaccgaag

SEQ ID NO: 134404 - DNA, 25 bp, Saccharomyces pastorianus
agatgtccacttcaatggtgatgac

SEQ ID NO: 134405 - DNA, 25 bp, Saccharomyces pastorianus
tgacgatatcaattccacacaagtt

SEQ ID NO: 134406 - DNA, 25 bp, Saccharomyces pastorianus
gaggatgacattccacaatccgaat

SEQ ID NO: 134407 - DNA, 25 bp, Saccharomyces pastorianus
gttgctttaaaacctgatgctcaca

SEQ ID NO: 134408 - DNA, 25 bp, Saccharomyces pastorianus
gttggcccgttatcgatcatctgat

SEQ ID NO: 134409 - DNA, 25 bp, Saccharomyces pastorianus
gtgtctttgacgaaggtcctacggg

SEQ ID NO: 134410 - DNA, 25 bp, Saccharomyces pastorianus
ggtcctacgggaatgatatcaactg

SEQ ID NO: 134411 - DNA, 25 bp, Saccharomyces pastorianus
agaaagtttgccaacgcatacggtt

SEQ ID NO: 134412 - DNA, 25 bp, Saccharomyces pastorianus
atttagcgccgtaatcgacaggaga

SEQ ID NO: 134413 - DNA, 25 bp, Saccharomyces pastorianus
aagaatatactccttcaggcttttt

SEQ ID NO: 134414 - DNA, 25 bp, Saccharomyces pastorianus
tgaagtaggcaaaccgcttctctac

SEQ ID NO: 134415 - DNA, 25 bp, Saccharomyces pastorianus
aggtcactcattgggtggcctaatc

SEQ ID NO: 134416 - DNA, 25 bp, Saccharomyces pastorianus
gaatccatccgcaagatttcttttg

SEQ ID NO: 134417 - DNA, 25 bp, Saccharomyces pastorianus
gaggacagtatatgcgaacgctatt

SEQ ID NO: 134418 - DNA, 25 bp, Saccharomyces pastorianus
tggcctaatccaagctttcgcaata

SEQ ID NO: 134419 - DNA, 25 bp, Saccharomyces pastorianus
tatttaggtactcgtttggccgaat

SEQ ID NO: 134420 - DNA, 25 bp, Saccharomyces pastorianus
gtcacagataatcccgcctatatta

SEQ ID NO: 134421 - DNA, 25 bp, Saccharomyces pastorianus
ttactttagcttcaccgcttttagg

SEQ ID NO: 134422 - DNA, 25 bp, Saccharomyces pastorianus
ggaattgtcccattgtatacggcat

SEQ ID NO: 134423 - DNA, 25 bp, Saccharomyces pastorianus
tgtgtcgaccgatctagtgtatatt

SEQ ID NO: 134424 - DNA, 25 bp, Saccharomyces pastorianus
gcttctctacttgctatctggtctg

SEQ ID NO: 134425 - DNA, 25 bp, Saccharomyces pastorianus
acccttggtaatgcggatcctaatt

SEQ ID NO: 134426 - DNA, 25 bp, Saccharomyces pastorianus
ggaccccatttgatggtacttccat

SEQ ID NO: 134427 - DNA, 25 bp, Saccharomyces pastorianus
gtttttatcgcgtccactttacgag

SEQ ID NO: 134428 - DNA, 25 bp, Saccharomyces pastorianus
cactttacgaggactgggctgcaga

SEQ ID NO: 134429 - DNA, 25 bp, Saccharomyces pastorianus
taatcctatgaatacacggcgcaat

SEQ ID NO: 134430 - DNA, 25 bp, Saccharomyces pastorianus
gaacgcatctagtgctgcatcggaa

SEQ ID NO: 134431 - DNA, 25 bp, Saccharomyces pastorianus
aatccggcagcgttgaatttattac

SEQ ID NO: 134432 - DNA, 25 bp, Saccharomyces pastorianus
agagcattttccattgcttctacct

SEQ ID NO: 134433 - DNA, 25 bp, Saccharomyces pastorianus
ttaagcagacacagcacccttggta

SEQ ID NO: 134434 - DNA, 25 bp, Saccharomyces pastorianus
tgagccggaatgtccagtggcatac

SEQ ID NO: 134435 - DNA, 25 bp, Saccharomyces pastorianus
atctcaaatttctcctgattccaca

SEQ ID NO: 134436 - DNA, 25 bp, Saccharomyces pastorianus
aggagatgcccaaccactcattgac

SEQ ID NO: 134437 - DNA, 25 bp, Saccharomyces pastorianus
taccaggctcttcgagttcaggaga

SEQ ID NO: 134438 - DNA, 25 bp, Saccharomyces pastorianus
acaatcagaacaacagccggagcaa

SEQ ID NO: 134439 - DNA, 25 bp, Saccharomyces pastorianus
gtctcaaaggttttccgaagccgct

SEQ ID NO: 134440 - DNA, 25 bp, Saccharomyces pastorianus
actcattgacttagattccactcca

SEQ ID NO: 134441 - DNA, 25 bp, Saccharomyces pastorianus
aactcagaggcagttgaagccgaaa

SEQ ID NO: 134442 - DNA, 25 bp, Saccharomyces pastorianus
atcgctggcgatatacaaggcgcta

SEQ ID NO: 134443 - DNA, 25 bp, Saccharomyces pastorianus
aaggcgctaaagatcttctaatcaa

SEQ ID NO: 134444 - DNA, 25 bp, Saccharomyces pastorianus
aagccgctttccttggatcaacata

SEQ ID NO: 134445 - DNA, 25 bp, Saccharomyces pastorianus
taatgcatattggatcgctggcgat

SEQ ID NO: 134446 - DNA, 25 bp, Saccharomyces pastorianus
gaggaagctccccagcaacaacaat

SEQ ID NO: 134447 - DNA, 25 bp, Saccharomyces pastorianus
aaatttgagctagccttgaaagtcg

SEQ ID NO: 134448 - DNA, 25 bp, Saccharomyces pastorianus
aagtgaatccattacatcaggcaaa

SEQ ID NO: 134449 - DNA, 25 bp, Saccharomyces pastorianus
taacaggctgaactacttcgtaggt

SEQ ID NO: 134450 - DNA, 25 bp, Saccharomyces pastorianus
cagttgacagatgagtgcgccgaga

SEQ ID NO: 134451 - DNA, 25 bp, Saccharomyces pastorianus
actcgtgttggcgatcagttgacag

SEQ ID NO: 134452 - DNA, 25 bp, Saccharomyces pastorianus
tgatgaggcttttgacgtattgtat

SEQ ID NO: 134453 - DNA, 25 bp, Saccharomyces pastorianus
gaagcactgaatatttctcctgatc

SEQ ID NO: 134454 - DNA, 25 bp, Saccharomyces pastorianus
ggtgatgtctttatctttaccacag

SEQ ID NO: 134455 - DNA, 25 bp, Saccharomyces pastorianus
gaaagtcggccaacttactcgtgtt

SEQ ID NO: 134456 - DNA, 25 bp, Saccharomyces pastorianus
atctattgggctatctagcacgtga

SEQ ID NO: 134457 - DNA, 25 bp, Saccharomyces pastorianus
tctttagaggtgctggagttccaaa

SEQ ID NO: 134458 - DNA, 25 bp, Saccharomyces pastorianus
tttcgaaaggacttgcccacattgt

SEQ ID NO: 134459 - DNA, 25 bp, Saccharomyces pastorianus
atgtgcacagaacagctccaatttt

SEQ ID NO: 134460 - DNA, 25 bp, Saccharomyces pastorianus
gatcaggtgcccaagaactcgattt

SEQ ID NO: 134461 - DNA, 25 bp, Saccharomyces pastorianus
aagcctcaacatactctgtcataca

SEQ ID NO: 134462 - DNA, 25 bp, Saccharomyces pastorianus
gaaactcgcacgactctgctattaa

SEQ ID NO: 134463 - DNA, 25 bp, Saccharomyces pastorianus
aacagcttagactgcggcacggcga

SEQ ID NO: 134464 - DNA, 25 bp, Saccharomyces pastorianus
gacaccactctaccgtgcataaagg

SEQ ID NO: 134465 - DNA, 25 bp, Saccharomyces pastorianus
taagtgcgaatctgaccatagtcta

SEQ ID NO: 134466 - DNA, 25 bp, Saccharomyces pastorianus
agcgcatctgctaatatctctaacg

SEQ ID NO: 134467 - DNA, 25 bp, Saccharomyces pastorianus
atccattatcgtacaagcctcaaca

SEQ ID NO: 134468 - DNA, 25 bp, Saccharomyces pastorianus
gagccagctatgtttgatatcgata

SEQ ID NO: 134469 - DNA, 25 bp, Saccharomyces pastorianus
gggtatcaccgcttgaaacattgag

SEQ ID NO: 134470 - DNA, 25 bp, Saccharomyces pastorianus
aatcctccttccaatgcatgttttg

SEQ ID NO: 134471 - DNA, 25 bp, Saccharomyces pastorianus
aaatcgcctgcccatagcaaaaaga

SEQ ID NO: 134472 - DNA, 25 bp, Saccharomyces pastorianus
aaaaacttggcgctctttgcattcg

SEQ ID NO: 134473 - DNA, 25 bp, Saccharomyces pastorianus
gtgaattacgcccagtttgtgagta

SEQ ID NO: 134474 - DNA, 25 bp, Saccharomyces pastorianus
tctttaacagaatcctccttccaat

SEQ ID NO: 134475 - DNA, 25 bp, Saccharomyces pastorianus
aagactgaaagaggccttaccgtga

SEQ ID NO: 134476 - DNA, 25 bp, Saccharomyces pastorianus
gggcactcaacctatgtcgatgatt

SEQ ID NO: 134477 - DNA, 25 bp, Saccharomyces pastorianus
tacgcaattaagtgggtatcaccgc

SEQ ID NO: 134478 - DNA, 25 bp, Saccharomyces pastorianus
aatttcagagaaatcgcctgcccat

SEQ ID NO: 134479 - DNA, 25 bp, Saccharomyces pastorianus
tgcattcgttgtgctcgtatgtggc

SEQ ID NO: 134480 - DNA, 25 bp, Saccharomyces pastorianus
gttatctgtccaatccaaggtgcca

SEQ ID NO: 134481 - DNA, 25 bp, Saccharomyces pastorianus
ctttacccgtggcattgggcaagat

SEQ ID NO: 134482 - DNA, 25 bp, Saccharomyces pastorianus
agatatcactatgaaccgaagttcg

SEQ ID NO: 134483 - DNA, 25 bp, Saccharomyces pastorianus
atatccggcgttgacaggacaaaca

SEQ ID NO: 134484 - DNA, 25 bp, Saccharomyces pastorianus
caaggtgccaatcatgtttacagtg

SEQ ID NO: 134485 - DNA, 25 bp, Saccharomyces pastorianus
aactactgcatattctgcgtacaga

SEQ ID NO: 134486 - DNA, 25 bp, Saccharomyces pastorianus
gacccctatgttactagatatcact

SEQ ID NO: 134487 - DNA, 25 bp, Saccharomyces pastorianus
atattagctatatccggcgttgaca

SEQ ID NO: 134488 - DNA, 25 bp, Saccharomyces pastorianus
atattccctggatttacaaatgggt

SEQ ID NO: 134489 - DNA, 25 bp, Saccharomyces pastorianus
aagatcccagtagacccctatgtta

SEQ ID NO: 134490 - DNA, 25 bp, Saccharomyces pastorianus
gatttgttatccgtaatgacccacc

SEQ ID NO: 134491 - DNA, 25 bp, Saccharomyces pastorianus
tcccgctacattactactctgattt

SEQ ID NO: 134492 - DNA, 25 bp, Saccharomyces pastorianus
atacccacggtcaaggatatttcgc

SEQ ID NO: 134493 - DNA, 25 bp, Saccharomyces pastorianus
aatgcttcgcaacatccgtattacg

SEQ ID NO: 134494 - DNA, 25 bp, Saccharomyces pastorianus
ttcaacttgccctatggtgactgga

SEQ ID NO: 134495 - DNA, 25 bp, Saccharomyces pastorianus
gtccttgacaacttcctgcaatcaa

SEQ ID NO: 134496 - DNA, 25 bp, Saccharomyces pastorianus
atcaagtattcatcacgctacgtgc

SEQ ID NO: 134497 - DNA, 25 bp, Saccharomyces pastorianus
tttattgcaaatccaacgccacggc

SEQ ID NO: 134498 - DNA, 25 bp, Saccharomyces pastorianus
aatgcagacgtcagaccccattacg

SEQ ID NO: 134499 - DNA, 25 bp, Saccharomyces pastorianus
atactgtattcgatactcccatcac

SEQ ID NO: 134500 - DNA, 25 bp, Saccharomyces pastorianus
gaccgctggttaatcgagttcctac

SEQ ID NO: 134501 - DNA, 25 bp, Saccharomyces pastorianus
acagcgcagcacgtattccgaaact

SEQ ID NO: 134502 - DNA, 25 bp, Saccharomyces pastorianus
tgacaaaagggttttattcaagagt

SEQ ID NO: 134503 - DNA, 25 bp, Saccharomyces pastorianus
gacgcccacttttgaattgtatctg

SEQ ID NO: 134504 - DNA, 25 bp, Saccharomyces pastorianus
caagagtgcgagaaaagtagctaat

SEQ ID NO: 134505 - DNA, 25 bp, Saccharomyces pastorianus
atggcattgttgacaaaagggtttt

SEQ ID NO: 134506 - DNA, 25 bp, Saccharomyces pastorianus
gaatggcgtgggtgacgcccacttt

SEQ ID NO: 134507 - DNA, 25 bp, Saccharomyces pastorianus
gtatctgattggaaataatggcatt

SEQ ID NO: 134508 - DNA, 25 bp, Saccharomyces pastorianus
gaaaagtagctaattggtgtcaaaa

SEQ ID NO: 134509 - DNA, 25 bp, Saccharomyces pastorianus
ggtgacgcccacttttgaattgtat

SEQ ID NO: 134510 - DNA, 25 bp, Saccharomyces pastorianus
tgggtgacgcccacttttgaattgt

SEQ ID NO: 134511 - DNA, 25 bp, Saccharomyces pastorianus
gcccacttttgaattgtatctgatt

SEQ ID NO: 134512 - DNA, 25 bp, Saccharomyces pastorianus
gtgacgcccacttttgaattgtatc

SEQ ID NO: 134513 - DNA, 25 bp, Saccharomyces pastorianus
atgttctgatccatcctagtacggt

SEQ ID NO: 134514 - DNA, 25 bp, Saccharomyces pastorianus
atttgtgctcacatcgaagaactac

SEQ ID NO: 134515 - DNA, 25 bp, Saccharomyces pastorianus
tgctgataatatccgctcccaatta

SEQ ID NO: 134516 - DNA, 25 bp, Saccharomyces pastorianus
agaatatcttcgctcatccagacgg

SEQ ID NO: 134517 - DNA, 25 bp, Saccharomyces pastorianus
acataagaactgtgacctcggtcag

SEQ ID NO: 134518 - DNA, 25 bp, Saccharomyces pastorianus
taaattacaggtccctttccgctgc

SEQ ID NO: 134519 - DNA, 25 bp, Saccharomyces pastorianus
ggtatccataagtggtgccgtgacc

SEQ ID NO: 134520 - DNA, 25 bp, Saccharomyces pastorianus
ggtcaggcccgaatggctgattgaa

SEQ ID NO: 134521 - DNA, 25 bp, Saccharomyces pastorianus
gccgtgaccactacctaaattacag

SEQ ID NO: 134522 - DNA, 25 bp, Saccharomyces pastorianus
tagcgcctgcatactacgacttaag

SEQ ID NO: 134523 - DNA, 25 bp, Saccharomyces pastorianus
tagtacggttcttggccacgacgca

SEQ ID NO: 134524 - DNA, 25 bp, Saccharomyces pastorianus
agttgttatctccacgaacatcgct

SEQ ID NO: 134525 - DNA, 25 bp, Saccharomyces pastorianus
gtatggttcattaccaccgcatcaa

SEQ ID NO: 134526 - DNA, 25 bp, Saccharomyces pastorianus
tattgtctacgtcgttgacccagga

SEQ ID NO: 134527 - DNA, 25 bp, Saccharomyces pastorianus
gagcctgctccagagtcacataatg

SEQ ID NO: 134528 - DNA, 25 bp, Saccharomyces pastorianus
gttttgcaaattcatgccactgaag

SEQ ID NO: 134529 - DNA, 25 bp, Saccharomyces pastorianus
ttgagtctttactcgtttcccctat

SEQ ID NO: 134530 - DNA, 25 bp, Saccharomyces pastorianus
ttatcctccaccgttctagaactaa

SEQ ID NO: 134531 - DNA, 25 bp, Saccharomyces pastorianus
atccgtatacccactgtatggttca

SEQ ID NO: 134532 - DNA, 25 bp, Saccharomyces pastorianus
gatgacttggtccatttcgatttta

SEQ ID NO: 134533 - DNA, 25 bp, Saccharomyces pastorianus
gaacatcgctgaaacttctttaaca

SEQ ID NO: 134534 - DNA, 25 bp, Saccharomyces pastorianus
gagggatgcggacctttatccgtat

SEQ ID NO: 134535 - DNA, 25 bp, Saccharomyces pastorianus
tccctttcatgggtttaggaattca

SEQ ID NO: 134536 - DNA, 25 bp, Saccharomyces pastorianus
gaagccaatgaaactaggtatccag

SEQ ID NO: 134537 - DNA, 25 bp, Saccharomyces pastorianus
ttatactacaagtccctttcatggg

SEQ ID NO: 134538 - DNA, 25 bp, Saccharomyces pastorianus
ccttttgtgatggttttgtgtcatt

SEQ ID NO: 134539 - DNA, 25 bp, Saccharomyces pastorianus
ttatggcatatattgttggtgtacg

SEQ ID NO: 134540 - DNA, 25 bp, Saccharomyces pastorianus
actgcagcggtgaatatgccacact

SEQ ID NO: 134541 - DNA, 25 bp, Saccharomyces pastorianus
aactaggtatccagcttatactaca

SEQ ID NO: 134542 - DNA, 25 bp, Saccharomyces pastorianus
gccacactggcattatcaacaagga

SEQ ID NO: 134543 - DNA, 25 bp, Saccharomyces pastorianus
gattgggtaactatggaaggactat

SEQ ID NO: 134544 - DNA, 25 bp, Saccharomyces pastorianus
ggactatttccttttgtgatggttt

SEQ ID NO: 134545 - DNA, 25 bp, Saccharomyces pastorianus
atcaacaaggagctgttcatttaat

SEQ ID NO: 134546 - DNA, 25 bp, Saccharomyces pastorianus
agccagtctggcacatatctgcagt

SEQ ID NO: 134547 - DNA, 25 bp, Saccharomyces pastorianus
agtaacagaaaagtttcctactcat

SEQ ID NO: 134548 - DNA, 25 bp, Saccharomyces pastorianus
ctggcacatatctgcagtaacagaa

SEQ ID NO: 134549 - DNA, 25 bp, Saccharomyces pastorianus
gccagtctggcacatatctgcagta

SEQ ID NO: 134550 - DNA, 25 bp, Saccharomyces pastorianus
acctgagccagtctggcacatatct

SEQ ID NO: 134551 - DNA, 25 bp, Saccharomyces pastorianus
tgccacctgagccagtctggcacat

SEQ ID NO: 134552 - DNA, 25 bp, Saccharomyces pastorianus
ccagtctggcacatatctgcagtaa

SEQ ID NO: 134553 - DNA, 25 bp, Saccharomyces pastorianus
gtctggcacatatctgcagtaacag

SEQ ID NO: 134554 - DNA, 25 bp, Saccharomyces pastorianus
ggcacatatctgcagtaacagaaaa

SEQ ID NO: 134555 - DNA, 25 bp, Saccharomyces pastorianus
gagccagtctggcacatatctgcag

SEQ ID NO: 134556 - DNA, 25 bp, Saccharomyces pastorianus
cagtctggcacatatctgcagtaac

SEQ ID NO: 134557 - DNA, 25 bp, Saccharomyces pastorianus
tctggtttggtcaagcattttcctt

SEQ ID NO: 134558 - DNA, 25 bp, Saccharomyces pastorianus
cgactccctatatgtctctacaatt

SEQ ID NO: 134559 - DNA, 25 bp, Saccharomyces pastorianus
gccaccaaaggactctaaggccggt

SEQ ID NO: 134560 - DNA, 25 bp, Saccharomyces pastorianus
aaagttgaatttgtcgagccaccaa

SEQ ID NO: 134561 - DNA, 25 bp, Saccharomyces pastorianus
taaggccggtgacaaggtgttcttt

SEQ ID NO: 134562 - DNA, 25 bp, Saccharomyces pastorianus
gccatccgcaatagatttccgtgtt

SEQ ID NO: 134563 - DNA, 25 bp, Saccharomyces pastorianus
cggtgacgaagctccaatgaagcaa

SEQ ID NO: 134564 - DNA, 25 bp, Saccharomyces pastorianus
aaggcagctaagaaggccgccaacg

SEQ ID NO: 134565 - DNA, 25 bp, Saccharomyces pastorianus
actgctatggtattgtgtggttcta

SEQ ID NO: 134566 - DNA, 25 bp, Saccharomyces pastorianus
gagaggtattaaatccactgctatg

SEQ ID NO: 134567 - DNA, 25 bp, Saccharomyces pastorianus
attttcctttggacgctatgcaaga

SEQ ID NO: 134568 - DNA, 25 bp, Saccharomyces pastorianus
aatgttccagttatcgtcaaagcta

SEQ ID NO: 134569 - DNA, 25 bp, Saccharomyces pastorianus
ggaaactgctccagttattgacact

SEQ ID NO: 134570 - DNA, 25 bp, Saccharomyces pastorianus
gttccagttatcgtcaaagctagat

SEQ ID NO: 134571 - DNA, 25 bp, Saccharomyces pastorianus
ccaaatgttccagttatcgtcaaag

SEQ ID NO: 134572 - DNA, 25 bp, Saccharomyces pastorianus
tacctgaaatctgcttccaaggaaa

SEQ ID NO: 134573 - DNA, 25 bp, Saccharomyces pastorianus
gtcaaagctagattcgtctccaagt

SEQ ID NO: 134574 - DNA, 25 bp, Saccharomyces pastorianus
actgctccagttattgacactttgg

SEQ ID NO: 134575 - DNA, 25 bp, Saccharomyces pastorianus
tatcgtcaaagctagattcgtctcc

SEQ ID NO: 134576 - DNA, 25 bp, Saccharomyces pastorianus
ctgaaatctgcttccaaggaaactg

SEQ ID NO: 134577 - DNA, 25 bp, Saccharomyces pastorianus
aaagctagattcgtctccaagttgg

SEQ ID NO: 134578 - DNA, 25 bp, Saccharomyces pastorianus
agctagattcgtctccaagttggct

SEQ ID NO: 134579 - DNA, 25 bp, Saccharomyces pastorianus
gtgatattacacctaatgacccaat

SEQ ID NO: 134580 - DNA, 25 bp, Saccharomyces pastorianus
gtatcagaatcgcacttgttcacga

SEQ ID NO: 134581 - DNA, 25 bp, Saccharomyces pastorianus
gggaaattcttgatgactggttagc

SEQ ID NO: 134582 - DNA, 25 bp, Saccharomyces pastorianus
taccatgctgattacggacaagaat

SEQ ID NO: 134583 - DNA, 25 bp, Saccharomyces pastorianus
aaatggacacaatctttactggaag

SEQ ID NO: 134584 - DNA, 25 bp, Saccharomyces pastorianus
aaggccctgcagtgaaagcgcatct

SEQ ID NO: 134585 - DNA, 25 bp, Saccharomyces pastorianus
tgggtttaactaccatgctgattac

SEQ ID NO: 134586 - DNA, 25 bp, Saccharomyces pastorianus
gaaactgtcaagtatctctgtgaaa

SEQ ID NO: 134587 - DNA, 25 bp, Saccharomyces pastorianus
gttcacgattttgcggagtcattag

SEQ ID NO: 134588 - DNA, 25 bp, Saccharomyces pastorianus
gaaagcgcatctagggaaattcttg

SEQ ID NO: 134589 - DNA, 25 bp, Saccharomyces pastorianus
gaaagcataataaggccctgcagtg

SEQ ID NO: 134590 - DNA, 25 bp, Saccharomyces pastorianus
gtggaagacggtgcgcttgttacaa

SEQ ID NO: 134591 - DNA, 25 bp, Saccharomyces pastorianus
gtccggtggtgttaagctgtctgat

SEQ ID NO: 134592 - DNA, 25 bp, Saccharomyces pastorianus
ctagcgctacctgataacgttgtta

SEQ ID NO: 134593 - DNA, 25 bp, Saccharomyces pastorianus
ggcgaaaaccattgctttgctttaa

SEQ ID NO: 134594 - DNA, 25 bp, Saccharomyces pastorianus
agtcgcggtagctcagaatggcatt

SEQ ID NO: 134595 - DNA, 25 bp, Saccharomyces pastorianus
gtgtggaggccaattttccgtgtcc

SEQ ID NO: 134596 - DNA, 25 bp, Saccharomyces pastorianus
tgatcctatcccaagatggcgattt

SEQ ID NO: 134597 - DNA, 25 bp, Saccharomyces pastorianus
gggtctcaccattcagtcgcggtag

SEQ ID NO: 134598 - DNA, 25 bp, Saccharomyces pastorianus
ggacgacactgaagttccaaccaga

SEQ ID NO: 134599 - DNA, 25 bp, Saccharomyces pastorianus
ggattaggcccttctgaggacgaca

SEQ ID NO: 134600 - DNA, 25 bp, Saccharomyces pastorianus
ggtgaacatcactcattgatcctat

SEQ ID NO: 134601 - DNA, 25 bp, Saccharomyces pastorianus
tgaagaaagcatgtatggtcctggg

SEQ ID NO: 134602 - DNA, 25 bp, Saccharomyces pastorianus
taaacccatttttacctcgcgatga

SEQ ID NO: 134603 - DNA, 25 bp, Saccharomyces pastorianus
tgggttgggtccactagccaaaaat

SEQ ID NO: 134604 - DNA, 25 bp, Saccharomyces pastorianus
gcagagatacttccaacgccaagga

SEQ ID NO: 134605 - DNA, 25 bp, Saccharomyces pastorianus
aacgccaaggaacaactcaaggaca

SEQ ID NO: 134606 - DNA, 25 bp, Saccharomyces pastorianus
atgcacaccttagcccttgatgaag

SEQ ID NO: 134607 - DNA, 25 bp, Saccharomyces pastorianus
tgagcttgggttgggtccactagcc

SEQ ID NO: 134608 - DNA, 25 bp, Saccharomyces pastorianus
ggtgcgttgggcagagatacttcca

SEQ ID NO: 134609 - DNA, 25 bp, Saccharomyces pastorianus
caactcaaggacatggacgccgatg

SEQ ID NO: 134610 - DNA, 25 bp, Saccharomyces pastorianus
ccaaccattggatatattttgctgg

SEQ ID NO: 134611 - DNA, 25 bp, Saccharomyces pastorianus
agtcggtggtatgcacaccttagcc

SEQ ID NO: 134612 - DNA, 25 bp, Saccharomyces pastorianus
aagcactgtcgtgaagtggccgcat

SEQ ID NO: 134613 - DNA, 25 bp, Saccharomyces pastorianus
ttgtaatgttatgtcccaagagatt

SEQ ID NO: 134614 - DNA, 25 bp, Saccharomyces pastorianus
gaaggccaaattgcttgagctcccc

SEQ ID NO: 134615 - DNA, 25 bp, Saccharomyces pastorianus
gttatgtcccaagagattgtatcaa

SEQ ID NO: 134616 - DNA, 25 bp, Saccharomyces pastorianus
acaatccttcaataggcgattcgaa

SEQ ID NO: 134617 - DNA, 25 bp, Saccharomyces pastorianus
actgtcgtgaagtggccgcatgttg

SEQ ID NO: 134618 - DNA, 25 bp, Saccharomyces pastorianus
tgaagtggccgcatgttgtaatgtt

SEQ ID NO: 134619 - DNA, 25 bp, Saccharomyces pastorianus
atgatcagtataagcactgtcgtga

SEQ ID NO: 134620 - DNA, 25 bp, Saccharomyces pastorianus
taggcgattcgaaggccaaattgct

SEQ ID NO: 134621 - DNA, 25 bp, Saccharomyces pastorianus
ctagggcagccagaaaaggcatact

SEQ ID NO: 134622 - DNA, 25 bp, Saccharomyces pastorianus
ggagaaaaacaatccttcaataggc

SEQ ID NO: 134623 - DNA, 25 bp, Saccharomyces pastorianus
atgaggctacattcgcatttgccgc

SEQ ID NO: 134624 - DNA, 25 bp, Saccharomyces pastorianus
agatcccttcgcaattgatattcaa

SEQ ID NO: 134625 - DNA, 25 bp, Saccharomyces pastorianus
gaattcagttggttgtgccttttga

SEQ ID NO: 134626 - DNA, 25 bp, Saccharomyces pastorianus
gacaagttttctttaccctatgatg

SEQ ID NO: 134627 - DNA, 25 bp, Saccharomyces pastorianus
gttattttccaactatatgctgcta

SEQ ID NO: 134628 - DNA, 25 bp, Saccharomyces pastorianus
gaatttgacactgtgctacggccag

SEQ ID NO: 134629 - DNA, 25 bp, Saccharomyces pastorianus
gtacaaaatctactcctgggttcgt

SEQ ID NO: 134630 - DNA, 25 bp, Saccharomyces pastorianus
gaatctcttgtgcaatcgcatttag

SEQ ID NO: 134631 - DNA, 25 bp, Saccharomyces pastorianus
agagcctctaccaatgatcacattt

SEQ ID NO: 134632 - DNA, 25 bp, Saccharomyces pastorianus
cctgggttcgtcttatgatttggca

SEQ ID NO: 134633 - DNA, 25 bp, Saccharomyces pastorianus
aattacatggccactctctttttgt

SEQ ID NO: 134634 - DNA, 25 bp, Saccharomyces pastorianus
taatgttcctatggcggtggctgac

SEQ ID NO: 134635 - DNA, 25 bp, Saccharomyces pastorianus
agatctattacgtcttctctatcag

SEQ ID NO: 134636 - DNA, 25 bp, Saccharomyces pastorianus
attcgttttcttcctcagtttcagg

SEQ ID NO: 134637 - DNA, 25 bp, Saccharomyces pastorianus
agggccgacttgacagagctgcgta

SEQ ID NO: 134638 - DNA, 25 bp, Saccharomyces pastorianus
aaacagcaactttcctcagaatggt

SEQ ID NO: 134639 - DNA, 25 bp, Saccharomyces pastorianus
aagatgacttctttggctccaaatg

SEQ ID NO: 134640 - DNA, 25 bp, Saccharomyces pastorianus
cactcgcctcacagtcaagtttagt

SEQ ID NO: 134641 - DNA, 25 bp, Saccharomyces pastorianus
ggttcagctcccttagtagatgact

SEQ ID NO: 134642 - DNA, 25 bp, Saccharomyces pastorianus
aagccactcagaaaagcacgtcacc

SEQ ID NO: 134643 - DNA, 25 bp, Saccharomyces pastorianus
gtcagatgcggaacccaaaccaatt

SEQ ID NO: 134644 - DNA, 25 bp, Saccharomyces pastorianus
tcagtttcagggaacgctcctttac

SEQ ID NO: 134645 - DNA, 25 bp, Saccharomyces pastorianus
gaaaagagcctacaccatggaaact

SEQ ID NO: 134646 - DNA, 25 bp, Saccharomyces pastorianus
aacagaatctattccctttctatag

SEQ ID NO: 134647 - DNA, 25 bp, Saccharomyces pastorianus
ccctttctatagattgtggcccaaa

SEQ ID NO: 134648 - DNA, 25 bp, Saccharomyces pastorianus
gagcctacaccatggaaactttatt

SEQ ID NO: 134649 - DNA, 25 bp, Saccharomyces pastorianus
taaatctaccatgcgtcaatccaac

SEQ ID NO: 134650 - DNA, 25 bp, Saccharomyces pastorianus
gggatgtccaaactgacttccacac

SEQ ID NO: 134651 - DNA, 25 bp, Saccharomyces pastorianus
aggaaatggcaaccccagcgaacaa

SEQ ID NO: 134652 - DNA, 25 bp, Saccharomyces pastorianus
agggccccctcatagtaatcatgaa

SEQ ID NO: 134653 - DNA, 25 bp, Saccharomyces pastorianus
taccatgcgtcaatccaactacggg

SEQ ID NO: 134654 - DNA, 25 bp, Saccharomyces pastorianus
gacttccacaccttacgtgactgga

SEQ ID NO: 134655 - DNA, 25 bp, Saccharomyces pastorianus
atgaccaaatggaacggcactattt

SEQ ID NO: 134656 - DNA, 25 bp, Saccharomyces pastorianus
acaaactacaattcagctactacaa

SEQ ID NO: 134657 - DNA, 25 bp, Saccharomyces pastorianus
gatagaggtcaacttccgtgctttt

SEQ ID NO: 134658 - DNA, 25 bp, Saccharomyces pastorianus
tatactgcaattacgtgacggcccc

SEQ ID NO: 134659 - DNA, 25 bp, Saccharomyces pastorianus
gatgatctcatgaatctatgggtgg

SEQ ID NO: 134660 - DNA, 25 bp, Saccharomyces pastorianus
caacttccgtgctttttggcaacaa

SEQ ID NO: 134661 - DNA, 25 bp, Saccharomyces pastorianus
aaaatgtaagtgtctcgagggagtt

SEQ ID NO: 134662 - DNA, 25 bp, Saccharomyces pastorianus
gaaaacactttgaaatctaaccttg

SEQ ID NO: 134663 - DNA, 25 bp, Saccharomyces pastorianus
gtacccatttctgtttatgattcac

SEQ ID NO: 134664 - DNA, 25 bp, Saccharomyces pastorianus
aaagattttccagactaaagcaagt

SEQ ID NO: 134665 - DNA, 25 bp, Saccharomyces pastorianus
atccagcagtggaaacagtacccat

SEQ ID NO: 134666 - DNA, 25 bp, Saccharomyces pastorianus
gtgacggccccttcataaaagatca

SEQ ID NO: 134667 - DNA, 25 bp, Saccharomyces pastorianus
gaagagttcaacgagctcactgaaa

SEQ ID NO: 134668 - DNA, 25 bp, Saccharomyces pastorianus
aatcccaggacacttctactttatg

SEQ ID NO: 134669 - DNA, 25 bp, Saccharomyces pastorianus
aatgatccaagaccaagttcagtat

SEQ ID NO: 134670 - DNA, 25 bp, Saccharomyces pastorianus
gataaactcacatccaaactactcc

SEQ ID NO: 134671 - DNA, 25 bp, Saccharomyces pastorianus
agagctctcattcgctactgatgaa

SEQ ID NO: 134672 - DNA, 25 bp, Saccharomyces pastorianus
gttatcaaaggtcactagccaatgt

SEQ ID NO: 134673 - DNA, 25 bp, Saccharomyces pastorianus
gcgaacatgcaacaagccaatgaat

SEQ ID NO: 134674 - DNA, 25 bp, Saccharomyces pastorianus
gaattgcgaacaaccctccaaaaca

SEQ ID NO: 134675 - DNA, 25 bp, Saccharomyces pastorianus
aaggcagcagtatgattcgaagtta

SEQ ID NO: 134676 - DNA, 25 bp, Saccharomyces pastorianus
caagttggaagcagagagctctcat

SEQ ID NO: 134677 - DNA, 25 bp, Saccharomyces pastorianus
gtcaattacacgtactcgaaagtca

SEQ ID NO: 134678 - DNA, 25 bp, Saccharomyces pastorianus
aacagtactgctatttggtatttgc

SEQ ID NO: 134679 - DNA, 25 bp, Saccharomyces pastorianus
gtcgtccctgtatttgcagcattat

SEQ ID NO: 134680 - DNA, 25 bp, Saccharomyces pastorianus
gcagcattattcatggcgccaacaa

SEQ ID NO: 134681 - DNA, 25 bp, Saccharomyces pastorianus
atcggtcgtaaagatatcgttcggt

SEQ ID NO: 134682 - DNA, 25 bp, Saccharomyces pastorianus
gtaaagcacacctctaactctttgc

SEQ ID NO: 134683 - DNA, 25 bp, Saccharomyces pastorianus
taactctttgcctttatctaccgga

SEQ ID NO: 134684 - DNA, 25 bp, Saccharomyces pastorianus
acttgcatcggtacgatcggtcgta

SEQ ID NO: 134685 - DNA, 25 bp, Saccharomyces pastorianus
ttatctaccggaacagtactgctat

SEQ ID NO: 134686 - DNA, 25 bp, Saccharomyces pastorianus
ttccagcgctgttcgtaaagcacac

SEQ ID NO: 134687 - DNA, 25 bp, Saccharomyces pastorianus
gcgccaacaatacagctgtcttttt

SEQ ID NO: 134688 - DNA, 25 bp, Saccharomyces pastorianus
ggagcatcgctcacgtttgactcat

SEQ ID NO: 134689 - DNA, 25 bp, Saccharomyces pastorianus
gctttaatgaccacagctattccac

SEQ ID NO: 134690 - DNA, 25 bp, Saccharomyces pastorianus
gataatgacaccgagcacgcaagta

SEQ ID NO: 134691 - DNA, 25 bp, Saccharomyces pastorianus
ccttcctcacggtagatgatcacac

SEQ ID NO: 134692 - DNA, 25 bp, Saccharomyces pastorianus
gtgagtgataacctgccaagcttta

SEQ ID NO: 134693 - DNA, 25 bp, Saccharomyces pastorianus
gatgatcacacactaaacgacaata

SEQ ID NO: 134694 - DNA, 25 bp, Saccharomyces pastorianus
ggaagcagattaacgcccttcctca

SEQ ID NO: 134695 - DNA, 25 bp, Saccharomyces pastorianus
ccgatataaagttcagcgccactga

SEQ ID NO: 134696 - DNA, 25 bp, Saccharomyces pastorianus
agtacaagtgtcaatcaaggcgaaa

SEQ ID NO: 134697 - DNA, 25 bp, Saccharomyces pastorianus
acacggcgcccgagaacgctaagaa

SEQ ID NO: 134698 - DNA, 25 bp, Saccharomyces pastorianus
aatacaggacccgacagagtacaac

SEQ ID NO: 134699 - DNA, 25 bp, Saccharomyces pastorianus
taccggaaccggctatagtcgaaat

SEQ ID NO: 134700 - DNA, 25 bp, Saccharomyces pastorianus
gagtgagaatccaagcctaacgccc

SEQ ID NO: 134701 - DNA, 25 bp, Saccharomyces pastorianus
gattttaggccttttacctcgcgag

SEQ ID NO: 134702 - DNA, 25 bp, Saccharomyces pastorianus
gctgtcaacgttaatagccctggtt

SEQ ID NO: 134703 - DNA, 25 bp, Saccharomyces pastorianus
atagagccaattcctcgacatcgag

SEQ ID NO: 134704 - DNA, 25 bp, Saccharomyces pastorianus
taataccaaccttgccaacaatctc

SEQ ID NO: 134705 - DNA, 25 bp, Saccharomyces pastorianus
gatttacgatgctctctgatgatga

SEQ ID NO: 134706 - DNA, 25 bp, Saccharomyces pastorianus
cttcctcgacaaacactaattccaa

SEQ ID NO: 134707 - DNA, 25 bp, Saccharomyces pastorianus
tggctcgccaataaggccctataaa

SEQ ID NO: 134708 - DNA, 25 bp, Saccharomyces pastorianus
atggttcacatactttctcctggat

SEQ ID NO: 134709 - DNA, 25 bp, Saccharomyces pastorianus
ttacctcgcgagatcctaataacca

SEQ ID NO: 134710 - DNA, 25 bp, Saccharomyces pastorianus
agcctaacgccctttgatatcgaat

SEQ ID NO: 134711 - DNA, 25 bp, Saccharomyces pastorianus
tgtcgtattgcccactaacagtaat

SEQ ID NO: 134712 - DNA, 25 bp, Saccharomyces pastorianus
atttgcccattccaacagctacaat

SEQ ID NO: 134713 - DNA, 25 bp, Saccharomyces pastorianus
aaaggccatgcttaccctctgtaaa

SEQ ID NO: 134714 - DNA, 25 bp, Saccharomyces pastorianus
ggacaataaccattcacatcagcta

SEQ ID NO: 134715 - DNA, 25 bp, Saccharomyces pastorianus
aatgttacttcatcagcatcctctt

SEQ ID NO: 134716 - DNA, 25 bp, Saccharomyces pastorianus
gatcaaacatcctccataaagccaa

SEQ ID NO: 134717 - DNA, 25 bp, Saccharomyces pastorianus
atgccacagtaaccaatgggcctca

SEQ ID NO: 134718 - DNA, 25 bp, Saccharomyces pastorianus
atcctcttcaactgtatcgtccata

SEQ ID NO: 134719 - DNA, 25 bp, Saccharomyces pastorianus
cgtccatatcccttgattcatcgaa

SEQ ID NO: 134720 - DNA, 25 bp, Saccharomyces pastorianus
aatcccctgtgattgtggtttaaca

SEQ ID NO: 134721 - DNA, 25 bp, Saccharomyces pastorianus
aatatgcgagtccttctaatgccac

SEQ ID NO: 134722 - DNA, 25 bp, Saccharomyces pastorianus
ctgaggctgctaatcgtgacgaaac

SEQ ID NO: 134723 - DNA, 25 bp, Saccharomyces pastorianus
gaggaggttactctatctcatgccc

SEQ ID NO: 134724 - DNA, 25 bp, Saccharomyces pastorianus
gtgtaccgataatgccaactctacc

SEQ ID NO: 134725 - DNA, 25 bp, Saccharomyces pastorianus
gatgattagatctcctgaggctgct

SEQ ID NO: 134726 - DNA, 25 bp, Saccharomyces pastorianus
taatatgtttttctgccgccaagca

SEQ ID NO: 134727 - DNA, 25 bp, Saccharomyces pastorianus
gatttgggtctgttaacactcatca

SEQ ID NO: 134728 - DNA, 25 bp, Saccharomyces pastorianus
gatcgcatggcttccattcatagca

SEQ ID NO: 134729 - DNA, 25 bp, Saccharomyces pastorianus
attaccacggcctttttgcagatgt

SEQ ID NO: 134730 - DNA, 25 bp, Saccharomyces pastorianus
gttgaccgaaattactcttctgagg

SEQ ID NO: 134731 - DNA, 25 bp, Saccharomyces pastorianus
aagcacatcttttacgttcatcttt

SEQ ID NO: 134732 - DNA, 25 bp, Saccharomyces pastorianus
gaatcctgggaataccgctaatagt

SEQ ID NO: 134733 - DNA, 25 bp, Saccharomyces pastorianus
catttctggtattgttcacgacgta

SEQ ID NO: 134734 - DNA, 25 bp, Saccharomyces pastorianus
accacgaattcccaactgattacag

SEQ ID NO: 134735 - DNA, 25 bp, Saccharomyces pastorianus
agggtttggttatcatttctggtat

SEQ ID NO: 134736 - DNA, 25 bp, Saccharomyces pastorianus
aaggacgctaccaaggctttcagtg

SEQ ID NO: 134737 - DNA, 25 bp, Saccharomyces pastorianus
cgtcactcaaatgccgctcaaaatg

SEQ ID NO: 134738 - DNA, 25 bp, Saccharomyces pastorianus
acaaaccttcttggctaagtctaag

SEQ ID NO: 134739 - DNA, 25 bp, Saccharomyces pastorianus
ggtgtctaccgtcactcaaatgccg

SEQ ID NO: 134740 - DNA, 25 bp, Saccharomyces pastorianus
gttggtctagcatacgacttgaaga

SEQ ID NO: 134741 - DNA, 25 bp, Saccharomyces pastorianus
ggttatcatctatttgacttcttta

SEQ ID NO: 134742 - DNA, 25 bp, Saccharomyces pastorianus
aaactgcattaggtaaggacgctac

SEQ ID NO: 134743 - DNA, 25 bp, Saccharomyces pastorianus
gacttctttagttggtctagcatac

SEQ ID NO: 134744 - DNA, 25 bp, Saccharomyces pastorianus
agcagtggcattgtcgacgaagtcg

SEQ ID NO: 134745 - DNA, 25 bp, Saccharomyces pastorianus
tccaaaggatgactctgccagcagt

SEQ ID NO: 134746 - DNA, 25 bp, Saccharomyces pastorianus
gccaacttctggaactactattgaa

SEQ ID NO: 134747 - DNA, 25 bp, Saccharomyces pastorianus
atgccaacttctggaactactattg

SEQ ID NO: 134748 - DNA, 25 bp, Saccharomyces pastorianus
tggaactactattgaattgattgac

SEQ ID NO: 134749 - DNA, 25 bp, Saccharomyces pastorianus
gtcgacttaacggaagctaatattt

SEQ ID NO: 134750 - DNA, 25 bp, Saccharomyces pastorianus
gccagcagtggcattgtcgacgaag

SEQ ID NO: 134751 - DNA, 25 bp, Saccharomyces pastorianus
ggatgactctgccagcagtggcatt

SEQ ID NO: 134752 - DNA, 25 bp, Saccharomyces pastorianus
gacgaagtcgacttaacggaagcta

SEQ ID NO: 134753 - DNA, 25 bp, Saccharomyces pastorianus
tgaattgattgacgaccaatttcca

SEQ ID NO: 134754 - DNA, 25 bp, Saccharomyces pastorianus
ggaagctaatattttggctactggt

SEQ ID NO: 134755 - DNA, 25 bp, Saccharomyces pastorianus
aacgttgcagtttcaatctagagtt

SEQ ID NO: 134756 - DNA, 25 bp, Saccharomyces pastorianus
gataaagtcagtgtaccgtcggaag

SEQ ID NO: 134757 - DNA, 25 bp, Saccharomyces pastorianus
gatagtgacgatgttccagttccaa

SEQ ID NO: 134758 - DNA, 25 bp, Saccharomyces pastorianus
gaacgacgagatccgaacagcagca

SEQ ID NO: 134759 - DNA, 25 bp, Saccharomyces pastorianus
ggttggccccattaaatgcatatga

SEQ ID NO: 134760 - DNA, 25 bp, Saccharomyces pastorianus
gaatttaagagattggttggcccca

SEQ ID NO: 134761 - DNA, 25 bp, Saccharomyces pastorianus
gttccagttccaaagtattcgccaa

SEQ ID NO: 134762 - DNA, 25 bp, Saccharomyces pastorianus
agagtttatctgaaagtgccccttg

SEQ ID NO: 134763 - DNA, 25 bp, Saccharomyces pastorianus
ggtatgtccatagaaaccgtcatag

SEQ ID NO: 134764 - DNA, 25 bp, Saccharomyces pastorianus
ttgatgcattttcgacccttactac

SEQ ID NO: 134765 - DNA, 25 bp, Saccharomyces pastorianus
ggctcctcaaaattctccatcgaat

SEQ ID NO: 134766 - DNA, 25 bp, Saccharomyces pastorianus
aactgtgacaccaacgaagccgctt

SEQ ID NO: 134767 - DNA, 25 bp, Saccharomyces pastorianus
ggcaccagcgcccttaaagcaaaag

SEQ ID NO: 134768 - DNA, 25 bp, Saccharomyces pastorianus
agcactctacgacgttttggccaag

SEQ ID NO: 134769 - DNA, 25 bp, Saccharomyces pastorianus
gaagccgcttacaaagccaggtatc

SEQ ID NO: 134770 - DNA, 25 bp, Saccharomyces pastorianus
gcatccacctcaatctattttgcat

SEQ ID NO: 134771 - DNA, 25 bp, Saccharomyces pastorianus
gtgagtccgtgaatggtgttcaaca

SEQ ID NO: 134772 - DNA, 25 bp, Saccharomyces pastorianus
acacctgaattcttagctacatgcg

SEQ ID NO: 134773 - DNA, 25 bp, Saccharomyces pastorianus
aaggtatcttactatcaattgcaaa

SEQ ID NO: 134774 - DNA, 25 bp, Saccharomyces pastorianus
gtacgtcagcactaaaccaagaaat

SEQ ID NO: 134775 - DNA, 25 bp, Saccharomyces pastorianus
aagacaactgtaggtgagtccgtga

SEQ ID NO: 134776 - DNA, 25 bp, Saccharomyces pastorianus
ctcctcccagtcagatgccatgaaa

SEQ ID NO: 134777 - DNA, 25 bp, Saccharomyces pastorianus
aatctggcatacagttaggacctga

SEQ ID NO: 134778 - DNA, 25 bp, Saccharomyces pastorianus
aaatctggcatacagttaggacctg

SEQ ID NO: 134779 - DNA, 25 bp, Saccharomyces pastorianus
gacctgaacaactggccccgctaat

SEQ ID NO: 134780 - DNA, 25 bp, Saccharomyces pastorianus
tggcatacagttaggacctgaacaa

SEQ ID NO: 134781 - DNA, 25 bp, Saccharomyces pastorianus
ttaggacctgaacaactggccccgc

SEQ ID NO: 134782 - DNA, 25 bp, Saccharomyces pastorianus
aggacctgaacaactggccccgcta

SEQ ID NO: 134783 - DNA, 25 bp, Saccharomyces pastorianus
gttaggacctgaacaactggccccg

SEQ ID NO: 134784 - DNA, 25 bp, Saccharomyces pastorianus
ttggaattggaaaaatctggcatac

SEQ ID NO: 134785 - DNA, 25 bp, Saccharomyces pastorianus
tctggcatacagttaggacctgaac

SEQ ID NO: 134786 - DNA, 25 bp, Saccharomyces pastorianus
gaattggaaaaatctggcatacagt

SEQ ID NO: 134787 - DNA, 25 bp, Saccharomyces pastorianus
gcatacagttaggacctgaacaact

SEQ ID NO: 134788 - DNA, 25 bp, Saccharomyces pastorianus
tccagagtcactcgttcgatagaac

SEQ ID NO: 134789 - DNA, 25 bp, Saccharomyces pastorianus
aagcatagttccagagtcactcgtt

SEQ ID NO: 134790 - DNA, 25 bp, Saccharomyces pastorianus
gctttcctggatttctccgagaaga

SEQ ID NO: 134791 - DNA, 25 bp, Saccharomyces pastorianus
ggacgacagacagcctaatgacaaa

SEQ ID NO: 134792 - DNA, 25 bp, Saccharomyces pastorianus
tcacaccaggagtttaaggaggctt

SEQ ID NO: 134793 - DNA, 25 bp, Saccharomyces pastorianus
gatttctccgagaagattttacgct

SEQ ID NO: 134794 - DNA, 25 bp, Saccharomyces pastorianus
attttacgctcaatcttgggacgac

SEQ ID NO: 134795 - DNA, 25 bp, Saccharomyces pastorianus
gaactatcgaacatttctaccacta

SEQ ID NO: 134796 - DNA, 25 bp, Saccharomyces pastorianus
aaggaggctttcctggatttctccg

SEQ ID NO: 134797 - DNA, 25 bp, Saccharomyces pastorianus
tttctaccactaatcacaccaggag

SEQ ID NO: 134798 - DNA, 25 bp, Saccharomyces pastorianus
aatcttgggacgacagacagcctaa

SEQ ID NO: 134799 - DNA, 25 bp, Saccharomyces pastorianus
ggcacacaaggacctggttccatga

SEQ ID NO: 134800 - DNA, 25 bp, Saccharomyces pastorianus
tctttcataccgtccacgtcgaaaa

SEQ ID NO: 134801 - DNA, 25 bp, Saccharomyces pastorianus
gatgctatgactacggcacctacga

SEQ ID NO: 134802 - DNA, 25 bp, Saccharomyces pastorianus
aagcagcctaatttctcaggaacgt

SEQ ID NO: 134803 - DNA, 25 bp, Saccharomyces pastorianus
tacatcatcacaatcagctgcgcag

SEQ ID NO: 134804 - DNA, 25 bp, Saccharomyces pastorianus
aatttcaagggttccaccatcagta

SEQ ID NO: 134805 - DNA, 25 bp, Saccharomyces pastorianus
tacgacaccaactccatacaagaac

SEQ ID NO: 134806 - DNA, 25 bp, Saccharomyces pastorianus
caaccaccttaactagagcaaccga

SEQ ID NO: 134807 - DNA, 25 bp, Saccharomyces pastorianus
aaaactctactccatgttcttccaa

SEQ ID NO: 134808 - DNA, 25 bp, Saccharomyces pastorianus
atcgaagtacgatgcctactcgtcc

SEQ ID NO: 134809 - DNA, 25 bp, Saccharomyces pastorianus
atatgacgagacaaccaaccacctt

SEQ ID NO: 134810 - DNA, 25 bp, Saccharomyces pastorianus
gaaatcgcttttcacttttgacaag

SEQ ID NO: 134811 - DNA, 25 bp, Saccharomyces pastorianus
gaggactcaattttgccaccaattc

SEQ ID NO: 134812 - DNA, 25 bp, Saccharomyces pastorianus
ggttcctactcactgtttacattca

SEQ ID NO: 134813 - DNA, 25 bp, Saccharomyces pastorianus
gtggtggtgagaactccagcgacaa

SEQ ID NO: 134814 - DNA, 25 bp, Saccharomyces pastorianus
aattccgcctatttcgaaatcgctt

SEQ ID NO: 134815 - DNA, 25 bp, Saccharomyces pastorianus
aacatgggcagtatttcgcaattaa

SEQ ID NO: 134816 - DNA, 25 bp, Saccharomyces pastorianus
gggctctactcaaagtttagcatcc

SEQ ID NO: 134817 - DNA, 25 bp, Saccharomyces pastorianus
aatatcattcagttccttctatcga

SEQ ID NO: 134818 - DNA, 25 bp, Saccharomyces pastorianus
gactgatttgtcctttcactttcaa

SEQ ID NO: 134819 - DNA, 25 bp, Saccharomyces pastorianus
aaccttggtgaattgggctctactc

SEQ ID NO: 134820 - DNA, 25 bp, Saccharomyces pastorianus
atttaatcctggttcctactcactg

SEQ ID NO: 134821 - DNA, 25 bp, Saccharomyces pastorianus
cggtaagttattcagagtcggtgtt

SEQ ID NO: 134822 - DNA, 25 bp, Saccharomyces pastorianus
gtctactacttccaaggtggtaaca

SEQ ID NO: 134823 - DNA, 25 bp, Saccharomyces pastorianus
gtggtaacaacgaattgggtactgc

SEQ ID NO: 134824 - DNA, 25 bp, Saccharomyces pastorianus
aagactaaggtctactacttccaag

SEQ ID NO: 134825 - DNA, 25 bp, Saccharomyces pastorianus
tactacttccaaggtggtaacaacg

SEQ ID NO: 134826 - DNA, 25 bp, Saccharomyces pastorianus
ttgtccaagactaaggtctactact

SEQ ID NO: 134827 - DNA, 25 bp, Saccharomyces pastorianus
cggtgttgtctctattttggaagct

SEQ ID NO: 134828 - DNA, 25 bp, Saccharomyces pastorianus
gactaaggtctactacttccaaggt

SEQ ID NO: 134829 - DNA, 25 bp, Saccharomyces pastorianus
taaggtctactacttccaaggtggt

SEQ ID NO: 134830 - DNA, 25 bp, Saccharomyces pastorianus
tgttgtctctattttggaagctggt

SEQ ID NO: 134831 - DNA, 25 bp, Saccharomyces pastorianus
agtcggtgttgtctctattttggaa

SEQ ID NO: 134832 - DNA, 25 bp, Saccharomyces pastorianus
aattagcgagggaatctggccagaa

SEQ ID NO: 134833 - DNA, 25 bp, Saccharomyces pastorianus
ggcagacagaaccactttagtcgat

SEQ ID NO: 134834 - DNA, 25 bp, Saccharomyces pastorianus
atgatcacaccattagacgtcccac

SEQ ID NO: 134835 - DNA, 25 bp, Saccharomyces pastorianus
aagccatggcttcccctgaagagaa

SEQ ID NO: 134836 - DNA, 25 bp, Saccharomyces pastorianus
tggccaagccactgacagagtgcgt

SEQ ID NO: 134837 - DNA, 25 bp, Saccharomyces pastorianus
tactcacatcgccatcgttggtaaa

SEQ ID NO: 134838 - DNA, 25 bp, Saccharomyces pastorianus
gtgagttaaccaggtcttctacgaa

SEQ ID NO: 134839 - DNA, 25 bp, Saccharomyces pastorianus
gtcttggtcatctttggtggtctaa

SEQ ID NO: 134840 - DNA, 25 bp, Saccharomyces pastorianus
gatgcaagggcttctgagaccatga

SEQ ID NO: 134841 - DNA, 25 bp, Saccharomyces pastorianus
gaggaactcgctactttacaagatg

SEQ ID NO: 134842 - DNA, 25 bp, Saccharomyces pastorianus
aagagcgtgatttctataccgcaga

SEQ ID NO: 134843 - DNA, 25 bp, Saccharomyces pastorianus
gcaactcgcaaaaaatgacgacgaa

SEQ ID NO: 134844 - DNA, 25 bp, Saccharomyces pastorianus
gattattggtaaggatagtccctga

SEQ ID NO: 134845 - DNA, 25 bp, Saccharomyces pastorianus
gtttctcagaagaaagcaactcgca

SEQ ID NO: 134846 - DNA, 25 bp, Saccharomyces pastorianus
cgaagaagcgcttttggacgaatct

SEQ ID NO: 134847 - DNA, 25 bp, Saccharomyces pastorianus
ggatagtccctgatgaagtagcatt

SEQ ID NO: 134848 - DNA, 25 bp, Saccharomyces pastorianus
atcgatgtggataaccgctgttctt

SEQ ID NO: 134849 - DNA, 25 bp, Saccharomyces pastorianus
tgtatttggacttgagtttctcaga

SEQ ID NO: 134850 - DNA, 25 bp, Saccharomyces pastorianus
cgctgttctttgtggtatgttgtct

SEQ ID NO: 134851 - DNA, 25 bp, Saccharomyces pastorianus
agtagcattgaaagcatttccggtt

SEQ ID NO: 134852 - DNA, 25 bp, Saccharomyces pastorianus
gcatttccggttgcttatgttcaaa

SEQ ID NO: 134853 - DNA, 25 bp, Saccharomyces pastorianus
gtatgttgtctttgattatgggatt

SEQ ID NO: 134854 - DNA, 25 bp, Saccharomyces pastorianus
gaaggcaccccaataaacaatgtct

SEQ ID NO: 134855 - DNA, 25 bp, Saccharomyces pastorianus
gacgatgaggtcagccaattctgtt

SEQ ID NO: 134856 - DNA, 25 bp, Saccharomyces pastorianus
gaacggcccgctattgaatttgaga

SEQ ID NO: 134857 - DNA, 25 bp, Saccharomyces pastorianus
ggattcgacaccagtattaagcttg

SEQ ID NO: 134858 - DNA, 25 bp, Saccharomyces pastorianus
cacctttttagtttccaatgacgat

SEQ ID NO: 134859 - DNA, 25 bp, Saccharomyces pastorianus
gcagccggagcgttatttgtatctt

SEQ ID NO: 134860 - DNA, 25 bp, Saccharomyces pastorianus
atttgtatcttctggattcgacacc

SEQ ID NO: 134861 - DNA, 25 bp, Saccharomyces pastorianus
agacccagaaagtgaacggcccgct

SEQ ID NO: 134862 - DNA, 25 bp, Saccharomyces pastorianus
tattgaatttgagacgcccaccttt

SEQ ID NO: 134863 - DNA, 25 bp, Saccharomyces pastorianus
agcttgacattatttcagacccaga

SEQ ID NO: 134864 - DNA, 25 bp, Saccharomyces pastorianus
gccaattctgttacctttctgatga

SEQ ID NO: 134865 - DNA, 25 bp, Saccharomyces pastorianus
tctaagatcaccagaatgcccagtt

SEQ ID NO: 134866 - DNA, 25 bp, Saccharomyces pastorianus
atatgtgattgctggccacgtttct

SEQ ID NO: 134867 - DNA, 25 bp, Saccharomyces pastorianus
tctctgcctctttggatggtacaat

SEQ ID NO: 134868 - DNA, 25 bp, Saccharomyces pastorianus
agcaaactattcaactcccaagcaa

SEQ ID NO: 134869 - DNA, 25 bp, Saccharomyces pastorianus
gtacaatttgcctttgggagtgcgg

SEQ ID NO: 134870 - DNA, 25 bp, Saccharomyces pastorianus
cacgttaattggacacagggcgaca

SEQ ID NO: 134871 - DNA, 25 bp, Saccharomyces pastorianus
tggccacgtttctggtgttattact

SEQ ID NO: 134872 - DNA, 25 bp, Saccharomyces pastorianus
gcgacagtcacagatattgccataa

SEQ ID NO: 134873 - DNA, 25 bp, Saccharomyces pastorianus
gaaattgaccaagctcacgttagtg

SEQ ID NO: 134874 - DNA, 25 bp, Saccharomyces pastorianus
aggaaggaatgtgctctctgcctct

SEQ ID NO: 134875 - DNA, 25 bp, Saccharomyces pastorianus
ggctcaaatcctcgcacgttaattg

SEQ ID NO: 134876 - DNA, 25 bp, Saccharomyces pastorianus
gaataacaacttttcttcctgaaca

SEQ ID NO: 134877 - DNA, 25 bp, Saccharomyces pastorianus
aacaacttttcttcctgaacattct

SEQ ID NO: 134878 - DNA, 25 bp, Saccharomyces pastorianus
caacttttcttcctgaacattctaa

SEQ ID NO: 134879 - DNA, 25 bp, Saccharomyces pastorianus
catatccaaagtttattctgacaca

SEQ ID NO: 134880 - DNA, 25 bp, Saccharomyces pastorianus
cttcctgaacattctaatggtttga

SEQ ID NO: 134881 - DNA, 25 bp, Saccharomyces pastorianus
tgtctgaagtcatatccaaagttta

SEQ ID NO: 134882 - DNA, 25 bp, Saccharomyces pastorianus
gaagtcatatccaaagtttattctg

SEQ ID NO: 134883 - DNA, 25 bp, Saccharomyces pastorianus
gtctgaagtcatatccaaagtttat

SEQ ID NO: 134884 - DNA, 25 bp, Saccharomyces pastorianus
atccaaagtttattctgacacaaga

SEQ ID NO: 134885 - DNA, 25 bp, Saccharomyces pastorianus
cttttcttcctgaacattctaatgg

SEQ ID NO: 134886 - DNA, 25 bp, Saccharomyces pastorianus
ataacaacttttcttcctgaacatt

SEQ ID NO: 134887 - DNA, 25 bp, Saccharomyces pastorianus
aagagattcgagttgttagctggaa

SEQ ID NO: 134888 - DNA, 25 bp, Saccharomyces pastorianus
tgcaatagttagtgcgccatccgtc

SEQ ID NO: 134889 - DNA, 25 bp, Saccharomyces pastorianus
attccaaccgaacatatctacttgt

SEQ ID NO: 134890 - DNA, 25 bp, Saccharomyces pastorianus
gtacagcgatgacacagccgcaatt

SEQ ID NO: 134891 - DNA, 25 bp, Saccharomyces pastorianus
gccgcaattttagcagatgccatat

SEQ ID NO: 134892 - DNA, 25 bp, Saccharomyces pastorianus
ggaagattggcagctttcccagttt

SEQ ID NO: 134893 - DNA, 25 bp, Saccharomyces pastorianus
gctttcccagttttggtacagcgat

SEQ ID NO: 134894 - DNA, 25 bp, Saccharomyces pastorianus
tgccatattggaaggtgcggacgaa

SEQ ID NO: 134895 - DNA, 25 bp, Saccharomyces pastorianus
atgattacaataaaccactggactt

SEQ ID NO: 134896 - DNA, 25 bp, Saccharomyces pastorianus
atccgtctatgctgccattcaaaag

SEQ ID NO: 134897 - DNA, 25 bp, Saccharomyces pastorianus
aggtgcggacgaaaacactgtaatt

SEQ ID NO: 134898 - DNA, 25 bp, Saccharomyces pastorianus
gaaagtgccggttattgcatgccct

SEQ ID NO: 134899 - DNA, 25 bp, Saccharomyces pastorianus
gaaacggacacagtctcggctcagt

SEQ ID NO: 134900 - DNA, 25 bp, Saccharomyces pastorianus
cagtcttacaccgagcatttttaaa

SEQ ID NO: 134901 - DNA, 25 bp, Saccharomyces pastorianus
tacgctggagtgattttccttctat

SEQ ID NO: 134902 - DNA, 25 bp, Saccharomyces pastorianus
tagtgctattattcttcgtatcatg

SEQ ID NO: 134903 - DNA, 25 bp, Saccharomyces pastorianus
atttggcaaccgcaagttccgtaga

SEQ ID NO: 134904 - DNA, 25 bp, Saccharomyces pastorianus
aagtgggctcatcatctaagtgtaa

SEQ ID NO: 134905 - DNA, 25 bp, Saccharomyces pastorianus
gctaagccatcagcaattacttgaa

SEQ ID NO: 134906 - DNA, 25 bp, Saccharomyces pastorianus
gaactaactcatattcccatagatg

SEQ ID NO: 134907 - DNA, 25 bp, Saccharomyces pastorianus
gccctctaccatctcagaaatcaga

SEQ ID NO: 134908 - DNA, 25 bp, Saccharomyces pastorianus
gtcaatgtcgacaatacccagatgt

SEQ ID NO: 134909 - DNA, 25 bp, Saccharomyces pastorianus
ttgattttggttctgttcgtcttaa

SEQ ID NO: 134910 - DNA, 25 bp, Saccharomyces pastorianus
gcgattacttggtcttcggaaattg

SEQ ID NO: 134911 - DNA, 25 bp, Saccharomyces pastorianus
attaatcggactcctaactgagaag

SEQ ID NO: 134912 - DNA, 25 bp, Saccharomyces pastorianus
ttattgaagatctaacgcacgaagc

SEQ ID NO: 134913 - DNA, 25 bp, Saccharomyces pastorianus
gcaatacttggcgatgttttctcaa

SEQ ID NO: 134914 - DNA, 25 bp, Saccharomyces pastorianus
gtagagctatatcgcagtcaacact

SEQ ID NO: 134915 - DNA, 25 bp, Saccharomyces pastorianus
tatcgcgttactgtcattgaatcta

SEQ ID NO: 134916 - DNA, 25 bp, Saccharomyces pastorianus
tgagtatctttctacctacgtggac

SEQ ID NO: 134917 - DNA, 25 bp, Saccharomyces pastorianus
gctagactcctcttttctaaatgtg

SEQ ID NO: 134918 - DNA, 25 bp, Saccharomyces pastorianus
cgcagtcaacactcgtttttggaaa

SEQ ID NO: 134919 - DNA, 25 bp, Saccharomyces pastorianus
gaaggagcattaccatctgagtatc

SEQ ID NO: 134920 - DNA, 25 bp, Saccharomyces pastorianus
gtcaagaaattatcaagaacccaga

SEQ ID NO: 134921 - DNA, 25 bp, Saccharomyces pastorianus
aaatttccagtatcagttcaagtga

SEQ ID NO: 134922 - DNA, 25 bp, Saccharomyces pastorianus
gaacccagaaatttccagtatcagt

SEQ ID NO: 134923 - DNA, 25 bp, Saccharomyces pastorianus
gagaatgagcgttcaagaatccata

SEQ ID NO: 134924 - DNA, 25 bp, Saccharomyces pastorianus
tcacgggttgacaaataatgactca

SEQ ID NO: 134925 - DNA, 25 bp, Saccharomyces pastorianus
tccaaccaggcacaatacatcgagt

SEQ ID NO: 134926 - DNA, 25 bp, Saccharomyces pastorianus
aataatgactcaactccaaccaggc

SEQ ID NO: 134927 - DNA, 25 bp, Saccharomyces pastorianus
aagaaggcggattcaaagtcaagaa

SEQ ID NO: 134928 - DNA, 25 bp, Saccharomyces pastorianus
cgagttccataccaaaaatttcaag

SEQ ID NO: 134929 - DNA, 25 bp, Saccharomyces pastorianus
ggcacaatacatcgagttccatacc

SEQ ID NO: 134930 - DNA, 25 bp, Saccharomyces pastorianus
gaatccataacacaatctatgcgaa

SEQ ID NO: 134931 - DNA, 25 bp, Saccharomyces pastorianus
ctaacgggcctcttacacgatagta

SEQ ID NO: 134932 - DNA, 25 bp, Saccharomyces pastorianus
ttgattcctcaataccgctaacggg

SEQ ID NO: 134933 - DNA, 25 bp, Saccharomyces pastorianus
gtgccattacaggatgactcactaa

SEQ ID NO: 134934 - DNA, 25 bp, Saccharomyces pastorianus
cggtgtgtcttcatcttccggaaat

SEQ ID NO: 134935 - DNA, 25 bp, Saccharomyces pastorianus
aaatctaactccaacgtatccactt

SEQ ID NO: 134936 - DNA, 25 bp, Saccharomyces pastorianus
aactctggcggatcttcggacggat

SEQ ID NO: 134937 - DNA, 25 bp, Saccharomyces pastorianus
atgactttgccccatgcaattgcag

SEQ ID NO: 134938 - DNA, 25 bp, Saccharomyces pastorianus
aatcatcggctcaaatcttcggata

SEQ ID NO: 134939 - DNA, 25 bp, Saccharomyces pastorianus
ggatacttgcctgaagctctgaaca

SEQ ID NO: 134940 - DNA, 25 bp, Saccharomyces pastorianus
gatctaattcgaactccggtgtgtc

SEQ ID NO: 134941 - DNA, 25 bp, Saccharomyces pastorianus
attaccaactcttcaagcgcttttt

SEQ ID NO: 134942 - DNA, 25 bp, Saccharomyces pastorianus
acgctcgagaactacagaaactgac

SEQ ID NO: 134943 - DNA, 25 bp, Saccharomyces pastorianus
aaacgctcgagaactacagaaactg

SEQ ID NO: 134944 - DNA, 25 bp, Saccharomyces pastorianus
aactacagaaactgaccacagcgct

SEQ ID NO: 134945 - DNA, 25 bp, Saccharomyces pastorianus
aacgctcgagaactacagaaactga

SEQ ID NO: 134946 - DNA, 25 bp, Saccharomyces pastorianus
cgctcgagaactacagaaactgacc

SEQ ID NO: 134947 - DNA, 25 bp, Saccharomyces pastorianus
tacagaaactgaccacagcgctcga

SEQ ID NO: 134948 - DNA, 25 bp, Saccharomyces pastorianus
gaactacagaaactgaccacagcgc

SEQ ID NO: 134949 - DNA, 25 bp, Saccharomyces pastorianus
acagaaactgaccacagcgctcgag

SEQ ID NO: 134950 - DNA, 25 bp, Saccharomyces pastorianus
gagaactacagaaactgaccacagc

SEQ ID NO: 134951 - DNA, 25 bp, Saccharomyces pastorianus
gaaacgctcgagaactacagaaact

SEQ ID NO: 134952 - DNA, 25 bp, Saccharomyces pastorianus
gagaaacgctcgagaactacagaaa

SEQ ID NO: 134953 - DNA, 25 bp, Saccharomyces pastorianus
gacggtaaaattgtcactgcttatc

SEQ ID NO: 134954 - DNA, 25 bp, Saccharomyces pastorianus
aatatggtatttcttgctgggtaaa

SEQ ID NO: 134955 - DNA, 25 bp, Saccharomyces pastorianus
tacacccctaaacacgctaatgttg

SEQ ID NO: 134956 - DNA, 25 bp, Saccharomyces pastorianus
gcttatcgtagtaacattttcacca

SEQ ID NO: 134957 - DNA, 25 bp, Saccharomyces pastorianus
gacagcgaagctagcatcgacgaga

SEQ ID NO: 134958 - DNA, 25 bp, Saccharomyces pastorianus
gacgacgctaatgatgaaaacctat

SEQ ID NO: 134959 - DNA, 25 bp, Saccharomyces pastorianus
gaaaacctatcatccaacttccata

SEQ ID NO: 134960 - DNA, 25 bp, Saccharomyces pastorianus
agtcaagattacaacgacgctgatg

SEQ ID NO: 134961 - DNA, 25 bp, Saccharomyces pastorianus
cagaaagattcagctcagattcccc

SEQ ID NO: 134962 - DNA, 25 bp, Saccharomyces pastorianus
aacggatttcattgactctgacggt

SEQ ID NO: 134963 - DNA, 25 bp, Saccharomyces pastorianus
actcacctactaaatctgcatcata

SEQ ID NO: 134964 - DNA, 25 bp, Saccharomyces pastorianus
atttcaacatccgtttcgacttctt

SEQ ID NO: 134965 - DNA, 25 bp, Saccharomyces pastorianus
tcgtcatcatcatcaatatctcctt

SEQ ID NO: 134966 - DNA, 25 bp, Saccharomyces pastorianus
tgtggcatcaacatcttcgacagtt

SEQ ID NO: 134967 - DNA, 25 bp, Saccharomyces pastorianus
tatcaacgccgagtatagcttcaat

SEQ ID NO: 134968 - DNA, 25 bp, Saccharomyces pastorianus
acatcgtcgtcttcttcggaggtta

SEQ ID NO: 134969 - DNA, 25 bp, Saccharomyces pastorianus
gaattgacatcatcctcgtactcat

SEQ ID NO: 134970 - DNA, 25 bp, Saccharomyces pastorianus
atgcaagtttcgtcgtcttcaacat

SEQ ID NO: 134971 - DNA, 25 bp, Saccharomyces pastorianus
actgcttactctttcgtcaacatta

SEQ ID NO: 134972 - DNA, 25 bp, Saccharomyces pastorianus
attatcttcagaactttcctcttcg

SEQ ID NO: 134973 - DNA, 25 bp, Saccharomyces pastorianus
tcggaggttacgtcatcatcgtcat

SEQ ID NO: 134974 - DNA, 25 bp, Saccharomyces pastorianus
ctagctcatcgttggttatctctac

SEQ ID NO: 134975 - DNA, 25 bp, Saccharomyces pastorianus
gaacatacaggaaggttgaccctcc

SEQ ID NO: 134976 - DNA, 25 bp, Saccharomyces pastorianus
tgaccctcctgacgtagagcaacta

SEQ ID NO: 134977 - DNA, 25 bp, Saccharomyces pastorianus
gaggtggatgtgtgaagcccacaat

SEQ ID NO: 134978 - DNA, 25 bp, Saccharomyces pastorianus
gagaaaatgcaccacaagttgagtc

SEQ ID NO: 134979 - DNA, 25 bp, Saccharomyces pastorianus
tgctcaacctacagaccaacagaag

SEQ ID NO: 134980 - DNA, 25 bp, Saccharomyces pastorianus
acagttcttgaatatcttctcacat

SEQ ID NO: 134981 - DNA, 25 bp, Saccharomyces pastorianus
tcatggacgctgttacactctgtag

SEQ ID NO: 134982 - DNA, 25 bp, Saccharomyces pastorianus
tgttacactctgtagctgccagcta

SEQ ID NO: 134983 - DNA, 25 bp, Saccharomyces pastorianus
tgtagctgccagctatcctgctcaa

SEQ ID NO: 134984 - DNA, 25 bp, Saccharomyces pastorianus
gaggaagcccaaatttgactgtaat

SEQ ID NO: 134985 - DNA, 25 bp, Saccharomyces pastorianus
aactaggtagatcttcatggacgct

SEQ ID NO: 134986 - DNA, 25 bp, Saccharomyces pastorianus
accgtatgttggattacgcaaagca

SEQ ID NO: 134987 - DNA, 25 bp, Saccharomyces pastorianus
gaagatggcaaaccgtatgttggat

SEQ ID NO: 134988 - DNA, 25 bp, Saccharomyces pastorianus
cgaagatggcaaaccgtatgttgga

SEQ ID NO: 134989 - DNA, 25 bp, Saccharomyces pastorianus
gcaaaccgtatgttggattacgcaa

SEQ ID NO: 134990 - DNA, 25 bp, Saccharomyces pastorianus
taatatatgacgaagatggcaaacc

SEQ ID NO: 134991 - DNA, 25 bp, Saccharomyces pastorianus
tgacgaagatggcaaaccgtatgtt

SEQ ID NO: 134992 - DNA, 25 bp, Saccharomyces pastorianus
aaccgtatgttggattacgcaaagc

SEQ ID NO: 134993 - DNA, 25 bp, Saccharomyces pastorianus
gtatgttggattacgcaaagcaatt

SEQ ID NO: 134994 - DNA, 25 bp, Saccharomyces pastorianus
tggcaaaccgtatgttggattacgc

SEQ ID NO: 134995 - DNA, 25 bp, Saccharomyces pastorianus
gatggcaaaccgtatgttggattac

SEQ ID NO: 134996 - DNA, 25 bp, Saccharomyces pastorianus
atatgacgaagatggcaaaccgtat

SEQ ID NO: 134997 - DNA, 25 bp, Saccharomyces pastorianus
tataccaacgacgaagctgcttctt

SEQ ID NO: 134998 - DNA, 25 bp, Saccharomyces pastorianus
tttttcctgccatttatttgtagtt

SEQ ID NO: 134999 - DNA, 25 bp, Saccharomyces pastorianus
agatcaaccgaaactataccaacga

SEQ ID NO: 135000 - DNA, 25 bp, Saccharomyces pastorianus
acgaagctgcttcttagtaaatata

SEQ ID NO: 135001 - DNA, 25 bp, Saccharomyces pastorianus
gttatatttatatctagatcaaccg

SEQ ID NO: 135002 - DNA, 25 bp, Saccharomyces pastorianus
ttttctactgtgtcaacgcattgga

SEQ ID NO: 135003 - DNA, 25 bp, Saccharomyces pastorianus
atgtcctgtgtcatttgcttcaatt

SEQ ID NO: 135004 - DNA, 25 bp, Saccharomyces pastorianus
atatattttctactgtgtcaacgca

SEQ ID NO: 135005 - DNA, 25 bp, Saccharomyces pastorianus
ctactgtgtcaacgcattggaactg

SEQ ID NO: 135006 - DNA, 25 bp, Saccharomyces pastorianus
cctgccatttatttgtagttatatt

SEQ ID NO: 135007 - DNA, 25 bp, Saccharomyces pastorianus
catttgcttcaatttttcctgccat

SEQ ID NO: 135008 - DNA, 25 bp, Saccharomyces pastorianus
ggtgggctttaccagcaaaaaagtg

SEQ ID NO: 135009 - DNA, 25 bp, Saccharomyces pastorianus
tactggataagaaaatccgaacttt

SEQ ID NO: 135010 - DNA, 25 bp, Saccharomyces pastorianus
tgtcacagattacatcaaaaggtcg

SEQ ID NO: 135011 - DNA, 25 bp, Saccharomyces pastorianus
cagcaaaaaagtggccgggcatgta

SEQ ID NO: 135012 - DNA, 25 bp, Saccharomyces pastorianus
aaggtcggcgtatactggataagaa

SEQ ID NO: 135013 - DNA, 25 bp, Saccharomyces pastorianus
acagattacatcaaaaggtcggcgt

SEQ ID NO: 135014 - DNA, 25 bp, Saccharomyces pastorianus
ttaccagcaaaaaagtggccgggca

SEQ ID NO: 135015 - DNA, 25 bp, Saccharomyces pastorianus
caaaaggtcggcgtatactggataa

SEQ ID NO: 135016 - DNA, 25 bp, Saccharomyces pastorianus
tacatcaaaaggtcggcgtatactg

SEQ ID NO: 135017 - DNA, 25 bp, Saccharomyces pastorianus
gtcggcgtatactggataagaaaat

SEQ ID NO: 135018 - DNA, 25 bp, Saccharomyces pastorianus
gattacatcaaaaggtcggcgtata

SEQ ID NO: 135019 - DNA, 25 bp, Saccharomyces pastorianus
atgaatacgtataggaagggaagtt

SEQ ID NO: 135020 - DNA, 25 bp, Saccharomyces pastorianus
tgaatacgtataggaagggaagttt

SEQ ID NO: 135021 - DNA, 25 bp, Saccharomyces pastorianus
gaatacgtataggaagggaagtttg

SEQ ID NO: 135022 - DNA, 25 bp, Saccharomyces pastorianus
tataggaagggaagtttgggacaga

SEQ ID NO: 135023 - DNA, 25 bp, Saccharomyces pastorianus
gaagggaagtttgggacagagacag

SEQ ID NO: 135024 - DNA, 25 bp, Saccharomyces pastorianus
agggaagtttgggacagagacagag

SEQ ID NO: 135025 - DNA, 25 bp, Saccharomyces pastorianus
taggaagggaagtttgggacagaga

SEQ ID NO: 135026 - DNA, 25 bp, Saccharomyces pastorianus
gggaagtttgggacagagacagaga

SEQ ID NO: 135027 - DNA, 25 bp, Saccharomyces pastorianus
ggaagtttgggacagagacagagac

SEQ ID NO: 135028 - DNA, 25 bp, Saccharomyces pastorianus
ggaagggaagtttgggacagagaca

SEQ ID NO: 135029 - DNA, 25 bp, Saccharomyces pastorianus
gtataggaagggaagtttgggacag

SEQ ID NO: 135030 - DNA, 25 bp, Saccharomyces pastorianus
gatatccagggtaaactcaagtaca

SEQ ID NO: 135031 - DNA, 25 bp, Saccharomyces pastorianus
gcttgttattagattgctacctcca

SEQ ID NO: 135032 - DNA, 25 bp, Saccharomyces pastorianus
agatatgaaactgtcgccctacgta

SEQ ID NO: 135033 - DNA, 25 bp, Saccharomyces pastorianus
aaactcgacatattctcggtgcaat

SEQ ID NO: 135034 - DNA, 25 bp, Saccharomyces pastorianus
gtcgccctacgtaaagaaattcact

SEQ ID NO: 135035 - DNA, 25 bp, Saccharomyces pastorianus
cggtgcaatttcttgttcgacaact

SEQ ID NO: 135036 - DNA, 25 bp, Saccharomyces pastorianus
gctacctccaaatttgactgcagat

SEQ ID NO: 135037 - DNA, 25 bp, Saccharomyces pastorianus
gttcgacaacttatcagacttggaa

SEQ ID NO: 135038 - DNA, 25 bp, Saccharomyces pastorianus
aaggatgccgcgctagtaggaacaa

SEQ ID NO: 135039 - DNA, 25 bp, Saccharomyces pastorianus
gacgagtactcattccaagatttta

SEQ ID NO: 135040 - DNA, 25 bp, Saccharomyces pastorianus
aacagagctggttggaactggtgat

SEQ ID NO: 135041 - DNA, 25 bp, Saccharomyces pastorianus
ttatattcggccatctatccacaca

SEQ ID NO: 135042 - DNA, 25 bp, Saccharomyces pastorianus
tatcccgcatactcgtctatttaaa

SEQ ID NO: 135043 - DNA, 25 bp, Saccharomyces pastorianus
ctagccatcgactggtggtacacaa

SEQ ID NO: 135044 - DNA, 25 bp, Saccharomyces pastorianus
aatcctcatcatttgatcggctggt

SEQ ID NO: 135045 - DNA, 25 bp, Saccharomyces pastorianus
tactatgggtgtcgcattcgtttgc

SEQ ID NO: 135046 - DNA, 25 bp, Saccharomyces pastorianus
ggttgaacatctgtctccagctaat

SEQ ID NO: 135047 - DNA, 25 bp, Saccharomyces pastorianus
tatagactcttcttattcctcacag

SEQ ID NO: 135048 - DNA, 25 bp, Saccharomyces pastorianus
gaacctttactgcatttcgatgtat

SEQ ID NO: 135049 - DNA, 25 bp, Saccharomyces pastorianus
acaacttccctcactacataattat

SEQ ID NO: 135050 - DNA, 25 bp, Saccharomyces pastorianus
ggtttcgagtctagaatcctcccta

SEQ ID NO: 135051 - DNA, 25 bp, Saccharomyces pastorianus
ggactctttgcacgagacgtatatc

SEQ ID NO: 135052 - DNA, 25 bp, Saccharomyces pastorianus
ctcagccagccgatttattgggaat

SEQ ID NO: 135053 - DNA, 25 bp, Saccharomyces pastorianus
accaaagatctattcctgaagccat

SEQ ID NO: 135054 - DNA, 25 bp, Saccharomyces pastorianus
tataaggcactgactgtataccctc

SEQ ID NO: 135055 - DNA, 25 bp, Saccharomyces pastorianus
ggaagcagcctctaagttttataag

SEQ ID NO: 135056 - DNA, 25 bp, Saccharomyces pastorianus
aaggcactgactgtataccctcagc

SEQ ID NO: 135057 - DNA, 25 bp, Saccharomyces pastorianus
gagttgttggaagcaaggccgaatc

SEQ ID NO: 135058 - DNA, 25 bp, Saccharomyces pastorianus
gtaaggaactggaagcagcctctaa

SEQ ID NO: 135059 - DNA, 25 bp, Saccharomyces pastorianus
cagccgatttattgggaatttacca

SEQ ID NO: 135060 - DNA, 25 bp, Saccharomyces pastorianus
tgttggaagcaaggccgaatctgat

SEQ ID NO: 135061 - DNA, 25 bp, Saccharomyces pastorianus
tataccctcagccagccgatttatt

SEQ ID NO: 135062 - DNA, 25 bp, Saccharomyces pastorianus
atttaccaaagatctattcctgaag

SEQ ID NO: 135063 - DNA, 25 bp, Saccharomyces pastorianus
aaaagctgattcatgggcctcacgc

SEQ ID NO: 135064 - DNA, 25 bp, Saccharomyces pastorianus
taaggacgcctacggtatctcgcag

SEQ ID NO: 135065 - DNA, 25 bp, Saccharomyces pastorianus
gcccgtctttgatgctccggaaagt

SEQ ID NO: 135066 - DNA, 25 bp, Saccharomyces pastorianus
gggtctttgcagttaaccgtccaag

SEQ ID NO: 135067 - DNA, 25 bp, Saccharomyces pastorianus
tgctagcacgcccttgaaacaagag

SEQ ID NO: 135068 - DNA, 25 bp, Saccharomyces pastorianus
gatgttatcatttccgagaccggca

SEQ ID NO: 135069 - DNA, 25 bp, Saccharomyces pastorianus
gagcaactttaggtgctgcctttgc

SEQ ID NO: 135070 - DNA, 25 bp, Saccharomyces pastorianus
gggatgccttaaccactgattcaga

SEQ ID NO: 135071 - DNA, 25 bp, Saccharomyces pastorianus
aattgaactgaaactgcccgtcttt

SEQ ID NO: 135072 - DNA, 25 bp, Saccharomyces pastorianus
ctgttgcccgcatttggtgcgaaaa

SEQ ID NO: 135073 - DNA, 25 bp, Saccharomyces pastorianus
ttgccgctgaggagattgaccccaa

SEQ ID NO: 135074 - DNA, 25 bp, Saccharomyces pastorianus
agaacgatccaagcggtattcttta

SEQ ID NO: 135075 - DNA, 25 bp, Saccharomyces pastorianus
ggtttgaaatcatcctgtggtatac

SEQ ID NO: 135076 - DNA, 25 bp, Saccharomyces pastorianus
agtagccgtgaatcttttacagaca

SEQ ID NO: 135077 - DNA, 25 bp, Saccharomyces pastorianus
ggatccaacataccagttagtgaag

SEQ ID NO: 135078 - DNA, 25 bp, Saccharomyces pastorianus
atcaatcttttattcacgcctggat

SEQ ID NO: 135079 - DNA, 25 bp, Saccharomyces pastorianus
attctttattcatcaggtatcccac

SEQ ID NO: 135080 - DNA, 25 bp, Saccharomyces pastorianus
agccccatcgaactttccagagaat

SEQ ID NO: 135081 - DNA, 25 bp, Saccharomyces pastorianus
taaagccactcttcaagggagccca

SEQ ID NO: 135082 - DNA, 25 bp, Saccharomyces pastorianus
gatcccaacggtacacatttgcaat

SEQ ID NO: 135083 - DNA, 25 bp, Saccharomyces pastorianus
actacccattgctacaaggcttaca

SEQ ID NO: 135084 - DNA, 25 bp, Saccharomyces pastorianus
ggtatactttcagccacagagttca

SEQ ID NO: 135085 - DNA, 25 bp, Saccharomyces pastorianus
gaatttactatcttgatggcagcgt

SEQ ID NO: 135086 - DNA, 25 bp, Saccharomyces pastorianus
ctttagctgctacatttgggtcaat

SEQ ID NO: 135087 - DNA, 25 bp, Saccharomyces pastorianus
tctaatccagagaattcctccagtt

SEQ ID NO: 135088 - DNA, 25 bp, Saccharomyces pastorianus
tatgtcgcattctggttcattgggt

SEQ ID NO: 135089 - DNA, 25 bp, Saccharomyces pastorianus
gatgagggtttccaaactccaacct

SEQ ID NO: 135090 - DNA, 25 bp, Saccharomyces pastorianus
attacttcacgggttttcatcatac

SEQ ID NO: 135091 - DNA, 25 bp, Saccharomyces pastorianus
actatggatttgtgccacgacggcc

SEQ ID NO: 135092 - DNA, 25 bp, Saccharomyces pastorianus
gggttttcatccaatatgtcgcatt

SEQ ID NO: 135093 - DNA, 25 bp, Saccharomyces pastorianus
atggctgcagcaacgtgggttttca

SEQ ID NO: 135094 - DNA, 25 bp, Saccharomyces pastorianus
gacggccatttacaatttcattcta

SEQ ID NO: 135095 - DNA, 25 bp, Saccharomyces pastorianus
ctccagttcaccagcttctaaatat

SEQ ID NO: 135096 - DNA, 25 bp, Saccharomyces pastorianus
ggctgacatggccaaatatgctgat

SEQ ID NO: 135097 - DNA, 25 bp, Saccharomyces pastorianus
tgacttcaccagtgaggctgacatg

SEQ ID NO: 135098 - DNA, 25 bp, Saccharomyces pastorianus
catcaaaacttgttgggttcacttt

SEQ ID NO: 135099 - DNA, 25 bp, Saccharomyces pastorianus
gacagcgaaactgatgccggttatt

SEQ ID NO: 135100 - DNA, 25 bp, Saccharomyces pastorianus
ggtaaacagggttccagtggcatct

SEQ ID NO: 135101 - DNA, 25 bp, Saccharomyces pastorianus
gttgggttcactttccgacatagaa

SEQ ID NO: 135102 - DNA, 25 bp, Saccharomyces pastorianus
tgactcggcagtatcatcaaaactt

SEQ ID NO: 135103 - DNA, 25 bp, Saccharomyces pastorianus
ttaacggctatggtagatgactcgg

SEQ ID NO: 135104 - DNA, 25 bp, Saccharomyces pastorianus
gtggcatcttattcaacggactgga

SEQ ID NO: 135105 - DNA, 25 bp, Saccharomyces pastorianus
gccggttattttgatgacttcacca

SEQ ID NO: 135106 - DNA, 25 bp, Saccharomyces pastorianus
ttttacaccccaactagacagcgaa

SEQ ID NO: 135107 - DNA, 25 bp, Saccharomyces pastorianus
actggtcgttgggttgtatgctgtt

SEQ ID NO: 135108 - DNA, 25 bp, Saccharomyces pastorianus
acaccatttagtggatcatcgacta

SEQ ID NO: 135109 - DNA, 25 bp, Saccharomyces pastorianus
tatgcgaactccatggttgggtctc

SEQ ID NO: 135110 - DNA, 25 bp, Saccharomyces pastorianus
ctggaatttccagcgtttacagaga

SEQ ID NO: 135111 - DNA, 25 bp, Saccharomyces pastorianus
taccaggcggtgattttcgtacatt

SEQ ID NO: 135112 - DNA, 25 bp, Saccharomyces pastorianus
ttgggtctccggattatatggcttt

SEQ ID NO: 135113 - DNA, 25 bp, Saccharomyces pastorianus
atgcgttacatgatttaggctatac

SEQ ID NO: 135114 - DNA, 25 bp, Saccharomyces pastorianus
agattttggtttggctgctggtacg

SEQ ID NO: 135115 - DNA, 25 bp, Saccharomyces pastorianus
aagtggccatgcgagattttacatc

SEQ ID NO: 135116 - DNA, 25 bp, Saccharomyces pastorianus
acttcttaatcgatgccaagggaca

SEQ ID NO: 135117 - DNA, 25 bp, Saccharomyces pastorianus
actttactgtggattactggtcgtt

SEQ ID NO: 135118 - DNA, 25 bp, Saccharomyces pastorianus
actattgtttaagctcaacgagaca

SEQ ID NO: 135119 - DNA, 25 bp, Saccharomyces pastorianus
tcccaagaagcttccaccaaagttt

SEQ ID NO: 135120 - DNA, 25 bp, Saccharomyces pastorianus
tgcaacagcaaagccaacttccgaa

SEQ ID NO: 135121 - DNA, 25 bp, Saccharomyces pastorianus
gacatagacgaagtatctcaacctg

SEQ ID NO: 135122 - DNA, 25 bp, Saccharomyces pastorianus
cacagagagttgttagtgtttgcaa

SEQ ID NO: 135123 - DNA, 25 bp, Saccharomyces pastorianus
aagttctagaatacctgcaacagca

SEQ ID NO: 135124 - DNA, 25 bp, Saccharomyces pastorianus
gacaacgcacgaagcaagttctaga

SEQ ID NO: 135125 - DNA, 25 bp, Saccharomyces pastorianus
ggatgtctcgaactctcccaagaag

SEQ ID NO: 135126 - DNA, 25 bp, Saccharomyces pastorianus
ccaacttccgaattctgaccagatt

SEQ ID NO: 135127 - DNA, 25 bp, Saccharomyces pastorianus
agagtggtcctcttacttacaaagg

SEQ ID NO: 135128 - DNA, 25 bp, Saccharomyces pastorianus
tctcaacctgatatggatgtctcga

SEQ ID NO: 135129 - DNA, 25 bp, Saccharomyces pastorianus
gagcaatttgagtttcgatgggcat

SEQ ID NO: 135130 - DNA, 25 bp, Saccharomyces pastorianus
gggcactggactgtttcctaaccaa

SEQ ID NO: 135131 - DNA, 25 bp, Saccharomyces pastorianus
aaggcctgtgggtatcaatgattca

SEQ ID NO: 135132 - DNA, 25 bp, Saccharomyces pastorianus
tcaatgattcaccttcgccggtaaa

SEQ ID NO: 135133 - DNA, 25 bp, Saccharomyces pastorianus
ctcttggcaggcaatatgagcaatt

SEQ ID NO: 135134 - DNA, 25 bp, Saccharomyces pastorianus
tggactgtttcctaaccaaaatata

SEQ ID NO: 135135 - DNA, 25 bp, Saccharomyces pastorianus
gggtatcaatgattcaccttcgccg

SEQ ID NO: 135136 - DNA, 25 bp, Saccharomyces pastorianus
tttgagtttcgatgggcatgggact

SEQ ID NO: 135137 - DNA, 25 bp, Saccharomyces pastorianus
gaggacaaggcctgtgggtatcaat

SEQ ID NO: 135138 - DNA, 25 bp, Saccharomyces pastorianus
atgattcaccttcgccggtaaacca

SEQ ID NO: 135139 - DNA, 25 bp, Saccharomyces pastorianus
tttcgatgggcatgggactcctggg

SEQ ID NO: 135140 - DNA, 25 bp, Saccharomyces pastorianus
gagactcctgaagcggacccaaaga

SEQ ID NO: 135141 - DNA, 25 bp, Saccharomyces pastorianus
cattgcctcattattcccattgaac

SEQ ID NO: 135142 - DNA, 25 bp, Saccharomyces pastorianus
aatacctcgttctaaagttctgcag

SEQ ID NO: 135143 - DNA, 25 bp, Saccharomyces pastorianus
gacgacgtgtactagcctttttact

SEQ ID NO: 135144 - DNA, 25 bp, Saccharomyces pastorianus
tttttacttaacttgccacgcaggg

SEQ ID NO: 135145 - DNA, 25 bp, Saccharomyces pastorianus
atggaattcttcaacctgtttacaa

SEQ ID NO: 135146 - DNA, 25 bp, Saccharomyces pastorianus
aatttaccgtctacgagactcctga

SEQ ID NO: 135147 - DNA, 25 bp, Saccharomyces pastorianus
gaacgttctattcatttccacaaac

SEQ ID NO: 135148 - DNA, 25 bp, Saccharomyces pastorianus
atgttacgattcacactcttccaaa

SEQ ID NO: 135149 - DNA, 25 bp, Saccharomyces pastorianus
tatggatatctcaggccattgcctc

SEQ ID NO: 135150 - DNA, 25 bp, Saccharomyces pastorianus
tagatctgcagtttggacgacgtgt

SEQ ID NO: 135151 - DNA, 25 bp, Saccharomyces pastorianus
tagaggcgcgcttacatagtcttgt

SEQ ID NO: 135152 - DNA, 25 bp, Saccharomyces pastorianus
atctggaaaagttctcccgtcattc

SEQ ID NO: 135153 - DNA, 25 bp, Saccharomyces pastorianus
atagtcttgttgtcggagcctttgc

SEQ ID NO: 135154 - DNA, 25 bp, Saccharomyces pastorianus
gcataaccagttccatcgtttccta

SEQ ID NO: 135155 - DNA, 25 bp, Saccharomyces pastorianus
tacggacccgactagttgccaacaa

SEQ ID NO: 135156 - DNA, 25 bp, Saccharomyces pastorianus
cgatccgtaggcgaatgcagttcat

SEQ ID NO: 135157 - DNA, 25 bp, Saccharomyces pastorianus
gtcattcgtctgtatacggttctta

SEQ ID NO: 135158 - DNA, 25 bp, Saccharomyces pastorianus
agaggtattctggtggccctttcca

SEQ ID NO: 135159 - DNA, 25 bp, Saccharomyces pastorianus
taaatcacagcgctggtaccattgg

SEQ ID NO: 135160 - DNA, 25 bp, Saccharomyces pastorianus
tggaaactagaaggtctccccggat

SEQ ID NO: 135161 - DNA, 25 bp, Saccharomyces pastorianus
ggcggcgtcattgctaagatcatta

SEQ ID NO: 135162 - DNA, 25 bp, Saccharomyces pastorianus
acgctcccgttgtacctaaggtgat

SEQ ID NO: 135163 - DNA, 25 bp, Saccharomyces pastorianus
caatgttccttgtttgactgctgaa

SEQ ID NO: 135164 - DNA, 25 bp, Saccharomyces pastorianus
tgcgcaccctgctttctataaacgg

SEQ ID NO: 135165 - DNA, 25 bp, Saccharomyces pastorianus
gcgaatcaccataccaaaccttaaa

SEQ ID NO: 135166 - DNA, 25 bp, Saccharomyces pastorianus
gctgaaaagactcatgcgcaccctg

SEQ ID NO: 135167 - DNA, 25 bp, Saccharomyces pastorianus
ggtgcaccctatccgaaaacacaag

SEQ ID NO: 135168 - DNA, 25 bp, Saccharomyces pastorianus
gaattcgtccgtcacaacgatcaac

SEQ ID NO: 135169 - DNA, 25 bp, Saccharomyces pastorianus
gcgcccaaaatttgactacctctag

SEQ ID NO: 135170 - DNA, 25 bp, Saccharomyces pastorianus
gagaaactctgaaggctctagccca

SEQ ID NO: 135171 - DNA, 25 bp, Saccharomyces pastorianus
aaaactgttgctgccgatcagtctg

SEQ ID NO: 135172 - DNA, 25 bp, Saccharomyces pastorianus
agttcaacagcttctagggtgcacc

SEQ ID NO: 135173 - DNA, 25 bp, Saccharomyces pastorianus
ttcccatacaccttgtttaacagat

SEQ ID NO: 135174 - DNA, 25 bp, Saccharomyces pastorianus
gtgaacataggttcccatacacctt

SEQ ID NO: 135175 - DNA, 25 bp, Saccharomyces pastorianus
cagcgtgaacataggttcccataca

SEQ ID NO: 135176 - DNA, 25 bp, Saccharomyces pastorianus
cataggttcccatacaccttgttta

SEQ ID NO: 135177 - DNA, 25 bp, Saccharomyces pastorianus
ttgtttaacagatagcacattcacc

SEQ ID NO: 135178 - DNA, 25 bp, Saccharomyces pastorianus
aacataggttcccatacaccttgtt

SEQ ID NO: 135179 - DNA, 25 bp, Saccharomyces pastorianus
gaaacagcgtgaacataggttccca

SEQ ID NO: 135180 - DNA, 25 bp, Saccharomyces pastorianus
atacaccttgtttaacagatagcac

SEQ ID NO: 135181 - DNA, 25 bp, Saccharomyces pastorianus
ggttcccatacaccttgtttaacag

SEQ ID NO: 135182 - DNA, 25 bp, Saccharomyces pastorianus
catatgtcaagaaacagcgtgaaca

SEQ ID NO: 135183 - DNA, 25 bp, Saccharomyces pastorianus
aacagcgtgaacataggttcccata

SEQ ID NO: 135184 - DNA, 25 bp, Saccharomyces pastorianus
taacaatcatcatcgccaggctagt

SEQ ID NO: 135185 - DNA, 25 bp, Saccharomyces pastorianus
acaactggtggtacagctggtgcaa

SEQ ID NO: 135186 - DNA, 25 bp, Saccharomyces pastorianus
ttccgtttccattgcagacacttat

SEQ ID NO: 135187 - DNA, 25 bp, Saccharomyces pastorianus
gatgcatcttccaccaaatttgttc

SEQ ID NO: 135188 - DNA, 25 bp, Saccharomyces pastorianus
gcacttatttatctggctcttcaca

SEQ ID NO: 135189 - DNA, 25 bp, Saccharomyces pastorianus
tggaccaattttacgctgcagctca

SEQ ID NO: 135190 - DNA, 25 bp, Saccharomyces pastorianus
ggcaccgattatgagtattccgcta

SEQ ID NO: 135191 - DNA, 25 bp, Saccharomyces pastorianus
tttcaaaagccccattccacaagtt

SEQ ID NO: 135192 - DNA, 25 bp, Saccharomyces pastorianus
gcaaatggtattcgcggtattcgca

SEQ ID NO: 135193 - DNA, 25 bp, Saccharomyces pastorianus
aagtcttcagcttattcttcttccg

SEQ ID NO: 135194 - DNA, 25 bp, Saccharomyces pastorianus
atagtatctccagagccttctgaag

SEQ ID NO: 135195 - DNA, 25 bp, Saccharomyces pastorianus
tacgttacttgaacggcgcagctcc

SEQ ID NO: 135196 - DNA, 25 bp, Saccharomyces pastorianus
gaggtgtatgccatctacgttactt

SEQ ID NO: 135197 - DNA, 25 bp, Saccharomyces pastorianus
atagcctatctgtttcatatgccgt

SEQ ID NO: 135198 - DNA, 25 bp, Saccharomyces pastorianus
gaggatgccctatggtactaggtaa

SEQ ID NO: 135199 - DNA, 25 bp, Saccharomyces pastorianus
atgggatttcgctgtaatactgacg

SEQ ID NO: 135200 - DNA, 25 bp, Saccharomyces pastorianus
tttcatatgccgtctctaaatctag

SEQ ID NO: 135201 - DNA, 25 bp, Saccharomyces pastorianus
atacttatttgctgggaggatgccc

SEQ ID NO: 135202 - DNA, 25 bp, Saccharomyces pastorianus
attcgtttatatagggcatggcgga

SEQ ID NO: 135203 - DNA, 25 bp, Saccharomyces pastorianus
ttatcgcgtttccattaccaactac

SEQ ID NO: 135204 - DNA, 25 bp, Saccharomyces pastorianus
gcaaaaccttcctctcaattagtga

SEQ ID NO: 135205 - DNA, 25 bp, Saccharomyces pastorianus
tttttactgggctgctcttcagcag

SEQ ID NO: 135206 - DNA, 25 bp, Saccharomyces pastorianus
aaacatctcatcgtactatactgaa

SEQ ID NO: 135207 - DNA, 25 bp, Saccharomyces pastorianus
cattccttccgaaaattggtcacaa

SEQ ID NO: 135208 - DNA, 25 bp, Saccharomyces pastorianus
agtgtccttttcaatgcttctgttt

SEQ ID NO: 135209 - DNA, 25 bp, Saccharomyces pastorianus
gggtatctttgatttggatccttta

SEQ ID NO: 135210 - DNA, 25 bp, Saccharomyces pastorianus
gatacgctatcatttgtttttgact

SEQ ID NO: 135211 - DNA, 25 bp, Saccharomyces pastorianus
attcattcattgctttacacgccta

SEQ ID NO: 135212 - DNA, 25 bp, Saccharomyces pastorianus
taaagagcctaaacgactgtcaaat

SEQ ID NO: 135213 - DNA, 25 bp, Saccharomyces pastorianus
gcagaatgatattttgctcactgag

SEQ ID NO: 135214 - DNA, 25 bp, Saccharomyces pastorianus
gaaatcttttcctgtttgttcaatg

SEQ ID NO: 135215 - DNA, 25 bp, Saccharomyces pastorianus
tatccgaacttctgggagttttatc

SEQ ID NO: 135216 - DNA, 25 bp, Saccharomyces pastorianus
atatctagtgctcagagtgcccaga

SEQ ID NO: 135217 - DNA, 25 bp, Saccharomyces pastorianus
ttcacgtcagagcatcaacccgaga

SEQ ID NO: 135218 - DNA, 25 bp, Saccharomyces pastorianus
aaggtcttttgagcctttgtcggca

SEQ ID NO: 135219 - DNA, 25 bp, Saccharomyces pastorianus
ctttgtcggcaaattcctcggaaga

SEQ ID NO: 135220 - DNA, 25 bp, Saccharomyces pastorianus
cgtcgtgtcgattcggtggcaacta

SEQ ID NO: 135221 - DNA, 25 bp, Saccharomyces pastorianus
aacagccgctgcaagttcaataact

SEQ ID NO: 135222 - DNA, 25 bp, Saccharomyces pastorianus
tacgagcttttcttttctaatactt

SEQ ID NO: 135223 - DNA, 25 bp, Saccharomyces pastorianus
attgcttctgtagagagtacgccaa

SEQ ID NO: 135224 - DNA, 25 bp, Saccharomyces pastorianus
ctaaagcagttgatctcgcggagga

SEQ ID NO: 135225 - DNA, 25 bp, Saccharomyces pastorianus
aaagttcctggtttgagatcgacga

SEQ ID NO: 135226 - DNA, 25 bp, Saccharomyces pastorianus
agttgctgagcaagttcgtcgtcgt

SEQ ID NO: 135227 - DNA, 25 bp, Saccharomyces pastorianus
acgatcatctgttcacgtcgacgaa

SEQ ID NO: 135228 - DNA, 25 bp, Saccharomyces pastorianus
aagagtttagtgtcatcagcgagga

SEQ ID NO: 135229 - DNA, 25 bp, Saccharomyces pastorianus
aagtgctacagttgtcggaagggct

SEQ ID NO: 135230 - DNA, 25 bp, Saccharomyces pastorianus
acctgtccagtgatgacttgtccaa

SEQ ID NO: 135231 - DNA, 25 bp, Saccharomyces pastorianus
ggaagggctgctactgctagacctg

SEQ ID NO: 135232 - DNA, 25 bp, Saccharomyces pastorianus
agagctgttagttacggctttcaaa

SEQ ID NO: 135233 - DNA, 25 bp, Saccharomyces pastorianus
ggacaaagatccagctttccggaaa

SEQ ID NO: 135234 - DNA, 25 bp, Saccharomyces pastorianus
ctgtgactcctgtagaccgtgtgaa

SEQ ID NO: 135235 - DNA, 25 bp, Saccharomyces pastorianus
tgccaaaaactttcaacctgtccag

SEQ ID NO: 135236 - DNA, 25 bp, Saccharomyces pastorianus
gaacgatgtggtaacaggcttggat

SEQ ID NO: 135237 - DNA, 25 bp, Saccharomyces pastorianus
acgcaactgcgccatatgccaaaaa

SEQ ID NO: 135238 - DNA, 25 bp, Saccharomyces pastorianus
gattctgctcatatcggcgagttga

SEQ ID NO: 135239 - DNA, 25 bp, Saccharomyces pastorianus
tcagccacagtggatatttgattgt

SEQ ID NO: 135240 - DNA, 25 bp, Saccharomyces pastorianus
aaggcgaattggtacctgccaacaa

SEQ ID NO: 135241 - DNA, 25 bp, Saccharomyces pastorianus
tgttgacaggccagttttgaaaaac

SEQ ID NO: 135242 - DNA, 25 bp, Saccharomyces pastorianus
gggaggctcttccacctcacttaag

SEQ ID NO: 135243 - DNA, 25 bp, Saccharomyces pastorianus
aaacaaggtagctggcagaacgtat

SEQ ID NO: 135244 - DNA, 25 bp, Saccharomyces pastorianus
acctgccaacaaatatcttccaggg

SEQ ID NO: 135245 - DNA, 25 bp, Saccharomyces pastorianus
gaaggatattgacatgtccaaggtc

SEQ ID NO: 135246 - DNA, 25 bp, Saccharomyces pastorianus
gacgatgacgaagagctacaagctc

SEQ ID NO: 135247 - DNA, 25 bp, Saccharomyces pastorianus
ggtatcaaatattccgaaacttcag

SEQ ID NO: 135248 - DNA, 25 bp, Saccharomyces pastorianus
gtccaaggtcactcatcaaattgtt

SEQ ID NO: 135249 - DNA, 25 bp, Saccharomyces pastorianus
gaacgtatattcagccacagtggat

SEQ ID NO: 135250 - DNA, 25 bp, Saccharomyces pastorianus
gaacgcttggttcgtaaagtgtttg

SEQ ID NO: 135251 - DNA, 25 bp, Saccharomyces pastorianus
gcaaacaagggctctactgcaccaa

SEQ ID NO: 135252 - DNA, 25 bp, Saccharomyces pastorianus
tctactgcaccaactactttttact

SEQ ID NO: 135253 - DNA, 25 bp, Saccharomyces pastorianus
gaccatattatcaaggagcgttatc

SEQ ID NO: 135254 - DNA, 25 bp, Saccharomyces pastorianus
gagcgttatccaagtttcccagatg

SEQ ID NO: 135255 - DNA, 25 bp, Saccharomyces pastorianus
agaagtctcttctgctaaaaggtta

SEQ ID NO: 135256 - DNA, 25 bp, Saccharomyces pastorianus
aaggtatctatcctagagagccaag

SEQ ID NO: 135257 - DNA, 25 bp, Saccharomyces pastorianus
gagaacacaagacttttgctaggaa

SEQ ID NO: 135258 - DNA, 25 bp, Saccharomyces pastorianus
atctaatgcatgagcccgttttggc

SEQ ID NO: 135259 - DNA, 25 bp, Saccharomyces pastorianus
aatggttagcctatgttgccaagga

SEQ ID NO: 135260 - DNA, 25 bp, Saccharomyces pastorianus
taatttgccctctaccaaccaggtt

SEQ ID NO: 135261 - DNA, 25 bp, Saccharomyces pastorianus
atgttccccttggtcattgcaaatt

SEQ ID NO: 135262 - DNA, 25 bp, Saccharomyces pastorianus
gcaaatttcagatattcctgctgca

SEQ ID NO: 135263 - DNA, 25 bp, Saccharomyces pastorianus
ccttcaaacgaatcatgttcccctt

SEQ ID NO: 135264 - DNA, 25 bp, Saccharomyces pastorianus
atgtcgacatggatgcaagtcccgc

SEQ ID NO: 135265 - DNA, 25 bp, Saccharomyces pastorianus
tgcacaacacagttccgcaagttac

SEQ ID NO: 135266 - DNA, 25 bp, Saccharomyces pastorianus
gtatcctcgctcatgaacggattgg

SEQ ID NO: 135267 - DNA, 25 bp, Saccharomyces pastorianus
taagtgtacccgatagacagtcaat

SEQ ID NO: 135268 - DNA, 25 bp, Saccharomyces pastorianus
atcccgcttaactatgctataacac

SEQ ID NO: 135269 - DNA, 25 bp, Saccharomyces pastorianus
gactatcatattatcttcagctggc

SEQ ID NO: 135270 - DNA, 25 bp, Saccharomyces pastorianus
ggcaaaaactcttcagtatcctcgc

SEQ ID NO: 135271 - DNA, 25 bp, Saccharomyces pastorianus
taacacggaatatcttgcacaacac

SEQ ID NO: 135272 - DNA, 25 bp, Saccharomyces pastorianus
gacggtgcatgctctgtggaagata

SEQ ID NO: 135273 - DNA, 25 bp, Saccharomyces pastorianus
gccggaaactctatatttggccata

SEQ ID NO: 135274 - DNA, 25 bp, Saccharomyces pastorianus
actatatcccgtttgccaattactg

SEQ ID NO: 135275 - DNA, 25 bp, Saccharomyces pastorianus
tattaccgtcattatgtgcctcagc

SEQ ID NO: 135276 - DNA, 25 bp, Saccharomyces pastorianus
gggcacctgggatggcaacttaatc

SEQ ID NO: 135277 - DNA, 25 bp, Saccharomyces pastorianus
tcagcggcaatgttcctttcgagaa

SEQ ID NO: 135278 - DNA, 25 bp, Saccharomyces pastorianus
taagtttggccttctgccggaaact

SEQ ID NO: 135279 - DNA, 25 bp, Saccharomyces pastorianus
gtggacttcaagttcatcgggatat

SEQ ID NO: 135280 - DNA, 25 bp, Saccharomyces pastorianus
aggaaatatactcccctagcataaa

SEQ ID NO: 135281 - DNA, 25 bp, Saccharomyces pastorianus
ggttggtacatcatgcctgttcatc

SEQ ID NO: 135282 - DNA, 25 bp, Saccharomyces pastorianus
gttggatctactattcacgacgagt

SEQ ID NO: 135283 - DNA, 25 bp, Saccharomyces pastorianus
gtcccaaggaccattctcggtaatg

SEQ ID NO: 135284 - DNA, 25 bp, Saccharomyces pastorianus
gactgccttgagctgtaatcggttg

SEQ ID NO: 135285 - DNA, 25 bp, Saccharomyces pastorianus
gcagcagtgctcaaatgatgactct

SEQ ID NO: 135286 - DNA, 25 bp, Saccharomyces pastorianus
aaaggatgaggtttcgagagccgat

SEQ ID NO: 135287 - DNA, 25 bp, Saccharomyces pastorianus
gtttcgagagccgatgacttcacct

SEQ ID NO: 135288 - DNA, 25 bp, Saccharomyces pastorianus
gaacaagtctatttccactcaaatg

SEQ ID NO: 135289 - DNA, 25 bp, Saccharomyces pastorianus
taatcggttgatatactctgagaac

SEQ ID NO: 135290 - DNA, 25 bp, Saccharomyces pastorianus
tatcctgcaagagatttctatgaac

SEQ ID NO: 135291 - DNA, 25 bp, Saccharomyces pastorianus
gatgactcttttcatacgaattcga

SEQ ID NO: 135292 - DNA, 25 bp, Saccharomyces pastorianus
acttcacctcctcttttaatgacag

SEQ ID NO: 135293 - DNA, 25 bp, Saccharomyces pastorianus
atacgaattcgactgccttgagctg

SEQ ID NO: 135294 - DNA, 25 bp, Saccharomyces pastorianus
gtaacgtcatcattgttcctcattc

SEQ ID NO: 135295 - DNA, 25 bp, Saccharomyces pastorianus
agcgtggttcaggtgaatacttatt

SEQ ID NO: 135296 - DNA, 25 bp, Saccharomyces pastorianus
gggcatcacttgtacctggataact

SEQ ID NO: 135297 - DNA, 25 bp, Saccharomyces pastorianus
aagctttgctttgaaatgtggtggt

SEQ ID NO: 135298 - DNA, 25 bp, Saccharomyces pastorianus
gagcagcagctattcgatggcaaaa

SEQ ID NO: 135299 - DNA, 25 bp, Saccharomyces pastorianus
atgtggtggtgaaccaagactttca

SEQ ID NO: 135300 - DNA, 25 bp, Saccharomyces pastorianus
gctttggctttatggcgatgacgat

SEQ ID NO: 135301 - DNA, 25 bp, Saccharomyces pastorianus
aagactttcattggagcagcagcta

SEQ ID NO: 135302 - DNA, 25 bp, Saccharomyces pastorianus
gtggacttagagtatcaagattctt

SEQ ID NO: 135303 - DNA, 25 bp, Saccharomyces pastorianus
attgttcctcattcagggcatcact

SEQ ID NO: 135304 - DNA, 25 bp, Saccharomyces pastorianus
gtaattgtgactggctttggcttta

SEQ ID NO: 135305 - DNA, 25 bp, Saccharomyces pastorianus
gaaagtccatcttacatacaatcag

SEQ ID NO: 135306 - DNA, 25 bp, Saccharomyces pastorianus
ggcgctgatttacccatcgaaaacg

SEQ ID NO: 135307 - DNA, 25 bp, Saccharomyces pastorianus
gtgactaaaaccacgcgtttgaata

SEQ ID NO: 135308 - DNA, 25 bp, Saccharomyces pastorianus
ggtcacgtgactaaaaccacgcgtt

SEQ ID NO: 135309 - DNA, 25 bp, Saccharomyces pastorianus
agaaatagcattgcttccggcgctg

SEQ ID NO: 135310 - DNA, 25 bp, Saccharomyces pastorianus
atagcattgcttccggcgctgattt

SEQ ID NO: 135311 - DNA, 25 bp, Saccharomyces pastorianus
gtccatcttacatacaatcagaaat

SEQ ID NO: 135312 - DNA, 25 bp, Saccharomyces pastorianus
ttacccatcgaaaacgacaatgttg

SEQ ID NO: 135313 - DNA, 25 bp, Saccharomyces pastorianus
aaatcatctcaaggtcacgtgacta

SEQ ID NO: 135314 - DNA, 25 bp, Saccharomyces pastorianus
accacgcgtttgaataataatacca

SEQ ID NO: 135315 - DNA, 25 bp, Saccharomyces pastorianus
tccaaatcatctcaaggtcacgtga

SEQ ID NO: 135316 - DNA, 25 bp, Saccharomyces pastorianus
gagaatgccatacaacagcttctgt

SEQ ID NO: 135317 - DNA, 25 bp, Saccharomyces pastorianus
gaatatcgtttgtccattggtagcg

SEQ ID NO: 135318 - DNA, 25 bp, Saccharomyces pastorianus
gaactgagcgattcaatcattactt

SEQ ID NO: 135319 - DNA, 25 bp, Saccharomyces pastorianus
gaatcctcgtccctgacaaaatttg

SEQ ID NO: 135320 - DNA, 25 bp, Saccharomyces pastorianus
gaccacaaggtctgccacggaatat

SEQ ID NO: 135321 - DNA, 25 bp, Saccharomyces pastorianus
attggtagcgctccgacttcaagaa

SEQ ID NO: 135322 - DNA, 25 bp, Saccharomyces pastorianus
tactttagattccaatttcacgcac

SEQ ID NO: 135323 - DNA, 25 bp, Saccharomyces pastorianus
ggactaacaagttccgttggcgaat

SEQ ID NO: 135324 - DNA, 25 bp, Saccharomyces pastorianus
cacgcacttgaattttatccacgag

SEQ ID NO: 135325 - DNA, 25 bp, Saccharomyces pastorianus
ggtcgtctatgggtgaatcctcgtc

SEQ ID NO: 135326 - DNA, 25 bp, Saccharomyces pastorianus
aacagcttctgttgcctaaaataag

SEQ ID NO: 135327 - DNA, 25 bp, Saccharomyces pastorianus
tatctttcttcctccttttgcttta

SEQ ID NO: 135328 - DNA, 25 bp, Saccharomyces pastorianus
tgttcgcttgggttattcttcaaag

SEQ ID NO: 135329 - DNA, 25 bp, Saccharomyces pastorianus
aggcaattaatgacctgttcgcttg

SEQ ID NO: 135330 - DNA, 25 bp, Saccharomyces pastorianus
attaatgacctgttcgcttgggtta

SEQ ID NO: 135331 - DNA, 25 bp, Saccharomyces pastorianus
atcaatatctttcttcctccttttg

SEQ ID NO: 135332 - DNA, 25 bp, Saccharomyces pastorianus
aaatcaatatctttcttcctccttt

SEQ ID NO: 135333 - DNA, 25 bp, Saccharomyces pastorianus
gggttattcttcaaagcacaaatca

SEQ ID NO: 135334 - DNA, 25 bp, Saccharomyces pastorianus
aatatctttcttcctccttttgctt

SEQ ID NO: 135335 - DNA, 25 bp, Saccharomyces pastorianus
acctgttcgcttgggttattcttca

SEQ ID NO: 135336 - DNA, 25 bp, Saccharomyces pastorianus
atgacctgttcgcttgggttattct

SEQ ID NO: 135337 - DNA, 25 bp, Saccharomyces pastorianus
cttgggttattcttcaaagcacaaa

SEQ ID NO: 135338 - DNA, 25 bp, Saccharomyces pastorianus
tttcttcctcgtccctagggaccag

SEQ ID NO: 135339 - DNA, 25 bp, Saccharomyces pastorianus
tttactatttcttcctcgtccctag

SEQ ID NO: 135340 - DNA, 25 bp, Saccharomyces pastorianus
ttcatcaatatcttcgtcttcctca

SEQ ID NO: 135341 - DNA, 25 bp, Saccharomyces pastorianus
gttgtcatttactatttcttcctcg

SEQ ID NO: 135342 - DNA, 25 bp, Saccharomyces pastorianus
aagacatcttctccttcttcttcat

SEQ ID NO: 135343 - DNA, 25 bp, Saccharomyces pastorianus
gagtcaaagacatcttctccttctt

SEQ ID NO: 135344 - DNA, 25 bp, Saccharomyces pastorianus
tgtcatttactatttcttcctcgtc

SEQ ID NO: 135345 - DNA, 25 bp, Saccharomyces pastorianus
ttcgtcttcctcagaggagtcaaag

SEQ ID NO: 135346 - DNA, 25 bp, Saccharomyces pastorianus
tcgtcttcatcaatatcttcgtctt

SEQ ID NO: 135347 - DNA, 25 bp, Saccharomyces pastorianus
aatatcttcgtcttcctcagaggag

SEQ ID NO: 135348 - DNA, 25 bp, Saccharomyces pastorianus
atcttcgtcttcatcaatatcttcg

SEQ ID NO: 135349 - DNA, 25 bp, Saccharomyces pastorianus
ttactatttccctttcaacggcaga

SEQ ID NO: 135350 - DNA, 25 bp, Saccharomyces pastorianus
ggtaaagtcttgattgtcgacaatc

SEQ ID NO: 135351 - DNA, 25 bp, Saccharomyces pastorianus
atccaagtgttatccagctttgtaa

SEQ ID NO: 135352 - DNA, 25 bp, Saccharomyces pastorianus
gcagacaggctgaggattacttaag

SEQ ID NO: 135353 - DNA, 25 bp, Saccharomyces pastorianus
taaccctggctggttttacttaatg

SEQ ID NO: 135354 - DNA, 25 bp, Saccharomyces pastorianus
tggttatttcctggtaaactacaat

SEQ ID NO: 135355 - DNA, 25 bp, Saccharomyces pastorianus
gaattcgtgatcagacagtctagcc

SEQ ID NO: 135356 - DNA, 25 bp, Saccharomyces pastorianus
agtctagccgaggtgatgaccactt

SEQ ID NO: 135357 - DNA, 25 bp, Saccharomyces pastorianus
gatttggaccagatcattgtagaat

SEQ ID NO: 135358 - DNA, 25 bp, Saccharomyces pastorianus
aaatctgtgtactatttcagtttga

SEQ ID NO: 135359 - DNA, 25 bp, Saccharomyces pastorianus
atgaccacttggttatcacctggaa

SEQ ID NO: 135360 - DNA, 25 bp, Saccharomyces pastorianus
gatgtctttgactcctctgaggaag

SEQ ID NO: 135361 - DNA, 25 bp, Saccharomyces pastorianus
aaagcgagctcctcttcaggaaaat

SEQ ID NO: 135362 - DNA, 25 bp, Saccharomyces pastorianus
ttcgaagctggtccctagggacgag

SEQ ID NO: 135363 - DNA, 25 bp, Saccharomyces pastorianus
gcgagctcctcttcaggaaaattta

SEQ ID NO: 135364 - DNA, 25 bp, Saccharomyces pastorianus
gagaagatgtctttgactcctctga

SEQ ID NO: 135365 - DNA, 25 bp, Saccharomyces pastorianus
gatgatcgactatccgaagatgatt

SEQ ID NO: 135366 - DNA, 25 bp, Saccharomyces pastorianus
tggagaatgctggtgttgaacgtac

SEQ ID NO: 135367 - DNA, 25 bp, Saccharomyces pastorianus
gagaagaagatgatcgactatccga

SEQ ID NO: 135368 - DNA, 25 bp, Saccharomyces pastorianus
ccgaagatgatttggatttgttaat

SEQ ID NO: 135369 - DNA, 25 bp, Saccharomyces pastorianus
gttgaacgtaccaaagcgagctcct

SEQ ID NO: 135370 - DNA, 25 bp, Saccharomyces pastorianus
aatgaagacccaggaacaagtattt

SEQ ID NO: 135371 - DNA, 25 bp, Saccharomyces pastorianus
gcattaaagcagtaccgacccgata

SEQ ID NO: 135372 - DNA, 25 bp, Saccharomyces pastorianus
gattttttcaaatggcacatgcttc

SEQ ID NO: 135373 - DNA, 25 bp, Saccharomyces pastorianus
gaaggcaacatatgaactaccacaa

SEQ ID NO: 135374 - DNA, 25 bp, Saccharomyces pastorianus
aagatgatgaacctgtcctgcctat

SEQ ID NO: 135375 - DNA, 25 bp, Saccharomyces pastorianus
attgcgccagggaatgctatgccta

SEQ ID NO: 135376 - DNA, 25 bp, Saccharomyces pastorianus
gagaaacttaatgtcactaccaacc

SEQ ID NO: 135377 - DNA, 25 bp, Saccharomyces pastorianus
tatagactctagctcgttgaacaaa

SEQ ID NO: 135378 - DNA, 25 bp, Saccharomyces pastorianus
acctgtcctgcctatattgttattt

SEQ ID NO: 135379 - DNA, 25 bp, Saccharomyces pastorianus
accaggcgcagattagcaagtcaat

SEQ ID NO: 135380 - DNA, 25 bp, Saccharomyces pastorianus
tgcttcggaaaaatcattgcgccag

SEQ ID NO: 135381 - DNA, 25 bp, Saccharomyces pastorianus
caaccaatactcctcgtaattacca

SEQ ID NO: 135382 - DNA, 25 bp, Saccharomyces pastorianus
acaggtgtcgttttctatgcattgg

SEQ ID NO: 135383 - DNA, 25 bp, Saccharomyces pastorianus
tgcgatcattccaacattatccttg

SEQ ID NO: 135384 - DNA, 25 bp, Saccharomyces pastorianus
attatccttggatgctttgagacaa

SEQ ID NO: 135385 - DNA, 25 bp, Saccharomyces pastorianus
gactgtagttttaatcggcactcaa

SEQ ID NO: 135386 - DNA, 25 bp, Saccharomyces pastorianus
ttttcagggctgtttacggattatg

SEQ ID NO: 135387 - DNA, 25 bp, Saccharomyces pastorianus
gggattttttccacgacacatattg

SEQ ID NO: 135388 - DNA, 25 bp, Saccharomyces pastorianus
taagaactcactcgttttgccaagt

SEQ ID NO: 135389 - DNA, 25 bp, Saccharomyces pastorianus
ggatttttcctattgccaactcaga

SEQ ID NO: 135390 - DNA, 25 bp, Saccharomyces pastorianus
cggcactcaacgctactttaagaac

SEQ ID NO: 135391 - DNA, 25 bp, Saccharomyces pastorianus
gaaattactccgttttatcatacaa

SEQ ID NO: 135392 - DNA, 25 bp, Saccharomyces pastorianus
gataagttcgatgctcacaggtgtc

SEQ ID NO: 135393 - DNA, 25 bp, Saccharomyces pastorianus
atatgtctgaacatccttaaaccag

SEQ ID NO: 135394 - DNA, 25 bp, Saccharomyces pastorianus
gaagctataatttctgggccgtcag

SEQ ID NO: 135395 - DNA, 25 bp, Saccharomyces pastorianus
gagtggactcctgtatgggatttgt

SEQ ID NO: 135396 - DNA, 25 bp, Saccharomyces pastorianus
ggaacccgtttgtgattctccactt

SEQ ID NO: 135397 - DNA, 25 bp, Saccharomyces pastorianus
gggccgtcagacacaccttatgaaa

SEQ ID NO: 135398 - DNA, 25 bp, Saccharomyces pastorianus
tggtaatatcatccgctgtggcgat

SEQ ID NO: 135399 - DNA, 25 bp, Saccharomyces pastorianus
gattctccacttgacgtagacattg

SEQ ID NO: 135400 - DNA, 25 bp, Saccharomyces pastorianus
gtgttcatgctgtttggagactcct

SEQ ID NO: 135401 - DNA, 25 bp, Saccharomyces pastorianus
gctgtggcgatatgagtgcctatca

SEQ ID NO: 135402 - DNA, 25 bp, Saccharomyces pastorianus
ctaccccatgaatccaccaaagata

SEQ ID NO: 135403 - DNA, 25 bp, Saccharomyces pastorianus
atgggatttgttacactgtgttcat

SEQ ID NO: 135404 - DNA, 25 bp, Saccharomyces pastorianus
tcgtgaaggagtacaaagtcatact

SEQ ID NO: 135405 - DNA, 25 bp, Saccharomyces pastorianus
aaagtcatactgaaaacattggcca

SEQ ID NO: 135406 - DNA, 25 bp, Saccharomyces pastorianus
gtcgaggatcgtgaaggagtacaaa

SEQ ID NO: 135407 - DNA, 25 bp, Saccharomyces pastorianus
gaaggagtacaaagtcatactgaaa

SEQ ID NO: 135408 - DNA, 25 bp, Saccharomyces pastorianus
aggagtacaaagtcatactgaaaac

SEQ ID NO: 135409 - DNA, 25 bp, Saccharomyces pastorianus
aagtcatactgaaaacattggccag

SEQ ID NO: 135410 - DNA, 25 bp, Saccharomyces pastorianus
atcgtgaaggagtacaaagtcatac

SEQ ID NO: 135411 - DNA, 25 bp, Saccharomyces pastorianus
gaggatcgtgaaggagtacaaagtc

SEQ ID NO: 135412 - DNA, 25 bp, Saccharomyces pastorianus
agtcatactgaaaacattggccagt

SEQ ID NO: 135413 - DNA, 25 bp, Saccharomyces pastorianus
atgtcgaggatcgtgaaggagtaca

SEQ ID NO: 135414 - DNA, 25 bp, Saccharomyces pastorianus
ggatcgtgaaggagtacaaagtcat

SEQ ID NO: 135415 - DNA, 25 bp, Saccharomyces pastorianus
gggtgctaccgcttataaacatatt

SEQ ID NO: 135416 - DNA, 25 bp, Saccharomyces pastorianus
atcggtgctctttgggcgttagcca

SEQ ID NO: 135417 - DNA, 25 bp, Saccharomyces pastorianus
gcgtaaacctactcctgaagatcgt

SEQ ID NO: 135418 - DNA, 25 bp, Saccharomyces pastorianus
gctaggtgctaagatcggtgctcca

SEQ ID NO: 135419 - DNA, 25 bp, Saccharomyces pastorianus
cagtgctctggctacaaaggttttc

SEQ ID NO: 135420 - DNA, 25 bp, Saccharomyces pastorianus
ggcgttagccacaactttctactgt

SEQ ID NO: 135421 - DNA, 25 bp, Saccharomyces pastorianus
ttatttgggttggtccagcttcagc

SEQ ID NO: 135422 - DNA, 25 bp, Saccharomyces pastorianus
gttttcttaagatccgccggtggtg

SEQ ID NO: 135423 - DNA, 25 bp, Saccharomyces pastorianus
attttcggtgaactatatggctaca

SEQ ID NO: 135424 - DNA, 25 bp, Saccharomyces pastorianus
ggtgctccatttgctgcaattgctc

SEQ ID NO: 135425 - DNA, 25 bp, Saccharomyces pastorianus
aattgctctatggatcctgggtgct

SEQ ID NO: 135426 - DNA, 25 bp, Saccharomyces pastorianus
aacacttccatggtggaggttgagg

SEQ ID NO: 135427 - DNA, 25 bp, Saccharomyces pastorianus
tccatggtggaggttgagggccaac

SEQ ID NO: 135428 - DNA, 25 bp, Saccharomyces pastorianus
aactcacaaaacacttccatggtgg

SEQ ID NO: 135429 - DNA, 25 bp, Saccharomyces pastorianus
aaaacacttccatggtggaggttga

SEQ ID NO: 135430 - DNA, 25 bp, Saccharomyces pastorianus
acaaaacacttccatggtggaggtt

SEQ ID NO: 135431 - DNA, 25 bp, Saccharomyces pastorianus
ttcaactcacaaaacacttccatgg

SEQ ID NO: 135432 - DNA, 25 bp, Saccharomyces pastorianus
catggtggaggttgagggccaacaa

SEQ ID NO: 135433 - DNA, 25 bp, Saccharomyces pastorianus
cattcaactcacaaaacacttccat

SEQ ID NO: 135434 - DNA, 25 bp, Saccharomyces pastorianus
tcacaaaacacttccatggtggagg

SEQ ID NO: 135435 - DNA, 25 bp, Saccharomyces pastorianus
cttccatggtggaggttgagggcca

SEQ ID NO: 135436 - DNA, 25 bp, Saccharomyces pastorianus
tcaactcacaaaacacttccatggt

SEQ ID NO: 135437 - DNA, 25 bp, Saccharomyces pastorianus
tcttcttgatgtcttcaggaaaaaa

SEQ ID NO: 135438 - DNA, 25 bp, Saccharomyces pastorianus
tttgttttcttatttcttcttgatg

SEQ ID NO: 135439 - DNA, 25 bp, Saccharomyces pastorianus
tcttatttcttcttgatgtcttcag

SEQ ID NO: 135440 - DNA, 25 bp, Saccharomyces pastorianus
cctcaaaagggtgtatgcgcaatgt

SEQ ID NO: 135441 - DNA, 25 bp, Saccharomyces pastorianus
gtacgaaacctcaaaagggtgtatg

SEQ ID NO: 135442 - DNA, 25 bp, Saccharomyces pastorianus
cattacagtgcatgcggatggcagt

SEQ ID NO: 135443 - DNA, 25 bp, Saccharomyces pastorianus
gggtgtatgcgcaatgtatatatat

SEQ ID NO: 135444 - DNA, 25 bp, Saccharomyces pastorianus
tatttcttcttgatgtcttcaggaa

SEQ ID NO: 135445 - DNA, 25 bp, Saccharomyces pastorianus
gtgcatgcggatggcagtgttcttc

SEQ ID NO: 135446 - DNA, 25 bp, Saccharomyces pastorianus
aaaataaacagtggcattacagtgc

SEQ ID NO: 135447 - DNA, 25 bp, Saccharomyces pastorianus
acagtggcattacagtgcatgcgga

SEQ ID NO: 135448 - DNA, 25 bp, Saccharomyces pastorianus
agagaaccctactttcacactatat

SEQ ID NO: 135449 - DNA, 25 bp, Saccharomyces pastorianus
tgaggactacccgacatatgattat

SEQ ID NO: 135450 - DNA, 25 bp, Saccharomyces pastorianus
agctgtctcagcaatatccacttta

SEQ ID NO: 135451 - DNA, 25 bp, Saccharomyces pastorianus
agggttctacgtccattacttgtga

SEQ ID NO: 135452 - DNA, 25 bp, Saccharomyces pastorianus
atgctacttctttacatcctagtgg

SEQ ID NO: 135453 - DNA, 25 bp, Saccharomyces pastorianus
ggtacatgcccgattatgacttcat

SEQ ID NO: 135454 - DNA, 25 bp, Saccharomyces pastorianus
ctgggcctatatcgactggcaatat

SEQ ID NO: 135455 - DNA, 25 bp, Saccharomyces pastorianus
tggtgttgcgtcacaatctctacaa

SEQ ID NO: 135456 - DNA, 25 bp, Saccharomyces pastorianus
gattacgtccgattataccagccga

SEQ ID NO: 135457 - DNA, 25 bp, Saccharomyces pastorianus
tgaatacttacgctggtgggccttt

SEQ ID NO: 135458 - DNA, 25 bp, Saccharomyces pastorianus
tgggccttttcaacaagctgtctca

SEQ ID NO: 135459 - DNA, 25 bp, Saccharomyces pastorianus
gaatattccagttcttcatccataa

SEQ ID NO: 135460 - DNA, 25 bp, Saccharomyces pastorianus
tcacccagtggagacgatgagcggc

SEQ ID NO: 135461 - DNA, 25 bp, Saccharomyces pastorianus
cagaacgttagggtgagcggtaatc

SEQ ID NO: 135462 - DNA, 25 bp, Saccharomyces pastorianus
gaagattataattcacccagtggag

SEQ ID NO: 135463 - DNA, 25 bp, Saccharomyces pastorianus
gagcggtaatcctttccttggaagt

SEQ ID NO: 135464 - DNA, 25 bp, Saccharomyces pastorianus
aataatcgtcattccaacagcgaaa

SEQ ID NO: 135465 - DNA, 25 bp, Saccharomyces pastorianus
agaacctgcagatggtcagaacgtt

SEQ ID NO: 135466 - DNA, 25 bp, Saccharomyces pastorianus
cagcgaaaatagtgtttccggaagc

SEQ ID NO: 135467 - DNA, 25 bp, Saccharomyces pastorianus
aaactccttttattcctcgaatgag

SEQ ID NO: 135468 - DNA, 25 bp, Saccharomyces pastorianus
atgtctgtgcgaaacctcaccaata

SEQ ID NO: 135469 - DNA, 25 bp, Saccharomyces pastorianus
aaagctcatcattagaacctgcaga

SEQ ID NO: 135470 - DNA, 25 bp, Saccharomyces pastorianus
aatccaggcgtcatgataattcatc

SEQ ID NO: 135471 - DNA, 25 bp, Saccharomyces pastorianus
gcagaacttacttttattcctcaaa

SEQ ID NO: 135472 - DNA, 25 bp, Saccharomyces pastorianus
aacgaaatgaaagccggcacttcca

SEQ ID NO: 135473 - DNA, 25 bp, Saccharomyces pastorianus
ggcacttccacgagtacgcaaagag

SEQ ID NO: 135474 - DNA, 25 bp, Saccharomyces pastorianus
aaagtgctcacgttacatttggcga

SEQ ID NO: 135475 - DNA, 25 bp, Saccharomyces pastorianus
atgaatccattttacgtcgtaacca

SEQ ID NO: 135476 - DNA, 25 bp, Saccharomyces pastorianus
aactgctgccgaagagtccgacgaa

SEQ ID NO: 135477 - DNA, 25 bp, Saccharomyces pastorianus
acgtcgtaaccaacgcggtgaagca

SEQ ID NO: 135478 - DNA, 25 bp, Saccharomyces pastorianus
aaggatggcagaggtcactatgact

SEQ ID NO: 135479 - DNA, 25 bp, Saccharomyces pastorianus
gtattagggcgctaactgctgccga

SEQ ID NO: 135480 - DNA, 25 bp, Saccharomyces pastorianus
gacaatggtaggtcgaagcccagat

SEQ ID NO: 135481 - DNA, 25 bp, Saccharomyces pastorianus
tctacttccgcaaatgatgtttcag

SEQ ID NO: 135482 - DNA, 25 bp, Saccharomyces pastorianus
gtctacgattttgctaatttgtcac

SEQ ID NO: 135483 - DNA, 25 bp, Saccharomyces pastorianus
ggcaatattgcatggctaccggtac

SEQ ID NO: 135484 - DNA, 25 bp, Saccharomyces pastorianus
gatttatatgttggtgcgagcggta

SEQ ID NO: 135485 - DNA, 25 bp, Saccharomyces pastorianus
ggctaccggtacatacaaacctcag

SEQ ID NO: 135486 - DNA, 25 bp, Saccharomyces pastorianus
tggatttcactattctctctgacga

SEQ ID NO: 135487 - DNA, 25 bp, Saccharomyces pastorianus
gaatttagcgaagcctccaataaga

SEQ ID NO: 135488 - DNA, 25 bp, Saccharomyces pastorianus
gtttcaagatcacttccagactgga

SEQ ID NO: 135489 - DNA, 25 bp, Saccharomyces pastorianus
gaagttcgatagacacacagatgct

SEQ ID NO: 135490 - DNA, 25 bp, Saccharomyces pastorianus
caaacctcagatccatgtctacgat

SEQ ID NO: 135491 - DNA, 25 bp, Saccharomyces pastorianus
tcaggtttctggtacaaacgtttca

SEQ ID NO: 135492 - DNA, 25 bp, Saccharomyces pastorianus
aatggagctacctactatatcgacc

SEQ ID NO: 135493 - DNA, 25 bp, Saccharomyces pastorianus
actattcactatgctgttgtgtggc

SEQ ID NO: 135494 - DNA, 25 bp, Saccharomyces pastorianus
ggacatccctttattatttggtttg

SEQ ID NO: 135495 - DNA, 25 bp, Saccharomyces pastorianus
tgaggtcaccttggccgatgataat

SEQ ID NO: 135496 - DNA, 25 bp, Saccharomyces pastorianus
tagctgcggccctatttttaactat

SEQ ID NO: 135497 - DNA, 25 bp, Saccharomyces pastorianus
atagtatttctatgggcgtctcata

SEQ ID NO: 135498 - DNA, 25 bp, Saccharomyces pastorianus
agtcatatctgatgcctccgtgaat

SEQ ID NO: 135499 - DNA, 25 bp, Saccharomyces pastorianus
gttacagcctgattctgatgcagtc

SEQ ID NO: 135500 - DNA, 25 bp, Saccharomyces pastorianus
gttgtgtggcatatggattcgttac

SEQ ID NO: 135501 - DNA, 25 bp, Saccharomyces pastorianus
ttcgttacaaattagctgcggccct

SEQ ID NO: 135502 - DNA, 25 bp, Saccharomyces pastorianus
tatatcgaccactacgggaagaatt

SEQ ID NO: 135503 - DNA, 25 bp, Saccharomyces pastorianus
ctttcttgcagttagaggacttcaa

SEQ ID NO: 135504 - DNA, 25 bp, Saccharomyces pastorianus
aagcattttaccctttcacactgtt

SEQ ID NO: 135505 - DNA, 25 bp, Saccharomyces pastorianus
cagaatggtttcatgtttactatac

SEQ ID NO: 135506 - DNA, 25 bp, Saccharomyces pastorianus
acatcacctgaatagaagtcgctct

SEQ ID NO: 135507 - DNA, 25 bp, Saccharomyces pastorianus
atcggatttttgatgggcagatttc

SEQ ID NO: 135508 - DNA, 25 bp, Saccharomyces pastorianus
gaagtcgctctttcttgcagttaga

SEQ ID NO: 135509 - DNA, 25 bp, Saccharomyces pastorianus
agaagacgtaaaccccatcatgaac

SEQ ID NO: 135510 - DNA, 25 bp, Saccharomyces pastorianus
gggcagatttccagaatggtttcat

SEQ ID NO: 135511 - DNA, 25 bp, Saccharomyces pastorianus
tttttcaaaaacagctcaaggttgg

SEQ ID NO: 135512 - DNA, 25 bp, Saccharomyces pastorianus
tgatagtcatcatccacatcacctg

SEQ ID NO: 135513 - DNA, 25 bp, Saccharomyces pastorianus
ctagataaacccttggattccattt

SEQ ID NO: 135514 - DNA, 25 bp, Saccharomyces pastorianus
aagtgacattcgacacgtctttgct

SEQ ID NO: 135515 - DNA, 25 bp, Saccharomyces pastorianus
tggtgacgctcacgttatttcgcat

SEQ ID NO: 135516 - DNA, 25 bp, Saccharomyces pastorianus
ttaggtatcattctggtaactccca

SEQ ID NO: 135517 - DNA, 25 bp, Saccharomyces pastorianus
taccacgacgcctgaactgtttgag

SEQ ID NO: 135518 - DNA, 25 bp, Saccharomyces pastorianus
gtggtcattggagtgcgacttctaa

SEQ ID NO: 135519 - DNA, 25 bp, Saccharomyces pastorianus
gacacgtctttgctttattttgaaa

SEQ ID NO: 135520 - DNA, 25 bp, Saccharomyces pastorianus
atttgaaatttcattgccggtacta

SEQ ID NO: 135521 - DNA, 25 bp, Saccharomyces pastorianus
aattggcgtcgaactttcgtctgag

SEQ ID NO: 135522 - DNA, 25 bp, Saccharomyces pastorianus
gaaaccaattttgtcttgcctactc

SEQ ID NO: 135523 - DNA, 25 bp, Saccharomyces pastorianus
aatgcccattgaactttataacgga

SEQ ID NO: 135524 - DNA, 25 bp, Saccharomyces pastorianus
gtcttgcctactccagtaactttga

SEQ ID NO: 135525 - DNA, 25 bp, Saccharomyces pastorianus
tggtattaacctacacacttatgat

SEQ ID NO: 135526 - DNA, 25 bp, Saccharomyces pastorianus
ggttacacacaagtttattcctatg

SEQ ID NO: 135527 - DNA, 25 bp, Saccharomyces pastorianus
tgaaagcaagaactcctatggtggg

SEQ ID NO: 135528 - DNA, 25 bp, Saccharomyces pastorianus
tcatacagggcttcaaatttggagt

SEQ ID NO: 135529 - DNA, 25 bp, Saccharomyces pastorianus
gtttattcctatgagcaatggcaat

SEQ ID NO: 135530 - DNA, 25 bp, Saccharomyces pastorianus
gactagcaatctctgattttggttg

SEQ ID NO: 135531 - DNA, 25 bp, Saccharomyces pastorianus
aagctgacttcccaaggtatctaca

SEQ ID NO: 135532 - DNA, 25 bp, Saccharomyces pastorianus
ttggtttaattcttgtggctttaca

SEQ ID NO: 135533 - DNA, 25 bp, Saccharomyces pastorianus
actaggcttgaaacctctaagacaa

SEQ ID NO: 135534 - DNA, 25 bp, Saccharomyces pastorianus
cccagaagcggtattaggcgttgtt

SEQ ID NO: 135535 - DNA, 25 bp, Saccharomyces pastorianus
tatcttggctgttttatggacattg

SEQ ID NO: 135536 - DNA, 25 bp, Saccharomyces pastorianus
acgctcctcctgcatcaaaagatag

SEQ ID NO: 135537 - DNA, 25 bp, Saccharomyces pastorianus
ggctcctcctccaaaggaagaacca

SEQ ID NO: 135538 - DNA, 25 bp, Saccharomyces pastorianus
gctcgatagtttgttcggtatttta

SEQ ID NO: 135539 - DNA, 25 bp, Saccharomyces pastorianus
caccaacttctaccgcaacaaatat

SEQ ID NO: 135540 - DNA, 25 bp, Saccharomyces pastorianus
ttggagggttcgcaattgctcgata

SEQ ID NO: 135541 - DNA, 25 bp, Saccharomyces pastorianus
ggtcctaagaccattcaacagattc

SEQ ID NO: 135542 - DNA, 25 bp, Saccharomyces pastorianus
gtttcagaacgggtcaagcaacatt

SEQ ID NO: 135543 - DNA, 25 bp, Saccharomyces pastorianus
gtttcctataccgtctgaatctgtt

SEQ ID NO: 135544 - DNA, 25 bp, Saccharomyces pastorianus
gacactctttcagaagggacgctcc

SEQ ID NO: 135545 - DNA, 25 bp, Saccharomyces pastorianus
ggatttgacggattctccatctgaa

SEQ ID NO: 135546 - DNA, 25 bp, Saccharomyces pastorianus
aagacgtacgaacaactccagtaat

SEQ ID NO: 135547 - DNA, 25 bp, Saccharomyces pastorianus
gattctggcagattcggcaataatt

SEQ ID NO: 135548 - DNA, 25 bp, Saccharomyces pastorianus
ctaaacgtcaaagcggacgccgaat

SEQ ID NO: 135549 - DNA, 25 bp, Saccharomyces pastorianus
gaagaagttgctccacttgttccaa

SEQ ID NO: 135550 - DNA, 25 bp, Saccharomyces pastorianus
agaagctagcccctgacggaaagac

SEQ ID NO: 135551 - DNA, 25 bp, Saccharomyces pastorianus
ggtgggtgccaaaattcaagtctaa

SEQ ID NO: 135552 - DNA, 25 bp, Saccharomyces pastorianus
gcaataattctagtcgtggccatga

SEQ ID NO: 135553 - DNA, 25 bp, Saccharomyces pastorianus
agagaccgcgagagaggctcctaca

SEQ ID NO: 135554 - DNA, 25 bp, Saccharomyces pastorianus
gcactgcttctaaaattgtcattcc

SEQ ID NO: 135555 - DNA, 25 bp, Saccharomyces pastorianus
gtggccatgactttagaaatacctc

SEQ ID NO: 135556 - DNA, 25 bp, Saccharomyces pastorianus
cgaatgggtccaaagcactgcttct

SEQ ID NO: 135557 - DNA, 25 bp, Saccharomyces pastorianus
gaaatgttcgatgctatttcatctg

SEQ ID NO: 135558 - DNA, 25 bp, Saccharomyces pastorianus
gctgagaaagctatacaaaagattt

SEQ ID NO: 135559 - DNA, 25 bp, Saccharomyces pastorianus
taccaaccttagctaacattactat

SEQ ID NO: 135560 - DNA, 25 bp, Saccharomyces pastorianus
tttgtcgatcgagaatcattgtttc

SEQ ID NO: 135561 - DNA, 25 bp, Saccharomyces pastorianus
ctaacattactataacgaagctgag

SEQ ID NO: 135562 - DNA, 25 bp, Saccharomyces pastorianus
attactataacgaagctgagaaagc

SEQ ID NO: 135563 - DNA, 25 bp, Saccharomyces pastorianus
taacaagtacataccaaccttagct

SEQ ID NO: 135564 - DNA, 25 bp, Saccharomyces pastorianus
gtacataccaaccttagctaacatt

SEQ ID NO: 135565 - DNA, 25 bp, Saccharomyces pastorianus
ttgttggaagctttctattattaac

SEQ ID NO: 135566 - DNA, 25 bp, Saccharomyces pastorianus
cgatcgagaatcattgtttcttatt

SEQ ID NO: 135567 - DNA, 25 bp, Saccharomyces pastorianus
actgtttgttggaagctttctatta

SEQ ID NO: 135568 - DNA, 25 bp, Saccharomyces pastorianus
acaaaagatttgtcgatcgagaatc

SEQ ID NO: 135569 - DNA, 25 bp, Saccharomyces pastorianus
aagcctacagtacagaggtgccaaa

SEQ ID NO: 135570 - DNA, 25 bp, Saccharomyces pastorianus
gtagagccaatgaccaaaccaagaa

SEQ ID NO: 135571 - DNA, 25 bp, Saccharomyces pastorianus
gaaagcctacagtacagaggtgcca

SEQ ID NO: 135572 - DNA, 25 bp, Saccharomyces pastorianus
cagtacagaggtgccaaagtttttt

SEQ ID NO: 135573 - DNA, 25 bp, Saccharomyces pastorianus
tagtagagccaatgaccaaaccaag

SEQ ID NO: 135574 - DNA, 25 bp, Saccharomyces pastorianus
tgaccaaaccaagaaagcctacagt

SEQ ID NO: 135575 - DNA, 25 bp, Saccharomyces pastorianus
gcctacagtacagaggtgccaaagt

SEQ ID NO: 135576 - DNA, 25 bp, Saccharomyces pastorianus
aaccaagaaagcctacagtacagag

SEQ ID NO: 135577 - DNA, 25 bp, Saccharomyces pastorianus
gagccaatgaccaaaccaagaaagc

SEQ ID NO: 135578 - DNA, 25 bp, Saccharomyces pastorianus
tacagtacagaggtgccaaagtttt

SEQ ID NO: 135579 - DNA, 25 bp, Saccharomyces pastorianus
tgatagtagagccaatgaccaaacc

SEQ ID NO: 135580 - DNA, 25 bp, Saccharomyces pastorianus
caattcgcccttgacactggaaaat

SEQ ID NO: 135581 - DNA, 25 bp, Saccharomyces pastorianus
tgtccggatattatggcaccctctc

SEQ ID NO: 135582 - DNA, 25 bp, Saccharomyces pastorianus
ggaaaatcagtaccaactgcataat

SEQ ID NO: 135583 - DNA, 25 bp, Saccharomyces pastorianus
ttatccaacgattacaaaattccag

SEQ ID NO: 135584 - DNA, 25 bp, Saccharomyces pastorianus
gtacctccgagagaaacatacttcg

SEQ ID NO: 135585 - DNA, 25 bp, Saccharomyces pastorianus
gggattatactattatccaacgatt

SEQ ID NO: 135586 - DNA, 25 bp, Saccharomyces pastorianus
aaaattccagttgtacctccgagag

SEQ ID NO: 135587 - DNA, 25 bp, Saccharomyces pastorianus
cgtggacttacgatttattggtatt

SEQ ID NO: 135588 - DNA, 25 bp, Saccharomyces pastorianus
ataatgggactatccccaattcgcc

SEQ ID NO: 135589 - DNA, 25 bp, Saccharomyces pastorianus
caccctctccggacttaaggtattg

SEQ ID NO: 135590 - DNA, 25 bp, Saccharomyces pastorianus
gagaaacatacttcgtggacttacg

SEQ ID NO: 135591 - DNA, 25 bp, Saccharomyces pastorianus
ctggttctgttacccaaatcaactc

SEQ ID NO: 135592 - DNA, 25 bp, Saccharomyces pastorianus
aaagtgccactcactgcattttcat

SEQ ID NO: 135593 - DNA, 25 bp, Saccharomyces pastorianus
agcgctacttttaaactggttctgt

SEQ ID NO: 135594 - DNA, 25 bp, Saccharomyces pastorianus
gggtttcctcctcaagatttagtct

SEQ ID NO: 135595 - DNA, 25 bp, Saccharomyces pastorianus
gaactagatccaatctgtcctttga

SEQ ID NO: 135596 - DNA, 25 bp, Saccharomyces pastorianus
tggtgcggccaacaacgttaattct

SEQ ID NO: 135597 - DNA, 25 bp, Saccharomyces pastorianus
gatttagtcttgcagctgcttcgac

SEQ ID NO: 135598 - DNA, 25 bp, Saccharomyces pastorianus
aattctggtggtttggccaatctaa

SEQ ID NO: 135599 - DNA, 25 bp, Saccharomyces pastorianus
atcaccttagcgtacgaactcgagc

SEQ ID NO: 135600 - DNA, 25 bp, Saccharomyces pastorianus
gagctgcatcccaatctgaagttac

SEQ ID NO: 135601 - DNA, 25 bp, Saccharomyces pastorianus
tgaagcgttctatgccaatttcctc

SEQ ID NO: 135602 - DNA, 25 bp, Saccharomyces pastorianus
gtggacaggagctgggctattttaa

SEQ ID NO: 135603 - DNA, 25 bp, Saccharomyces pastorianus
cacaagattatcaccggtttcactc

SEQ ID NO: 135604 - DNA, 25 bp, Saccharomyces pastorianus
aactactgtacatacctattggtgc

SEQ ID NO: 135605 - DNA, 25 bp, Saccharomyces pastorianus
accggtttcactcaccatgtaatgg

SEQ ID NO: 135606 - DNA, 25 bp, Saccharomyces pastorianus
aatccaatggccgttcgtagtgagt

SEQ ID NO: 135607 - DNA, 25 bp, Saccharomyces pastorianus
aataatcattatcccgcacaacaac

SEQ ID NO: 135608 - DNA, 25 bp, Saccharomyces pastorianus
atatcagagttattatccccatcga

SEQ ID NO: 135609 - DNA, 25 bp, Saccharomyces pastorianus
catgtttgattctgaccttgtgaaa

SEQ ID NO: 135610 - DNA, 25 bp, Saccharomyces pastorianus
gttggatccatactattgacctgca

SEQ ID NO: 135611 - DNA, 25 bp, Saccharomyces pastorianus
atcccgcacaacaacttcatgtttg

SEQ ID NO: 135612 - DNA, 25 bp, Saccharomyces pastorianus
catcgattctcctcaatttggcaaa

SEQ ID NO: 135613 - DNA, 25 bp, Saccharomyces pastorianus
atgcgttcatgcaaaccaactagaa

SEQ ID NO: 135614 - DNA, 25 bp, Saccharomyces pastorianus
taagcgcacacgtaaagttgggaat

SEQ ID NO: 135615 - DNA, 25 bp, Saccharomyces pastorianus
actttaaagccgtcgtacgtctcat

SEQ ID NO: 135616 - DNA, 25 bp, Saccharomyces pastorianus
tgttttcaccagcagattcaagatg

SEQ ID NO: 135617 - DNA, 25 bp, Saccharomyces pastorianus
aagccggctgcctgaaagtaataat

SEQ ID NO: 135618 - DNA, 25 bp, Saccharomyces pastorianus
agatccctcttgaagactttatcaa

SEQ ID NO: 135619 - DNA, 25 bp, Saccharomyces pastorianus
tagacctttcacaatgccgagataa

SEQ ID NO: 135620 - DNA, 25 bp, Saccharomyces pastorianus
agatgcacagtgttcccaactatac

SEQ ID NO: 135621 - DNA, 25 bp, Saccharomyces pastorianus
acgtctcatctgcatttgcatccaa

SEQ ID NO: 135622 - DNA, 25 bp, Saccharomyces pastorianus
gacttgataacccattttgccatat

SEQ ID NO: 135623 - DNA, 25 bp, Saccharomyces pastorianus
aagtttcactcactagacctttcac

SEQ ID NO: 135624 - DNA, 25 bp, Saccharomyces pastorianus
gtgtgttatcggtgacgctctaaat

SEQ ID NO: 135625 - DNA, 25 bp, Saccharomyces pastorianus
gtcagtggctttgtattctttgttc

SEQ ID NO: 135626 - DNA, 25 bp, Saccharomyces pastorianus
gccaaagcctttgcaattgaccagg

SEQ ID NO: 135627 - DNA, 25 bp, Saccharomyces pastorianus
tgctgtcgctttttacaccatttac

SEQ ID NO: 135628 - DNA, 25 bp, Saccharomyces pastorianus
gtattctttgttcgctgctgacagc

SEQ ID NO: 135629 - DNA, 25 bp, Saccharomyces pastorianus
atttctgtctggtgtcttgccaaag

SEQ ID NO: 135630 - DNA, 25 bp, Saccharomyces pastorianus
attgaccagggttttctttgctgtc

SEQ ID NO: 135631 - DNA, 25 bp, Saccharomyces pastorianus
aattggtgacctagacttcagcgac

SEQ ID NO: 135632 - DNA, 25 bp, Saccharomyces pastorianus
cgttattaacgttttgtcagtggct

SEQ ID NO: 135633 - DNA, 25 bp, Saccharomyces pastorianus
acaaacccgttgaatttctgtctgg

SEQ ID NO: 135634 - DNA, 25 bp, Saccharomyces pastorianus
gtggcgattgtgttaacaaacccgt

SEQ ID NO: 135635 - DNA, 25 bp, Saccharomyces pastorianus
aagtctgggtatgattcaatctatc

SEQ ID NO: 135636 - DNA, 25 bp, Saccharomyces pastorianus
gttgatattccatacccttacaagg

SEQ ID NO: 135637 - DNA, 25 bp, Saccharomyces pastorianus
accaggtggtgttagagcattgaga

SEQ ID NO: 135638 - DNA, 25 bp, Saccharomyces pastorianus
tagaacgtgactgggctatgcctga

SEQ ID NO: 135639 - DNA, 25 bp, Saccharomyces pastorianus
gagaaacattactgctcaagagcca

SEQ ID NO: 135640 - DNA, 25 bp, Saccharomyces pastorianus
atcggtccatgtgttgctacaggtc

SEQ ID NO: 135641 - DNA, 25 bp, Saccharomyces pastorianus
tacaaggccgatatccctaaagttg

SEQ ID NO: 135642 - DNA, 25 bp, Saccharomyces pastorianus
cgaagcatatcctgttaccggttat

SEQ ID NO: 135643 - DNA, 25 bp, Saccharomyces pastorianus
agagccaaatgttactagagtgcaa

SEQ ID NO: 135644 - DNA, 25 bp, Saccharomyces pastorianus
gacaacacaattacctacgatgcga

SEQ ID NO: 135645 - DNA, 25 bp, Saccharomyces pastorianus
tgttggtgccaggttgacattgatg

SEQ ID NO: 135646 - DNA, 25 bp, Saccharomyces pastorianus
aacttgcagcactatactcatcgga

SEQ ID NO: 135647 - DNA, 25 bp, Saccharomyces pastorianus
gtgccttcgccaatcaaacaagagg

SEQ ID NO: 135648 - DNA, 25 bp, Saccharomyces pastorianus
aatactgaaaagcttcccagaggga

SEQ ID NO: 135649 - DNA, 25 bp, Saccharomyces pastorianus
atgcatcgaatacagtgccttcgcc

SEQ ID NO: 135650 - DNA, 25 bp, Saccharomyces pastorianus
aaggcttgaattctacagtggcaga

SEQ ID NO: 135651 - DNA, 25 bp, Saccharomyces pastorianus
caaagagaatgaatcgcccgttaaa

SEQ ID NO: 135652 - DNA, 25 bp, Saccharomyces pastorianus
ggaagaaactccagcgcctacaata

SEQ ID NO: 135653 - DNA, 25 bp, Saccharomyces pastorianus
gaagattcggacactctatccaaat

SEQ ID NO: 135654 - DNA, 25 bp, Saccharomyces pastorianus
gagatcaacccatacttatctgaat

SEQ ID NO: 135655 - DNA, 25 bp, Saccharomyces pastorianus
atggaatccacagacgacaaaagct

SEQ ID NO: 135656 - DNA, 25 bp, Saccharomyces pastorianus
gcgcatgtgcataaagagccaactt

SEQ ID NO: 135657 - DNA, 25 bp, Saccharomyces pastorianus
gggtaagaatatctcccctgctttc

SEQ ID NO: 135658 - DNA, 25 bp, Saccharomyces pastorianus
ccctgctttcggattcaaacgcaag

SEQ ID NO: 135659 - DNA, 25 bp, Saccharomyces pastorianus
gagaggtggccaagttcaaagacaa

SEQ ID NO: 135660 - DNA, 25 bp, Saccharomyces pastorianus
atcaagctgtgctagatgactcaga

SEQ ID NO: 135661 - DNA, 25 bp, Saccharomyces pastorianus
gtttgctcaagtcattggtgctaca

SEQ ID NO: 135662 - DNA, 25 bp, Saccharomyces pastorianus
tccgctgcgggactacctaaataaa

SEQ ID NO: 135663 - DNA, 25 bp, Saccharomyces pastorianus
gaatgacaattttccatggcatgta

SEQ ID NO: 135664 - DNA, 25 bp, Saccharomyces pastorianus
attacgatgaatctccgctgcggga

SEQ ID NO: 135665 - DNA, 25 bp, Saccharomyces pastorianus
gtggtcattgttatacgactctaat

SEQ ID NO: 135666 - DNA, 25 bp, Saccharomyces pastorianus
catgtgcccttggtggttgttataa

SEQ ID NO: 135667 - DNA, 25 bp, Saccharomyces pastorianus
gagatcgttcctagcgtaaaagcca

SEQ ID NO: 135668 - DNA, 25 bp, Saccharomyces pastorianus
gaaacagttctgtactacgatgaga

SEQ ID NO: 135669 - DNA, 25 bp, Saccharomyces pastorianus
gattcgctgaattaattttccctga

SEQ ID NO: 135670 - DNA, 25 bp, Saccharomyces pastorianus
ggtatttgtccctcatttacgagaa

SEQ ID NO: 135671 - DNA, 25 bp, Saccharomyces pastorianus
ttttccctgaagagctaggcgtcga

SEQ ID NO: 135672 - DNA, 25 bp, Saccharomyces pastorianus
tgatgaggatgccaaggccgccatc

SEQ ID NO: 135673 - DNA, 25 bp, Saccharomyces pastorianus
agatgccttggtcggattcgctgaa

SEQ ID NO: 135674 - DNA, 25 bp, Saccharomyces pastorianus
cacagataggtcagcagcgtatgca

SEQ ID NO: 135675 - DNA, 25 bp, Saccharomyces pastorianus
aaagaagcctccaatgtcgaaagta

SEQ ID NO: 135676 - DNA, 25 bp, Saccharomyces pastorianus
gaggcttactattccccagaagttt

SEQ ID NO: 135677 - DNA, 25 bp, Saccharomyces pastorianus
gcgttattatactctcagccttgat

SEQ ID NO: 135678 - DNA, 25 bp, Saccharomyces pastorianus
gaagtttggtggtatttgtccctca

SEQ ID NO: 135679 - DNA, 25 bp, Saccharomyces pastorianus
gcaccagatgtgtatacccaggaaa

SEQ ID NO: 135680 - DNA, 25 bp, Saccharomyces pastorianus
gaaatttttggcactttagaggcac

SEQ ID NO: 135681 - DNA, 25 bp, Saccharomyces pastorianus
tgaattgaacagcatgggtcccaaa

SEQ ID NO: 135682 - DNA, 25 bp, Saccharomyces pastorianus
aaatgcgtggtcaacattgtacgaa

SEQ ID NO: 135683 - DNA, 25 bp, Saccharomyces pastorianus
attagctctttgtaggtctgtgcaa

SEQ ID NO: 135684 - DNA, 25 bp, Saccharomyces pastorianus
gtaatgcaatgatgctgtccacaaa

SEQ ID NO: 135685 - DNA, 25 bp, Saccharomyces pastorianus
gaaactgcaatcaagactctagaat

SEQ ID NO: 135686 - DNA, 25 bp, Saccharomyces pastorianus
gacacttccagaggtctttgaatta

SEQ ID NO: 135687 - DNA, 25 bp, Saccharomyces pastorianus
tacgcaacattatttccagattcac

SEQ ID NO: 135688 - DNA, 25 bp, Saccharomyces pastorianus
gatagtttgctctgttctagaagct

SEQ ID NO: 135689 - DNA, 25 bp, Saccharomyces pastorianus
actttagaggcactggagacacttc

SEQ ID NO: 135690 - DNA, 25 bp, Saccharomyces pastorianus
ttttgtcaccgcgtccagggataaa

SEQ ID NO: 135691 - DNA, 25 bp, Saccharomyces pastorianus
ggatataacaccagcagacaaaatt

SEQ ID NO: 135692 - DNA, 25 bp, Saccharomyces pastorianus
aggagccagctgatgactacgttct

SEQ ID NO: 135693 - DNA, 25 bp, Saccharomyces pastorianus
gctatttccgtacatgacagcatga

SEQ ID NO: 135694 - DNA, 25 bp, Saccharomyces pastorianus
aaagctgtcactgctatttccgtac

SEQ ID NO: 135695 - DNA, 25 bp, Saccharomyces pastorianus
aaataaagcctgcattaccgttcca

SEQ ID NO: 135696 - DNA, 25 bp, Saccharomyces pastorianus
tatgggatgcagactgggcaccatt

SEQ ID NO: 135697 - DNA, 25 bp, Saccharomyces pastorianus
aactgtcaaagtatggaggcaccaa

SEQ ID NO: 135698 - DNA, 25 bp, Saccharomyces pastorianus
gatatcggtgggtcttgaaaacggt

SEQ ID NO: 135699 - DNA, 25 bp, Saccharomyces pastorianus
cattaccgttccacagtctaacgat

SEQ ID NO: 135700 - DNA, 25 bp, Saccharomyces pastorianus
gactacgttctggaagcatcaatta

SEQ ID NO: 135701 - DNA, 25 bp, Saccharomyces pastorianus
aggttccattgctacattgacgtta

SEQ ID NO: 135702 - DNA, 25 bp, Saccharomyces pastorianus
gggatagtattcaccaccgataaca

SEQ ID NO: 135703 - DNA, 25 bp, Saccharomyces pastorianus
atttgaacgactttgtccggagtga

SEQ ID NO: 135704 - DNA, 25 bp, Saccharomyces pastorianus
tgacgttaggaatcgactccaacag

SEQ ID NO: 135705 - DNA, 25 bp, Saccharomyces pastorianus
gttgatgtcaatgccaagctcttct

SEQ ID NO: 135706 - DNA, 25 bp, Saccharomyces pastorianus
gaccgacgaacaattgcatgctttt

SEQ ID NO: 135707 - DNA, 25 bp, Saccharomyces pastorianus
aacaatgtttatggctggagactac

SEQ ID NO: 135708 - DNA, 25 bp, Saccharomyces pastorianus
atgccaagctcttcttctatagcga

SEQ ID NO: 135709 - DNA, 25 bp, Saccharomyces pastorianus
gatacatgccctcctataaacttta

SEQ ID NO: 135710 - DNA, 25 bp, Saccharomyces pastorianus
ttgtggatagatacatgccctccta

SEQ ID NO: 135711 - DNA, 25 bp, Saccharomyces pastorianus
ctatagcgacttgttgtggcgcaac

SEQ ID NO: 135712 - DNA, 25 bp, Saccharomyces pastorianus
aagactaagtcacctggtgtgaaat

SEQ ID NO: 135713 - DNA, 25 bp, Saccharomyces pastorianus
tcacctggtgtgaaattgaattctg

SEQ ID NO: 135714 - DNA, 25 bp, Saccharomyces pastorianus
caaagactaagtcacctggtgtgaa

SEQ ID NO: 135715 - DNA, 25 bp, Saccharomyces pastorianus
attgaattctgtggatgaattgatt

SEQ ID NO: 135716 - DNA, 25 bp, Saccharomyces pastorianus
gccaaagactaagtcacctggtgtg

SEQ ID NO: 135717 - DNA, 25 bp, Saccharomyces pastorianus
agccaaagactaagtcacctggtgt

SEQ ID NO: 135718 - DNA, 25 bp, Saccharomyces pastorianus
agagccaaagactaagtcacctggt

SEQ ID NO: 135719 - DNA, 25 bp, Saccharomyces pastorianus
gaagagccaaagactaagtcacctg

SEQ ID NO: 135720 - DNA, 25 bp, Saccharomyces pastorianus
agtcacctggtgtgaaattgaattc

SEQ ID NO: 135721 - DNA, 25 bp, Saccharomyces pastorianus
acctggtgtgaaattgaattctgtg

SEQ ID NO: 135722 - DNA, 25 bp, Saccharomyces pastorianus
gactaagtcacctggtgtgaaattg

SEQ ID NO: 135723 - DNA, 25 bp, Saccharomyces pastorianus
aagtcgctgaagaagccgccaccga

SEQ ID NO: 135724 - DNA, 25 bp, Saccharomyces pastorianus
agttgaacaagtcgctgaagaagcc

SEQ ID NO: 135725 - DNA, 25 bp, Saccharomyces pastorianus
ttactgaagaacaagctgaggccac

SEQ ID NO: 135726 - DNA, 25 bp, Saccharomyces pastorianus
agtcgctgaagaagccgccaccgaa

SEQ ID NO: 135727 - DNA, 25 bp, Saccharomyces pastorianus
cgctgaagaagccgccaccgaagaa

SEQ ID NO: 135728 - DNA, 25 bp, Saccharomyces pastorianus
aacaagtcgctgaagaagccgccac

SEQ ID NO: 135729 - DNA, 25 bp, Saccharomyces pastorianus
gaagaacaagctgaggccactgaat

SEQ ID NO: 135730 - DNA, 25 bp, Saccharomyces pastorianus
gaacaagtcgctgaagaagccgcca

SEQ ID NO: 135731 - DNA, 25 bp, Saccharomyces pastorianus
agaacaagctgaggccactgaatgg

SEQ ID NO: 135732 - DNA, 25 bp, Saccharomyces pastorianus
gtcgctgaagaagccgccaccgaag

SEQ ID NO: 135733 - DNA, 25 bp, Saccharomyces pastorianus
actgaagaacaagctgaggccactg

SEQ ID NO: 135734 - DNA, 25 bp, Saccharomyces pastorianus
atgtccttaccagctacttttgact

SEQ ID NO: 135735 - DNA, 25 bp, Saccharomyces pastorianus
gactccagaagatgcccaacttttg

SEQ ID NO: 135736 - DNA, 25 bp, Saccharomyces pastorianus
gaagatgcccaacttttgttggctg

SEQ ID NO: 135737 - DNA, 25 bp, Saccharomyces pastorianus
ttgactccagaagatgcccaacttt

SEQ ID NO: 135738 - DNA, 25 bp, Saccharomyces pastorianus
actccagaagatgcccaacttttgt

SEQ ID NO: 135739 - DNA, 25 bp, Saccharomyces pastorianus
ccttaccagctacttttgacttgac

SEQ ID NO: 135740 - DNA, 25 bp, Saccharomyces pastorianus
cagctacttttgacttgactccaga

SEQ ID NO: 135741 - DNA, 25 bp, Saccharomyces pastorianus
gacttgactccagaagatgcccaac

SEQ ID NO: 135742 - DNA, 25 bp, Saccharomyces pastorianus
tacttttgacttgactccagaagat

SEQ ID NO: 135743 - DNA, 25 bp, Saccharomyces pastorianus
gatgcccaacttttgttggctgcta

SEQ ID NO: 135744 - DNA, 25 bp, Saccharomyces pastorianus
tgcccaacttttgttggctgctaac

SEQ ID NO: 135745 - DNA, 25 bp, Saccharomyces pastorianus
atacctctctatacagcttattctg

SEQ ID NO: 135746 - DNA, 25 bp, Saccharomyces pastorianus
ttgcgacacctagaatggactacgg

SEQ ID NO: 135747 - DNA, 25 bp, Saccharomyces pastorianus
taaacgtaaatctggaacctgctcc

SEQ ID NO: 135748 - DNA, 25 bp, Saccharomyces pastorianus
ggttaacccagatgatccatatgac

SEQ ID NO: 135749 - DNA, 25 bp, Saccharomyces pastorianus
gaaagagaacctattgcgacaccta

SEQ ID NO: 135750 - DNA, 25 bp, Saccharomyces pastorianus
caattttatgtggtctccgagaatg

SEQ ID NO: 135751 - DNA, 25 bp, Saccharomyces pastorianus
tagacctgatcggactgaacaaaga

SEQ ID NO: 135752 - DNA, 25 bp, Saccharomyces pastorianus
gtccatcatctatatatcctgggta

SEQ ID NO: 135753 - DNA, 25 bp, Saccharomyces pastorianus
gatgaaacgtaccattgaacccgaa

SEQ ID NO: 135754 - DNA, 25 bp, Saccharomyces pastorianus
aatcaagactctacgatggagcccc

SEQ ID NO: 135755 - DNA, 25 bp, Saccharomyces pastorianus
taaagatcccacagtatcgtctcac

SEQ ID NO: 135756 - DNA, 25 bp, Saccharomyces pastorianus
ctacagattgcattagacctagtga

SEQ ID NO: 135757 - DNA, 25 bp, Saccharomyces pastorianus
gacttagtggtcttcaaaggcactt

SEQ ID NO: 135758 - DNA, 25 bp, Saccharomyces pastorianus
tgataacaagatttcggtaccatta

SEQ ID NO: 135759 - DNA, 25 bp, Saccharomyces pastorianus
ctccggctgcctttaaattgtttgt

SEQ ID NO: 135760 - DNA, 25 bp, Saccharomyces pastorianus
gacgctatttgttgggcgttcaaac

SEQ ID NO: 135761 - DNA, 25 bp, Saccharomyces pastorianus
atgtcccatttgcaaatgagttcca

SEQ ID NO: 135762 - DNA, 25 bp, Saccharomyces pastorianus
gtcggaggtgatccaacagattatt

SEQ ID NO: 135763 - DNA, 25 bp, Saccharomyces pastorianus
taaccgattccgaccacaaatccgg

SEQ ID NO: 135764 - DNA, 25 bp, Saccharomyces pastorianus
atccggtttttctaagcaagctttg

SEQ ID NO: 135765 - DNA, 25 bp, Saccharomyces pastorianus
gctgaggtaccacaaggaacttcaa

SEQ ID NO: 135766 - DNA, 25 bp, Saccharomyces pastorianus
tcgcaagttttctctctgcattaac

SEQ ID NO: 135767 - DNA, 25 bp, Saccharomyces pastorianus
acaaggcttgtggtattattatttc

SEQ ID NO: 135768 - DNA, 25 bp, Saccharomyces pastorianus
gttgttagattctgaaactgtcaaa

SEQ ID NO: 135769 - DNA, 25 bp, Saccharomyces pastorianus
tcggatattatgtacgtcgtgggcc

SEQ ID NO: 135770 - DNA, 25 bp, Saccharomyces pastorianus
aacaaccccgtgagtctgagccttt

SEQ ID NO: 135771 - DNA, 25 bp, Saccharomyces pastorianus
aaactcatgagggtgttcaggatat

SEQ ID NO: 135772 - DNA, 25 bp, Saccharomyces pastorianus
gatttactagatttaacggtcaaga

SEQ ID NO: 135773 - DNA, 25 bp, Saccharomyces pastorianus
agtctgagcctttcatccaaacaat

SEQ ID NO: 135774 - DNA, 25 bp, Saccharomyces pastorianus
tcctagatttttgaaggctcactgg

SEQ ID NO: 135775 - DNA, 25 bp, Saccharomyces pastorianus
gtcgtgggccaatatcctagatttt

SEQ ID NO: 135776 - DNA, 25 bp, Saccharomyces pastorianus
ccactgctaacccaacattgttgtt

SEQ ID NO: 135777 - DNA, 25 bp, Saccharomyces pastorianus
gtggaacaatccactgctaacccaa

SEQ ID NO: 135778 - DNA, 25 bp, Saccharomyces pastorianus
gaaagtcgacgatgaaaataatgtt

SEQ ID NO: 135779 - DNA, 25 bp, Saccharomyces pastorianus
ttatggtcaaaaccaagacccaggt

SEQ ID NO: 135780 - DNA, 25 bp, Saccharomyces pastorianus
ggtactgccaggaagaaagatgcct

SEQ ID NO: 135781 - DNA, 25 bp, Saccharomyces pastorianus
atgcctggtcatatgggaaacgagc

SEQ ID NO: 135782 - DNA, 25 bp, Saccharomyces pastorianus
tatttgggttaaaggctctgtggct

SEQ ID NO: 135783 - DNA, 25 bp, Saccharomyces pastorianus
aaagatgcctggtcatatgggaaac

SEQ ID NO: 135784 - DNA, 25 bp, Saccharomyces pastorianus
ttaaaggctctgtggctgggcccaa

SEQ ID NO: 135785 - DNA, 25 bp, Saccharomyces pastorianus
ggaaacgagcatgttactatccaaa

SEQ ID NO: 135786 - DNA, 25 bp, Saccharomyces pastorianus
tgtggctgggcccaaaaacagtttc

SEQ ID NO: 135787 - DNA, 25 bp, Saccharomyces pastorianus
aaggctctgtggctgggcccaaaaa

SEQ ID NO: 135788 - DNA, 25 bp, Saccharomyces pastorianus
gacccaggtagggtactgccaggaa

SEQ ID NO: 135789 - DNA, 25 bp, Saccharomyces pastorianus
ccttcacagccgctttatgtggaag

SEQ ID NO: 135790 - DNA, 25 bp, Saccharomyces pastorianus
attgccgccgactgcaagcaggttt

SEQ ID NO: 135791 - DNA, 25 bp, Saccharomyces pastorianus
gactgcaagcaggtttgcatgttca

SEQ ID NO: 135792 - DNA, 25 bp, Saccharomyces pastorianus
gctacaagaattatcattgccgccg

SEQ ID NO: 135793 - DNA, 25 bp, Saccharomyces pastorianus
caagaattatcattgccgccgactg

SEQ ID NO: 135794 - DNA, 25 bp, Saccharomyces pastorianus
agaattatcattgccgccgactgca

SEQ ID NO: 135795 - DNA, 25 bp, Saccharomyces pastorianus
ggaaatatcccataagctacaagaa

SEQ ID NO: 135796 - DNA, 25 bp, Saccharomyces pastorianus
gtttatccaagtcggaaatatccca

SEQ ID NO: 135797 - DNA, 25 bp, Saccharomyces pastorianus
gccgactgcaagcaggtttgcatgt

SEQ ID NO: 135798 - DNA, 25 bp, Saccharomyces pastorianus
acagccgctttatgtggaagaacaa

SEQ ID NO: 135799 - DNA, 25 bp, Saccharomyces pastorianus
atggccttcacagccgctttatgtg

SEQ ID NO: 135800 - DNA, 25 bp, Saccharomyces pastorianus
atccataaatcccactctcttgaat

SEQ ID NO: 135801 - DNA, 25 bp, Saccharomyces pastorianus
taccctccatatactctataatatt

SEQ ID NO: 135802 - DNA, 25 bp, Saccharomyces pastorianus
tttcgataccctccatatactctat

SEQ ID NO: 135803 - DNA, 25 bp, Saccharomyces pastorianus
atgtgttgtttcgataccctccata

SEQ ID NO: 135804 - DNA, 25 bp, Saccharomyces pastorianus
cataaatcccactctcttgaatttc

SEQ ID NO: 135805 - DNA, 25 bp, Saccharomyces pastorianus
tcccactctcttgaatttcattaat

SEQ ID NO: 135806 - DNA, 25 bp, Saccharomyces pastorianus
gttgtttcgataccctccatatact

SEQ ID NO: 135807 - DNA, 25 bp, Saccharomyces pastorianus
attagatccataaatcccactctct

SEQ ID NO: 135808 - DNA, 25 bp, Saccharomyces pastorianus
aatcccactctcttgaatttcatta

SEQ ID NO: 135809 - DNA, 25 bp, Saccharomyces pastorianus
gtgttgtttcgataccctccatata

SEQ ID NO: 135810 - DNA, 25 bp, Saccharomyces pastorianus
cgataccctccatatactctataat

SEQ ID NO: 135811 - DNA, 25 bp, Saccharomyces pastorianus
gcgacctaacttcgagtagttttga

SEQ ID NO: 135812 - DNA, 25 bp, Saccharomyces pastorianus
ggtatcaccgaatccaaaagtagca

SEQ ID NO: 135813 - DNA, 25 bp, Saccharomyces pastorianus
tactgcgctcagtacacgcaaaggg

SEQ ID NO: 135814 - DNA, 25 bp, Saccharomyces pastorianus
gaatccaaaagtagcaacaatctgt

SEQ ID NO: 135815 - DNA, 25 bp, Saccharomyces pastorianus
aacaatctgtttatgtctcaacgac

SEQ ID NO: 135816 - DNA, 25 bp, Saccharomyces pastorianus
aatacaggattcttggtatcaccga

SEQ ID NO: 135817 - DNA, 25 bp, Saccharomyces pastorianus
agattactgcgctcagtacacgcaa

SEQ ID NO: 135818 - DNA, 25 bp, Saccharomyces pastorianus
tacacgcaaagggttgggcgaccta

SEQ ID NO: 135819 - DNA, 25 bp, Saccharomyces pastorianus
tggaacttggagagattactgcgct

SEQ ID NO: 135820 - DNA, 25 bp, Saccharomyces pastorianus
cgagtagttttgataattttggata

SEQ ID NO: 135821 - DNA, 25 bp, Saccharomyces pastorianus
gttgggcgacctaacttcgagtagt

SEQ ID NO: 135822 - DNA, 25 bp, Saccharomyces pastorianus
tttacagttgtagtctccgcttcgc

SEQ ID NO: 135823 - DNA, 25 bp, Saccharomyces pastorianus
atgctctgcttgtccaaggctttct

SEQ ID NO: 135824 - DNA, 25 bp, Saccharomyces pastorianus
atttcatgctctgcttgtccaaggc

SEQ ID NO: 135825 - DNA, 25 bp, Saccharomyces pastorianus
agctttgatttcatgctctgcttgt

SEQ ID NO: 135826 - DNA, 25 bp, Saccharomyces pastorianus
tatcagctttgatttcatgctctgc

SEQ ID NO: 135827 - DNA, 25 bp, Saccharomyces pastorianus
tctgcttgtccaaggctttctgtat

SEQ ID NO: 135828 - DNA, 25 bp, Saccharomyces pastorianus
ttgatttcatgctctgcttgtccaa

SEQ ID NO: 135829 - DNA, 25 bp, Saccharomyces pastorianus
cagttgtagtctccgcttcgctagg

SEQ ID NO: 135830 - DNA, 25 bp, Saccharomyces pastorianus
gtatttacagttgtagtctccgctt

SEQ ID NO: 135831 - DNA, 25 bp, Saccharomyces pastorianus
gtccaaggctttctgtatttacagt

SEQ ID NO: 135832 - DNA, 25 bp, Saccharomyces pastorianus
gcttgtccaaggctttctgtattta

SEQ ID NO: 135833 - DNA, 25 bp, Saccharomyces pastorianus
ggttacagcgggatctactacgctt

SEQ ID NO: 135834 - DNA, 25 bp, Saccharomyces pastorianus
gctcagagattcaaccacaggcaaa

SEQ ID NO: 135835 - DNA, 25 bp, Saccharomyces pastorianus
agtggtgtctctcagaagcctacta

SEQ ID NO: 135836 - DNA, 25 bp, Saccharomyces pastorianus
gggagtatgcgccaaatagttttca

SEQ ID NO: 135837 - DNA, 25 bp, Saccharomyces pastorianus
cagtccagctggtaattcgtgtata

SEQ ID NO: 135838 - DNA, 25 bp, Saccharomyces pastorianus
agtactgaagatatgcccgtcgttg

SEQ ID NO: 135839 - DNA, 25 bp, Saccharomyces pastorianus
tgaacgttttttgcgtcacagcgga

SEQ ID NO: 135840 - DNA, 25 bp, Saccharomyces pastorianus
aagcttgctcgatccttaactggaa

SEQ ID NO: 135841 - DNA, 25 bp, Saccharomyces pastorianus
acggactactgttgattgcatcggt

SEQ ID NO: 135842 - DNA, 25 bp, Saccharomyces pastorianus
cccgtcgttggctaggatcatcaaa

SEQ ID NO: 135843 - DNA, 25 bp, Saccharomyces pastorianus
tactagaagttattcccgggtcagt

SEQ ID NO: 135844 - DNA, 25 bp, Saccharomyces pastorianus
gcgtctgtgcaatactactatgatg

SEQ ID NO: 135845 - DNA, 25 bp, Saccharomyces pastorianus
attaagtaccgcgtctgtgcaatac

SEQ ID NO: 135846 - DNA, 25 bp, Saccharomyces pastorianus
ttgcgtatgcaatgccaacaacctt

SEQ ID NO: 135847 - DNA, 25 bp, Saccharomyces pastorianus
tttccacactttaccgaaagacaag

SEQ ID NO: 135848 - DNA, 25 bp, Saccharomyces pastorianus
ccgaaagacaagatcgtgtttggaa

SEQ ID NO: 135849 - DNA, 25 bp, Saccharomyces pastorianus
agagattaagtaccgcgtctgtgca

SEQ ID NO: 135850 - DNA, 25 bp, Saccharomyces pastorianus
gtgcaatactactatgatgccaaaa

SEQ ID NO: 135851 - DNA, 25 bp, Saccharomyces pastorianus
tgttttgcgtatgcaatgccaacaa

SEQ ID NO: 135852 - DNA, 25 bp, Saccharomyces pastorianus
tgaacacctttccacactttaccga

SEQ ID NO: 135853 - DNA, 25 bp, Saccharomyces pastorianus
gaaatgaacacctttccacacttta

SEQ ID NO: 135854 - DNA, 25 bp, Saccharomyces pastorianus
taccgcgtctgtgcaatactactat

SEQ ID NO: 135855 - DNA, 25 bp, Saccharomyces pastorianus
gcgtctgtgcaatactactatgatg

SEQ ID NO: 135856 - DNA, 25 bp, Saccharomyces pastorianus
tttccacactttaccgaaagacaag

SEQ ID NO: 135857 - DNA, 25 bp, Saccharomyces pastorianus
ccgaaagacaagatcgtgtttggaa

SEQ ID NO: 135858 - DNA, 25 bp, Saccharomyces pastorianus
gggtctcatccataatctagaaatg

SEQ ID NO: 135859 - DNA, 25 bp, Saccharomyces pastorianus
agagattaagtaccgcgtctgtgca

SEQ ID NO: 135860 - DNA, 25 bp, Saccharomyces pastorianus
gtgcaatactactatgatgccaaaa

SEQ ID NO: 135861 - DNA, 25 bp, Saccharomyces pastorianus
tgttttgcgtatgcaatgccaacaa

SEQ ID NO: 135862 - DNA, 25 bp, Saccharomyces pastorianus
gaaatgaacacctttccacacttta

SEQ ID NO: 135863 - DNA, 25 bp, Saccharomyces pastorianus
gcaatgccaacaaccttcaggaaca

SEQ ID NO: 135864 - DNA, 25 bp, Saccharomyces pastorianus
ttcaggaacaccatgggtctcatcc

SEQ ID NO: 135865 - DNA, 25 bp, Saccharomyces pastorianus
taccgcgtctgtgcaatactactat

SEQ ID NO: 135866 - DNA, 25 bp, Saccharomyces pastorianus
ttaccgtcagctagatcccgttgag

SEQ ID NO: 135867 - DNA, 25 bp, Saccharomyces pastorianus
tgaggagaagattgttccaccagaa

SEQ ID NO: 135868 - DNA, 25 bp, Saccharomyces pastorianus
attttggttgcttccatgacaggtt

SEQ ID NO: 135869 - DNA, 25 bp, Saccharomyces pastorianus
gatttttaccgtcagctagatcccg

SEQ ID NO: 135870 - DNA, 25 bp, Saccharomyces pastorianus
gctagatcccgttgaggagaagatt

SEQ ID NO: 135871 - DNA, 25 bp, Saccharomyces pastorianus
taatttcttcggaggccaaagaggc

SEQ ID NO: 135872 - DNA, 25 bp, Saccharomyces pastorianus
cgtcagctagatcccgttgaggaga

SEQ ID NO: 135873 - DNA, 25 bp, Saccharomyces pastorianus
acaaaagatttttaccgtcagctag

SEQ ID NO: 135874 - DNA, 25 bp, Saccharomyces pastorianus
aaacgctatagtaatttcttcggag

SEQ ID NO: 135875 - DNA, 25 bp, Saccharomyces pastorianus
tatagtaatttcttcggaggccaaa

SEQ ID NO: 135876 - DNA, 25 bp, Saccharomyces pastorianus
ggttgcttccatgacaggttccgtt

SEQ ID NO: 135877 - DNA, 25 bp, Saccharomyces pastorianus
aaaatgagctggtagacggtatttc

SEQ ID NO: 135878 - DNA, 25 bp, Saccharomyces pastorianus
agaaaatgagctggtagacggtatt

SEQ ID NO: 135879 - DNA, 25 bp, Saccharomyces pastorianus
atattggagaaaatgagctggtaga

SEQ ID NO: 135880 - DNA, 25 bp, Saccharomyces pastorianus
gctggtagacggtatttcagtacgt

SEQ ID NO: 135881 - DNA, 25 bp, Saccharomyces pastorianus
aaatgagctggtagacggtatttca

SEQ ID NO: 135882 - DNA, 25 bp, Saccharomyces pastorianus
gagaaaatgagctggtagacggtat

SEQ ID NO: 135883 - DNA, 25 bp, Saccharomyces pastorianus
agctggtagacggtatttcagtacg

SEQ ID NO: 135884 - DNA, 25 bp, Saccharomyces pastorianus
atatattggagaaaatgagctggta

SEQ ID NO: 135885 - DNA, 25 bp, Saccharomyces pastorianus
aatgagctggtagacggtatttcag

SEQ ID NO: 135886 - DNA, 25 bp, Saccharomyces pastorianus
tgagctggtagacggtatttcagta

SEQ ID NO: 135887 - DNA, 25 bp, Saccharomyces pastorianus
atgagctggtagacggtatttcagt

SEQ ID NO: 135888 - DNA, 25 bp, Saccharomyces pastorianus
aacaaaatccgcagggctatcaccc

SEQ ID NO: 135889 - DNA, 25 bp, Saccharomyces pastorianus
catcctcaacaaacgaccatcaatt

SEQ ID NO: 135890 - DNA, 25 bp, Saccharomyces pastorianus
ttatgaagtacgacagttctggccg

SEQ ID NO: 135891 - DNA, 25 bp, Saccharomyces pastorianus
aattcgaggcgcagctcaaagcgga

SEQ ID NO: 135892 - DNA, 25 bp, Saccharomyces pastorianus
gaagttcacttcacatccaatgaga

SEQ ID NO: 135893 - DNA, 25 bp, Saccharomyces pastorianus
aaaaggacagttcctcatcctcaac

SEQ ID NO: 135894 - DNA, 25 bp, Saccharomyces pastorianus
gttctggccgaaagctaactcctat

SEQ ID NO: 135895 - DNA, 25 bp, Saccharomyces pastorianus
gcctctgtaaatgagtacttcccaa

SEQ ID NO: 135896 - DNA, 25 bp, Saccharomyces pastorianus
atttacaaccacgaaactgcctcta

SEQ ID NO: 135897 - DNA, 25 bp, Saccharomyces pastorianus
gtacttcccaatctcacctgaaaaa

SEQ ID NO: 135898 - DNA, 25 bp, Saccharomyces pastorianus
ctacgcctcatatcaagacagcact

SEQ ID NO: 135899 - DNA, 25 bp, Saccharomyces pastorianus
ggcaccttccttaattgatgaccaa

SEQ ID NO: 135900 - DNA, 25 bp, Saccharomyces pastorianus
ggtagccaggctctaatgaccttgc

SEQ ID NO: 135901 - DNA, 25 bp, Saccharomyces pastorianus
aggctctaatgaccttgccactgac

SEQ ID NO: 135902 - DNA, 25 bp, Saccharomyces pastorianus
gtcatctgcaaagacatttactaag

SEQ ID NO: 135903 - DNA, 25 bp, Saccharomyces pastorianus
atactttgaccggtagccaggctct

SEQ ID NO: 135904 - DNA, 25 bp, Saccharomyces pastorianus
ttaaaaatgacagtcaccatgttgg

SEQ ID NO: 135905 - DNA, 25 bp, Saccharomyces pastorianus
atatacctccacaatttaatcctgt

SEQ ID NO: 135906 - DNA, 25 bp, Saccharomyces pastorianus
gacatttactaagcatatctcgttt

SEQ ID NO: 135907 - DNA, 25 bp, Saccharomyces pastorianus
tcattttttacatatacctccacaa

SEQ ID NO: 135908 - DNA, 25 bp, Saccharomyces pastorianus
tgatgaccaagctaccattattaaa

SEQ ID NO: 135909 - DNA, 25 bp, Saccharomyces pastorianus
ttgatgatctggcaccttccttaat

SEQ ID NO: 135910 - DNA, 25 bp, Saccharomyces pastorianus
acaagcaggagcagcgtggcgccat

SEQ ID NO: 135911 - DNA, 25 bp, Saccharomyces pastorianus
gagattccctcaaggacgaactgct

SEQ ID NO: 135912 - DNA, 25 bp, Saccharomyces pastorianus
ttctttgcgggctaatttactcgac

SEQ ID NO: 135913 - DNA, 25 bp, Saccharomyces pastorianus
aaaaagctatcctaccagtgcacgg

SEQ ID NO: 135914 - DNA, 25 bp, Saccharomyces pastorianus
ggaagctcgaagtctatggacctaa

SEQ ID NO: 135915 - DNA, 25 bp, Saccharomyces pastorianus
tgcacggccaccttcaagtgagaaa

SEQ ID NO: 135916 - DNA, 25 bp, Saccharomyces pastorianus
aaggctattcacctatcacaatccg

SEQ ID NO: 135917 - DNA, 25 bp, Saccharomyces pastorianus
aaattttgatgcgttccacagaatg

SEQ ID NO: 135918 - DNA, 25 bp, Saccharomyces pastorianus
gtggcgccatcactcatggaaattt

SEQ ID NO: 135919 - DNA, 25 bp, Saccharomyces pastorianus
gaaaactctctgatggaagctcgaa

SEQ ID NO: 135920 - DNA, 25 bp, Saccharomyces pastorianus
gaatcgtcctgctatctgggtaaat

SEQ ID NO: 135921 - DNA, 25 bp, Saccharomyces pastorianus
agtggaccataccacaacctatcgg

SEQ ID NO: 135922 - DNA, 25 bp, Saccharomyces pastorianus
acgatctggtcgtctttgatttatc

SEQ ID NO: 135923 - DNA, 25 bp, Saccharomyces pastorianus
tggcggcgacacacacaagctgaat

SEQ ID NO: 135924 - DNA, 25 bp, Saccharomyces pastorianus
gcctatgttgtgtttggcggcgaca

SEQ ID NO: 135925 - DNA, 25 bp, Saccharomyces pastorianus
tgcctcctcctttaacaaatcatac

SEQ ID NO: 135926 - DNA, 25 bp, Saccharomyces pastorianus
tgatacataccgctacgatccagca

SEQ ID NO: 135927 - DNA, 25 bp, Saccharomyces pastorianus
aatttttagagcctgtcggcgacct

SEQ ID NO: 135928 - DNA, 25 bp, Saccharomyces pastorianus
taaactatatctttttggcggacaa

SEQ ID NO: 135929 - DNA, 25 bp, Saccharomyces pastorianus
gcaggtacggccataaaatttctat

SEQ ID NO: 135930 - DNA, 25 bp, Saccharomyces pastorianus
gatttatcatcattccgtaggccga

SEQ ID NO: 135931 - DNA, 25 bp, Saccharomyces pastorianus
ccgtaggccgaattctcattgggaa

SEQ ID NO: 135932 - DNA, 25 bp, Saccharomyces pastorianus
atgcgttctactaccaacagagaaa

SEQ ID NO: 135933 - DNA, 25 bp, Saccharomyces pastorianus
aaatgtcactacgagacaagcaaaa

SEQ ID NO: 135934 - DNA, 25 bp, Saccharomyces pastorianus
ggtaaacaaaaaatgtcactacgag

SEQ ID NO: 135935 - DNA, 25 bp, Saccharomyces pastorianus
gaactttgttatgtctattcacaag

SEQ ID NO: 135936 - DNA, 25 bp, Saccharomyces pastorianus
gttatgtctattcacaagagatctg

SEQ ID NO: 135937 - DNA, 25 bp, Saccharomyces pastorianus
gcgttctactaccaacagagaaaaa

SEQ ID NO: 135938 - DNA, 25 bp, Saccharomyces pastorianus
cacaagagatctgttagaggtaaac

SEQ ID NO: 135939 - DNA, 25 bp, Saccharomyces pastorianus
atgtctattcacaagagatctgtta

SEQ ID NO: 135940 - DNA, 25 bp, Saccharomyces pastorianus
gaagaactttgttatgtctattcac

SEQ ID NO: 135941 - DNA, 25 bp, Saccharomyces pastorianus
agacaagcaaaaagtgttacgtgca

SEQ ID NO: 135942 - DNA, 25 bp, Saccharomyces pastorianus
ctattcacaagagatctgttagagg

SEQ ID NO: 135943 - DNA, 25 bp, Saccharomyces pastorianus
acaatggcgagaatacgtcgtatta

SEQ ID NO: 135944 - DNA, 25 bp, Saccharomyces pastorianus
gattggtgtttaacaattgccgaat

SEQ ID NO: 135945 - DNA, 25 bp, Saccharomyces pastorianus
acaattgccgaatgtacaatggcga

SEQ ID NO: 135946 - DNA, 25 bp, Saccharomyces pastorianus
ggtgtttaacaattgccgaatgtac

SEQ ID NO: 135947 - DNA, 25 bp, Saccharomyces pastorianus
tacgtcgtattacaagtatgctaat

SEQ ID NO: 135948 - DNA, 25 bp, Saccharomyces pastorianus
gtacaatggcgagaatacgtcgtat

SEQ ID NO: 135949 - DNA, 25 bp, Saccharomyces pastorianus
atatgatgccagattggtgtttaac

SEQ ID NO: 135950 - DNA, 25 bp, Saccharomyces pastorianus
gaatacgtcgtattacaagtatgct

SEQ ID NO: 135951 - DNA, 25 bp, Saccharomyces pastorianus
attgccgaatgtacaatggcgagaa

SEQ ID NO: 135952 - DNA, 25 bp, Saccharomyces pastorianus
gatgccagattggtgtttaacaatt

SEQ ID NO: 135953 - DNA, 25 bp, Saccharomyces pastorianus
taataggctagagaaattcttcaat

SEQ ID NO: 135954 - DNA, 25 bp, Saccharomyces pastorianus
gggttgccttgttaattgctggcca

SEQ ID NO: 135955 - DNA, 25 bp, Saccharomyces pastorianus
accatctgggacattttaccgttat

SEQ ID NO: 135956 - DNA, 25 bp, Saccharomyces pastorianus
tttccatgcagaaccatctgggaca

SEQ ID NO: 135957 - DNA, 25 bp, Saccharomyces pastorianus
gaaggagcacaagcagaattattga

SEQ ID NO: 135958 - DNA, 25 bp, Saccharomyces pastorianus
ttttaccgttataatgccaaagcca

SEQ ID NO: 135959 - DNA, 25 bp, Saccharomyces pastorianus
gccaaagccattggttcaggctctg

SEQ ID NO: 135960 - DNA, 25 bp, Saccharomyces pastorianus
aattgctggccatgatgcggatgat

SEQ ID NO: 135961 - DNA, 25 bp, Saccharomyces pastorianus
gcggatgatggttatcaacttttcc

SEQ ID NO: 135962 - DNA, 25 bp, Saccharomyces pastorianus
gataacgaaaaaactgctgaattga

SEQ ID NO: 135963 - DNA, 25 bp, Saccharomyces pastorianus
attggttcaggctctgaaggagcac

SEQ ID NO: 135964 - DNA, 25 bp, Saccharomyces pastorianus
aaacttgatgaaaataacgcgcaat

SEQ ID NO: 135965 - DNA, 25 bp, Saccharomyces pastorianus
tgtaagcacattttccccagaaggg

SEQ ID NO: 135966 - DNA, 25 bp, Saccharomyces pastorianus
ggtgtggagaaacgtgccacctcac

SEQ ID NO: 135967 - DNA, 25 bp, Saccharomyces pastorianus
tccccagaagggaggttattccaag

SEQ ID NO: 135968 - DNA, 25 bp, Saccharomyces pastorianus
gagtattctttggaggccatcaaat

SEQ ID NO: 135969 - DNA, 25 bp, Saccharomyces pastorianus
tgtggagaaacgtgccacctcacca

SEQ ID NO: 135970 - DNA, 25 bp, Saccharomyces pastorianus
ggaggttattccaagttgagtattc

SEQ ID NO: 135971 - DNA, 25 bp, Saccharomyces pastorianus
gtattctttggaggccatcaaatta

SEQ ID NO: 135972 - DNA, 25 bp, Saccharomyces pastorianus
agttgagtattctttggaggccatc

SEQ ID NO: 135973 - DNA, 25 bp, Saccharomyces pastorianus
ttgtactaggtgtggagaaacgtgc

SEQ ID NO: 135974 - DNA, 25 bp, Saccharomyces pastorianus
gtaagcacattttccccagaaggga

SEQ ID NO: 135975 - DNA, 25 bp, Saccharomyces pastorianus
ggagaaacgtgccacctcaccactg

SEQ ID NO: 135976 - DNA, 25 bp, Saccharomyces pastorianus
gacgattttatcgtttctgcaagat

SEQ ID NO: 135977 - DNA, 25 bp, Saccharomyces pastorianus
aagcacctaaacctacggcaagaag

SEQ ID NO: 135978 - DNA, 25 bp, Saccharomyces pastorianus
aagatctttcacatctagctccaac

SEQ ID NO: 135979 - DNA, 25 bp, Saccharomyces pastorianus
tagctccaacgcaaaattgactggg

SEQ ID NO: 135980 - DNA, 25 bp, Saccharomyces pastorianus
gatgatttcatccttgtttgattca

SEQ ID NO: 135981 - DNA, 25 bp, Saccharomyces pastorianus
aaacaccttcacatctcaaaacggg

SEQ ID NO: 135982 - DNA, 25 bp, Saccharomyces pastorianus
gtttgcaaagcctggacgagttttt

SEQ ID NO: 135983 - DNA, 25 bp, Saccharomyces pastorianus
gtgtcactactattacaagcaccta

SEQ ID NO: 135984 - DNA, 25 bp, Saccharomyces pastorianus
gtgactcttctttgggaacgtcttc

SEQ ID NO: 135985 - DNA, 25 bp, Saccharomyces pastorianus
tttattaccaacaactcagcaagat

SEQ ID NO: 135986 - DNA, 25 bp, Saccharomyces pastorianus
ttttcatcccagtcttttattacca

SEQ ID NO: 135987 - DNA, 25 bp, Saccharomyces pastorianus
gtttgaggtttcttccattctagag

SEQ ID NO: 135988 - DNA, 25 bp, Saccharomyces pastorianus
aaaataaaaactccgctgttcatcg

SEQ ID NO: 135989 - DNA, 25 bp, Saccharomyces pastorianus
attacatcctaatgcggtctatcgt

SEQ ID NO: 135990 - DNA, 25 bp, Saccharomyces pastorianus
gttacaatgtttgaggtttcttcca

SEQ ID NO: 135991 - DNA, 25 bp, Saccharomyces pastorianus
ttccattctagagaaactgccgcag

SEQ ID NO: 135992 - DNA, 25 bp, Saccharomyces pastorianus
aatgtcgttcttaacacaaagatcg

SEQ ID NO: 135993 - DNA, 25 bp, Saccharomyces pastorianus
gaaactgccgcagaatattttactg

SEQ ID NO: 135994 - DNA, 25 bp, Saccharomyces pastorianus
gcggtctatcgtttctgcaatatga

SEQ ID NO: 135995 - DNA, 25 bp, Saccharomyces pastorianus
tattttactgtttcactaccctctt

SEQ ID NO: 135996 - DNA, 25 bp, Saccharomyces pastorianus
tgttcatcgcttcctacgcaatgtt

SEQ ID NO: 135997 - DNA, 25 bp, Saccharomyces pastorianus
tcctacgcaatgttcttagccaagc

SEQ ID NO: 135998 - DNA, 25 bp, Saccharomyces pastorianus
ttgcatctctctattcattttacta

SEQ ID NO: 135999 - DNA, 25 bp, Saccharomyces pastorianus
tgcatttgtatagcatagccaagtc

SEQ ID NO: 136000 - DNA, 25 bp, Saccharomyces pastorianus
gtcaacaacaatactgcgttttcta

SEQ ID NO: 136001 - DNA, 25 bp, Saccharomyces pastorianus
ctgcgttttctaaggcatattttat

SEQ ID NO: 136002 - DNA, 25 bp, Saccharomyces pastorianus
ttattgccatttttgcatctctcta

SEQ ID NO: 136003 - DNA, 25 bp, Saccharomyces pastorianus
gttgcttgtgcagaataatctatgt

SEQ ID NO: 136004 - DNA, 25 bp, Saccharomyces pastorianus
tcattttactagttgcttgtgcaga

SEQ ID NO: 136005 - DNA, 25 bp, Saccharomyces pastorianus
tatagcatagccaagtcaacaacaa

SEQ ID NO: 136006 - DNA, 25 bp, Saccharomyces pastorianus
aatactgcgttttctaaggcatatt

SEQ ID NO: 136007 - DNA, 25 bp, Saccharomyces pastorianus
cttgtgcagaataatctatgttggc

SEQ ID NO: 136008 - DNA, 25 bp, Saccharomyces pastorianus
gccatttttgcatctctctattcat

SEQ ID NO: 136009 - DNA, 25 bp, Saccharomyces pastorianus
atgggcacatgcattgtattgataa

SEQ ID NO: 136010 - DNA, 25 bp, Saccharomyces pastorianus
gagttggtgggtttcactgagtcaa

SEQ ID NO: 136011 - DNA, 25 bp, Saccharomyces pastorianus
agttccgcgtaaataggcccatcca

SEQ ID NO: 136012 - DNA, 25 bp, Saccharomyces pastorianus
gcaaaccgtgctgacaaaatcgaaa

SEQ ID NO: 136013 - DNA, 25 bp, Saccharomyces pastorianus
gaattttccagccaaacttgtacaa

SEQ ID NO: 136014 - DNA, 25 bp, Saccharomyces pastorianus
tagaacctggttttgcgaatgaaca

SEQ ID NO: 136015 - DNA, 25 bp, Saccharomyces pastorianus
catccagcttcgtccaataacatta

SEQ ID NO: 136016 - DNA, 25 bp, Saccharomyces pastorianus
gaacaatcgctacaatctgcaaacg

SEQ ID NO: 136017 - DNA, 25 bp, Saccharomyces pastorianus
gaagtgaaagcagcttctgctcaaa

SEQ ID NO: 136018 - DNA, 25 bp, Saccharomyces pastorianus
gaagaacgccatacccgaaatattt

SEQ ID NO: 136019 - DNA, 25 bp, Saccharomyces pastorianus
cggaggtagaacttcatgggcacat

SEQ ID NO: 136020 - DNA, 25 bp, Saccharomyces pastorianus
cttttccaggtttccgatgaggcga

SEQ ID NO: 136021 - DNA, 25 bp, Saccharomyces pastorianus
agaaggctaacgctggtcggatact

SEQ ID NO: 136022 - DNA, 25 bp, Saccharomyces pastorianus
ttctccatccggcaattaagggctg

SEQ ID NO: 136023 - DNA, 25 bp, Saccharomyces pastorianus
gatggcattggtattttcccttact

SEQ ID NO: 136024 - DNA, 25 bp, Saccharomyces pastorianus
agtgccacaactcgaatcgctgatg

SEQ ID NO: 136025 - DNA, 25 bp, Saccharomyces pastorianus
gaacgtgccctggagacattttaag

SEQ ID NO: 136026 - DNA, 25 bp, Saccharomyces pastorianus
ttgaagaccaagatagcctcgccac

SEQ ID NO: 136027 - DNA, 25 bp, Saccharomyces pastorianus
ggtacccatgtttgtaaacccagct

SEQ ID NO: 136028 - DNA, 25 bp, Saccharomyces pastorianus
gaacacttacgatagactcttggaa

SEQ ID NO: 136029 - DNA, 25 bp, Saccharomyces pastorianus
tattatcaaacgacttctccatccg

SEQ ID NO: 136030 - DNA, 25 bp, Saccharomyces pastorianus
tcgccactttgcaccttgaatgaac

SEQ ID NO: 136031 - DNA, 25 bp, Saccharomyces pastorianus
ggatgcgcatgccataacccttgca

SEQ ID NO: 136032 - DNA, 25 bp, Saccharomyces pastorianus
gccataacccttgcatggttagcac

SEQ ID NO: 136033 - DNA, 25 bp, Saccharomyces pastorianus
cgcatgccataacccttgcatggtt

SEQ ID NO: 136034 - DNA, 25 bp, Saccharomyces pastorianus
gatgcgcatgccataacccttgcat

SEQ ID NO: 136035 - DNA, 25 bp, Saccharomyces pastorianus
atgcgcatgccataacccttgcatg

SEQ ID NO: 136036 - DNA, 25 bp, Saccharomyces pastorianus
taacccttgcatggttagcacacgc

SEQ ID NO: 136037 - DNA, 25 bp, Saccharomyces pastorianus
atggatgcgcatgccataacccttg

SEQ ID NO: 136038 - DNA, 25 bp, Saccharomyces pastorianus
atgccataacccttgcatggttagc

SEQ ID NO: 136039 - DNA, 25 bp, Saccharomyces pastorianus
ataacccttgcatggttagcacacg

SEQ ID NO: 136040 - DNA, 25 bp, Saccharomyces pastorianus
gcgcatgccataacccttgcatggt

SEQ ID NO: 136041 - DNA, 25 bp, Saccharomyces pastorianus
acatggatgcgcatgccataaccct

SEQ ID NO: 136042 - DNA, 25 bp, Saccharomyces pastorianus
aattgtggtactaggagatgcaaac

SEQ ID NO: 136043 - DNA, 25 bp, Saccharomyces pastorianus
ttctaccttttctacctgaattaca

SEQ ID NO: 136044 - DNA, 25 bp, Saccharomyces pastorianus
tttttccggcaagagtcgcgtgatc

SEQ ID NO: 136045 - DNA, 25 bp, Saccharomyces pastorianus
catactagaggaaacttctaccttt

SEQ ID NO: 136046 - DNA, 25 bp, Saccharomyces pastorianus
aatccaatctgtgaacatactagag

SEQ ID NO: 136047 - DNA, 25 bp, Saccharomyces pastorianus
agatgcaaaccttttggtctccaca

SEQ ID NO: 136048 - DNA, 25 bp, Saccharomyces pastorianus
gtaggaaatgccacatggatgcgca

SEQ ID NO: 136049 - DNA, 25 bp, Saccharomyces pastorianus
tttggtctccacatcaattgcagaa

SEQ ID NO: 136050 - DNA, 25 bp, Saccharomyces pastorianus
aaaagattgactgtttgcatgtgca

SEQ ID NO: 136051 - DNA, 25 bp, Saccharomyces pastorianus
ttgcatgtgcaattatcttatatat

SEQ ID NO: 136052 - DNA, 25 bp, Saccharomyces pastorianus
tacattatcaacacttttgcaccaa

SEQ ID NO: 136053 - DNA, 25 bp, Saccharomyces pastorianus
tcaggaccctattctatttgcaggt

SEQ ID NO: 136054 - DNA, 25 bp, Saccharomyces pastorianus
tgcacgatcattgttacgcgagcca

SEQ ID NO: 136055 - DNA, 25 bp, Saccharomyces pastorianus
ttcaaagcactttcacaggtaaatc

SEQ ID NO: 136056 - DNA, 25 bp, Saccharomyces pastorianus
aattcttactattgcacatcgtttg

SEQ ID NO: 136057 - DNA, 25 bp, Saccharomyces pastorianus
taatacttttggacgaggctacttc

SEQ ID NO: 136058 - DNA, 25 bp, Saccharomyces pastorianus
ttgagatctgttatcgactacgaca

SEQ ID NO: 136059 - DNA, 25 bp, Saccharomyces pastorianus
gatctcgttacattacgtcgttcca

SEQ ID NO: 136060 - DNA, 25 bp, Saccharomyces pastorianus
tgagggcggcttaaacctgtcccaa

SEQ ID NO: 136061 - DNA, 25 bp, Saccharomyces pastorianus
aggctacttcctctattgattacga

SEQ ID NO: 136062 - DNA, 25 bp, Saccharomyces pastorianus
atatgatcgccctagtgaactgttg

SEQ ID NO: 136063 - DNA, 25 bp, Saccharomyces pastorianus
taactcggaggaacgctttaacagc

SEQ ID NO: 136064 - DNA, 25 bp, Saccharomyces pastorianus
gaaattatgcaaaaggcttacgtag

SEQ ID NO: 136065 - DNA, 25 bp, Saccharomyces pastorianus
tggtatgttcatttgtagattgaca

SEQ ID NO: 136066 - DNA, 25 bp, Saccharomyces pastorianus
gttcatttgtagattgacattagca

SEQ ID NO: 136067 - DNA, 25 bp, Saccharomyces pastorianus
agcaatttgtaattcccaaggtcaa

SEQ ID NO: 136068 - DNA, 25 bp, Saccharomyces pastorianus
ggcgtggctttatattattggtatg

SEQ ID NO: 136069 - DNA, 25 bp, Saccharomyces pastorianus
ctcatcatgcatgaatttggcgtgg

SEQ ID NO: 136070 - DNA, 25 bp, Saccharomyces pastorianus
aaccgttcctcatcatgcatgaatt

SEQ ID NO: 136071 - DNA, 25 bp, Saccharomyces pastorianus
attcccaaggtcaatttgtttctga

SEQ ID NO: 136072 - DNA, 25 bp, Saccharomyces pastorianus
ttgtttaagaataagagccatactc

SEQ ID NO: 136073 - DNA, 25 bp, Saccharomyces pastorianus
taagagccatactcataggagaaat

SEQ ID NO: 136074 - DNA, 25 bp, Saccharomyces pastorianus
ggcttacgtaggaggctgtttacat

SEQ ID NO: 136075 - DNA, 25 bp, Saccharomyces pastorianus
ggaagactatagcattttcatccta

SEQ ID NO: 136076 - DNA, 25 bp, Saccharomyces pastorianus
ctggattccaatacgttcggtctat

SEQ ID NO: 136077 - DNA, 25 bp, Saccharomyces pastorianus
gttttactgcccatacaactatttg

SEQ ID NO: 136078 - DNA, 25 bp, Saccharomyces pastorianus
atgggaggcccaaaagaacactatt

SEQ ID NO: 136079 - DNA, 25 bp, Saccharomyces pastorianus
aagcgttcaacgaatctttgggcca

SEQ ID NO: 136080 - DNA, 25 bp, Saccharomyces pastorianus
atctttgggccatctgttttactgc

SEQ ID NO: 136081 - DNA, 25 bp, Saccharomyces pastorianus
gttgcattacttggagctggattac

SEQ ID NO: 136082 - DNA, 25 bp, Saccharomyces pastorianus
atacctctccttcgagggaacacat

SEQ ID NO: 136083 - DNA, 25 bp, Saccharomyces pastorianus
ggatgtaccctcacagatattttac

SEQ ID NO: 136084 - DNA, 25 bp, Saccharomyces pastorianus
gacgctagcactgtttgaatctttc

SEQ ID NO: 136085 - DNA, 25 bp, Saccharomyces pastorianus
acaactcatccatcatctacgtaag

SEQ ID NO: 136086 - DNA, 25 bp, Saccharomyces pastorianus
ttgtattggccacgataaccaccct

SEQ ID NO: 136087 - DNA, 25 bp, Saccharomyces pastorianus
acgcgtttgtattggccacgataac

SEQ ID NO: 136088 - DNA, 25 bp, Saccharomyces pastorianus
taacacgagaaggaagaaaaacgcg

SEQ ID NO: 136089 - DNA, 25 bp, Saccharomyces pastorianus
cgcgtttgtattggccacgataacc

SEQ ID NO: 136090 - DNA, 25 bp, Saccharomyces pastorianus
aaacgcgtttgtattggccacgata

SEQ ID NO: 136091 - DNA, 25 bp, Saccharomyces pastorianus
tttgtattggccacgataaccaccc

SEQ ID NO: 136092 - DNA, 25 bp, Saccharomyces pastorianus
aaaacgcgtttgtattggccacgat

SEQ ID NO: 136093 - DNA, 25 bp, Saccharomyces pastorianus
tgtattggccacgataaccaccctt

SEQ ID NO: 136094 - DNA, 25 bp, Saccharomyces pastorianus
gcgtttgtattggccacgataacca

SEQ ID NO: 136095 - DNA, 25 bp, Saccharomyces pastorianus
gtttgtattggccacgataaccacc

SEQ ID NO: 136096 - DNA, 25 bp, Saccharomyces pastorianus
aacgcgtttgtattggccacgataa

SEQ ID NO: 136097 - DNA, 25 bp, Saccharomyces pastorianus
tagctgctagtgaaattggtatctc

SEQ ID NO: 136098 - DNA, 25 bp, Saccharomyces pastorianus
agaagattccaagcttgcagaacaa

SEQ ID NO: 136099 - DNA, 25 bp, Saccharomyces pastorianus
gaaatgattcgattgttgggcagcg

SEQ ID NO: 136100 - DNA, 25 bp, Saccharomyces pastorianus
gggagactatgggatcaaacttttc

SEQ ID NO: 136101 - DNA, 25 bp, Saccharomyces pastorianus
tgagattgcataccttttccataat

SEQ ID NO: 136102 - DNA, 25 bp, Saccharomyces pastorianus
gatttagtaccataagtagcgctga

SEQ ID NO: 136103 - DNA, 25 bp, Saccharomyces pastorianus
gcagacttccgatgaatccacaata

SEQ ID NO: 136104 - DNA, 25 bp, Saccharomyces pastorianus
gagacgatcaccttcttaattgaaa

SEQ ID NO: 136105 - DNA, 25 bp, Saccharomyces pastorianus
aggttccattaagcagacttccgat

SEQ ID NO: 136106 - DNA, 25 bp, Saccharomyces pastorianus
gtagcgctgactttatccaaaatgt

SEQ ID NO: 136107 - DNA, 25 bp, Saccharomyces pastorianus
aagttcggtggcctgatcattcaga

SEQ ID NO: 136108 - DNA, 25 bp, Saccharomyces pastorianus
ggcactaacaaggatatgatattaa

SEQ ID NO: 136109 - DNA, 25 bp, Saccharomyces pastorianus
ggcagagacatatgttgcatcttat

SEQ ID NO: 136110 - DNA, 25 bp, Saccharomyces pastorianus
aagcgaatcacaaaaatagcacaat

SEQ ID NO: 136111 - DNA, 25 bp, Saccharomyces pastorianus
atagcacaatcacaaacaatggcag

SEQ ID NO: 136112 - DNA, 25 bp, Saccharomyces pastorianus
gttgcatcttatgttgttccacgat

SEQ ID NO: 136113 - DNA, 25 bp, Saccharomyces pastorianus
tgttgttccacgattatatttgaaa

SEQ ID NO: 136114 - DNA, 25 bp, Saccharomyces pastorianus
atgttgcatcttatgttgttccacg

SEQ ID NO: 136115 - DNA, 25 bp, Saccharomyces pastorianus
gcatcttatgttgttccacgattat

SEQ ID NO: 136116 - DNA, 25 bp, Saccharomyces pastorianus
gcacaatcacaaacaatggcagaga

SEQ ID NO: 136117 - DNA, 25 bp, Saccharomyces pastorianus
tcttatgttgttccacgattatatt

SEQ ID NO: 136118 - DNA, 25 bp, Saccharomyces pastorianus
atggcagagacatatgttgcatctt

SEQ ID NO: 136119 - DNA, 25 bp, Saccharomyces pastorianus
agagaattccagtctttttcaagaa

SEQ ID NO: 136120 - DNA, 25 bp, Saccharomyces pastorianus
aggttgcgactctacaaaaccctct

SEQ ID NO: 136121 - DNA, 25 bp, Saccharomyces pastorianus
gttgtggctggtaaatggtcaagta

SEQ ID NO: 136122 - DNA, 25 bp, Saccharomyces pastorianus
gatcaacgatgtgacagcaattcaa

SEQ ID NO: 136123 - DNA, 25 bp, Saccharomyces pastorianus
gtaagtacttgatcaaacagattga

SEQ ID NO: 136124 - DNA, 25 bp, Saccharomyces pastorianus
tgacaaaattcggtttacttctcca

SEQ ID NO: 136125 - DNA, 25 bp, Saccharomyces pastorianus
ttccctgctacaaatgttaccacta

SEQ ID NO: 136126 - DNA, 25 bp, Saccharomyces pastorianus
atgcaacaaaaattccctgctacaa

SEQ ID NO: 136127 - DNA, 25 bp, Saccharomyces pastorianus
taaagttggtctgccaagtgacaaa

SEQ ID NO: 136128 - DNA, 25 bp, Saccharomyces pastorianus
agcaaaacgatttcttattttcagt

SEQ ID NO: 136129 - DNA, 25 bp, Saccharomyces pastorianus
gaatctttaagtgttgtggctggta

SEQ ID NO: 136130 - DNA, 25 bp, Saccharomyces pastorianus
gatcgactcgattttgaattatgcg

SEQ ID NO: 136131 - DNA, 25 bp, Saccharomyces pastorianus
ggtttcagcgttggataagtgtatt

SEQ ID NO: 136132 - DNA, 25 bp, Saccharomyces pastorianus
gcatttgcaatttcaatgggatatt

SEQ ID NO: 136133 - DNA, 25 bp, Saccharomyces pastorianus
atttattcaaggtttcagcgttgga

SEQ ID NO: 136134 - DNA, 25 bp, Saccharomyces pastorianus
gttggtacagcgatcgactcgattt

SEQ ID NO: 136135 - DNA, 25 bp, Saccharomyces pastorianus
gaaagttgttggtacagcgatcgac

SEQ ID NO: 136136 - DNA, 25 bp, Saccharomyces pastorianus
aatattttgagcctacctcaacaga

SEQ ID NO: 136137 - DNA, 25 bp, Saccharomyces pastorianus
taacgaaatattttgagcctacctc

SEQ ID NO: 136138 - DNA, 25 bp, Saccharomyces pastorianus
gcaagtgtatttatgcctttgattt

SEQ ID NO: 136139 - DNA, 25 bp, Saccharomyces pastorianus
gagtcggttaatatagcatttgcaa

SEQ ID NO: 136140 - DNA, 25 bp, Saccharomyces pastorianus
gagcctacctcaacagaaaataaca

SEQ ID NO: 136141 - DNA, 25 bp, Saccharomyces pastorianus
atctgttcgtgctgcgcctagctat

SEQ ID NO: 136142 - DNA, 25 bp, Saccharomyces pastorianus
tatgccacactatccatctgttcgt

SEQ ID NO: 136143 - DNA, 25 bp, Saccharomyces pastorianus
gtggtgttttcaaccgccaatcaca

SEQ ID NO: 136144 - DNA, 25 bp, Saccharomyces pastorianus
gatattatcatgagtaagctggcga

SEQ ID NO: 136145 - DNA, 25 bp, Saccharomyces pastorianus
aagataccaatgttaccatcgcgcc

SEQ ID NO: 136146 - DNA, 25 bp, Saccharomyces pastorianus
atcgcgccgtacaatggcaggtgga

SEQ ID NO: 136147 - DNA, 25 bp, Saccharomyces pastorianus
gccaatcacagtatgctatgccaca

SEQ ID NO: 136148 - DNA, 25 bp, Saccharomyces pastorianus
taactgggaatttagcctgaaccaa

SEQ ID NO: 136149 - DNA, 25 bp, Saccharomyces pastorianus
aacttcattgaagcctaactgggaa

SEQ ID NO: 136150 - DNA, 25 bp, Saccharomyces pastorianus
tattcctccagtggctgttctatat

SEQ ID NO: 136151 - DNA, 25 bp, Saccharomyces pastorianus
tgttctatattaccgcctctacaat

SEQ ID NO: 136152 - DNA, 25 bp, Saccharomyces pastorianus
agcataattggctctttggctattt

SEQ ID NO: 136153 - DNA, 25 bp, Saccharomyces pastorianus
ctaagtttattcatccaggtgggtc

SEQ ID NO: 136154 - DNA, 25 bp, Saccharomyces pastorianus
aattgcctttgtatgcactccagtg

SEQ ID NO: 136155 - DNA, 25 bp, Saccharomyces pastorianus
gatttatgccgttgtaattgccttt

SEQ ID NO: 136156 - DNA, 25 bp, Saccharomyces pastorianus
gttcattgtcatttggccagtcact

SEQ ID NO: 136157 - DNA, 25 bp, Saccharomyces pastorianus
accatttcaggcgattgtgcactaa

SEQ ID NO: 136158 - DNA, 25 bp, Saccharomyces pastorianus
tataggccataaggtcgggtcccac

SEQ ID NO: 136159 - DNA, 25 bp, Saccharomyces pastorianus
aaggttttctcacatctcagttcat

SEQ ID NO: 136160 - DNA, 25 bp, Saccharomyces pastorianus
cactatgggtatccttgctggtata

SEQ ID NO: 136161 - DNA, 25 bp, Saccharomyces pastorianus
agatctatgatcctagccattgcca

SEQ ID NO: 136162 - DNA, 25 bp, Saccharomyces pastorianus
tcaacgattatccactaccgcaggt

SEQ ID NO: 136163 - DNA, 25 bp, Saccharomyces pastorianus
acatcggcaaggtcgtgtttaactt

SEQ ID NO: 136164 - DNA, 25 bp, Saccharomyces pastorianus
gaatatgaccgcctgcaagaagaaa

SEQ ID NO: 136165 - DNA, 25 bp, Saccharomyces pastorianus
aaatacgtgtgcatccatggtggca

SEQ ID NO: 136166 - DNA, 25 bp, Saccharomyces pastorianus
tgaaaacctcaatgaatccaccgcc

SEQ ID NO: 136167 - DNA, 25 bp, Saccharomyces pastorianus
gatttcgagattccgtactgtacat

SEQ ID NO: 136168 - DNA, 25 bp, Saccharomyces pastorianus
agtctttcccctgggtcagatacaa

SEQ ID NO: 136169 - DNA, 25 bp, Saccharomyces pastorianus
taaacgtgagaattcccctgacaaa

SEQ ID NO: 136170 - DNA, 25 bp, Saccharomyces pastorianus
cgtactgtacatgcagtggcctgaa

SEQ ID NO: 136171 - DNA, 25 bp, Saccharomyces pastorianus
ttcccacgttactcctcgagataag

SEQ ID NO: 136172 - DNA, 25 bp, Saccharomyces pastorianus
gagtgacgattttctcctctgggag

SEQ ID NO: 136173 - DNA, 25 bp, Saccharomyces pastorianus
agccacaattgcagtaccagtcttt

SEQ ID NO: 136174 - DNA, 25 bp, Saccharomyces pastorianus
gcaggccgccacagatgcaagagaa

SEQ ID NO: 136175 - DNA, 25 bp, Saccharomyces pastorianus
acgagttctttcttgatgttattga

SEQ ID NO: 136176 - DNA, 25 bp, Saccharomyces pastorianus
gatgatgctggtttgcaggccgcca

SEQ ID NO: 136177 - DNA, 25 bp, Saccharomyces pastorianus
gagaaatcgaatttataccgccgga

SEQ ID NO: 136178 - DNA, 25 bp, Saccharomyces pastorianus
gaacgtgttcagtacttgatggatt

SEQ ID NO: 136179 - DNA, 25 bp, Saccharomyces pastorianus
gatgctatttatcagggatgcccaa

SEQ ID NO: 136180 - DNA, 25 bp, Saccharomyces pastorianus
aagaagccgctaatgacgagctccc

SEQ ID NO: 136181 - DNA, 25 bp, Saccharomyces pastorianus
gttcatgtcgaattccagctttcat

SEQ ID NO: 136182 - DNA, 25 bp, Saccharomyces pastorianus
gagctccccaatgacggtaatgatt

SEQ ID NO: 136183 - DNA, 25 bp, Saccharomyces pastorianus
gcgaagacgattataatgcccatat

SEQ ID NO: 136184 - DNA, 25 bp, Saccharomyces pastorianus
tccagctttcatcagtgtgtttcac

SEQ ID NO: 136185 - DNA, 25 bp, Saccharomyces pastorianus
gttcccgatggctctattttggaaa

SEQ ID NO: 136186 - DNA, 25 bp, Saccharomyces pastorianus
ttattaccttcaatcgacttgggcg

SEQ ID NO: 136187 - DNA, 25 bp, Saccharomyces pastorianus
gcgttctttccgaacagtcgagtat

SEQ ID NO: 136188 - DNA, 25 bp, Saccharomyces pastorianus
ggtttattacaactgcttatccaat

SEQ ID NO: 136189 - DNA, 25 bp, Saccharomyces pastorianus
aaatttgccaattcattctagggaa

SEQ ID NO: 136190 - DNA, 25 bp, Saccharomyces pastorianus
tcaagagacagatttttacccctaa

SEQ ID NO: 136191 - DNA, 25 bp, Saccharomyces pastorianus
gcacgtgtcgaattgtcaacactaa

SEQ ID NO: 136192 - DNA, 25 bp, Saccharomyces pastorianus
ttaacctctaccctctgaaatttgg

SEQ ID NO: 136193 - DNA, 25 bp, Saccharomyces pastorianus
atgtaattactgttcccgatggctc

SEQ ID NO: 136194 - DNA, 25 bp, Saccharomyces pastorianus
tggtcgattgtattgcgttctttcc

SEQ ID NO: 136195 - DNA, 25 bp, Saccharomyces pastorianus
gacttgggcgatgagtttgcaactt

SEQ ID NO: 136196 - DNA, 25 bp, Saccharomyces pastorianus
aagcattttccttcgatacgtgaca

SEQ ID NO: 136197 - DNA, 25 bp, Saccharomyces pastorianus
tccttcgatacgtgacaagaattat

SEQ ID NO: 136198 - DNA, 25 bp, Saccharomyces pastorianus
tagagtttgaaggtactttcgaagg

SEQ ID NO: 136199 - DNA, 25 bp, Saccharomyces pastorianus
tgaaggtactttcgaaggtattgga

SEQ ID NO: 136200 - DNA, 25 bp, Saccharomyces pastorianus
ttttccttcgatacgtgacaagaat

SEQ ID NO: 136201 - DNA, 25 bp, Saccharomyces pastorianus
atgtcacaaatgataagggccttgc

SEQ ID NO: 136202 - DNA, 25 bp, Saccharomyces pastorianus
gcattttccttcgatacgtgacaag

SEQ ID NO: 136203 - DNA, 25 bp, Saccharomyces pastorianus
agggccttgcagaagcattttcctt

SEQ ID NO: 136204 - DNA, 25 bp, Saccharomyces pastorianus
ggaaaggatgttgttatgtcacaaa

SEQ ID NO: 136205 - DNA, 25 bp, Saccharomyces pastorianus
atgacggttttctctggagtaaata

SEQ ID NO: 136206 - DNA, 25 bp, Saccharomyces pastorianus
gcagaagcattttccttcgatacgt

SEQ ID NO: 136207 - DNA, 25 bp, Saccharomyces pastorianus
aatggcggttacaatatcctggaaa

SEQ ID NO: 136208 - DNA, 25 bp, Saccharomyces pastorianus
gaaagcccagatgacttactcaaaa

SEQ ID NO: 136209 - DNA, 25 bp, Saccharomyces pastorianus
caaacagtaccacgttaggcggact

SEQ ID NO: 136210 - DNA, 25 bp, Saccharomyces pastorianus
tctagggaagtgacccctccggtat

SEQ ID NO: 136211 - DNA, 25 bp, Saccharomyces pastorianus
acacagacgatgctcattcattacg

SEQ ID NO: 136212 - DNA, 25 bp, Saccharomyces pastorianus
ggacagcactccaaggcggcaaaaa

SEQ ID NO: 136213 - DNA, 25 bp, Saccharomyces pastorianus
atggctgctgttggcataaaccgca

SEQ ID NO: 136214 - DNA, 25 bp, Saccharomyces pastorianus
agaatttcactcaagcaaggatgca

SEQ ID NO: 136215 - DNA, 25 bp, Saccharomyces pastorianus
ggatacttttcctcataacgctcca

SEQ ID NO: 136216 - DNA, 25 bp, Saccharomyces pastorianus
gaagatgcaacttacgaccctaagg

SEQ ID NO: 136217 - DNA, 25 bp, Saccharomyces pastorianus
agccgaaacacataactcgacattt

SEQ ID NO: 136218 - DNA, 25 bp, Saccharomyces pastorianus
caggtattggttctcaggagctttg

SEQ ID NO: 136219 - DNA, 25 bp, Saccharomyces pastorianus
acctttgtagtcatcttacaggtat

SEQ ID NO: 136220 - DNA, 25 bp, Saccharomyces pastorianus
ttggttctcaggagctttggatgaa

SEQ ID NO: 136221 - DNA, 25 bp, Saccharomyces pastorianus
acaggtattggttctcaggagcttt

SEQ ID NO: 136222 - DNA, 25 bp, Saccharomyces pastorianus
tggttctcaggagctttggatgaag

SEQ ID NO: 136223 - DNA, 25 bp, Saccharomyces pastorianus
tgtagtcatcttacaggtattggtt

SEQ ID NO: 136224 - DNA, 25 bp, Saccharomyces pastorianus
tacaggtattggttctcaggagctt

SEQ ID NO: 136225 - DNA, 25 bp, Saccharomyces pastorianus
gtattggttctcaggagctttggat

SEQ ID NO: 136226 - DNA, 25 bp, Saccharomyces pastorianus
aggtattggttctcaggagctttgg

SEQ ID NO: 136227 - DNA, 25 bp, Saccharomyces pastorianus
attggttctcaggagctttggatga

SEQ ID NO: 136228 - DNA, 25 bp, Saccharomyces pastorianus
tttgtagtcatcttacaggtattgg

SEQ ID NO: 136229 - DNA, 25 bp, Saccharomyces pastorianus
tcattggctccgctagtcaagttag

SEQ ID NO: 136230 - DNA, 25 bp, Saccharomyces pastorianus
gatagctgaagccaattcctcattg

SEQ ID NO: 136231 - DNA, 25 bp, Saccharomyces pastorianus
gggagcctccatatttaaatgaaac

SEQ ID NO: 136232 - DNA, 25 bp, Saccharomyces pastorianus
gaacgccttattggatggcgcctga

SEQ ID NO: 136233 - DNA, 25 bp, Saccharomyces pastorianus
gcgctacggaattgcttcatgatga

SEQ ID NO: 136234 - DNA, 25 bp, Saccharomyces pastorianus
tgaaacccctctaagagcactgtat

SEQ ID NO: 136235 - DNA, 25 bp, Saccharomyces pastorianus
atccgataacatcctattgtccatg

SEQ ID NO: 136236 - DNA, 25 bp, Saccharomyces pastorianus
tatctggtcgttgggtatcatgatc

SEQ ID NO: 136237 - DNA, 25 bp, Saccharomyces pastorianus
aaaggtgttcttcacagagatatca

SEQ ID NO: 136238 - DNA, 25 bp, Saccharomyces pastorianus
gaactactatggtgggaacgcctta

SEQ ID NO: 136239 - DNA, 25 bp, Saccharomyces pastorianus
gaacccgagaatctatcgtcaagct

SEQ ID NO: 136240 - DNA, 25 bp, Saccharomyces pastorianus
caatgtttcgcccttgaagcagact

SEQ ID NO: 136241 - DNA, 25 bp, Saccharomyces pastorianus
aagcgccggcgcaagagacggtaac

SEQ ID NO: 136242 - DNA, 25 bp, Saccharomyces pastorianus
gtcatgaattctgccgccaatgttt

SEQ ID NO: 136243 - DNA, 25 bp, Saccharomyces pastorianus
cagcaagttgctcaatcgccaaaag

SEQ ID NO: 136244 - DNA, 25 bp, Saccharomyces pastorianus
gaagcagactcatgcacctacaact

SEQ ID NO: 136245 - DNA, 25 bp, Saccharomyces pastorianus
aagaggagcagccactaccaccaat

SEQ ID NO: 136246 - DNA, 25 bp, Saccharomyces pastorianus
aaatccaaaacgtctccaatcatct

SEQ ID NO: 136247 - DNA, 25 bp, Saccharomyces pastorianus
gcatcaggtggtgtttatactgctt

SEQ ID NO: 136248 - DNA, 25 bp, Saccharomyces pastorianus
taggtacgaatgtctcagtggccat

SEQ ID NO: 136249 - DNA, 25 bp, Saccharomyces pastorianus
gacggtaacgacacctacttcgaag

SEQ ID NO: 136250 - DNA, 25 bp, Saccharomyces pastorianus
aaatttgctcagacggtgacccaag

SEQ ID NO: 136251 - DNA, 25 bp, Saccharomyces pastorianus
aacagctgcggctacttagccttgt

SEQ ID NO: 136252 - DNA, 25 bp, Saccharomyces pastorianus
tactctaatgtactcgtctatggat

SEQ ID NO: 136253 - DNA, 25 bp, Saccharomyces pastorianus
gaaggaccgcaacagctgcggctac

SEQ ID NO: 136254 - DNA, 25 bp, Saccharomyces pastorianus
gtccgcaatactctaatgtactcgt

SEQ ID NO: 136255 - DNA, 25 bp, Saccharomyces pastorianus
gtactcgtctatggattgtgggatc

SEQ ID NO: 136256 - DNA, 25 bp, Saccharomyces pastorianus
ggctacttagccttgtgttacggca

SEQ ID NO: 136257 - DNA, 25 bp, Saccharomyces pastorianus
agccttgtgttacggcagtgcctta

SEQ ID NO: 136258 - DNA, 25 bp, Saccharomyces pastorianus
gacacaagaaggaccgcaacagctg

SEQ ID NO: 136259 - DNA, 25 bp, Saccharomyces pastorianus
ggatctcaccgcgacacaagaagga

SEQ ID NO: 136260 - DNA, 25 bp, Saccharomyces pastorianus
ttacggcagtgccttagtctgccat

SEQ ID NO: 136261 - DNA, 25 bp, Saccharomyces pastorianus
atggattgtgggatctcaccgcgac

SEQ ID NO: 136262 - DNA, 25 bp, Saccharomyces pastorianus
ggagcacgtgactacgaacactgtt

SEQ ID NO: 136263 - DNA, 25 bp, Saccharomyces pastorianus
gcaggcgaatggtccgcaatactct

SEQ ID NO: 136264 - DNA, 25 bp, Saccharomyces pastorianus
tacttatacatgtacctcacccgga

SEQ ID NO: 136265 - DNA, 25 bp, Saccharomyces pastorianus
agccgcgagcgggtatccgtagttt

SEQ ID NO: 136266 - DNA, 25 bp, Saccharomyces pastorianus
atccagaaccgccttctagtagcgt

SEQ ID NO: 136267 - DNA, 25 bp, Saccharomyces pastorianus
ttgcaggtcacgtggcaagccgcga

SEQ ID NO: 136268 - DNA, 25 bp, Saccharomyces pastorianus
ttctagtagcgtgcctgcccgacta

SEQ ID NO: 136269 - DNA, 25 bp, Saccharomyces pastorianus
ctcacccggatgcaagcgcaggcga

SEQ ID NO: 136270 - DNA, 25 bp, Saccharomyces pastorianus
gaggactgaaggagcacgtgactac

SEQ ID NO: 136271 - DNA, 25 bp, Saccharomyces pastorianus
tgggccgggtaaagtacttatacat

SEQ ID NO: 136272 - DNA, 25 bp, Saccharomyces pastorianus
gaacactgttgcaggtcacgtggca

SEQ ID NO: 136273 - DNA, 25 bp, Saccharomyces pastorianus
caagatacgctatacaaaaagattc

SEQ ID NO: 136274 - DNA, 25 bp, Saccharomyces pastorianus
gcttgggctatttgtattcacagaa

SEQ ID NO: 136275 - DNA, 25 bp, Saccharomyces pastorianus
gcatgcttgggctatttgtattcac

SEQ ID NO: 136276 - DNA, 25 bp, Saccharomyces pastorianus
gatggcctaagtttcaagatacgct

SEQ ID NO: 136277 - DNA, 25 bp, Saccharomyces pastorianus
gagctagcatgcttgggctatttgt

SEQ ID NO: 136278 - DNA, 25 bp, Saccharomyces pastorianus
atgcttgggctatttgtattcacag

SEQ ID NO: 136279 - DNA, 25 bp, Saccharomyces pastorianus
gtggagctagcatgcttgggctatt

SEQ ID NO: 136280 - DNA, 25 bp, Saccharomyces pastorianus
aagtttcaagatacgctatacaaaa

SEQ ID NO: 136281 - DNA, 25 bp, Saccharomyces pastorianus
ggcctaagtttcaagatacgctata

SEQ ID NO: 136282 - DNA, 25 bp, Saccharomyces pastorianus
ttgtattcacagaaggatggcctaa

SEQ ID NO: 136283 - DNA, 25 bp, Saccharomyces pastorianus
aaggatggcctaagtttcaagatac

SEQ ID NO: 136284 - DNA, 25 bp, Saccharomyces pastorianus
taaccaaagtgtcaggctatccaat

SEQ ID NO: 136285 - DNA, 25 bp, Saccharomyces pastorianus
gacgacatactctctcctatagatt

SEQ ID NO: 136286 - DNA, 25 bp, Saccharomyces pastorianus
ggaccatgcctggtatttttggttt

SEQ ID NO: 136287 - DNA, 25 bp, Saccharomyces pastorianus
gaggcaagtctcctattagcggata

SEQ ID NO: 136288 - DNA, 25 bp, Saccharomyces pastorianus
gaggctctcagacatttaccggaat

SEQ ID NO: 136289 - DNA, 25 bp, Saccharomyces pastorianus
gcggatactctacgaaactagctct

SEQ ID NO: 136290 - DNA, 25 bp, Saccharomyces pastorianus
aacatcgtgcaatcaatgctgtcag

SEQ ID NO: 136291 - DNA, 25 bp, Saccharomyces pastorianus
ggagcgatcgtcattgcttggatta

SEQ ID NO: 136292 - DNA, 25 bp, Saccharomyces pastorianus
gtaatgaaatgctcgatccacgccg

SEQ ID NO: 136293 - DNA, 25 bp, Saccharomyces pastorianus
gacagcatcctagagactttccaaa

SEQ ID NO: 136294 - DNA, 25 bp, Saccharomyces pastorianus
aatctccttaaccaatgttgttctg

SEQ ID NO: 136295 - DNA, 25 bp, Saccharomyces pastorianus
gtatatagttatagtcggagctgga

SEQ ID NO: 136296 - DNA, 25 bp, Saccharomyces pastorianus
tgttttcaacccaacttgccaaaag

SEQ ID NO: 136297 - DNA, 25 bp, Saccharomyces pastorianus
tatgatgaccacttatttagggaac

SEQ ID NO: 136298 - DNA, 25 bp, Saccharomyces pastorianus
aatacaaactttcatgtgcggctaa

SEQ ID NO: 136299 - DNA, 25 bp, Saccharomyces pastorianus
gtatcgcgacctcgtcaatatgatg

SEQ ID NO: 136300 - DNA, 25 bp, Saccharomyces pastorianus
tggctcgtaactatgcatttcttgg

SEQ ID NO: 136301 - DNA, 25 bp, Saccharomyces pastorianus
tttagggaacaattggctcgtaact

SEQ ID NO: 136302 - DNA, 25 bp, Saccharomyces pastorianus
atacgtggaagttaattgctactac

SEQ ID NO: 136303 - DNA, 25 bp, Saccharomyces pastorianus
gaataaaaccgtatcgcgacctcgt

SEQ ID NO: 136304 - DNA, 25 bp, Saccharomyces pastorianus
tgctactacagctcttatatcggtg

SEQ ID NO: 136305 - DNA, 25 bp, Saccharomyces pastorianus
cagctcttatatcggtgttttcaac

SEQ ID NO: 136306 - DNA, 25 bp, Saccharomyces pastorianus
gagcaatcgtcgttggagccagaca

SEQ ID NO: 136307 - DNA, 25 bp, Saccharomyces pastorianus
gtaatgcagtccaaggaacgcctta

SEQ ID NO: 136308 - DNA, 25 bp, Saccharomyces pastorianus
aaacaaggttcatctcatccgacga

SEQ ID NO: 136309 - DNA, 25 bp, Saccharomyces pastorianus
aaatggactttgaacttctgggtga

SEQ ID NO: 136310 - DNA, 25 bp, Saccharomyces pastorianus
gacgaaagtgtttccgaaccagctt

SEQ ID NO: 136311 - DNA, 25 bp, Saccharomyces pastorianus
aagtcatacccattggattcagagc

SEQ ID NO: 136312 - DNA, 25 bp, Saccharomyces pastorianus
aagacttcggatggccaaacaaggt

SEQ ID NO: 136313 - DNA, 25 bp, Saccharomyces pastorianus
ggagactcaagattatctggccctt

SEQ ID NO: 136314 - DNA, 25 bp, Saccharomyces pastorianus
aaaccgaggaggacgcaatcaatca

SEQ ID NO: 136315 - DNA, 25 bp, Saccharomyces pastorianus
ccaaaatgcatcttctgtaccacaa

SEQ ID NO: 136316 - DNA, 25 bp, Saccharomyces pastorianus
atggattctccagcattatcctctg

SEQ ID NO: 136317 - DNA, 25 bp, Saccharomyces pastorianus
ggttatcacgttttggtttctccag

SEQ ID NO: 136318 - DNA, 25 bp, Saccharomyces pastorianus
atttctaagggtgtcagctctccat

SEQ ID NO: 136319 - DNA, 25 bp, Saccharomyces pastorianus
tatgtcatcccagcaggttatcacg

SEQ ID NO: 136320 - DNA, 25 bp, Saccharomyces pastorianus
agacgaatacttccctaatgctcac

SEQ ID NO: 136321 - DNA, 25 bp, Saccharomyces pastorianus
cgttggaacaacgattcagcctcct

SEQ ID NO: 136322 - DNA, 25 bp, Saccharomyces pastorianus
agctctccatacttacctttcggtg

SEQ ID NO: 136323 - DNA, 25 bp, Saccharomyces pastorianus
gtcagctaggtgttctaatgtccat

SEQ ID NO: 136324 - DNA, 25 bp, Saccharomyces pastorianus
tttctccaggttacacccatttaag

SEQ ID NO: 136325 - DNA, 25 bp, Saccharomyces pastorianus
tcctcttattccgtcggtgaagaag

SEQ ID NO: 136326 - DNA, 25 bp, Saccharomyces pastorianus
gaacactttgcttactgtcagctag

SEQ ID NO: 136327 - DNA, 25 bp, Saccharomyces pastorianus
cacctcctgactttacatctatggt

SEQ ID NO: 136328 - DNA, 25 bp, Saccharomyces pastorianus
aaagaatctctttgatcataataat

SEQ ID NO: 136329 - DNA, 25 bp, Saccharomyces pastorianus
aataattcctttcatttacaatatt

SEQ ID NO: 136330 - DNA, 25 bp, Saccharomyces pastorianus
tttcttggctttaccattggcccaa

SEQ ID NO: 136331 - DNA, 25 bp, Saccharomyces pastorianus
acattggtttaagtcatttcttggc

SEQ ID NO: 136332 - DNA, 25 bp, Saccharomyces pastorianus
gtcatttcttggctttaccattggc

SEQ ID NO: 136333 - DNA, 25 bp, Saccharomyces pastorianus
ttaagtcatttcttggctttaccat

SEQ ID NO: 136334 - DNA, 25 bp, Saccharomyces pastorianus
ctctttgatcataataattcctttc

SEQ ID NO: 136335 - DNA, 25 bp, Saccharomyces pastorianus
tggtttaagtcatttcttggcttta

SEQ ID NO: 136336 - DNA, 25 bp, Saccharomyces pastorianus
aagtcatttcttggctttaccattg

SEQ ID NO: 136337 - DNA, 25 bp, Saccharomyces pastorianus
gagaggcattggaatacgtaaacat

SEQ ID NO: 136338 - DNA, 25 bp, Saccharomyces pastorianus
gttggagaggcattggaatacgtaa

SEQ ID NO: 136339 - DNA, 25 bp, Saccharomyces pastorianus
aataattcctttcatttacaatatt

SEQ ID NO: 136340 - DNA, 25 bp, Saccharomyces pastorianus
atctctttgatcataataattcctt

SEQ ID NO: 136341 - DNA, 25 bp, Saccharomyces pastorianus
tttcttggctttaccattggcccaa

SEQ ID NO: 136342 - DNA, 25 bp, Saccharomyces pastorianus
acattggtttaagtcatttcttggc

SEQ ID NO: 136343 - DNA, 25 bp, Saccharomyces pastorianus
gtcatttcttggctttaccattggc

SEQ ID NO: 136344 - DNA, 25 bp, Saccharomyces pastorianus
gaaaggaccgtccacctctagtgtt

SEQ ID NO: 136345 - DNA, 25 bp, Saccharomyces pastorianus
ttaagtcatttcttggctttaccat

SEQ ID NO: 136346 - DNA, 25 bp, Saccharomyces pastorianus
accattggcccaaagaatctctttg

SEQ ID NO: 136347 - DNA, 25 bp, Saccharomyces pastorianus
ttctttgagaaaggaccgtccacct

SEQ ID NO: 136348 - DNA, 25 bp, Saccharomyces pastorianus
atgtctgctaccaagtcaatcgttg

SEQ ID NO: 136349 - DNA, 25 bp, Saccharomyces pastorianus
gagaggcattggaatacgtaaacat

SEQ ID NO: 136350 - DNA, 25 bp, Saccharomyces pastorianus
ttccttcctttttttacacagctgt

SEQ ID NO: 136351 - DNA, 25 bp, Saccharomyces pastorianus
gaagaacaaatttgagaattcgcca

SEQ ID NO: 136352 - DNA, 25 bp, Saccharomyces pastorianus
gaagggttcacatttactaactatt

SEQ ID NO: 136353 - DNA, 25 bp, Saccharomyces pastorianus
gggttcacatttactaactatttct

SEQ ID NO: 136354 - DNA, 25 bp, Saccharomyces pastorianus
ttcacatttactaactatttctttt

SEQ ID NO: 136355 - DNA, 25 bp, Saccharomyces pastorianus
gccaaactttaagaagggttcacat

SEQ ID NO: 136356 - DNA, 25 bp, Saccharomyces pastorianus
tattttttctctccctagtattgaa

SEQ ID NO: 136357 - DNA, 25 bp, Saccharomyces pastorianus
ttttttacacagctgtcgttgtccg

SEQ ID NO: 136358 - DNA, 25 bp, Saccharomyces pastorianus
atattttttctctccctagtattga

SEQ ID NO: 136359 - DNA, 25 bp, Saccharomyces pastorianus
taagaagggttcacatttactaact

SEQ ID NO: 136360 - DNA, 25 bp, Saccharomyces pastorianus
gagaattcgccaaactttaagaagg

SEQ ID NO: 136361 - DNA, 25 bp, Saccharomyces pastorianus
ttccttcctttttttacacagctgt

SEQ ID NO: 136362 - DNA, 25 bp, Saccharomyces pastorianus
gaagaacaaatttgagaattcgcca

SEQ ID NO: 136363 - DNA, 25 bp, Saccharomyces pastorianus
gaagggttcacatttactaactatt

SEQ ID NO: 136364 - DNA, 25 bp, Saccharomyces pastorianus
gggttcacatttactaactatttct

SEQ ID NO: 136365 - DNA, 25 bp, Saccharomyces pastorianus
gatcaagcctttcatcaaggtcgtc

SEQ ID NO: 136366 - DNA, 25 bp, Saccharomyces pastorianus
gccaaactttaagaagggttcacat

SEQ ID NO: 136367 - DNA, 25 bp, Saccharomyces pastorianus
tattttttctctccctagtattgaa

SEQ ID NO: 136368 - DNA, 25 bp, Saccharomyces pastorianus
ttttttacacagctgtcgttgtccg

SEQ ID NO: 136369 - DNA, 25 bp, Saccharomyces pastorianus
atattttttctctccctagtattga

SEQ ID NO: 136370 - DNA, 25 bp, Saccharomyces pastorianus
tctctccctagtattgaagaacaaa

SEQ ID NO: 136371 - DNA, 25 bp, Saccharomyces pastorianus
gagaattcgccaaactttaagaagg

SEQ ID NO: 136372 - DNA, 25 bp, Saccharomyces pastorianus
gtagcggttataccgttgtgccaaa

SEQ ID NO: 136373 - DNA, 25 bp, Saccharomyces pastorianus
gaacaacctgggtcttacacgccta

SEQ ID NO: 136374 - DNA, 25 bp, Saccharomyces pastorianus
caaggtgctttgaaaatcggctgtt

SEQ ID NO: 136375 - DNA, 25 bp, Saccharomyces pastorianus
gtctaattcaccaagtttctgcctc

SEQ ID NO: 136376 - DNA, 25 bp, Saccharomyces pastorianus
gaccccttatctttgttagcattgg

SEQ ID NO: 136377 - DNA, 25 bp, Saccharomyces pastorianus
acatcagaggtggacaagccgacta

SEQ ID NO: 136378 - DNA, 25 bp, Saccharomyces pastorianus
ggtgcttttaatacagattggccaa

SEQ ID NO: 136379 - DNA, 25 bp, Saccharomyces pastorianus
attggcacgccagttggatgtagac

SEQ ID NO: 136380 - DNA, 25 bp, Saccharomyces pastorianus
ggtggtactcataacgttgaagctt

SEQ ID NO: 136381 - DNA, 25 bp, Saccharomyces pastorianus
atccaggtagctgtacgggtgcttt

SEQ ID NO: 136382 - DNA, 25 bp, Saccharomyces pastorianus
gttgtgccaaagaacgaccccttat

SEQ ID NO: 136383 - DNA, 25 bp, Saccharomyces pastorianus
caggcgacttggctttcaaaaaagg

SEQ ID NO: 136384 - DNA, 25 bp, Saccharomyces pastorianus
tacaaattcggcgacaccaacggct

SEQ ID NO: 136385 - DNA, 25 bp, Saccharomyces pastorianus
gtggacaggcaggactaacggaaaa

SEQ ID NO: 136386 - DNA, 25 bp, Saccharomyces pastorianus
ggttaggtaatgaatccactgctac

SEQ ID NO: 136387 - DNA, 25 bp, Saccharomyces pastorianus
accaacggctgttgttctctacaat

SEQ ID NO: 136388 - DNA, 25 bp, Saccharomyces pastorianus
aaatgattggtggacaggcaggact

SEQ ID NO: 136389 - DNA, 25 bp, Saccharomyces pastorianus
aatccactgctacaaattcggcgac

SEQ ID NO: 136390 - DNA, 25 bp, Saccharomyces pastorianus
tgagcaatgtcgatgatttatcaca

SEQ ID NO: 136391 - DNA, 25 bp, Saccharomyces pastorianus
gaacaaccaggcgacttggctttca

SEQ ID NO: 136392 - DNA, 25 bp, Saccharomyces pastorianus
aaaaaggtgatgttattactatctt

SEQ ID NO: 136393 - DNA, 25 bp, Saccharomyces pastorianus
aatgtcgaagacagggttaggtaat

SEQ ID NO: 136394 - DNA, 25 bp, Saccharomyces pastorianus
gagtaaaagtcccaccagcagcaga

SEQ ID NO: 136395 - DNA, 25 bp, Saccharomyces pastorianus
agagcattcaactttacacgccacg

SEQ ID NO: 136396 - DNA, 25 bp, Saccharomyces pastorianus
acgacgatattccagattcctttga

SEQ ID NO: 136397 - DNA, 25 bp, Saccharomyces pastorianus
acaacgctagcggtgatgattttta

SEQ ID NO: 136398 - DNA, 25 bp, Saccharomyces pastorianus
agcagccgcaatagaggcccacaga

SEQ ID NO: 136399 - DNA, 25 bp, Saccharomyces pastorianus
gttttacggcgataactgtacatca

SEQ ID NO: 136400 - DNA, 25 bp, Saccharomyces pastorianus
tgcagcttctgcatctacaggtggt

SEQ ID NO: 136401 - DNA, 25 bp, Saccharomyces pastorianus
gccacgaccatgatgacaacgctag

SEQ ID NO: 136402 - DNA, 25 bp, Saccharomyces pastorianus
aaaggtttatttgccggtgtgtctg

SEQ ID NO: 136403 - DNA, 25 bp, Saccharomyces pastorianus
gcgacaacacaagccattattacga

SEQ ID NO: 136404 - DNA, 25 bp, Saccharomyces pastorianus
tctactgatggatcctcaacacgtc

SEQ ID NO: 136405 - DNA, 25 bp, Saccharomyces pastorianus
tatcccattcgaccaacctgtattg

SEQ ID NO: 136406 - DNA, 25 bp, Saccharomyces pastorianus
gagctaaagggtattccaatccgta

SEQ ID NO: 136407 - DNA, 25 bp, Saccharomyces pastorianus
caagtcgttgtcgttcgtagaaatg

SEQ ID NO: 136408 - DNA, 25 bp, Saccharomyces pastorianus
ggtgccaaatctttatgtatcccat

SEQ ID NO: 136409 - DNA, 25 bp, Saccharomyces pastorianus
ggaagcccgtatcccagaaatctta

SEQ ID NO: 136410 - DNA, 25 bp, Saccharomyces pastorianus
gttcgacacccacagagttatcgtt

SEQ ID NO: 136411 - DNA, 25 bp, Saccharomyces pastorianus
cagccagaagtgtggaatcccgttt

SEQ ID NO: 136412 - DNA, 25 bp, Saccharomyces pastorianus
ggagtggttttgttccagcattgaa

SEQ ID NO: 136413 - DNA, 25 bp, Saccharomyces pastorianus
gaacgttatcttagcaccatggtgt

SEQ ID NO: 136414 - DNA, 25 bp, Saccharomyces pastorianus
aaagccaaggagctgttcgacaccc

SEQ ID NO: 136415 - DNA, 25 bp, Saccharomyces pastorianus
tggaaattttcccaatacgagctaa

SEQ ID NO: 136416 - DNA, 25 bp, Saccharomyces pastorianus
gtggttgatttctcccaagaggtgt

SEQ ID NO: 136417 - DNA, 25 bp, Saccharomyces pastorianus
gatttctcccaagaggtgtctaagg

SEQ ID NO: 136418 - DNA, 25 bp, Saccharomyces pastorianus
ggtgtctaaggaaaccgctacagaa

SEQ ID NO: 136419 - DNA, 25 bp, Saccharomyces pastorianus
aaggaaaccgctacagaaggcaaga

SEQ ID NO: 136420 - DNA, 25 bp, Saccharomyces pastorianus
ttctaagcaattttgaggatagtca

SEQ ID NO: 136421 - DNA, 25 bp, Saccharomyces pastorianus
atctgacatgatgaaatttctaagc

SEQ ID NO: 136422 - DNA, 25 bp, Saccharomyces pastorianus
agaggtgtctaaggaaaccgctaca

SEQ ID NO: 136423 - DNA, 25 bp, Saccharomyces pastorianus
gtcaaaaagtggttgatttctccca

SEQ ID NO: 136424 - DNA, 25 bp, Saccharomyces pastorianus
accgctacagaaggcaagaaacaac

SEQ ID NO: 136425 - DNA, 25 bp, Saccharomyces pastorianus
gttgatttctcccaagaggtgtcta

SEQ ID NO: 136426 - DNA, 25 bp, Saccharomyces pastorianus
aagtggttgatttctcccaagaggt

SEQ ID NO: 136427 - DNA, 25 bp, Saccharomyces pastorianus
tggatgtcaaatgcccaggttgttt

SEQ ID NO: 136428 - DNA, 25 bp, Saccharomyces pastorianus
cctacagttttcaaattactaacat

SEQ ID NO: 136429 - DNA, 25 bp, Saccharomyces pastorianus
tcgttttcgtttctatttatttcat

SEQ ID NO: 136430 - DNA, 25 bp, Saccharomyces pastorianus
catcaatttttttgtgaaacgactt

SEQ ID NO: 136431 - DNA, 25 bp, Saccharomyces pastorianus
ctacttcttggatgtcaaatgccca

SEQ ID NO: 136432 - DNA, 25 bp, Saccharomyces pastorianus
tatttatttcattacaggttttagt

SEQ ID NO: 136433 - DNA, 25 bp, Saccharomyces pastorianus
ttcaaggcccaagatcctacttctt

SEQ ID NO: 136434 - DNA, 25 bp, Saccharomyces pastorianus
acagttttcaaattactaacatcaa

SEQ ID NO: 136435 - DNA, 25 bp, Saccharomyces pastorianus
aagatcctacttcttggatgtcaaa

SEQ ID NO: 136436 - DNA, 25 bp, Saccharomyces pastorianus
aaggcccaagatcctacttcttgga

SEQ ID NO: 136437 - DNA, 25 bp, Saccharomyces pastorianus
ttggttcaaggcccaagatcctact

SEQ ID NO: 136438 - DNA, 25 bp, Saccharomyces pastorianus
ttttgacaagctattggattgggca

SEQ ID NO: 136439 - DNA, 25 bp, Saccharomyces pastorianus
ccttttggatctaaatggtgtggaa

SEQ ID NO: 136440 - DNA, 25 bp, Saccharomyces pastorianus
ttcctgactcagatcatagtataag

SEQ ID NO: 136441 - DNA, 25 bp, Saccharomyces pastorianus
gtttctggaccttttggatctaaat

SEQ ID NO: 136442 - DNA, 25 bp, Saccharomyces pastorianus
acgtctttcctgactcagatcatag

SEQ ID NO: 136443 - DNA, 25 bp, Saccharomyces pastorianus
gtataagataccataatgcgaatgt

SEQ ID NO: 136444 - DNA, 25 bp, Saccharomyces pastorianus
tggaaaattatgacgtccacgtctt

SEQ ID NO: 136445 - DNA, 25 bp, Saccharomyces pastorianus
taaagtttctggaccttttggatct

SEQ ID NO: 136446 - DNA, 25 bp, Saccharomyces pastorianus
attatgacgtccacgtctttcctga

SEQ ID NO: 136447 - DNA, 25 bp, Saccharomyces pastorianus
tggaccttttggatctaaatggtgt

SEQ ID NO: 136448 - DNA, 25 bp, Saccharomyces pastorianus
gcgaatgtaatcgtttttgacaagc

SEQ ID NO: 136449 - DNA, 25 bp, Saccharomyces pastorianus
ggcacagggtcaaactattcaaaga

SEQ ID NO: 136450 - DNA, 25 bp, Saccharomyces pastorianus
gagcggtaactatggacaccttaca

SEQ ID NO: 136451 - DNA, 25 bp, Saccharomyces pastorianus
gctatgctgggcattgtccattcat

SEQ ID NO: 136452 - DNA, 25 bp, Saccharomyces pastorianus
tgagctcatggtcccagagcgcttt

SEQ ID NO: 136453 - DNA, 25 bp, Saccharomyces pastorianus
gatccaggaaagattcgcaccaatg

SEQ ID NO: 136454 - DNA, 25 bp, Saccharomyces pastorianus
atgttgcactgtcaagagcggtaac

SEQ ID NO: 136455 - DNA, 25 bp, Saccharomyces pastorianus
gtccattcataaggcacagggtcaa

SEQ ID NO: 136456 - DNA, 25 bp, Saccharomyces pastorianus
agagcgctttcccattgatattccc

SEQ ID NO: 136457 - DNA, 25 bp, Saccharomyces pastorianus
aagccggccaagtttatgttgcact

SEQ ID NO: 136458 - DNA, 25 bp, Saccharomyces pastorianus
gaggagaattttcgaagccggccaa

SEQ ID NO: 136459 - DNA, 25 bp, Saccharomyces pastorianus
gacaccttacagttcctaaactttg

SEQ ID NO: 136460 - DNA, 25 bp, Saccharomyces pastorianus
gatattctaaatgccataagatacg

SEQ ID NO: 136461 - DNA, 25 bp, Saccharomyces pastorianus
atgccataagatacggagagctgac

SEQ ID NO: 136462 - DNA, 25 bp, Saccharomyces pastorianus
gactatgccgatggaattgctccta

SEQ ID NO: 136463 - DNA, 25 bp, Saccharomyces pastorianus
gctgactgtcgacattgctaaaaca

SEQ ID NO: 136464 - DNA, 25 bp, Saccharomyces pastorianus
gagagctgactgtcgacattgctaa

SEQ ID NO: 136465 - DNA, 25 bp, Saccharomyces pastorianus
ggatatagactatgccgatggaatt

SEQ ID NO: 136466 - DNA, 25 bp, Saccharomyces pastorianus
gactgtcgacattgctaaaacaata

SEQ ID NO: 136467 - DNA, 25 bp, Saccharomyces pastorianus
gagattagtaagtcgagtcattggt

SEQ ID NO: 136468 - DNA, 25 bp, Saccharomyces pastorianus
gtaagtcgagtcattggtaatccct

SEQ ID NO: 136469 - DNA, 25 bp, Saccharomyces pastorianus
tatgccgatggaattgctcctacag

SEQ ID NO: 136470 - DNA, 25 bp, Saccharomyces pastorianus
gatacggagagctgactgtcgacat

SEQ ID NO: 136471 - DNA, 25 bp, Saccharomyces pastorianus
atgccaggccattagctagattgga

SEQ ID NO: 136472 - DNA, 25 bp, Saccharomyces pastorianus
tttgttacagaatcgctggtggtga

SEQ ID NO: 136473 - DNA, 25 bp, Saccharomyces pastorianus
aaaattcccctatgtgaggtggaca

SEQ ID NO: 136474 - DNA, 25 bp, Saccharomyces pastorianus
gcagttaagatctctccgcataagg

SEQ ID NO: 136475 - DNA, 25 bp, Saccharomyces pastorianus
gaattgctcctacagaactgtatgc

SEQ ID NO: 136476 - DNA, 25 bp, Saccharomyces pastorianus
cgtcaagatttgaatgccaggccat

SEQ ID NO: 136477 - DNA, 25 bp, Saccharomyces pastorianus
atactagattcttcattaatggtgg

SEQ ID NO: 136478 - DNA, 25 bp, Saccharomyces pastorianus
gcccgagagataccaagcgatacta

SEQ ID NO: 136479 - DNA, 25 bp, Saccharomyces pastorianus
agctgtagataacgcgcccgagaga

SEQ ID NO: 136480 - DNA, 25 bp, Saccharomyces pastorianus
ggaaaaagttgtcgcattgaaggaa

SEQ ID NO: 136481 - DNA, 25 bp, Saccharomyces pastorianus
agaactgtatgccacaagaagagaa

SEQ ID NO: 136482 - DNA, 25 bp, Saccharomyces pastorianus
atgtgttagcattcctgtatcatct

SEQ ID NO: 136483 - DNA, 25 bp, Saccharomyces pastorianus
ggtacatcaacctagccgcattcta

SEQ ID NO: 136484 - DNA, 25 bp, Saccharomyces pastorianus
ggcatatgtgttagcattcctgtat

SEQ ID NO: 136485 - DNA, 25 bp, Saccharomyces pastorianus
agccgcattctactgtctaggtgtg

SEQ ID NO: 136486 - DNA, 25 bp, Saccharomyces pastorianus
aggtgggtacatcaacctagccgca

SEQ ID NO: 136487 - DNA, 25 bp, Saccharomyces pastorianus
gtgcccatggcatatgtgttagcat

SEQ ID NO: 136488 - DNA, 25 bp, Saccharomyces pastorianus
aacctagccgcattctactgtctag

SEQ ID NO: 136489 - DNA, 25 bp, Saccharomyces pastorianus
tactgtctaggtgtgcccatggcat

SEQ ID NO: 136490 - DNA, 25 bp, Saccharomyces pastorianus
ctgtctaggtgtgcccatggcatat

SEQ ID NO: 136491 - DNA, 25 bp, Saccharomyces pastorianus
cattctactgtctaggtgtgcccat

SEQ ID NO: 136492 - DNA, 25 bp, Saccharomyces pastorianus
gtgggtacatcaacctagccgcatt

SEQ ID NO: 136493 - DNA, 25 bp, Saccharomyces pastorianus
gccgcctacaagctgcgaattctta

SEQ ID NO: 136494 - DNA, 25 bp, Saccharomyces pastorianus
ttgccgcgcgacatagtcgtgaatg

SEQ ID NO: 136495 - DNA, 25 bp, Saccharomyces pastorianus
gagcttcctgcactagaggtattga

SEQ ID NO: 136496 - DNA, 25 bp, Saccharomyces pastorianus
acggtaagctgagcatacccttgcc

SEQ ID NO: 136497 - DNA, 25 bp, Saccharomyces pastorianus
gaacaaagctccgaactcgaagccg

SEQ ID NO: 136498 - DNA, 25 bp, Saccharomyces pastorianus
agaacaaaatctccggagccaagat

SEQ ID NO: 136499 - DNA, 25 bp, Saccharomyces pastorianus
tgcaccgcacgagcagcaggaggac

SEQ ID NO: 136500 - DNA, 25 bp, Saccharomyces pastorianus
gaagaagggcgctgagcttcctgca

SEQ ID NO: 136501 - DNA, 25 bp, Saccharomyces pastorianus
gccggagacccgatgagtatattga

SEQ ID NO: 136502 - DNA, 25 bp, Saccharomyces pastorianus
tgatcccgacgatggaacactacca

SEQ ID NO: 136503 - DNA, 25 bp, Saccharomyces pastorianus
tccgagctacaacttcgcagagaat

SEQ ID NO: 136504 - DNA, 25 bp, Saccharomyces pastorianus
ccgagattcggtggtattgtgcaga

SEQ ID NO: 136505 - DNA, 25 bp, Saccharomyces pastorianus
cgagagatactggtcgaatggtgct

SEQ ID NO: 136506 - DNA, 25 bp, Saccharomyces pastorianus
agtcatgtgagatccgagattcggt

SEQ ID NO: 136507 - DNA, 25 bp, Saccharomyces pastorianus
ttcggtggtattgtgcagagatcgc

SEQ ID NO: 136508 - DNA, 25 bp, Saccharomyces pastorianus
gcagagatcgcattgcattccccaa

SEQ ID NO: 136509 - DNA, 25 bp, Saccharomyces pastorianus
cagagatcgcattgcattccccaag

SEQ ID NO: 136510 - DNA, 25 bp, Saccharomyces pastorianus
agattcggtggtattgtgcagagat

SEQ ID NO: 136511 - DNA, 25 bp, Saccharomyces pastorianus
tccgagattcggtggtattgtgcag

SEQ ID NO: 136512 - DNA, 25 bp, Saccharomyces pastorianus
tggtattgtgcagagatcgcattgc

SEQ ID NO: 136513 - DNA, 25 bp, Saccharomyces pastorianus
gtgcagagatcgcattgcattcccc

SEQ ID NO: 136514 - DNA, 25 bp, Saccharomyces pastorianus
ttgtgcagagatcgcattgcattcc

SEQ ID NO: 136515 - DNA, 25 bp, Saccharomyces pastorianus
aaagcaaaattattcccttggacat

SEQ ID NO: 136516 - DNA, 25 bp, Saccharomyces pastorianus
caaaggtttccgcagccattatatg

SEQ ID NO: 136517 - DNA, 25 bp, Saccharomyces pastorianus
gtcaggaccgtttcttgaaaagcaa

SEQ ID NO: 136518 - DNA, 25 bp, Saccharomyces pastorianus
gttgcagtcaggaccgtttcttgaa

SEQ ID NO: 136519 - DNA, 25 bp, Saccharomyces pastorianus
caaggaaactcttggtacagaggat

SEQ ID NO: 136520 - DNA, 25 bp, Saccharomyces pastorianus
ggacatcactgacaaggaaactctt

SEQ ID NO: 136521 - DNA, 25 bp, Saccharomyces pastorianus
tggtacagaggatatgacattcaat

SEQ ID NO: 136522 - DNA, 25 bp, Saccharomyces pastorianus
ttgaaactaaaaccggttgcagtca

SEQ ID NO: 136523 - DNA, 25 bp, Saccharomyces pastorianus
attattcccttggacatcactgaca

SEQ ID NO: 136524 - DNA, 25 bp, Saccharomyces pastorianus
tccgcagccattatatgttgaaact

SEQ ID NO: 136525 - DNA, 25 bp, Saccharomyces pastorianus
ggtttccgcagccattatatgttga

SEQ ID NO: 136526 - DNA, 25 bp, Saccharomyces pastorianus
caccatttgtgtagatggtggctcg

SEQ ID NO: 136527 - DNA, 25 bp, Saccharomyces pastorianus
aaccaccatttgtgtagatggtggc

SEQ ID NO: 136528 - DNA, 25 bp, Saccharomyces pastorianus
catttgtgtagatggtggctcgtac

SEQ ID NO: 136529 - DNA, 25 bp, Saccharomyces pastorianus
accatttgtgtagatggtggctcgt

SEQ ID NO: 136530 - DNA, 25 bp, Saccharomyces pastorianus
accaccatttgtgtagatggtggct

SEQ ID NO: 136531 - DNA, 25 bp, Saccharomyces pastorianus
tttgtgtagatggtggctcgtactt

SEQ ID NO: 136532 - DNA, 25 bp, Saccharomyces pastorianus
ccaccatttgtgtagatggtggctc

SEQ ID NO: 136533 - DNA, 25 bp, Saccharomyces pastorianus
ttgtgtagatggtggctcgtactta

SEQ ID NO: 136534 - DNA, 25 bp, Saccharomyces pastorianus
atttgtgtagatggtggctcgtact

SEQ ID NO: 136535 - DNA, 25 bp, Saccharomyces pastorianus
ccatttgtgtagatggtggctcgta

SEQ ID NO: 136536 - DNA, 25 bp, Saccharomyces pastorianus
gactggatcgtattggatgtcccat

SEQ ID NO: 136537 - DNA, 25 bp, Saccharomyces pastorianus
gaagcaattgtttctactaccaaat

SEQ ID NO: 136538 - DNA, 25 bp, Saccharomyces pastorianus
cgatagctttgcttactcatccaag

SEQ ID NO: 136539 - DNA, 25 bp, Saccharomyces pastorianus
gatagcctcacgaattatcgatagc

SEQ ID NO: 136540 - DNA, 25 bp, Saccharomyces pastorianus
ggatgtcccattaacaagagcccag

SEQ ID NO: 136541 - DNA, 25 bp, Saccharomyces pastorianus
aagaaggtcgcgagctctgttgcaa

SEQ ID NO: 136542 - DNA, 25 bp, Saccharomyces pastorianus
agacacatgcctttcattatgcaaa

SEQ ID NO: 136543 - DNA, 25 bp, Saccharomyces pastorianus
aagagcccagatacttcaagatgat

SEQ ID NO: 136544 - DNA, 25 bp, Saccharomyces pastorianus
gcaaacctttcatctggagttacag

SEQ ID NO: 136545 - DNA, 25 bp, Saccharomyces pastorianus
aggtctccaattctatcggttcgga

SEQ ID NO: 136546 - DNA, 25 bp, Saccharomyces pastorianus
ggttcggaatacttcacctgatgaa

SEQ ID NO: 136547 - DNA, 25 bp, Saccharomyces pastorianus
gagaacagaatgtttggacttgtct

SEQ ID NO: 136548 - DNA, 25 bp, Saccharomyces pastorianus
ttattcgatggcttgttccctacga

SEQ ID NO: 136549 - DNA, 25 bp, Saccharomyces pastorianus
cgatggcttgttccctacgagaaca

SEQ ID NO: 136550 - DNA, 25 bp, Saccharomyces pastorianus
gcttgttccctacgagaacagaatg

SEQ ID NO: 136551 - DNA, 25 bp, Saccharomyces pastorianus
gttccctacgagaacagaatgtttg

SEQ ID NO: 136552 - DNA, 25 bp, Saccharomyces pastorianus
tcgatggcttgttccctacgagaac

SEQ ID NO: 136553 - DNA, 25 bp, Saccharomyces pastorianus
tattcgatggcttgttccctacgag

SEQ ID NO: 136554 - DNA, 25 bp, Saccharomyces pastorianus
attcgatggcttgttccctacgaga

SEQ ID NO: 136555 - DNA, 25 bp, Saccharomyces pastorianus
ggcttgttccctacgagaacagaat

SEQ ID NO: 136556 - DNA, 25 bp, Saccharomyces pastorianus
atggcttgttccctacgagaacaga

SEQ ID NO: 136557 - DNA, 25 bp, Saccharomyces pastorianus
ttcgatggcttgttccctacgagaa

SEQ ID NO: 136558 - DNA, 25 bp, Saccharomyces pastorianus
atgagtggtaccgacgataaggctg

SEQ ID NO: 136559 - DNA, 25 bp, Saccharomyces pastorianus
ggctggtggtccaaacattttaagc

SEQ ID NO: 136560 - DNA, 25 bp, Saccharomyces pastorianus
ggtggtccaaacattttaagcagat

SEQ ID NO: 136561 - DNA, 25 bp, Saccharomyces pastorianus
aagaatgagtggtaccgacgataag

SEQ ID NO: 136562 - DNA, 25 bp, Saccharomyces pastorianus
cattttaagcagatttgtcagtatt

SEQ ID NO: 136563 - DNA, 25 bp, Saccharomyces pastorianus
gataaggctggtggtccaaacattt

SEQ ID NO: 136564 - DNA, 25 bp, Saccharomyces pastorianus
taaggctggtggtccaaacatttta

SEQ ID NO: 136565 - DNA, 25 bp, Saccharomyces pastorianus
gaaacacaaaggagaacttctacga

SEQ ID NO: 136566 - DNA, 25 bp, Saccharomyces pastorianus
cacaaaggagaacttctacgagttg

SEQ ID NO: 136567 - DNA, 25 bp, Saccharomyces pastorianus
gtcagtattagaaacacaaaggaga

SEQ ID NO: 136568 - DNA, 25 bp, Saccharomyces pastorianus
tggtccaaacattttaagcagattt

SEQ ID NO: 136569 - DNA, 25 bp, Saccharomyces pastorianus
aattctttacggtggacaatacgat

SEQ ID NO: 136570 - DNA, 25 bp, Saccharomyces pastorianus
gcaagtccaatttctggtgggaatt

SEQ ID NO: 136571 - DNA, 25 bp, Saccharomyces pastorianus
caaggttggtttgtcggacccacag

SEQ ID NO: 136572 - DNA, 25 bp, Saccharomyces pastorianus
tgaacacatccgcaagtccaatttc

SEQ ID NO: 136573 - DNA, 25 bp, Saccharomyces pastorianus
ctgtcatccatgaacaaagtttcga

SEQ ID NO: 136574 - DNA, 25 bp, Saccharomyces pastorianus
agccaagagaccagatcatccatat

SEQ ID NO: 136575 - DNA, 25 bp, Saccharomyces pastorianus
gggatttatgggtcctgtcatccat

SEQ ID NO: 136576 - DNA, 25 bp, Saccharomyces pastorianus
ggacccacagtcataaaagccaaga

SEQ ID NO: 136577 - DNA, 25 bp, Saccharomyces pastorianus
tgcagtcacagaatgttgtcccaat

SEQ ID NO: 136578 - DNA, 25 bp, Saccharomyces pastorianus
aagatgcaaagaaagaccccgagtt

SEQ ID NO: 136579 - DNA, 25 bp, Saccharomyces pastorianus
ttgtcccaatgaacacatccgcaag

SEQ ID NO: 136580 - DNA, 25 bp, Saccharomyces pastorianus
tatgctcaacaacccgtagagtcag

SEQ ID NO: 136581 - DNA, 25 bp, Saccharomyces pastorianus
tgccttgcattttaccggttctaca

SEQ ID NO: 136582 - DNA, 25 bp, Saccharomyces pastorianus
atcgactgtatcacggaattatctg

SEQ ID NO: 136583 - DNA, 25 bp, Saccharomyces pastorianus
gggctccagctttgatgggtaatac

SEQ ID NO: 136584 - DNA, 25 bp, Saccharomyces pastorianus
tcaactttactgctattgctgcaaa

SEQ ID NO: 136585 - DNA, 25 bp, Saccharomyces pastorianus
gcactttcgagttccaaggccaaaa

SEQ ID NO: 136586 - DNA, 25 bp, Saccharomyces pastorianus
aaaatttccatctagttcacccaag

SEQ ID NO: 136587 - DNA, 25 bp, Saccharomyces pastorianus
accgctgccctttcaaattacttat

SEQ ID NO: 136588 - DNA, 25 bp, Saccharomyces pastorianus
tgtctggaaaccttcacaaaccgct

SEQ ID NO: 136589 - DNA, 25 bp, Saccharomyces pastorianus
cattccaggtgatccagttcaagtt

SEQ ID NO: 136590 - DNA, 25 bp, Saccharomyces pastorianus
gtgtatgctgtttcaccattcaact

SEQ ID NO: 136591 - DNA, 25 bp, Saccharomyces pastorianus
cttggctggaacaagctcttgcata

SEQ ID NO: 136592 - DNA, 25 bp, Saccharomyces pastorianus
cacgatattcgttgccatgacagag

SEQ ID NO: 136593 - DNA, 25 bp, Saccharomyces pastorianus
accacagtgatcgagtttcccacga

SEQ ID NO: 136594 - DNA, 25 bp, Saccharomyces pastorianus
gaagagcggactcaaattctacacg

SEQ ID NO: 136595 - DNA, 25 bp, Saccharomyces pastorianus
ttttcaaacatgtcagccaccgtat

SEQ ID NO: 136596 - DNA, 25 bp, Saccharomyces pastorianus
aagaggactctcaaccgacagaaga

SEQ ID NO: 136597 - DNA, 25 bp, Saccharomyces pastorianus
aggaaacacaggacgccagcgacag

SEQ ID NO: 136598 - DNA, 25 bp, Saccharomyces pastorianus
gcccacttgagcatacgagtacact

SEQ ID NO: 136599 - DNA, 25 bp, Saccharomyces pastorianus
agagggctacgaggtgctacaccag

SEQ ID NO: 136600 - DNA, 25 bp, Saccharomyces pastorianus
agaggctgacctaccagagggctac

SEQ ID NO: 136601 - DNA, 25 bp, Saccharomyces pastorianus
ctgtgaattctatcgcttggctgga

SEQ ID NO: 136602 - DNA, 25 bp, Saccharomyces pastorianus
aacgaaatgcttatgtccagaggga

SEQ ID NO: 136603 - DNA, 25 bp, Saccharomyces pastorianus
gtgaactgtttgatgctacccaagg

SEQ ID NO: 136604 - DNA, 25 bp, Saccharomyces pastorianus
gtccagagggactacaactatctga

SEQ ID NO: 136605 - DNA, 25 bp, Saccharomyces pastorianus
gggcggccacaactctaatttcaag

SEQ ID NO: 136606 - DNA, 25 bp, Saccharomyces pastorianus
ggtcaaacacatgatcctaaggagt

SEQ ID NO: 136607 - DNA, 25 bp, Saccharomyces pastorianus
tggagtgttccaagaagcacaagac

SEQ ID NO: 136608 - DNA, 25 bp, Saccharomyces pastorianus
ggacaattgctcaggtcaaacacat

SEQ ID NO: 136609 - DNA, 25 bp, Saccharomyces pastorianus
ggtgcaaacttgctctttggagtgt

SEQ ID NO: 136610 - DNA, 25 bp, Saccharomyces pastorianus
agcgatcatcgcaaaacaggagcaa

SEQ ID NO: 136611 - DNA, 25 bp, Saccharomyces pastorianus
tagcacggagtgtcagaggataatt

SEQ ID NO: 136612 - DNA, 25 bp, Saccharomyces pastorianus
acaggcggacgacgacaagcacgaa

SEQ ID NO: 136613 - DNA, 25 bp, Saccharomyces pastorianus
gattgcaggcatcgaaggacaccta

SEQ ID NO: 136614 - DNA, 25 bp, Saccharomyces pastorianus
ggtgttcaatggctcatctacgggc

SEQ ID NO: 136615 - DNA, 25 bp, Saccharomyces pastorianus
gacacctagctgaaatccgggccaa

SEQ ID NO: 136616 - DNA, 25 bp, Saccharomyces pastorianus
tattttgtcgtccaagctgtccaac

SEQ ID NO: 136617 - DNA, 25 bp, Saccharomyces pastorianus
gggccggacaccagcaacgaaatat

SEQ ID NO: 136618 - DNA, 25 bp, Saccharomyces pastorianus
atggccggcagaccgtgctaatcaa

SEQ ID NO: 136619 - DNA, 25 bp, Saccharomyces pastorianus
gacgttgatcttggacgggctcacc

SEQ ID NO: 136620 - DNA, 25 bp, Saccharomyces pastorianus
tacgggcgttcctgagtccatagac

SEQ ID NO: 136621 - DNA, 25 bp, Saccharomyces pastorianus
ggacaactcagcgatggtgacgact

SEQ ID NO: 136622 - DNA, 25 bp, Saccharomyces pastorianus
cactgggttcaagggtctcctgata

SEQ ID NO: 136623 - DNA, 25 bp, Saccharomyces pastorianus
acaaaacctcatccgactcgttggg

SEQ ID NO: 136624 - DNA, 25 bp, Saccharomyces pastorianus
gttttgatcaaaccctggctcaagc

SEQ ID NO: 136625 - DNA, 25 bp, Saccharomyces pastorianus
acaccgttgccagacttggcggaga

SEQ ID NO: 136626 - DNA, 25 bp, Saccharomyces pastorianus
aaggacattgtcttatctgctagat

SEQ ID NO: 136627 - DNA, 25 bp, Saccharomyces pastorianus
gttcaaggcagttgttttcaacacc

SEQ ID NO: 136628 - DNA, 25 bp, Saccharomyces pastorianus
ctggctcaagccttagacactatta

SEQ ID NO: 136629 - DNA, 25 bp, Saccharomyces pastorianus
atcaaaaccctgtttcgtcagaaga

SEQ ID NO: 136630 - DNA, 25 bp, Saccharomyces pastorianus
agagattacagccaggctcgcctgt

SEQ ID NO: 136631 - DNA, 25 bp, Saccharomyces pastorianus
tatgggcctggatgcaagaacactg

SEQ ID NO: 136632 - DNA, 25 bp, Saccharomyces pastorianus
aggccatacctgcactgttcaaggc

SEQ ID NO: 136633 - DNA, 25 bp, Saccharomyces pastorianus
agatttttacatcccaatgcaaggc

SEQ ID NO: 136634 - DNA, 25 bp, Saccharomyces pastorianus
gacactattagatccaaggcgcaat

SEQ ID NO: 136635 - DNA, 25 bp, Saccharomyces pastorianus
gtgggacgccttagcagatgcctct

SEQ ID NO: 136636 - DNA, 25 bp, Saccharomyces pastorianus
ggaagatacaaccatataccccatt

SEQ ID NO: 136637 - DNA, 25 bp, Saccharomyces pastorianus
gttggttttccagtgttatctgtca

SEQ ID NO: 136638 - DNA, 25 bp, Saccharomyces pastorianus
gatgcctctggcaaggacgtttgtt

SEQ ID NO: 136639 - DNA, 25 bp, Saccharomyces pastorianus
actgacaatttacaacgtgctctaa

SEQ ID NO: 136640 - DNA, 25 bp, Saccharomyces pastorianus
gaaaaatctgctactttcgaactaa

SEQ ID NO: 136641 - DNA, 25 bp, Saccharomyces pastorianus
gaccggagatttgtgggacgcctta

SEQ ID NO: 136642 - DNA, 25 bp, Saccharomyces pastorianus
tataccccattttgttagctttgaa

SEQ ID NO: 136643 - DNA, 25 bp, Saccharomyces pastorianus
gtattttcattacctcttattctga

SEQ ID NO: 136644 - DNA, 25 bp, Saccharomyces pastorianus
gattcattgagatcttcccatccaa

SEQ ID NO: 136645 - DNA, 25 bp, Saccharomyces pastorianus
tcccatccaattgaagttcccgtta

SEQ ID NO: 136646 - DNA, 25 bp, Saccharomyces pastorianus
gcgcatgggtgagcagagatcgtga

SEQ ID NO: 136647 - DNA, 25 bp, Saccharomyces pastorianus
cgcgcatgggtgagcagagatcgtg

SEQ ID NO: 136648 - DNA, 25 bp, Saccharomyces pastorianus
tgagcagagatcgtgaaatcgttgc

SEQ ID NO: 136649 - DNA, 25 bp, Saccharomyces pastorianus
cacgcgcatgggtgagcagagatcg

SEQ ID NO: 136650 - DNA, 25 bp, Saccharomyces pastorianus
ccacgcgcatgggtgagcagagatc

SEQ ID NO: 136651 - DNA, 25 bp, Saccharomyces pastorianus
ggtgagcagagatcgtgaaatcgtt

SEQ ID NO: 136652 - DNA, 25 bp, Saccharomyces pastorianus
gaccacgcgcatgggtgagcagaga

SEQ ID NO: 136653 - DNA, 25 bp, Saccharomyces pastorianus
atgggtgagcagagatcgtgaaatc

SEQ ID NO: 136654 - DNA, 25 bp, Saccharomyces pastorianus
gagcagagatcgtgaaatcgttgct

SEQ ID NO: 136655 - DNA, 25 bp, Saccharomyces pastorianus
acgcgcatgggtgagcagagatcgt

SEQ ID NO: 136656 - DNA, 25 bp, Saccharomyces pastorianus
catgggtgagcagagatcgtgaaat

SEQ ID NO: 136657 - DNA, 25 bp, Saccharomyces pastorianus
atgttctcttgaaattccccgttag

SEQ ID NO: 136658 - DNA, 25 bp, Saccharomyces pastorianus
cacatttgctattttccaacgttgt

SEQ ID NO: 136659 - DNA, 25 bp, Saccharomyces pastorianus
caaaattttgcgagaaactctgata

SEQ ID NO: 136660 - DNA, 25 bp, Saccharomyces pastorianus
aattccccgttagtgaactgaacag

SEQ ID NO: 136661 - DNA, 25 bp, Saccharomyces pastorianus
gctattgattcatgacaagattttg

SEQ ID NO: 136662 - DNA, 25 bp, Saccharomyces pastorianus
taattttatcttccccataaagtcg

SEQ ID NO: 136663 - DNA, 25 bp, Saccharomyces pastorianus
ggcaataatcgctttcattctaatg

SEQ ID NO: 136664 - DNA, 25 bp, Saccharomyces pastorianus
gataaagtcattttcaagcggcaat

SEQ ID NO: 136665 - DNA, 25 bp, Saccharomyces pastorianus
gataatctgggtattactacggcaa

SEQ ID NO: 136666 - DNA, 25 bp, Saccharomyces pastorianus
ttccccataaagtcgataaagtcat

SEQ ID NO: 136667 - DNA, 25 bp, Saccharomyces pastorianus
cagaattttatagcaatcacatttg

SEQ ID NO: 136668 - DNA, 25 bp, Saccharomyces pastorianus
ggcacgttcaacacgcgttatcgag

SEQ ID NO: 136669 - DNA, 25 bp, Saccharomyces pastorianus
gattgaggtcaagcgccgaaattgc

SEQ ID NO: 136670 - DNA, 25 bp, Saccharomyces pastorianus
acatggtttaccgatctgtcgcact

SEQ ID NO: 136671 - DNA, 25 bp, Saccharomyces pastorianus
tcctttgttggcttacctgttagta

SEQ ID NO: 136672 - DNA, 25 bp, Saccharomyces pastorianus
gattccgggcatttcattcaagaag

SEQ ID NO: 136673 - DNA, 25 bp, Saccharomyces pastorianus
tgctataccagctttatttgctccg

SEQ ID NO: 136674 - DNA, 25 bp, Saccharomyces pastorianus
gccctttctgggacacatggtttac

SEQ ID NO: 136675 - DNA, 25 bp, Saccharomyces pastorianus
ggtagttttccaagattccgggcat

SEQ ID NO: 136676 - DNA, 25 bp, Saccharomyces pastorianus
aatgacgctgtcgattggcacgttc

SEQ ID NO: 136677 - DNA, 25 bp, Saccharomyces pastorianus
tatttgctccgctcaagtcagggaa

SEQ ID NO: 136678 - DNA, 25 bp, Saccharomyces pastorianus
gaagaggctgccattatggccttaa

SEQ ID NO: 136679 - DNA, 25 bp, Saccharomyces pastorianus
gccagtcagcgttcaaaaaccttta

SEQ ID NO: 136680 - DNA, 25 bp, Saccharomyces pastorianus
gatgcaagaatccatagacgcaagg

SEQ ID NO: 136681 - DNA, 25 bp, Saccharomyces pastorianus
gaagattgcatttacgttcttgact

SEQ ID NO: 136682 - DNA, 25 bp, Saccharomyces pastorianus
gaaatttgtctctgatgtccttgaa

SEQ ID NO: 136683 - DNA, 25 bp, Saccharomyces pastorianus
tacgttcttgactaaaagcggtaag

SEQ ID NO: 136684 - DNA, 25 bp, Saccharomyces pastorianus
gttatccaagccaaagaagattgca

SEQ ID NO: 136685 - DNA, 25 bp, Saccharomyces pastorianus
gaaccttcttcaagcaaggagacct

SEQ ID NO: 136686 - DNA, 25 bp, Saccharomyces pastorianus
gaattttacaattaccaacggatgt

SEQ ID NO: 136687 - DNA, 25 bp, Saccharomyces pastorianus
gagacctacgaagagttatccaagc

SEQ ID NO: 136688 - DNA, 25 bp, Saccharomyces pastorianus
ggttgttgccagtaaaattccagta

SEQ ID NO: 136689 - DNA, 25 bp, Saccharomyces pastorianus
tccagtaatttcgaagccagtcagc

SEQ ID NO: 136690 - DNA, 25 bp, Saccharomyces pastorianus
gtagcctagacttcaaacacattgt

SEQ ID NO: 136691 - DNA, 25 bp, Saccharomyces pastorianus
ctcactgggacgatgtagctattca

SEQ ID NO: 136692 - DNA, 25 bp, Saccharomyces pastorianus
gccgcgatttcgtcatcagatgtat

SEQ ID NO: 136693 - DNA, 25 bp, Saccharomyces pastorianus
gttggttcggaaagctcactgggac

SEQ ID NO: 136694 - DNA, 25 bp, Saccharomyces pastorianus
gtctatacagttaccgccgcgattt

SEQ ID NO: 136695 - DNA, 25 bp, Saccharomyces pastorianus
cacattattcggtttggtcatatca

SEQ ID NO: 136696 - DNA, 25 bp, Saccharomyces pastorianus
aacatgaacatgaaaggcgccttag

SEQ ID NO: 136697 - DNA, 25 bp, Saccharomyces pastorianus
tttaaacgactcagatccaccggat

SEQ ID NO: 136698 - DNA, 25 bp, Saccharomyces pastorianus
actaaagttctaggcggtctataca

SEQ ID NO: 136699 - DNA, 25 bp, Saccharomyces pastorianus
aagtgctgttttctctgttttcaaa

SEQ ID NO: 136700 - DNA, 25 bp, Saccharomyces pastorianus
gtcatatcaacaatcaacccaatcc

SEQ ID NO: 136701 - DNA, 25 bp, Saccharomyces pastorianus
gacgccggttctgactttgtaatac

SEQ ID NO: 136702 - DNA, 25 bp, Saccharomyces pastorianus
gacctactgctatgaaagttctaag

SEQ ID NO: 136703 - DNA, 25 bp, Saccharomyces pastorianus
agatccttaattgcagaagctacag

SEQ ID NO: 136704 - DNA, 25 bp, Saccharomyces pastorianus
ttgaaaacagagaccctccaagtgc

SEQ ID NO: 136705 - DNA, 25 bp, Saccharomyces pastorianus
acagatctgatctcccaaatgattg

SEQ ID NO: 136706 - DNA, 25 bp, Saccharomyces pastorianus
gattacttcaccaagcgttttccaa

SEQ ID NO: 136707 - DNA, 25 bp, Saccharomyces pastorianus
aatgaaattcgacgccggttctgac

SEQ ID NO: 136708 - DNA, 25 bp, Saccharomyces pastorianus
tacccagtggagattggactgtcaa

SEQ ID NO: 136709 - DNA, 25 bp, Saccharomyces pastorianus
gatccgttaaaaagacctactgcta

SEQ ID NO: 136710 - DNA, 25 bp, Saccharomyces pastorianus
gtgtattctattatatcctatccaa

SEQ ID NO: 136711 - DNA, 25 bp, Saccharomyces pastorianus
cctccaagtgccctgttaatgaaat

SEQ ID NO: 136712 - DNA, 25 bp, Saccharomyces pastorianus
gtctcgcacctcaaggcggcagata

SEQ ID NO: 136713 - DNA, 25 bp, Saccharomyces pastorianus
aaaaatatagactcgcccattcctg

SEQ ID NO: 136714 - DNA, 25 bp, Saccharomyces pastorianus
gttagtattgacactgctcgtttgt

SEQ ID NO: 136715 - DNA, 25 bp, Saccharomyces pastorianus
tgctcgtttgtgtgttttcatccat

SEQ ID NO: 136716 - DNA, 25 bp, Saccharomyces pastorianus
agggctgccaattctataagtgtac

SEQ ID NO: 136717 - DNA, 25 bp, Saccharomyces pastorianus
attcctgctccaagaaccactgaag

SEQ ID NO: 136718 - DNA, 25 bp, Saccharomyces pastorianus
atttcatgctcaatcccattgtcgt

SEQ ID NO: 136719 - DNA, 25 bp, Saccharomyces pastorianus
gaatactgctgataatcgacgtgct

SEQ ID NO: 136720 - DNA, 25 bp, Saccharomyces pastorianus
gtgtaccctatttggagaatcgttc

SEQ ID NO: 136721 - DNA, 25 bp, Saccharomyces pastorianus
gaagatgaagttgcctccactaaaa

SEQ ID NO: 136722 - DNA, 25 bp, Saccharomyces pastorianus
agctcatatccaactcctaacttat

SEQ ID NO: 136723 - DNA, 25 bp, Saccharomyces pastorianus
gatcattatgcttttctggtctcct

SEQ ID NO: 136724 - DNA, 25 bp, Saccharomyces pastorianus
gaaaacgccatatcatctgagaaga

SEQ ID NO: 136725 - DNA, 25 bp, Saccharomyces pastorianus
cctcggcttcacgtgtttcaagaaa

SEQ ID NO: 136726 - DNA, 25 bp, Saccharomyces pastorianus
actcatattttggatttcgttcaga

SEQ ID NO: 136727 - DNA, 25 bp, Saccharomyces pastorianus
gagtgcaatatcacctcgaggtcgt

SEQ ID NO: 136728 - DNA, 25 bp, Saccharomyces pastorianus
gaaggctgctgattgatggtcaaga

SEQ ID NO: 136729 - DNA, 25 bp, Saccharomyces pastorianus
gtttcggcacactgtataactcata

SEQ ID NO: 136730 - DNA, 25 bp, Saccharomyces pastorianus
aatataattacgtgcccagtttcgg

SEQ ID NO: 136731 - DNA, 25 bp, Saccharomyces pastorianus
tcgaggtcgtgctatgttgagaaac

SEQ ID NO: 136732 - DNA, 25 bp, Saccharomyces pastorianus
gctgagtcctcaaaaactattcttg

SEQ ID NO: 136733 - DNA, 25 bp, Saccharomyces pastorianus
ataaacataggcctttccatagtaa

SEQ ID NO: 136734 - DNA, 25 bp, Saccharomyces pastorianus
aaaactgttccttccaaatggtcag

SEQ ID NO: 136735 - DNA, 25 bp, Saccharomyces pastorianus
attgcatcgaccatcataccgagac

SEQ ID NO: 136736 - DNA, 25 bp, Saccharomyces pastorianus
aacggtcgtccatcttcgggattga

SEQ ID NO: 136737 - DNA, 25 bp, Saccharomyces pastorianus
taccgagacctagtatgtccaacgg

SEQ ID NO: 136738 - DNA, 25 bp, Saccharomyces pastorianus
aaatggtcagtagtcagttcctcta

SEQ ID NO: 136739 - DNA, 25 bp, Saccharomyces pastorianus
tattcaaggactctggtgtcagccc

SEQ ID NO: 136740 - DNA, 25 bp, Saccharomyces pastorianus
gtgtcagccccaatgaaaggttgat

SEQ ID NO: 136741 - DNA, 25 bp, Saccharomyces pastorianus
gaaagtactaccttcgacggcactg

SEQ ID NO: 136742 - DNA, 25 bp, Saccharomyces pastorianus
caactcctctaatggcctaacgaat

SEQ ID NO: 136743 - DNA, 25 bp, Saccharomyces pastorianus
aaaagattgtccttcaactcctcta

SEQ ID NO: 136744 - DNA, 25 bp, Saccharomyces pastorianus
aacaccagtagcgacgttttacaag

SEQ ID NO: 136745 - DNA, 25 bp, Saccharomyces pastorianus
gagctaaaagctccttcgttggctt

SEQ ID NO: 136746 - DNA, 25 bp, Saccharomyces pastorianus
gtttatgttccacctcatcatagga

SEQ ID NO: 136747 - DNA, 25 bp, Saccharomyces pastorianus
gctggctccactcacgataaaaaat

SEQ ID NO: 136748 - DNA, 25 bp, Saccharomyces pastorianus
agacgtattcgcagactctaacaat

SEQ ID NO: 136749 - DNA, 25 bp, Saccharomyces pastorianus
gagaagttgtcctcttcaccaggag

SEQ ID NO: 136750 - DNA, 25 bp, Saccharomyces pastorianus
aggccacgttgtcagtttcgcataa

SEQ ID NO: 136751 - DNA, 25 bp, Saccharomyces pastorianus
ggtggtgacaacgaatcctcgtcaa

SEQ ID NO: 136752 - DNA, 25 bp, Saccharomyces pastorianus
atttatgctcaaactttcgctggct

SEQ ID NO: 136753 - DNA, 25 bp, Saccharomyces pastorianus
gggaacacaggtacctcctatgaat

SEQ ID NO: 136754 - DNA, 25 bp, Saccharomyces pastorianus
tgaatctaacccactgcatatgaat

SEQ ID NO: 136755 - DNA, 25 bp, Saccharomyces pastorianus
attccaggcgttccagtgctaatga

SEQ ID NO: 136756 - DNA, 25 bp, Saccharomyces pastorianus
gatttcttcgactcttacatcatca

SEQ ID NO: 136757 - DNA, 25 bp, Saccharomyces pastorianus
ggcggtgacctatatgaggcgatca

SEQ ID NO: 136758 - DNA, 25 bp, Saccharomyces pastorianus
ggaatattgctctggcggtgaccta

SEQ ID NO: 136759 - DNA, 25 bp, Saccharomyces pastorianus
aaagttgatacggatcgccatgaaa

SEQ ID NO: 136760 - DNA, 25 bp, Saccharomyces pastorianus
gcctccagtaataacgggtcaagta

SEQ ID NO: 136761 - DNA, 25 bp, Saccharomyces pastorianus
taataacatttgtctcgaagccatg

SEQ ID NO: 136762 - DNA, 25 bp, Saccharomyces pastorianus
gatgctgtgcctaagaaaaccaaat

SEQ ID NO: 136763 - DNA, 25 bp, Saccharomyces pastorianus
gcgatcaaagccgatgctgtgccta

SEQ ID NO: 136764 - DNA, 25 bp, Saccharomyces pastorianus
attgctgctctattagatttcttcg

SEQ ID NO: 136765 - DNA, 25 bp, Saccharomyces pastorianus
ggtagacaccaaaatattgctgctc

SEQ ID NO: 136766 - DNA, 25 bp, Saccharomyces pastorianus
gtacgatgggcctcaggacgacgaa

SEQ ID NO: 136767 - DNA, 25 bp, Saccharomyces pastorianus
gaagaccaagttcctccagttatac

SEQ ID NO: 136768 - DNA, 25 bp, Saccharomyces pastorianus
gaagtatttgttcacgcaagcacta

SEQ ID NO: 136769 - DNA, 25 bp, Saccharomyces pastorianus
gggaagccttcataccaggaacact

SEQ ID NO: 136770 - DNA, 25 bp, Saccharomyces pastorianus
ggcgatcacgattcagacgacgttt

SEQ ID NO: 136771 - DNA, 25 bp, Saccharomyces pastorianus
ataccggtaagtcaccactttcaag

SEQ ID NO: 136772 - DNA, 25 bp, Saccharomyces pastorianus
taagagttccgcaatcaactgctcc

SEQ ID NO: 136773 - DNA, 25 bp, Saccharomyces pastorianus
ctacagttcaacattcaccaggcgc

SEQ ID NO: 136774 - DNA, 25 bp, Saccharomyces pastorianus
aaatgatcacttaccgcatacaacg

SEQ ID NO: 136775 - DNA, 25 bp, Saccharomyces pastorianus
ggcgtggttctacgactacagttca

SEQ ID NO: 136776 - DNA, 25 bp, Saccharomyces pastorianus
aatgccaggaaccatcacgtaagcc

SEQ ID NO: 136777 - DNA, 25 bp, Saccharomyces pastorianus
gctcctgatatctctaccgttttag

SEQ ID NO: 136778 - DNA, 25 bp, Saccharomyces pastorianus
attgtctttggtgtcgtcaacttct

SEQ ID NO: 136779 - DNA, 25 bp, Saccharomyces pastorianus
ttgttgttctctgtacaccgttgac

SEQ ID NO: 136780 - DNA, 25 bp, Saccharomyces pastorianus
gtctatgcttctgttggagtcacta

SEQ ID NO: 136781 - DNA, 25 bp, Saccharomyces pastorianus
aaacaacggctcatccaagggtgct

SEQ ID NO: 136782 - DNA, 25 bp, Saccharomyces pastorianus
ctgttatgttgtctatgcttctgtt

SEQ ID NO: 136783 - DNA, 25 bp, Saccharomyces pastorianus
ggttccagtatccaagagaggcgct

SEQ ID NO: 136784 - DNA, 25 bp, Saccharomyces pastorianus
tgtatgtctattgccagtgctgcta

SEQ ID NO: 136785 - DNA, 25 bp, Saccharomyces pastorianus
aacttcttctccacttgttgttctc

SEQ ID NO: 136786 - DNA, 25 bp, Saccharomyces pastorianus
tgtacaccgttgaccgttttggccg

SEQ ID NO: 136787 - DNA, 25 bp, Saccharomyces pastorianus
gaaatcagcttcctgggttccagta

SEQ ID NO: 136788 - DNA, 25 bp, Saccharomyces pastorianus
gccccaatcgcttacgttgttattt

SEQ ID NO: 136789 - DNA, 25 bp, Saccharomyces pastorianus
tgccattggtggtatcgtcttagcc

SEQ ID NO: 136790 - DNA, 25 bp, Saccharomyces pastorianus
gtatggtcgtagaatcggtttgatt

SEQ ID NO: 136791 - DNA, 25 bp, Saccharomyces pastorianus
atgaagcaccacgacggtagtcatt

SEQ ID NO: 136792 - DNA, 25 bp, Saccharomyces pastorianus
aggtgtcggtggtatcacagtttta

SEQ ID NO: 136793 - DNA, 25 bp, Saccharomyces pastorianus
tatcacagttttatctcccatgcta

SEQ ID NO: 136794 - DNA, 25 bp, Saccharomyces pastorianus
gagaggcaccttggtttcatgttac

SEQ ID NO: 136795 - DNA, 25 bp, Saccharomyces pastorianus
agtaatctacactatcggtatcatt

SEQ ID NO: 136796 - DNA, 25 bp, Saccharomyces pastorianus
tcccatgctaatatctgaggtcgcc

SEQ ID NO: 136797 - DNA, 25 bp, Saccharomyces pastorianus
acggtagtcattacttgtccaaggt

SEQ ID NO: 136798 - DNA, 25 bp, Saccharomyces pastorianus
atcgtcttagccaagctaggtgata

SEQ ID NO: 136799 - DNA, 25 bp, Saccharomyces pastorianus
ggtgcctacgtaacggtttctatct

SEQ ID NO: 136800 - DNA, 25 bp, Saccharomyces pastorianus
gacgctactagaaatgatccgagac

SEQ ID NO: 136801 - DNA, 25 bp, Saccharomyces pastorianus
aatggatcccaccatctaggagaac

SEQ ID NO: 136802 - DNA, 25 bp, Saccharomyces pastorianus
atataccgtcgatcgttttggtcgt

SEQ ID NO: 136803 - DNA, 25 bp, Saccharomyces pastorianus
acagattatgacctagacgctacta

SEQ ID NO: 136804 - DNA, 25 bp, Saccharomyces pastorianus
tgtttcgacttttttctcgctatat

SEQ ID NO: 136805 - DNA, 25 bp, Saccharomyces pastorianus
aaatgtgctaccttggaagtctacc

SEQ ID NO: 136806 - DNA, 25 bp, Saccharomyces pastorianus
ggtgttcgcatacttttatgtgttc

SEQ ID NO: 136807 - DNA, 25 bp, Saccharomyces pastorianus
gattgttttcgcatgtttctacatt

SEQ ID NO: 136808 - DNA, 25 bp, Saccharomyces pastorianus
ttatctctgagtcgtatcccttaag

SEQ ID NO: 136809 - DNA, 25 bp, Saccharomyces pastorianus
gttgcctatgtccttatctctgagt

SEQ ID NO: 136810 - DNA, 25 bp, Saccharomyces pastorianus
aatgtcgattgcaagtgcctgtaac

SEQ ID NO: 136811 - DNA, 25 bp, Saccharomyces pastorianus
attacgatgggtctaggctcaacga

SEQ ID NO: 136812 - DNA, 25 bp, Saccharomyces pastorianus
aggccaattccagtactacgacttt

SEQ ID NO: 136813 - DNA, 25 bp, Saccharomyces pastorianus
ataaagtggcgcctgtactggcctt

SEQ ID NO: 136814 - DNA, 25 bp, Saccharomyces pastorianus
aaactgaactagtccatgggcccat

SEQ ID NO: 136815 - DNA, 25 bp, Saccharomyces pastorianus
tcaacgacgttcctggatggcgcac

SEQ ID NO: 136816 - DNA, 25 bp, Saccharomyces pastorianus
aatagaacttctgttccggtcactg

SEQ ID NO: 136817 - DNA, 25 bp, Saccharomyces pastorianus
gaaaaaagtctctcccctcaagaag

SEQ ID NO: 136818 - DNA, 25 bp, Saccharomyces pastorianus
taggcggccgcacaagtaagaagtc

SEQ ID NO: 136819 - DNA, 25 bp, Saccharomyces pastorianus
tattacccagttcgactccaaaatg

SEQ ID NO: 136820 - DNA, 25 bp, Saccharomyces pastorianus
gacgattctgagacgctgaaccaac

SEQ ID NO: 136821 - DNA, 25 bp, Saccharomyces pastorianus
gtcttccgctgccatagagcaagat

SEQ ID NO: 136822 - DNA, 25 bp, Saccharomyces pastorianus
ttggccctattcatccgtgacgaga

SEQ ID NO: 136823 - DNA, 25 bp, Saccharomyces pastorianus
atcatggtttagcaaccttcaccgg

SEQ ID NO: 136824 - DNA, 25 bp, Saccharomyces pastorianus
ccaccagattctccgatatttcata

SEQ ID NO: 136825 - DNA, 25 bp, Saccharomyces pastorianus
attggcagcgctgtcagtccaagaa

SEQ ID NO: 136826 - DNA, 25 bp, Saccharomyces pastorianus
agttccattcagactgacgcctaat

SEQ ID NO: 136827 - DNA, 25 bp, Saccharomyces pastorianus
gatgatcaataaccgtactcctcac

SEQ ID NO: 136828 - DNA, 25 bp, Saccharomyces pastorianus
gaactgaacacatacttggccctat

SEQ ID NO: 136829 - DNA, 25 bp, Saccharomyces pastorianus
cgtactcctcacaaaatccatgttg

SEQ ID NO: 136830 - DNA, 25 bp, Saccharomyces pastorianus
agttcatcctagactgtattggcag

SEQ ID NO: 136831 - DNA, 25 bp, Saccharomyces pastorianus
atacagttcgtttgtcttcatgtct

SEQ ID NO: 136832 - DNA, 25 bp, Saccharomyces pastorianus
atgacttaagtcttccaccagattc

SEQ ID NO: 136833 - DNA, 25 bp, Saccharomyces pastorianus
aaattgtgggcttctgtttccaggg

SEQ ID NO: 136834 - DNA, 25 bp, Saccharomyces pastorianus
gctggcatccttttaagattcttga

SEQ ID NO: 136835 - DNA, 25 bp, Saccharomyces pastorianus
gttcttcttccacacttaaacgatc

SEQ ID NO: 136836 - DNA, 25 bp, Saccharomyces pastorianus
atgtccgtcaatcttttccccaata

SEQ ID NO: 136837 - DNA, 25 bp, Saccharomyces pastorianus
tacggttgctaatcctaaattgtgg

SEQ ID NO: 136838 - DNA, 25 bp, Saccharomyces pastorianus
gatctaatactaaactccctgaaat

SEQ ID NO: 136839 - DNA, 25 bp, Saccharomyces pastorianus
tacatgtcgcgcaatcctttttaac

SEQ ID NO: 136840 - DNA, 25 bp, Saccharomyces pastorianus
atatcaatgaggttgttcttcttcc

SEQ ID NO: 136841 - DNA, 25 bp, Saccharomyces pastorianus
atgctggaggattctgggctgctac

SEQ ID NO: 136842 - DNA, 25 bp, Saccharomyces pastorianus
ttcaaattgtcctttatgtccgtca

SEQ ID NO: 136843 - DNA, 25 bp, Saccharomyces pastorianus
gtctcagccaccaaagatgctcgtg

SEQ ID NO: 136844 - DNA, 25 bp, Saccharomyces pastorianus
taaagtttcggcaaatcctctctcc

SEQ ID NO: 136845 - DNA, 25 bp, Saccharomyces pastorianus
atggcaaacctaatgggtcatacgg

SEQ ID NO: 136846 - DNA, 25 bp, Saccharomyces pastorianus
tttcggcaaatcctctctccaagtt

SEQ ID NO: 136847 - DNA, 25 bp, Saccharomyces pastorianus
aaagtttcggcaaatcctctctcca

SEQ ID NO: 136848 - DNA, 25 bp, Saccharomyces pastorianus
ttcggcaaatcctctctccaagttc

SEQ ID NO: 136849 - DNA, 25 bp, Saccharomyces pastorianus
ggtgtaaagtttcggcaaatcctct

SEQ ID NO: 136850 - DNA, 25 bp, Saccharomyces pastorianus
agtttcggcaaatcctctctccaag

SEQ ID NO: 136851 - DNA, 25 bp, Saccharomyces pastorianus
gatggtgtaaagtttcggcaaatcc

SEQ ID NO: 136852 - DNA, 25 bp, Saccharomyces pastorianus
tggcaaacctaatgggtcatacggg

SEQ ID NO: 136853 - DNA, 25 bp, Saccharomyces pastorianus
tggtgtaaagtttcggcaaatcctc

SEQ ID NO: 136854 - DNA, 25 bp, Saccharomyces pastorianus
gtaaagtttcggcaaatcctctctc

SEQ ID NO: 136855 - DNA, 25 bp, Saccharomyces pastorianus
atccctgtctcaatgactccaatta

SEQ ID NO: 136856 - DNA, 25 bp, Saccharomyces pastorianus
ttcacaacagactattccatccgga

SEQ ID NO: 136857 - DNA, 25 bp, Saccharomyces pastorianus
tctttaggctttggcatgtgtcctc

SEQ ID NO: 136858 - DNA, 25 bp, Saccharomyces pastorianus
gacttagaatcgtttctgccaggaa

SEQ ID NO: 136859 - DNA, 25 bp, Saccharomyces pastorianus
aatcatattctgagttccgccgcaa

SEQ ID NO: 136860 - DNA, 25 bp, Saccharomyces pastorianus
aatattcttggctcatctgtttccg

SEQ ID NO: 136861 - DNA, 25 bp, Saccharomyces pastorianus
agtgttcctctttctgctaatacag

SEQ ID NO: 136862 - DNA, 25 bp, Saccharomyces pastorianus
tgcctcggaacacccattgaatatt

SEQ ID NO: 136863 - DNA, 25 bp, Saccharomyces pastorianus
gaaggtttgccctgcattgaacacg

SEQ ID NO: 136864 - DNA, 25 bp, Saccharomyces pastorianus
atcaacgactgcaccaatttcacaa

SEQ ID NO: 136865 - DNA, 25 bp, Saccharomyces pastorianus
agcggccctaataacagtgttcctc

SEQ ID NO: 136866 - DNA, 25 bp, Saccharomyces pastorianus
tccttcgtcatctagctcaatacaa

SEQ ID NO: 136867 - DNA, 25 bp, Saccharomyces pastorianus
taacaagacgtcaaagggccctcca

SEQ ID NO: 136868 - DNA, 25 bp, Saccharomyces pastorianus
ataaatcaccttcaaacgtgcccag

SEQ ID NO: 136869 - DNA, 25 bp, Saccharomyces pastorianus
tatagccagagtacacctgctttgc

SEQ ID NO: 136870 - DNA, 25 bp, Saccharomyces pastorianus
tgcgagcgcagatccggttttaata

SEQ ID NO: 136871 - DNA, 25 bp, Saccharomyces pastorianus
actaccgaatagtgctctaccaacg

SEQ ID NO: 136872 - DNA, 25 bp, Saccharomyces pastorianus
agctccactccgaacaacagtaata

SEQ ID NO: 136873 - DNA, 25 bp, Saccharomyces pastorianus
aacgtgcccagacggttgacagtca

SEQ ID NO: 136874 - DNA, 25 bp, Saccharomyces pastorianus
acaaaggccaggtcatctacagtga

SEQ ID NO: 136875 - DNA, 25 bp, Saccharomyces pastorianus
gattaactactgctccaacgtctat

SEQ ID NO: 136876 - DNA, 25 bp, Saccharomyces pastorianus
gcagttgcttctaattccggaatca

SEQ ID NO: 136877 - DNA, 25 bp, Saccharomyces pastorianus
tagagagaccggtggctctgcagac

SEQ ID NO: 136878 - DNA, 25 bp, Saccharomyces pastorianus
gtagctaacgactcaccatgcggtt

SEQ ID NO: 136879 - DNA, 25 bp, Saccharomyces pastorianus
agaactctagacttgggtaatcctg

SEQ ID NO: 136880 - DNA, 25 bp, Saccharomyces pastorianus
gtggtggtcccgtaatcaagattaa

SEQ ID NO: 136881 - DNA, 25 bp, Saccharomyces pastorianus
agattctaacttcttgcctaatata

SEQ ID NO: 136882 - DNA, 25 bp, Saccharomyces pastorianus
agaggctgctaaagtccctttgcaa

SEQ ID NO: 136883 - DNA, 25 bp, Saccharomyces pastorianus
gttgctcatgcagttcatccaaact

SEQ ID NO: 136884 - DNA, 25 bp, Saccharomyces pastorianus
gctctgcagacctggagttccaaat

SEQ ID NO: 136885 - DNA, 25 bp, Saccharomyces pastorianus
gtccctttgcaattgtttgtcgtag

SEQ ID NO: 136886 - DNA, 25 bp, Saccharomyces pastorianus
cggtttaacgttggcggctgacaca

SEQ ID NO: 136887 - DNA, 25 bp, Saccharomyces pastorianus
aagtcgtttttcctttcatctgatg

SEQ ID NO: 136888 - DNA, 25 bp, Saccharomyces pastorianus
aaatggcttcaaagagttgagcgaa

SEQ ID NO: 136889 - DNA, 25 bp, Saccharomyces pastorianus
cagttcataacatcaaaaagcatct

SEQ ID NO: 136890 - DNA, 25 bp, Saccharomyces pastorianus
aaagtactttgtgacaagaatggct

SEQ ID NO: 136891 - DNA, 25 bp, Saccharomyces pastorianus
ggagtttgtcagtttcttaaatagc

SEQ ID NO: 136892 - DNA, 25 bp, Saccharomyces pastorianus
tcttaaatagctcacactctcctta

SEQ ID NO: 136893 - DNA, 25 bp, Saccharomyces pastorianus
ggccacgtcgcacaaaaaggaaagt

SEQ ID NO: 136894 - DNA, 25 bp, Saccharomyces pastorianus
gcatctggtgtcaaatggcttcaaa

SEQ ID NO: 136895 - DNA, 25 bp, Saccharomyces pastorianus
gtttcttaaatagctcacactctcc

SEQ ID NO: 136896 - DNA, 25 bp, Saccharomyces pastorianus
actctccttaccatacagttcataa

SEQ ID NO: 136897 - DNA, 25 bp, Saccharomyces pastorianus
tgggctggccacgtcgcacaaaaag

SEQ ID NO: 136898 - DNA, 25 bp, Saccharomyces pastorianus
cgaacgtgactcgtgggctggccac

SEQ ID NO: 136899 - DNA, 25 bp, Saccharomyces pastorianus
cttcgcggaagctgcaaagatacaa

SEQ ID NO: 136900 - DNA, 25 bp, Saccharomyces pastorianus
gcaattttagcaagaactatggatg

SEQ ID NO: 136901 - DNA, 25 bp, Saccharomyces pastorianus
aacttcaagctactaccttcgcgga

SEQ ID NO: 136902 - DNA, 25 bp, Saccharomyces pastorianus
gaaaaaattgacgaggccatagaat

SEQ ID NO: 136903 - DNA, 25 bp, Saccharomyces pastorianus
taagtgcaaagatggagctaacatt

SEQ ID NO: 136904 - DNA, 25 bp, Saccharomyces pastorianus
gaagattctgcaattttagcaagaa

SEQ ID NO: 136905 - DNA, 25 bp, Saccharomyces pastorianus
cgaggccatagaattgtttgaagat

SEQ ID NO: 136906 - DNA, 25 bp, Saccharomyces pastorianus
aagctactaccttcgcggaagctgc

SEQ ID NO: 136907 - DNA, 25 bp, Saccharomyces pastorianus
gggctgatccaatcataagtgcaaa

SEQ ID NO: 136908 - DNA, 25 bp, Saccharomyces pastorianus
gcgtttgagggctgatccaatcata

SEQ ID NO: 136909 - DNA, 25 bp, Saccharomyces pastorianus
actaccttcgcggaagctgcaaaga

SEQ ID NO: 136910 - DNA, 25 bp, Saccharomyces pastorianus
accaccgtgggcagatgtattttat

SEQ ID NO: 136911 - DNA, 25 bp, Saccharomyces pastorianus
gggatttttgactctcacttagaag

SEQ ID NO: 136912 - DNA, 25 bp, Saccharomyces pastorianus
acgctctattgtcagatgctttgca

SEQ ID NO: 136913 - DNA, 25 bp, Saccharomyces pastorianus
taccactctctactttctgcaaata

SEQ ID NO: 136914 - DNA, 25 bp, Saccharomyces pastorianus
actacgatactgcatacgctctatt

SEQ ID NO: 136915 - DNA, 25 bp, Saccharomyces pastorianus
aacctgttagatgcccaagttcttt

SEQ ID NO: 136916 - DNA, 25 bp, Saccharomyces pastorianus
ggcattctgctacacgggtattttc

SEQ ID NO: 136917 - DNA, 25 bp, Saccharomyces pastorianus
aggttttgccgtctaacacatctct

SEQ ID NO: 136918 - DNA, 25 bp, Saccharomyces pastorianus
acatctctggcgtcattttttggga

SEQ ID NO: 136919 - DNA, 25 bp, Saccharomyces pastorianus
ttgatctaaaccctgagtatccgcc

SEQ ID NO: 136920 - DNA, 25 bp, Saccharomyces pastorianus
tttttggcattgaccttggccgata

SEQ ID NO: 136921 - DNA, 25 bp, Saccharomyces pastorianus
gaaacatcgttcatcttgcaaggag

SEQ ID NO: 136922 - DNA, 25 bp, Saccharomyces pastorianus
ggaacggtctttagctattctagat

SEQ ID NO: 136923 - DNA, 25 bp, Saccharomyces pastorianus
gacattcacggccaataactgcgaa

SEQ ID NO: 136924 - DNA, 25 bp, Saccharomyces pastorianus
gcaattatagtcattctggcgcaaa

SEQ ID NO: 136925 - DNA, 25 bp, Saccharomyces pastorianus
tctagatgagattggccgtgggact

SEQ ID NO: 136926 - DNA, 25 bp, Saccharomyces pastorianus
cttgcaaggagctacggaacggtct

SEQ ID NO: 136927 - DNA, 25 bp, Saccharomyces pastorianus
aaccataagttgaagccgggcatct

SEQ ID NO: 136928 - DNA, 25 bp, Saccharomyces pastorianus
ttagccgagttggttcagcagatga

SEQ ID NO: 136929 - DNA, 25 bp, Saccharomyces pastorianus
gcattagcatcgcttatgcaacttt

SEQ ID NO: 136930 - DNA, 25 bp, Saccharomyces pastorianus
agttgcggaattggccggatttcca

SEQ ID NO: 136931 - DNA, 25 bp, Saccharomyces pastorianus
aagccgggcatctgcacgaaatcag

SEQ ID NO: 136932 - DNA, 25 bp, Saccharomyces pastorianus
gaaattgtctttcgactcagcaaga

SEQ ID NO: 136933 - DNA, 25 bp, Saccharomyces pastorianus
ggagcagtgcactagcaatcgttac

SEQ ID NO: 136934 - DNA, 25 bp, Saccharomyces pastorianus
ttcccttccaccatcattacaatat

SEQ ID NO: 136935 - DNA, 25 bp, Saccharomyces pastorianus
aagcatttgacactttgcagggcaa

SEQ ID NO: 136936 - DNA, 25 bp, Saccharomyces pastorianus
tacagtgtaactatcgcagagcaat

SEQ ID NO: 136937 - DNA, 25 bp, Saccharomyces pastorianus
aggcacgtggccagcatcaatgcaa

SEQ ID NO: 136938 - DNA, 25 bp, Saccharomyces pastorianus
tccccggcacttttcattgatgaag

SEQ ID NO: 136939 - DNA, 25 bp, Saccharomyces pastorianus
aaactatcaagcactgagccctcga

SEQ ID NO: 136940 - DNA, 25 bp, Saccharomyces pastorianus
tttgcagggcaacatcacatatctc

SEQ ID NO: 136941 - DNA, 25 bp, Saccharomyces pastorianus
tgggtttcctgtacaccagttaagt

SEQ ID NO: 136942 - DNA, 25 bp, Saccharomyces pastorianus
aaagttccatttgctgggtttcctg

SEQ ID NO: 136943 - DNA, 25 bp, Saccharomyces pastorianus
agatattgttttttccctagctgtt

SEQ ID NO: 136944 - DNA, 25 bp, Saccharomyces pastorianus
ggtctctcactaggtgttcacatta

SEQ ID NO: 136945 - DNA, 25 bp, Saccharomyces pastorianus
atagaaacagcacttcttcggccaa

SEQ ID NO: 136946 - DNA, 25 bp, Saccharomyces pastorianus
ataaaatcgtctttgccctatcttg

SEQ ID NO: 136947 - DNA, 25 bp, Saccharomyces pastorianus
acccatgttaattcctttgtgccag

SEQ ID NO: 136948 - DNA, 25 bp, Saccharomyces pastorianus
atcttggcttgggttcggtctctca

SEQ ID NO: 136949 - DNA, 25 bp, Saccharomyces pastorianus
tttattacactctctttcatccttt

SEQ ID NO: 136950 - DNA, 25 bp, Saccharomyces pastorianus
taagcagagctttcccatgttcaat

SEQ ID NO: 136951 - DNA, 25 bp, Saccharomyces pastorianus
gttgcccttttttgcctattatgca

SEQ ID NO: 136952 - DNA, 25 bp, Saccharomyces pastorianus
cctagctgttttcggtttggttatg

SEQ ID NO: 136953 - DNA, 25 bp, Saccharomyces pastorianus
gtaatctggcatacctacttattta

SEQ ID NO: 136954 - DNA, 25 bp, Saccharomyces pastorianus
aaaggcttcatcgtgggacctacgg

SEQ ID NO: 136955 - DNA, 25 bp, Saccharomyces pastorianus
atcgaaggcgagcatcatctactct

SEQ ID NO: 136956 - DNA, 25 bp, Saccharomyces pastorianus
gacctacggcgttgatagaacttaa

SEQ ID NO: 136957 - DNA, 25 bp, Saccharomyces pastorianus
tatattccagtttcgggaccaacct

SEQ ID NO: 136958 - DNA, 25 bp, Saccharomyces pastorianus
gacaccgatgaatatgctggcgatg

SEQ ID NO: 136959 - DNA, 25 bp, Saccharomyces pastorianus
gttgcttctccaatataccttacgg

SEQ ID NO: 136960 - DNA, 25 bp, Saccharomyces pastorianus
gagggattctctgaagtgcatcaaa

SEQ ID NO: 136961 - DNA, 25 bp, Saccharomyces pastorianus
gaaggcgttatttgagggattctct

SEQ ID NO: 136962 - DNA, 25 bp, Saccharomyces pastorianus
atcatctactctaagttgcttctcc

SEQ ID NO: 136963 - DNA, 25 bp, Saccharomyces pastorianus
gggtaaggttatctatattccagtt

SEQ ID NO: 136964 - DNA, 25 bp, Saccharomyces pastorianus
tttagcaaccgccagagcttacaga

SEQ ID NO: 136965 - DNA, 25 bp, Saccharomyces pastorianus
gatcaaaaatatactgtggccccaa

SEQ ID NO: 136966 - DNA, 25 bp, Saccharomyces pastorianus
ggtgattttaacctttcgatcctat

SEQ ID NO: 136967 - DNA, 25 bp, Saccharomyces pastorianus
aacgatttcttttgtgctggtcaac

SEQ ID NO: 136968 - DNA, 25 bp, Saccharomyces pastorianus
gatcctattatttgccatggataat

SEQ ID NO: 136969 - DNA, 25 bp, Saccharomyces pastorianus
gaacaacttgtatgcacgatgtcgg

SEQ ID NO: 136970 - DNA, 25 bp, Saccharomyces pastorianus
gccatccttaacaaacgaacaactt

SEQ ID NO: 136971 - DNA, 25 bp, Saccharomyces pastorianus
gccatggataatttgccctctattg

SEQ ID NO: 136972 - DNA, 25 bp, Saccharomyces pastorianus
ctgtggccccaagaaacaacgattt

SEQ ID NO: 136973 - DNA, 25 bp, Saccharomyces pastorianus
gtatgcacgatgtcggatcaaaaat

SEQ ID NO: 136974 - DNA, 25 bp, Saccharomyces pastorianus
ggcagagccatccttaacaaacgaa

SEQ ID NO: 136975 - DNA, 25 bp, Saccharomyces pastorianus
aatttgccctctattggcagagcca

SEQ ID NO: 136976 - DNA, 25 bp, Saccharomyces pastorianus
gatcaaaaatatactgtggccccaa

SEQ ID NO: 136977 - DNA, 25 bp, Saccharomyces pastorianus
atactgtggccccaagaaacaacga

SEQ ID NO: 136978 - DNA, 25 bp, Saccharomyces pastorianus
ggtgattttaacctttcgatcctat

SEQ ID NO: 136979 - DNA, 25 bp, Saccharomyces pastorianus
gatcctattatttgccatggataat

SEQ ID NO: 136980 - DNA, 25 bp, Saccharomyces pastorianus
gaacaacttgtatgcacgatgtcgg

SEQ ID NO: 136981 - DNA, 25 bp, Saccharomyces pastorianus
gccatccttaacaaacgaacaactt

SEQ ID NO: 136982 - DNA, 25 bp, Saccharomyces pastorianus
tttaacctttcgatcctattatttg

SEQ ID NO: 136983 - DNA, 25 bp, Saccharomyces pastorianus
gccatggataatttgccctctattg

SEQ ID NO: 136984 - DNA, 25 bp, Saccharomyces pastorianus
gtatgcacgatgtcggatcaaaaat

SEQ ID NO: 136985 - DNA, 25 bp, Saccharomyces pastorianus
ggcagagccatccttaacaaacgaa

SEQ ID NO: 136986 - DNA, 25 bp, Saccharomyces pastorianus
aatttgccctctattggcagagcca

SEQ ID NO: 136987 - DNA, 25 bp, Saccharomyces pastorianus
gagttggcggcttttgcagccgaaa

SEQ ID NO: 136988 - DNA, 25 bp, Saccharomyces pastorianus
atgatgatgacgaggtactcccggg

SEQ ID NO: 136989 - DNA, 25 bp, Saccharomyces pastorianus
gcatccagagggtatatcatctata

SEQ ID NO: 136990 - DNA, 25 bp, Saccharomyces pastorianus
tagatagaggtaattccccgagaga

SEQ ID NO: 136991 - DNA, 25 bp, Saccharomyces pastorianus
aagtgataatattagcagctcctta

SEQ ID NO: 136992 - DNA, 25 bp, Saccharomyces pastorianus
gttgtaatccttgatgatgatgacg

SEQ ID NO: 136993 - DNA, 25 bp, Saccharomyces pastorianus
attccccgagagagttggcggcttt

SEQ ID NO: 136994 - DNA, 25 bp, Saccharomyces pastorianus
atatagagatgatcgctggtgcgga

SEQ ID NO: 136995 - DNA, 25 bp, Saccharomyces pastorianus
gcagctccttagaagttgtaatcct

SEQ ID NO: 136996 - DNA, 25 bp, Saccharomyces pastorianus
caggaataagtactaacacagggat

SEQ ID NO: 136997 - DNA, 25 bp, Saccharomyces pastorianus
gaagttagggagtttgcatccagag

SEQ ID NO: 136998 - DNA, 25 bp, Saccharomyces pastorianus
ataatgggcaccatgctgcacgaat

SEQ ID NO: 136999 - DNA, 25 bp, Saccharomyces pastorianus
tgggcaccatgctgcacgaattaac

SEQ ID NO: 137000 - DNA, 25 bp, Saccharomyces pastorianus
gggcaccatgctgcacgaattaact

SEQ ID NO: 137001 - DNA, 25 bp, Saccharomyces pastorianus
ggagtgtataatgggcaccatgctg

SEQ ID NO: 137002 - DNA, 25 bp, Saccharomyces pastorianus
tggagtgtataatgggcaccatgct

SEQ ID NO: 137003 - DNA, 25 bp, Saccharomyces pastorianus
tataatgggcaccatgctgcacgaa

SEQ ID NO: 137004 - DNA, 25 bp, Saccharomyces pastorianus
gtataatgggcaccatgctgcacga

SEQ ID NO: 137005 - DNA, 25 bp, Saccharomyces pastorianus
taatgggcaccatgctgcacgaatt

SEQ ID NO: 137006 - DNA, 25 bp, Saccharomyces pastorianus
tgtataatgggcaccatgctgcacg

SEQ ID NO: 137007 - DNA, 25 bp, Saccharomyces pastorianus
atgggcaccatgctgcacgaattaa

SEQ ID NO: 137008 - DNA, 25 bp, Saccharomyces pastorianus
aatgggcaccatgctgcacgaatta

SEQ ID NO: 137009 - DNA, 25 bp, Saccharomyces pastorianus
catatttctccgtaaagtcagccga

SEQ ID NO: 137010 - DNA, 25 bp, Saccharomyces pastorianus
tatgccaatggtgatcagcgaggac

SEQ ID NO: 137011 - DNA, 25 bp, Saccharomyces pastorianus
gtgcctgatttgaacctacttacaa

SEQ ID NO: 137012 - DNA, 25 bp, Saccharomyces pastorianus
tcagcgaggacttcaaatcatgcat

SEQ ID NO: 137013 - DNA, 25 bp, Saccharomyces pastorianus
acgaaaccaagtgctgacggaatta

SEQ ID NO: 137014 - DNA, 25 bp, Saccharomyces pastorianus
tgtcttttgatatctgcggtaacca

SEQ ID NO: 137015 - DNA, 25 bp, Saccharomyces pastorianus
agacaaatgcatcaccactcagaat

SEQ ID NO: 137016 - DNA, 25 bp, Saccharomyces pastorianus
gcggtaaccaatttgttctttgttg

SEQ ID NO: 137017 - DNA, 25 bp, Saccharomyces pastorianus
aattgaccgtgttttatttaagcag

SEQ ID NO: 137018 - DNA, 25 bp, Saccharomyces pastorianus
tcggtctttgacagtgcctgatttg

SEQ ID NO: 137019 - DNA, 25 bp, Saccharomyces pastorianus
aagtcagccgaaaccctatttcaga

SEQ ID NO: 137020 - DNA, 25 bp, Saccharomyces pastorianus
gagaatactaacgaaacgcctatgg

SEQ ID NO: 137021 - DNA, 25 bp, Saccharomyces pastorianus
aattcatactgggagcgcattaggc

SEQ ID NO: 137022 - DNA, 25 bp, Saccharomyces pastorianus
atgtgacctggcaatactatatgac

SEQ ID NO: 137023 - DNA, 25 bp, Saccharomyces pastorianus
aagggaagcctggtgctactttcaa

SEQ ID NO: 137024 - DNA, 25 bp, Saccharomyces pastorianus
tgaagagcacgtatgaccatcattt

SEQ ID NO: 137025 - DNA, 25 bp, Saccharomyces pastorianus
tccaagttcactatttctttgcaag

SEQ ID NO: 137026 - DNA, 25 bp, Saccharomyces pastorianus
aagacgctattccacgttctttttg

SEQ ID NO: 137027 - DNA, 25 bp, Saccharomyces pastorianus
cttactccttcgtgtgaggttcata

SEQ ID NO: 137028 - DNA, 25 bp, Saccharomyces pastorianus
gaatgtatcacctctcaaggagagt

SEQ ID NO: 137029 - DNA, 25 bp, Saccharomyces pastorianus
gacaaatctcaagtttttccaagtt

SEQ ID NO: 137030 - DNA, 25 bp, Saccharomyces pastorianus
attagttcttcagcagcgtgtgaca

SEQ ID NO: 137031 - DNA, 25 bp, Saccharomyces pastorianus
cactctgcctgtgttgaaagacgcc

SEQ ID NO: 137032 - DNA, 25 bp, Saccharomyces pastorianus
gcgtatcgtacctcaagtgcttgat

SEQ ID NO: 137033 - DNA, 25 bp, Saccharomyces pastorianus
gaaagacgccaaagccctgtgtttt

SEQ ID NO: 137034 - DNA, 25 bp, Saccharomyces pastorianus
gataaattaccctcgactagtcagc

SEQ ID NO: 137035 - DNA, 25 bp, Saccharomyces pastorianus
tggtgccttcaagagagctgttcta

SEQ ID NO: 137036 - DNA, 25 bp, Saccharomyces pastorianus
tatcttctcgagtgcaatggtctaa

SEQ ID NO: 137037 - DNA, 25 bp, Saccharomyces pastorianus
acacttgttccttattccctggaga

SEQ ID NO: 137038 - DNA, 25 bp, Saccharomyces pastorianus
gaattgtgccactgacggacgctga

SEQ ID NO: 137039 - DNA, 25 bp, Saccharomyces pastorianus
gtagcggacgaatcactatcttctc

SEQ ID NO: 137040 - DNA, 25 bp, Saccharomyces pastorianus
acgagtccttgattggcagcgatgc

SEQ ID NO: 137041 - DNA, 25 bp, Saccharomyces pastorianus
tagtcagccaaacgtttatcccatg

SEQ ID NO: 137042 - DNA, 25 bp, Saccharomyces pastorianus
aggcctcgaggataatagaaggcaa

SEQ ID NO: 137043 - DNA, 25 bp, Saccharomyces pastorianus
ataaagaggaaaggcctcgaggata

SEQ ID NO: 137044 - DNA, 25 bp, Saccharomyces pastorianus
aagaggaaaggcctcgaggataata

SEQ ID NO: 137045 - DNA, 25 bp, Saccharomyces pastorianus
cctcgaggataatagaaggcaatgc

SEQ ID NO: 137046 - DNA, 25 bp, Saccharomyces pastorianus
ggcctcgaggataatagaaggcaat

SEQ ID NO: 137047 - DNA, 25 bp, Saccharomyces pastorianus
gaaaggcctcgaggataatagaagg

SEQ ID NO: 137048 - DNA, 25 bp, Saccharomyces pastorianus
tataaagaggaaaggcctcgaggat

SEQ ID NO: 137049 - DNA, 25 bp, Saccharomyces pastorianus
aaggcctcgaggataatagaaggca

SEQ ID NO: 137050 - DNA, 25 bp, Saccharomyces pastorianus
agaggaaaggcctcgaggataatag

SEQ ID NO: 137051 - DNA, 25 bp, Saccharomyces pastorianus
aggaaaggcctcgaggataatagaa

SEQ ID NO: 137052 - DNA, 25 bp, Saccharomyces pastorianus
ggaaaggcctcgaggataatagaag

SEQ ID NO: 137053 - DNA, 25 bp, Saccharomyces pastorianus
gacgggctagagatcttgactgctg

SEQ ID NO: 137054 - DNA, 25 bp, Saccharomyces pastorianus
agtacaatcggctctgttcctgaaa

SEQ ID NO: 137055 - DNA, 25 bp, Saccharomyces pastorianus
aagggccaaatccaagctgatcatt

SEQ ID NO: 137056 - DNA, 25 bp, Saccharomyces pastorianus
agcggcgtaccatgcgaagatattg

SEQ ID NO: 137057 - DNA, 25 bp, Saccharomyces pastorianus
ataactgcccggatattatcgaaca

SEQ ID NO: 137058 - DNA, 25 bp, Saccharomyces pastorianus
ggtgccaaacccatcacatcaaagt

SEQ ID NO: 137059 - DNA, 25 bp, Saccharomyces pastorianus
aggaatgttattgagcggcgtacca

SEQ ID NO: 137060 - DNA, 25 bp, Saccharomyces pastorianus
gcaaggatgcactctacaaatacaa

SEQ ID NO: 137061 - DNA, 25 bp, Saccharomyces pastorianus
atttcccgacagatcaaacgctatt

SEQ ID NO: 137062 - DNA, 25 bp, Saccharomyces pastorianus
aaacgctattgatgaggcacgcaaa

SEQ ID NO: 137063 - DNA, 25 bp, Saccharomyces pastorianus
atcgttcgtgaacctgttagaagag

SEQ ID NO: 137064 - DNA, 25 bp, Saccharomyces pastorianus
gaattacgatataccttcagaccca

SEQ ID NO: 137065 - DNA, 25 bp, Saccharomyces pastorianus
tgcaagaatcctcatcgctacagat

SEQ ID NO: 137066 - DNA, 25 bp, Saccharomyces pastorianus
atcccaactgttgagcttgtagtga

SEQ ID NO: 137067 - DNA, 25 bp, Saccharomyces pastorianus
atagatctggtcgtacggcccgtgc

SEQ ID NO: 137068 - DNA, 25 bp, Saccharomyces pastorianus
gagggtagcgtcgttgcactctcaa

SEQ ID NO: 137069 - DNA, 25 bp, Saccharomyces pastorianus
atagatttcgagctaacgctgcaag

SEQ ID NO: 137070 - DNA, 25 bp, Saccharomyces pastorianus
caaggtacacgataccgctgtaata

SEQ ID NO: 137071 - DNA, 25 bp, Saccharomyces pastorianus
atgaccgcggagatccttagaagaa

SEQ ID NO: 137072 - DNA, 25 bp, Saccharomyces pastorianus
tacaggccattgaggaccgtatcaa

SEQ ID NO: 137073 - DNA, 25 bp, Saccharomyces pastorianus
attggtgacgccatatcattcgtta

SEQ ID NO: 137074 - DNA, 25 bp, Saccharomyces pastorianus
gttacccagcgagatgtttctagga

SEQ ID NO: 137075 - DNA, 25 bp, Saccharomyces pastorianus
taagagctatgaaaattactcagcc

SEQ ID NO: 137076 - DNA, 25 bp, Saccharomyces pastorianus
tcaaaatggcttacggaatccttaa

SEQ ID NO: 137077 - DNA, 25 bp, Saccharomyces pastorianus
taggtctttcaaaatggcttacgga

SEQ ID NO: 137078 - DNA, 25 bp, Saccharomyces pastorianus
aatctttaggtctttcaaaatggct

SEQ ID NO: 137079 - DNA, 25 bp, Saccharomyces pastorianus
ggcttacggaatccttaagagctat

SEQ ID NO: 137080 - DNA, 25 bp, Saccharomyces pastorianus
gcttgtattcccaaaatcttagaag

SEQ ID NO: 137081 - DNA, 25 bp, Saccharomyces pastorianus
tacggaatccttaagagctatgaaa

SEQ ID NO: 137082 - DNA, 25 bp, Saccharomyces pastorianus
atggcagactttaaatctttaggtc

SEQ ID NO: 137083 - DNA, 25 bp, Saccharomyces pastorianus
aaggcttgtattcccaaaatcttag

SEQ ID NO: 137084 - DNA, 25 bp, Saccharomyces pastorianus
ggtctttcaaaatggcttacggaat

SEQ ID NO: 137085 - DNA, 25 bp, Saccharomyces pastorianus
aatggcttacggaatccttaagagc

SEQ ID NO: 137086 - DNA, 25 bp, Saccharomyces pastorianus
attggtggtgccaagactggttctg

SEQ ID NO: 137087 - DNA, 25 bp, Saccharomyces pastorianus
taagagctatgaaaattactcagcc

SEQ ID NO: 137088 - DNA, 25 bp, Saccharomyces pastorianus
tcaaaatggcttacggaatccttaa

SEQ ID NO: 137089 - DNA, 25 bp, Saccharomyces pastorianus
taggtctttcaaaatggcttacgga

SEQ ID NO: 137090 - DNA, 25 bp, Saccharomyces pastorianus
gaaaattactcagccaaccgctatc

SEQ ID NO: 137091 - DNA, 25 bp, Saccharomyces pastorianus
aatctttaggtctttcaaaatggct

SEQ ID NO: 137092 - DNA, 25 bp, Saccharomyces pastorianus
ggcttacggaatccttaagagctat

SEQ ID NO: 137093 - DNA, 25 bp, Saccharomyces pastorianus
gcttgtattcccaaaatcttagaag

SEQ ID NO: 137094 - DNA, 25 bp, Saccharomyces pastorianus
tacggaatccttaagagctatgaaa

SEQ ID NO: 137095 - DNA, 25 bp, Saccharomyces pastorianus
atggcagactttaaatctttaggtc

SEQ ID NO: 137096 - DNA, 25 bp, Saccharomyces pastorianus
aaggcttgtattcccaaaatcttag

SEQ ID NO: 137097 - DNA, 25 bp, Saccharomyces pastorianus
aacaactgggctgttatttttgcca

SEQ ID NO: 137098 - DNA, 25 bp, Saccharomyces pastorianus
agacccggcgttgctatgatggcct

SEQ ID NO: 137099 - DNA, 25 bp, Saccharomyces pastorianus
tgcccagcatgtagccctaaagtta

SEQ ID NO: 137100 - DNA, 25 bp, Saccharomyces pastorianus
tgtgcacagtaactagacccggcgt

SEQ ID NO: 137101 - DNA, 25 bp, Saccharomyces pastorianus
tgtggtagcaccaactgacagttta

SEQ ID NO: 137102 - DNA, 25 bp, Saccharomyces pastorianus
ggagcatccactttaccttgaagaa

SEQ ID NO: 137103 - DNA, 25 bp, Saccharomyces pastorianus
gaaactccagcctatgagcattgcc

SEQ ID NO: 137104 - DNA, 25 bp, Saccharomyces pastorianus
gatggcctcttctttagcagttgaa

SEQ ID NO: 137105 - DNA, 25 bp, Saccharomyces pastorianus
aaaccgttattaatgctgctctggg

SEQ ID NO: 137106 - DNA, 25 bp, Saccharomyces pastorianus
gatgacttccttactacagaccaaa

SEQ ID NO: 137107 - DNA, 25 bp, Saccharomyces pastorianus
gatggcttccgtcgttattgagcaa

SEQ ID NO: 137108 - DNA, 25 bp, Saccharomyces pastorianus
atgggtgtgtatactggatgcagac

SEQ ID NO: 137109 - DNA, 25 bp, Saccharomyces pastorianus
gagattgaaactcgatgttctgaaa

SEQ ID NO: 137110 - DNA, 25 bp, Saccharomyces pastorianus
agttttacatgtgcggccagagccg

SEQ ID NO: 137111 - DNA, 25 bp, Saccharomyces pastorianus
tgccaaccacttactgtgaatctag

SEQ ID NO: 137112 - DNA, 25 bp, Saccharomyces pastorianus
tagattcaacatgccaaccacttac

SEQ ID NO: 137113 - DNA, 25 bp, Saccharomyces pastorianus
aagaccctcttcaacagttttacat

SEQ ID NO: 137114 - DNA, 25 bp, Saccharomyces pastorianus
agcgtactaacgaagtgcctttaca

SEQ ID NO: 137115 - DNA, 25 bp, Saccharomyces pastorianus
ttacacaacattcctaaatctgctg

SEQ ID NO: 137116 - DNA, 25 bp, Saccharomyces pastorianus
aagggctgttctcaaagtgtcaaaa

SEQ ID NO: 137117 - DNA, 25 bp, Saccharomyces pastorianus
aagggtcttaaattatgcaccagct

SEQ ID NO: 137118 - DNA, 25 bp, Saccharomyces pastorianus
aaatctgctgatcaagttccattat

SEQ ID NO: 137119 - DNA, 25 bp, Saccharomyces pastorianus
gtctgacttgattccactacagtta

SEQ ID NO: 137120 - DNA, 25 bp, Saccharomyces pastorianus
gaaagggttctttactctatagtgc

SEQ ID NO: 137121 - DNA, 25 bp, Saccharomyces pastorianus
agaggctattcgcacactgtgaaga

SEQ ID NO: 137122 - DNA, 25 bp, Saccharomyces pastorianus
cttgccgttgccatccaaaatgaac

SEQ ID NO: 137123 - DNA, 25 bp, Saccharomyces pastorianus
tacagaaatcctactcttgccgttg

SEQ ID NO: 137124 - DNA, 25 bp, Saccharomyces pastorianus
aactggaccccgtactatatgagaa

SEQ ID NO: 137125 - DNA, 25 bp, Saccharomyces pastorianus
gatagttcaagtgtcgacgctgcgg

SEQ ID NO: 137126 - DNA, 25 bp, Saccharomyces pastorianus
gatgccgccctggaattaattcaga

SEQ ID NO: 137127 - DNA, 25 bp, Saccharomyces pastorianus
ttggttaccaagaagatgccgccct

SEQ ID NO: 137128 - DNA, 25 bp, Saccharomyces pastorianus
caacgcgtccagcatttttcggaag

SEQ ID NO: 137129 - DNA, 25 bp, Saccharomyces pastorianus
gggccacgagagtgctgcatgctaa

SEQ ID NO: 137130 - DNA, 25 bp, Saccharomyces pastorianus
aaatggtctgacacaagctttggga

SEQ ID NO: 137131 - DNA, 25 bp, Saccharomyces pastorianus
aaggcgtgtacaagaggcattagtt

SEQ ID NO: 137132 - DNA, 25 bp, Saccharomyces pastorianus
gattatgaacctagtgacccagaga

SEQ ID NO: 137133 - DNA, 25 bp, Saccharomyces pastorianus
aaggacgaaccagtcttcacaagaa

SEQ ID NO: 137134 - DNA, 25 bp, Saccharomyces pastorianus
gattgccaagaaaatggatccatca

SEQ ID NO: 137135 - DNA, 25 bp, Saccharomyces pastorianus
gacccagagacaccgatagaattta

SEQ ID NO: 137136 - DNA, 25 bp, Saccharomyces pastorianus
tatcagcccctgatcaaaggcgtgt

SEQ ID NO: 137137 - DNA, 25 bp, Saccharomyces pastorianus
gattggacttgaaggaacatacatc

SEQ ID NO: 137138 - DNA, 25 bp, Saccharomyces pastorianus
gaaagcagcttgcacttacgattaa

SEQ ID NO: 137139 - DNA, 25 bp, Saccharomyces pastorianus
caaacaaatggagttgctgtacaat

SEQ ID NO: 137140 - DNA, 25 bp, Saccharomyces pastorianus
cacaagctttgggatggttttgcaa

SEQ ID NO: 137141 - DNA, 25 bp, Saccharomyces pastorianus
atgtatcaattagtggatgccagtt

SEQ ID NO: 137142 - DNA, 25 bp, Saccharomyces pastorianus
ttgcatatggcaaagtccacgaaag

SEQ ID NO: 137143 - DNA, 25 bp, Saccharomyces pastorianus
actaccctagtgaggtgtatgctga

SEQ ID NO: 137144 - DNA, 25 bp, Saccharomyces pastorianus
ggtatcacacttcatgaattttgca

SEQ ID NO: 137145 - DNA, 25 bp, Saccharomyces pastorianus
gcgtgcggtgtgtagatgtatcaat

SEQ ID NO: 137146 - DNA, 25 bp, Saccharomyces pastorianus
gcttcagaaaaaaggcgtgcggtgt

SEQ ID NO: 137147 - DNA, 25 bp, Saccharomyces pastorianus
agtccacgaaagtgggcttcagaaa

SEQ ID NO: 137148 - DNA, 25 bp, Saccharomyces pastorianus
gatgccagttttggaacgggattcc

SEQ ID NO: 137149 - DNA, 25 bp, Saccharomyces pastorianus
tacaaccaaagatactaccctagtg

SEQ ID NO: 137150 - DNA, 25 bp, Saccharomyces pastorianus
gtatgctgacttggtatcacacttc

SEQ ID NO: 137151 - DNA, 25 bp, Saccharomyces pastorianus
tgaaccacgatgaaccaaatgatca

SEQ ID NO: 137152 - DNA, 25 bp, Saccharomyces pastorianus
gacatctggagatcttttgaattct

SEQ ID NO: 137153 - DNA, 25 bp, Saccharomyces pastorianus
tcatagaatgatgattgcggccacc

SEQ ID NO: 137154 - DNA, 25 bp, Saccharomyces pastorianus
gatgcatttttatcttcgatggctt

SEQ ID NO: 137155 - DNA, 25 bp, Saccharomyces pastorianus
ggaatcccaaagtcactgtcctact

SEQ ID NO: 137156 - DNA, 25 bp, Saccharomyces pastorianus
ggccaccaattctcacgattctatt

SEQ ID NO: 137157 - DNA, 25 bp, Saccharomyces pastorianus
tactcttccacttctgatgcatttt

SEQ ID NO: 137158 - DNA, 25 bp, Saccharomyces pastorianus
atttttatcttcgatggctttccat

SEQ ID NO: 137159 - DNA, 25 bp, Saccharomyces pastorianus
tggcgtaacaagtacattagccgct

SEQ ID NO: 137160 - DNA, 25 bp, Saccharomyces pastorianus
acattagccgctacgggaatcccaa

SEQ ID NO: 137161 - DNA, 25 bp, Saccharomyces pastorianus
gcatgctccgataattgcgacaggg

SEQ ID NO: 137162 - DNA, 25 bp, Saccharomyces pastorianus
gatatggacgacatctggagatctt

SEQ ID NO: 137163 - DNA, 25 bp, Saccharomyces pastorianus
ctttaaaattgtatccgcctggaga

SEQ ID NO: 137164 - DNA, 25 bp, Saccharomyces pastorianus
gtggacattcctgcaaaaacatcat

SEQ ID NO: 137165 - DNA, 25 bp, Saccharomyces pastorianus
gagagtatatgatcgccgtctcgat

SEQ ID NO: 137166 - DNA, 25 bp, Saccharomyces pastorianus
gagactaccaagatgtcgacacctt

SEQ ID NO: 137167 - DNA, 25 bp, Saccharomyces pastorianus
gactccgcccttttattgacaggtt

SEQ ID NO: 137168 - DNA, 25 bp, Saccharomyces pastorianus
aggttatccgtgtctgggatgcgca

SEQ ID NO: 137169 - DNA, 25 bp, Saccharomyces pastorianus
gacaggttcttcagacggtgttatc

SEQ ID NO: 137170 - DNA, 25 bp, Saccharomyces pastorianus
gaagtttgcccagtttgaagatcag

SEQ ID NO: 137171 - DNA, 25 bp, Saccharomyces pastorianus
attacatccttgacggctgatcagc

SEQ ID NO: 137172 - DNA, 25 bp, Saccharomyces pastorianus
gaggcttgaccgatatgttattgac

SEQ ID NO: 137173 - DNA, 25 bp, Saccharomyces pastorianus
gtttgcagatggctccctgagagta

SEQ ID NO: 137174 - DNA, 25 bp, Saccharomyces pastorianus
caatcgagatttgcagtggccaatt

SEQ ID NO: 137175 - DNA, 25 bp, Saccharomyces pastorianus
attgccatcctgtatctgatccaga

SEQ ID NO: 137176 - DNA, 25 bp, Saccharomyces pastorianus
aatgccgtggtacaattgccatcct

SEQ ID NO: 137177 - DNA, 25 bp, Saccharomyces pastorianus
gcagctctaagtcgaatgcccaaga

SEQ ID NO: 137178 - DNA, 25 bp, Saccharomyces pastorianus
atctatatctttgcaagctcacagc

SEQ ID NO: 137179 - DNA, 25 bp, Saccharomyces pastorianus
atacccaacgtcaatatccctggaa

SEQ ID NO: 137180 - DNA, 25 bp, Saccharomyces pastorianus
ttgatctgaaaaatgctcctcccgc

SEQ ID NO: 137181 - DNA, 25 bp, Saccharomyces pastorianus
gtctctagtaaataaccctgctctc

SEQ ID NO: 137182 - DNA, 25 bp, Saccharomyces pastorianus
taacggacacaattgcatggacatc

SEQ ID NO: 137183 - DNA, 25 bp, Saccharomyces pastorianus
atgattgctacgcttttcagaaatt

SEQ ID NO: 137184 - DNA, 25 bp, Saccharomyces pastorianus
tcccgctactgccttagagagtcag

SEQ ID NO: 137185 - DNA, 25 bp, Saccharomyces pastorianus
catgggactcatattcggtatgcta

SEQ ID NO: 137186 - DNA, 25 bp, Saccharomyces pastorianus
agctcttctgcaatttgccgagtat

SEQ ID NO: 137187 - DNA, 25 bp, Saccharomyces pastorianus
gagtatccaccagatgcaaaccatg

SEQ ID NO: 137188 - DNA, 25 bp, Saccharomyces pastorianus
gagtcctcatcgtctctttatgaaa

SEQ ID NO: 137189 - DNA, 25 bp, Saccharomyces pastorianus
gaggccgataagattacgttgcaat

SEQ ID NO: 137190 - DNA, 25 bp, Saccharomyces pastorianus
aatcgatgcagctgtaatcaccgtg

SEQ ID NO: 137191 - DNA, 25 bp, Saccharomyces pastorianus
agaacctctactctattgttatccc

SEQ ID NO: 137192 - DNA, 25 bp, Saccharomyces pastorianus
aatggtcaccgtcgaagaggccgat

SEQ ID NO: 137193 - DNA, 25 bp, Saccharomyces pastorianus
taacgtcatcattctaacatctaca

SEQ ID NO: 137194 - DNA, 25 bp, Saccharomyces pastorianus
ttgttatccctgtctacaccggatt

SEQ ID NO: 137195 - DNA, 25 bp, Saccharomyces pastorianus
aatcaccgtgctatctttggagtcc

SEQ ID NO: 137196 - DNA, 25 bp, Saccharomyces pastorianus
ctctccgcaattgcaagaagacgat

SEQ ID NO: 137197 - DNA, 25 bp, Saccharomyces pastorianus
taaatactatttacaagcggccgat

SEQ ID NO: 137198 - DNA, 25 bp, Saccharomyces pastorianus
ttctactacctctccgcaattgcaa

SEQ ID NO: 137199 - DNA, 25 bp, Saccharomyces pastorianus
taacttctactacctctccgcaatt

SEQ ID NO: 137200 - DNA, 25 bp, Saccharomyces pastorianus
aaatactatttacaagcggccgata

SEQ ID NO: 137201 - DNA, 25 bp, Saccharomyces pastorianus
tacctctccgcaattgcaagaagac

SEQ ID NO: 137202 - DNA, 25 bp, Saccharomyces pastorianus
gcaagaagacgatatcatcttagat

SEQ ID NO: 137203 - DNA, 25 bp, Saccharomyces pastorianus
gaagacgatatcatcttagataaat

SEQ ID NO: 137204 - DNA, 25 bp, Saccharomyces pastorianus
tactatttacaagcggccgatagaa

SEQ ID NO: 137205 - DNA, 25 bp, Saccharomyces pastorianus
aaataacttctactacctctccgca

SEQ ID NO: 137206 - DNA, 25 bp, Saccharomyces pastorianus
actacctctccgcaattgcaagaag

SEQ ID NO: 137207 - DNA, 25 bp, Saccharomyces pastorianus
agagagtctacatcttcacataaga

SEQ ID NO: 137208 - DNA, 25 bp, Saccharomyces pastorianus
tgaacccaaacacgaagtcccaaag

SEQ ID NO: 137209 - DNA, 25 bp, Saccharomyces pastorianus
actggcctggagactttaaaagcgt

SEQ ID NO: 137210 - DNA, 25 bp, Saccharomyces pastorianus
gaagtcccaaaggtcgtcgatgata

SEQ ID NO: 137211 - DNA, 25 bp, Saccharomyces pastorianus
ggttgaaacgaacgaatcatcctca

SEQ ID NO: 137212 - DNA, 25 bp, Saccharomyces pastorianus
gccaatactggcctggagactttaa

SEQ ID NO: 137213 - DNA, 25 bp, Saccharomyces pastorianus
gaaaatgttacaatccctgaaccca

SEQ ID NO: 137214 - DNA, 25 bp, Saccharomyces pastorianus
ggagtttgaaattcccgctatcgaa

SEQ ID NO: 137215 - DNA, 25 bp, Saccharomyces pastorianus
aaacaaccgtggataatggcgaaga

SEQ ID NO: 137216 - DNA, 25 bp, Saccharomyces pastorianus
ggtcgtcgatgatactgccatattc

SEQ ID NO: 137217 - DNA, 25 bp, Saccharomyces pastorianus
gaatcatcctcaaacgccaatactg

SEQ ID NO: 137218 - DNA, 25 bp, Saccharomyces pastorianus
taatctcctgcgttgcgaggttctt

SEQ ID NO: 137219 - DNA, 25 bp, Saccharomyces pastorianus
attggattttgccttcaactccaca

SEQ ID NO: 137220 - DNA, 25 bp, Saccharomyces pastorianus
agtgccgaaggtgcattttctgata

SEQ ID NO: 137221 - DNA, 25 bp, Saccharomyces pastorianus
gaaagctttgttaatctcctgcgtt

SEQ ID NO: 137222 - DNA, 25 bp, Saccharomyces pastorianus
gccttcaactccacatattcaaatt

SEQ ID NO: 137223 - DNA, 25 bp, Saccharomyces pastorianus
gcgaggttcttcacccaggtagtga

SEQ ID NO: 137224 - DNA, 25 bp, Saccharomyces pastorianus
gtggcgttgttcttatctcatgata

SEQ ID NO: 137225 - DNA, 25 bp, Saccharomyces pastorianus
gattttgtctcatttaggccaccaa

SEQ ID NO: 137226 - DNA, 25 bp, Saccharomyces pastorianus
gatatttatacgcacccagagctat

SEQ ID NO: 137227 - DNA, 25 bp, Saccharomyces pastorianus
aacataatcagcgtcatatcccaat

SEQ ID NO: 137228 - DNA, 25 bp, Saccharomyces pastorianus
atttgagtttgctactgttttcaga

SEQ ID NO: 137229 - DNA, 25 bp, Saccharomyces pastorianus
gtagcccaataagtgattctcgaga

SEQ ID NO: 137230 - DNA, 25 bp, Saccharomyces pastorianus
tcatttgcttactgtgacgcctggc

SEQ ID NO: 137231 - DNA, 25 bp, Saccharomyces pastorianus
tgtggcatttgtgtgtagcccaata

SEQ ID NO: 137232 - DNA, 25 bp, Saccharomyces pastorianus
aatggccttgcgtctgtctatggaa

SEQ ID NO: 137233 - DNA, 25 bp, Saccharomyces pastorianus
ttctcgaagaaggatcctccggtat

SEQ ID NO: 137234 - DNA, 25 bp, Saccharomyces pastorianus
gttgccgtggacatcatcaattttg

SEQ ID NO: 137235 - DNA, 25 bp, Saccharomyces pastorianus
gcatcttcacccataattctcgaag

SEQ ID NO: 137236 - DNA, 25 bp, Saccharomyces pastorianus
ggtctggcggtgattccgatgccaa

SEQ ID NO: 137237 - DNA, 25 bp, Saccharomyces pastorianus
ttgcagatcgctcagctgactttga

SEQ ID NO: 137238 - DNA, 25 bp, Saccharomyces pastorianus
acacggagcttttggatgagttcat

SEQ ID NO: 137239 - DNA, 25 bp, Saccharomyces pastorianus
atagctgcagtgaacaaccctcaag

SEQ ID NO: 137240 - DNA, 25 bp, Saccharomyces pastorianus
gcaatcctgagaatacagtgggtct

SEQ ID NO: 137241 - DNA, 25 bp, Saccharomyces pastorianus
tggcgactttcctaggacaaggttt

SEQ ID NO: 137242 - DNA, 25 bp, Saccharomyces pastorianus
gaagcccagatcgactcggtagagt

SEQ ID NO: 137243 - DNA, 25 bp, Saccharomyces pastorianus
gtcttatctctggtgctggcgccaa

SEQ ID NO: 137244 - DNA, 25 bp, Saccharomyces pastorianus
gacaaggtttgaagcccagatcgac

SEQ ID NO: 137245 - DNA, 25 bp, Saccharomyces pastorianus
ctacagtgttagtgattgataattc

SEQ ID NO: 137246 - DNA, 25 bp, Saccharomyces pastorianus
ggtagagttcatatttcaagccaag

SEQ ID NO: 137247 - DNA, 25 bp, Saccharomyces pastorianus
aagccaagagaaacagcaatcctga

SEQ ID NO: 137248 - DNA, 25 bp, Saccharomyces pastorianus
tacagtgggtcttatctctggtgct

SEQ ID NO: 137249 - DNA, 25 bp, Saccharomyces pastorianus
tggcgccaaccccagggtgtatcta

SEQ ID NO: 137250 - DNA, 25 bp, Saccharomyces pastorianus
tcgcaatggcgactttcctaggaca

SEQ ID NO: 137251 - DNA, 25 bp, Saccharomyces pastorianus
gatttcatcaagttcgatgccggta

SEQ ID NO: 137252 - DNA, 25 bp, Saccharomyces pastorianus
tcgatgccggtaagttggtttacgt

SEQ ID NO: 137253 - DNA, 25 bp, Saccharomyces pastorianus
atcaagttcgatgccggtaagttgg

SEQ ID NO: 137254 - DNA, 25 bp, Saccharomyces pastorianus
ctgtccaccgtatcaccgatgaaga

SEQ ID NO: 137255 - DNA, 25 bp, Saccharomyces pastorianus
gtcaagggtagattcgctgtccacc

SEQ ID NO: 137256 - DNA, 25 bp, Saccharomyces pastorianus
caagggtagattcgctgtccaccgt

SEQ ID NO: 137257 - DNA, 25 bp, Saccharomyces pastorianus
agggtagattcgctgtccaccgtat

SEQ ID NO: 137258 - DNA, 25 bp, Saccharomyces pastorianus
gtagattcgctgtccaccgtatcac

SEQ ID NO: 137259 - DNA, 25 bp, Saccharomyces pastorianus
gatgtcaagggtagattcgctgtcc

SEQ ID NO: 137260 - DNA, 25 bp, Saccharomyces pastorianus
gattactgatttcatcaagttcgat

SEQ ID NO: 137261 - DNA, 25 bp, Saccharomyces pastorianus
ggcctctggtaagattactgatttc

SEQ ID NO: 137262 - DNA, 25 bp, Saccharomyces pastorianus
gcagatggacttcgacggcgaccaa

SEQ ID NO: 137263 - DNA, 25 bp, Saccharomyces pastorianus
aaacctcacctagtctcggagacgg

SEQ ID NO: 137264 - DNA, 25 bp, Saccharomyces pastorianus
agcaaagtttgctggtttcaccttt

SEQ ID NO: 137265 - DNA, 25 bp, Saccharomyces pastorianus
tttcacctttgttgatgagtccgcc

SEQ ID NO: 137266 - DNA, 25 bp, Saccharomyces pastorianus
aaattccccagagacgtactgtcac

SEQ ID NO: 137267 - DNA, 25 bp, Saccharomyces pastorianus
atatcgactgggaggccttgaagca

SEQ ID NO: 137268 - DNA, 25 bp, Saccharomyces pastorianus
gaacaagcaccagccgatgatgact

SEQ ID NO: 137269 - DNA, 25 bp, Saccharomyces pastorianus
ggatacctccaattttgacccagag

SEQ ID NO: 137270 - DNA, 25 bp, Saccharomyces pastorianus
gagctcatccatttttcgcagatat

SEQ ID NO: 137271 - DNA, 25 bp, Saccharomyces pastorianus
tactttatggaacctggctccttta

SEQ ID NO: 137272 - DNA, 25 bp, Saccharomyces pastorianus
gacccagagttcacaacagcttcaa

SEQ ID NO: 137273 - DNA, 25 bp, Saccharomyces pastorianus
ctttgatagacttcgtatgtggagt

SEQ ID NO: 137274 - DNA, 25 bp, Saccharomyces pastorianus
ctgttttatggcgcttatgtgtatt

SEQ ID NO: 137275 - DNA, 25 bp, Saccharomyces pastorianus
ttatggcgcttatgtgtattcgtat

SEQ ID NO: 137276 - DNA, 25 bp, Saccharomyces pastorianus
tactgttttatggcgcttatgtgta

SEQ ID NO: 137277 - DNA, 25 bp, Saccharomyces pastorianus
actgttttatggcgcttatgtgtat

SEQ ID NO: 137278 - DNA, 25 bp, Saccharomyces pastorianus
gtactgttttatggcgcttatgtgt

SEQ ID NO: 137279 - DNA, 25 bp, Saccharomyces pastorianus
aagatgttcttgtttctgaacgaat

SEQ ID NO: 137280 - DNA, 25 bp, Saccharomyces pastorianus
atcatacatctttgatagacttcgt

SEQ ID NO: 137281 - DNA, 25 bp, Saccharomyces pastorianus
gaatcatacatctttgatagacttc

SEQ ID NO: 137282 - DNA, 25 bp, Saccharomyces pastorianus
atacatctttgatagacttcgtatg

SEQ ID NO: 137283 - DNA, 25 bp, Saccharomyces pastorianus
atctttgatagacttcgtatgtgga

SEQ ID NO: 137284 - DNA, 25 bp, Saccharomyces pastorianus
aatactctataaacaccggcgctta

SEQ ID NO: 137285 - DNA, 25 bp, Saccharomyces pastorianus
gtttcaacgcgcgaaggcaggtaca

SEQ ID NO: 137286 - DNA, 25 bp, Saccharomyces pastorianus
tgcacatttagcaccacatccttgt

SEQ ID NO: 137287 - DNA, 25 bp, Saccharomyces pastorianus
aggcattcagggaaaaatactctat

SEQ ID NO: 137288 - DNA, 25 bp, Saccharomyces pastorianus
atcaccaagtctgcgtttcaacgcg

SEQ ID NO: 137289 - DNA, 25 bp, Saccharomyces pastorianus
caccacatccttgtccgggaaaaga

SEQ ID NO: 137290 - DNA, 25 bp, Saccharomyces pastorianus
aaaaaggtgccacttactcttcgct

SEQ ID NO: 137291 - DNA, 25 bp, Saccharomyces pastorianus
gaaattggatgcacatttagcacca

SEQ ID NO: 137292 - DNA, 25 bp, Saccharomyces pastorianus
ttcgctgcttcatgatcagctttca

SEQ ID NO: 137293 - DNA, 25 bp, Saccharomyces pastorianus
acaattcttctcgttattttctttg

SEQ ID NO: 137294 - DNA, 25 bp, Saccharomyces pastorianus
tttttgttacaattcttctcgttat

SEQ ID NO: 137295 - DNA, 25 bp, Saccharomyces pastorianus
tgaggattctgatctgggcggtaat

SEQ ID NO: 137296 - DNA, 25 bp, Saccharomyces pastorianus
aggctcaactattgacaagtctgaa

SEQ ID NO: 137297 - DNA, 25 bp, Saccharomyces pastorianus
gatgaagacagcaaccaaccgggag

SEQ ID NO: 137298 - DNA, 25 bp, Saccharomyces pastorianus
aagcatcatgtgatcgttttgacac

SEQ ID NO: 137299 - DNA, 25 bp, Saccharomyces pastorianus
gatactctgtcttttccgaaacact

SEQ ID NO: 137300 - DNA, 25 bp, Saccharomyces pastorianus
cacgctgtgactttattaaatctag

SEQ ID NO: 137301 - DNA, 25 bp, Saccharomyces pastorianus
tatcaatgtagcttatccaggtttc

SEQ ID NO: 137302 - DNA, 25 bp, Saccharomyces pastorianus
gtcttttccgaaacactgagtacat

SEQ ID NO: 137303 - DNA, 25 bp, Saccharomyces pastorianus
ccgggagctgctgaagtgttaatat

SEQ ID NO: 137304 - DNA, 25 bp, Saccharomyces pastorianus
gtcgatacgagatacttaagcatca

SEQ ID NO: 137305 - DNA, 25 bp, Saccharomyces pastorianus
aatgatgcttcgatactctgtcttt

SEQ ID NO: 137306 - DNA, 25 bp, Saccharomyces pastorianus
caatgcagaagaattcaccccaagg

SEQ ID NO: 137307 - DNA, 25 bp, Saccharomyces pastorianus
aatgcagaagaattcaccccaaggt

SEQ ID NO: 137308 - DNA, 25 bp, Saccharomyces pastorianus
gtccaatgcagaagaattcacccca

SEQ ID NO: 137309 - DNA, 25 bp, Saccharomyces pastorianus
ttcctactcattccactgtccaatg

SEQ ID NO: 137310 - DNA, 25 bp, Saccharomyces pastorianus
gcagaagaattcaccccaaggttac

SEQ ID NO: 137311 - DNA, 25 bp, Saccharomyces pastorianus
atgcagaagaattcaccccaaggtt

SEQ ID NO: 137312 - DNA, 25 bp, Saccharomyces pastorianus
tattcctactcattccactgtccaa

SEQ ID NO: 137313 - DNA, 25 bp, Saccharomyces pastorianus
tactcattccactgtccaatgcaga

SEQ ID NO: 137314 - DNA, 25 bp, Saccharomyces pastorianus
tccaatgcagaagaattcaccccaa

SEQ ID NO: 137315 - DNA, 25 bp, Saccharomyces pastorianus
gtattcctactcattccactgtcca

SEQ ID NO: 137316 - DNA, 25 bp, Saccharomyces pastorianus
tgcagaagaattcaccccaaggtta

SEQ ID NO: 137317 - DNA, 25 bp, Saccharomyces pastorianus
tactctatatgtgtaccaaggacag

SEQ ID NO: 137318 - DNA, 25 bp, Saccharomyces pastorianus
gaggtttttggaagcaattgccctt

SEQ ID NO: 137319 - DNA, 25 bp, Saccharomyces pastorianus
cgaggatgtcgaagttagaaataac

SEQ ID NO: 137320 - DNA, 25 bp, Saccharomyces pastorianus
gtctttcagggagggaattaacgct

SEQ ID NO: 137321 - DNA, 25 bp, Saccharomyces pastorianus
gacaggaactgggtgaaatcaattt

SEQ ID NO: 137322 - DNA, 25 bp, Saccharomyces pastorianus
atatgtgtaccaaggacaggaactg

SEQ ID NO: 137323 - DNA, 25 bp, Saccharomyces pastorianus
gaaataactatgatgcgatcaagga

SEQ ID NO: 137324 - DNA, 25 bp, Saccharomyces pastorianus
aagaactggcctatcgaaaaatacg

SEQ ID NO: 137325 - DNA, 25 bp, Saccharomyces pastorianus
agcaattgcccttatttccagagac

SEQ ID NO: 137326 - DNA, 25 bp, Saccharomyces pastorianus
tgtcactgagcggtactctatatgt

SEQ ID NO: 137327 - DNA, 25 bp, Saccharomyces pastorianus
gaagcaattgcccttatttccagag

SEQ ID NO: 137328 - DNA, 25 bp, Saccharomyces pastorianus
acttcagctctgattcgatcgactt

SEQ ID NO: 137329 - DNA, 25 bp, Saccharomyces pastorianus
aagaagtgaagttgatgcgtcttcc

SEQ ID NO: 137330 - DNA, 25 bp, Saccharomyces pastorianus
aacgctgaagacgaatccaaggacc

SEQ ID NO: 137331 - DNA, 25 bp, Saccharomyces pastorianus
ctcatcgtttaagttggaattcgga

SEQ ID NO: 137332 - DNA, 25 bp, Saccharomyces pastorianus
gaagacgaatccaaggaccccaact

SEQ ID NO: 137333 - DNA, 25 bp, Saccharomyces pastorianus
gattcgatcgacttcacgattccaa

SEQ ID NO: 137334 - DNA, 25 bp, Saccharomyces pastorianus
tcgacttcacgattccaaacaatag

SEQ ID NO: 137335 - DNA, 25 bp, Saccharomyces pastorianus
tggaattcggaaactacccaagaag

SEQ ID NO: 137336 - DNA, 25 bp, Saccharomyces pastorianus
gattccaaacaatagctcatcgttt

SEQ ID NO: 137337 - DNA, 25 bp, Saccharomyces pastorianus
ctgctttgaacttcagctctgattc

SEQ ID NO: 137338 - DNA, 25 bp, Saccharomyces pastorianus
gaaactgttcagcttcacaaagaaa

SEQ ID NO: 137339 - DNA, 25 bp, Saccharomyces pastorianus
agcagatcctcaaaaaccaatccaa

SEQ ID NO: 137340 - DNA, 25 bp, Saccharomyces pastorianus
tgaacggaccacgtatccatgagtt

SEQ ID NO: 137341 - DNA, 25 bp, Saccharomyces pastorianus
gctcctgtgattgacgaaaactcaa

SEQ ID NO: 137342 - DNA, 25 bp, Saccharomyces pastorianus
gaccacgtatccatgagtttcatca

SEQ ID NO: 137343 - DNA, 25 bp, Saccharomyces pastorianus
cttgtactccaaggttgctggtcta

SEQ ID NO: 137344 - DNA, 25 bp, Saccharomyces pastorianus
tgatgtgggaagcttgtactccaag

SEQ ID NO: 137345 - DNA, 25 bp, Saccharomyces pastorianus
ctccaaacaattggaggtcttactt

SEQ ID NO: 137346 - DNA, 25 bp, Saccharomyces pastorianus
gtatccatgagtttcatcaagaaat

SEQ ID NO: 137347 - DNA, 25 bp, Saccharomyces pastorianus
gaaaactcaaagtggcaacccagtg

SEQ ID NO: 137348 - DNA, 25 bp, Saccharomyces pastorianus
aaggttgctggtctaccggatgctc

SEQ ID NO: 137349 - DNA, 25 bp, Saccharomyces pastorianus
caaaaaccaatccaaaacgtgactg

SEQ ID NO: 137350 - DNA, 25 bp, Saccharomyces pastorianus
gcttgctgtattttctagctctggg

SEQ ID NO: 137351 - DNA, 25 bp, Saccharomyces pastorianus
tgaaaagacacctttgattcgtcaa

SEQ ID NO: 137352 - DNA, 25 bp, Saccharomyces pastorianus
agggttctgggaagcttgctgtatt

SEQ ID NO: 137353 - DNA, 25 bp, Saccharomyces pastorianus
tcaaatcgagaggaatcgggcattt

SEQ ID NO: 137354 - DNA, 25 bp, Saccharomyces pastorianus
gcagcagcaactgcctgcagatcga

SEQ ID NO: 137355 - DNA, 25 bp, Saccharomyces pastorianus
aagtcattatccatggtgatcattg

SEQ ID NO: 137356 - DNA, 25 bp, Saccharomyces pastorianus
caaccaggtggaagtttcaaatcga

SEQ ID NO: 137357 - DNA, 25 bp, Saccharomyces pastorianus
cttaattgcagtgtagtggttccta

SEQ ID NO: 137358 - DNA, 25 bp, Saccharomyces pastorianus
aagtgcaggagccaaagtcattatc

SEQ ID NO: 137359 - DNA, 25 bp, Saccharomyces pastorianus
gcctgcagatcgatggcacttaatt

SEQ ID NO: 137360 - DNA, 25 bp, Saccharomyces pastorianus
cgtggttttacgttaagcatgagat

SEQ ID NO: 137361 - DNA, 25 bp, Saccharomyces pastorianus
tgacacaaacccctggatcaagtat

SEQ ID NO: 137362 - DNA, 25 bp, Saccharomyces pastorianus
agttggttcctatttatctctgata

SEQ ID NO: 137363 - DNA, 25 bp, Saccharomyces pastorianus
taaatttaccattagcggcactgtt

SEQ ID NO: 137364 - DNA, 25 bp, Saccharomyces pastorianus
acattttagcaattccaggccaagc

SEQ ID NO: 137365 - DNA, 25 bp, Saccharomyces pastorianus
atcactctgtgtgggaattgccaac

SEQ ID NO: 137366 - DNA, 25 bp, Saccharomyces pastorianus
ttctaggattcacttgcttcaacat

SEQ ID NO: 137367 - DNA, 25 bp, Saccharomyces pastorianus
aacgtttgggtgctccctttcatag

SEQ ID NO: 137368 - DNA, 25 bp, Saccharomyces pastorianus
attcttgctggttgggtctccgaga

SEQ ID NO: 137369 - DNA, 25 bp, Saccharomyces pastorianus
tttcatagtttctctggtcgcttta

SEQ ID NO: 137370 - DNA, 25 bp, Saccharomyces pastorianus
cggcactgttatcgcgtaaattgaa

SEQ ID NO: 137371 - DNA, 25 bp, Saccharomyces pastorianus
ggaccgcaaatggaactctatgaca

SEQ ID NO: 137372 - DNA, 25 bp, Saccharomyces pastorianus
agcagagcgttggagaaaagtctat

SEQ ID NO: 137373 - DNA, 25 bp, Saccharomyces pastorianus
gcttaacatcagattcggagagtat

SEQ ID NO: 137374 - DNA, 25 bp, Saccharomyces pastorianus
attcgatcctgagtttacatggaca

SEQ ID NO: 137375 - DNA, 25 bp, Saccharomyces pastorianus
aatccagtggttatgaaggcttgtc

SEQ ID NO: 137376 - DNA, 25 bp, Saccharomyces pastorianus
ggagagtatttcacataacccattt

SEQ ID NO: 137377 - DNA, 25 bp, Saccharomyces pastorianus
aaaggcccaattatctgtgtccgca

SEQ ID NO: 137378 - DNA, 25 bp, Saccharomyces pastorianus
tgaaggcttgtctaaattcgatcct

SEQ ID NO: 137379 - DNA, 25 bp, Saccharomyces pastorianus
cgattttcataaagcagagcgttgg

SEQ ID NO: 137380 - DNA, 25 bp, Saccharomyces pastorianus
cacataacccatttgacgattttca

SEQ ID NO: 137381 - DNA, 25 bp, Saccharomyces pastorianus
ctgtgtccgcagaaagcttaacatc

SEQ ID NO: 137382 - DNA, 25 bp, Saccharomyces pastorianus
gaaaagtctatgaatccagtggtta

SEQ ID NO: 137383 - DNA, 25 bp, Saccharomyces pastorianus
atggtttactatagagcccttaggc

SEQ ID NO: 137384 - DNA, 25 bp, Saccharomyces pastorianus
aacaaagtcgtttaagcattcctcg

SEQ ID NO: 137385 - DNA, 25 bp, Saccharomyces pastorianus
gcattcctcgaaaagaaacgtctct

SEQ ID NO: 137386 - DNA, 25 bp, Saccharomyces pastorianus
gtcagtttttccagaaacctccatg

SEQ ID NO: 137387 - DNA, 25 bp, Saccharomyces pastorianus
aataggcaaacatcgggcgtacctt

SEQ ID NO: 137388 - DNA, 25 bp, Saccharomyces pastorianus
ctccatggaaaaaccctggacgtgg

SEQ ID NO: 137389 - DNA, 25 bp, Saccharomyces pastorianus
ggcgtaccttaaaagtcttagacat

SEQ ID NO: 137390 - DNA, 25 bp, Saccharomyces pastorianus
tataatcacattcctcgtcagtttt

SEQ ID NO: 137391 - DNA, 25 bp, Saccharomyces pastorianus
ttaacgctacgcgtatttcttcgcc

SEQ ID NO: 137392 - DNA, 25 bp, Saccharomyces pastorianus
aacgtctctatgatggtaataggca

SEQ ID NO: 137393 - DNA, 25 bp, Saccharomyces pastorianus
gagcccttaggcaacatttttgtca

SEQ ID NO: 137394 - DNA, 25 bp, Saccharomyces pastorianus
acttgggagagtccgtatacgacta

SEQ ID NO: 137395 - DNA, 25 bp, Saccharomyces pastorianus
gagtccgtatacgactattcagttg

SEQ ID NO: 137396 - DNA, 25 bp, Saccharomyces pastorianus
gtccgtatacgactattcagttgcc

SEQ ID NO: 137397 - DNA, 25 bp, Saccharomyces pastorianus
gagagtccgtatacgactattcagt

SEQ ID NO: 137398 - DNA, 25 bp, Saccharomyces pastorianus
gaacttgggagagtccgtatacgac

SEQ ID NO: 137399 - DNA, 25 bp, Saccharomyces pastorianus
aagcggtacttgaacttgggagagt

SEQ ID NO: 137400 - DNA, 25 bp, Saccharomyces pastorianus
gggagagtccgtatacgactattca

SEQ ID NO: 137401 - DNA, 25 bp, Saccharomyces pastorianus
gtacttgaacttgggagagtccgta

SEQ ID NO: 137402 - DNA, 25 bp, Saccharomyces pastorianus
cttgaacttgggagagtccgtatac

SEQ ID NO: 137403 - DNA, 25 bp, Saccharomyces pastorianus
gtatacgactattcagttgccactt

SEQ ID NO: 137404 - DNA, 25 bp, Saccharomyces pastorianus
atacgactattcagttgccacttgt

SEQ ID NO: 137405 - DNA, 25 bp, Saccharomyces pastorianus
tctacacggacctgagcagcgagtc

SEQ ID NO: 137406 - DNA, 25 bp, Saccharomyces pastorianus
agggagacaccgtctacattgtcca

SEQ ID NO: 137407 - DNA, 25 bp, Saccharomyces pastorianus
agatgttcgccaacgttgccagaat

SEQ ID NO: 137408 - DNA, 25 bp, Saccharomyces pastorianus
tgacctatctcatgggcgcagctgt

SEQ ID NO: 137409 - DNA, 25 bp, Saccharomyces pastorianus
tgtgcccatcctcgcggttagaaag

SEQ ID NO: 137410 - DNA, 25 bp, Saccharomyces pastorianus
ggaaccaaaggtccttcatcctcta

SEQ ID NO: 137411 - DNA, 25 bp, Saccharomyces pastorianus
acattgtccactgggagccctcgaa

SEQ ID NO: 137412 - DNA, 25 bp, Saccharomyces pastorianus
gaatcagaaagcacgtcatgcacct

SEQ ID NO: 137413 - DNA, 25 bp, Saccharomyces pastorianus
tgcacctgtttgactgcgtcgcggg

SEQ ID NO: 137414 - DNA, 25 bp, Saccharomyces pastorianus
ggcgcagctgtcaaccagggagaca

SEQ ID NO: 137415 - DNA, 25 bp, Saccharomyces pastorianus
atgcaactactcaccaagggtgccg

SEQ ID NO: 137416 - DNA, 25 bp, Saccharomyces pastorianus
gaagagtccgatgaagagcaagtga

SEQ ID NO: 137417 - DNA, 25 bp, Saccharomyces pastorianus
agaggcgaacgagactcaaacgtga

SEQ ID NO: 137418 - DNA, 25 bp, Saccharomyces pastorianus
aagcagggccagtagccgcagcaga

SEQ ID NO: 137419 - DNA, 25 bp, Saccharomyces pastorianus
gacggaacacaatcgaatctacaca

SEQ ID NO: 137420 - DNA, 25 bp, Saccharomyces pastorianus
gaatctacacagcatcaaaacggaa

SEQ ID NO: 137421 - DNA, 25 bp, Saccharomyces pastorianus
aaacgtgagcagtctgtcgcggtcg

SEQ ID NO: 137422 - DNA, 25 bp, Saccharomyces pastorianus
tttagagattgacgaggagttccac

SEQ ID NO: 137423 - DNA, 25 bp, Saccharomyces pastorianus
tattgctgactaaacctgacggaac

SEQ ID NO: 137424 - DNA, 25 bp, Saccharomyces pastorianus
gagttcgactcggagcagatggaaa

SEQ ID NO: 137425 - DNA, 25 bp, Saccharomyces pastorianus
gagttcctcaagtggaccgtgttga

SEQ ID NO: 137426 - DNA, 25 bp, Saccharomyces pastorianus
gagcatattgctgactaaacctgac

SEQ ID NO: 137427 - DNA, 25 bp, Saccharomyces pastorianus
gggagcgcccgttcaagaagaaaca

SEQ ID NO: 137428 - DNA, 25 bp, Saccharomyces pastorianus
atcaccacctcaacatatgaacttc

SEQ ID NO: 137429 - DNA, 25 bp, Saccharomyces pastorianus
aaaaatagccctgcgttcacaaact

SEQ ID NO: 137430 - DNA, 25 bp, Saccharomyces pastorianus
aaaggtcaccttcagggagcgcccg

SEQ ID NO: 137431 - DNA, 25 bp, Saccharomyces pastorianus
ttttgaattctccttctcatttgcc

SEQ ID NO: 137432 - DNA, 25 bp, Saccharomyces pastorianus
gaaacagcaataggcccggcagtgc

SEQ ID NO: 137433 - DNA, 25 bp, Saccharomyces pastorianus
gggaaccagcgctagaagcactacg

SEQ ID NO: 137434 - DNA, 25 bp, Saccharomyces pastorianus
atatgaacttcaccaaccctttcat

SEQ ID NO: 137435 - DNA, 25 bp, Saccharomyces pastorianus
aatgcaaggtcactactcgttctcg

SEQ ID NO: 137436 - DNA, 25 bp, Saccharomyces pastorianus
ggcagtgctgccaacattatgatcg

SEQ ID NO: 137437 - DNA, 25 bp, Saccharomyces pastorianus
atcgccatcgaaccaacagtactta

SEQ ID NO: 137438 - DNA, 25 bp, Saccharomyces pastorianus
gaacgacaataattatatgccacct

SEQ ID NO: 137439 - DNA, 25 bp, Saccharomyces pastorianus
gcggcacagagggagaacgacaata

SEQ ID NO: 137440 - DNA, 25 bp, Saccharomyces pastorianus
cgactcccacgtggcggcacagagg

SEQ ID NO: 137441 - DNA, 25 bp, Saccharomyces pastorianus
ggataccagcaaccacaaccaagac

SEQ ID NO: 137442 - DNA, 25 bp, Saccharomyces pastorianus
ggcacagagggagaacgacaataat

SEQ ID NO: 137443 - DNA, 25 bp, Saccharomyces pastorianus
gagttctatgatttttgaaagaaat

SEQ ID NO: 137444 - DNA, 25 bp, Saccharomyces pastorianus
tgaaagaaatgtagaggacccatca

SEQ ID NO: 137445 - DNA, 25 bp, Saccharomyces pastorianus
acgacaataattatatgccaccttc

SEQ ID NO: 137446 - DNA, 25 bp, Saccharomyces pastorianus
cacagagggagaacgacaataatta

SEQ ID NO: 137447 - DNA, 25 bp, Saccharomyces pastorianus
atggataccagcaaccacaaccaag

SEQ ID NO: 137448 - DNA, 25 bp, Saccharomyces pastorianus
agcaaccacaaccaagaccacgact

SEQ ID NO: 137449 - DNA, 25 bp, Saccharomyces pastorianus
gaacgacaataattatatgccacct

SEQ ID NO: 137450 - DNA, 25 bp, Saccharomyces pastorianus
ccctccatgagcgagagttctatga

SEQ ID NO: 137451 - DNA, 25 bp, Saccharomyces pastorianus
cgactcccacgtggcggcacagagg

SEQ ID NO: 137452 - DNA, 25 bp, Saccharomyces pastorianus
ggataccagcaaccacaaccaagac

SEQ ID NO: 137453 - DNA, 25 bp, Saccharomyces pastorianus
ggcacagagggagaacgacaataat

SEQ ID NO: 137454 - DNA, 25 bp, Saccharomyces pastorianus
acgacaataattatatgccaccttc

SEQ ID NO: 137455 - DNA, 25 bp, Saccharomyces pastorianus
tgaaagaaatgtagaggacccatca

SEQ ID NO: 137456 - DNA, 25 bp, Saccharomyces pastorianus
gagcgagagttctatgatttttgaa

SEQ ID NO: 137457 - DNA, 25 bp, Saccharomyces pastorianus
acaataattatatgccaccttcccc

SEQ ID NO: 137458 - DNA, 25 bp, Saccharomyces pastorianus
atggataccagcaaccacaaccaag

SEQ ID NO: 137459 - DNA, 25 bp, Saccharomyces pastorianus
agcaaccacaaccaagaccacgact

SEQ ID NO: 137460 - DNA, 25 bp, Saccharomyces pastorianus
aggctaccgctttcaacaagacccg

SEQ ID NO: 137461 - DNA, 25 bp, Saccharomyces pastorianus
gaaagttgcctctgctaatgctact

SEQ ID NO: 137462 - DNA, 25 bp, Saccharomyces pastorianus
gatttcttgagaaaggctaccgctt

SEQ ID NO: 137463 - DNA, 25 bp, Saccharomyces pastorianus
agttgcctctgctaatgctactgct

SEQ ID NO: 137464 - DNA, 25 bp, Saccharomyces pastorianus
tctacaaagctcttcgtggtatggt

SEQ ID NO: 137465 - DNA, 25 bp, Saccharomyces pastorianus
taaagtaccatgatttcttgagaaa

SEQ ID NO: 137466 - DNA, 25 bp, Saccharomyces pastorianus
aagctcttcgtggtatggtttctca

SEQ ID NO: 137467 - DNA, 25 bp, Saccharomyces pastorianus
tcttcgtggtatggtttctcacaag

SEQ ID NO: 137468 - DNA, 25 bp, Saccharomyces pastorianus
gatgttgttgccaaattggaagcaa

SEQ ID NO: 137469 - DNA, 25 bp, Saccharomyces pastorianus
caccaagaaagttgcctctgctaat

SEQ ID NO: 137470 - DNA, 25 bp, Saccharomyces pastorianus
cctctgctaatgctactgctgctga

SEQ ID NO: 137471 - DNA, 25 bp, Saccharomyces pastorianus
ttggtacatatcctacggcgagtgg

SEQ ID NO: 137472 - DNA, 25 bp, Saccharomyces pastorianus
gttaggaatctcatttgggctcttt

SEQ ID NO: 137473 - DNA, 25 bp, Saccharomyces pastorianus
agcttccctggaaaactctcaataa

SEQ ID NO: 137474 - DNA, 25 bp, Saccharomyces pastorianus
ggcagttgaaatcagacgagtatct

SEQ ID NO: 137475 - DNA, 25 bp, Saccharomyces pastorianus
cacggaaaaggcgatgttgcattta

SEQ ID NO: 137476 - DNA, 25 bp, Saccharomyces pastorianus
aaagcagcttggtacatatcctacg

SEQ ID NO: 137477 - DNA, 25 bp, Saccharomyces pastorianus
gggacctagaagacctgtacacgga

SEQ ID NO: 137478 - DNA, 25 bp, Saccharomyces pastorianus
gggctctttggtttagtgagactat

SEQ ID NO: 137479 - DNA, 25 bp, Saccharomyces pastorianus
gtgagactattagccaatcctgaaa

SEQ ID NO: 137480 - DNA, 25 bp, Saccharomyces pastorianus
aatcctgaaactccaaagactatga

SEQ ID NO: 137481 - DNA, 25 bp, Saccharomyces pastorianus
gacagaacgtcaaaagcttccctgg

SEQ ID NO: 137482 - DNA, 25 bp, Saccharomyces pastorianus
gtaagtgcccctaagtatgtggaat

SEQ ID NO: 137483 - DNA, 25 bp, Saccharomyces pastorianus
atggctagcggttcattgcgtggat

SEQ ID NO: 137484 - DNA, 25 bp, Saccharomyces pastorianus
atgacgaatctctttttccttccaa

SEQ ID NO: 137485 - DNA, 25 bp, Saccharomyces pastorianus
agaagccgtttctacaaccgcaagc

SEQ ID NO: 137486 - DNA, 25 bp, Saccharomyces pastorianus
gagttcgaactactaagaccggctg

SEQ ID NO: 137487 - DNA, 25 bp, Saccharomyces pastorianus
gcgcatatttactgtcatcatttta

SEQ ID NO: 137488 - DNA, 25 bp, Saccharomyces pastorianus
gagggattcatccaacgagtaattc

SEQ ID NO: 137489 - DNA, 25 bp, Saccharomyces pastorianus
gagggagtccttaaccaagctgtga

SEQ ID NO: 137490 - DNA, 25 bp, Saccharomyces pastorianus
aagaccggctgattttggtccgctg

SEQ ID NO: 137491 - DNA, 25 bp, Saccharomyces pastorianus
atcacagaattttgctccccacaaa

SEQ ID NO: 137492 - DNA, 25 bp, Saccharomyces pastorianus
aagctgtgaagttaccgcgtggtga

SEQ ID NO: 137493 - DNA, 25 bp, Saccharomyces pastorianus
gtctgtagcttgtgcgtgtacgtgt

SEQ ID NO: 137494 - DNA, 25 bp, Saccharomyces pastorianus
gtacgtgtgtacacacttcaacata

SEQ ID NO: 137495 - DNA, 25 bp, Saccharomyces pastorianus
gtgcgtgtacgtgtgtacacacttc

SEQ ID NO: 137496 - DNA, 25 bp, Saccharomyces pastorianus
atgccgggccgcgtggcgtctgtag

SEQ ID NO: 137497 - DNA, 25 bp, Saccharomyces pastorianus
cgtgtgtacacacttcaacatatat

SEQ ID NO: 137498 - DNA, 25 bp, Saccharomyces pastorianus
acatatatgaatgccgggccgcgtg

SEQ ID NO: 137499 - DNA, 25 bp, Saccharomyces pastorianus
tagcttgtgcgtgtacgtgtgtaca

SEQ ID NO: 137500 - DNA, 25 bp, Saccharomyces pastorianus
gcgtgtacgtgtgtacacacttcaa

SEQ ID NO: 137501 - DNA, 25 bp, Saccharomyces pastorianus
gcgtctgtagcttgtgcgtgtacgt

SEQ ID NO: 137502 - DNA, 25 bp, Saccharomyces pastorianus
tgtacatatatgaatgccgggccgc

SEQ ID NO: 137503 - DNA, 25 bp, Saccharomyces pastorianus
tacatatatgaatgccgggccgcgt

SEQ ID NO: 137504 - DNA, 25 bp, Saccharomyces pastorianus
tctctcttcttctccactatactgt

SEQ ID NO: 137505 - DNA, 25 bp, Saccharomyces pastorianus
ttttcagcccattcggcgcgcgaaa

SEQ ID NO: 137506 - DNA, 25 bp, Saccharomyces pastorianus
ttcggcgcgcgaaatcacaagctgt

SEQ ID NO: 137507 - DNA, 25 bp, Saccharomyces pastorianus
accacatccattgctattgcccctc

SEQ ID NO: 137508 - DNA, 25 bp, Saccharomyces pastorianus
actatactgtgcttttcagcccatt

SEQ ID NO: 137509 - DNA, 25 bp, Saccharomyces pastorianus
tctccactatactgtgcttttcagc

SEQ ID NO: 137510 - DNA, 25 bp, Saccharomyces pastorianus
gcgcgcgaaatcacaagctgtatat

SEQ ID NO: 137511 - DNA, 25 bp, Saccharomyces pastorianus
atactgtgcttttcagcccattcgg

SEQ ID NO: 137512 - DNA, 25 bp, Saccharomyces pastorianus
gcgaaatcacaagctgtatatatac

SEQ ID NO: 137513 - DNA, 25 bp, Saccharomyces pastorianus
cggcgcgcgaaatcacaagctgtat

SEQ ID NO: 137514 - DNA, 25 bp, Saccharomyces pastorianus
ttcttctccactatactgtgctttt

SEQ ID NO: 137515 - DNA, 25 bp, Saccharomyces pastorianus
ggcgcttcgaagcatagaacattat

SEQ ID NO: 137516 - DNA, 25 bp, Saccharomyces pastorianus
gctgttgttcaatggatgcggttcg

SEQ ID NO: 137517 - DNA, 25 bp, Saccharomyces pastorianus
caatggatgcggttcgaggcccagc

SEQ ID NO: 137518 - DNA, 25 bp, Saccharomyces pastorianus
acagcttgtgatttcgcgcgccgaa

SEQ ID NO: 137519 - DNA, 25 bp, Saccharomyces pastorianus
aaggccaagctgttgttcaatggat

SEQ ID NO: 137520 - DNA, 25 bp, Saccharomyces pastorianus
cagggaaggccaagctgttgttcaa

SEQ ID NO: 137521 - DNA, 25 bp, Saccharomyces pastorianus
gcaatagcaatggatgtggtagaat

SEQ ID NO: 137522 - DNA, 25 bp, Saccharomyces pastorianus
atatacagcttgtgatttcgcgcgc

SEQ ID NO: 137523 - DNA, 25 bp, Saccharomyces pastorianus
atttcgcgcgccgaatgggctgaaa

SEQ ID NO: 137524 - DNA, 25 bp, Saccharomyces pastorianus
gggctgaaaagcacagtatagtgga

SEQ ID NO: 137525 - DNA, 25 bp, Saccharomyces pastorianus
cgccgaatgggctgaaaagcacagt

SEQ ID NO: 137526 - DNA, 25 bp, Saccharomyces pastorianus
gaagtgtgtacacacgtacacgcac

SEQ ID NO: 137527 - DNA, 25 bp, Saccharomyces pastorianus
acgcggcccggcattcatatatgta

SEQ ID NO: 137528 - DNA, 25 bp, Saccharomyces pastorianus
acacgtacacgcacaagctacagac

SEQ ID NO: 137529 - DNA, 25 bp, Saccharomyces pastorianus
acgtacacgcacaagctacagacgc

SEQ ID NO: 137530 - DNA, 25 bp, Saccharomyces pastorianus
tatatatgttgaagtgtgtacacac

SEQ ID NO: 137531 - DNA, 25 bp, Saccharomyces pastorianus
cccggcattcatatatgtacataca

SEQ ID NO: 137532 - DNA, 25 bp, Saccharomyces pastorianus
tgtacacacgtacacgcacaagcta

SEQ ID NO: 137533 - DNA, 25 bp, Saccharomyces pastorianus
tacacacgtacacgcacaagctaca

SEQ ID NO: 137534 - DNA, 25 bp, Saccharomyces pastorianus
ggcccggcattcatatatgtacata

SEQ ID NO: 137535 - DNA, 25 bp, Saccharomyces pastorianus
gcacaagctacagacgccacgcggc

SEQ ID NO: 137536 - DNA, 25 bp, Saccharomyces pastorianus
gcggcccggcattcatatatgtaca

SEQ ID NO: 137537 - DNA, 25 bp, Saccharomyces pastorianus
gcaccaactcctactgctagaagat

SEQ ID NO: 137538 - DNA, 25 bp, Saccharomyces pastorianus
tcgctgtaatgcaaacgctcaccac

SEQ ID NO: 137539 - DNA, 25 bp, Saccharomyces pastorianus
ggattattattctttccctcttaga

SEQ ID NO: 137540 - DNA, 25 bp, Saccharomyces pastorianus
gagttgccgatatcgtctatatagt

SEQ ID NO: 137541 - DNA, 25 bp, Saccharomyces pastorianus
cactgtttatttttgctacgcacca

SEQ ID NO: 137542 - DNA, 25 bp, Saccharomyces pastorianus
gaaattttcgtgctctcgctgtaat

SEQ ID NO: 137543 - DNA, 25 bp, Saccharomyces pastorianus
attccgccattgcatcctttaaaga

SEQ ID NO: 137544 - DNA, 25 bp, Saccharomyces pastorianus
gttgacacatttctaattccgccat

SEQ ID NO: 137545 - DNA, 25 bp, Saccharomyces pastorianus
ttaaacattcactcctatgtctagg

SEQ ID NO: 137546 - DNA, 25 bp, Saccharomyces pastorianus
gtagctttgggaagcactacttcaa

SEQ ID NO: 137547 - DNA, 25 bp, Saccharomyces pastorianus
tgaagtaccccgatccagatttttt

SEQ ID NO: 137548 - DNA, 25 bp, Saccharomyces pastorianus
tgaagacatcgaagaccactccacc

SEQ ID NO: 137549 - DNA, 25 bp, Saccharomyces pastorianus
actccaccccttgcatggatatttt

SEQ ID NO: 137550 - DNA, 25 bp, Saccharomyces pastorianus
tggttgttacaagccctccataaag

SEQ ID NO: 137551 - DNA, 25 bp, Saccharomyces pastorianus
atgtcgatgcgtgtgccccaagaaa

SEQ ID NO: 137552 - DNA, 25 bp, Saccharomyces pastorianus
aagggcccgctctaaggtgccaatg

SEQ ID NO: 137553 - DNA, 25 bp, Saccharomyces pastorianus
gggtgacgcgccaattcattcaatt

SEQ ID NO: 137554 - DNA, 25 bp, Saccharomyces pastorianus
gaccttggatctagaagacgttcat

SEQ ID NO: 137555 - DNA, 25 bp, Saccharomyces pastorianus
gtgccaatgctagaggattcccttg

SEQ ID NO: 137556 - DNA, 25 bp, Saccharomyces pastorianus
gtaactttgaaattgcccgcgttga

SEQ ID NO: 137557 - DNA, 25 bp, Saccharomyces pastorianus
aatatctcgttgaaagggcccgctc

SEQ ID NO: 137558 - DNA, 25 bp, Saccharomyces pastorianus
ttatagacactcatcgctgcagcat

SEQ ID NO: 137559 - DNA, 25 bp, Saccharomyces pastorianus
cggcaacatccaacttttactacta

SEQ ID NO: 137560 - DNA, 25 bp, Saccharomyces pastorianus
gcgtccaccatctttgataactaca

SEQ ID NO: 137561 - DNA, 25 bp, Saccharomyces pastorianus
aattatatctgttagccacggctca

SEQ ID NO: 137562 - DNA, 25 bp, Saccharomyces pastorianus
gaggatactgtttccggtgacaacg

SEQ ID NO: 137563 - DNA, 25 bp, Saccharomyces pastorianus
gaattattgctgcttgccatcgaag

SEQ ID NO: 137564 - DNA, 25 bp, Saccharomyces pastorianus
tttaaacctggctgaatcgtacatt

SEQ ID NO: 137565 - DNA, 25 bp, Saccharomyces pastorianus
aagagctatctcaaacctttcctac

SEQ ID NO: 137566 - DNA, 25 bp, Saccharomyces pastorianus
accaaattacgcttgctcttatgca

SEQ ID NO: 137567 - DNA, 25 bp, Saccharomyces pastorianus
acggctcaagctatcttgggtgact

SEQ ID NO: 137568 - DNA, 25 bp, Saccharomyces pastorianus
gtcgagctattactatctgattact

SEQ ID NO: 137569 - DNA, 25 bp, Saccharomyces pastorianus
tgtacaaacctactttcttggcaaa

SEQ ID NO: 137570 - DNA, 25 bp, Saccharomyces pastorianus
gagaaggatgcatctccagttccat

SEQ ID NO: 137571 - DNA, 25 bp, Saccharomyces pastorianus
atatggctgctgatcgtgccatcta

SEQ ID NO: 137572 - DNA, 25 bp, Saccharomyces pastorianus
tacacatattgcttccgtctcagaa

SEQ ID NO: 137573 - DNA, 25 bp, Saccharomyces pastorianus
aaaggcggcatctgcgcttaccgaa

SEQ ID NO: 137574 - DNA, 25 bp, Saccharomyces pastorianus
aaaggtgattgcttgtactgctcct

SEQ ID NO: 137575 - DNA, 25 bp, Saccharomyces pastorianus
ggaagatagtgttgccccagcagtt

SEQ ID NO: 137576 - DNA, 25 bp, Saccharomyces pastorianus
acatcgatcagtctcattccttgaa

SEQ ID NO: 137577 - DNA, 25 bp, Saccharomyces pastorianus
ctccgctgctattcaatttaccatt

SEQ ID NO: 137578 - DNA, 25 bp, Saccharomyces pastorianus
gaatcttttcttgcaagcaccatca

SEQ ID NO: 137579 - DNA, 25 bp, Saccharomyces pastorianus
atcggtgtcgagtgccatgtcaaat

SEQ ID NO: 137580 - DNA, 25 bp, Saccharomyces pastorianus
gatcgtccagtttatgttccaaagg

SEQ ID NO: 137581 - DNA, 25 bp, Saccharomyces pastorianus
tatcgttgctatctgtcgttcgcca

SEQ ID NO: 137582 - DNA, 25 bp, Saccharomyces pastorianus
tgtcgttcgccaccctcggtatatc

SEQ ID NO: 137583 - DNA, 25 bp, Saccharomyces pastorianus
ggtatatccaacgtgcaggccaata

SEQ ID NO: 137584 - DNA, 25 bp, Saccharomyces pastorianus
attgtgtggtatcgttgctatctgt

SEQ ID NO: 137585 - DNA, 25 bp, Saccharomyces pastorianus
ccctagcgtggaattgtgtggtatc

SEQ ID NO: 137586 - DNA, 25 bp, Saccharomyces pastorianus
ggccaatatcactctctaagaaaat

SEQ ID NO: 137587 - DNA, 25 bp, Saccharomyces pastorianus
tgcaggccaatatcactctctaaga

SEQ ID NO: 137588 - DNA, 25 bp, Saccharomyces pastorianus
gtagtgaagtccctagcgtggaatt

SEQ ID NO: 137589 - DNA, 25 bp, Saccharomyces pastorianus
accacagccactatactcacgtagt

SEQ ID NO: 137590 - DNA, 25 bp, Saccharomyces pastorianus
accctcggtatatccaacgtgcagg

SEQ ID NO: 137591 - DNA, 25 bp, Saccharomyces pastorianus
actcacgtagtgaagtccctagcgt

SEQ ID NO: 137592 - DNA, 25 bp, Saccharomyces pastorianus
tatcgctattccaaggttctgtaat

SEQ ID NO: 137593 - DNA, 25 bp, Saccharomyces pastorianus
atattactcatctcgatctttcctg

SEQ ID NO: 137594 - DNA, 25 bp, Saccharomyces pastorianus
ctttgtttgggttctattatcgcta

SEQ ID NO: 137595 - DNA, 25 bp, Saccharomyces pastorianus
gctcgtcactgaaattgctacttta

SEQ ID NO: 137596 - DNA, 25 bp, Saccharomyces pastorianus
agcttcactgctttggttgtaaatg

SEQ ID NO: 137597 - DNA, 25 bp, Saccharomyces pastorianus
ttttctcaggcctttacgagtttat

SEQ ID NO: 137598 - DNA, 25 bp, Saccharomyces pastorianus
gtatcggttccatttcttggcgatt

SEQ ID NO: 137599 - DNA, 25 bp, Saccharomyces pastorianus
ggatggttgctatcagcttcactgc

SEQ ID NO: 137600 - DNA, 25 bp, Saccharomyces pastorianus
accgtaaattactatgctggacttt

SEQ ID NO: 137601 - DNA, 25 bp, Saccharomyces pastorianus
gcaatttgccaagcggtatattcca

SEQ ID NO: 137602 - DNA, 25 bp, Saccharomyces pastorianus
gtatattccatctgttcgttgttcg

SEQ ID NO: 137603 - DNA, 25 bp, Saccharomyces pastorianus
tgtttgtatatgtgtgggagtgatt

SEQ ID NO: 137604 - DNA, 25 bp, Saccharomyces pastorianus
atatattcatatgtcgtgtgtttgt

SEQ ID NO: 137605 - DNA, 25 bp, Saccharomyces pastorianus
attgtgcgtgtatatgtgtgttggc

SEQ ID NO: 137606 - DNA, 25 bp, Saccharomyces pastorianus
tattcatatgtcgtgtgtttgtata

SEQ ID NO: 137607 - DNA, 25 bp, Saccharomyces pastorianus
atgtgtgttggcgtgtgtggtacaa

SEQ ID NO: 137608 - DNA, 25 bp, Saccharomyces pastorianus
ggcgcgtgtactatatatattcata

SEQ ID NO: 137609 - DNA, 25 bp, Saccharomyces pastorianus
ttggcgcgtgtactatatatattca

SEQ ID NO: 137610 - DNA, 25 bp, Saccharomyces pastorianus
gcgcgtgtactatatatattcatat

SEQ ID NO: 137611 - DNA, 25 bp, Saccharomyces pastorianus
gtgattgtgcgtgtatatgtgtgtt

SEQ ID NO: 137612 - DNA, 25 bp, Saccharomyces pastorianus
atatgtcgtgtgtttgtatatgtgt

SEQ ID NO: 137613 - DNA, 25 bp, Saccharomyces pastorianus
gattggcgcgtgtactatatatatt

SEQ ID NO: 137614 - DNA, 25 bp, Saccharomyces pastorianus
agtgacgacaccacaatccgaatgt

SEQ ID NO: 137615 - DNA, 25 bp, Saccharomyces pastorianus
gtagagaatctagccaccgacaaca

SEQ ID NO: 137616 - DNA, 25 bp, Saccharomyces pastorianus
agtgtatgcacacgttcaacggtcg

SEQ ID NO: 137617 - DNA, 25 bp, Saccharomyces pastorianus
ataccttatccaacacatctactat

SEQ ID NO: 137618 - DNA, 25 bp, Saccharomyces pastorianus
cacatctactatcttgcggactgga

SEQ ID NO: 137619 - DNA, 25 bp, Saccharomyces pastorianus
accgacaacacttctgatggcagct

SEQ ID NO: 137620 - DNA, 25 bp, Saccharomyces pastorianus
atcagacacaccgtcgaacgagcaa

SEQ ID NO: 137621 - DNA, 25 bp, Saccharomyces pastorianus
agtggttctcacgacggaagcatta

SEQ ID NO: 137622 - DNA, 25 bp, Saccharomyces pastorianus
tgatggcagctctccgcaggatgac

SEQ ID NO: 137623 - DNA, 25 bp, Saccharomyces pastorianus
gcccctatcgcttgtgtttgtattg

SEQ ID NO: 137624 - DNA, 25 bp, Saccharomyces pastorianus
ttgggtgataaagtcgcccctatcg

SEQ ID NO: 137625 - DNA, 25 bp, Saccharomyces pastorianus
gatttggcacaaggatcatcgggta

SEQ ID NO: 137626 - DNA, 25 bp, Saccharomyces pastorianus
gctatcggcataacccggacattca

SEQ ID NO: 137627 - DNA, 25 bp, Saccharomyces pastorianus
ggacattcagttctcaccaactcat

SEQ ID NO: 137628 - DNA, 25 bp, Saccharomyces pastorianus
gacagcggcactagggtacagccat

SEQ ID NO: 137629 - DNA, 25 bp, Saccharomyces pastorianus
tcgtcatcacccgatttggcgacaa

SEQ ID NO: 137630 - DNA, 25 bp, Saccharomyces pastorianus
cttcaccaagttctgctatcggcat

SEQ ID NO: 137631 - DNA, 25 bp, Saccharomyces pastorianus
atttggcgacaaacgacagcggcac

SEQ ID NO: 137632 - DNA, 25 bp, Saccharomyces pastorianus
acgggcagtagcgatgatttggcac

SEQ ID NO: 137633 - DNA, 25 bp, Saccharomyces pastorianus
gggtacagccattgccagaatataa

SEQ ID NO: 137634 - DNA, 25 bp, Saccharomyces pastorianus
aactcatacagcgtgctacaagcag

SEQ ID NO: 137635 - DNA, 25 bp, Saccharomyces pastorianus
gatgccaccattaaagagattgctt

SEQ ID NO: 137636 - DNA, 25 bp, Saccharomyces pastorianus
gtcatcaaggaacacttgcccgctg

SEQ ID NO: 137637 - DNA, 25 bp, Saccharomyces pastorianus
tgaagccttcccaatttaagatagt

SEQ ID NO: 137638 - DNA, 25 bp, Saccharomyces pastorianus
tctcctgaccgtgaagactgggctg

SEQ ID NO: 137639 - DNA, 25 bp, Saccharomyces pastorianus
ccagccatggttgcctcagttagaa

SEQ ID NO: 137640 - DNA, 25 bp, Saccharomyces pastorianus
tctctctagtctttgggaacgtcca

SEQ ID NO: 137641 - DNA, 25 bp, Saccharomyces pastorianus
ggtattgcgcccatgtatcagatta

SEQ ID NO: 137642 - DNA, 25 bp, Saccharomyces pastorianus
atgaaagctattgccatggaccctc

SEQ ID NO: 137643 - DNA, 25 bp, Saccharomyces pastorianus
acgacactaccaaggtctctctagt

SEQ ID NO: 137644 - DNA, 25 bp, Saccharomyces pastorianus
gctgctacagtggacaacgttcaaa

SEQ ID NO: 137645 - DNA, 25 bp, Saccharomyces pastorianus
tgattgctggcggtactggtattgc

SEQ ID NO: 137646 - DNA, 25 bp, Saccharomyces pastorianus
agtttactacttagactctcctgac

SEQ ID NO: 137647 - DNA, 25 bp, Saccharomyces pastorianus
gctgacgacgtactcggtttaccaa

SEQ ID NO: 137648 - DNA, 25 bp, Saccharomyces pastorianus
ctagtgaagtcttaccccacaggta

SEQ ID NO: 137649 - DNA, 25 bp, Saccharomyces pastorianus
cgatgtacaagttcgggctacctca

SEQ ID NO: 137650 - DNA, 25 bp, Saccharomyces pastorianus
gtgcctttgctcttcaagttcatta

SEQ ID NO: 137651 - DNA, 25 bp, Saccharomyces pastorianus
tatacgcccacatcgttggatggag

SEQ ID NO: 137652 - DNA, 25 bp, Saccharomyces pastorianus
caagcctgtgctggatcccaaaagg

SEQ ID NO: 137653 - DNA, 25 bp, Saccharomyces pastorianus
cttccaatcatttccgctggttgaa

SEQ ID NO: 137654 - DNA, 25 bp, Saccharomyces pastorianus
ttatcggaccgaagaccaagcctgt

SEQ ID NO: 137655 - DNA, 25 bp, Saccharomyces pastorianus
aagtatgcatccaactggctcttca

SEQ ID NO: 137656 - DNA, 25 bp, Saccharomyces pastorianus
gtcatcgtgatcgtggtcgtgcctt

SEQ ID NO: 137657 - DNA, 25 bp, Saccharomyces pastorianus
gaagataggtgactcgatccagatc

SEQ ID NO: 137658 - DNA, 25 bp, Saccharomyces pastorianus
ttcaatggttcaaaagtactgtaca

SEQ ID NO: 137659 - DNA, 25 bp, Saccharomyces pastorianus
tttacgttctttttccaagcaactg

SEQ ID NO: 137660 - DNA, 25 bp, Saccharomyces pastorianus
gtacagaatgtaaaagacgaggttt

SEQ ID NO: 137661 - DNA, 25 bp, Saccharomyces pastorianus
ttcggactactgatagcattagagt

SEQ ID NO: 137662 - DNA, 25 bp, Saccharomyces pastorianus
gttctttttccaagcaactgtgctg

SEQ ID NO: 137663 - DNA, 25 bp, Saccharomyces pastorianus
tatttatttcggactactgatagca

SEQ ID NO: 137664 - DNA, 25 bp, Saccharomyces pastorianus
atgcaagatatttatttcggactac

SEQ ID NO: 137665 - DNA, 25 bp, Saccharomyces pastorianus
gcaactgtgctgttcattcaatggt

SEQ ID NO: 137666 - DNA, 25 bp, Saccharomyces pastorianus
gagtcatttacgttctttttccaag

SEQ ID NO: 137667 - DNA, 25 bp, Saccharomyces pastorianus
tgtgctgttcattcaatggttcaaa

SEQ ID NO: 137668 - DNA, 25 bp, Saccharomyces pastorianus
gatagcattagagtcatttacgttc

SEQ ID NO: 137669 - DNA, 25 bp, Saccharomyces pastorianus
gacaaggccctctagtgataaatct

SEQ ID NO: 137670 - DNA, 25 bp, Saccharomyces pastorianus
agtcagtatcgtttgtgcttcatcc

SEQ ID NO: 137671 - DNA, 25 bp, Saccharomyces pastorianus
acgaacaagactttggcgcagctgt

SEQ ID NO: 137672 - DNA, 25 bp, Saccharomyces pastorianus
ttactacttgtctggcgctcatata

SEQ ID NO: 137673 - DNA, 25 bp, Saccharomyces pastorianus
tgggttgtgccatctttactacttg

SEQ ID NO: 137674 - DNA, 25 bp, Saccharomyces pastorianus
tgcttcatccaatcttgtctcgagg

SEQ ID NO: 137675 - DNA, 25 bp, Saccharomyces pastorianus
tgggctgacgaaactggtccctaaa

SEQ ID NO: 137676 - DNA, 25 bp, Saccharomyces pastorianus
gttttcaccgcaatatacctggcaa

SEQ ID NO: 137677 - DNA, 25 bp, Saccharomyces pastorianus
gacatcatttatctttacaacggct

SEQ ID NO: 137678 - DNA, 25 bp, Saccharomyces pastorianus
agagctttacctgctttaacgacgt

SEQ ID NO: 137679 - DNA, 25 bp, Saccharomyces pastorianus
ggcaatttcctatttgtttccaact

SEQ ID NO: 137680 - DNA, 25 bp, Saccharomyces pastorianus
gggtcgtcttaaccgatggtatact

SEQ ID NO: 137681 - DNA, 25 bp, Saccharomyces pastorianus
catttcgtcaatggtcaatttcgga

SEQ ID NO: 137682 - DNA, 25 bp, Saccharomyces pastorianus
agaactatggtttcgtgggtcgtct

SEQ ID NO: 137683 - DNA, 25 bp, Saccharomyces pastorianus
ggtcaaggaattttcatggccatct

SEQ ID NO: 137684 - DNA, 25 bp, Saccharomyces pastorianus
agcctgttacaattatctcaccatc

SEQ ID NO: 137685 - DNA, 25 bp, Saccharomyces pastorianus
aacactctcgatgaacatgccgttg

SEQ ID NO: 137686 - DNA, 25 bp, Saccharomyces pastorianus
gagagatatcaacaatgcccctgtt

SEQ ID NO: 137687 - DNA, 25 bp, Saccharomyces pastorianus
ttatgtctgtgtcggatctgtttgt

SEQ ID NO: 137688 - DNA, 25 bp, Saccharomyces pastorianus
attcgtcgtttggatcatttcgtca

SEQ ID NO: 137689 - DNA, 25 bp, Saccharomyces pastorianus
aggaactctctgacattagctactc

SEQ ID NO: 137690 - DNA, 25 bp, Saccharomyces pastorianus
gtttggcaattcttcatacactatt

SEQ ID NO: 137691 - DNA, 25 bp, Saccharomyces pastorianus
acttctagtctctttgattcaatta

SEQ ID NO: 137692 - DNA, 25 bp, Saccharomyces pastorianus
tggtactcttggctaaaaaaacagt

SEQ ID NO: 137693 - DNA, 25 bp, Saccharomyces pastorianus
caattagtggtactcttggctaaaa

SEQ ID NO: 137694 - DNA, 25 bp, Saccharomyces pastorianus
attcaattagtggtactcttggcta

SEQ ID NO: 137695 - DNA, 25 bp, Saccharomyces pastorianus
cttctagtctctttgattcaattag

SEQ ID NO: 137696 - DNA, 25 bp, Saccharomyces pastorianus
tcaattagtggtactcttggctaaa

SEQ ID NO: 137697 - DNA, 25 bp, Saccharomyces pastorianus
gtctctttgattcaattagtggtac

SEQ ID NO: 137698 - DNA, 25 bp, Saccharomyces pastorianus
tctttgattcaattagtggtactct

SEQ ID NO: 137699 - DNA, 25 bp, Saccharomyces pastorianus
ctttgattcaattagtggtactctt

SEQ ID NO: 137700 - DNA, 25 bp, Saccharomyces pastorianus
ctagtctctttgattcaattagtgg

SEQ ID NO: 137701 - DNA, 25 bp, Saccharomyces pastorianus
gattcaattagtggtactcttggct

SEQ ID NO: 137702 - DNA, 25 bp, Saccharomyces pastorianus
acccattccaacagacaggattcat

SEQ ID NO: 137703 - DNA, 25 bp, Saccharomyces pastorianus
tacccattccaacagacaggattca

SEQ ID NO: 137704 - DNA, 25 bp, Saccharomyces pastorianus
agctacccattccaacagacaggat

SEQ ID NO: 137705 - DNA, 25 bp, Saccharomyces pastorianus
taacatccgcgcctggttttgaaat

SEQ ID NO: 137706 - DNA, 25 bp, Saccharomyces pastorianus
caacagacaggattcatgcatgtat

SEQ ID NO: 137707 - DNA, 25 bp, Saccharomyces pastorianus
ccattccaacagacaggattcatgc

SEQ ID NO: 137708 - DNA, 25 bp, Saccharomyces pastorianus
tccaacagacaggattcatgcatgt

SEQ ID NO: 137709 - DNA, 25 bp, Saccharomyces pastorianus
aacatccgcgcctggttttgaaatg

SEQ ID NO: 137710 - DNA, 25 bp, Saccharomyces pastorianus
attccaacagacaggattcatgcat

SEQ ID NO: 137711 - DNA, 25 bp, Saccharomyces pastorianus
acagacaggattcatgcatgtattt

SEQ ID NO: 137712 - DNA, 25 bp, Saccharomyces pastorianus
gctacccattccaacagacaggatt

SEQ ID NO: 137713 - DNA, 25 bp, Saccharomyces pastorianus
acccattccaacagacaggattcat

SEQ ID NO: 137714 - DNA, 25 bp, Saccharomyces pastorianus
agctacccattccaacagacaggat

SEQ ID NO: 137715 - DNA, 25 bp, Saccharomyces pastorianus
taacatccgcgcctggttttgaaat

SEQ ID NO: 137716 - DNA, 25 bp, Saccharomyces pastorianus
gcgcctggttttgaaatgtctatat

SEQ ID NO: 137717 - DNA, 25 bp, Saccharomyces pastorianus
caacagacaggattcatgcatgtat

SEQ ID NO: 137718 - DNA, 25 bp, Saccharomyces pastorianus
tccaacagacaggattcatgcatgt

SEQ ID NO: 137719 - DNA, 25 bp, Saccharomyces pastorianus
aacatccgcgcctggttttgaaatg

SEQ ID NO: 137720 - DNA, 25 bp, Saccharomyces pastorianus
attccaacagacaggattcatgcat

SEQ ID NO: 137721 - DNA, 25 bp, Saccharomyces pastorianus
acagacaggattcatgcatgtattt

SEQ ID NO: 137722 - DNA, 25 bp, Saccharomyces pastorianus
atgcatgtatttaattgagcccctg

SEQ ID NO: 137723 - DNA, 25 bp, Saccharomyces pastorianus
gctacccattccaacagacaggatt

SEQ ID NO: 137724 - DNA, 25 bp, Saccharomyces pastorianus
aacaccgcttcaaatatgccgggaa

SEQ ID NO: 137725 - DNA, 25 bp, Saccharomyces pastorianus
gtgataacaacaccgcttcaaatat

SEQ ID NO: 137726 - DNA, 25 bp, Saccharomyces pastorianus
aaagttaattttgcatcgggtgata

SEQ ID NO: 137727 - DNA, 25 bp, Saccharomyces pastorianus
gcgctgagcaagatccttactccaa

SEQ ID NO: 137728 - DNA, 25 bp, Saccharomyces pastorianus
atgacgggcgctgagcaagatcctt

SEQ ID NO: 137729 - DNA, 25 bp, Saccharomyces pastorianus
gcatcgggtgataacaacaccgctt

SEQ ID NO: 137730 - DNA, 25 bp, Saccharomyces pastorianus
agcaagatccttactccaatgcatc

SEQ ID NO: 137731 - DNA, 25 bp, Saccharomyces pastorianus
aagacgtaatgatgacgggcgctga

SEQ ID NO: 137732 - DNA, 25 bp, Saccharomyces pastorianus
tatgccgggaagtaacgaagacgta

SEQ ID NO: 137733 - DNA, 25 bp, Saccharomyces pastorianus
ttactccaatgcatctcaaatgggt

SEQ ID NO: 137734 - DNA, 25 bp, Saccharomyces pastorianus
tccttactccaatgcatctcaaatg

SEQ ID NO: 137735 - DNA, 25 bp, Saccharomyces pastorianus
gggtctattcccgttgatcaagttg

SEQ ID NO: 137736 - DNA, 25 bp, Saccharomyces pastorianus
acattacagaaaaaggttgcctcaa

SEQ ID NO: 137737 - DNA, 25 bp, Saccharomyces pastorianus
ttgatcaagttgtcgtcagaggtat

SEQ ID NO: 137738 - DNA, 25 bp, Saccharomyces pastorianus
aggtgaccccttcgattataaggct

SEQ ID NO: 137739 - DNA, 25 bp, Saccharomyces pastorianus
gtatgatccttggaataagctcaaa

SEQ ID NO: 137740 - DNA, 25 bp, Saccharomyces pastorianus
atagagttcgagtatgatccttgga

SEQ ID NO: 137741 - DNA, 25 bp, Saccharomyces pastorianus
taaggctcaggcagatacattttat

SEQ ID NO: 137742 - DNA, 25 bp, Saccharomyces pastorianus
gggtccagcagcagccatagagttc

SEQ ID NO: 137743 - DNA, 25 bp, Saccharomyces pastorianus
gttgcctcaatattgttagctctga

SEQ ID NO: 137744 - DNA, 25 bp, Saccharomyces pastorianus
ggtatagccaaagagcacgccaagt

SEQ ID NO: 137745 - DNA, 25 bp, Saccharomyces pastorianus
gaatggcctcagtctaaaaattgtg

SEQ ID NO: 137746 - DNA, 25 bp, Saccharomyces pastorianus
atgcccaatattacggcccatgaga

SEQ ID NO: 137747 - DNA, 25 bp, Saccharomyces pastorianus
aattaccaagtccttgctgtagacg

SEQ ID NO: 137748 - DNA, 25 bp, Saccharomyces pastorianus
ttacggcccatgagattagacacaa

SEQ ID NO: 137749 - DNA, 25 bp, Saccharomyces pastorianus
ttaccaagtccttgctgtagacgtt

SEQ ID NO: 137750 - DNA, 25 bp, Saccharomyces pastorianus
agacacaattaccaagtccttgctg

SEQ ID NO: 137751 - DNA, 25 bp, Saccharomyces pastorianus
cacaattaccaagtccttgctgtag

SEQ ID NO: 137752 - DNA, 25 bp, Saccharomyces pastorianus
acggcccatgagattagacacaatt

SEQ ID NO: 137753 - DNA, 25 bp, Saccharomyces pastorianus
ggcccatgagattagacacaattac

SEQ ID NO: 137754 - DNA, 25 bp, Saccharomyces pastorianus
aatattacggcccatgagattagac

SEQ ID NO: 137755 - DNA, 25 bp, Saccharomyces pastorianus
tattacggcccatgagattagacac

SEQ ID NO: 137756 - DNA, 25 bp, Saccharomyces pastorianus
tgcccaatattacggcccatgagat

SEQ ID NO: 137757 - DNA, 25 bp, Saccharomyces pastorianus
ccttagatatatttggtggtaacct

SEQ ID NO: 137758 - DNA, 25 bp, Saccharomyces pastorianus
gacgaactaagtcacgggaaagtag

SEQ ID NO: 137759 - DNA, 25 bp, Saccharomyces pastorianus
ctaagtcacgggaaagtagatttga

SEQ ID NO: 137760 - DNA, 25 bp, Saccharomyces pastorianus
tagacgaactaagtcacgggaaagt

SEQ ID NO: 137761 - DNA, 25 bp, Saccharomyces pastorianus
attcggtagttccttagatatattt

SEQ ID NO: 137762 - DNA, 25 bp, Saccharomyces pastorianus
tttgacattcggtagttccttagat

SEQ ID NO: 137763 - DNA, 25 bp, Saccharomyces pastorianus
cattcggtagttccttagatatatt

SEQ ID NO: 137764 - DNA, 25 bp, Saccharomyces pastorianus
atttgacattcggtagttccttaga

SEQ ID NO: 137765 - DNA, 25 bp, Saccharomyces pastorianus
agatatatttggtggtaacctagtt

SEQ ID NO: 137766 - DNA, 25 bp, Saccharomyces pastorianus
gacattcggtagttccttagatata

SEQ ID NO: 137767 - DNA, 25 bp, Saccharomyces pastorianus
ttgacattcggtagttccttagata

SEQ ID NO: 137768 - DNA, 25 bp, Saccharomyces pastorianus
ctcacggtggtggtaaccatcaaca

SEQ ID NO: 137769 - DNA, 25 bp, Saccharomyces pastorianus
acggtggtggtaaccatcaacatat

SEQ ID NO: 137770 - DNA, 25 bp, Saccharomyces pastorianus
ggtaaccatcaacatattggtaagg

SEQ ID NO: 137771 - DNA, 25 bp, Saccharomyces pastorianus
cacggtggtggtaaccatcaacata

SEQ ID NO: 137772 - DNA, 25 bp, Saccharomyces pastorianus
catcaacatattggtaaggcttcta

SEQ ID NO: 137773 - DNA, 25 bp, Saccharomyces pastorianus
ggtggtaaccatcaacatattggta

SEQ ID NO: 137774 - DNA, 25 bp, Saccharomyces pastorianus
cctcacggtggtggtaaccatcaac

SEQ ID NO: 137775 - DNA, 25 bp, Saccharomyces pastorianus
tcacggtggtggtaaccatcaacat

SEQ ID NO: 137776 - DNA, 25 bp, Saccharomyces pastorianus
cggtggtggtaaccatcaacatatt

SEQ ID NO: 137777 - DNA, 25 bp, Saccharomyces pastorianus
atcaacatattggtaaggcttctac

SEQ ID NO: 137778 - DNA, 25 bp, Saccharomyces pastorianus
gtggtggtaaccatcaacatattgg

SEQ ID NO: 137779 - DNA, 25 bp, Saccharomyces pastorianus
atgcttttgaagttgctgattgagt

SEQ ID NO: 137780 - DNA, 25 bp, Saccharomyces pastorianus
tcagtttgaaaaagcgccggttcct

SEQ ID NO: 137781 - DNA, 25 bp, Saccharomyces pastorianus
gatttgattaacgtggatgagtcct

SEQ ID NO: 137782 - DNA, 25 bp, Saccharomyces pastorianus
gcgtaactattgcaacgaaatgctt

SEQ ID NO: 137783 - DNA, 25 bp, Saccharomyces pastorianus
tgagttagacagtatcgatttgatt

SEQ ID NO: 137784 - DNA, 25 bp, Saccharomyces pastorianus
gccggttcctctgactctagaagaa

SEQ ID NO: 137785 - DNA, 25 bp, Saccharomyces pastorianus
aaggacatctacgagcgtaactatt

SEQ ID NO: 137786 - DNA, 25 bp, Saccharomyces pastorianus
ggaaggtcgtagcaaggatctaata

SEQ ID NO: 137787 - DNA, 25 bp, Saccharomyces pastorianus
gatgagtccttaagaaggccgttga

SEQ ID NO: 137788 - DNA, 25 bp, Saccharomyces pastorianus
atacggcaacgagttggaaggtcgt

SEQ ID NO: 137789 - DNA, 25 bp, Saccharomyces pastorianus
caaattgacaatgtgtcgttgagat

SEQ ID NO: 137790 - DNA, 25 bp, Saccharomyces pastorianus
ttggccgtgattgctgttgtatttt

SEQ ID NO: 137791 - DNA, 25 bp, Saccharomyces pastorianus
cctcttggccgtgattgctgttgta

SEQ ID NO: 137792 - DNA, 25 bp, Saccharomyces pastorianus
tcttggccgtgattgctgttgtatt

SEQ ID NO: 137793 - DNA, 25 bp, Saccharomyces pastorianus
gacgtacgtcctcttggccgtgatt

SEQ ID NO: 137794 - DNA, 25 bp, Saccharomyces pastorianus
gtcctcttggccgtgattgctgttg

SEQ ID NO: 137795 - DNA, 25 bp, Saccharomyces pastorianus
gtacgtcctcttggccgtgattgct

SEQ ID NO: 137796 - DNA, 25 bp, Saccharomyces pastorianus
gctgttgtatttttggttacaatca

SEQ ID NO: 137797 - DNA, 25 bp, Saccharomyces pastorianus
ggaacattggaagagcaagctgagc

SEQ ID NO: 137798 - DNA, 25 bp, Saccharomyces pastorianus
agctgagcaaaacaagtacctcgac

SEQ ID NO: 137799 - DNA, 25 bp, Saccharomyces pastorianus
aagtacctcgacgtacgtcctcttg

SEQ ID NO: 137800 - DNA, 25 bp, Saccharomyces pastorianus
agcaagctgagcaaaacaagtacct

SEQ ID NO: 137801 - DNA, 25 bp, Saccharomyces pastorianus
gcatacgtcgtattcgatctcgata

SEQ ID NO: 137802 - DNA, 25 bp, Saccharomyces pastorianus
cgcttcccacttcgaattcaataga

SEQ ID NO: 137803 - DNA, 25 bp, Saccharomyces pastorianus
gatgccaggcactagatcaactact

SEQ ID NO: 137804 - DNA, 25 bp, Saccharomyces pastorianus
gacatttattcatctacaggctgca

SEQ ID NO: 137805 - DNA, 25 bp, Saccharomyces pastorianus
agatgggtctatttcaggtgccaaa

SEQ ID NO: 137806 - DNA, 25 bp, Saccharomyces pastorianus
agtaggccttttcttcaatcatcga

SEQ ID NO: 137807 - DNA, 25 bp, Saccharomyces pastorianus
acagcctcttcgcttattgcagaaa

SEQ ID NO: 137808 - DNA, 25 bp, Saccharomyces pastorianus
aaattgctacagctgaaccctggtc

SEQ ID NO: 137809 - DNA, 25 bp, Saccharomyces pastorianus
actatggcaaactcgggcagtgtct

SEQ ID NO: 137810 - DNA, 25 bp, Saccharomyces pastorianus
agcggagcattctacgtttaaccaa

SEQ ID NO: 137811 - DNA, 25 bp, Saccharomyces pastorianus
aaagtcgcaactgctctacgaagat

SEQ ID NO: 137812 - DNA, 25 bp, Saccharomyces pastorianus
cattggcgatgctgacttagtctac

SEQ ID NO: 137813 - DNA, 25 bp, Saccharomyces pastorianus
tcgagcaatgtctcacttcaaaatt

SEQ ID NO: 137814 - DNA, 25 bp, Saccharomyces pastorianus
tctcaatataaaccaggccacgata

SEQ ID NO: 137815 - DNA, 25 bp, Saccharomyces pastorianus
aacaagtcctcgagcaatgtctcac

SEQ ID NO: 137816 - DNA, 25 bp, Saccharomyces pastorianus
ttgatattgatcaagtcggatcgtt

SEQ ID NO: 137817 - DNA, 25 bp, Saccharomyces pastorianus
tgcctaagcaacatttcgtccaaag

SEQ ID NO: 137818 - DNA, 25 bp, Saccharomyces pastorianus
gaaatagtgcccgttctcaatataa

SEQ ID NO: 137819 - DNA, 25 bp, Saccharomyces pastorianus
aaccaggccacgatatttgatattg

SEQ ID NO: 137820 - DNA, 25 bp, Saccharomyces pastorianus
ttcgtccaaagaaatagtgcccgtt

SEQ ID NO: 137821 - DNA, 25 bp, Saccharomyces pastorianus
ttagtctacgtaacaagtcctcgag

SEQ ID NO: 137822 - DNA, 25 bp, Saccharomyces pastorianus
gtctcacttcaaaatttgcctaagc

SEQ ID NO: 137823 - DNA, 25 bp, Saccharomyces pastorianus
aatccgtgccatttcgccaaaatta

SEQ ID NO: 137824 - DNA, 25 bp, Saccharomyces pastorianus
tgatcaatatcatccctctggccat

SEQ ID NO: 137825 - DNA, 25 bp, Saccharomyces pastorianus
gccgaaagtaattttggagtctcat

SEQ ID NO: 137826 - DNA, 25 bp, Saccharomyces pastorianus
gacaactcggagcatgatcaatatc

SEQ ID NO: 137827 - DNA, 25 bp, Saccharomyces pastorianus
tggagtctcattcaaagccaacaga

SEQ ID NO: 137828 - DNA, 25 bp, Saccharomyces pastorianus
taccgcatatgagcccgacaatttt

SEQ ID NO: 137829 - DNA, 25 bp, Saccharomyces pastorianus
aagcaggacttagcgctaccgcata

SEQ ID NO: 137830 - DNA, 25 bp, Saccharomyces pastorianus
gcccgacaattttaaccaatccgtg

SEQ ID NO: 137831 - DNA, 25 bp, Saccharomyces pastorianus
tctggccatgtaattcctagcttga

SEQ ID NO: 137832 - DNA, 25 bp, Saccharomyces pastorianus
gactcagtttttctacagccatgga

SEQ ID NO: 137833 - DNA, 25 bp, Saccharomyces pastorianus
taacgtttgcgactacaaggtatac

SEQ ID NO: 137834 - DNA, 25 bp, Saccharomyces pastorianus
aatcaaactattgaccagcttggtg

SEQ ID NO: 137835 - DNA, 25 bp, Saccharomyces pastorianus
gaccagcttggtgatactttccata

SEQ ID NO: 137836 - DNA, 25 bp, Saccharomyces pastorianus
gcactcaagtcattatcgttgaaga

SEQ ID NO: 137837 - DNA, 25 bp, Saccharomyces pastorianus
aaaggacttttggaaacatgatgga

SEQ ID NO: 137838 - DNA, 25 bp, Saccharomyces pastorianus
tgggagctatgggtcagagaataaa

SEQ ID NO: 137839 - DNA, 25 bp, Saccharomyces pastorianus
tctgggatcagtataaaaacatggt

SEQ ID NO: 137840 - DNA, 25 bp, Saccharomyces pastorianus
aaaagcactcaagtcattatcgttg

SEQ ID NO: 137841 - DNA, 25 bp, Saccharomyces pastorianus
catgatggagatggccagaagatct

SEQ ID NO: 137842 - DNA, 25 bp, Saccharomyces pastorianus
taacacttctgtaaaactcaaaagg

SEQ ID NO: 137843 - DNA, 25 bp, Saccharomyces pastorianus
gatactttccataacacttctgtaa

SEQ ID NO: 137844 - DNA, 25 bp, Saccharomyces pastorianus
gagattagaggcagcaatcaaacta

SEQ ID NO: 137845 - DNA, 25 bp, Saccharomyces pastorianus
tgagtcggatcctctttctcagttg

SEQ ID NO: 137846 - DNA, 25 bp, Saccharomyces pastorianus
caggaacagcagatggaggaccaaa

SEQ ID NO: 137847 - DNA, 25 bp, Saccharomyces pastorianus
gaggccatcgccaacagagatcaaa

SEQ ID NO: 137848 - DNA, 25 bp, Saccharomyces pastorianus
acctgctaatgctgagtcggatcct

SEQ ID NO: 137849 - DNA, 25 bp, Saccharomyces pastorianus
ataagtgaggaatctctgtccccat

SEQ ID NO: 137850 - DNA, 25 bp, Saccharomyces pastorianus
tctttctcagttgccacagacgaac

SEQ ID NO: 137851 - DNA, 25 bp, Saccharomyces pastorianus
taagatggaggctgctctttgtcct

SEQ ID NO: 137852 - DNA, 25 bp, Saccharomyces pastorianus
gccacagacgaacgccgtaggtaat

SEQ ID NO: 137853 - DNA, 25 bp, Saccharomyces pastorianus
gaggaatctctgtccccatcggagg

SEQ ID NO: 137854 - DNA, 25 bp, Saccharomyces pastorianus
ggaaaagttacctgctaatgctgag

SEQ ID NO: 137855 - DNA, 25 bp, Saccharomyces pastorianus
tggaggctgctctttgtccttttga

SEQ ID NO: 137856 - DNA, 25 bp, Saccharomyces pastorianus
ggtaattcttcagctactaccgctt

SEQ ID NO: 137857 - DNA, 25 bp, Saccharomyces pastorianus
gagaagaagttgtcctccccggata

SEQ ID NO: 137858 - DNA, 25 bp, Saccharomyces pastorianus
tattactagcgataccacgaaggca

SEQ ID NO: 137859 - DNA, 25 bp, Saccharomyces pastorianus
agcttccaccttccttggagaagaa

SEQ ID NO: 137860 - DNA, 25 bp, Saccharomyces pastorianus
tatggtgaaccctggacagcttcca

SEQ ID NO: 137861 - DNA, 25 bp, Saccharomyces pastorianus
agctactaccgcttcagcagatatt

SEQ ID NO: 137862 - DNA, 25 bp, Saccharomyces pastorianus
ctacctggtatggtgaaccctggac

SEQ ID NO: 137863 - DNA, 25 bp, Saccharomyces pastorianus
aattggaatgtttcctcttccttct

SEQ ID NO: 137864 - DNA, 25 bp, Saccharomyces pastorianus
cacgaaggcagattttacgagcaaa

SEQ ID NO: 137865 - DNA, 25 bp, Saccharomyces pastorianus
gtagaggacctcgtgggcgtaaatt

SEQ ID NO: 137866 - DNA, 25 bp, Saccharomyces pastorianus
tgtcctccccggatactgaatctaa

SEQ ID NO: 137867 - DNA, 25 bp, Saccharomyces pastorianus
atggctttcaagaacctccaattcc

SEQ ID NO: 137868 - DNA, 25 bp, Saccharomyces pastorianus
gggcgcatatggatccgattctgat

SEQ ID NO: 137869 - DNA, 25 bp, Saccharomyces pastorianus
cagaacctattatcgctcacgttga

SEQ ID NO: 137870 - DNA, 25 bp, Saccharomyces pastorianus
gataccaccttctgttactcaggag

SEQ ID NO: 137871 - DNA, 25 bp, Saccharomyces pastorianus
aacaagcttccacttcagaacctat

SEQ ID NO: 137872 - DNA, 25 bp, Saccharomyces pastorianus
agtttctactgcaggtatcccatca

SEQ ID NO: 137873 - DNA, 25 bp, Saccharomyces pastorianus
caccccagctttagttggaggcgtt

SEQ ID NO: 137874 - DNA, 25 bp, Saccharomyces pastorianus
gattggtcatcctgatcatgcacgt

SEQ ID NO: 137875 - DNA, 25 bp, Saccharomyces pastorianus
tttgcctgctgttgatggctttcaa

SEQ ID NO: 137876 - DNA, 25 bp, Saccharomyces pastorianus
gatgacgttttatcgattcctgaat

SEQ ID NO: 137877 - DNA, 25 bp, Saccharomyces pastorianus
gtagtcctattccaatagctccgat

SEQ ID NO: 137878 - DNA, 25 bp, Saccharomyces pastorianus
cacagacttcatttggcgttaattt

SEQ ID NO: 137879 - DNA, 25 bp, Saccharomyces pastorianus
aaagcggtcctgcaagtatgcccaa

SEQ ID NO: 137880 - DNA, 25 bp, Saccharomyces pastorianus
atttaggacctcagttgaccggcgg

SEQ ID NO: 137881 - DNA, 25 bp, Saccharomyces pastorianus
gtatgcccaatttgtcctttaatca

SEQ ID NO: 137882 - DNA, 25 bp, Saccharomyces pastorianus
gttttctaccaccatctaactttag

SEQ ID NO: 137883 - DNA, 25 bp, Saccharomyces pastorianus
ggcggtgctttgcaatctcagtata

SEQ ID NO: 137884 - DNA, 25 bp, Saccharomyces pastorianus
gattacaatctcagttaaccgggtt

SEQ ID NO: 137885 - DNA, 25 bp, Saccharomyces pastorianus
taactttagtgctaccatgccgttg

SEQ ID NO: 137886 - DNA, 25 bp, Saccharomyces pastorianus
ggaggatatggttccgttatgcccc

SEQ ID NO: 137887 - DNA, 25 bp, Saccharomyces pastorianus
catgccgttgactgcccaaaagaca

SEQ ID NO: 137888 - DNA, 25 bp, Saccharomyces pastorianus
atgctttgcaacctcagacaactgg

SEQ ID NO: 137889 - DNA, 25 bp, Saccharomyces pastorianus
ggcgaaatgttactcaaagttccag

SEQ ID NO: 137890 - DNA, 25 bp, Saccharomyces pastorianus
ggcggccatgtgaacgttcctcagg

SEQ ID NO: 137891 - DNA, 25 bp, Saccharomyces pastorianus
aaccaactcaacctgttcagaatgt

SEQ ID NO: 137892 - DNA, 25 bp, Saccharomyces pastorianus
caccatctgcagctttttcgcaaaa

SEQ ID NO: 137893 - DNA, 25 bp, Saccharomyces pastorianus
tgctggttcttccaatttagttgaa

SEQ ID NO: 137894 - DNA, 25 bp, Saccharomyces pastorianus
aaagttccagatcgattagcagtga

SEQ ID NO: 137895 - DNA, 25 bp, Saccharomyces pastorianus
tagagcaactccattccaagaagaa

SEQ ID NO: 137896 - DNA, 25 bp, Saccharomyces pastorianus
tgtggaagtcgctcaaccaactcaa

SEQ ID NO: 137897 - DNA, 25 bp, Saccharomyces pastorianus
cacaacagattgctggttcttccaa

SEQ ID NO: 137898 - DNA, 25 bp, Saccharomyces pastorianus
aaactctcgagaacagccacaacag

SEQ ID NO: 137899 - DNA, 25 bp, Saccharomyces pastorianus
gaaaagacaactttggcggccatgt

SEQ ID NO: 137900 - DNA, 25 bp, Saccharomyces pastorianus
tctttcggaacatctacagaacctg

SEQ ID NO: 137901 - DNA, 25 bp, Saccharomyces pastorianus
agcggttccgcattcgcaagaaaca

SEQ ID NO: 137902 - DNA, 25 bp, Saccharomyces pastorianus
gaagaggaagctcccgtgagcactt

SEQ ID NO: 137903 - DNA, 25 bp, Saccharomyces pastorianus
acagaacctgatatcaagcgattca

SEQ ID NO: 137904 - DNA, 25 bp, Saccharomyces pastorianus
gtgagcacttctaacgaactggata

SEQ ID NO: 137905 - DNA, 25 bp, Saccharomyces pastorianus
gcaaatcaacaaacttcgcgatcgt

SEQ ID NO: 137906 - DNA, 25 bp, Saccharomyces pastorianus
cgcttgctatcattgctgctggtta

SEQ ID NO: 137907 - DNA, 25 bp, Saccharomyces pastorianus
cttcgcgatcgtatagagcaattga

SEQ ID NO: 137908 - DNA, 25 bp, Saccharomyces pastorianus
gcagtttaagaagctccgcgagccg

SEQ ID NO: 137909 - DNA, 25 bp, Saccharomyces pastorianus
aagcgattcagagctgggctcgcgc

SEQ ID NO: 137910 - DNA, 25 bp, Saccharomyces pastorianus
atggccaggatgtctcgcagtttaa

SEQ ID NO: 137911 - DNA, 25 bp, Saccharomyces pastorianus
gtgctgctaatatcaaggttcttgg

SEQ ID NO: 137912 - DNA, 25 bp, Saccharomyces pastorianus
ggtgctgctaatatcaaggttcttg

SEQ ID NO: 137913 - DNA, 25 bp, Saccharomyces pastorianus
ttaccaaggtgctgctaatatcaag

SEQ ID NO: 137914 - DNA, 25 bp, Saccharomyces pastorianus
caaggtgctgctaatatcaaggttc

SEQ ID NO: 137915 - DNA, 25 bp, Saccharomyces pastorianus
gtacttaccaaggtgctgctaatat

SEQ ID NO: 137916 - DNA, 25 bp, Saccharomyces pastorianus
tgctaatatcaaggttcttggaaac

SEQ ID NO: 137917 - DNA, 25 bp, Saccharomyces pastorianus
aggtgctgctaatatcaaggttctt

SEQ ID NO: 137918 - DNA, 25 bp, Saccharomyces pastorianus
tcgagtacttaccaaggtgctgcta

SEQ ID NO: 137919 - DNA, 25 bp, Saccharomyces pastorianus
gctgctaatatcaaggttcttggaa

SEQ ID NO: 137920 - DNA, 25 bp, Saccharomyces pastorianus
gagtacttaccaaggtgctgctaat

SEQ ID NO: 137921 - DNA, 25 bp, Saccharomyces pastorianus
acttaccaaggtgctgctaatatca

SEQ ID NO: 137922 - DNA, 25 bp, Saccharomyces pastorianus
tcgctacatactctgttccttctat

SEQ ID NO: 137923 - DNA, 25 bp, Saccharomyces pastorianus
atctccatctctaactggtccacta

SEQ ID NO: 137924 - DNA, 25 bp, Saccharomyces pastorianus
ttctgcagtcgctacatactctgtt

SEQ ID NO: 137925 - DNA, 25 bp, Saccharomyces pastorianus
tgcagtcgctacatactctgttcct

SEQ ID NO: 137926 - DNA, 25 bp, Saccharomyces pastorianus
gttgtcacatctccatctctaactg

SEQ ID NO: 137927 - DNA, 25 bp, Saccharomyces pastorianus
tgttccttctatctcgagtacttac

SEQ ID NO: 137928 - DNA, 25 bp, Saccharomyces pastorianus
tctaactggtccactacaatctgct

SEQ ID NO: 137929 - DNA, 25 bp, Saccharomyces pastorianus
tgcttctggttctgcagtcgctaca

SEQ ID NO: 137930 - DNA, 25 bp, Saccharomyces pastorianus
atactctgttccttctatctcgagt

SEQ ID NO: 137931 - DNA, 25 bp, Saccharomyces pastorianus
ttctggttctgcagtcgctacatac

SEQ ID NO: 137932 - DNA, 25 bp, Saccharomyces pastorianus
tccttctatctcgagtacttaccaa

SEQ ID NO: 137933 - DNA, 25 bp, Saccharomyces pastorianus
gtatttgcaagatagtgccgctcaa

SEQ ID NO: 137934 - DNA, 25 bp, Saccharomyces pastorianus
gtaaggaaaagcctacacctcctca

SEQ ID NO: 137935 - DNA, 25 bp, Saccharomyces pastorianus
tagtacttccgagtcatctaccact

SEQ ID NO: 137936 - DNA, 25 bp, Saccharomyces pastorianus
gatttcccaggcttctattggaaca

SEQ ID NO: 137937 - DNA, 25 bp, Saccharomyces pastorianus
aacatagatgacttcgtaccgccac

SEQ ID NO: 137938 - DNA, 25 bp, Saccharomyces pastorianus
acatctagcacttccgagtcatcta

SEQ ID NO: 137939 - DNA, 25 bp, Saccharomyces pastorianus
gtaccgccacaattgttgtcacaat

SEQ ID NO: 137940 - DNA, 25 bp, Saccharomyces pastorianus
gttgtcacaatctaccactacatca

SEQ ID NO: 137941 - DNA, 25 bp, Saccharomyces pastorianus
gggaactacatcttttgctttgtct

SEQ ID NO: 137942 - DNA, 25 bp, Saccharomyces pastorianus
gccgctcaatatgcaagctcttgga

SEQ ID NO: 137943 - DNA, 25 bp, Saccharomyces pastorianus
ggtgtggatgcctgacttccaaatt

SEQ ID NO: 137944 - DNA, 25 bp, Saccharomyces pastorianus
ttgtggtacaaaactccatacctaa

SEQ ID NO: 137945 - DNA, 25 bp, Saccharomyces pastorianus
atactctggggctggcgtaggcaca

SEQ ID NO: 137946 - DNA, 25 bp, Saccharomyces pastorianus
ttttgtggtacaaaactccatacct

SEQ ID NO: 137947 - DNA, 25 bp, Saccharomyces pastorianus
gagaacatactctggggctggcgta

SEQ ID NO: 137948 - DNA, 25 bp, Saccharomyces pastorianus
attacagctgtgagaacatactctg

SEQ ID NO: 137949 - DNA, 25 bp, Saccharomyces pastorianus
agaacatactctggggctggcgtag

SEQ ID NO: 137950 - DNA, 25 bp, Saccharomyces pastorianus
aacatactctggggctggcgtaggc

SEQ ID NO: 137951 - DNA, 25 bp, Saccharomyces pastorianus
aattacagctgtgagaacatactct

SEQ ID NO: 137952 - DNA, 25 bp, Saccharomyces pastorianus
gaattacagctgtgagaacatactc

SEQ ID NO: 137953 - DNA, 25 bp, Saccharomyces pastorianus
tgtggtacaaaactccatacctaaa

SEQ ID NO: 137954 - DNA, 25 bp, Saccharomyces pastorianus
tttgtggtacaaaactccataccta

SEQ ID NO: 137955 - DNA, 25 bp, Saccharomyces pastorianus
ggcgtctttttagtgtcataccatt

SEQ ID NO: 137956 - DNA, 25 bp, Saccharomyces pastorianus
ataccaacctatacttccattgctg

SEQ ID NO: 137957 - DNA, 25 bp, Saccharomyces pastorianus
ttactacctaggatcatcgacaatg

SEQ ID NO: 137958 - DNA, 25 bp, Saccharomyces pastorianus
gtaaccacagatattcaataccaac

SEQ ID NO: 137959 - DNA, 25 bp, Saccharomyces pastorianus
ttctcaatggcgtctttttagtgtc

SEQ ID NO: 137960 - DNA, 25 bp, Saccharomyces pastorianus
gtcataccattcttttttactacct

SEQ ID NO: 137961 - DNA, 25 bp, Saccharomyces pastorianus
tacaaatctatagccgggatcaccg

SEQ ID NO: 137962 - DNA, 25 bp, Saccharomyces pastorianus
ggagacatctttagagtaaccacag

SEQ ID NO: 137963 - DNA, 25 bp, Saccharomyces pastorianus
gggatcaccgaccttgttatattct

SEQ ID NO: 137964 - DNA, 25 bp, Saccharomyces pastorianus
gagttttaaaatttgctttgcggca

SEQ ID NO: 137965 - DNA, 25 bp, Saccharomyces pastorianus
gaccttgttatattcttcggagaca

SEQ ID NO: 137966 - DNA, 25 bp, Saccharomyces pastorianus
gaattcaggattgcagacagctgca

SEQ ID NO: 137967 - DNA, 25 bp, Saccharomyces pastorianus
agcaaacgagctttttcattggtag

SEQ ID NO: 137968 - DNA, 25 bp, Saccharomyces pastorianus
gacagctgcaagcaaacgagctttt

SEQ ID NO: 137969 - DNA, 25 bp, Saccharomyces pastorianus
ttttgccaatcgaccaagctagtgt

SEQ ID NO: 137970 - DNA, 25 bp, Saccharomyces pastorianus
atcgatatgatcttttcagttgcaa

SEQ ID NO: 137971 - DNA, 25 bp, Saccharomyces pastorianus
tctgatcgctctctttctatagaaa

SEQ ID NO: 137972 - DNA, 25 bp, Saccharomyces pastorianus
gcatttcgcgtatagtaggtgttct

SEQ ID NO: 137973 - DNA, 25 bp, Saccharomyces pastorianus
ggttttcctttaatgagactcttat

SEQ ID NO: 137974 - DNA, 25 bp, Saccharomyces pastorianus
ctcttatgggagtcaattcgcacca

SEQ ID NO: 137975 - DNA, 25 bp, Saccharomyces pastorianus
gtcaattcgcaccagaaggtgtcaa

SEQ ID NO: 137976 - DNA, 25 bp, Saccharomyces pastorianus
agttacgtacactccttggcatttc

SEQ ID NO: 137977 - DNA, 25 bp, Saccharomyces pastorianus
gtcttcttcttctggaaaaaggcct

SEQ ID NO: 137978 - DNA, 25 bp, Saccharomyces pastorianus
aagatatccttgtttatgggcataa

SEQ ID NO: 137979 - DNA, 25 bp, Saccharomyces pastorianus
gcagttttcaatttcagtagcgata

SEQ ID NO: 137980 - DNA, 25 bp, Saccharomyces pastorianus
gtacagtttttatctaccaaggaca

SEQ ID NO: 137981 - DNA, 25 bp, Saccharomyces pastorianus
atgagccttctgcaggtttctcgaa

SEQ ID NO: 137982 - DNA, 25 bp, Saccharomyces pastorianus
gcaaactcaaatggtgattcccgca

SEQ ID NO: 137983 - DNA, 25 bp, Saccharomyces pastorianus
cctcctacaccatgttttttggcaa

SEQ ID NO: 137984 - DNA, 25 bp, Saccharomyces pastorianus
gttcctgataatgaggcctcctaca

SEQ ID NO: 137985 - DNA, 25 bp, Saccharomyces pastorianus
tttctcgaaggatgccaaaccatgg

SEQ ID NO: 137986 - DNA, 25 bp, Saccharomyces pastorianus
ggtactggtacatatgccgccatta

SEQ ID NO: 137987 - DNA, 25 bp, Saccharomyces pastorianus
gaacaccattcccatggagtgctga

SEQ ID NO: 137988 - DNA, 25 bp, Saccharomyces pastorianus
ctttctttggtggatctgcttggag

SEQ ID NO: 137989 - DNA, 25 bp, Saccharomyces pastorianus
tctgcatgtgtttgctcctggccaa

SEQ ID NO: 137990 - DNA, 25 bp, Saccharomyces pastorianus
gtcacaacgttgatggctttcgtat

SEQ ID NO: 137991 - DNA, 25 bp, Saccharomyces pastorianus
ggagacctccaaagggtttcgatga

SEQ ID NO: 137992 - DNA, 25 bp, Saccharomyces pastorianus
ggaccacgaattcacgagtaccata

SEQ ID NO: 137993 - DNA, 25 bp, Saccharomyces pastorianus
gatgctcctatcactgatcctacag

SEQ ID NO: 137994 - DNA, 25 bp, Saccharomyces pastorianus
gatcctacagttccttaccaaaaag

SEQ ID NO: 137995 - DNA, 25 bp, Saccharomyces pastorianus
tgggctattggctacgtcacaacgt

SEQ ID NO: 137996 - DNA, 25 bp, Saccharomyces pastorianus
aactggtgagttctttctgcatgtg

SEQ ID NO: 137997 - DNA, 25 bp, Saccharomyces pastorianus
aaggttgagggcctacccgatgctc

SEQ ID NO: 137998 - DNA, 25 bp, Saccharomyces pastorianus
atttatgactcctcagtgggctatt

SEQ ID NO: 137999 - DNA, 25 bp, Saccharomyces pastorianus
tcggcaattaatttctactacggtt

SEQ ID NO: 138000 - DNA, 25 bp, Saccharomyces pastorianus
cagcttctagaagggatggtgatta

SEQ ID NO: 138001 - DNA, 25 bp, Saccharomyces pastorianus
agatgtggatggacggtgtattacc

SEQ ID NO: 138002 - DNA, 25 bp, Saccharomyces pastorianus
ggacggtgtattaccttggaaatct

SEQ ID NO: 138003 - DNA, 25 bp, Saccharomyces pastorianus
ttactccttttattacttcggcaat

SEQ ID NO: 138004 - DNA, 25 bp, Saccharomyces pastorianus
ttcatgggttgcttagcattttcat

SEQ ID NO: 138005 - DNA, 25 bp, Saccharomyces pastorianus
catatttttacgtcttcttctttgt

SEQ ID NO: 138006 - DNA, 25 bp, Saccharomyces pastorianus
tgttccagaaacaaaaggtctaact

SEQ ID NO: 138007 - DNA, 25 bp, Saccharomyces pastorianus
gaaatctgaatcctgggtaccagct

SEQ ID NO: 138008 - DNA, 25 bp, Saccharomyces pastorianus
gcattttcatatttttacgtcttct

SEQ ID NO: 138009 - DNA, 25 bp, Saccharomyces pastorianus
gaatcctgggtaccagcttctagaa

SEQ ID NO: 138010 - DNA, 25 bp, Saccharomyces pastorianus
gaagttgttgttccagaaaagcctg

SEQ ID NO: 138011 - DNA, 25 bp, Saccharomyces pastorianus
agcctatgctactgtttctatcatg

SEQ ID NO: 138012 - DNA, 25 bp, Saccharomyces pastorianus
gacggctgcccttcaatagaaaatt

SEQ ID NO: 138013 - DNA, 25 bp, Saccharomyces pastorianus
atgtgtttatgtatggctttcggtg

SEQ ID NO: 138014 - DNA, 25 bp, Saccharomyces pastorianus
aagaaccgattttcgaagaggcaga

SEQ ID NO: 138015 - DNA, 25 bp, Saccharomyces pastorianus
gaaaagcctgcttcagcctatgcta

SEQ ID NO: 138016 - DNA, 25 bp, Saccharomyces pastorianus
acaaggacttttccgagtataatgg

SEQ ID NO: 138017 - DNA, 25 bp, Saccharomyces pastorianus
gactgatcgtaaaaccaacttacca

SEQ ID NO: 138018 - DNA, 25 bp, Saccharomyces pastorianus
gctttcggtggatttatgtccggtt

SEQ ID NO: 138019 - DNA, 25 bp, Saccharomyces pastorianus
acatctgtcagtacccacagtggag

SEQ ID NO: 138020 - DNA, 25 bp, Saccharomyces pastorianus
agaagatgacggctgcccttcaata

SEQ ID NO: 138021 - DNA, 25 bp, Saccharomyces pastorianus
gacagtcatgattaactctctgcag

SEQ ID NO: 138022 - DNA, 25 bp, Saccharomyces pastorianus
agattgatcttctcgttgctggtgt

SEQ ID NO: 138023 - DNA, 25 bp, Saccharomyces pastorianus
gatgtcttttacttggagcagccac

SEQ ID NO: 138024 - DNA, 25 bp, Saccharomyces pastorianus
gtgcatggttatttacgcctccgtt

SEQ ID NO: 138025 - DNA, 25 bp, Saccharomyces pastorianus
aagttgggccgtcgtagatgtcttt

SEQ ID NO: 138026 - DNA, 25 bp, Saccharomyces pastorianus
tcctgcttcttttcactttattctg

SEQ ID NO: 138027 - DNA, 25 bp, Saccharomyces pastorianus
gcttagtgttgacgatcctgctgtg

SEQ ID NO: 138028 - DNA, 25 bp, Saccharomyces pastorianus
tttacattttctgcttttcctgcac

SEQ ID NO: 138029 - DNA, 25 bp, Saccharomyces pastorianus
ctccgttggcgtcacaagactatat

SEQ ID NO: 138030 - DNA, 25 bp, Saccharomyces pastorianus
gagcagccaccatgacggcgtgcat

SEQ ID NO: 138031 - DNA, 25 bp, Saccharomyces pastorianus
attgtgaattttgcttcctgcttct

SEQ ID NO: 138032 - DNA, 25 bp, Saccharomyces pastorianus
caactgttactcctgccgaaatgaa

SEQ ID NO: 138033 - DNA, 25 bp, Saccharomyces pastorianus
gaggttttgctctcagcaactgtta

SEQ ID NO: 138034 - DNA, 25 bp, Saccharomyces pastorianus
ggttcagatttattgggtcctctat

SEQ ID NO: 138035 - DNA, 25 bp, Saccharomyces pastorianus
ccgaaatgaacggattaggcgataa

SEQ ID NO: 138036 - DNA, 25 bp, Saccharomyces pastorianus
gatgaaatcaaatccgttggacgat

SEQ ID NO: 138037 - DNA, 25 bp, Saccharomyces pastorianus
gggtcctctatatggttatcaaacg

SEQ ID NO: 138038 - DNA, 25 bp, Saccharomyces pastorianus
acgattttggatgaacccgagagca

SEQ ID NO: 138039 - DNA, 25 bp, Saccharomyces pastorianus
attgctgacctactgatgatgaaat

SEQ ID NO: 138040 - DNA, 25 bp, Saccharomyces pastorianus
gggacagattaagccagggttcatt

SEQ ID NO: 138041 - DNA, 25 bp, Saccharomyces pastorianus
aagttcaatcggcacaagaggtttt

SEQ ID NO: 138042 - DNA, 25 bp, Saccharomyces pastorianus
aagccagggttcattgctgacctac

SEQ ID NO: 138043 - DNA, 25 bp, Saccharomyces pastorianus
gcagagattcgtcagggatccttga

SEQ ID NO: 138044 - DNA, 25 bp, Saccharomyces pastorianus
tgctagtgcctttgacagctgttca

SEQ ID NO: 138045 - DNA, 25 bp, Saccharomyces pastorianus
ggttgctacttgactccaacactag

SEQ ID NO: 138046 - DNA, 25 bp, Saccharomyces pastorianus
ggcgatctgagatctggtgccctac

SEQ ID NO: 138047 - DNA, 25 bp, Saccharomyces pastorianus
agctgttcatgccactttggtcaag

SEQ ID NO: 138048 - DNA, 25 bp, Saccharomyces pastorianus
gaacgtaccgcagaacttatggcag

SEQ ID NO: 138049 - DNA, 25 bp, Saccharomyces pastorianus
gacatgccatttcccaaactggtgg

SEQ ID NO: 138050 - DNA, 25 bp, Saccharomyces pastorianus
ggatccttgaatggtcccagattaa

SEQ ID NO: 138051 - DNA, 25 bp, Saccharomyces pastorianus
gtggcctctccaactgacaaaatat

SEQ ID NO: 138052 - DNA, 25 bp, Saccharomyces pastorianus
aatttagtgcattcttgggacctga

SEQ ID NO: 138053 - DNA, 25 bp, Saccharomyces pastorianus
gatggtgttcccgaatgctacaaag

SEQ ID NO: 138054 - DNA, 25 bp, Saccharomyces pastorianus
agaagccatttctagcactataagt

SEQ ID NO: 138055 - DNA, 25 bp, Saccharomyces pastorianus
atcgcagtctttgggctctgtcgaa

SEQ ID NO: 138056 - DNA, 25 bp, Saccharomyces pastorianus
gattccttatcgcaggcaagcatta

SEQ ID NO: 138057 - DNA, 25 bp, Saccharomyces pastorianus
caagtggcatagttgctttggctaa

SEQ ID NO: 138058 - DNA, 25 bp, Saccharomyces pastorianus
aatcagtgcgcaaatattctctcgg

SEQ ID NO: 138059 - DNA, 25 bp, Saccharomyces pastorianus
ggaggcatacgttaaatcgcagtct

SEQ ID NO: 138060 - DNA, 25 bp, Saccharomyces pastorianus
gccaattgctctacaaggcttcaag

SEQ ID NO: 138061 - DNA, 25 bp, Saccharomyces pastorianus
gtctttctttctttgccgcatatca

SEQ ID NO: 138062 - DNA, 25 bp, Saccharomyces pastorianus
gaataatcctgctacgcagccaatt

SEQ ID NO: 138063 - DNA, 25 bp, Saccharomyces pastorianus
tatttttaaatacccgttgttgcag

SEQ ID NO: 138064 - DNA, 25 bp, Saccharomyces pastorianus
aaccattttgatcttgctgtctaat

SEQ ID NO: 138065 - DNA, 25 bp, Saccharomyces pastorianus
tattctcaacagcataaccagcatt

SEQ ID NO: 138066 - DNA, 25 bp, Saccharomyces pastorianus
atagtgactggaataggctcatcat

SEQ ID NO: 138067 - DNA, 25 bp, Saccharomyces pastorianus
agagacgtgtcagccctactagagg

SEQ ID NO: 138068 - DNA, 25 bp, Saccharomyces pastorianus
gttcagaaacattacactctccatg

SEQ ID NO: 138069 - DNA, 25 bp, Saccharomyces pastorianus
gaagactcttccaaagctataacag

SEQ ID NO: 138070 - DNA, 25 bp, Saccharomyces pastorianus
ggctcatcatattttgacactacat

SEQ ID NO: 138071 - DNA, 25 bp, Saccharomyces pastorianus
tgaaatctttattcttgcttctaag

SEQ ID NO: 138072 - DNA, 25 bp, Saccharomyces pastorianus
tgacactacattcatgggctcaaat

SEQ ID NO: 138073 - DNA, 25 bp, Saccharomyces pastorianus
gaacttcaagtctaaaaggcgcctt

SEQ ID NO: 138074 - DNA, 25 bp, Saccharomyces pastorianus
ttccaaattccggtcctgtcaagaa

SEQ ID NO: 138075 - DNA, 25 bp, Saccharomyces pastorianus
gagatatctcgcactttttccaaat

SEQ ID NO: 138076 - DNA, 25 bp, Saccharomyces pastorianus
aggaaatacacactcaactggatga

SEQ ID NO: 138077 - DNA, 25 bp, Saccharomyces pastorianus
atacggatgatttagaactgcattc

SEQ ID NO: 138078 - DNA, 25 bp, Saccharomyces pastorianus
ggacgaatatcctggtgtagttttt

SEQ ID NO: 138079 - DNA, 25 bp, Saccharomyces pastorianus
gtctcagctctatacgatttccata

SEQ ID NO: 138080 - DNA, 25 bp, Saccharomyces pastorianus
gtttatcagtttgtctcagctctat

SEQ ID NO: 138081 - DNA, 25 bp, Saccharomyces pastorianus
gtagtttttgattccgcagcattct

SEQ ID NO: 138082 - DNA, 25 bp, Saccharomyces pastorianus
ttaacttggataaccaccaatttgg

SEQ ID NO: 138083 - DNA, 25 bp, Saccharomyces pastorianus
agaactgcattcagtgtttatcagt

SEQ ID NO: 138084 - DNA, 25 bp, Saccharomyces pastorianus
tatacgatttccatatggcgtttga

SEQ ID NO: 138085 - DNA, 25 bp, Saccharomyces pastorianus
gtgaggtatatctccgtactagaaa

SEQ ID NO: 138086 - DNA, 25 bp, Saccharomyces pastorianus
aatggtcacgatttattaacttgga

SEQ ID NO: 138087 - DNA, 25 bp, Saccharomyces pastorianus
tccacaaggtcatcatttacacgag

SEQ ID NO: 138088 - DNA, 25 bp, Saccharomyces pastorianus
gtccacaaggtcatcatttacacga

SEQ ID NO: 138089 - DNA, 25 bp, Saccharomyces pastorianus
ggcgtccacaaggtcatcatttaca

SEQ ID NO: 138090 - DNA, 25 bp, Saccharomyces pastorianus
gctgtctcagctactatgtgtacga

SEQ ID NO: 138091 - DNA, 25 bp, Saccharomyces pastorianus
ggctgtctcagctactatgtgtacg

SEQ ID NO: 138092 - DNA, 25 bp, Saccharomyces pastorianus
gtaggctgtctcagctactatgtgt

SEQ ID NO: 138093 - DNA, 25 bp, Saccharomyces pastorianus
gcgtccacaaggtcatcatttacac

SEQ ID NO: 138094 - DNA, 25 bp, Saccharomyces pastorianus
gggcgtccacaaggtcatcatttac

SEQ ID NO: 138095 - DNA, 25 bp, Saccharomyces pastorianus
ctgtctcagctactatgtgtacgaa

SEQ ID NO: 138096 - DNA, 25 bp, Saccharomyces pastorianus
aggctgtctcagctactatgtgtac

SEQ ID NO: 138097 - DNA, 25 bp, Saccharomyces pastorianus
acaaggtcatcatttacacgagctc

SEQ ID NO: 138098 - DNA, 25 bp, Saccharomyces pastorianus
tggcattagcttcttcttctacaga

SEQ ID NO: 138099 - DNA, 25 bp, Saccharomyces pastorianus
aaacctccacttcctattaaggcag

SEQ ID NO: 138100 - DNA, 25 bp, Saccharomyces pastorianus
agtgaactaggctgcttaacccttc

SEQ ID NO: 138101 - DNA, 25 bp, Saccharomyces pastorianus
acaaagatctgttacgtctccaacg

SEQ ID NO: 138102 - DNA, 25 bp, Saccharomyces pastorianus
gcagaaatgtttcatccccatcatt

SEQ ID NO: 138103 - DNA, 25 bp, Saccharomyces pastorianus
agatacattatcctcaccgacgaag

SEQ ID NO: 138104 - DNA, 25 bp, Saccharomyces pastorianus
gaagtcgaagccctagtccacaaag

SEQ ID NO: 138105 - DNA, 25 bp, Saccharomyces pastorianus
acaactgtctctaacttccaattct

SEQ ID NO: 138106 - DNA, 25 bp, Saccharomyces pastorianus
gtaacagcagcaccgatttaacgat

SEQ ID NO: 138107 - DNA, 25 bp, Saccharomyces pastorianus
taaccctcgtccaaaacgcgaagat

SEQ ID NO: 138108 - DNA, 25 bp, Saccharomyces pastorianus
agcagactcgcttccattgagtaac

SEQ ID NO: 138109 - DNA, 25 bp, Saccharomyces pastorianus
gattcgacttatttgccagcatctg

SEQ ID NO: 138110 - DNA, 25 bp, Saccharomyces pastorianus
tttagatcttactcagttgatccta

SEQ ID NO: 138111 - DNA, 25 bp, Saccharomyces pastorianus
ttggcgataagcaagtttatgactt

SEQ ID NO: 138112 - DNA, 25 bp, Saccharomyces pastorianus
actctggtcacgcaatttatgtctt

SEQ ID NO: 138113 - DNA, 25 bp, Saccharomyces pastorianus
ccagcatctgatgaaattggcgata

SEQ ID NO: 138114 - DNA, 25 bp, Saccharomyces pastorianus
gacttgcttattaatgccctcatgg

SEQ ID NO: 138115 - DNA, 25 bp, Saccharomyces pastorianus
aatgccctcatggatcgattggtaa

SEQ ID NO: 138116 - DNA, 25 bp, Saccharomyces pastorianus
gttgatcctaactctggtcacgcaa

SEQ ID NO: 138117 - DNA, 25 bp, Saccharomyces pastorianus
ctttgattcgacttatttgccagca

SEQ ID NO: 138118 - DNA, 25 bp, Saccharomyces pastorianus
cacgcaatttatgtctttgattcga

SEQ ID NO: 138119 - DNA, 25 bp, Saccharomyces pastorianus
attgccacaggcaccatattcactg

SEQ ID NO: 138120 - DNA, 25 bp, Saccharomyces pastorianus
cccaggaccaggtggtcaagccgct

SEQ ID NO: 138121 - DNA, 25 bp, Saccharomyces pastorianus
agacgttactccagtcccatcagac

SEQ ID NO: 138122 - DNA, 25 bp, Saccharomyces pastorianus
gtatcgaagacgttactccagtccc

SEQ ID NO: 138123 - DNA, 25 bp, Saccharomyces pastorianus
tggtaccagaaccaagaccccagga

SEQ ID NO: 138124 - DNA, 25 bp, Saccharomyces pastorianus
gaccccaggaccaggtggtcaagcc

SEQ ID NO: 138125 - DNA, 25 bp, Saccharomyces pastorianus
aaggccgacagagacgaatcctctc

SEQ ID NO: 138126 - DNA, 25 bp, Saccharomyces pastorianus
gaagacgttactccagtcccatcag

SEQ ID NO: 138127 - DNA, 25 bp, Saccharomyces pastorianus
atcgaagacgttactccagtcccat

SEQ ID NO: 138128 - DNA, 25 bp, Saccharomyces pastorianus
aaagtcaaggccgacagagacgaat

SEQ ID NO: 138129 - DNA, 25 bp, Saccharomyces pastorianus
cgacagagacgaatcctctccatac

SEQ ID NO: 138130 - DNA, 25 bp, Saccharomyces pastorianus
tggtggtaccagaaccaagacccca

SEQ ID NO: 138131 - DNA, 25 bp, Saccharomyces pastorianus
gctaagaagcaaaacagaccattgc

SEQ ID NO: 138132 - DNA, 25 bp, Saccharomyces pastorianus
taagaagcaaaacagaccattgcca

SEQ ID NO: 138133 - DNA, 25 bp, Saccharomyces pastorianus
ggctaagaagcaaaacagaccattg

SEQ ID NO: 138134 - DNA, 25 bp, Saccharomyces pastorianus
aggctaagaagcaaaacagaccatt

SEQ ID NO: 138135 - DNA, 25 bp, Saccharomyces pastorianus
ctaagaagcaaaacagaccattgcc

SEQ ID NO: 138136 - DNA, 25 bp, Saccharomyces pastorianus
agaagcaaaacagaccattgccaca

SEQ ID NO: 138137 - DNA, 25 bp, Saccharomyces pastorianus
aagaagcaaaacagaccattgccac

SEQ ID NO: 138138 - DNA, 25 bp, Saccharomyces pastorianus
gcaaaacagaccattgccacaatgg

SEQ ID NO: 138139 - DNA, 25 bp, Saccharomyces pastorianus
aagcaaaacagaccattgccacaat

SEQ ID NO: 138140 - DNA, 25 bp, Saccharomyces pastorianus
gaagcaaaacagaccattgccacaa

SEQ ID NO: 138141 - DNA, 25 bp, Saccharomyces pastorianus
agcaaaacagaccattgccacaatg

SEQ ID NO: 138142 - DNA, 25 bp, Saccharomyces pastorianus
acgcgtcactaagaataaggaaaat

SEQ ID NO: 138143 - DNA, 25 bp, Saccharomyces pastorianus
cgcgaaaacgcgtcactaagaataa

SEQ ID NO: 138144 - DNA, 25 bp, Saccharomyces pastorianus
acttgaaactgacgcgcgaaaacgc

SEQ ID NO: 138145 - DNA, 25 bp, Saccharomyces pastorianus
aactgacgcgcgaaaacgcgtcact

SEQ ID NO: 138146 - DNA, 25 bp, Saccharomyces pastorianus
aacttgaaactgacgcgcgaaaacg

SEQ ID NO: 138147 - DNA, 25 bp, Saccharomyces pastorianus
gcgtcactaagaataaggaaaatgc

SEQ ID NO: 138148 - DNA, 25 bp, Saccharomyces pastorianus
gcgaaaacgcgtcactaagaataag

SEQ ID NO: 138149 - DNA, 25 bp, Saccharomyces pastorianus
gcgcgaaaacgcgtcactaagaata

SEQ ID NO: 138150 - DNA, 25 bp, Saccharomyces pastorianus
gacgcgcgaaaacgcgtcactaaga

SEQ ID NO: 138151 - DNA, 25 bp, Saccharomyces pastorianus
gaaaacgcgtcactaagaataagga

SEQ ID NO: 138152 - DNA, 25 bp, Saccharomyces pastorianus
cgaaaacgcgtcactaagaataagg

SEQ ID NO: 138153 - DNA, 25 bp, Saccharomyces pastorianus
tatattataccttctatcaccgaaa

SEQ ID NO: 138154 - DNA, 25 bp, Saccharomyces pastorianus
tatctccataatagtttgcgcgtac

SEQ ID NO: 138155 - DNA, 25 bp, Saccharomyces pastorianus
ggcatatattataccttctatcacc

SEQ ID NO: 138156 - DNA, 25 bp, Saccharomyces pastorianus
gaatatctccataatagtttgcgcg

SEQ ID NO: 138157 - DNA, 25 bp, Saccharomyces pastorianus
gtcatacacctcacaggcatatatt

SEQ ID NO: 138158 - DNA, 25 bp, Saccharomyces pastorianus
agggtcatacacctcacaggcatat

SEQ ID NO: 138159 - DNA, 25 bp, Saccharomyces pastorianus
atcaccgaaaaagcttcttcttctt

SEQ ID NO: 138160 - DNA, 25 bp, Saccharomyces pastorianus
ataccttctatcaccgaaaaagctt

SEQ ID NO: 138161 - DNA, 25 bp, Saccharomyces pastorianus
ccataatagtttgcgcgtactgtcc

SEQ ID NO: 138162 - DNA, 25 bp, Saccharomyces pastorianus
gggtacagggtcatacacctcacag

SEQ ID NO: 138163 - DNA, 25 bp, Saccharomyces pastorianus
cttcttccttgaatatctccataat

SEQ ID NO: 138164 - DNA, 25 bp, Saccharomyces pastorianus
aacagatgtcatcttgcctggtaag

SEQ ID NO: 138165 - DNA, 25 bp, Saccharomyces pastorianus
gcataccgtagaacctcctgaagat

SEQ ID NO: 138166 - DNA, 25 bp, Saccharomyces pastorianus
gaaactgagagtgcgcttacattga

SEQ ID NO: 138167 - DNA, 25 bp, Saccharomyces pastorianus
tggtacaggccttgtcgtgcgagaa

SEQ ID NO: 138168 - DNA, 25 bp, Saccharomyces pastorianus
gaccctaaaaggaccatctggctgt

SEQ ID NO: 138169 - DNA, 25 bp, Saccharomyces pastorianus
gtaaggatgctatcaccactcaaat

SEQ ID NO: 138170 - DNA, 25 bp, Saccharomyces pastorianus
agctgactagtcacacatgggccga

SEQ ID NO: 138171 - DNA, 25 bp, Saccharomyces pastorianus
ggcgccaattcttttgacgcaaaac

SEQ ID NO: 138172 - DNA, 25 bp, Saccharomyces pastorianus
gacttggatatgtggcttcatcagt

SEQ ID NO: 138173 - DNA, 25 bp, Saccharomyces pastorianus
tagctcactaacttctacggaaagg

SEQ ID NO: 138174 - DNA, 25 bp, Saccharomyces pastorianus
ggaaagggatactccgccaagcaca

SEQ ID NO: 138175 - DNA, 25 bp, Saccharomyces pastorianus
aatgaattttttgactaacgagcta

SEQ ID NO: 138176 - DNA, 25 bp, Saccharomyces pastorianus
ggtcaatccgaagactgtacagtcg

SEQ ID NO: 138177 - DNA, 25 bp, Saccharomyces pastorianus
aggagtcatattttcgctactaacg

SEQ ID NO: 138178 - DNA, 25 bp, Saccharomyces pastorianus
ggaaatctctgaccaaaagccaatt

SEQ ID NO: 138179 - DNA, 25 bp, Saccharomyces pastorianus
gtatgctatcgaaacctgaaacttt

SEQ ID NO: 138180 - DNA, 25 bp, Saccharomyces pastorianus
ggttcagaaattgccatatcatcat

SEQ ID NO: 138181 - DNA, 25 bp, Saccharomyces pastorianus
atcatcattgggttataggagtcat

SEQ ID NO: 138182 - DNA, 25 bp, Saccharomyces pastorianus
atcaggtcgcagatagaccatttca

SEQ ID NO: 138183 - DNA, 25 bp, Saccharomyces pastorianus
cattcttggtgggtttggtcaatcc

SEQ ID NO: 138184 - DNA, 25 bp, Saccharomyces pastorianus
agtcgatgacccagagagccattca

SEQ ID NO: 138185 - DNA, 25 bp, Saccharomyces pastorianus
gagccattcagtccgcagaatcaat

SEQ ID NO: 138186 - DNA, 25 bp, Saccharomyces pastorianus
aacgatcacattgcaaggacttctc

SEQ ID NO: 138187 - DNA, 25 bp, Saccharomyces pastorianus
acttgcctgctatttggttgctaaa

SEQ ID NO: 138188 - DNA, 25 bp, Saccharomyces pastorianus
aactgttcatgttgggctagtggat

SEQ ID NO: 138189 - DNA, 25 bp, Saccharomyces pastorianus
atctctattctactttccacacttt

SEQ ID NO: 138190 - DNA, 25 bp, Saccharomyces pastorianus
aatgtcgtctctttcatatccgatg

SEQ ID NO: 138191 - DNA, 25 bp, Saccharomyces pastorianus
acgatttattggctgcaattccaga

SEQ ID NO: 138192 - DNA, 25 bp, Saccharomyces pastorianus
tgtttgaattcgaaatgcctactga

SEQ ID NO: 138193 - DNA, 25 bp, Saccharomyces pastorianus
atatccaaccaatgccaactgttca

SEQ ID NO: 138194 - DNA, 25 bp, Saccharomyces pastorianus
attgggtactatgacttgcctgcta

SEQ ID NO: 138195 - DNA, 25 bp, Saccharomyces pastorianus
gtttctgctgatactgttaacgatt

SEQ ID NO: 138196 - DNA, 25 bp, Saccharomyces pastorianus
atccgatgccactccattcaatgga

SEQ ID NO: 138197 - DNA, 25 bp, Saccharomyces pastorianus
agttctaacggtactggcagcgcca

SEQ ID NO: 138198 - DNA, 25 bp, Saccharomyces pastorianus
ggacctcagtcgtaccaaaagttgg

SEQ ID NO: 138199 - DNA, 25 bp, Saccharomyces pastorianus
gtaagaacgctccactagcagacta

SEQ ID NO: 138200 - DNA, 25 bp, Saccharomyces pastorianus
atgttggttttacaggctcctacgt

SEQ ID NO: 138201 - DNA, 25 bp, Saccharomyces pastorianus
tgattggaaccgtcttgcctactat

SEQ ID NO: 138202 - DNA, 25 bp, Saccharomyces pastorianus
gaagctaccgttttggcagatggca

SEQ ID NO: 138203 - DNA, 25 bp, Saccharomyces pastorianus
gaaatgctttgtcctacgctagttc

SEQ ID NO: 138204 - DNA, 25 bp, Saccharomyces pastorianus
tttatgttgcacacagtcgctgcca

SEQ ID NO: 138205 - DNA, 25 bp, Saccharomyces pastorianus
tgaagcttccccttgtttaggaaat

SEQ ID NO: 138206 - DNA, 25 bp, Saccharomyces pastorianus
tgcctactatgagtccagttccaaa

SEQ ID NO: 138207 - DNA, 25 bp, Saccharomyces pastorianus
gcagactatttatccgttcatttcc

SEQ ID NO: 138208 - DNA, 25 bp, Saccharomyces pastorianus
gttcttacagtattggcaaccacat

SEQ ID NO: 138209 - DNA, 25 bp, Saccharomyces pastorianus
taaaacaaaacatctagccgcgccc

SEQ ID NO: 138210 - DNA, 25 bp, Saccharomyces pastorianus
ttgtttttggaatcttgtgccccgt

SEQ ID NO: 138211 - DNA, 25 bp, Saccharomyces pastorianus
aaatgagtgtgcctgtccaaccttg

SEQ ID NO: 138212 - DNA, 25 bp, Saccharomyces pastorianus
gaagtcctccaagagattcgcgtca

SEQ ID NO: 138213 - DNA, 25 bp, Saccharomyces pastorianus
ttcgcgtcatgcagaatttcagtga

SEQ ID NO: 138214 - DNA, 25 bp, Saccharomyces pastorianus
attggaattccacgacttgcaagaa

SEQ ID NO: 138215 - DNA, 25 bp, Saccharomyces pastorianus
tgccgtcgtctatcctaaacgtgaa

SEQ ID NO: 138216 - DNA, 25 bp, Saccharomyces pastorianus
agccgcgcccttcgagaacgatgag

SEQ ID NO: 138217 - DNA, 25 bp, Saccharomyces pastorianus
gaatcttttagcctggtggttctta

SEQ ID NO: 138218 - DNA, 25 bp, Saccharomyces pastorianus
aaggtagcccacgatgtgctggagt

SEQ ID NO: 138219 - DNA, 25 bp, Saccharomyces pastorianus
tacgacgaacacattggtagtcaat

SEQ ID NO: 138220 - DNA, 25 bp, Saccharomyces pastorianus
tccggtactttctacaacttgtacg

SEQ ID NO: 138221 - DNA, 25 bp, Saccharomyces pastorianus
tttgtccggtactttctacaacttg

SEQ ID NO: 138222 - DNA, 25 bp, Saccharomyces pastorianus
gtacgacgaacacattggtagtcaa

SEQ ID NO: 138223 - DNA, 25 bp, Saccharomyces pastorianus
cttgtacgacgaacacattggtagt

SEQ ID NO: 138224 - DNA, 25 bp, Saccharomyces pastorianus
acttgtacgacgaacacattggtag

SEQ ID NO: 138225 - DNA, 25 bp, Saccharomyces pastorianus
ttgtacgacgaacacattggtagtc

SEQ ID NO: 138226 - DNA, 25 bp, Saccharomyces pastorianus
ttgtccggtactttctacaacttgt

SEQ ID NO: 138227 - DNA, 25 bp, Saccharomyces pastorianus
gatgtcttctaccaatgtttgtccg

SEQ ID NO: 138228 - DNA, 25 bp, Saccharomyces pastorianus
tgtacgacgaacacattggtagtca

SEQ ID NO: 138229 - DNA, 25 bp, Saccharomyces pastorianus
tgtccggtactttctacaacttgta

SEQ ID NO: 138230 - DNA, 25 bp, Saccharomyces pastorianus
agacggtaacttggctattggtgac

SEQ ID NO: 138231 - DNA, 25 bp, Saccharomyces pastorianus
gctggttggtctataactccagacg

SEQ ID NO: 138232 - DNA, 25 bp, Saccharomyces pastorianus
gttggtctataactccagacggtaa

SEQ ID NO: 138233 - DNA, 25 bp, Saccharomyces pastorianus
aactccagacggtaacttggctatt

SEQ ID NO: 138234 - DNA, 25 bp, Saccharomyces pastorianus
tggttggtctataactccagacggt

SEQ ID NO: 138235 - DNA, 25 bp, Saccharomyces pastorianus
gtaacttggctattggtgacaatga

SEQ ID NO: 138236 - DNA, 25 bp, Saccharomyces pastorianus
cggtaacttggctattggtgacaat

SEQ ID NO: 138237 - DNA, 25 bp, Saccharomyces pastorianus
cagacggtaacttggctattggtga

SEQ ID NO: 138238 - DNA, 25 bp, Saccharomyces pastorianus
ggtctataactccagacggtaactt

SEQ ID NO: 138239 - DNA, 25 bp, Saccharomyces pastorianus
ggctattggtgacaatgatgtcttc

SEQ ID NO: 138240 - DNA, 25 bp, Saccharomyces pastorianus
tataactccagacggtaacttggct

SEQ ID NO: 138241 - DNA, 25 bp, Saccharomyces pastorianus
gaaggtgagttttatagtcgctcct

SEQ ID NO: 138242 - DNA, 25 bp, Saccharomyces pastorianus
ttacttggaaaaataaagcgacaat

SEQ ID NO: 138243 - DNA, 25 bp, Saccharomyces pastorianus
aggtgagttttatagtcgctcctac

SEQ ID NO: 138244 - DNA, 25 bp, Saccharomyces pastorianus
gttttatagtcgctcctacagtgat

SEQ ID NO: 138245 - DNA, 25 bp, Saccharomyces pastorianus
ttttatagtcgctcctacagtgatg

SEQ ID NO: 138246 - DNA, 25 bp, Saccharomyces pastorianus
tgagttttatagtcgctcctacagt

SEQ ID NO: 138247 - DNA, 25 bp, Saccharomyces pastorianus
aaggtgagttttatagtcgctccta

SEQ ID NO: 138248 - DNA, 25 bp, Saccharomyces pastorianus
aagcgacaatgaaggtgagttttat

SEQ ID NO: 138249 - DNA, 25 bp, Saccharomyces pastorianus
ggtgagttttatagtcgctcctaca

SEQ ID NO: 138250 - DNA, 25 bp, Saccharomyces pastorianus
gagttttatagtcgctcctacagtg

SEQ ID NO: 138251 - DNA, 25 bp, Saccharomyces pastorianus
gtgagttttatagtcgctcctacag

SEQ ID NO: 138252 - DNA, 25 bp, Saccharomyces pastorianus
gcattctgaaacgaccgagtctctc

SEQ ID NO: 138253 - DNA, 25 bp, Saccharomyces pastorianus
atgttgaaaattgcatcgctgaaaa

SEQ ID NO: 138254 - DNA, 25 bp, Saccharomyces pastorianus
gaaagttgcattctgaaacgaccga

SEQ ID NO: 138255 - DNA, 25 bp, Saccharomyces pastorianus
ttgcattctgaaacgaccgagtctc

SEQ ID NO: 138256 - DNA, 25 bp, Saccharomyces pastorianus
tgcattctgaaacgaccgagtctct

SEQ ID NO: 138257 - DNA, 25 bp, Saccharomyces pastorianus
attctgaaacgaccgagtctctctt

SEQ ID NO: 138258 - DNA, 25 bp, Saccharomyces pastorianus
aagttgcattctgaaacgaccgagt

SEQ ID NO: 138259 - DNA, 25 bp, Saccharomyces pastorianus
tctgaaacgaccgagtctctcttgc

SEQ ID NO: 138260 - DNA, 25 bp, Saccharomyces pastorianus
agtctctcttgcccgcctaacaaaa

SEQ ID NO: 138261 - DNA, 25 bp, Saccharomyces pastorianus
gttgcattctgaaacgaccgagtct

SEQ ID NO: 138262 - DNA, 25 bp, Saccharomyces pastorianus
gaaacgaccgagtctctcttgcccg

SEQ ID NO: 138263 - DNA, 25 bp, Saccharomyces pastorianus
gcggtgtgctaaatttgaacccgtt

SEQ ID NO: 138264 - DNA, 25 bp, Saccharomyces pastorianus
ggatcgtctttaccgggtccttcag

SEQ ID NO: 138265 - DNA, 25 bp, Saccharomyces pastorianus
taaaagcatacagaactcccaagaa

SEQ ID NO: 138266 - DNA, 25 bp, Saccharomyces pastorianus
tatgctacaccccttcataacaaag

SEQ ID NO: 138267 - DNA, 25 bp, Saccharomyces pastorianus
gagtttacaggtgagtggtttcctc

SEQ ID NO: 138268 - DNA, 25 bp, Saccharomyces pastorianus
gaatagggagtgtttgatccacttt

SEQ ID NO: 138269 - DNA, 25 bp, Saccharomyces pastorianus
ttaccgggtccttcagaaaaacatg

SEQ ID NO: 138270 - DNA, 25 bp, Saccharomyces pastorianus
aaacatgacgatgcaaaaggccagc

SEQ ID NO: 138271 - DNA, 25 bp, Saccharomyces pastorianus
gaactcccaagaacttatcgaccaa

SEQ ID NO: 138272 - DNA, 25 bp, Saccharomyces pastorianus
gatccactttttaggcggtgtgcta

SEQ ID NO: 138273 - DNA, 25 bp, Saccharomyces pastorianus
gaaagttcttcctctacacaaaagc

SEQ ID NO: 138274 - DNA, 25 bp, Saccharomyces pastorianus
ttattgcgatttcccatatgacccg

SEQ ID NO: 138275 - DNA, 25 bp, Saccharomyces pastorianus
gttggtaagcattatcccgttgttg

SEQ ID NO: 138276 - DNA, 25 bp, Saccharomyces pastorianus
gggtggaacccaatgtcaagtatta

SEQ ID NO: 138277 - DNA, 25 bp, Saccharomyces pastorianus
gaacttggctattttcactcaccgt

SEQ ID NO: 138278 - DNA, 25 bp, Saccharomyces pastorianus
agcatcttacgctgttagactcgat

SEQ ID NO: 138279 - DNA, 25 bp, Saccharomyces pastorianus
gccagcgaagagaccattttacgta

SEQ ID NO: 138280 - DNA, 25 bp, Saccharomyces pastorianus
gggtgacgcacctgtacattcaatt

SEQ ID NO: 138281 - DNA, 25 bp, Saccharomyces pastorianus
cctactgctgagacctgacgaaatc

SEQ ID NO: 138282 - DNA, 25 bp, Saccharomyces pastorianus
gtacattcaattggtgtctccctac

SEQ ID NO: 138283 - DNA, 25 bp, Saccharomyces pastorianus
atgccaagggcggattttactacga

SEQ ID NO: 138284 - DNA, 25 bp, Saccharomyces pastorianus
agtgcctatgcatttttgaccgatt

SEQ ID NO: 138285 - DNA, 25 bp, Saccharomyces pastorianus
tacgtatactgctctttcccaaaga

SEQ ID NO: 138286 - DNA, 25 bp, Saccharomyces pastorianus
gattggacttttctaaatgacgttc

SEQ ID NO: 138287 - DNA, 25 bp, Saccharomyces pastorianus
agctacgacgactacactttaaatt

SEQ ID NO: 138288 - DNA, 25 bp, Saccharomyces pastorianus
gacgttcctttcgatcaagacttca

SEQ ID NO: 138289 - DNA, 25 bp, Saccharomyces pastorianus
gtgggaagacccaatatgctttaat

SEQ ID NO: 138290 - DNA, 25 bp, Saccharomyces pastorianus
ccagaagattggaatcggccgcaat

SEQ ID NO: 138291 - DNA, 25 bp, Saccharomyces pastorianus
ggccgcaatggattaacgatacact

SEQ ID NO: 138292 - DNA, 25 bp, Saccharomyces pastorianus
aaactttcccgcaatagctacgacg

SEQ ID NO: 138293 - DNA, 25 bp, Saccharomyces pastorianus
gaagctacaacatcaatggcgagtg

SEQ ID NO: 138294 - DNA, 25 bp, Saccharomyces pastorianus
ggcaaagagttattcctcatacgaa

SEQ ID NO: 138295 - DNA, 25 bp, Saccharomyces pastorianus
gattctgattcttttcacctacgag

SEQ ID NO: 138296 - DNA, 25 bp, Saccharomyces pastorianus
gtaatagcatgattttgggtcccca

SEQ ID NO: 138297 - DNA, 25 bp, Saccharomyces pastorianus
tccatcccggatgagtttggttcat

SEQ ID NO: 138298 - DNA, 25 bp, Saccharomyces pastorianus
ggcatctcatgctcataaatcctga

SEQ ID NO: 138299 - DNA, 25 bp, Saccharomyces pastorianus
tccccaggcagtttcgatgcaagag

SEQ ID NO: 138300 - DNA, 25 bp, Saccharomyces pastorianus
gaaggtatgagttttgtagccgtat

SEQ ID NO: 138301 - DNA, 25 bp, Saccharomyces pastorianus
gatccgaagcgcaaaacccttttga

SEQ ID NO: 138302 - DNA, 25 bp, Saccharomyces pastorianus
tatagtaggcattccccaatatggg

SEQ ID NO: 138303 - DNA, 25 bp, Saccharomyces pastorianus
ggcaaaatcagattccatcccggat

SEQ ID NO: 138304 - DNA, 25 bp, Saccharomyces pastorianus
tgggtccccaaaatcaccttatagt

SEQ ID NO: 138305 - DNA, 25 bp, Saccharomyces pastorianus
tgtagccgtatctcaaccaatgttt

SEQ ID NO: 138306 - DNA, 25 bp, Saccharomyces pastorianus
ttcggtgcagccatatattcttgga

SEQ ID NO: 138307 - DNA, 25 bp, Saccharomyces pastorianus
ttaacccctcatatcatctcaaaga

SEQ ID NO: 138308 - DNA, 25 bp, Saccharomyces pastorianus
acgcaggccttcttggatttgttta

SEQ ID NO: 138309 - DNA, 25 bp, Saccharomyces pastorianus
tatcgccgctaaatattctcctgtt

SEQ ID NO: 138310 - DNA, 25 bp, Saccharomyces pastorianus
gacaacaagatcttggcacacgcca

SEQ ID NO: 138311 - DNA, 25 bp, Saccharomyces pastorianus
aatagccctgaagaatatgcacgtc

SEQ ID NO: 138312 - DNA, 25 bp, Saccharomyces pastorianus
aagctggcttacttggtgttgagag

SEQ ID NO: 138313 - DNA, 25 bp, Saccharomyces pastorianus
gaaccgtacattcattgtgtcgttt

SEQ ID NO: 138314 - DNA, 25 bp, Saccharomyces pastorianus
aagaccgatgttctgtattgtacaa

SEQ ID NO: 138315 - DNA, 25 bp, Saccharomyces pastorianus
gaaatgtctgttcatatcgccgcta

SEQ ID NO: 138316 - DNA, 25 bp, Saccharomyces pastorianus
ggtaatggttctcgcgagcatccta

SEQ ID NO: 138317 - DNA, 25 bp, Saccharomyces pastorianus
actgttactttcatgggtgatctca

SEQ ID NO: 138318 - DNA, 25 bp, Saccharomyces pastorianus
tggaacttaaggacggcacggtctt

SEQ ID NO: 138319 - DNA, 25 bp, Saccharomyces pastorianus
ggtaggcaattatggtgtcccagat

SEQ ID NO: 138320 - DNA, 25 bp, Saccharomyces pastorianus
tgaccgtctggttacgttggaactt

SEQ ID NO: 138321 - DNA, 25 bp, Saccharomyces pastorianus
gtaatagaatccatattgccggttt

SEQ ID NO: 138322 - DNA, 25 bp, Saccharomyces pastorianus
gaatctacgggtgaccgtctggtta

SEQ ID NO: 138323 - DNA, 25 bp, Saccharomyces pastorianus
atcacccctccaatggaatctacgg

SEQ ID NO: 138324 - DNA, 25 bp, Saccharomyces pastorianus
atattgccggtttagttatttctca

SEQ ID NO: 138325 - DNA, 25 bp, Saccharomyces pastorianus
tgtcccagatatgcacttgagagat

SEQ ID NO: 138326 - DNA, 25 bp, Saccharomyces pastorianus
ccgatccatcttatgaaggccagat

SEQ ID NO: 138327 - DNA, 25 bp, Saccharomyces pastorianus
gtgctgagaaatccaccgctggtga

SEQ ID NO: 138328 - DNA, 25 bp, Saccharomyces pastorianus
gatcttagtcatcacttacccattg

SEQ ID NO: 138329 - DNA, 25 bp, Saccharomyces pastorianus
cggacaccaaccaatcgttttcaag

SEQ ID NO: 138330 - DNA, 25 bp, Saccharomyces pastorianus
gctttcatttgacttgtggtttcta

SEQ ID NO: 138331 - DNA, 25 bp, Saccharomyces pastorianus
gaacatattgaccaccttgagggca

SEQ ID NO: 138332 - DNA, 25 bp, Saccharomyces pastorianus
ggatcgtgcaattatcttgcctagt

SEQ ID NO: 138333 - DNA, 25 bp, Saccharomyces pastorianus
gggctatcgctaggttatccggaca

SEQ ID NO: 138334 - DNA, 25 bp, Saccharomyces pastorianus
gcgcttacggtacagttgggctatc

SEQ ID NO: 138335 - DNA, 25 bp, Saccharomyces pastorianus
tagaggtctaccatactcactggat

SEQ ID NO: 138336 - DNA, 25 bp, Saccharomyces pastorianus
gacaggctagaaccaatacagaaga

SEQ ID NO: 138337 - DNA, 25 bp, Saccharomyces pastorianus
tcggtgcccatttaaggaaacagct

SEQ ID NO: 138338 - DNA, 25 bp, Saccharomyces pastorianus
acaaaatcctttatcggtgcccatt

SEQ ID NO: 138339 - DNA, 25 bp, Saccharomyces pastorianus
gggagctcttaagcgtaagaccaca

SEQ ID NO: 138340 - DNA, 25 bp, Saccharomyces pastorianus
aagcctcttccgactctaatgagaa

SEQ ID NO: 138341 - DNA, 25 bp, Saccharomyces pastorianus
aatggtcttaacaactatcctactt

SEQ ID NO: 138342 - DNA, 25 bp, Saccharomyces pastorianus
atttcgataccgattatgacctaga

SEQ ID NO: 138343 - DNA, 25 bp, Saccharomyces pastorianus
gtattcttcattacgcagagtctat

SEQ ID NO: 138344 - DNA, 25 bp, Saccharomyces pastorianus
aaatgagctcgcaaggacgcctgat

SEQ ID NO: 138345 - DNA, 25 bp, Saccharomyces pastorianus
gacctagatcctcgtcatgatttat

SEQ ID NO: 138346 - DNA, 25 bp, Saccharomyces pastorianus
gacgtaactcaaacttccttggatt

SEQ ID NO: 138347 - DNA, 25 bp, Saccharomyces pastorianus
gacagcgatcgcaattatcctgata

SEQ ID NO: 138348 - DNA, 25 bp, Saccharomyces pastorianus
ggaacgttccaggaccatcgatatg

SEQ ID NO: 138349 - DNA, 25 bp, Saccharomyces pastorianus
aacgtatctatcatggcaaccaact

SEQ ID NO: 138350 - DNA, 25 bp, Saccharomyces pastorianus
tttgaacatggtccctatgcatctg

SEQ ID NO: 138351 - DNA, 25 bp, Saccharomyces pastorianus
actggtgcattatcagcagcagcaa

SEQ ID NO: 138352 - DNA, 25 bp, Saccharomyces pastorianus
tcccgcaacatcatccctggtacga

SEQ ID NO: 138353 - DNA, 25 bp, Saccharomyces pastorianus
gcagcaacagcagctcccgcaacat

SEQ ID NO: 138354 - DNA, 25 bp, Saccharomyces pastorianus
aatccagatggtggctgttccactt

SEQ ID NO: 138355 - DNA, 25 bp, Saccharomyces pastorianus
ggctgttccacttgctcttcccagt

SEQ ID NO: 138356 - DNA, 25 bp, Saccharomyces pastorianus
gaaatccagatggtggctgttccac

SEQ ID NO: 138357 - DNA, 25 bp, Saccharomyces pastorianus
cagtccaactgcactggtgcattat

SEQ ID NO: 138358 - DNA, 25 bp, Saccharomyces pastorianus
tgcactggtgcattatcagcagcag

SEQ ID NO: 138359 - DNA, 25 bp, Saccharomyces pastorianus
agatggtggctgttccacttgctct

SEQ ID NO: 138360 - DNA, 25 bp, Saccharomyces pastorianus
tcttcccagtccaactgcactggtg

SEQ ID NO: 138361 - DNA, 25 bp, Saccharomyces pastorianus
ctggtacgacctctcgctttctgaa

SEQ ID NO: 138362 - DNA, 25 bp, Saccharomyces pastorianus
gccgccttagctgcatttgtcatag

SEQ ID NO: 138363 - DNA, 25 bp, Saccharomyces pastorianus
ttcgttccagcgtttaccattagta

SEQ ID NO: 138364 - DNA, 25 bp, Saccharomyces pastorianus
gttatggtcttcatttcttgcaccg

SEQ ID NO: 138365 - DNA, 25 bp, Saccharomyces pastorianus
tgccatctcgtattgcttcacaaaa

SEQ ID NO: 138366 - DNA, 25 bp, Saccharomyces pastorianus
tttcttgcaccggttatgtcgtaac

SEQ ID NO: 138367 - DNA, 25 bp, Saccharomyces pastorianus
aatcttcgttcaagtgccatctcgt

SEQ ID NO: 138368 - DNA, 25 bp, Saccharomyces pastorianus
ggtccgtatgttctacgccattatt

SEQ ID NO: 138369 - DNA, 25 bp, Saccharomyces pastorianus
aattcgacagagtttactgccgcct

SEQ ID NO: 138370 - DNA, 25 bp, Saccharomyces pastorianus
tgggactatttgcttcttcactctt

SEQ ID NO: 138371 - DNA, 25 bp, Saccharomyces pastorianus
tttggcataacattgggctcagctt

SEQ ID NO: 138372 - DNA, 25 bp, Saccharomyces pastorianus
atccatcgtcctcaatgtcatttag

SEQ ID NO: 138373 - DNA, 25 bp, Saccharomyces pastorianus
aaagttcgagcctcatctatccaat

SEQ ID NO: 138374 - DNA, 25 bp, Saccharomyces pastorianus
acgggaaaagttcgagcctcatcta

SEQ ID NO: 138375 - DNA, 25 bp, Saccharomyces pastorianus
aatcacgggaaaagttcgagcctca

SEQ ID NO: 138376 - DNA, 25 bp, Saccharomyces pastorianus
ggaaaagttcgagcctcatctatcc

SEQ ID NO: 138377 - DNA, 25 bp, Saccharomyces pastorianus
tcacgggaaaagttcgagcctcatc

SEQ ID NO: 138378 - DNA, 25 bp, Saccharomyces pastorianus
aaaagttcgagcctcatctatccaa

SEQ ID NO: 138379 - DNA, 25 bp, Saccharomyces pastorianus
aagttcgagcctcatctatccaatt

SEQ ID NO: 138380 - DNA, 25 bp, Saccharomyces pastorianus
gatacctacattaaaaaaatcacgg

SEQ ID NO: 138381 - DNA, 25 bp, Saccharomyces pastorianus
gttcgagcctcatctatccaattca

SEQ ID NO: 138382 - DNA, 25 bp, Saccharomyces pastorianus
agttcgagcctcatctatccaattc

SEQ ID NO: 138383 - DNA, 25 bp, Saccharomyces pastorianus
gggaaaagttcgagcctcatctatc

SEQ ID NO: 138384 - DNA, 25 bp, Saccharomyces pastorianus
agcaacaacgatcacgattctcatg

SEQ ID NO: 138385 - DNA, 25 bp, Saccharomyces pastorianus
gcccatatattttaactcttcaaca

SEQ ID NO: 138386 - DNA, 25 bp, Saccharomyces pastorianus
aaattgcccgcagaaacagagtcta

SEQ ID NO: 138387 - DNA, 25 bp, Saccharomyces pastorianus
gatgatcactcaatacctgatgttg

SEQ ID NO: 138388 - DNA, 25 bp, Saccharomyces pastorianus
gtataaatccagtagcgaccaacac

SEQ ID NO: 138389 - DNA, 25 bp, Saccharomyces pastorianus
gaagacatcgttctaccatatgtga

SEQ ID NO: 138390 - DNA, 25 bp, Saccharomyces pastorianus
ggaacagctattttttgacctggaa

SEQ ID NO: 138391 - DNA, 25 bp, Saccharomyces pastorianus
gaagtcttagatcattcattatcga

SEQ ID NO: 138392 - DNA, 25 bp, Saccharomyces pastorianus
gcgaccaacacaaagcccatatatt

SEQ ID NO: 138393 - DNA, 25 bp, Saccharomyces pastorianus
gattctcatgctatgtgctcaccaa

SEQ ID NO: 138394 - DNA, 25 bp, Saccharomyces pastorianus
aatttggccctttgtcaactaccag

SEQ ID NO: 138395 - DNA, 25 bp, Saccharomyces pastorianus
aagtactttttcatccacattggcc

SEQ ID NO: 138396 - DNA, 25 bp, Saccharomyces pastorianus
gagattttggagtcttcgctgcaga

SEQ ID NO: 138397 - DNA, 25 bp, Saccharomyces pastorianus
gaaggaatccctatctaataaatct

SEQ ID NO: 138398 - DNA, 25 bp, Saccharomyces pastorianus
gtgcatgtgggtacttgggccataa

SEQ ID NO: 138399 - DNA, 25 bp, Saccharomyces pastorianus
gcccaatgtggaactagtaacggta

SEQ ID NO: 138400 - DNA, 25 bp, Saccharomyces pastorianus
taagacggagttgtgagcccaatgt

SEQ ID NO: 138401 - DNA, 25 bp, Saccharomyces pastorianus
tagactctcgagaaacaggcggatt

SEQ ID NO: 138402 - DNA, 25 bp, Saccharomyces pastorianus
atccacattggcctttatatataga

SEQ ID NO: 138403 - DNA, 25 bp, Saccharomyces pastorianus
tcttcgctgcagattcttgtgttaa

SEQ ID NO: 138404 - DNA, 25 bp, Saccharomyces pastorianus
cggatcccgacaagttctggttgat

SEQ ID NO: 138405 - DNA, 25 bp, Saccharomyces pastorianus
taaagatttggattccctaccggat

SEQ ID NO: 138406 - DNA, 25 bp, Saccharomyces pastorianus
agtgcagcttcagagacattaccct

SEQ ID NO: 138407 - DNA, 25 bp, Saccharomyces pastorianus
aatacaatgcctacagctggcccaa

SEQ ID NO: 138408 - DNA, 25 bp, Saccharomyces pastorianus
ggcattttcaaccatcattcttcat

SEQ ID NO: 138409 - DNA, 25 bp, Saccharomyces pastorianus
aaagattacggcgatcacacaccct

SEQ ID NO: 138410 - DNA, 25 bp, Saccharomyces pastorianus
tgccaccataccatttccactgaaa

SEQ ID NO: 138411 - DNA, 25 bp, Saccharomyces pastorianus
caggctcatcaaaaacggcatcaac

SEQ ID NO: 138412 - DNA, 25 bp, Saccharomyces pastorianus
ttgtccgtcagcagtgcagcttcag

SEQ ID NO: 138413 - DNA, 25 bp, Saccharomyces pastorianus
acaaggtcatatcgcggtcgtcgtc

SEQ ID NO: 138414 - DNA, 25 bp, Saccharomyces pastorianus
ctcacctcagtatatgccgataagg

SEQ ID NO: 138415 - DNA, 25 bp, Saccharomyces pastorianus
ggtcgtcgtcgtactcatctaatag

SEQ ID NO: 138416 - DNA, 25 bp, Saccharomyces pastorianus
gtagcattggcaactgctgccacca

SEQ ID NO: 138417 - DNA, 25 bp, Saccharomyces pastorianus
tcctttttaggagctgaaattgcag

SEQ ID NO: 138418 - DNA, 25 bp, Saccharomyces pastorianus
agtcgatcgattatgatttgctttc

SEQ ID NO: 138419 - DNA, 25 bp, Saccharomyces pastorianus
acacgagagactatactattattta

SEQ ID NO: 138420 - DNA, 25 bp, Saccharomyces pastorianus
aaagctaatttctgatagagcaagc

SEQ ID NO: 138421 - DNA, 25 bp, Saccharomyces pastorianus
caagcggtgaattgccaacaacagc

SEQ ID NO: 138422 - DNA, 25 bp, Saccharomyces pastorianus
atttgtacgccaatcctatgccaaa

SEQ ID NO: 138423 - DNA, 25 bp, Saccharomyces pastorianus
aattgacatcctttttaggagctga

SEQ ID NO: 138424 - DNA, 25 bp, Saccharomyces pastorianus
gattatgatttgctttctacgtgtg

SEQ ID NO: 138425 - DNA, 25 bp, Saccharomyces pastorianus
agcattcttccaaacacgagagact

SEQ ID NO: 138426 - DNA, 25 bp, Saccharomyces pastorianus
tacgtgtgatagacttacccattta

SEQ ID NO: 138427 - DNA, 25 bp, Saccharomyces pastorianus
ttttgtactacaacatccagattac

SEQ ID NO: 138428 - DNA, 25 bp, Saccharomyces pastorianus
aagcgagattttccataatccagag

SEQ ID NO: 138429 - DNA, 25 bp, Saccharomyces pastorianus
gagatccagtatctacattcgaaga

SEQ ID NO: 138430 - DNA, 25 bp, Saccharomyces pastorianus
agttcggttgatcttttcttgggtg

SEQ ID NO: 138431 - DNA, 25 bp, Saccharomyces pastorianus
ttcttgggtgggtcgaaattcttca

SEQ ID NO: 138432 - DNA, 25 bp, Saccharomyces pastorianus
gatagcattttgaccttttccgata

SEQ ID NO: 138433 - DNA, 25 bp, Saccharomyces pastorianus
gaagatagcccatcacagagatgct

SEQ ID NO: 138434 - DNA, 25 bp, Saccharomyces pastorianus
tccgtgctcatatacttgattgtcg

SEQ ID NO: 138435 - DNA, 25 bp, Saccharomyces pastorianus
tcatttcgcaacgacaccgatgtgg

SEQ ID NO: 138436 - DNA, 25 bp, Saccharomyces pastorianus
aacattttgcgcatctctacataag

SEQ ID NO: 138437 - DNA, 25 bp, Saccharomyces pastorianus
gagaacgctgcgtattccgtgctca

SEQ ID NO: 138438 - DNA, 25 bp, Saccharomyces pastorianus
gcgccactggactatgatcttgcta

SEQ ID NO: 138439 - DNA, 25 bp, Saccharomyces pastorianus
agagtcgtacccagaattcttggcc

SEQ ID NO: 138440 - DNA, 25 bp, Saccharomyces pastorianus
cactctgcacccatttgctaataaa

SEQ ID NO: 138441 - DNA, 25 bp, Saccharomyces pastorianus
aacgccatagacgaacctattggat

SEQ ID NO: 138442 - DNA, 25 bp, Saccharomyces pastorianus
accccaagcacaattccatttcatg

SEQ ID NO: 138443 - DNA, 25 bp, Saccharomyces pastorianus
attcttggccctatttagcagggac

SEQ ID NO: 138444 - DNA, 25 bp, Saccharomyces pastorianus
accaagattttaacgtccgaatgtg

SEQ ID NO: 138445 - DNA, 25 bp, Saccharomyces pastorianus
cctgtatactatgattccactctgc

SEQ ID NO: 138446 - DNA, 25 bp, Saccharomyces pastorianus
agatctcatttcctaccgatattga

SEQ ID NO: 138447 - DNA, 25 bp, Saccharomyces pastorianus
gttgcccacctccagtttctatttt

SEQ ID NO: 138448 - DNA, 25 bp, Saccharomyces pastorianus
caggcgttcaacgttgtcgaaacat

SEQ ID NO: 138449 - DNA, 25 bp, Saccharomyces pastorianus
ggatcatattccacttcaccaatgg

SEQ ID NO: 138450 - DNA, 25 bp, Saccharomyces pastorianus
gacagaaccgtccaagcaactaaac

SEQ ID NO: 138451 - DNA, 25 bp, Saccharomyces pastorianus
aaacctcgggtacatctgtgaaagt

SEQ ID NO: 138452 - DNA, 25 bp, Saccharomyces pastorianus
ctgtagagacatttggacgcgaact

SEQ ID NO: 138453 - DNA, 25 bp, Saccharomyces pastorianus
atatggcccattttctcccaaatgg

SEQ ID NO: 138454 - DNA, 25 bp, Saccharomyces pastorianus
gactggaaacgcatctagtacccta

SEQ ID NO: 138455 - DNA, 25 bp, Saccharomyces pastorianus
aaccatttggtttctgactgtattg

SEQ ID NO: 138456 - DNA, 25 bp, Saccharomyces pastorianus
atttcatcgtaagtcatccggcgaa

SEQ ID NO: 138457 - DNA, 25 bp, Saccharomyces pastorianus
aagttgtctgattccaaacctcggg

SEQ ID NO: 138458 - DNA, 25 bp, Saccharomyces pastorianus
aactggctcaagtgggtcatacttt

SEQ ID NO: 138459 - DNA, 25 bp, Saccharomyces pastorianus
caaatgggcacaccgcacgtttttc

SEQ ID NO: 138460 - DNA, 25 bp, Saccharomyces pastorianus
gtttttcccatgtctgtttggcaga

SEQ ID NO: 138461 - DNA, 25 bp, Saccharomyces pastorianus
gggcgacagagttattcttccattc

SEQ ID NO: 138462 - DNA, 25 bp, Saccharomyces pastorianus
cttcctcaagcatcagtagtacaaa

SEQ ID NO: 138463 - DNA, 25 bp, Saccharomyces pastorianus
actacaagctagttggtcatccaat

SEQ ID NO: 138464 - DNA, 25 bp, Saccharomyces pastorianus
ccatatttggtgaccgagggcgaca

SEQ ID NO: 138465 - DNA, 25 bp, Saccharomyces pastorianus
gacgggtccgtcatgcaaagagtaa

SEQ ID NO: 138466 - DNA, 25 bp, Saccharomyces pastorianus
gattcataatcgtccatatttggtg

SEQ ID NO: 138467 - DNA, 25 bp, Saccharomyces pastorianus
tcagaaatttagctacttcctcaag

SEQ ID NO: 138468 - DNA, 25 bp, Saccharomyces pastorianus
tggccagtggccagaatcacaccta

SEQ ID NO: 138469 - DNA, 25 bp, Saccharomyces pastorianus
ggtcatccaatcaatacttctctgt

SEQ ID NO: 138470 - DNA, 25 bp, Saccharomyces pastorianus
gcggaggtgggtgacattttaaaca

SEQ ID NO: 138471 - DNA, 25 bp, Saccharomyces pastorianus
ataggccatttaccagtcatccatt

SEQ ID NO: 138472 - DNA, 25 bp, Saccharomyces pastorianus
aatctaccagactcgcgaagtttat

SEQ ID NO: 138473 - DNA, 25 bp, Saccharomyces pastorianus
ggattggcatacctacactcgaaag

SEQ ID NO: 138474 - DNA, 25 bp, Saccharomyces pastorianus
aaaggccaaccgctaacgagcttct

SEQ ID NO: 138475 - DNA, 25 bp, Saccharomyces pastorianus
actcgaaaggtattctccacaggga

SEQ ID NO: 138476 - DNA, 25 bp, Saccharomyces pastorianus
gcccgtggtccaacttagaagtcgt

SEQ ID NO: 138477 - DNA, 25 bp, Saccharomyces pastorianus
gaagtcgtcgcagccatgttcaaaa

SEQ ID NO: 138478 - DNA, 25 bp, Saccharomyces pastorianus
gaaattttctggacgcatgcttcga

SEQ ID NO: 138479 - DNA, 25 bp, Saccharomyces pastorianus
agcttctttctcatccttttagtga

SEQ ID NO: 138480 - DNA, 25 bp, Saccharomyces pastorianus
gtctctgggatgcatcgttctggaa

SEQ ID NO: 138481 - DNA, 25 bp, Saccharomyces pastorianus
ggaaagtcaaaatcggcaccaccaa

SEQ ID NO: 138482 - DNA, 25 bp, Saccharomyces pastorianus
aattcctgaggacactttaccattg

SEQ ID NO: 138483 - DNA, 25 bp, Saccharomyces pastorianus
cggtagcttatgtaacgtctcaaga

SEQ ID NO: 138484 - DNA, 25 bp, Saccharomyces pastorianus
ggttcctagcccaaatacggtagct

SEQ ID NO: 138485 - DNA, 25 bp, Saccharomyces pastorianus
gtaaatataccatctccatcttcat

SEQ ID NO: 138486 - DNA, 25 bp, Saccharomyces pastorianus
gacaagacagttccagtgccggtaa

SEQ ID NO: 138487 - DNA, 25 bp, Saccharomyces pastorianus
tactgctaccttaaccgtacaaacg

SEQ ID NO: 138488 - DNA, 25 bp, Saccharomyces pastorianus
ttaaaacaatcttcactacccactt

SEQ ID NO: 138489 - DNA, 25 bp, Saccharomyces pastorianus
aatcgaattcgagtactgctacctt

SEQ ID NO: 138490 - DNA, 25 bp, Saccharomyces pastorianus
gaatctgctctcacaaaattgggaa

SEQ ID NO: 138491 - DNA, 25 bp, Saccharomyces pastorianus
gaaactaatgtgtcttcacctttaa

SEQ ID NO: 138492 - DNA, 25 bp, Saccharomyces pastorianus
taaaatttcttcaaccacggcgtct

SEQ ID NO: 138493 - DNA, 25 bp, Saccharomyces pastorianus
gaagtttggaggtcatcagcacaga

SEQ ID NO: 138494 - DNA, 25 bp, Saccharomyces pastorianus
aaaccatacctgacacaatccgatt

SEQ ID NO: 138495 - DNA, 25 bp, Saccharomyces pastorianus
agtctattttccagtcactcaaggc

SEQ ID NO: 138496 - DNA, 25 bp, Saccharomyces pastorianus
tgaagggtcgaatcgtcgttttgac

SEQ ID NO: 138497 - DNA, 25 bp, Saccharomyces pastorianus
gagactgtgcttgatgttggtttat

SEQ ID NO: 138498 - DNA, 25 bp, Saccharomyces pastorianus
ggcagattaaatgctgatcgcttta

SEQ ID NO: 138499 - DNA, 25 bp, Saccharomyces pastorianus
gaccttcctgatgaaagtgagccct

SEQ ID NO: 138500 - DNA, 25 bp, Saccharomyces pastorianus
gatcacatttattctcatctcctag

SEQ ID NO: 138501 - DNA, 25 bp, Saccharomyces pastorianus
gaactatcatctactttcttcaagt

SEQ ID NO: 138502 - DNA, 25 bp, Saccharomyces pastorianus
aaagccgtcctttatagagactgtg

SEQ ID NO: 138503 - DNA, 25 bp, Saccharomyces pastorianus
catctcctaggtctgaatgaactat

SEQ ID NO: 138504 - DNA, 25 bp, Saccharomyces pastorianus
catttgctgagcatgactggctaaa

SEQ ID NO: 138505 - DNA, 25 bp, Saccharomyces pastorianus
tgactcagcttgtttacccagattc

SEQ ID NO: 138506 - DNA, 25 bp, Saccharomyces pastorianus
tctctccatctctaaagctgctaaa

SEQ ID NO: 138507 - DNA, 25 bp, Saccharomyces pastorianus
aacactacagaagcgatctctccat

SEQ ID NO: 138508 - DNA, 25 bp, Saccharomyces pastorianus
gggtatctcccaagcctaagaataa

SEQ ID NO: 138509 - DNA, 25 bp, Saccharomyces pastorianus
gacaacagctactgattccacattg

SEQ ID NO: 138510 - DNA, 25 bp, Saccharomyces pastorianus
tgttcgcaaatccttatctacacct

SEQ ID NO: 138511 - DNA, 25 bp, Saccharomyces pastorianus
gaacgaaacctccttgagcagaatg

SEQ ID NO: 138512 - DNA, 25 bp, Saccharomyces pastorianus
attcataccgggatggtgttcgcaa

SEQ ID NO: 138513 - DNA, 25 bp, Saccharomyces pastorianus
actgcagccggtgttttgatgtcat

SEQ ID NO: 138514 - DNA, 25 bp, Saccharomyces pastorianus
gatgaaaaattgaccccgtttgagg

SEQ ID NO: 138515 - DNA, 25 bp, Saccharomyces pastorianus
tggtgcagcagatggtctcgattct

SEQ ID NO: 138516 - DNA, 25 bp, Saccharomyces pastorianus
gaatgaacctgcatcaagtcaaatg

SEQ ID NO: 138517 - DNA, 25 bp, Saccharomyces pastorianus
atggatatattttctcagctgtcac

SEQ ID NO: 138518 - DNA, 25 bp, Saccharomyces pastorianus
atattttctcagctgtcacgtgcga

SEQ ID NO: 138519 - DNA, 25 bp, Saccharomyces pastorianus
tgaacctgcatcaagtcaaatggat

SEQ ID NO: 138520 - DNA, 25 bp, Saccharomyces pastorianus
ggtgaagaatgaacctgcatcaagt

SEQ ID NO: 138521 - DNA, 25 bp, Saccharomyces pastorianus
ttctcagctgtcacgtgcgaaaaaa

SEQ ID NO: 138522 - DNA, 25 bp, Saccharomyces pastorianus
gatatattttctcagctgtcacgtg

SEQ ID NO: 138523 - DNA, 25 bp, Saccharomyces pastorianus
attttctcagctgtcacgtgcgaaa

SEQ ID NO: 138524 - DNA, 25 bp, Saccharomyces pastorianus
ggatatattttctcagctgtcacgt

SEQ ID NO: 138525 - DNA, 25 bp, Saccharomyces pastorianus
gaagaatgaacctgcatcaagtcaa

SEQ ID NO: 138526 - DNA, 25 bp, Saccharomyces pastorianus
tatattttctcagctgtcacgtgcg

SEQ ID NO: 138527 - DNA, 25 bp, Saccharomyces pastorianus
gctgcggaccagttacgactcgaaa

SEQ ID NO: 138528 - DNA, 25 bp, Saccharomyces pastorianus
cgtaatattcatttcccactgcagg

SEQ ID NO: 138529 - DNA, 25 bp, Saccharomyces pastorianus
aggagtttcattcttctactgggaa

SEQ ID NO: 138530 - DNA, 25 bp, Saccharomyces pastorianus
aatcaatggcaattacgctcctaaa

SEQ ID NO: 138531 - DNA, 25 bp, Saccharomyces pastorianus
aaatcacgcccatccaaaatcaatg

SEQ ID NO: 138532 - DNA, 25 bp, Saccharomyces pastorianus
ggtgtatgcacctcaatacgtttca

SEQ ID NO: 138533 - DNA, 25 bp, Saccharomyces pastorianus
gacgagccacatgccagatgattta

SEQ ID NO: 138534 - DNA, 25 bp, Saccharomyces pastorianus
tagtgatttcacgtcagctgcggac

SEQ ID NO: 138535 - DNA, 25 bp, Saccharomyces pastorianus
gaaactacatcattccattctccta

SEQ ID NO: 138536 - DNA, 25 bp, Saccharomyces pastorianus
taatgagaccatcacccacgaggaa

SEQ ID NO: 138537 - DNA, 25 bp, Saccharomyces pastorianus
gataaactattctcccttgaccaat

SEQ ID NO: 138538 - DNA, 25 bp, Saccharomyces pastorianus
cttcgacttgggactattggacttc

SEQ ID NO: 138539 - DNA, 25 bp, Saccharomyces pastorianus
taaccccattaactggcctctgtat

SEQ ID NO: 138540 - DNA, 25 bp, Saccharomyces pastorianus
gaaggcatcttctcatttctaggtt

SEQ ID NO: 138541 - DNA, 25 bp, Saccharomyces pastorianus
aaatcattcctggttttgttggcat

SEQ ID NO: 138542 - DNA, 25 bp, Saccharomyces pastorianus
ttataagccttctacgcaagacgta

SEQ ID NO: 138543 - DNA, 25 bp, Saccharomyces pastorianus
attcatagctgtcatatcggttttc

SEQ ID NO: 138544 - DNA, 25 bp, Saccharomyces pastorianus
gttggcaaatgtctctactggttta

SEQ ID NO: 138545 - DNA, 25 bp, Saccharomyces pastorianus
gactgggtactgcttgactgacaaa

SEQ ID NO: 138546 - DNA, 25 bp, Saccharomyces pastorianus
gtcacgatagattcttcacccttaa

SEQ ID NO: 138547 - DNA, 25 bp, Saccharomyces pastorianus
gttggcatactgctcattcatagct

SEQ ID NO: 138548 - DNA, 25 bp, Saccharomyces pastorianus
tttcttgttatcagccagttggttt

SEQ ID NO: 138549 - DNA, 25 bp, Saccharomyces pastorianus
tgtttgctcgcattcatatatggaa

SEQ ID NO: 138550 - DNA, 25 bp, Saccharomyces pastorianus
aaccataccttctaaacacgctaat

SEQ ID NO: 138551 - DNA, 25 bp, Saccharomyces pastorianus
gaaaaattccaaccttatgcctcct

SEQ ID NO: 138552 - DNA, 25 bp, Saccharomyces pastorianus
ctggcatatccagcgtgcaatacat

SEQ ID NO: 138553 - DNA, 25 bp, Saccharomyces pastorianus
tttatgctagtgaaccataccttct

SEQ ID NO: 138554 - DNA, 25 bp, Saccharomyces pastorianus
aagaggactttgtgacagggctcaa

SEQ ID NO: 138555 - DNA, 25 bp, Saccharomyces pastorianus
acagggctcaatggcggttctatga

SEQ ID NO: 138556 - DNA, 25 bp, Saccharomyces pastorianus
acatcaattgctttggtaacttaca

SEQ ID NO: 138557 - DNA, 25 bp, Saccharomyces pastorianus
gcattgaactgggttgctttgcttc

SEQ ID NO: 138558 - DNA, 25 bp, Saccharomyces pastorianus
tgggttgctttgcttctatctatta

SEQ ID NO: 138559 - DNA, 25 bp, Saccharomyces pastorianus
aatactgttaccttgtttgctcgca

SEQ ID NO: 138560 - DNA, 25 bp, Saccharomyces pastorianus
aaggattcctcggtaccgatcatca

SEQ ID NO: 138561 - DNA, 25 bp, Saccharomyces pastorianus
ataagtgtcagtatttccactcccc

SEQ ID NO: 138562 - DNA, 25 bp, Saccharomyces pastorianus
ccgatactttcgtttccatgggtga

SEQ ID NO: 138563 - DNA, 25 bp, Saccharomyces pastorianus
gcatcgcatgtctgaaattcggtat

SEQ ID NO: 138564 - DNA, 25 bp, Saccharomyces pastorianus
tgtgacaaattccaccctttgcaag

SEQ ID NO: 138565 - DNA, 25 bp, Saccharomyces pastorianus
ggagagcattccatagtctttgaag

SEQ ID NO: 138566 - DNA, 25 bp, Saccharomyces pastorianus
gtaccgatcatcaactctctatgtg

SEQ ID NO: 138567 - DNA, 25 bp, Saccharomyces pastorianus
acacacgactctttaaaggcctcca

SEQ ID NO: 138568 - DNA, 25 bp, Saccharomyces pastorianus
aagaacttgtctctgtggctgatcc

SEQ ID NO: 138569 - DNA, 25 bp, Saccharomyces pastorianus
atgtctgccattgatatctttgtta

SEQ ID NO: 138570 - DNA, 25 bp, Saccharomyces pastorianus
aaggcctccaccaatgccaatatat

SEQ ID NO: 138571 - DNA, 25 bp, Saccharomyces pastorianus
gcatatcaaatatacccctgacgaa

SEQ ID NO: 138572 - DNA, 25 bp, Saccharomyces pastorianus
aaagcatatcaaatatacccctgac

SEQ ID NO: 138573 - DNA, 25 bp, Saccharomyces pastorianus
aagactctttcaagaatcctagaaa

SEQ ID NO: 138574 - DNA, 25 bp, Saccharomyces pastorianus
aagcatatcaaatatacccctgacg

SEQ ID NO: 138575 - DNA, 25 bp, Saccharomyces pastorianus
cccatgtatgaaagattctacagta

SEQ ID NO: 138576 - DNA, 25 bp, Saccharomyces pastorianus
gaaagcatatcaaatatacccctga

SEQ ID NO: 138577 - DNA, 25 bp, Saccharomyces pastorianus
catatcaaatatacccctgacgaac

SEQ ID NO: 138578 - DNA, 25 bp, Saccharomyces pastorianus
ctacagtagatataaagactctttc

SEQ ID NO: 138579 - DNA, 25 bp, Saccharomyces pastorianus
tatcaaatatacccctgacgaacta

SEQ ID NO: 138580 - DNA, 25 bp, Saccharomyces pastorianus
atatcaaatatacccctgacgaact

SEQ ID NO: 138581 - DNA, 25 bp, Saccharomyces pastorianus
agcatatcaaatatacccctgacga

SEQ ID NO: 138582 - DNA, 25 bp, Saccharomyces pastorianus
gaatacactttgcaaaacgaggctt

SEQ ID NO: 138583 - DNA, 25 bp, Saccharomyces pastorianus
tggtgtcactgaagcaactgtagat

SEQ ID NO: 138584 - DNA, 25 bp, Saccharomyces pastorianus
gatgtggctaatcctaatagctcta

SEQ ID NO: 138585 - DNA, 25 bp, Saccharomyces pastorianus
aaacggatgtttaggcgccatggac

SEQ ID NO: 138586 - DNA, 25 bp, Saccharomyces pastorianus
gaagcaacctcgagaactttggatt

SEQ ID NO: 138587 - DNA, 25 bp, Saccharomyces pastorianus
gaacctgacgcttgttgagcagatc

SEQ ID NO: 138588 - DNA, 25 bp, Saccharomyces pastorianus
tgatgcctaaccaagagccagatgt

SEQ ID NO: 138589 - DNA, 25 bp, Saccharomyces pastorianus
ggcgccatggacaatatcacacgtg

SEQ ID NO: 138590 - DNA, 25 bp, Saccharomyces pastorianus
gattgcatagacactttggcagtta

SEQ ID NO: 138591 - DNA, 25 bp, Saccharomyces pastorianus
attctatttctactattccttccaa

SEQ ID NO: 138592 - DNA, 25 bp, Saccharomyces pastorianus
aaatctcttcgaggcaaggaactac

SEQ ID NO: 138593 - DNA, 25 bp, Saccharomyces pastorianus
tgacagagtatcacaaccctgccat

SEQ ID NO: 138594 - DNA, 25 bp, Saccharomyces pastorianus
acaaccctgccattgattcggaaga

SEQ ID NO: 138595 - DNA, 25 bp, Saccharomyces pastorianus
gttagatgacattgttctgccaaaa

SEQ ID NO: 138596 - DNA, 25 bp, Saccharomyces pastorianus
agagcccaaaattatgccgccgatt

SEQ ID NO: 138597 - DNA, 25 bp, Saccharomyces pastorianus
atcacctgtccttgaactggcttat

SEQ ID NO: 138598 - DNA, 25 bp, Saccharomyces pastorianus
tgaactggcttatttctacaacggt

SEQ ID NO: 138599 - DNA, 25 bp, Saccharomyces pastorianus
ttatgccgccgattacgaattgagt

SEQ ID NO: 138600 - DNA, 25 bp, Saccharomyces pastorianus
catatccagccgctctttatgagag

SEQ ID NO: 138601 - DNA, 25 bp, Saccharomyces pastorianus
gaaacttactactatccttgacctt

SEQ ID NO: 138602 - DNA, 25 bp, Saccharomyces pastorianus
attcggaagacccagatcaagagct

SEQ ID NO: 138603 - DNA, 25 bp, Saccharomyces pastorianus
actcaatagcaacatcacctgtcct

SEQ ID NO: 138604 - DNA, 25 bp, Saccharomyces pastorianus
gtgccctgtggctgctaaatgaggc

SEQ ID NO: 138605 - DNA, 25 bp, Saccharomyces pastorianus
tgtacacttattttgcgggttgctg

SEQ ID NO: 138606 - DNA, 25 bp, Saccharomyces pastorianus
actttttcctaatagtgccctgtgg

SEQ ID NO: 138607 - DNA, 25 bp, Saccharomyces pastorianus
gtgcaaccttattgcatcctggaaa

SEQ ID NO: 138608 - DNA, 25 bp, Saccharomyces pastorianus
aaattctggaggacgcattactaaa

SEQ ID NO: 138609 - DNA, 25 bp, Saccharomyces pastorianus
gatagtagccttttaccaggttata

SEQ ID NO: 138610 - DNA, 25 bp, Saccharomyces pastorianus
gctgtgctatctattgttggattca

SEQ ID NO: 138611 - DNA, 25 bp, Saccharomyces pastorianus
gcgggttgctgttacttggaaaatt

SEQ ID NO: 138612 - DNA, 25 bp, Saccharomyces pastorianus
gaacgtgcgatccttttagtcaact

SEQ ID NO: 138613 - DNA, 25 bp, Saccharomyces pastorianus
gaaagggcaggcttcgtgattctct

SEQ ID NO: 138614 - DNA, 25 bp, Saccharomyces pastorianus
attggtctcacgcattgtacactta

SEQ ID NO: 138615 - DNA, 25 bp, Saccharomyces pastorianus
ccaggtggttctaacatcaaaaaga

SEQ ID NO: 138616 - DNA, 25 bp, Saccharomyces pastorianus
agaagcggccgacgttatcatcaac

SEQ ID NO: 138617 - DNA, 25 bp, Saccharomyces pastorianus
gacaaagtcaatgatgttgtgtaca

SEQ ID NO: 138618 - DNA, 25 bp, Saccharomyces pastorianus
tcatcaacgtcccaaggaagtctga

SEQ ID NO: 138619 - DNA, 25 bp, Saccharomyces pastorianus
agagaagcggccgacgttatcatca

SEQ ID NO: 138620 - DNA, 25 bp, Saccharomyces pastorianus
aagcggccgacgttatcatcaacgt

SEQ ID NO: 138621 - DNA, 25 bp, Saccharomyces pastorianus
caacgtcccaaggaagtctgacaaa

SEQ ID NO: 138622 - DNA, 25 bp, Saccharomyces pastorianus
gttatcatcaacgtcccaaggaagt

SEQ ID NO: 138623 - DNA, 25 bp, Saccharomyces pastorianus
aaaagattagagaagcggccgacgt

SEQ ID NO: 138624 - DNA, 25 bp, Saccharomyces pastorianus
gtcccaaggaagtctgacaaagtca

SEQ ID NO: 138625 - DNA, 25 bp, Saccharomyces pastorianus
tatcatcaacgtcccaaggaagtct

SEQ ID NO: 138626 - DNA, 25 bp, Saccharomyces pastorianus
agtagcattctctctgacggtgaag

SEQ ID NO: 138627 - DNA, 25 bp, Saccharomyces pastorianus
aaattagctcgtgctccaatcgaaa

SEQ ID NO: 138628 - DNA, 25 bp, Saccharomyces pastorianus
gaagaagctctcgatactgctgtta

SEQ ID NO: 138629 - DNA, 25 bp, Saccharomyces pastorianus
aagtccgtggatctaccgaaggcga

SEQ ID NO: 138630 - DNA, 25 bp, Saccharomyces pastorianus
atgttcctgcctccatttatgaata

SEQ ID NO: 138631 - DNA, 25 bp, Saccharomyces pastorianus
ggacacttcaaacgattccgctaag

SEQ ID NO: 138632 - DNA, 25 bp, Saccharomyces pastorianus
ggtgcaccaacttcttccgaggaag

SEQ ID NO: 138633 - DNA, 25 bp, Saccharomyces pastorianus
atctgctacatatgccggttacgtc

SEQ ID NO: 138634 - DNA, 25 bp, Saccharomyces pastorianus
gaccgagaagtcgatgttcctgcct

SEQ ID NO: 138635 - DNA, 25 bp, Saccharomyces pastorianus
gtgggattgttcgtcgtcaactaga

SEQ ID NO: 138636 - DNA, 25 bp, Saccharomyces pastorianus
aaataactattaccggtgcaccaga

SEQ ID NO: 138637 - DNA, 25 bp, Saccharomyces pastorianus
tattagtgcgaaatccgctagtgct

SEQ ID NO: 138638 - DNA, 25 bp, Saccharomyces pastorianus
aaaagccccttcaagcagtgatgat

SEQ ID NO: 138639 - DNA, 25 bp, Saccharomyces pastorianus
attctgactctaactccagttcgga

SEQ ID NO: 138640 - DNA, 25 bp, Saccharomyces pastorianus
agttcgtccttctttgagttcatta

SEQ ID NO: 138641 - DNA, 25 bp, Saccharomyces pastorianus
gtatacttcatgaccttccaagaaa

SEQ ID NO: 138642 - DNA, 25 bp, Saccharomyces pastorianus
gttaaatccaagaccacctcaaatc

SEQ ID NO: 138643 - DNA, 25 bp, Saccharomyces pastorianus
atgtcgtctcctccgtcagttaaat

SEQ ID NO: 138644 - DNA, 25 bp, Saccharomyces pastorianus
tgtttcaagaggcatcccagatgta

SEQ ID NO: 138645 - DNA, 25 bp, Saccharomyces pastorianus
agttcggactccgtatcggattcca

SEQ ID NO: 138646 - DNA, 25 bp, Saccharomyces pastorianus
acctcaaatccgtctagtatacttc

SEQ ID NO: 138647 - DNA, 25 bp, Saccharomyces pastorianus
tcggattccagttcagattctaaat

SEQ ID NO: 138648 - DNA, 25 bp, Saccharomyces pastorianus
taacatgttcaaaaatccaggaagt

SEQ ID NO: 138649 - DNA, 25 bp, Saccharomyces pastorianus
acgaaacattaagtgatgacgataa

SEQ ID NO: 138650 - DNA, 25 bp, Saccharomyces pastorianus
aaatccaggaagtggcttcccattc

SEQ ID NO: 138651 - DNA, 25 bp, Saccharomyces pastorianus
gggcctaggcaaaataacatgttca

SEQ ID NO: 138652 - DNA, 25 bp, Saccharomyces pastorianus
acaaatcaatgaagcgtacgaaaca

SEQ ID NO: 138653 - DNA, 25 bp, Saccharomyces pastorianus
gaagcgtacgaaacattaagtgatg

SEQ ID NO: 138654 - DNA, 25 bp, Saccharomyces pastorianus
atgtcacaaatcaatgaagcgtacg

SEQ ID NO: 138655 - DNA, 25 bp, Saccharomyces pastorianus
gaatacgatctttccaggtcaaacc

SEQ ID NO: 138656 - DNA, 25 bp, Saccharomyces pastorianus
aaggaatacgatctttccaggtcaa

SEQ ID NO: 138657 - DNA, 25 bp, Saccharomyces pastorianus
gcaacacttttcctcaggggcctag

SEQ ID NO: 138658 - DNA, 25 bp, Saccharomyces pastorianus
ggaaggaatacgatctttccaggtc

SEQ ID NO: 138659 - DNA, 25 bp, Saccharomyces pastorianus
atcctggatccagcaacatatgcat

SEQ ID NO: 138660 - DNA, 25 bp, Saccharomyces pastorianus
cattgattccattctttgtcaggct

SEQ ID NO: 138661 - DNA, 25 bp, Saccharomyces pastorianus
actaagcctgactatttccaaattg

SEQ ID NO: 138662 - DNA, 25 bp, Saccharomyces pastorianus
aactcagatgcgtcgttcaatataa

SEQ ID NO: 138663 - DNA, 25 bp, Saccharomyces pastorianus
ctggctgcgccgttctgtaaaaaga

SEQ ID NO: 138664 - DNA, 25 bp, Saccharomyces pastorianus
agagagctaaactggctgcgccgtt

SEQ ID NO: 138665 - DNA, 25 bp, Saccharomyces pastorianus
gacgttcaactgtcgagacctttgg

SEQ ID NO: 138666 - DNA, 25 bp, Saccharomyces pastorianus
aggcttctagcatgagtccggacgt

SEQ ID NO: 138667 - DNA, 25 bp, Saccharomyces pastorianus
cagacctttgtacttaactcagatg

SEQ ID NO: 138668 - DNA, 25 bp, Saccharomyces pastorianus
gagtccggacgtcaagagagctaaa

SEQ ID NO: 138669 - DNA, 25 bp, Saccharomyces pastorianus
gaaacaatcctcgacaagcatttgg

SEQ ID NO: 138670 - DNA, 25 bp, Saccharomyces pastorianus
tacacgctagaacctctcattgaag

SEQ ID NO: 138671 - DNA, 25 bp, Saccharomyces pastorianus
acagccaaaatcaatccttctagag

SEQ ID NO: 138672 - DNA, 25 bp, Saccharomyces pastorianus
taaagcacaacgttccgatgattag

SEQ ID NO: 138673 - DNA, 25 bp, Saccharomyces pastorianus
aaggcgccttactttgaggagaacg

SEQ ID NO: 138674 - DNA, 25 bp, Saccharomyces pastorianus
aaatacccattttagctgcgccatt

SEQ ID NO: 138675 - DNA, 25 bp, Saccharomyces pastorianus
tgaacccaacagatttgtgcgagtt

SEQ ID NO: 138676 - DNA, 25 bp, Saccharomyces pastorianus
cttctagagatatcactgtgggcga

SEQ ID NO: 138677 - DNA, 25 bp, Saccharomyces pastorianus
ctgcgccattatcatctgtttcatt

SEQ ID NO: 138678 - DNA, 25 bp, Saccharomyces pastorianus
gtacaaggctcattggattggcgtt

SEQ ID NO: 138679 - DNA, 25 bp, Saccharomyces pastorianus
gaacaagtgtgctatctagtggcta

SEQ ID NO: 138680 - DNA, 25 bp, Saccharomyces pastorianus
aagtatttacttgctgaacccaaca

SEQ ID NO: 138681 - DNA, 25 bp, Saccharomyces pastorianus
ttttctcaatggttgctacgatgga

SEQ ID NO: 138682 - DNA, 25 bp, Saccharomyces pastorianus
aatgtcgtgtcaaatttccaggagt

SEQ ID NO: 138683 - DNA, 25 bp, Saccharomyces pastorianus
agggtgacaatccaactgttgcgca

SEQ ID NO: 138684 - DNA, 25 bp, Saccharomyces pastorianus
aatgtgtgttctatggatctggtca

SEQ ID NO: 138685 - DNA, 25 bp, Saccharomyces pastorianus
ggagcagttaccaatagattcatct

SEQ ID NO: 138686 - DNA, 25 bp, Saccharomyces pastorianus
ttggcccaagtatcagttaattttc

SEQ ID NO: 138687 - DNA, 25 bp, Saccharomyces pastorianus
aattttcaattctattccagtggtg

SEQ ID NO: 138688 - DNA, 25 bp, Saccharomyces pastorianus
aaattttggacagcacagggtgaca

SEQ ID NO: 138689 - DNA, 25 bp, Saccharomyces pastorianus
gctagtatcgtataatatccgctgg

SEQ ID NO: 138690 - DNA, 25 bp, Saccharomyces pastorianus
atcttcaatcctttattcactctgg

SEQ ID NO: 138691 - DNA, 25 bp, Saccharomyces pastorianus
attgccaggatttttcccaaactat

SEQ ID NO: 138692 - DNA, 25 bp, Saccharomyces pastorianus
aatatactggtccatgctaccgtgg

SEQ ID NO: 138693 - DNA, 25 bp, Saccharomyces pastorianus
gaagtaagttacctgccttcaccta

SEQ ID NO: 138694 - DNA, 25 bp, Saccharomyces pastorianus
tttgtgatgggattgctgaatggct

SEQ ID NO: 138695 - DNA, 25 bp, Saccharomyces pastorianus
atttcgcgccggcaatatactggtc

SEQ ID NO: 138696 - DNA, 25 bp, Saccharomyces pastorianus
ggcatgcgtcgttttgagatttcat

SEQ ID NO: 138697 - DNA, 25 bp, Saccharomyces pastorianus
ctgccttcacctatcattgtatatt

SEQ ID NO: 138698 - DNA, 25 bp, Saccharomyces pastorianus
atgtccgttgccaatttcgcgccgg

SEQ ID NO: 138699 - DNA, 25 bp, Saccharomyces pastorianus
gcctctattccagcacaagttaagt

SEQ ID NO: 138700 - DNA, 25 bp, Saccharomyces pastorianus
gtggtcaataaactacgcctctatt

SEQ ID NO: 138701 - DNA, 25 bp, Saccharomyces pastorianus
gaacttgtttgatgacggcatgcgt

SEQ ID NO: 138702 - DNA, 25 bp, Saccharomyces pastorianus
taagttgcaaacgttcatcagaagt

SEQ ID NO: 138703 - DNA, 25 bp, Saccharomyces pastorianus
tgatgttccaaacttcttctcagaa

SEQ ID NO: 138704 - DNA, 25 bp, Saccharomyces pastorianus
tacatttttccaattcggtggcaca

SEQ ID NO: 138705 - DNA, 25 bp, Saccharomyces pastorianus
caaaatattccaaccgcctcattaa

SEQ ID NO: 138706 - DNA, 25 bp, Saccharomyces pastorianus
tgttgtcatttcaaggttggtcctg

SEQ ID NO: 138707 - DNA, 25 bp, Saccharomyces pastorianus
gaaataccgctctttatgcatgatt

SEQ ID NO: 138708 - DNA, 25 bp, Saccharomyces pastorianus
gtaacttgattgtacttgcgcgcgt

SEQ ID NO: 138709 - DNA, 25 bp, Saccharomyces pastorianus
tccttcctggaagtggtgcttaaat

SEQ ID NO: 138710 - DNA, 25 bp, Saccharomyces pastorianus
atggcatctgctggttttcaagtac

SEQ ID NO: 138711 - DNA, 25 bp, Saccharomyces pastorianus
aatctcgtgggaaatcgtcaatggt

SEQ ID NO: 138712 - DNA, 25 bp, Saccharomyces pastorianus
taggtcaatttctcgttttccaaat

SEQ ID NO: 138713 - DNA, 25 bp, Saccharomyces pastorianus
gcgttttcttccaagcttgggctat

SEQ ID NO: 138714 - DNA, 25 bp, Saccharomyces pastorianus
gaagctatctcaaatcgccgaatcc

SEQ ID NO: 138715 - DNA, 25 bp, Saccharomyces pastorianus
attcaacagctttgttcactctcaa

SEQ ID NO: 138716 - DNA, 25 bp, Saccharomyces pastorianus
aacgaattatcccatcagcagaccg

SEQ ID NO: 138717 - DNA, 25 bp, Saccharomyces pastorianus
aacagttcgaattgacgcgccaact

SEQ ID NO: 138718 - DNA, 25 bp, Saccharomyces pastorianus
aaacgaatgggatgagctacgcaaa

SEQ ID NO: 138719 - DNA, 25 bp, Saccharomyces pastorianus
ctcgtatcgaggcagaaactatcaa

SEQ ID NO: 138720 - DNA, 25 bp, Saccharomyces pastorianus
gcgccaactacaatcgacatgcaaa

SEQ ID NO: 138721 - DNA, 25 bp, Saccharomyces pastorianus
caaactttgggtgtttctatccaca

SEQ ID NO: 138722 - DNA, 25 bp, Saccharomyces pastorianus
tgggatgcacaactaagcagacagt

SEQ ID NO: 138723 - DNA, 25 bp, Saccharomyces pastorianus
tcactctcaaaaatcccttcaacaa

SEQ ID NO: 138724 - DNA, 25 bp, Saccharomyces pastorianus
gcagaccgccagatacctttaaaaa

SEQ ID NO: 138725 - DNA, 25 bp, Saccharomyces pastorianus
gcacgtgttaacgacatcacagatt

SEQ ID NO: 138726 - DNA, 25 bp, Saccharomyces pastorianus
agtaatgtacgagtccctggattct

SEQ ID NO: 138727 - DNA, 25 bp, Saccharomyces pastorianus
gagtccctggattctacaacagatg

SEQ ID NO: 138728 - DNA, 25 bp, Saccharomyces pastorianus
ggaatatcgtttagccaaggttcaa

SEQ ID NO: 138729 - DNA, 25 bp, Saccharomyces pastorianus
tttcccggcgagctgtatgactata

SEQ ID NO: 138730 - DNA, 25 bp, Saccharomyces pastorianus
gacgttatattgtctaaacaccaca

SEQ ID NO: 138731 - DNA, 25 bp, Saccharomyces pastorianus
gaacaactcctttggtttagatgca

SEQ ID NO: 138732 - DNA, 25 bp, Saccharomyces pastorianus
caaggttcaaggaccattcacgata

SEQ ID NO: 138733 - DNA, 25 bp, Saccharomyces pastorianus
cagaaggcggtgatatctttgcatt

SEQ ID NO: 138734 - DNA, 25 bp, Saccharomyces pastorianus
gcattttatccatttttaccgtcag

SEQ ID NO: 138735 - DNA, 25 bp, Saccharomyces pastorianus
atgggtctttaatcttactcttcaa

SEQ ID NO: 138736 - DNA, 25 bp, Saccharomyces pastorianus
atttcacctaatggacgctctttta

SEQ ID NO: 138737 - DNA, 25 bp, Saccharomyces pastorianus
gggtcgtggctctcttatatgtcac

SEQ ID NO: 138738 - DNA, 25 bp, Saccharomyces pastorianus
ggtttttaaatcaccagctgatgaa

SEQ ID NO: 138739 - DNA, 25 bp, Saccharomyces pastorianus
gtggatagcactttgaacttcagta

SEQ ID NO: 138740 - DNA, 25 bp, Saccharomyces pastorianus
tcattaccagcaccagaggaaaatt

SEQ ID NO: 138741 - DNA, 25 bp, Saccharomyces pastorianus
aatttgagcaccgtatcaacccaaa

SEQ ID NO: 138742 - DNA, 25 bp, Saccharomyces pastorianus
caaaacctccaaaagtattctgctt

SEQ ID NO: 138743 - DNA, 25 bp, Saccharomyces pastorianus
aatgatgctagacccacagcgaaga

SEQ ID NO: 138744 - DNA, 25 bp, Saccharomyces pastorianus
gacaacgttactttatcattaccag

SEQ ID NO: 138745 - DNA, 25 bp, Saccharomyces pastorianus
aagagcgttgattttactggccttc

SEQ ID NO: 138746 - DNA, 25 bp, Saccharomyces pastorianus
tttgaacttcagtacaatctcggaa

SEQ ID NO: 138747 - DNA, 25 bp, Saccharomyces pastorianus
cgaactgcacagtatcggcctaata

SEQ ID NO: 138748 - DNA, 25 bp, Saccharomyces pastorianus
agttggcctatctacggaacagctc

SEQ ID NO: 138749 - DNA, 25 bp, Saccharomyces pastorianus
atggattcttcggttggatttgtca

SEQ ID NO: 138750 - DNA, 25 bp, Saccharomyces pastorianus
cagcaccagaacttattatccaggg

SEQ ID NO: 138751 - DNA, 25 bp, Saccharomyces pastorianus
gatgggagccaatcggattcacaag

SEQ ID NO: 138752 - DNA, 25 bp, Saccharomyces pastorianus
gttaccttcaagatcgagtcgcaca

SEQ ID NO: 138753 - DNA, 25 bp, Saccharomyces pastorianus
gaacagctcgtatccattataaggg

SEQ ID NO: 138754 - DNA, 25 bp, Saccharomyces pastorianus
agggacttgaaaccatccaactgtt

SEQ ID NO: 138755 - DNA, 25 bp, Saccharomyces pastorianus
tttacaacagtattgcagtggcggc

SEQ ID NO: 138756 - DNA, 25 bp, Saccharomyces pastorianus
gagaccagtttcttcttctacgtta

SEQ ID NO: 138757 - DNA, 25 bp, Saccharomyces pastorianus
gagtttttcccatcaattgttattg

SEQ ID NO: 138758 - DNA, 25 bp, Saccharomyces pastorianus
tgtggcatgactgccatcgtacgtt

SEQ ID NO: 138759 - DNA, 25 bp, Saccharomyces pastorianus
tttagttcagcataccaggacacac

SEQ ID NO: 138760 - DNA, 25 bp, Saccharomyces pastorianus
aggacacactctggcgaaaaacctt

SEQ ID NO: 138761 - DNA, 25 bp, Saccharomyces pastorianus
aataagtcattttccagtgctcagg

SEQ ID NO: 138762 - DNA, 25 bp, Saccharomyces pastorianus
aaattcgcgatttcaagttctttga

SEQ ID NO: 138763 - DNA, 25 bp, Saccharomyces pastorianus
ttagaagcagtacatttaacccggg

SEQ ID NO: 138764 - DNA, 25 bp, Saccharomyces pastorianus
tattgcgtcaatcaaggcagccgga

SEQ ID NO: 138765 - DNA, 25 bp, Saccharomyces pastorianus
gtgctcaggaattaaacgaccattt

SEQ ID NO: 138766 - DNA, 25 bp, Saccharomyces pastorianus
gtctgaataccaatgcttgtggcat

SEQ ID NO: 138767 - DNA, 25 bp, Saccharomyces pastorianus
aatacaagtgctctgactgttccaa

SEQ ID NO: 138768 - DNA, 25 bp, Saccharomyces pastorianus
cagccggaacaggtgatttgccaat

SEQ ID NO: 138769 - DNA, 25 bp, Saccharomyces pastorianus
gactagtggtcacaagtttgttcaa

SEQ ID NO: 138770 - DNA, 25 bp, Saccharomyces pastorianus
caaataatgatgacgttttccataa

SEQ ID NO: 138771 - DNA, 25 bp, Saccharomyces pastorianus
atcttaaataccgatatggatttga

SEQ ID NO: 138772 - DNA, 25 bp, Saccharomyces pastorianus
gtttgttcaagatcatcaatcatca

SEQ ID NO: 138773 - DNA, 25 bp, Saccharomyces pastorianus
tgacgttttccataaatactgcaaa

SEQ ID NO: 138774 - DNA, 25 bp, Saccharomyces pastorianus
atgcacggctagcacgagcgcgact

SEQ ID NO: 138775 - DNA, 25 bp, Saccharomyces pastorianus
gtcacaagtttgttcaagatcatca

SEQ ID NO: 138776 - DNA, 25 bp, Saccharomyces pastorianus
cagaaaatcatgaaaacggtaacca

SEQ ID NO: 138777 - DNA, 25 bp, Saccharomyces pastorianus
atggttcgagcacagaaaatcatga

SEQ ID NO: 138778 - DNA, 25 bp, Saccharomyces pastorianus
agcacgagcgcgactagtggtcaca

SEQ ID NO: 138779 - DNA, 25 bp, Saccharomyces pastorianus
gagcgcgactagtggtcacaagttt

SEQ ID NO: 138780 - DNA, 25 bp, Saccharomyces pastorianus
gactagtggtcacaagtttgttcaa

SEQ ID NO: 138781 - DNA, 25 bp, Saccharomyces pastorianus
caaccttgttctaagcatatgcatt

SEQ ID NO: 138782 - DNA, 25 bp, Saccharomyces pastorianus
ctaccacccaaatgttcatctttac

SEQ ID NO: 138783 - DNA, 25 bp, Saccharomyces pastorianus
gtttgttcaagatcatcaatcatca

SEQ ID NO: 138784 - DNA, 25 bp, Saccharomyces pastorianus
atgcacggctagcacgagcgcgact

SEQ ID NO: 138785 - DNA, 25 bp, Saccharomyces pastorianus
gcacgagcgcgactagtggtcacaa

SEQ ID NO: 138786 - DNA, 25 bp, Saccharomyces pastorianus
ggtacaaatcatgcttatcacgaac

SEQ ID NO: 138787 - DNA, 25 bp, Saccharomyces pastorianus
atgacgttttccataaatactgcaa

SEQ ID NO: 138788 - DNA, 25 bp, Saccharomyces pastorianus
tatgcatttagagtcaaagccacct

SEQ ID NO: 138789 - DNA, 25 bp, Saccharomyces pastorianus
atggttcgagcacagaaaatcatga

SEQ ID NO: 138790 - DNA, 25 bp, Saccharomyces pastorianus
ggagagcactgataatcaaccttgt

SEQ ID NO: 138791 - DNA, 25 bp, Saccharomyces pastorianus
tatgggtggtgattgccacgtcaat

SEQ ID NO: 138792 - DNA, 25 bp, Saccharomyces pastorianus
atgcaaggagtacaccgactgccaa

SEQ ID NO: 138793 - DNA, 25 bp, Saccharomyces pastorianus
taacgacgatctgatactgctgccc

SEQ ID NO: 138794 - DNA, 25 bp, Saccharomyces pastorianus
caccacctggatccgatgattgtta

SEQ ID NO: 138795 - DNA, 25 bp, Saccharomyces pastorianus
acttccgcatttgcatctggagcta

SEQ ID NO: 138796 - DNA, 25 bp, Saccharomyces pastorianus
aacaatttccattcggtagcttctg

SEQ ID NO: 138797 - DNA, 25 bp, Saccharomyces pastorianus
gcagctgttgctgatgccgctactt

SEQ ID NO: 138798 - DNA, 25 bp, Saccharomyces pastorianus
ctgctgccctcttccaagaaaaata

SEQ ID NO: 138799 - DNA, 25 bp, Saccharomyces pastorianus
gactgccaacatttcgagttcttga

SEQ ID NO: 138800 - DNA, 25 bp, Saccharomyces pastorianus
ggtagcttctgatccgacaagtccc

SEQ ID NO: 138801 - DNA, 25 bp, Saccharomyces pastorianus
attctaaaagcgacctaccacgtag

SEQ ID NO: 138802 - DNA, 25 bp, Saccharomyces pastorianus
caacaggtgttgtatgagtgtgaca

SEQ ID NO: 138803 - DNA, 25 bp, Saccharomyces pastorianus
atccggccttcttggcaggatagct

SEQ ID NO: 138804 - DNA, 25 bp, Saccharomyces pastorianus
ggccttcttggcaggatagcttttc

SEQ ID NO: 138805 - DNA, 25 bp, Saccharomyces pastorianus
tttttcaatctctctatccggcctt

SEQ ID NO: 138806 - DNA, 25 bp, Saccharomyces pastorianus
gacaaggacactttatatatctttt

SEQ ID NO: 138807 - DNA, 25 bp, Saccharomyces pastorianus
tcttggcaggatagcttttcgtttc

SEQ ID NO: 138808 - DNA, 25 bp, Saccharomyces pastorianus
ttggcaggatagcttttcgtttcaa

SEQ ID NO: 138809 - DNA, 25 bp, Saccharomyces pastorianus
tatctttttcaatctctctatccgg

SEQ ID NO: 138810 - DNA, 25 bp, Saccharomyces pastorianus
cttcttggcaggatagcttttcgtt

SEQ ID NO: 138811 - DNA, 25 bp, Saccharomyces pastorianus
tctatccggccttcttggcaggata

SEQ ID NO: 138812 - DNA, 25 bp, Saccharomyces pastorianus
gtatgagtgtgacaaggacacttta

SEQ ID NO: 138813 - DNA, 25 bp, Saccharomyces pastorianus
aaaggctttagtgttggtgagttca

SEQ ID NO: 138814 - DNA, 25 bp, Saccharomyces pastorianus
caggcggtgaaagaaccagttctgc

SEQ ID NO: 138815 - DNA, 25 bp, Saccharomyces pastorianus
taaaggcatgcataactagatccgt

SEQ ID NO: 138816 - DNA, 25 bp, Saccharomyces pastorianus
ggaaactacgtgtggttctaccgag

SEQ ID NO: 138817 - DNA, 25 bp, Saccharomyces pastorianus
gggctagactacgaccatttatttg

SEQ ID NO: 138818 - DNA, 25 bp, Saccharomyces pastorianus
gaagtaattcccaatggacccaaga

SEQ ID NO: 138819 - DNA, 25 bp, Saccharomyces pastorianus
gccttggccaagttgttacgagaca

SEQ ID NO: 138820 - DNA, 25 bp, Saccharomyces pastorianus
tccaaagtagcaacacaggcggtga

SEQ ID NO: 138821 - DNA, 25 bp, Saccharomyces pastorianus
cagttctgcacaccacgaaggaagt

SEQ ID NO: 138822 - DNA, 25 bp, Saccharomyces pastorianus
gtgagttcaaagacgccttggccaa

SEQ ID NO: 138823 - DNA, 25 bp, Saccharomyces pastorianus
ggacccaagaattactaaaggcatg

SEQ ID NO: 138824 - DNA, 25 bp, Saccharomyces pastorianus
atagaaatgatttaatcggcttgga

SEQ ID NO: 138825 - DNA, 25 bp, Saccharomyces pastorianus
aaatgatttaatcggcttggaattc

SEQ ID NO: 138826 - DNA, 25 bp, Saccharomyces pastorianus
aatgatttaatcggcttggaattca

SEQ ID NO: 138827 - DNA, 25 bp, Saccharomyces pastorianus
gaaatgatttaatcggcttggaatt

SEQ ID NO: 138828 - DNA, 25 bp, Saccharomyces pastorianus
agaaatgatttaatcggcttggaat

SEQ ID NO: 138829 - DNA, 25 bp, Saccharomyces pastorianus
gtgatagaaatgatttaatcggctt

SEQ ID NO: 138830 - DNA, 25 bp, Saccharomyces pastorianus
gatagaaatgatttaatcggcttgg

SEQ ID NO: 138831 - DNA, 25 bp, Saccharomyces pastorianus
tgatttaatcggcttggaattcaaa

SEQ ID NO: 138832 - DNA, 25 bp, Saccharomyces pastorianus
tgatagaaatgatttaatcggcttg

SEQ ID NO: 138833 - DNA, 25 bp, Saccharomyces pastorianus
tagaaatgatttaatcggcttggaa

SEQ ID NO: 138834 - DNA, 25 bp, Saccharomyces pastorianus
tgtgatagaaatgatttaatcggct

SEQ ID NO: 138835 - DNA, 25 bp, Saccharomyces pastorianus
gcagtagtatccgagcgttttcaga

SEQ ID NO: 138836 - DNA, 25 bp, Saccharomyces pastorianus
gatgctatgaacaccttacagagcg

SEQ ID NO: 138837 - DNA, 25 bp, Saccharomyces pastorianus
agtgcttataaaattgccggtggta

SEQ ID NO: 138838 - DNA, 25 bp, Saccharomyces pastorianus
gataggtgcgccgttataggcaaaa

SEQ ID NO: 138839 - DNA, 25 bp, Saccharomyces pastorianus
gaaccctcactaccgaacaatatgg

SEQ ID NO: 138840 - DNA, 25 bp, Saccharomyces pastorianus
aacgatgttgcttaatgcggattta

SEQ ID NO: 138841 - DNA, 25 bp, Saccharomyces pastorianus
attactcctaatcagttcattgcag

SEQ ID NO: 138842 - DNA, 25 bp, Saccharomyces pastorianus
tcattgaatcccgaactaagactag

SEQ ID NO: 138843 - DNA, 25 bp, Saccharomyces pastorianus
cggatttaggacagtttagcggctt

SEQ ID NO: 138844 - DNA, 25 bp, Saccharomyces pastorianus
ggcactgtactgcatgatttgggca

SEQ ID NO: 138845 - DNA, 25 bp, Saccharomyces pastorianus
gtttagcggcttattagaaccctca

SEQ ID NO: 138846 - DNA, 25 bp, Saccharomyces pastorianus
aaggagtctcgtggtgctcatgcga

SEQ ID NO: 138847 - DNA, 25 bp, Saccharomyces pastorianus
cattggcttcaaacatcgggcacga

SEQ ID NO: 138848 - DNA, 25 bp, Saccharomyces pastorianus
ggctcactgaaaacctctcaaatca

SEQ ID NO: 138849 - DNA, 25 bp, Saccharomyces pastorianus
gcttgcgtatcggttcatggagcga

SEQ ID NO: 138850 - DNA, 25 bp, Saccharomyces pastorianus
tggatttagtcgttttcggtcgcgc

SEQ ID NO: 138851 - DNA, 25 bp, Saccharomyces pastorianus
aaacggctgtttctgcttccaaaag

SEQ ID NO: 138852 - DNA, 25 bp, Saccharomyces pastorianus
attacagcctggcttgcctcataag

SEQ ID NO: 138853 - DNA, 25 bp, Saccharomyces pastorianus
ggtcgcgccgttgcaaataccattg

SEQ ID NO: 138854 - DNA, 25 bp, Saccharomyces pastorianus
ggatgtgcacgtttctgataagtca

SEQ ID NO: 138855 - DNA, 25 bp, Saccharomyces pastorianus
taggcgctaactcgctactggattt

SEQ ID NO: 138856 - DNA, 25 bp, Saccharomyces pastorianus
gtaagaaatgctcgcggctcactga

SEQ ID NO: 138857 - DNA, 25 bp, Saccharomyces pastorianus
cttctgtccgatgttgtgtctacaa

SEQ ID NO: 138858 - DNA, 25 bp, Saccharomyces pastorianus
catccaatctttcttctctaatact

SEQ ID NO: 138859 - DNA, 25 bp, Saccharomyces pastorianus
gcctataagacagcccagactttgg

SEQ ID NO: 138860 - DNA, 25 bp, Saccharomyces pastorianus
tttcgacgctttaaggtcactagac

SEQ ID NO: 138861 - DNA, 25 bp, Saccharomyces pastorianus
aactcgttgtcatccaatctttctt

SEQ ID NO: 138862 - DNA, 25 bp, Saccharomyces pastorianus
agaggcacttctgtccgatgttgtg

SEQ ID NO: 138863 - DNA, 25 bp, Saccharomyces pastorianus
gtgctgcggccaacaataatgacca

SEQ ID NO: 138864 - DNA, 25 bp, Saccharomyces pastorianus
gtcactagacgataactccacctct

SEQ ID NO: 138865 - DNA, 25 bp, Saccharomyces pastorianus
gtgtctacaagttcaggtgctgcgg

SEQ ID NO: 138866 - DNA, 25 bp, Saccharomyces pastorianus
aatcttgaattcacatttcgacgct

SEQ ID NO: 138867 - DNA, 25 bp, Saccharomyces pastorianus
ttgaaaccaagacagaggcacttct

SEQ ID NO: 138868 - DNA, 25 bp, Saccharomyces pastorianus
tcattgttattcttctccgcgggct

SEQ ID NO: 138869 - DNA, 25 bp, Saccharomyces pastorianus
tgggttagcaccagctgatcctgaa

SEQ ID NO: 138870 - DNA, 25 bp, Saccharomyces pastorianus
tagcaccagctttattttcatccga

SEQ ID NO: 138871 - DNA, 25 bp, Saccharomyces pastorianus
gccggcttggaggtttcattgttat

SEQ ID NO: 138872 - DNA, 25 bp, Saccharomyces pastorianus
ttttcttctggcttagcaccgaatg

SEQ ID NO: 138873 - DNA, 25 bp, Saccharomyces pastorianus
gaattatcatccttcttttcttctg

SEQ ID NO: 138874 - DNA, 25 bp, Saccharomyces pastorianus
tttctcatcggactttgctccaaaa

SEQ ID NO: 138875 - DNA, 25 bp, Saccharomyces pastorianus
ttccatcttgcttgtcttcatttga

SEQ ID NO: 138876 - DNA, 25 bp, Saccharomyces pastorianus
gaaaatgctggcttagccgttccat

SEQ ID NO: 138877 - DNA, 25 bp, Saccharomyces pastorianus
agagggctggttttgctggttcatt

SEQ ID NO: 138878 - DNA, 25 bp, Saccharomyces pastorianus
tttagaggcatcaccatcctttttc

SEQ ID NO: 138879 - DNA, 25 bp, Saccharomyces pastorianus
taagaggctagtgatcggaatattc

SEQ ID NO: 138880 - DNA, 25 bp, Saccharomyces pastorianus
gacgaagtctacgttcagaattcca

SEQ ID NO: 138881 - DNA, 25 bp, Saccharomyces pastorianus
taagaaaaattcgtcggatcctaat

SEQ ID NO: 138882 - DNA, 25 bp, Saccharomyces pastorianus
gatatcagctgttttagtgagcatg

SEQ ID NO: 138883 - DNA, 25 bp, Saccharomyces pastorianus
aatccgctactagttgacaaagatg

SEQ ID NO: 138884 - DNA, 25 bp, Saccharomyces pastorianus
gggagctcaaacaaagctgttgttc

SEQ ID NO: 138885 - DNA, 25 bp, Saccharomyces pastorianus
ggtgtttccttgtttgagttaatcg

SEQ ID NO: 138886 - DNA, 25 bp, Saccharomyces pastorianus
gagttaatcgttcctatattccaat

SEQ ID NO: 138887 - DNA, 25 bp, Saccharomyces pastorianus
caaagctgttgttcaaacggtaaag

SEQ ID NO: 138888 - DNA, 25 bp, Saccharomyces pastorianus
gacaaagatgctaatggtgtttcct

SEQ ID NO: 138889 - DNA, 25 bp, Saccharomyces pastorianus
gttaacgtcaccttggataatccgc

SEQ ID NO: 138890 - DNA, 25 bp, Saccharomyces pastorianus
ttggattcacttattcaactggcta

SEQ ID NO: 138891 - DNA, 25 bp, Saccharomyces pastorianus
aacgatgttgtttatggcgagggaa

SEQ ID NO: 138892 - DNA, 25 bp, Saccharomyces pastorianus
cgccgttttcctatttgatatatat

SEQ ID NO: 138893 - DNA, 25 bp, Saccharomyces pastorianus
acggcaggctatatcagttgttcaa

SEQ ID NO: 138894 - DNA, 25 bp, Saccharomyces pastorianus
aaaggcacggtagacggcaggctat

SEQ ID NO: 138895 - DNA, 25 bp, Saccharomyces pastorianus
gactgctcttaataatacgttcgct

SEQ ID NO: 138896 - DNA, 25 bp, Saccharomyces pastorianus
attcagggtataaactccccactct

SEQ ID NO: 138897 - DNA, 25 bp, Saccharomyces pastorianus
aacctatctgtgctgcactcttggg

SEQ ID NO: 138898 - DNA, 25 bp, Saccharomyces pastorianus
tctcctctgtggcattaaggtccga

SEQ ID NO: 138899 - DNA, 25 bp, Saccharomyces pastorianus
cactcttgggtacagttggtgcaaa

SEQ ID NO: 138900 - DNA, 25 bp, Saccharomyces pastorianus
ggtccgaaaaggttctgcaggattt

SEQ ID NO: 138901 - DNA, 25 bp, Saccharomyces pastorianus
actagtctatgcttagtctcggcca

SEQ ID NO: 138902 - DNA, 25 bp, Saccharomyces pastorianus
gaataagtatgatctggttgccaag

SEQ ID NO: 138903 - DNA, 25 bp, Saccharomyces pastorianus
gagtagtcgctgcaacaacgataga

SEQ ID NO: 138904 - DNA, 25 bp, Saccharomyces pastorianus
aacgatagaggctggtctggcacaa

SEQ ID NO: 138905 - DNA, 25 bp, Saccharomyces pastorianus
aaggaggtgctctcacggatcagta

SEQ ID NO: 138906 - DNA, 25 bp, Saccharomyces pastorianus
gcattggaggcgtcggatttcttat

SEQ ID NO: 138907 - DNA, 25 bp, Saccharomyces pastorianus
ggatcagtagagtagtcgctgcaac

SEQ ID NO: 138908 - DNA, 25 bp, Saccharomyces pastorianus
agcagtaaatatatctccgttcaag

SEQ ID NO: 138909 - DNA, 25 bp, Saccharomyces pastorianus
ttagtctcggccagcattggaggcg

SEQ ID NO: 138910 - DNA, 25 bp, Saccharomyces pastorianus
gtatggtaaccactcttttattcta

SEQ ID NO: 138911 - DNA, 25 bp, Saccharomyces pastorianus
taagggcctaaaccgagcagtaaat

SEQ ID NO: 138912 - DNA, 25 bp, Saccharomyces pastorianus
taccggaaccaaactggtcaactca

SEQ ID NO: 138913 - DNA, 25 bp, Saccharomyces pastorianus
agttgtgtttgcttaccgttgtatt

SEQ ID NO: 138914 - DNA, 25 bp, Saccharomyces pastorianus
cgcagagttctgtctgtgttgatga

SEQ ID NO: 138915 - DNA, 25 bp, Saccharomyces pastorianus
gagcagtggttgaattcgaaagtac

SEQ ID NO: 138916 - DNA, 25 bp, Saccharomyces pastorianus
gcttaccgttgtattagcaagtagt

SEQ ID NO: 138917 - DNA, 25 bp, Saccharomyces pastorianus
cttactcgcagagttctgtctgtgt

SEQ ID NO: 138918 - DNA, 25 bp, Saccharomyces pastorianus
aactggtcaactcattaagggtctt

SEQ ID NO: 138919 - DNA, 25 bp, Saccharomyces pastorianus
gaaaggatttttctgatccagttgt

SEQ ID NO: 138920 - DNA, 25 bp, Saccharomyces pastorianus
taagggtcttggctgcttactcgca

SEQ ID NO: 138921 - DNA, 25 bp, Saccharomyces pastorianus
attagcaagtagtagagcagtggtt

SEQ ID NO: 138922 - DNA, 25 bp, Saccharomyces pastorianus
tgatccagttgtgtttgcttaccgt

SEQ ID NO: 138923 - DNA, 25 bp, Saccharomyces pastorianus
atcaagaaatctctgggctcactag

SEQ ID NO: 138924 - DNA, 25 bp, Saccharomyces pastorianus
gtgtaaaaacggctgaaatcaagaa

SEQ ID NO: 138925 - DNA, 25 bp, Saccharomyces pastorianus
catttcgaaagtgtaaaaacggctg

SEQ ID NO: 138926 - DNA, 25 bp, Saccharomyces pastorianus
caagaaatctctgggctcactagcg

SEQ ID NO: 138927 - DNA, 25 bp, Saccharomyces pastorianus
aaatctctgggctcactagcggacc

SEQ ID NO: 138928 - DNA, 25 bp, Saccharomyces pastorianus
tctgggctcactagcggaccatcat

SEQ ID NO: 138929 - DNA, 25 bp, Saccharomyces pastorianus
ggaaatagaccatttcgaaagtgta

SEQ ID NO: 138930 - DNA, 25 bp, Saccharomyces pastorianus
tatcgaattctacgaaaggatactt

SEQ ID NO: 138931 - DNA, 25 bp, Saccharomyces pastorianus
gaaatcaagaaatctctgggctcac

SEQ ID NO: 138932 - DNA, 25 bp, Saccharomyces pastorianus
ctgggctcactagcggaccatcata

SEQ ID NO: 138933 - DNA, 25 bp, Saccharomyces pastorianus
atctctgggctcactagcggaccat

SEQ ID NO: 138934 - DNA, 25 bp, Saccharomyces pastorianus
gtcatatggcttgcaagatcttaca

SEQ ID NO: 138935 - DNA, 25 bp, Saccharomyces pastorianus
aggtgtaacacagctgtcatatggc

SEQ ID NO: 138936 - DNA, 25 bp, Saccharomyces pastorianus
ttacaagaattggtcacaggcgaaa

SEQ ID NO: 138937 - DNA, 25 bp, Saccharomyces pastorianus
gatgtcatagtttgcaaaatttcct

SEQ ID NO: 138938 - DNA, 25 bp, Saccharomyces pastorianus
gtcctccaggatagcttgcaaccaa

SEQ ID NO: 138939 - DNA, 25 bp, Saccharomyces pastorianus
taagaagggtctctttgcatcccga

SEQ ID NO: 138940 - DNA, 25 bp, Saccharomyces pastorianus
aaactagatcggactgtgacaaaga

SEQ ID NO: 138941 - DNA, 25 bp, Saccharomyces pastorianus
gaaggatcttgaacactacattgat

SEQ ID NO: 138942 - DNA, 25 bp, Saccharomyces pastorianus
tttgcatcccgatctttctcaatca

SEQ ID NO: 138943 - DNA, 25 bp, Saccharomyces pastorianus
tatgcgacagctgatcaaattgaaa

SEQ ID NO: 138944 - DNA, 25 bp, Saccharomyces pastorianus
gcgaaaacgaggaacttgctgcgaa

SEQ ID NO: 138945 - DNA, 25 bp, Saccharomyces pastorianus
aattcgcttctgaagacgcttctat

SEQ ID NO: 138946 - DNA, 25 bp, Saccharomyces pastorianus
ggtattctgaaggtgtctgccacag

SEQ ID NO: 138947 - DNA, 25 bp, Saccharomyces pastorianus
tgaattaaccggcattccaccagca

SEQ ID NO: 138948 - DNA, 25 bp, Saccharomyces pastorianus
gaatctttgtccaaggtcgcttatc

SEQ ID NO: 138949 - DNA, 25 bp, Saccharomyces pastorianus
agaaaactacgctcactctttgaaa

SEQ ID NO: 138950 - DNA, 25 bp, Saccharomyces pastorianus
gttctggtgccgctgattatgacga

SEQ ID NO: 138951 - DNA, 25 bp, Saccharomyces pastorianus
tgaaaccgccattgctgaagacttt

SEQ ID NO: 138952 - DNA, 25 bp, Saccharomyces pastorianus
cttctaagttgtacggaggtgctga

SEQ ID NO: 138953 - DNA, 25 bp, Saccharomyces pastorianus
gaggtcacatttgcacttgacgcta

SEQ ID NO: 138954 - DNA, 25 bp, Saccharomyces pastorianus
aaatccgaatctatcaccatcacta

SEQ ID NO: 138955 - DNA, 25 bp, Saccharomyces pastorianus
caaggtcgcttatccaattacttct

SEQ ID NO: 138956 - DNA, 25 bp, Saccharomyces pastorianus
ggctatcggtagacttctaacccat

SEQ ID NO: 138957 - DNA, 25 bp, Saccharomyces pastorianus
gattttccccttggatcgagaagcc

SEQ ID NO: 138958 - DNA, 25 bp, Saccharomyces pastorianus
tctagtgattatttccagtggtctg

SEQ ID NO: 138959 - DNA, 25 bp, Saccharomyces pastorianus
gaggagaccctagagtttttgaagt

SEQ ID NO: 138960 - DNA, 25 bp, Saccharomyces pastorianus
agggtcctctcttattttatgctca

SEQ ID NO: 138961 - DNA, 25 bp, Saccharomyces pastorianus
taaaatggatcctttccctcacgga

SEQ ID NO: 138962 - DNA, 25 bp, Saccharomyces pastorianus
gagaccgacaatacccactaaaatg

SEQ ID NO: 138963 - DNA, 25 bp, Saccharomyces pastorianus
ggaatcattgactcagcgcacaacc

SEQ ID NO: 138964 - DNA, 25 bp, Saccharomyces pastorianus
tttacccagacaaaccgacttctag

SEQ ID NO: 138965 - DNA, 25 bp, Saccharomyces pastorianus
agaggctaatccaccggccagaaag

SEQ ID NO: 138966 - DNA, 25 bp, Saccharomyces pastorianus
gtggattttgccatttctaaagagc

SEQ ID NO: 138967 - DNA, 25 bp, Saccharomyces pastorianus
actttcataagaggtcccatctgcg

SEQ ID NO: 138968 - DNA, 25 bp, Saccharomyces pastorianus
tcccatctgcggtacagacaactgc

SEQ ID NO: 138969 - DNA, 25 bp, Saccharomyces pastorianus
aagaggtcccatctgcggtacagac

SEQ ID NO: 138970 - DNA, 25 bp, Saccharomyces pastorianus
ttcataagaggtcccatctgcggta

SEQ ID NO: 138971 - DNA, 25 bp, Saccharomyces pastorianus
tttcataagaggtcccatctgcggt

SEQ ID NO: 138972 - DNA, 25 bp, Saccharomyces pastorianus
gtcccatctgcggtacagacaactg

SEQ ID NO: 138973 - DNA, 25 bp, Saccharomyces pastorianus
ataagaggtcccatctgcggtacag

SEQ ID NO: 138974 - DNA, 25 bp, Saccharomyces pastorianus
ggtacagacaactgcccctcacggc

SEQ ID NO: 138975 - DNA, 25 bp, Saccharomyces pastorianus
gaggtcccatctgcggtacagacaa

SEQ ID NO: 138976 - DNA, 25 bp, Saccharomyces pastorianus
ctactttcataagaggtcccatctg

SEQ ID NO: 138977 - DNA, 25 bp, Saccharomyces pastorianus
taagaggtcccatctgcggtacaga

SEQ ID NO: 138978 - DNA, 25 bp, Saccharomyces pastorianus
ttgacgaactcaacaaagctgccga

SEQ ID NO: 138979 - DNA, 25 bp, Saccharomyces pastorianus
tgccgagtccacagatagtaaaatt

SEQ ID NO: 138980 - DNA, 25 bp, Saccharomyces pastorianus
aaagctgccgagtccacagatagta

SEQ ID NO: 138981 - DNA, 25 bp, Saccharomyces pastorianus
taacgtccactggatttggaagcgc

SEQ ID NO: 138982 - DNA, 25 bp, Saccharomyces pastorianus
cactggatttggaagcgcactacaa

SEQ ID NO: 138983 - DNA, 25 bp, Saccharomyces pastorianus
gaagcgcactacaagcgtttgctca

SEQ ID NO: 138984 - DNA, 25 bp, Saccharomyces pastorianus
ggaagactaacgtccactggatttg

SEQ ID NO: 138985 - DNA, 25 bp, Saccharomyces pastorianus
caaatgtgaacagaatagttgcttc

SEQ ID NO: 138986 - DNA, 25 bp, Saccharomyces pastorianus
aacaaagctgccgagtccacagata

SEQ ID NO: 138987 - DNA, 25 bp, Saccharomyces pastorianus
tagttgcttctgttgacgaactcaa

SEQ ID NO: 138988 - DNA, 25 bp, Saccharomyces pastorianus
cgcactacaagcgtttgctcaaggc

SEQ ID NO: 138989 - DNA, 25 bp, Saccharomyces pastorianus
gactcttcaagaacgctttccatcg

SEQ ID NO: 138990 - DNA, 25 bp, Saccharomyces pastorianus
gagcaagaacgtttggcgcaactat

SEQ ID NO: 138991 - DNA, 25 bp, Saccharomyces pastorianus
gagatcgatgatcatttcatttcca

SEQ ID NO: 138992 - DNA, 25 bp, Saccharomyces pastorianus
ataaaagcgcacctcctgctataag

SEQ ID NO: 138993 - DNA, 25 bp, Saccharomyces pastorianus
gaaacacaatcagcacgtattcttg

SEQ ID NO: 138994 - DNA, 25 bp, Saccharomyces pastorianus
gggctaagaatttcgtgtcacaaat

SEQ ID NO: 138995 - DNA, 25 bp, Saccharomyces pastorianus
gcaactaagattctccttgaccttt

SEQ ID NO: 138996 - DNA, 25 bp, Saccharomyces pastorianus
tttccatcgccagtcgaaacacaat

SEQ ID NO: 138997 - DNA, 25 bp, Saccharomyces pastorianus
attaaaccaggtgacattcttgtaa

SEQ ID NO: 138998 - DNA, 25 bp, Saccharomyces pastorianus
gaagttatacaacccataggagcaa

SEQ ID NO: 138999 - DNA, 25 bp, Saccharomyces pastorianus
gtaggcgagatttccaacaacgtca

SEQ ID NO: 139000 - DNA, 25 bp, Saccharomyces pastorianus
ggcggaaatccataaacgagtatca

SEQ ID NO: 139001 - DNA, 25 bp, Saccharomyces pastorianus
ggagcaagcttttcagataggtaat

SEQ ID NO: 139002 - DNA, 25 bp, Saccharomyces pastorianus
actggaaatgttttgcctgtctctt

SEQ ID NO: 139003 - DNA, 25 bp, Saccharomyces pastorianus
agtttccactaattcatctgcatta

SEQ ID NO: 139004 - DNA, 25 bp, Saccharomyces pastorianus
aatctcccaccgtactgcagaagta

SEQ ID NO: 139005 - DNA, 25 bp, Saccharomyces pastorianus
cattcgatggtggagcaagcttttc

SEQ ID NO: 139006 - DNA, 25 bp, Saccharomyces pastorianus
gagttgctcgcaacgggtcgataaa

SEQ ID NO: 139007 - DNA, 25 bp, Saccharomyces pastorianus
ctgcattaacagaaaccgctcaaga

SEQ ID NO: 139008 - DNA, 25 bp, Saccharomyces pastorianus
gagtatcatgatacagtttccacta

SEQ ID NO: 139009 - DNA, 25 bp, Saccharomyces pastorianus
ttccccacaaacaagagttgctcgc

SEQ ID NO: 139010 - DNA, 25 bp, Saccharomyces pastorianus
agatatttcgatggcagctccacca

SEQ ID NO: 139011 - DNA, 25 bp, Saccharomyces pastorianus
tttacttgcaattgattcatcatat

SEQ ID NO: 139012 - DNA, 25 bp, Saccharomyces pastorianus
attgattcatcatattagtcgtttc

SEQ ID NO: 139013 - DNA, 25 bp, Saccharomyces pastorianus
cgtttacttgcaattgattcatcat

SEQ ID NO: 139014 - DNA, 25 bp, Saccharomyces pastorianus
acttgcaattgattcatcatattag

SEQ ID NO: 139015 - DNA, 25 bp, Saccharomyces pastorianus
tgcaattgattcatcatattagtcg

SEQ ID NO: 139016 - DNA, 25 bp, Saccharomyces pastorianus
gcaattgattcatcatattagtcgt

SEQ ID NO: 139017 - DNA, 25 bp, Saccharomyces pastorianus
ttacttgcaattgattcatcatatt

SEQ ID NO: 139018 - DNA, 25 bp, Saccharomyces pastorianus
gtttacttgcaattgattcatcata

SEQ ID NO: 139019 - DNA, 25 bp, Saccharomyces pastorianus
gcgtttacttgcaattgattcatca

SEQ ID NO: 139020 - DNA, 25 bp, Saccharomyces pastorianus
aattgattcatcatattagtcgttt

SEQ ID NO: 139021 - DNA, 25 bp, Saccharomyces pastorianus
ggcgtttacttgcaattgattcatc

SEQ ID NO: 139022 - DNA, 25 bp, Saccharomyces pastorianus
gaagcactgagacgtctgatatcat

SEQ ID NO: 139023 - DNA, 25 bp, Saccharomyces pastorianus
tgacgccaaagggacgaagcactga

SEQ ID NO: 139024 - DNA, 25 bp, Saccharomyces pastorianus
aaagccttagtctccaagtcgttga

SEQ ID NO: 139025 - DNA, 25 bp, Saccharomyces pastorianus
ataaactgccctatgacgccaaagg

SEQ ID NO: 139026 - DNA, 25 bp, Saccharomyces pastorianus
tcaagccgcggcagttaaccccaat

SEQ ID NO: 139027 - DNA, 25 bp, Saccharomyces pastorianus
gaagtgaccctgtttatcaaatgat

SEQ ID NO: 139028 - DNA, 25 bp, Saccharomyces pastorianus
accaatctgggtgagcttaaacaac

SEQ ID NO: 139029 - DNA, 25 bp, Saccharomyces pastorianus
gaagtcttggcaatttctagaaacg

SEQ ID NO: 139030 - DNA, 25 bp, Saccharomyces pastorianus
gttgacgccctcaaaccagggaaga

SEQ ID NO: 139031 - DNA, 25 bp, Saccharomyces pastorianus
gaaaaactaccgatctttagagatt

SEQ ID NO: 139032 - DNA, 25 bp, Saccharomyces pastorianus
tgatatcatctcagctgtcaagccg

SEQ ID NO: 139033 - DNA, 25 bp, Saccharomyces pastorianus
ctccaagaaatactatgaaatcgtg

SEQ ID NO: 139034 - DNA, 25 bp, Saccharomyces pastorianus
gaaaatcctatctccaagaaatact

SEQ ID NO: 139035 - DNA, 25 bp, Saccharomyces pastorianus
gagagtgctaatgctgcttattatc

SEQ ID NO: 139036 - DNA, 25 bp, Saccharomyces pastorianus
tcaaagaaagatcaggaatgccgaa

SEQ ID NO: 139037 - DNA, 25 bp, Saccharomyces pastorianus
tgttgagagtgctaatgctgcttat

SEQ ID NO: 139038 - DNA, 25 bp, Saccharomyces pastorianus
aatcctatctccaagaaatactatg

SEQ ID NO: 139039 - DNA, 25 bp, Saccharomyces pastorianus
atgccgaaaatcctatctccaagaa

SEQ ID NO: 139040 - DNA, 25 bp, Saccharomyces pastorianus
gaatgccgaaaatcctatctccaag

SEQ ID NO: 139041 - DNA, 25 bp, Saccharomyces pastorianus
gagtgctaatgctgcttattatcaa

SEQ ID NO: 139042 - DNA, 25 bp, Saccharomyces pastorianus
gccgaaaatcctatctccaagaaat

SEQ ID NO: 139043 - DNA, 25 bp, Saccharomyces pastorianus
agtgctaatgctgcttattatcaaa

SEQ ID NO: 139044 - DNA, 25 bp, Saccharomyces pastorianus
tcattaaccgtttctcgtgagcaat

SEQ ID NO: 139045 - DNA, 25 bp, Saccharomyces pastorianus
gatttcattggttctggtagtggac

SEQ ID NO: 139046 - DNA, 25 bp, Saccharomyces pastorianus
gttgtcaacattcttgcaattcggt

SEQ ID NO: 139047 - DNA, 25 bp, Saccharomyces pastorianus
ggtacagagttgagacgccgtttaa

SEQ ID NO: 139048 - DNA, 25 bp, Saccharomyces pastorianus
gccagacgaagaccgttatgctcca

SEQ ID NO: 139049 - DNA, 25 bp, Saccharomyces pastorianus
gaatggtcacttatttgccagacga

SEQ ID NO: 139050 - DNA, 25 bp, Saccharomyces pastorianus
gatttctacggtccatacgatgctc

SEQ ID NO: 139051 - DNA, 25 bp, Saccharomyces pastorianus
caaggactctgttgttggcaagcaa

SEQ ID NO: 139052 - DNA, 25 bp, Saccharomyces pastorianus
gattcctgaatggttctcatatcct

SEQ ID NO: 139053 - DNA, 25 bp, Saccharomyces pastorianus
atacctcaagctcagccgatattca

SEQ ID NO: 139054 - DNA, 25 bp, Saccharomyces pastorianus
gtcagcggatgaacctatttcacat

SEQ ID NO: 139055 - DNA, 25 bp, Saccharomyces pastorianus
cattagtgactatccaggtttgcgt

SEQ ID NO: 139056 - DNA, 25 bp, Saccharomyces pastorianus
gactatccaggtttgcgttaagaca

SEQ ID NO: 139057 - DNA, 25 bp, Saccharomyces pastorianus
aactaagactcgaattccaatcaag

SEQ ID NO: 139058 - DNA, 25 bp, Saccharomyces pastorianus
attacctcaacattagtgactatcc

SEQ ID NO: 139059 - DNA, 25 bp, Saccharomyces pastorianus
acctgcccaactaagactcgaattc

SEQ ID NO: 139060 - DNA, 25 bp, Saccharomyces pastorianus
ggtttgcgttaagacacctgcccaa

SEQ ID NO: 139061 - DNA, 25 bp, Saccharomyces pastorianus
gttaagacacctgcccaactaagac

SEQ ID NO: 139062 - DNA, 25 bp, Saccharomyces pastorianus
gtgattattacgtcggcggttcttt

SEQ ID NO: 139063 - DNA, 25 bp, Saccharomyces pastorianus
cggcggttctttagatagcgattca

SEQ ID NO: 139064 - DNA, 25 bp, Saccharomyces pastorianus
ttagatagcgattcaattacctcaa

SEQ ID NO: 139065 - DNA, 25 bp, Saccharomyces pastorianus
ttacgtcggcggttctttagatagc

SEQ ID NO: 139066 - DNA, 25 bp, Saccharomyces pastorianus
ttaatcggccacattgttcccgaag

SEQ ID NO: 139067 - DNA, 25 bp, Saccharomyces pastorianus
aagaaagcaccaagcctacctgaag

SEQ ID NO: 139068 - DNA, 25 bp, Saccharomyces pastorianus
tggtcctatcgggttggtcagagac

SEQ ID NO: 139069 - DNA, 25 bp, Saccharomyces pastorianus
aggccaacggtcacttgcaaattct

SEQ ID NO: 139070 - DNA, 25 bp, Saccharomyces pastorianus
ttgacctattagtctctgataagga

SEQ ID NO: 139071 - DNA, 25 bp, Saccharomyces pastorianus
ctctgctctgatgggttacggtttg

SEQ ID NO: 139072 - DNA, 25 bp, Saccharomyces pastorianus
acaaagttgggttgcacctccacct

SEQ ID NO: 139073 - DNA, 25 bp, Saccharomyces pastorianus
agattattaagccactctctcaccc

SEQ ID NO: 139074 - DNA, 25 bp, Saccharomyces pastorianus
attctgtacggttcattagcaccag

SEQ ID NO: 139075 - DNA, 25 bp, Saccharomyces pastorianus
tggttctcacgggttcttaatcggc

SEQ ID NO: 139076 - DNA, 25 bp, Saccharomyces pastorianus
cttcaagggtagagcacgtgtgttc

SEQ ID NO: 139077 - DNA, 25 bp, Saccharomyces pastorianus
agctcaacaagtactcgtatatcat

SEQ ID NO: 139078 - DNA, 25 bp, Saccharomyces pastorianus
acgagatgcgttgcaaagaagctca

SEQ ID NO: 139079 - DNA, 25 bp, Saccharomyces pastorianus
gaataacagatgttctcaatccatt

SEQ ID NO: 139080 - DNA, 25 bp, Saccharomyces pastorianus
agttgctacatctagacaattctct

SEQ ID NO: 139081 - DNA, 25 bp, Saccharomyces pastorianus
tcctgttggtggtccggtaacccat

SEQ ID NO: 139082 - DNA, 25 bp, Saccharomyces pastorianus
cggtaacccatgtaacatgcatcta

SEQ ID NO: 139083 - DNA, 25 bp, Saccharomyces pastorianus
aggccatgctttatgccaccggttt

SEQ ID NO: 139084 - DNA, 25 bp, Saccharomyces pastorianus
ttatgccaccggtttcaagaaggaa

SEQ ID NO: 139085 - DNA, 25 bp, Saccharomyces pastorianus
agatttcaagaagcctcaagtcggg

SEQ ID NO: 139086 - DNA, 25 bp, Saccharomyces pastorianus
taacatgcatctattggacttgaat

SEQ ID NO: 139087 - DNA, 25 bp, Saccharomyces pastorianus
gtatatcatcactgaacctaagggc

SEQ ID NO: 139088 - DNA, 25 bp, Saccharomyces pastorianus
cacactcctgcacgatatggacgaa

SEQ ID NO: 139089 - DNA, 25 bp, Saccharomyces pastorianus
cagccaactggaggacgtgcataaa

SEQ ID NO: 139090 - DNA, 25 bp, Saccharomyces pastorianus
gtgcataaagtgctcctgtctctat

SEQ ID NO: 139091 - DNA, 25 bp, Saccharomyces pastorianus
gaaacgcagaagatccagctcccca

SEQ ID NO: 139092 - DNA, 25 bp, Saccharomyces pastorianus
gtcggattccagctacaggcaggta

SEQ ID NO: 139093 - DNA, 25 bp, Saccharomyces pastorianus
aaaggcagatcacgcctacgatcgc

SEQ ID NO: 139094 - DNA, 25 bp, Saccharomyces pastorianus
gactgctctagagatggcgtttcga

SEQ ID NO: 139095 - DNA, 25 bp, Saccharomyces pastorianus
agcagcgtaagaagtccgtgccgcc

SEQ ID NO: 139096 - DNA, 25 bp, Saccharomyces pastorianus
gatcgcccggatgtgtctctgaatg

SEQ ID NO: 139097 - DNA, 25 bp, Saccharomyces pastorianus
gacgaagcccacgataagcagcgta

SEQ ID NO: 139098 - DNA, 25 bp, Saccharomyces pastorianus
aatgatgacgctagccatcggctga

SEQ ID NO: 139099 - DNA, 25 bp, Saccharomyces pastorianus
gaggctaattctgagcactcgttga

SEQ ID NO: 139100 - DNA, 25 bp, Saccharomyces pastorianus
ggaaaactctgacaagctaattaaa

SEQ ID NO: 139101 - DNA, 25 bp, Saccharomyces pastorianus
taagacattatgtaaatcgctaaac

SEQ ID NO: 139102 - DNA, 25 bp, Saccharomyces pastorianus
atggagctgagggaaaactctgaca

SEQ ID NO: 139103 - DNA, 25 bp, Saccharomyces pastorianus
ggaatcggacaagcagatactggaa

SEQ ID NO: 139104 - DNA, 25 bp, Saccharomyces pastorianus
gattacagaaacatcatcaccgttc

SEQ ID NO: 139105 - DNA, 25 bp, Saccharomyces pastorianus
aagtaacgaatgcaggcgctttaga

SEQ ID NO: 139106 - DNA, 25 bp, Saccharomyces pastorianus
caggcgctttagaggaatcggacaa

SEQ ID NO: 139107 - DNA, 25 bp, Saccharomyces pastorianus
atggtcgctagaggtagaacagacg

SEQ ID NO: 139108 - DNA, 25 bp, Saccharomyces pastorianus
agatatctacagatgtttcagaggc

SEQ ID NO: 139109 - DNA, 25 bp, Saccharomyces pastorianus
gagcactcgttgatgattacagaaa

SEQ ID NO: 139110 - DNA, 25 bp, Saccharomyces pastorianus
gaattccttgcttatgcggttgaaa

SEQ ID NO: 139111 - DNA, 25 bp, Saccharomyces pastorianus
agccgtttaggcttgctatgaggca

SEQ ID NO: 139112 - DNA, 25 bp, Saccharomyces pastorianus
gtgccttgcagatgaattccttgct

SEQ ID NO: 139113 - DNA, 25 bp, Saccharomyces pastorianus
agagcaatctcgctgcctcgaagta

SEQ ID NO: 139114 - DNA, 25 bp, Saccharomyces pastorianus
gattagtatttttgtcgaagccgtt

SEQ ID NO: 139115 - DNA, 25 bp, Saccharomyces pastorianus
aatctcgctgcctcgaagtaactgt

SEQ ID NO: 139116 - DNA, 25 bp, Saccharomyces pastorianus
aggcttgctatgaggcattcgccgt

SEQ ID NO: 139117 - DNA, 25 bp, Saccharomyces pastorianus
tgcctcgaagtaactgtgccttgca

SEQ ID NO: 139118 - DNA, 25 bp, Saccharomyces pastorianus
tgaggccaacaagagcaatctcgct

SEQ ID NO: 139119 - DNA, 25 bp, Saccharomyces pastorianus
tatttttgtcgaagccgtttaggct

SEQ ID NO: 139120 - DNA, 25 bp, Saccharomyces pastorianus
gcttatgcggttgaaaacattggtt

SEQ ID NO: 139121 - DNA, 25 bp, Saccharomyces pastorianus
gacaggattattaccgatttttgag

SEQ ID NO: 139122 - DNA, 25 bp, Saccharomyces pastorianus
ctattcaaggtctcgcccatcaatg

SEQ ID NO: 139123 - DNA, 25 bp, Saccharomyces pastorianus
gtgtgaagcacctgaatccaatcca

SEQ ID NO: 139124 - DNA, 25 bp, Saccharomyces pastorianus
gaacattctgttatctcgagcaagt

SEQ ID NO: 139125 - DNA, 25 bp, Saccharomyces pastorianus
actagcattttatccgttctttcta

SEQ ID NO: 139126 - DNA, 25 bp, Saccharomyces pastorianus
tttctaaaatcttcttgggccaact

SEQ ID NO: 139127 - DNA, 25 bp, Saccharomyces pastorianus
gcagacctactttcgactgttggga

SEQ ID NO: 139128 - DNA, 25 bp, Saccharomyces pastorianus
atgtcatgtgcaggtgccgttggca

SEQ ID NO: 139129 - DNA, 25 bp, Saccharomyces pastorianus
atgcctcaatccctgtgacgaacta

SEQ ID NO: 139130 - DNA, 25 bp, Saccharomyces pastorianus
gaatccaatccataccgttctatta

SEQ ID NO: 139131 - DNA, 25 bp, Saccharomyces pastorianus
ttgatctttctagtcgttccattaa

SEQ ID NO: 139132 - DNA, 25 bp, Saccharomyces pastorianus
actgttttggccgtgaacccagcta

SEQ ID NO: 139133 - DNA, 25 bp, Saccharomyces pastorianus
gattcgtttgttgacagcttccaca

SEQ ID NO: 139134 - DNA, 25 bp, Saccharomyces pastorianus
acaaacaagtgtggccgcgttgctg

SEQ ID NO: 139135 - DNA, 25 bp, Saccharomyces pastorianus
atctggtttagtacagctgcggcta

SEQ ID NO: 139136 - DNA, 25 bp, Saccharomyces pastorianus
gaacccagctacgatgattgtcaaa

SEQ ID NO: 139137 - DNA, 25 bp, Saccharomyces pastorianus
tcatgatcctctgatatctggttta

SEQ ID NO: 139138 - DNA, 25 bp, Saccharomyces pastorianus
agcttccacaatttgcctacttcta

SEQ ID NO: 139139 - DNA, 25 bp, Saccharomyces pastorianus
gcctacttctagctatcatgatcct

SEQ ID NO: 139140 - DNA, 25 bp, Saccharomyces pastorianus
gtgcatcaatctttgttctgccatg

SEQ ID NO: 139141 - DNA, 25 bp, Saccharomyces pastorianus
cacgacgtgccaatggaaactgttt

SEQ ID NO: 139142 - DNA, 25 bp, Saccharomyces pastorianus
gccatgaacaagcagtccagagata

SEQ ID NO: 139143 - DNA, 25 bp, Saccharomyces pastorianus
gacgatggtataaccttcgcaagat

SEQ ID NO: 139144 - DNA, 25 bp, Saccharomyces pastorianus
aactttttctcatctagtgttagca

SEQ ID NO: 139145 - DNA, 25 bp, Saccharomyces pastorianus
gcattggcgtcagtctttctgataa

SEQ ID NO: 139146 - DNA, 25 bp, Saccharomyces pastorianus
gcatccaaggaagctcgccaagaaa

SEQ ID NO: 139147 - DNA, 25 bp, Saccharomyces pastorianus
atcaattccaataccaaaacgctag

SEQ ID NO: 139148 - DNA, 25 bp, Saccharomyces pastorianus
tagcatacttaacagcattggcgtc

SEQ ID NO: 139149 - DNA, 25 bp, Saccharomyces pastorianus
gcgggcagttcttcttcgaatataa

SEQ ID NO: 139150 - DNA, 25 bp, Saccharomyces pastorianus
aactggatcagctgccattttaggc

SEQ ID NO: 139151 - DNA, 25 bp, Saccharomyces pastorianus
caaaagaggcttccagagtagcgat

SEQ ID NO: 139152 - DNA, 25 bp, Saccharomyces pastorianus
cagagtagcgattgaggcggttaat

SEQ ID NO: 139153 - DNA, 25 bp, Saccharomyces pastorianus
tgattcggttgtcaattcgcacgcg

SEQ ID NO: 139154 - DNA, 25 bp, Saccharomyces pastorianus
tacatagtgcttcctttggaggtat

SEQ ID NO: 139155 - DNA, 25 bp, Saccharomyces pastorianus
aagcctacatagtgcttcctttgga

SEQ ID NO: 139156 - DNA, 25 bp, Saccharomyces pastorianus
gcctacatagtgcttcctttggagg

SEQ ID NO: 139157 - DNA, 25 bp, Saccharomyces pastorianus
gtcaagcctacatagtgcttccttt

SEQ ID NO: 139158 - DNA, 25 bp, Saccharomyces pastorianus
acgattgtctcaacttactatgatt

SEQ ID NO: 139159 - DNA, 25 bp, Saccharomyces pastorianus
atagtgcttcctttggaggtatacg

SEQ ID NO: 139160 - DNA, 25 bp, Saccharomyces pastorianus
gtgcttcctttggaggtatacgatt

SEQ ID NO: 139161 - DNA, 25 bp, Saccharomyces pastorianus
ttcctttggaggtatacgattgtct

SEQ ID NO: 139162 - DNA, 25 bp, Saccharomyces pastorianus
gaggtatacgattgtctcaacttac

SEQ ID NO: 139163 - DNA, 25 bp, Saccharomyces pastorianus
ttgtcaagcctacatagtgcttcct

SEQ ID NO: 139164 - DNA, 25 bp, Saccharomyces pastorianus
ggtatacgattgtctcaacttacta

SEQ ID NO: 139165 - DNA, 25 bp, Saccharomyces pastorianus
gaatcctccctgctggcatgagaaa

SEQ ID NO: 139166 - DNA, 25 bp, Saccharomyces pastorianus
gtcatcgctatacgaatcctccctg

SEQ ID NO: 139167 - DNA, 25 bp, Saccharomyces pastorianus
aagtcatcgctatacgaatcctccc

SEQ ID NO: 139168 - DNA, 25 bp, Saccharomyces pastorianus
tatacgaatcctccctgctggcatg

SEQ ID NO: 139169 - DNA, 25 bp, Saccharomyces pastorianus
gttgtcaagtcatcgctatacgaat

SEQ ID NO: 139170 - DNA, 25 bp, Saccharomyces pastorianus
actataatgttgtcaagtcatcgct

SEQ ID NO: 139171 - DNA, 25 bp, Saccharomyces pastorianus
tgttgtcaagtcatcgctatacgaa

SEQ ID NO: 139172 - DNA, 25 bp, Saccharomyces pastorianus
aatgttgtcaagtcatcgctatacg

SEQ ID NO: 139173 - DNA, 25 bp, Saccharomyces pastorianus
atcgctatacgaatcctccctgctg

SEQ ID NO: 139174 - DNA, 25 bp, Saccharomyces pastorianus
gtcaagtcatcgctatacgaatcct

SEQ ID NO: 139175 - DNA, 25 bp, Saccharomyces pastorianus
tacgaatcctccctgctggcatgag

SEQ ID NO: 139176 - DNA, 25 bp, Saccharomyces pastorianus
ggtgcagccgctataactttcaaga

SEQ ID NO: 139177 - DNA, 25 bp, Saccharomyces pastorianus
gatcggaatcctgcatgaagagtca

SEQ ID NO: 139178 - DNA, 25 bp, Saccharomyces pastorianus
aagagtgtaccatgttgctgagcaa

SEQ ID NO: 139179 - DNA, 25 bp, Saccharomyces pastorianus
aagctgtcttcgcaaagcggtcggt

SEQ ID NO: 139180 - DNA, 25 bp, Saccharomyces pastorianus
ttcaaaagttcctgggcttcctcga

SEQ ID NO: 139181 - DNA, 25 bp, Saccharomyces pastorianus
tgagcacgtttttaggcgaatctac

SEQ ID NO: 139182 - DNA, 25 bp, Saccharomyces pastorianus
aattgcaggtacagcctctgaattt

SEQ ID NO: 139183 - DNA, 25 bp, Saccharomyces pastorianus
gaggttcaatgtcatccatacaaca

SEQ ID NO: 139184 - DNA, 25 bp, Saccharomyces pastorianus
tcatcaatagcattaccgacaccgg

SEQ ID NO: 139185 - DNA, 25 bp, Saccharomyces pastorianus
ggaaaatgtttaccggtgcagccgc

SEQ ID NO: 139186 - DNA, 25 bp, Saccharomyces pastorianus
gcgaatctacatttatgcccttatt

SEQ ID NO: 139187 - DNA, 25 bp, Saccharomyces pastorianus
gaatgaatctccaatcacggtgaag

SEQ ID NO: 139188 - DNA, 25 bp, Saccharomyces pastorianus
gttggtcagttatccatttcataat

SEQ ID NO: 139189 - DNA, 25 bp, Saccharomyces pastorianus
ggttggtcactgctaaagatatttt

SEQ ID NO: 139190 - DNA, 25 bp, Saccharomyces pastorianus
agctcaaacgacactggtatacttc

SEQ ID NO: 139191 - DNA, 25 bp, Saccharomyces pastorianus
gaatctttgttgtacgactcagcgt

SEQ ID NO: 139192 - DNA, 25 bp, Saccharomyces pastorianus
tacctttccgagcttgaatctttgt

SEQ ID NO: 139193 - DNA, 25 bp, Saccharomyces pastorianus
gcagctcatgtcctccaaattaatt

SEQ ID NO: 139194 - DNA, 25 bp, Saccharomyces pastorianus
tgaaaccatttacctttccgagctt

SEQ ID NO: 139195 - DNA, 25 bp, Saccharomyces pastorianus
aatattctgtgcatggttttccaat

SEQ ID NO: 139196 - DNA, 25 bp, Saccharomyces pastorianus
gaaggcggtgccagtaacattgtta

SEQ ID NO: 139197 - DNA, 25 bp, Saccharomyces pastorianus
gactcagcgtctgaatattctgtgc

SEQ ID NO: 139198 - DNA, 25 bp, Saccharomyces pastorianus
tcattgtcagaggaactggctactt

SEQ ID NO: 139199 - DNA, 25 bp, Saccharomyces pastorianus
tgctgaggaaaatagaccactgtct

SEQ ID NO: 139200 - DNA, 25 bp, Saccharomyces pastorianus
agaccactgtctgtagactcggaca

SEQ ID NO: 139201 - DNA, 25 bp, Saccharomyces pastorianus
agctctacggccatagtttttggat

SEQ ID NO: 139202 - DNA, 25 bp, Saccharomyces pastorianus
gtcttcacggaaactctggttaact

SEQ ID NO: 139203 - DNA, 25 bp, Saccharomyces pastorianus
attgctggtttcctacaagtcttca

SEQ ID NO: 139204 - DNA, 25 bp, Saccharomyces pastorianus
caccaatcgattcaccaatattcca

SEQ ID NO: 139205 - DNA, 25 bp, Saccharomyces pastorianus
ggttatatgggaccgtgcaaaaaca

SEQ ID NO: 139206 - DNA, 25 bp, Saccharomyces pastorianus
gatgtcattgacaccaatcgattca

SEQ ID NO: 139207 - DNA, 25 bp, Saccharomyces pastorianus
gactcggacagggagttccttaatt

SEQ ID NO: 139208 - DNA, 25 bp, Saccharomyces pastorianus
atttatcacattaagctctacggcc

SEQ ID NO: 139209 - DNA, 25 bp, Saccharomyces pastorianus
tattggttcaggaatctcagagatt

SEQ ID NO: 139210 - DNA, 25 bp, Saccharomyces pastorianus
atgctgctcctacggctattggttc

SEQ ID NO: 139211 - DNA, 25 bp, Saccharomyces pastorianus
cagtcttatgtgctctaattagtac

SEQ ID NO: 139212 - DNA, 25 bp, Saccharomyces pastorianus
tgttagtccactatgctgctcctac

SEQ ID NO: 139213 - DNA, 25 bp, Saccharomyces pastorianus
gtacactgttagtccactatgctgc

SEQ ID NO: 139214 - DNA, 25 bp, Saccharomyces pastorianus
ctacggctattggttcaggaatctc

SEQ ID NO: 139215 - DNA, 25 bp, Saccharomyces pastorianus
cggctattggttcaggaatctcaga

SEQ ID NO: 139216 - DNA, 25 bp, Saccharomyces pastorianus
acactgttagtccactatgctgctc

SEQ ID NO: 139217 - DNA, 25 bp, Saccharomyces pastorianus
tgctcctacggctattggttcagga

SEQ ID NO: 139218 - DNA, 25 bp, Saccharomyces pastorianus
actatgctgctcctacggctattgg

SEQ ID NO: 139219 - DNA, 25 bp, Saccharomyces pastorianus
atgtgctctaattagtacactgtta

SEQ ID NO: 139220 - DNA, 25 bp, Saccharomyces pastorianus
gatttcttacttcaatgagttcttg

SEQ ID NO: 139221 - DNA, 25 bp, Saccharomyces pastorianus
atttttacttccctatgctttgcca

SEQ ID NO: 139222 - DNA, 25 bp, Saccharomyces pastorianus
gtacctgtcctcatggccagttcaa

SEQ ID NO: 139223 - DNA, 25 bp, Saccharomyces pastorianus
gttggatgaaaatacgcacgctttt

SEQ ID NO: 139224 - DNA, 25 bp, Saccharomyces pastorianus
atcatatggcgccagagttcctgcc

SEQ ID NO: 139225 - DNA, 25 bp, Saccharomyces pastorianus
ttccctatgctttgccactgttatc

SEQ ID NO: 139226 - DNA, 25 bp, Saccharomyces pastorianus
gtatattgtttcatgaatgtgtcaa

SEQ ID NO: 139227 - DNA, 25 bp, Saccharomyces pastorianus
tggtggtatcatatggcgccagagt

SEQ ID NO: 139228 - DNA, 25 bp, Saccharomyces pastorianus
tttttggcgacgcttactgctttga

SEQ ID NO: 139229 - DNA, 25 bp, Saccharomyces pastorianus
gaacgataacacctcaacttttagt

SEQ ID NO: 139230 - DNA, 25 bp, Saccharomyces pastorianus
gacgcttactgctttgatttcttac

SEQ ID NO: 139231 - DNA, 25 bp, Saccharomyces pastorianus
gcagacgccgtagccagactaataa

SEQ ID NO: 139232 - DNA, 25 bp, Saccharomyces pastorianus
agcccggtattcatgcgatttttga

SEQ ID NO: 139233 - DNA, 25 bp, Saccharomyces pastorianus
tgtgtgcaaattcagcagacgccgt

SEQ ID NO: 139234 - DNA, 25 bp, Saccharomyces pastorianus
gttgtctattacgacgcagttcagt

SEQ ID NO: 139235 - DNA, 25 bp, Saccharomyces pastorianus
aaaaagagtctgcagcccggtattc

SEQ ID NO: 139236 - DNA, 25 bp, Saccharomyces pastorianus
gaaggctttattaacatcatcgaag

SEQ ID NO: 139237 - DNA, 25 bp, Saccharomyces pastorianus
aatcgtcaccatttgtttaactccg

SEQ ID NO: 139238 - DNA, 25 bp, Saccharomyces pastorianus
tccgttctttgccagatactagaaa

SEQ ID NO: 139239 - DNA, 25 bp, Saccharomyces pastorianus
gtttaaattttccaatcgtcaccat

SEQ ID NO: 139240 - DNA, 25 bp, Saccharomyces pastorianus
caattgaacgctttccttgacacac

SEQ ID NO: 139241 - DNA, 25 bp, Saccharomyces pastorianus
taacgaactactgcgagccttataa

SEQ ID NO: 139242 - DNA, 25 bp, Saccharomyces pastorianus
tatcgccgggtttactatcgcaaaa

SEQ ID NO: 139243 - DNA, 25 bp, Saccharomyces pastorianus
cagataagtgcgattctgccttggg

SEQ ID NO: 139244 - DNA, 25 bp, Saccharomyces pastorianus
gctctggaacagtgctaaatcgttt

SEQ ID NO: 139245 - DNA, 25 bp, Saccharomyces pastorianus
acaaggtcctgatgcgtttaaccgc

SEQ ID NO: 139246 - DNA, 25 bp, Saccharomyces pastorianus
accattagccaaccttgtgctgaaa

SEQ ID NO: 139247 - DNA, 25 bp, Saccharomyces pastorianus
taaatcgttttccaccattagccaa

SEQ ID NO: 139248 - DNA, 25 bp, Saccharomyces pastorianus
gtttaaccgcctgctctggaacagt

SEQ ID NO: 139249 - DNA, 25 bp, Saccharomyces pastorianus
acgaccggacaaggcgatatttcta

SEQ ID NO: 139250 - DNA, 25 bp, Saccharomyces pastorianus
tttttggttcattcactccttacag

SEQ ID NO: 139251 - DNA, 25 bp, Saccharomyces pastorianus
aaagtgtaccatgcgccagaagaac

SEQ ID NO: 139252 - DNA, 25 bp, Saccharomyces pastorianus
atagcaaactaattatcgccgggtt

SEQ ID NO: 139253 - DNA, 25 bp, Saccharomyces pastorianus
actaaatgggatgacgctgatgaaa

SEQ ID NO: 139254 - DNA, 25 bp, Saccharomyces pastorianus
aaagcttacctagtagcatggcaac

SEQ ID NO: 139255 - DNA, 25 bp, Saccharomyces pastorianus
gtggcgacagtcattgaagttatag

SEQ ID NO: 139256 - DNA, 25 bp, Saccharomyces pastorianus
agtagcatggcaacacttttgaaaa

SEQ ID NO: 139257 - DNA, 25 bp, Saccharomyces pastorianus
gattcagtggcgacagtcattgaag

SEQ ID NO: 139258 - DNA, 25 bp, Saccharomyces pastorianus
gaaactaaatgggatgacgctgatg

SEQ ID NO: 139259 - DNA, 25 bp, Saccharomyces pastorianus
gatgaagattcagtggcgacagtca

SEQ ID NO: 139260 - DNA, 25 bp, Saccharomyces pastorianus
tacctagtagcatggcaacactttt

SEQ ID NO: 139261 - DNA, 25 bp, Saccharomyces pastorianus
gcatggcaacacttttgaaaaattt

SEQ ID NO: 139262 - DNA, 25 bp, Saccharomyces pastorianus
gcagataaaagcttacctagtagca

SEQ ID NO: 139263 - DNA, 25 bp, Saccharomyces pastorianus
gaaaccattattgaagcagataaaa

SEQ ID NO: 139264 - DNA, 25 bp, Saccharomyces pastorianus
gcgcctattgcttttgctgattgaa

SEQ ID NO: 139265 - DNA, 25 bp, Saccharomyces pastorianus
tatgcgtcaaactttagcgccatat

SEQ ID NO: 139266 - DNA, 25 bp, Saccharomyces pastorianus
cgttgccattggattgatagcctta

SEQ ID NO: 139267 - DNA, 25 bp, Saccharomyces pastorianus
gatagccttatctgcaacagggacg

SEQ ID NO: 139268 - DNA, 25 bp, Saccharomyces pastorianus
ggccagaagttggacgaccctgtgt

SEQ ID NO: 139269 - DNA, 25 bp, Saccharomyces pastorianus
gaccctgtgttgaatgccattgtga

SEQ ID NO: 139270 - DNA, 25 bp, Saccharomyces pastorianus
agcgccatatgctgttctgtcacaa

SEQ ID NO: 139271 - DNA, 25 bp, Saccharomyces pastorianus
ttgtgagcaaaaactctcctgcaga

SEQ ID NO: 139272 - DNA, 25 bp, Saccharomyces pastorianus
gataaggaactatggcccgttgcca

SEQ ID NO: 139273 - DNA, 25 bp, Saccharomyces pastorianus
ttccacactacccatttgttacgaa

SEQ ID NO: 139274 - DNA, 25 bp, Saccharomyces pastorianus
ttgaagcttcgtgcatggagggcca

SEQ ID NO: 139275 - DNA, 25 bp, Saccharomyces pastorianus
ttgtgacaaagagacccgcaacttc

SEQ ID NO: 139276 - DNA, 25 bp, Saccharomyces pastorianus
taaatctgaagaagagccctcctct

SEQ ID NO: 139277 - DNA, 25 bp, Saccharomyces pastorianus
agggcattgtcgtcttcaaaaaagc

SEQ ID NO: 139278 - DNA, 25 bp, Saccharomyces pastorianus
gaaacgccgtcatcgaataaaaggt

SEQ ID NO: 139279 - DNA, 25 bp, Saccharomyces pastorianus
aaaaaagcaagaaacgccgtcatcg

SEQ ID NO: 139280 - DNA, 25 bp, Saccharomyces pastorianus
agcaaacaaagccttctgaaacaga

SEQ ID NO: 139281 - DNA, 25 bp, Saccharomyces pastorianus
gaaacagaacattcaaaggaaccta

SEQ ID NO: 139282 - DNA, 25 bp, Saccharomyces pastorianus
acgcaagccatcacccgtggtaaaa

SEQ ID NO: 139283 - DNA, 25 bp, Saccharomyces pastorianus
aaagagacccgcaacttcaacacca

SEQ ID NO: 139284 - DNA, 25 bp, Saccharomyces pastorianus
gtaaaaagggcattgtcgtcttcaa

SEQ ID NO: 139285 - DNA, 25 bp, Saccharomyces pastorianus
agagccctcctcttttattgatgag

SEQ ID NO: 139286 - DNA, 25 bp, Saccharomyces pastorianus
gttagggatcaaatcacttccttga

SEQ ID NO: 139287 - DNA, 25 bp, Saccharomyces pastorianus
aacaagccatcgaaactgccaacaa

SEQ ID NO: 139288 - DNA, 25 bp, Saccharomyces pastorianus
tacaagaacgactctaacaacaaca

SEQ ID NO: 139289 - DNA, 25 bp, Saccharomyces pastorianus
aacgatactgaaaactccttgaaag

SEQ ID NO: 139290 - DNA, 25 bp, Saccharomyces pastorianus
agaattgcaaacttcctcgatgaaa

SEQ ID NO: 139291 - DNA, 25 bp, Saccharomyces pastorianus
acaaggtggcgaagaggttaacgct

SEQ ID NO: 139292 - DNA, 25 bp, Saccharomyces pastorianus
acttcctcgatgaaattgtttgaac

SEQ ID NO: 139293 - DNA, 25 bp, Saccharomyces pastorianus
gaaggagttggttgctagagtacaa

SEQ ID NO: 139294 - DNA, 25 bp, Saccharomyces pastorianus
acttccttgaaggagttggttgcta

SEQ ID NO: 139295 - DNA, 25 bp, Saccharomyces pastorianus
ttttgacatcgatgccgatggtatt

SEQ ID NO: 139296 - DNA, 25 bp, Saccharomyces pastorianus
tgaggagttaaagaccaagaccgaa

SEQ ID NO: 139297 - DNA, 25 bp, Saccharomyces pastorianus
acttgggtaagccagttaagaatgc

SEQ ID NO: 139298 - DNA, 25 bp, Saccharomyces pastorianus
tactcaccagcccaaatcggtgggt

SEQ ID NO: 139299 - DNA, 25 bp, Saccharomyces pastorianus
tacgtgtcgtcaatgaaccaaccgc

SEQ ID NO: 139300 - DNA, 25 bp, Saccharomyces pastorianus
agttaagaatgctgttgtcactgtc

SEQ ID NO: 139301 - DNA, 25 bp, Saccharomyces pastorianus
caccagcccaaatcggtgggttcgt

SEQ ID NO: 139302 - DNA, 25 bp, Saccharomyces pastorianus
tttgaacgttttacgtgtcgtcaat

SEQ ID NO: 139303 - DNA, 25 bp, Saccharomyces pastorianus
agaggtcaaacttactcaccagccc

SEQ ID NO: 139304 - DNA, 25 bp, Saccharomyces pastorianus
gaggccagaggtcaaacttactcac

SEQ ID NO: 139305 - DNA, 25 bp, Saccharomyces pastorianus
caggccaaattgttggtttgaacgt

SEQ ID NO: 139306 - DNA, 25 bp, Saccharomyces pastorianus
tgggttgaggccagaggtcaaactt

SEQ ID NO: 139307 - DNA, 25 bp, Saccharomyces pastorianus
aaagacgcaggccaaattgttggtt

SEQ ID NO: 139308 - DNA, 25 bp, Saccharomyces pastorianus
taagaatgctgttgtcactgtccca

SEQ ID NO: 139309 - DNA, 25 bp, Saccharomyces pastorianus
tactcaccagcccaaatcggtgggt

SEQ ID NO: 139310 - DNA, 25 bp, Saccharomyces pastorianus
tacgtgtcgtcaatgaaccaaccgc

SEQ ID NO: 139311 - DNA, 25 bp, Saccharomyces pastorianus
gtaccttcgatatctccatcttaga

SEQ ID NO: 139312 - DNA, 25 bp, Saccharomyces pastorianus
gacgcaggccaaattgttggtttga

SEQ ID NO: 139313 - DNA, 25 bp, Saccharomyces pastorianus
gccagttaagaatgctgttgtcact

SEQ ID NO: 139314 - DNA, 25 bp, Saccharomyces pastorianus
tttgaacgttttacgtgtcgtcaat

SEQ ID NO: 139315 - DNA, 25 bp, Saccharomyces pastorianus
agaggtcaaacttactcaccagccc

SEQ ID NO: 139316 - DNA, 25 bp, Saccharomyces pastorianus
aacagctgaggcctacttgggtaag

SEQ ID NO: 139317 - DNA, 25 bp, Saccharomyces pastorianus
tgggttgaggccagaggtcaaactt

SEQ ID NO: 139318 - DNA, 25 bp, Saccharomyces pastorianus
gctgccttagcatacggtttggaaa

SEQ ID NO: 139319 - DNA, 25 bp, Saccharomyces pastorianus
ttctgccatgggtgaagaagctgcc

SEQ ID NO: 139320 - DNA, 25 bp, Saccharomyces pastorianus
aggatttgatggtcactatcatttc

SEQ ID NO: 139321 - DNA, 25 bp, Saccharomyces pastorianus
agctgctttcgatgaaggtaaggat

SEQ ID NO: 139322 - DNA, 25 bp, Saccharomyces pastorianus
gaaggtaaggatttgatggtcacta

SEQ ID NO: 139323 - DNA, 25 bp, Saccharomyces pastorianus
gatggtcactatcatttctgccatg

SEQ ID NO: 139324 - DNA, 25 bp, Saccharomyces pastorianus
ctgctttcgatgaaggtaaggattt

SEQ ID NO: 139325 - DNA, 25 bp, Saccharomyces pastorianus
gctgctttcgatgaaggtaaggatt

SEQ ID NO: 139326 - DNA, 25 bp, Saccharomyces pastorianus
tggtcactatcatttctgccatggg

SEQ ID NO: 139327 - DNA, 25 bp, Saccharomyces pastorianus
ttgatggtcactatcatttctgcca

SEQ ID NO: 139328 - DNA, 25 bp, Saccharomyces pastorianus
cactatcatttctgccatgggtgaa

SEQ ID NO: 139329 - DNA, 25 bp, Saccharomyces pastorianus
gtcactatcatttctgccatgggtg

SEQ ID NO: 139330 - DNA, 25 bp, Saccharomyces pastorianus
ctgccttgagaaagaatggtttcgt

SEQ ID NO: 139331 - DNA, 25 bp, Saccharomyces pastorianus
aatggtttcgttgtcatcaaaggta

SEQ ID NO: 139332 - DNA, 25 bp, Saccharomyces pastorianus
ttggttacccttgatatcttcactg

SEQ ID NO: 139333 - DNA, 25 bp, Saccharomyces pastorianus
gccaaggtccatttggttacccttg

SEQ ID NO: 139334 - DNA, 25 bp, Saccharomyces pastorianus
atttggttacccttgatatcttcac

SEQ ID NO: 139335 - DNA, 25 bp, Saccharomyces pastorianus
caaggtccatttggttacccttgat

SEQ ID NO: 139336 - DNA, 25 bp, Saccharomyces pastorianus
acacctttgaaaatgctgacgctgg

SEQ ID NO: 139337 - DNA, 25 bp, Saccharomyces pastorianus
aacacacctttgaaaatgctgacgc

SEQ ID NO: 139338 - DNA, 25 bp, Saccharomyces pastorianus
caatgttctgccttgagaaagaatg

SEQ ID NO: 139339 - DNA, 25 bp, Saccharomyces pastorianus
aggtccatttggttacccttgatat

SEQ ID NO: 139340 - DNA, 25 bp, Saccharomyces pastorianus
aaatgctgacgctggtgcctccgcc

SEQ ID NO: 139341 - DNA, 25 bp, Saccharomyces pastorianus
gtcaagagaagcgaataccaattgt

SEQ ID NO: 139342 - DNA, 25 bp, Saccharomyces pastorianus
gagaagcgaataccaattgttggat

SEQ ID NO: 139343 - DNA, 25 bp, Saccharomyces pastorianus
tcaagagaagcgaataccaattgtt

SEQ ID NO: 139344 - DNA, 25 bp, Saccharomyces pastorianus
aagagaagcgaataccaattgttgg

SEQ ID NO: 139345 - DNA, 25 bp, Saccharomyces pastorianus
ttgatgatggctacttgtccttgat

SEQ ID NO: 139346 - DNA, 25 bp, Saccharomyces pastorianus
ataccaattgttggatattgatgat

SEQ ID NO: 139347 - DNA, 25 bp, Saccharomyces pastorianus
agaagcgaataccaattgttggata

SEQ ID NO: 139348 - DNA, 25 bp, Saccharomyces pastorianus
tattgatgatggctacttgtccttg

SEQ ID NO: 139349 - DNA, 25 bp, Saccharomyces pastorianus
tgatgatggctacttgtccttgatg

SEQ ID NO: 139350 - DNA, 25 bp, Saccharomyces pastorianus
attgatgatggctacttgtccttga

SEQ ID NO: 139351 - DNA, 25 bp, Saccharomyces pastorianus
caagagaagcgaataccaattgttg

SEQ ID NO: 139352 - DNA, 25 bp, Saccharomyces pastorianus
ttgaagcgcttatttggcaaatcgt

SEQ ID NO: 139353 - DNA, 25 bp, Saccharomyces pastorianus
gaagttgaagcgcttatttggcaaa

SEQ ID NO: 139354 - DNA, 25 bp, Saccharomyces pastorianus
aggcgatgagtcaatcacgattgta

SEQ ID NO: 139355 - DNA, 25 bp, Saccharomyces pastorianus
gtcaatcacgattgtagacgttact

SEQ ID NO: 139356 - DNA, 25 bp, Saccharomyces pastorianus
aaatcgttgagcctgttttgagtac

SEQ ID NO: 139357 - DNA, 25 bp, Saccharomyces pastorianus
aatcgttgagcctgttttgagtacg

SEQ ID NO: 139358 - DNA, 25 bp, Saccharomyces pastorianus
ggaaaggcgatgagtcaatcacgat

SEQ ID NO: 139359 - DNA, 25 bp, Saccharomyces pastorianus
tttggcaaatcgttgagcctgtttt

SEQ ID NO: 139360 - DNA, 25 bp, Saccharomyces pastorianus
atcacgattgtagacgttactaata

SEQ ID NO: 139361 - DNA, 25 bp, Saccharomyces pastorianus
gacgttactaataaggacattcagg

SEQ ID NO: 139362 - DNA, 25 bp, Saccharomyces pastorianus
gacattcaggaagttgaagcgctta

SEQ ID NO: 139363 - DNA, 25 bp, Saccharomyces pastorianus
taaagtcgatgctaaactccacccc

SEQ ID NO: 139364 - DNA, 25 bp, Saccharomyces pastorianus
tacaaagaactttagcgcaccgaat

SEQ ID NO: 139365 - DNA, 25 bp, Saccharomyces pastorianus
agcgcaccgaatgtttcgtcatcag

SEQ ID NO: 139366 - DNA, 25 bp, Saccharomyces pastorianus
tgagaagcctcggaagtccaagcgt

SEQ ID NO: 139367 - DNA, 25 bp, Saccharomyces pastorianus
gcaaaagctggcactcaattagata

SEQ ID NO: 139368 - DNA, 25 bp, Saccharomyces pastorianus
gaaacaccggcttctacaaagaact

SEQ ID NO: 139369 - DNA, 25 bp, Saccharomyces pastorianus
ataagcgtatgagcgacctatcact

SEQ ID NO: 139370 - DNA, 25 bp, Saccharomyces pastorianus
gtttcgtcatcaggcaattcattga

SEQ ID NO: 139371 - DNA, 25 bp, Saccharomyces pastorianus
gtaattcaccaccacttggacatta

SEQ ID NO: 139372 - DNA, 25 bp, Saccharomyces pastorianus
gtccaagcgtgtcatcctcgaaaaa

SEQ ID NO: 139373 - DNA, 25 bp, Saccharomyces pastorianus
tggacattaccaacagcgttacaaa

SEQ ID NO: 139374 - DNA, 25 bp, Saccharomyces pastorianus
gtaaactactggattctacgatttt

SEQ ID NO: 139375 - DNA, 25 bp, Saccharomyces pastorianus
cacaggatgatgatgagagttcgct

SEQ ID NO: 139376 - DNA, 25 bp, Saccharomyces pastorianus
tcttatcgaaagcattttgggcaaa

SEQ ID NO: 139377 - DNA, 25 bp, Saccharomyces pastorianus
tagaatgcccctagatcatgaatat

SEQ ID NO: 139378 - DNA, 25 bp, Saccharomyces pastorianus
gatggtaccacgatttttgcaggaa

SEQ ID NO: 139379 - DNA, 25 bp, Saccharomyces pastorianus
aacctcccttggacagccttggaag

SEQ ID NO: 139380 - DNA, 25 bp, Saccharomyces pastorianus
gagttcgcttgattctctcaatgaa

SEQ ID NO: 139381 - DNA, 25 bp, Saccharomyces pastorianus
ggtttaaaaattcatctcttatcga

SEQ ID NO: 139382 - DNA, 25 bp, Saccharomyces pastorianus
ggtgctagctaacagatgtggtact

SEQ ID NO: 139383 - DNA, 25 bp, Saccharomyces pastorianus
aatgcgattttggtgctagctaaca

SEQ ID NO: 139384 - DNA, 25 bp, Saccharomyces pastorianus
gaaccagatatgtcaaacgtaaact

SEQ ID NO: 139385 - DNA, 25 bp, Saccharomyces pastorianus
acaggttacagttttcatgccagaa

SEQ ID NO: 139386 - DNA, 25 bp, Saccharomyces pastorianus
gaagctatacaattctgccctggta

SEQ ID NO: 139387 - DNA, 25 bp, Saccharomyces pastorianus
aaagttacgaaaagtgccacctatg

SEQ ID NO: 139388 - DNA, 25 bp, Saccharomyces pastorianus
tattccccgaatttgcattgacagg

SEQ ID NO: 139389 - DNA, 25 bp, Saccharomyces pastorianus
aaccagacataatactattccccga

SEQ ID NO: 139390 - DNA, 25 bp, Saccharomyces pastorianus
tagtaattcaactcaatccgcaaat

SEQ ID NO: 139391 - DNA, 25 bp, Saccharomyces pastorianus
gtgccacctatgtgaaaccagacat

SEQ ID NO: 139392 - DNA, 25 bp, Saccharomyces pastorianus
tagacgcaattcatggtgctaagat

SEQ ID NO: 139393 - DNA, 25 bp, Saccharomyces pastorianus
gaactggctaaatcaatatccgaga

SEQ ID NO: 139394 - DNA, 25 bp, Saccharomyces pastorianus
aattctgccctggtagtaaatccgc

SEQ ID NO: 139395 - DNA, 25 bp, Saccharomyces pastorianus
gatgaagggccctcttttgaactgg

SEQ ID NO: 139396 - DNA, 25 bp, Saccharomyces pastorianus
tctggtcttgatccaatcggaactt

SEQ ID NO: 139397 - DNA, 25 bp, Saccharomyces pastorianus
gagcagccgaagtgactatgtccct

SEQ ID NO: 139398 - DNA, 25 bp, Saccharomyces pastorianus
gtatgcattccgtggattcgcccaa

SEQ ID NO: 139399 - DNA, 25 bp, Saccharomyces pastorianus
acggtcgcattgttccaagatttca

SEQ ID NO: 139400 - DNA, 25 bp, Saccharomyces pastorianus
atttgtcgttgatccatttattggc

SEQ ID NO: 139401 - DNA, 25 bp, Saccharomyces pastorianus
tatgtccctggctgtctctgaggaa

SEQ ID NO: 139402 - DNA, 25 bp, Saccharomyces pastorianus
gtcgattgcttaggttacgggtcta

SEQ ID NO: 139403 - DNA, 25 bp, Saccharomyces pastorianus
tttccaacattggtgtcgattgctt

SEQ ID NO: 139404 - DNA, 25 bp, Saccharomyces pastorianus
attcgcccaagcgttagacaccatt

SEQ ID NO: 139405 - DNA, 25 bp, Saccharomyces pastorianus
attgccatttccacaaacggtcgca

SEQ ID NO: 139406 - DNA, 25 bp, Saccharomyces pastorianus
gtgcattgcatgactcactatgtgt

SEQ ID NO: 139407 - DNA, 25 bp, Saccharomyces pastorianus
ggtccccgtgggttagataagatct

SEQ ID NO: 139408 - DNA, 25 bp, Saccharomyces pastorianus
gttagtacaactttccaaatctcaa

SEQ ID NO: 139409 - DNA, 25 bp, Saccharomyces pastorianus
gaaatcacatatattggctgctaga

SEQ ID NO: 139410 - DNA, 25 bp, Saccharomyces pastorianus
gtactactggtgttgttgttctggc

SEQ ID NO: 139411 - DNA, 25 bp, Saccharomyces pastorianus
tgttgttctggcaagtgcgctactt

SEQ ID NO: 139412 - DNA, 25 bp, Saccharomyces pastorianus
agacagcacggattagaggccaaga

SEQ ID NO: 139413 - DNA, 25 bp, Saccharomyces pastorianus
ggatctgtcgaacgccattgtggca

SEQ ID NO: 139414 - DNA, 25 bp, Saccharomyces pastorianus
gtagcttctattatcaaaacttcgt

SEQ ID NO: 139415 - DNA, 25 bp, Saccharomyces pastorianus
aagatcttgatttcacctgacggtg

SEQ ID NO: 139416 - DNA, 25 bp, Saccharomyces pastorianus
ttggctgctagatcagtagcttcta

SEQ ID NO: 139417 - DNA, 25 bp, Saccharomyces pastorianus
gatggtgctacaattttgtcccaaa

SEQ ID NO: 139418 - DNA, 25 bp, Saccharomyces pastorianus
ggtgggtctaccatgttcaaagatt

SEQ ID NO: 139419 - DNA, 25 bp, Saccharomyces pastorianus
gttacgaaagattcttggcacctga

SEQ ID NO: 139420 - DNA, 25 bp, Saccharomyces pastorianus
tggtggctcgctgctggcacaaaca

SEQ ID NO: 139421 - DNA, 25 bp, Saccharomyces pastorianus
aaacgctgtctggtttggtggctcg

SEQ ID NO: 139422 - DNA, 25 bp, Saccharomyces pastorianus
gaaaggctactgtcacactaagaaa

SEQ ID NO: 139423 - DNA, 25 bp, Saccharomyces pastorianus
gatcaaactatccaggcttgcccta

SEQ ID NO: 139424 - DNA, 25 bp, Saccharomyces pastorianus
ttgactcctttacccacggtagtgg

SEQ ID NO: 139425 - DNA, 25 bp, Saccharomyces pastorianus
ggtgtagatgtttccgtgatttctc

SEQ ID NO: 139426 - DNA, 25 bp, Saccharomyces pastorianus
gacacttccttgagaactgccgaaa

SEQ ID NO: 139427 - DNA, 25 bp, Saccharomyces pastorianus
ggcacctgaaatcttcttcaatcca

SEQ ID NO: 139428 - DNA, 25 bp, Saccharomyces pastorianus
gcttgccctattgacgtccgtaaag

SEQ ID NO: 139429 - DNA, 25 bp, Saccharomyces pastorianus
aagcttttgcgcttgatcctttgat

SEQ ID NO: 139430 - DNA, 25 bp, Saccharomyces pastorianus
taatggcgatcttggaagcttttgc

SEQ ID NO: 139431 - DNA, 25 bp, Saccharomyces pastorianus
aaggcagtttccgaattacttgtga

SEQ ID NO: 139432 - DNA, 25 bp, Saccharomyces pastorianus
atgagaccagaaacgccagagcaat

SEQ ID NO: 139433 - DNA, 25 bp, Saccharomyces pastorianus
aactggaattcctttgccgttgatt

SEQ ID NO: 139434 - DNA, 25 bp, Saccharomyces pastorianus
gatttaccgccacaaaaacttactg

SEQ ID NO: 139435 - DNA, 25 bp, Saccharomyces pastorianus
gaaagggcgcaattactgtcgaaga

SEQ ID NO: 139436 - DNA, 25 bp, Saccharomyces pastorianus
gcgattgttttgaagctgccatctt

SEQ ID NO: 139437 - DNA, 25 bp, Saccharomyces pastorianus
tgaattagacgtccctgagcaggtt

SEQ ID NO: 139438 - DNA, 25 bp, Saccharomyces pastorianus
atgactggttatattctgggactag

SEQ ID NO: 139439 - DNA, 25 bp, Saccharomyces pastorianus
tgggactaggtgatcgccatccaag

SEQ ID NO: 139440 - DNA, 25 bp, Saccharomyces pastorianus
gcgttatgaaacctaaatctccaga

SEQ ID NO: 139441 - DNA, 25 bp, Saccharomyces pastorianus
gctgaaagatgtcacgcctatgcca

SEQ ID NO: 139442 - DNA, 25 bp, Saccharomyces pastorianus
tccgtgagcgttacactcggtaaga

SEQ ID NO: 139443 - DNA, 25 bp, Saccharomyces pastorianus
caaagcctgggcgagtatgctgaaa

SEQ ID NO: 139444 - DNA, 25 bp, Saccharomyces pastorianus
tgcccaacaacatcattcacttcaa

SEQ ID NO: 139445 - DNA, 25 bp, Saccharomyces pastorianus
gaacagttgtcgcaattggcagcta

SEQ ID NO: 139446 - DNA, 25 bp, Saccharomyces pastorianus
agaagctaatagctcccttggcagc

SEQ ID NO: 139447 - DNA, 25 bp, Saccharomyces pastorianus
gcctatgccaaagcgctacattata

SEQ ID NO: 139448 - DNA, 25 bp, Saccharomyces pastorianus
gcattaccaataccaactcaaagcc

SEQ ID NO: 139449 - DNA, 25 bp, Saccharomyces pastorianus
ccttcatgcccttggcgaatgggaa

SEQ ID NO: 139450 - DNA, 25 bp, Saccharomyces pastorianus
gcaggtgatacttccgtgagcgtta

SEQ ID NO: 139451 - DNA, 25 bp, Saccharomyces pastorianus
acagccatgcagatctgcattcaat

SEQ ID NO: 139452 - DNA, 25 bp, Saccharomyces pastorianus
acaccacagccatgcagatctgcat

SEQ ID NO: 139453 - DNA, 25 bp, Saccharomyces pastorianus
accacagccatgcagatctgcattc

SEQ ID NO: 139454 - DNA, 25 bp, Saccharomyces pastorianus
cacagccatgcagatctgcattcaa

SEQ ID NO: 139455 - DNA, 25 bp, Saccharomyces pastorianus
atctgcattcaataacaatgatcgt

SEQ ID NO: 139456 - DNA, 25 bp, Saccharomyces pastorianus
ctgcattcaataacaatgatcgtat

SEQ ID NO: 139457 - DNA, 25 bp, Saccharomyces pastorianus
agccatgcagatctgcattcaataa

SEQ ID NO: 139458 - DNA, 25 bp, Saccharomyces pastorianus
tgcagatctgcattcaataacaatg

SEQ ID NO: 139459 - DNA, 25 bp, Saccharomyces pastorianus
gcagatctgcattcaataacaatga

SEQ ID NO: 139460 - DNA, 25 bp, Saccharomyces pastorianus
catgcagatctgcattcaataacaa

SEQ ID NO: 139461 - DNA, 25 bp, Saccharomyces pastorianus
cagccatgcagatctgcattcaata

SEQ ID NO: 139462 - DNA, 25 bp, Saccharomyces pastorianus
tgcgtagcgtaatctcagggaacct

SEQ ID NO: 139463 - DNA, 25 bp, Saccharomyces pastorianus
gataatgatactgctggttccactt

SEQ ID NO: 139464 - DNA, 25 bp, Saccharomyces pastorianus
tggttccacttgctcttttaactaa

SEQ ID NO: 139465 - DNA, 25 bp, Saccharomyces pastorianus
gtggtcttcactcggttggtacaac

SEQ ID NO: 139466 - DNA, 25 bp, Saccharomyces pastorianus
ggaatctaccggcaagttcgtctta

SEQ ID NO: 139467 - DNA, 25 bp, Saccharomyces pastorianus
gcaaggattgcatgtcgtcatcaca

SEQ ID NO: 139468 - DNA, 25 bp, Saccharomyces pastorianus
gggatcatccagtaatcgccggagt

SEQ ID NO: 139469 - DNA, 25 bp, Saccharomyces pastorianus
aaaggttgtaccctcactgggatca

SEQ ID NO: 139470 - DNA, 25 bp, Saccharomyces pastorianus
gggaacctgtcactgtacgaggcta

SEQ ID NO: 139471 - DNA, 25 bp, Saccharomyces pastorianus
agttggatgccctagaatgccgtct

SEQ ID NO: 139472 - DNA, 25 bp, Saccharomyces pastorianus
gaacgcgggttcttccatttaaatg

SEQ ID NO: 139473 - DNA, 25 bp, Saccharomyces pastorianus
ttttgaagagaaacgctatgacgac

SEQ ID NO: 139474 - DNA, 25 bp, Saccharomyces pastorianus
gacttcatcagatatgacgttaaaa

SEQ ID NO: 139475 - DNA, 25 bp, Saccharomyces pastorianus
atatatactacaaaggcctacggcg

SEQ ID NO: 139476 - DNA, 25 bp, Saccharomyces pastorianus
atatactacaaaggcctacggcgac

SEQ ID NO: 139477 - DNA, 25 bp, Saccharomyces pastorianus
ggatgttgatataggatgttatttt

SEQ ID NO: 139478 - DNA, 25 bp, Saccharomyces pastorianus
gacgacaaactgttagacttcatca

SEQ ID NO: 139479 - DNA, 25 bp, Saccharomyces pastorianus
cagatatgacgttaaaacacctaaa

SEQ ID NO: 139480 - DNA, 25 bp, Saccharomyces pastorianus
gacaaactgttagacttcatcagat

SEQ ID NO: 139481 - DNA, 25 bp, Saccharomyces pastorianus
agaaacgctatgacgacaaactgtt

SEQ ID NO: 139482 - DNA, 25 bp, Saccharomyces pastorianus
gaagagaaacgctatgacgacaaac

SEQ ID NO: 139483 - DNA, 25 bp, Saccharomyces pastorianus
gttagacttcatcagatatgacgtt

SEQ ID NO: 139484 - DNA, 25 bp, Saccharomyces pastorianus
gaggagcgttgaacttagcgaacta

SEQ ID NO: 139485 - DNA, 25 bp, Saccharomyces pastorianus
tagcaagaaaccaacccagaccgag

SEQ ID NO: 139486 - DNA, 25 bp, Saccharomyces pastorianus
atcatttctcgcgaactgggacgta

SEQ ID NO: 139487 - DNA, 25 bp, Saccharomyces pastorianus
gactctgtattatgaggctctacgt

SEQ ID NO: 139488 - DNA, 25 bp, Saccharomyces pastorianus
gatcaaactatctgcatcgaagcta

SEQ ID NO: 139489 - DNA, 25 bp, Saccharomyces pastorianus
gtattacaccattcaattacgcttg

SEQ ID NO: 139490 - DNA, 25 bp, Saccharomyces pastorianus
cagaccgagctcttggaaaaggcat

SEQ ID NO: 139491 - DNA, 25 bp, Saccharomyces pastorianus
taaagcccgttattgtttggaacag

SEQ ID NO: 139492 - DNA, 25 bp, Saccharomyces pastorianus
caattacgcttgttttggtaggcta

SEQ ID NO: 139493 - DNA, 25 bp, Saccharomyces pastorianus
ggaacaggtcctatgtattacacca

SEQ ID NO: 139494 - DNA, 25 bp, Saccharomyces pastorianus
gtgggcattggttaacatcatttct

SEQ ID NO: 139495 - DNA, 25 bp, Saccharomyces pastorianus
tctatgttttggtgtaccgaaacca

SEQ ID NO: 139496 - DNA, 25 bp, Saccharomyces pastorianus
tggatcgcattggaacggaggaaat

SEQ ID NO: 139497 - DNA, 25 bp, Saccharomyces pastorianus
aatccagaacaattactgcaactag

SEQ ID NO: 139498 - DNA, 25 bp, Saccharomyces pastorianus
aaaggcgctattgaatatctggaaa

SEQ ID NO: 139499 - DNA, 25 bp, Saccharomyces pastorianus
aagcgtatactcaatttaatccaga

SEQ ID NO: 139500 - DNA, 25 bp, Saccharomyces pastorianus
aaaagtggagactctggactaacag

SEQ ID NO: 139501 - DNA, 25 bp, Saccharomyces pastorianus
taaacggaaatgataaaggcgctat

SEQ ID NO: 139502 - DNA, 25 bp, Saccharomyces pastorianus
atggtaatcatgaaagccactttat

SEQ ID NO: 139503 - DNA, 25 bp, Saccharomyces pastorianus
gtgtaccgaaaccaagacgttgatg

SEQ ID NO: 139504 - DNA, 25 bp, Saccharomyces pastorianus
gacgttgatgcgcaagttgtttata

SEQ ID NO: 139505 - DNA, 25 bp, Saccharomyces pastorianus
agccactttattgcagataaacgga

SEQ ID NO: 139506 - DNA, 25 bp, Saccharomyces pastorianus
gcacaagtttggctgataattctaa

SEQ ID NO: 139507 - DNA, 25 bp, Saccharomyces pastorianus
ggatatgcctatagattcatcaact

SEQ ID NO: 139508 - DNA, 25 bp, Saccharomyces pastorianus
gaatttggtgtctggaacctcttca

SEQ ID NO: 139509 - DNA, 25 bp, Saccharomyces pastorianus
gaaccccgatcgcatctcaagaaaa

SEQ ID NO: 139510 - DNA, 25 bp, Saccharomyces pastorianus
tgctacgctagctaatgacaaagac

SEQ ID NO: 139511 - DNA, 25 bp, Saccharomyces pastorianus
ggaacctcttcatatccacggaatt

SEQ ID NO: 139512 - DNA, 25 bp, Saccharomyces pastorianus
gttattaaacccgaatttgagccag

SEQ ID NO: 139513 - DNA, 25 bp, Saccharomyces pastorianus
gggattactatactgccacaaattt

SEQ ID NO: 139514 - DNA, 25 bp, Saccharomyces pastorianus
aagacggtgatctggcttttttgat

SEQ ID NO: 139515 - DNA, 25 bp, Saccharomyces pastorianus
gagccagtcccatcagttgcaagga

SEQ ID NO: 139516 - DNA, 25 bp, Saccharomyces pastorianus
agtgcaatctattaagcgcgaattt

SEQ ID NO: 139517 - DNA, 25 bp, Saccharomyces pastorianus
tccagtgatcgatcctaagacatct

SEQ ID NO: 139518 - DNA, 25 bp, Saccharomyces pastorianus
gacaagtacttcagcaatccagatg

SEQ ID NO: 139519 - DNA, 25 bp, Saccharomyces pastorianus
gatgttgctattgtcatcgtcaaac

SEQ ID NO: 139520 - DNA, 25 bp, Saccharomyces pastorianus
caatgtgagagactgcagatccaaa

SEQ ID NO: 139521 - DNA, 25 bp, Saccharomyces pastorianus
atgaggcaacatctgactgttactg

SEQ ID NO: 139522 - DNA, 25 bp, Saccharomyces pastorianus
tgcctccttatttacttgcgcaata

SEQ ID NO: 139523 - DNA, 25 bp, Saccharomyces pastorianus
aagatgttcttgagactctaagcaa

SEQ ID NO: 139524 - DNA, 25 bp, Saccharomyces pastorianus
ggccaagcttggattttactttgat

SEQ ID NO: 139525 - DNA, 25 bp, Saccharomyces pastorianus
gttatcccgtatcaggcaatggcca

SEQ ID NO: 139526 - DNA, 25 bp, Saccharomyces pastorianus
gagttttaaagttatcccgtatcag

SEQ ID NO: 139527 - DNA, 25 bp, Saccharomyces pastorianus
ttgacggactatagcttccatatgg

SEQ ID NO: 139528 - DNA, 25 bp, Saccharomyces pastorianus
gcatagaaggcttaggcgatccaag

SEQ ID NO: 139529 - DNA, 25 bp, Saccharomyces pastorianus
tccaagcatggataaaacacttatg

SEQ ID NO: 139530 - DNA, 25 bp, Saccharomyces pastorianus
tcatgcgatacgactccagcataga

SEQ ID NO: 139531 - DNA, 25 bp, Saccharomyces pastorianus
atgcaggactcatgcgatacgactc

SEQ ID NO: 139532 - DNA, 25 bp, Saccharomyces pastorianus
gactcatgcgatacgactccagcat

SEQ ID NO: 139533 - DNA, 25 bp, Saccharomyces pastorianus
aggactcatgcgatacgactccagc

SEQ ID NO: 139534 - DNA, 25 bp, Saccharomyces pastorianus
aggcttaggcgatccaagcatggat

SEQ ID NO: 139535 - DNA, 25 bp, Saccharomyces pastorianus
gactccagcatagaaggcttaggcg

SEQ ID NO: 139536 - DNA, 25 bp, Saccharomyces pastorianus
atggtgaatgcaggactcatgcgat

SEQ ID NO: 139537 - DNA, 25 bp, Saccharomyces pastorianus
gatacgactccagcatagaaggctt

SEQ ID NO: 139538 - DNA, 25 bp, Saccharomyces pastorianus
taaaacacttatgaacgatacctgt

SEQ ID NO: 139539 - DNA, 25 bp, Saccharomyces pastorianus
aacaacacgaactataacgacgata

SEQ ID NO: 139540 - DNA, 25 bp, Saccharomyces pastorianus
gaacccgtttatcgttgccacaact

SEQ ID NO: 139541 - DNA, 25 bp, Saccharomyces pastorianus
aatgttggctcctcacaacctcata

SEQ ID NO: 139542 - DNA, 25 bp, Saccharomyces pastorianus
tcacaacctcatacgaacaacaaca

SEQ ID NO: 139543 - DNA, 25 bp, Saccharomyces pastorianus
gaactataacgacgataacaccgtt

SEQ ID NO: 139544 - DNA, 25 bp, Saccharomyces pastorianus
ataacaacactactatggaattagt

SEQ ID NO: 139545 - DNA, 25 bp, Saccharomyces pastorianus
agtaaacaatgttggctcctcacaa

SEQ ID NO: 139546 - DNA, 25 bp, Saccharomyces pastorianus
gagcctaactaaccataacaacact

SEQ ID NO: 139547 - DNA, 25 bp, Saccharomyces pastorianus
gtttatcgttgccacaactgagcct

SEQ ID NO: 139548 - DNA, 25 bp, Saccharomyces pastorianus
ttggctcctcacaacctcatacgaa

SEQ ID NO: 139549 - DNA, 25 bp, Saccharomyces pastorianus
gttgccacaactgagcctaactaac

SEQ ID NO: 139550 - DNA, 25 bp, Saccharomyces pastorianus
acgattcttcgccaccaaaggaatt

SEQ ID NO: 139551 - DNA, 25 bp, Saccharomyces pastorianus
atcaccctctagtactcataacaag

SEQ ID NO: 139552 - DNA, 25 bp, Saccharomyces pastorianus
gacggattctactcaaatgcaacca

SEQ ID NO: 139553 - DNA, 25 bp, Saccharomyces pastorianus
acagcagcatttcgcacatgttcgc

SEQ ID NO: 139554 - DNA, 25 bp, Saccharomyces pastorianus
aagaagtcgggttggcatcaccctc

SEQ ID NO: 139555 - DNA, 25 bp, Saccharomyces pastorianus
aatcatcctagattccctatttgga

SEQ ID NO: 139556 - DNA, 25 bp, Saccharomyces pastorianus
agcggcttttcaggcaacgccagta

SEQ ID NO: 139557 - DNA, 25 bp, Saccharomyces pastorianus
ccgggccaaccattgaatgccaatt

SEQ ID NO: 139558 - DNA, 25 bp, Saccharomyces pastorianus
gaggtctttctgtttctagcgttaa

SEQ ID NO: 139559 - DNA, 25 bp, Saccharomyces pastorianus
caaattatggcccaacctttgtcca

SEQ ID NO: 139560 - DNA, 25 bp, Saccharomyces pastorianus
ggctattttagttatcctggcgtct

SEQ ID NO: 139561 - DNA, 25 bp, Saccharomyces pastorianus
ggcaaccctatgctccaaatatggt

SEQ ID NO: 139562 - DNA, 25 bp, Saccharomyces pastorianus
ggctttagttgaattttcttccgtg

SEQ ID NO: 139563 - DNA, 25 bp, Saccharomyces pastorianus
taacaagtacttccttggcaaccct

SEQ ID NO: 139564 - DNA, 25 bp, Saccharomyces pastorianus
acatggagctgtgactttccaacaa

SEQ ID NO: 139565 - DNA, 25 bp, Saccharomyces pastorianus
gccaaaatcttacctatgcatcaac

SEQ ID NO: 139566 - DNA, 25 bp, Saccharomyces pastorianus
cccacaatttcttctcaattctcaa

SEQ ID NO: 139567 - DNA, 25 bp, Saccharomyces pastorianus
tcatatctgctaggactttaaggaa

SEQ ID NO: 139568 - DNA, 25 bp, Saccharomyces pastorianus
agtgccgtaaaagccttagatagtt

SEQ ID NO: 139569 - DNA, 25 bp, Saccharomyces pastorianus
tacagcaccagcagccacaattaaa

SEQ ID NO: 139570 - DNA, 25 bp, Saccharomyces pastorianus
acaggagcagttattcacatggagc

SEQ ID NO: 139571 - DNA, 25 bp, Saccharomyces pastorianus
acaatttgcaaccacagcctttatt

SEQ ID NO: 139572 - DNA, 25 bp, Saccharomyces pastorianus
aatgcttccagctagtatttgacga

SEQ ID NO: 139573 - DNA, 25 bp, Saccharomyces pastorianus
atgttttccatcaaccctgggtgaa

SEQ ID NO: 139574 - DNA, 25 bp, Saccharomyces pastorianus
aaggcgcctcacaaagtggcttcgt

SEQ ID NO: 139575 - DNA, 25 bp, Saccharomyces pastorianus
ggctcgcaactttctggttatcatg

SEQ ID NO: 139576 - DNA, 25 bp, Saccharomyces pastorianus
atcgcagacaaaattcacggctcaa

SEQ ID NO: 139577 - DNA, 25 bp, Saccharomyces pastorianus
aggtttttcaaactgcacggctcgc

SEQ ID NO: 139578 - DNA, 25 bp, Saccharomyces pastorianus
gggtactctttaatgaatgcttcca

SEQ ID NO: 139579 - DNA, 25 bp, Saccharomyces pastorianus
ttcacggctcaaaaaggctgtacga

SEQ ID NO: 139580 - DNA, 25 bp, Saccharomyces pastorianus
gaaagaacttctgcctttgaacaat

SEQ ID NO: 139581 - DNA, 25 bp, Saccharomyces pastorianus
ggctgtacgagttaccacgcaaggc

SEQ ID NO: 139582 - DNA, 25 bp, Saccharomyces pastorianus
aattactttcaacgcggaatgctct

SEQ ID NO: 139583 - DNA, 25 bp, Saccharomyces pastorianus
aatggcagtgaaattggtgtcgacc

SEQ ID NO: 139584 - DNA, 25 bp, Saccharomyces pastorianus
aggccgctgaagtgaatgaaccatt

SEQ ID NO: 139585 - DNA, 25 bp, Saccharomyces pastorianus
gaatccattgccaactcccaatttt

SEQ ID NO: 139586 - DNA, 25 bp, Saccharomyces pastorianus
gattaccactgcatctacggtcgat

SEQ ID NO: 139587 - DNA, 25 bp, Saccharomyces pastorianus
atcagtcggtgagcgaggctcgtaa

SEQ ID NO: 139588 - DNA, 25 bp, Saccharomyces pastorianus
gattccatcgatttaaccagatcca

SEQ ID NO: 139589 - DNA, 25 bp, Saccharomyces pastorianus
ggataatggatcaacttcgttcaaa

SEQ ID NO: 139590 - DNA, 25 bp, Saccharomyces pastorianus
atccaattcaccagaatccattgcc

SEQ ID NO: 139591 - DNA, 25 bp, Saccharomyces pastorianus
taccacccctgccaagatgggaaga

SEQ ID NO: 139592 - DNA, 25 bp, Saccharomyces pastorianus
tgtcgaccatggagaggccgctgaa

SEQ ID NO: 139593 - DNA, 25 bp, Saccharomyces pastorianus
tcccaattttcacaacaatcctcga

SEQ ID NO: 139594 - DNA, 25 bp, Saccharomyces pastorianus
ttaccactaccgaagactaaaactg

SEQ ID NO: 139595 - DNA, 25 bp, Saccharomyces pastorianus
tgatgaacttttgaactggccagaa

SEQ ID NO: 139596 - DNA, 25 bp, Saccharomyces pastorianus
gccccattgtgtcacggctacaaaa

SEQ ID NO: 139597 - DNA, 25 bp, Saccharomyces pastorianus
aaatctaaaggtctcgtcgtcgaag

SEQ ID NO: 139598 - DNA, 25 bp, Saccharomyces pastorianus
gcctacaactttgaactgtcagacg

SEQ ID NO: 139599 - DNA, 25 bp, Saccharomyces pastorianus
gagatatcaccttggattatgagac

SEQ ID NO: 139600 - DNA, 25 bp, Saccharomyces pastorianus
gaaatttcttgatcatcctgatgct

SEQ ID NO: 139601 - DNA, 25 bp, Saccharomyces pastorianus
gtcgtcgaagcctttgccccattgt

SEQ ID NO: 139602 - DNA, 25 bp, Saccharomyces pastorianus
gaaggtaaccttgcagcctacaact

SEQ ID NO: 139603 - DNA, 25 bp, Saccharomyces pastorianus
ggtggaccgtaatccaggtcaagtt

SEQ ID NO: 139604 - DNA, 25 bp, Saccharomyces pastorianus
aagcacaagccagtggtcaaccaaa

SEQ ID NO: 139605 - DNA, 25 bp, Saccharomyces pastorianus
tttcaaacggcttcaaaatcccaag

SEQ ID NO: 139606 - DNA, 25 bp, Saccharomyces pastorianus
caaacggcttcaaaatcccaagcat

SEQ ID NO: 139607 - DNA, 25 bp, Saccharomyces pastorianus
aacggcttcaaaatcccaagcattg

SEQ ID NO: 139608 - DNA, 25 bp, Saccharomyces pastorianus
acggcttcaaaatcccaagcattgc

SEQ ID NO: 139609 - DNA, 25 bp, Saccharomyces pastorianus
aaacggcttcaaaatcccaagcatt

SEQ ID NO: 139610 - DNA, 25 bp, Saccharomyces pastorianus
tcaaacggcttcaaaatcccaagca

SEQ ID NO: 139611 - DNA, 25 bp, Saccharomyces pastorianus
tcccaagcattgctttgggaaccta

SEQ ID NO: 139612 - DNA, 25 bp, Saccharomyces pastorianus
cccaagcattgctttgggaacctac

SEQ ID NO: 139613 - DNA, 25 bp, Saccharomyces pastorianus
aatcccaagcattgctttgggaacc

SEQ ID NO: 139614 - DNA, 25 bp, Saccharomyces pastorianus
ttcaaacggcttcaaaatcccaagc

SEQ ID NO: 139615 - DNA, 25 bp, Saccharomyces pastorianus
atcccaagcattgctttgggaacct

SEQ ID NO: 139616 - DNA, 25 bp, Saccharomyces pastorianus
agcattcatatctatcgttgacagc

SEQ ID NO: 139617 - DNA, 25 bp, Saccharomyces pastorianus
attcatatctatcgttgacagcgaa

SEQ ID NO: 139618 - DNA, 25 bp, Saccharomyces pastorianus
aaagcattcatatctatcgttgaca

SEQ ID NO: 139619 - DNA, 25 bp, Saccharomyces pastorianus
atatctatcgttgacagcgaaaaag

SEQ ID NO: 139620 - DNA, 25 bp, Saccharomyces pastorianus
tctatcgttgacagcgaaaaagaag

SEQ ID NO: 139621 - DNA, 25 bp, Saccharomyces pastorianus
aagcattcatatctatcgttgacag

SEQ ID NO: 139622 - DNA, 25 bp, Saccharomyces pastorianus
tggcaaaagcattcatatctatcgt

SEQ ID NO: 139623 - DNA, 25 bp, Saccharomyces pastorianus
gcattcatatctatcgttgacagcg

SEQ ID NO: 139624 - DNA, 25 bp, Saccharomyces pastorianus
tcatatctatcgttgacagcgaaaa

SEQ ID NO: 139625 - DNA, 25 bp, Saccharomyces pastorianus
ggcaaaagcattcatatctatcgtt

SEQ ID NO: 139626 - DNA, 25 bp, Saccharomyces pastorianus
gaaatcaatggcaaaagcattcata

SEQ ID NO: 139627 - DNA, 25 bp, Saccharomyces pastorianus
gtgcctttcgatgaagtcttccata

SEQ ID NO: 139628 - DNA, 25 bp, Saccharomyces pastorianus
aggtaccaagggatgtgcctttcga

SEQ ID NO: 139629 - DNA, 25 bp, Saccharomyces pastorianus
ttcgcttaaagctaccctaaacgca

SEQ ID NO: 139630 - DNA, 25 bp, Saccharomyces pastorianus
gatttttactatggtccgggcgacg

SEQ ID NO: 139631 - DNA, 25 bp, Saccharomyces pastorianus
gcttgtcacctctcgtcaatgagaa

SEQ ID NO: 139632 - DNA, 25 bp, Saccharomyces pastorianus
gtttgtcctaaatgcacctgttgtt

SEQ ID NO: 139633 - DNA, 25 bp, Saccharomyces pastorianus
aaacgcaactagcaagtttgtccta

SEQ ID NO: 139634 - DNA, 25 bp, Saccharomyces pastorianus
cagagagctttccagttgtttgtaa

SEQ ID NO: 139635 - DNA, 25 bp, Saccharomyces pastorianus
ggatagcttagattacgacccgaac

SEQ ID NO: 139636 - DNA, 25 bp, Saccharomyces pastorianus
ttggaaaacccttggcttgtcacct

SEQ ID NO: 139637 - DNA, 25 bp, Saccharomyces pastorianus
cgggcgacggtgttgttcaccataa

SEQ ID NO: 139638 - DNA, 25 bp, Saccharomyces pastorianus
tcaaagggccgtgttattagcaaac

SEQ ID NO: 139639 - DNA, 25 bp, Saccharomyces pastorianus
agaactggcatctctggaggcgtcg

SEQ ID NO: 139640 - DNA, 25 bp, Saccharomyces pastorianus
accgatactggtgtttatgttgtta

SEQ ID NO: 139641 - DNA, 25 bp, Saccharomyces pastorianus
tagcaaacgctgtgtccatcgattt

SEQ ID NO: 139642 - DNA, 25 bp, Saccharomyces pastorianus
agatgcacctttcttatcatttgat

SEQ ID NO: 139643 - DNA, 25 bp, Saccharomyces pastorianus
ttatcctactgagatgctaagttct

SEQ ID NO: 139644 - DNA, 25 bp, Saccharomyces pastorianus
ataatggcgagtgtagaccgaaatt

SEQ ID NO: 139645 - DNA, 25 bp, Saccharomyces pastorianus
gaaggatccacttttgaccaatttg

SEQ ID NO: 139646 - DNA, 25 bp, Saccharomyces pastorianus
gttagatttgattcgcagagatgct

SEQ ID NO: 139647 - DNA, 25 bp, Saccharomyces pastorianus
tatcatttgattttcctgtaacaga

SEQ ID NO: 139648 - DNA, 25 bp, Saccharomyces pastorianus
atctctggaggcgtcgttacgaatt

SEQ ID NO: 139649 - DNA, 25 bp, Saccharomyces pastorianus
acctccttccgcgtatgttgataat

SEQ ID NO: 139650 - DNA, 25 bp, Saccharomyces pastorianus
cgtttttctaggtttcgagcaggct

SEQ ID NO: 139651 - DNA, 25 bp, Saccharomyces pastorianus
taaaaggcccttttcgttcatcaat

SEQ ID NO: 139652 - DNA, 25 bp, Saccharomyces pastorianus
cccttttcgttcatcaattctcata

SEQ ID NO: 139653 - DNA, 25 bp, Saccharomyces pastorianus
cgagcaggctaataggtatgccata

SEQ ID NO: 139654 - DNA, 25 bp, Saccharomyces pastorianus
ataaagactatcatacctccttccg

SEQ ID NO: 139655 - DNA, 25 bp, Saccharomyces pastorianus
gtccttttttggtagatgtctttga

SEQ ID NO: 139656 - DNA, 25 bp, Saccharomyces pastorianus
gagatttttctataacaaaggccat

SEQ ID NO: 139657 - DNA, 25 bp, Saccharomyces pastorianus
tcgtctacatcgtccttttttggta

SEQ ID NO: 139658 - DNA, 25 bp, Saccharomyces pastorianus
aaaggccataatgcggcagttttat

SEQ ID NO: 139659 - DNA, 25 bp, Saccharomyces pastorianus
ggcagttttatcgtctacatcgtcc

SEQ ID NO: 139660 - DNA, 25 bp, Saccharomyces pastorianus
ggagaagcagcaataccaccactac

SEQ ID NO: 139661 - DNA, 25 bp, Saccharomyces pastorianus
gtttgaagcccctatgcgatagaaa

SEQ ID NO: 139662 - DNA, 25 bp, Saccharomyces pastorianus
ataccaccactacgagatattttat

SEQ ID NO: 139663 - DNA, 25 bp, Saccharomyces pastorianus
gtggttcgaagactctggaaaactg

SEQ ID NO: 139664 - DNA, 25 bp, Saccharomyces pastorianus
gggcttctttgatactacagtggtt

SEQ ID NO: 139665 - DNA, 25 bp, Saccharomyces pastorianus
tgggagttccatagaatgcccgaaa

SEQ ID NO: 139666 - DNA, 25 bp, Saccharomyces pastorianus
atagggccacaatgctgaaagatga

SEQ ID NO: 139667 - DNA, 25 bp, Saccharomyces pastorianus
tattattgtttgaagcccctatgcg

SEQ ID NO: 139668 - DNA, 25 bp, Saccharomyces pastorianus
aggcaaatgcttaccgattgaccaa

SEQ ID NO: 139669 - DNA, 25 bp, Saccharomyces pastorianus
gagcttagacagttgggcttctttg

SEQ ID NO: 139670 - DNA, 25 bp, Saccharomyces pastorianus
gaatgcccgaaagcttgctctatta

SEQ ID NO: 139671 - DNA, 25 bp, Saccharomyces pastorianus
ggcagaagcgtcgttatccacgccg

SEQ ID NO: 139672 - DNA, 25 bp, Saccharomyces pastorianus
tggtgtggccaagggctccttcaag

SEQ ID NO: 139673 - DNA, 25 bp, Saccharomyces pastorianus
tccttcaaggactctttgatcaagc

SEQ ID NO: 139674 - DNA, 25 bp, Saccharomyces pastorianus
ttgatcaagcttatcggtcctacct

SEQ ID NO: 139675 - DNA, 25 bp, Saccharomyces pastorianus
ctccgttgtaggcagaagcgtcgtt

SEQ ID NO: 139676 - DNA, 25 bp, Saccharomyces pastorianus
aatctttgaagactggtaatgccgg

SEQ ID NO: 139677 - DNA, 25 bp, Saccharomyces pastorianus
ggtcctacctccgttgtaggcagaa

SEQ ID NO: 139678 - DNA, 25 bp, Saccharomyces pastorianus
acgccggccaagatgacttaggtaa

SEQ ID NO: 139679 - DNA, 25 bp, Saccharomyces pastorianus
atccacgccggccaagatgacttag

SEQ ID NO: 139680 - DNA, 25 bp, Saccharomyces pastorianus
aggactctttgatcaagcttatcgg

SEQ ID NO: 139681 - DNA, 25 bp, Saccharomyces pastorianus
aagactggtaatgccggtccaagac

SEQ ID NO: 139682 - DNA, 25 bp, Saccharomyces pastorianus
gaagacaccgtgactatccgcaagc

SEQ ID NO: 139683 - DNA, 25 bp, Saccharomyces pastorianus
caaagggtgttcgatgtgaaggata

SEQ ID NO: 139684 - DNA, 25 bp, Saccharomyces pastorianus
cattatgcgcaagtgtaacgagtga

SEQ ID NO: 139685 - DNA, 25 bp, Saccharomyces pastorianus
tatccgcaagctacaggccaacaag

SEQ ID NO: 139686 - DNA, 25 bp, Saccharomyces pastorianus
tttgctgaagacaccgtgactatcc

SEQ ID NO: 139687 - DNA, 25 bp, Saccharomyces pastorianus
aattcgcccaaagcgtggtttcgcg

SEQ ID NO: 139688 - DNA, 25 bp, Saccharomyces pastorianus
gggtgctgatctgttcattatgcgc

SEQ ID NO: 139689 - DNA, 25 bp, Saccharomyces pastorianus
gctacaggccaacaagtacgtgtta

SEQ ID NO: 139690 - DNA, 25 bp, Saccharomyces pastorianus
gtgactatccgcaagctacaggcca

SEQ ID NO: 139691 - DNA, 25 bp, Saccharomyces pastorianus
taacgagtgaattcgcccaaagcgt

SEQ ID NO: 139692 - DNA, 25 bp, Saccharomyces pastorianus
gatctgttcattatgcgcaagtgta

SEQ ID NO: 139693 - DNA, 25 bp, Saccharomyces pastorianus
ggcacttcgtctgcctttgaaaaga

SEQ ID NO: 139694 - DNA, 25 bp, Saccharomyces pastorianus
aaagtcactcgacgaactagctccg

SEQ ID NO: 139695 - DNA, 25 bp, Saccharomyces pastorianus
aaagagtgtcgagcgacttcgccgt

SEQ ID NO: 139696 - DNA, 25 bp, Saccharomyces pastorianus
aagacgttcaacacaggcgtggcca

SEQ ID NO: 139697 - DNA, 25 bp, Saccharomyces pastorianus
aaggcacaaaccattctgtccaggg

SEQ ID NO: 139698 - DNA, 25 bp, Saccharomyces pastorianus
tgtcattcctgtgcctctgaacaag

SEQ ID NO: 139699 - DNA, 25 bp, Saccharomyces pastorianus
ctagctccgctgatgatgaccaaga

SEQ ID NO: 139700 - DNA, 25 bp, Saccharomyces pastorianus
ggaccccatccaggctttggaaaag

SEQ ID NO: 139701 - DNA, 25 bp, Saccharomyces pastorianus
ttcgccgtgcgcttgggagaagaac

SEQ ID NO: 139702 - DNA, 25 bp, Saccharomyces pastorianus
ggagaagaactcactgccattgcca

SEQ ID NO: 139703 - DNA, 25 bp, Saccharomyces pastorianus
gggccttatatctggtgtactgcca

SEQ ID NO: 139704 - DNA, 25 bp, Saccharomyces pastorianus
tttgcagagaactcttcccttagct

SEQ ID NO: 139705 - DNA, 25 bp, Saccharomyces pastorianus
ggtctctggcaggtattcttttgca

SEQ ID NO: 139706 - DNA, 25 bp, Saccharomyces pastorianus
ttctctgccgatggttcgctagctg

SEQ ID NO: 139707 - DNA, 25 bp, Saccharomyces pastorianus
cgctagctggtgttcgtactgacga

SEQ ID NO: 139708 - DNA, 25 bp, Saccharomyces pastorianus
gcctgcgaaccctgtaagaggtcta

SEQ ID NO: 139709 - DNA, 25 bp, Saccharomyces pastorianus
ttagctcgttgatcgcttcaagcca

SEQ ID NO: 139710 - DNA, 25 bp, Saccharomyces pastorianus
ggagacgtggcctgactaacatata

SEQ ID NO: 139711 - DNA, 25 bp, Saccharomyces pastorianus
aagaggtctactttggactggcccg

SEQ ID NO: 139712 - DNA, 25 bp, Saccharomyces pastorianus
gaagcgagcaacacatgtcccactt

SEQ ID NO: 139713 - DNA, 25 bp, Saccharomyces pastorianus
ctgctctgcagttggttatcttgga

SEQ ID NO: 139714 - DNA, 25 bp, Saccharomyces pastorianus
atgtcccactttgccacaggagacg

SEQ ID NO: 139715 - DNA, 25 bp, Saccharomyces pastorianus
tattgctttgttgaccattggtgcc

SEQ ID NO: 139716 - DNA, 25 bp, Saccharomyces pastorianus
tgctttgttgaccattggtgccaga

SEQ ID NO: 139717 - DNA, 25 bp, Saccharomyces pastorianus
gaccattggtgccagagaagctgct

SEQ ID NO: 139718 - DNA, 25 bp, Saccharomyces pastorianus
ttgaccattggtgccagagaagctg

SEQ ID NO: 139719 - DNA, 25 bp, Saccharomyces pastorianus
tttgttgaccattggtgccagagaa

SEQ ID NO: 139720 - DNA, 25 bp, Saccharomyces pastorianus
gttgaccattggtgccagagaagct

SEQ ID NO: 139721 - DNA, 25 bp, Saccharomyces pastorianus
gctttgttgaccattggtgccagag

SEQ ID NO: 139722 - DNA, 25 bp, Saccharomyces pastorianus
accattggtgccagagaagctgctt

SEQ ID NO: 139723 - DNA, 25 bp, Saccharomyces pastorianus
ttgctttgttgaccattggtgccag

SEQ ID NO: 139724 - DNA, 25 bp, Saccharomyces pastorianus
cattggtgccagagaagctgctttc

SEQ ID NO: 139725 - DNA, 25 bp, Saccharomyces pastorianus
attgctttgttgaccattggtgcca

SEQ ID NO: 139726 - DNA, 25 bp, Saccharomyces pastorianus
aattgatcaatgctgctaagggttc

SEQ ID NO: 139727 - DNA, 25 bp, Saccharomyces pastorianus
attgctgaaactttggccgaagaat

SEQ ID NO: 139728 - DNA, 25 bp, Saccharomyces pastorianus
gctatcaccaacactggtccaagag

SEQ ID NO: 139729 - DNA, 25 bp, Saccharomyces pastorianus
atcaagcacactttggacatcatca

SEQ ID NO: 139730 - DNA, 25 bp, Saccharomyces pastorianus
caaaacccaatccaagttgttgttg

SEQ ID NO: 139731 - DNA, 25 bp, Saccharomyces pastorianus
gactgaccaaaacccaatccaagtt

SEQ ID NO: 139732 - DNA, 25 bp, Saccharomyces pastorianus
aagagaagacaccaccagagtcggt

SEQ ID NO: 139733 - DNA, 25 bp, Saccharomyces pastorianus
agctgtcgatgtttctccattgaga

SEQ ID NO: 139734 - DNA, 25 bp, Saccharomyces pastorianus
acatcatcaatgtcttgactgacca

SEQ ID NO: 139735 - DNA, 25 bp, Saccharomyces pastorianus
acgtcaagctgtcgatgtttctcca

SEQ ID NO: 139736 - DNA, 25 bp, Saccharomyces pastorianus
aaggctgttagaatcatcaagcaca

SEQ ID NO: 139737 - DNA, 25 bp, Saccharomyces pastorianus
aacgaggtcattcagtggttaacca

SEQ ID NO: 139738 - DNA, 25 bp, Saccharomyces pastorianus
ggcactctaatctatcttcagcatt

SEQ ID NO: 139739 - DNA, 25 bp, Saccharomyces pastorianus
tcaggcgcagtctatcatagtaact

SEQ ID NO: 139740 - DNA, 25 bp, Saccharomyces pastorianus
gaagtactctcttttagcacctagt

SEQ ID NO: 139741 - DNA, 25 bp, Saccharomyces pastorianus
tagggaagctttacctgtttgggct

SEQ ID NO: 139742 - DNA, 25 bp, Saccharomyces pastorianus
agtaactccgtattcgatagcccaa

SEQ ID NO: 139743 - DNA, 25 bp, Saccharomyces pastorianus
ataactggtatatcgcatggcactc

SEQ ID NO: 139744 - DNA, 25 bp, Saccharomyces pastorianus
gaagatagcatccaatttgaccaac

SEQ ID NO: 139745 - DNA, 25 bp, Saccharomyces pastorianus
tgtaggtttgacaacgctgatgctg

SEQ ID NO: 139746 - DNA, 25 bp, Saccharomyces pastorianus
gttttgcccggccttcacgaaggat

SEQ ID NO: 139747 - DNA, 25 bp, Saccharomyces pastorianus
tcagcatttccccaggacgatgaag

SEQ ID NO: 139748 - DNA, 25 bp, Saccharomyces pastorianus
ggcgcttccagtgtcattatatata

SEQ ID NO: 139749 - DNA, 25 bp, Saccharomyces pastorianus
tgggtttttacactatccttatgga

SEQ ID NO: 139750 - DNA, 25 bp, Saccharomyces pastorianus
gcatcagtgactacaagctactttt

SEQ ID NO: 139751 - DNA, 25 bp, Saccharomyces pastorianus
ttaaaggtgatcctgcttctcacgc

SEQ ID NO: 139752 - DNA, 25 bp, Saccharomyces pastorianus
gataaaatccacatcgtacgatcgg

SEQ ID NO: 139753 - DNA, 25 bp, Saccharomyces pastorianus
gatatacttgaactccttgcaacag

SEQ ID NO: 139754 - DNA, 25 bp, Saccharomyces pastorianus
aatgcagaactttatggcgcttcca

SEQ ID NO: 139755 - DNA, 25 bp, Saccharomyces pastorianus
atataccttggacgagtttctagat

SEQ ID NO: 139756 - DNA, 25 bp, Saccharomyces pastorianus
gtaactgctcgatacgtgttttgca

SEQ ID NO: 139757 - DNA, 25 bp, Saccharomyces pastorianus
ggagcaagtgattcgtcaacgttta

SEQ ID NO: 139758 - DNA, 25 bp, Saccharomyces pastorianus
aagtggtctacgaagcaagcatgat

SEQ ID NO: 139759 - DNA, 25 bp, Saccharomyces pastorianus
atggacccgaataccgatataaatg

SEQ ID NO: 139760 - DNA, 25 bp, Saccharomyces pastorianus
aattcaactaattgtagcggcaagt

SEQ ID NO: 139761 - DNA, 25 bp, Saccharomyces pastorianus
attatcgttcgctcatggtttgcaa

SEQ ID NO: 139762 - DNA, 25 bp, Saccharomyces pastorianus
aattgtagcggcaagtctatcctcc

SEQ ID NO: 139763 - DNA, 25 bp, Saccharomyces pastorianus
ggtgatgcgccaatttggcctataa

SEQ ID NO: 139764 - DNA, 25 bp, Saccharomyces pastorianus
gcaagtctatcctccaaatgtttat

SEQ ID NO: 139765 - DNA, 25 bp, Saccharomyces pastorianus
gtctatcctccaaatgtttatattt

SEQ ID NO: 139766 - DNA, 25 bp, Saccharomyces pastorianus
atattaggtgatgcgccaatttggc

SEQ ID NO: 139767 - DNA, 25 bp, Saccharomyces pastorianus
tagcggcaagtctatcctccaaatg

SEQ ID NO: 139768 - DNA, 25 bp, Saccharomyces pastorianus
tggtttgcaatcaagagctatctat

SEQ ID NO: 139769 - DNA, 25 bp, Saccharomyces pastorianus
tggcctataatattatcgttcgctc

SEQ ID NO: 139770 - DNA, 25 bp, Saccharomyces pastorianus
ggtggatgcgtggacttcatttttt

SEQ ID NO: 139771 - DNA, 25 bp, Saccharomyces pastorianus
taattccggtatatttgtttgccaa

SEQ ID NO: 139772 - DNA, 25 bp, Saccharomyces pastorianus
gcgaccacatgtatgttcactgcag

SEQ ID NO: 139773 - DNA, 25 bp, Saccharomyces pastorianus
ttgggcacgcgggtacaatgccaac

SEQ ID NO: 139774 - DNA, 25 bp, Saccharomyces pastorianus
aatactcctgtatttgcgaccacat

SEQ ID NO: 139775 - DNA, 25 bp, Saccharomyces pastorianus
ggatgccctaaatttgtcagcacta

SEQ ID NO: 139776 - DNA, 25 bp, Saccharomyces pastorianus
gagacggtgtttggacctggcacat

SEQ ID NO: 139777 - DNA, 25 bp, Saccharomyces pastorianus
ggaagctaccgagtatgcactgaat

SEQ ID NO: 139778 - DNA, 25 bp, Saccharomyces pastorianus
taaacgccaatccagcaatgaggtt

SEQ ID NO: 139779 - DNA, 25 bp, Saccharomyces pastorianus
ttttcggaccgtgtcttatggctaa

SEQ ID NO: 139780 - DNA, 25 bp, Saccharomyces pastorianus
tggcatcttgacacctaccgagaat

SEQ ID NO: 139781 - DNA, 25 bp, Saccharomyces pastorianus
aaatgtacaagcagtcttcctcggg

SEQ ID NO: 139782 - DNA, 25 bp, Saccharomyces pastorianus
gtcgtctgtgggtgacttttttgtt

SEQ ID NO: 139783 - DNA, 25 bp, Saccharomyces pastorianus
acctgtgttgattgtaatgacccaa

SEQ ID NO: 139784 - DNA, 25 bp, Saccharomyces pastorianus
ttaaggcgattcaccagtttaagtg

SEQ ID NO: 139785 - DNA, 25 bp, Saccharomyces pastorianus
actgagggcctttctattcatgaag

SEQ ID NO: 139786 - DNA, 25 bp, Saccharomyces pastorianus
ttcatgaagcccgtagacgtccgtt

SEQ ID NO: 139787 - DNA, 25 bp, Saccharomyces pastorianus
taaaccactcgataggcacaaccta

SEQ ID NO: 139788 - DNA, 25 bp, Saccharomyces pastorianus
gggattgttagcatcaggctctact

SEQ ID NO: 139789 - DNA, 25 bp, Saccharomyces pastorianus
agaagctcatccttttccagtatta

SEQ ID NO: 139790 - DNA, 25 bp, Saccharomyces pastorianus
ggcggaaatcgcaactagcttcttt

SEQ ID NO: 139791 - DNA, 25 bp, Saccharomyces pastorianus
ttgcgcctgaaatcgttgtcttcaa

SEQ ID NO: 139792 - DNA, 25 bp, Saccharomyces pastorianus
atggtttacgccatgattccattat

SEQ ID NO: 139793 - DNA, 25 bp, Saccharomyces pastorianus
gagaatgactggttgccctaacggt

SEQ ID NO: 139794 - DNA, 25 bp, Saccharomyces pastorianus
gtttgccgaatctgaacgtttccta

SEQ ID NO: 139795 - DNA, 25 bp, Saccharomyces pastorianus
aacatgtggtttagcgtttgccgaa

SEQ ID NO: 139796 - DNA, 25 bp, Saccharomyces pastorianus
gtttgagattatcttcatcttcctg

SEQ ID NO: 139797 - DNA, 25 bp, Saccharomyces pastorianus
gtatcattaaaccaaccaccgaggg

SEQ ID NO: 139798 - DNA, 25 bp, Saccharomyces pastorianus
gctcttgttggtaaagctccacata

SEQ ID NO: 139799 - DNA, 25 bp, Saccharomyces pastorianus
gataacaccgatttcagcggtttga

SEQ ID NO: 139800 - DNA, 25 bp, Saccharomyces pastorianus
tggtggttacctcggccaaaggcta

SEQ ID NO: 139801 - DNA, 25 bp, Saccharomyces pastorianus
gaacgtttcctacctgacattatta

SEQ ID NO: 139802 - DNA, 25 bp, Saccharomyces pastorianus
ttgtcgactacatcaaaccattgtt

SEQ ID NO: 139803 - DNA, 25 bp, Saccharomyces pastorianus
atttacggtccaacttatctgccaa

SEQ ID NO: 139804 - DNA, 25 bp, Saccharomyces pastorianus
ttatggatacattagctgctgcagg

SEQ ID NO: 139805 - DNA, 25 bp, Saccharomyces pastorianus
agactacggcctaccacgaagtttg

SEQ ID NO: 139806 - DNA, 25 bp, Saccharomyces pastorianus
gggcaaccttccagattcatggtgt

SEQ ID NO: 139807 - DNA, 25 bp, Saccharomyces pastorianus
aatggcttgctctggatcacttatc

SEQ ID NO: 139808 - DNA, 25 bp, Saccharomyces pastorianus
tgctctaccaaccaatgccaaggtt

SEQ ID NO: 139809 - DNA, 25 bp, Saccharomyces pastorianus
gccgttcctccatataacgatgtgg

SEQ ID NO: 139810 - DNA, 25 bp, Saccharomyces pastorianus
gaaatgtcatggtttctgctctacc

SEQ ID NO: 139811 - DNA, 25 bp, Saccharomyces pastorianus
agcggtaacgctttggtcgatattg

SEQ ID NO: 139812 - DNA, 25 bp, Saccharomyces pastorianus
ccatcctggccatctatttttgaaa

SEQ ID NO: 139813 - DNA, 25 bp, Saccharomyces pastorianus
aagaccactccacaacaatggcttg

SEQ ID NO: 139814 - DNA, 25 bp, Saccharomyces pastorianus
aagacattattccaccacttgaagg

SEQ ID NO: 139815 - DNA, 25 bp, Saccharomyces pastorianus
attccaccacttgaaggtatcgtta

SEQ ID NO: 139816 - DNA, 25 bp, Saccharomyces pastorianus
gacattattccaccacttgaaggta

SEQ ID NO: 139817 - DNA, 25 bp, Saccharomyces pastorianus
tccaccacttgaaggtatcgttatt

SEQ ID NO: 139818 - DNA, 25 bp, Saccharomyces pastorianus
tgaagacattattccaccacttgaa

SEQ ID NO: 139819 - DNA, 25 bp, Saccharomyces pastorianus
tagggtcatgcttaggttttgttaa

SEQ ID NO: 139820 - DNA, 25 bp, Saccharomyces pastorianus
aaacttacccaagattagggtcatg

SEQ ID NO: 139821 - DNA, 25 bp, Saccharomyces pastorianus
ttattccaccacttgaaggtatcgt

SEQ ID NO: 139822 - DNA, 25 bp, Saccharomyces pastorianus
cccaagattagggtcatgcttaggt

SEQ ID NO: 139823 - DNA, 25 bp, Saccharomyces pastorianus
gattagggtcatgcttaggttttgt

SEQ ID NO: 139824 - DNA, 25 bp, Saccharomyces pastorianus
gtcatgcttaggttttgttaaaact

SEQ ID NO: 139825 - DNA, 25 bp, Saccharomyces pastorianus
taatgctttttacagctcccttcaa

SEQ ID NO: 139826 - DNA, 25 bp, Saccharomyces pastorianus
agctcttattttcaaggcactcctg

SEQ ID NO: 139827 - DNA, 25 bp, Saccharomyces pastorianus
gctcccttcaacatactaatgcact

SEQ ID NO: 139828 - DNA, 25 bp, Saccharomyces pastorianus
ggcactcctgcgacttttgaaaatg

SEQ ID NO: 139829 - DNA, 25 bp, Saccharomyces pastorianus
ggcaaactcttgtcgttacgtacta

SEQ ID NO: 139830 - DNA, 25 bp, Saccharomyces pastorianus
tgcacttttaccctcaagcatgaaa

SEQ ID NO: 139831 - DNA, 25 bp, Saccharomyces pastorianus
attggcattgccacaaacccgatgt

SEQ ID NO: 139832 - DNA, 25 bp, Saccharomyces pastorianus
gatattttccgttgacattggagtc

SEQ ID NO: 139833 - DNA, 25 bp, Saccharomyces pastorianus
tgctcagcagtgttaggccaagtaa

SEQ ID NO: 139834 - DNA, 25 bp, Saccharomyces pastorianus
gacaagtcttcctacacaagatttg

SEQ ID NO: 139835 - DNA, 25 bp, Saccharomyces pastorianus
gccaagtaactgctggttcgcttta

SEQ ID NO: 139836 - DNA, 25 bp, Saccharomyces pastorianus
gaagatattttacttccagtagaag

SEQ ID NO: 139837 - DNA, 25 bp, Saccharomyces pastorianus
gttgaagatattttacttccagtag

SEQ ID NO: 139838 - DNA, 25 bp, Saccharomyces pastorianus
ttcttacaagttcaaaaacagaggt

SEQ ID NO: 139839 - DNA, 25 bp, Saccharomyces pastorianus
attttacttccagtagaagttgaag

SEQ ID NO: 139840 - DNA, 25 bp, Saccharomyces pastorianus
gtaaagacttagaatggatgacgaa

SEQ ID NO: 139841 - DNA, 25 bp, Saccharomyces pastorianus
aaagtagacacttcttacaagttca

SEQ ID NO: 139842 - DNA, 25 bp, Saccharomyces pastorianus
gagacactcatgagcatatctggtg

SEQ ID NO: 139843 - DNA, 25 bp, Saccharomyces pastorianus
atgagcatatctggtgatgaagaac

SEQ ID NO: 139844 - DNA, 25 bp, Saccharomyces pastorianus
gtagacacttcttacaagttcaaaa

SEQ ID NO: 139845 - DNA, 25 bp, Saccharomyces pastorianus
actcatgagcatatctggtgatgaa

SEQ ID NO: 139846 - DNA, 25 bp, Saccharomyces pastorianus
gacactcatgagcatatctggtgat

SEQ ID NO: 139847 - DNA, 25 bp, Saccharomyces pastorianus
gaagcaatcctctaagatatatgac

SEQ ID NO: 139848 - DNA, 25 bp, Saccharomyces pastorianus
gttctatcatgtcgcttccagatgg

SEQ ID NO: 139849 - DNA, 25 bp, Saccharomyces pastorianus
gtcgcttccagatggaagatggact

SEQ ID NO: 139850 - DNA, 25 bp, Saccharomyces pastorianus
tatcatgtcgcttccagatggaaga

SEQ ID NO: 139851 - DNA, 25 bp, Saccharomyces pastorianus
atgacagttctatcatgtcgcttcc

SEQ ID NO: 139852 - DNA, 25 bp, Saccharomyces pastorianus
acagttctatcatgtcgcttccaga

SEQ ID NO: 139853 - DNA, 25 bp, Saccharomyces pastorianus
gttaagaagcaatcctctaagatat

SEQ ID NO: 139854 - DNA, 25 bp, Saccharomyces pastorianus
gcaatcctctaagatatatgacagt

SEQ ID NO: 139855 - DNA, 25 bp, Saccharomyces pastorianus
gacgaagttaagaagcaatcctcta

SEQ ID NO: 139856 - DNA, 25 bp, Saccharomyces pastorianus
agttctatcatgtcgcttccagatg

SEQ ID NO: 139857 - DNA, 25 bp, Saccharomyces pastorianus
tctatcatgtcgcttccagatggaa

SEQ ID NO: 139858 - DNA, 25 bp, Saccharomyces pastorianus
tgcatcatatgaacggaaccctaag

SEQ ID NO: 139859 - DNA, 25 bp, Saccharomyces pastorianus
agtggtgtttcgttctggaccaacg

SEQ ID NO: 139860 - DNA, 25 bp, Saccharomyces pastorianus
gtctcctggtgctgtcattattttc

SEQ ID NO: 139861 - DNA, 25 bp, Saccharomyces pastorianus
gctgttgcgtggttttttgtatact

SEQ ID NO: 139862 - DNA, 25 bp, Saccharomyces pastorianus
gacatcgtggctattatgccctaaa

SEQ ID NO: 139863 - DNA, 25 bp, Saccharomyces pastorianus
atgtcagcttgtcaccatcggaagt

SEQ ID NO: 139864 - DNA, 25 bp, Saccharomyces pastorianus
tataccgtcttcttggtgtgtgtct

SEQ ID NO: 139865 - DNA, 25 bp, Saccharomyces pastorianus
gggtggtggttccaagtcatatcat

SEQ ID NO: 139866 - DNA, 25 bp, Saccharomyces pastorianus
atcgtggccgatttaattactagac

SEQ ID NO: 139867 - DNA, 25 bp, Saccharomyces pastorianus
cattggctgtttttgttggcattat

SEQ ID NO: 139868 - DNA, 25 bp, Saccharomyces pastorianus
ttaatcgcgtgcttattctcaggag

SEQ ID NO: 139869 - DNA, 25 bp, Saccharomyces pastorianus
gactctcccttaagtgttgactcta

SEQ ID NO: 139870 - DNA, 25 bp, Saccharomyces pastorianus
tgttaccaccccatggcagtgatgt

SEQ ID NO: 139871 - DNA, 25 bp, Saccharomyces pastorianus
gatactgacgcattcttacattctc

SEQ ID NO: 139872 - DNA, 25 bp, Saccharomyces pastorianus
atctcatccgctggtcaacaagtta

SEQ ID NO: 139873 - DNA, 25 bp, Saccharomyces pastorianus
tcttacattctcacttggcacgtta

SEQ ID NO: 139874 - DNA, 25 bp, Saccharomyces pastorianus
tggcacgttacccacaacggtatga

SEQ ID NO: 139875 - DNA, 25 bp, Saccharomyces pastorianus
atacctccgtagctttgtggactca

SEQ ID NO: 139876 - DNA, 25 bp, Saccharomyces pastorianus
aagttactggttacacgcatcctga

SEQ ID NO: 139877 - DNA, 25 bp, Saccharomyces pastorianus
ggcgacgcatttatgtctgctgaat

SEQ ID NO: 139878 - DNA, 25 bp, Saccharomyces pastorianus
ttgagacatgtagccaccgatacct

SEQ ID NO: 139879 - DNA, 25 bp, Saccharomyces pastorianus
gaatacttcaggtcctggcgacgca

SEQ ID NO: 139880 - DNA, 25 bp, Saccharomyces pastorianus
gatttcatcaagttcgatgccggta

SEQ ID NO: 139881 - DNA, 25 bp, Saccharomyces pastorianus
tcgatgccggtaagttggtttacgt

SEQ ID NO: 139882 - DNA, 25 bp, Saccharomyces pastorianus
atcaagttcgatgccggtaagttgg

SEQ ID NO: 139883 - DNA, 25 bp, Saccharomyces pastorianus
ctgtccaccgtatcaccgatgaaga

SEQ ID NO: 139884 - DNA, 25 bp, Saccharomyces pastorianus
gtcaagggtagattcgctgtccacc

SEQ ID NO: 139885 - DNA, 25 bp, Saccharomyces pastorianus
caagggtagattcgctgtccaccgt

SEQ ID NO: 139886 - DNA, 25 bp, Saccharomyces pastorianus
agggtagattcgctgtccaccgtat

SEQ ID NO: 139887 - DNA, 25 bp, Saccharomyces pastorianus
gtagattcgctgtccaccgtatcac

SEQ ID NO: 139888 - DNA, 25 bp, Saccharomyces pastorianus
gatgtcaagggtagattcgctgtcc

SEQ ID NO: 139889 - DNA, 25 bp, Saccharomyces pastorianus
gattactgatttcatcaagttcgat

SEQ ID NO: 139890 - DNA, 25 bp, Saccharomyces pastorianus
ggcctctggtaagattactgatttc

SEQ ID NO: 139891 - DNA, 25 bp, Saccharomyces pastorianus
ggagataccccgttctgttgaaaga

SEQ ID NO: 139892 - DNA, 25 bp, Saccharomyces pastorianus
gtgtcattggccctcatggtataaa

SEQ ID NO: 139893 - DNA, 25 bp, Saccharomyces pastorianus
aggctgtaacagcatctatattatc

SEQ ID NO: 139894 - DNA, 25 bp, Saccharomyces pastorianus
atcagaacgtcgtgtcattggccct

SEQ ID NO: 139895 - DNA, 25 bp, Saccharomyces pastorianus
ggtaagacatagcacaggcgcatta

SEQ ID NO: 139896 - DNA, 25 bp, Saccharomyces pastorianus
agagttctcgatcagaagaggttca

SEQ ID NO: 139897 - DNA, 25 bp, Saccharomyces pastorianus
ggatgttcaatttcggaaggctgta

SEQ ID NO: 139898 - DNA, 25 bp, Saccharomyces pastorianus
tcgattcatcattaaaacccctggt

SEQ ID NO: 139899 - DNA, 25 bp, Saccharomyces pastorianus
ggcgcattaatcaatgtcggcggta

SEQ ID NO: 139900 - DNA, 25 bp, Saccharomyces pastorianus
tcaacccggtgatcgattcatcatt

SEQ ID NO: 139901 - DNA, 25 bp, Saccharomyces pastorianus
atacgatttacgctcaacccggtga

SEQ ID NO: 139902 - DNA, 25 bp, Saccharomyces pastorianus
ttttaatttcgatggcacttctccc

SEQ ID NO: 139903 - DNA, 25 bp, Saccharomyces pastorianus
tacccaggctgctcaggttcaagaa

SEQ ID NO: 139904 - DNA, 25 bp, Saccharomyces pastorianus
tctgcgattctttattgtctacggt

SEQ ID NO: 139905 - DNA, 25 bp, Saccharomyces pastorianus
tggcacaacgaagttttctggcgaa

SEQ ID NO: 139906 - DNA, 25 bp, Saccharomyces pastorianus
gaggctattactaattctgcgattc

SEQ ID NO: 139907 - DNA, 25 bp, Saccharomyces pastorianus
gcgcaagtcgcagctaacacaaaag

SEQ ID NO: 139908 - DNA, 25 bp, Saccharomyces pastorianus
ataaaaattcctgctggttccctct

SEQ ID NO: 139909 - DNA, 25 bp, Saccharomyces pastorianus
gcacttctccccaagtttatggtaa

SEQ ID NO: 139910 - DNA, 25 bp, Saccharomyces pastorianus
ctgctgttgtcggaggcaatgtatt

SEQ ID NO: 139911 - DNA, 25 bp, Saccharomyces pastorianus
gaagatccaggcaaatacccaggct

SEQ ID NO: 139912 - DNA, 25 bp, Saccharomyces pastorianus
tacaagcttttcgtagaagatccag

SEQ ID NO: 139913 - DNA, 25 bp, Saccharomyces pastorianus
atgattctcgaagtttgcgcagatg

SEQ ID NO: 139914 - DNA, 25 bp, Saccharomyces pastorianus
agtttgcgcagatgacaaggaagga

SEQ ID NO: 139915 - DNA, 25 bp, Saccharomyces pastorianus
aagtttgcgcagatgacaaggaagg

SEQ ID NO: 139916 - DNA, 25 bp, Saccharomyces pastorianus
gaagtttgcgcagatgacaaggaag

SEQ ID NO: 139917 - DNA, 25 bp, Saccharomyces pastorianus
tgattctcgaagtttgcgcagatga

SEQ ID NO: 139918 - DNA, 25 bp, Saccharomyces pastorianus
gattctcgaagtttgcgcagatgac

SEQ ID NO: 139919 - DNA, 25 bp, Saccharomyces pastorianus
tcgaagtttgcgcagatgacaagga

SEQ ID NO: 139920 - DNA, 25 bp, Saccharomyces pastorianus
attctcgaagtttgcgcagatgaca

SEQ ID NO: 139921 - DNA, 25 bp, Saccharomyces pastorianus
ttctcgaagtttgcgcagatgacaa

SEQ ID NO: 139922 - DNA, 25 bp, Saccharomyces pastorianus
cgaagtttgcgcagatgacaaggaa

SEQ ID NO: 139923 - DNA, 25 bp, Saccharomyces pastorianus
tttgcgcagatgacaaggaaggaga

SEQ ID NO: 139924 - DNA, 25 bp, Saccharomyces pastorianus
gtaactcgattgcagttcttaaaga

SEQ ID NO: 139925 - DNA, 25 bp, Saccharomyces pastorianus
gttataacgcatagtgaacaaatga

SEQ ID NO: 139926 - DNA, 25 bp, Saccharomyces pastorianus
acaaatgatgaggtcttgtaactcg

SEQ ID NO: 139927 - DNA, 25 bp, Saccharomyces pastorianus
ggttgagcgaggtaacttcgacact

SEQ ID NO: 139928 - DNA, 25 bp, Saccharomyces pastorianus
cgacactttatataataatcgcggg

SEQ ID NO: 139929 - DNA, 25 bp, Saccharomyces pastorianus
taaagatggtaaagtggttgagcga

SEQ ID NO: 139930 - DNA, 25 bp, Saccharomyces pastorianus
gcgaggtaacttcgacactttatat

SEQ ID NO: 139931 - DNA, 25 bp, Saccharomyces pastorianus
ggtaacttcgacactttatataata

SEQ ID NO: 139932 - DNA, 25 bp, Saccharomyces pastorianus
gatgaggtcttgtaactcgattgca

SEQ ID NO: 139933 - DNA, 25 bp, Saccharomyces pastorianus
ctcgattgcagttcttaaagatggt

SEQ ID NO: 139934 - DNA, 25 bp, Saccharomyces pastorianus
ggtcttgtaactcgattgcagttct

SEQ ID NO: 139935 - DNA, 25 bp, Saccharomyces pastorianus
atactgccaaaacctgacatttatt

SEQ ID NO: 139936 - DNA, 25 bp, Saccharomyces pastorianus
ctaagttaagctcccctgcaaagga

SEQ ID NO: 139937 - DNA, 25 bp, Saccharomyces pastorianus
tatactcctgctaatactgttgaag

SEQ ID NO: 139938 - DNA, 25 bp, Saccharomyces pastorianus
ttgcgccaactttatccgacgttaa

SEQ ID NO: 139939 - DNA, 25 bp, Saccharomyces pastorianus
atatggtttagacctttttgcgcca

SEQ ID NO: 139940 - DNA, 25 bp, Saccharomyces pastorianus
taaggaccctattattgtatacgag

SEQ ID NO: 139941 - DNA, 25 bp, Saccharomyces pastorianus
tgcaaaggacccatttctttttggt

SEQ ID NO: 139942 - DNA, 25 bp, Saccharomyces pastorianus
tgcgcattaatgttgctcctaagtt

SEQ ID NO: 139943 - DNA, 25 bp, Saccharomyces pastorianus
gaaactggaacaactctagatgata

SEQ ID NO: 139944 - DNA, 25 bp, Saccharomyces pastorianus
atacgaggactatgcttatgccaag

SEQ ID NO: 139945 - DNA, 25 bp, Saccharomyces pastorianus
ctttagtagcaactcctttttggat

SEQ ID NO: 139946 - DNA, 25 bp, Saccharomyces pastorianus
atttagtcgcacatcctaaggaaga

SEQ ID NO: 139947 - DNA, 25 bp, Saccharomyces pastorianus
gcaactggacacttacattagcaaa

SEQ ID NO: 139948 - DNA, 25 bp, Saccharomyces pastorianus
ctgtcagaccagcatacacactatt

SEQ ID NO: 139949 - DNA, 25 bp, Saccharomyces pastorianus
aaaggtctagtgttggccagtttat

SEQ ID NO: 139950 - DNA, 25 bp, Saccharomyces pastorianus
ttttttgctgaaacggtcgcttcta

SEQ ID NO: 139951 - DNA, 25 bp, Saccharomyces pastorianus
aagatccttcacaggctgacgctat

SEQ ID NO: 139952 - DNA, 25 bp, Saccharomyces pastorianus
tacatcggtgtatttcgctctggag

SEQ ID NO: 139953 - DNA, 25 bp, Saccharomyces pastorianus
aatcggagtcattaacggcaagttc

SEQ ID NO: 139954 - DNA, 25 bp, Saccharomyces pastorianus
gacttgtcacaatttggtttctttg

SEQ ID NO: 139955 - DNA, 25 bp, Saccharomyces pastorianus
acggtcgcttctagaactggtgcag

SEQ ID NO: 139956 - DNA, 25 bp, Saccharomyces pastorianus
tattggccacgtttatgccaggagt

SEQ ID NO: 139957 - DNA, 25 bp, Saccharomyces pastorianus
gatagctcagggtctattgataaaa

SEQ ID NO: 139958 - DNA, 25 bp, Saccharomyces pastorianus
tggcgtttcgtcaaaccctcttgct

SEQ ID NO: 139959 - DNA, 25 bp, Saccharomyces pastorianus
gattatccattttcagtgggcgtgg

SEQ ID NO: 139960 - DNA, 25 bp, Saccharomyces pastorianus
aaccctcttgctggacgtataatgg

SEQ ID NO: 139961 - DNA, 25 bp, Saccharomyces pastorianus
agagttcatcacaggattatccatt

SEQ ID NO: 139962 - DNA, 25 bp, Saccharomyces pastorianus
gatagcgacggcgacggacgtttaa

SEQ ID NO: 139963 - DNA, 25 bp, Saccharomyces pastorianus
tctacgacattgacaaggacggttt

SEQ ID NO: 139964 - DNA, 25 bp, Saccharomyces pastorianus
atttatgagcattcctggcgtttcg

SEQ ID NO: 139965 - DNA, 25 bp, Saccharomyces pastorianus
gattcgccttcaaaatctacgacat

SEQ ID NO: 139966 - DNA, 25 bp, Saccharomyces pastorianus
aggacggtttcatatccaatggtga

SEQ ID NO: 139967 - DNA, 25 bp, Saccharomyces pastorianus
gggacgtggattttcaagagttcat

SEQ ID NO: 139968 - DNA, 25 bp, Saccharomyces pastorianus
gtaagagattaccactgttttccca

SEQ ID NO: 139969 - DNA, 25 bp, Saccharomyces pastorianus
taaacccaagtttgctgtgctcgac

SEQ ID NO: 139970 - DNA, 25 bp, Saccharomyces pastorianus
tttgctgtgctcgacgaatgtacat

SEQ ID NO: 139971 - DNA, 25 bp, Saccharomyces pastorianus
ttttcccaaccatctagttcagcat

SEQ ID NO: 139972 - DNA, 25 bp, Saccharomyces pastorianus
cttcttgaactaaatgccatcttgg

SEQ ID NO: 139973 - DNA, 25 bp, Saccharomyces pastorianus
gcgaatcacatcacctacagggcag

SEQ ID NO: 139974 - DNA, 25 bp, Saccharomyces pastorianus
attggtgtccaacaaaggttagcta

SEQ ID NO: 139975 - DNA, 25 bp, Saccharomyces pastorianus
gaatgtacatctgcagtagccccag

SEQ ID NO: 139976 - DNA, 25 bp, Saccharomyces pastorianus
gtatctcgttaatatcagtttgcca

SEQ ID NO: 139977 - DNA, 25 bp, Saccharomyces pastorianus
aacaggtgccactttgggagcggaa

SEQ ID NO: 139978 - DNA, 25 bp, Saccharomyces pastorianus
atcagtttgccacaggacaagttta

SEQ ID NO: 139979 - DNA, 25 bp, Saccharomyces pastorianus
gttggttcagatctttacactcgaa

SEQ ID NO: 139980 - DNA, 25 bp, Saccharomyces pastorianus
tctacgcctccaattcattactaaa

SEQ ID NO: 139981 - DNA, 25 bp, Saccharomyces pastorianus
gacaaaactttgtgctgtcactatt

SEQ ID NO: 139982 - DNA, 25 bp, Saccharomyces pastorianus
aaggaactttggcactgggcttaat

SEQ ID NO: 139983 - DNA, 25 bp, Saccharomyces pastorianus
cgtagcttctgctgaatctgtttca

SEQ ID NO: 139984 - DNA, 25 bp, Saccharomyces pastorianus
gctggatttgatcctctgttcattc

SEQ ID NO: 139985 - DNA, 25 bp, Saccharomyces pastorianus
ggttaactatggcaagcgcatcttt

SEQ ID NO: 139986 - DNA, 25 bp, Saccharomyces pastorianus
tgggcttaattgtctacgcctccaa

SEQ ID NO: 139987 - DNA, 25 bp, Saccharomyces pastorianus
tgatgttgctactgcatttgtcatt

SEQ ID NO: 139988 - DNA, 25 bp, Saccharomyces pastorianus
aagtttcagactttctactctcaaa

SEQ ID NO: 139989 - DNA, 25 bp, Saccharomyces pastorianus
atcaccatactttctattccgtagc

SEQ ID NO: 139990 - DNA, 25 bp, Saccharomyces pastorianus
gtgcgtgtcgtgtcattcgagtgat

SEQ ID NO: 139991 - DNA, 25 bp, Saccharomyces pastorianus
tgaagggtaccgttgcttattttgt

SEQ ID NO: 139992 - DNA, 25 bp, Saccharomyces pastorianus
gctatgtaactcttgtggtcttcga

SEQ ID NO: 139993 - DNA, 25 bp, Saccharomyces pastorianus
agtgattcgccctgttggaggccat

SEQ ID NO: 139994 - DNA, 25 bp, Saccharomyces pastorianus
tatcatagatttgctctcgactctc

SEQ ID NO: 139995 - DNA, 25 bp, Saccharomyces pastorianus
gagatcaagatcatcctcacctgtg

SEQ ID NO: 139996 - DNA, 25 bp, Saccharomyces pastorianus
aagcccaaggtcacccaattatcat

SEQ ID NO: 139997 - DNA, 25 bp, Saccharomyces pastorianus
actcgacaacgctagttacagttct

SEQ ID NO: 139998 - DNA, 25 bp, Saccharomyces pastorianus
tacagttctgtctctgcatcttcat

SEQ ID NO: 139999 - DNA, 25 bp, Saccharomyces pastorianus
atttgtccccgaacgcaactgcgaa

SEQ ID NO: 140000 - DNA, 25 bp, Saccharomyces pastorianus
ggaggccatcgtggtcgccaagaaa

SEQ ID NO: 140001 - DNA, 25 bp, Saccharomyces pastorianus
gaagtattcgtttcattcgctcaat

SEQ ID NO: 140002 - DNA, 25 bp, Saccharomyces pastorianus
gtattcgtttcattcgctcaatgtg

SEQ ID NO: 140003 - DNA, 25 bp, Saccharomyces pastorianus
ataattcagcaagtcctaggaagta

SEQ ID NO: 140004 - DNA, 25 bp, Saccharomyces pastorianus
tctttggctaacgaaatacttggaa

SEQ ID NO: 140005 - DNA, 25 bp, Saccharomyces pastorianus
attcgctcaatgtgtcgccaattct

SEQ ID NO: 140006 - DNA, 25 bp, Saccharomyces pastorianus
tcgctcaatgtgtcgccaattcttt

SEQ ID NO: 140007 - DNA, 25 bp, Saccharomyces pastorianus
tttcattcgctcaatgtgtcgccaa

SEQ ID NO: 140008 - DNA, 25 bp, Saccharomyces pastorianus
caagtcctaggaagtattcgtttca

SEQ ID NO: 140009 - DNA, 25 bp, Saccharomyces pastorianus
aatgtgtcgccaattctttccccaa

SEQ ID NO: 140010 - DNA, 25 bp, Saccharomyces pastorianus
aattctttccccaatatctttggct

SEQ ID NO: 140011 - DNA, 25 bp, Saccharomyces pastorianus
tttccccaatatctttggctaacga

SEQ ID NO: 140012 - DNA, 25 bp, Saccharomyces pastorianus
aggttgctagattggccggaaagta

SEQ ID NO: 140013 - DNA, 25 bp, Saccharomyces pastorianus
aggttttgcttgtatcccattagtt

SEQ ID NO: 140014 - DNA, 25 bp, Saccharomyces pastorianus
ccggctggttggttgaaatcgtcaa

SEQ ID NO: 140015 - DNA, 25 bp, Saccharomyces pastorianus
agttggtatttctgttcctttccat

SEQ ID NO: 140016 - DNA, 25 bp, Saccharomyces pastorianus
gtcgctgcatcattctctcaagaag

SEQ ID NO: 140017 - DNA, 25 bp, Saccharomyces pastorianus
attaacccaggtagagtcgctgcat

SEQ ID NO: 140018 - DNA, 25 bp, Saccharomyces pastorianus
gagatcattgacgaagcttccaaga

SEQ ID NO: 140019 - DNA, 25 bp, Saccharomyces pastorianus
agagctttagacaccgttaccaatg

SEQ ID NO: 140020 - DNA, 25 bp, Saccharomyces pastorianus
ctttccattccacctacttgatgaa

SEQ ID NO: 140021 - DNA, 25 bp, Saccharomyces pastorianus
aagcctcgcccacttaaattggaga

SEQ ID NO: 140022 - DNA, 25 bp, Saccharomyces pastorianus
gagctgggcagatccaactatggta

SEQ ID NO: 140023 - DNA, 25 bp, Saccharomyces pastorianus
tacttaaccggtgaatggtccacaa

SEQ ID NO: 140024 - DNA, 25 bp, Saccharomyces pastorianus
tttggttcgagggtcatgattgcta

SEQ ID NO: 140025 - DNA, 25 bp, Saccharomyces pastorianus
tatctcaagattgaacgccgatttc

SEQ ID NO: 140026 - DNA, 25 bp, Saccharomyces pastorianus
gacgaaaccatcttcaacttaccaa

SEQ ID NO: 140027 - DNA, 25 bp, Saccharomyces pastorianus
aagttaaaacttctcctgatgctaa

SEQ ID NO: 140028 - DNA, 25 bp, Saccharomyces pastorianus
atcattctttcgaagatgctcacac

SEQ ID NO: 140029 - DNA, 25 bp, Saccharomyces pastorianus
aaaccatggtttgctaccgtcaacg

SEQ ID NO: 140030 - DNA, 25 bp, Saccharomyces pastorianus
atgacacttacccatacttaaccgg

SEQ ID NO: 140031 - DNA, 25 bp, Saccharomyces pastorianus
ctgcttgtactggtgttcctgatga

SEQ ID NO: 140032 - DNA, 25 bp, Saccharomyces pastorianus
gtcaacggtcaagcccgtgacctag

SEQ ID NO: 140033 - DNA, 25 bp, Saccharomyces pastorianus
tgacctagccacaatgacatacgaa

SEQ ID NO: 140034 - DNA, 25 bp, Saccharomyces pastorianus
agaagctgtcgccaaggctgctgaa

SEQ ID NO: 140035 - DNA, 25 bp, Saccharomyces pastorianus
aaggaagaagctgtcgccaaggctg

SEQ ID NO: 140036 - DNA, 25 bp, Saccharomyces pastorianus
gaagctgtcgccaaggctgctgaaa

SEQ ID NO: 140037 - DNA, 25 bp, Saccharomyces pastorianus
aaaggaagaagctgtcgccaaggct

SEQ ID NO: 140038 - DNA, 25 bp, Saccharomyces pastorianus
aagaagctgtcgccaaggctgctga

SEQ ID NO: 140039 - DNA, 25 bp, Saccharomyces pastorianus
agctgtcgccaaggctgctgaaaag

SEQ ID NO: 140040 - DNA, 25 bp, Saccharomyces pastorianus
gaagaagctgtcgccaaggctgctg

SEQ ID NO: 140041 - DNA, 25 bp, Saccharomyces pastorianus
aagctgtcgccaaggctgctgaaaa

SEQ ID NO: 140042 - DNA, 25 bp, Saccharomyces pastorianus
ggaagaagctgtcgccaaggctgct

SEQ ID NO: 140043 - DNA, 25 bp, Saccharomyces pastorianus
aggaagaagctgtcgccaaggctgc

SEQ ID NO: 140044 - DNA, 25 bp, Saccharomyces pastorianus
gctgtcgccaaggctgctgaaaaga

SEQ ID NO: 140045 - DNA, 25 bp, Saccharomyces pastorianus
gcgattcagaagctttacggatttt

SEQ ID NO: 140046 - DNA, 25 bp, Saccharomyces pastorianus
cgattcagaagctttacggattttt

SEQ ID NO: 140047 - DNA, 25 bp, Saccharomyces pastorianus
cgcgattcagaagctttacggattt

SEQ ID NO: 140048 - DNA, 25 bp, Saccharomyces pastorianus
tagatagtgagcttcgcgattcaga

SEQ ID NO: 140049 - DNA, 25 bp, Saccharomyces pastorianus
agatagtgagcttcgcgattcagaa

SEQ ID NO: 140050 - DNA, 25 bp, Saccharomyces pastorianus
aatagatagtgagcttcgcgattca

SEQ ID NO: 140051 - DNA, 25 bp, Saccharomyces pastorianus
ttcgcgattcagaagctttacggat

SEQ ID NO: 140052 - DNA, 25 bp, Saccharomyces pastorianus
gtgagcttcgcgattcagaagcttt

SEQ ID NO: 140053 - DNA, 25 bp, Saccharomyces pastorianus
ggaatagatagtgagcttcgcgatt

SEQ ID NO: 140054 - DNA, 25 bp, Saccharomyces pastorianus
gatagtgagcttcgcgattcagaag

SEQ ID NO: 140055 - DNA, 25 bp, Saccharomyces pastorianus
gagcttcgcgattcagaagctttac

SEQ ID NO: 140056 - DNA, 25 bp, Saccharomyces pastorianus
attagccataattcttgtccccaga

SEQ ID NO: 140057 - DNA, 25 bp, Saccharomyces pastorianus
atcctttctgcacatgttacgctgt

SEQ ID NO: 140058 - DNA, 25 bp, Saccharomyces pastorianus
gaatgcaacggtggagccatccttt

SEQ ID NO: 140059 - DNA, 25 bp, Saccharomyces pastorianus
tgtccccagaggttcaccggtattt

SEQ ID NO: 140060 - DNA, 25 bp, Saccharomyces pastorianus
gagtcaagggctttgctttctgtat

SEQ ID NO: 140061 - DNA, 25 bp, Saccharomyces pastorianus
aaaacgcaagcagtatctccgaatg

SEQ ID NO: 140062 - DNA, 25 bp, Saccharomyces pastorianus
ggctgttcccgtaatgttttgagtc

SEQ ID NO: 140063 - DNA, 25 bp, Saccharomyces pastorianus
tattctgtctccaaccattgcagga

SEQ ID NO: 140064 - DNA, 25 bp, Saccharomyces pastorianus
gttacgctgtttagaccttacgaca

SEQ ID NO: 140065 - DNA, 25 bp, Saccharomyces pastorianus
atatcaccttttttgacacggttgg

SEQ ID NO: 140066 - DNA, 25 bp, Saccharomyces pastorianus
gtatcccttgtctttcaagtgttct

SEQ ID NO: 140067 - DNA, 25 bp, Saccharomyces pastorianus
gttgccaatttttgatcctttcctg

SEQ ID NO: 140068 - DNA, 25 bp, Saccharomyces pastorianus
aatctcttttctacttcttgttcac

SEQ ID NO: 140069 - DNA, 25 bp, Saccharomyces pastorianus
ttcgcaccatcctttatcattttga

SEQ ID NO: 140070 - DNA, 25 bp, Saccharomyces pastorianus
caagtcgcattctttggaactggta

SEQ ID NO: 140071 - DNA, 25 bp, Saccharomyces pastorianus
gggttctttttacttcaagtcgcat

SEQ ID NO: 140072 - DNA, 25 bp, Saccharomyces pastorianus
ggaactggtaacgtcgcttcaatct

SEQ ID NO: 140073 - DNA, 25 bp, Saccharomyces pastorianus
gaagtactcggtcatgtgttgctaa

SEQ ID NO: 140074 - DNA, 25 bp, Saccharomyces pastorianus
ctattgtccacatgcctaggtatac

SEQ ID NO: 140075 - DNA, 25 bp, Saccharomyces pastorianus
tgatcctttcctgatgggcgcatta

SEQ ID NO: 140076 - DNA, 25 bp, Saccharomyces pastorianus
tggcgatcctatcatctttgttcat

SEQ ID NO: 140077 - DNA, 25 bp, Saccharomyces pastorianus
tcatttatttaaccttcgcaccatc

SEQ ID NO: 140078 - DNA, 25 bp, Saccharomyces pastorianus
atacttattcattcggttcacctga

SEQ ID NO: 140079 - DNA, 25 bp, Saccharomyces pastorianus
aatcccgtcctggtcatgttgctat

SEQ ID NO: 140080 - DNA, 25 bp, Saccharomyces pastorianus
ttttacgcaatcttccatcgagctg

SEQ ID NO: 140081 - DNA, 25 bp, Saccharomyces pastorianus
atctatttcatttcaccgcttgttc

SEQ ID NO: 140082 - DNA, 25 bp, Saccharomyces pastorianus
tcaaagatggcgcttctgacccaaa

SEQ ID NO: 140083 - DNA, 25 bp, Saccharomyces pastorianus
aatgaataatgccacctacggtata

SEQ ID NO: 140084 - DNA, 25 bp, Saccharomyces pastorianus
gaagtcaaaccctgtcaatttcgat

SEQ ID NO: 140085 - DNA, 25 bp, Saccharomyces pastorianus
aacccctcctgcaaagagattgttt

SEQ ID NO: 140086 - DNA, 25 bp, Saccharomyces pastorianus
aagtcactcatccagtatccggaaa

SEQ ID NO: 140087 - DNA, 25 bp, Saccharomyces pastorianus
ggtttacgtgcagataccacttttg

SEQ ID NO: 140088 - DNA, 25 bp, Saccharomyces pastorianus
gagctggatgcttttgtctttagac

SEQ ID NO: 140089 - DNA, 25 bp, Saccharomyces pastorianus
aagggatccaatgtggtgagaccat

SEQ ID NO: 140090 - DNA, 25 bp, Saccharomyces pastorianus
ctcacatttatttggtcttaaacca

SEQ ID NO: 140091 - DNA, 25 bp, Saccharomyces pastorianus
tggtgagaccatacactcctgtgag

SEQ ID NO: 140092 - DNA, 25 bp, Saccharomyces pastorianus
actcctgtgagtgatctttcccaga

SEQ ID NO: 140093 - DNA, 25 bp, Saccharomyces pastorianus
gggttggtcctagcatctgctctgt

SEQ ID NO: 140094 - DNA, 25 bp, Saccharomyces pastorianus
gaagggtcacttccagctggtcgtc

SEQ ID NO: 140095 - DNA, 25 bp, Saccharomyces pastorianus
tgtgagtgatctttcccagaagggt

SEQ ID NO: 140096 - DNA, 25 bp, Saccharomyces pastorianus
tgtcacaccaaagggatccaatgtg

SEQ ID NO: 140097 - DNA, 25 bp, Saccharomyces pastorianus
cctagcatctgctctgtttgctaaa

SEQ ID NO: 140098 - DNA, 25 bp, Saccharomyces pastorianus
ttccagctggtcgtcaagcattatg

SEQ ID NO: 140099 - DNA, 25 bp, Saccharomyces pastorianus
gaaggtggtaaaatgacctcacatt

SEQ ID NO: 140100 - DNA, 25 bp, Saccharomyces pastorianus
gttccatttatttcaagcccgactc

SEQ ID NO: 140101 - DNA, 25 bp, Saccharomyces pastorianus
gagctgaaactaggtggcgactcaa

SEQ ID NO: 140102 - DNA, 25 bp, Saccharomyces pastorianus
gctaacgatgatgtgctattggatt

SEQ ID NO: 140103 - DNA, 25 bp, Saccharomyces pastorianus
aagtaaacttccaatgatctccaat

SEQ ID NO: 140104 - DNA, 25 bp, Saccharomyces pastorianus
gatttatttgatttcggaccatctg

SEQ ID NO: 140105 - DNA, 25 bp, Saccharomyces pastorianus
ggagatgcctttcgatgccaaataa

SEQ ID NO: 140106 - DNA, 25 bp, Saccharomyces pastorianus
gataccaaggctgtacaagggttga

SEQ ID NO: 140107 - DNA, 25 bp, Saccharomyces pastorianus
gcgactcaaacggtatatcttctgg

SEQ ID NO: 140108 - DNA, 25 bp, Saccharomyces pastorianus
ggaccatctgaggatgccacacaaa

SEQ ID NO: 140109 - DNA, 25 bp, Saccharomyces pastorianus
gaatacttcaacaactttaggcgat

SEQ ID NO: 140110 - DNA, 25 bp, Saccharomyces pastorianus
acaatcccgatgtttcgggcggcaa

SEQ ID NO: 140111 - DNA, 25 bp, Saccharomyces pastorianus
gacattgccccggaaacgataagat

SEQ ID NO: 140112 - DNA, 25 bp, Saccharomyces pastorianus
gaagatcgatatccttgtaagacta

SEQ ID NO: 140113 - DNA, 25 bp, Saccharomyces pastorianus
gaatcattcgtcagtaaagtcttgg

SEQ ID NO: 140114 - DNA, 25 bp, Saccharomyces pastorianus
ggtcaaatccagaggtgttattaca

SEQ ID NO: 140115 - DNA, 25 bp, Saccharomyces pastorianus
gtaagactagtcgatccttccaact

SEQ ID NO: 140116 - DNA, 25 bp, Saccharomyces pastorianus
gtctggttgctaggacagcatccca

SEQ ID NO: 140117 - DNA, 25 bp, Saccharomyces pastorianus
agttcaacgatcctctttacgtcaa

SEQ ID NO: 140118 - DNA, 25 bp, Saccharomyces pastorianus
gtcagactacatgctactttaacgg

SEQ ID NO: 140119 - DNA, 25 bp, Saccharomyces pastorianus
attcaagctttgtcccagttgggta

SEQ ID NO: 140120 - DNA, 25 bp, Saccharomyces pastorianus
gacagcatcccaacaatttctcaga

SEQ ID NO: 140121 - DNA, 25 bp, Saccharomyces pastorianus
gtgatttattaagacattgccccgg

SEQ ID NO: 140122 - DNA, 25 bp, Saccharomyces pastorianus
acgcttgagggcatctaagaaggaa

SEQ ID NO: 140123 - DNA, 25 bp, Saccharomyces pastorianus
tggatcagagaatacttaaggcatt

SEQ ID NO: 140124 - DNA, 25 bp, Saccharomyces pastorianus
cataagggacgcttgagggcatcta

SEQ ID NO: 140125 - DNA, 25 bp, Saccharomyces pastorianus
actacggtattggtgtgataaattt

SEQ ID NO: 140126 - DNA, 25 bp, Saccharomyces pastorianus
agggacgcttgagggcatctaagaa

SEQ ID NO: 140127 - DNA, 25 bp, Saccharomyces pastorianus
attatcccttgctcactacggtatt

SEQ ID NO: 140128 - DNA, 25 bp, Saccharomyces pastorianus
atcccttgctcactacggtattggt

SEQ ID NO: 140129 - DNA, 25 bp, Saccharomyces pastorianus
ttaaggcattatcccttgctcacta

SEQ ID NO: 140130 - DNA, 25 bp, Saccharomyces pastorianus
ccttgctcactacggtattggtgtg

SEQ ID NO: 140131 - DNA, 25 bp, Saccharomyces pastorianus
aaaaggctattcgtatttcagagat

SEQ ID NO: 140132 - DNA, 25 bp, Saccharomyces pastorianus
tgaactcattgaggaagctcaacgt

SEQ ID NO: 140133 - DNA, 25 bp, Saccharomyces pastorianus
gcaacgttattgataatgcaccttt

SEQ ID NO: 140134 - DNA, 25 bp, Saccharomyces pastorianus
atgcaccttttattagctcaacgag

SEQ ID NO: 140135 - DNA, 25 bp, Saccharomyces pastorianus
ttgcccaggcagagctcggatcgat

SEQ ID NO: 140136 - DNA, 25 bp, Saccharomyces pastorianus
atactcgttactgtctcaatcggaa

SEQ ID NO: 140137 - DNA, 25 bp, Saccharomyces pastorianus
tactagcggatagtcctctggacga

SEQ ID NO: 140138 - DNA, 25 bp, Saccharomyces pastorianus
gaacctgaaagcgaacaatgcgttt

SEQ ID NO: 140139 - DNA, 25 bp, Saccharomyces pastorianus
tccaaacctgactaccaaatgcatt

SEQ ID NO: 140140 - DNA, 25 bp, Saccharomyces pastorianus
gatgctacagctttatatggagaca

SEQ ID NO: 140141 - DNA, 25 bp, Saccharomyces pastorianus
gaagaatttcaagggtctaccattt

SEQ ID NO: 140142 - DNA, 25 bp, Saccharomyces pastorianus
gaatttttggagaactcaccggagt

SEQ ID NO: 140143 - DNA, 25 bp, Saccharomyces pastorianus
tggacgacatcttgcttgcccaggc

SEQ ID NO: 140144 - DNA, 25 bp, Saccharomyces pastorianus
agctgcgtggcactccattttagat

SEQ ID NO: 140145 - DNA, 25 bp, Saccharomyces pastorianus
gaagaatttgatgttgtcgctacta

SEQ ID NO: 140146 - DNA, 25 bp, Saccharomyces pastorianus
gctgagcgccttggacgaagaattt

SEQ ID NO: 140147 - DNA, 25 bp, Saccharomyces pastorianus
gaagttgtccaatttgccattaaat

SEQ ID NO: 140148 - DNA, 25 bp, Saccharomyces pastorianus
gattgagtctttgcgtataggcagc

SEQ ID NO: 140149 - DNA, 25 bp, Saccharomyces pastorianus
attttagatggtaagctgagcgcct

SEQ ID NO: 140150 - DNA, 25 bp, Saccharomyces pastorianus
agattcttcctgtcaactccgaaga

SEQ ID NO: 140151 - DNA, 25 bp, Saccharomyces pastorianus
tgcgcagatgaggacggaacgaata

SEQ ID NO: 140152 - DNA, 25 bp, Saccharomyces pastorianus
gaatttcagaccttgtcagctgcgt

SEQ ID NO: 140153 - DNA, 25 bp, Saccharomyces pastorianus
aatatcttcttgcaggagattcttc

SEQ ID NO: 140154 - DNA, 25 bp, Saccharomyces pastorianus
taggcagcaacctgctagatttaga

SEQ ID NO: 140155 - DNA, 25 bp, Saccharomyces pastorianus
ggtaattttaccaatagcctcaatg

SEQ ID NO: 140156 - DNA, 25 bp, Saccharomyces pastorianus
caagttcatcagtcatttgcgaagg

SEQ ID NO: 140157 - DNA, 25 bp, Saccharomyces pastorianus
gtgttgaaacgtttgacttactgaa

SEQ ID NO: 140158 - DNA, 25 bp, Saccharomyces pastorianus
gttgaacaaatactcgccttactct

SEQ ID NO: 140159 - DNA, 25 bp, Saccharomyces pastorianus
gtagctacgctacgattcgagagaa

SEQ ID NO: 140160 - DNA, 25 bp, Saccharomyces pastorianus
gtgtgttaagctataatgcatcaga

SEQ ID NO: 140161 - DNA, 25 bp, Saccharomyces pastorianus
gaactattatctaacgcagtcatta

SEQ ID NO: 140162 - DNA, 25 bp, Saccharomyces pastorianus
tccagaggcggattcgtttgacaag

SEQ ID NO: 140163 - DNA, 25 bp, Saccharomyces pastorianus
tattcacgtgctgaacaagttcatc

SEQ ID NO: 140164 - DNA, 25 bp, Saccharomyces pastorianus
atcaaagtcactcctggaacttgtg

SEQ ID NO: 140165 - DNA, 25 bp, Saccharomyces pastorianus
ggtatctctcatcttatattcacgt

SEQ ID NO: 140166 - DNA, 25 bp, Saccharomyces pastorianus
agcgtcgcgtactgtttcagcataa

SEQ ID NO: 140167 - DNA, 25 bp, Saccharomyces pastorianus
gtctttggccactcgacaacaattt

SEQ ID NO: 140168 - DNA, 25 bp, Saccharomyces pastorianus
gcagcatttcaagcactttgttaca

SEQ ID NO: 140169 - DNA, 25 bp, Saccharomyces pastorianus
acatcgtcttcttggtctttggcca

SEQ ID NO: 140170 - DNA, 25 bp, Saccharomyces pastorianus
ttgcccaacaagaaagcgtcgcgta

SEQ ID NO: 140171 - DNA, 25 bp, Saccharomyces pastorianus
attccgcacaagcaaataccacatc

SEQ ID NO: 140172 - DNA, 25 bp, Saccharomyces pastorianus
atcatcggcaaagctgatagcgaca

SEQ ID NO: 140173 - DNA, 25 bp, Saccharomyces pastorianus
ttgacttacagagttacttcccata

SEQ ID NO: 140174 - DNA, 25 bp, Saccharomyces pastorianus
ttgatgtttgctcgtattgcccaac

SEQ ID NO: 140175 - DNA, 25 bp, Saccharomyces pastorianus
acttcccatatgatcctttgtttct

SEQ ID NO: 140176 - DNA, 25 bp, Saccharomyces pastorianus
ggtttaaacatttctatgcagcatt

SEQ ID NO: 140177 - DNA, 25 bp, Saccharomyces pastorianus
atgcgtttgggagtgtttatggcca

SEQ ID NO: 140178 - DNA, 25 bp, Saccharomyces pastorianus
gcgcaaactagtaagcccctgtggt

SEQ ID NO: 140179 - DNA, 25 bp, Saccharomyces pastorianus
gaattgccaccaagatatgctgaca

SEQ ID NO: 140180 - DNA, 25 bp, Saccharomyces pastorianus
tatgctgacaccgataatttctttg

SEQ ID NO: 140181 - DNA, 25 bp, Saccharomyces pastorianus
aagagttcacgatccacatgatgaa

SEQ ID NO: 140182 - DNA, 25 bp, Saccharomyces pastorianus
ttggaattcctcctgcgtataatgg

SEQ ID NO: 140183 - DNA, 25 bp, Saccharomyces pastorianus
ggccaagttgggttcgtctttatag

SEQ ID NO: 140184 - DNA, 25 bp, Saccharomyces pastorianus
attacatgttaatttgggccaagtt

SEQ ID NO: 140185 - DNA, 25 bp, Saccharomyces pastorianus
aagcccctgtggtctgttgggacgt

SEQ ID NO: 140186 - DNA, 25 bp, Saccharomyces pastorianus
ggtcatcctctagaataacggcgca

SEQ ID NO: 140187 - DNA, 25 bp, Saccharomyces pastorianus
tggccaaattggaattcctcctgcg

SEQ ID NO: 140188 - DNA, 25 bp, Saccharomyces pastorianus
gcagcaattagtttggctttcttaa

SEQ ID NO: 140189 - DNA, 25 bp, Saccharomyces pastorianus
cccctatggattcagattctgcagc

SEQ ID NO: 140190 - DNA, 25 bp, Saccharomyces pastorianus
atccctggcgggtttgatgatgaga

SEQ ID NO: 140191 - DNA, 25 bp, Saccharomyces pastorianus
tgatgagatcgttcttcaggaaaga

SEQ ID NO: 140192 - DNA, 25 bp, Saccharomyces pastorianus
actctgcactctttgtttggtaaaa

SEQ ID NO: 140193 - DNA, 25 bp, Saccharomyces pastorianus
gaacgccttaggtacacgaacttca

SEQ ID NO: 140194 - DNA, 25 bp, Saccharomyces pastorianus
tggattcgagttttgcatccctggc

SEQ ID NO: 140195 - DNA, 25 bp, Saccharomyces pastorianus
gaacttcaggaactctgcactcttt

SEQ ID NO: 140196 - DNA, 25 bp, Saccharomyces pastorianus
catagtggcatcttgttggattcga

SEQ ID NO: 140197 - DNA, 25 bp, Saccharomyces pastorianus
ctcatcttggtagtaatagcggcat

SEQ ID NO: 140198 - DNA, 25 bp, Saccharomyces pastorianus
taagtctttctattacgtttgcaat

SEQ ID NO: 140199 - DNA, 25 bp, Saccharomyces pastorianus
agacaagtatattctgagatagtaa

SEQ ID NO: 140200 - DNA, 25 bp, Saccharomyces pastorianus
cttatctttttttctgtgttacaca

SEQ ID NO: 140201 - DNA, 25 bp, Saccharomyces pastorianus
tgtactggtaattttcaacgcgggt

SEQ ID NO: 140202 - DNA, 25 bp, Saccharomyces pastorianus
acatctacgcttcgaattcatccat

SEQ ID NO: 140203 - DNA, 25 bp, Saccharomyces pastorianus
tacgcttcgaattcatccataccca

SEQ ID NO: 140204 - DNA, 25 bp, Saccharomyces pastorianus
ttttcaacgcgggtctgttcttatc

SEQ ID NO: 140205 - DNA, 25 bp, Saccharomyces pastorianus
ctggtaattttcaacgcgggtctgt

SEQ ID NO: 140206 - DNA, 25 bp, Saccharomyces pastorianus
caacgcgggtctgttcttatctttt

SEQ ID NO: 140207 - DNA, 25 bp, Saccharomyces pastorianus
gtaatcacatctacgcttcgaattc

SEQ ID NO: 140208 - DNA, 25 bp, Saccharomyces pastorianus
tctgtgttacacaattagacaagta

SEQ ID NO: 140209 - DNA, 25 bp, Saccharomyces pastorianus
gatagtaatcacatctacgcttcga

SEQ ID NO: 140210 - DNA, 25 bp, Saccharomyces pastorianus
gtttatagatgtttcgcgttgcgtt

SEQ ID NO: 140211 - DNA, 25 bp, Saccharomyces pastorianus
taagaaggctgagcacaccatcctc

SEQ ID NO: 140212 - DNA, 25 bp, Saccharomyces pastorianus
gaaactacttgcttggtttatagat

SEQ ID NO: 140213 - DNA, 25 bp, Saccharomyces pastorianus
gcgttacagaataaggcagcctttt

SEQ ID NO: 140214 - DNA, 25 bp, Saccharomyces pastorianus
ttcgcgttgcgttacagaataaggc

SEQ ID NO: 140215 - DNA, 25 bp, Saccharomyces pastorianus
agatgtttcgcgttgcgttacagaa

SEQ ID NO: 140216 - DNA, 25 bp, Saccharomyces pastorianus
gattttcatttttcacatactgatg

SEQ ID NO: 140217 - DNA, 25 bp, Saccharomyces pastorianus
gagcacaccatcctcttatggaacg

SEQ ID NO: 140218 - DNA, 25 bp, Saccharomyces pastorianus
aatgaactaagaaggctgagcacac

SEQ ID NO: 140219 - DNA, 25 bp, Saccharomyces pastorianus
cacatactgatggattagcagacga

SEQ ID NO: 140220 - DNA, 25 bp, Saccharomyces pastorianus
catttcatagaaactacttgcttgg

SEQ ID NO: 140221 - DNA, 25 bp, Saccharomyces pastorianus
gagtcatcaaatcctgacctgccta

SEQ ID NO: 140222 - DNA, 25 bp, Saccharomyces pastorianus
tacagccttaccattaagcgttccg

SEQ ID NO: 140223 - DNA, 25 bp, Saccharomyces pastorianus
aatcatggacttttggtttgccctc

SEQ ID NO: 140224 - DNA, 25 bp, Saccharomyces pastorianus
aagcgttccggtgactatcattgat

SEQ ID NO: 140225 - DNA, 25 bp, Saccharomyces pastorianus
agctggtacagaaggccaccggttt

SEQ ID NO: 140226 - DNA, 25 bp, Saccharomyces pastorianus
gcatgtctttgagagagccacttat

SEQ ID NO: 140227 - DNA, 25 bp, Saccharomyces pastorianus
aagtcattctactcataccacgaac

SEQ ID NO: 140228 - DNA, 25 bp, Saccharomyces pastorianus
gtggaacagccactttggagtcatc

SEQ ID NO: 140229 - DNA, 25 bp, Saccharomyces pastorianus
gcaacaacgatgattcttcccctta

SEQ ID NO: 140230 - DNA, 25 bp, Saccharomyces pastorianus
ggtttgccctctccgctgaaaagga

SEQ ID NO: 140231 - DNA, 25 bp, Saccharomyces pastorianus
agataagtcgcatgaccgtcacggt

SEQ ID NO: 140232 - DNA, 25 bp, Saccharomyces pastorianus
aaacaatcagccgttccatcaagta

SEQ ID NO: 140233 - DNA, 25 bp, Saccharomyces pastorianus
tggccctccgacgagtatttcaaaa

SEQ ID NO: 140234 - DNA, 25 bp, Saccharomyces pastorianus
tgaggctactctttcgcataatata

SEQ ID NO: 140235 - DNA, 25 bp, Saccharomyces pastorianus
atctggcaacttggcttcacacgag

SEQ ID NO: 140236 - DNA, 25 bp, Saccharomyces pastorianus
gtatatccagcttctgactcatctt

SEQ ID NO: 140237 - DNA, 25 bp, Saccharomyces pastorianus
gagttgcacctgaccttttgaaaag

SEQ ID NO: 140238 - DNA, 25 bp, Saccharomyces pastorianus
gttcagacactttcagcctagattc

SEQ ID NO: 140239 - DNA, 25 bp, Saccharomyces pastorianus
atcaagtacttcctcgtccatttat

SEQ ID NO: 140240 - DNA, 25 bp, Saccharomyces pastorianus
aaatcaccaatcgttcgtgcctaag

SEQ ID NO: 140241 - DNA, 25 bp, Saccharomyces pastorianus
cacgaggcgtccaagtgttttccaa

SEQ ID NO: 140242 - DNA, 25 bp, Saccharomyces pastorianus
ttacgtggtgctaatccttacctca

SEQ ID NO: 140243 - DNA, 25 bp, Saccharomyces pastorianus
tgctgtgctcttctcgttaaggaaa

SEQ ID NO: 140244 - DNA, 25 bp, Saccharomyces pastorianus
ttgttgtctttcctaatcctcaggt

SEQ ID NO: 140245 - DNA, 25 bp, Saccharomyces pastorianus
agtttttcgtcatctctaatcttaa

SEQ ID NO: 140246 - DNA, 25 bp, Saccharomyces pastorianus
atgccatcttaagctctgctgtgct

SEQ ID NO: 140247 - DNA, 25 bp, Saccharomyces pastorianus
ttcgctccattcaatcgcagacttt

SEQ ID NO: 140248 - DNA, 25 bp, Saccharomyces pastorianus
cttcctttctctttatagctttgcg

SEQ ID NO: 140249 - DNA, 25 bp, Saccharomyces pastorianus
gtctttcagatatcgtgtcttccac

SEQ ID NO: 140250 - DNA, 25 bp, Saccharomyces pastorianus
ctaatcttaattccttctgcttgta

SEQ ID NO: 140251 - DNA, 25 bp, Saccharomyces pastorianus
actaccgacatactttcttttcatc

SEQ ID NO: 140252 - DNA, 25 bp, Saccharomyces pastorianus
ttttaatctaccctcaaatccggct

SEQ ID NO: 140253 - DNA, 25 bp, Saccharomyces pastorianus
agactttctcttttgtgcttccttt

SEQ ID NO: 140254 - DNA, 25 bp, Saccharomyces pastorianus
agaccagttgctttgccatggttct

SEQ ID NO: 140255 - DNA, 25 bp, Saccharomyces pastorianus
gcacccattggaagctttaggaaag

SEQ ID NO: 140256 - DNA, 25 bp, Saccharomyces pastorianus
attgttggtgccgttatggtcagag

SEQ ID NO: 140257 - DNA, 25 bp, Saccharomyces pastorianus
aagatttcgctccagcctttgatgt

SEQ ID NO: 140258 - DNA, 25 bp, Saccharomyces pastorianus
ggctgaaaaggctctaacctacact

SEQ ID NO: 140259 - DNA, 25 bp, Saccharomyces pastorianus
tttgatgtcgctccagactgggaat

SEQ ID NO: 140260 - DNA, 25 bp, Saccharomyces pastorianus
aaccctgaagaatactccatctgga

SEQ ID NO: 140261 - DNA, 25 bp, Saccharomyces pastorianus
ggttctgggaacactacaaccctga

SEQ ID NO: 140262 - DNA, 25 bp, Saccharomyces pastorianus
catgttcggttgtttagttgtctat

SEQ ID NO: 140263 - DNA, 25 bp, Saccharomyces pastorianus
tgggataagcctgttgttgtcaatg

SEQ ID NO: 140264 - DNA, 25 bp, Saccharomyces pastorianus
gacgaacttaccttgactttcatgt

SEQ ID NO: 140265 - DNA, 25 bp, Saccharomyces pastorianus
caagaaactacgcttctgaagcttt

SEQ ID NO: 140266 - DNA, 25 bp, Saccharomyces pastorianus
tgaagcaagcccctgcatttttggg

SEQ ID NO: 140267 - DNA, 25 bp, Saccharomyces pastorianus
gaacaatctagcgagtttgcttctt

SEQ ID NO: 140268 - DNA, 25 bp, Saccharomyces pastorianus
gcccctgcatttttgggtccaaagg

SEQ ID NO: 140269 - DNA, 25 bp, Saccharomyces pastorianus
aaactagatgtcaagatcgctgatc

SEQ ID NO: 140270 - DNA, 25 bp, Saccharomyces pastorianus
gatttcttactttaaactagatgtc

SEQ ID NO: 140271 - DNA, 25 bp, Saccharomyces pastorianus
ggtccaaagggcctaaagctaactg

SEQ ID NO: 140272 - DNA, 25 bp, Saccharomyces pastorianus
tctagcgagtttgcttctttgttcc

SEQ ID NO: 140273 - DNA, 25 bp, Saccharomyces pastorianus
agatctccaagaaactacgcttctg

SEQ ID NO: 140274 - DNA, 25 bp, Saccharomyces pastorianus
aagatcgctgatctagaacaatcta

SEQ ID NO: 140275 - DNA, 25 bp, Saccharomyces pastorianus
gctaactgaagctttggctattcaa

SEQ ID NO: 140276 - DNA, 25 bp, Saccharomyces pastorianus
gagcttttaactactaacgccatct

SEQ ID NO: 140277 - DNA, 25 bp, Saccharomyces pastorianus
gaagagggtctatgagctcgtcatc

SEQ ID NO: 140278 - DNA, 25 bp, Saccharomyces pastorianus
atcaaatagcccttggtcagccaat

SEQ ID NO: 140279 - DNA, 25 bp, Saccharomyces pastorianus
gaagggattaaacctccattcgata

SEQ ID NO: 140280 - DNA, 25 bp, Saccharomyces pastorianus
ggagtcttttgtggcaagaccgttt

SEQ ID NO: 140281 - DNA, 25 bp, Saccharomyces pastorianus
gagctcgtcatcaggaaatactatg

SEQ ID NO: 140282 - DNA, 25 bp, Saccharomyces pastorianus
gtttcttctagcagtatagcaacca

SEQ ID NO: 140283 - DNA, 25 bp, Saccharomyces pastorianus
gcaaccactggatcacaggagtctt

SEQ ID NO: 140284 - DNA, 25 bp, Saccharomyces pastorianus
gccaatacttcctcaaaacctttag

SEQ ID NO: 140285 - DNA, 25 bp, Saccharomyces pastorianus
aataaatctacaatcccatctccta

SEQ ID NO: 140286 - DNA, 25 bp, Saccharomyces pastorianus
aagttctgtcaaagagctctctctt

SEQ ID NO: 140287 - DNA, 25 bp, Saccharomyces pastorianus
atggctgcaggaccaatttgatcgt

SEQ ID NO: 140288 - DNA, 25 bp, Saccharomyces pastorianus
gcctactaaggagcaactggcttta

SEQ ID NO: 140289 - DNA, 25 bp, Saccharomyces pastorianus
atgttgcattatctatccctactgt

SEQ ID NO: 140290 - DNA, 25 bp, Saccharomyces pastorianus
tggtggtatttttcgtcttcatgta

SEQ ID NO: 140291 - DNA, 25 bp, Saccharomyces pastorianus
aaatcacaagtacaccgaattgcca

SEQ ID NO: 140292 - DNA, 25 bp, Saccharomyces pastorianus
tatccctactgtcgtggtggtattt

SEQ ID NO: 140293 - DNA, 25 bp, Saccharomyces pastorianus
ggatcgttgtatcagttcagccaat

SEQ ID NO: 140294 - DNA, 25 bp, Saccharomyces pastorianus
gatttcgatccactacaatacggta

SEQ ID NO: 140295 - DNA, 25 bp, Saccharomyces pastorianus
gtgttttgggtaagttctcggagat

SEQ ID NO: 140296 - DNA, 25 bp, Saccharomyces pastorianus
ctggctttagacgatgcaggtataa

SEQ ID NO: 140297 - DNA, 25 bp, Saccharomyces pastorianus
gtactttttcttatatgtcaacggg

SEQ ID NO: 140298 - DNA, 25 bp, Saccharomyces pastorianus
gtatctactgatatgggccaatatg

SEQ ID NO: 140299 - DNA, 25 bp, Saccharomyces pastorianus
ggcgtaaatattatcacaccagaag

SEQ ID NO: 140300 - DNA, 25 bp, Saccharomyces pastorianus
atcagcggcgtaaatattatcacac

SEQ ID NO: 140301 - DNA, 25 bp, Saccharomyces pastorianus
agaagaaagtgcctctgcgctaatt

SEQ ID NO: 140302 - DNA, 25 bp, Saccharomyces pastorianus
gaaagtgcctctgcgctaattgatg

SEQ ID NO: 140303 - DNA, 25 bp, Saccharomyces pastorianus
ggagaatatagacatcagcggcgta

SEQ ID NO: 140304 - DNA, 25 bp, Saccharomyces pastorianus
ggcattgatcattttaaagaggaga

SEQ ID NO: 140305 - DNA, 25 bp, Saccharomyces pastorianus
gtgcctctgcgctaattgatgtctt

SEQ ID NO: 140306 - DNA, 25 bp, Saccharomyces pastorianus
ctgcgctaattgatgtcttccgaaa

SEQ ID NO: 140307 - DNA, 25 bp, Saccharomyces pastorianus
gatgtcttccgaaaaattttaccag

SEQ ID NO: 140308 - DNA, 25 bp, Saccharomyces pastorianus
gggccaatatggcattgatcatttt

SEQ ID NO: 140309 - DNA, 25 bp, Saccharomyces pastorianus
agtgaaattgccacacttccttctt

SEQ ID NO: 140310 - DNA, 25 bp, Saccharomyces pastorianus
gatgtcaaatgcttttggctcccag

SEQ ID NO: 140311 - DNA, 25 bp, Saccharomyces pastorianus
gatgttcatacggtttcagcgaaga

SEQ ID NO: 140312 - DNA, 25 bp, Saccharomyces pastorianus
attataggtacttcatcggccttgg

SEQ ID NO: 140313 - DNA, 25 bp, Saccharomyces pastorianus
tccttcttctttccgaactttatag

SEQ ID NO: 140314 - DNA, 25 bp, Saccharomyces pastorianus
gtcttgtagtatccggaagcatgcc

SEQ ID NO: 140315 - DNA, 25 bp, Saccharomyces pastorianus
atgcttttggctcccagtgaaattg

SEQ ID NO: 140316 - DNA, 25 bp, Saccharomyces pastorianus
aatcgcggaacgtacgatgttcata

SEQ ID NO: 140317 - DNA, 25 bp, Saccharomyces pastorianus
gaagcatgcctaccggcattattat

SEQ ID NO: 140318 - DNA, 25 bp, Saccharomyces pastorianus
acttcatcggccttggactatgtag

SEQ ID NO: 140319 - DNA, 25 bp, Saccharomyces pastorianus
gcaaaggtctgttacaatcgcggaa

SEQ ID NO: 140320 - DNA, 25 bp, Saccharomyces pastorianus
atgaattttttagaaggagcacgat

SEQ ID NO: 140321 - DNA, 25 bp, Saccharomyces pastorianus
acatcatgttccctcactagctaat

SEQ ID NO: 140322 - DNA, 25 bp, Saccharomyces pastorianus
tcatgttccctcactagctaataat

SEQ ID NO: 140323 - DNA, 25 bp, Saccharomyces pastorianus
atgttccctcactagctaataatat

SEQ ID NO: 140324 - DNA, 25 bp, Saccharomyces pastorianus
gctttgggcagctcacatcatgttc

SEQ ID NO: 140325 - DNA, 25 bp, Saccharomyces pastorianus
atcatgttccctcactagctaataa

SEQ ID NO: 140326 - DNA, 25 bp, Saccharomyces pastorianus
attttttagaaggagcacgattata

SEQ ID NO: 140327 - DNA, 25 bp, Saccharomyces pastorianus
gggcagctcacatcatgttccctca

SEQ ID NO: 140328 - DNA, 25 bp, Saccharomyces pastorianus
ttgggcagctcacatcatgttccct

SEQ ID NO: 140329 - DNA, 25 bp, Saccharomyces pastorianus
tagaaggagcacgattatataaaaa

SEQ ID NO: 140330 - DNA, 25 bp, Saccharomyces pastorianus
tgttccctcactagctaataatata

SEQ ID NO: 140331 - DNA, 25 bp, Saccharomyces pastorianus
tgaagacgttttgccttcggacgat

SEQ ID NO: 140332 - DNA, 25 bp, Saccharomyces pastorianus
gatacagacaatcccgctatttcaa

SEQ ID NO: 140333 - DNA, 25 bp, Saccharomyces pastorianus
gttttcgtcgtcttcatgttcctat

SEQ ID NO: 140334 - DNA, 25 bp, Saccharomyces pastorianus
cttttattctgttccatcttctcaa

SEQ ID NO: 140335 - DNA, 25 bp, Saccharomyces pastorianus
aacgccggcgtgattgccacagaaa

SEQ ID NO: 140336 - DNA, 25 bp, Saccharomyces pastorianus
tatttatgattctttccgccgactt

SEQ ID NO: 140337 - DNA, 25 bp, Saccharomyces pastorianus
aacactgtggatgagctgccttggt

SEQ ID NO: 140338 - DNA, 25 bp, Saccharomyces pastorianus
aactctcgcagttgtatgggccatt

SEQ ID NO: 140339 - DNA, 25 bp, Saccharomyces pastorianus
tgtaccatcgcgttcacattgctat

SEQ ID NO: 140340 - DNA, 25 bp, Saccharomyces pastorianus
acattgctatggtctctgttttcgt

SEQ ID NO: 140341 - DNA, 25 bp, Saccharomyces pastorianus
gggccatttgttttggtgctatcaa

SEQ ID NO: 140342 - DNA, 25 bp, Saccharomyces pastorianus
ggagcaattccctgtgtacatttca

SEQ ID NO: 140343 - DNA, 25 bp, Saccharomyces pastorianus
atatattggttcatgcactcggagc

SEQ ID NO: 140344 - DNA, 25 bp, Saccharomyces pastorianus
tggtatgctgatagccatgcttatt

SEQ ID NO: 140345 - DNA, 25 bp, Saccharomyces pastorianus
agtcaaggccatcccatatattggt

SEQ ID NO: 140346 - DNA, 25 bp, Saccharomyces pastorianus
gccactaatttaaggccactgttta

SEQ ID NO: 140347 - DNA, 25 bp, Saccharomyces pastorianus
aaaagacccttctatctctgattcc

SEQ ID NO: 140348 - DNA, 25 bp, Saccharomyces pastorianus
gtacatttcagatataggtgccact

SEQ ID NO: 140349 - DNA, 25 bp, Saccharomyces pastorianus
gctatgtaatcactgttgcccttga

SEQ ID NO: 140350 - DNA, 25 bp, Saccharomyces pastorianus
gttttttcaaagatccggctatctg

SEQ ID NO: 140351 - DNA, 25 bp, Saccharomyces pastorianus
ggctatctgcctttccaactgaaaa

SEQ ID NO: 140352 - DNA, 25 bp, Saccharomyces pastorianus
catgcttatttgctgggccagtcaa

SEQ ID NO: 140353 - DNA, 25 bp, Saccharomyces pastorianus
cggatgcttgcttggagtgttctaa

SEQ ID NO: 140354 - DNA, 25 bp, Saccharomyces pastorianus
gtaccaaaacacagagcaccggatg

SEQ ID NO: 140355 - DNA, 25 bp, Saccharomyces pastorianus
agccattgaaagaaccctctcggtc

SEQ ID NO: 140356 - DNA, 25 bp, Saccharomyces pastorianus
aaagtctccaatacttcagaccaag

SEQ ID NO: 140357 - DNA, 25 bp, Saccharomyces pastorianus
cctctcggtcctcacaaattatgtt

SEQ ID NO: 140358 - DNA, 25 bp, Saccharomyces pastorianus
aatcatgctacgcatcgtcattctt

SEQ ID NO: 140359 - DNA, 25 bp, Saccharomyces pastorianus
attcttcccaatccagtcgcgatta

SEQ ID NO: 140360 - DNA, 25 bp, Saccharomyces pastorianus
gatgctacaggtaatcctcgtacaa

SEQ ID NO: 140361 - DNA, 25 bp, Saccharomyces pastorianus
accgttaaggtaaatccgtctgatg

SEQ ID NO: 140362 - DNA, 25 bp, Saccharomyces pastorianus
attactcaccctcttcggatgcttg

SEQ ID NO: 140363 - DNA, 25 bp, Saccharomyces pastorianus
taacgacaggatgtcacccttacct

SEQ ID NO: 140364 - DNA, 25 bp, Saccharomyces pastorianus
gaagcaatcagaatgaacactttgt

SEQ ID NO: 140365 - DNA, 25 bp, Saccharomyces pastorianus
gaggtaaattcattggttagactac

SEQ ID NO: 140366 - DNA, 25 bp, Saccharomyces pastorianus
atgtacacttccagagcgcagttgg

SEQ ID NO: 140367 - DNA, 25 bp, Saccharomyces pastorianus
agagatggacgaagctgttgatgaa

SEQ ID NO: 140368 - DNA, 25 bp, Saccharomyces pastorianus
ttccagagcgcagttggattctgtt

SEQ ID NO: 140369 - DNA, 25 bp, Saccharomyces pastorianus
ttggttagactacctcaattgagaa

SEQ ID NO: 140370 - DNA, 25 bp, Saccharomyces pastorianus
gccaaccgtagaattagcagccaat

SEQ ID NO: 140371 - DNA, 25 bp, Saccharomyces pastorianus
aatggctgacagtgcgggcttaatg

SEQ ID NO: 140372 - DNA, 25 bp, Saccharomyces pastorianus
gaatgttgaccaagtgccaaccgta

SEQ ID NO: 140373 - DNA, 25 bp, Saccharomyces pastorianus
aggaacttatgaaatctgggattat

SEQ ID NO: 140374 - DNA, 25 bp, Saccharomyces pastorianus
gaacactttgtcaaatcaaatggct

SEQ ID NO: 140375 - DNA, 25 bp, Saccharomyces pastorianus
aggagaatcagatcggtcctgagga

SEQ ID NO: 140376 - DNA, 25 bp, Saccharomyces pastorianus
gcaacagaggagaatcagatcggtc

SEQ ID NO: 140377 - DNA, 25 bp, Saccharomyces pastorianus
ggtcctgaggaaaaatggtcgaaat

SEQ ID NO: 140378 - DNA, 25 bp, Saccharomyces pastorianus
agaatcagatcggtcctgaggaaaa

SEQ ID NO: 140379 - DNA, 25 bp, Saccharomyces pastorianus
aatatagacaaatcgttgcgggaac

SEQ ID NO: 140380 - DNA, 25 bp, Saccharomyces pastorianus
gggccagaccctaaggagcaacaga

SEQ ID NO: 140381 - DNA, 25 bp, Saccharomyces pastorianus
cagaggagaatcagatcggtcctga

SEQ ID NO: 140382 - DNA, 25 bp, Saccharomyces pastorianus
tatagacaaatcgttgcgggaactc

SEQ ID NO: 140383 - DNA, 25 bp, Saccharomyces pastorianus
agaccctaaggagcaacagaggaga

SEQ ID NO: 140384 - DNA, 25 bp, Saccharomyces pastorianus
aatcagatcggtcctgaggaaaaat

SEQ ID NO: 140385 - DNA, 25 bp, Saccharomyces pastorianus
gccagaccctaaggagcaacagagg

SEQ ID NO: 140386 - DNA, 25 bp, Saccharomyces pastorianus
tgcagtgtccaggagtggagtcttt

SEQ ID NO: 140387 - DNA, 25 bp, Saccharomyces pastorianus
gcaacttgcttacgatgaagatgtt

SEQ ID NO: 140388 - DNA, 25 bp, Saccharomyces pastorianus
tgcccaaatttgaacttaccgaaga

SEQ ID NO: 140389 - DNA, 25 bp, Saccharomyces pastorianus
ttctctccacagatggcgagatgct

SEQ ID NO: 140390 - DNA, 25 bp, Saccharomyces pastorianus
accattccaagttagcacagcaaat

SEQ ID NO: 140391 - DNA, 25 bp, Saccharomyces pastorianus
ggtccattggaatagtatcaagcct

SEQ ID NO: 140392 - DNA, 25 bp, Saccharomyces pastorianus
aatgctttaaaatttctctccacag

SEQ ID NO: 140393 - DNA, 25 bp, Saccharomyces pastorianus
gacgcgtggctccaagagtatagtt

SEQ ID NO: 140394 - DNA, 25 bp, Saccharomyces pastorianus
tccaaagaattccatgctgtccaag

SEQ ID NO: 140395 - DNA, 25 bp, Saccharomyces pastorianus
agatgctacagacgcgtggctccaa

SEQ ID NO: 140396 - DNA, 25 bp, Saccharomyces pastorianus
agatttgttaaccaagcaacttgct

SEQ ID NO: 140397 - DNA, 25 bp, Saccharomyces pastorianus
gaactggtcaagcagatgcctacat

SEQ ID NO: 140398 - DNA, 25 bp, Saccharomyces pastorianus
agaaacgacgtcatgtggccaaagt

SEQ ID NO: 140399 - DNA, 25 bp, Saccharomyces pastorianus
aagtagttcaaatcaccagcgtgct

SEQ ID NO: 140400 - DNA, 25 bp, Saccharomyces pastorianus
agtcgctgggaaccttaacgctgca

SEQ ID NO: 140401 - DNA, 25 bp, Saccharomyces pastorianus
ttgctatcctgcacgaggtctacaa

SEQ ID NO: 140402 - DNA, 25 bp, Saccharomyces pastorianus
gcttgagaacgttgccctggaaaat

SEQ ID NO: 140403 - DNA, 25 bp, Saccharomyces pastorianus
gaggactttcgtccacgaccagaaa

SEQ ID NO: 140404 - DNA, 25 bp, Saccharomyces pastorianus
ataagcccataatgtccctgacagg

SEQ ID NO: 140405 - DNA, 25 bp, Saccharomyces pastorianus
caggacctggtcatgaagctgtcaa

SEQ ID NO: 140406 - DNA, 25 bp, Saccharomyces pastorianus
aagacactggcactatcctttcaga

SEQ ID NO: 140407 - DNA, 25 bp, Saccharomyces pastorianus
gacattgcttgatgaacgccgtact

SEQ ID NO: 140408 - DNA, 25 bp, Saccharomyces pastorianus
gttcaacagtctcccataacgaata

SEQ ID NO: 140409 - DNA, 25 bp, Saccharomyces pastorianus
atgcccgcgggtaatattggccaac

SEQ ID NO: 140410 - DNA, 25 bp, Saccharomyces pastorianus
gatacaatcaactatgcccgcgggt

SEQ ID NO: 140411 - DNA, 25 bp, Saccharomyces pastorianus
tggcattcctcctagtttccaaaat

SEQ ID NO: 140412 - DNA, 25 bp, Saccharomyces pastorianus
aaacggaagtgtcaccggctcaggc

SEQ ID NO: 140413 - DNA, 25 bp, Saccharomyces pastorianus
cagtgcctctagtagtggtggttat

SEQ ID NO: 140414 - DNA, 25 bp, Saccharomyces pastorianus
aaactctcttttactaggtggccag

SEQ ID NO: 140415 - DNA, 25 bp, Saccharomyces pastorianus
ggcaatagcggcgacaacggtataa

SEQ ID NO: 140416 - DNA, 25 bp, Saccharomyces pastorianus
gttccataccttctttgctacgaaa

SEQ ID NO: 140417 - DNA, 25 bp, Saccharomyces pastorianus
gcagttgtcttataacaccgttcaa

SEQ ID NO: 140418 - DNA, 25 bp, Saccharomyces pastorianus
aaagtgccctaccatgagtttcaac

SEQ ID NO: 140419 - DNA, 25 bp, Saccharomyces pastorianus
gccgccctcaatgaatgtttccaaa

SEQ ID NO: 140420 - DNA, 25 bp, Saccharomyces pastorianus
aacgaccttgaccagtgacttattg

SEQ ID NO: 140421 - DNA, 25 bp, Saccharomyces pastorianus
gcgtggctttgtcgccaagcaatga

SEQ ID NO: 140422 - DNA, 25 bp, Saccharomyces pastorianus
gaattgttagttcgtgttgctctga

SEQ ID NO: 140423 - DNA, 25 bp, Saccharomyces pastorianus
gccaggtggcaagtttttcgataat

SEQ ID NO: 140424 - DNA, 25 bp, Saccharomyces pastorianus
ggatttccgatcatacctttaaaca

SEQ ID NO: 140425 - DNA, 25 bp, Saccharomyces pastorianus
tgggttcactacagccagggcaagg

SEQ ID NO: 140426 - DNA, 25 bp, Saccharomyces pastorianus
tcgcctatggacagatatccgatgt

SEQ ID NO: 140427 - DNA, 25 bp, Saccharomyces pastorianus
acttcttcaactatcgcctatggac

SEQ ID NO: 140428 - DNA, 25 bp, Saccharomyces pastorianus
tgcaaagcgtttttattgccgccct

SEQ ID NO: 140429 - DNA, 25 bp, Saccharomyces pastorianus
tcgataatattgttggcgtggcttt

SEQ ID NO: 140430 - DNA, 25 bp, Saccharomyces pastorianus
gaacataccgttgattgcgcgatat

SEQ ID NO: 140431 - DNA, 25 bp, Saccharomyces pastorianus
gctggttcttgcctaagcacacaat

SEQ ID NO: 140432 - DNA, 25 bp, Saccharomyces pastorianus
aagcttgcccgttgtgtatgttttc

SEQ ID NO: 140433 - DNA, 25 bp, Saccharomyces pastorianus
tggtcacgccttgtaatcacgtatt

SEQ ID NO: 140434 - DNA, 25 bp, Saccharomyces pastorianus
tcgtcgtatttttatcattgtggct

SEQ ID NO: 140435 - DNA, 25 bp, Saccharomyces pastorianus
ttcaagcccctttcaaacgagtata

SEQ ID NO: 140436 - DNA, 25 bp, Saccharomyces pastorianus
gtatgttttcacttactcctctaat

SEQ ID NO: 140437 - DNA, 25 bp, Saccharomyces pastorianus
cgtatttcatacttcgtgtctagaa

SEQ ID NO: 140438 - DNA, 25 bp, Saccharomyces pastorianus
actcctctaatgtgttcaggcacca

SEQ ID NO: 140439 - DNA, 25 bp, Saccharomyces pastorianus
gtggatcagcactcttacatggtca

SEQ ID NO: 140440 - DNA, 25 bp, Saccharomyces pastorianus
ggccccgtcagctaaggatggtatt

SEQ ID NO: 140441 - DNA, 25 bp, Saccharomyces pastorianus
gtggccttcgtatggcgaacttcat

SEQ ID NO: 140442 - DNA, 25 bp, Saccharomyces pastorianus
gcattccatatactcgaaggctgta

SEQ ID NO: 140443 - DNA, 25 bp, Saccharomyces pastorianus
tatgagccggcaactgatttttcag

SEQ ID NO: 140444 - DNA, 25 bp, Saccharomyces pastorianus
atattcctcctgaaggtgagacgta

SEQ ID NO: 140445 - DNA, 25 bp, Saccharomyces pastorianus
gataaggatgcctgtacccagattc

SEQ ID NO: 140446 - DNA, 25 bp, Saccharomyces pastorianus
catggttttgcccaacgatgtcata

SEQ ID NO: 140447 - DNA, 25 bp, Saccharomyces pastorianus
gaatgatgacgcttccaaccttttc

SEQ ID NO: 140448 - DNA, 25 bp, Saccharomyces pastorianus
acatttcattcattgttcgcccttc

SEQ ID NO: 140449 - DNA, 25 bp, Saccharomyces pastorianus
gacgtactggtctgagtggccttcg

SEQ ID NO: 140450 - DNA, 25 bp, Saccharomyces pastorianus
agattatgatcgatggtttcccaat

SEQ ID NO: 140451 - DNA, 25 bp, Saccharomyces pastorianus
gtacccagattctatgagccggcaa

SEQ ID NO: 140452 - DNA, 25 bp, Saccharomyces pastorianus
gccctctcttagtggcgacaattcg

SEQ ID NO: 140453 - DNA, 25 bp, Saccharomyces pastorianus
gggtagcaacccaggtctcgagtcg

SEQ ID NO: 140454 - DNA, 25 bp, Saccharomyces pastorianus
tctgtgatagtggtggcacgcgata

SEQ ID NO: 140455 - DNA, 25 bp, Saccharomyces pastorianus
cttagtggcgacaattcggctagtt

SEQ ID NO: 140456 - DNA, 25 bp, Saccharomyces pastorianus
tgtccaggccgggtagcaacccagg

SEQ ID NO: 140457 - DNA, 25 bp, Saccharomyces pastorianus
tcgagtcgccctctcttagtggcga

SEQ ID NO: 140458 - DNA, 25 bp, Saccharomyces pastorianus
gcagcggagatcatcttgtctgtga

SEQ ID NO: 140459 - DNA, 25 bp, Saccharomyces pastorianus
attcggctagttggtccactgcagc

SEQ ID NO: 140460 - DNA, 25 bp, Saccharomyces pastorianus
catcttgtctgtgatagtggtggca

SEQ ID NO: 140461 - DNA, 25 bp, Saccharomyces pastorianus
tccactgcagcggagatcatcttgt

SEQ ID NO: 140462 - DNA, 25 bp, Saccharomyces pastorianus
tagttggtccactgcagcggagatc

SEQ ID NO: 140463 - DNA, 25 bp, Saccharomyces pastorianus
ggatttaactcatgtcctaagatgt

SEQ ID NO: 140464 - DNA, 25 bp, Saccharomyces pastorianus
aggaaataacccctcaatcaattga

SEQ ID NO: 140465 - DNA, 25 bp, Saccharomyces pastorianus
actgcccctaaagaatatcgattgg

SEQ ID NO: 140466 - DNA, 25 bp, Saccharomyces pastorianus
taacaacaacactgcccctaaagaa

SEQ ID NO: 140467 - DNA, 25 bp, Saccharomyces pastorianus
gtcctggaatcgtcacaaacctata

SEQ ID NO: 140468 - DNA, 25 bp, Saccharomyces pastorianus
gaatctgggactaaattccccatta

SEQ ID NO: 140469 - DNA, 25 bp, Saccharomyces pastorianus
taatgttggtaacgcccgatgagtt

SEQ ID NO: 140470 - DNA, 25 bp, Saccharomyces pastorianus
gactggtcaacaagctaaattgcat

SEQ ID NO: 140471 - DNA, 25 bp, Saccharomyces pastorianus
gagagctattatttaacctatccat

SEQ ID NO: 140472 - DNA, 25 bp, Saccharomyces pastorianus
gataagatgttcatggtcctggaat

SEQ ID NO: 140473 - DNA, 25 bp, Saccharomyces pastorianus
acatggagtctgtcttatcaagaga

SEQ ID NO: 140474 - DNA, 25 bp, Saccharomyces pastorianus
cacagtcttctacagtatcacctat

SEQ ID NO: 140475 - DNA, 25 bp, Saccharomyces pastorianus
tgcacctgaacagccatcatcattg

SEQ ID NO: 140476 - DNA, 25 bp, Saccharomyces pastorianus
atatcaataccaactaccgcttcga

SEQ ID NO: 140477 - DNA, 25 bp, Saccharomyces pastorianus
aatgcacattcttttccatttccct

SEQ ID NO: 140478 - DNA, 25 bp, Saccharomyces pastorianus
acctcctcaattcacactaatgcaa

SEQ ID NO: 140479 - DNA, 25 bp, Saccharomyces pastorianus
taagtacccacgtatttatccgcct

SEQ ID NO: 140480 - DNA, 25 bp, Saccharomyces pastorianus
taataatgtgccacctcctatgcaa

SEQ ID NO: 140481 - DNA, 25 bp, Saccharomyces pastorianus
tctgcagatcagcttttcattccaa

SEQ ID NO: 140482 - DNA, 25 bp, Saccharomyces pastorianus
ttatcgattttgcaggttttcccct

SEQ ID NO: 140483 - DNA, 25 bp, Saccharomyces pastorianus
gtatcacctatatgcacctgaacag

SEQ ID NO: 140484 - DNA, 25 bp, Saccharomyces pastorianus
caaccgccacccatagagagtagta

SEQ ID NO: 140485 - DNA, 25 bp, Saccharomyces pastorianus
gaaacagctgatataggtgaccaaa

SEQ ID NO: 140486 - DNA, 25 bp, Saccharomyces pastorianus
gttcatttctatccttgtgagaagt

SEQ ID NO: 140487 - DNA, 25 bp, Saccharomyces pastorianus
tattgggtcacacaaaccgtattaa

SEQ ID NO: 140488 - DNA, 25 bp, Saccharomyces pastorianus
agtctacgactgtggcgaaaggcta

SEQ ID NO: 140489 - DNA, 25 bp, Saccharomyces pastorianus
gacaaggagggtatcaaccccgcct

SEQ ID NO: 140490 - DNA, 25 bp, Saccharomyces pastorianus
gaatttggtacctacctagtcacca

SEQ ID NO: 140491 - DNA, 25 bp, Saccharomyces pastorianus
tacctagtcaccattggttctgatg

SEQ ID NO: 140492 - DNA, 25 bp, Saccharomyces pastorianus
ggctaaattgcttaacgctatgcga

SEQ ID NO: 140493 - DNA, 25 bp, Saccharomyces pastorianus
cgccttttctttattgggtcacaca

SEQ ID NO: 140494 - DNA, 25 bp, Saccharomyces pastorianus
gaaacacatattttaccattcgata

SEQ ID NO: 140495 - DNA, 25 bp, Saccharomyces pastorianus
ggttctgatggtaaaattgtcgtat

SEQ ID NO: 140496 - DNA, 25 bp, Saccharomyces pastorianus
ttacgcgaactaatctattttattt

SEQ ID NO: 140497 - DNA, 25 bp, Saccharomyces pastorianus
tacaacattggtactttacggaacg

SEQ ID NO: 140498 - DNA, 25 bp, Saccharomyces pastorianus
tattgtgtcgtttttcgaggttttg

SEQ ID NO: 140499 - DNA, 25 bp, Saccharomyces pastorianus
ttacaaagtccaaagggtagcagat

SEQ ID NO: 140500 - DNA, 25 bp, Saccharomyces pastorianus
gaaaaactactattaggctacaacg

SEQ ID NO: 140501 - DNA, 25 bp, Saccharomyces pastorianus
aattagcagaaacggtattgtgtcg

SEQ ID NO: 140502 - DNA, 25 bp, Saccharomyces pastorianus
ggacgatatactgtacaacattggt

SEQ ID NO: 140503 - DNA, 25 bp, Saccharomyces pastorianus
ggctacaacgagcttgtcaaatcac

SEQ ID NO: 140504 - DNA, 25 bp, Saccharomyces pastorianus
aaacttgatcaatatgccatacttg

SEQ ID NO: 140505 - DNA, 25 bp, Saccharomyces pastorianus
aaatctagactaccacaggacgata

SEQ ID NO: 140506 - DNA, 25 bp, Saccharomyces pastorianus
aatactactttgaggttagcccaag

SEQ ID NO: 140507 - DNA, 25 bp, Saccharomyces pastorianus
gggatctcccaagcttccaattggg

SEQ ID NO: 140508 - DNA, 25 bp, Saccharomyces pastorianus
tgaacgctgaacatggctatacaat

SEQ ID NO: 140509 - DNA, 25 bp, Saccharomyces pastorianus
agactggtctatggcaactttatac

SEQ ID NO: 140510 - DNA, 25 bp, Saccharomyces pastorianus
atggcctaacagcagacgagtatct

SEQ ID NO: 140511 - DNA, 25 bp, Saccharomyces pastorianus
atatccgcgtttggtaagcatgaaa

SEQ ID NO: 140512 - DNA, 25 bp, Saccharomyces pastorianus
ttgcaatttttaacgggatctccca

SEQ ID NO: 140513 - DNA, 25 bp, Saccharomyces pastorianus
gatgctaatactttttccggatgaa

SEQ ID NO: 140514 - DNA, 25 bp, Saccharomyces pastorianus
accctagaatcgttgtccttgacat

SEQ ID NO: 140515 - DNA, 25 bp, Saccharomyces pastorianus
aaatccttgaactcttctaatgttg

SEQ ID NO: 140516 - DNA, 25 bp, Saccharomyces pastorianus
gaatatatccatggcgttatcgacc

SEQ ID NO: 140517 - DNA, 25 bp, Saccharomyces pastorianus
tccttgacatttaccgttcctggaa

SEQ ID NO: 140518 - DNA, 25 bp, Saccharomyces pastorianus
aggctggtaatagcatatggagaat

SEQ ID NO: 140519 - DNA, 25 bp, Saccharomyces pastorianus
aacccgatcattaaaggctggtaat

SEQ ID NO: 140520 - DNA, 25 bp, Saccharomyces pastorianus
ggttaacccgatcattaaaggctgg

SEQ ID NO: 140521 - DNA, 25 bp, Saccharomyces pastorianus
gaatggtgggtttggcgttattaat

SEQ ID NO: 140522 - DNA, 25 bp, Saccharomyces pastorianus
gctacattcagaaacataaaccaag

SEQ ID NO: 140523 - DNA, 25 bp, Saccharomyces pastorianus
agccaataaattagctacattcaga

SEQ ID NO: 140524 - DNA, 25 bp, Saccharomyces pastorianus
gatatcaaaaattcgtcctcaaggt

SEQ ID NO: 140525 - DNA, 25 bp, Saccharomyces pastorianus
gattcattgggatcgatgtttaccg

SEQ ID NO: 140526 - DNA, 25 bp, Saccharomyces pastorianus
gggatcgatgtttaccgatatcaaa

SEQ ID NO: 140527 - DNA, 25 bp, Saccharomyces pastorianus
gacagttctgtcataaaccaaatga

SEQ ID NO: 140528 - DNA, 25 bp, Saccharomyces pastorianus
tcgtcctcaaggttaacccgatcat

SEQ ID NO: 140529 - DNA, 25 bp, Saccharomyces pastorianus
gcaccatgtacataggccttgactt

SEQ ID NO: 140530 - DNA, 25 bp, Saccharomyces pastorianus
aaagggttacgatttgccagatgaa

SEQ ID NO: 140531 - DNA, 25 bp, Saccharomyces pastorianus
aactgagacagcactgaacgccctt

SEQ ID NO: 140532 - DNA, 25 bp, Saccharomyces pastorianus
gggcagtgacgagcaacatttaaaa

SEQ ID NO: 140533 - DNA, 25 bp, Saccharomyces pastorianus
acattccctgcactgaatttgtgaa

SEQ ID NO: 140534 - DNA, 25 bp, Saccharomyces pastorianus
aaaattgcacatcctttcaccaaac

SEQ ID NO: 140535 - DNA, 25 bp, Saccharomyces pastorianus
aaagttgacattcacattccctgca

SEQ ID NO: 140536 - DNA, 25 bp, Saccharomyces pastorianus
gagatctaaatcagatgctgcttca

SEQ ID NO: 140537 - DNA, 25 bp, Saccharomyces pastorianus
attgttgtccaaccgaggatgacta

SEQ ID NO: 140538 - DNA, 25 bp, Saccharomyces pastorianus
acaaagtattcaatctagccctccg

SEQ ID NO: 140539 - DNA, 25 bp, Saccharomyces pastorianus
gaacgcccttaaactggtaacagat

SEQ ID NO: 140540 - DNA, 25 bp, Saccharomyces pastorianus
ggacctgtttccaccgtgggcgcca

SEQ ID NO: 140541 - DNA, 25 bp, Saccharomyces pastorianus
ttactggacctgtttccaccgtggg

SEQ ID NO: 140542 - DNA, 25 bp, Saccharomyces pastorianus
gcaagaaactgccaatagggtacaa

SEQ ID NO: 140543 - DNA, 25 bp, Saccharomyces pastorianus
cgtgggcgccacagcagcagaaaat

SEQ ID NO: 140544 - DNA, 25 bp, Saccharomyces pastorianus
tgttgaaaatattgcaggaattggc

SEQ ID NO: 140545 - DNA, 25 bp, Saccharomyces pastorianus
aatgatagtttaatccaagaactga

SEQ ID NO: 140546 - DNA, 25 bp, Saccharomyces pastorianus
ggaaggatcgttcgaaacagagcaa

SEQ ID NO: 140547 - DNA, 25 bp, Saccharomyces pastorianus
actgccaatagggtacaagtgttga

SEQ ID NO: 140548 - DNA, 25 bp, Saccharomyces pastorianus
ggcgccacagcagcagaaaataaat

SEQ ID NO: 140549 - DNA, 25 bp, Saccharomyces pastorianus
ggatcgttcgaaacagagcaagaaa

SEQ ID NO: 140550 - DNA, 25 bp, Saccharomyces pastorianus
tggtattactggacctgtttccacc

SEQ ID NO: 140551 - DNA, 25 bp, Saccharomyces pastorianus
aaatatccctatcgacgaggaccct

SEQ ID NO: 140552 - DNA, 25 bp, Saccharomyces pastorianus
ttggccgttcgcaatcatcctgttg

SEQ ID NO: 140553 - DNA, 25 bp, Saccharomyces pastorianus
gacgaggaccctgagaagcaaatac

SEQ ID NO: 140554 - DNA, 25 bp, Saccharomyces pastorianus
agatcaccaaagacagttagccaaa

SEQ ID NO: 140555 - DNA, 25 bp, Saccharomyces pastorianus
acaaatttttcatccccgcatttga

SEQ ID NO: 140556 - DNA, 25 bp, Saccharomyces pastorianus
aaggttacagatgcgttggccgttc

SEQ ID NO: 140557 - DNA, 25 bp, Saccharomyces pastorianus
gcaacctcgttcttcaccaaaagtt

SEQ ID NO: 140558 - DNA, 25 bp, Saccharomyces pastorianus
ggacttaaagcaacctcgttcttca

SEQ ID NO: 140559 - DNA, 25 bp, Saccharomyces pastorianus
aaaagttcggccattgagcgagcaa

SEQ ID NO: 140560 - DNA, 25 bp, Saccharomyces pastorianus
aagcctggcgaagatcttgactatt

SEQ ID NO: 140561 - DNA, 25 bp, Saccharomyces pastorianus
gcgtagaatttcatccaaagttgtt

SEQ ID NO: 140562 - DNA, 25 bp, Saccharomyces pastorianus
acagcttattgggatctaccataca

SEQ ID NO: 140563 - DNA, 25 bp, Saccharomyces pastorianus
gggtcgttattcctaaatctagatt

SEQ ID NO: 140564 - DNA, 25 bp, Saccharomyces pastorianus
ggctgcgatttgaccaggatcacct

SEQ ID NO: 140565 - DNA, 25 bp, Saccharomyces pastorianus
gattcctgaatcttcgattagagtg

SEQ ID NO: 140566 - DNA, 25 bp, Saccharomyces pastorianus
gtttttgttacaggcgcattcagaa

SEQ ID NO: 140567 - DNA, 25 bp, Saccharomyces pastorianus
taggtaattcaagtgcggccatgat

SEQ ID NO: 140568 - DNA, 25 bp, Saccharomyces pastorianus
accaggatcaccttgcctactttta

SEQ ID NO: 140569 - DNA, 25 bp, Saccharomyces pastorianus
gcgcattcagaaaaggaccccttga

SEQ ID NO: 140570 - DNA, 25 bp, Saccharomyces pastorianus
ttaaatctcctaacttccaagctga

SEQ ID NO: 140571 - DNA, 25 bp, Saccharomyces pastorianus
tctaccatacaagcagcaggcatat

SEQ ID NO: 140572 - DNA, 25 bp, Saccharomyces pastorianus
gctggcatattgctccaaaggctgt

SEQ ID NO: 140573 - DNA, 25 bp, Saccharomyces pastorianus
tgttctctacaaccttttcgcaagt

SEQ ID NO: 140574 - DNA, 25 bp, Saccharomyces pastorianus
tggtgaattcatatcggcggcatct

SEQ ID NO: 140575 - DNA, 25 bp, Saccharomyces pastorianus
ccggtcgcgggtatcttttagagat

SEQ ID NO: 140576 - DNA, 25 bp, Saccharomyces pastorianus
aagatttctgatccaggcgctgcta

SEQ ID NO: 140577 - DNA, 25 bp, Saccharomyces pastorianus
aattttggtctctttagcgctaatg

SEQ ID NO: 140578 - DNA, 25 bp, Saccharomyces pastorianus
taatgagcaggccacactgttctct

SEQ ID NO: 140579 - DNA, 25 bp, Saccharomyces pastorianus
gtaccgcaacttcgacgtttttgag

SEQ ID NO: 140580 - DNA, 25 bp, Saccharomyces pastorianus
gtgccgcacttaccagaactagatt

SEQ ID NO: 140581 - DNA, 25 bp, Saccharomyces pastorianus
gtatttctattctcttcctgtaagc

SEQ ID NO: 140582 - DNA, 25 bp, Saccharomyces pastorianus
ggattttcatattcactgccatcac

SEQ ID NO: 140583 - DNA, 25 bp, Saccharomyces pastorianus
gtagcagtacttaatccggatggat

SEQ ID NO: 140584 - DNA, 25 bp, Saccharomyces pastorianus
ttacatcaccggattcagcgaaaat

SEQ ID NO: 140585 - DNA, 25 bp, Saccharomyces pastorianus
aatgaaattttcagccagtcccagg

SEQ ID NO: 140586 - DNA, 25 bp, Saccharomyces pastorianus
atgaaattttcagccagtcccaggt

SEQ ID NO: 140587 - DNA, 25 bp, Saccharomyces pastorianus
ccggattcagcgaaaatatcaaagg

SEQ ID NO: 140588 - DNA, 25 bp, Saccharomyces pastorianus
gaagttgcactctaatatactaaat

SEQ ID NO: 140589 - DNA, 25 bp, Saccharomyces pastorianus
gttgcactctaatatactaaatgaa

SEQ ID NO: 140590 - DNA, 25 bp, Saccharomyces pastorianus
ctgcttacatcaccggattcagcga

SEQ ID NO: 140591 - DNA, 25 bp, Saccharomyces pastorianus
cttacatcaccggattcagcgaaaa

SEQ ID NO: 140592 - DNA, 25 bp, Saccharomyces pastorianus
acatcaccggattcagcgaaaatat

SEQ ID NO: 140593 - DNA, 25 bp, Saccharomyces pastorianus
ggaacagttaaagaagttgcactct

SEQ ID NO: 140594 - DNA, 25 bp, Saccharomyces pastorianus
tcaccggattcagcgaaaatatcaa

SEQ ID NO: 140595 - DNA, 25 bp, Saccharomyces pastorianus
gagacattgttgcaaacaccaacga

SEQ ID NO: 140596 - DNA, 25 bp, Saccharomyces pastorianus
gaacacgaacagaaactgctggcca

SEQ ID NO: 140597 - DNA, 25 bp, Saccharomyces pastorianus
atgggagccgtactcagctgttgta

SEQ ID NO: 140598 - DNA, 25 bp, Saccharomyces pastorianus
cgaaaggagcgcaggtgatgacaac

SEQ ID NO: 140599 - DNA, 25 bp, Saccharomyces pastorianus
gagaatgaagctttgctgagggaac

SEQ ID NO: 140600 - DNA, 25 bp, Saccharomyces pastorianus
gatgacaacctcagtgggcactcag

SEQ ID NO: 140601 - DNA, 25 bp, Saccharomyces pastorianus
ctgctggccagggaacaagagttaa

SEQ ID NO: 140602 - DNA, 25 bp, Saccharomyces pastorianus
acagcaggcaggctatggaagtcaa

SEQ ID NO: 140603 - DNA, 25 bp, Saccharomyces pastorianus
gtaattcaagggacagacctgcaag

SEQ ID NO: 140604 - DNA, 25 bp, Saccharomyces pastorianus
aatgacgaatacgatgccgaacaaa

SEQ ID NO: 140605 - DNA, 25 bp, Saccharomyces pastorianus
gctgttgtagaaaccattccggcga

SEQ ID NO: 140606 - DNA, 25 bp, Saccharomyces pastorianus
aaatggccaagcgataccgtccagt

SEQ ID NO: 140607 - DNA, 25 bp, Saccharomyces pastorianus
gatagctcttcctcagatgattcgg

SEQ ID NO: 140608 - DNA, 25 bp, Saccharomyces pastorianus
atgattcggatgatgattctgattc

SEQ ID NO: 140609 - DNA, 25 bp, Saccharomyces pastorianus
cttcttccatgtcacttgaatcttc

SEQ ID NO: 140610 - DNA, 25 bp, Saccharomyces pastorianus
tttagaaagaacaccgcagctcaag

SEQ ID NO: 140611 - DNA, 25 bp, Saccharomyces pastorianus
gaatcttcattggatagctcttcct

SEQ ID NO: 140612 - DNA, 25 bp, Saccharomyces pastorianus
agcgataccgtccagtttagaaaga

SEQ ID NO: 140613 - DNA, 25 bp, Saccharomyces pastorianus
agacaagtcatggaccagctggaaa

SEQ ID NO: 140614 - DNA, 25 bp, Saccharomyces pastorianus
aaggttaccaggtcgcattcttcac

SEQ ID NO: 140615 - DNA, 25 bp, Saccharomyces pastorianus
gcagctcaagaaagtcaaggttacc

SEQ ID NO: 140616 - DNA, 25 bp, Saccharomyces pastorianus
ttctgattcgaggaacgtgcaagtt

SEQ ID NO: 140617 - DNA, 25 bp, Saccharomyces pastorianus
aagcgcacggtctagtgagagaata

SEQ ID NO: 140618 - DNA, 25 bp, Saccharomyces pastorianus
tccactttaaggatgtcgtaactgt

SEQ ID NO: 140619 - DNA, 25 bp, Saccharomyces pastorianus
gataatgcaggaacaccgatggaca

SEQ ID NO: 140620 - DNA, 25 bp, Saccharomyces pastorianus
gtacttgggtcaactattttaacag

SEQ ID NO: 140621 - DNA, 25 bp, Saccharomyces pastorianus
ttaaactcaacatatcacctcacgg

SEQ ID NO: 140622 - DNA, 25 bp, Saccharomyces pastorianus
accgatggacaacgcgtactttcaa

SEQ ID NO: 140623 - DNA, 25 bp, Saccharomyces pastorianus
gcatcttccgccagtaaaaatgata

SEQ ID NO: 140624 - DNA, 25 bp, Saccharomyces pastorianus
gaagaacctggtaagcactcggaga

SEQ ID NO: 140625 - DNA, 25 bp, Saccharomyces pastorianus
tttcaacccgaaccccaagataatg

SEQ ID NO: 140626 - DNA, 25 bp, Saccharomyces pastorianus
ggaccaaaatagcatcttccgccag

SEQ ID NO: 140627 - DNA, 25 bp, Saccharomyces pastorianus
atcaggtagtcagacctaggaccaa

SEQ ID NO: 140628 - DNA, 25 bp, Saccharomyces pastorianus
gtgattcttgatatggccccggtaa

SEQ ID NO: 140629 - DNA, 25 bp, Saccharomyces pastorianus
aattgggcccttagtcaggcgtagc

SEQ ID NO: 140630 - DNA, 25 bp, Saccharomyces pastorianus
gagcatccttcacaaggttgtttat

SEQ ID NO: 140631 - DNA, 25 bp, Saccharomyces pastorianus
agttgtggaattcgattgtccggta

SEQ ID NO: 140632 - DNA, 25 bp, Saccharomyces pastorianus
gaacagggcctatatatttattcat

SEQ ID NO: 140633 - DNA, 25 bp, Saccharomyces pastorianus
gacagattatggaaattgggccctt

SEQ ID NO: 140634 - DNA, 25 bp, Saccharomyces pastorianus
gttgcatccattgaacagggcctat

SEQ ID NO: 140635 - DNA, 25 bp, Saccharomyces pastorianus
gaactggatccgttgcatccattga

SEQ ID NO: 140636 - DNA, 25 bp, Saccharomyces pastorianus
gattgcctagatgaactggatccgt

SEQ ID NO: 140637 - DNA, 25 bp, Saccharomyces pastorianus
tagccctgctgttttagttgtggaa

SEQ ID NO: 140638 - DNA, 25 bp, Saccharomyces pastorianus
gattgtccggtagaggattgcctag

SEQ ID NO: 140639 - DNA, 25 bp, Saccharomyces pastorianus
cgggtgatatttacattccacaacc

SEQ ID NO: 140640 - DNA, 25 bp, Saccharomyces pastorianus
acctcgggtgatatttacattccac

SEQ ID NO: 140641 - DNA, 25 bp, Saccharomyces pastorianus
ctcgggtgatatttacattccacaa

SEQ ID NO: 140642 - DNA, 25 bp, Saccharomyces pastorianus
aatacctcgggtgatatttacattc

SEQ ID NO: 140643 - DNA, 25 bp, Saccharomyces pastorianus
tatttacattccacaaccattaatg

SEQ ID NO: 140644 - DNA, 25 bp, Saccharomyces pastorianus
tacctcgggtgatatttacattcca

SEQ ID NO: 140645 - DNA, 25 bp, Saccharomyces pastorianus
gaaatacctcgggtgatatttacat

SEQ ID NO: 140646 - DNA, 25 bp, Saccharomyces pastorianus
gatatttacattccacaaccattaa

SEQ ID NO: 140647 - DNA, 25 bp, Saccharomyces pastorianus
tcgggtgatatttacattccacaac

SEQ ID NO: 140648 - DNA, 25 bp, Saccharomyces pastorianus
tgatatttacattccacaaccatta

SEQ ID NO: 140649 - DNA, 25 bp, Saccharomyces pastorianus
atacctcgggtgatatttacattcc

SEQ ID NO: 140650 - DNA, 25 bp, Saccharomyces pastorianus
tgggaactacttggcttagctctgc

SEQ ID NO: 140651 - DNA, 25 bp, Saccharomyces pastorianus
gaaattgatctcctttcggatacga

SEQ ID NO: 140652 - DNA, 25 bp, Saccharomyces pastorianus
ttaattctccttacgggcaagctgg

SEQ ID NO: 140653 - DNA, 25 bp, Saccharomyces pastorianus
gattatatgcttgaatgcctctcta

SEQ ID NO: 140654 - DNA, 25 bp, Saccharomyces pastorianus
aaaatcggaatgacgccagcctagc

SEQ ID NO: 140655 - DNA, 25 bp, Saccharomyces pastorianus
ggcaagctggcatcacttcggtgat

SEQ ID NO: 140656 - DNA, 25 bp, Saccharomyces pastorianus
gttgtcaccatctgttgaaccttta

SEQ ID NO: 140657 - DNA, 25 bp, Saccharomyces pastorianus
tctgcttcgagtgagtgacttaccc

SEQ ID NO: 140658 - DNA, 25 bp, Saccharomyces pastorianus
tagagggacagctgggctccgaaat

SEQ ID NO: 140659 - DNA, 25 bp, Saccharomyces pastorianus
ttcagatattttcccttcaagtact

SEQ ID NO: 140660 - DNA, 25 bp, Saccharomyces pastorianus
tgacttacccgatgcagtagcgtgt

SEQ ID NO: 140661 - DNA, 25 bp, Saccharomyces pastorianus
atgaactactacaaggcaccactat

SEQ ID NO: 140662 - DNA, 25 bp, Saccharomyces pastorianus
caattcgatgccctgtttagcggaa

SEQ ID NO: 140663 - DNA, 25 bp, Saccharomyces pastorianus
aagcatccaagcaaggtttctattg

SEQ ID NO: 140664 - DNA, 25 bp, Saccharomyces pastorianus
gacctattactacccgtactgtatg

SEQ ID NO: 140665 - DNA, 25 bp, Saccharomyces pastorianus
gaacactgtaccatgacatcacacg

SEQ ID NO: 140666 - DNA, 25 bp, Saccharomyces pastorianus
aaggcactgctctcaatcaattcga

SEQ ID NO: 140667 - DNA, 25 bp, Saccharomyces pastorianus
ggacgcactgtaatgcccaatgaat

SEQ ID NO: 140668 - DNA, 25 bp, Saccharomyces pastorianus
ttgccatccgatgaaccttacattt

SEQ ID NO: 140669 - DNA, 25 bp, Saccharomyces pastorianus
tctttatccatttccacattggcca

SEQ ID NO: 140670 - DNA, 25 bp, Saccharomyces pastorianus
cattggccacgaatttatcttctga

SEQ ID NO: 140671 - DNA, 25 bp, Saccharomyces pastorianus
aattaggacctatttgtggaccaca

SEQ ID NO: 140672 - DNA, 25 bp, Saccharomyces pastorianus
ggatccacggtcatttggtcatttt

SEQ ID NO: 140673 - DNA, 25 bp, Saccharomyces pastorianus
attgacccgtattccttcgaggatc

SEQ ID NO: 140674 - DNA, 25 bp, Saccharomyces pastorianus
attagtgtttcattgtcaacccgat

SEQ ID NO: 140675 - DNA, 25 bp, Saccharomyces pastorianus
gtcaacccgataatgctgtacaaaa

SEQ ID NO: 140676 - DNA, 25 bp, Saccharomyces pastorianus
gaaactcaacttcattgacccgtat

SEQ ID NO: 140677 - DNA, 25 bp, Saccharomyces pastorianus
gaagttatccggcagtttgctttat

SEQ ID NO: 140678 - DNA, 25 bp, Saccharomyces pastorianus
tatggttcactatagccttgagaaa

SEQ ID NO: 140679 - DNA, 25 bp, Saccharomyces pastorianus
tggtcattttcccaaccgaatggtt

SEQ ID NO: 140680 - DNA, 25 bp, Saccharomyces pastorianus
gaggatcctcttatttcttcgtttt

SEQ ID NO: 140681 - DNA, 25 bp, Saccharomyces pastorianus
gtttttgacaaacatacggcgcaga

SEQ ID NO: 140682 - DNA, 25 bp, Saccharomyces pastorianus
atggttcactggacgatctactttc

SEQ ID NO: 140683 - DNA, 25 bp, Saccharomyces pastorianus
atgtgtcaccgaaccactcattaga

SEQ ID NO: 140684 - DNA, 25 bp, Saccharomyces pastorianus
tggaagcggccatcgtcataaccag

SEQ ID NO: 140685 - DNA, 25 bp, Saccharomyces pastorianus
ggctctacaacaatctccatagcag

SEQ ID NO: 140686 - DNA, 25 bp, Saccharomyces pastorianus
ttcttcttctgtagcttacacccaa

SEQ ID NO: 140687 - DNA, 25 bp, Saccharomyces pastorianus
taaattctcctacaccggctggaag

SEQ ID NO: 140688 - DNA, 25 bp, Saccharomyces pastorianus
tgcattgcccaaatcctttgtagat

SEQ ID NO: 140689 - DNA, 25 bp, Saccharomyces pastorianus
ctaatgaacatgatcctcgtcgagg

SEQ ID NO: 140690 - DNA, 25 bp, Saccharomyces pastorianus
gtattgcggcaattacctgagaatg

SEQ ID NO: 140691 - DNA, 25 bp, Saccharomyces pastorianus
aggaaaatatgcaccggctctacaa

SEQ ID NO: 140692 - DNA, 25 bp, Saccharomyces pastorianus
gtacacacaaagactagcctctgat

SEQ ID NO: 140693 - DNA, 25 bp, Saccharomyces pastorianus
gaaagagcccctcaaaggcgttctt

SEQ ID NO: 140694 - DNA, 25 bp, Saccharomyces pastorianus
ctttttcagattccgctgtaccaga

SEQ ID NO: 140695 - DNA, 25 bp, Saccharomyces pastorianus
tggacccctgcgaacctagtgggaa

SEQ ID NO: 140696 - DNA, 25 bp, Saccharomyces pastorianus
aaggctgcctaatttgtcaacatta

SEQ ID NO: 140697 - DNA, 25 bp, Saccharomyces pastorianus
tattagaaccctcacctttttcaga

SEQ ID NO: 140698 - DNA, 25 bp, Saccharomyces pastorianus
acctctatcagatcaacggttcaga

SEQ ID NO: 140699 - DNA, 25 bp, Saccharomyces pastorianus
acaaaggagtgctccacgcagcggg

SEQ ID NO: 140700 - DNA, 25 bp, Saccharomyces pastorianus
ggagttggtgacagacctatacaaa

SEQ ID NO: 140701 - DNA, 25 bp, Saccharomyces pastorianus
gtgggaaaaactacctctatcagat

SEQ ID NO: 140702 - DNA, 25 bp, Saccharomyces pastorianus
accgttcccaacacaaaggagtgct

SEQ ID NO: 140703 - DNA, 25 bp, Saccharomyces pastorianus
tatagagctgacaaggctgcctaat

SEQ ID NO: 140704 - DNA, 25 bp, Saccharomyces pastorianus
gagcgggtccattaagccactgtta

SEQ ID NO: 140705 - DNA, 25 bp, Saccharomyces pastorianus
tcagctgctgctggagtggatgatt

SEQ ID NO: 140706 - DNA, 25 bp, Saccharomyces pastorianus
ctgttctctgtaatgcatgtggcct

SEQ ID NO: 140707 - DNA, 25 bp, Saccharomyces pastorianus
acacggtactgttctctgtaatgca

SEQ ID NO: 140708 - DNA, 25 bp, Saccharomyces pastorianus
cccacgtgccagaattgtttcactg

SEQ ID NO: 140709 - DNA, 25 bp, Saccharomyces pastorianus
gtgccagaattgtttcactgtcaaa

SEQ ID NO: 140710 - DNA, 25 bp, Saccharomyces pastorianus
ttgaagctgccctcgcctacacttt

SEQ ID NO: 140711 - DNA, 25 bp, Saccharomyces pastorianus
gattgtgacggagaggaccacccca

SEQ ID NO: 140712 - DNA, 25 bp, Saccharomyces pastorianus
gtcaaaacgcccctatggagaagag

SEQ ID NO: 140713 - DNA, 25 bp, Saccharomyces pastorianus
tgtaatgcatgtggcctcttcctga

SEQ ID NO: 140714 - DNA, 25 bp, Saccharomyces pastorianus
tacactttcagctgctgctggagtg

SEQ ID NO: 140715 - DNA, 25 bp, Saccharomyces pastorianus
tgcatgtggcctcttcctgaagttg

SEQ ID NO: 140716 - DNA, 25 bp, Saccharomyces pastorianus
aaaggagaagaaccgccactacaag

SEQ ID NO: 140717 - DNA, 25 bp, Saccharomyces pastorianus
agaaaaaccatctttgtcgaggact

SEQ ID NO: 140718 - DNA, 25 bp, Saccharomyces pastorianus
ggatcctctgtcatttcaaattcaa

SEQ ID NO: 140719 - DNA, 25 bp, Saccharomyces pastorianus
gataccgatcttataggatcctctg

SEQ ID NO: 140720 - DNA, 25 bp, Saccharomyces pastorianus
gatccgcaaattcaaaggctcctat

SEQ ID NO: 140721 - DNA, 25 bp, Saccharomyces pastorianus
ggacttccctactgatttaattctt

SEQ ID NO: 140722 - DNA, 25 bp, Saccharomyces pastorianus
gcaggattacgaccaattgtaccat

SEQ ID NO: 140723 - DNA, 25 bp, Saccharomyces pastorianus
gcattatcggccgtgttcaaggatg

SEQ ID NO: 140724 - DNA, 25 bp, Saccharomyces pastorianus
gaaaaaccgatcatccatgtgccca

SEQ ID NO: 140725 - DNA, 25 bp, Saccharomyces pastorianus
tcttcttctcacgacgttgctaaga

SEQ ID NO: 140726 - DNA, 25 bp, Saccharomyces pastorianus
aacaactttcctccaaattgcgctt

SEQ ID NO: 140727 - DNA, 25 bp, Saccharomyces pastorianus
agccaccaggaatttttcataatgc

SEQ ID NO: 140728 - DNA, 25 bp, Saccharomyces pastorianus
taatgccatcctgcagggagcaagc

SEQ ID NO: 140729 - DNA, 25 bp, Saccharomyces pastorianus
tttcaagccaccaggaatttttcat

SEQ ID NO: 140730 - DNA, 25 bp, Saccharomyces pastorianus
tctatttcaagccaccaggaatttt

SEQ ID NO: 140731 - DNA, 25 bp, Saccharomyces pastorianus
ttcataatgccatcctgcagggagc

SEQ ID NO: 140732 - DNA, 25 bp, Saccharomyces pastorianus
acactctatttcaagccaccaggaa

SEQ ID NO: 140733 - DNA, 25 bp, Saccharomyces pastorianus
agggcggtggactctatgtccacac

SEQ ID NO: 140734 - DNA, 25 bp, Saccharomyces pastorianus
atttttcataatgccatcctgcagg

SEQ ID NO: 140735 - DNA, 25 bp, Saccharomyces pastorianus
tatgtccacactctatttcaagcca

SEQ ID NO: 140736 - DNA, 25 bp, Saccharomyces pastorianus
ggactctatgtccacactctatttc

SEQ ID NO: 140737 - DNA, 25 bp, Saccharomyces pastorianus
aatagggcggtggactctatgtcca

SEQ ID NO: 140738 - DNA, 25 bp, Saccharomyces pastorianus
ggttgagactttcccgcgttattgc

SEQ ID NO: 140739 - DNA, 25 bp, Saccharomyces pastorianus
tttgctgctatttggtttggactgg

SEQ ID NO: 140740 - DNA, 25 bp, Saccharomyces pastorianus
gaattagcaggtccatttgtctcac

SEQ ID NO: 140741 - DNA, 25 bp, Saccharomyces pastorianus
atgatgacgacacagttccatatgt

SEQ ID NO: 140742 - DNA, 25 bp, Saccharomyces pastorianus
gacatcatggtctttgcgcacggac

SEQ ID NO: 140743 - DNA, 25 bp, Saccharomyces pastorianus
atacgctcaccacaacattgacgaa

SEQ ID NO: 140744 - DNA, 25 bp, Saccharomyces pastorianus
tgcgtgccaggcaaactgtggattt

SEQ ID NO: 140745 - DNA, 25 bp, Saccharomyces pastorianus
ggattggtgttttgtcatacgctca

SEQ ID NO: 140746 - DNA, 25 bp, Saccharomyces pastorianus
gcgttattgccagaatccagaactt

SEQ ID NO: 140747 - DNA, 25 bp, Saccharomyces pastorianus
aatccatgtttcttactggacgccg

SEQ ID NO: 140748 - DNA, 25 bp, Saccharomyces pastorianus
gcgcacggacatgcattgcgttatt

SEQ ID NO: 140749 - DNA, 25 bp, Saccharomyces pastorianus
tgactgcttgcattcaggagcctgt

SEQ ID NO: 140750 - DNA, 25 bp, Saccharomyces pastorianus
gcattcaggagcctgttccggcctg

SEQ ID NO: 140751 - DNA, 25 bp, Saccharomyces pastorianus
tccaagccgtgatcatcatcatctt

SEQ ID NO: 140752 - DNA, 25 bp, Saccharomyces pastorianus
gtgcgttgggattatgactgcttgc

SEQ ID NO: 140753 - DNA, 25 bp, Saccharomyces pastorianus
ttccggcctgccagcaaaatcgtct

SEQ ID NO: 140754 - DNA, 25 bp, Saccharomyces pastorianus
tcttcggcagattccccgtcgtcat

SEQ ID NO: 140755 - DNA, 25 bp, Saccharomyces pastorianus
acggttatgaccactcttgcgaagt

SEQ ID NO: 140756 - DNA, 25 bp, Saccharomyces pastorianus
gaatacggttatgaccactcttgcg

SEQ ID NO: 140757 - DNA, 25 bp, Saccharomyces pastorianus
aaaatcgtcttgctcttcggcagat

SEQ ID NO: 140758 - DNA, 25 bp, Saccharomyces pastorianus
gtcgtcatcctccaagccgtgatca

SEQ ID NO: 140759 - DNA, 25 bp, Saccharomyces pastorianus
accactcttgcgaagtgcgttggga

SEQ ID NO: 140760 - DNA, 25 bp, Saccharomyces pastorianus
cagcttacacacttacatgtatatg

SEQ ID NO: 140761 - DNA, 25 bp, Saccharomyces pastorianus
atatatttcagcttacacacttaca

SEQ ID NO: 140762 - DNA, 25 bp, Saccharomyces pastorianus
acatatatttcagcttacacactta

SEQ ID NO: 140763 - DNA, 25 bp, Saccharomyces pastorianus
gcttacacacttacatgtatatgca

SEQ ID NO: 140764 - DNA, 25 bp, Saccharomyces pastorianus
atttcagcttacacacttacatgta

SEQ ID NO: 140765 - DNA, 25 bp, Saccharomyces pastorianus
atatttcagcttacacacttacatg

SEQ ID NO: 140766 - DNA, 25 bp, Saccharomyces pastorianus
ttcagcttacacacttacatgtata

SEQ ID NO: 140767 - DNA, 25 bp, Saccharomyces pastorianus
tttcagcttacacacttacatgtat

SEQ ID NO: 140768 - DNA, 25 bp, Saccharomyces pastorianus
aacatatatttcagcttacacactt

SEQ ID NO: 140769 - DNA, 25 bp, Saccharomyces pastorianus
tatttcagcttacacacttacatgt

SEQ ID NO: 140770 - DNA, 25 bp, Saccharomyces pastorianus
tatatttcagcttacacacttacat

SEQ ID NO: 140771 - DNA, 25 bp, Saccharomyces pastorianus
gtgtattgtaccttcctattgtcat

SEQ ID NO: 140772 - DNA, 25 bp, Saccharomyces pastorianus
actgtctaatacgattgagcctgca

SEQ ID NO: 140773 - DNA, 25 bp, Saccharomyces pastorianus
aagtggtcgctaaactttgtgcgca

SEQ ID NO: 140774 - DNA, 25 bp, Saccharomyces pastorianus
tttcatgccttgatcactgccagga

SEQ ID NO: 140775 - DNA, 25 bp, Saccharomyces pastorianus
gattcactcagttcatggcttcaat

SEQ ID NO: 140776 - DNA, 25 bp, Saccharomyces pastorianus
gcgactttcaatttgcctcagtgta

SEQ ID NO: 140777 - DNA, 25 bp, Saccharomyces pastorianus
gattggttcctcatgggttttccaa

SEQ ID NO: 140778 - DNA, 25 bp, Saccharomyces pastorianus
gattacgaacgtcttcaggctaaag

SEQ ID NO: 140779 - DNA, 25 bp, Saccharomyces pastorianus
gtattctgcggctcggacaatttgc

SEQ ID NO: 140780 - DNA, 25 bp, Saccharomyces pastorianus
aaggcttactgccatactgtctaat

SEQ ID NO: 140781 - DNA, 25 bp, Saccharomyces pastorianus
gtattagccaccaattctaccaaca

SEQ ID NO: 140782 - DNA, 25 bp, Saccharomyces pastorianus
gaatttcctactttctgaatgtaca

SEQ ID NO: 140783 - DNA, 25 bp, Saccharomyces pastorianus
ctctgatcactgtccaaccgaaaaa

SEQ ID NO: 140784 - DNA, 25 bp, Saccharomyces pastorianus
gtatctcgaagcactttttggttct

SEQ ID NO: 140785 - DNA, 25 bp, Saccharomyces pastorianus
aaatcctcacgatgtgttccttcac

SEQ ID NO: 140786 - DNA, 25 bp, Saccharomyces pastorianus
gctcttgcctaaaattctgcacgtg

SEQ ID NO: 140787 - DNA, 25 bp, Saccharomyces pastorianus
gagactggtttagagctcttgccta

SEQ ID NO: 140788 - DNA, 25 bp, Saccharomyces pastorianus
agcaaatcttttggcgacacctatt

SEQ ID NO: 140789 - DNA, 25 bp, Saccharomyces pastorianus
gagcaaatccatgatatttccgtga

SEQ ID NO: 140790 - DNA, 25 bp, Saccharomyces pastorianus
ggcaagttttattgactctgatcac

SEQ ID NO: 140791 - DNA, 25 bp, Saccharomyces pastorianus
gacacacttgaagggcgttcgatat

SEQ ID NO: 140792 - DNA, 25 bp, Saccharomyces pastorianus
gagattgtatcatccatttgagcaa

SEQ ID NO: 140793 - DNA, 25 bp, Saccharomyces pastorianus
aggtttccatcgcattttgtctata

SEQ ID NO: 140794 - DNA, 25 bp, Saccharomyces pastorianus
tgtctatatagaccagctcgataat

SEQ ID NO: 140795 - DNA, 25 bp, Saccharomyces pastorianus
gaactgccgagagctgtcaaacaat

SEQ ID NO: 140796 - DNA, 25 bp, Saccharomyces pastorianus
gatccccgttgttttgaatgaccag

SEQ ID NO: 140797 - DNA, 25 bp, Saccharomyces pastorianus
ggttaacatgcttacctctgtaaat

SEQ ID NO: 140798 - DNA, 25 bp, Saccharomyces pastorianus
tttggcaaactttcttcggagggcg

SEQ ID NO: 140799 - DNA, 25 bp, Saccharomyces pastorianus
gaatgaccagctaacacacgtggtt

SEQ ID NO: 140800 - DNA, 25 bp, Saccharomyces pastorianus
acattaactccacctgaagcactta

SEQ ID NO: 140801 - DNA, 25 bp, Saccharomyces pastorianus
gaactttcgaaacgccgtggtgtag

SEQ ID NO: 140802 - DNA, 25 bp, Saccharomyces pastorianus
aaaaagatgcactctgtcgcagccg

SEQ ID NO: 140803 - DNA, 25 bp, Saccharomyces pastorianus
tgcaaaaatgttactgatccccgtt

SEQ ID NO: 140804 - DNA, 25 bp, Saccharomyces pastorianus
ggtaaatccaaggtcacctgggtat

SEQ ID NO: 140805 - DNA, 25 bp, Saccharomyces pastorianus
ccgattttatagttccagaggtcaa

SEQ ID NO: 140806 - DNA, 25 bp, Saccharomyces pastorianus
ttgatggtttacgtgccttagtgaa

SEQ ID NO: 140807 - DNA, 25 bp, Saccharomyces pastorianus
ggtatttacggagccaatccaaact

SEQ ID NO: 140808 - DNA, 25 bp, Saccharomyces pastorianus
gacgtggtccctatggaatttaccg

SEQ ID NO: 140809 - DNA, 25 bp, Saccharomyces pastorianus
ccttagtgaagcttgttacggcgaa

SEQ ID NO: 140810 - DNA, 25 bp, Saccharomyces pastorianus
aacaatgtcccaagtggccaacaat

SEQ ID NO: 140811 - DNA, 25 bp, Saccharomyces pastorianus
tcttcacgatctgcgatcctacaaa

SEQ ID NO: 140812 - DNA, 25 bp, Saccharomyces pastorianus
aaaccttcatgttgtcttcacgatc

SEQ ID NO: 140813 - DNA, 25 bp, Saccharomyces pastorianus
ccagcccttttcaatcgttgcataa

SEQ ID NO: 140814 - DNA, 25 bp, Saccharomyces pastorianus
gcaatgataagttctccagcccttt

SEQ ID NO: 140815 - DNA, 25 bp, Saccharomyces pastorianus
ccaggcacgtgatgtcgagtacttc

SEQ ID NO: 140816 - DNA, 25 bp, Saccharomyces pastorianus
ttcccaggcacgtgatgtcgagtac

SEQ ID NO: 140817 - DNA, 25 bp, Saccharomyces pastorianus
aggcacgtgatgtcgagtacttcct

SEQ ID NO: 140818 - DNA, 25 bp, Saccharomyces pastorianus
cattcccaggcacgtgatgtcgagt

SEQ ID NO: 140819 - DNA, 25 bp, Saccharomyces pastorianus
ggcacgtgatgtcgagtacttcctc

SEQ ID NO: 140820 - DNA, 25 bp, Saccharomyces pastorianus
gcacgtgatgtcgagtacttcctca

SEQ ID NO: 140821 - DNA, 25 bp, Saccharomyces pastorianus
cccaggcacgtgatgtcgagtactt

SEQ ID NO: 140822 - DNA, 25 bp, Saccharomyces pastorianus
attcccaggcacgtgatgtcgagta

SEQ ID NO: 140823 - DNA, 25 bp, Saccharomyces pastorianus
tcccaggcacgtgatgtcgagtact

SEQ ID NO: 140824 - DNA, 25 bp, Saccharomyces pastorianus
caggcacgtgatgtcgagtacttcc

SEQ ID NO: 140825 - DNA, 25 bp, Saccharomyces pastorianus
tccattcccaggcacgtgatgtcga

SEQ ID NO: 140826 - DNA, 25 bp, Saccharomyces pastorianus
tatcctgccaatagtgaccaagtat

SEQ ID NO: 140827 - DNA, 25 bp, Saccharomyces pastorianus
atatgcagctccaagggcgtagata

SEQ ID NO: 140828 - DNA, 25 bp, Saccharomyces pastorianus
aaacttgcgttaccaatcctagaca

SEQ ID NO: 140829 - DNA, 25 bp, Saccharomyces pastorianus
gcaagctcccgctaaaggtgatgat

SEQ ID NO: 140830 - DNA, 25 bp, Saccharomyces pastorianus
gctgacagtgtctcttttgcagaaa

SEQ ID NO: 140831 - DNA, 25 bp, Saccharomyces pastorianus
ttggatccaccacgcaagggctgtg

SEQ ID NO: 140832 - DNA, 25 bp, Saccharomyces pastorianus
ttgatttctttccacaaacgcacca

SEQ ID NO: 140833 - DNA, 25 bp, Saccharomyces pastorianus
aacacttccgttatcttggatccac

SEQ ID NO: 140834 - DNA, 25 bp, Saccharomyces pastorianus
aagggctgtgacgaattattcctaa

SEQ ID NO: 140835 - DNA, 25 bp, Saccharomyces pastorianus
atgtccgtgataacttgcaagctcc

SEQ ID NO: 140836 - DNA, 25 bp, Saccharomyces pastorianus
tatcgtgtaatgtccattcccaggc

SEQ ID NO: 140837 - DNA, 25 bp, Saccharomyces pastorianus
aatttgtccagggagcaggttctga

SEQ ID NO: 140838 - DNA, 25 bp, Saccharomyces pastorianus
aacttctccgatgggtgtcctagaa

SEQ ID NO: 140839 - DNA, 25 bp, Saccharomyces pastorianus
taccgttgacaacaaaaggctttcg

SEQ ID NO: 140840 - DNA, 25 bp, Saccharomyces pastorianus
aaggctttcgtctcctttgacagat

SEQ ID NO: 140841 - DNA, 25 bp, Saccharomyces pastorianus
tctagaatactcatgcacggtgcgt

SEQ ID NO: 140842 - DNA, 25 bp, Saccharomyces pastorianus
aatcagcaccatgactggaagtact

SEQ ID NO: 140843 - DNA, 25 bp, Saccharomyces pastorianus
gcaggttctgaacgatgttacttca

SEQ ID NO: 140844 - DNA, 25 bp, Saccharomyces pastorianus
taaccgccggactaagaagccaaag

SEQ ID NO: 140845 - DNA, 25 bp, Saccharomyces pastorianus
tagtctcaaagatggcctatcgctt

SEQ ID NO: 140846 - DNA, 25 bp, Saccharomyces pastorianus
tgacagattctggtaaccgccggac

SEQ ID NO: 140847 - DNA, 25 bp, Saccharomyces pastorianus
cctatcgcttacatatcaccagagt

SEQ ID NO: 140848 - DNA, 25 bp, Saccharomyces pastorianus
atccaaagtagagaggtgtttccct

SEQ ID NO: 140849 - DNA, 25 bp, Saccharomyces pastorianus
gggaggattctgattatctatccaa

SEQ ID NO: 140850 - DNA, 25 bp, Saccharomyces pastorianus
gattctgattatctatccaaagtag

SEQ ID NO: 140851 - DNA, 25 bp, Saccharomyces pastorianus
aacttacagcagaggaaaccaacca

SEQ ID NO: 140852 - DNA, 25 bp, Saccharomyces pastorianus
gcaacaagaaatgcccaacttcaaa

SEQ ID NO: 140853 - DNA, 25 bp, Saccharomyces pastorianus
accaaccaaccgcaacaagaaatgc

SEQ ID NO: 140854 - DNA, 25 bp, Saccharomyces pastorianus
acttcaaatttgactgggaggattc

SEQ ID NO: 140855 - DNA, 25 bp, Saccharomyces pastorianus
gaaatgcccaacttcaaatttgact

SEQ ID NO: 140856 - DNA, 25 bp, Saccharomyces pastorianus
aatgcccaacttcaaatttgactgg

SEQ ID NO: 140857 - DNA, 25 bp, Saccharomyces pastorianus
aaatttgactgggaggattctgatt

SEQ ID NO: 140858 - DNA, 25 bp, Saccharomyces pastorianus
gactgggaggattctgattatctat

SEQ ID NO: 140859 - DNA, 25 bp, Saccharomyces pastorianus
tctattggctcgctagcttctaacg

SEQ ID NO: 140860 - DNA, 25 bp, Saccharomyces pastorianus
attccaattttttctgatgcaaagc

SEQ ID NO: 140861 - DNA, 25 bp, Saccharomyces pastorianus
gtgtacaatctagaagccgctcttc

SEQ ID NO: 140862 - DNA, 25 bp, Saccharomyces pastorianus
cagtcgcaacacaaatatatcttcg

SEQ ID NO: 140863 - DNA, 25 bp, Saccharomyces pastorianus
aaaaatcctgccatagtacaaaccg

SEQ ID NO: 140864 - DNA, 25 bp, Saccharomyces pastorianus
gcttctaacgccctatcaagagtga

SEQ ID NO: 140865 - DNA, 25 bp, Saccharomyces pastorianus
gaggctcgttgaccgatattccaat

SEQ ID NO: 140866 - DNA, 25 bp, Saccharomyces pastorianus
ccgctcttcttctatacattctatt

SEQ ID NO: 140867 - DNA, 25 bp, Saccharomyces pastorianus
atcttcgaagattgcttcgctggta

SEQ ID NO: 140868 - DNA, 25 bp, Saccharomyces pastorianus
gtacaaaccgcacaaagttctgatc

SEQ ID NO: 140869 - DNA, 25 bp, Saccharomyces pastorianus
atacattctattggctcgctagctt

SEQ ID NO: 140870 - DNA, 25 bp, Saccharomyces pastorianus
cctttgcctgccattgtagaaatca

SEQ ID NO: 140871 - DNA, 25 bp, Saccharomyces pastorianus
ggttccttccaataacgcattcata

SEQ ID NO: 140872 - DNA, 25 bp, Saccharomyces pastorianus
tttgctatactatcgttaccgggtt

SEQ ID NO: 140873 - DNA, 25 bp, Saccharomyces pastorianus
aagggtaccgatttgttggccacat

SEQ ID NO: 140874 - DNA, 25 bp, Saccharomyces pastorianus
aggtgctttgtaactttgatcgttc

SEQ ID NO: 140875 - DNA, 25 bp, Saccharomyces pastorianus
atgcgttattggttttcaccacgta

SEQ ID NO: 140876 - DNA, 25 bp, Saccharomyces pastorianus
tggcaccaattttatacgttactta

SEQ ID NO: 140877 - DNA, 25 bp, Saccharomyces pastorianus
ttcattatttgtcgcgtatactcag

SEQ ID NO: 140878 - DNA, 25 bp, Saccharomyces pastorianus
atcgtggcgttaatattggcaccaa

SEQ ID NO: 140879 - DNA, 25 bp, Saccharomyces pastorianus
acactattgtcgcatctgggttcct

SEQ ID NO: 140880 - DNA, 25 bp, Saccharomyces pastorianus
caacagaaggctacttttcggttat

SEQ ID NO: 140881 - DNA, 25 bp, Saccharomyces pastorianus
ggatgaaaacccattggctgacttt

SEQ ID NO: 140882 - DNA, 25 bp, Saccharomyces pastorianus
atggtgcagctggattgtgatgtct

SEQ ID NO: 140883 - DNA, 25 bp, Saccharomyces pastorianus
acatcacacccaacataacgaactg

SEQ ID NO: 140884 - DNA, 25 bp, Saccharomyces pastorianus
aagggtcacttgaaatggtgcagct

SEQ ID NO: 140885 - DNA, 25 bp, Saccharomyces pastorianus
gacgctatgaaatcgctctggtatt

SEQ ID NO: 140886 - DNA, 25 bp, Saccharomyces pastorianus
ttgaggatttcttggctaggacggc

SEQ ID NO: 140887 - DNA, 25 bp, Saccharomyces pastorianus
gaactggtcgcataacaaggatact

SEQ ID NO: 140888 - DNA, 25 bp, Saccharomyces pastorianus
gaggagactctcagacggagatcaa

SEQ ID NO: 140889 - DNA, 25 bp, Saccharomyces pastorianus
attggctgactttgtggagttaccc

SEQ ID NO: 140890 - DNA, 25 bp, Saccharomyces pastorianus
ggagttacccatggacgctatgaaa

SEQ ID NO: 140891 - DNA, 25 bp, Saccharomyces pastorianus
atgtctggtttgtgtcggatatctt

SEQ ID NO: 140892 - DNA, 25 bp, Saccharomyces pastorianus
attgcacctgtggtatgaaaggaca

SEQ ID NO: 140893 - DNA, 25 bp, Saccharomyces pastorianus
acatgcggtaaatccaaaactaaga

SEQ ID NO: 140894 - DNA, 25 bp, Saccharomyces pastorianus
aagttggcggctgtggttcttgttc

SEQ ID NO: 140895 - DNA, 25 bp, Saccharomyces pastorianus
acgagttgaccgagattgatttcac

SEQ ID NO: 140896 - DNA, 25 bp, Saccharomyces pastorianus
ggcttgtaaagattgcacctgtggt

SEQ ID NO: 140897 - DNA, 25 bp, Saccharomyces pastorianus
tacttgggtcttcctgctttcaagc

SEQ ID NO: 140898 - DNA, 25 bp, Saccharomyces pastorianus
cggctgtggttcttgttctctaggg

SEQ ID NO: 140899 - DNA, 25 bp, Saccharomyces pastorianus
atgcctttagatgtagtggttgtcc

SEQ ID NO: 140900 - DNA, 25 bp, Saccharomyces pastorianus
aaatttacagaagacgagttgaccg

SEQ ID NO: 140901 - DNA, 25 bp, Saccharomyces pastorianus
atgtagtggttgtccctacttgggt

SEQ ID NO: 140902 - DNA, 25 bp, Saccharomyces pastorianus
aaacgatataagatcccaacaagat

SEQ ID NO: 140903 - DNA, 25 bp, Saccharomyces pastorianus
aatgtcgcagtacgaatccactccg

SEQ ID NO: 140904 - DNA, 25 bp, Saccharomyces pastorianus
tatagaactacgtcgctgggcggat

SEQ ID NO: 140905 - DNA, 25 bp, Saccharomyces pastorianus
aaacgccagtgaagcagtccgtcat

SEQ ID NO: 140906 - DNA, 25 bp, Saccharomyces pastorianus
aaattgcacgtattgtttggcgcta

SEQ ID NO: 140907 - DNA, 25 bp, Saccharomyces pastorianus
gaatttggatcccagactgcctcaa

SEQ ID NO: 140908 - DNA, 25 bp, Saccharomyces pastorianus
aagttatcctcactcaatcagcaac

SEQ ID NO: 140909 - DNA, 25 bp, Saccharomyces pastorianus
aggccaaattaatgtgcgttccacc

SEQ ID NO: 140910 - DNA, 25 bp, Saccharomyces pastorianus
aaaaattgctttgggcctgtgcgac

SEQ ID NO: 140911 - DNA, 25 bp, Saccharomyces pastorianus
tagctccactaactgcaaacacatt

SEQ ID NO: 140912 - DNA, 25 bp, Saccharomyces pastorianus
ggcgctacaggttcgttatcggtat

SEQ ID NO: 140913 - DNA, 25 bp, Saccharomyces pastorianus
gaactgatcctgtacttcatataga

SEQ ID NO: 140914 - DNA, 25 bp, Saccharomyces pastorianus
aaatctggaccgtacaacactgtta

SEQ ID NO: 140915 - DNA, 25 bp, Saccharomyces pastorianus
tttctttgttccagttgatggacag

SEQ ID NO: 140916 - DNA, 25 bp, Saccharomyces pastorianus
atctggaccgtacaacactgttaca

SEQ ID NO: 140917 - DNA, 25 bp, Saccharomyces pastorianus
ttagtcaaatctggaccgtacaaca

SEQ ID NO: 140918 - DNA, 25 bp, Saccharomyces pastorianus
ggaccgtacaacactgttacatcgg

SEQ ID NO: 140919 - DNA, 25 bp, Saccharomyces pastorianus
ccgtacaacactgttacatcggttt

SEQ ID NO: 140920 - DNA, 25 bp, Saccharomyces pastorianus
tctggaccgtacaacactgttacat

SEQ ID NO: 140921 - DNA, 25 bp, Saccharomyces pastorianus
cgtacaacactgttacatcggtttc

SEQ ID NO: 140922 - DNA, 25 bp, Saccharomyces pastorianus
tggaccgtacaacactgttacatcg

SEQ ID NO: 140923 - DNA, 25 bp, Saccharomyces pastorianus
gtcaaatctggaccgtacaacactg

SEQ ID NO: 140924 - DNA, 25 bp, Saccharomyces pastorianus
ttctttgttccagttgatggacagt

SEQ ID NO: 140925 - DNA, 25 bp, Saccharomyces pastorianus
atgatttcgttacctatagaaaaag

SEQ ID NO: 140926 - DNA, 25 bp, Saccharomyces pastorianus
tacctatagaaaaagatgatgccac

SEQ ID NO: 140927 - DNA, 25 bp, Saccharomyces pastorianus
ctatgatttcgttacctatagaaaa

SEQ ID NO: 140928 - DNA, 25 bp, Saccharomyces pastorianus
tatagaaaaagatgatgccacaatg

SEQ ID NO: 140929 - DNA, 25 bp, Saccharomyces pastorianus
atcttctatgatttcgttacctata

SEQ ID NO: 140930 - DNA, 25 bp, Saccharomyces pastorianus
tcttctatgatttcgttacctatag

SEQ ID NO: 140931 - DNA, 25 bp, Saccharomyces pastorianus
aatcttctatgatttcgttacctat

SEQ ID NO: 140932 - DNA, 25 bp, Saccharomyces pastorianus
aaatcttctatgatttcgttaccta

SEQ ID NO: 140933 - DNA, 25 bp, Saccharomyces pastorianus
gttacctatagaaaaagatgatgcc

SEQ ID NO: 140934 - DNA, 25 bp, Saccharomyces pastorianus
cttctatgatttcgttacctataga

SEQ ID NO: 140935 - DNA, 25 bp, Saccharomyces pastorianus
cctatagaaaaagatgatgccacaa

SEQ ID NO: 140936 - DNA, 25 bp, Saccharomyces pastorianus
accaaggcaattcaggtctcctgca

SEQ ID NO: 140937 - DNA, 25 bp, Saccharomyces pastorianus
gacaagtttgcaaccagcagctact

SEQ ID NO: 140938 - DNA, 25 bp, Saccharomyces pastorianus
gtttcactcccaatctcgatggaat

SEQ ID NO: 140939 - DNA, 25 bp, Saccharomyces pastorianus
aaaaagcctgttacttctgaccgtg

SEQ ID NO: 140940 - DNA, 25 bp, Saccharomyces pastorianus
aagattaatagatccccttcccata

SEQ ID NO: 140941 - DNA, 25 bp, Saccharomyces pastorianus
ttaatctaccacttcaatcatcacc

SEQ ID NO: 140942 - DNA, 25 bp, Saccharomyces pastorianus
gaactccgaatgcaaactccaattt

SEQ ID NO: 140943 - DNA, 25 bp, Saccharomyces pastorianus
gtgtccaacatcataaagccgtctc

SEQ ID NO: 140944 - DNA, 25 bp, Saccharomyces pastorianus
gtccttcccactgatacatcgaaaa

SEQ ID NO: 140945 - DNA, 25 bp, Saccharomyces pastorianus
gggtaattccgccagtaacatcata

SEQ ID NO: 140946 - DNA, 25 bp, Saccharomyces pastorianus
gaaaacttcacgtctcctaacacaa

SEQ ID NO: 140947 - DNA, 25 bp, Saccharomyces pastorianus
ctttcttgacaaactatctccggga

SEQ ID NO: 140948 - DNA, 25 bp, Saccharomyces pastorianus
aaactgaatgaatccttcctgaaaa

SEQ ID NO: 140949 - DNA, 25 bp, Saccharomyces pastorianus
gcaaatttctttggacgaagtcatt

SEQ ID NO: 140950 - DNA, 25 bp, Saccharomyces pastorianus
ggaaacagttactctaccatgtatt

SEQ ID NO: 140951 - DNA, 25 bp, Saccharomyces pastorianus
cagtacattgtagacgaggcagtga

SEQ ID NO: 140952 - DNA, 25 bp, Saccharomyces pastorianus
ggcagaggatgaataccgcattgta

SEQ ID NO: 140953 - DNA, 25 bp, Saccharomyces pastorianus
gaagaccttaagatacgcacggcag

SEQ ID NO: 140954 - DNA, 25 bp, Saccharomyces pastorianus
aaaaattcaaaggtgcatcgaggca

SEQ ID NO: 140955 - DNA, 25 bp, Saccharomyces pastorianus
tataaccgtgttaagcagagctggg

SEQ ID NO: 140956 - DNA, 25 bp, Saccharomyces pastorianus
gaagccgccgaggttaatagttgtt

SEQ ID NO: 140957 - DNA, 25 bp, Saccharomyces pastorianus
ctatctccgggaaacaacaacagta

SEQ ID NO: 140958 - DNA, 25 bp, Saccharomyces pastorianus
aacttgcagagctatacattgtgac

SEQ ID NO: 140959 - DNA, 25 bp, Saccharomyces pastorianus
gaaattttccctcgaaataggctat

SEQ ID NO: 140960 - DNA, 25 bp, Saccharomyces pastorianus
aatcagctactggaggatgccgtga

SEQ ID NO: 140961 - DNA, 25 bp, Saccharomyces pastorianus
gttttgctttcgacagtatgatcgt

SEQ ID NO: 140962 - DNA, 25 bp, Saccharomyces pastorianus
attaattcacgaagctacactggaa

SEQ ID NO: 140963 - DNA, 25 bp, Saccharomyces pastorianus
gtgactgggcatattcgaactcaat

SEQ ID NO: 140964 - DNA, 25 bp, Saccharomyces pastorianus
cacttttcccagagatatcccaaat

SEQ ID NO: 140965 - DNA, 25 bp, Saccharomyces pastorianus
cagcgtatttttccactgctgaata

SEQ ID NO: 140966 - DNA, 25 bp, Saccharomyces pastorianus
aactcaattaccttccgaatggacg

SEQ ID NO: 140967 - DNA, 25 bp, Saccharomyces pastorianus
gttgatcttaacacacttttcccag

SEQ ID NO: 140968 - DNA, 25 bp, Saccharomyces pastorianus
gagatatcccaaattgccccaatta

SEQ ID NO: 140969 - DNA, 25 bp, Saccharomyces pastorianus
aagtggcggatttctcgtggcaaga

SEQ ID NO: 140970 - DNA, 25 bp, Saccharomyces pastorianus
ccatttgggaataatcagcgtgcta

SEQ ID NO: 140971 - DNA, 25 bp, Saccharomyces pastorianus
tacacaggatgttttctcagctagc

SEQ ID NO: 140972 - DNA, 25 bp, Saccharomyces pastorianus
aaagttccttttactgacgccgatg

SEQ ID NO: 140973 - DNA, 25 bp, Saccharomyces pastorianus
gaaccggtagtgcattgccttctaa

SEQ ID NO: 140974 - DNA, 25 bp, Saccharomyces pastorianus
gatatatctgagtcacttgcatgca

SEQ ID NO: 140975 - DNA, 25 bp, Saccharomyces pastorianus
cttgcatgcagaccaccatttggga

SEQ ID NO: 140976 - DNA, 25 bp, Saccharomyces pastorianus
gaatttcccttagctgatgtcgata

SEQ ID NO: 140977 - DNA, 25 bp, Saccharomyces pastorianus
gtggttactccatggcaatatcaca

SEQ ID NO: 140978 - DNA, 25 bp, Saccharomyces pastorianus
tctcagctagcagtcaagtcaatat

SEQ ID NO: 140979 - DNA, 25 bp, Saccharomyces pastorianus
gaaatgttgtctccacacttgttaa

SEQ ID NO: 140980 - DNA, 25 bp, Saccharomyces pastorianus
atggcaggtttcctattgatcagaa

SEQ ID NO: 140981 - DNA, 25 bp, Saccharomyces pastorianus
aatggctctatcagggaagttttca

SEQ ID NO: 140982 - DNA, 25 bp, Saccharomyces pastorianus
gcccagtgtggatcttttatgtgac

SEQ ID NO: 140983 - DNA, 25 bp, Saccharomyces pastorianus
gttgcactcgactattggttctgta

SEQ ID NO: 140984 - DNA, 25 bp, Saccharomyces pastorianus
gcttcggcatatagtcaaacgtgtt

SEQ ID NO: 140985 - DNA, 25 bp, Saccharomyces pastorianus
gtgacaaatcgttactgacgccaga

SEQ ID NO: 140986 - DNA, 25 bp, Saccharomyces pastorianus
gtagtcaatctatcggatctcgttg

SEQ ID NO: 140987 - DNA, 25 bp, Saccharomyces pastorianus
taccgttaaggcttctttctgttga

SEQ ID NO: 140988 - DNA, 25 bp, Saccharomyces pastorianus
aaaataatgatttccccttgcccag

SEQ ID NO: 140989 - DNA, 25 bp, Saccharomyces pastorianus
agttgtattctatgctcgacgatga

SEQ ID NO: 140990 - DNA, 25 bp, Saccharomyces pastorianus
tgaactcagacaactcactcgagat

SEQ ID NO: 140991 - DNA, 25 bp, Saccharomyces pastorianus
ggaattgaccacctttgacatgaac

SEQ ID NO: 140992 - DNA, 25 bp, Saccharomyces pastorianus
acagggccaatcaacgaatcacgaa

SEQ ID NO: 140993 - DNA, 25 bp, Saccharomyces pastorianus
tctgtgttggagatcatcccatcga

SEQ ID NO: 140994 - DNA, 25 bp, Saccharomyces pastorianus
tcgtccattcattcagcacagtgtt

SEQ ID NO: 140995 - DNA, 25 bp, Saccharomyces pastorianus
gaaattgcgcaaagcctatccagaa

SEQ ID NO: 140996 - DNA, 25 bp, Saccharomyces pastorianus
cgtttattcttttcatcggagtcaa

SEQ ID NO: 140997 - DNA, 25 bp, Saccharomyces pastorianus
tttgctgccaggaacaccgtttatt

SEQ ID NO: 140998 - DNA, 25 bp, Saccharomyces pastorianus
tgacatgaaccgacctttgctgcca

SEQ ID NO: 140999 - DNA, 25 bp, Saccharomyces pastorianus
ggattcctttattaactgcccatga

SEQ ID NO: 141000 - DNA, 25 bp, Saccharomyces pastorianus
gcatcagttgattattcgtccattc

SEQ ID NO: 141001 - DNA, 25 bp, Saccharomyces pastorianus
tcaggttggttctcaacagggccaa

SEQ ID NO: 141002 - DNA, 25 bp, Saccharomyces pastorianus
ggtatttcctactctaaaggcgcag

SEQ ID NO: 141003 - DNA, 25 bp, Saccharomyces pastorianus
gatactataagactacggtgccaac

SEQ ID NO: 141004 - DNA, 25 bp, Saccharomyces pastorianus
cttacagtgactacagcgatggagc

SEQ ID NO: 141005 - DNA, 25 bp, Saccharomyces pastorianus
tggagcagacgacatgccggacttt

SEQ ID NO: 141006 - DNA, 25 bp, Saccharomyces pastorianus
aagccaattgctgttgctaatggga

SEQ ID NO: 141007 - DNA, 25 bp, Saccharomyces pastorianus
aaaggcgcagttacaggattaccaa

SEQ ID NO: 141008 - DNA, 25 bp, Saccharomyces pastorianus
atttgttaaatctgccttacctcac

SEQ ID NO: 141009 - DNA, 25 bp, Saccharomyces pastorianus
aaatgatcggcttccagactggctt

SEQ ID NO: 141010 - DNA, 25 bp, Saccharomyces pastorianus
catgccggactttcacgacgaaggt

SEQ ID NO: 141011 - DNA, 25 bp, Saccharomyces pastorianus
ggcaaacatctcaatttcgcaacaa

SEQ ID NO: 141012 - DNA, 25 bp, Saccharomyces pastorianus
gggataatctttcacttaagctagc

SEQ ID NO: 141013 - DNA, 25 bp, Saccharomyces pastorianus
atctctcccaacctggatactgaat

SEQ ID NO: 141014 - DNA, 25 bp, Saccharomyces pastorianus
ggcaatgaggatcccacatatcaat

SEQ ID NO: 141015 - DNA, 25 bp, Saccharomyces pastorianus
gagaatgacgattccgtacgggagt

SEQ ID NO: 141016 - DNA, 25 bp, Saccharomyces pastorianus
gtttctcccacagcggttatcgagg

SEQ ID NO: 141017 - DNA, 25 bp, Saccharomyces pastorianus
tggcgacgccggcaaggaaatattt

SEQ ID NO: 141018 - DNA, 25 bp, Saccharomyces pastorianus
gaatctaagagccttctggcgacgc

SEQ ID NO: 141019 - DNA, 25 bp, Saccharomyces pastorianus
acaacgtacaatttcactttccagg

SEQ ID NO: 141020 - DNA, 25 bp, Saccharomyces pastorianus
aatcaagactcaactgcgcaatggt

SEQ ID NO: 141021 - DNA, 25 bp, Saccharomyces pastorianus
gtacgggagttttcacgcacgctaa

SEQ ID NO: 141022 - DNA, 25 bp, Saccharomyces pastorianus
gaagcgcaagattctcctacatctg

SEQ ID NO: 141023 - DNA, 25 bp, Saccharomyces pastorianus
taaacgaattgatctctcccaacct

SEQ ID NO: 141024 - DNA, 25 bp, Saccharomyces pastorianus
gggagttgacagacaacacctacaa

SEQ ID NO: 141025 - DNA, 25 bp, Saccharomyces pastorianus
gacaacacctacaaaggcgcggctg

SEQ ID NO: 141026 - DNA, 25 bp, Saccharomyces pastorianus
aggttcttacagaggtggatccatt

SEQ ID NO: 141027 - DNA, 25 bp, Saccharomyces pastorianus
cgaagcttgggagttgacagacaac

SEQ ID NO: 141028 - DNA, 25 bp, Saccharomyces pastorianus
gagtaagaggtaaagatttcacgaa

SEQ ID NO: 141029 - DNA, 25 bp, Saccharomyces pastorianus
gaggtaaagatttcacgaagaacaa

SEQ ID NO: 141030 - DNA, 25 bp, Saccharomyces pastorianus
ttcgaagcttgggagttgacagaca

SEQ ID NO: 141031 - DNA, 25 bp, Saccharomyces pastorianus
aacacctacaaaggcgcggctggaa

SEQ ID NO: 141032 - DNA, 25 bp, Saccharomyces pastorianus
ttcttacagaggtggatccattaca

SEQ ID NO: 141033 - DNA, 25 bp, Saccharomyces pastorianus
ctacaaaggcgcggctggaacatgg

SEQ ID NO: 141034 - DNA, 25 bp, Saccharomyces pastorianus
ttgacagacaacacctacaaaggcg

SEQ ID NO: 141035 - DNA, 25 bp, Saccharomyces pastorianus
atttgaataatgagctagatttgca

SEQ ID NO: 141036 - DNA, 25 bp, Saccharomyces pastorianus
ttgaataatgagctagatttgcaga

SEQ ID NO: 141037 - DNA, 25 bp, Saccharomyces pastorianus
ataatgagctagatttgcagaaaaa

SEQ ID NO: 141038 - DNA, 25 bp, Saccharomyces pastorianus
aatgagctagatttgcagaaaaaag

SEQ ID NO: 141039 - DNA, 25 bp, Saccharomyces pastorianus
aataatgagctagatttgcagaaaa

SEQ ID NO: 141040 - DNA, 25 bp, Saccharomyces pastorianus
tgaataatgagctagatttgcagaa

SEQ ID NO: 141041 - DNA, 25 bp, Saccharomyces pastorianus
taatgagctagatttgcagaaaaaa

SEQ ID NO: 141042 - DNA, 25 bp, Saccharomyces pastorianus
tttgaataatgagctagatttgcag

SEQ ID NO: 141043 - DNA, 25 bp, Saccharomyces pastorianus
gaataatgagctagatttgcagaaa

SEQ ID NO: 141044 - DNA, 25 bp, Saccharomyces pastorianus
atgagctagatttgcagaaaaaagg

SEQ ID NO: 141045 - DNA, 25 bp, Saccharomyces pastorianus
tgagctagatttgcagaaaaaaggg

SEQ ID NO: 141046 - DNA, 25 bp, Saccharomyces pastorianus
gactcctccgaaatctgttaacaat

SEQ ID NO: 141047 - DNA, 25 bp, Saccharomyces pastorianus
agacgtggtgcttcgaaaacagcta

SEQ ID NO: 141048 - DNA, 25 bp, Saccharomyces pastorianus
aactcatttggaacccagcttctac

SEQ ID NO: 141049 - DNA, 25 bp, Saccharomyces pastorianus
attctaagtcttcatcaggtggatt

SEQ ID NO: 141050 - DNA, 25 bp, Saccharomyces pastorianus
aaacaaagtgccgagactcctccga

SEQ ID NO: 141051 - DNA, 25 bp, Saccharomyces pastorianus
aagggagtcgttggctaacaagaca

SEQ ID NO: 141052 - DNA, 25 bp, Saccharomyces pastorianus
actcccctcatatctcaggtgatga

SEQ ID NO: 141053 - DNA, 25 bp, Saccharomyces pastorianus
gccatcccctaataagcacttacaa

SEQ ID NO: 141054 - DNA, 25 bp, Saccharomyces pastorianus
acaagacagatccaccaactcattt

SEQ ID NO: 141055 - DNA, 25 bp, Saccharomyces pastorianus
tcaccatttaatccgttactttccg

SEQ ID NO: 141056 - DNA, 25 bp, Saccharomyces pastorianus
gcaatgatgaaaactacccttttgg

SEQ ID NO: 141057 - DNA, 25 bp, Saccharomyces pastorianus
gtgggagttagcagtatcatagaca

SEQ ID NO: 141058 - DNA, 25 bp, Saccharomyces pastorianus
gcattgatgatagggtgcttcgagt

SEQ ID NO: 141059 - DNA, 25 bp, Saccharomyces pastorianus
cttcgagtgggagttagcagtatca

SEQ ID NO: 141060 - DNA, 25 bp, Saccharomyces pastorianus
tgctagtccagttcagaagcattga

SEQ ID NO: 141061 - DNA, 25 bp, Saccharomyces pastorianus
agtccagttcagaagcattgatgat

SEQ ID NO: 141062 - DNA, 25 bp, Saccharomyces pastorianus
gggagttagcagtatcatagacagt

SEQ ID NO: 141063 - DNA, 25 bp, Saccharomyces pastorianus
gagttagcagtatcatagacagtat

SEQ ID NO: 141064 - DNA, 25 bp, Saccharomyces pastorianus
tagcagtatcatagacagtatcaaa

SEQ ID NO: 141065 - DNA, 25 bp, Saccharomyces pastorianus
tcgagtgggagttagcagtatcata

SEQ ID NO: 141066 - DNA, 25 bp, Saccharomyces pastorianus
gttagcagtatcatagacagtatca

SEQ ID NO: 141067 - DNA, 25 bp, Saccharomyces pastorianus
gctagtccagttcagaagcattgat

SEQ ID NO: 141068 - DNA, 25 bp, Saccharomyces pastorianus
gagcctaatatatttcatgcctaga

SEQ ID NO: 141069 - DNA, 25 bp, Saccharomyces pastorianus
tatatttcatgcctagatcctctag

SEQ ID NO: 141070 - DNA, 25 bp, Saccharomyces pastorianus
catgcctagatcctctagaggtgaa

SEQ ID NO: 141071 - DNA, 25 bp, Saccharomyces pastorianus
taaagattgggagtgcctgaatgcg

SEQ ID NO: 141072 - DNA, 25 bp, Saccharomyces pastorianus
gtggttgctctttgccttagagata

SEQ ID NO: 141073 - DNA, 25 bp, Saccharomyces pastorianus
aagagtgtacgtcggccgcgcttca

SEQ ID NO: 141074 - DNA, 25 bp, Saccharomyces pastorianus
ggagtgcctgaatgcggataaagaa

SEQ ID NO: 141075 - DNA, 25 bp, Saccharomyces pastorianus
gcttcattcctcttgagagcctaat

SEQ ID NO: 141076 - DNA, 25 bp, Saccharomyces pastorianus
ttgggaagcccaagagtgtacgtcg

SEQ ID NO: 141077 - DNA, 25 bp, Saccharomyces pastorianus
ctctagaggtgaaatggtggttgct

SEQ ID NO: 141078 - DNA, 25 bp, Saccharomyces pastorianus
gatttcaatctagggcttgggaagc

SEQ ID NO: 141079 - DNA, 25 bp, Saccharomyces pastorianus
cgaaatcaactgtagggcgtgctgt

SEQ ID NO: 141080 - DNA, 25 bp, Saccharomyces pastorianus
ccgacaccacgctagttcatgaaat

SEQ ID NO: 141081 - DNA, 25 bp, Saccharomyces pastorianus
gtctccactgatgatatcgtcactg

SEQ ID NO: 141082 - DNA, 25 bp, Saccharomyces pastorianus
gtcactgctttcatctggaaatcag

SEQ ID NO: 141083 - DNA, 25 bp, Saccharomyces pastorianus
ggcctataatacatgcgcacttgct

SEQ ID NO: 141084 - DNA, 25 bp, Saccharomyces pastorianus
gccgatgcccggacaagactaaggt

SEQ ID NO: 141085 - DNA, 25 bp, Saccharomyces pastorianus
aaatcagtttctcgagcccgtttat

SEQ ID NO: 141086 - DNA, 25 bp, Saccharomyces pastorianus
aaagtttgggcgttcttgcatcaca

SEQ ID NO: 141087 - DNA, 25 bp, Saccharomyces pastorianus
gttgaattttctgctatctcattgc

SEQ ID NO: 141088 - DNA, 25 bp, Saccharomyces pastorianus
accctaagtcttcgatttggcctat

SEQ ID NO: 141089 - DNA, 25 bp, Saccharomyces pastorianus
ttcttcgaactctacttgggcttat

SEQ ID NO: 141090 - DNA, 25 bp, Saccharomyces pastorianus
gtttattttcaccatgctacacctg

SEQ ID NO: 141091 - DNA, 25 bp, Saccharomyces pastorianus
tgctcgaccctgttagtgtttattt

SEQ ID NO: 141092 - DNA, 25 bp, Saccharomyces pastorianus
acgggactttaatcgctgaatgcac

SEQ ID NO: 141093 - DNA, 25 bp, Saccharomyces pastorianus
agtccgcattgccttggctgagaag

SEQ ID NO: 141094 - DNA, 25 bp, Saccharomyces pastorianus
cacagtgccagtgcttgaacttgat

SEQ ID NO: 141095 - DNA, 25 bp, Saccharomyces pastorianus
gagaacgcccatatgttgctggtga

SEQ ID NO: 141096 - DNA, 25 bp, Saccharomyces pastorianus
gctggtctaatatttgctgcgattg

SEQ ID NO: 141097 - DNA, 25 bp, Saccharomyces pastorianus
gttgctggtgattcattctcaatgg

SEQ ID NO: 141098 - DNA, 25 bp, Saccharomyces pastorianus
gggcctgaagtcgagttctaccaaa

SEQ ID NO: 141099 - DNA, 25 bp, Saccharomyces pastorianus
ttgatgcacttgatggtacacccac

SEQ ID NO: 141100 - DNA, 25 bp, Saccharomyces pastorianus
gaagcctgaatttcttgccaagaac

SEQ ID NO: 141101 - DNA, 25 bp, Saccharomyces pastorianus
cttatattccacctgaacagccgga

SEQ ID NO: 141102 - DNA, 25 bp, Saccharomyces pastorianus
gttgacaatgcttatattccacctg

SEQ ID NO: 141103 - DNA, 25 bp, Saccharomyces pastorianus
gcattcgcgttttaatattaacaga

SEQ ID NO: 141104 - DNA, 25 bp, Saccharomyces pastorianus
tattccacctgaacagccggaaaca

SEQ ID NO: 141105 - DNA, 25 bp, Saccharomyces pastorianus
ccaaccggtgttgacaatgcttata

SEQ ID NO: 141106 - DNA, 25 bp, Saccharomyces pastorianus
gacaatgcttatattccacctgaac

SEQ ID NO: 141107 - DNA, 25 bp, Saccharomyces pastorianus
gccggaaacaaagcattcgcgtttt

SEQ ID NO: 141108 - DNA, 25 bp, Saccharomyces pastorianus
aacatttcgcacttggacccaaccg

SEQ ID NO: 141109 - DNA, 25 bp, Saccharomyces pastorianus
tctaacgaatctaacgaccttgaaa

SEQ ID NO: 141110 - DNA, 25 bp, Saccharomyces pastorianus
gagataccttaagaaaccactttat

SEQ ID NO: 141111 - DNA, 25 bp, Saccharomyces pastorianus
ggacccaaccggtgttgacaatgct

SEQ ID NO: 141112 - DNA, 25 bp, Saccharomyces pastorianus
gccataaagctgtcacgaaaccctg

SEQ ID NO: 141113 - DNA, 25 bp, Saccharomyces pastorianus
ttatgggcccagtaatcttcacctc

SEQ ID NO: 141114 - DNA, 25 bp, Saccharomyces pastorianus
gaatccttcttttcttaacggctat

SEQ ID NO: 141115 - DNA, 25 bp, Saccharomyces pastorianus
cctcctgttctggtggacgatgtta

SEQ ID NO: 141116 - DNA, 25 bp, Saccharomyces pastorianus
aagtacgccgcctggagattcatta

SEQ ID NO: 141117 - DNA, 25 bp, Saccharomyces pastorianus
gatcatggcgatcaagaatccttct

SEQ ID NO: 141118 - DNA, 25 bp, Saccharomyces pastorianus
attcattagcggtcgtgtgctgcgg

SEQ ID NO: 141119 - DNA, 25 bp, Saccharomyces pastorianus
aggcttgcctggtccattagatcat

SEQ ID NO: 141120 - DNA, 25 bp, Saccharomyces pastorianus
atcggcaatgcaagacctgatttta

SEQ ID NO: 141121 - DNA, 25 bp, Saccharomyces pastorianus
cacgtcaacgtgcaggtttacctta

SEQ ID NO: 141122 - DNA, 25 bp, Saccharomyces pastorianus
ccgagtggccattgagggaccttat

SEQ ID NO: 141123 - DNA, 25 bp, Saccharomyces pastorianus
aaggagagccttaaacggtgtctct

SEQ ID NO: 141124 - DNA, 25 bp, Saccharomyces pastorianus
gtttctgtgtagtgttgctgttgct

SEQ ID NO: 141125 - DNA, 25 bp, Saccharomyces pastorianus
agatggtctatgcatcctccaagga

SEQ ID NO: 141126 - DNA, 25 bp, Saccharomyces pastorianus
tgctgttgctgatgaatcccttacc

SEQ ID NO: 141127 - DNA, 25 bp, Saccharomyces pastorianus
ccatcttacgatgccttcttagaga

SEQ ID NO: 141128 - DNA, 25 bp, Saccharomyces pastorianus
aaggaaacctctactgacccatctt

SEQ ID NO: 141129 - DNA, 25 bp, Saccharomyces pastorianus
tcccttaccgctttcaatgacttga

SEQ ID NO: 141130 - DNA, 25 bp, Saccharomyces pastorianus
tacgccatttacgattttgaatacg

SEQ ID NO: 141131 - DNA, 25 bp, Saccharomyces pastorianus
gaaaacgactgtctttacgccattt

SEQ ID NO: 141132 - DNA, 25 bp, Saccharomyces pastorianus
gacactgctccagtcagatcgaaga

SEQ ID NO: 141133 - DNA, 25 bp, Saccharomyces pastorianus
gattgttttcttcacttggtctcca

SEQ ID NO: 141134 - DNA, 25 bp, Saccharomyces pastorianus
ggatatcctaattgaattggctaaa

SEQ ID NO: 141135 - DNA, 25 bp, Saccharomyces pastorianus
gcatagtggagaattggatatccta

SEQ ID NO: 141136 - DNA, 25 bp, Saccharomyces pastorianus
atagcatgtgtgagcatagtggaga

SEQ ID NO: 141137 - DNA, 25 bp, Saccharomyces pastorianus
gccttttatagcatgtgtgagcata

SEQ ID NO: 141138 - DNA, 25 bp, Saccharomyces pastorianus
atgatcacccatattctttgttact

SEQ ID NO: 141139 - DNA, 25 bp, Saccharomyces pastorianus
cacccatattctttgttacttaaca

SEQ ID NO: 141140 - DNA, 25 bp, Saccharomyces pastorianus
gatcacccatattctttgttactta

SEQ ID NO: 141141 - DNA, 25 bp, Saccharomyces pastorianus
tgttacttaacaaacaaagtgcctt

SEQ ID NO: 141142 - DNA, 25 bp, Saccharomyces pastorianus
aacaaagtgccttttatagcatgtg

SEQ ID NO: 141143 - DNA, 25 bp, Saccharomyces pastorianus
gaggtaaaagagtatgatcacccat

SEQ ID NO: 141144 - DNA, 25 bp, Saccharomyces pastorianus
agagtatgatcacccatattctttg

SEQ ID NO: 141145 - DNA, 25 bp, Saccharomyces pastorianus
gaacaattacacaaggcgccacaag

SEQ ID NO: 141146 - DNA, 25 bp, Saccharomyces pastorianus
tttctgtcgacgctcagtctaagat

SEQ ID NO: 141147 - DNA, 25 bp, Saccharomyces pastorianus
gtatgctccaaacctacctagagta

SEQ ID NO: 141148 - DNA, 25 bp, Saccharomyces pastorianus
gagcaagagccatacaacgaacaca

SEQ ID NO: 141149 - DNA, 25 bp, Saccharomyces pastorianus
gatccaacactattctcagggacga

SEQ ID NO: 141150 - DNA, 25 bp, Saccharomyces pastorianus
ccggtgccggtaaatcaactattat

SEQ ID NO: 141151 - DNA, 25 bp, Saccharomyces pastorianus
tcgatatttccggtgttgatttaca

SEQ ID NO: 141152 - DNA, 25 bp, Saccharomyces pastorianus
gacgtatgctatttccttcactgaa

SEQ ID NO: 141153 - DNA, 25 bp, Saccharomyces pastorianus
ggctggtatatctttgacgtatgct

SEQ ID NO: 141154 - DNA, 25 bp, Saccharomyces pastorianus
tattaccgccttgttcaggtttttg

SEQ ID NO: 141155 - DNA, 25 bp, Saccharomyces pastorianus
gatttatcattacggtatgctccaa

SEQ ID NO: 141156 - DNA, 25 bp, Saccharomyces pastorianus
aagacgaagctgctttggctaagtt

SEQ ID NO: 141157 - DNA, 25 bp, Saccharomyces pastorianus
aagtcagagccgaagacgaagctgc

SEQ ID NO: 141158 - DNA, 25 bp, Saccharomyces pastorianus
acgaagctgctttggctaagttggt

SEQ ID NO: 141159 - DNA, 25 bp, Saccharomyces pastorianus
gacgaagctgctttggctaagttgg

SEQ ID NO: 141160 - DNA, 25 bp, Saccharomyces pastorianus
aagctgctttggctaagttggtttc

SEQ ID NO: 141161 - DNA, 25 bp, Saccharomyces pastorianus
agctgctttggctaagttggtttcc

SEQ ID NO: 141162 - DNA, 25 bp, Saccharomyces pastorianus
agacgaagctgctttggctaagttg

SEQ ID NO: 141163 - DNA, 25 bp, Saccharomyces pastorianus
agtcagagccgaagacgaagctgct

SEQ ID NO: 141164 - DNA, 25 bp, Saccharomyces pastorianus
gaagtcagagccgaagacgaagctg

SEQ ID NO: 141165 - DNA, 25 bp, Saccharomyces pastorianus
cgaagctgctttggctaagttggtt

SEQ ID NO: 141166 - DNA, 25 bp, Saccharomyces pastorianus
gaagtcaagaagcactggggtggtg

SEQ ID NO: 141167 - DNA, 25 bp, Saccharomyces pastorianus
ctgctgaaaccttcaagttgttcaa

SEQ ID NO: 141168 - DNA, 25 bp, Saccharomyces pastorianus
tgaaaccttcaagttgttcaacaag

SEQ ID NO: 141169 - DNA, 25 bp, Saccharomyces pastorianus
agttgttcaacaagtacagaccaga

SEQ ID NO: 141170 - DNA, 25 bp, Saccharomyces pastorianus
gaaaccttcaagttgttcaacaagt

SEQ ID NO: 141171 - DNA, 25 bp, Saccharomyces pastorianus
gttgttcaacaagtacagaccagaa

SEQ ID NO: 141172 - DNA, 25 bp, Saccharomyces pastorianus
gctgaaaccttcaagttgttcaaca

SEQ ID NO: 141173 - DNA, 25 bp, Saccharomyces pastorianus
accttcaagttgttcaacaagtaca

SEQ ID NO: 141174 - DNA, 25 bp, Saccharomyces pastorianus
tgttcaacaagtacagaccagaaac

SEQ ID NO: 141175 - DNA, 25 bp, Saccharomyces pastorianus
aagttgttcaacaagtacagaccag

SEQ ID NO: 141176 - DNA, 25 bp, Saccharomyces pastorianus
gctgctgaaaccttcaagttgttca

SEQ ID NO: 141177 - DNA, 25 bp, Saccharomyces pastorianus
tgctgaaaccttcaagttgttcaac

SEQ ID NO: 141178 - DNA, 25 bp, Saccharomyces pastorianus
gtgcaaatggccacccaagagctta

SEQ ID NO: 141179 - DNA, 25 bp, Saccharomyces pastorianus
gaagaacgtcggtccttgtacagga

SEQ ID NO: 141180 - DNA, 25 bp, Saccharomyces pastorianus
ttatgatctacgtgaggcccaagga

SEQ ID NO: 141181 - DNA, 25 bp, Saccharomyces pastorianus
aaagtaccaccactgtgcttgacat

SEQ ID NO: 141182 - DNA, 25 bp, Saccharomyces pastorianus
gaacatcgccattgctgttagggaa

SEQ ID NO: 141183 - DNA, 25 bp, Saccharomyces pastorianus
gttgcagagtgcgtctaccaaggta

SEQ ID NO: 141184 - DNA, 25 bp, Saccharomyces pastorianus
gatgaatacctgtcgcacgttatat

SEQ ID NO: 141185 - DNA, 25 bp, Saccharomyces pastorianus
gagcggaattgcactggacccatac

SEQ ID NO: 141186 - DNA, 25 bp, Saccharomyces pastorianus
gaatacttcattcccatcagcgatc

SEQ ID NO: 141187 - DNA, 25 bp, Saccharomyces pastorianus
gctggtttcctcaaaggccttggta

SEQ ID NO: 141188 - DNA, 25 bp, Saccharomyces pastorianus
acaggatatccttccatccagggaa

SEQ ID NO: 141189 - DNA, 25 bp, Saccharomyces pastorianus
tcactgcttcagctaaggattggtc

SEQ ID NO: 141190 - DNA, 25 bp, Saccharomyces pastorianus
gcttcagctaaggattggtctacga

SEQ ID NO: 141191 - DNA, 25 bp, Saccharomyces pastorianus
aatcactgcttcagctaaggattgg

SEQ ID NO: 141192 - DNA, 25 bp, Saccharomyces pastorianus
cttcagctaaggattggtctacgac

SEQ ID NO: 141193 - DNA, 25 bp, Saccharomyces pastorianus
gtaaatgaaatcactgcttcagcta

SEQ ID NO: 141194 - DNA, 25 bp, Saccharomyces pastorianus
atgaaatcactgcttcagctaagga

SEQ ID NO: 141195 - DNA, 25 bp, Saccharomyces pastorianus
aaatgaaatcactgcttcagctaag

SEQ ID NO: 141196 - DNA, 25 bp, Saccharomyces pastorianus
tgcttcagctaaggattggtctacg

SEQ ID NO: 141197 - DNA, 25 bp, Saccharomyces pastorianus
ttcagctaaggattggtctacgact

SEQ ID NO: 141198 - DNA, 25 bp, Saccharomyces pastorianus
tgaaatcactgcttcagctaaggat

SEQ ID NO: 141199 - DNA, 25 bp, Saccharomyces pastorianus
gaaatcactgcttcagctaaggatt

SEQ ID NO: 141200 - DNA, 25 bp, Saccharomyces pastorianus
ggctagccagagctcagattccgaa

SEQ ID NO: 141201 - DNA, 25 bp, Saccharomyces pastorianus
gaaacattcaatgctgacttaggcg

SEQ ID NO: 141202 - DNA, 25 bp, Saccharomyces pastorianus
atccaagcattttaggtgagcgcag

SEQ ID NO: 141203 - DNA, 25 bp, Saccharomyces pastorianus
caatgctgacttaggcggactgaga

SEQ ID NO: 141204 - DNA, 25 bp, Saccharomyces pastorianus
gaatcaattgtagtgcctacttcaa

SEQ ID NO: 141205 - DNA, 25 bp, Saccharomyces pastorianus
aaattagcggtgttggatccaagca

SEQ ID NO: 141206 - DNA, 25 bp, Saccharomyces pastorianus
tagccagagctcagattccgaatca

SEQ ID NO: 141207 - DNA, 25 bp, Saccharomyces pastorianus
gattccgaatcaattgtagtgccta

SEQ ID NO: 141208 - DNA, 25 bp, Saccharomyces pastorianus
agcggtgttggatccaagcatttta

SEQ ID NO: 141209 - DNA, 25 bp, Saccharomyces pastorianus
cattttaggtgagcgcagcagggct

SEQ ID NO: 141210 - DNA, 25 bp, Saccharomyces pastorianus
agcagggctagccagagctcagatt

SEQ ID NO: 141211 - DNA, 25 bp, Saccharomyces pastorianus
tacttgctgatccttgcgacatgaa

SEQ ID NO: 141212 - DNA, 25 bp, Saccharomyces pastorianus
tcagcccctgttgatgcgtatttca

SEQ ID NO: 141213 - DNA, 25 bp, Saccharomyces pastorianus
aaacgagttaccacattgctaaata

SEQ ID NO: 141214 - DNA, 25 bp, Saccharomyces pastorianus
aaacggctctgatcttacttgctga

SEQ ID NO: 141215 - DNA, 25 bp, Saccharomyces pastorianus
aatgttggtatcttcctattcaaaa

SEQ ID NO: 141216 - DNA, 25 bp, Saccharomyces pastorianus
gacgaatatacagctttccgttcag

SEQ ID NO: 141217 - DNA, 25 bp, Saccharomyces pastorianus
gatgcaattatgtccaaaagccacg

SEQ ID NO: 141218 - DNA, 25 bp, Saccharomyces pastorianus
cacttagagatattcgtctggcgat

SEQ ID NO: 141219 - DNA, 25 bp, Saccharomyces pastorianus
acttttcatcctccttgacaattga

SEQ ID NO: 141220 - DNA, 25 bp, Saccharomyces pastorianus
tcaacttctcagaccctaatgacga

SEQ ID NO: 141221 - DNA, 25 bp, Saccharomyces pastorianus
gcaatggactatttggtttctctca

SEQ ID NO: 141222 - DNA, 25 bp, Saccharomyces pastorianus
aggctcgcatactgagtacccaatc

SEQ ID NO: 141223 - DNA, 25 bp, Saccharomyces pastorianus
gggaactgacaaatcaggctcgcat

SEQ ID NO: 141224 - DNA, 25 bp, Saccharomyces pastorianus
atggacggaatcttcactacaggcc

SEQ ID NO: 141225 - DNA, 25 bp, Saccharomyces pastorianus
gagaacaaaacctcttcttcttctt

SEQ ID NO: 141226 - DNA, 25 bp, Saccharomyces pastorianus
atctacagattccaactgggctcca

SEQ ID NO: 141227 - DNA, 25 bp, Saccharomyces pastorianus
ggatactgggtgatttggtcttaac

SEQ ID NO: 141228 - DNA, 25 bp, Saccharomyces pastorianus
ggtcttaacggtcccatggtcaagt

SEQ ID NO: 141229 - DNA, 25 bp, Saccharomyces pastorianus
actgggctccaagtttcattgatat

SEQ ID NO: 141230 - DNA, 25 bp, Saccharomyces pastorianus
acgccgggtttatgcagtctttgac

SEQ ID NO: 141231 - DNA, 25 bp, Saccharomyces pastorianus
tattatgctcaccacgttcagaaga

SEQ ID NO: 141232 - DNA, 25 bp, Saccharomyces pastorianus
acaggcccatcttccgttggattaa

SEQ ID NO: 141233 - DNA, 25 bp, Saccharomyces pastorianus
agaagatggtagaacgctgtcggac

SEQ ID NO: 141234 - DNA, 25 bp, Saccharomyces pastorianus
acgctgtcggactacaatattcaaa

SEQ ID NO: 141235 - DNA, 25 bp, Saccharomyces pastorianus
tggtagaacgctgtcggactacaat

SEQ ID NO: 141236 - DNA, 25 bp, Saccharomyces pastorianus
gatggtagaacgctgtcggactaca

SEQ ID NO: 141237 - DNA, 25 bp, Saccharomyces pastorianus
cgctgtcggactacaatattcaaaa

SEQ ID NO: 141238 - DNA, 25 bp, Saccharomyces pastorianus
aacattcagaaagagtctacgttgc

SEQ ID NO: 141239 - DNA, 25 bp, Saccharomyces pastorianus
ctgtcggactacaatattcaaaagg

SEQ ID NO: 141240 - DNA, 25 bp, Saccharomyces pastorianus
gtagaacgctgtcggactacaatat

SEQ ID NO: 141241 - DNA, 25 bp, Saccharomyces pastorianus
attcagaaagagtctacgttgcatt

SEQ ID NO: 141242 - DNA, 25 bp, Saccharomyces pastorianus
aagatggtagaacgctgtcggacta

SEQ ID NO: 141243 - DNA, 25 bp, Saccharomyces pastorianus
gaacgctgtcggactacaatattca

SEQ ID NO: 141244 - DNA, 25 bp, Saccharomyces pastorianus
gaagatggtagaacgctgtcggact

SEQ ID NO: 141245 - DNA, 25 bp, Saccharomyces pastorianus
cattcagaaagagtctacgttgcat

SEQ ID NO: 141246 - DNA, 25 bp, Saccharomyces pastorianus
ctacgttgcatttggtgttgagatt

SEQ ID NO: 141247 - DNA, 25 bp, Saccharomyces pastorianus
agaggttgaatcttccgacactatt

SEQ ID NO: 141248 - DNA, 25 bp, Saccharomyces pastorianus
gctgtcggactacaatattcaaaag

SEQ ID NO: 141249 - DNA, 25 bp, Saccharomyces pastorianus
ttccgacactattgacaacgtcaaa

SEQ ID NO: 141250 - DNA, 25 bp, Saccharomyces pastorianus
gaccagcaaagattgatttttgccg

SEQ ID NO: 141251 - DNA, 25 bp, Saccharomyces pastorianus
ggtagaacgctgtcggactacaata

SEQ ID NO: 141252 - DNA, 25 bp, Saccharomyces pastorianus
gggaagactataaccctagaggttg

SEQ ID NO: 141253 - DNA, 25 bp, Saccharomyces pastorianus
gaacgctgtcggactacaatattca

SEQ ID NO: 141254 - DNA, 25 bp, Saccharomyces pastorianus
accctagaggttgaatcttccgaca

SEQ ID NO: 141255 - DNA, 25 bp, Saccharomyces pastorianus
aggtggtatgcagatctttgttaag

SEQ ID NO: 141256 - DNA, 25 bp, Saccharomyces pastorianus
aagttgaatcttccgataccatcga

SEQ ID NO: 141257 - DNA, 25 bp, Saccharomyces pastorianus
tgatctttgccggtaagcagttaga

SEQ ID NO: 141258 - DNA, 25 bp, Saccharomyces pastorianus
tcagaaggaatctactcttcacttg

SEQ ID NO: 141259 - DNA, 25 bp, Saccharomyces pastorianus
tccgataccatcgacaacgttaagt

SEQ ID NO: 141260 - DNA, 25 bp, Saccharomyces pastorianus
gtatgcagatctttgttaagacttt

SEQ ID NO: 141261 - DNA, 25 bp, Saccharomyces pastorianus
ggtatgcagatctttgttaagactt

SEQ ID NO: 141262 - DNA, 25 bp, Saccharomyces pastorianus
gtggtatgcagatctttgttaagac

SEQ ID NO: 141263 - DNA, 25 bp, Saccharomyces pastorianus
gcagatctttgttaagactttgacc

SEQ ID NO: 141264 - DNA, 25 bp, Saccharomyces pastorianus
ggtggtatgcagatctttgttaaga

SEQ ID NO: 141265 - DNA, 25 bp, Saccharomyces pastorianus
gatctttgttaagactttgaccggt

SEQ ID NO: 141266 - DNA, 25 bp, Saccharomyces pastorianus
ccccgcacaattacatgggatgata

SEQ ID NO: 141267 - DNA, 25 bp, Saccharomyces pastorianus
ttttagataaacaacctgaggatgc

SEQ ID NO: 141268 - DNA, 25 bp, Saccharomyces pastorianus
aatatacaaataccgttcgcaactt

SEQ ID NO: 141269 - DNA, 25 bp, Saccharomyces pastorianus
actcctttttgtgactttcttccat

SEQ ID NO: 141270 - DNA, 25 bp, Saccharomyces pastorianus
gataatatacaaataccgttcgcaa

SEQ ID NO: 141271 - DNA, 25 bp, Saccharomyces pastorianus
tcctttttgtgactttcttccatcc

SEQ ID NO: 141272 - DNA, 25 bp, Saccharomyces pastorianus
acatttatgtgccaccttgccatac

SEQ ID NO: 141273 - DNA, 25 bp, Saccharomyces pastorianus
aacaacctgaggatgctcaatggat

SEQ ID NO: 141274 - DNA, 25 bp, Saccharomyces pastorianus
caccttgccatacccagattttaga

SEQ ID NO: 141275 - DNA, 25 bp, Saccharomyces pastorianus
acatgtgtggaaagttcgtaagaac

SEQ ID NO: 141276 - DNA, 25 bp, Saccharomyces pastorianus
tgccatacccagattttagataaac

SEQ ID NO: 141277 - DNA, 25 bp, Saccharomyces pastorianus
catacctgaactgcgctgataaact

SEQ ID NO: 141278 - DNA, 25 bp, Saccharomyces pastorianus
agagcaagccttcttcggaacgtca

SEQ ID NO: 141279 - DNA, 25 bp, Saccharomyces pastorianus
aagcccactcacttattgtttttgg

SEQ ID NO: 141280 - DNA, 25 bp, Saccharomyces pastorianus
aatcctcaagatatcaagtccgcat

SEQ ID NO: 141281 - DNA, 25 bp, Saccharomyces pastorianus
gaacgtcattgcttaatctacctgg

SEQ ID NO: 141282 - DNA, 25 bp, Saccharomyces pastorianus
tatgcacctgaagttgttcgcgttc

SEQ ID NO: 141283 - DNA, 25 bp, Saccharomyces pastorianus
cgcctcttttaaaatctgcaccttt

SEQ ID NO: 141284 - DNA, 25 bp, Saccharomyces pastorianus
gaaatccttgaatacctttcccatc

SEQ ID NO: 141285 - DNA, 25 bp, Saccharomyces pastorianus
gattatgattttgcgcctcttttaa

SEQ ID NO: 141286 - DNA, 25 bp, Saccharomyces pastorianus
acaccttatcttctaggttccatgc

SEQ ID NO: 141287 - DNA, 25 bp, Saccharomyces pastorianus
gagtttttccacatcactacgagat

SEQ ID NO: 141288 - DNA, 25 bp, Saccharomyces pastorianus
tcaactggtcgttacttttggtaca

SEQ ID NO: 141289 - DNA, 25 bp, Saccharomyces pastorianus
tgcttctttaagtttaatagtcact

SEQ ID NO: 141290 - DNA, 25 bp, Saccharomyces pastorianus
agtcactcaactggtcgttactttt

SEQ ID NO: 141291 - DNA, 25 bp, Saccharomyces pastorianus
ttctgcccaaggtttatctttgctt

SEQ ID NO: 141292 - DNA, 25 bp, Saccharomyces pastorianus
ggaaaatcttctgcccaaggtttat

SEQ ID NO: 141293 - DNA, 25 bp, Saccharomyces pastorianus
caaggtttatctttgcttctttaag

SEQ ID NO: 141294 - DNA, 25 bp, Saccharomyces pastorianus
gcccaaggtttatctttgcttcttt

SEQ ID NO: 141295 - DNA, 25 bp, Saccharomyces pastorianus
ggtcgttacttttggtacaattgca

SEQ ID NO: 141296 - DNA, 25 bp, Saccharomyces pastorianus
gtttggaaaatcttctgcccaaggt

SEQ ID NO: 141297 - DNA, 25 bp, Saccharomyces pastorianus
atcttctgcccaaggtttatctttg

SEQ ID NO: 141298 - DNA, 25 bp, Saccharomyces pastorianus
ttttggtacaattgcatttgctagt

SEQ ID NO: 141299 - DNA, 25 bp, Saccharomyces pastorianus
atttgttactggaagcctacccact

SEQ ID NO: 141300 - DNA, 25 bp, Saccharomyces pastorianus
atggtcattgcaggtaccgttttcc

SEQ ID NO: 141301 - DNA, 25 bp, Saccharomyces pastorianus
gtgcccgaggccagattatacgcaa

SEQ ID NO: 141302 - DNA, 25 bp, Saccharomyces pastorianus
tgagttgccatacatcgccttgatt

SEQ ID NO: 141303 - DNA, 25 bp, Saccharomyces pastorianus
cgtatctattgttggcagcttctgc

SEQ ID NO: 141304 - DNA, 25 bp, Saccharomyces pastorianus
gtcgcagcaaacactttcatgaggt

SEQ ID NO: 141305 - DNA, 25 bp, Saccharomyces pastorianus
tattaggtctatttgccgctgcgat

SEQ ID NO: 141306 - DNA, 25 bp, Saccharomyces pastorianus
gggctactatcctcacaagattcat

SEQ ID NO: 141307 - DNA, 25 bp, Saccharomyces pastorianus
tatggttctgttggacgggctacta

SEQ ID NO: 141308 - DNA, 25 bp, Saccharomyces pastorianus
atcggtatgatggtgtgtgctgctt

SEQ ID NO: 141309 - DNA, 25 bp, Saccharomyces pastorianus
gattcccgtgcctttactattctta

SEQ ID NO: 141310 - DNA, 25 bp, Saccharomyces pastorianus
tcttggccaaatatggttattccga

SEQ ID NO: 141311 - DNA, 25 bp, Saccharomyces pastorianus
aatctcgtgatgaaaatgttcctga

SEQ ID NO: 141312 - DNA, 25 bp, Saccharomyces pastorianus
agtcattttcaacaagctatctaga

SEQ ID NO: 141313 - DNA, 25 bp, Saccharomyces pastorianus
gaacaaactggcactaaggatctta

SEQ ID NO: 141314 - DNA, 25 bp, Saccharomyces pastorianus
ggaagttctaccaaatcacgaagct

SEQ ID NO: 141315 - DNA, 25 bp, Saccharomyces pastorianus
ggtcatgggtgctgttaggcaacat

SEQ ID NO: 141316 - DNA, 25 bp, Saccharomyces pastorianus
catgacttccaatctaggtgctgaa

SEQ ID NO: 141317 - DNA, 25 bp, Saccharomyces pastorianus
gaaactgtcaatgtcgtcttgaaga

SEQ ID NO: 141318 - DNA, 25 bp, Saccharomyces pastorianus
gacgatcgactgttccaattgtatt

SEQ ID NO: 141319 - DNA, 25 bp, Saccharomyces pastorianus
gggtgcacgtccactgaacaggtta

SEQ ID NO: 141320 - DNA, 25 bp, Saccharomyces pastorianus
tttaactcaagaggccaaggacttc

SEQ ID NO: 141321 - DNA, 25 bp, Saccharomyces pastorianus
tcaatgattcgtctattcagcaaat

SEQ ID NO: 141322 - DNA, 25 bp, Saccharomyces pastorianus
cagtcccttacctacagaatctaat

SEQ ID NO: 141323 - DNA, 25 bp, Saccharomyces pastorianus
ggactcatttatagcgcaagaccat

SEQ ID NO: 141324 - DNA, 25 bp, Saccharomyces pastorianus
tgagcaggctcgtcaaggtaaactt

SEQ ID NO: 141325 - DNA, 25 bp, Saccharomyces pastorianus
gggaaagtccttcaagacgctgcta

SEQ ID NO: 141326 - DNA, 25 bp, Saccharomyces pastorianus
tagaattgactctcgtggcgctgat

SEQ ID NO: 141327 - DNA, 25 bp, Saccharomyces pastorianus
caagctcttgaacttcgtggtaaca

SEQ ID NO: 141328 - DNA, 25 bp, Saccharomyces pastorianus
gcgctgatacgaacacacctttgga

SEQ ID NO: 141329 - DNA, 25 bp, Saccharomyces pastorianus
gaagatggatcagtcccttacctac

SEQ ID NO: 141330 - DNA, 25 bp, Saccharomyces pastorianus
gaccatatattgtttgctctattca

SEQ ID NO: 141331 - DNA, 25 bp, Saccharomyces pastorianus
tgaccctgtcatcggccgtgaagaa

SEQ ID NO: 141332 - DNA, 25 bp, Saccharomyces pastorianus
caaaggagctggtaaaaactgtaga

SEQ ID NO: 141333 - DNA, 25 bp, Saccharomyces pastorianus
ttgcgtttgatgttgccaaatgtac

SEQ ID NO: 141334 - DNA, 25 bp, Saccharomyces pastorianus
taactggcgatggaatactagcgaa

SEQ ID NO: 141335 - DNA, 25 bp, Saccharomyces pastorianus
tcaaacagcggttggcagggattgc

SEQ ID NO: 141336 - DNA, 25 bp, Saccharomyces pastorianus
tactagcgaaggaaaagagcgatca

SEQ ID NO: 141337 - DNA, 25 bp, Saccharomyces pastorianus
cagggattgcgtttgatgttgccaa

SEQ ID NO: 141338 - DNA, 25 bp, Saccharomyces pastorianus
tgttgccaaatgtacaaaggagctg

SEQ ID NO: 141339 - DNA, 25 bp, Saccharomyces pastorianus
agagcgatcaagattatgctgacaa

SEQ ID NO: 141340 - DNA, 25 bp, Saccharomyces pastorianus
aattttgtgccaattaactggcgat

SEQ ID NO: 141341 - DNA, 25 bp, Saccharomyces pastorianus
aaaaacttcaaacagcggttggcag

SEQ ID NO: 141342 - DNA, 25 bp, Saccharomyces pastorianus
agaagaggcaagtttgaaggacgaa

SEQ ID NO: 141343 - DNA, 25 bp, Saccharomyces pastorianus
gatcaagaaaccacaggtgacgaag

SEQ ID NO: 141344 - DNA, 25 bp, Saccharomyces pastorianus
gaaaatccggataatacactatcag

SEQ ID NO: 141345 - DNA, 25 bp, Saccharomyces pastorianus
gctactagcatatcaatggagcaaa

SEQ ID NO: 141346 - DNA, 25 bp, Saccharomyces pastorianus
tggagcaaagcagaaatgccaattt

SEQ ID NO: 141347 - DNA, 25 bp, Saccharomyces pastorianus
gggagaatcgaatgcaatcaaccaa

SEQ ID NO: 141348 - DNA, 25 bp, Saccharomyces pastorianus
acactatcagagttactattgtatt

SEQ ID NO: 141349 - DNA, 25 bp, Saccharomyces pastorianus
gtggatacatttgacattgaaaatc

SEQ ID NO: 141350 - DNA, 25 bp, Saccharomyces pastorianus
tggtggacgctactagcatatcaat

SEQ ID NO: 141351 - DNA, 25 bp, Saccharomyces pastorianus
gcaatcaaccaagtcataggtcaaa

SEQ ID NO: 141352 - DNA, 25 bp, Saccharomyces pastorianus
ccacaggtgacgaagggtaatttga

SEQ ID NO: 141353 - DNA, 25 bp, Saccharomyces pastorianus
gtcaaatggtggacgctactagcat

SEQ ID NO: 141354 - DNA, 25 bp, Saccharomyces pastorianus
agagacattgtctcctcagagccga

SEQ ID NO: 141355 - DNA, 25 bp, Saccharomyces pastorianus
agacattgtctcctcagagccgata

SEQ ID NO: 141356 - DNA, 25 bp, Saccharomyces pastorianus
actgtgtctgaacctcaagaaataa

SEQ ID NO: 141357 - DNA, 25 bp, Saccharomyces pastorianus
ggaaatactgtgtctgaacctcaag

SEQ ID NO: 141358 - DNA, 25 bp, Saccharomyces pastorianus
attgtctcctcagagccgatagaga

SEQ ID NO: 141359 - DNA, 25 bp, Saccharomyces pastorianus
taaagggaaatactgtgtctgaacc

SEQ ID NO: 141360 - DNA, 25 bp, Saccharomyces pastorianus
tagagaatgttgaccccccaaaagt

SEQ ID NO: 141361 - DNA, 25 bp, Saccharomyces pastorianus
gggaaatactgtgtctgaacctcaa

SEQ ID NO: 141362 - DNA, 25 bp, Saccharomyces pastorianus
acattgtctcctcagagccgataga

SEQ ID NO: 141363 - DNA, 25 bp, Saccharomyces pastorianus
agagccgatagagaatgttgacccc

SEQ ID NO: 141364 - DNA, 25 bp, Saccharomyces pastorianus
aatactgtgtctgaacctcaagaaa

SEQ ID NO: 141365 - DNA, 25 bp, Saccharomyces pastorianus
ctgtaggcccagagtcagctagcag

SEQ ID NO: 141366 - DNA, 25 bp, Saccharomyces pastorianus
aagcggctaggaagttggcgtcatc

SEQ ID NO: 141367 - DNA, 25 bp, Saccharomyces pastorianus
gtcgaatctccggatatgacgcaga

SEQ ID NO: 141368 - DNA, 25 bp, Saccharomyces pastorianus
gctgtaggcccagaatcagatagta

SEQ ID NO: 141369 - DNA, 25 bp, Saccharomyces pastorianus
agaatcaatcaagtccccggaagcg

SEQ ID NO: 141370 - DNA, 25 bp, Saccharomyces pastorianus
aagggcgcatctgtagaatcagtca

SEQ ID NO: 141371 - DNA, 25 bp, Saccharomyces pastorianus
ctagcagggttgaatctccgggtat

SEQ ID NO: 141372 - DNA, 25 bp, Saccharomyces pastorianus
aatcacgtcatctgaaatgtcttca

SEQ ID NO: 141373 - DNA, 25 bp, Saccharomyces pastorianus
ggatgttgagccttcagaaatgtca

SEQ ID NO: 141374 - DNA, 25 bp, Saccharomyces pastorianus
aaccacttggtgatgtcgaatctcc

SEQ ID NO: 141375 - DNA, 25 bp, Saccharomyces pastorianus
aatgccaagtagttcgctgcctaag

SEQ ID NO: 141376 - DNA, 25 bp, Saccharomyces pastorianus
aaggtcttgcaacaggattacggcg

SEQ ID NO: 141377 - DNA, 25 bp, Saccharomyces pastorianus
caattggaatctaccgccggagaaa

SEQ ID NO: 141378 - DNA, 25 bp, Saccharomyces pastorianus
gattacggcgatagcttaagcatca

SEQ ID NO: 141379 - DNA, 25 bp, Saccharomyces pastorianus
gcatcaattggaatctaccgccgga

SEQ ID NO: 141380 - DNA, 25 bp, Saccharomyces pastorianus
cgccggagaaaaactggtctttgat

SEQ ID NO: 141381 - DNA, 25 bp, Saccharomyces pastorianus
gatatttacatctcaaaggtcttgc

SEQ ID NO: 141382 - DNA, 25 bp, Saccharomyces pastorianus
gcagtcatgtgatcgcttagatatt

SEQ ID NO: 141383 - DNA, 25 bp, Saccharomyces pastorianus
tcctcaactactgatgaactcgata

SEQ ID NO: 141384 - DNA, 25 bp, Saccharomyces pastorianus
ctcttcttcctcaactactgatgaa

SEQ ID NO: 141385 - DNA, 25 bp, Saccharomyces pastorianus
aagacaaacacattcctcttcttcc

SEQ ID NO: 141386 - DNA, 25 bp, Saccharomyces pastorianus
aaaagggtcttgcagtcatgtgatc

SEQ ID NO: 141387 - DNA, 25 bp, Saccharomyces pastorianus
aaaaccgtacagtcgctaagcaaga

SEQ ID NO: 141388 - DNA, 25 bp, Saccharomyces pastorianus
gaaattgtccttggcttgggctggt

SEQ ID NO: 141389 - DNA, 25 bp, Saccharomyces pastorianus
acggcaggtccatttacgattttat

SEQ ID NO: 141390 - DNA, 25 bp, Saccharomyces pastorianus
taaattgggcaactctccatcagac

SEQ ID NO: 141391 - DNA, 25 bp, Saccharomyces pastorianus
gattttatgtgctccaacggcattg

SEQ ID NO: 141392 - DNA, 25 bp, Saccharomyces pastorianus
ttccattacgaatatcatcctcctg

SEQ ID NO: 141393 - DNA, 25 bp, Saccharomyces pastorianus
aggccattgccagacagctaatcag

SEQ ID NO: 141394 - DNA, 25 bp, Saccharomyces pastorianus
tcgtcactatagagccccggaaatt

SEQ ID NO: 141395 - DNA, 25 bp, Saccharomyces pastorianus
agatctgtctgcttcttgcacgatt

SEQ ID NO: 141396 - DNA, 25 bp, Saccharomyces pastorianus
atttcggtagcgcaattttccatta

SEQ ID NO: 141397 - DNA, 25 bp, Saccharomyces pastorianus
gtccatcgcgtgtgtcctagtagaa

SEQ ID NO: 141398 - DNA, 25 bp, Saccharomyces pastorianus
gagcttgttctcctttgtttgttac

SEQ ID NO: 141399 - DNA, 25 bp, Saccharomyces pastorianus
tttcgccagtccatgtttcagtgaa

SEQ ID NO: 141400 - DNA, 25 bp, Saccharomyces pastorianus
tattactccaagaagccatccagcg

SEQ ID NO: 141401 - DNA, 25 bp, Saccharomyces pastorianus
gttacaccatcttcaattacctgtt

SEQ ID NO: 141402 - DNA, 25 bp, Saccharomyces pastorianus
tcgaaaatccctggttctttggtga

SEQ ID NO: 141403 - DNA, 25 bp, Saccharomyces pastorianus
ataccctttgggataccgcattaag

SEQ ID NO: 141404 - DNA, 25 bp, Saccharomyces pastorianus
ttttcagacgcatcaaaggccccaa

SEQ ID NO: 141405 - DNA, 25 bp, Saccharomyces pastorianus
gccatccagcgcctttgaaagtgat

SEQ ID NO: 141406 - DNA, 25 bp, Saccharomyces pastorianus
ttggttcccataagatgttccccga

SEQ ID NO: 141407 - DNA, 25 bp, Saccharomyces pastorianus
taagagatcgccatttcctgttttc

SEQ ID NO: 141408 - DNA, 25 bp, Saccharomyces pastorianus
gagtatgcccatattgatgtcctat

SEQ ID NO: 141409 - DNA, 25 bp, Saccharomyces pastorianus
ggcaatggtgcacgttcttatagaa

SEQ ID NO: 141410 - DNA, 25 bp, Saccharomyces pastorianus
accttcgtcggtgaatcatctcaag

SEQ ID NO: 141411 - DNA, 25 bp, Saccharomyces pastorianus
caaacttgttgaatccatgaacgat

SEQ ID NO: 141412 - DNA, 25 bp, Saccharomyces pastorianus
aaaaccgaccgtattgcagatcaag

SEQ ID NO: 141413 - DNA, 25 bp, Saccharomyces pastorianus
gatctacctgcatagagttggtcgt

SEQ ID NO: 141414 - DNA, 25 bp, Saccharomyces pastorianus
cacttggtagaaacgtagactgggt

SEQ ID NO: 141415 - DNA, 25 bp, Saccharomyces pastorianus
gttgttatcaactacgatatgccca

SEQ ID NO: 141416 - DNA, 25 bp, Saccharomyces pastorianus
tgcccaagagttatgagatctacct

SEQ ID NO: 141417 - DNA, 25 bp, Saccharomyces pastorianus
gtccctaactcaaggtaaagcactt

SEQ ID NO: 141418 - DNA, 25 bp, Saccharomyces pastorianus
gatatccccaagattgaggttgtta

SEQ ID NO: 141419 - DNA, 25 bp, Saccharomyces pastorianus
gaagtattgtacgtgctgctataaa

SEQ ID NO: 141420 - DNA, 25 bp, Saccharomyces pastorianus
tgcctatccgtttcaattccgaaga

SEQ ID NO: 141421 - DNA, 25 bp, Saccharomyces pastorianus
ttcaattccgaagaaccgtcaacat

SEQ ID NO: 141422 - DNA, 25 bp, Saccharomyces pastorianus
tcactttctgcctatccgtttcaat

SEQ ID NO: 141423 - DNA, 25 bp, Saccharomyces pastorianus
actttctgcctatccgtttcaattc

SEQ ID NO: 141424 - DNA, 25 bp, Saccharomyces pastorianus
tatccgtttcaattccgaagaaccg

SEQ ID NO: 141425 - DNA, 25 bp, Saccharomyces pastorianus
tctgcctatccgtttcaattccgaa

SEQ ID NO: 141426 - DNA, 25 bp, Saccharomyces pastorianus
gcctatccgtttcaattccgaagaa

SEQ ID NO: 141427 - DNA, 25 bp, Saccharomyces pastorianus
ttcactttctgcctatccgtttcaa

SEQ ID NO: 141428 - DNA, 25 bp, Saccharomyces pastorianus
tttcaattccgaagaaccgtcaaca

SEQ ID NO: 141429 - DNA, 25 bp, Saccharomyces pastorianus
ttctgcctatccgtttcaattccga

SEQ ID NO: 141430 - DNA, 25 bp, Saccharomyces pastorianus
tttttcactttctgcctatccgttt

SEQ ID NO: 141431 - DNA, 25 bp, Saccharomyces pastorianus
gcccttgtatacatttcagtttact

SEQ ID NO: 141432 - DNA, 25 bp, Saccharomyces pastorianus
gttgcccttgtatacatttcagttt

SEQ ID NO: 141433 - DNA, 25 bp, Saccharomyces pastorianus
ccttgtatacatttcagtttacttc

SEQ ID NO: 141434 - DNA, 25 bp, Saccharomyces pastorianus
gggttgcccttgtatacatttcagt

SEQ ID NO: 141435 - DNA, 25 bp, Saccharomyces pastorianus
tcaatccaacgtggaacgggttgcc

SEQ ID NO: 141436 - DNA, 25 bp, Saccharomyces pastorianus
caattgagtcaatccaacgtggaac

SEQ ID NO: 141437 - DNA, 25 bp, Saccharomyces pastorianus
acgggttgcccttgtatacatttca

SEQ ID NO: 141438 - DNA, 25 bp, Saccharomyces pastorianus
gagtcaatccaacgtggaacgggtt

SEQ ID NO: 141439 - DNA, 25 bp, Saccharomyces pastorianus
gacacaattgagtcaatccaacgtg

SEQ ID NO: 141440 - DNA, 25 bp, Saccharomyces pastorianus
gtggaacgggttgcccttgtataca

SEQ ID NO: 141441 - DNA, 25 bp, Saccharomyces pastorianus
gaacgggttgcccttgtatacattt

SEQ ID NO: 141442 - DNA, 25 bp, Saccharomyces pastorianus
gggacaatatccttcattccttgaa

SEQ ID NO: 141443 - DNA, 25 bp, Saccharomyces pastorianus
aaatcacccgatctgcctgaatatt

SEQ ID NO: 141444 - DNA, 25 bp, Saccharomyces pastorianus
ggttaccaagtatgtggccacgtag

SEQ ID NO: 141445 - DNA, 25 bp, Saccharomyces pastorianus
caggcgtgtttgaccgtatctttaa

SEQ ID NO: 141446 - DNA, 25 bp, Saccharomyces pastorianus
cgatgcgttgaaccaagattccaat

SEQ ID NO: 141447 - DNA, 25 bp, Saccharomyces pastorianus
ggatacaggtgatgatttccccatt

SEQ ID NO: 141448 - DNA, 25 bp, Saccharomyces pastorianus
aggagtttgcttctacttcgaacgg

SEQ ID NO: 141449 - DNA, 25 bp, Saccharomyces pastorianus
tattcccaagatcggcagtgtcatt

SEQ ID NO: 141450 - DNA, 25 bp, Saccharomyces pastorianus
atttccccattttctcgaattgcag

SEQ ID NO: 141451 - DNA, 25 bp, Saccharomyces pastorianus
aagtcgctaattggctcacggtcta

SEQ ID NO: 141452 - DNA, 25 bp, Saccharomyces pastorianus
gattccaatttgtcaggttaccaag

SEQ ID NO: 141453 - DNA, 25 bp, Saccharomyces pastorianus
atgtcagtaaaaacgggagcttcaa

SEQ ID NO: 141454 - DNA, 25 bp, Saccharomyces pastorianus
gggttctactactaatgacttaaag

SEQ ID NO: 141455 - DNA, 25 bp, Saccharomyces pastorianus
gagcttcaaaggtctcgatgatgca

SEQ ID NO: 141456 - DNA, 25 bp, Saccharomyces pastorianus
aacaactcagagtttaatgtcagta

SEQ ID NO: 141457 - DNA, 25 bp, Saccharomyces pastorianus
acggattcgttaatgacgtttgacg

SEQ ID NO: 141458 - DNA, 25 bp, Saccharomyces pastorianus
ttacagagactaatcatggagaatt

SEQ ID NO: 141459 - DNA, 25 bp, Saccharomyces pastorianus
gaatttgaagggttctactactaat

SEQ ID NO: 141460 - DNA, 25 bp, Saccharomyces pastorianus
gcaaacttcaaacaactcagagttt

SEQ ID NO: 141461 - DNA, 25 bp, Saccharomyces pastorianus
tgacgtttgacgattatataagcaa

SEQ ID NO: 141462 - DNA, 25 bp, Saccharomyces pastorianus
gagctacctgaacatttacagagac

SEQ ID NO: 141463 - DNA, 25 bp, Saccharomyces pastorianus
gtgagaatgaatccaccgaaacgga

SEQ ID NO: 141464 - DNA, 25 bp, Saccharomyces pastorianus
gctgtaccttttagcctaagcgcca

SEQ ID NO: 141465 - DNA, 25 bp, Saccharomyces pastorianus
gccaattctcctaaaatcgatcaag

SEQ ID NO: 141466 - DNA, 25 bp, Saccharomyces pastorianus
gtaccttttagcctaagcgccaatt

SEQ ID NO: 141467 - DNA, 25 bp, Saccharomyces pastorianus
tctcctaaaatcgatcaagatatgg

SEQ ID NO: 141468 - DNA, 25 bp, Saccharomyces pastorianus
gtagaatacccgctgtaccttttag

SEQ ID NO: 141469 - DNA, 25 bp, Saccharomyces pastorianus
agcgccaattctcctaaaatcgatc

SEQ ID NO: 141470 - DNA, 25 bp, Saccharomyces pastorianus
tacccgctgtaccttttagcctaag

SEQ ID NO: 141471 - DNA, 25 bp, Saccharomyces pastorianus
accttttagcctaagcgccaattct

SEQ ID NO: 141472 - DNA, 25 bp, Saccharomyces pastorianus
tagcctaagcgccaattctcctaaa

SEQ ID NO: 141473 - DNA, 25 bp, Saccharomyces pastorianus
ctaagcgccaattctcctaaaatcg

SEQ ID NO: 141474 - DNA, 25 bp, Saccharomyces pastorianus
tttggtagaatacccgctgtacctt

SEQ ID NO: 141475 - DNA, 25 bp, Saccharomyces pastorianus
gggcaaattcggcacgacaaataaa

SEQ ID NO: 141476 - DNA, 25 bp, Saccharomyces pastorianus
cggagaatcttctgcgtgataaatt

SEQ ID NO: 141477 - DNA, 25 bp, Saccharomyces pastorianus
atcttctgcgtgataaattcgtacc

SEQ ID NO: 141478 - DNA, 25 bp, Saccharomyces pastorianus
attcggcacgacaaataaatcaacg

SEQ ID NO: 141479 - DNA, 25 bp, Saccharomyces pastorianus
taaattcgtacccgagacatctcca

SEQ ID NO: 141480 - DNA, 25 bp, Saccharomyces pastorianus
caacggagaatcttctgcgtgataa

SEQ ID NO: 141481 - DNA, 25 bp, Saccharomyces pastorianus
gtgataaattcgtacccgagacatc

SEQ ID NO: 141482 - DNA, 25 bp, Saccharomyces pastorianus
ctgcgtgataaattcgtacccgaga

SEQ ID NO: 141483 - DNA, 25 bp, Saccharomyces pastorianus
taaatcaacggagaatcttctgcgt

SEQ ID NO: 141484 - DNA, 25 bp, Saccharomyces pastorianus
ttctgcgtgataaattcgtacccga

SEQ ID NO: 141485 - DNA, 25 bp, Saccharomyces pastorianus
atcaacggagaatcttctgcgtgat

SEQ ID NO: 141486 - DNA, 25 bp, Saccharomyces pastorianus
gggcactttatgagctggagaataa

SEQ ID NO: 141487 - DNA, 25 bp, Saccharomyces pastorianus
acctcgtgaagcgtatttttcattc

SEQ ID NO: 141488 - DNA, 25 bp, Saccharomyces pastorianus
ggcacaagagcattggaaacactta

SEQ ID NO: 141489 - DNA, 25 bp, Saccharomyces pastorianus
ggttagcagatcaggcctttttgaa

SEQ ID NO: 141490 - DNA, 25 bp, Saccharomyces pastorianus
cgctcgttccaacaatggataactt

SEQ ID NO: 141491 - DNA, 25 bp, Saccharomyces pastorianus
gattcgaagaccatctgcatttgta

SEQ ID NO: 141492 - DNA, 25 bp, Saccharomyces pastorianus
gcgtttttgagaagatgtggctgaa

SEQ ID NO: 141493 - DNA, 25 bp, Saccharomyces pastorianus
aaaccggtcatttcaacatagtcaa

SEQ ID NO: 141494 - DNA, 25 bp, Saccharomyces pastorianus
atcagacacttttgaggtgcgtttt

SEQ ID NO: 141495 - DNA, 25 bp, Saccharomyces pastorianus
gaggctaacctcgtgaagcgtattt

SEQ ID NO: 141496 - DNA, 25 bp, Saccharomyces pastorianus
aactcttaaggagcagtcaaggtta

SEQ ID NO: 141497 - DNA, 25 bp, Saccharomyces pastorianus
gttcgcgaagaatttgtgttagtca

SEQ ID NO: 141498 - DNA, 25 bp, Saccharomyces pastorianus
gaatgtaacattcaggctatttcaa

SEQ ID NO: 141499 - DNA, 25 bp, Saccharomyces pastorianus
ctcaaccataccaggctcagaaaga

SEQ ID NO: 141500 - DNA, 25 bp, Saccharomyces pastorianus
cttctagtgttcttgattctacagc

SEQ ID NO: 141501 - DNA, 25 bp, Saccharomyces pastorianus
agatcagactctcaaaacgcctcaa

SEQ ID NO: 141502 - DNA, 25 bp, Saccharomyces pastorianus
gagacagtcgaggtttttcgtcatc

SEQ ID NO: 141503 - DNA, 25 bp, Saccharomyces pastorianus
tttcgtcatcggtgggacagggcca

SEQ ID NO: 141504 - DNA, 25 bp, Saccharomyces pastorianus
ggaaggacttcaatcttaaacatga

SEQ ID NO: 141505 - DNA, 25 bp, Saccharomyces pastorianus
accaagtccggtgaaatcttctagt

SEQ ID NO: 141506 - DNA, 25 bp, Saccharomyces pastorianus
gaagtcgcattatagcagggcaaga

SEQ ID NO: 141507 - DNA, 25 bp, Saccharomyces pastorianus
aagaattagcagacgaagttcgcga

SEQ ID NO: 141508 - DNA, 25 bp, Saccharomyces pastorianus
caaatatcagatttttcactgggcg

SEQ ID NO: 141509 - DNA, 25 bp, Saccharomyces pastorianus
atgatgatggtatcgacgcagaatc

SEQ ID NO: 141510 - DNA, 25 bp, Saccharomyces pastorianus
gattggtaaccaaactctacaaaga

SEQ ID NO: 141511 - DNA, 25 bp, Saccharomyces pastorianus
aagggtcaacctgtgttcgatgcat

SEQ ID NO: 141512 - DNA, 25 bp, Saccharomyces pastorianus
aagaaaagatccattgccggtgatg

SEQ ID NO: 141513 - DNA, 25 bp, Saccharomyces pastorianus
acctgtgttcgatgcatcagacaag

SEQ ID NO: 141514 - DNA, 25 bp, Saccharomyces pastorianus
aggcagttatgtgtttactcgtcaa

SEQ ID NO: 141515 - DNA, 25 bp, Saccharomyces pastorianus
atggtacttcatctatatcttcgaa

SEQ ID NO: 141516 - DNA, 25 bp, Saccharomyces pastorianus
gatgaccttgaaaacgctgaacctc

SEQ ID NO: 141517 - DNA, 25 bp, Saccharomyces pastorianus
ttcactgggcgatatagatgacctt

SEQ ID NO: 141518 - DNA, 25 bp, Saccharomyces pastorianus
gaggatcaaactttagctcaagata

SEQ ID NO: 141519 - DNA, 25 bp, Saccharomyces pastorianus
ccattttagctgttgttgggtcaca

SEQ ID NO: 141520 - DNA, 25 bp, Saccharomyces pastorianus
ctcgatttgcccattttagctgttg

SEQ ID NO: 141521 - DNA, 25 bp, Saccharomyces pastorianus
tgttgggtcacaatcctccgggaaa

SEQ ID NO: 141522 - DNA, 25 bp, Saccharomyces pastorianus
ataacatatctccaaattctcctct

SEQ ID NO: 141523 - DNA, 25 bp, Saccharomyces pastorianus
gataactcagttaatccacatgatg

SEQ ID NO: 141524 - DNA, 25 bp, Saccharomyces pastorianus
atcctccgggaaatcctcgatattg

SEQ ID NO: 141525 - DNA, 25 bp, Saccharomyces pastorianus
agctggtacgaagcccttggagtat

SEQ ID NO: 141526 - DNA, 25 bp, Saccharomyces pastorianus
ttgtcacaagaagaccgttagttct

SEQ ID NO: 141527 - DNA, 25 bp, Saccharomyces pastorianus
gggagttcctgcatataccaggaaa

SEQ ID NO: 141528 - DNA, 25 bp, Saccharomyces pastorianus
atatcaggattcgaagctggtacga

SEQ ID NO: 141529 - DNA, 25 bp, Saccharomyces pastorianus
ttattcctactgtcaacaagctgca

SEQ ID NO: 141530 - DNA, 25 bp, Saccharomyces pastorianus
gtcctctgccaagtcttgaaaacct

SEQ ID NO: 141531 - DNA, 25 bp, Saccharomyces pastorianus
atcattcgagaatgcagccgtcctc

SEQ ID NO: 141532 - DNA, 25 bp, Saccharomyces pastorianus
tgacttgcttttccaaggtaaggaa

SEQ ID NO: 141533 - DNA, 25 bp, Saccharomyces pastorianus
agaatgcagccgtcctctgccaagt

SEQ ID NO: 141534 - DNA, 25 bp, Saccharomyces pastorianus
tgccaagtcttgaaaacctttttga

SEQ ID NO: 141535 - DNA, 25 bp, Saccharomyces pastorianus
aaagttagatatcattcttgatgca

SEQ ID NO: 141536 - DNA, 25 bp, Saccharomyces pastorianus
gaagctactgacttgcttttccaag

SEQ ID NO: 141537 - DNA, 25 bp, Saccharomyces pastorianus
aaaattatagaagctactgacttgc

SEQ ID NO: 141538 - DNA, 25 bp, Saccharomyces pastorianus
gctactgacttgcttttccaaggta

SEQ ID NO: 141539 - DNA, 25 bp, Saccharomyces pastorianus
attcgagaatgcagccgtcctctgc

SEQ ID NO: 141540 - DNA, 25 bp, Saccharomyces pastorianus
gccgtcctctgccaagtcttgaaaa

SEQ ID NO: 141541 - DNA, 25 bp, Saccharomyces pastorianus
gaacatgaagtaatttttgacgcca

SEQ ID NO: 141542 - DNA, 25 bp, Saccharomyces pastorianus
gcacttccagcaagttcaccagaaa

SEQ ID NO: 141543 - DNA, 25 bp, Saccharomyces pastorianus
gaaagccagtatatcgtctcacaac

SEQ ID NO: 141544 - DNA, 25 bp, Saccharomyces pastorianus
gtctcacaacgaaaagcacttccag

SEQ ID NO: 141545 - DNA, 25 bp, Saccharomyces pastorianus
gatggactcgcctatgattttgatg

SEQ ID NO: 141546 - DNA, 25 bp, Saccharomyces pastorianus
cgcctatgattttgatgccgaacat

SEQ ID NO: 141547 - DNA, 25 bp, Saccharomyces pastorianus
atgatttagatgatggactcgccta

SEQ ID NO: 141548 - DNA, 25 bp, Saccharomyces pastorianus
gaagatgattcgaatagacctattt

SEQ ID NO: 141549 - DNA, 25 bp, Saccharomyces pastorianus
gaggtctatagaacaagatgacgtt

SEQ ID NO: 141550 - DNA, 25 bp, Saccharomyces pastorianus
tttgacgccaaggatggtagtcccc

SEQ ID NO: 141551 - DNA, 25 bp, Saccharomyces pastorianus
tattgagtacctaacaactttgata

SEQ ID NO: 141552 - DNA, 25 bp, Saccharomyces pastorianus
atcactggtacttttggtttcgaca

SEQ ID NO: 141553 - DNA, 25 bp, Saccharomyces pastorianus
tataggttgtatcgttcttatcagt

SEQ ID NO: 141554 - DNA, 25 bp, Saccharomyces pastorianus
ggtgccattggtacattttcagtga

SEQ ID NO: 141555 - DNA, 25 bp, Saccharomyces pastorianus
tatcagtttacccttatcccataag

SEQ ID NO: 141556 - DNA, 25 bp, Saccharomyces pastorianus
acttattttctctgtacttgcttta

SEQ ID NO: 141557 - DNA, 25 bp, Saccharomyces pastorianus
gatgtttagggcatactcagctcca

SEQ ID NO: 141558 - DNA, 25 bp, Saccharomyces pastorianus
aatgtctcctgtattattgctccac

SEQ ID NO: 141559 - DNA, 25 bp, Saccharomyces pastorianus
acaactcaaatgttgtcccgctggg

SEQ ID NO: 141560 - DNA, 25 bp, Saccharomyces pastorianus
gttctcaaatttctactggtgccat

SEQ ID NO: 141561 - DNA, 25 bp, Saccharomyces pastorianus
gggtcatatcacactcataaccaca

SEQ ID NO: 141562 - DNA, 25 bp, Saccharomyces pastorianus
tcagtgtgtttgtgttcccctacaa

SEQ ID NO: 141563 - DNA, 25 bp, Saccharomyces pastorianus
gtcacaacgatccatggacgtggag

SEQ ID NO: 141564 - DNA, 25 bp, Saccharomyces pastorianus
aacgatccatggacgtggagaagaa

SEQ ID NO: 141565 - DNA, 25 bp, Saccharomyces pastorianus
tgtcacaacgatccatggacgtgga

SEQ ID NO: 141566 - DNA, 25 bp, Saccharomyces pastorianus
gagaagaaggcagctaacgctgata

SEQ ID NO: 141567 - DNA, 25 bp, Saccharomyces pastorianus
acaacgatccatggacgtggagaag

SEQ ID NO: 141568 - DNA, 25 bp, Saccharomyces pastorianus
atgtcacaacgatccatggacgtgg

SEQ ID NO: 141569 - DNA, 25 bp, Saccharomyces pastorianus
aacatgtcacaacgatccatggacg

SEQ ID NO: 141570 - DNA, 25 bp, Saccharomyces pastorianus
acatgtcacaacgatccatggacgt

SEQ ID NO: 141571 - DNA, 25 bp, Saccharomyces pastorianus
cgtggagaagaaggcagctaacgct

SEQ ID NO: 141572 - DNA, 25 bp, Saccharomyces pastorianus
gaagaaggcagctaacgctgatagt

SEQ ID NO: 141573 - DNA, 25 bp, Saccharomyces pastorianus
tcacaacgatccatggacgtggaga

SEQ ID NO: 141574 - DNA, 25 bp, Saccharomyces pastorianus
aaccctcactcattcaaacaagcga

SEQ ID NO: 141575 - DNA, 25 bp, Saccharomyces pastorianus
aggcgcccgtgattattgtagcatt

SEQ ID NO: 141576 - DNA, 25 bp, Saccharomyces pastorianus
tctcaataactcacactccaatctt

SEQ ID NO: 141577 - DNA, 25 bp, Saccharomyces pastorianus
aaacaagcgacatctatgaccccta

SEQ ID NO: 141578 - DNA, 25 bp, Saccharomyces pastorianus
aaagccggatgaccgacagtgtttt

SEQ ID NO: 141579 - DNA, 25 bp, Saccharomyces pastorianus
ttgtagcattgaccgcatctaactc

SEQ ID NO: 141580 - DNA, 25 bp, Saccharomyces pastorianus
aaagagattctctcaggcgcccgtg

SEQ ID NO: 141581 - DNA, 25 bp, Saccharomyces pastorianus
agctgcctgtcttgtcttttataga

SEQ ID NO: 141582 - DNA, 25 bp, Saccharomyces pastorianus
atctccacagaaacctattgcacct

SEQ ID NO: 141583 - DNA, 25 bp, Saccharomyces pastorianus
gtaacgactacctgactaaaccagt

SEQ ID NO: 141584 - DNA, 25 bp, Saccharomyces pastorianus
aaagcacttctttctggttgtaacg

SEQ ID NO: 141585 - DNA, 25 bp, Saccharomyces pastorianus
atgaagactgtctattacaaagaaa

SEQ ID NO: 141586 - DNA, 25 bp, Saccharomyces pastorianus
aagaagttgcttggttcgatcgcgt

SEQ ID NO: 141587 - DNA, 25 bp, Saccharomyces pastorianus
aaagaattgcatttgatcgtcaagg

SEQ ID NO: 141588 - DNA, 25 bp, Saccharomyces pastorianus
tacaaagaaatcacctaccagcagt

SEQ ID NO: 141589 - DNA, 25 bp, Saccharomyces pastorianus
gatcgcgttacaacatggtcatata

SEQ ID NO: 141590 - DNA, 25 bp, Saccharomyces pastorianus
aatcacctaccagcagtatcttcaa

SEQ ID NO: 141591 - DNA, 25 bp, Saccharomyces pastorianus
gaatgcttatattccgagctacaga

SEQ ID NO: 141592 - DNA, 25 bp, Saccharomyces pastorianus
gtatcttcaactgcaacctgaacaa

SEQ ID NO: 141593 - DNA, 25 bp, Saccharomyces pastorianus
gcttggttcgatcgcgttacaacat

SEQ ID NO: 141594 - DNA, 25 bp, Saccharomyces pastorianus
ggaaaaatacctggctttatgtcaa

SEQ ID NO: 141595 - DNA, 25 bp, Saccharomyces pastorianus
tgtgcctggtattgctaggaaattt

SEQ ID NO: 141596 - DNA, 25 bp, Saccharomyces pastorianus
tcaggcaaaccgcatgtcaagttat

SEQ ID NO: 141597 - DNA, 25 bp, Saccharomyces pastorianus
ttgtcaggtctggtaacggaaacga

SEQ ID NO: 141598 - DNA, 25 bp, Saccharomyces pastorianus
aagcaccttttgatatacctctaga

SEQ ID NO: 141599 - DNA, 25 bp, Saccharomyces pastorianus
aggcgagtcttcttacgatatcagt

SEQ ID NO: 141600 - DNA, 25 bp, Saccharomyces pastorianus
ggttacttcgggatctgtatgggat

SEQ ID NO: 141601 - DNA, 25 bp, Saccharomyces pastorianus
gtgcttctacaaatacgtcttctgc

SEQ ID NO: 141602 - DNA, 25 bp, Saccharomyces pastorianus
ttgcgaatctgcgaaaacctgttac

SEQ ID NO: 141603 - DNA, 25 bp, Saccharomyces pastorianus
tttgacgacggtacttttgataaca

SEQ ID NO: 141604 - DNA, 25 bp, Saccharomyces pastorianus
gcattgaattgccagtcgtatacca

SEQ ID NO: 141605 - DNA, 25 bp, Saccharomyces pastorianus
acacagcaatgtttcccagtttaat

SEQ ID NO: 141606 - DNA, 25 bp, Saccharomyces pastorianus
gatatccttttccaggttacttcgg

SEQ ID NO: 141607 - DNA, 25 bp, Saccharomyces pastorianus
gacaggcataaatagcgcgttcgaa

SEQ ID NO: 141608 - DNA, 25 bp, Saccharomyces pastorianus
tgatccattggaactaccacctcga

SEQ ID NO: 141609 - DNA, 25 bp, Saccharomyces pastorianus
aaaaagtcaacatgcgtccgatagt

SEQ ID NO: 141610 - DNA, 25 bp, Saccharomyces pastorianus
agattgacgtatgctcttccgagga

SEQ ID NO: 141611 - DNA, 25 bp, Saccharomyces pastorianus
gattcatcgggtatttcctttgcga

SEQ ID NO: 141612 - DNA, 25 bp, Saccharomyces pastorianus
tgcgaaattagtcttcacggcaact

SEQ ID NO: 141613 - DNA, 25 bp, Saccharomyces pastorianus
ggtccctggaatcccaatattgcat

SEQ ID NO: 141614 - DNA, 25 bp, Saccharomyces pastorianus
ttaccagtgcttttagtgcgcatac

SEQ ID NO: 141615 - DNA, 25 bp, Saccharomyces pastorianus
gaacctatttatggtccctggaatc

SEQ ID NO: 141616 - DNA, 25 bp, Saccharomyces pastorianus
gatactaattcccagttacctttgc

SEQ ID NO: 141617 - DNA, 25 bp, Saccharomyces pastorianus
acaggcagccctatgacttcagatg

SEQ ID NO: 141618 - DNA, 25 bp, Saccharomyces pastorianus
gcaacatgctgttccgatatcttct

SEQ ID NO: 141619 - DNA, 25 bp, Saccharomyces pastorianus
atcatcttagataattcgccggcct

SEQ ID NO: 141620 - DNA, 25 bp, Saccharomyces pastorianus
tgacgcatttgcaaccagaccagta

SEQ ID NO: 141621 - DNA, 25 bp, Saccharomyces pastorianus
atcccacttttggaggacctttcat

SEQ ID NO: 141622 - DNA, 25 bp, Saccharomyces pastorianus
gccaggcgtcgatgagttcttgaac

SEQ ID NO: 141623 - DNA, 25 bp, Saccharomyces pastorianus
gcattcagctgatttcgttttgccc

SEQ ID NO: 141624 - DNA, 25 bp, Saccharomyces pastorianus
gttggaccctaatggaaccatccat

SEQ ID NO: 141625 - DNA, 25 bp, Saccharomyces pastorianus
atacgaagttgttgtgttcacggca

SEQ ID NO: 141626 - DNA, 25 bp, Saccharomyces pastorianus
ttacatctttcatccgcaacatgct

SEQ ID NO: 141627 - DNA, 25 bp, Saccharomyces pastorianus
tcttcttggttctctgatactcatg

SEQ ID NO: 141628 - DNA, 25 bp, Saccharomyces pastorianus
acggaggaggacttctctgacctga

SEQ ID NO: 141629 - DNA, 25 bp, Saccharomyces pastorianus
gatcgtttatacctcttatgatgac

SEQ ID NO: 141630 - DNA, 25 bp, Saccharomyces pastorianus
caaaaggtattgattctccgtggta

SEQ ID NO: 141631 - DNA, 25 bp, Saccharomyces pastorianus
aagacatggtttcctattgccaaga

SEQ ID NO: 141632 - DNA, 25 bp, Saccharomyces pastorianus
aaatttcttattttcaccagtccat

SEQ ID NO: 141633 - DNA, 25 bp, Saccharomyces pastorianus
aatgcaatggtggttgtcacctctt

SEQ ID NO: 141634 - DNA, 25 bp, Saccharomyces pastorianus
tgattctccgtggtactttggtaga

SEQ ID NO: 141635 - DNA, 25 bp, Saccharomyces pastorianus
tacctatttgattggaacgatgtct

SEQ ID NO: 141636 - DNA, 25 bp, Saccharomyces pastorianus
ttcgttcctctcatacatcatgttt

SEQ ID NO: 141637 - DNA, 25 bp, Saccharomyces pastorianus
aagattttttcgttcctctcataca

SEQ ID NO: 141638 - DNA, 25 bp, Saccharomyces pastorianus
gttgtcacctcttcctaataagcta

SEQ ID NO: 141639 - DNA, 25 bp, Saccharomyces pastorianus
accagtccatatttccgtcaaacta

SEQ ID NO: 141640 - DNA, 25 bp, Saccharomyces pastorianus
tcactacctagtgttccaagtaata

SEQ ID NO: 141641 - DNA, 25 bp, Saccharomyces pastorianus
atgcggcgcctatctcagagaacaa

SEQ ID NO: 141642 - DNA, 25 bp, Saccharomyces pastorianus
atgaagatgagctggacgaggaatt

SEQ ID NO: 141643 - DNA, 25 bp, Saccharomyces pastorianus
taataatgttaatgcggcgcctatc

SEQ ID NO: 141644 - DNA, 25 bp, Saccharomyces pastorianus
ctatgcaggaaggtgctaaggcaat

SEQ ID NO: 141645 - DNA, 25 bp, Saccharomyces pastorianus
gacgctatatccaggcctttaatta

SEQ ID NO: 141646 - DNA, 25 bp, Saccharomyces pastorianus
cgaggaattggacatgctggctcaa

SEQ ID NO: 141647 - DNA, 25 bp, Saccharomyces pastorianus
ataagcgacgctatatccaggcctt

SEQ ID NO: 141648 - DNA, 25 bp, Saccharomyces pastorianus
gaaaactattcacagtggccttgac

SEQ ID NO: 141649 - DNA, 25 bp, Saccharomyces pastorianus
gagaacaaagtctcactacctagtg

SEQ ID NO: 141650 - DNA, 25 bp, Saccharomyces pastorianus
ttcacagtggccttgacatagataa

SEQ ID NO: 141651 - DNA, 25 bp, Saccharomyces pastorianus
aaagcaatcgcatttacgtactcaa

SEQ ID NO: 141652 - DNA, 25 bp, Saccharomyces pastorianus
catagtgcggttgagggagcatatc

SEQ ID NO: 141653 - DNA, 25 bp, Saccharomyces pastorianus
aagagtcaccaacaaaggccatagt

SEQ ID NO: 141654 - DNA, 25 bp, Saccharomyces pastorianus
gcaatcgcatttacgtactcaaatt

SEQ ID NO: 141655 - DNA, 25 bp, Saccharomyces pastorianus
aacaaaggccatagtgcggttgagg

SEQ ID NO: 141656 - DNA, 25 bp, Saccharomyces pastorianus
gggcaataaagtaatggcgaagaat

SEQ ID NO: 141657 - DNA, 25 bp, Saccharomyces pastorianus
gcatttacgtactcaaattacaaat

SEQ ID NO: 141658 - DNA, 25 bp, Saccharomyces pastorianus
ttctatccaaaaagcaatcgcattt

SEQ ID NO: 141659 - DNA, 25 bp, Saccharomyces pastorianus
gtcaccaacaaaggccatagtgcgg

SEQ ID NO: 141660 - DNA, 25 bp, Saccharomyces pastorianus
gtaatgccaagaataaagagtcacc

SEQ ID NO: 141661 - DNA, 25 bp, Saccharomyces pastorianus
gtaatggcgaagaatgcacttaaaa

SEQ ID NO: 141662 - DNA, 25 bp, Saccharomyces pastorianus
ggacaaagttgtcttccaagcggcg

SEQ ID NO: 141663 - DNA, 25 bp, Saccharomyces pastorianus
acaaagttgtcttccaagcggcgga

SEQ ID NO: 141664 - DNA, 25 bp, Saccharomyces pastorianus
agcggcggattcatttgatatcgtc

SEQ ID NO: 141665 - DNA, 25 bp, Saccharomyces pastorianus
caaagttgtcttccaagcggcggat

SEQ ID NO: 141666 - DNA, 25 bp, Saccharomyces pastorianus
aaagttgtcttccaagcggcggatt

SEQ ID NO: 141667 - DNA, 25 bp, Saccharomyces pastorianus
gcggcggattcatttgatatcgtct

SEQ ID NO: 141668 - DNA, 25 bp, Saccharomyces pastorianus
ggcggattcatttgatatcgtctac

SEQ ID NO: 141669 - DNA, 25 bp, Saccharomyces pastorianus
aagttgtcttccaagcggcggattc

SEQ ID NO: 141670 - DNA, 25 bp, Saccharomyces pastorianus
agttgtcttccaagcggcggattca

SEQ ID NO: 141671 - DNA, 25 bp, Saccharomyces pastorianus
cggcggattcatttgatatcgtcta

SEQ ID NO: 141672 - DNA, 25 bp, Saccharomyces pastorianus
gacaaagttgtcttccaagcggcgg

SEQ ID NO: 141673 - DNA, 25 bp, Saccharomyces pastorianus
gttcaagcacgtttctccagcaggt

SEQ ID NO: 141674 - DNA, 25 bp, Saccharomyces pastorianus
aagtgctctgcggtacaccaggata

SEQ ID NO: 141675 - DNA, 25 bp, Saccharomyces pastorianus
atgcgcatacgctagggcccgtggt

SEQ ID NO: 141676 - DNA, 25 bp, Saccharomyces pastorianus
gtcatcctttggtgatttcattgca

SEQ ID NO: 141677 - DNA, 25 bp, Saccharomyces pastorianus
gtgggacttccattatccgatgtgg

SEQ ID NO: 141678 - DNA, 25 bp, Saccharomyces pastorianus
tatgatgcggccatttctgactttt

SEQ ID NO: 141679 - DNA, 25 bp, Saccharomyces pastorianus
gggaaagcccaattaccgctaagat

SEQ ID NO: 141680 - DNA, 25 bp, Saccharomyces pastorianus
gaggagttgcccttcaaagtgctct

SEQ ID NO: 141681 - DNA, 25 bp, Saccharomyces pastorianus
gatatggttgtaatccccaccaaag

SEQ ID NO: 141682 - DNA, 25 bp, Saccharomyces pastorianus
agcaggtgctgctgtgggacttcca

SEQ ID NO: 141683 - DNA, 25 bp, Saccharomyces pastorianus
taaggcgtttgaacatacggccgat

SEQ ID NO: 141684 - DNA, 25 bp, Saccharomyces pastorianus
ttccaattaatacgcttactcaagg

SEQ ID NO: 141685 - DNA, 25 bp, Saccharomyces pastorianus
atgtgtttccaattaatacgcttac

SEQ ID NO: 141686 - DNA, 25 bp, Saccharomyces pastorianus
attagacagagaaaacaacacacaa

SEQ ID NO: 141687 - DNA, 25 bp, Saccharomyces pastorianus
tgtgtttccaattaatacgcttact

SEQ ID NO: 141688 - DNA, 25 bp, Saccharomyces pastorianus
caattaatacgcttactcaaggaat

SEQ ID NO: 141689 - DNA, 25 bp, Saccharomyces pastorianus
acgcttactcaaggaattagacaga

SEQ ID NO: 141690 - DNA, 25 bp, Saccharomyces pastorianus
gtttccaattaatacgcttactcaa

SEQ ID NO: 141691 - DNA, 25 bp, Saccharomyces pastorianus
gtgtttccaattaatacgcttactc

SEQ ID NO: 141692 - DNA, 25 bp, Saccharomyces pastorianus
ttaatacgcttactcaaggaattag

SEQ ID NO: 141693 - DNA, 25 bp, Saccharomyces pastorianus
gaattagacagagaaaacaacacac

SEQ ID NO: 141694 - DNA, 25 bp, Saccharomyces pastorianus
atacgcttactcaaggaattagaca

SEQ ID NO: 141695 - DNA, 25 bp, Saccharomyces pastorianus
attacgtcgtatactctttggaaga

SEQ ID NO: 141696 - DNA, 25 bp, Saccharomyces pastorianus
aaaagccactagtttccattccaat

SEQ ID NO: 141697 - DNA, 25 bp, Saccharomyces pastorianus
tgacaacaccgatcctgagcataat

SEQ ID NO: 141698 - DNA, 25 bp, Saccharomyces pastorianus
tagttcaaggccataattacgtcgt

SEQ ID NO: 141699 - DNA, 25 bp, Saccharomyces pastorianus
tactgcgaagcgactctttggatga

SEQ ID NO: 141700 - DNA, 25 bp, Saccharomyces pastorianus
gggctggcaaaccttaactttgttg

SEQ ID NO: 141701 - DNA, 25 bp, Saccharomyces pastorianus
atttgtatccaatatcaaccacccc

SEQ ID NO: 141702 - DNA, 25 bp, Saccharomyces pastorianus
tcactgcatttttaacgcgcgattt

SEQ ID NO: 141703 - DNA, 25 bp, Saccharomyces pastorianus
aacgcgcgattttccaaattggtgg

SEQ ID NO: 141704 - DNA, 25 bp, Saccharomyces pastorianus
aaacaccaaatatacctcgaccaat

SEQ ID NO: 141705 - DNA, 25 bp, Saccharomyces pastorianus
aacagctacaacacatacacttcac

SEQ ID NO: 141706 - DNA, 25 bp, Saccharomyces pastorianus
gggagatgatctacattttaagaaa

SEQ ID NO: 141707 - DNA, 25 bp, Saccharomyces pastorianus
gctaaaatgcttggcgtacttctgt

SEQ ID NO: 141708 - DNA, 25 bp, Saccharomyces pastorianus
ctgttagtgtttttaaattacgatg

SEQ ID NO: 141709 - DNA, 25 bp, Saccharomyces pastorianus
ttagcactctgtatcgaagaaaatg

SEQ ID NO: 141710 - DNA, 25 bp, Saccharomyces pastorianus
gaaagatttgggagatgatctacat

SEQ ID NO: 141711 - DNA, 25 bp, Saccharomyces pastorianus
gagatttattagcactctgtatcga

SEQ ID NO: 141712 - DNA, 25 bp, Saccharomyces pastorianus
ctgtatcgaagaaaatgaggctaaa

SEQ ID NO: 141713 - DNA, 25 bp, Saccharomyces pastorianus
ttattagcactctgtatcgaagaaa

SEQ ID NO: 141714 - DNA, 25 bp, Saccharomyces pastorianus
tgaggctaaaatgcttggcgtactt

SEQ ID NO: 141715 - DNA, 25 bp, Saccharomyces pastorianus
gatttattagcactctgtatcgaag

SEQ ID NO: 141716 - DNA, 25 bp, Saccharomyces pastorianus
aggctaaaatgcttggcgtacttct

SEQ ID NO: 141717 - DNA, 25 bp, Saccharomyces pastorianus
gcaccgcgtaaactctcttaacata

SEQ ID NO: 141718 - DNA, 25 bp, Saccharomyces pastorianus
aaagttataaacgtgccgctgcagt

SEQ ID NO: 141719 - DNA, 25 bp, Saccharomyces pastorianus
ggaagcgcagtctaaattgaacgaa

SEQ ID NO: 141720 - DNA, 25 bp, Saccharomyces pastorianus
agctgtctgatagagtactgtcact

SEQ ID NO: 141721 - DNA, 25 bp, Saccharomyces pastorianus
tcttccaccgtgtcaagcaactatg

SEQ ID NO: 141722 - DNA, 25 bp, Saccharomyces pastorianus
tacgatttcatcatactccatacct

SEQ ID NO: 141723 - DNA, 25 bp, Saccharomyces pastorianus
gctgcagtgacatctaccctaaagg

SEQ ID NO: 141724 - DNA, 25 bp, Saccharomyces pastorianus
agcagtgtctccgacgatttggata

SEQ ID NO: 141725 - DNA, 25 bp, Saccharomyces pastorianus
cttccgctttgccatttaaggagga

SEQ ID NO: 141726 - DNA, 25 bp, Saccharomyces pastorianus
taaaatctttatcttccgctttgcc

SEQ ID NO: 141727 - DNA, 25 bp, Saccharomyces pastorianus
aagatcaagcgagtccatcggcgac

SEQ ID NO: 141728 - DNA, 25 bp, Saccharomyces pastorianus
tcattgctcaatcggtgcttctatt

SEQ ID NO: 141729 - DNA, 25 bp, Saccharomyces pastorianus
ctcgatttcgactttcattgctcaa

SEQ ID NO: 141730 - DNA, 25 bp, Saccharomyces pastorianus
tggacacattttcctttcgttttag

SEQ ID NO: 141731 - DNA, 25 bp, Saccharomyces pastorianus
tgcccgcggtttgatgtggacacat

SEQ ID NO: 141732 - DNA, 25 bp, Saccharomyces pastorianus
acatgattgggcgtgtcctacaggc

SEQ ID NO: 141733 - DNA, 25 bp, Saccharomyces pastorianus
gtacagtttctttcgtagtggcaga

SEQ ID NO: 141734 - DNA, 25 bp, Saccharomyces pastorianus
atactgggcgtatcctaattattgt

SEQ ID NO: 141735 - DNA, 25 bp, Saccharomyces pastorianus
ggcacgtctaattcttatggaggca

SEQ ID NO: 141736 - DNA, 25 bp, Saccharomyces pastorianus
atagtctttatcaatagcccctcga

SEQ ID NO: 141737 - DNA, 25 bp, Saccharomyces pastorianus
attgatagcaccttcactttacgcc

SEQ ID NO: 141738 - DNA, 25 bp, Saccharomyces pastorianus
aggtgggttgttatcctcatggaac

SEQ ID NO: 141739 - DNA, 25 bp, Saccharomyces pastorianus
atccttgtttagaggcggcgcctaa

SEQ ID NO: 141740 - DNA, 25 bp, Saccharomyces pastorianus
gatggaaatccccaacctacggagc

SEQ ID NO: 141741 - DNA, 25 bp, Saccharomyces pastorianus
ggatcgagcgttttcagacaaccaa

SEQ ID NO: 141742 - DNA, 25 bp, Saccharomyces pastorianus
aagatcaggattcccgcaggtgtta

SEQ ID NO: 141743 - DNA, 25 bp, Saccharomyces pastorianus
taaagtgttctttggcaggcctaca

SEQ ID NO: 141744 - DNA, 25 bp, Saccharomyces pastorianus
acaagtatgggttctcgctgcaggc

SEQ ID NO: 141745 - DNA, 25 bp, Saccharomyces pastorianus
ggagcccaatgagaacacagccctt

SEQ ID NO: 141746 - DNA, 25 bp, Saccharomyces pastorianus
tcaggagtatttcttcgagcggccg

SEQ ID NO: 141747 - DNA, 25 bp, Saccharomyces pastorianus
ggaactctaactacacattcttcgt

SEQ ID NO: 141748 - DNA, 25 bp, Saccharomyces pastorianus
aaagatcattgagccacctgcccaa

SEQ ID NO: 141749 - DNA, 25 bp, Saccharomyces pastorianus
tcgagcggccgagtttcagaactgg

SEQ ID NO: 141750 - DNA, 25 bp, Saccharomyces pastorianus
gtatcacaaacagtcactacaacta

SEQ ID NO: 141751 - DNA, 25 bp, Saccharomyces pastorianus
ttcaacagaagatcatgggttcaca

SEQ ID NO: 141752 - DNA, 25 bp, Saccharomyces pastorianus
gtatgtatcacaaacagtcactaca

SEQ ID NO: 141753 - DNA, 25 bp, Saccharomyces pastorianus
tcacaaacagtcactacaactatgt

SEQ ID NO: 141754 - DNA, 25 bp, Saccharomyces pastorianus
acacgtatgtatcacaaacagtcac

SEQ ID NO: 141755 - DNA, 25 bp, Saccharomyces pastorianus
aaacagtcactacaactatgtttaa

SEQ ID NO: 141756 - DNA, 25 bp, Saccharomyces pastorianus
gatcatgggttcacaaaacacgtat

SEQ ID NO: 141757 - DNA, 25 bp, Saccharomyces pastorianus
catgggttcacaaaacacgtatgta

SEQ ID NO: 141758 - DNA, 25 bp, Saccharomyces pastorianus
gaagatcatgggttcacaaaacacg

SEQ ID NO: 141759 - DNA, 25 bp, Saccharomyces pastorianus
gggttcacaaaacacgtatgtatca

SEQ ID NO: 141760 - DNA, 25 bp, Saccharomyces pastorianus
acagaagatcatgggttcacaaaac

SEQ ID NO: 141761 - DNA, 25 bp, Saccharomyces pastorianus
gcattttagaactttaagagtccgc

SEQ ID NO: 141762 - DNA, 25 bp, Saccharomyces pastorianus
gagtccgcaaatattctcagatatg

SEQ ID NO: 141763 - DNA, 25 bp, Saccharomyces pastorianus
atatgtgttattatacccttaatga

SEQ ID NO: 141764 - DNA, 25 bp, Saccharomyces pastorianus
gcaaatattctcagatatgtctttt

SEQ ID NO: 141765 - DNA, 25 bp, Saccharomyces pastorianus
gtccgcaaatattctcagatatgtc

SEQ ID NO: 141766 - DNA, 25 bp, Saccharomyces pastorianus
aagcatcatgtttcaacagaagatc

SEQ ID NO: 141767 - DNA, 25 bp, Saccharomyces pastorianus
gctaactgacaaattcttcaaaata

SEQ ID NO: 141768 - DNA, 25 bp, Saccharomyces pastorianus
tacccttaatgaattatttgttgct

SEQ ID NO: 141769 - DNA, 25 bp, Saccharomyces pastorianus
tgttgctaactgacaaattcttcaa

SEQ ID NO: 141770 - DNA, 25 bp, Saccharomyces pastorianus
gaactttaagagtccgcaaatattc

SEQ ID NO: 141771 - DNA, 25 bp, Saccharomyces pastorianus
gtcaccatttaaagcatcatgtttc

SEQ ID NO: 141772 - DNA, 25 bp, Saccharomyces pastorianus
gcgtaaatacaacgaatttcaggag

SEQ ID NO: 141773 - DNA, 25 bp, Saccharomyces pastorianus
gggtgatgaagcttctaataagtat

SEQ ID NO: 141774 - DNA, 25 bp, Saccharomyces pastorianus
atttcaggagaaatctacgagcggt

SEQ ID NO: 141775 - DNA, 25 bp, Saccharomyces pastorianus
cagagaggtttcaatggtccatatt

SEQ ID NO: 141776 - DNA, 25 bp, Saccharomyces pastorianus
atggtccatattgaagcaggatgat

SEQ ID NO: 141777 - DNA, 25 bp, Saccharomyces pastorianus
gactattttggaaacactcatgggt

SEQ ID NO: 141778 - DNA, 25 bp, Saccharomyces pastorianus
gaaagtcgactattttggaaacact

SEQ ID NO: 141779 - DNA, 25 bp, Saccharomyces pastorianus
tacgagcggtaggaaggcacattac

SEQ ID NO: 141780 - DNA, 25 bp, Saccharomyces pastorianus
gaagcaggatgattttatatatcgt

SEQ ID NO: 141781 - DNA, 25 bp, Saccharomyces pastorianus
ttatatatcgtaatgacaggaagga

SEQ ID NO: 141782 - DNA, 25 bp, Saccharomyces pastorianus
cactcatgggtgatgaagcttctaa

SEQ ID NO: 141783 - DNA, 25 bp, Saccharomyces pastorianus
gataacatgcgtcgtgaagttcaac

SEQ ID NO: 141784 - DNA, 25 bp, Saccharomyces pastorianus
gaagaacgtcttgcctagtgtggag

SEQ ID NO: 141785 - DNA, 25 bp, Saccharomyces pastorianus
ggtttaccttaccaaagccagatga

SEQ ID NO: 141786 - DNA, 25 bp, Saccharomyces pastorianus
gaagttcaacgagatttattgctga

SEQ ID NO: 141787 - DNA, 25 bp, Saccharomyces pastorianus
gatcgaaactaaccttaagaagctt

SEQ ID NO: 141788 - DNA, 25 bp, Saccharomyces pastorianus
aggaacaagtttctcttcaacaaga

SEQ ID NO: 141789 - DNA, 25 bp, Saccharomyces pastorianus
catagagctgctcttgatccaaaga

SEQ ID NO: 141790 - DNA, 25 bp, Saccharomyces pastorianus
aagagatgctagtgccagtctagaa

SEQ ID NO: 141791 - DNA, 25 bp, Saccharomyces pastorianus
gtggaagacttatttggagcactaa

SEQ ID NO: 141792 - DNA, 25 bp, Saccharomyces pastorianus
agaaaccggatttgatgctttagca

SEQ ID NO: 141793 - DNA, 25 bp, Saccharomyces pastorianus
gataatgactggtttaccttaccaa

SEQ ID NO: 141794 - DNA, 25 bp, Saccharomyces pastorianus
ggtttttgcaatccatctcgtacca

SEQ ID NO: 141795 - DNA, 25 bp, Saccharomyces pastorianus
aatacctatcaaacaatcctgccgt

SEQ ID NO: 141796 - DNA, 25 bp, Saccharomyces pastorianus
tccatcctgtagacgggtttttgca

SEQ ID NO: 141797 - DNA, 25 bp, Saccharomyces pastorianus
acggtcaattcaccactctgtggga

SEQ ID NO: 141798 - DNA, 25 bp, Saccharomyces pastorianus
gattctgttcacttttgttaacttt

SEQ ID NO: 141799 - DNA, 25 bp, Saccharomyces pastorianus
atctcattctttccatcctgtagac

SEQ ID NO: 141800 - DNA, 25 bp, Saccharomyces pastorianus
ctttttcactgattgcggtgtgtat

SEQ ID NO: 141801 - DNA, 25 bp, Saccharomyces pastorianus
tgctaaggagacctgggacgctcaa

SEQ ID NO: 141802 - DNA, 25 bp, Saccharomyces pastorianus
aaccacggtgtaaggaagctcatta

SEQ ID NO: 141803 - DNA, 25 bp, Saccharomyces pastorianus
agcgcacagatggttgcattggcca

SEQ ID NO: 141804 - DNA, 25 bp, Saccharomyces pastorianus
ggactgttatgattcatgacggtca

SEQ ID NO: 141805 - DNA, 25 bp, Saccharomyces pastorianus
gcccgcttcgttggcagctaatatt

SEQ ID NO: 141806 - DNA, 25 bp, Saccharomyces pastorianus
gacgacgtcttttgcatcgctattg

SEQ ID NO: 141807 - DNA, 25 bp, Saccharomyces pastorianus
gtgggttcagcaattctacgatttt

SEQ ID NO: 141808 - DNA, 25 bp, Saccharomyces pastorianus
ggcagtcagtgctatcccatggatg

SEQ ID NO: 141809 - DNA, 25 bp, Saccharomyces pastorianus
gcctcgttccagcatcttgagagaa

SEQ ID NO: 141810 - DNA, 25 bp, Saccharomyces pastorianus
acttattcacggctagtctcagcta

SEQ ID NO: 141811 - DNA, 25 bp, Saccharomyces pastorianus
gaactccaagaatgccgtcaaagaa

SEQ ID NO: 141812 - DNA, 25 bp, Saccharomyces pastorianus
agtctcagctacgtgtttgtgtttg

SEQ ID NO: 141813 - DNA, 25 bp, Saccharomyces pastorianus
agaattcctctcactatgggttatt

SEQ ID NO: 141814 - DNA, 25 bp, Saccharomyces pastorianus
ttgtacgctaaagttctgcccgctt

SEQ ID NO: 141815 - DNA, 25 bp, Saccharomyces pastorianus
aggtgccattcctgtttgatatgtc

SEQ ID NO: 141816 - DNA, 25 bp, Saccharomyces pastorianus
attgatgtgaacgatctaagatcca

SEQ ID NO: 141817 - DNA, 25 bp, Saccharomyces pastorianus
ctaagatccaagtattctatctggg

SEQ ID NO: 141818 - DNA, 25 bp, Saccharomyces pastorianus
gatttggttttcaagttacactgga

SEQ ID NO: 141819 - DNA, 25 bp, Saccharomyces pastorianus
ttcgaaggcaaggatttggttttca

SEQ ID NO: 141820 - DNA, 25 bp, Saccharomyces pastorianus
aaggatgatgctgtgattgatgtga

SEQ ID NO: 141821 - DNA, 25 bp, Saccharomyces pastorianus
acaagtgaggtaacattttgggata

SEQ ID NO: 141822 - DNA, 25 bp, Saccharomyces pastorianus
acactggaatgttcaaccatgggta

SEQ ID NO: 141823 - DNA, 25 bp, Saccharomyces pastorianus
aactgctgagtataacagtactgaa

SEQ ID NO: 141824 - DNA, 25 bp, Saccharomyces pastorianus
caaccatgggtaggtttgctaactt

SEQ ID NO: 141825 - DNA, 25 bp, Saccharomyces pastorianus
acttacggtgaaactgtaggcaact

SEQ ID NO: 141826 - DNA, 25 bp, Saccharomyces pastorianus
gcaagtttttgtctatctaactgct

SEQ ID NO: 141827 - DNA, 25 bp, Saccharomyces pastorianus
atcgaaccaggccttttcaatggga

SEQ ID NO: 141828 - DNA, 25 bp, Saccharomyces pastorianus
tcatggcatcctcatactatcaatt

SEQ ID NO: 141829 - DNA, 25 bp, Saccharomyces pastorianus
gtaatggttgtattcatcatggcat

SEQ ID NO: 141830 - DNA, 25 bp, Saccharomyces pastorianus
caggccttttcaatgggaattgtaa

SEQ ID NO: 141831 - DNA, 25 bp, Saccharomyces pastorianus
aatgtatcgaaccaggccttttcaa

SEQ ID NO: 141832 - DNA, 25 bp, Saccharomyces pastorianus
aagattccagaatgtatcgaaccag

SEQ ID NO: 141833 - DNA, 25 bp, Saccharomyces pastorianus
tccagaatgtatcgaaccaggcctt

SEQ ID NO: 141834 - DNA, 25 bp, Saccharomyces pastorianus
ttcatcatggcatcctcatactatc

SEQ ID NO: 141835 - DNA, 25 bp, Saccharomyces pastorianus
gaaccaggccttttcaatgggaatt

SEQ ID NO: 141836 - DNA, 25 bp, Saccharomyces pastorianus
ggcatcctcatactatcaattaatc

SEQ ID NO: 141837 - DNA, 25 bp, Saccharomyces pastorianus
tcaattaatcaataataacgcgttc

SEQ ID NO: 141838 - DNA, 25 bp, Saccharomyces pastorianus
gctgtttccgatactgtcaaggtga

SEQ ID NO: 141839 - DNA, 25 bp, Saccharomyces pastorianus
aaggtgattatagtgactccatcga

SEQ ID NO: 141840 - DNA, 25 bp, Saccharomyces pastorianus
cccatctcgatcattccaacaaaag

SEQ ID NO: 141841 - DNA, 25 bp, Saccharomyces pastorianus
gaaaactctcgcttaaaccattgat

SEQ ID NO: 141842 - DNA, 25 bp, Saccharomyces pastorianus
gctagtctctagcagaaaactctcg

SEQ ID NO: 141843 - DNA, 25 bp, Saccharomyces pastorianus
aaggatgctgtcgaggcattcgaag

SEQ ID NO: 141844 - DNA, 25 bp, Saccharomyces pastorianus
gattacacatcgctatagctttaag

SEQ ID NO: 141845 - DNA, 25 bp, Saccharomyces pastorianus
aactgacattccaaggctgtttccg

SEQ ID NO: 141846 - DNA, 25 bp, Saccharomyces pastorianus
aatacaatttcccatctcgatcatt

SEQ ID NO: 141847 - DNA, 25 bp, Saccharomyces pastorianus
ttcgaagaaacaagccaccacccgt

SEQ ID NO: 141848 - DNA, 25 bp, Saccharomyces pastorianus
agtgactccatcgagctagtctcta

SEQ ID NO: 141849 - DNA, 25 bp, Saccharomyces pastorianus
tggtgaagtcaaggacgacggtgct

SEQ ID NO: 141850 - DNA, 25 bp, Saccharomyces pastorianus
gagcagatacaagtcccggtcaacg

SEQ ID NO: 141851 - DNA, 25 bp, Saccharomyces pastorianus
cgaagattatttgtctagaagtggg

SEQ ID NO: 141852 - DNA, 25 bp, Saccharomyces pastorianus
ggtcaacgaagattatttgtctaga

SEQ ID NO: 141853 - DNA, 25 bp, Saccharomyces pastorianus
gcagatacaagtcccggtcaacgaa

SEQ ID NO: 141854 - DNA, 25 bp, Saccharomyces pastorianus
aagagcagatacaagtcccggtcaa

SEQ ID NO: 141855 - DNA, 25 bp, Saccharomyces pastorianus
caagtcccggtcaacgaagattatt

SEQ ID NO: 141856 - DNA, 25 bp, Saccharomyces pastorianus
atacaagtcccggtcaacgaagatt

SEQ ID NO: 141857 - DNA, 25 bp, Saccharomyces pastorianus
gtcccggtcaacgaagattatttgt

SEQ ID NO: 141858 - DNA, 25 bp, Saccharomyces pastorianus
agaagctggtgaagtcaaggacgac

SEQ ID NO: 141859 - DNA, 25 bp, Saccharomyces pastorianus
cccggtcaacgaagattatttgtct

SEQ ID NO: 141860 - DNA, 25 bp, Saccharomyces pastorianus
tggtgaagtcaaggacgacggtgct

SEQ ID NO: 141861 - DNA, 25 bp, Saccharomyces pastorianus
gagcagatacaagtcccggtcaacg

SEQ ID NO: 141862 - DNA, 25 bp, Saccharomyces pastorianus
cgaagattatttgtctagaagtggg

SEQ ID NO: 141863 - DNA, 25 bp, Saccharomyces pastorianus
ccggtcaacgaagattatttgtcta

SEQ ID NO: 141864 - DNA, 25 bp, Saccharomyces pastorianus
gcagatacaagtcccggtcaacgaa

SEQ ID NO: 141865 - DNA, 25 bp, Saccharomyces pastorianus
aagagcagatacaagtcccggtcaa

SEQ ID NO: 141866 - DNA, 25 bp, Saccharomyces pastorianus
caagtcccggtcaacgaagattatt

SEQ ID NO: 141867 - DNA, 25 bp, Saccharomyces pastorianus
atacaagtcccggtcaacgaagatt

SEQ ID NO: 141868 - DNA, 25 bp, Saccharomyces pastorianus
gtcccggtcaacgaagattatttgt

SEQ ID NO: 141869 - DNA, 25 bp, Saccharomyces pastorianus
agaagctggtgaagtcaaggacgac

SEQ ID NO: 141870 - DNA, 25 bp, Saccharomyces pastorianus
ggtgctttcgttaagttcttgtcca

SEQ ID NO: 141871 - DNA, 25 bp, Saccharomyces pastorianus
cctctatcaataaacgggtgttcaa

SEQ ID NO: 141872 - DNA, 25 bp, Saccharomyces pastorianus
cggaacaaactatcacctctatcaa

SEQ ID NO: 141873 - DNA, 25 bp, Saccharomyces pastorianus
atggcctaagaacattgggtgtttc

SEQ ID NO: 141874 - DNA, 25 bp, Saccharomyces pastorianus
acactagtcttttggatcgcgttaa

SEQ ID NO: 141875 - DNA, 25 bp, Saccharomyces pastorianus
tccgataacccctttagtacatcag

SEQ ID NO: 141876 - DNA, 25 bp, Saccharomyces pastorianus
gattacattctagaaatgggccaac

SEQ ID NO: 141877 - DNA, 25 bp, Saccharomyces pastorianus
gggctacaaaaggaacagtctgttt

SEQ ID NO: 141878 - DNA, 25 bp, Saccharomyces pastorianus
gggtaacgctcaattagattacatt

SEQ ID NO: 141879 - DNA, 25 bp, Saccharomyces pastorianus
tgggccaacaatcattcgaaaatat

SEQ ID NO: 141880 - DNA, 25 bp, Saccharomyces pastorianus
tagtacatcagagaccatcatgaat

SEQ ID NO: 141881 - DNA, 25 bp, Saccharomyces pastorianus
tcgcgttaattctcttgatcatagg

SEQ ID NO: 141882 - DNA, 25 bp, Saccharomyces pastorianus
tggttggcactgctgattttcatta

SEQ ID NO: 141883 - DNA, 25 bp, Saccharomyces pastorianus
agtttccaagattttctttcgatga

SEQ ID NO: 141884 - DNA, 25 bp, Saccharomyces pastorianus
aattcgacaagatgccaagctgtat

SEQ ID NO: 141885 - DNA, 25 bp, Saccharomyces pastorianus
atgatatcgatccattactccgcaa

SEQ ID NO: 141886 - DNA, 25 bp, Saccharomyces pastorianus
actgattcaacgtttaagaccactg

SEQ ID NO: 141887 - DNA, 25 bp, Saccharomyces pastorianus
gatcacattggcgtactacatgttt

SEQ ID NO: 141888 - DNA, 25 bp, Saccharomyces pastorianus
gtataacgagtaacgagcttttcga

SEQ ID NO: 141889 - DNA, 25 bp, Saccharomyces pastorianus
gtatggcaagcagaccaaaggtcat

SEQ ID NO: 141890 - DNA, 25 bp, Saccharomyces pastorianus
aagaccactgttagatctgaagaaa

SEQ ID NO: 141891 - DNA, 25 bp, Saccharomyces pastorianus
gatgaacgcaaacctggacagattg

SEQ ID NO: 141892 - DNA, 25 bp, Saccharomyces pastorianus
cagccataagtgacgatagtttcca

SEQ ID NO: 141893 - DNA, 25 bp, Saccharomyces pastorianus
aacagagtgtgtttccagacgagga

SEQ ID NO: 141894 - DNA, 25 bp, Saccharomyces pastorianus
aagtgctatcaacgatgcatccaaa

SEQ ID NO: 141895 - DNA, 25 bp, Saccharomyces pastorianus
gggtcttgcattttggctgaagcaa

SEQ ID NO: 141896 - DNA, 25 bp, Saccharomyces pastorianus
gaactttcacaatggactttgggtg

SEQ ID NO: 141897 - DNA, 25 bp, Saccharomyces pastorianus
atcttgacattggatcctcaccgta

SEQ ID NO: 141898 - DNA, 25 bp, Saccharomyces pastorianus
atcctcaccgtattttgcgtcatgt

SEQ ID NO: 141899 - DNA, 25 bp, Saccharomyces pastorianus
gagcgtgacagcgtatttgaatgac

SEQ ID NO: 141900 - DNA, 25 bp, Saccharomyces pastorianus
aagtttcgggttcagaggcagcaca

SEQ ID NO: 141901 - DNA, 25 bp, Saccharomyces pastorianus
ttgcgtcatgtctgttccaatacca

SEQ ID NO: 141902 - DNA, 25 bp, Saccharomyces pastorianus
ggcagcagcccatttaggattggaa

SEQ ID NO: 141903 - DNA, 25 bp, Saccharomyces pastorianus
aagttaaatttatgggcagcagccc

SEQ ID NO: 141904 - DNA, 25 bp, Saccharomyces pastorianus
aaaagctccgagacgttgaattgaa

SEQ ID NO: 141905 - DNA, 25 bp, Saccharomyces pastorianus
ggttcgagcggaagaggactctacc

SEQ ID NO: 141906 - DNA, 25 bp, Saccharomyces pastorianus
gttcaatatagccactgtcaaatta

SEQ ID NO: 141907 - DNA, 25 bp, Saccharomyces pastorianus
ccggcagtgatagtttggttcgagc

SEQ ID NO: 141908 - DNA, 25 bp, Saccharomyces pastorianus
tttcgagaggaaaacaccggcagtg

SEQ ID NO: 141909 - DNA, 25 bp, Saccharomyces pastorianus
gacgggcgtctttccattggtaaag

SEQ ID NO: 141910 - DNA, 25 bp, Saccharomyces pastorianus
ggactctaccgctgtcactaatgaa

SEQ ID NO: 141911 - DNA, 25 bp, Saccharomyces pastorianus
ttagagataacctcgtcgcttgggt

SEQ ID NO: 141912 - DNA, 25 bp, Saccharomyces pastorianus
tggtaaagacaaaccctttcgagag

SEQ ID NO: 141913 - DNA, 25 bp, Saccharomyces pastorianus
ggaaccaaatcctgactttagacct

SEQ ID NO: 141914 - DNA, 25 bp, Saccharomyces pastorianus
tcgtcgcttgggtcactcaaggaaa

SEQ ID NO: 141915 - DNA, 25 bp, Saccharomyces pastorianus
gatagtctagatcctttttctgaag

SEQ ID NO: 141916 - DNA, 25 bp, Saccharomyces pastorianus
aatagatgccgctctggatttcaga

SEQ ID NO: 141917 - DNA, 25 bp, Saccharomyces pastorianus
atgcacagtttattgttatttcgct

SEQ ID NO: 141918 - DNA, 25 bp, Saccharomyces pastorianus
gaaatgtctcaatcgtagctaacta

SEQ ID NO: 141919 - DNA, 25 bp, Saccharomyces pastorianus
ataacaaacctttcaggtggtgaga

SEQ ID NO: 141920 - DNA, 25 bp, Saccharomyces pastorianus
ggtggtgagaaaacactaagctcct

SEQ ID NO: 141921 - DNA, 25 bp, Saccharomyces pastorianus
gctggctctcatatcatatcaatga

SEQ ID NO: 141922 - DNA, 25 bp, Saccharomyces pastorianus
acactaagctccttggctttggttt

SEQ ID NO: 141923 - DNA, 25 bp, Saccharomyces pastorianus
catgttcgaattagcgcaacagtta

SEQ ID NO: 141924 - DNA, 25 bp, Saccharomyces pastorianus
aacccccctttatgtcatggatgaa

SEQ ID NO: 141925 - DNA, 25 bp, Saccharomyces pastorianus
gttacgtttagtgttatgcctccta

SEQ ID NO: 141926 - DNA, 25 bp, Saccharomyces pastorianus
aataccggtcctgtgaaactcaaga

SEQ ID NO: 141927 - DNA, 25 bp, Saccharomyces pastorianus
cacaccctgggaatgttagacgata

SEQ ID NO: 141928 - DNA, 25 bp, Saccharomyces pastorianus
caagaacttgatcaggaataccggt

SEQ ID NO: 141929 - DNA, 25 bp, Saccharomyces pastorianus
gagacttcagatgaggtatccagag

SEQ ID NO: 141930 - DNA, 25 bp, Saccharomyces pastorianus
attagggatgtaacccacaccctgg

SEQ ID NO: 141931 - DNA, 25 bp, Saccharomyces pastorianus
ttgaactcactgttgacgtacatca

SEQ ID NO: 141932 - DNA, 25 bp, Saccharomyces pastorianus
ggacgatgagacttcttgtgacaat

SEQ ID NO: 141933 - DNA, 25 bp, Saccharomyces pastorianus
gtgacaattatcatcctatgaacgt

SEQ ID NO: 141934 - DNA, 25 bp, Saccharomyces pastorianus
gtttcaaaaactgctccaaaattct

SEQ ID NO: 141935 - DNA, 25 bp, Saccharomyces pastorianus
ggataccaagactttctgaggacga

SEQ ID NO: 141936 - DNA, 25 bp, Saccharomyces pastorianus
aacatacaaaactggctttggcaga

SEQ ID NO: 141937 - DNA, 25 bp, Saccharomyces pastorianus
gttgtttcacaagcgtttcttctaa

SEQ ID NO: 141938 - DNA, 25 bp, Saccharomyces pastorianus
ataggttggcttccatgttggctat

SEQ ID NO: 141939 - DNA, 25 bp, Saccharomyces pastorianus
cagtttggtttcaacatctttgcta

SEQ ID NO: 141940 - DNA, 25 bp, Saccharomyces pastorianus
tcacatctcagaaccactatcatac

SEQ ID NO: 141941 - DNA, 25 bp, Saccharomyces pastorianus
gcattgcatcttgttttttaccttt

SEQ ID NO: 141942 - DNA, 25 bp, Saccharomyces pastorianus
gtttcttctaataccttcatcggga

SEQ ID NO: 141943 - DNA, 25 bp, Saccharomyces pastorianus
gatcggtacattggcatttcctatg

SEQ ID NO: 141944 - DNA, 25 bp, Saccharomyces pastorianus
actcgatcctctatcccaataaaaa

SEQ ID NO: 141945 - DNA, 25 bp, Saccharomyces pastorianus
gagctcgtcgagaatcacatggata

SEQ ID NO: 141946 - DNA, 25 bp, Saccharomyces pastorianus
actggtttcagcatggttggatttg

SEQ ID NO: 141947 - DNA, 25 bp, Saccharomyces pastorianus
gaacatgaggtgacaactcgatcct

SEQ ID NO: 141948 - DNA, 25 bp, Saccharomyces pastorianus
catgctatgcgctctatttggttta

SEQ ID NO: 141949 - DNA, 25 bp, Saccharomyces pastorianus
gctatgcgctctatttggtttattt

SEQ ID NO: 141950 - DNA, 25 bp, Saccharomyces pastorianus
ggcttgtcccgcgtataatcgcctt

SEQ ID NO: 141951 - DNA, 25 bp, Saccharomyces pastorianus
tgtcccgcgtataatcgccttatta

SEQ ID NO: 141952 - DNA, 25 bp, Saccharomyces pastorianus
aagttgcatcgaaggattgttgata

SEQ ID NO: 141953 - DNA, 25 bp, Saccharomyces pastorianus
gcgtataatcgccttattaccagtt

SEQ ID NO: 141954 - DNA, 25 bp, Saccharomyces pastorianus
agttatttccatgctatgcgctcta

SEQ ID NO: 141955 - DNA, 25 bp, Saccharomyces pastorianus
atcgccttattaccagttatttcca

SEQ ID NO: 141956 - DNA, 25 bp, Saccharomyces pastorianus
atggccttattggagaagttgcatc

SEQ ID NO: 141957 - DNA, 25 bp, Saccharomyces pastorianus
atttccatgctatgcgctctatttg

SEQ ID NO: 141958 - DNA, 25 bp, Saccharomyces pastorianus
attggagaagttgcatcgaaggatt

SEQ ID NO: 141959 - DNA, 25 bp, Saccharomyces pastorianus
caagaagctcgccacttagagttaa

SEQ ID NO: 141960 - DNA, 25 bp, Saccharomyces pastorianus
tggccaagaacctggtacttaccat

SEQ ID NO: 141961 - DNA, 25 bp, Saccharomyces pastorianus
gccacttagagttaactccggatga

SEQ ID NO: 141962 - DNA, 25 bp, Saccharomyces pastorianus
actggcatttgcactgttcccggtt

SEQ ID NO: 141963 - DNA, 25 bp, Saccharomyces pastorianus
gttaactccggatgaattttattgt

SEQ ID NO: 141964 - DNA, 25 bp, Saccharomyces pastorianus
tctgggtttggccaagaacctggta

SEQ ID NO: 141965 - DNA, 25 bp, Saccharomyces pastorianus
gcactgttcccggttctgggtttgg

SEQ ID NO: 141966 - DNA, 25 bp, Saccharomyces pastorianus
gaatctactggcatttgcactgttc

SEQ ID NO: 141967 - DNA, 25 bp, Saccharomyces pastorianus
tggcacctggtctggaatggattaa

SEQ ID NO: 141968 - DNA, 25 bp, Saccharomyces pastorianus
agctcgccacttagagttaactccg

SEQ ID NO: 141969 - DNA, 25 bp, Saccharomyces pastorianus
gttagaatctactggcatttgcact

SEQ ID NO: 141970 - DNA, 25 bp, Saccharomyces pastorianus
aacgggtgtcttgattccaattcct

SEQ ID NO: 141971 - DNA, 25 bp, Saccharomyces pastorianus
ggtgttcctggtgcatgtggtcaaa

SEQ ID NO: 141972 - DNA, 25 bp, Saccharomyces pastorianus
catccgcagctgtcaattacttgtt

SEQ ID NO: 141973 - DNA, 25 bp, Saccharomyces pastorianus
gcattcgacttctaagggtgttcct

SEQ ID NO: 141974 - DNA, 25 bp, Saccharomyces pastorianus
tggaactcactggattcagccatga

SEQ ID NO: 141975 - DNA, 25 bp, Saccharomyces pastorianus
gttcagctagcttctttgcattcga

SEQ ID NO: 141976 - DNA, 25 bp, Saccharomyces pastorianus
ggatattttcctaactgctggtgca

SEQ ID NO: 141977 - DNA, 25 bp, Saccharomyces pastorianus
agctgtcctatcacctgagtctata

SEQ ID NO: 141978 - DNA, 25 bp, Saccharomyces pastorianus
gaagtcgcagccaagtacggtacag

SEQ ID NO: 141979 - DNA, 25 bp, Saccharomyces pastorianus
agaaaatatcttcccgggcactaag

SEQ ID NO: 141980 - DNA, 25 bp, Saccharomyces pastorianus
atccattatataccgctactctagc

SEQ ID NO: 141981 - DNA, 25 bp, Saccharomyces pastorianus
ctttttctacctcagccagtagtac

SEQ ID NO: 141982 - DNA, 25 bp, Saccharomyces pastorianus
gttgctcaaaatcatagacgttcat

SEQ ID NO: 141983 - DNA, 25 bp, Saccharomyces pastorianus
ttccacaccacacgttgaaacttcg

SEQ ID NO: 141984 - DNA, 25 bp, Saccharomyces pastorianus
ataaggactctcacttcaagcgcag

SEQ ID NO: 141985 - DNA, 25 bp, Saccharomyces pastorianus
gcgtcatttgaatcgctttccacac

SEQ ID NO: 141986 - DNA, 25 bp, Saccharomyces pastorianus
gctcttcctggattgttgctcaaaa

SEQ ID NO: 141987 - DNA, 25 bp, Saccharomyces pastorianus
aaaatgccacatatcactactcctt

SEQ ID NO: 141988 - DNA, 25 bp, Saccharomyces pastorianus
ttcgctaaacgacctgcgtcatttg

SEQ ID NO: 141989 - DNA, 25 bp, Saccharomyces pastorianus
gttagacccgtcctacagagacata

SEQ ID NO: 141990 - DNA, 25 bp, Saccharomyces pastorianus
gagacatagctcttcctggattgtt

SEQ ID NO: 141991 - DNA, 25 bp, Saccharomyces pastorianus
gttcattatctggtcaatcttcgct

SEQ ID NO: 141992 - DNA, 25 bp, Saccharomyces pastorianus
gcgtttataccgcttcaggaacaaa

SEQ ID NO: 141993 - DNA, 25 bp, Saccharomyces pastorianus
cccagcacctcagtcgatgttgaaa

SEQ ID NO: 141994 - DNA, 25 bp, Saccharomyces pastorianus
gcaagttgaattccactttgtgggt

SEQ ID NO: 141995 - DNA, 25 bp, Saccharomyces pastorianus
agtggcacagacagacgctacggct

SEQ ID NO: 141996 - DNA, 25 bp, Saccharomyces pastorianus
ggaacaaatctacctttcttccata

SEQ ID NO: 141997 - DNA, 25 bp, Saccharomyces pastorianus
atactatgcttagacttctcacaag

SEQ ID NO: 141998 - DNA, 25 bp, Saccharomyces pastorianus
gtacctcaaggcgaagaaaatcctg

SEQ ID NO: 141999 - DNA, 25 bp, Saccharomyces pastorianus
atcacgtagccagagtacctcaagg

SEQ ID NO: 142000 - DNA, 25 bp, Saccharomyces pastorianus
aaagagatgacaggccattgctgaa

SEQ ID NO: 142001 - DNA, 25 bp, Saccharomyces pastorianus
tttgtgggtatcatttcaccatggg

SEQ ID NO: 142002 - DNA, 25 bp, Saccharomyces pastorianus
gctacggctcttcaatcattggttg

SEQ ID NO: 142003 - DNA, 25 bp, Saccharomyces pastorianus
cagcgactggttccttttcaaggtc

SEQ ID NO: 142004 - DNA, 25 bp, Saccharomyces pastorianus
ctgtatctgatcttttggcctctta

SEQ ID NO: 142005 - DNA, 25 bp, Saccharomyces pastorianus
aatgtaatgtccgtacgccgttatc

SEQ ID NO: 142006 - DNA, 25 bp, Saccharomyces pastorianus
gacttcatctgtttcattgtcaccg

SEQ ID NO: 142007 - DNA, 25 bp, Saccharomyces pastorianus
ttcgggttcatgtgttcttttagca

SEQ ID NO: 142008 - DNA, 25 bp, Saccharomyces pastorianus
tggcctcttattcaactacctggaa

SEQ ID NO: 142009 - DNA, 25 bp, Saccharomyces pastorianus
gattgctattggtgtctcgaacctt

SEQ ID NO: 142010 - DNA, 25 bp, Saccharomyces pastorianus
aatttgcctgcatccattattgtgt

SEQ ID NO: 142011 - DNA, 25 bp, Saccharomyces pastorianus
aaggctaccttatctgcagttatca

SEQ ID NO: 142012 - DNA, 25 bp, Saccharomyces pastorianus
gcattatattgtttgaccggcgcat

SEQ ID NO: 142013 - DNA, 25 bp, Saccharomyces pastorianus
gtcgtccccgaccaagaattgattg

SEQ ID NO: 142014 - DNA, 25 bp, Saccharomyces pastorianus
aacttcccaactaaatagcagcagt

SEQ ID NO: 142015 - DNA, 25 bp, Saccharomyces pastorianus
ataaaacttcccaactaaatagcag

SEQ ID NO: 142016 - DNA, 25 bp, Saccharomyces pastorianus
gcagaaggtccaaaatattacgtta

SEQ ID NO: 142017 - DNA, 25 bp, Saccharomyces pastorianus
ataatgtggtggcagaaggtccaaa

SEQ ID NO: 142018 - DNA, 25 bp, Saccharomyces pastorianus
taactttcactattatactatttgt

SEQ ID NO: 142019 - DNA, 25 bp, Saccharomyces pastorianus
gtggtggcagaaggtccaaaatatt

SEQ ID NO: 142020 - DNA, 25 bp, Saccharomyces pastorianus
ggcgcaaagcggtcaatataaaaga

SEQ ID NO: 142021 - DNA, 25 bp, Saccharomyces pastorianus
tattggtggataaaacttcccaact

SEQ ID NO: 142022 - DNA, 25 bp, Saccharomyces pastorianus
aatttaggcgcaaagcggtcaatat

SEQ ID NO: 142023 - DNA, 25 bp, Saccharomyces pastorianus
gacaagttcttggagagacaagaaa

SEQ ID NO: 142024 - DNA, 25 bp, Saccharomyces pastorianus
gtaataaatttaggcgcaaagcggt

SEQ ID NO: 142025 - DNA, 25 bp, Saccharomyces pastorianus
cggcctagcaggtgtacatttcaaa

SEQ ID NO: 142026 - DNA, 25 bp, Saccharomyces pastorianus
gacagtcaattatcatccagttacc

SEQ ID NO: 142027 - DNA, 25 bp, Saccharomyces pastorianus
cactactggcgtgggtttggattcc

SEQ ID NO: 142028 - DNA, 25 bp, Saccharomyces pastorianus
taaaggttcgtatcgtcggcctagc

SEQ ID NO: 142029 - DNA, 25 bp, Saccharomyces pastorianus
agttaccatagtacagcgtcctcag

SEQ ID NO: 142030 - DNA, 25 bp, Saccharomyces pastorianus
agctgtccctgttataaccactact

SEQ ID NO: 142031 - DNA, 25 bp, Saccharomyces pastorianus
gaaaggcgggttcatatgtgtccaa

SEQ ID NO: 142032 - DNA, 25 bp, Saccharomyces pastorianus
tacagcgtcctcagcatcaagaaat

SEQ ID NO: 142033 - DNA, 25 bp, Saccharomyces pastorianus
ggccatctattgagactgcagctgt

SEQ ID NO: 142034 - DNA, 25 bp, Saccharomyces pastorianus
aacacctttagcgaccaatacacat

SEQ ID NO: 142035 - DNA, 25 bp, Saccharomyces pastorianus
agattcatctatcccaatgtctcca

SEQ ID NO: 142036 - DNA, 25 bp, Saccharomyces pastorianus
aatcctggtatctttcaagtgccgg

SEQ ID NO: 142037 - DNA, 25 bp, Saccharomyces pastorianus
gaaggcaagcattggccctgcaagc

SEQ ID NO: 142038 - DNA, 25 bp, Saccharomyces pastorianus
taataacctcaacaaacctccactg

SEQ ID NO: 142039 - DNA, 25 bp, Saccharomyces pastorianus
gcacttggcactaaggtcgccttaa

SEQ ID NO: 142040 - DNA, 25 bp, Saccharomyces pastorianus
gcaagcgcaggctcagcaaaggcaa

SEQ ID NO: 142041 - DNA, 25 bp, Saccharomyces pastorianus
tcgggaacctcaaacaacactaata

SEQ ID NO: 142042 - DNA, 25 bp, Saccharomyces pastorianus
taactccccggatattatgaccaaa

SEQ ID NO: 142043 - DNA, 25 bp, Saccharomyces pastorianus
gaagatcctactttagcatatcatc

SEQ ID NO: 142044 - DNA, 25 bp, Saccharomyces pastorianus
gaatacatccaactttcccaagaat

SEQ ID NO: 142045 - DNA, 25 bp, Saccharomyces pastorianus
acctccactgcatgtaatggttcct

SEQ ID NO: 142046 - DNA, 25 bp, Saccharomyces pastorianus
gggacaaattatccaacgccaaggg

SEQ ID NO: 142047 - DNA, 25 bp, Saccharomyces pastorianus
tgtgccatttaaaactttcgcgaag

SEQ ID NO: 142048 - DNA, 25 bp, Saccharomyces pastorianus
gtcatatgtgttattggagcctcgg

SEQ ID NO: 142049 - DNA, 25 bp, Saccharomyces pastorianus
caatggatcttaacggaatcaccga

SEQ ID NO: 142050 - DNA, 25 bp, Saccharomyces pastorianus
gtaagatacggttccaatgcagaaa

SEQ ID NO: 142051 - DNA, 25 bp, Saccharomyces pastorianus
tacagatgaacctagcgctgtcgtg

SEQ ID NO: 142052 - DNA, 25 bp, Saccharomyces pastorianus
gggaatgcatctaactgttcgttga

SEQ ID NO: 142053 - DNA, 25 bp, Saccharomyces pastorianus
gctgtcgtgaagcacttctccaaag

SEQ ID NO: 142054 - DNA, 25 bp, Saccharomyces pastorianus
gttcgttatctcttttaaagccagt

SEQ ID NO: 142055 - DNA, 25 bp, Saccharomyces pastorianus
ggagcctcggatttgattatgattt

SEQ ID NO: 142056 - DNA, 25 bp, Saccharomyces pastorianus
gcttccacgattctgtgccatttaa

SEQ ID NO: 142057 - DNA, 25 bp, Saccharomyces pastorianus
acggccaatgtttgagattactttc

SEQ ID NO: 142058 - DNA, 25 bp, Saccharomyces pastorianus
ggcgtttccaccaataactgcagaa

SEQ ID NO: 142059 - DNA, 25 bp, Saccharomyces pastorianus
ccaccaataactgcagaaacggatg

SEQ ID NO: 142060 - DNA, 25 bp, Saccharomyces pastorianus
gcgtttccaccaataactgcagaaa

SEQ ID NO: 142061 - DNA, 25 bp, Saccharomyces pastorianus
atggcgtttccaccaataactgcag

SEQ ID NO: 142062 - DNA, 25 bp, Saccharomyces pastorianus
ggaaggtccataattgaaatacgtc

SEQ ID NO: 142063 - DNA, 25 bp, Saccharomyces pastorianus
ggtccataattgaaatacgtcgtga

SEQ ID NO: 142064 - DNA, 25 bp, Saccharomyces pastorianus
ataactgcagaaacggatgctaaag

SEQ ID NO: 142065 - DNA, 25 bp, Saccharomyces pastorianus
acgtcgtgaagatctttcaccattc

SEQ ID NO: 142066 - DNA, 25 bp, Saccharomyces pastorianus
cagaaacggatgctaaagtgagaat

SEQ ID NO: 142067 - DNA, 25 bp, Saccharomyces pastorianus
atacgtcgtgaagatctttcaccat

SEQ ID NO: 142068 - DNA, 25 bp, Saccharomyces pastorianus
gaatagataattttggaaggtccat

SEQ ID NO: 142069 - DNA, 25 bp, Saccharomyces pastorianus
gttgctgtaaaagccgaaaccttct

SEQ ID NO: 142070 - DNA, 25 bp, Saccharomyces pastorianus
gaatcattctcgttgctgtaaaagc

SEQ ID NO: 142071 - DNA, 25 bp, Saccharomyces pastorianus
cattctcgttgctgtaaaagccgaa

SEQ ID NO: 142072 - DNA, 25 bp, Saccharomyces pastorianus
agccgaaaccttctctgggacgaag

SEQ ID NO: 142073 - DNA, 25 bp, Saccharomyces pastorianus
ggaagaatcattctcgttgctgtaa

SEQ ID NO: 142074 - DNA, 25 bp, Saccharomyces pastorianus
tgtaaaagccgaaaccttctctggg

SEQ ID NO: 142075 - DNA, 25 bp, Saccharomyces pastorianus
aagaatcattctcgttgctgtaaaa

SEQ ID NO: 142076 - DNA, 25 bp, Saccharomyces pastorianus
atcattctcgttgctgtaaaagccg

SEQ ID NO: 142077 - DNA, 25 bp, Saccharomyces pastorianus
aatggaagaatcattctcgttgctg

SEQ ID NO: 142078 - DNA, 25 bp, Saccharomyces pastorianus
ttctcgttgctgtaaaagccgaaac

SEQ ID NO: 142079 - DNA, 25 bp, Saccharomyces pastorianus
gctgtaaaagccgaaaccttctctg

SEQ ID NO: 142080 - DNA, 25 bp, Saccharomyces pastorianus
gacctatccagagaggctgcaatgt

SEQ ID NO: 142081 - DNA, 25 bp, Saccharomyces pastorianus
tcataccggaaaccaatctttagcg

SEQ ID NO: 142082 - DNA, 25 bp, Saccharomyces pastorianus
tagcggtaagcagttgtctcaatgg

SEQ ID NO: 142083 - DNA, 25 bp, Saccharomyces pastorianus
agtttcgcacgatcttattttccaa

SEQ ID NO: 142084 - DNA, 25 bp, Saccharomyces pastorianus
gtgtctccatttgtgacttgacggt

SEQ ID NO: 142085 - DNA, 25 bp, Saccharomyces pastorianus
taattattcctgcatgtgtctccat

SEQ ID NO: 142086 - DNA, 25 bp, Saccharomyces pastorianus
accgctactggatttcataaaaccg

SEQ ID NO: 142087 - DNA, 25 bp, Saccharomyces pastorianus
aaggttaacatcacttcataccgga

SEQ ID NO: 142088 - DNA, 25 bp, Saccharomyces pastorianus
atgacgaatctgaacctccaacaaa

SEQ ID NO: 142089 - DNA, 25 bp, Saccharomyces pastorianus
agagagggtcttggattgcaccaat

SEQ ID NO: 142090 - DNA, 25 bp, Saccharomyces pastorianus
accaaaggccttatatcgatacagt

SEQ ID NO: 142091 - DNA, 25 bp, Saccharomyces pastorianus
atacagttgccactgtcgttggcag

SEQ ID NO: 142092 - DNA, 25 bp, Saccharomyces pastorianus
ggtctgcatctattatatggccatc

SEQ ID NO: 142093 - DNA, 25 bp, Saccharomyces pastorianus
gaaatgctccgtagtaatcctaaat

SEQ ID NO: 142094 - DNA, 25 bp, Saccharomyces pastorianus
actattatcgatggtacgccttccg

SEQ ID NO: 142095 - DNA, 25 bp, Saccharomyces pastorianus
gagagcctaccgcaagtgaacaatc

SEQ ID NO: 142096 - DNA, 25 bp, Saccharomyces pastorianus
acgccttccgaactttttgatactg

SEQ ID NO: 142097 - DNA, 25 bp, Saccharomyces pastorianus
gactccaacctcgataaccttttga

SEQ ID NO: 142098 - DNA, 25 bp, Saccharomyces pastorianus
tacacggttcatctaggagccataa

SEQ ID NO: 142099 - DNA, 25 bp, Saccharomyces pastorianus
aagaccctggatatctccattgact

SEQ ID NO: 142100 - DNA, 25 bp, Saccharomyces pastorianus
gtagcagtccgcaaaatcaatgatg

SEQ ID NO: 142101 - DNA, 25 bp, Saccharomyces pastorianus
aaacaggtgcgttgtcaatcggtga

SEQ ID NO: 142102 - DNA, 25 bp, Saccharomyces pastorianus
aaatcaatgctcgagtgctgtcccc

SEQ ID NO: 142103 - DNA, 25 bp, Saccharomyces pastorianus
gcatctgcaggtgttataggtccat

SEQ ID NO: 142104 - DNA, 25 bp, Saccharomyces pastorianus
gtacttattctgtcttacgcgagag

SEQ ID NO: 142105 - DNA, 25 bp, Saccharomyces pastorianus
tttggacaggtttggctcctctcaa

SEQ ID NO: 142106 - DNA, 25 bp, Saccharomyces pastorianus
gcaaatttctggacctgttcacaca

SEQ ID NO: 142107 - DNA, 25 bp, Saccharomyces pastorianus
tgttcctttgaagtactcgcaattg

SEQ ID NO: 142108 - DNA, 25 bp, Saccharomyces pastorianus
aatgctgcttctatattggacgcca

SEQ ID NO: 142109 - DNA, 25 bp, Saccharomyces pastorianus
aatgcgcacacacaagtacctgtac

SEQ ID NO: 142110 - DNA, 25 bp, Saccharomyces pastorianus
ttggacgccactggtaagcccttat

SEQ ID NO: 142111 - DNA, 25 bp, Saccharomyces pastorianus
gatggattgactttgctggcgtaca

SEQ ID NO: 142112 - DNA, 25 bp, Saccharomyces pastorianus
tatcaactttgatgaggccctctgc

SEQ ID NO: 142113 - DNA, 25 bp, Saccharomyces pastorianus
attacaaagccctccagagtcggaa

SEQ ID NO: 142114 - DNA, 25 bp, Saccharomyces pastorianus
gcgtcacatatttcgaggcaagctc

SEQ ID NO: 142115 - DNA, 25 bp, Saccharomyces pastorianus
gcaatactcatccaattcaagcacc

SEQ ID NO: 142116 - DNA, 25 bp, Saccharomyces pastorianus
gcaagctcaaaacgtgacgcctaca

SEQ ID NO: 142117 - DNA, 25 bp, Saccharomyces pastorianus
gtatgactacggtacaatcctcaat

SEQ ID NO: 142118 - DNA, 25 bp, Saccharomyces pastorianus
tcccggcctaacatcaagtagcttt

SEQ ID NO: 142119 - DNA, 25 bp, Saccharomyces pastorianus
tggcctaagcggtcctccagggttt

SEQ ID NO: 142120 - DNA, 25 bp, Saccharomyces pastorianus
atgacaataattcggcggaaccttc

SEQ ID NO: 142121 - DNA, 25 bp, Saccharomyces pastorianus
agtagctttagttccggagttccag

SEQ ID NO: 142122 - DNA, 25 bp, Saccharomyces pastorianus
aaatttccggcttcttcacgttatg

SEQ ID NO: 142123 - DNA, 25 bp, Saccharomyces pastorianus
gccacggtaaataattctgcgccaa

SEQ ID NO: 142124 - DNA, 25 bp, Saccharomyces pastorianus
gaattcgtggattacgtttttcctg

SEQ ID NO: 142125 - DNA, 25 bp, Saccharomyces pastorianus
gaactcgatcaagaaaccgtcaaga

SEQ ID NO: 142126 - DNA, 25 bp, Saccharomyces pastorianus
gatgataaacaagggagactgtcta

SEQ ID NO: 142127 - DNA, 25 bp, Saccharomyces pastorianus
acaggacggtgtggaagaagaattc

SEQ ID NO: 142128 - DNA, 25 bp, Saccharomyces pastorianus
gagactgtctattttggaagcgcta

SEQ ID NO: 142129 - DNA, 25 bp, Saccharomyces pastorianus
acgtttttcctgatgatatcgatga

SEQ ID NO: 142130 - DNA, 25 bp, Saccharomyces pastorianus
gatatcgatgatgacaagccaaaac

SEQ ID NO: 142131 - DNA, 25 bp, Saccharomyces pastorianus
gacaagccaaaaccatcaaagttct

SEQ ID NO: 142132 - DNA, 25 bp, Saccharomyces pastorianus
gactatgaagaaacttacggtactg

SEQ ID NO: 142133 - DNA, 25 bp, Saccharomyces pastorianus
gaaacttacggtactgaactcgatc

SEQ ID NO: 142134 - DNA, 25 bp, Saccharomyces pastorianus
tttggaagcgctaaaagactatgaa

SEQ ID NO: 142135 - DNA, 25 bp, Saccharomyces pastorianus
tttgctcattgggaagctgcgcagc

SEQ ID NO: 142136 - DNA, 25 bp, Saccharomyces pastorianus
aaaatacgtcatggctcacccgcaa

SEQ ID NO: 142137 - DNA, 25 bp, Saccharomyces pastorianus
attgctatagaaaaatggccctcca

SEQ ID NO: 142138 - DNA, 25 bp, Saccharomyces pastorianus
atggccctccaatcaattgcttaag

SEQ ID NO: 142139 - DNA, 25 bp, Saccharomyces pastorianus
gacacagtagctaacctccaaaatt

SEQ ID NO: 142140 - DNA, 25 bp, Saccharomyces pastorianus
gtggctgtacttggatctcatttca

SEQ ID NO: 142141 - DNA, 25 bp, Saccharomyces pastorianus
aaagctgttgtggacagccgaccaa

SEQ ID NO: 142142 - DNA, 25 bp, Saccharomyces pastorianus
taacgcctatgattatgacacctgg

SEQ ID NO: 142143 - DNA, 25 bp, Saccharomyces pastorianus
gatctagtgctctttatcaaattgc

SEQ ID NO: 142144 - DNA, 25 bp, Saccharomyces pastorianus
tcacccgcaaatgcagacgtggcta

SEQ ID NO: 142145 - DNA, 25 bp, Saccharomyces pastorianus
atgacacctggtggctgtacttgga

SEQ ID NO: 142146 - DNA, 25 bp, Saccharomyces pastorianus
aaggtccattgactcagccgatgac

SEQ ID NO: 142147 - DNA, 25 bp, Saccharomyces pastorianus
ggtccaagccttattagaaaactgt

SEQ ID NO: 142148 - DNA, 25 bp, Saccharomyces pastorianus
tatacgtcacaaaattcaatccctt

SEQ ID NO: 142149 - DNA, 25 bp, Saccharomyces pastorianus
cagccgatgacctggatcagttcat

SEQ ID NO: 142150 - DNA, 25 bp, Saccharomyces pastorianus
gatgtggtaccatctccgggtttac

SEQ ID NO: 142151 - DNA, 25 bp, Saccharomyces pastorianus
agcaaaaatattcccttacctgaag

SEQ ID NO: 142152 - DNA, 25 bp, Saccharomyces pastorianus
ggacatacgaacacaatatcacttg

SEQ ID NO: 142153 - DNA, 25 bp, Saccharomyces pastorianus
ttcaaacccacagacaccaattaga

SEQ ID NO: 142154 - DNA, 25 bp, Saccharomyces pastorianus
ggcaagattaccattccgaattttc

SEQ ID NO: 142155 - DNA, 25 bp, Saccharomyces pastorianus
tcaatcccttaacggactttgctgg

SEQ ID NO: 142156 - DNA, 25 bp, Saccharomyces pastorianus
gttcacagctagaaactaccacaag

SEQ ID NO: 142157 - DNA, 25 bp, Saccharomyces pastorianus
ctggacggtccatgaaaaattatat

SEQ ID NO: 142158 - DNA, 25 bp, Saccharomyces pastorianus
atacagtcttcattctatggccgca

SEQ ID NO: 142159 - DNA, 25 bp, Saccharomyces pastorianus
ttgtggcattctctggacggtccat

SEQ ID NO: 142160 - DNA, 25 bp, Saccharomyces pastorianus
gctctttcatacagtcttcattcta

SEQ ID NO: 142161 - DNA, 25 bp, Saccharomyces pastorianus
acttttgtggcattctctggacggt

SEQ ID NO: 142162 - DNA, 25 bp, Saccharomyces pastorianus
ggcattctctggacggtccatgaaa

SEQ ID NO: 142163 - DNA, 25 bp, Saccharomyces pastorianus
agtcttcattctatggccgcacttt

SEQ ID NO: 142164 - DNA, 25 bp, Saccharomyces pastorianus
attctatggccgcacttttgtggca

SEQ ID NO: 142165 - DNA, 25 bp, Saccharomyces pastorianus
atggccgcacttttgtggcattctc

SEQ ID NO: 142166 - DNA, 25 bp, Saccharomyces pastorianus
gcgctctttcatacagtcttcattc

SEQ ID NO: 142167 - DNA, 25 bp, Saccharomyces pastorianus
gcacttttgtggcattctctggacg

SEQ ID NO: 142168 - DNA, 25 bp, Saccharomyces pastorianus
gtagtcaaatctcgaaattgccttg

SEQ ID NO: 142169 - DNA, 25 bp, Saccharomyces pastorianus
aaagcggctcctaaacagaaattct

SEQ ID NO: 142170 - DNA, 25 bp, Saccharomyces pastorianus
gcggctcctaaacagaaattcttca

SEQ ID NO: 142171 - DNA, 25 bp, Saccharomyces pastorianus
gcaaaagcggctcctaaacagaaat

SEQ ID NO: 142172 - DNA, 25 bp, Saccharomyces pastorianus
ggctcctaaacagaaattcttcagt

SEQ ID NO: 142173 - DNA, 25 bp, Saccharomyces pastorianus
gaaattcttcagtagtcaaatctcg

SEQ ID NO: 142174 - DNA, 25 bp, Saccharomyces pastorianus
atgcaaaagcggctcctaaacagaa

SEQ ID NO: 142175 - DNA, 25 bp, Saccharomyces pastorianus
agtcaaatctcgaaattgccttgct

SEQ ID NO: 142176 - DNA, 25 bp, Saccharomyces pastorianus
agcggctcctaaacagaaattcttc

SEQ ID NO: 142177 - DNA, 25 bp, Saccharomyces pastorianus
aattcttcagtagtcaaatctcgaa

SEQ ID NO: 142178 - DNA, 25 bp, Saccharomyces pastorianus
ttcttcagtagtcaaatctcgaaat

SEQ ID NO: 142179 - DNA, 25 bp, Saccharomyces pastorianus
tttacgctcattacaaccaccgaga

SEQ ID NO: 142180 - DNA, 25 bp, Saccharomyces pastorianus
aaaaagctcagcgatttacgctcat

SEQ ID NO: 142181 - DNA, 25 bp, Saccharomyces pastorianus
aaccaccgagattcactaggaaacg

SEQ ID NO: 142182 - DNA, 25 bp, Saccharomyces pastorianus
tcattacaaccaccgagattcacta

SEQ ID NO: 142183 - DNA, 25 bp, Saccharomyces pastorianus
tacgctcattacaaccaccgagatt

SEQ ID NO: 142184 - DNA, 25 bp, Saccharomyces pastorianus
actaggaaacggagctgtccctcgg

SEQ ID NO: 142185 - DNA, 25 bp, Saccharomyces pastorianus
agctcagcgatttacgctcattaca

SEQ ID NO: 142186 - DNA, 25 bp, Saccharomyces pastorianus
gatttacgctcattacaaccaccga

SEQ ID NO: 142187 - DNA, 25 bp, Saccharomyces pastorianus
aggaaacggagctgtccctcggaat

SEQ ID NO: 142188 - DNA, 25 bp, Saccharomyces pastorianus
ttcactaggaaacggagctgtccct

SEQ ID NO: 142189 - DNA, 25 bp, Saccharomyces pastorianus
ttacaaccaccgagattcactagga

SEQ ID NO: 142190 - DNA, 25 bp, Saccharomyces pastorianus
cttgtgcttggtattgcttcgtgga

SEQ ID NO: 142191 - DNA, 25 bp, Saccharomyces pastorianus
ctcatatcaggacggaattttacaa

SEQ ID NO: 142192 - DNA, 25 bp, Saccharomyces pastorianus
atatatattctcatatcaggacgga

SEQ ID NO: 142193 - DNA, 25 bp, Saccharomyces pastorianus
atgatgcagcgtgttatcacatctt

SEQ ID NO: 142194 - DNA, 25 bp, Saccharomyces pastorianus
catcttgcgttaccgggccttgcaa

SEQ ID NO: 142195 - DNA, 25 bp, Saccharomyces pastorianus
cagcgtgttatcacatcttgcgtta

SEQ ID NO: 142196 - DNA, 25 bp, Saccharomyces pastorianus
tattgcttcgtggagatatatattc

SEQ ID NO: 142197 - DNA, 25 bp, Saccharomyces pastorianus
ggccttgcaaaaattgctatgtttt

SEQ ID NO: 142198 - DNA, 25 bp, Saccharomyces pastorianus
gctatgtttttcttgtgcttggtat

SEQ ID NO: 142199 - DNA, 25 bp, Saccharomyces pastorianus
tgttatcacatcttgcgttaccggg

SEQ ID NO: 142200 - DNA, 25 bp, Saccharomyces pastorianus
gcttggtattgcttcgtggagatat

SEQ ID NO: 142201 - DNA, 25 bp, Saccharomyces pastorianus
gatatttaaacactctggccgatga

SEQ ID NO: 142202 - DNA, 25 bp, Saccharomyces pastorianus
gaatgctgactaatttaggcgcaat

SEQ ID NO: 142203 - DNA, 25 bp, Saccharomyces pastorianus
gaaacttcataagatccattctttt

SEQ ID NO: 142204 - DNA, 25 bp, Saccharomyces pastorianus
gaaaattaccgtgccaaaagattgg

SEQ ID NO: 142205 - DNA, 25 bp, Saccharomyces pastorianus
gggatataaccgaattactcttcaa

SEQ ID NO: 142206 - DNA, 25 bp, Saccharomyces pastorianus
acactctggccgatgagggtaggct

SEQ ID NO: 142207 - DNA, 25 bp, Saccharomyces pastorianus
aggctgaagtacattgccaatggtt

SEQ ID NO: 142208 - DNA, 25 bp, Saccharomyces pastorianus
gcgagatggattttgatcaagcaca

SEQ ID NO: 142209 - DNA, 25 bp, Saccharomyces pastorianus
aagaccgccccaatggagattgaga

SEQ ID NO: 142210 - DNA, 25 bp, Saccharomyces pastorianus
agaagtctgccattcatcgaaggaa

SEQ ID NO: 142211 - DNA, 25 bp, Saccharomyces pastorianus
atgaactacataacgattctgagat

SEQ ID NO: 142212 - DNA, 25 bp, Saccharomyces pastorianus
tgaaggcactgctctcacttgtaga

SEQ ID NO: 142213 - DNA, 25 bp, Saccharomyces pastorianus
gcagcagatgcagaccagtcgaatt

SEQ ID NO: 142214 - DNA, 25 bp, Saccharomyces pastorianus
gacacgccatgctatacgaacatat

SEQ ID NO: 142215 - DNA, 25 bp, Saccharomyces pastorianus
caaacggtatattaggactcccaga

SEQ ID NO: 142216 - DNA, 25 bp, Saccharomyces pastorianus
ggacctaccaataagacacgccatg

SEQ ID NO: 142217 - DNA, 25 bp, Saccharomyces pastorianus
tatagcttgggtaccagagcctaat

SEQ ID NO: 142218 - DNA, 25 bp, Saccharomyces pastorianus
atgtagcgaggagctctgccgtaaa

SEQ ID NO: 142219 - DNA, 25 bp, Saccharomyces pastorianus
gagcctaatgacatgattcccggta

SEQ ID NO: 142220 - DNA, 25 bp, Saccharomyces pastorianus
gtagacactttgcacgattctgata

SEQ ID NO: 142221 - DNA, 25 bp, Saccharomyces pastorianus
aagcccctttctatggaacctcaag

SEQ ID NO: 142222 - DNA, 25 bp, Saccharomyces pastorianus
gaggtgcttttggatctatttgaat

SEQ ID NO: 142223 - DNA, 25 bp, Saccharomyces pastorianus
aaggctgttccaccatttcagacat

SEQ ID NO: 142224 - DNA, 25 bp, Saccharomyces pastorianus
tgctgctcctctttttcaaacgata

SEQ ID NO: 142225 - DNA, 25 bp, Saccharomyces pastorianus
acgataccccaccattcagaaaata

SEQ ID NO: 142226 - DNA, 25 bp, Saccharomyces pastorianus
cgattacgacgaaactgcagcctgg

SEQ ID NO: 142227 - DNA, 25 bp, Saccharomyces pastorianus
gtaaagacacctggcgtatgctgct

SEQ ID NO: 142228 - DNA, 25 bp, Saccharomyces pastorianus
atttttccaaccagagtacccagtg

SEQ ID NO: 142229 - DNA, 25 bp, Saccharomyces pastorianus
gctttcaatttgattctggacccaa

SEQ ID NO: 142230 - DNA, 25 bp, Saccharomyces pastorianus
gaaactgcagcctggccatttatta

SEQ ID NO: 142231 - DNA, 25 bp, Saccharomyces pastorianus
atggttccgtttccttcgcgatgag

SEQ ID NO: 142232 - DNA, 25 bp, Saccharomyces pastorianus
gatttgcttgagacatggttccgtt

SEQ ID NO: 142233 - DNA, 25 bp, Saccharomyces pastorianus
gtacccagtgcgtatggaaccagat

SEQ ID NO: 142234 - DNA, 25 bp, Saccharomyces pastorianus
catattacgtctcctttaccagatg

SEQ ID NO: 142235 - DNA, 25 bp, Saccharomyces pastorianus
aactattcgagtgcttataccctaa

SEQ ID NO: 142236 - DNA, 25 bp, Saccharomyces pastorianus
taatacctaggactacgccaatgaa

SEQ ID NO: 142237 - DNA, 25 bp, Saccharomyces pastorianus
gaccagtacgtcaaggaactacccg

SEQ ID NO: 142238 - DNA, 25 bp, Saccharomyces pastorianus
atagaccgtattcatgcgactttcc

SEQ ID NO: 142239 - DNA, 25 bp, Saccharomyces pastorianus
gtcggatgatttgcaccggcggtaa

SEQ ID NO: 142240 - DNA, 25 bp, Saccharomyces pastorianus
aaaaagcctgcttgacagcccgcat

SEQ ID NO: 142241 - DNA, 25 bp, Saccharomyces pastorianus
agaaatacatctgcccatgcggaaa

SEQ ID NO: 142242 - DNA, 25 bp, Saccharomyces pastorianus
gacacatttgcaagatagaccgtat

SEQ ID NO: 142243 - DNA, 25 bp, Saccharomyces pastorianus
tcccggttgcaccaaggcgtttgtt

SEQ ID NO: 142244 - DNA, 25 bp, Saccharomyces pastorianus
ggcgtttgttcgcaatcatgattta

SEQ ID NO: 142245 - DNA, 25 bp, Saccharomyces pastorianus
aagagaggtctaagtggcacagcga

SEQ ID NO: 142246 - DNA, 25 bp, Saccharomyces pastorianus
acgggcgatggctcttctgataaaa

SEQ ID NO: 142247 - DNA, 25 bp, Saccharomyces pastorianus
gcgatatttggatttctcggccata

SEQ ID NO: 142248 - DNA, 25 bp, Saccharomyces pastorianus
aaaaatcaatgtcctcgcacaagag

SEQ ID NO: 142249 - DNA, 25 bp, Saccharomyces pastorianus
gataatgtcaatcctaccatacccc

SEQ ID NO: 142250 - DNA, 25 bp, Saccharomyces pastorianus
acaacaaagtctcccactatagcaa

SEQ ID NO: 142251 - DNA, 25 bp, Saccharomyces pastorianus
gatgatggcctcgataatttgttag

SEQ ID NO: 142252 - DNA, 25 bp, Saccharomyces pastorianus
atgtctaaagatccgcaacccatgg

SEQ ID NO: 142253 - DNA, 25 bp, Saccharomyces pastorianus
agtgccttctcctaagacgggcgat

SEQ ID NO: 142254 - DNA, 25 bp, Saccharomyces pastorianus
tctggatattcctttagtgccttct

SEQ ID NO: 142255 - DNA, 25 bp, Saccharomyces pastorianus
agctatttgagccaagtttcgttga

SEQ ID NO: 142256 - DNA, 25 bp, Saccharomyces pastorianus
tgtacaactattttggtcgctctgg

SEQ ID NO: 142257 - DNA, 25 bp, Saccharomyces pastorianus
attacaacaatgctaaggccccaca

SEQ ID NO: 142258 - DNA, 25 bp, Saccharomyces pastorianus
aaaaaagaagcctccactgccatca

SEQ ID NO: 142259 - DNA, 25 bp, Saccharomyces pastorianus
ctgaacccgaatcccctgaagaaga

SEQ ID NO: 142260 - DNA, 25 bp, Saccharomyces pastorianus
ggtgaccttattggcttaggcataa

SEQ ID NO: 142261 - DNA, 25 bp, Saccharomyces pastorianus
tagcgaatcatctttccgagtggat

SEQ ID NO: 142262 - DNA, 25 bp, Saccharomyces pastorianus
gtgccacgctgatagatatcccgat

SEQ ID NO: 142263 - DNA, 25 bp, Saccharomyces pastorianus
agctggcgtcagcattgacacgttc

SEQ ID NO: 142264 - DNA, 25 bp, Saccharomyces pastorianus
aatggagacccactgtacaactatt

SEQ ID NO: 142265 - DNA, 25 bp, Saccharomyces pastorianus
aatcccgccgcatatgatttagcga

SEQ ID NO: 142266 - DNA, 25 bp, Saccharomyces pastorianus
tgaatatgcaggtgccaatcccgcc

SEQ ID NO: 142267 - DNA, 25 bp, Saccharomyces pastorianus
aacttagtcaagatctctggtgcga

SEQ ID NO: 142268 - DNA, 25 bp, Saccharomyces pastorianus
atataggtccttccctttacggctg

SEQ ID NO: 142269 - DNA, 25 bp, Saccharomyces pastorianus
agattttggctaggctttcattgaa

SEQ ID NO: 142270 - DNA, 25 bp, Saccharomyces pastorianus
taaccagtggttgcgcacgattgaa

SEQ ID NO: 142271 - DNA, 25 bp, Saccharomyces pastorianus
aaatccaaccggtagcacaagatat

SEQ ID NO: 142272 - DNA, 25 bp, Saccharomyces pastorianus
ggtgttcctctcttgagttcagaaa

SEQ ID NO: 142273 - DNA, 25 bp, Saccharomyces pastorianus
acgggtcggcttgttggcaaaagat

SEQ ID NO: 142274 - DNA, 25 bp, Saccharomyces pastorianus
ataccctaagttaccatcgttgcta

SEQ ID NO: 142275 - DNA, 25 bp, Saccharomyces pastorianus
gagttacatgtaggtgttcctctct

SEQ ID NO: 142276 - DNA, 25 bp, Saccharomyces pastorianus
gcaagtttaccttcggattatctga

SEQ ID NO: 142277 - DNA, 25 bp, Saccharomyces pastorianus
agatagtttgggttcgacttcgtcg

SEQ ID NO: 142278 - DNA, 25 bp, Saccharomyces pastorianus
gtgattcttggtaacttcgtcgaca

SEQ ID NO: 142279 - DNA, 25 bp, Saccharomyces pastorianus
agttggcgacgctgatatcaccgca

SEQ ID NO: 142280 - DNA, 25 bp, Saccharomyces pastorianus
caatttgcaattccatgtcctcgtg

SEQ ID NO: 142281 - DNA, 25 bp, Saccharomyces pastorianus
gagtacctgatagatccgtttctga

SEQ ID NO: 142282 - DNA, 25 bp, Saccharomyces pastorianus
taagattggaacttcccaccgtcga

SEQ ID NO: 142283 - DNA, 25 bp, Saccharomyces pastorianus
gaaacatgttcttccgtgtacgtta

SEQ ID NO: 142284 - DNA, 25 bp, Saccharomyces pastorianus
atcaggtattttgcccgtgattctt

SEQ ID NO: 142285 - DNA, 25 bp, Saccharomyces pastorianus
gttgcatttggaagtagccgctcta

SEQ ID NO: 142286 - DNA, 25 bp, Saccharomyces pastorianus
gtcacttccatctaagtctacgttg

SEQ ID NO: 142287 - DNA, 25 bp, Saccharomyces pastorianus
gacgctcaagcaactcaaacactgg

SEQ ID NO: 142288 - DNA, 25 bp, Saccharomyces pastorianus
agaaagcggtgcatttcccgatcac

SEQ ID NO: 142289 - DNA, 25 bp, Saccharomyces pastorianus
atggcattcaagttatggctactgg

SEQ ID NO: 142290 - DNA, 25 bp, Saccharomyces pastorianus
cacacaattggagggccagtccggg

SEQ ID NO: 142291 - DNA, 25 bp, Saccharomyces pastorianus
aactggcgcaggatttgggtattca

SEQ ID NO: 142292 - DNA, 25 bp, Saccharomyces pastorianus
gagcacgtgttcgaacggtacacac

SEQ ID NO: 142293 - DNA, 25 bp, Saccharomyces pastorianus
gttcgaacggtacacacaattggag

SEQ ID NO: 142294 - DNA, 25 bp, Saccharomyces pastorianus
atggctactggatgaggaaacaata

SEQ ID NO: 142295 - DNA, 25 bp, Saccharomyces pastorianus
cggtacacacaattggagggccagt

SEQ ID NO: 142296 - DNA, 25 bp, Saccharomyces pastorianus
agtccgggaaactggcgcaggattt

SEQ ID NO: 142297 - DNA, 25 bp, Saccharomyces pastorianus
gaggaaacaatatacgagcacgtgt

SEQ ID NO: 142298 - DNA, 25 bp, Saccharomyces pastorianus
gcacgtgttcgaacggtacacacaa

SEQ ID NO: 142299 - DNA, 25 bp, Saccharomyces pastorianus
gcattcaagttatggctactggatg

SEQ ID NO: 142300 - DNA, 25 bp, Saccharomyces pastorianus
atacgtcaatgaagagggtgagttc

SEQ ID NO: 142301 - DNA, 25 bp, Saccharomyces pastorianus
ataatactggccaactttggtcaag

SEQ ID NO: 142302 - DNA, 25 bp, Saccharomyces pastorianus
ggccaactttggtcaagaaaatacg

SEQ ID NO: 142303 - DNA, 25 bp, Saccharomyces pastorianus
tactggccaactttggtcaagaaaa

SEQ ID NO: 142304 - DNA, 25 bp, Saccharomyces pastorianus
cacaataatactggccaactttggt

SEQ ID NO: 142305 - DNA, 25 bp, Saccharomyces pastorianus
gagggtgagttcactttgcccataa

SEQ ID NO: 142306 - DNA, 25 bp, Saccharomyces pastorianus
aatactggccaactttggtcaagaa

SEQ ID NO: 142307 - DNA, 25 bp, Saccharomyces pastorianus
gggtgagttcactttgcccataaaa

SEQ ID NO: 142308 - DNA, 25 bp, Saccharomyces pastorianus
aagagggtgagttcactttgcccat

SEQ ID NO: 142309 - DNA, 25 bp, Saccharomyces pastorianus
gaacacaataatactggccaacttt

SEQ ID NO: 142310 - DNA, 25 bp, Saccharomyces pastorianus
actttggtcaagaaaatacgtcaat

SEQ ID NO: 142311 - DNA, 25 bp, Saccharomyces pastorianus
aacagtcaacttctagctctcagga

SEQ ID NO: 142312 - DNA, 25 bp, Saccharomyces pastorianus
aattgtcttgataactaccaagggt

SEQ ID NO: 142313 - DNA, 25 bp, Saccharomyces pastorianus
ttcctgtgatcatggtgttgttgct

SEQ ID NO: 142314 - DNA, 25 bp, Saccharomyces pastorianus
caaattggataaatacggccgtgtt

SEQ ID NO: 142315 - DNA, 25 bp, Saccharomyces pastorianus
aatgaaggcagacggcaaattggat

SEQ ID NO: 142316 - DNA, 25 bp, Saccharomyces pastorianus
tgccatcgcacaaatgtcaaccgtt

SEQ ID NO: 142317 - DNA, 25 bp, Saccharomyces pastorianus
aagaatatgttccattagacaatgc

SEQ ID NO: 142318 - DNA, 25 bp, Saccharomyces pastorianus
aagccattgctgttgccatcgcaca

SEQ ID NO: 142319 - DNA, 25 bp, Saccharomyces pastorianus
atcatggtgttgttgctagtgtgaa

SEQ ID NO: 142320 - DNA, 25 bp, Saccharomyces pastorianus
gacaatgctgaacagtcaacttcta

SEQ ID NO: 142321 - DNA, 25 bp, Saccharomyces pastorianus
acttctagctctcaggaaactaagg

SEQ ID NO: 142322 - DNA, 25 bp, Saccharomyces pastorianus
aatgacaacatggtcactttacatg

SEQ ID NO: 142323 - DNA, 25 bp, Saccharomyces pastorianus
ccggtgctctgtctgaaaatgacaa

SEQ ID NO: 142324 - DNA, 25 bp, Saccharomyces pastorianus
tagatccggtgctctgtctgaaaat

SEQ ID NO: 142325 - DNA, 25 bp, Saccharomyces pastorianus
agatccggtgctctgtctgaaaatg

SEQ ID NO: 142326 - DNA, 25 bp, Saccharomyces pastorianus
gaaaatgacaacatggtcactttac

SEQ ID NO: 142327 - DNA, 25 bp, Saccharomyces pastorianus
gatccggtgctctgtctgaaaatga

SEQ ID NO: 142328 - DNA, 25 bp, Saccharomyces pastorianus
aaatgacaacatggtcactttacat

SEQ ID NO: 142329 - DNA, 25 bp, Saccharomyces pastorianus
atgacaacatggtcactttacatga

SEQ ID NO: 142330 - DNA, 25 bp, Saccharomyces pastorianus
cggtgctctgtctgaaaatgacaac

SEQ ID NO: 142331 - DNA, 25 bp, Saccharomyces pastorianus
tccggtgctctgtctgaaaatgaca

SEQ ID NO: 142332 - DNA, 25 bp, Saccharomyces pastorianus
atccggtgctctgtctgaaaatgac

SEQ ID NO: 142333 - DNA, 25 bp, Saccharomyces pastorianus
ggtggtcacatgcaagaattgcgtc

SEQ ID NO: 142334 - DNA, 25 bp, Saccharomyces pastorianus
gagatgaatcttacttgagatccat

SEQ ID NO: 142335 - DNA, 25 bp, Saccharomyces pastorianus
gttcatttaggtatgctattaggtg

SEQ ID NO: 142336 - DNA, 25 bp, Saccharomyces pastorianus
gatgttatggatgcccaatgggttt

SEQ ID NO: 142337 - DNA, 25 bp, Saccharomyces pastorianus
tgaatcttacttgagatccattatt

SEQ ID NO: 142338 - DNA, 25 bp, Saccharomyces pastorianus
aattgcgtcgtgttagatccggtgc

SEQ ID NO: 142339 - DNA, 25 bp, Saccharomyces pastorianus
gcaagaattgcgtcgtgttagatcc

SEQ ID NO: 142340 - DNA, 25 bp, Saccharomyces pastorianus
ctttacatgatgttatggatgccca

SEQ ID NO: 142341 - DNA, 25 bp, Saccharomyces pastorianus
ttatggatgcccaatgggtttacga

SEQ ID NO: 142342 - DNA, 25 bp, Saccharomyces pastorianus
tgcgtcgtgttagatccggtgctct

SEQ ID NO: 142343 - DNA, 25 bp, Saccharomyces pastorianus
ttgtgtgttcatttaggtatgctat

SEQ ID NO: 142344 - DNA, 25 bp, Saccharomyces pastorianus
agaattgcgtcgtgttagatccggt

SEQ ID NO: 142345 - DNA, 25 bp, Saccharomyces pastorianus
tagatccggtgctctgtctgaaaat

SEQ ID NO: 142346 - DNA, 25 bp, Saccharomyces pastorianus
agatccggtgctctgtctgaaaatg

SEQ ID NO: 142347 - DNA, 25 bp, Saccharomyces pastorianus
gcgtactttgtgtgttcatttaggt

SEQ ID NO: 142348 - DNA, 25 bp, Saccharomyces pastorianus
gtatgctattaggtgttggtggtca

SEQ ID NO: 142349 - DNA, 25 bp, Saccharomyces pastorianus
gatccggtgctctgtctgaaaatga

SEQ ID NO: 142350 - DNA, 25 bp, Saccharomyces pastorianus
atgcccaatgggtttacgacaatac

SEQ ID NO: 142351 - DNA, 25 bp, Saccharomyces pastorianus
atgacaacatggtcactttacatga

SEQ ID NO: 142352 - DNA, 25 bp, Saccharomyces pastorianus
cggtgctctgtctgaaaatgacaac

SEQ ID NO: 142353 - DNA, 25 bp, Saccharomyces pastorianus
gttggtggtcacatgcaagaattgc

SEQ ID NO: 142354 - DNA, 25 bp, Saccharomyces pastorianus
atccggtgctctgtctgaaaatgac

SEQ ID NO: 142355 - DNA, 25 bp, Saccharomyces pastorianus
gggcgcaactaaagtccgagatcat

SEQ ID NO: 142356 - DNA, 25 bp, Saccharomyces pastorianus
gctgacgaaatcacgaccgaggact

SEQ ID NO: 142357 - DNA, 25 bp, Saccharomyces pastorianus
gaccgaggacttaagggcgcaacta

SEQ ID NO: 142358 - DNA, 25 bp, Saccharomyces pastorianus
atgccatcggtattgcagaaccatt

SEQ ID NO: 142359 - DNA, 25 bp, Saccharomyces pastorianus
gtcgaatacaaggatgaccacggta

SEQ ID NO: 142360 - DNA, 25 bp, Saccharomyces pastorianus
taaggttgatcgttctgccgcttat

SEQ ID NO: 142361 - DNA, 25 bp, Saccharomyces pastorianus
tcaaggagttggacttagctagacc

SEQ ID NO: 142362 - DNA, 25 bp, Saccharomyces pastorianus
accgcttcttatggccatttcacaa

SEQ ID NO: 142363 - DNA, 25 bp, Saccharomyces pastorianus
gaccacggtagatgggttccgcaaa

SEQ ID NO: 142364 - DNA, 25 bp, Saccharomyces pastorianus
ggtaaggactactctaaggttgatc

SEQ ID NO: 142365 - DNA, 25 bp, Saccharomyces pastorianus
gtctccgctcaacatgctgacgaaa

SEQ ID NO: 142366 - DNA, 25 bp, Saccharomyces pastorianus
ggccggtacatttttattcacttct

SEQ ID NO: 142367 - DNA, 25 bp, Saccharomyces pastorianus
tggccggtacatttttattcacttc

SEQ ID NO: 142368 - DNA, 25 bp, Saccharomyces pastorianus
agtttccgacgccatcttggacgct

SEQ ID NO: 142369 - DNA, 25 bp, Saccharomyces pastorianus
gtgaaggtcacccagataagatctg

SEQ ID NO: 142370 - DNA, 25 bp, Saccharomyces pastorianus
gataagatctgtgaccaagtttccg

SEQ ID NO: 142371 - DNA, 25 bp, Saccharomyces pastorianus
tattcacttctgaatccgttggtga

SEQ ID NO: 142372 - DNA, 25 bp, Saccharomyces pastorianus
gtgaccaagtttccgacgccatctt

SEQ ID NO: 142373 - DNA, 25 bp, Saccharomyces pastorianus
agatctgtgaccaagtttccgacgc

SEQ ID NO: 142374 - DNA, 25 bp, Saccharomyces pastorianus
tcacttctgaatccgttggtgaagg

SEQ ID NO: 142375 - DNA, 25 bp, Saccharomyces pastorianus
gaatccgttggtgaaggtcacccag

SEQ ID NO: 142376 - DNA, 25 bp, Saccharomyces pastorianus
tctgtgaccaagtttccgacgccat

SEQ ID NO: 142377 - DNA, 25 bp, Saccharomyces pastorianus
attatgaagacctgcccaccgccaa

SEQ ID NO: 142378 - DNA, 25 bp, Saccharomyces pastorianus
ttgaattatgaagacctgcccaccg

SEQ ID NO: 142379 - DNA, 25 bp, Saccharomyces pastorianus
tgaattatgaagacctgcccaccgc

SEQ ID NO: 142380 - DNA, 25 bp, Saccharomyces pastorianus
gcccaccgccaaagatgagttaact

SEQ ID NO: 142381 - DNA, 25 bp, Saccharomyces pastorianus
ctgcccaccgccaaagatgagttaa

SEQ ID NO: 142382 - DNA, 25 bp, Saccharomyces pastorianus
gagcaaattcaaaaacttgccaaat

SEQ ID NO: 142383 - DNA, 25 bp, Saccharomyces pastorianus
aaacttgccaaatacgccataagcg

SEQ ID NO: 142384 - DNA, 25 bp, Saccharomyces pastorianus
caaatacgccataagcgcattgaat

SEQ ID NO: 142385 - DNA, 25 bp, Saccharomyces pastorianus
cagggccagtaaaatagagcaaatt

SEQ ID NO: 142386 - DNA, 25 bp, Saccharomyces pastorianus
tgccaaatacgccataagcgcattg

SEQ ID NO: 142387 - DNA, 25 bp, Saccharomyces pastorianus
gacagggccagtaaaatagagcaaa

SEQ ID NO: 142388 - DNA, 25 bp, Saccharomyces pastorianus
aagaagatcggtcgcaagagatgac

SEQ ID NO: 142389 - DNA, 25 bp, Saccharomyces pastorianus
aagagatgaccgcactagcgacaga

SEQ ID NO: 142390 - DNA, 25 bp, Saccharomyces pastorianus
gagagtgaagcagaagacagtgaca

SEQ ID NO: 142391 - DNA, 25 bp, Saccharomyces pastorianus
taagaaggagattggcggcgagagt

SEQ ID NO: 142392 - DNA, 25 bp, Saccharomyces pastorianus
accgcactagcgacagaacttcttg

SEQ ID NO: 142393 - DNA, 25 bp, Saccharomyces pastorianus
tactgagtgaagaagatcggtcgca

SEQ ID NO: 142394 - DNA, 25 bp, Saccharomyces pastorianus
gatactattgaagcgtttaagaagg

SEQ ID NO: 142395 - DNA, 25 bp, Saccharomyces pastorianus
cgacagaacttcttgatactattga

SEQ ID NO: 142396 - DNA, 25 bp, Saccharomyces pastorianus
atatgcggtgggattgatactgagt

SEQ ID NO: 142397 - DNA, 25 bp, Saccharomyces pastorianus
aagcttacacgttatgaagactcta

SEQ ID NO: 142398 - DNA, 25 bp, Saccharomyces pastorianus
gacagtgacaaaagcttacacgtta

SEQ ID NO: 142399 - DNA, 25 bp, Saccharomyces pastorianus
atgagatacttgaaacacgtttcaa

SEQ ID NO: 142400 - DNA, 25 bp, Saccharomyces pastorianus
aaacacgtttcaagaagattcaaga

SEQ ID NO: 142401 - DNA, 25 bp, Saccharomyces pastorianus
gtttcaagaagattcaagaacggtt

SEQ ID NO: 142402 - DNA, 25 bp, Saccharomyces pastorianus
ttcaagaagattcaagaacggtttc

SEQ ID NO: 142403 - DNA, 25 bp, Saccharomyces pastorianus
tgagatacttgaaacacgtttcaag

SEQ ID NO: 142404 - DNA, 25 bp, Saccharomyces pastorianus
gaaacacgtttcaagaagattcaag

SEQ ID NO: 142405 - DNA, 25 bp, Saccharomyces pastorianus
cacgtttcaagaagattcaagaacg

SEQ ID NO: 142406 - DNA, 25 bp, Saccharomyces pastorianus
tttcaagaagattcaagaacggttt

SEQ ID NO: 142407 - DNA, 25 bp, Saccharomyces pastorianus
gagatacttgaaacacgtttcaaga

SEQ ID NO: 142408 - DNA, 25 bp, Saccharomyces pastorianus
acacgtttcaagaagattcaagaac

SEQ ID NO: 142409 - DNA, 25 bp, Saccharomyces pastorianus
aacacgtttcaagaagattcaagaa

SEQ ID NO: 142410 - DNA, 25 bp, Saccharomyces pastorianus
atgtattctttccaatcttcgcaac

SEQ ID NO: 142411 - DNA, 25 bp, Saccharomyces pastorianus
tttcattcgtcgcaacagcgccaaa

SEQ ID NO: 142412 - DNA, 25 bp, Saccharomyces pastorianus
taaataccactaaccgcacaaatcc

SEQ ID NO: 142413 - DNA, 25 bp, Saccharomyces pastorianus
agtggattttctcaatttatgcctc

SEQ ID NO: 142414 - DNA, 25 bp, Saccharomyces pastorianus
caaaaccaatcactttccttcagaa

SEQ ID NO: 142415 - DNA, 25 bp, Saccharomyces pastorianus
ggtggaaactcatcaatgtattctt

SEQ ID NO: 142416 - DNA, 25 bp, Saccharomyces pastorianus
gatagatctccaataccgcaaacac

SEQ ID NO: 142417 - DNA, 25 bp, Saccharomyces pastorianus
atcttcgcaacatcggtttcattcg

SEQ ID NO: 142418 - DNA, 25 bp, Saccharomyces pastorianus
gcaaacacagcaccatgtaccagat

SEQ ID NO: 142419 - DNA, 25 bp, Saccharomyces pastorianus
cacaaatccgcttactgcacaaagt

SEQ ID NO: 142420 - DNA, 25 bp, Saccharomyces pastorianus
atcaaaatacattccatccatcgcc

SEQ ID NO: 142421 - DNA, 25 bp, Saccharomyces pastorianus
tgggcaaaccaaccgaacagtaact

SEQ ID NO: 142422 - DNA, 25 bp, Saccharomyces pastorianus
tgaaaccctttctgccagtgacaga

SEQ ID NO: 142423 - DNA, 25 bp, Saccharomyces pastorianus
gagatacgtaggtacatccactgaa

SEQ ID NO: 142424 - DNA, 25 bp, Saccharomyces pastorianus
ataacagttcatcggtcaacctcaa

SEQ ID NO: 142425 - DNA, 25 bp, Saccharomyces pastorianus
gaagaacaacgtgtgccggattttg

SEQ ID NO: 142426 - DNA, 25 bp, Saccharomyces pastorianus
ctttcttcgcctttgagggtagaag

SEQ ID NO: 142427 - DNA, 25 bp, Saccharomyces pastorianus
tacgataaatacttccctttcttcg

SEQ ID NO: 142428 - DNA, 25 bp, Saccharomyces pastorianus
tcttttgttacggacctgaacttga

SEQ ID NO: 142429 - DNA, 25 bp, Saccharomyces pastorianus
actacggatgagtttgacttttcag

SEQ ID NO: 142430 - DNA, 25 bp, Saccharomyces pastorianus
aaatgaggacctgggatctttgaaa

SEQ ID NO: 142431 - DNA, 25 bp, Saccharomyces pastorianus
gatcccacattcttctttatttaca

SEQ ID NO: 142432 - DNA, 25 bp, Saccharomyces pastorianus
aatcgccattcctaatagtgaacta

SEQ ID NO: 142433 - DNA, 25 bp, Saccharomyces pastorianus
tagtgaactaaacgcgctgcttgcc

SEQ ID NO: 142434 - DNA, 25 bp, Saccharomyces pastorianus
aaaacatggctcagtggttgaaact

SEQ ID NO: 142435 - DNA, 25 bp, Saccharomyces pastorianus
attgcacataggctttcgacgatca

SEQ ID NO: 142436 - DNA, 25 bp, Saccharomyces pastorianus
gcttgccgaacagcaggacgaggaa

SEQ ID NO: 142437 - DNA, 25 bp, Saccharomyces pastorianus
gggttcactactatatcaattgcac

SEQ ID NO: 142438 - DNA, 25 bp, Saccharomyces pastorianus
ggctttcgacgatcaaacacagtac

SEQ ID NO: 142439 - DNA, 25 bp, Saccharomyces pastorianus
tcctgccgtccttattctagatgaa

SEQ ID NO: 142440 - DNA, 25 bp, Saccharomyces pastorianus
ttccgagatctaatcgccattccta

SEQ ID NO: 142441 - DNA, 25 bp, Saccharomyces pastorianus
aaactggttcattccgagatctaat

SEQ ID NO: 142442 - DNA, 25 bp, Saccharomyces pastorianus
agatgaagcaaccagtgcccgtgac

SEQ ID NO: 142443 - DNA, 25 bp, Saccharomyces pastorianus
tggtttatcgagcttctattcagaa

SEQ ID NO: 142444 - DNA, 25 bp, Saccharomyces pastorianus
attcttcggaagtactgggctagtt

SEQ ID NO: 142445 - DNA, 25 bp, Saccharomyces pastorianus
gaaaggaccctgtatcattagccca

SEQ ID NO: 142446 - DNA, 25 bp, Saccharomyces pastorianus
gcggctgccagggtttttgaattaa

SEQ ID NO: 142447 - DNA, 25 bp, Saccharomyces pastorianus
aagcctggtgaacacgtttgcgctg

SEQ ID NO: 142448 - DNA, 25 bp, Saccharomyces pastorianus
tcggcccaaacaccagattttcaag

SEQ ID NO: 142449 - DNA, 25 bp, Saccharomyces pastorianus
aaacgtgtcattcacttatcccact

SEQ ID NO: 142450 - DNA, 25 bp, Saccharomyces pastorianus
aattgcgtctttgttgctcaggtac

SEQ ID NO: 142451 - DNA, 25 bp, Saccharomyces pastorianus
gtaagccattgattcgtccgactat

SEQ ID NO: 142452 - DNA, 25 bp, Saccharomyces pastorianus
gttggcaacactgcaatgctgtcgt

SEQ ID NO: 142453 - DNA, 25 bp, Saccharomyces pastorianus
aaaaacgaggttcgccgctatgcaa

SEQ ID NO: 142454 - DNA, 25 bp, Saccharomyces pastorianus
attggttgttcccacaagtcgatgc

SEQ ID NO: 142455 - DNA, 25 bp, Saccharomyces pastorianus
ctggagcttcattacgtgctggttt

SEQ ID NO: 142456 - DNA, 25 bp, Saccharomyces pastorianus
gtagatgcaaccaaactgacacctg

SEQ ID NO: 142457 - DNA, 25 bp, Saccharomyces pastorianus
gtggttctggaactactggagcttc

SEQ ID NO: 142458 - DNA, 25 bp, Saccharomyces pastorianus
gggtttggttcgattgtagtctcta

SEQ ID NO: 142459 - DNA, 25 bp, Saccharomyces pastorianus
atcaagagtgaaaaccccgcgcaag

SEQ ID NO: 142460 - DNA, 25 bp, Saccharomyces pastorianus
gtgctggtttacctactgttataaa

SEQ ID NO: 142461 - DNA, 25 bp, Saccharomyces pastorianus
gaaacgttccccatgattggttgtt

SEQ ID NO: 142462 - DNA, 25 bp, Saccharomyces pastorianus
ggtgatcagttcttttatgcaggta

SEQ ID NO: 142463 - DNA, 25 bp, Saccharomyces pastorianus
acggaagctctcgtcgaagcagtta

SEQ ID NO: 142464 - DNA, 25 bp, Saccharomyces pastorianus
gatgctgccgttcaccatggtggtt

SEQ ID NO: 142465 - DNA, 25 bp, Saccharomyces pastorianus
ggcatcatcgcctttcaaggtcact

SEQ ID NO: 142466 - DNA, 25 bp, Saccharomyces pastorianus
tcaagcgctggagaggaagatcaaa

SEQ ID NO: 142467 - DNA, 25 bp, Saccharomyces pastorianus
gcaggacagtccaaatgaagcccgt

SEQ ID NO: 142468 - DNA, 25 bp, Saccharomyces pastorianus
ggtacctgataagccatctgagcca

SEQ ID NO: 142469 - DNA, 25 bp, Saccharomyces pastorianus
atctgagccagaaacttcccctagg

SEQ ID NO: 142470 - DNA, 25 bp, Saccharomyces pastorianus
aatgcagatgacttggcgaaatcca

SEQ ID NO: 142471 - DNA, 25 bp, Saccharomyces pastorianus
aaatgaagcccgtagtgatgatgac

SEQ ID NO: 142472 - DNA, 25 bp, Saccharomyces pastorianus
agaaacttcccctaggcatcatcgc

SEQ ID NO: 142473 - DNA, 25 bp, Saccharomyces pastorianus
ggtcactttcgaagttcaagcgctg

SEQ ID NO: 142474 - DNA, 25 bp, Saccharomyces pastorianus
caagcatttcgttggtacctgataa

SEQ ID NO: 142475 - DNA, 25 bp, Saccharomyces pastorianus
gggccaaaaccaagcatttcgttgg

SEQ ID NO: 142476 - DNA, 25 bp, Saccharomyces pastorianus
attctgactggtggaaagtgaggac

SEQ ID NO: 142477 - DNA, 25 bp, Saccharomyces pastorianus
ggcaatattggctacattccgtata

SEQ ID NO: 142478 - DNA, 25 bp, Saccharomyces pastorianus
cctcttgggagggattctgactggt

SEQ ID NO: 142479 - DNA, 25 bp, Saccharomyces pastorianus
gggcgacttgatgcaattttgagta

SEQ ID NO: 142480 - DNA, 25 bp, Saccharomyces pastorianus
ttgagtaagaaagaccctcttggga

SEQ ID NO: 142481 - DNA, 25 bp, Saccharomyces pastorianus
aagtgaggacaaagaacggcaatat

SEQ ID NO: 142482 - DNA, 25 bp, Saccharomyces pastorianus
ggctacattccgtataactatattg

SEQ ID NO: 142483 - DNA, 25 bp, Saccharomyces pastorianus
ccgtataactatattgagatcataa

SEQ ID NO: 142484 - DNA, 25 bp, Saccharomyces pastorianus
aaaaagggcgacttgatgcaatttt

SEQ ID NO: 142485 - DNA, 25 bp, Saccharomyces pastorianus
tattggctacattccgtataactat

SEQ ID NO: 142486 - DNA, 25 bp, Saccharomyces pastorianus
gaacggcaatattggctacattccg

SEQ ID NO: 142487 - DNA, 25 bp, Saccharomyces pastorianus
cgattaagagaacgctgggacagct

SEQ ID NO: 142488 - DNA, 25 bp, Saccharomyces pastorianus
gcttattggctctgttattttaaac

SEQ ID NO: 142489 - DNA, 25 bp, Saccharomyces pastorianus
taaacaacaaatctccgataaatgg

SEQ ID NO: 142490 - DNA, 25 bp, Saccharomyces pastorianus
aacgatccacttcttatgtcaattt

SEQ ID NO: 142491 - DNA, 25 bp, Saccharomyces pastorianus
agtcccataaacgatccacttctta

SEQ ID NO: 142492 - DNA, 25 bp, Saccharomyces pastorianus
atgtcaattttaaaccgcttacaat

SEQ ID NO: 142493 - DNA, 25 bp, Saccharomyces pastorianus
ataacccagcatatcaggacacttt

SEQ ID NO: 142494 - DNA, 25 bp, Saccharomyces pastorianus
gctgggacagcttagtagaaagtgc

SEQ ID NO: 142495 - DNA, 25 bp, Saccharomyces pastorianus
caatatgcttattggctctgttatt

SEQ ID NO: 142496 - DNA, 25 bp, Saccharomyces pastorianus
aatgctaggaattgggataacccag

SEQ ID NO: 142497 - DNA, 25 bp, Saccharomyces pastorianus
gacactttaagtcccataaacgatc

SEQ ID NO: 142498 - DNA, 25 bp, Saccharomyces pastorianus
taggcgctgacacttgggccactta

SEQ ID NO: 142499 - DNA, 25 bp, Saccharomyces pastorianus
aaaatagctcgcacagtcctgaaga

SEQ ID NO: 142500 - DNA, 25 bp, Saccharomyces pastorianus
gagactagaaatcgctgtttggcca

SEQ ID NO: 142501 - DNA, 25 bp, Saccharomyces pastorianus
gacggcccaatcaaactactattct

SEQ ID NO: 142502 - DNA, 25 bp, Saccharomyces pastorianus
aatataggtacccacaaacgccgat

SEQ ID NO: 142503 - DNA, 25 bp, Saccharomyces pastorianus
agggccaatttacggcgcatgttga

SEQ ID NO: 142504 - DNA, 25 bp, Saccharomyces pastorianus
gaagaaggatacctgggaccccatt

SEQ ID NO: 142505 - DNA, 25 bp, Saccharomyces pastorianus
aaactgggcaggtggcctcatagat

SEQ ID NO: 142506 - DNA, 25 bp, Saccharomyces pastorianus
gtgtggtgactgcatttgacttaac

SEQ ID NO: 142507 - DNA, 25 bp, Saccharomyces pastorianus
ttgaacaaatcaccgtaacgccgta

SEQ ID NO: 142508 - DNA, 25 bp, Saccharomyces pastorianus
aatgcaaagatttcccgtaggcgct

SEQ ID NO: 142509 - DNA, 25 bp, Saccharomyces pastorianus
atcaatattacagctggtgccggtt

SEQ ID NO: 142510 - DNA, 25 bp, Saccharomyces pastorianus
cgatatgtgtcggtggctgcaacgt

SEQ ID NO: 142511 - DNA, 25 bp, Saccharomyces pastorianus
aatgtggcgctggaccgatatgtgt

SEQ ID NO: 142512 - DNA, 25 bp, Saccharomyces pastorianus
gtgccggttgttggctacatcggat

SEQ ID NO: 142513 - DNA, 25 bp, Saccharomyces pastorianus
aaataacccttgtcccgcagaatgg

SEQ ID NO: 142514 - DNA, 25 bp, Saccharomyces pastorianus
tcttgttctccaaataacccttgtc

SEQ ID NO: 142515 - DNA, 25 bp, Saccharomyces pastorianus
gctacatcggatttgcactgggaga

SEQ ID NO: 142516 - DNA, 25 bp, Saccharomyces pastorianus
agaatggccgtgctgctcgccgtat

SEQ ID NO: 142517 - DNA, 25 bp, Saccharomyces pastorianus
gctgcaacgtgaggtcatctttcga

SEQ ID NO: 142518 - DNA, 25 bp, Saccharomyces pastorianus
gtgctgctcgccgtataatgaatgt

SEQ ID NO: 142519 - DNA, 25 bp, Saccharomyces pastorianus
aaactccatttcttgttctccaaat

SEQ ID NO: 142520 - DNA, 25 bp, Saccharomyces pastorianus
gaatattgccatctgtgctcttaaa

SEQ ID NO: 142521 - DNA, 25 bp, Saccharomyces pastorianus
gacgccgccattttgaaagctattc

SEQ ID NO: 142522 - DNA, 25 bp, Saccharomyces pastorianus
tagaaatggccactactttccagcc

SEQ ID NO: 142523 - DNA, 25 bp, Saccharomyces pastorianus
aggccaaagctttgtaccgtcgtgg

SEQ ID NO: 142524 - DNA, 25 bp, Saccharomyces pastorianus
gatatggctctcaatgacctagaaa

SEQ ID NO: 142525 - DNA, 25 bp, Saccharomyces pastorianus
atgactgtggcgtgttacctgacga

SEQ ID NO: 142526 - DNA, 25 bp, Saccharomyces pastorianus
aatgccgaagctacaccaacagatg

SEQ ID NO: 142527 - DNA, 25 bp, Saccharomyces pastorianus
gtggcctggcctattaccatgttaa

SEQ ID NO: 142528 - DNA, 25 bp, Saccharomyces pastorianus
gaagaatttcgacaccgtcttgaaa

SEQ ID NO: 142529 - DNA, 25 bp, Saccharomyces pastorianus
gaaacagaactattccgtggcttta

SEQ ID NO: 142530 - DNA, 25 bp, Saccharomyces pastorianus
gcaagtattagtagcctcatcggag

SEQ ID NO: 142531 - DNA, 25 bp, Saccharomyces pastorianus
gtttacctccaatagaaatatcaaa

SEQ ID NO: 142532 - DNA, 25 bp, Saccharomyces pastorianus
tttcagccgttttaggcactatgtc

SEQ ID NO: 142533 - DNA, 25 bp, Saccharomyces pastorianus
tcagccgttttaggcactatgtcat

SEQ ID NO: 142534 - DNA, 25 bp, Saccharomyces pastorianus
ccgttttaggcactatgtcattgta

SEQ ID NO: 142535 - DNA, 25 bp, Saccharomyces pastorianus
ttcagccgttttaggcactatgtca

SEQ ID NO: 142536 - DNA, 25 bp, Saccharomyces pastorianus
gccgttttaggcactatgtcattgt

SEQ ID NO: 142537 - DNA, 25 bp, Saccharomyces pastorianus
aattttcagccgttttaggcactat

SEQ ID NO: 142538 - DNA, 25 bp, Saccharomyces pastorianus
gggtttacctccaatagaaatatca

SEQ ID NO: 142539 - DNA, 25 bp, Saccharomyces pastorianus
ttttcagccgttttaggcactatgt

SEQ ID NO: 142540 - DNA, 25 bp, Saccharomyces pastorianus
gttttaggcactatgtcattgtaca

SEQ ID NO: 142541 - DNA, 25 bp, Saccharomyces pastorianus
caactcaaaaactatacggccttgg

SEQ ID NO: 142542 - DNA, 25 bp, Saccharomyces pastorianus
agcaatgactttagatcacccaatg

SEQ ID NO: 142543 - DNA, 25 bp, Saccharomyces pastorianus
aattgagtgagatacccggaatggt

SEQ ID NO: 142544 - DNA, 25 bp, Saccharomyces pastorianus
cacgcaaaggcatttcacaagggtt

SEQ ID NO: 142545 - DNA, 25 bp, Saccharomyces pastorianus
gcagatggtgttttccagttttgga

SEQ ID NO: 142546 - DNA, 25 bp, Saccharomyces pastorianus
agagctttgggcgaatcaaggtcta

SEQ ID NO: 142547 - DNA, 25 bp, Saccharomyces pastorianus
aaacacataccatagcgcaaagaac

SEQ ID NO: 142548 - DNA, 25 bp, Saccharomyces pastorianus
agaattggaccaagccatctctatc

SEQ ID NO: 142549 - DNA, 25 bp, Saccharomyces pastorianus
ataattccatacacgcaaaggcatt

SEQ ID NO: 142550 - DNA, 25 bp, Saccharomyces pastorianus
gtctgaagactttggatggtcataa

SEQ ID NO: 142551 - DNA, 25 bp, Saccharomyces pastorianus
accaagccatctctatcctaaatga

SEQ ID NO: 142552 - DNA, 25 bp, Saccharomyces pastorianus
atatgatcgtaagtgctgatgcaga

SEQ ID NO: 142553 - DNA, 25 bp, Saccharomyces pastorianus
aacgcttctcgcagttggcgggaca

SEQ ID NO: 142554 - DNA, 25 bp, Saccharomyces pastorianus
ggcggtgatgctatctttcagttaa

SEQ ID NO: 142555 - DNA, 25 bp, Saccharomyces pastorianus
ggtcatggtggtacaatttccagtt

SEQ ID NO: 142556 - DNA, 25 bp, Saccharomyces pastorianus
ggttacattactcattcgttcaaag

SEQ ID NO: 142557 - DNA, 25 bp, Saccharomyces pastorianus
ggttattagcatccggtgacaccaa

SEQ ID NO: 142558 - DNA, 25 bp, Saccharomyces pastorianus
gactctgaatctggtagcgtgctta

SEQ ID NO: 142559 - DNA, 25 bp, Saccharomyces pastorianus
gcataatttatacagccggcggtga

SEQ ID NO: 142560 - DNA, 25 bp, Saccharomyces pastorianus
tttactttccggtggtagagacgat

SEQ ID NO: 142561 - DNA, 25 bp, Saccharomyces pastorianus
gacgatatcatcaatctctgggatt

SEQ ID NO: 142562 - DNA, 25 bp, Saccharomyces pastorianus
gtacattctcgacgcagattccact

SEQ ID NO: 142563 - DNA, 25 bp, Saccharomyces pastorianus
acaggtagagtcatgcggattccta

SEQ ID NO: 142564 - DNA, 25 bp, Saccharomyces pastorianus
cagatatcgaaggaattatgggcaa

SEQ ID NO: 142565 - DNA, 25 bp, Saccharomyces pastorianus
gtgcattggcagatatcgaaggaat

SEQ ID NO: 142566 - DNA, 25 bp, Saccharomyces pastorianus
agcagcggctgaaaatcttcgtttc

SEQ ID NO: 142567 - DNA, 25 bp, Saccharomyces pastorianus
gaaaatcttcgtttcactaaaaatg

SEQ ID NO: 142568 - DNA, 25 bp, Saccharomyces pastorianus
ggctgaaaatcttcgtttcactaaa

SEQ ID NO: 142569 - DNA, 25 bp, Saccharomyces pastorianus
gcggctgaaaatcttcgtttcacta

SEQ ID NO: 142570 - DNA, 25 bp, Saccharomyces pastorianus
tatttagtgagagtgcattggcaga

SEQ ID NO: 142571 - DNA, 25 bp, Saccharomyces pastorianus
gtgagagtgcattggcagatatcga

SEQ ID NO: 142572 - DNA, 25 bp, Saccharomyces pastorianus
ggaattatgggcaatgatgttaacc

SEQ ID NO: 142573 - DNA, 25 bp, Saccharomyces pastorianus
gcaaagtatggtggaagcagcggct

SEQ ID NO: 142574 - DNA, 25 bp, Saccharomyces pastorianus
aagaaggcaaagtatggtggaagca

SEQ ID NO: 142575 - DNA, 25 bp, Saccharomyces pastorianus
gttcctaaggttccattatctgcat

SEQ ID NO: 142576 - DNA, 25 bp, Saccharomyces pastorianus
gaagatgcgtcattaatacctcata

SEQ ID NO: 142577 - DNA, 25 bp, Saccharomyces pastorianus
atcggtaacaataacagccatagcg

SEQ ID NO: 142578 - DNA, 25 bp, Saccharomyces pastorianus
ggaggatgattcaccatcccacaca

SEQ ID NO: 142579 - DNA, 25 bp, Saccharomyces pastorianus
gcgacataaataccggtaccgattt

SEQ ID NO: 142580 - DNA, 25 bp, Saccharomyces pastorianus
cataattctgatcttgccgtggaca

SEQ ID NO: 142581 - DNA, 25 bp, Saccharomyces pastorianus
gctgcagattggtatgaagttccta

SEQ ID NO: 142582 - DNA, 25 bp, Saccharomyces pastorianus
atacccctatgaatgaacttccctc

SEQ ID NO: 142583 - DNA, 25 bp, Saccharomyces pastorianus
aaagttcccattggctatattggta

SEQ ID NO: 142584 - DNA, 25 bp, Saccharomyces pastorianus
aatggccatgagatcatcggtaaca

SEQ ID NO: 142585 - DNA, 25 bp, Saccharomyces pastorianus
gcacaaatggccatgctgcagattg

SEQ ID NO: 142586 - DNA, 25 bp, Saccharomyces pastorianus
ttgaaggcactggaacgacacatct

SEQ ID NO: 142587 - DNA, 25 bp, Saccharomyces pastorianus
tgtacctttacaagcctatccgata

SEQ ID NO: 142588 - DNA, 25 bp, Saccharomyces pastorianus
gattattgggcacggtgtaccttta

SEQ ID NO: 142589 - DNA, 25 bp, Saccharomyces pastorianus
tcttcccctggaactgaaagctatc

SEQ ID NO: 142590 - DNA, 25 bp, Saccharomyces pastorianus
gatatcgaagccgtggttactcttt

SEQ ID NO: 142591 - DNA, 25 bp, Saccharomyces pastorianus
gagtttggcctgcttacaatctgaa

SEQ ID NO: 142592 - DNA, 25 bp, Saccharomyces pastorianus
gaagtttcgtctacaagcatccggt

SEQ ID NO: 142593 - DNA, 25 bp, Saccharomyces pastorianus
accttcccaggctatacgatgagca

SEQ ID NO: 142594 - DNA, 25 bp, Saccharomyces pastorianus
tgttctttttcataccagtttgcat

SEQ ID NO: 142595 - DNA, 25 bp, Saccharomyces pastorianus
atactgtgttaacctaggccacctt

SEQ ID NO: 142596 - DNA, 25 bp, Saccharomyces pastorianus
gaggaaggacgagcctacaccggta

SEQ ID NO: 142597 - DNA, 25 bp, Saccharomyces pastorianus
tctggaaggcttattactttcatca

SEQ ID NO: 142598 - DNA, 25 bp, Saccharomyces pastorianus
agaaactgcgctttgactcacctaa

SEQ ID NO: 142599 - DNA, 25 bp, Saccharomyces pastorianus
gggaacttgccggacattttgtcac

SEQ ID NO: 142600 - DNA, 25 bp, Saccharomyces pastorianus
gactgttcagaatctctggacgatt

SEQ ID NO: 142601 - DNA, 25 bp, Saccharomyces pastorianus
tgaagtaactgactaccaactccct

SEQ ID NO: 142602 - DNA, 25 bp, Saccharomyces pastorianus
gaccctcagattatatgctgcttga

SEQ ID NO: 142603 - DNA, 25 bp, Saccharomyces pastorianus
tggacgattatcatccccgaactta

SEQ ID NO: 142604 - DNA, 25 bp, Saccharomyces pastorianus
gaacttaccaattcagacatcccag

SEQ ID NO: 142605 - DNA, 25 bp, Saccharomyces pastorianus
actccctaaggtactgttgactgct

SEQ ID NO: 142606 - DNA, 25 bp, Saccharomyces pastorianus
tattgatgcttgtgacaatcctgat

SEQ ID NO: 142607 - DNA, 25 bp, Saccharomyces pastorianus
acacattcgaagcatcatctgaaat

SEQ ID NO: 142608 - DNA, 25 bp, Saccharomyces pastorianus
attttctctcatatccagacgaagc

SEQ ID NO: 142609 - DNA, 25 bp, Saccharomyces pastorianus
agaaaaactatcactggcccactat

SEQ ID NO: 142610 - DNA, 25 bp, Saccharomyces pastorianus
attgtctccgctcccagaaaaagat

SEQ ID NO: 142611 - DNA, 25 bp, Saccharomyces pastorianus
aaacatgctgcttcacgagggagaa

SEQ ID NO: 142612 - DNA, 25 bp, Saccharomyces pastorianus
attgactaaggtgctttctccaaaa

SEQ ID NO: 142613 - DNA, 25 bp, Saccharomyces pastorianus
aatgacaccggcatcatatggaatg

SEQ ID NO: 142614 - DNA, 25 bp, Saccharomyces pastorianus
aattggatgccctacattgactaag

SEQ ID NO: 142615 - DNA, 25 bp, Saccharomyces pastorianus
gatggcgtttcttctgagttggtaa

SEQ ID NO: 142616 - DNA, 25 bp, Saccharomyces pastorianus
cagggaattttcttgcattaacttt

SEQ ID NO: 142617 - DNA, 25 bp, Saccharomyces pastorianus
gacgattatgtgtatgattctcccg

SEQ ID NO: 142618 - DNA, 25 bp, Saccharomyces pastorianus
atgattctcccgacatgattaataa

SEQ ID NO: 142619 - DNA, 25 bp, Saccharomyces pastorianus
gagtaatccactgacgttttccatt

SEQ ID NO: 142620 - DNA, 25 bp, Saccharomyces pastorianus
ggagatacttattttcaacgagcga

SEQ ID NO: 142621 - DNA, 25 bp, Saccharomyces pastorianus
ggtcactgggaaattctcactgtat

SEQ ID NO: 142622 - DNA, 25 bp, Saccharomyces pastorianus
ggtacttgaatattgcctcactcta

SEQ ID NO: 142623 - DNA, 25 bp, Saccharomyces pastorianus
gtgattaatctaggttccacacatt

SEQ ID NO: 142624 - DNA, 25 bp, Saccharomyces pastorianus
ttcaaatgctctcttcgcgaagttg

SEQ ID NO: 142625 - DNA, 25 bp, Saccharomyces pastorianus
gacgttttccattgtaatctcacta

SEQ ID NO: 142626 - DNA, 25 bp, Saccharomyces pastorianus
atgacatcatcgaacacctatgcgc

SEQ ID NO: 142627 - DNA, 25 bp, Saccharomyces pastorianus
acagatggactttcaactcatgaga

SEQ ID NO: 142628 - DNA, 25 bp, Saccharomyces pastorianus
aaggattccgtccaaatgtgcgtta

SEQ ID NO: 142629 - DNA, 25 bp, Saccharomyces pastorianus
aacacactttggttccacagtcatg

SEQ ID NO: 142630 - DNA, 25 bp, Saccharomyces pastorianus
aaatctgcgaaggtcatgcctccaa

SEQ ID NO: 142631 - DNA, 25 bp, Saccharomyces pastorianus
acgaccctgggtgtctcactagtgc

SEQ ID NO: 142632 - DNA, 25 bp, Saccharomyces pastorianus
atacaaacggcattggcacagacgc

SEQ ID NO: 142633 - DNA, 25 bp, Saccharomyces pastorianus
tgtctcactagtgcacggcttcgag

SEQ ID NO: 142634 - DNA, 25 bp, Saccharomyces pastorianus
agagtgaactcattctcctcatgga

SEQ ID NO: 142635 - DNA, 25 bp, Saccharomyces pastorianus
gagcacatagacaagatccaagtac

SEQ ID NO: 142636 - DNA, 25 bp, Saccharomyces pastorianus
cgaatgcctgcaagaatactctctt

SEQ ID NO: 142637 - DNA, 25 bp, Saccharomyces pastorianus
gtcatgcctccaagactgatgttgt

SEQ ID NO: 142638 - DNA, 25 bp, Saccharomyces pastorianus
tgaatgccctcgtagacatcgcgaa

SEQ ID NO: 142639 - DNA, 25 bp, Saccharomyces pastorianus
gccgcccaagccgatgactgagagt

SEQ ID NO: 142640 - DNA, 25 bp, Saccharomyces pastorianus
agacgccaccattgcggagcacata

SEQ ID NO: 142641 - DNA, 25 bp, Saccharomyces pastorianus
aattggaccaactcgctgcaggcgg

SEQ ID NO: 142642 - DNA, 25 bp, Saccharomyces pastorianus
gagacatgcatcgaaaccgccggca

SEQ ID NO: 142643 - DNA, 25 bp, Saccharomyces pastorianus
aacagagactgatactttcccacac

SEQ ID NO: 142644 - DNA, 25 bp, Saccharomyces pastorianus
aaccgccggcaatgttgctcaagta

SEQ ID NO: 142645 - DNA, 25 bp, Saccharomyces pastorianus
ttttgttcccgaagagttctggtat

SEQ ID NO: 142646 - DNA, 25 bp, Saccharomyces pastorianus
gcgtctgaacgccaaacaatcacta

SEQ ID NO: 142647 - DNA, 25 bp, Saccharomyces pastorianus
ctttacctctgaccacagtggagct

SEQ ID NO: 142648 - DNA, 25 bp, Saccharomyces pastorianus
tccaacgctcggctttgtagtagac

SEQ ID NO: 142649 - DNA, 25 bp, Saccharomyces pastorianus
gagaaaccaagccaccatgaccaag

SEQ ID NO: 142650 - DNA, 25 bp, Saccharomyces pastorianus
aagtcgtatcgtatggtacatgcca

SEQ ID NO: 142651 - DNA, 25 bp, Saccharomyces pastorianus
gaccggctgagcgtgttaacgtttt

SEQ ID NO: 142652 - DNA, 25 bp, Saccharomyces pastorianus
atgtcctttacaacatcagtcttgg

SEQ ID NO: 142653 - DNA, 25 bp, Saccharomyces pastorianus
aagcggagagctttttcgaagacaa

SEQ ID NO: 142654 - DNA, 25 bp, Saccharomyces pastorianus
gtcttgtgccagtacttcctatact

SEQ ID NO: 142655 - DNA, 25 bp, Saccharomyces pastorianus
ttcctatacttctcgactatgtcct

SEQ ID NO: 142656 - DNA, 25 bp, Saccharomyces pastorianus
gcatgaccttcgcagattttcttga

SEQ ID NO: 142657 - DNA, 25 bp, Saccharomyces pastorianus
atcagtcttggaggcatgaccttcg

SEQ ID NO: 142658 - DNA, 25 bp, Saccharomyces pastorianus
aaacgccttacatggatgccttgac

SEQ ID NO: 142659 - DNA, 25 bp, Saccharomyces pastorianus
gagtattcttgcaggcattcgtctt

SEQ ID NO: 142660 - DNA, 25 bp, Saccharomyces pastorianus
gattttcttgaggtcttgctccatt

SEQ ID NO: 142661 - DNA, 25 bp, Saccharomyces pastorianus
ttgctccatttctctgcgctggaag

SEQ ID NO: 142662 - DNA, 25 bp, Saccharomyces pastorianus
acatggatgccttgacacggtcata

SEQ ID NO: 142663 - DNA, 25 bp, Saccharomyces pastorianus
cattgagttcaattcgcgagtacga

SEQ ID NO: 142664 - DNA, 25 bp, Saccharomyces pastorianus
gatcatttgccccattctacaggaa

SEQ ID NO: 142665 - DNA, 25 bp, Saccharomyces pastorianus
aaaattttgacttcagggctggcgt

SEQ ID NO: 142666 - DNA, 25 bp, Saccharomyces pastorianus
tcccgcttccagtagtgacattatg

SEQ ID NO: 142667 - DNA, 25 bp, Saccharomyces pastorianus
ttctacggtgaattctgccaatgag

SEQ ID NO: 142668 - DNA, 25 bp, Saccharomyces pastorianus
agagtcgtatgcatacccttacgct

SEQ ID NO: 142669 - DNA, 25 bp, Saccharomyces pastorianus
ggttttgtcatcttgccttttcccg

SEQ ID NO: 142670 - DNA, 25 bp, Saccharomyces pastorianus
aacactggcaggattcgaaggagga

SEQ ID NO: 142671 - DNA, 25 bp, Saccharomyces pastorianus
gatttttgccacagatcatttgccc

SEQ ID NO: 142672 - DNA, 25 bp, Saccharomyces pastorianus
gagaagaactatttgccgttgtcaa

SEQ ID NO: 142673 - DNA, 25 bp, Saccharomyces pastorianus
cagggctggcgtactttattattgg

SEQ ID NO: 142674 - DNA, 25 bp, Saccharomyces pastorianus
aggagttctccttattctatgtcga

SEQ ID NO: 142675 - DNA, 25 bp, Saccharomyces pastorianus
aaaagatcaccagtgggccgctaac

SEQ ID NO: 142676 - DNA, 25 bp, Saccharomyces pastorianus
gtgggatcatgtttgtctttctaga

SEQ ID NO: 142677 - DNA, 25 bp, Saccharomyces pastorianus
tggaatcccctatttttacgagtat

SEQ ID NO: 142678 - DNA, 25 bp, Saccharomyces pastorianus
gcatctaattactgggcgtacctca

SEQ ID NO: 142679 - DNA, 25 bp, Saccharomyces pastorianus
ttcataaccagattggctcctgcac

SEQ ID NO: 142680 - DNA, 25 bp, Saccharomyces pastorianus
gcaaggtattggtatgttcccgttt

SEQ ID NO: 142681 - DNA, 25 bp, Saccharomyces pastorianus
gcagctcaggctgtattagatccta

SEQ ID NO: 142682 - DNA, 25 bp, Saccharomyces pastorianus
aacctatctcttcacattgcttaac

SEQ ID NO: 142683 - DNA, 25 bp, Saccharomyces pastorianus
tacctcagcgataccaccaaaattg

SEQ ID NO: 142684 - DNA, 25 bp, Saccharomyces pastorianus
tagttttcacattggcaggtacagc

SEQ ID NO: 142685 - DNA, 25 bp, Saccharomyces pastorianus
gagattctttgggtgctttgtctaa

SEQ ID NO: 142686 - DNA, 25 bp, Saccharomyces pastorianus
ttgggtgctttgtctaaggctttga

SEQ ID NO: 142687 - DNA, 25 bp, Saccharomyces pastorianus
gtctaaggctttgaaggaatttgaa

SEQ ID NO: 142688 - DNA, 25 bp, Saccharomyces pastorianus
atggcaaagacctcacttgattgtc

SEQ ID NO: 142689 - DNA, 25 bp, Saccharomyces pastorianus
attctttgggtgctttgtctaaggc

SEQ ID NO: 142690 - DNA, 25 bp, Saccharomyces pastorianus
ctcacttgattgtcttagatgaacc

SEQ ID NO: 142691 - DNA, 25 bp, Saccharomyces pastorianus
tgaatctcactctaagatggttgct

SEQ ID NO: 142692 - DNA, 25 bp, Saccharomyces pastorianus
tgctttgtctaaggctttgaaggaa

SEQ ID NO: 142693 - DNA, 25 bp, Saccharomyces pastorianus
ggttgaatctcactctaagatggtt

SEQ ID NO: 142694 - DNA, 25 bp, Saccharomyces pastorianus
ctttgggtgctttgtctaaggcttt

SEQ ID NO: 142695 - DNA, 25 bp, Saccharomyces pastorianus
gacctcacttgattgtcttagatga

SEQ ID NO: 142696 - DNA, 25 bp, Saccharomyces pastorianus
acttctatcactatttctcacgact

SEQ ID NO: 142697 - DNA, 25 bp, Saccharomyces pastorianus
tctcacgactccgttttcttagata

SEQ ID NO: 142698 - DNA, 25 bp, Saccharomyces pastorianus
tccgtcttggatttcgttttcgaat

SEQ ID NO: 142699 - DNA, 25 bp, Saccharomyces pastorianus
gttttcgaatctggtgttggtacta

SEQ ID NO: 142700 - DNA, 25 bp, Saccharomyces pastorianus
tagaaccgtctacgtcgaacacgac

SEQ ID NO: 142701 - DNA, 25 bp, Saccharomyces pastorianus
gtcgaacacgacattgatggtactc

SEQ ID NO: 142702 - DNA, 25 bp, Saccharomyces pastorianus
tcactctgacacttccgtcttggat

SEQ ID NO: 142703 - DNA, 25 bp, Saccharomyces pastorianus
aatgagagctattgccaacggtcaa

SEQ ID NO: 142704 - DNA, 25 bp, Saccharomyces pastorianus
cagttggtccaaacttcgacgacga

SEQ ID NO: 142705 - DNA, 25 bp, Saccharomyces pastorianus
acacctgtggtatcacttctatcac

SEQ ID NO: 142706 - DNA, 25 bp, Saccharomyces pastorianus
agttaactacttgaacacctgtggt

SEQ ID NO: 142707 - DNA, 25 bp, Saccharomyces pastorianus
gaccacatcttcaaccttgtacttg

SEQ ID NO: 142708 - DNA, 25 bp, Saccharomyces pastorianus
caacgctgcaagaagtcactgtaat

SEQ ID NO: 142709 - DNA, 25 bp, Saccharomyces pastorianus
caaaaactaacaacgctgcaagaag

SEQ ID NO: 142710 - DNA, 25 bp, Saccharomyces pastorianus
cacatcttcaaccttgtacttgcag

SEQ ID NO: 142711 - DNA, 25 bp, Saccharomyces pastorianus
atcaaagtctcgaccacatcttcaa

SEQ ID NO: 142712 - DNA, 25 bp, Saccharomyces pastorianus
gtcactgtaatattccaaataccca

SEQ ID NO: 142713 - DNA, 25 bp, Saccharomyces pastorianus
ggatactatcaaagtctcgaccaca

SEQ ID NO: 142714 - DNA, 25 bp, Saccharomyces pastorianus
gtacttgcagaacatggcaaaaact

SEQ ID NO: 142715 - DNA, 25 bp, Saccharomyces pastorianus
atcttcaaccttgtacttgcagaac

SEQ ID NO: 142716 - DNA, 25 bp, Saccharomyces pastorianus
gaagttgtttaaggatactatcaaa

SEQ ID NO: 142717 - DNA, 25 bp, Saccharomyces pastorianus
aaccttgtacttgcagaacatggca

SEQ ID NO: 142718 - DNA, 25 bp, Saccharomyces pastorianus
ccgaatttggatttggaaacagcta

SEQ ID NO: 142719 - DNA, 25 bp, Saccharomyces pastorianus
aacagatttagagatacaggtagat

SEQ ID NO: 142720 - DNA, 25 bp, Saccharomyces pastorianus
ctggagacccagttgagcgagcttg

SEQ ID NO: 142721 - DNA, 25 bp, Saccharomyces pastorianus
aggcgccacgaaagaatatgaaaat

SEQ ID NO: 142722 - DNA, 25 bp, Saccharomyces pastorianus
aaaagcgatcttcttgagagccaac

SEQ ID NO: 142723 - DNA, 25 bp, Saccharomyces pastorianus
gaaacagctatacagataatctcct

SEQ ID NO: 142724 - DNA, 25 bp, Saccharomyces pastorianus
gatcttcttgagagccaacaacaaa

SEQ ID NO: 142725 - DNA, 25 bp, Saccharomyces pastorianus
agcgagcttgaaggcgccacgaaag

SEQ ID NO: 142726 - DNA, 25 bp, Saccharomyces pastorianus
ggagacccagttgagcgagcttgaa

SEQ ID NO: 142727 - DNA, 25 bp, Saccharomyces pastorianus
ataatctcctcactggagacccagt

SEQ ID NO: 142728 - DNA, 25 bp, Saccharomyces pastorianus
gcttgaaggcgccacgaaagaatat

SEQ ID NO: 142729 - DNA, 25 bp, Saccharomyces pastorianus
gtaccattccaacggttccatcgtt

SEQ ID NO: 142730 - DNA, 25 bp, Saccharomyces pastorianus
gccactattatcgtcattttccatg

SEQ ID NO: 142731 - DNA, 25 bp, Saccharomyces pastorianus
atgataaagccttccagtctggtag

SEQ ID NO: 142732 - DNA, 25 bp, Saccharomyces pastorianus
gcatccaactctgctacacagtata

SEQ ID NO: 142733 - DNA, 25 bp, Saccharomyces pastorianus
atgacgcctatgacaagtgcattca

SEQ ID NO: 142734 - DNA, 25 bp, Saccharomyces pastorianus
ttatcgacactgagaagcccacaag

SEQ ID NO: 142735 - DNA, 25 bp, Saccharomyces pastorianus
gctatcatcggtgcagccactatta

SEQ ID NO: 142736 - DNA, 25 bp, Saccharomyces pastorianus
aaggctcagacttagcatccaactc

SEQ ID NO: 142737 - DNA, 25 bp, Saccharomyces pastorianus
attttccatgaaccagctaaacggg

SEQ ID NO: 142738 - DNA, 25 bp, Saccharomyces pastorianus
aaatttgccagacccatctagagat

SEQ ID NO: 142739 - DNA, 25 bp, Saccharomyces pastorianus
agtgccaacggcagtgctttatcga

SEQ ID NO: 142740 - DNA, 25 bp, Saccharomyces pastorianus
agaaacaccaattcactattcgatt

SEQ ID NO: 142741 - DNA, 25 bp, Saccharomyces pastorianus
gagtacgctcaagaggcattaaatt

SEQ ID NO: 142742 - DNA, 25 bp, Saccharomyces pastorianus
ccatggatggctacagaaactgcat

SEQ ID NO: 142743 - DNA, 25 bp, Saccharomyces pastorianus
gaatgttatcttgtcttacccttgt

SEQ ID NO: 142744 - DNA, 25 bp, Saccharomyces pastorianus
gcattaaattttgccatggatggct

SEQ ID NO: 142745 - DNA, 25 bp, Saccharomyces pastorianus
caccaattcactattcgattacatg

SEQ ID NO: 142746 - DNA, 25 bp, Saccharomyces pastorianus
gatcctggtactaatatcgtagcta

SEQ ID NO: 142747 - DNA, 25 bp, Saccharomyces pastorianus
gaaactgcatgattttcttcaacaa

SEQ ID NO: 142748 - DNA, 25 bp, Saccharomyces pastorianus
atcgtagctaaggagtacgctcaag

SEQ ID NO: 142749 - DNA, 25 bp, Saccharomyces pastorianus
actcattatgaaccaatgggcagtg

SEQ ID NO: 142750 - DNA, 25 bp, Saccharomyces pastorianus
atgggcagtgaagatcctggtacta

SEQ ID NO: 142751 - DNA, 25 bp, Saccharomyces pastorianus
gaaggtggttctgtagattcaaata

SEQ ID NO: 142752 - DNA, 25 bp, Saccharomyces pastorianus
caacttcggaaggtggttctgtaga

SEQ ID NO: 142753 - DNA, 25 bp, Saccharomyces pastorianus
cttcggaaggtggttctgtagattc

SEQ ID NO: 142754 - DNA, 25 bp, Saccharomyces pastorianus
gtgagcccttgatcaacaaagggtt

SEQ ID NO: 142755 - DNA, 25 bp, Saccharomyces pastorianus
tgatagtagtgagcccttgatcaac

SEQ ID NO: 142756 - DNA, 25 bp, Saccharomyces pastorianus
agtagtgagcccttgatcaacaaag

SEQ ID NO: 142757 - DNA, 25 bp, Saccharomyces pastorianus
atgtcaatgatagtagtgagccctt

SEQ ID NO: 142758 - DNA, 25 bp, Saccharomyces pastorianus
tggttctgtagattcaaataatgat

SEQ ID NO: 142759 - DNA, 25 bp, Saccharomyces pastorianus
ttaccaacttcggaaggtggttctg

SEQ ID NO: 142760 - DNA, 25 bp, Saccharomyces pastorianus
caatgatagtagtgagcccttgatc

SEQ ID NO: 142761 - DNA, 25 bp, Saccharomyces pastorianus
gatcaacaaagggttattaccaact

SEQ ID NO: 142762 - DNA, 25 bp, Saccharomyces pastorianus
gggagccctcgactactaagaaatc

SEQ ID NO: 142763 - DNA, 25 bp, Saccharomyces pastorianus
agcaaccagccaggacgtgtctaac

SEQ ID NO: 142764 - DNA, 25 bp, Saccharomyces pastorianus
ataacaacatgtctgctgccactac

SEQ ID NO: 142765 - DNA, 25 bp, Saccharomyces pastorianus
tctcaccagatcctattgtccaata

SEQ ID NO: 142766 - DNA, 25 bp, Saccharomyces pastorianus
gaagtggttctaaccctgtgaacaa

SEQ ID NO: 142767 - DNA, 25 bp, Saccharomyces pastorianus
gagaccctgataattttcctcaatt

SEQ ID NO: 142768 - DNA, 25 bp, Saccharomyces pastorianus
atggcctttagttgtgggttacaca

SEQ ID NO: 142769 - DNA, 25 bp, Saccharomyces pastorianus
gtcgaggcactggagctatgtcaaa

SEQ ID NO: 142770 - DNA, 25 bp, Saccharomyces pastorianus
tggcatggccaatcctggtcacgat

SEQ ID NO: 142771 - DNA, 25 bp, Saccharomyces pastorianus
taaccacggtgcagtttgccatttt

SEQ ID NO: 142772 - DNA, 25 bp, Saccharomyces pastorianus
gtgcctctaatgatttgactacctt

SEQ ID NO: 142773 - DNA, 25 bp, Saccharomyces pastorianus
tgacccctggtgatttgggtactct

SEQ ID NO: 142774 - DNA, 25 bp, Saccharomyces pastorianus
aaatgtctctggcttcggttcctat

SEQ ID NO: 142775 - DNA, 25 bp, Saccharomyces pastorianus
gagtgaatcctgcagctgacgatga

SEQ ID NO: 142776 - DNA, 25 bp, Saccharomyces pastorianus
tagtgtacctggctcaccaagagat

SEQ ID NO: 142777 - DNA, 25 bp, Saccharomyces pastorianus
agactgtccgacttactggactgga

SEQ ID NO: 142778 - DNA, 25 bp, Saccharomyces pastorianus
tggatcgtcgtttcaaggcacctga

SEQ ID NO: 142779 - DNA, 25 bp, Saccharomyces pastorianus
gtacagtaatgggtgttccctccat

SEQ ID NO: 142780 - DNA, 25 bp, Saccharomyces pastorianus
gttgcaagaccgcttagtgtacctg

SEQ ID NO: 142781 - DNA, 25 bp, Saccharomyces pastorianus
gaagaggctatcctgatcagttcag

SEQ ID NO: 142782 - DNA, 25 bp, Saccharomyces pastorianus
acagcacagtttacatgacccctgg

SEQ ID NO: 142783 - DNA, 25 bp, Saccharomyces pastorianus
gggtgttttcccttcatactacgag

SEQ ID NO: 142784 - DNA, 25 bp, Saccharomyces pastorianus
tcccgtgacctacaaaaccatttgt

SEQ ID NO: 142785 - DNA, 25 bp, Saccharomyces pastorianus
aagcctgaggccttttccgatgaaa

SEQ ID NO: 142786 - DNA, 25 bp, Saccharomyces pastorianus
taaaatcgaaggctcccattacggt

SEQ ID NO: 142787 - DNA, 25 bp, Saccharomyces pastorianus
ggcccttaaataaagccacttatca

SEQ ID NO: 142788 - DNA, 25 bp, Saccharomyces pastorianus
gcagcatgccctgcaaacaatggaa

SEQ ID NO: 142789 - DNA, 25 bp, Saccharomyces pastorianus
tcccattacggttgcccagtataaa

SEQ ID NO: 142790 - DNA, 25 bp, Saccharomyces pastorianus
cattaccacttgatagggcccttaa

SEQ ID NO: 142791 - DNA, 25 bp, Saccharomyces pastorianus
atactttttgacttggattctgtga

SEQ ID NO: 142792 - DNA, 25 bp, Saccharomyces pastorianus
aaatgaggccagtgcagcatgccct

SEQ ID NO: 142793 - DNA, 25 bp, Saccharomyces pastorianus
ggtggctgattgaaggtgctccaaa

SEQ ID NO: 142794 - DNA, 25 bp, Saccharomyces pastorianus
aaccatttgttattcgagactgcga

SEQ ID NO: 142795 - DNA, 25 bp, Saccharomyces pastorianus
aattgccatattatactaatactga

SEQ ID NO: 142796 - DNA, 25 bp, Saccharomyces pastorianus
gtcaaataaattgccatattatact

SEQ ID NO: 142797 - DNA, 25 bp, Saccharomyces pastorianus
aaattgccatattatactaatactg

SEQ ID NO: 142798 - DNA, 25 bp, Saccharomyces pastorianus
tattatactaatactgaactagact

SEQ ID NO: 142799 - DNA, 25 bp, Saccharomyces pastorianus
tatactaatactgaactagactatg

SEQ ID NO: 142800 - DNA, 25 bp, Saccharomyces pastorianus
tgccatattatactaatactgaact

SEQ ID NO: 142801 - DNA, 25 bp, Saccharomyces pastorianus
gccatattatactaatactgaacta

SEQ ID NO: 142802 - DNA, 25 bp, Saccharomyces pastorianus
ttgccatattatactaatactgaac

SEQ ID NO: 142803 - DNA, 25 bp, Saccharomyces pastorianus
attgccatattatactaatactgaa

SEQ ID NO: 142804 - DNA, 25 bp, Saccharomyces pastorianus
atactaatactgaactagactatgt

SEQ ID NO: 142805 - DNA, 25 bp, Saccharomyces pastorianus
tactaatactgaactagactatgtt

SEQ ID NO: 142806 - DNA, 25 bp, Saccharomyces pastorianus
aatctgttggcagttgagacatggt

SEQ ID NO: 142807 - DNA, 25 bp, Saccharomyces pastorianus
gttggcagttgagacatggtatatg

SEQ ID NO: 142808 - DNA, 25 bp, Saccharomyces pastorianus
ctgttggcagttgagacatggtata

SEQ ID NO: 142809 - DNA, 25 bp, Saccharomyces pastorianus
aaaatctgttggcagttgagacatg

SEQ ID NO: 142810 - DNA, 25 bp, Saccharomyces pastorianus
gaagcaaaatctgttggcagttgag

SEQ ID NO: 142811 - DNA, 25 bp, Saccharomyces pastorianus
agcaaaatctgttggcagttgagac

SEQ ID NO: 142812 - DNA, 25 bp, Saccharomyces pastorianus
atgaagcaaaatctgttggcagttg

SEQ ID NO: 142813 - DNA, 25 bp, Saccharomyces pastorianus
aaatctgttggcagttgagacatgg

SEQ ID NO: 142814 - DNA, 25 bp, Saccharomyces pastorianus
atctgttggcagttgagacatggta

SEQ ID NO: 142815 - DNA, 25 bp, Saccharomyces pastorianus
gcaaaatctgttggcagttgagaca

SEQ ID NO: 142816 - DNA, 25 bp, Saccharomyces pastorianus
tctgttggcagttgagacatggtat

SEQ ID NO: 142817 - DNA, 25 bp, Saccharomyces pastorianus
tttccttcgatatatagtgatgata

SEQ ID NO: 142818 - DNA, 25 bp, Saccharomyces pastorianus
gagttggaaagcctcttttccttcg

SEQ ID NO: 142819 - DNA, 25 bp, Saccharomyces pastorianus
gaaagcctcttttccttcgatatat

SEQ ID NO: 142820 - DNA, 25 bp, Saccharomyces pastorianus
aaagcctcttttccttcgatatata

SEQ ID NO: 142821 - DNA, 25 bp, Saccharomyces pastorianus
gcctcttttccttcgatatatagtg

SEQ ID NO: 142822 - DNA, 25 bp, Saccharomyces pastorianus
tggaaagcctcttttccttcgatat

SEQ ID NO: 142823 - DNA, 25 bp, Saccharomyces pastorianus
aagcctcttttccttcgatatatag

SEQ ID NO: 142824 - DNA, 25 bp, Saccharomyces pastorianus
agtgatgatatccttgaaaagactc

SEQ ID NO: 142825 - DNA, 25 bp, Saccharomyces pastorianus
gcaattcgatcatccaaaagagttg

SEQ ID NO: 142826 - DNA, 25 bp, Saccharomyces pastorianus
gttggaaagcctcttttccttcgat

SEQ ID NO: 142827 - DNA, 25 bp, Saccharomyces pastorianus
tcttttccttcgatatatagtgatg

SEQ ID NO: 142828 - DNA, 25 bp, Saccharomyces pastorianus
gaagattacctataggctggtctac

SEQ ID NO: 142829 - DNA, 25 bp, Saccharomyces pastorianus
ggccgctgaaaaactgtcatcgaac

SEQ ID NO: 142830 - DNA, 25 bp, Saccharomyces pastorianus
aggctggtctacttcttatcaaact

SEQ ID NO: 142831 - DNA, 25 bp, Saccharomyces pastorianus
ggtcgtctattccaattaccattcg

SEQ ID NO: 142832 - DNA, 25 bp, Saccharomyces pastorianus
gtcatcgaacttcgtcaccattagg

SEQ ID NO: 142833 - DNA, 25 bp, Saccharomyces pastorianus
aagcaagcggaacatctttgtcaga

SEQ ID NO: 142834 - DNA, 25 bp, Saccharomyces pastorianus
agattttcccaattagcactggata

SEQ ID NO: 142835 - DNA, 25 bp, Saccharomyces pastorianus
ggataaggccttatatgccctagag

SEQ ID NO: 142836 - DNA, 25 bp, Saccharomyces pastorianus
gagaggcatgttgacgaagctatta

SEQ ID NO: 142837 - DNA, 25 bp, Saccharomyces pastorianus
tttcaagcttctacaatggacgcag

SEQ ID NO: 142838 - DNA, 25 bp, Saccharomyces pastorianus
gacgcagcgtctcaggatccaattg

SEQ ID NO: 142839 - DNA, 25 bp, Saccharomyces pastorianus
gattctctcttattgactctttacc

SEQ ID NO: 142840 - DNA, 25 bp, Saccharomyces pastorianus
gtatggatactgattctctcttatt

SEQ ID NO: 142841 - DNA, 25 bp, Saccharomyces pastorianus
gagctcaatctgctaataacaatga

SEQ ID NO: 142842 - DNA, 25 bp, Saccharomyces pastorianus
gaaactatcagacgaaccttcagat

SEQ ID NO: 142843 - DNA, 25 bp, Saccharomyces pastorianus
atcattccattattcgaaaccgcga

SEQ ID NO: 142844 - DNA, 25 bp, Saccharomyces pastorianus
agacgaaccttcagatatcattcca

SEQ ID NO: 142845 - DNA, 25 bp, Saccharomyces pastorianus
catggagcatttgatcggatataac

SEQ ID NO: 142846 - DNA, 25 bp, Saccharomyces pastorianus
gaaaccgcgatcacacaggtggcta

SEQ ID NO: 142847 - DNA, 25 bp, Saccharomyces pastorianus
ctttaacggttaacatggagcattt

SEQ ID NO: 142848 - DNA, 25 bp, Saccharomyces pastorianus
gataagtattctgagcagagctcaa

SEQ ID NO: 142849 - DNA, 25 bp, Saccharomyces pastorianus
ggagttcagacttgactcgcaattt

SEQ ID NO: 142850 - DNA, 25 bp, Saccharomyces pastorianus
aactattcttaagaggtgattcagt

SEQ ID NO: 142851 - DNA, 25 bp, Saccharomyces pastorianus
gtgacaagaacacctgtgataatct

SEQ ID NO: 142852 - DNA, 25 bp, Saccharomyces pastorianus
gtgaaagctttcgacaggcattgta

SEQ ID NO: 142853 - DNA, 25 bp, Saccharomyces pastorianus
gaacacctgtgataatctcattaag

SEQ ID NO: 142854 - DNA, 25 bp, Saccharomyces pastorianus
taaatgatgctatggtgacaagaac

SEQ ID NO: 142855 - DNA, 25 bp, Saccharomyces pastorianus
acctgtgataatctcattaagaaac

SEQ ID NO: 142856 - DNA, 25 bp, Saccharomyces pastorianus
atcgggaaagattcataagtaaact

SEQ ID NO: 142857 - DNA, 25 bp, Saccharomyces pastorianus
cgacaggcattgtaatatggtttta

SEQ ID NO: 142858 - DNA, 25 bp, Saccharomyces pastorianus
gaagggcaaaaatgtaattaatcgg

SEQ ID NO: 142859 - DNA, 25 bp, Saccharomyces pastorianus
tccctgataaatgatgctatggtga

SEQ ID NO: 142860 - DNA, 25 bp, Saccharomyces pastorianus
aagctttcgacaggcattgtaatat

SEQ ID NO: 142861 - DNA, 25 bp, Saccharomyces pastorianus
aagtttgttcctttccacaatgcta

SEQ ID NO: 142862 - DNA, 25 bp, Saccharomyces pastorianus
aaagaccggtactgcaatttcattc

SEQ ID NO: 142863 - DNA, 25 bp, Saccharomyces pastorianus
atgttgcatgtgtcctcaatttcga

SEQ ID NO: 142864 - DNA, 25 bp, Saccharomyces pastorianus
ttccgtgctgttactcaagttgcca

SEQ ID NO: 142865 - DNA, 25 bp, Saccharomyces pastorianus
gctaagaagcgccattcacataaaa

SEQ ID NO: 142866 - DNA, 25 bp, Saccharomyces pastorianus
gacggctaagtcctacgtgcataga

SEQ ID NO: 142867 - DNA, 25 bp, Saccharomyces pastorianus
tcaatttcgatttacctacgacggc

SEQ ID NO: 142868 - DNA, 25 bp, Saccharomyces pastorianus
ttacagccttacaaattcgatcaaa

SEQ ID NO: 142869 - DNA, 25 bp, Saccharomyces pastorianus
gcaatttcattcgtagtcccactga

SEQ ID NO: 142870 - DNA, 25 bp, Saccharomyces pastorianus
aggtcgaggcgttccgttacagaat

SEQ ID NO: 142871 - DNA, 25 bp, Saccharomyces pastorianus
tagaactgctcgtggcggaaagacc

SEQ ID NO: 142872 - DNA, 25 bp, Saccharomyces pastorianus
ttctgctgatgggaagttcgccgtt

SEQ ID NO: 142873 - DNA, 25 bp, Saccharomyces pastorianus
tagcatagtttcttcggccccaatt

SEQ ID NO: 142874 - DNA, 25 bp, Saccharomyces pastorianus
tttccctacagacagctactactag

SEQ ID NO: 142875 - DNA, 25 bp, Saccharomyces pastorianus
gaatgctcaatatgcggctggtaaa

SEQ ID NO: 142876 - DNA, 25 bp, Saccharomyces pastorianus
tatcttcccaaataaccagtgctgc

SEQ ID NO: 142877 - DNA, 25 bp, Saccharomyces pastorianus
acagctatcactagtactctttcgc

SEQ ID NO: 142878 - DNA, 25 bp, Saccharomyces pastorianus
ttggtgacccctcaaacaactacta

SEQ ID NO: 142879 - DNA, 25 bp, Saccharomyces pastorianus
gccgtttgtaatcatagcgcttggg

SEQ ID NO: 142880 - DNA, 25 bp, Saccharomyces pastorianus
agagttcttctgtcgtttccctaca

SEQ ID NO: 142881 - DNA, 25 bp, Saccharomyces pastorianus
atgttatgcttatgactccggcgac

SEQ ID NO: 142882 - DNA, 25 bp, Saccharomyces pastorianus
gttactttatctccaactgcaagca

SEQ ID NO: 142883 - DNA, 25 bp, Saccharomyces pastorianus
ttggatcgtggtagcttggaagata

SEQ ID NO: 142884 - DNA, 25 bp, Saccharomyces pastorianus
aaggtgtgttccaagctatacgctg

SEQ ID NO: 142885 - DNA, 25 bp, Saccharomyces pastorianus
aatcatccgttgcaaagattggaag

SEQ ID NO: 142886 - DNA, 25 bp, Saccharomyces pastorianus
gtcgacacatgaagtaatcatccgt

SEQ ID NO: 142887 - DNA, 25 bp, Saccharomyces pastorianus
tacgctgcatttgaagaagttgttt

SEQ ID NO: 142888 - DNA, 25 bp, Saccharomyces pastorianus
cctgtatggtgggaaaggctgaaca

SEQ ID NO: 142889 - DNA, 25 bp, Saccharomyces pastorianus
tgaacaggaaagttcgtcgacacat

SEQ ID NO: 142890 - DNA, 25 bp, Saccharomyces pastorianus
gttccaagctatacgctgcatttga

SEQ ID NO: 142891 - DNA, 25 bp, Saccharomyces pastorianus
gacgaatcctgcgtattccactgtt

SEQ ID NO: 142892 - DNA, 25 bp, Saccharomyces pastorianus
actgttcgttggatcgtggtagctt

SEQ ID NO: 142893 - DNA, 25 bp, Saccharomyces pastorianus
tgcgtattccactgttcgttggatc

SEQ ID NO: 142894 - DNA, 25 bp, Saccharomyces pastorianus
attattccgagcacaagatacgcga

SEQ ID NO: 142895 - DNA, 25 bp, Saccharomyces pastorianus
gtacctgtcaaactattattccgag

SEQ ID NO: 142896 - DNA, 25 bp, Saccharomyces pastorianus
gcggataaaccgatgtcttcactat

SEQ ID NO: 142897 - DNA, 25 bp, Saccharomyces pastorianus
acatcgacacagacggccggcagga

SEQ ID NO: 142898 - DNA, 25 bp, Saccharomyces pastorianus
gccttccacgggttcattagacgtg

SEQ ID NO: 142899 - DNA, 25 bp, Saccharomyces pastorianus
atgcattcgttcaaagtacctgtca

SEQ ID NO: 142900 - DNA, 25 bp, Saccharomyces pastorianus
gtacaagctaccaccaatatcgggt

SEQ ID NO: 142901 - DNA, 25 bp, Saccharomyces pastorianus
aatatcgggtgagtttggctccgcc

SEQ ID NO: 142902 - DNA, 25 bp, Saccharomyces pastorianus
aggatagctcgatcgcagatacgcg

SEQ ID NO: 142903 - DNA, 25 bp, Saccharomyces pastorianus
ggtttaccaaccacagtaggcacag

SEQ ID NO: 142904 - DNA, 25 bp, Saccharomyces pastorianus
gaaggatctcttccgattatcgaag

SEQ ID NO: 142905 - DNA, 25 bp, Saccharomyces pastorianus
ggcactaaagccgtttttgtcaatg

SEQ ID NO: 142906 - DNA, 25 bp, Saccharomyces pastorianus
ggtttgtataagctttctcctctat

SEQ ID NO: 142907 - DNA, 25 bp, Saccharomyces pastorianus
accgattatgttccgcctgaaaata

SEQ ID NO: 142908 - DNA, 25 bp, Saccharomyces pastorianus
gactatctcgtcaaattcaggtgta

SEQ ID NO: 142909 - DNA, 25 bp, Saccharomyces pastorianus
gcgggtcccaacgtatattacctag

SEQ ID NO: 142910 - DNA, 25 bp, Saccharomyces pastorianus
tagaaaccctagtagtcccagactc

SEQ ID NO: 142911 - DNA, 25 bp, Saccharomyces pastorianus
agaactcctgtatttgctgttgcag

SEQ ID NO: 142912 - DNA, 25 bp, Saccharomyces pastorianus
aatttctgattactgctcgcgaacg

SEQ ID NO: 142913 - DNA, 25 bp, Saccharomyces pastorianus
atccgtttgtgaatgcgcccgagaa

SEQ ID NO: 142914 - DNA, 25 bp, Saccharomyces pastorianus
tttgctttaatgtcccgtgtgggta

SEQ ID NO: 142915 - DNA, 25 bp, Saccharomyces pastorianus
gattttattaactcctacacctgat

SEQ ID NO: 142916 - DNA, 25 bp, Saccharomyces pastorianus
aagtgcaaggttcatacgccatcgc

SEQ ID NO: 142917 - DNA, 25 bp, Saccharomyces pastorianus
tgacactttcgttgctaagttaaaa

SEQ ID NO: 142918 - DNA, 25 bp, Saccharomyces pastorianus
gcggcaacatctgatgtgaatgtta

SEQ ID NO: 142919 - DNA, 25 bp, Saccharomyces pastorianus
atacgccatcgccttggaaacttta

SEQ ID NO: 142920 - DNA, 25 bp, Saccharomyces pastorianus
tcctctcaagcattcacttcagtgc

SEQ ID NO: 142921 - DNA, 25 bp, Saccharomyces pastorianus
gaaactttacaactgttaatgcgat

SEQ ID NO: 142922 - DNA, 25 bp, Saccharomyces pastorianus
attcacttcagtgcatccgaatgcg

SEQ ID NO: 142923 - DNA, 25 bp, Saccharomyces pastorianus
gttactattgacactttcgttgcta

SEQ ID NO: 142924 - DNA, 25 bp, Saccharomyces pastorianus
atcgccttggaaactttacaactgt

SEQ ID NO: 142925 - DNA, 25 bp, Saccharomyces pastorianus
agtgcatccgaatgcggcaacatct

SEQ ID NO: 142926 - DNA, 25 bp, Saccharomyces pastorianus
aatgcgatttatctctgcagctcgt

SEQ ID NO: 142927 - DNA, 25 bp, Saccharomyces pastorianus
atcactaccaagtctttgcttctga

SEQ ID NO: 142928 - DNA, 25 bp, Saccharomyces pastorianus
gttatcatcatccatgacgctttcc

SEQ ID NO: 142929 - DNA, 25 bp, Saccharomyces pastorianus
gaatgaatcccactggactgtttgt

SEQ ID NO: 142930 - DNA, 25 bp, Saccharomyces pastorianus
gacgctttccaaccatacaattatt

SEQ ID NO: 142931 - DNA, 25 bp, Saccharomyces pastorianus
gccgccgctttgactgattgtacaa

SEQ ID NO: 142932 - DNA, 25 bp, Saccharomyces pastorianus
gactgtttgtggtgagtttgccgcc

SEQ ID NO: 142933 - DNA, 25 bp, Saccharomyces pastorianus
gtgtcactatcgaccatcatcacta

SEQ ID NO: 142934 - DNA, 25 bp, Saccharomyces pastorianus
atcttcttacattggctcttgtgct

SEQ ID NO: 142935 - DNA, 25 bp, Saccharomyces pastorianus
gatatagcttactggtctgacgaaa

SEQ ID NO: 142936 - DNA, 25 bp, Saccharomyces pastorianus
ttcggcgctagatacgacggttctt

SEQ ID NO: 142937 - DNA, 25 bp, Saccharomyces pastorianus
ttgaatagtgttggcttcggcgcta

SEQ ID NO: 142938 - DNA, 25 bp, Saccharomyces pastorianus
taggtaaggatttggctaaaagccg

SEQ ID NO: 142939 - DNA, 25 bp, Saccharomyces pastorianus
acttctgtcaatatttaggtaagga

SEQ ID NO: 142940 - DNA, 25 bp, Saccharomyces pastorianus
cagagccattggtctactttctacc

SEQ ID NO: 142941 - DNA, 25 bp, Saccharomyces pastorianus
ggatttggctaaaagccgtttacag

SEQ ID NO: 142942 - DNA, 25 bp, Saccharomyces pastorianus
cgacgaatatcacttctgtcaatat

SEQ ID NO: 142943 - DNA, 25 bp, Saccharomyces pastorianus
agccgtttacagagccattggtcta

SEQ ID NO: 142944 - DNA, 25 bp, Saccharomyces pastorianus
atatcacttctgtcaatatttaggt

SEQ ID NO: 142945 - DNA, 25 bp, Saccharomyces pastorianus
gtcgacgaatatcacttctgtcaat

SEQ ID NO: 142946 - DNA, 25 bp, Saccharomyces pastorianus
gacgaatatcacttctgtcaatatt

SEQ ID NO: 142947 - DNA, 25 bp, Saccharomyces pastorianus
atcacttctgtcaatatttaggtaa

SEQ ID NO: 142948 - DNA, 25 bp, Saccharomyces pastorianus
ggtctactttctaccaagaacaaga

SEQ ID NO: 142949 - DNA, 25 bp, Saccharomyces pastorianus
ggcggtttcgctatcatcacaaagt

SEQ ID NO: 142950 - DNA, 25 bp, Saccharomyces pastorianus
gaatcgatattctgggtctagctga

SEQ ID NO: 142951 - DNA, 25 bp, Saccharomyces pastorianus
aaaaaacagggtctattgccattga

SEQ ID NO: 142952 - DNA, 25 bp, Saccharomyces pastorianus
gggatgctgtgttgacccatacttt

SEQ ID NO: 142953 - DNA, 25 bp, Saccharomyces pastorianus
gaacacgctgctttggaaccaagat

SEQ ID NO: 142954 - DNA, 25 bp, Saccharomyces pastorianus
ggtctagctgaattggctccaggta

SEQ ID NO: 142955 - DNA, 25 bp, Saccharomyces pastorianus
aaagtctttcgctcgtatccatgaa

SEQ ID NO: 142956 - DNA, 25 bp, Saccharomyces pastorianus
aactttggtgaaggttcctctcgtg

SEQ ID NO: 142957 - DNA, 25 bp, Saccharomyces pastorianus
accaagattcttgggcggtttcgct

SEQ ID NO: 142958 - DNA, 25 bp, Saccharomyces pastorianus
taaggccgtcggtaagacaactact

SEQ ID NO: 142959 - DNA, 25 bp, Saccharomyces pastorianus
gacccatactttcaacgatgagcaa

SEQ ID NO: 142960 - DNA, 25 bp, Saccharomyces pastorianus
gaaaggtttgatcttagagcacgat

SEQ ID NO: 142961 - DNA, 25 bp, Saccharomyces pastorianus
gcacgatggtgcacgaagaacagtt

SEQ ID NO: 142962 - DNA, 25 bp, Saccharomyces pastorianus
gttgtcttgtgggatctcgatactt

SEQ ID NO: 142963 - DNA, 25 bp, Saccharomyces pastorianus
ttccccaagtattttaggcctccat

SEQ ID NO: 142964 - DNA, 25 bp, Saccharomyces pastorianus
tattttaggcctccatacggtgcaa

SEQ ID NO: 142965 - DNA, 25 bp, Saccharomyces pastorianus
tcaacgaacttattggtagtgacca

SEQ ID NO: 142966 - DNA, 25 bp, Saccharomyces pastorianus
ggcctccatacggtgcaattgataa

SEQ ID NO: 142967 - DNA, 25 bp, Saccharomyces pastorianus
cacaggcaaacatttccccaagtat

SEQ ID NO: 142968 - DNA, 25 bp, Saccharomyces pastorianus
cgaagaacagttgaggttgctatta

SEQ ID NO: 142969 - DNA, 25 bp, Saccharomyces pastorianus
acagtttggcctaacggttgtcttg

SEQ ID NO: 142970 - DNA, 25 bp, Saccharomyces pastorianus
agagctatagtaaaacagtttggcc

SEQ ID NO: 142971 - DNA, 25 bp, Saccharomyces pastorianus
catctgggcgatgaatgctactggc

SEQ ID NO: 142972 - DNA, 25 bp, Saccharomyces pastorianus
ggtctcacgtatatttgccaaatgt

SEQ ID NO: 142973 - DNA, 25 bp, Saccharomyces pastorianus
agggacacttaatcggctcacatac

SEQ ID NO: 142974 - DNA, 25 bp, Saccharomyces pastorianus
aacagtttctcattgtgtcggcgga

SEQ ID NO: 142975 - DNA, 25 bp, Saccharomyces pastorianus
gattggagcctccttctcaatgatt

SEQ ID NO: 142976 - DNA, 25 bp, Saccharomyces pastorianus
gaaaaaactgtcgatcttgccatta

SEQ ID NO: 142977 - DNA, 25 bp, Saccharomyces pastorianus
agctcaaattgaatggtccatctgg

SEQ ID NO: 142978 - DNA, 25 bp, Saccharomyces pastorianus
ggtgatgatcaatcaacagtttctc

SEQ ID NO: 142979 - DNA, 25 bp, Saccharomyces pastorianus
ggaacaagtcaggaaccggattaat

SEQ ID NO: 142980 - DNA, 25 bp, Saccharomyces pastorianus
gctcacatacctggtctcacgtata

SEQ ID NO: 142981 - DNA, 25 bp, Saccharomyces pastorianus
ggttcagacctccatatggcggaat

SEQ ID NO: 142982 - DNA, 25 bp, Saccharomyces pastorianus
actctcattgtctaaggctgatgaa

SEQ ID NO: 142983 - DNA, 25 bp, Saccharomyces pastorianus
aagactcaagccacttcagatgatt

SEQ ID NO: 142984 - DNA, 25 bp, Saccharomyces pastorianus
ttgtcctctcaattgaatgctttaa

SEQ ID NO: 142985 - DNA, 25 bp, Saccharomyces pastorianus
cggtactctagctaacgcgaatatt

SEQ ID NO: 142986 - DNA, 25 bp, Saccharomyces pastorianus
gaattttgagctacagtctgccaat

SEQ ID NO: 142987 - DNA, 25 bp, Saccharomyces pastorianus
taggtctggttctatcggtactcta

SEQ ID NO: 142988 - DNA, 25 bp, Saccharomyces pastorianus
agtctgccaatgagaaacttctgaa

SEQ ID NO: 142989 - DNA, 25 bp, Saccharomyces pastorianus
aaaaattatcgttcattgtcctctc

SEQ ID NO: 142990 - DNA, 25 bp, Saccharomyces pastorianus
gcgaatattgattcctcaccagcga

SEQ ID NO: 142991 - DNA, 25 bp, Saccharomyces pastorianus
atcggaaatacacgctttaaagctt

SEQ ID NO: 142992 - DNA, 25 bp, Saccharomyces pastorianus
tcctcaccagcgaataactctaatc

SEQ ID NO: 142993 - DNA, 25 bp, Saccharomyces pastorianus
agagcacaagctgagtgaattggaa

SEQ ID NO: 142994 - DNA, 25 bp, Saccharomyces pastorianus
ggaaaactcacagctcgaaaaatca

SEQ ID NO: 142995 - DNA, 25 bp, Saccharomyces pastorianus
ggaggcataactacgggtgatatca

SEQ ID NO: 142996 - DNA, 25 bp, Saccharomyces pastorianus
aacaccgagttgatcgataccaaga

SEQ ID NO: 142997 - DNA, 25 bp, Saccharomyces pastorianus
gagcaaaatttgtcttcgaaaagta

SEQ ID NO: 142998 - DNA, 25 bp, Saccharomyces pastorianus
attccctcgaggacagtcgaatgaa

SEQ ID NO: 142999 - DNA, 25 bp, Saccharomyces pastorianus
gagctggaaacccttaacaccgagt

SEQ ID NO: 143000 - DNA, 25 bp, Saccharomyces pastorianus
gttaccgaaggcgatatctcatcaa

SEQ ID NO: 143001 - DNA, 25 bp, Saccharomyces pastorianus
aaagtcctcagagttggcagaacta

SEQ ID NO: 143002 - DNA, 25 bp, Saccharomyces pastorianus
ggctataaagaaccattccctcgag

SEQ ID NO: 143003 - DNA, 25 bp, Saccharomyces pastorianus
ggaaacggtcgataactcaatcaat

SEQ ID NO: 143004 - DNA, 25 bp, Saccharomyces pastorianus
aactacagacgtgcattcattcgtt

SEQ ID NO: 143005 - DNA, 25 bp, Saccharomyces pastorianus
aatctagaccctttcatattttgga

SEQ ID NO: 143006 - DNA, 25 bp, Saccharomyces pastorianus
gggcaactttctttgcagttcagca

SEQ ID NO: 143007 - DNA, 25 bp, Saccharomyces pastorianus
gagtcgtacttgagaaatcctagcg

SEQ ID NO: 143008 - DNA, 25 bp, Saccharomyces pastorianus
ttattggtgcaattctgtcaacgaa

SEQ ID NO: 143009 - DNA, 25 bp, Saccharomyces pastorianus
acacgggtcaaagccatacaacgaa

SEQ ID NO: 143010 - DNA, 25 bp, Saccharomyces pastorianus
gttaaagaatggttcgccggccaag

SEQ ID NO: 143011 - DNA, 25 bp, Saccharomyces pastorianus
ataagtcgttcgcacacgggtcaaa

SEQ ID NO: 143012 - DNA, 25 bp, Saccharomyces pastorianus
gaaaaactgaatctgctaggagcac

SEQ ID NO: 143013 - DNA, 25 bp, Saccharomyces pastorianus
aaaacacagcatgcacattcgttaa

SEQ ID NO: 143014 - DNA, 25 bp, Saccharomyces pastorianus
tggtgaaaccacgatttttgctagt

SEQ ID NO: 143015 - DNA, 25 bp, Saccharomyces pastorianus
ttccttacagagatgcagcgcaccg

SEQ ID NO: 143016 - DNA, 25 bp, Saccharomyces pastorianus
gctaaactcaacatacgaagccttt

SEQ ID NO: 143017 - DNA, 25 bp, Saccharomyces pastorianus
gaacgataacaaacagctaaactca

SEQ ID NO: 143018 - DNA, 25 bp, Saccharomyces pastorianus
atggccctgatccattctcgtgtga

SEQ ID NO: 143019 - DNA, 25 bp, Saccharomyces pastorianus
taacgagtggtgacgggtactgcat

SEQ ID NO: 143020 - DNA, 25 bp, Saccharomyces pastorianus
tgacgggtactgcatgaacgataac

SEQ ID NO: 143021 - DNA, 25 bp, Saccharomyces pastorianus
cctgatccattctcgtgtgagacga

SEQ ID NO: 143022 - DNA, 25 bp, Saccharomyces pastorianus
gcagcgcaccgggagcttaaaatta

SEQ ID NO: 143023 - DNA, 25 bp, Saccharomyces pastorianus
agacgagtggtcttccttacagaga

SEQ ID NO: 143024 - DNA, 25 bp, Saccharomyces pastorianus
atggatcggcgaggaatatcctgtg

SEQ ID NO: 143025 - DNA, 25 bp, Saccharomyces pastorianus
gaagcctttcaatggatcggcgagg

SEQ ID NO: 143026 - DNA, 25 bp, Saccharomyces pastorianus
gctacccatcgaccacagtgtaatg

SEQ ID NO: 143027 - DNA, 25 bp, Saccharomyces pastorianus
aatggtgggcatccgtgcggtaggc

SEQ ID NO: 143028 - DNA, 25 bp, Saccharomyces pastorianus
atcgaccacagtgtaatggtgggca

SEQ ID NO: 143029 - DNA, 25 bp, Saccharomyces pastorianus
gaaactgcgaaaactcgctacccat

SEQ ID NO: 143030 - DNA, 25 bp, Saccharomyces pastorianus
tacccatcgaccacagtgtaatggt

SEQ ID NO: 143031 - DNA, 25 bp, Saccharomyces pastorianus
actgcgaaaactcgctacccatcga

SEQ ID NO: 143032 - DNA, 25 bp, Saccharomyces pastorianus
atggcagaaactgcgaaaactcgct

SEQ ID NO: 143033 - DNA, 25 bp, Saccharomyces pastorianus
gtggtggcagaagatggcagaaact

SEQ ID NO: 143034 - DNA, 25 bp, Saccharomyces pastorianus
acagtgtaatggtgggcatccgtgc

SEQ ID NO: 143035 - DNA, 25 bp, Saccharomyces pastorianus
gttgacccatcaagaaagaaggaca

SEQ ID NO: 143036 - DNA, 25 bp, Saccharomyces pastorianus
aaagaaggacaaagtggtggcagaa

SEQ ID NO: 143037 - DNA, 25 bp, Saccharomyces pastorianus
gaacgggataatagaaaatcggctt

SEQ ID NO: 143038 - DNA, 25 bp, Saccharomyces pastorianus
agaaaatcggcttctgcaaattaga

SEQ ID NO: 143039 - DNA, 25 bp, Saccharomyces pastorianus
taaaaatcgattatcagaacgggat

SEQ ID NO: 143040 - DNA, 25 bp, Saccharomyces pastorianus
atccgctaaaaatcgattatcagaa

SEQ ID NO: 143041 - DNA, 25 bp, Saccharomyces pastorianus
atagaaaatcggcttctgcaaatta

SEQ ID NO: 143042 - DNA, 25 bp, Saccharomyces pastorianus
gaaaatcggcttctgcaaattagaa

SEQ ID NO: 143043 - DNA, 25 bp, Saccharomyces pastorianus
aaatcggcttctgcaaattagaaat

SEQ ID NO: 143044 - DNA, 25 bp, Saccharomyces pastorianus
tcggcttctgcaaattagaaatttc

SEQ ID NO: 143045 - DNA, 25 bp, Saccharomyces pastorianus
ggcttctgcaaattagaaatttcaa

SEQ ID NO: 143046 - DNA, 25 bp, Saccharomyces pastorianus
gataatagaaaatcggcttctgcaa

SEQ ID NO: 143047 - DNA, 25 bp, Saccharomyces pastorianus
gggataatagaaaatcggcttctgc

SEQ ID NO: 143048 - DNA, 25 bp, Saccharomyces pastorianus
gaacatacctaatcagattcctcat

SEQ ID NO: 143049 - DNA, 25 bp, Saccharomyces pastorianus
gcaggtctggtatctgtgttgagaa

SEQ ID NO: 143050 - DNA, 25 bp, Saccharomyces pastorianus
tctggtatctgtgttgagaatcgca

SEQ ID NO: 143051 - DNA, 25 bp, Saccharomyces pastorianus
actttgcaaagttcgctatctgcga

SEQ ID NO: 143052 - DNA, 25 bp, Saccharomyces pastorianus
aatcgcagatgggttttgggagcat

SEQ ID NO: 143053 - DNA, 25 bp, Saccharomyces pastorianus
gcaaagttcgctatctgcgattgta

SEQ ID NO: 143054 - DNA, 25 bp, Saccharomyces pastorianus
acttttgcagctaaggatgcttgat

SEQ ID NO: 143055 - DNA, 25 bp, Saccharomyces pastorianus
gcagctaaggatgcttgatagtaat

SEQ ID NO: 143056 - DNA, 25 bp, Saccharomyces pastorianus
agattcctcatactactttgcaaag

SEQ ID NO: 143057 - DNA, 25 bp, Saccharomyces pastorianus
gggagcatgacaaacttttgcagct

SEQ ID NO: 143058 - DNA, 25 bp, Saccharomyces pastorianus
tcgctatctgcgattgtaataaaga

SEQ ID NO: 143059 - DNA, 25 bp, Saccharomyces pastorianus
tattagctgttttcttatccctggc

SEQ ID NO: 143060 - DNA, 25 bp, Saccharomyces pastorianus
gtgcgttctgggactcattcaatga

SEQ ID NO: 143061 - DNA, 25 bp, Saccharomyces pastorianus
gaatgaactcctgcgatgggcttat

SEQ ID NO: 143062 - DNA, 25 bp, Saccharomyces pastorianus
attgcttctgatttgctgctcattt

SEQ ID NO: 143063 - DNA, 25 bp, Saccharomyces pastorianus
ggaaaattcctcgtagattctggta

SEQ ID NO: 143064 - DNA, 25 bp, Saccharomyces pastorianus
tataacggcttagatgctgcattac

SEQ ID NO: 143065 - DNA, 25 bp, Saccharomyces pastorianus
ctatcactttctttccaatctgttg

SEQ ID NO: 143066 - DNA, 25 bp, Saccharomyces pastorianus
tggactttctttacctataacggct

SEQ ID NO: 143067 - DNA, 25 bp, Saccharomyces pastorianus
gcatttcactcccttattatcgatt

SEQ ID NO: 143068 - DNA, 25 bp, Saccharomyces pastorianus
aaaccgctttattccattgcttctg

SEQ ID NO: 143069 - DNA, 25 bp, Saccharomyces pastorianus
tacactttcagcttgcatttcactc

SEQ ID NO: 143070 - DNA, 25 bp, Saccharomyces pastorianus
atatttcttccacgaaagttcgtct

SEQ ID NO: 143071 - DNA, 25 bp, Saccharomyces pastorianus
aggtggtgtagctactgttactgga

SEQ ID NO: 143072 - DNA, 25 bp, Saccharomyces pastorianus
attggcctgcgaaagaacctcatct

SEQ ID NO: 143073 - DNA, 25 bp, Saccharomyces pastorianus
aatgttgctggctggtggtgaccta

SEQ ID NO: 143074 - DNA, 25 bp, Saccharomyces pastorianus
gattgtcgaacgtactggttctgat

SEQ ID NO: 143075 - DNA, 25 bp, Saccharomyces pastorianus
aattcggtcatcaggtatatccaag

SEQ ID NO: 143076 - DNA, 25 bp, Saccharomyces pastorianus
gtaaggtcttttttgttatcccatg

SEQ ID NO: 143077 - DNA, 25 bp, Saccharomyces pastorianus
gtctatttatcagacgcgccatgtc

SEQ ID NO: 143078 - DNA, 25 bp, Saccharomyces pastorianus
acatcacattctcggtaattacggt

SEQ ID NO: 143079 - DNA, 25 bp, Saccharomyces pastorianus
tgcatgggagtcattgcaaccttca

SEQ ID NO: 143080 - DNA, 25 bp, Saccharomyces pastorianus
ggcggacgccgatttacatcacatt

SEQ ID NO: 143081 - DNA, 25 bp, Saccharomyces pastorianus
acggcgtatcaaattctgtgtcgaa

SEQ ID NO: 143082 - DNA, 25 bp, Saccharomyces pastorianus
ggtcttctccatgatttcaaggctc

SEQ ID NO: 143083 - DNA, 25 bp, Saccharomyces pastorianus
caaggctccgattgaagtggcaaca

SEQ ID NO: 143084 - DNA, 25 bp, Saccharomyces pastorianus
gacaaatcttcaacaacggcgtatc

SEQ ID NO: 143085 - DNA, 25 bp, Saccharomyces pastorianus
gagcaattcagtacttcttccaata

SEQ ID NO: 143086 - DNA, 25 bp, Saccharomyces pastorianus
aaagttcgctcgctccgatatccta

SEQ ID NO: 143087 - DNA, 25 bp, Saccharomyces pastorianus
aatgcttaacatgattgcccaagac

SEQ ID NO: 143088 - DNA, 25 bp, Saccharomyces pastorianus
agaggtcctccaattcagaattttc

SEQ ID NO: 143089 - DNA, 25 bp, Saccharomyces pastorianus
aagtggcaacaaagttcgctcgctc

SEQ ID NO: 143090 - DNA, 25 bp, Saccharomyces pastorianus
ctgtgtcgaagaagaggtcctccaa

SEQ ID NO: 143091 - DNA, 25 bp, Saccharomyces pastorianus
atatcctacgccctaacgagcaatt

SEQ ID NO: 143092 - DNA, 25 bp, Saccharomyces pastorianus
atgaacgatcgattagttacggaag

SEQ ID NO: 143093 - DNA, 25 bp, Saccharomyces pastorianus
ttgtttacaaaattgcgcgagattg

SEQ ID NO: 143094 - DNA, 25 bp, Saccharomyces pastorianus
gttgtttacaaaattgcgcgagatt

SEQ ID NO: 143095 - DNA, 25 bp, Saccharomyces pastorianus
acggaagagcaagagttgtttacaa

SEQ ID NO: 143096 - DNA, 25 bp, Saccharomyces pastorianus
gagttgtttacaaaattgcgcgaga

SEQ ID NO: 143097 - DNA, 25 bp, Saccharomyces pastorianus
agttacggaagagcaagagttgttt

SEQ ID NO: 143098 - DNA, 25 bp, Saccharomyces pastorianus
cgatcgattagttacggaagagcaa

SEQ ID NO: 143099 - DNA, 25 bp, Saccharomyces pastorianus
aacgatcgattagttacggaagagc

SEQ ID NO: 143100 - DNA, 25 bp, Saccharomyces pastorianus
cgattagttacggaagagcaagagt

SEQ ID NO: 143101 - DNA, 25 bp, Saccharomyces pastorianus
gatcgattagttacggaagagcaag

SEQ ID NO: 143102 - DNA, 25 bp, Saccharomyces pastorianus
aaaattgcgcgagattgtaggttca

SEQ ID NO: 143103 - DNA, 25 bp, Saccharomyces pastorianus
gagcctttagctcccggaaatgata

SEQ ID NO: 143104 - DNA, 25 bp, Saccharomyces pastorianus
aaagctcctactgttgcggctgatg

SEQ ID NO: 143105 - DNA, 25 bp, Saccharomyces pastorianus
aatgctgaaaccaaatcgtacgatt

SEQ ID NO: 143106 - DNA, 25 bp, Saccharomyces pastorianus
ggacgatccttctaaagtgcgccta

SEQ ID NO: 143107 - DNA, 25 bp, Saccharomyces pastorianus
gaggcgtaggcgaaatgaagctttt

SEQ ID NO: 143108 - DNA, 25 bp, Saccharomyces pastorianus
gcggctgatgggaaacttgtaactt

SEQ ID NO: 143109 - DNA, 25 bp, Saccharomyces pastorianus
gataatctcattaaagctcctactg

SEQ ID NO: 143110 - DNA, 25 bp, Saccharomyces pastorianus
aatgcaactgttgtagactccttca

SEQ ID NO: 143111 - DNA, 25 bp, Saccharomyces pastorianus
gactccttcaaatatgagcctttag

SEQ ID NO: 143112 - DNA, 25 bp, Saccharomyces pastorianus
agtgcgcctactttgtaggtctgac

SEQ ID NO: 143113 - DNA, 25 bp, Saccharomyces pastorianus
ggaagaaggccgctcatttacgaaa

SEQ ID NO: 143114 - DNA, 25 bp, Saccharomyces pastorianus
aaacatgctgcggattctcaaaata

SEQ ID NO: 143115 - DNA, 25 bp, Saccharomyces pastorianus
gtaaaaatcccctttcattgacaga

SEQ ID NO: 143116 - DNA, 25 bp, Saccharomyces pastorianus
aagcagctgcaaaaccatcgctaga

SEQ ID NO: 143117 - DNA, 25 bp, Saccharomyces pastorianus
attttcattttcttcggccacttca

SEQ ID NO: 143118 - DNA, 25 bp, Saccharomyces pastorianus
gattccgttttctcatttggcccaa

SEQ ID NO: 143119 - DNA, 25 bp, Saccharomyces pastorianus
gacgaaaactcaacctctaactcaa

SEQ ID NO: 143120 - DNA, 25 bp, Saccharomyces pastorianus
gaggcttccttcacttttggaacaa

SEQ ID NO: 143121 - DNA, 25 bp, Saccharomyces pastorianus
taaaccgcctatttcagattccgtt

SEQ ID NO: 143122 - DNA, 25 bp, Saccharomyces pastorianus
ggagggacccaagttcacaatagat

SEQ ID NO: 143123 - DNA, 25 bp, Saccharomyces pastorianus
aaagagctcattcacgtttggttca

SEQ ID NO: 143124 - DNA, 25 bp, Saccharomyces pastorianus
ttcggccacttcaactactgaacaa

SEQ ID NO: 143125 - DNA, 25 bp, Saccharomyces pastorianus
attactacgcattggtcgcgaacaa

SEQ ID NO: 143126 - DNA, 25 bp, Saccharomyces pastorianus
ggcttgggcttcaaaagctgccaaa

SEQ ID NO: 143127 - DNA, 25 bp, Saccharomyces pastorianus
tatgctattcattctcaaaggtttg

SEQ ID NO: 143128 - DNA, 25 bp, Saccharomyces pastorianus
ggtatagccatttatcgaagtcgtt

SEQ ID NO: 143129 - DNA, 25 bp, Saccharomyces pastorianus
tactccgatgattatttgcgcgatg

SEQ ID NO: 143130 - DNA, 25 bp, Saccharomyces pastorianus
ataagcgtataatctactccgatga

SEQ ID NO: 143131 - DNA, 25 bp, Saccharomyces pastorianus
aaactgcttcgcatctcaaatcagg

SEQ ID NO: 143132 - DNA, 25 bp, Saccharomyces pastorianus
tagataccataatttccttgcagga

SEQ ID NO: 143133 - DNA, 25 bp, Saccharomyces pastorianus
gatgttttcaagcatgttccattta

SEQ ID NO: 143134 - DNA, 25 bp, Saccharomyces pastorianus
ttttttggatcgttgcttgctaatg

SEQ ID NO: 143135 - DNA, 25 bp, Saccharomyces pastorianus
aagtcgtttcaattcctattctggg

SEQ ID NO: 143136 - DNA, 25 bp, Saccharomyces pastorianus
gatagcaagaataatgtccccgccg

SEQ ID NO: 143137 - DNA, 25 bp, Saccharomyces pastorianus
tattttctacaggtggatcgacgct

SEQ ID NO: 143138 - DNA, 25 bp, Saccharomyces pastorianus
tgtgtcacaaatgcctaagccacgt

SEQ ID NO: 143139 - DNA, 25 bp, Saccharomyces pastorianus
atttagtgcaccaagtctgcctcag

SEQ ID NO: 143140 - DNA, 25 bp, Saccharomyces pastorianus
accagttccaccagttttatcagat

SEQ ID NO: 143141 - DNA, 25 bp, Saccharomyces pastorianus
ctcagcaatccgtgtctacatcaat

SEQ ID NO: 143142 - DNA, 25 bp, Saccharomyces pastorianus
cgccgcttctttattacacgatgtt

SEQ ID NO: 143143 - DNA, 25 bp, Saccharomyces pastorianus
ggatcgacgctgcaacacaagcata

SEQ ID NO: 143144 - DNA, 25 bp, Saccharomyces pastorianus
gatggataccggtacctctaatagc

SEQ ID NO: 143145 - DNA, 25 bp, Saccharomyces pastorianus
gaatcaatttcgaagaaccccacta

SEQ ID NO: 143146 - DNA, 25 bp, Saccharomyces pastorianus
tgctccgctattgccaacatttagt

SEQ ID NO: 143147 - DNA, 25 bp, Saccharomyces pastorianus
gtcagcatcatctattcctttagca

SEQ ID NO: 143148 - DNA, 25 bp, Saccharomyces pastorianus
gttgcaacgtcagtaccatcggctc

SEQ ID NO: 143149 - DNA, 25 bp, Saccharomyces pastorianus
agcatcatctattcctttagcacca

SEQ ID NO: 143150 - DNA, 25 bp, Saccharomyces pastorianus
ttcggttgcaacgtcagtaccatcg

SEQ ID NO: 143151 - DNA, 25 bp, Saccharomyces pastorianus
ttgtcagcatcatctattcctttag

SEQ ID NO: 143152 - DNA, 25 bp, Saccharomyces pastorianus
tctgccttgtcagcatcatctattc

SEQ ID NO: 143153 - DNA, 25 bp, Saccharomyces pastorianus
tcctccttcggttgcaacgtcagta

SEQ ID NO: 143154 - DNA, 25 bp, Saccharomyces pastorianus
aacatcctctgccttgtcagcatca

SEQ ID NO: 143155 - DNA, 25 bp, Saccharomyces pastorianus
tgctttttcaacatcctctgccttg

SEQ ID NO: 143156 - DNA, 25 bp, Saccharomyces pastorianus
atcatctattcctttagcaccacca

SEQ ID NO: 143157 - DNA, 25 bp, Saccharomyces pastorianus
ttttcaacatcctctgccttgtcag

SEQ ID NO: 143158 - DNA, 25 bp, Saccharomyces pastorianus
gagccgtcaacactggtatggaacc

SEQ ID NO: 143159 - DNA, 25 bp, Saccharomyces pastorianus
tcaaggtcgttgacgccggtaacaa

SEQ ID NO: 143160 - DNA, 25 bp, Saccharomyces pastorianus
tcagcaccattgcttctatctcttt

SEQ ID NO: 143161 - DNA, 25 bp, Saccharomyces pastorianus
aacagagttgctgctccagccagag

SEQ ID NO: 143162 - DNA, 25 bp, Saccharomyces pastorianus
agaaaagtacgctgctgctgctcca

SEQ ID NO: 143163 - DNA, 25 bp, Saccharomyces pastorianus
gacaacggtcaagtgttcccatctt

SEQ ID NO: 143164 - DNA, 25 bp, Saccharomyces pastorianus
ttcctaccactaccctgaaattgaa

SEQ ID NO: 143165 - DNA, 25 bp, Saccharomyces pastorianus
gaagcttccttgttgaacttgttga

SEQ ID NO: 143166 - DNA, 25 bp, Saccharomyces pastorianus
aggtcggtcaatctgaagcttcctt

SEQ ID NO: 143167 - DNA, 25 bp, Saccharomyces pastorianus
atctctccattcactttcggtttga

SEQ ID NO: 143168 - DNA, 25 bp, Saccharomyces pastorianus
agacatctgggttagagccgtcaac

SEQ ID NO: 143169 - DNA, 25 bp, Saccharomyces pastorianus
gacgaagaaggcctccaattcaata

SEQ ID NO: 143170 - DNA, 25 bp, Saccharomyces pastorianus
acggcaacaactcttgagcgcttgg

SEQ ID NO: 143171 - DNA, 25 bp, Saccharomyces pastorianus
agcgcttggtgcaacggaactgttc

SEQ ID NO: 143172 - DNA, 25 bp, Saccharomyces pastorianus
ggtcagtatccctccacaaatatag

SEQ ID NO: 143173 - DNA, 25 bp, Saccharomyces pastorianus
gagagtcctcaaacgcagaatctga

SEQ ID NO: 143174 - DNA, 25 bp, Saccharomyces pastorianus
attgtctttgagcaccagattccgc

SEQ ID NO: 143175 - DNA, 25 bp, Saccharomyces pastorianus
gccgtttgaagcatttttccaattc

SEQ ID NO: 143176 - DNA, 25 bp, Saccharomyces pastorianus
gagcaccagattccgcagttatttt

SEQ ID NO: 143177 - DNA, 25 bp, Saccharomyces pastorianus
tagtggacataatgagccgtttgaa

SEQ ID NO: 143178 - DNA, 25 bp, Saccharomyces pastorianus
attatcaactacgttcttttcagta

SEQ ID NO: 143179 - DNA, 25 bp, Saccharomyces pastorianus
tttgcaagctaaagggtcagtatcc

SEQ ID NO: 143180 - DNA, 25 bp, Saccharomyces pastorianus
tttgaagatccttgccgacgctgtc

SEQ ID NO: 143181 - DNA, 25 bp, Saccharomyces pastorianus
gtgctctccagcagacgtcatgaag

SEQ ID NO: 143182 - DNA, 25 bp, Saccharomyces pastorianus
gtttaccggttggaagcctaacatg

SEQ ID NO: 143183 - DNA, 25 bp, Saccharomyces pastorianus
gaactatacacacttgacagcgtcc

SEQ ID NO: 143184 - DNA, 25 bp, Saccharomyces pastorianus
gacgctgtccgcaaagagggcccat

SEQ ID NO: 143185 - DNA, 25 bp, Saccharomyces pastorianus
tcactagactgggtccattcacaat

SEQ ID NO: 143186 - DNA, 25 bp, Saccharomyces pastorianus
gcaaaacgactctgctttggaggca

SEQ ID NO: 143187 - DNA, 25 bp, Saccharomyces pastorianus
gaatgtgatcccacgcgagcaattg

SEQ ID NO: 143188 - DNA, 25 bp, Saccharomyces pastorianus
acatggcgtatcttttaccttgctc

SEQ ID NO: 143189 - DNA, 25 bp, Saccharomyces pastorianus
tgctccatgttcagtggtgccattg

SEQ ID NO: 143190 - DNA, 25 bp, Saccharomyces pastorianus
ggtggttgccaagtttcactagact

SEQ ID NO: 143191 - DNA, 25 bp, Saccharomyces pastorianus
gaaaatttctgctcattgtacccat

SEQ ID NO: 143192 - DNA, 25 bp, Saccharomyces pastorianus
cggtgcttattggtgtcgttcctaa

SEQ ID NO: 143193 - DNA, 25 bp, Saccharomyces pastorianus
atagtactcttgaggctcttctact

SEQ ID NO: 143194 - DNA, 25 bp, Saccharomyces pastorianus
tgaaaccattcccttctcaaagcaa

SEQ ID NO: 143195 - DNA, 25 bp, Saccharomyces pastorianus
gcccttcgactttaacggtggtgcg

SEQ ID NO: 143196 - DNA, 25 bp, Saccharomyces pastorianus
gatgagactttgtacacacccacta

SEQ ID NO: 143197 - DNA, 25 bp, Saccharomyces pastorianus
tgcgtacgacaacctgaccatgtgg

SEQ ID NO: 143198 - DNA, 25 bp, Saccharomyces pastorianus
actaccgcaacgacatgacactatt

SEQ ID NO: 143199 - DNA, 25 bp, Saccharomyces pastorianus
gcgaggcgcgtggttgattcatatc

SEQ ID NO: 143200 - DNA, 25 bp, Saccharomyces pastorianus
ttctatatcatgttccaccttgtca

SEQ ID NO: 143201 - DNA, 25 bp, Saccharomyces pastorianus
gtacccattgtgttgttcctgatta

SEQ ID NO: 143202 - DNA, 25 bp, Saccharomyces pastorianus
agcgtactgatctgcacagccaaac

SEQ ID NO: 143203 - DNA, 25 bp, Saccharomyces pastorianus
ctcgtttgtcttacctatctctata

SEQ ID NO: 143204 - DNA, 25 bp, Saccharomyces pastorianus
tcggctaagttcacggcgcacagac

SEQ ID NO: 143205 - DNA, 25 bp, Saccharomyces pastorianus
acacctaagcctgccactgaatagg

SEQ ID NO: 143206 - DNA, 25 bp, Saccharomyces pastorianus
gaaaagatcccaagcatcacgttat

SEQ ID NO: 143207 - DNA, 25 bp, Saccharomyces pastorianus
tgagaaagagtccttgccaggccca

SEQ ID NO: 143208 - DNA, 25 bp, Saccharomyces pastorianus
cttggattaagaccctcggctaagt

SEQ ID NO: 143209 - DNA, 25 bp, Saccharomyces pastorianus
gatgatttaacatcgcaggcatcaa

SEQ ID NO: 143210 - DNA, 25 bp, Saccharomyces pastorianus
atataatgatcgatgcagcctcctc

SEQ ID NO: 143211 - DNA, 25 bp, Saccharomyces pastorianus
gaggcccgcttactgtacaaggttt

SEQ ID NO: 143212 - DNA, 25 bp, Saccharomyces pastorianus
caggcccatttgtccttggattaag

SEQ ID NO: 143213 - DNA, 25 bp, Saccharomyces pastorianus
ccccaatcatcgacttaccgtatat

SEQ ID NO: 143214 - DNA, 25 bp, Saccharomyces pastorianus
cgagtcgagctcttcaatgaatcca

SEQ ID NO: 143215 - DNA, 25 bp, Saccharomyces pastorianus
agagacaacaggtccactactccat

SEQ ID NO: 143216 - DNA, 25 bp, Saccharomyces pastorianus
atcctcaattagtgtatcctgattt

SEQ ID NO: 143217 - DNA, 25 bp, Saccharomyces pastorianus
taatgcagccagagccgagtcgagc

SEQ ID NO: 143218 - DNA, 25 bp, Saccharomyces pastorianus
ggatatcgataaccctaaggatgct

SEQ ID NO: 143219 - DNA, 25 bp, Saccharomyces pastorianus
gaaagactcgtacttccgtcaaaag

SEQ ID NO: 143220 - DNA, 25 bp, Saccharomyces pastorianus
tagacagctatccagaactcaggta

SEQ ID NO: 143221 - DNA, 25 bp, Saccharomyces pastorianus
aaatacgccttagtccttgagaaat

SEQ ID NO: 143222 - DNA, 25 bp, Saccharomyces pastorianus
tgatttgggtcctctacccgatgaa

SEQ ID NO: 143223 - DNA, 25 bp, Saccharomyces pastorianus
atgaggactatgaggcgacggatat

SEQ ID NO: 143224 - DNA, 25 bp, Saccharomyces pastorianus
tattccgacattatacagatgctca

SEQ ID NO: 143225 - DNA, 25 bp, Saccharomyces pastorianus
attcaatgtccttccacctaaaaag

SEQ ID NO: 143226 - DNA, 25 bp, Saccharomyces pastorianus
gagatttcaccaatattcaatgtcc

SEQ ID NO: 143227 - DNA, 25 bp, Saccharomyces pastorianus
gattctgggttagagatttcaccaa

SEQ ID NO: 143228 - DNA, 25 bp, Saccharomyces pastorianus
tactgtaataaagcgtattccgaca

SEQ ID NO: 143229 - DNA, 25 bp, Saccharomyces pastorianus
gatcaagaaccctgtatctttcaat

SEQ ID NO: 143230 - DNA, 25 bp, Saccharomyces pastorianus
tcaccaatattcaatgtccttccac

SEQ ID NO: 143231 - DNA, 25 bp, Saccharomyces pastorianus
tccggactactacgcagtgatcaag

SEQ ID NO: 143232 - DNA, 25 bp, Saccharomyces pastorianus
aaggattatccggactactacgcag

SEQ ID NO: 143233 - DNA, 25 bp, Saccharomyces pastorianus
gattatccggactactacgcagtga

SEQ ID NO: 143234 - DNA, 25 bp, Saccharomyces pastorianus
cgcagtgatcaagaaccctgtatct

SEQ ID NO: 143235 - DNA, 25 bp, Saccharomyces pastorianus
ggtacactttattttctggactcac

SEQ ID NO: 143236 - DNA, 25 bp, Saccharomyces pastorianus
gttgcggacatgaccattgtaacga

SEQ ID NO: 143237 - DNA, 25 bp, Saccharomyces pastorianus
caaaacaggtctttcaatggcattt

SEQ ID NO: 143238 - DNA, 25 bp, Saccharomyces pastorianus
gagatgactctacgccgaacaaaat

SEQ ID NO: 143239 - DNA, 25 bp, Saccharomyces pastorianus
aatggcattttttcacatcccactg

SEQ ID NO: 143240 - DNA, 25 bp, Saccharomyces pastorianus
tcccactgccagaatacttgaatat

SEQ ID NO: 143241 - DNA, 25 bp, Saccharomyces pastorianus
gagaaaaatcccctcattggaatgt

SEQ ID NO: 143242 - DNA, 25 bp, Saccharomyces pastorianus
acagaagtcccagtaggtacacttt

SEQ ID NO: 143243 - DNA, 25 bp, Saccharomyces pastorianus
aaatctggctatgctatggcggtgg

SEQ ID NO: 143244 - DNA, 25 bp, Saccharomyces pastorianus
gaatccaagacacatcccggagaga

SEQ ID NO: 143245 - DNA, 25 bp, Saccharomyces pastorianus
acgattactgtcttcgagatgactc

SEQ ID NO: 143246 - DNA, 25 bp, Saccharomyces pastorianus
gagagcttctttgcaaggttccgta

SEQ ID NO: 143247 - DNA, 25 bp, Saccharomyces pastorianus
aggttccgtattctggatgtcacca

SEQ ID NO: 143248 - DNA, 25 bp, Saccharomyces pastorianus
agataccttcctgggctacgtcaga

SEQ ID NO: 143249 - DNA, 25 bp, Saccharomyces pastorianus
agcgatcttcaaaataggcacaaac

SEQ ID NO: 143250 - DNA, 25 bp, Saccharomyces pastorianus
ttcggtttcctccatgctgaataat

SEQ ID NO: 143251 - DNA, 25 bp, Saccharomyces pastorianus
aaacagaccgctactactgctaaag

SEQ ID NO: 143252 - DNA, 25 bp, Saccharomyces pastorianus
atttttctcaaatgcaagcgatctt

SEQ ID NO: 143253 - DNA, 25 bp, Saccharomyces pastorianus
tatggtctacaggatgtgttgtcat

SEQ ID NO: 143254 - DNA, 25 bp, Saccharomyces pastorianus
tgttacttattatggtgcttctcaa

SEQ ID NO: 143255 - DNA, 25 bp, Saccharomyces pastorianus
attacggaccatttgaggaatcact

SEQ ID NO: 143256 - DNA, 25 bp, Saccharomyces pastorianus
tatttttcttgaatacgttcctggg

SEQ ID NO: 143257 - DNA, 25 bp, Saccharomyces pastorianus
aggactaacgccttttcagggagat

SEQ ID NO: 143258 - DNA, 25 bp, Saccharomyces pastorianus
gaaccaaatgactgctggtccaaca

SEQ ID NO: 143259 - DNA, 25 bp, Saccharomyces pastorianus
ggatactttatgtgccttaaaccaa

SEQ ID NO: 143260 - DNA, 25 bp, Saccharomyces pastorianus
tatacgatcttttcgatggcatgtt

SEQ ID NO: 143261 - DNA, 25 bp, Saccharomyces pastorianus
acagagcacacggattacgcgatat

SEQ ID NO: 143262 - DNA, 25 bp, Saccharomyces pastorianus
ttgtgggagagcttttcttccgtta

SEQ ID NO: 143263 - DNA, 25 bp, Saccharomyces pastorianus
gcccaggccatttgagggatatcca

SEQ ID NO: 143264 - DNA, 25 bp, Saccharomyces pastorianus
gagggattacgttcttcttgatgac

SEQ ID NO: 143265 - DNA, 25 bp, Saccharomyces pastorianus
tcttccgttattccacgaactgact

SEQ ID NO: 143266 - DNA, 25 bp, Saccharomyces pastorianus
tgatataagagtacgcctggctgaa

SEQ ID NO: 143267 - DNA, 25 bp, Saccharomyces pastorianus
aagttcccagagatgtgacgatgta

SEQ ID NO: 143268 - DNA, 25 bp, Saccharomyces pastorianus
tagggcattaaaattattccaaagc

SEQ ID NO: 143269 - DNA, 25 bp, Saccharomyces pastorianus
atttctagcgaaaaagagtattcta

SEQ ID NO: 143270 - DNA, 25 bp, Saccharomyces pastorianus
atgcgctacagggtagggcattaaa

SEQ ID NO: 143271 - DNA, 25 bp, Saccharomyces pastorianus
taatatcgtagaggacatcaaagct

SEQ ID NO: 143272 - DNA, 25 bp, Saccharomyces pastorianus
gacatgtcaattgatgtaaacggaa

SEQ ID NO: 143273 - DNA, 25 bp, Saccharomyces pastorianus
gatatgaaaaactgatttctagcga

SEQ ID NO: 143274 - DNA, 25 bp, Saccharomyces pastorianus
gaggacatcaaagctctgagacaag

SEQ ID NO: 143275 - DNA, 25 bp, Saccharomyces pastorianus
atcaaagctctgagacaagctataa

SEQ ID NO: 143276 - DNA, 25 bp, Saccharomyces pastorianus
aaagctacggatgcgctacagggta

SEQ ID NO: 143277 - DNA, 25 bp, Saccharomyces pastorianus
aaggctaacgaaaatgacatgtcaa

SEQ ID NO: 143278 - DNA, 25 bp, Saccharomyces pastorianus
gagtattctaatatcgtagaggaca

SEQ ID NO: 143279 - DNA, 25 bp, Saccharomyces pastorianus
gaaaactcttgtagggatggcagct

SEQ ID NO: 143280 - DNA, 25 bp, Saccharomyces pastorianus
acctgggtaccacgaatagtgctgt

SEQ ID NO: 143281 - DNA, 25 bp, Saccharomyces pastorianus
attctgaaaacactttctttgctac

SEQ ID NO: 143282 - DNA, 25 bp, Saccharomyces pastorianus
atctatagttgcctttgatgtcaaa

SEQ ID NO: 143283 - DNA, 25 bp, Saccharomyces pastorianus
gacaacgaaccacaccatctatagt

SEQ ID NO: 143284 - DNA, 25 bp, Saccharomyces pastorianus
gtcattggtatcgacctgggtacca

SEQ ID NO: 143285 - DNA, 25 bp, Saccharomyces pastorianus
aacgatccctcaactggctaagaag

SEQ ID NO: 143286 - DNA, 25 bp, Saccharomyces pastorianus
tgatgtcaaaagctcgccacagaat

SEQ ID NO: 143287 - DNA, 25 bp, Saccharomyces pastorianus
atatatccgtgattctaacgacaaa

SEQ ID NO: 143288 - DNA, 25 bp, Saccharomyces pastorianus
tatcaattcacgattactatactca

SEQ ID NO: 143289 - DNA, 25 bp, Saccharomyces pastorianus
aatctggtagactcaactttctcaa

SEQ ID NO: 143290 - DNA, 25 bp, Saccharomyces pastorianus
gttctcacccttgatacctagaaat

SEQ ID NO: 143291 - DNA, 25 bp, Saccharomyces pastorianus
taggagcagctattcaaggtggtat

SEQ ID NO: 143292 - DNA, 25 bp, Saccharomyces pastorianus
gatgccgatatcgaaccggaggata

SEQ ID NO: 143293 - DNA, 25 bp, Saccharomyces pastorianus
aacatctacgagtgccaatgacaga

SEQ ID NO: 143294 - DNA, 25 bp, Saccharomyces pastorianus
aatccttgttggtggtatgacccgt

SEQ ID NO: 143295 - DNA, 25 bp, Saccharomyces pastorianus
caaggtggtattctatccggtgaaa

SEQ ID NO: 143296 - DNA, 25 bp, Saccharomyces pastorianus
gtgacaccattgacattagggattg

SEQ ID NO: 143297 - DNA, 25 bp, Saccharomyces pastorianus
aacatttggaggagcgttctcaccc

SEQ ID NO: 143298 - DNA, 25 bp, Saccharomyces pastorianus
gtctccaaattctagtgttaaccca

SEQ ID NO: 143299 - DNA, 25 bp, Saccharomyces pastorianus
ggtatgacccgtatgccaaagatta

SEQ ID NO: 143300 - DNA, 25 bp, Saccharomyces pastorianus
gactatcccacctgtgaagcaagca

SEQ ID NO: 143301 - DNA, 25 bp, Saccharomyces pastorianus
ccaacgatagtagttctgtcatatt

SEQ ID NO: 143302 - DNA, 25 bp, Saccharomyces pastorianus
aaattgtcacaccaatctcgcccat

SEQ ID NO: 143303 - DNA, 25 bp, Saccharomyces pastorianus
ggagatggaatctcccaacgatagt

SEQ ID NO: 143304 - DNA, 25 bp, Saccharomyces pastorianus
gtgattccaattctgatatctcgca

SEQ ID NO: 143305 - DNA, 25 bp, Saccharomyces pastorianus
taaggcttgaccatggtgctaacaa

SEQ ID NO: 143306 - DNA, 25 bp, Saccharomyces pastorianus
atctcgcccatgaatgaagctatta

SEQ ID NO: 143307 - DNA, 25 bp, Saccharomyces pastorianus
tgctaacaataaatcacttctgctt

SEQ ID NO: 143308 - DNA, 25 bp, Saccharomyces pastorianus
agatagtggcagtctgccattcaac

SEQ ID NO: 143309 - DNA, 25 bp, Saccharomyces pastorianus
taatcattttaaggccgtttcagaa

SEQ ID NO: 143310 - DNA, 25 bp, Saccharomyces pastorianus
tgatatctcgcaaaggtccgttagc

SEQ ID NO: 143311 - DNA, 25 bp, Saccharomyces pastorianus
tctgcttggaagttttttggacggt

SEQ ID NO: 143312 - DNA, 25 bp, Saccharomyces pastorianus
ttatctcagggaatagcgaacggca

SEQ ID NO: 143313 - DNA, 25 bp, Saccharomyces pastorianus
acaactgaacttgctagagactaca

SEQ ID NO: 143314 - DNA, 25 bp, Saccharomyces pastorianus
gaagactatagacatcgcggcaata

SEQ ID NO: 143315 - DNA, 25 bp, Saccharomyces pastorianus
tgaagctgaagctctgcccagatat

SEQ ID NO: 143316 - DNA, 25 bp, Saccharomyces pastorianus
gatcctgttcagatcttttgtcaag

SEQ ID NO: 143317 - DNA, 25 bp, Saccharomyces pastorianus
gactacttgtttaggtctggcagcc

SEQ ID NO: 143318 - DNA, 25 bp, Saccharomyces pastorianus
ggtctggcagcctaaattttgacaa

SEQ ID NO: 143319 - DNA, 25 bp, Saccharomyces pastorianus
gagcaaaatgcaaattaccccactt

SEQ ID NO: 143320 - DNA, 25 bp, Saccharomyces pastorianus
gactacaacatatttatctcaggga

SEQ ID NO: 143321 - DNA, 25 bp, Saccharomyces pastorianus
ggatcaccccattttaagaaagttg

SEQ ID NO: 143322 - DNA, 25 bp, Saccharomyces pastorianus
gcgaacggcaattactcttctttga

SEQ ID NO: 143323 - DNA, 25 bp, Saccharomyces pastorianus
gagtgataatcatcagccacctcgc

SEQ ID NO: 143324 - DNA, 25 bp, Saccharomyces pastorianus
agttgccaaatcttgacatcctcac

SEQ ID NO: 143325 - DNA, 25 bp, Saccharomyces pastorianus
agaagcagtggtcttgccttttcat

SEQ ID NO: 143326 - DNA, 25 bp, Saccharomyces pastorianus
aagattatcttcagcttctctccaa

SEQ ID NO: 143327 - DNA, 25 bp, Saccharomyces pastorianus
agccacctcgctcaagtaatactgt

SEQ ID NO: 143328 - DNA, 25 bp, Saccharomyces pastorianus
atagaaatagcattcctcctcctgg

SEQ ID NO: 143329 - DNA, 25 bp, Saccharomyces pastorianus
acacacaacttgagctcacacgtaa

SEQ ID NO: 143330 - DNA, 25 bp, Saccharomyces pastorianus
ttcgcctctatcttcatcatcaaat

SEQ ID NO: 143331 - DNA, 25 bp, Saccharomyces pastorianus
gaataatggctctgtatcttccaaa

SEQ ID NO: 143332 - DNA, 25 bp, Saccharomyces pastorianus
tgaacagattttcgttctctcctgt

SEQ ID NO: 143333 - DNA, 25 bp, Saccharomyces pastorianus
gttctctcctgtgcgtgttgcaaaa

SEQ ID NO: 143334 - DNA, 25 bp, Saccharomyces pastorianus
gctagacgaaatttgccgcgaagtt

SEQ ID NO: 143335 - DNA, 25 bp, Saccharomyces pastorianus
gccccgaggctgaaggtactgtagt

SEQ ID NO: 143336 - DNA, 25 bp, Saccharomyces pastorianus
cagaaaaaggtttgccatgatgaat

SEQ ID NO: 143337 - DNA, 25 bp, Saccharomyces pastorianus
tgagcagggctcaagagttgattaa

SEQ ID NO: 143338 - DNA, 25 bp, Saccharomyces pastorianus
gccgcgaagttaagactgcctctat

SEQ ID NO: 143339 - DNA, 25 bp, Saccharomyces pastorianus
actgtagtcagagttatcacttggc

SEQ ID NO: 143340 - DNA, 25 bp, Saccharomyces pastorianus
agagttatcacttggctagacgaaa

SEQ ID NO: 143341 - DNA, 25 bp, Saccharomyces pastorianus
tgggcccgtggtttatcattcaaag

SEQ ID NO: 143342 - DNA, 25 bp, Saccharomyces pastorianus
tgtgttttcaatacgcatcagattc

SEQ ID NO: 143343 - DNA, 25 bp, Saccharomyces pastorianus
tacgcatcagattccattaactcag

SEQ ID NO: 143344 - DNA, 25 bp, Saccharomyces pastorianus
aatcatggaaatgagccccgaggct

SEQ ID NO: 143345 - DNA, 25 bp, Saccharomyces pastorianus
gatcactaaacgcaagtttgccgca

SEQ ID NO: 143346 - DNA, 25 bp, Saccharomyces pastorianus
gaagttcctgtgacggctattgaag

SEQ ID NO: 143347 - DNA, 25 bp, Saccharomyces pastorianus
tacaaactcccaaatggtgagccaa

SEQ ID NO: 143348 - DNA, 25 bp, Saccharomyces pastorianus
gtttgccgcacccttgggaaaagtg

SEQ ID NO: 143349 - DNA, 25 bp, Saccharomyces pastorianus
gatgttgccgctttgaacgagttta

SEQ ID NO: 143350 - DNA, 25 bp, Saccharomyces pastorianus
ttctctgaaggatgctgtttgtgtc

SEQ ID NO: 143351 - DNA, 25 bp, Saccharomyces pastorianus
agaaatggttaaatcgccttcgata

SEQ ID NO: 143352 - DNA, 25 bp, Saccharomyces pastorianus
taaggaggcaacagtcaacctaatg

SEQ ID NO: 143353 - DNA, 25 bp, Saccharomyces pastorianus
tagggaccccaatgattgcttgaaa

SEQ ID NO: 143354 - DNA, 25 bp, Saccharomyces pastorianus
atcgccttcgatattgcatatcttg

SEQ ID NO: 143355 - DNA, 25 bp, Saccharomyces pastorianus
gcagactcgttgcttttagggaccc

SEQ ID NO: 143356 - DNA, 25 bp, Saccharomyces pastorianus
ccagatcattacttgaacgtggtat

SEQ ID NO: 143357 - DNA, 25 bp, Saccharomyces pastorianus
actgactccaggtgagtttacccaa

SEQ ID NO: 143358 - DNA, 25 bp, Saccharomyces pastorianus
gggctattgcccattgtcaaggagt

SEQ ID NO: 143359 - DNA, 25 bp, Saccharomyces pastorianus
ggcttggattccactggtacagtca

SEQ ID NO: 143360 - DNA, 25 bp, Saccharomyces pastorianus
cagttatctttagcagcatccgtaa

SEQ ID NO: 143361 - DNA, 25 bp, Saccharomyces pastorianus
taacgatgggtgttccgacgaggtt

SEQ ID NO: 143362 - DNA, 25 bp, Saccharomyces pastorianus
agtcctttatctattgctacgttca

SEQ ID NO: 143363 - DNA, 25 bp, Saccharomyces pastorianus
ggtacagtcattgtgatggcatata

SEQ ID NO: 143364 - DNA, 25 bp, Saccharomyces pastorianus
gagggaattaacttctgcaacaata

SEQ ID NO: 143365 - DNA, 25 bp, Saccharomyces pastorianus
ccgacgaggttgcagtctcagttta

SEQ ID NO: 143366 - DNA, 25 bp, Saccharomyces pastorianus
ggtttgaaccttcccacaagaacag

SEQ ID NO: 143367 - DNA, 25 bp, Saccharomyces pastorianus
tgcttccacagcatgtcaagtttat

SEQ ID NO: 143368 - DNA, 25 bp, Saccharomyces pastorianus
ttcaacacgtggaggtgccaaccgt

SEQ ID NO: 143369 - DNA, 25 bp, Saccharomyces pastorianus
caatgctttatagaggtgccgattt

SEQ ID NO: 143370 - DNA, 25 bp, Saccharomyces pastorianus
gtttatcttattatctgccaccgtt

SEQ ID NO: 143371 - DNA, 25 bp, Saccharomyces pastorianus
ggcgcaattggctccaacagcgtaa

SEQ ID NO: 143372 - DNA, 25 bp, Saccharomyces pastorianus
ccaccgttcctaacacttatgagtt

SEQ ID NO: 143373 - DNA, 25 bp, Saccharomyces pastorianus
aggtgccaaccgtggaggttcaaga

SEQ ID NO: 143374 - DNA, 25 bp, Saccharomyces pastorianus
tttacactcaagatggtccttcgaa

SEQ ID NO: 143375 - DNA, 25 bp, Saccharomyces pastorianus
gggccgtggtggatccaatactcga

SEQ ID NO: 143376 - DNA, 25 bp, Saccharomyces pastorianus
gggctccttcaaaaactgacaacgg

SEQ ID NO: 143377 - DNA, 25 bp, Saccharomyces pastorianus
tcatttccacaccaaaaagacccgt

SEQ ID NO: 143378 - DNA, 25 bp, Saccharomyces pastorianus
atgaaagctcatccggtgcttctaa

SEQ ID NO: 143379 - DNA, 25 bp, Saccharomyces pastorianus
aatccatgcccaatatttctgaaga

SEQ ID NO: 143380 - DNA, 25 bp, Saccharomyces pastorianus
atcttagacagtgcttcacctctga

SEQ ID NO: 143381 - DNA, 25 bp, Saccharomyces pastorianus
tgttacgcgagatgcttcgtccttg

SEQ ID NO: 143382 - DNA, 25 bp, Saccharomyces pastorianus
ggacggtacttcaggtgttacgcga

SEQ ID NO: 143383 - DNA, 25 bp, Saccharomyces pastorianus
gtagaacttgacctcgacactttag

SEQ ID NO: 143384 - DNA, 25 bp, Saccharomyces pastorianus
aaagcgctgcacacaacgggttttc

SEQ ID NO: 143385 - DNA, 25 bp, Saccharomyces pastorianus
gtgggtctaagaacgcttcttcgaa

SEQ ID NO: 143386 - DNA, 25 bp, Saccharomyces pastorianus
gaggcgcttagcacgtggatcaaag

SEQ ID NO: 143387 - DNA, 25 bp, Saccharomyces pastorianus
acgggttttcctcatcttcagatga

SEQ ID NO: 143388 - DNA, 25 bp, Saccharomyces pastorianus
tgcttctaacggtttggacggtact

SEQ ID NO: 143389 - DNA, 25 bp, Saccharomyces pastorianus
agcgcctgctggacttgcagagaac

SEQ ID NO: 143390 - DNA, 25 bp, Saccharomyces pastorianus
gggatccttcgaatggactcgcaga

SEQ ID NO: 143391 - DNA, 25 bp, Saccharomyces pastorianus
aacgatgtggatgtcaatggtaata

SEQ ID NO: 143392 - DNA, 25 bp, Saccharomyces pastorianus
ggagatgctctaacatcagcgcctg

SEQ ID NO: 143393 - DNA, 25 bp, Saccharomyces pastorianus
gcagaagaagaaaaccccgccaata

SEQ ID NO: 143394 - DNA, 25 bp, Saccharomyces pastorianus
gaagtggcgcagaagacgaacagca

SEQ ID NO: 143395 - DNA, 25 bp, Saccharomyces pastorianus
gaacggtattgaaggcgccaccctg

SEQ ID NO: 143396 - DNA, 25 bp, Saccharomyces pastorianus
aaaccccgccaataaccagttgcat

SEQ ID NO: 143397 - DNA, 25 bp, Saccharomyces pastorianus
aaggctagactggatggagatgctc

SEQ ID NO: 143398 - DNA, 25 bp, Saccharomyces pastorianus
accagttgcatctcaaaaaggctag

SEQ ID NO: 143399 - DNA, 25 bp, Saccharomyces pastorianus
gacgacgtttccagtaatctaaaga

SEQ ID NO: 143400 - DNA, 25 bp, Saccharomyces pastorianus
aatacttttcattcttccgtacacg

SEQ ID NO: 143401 - DNA, 25 bp, Saccharomyces pastorianus
atcacctctggtacttgtccaagat

SEQ ID NO: 143402 - DNA, 25 bp, Saccharomyces pastorianus
gatccagattcgaccgattcttttg

SEQ ID NO: 143403 - DNA, 25 bp, Saccharomyces pastorianus
gaaaatggctccagttccaatggaa

SEQ ID NO: 143404 - DNA, 25 bp, Saccharomyces pastorianus
gccctagtaaccacaattccatgaa

SEQ ID NO: 143405 - DNA, 25 bp, Saccharomyces pastorianus
ttccgtacacgcaaaatcttctcaa

SEQ ID NO: 143406 - DNA, 25 bp, Saccharomyces pastorianus
atgaactctgtcgtaaatccaacta

SEQ ID NO: 143407 - DNA, 25 bp, Saccharomyces pastorianus
agacgatcctgcgagaaggctctat

SEQ ID NO: 143408 - DNA, 25 bp, Saccharomyces pastorianus
aatccaactacaggttctcacaact

SEQ ID NO: 143409 - DNA, 25 bp, Saccharomyces pastorianus
catcaaaccgatttatcacctctgg

SEQ ID NO: 143410 - DNA, 25 bp, Saccharomyces pastorianus
gaagtaccatagattgcacggacat

SEQ ID NO: 143411 - DNA, 25 bp, Saccharomyces pastorianus
tgctggtgacactagttcatcagtt

SEQ ID NO: 143412 - DNA, 25 bp, Saccharomyces pastorianus
ggtgacactagttcatcagttcgta

SEQ ID NO: 143413 - DNA, 25 bp, Saccharomyces pastorianus
gacactagttcatcagttcgtatga

SEQ ID NO: 143414 - DNA, 25 bp, Saccharomyces pastorianus
tgacttataatacctcttctgccaa

SEQ ID NO: 143415 - DNA, 25 bp, Saccharomyces pastorianus
taatacctcttctgccaactatgac

SEQ ID NO: 143416 - DNA, 25 bp, Saccharomyces pastorianus
tcttctgccaactatgacctgcaga

SEQ ID NO: 143417 - DNA, 25 bp, Saccharomyces pastorianus
aactctgctggtgacactagttcat

SEQ ID NO: 143418 - DNA, 25 bp, Saccharomyces pastorianus
ttataatacctcttctgccaactat

SEQ ID NO: 143419 - DNA, 25 bp, Saccharomyces pastorianus
gccaactatgacctgcagaataaca

SEQ ID NO: 143420 - DNA, 25 bp, Saccharomyces pastorianus
tacctcttctgccaactatgacctg

SEQ ID NO: 143421 - DNA, 25 bp, Saccharomyces pastorianus
gttcatcagttcgtatgacttataa

SEQ ID NO: 143422 - DNA, 25 bp, Saccharomyces pastorianus
tgctggtgacactagttcatcagtt

SEQ ID NO: 143423 - DNA, 25 bp, Saccharomyces pastorianus
gacactagttcatcagttcgtatga

SEQ ID NO: 143424 - DNA, 25 bp, Saccharomyces pastorianus
tgacttataatacctcttctgccaa

SEQ ID NO: 143425 - DNA, 25 bp, Saccharomyces pastorianus
atggccgctcatactcataatgcag

SEQ ID NO: 143426 - DNA, 25 bp, Saccharomyces pastorianus
taatacctcttctgccaactatgac

SEQ ID NO: 143427 - DNA, 25 bp, Saccharomyces pastorianus
aactctgctggtgacactagttcat

SEQ ID NO: 143428 - DNA, 25 bp, Saccharomyces pastorianus
ggtgacactagttcatcagttcgta

SEQ ID NO: 143429 - DNA, 25 bp, Saccharomyces pastorianus
ttataatacctcttctgccaactat

SEQ ID NO: 143430 - DNA, 25 bp, Saccharomyces pastorianus
gccaactatgacctgcagaataaca

SEQ ID NO: 143431 - DNA, 25 bp, Saccharomyces pastorianus
gacctgcagaataacatggccgctc

SEQ ID NO: 143432 - DNA, 25 bp, Saccharomyces pastorianus
gttcatcagttcgtatgacttataa

SEQ ID NO: 143433 - DNA, 25 bp, Saccharomyces pastorianus
acaatctcggtgttcttgaaaacgg

SEQ ID NO: 143434 - DNA, 25 bp, Saccharomyces pastorianus
taggcccatcacgtctagacgttta

SEQ ID NO: 143435 - DNA, 25 bp, Saccharomyces pastorianus
taaacctacagctttattgccagag

SEQ ID NO: 143436 - DNA, 25 bp, Saccharomyces pastorianus
acggattccatgtcgcctcaggaga

SEQ ID NO: 143437 - DNA, 25 bp, Saccharomyces pastorianus
ggttgcactgcattcatttttgtta

SEQ ID NO: 143438 - DNA, 25 bp, Saccharomyces pastorianus
caggagatcgaacaactaggcccat

SEQ ID NO: 143439 - DNA, 25 bp, Saccharomyces pastorianus
ctttcacacttctagacctattgtc

SEQ ID NO: 143440 - DNA, 25 bp, Saccharomyces pastorianus
gaatacaagctcgatctaaacctac

SEQ ID NO: 143441 - DNA, 25 bp, Saccharomyces pastorianus
gatgtttacagaggtccaggcccgc

SEQ ID NO: 143442 - DNA, 25 bp, Saccharomyces pastorianus
ccgctattgggtgctcctggaggaa

SEQ ID NO: 143443 - DNA, 25 bp, Saccharomyces pastorianus
tattgtctgcctcgcactgacggat

SEQ ID NO: 143444 - DNA, 25 bp, Saccharomyces pastorianus
tagtcccccttaatacgttcaacat

SEQ ID NO: 143445 - DNA, 25 bp, Saccharomyces pastorianus
gttgcatttctgatacaattgctaa

SEQ ID NO: 143446 - DNA, 25 bp, Saccharomyces pastorianus
tacagtttttacaatggagttcata

SEQ ID NO: 143447 - DNA, 25 bp, Saccharomyces pastorianus
ggagttcatatattgttgttgcatt

SEQ ID NO: 143448 - DNA, 25 bp, Saccharomyces pastorianus
tatcccgtccattacagtttttaca

SEQ ID NO: 143449 - DNA, 25 bp, Saccharomyces pastorianus
tacctgccgattcctctaacgtagt

SEQ ID NO: 143450 - DNA, 25 bp, Saccharomyces pastorianus
tacctaagactattacctgccgatt

SEQ ID NO: 143451 - DNA, 25 bp, Saccharomyces pastorianus
atatatcacgatttttacctaagac

SEQ ID NO: 143452 - DNA, 25 bp, Saccharomyces pastorianus
taaatggcgtacaatttggtacaaa

SEQ ID NO: 143453 - DNA, 25 bp, Saccharomyces pastorianus
aatgtatcccgtccattacagtttt

SEQ ID NO: 143454 - DNA, 25 bp, Saccharomyces pastorianus
aatacgttcaacattttaaatggcg

SEQ ID NO: 143455 - DNA, 25 bp, Saccharomyces pastorianus
cgaaccagttttggttgcctctgct

SEQ ID NO: 143456 - DNA, 25 bp, Saccharomyces pastorianus
tcctacgtcgaaccagttttggttg

SEQ ID NO: 143457 - DNA, 25 bp, Saccharomyces pastorianus
accagttttggttgcctctgctaag

SEQ ID NO: 143458 - DNA, 25 bp, Saccharomyces pastorianus
cgtcgaaccagttttggttgcctct

SEQ ID NO: 143459 - DNA, 25 bp, Saccharomyces pastorianus
ccattgttttcctacgtcgaaccag

SEQ ID NO: 143460 - DNA, 25 bp, Saccharomyces pastorianus
gaaccagttttggttgcctctgcta

SEQ ID NO: 143461 - DNA, 25 bp, Saccharomyces pastorianus
gtcgaaccagttttggttgcctctg

SEQ ID NO: 143462 - DNA, 25 bp, Saccharomyces pastorianus
tcgaaccagttttggttgcctctgc

SEQ ID NO: 143463 - DNA, 25 bp, Saccharomyces pastorianus
cattgttttcctacgtcgaaccagt

SEQ ID NO: 143464 - DNA, 25 bp, Saccharomyces pastorianus
tacgtcgaaccagttttggttgcct

SEQ ID NO: 143465 - DNA, 25 bp, Saccharomyces pastorianus
aaccagttttggttgcctctgctaa

SEQ ID NO: 143466 - DNA, 25 bp, Saccharomyces pastorianus
gcgacttcatgacgactcatttaaa

SEQ ID NO: 143467 - DNA, 25 bp, Saccharomyces pastorianus
tctccgaatccttgaaatgacgtac

SEQ ID NO: 143468 - DNA, 25 bp, Saccharomyces pastorianus
aataagtgtgtttctcctattaact

SEQ ID NO: 143469 - DNA, 25 bp, Saccharomyces pastorianus
gggcataccgaagcattacaaaagg

SEQ ID NO: 143470 - DNA, 25 bp, Saccharomyces pastorianus
aagtacactccgtatatggggcata

SEQ ID NO: 143471 - DNA, 25 bp, Saccharomyces pastorianus
agggatctccgaatccttgaaatga

SEQ ID NO: 143472 - DNA, 25 bp, Saccharomyces pastorianus
gtgtttctcctattaactatatgtt

SEQ ID NO: 143473 - DNA, 25 bp, Saccharomyces pastorianus
ttattgcgacttcatgacgactcat

SEQ ID NO: 143474 - DNA, 25 bp, Saccharomyces pastorianus
caaaaggaagcagagcttgtggata

SEQ ID NO: 143475 - DNA, 25 bp, Saccharomyces pastorianus
gtacaggtgaagaagttattgcgac

SEQ ID NO: 143476 - DNA, 25 bp, Saccharomyces pastorianus
aactatatgttggaaaagtacactc

SEQ ID NO: 143477 - DNA, 25 bp, Saccharomyces pastorianus
tgaattcctttgagccatttgatga

SEQ ID NO: 143478 - DNA, 25 bp, Saccharomyces pastorianus
gaatcaagatattgcctctgctctt

SEQ ID NO: 143479 - DNA, 25 bp, Saccharomyces pastorianus
ctctgtcagagaaggcatagcacat

SEQ ID NO: 143480 - DNA, 25 bp, Saccharomyces pastorianus
gagagggctcacaatccaaggacta

SEQ ID NO: 143481 - DNA, 25 bp, Saccharomyces pastorianus
gagcttactgtttaaggcacacggt

SEQ ID NO: 143482 - DNA, 25 bp, Saccharomyces pastorianus
ggactattcatcattgctggccact

SEQ ID NO: 143483 - DNA, 25 bp, Saccharomyces pastorianus
gaagaaatccatcgcagagatcaag

SEQ ID NO: 143484 - DNA, 25 bp, Saccharomyces pastorianus
gcttccatttttcttgcaactatct

SEQ ID NO: 143485 - DNA, 25 bp, Saccharomyces pastorianus
gtggtttatcgacgcgttaacacag

SEQ ID NO: 143486 - DNA, 25 bp, Saccharomyces pastorianus
tgctggccactctaataaatttctc

SEQ ID NO: 143487 - DNA, 25 bp, Saccharomyces pastorianus
taaatttctcacctgctgcagtgga

SEQ ID NO: 143488 - DNA, 25 bp, Saccharomyces pastorianus
gaagcaaccgtgaatgaaccgaaaa

SEQ ID NO: 143489 - DNA, 25 bp, Saccharomyces pastorianus
gaaggcgatttactgatagacaagc

SEQ ID NO: 143490 - DNA, 25 bp, Saccharomyces pastorianus
aggcctcatatctcccatggaaatg

SEQ ID NO: 143491 - DNA, 25 bp, Saccharomyces pastorianus
gatctgatcggtgataatcctggtt

SEQ ID NO: 143492 - DNA, 25 bp, Saccharomyces pastorianus
aatcctggttctgatctcttgagat

SEQ ID NO: 143493 - DNA, 25 bp, Saccharomyces pastorianus
ttcacgttgtccgagtttaaagatt

SEQ ID NO: 143494 - DNA, 25 bp, Saccharomyces pastorianus
agattgacacagattttgagttcca

SEQ ID NO: 143495 - DNA, 25 bp, Saccharomyces pastorianus
gcaactgagtgggatttactactat

SEQ ID NO: 143496 - DNA, 25 bp, Saccharomyces pastorianus
ctatgcgtataggtacaggcctcat

SEQ ID NO: 143497 - DNA, 25 bp, Saccharomyces pastorianus
gagaagaccgctattgatccttgat

SEQ ID NO: 143498 - DNA, 25 bp, Saccharomyces pastorianus
actggacactaggtatccttatgga

SEQ ID NO: 143499 - DNA, 25 bp, Saccharomyces pastorianus
ggatatcgccacttgcaaagctata

SEQ ID NO: 143500 - DNA, 25 bp, Saccharomyces pastorianus
ggcgcgagcttccatggtaatcatt

SEQ ID NO: 143501 - DNA, 25 bp, Saccharomyces pastorianus
acaattcttgtgttaagtcatccaa

SEQ ID NO: 143502 - DNA, 25 bp, Saccharomyces pastorianus
atggcacacttgaggcatccacatt

SEQ ID NO: 143503 - DNA, 25 bp, Saccharomyces pastorianus
agagcctaggcgaattggttcccgt

SEQ ID NO: 143504 - DNA, 25 bp, Saccharomyces pastorianus
agaaacgcccctccatagaatctct

SEQ ID NO: 143505 - DNA, 25 bp, Saccharomyces pastorianus
aattggttcccgtccagatcataaa

SEQ ID NO: 143506 - DNA, 25 bp, Saccharomyces pastorianus
gtgctacagactccaagaaacgccc

SEQ ID NO: 143507 - DNA, 25 bp, Saccharomyces pastorianus
ggcatccacatttgaatagcttacc

SEQ ID NO: 143508 - DNA, 25 bp, Saccharomyces pastorianus
tgcaaagctataccggtcaattttt

SEQ ID NO: 143509 - DNA, 25 bp, Saccharomyces pastorianus
acttgatttttgttgtaccggcgcg

SEQ ID NO: 143510 - DNA, 25 bp, Saccharomyces pastorianus
aatgcctttgaatttacagtgttga

SEQ ID NO: 143511 - DNA, 25 bp, Saccharomyces pastorianus
gcagaatttacctatttgtggctac

SEQ ID NO: 143512 - DNA, 25 bp, Saccharomyces pastorianus
tagtgagccgttacctagcgcaagg

SEQ ID NO: 143513 - DNA, 25 bp, Saccharomyces pastorianus
agcgcaaggaaacactctagatgaa

SEQ ID NO: 143514 - DNA, 25 bp, Saccharomyces pastorianus
ttgtggctacaacagacggtatcta

SEQ ID NO: 143515 - DNA, 25 bp, Saccharomyces pastorianus
ggatgcaccggtgaatctacctgta

SEQ ID NO: 143516 - DNA, 25 bp, Saccharomyces pastorianus
gtagcactcaaagcttacgctcaaa

SEQ ID NO: 143517 - DNA, 25 bp, Saccharomyces pastorianus
gtgcagaagtactcaaccaatggat

SEQ ID NO: 143518 - DNA, 25 bp, Saccharomyces pastorianus
atacttcgacaaggatgcaccggtg

SEQ ID NO: 143519 - DNA, 25 bp, Saccharomyces pastorianus
gagctctgagttcgcatacttcgac

SEQ ID NO: 143520 - DNA, 25 bp, Saccharomyces pastorianus
aatctacctgtagctccggaaggat

SEQ ID NO: 143521 - DNA, 25 bp, Saccharomyces pastorianus
ttttgggcatattgacgccggccaa

SEQ ID NO: 143522 - DNA, 25 bp, Saccharomyces pastorianus
ttcattcaagaactggcccctagta

SEQ ID NO: 143523 - DNA, 25 bp, Saccharomyces pastorianus
gtaccttattcgctacaacgcattg

SEQ ID NO: 143524 - DNA, 25 bp, Saccharomyces pastorianus
atgtttgcaggattcaagcctcctc

SEQ ID NO: 143525 - DNA, 25 bp, Saccharomyces pastorianus
gatagcctttcatcagtcgtacagt

SEQ ID NO: 143526 - DNA, 25 bp, Saccharomyces pastorianus
aacactattagtgaccccagggcaa

SEQ ID NO: 143527 - DNA, 25 bp, Saccharomyces pastorianus
aagtagcagcttatgcggcgagcaa

SEQ ID NO: 143528 - DNA, 25 bp, Saccharomyces pastorianus
gataaacacatttgcaccacttcag

SEQ ID NO: 143529 - DNA, 25 bp, Saccharomyces pastorianus
gttctttgcccctgtaatagacatt

SEQ ID NO: 143530 - DNA, 25 bp, Saccharomyces pastorianus
agacattactactctagctgccaag

SEQ ID NO: 143531 - DNA, 25 bp, Saccharomyces pastorianus
catcttttgatgtgcgtaccttatt

SEQ ID NO: 143532 - DNA, 25 bp, Saccharomyces pastorianus
tgtcgttgggtagttctgccactgc

SEQ ID NO: 143533 - DNA, 25 bp, Saccharomyces pastorianus
gttgggtagttctgccactgctgcg

SEQ ID NO: 143534 - DNA, 25 bp, Saccharomyces pastorianus
ttgggtagttctgccactgctgcgc

SEQ ID NO: 143535 - DNA, 25 bp, Saccharomyces pastorianus
gtttgtgtcgttgggtagttctgcc

SEQ ID NO: 143536 - DNA, 25 bp, Saccharomyces pastorianus
tcgttgggtagttctgccactgctg

SEQ ID NO: 143537 - DNA, 25 bp, Saccharomyces pastorianus
gaatatagactgtttgtgtcgttgg

SEQ ID NO: 143538 - DNA, 25 bp, Saccharomyces pastorianus
ttgtgtcgttgggtagttctgccac

SEQ ID NO: 143539 - DNA, 25 bp, Saccharomyces pastorianus
actgtttgtgtcgttgggtagttct

SEQ ID NO: 143540 - DNA, 25 bp, Saccharomyces pastorianus
tagactgtttgtgtcgttgggtagt

SEQ ID NO: 143541 - DNA, 25 bp, Saccharomyces pastorianus
gtgtcgttgggtagttctgccactg

SEQ ID NO: 143542 - DNA, 25 bp, Saccharomyces pastorianus
ggtagttctgccactgctgcgctat

SEQ ID NO: 143543 - DNA, 25 bp, Saccharomyces pastorianus
gccaccacgatcttcagcattcaaa

SEQ ID NO: 143544 - DNA, 25 bp, Saccharomyces pastorianus
gtattgggcccacaggcacacgcaa

SEQ ID NO: 143545 - DNA, 25 bp, Saccharomyces pastorianus
aacagttcgagacggaatgcttcat

SEQ ID NO: 143546 - DNA, 25 bp, Saccharomyces pastorianus
cacaggcacacgcaacagttcgaga

SEQ ID NO: 143547 - DNA, 25 bp, Saccharomyces pastorianus
aaaggacctggtattgggcccacag

SEQ ID NO: 143548 - DNA, 25 bp, Saccharomyces pastorianus
gatcttcagcattcaaaggacctgg

SEQ ID NO: 143549 - DNA, 25 bp, Saccharomyces pastorianus
gagacggaatgcttcatctagccca

SEQ ID NO: 143550 - DNA, 25 bp, Saccharomyces pastorianus
gttcgagacggaatgcttcatctag

SEQ ID NO: 143551 - DNA, 25 bp, Saccharomyces pastorianus
ggcacacgcaacagttcgagacgga

SEQ ID NO: 143552 - DNA, 25 bp, Saccharomyces pastorianus
ggacctggtattgggcccacaggca

SEQ ID NO: 143553 - DNA, 25 bp, Saccharomyces pastorianus
accacgatcttcagcattcaaagga

SEQ ID NO: 143554 - DNA, 25 bp, Saccharomyces pastorianus
gaaaggtctcaatggcgttcctgcg

SEQ ID NO: 143555 - DNA, 25 bp, Saccharomyces pastorianus
gagctttgctcaacaatcctttgat

SEQ ID NO: 143556 - DNA, 25 bp, Saccharomyces pastorianus
tcatgcactgtcaccatccaaaaga

SEQ ID NO: 143557 - DNA, 25 bp, Saccharomyces pastorianus
gcgttcctgcgtataatagccaatt

SEQ ID NO: 143558 - DNA, 25 bp, Saccharomyces pastorianus
gatcagcttcgaatcctaacgactt

SEQ ID NO: 143559 - DNA, 25 bp, Saccharomyces pastorianus
gatttactttcttggaccttaccat

SEQ ID NO: 143560 - DNA, 25 bp, Saccharomyces pastorianus
gaccttaccattttatcatgcactg

SEQ ID NO: 143561 - DNA, 25 bp, Saccharomyces pastorianus
gataagccactagactttttgttaa

SEQ ID NO: 143562 - DNA, 25 bp, Saccharomyces pastorianus
aacccttcacattccatagcatttt

SEQ ID NO: 143563 - DNA, 25 bp, Saccharomyces pastorianus
gaattcagcaactgccttgttgaga

SEQ ID NO: 143564 - DNA, 25 bp, Saccharomyces pastorianus
ttggctccgagttttggtccaaaat

SEQ ID NO: 143565 - DNA, 25 bp, Saccharomyces pastorianus
acaggcccatatcttggcggttagt

SEQ ID NO: 143566 - DNA, 25 bp, Saccharomyces pastorianus
ggccctggtatggatatcttgaaca

SEQ ID NO: 143567 - DNA, 25 bp, Saccharomyces pastorianus
gaacaaaagaccctggcaccagctt

SEQ ID NO: 143568 - DNA, 25 bp, Saccharomyces pastorianus
tccccgtacttgctggatgttcaat

SEQ ID NO: 143569 - DNA, 25 bp, Saccharomyces pastorianus
actttcttcaattattcctctcagg

SEQ ID NO: 143570 - DNA, 25 bp, Saccharomyces pastorianus
gagccattagctccctacaaatttt

SEQ ID NO: 143571 - DNA, 25 bp, Saccharomyces pastorianus
atgttcgactttatctggttcagcc

SEQ ID NO: 143572 - DNA, 25 bp, Saccharomyces pastorianus
gaaatacgtgttgccattgagttag

SEQ ID NO: 143573 - DNA, 25 bp, Saccharomyces pastorianus
gagttagttgactaccttttcagaa

SEQ ID NO: 143574 - DNA, 25 bp, Saccharomyces pastorianus
ggttcagcccatgatgtactcgcaa

SEQ ID NO: 143575 - DNA, 25 bp, Saccharomyces pastorianus
gcatgtcaatgtaccgaactttctt

SEQ ID NO: 143576 - DNA, 25 bp, Saccharomyces pastorianus
ggcgaactgcatgaaactctgcccg

SEQ ID NO: 143577 - DNA, 25 bp, Saccharomyces pastorianus
tgattatacgccgtcaatctccgat

SEQ ID NO: 143578 - DNA, 25 bp, Saccharomyces pastorianus
gcaagacagctatcctgctgaggca

SEQ ID NO: 143579 - DNA, 25 bp, Saccharomyces pastorianus
gagaacaatttctccgcctgaaatc

SEQ ID NO: 143580 - DNA, 25 bp, Saccharomyces pastorianus
gacgatccacaagtttcgcaagcaa

SEQ ID NO: 143581 - DNA, 25 bp, Saccharomyces pastorianus
aaataggacccactctcaacatgtg

SEQ ID NO: 143582 - DNA, 25 bp, Saccharomyces pastorianus
cggtggttcttcgaggatcctgact

SEQ ID NO: 143583 - DNA, 25 bp, Saccharomyces pastorianus
acgcaggtacctgctgctattacaa

SEQ ID NO: 143584 - DNA, 25 bp, Saccharomyces pastorianus
atcctgactgcttccgattacggtg

SEQ ID NO: 143585 - DNA, 25 bp, Saccharomyces pastorianus
gtaacaacagggtggcttctcataa

SEQ ID NO: 143586 - DNA, 25 bp, Saccharomyces pastorianus
gaatcaatactcaacggctcctgtg

SEQ ID NO: 143587 - DNA, 25 bp, Saccharomyces pastorianus
ttataaaagaacgaagcaaagcctt

SEQ ID NO: 143588 - DNA, 25 bp, Saccharomyces pastorianus
aagaacgaagcaaagcctttaatat

SEQ ID NO: 143589 - DNA, 25 bp, Saccharomyces pastorianus
agaacgaagcaaagcctttaatatt

SEQ ID NO: 143590 - DNA, 25 bp, Saccharomyces pastorianus
tgtttttaaatcaagaggcattatt

SEQ ID NO: 143591 - DNA, 25 bp, Saccharomyces pastorianus
gaacgaagcaaagcctttaatattt

SEQ ID NO: 143592 - DNA, 25 bp, Saccharomyces pastorianus
gcaaagcctttaatatttgctttat

SEQ ID NO: 143593 - DNA, 25 bp, Saccharomyces pastorianus
gtttttaaatcaagaggcattatta

SEQ ID NO: 143594 - DNA, 25 bp, Saccharomyces pastorianus
acgaagcaaagcctttaatatttgc

SEQ ID NO: 143595 - DNA, 25 bp, Saccharomyces pastorianus
caaagcctttaatatttgctttatt

SEQ ID NO: 143596 - DNA, 25 bp, Saccharomyces pastorianus
tgctttattaaaggtactattcaaa

SEQ ID NO: 143597 - DNA, 25 bp, Saccharomyces pastorianus
aatcaagaggcattattataaaaga

SEQ ID NO: 143598 - DNA, 25 bp, Saccharomyces pastorianus
tggactccacctttcttcctgttgt

SEQ ID NO: 143599 - DNA, 25 bp, Saccharomyces pastorianus
attttccgcagatttcttttggact

SEQ ID NO: 143600 - DNA, 25 bp, Saccharomyces pastorianus
gatttcttttggactccacctttct

SEQ ID NO: 143601 - DNA, 25 bp, Saccharomyces pastorianus
cagatttcttttggactccaccttt

SEQ ID NO: 143602 - DNA, 25 bp, Saccharomyces pastorianus
tttccgcagatttcttttggactcc

SEQ ID NO: 143603 - DNA, 25 bp, Saccharomyces pastorianus
tccgcagatttcttttggactccac

SEQ ID NO: 143604 - DNA, 25 bp, Saccharomyces pastorianus
ttccgcagatttcttttggactcca

SEQ ID NO: 143605 - DNA, 25 bp, Saccharomyces pastorianus
ttttggactccacctttcttcctgt

SEQ ID NO: 143606 - DNA, 25 bp, Saccharomyces pastorianus
ttttccgcagatttcttttggactc

SEQ ID NO: 143607 - DNA, 25 bp, Saccharomyces pastorianus
gcagatttcttttggactccacctt

SEQ ID NO: 143608 - DNA, 25 bp, Saccharomyces pastorianus
cgcagatttcttttggactccacct

SEQ ID NO: 143609 - DNA, 25 bp, Saccharomyces pastorianus
taccgattgccgtagaggtcatcaa

SEQ ID NO: 143610 - DNA, 25 bp, Saccharomyces pastorianus
gttgaagacgactcggctttaccga

SEQ ID NO: 143611 - DNA, 25 bp, Saccharomyces pastorianus
aaccaatctaatgttctctgacgaa

SEQ ID NO: 143612 - DNA, 25 bp, Saccharomyces pastorianus
gttgacgccgctttgatcgaagaaa

SEQ ID NO: 143613 - DNA, 25 bp, Saccharomyces pastorianus
cagggattgtagtagaccttttcaa

SEQ ID NO: 143614 - DNA, 25 bp, Saccharomyces pastorianus
gtatcgtctaaacctgaaccaattg

SEQ ID NO: 143615 - DNA, 25 bp, Saccharomyces pastorianus
gcaacaggcacgttttgagctcggt

SEQ ID NO: 143616 - DNA, 25 bp, Saccharomyces pastorianus
gaggttgtacctgacttagtatcgt

SEQ ID NO: 143617 - DNA, 25 bp, Saccharomyces pastorianus
aatccttacggaacaatgagcacac

SEQ ID NO: 143618 - DNA, 25 bp, Saccharomyces pastorianus
gacagcatttgttcaggctgagcaa

SEQ ID NO: 143619 - DNA, 25 bp, Saccharomyces pastorianus
tgagctcggtgtttccatggttatt

SEQ ID NO: 143620 - DNA, 25 bp, Saccharomyces pastorianus
gtttgtatttattacaacaggaaga

SEQ ID NO: 143621 - DNA, 25 bp, Saccharomyces pastorianus
tagtttgtatttattacaacaggaa

SEQ ID NO: 143622 - DNA, 25 bp, Saccharomyces pastorianus
gtatttattacaacaggaagaaagg

SEQ ID NO: 143623 - DNA, 25 bp, Saccharomyces pastorianus
aatagtttgtatttattacaacagg

SEQ ID NO: 143624 - DNA, 25 bp, Saccharomyces pastorianus
gattcaaatagtttgtatttattac

SEQ ID NO: 143625 - DNA, 25 bp, Saccharomyces pastorianus
tcaaatagtttgtatttattacaac

SEQ ID NO: 143626 - DNA, 25 bp, Saccharomyces pastorianus
aaatagtttgtatttattacaacag

SEQ ID NO: 143627 - DNA, 25 bp, Saccharomyces pastorianus
caaatagtttgtatttattacaaca

SEQ ID NO: 143628 - DNA, 25 bp, Saccharomyces pastorianus
atagtttgtatttattacaacagga

SEQ ID NO: 143629 - DNA, 25 bp, Saccharomyces pastorianus
tgtatttattacaacaggaagaaag

SEQ ID NO: 143630 - DNA, 25 bp, Saccharomyces pastorianus
agtttgtatttattacaacaggaag

SEQ ID NO: 143631 - DNA, 25 bp, Saccharomyces pastorianus
gaagaagaaattagtcccggcgttg

SEQ ID NO: 143632 - DNA, 25 bp, Saccharomyces pastorianus
gagatccaaatgtcaacacgtcaat

SEQ ID NO: 143633 - DNA, 25 bp, Saccharomyces pastorianus
ttagtcccggcgttgtaaacaacat

SEQ ID NO: 143634 - DNA, 25 bp, Saccharomyces pastorianus
caacagtagtaacggcggattttca

SEQ ID NO: 143635 - DNA, 25 bp, Saccharomyces pastorianus
gtcttcgtcctccattactttagag

SEQ ID NO: 143636 - DNA, 25 bp, Saccharomyces pastorianus
acagcgcaaaatcactttcagcatt

SEQ ID NO: 143637 - DNA, 25 bp, Saccharomyces pastorianus
accaaggctagtcaaagagatccaa

SEQ ID NO: 143638 - DNA, 25 bp, Saccharomyces pastorianus
tgggttggaaccgacatccgactat

SEQ ID NO: 143639 - DNA, 25 bp, Saccharomyces pastorianus
gcgtaagtaccccaacaatggcatt

SEQ ID NO: 143640 - DNA, 25 bp, Saccharomyces pastorianus
gcatttaagatcgtcttcgtcttcg

SEQ ID NO: 143641 - DNA, 25 bp, Saccharomyces pastorianus
caaattctcatcatgttgctcctga

SEQ ID NO: 143642 - DNA, 25 bp, Saccharomyces pastorianus
gtggacgtgcaggacttcagcatta

SEQ ID NO: 143643 - DNA, 25 bp, Saccharomyces pastorianus
gtacgggacttcattcttcgcggct

SEQ ID NO: 143644 - DNA, 25 bp, Saccharomyces pastorianus
ttcctttcgctctacattattcttt

SEQ ID NO: 143645 - DNA, 25 bp, Saccharomyces pastorianus
attgagggtcttcccttgcaaaaca

SEQ ID NO: 143646 - DNA, 25 bp, Saccharomyces pastorianus
attatctctagtttgaacccaccca

SEQ ID NO: 143647 - DNA, 25 bp, Saccharomyces pastorianus
ttcgcggcttatcaacgccataaag

SEQ ID NO: 143648 - DNA, 25 bp, Saccharomyces pastorianus
ttaagctggattctgggcctgacgt

SEQ ID NO: 143649 - DNA, 25 bp, Saccharomyces pastorianus
actacgatgtcttttgggccacgca

SEQ ID NO: 143650 - DNA, 25 bp, Saccharomyces pastorianus
accgggtcaagtctagcacgcagga

SEQ ID NO: 143651 - DNA, 25 bp, Saccharomyces pastorianus
aacaacttgattgtcttcctttcgc

SEQ ID NO: 143652 - DNA, 25 bp, Saccharomyces pastorianus
caaatgtcccgctagataccgtctt

SEQ ID NO: 143653 - DNA, 25 bp, Saccharomyces pastorianus
agcgtgttcatgactccaacgacct

SEQ ID NO: 143654 - DNA, 25 bp, Saccharomyces pastorianus
aactacagcgtgttcatgactccaa

SEQ ID NO: 143655 - DNA, 25 bp, Saccharomyces pastorianus
aagaggcttgtgtcggcctccaaga

SEQ ID NO: 143656 - DNA, 25 bp, Saccharomyces pastorianus
gcaacttaaactacagcgtgttcat

SEQ ID NO: 143657 - DNA, 25 bp, Saccharomyces pastorianus
gggcaacttaaactacagcgtgttc

SEQ ID NO: 143658 - DNA, 25 bp, Saccharomyces pastorianus
gcgtgttcatgactccaacgacctc

SEQ ID NO: 143659 - DNA, 25 bp, Saccharomyces pastorianus
gtgtcggcctccaagacctgagaaa

SEQ ID NO: 143660 - DNA, 25 bp, Saccharomyces pastorianus
tacagcgtgttcatgactccaacga

SEQ ID NO: 143661 - DNA, 25 bp, Saccharomyces pastorianus
ttgtgtcggcctccaagacctgaga

SEQ ID NO: 143662 - DNA, 25 bp, Saccharomyces pastorianus
gtcggcctccaagacctgagaaagt

SEQ ID NO: 143663 - DNA, 25 bp, Saccharomyces pastorianus
actacagcgtgttcatgactccaac

SEQ ID NO: 143664 - DNA, 25 bp, Saccharomyces pastorianus
tccccagataataaagtccctaaat

SEQ ID NO: 143665 - DNA, 25 bp, Saccharomyces pastorianus
ggcgagtcgttcatcttattcactt

SEQ ID NO: 143666 - DNA, 25 bp, Saccharomyces pastorianus
catgccgttcaagaggcttgtgtcg

SEQ ID NO: 143667 - DNA, 25 bp, Saccharomyces pastorianus
tccaacgacctcatatccgaaatat

SEQ ID NO: 143668 - DNA, 25 bp, Saccharomyces pastorianus
ttcgaacctcatgccgttcaagagg

SEQ ID NO: 143669 - DNA, 25 bp, Saccharomyces pastorianus
aagacctgagaaagtccccagataa

SEQ ID NO: 143670 - DNA, 25 bp, Saccharomyces pastorianus
tccccaccgtgagaaaatacttgaa

SEQ ID NO: 143671 - DNA, 25 bp, Saccharomyces pastorianus
gacgaactccccaccgtgagaaaat

SEQ ID NO: 143672 - DNA, 25 bp, Saccharomyces pastorianus
taaattagacgaactccccaccgtg

SEQ ID NO: 143673 - DNA, 25 bp, Saccharomyces pastorianus
agacgtgggcgagtcgttcatctta

SEQ ID NO: 143674 - DNA, 25 bp, Saccharomyces pastorianus
acgacctcatatccgaaatatcaca

SEQ ID NO: 143675 - DNA, 25 bp, Saccharomyces pastorianus
aattggagctaagcgcccgtgacct

SEQ ID NO: 143676 - DNA, 25 bp, Saccharomyces pastorianus
ggaagtcgaaattgttacatcgcaa

SEQ ID NO: 143677 - DNA, 25 bp, Saccharomyces pastorianus
agtacgcactggacggacagaacga

SEQ ID NO: 143678 - DNA, 25 bp, Saccharomyces pastorianus
ataagagtaaggtaggcggcattgc

SEQ ID NO: 143679 - DNA, 25 bp, Saccharomyces pastorianus
catcgcaatggagcacactagaatt

SEQ ID NO: 143680 - DNA, 25 bp, Saccharomyces pastorianus
gcttactggaggtttgcccccttga

SEQ ID NO: 143681 - DNA, 25 bp, Saccharomyces pastorianus
tttgcccccttgaggaagtcgaaat

SEQ ID NO: 143682 - DNA, 25 bp, Saccharomyces pastorianus
ttgttacatcgcaatggagcacact

SEQ ID NO: 143683 - DNA, 25 bp, Saccharomyces pastorianus
cactagaattggagctaagcgcccg

SEQ ID NO: 143684 - DNA, 25 bp, Saccharomyces pastorianus
gacagacaagtacgcactggacgga

SEQ ID NO: 143685 - DNA, 25 bp, Saccharomyces pastorianus
ggacggacagaacgacaataagagt

SEQ ID NO: 143686 - DNA, 25 bp, Saccharomyces pastorianus
ggaagatttatgaacgccctcaaag

SEQ ID NO: 143687 - DNA, 25 bp, Saccharomyces pastorianus
gtttagaccatggaaatcacaccgc

SEQ ID NO: 143688 - DNA, 25 bp, Saccharomyces pastorianus
tcgggttttcttaccatcttggagt

SEQ ID NO: 143689 - DNA, 25 bp, Saccharomyces pastorianus
gtcatacttagcttggtctggctta

SEQ ID NO: 143690 - DNA, 25 bp, Saccharomyces pastorianus
taccaagccggtttatttactgatg

SEQ ID NO: 143691 - DNA, 25 bp, Saccharomyces pastorianus
acgacagtctacttcgggcgaggct

SEQ ID NO: 143692 - DNA, 25 bp, Saccharomyces pastorianus
aacacgaaccatttgctactagaga

SEQ ID NO: 143693 - DNA, 25 bp, Saccharomyces pastorianus
gtcttgcctgggttaactacactat

SEQ ID NO: 143694 - DNA, 25 bp, Saccharomyces pastorianus
tggagttacatggtttgcgcttctg

SEQ ID NO: 143695 - DNA, 25 bp, Saccharomyces pastorianus
cttcttacagtcaacgttatccgca

SEQ ID NO: 143696 - DNA, 25 bp, Saccharomyces pastorianus
gggcacttgttcatatcaactctct

SEQ ID NO: 143697 - DNA, 25 bp, Saccharomyces pastorianus
ttgctgccggtcacctggtacaaag

SEQ ID NO: 143698 - DNA, 25 bp, Saccharomyces pastorianus
gatcctgcgcagaacgtcgaaagtt

SEQ ID NO: 143699 - DNA, 25 bp, Saccharomyces pastorianus
taaggatctctgtttccatgccatc

SEQ ID NO: 143700 - DNA, 25 bp, Saccharomyces pastorianus
aacgcgcacgcagctaatttggtca

SEQ ID NO: 143701 - DNA, 25 bp, Saccharomyces pastorianus
tggctggtgaactgtctctgtgctc

SEQ ID NO: 143702 - DNA, 25 bp, Saccharomyces pastorianus
gtcactgcacttttcttggcattag

SEQ ID NO: 143703 - DNA, 25 bp, Saccharomyces pastorianus
tggcattaggccaagatcctgcgca

SEQ ID NO: 143704 - DNA, 25 bp, Saccharomyces pastorianus
gaataatcgcgtgtgctgtcttggc

SEQ ID NO: 143705 - DNA, 25 bp, Saccharomyces pastorianus
aagccaatgaactgccacaaccaag

SEQ ID NO: 143706 - DNA, 25 bp, Saccharomyces pastorianus
atgcttgatcttctcggcgttcgtg

SEQ ID NO: 143707 - DNA, 25 bp, Saccharomyces pastorianus
atctgttggtggtttcaacgcgcac

SEQ ID NO: 143708 - DNA, 25 bp, Saccharomyces pastorianus
accactgaagcaactcacaacttat

SEQ ID NO: 143709 - DNA, 25 bp, Saccharomyces pastorianus
aacttgggatgttgataagcctgta

SEQ ID NO: 143710 - DNA, 25 bp, Saccharomyces pastorianus
ggcgagtgatgttccgttagttcaa

SEQ ID NO: 143711 - DNA, 25 bp, Saccharomyces pastorianus
tcaatttcccgactttaagattgtc

SEQ ID NO: 143712 - DNA, 25 bp, Saccharomyces pastorianus
ttgagggtcacagatctattacttg

SEQ ID NO: 143713 - DNA, 25 bp, Saccharomyces pastorianus
tggagcttccagtatttttgatatg

SEQ ID NO: 143714 - DNA, 25 bp, Saccharomyces pastorianus
tatggtgtcatcagaatcagaggaa

SEQ ID NO: 143715 - DNA, 25 bp, Saccharomyces pastorianus
aaacgttgagaccactttgtcgagt

SEQ ID NO: 143716 - DNA, 25 bp, Saccharomyces pastorianus
agattgtccaaccaaactttgaggg

SEQ ID NO: 143717 - DNA, 25 bp, Saccharomyces pastorianus
gagattggctaacgttactaacttt

SEQ ID NO: 143718 - DNA, 25 bp, Saccharomyces pastorianus
ttgctgacgatacttcaccactgaa

SEQ ID NO: 143719 - DNA, 25 bp, Saccharomyces pastorianus
taatgttctactgtacaagtggctt

SEQ ID NO: 143720 - DNA, 25 bp, Saccharomyces pastorianus
gtttccgattaatgttctactgtac

SEQ ID NO: 143721 - DNA, 25 bp, Saccharomyces pastorianus
tgttctactgtacaagtggcttata

SEQ ID NO: 143722 - DNA, 25 bp, Saccharomyces pastorianus
atgatgtttccgattaatgttctac

SEQ ID NO: 143723 - DNA, 25 bp, Saccharomyces pastorianus
aatgttctactgtacaagtggctta

SEQ ID NO: 143724 - DNA, 25 bp, Saccharomyces pastorianus
atgtttccgattaatgttctactgt

SEQ ID NO: 143725 - DNA, 25 bp, Saccharomyces pastorianus
ttccgattaatgttctactgtacaa

SEQ ID NO: 143726 - DNA, 25 bp, Saccharomyces pastorianus
atgttctactgtacaagtggcttat

SEQ ID NO: 143727 - DNA, 25 bp, Saccharomyces pastorianus
ccgattaatgttctactgtacaagt

SEQ ID NO: 143728 - DNA, 25 bp, Saccharomyces pastorianus
gatgtttccgattaatgttctactg

SEQ ID NO: 143729 - DNA, 25 bp, Saccharomyces pastorianus
attaatgttctactgtacaagtggc

SEQ ID NO: 143730 - DNA, 25 bp, Saccharomyces pastorianus
ataggcaagttttctgtcttcatga

SEQ ID NO: 143731 - DNA, 25 bp, Saccharomyces pastorianus
aagggtggacagcattgccatagaa

SEQ ID NO: 143732 - DNA, 25 bp, Saccharomyces pastorianus
gctagatttatctgaacttccaaca

SEQ ID NO: 143733 - DNA, 25 bp, Saccharomyces pastorianus
tttcctttatcaaatgcttcctatc

SEQ ID NO: 143734 - DNA, 25 bp, Saccharomyces pastorianus
gatatcgacacgctaatgctagatt

SEQ ID NO: 143735 - DNA, 25 bp, Saccharomyces pastorianus
taaagtctttacgtcctcttgtccg

SEQ ID NO: 143736 - DNA, 25 bp, Saccharomyces pastorianus
taagtgttttttgcctctaatcaat

SEQ ID NO: 143737 - DNA, 25 bp, Saccharomyces pastorianus
agaagagacgcaacacattttttat

SEQ ID NO: 143738 - DNA, 25 bp, Saccharomyces pastorianus
gtcttcatgataagccatcactcta

SEQ ID NO: 143739 - DNA, 25 bp, Saccharomyces pastorianus
tatgttctgcaaacgctgatatcga

SEQ ID NO: 143740 - DNA, 25 bp, Saccharomyces pastorianus
caaggcgtagagtcctatttgacta

SEQ ID NO: 143741 - DNA, 25 bp, Saccharomyces pastorianus
agacaaggtccatttcagcattccc

SEQ ID NO: 143742 - DNA, 25 bp, Saccharomyces pastorianus
aaaagcattatttgactcgtctatg

SEQ ID NO: 143743 - DNA, 25 bp, Saccharomyces pastorianus
cactggatatgggtattctcttcga

SEQ ID NO: 143744 - DNA, 25 bp, Saccharomyces pastorianus
aaagcctccattagatccttctgtt

SEQ ID NO: 143745 - DNA, 25 bp, Saccharomyces pastorianus
aaaaaatttttatcctgcagcgcag

SEQ ID NO: 143746 - DNA, 25 bp, Saccharomyces pastorianus
caggacgatacgaacatgcagagat

SEQ ID NO: 143747 - DNA, 25 bp, Saccharomyces pastorianus
gcggcgaatcagctggtttcatagt

SEQ ID NO: 143748 - DNA, 25 bp, Saccharomyces pastorianus
aatgttcattccaaaccaggacgat

SEQ ID NO: 143749 - DNA, 25 bp, Saccharomyces pastorianus
gtccctatatgcttggcggcgaatc

SEQ ID NO: 143750 - DNA, 25 bp, Saccharomyces pastorianus
aagccgttactggtatggtctagac

SEQ ID NO: 143751 - DNA, 25 bp, Saccharomyces pastorianus
ggtctagacctagtaccaatacaat

SEQ ID NO: 143752 - DNA, 25 bp, Saccharomyces pastorianus
gatccatctaaatttgtctttaagg

SEQ ID NO: 143753 - DNA, 25 bp, Saccharomyces pastorianus
aagattgacctcttgaaatccgcta

SEQ ID NO: 143754 - DNA, 25 bp, Saccharomyces pastorianus
atagtctgtggtgctataagtgcct

SEQ ID NO: 143755 - DNA, 25 bp, Saccharomyces pastorianus
tgaaatccgctacccttgaagatgg

SEQ ID NO: 143756 - DNA, 25 bp, Saccharomyces pastorianus
gataaattgggttctctggttaagc

SEQ ID NO: 143757 - DNA, 25 bp, Saccharomyces pastorianus
gggtatagctttattctgactaaac

SEQ ID NO: 143758 - DNA, 25 bp, Saccharomyces pastorianus
aagatggtaccggtgataagttcaa

SEQ ID NO: 143759 - DNA, 25 bp, Saccharomyces pastorianus
tgggttctctggttaagcatggtaa

SEQ ID NO: 143760 - DNA, 25 bp, Saccharomyces pastorianus
cgattggtcgttaaaggagtactag

SEQ ID NO: 143761 - DNA, 25 bp, Saccharomyces pastorianus
attgatgattttccaaaggcattag

SEQ ID NO: 143762 - DNA, 25 bp, Saccharomyces pastorianus
ataagtgcctataatgatccatcta

SEQ ID NO: 143763 - DNA, 25 bp, Saccharomyces pastorianus
tatttatctaatgatcctgcccaaa

SEQ ID NO: 143764 - DNA, 25 bp, Saccharomyces pastorianus
atctctctgtcttaggtggtacgtc

SEQ ID NO: 143765 - DNA, 25 bp, Saccharomyces pastorianus
ggcgattatgtctctgcagtgaccg

SEQ ID NO: 143766 - DNA, 25 bp, Saccharomyces pastorianus
gatcctgcatgtactttcgagctca

SEQ ID NO: 143767 - DNA, 25 bp, Saccharomyces pastorianus
gaaaaggaactctcttcagaacaat

SEQ ID NO: 143768 - DNA, 25 bp, Saccharomyces pastorianus
aataaagcattctctcctggcgatt

SEQ ID NO: 143769 - DNA, 25 bp, Saccharomyces pastorianus
gcagtgaccggctggactacacatg

SEQ ID NO: 143770 - DNA, 25 bp, Saccharomyces pastorianus
gaattggtaaagtcttggcctctag

SEQ ID NO: 143771 - DNA, 25 bp, Saccharomyces pastorianus
ggtggtacgtctttaacagcttatt

SEQ ID NO: 143772 - DNA, 25 bp, Saccharomyces pastorianus
aattatggtggtatctctctgtctt

SEQ ID NO: 143773 - DNA, 25 bp, Saccharomyces pastorianus
aattacgccaaaggtgtccagcctg

SEQ ID NO: 143774 - DNA, 25 bp, Saccharomyces pastorianus
gaatccaactccgtgtcagaaatca

SEQ ID NO: 143775 - DNA, 25 bp, Saccharomyces pastorianus
accaagtgtgataccaagttccgaa

SEQ ID NO: 143776 - DNA, 25 bp, Saccharomyces pastorianus
attcgacctgatgtatgccaaacgt

SEQ ID NO: 143777 - DNA, 25 bp, Saccharomyces pastorianus
gatatcatctgttacagcctctttg

SEQ ID NO: 143778 - DNA, 25 bp, Saccharomyces pastorianus
tagagctgtctgcatgctatccaac

SEQ ID NO: 143779 - DNA, 25 bp, Saccharomyces pastorianus
gggaatttctagaccaagcttcagc

SEQ ID NO: 143780 - DNA, 25 bp, Saccharomyces pastorianus
gcttgtttcgaaccgggcaatcaaa

SEQ ID NO: 143781 - DNA, 25 bp, Saccharomyces pastorianus
aacgggttgattgcccaagtgatat

SEQ ID NO: 143782 - DNA, 25 bp, Saccharomyces pastorianus
agaagagggccacccatgaatccaa

SEQ ID NO: 143783 - DNA, 25 bp, Saccharomyces pastorianus
tcatttccctttggtttcctacgca

SEQ ID NO: 143784 - DNA, 25 bp, Saccharomyces pastorianus
gcctctttgaggttcgatggttcat

SEQ ID NO: 143785 - DNA, 25 bp, Saccharomyces pastorianus
cagacagtgcttttggattcccatt

SEQ ID NO: 143786 - DNA, 25 bp, Saccharomyces pastorianus
taccaatgatcaccaactctacagt

SEQ ID NO: 143787 - DNA, 25 bp, Saccharomyces pastorianus
gagaagttcaaatgcttccaccctt

SEQ ID NO: 143788 - DNA, 25 bp, Saccharomyces pastorianus
tagccttcaatggtgattctgcctt

SEQ ID NO: 143789 - DNA, 25 bp, Saccharomyces pastorianus
gagttagacggcgacgattcatttg

SEQ ID NO: 143790 - DNA, 25 bp, Saccharomyces pastorianus
agccatactagccacagttctgaat

SEQ ID NO: 143791 - DNA, 25 bp, Saccharomyces pastorianus
aaatctcaactttgcctccaagaaa

SEQ ID NO: 143792 - DNA, 25 bp, Saccharomyces pastorianus
aactacgacgtggaagtgcattcta

SEQ ID NO: 143793 - DNA, 25 bp, Saccharomyces pastorianus
cagattacccaaacgctccaataaa

SEQ ID NO: 143794 - DNA, 25 bp, Saccharomyces pastorianus
tcagccatctgaagcttagcgatcc

SEQ ID NO: 143795 - DNA, 25 bp, Saccharomyces pastorianus
gattatgtttgaccatcgtctagga

SEQ ID NO: 143796 - DNA, 25 bp, Saccharomyces pastorianus
gccagaagcttgagcatgtcagggt

SEQ ID NO: 143797 - DNA, 25 bp, Saccharomyces pastorianus
agcccgaaaactatttggaattgat

SEQ ID NO: 143798 - DNA, 25 bp, Saccharomyces pastorianus
ttagaactgggtaacaatcatgtaa

SEQ ID NO: 143799 - DNA, 25 bp, Saccharomyces pastorianus
acaaattagaactgggtaacaatca

SEQ ID NO: 143800 - DNA, 25 bp, Saccharomyces pastorianus
tcaaataagcacaaatcaagacatt

SEQ ID NO: 143801 - DNA, 25 bp, Saccharomyces pastorianus
aagcttgagcatgtcagggtcattt

SEQ ID NO: 143802 - DNA, 25 bp, Saccharomyces pastorianus
ggaattgatccaagacactttacaa

SEQ ID NO: 143803 - DNA, 25 bp, Saccharomyces pastorianus
gcccgaaaactatttggaattgatc

SEQ ID NO: 143804 - DNA, 25 bp, Saccharomyces pastorianus
agaagcttgagcatgtcagggtcat

SEQ ID NO: 143805 - DNA, 25 bp, Saccharomyces pastorianus
gaattgatccaagacactttacaaa

SEQ ID NO: 143806 - DNA, 25 bp, Saccharomyces pastorianus
gaagcttgagcatgtcagggtcatt

SEQ ID NO: 143807 - DNA, 25 bp, Saccharomyces pastorianus
gatttccaataatgccggtttaacg

SEQ ID NO: 143808 - DNA, 25 bp, Saccharomyces pastorianus
atgcggtgactttagccagaagctt

SEQ ID NO: 143809 - DNA, 25 bp, Saccharomyces pastorianus
gaagagcttactaagatttccaata

SEQ ID NO: 143810 - DNA, 25 bp, Saccharomyces pastorianus
aaacgcacgggctctgtagttagaa

SEQ ID NO: 143811 - DNA, 25 bp, Saccharomyces pastorianus
taagcgaatatcctcatctgacatc

SEQ ID NO: 143812 - DNA, 25 bp, Saccharomyces pastorianus
taacggactcagatgcggtgacttt

SEQ ID NO: 143813 - DNA, 25 bp, Saccharomyces pastorianus
aaatttgatgacgagcctccccttg

SEQ ID NO: 143814 - DNA, 25 bp, Saccharomyces pastorianus
tccccttgcagacaaaccacaagaa

SEQ ID NO: 143815 - DNA, 25 bp, Saccharomyces pastorianus
gctctgtagttagaaggccttctcg

SEQ ID NO: 143816 - DNA, 25 bp, Saccharomyces pastorianus
gaatagaaaacgcacgggctctgta

SEQ ID NO: 143817 - DNA, 25 bp, Saccharomyces pastorianus
aggccttctcggttgaagacatctt

SEQ ID NO: 143818 - DNA, 25 bp, Saccharomyces pastorianus
ttacgttgaaaagagcgctgaagca

SEQ ID NO: 143819 - DNA, 25 bp, Saccharomyces pastorianus
gaaaagacccagtattccttgtcca

SEQ ID NO: 143820 - DNA, 25 bp, Saccharomyces pastorianus
atggctaagggcaagttcacagaat

SEQ ID NO: 143821 - DNA, 25 bp, Saccharomyces pastorianus
tattaaaacagtctcccaagcagga

SEQ ID NO: 143822 - DNA, 25 bp, Saccharomyces pastorianus
tgaagcagcaatcgcattttaccaa

SEQ ID NO: 143823 - DNA, 25 bp, Saccharomyces pastorianus
acatcccaggtaagattgtagacaa

SEQ ID NO: 143824 - DNA, 25 bp, Saccharomyces pastorianus
gacaagccgctattagacagcatga

SEQ ID NO: 143825 - DNA, 25 bp, Saccharomyces pastorianus
ggcccaaataagacaagccgctatt

SEQ ID NO: 143826 - DNA, 25 bp, Saccharomyces pastorianus
aattcatggtcgacattggtacagg

SEQ ID NO: 143827 - DNA, 25 bp, Saccharomyces pastorianus
gggcaaaaactactggttccagcat

SEQ ID NO: 143828 - DNA, 25 bp, Saccharomyces pastorianus
tccttgtccatcgaggcccaaataa

SEQ ID NO: 143829 - DNA, 25 bp, Saccharomyces pastorianus
ggtatccttactaacaccggacatt

SEQ ID NO: 143830 - DNA, 25 bp, Saccharomyces pastorianus
atgcaagaggctacacagtccggtg

SEQ ID NO: 143831 - DNA, 25 bp, Saccharomyces pastorianus
gccactggccatgtcagaaacactt

SEQ ID NO: 143832 - DNA, 25 bp, Saccharomyces pastorianus
gaatttatggtgaataccctcccac

SEQ ID NO: 143833 - DNA, 25 bp, Saccharomyces pastorianus
ttgattgctggccacgacgaattta

SEQ ID NO: 143834 - DNA, 25 bp, Saccharomyces pastorianus
agaccctttggtgtttcactgttga

SEQ ID NO: 143835 - DNA, 25 bp, Saccharomyces pastorianus
agacgccattcatattgccttacta

SEQ ID NO: 143836 - DNA, 25 bp, Saccharomyces pastorianus
atatcaagtggatccttccggttcc

SEQ ID NO: 143837 - DNA, 25 bp, Saccharomyces pastorianus
agaaaagaagtcgtcctcgccactg

SEQ ID NO: 143838 - DNA, 25 bp, Saccharomyces pastorianus
gtattccaaccgataaaggccctag

SEQ ID NO: 143839 - DNA, 25 bp, Saccharomyces pastorianus
tgagaaccctgacttgctaggctac

SEQ ID NO: 143840 - DNA, 25 bp, Saccharomyces pastorianus
gaagcctgtcgaaaaagtagtgcaa

SEQ ID NO: 143841 - DNA, 25 bp, Saccharomyces pastorianus
atttgaacagccagatatcgatatt

SEQ ID NO: 143842 - DNA, 25 bp, Saccharomyces pastorianus
gttatgcaaggcctcatagatgaaa

SEQ ID NO: 143843 - DNA, 25 bp, Saccharomyces pastorianus
ctttcttgccgcatcatactgatat

SEQ ID NO: 143844 - DNA, 25 bp, Saccharomyces pastorianus
tatgaatgcaaaagccacgtgggaa

SEQ ID NO: 143845 - DNA, 25 bp, Saccharomyces pastorianus
gggtggttcatatagaactgttcca

SEQ ID NO: 143846 - DNA, 25 bp, Saccharomyces pastorianus
tagaactgttccatactggagatgt

SEQ ID NO: 143847 - DNA, 25 bp, Saccharomyces pastorianus
ttaggtcaacacttgctactatgaa

SEQ ID NO: 143848 - DNA, 25 bp, Saccharomyces pastorianus
gaaacgtaaagctgacgtgccatta

SEQ ID NO: 143849 - DNA, 25 bp, Saccharomyces pastorianus
tactatcggcgaaaagcaatcatgg

SEQ ID NO: 143850 - DNA, 25 bp, Saccharomyces pastorianus
gaacaagtagtgaagcctgtcgaaa

SEQ ID NO: 143851 - DNA, 25 bp, Saccharomyces pastorianus
gagctcaatttttaaccgtccatgg

SEQ ID NO: 143852 - DNA, 25 bp, Saccharomyces pastorianus
atggtgctggatgctggagctcaat

SEQ ID NO: 143853 - DNA, 25 bp, Saccharomyces pastorianus
aagatacggtgcaaccttggcgtac

SEQ ID NO: 143854 - DNA, 25 bp, Saccharomyces pastorianus
taggccgttggttgtacagttctgc

SEQ ID NO: 143855 - DNA, 25 bp, Saccharomyces pastorianus
tagacggctctagcgtagataggcc

SEQ ID NO: 143856 - DNA, 25 bp, Saccharomyces pastorianus
gaatgggaccttatacacaatttaa

SEQ ID NO: 143857 - DNA, 25 bp, Saccharomyces pastorianus
gaaaggtcactatgggtcatttttg

SEQ ID NO: 143858 - DNA, 25 bp, Saccharomyces pastorianus
cagagtatctattggcggcagctaa

SEQ ID NO: 143859 - DNA, 25 bp, Saccharomyces pastorianus
tacagttctgcgctaatgacccaga

SEQ ID NO: 143860 - DNA, 25 bp, Saccharomyces pastorianus
tggaacatatcggtgctgacgcagt

SEQ ID NO: 143861 - DNA, 25 bp, Saccharomyces pastorianus
aattggtcttccttagacggctcta

SEQ ID NO: 143862 - DNA, 25 bp, Saccharomyces pastorianus
ctattgtccgactttaaacagcagt

SEQ ID NO: 143863 - DNA, 25 bp, Saccharomyces pastorianus
gtcttacactcaggttttacagtat

SEQ ID NO: 143864 - DNA, 25 bp, Saccharomyces pastorianus
acatactgtacagcgtcagggctat

SEQ ID NO: 143865 - DNA, 25 bp, Saccharomyces pastorianus
tattatcaccgtacgatttcgctga

SEQ ID NO: 143866 - DNA, 25 bp, Saccharomyces pastorianus
gcgtcagggctatggtttgttctat

SEQ ID NO: 143867 - DNA, 25 bp, Saccharomyces pastorianus
tagagtccacacatactgtacagcg

SEQ ID NO: 143868 - DNA, 25 bp, Saccharomyces pastorianus
gagcaacaacttattatcaccgtac

SEQ ID NO: 143869 - DNA, 25 bp, Saccharomyces pastorianus
tggtttgttctattgtccgacttta

SEQ ID NO: 143870 - DNA, 25 bp, Saccharomyces pastorianus
caccgtacgatttcgctgaaaacga

SEQ ID NO: 143871 - DNA, 25 bp, Saccharomyces pastorianus
gtcaagggacaagaaagatcaccaa

SEQ ID NO: 143872 - DNA, 25 bp, Saccharomyces pastorianus
aacagcagtcttacactcaggtttt

SEQ ID NO: 143873 - DNA, 25 bp, Saccharomyces pastorianus
cacaacaggaaacctgctgaaccaa

SEQ ID NO: 143874 - DNA, 25 bp, Saccharomyces pastorianus
ggacgccactgatataaatcgtttg

SEQ ID NO: 143875 - DNA, 25 bp, Saccharomyces pastorianus
aacaggaaacctgctgaaccaacaa

SEQ ID NO: 143876 - DNA, 25 bp, Saccharomyces pastorianus
acccacaacaggaaacctgctgaac

SEQ ID NO: 143877 - DNA, 25 bp, Saccharomyces pastorianus
caggaaacctgctgaaccaacaaaa

SEQ ID NO: 143878 - DNA, 25 bp, Saccharomyces pastorianus
acctaacaatttggacgccactgat

SEQ ID NO: 143879 - DNA, 25 bp, Saccharomyces pastorianus
acaggaaacctgctgaaccaacaaa

SEQ ID NO: 143880 - DNA, 25 bp, Saccharomyces pastorianus
tgaaccaacaaaacctaacaatttg

SEQ ID NO: 143881 - DNA, 25 bp, Saccharomyces pastorianus
gacgccactgatataaatcgtttga

SEQ ID NO: 143882 - DNA, 25 bp, Saccharomyces pastorianus
cctaacaatttggacgccactgata

SEQ ID NO: 143883 - DNA, 25 bp, Saccharomyces pastorianus
acgccactgatataaatcgtttgaa

SEQ ID NO: 143884 - DNA, 25 bp, Saccharomyces pastorianus
ggaaggctctttcaattttggcaga

SEQ ID NO: 143885 - DNA, 25 bp, Saccharomyces pastorianus
taagttacctttgtacgctttggag

SEQ ID NO: 143886 - DNA, 25 bp, Saccharomyces pastorianus
atgcctttgcccgttggtgttatag

SEQ ID NO: 143887 - DNA, 25 bp, Saccharomyces pastorianus
ggcagaagctcctgtattagcatct

SEQ ID NO: 143888 - DNA, 25 bp, Saccharomyces pastorianus
ttagcatctgatcgtttaccatata

SEQ ID NO: 143889 - DNA, 25 bp, Saccharomyces pastorianus
gttataggttacatgcctttgcccg

SEQ ID NO: 143890 - DNA, 25 bp, Saccharomyces pastorianus
tgacaagaggcccagtagtccgttt

SEQ ID NO: 143891 - DNA, 25 bp, Saccharomyces pastorianus
gactacgaccgcgtatttggcgctt

SEQ ID NO: 143892 - DNA, 25 bp, Saccharomyces pastorianus
ataggccccttggttatcgatggta

SEQ ID NO: 143893 - DNA, 25 bp, Saccharomyces pastorianus
tcgctgccttggttattcacggtaa

SEQ ID NO: 143894 - DNA, 25 bp, Saccharomyces pastorianus
gagggttgtttggtagcttctgcca

SEQ ID NO: 143895 - DNA, 25 bp, Saccharomyces pastorianus
gaaggcggcatagtaatcgaagacc

SEQ ID NO: 143896 - DNA, 25 bp, Saccharomyces pastorianus
gccaggtattcctgccaattccgaa

SEQ ID NO: 143897 - DNA, 25 bp, Saccharomyces pastorianus
ggacattggtgttgccggtatgtct

SEQ ID NO: 143898 - DNA, 25 bp, Saccharomyces pastorianus
ttgcattcaaacttggccgtggtga

SEQ ID NO: 143899 - DNA, 25 bp, Saccharomyces pastorianus
tggtggcgaacgtagaatcatcatt

SEQ ID NO: 143900 - DNA, 25 bp, Saccharomyces pastorianus
gtactatcggtgatggcccacaggc

SEQ ID NO: 143901 - DNA, 25 bp, Saccharomyces pastorianus
agcaccatatgcctacgggaagcaa

SEQ ID NO: 143902 - DNA, 25 bp, Saccharomyces pastorianus
cagcggtaaaccatttgcattcaaa

SEQ ID NO: 143903 - DNA, 25 bp, Saccharomyces pastorianus
cgggaagcaagctctgccaggtatt

SEQ ID NO: 143904 - DNA, 25 bp, Saccharomyces pastorianus
agttttcgacaagaacaccagcggt

SEQ ID NO: 143905 - DNA, 25 bp, Saccharomyces pastorianus
gaatcatcattccagcaccatatgc

SEQ ID NO: 143906 - DNA, 25 bp, Saccharomyces pastorianus
cgatgagttccaagaatccgtcctt

SEQ ID NO: 143907 - DNA, 25 bp, Saccharomyces pastorianus
ggttccagcaatcgacgtcacgatg

SEQ ID NO: 143908 - DNA, 25 bp, Saccharomyces pastorianus
tctccttgagcggtaactatgttaa

SEQ ID NO: 143909 - DNA, 25 bp, Saccharomyces pastorianus
tgaatgttgaaccttataccccggt

SEQ ID NO: 143910 - DNA, 25 bp, Saccharomyces pastorianus
tgcccatcaccgttcgtattactat

SEQ ID NO: 143911 - DNA, 25 bp, Saccharomyces pastorianus
attactatggctgctttgaacccgg

SEQ ID NO: 143912 - DNA, 25 bp, Saccharomyces pastorianus
ggacttgaccattactccagaagaa

SEQ ID NO: 143913 - DNA, 25 bp, Saccharomyces pastorianus
tgaagactacgacttgaccccagat

SEQ ID NO: 143914 - DNA, 25 bp, Saccharomyces pastorianus
ggaagcccaataccaacaatctttg

SEQ ID NO: 143915 - DNA, 25 bp, Saccharomyces pastorianus
gtccttttgactttatctccggaag

SEQ ID NO: 143916 - DNA, 25 bp, Saccharomyces pastorianus
tttgaacccggaagccatcgatgaa

SEQ ID NO: 143917 - DNA, 25 bp, Saccharomyces pastorianus
gtgcttcgtggattttcacactact

SEQ ID NO: 143918 - DNA, 25 bp, Saccharomyces pastorianus
atggctcttatcaccatcatgggac

SEQ ID NO: 143919 - DNA, 25 bp, Saccharomyces pastorianus
ggcaatctgctcatttttggtctac

SEQ ID NO: 143920 - DNA, 25 bp, Saccharomyces pastorianus
acaaggcacatcttccggaattcaa

SEQ ID NO: 143921 - DNA, 25 bp, Saccharomyces pastorianus
gccgggcatcttcttcaaatacaat

SEQ ID NO: 143922 - DNA, 25 bp, Saccharomyces pastorianus
tgttgtgcccactcttttcaagaaa

SEQ ID NO: 143923 - DNA, 25 bp, Saccharomyces pastorianus
taagtggtccttgcgttatcagcca

SEQ ID NO: 143924 - DNA, 25 bp, Saccharomyces pastorianus
taacccattggataacactgcacag

SEQ ID NO: 143925 - DNA, 25 bp, Saccharomyces pastorianus
ggtgccatgtatttgggtccattcc

SEQ ID NO: 143926 - DNA, 25 bp, Saccharomyces pastorianus
ttcacactactggatatggctctta

SEQ ID NO: 143927 - DNA, 25 bp, Saccharomyces pastorianus
gatgaacctttaactacttacgtct

SEQ ID NO: 143928 - DNA, 25 bp, Saccharomyces pastorianus
gaagaagaaggtcgttgacccattt

SEQ ID NO: 143929 - DNA, 25 bp, Saccharomyces pastorianus
aatggttcgatattaaagccccatc

SEQ ID NO: 143930 - DNA, 25 bp, Saccharomyces pastorianus
ggaatggttcgatattaaagcccca

SEQ ID NO: 143931 - DNA, 25 bp, Saccharomyces pastorianus
tattaaagccccatccacttttgaa

SEQ ID NO: 143932 - DNA, 25 bp, Saccharomyces pastorianus
gagactatccagaggtaagaagggt

SEQ ID NO: 143933 - DNA, 25 bp, Saccharomyces pastorianus
tatccagaggtaagaagggtttgaa

SEQ ID NO: 143934 - DNA, 25 bp, Saccharomyces pastorianus
tgaagaagaaggtcgttgacccatt

SEQ ID NO: 143935 - DNA, 25 bp, Saccharomyces pastorianus
ggtcgttgacccatttaccagaaag

SEQ ID NO: 143936 - DNA, 25 bp, Saccharomyces pastorianus
tggctgttggtaagaataagagact

SEQ ID NO: 143937 - DNA, 25 bp, Saccharomyces pastorianus
ctatccagaggtaagaagggtttga

SEQ ID NO: 143938 - DNA, 25 bp, Saccharomyces pastorianus
gactatccagaggtaagaagggttt

SEQ ID NO: 143939 - DNA, 25 bp, Saccharomyces pastorianus
aatctcagggtcagacacttccaaa

SEQ ID NO: 143940 - DNA, 25 bp, Saccharomyces pastorianus
gaaggctacctctcgtgagattcaa

SEQ ID NO: 143941 - DNA, 25 bp, Saccharomyces pastorianus
tatcttactttatcttcagccgaaa

SEQ ID NO: 143942 - DNA, 25 bp, Saccharomyces pastorianus
aagccactggtatcaagggttcaat

SEQ ID NO: 143943 - DNA, 25 bp, Saccharomyces pastorianus
agggttcaattaccgctaatgcttg

SEQ ID NO: 143944 - DNA, 25 bp, Saccharomyces pastorianus
aagttcattcattggtttccgacga

SEQ ID NO: 143945 - DNA, 25 bp, Saccharomyces pastorianus
ggaagttagactacgcaccaggccc

SEQ ID NO: 143946 - DNA, 25 bp, Saccharomyces pastorianus
catatcagcgaccacacaatctaat

SEQ ID NO: 143947 - DNA, 25 bp, Saccharomyces pastorianus
gttgccctttctagagctgtttcaa

SEQ ID NO: 143948 - DNA, 25 bp, Saccharomyces pastorianus
gtcactatccattcacaaatctcag

SEQ ID NO: 143949 - DNA, 25 bp, Saccharomyces pastorianus
aagtcaaattctccagcacccatat

SEQ ID NO: 143950 - DNA, 25 bp, Saccharomyces pastorianus
gaagacctagatttgctctctgatt

SEQ ID NO: 143951 - DNA, 25 bp, Saccharomyces pastorianus
gagtagtcgtggtttcaggtctaat

SEQ ID NO: 143952 - DNA, 25 bp, Saccharomyces pastorianus
tcatattataccaagaagaccattt

SEQ ID NO: 143953 - DNA, 25 bp, Saccharomyces pastorianus
gtatcgcacgccaaactatcgtttt

SEQ ID NO: 143954 - DNA, 25 bp, Saccharomyces pastorianus
ttttactcaaaaacgtatcgcacgc

SEQ ID NO: 143955 - DNA, 25 bp, Saccharomyces pastorianus
ggaagaacctgattgcatacagtta

SEQ ID NO: 143956 - DNA, 25 bp, Saccharomyces pastorianus
ctatcgttttctatgagtagtcgtg

SEQ ID NO: 143957 - DNA, 25 bp, Saccharomyces pastorianus
agcacaattgaagcatccttccata

SEQ ID NO: 143958 - DNA, 25 bp, Saccharomyces pastorianus
gtggtttcaggtctaataactttat

SEQ ID NO: 143959 - DNA, 25 bp, Saccharomyces pastorianus
gatttgctctctgattcggatgatt

SEQ ID NO: 143960 - DNA, 25 bp, Saccharomyces pastorianus
gaagaccatttatctgtagtttcaa

SEQ ID NO: 143961 - DNA, 25 bp, Saccharomyces pastorianus
tcgttatttctctgagtcagacagt

SEQ ID NO: 143962 - DNA, 25 bp, Saccharomyces pastorianus
ttctctgagtcagacagtgtcttgg

SEQ ID NO: 143963 - DNA, 25 bp, Saccharomyces pastorianus
gtcaccaggtgaatacttctacaag

SEQ ID NO: 143964 - DNA, 25 bp, Saccharomyces pastorianus
gaccggtaacaagggtaatgcctct

SEQ ID NO: 143965 - DNA, 25 bp, Saccharomyces pastorianus
tcctccaccgtcatgatgggtggta

SEQ ID NO: 143966 - DNA, 25 bp, Saccharomyces pastorianus
atcaccaaggctttggcccttggtt

SEQ ID NO: 143967 - DNA, 25 bp, Saccharomyces pastorianus
agggtaatgcctctacctctcgtta

SEQ ID NO: 143968 - DNA, 25 bp, Saccharomyces pastorianus
ttccatcaagaagtttatcccatat

SEQ ID NO: 143969 - DNA, 25 bp, Saccharomyces pastorianus
gggctgtcgtagacaaaggttccat

SEQ ID NO: 143970 - DNA, 25 bp, Saccharomyces pastorianus
agctgtctacaacgtttgtcaattt

SEQ ID NO: 143971 - DNA, 25 bp, Saccharomyces pastorianus
ttggttcctccaccgtcatgatggg

SEQ ID NO: 143972 - DNA, 25 bp, Saccharomyces pastorianus
aatttcccatcttctgctgtcagtt

SEQ ID NO: 143973 - DNA, 25 bp, Saccharomyces pastorianus
gctgatatggctatttatatggctt

SEQ ID NO: 143974 - DNA, 25 bp, Saccharomyces pastorianus
gaccaagaaaatcactttgaacact

SEQ ID NO: 143975 - DNA, 25 bp, Saccharomyces pastorianus
aatttctccaaccaccactgttggt

SEQ ID NO: 143976 - DNA, 25 bp, Saccharomyces pastorianus
attgatggactccacaactagaggt

SEQ ID NO: 143977 - DNA, 25 bp, Saccharomyces pastorianus
gattttttggtcttaccaggcttgg

SEQ ID NO: 143978 - DNA, 25 bp, Saccharomyces pastorianus
aaggacggtctttctgtccaggaat

SEQ ID NO: 143979 - DNA, 25 bp, Saccharomyces pastorianus
aaggctttagaacatttgaagacat

SEQ ID NO: 143980 - DNA, 25 bp, Saccharomyces pastorianus
accaggcttggtcaatttcccatct

SEQ ID NO: 143981 - DNA, 25 bp, Saccharomyces pastorianus
tccaatagtaatttctccaaccacc

SEQ ID NO: 143982 - DNA, 25 bp, Saccharomyces pastorianus
gaagacatacagttccaaggacggt

SEQ ID NO: 143983 - DNA, 25 bp, Saccharomyces pastorianus
ttttttcacgaaaattctctctcta

SEQ ID NO: 143984 - DNA, 25 bp, Saccharomyces pastorianus
gcattctgcccatttttttcacgaa

SEQ ID NO: 143985 - DNA, 25 bp, Saccharomyces pastorianus
ttctgcccatttttttcacgaaaat

SEQ ID NO: 143986 - DNA, 25 bp, Saccharomyces pastorianus
tggcattctgcccatttttttcacg

SEQ ID NO: 143987 - DNA, 25 bp, Saccharomyces pastorianus
ggcattctgcccatttttttcacga

SEQ ID NO: 143988 - DNA, 25 bp, Saccharomyces pastorianus
ttttcacgaaaattctctctctata

SEQ ID NO: 143989 - DNA, 25 bp, Saccharomyces pastorianus
tttttcacgaaaattctctctctat

SEQ ID NO: 143990 - DNA, 25 bp, Saccharomyces pastorianus
cattctgcccatttttttcacgaaa

SEQ ID NO: 143991 - DNA, 25 bp, Saccharomyces pastorianus
tctgcccatttttttcacgaaaatt

SEQ ID NO: 143992 - DNA, 25 bp, Saccharomyces pastorianus
tgcccatttttttcacgaaaattct

SEQ ID NO: 143993 - DNA, 25 bp, Saccharomyces pastorianus
catttttttcacgaaaattctctct

SEQ ID NO: 143994 - DNA, 25 bp, Saccharomyces pastorianus
agtcgtgcattgctaacatgtggca

SEQ ID NO: 143995 - DNA, 25 bp, Saccharomyces pastorianus
gcattgctaacatgtggcattctgc

SEQ ID NO: 143996 - DNA, 25 bp, Saccharomyces pastorianus
cgtgcattgctaacatgtggcattc

SEQ ID NO: 143997 - DNA, 25 bp, Saccharomyces pastorianus
aagtcgtgcattgctaacatgtggc

SEQ ID NO: 143998 - DNA, 25 bp, Saccharomyces pastorianus
tgcattgctaacatgtggcattctg

SEQ ID NO: 143999 - DNA, 25 bp, Saccharomyces pastorianus
cattgctaacatgtggcattctgcc

SEQ ID NO: 144000 - DNA, 25 bp, Saccharomyces pastorianus
gtgcattgctaacatgtggcattct

SEQ ID NO: 144001 - DNA, 25 bp, Saccharomyces pastorianus
gtcgtgcattgctaacatgtggcat

SEQ ID NO: 144002 - DNA, 25 bp, Saccharomyces pastorianus
tcgtgcattgctaacatgtggcatt

SEQ ID NO: 144003 - DNA, 25 bp, Saccharomyces pastorianus
attgctaacatgtggcattctgccc

SEQ ID NO: 144004 - DNA, 25 bp, Saccharomyces pastorianus
tcaagtcgtgcattgctaacatgtg

SEQ ID NO: 144005 - DNA, 25 bp, Saccharomyces pastorianus
ggcaatgttccagtgtcatgcagtt

SEQ ID NO: 144006 - DNA, 25 bp, Saccharomyces pastorianus
gacaacaagctcctttagacccggg

SEQ ID NO: 144007 - DNA, 25 bp, Saccharomyces pastorianus
aatctggtcctttactacagtggaa

SEQ ID NO: 144008 - DNA, 25 bp, Saccharomyces pastorianus
gaactagagcaaacgacttcccgct

SEQ ID NO: 144009 - DNA, 25 bp, Saccharomyces pastorianus
gacttcccgctagctaatggacaac

SEQ ID NO: 144010 - DNA, 25 bp, Saccharomyces pastorianus
gtaccggatcatcttttattccaag

SEQ ID NO: 144011 - DNA, 25 bp, Saccharomyces pastorianus
gtatcaatctatctctgacttccac

SEQ ID NO: 144012 - DNA, 25 bp, Saccharomyces pastorianus
ggtcattgatattcacggtaccaag

SEQ ID NO: 144013 - DNA, 25 bp, Saccharomyces pastorianus
ccaccttgatggatgctctgatatt

SEQ ID NO: 144014 - DNA, 25 bp, Saccharomyces pastorianus
gggccagcgagtcccaaagacagta

SEQ ID NO: 144015 - DNA, 25 bp, Saccharomyces pastorianus
gatttcgaaggctttcccaccttga

SEQ ID NO: 144016 - DNA, 25 bp, Saccharomyces pastorianus
attgagtaatgccactgcttttccc

SEQ ID NO: 144017 - DNA, 25 bp, Saccharomyces pastorianus
aattgagacttctattgccaccatc

SEQ ID NO: 144018 - DNA, 25 bp, Saccharomyces pastorianus
aagagtcggattcgtcggtctcaac

SEQ ID NO: 144019 - DNA, 25 bp, Saccharomyces pastorianus
tgccaccatccagcgtctaaaattg

SEQ ID NO: 144020 - DNA, 25 bp, Saccharomyces pastorianus
gtgcctaatgcagctcccataagag

SEQ ID NO: 144021 - DNA, 25 bp, Saccharomyces pastorianus
tgggcaatcaagacacattaccccg

SEQ ID NO: 144022 - DNA, 25 bp, Saccharomyces pastorianus
actgcttttcccactttagagtcat

SEQ ID NO: 144023 - DNA, 25 bp, Saccharomyces pastorianus
atgacgttgttatgcctctcttgga

SEQ ID NO: 144024 - DNA, 25 bp, Saccharomyces pastorianus
atccaagtggccagtcattatgacg

SEQ ID NO: 144025 - DNA, 25 bp, Saccharomyces pastorianus
agatctttggtctcaaccgtgccta

SEQ ID NO: 144026 - DNA, 25 bp, Saccharomyces pastorianus
tcggtctcaacgcagccaaaggatg

SEQ ID NO: 144027 - DNA, 25 bp, Saccharomyces pastorianus
atcctggacagcctttcaaattctg

SEQ ID NO: 144028 - DNA, 25 bp, Saccharomyces pastorianus
atcaagtacccgctagacgtcatca

SEQ ID NO: 144029 - DNA, 25 bp, Saccharomyces pastorianus
atgggcttacaaggaaccgtgggat

SEQ ID NO: 144030 - DNA, 25 bp, Saccharomyces pastorianus
gtgggatgctttatccccttattat

SEQ ID NO: 144031 - DNA, 25 bp, Saccharomyces pastorianus
atcatgatcccagcgaattatctaa

SEQ ID NO: 144032 - DNA, 25 bp, Saccharomyces pastorianus
gctattatgcccctgtacgtaaagt

SEQ ID NO: 144033 - DNA, 25 bp, Saccharomyces pastorianus
aaatttcctgagactttccttgaat

SEQ ID NO: 144034 - DNA, 25 bp, Saccharomyces pastorianus
agacgtcatcactttacagcagaaa

SEQ ID NO: 144035 - DNA, 25 bp, Saccharomyces pastorianus
tcaactactgaaccacttctttgtt

SEQ ID NO: 144036 - DNA, 25 bp, Saccharomyces pastorianus
tgagggttcctgttccattttaggt

SEQ ID NO: 144037 - DNA, 25 bp, Saccharomyces pastorianus
atcatcactgatttccatatcctgg

SEQ ID NO: 144038 - DNA, 25 bp, Saccharomyces pastorianus
tattgtatgtgccacgtcctcgaaa

SEQ ID NO: 144039 - DNA, 25 bp, Saccharomyces pastorianus
gaagcaacgcgttcggctttcaagc

SEQ ID NO: 144040 - DNA, 25 bp, Saccharomyces pastorianus
aatgccctctaaagttgcgattgta

SEQ ID NO: 144041 - DNA, 25 bp, Saccharomyces pastorianus
gccaccagcgggaattcgtattgta

SEQ ID NO: 144042 - DNA, 25 bp, Saccharomyces pastorianus
atgggctcacactctattatccaag

SEQ ID NO: 144043 - DNA, 25 bp, Saccharomyces pastorianus
taataagctgacttgggtgccacca

SEQ ID NO: 144044 - DNA, 25 bp, Saccharomyces pastorianus
gatcctgcaacaaccggcgataaca

SEQ ID NO: 144045 - DNA, 25 bp, Saccharomyces pastorianus
tattatccaagtatgcaccgcagaa

SEQ ID NO: 144046 - DNA, 25 bp, Saccharomyces pastorianus
gaactaagacatatcgtaccgactg

SEQ ID NO: 144047 - DNA, 25 bp, Saccharomyces pastorianus
tttcaagctctctcaggacacaaca

SEQ ID NO: 144048 - DNA, 25 bp, Saccharomyces pastorianus
ttatggctaatacccgatcctgcaa

SEQ ID NO: 144049 - DNA, 25 bp, Saccharomyces pastorianus
gctactcggatgtagaaacgtacga

SEQ ID NO: 144050 - DNA, 25 bp, Saccharomyces pastorianus
gaagggaccatatgtggtgacaaca

SEQ ID NO: 144051 - DNA, 25 bp, Saccharomyces pastorianus
gtacgaaagagtatatacgcccata

SEQ ID NO: 144052 - DNA, 25 bp, Saccharomyces pastorianus
gaaagcacaataccgagttactact

SEQ ID NO: 144053 - DNA, 25 bp, Saccharomyces pastorianus
atatgtggtgacaacaaaacgcaaa

SEQ ID NO: 144054 - DNA, 25 bp, Saccharomyces pastorianus
ttatggcgacgaaagcacaataccg

SEQ ID NO: 144055 - DNA, 25 bp, Saccharomyces pastorianus
gtatatacgcccataaaggcatatt

SEQ ID NO: 144056 - DNA, 25 bp, Saccharomyces pastorianus
atgatagtcctgattatggcgacga

SEQ ID NO: 144057 - DNA, 25 bp, Saccharomyces pastorianus
ggcgacgaaagcacaataccgagtt

SEQ ID NO: 144058 - DNA, 25 bp, Saccharomyces pastorianus
gagttactactgctactcggatgta

SEQ ID NO: 144059 - DNA, 25 bp, Saccharomyces pastorianus
aaaattcgattatgatagtcctgat

SEQ ID NO: 144060 - DNA, 25 bp, Saccharomyces pastorianus
gaatgagaccagtagcggaacccat

SEQ ID NO: 144061 - DNA, 25 bp, Saccharomyces pastorianus
tttactgacagtttcgaatgagacc

SEQ ID NO: 144062 - DNA, 25 bp, Saccharomyces pastorianus
atgtttgaggctattgttcggtgac

SEQ ID NO: 144063 - DNA, 25 bp, Saccharomyces pastorianus
gtccttcatgttgttctcgtttatc

SEQ ID NO: 144064 - DNA, 25 bp, Saccharomyces pastorianus
atcaacggattaactttgtggtcag

SEQ ID NO: 144065 - DNA, 25 bp, Saccharomyces pastorianus
gcggaacccatagtactcaaagcct

SEQ ID NO: 144066 - DNA, 25 bp, Saccharomyces pastorianus
gaaagtgtgatcttgtccttcatgt

SEQ ID NO: 144067 - DNA, 25 bp, Saccharomyces pastorianus
gttcggtgactctccaaggcaaata

SEQ ID NO: 144068 - DNA, 25 bp, Saccharomyces pastorianus
acgtccgagatttttgtctagtaca

SEQ ID NO: 144069 - DNA, 25 bp, Saccharomyces pastorianus
tattcatcattttcatacgtccgag

SEQ ID NO: 144070 - DNA, 25 bp, Saccharomyces pastorianus
gcggatgcatattatgctcctcatt

SEQ ID NO: 144071 - DNA, 25 bp, Saccharomyces pastorianus
gaaaacgcgtatttgagcatagttc

SEQ ID NO: 144072 - DNA, 25 bp, Saccharomyces pastorianus
ggcaagaattgaagaactcgttact

SEQ ID NO: 144073 - DNA, 25 bp, Saccharomyces pastorianus
ggataggtccgatggaacccaatga

SEQ ID NO: 144074 - DNA, 25 bp, Saccharomyces pastorianus
gaacttaactgaaattcgaggtgaa

SEQ ID NO: 144075 - DNA, 25 bp, Saccharomyces pastorianus
aattgcgtgacatctttctttctga

SEQ ID NO: 144076 - DNA, 25 bp, Saccharomyces pastorianus
acatctttctttctgatattgtcga

SEQ ID NO: 144077 - DNA, 25 bp, Saccharomyces pastorianus
gagcatagttcaattgcgtgacatc

SEQ ID NO: 144078 - DNA, 25 bp, Saccharomyces pastorianus
gaactcgttactcaaaccatggaaa

SEQ ID NO: 144079 - DNA, 25 bp, Saccharomyces pastorianus
gtccgatccgaaagaaaacgcgtat

SEQ ID NO: 144080 - DNA, 25 bp, Saccharomyces pastorianus
gattaaatcaatgtccgatccgaaa

SEQ ID NO: 144081 - DNA, 25 bp, Saccharomyces pastorianus
ggccaatatggctaatgtttttact

SEQ ID NO: 144082 - DNA, 25 bp, Saccharomyces pastorianus
gtatgacggaagatgccctctatca

SEQ ID NO: 144083 - DNA, 25 bp, Saccharomyces pastorianus
gaagtaccatcccatcgagttagtg

SEQ ID NO: 144084 - DNA, 25 bp, Saccharomyces pastorianus
gtggcaattccttcgagtttattca

SEQ ID NO: 144085 - DNA, 25 bp, Saccharomyces pastorianus
ttgttattcctctcttatttggcct

SEQ ID NO: 144086 - DNA, 25 bp, Saccharomyces pastorianus
agaccgaaatgtatcccttgtccac

SEQ ID NO: 144087 - DNA, 25 bp, Saccharomyces pastorianus
gaggacctgtggatccaagttatca

SEQ ID NO: 144088 - DNA, 25 bp, Saccharomyces pastorianus
gagctccttggattcgcgacgatga

SEQ ID NO: 144089 - DNA, 25 bp, Saccharomyces pastorianus
atttgttgcaggactacagaccgaa

SEQ ID NO: 144090 - DNA, 25 bp, Saccharomyces pastorianus
agactgctcataggttactgtgggc

SEQ ID NO: 144091 - DNA, 25 bp, Saccharomyces pastorianus
tgagcaaatcattactggcgctatt

SEQ ID NO: 144092 - DNA, 25 bp, Saccharomyces pastorianus
gttagcaccatctagacttgacttt

SEQ ID NO: 144093 - DNA, 25 bp, Saccharomyces pastorianus
gaccttctcgatgattctcttatgt

SEQ ID NO: 144094 - DNA, 25 bp, Saccharomyces pastorianus
gtccaagcatgttccagcgagtgtg

SEQ ID NO: 144095 - DNA, 25 bp, Saccharomyces pastorianus
agaaggatcccgttgtagctaagca

SEQ ID NO: 144096 - DNA, 25 bp, Saccharomyces pastorianus
ggcacaccgttgatcagactacgtc

SEQ ID NO: 144097 - DNA, 25 bp, Saccharomyces pastorianus
agccgttccgcaacaaagatcgaca

SEQ ID NO: 144098 - DNA, 25 bp, Saccharomyces pastorianus
aggcacaatccattaggcacaccgt

SEQ ID NO: 144099 - DNA, 25 bp, Saccharomyces pastorianus
ggctgggaatcaagtaccgcgtgaa

SEQ ID NO: 144100 - DNA, 25 bp, Saccharomyces pastorianus
agctaaggctgcaacttccgtacaa

SEQ ID NO: 144101 - DNA, 25 bp, Saccharomyces pastorianus
aaacgatgaccaccgcgagggattc

SEQ ID NO: 144102 - DNA, 25 bp, Saccharomyces pastorianus
taaaacgaacgctacagcttttccg

SEQ ID NO: 144103 - DNA, 25 bp, Saccharomyces pastorianus
gaaatggtgcagtgccagccgttcc

SEQ ID NO: 144104 - DNA, 25 bp, Saccharomyces pastorianus
tgagaagctggttccattgcccata

SEQ ID NO: 144105 - DNA, 25 bp, Saccharomyces pastorianus
tgttctttatcagctgtccactagt

SEQ ID NO: 144106 - DNA, 25 bp, Saccharomyces pastorianus
ggatccggaatcgatggcatacact

SEQ ID NO: 144107 - DNA, 25 bp, Saccharomyces pastorianus
gaggtccatctgtgcactgggtgaa

SEQ ID NO: 144108 - DNA, 25 bp, Saccharomyces pastorianus
actaccgacatgatcagtgttcttt

SEQ ID NO: 144109 - DNA, 25 bp, Saccharomyces pastorianus
acaatgttgctctgaacgacgtata

SEQ ID NO: 144110 - DNA, 25 bp, Saccharomyces pastorianus
ttatgactgctatgcgtctgatgtt

SEQ ID NO: 144111 - DNA, 25 bp, Saccharomyces pastorianus
gcactgacaggactgctgatccgat

SEQ ID NO: 144112 - DNA, 25 bp, Saccharomyces pastorianus
aaggcggtatcattgcatccgttgg

SEQ ID NO: 144113 - DNA, 25 bp, Saccharomyces pastorianus
gcagacgtggccaagttagcgaact

SEQ ID NO: 144114 - DNA, 25 bp, Saccharomyces pastorianus
tataatgtcgtttatcttcccttcc

SEQ ID NO: 144115 - DNA, 25 bp, Saccharomyces pastorianus
gtttcttgtataccagggagtctat

SEQ ID NO: 144116 - DNA, 25 bp, Saccharomyces pastorianus
ttatttggctagtcgttcccacgat

SEQ ID NO: 144117 - DNA, 25 bp, Saccharomyces pastorianus
gagtctatagcatgggcagcatcct

SEQ ID NO: 144118 - DNA, 25 bp, Saccharomyces pastorianus
acgaatggcgtgctagctgtcacaa

SEQ ID NO: 144119 - DNA, 25 bp, Saccharomyces pastorianus
aggccccacaagactacgtattaga

SEQ ID NO: 144120 - DNA, 25 bp, Saccharomyces pastorianus
acttactttcattctaggccaattg

SEQ ID NO: 144121 - DNA, 25 bp, Saccharomyces pastorianus
gcagcatccttttatcattcgtact

SEQ ID NO: 144122 - DNA, 25 bp, Saccharomyces pastorianus
aacctagtttcccttttgatcattg

SEQ ID NO: 144123 - DNA, 25 bp, Saccharomyces pastorianus
cattcgtactgggtgtggttttcgg

SEQ ID NO: 144124 - DNA, 25 bp, Saccharomyces pastorianus
ttgggttcgctaattcacttacttt

SEQ ID NO: 144125 - DNA, 25 bp, Saccharomyces pastorianus
atatgtccataggttgtctgcacaa

SEQ ID NO: 144126 - DNA, 25 bp, Saccharomyces pastorianus
tctgccatgtaactggactccaggt

SEQ ID NO: 144127 - DNA, 25 bp, Saccharomyces pastorianus
tgtctgccatgtaactggactccag

SEQ ID NO: 144128 - DNA, 25 bp, Saccharomyces pastorianus
atgtaactggactccaggtgctgct

SEQ ID NO: 144129 - DNA, 25 bp, Saccharomyces pastorianus
taactggactccaggtgctgctacc

SEQ ID NO: 144130 - DNA, 25 bp, Saccharomyces pastorianus
aagaacggtactgtctgccatgtaa

SEQ ID NO: 144131 - DNA, 25 bp, Saccharomyces pastorianus
gaacggtactgtctgccatgtaact

SEQ ID NO: 144132 - DNA, 25 bp, Saccharomyces pastorianus
acaagaacggtactgtctgccatgt

SEQ ID NO: 144133 - DNA, 25 bp, Saccharomyces pastorianus
gaccgacaagaacggtactgtctgc

SEQ ID NO: 144134 - DNA, 25 bp, Saccharomyces pastorianus
tactgtctgccatgtaactggactc

SEQ ID NO: 144135 - DNA, 25 bp, Saccharomyces pastorianus
ggtactgtctgccatgtaactggac

SEQ ID NO: 144136 - DNA, 25 bp, Saccharomyces pastorianus
acggtactgtctgccatgtaactgg

SEQ ID NO: 144137 - DNA, 25 bp, Saccharomyces pastorianus
ttgttcatcatcgacccaaagggtg

SEQ ID NO: 144138 - DNA, 25 bp, Saccharomyces pastorianus
aacaaggcgctcaagttcttttcgc

SEQ ID NO: 144139 - DNA, 25 bp, Saccharomyces pastorianus
taacgatttgccagtcggtagaaac

SEQ ID NO: 144140 - DNA, 25 bp, Saccharomyces pastorianus
gtctgtccaaccgaaatcattgctt

SEQ ID NO: 144141 - DNA, 25 bp, Saccharomyces pastorianus
gaaacgttgacgaagccttgagatt

SEQ ID NO: 144142 - DNA, 25 bp, Saccharomyces pastorianus
aaggaatacttcgaagctgccaaca

SEQ ID NO: 144143 - DNA, 25 bp, Saccharomyces pastorianus
tttgggcccaatcaacattccattg

SEQ ID NO: 144144 - DNA, 25 bp, Saccharomyces pastorianus
gttgaagccttccaatggaccgaca

SEQ ID NO: 144145 - DNA, 25 bp, Saccharomyces pastorianus
gtaagtacgttgtcctagcctttat

SEQ ID NO: 144146 - DNA, 25 bp, Saccharomyces pastorianus
acattccattgttggctgacaccaa

SEQ ID NO: 144147 - DNA, 25 bp, Saccharomyces pastorianus
gtcgccttgagaggtttgttcatca

SEQ ID NO: 144148 - DNA, 25 bp, Saccharomyces pastorianus
actcattacaagatcccagcctggt

SEQ ID NO: 144149 - DNA, 25 bp, Saccharomyces pastorianus
ctcattacaagatcccagcctggtt

SEQ ID NO: 144150 - DNA, 25 bp, Saccharomyces pastorianus
gatcccagcctggttcttaaaccgt

SEQ ID NO: 144151 - DNA, 25 bp, Saccharomyces pastorianus
tacaagatcccagcctggttcttaa

SEQ ID NO: 144152 - DNA, 25 bp, Saccharomyces pastorianus
tcattacaagatcccagcctggttc

SEQ ID NO: 144153 - DNA, 25 bp, Saccharomyces pastorianus
attacaagatcccagcctggttctt

SEQ ID NO: 144154 - DNA, 25 bp, Saccharomyces pastorianus
agatcccagcctggttcttaaaccg

SEQ ID NO: 144155 - DNA, 25 bp, Saccharomyces pastorianus
ttacaagatcccagcctggttctta

SEQ ID NO: 144156 - DNA, 25 bp, Saccharomyces pastorianus
aactcattacaagatcccagcctgg

SEQ ID NO: 144157 - DNA, 25 bp, Saccharomyces pastorianus
caactcattacaagatcccagcctg

SEQ ID NO: 144158 - DNA, 25 bp, Saccharomyces pastorianus
caagatcccagcctggttcttaaac

SEQ ID NO: 144159 - DNA, 25 bp, Saccharomyces pastorianus
actcattacaagatcccagcctggt

SEQ ID NO: 144160 - DNA, 25 bp, Saccharomyces pastorianus
ctcattacaagatcccagcctggtt

SEQ ID NO: 144161 - DNA, 25 bp, Saccharomyces pastorianus
gagcccaccgtggtattagacactt

SEQ ID NO: 144162 - DNA, 25 bp, Saccharomyces pastorianus
gatcccagcctggttcttaaaccgt

SEQ ID NO: 144163 - DNA, 25 bp, Saccharomyces pastorianus
tacaagatcccagcctggttcttaa

SEQ ID NO: 144164 - DNA, 25 bp, Saccharomyces pastorianus
tcattacaagatcccagcctggttc

SEQ ID NO: 144165 - DNA, 25 bp, Saccharomyces pastorianus
attacaagatcccagcctggttctt

SEQ ID NO: 144166 - DNA, 25 bp, Saccharomyces pastorianus
agatcccagcctggttcttaaaccg

SEQ ID NO: 144167 - DNA, 25 bp, Saccharomyces pastorianus
caagatcccagcctggttcttaaac

SEQ ID NO: 144168 - DNA, 25 bp, Saccharomyces pastorianus
aactcattacaagatcccagcctgg

SEQ ID NO: 144169 - DNA, 25 bp, Saccharomyces pastorianus
ttacaagatcccagcctggttctta

SEQ ID NO: 144170 - DNA, 25 bp, Saccharomyces pastorianus
aatgacatactaagagcgcaagctg

SEQ ID NO: 144171 - DNA, 25 bp, Saccharomyces pastorianus
gggctgataaagagttctgatccat

SEQ ID NO: 144172 - DNA, 25 bp, Saccharomyces pastorianus
gctaccatccaaggtttattccatg

SEQ ID NO: 144173 - DNA, 25 bp, Saccharomyces pastorianus
aaggtcgacttaatatctcccacac

SEQ ID NO: 144174 - DNA, 25 bp, Saccharomyces pastorianus
aaacgactatactacagagctacca

SEQ ID NO: 144175 - DNA, 25 bp, Saccharomyces pastorianus
agaactcgacttgaacaggctggat

SEQ ID NO: 144176 - DNA, 25 bp, Saccharomyces pastorianus
gtagggcattggcaagaactgcacc

SEQ ID NO: 144177 - DNA, 25 bp, Saccharomyces pastorianus
gagcgcaagctgtttttatcgaatt

SEQ ID NO: 144178 - DNA, 25 bp, Saccharomyces pastorianus
atttttgagggcgaagtcatcttca

SEQ ID NO: 144179 - DNA, 25 bp, Saccharomyces pastorianus
acaggctggatcttgtgaatacaaa

SEQ ID NO: 144180 - DNA, 25 bp, Saccharomyces pastorianus
tcttgaatatctagcaatggcccat

SEQ ID NO: 144181 - DNA, 25 bp, Saccharomyces pastorianus
gaatccaaaagggtccagttagagg

SEQ ID NO: 144182 - DNA, 25 bp, Saccharomyces pastorianus
tttggacttgtctcgttctaacggt

SEQ ID NO: 144183 - DNA, 25 bp, Saccharomyces pastorianus
tgacttggttaaatctttgggtttg

SEQ ID NO: 144184 - DNA, 25 bp, Saccharomyces pastorianus
tggacttgtctcgttctaacggtgt

SEQ ID NO: 144185 - DNA, 25 bp, Saccharomyces pastorianus
ccagaagtctctgctttggacttgt

SEQ ID NO: 144186 - DNA, 25 bp, Saccharomyces pastorianus
tctgacttggttaaatctttgggtt

SEQ ID NO: 144187 - DNA, 25 bp, Saccharomyces pastorianus
ttgtctcgttctaacggtgttttga

SEQ ID NO: 144188 - DNA, 25 bp, Saccharomyces pastorianus
ctgctttggacttgtctcgttctaa

SEQ ID NO: 144189 - DNA, 25 bp, Saccharomyces pastorianus
tccaaaagggtccagttagaggtat

SEQ ID NO: 144190 - DNA, 25 bp, Saccharomyces pastorianus
aagtctctgctttggacttgtctcg

SEQ ID NO: 144191 - DNA, 25 bp, Saccharomyces pastorianus
gacttgtctcgttctaacggtgttt

SEQ ID NO: 144192 - DNA, 25 bp, Saccharomyces pastorianus
tgagttaggagccaacccctatcgt

SEQ ID NO: 144193 - DNA, 25 bp, Saccharomyces pastorianus
aacccctatcgtctgccatggtgta

SEQ ID NO: 144194 - DNA, 25 bp, Saccharomyces pastorianus
cccctatcgtctgccatggtgtatg

SEQ ID NO: 144195 - DNA, 25 bp, Saccharomyces pastorianus
aatttgaggaatgggagcctgagac

SEQ ID NO: 144196 - DNA, 25 bp, Saccharomyces pastorianus
gtactcaccatataaattgtctgag

SEQ ID NO: 144197 - DNA, 25 bp, Saccharomyces pastorianus
attgtctgagttaggagccaacccc

SEQ ID NO: 144198 - DNA, 25 bp, Saccharomyces pastorianus
gggattgatgtacgagtccaacaag

SEQ ID NO: 144199 - DNA, 25 bp, Saccharomyces pastorianus
gagtccaacaagcatttcagtaatg

SEQ ID NO: 144200 - DNA, 25 bp, Saccharomyces pastorianus
gtacgagtccaacaagcatttcagt

SEQ ID NO: 144201 - DNA, 25 bp, Saccharomyces pastorianus
tatccaattgagtactcaccatata

SEQ ID NO: 144202 - DNA, 25 bp, Saccharomyces pastorianus
tgggagcctgagacaaagcaattga

SEQ ID NO: 144203 - DNA, 25 bp, Saccharomyces pastorianus
cattctacggttgcagatcatactt

SEQ ID NO: 144204 - DNA, 25 bp, Saccharomyces pastorianus
cggttgcagatcatactttgtttgt

SEQ ID NO: 144205 - DNA, 25 bp, Saccharomyces pastorianus
catactttgtttgttcgtgcttacc

SEQ ID NO: 144206 - DNA, 25 bp, Saccharomyces pastorianus
ctacggttgcagatcatactttgtt

SEQ ID NO: 144207 - DNA, 25 bp, Saccharomyces pastorianus
gtccattctacggttgcagatcata

SEQ ID NO: 144208 - DNA, 25 bp, Saccharomyces pastorianus
ctttgtttgttcgtgcttaccatac

SEQ ID NO: 144209 - DNA, 25 bp, Saccharomyces pastorianus
gatcatactttgtttgttcgtgctt

SEQ ID NO: 144210 - DNA, 25 bp, Saccharomyces pastorianus
gtttgttcgtgcttaccatacgagt

SEQ ID NO: 144211 - DNA, 25 bp, Saccharomyces pastorianus
tactttgtttgttcgtgcttaccat

SEQ ID NO: 144212 - DNA, 25 bp, Saccharomyces pastorianus
tgttcgtgcttaccatacgagtgat

SEQ ID NO: 144213 - DNA, 25 bp, Saccharomyces pastorianus
gcagatcatactttgtttgttcgtg

SEQ ID NO: 144214 - DNA, 25 bp, Saccharomyces pastorianus
ggtgcagcactcacaaaatcagtta

SEQ ID NO: 144215 - DNA, 25 bp, Saccharomyces pastorianus
gacataggcaatcagtttccgaaca

SEQ ID NO: 144216 - DNA, 25 bp, Saccharomyces pastorianus
agattaccaatctaggcccatcaga

SEQ ID NO: 144217 - DNA, 25 bp, Saccharomyces pastorianus
ggtacatctaccaagtttgtcacag

SEQ ID NO: 144218 - DNA, 25 bp, Saccharomyces pastorianus
attggtgagccaacgggtacatcta

SEQ ID NO: 144219 - DNA, 25 bp, Saccharomyces pastorianus
gaagaccttcatcaagggtacgaga

SEQ ID NO: 144220 - DNA, 25 bp, Saccharomyces pastorianus
gaacattgttgtaccaagtttcgat

SEQ ID NO: 144221 - DNA, 25 bp, Saccharomyces pastorianus
atcagagttctcattgtcggcgttc

SEQ ID NO: 144222 - DNA, 25 bp, Saccharomyces pastorianus
ctctatttagggttgatccatggaa

SEQ ID NO: 144223 - DNA, 25 bp, Saccharomyces pastorianus
gttggaacacaacagaggatctcta

SEQ ID NO: 144224 - DNA, 25 bp, Saccharomyces pastorianus
gaatacagtcacatccacaatttgg

SEQ ID NO: 144225 - DNA, 25 bp, Saccharomyces pastorianus
aagtgccccagctatggccaaatgg

SEQ ID NO: 144226 - DNA, 25 bp, Saccharomyces pastorianus
gactttgaattggtatcgcccttcc

SEQ ID NO: 144227 - DNA, 25 bp, Saccharomyces pastorianus
agattcgtcaagaagttcccctcca

SEQ ID NO: 144228 - DNA, 25 bp, Saccharomyces pastorianus
tgctactgctaccacgatcgaagag

SEQ ID NO: 144229 - DNA, 25 bp, Saccharomyces pastorianus
attgggtgtcacatatacctcgcgg

SEQ ID NO: 144230 - DNA, 25 bp, Saccharomyces pastorianus
gcggtatattctagtgaccccgtag

SEQ ID NO: 144231 - DNA, 25 bp, Saccharomyces pastorianus
gcccttccctaagtatactgtgcat

SEQ ID NO: 144232 - DNA, 25 bp, Saccharomyces pastorianus
gcttacctcatttgatctcgaacgt

SEQ ID NO: 144233 - DNA, 25 bp, Saccharomyces pastorianus
agacgatgatgtgctctgctttaaa

SEQ ID NO: 144234 - DNA, 25 bp, Saccharomyces pastorianus
gaaattaaactcaactgctcggcaa

SEQ ID NO: 144235 - DNA, 25 bp, Saccharomyces pastorianus
ggccacatcatcaacaacgagctta

SEQ ID NO: 144236 - DNA, 25 bp, Saccharomyces pastorianus
gataattgcctgattttgtcctgga

SEQ ID NO: 144237 - DNA, 25 bp, Saccharomyces pastorianus
gagctcttcgatcgtggtagcagta

SEQ ID NO: 144238 - DNA, 25 bp, Saccharomyces pastorianus
gaagactgccatttggccatagctg

SEQ ID NO: 144239 - DNA, 25 bp, Saccharomyces pastorianus
ttgttgatgatgtggccgagctctt

SEQ ID NO: 144240 - DNA, 25 bp, Saccharomyces pastorianus
gctcgttaggatgcacagtatactt

SEQ ID NO: 144241 - DNA, 25 bp, Saccharomyces pastorianus
caagtttaccacgttcgagatcaaa

SEQ ID NO: 144242 - DNA, 25 bp, Saccharomyces pastorianus
gtcctggagggcgttagaccattct

SEQ ID NO: 144243 - DNA, 25 bp, Saccharomyces pastorianus
ttggtccaccgacatgtgctcgtta

SEQ ID NO: 144244 - DNA, 25 bp, Saccharomyces pastorianus
gagcacatcatcgtctgcagataat

SEQ ID NO: 144245 - DNA, 25 bp, Saccharomyces pastorianus
gtagcagtttcaagttgtccttctt

SEQ ID NO: 144246 - DNA, 25 bp, Saccharomyces pastorianus
ttcatccagtgcttccactagaaga

SEQ ID NO: 144247 - DNA, 25 bp, Saccharomyces pastorianus
acctcttctggtcttagcggtggta

SEQ ID NO: 144248 - DNA, 25 bp, Saccharomyces pastorianus
gaatgggcccaagttacgtcagtgc

SEQ ID NO: 144249 - DNA, 25 bp, Saccharomyces pastorianus
acaccagctgtaaatgcgcatggag

SEQ ID NO: 144250 - DNA, 25 bp, Saccharomyces pastorianus
aaacatggccactggcggtattgca

SEQ ID NO: 144251 - DNA, 25 bp, Saccharomyces pastorianus
gtgccccaagaaacatggccactgg

SEQ ID NO: 144252 - DNA, 25 bp, Saccharomyces pastorianus
cactggcggtattgcagcaggtgct

SEQ ID NO: 144253 - DNA, 25 bp, Saccharomyces pastorianus
acgtcagtgccccaagaaacatggc

SEQ ID NO: 144254 - DNA, 25 bp, Saccharomyces pastorianus
cttctggtcttagcggtggtatgac

SEQ ID NO: 144255 - DNA, 25 bp, Saccharomyces pastorianus
tattgcagcaggtgctgcggctacc

SEQ ID NO: 144256 - DNA, 25 bp, Saccharomyces pastorianus
aggtgctgcggctacctcttctggt

SEQ ID NO: 144257 - DNA, 25 bp, Saccharomyces pastorianus
acaggccagaatgggcccaagttac

SEQ ID NO: 144258 - DNA, 25 bp, Saccharomyces pastorianus
gaagccgcgaaagttctcataaaga

SEQ ID NO: 144259 - DNA, 25 bp, Saccharomyces pastorianus
gacaaacgcctttattttccatctt

SEQ ID NO: 144260 - DNA, 25 bp, Saccharomyces pastorianus
aaacattccaatccttttacaactg

SEQ ID NO: 144261 - DNA, 25 bp, Saccharomyces pastorianus
ggtgaagaccgcatttgatatcgca

SEQ ID NO: 144262 - DNA, 25 bp, Saccharomyces pastorianus
gtggctcattatctaacccatgaaa

SEQ ID NO: 144263 - DNA, 25 bp, Saccharomyces pastorianus
aagatcatgctgttcaattgtactg

SEQ ID NO: 144264 - DNA, 25 bp, Saccharomyces pastorianus
tcgaccttcttcacttgttttgatt

SEQ ID NO: 144265 - DNA, 25 bp, Saccharomyces pastorianus
agatatgcacgtaccgtggctcatt

SEQ ID NO: 144266 - DNA, 25 bp, Saccharomyces pastorianus
gtttgactatctagaccacaccgat

SEQ ID NO: 144267 - DNA, 25 bp, Saccharomyces pastorianus
aaagatcactcggtactaagcaaga

SEQ ID NO: 144268 - DNA, 25 bp, Saccharomyces pastorianus
tattgacgccatcacgaaagaccgt

SEQ ID NO: 144269 - DNA, 25 bp, Saccharomyces pastorianus
ccacatatcccttagttgaagtact

SEQ ID NO: 144270 - DNA, 25 bp, Saccharomyces pastorianus
atggcaatatccgacggaggtaaat

SEQ ID NO: 144271 - DNA, 25 bp, Saccharomyces pastorianus
tacatttctccctcccatgaaagca

SEQ ID NO: 144272 - DNA, 25 bp, Saccharomyces pastorianus
atggcgagatcccaggatatccaga

SEQ ID NO: 144273 - DNA, 25 bp, Saccharomyces pastorianus
catgaaagcaccacatatcccttag

SEQ ID NO: 144274 - DNA, 25 bp, Saccharomyces pastorianus
tatccgacggaggtaaattggtgac

SEQ ID NO: 144275 - DNA, 25 bp, Saccharomyces pastorianus
aaattggtgacctacatttctccct

SEQ ID NO: 144276 - DNA, 25 bp, Saccharomyces pastorianus
gaaagcaccacatatcccttagttg

SEQ ID NO: 144277 - DNA, 25 bp, Saccharomyces pastorianus
aagtactaaaatatggcgagatccc

SEQ ID NO: 144278 - DNA, 25 bp, Saccharomyces pastorianus
aaatatggcgagatcccaggatatc

SEQ ID NO: 144279 - DNA, 25 bp, Saccharomyces pastorianus
agcaccacatatcccttagttgaag

SEQ ID NO: 144280 - DNA, 25 bp, Saccharomyces pastorianus
gagcagtcactggttaacttcaaag

SEQ ID NO: 144281 - DNA, 25 bp, Saccharomyces pastorianus
ggaacacctaattacatcgcacctg

SEQ ID NO: 144282 - DNA, 25 bp, Saccharomyces pastorianus
gtcatgtcagaagcaccaaattttg

SEQ ID NO: 144283 - DNA, 25 bp, Saccharomyces pastorianus
taagccacccttccaagcaagagat

SEQ ID NO: 144284 - DNA, 25 bp, Saccharomyces pastorianus
gacattctctccttagatccaatag

SEQ ID NO: 144285 - DNA, 25 bp, Saccharomyces pastorianus
tctggcagctgtgttggcgaatgaa

SEQ ID NO: 144286 - DNA, 25 bp, Saccharomyces pastorianus
gggtaagcattctggacattcattt

SEQ ID NO: 144287 - DNA, 25 bp, Saccharomyces pastorianus
gaacgtaaatacaccatatgcggaa

SEQ ID NO: 144288 - DNA, 25 bp, Saccharomyces pastorianus
atgtcgtgatttttcgtttccaaga

SEQ ID NO: 144289 - DNA, 25 bp, Saccharomyces pastorianus
agattggtgacttcggtctggcagc

SEQ ID NO: 144290 - DNA, 25 bp, Saccharomyces pastorianus
atctattccttcgacggtcatgtca

SEQ ID NO: 144291 - DNA, 25 bp, Saccharomyces pastorianus
gttgggtagcaagtcattatttatt

SEQ ID NO: 144292 - DNA, 25 bp, Saccharomyces pastorianus
ggattctcctatcagttatcaacag

SEQ ID NO: 144293 - DNA, 25 bp, Saccharomyces pastorianus
gtatattagttatgacgatcgggaa

SEQ ID NO: 144294 - DNA, 25 bp, Saccharomyces pastorianus
aataatggcaccacagttctccgat

SEQ ID NO: 144295 - DNA, 25 bp, Saccharomyces pastorianus
caccacagttctccgattggcagat

SEQ ID NO: 144296 - DNA, 25 bp, Saccharomyces pastorianus
gcgaaaaaccacgagagctaagtag

SEQ ID NO: 144297 - DNA, 25 bp, Saccharomyces pastorianus
tgcctaaaattaaacacccaatgat

SEQ ID NO: 144298 - DNA, 25 bp, Saccharomyces pastorianus
cagaggatattggtgtcttatttaa

SEQ ID NO: 144299 - DNA, 25 bp, Saccharomyces pastorianus
tttattgagcgaaaaaccacgagag

SEQ ID NO: 144300 - DNA, 25 bp, Saccharomyces pastorianus
catgaaggcaaatttgagccgagta

SEQ ID NO: 144301 - DNA, 25 bp, Saccharomyces pastorianus
ctccaacaaacacggattctcctat

SEQ ID NO: 144302 - DNA, 25 bp, Saccharomyces pastorianus
tattcttcttctgcttccttgtctg

SEQ ID NO: 144303 - DNA, 25 bp, Saccharomyces pastorianus
tgcagccagtgttttaccaactact

SEQ ID NO: 144304 - DNA, 25 bp, Saccharomyces pastorianus
attgccctctgaatgcagccagtgt

SEQ ID NO: 144305 - DNA, 25 bp, Saccharomyces pastorianus
ggaacggtactattgacagcaggtc

SEQ ID NO: 144306 - DNA, 25 bp, Saccharomyces pastorianus
acactaacacttttattggtgtctt

SEQ ID NO: 144307 - DNA, 25 bp, Saccharomyces pastorianus
aacttgaatgctacattgccctctg

SEQ ID NO: 144308 - DNA, 25 bp, Saccharomyces pastorianus
gcgggcaatgctttggtgaattatt

SEQ ID NO: 144309 - DNA, 25 bp, Saccharomyces pastorianus
cttctgggtcttccactcataagaa

SEQ ID NO: 144310 - DNA, 25 bp, Saccharomyces pastorianus
agcaggtcagtctcaggtgtaggaa

SEQ ID NO: 144311 - DNA, 25 bp, Saccharomyces pastorianus
tgatgattattcttcttctgcttcc

SEQ ID NO: 144312 - DNA, 25 bp, Saccharomyces pastorianus
accaactactgctggaacggtacta

SEQ ID NO: 144313 - DNA, 25 bp, Saccharomyces pastorianus
gagtacattccaccattaattgttt

SEQ ID NO: 144314 - DNA, 25 bp, Saccharomyces pastorianus
atttggcagccaaggtctcaatttg

SEQ ID NO: 144315 - DNA, 25 bp, Saccharomyces pastorianus
aaaagaacgcaacctccagtattat

SEQ ID NO: 144316 - DNA, 25 bp, Saccharomyces pastorianus
gtacttttaagatgtcatactccga

SEQ ID NO: 144317 - DNA, 25 bp, Saccharomyces pastorianus
aacttagccaccgatttcctggaag

SEQ ID NO: 144318 - DNA, 25 bp, Saccharomyces pastorianus
gttaacacctatcagcgtcaatttg

SEQ ID NO: 144319 - DNA, 25 bp, Saccharomyces pastorianus
gtctcaatttgtctttcccatatgt

SEQ ID NO: 144320 - DNA, 25 bp, Saccharomyces pastorianus
gaattctaccgatttaccttcattt

SEQ ID NO: 144321 - DNA, 25 bp, Saccharomyces pastorianus
tgctgatactgacgactattggcca

SEQ ID NO: 144322 - DNA, 25 bp, Saccharomyces pastorianus
ttggccagatggtgcttcattagtt

SEQ ID NO: 144323 - DNA, 25 bp, Saccharomyces pastorianus
tattcctttagttccattgttgcaa

SEQ ID NO: 144324 - DNA, 25 bp, Saccharomyces pastorianus
ttcttgggctgtgttggttgcgcca

SEQ ID NO: 144325 - DNA, 25 bp, Saccharomyces pastorianus
ccattatcagacgtaagcaacaaaa

SEQ ID NO: 144326 - DNA, 25 bp, Saccharomyces pastorianus
ggctgtgttggttgcgccattatca

SEQ ID NO: 144327 - DNA, 25 bp, Saccharomyces pastorianus
cattatcagacgtaagcaacaaaac

SEQ ID NO: 144328 - DNA, 25 bp, Saccharomyces pastorianus
ttggttgcgccattatcagacgtaa

SEQ ID NO: 144329 - DNA, 25 bp, Saccharomyces pastorianus
cagacgtaagcaacaaaacttgaat

SEQ ID NO: 144330 - DNA, 25 bp, Saccharomyces pastorianus
tgttggttgcgccattatcagacgt

SEQ ID NO: 144331 - DNA, 25 bp, Saccharomyces pastorianus
ggttgcgccattatcagacgtaagc

SEQ ID NO: 144332 - DNA, 25 bp, Saccharomyces pastorianus
ttatcagacgtaagcaacaaaactt

SEQ ID NO: 144333 - DNA, 25 bp, Saccharomyces pastorianus
attatcagacgtaagcaacaaaact

SEQ ID NO: 144334 - DNA, 25 bp, Saccharomyces pastorianus
tatcagacgtaagcaacaaaacttg

SEQ ID NO: 144335 - DNA, 25 bp, Saccharomyces pastorianus
gagttaccaaaaatccatcacccag

SEQ ID NO: 144336 - DNA, 25 bp, Saccharomyces pastorianus
aagtccttataacgctactgtggtt

SEQ ID NO: 144337 - DNA, 25 bp, Saccharomyces pastorianus
acccaagggattttcaccaagcaat

SEQ ID NO: 144338 - DNA, 25 bp, Saccharomyces pastorianus
gcatatggctataccgagtcacgtt

SEQ ID NO: 144339 - DNA, 25 bp, Saccharomyces pastorianus
gagcacatcactgtaacccaaggga

SEQ ID NO: 144340 - DNA, 25 bp, Saccharomyces pastorianus
tgggtatgaatcacacgcactcagc

SEQ ID NO: 144341 - DNA, 25 bp, Saccharomyces pastorianus
aaggcgattcttccaactctaagag

SEQ ID NO: 144342 - DNA, 25 bp, Saccharomyces pastorianus
cttgggacaactaagctcctatgtt

SEQ ID NO: 144343 - DNA, 25 bp, Saccharomyces pastorianus
aacgggatcaaattcagctggccat

SEQ ID NO: 144344 - DNA, 25 bp, Saccharomyces pastorianus
gaaggatttccaccgtgcattagag

SEQ ID NO: 144345 - DNA, 25 bp, Saccharomyces pastorianus
aattagccctaggtgttcaagatac

SEQ ID NO: 144346 - DNA, 25 bp, Saccharomyces pastorianus
ggatgaagctgcaatcgctgcttcc

SEQ ID NO: 144347 - DNA, 25 bp, Saccharomyces pastorianus
atcccttggacatcaactttgctag

SEQ ID NO: 144348 - DNA, 25 bp, Saccharomyces pastorianus
tagcattttcatcgcaatccaaggg

SEQ ID NO: 144349 - DNA, 25 bp, Saccharomyces pastorianus
tgttggattcgataagaggcgctat

SEQ ID NO: 144350 - DNA, 25 bp, Saccharomyces pastorianus
tgaaaaccgttacccacacaggcaa

SEQ ID NO: 144351 - DNA, 25 bp, Saccharomyces pastorianus
gcttgcatatgcacgaagttcgtta

SEQ ID NO: 144352 - DNA, 25 bp, Saccharomyces pastorianus
gtttccgacgttagtggcaattatg

SEQ ID NO: 144353 - DNA, 25 bp, Saccharomyces pastorianus
atcttttattcctatgtttccgacg

SEQ ID NO: 144354 - DNA, 25 bp, Saccharomyces pastorianus
ttagccaacacgtatcccttggaca

SEQ ID NO: 144355 - DNA, 25 bp, Saccharomyces pastorianus
gatgctgactttgattctgttttag

SEQ ID NO: 144356 - DNA, 25 bp, Saccharomyces pastorianus
tcgctgcttccaaccaagacttgaa

SEQ ID NO: 144357 - DNA, 25 bp, Saccharomyces pastorianus
ggcatttcatcattttcttactcat

SEQ ID NO: 144358 - DNA, 25 bp, Saccharomyces pastorianus
tcatacctttatttactcttcggaa

SEQ ID NO: 144359 - DNA, 25 bp, Saccharomyces pastorianus
gaacacctcccgaaaattgtggcat

SEQ ID NO: 144360 - DNA, 25 bp, Saccharomyces pastorianus
gaattggtgattccttagcatctat

SEQ ID NO: 144361 - DNA, 25 bp, Saccharomyces pastorianus
cacagcgggccattgatcatatcat

SEQ ID NO: 144362 - DNA, 25 bp, Saccharomyces pastorianus
aaggtatggccgcattcgttggaaa

SEQ ID NO: 144363 - DNA, 25 bp, Saccharomyces pastorianus
atgatagggaccacagcgggccatt

SEQ ID NO: 144364 - DNA, 25 bp, Saccharomyces pastorianus
aattgcttaccctttgtacactgag

SEQ ID NO: 144365 - DNA, 25 bp, Saccharomyces pastorianus
taccgccgttaggatctgctattga

SEQ ID NO: 144366 - DNA, 25 bp, Saccharomyces pastorianus
aatgaataactctccaatgggtcta

SEQ ID NO: 144367 - DNA, 25 bp, Saccharomyces pastorianus
gctgcaatttttaaccacctaacta

SEQ ID NO: 144368 - DNA, 25 bp, Saccharomyces pastorianus
tatgaggactcgtaaatttgatgtg

SEQ ID NO: 144369 - DNA, 25 bp, Saccharomyces pastorianus
gataatggttggtctgatattcaca

SEQ ID NO: 144370 - DNA, 25 bp, Saccharomyces pastorianus
atgccaactgaggagatctgcaaaa

SEQ ID NO: 144371 - DNA, 25 bp, Saccharomyces pastorianus
gcaacatggttacaaaagcctaccc

SEQ ID NO: 144372 - DNA, 25 bp, Saccharomyces pastorianus
ctcgtaaatttgatgtgggcgggaa

SEQ ID NO: 144373 - DNA, 25 bp, Saccharomyces pastorianus
ttacaaaagcctacccaagttcgat

SEQ ID NO: 144374 - DNA, 25 bp, Saccharomyces pastorianus
aatgtctttgtggtgtgtttgataa

SEQ ID NO: 144375 - DNA, 25 bp, Saccharomyces pastorianus
tattcacaaaatattggcaacatgg

SEQ ID NO: 144376 - DNA, 25 bp, Saccharomyces pastorianus
gatctgcaaaatcaatatgaggact

SEQ ID NO: 144377 - DNA, 25 bp, Saccharomyces pastorianus
atggttggtctgatattcacaaaat

SEQ ID NO: 144378 - DNA, 25 bp, Saccharomyces pastorianus
aagcctacccaagttcgataccatt

SEQ ID NO: 144379 - DNA, 25 bp, Saccharomyces pastorianus
tctccggaaagtgcagtagcaaatc

SEQ ID NO: 144380 - DNA, 25 bp, Saccharomyces pastorianus
ctgtcagtaaaatagggaactctcc

SEQ ID NO: 144381 - DNA, 25 bp, Saccharomyces pastorianus
gtagcaaatctaggtactgatactg

SEQ ID NO: 144382 - DNA, 25 bp, Saccharomyces pastorianus
tgccctcagatgttcttgatactgt

SEQ ID NO: 144383 - DNA, 25 bp, Saccharomyces pastorianus
actggattgccctcagatgttcttg

SEQ ID NO: 144384 - DNA, 25 bp, Saccharomyces pastorianus
ctctcctaatgtgtttgatgatgat

SEQ ID NO: 144385 - DNA, 25 bp, Saccharomyces pastorianus
gattgccctcagatgttcttgatac

SEQ ID NO: 144386 - DNA, 25 bp, Saccharomyces pastorianus
tgatactggattgccctcagatgtt

SEQ ID NO: 144387 - DNA, 25 bp, Saccharomyces pastorianus
agggaactctcctaatgtgtttgat

SEQ ID NO: 144388 - DNA, 25 bp, Saccharomyces pastorianus
aggtactgatactggattgccctca

SEQ ID NO: 144389 - DNA, 25 bp, Saccharomyces pastorianus
agatgttcttgatactgtcagtaaa

SEQ ID NO: 144390 - DNA, 25 bp, Saccharomyces pastorianus
aaaaatcggccttcaatgcttcctg

SEQ ID NO: 144391 - DNA, 25 bp, Saccharomyces pastorianus
gatcatggtgatgacacccctaata

SEQ ID NO: 144392 - DNA, 25 bp, Saccharomyces pastorianus
gctactctcggaactgatcatggtg

SEQ ID NO: 144393 - DNA, 25 bp, Saccharomyces pastorianus
tggtggttaaacctttctcaactat

SEQ ID NO: 144394 - DNA, 25 bp, Saccharomyces pastorianus
gtaatcttttctttgttccgtggtg

SEQ ID NO: 144395 - DNA, 25 bp, Saccharomyces pastorianus
tatgtattatctacctgcacgcagg

SEQ ID NO: 144396 - DNA, 25 bp, Saccharomyces pastorianus
atgcttcctgagtgcttatggtgtt

SEQ ID NO: 144397 - DNA, 25 bp, Saccharomyces pastorianus
ttgcaattggaagctactctcggaa

SEQ ID NO: 144398 - DNA, 25 bp, Saccharomyces pastorianus
atatggcgaaccttagagtgctcta

SEQ ID NO: 144399 - DNA, 25 bp, Saccharomyces pastorianus
gcacgcagggattgccgtaactcaa

SEQ ID NO: 144400 - DNA, 25 bp, Saccharomyces pastorianus
acgactgagagattctgctttgcaa

SEQ ID NO: 144401 - DNA, 25 bp, Saccharomyces pastorianus
tacccgcgagcgagatgtgcgaaca

SEQ ID NO: 144402 - DNA, 25 bp, Saccharomyces pastorianus
aatgggtcggttctaccaactatca

SEQ ID NO: 144403 - DNA, 25 bp, Saccharomyces pastorianus
agttcaaccattcatgacatacctg

SEQ ID NO: 144404 - DNA, 25 bp, Saccharomyces pastorianus
atggtatgacacctttatagttgga

SEQ ID NO: 144405 - DNA, 25 bp, Saccharomyces pastorianus
aatcgtggcttttgataaccttcta

SEQ ID NO: 144406 - DNA, 25 bp, Saccharomyces pastorianus
gaacgcgttaagtcaagcggtgaac

SEQ ID NO: 144407 - DNA, 25 bp, Saccharomyces pastorianus
gacaactatcgttacttctatcaag

SEQ ID NO: 144408 - DNA, 25 bp, Saccharomyces pastorianus
gaacgagaccgtgcaattgcgcagc

SEQ ID NO: 144409 - DNA, 25 bp, Saccharomyces pastorianus
aaatttcctgagatccattccactt

SEQ ID NO: 144410 - DNA, 25 bp, Saccharomyces pastorianus
acctgttacagacagacggcgtgct

SEQ ID NO: 144411 - DNA, 25 bp, Saccharomyces pastorianus
ttgcgcagccaacttggtcaatggt

SEQ ID NO: 144412 - DNA, 25 bp, Saccharomyces pastorianus
agcgtacagagcgacttatgtttat

SEQ ID NO: 144413 - DNA, 25 bp, Saccharomyces pastorianus
gatgcaagtcctgtcattgtttcca

SEQ ID NO: 144414 - DNA, 25 bp, Saccharomyces pastorianus
gaatcgttaattagcactctgacaa

SEQ ID NO: 144415 - DNA, 25 bp, Saccharomyces pastorianus
ttgtctcaatcaagtgccgatgcaa

SEQ ID NO: 144416 - DNA, 25 bp, Saccharomyces pastorianus
gagcgacttagtttccgatgatgag

SEQ ID NO: 144417 - DNA, 25 bp, Saccharomyces pastorianus
gtaccccatattaagcgtgtcctgt

SEQ ID NO: 144418 - DNA, 25 bp, Saccharomyces pastorianus
ttagcacacctatcatcgaagacgt

SEQ ID NO: 144419 - DNA, 25 bp, Saccharomyces pastorianus
tagactcggatcgaagtaccccata

SEQ ID NO: 144420 - DNA, 25 bp, Saccharomyces pastorianus
atcaaaacttttgcctgaggacata

SEQ ID NO: 144421 - DNA, 25 bp, Saccharomyces pastorianus
gagattctcaaaaacgacgtactgt

SEQ ID NO: 144422 - DNA, 25 bp, Saccharomyces pastorianus
cgtactgtacggcttggaagagttt

SEQ ID NO: 144423 - DNA, 25 bp, Saccharomyces pastorianus
gccaagaaattcagaatacggatga

SEQ ID NO: 144424 - DNA, 25 bp, Saccharomyces pastorianus
gcacagttgactgctataatagatt

SEQ ID NO: 144425 - DNA, 25 bp, Saccharomyces pastorianus
tgtagaaaagaacatcatatgtctg

SEQ ID NO: 144426 - DNA, 25 bp, Saccharomyces pastorianus
tgctataatagattttgccgacgat

SEQ ID NO: 144427 - DNA, 25 bp, Saccharomyces pastorianus
atggcacagttgactgctataatag

SEQ ID NO: 144428 - DNA, 25 bp, Saccharomyces pastorianus
atagattttgccgacgataatagcc

SEQ ID NO: 144429 - DNA, 25 bp, Saccharomyces pastorianus
ggatgagattttccataatgtagaa

SEQ ID NO: 144430 - DNA, 25 bp, Saccharomyces pastorianus
gctataatagattttgccgacgata

SEQ ID NO: 144431 - DNA, 25 bp, Saccharomyces pastorianus
atacggatgagattttccataatgt

SEQ ID NO: 144432 - DNA, 25 bp, Saccharomyces pastorianus
tagattttgccgacgataatagcca

SEQ ID NO: 144433 - DNA, 25 bp, Saccharomyces pastorianus
cagaatacggatgagattttccata

SEQ ID NO: 144434 - DNA, 25 bp, Saccharomyces pastorianus
aggatacgtggcatgctacccgtgt

SEQ ID NO: 144435 - DNA, 25 bp, Saccharomyces pastorianus
gatgaagatattccaaggccgcctt

SEQ ID NO: 144436 - DNA, 25 bp, Saccharomyces pastorianus
ttggaaacaggatacgtggcatgct

SEQ ID NO: 144437 - DNA, 25 bp, Saccharomyces pastorianus
aactgtacaaaacccctgcgtattg

SEQ ID NO: 144438 - DNA, 25 bp, Saccharomyces pastorianus
agagggagtttctgaggcctgtccc

SEQ ID NO: 144439 - DNA, 25 bp, Saccharomyces pastorianus
caaaacccctgcgtattggaaacag

SEQ ID NO: 144440 - DNA, 25 bp, Saccharomyces pastorianus
gtcccgttaccaataaaaagctgct

SEQ ID NO: 144441 - DNA, 25 bp, Saccharomyces pastorianus
gcctgtcccgtttgcgaaaaaactg

SEQ ID NO: 144442 - DNA, 25 bp, Saccharomyces pastorianus
aaaagctgctgggttgtacatacaa

SEQ ID NO: 144443 - DNA, 25 bp, Saccharomyces pastorianus
gcctttctcctcacatagtgacaaa

SEQ ID NO: 144444 - DNA, 25 bp, Saccharomyces pastorianus
ctacccgtgtgccataagctatttg

SEQ ID NO: 144445 - DNA, 25 bp, Saccharomyces pastorianus
gagggtcttcaacaagcggtcgaaa

SEQ ID NO: 144446 - DNA, 25 bp, Saccharomyces pastorianus
agaaatcgattcgttactgcccgca

SEQ ID NO: 144447 - DNA, 25 bp, Saccharomyces pastorianus
gagctattattcaaacctaccgtct

SEQ ID NO: 144448 - DNA, 25 bp, Saccharomyces pastorianus
gcatccatccgttatctactggcaa

SEQ ID NO: 144449 - DNA, 25 bp, Saccharomyces pastorianus
tctactggcaaatcatttagtggcg

SEQ ID NO: 144450 - DNA, 25 bp, Saccharomyces pastorianus
attgtatccgactatctttgagata

SEQ ID NO: 144451 - DNA, 25 bp, Saccharomyces pastorianus
ttattcaaacctaccgtctgcagga

SEQ ID NO: 144452 - DNA, 25 bp, Saccharomyces pastorianus
taccgtctgcaggacaatctagtcg

SEQ ID NO: 144453 - DNA, 25 bp, Saccharomyces pastorianus
acaatctagtcgagggtcttcaaca

SEQ ID NO: 144454 - DNA, 25 bp, Saccharomyces pastorianus
gggattagaaccattgtatccgact

SEQ ID NO: 144455 - DNA, 25 bp, Saccharomyces pastorianus
tcatttagtggcgaacttccctaac

SEQ ID NO: 144456 - DNA, 25 bp, Saccharomyces pastorianus
ggtttccttgttgcaatacttattc

SEQ ID NO: 144457 - DNA, 25 bp, Saccharomyces pastorianus
gagcgtttctaagaatttatccatt

SEQ ID NO: 144458 - DNA, 25 bp, Saccharomyces pastorianus
aatatatcgtcaattttcgcgctaa

SEQ ID NO: 144459 - DNA, 25 bp, Saccharomyces pastorianus
ttagcgttatccaatttactcgtta

SEQ ID NO: 144460 - DNA, 25 bp, Saccharomyces pastorianus
aaatggcccaagagagcgtttctaa

SEQ ID NO: 144461 - DNA, 25 bp, Saccharomyces pastorianus
gtcagaactctctggtctcaaagag

SEQ ID NO: 144462 - DNA, 25 bp, Saccharomyces pastorianus
agaccactatcgtcagaactctctg

SEQ ID NO: 144463 - DNA, 25 bp, Saccharomyces pastorianus
gagtacacaacggtaagaccactat

SEQ ID NO: 144464 - DNA, 25 bp, Saccharomyces pastorianus
aggacaattatcgattatacccaga

SEQ ID NO: 144465 - DNA, 25 bp, Saccharomyces pastorianus
aacaggatcggtttccttgttgcaa

SEQ ID NO: 144466 - DNA, 25 bp, Saccharomyces pastorianus
ttttcgcgctaatgcaaggacaatt

SEQ ID NO: 144467 - DNA, 25 bp, Saccharomyces pastorianus
actggcgacagaaaatggccccgca

SEQ ID NO: 144468 - DNA, 25 bp, Saccharomyces pastorianus
tacaagttgctttacctgaaggtct

SEQ ID NO: 144469 - DNA, 25 bp, Saccharomyces pastorianus
ggacctcttgctacgaatggtatta

SEQ ID NO: 144470 - DNA, 25 bp, Saccharomyces pastorianus
ttacctgaaggtctagacgcgaaat

SEQ ID NO: 144471 - DNA, 25 bp, Saccharomyces pastorianus
atgggaaacggctatcggacctctt

SEQ ID NO: 144472 - DNA, 25 bp, Saccharomyces pastorianus
catcattgagcttgagaacctgtaa

SEQ ID NO: 144473 - DNA, 25 bp, Saccharomyces pastorianus
tatcggacctcttgctacgaatggt

SEQ ID NO: 144474 - DNA, 25 bp, Saccharomyces pastorianus
atggtattacatcattgagcttgag

SEQ ID NO: 144475 - DNA, 25 bp, Saccharomyces pastorianus
ggtctagacgcgaaattaagtcaag

SEQ ID NO: 144476 - DNA, 25 bp, Saccharomyces pastorianus
gccgatgtacaagttgctttacctg

SEQ ID NO: 144477 - DNA, 25 bp, Saccharomyces pastorianus
gccccgcaccactaaatgggaaacg

SEQ ID NO: 144478 - DNA, 25 bp, Saccharomyces pastorianus
aaataccatggatccattcttgcac

SEQ ID NO: 144479 - DNA, 25 bp, Saccharomyces pastorianus
gatgttggcagcttttctgttacaa

SEQ ID NO: 144480 - DNA, 25 bp, Saccharomyces pastorianus
ttcccaagtggtgaaccctcgacaa

SEQ ID NO: 144481 - DNA, 25 bp, Saccharomyces pastorianus
agagatcgtgagttcttcccaagtg

SEQ ID NO: 144482 - DNA, 25 bp, Saccharomyces pastorianus
gcaagagctgcatccgagtccaaga

SEQ ID NO: 144483 - DNA, 25 bp, Saccharomyces pastorianus
ttttccacgctaaagacattccata

SEQ ID NO: 144484 - DNA, 25 bp, Saccharomyces pastorianus
ggtattaaccaaagccagggccgat

SEQ ID NO: 144485 - DNA, 25 bp, Saccharomyces pastorianus
gaaaagttcgtctctagcggtaaga

SEQ ID NO: 144486 - DNA, 25 bp, Saccharomyces pastorianus
atctttattgaccaacgctacgtta

SEQ ID NO: 144487 - DNA, 25 bp, Saccharomyces pastorianus
gctcttgatttatttgctggtgaaa

SEQ ID NO: 144488 - DNA, 25 bp, Saccharomyces pastorianus
ggctaccaaatgtattttccacgct

SEQ ID NO: 144489 - DNA, 25 bp, Saccharomyces pastorianus
gaagaaccagagcaagcaccagatg

SEQ ID NO: 144490 - DNA, 25 bp, Saccharomyces pastorianus
aagagtttgaagaaggtcgcgttct

SEQ ID NO: 144491 - DNA, 25 bp, Saccharomyces pastorianus
aaagctcgtgagtgggacgagttca

SEQ ID NO: 144492 - DNA, 25 bp, Saccharomyces pastorianus
tttcctcaagaaattcccgtacatg

SEQ ID NO: 144493 - DNA, 25 bp, Saccharomyces pastorianus
tcatcaggtactcagatacgaaaag

SEQ ID NO: 144494 - DNA, 25 bp, Saccharomyces pastorianus
gatgattccactggttttaccgata

SEQ ID NO: 144495 - DNA, 25 bp, Saccharomyces pastorianus
gtcaagtcttgaggaacttcacgct

SEQ ID NO: 144496 - DNA, 25 bp, Saccharomyces pastorianus
aaaagtgcgaggatatggtcaatat

SEQ ID NO: 144497 - DNA, 25 bp, Saccharomyces pastorianus
gaacttcacgcttgtcgacaaaagg

SEQ ID NO: 144498 - DNA, 25 bp, Saccharomyces pastorianus
acgagttcaaggaaagtcatgctaa

SEQ ID NO: 144499 - DNA, 25 bp, Saccharomyces pastorianus
atatggaccaacaatgtcggtggag

SEQ ID NO: 144500 - DNA, 25 bp, Saccharomyces pastorianus
gcttagcgaattgtacgcgcaacca

SEQ ID NO: 144501 - DNA, 25 bp, Saccharomyces pastorianus
gcacaaaactgcactgcttggagtt

SEQ ID NO: 144502 - DNA, 25 bp, Saccharomyces pastorianus
gacgaggaccacgaccatgatgaat

SEQ ID NO: 144503 - DNA, 25 bp, Saccharomyces pastorianus
tgaggttacatcactttagtcttga

SEQ ID NO: 144504 - DNA, 25 bp, Saccharomyces pastorianus
aagattgagctattccagcgcaata

SEQ ID NO: 144505 - DNA, 25 bp, Saccharomyces pastorianus
aagcttctagatcctttggttggtg

SEQ ID NO: 144506 - DNA, 25 bp, Saccharomyces pastorianus
tcgttataaccctcagcttagcgaa

SEQ ID NO: 144507 - DNA, 25 bp, Saccharomyces pastorianus
atgattcggatgttgctcaaaggca

SEQ ID NO: 144508 - DNA, 25 bp, Saccharomyces pastorianus
tgtgtctactgcttccatcaaattt

SEQ ID NO: 144509 - DNA, 25 bp, Saccharomyces pastorianus
gacaggttggcattgttcagtacta

SEQ ID NO: 144510 - DNA, 25 bp, Saccharomyces pastorianus
gtgaaatgctctctaatttcctcaa

SEQ ID NO: 144511 - DNA, 25 bp, Saccharomyces pastorianus
caccagtgaaggttttccagtcatt

SEQ ID NO: 144512 - DNA, 25 bp, Saccharomyces pastorianus
tgaggcacctggattagcgaatttc

SEQ ID NO: 144513 - DNA, 25 bp, Saccharomyces pastorianus
caaggccatgtatccattgattgga

SEQ ID NO: 144514 - DNA, 25 bp, Saccharomyces pastorianus
gggcgactatctgctaattactgag

SEQ ID NO: 144515 - DNA, 25 bp, Saccharomyces pastorianus
gaaagaacgcctaactctgagcaca

SEQ ID NO: 144516 - DNA, 25 bp, Saccharomyces pastorianus
atccgcttcttcgaggtcggatgat

SEQ ID NO: 144517 - DNA, 25 bp, Saccharomyces pastorianus
aagcacaattttgttcaaccctcct

SEQ ID NO: 144518 - DNA, 25 bp, Saccharomyces pastorianus
taccttgcctattgtcaccagtgaa

SEQ ID NO: 144519 - DNA, 25 bp, Saccharomyces pastorianus
ttcaaccctcctgtggcagtaagag

SEQ ID NO: 144520 - DNA, 25 bp, Saccharomyces pastorianus
attactgttaccttgcctattgtca

SEQ ID NO: 144521 - DNA, 25 bp, Saccharomyces pastorianus
agcgaatttccataagggcgactat

SEQ ID NO: 144522 - DNA, 25 bp, Saccharomyces pastorianus
gagattatattcttgggtgcccaaa

SEQ ID NO: 144523 - DNA, 25 bp, Saccharomyces pastorianus
gcaccgcatttgttccaactataga

SEQ ID NO: 144524 - DNA, 25 bp, Saccharomyces pastorianus
gaatacgtacagtgtcctacagtaa

SEQ ID NO: 144525 - DNA, 25 bp, Saccharomyces pastorianus
ggtgcccaaattgtttctaagcaaa

SEQ ID NO: 144526 - DNA, 25 bp, Saccharomyces pastorianus
gtttatgacaaatagcaccgcattt

SEQ ID NO: 144527 - DNA, 25 bp, Saccharomyces pastorianus
atatccagattactttcctgagtgg

SEQ ID NO: 144528 - DNA, 25 bp, Saccharomyces pastorianus
gaagctttactaggtcaactactga

SEQ ID NO: 144529 - DNA, 25 bp, Saccharomyces pastorianus
gcgaaatccgtattaccagctgcaa

SEQ ID NO: 144530 - DNA, 25 bp, Saccharomyces pastorianus
ggtggcactacttcaatttcaggtt

SEQ ID NO: 144531 - DNA, 25 bp, Saccharomyces pastorianus
gaaaatattatcatcgtcggtggca

SEQ ID NO: 144532 - DNA, 25 bp, Saccharomyces pastorianus
ctaagcaaattttcactcatcctaa

SEQ ID NO: 144533 - DNA, 25 bp, Saccharomyces pastorianus
gaatatggctccattatcgcctgca

SEQ ID NO: 144534 - DNA, 25 bp, Saccharomyces pastorianus
actgtcacatttgtcccaagagctt

SEQ ID NO: 144535 - DNA, 25 bp, Saccharomyces pastorianus
ctactccaaatttcgatctttccat

SEQ ID NO: 144536 - DNA, 25 bp, Saccharomyces pastorianus
gtgtcaactcaactggcaatggtgc

SEQ ID NO: 144537 - DNA, 25 bp, Saccharomyces pastorianus
agtctgctgtgcctttgatgggtac

SEQ ID NO: 144538 - DNA, 25 bp, Saccharomyces pastorianus
agggtcaccataccatgaactctaa

SEQ ID NO: 144539 - DNA, 25 bp, Saccharomyces pastorianus
aatgcgtccgttattgcgaaagtgg

SEQ ID NO: 144540 - DNA, 25 bp, Saccharomyces pastorianus
ggtacggtgccgcttacaaatcaac

SEQ ID NO: 144541 - DNA, 25 bp, Saccharomyces pastorianus
gaacgaccatttgcttgtcacatat

SEQ ID NO: 144542 - DNA, 25 bp, Saccharomyces pastorianus
aagtggcgactacaggcttgagtaa

SEQ ID NO: 144543 - DNA, 25 bp, Saccharomyces pastorianus
aaatcatttctatcaccatttccca

SEQ ID NO: 144544 - DNA, 25 bp, Saccharomyces pastorianus
gatgcactggcttcaagggcatata

SEQ ID NO: 144545 - DNA, 25 bp, Saccharomyces pastorianus
agtggatgcactggcttcaagggca

SEQ ID NO: 144546 - DNA, 25 bp, Saccharomyces pastorianus
gctggagatgacattctgaaggaaa

SEQ ID NO: 144547 - DNA, 25 bp, Saccharomyces pastorianus
ttcaagggcatataaccaaaggaat

SEQ ID NO: 144548 - DNA, 25 bp, Saccharomyces pastorianus
ggcttcatcatctacttttatatat

SEQ ID NO: 144549 - DNA, 25 bp, Saccharomyces pastorianus
gtaccgcaaccagaaaaatccctat

SEQ ID NO: 144550 - DNA, 25 bp, Saccharomyces pastorianus
aataaatagtgtaaccccagtggat

SEQ ID NO: 144551 - DNA, 25 bp, Saccharomyces pastorianus
ttcaggcttcatcatctacttttat

SEQ ID NO: 144552 - DNA, 25 bp, Saccharomyces pastorianus
tacatttcaggcttcatcatctact

SEQ ID NO: 144553 - DNA, 25 bp, Saccharomyces pastorianus
tgaaggctggagatgacattctgaa

SEQ ID NO: 144554 - DNA, 25 bp, Saccharomyces pastorianus
ccgtgatgagtatattgcgaagaat

SEQ ID NO: 144555 - DNA, 25 bp, Saccharomyces pastorianus
taatgttcgggccaggattacctgc

SEQ ID NO: 144556 - DNA, 25 bp, Saccharomyces pastorianus
aaaggctgtttttgcggacgttgcg

SEQ ID NO: 144557 - DNA, 25 bp, Saccharomyces pastorianus
ttgcaactgcgcaaagttcctcatt

SEQ ID NO: 144558 - DNA, 25 bp, Saccharomyces pastorianus
gctggaattcctttgacctcattag

SEQ ID NO: 144559 - DNA, 25 bp, Saccharomyces pastorianus
atgcgaacttgccaaacagaccgaa

SEQ ID NO: 144560 - DNA, 25 bp, Saccharomyces pastorianus
attatcctcttattctctcttgcaa

SEQ ID NO: 144561 - DNA, 25 bp, Saccharomyces pastorianus
gcgcaacgaaacatcattcccggaa

SEQ ID NO: 144562 - DNA, 25 bp, Saccharomyces pastorianus
gattacctgctttaactgttatcct

SEQ ID NO: 144563 - DNA, 25 bp, Saccharomyces pastorianus
gttcctcatttagttgtgggtcata

SEQ ID NO: 144564 - DNA, 25 bp, Saccharomyces pastorianus
tgaacctgttgacctcgctggaatt

SEQ ID NO: 144565 - DNA, 25 bp, Saccharomyces pastorianus
gttgcggaaaaagatgcctccttca

SEQ ID NO: 144566 - DNA, 25 bp, Saccharomyces pastorianus
tacaggatcccttttcggaggtact

SEQ ID NO: 144567 - DNA, 25 bp, Saccharomyces pastorianus
ccaaacgcctcttcgggtggaatat

SEQ ID NO: 144568 - DNA, 25 bp, Saccharomyces pastorianus
gcaaacctgctacaggatccctttt

SEQ ID NO: 144569 - DNA, 25 bp, Saccharomyces pastorianus
aatcctgcctcaactagcggcggat

SEQ ID NO: 144570 - DNA, 25 bp, Saccharomyces pastorianus
agcggcggattatttggtagcaaac

SEQ ID NO: 144571 - DNA, 25 bp, Saccharomyces pastorianus
cgaacactgttggaggcggattatt

SEQ ID NO: 144572 - DNA, 25 bp, Saccharomyces pastorianus
ggtggcctgtttggttcaaaaccat

SEQ ID NO: 144573 - DNA, 25 bp, Saccharomyces pastorianus
ggtaataatacctctcaatctacta

SEQ ID NO: 144574 - DNA, 25 bp, Saccharomyces pastorianus
gaggtactaattccacggctccaaa

SEQ ID NO: 144575 - DNA, 25 bp, Saccharomyces pastorianus
aatcaaaacaatcctgcctcaacta

SEQ ID NO: 144576 - DNA, 25 bp, Saccharomyces pastorianus
taaacagcaacctgcttcgggtggc

SEQ ID NO: 144577 - DNA, 25 bp, Saccharomyces pastorianus
atgttgcatgcgctacgtttgcatt

SEQ ID NO: 144578 - DNA, 25 bp, Saccharomyces pastorianus
tactgcttgcggcactagtttgtgt

SEQ ID NO: 144579 - DNA, 25 bp, Saccharomyces pastorianus
gcatcatatctacgtctttgggcac

SEQ ID NO: 144580 - DNA, 25 bp, Saccharomyces pastorianus
tcatcagtgatgttgccagtgttgc

SEQ ID NO: 144581 - DNA, 25 bp, Saccharomyces pastorianus
aaaaactcagggtcgcctttggctg

SEQ ID NO: 144582 - DNA, 25 bp, Saccharomyces pastorianus
gtgtcccgtggttattgctgtataa

SEQ ID NO: 144583 - DNA, 25 bp, Saccharomyces pastorianus
ggcgcatgcgcaattatctagtgtt

SEQ ID NO: 144584 - DNA, 25 bp, Saccharomyces pastorianus
tggtggcaggcctcacggataccaa

SEQ ID NO: 144585 - DNA, 25 bp, Saccharomyces pastorianus
tttgggcactatcgttggcgcatgc

SEQ ID NO: 144586 - DNA, 25 bp, Saccharomyces pastorianus
gggccatttaatttcggcgatgtca

SEQ ID NO: 144587 - DNA, 25 bp, Saccharomyces pastorianus
aaccgtttgtatcctagttttcatg

SEQ ID NO: 144588 - DNA, 25 bp, Saccharomyces pastorianus
taccatggaaccactatcgttggaa

SEQ ID NO: 144589 - DNA, 25 bp, Saccharomyces pastorianus
tggaagagctacaaaccccgagatt

SEQ ID NO: 144590 - DNA, 25 bp, Saccharomyces pastorianus
gacctcactagaaaccaatcagtcg

SEQ ID NO: 144591 - DNA, 25 bp, Saccharomyces pastorianus
aagcgatgctttttcttttgacgac

SEQ ID NO: 144592 - DNA, 25 bp, Saccharomyces pastorianus
ggcgctctagggaatgacctcacta

SEQ ID NO: 144593 - DNA, 25 bp, Saccharomyces pastorianus
ttttgacgacgaaacaccacaggac

SEQ ID NO: 144594 - DNA, 25 bp, Saccharomyces pastorianus
ttgcccaacccgatatggcggatct

SEQ ID NO: 144595 - DNA, 25 bp, Saccharomyces pastorianus
tactgattgcgaatcccgtgcaagg

SEQ ID NO: 144596 - DNA, 25 bp, Saccharomyces pastorianus
gaaggaaacgacattgcccaacccg

SEQ ID NO: 144597 - DNA, 25 bp, Saccharomyces pastorianus
ggcggatctcatcaataccatggaa

SEQ ID NO: 144598 - DNA, 25 bp, Saccharomyces pastorianus
gacgagtttagaatgacccctgatg

SEQ ID NO: 144599 - DNA, 25 bp, Saccharomyces pastorianus
tatggcgtatcaacttttcactaag

SEQ ID NO: 144600 - DNA, 25 bp, Saccharomyces pastorianus
aatattctctttgtggtggcattcc

SEQ ID NO: 144601 - DNA, 25 bp, Saccharomyces pastorianus
tcaaatcggattcccctgttaattt

SEQ ID NO: 144602 - DNA, 25 bp, Saccharomyces pastorianus
atactcacgttatccagctgcaata

SEQ ID NO: 144603 - DNA, 25 bp, Saccharomyces pastorianus
tactacgacagtttccggattttga

SEQ ID NO: 144604 - DNA, 25 bp, Saccharomyces pastorianus
tcgctaagatccctgctcaaattta

SEQ ID NO: 144605 - DNA, 25 bp, Saccharomyces pastorianus
atgtccttctgaacctatggcgtat

SEQ ID NO: 144606 - DNA, 25 bp, Saccharomyces pastorianus
tgaacgtgttattagctcctctgct

SEQ ID NO: 144607 - DNA, 25 bp, Saccharomyces pastorianus
ctgacgagatcattcggctgggcgt

SEQ ID NO: 144608 - DNA, 25 bp, Saccharomyces pastorianus
tgggcgtcgggttcatcgctaagat

SEQ ID NO: 144609 - DNA, 25 bp, Saccharomyces pastorianus
gaacggcgccaaactactagatatt

SEQ ID NO: 144610 - DNA, 25 bp, Saccharomyces pastorianus
gtaccttgcgctcttgaaactgggc

SEQ ID NO: 144611 - DNA, 25 bp, Saccharomyces pastorianus
gaggcgtctacacaacggtaccttg

SEQ ID NO: 144612 - DNA, 25 bp, Saccharomyces pastorianus
agcgcacgcgatgttacgtgtggac

SEQ ID NO: 144613 - DNA, 25 bp, Saccharomyces pastorianus
aacttcgctacctcatactcagtga

SEQ ID NO: 144614 - DNA, 25 bp, Saccharomyces pastorianus
tggacggtgctctctcaaacttcta

SEQ ID NO: 144615 - DNA, 25 bp, Saccharomyces pastorianus
agatctgatatcaaatcctcccctg

SEQ ID NO: 144616 - DNA, 25 bp, Saccharomyces pastorianus
gataaacagcagcagcgcacgcgat

SEQ ID NO: 144617 - DNA, 25 bp, Saccharomyces pastorianus
gaagggcttcccatatctgaagata

SEQ ID NO: 144618 - DNA, 25 bp, Saccharomyces pastorianus
ctcatactcagtgaagggcttccca

SEQ ID NO: 144619 - DNA, 25 bp, Saccharomyces pastorianus
tgcgctcttgaaactgggcccacct

SEQ ID NO: 144620 - DNA, 25 bp, Saccharomyces pastorianus
caaacttctatggaggcgtctacac

SEQ ID NO: 144621 - DNA, 25 bp, Saccharomyces pastorianus
tcatccggtgtctgtcgtgctttgc

SEQ ID NO: 144622 - DNA, 25 bp, Saccharomyces pastorianus
ggatgccctcatccggtgtctgtcg

SEQ ID NO: 144623 - DNA, 25 bp, Saccharomyces pastorianus
cgtgctttgcttggcaaacacaaca

SEQ ID NO: 144624 - DNA, 25 bp, Saccharomyces pastorianus
ctgtcgtgctttgcttggcaaacac

SEQ ID NO: 144625 - DNA, 25 bp, Saccharomyces pastorianus
gtgtctgtcgtgctttgcttggcaa

SEQ ID NO: 144626 - DNA, 25 bp, Saccharomyces pastorianus
gtctgtcgtgctttgcttggcaaac

SEQ ID NO: 144627 - DNA, 25 bp, Saccharomyces pastorianus
gtcgtgctttgcttggcaaacacaa

SEQ ID NO: 144628 - DNA, 25 bp, Saccharomyces pastorianus
tctgtcgtgctttgcttggcaaaca

SEQ ID NO: 144629 - DNA, 25 bp, Saccharomyces pastorianus
atccggtgtctgtcgtgctttgctt

SEQ ID NO: 144630 - DNA, 25 bp, Saccharomyces pastorianus
tggcaaacacaacaaagaagacaaa

SEQ ID NO: 144631 - DNA, 25 bp, Saccharomyces pastorianus
agaggatgccctcatccggtgtctg

SEQ ID NO: 144632 - DNA, 25 bp, Saccharomyces pastorianus
caattgcaatttatggtatgatgga

SEQ ID NO: 144633 - DNA, 25 bp, Saccharomyces pastorianus
aaaggttattcgagacttgcacgtg

SEQ ID NO: 144634 - DNA, 25 bp, Saccharomyces pastorianus
tggtattatcacaattgcaatttat

SEQ ID NO: 144635 - DNA, 25 bp, Saccharomyces pastorianus
aacgaagatcgtcattccactgaaa

SEQ ID NO: 144636 - DNA, 25 bp, Saccharomyces pastorianus
tcgagacttgcacgtggaccctgaa

SEQ ID NO: 144637 - DNA, 25 bp, Saccharomyces pastorianus
gagcgtgaggtaaacgaagatcgtc

SEQ ID NO: 144638 - DNA, 25 bp, Saccharomyces pastorianus
gctttgccggtattcttggtattat

SEQ ID NO: 144639 - DNA, 25 bp, Saccharomyces pastorianus
gaagtcttgctaaatgaggttgatg

SEQ ID NO: 144640 - DNA, 25 bp, Saccharomyces pastorianus
atggatatggaagatacgaccgaaa

SEQ ID NO: 144641 - DNA, 25 bp, Saccharomyces pastorianus
acattctcctgctttgccggtattc

SEQ ID NO: 144642 - DNA, 25 bp, Saccharomyces pastorianus
acgtggaccctgaagtcttgctaaa

SEQ ID NO: 144643 - DNA, 25 bp, Saccharomyces pastorianus
aatccaatttcgtcatcaggttcaa

SEQ ID NO: 144644 - DNA, 25 bp, Saccharomyces pastorianus
atggcgagccagatcatgtgattac

SEQ ID NO: 144645 - DNA, 25 bp, Saccharomyces pastorianus
cgctttccaaaccatccagagagat

SEQ ID NO: 144646 - DNA, 25 bp, Saccharomyces pastorianus
aggtacccatcctttccatttacat

SEQ ID NO: 144647 - DNA, 25 bp, Saccharomyces pastorianus
atgatgccctaggtgaagttcctca

SEQ ID NO: 144648 - DNA, 25 bp, Saccharomyces pastorianus
ggtgatcaagcaaacaactccgaaa

SEQ ID NO: 144649 - DNA, 25 bp, Saccharomyces pastorianus
tacggttcaaacacgcacactttca

SEQ ID NO: 144650 - DNA, 25 bp, Saccharomyces pastorianus
gttcaaagccgataacccaggtgtt

SEQ ID NO: 144651 - DNA, 25 bp, Saccharomyces pastorianus
ccatttacatggtcacgctttccaa

SEQ ID NO: 144652 - DNA, 25 bp, Saccharomyces pastorianus
tgcgctgcccacacaaaattacgtg

SEQ ID NO: 144653 - DNA, 25 bp, Saccharomyces pastorianus
agttcctactttgatgaccgttttg

SEQ ID NO: 144654 - DNA, 25 bp, Saccharomyces pastorianus
tttgcttttctcgatgctctcgcta

SEQ ID NO: 144655 - DNA, 25 bp, Saccharomyces pastorianus
gcacacgtttaattggaccactggc

SEQ ID NO: 144656 - DNA, 25 bp, Saccharomyces pastorianus
taacactttgctctctatagccgtt

SEQ ID NO: 144657 - DNA, 25 bp, Saccharomyces pastorianus
atgactaacactttgctctctatag

SEQ ID NO: 144658 - DNA, 25 bp, Saccharomyces pastorianus
atagccgttttgcttttctcgatgc

SEQ ID NO: 144659 - DNA, 25 bp, Saccharomyces pastorianus
aattggaccactggctgggactaca

SEQ ID NO: 144660 - DNA, 25 bp, Saccharomyces pastorianus
actttgctctctatagccgttttgc

SEQ ID NO: 144661 - DNA, 25 bp, Saccharomyces pastorianus
gatgctctcgctagcacaagcggag

SEQ ID NO: 144662 - DNA, 25 bp, Saccharomyces pastorianus
tctatagccgttttgcttttctcga

SEQ ID NO: 144663 - DNA, 25 bp, Saccharomyces pastorianus
gcacaagcggagacgcacacgttta

SEQ ID NO: 144664 - DNA, 25 bp, Saccharomyces pastorianus
gacgcacacgtttaattggaccact

SEQ ID NO: 144665 - DNA, 25 bp, Saccharomyces pastorianus
gatgacttcgtccatagaccaagta

SEQ ID NO: 144666 - DNA, 25 bp, Saccharomyces pastorianus
ggagcaaagagatcctcaatttaga

SEQ ID NO: 144667 - DNA, 25 bp, Saccharomyces pastorianus
ttagagagcaaggaaacgttgtgat

SEQ ID NO: 144668 - DNA, 25 bp, Saccharomyces pastorianus
tgatgacttcgtccatagaccaagt

SEQ ID NO: 144669 - DNA, 25 bp, Saccharomyces pastorianus
aaattgatgacttcgtccatagacc

SEQ ID NO: 144670 - DNA, 25 bp, Saccharomyces pastorianus
gaacaaaattgatgacttcgtccat

SEQ ID NO: 144671 - DNA, 25 bp, Saccharomyces pastorianus
attgatgacttcgtccatagaccaa

SEQ ID NO: 144672 - DNA, 25 bp, Saccharomyces pastorianus
tcgtccatagaccaagtaataactt

SEQ ID NO: 144673 - DNA, 25 bp, Saccharomyces pastorianus
gacttcgtccatagaccaagtaata

SEQ ID NO: 144674 - DNA, 25 bp, Saccharomyces pastorianus
gagatcctcaatttagagagcaagg

SEQ ID NO: 144675 - DNA, 25 bp, Saccharomyces pastorianus
taacttggagcaaagagatcctcaa

SEQ ID NO: 144676 - DNA, 25 bp, Saccharomyces pastorianus
cgtgaacatcgtacaattcttacat

SEQ ID NO: 144677 - DNA, 25 bp, Saccharomyces pastorianus
gaaagtatctggttacgtgaacatc

SEQ ID NO: 144678 - DNA, 25 bp, Saccharomyces pastorianus
caaagagtatggttgcgggattgca

SEQ ID NO: 144679 - DNA, 25 bp, Saccharomyces pastorianus
gaagcatcgttgatttcagtggaca

SEQ ID NO: 144680 - DNA, 25 bp, Saccharomyces pastorianus
gcgggattgcagatcgtattctcaa

SEQ ID NO: 144681 - DNA, 25 bp, Saccharomyces pastorianus
ctaccagctctttttgaacaccaaa

SEQ ID NO: 144682 - DNA, 25 bp, Saccharomyces pastorianus
tcagtggacagcattgcgcttgtat

SEQ ID NO: 144683 - DNA, 25 bp, Saccharomyces pastorianus
tagactaacggactaccagctcttt

SEQ ID NO: 144684 - DNA, 25 bp, Saccharomyces pastorianus
acaatacagacctatcatcagatgg

SEQ ID NO: 144685 - DNA, 25 bp, Saccharomyces pastorianus
gatcgccttttagagtattccctat

SEQ ID NO: 144686 - DNA, 25 bp, Saccharomyces pastorianus
cagcattgcgcttgtatggtttatc

SEQ ID NO: 144687 - DNA, 25 bp, Saccharomyces pastorianus
gaaccggtgatcaggcagcacaatt

SEQ ID NO: 144688 - DNA, 25 bp, Saccharomyces pastorianus
aatattgtgcgcgatcgggtatgca

SEQ ID NO: 144689 - DNA, 25 bp, Saccharomyces pastorianus
gaagatgctgactttcgctactacc

SEQ ID NO: 144690 - DNA, 25 bp, Saccharomyces pastorianus
atgctttgcattttgaagacgccaa

SEQ ID NO: 144691 - DNA, 25 bp, Saccharomyces pastorianus
aggtcacagaatttgctcagcgctt

SEQ ID NO: 144692 - DNA, 25 bp, Saccharomyces pastorianus
ggtcaaaaccgcactatatgggcaa

SEQ ID NO: 144693 - DNA, 25 bp, Saccharomyces pastorianus
agcttgtcgctaatggtgtgccaca

SEQ ID NO: 144694 - DNA, 25 bp, Saccharomyces pastorianus
tgttggccaacggtgctattgacac

SEQ ID NO: 144695 - DNA, 25 bp, Saccharomyces pastorianus
tgtctgtcgacttgggaaccggtga

SEQ ID NO: 144696 - DNA, 25 bp, Saccharomyces pastorianus
gacacaatttgcatgttggccaacg

SEQ ID NO: 144697 - DNA, 25 bp, Saccharomyces pastorianus
cttggcccagttagtcgttcgcgat

SEQ ID NO: 144698 - DNA, 25 bp, Saccharomyces pastorianus
ggagcctggacctgggtgtaatctt

SEQ ID NO: 144699 - DNA, 25 bp, Saccharomyces pastorianus
gtaggctacactgcatctggagtca

SEQ ID NO: 144700 - DNA, 25 bp, Saccharomyces pastorianus
aagtccttgaaactgctcgtggtaa

SEQ ID NO: 144701 - DNA, 25 bp, Saccharomyces pastorianus
atcatcaacattgcttcaacgctcg

SEQ ID NO: 144702 - DNA, 25 bp, Saccharomyces pastorianus
aagtatgcattatacgtgcccaaga

SEQ ID NO: 144703 - DNA, 25 bp, Saccharomyces pastorianus
agctgcgccagtttggacatcgaaa

SEQ ID NO: 144704 - DNA, 25 bp, Saccharomyces pastorianus
tcaacgctcgaagcagcttatagat

SEQ ID NO: 144705 - DNA, 25 bp, Saccharomyces pastorianus
aataaattcaaagctgcgccagttt

SEQ ID NO: 144706 - DNA, 25 bp, Saccharomyces pastorianus
ataccaataaatctcgtccttcaac

SEQ ID NO: 144707 - DNA, 25 bp, Saccharomyces pastorianus
atacgtgcccaagacgggctctttt

SEQ ID NO: 144708 - DNA, 25 bp, Saccharomyces pastorianus
cagcagctgttttcacgaccaataa

SEQ ID NO: 144709 - DNA, 25 bp, Saccharomyces pastorianus
ggtctgtgtattgccattattatca

SEQ ID NO: 144710 - DNA, 25 bp, Saccharomyces pastorianus
tgagtcttcattatccacctcaaac

SEQ ID NO: 144711 - DNA, 25 bp, Saccharomyces pastorianus
gagatcatcaatccgctacttgaat

SEQ ID NO: 144712 - DNA, 25 bp, Saccharomyces pastorianus
caacaggtgagctctgagtcttcat

SEQ ID NO: 144713 - DNA, 25 bp, Saccharomyces pastorianus
gaaaccgctgtaccacaagatttgg

SEQ ID NO: 144714 - DNA, 25 bp, Saccharomyces pastorianus
gaaggcacaaaatacgccctcattt

SEQ ID NO: 144715 - DNA, 25 bp, Saccharomyces pastorianus
cgtcgcatcataacgaaaccgctgt

SEQ ID NO: 144716 - DNA, 25 bp, Saccharomyces pastorianus
ttgccgattttacaaccgtcgcatc

SEQ ID NO: 144717 - DNA, 25 bp, Saccharomyces pastorianus
taaagattcacccaacttgtcaccc

SEQ ID NO: 144718 - DNA, 25 bp, Saccharomyces pastorianus
gtcacccaagagtactgttccaaat

SEQ ID NO: 144719 - DNA, 25 bp, Saccharomyces pastorianus
gaggttatcccaaatgctgtttttt

SEQ ID NO: 144720 - DNA, 25 bp, Saccharomyces pastorianus
gcagcaacagctcccgaaaatgaag

SEQ ID NO: 144721 - DNA, 25 bp, Saccharomyces pastorianus
aagacattttctatgcccttggtgc

SEQ ID NO: 144722 - DNA, 25 bp, Saccharomyces pastorianus
atgccaattttgtgagaagtctttc

SEQ ID NO: 144723 - DNA, 25 bp, Saccharomyces pastorianus
aatctcaatattaacccggcacaac

SEQ ID NO: 144724 - DNA, 25 bp, Saccharomyces pastorianus
gaaccctgtggcctcgaactcggtt

SEQ ID NO: 144725 - DNA, 25 bp, Saccharomyces pastorianus
aacaattcttcctcctctaataata

SEQ ID NO: 144726 - DNA, 25 bp, Saccharomyces pastorianus
aataaacactatgccgcaaccacgt

SEQ ID NO: 144727 - DNA, 25 bp, Saccharomyces pastorianus
gaaaaggcacctattgtcacactcg

SEQ ID NO: 144728 - DNA, 25 bp, Saccharomyces pastorianus
ataacagcaatagcgctagcggcag

SEQ ID NO: 144729 - DNA, 25 bp, Saccharomyces pastorianus
tgccccatcatcagaccataaatat

SEQ ID NO: 144730 - DNA, 25 bp, Saccharomyces pastorianus
gcccttggtgcttaagcaggcagaa

SEQ ID NO: 144731 - DNA, 25 bp, Saccharomyces pastorianus
gcggaccatcacctgcaacagcagc

SEQ ID NO: 144732 - DNA, 25 bp, Saccharomyces pastorianus
catcacctgcaacagcagcagcaac

SEQ ID NO: 144733 - DNA, 25 bp, Saccharomyces pastorianus
tgcggaccatcacctgcaacagcag

SEQ ID NO: 144734 - DNA, 25 bp, Saccharomyces pastorianus
accatcacctgcaacagcagcagca

SEQ ID NO: 144735 - DNA, 25 bp, Saccharomyces pastorianus
ggaccatcacctgcaacagcagcag

SEQ ID NO: 144736 - DNA, 25 bp, Saccharomyces pastorianus
ccatcacctgcaacagcagcagcaa

SEQ ID NO: 144737 - DNA, 25 bp, Saccharomyces pastorianus
aatgcggaccatcacctgcaacagc

SEQ ID NO: 144738 - DNA, 25 bp, Saccharomyces pastorianus
atgcggaccatcacctgcaacagca

SEQ ID NO: 144739 - DNA, 25 bp, Saccharomyces pastorianus
gcagcagcaacagcgacaacagcat

SEQ ID NO: 144740 - DNA, 25 bp, Saccharomyces pastorianus
gaccatcacctgcaacagcagcagc

SEQ ID NO: 144741 - DNA, 25 bp, Saccharomyces pastorianus
cggaccatcacctgcaacagcagca

SEQ ID NO: 144742 - DNA, 25 bp, Saccharomyces pastorianus
tatcctcgctattgccattttggga

SEQ ID NO: 144743 - DNA, 25 bp, Saccharomyces pastorianus
gactacgttagtcagttctttcaaa

SEQ ID NO: 144744 - DNA, 25 bp, Saccharomyces pastorianus
aagttattgcttttggaagccgatt

SEQ ID NO: 144745 - DNA, 25 bp, Saccharomyces pastorianus
gtctttgaccatattatcctcgcta

SEQ ID NO: 144746 - DNA, 25 bp, Saccharomyces pastorianus
gttcgttcgacacgactacgttagt

SEQ ID NO: 144747 - DNA, 25 bp, Saccharomyces pastorianus
actactcttgtcgttgttgctaact

SEQ ID NO: 144748 - DNA, 25 bp, Saccharomyces pastorianus
gttctttcaaatcccataattttct

SEQ ID NO: 144749 - DNA, 25 bp, Saccharomyces pastorianus
tatagaatctagttcgttcgacacg

SEQ ID NO: 144750 - DNA, 25 bp, Saccharomyces pastorianus
ggtttggattcgataatcttcttta

SEQ ID NO: 144751 - DNA, 25 bp, Saccharomyces pastorianus
ttaacgaggctatgtctttgaccat

SEQ ID NO: 144752 - DNA, 25 bp, Saccharomyces pastorianus
agccgatttattgttactactcttg

SEQ ID NO: 144753 - DNA, 25 bp, Saccharomyces pastorianus
aaattttacatcatcaacgcgccat

SEQ ID NO: 144754 - DNA, 25 bp, Saccharomyces pastorianus
gttcaatacagattacctgcctgtt

SEQ ID NO: 144755 - DNA, 25 bp, Saccharomyces pastorianus
atcaacgcgccattcggtttctcta

SEQ ID NO: 144756 - DNA, 25 bp, Saccharomyces pastorianus
aaaccgataaagatggccgcccagt

SEQ ID NO: 144757 - DNA, 25 bp, Saccharomyces pastorianus
ttatgtcatatgttagggaagcctc

SEQ ID NO: 144758 - DNA, 25 bp, Saccharomyces pastorianus
aaacctttcttggatccagtcactg

SEQ ID NO: 144759 - DNA, 25 bp, Saccharomyces pastorianus
ctctaccgcatttaggctatttaaa

SEQ ID NO: 144760 - DNA, 25 bp, Saccharomyces pastorianus
gattgccaaattctacccacaatat

SEQ ID NO: 144761 - DNA, 25 bp, Saccharomyces pastorianus
tctccatatctagtgcatacagtgt

SEQ ID NO: 144762 - DNA, 25 bp, Saccharomyces pastorianus
agagctgctggtcacctagtggaaa

SEQ ID NO: 144763 - DNA, 25 bp, Saccharomyces pastorianus
gaatccaagggtgggttatacctat

SEQ ID NO: 144764 - DNA, 25 bp, Saccharomyces pastorianus
gggtctaacccgtgccaaatatggt

SEQ ID NO: 144765 - DNA, 25 bp, Saccharomyces pastorianus
ggaaccatctgttaatccacttcag

SEQ ID NO: 144766 - DNA, 25 bp, Saccharomyces pastorianus
gactgaacggccaatgaacgctcaa

SEQ ID NO: 144767 - DNA, 25 bp, Saccharomyces pastorianus
tcttggtaatcctagatctttggca

SEQ ID NO: 144768 - DNA, 25 bp, Saccharomyces pastorianus
gaggaggcttctcatttgaactcta

SEQ ID NO: 144769 - DNA, 25 bp, Saccharomyces pastorianus
caggccattggtttcttacgtgatc

SEQ ID NO: 144770 - DNA, 25 bp, Saccharomyces pastorianus
tgttcaattagttcgtcctcagcca

SEQ ID NO: 144771 - DNA, 25 bp, Saccharomyces pastorianus
gaagttccaggattttgatgcacag

SEQ ID NO: 144772 - DNA, 25 bp, Saccharomyces pastorianus
aatgggtgactttccgaagttccag

SEQ ID NO: 144773 - DNA, 25 bp, Saccharomyces pastorianus
tgatcctcgtcgtctaaacgtgggt

SEQ ID NO: 144774 - DNA, 25 bp, Saccharomyces pastorianus
gtatggtgtcattcagtggtcaaat

SEQ ID NO: 144775 - DNA, 25 bp, Saccharomyces pastorianus
gtcatgtattacaacgtccgttatc

SEQ ID NO: 144776 - DNA, 25 bp, Saccharomyces pastorianus
tagcttccaggacacattcacatta

SEQ ID NO: 144777 - DNA, 25 bp, Saccharomyces pastorianus
atctttaattcaaggcccaccaggc

SEQ ID NO: 144778 - DNA, 25 bp, Saccharomyces pastorianus
gcatctttcactttatctactttcg

SEQ ID NO: 144779 - DNA, 25 bp, Saccharomyces pastorianus
tatttctgtttcatggtccttagct

SEQ ID NO: 144780 - DNA, 25 bp, Saccharomyces pastorianus
ttcatttgatgtcccattacctaag

SEQ ID NO: 144781 - DNA, 25 bp, Saccharomyces pastorianus
aattaaactcatcccagtcgaacgc

SEQ ID NO: 144782 - DNA, 25 bp, Saccharomyces pastorianus
agtcgaacgctgttagtcatgtatt

SEQ ID NO: 144783 - DNA, 25 bp, Saccharomyces pastorianus
aggtacctcttatgacaggatgcaa

SEQ ID NO: 144784 - DNA, 25 bp, Saccharomyces pastorianus
ctccaacacatttgaccactggttt

SEQ ID NO: 144785 - DNA, 25 bp, Saccharomyces pastorianus
tgttcggttaccaaatagcttccag

SEQ ID NO: 144786 - DNA, 25 bp, Saccharomyces pastorianus
tgaaagctggtgactgggttgccat

SEQ ID NO: 144787 - DNA, 25 bp, Saccharomyces pastorianus
aagccgctatttctctatctacgga

SEQ ID NO: 144788 - DNA, 25 bp, Saccharomyces pastorianus
gacttggccgaagtagccccaatat

SEQ ID NO: 144789 - DNA, 25 bp, Saccharomyces pastorianus
tggcttgggttccttggccgttcaa

SEQ ID NO: 144790 - DNA, 25 bp, Saccharomyces pastorianus
ttggtttgcccgctaacgcctacgt

SEQ ID NO: 144791 - DNA, 25 bp, Saccharomyces pastorianus
agaccatgtggtaccgtcgttttgg

SEQ ID NO: 144792 - DNA, 25 bp, Saccharomyces pastorianus
gtattctctcatgtggtgaagtcca

SEQ ID NO: 144793 - DNA, 25 bp, Saccharomyces pastorianus
ggtgaagtccatcaatatcaagggt

SEQ ID NO: 144794 - DNA, 25 bp, Saccharomyces pastorianus
aacgcctacgttaaatcagaggtat

SEQ ID NO: 144795 - DNA, 25 bp, Saccharomyces pastorianus
gtagccccaatattatgtgctggtg

SEQ ID NO: 144796 - DNA, 25 bp, Saccharomyces pastorianus
ggccgttcaatatgcaactgcgatg

SEQ ID NO: 144797 - DNA, 25 bp, Saccharomyces pastorianus
caagccttaactatagtcccaagcc

SEQ ID NO: 144798 - DNA, 25 bp, Saccharomyces pastorianus
gagtcttagctgtggcatctgataa

SEQ ID NO: 144799 - DNA, 25 bp, Saccharomyces pastorianus
tatacttctcaatacatcgctttag

SEQ ID NO: 144800 - DNA, 25 bp, Saccharomyces pastorianus
aaggatgctttttcgcccaaaatcg

SEQ ID NO: 144801 - DNA, 25 bp, Saccharomyces pastorianus
gataatccgccaattatcgcctttg

SEQ ID NO: 144802 - DNA, 25 bp, Saccharomyces pastorianus
atcgctttagtcatgattgccctat

SEQ ID NO: 144803 - DNA, 25 bp, Saccharomyces pastorianus
gattgccctatggatgtcggaagat

SEQ ID NO: 144804 - DNA, 25 bp, Saccharomyces pastorianus
gaaagtattcttaccgacgagctag

SEQ ID NO: 144805 - DNA, 25 bp, Saccharomyces pastorianus
aaatcgcgtcttgcattgaccaaat

SEQ ID NO: 144806 - DNA, 25 bp, Saccharomyces pastorianus
tgaggtaccccaaaccgtagattgt

SEQ ID NO: 144807 - DNA, 25 bp, Saccharomyces pastorianus
tctgctttggaaggcgcctcgaaga

SEQ ID NO: 144808 - DNA, 25 bp, Saccharomyces pastorianus
gaacggcgaaaacaggctcccacaa

SEQ ID NO: 144809 - DNA, 25 bp, Saccharomyces pastorianus
caagcacaggaagtcagcgttacaa

SEQ ID NO: 144810 - DNA, 25 bp, Saccharomyces pastorianus
aataatgtggtttcccctggagtct

SEQ ID NO: 144811 - DNA, 25 bp, Saccharomyces pastorianus
agatgagtcccaatttttcaaccaa

SEQ ID NO: 144812 - DNA, 25 bp, Saccharomyces pastorianus
aagtcctaatcatactaccaccgat

SEQ ID NO: 144813 - DNA, 25 bp, Saccharomyces pastorianus
caccgatcctgccattacaagtaaa

SEQ ID NO: 144814 - DNA, 25 bp, Saccharomyces pastorianus
gaccaataggttacgcttctctagt

SEQ ID NO: 144815 - DNA, 25 bp, Saccharomyces pastorianus
caagatttgcggattcagactcaga

SEQ ID NO: 144816 - DNA, 25 bp, Saccharomyces pastorianus
attcaaacccttcgatgaccaatag

SEQ ID NO: 144817 - DNA, 25 bp, Saccharomyces pastorianus
aattcagcgggttatctttaagagc

SEQ ID NO: 144818 - DNA, 25 bp, Saccharomyces pastorianus
taacggtgctttttcgcttttcaag

SEQ ID NO: 144819 - DNA, 25 bp, Saccharomyces pastorianus
gagaatgacacaacatcgtctccca

SEQ ID NO: 144820 - DNA, 25 bp, Saccharomyces pastorianus
aaaataaccgtcaagcatctactct

SEQ ID NO: 144821 - DNA, 25 bp, Saccharomyces pastorianus
gttcctctcattgaaacacaagttc

SEQ ID NO: 144822 - DNA, 25 bp, Saccharomyces pastorianus
agtagcagaacatcctcttccggag

SEQ ID NO: 144823 - DNA, 25 bp, Saccharomyces pastorianus
gaaaaaccttcttcactaaacattg

SEQ ID NO: 144824 - DNA, 25 bp, Saccharomyces pastorianus
ttccggaggccgaagtggatgacaa

SEQ ID NO: 144825 - DNA, 25 bp, Saccharomyces pastorianus
tctaactcttccgaatccgaaacag

SEQ ID NO: 144826 - DNA, 25 bp, Saccharomyces pastorianus
agaccttgatgaaaaatcccgctca

SEQ ID NO: 144827 - DNA, 25 bp, Saccharomyces pastorianus
attcggcccaaggatcagttgaaaa

SEQ ID NO: 144828 - DNA, 25 bp, Saccharomyces pastorianus
tagcggcagttattcggcccaagga

SEQ ID NO: 144829 - DNA, 25 bp, Saccharomyces pastorianus
gaacaacatttcttctagcggcagt

SEQ ID NO: 144830 - DNA, 25 bp, Saccharomyces pastorianus
gagtccctatttctttctaccaaag

SEQ ID NO: 144831 - DNA, 25 bp, Saccharomyces pastorianus
gttacagtgcatggaagccatcgtt

SEQ ID NO: 144832 - DNA, 25 bp, Saccharomyces pastorianus
aacttgtacaaggagagaatttctg

SEQ ID NO: 144833 - DNA, 25 bp, Saccharomyces pastorianus
tggaagccatcgttcagaagttgaa

SEQ ID NO: 144834 - DNA, 25 bp, Saccharomyces pastorianus
aaaatcctttatatgttacagtgca

SEQ ID NO: 144835 - DNA, 25 bp, Saccharomyces pastorianus
ggagatttcttgattattcattatt

SEQ ID NO: 144836 - DNA, 25 bp, Saccharomyces pastorianus
ttcagaagttgaacgagcacgaaaa

SEQ ID NO: 144837 - DNA, 25 bp, Saccharomyces pastorianus
gcatggaagccatcgttcagaagtt

SEQ ID NO: 144838 - DNA, 25 bp, Saccharomyces pastorianus
gaatttctgccgagagtccctattt

SEQ ID NO: 144839 - DNA, 25 bp, Saccharomyces pastorianus
tgccgagagtccctatttctttcta

SEQ ID NO: 144840 - DNA, 25 bp, Saccharomyces pastorianus
gagagaatttctgccgagagtccct

SEQ ID NO: 144841 - DNA, 25 bp, Saccharomyces pastorianus
accgatgattattatgcttctgaac

SEQ ID NO: 144842 - DNA, 25 bp, Saccharomyces pastorianus
gaaaacttgctggtgatcctattga

SEQ ID NO: 144843 - DNA, 25 bp, Saccharomyces pastorianus
atgatgtatcctgcttccgagaatg

SEQ ID NO: 144844 - DNA, 25 bp, Saccharomyces pastorianus
agggccttagaaaccatgatgtatc

SEQ ID NO: 144845 - DNA, 25 bp, Saccharomyces pastorianus
gaattctttgaacacaggccacatg

SEQ ID NO: 144846 - DNA, 25 bp, Saccharomyces pastorianus
gaagacgttttaagggctatcaccg

SEQ ID NO: 144847 - DNA, 25 bp, Saccharomyces pastorianus
tggtgctaaaatcattcgtggcggc

SEQ ID NO: 144848 - DNA, 25 bp, Saccharomyces pastorianus
aattggctctatcagcattctgctg

SEQ ID NO: 144849 - DNA, 25 bp, Saccharomyces pastorianus
gaatccacacagtcaaccactgttt

SEQ ID NO: 144850 - DNA, 25 bp, Saccharomyces pastorianus
cagcattctgctgcgtgtagtagat

SEQ ID NO: 144851 - DNA, 25 bp, Saccharomyces pastorianus
atagtcccagcgacacaagcattgt

SEQ ID NO: 144852 - DNA, 25 bp, Saccharomyces pastorianus
gattcagagggaggtctagcttccg

SEQ ID NO: 144853 - DNA, 25 bp, Saccharomyces pastorianus
aattatgcaattgatactgaggatt

SEQ ID NO: 144854 - DNA, 25 bp, Saccharomyces pastorianus
ggaggtctagcttccgaagttgaac

SEQ ID NO: 144855 - DNA, 25 bp, Saccharomyces pastorianus
cagagggaggtctagcttccgaagt

SEQ ID NO: 144856 - DNA, 25 bp, Saccharomyces pastorianus
gcaattgatactgaggatttagata

SEQ ID NO: 144857 - DNA, 25 bp, Saccharomyces pastorianus
ttcagagggaggtctagcttccgaa

SEQ ID NO: 144858 - DNA, 25 bp, Saccharomyces pastorianus
gggaggtctagcttccgaagttgaa

SEQ ID NO: 144859 - DNA, 25 bp, Saccharomyces pastorianus
agagggaggtctagcttccgaagtt

SEQ ID NO: 144860 - DNA, 25 bp, Saccharomyces pastorianus
tagcttccgaagttgaacatgagaa

SEQ ID NO: 144861 - DNA, 25 bp, Saccharomyces pastorianus
attcagagggaggtctagcttccga

SEQ ID NO: 144862 - DNA, 25 bp, Saccharomyces pastorianus
gaagcggtcaagatctactagcaac

SEQ ID NO: 144863 - DNA, 25 bp, Saccharomyces pastorianus
tttttaatttacgacacacaagaat

SEQ ID NO: 144864 - DNA, 25 bp, Saccharomyces pastorianus
gtttttaacaatatcatcgtaccta

SEQ ID NO: 144865 - DNA, 25 bp, Saccharomyces pastorianus
cttcgatgtcaagcaatagtttggc

SEQ ID NO: 144866 - DNA, 25 bp, Saccharomyces pastorianus
atcatcgtacctagagcattgttcg

SEQ ID NO: 144867 - DNA, 25 bp, Saccharomyces pastorianus
gctatcttttcggactttgaaccat

SEQ ID NO: 144868 - DNA, 25 bp, Saccharomyces pastorianus
aatcaagtggtggaacatcgaggaa

SEQ ID NO: 144869 - DNA, 25 bp, Saccharomyces pastorianus
gtacctagagcattgttcgatagta

SEQ ID NO: 144870 - DNA, 25 bp, Saccharomyces pastorianus
gagaacttttaaatcgttgtacata

SEQ ID NO: 144871 - DNA, 25 bp, Saccharomyces pastorianus
aataacataccttcgatgtcaagca

SEQ ID NO: 144872 - DNA, 25 bp, Saccharomyces pastorianus
atagtttggctatcttttcggactt

SEQ ID NO: 144873 - DNA, 25 bp, Saccharomyces pastorianus
ggactttgaaccatatcaagctaca

SEQ ID NO: 144874 - DNA, 25 bp, Saccharomyces pastorianus
aattctgacgaaaactcctcaccta

SEQ ID NO: 144875 - DNA, 25 bp, Saccharomyces pastorianus
gagcctgcggaagatcactgtgaga

SEQ ID NO: 144876 - DNA, 25 bp, Saccharomyces pastorianus
gacgagcttgacttacttaatgtaa

SEQ ID NO: 144877 - DNA, 25 bp, Saccharomyces pastorianus
cagtgttgcttttgacgagcttgac

SEQ ID NO: 144878 - DNA, 25 bp, Saccharomyces pastorianus
atggacgtaccttgataatgaactt

SEQ ID NO: 144879 - DNA, 25 bp, Saccharomyces pastorianus
tatggaatccatgaagagcctgcgg

SEQ ID NO: 144880 - DNA, 25 bp, Saccharomyces pastorianus
ctcacctagctccacaattaaaaac

SEQ ID NO: 144881 - DNA, 25 bp, Saccharomyces pastorianus
ataatgaacttcgactggcctactt

SEQ ID NO: 144882 - DNA, 25 bp, Saccharomyces pastorianus
atgggttcagagacaatcctggtaa

SEQ ID NO: 144883 - DNA, 25 bp, Saccharomyces pastorianus
aaaccatctttatgacggaacgctt

SEQ ID NO: 144884 - DNA, 25 bp, Saccharomyces pastorianus
gggagcaacgcacaaccaactaaca

SEQ ID NO: 144885 - DNA, 25 bp, Saccharomyces pastorianus
tttccagaaccggactagctgactt

SEQ ID NO: 144886 - DNA, 25 bp, Saccharomyces pastorianus
acgcctatcacgcatgaatcaaatt

SEQ ID NO: 144887 - DNA, 25 bp, Saccharomyces pastorianus
tagagtagcttacatcgacctgaat

SEQ ID NO: 144888 - DNA, 25 bp, Saccharomyces pastorianus
accggactagctgactttacaagat

SEQ ID NO: 144889 - DNA, 25 bp, Saccharomyces pastorianus
agaaccggactagctgactttacaa

SEQ ID NO: 144890 - DNA, 25 bp, Saccharomyces pastorianus
acgtagagtagcttacatcgacctg

SEQ ID NO: 144891 - DNA, 25 bp, Saccharomyces pastorianus
agctgactttacaagatgggacaac

SEQ ID NO: 144892 - DNA, 25 bp, Saccharomyces pastorianus
gaatcaaatttccagaaccggacta

SEQ ID NO: 144893 - DNA, 25 bp, Saccharomyces pastorianus
aaaatacgcctatcacgcatgaatc

SEQ ID NO: 144894 - DNA, 25 bp, Saccharomyces pastorianus
gatgggacaacttgcaaaagcttgt

SEQ ID NO: 144895 - DNA, 25 bp, Saccharomyces pastorianus
gcaaaagcttgtattacgtagagta

SEQ ID NO: 144896 - DNA, 25 bp, Saccharomyces pastorianus
caggatggagacgatttcactttat

SEQ ID NO: 144897 - DNA, 25 bp, Saccharomyces pastorianus
gaggctctcagactatatgctatgg

SEQ ID NO: 144898 - DNA, 25 bp, Saccharomyces pastorianus
ggtgatcaatctttactatctccag

SEQ ID NO: 144899 - DNA, 25 bp, Saccharomyces pastorianus
gtacatgggtttccattccaataaa

SEQ ID NO: 144900 - DNA, 25 bp, Saccharomyces pastorianus
aacaagtgggcataggaggctctca

SEQ ID NO: 144901 - DNA, 25 bp, Saccharomyces pastorianus
cgttgtggccaaattttagcttctt

SEQ ID NO: 144902 - DNA, 25 bp, Saccharomyces pastorianus
atatgttttccttacacttcaagaa

SEQ ID NO: 144903 - DNA, 25 bp, Saccharomyces pastorianus
gtacctgatgattctcaaatggtcc

SEQ ID NO: 144904 - DNA, 25 bp, Saccharomyces pastorianus
atgttacatactattcgtgattcag

SEQ ID NO: 144905 - DNA, 25 bp, Saccharomyces pastorianus
gagccaaggactataaggatccctt

SEQ ID NO: 144906 - DNA, 25 bp, Saccharomyces pastorianus
agcttctttgctatgtacctgatga

SEQ ID NO: 144907 - DNA, 25 bp, Saccharomyces pastorianus
caaagaacagatgtgcttcgcagtg

SEQ ID NO: 144908 - DNA, 25 bp, Saccharomyces pastorianus
gtagaaaccaaagaacagatgtgct

SEQ ID NO: 144909 - DNA, 25 bp, Saccharomyces pastorianus
attcagattcagtttgtagccctaa

SEQ ID NO: 144910 - DNA, 25 bp, Saccharomyces pastorianus
gtgcttcgcagtgaaaagtatattt

SEQ ID NO: 144911 - DNA, 25 bp, Saccharomyces pastorianus
tcagattcagtttgtagccctaaaa

SEQ ID NO: 144912 - DNA, 25 bp, Saccharomyces pastorianus
cagagagtatttgagtgggttatgt

SEQ ID NO: 144913 - DNA, 25 bp, Saccharomyces pastorianus
gagtgggttatgtcattaagcttgt

SEQ ID NO: 144914 - DNA, 25 bp, Saccharomyces pastorianus
ggttatgtcattaagcttgttttca

SEQ ID NO: 144915 - DNA, 25 bp, Saccharomyces pastorianus
gattcagtttgtagccctaaaaagg

SEQ ID NO: 144916 - DNA, 25 bp, Saccharomyces pastorianus
gaacagatgtgcttcgcagtgaaaa

SEQ ID NO: 144917 - DNA, 25 bp, Saccharomyces pastorianus
gatgtgcttcgcagtgaaaagtata

SEQ ID NO: 144918 - DNA, 25 bp, Saccharomyces pastorianus
gagaacgttcctgttatgtacaaga

SEQ ID NO: 144919 - DNA, 25 bp, Saccharomyces pastorianus
cactgtgtgattttgggctttgcaa

SEQ ID NO: 144920 - DNA, 25 bp, Saccharomyces pastorianus
gacccaagcagaagactcggcgtta

SEQ ID NO: 144921 - DNA, 25 bp, Saccharomyces pastorianus
gtggtactcccgaatatttggcacc

SEQ ID NO: 144922 - DNA, 25 bp, Saccharomyces pastorianus
gaaaattctgcagcaaccgctacta

SEQ ID NO: 144923 - DNA, 25 bp, Saccharomyces pastorianus
gaccctgcggctaaagacctattaa

SEQ ID NO: 144924 - DNA, 25 bp, Saccharomyces pastorianus
gcaaccgctactatttcctgatgga

SEQ ID NO: 144925 - DNA, 25 bp, Saccharomyces pastorianus
tttcctgatggatttgaccctgcgg

SEQ ID NO: 144926 - DNA, 25 bp, Saccharomyces pastorianus
ttgaagggctatattccgccttaca

SEQ ID NO: 144927 - DNA, 25 bp, Saccharomyces pastorianus
acagggctgccaccatactatgatg

SEQ ID NO: 144928 - DNA, 25 bp, Saccharomyces pastorianus
gacctattaattggcctcttaagca

SEQ ID NO: 144929 - DNA, 25 bp, Saccharomyces pastorianus
atgtctttgcaaggattccatccct

SEQ ID NO: 144930 - DNA, 25 bp, Saccharomyces pastorianus
attccttcctctatattgttacctg

SEQ ID NO: 144931 - DNA, 25 bp, Saccharomyces pastorianus
ttcatcatccaatgacgcttccgaa

SEQ ID NO: 144932 - DNA, 25 bp, Saccharomyces pastorianus
tttaccctctaaaaactggcaacag

SEQ ID NO: 144933 - DNA, 25 bp, Saccharomyces pastorianus
tttgccactaaattcattccttcct

SEQ ID NO: 144934 - DNA, 25 bp, Saccharomyces pastorianus
aggatatccatttggactccttcca

SEQ ID NO: 144935 - DNA, 25 bp, Saccharomyces pastorianus
aaatcgattctgcagcccaaataag

SEQ ID NO: 144936 - DNA, 25 bp, Saccharomyces pastorianus
taagttccggcatccttacttcatc

SEQ ID NO: 144937 - DNA, 25 bp, Saccharomyces pastorianus
taatgcggcagctaccacgatacaa

SEQ ID NO: 144938 - DNA, 25 bp, Saccharomyces pastorianus
gacgcttccgaagttgcagccataa

SEQ ID NO: 144939 - DNA, 25 bp, Saccharomyces pastorianus
tcacgcggactacaaaccttctaag

SEQ ID NO: 144940 - DNA, 25 bp, Saccharomyces pastorianus
ggagattacccgcagaagtagaaat

SEQ ID NO: 144941 - DNA, 25 bp, Saccharomyces pastorianus
taggacacatcagcaagagaacttg

SEQ ID NO: 144942 - DNA, 25 bp, Saccharomyces pastorianus
gaatgttgacatctctaacatgtcg

SEQ ID NO: 144943 - DNA, 25 bp, Saccharomyces pastorianus
cttgcagagcatgagaagatcttcc

SEQ ID NO: 144944 - DNA, 25 bp, Saccharomyces pastorianus
gtaccgtcaacctaggacacatcag

SEQ ID NO: 144945 - DNA, 25 bp, Saccharomyces pastorianus
gaagatcttccataggatcacagga

SEQ ID NO: 144946 - DNA, 25 bp, Saccharomyces pastorianus
gacagttccgatgttgaggacgtta

SEQ ID NO: 144947 - DNA, 25 bp, Saccharomyces pastorianus
gtcgcaaggtgagtttttaagactt

SEQ ID NO: 144948 - DNA, 25 bp, Saccharomyces pastorianus
tctctaacatgtcgcaaggtgagtt

SEQ ID NO: 144949 - DNA, 25 bp, Saccharomyces pastorianus
taggatcacaggacagttccgatgt

SEQ ID NO: 144950 - DNA, 25 bp, Saccharomyces pastorianus
tttcgaaagagtaccgtcaacctag

SEQ ID NO: 144951 - DNA, 25 bp, Saccharomyces pastorianus
tcgggaaacttctggatggctctaa

SEQ ID NO: 144952 - DNA, 25 bp, Saccharomyces pastorianus
gttgggtgccaacagcttacatgaa

SEQ ID NO: 144953 - DNA, 25 bp, Saccharomyces pastorianus
aaataataatatccctactcctcct

SEQ ID NO: 144954 - DNA, 25 bp, Saccharomyces pastorianus
agaagatctgttcctaatcctgctt

SEQ ID NO: 144955 - DNA, 25 bp, Saccharomyces pastorianus
ggatcaccatctgagttacctttaa

SEQ ID NO: 144956 - DNA, 25 bp, Saccharomyces pastorianus
caagcggttggtctctcgggaaact

SEQ ID NO: 144957 - DNA, 25 bp, Saccharomyces pastorianus
aacacctctgcaaacgttattccag

SEQ ID NO: 144958 - DNA, 25 bp, Saccharomyces pastorianus
agaacccatgtttgaagcggcttac

SEQ ID NO: 144959 - DNA, 25 bp, Saccharomyces pastorianus
ggatgttcctaaacccgttctgaat

SEQ ID NO: 144960 - DNA, 25 bp, Saccharomyces pastorianus
atgcgcttgctgctagggccaataa

SEQ ID NO: 144961 - DNA, 25 bp, Saccharomyces pastorianus
agcggcttacgatttttctggttca

SEQ ID NO: 144962 - DNA, 25 bp, Saccharomyces pastorianus
cagcttattgtctgtcatcaaaaga

SEQ ID NO: 144963 - DNA, 25 bp, Saccharomyces pastorianus
aagattcgatcactatggccaagga

SEQ ID NO: 144964 - DNA, 25 bp, Saccharomyces pastorianus
gggtcattgttctatcttcaagcag

SEQ ID NO: 144965 - DNA, 25 bp, Saccharomyces pastorianus
gatcaactggatccttcaattgcac

SEQ ID NO: 144966 - DNA, 25 bp, Saccharomyces pastorianus
gcacagtcaattgctctatctacct

SEQ ID NO: 144967 - DNA, 25 bp, Saccharomyces pastorianus
aatgaactccttgcagaagctgaaa

SEQ ID NO: 144968 - DNA, 25 bp, Saccharomyces pastorianus
ggcagacatgccaccaggacagata

SEQ ID NO: 144969 - DNA, 25 bp, Saccharomyces pastorianus
taaaagccgttagattcgtacgcaa

SEQ ID NO: 144970 - DNA, 25 bp, Saccharomyces pastorianus
gacagcgttattgcgtttgccaaaa

SEQ ID NO: 144971 - DNA, 25 bp, Saccharomyces pastorianus
gcacaaaaatgttacgacagcgtta

SEQ ID NO: 144972 - DNA, 25 bp, Saccharomyces pastorianus
aggacagatattgctatcacaggca

SEQ ID NO: 144973 - DNA, 25 bp, Saccharomyces pastorianus
ctacatgatataaggccgcctgcat

SEQ ID NO: 144974 - DNA, 25 bp, Saccharomyces pastorianus
ataccggagtctccagcaaactcac

SEQ ID NO: 144975 - DNA, 25 bp, Saccharomyces pastorianus
atgcgatcgctctcatgtcgattta

SEQ ID NO: 144976 - DNA, 25 bp, Saccharomyces pastorianus
tacctctttcggcacaaaaagtctg

SEQ ID NO: 144977 - DNA, 25 bp, Saccharomyces pastorianus
aggccgcctgcatcaaacttcaata

SEQ ID NO: 144978 - DNA, 25 bp, Saccharomyces pastorianus
cgctctcatgtcgatttattgtcag

SEQ ID NO: 144979 - DNA, 25 bp, Saccharomyces pastorianus
gcgttggatgaatgcgatcgctctc

SEQ ID NO: 144980 - DNA, 25 bp, Saccharomyces pastorianus
gatggcacctaaacccaatttgaaa

SEQ ID NO: 144981 - DNA, 25 bp, Saccharomyces pastorianus
gtggactacgaaccctgctcatata

SEQ ID NO: 144982 - DNA, 25 bp, Saccharomyces pastorianus
aactcgaccacagatggcacctaaa

SEQ ID NO: 144983 - DNA, 25 bp, Saccharomyces pastorianus
acttcaatacgcaagaatcggcccc

SEQ ID NO: 144984 - DNA, 25 bp, Saccharomyces pastorianus
ctgccactgctaccggtattaaggt

SEQ ID NO: 144985 - DNA, 25 bp, Saccharomyces pastorianus
tgctaccggtattaaggtcttttct

SEQ ID NO: 144986 - DNA, 25 bp, Saccharomyces pastorianus
gtctgcccaagatgaagttttctct

SEQ ID NO: 144987 - DNA, 25 bp, Saccharomyces pastorianus
acagatactggttggctgctgccac

SEQ ID NO: 144988 - DNA, 25 bp, Saccharomyces pastorianus
aaacagatactggttggctgctgcc

SEQ ID NO: 144989 - DNA, 25 bp, Saccharomyces pastorianus
atgttgtggaacttggccgctaaga

SEQ ID NO: 144990 - DNA, 25 bp, Saccharomyces pastorianus
cactgctaccggtattaaggtcttt

SEQ ID NO: 144991 - DNA, 25 bp, Saccharomyces pastorianus
tactggttggctgctgccactgcta

SEQ ID NO: 144992 - DNA, 25 bp, Saccharomyces pastorianus
ccaagatgaagttttctctttggct

SEQ ID NO: 144993 - DNA, 25 bp, Saccharomyces pastorianus
gatactggttggctgctgccactgc

SEQ ID NO: 144994 - DNA, 25 bp, Saccharomyces pastorianus
actttgtctgcccaagatgaagttt

SEQ ID NO: 144995 - DNA, 25 bp, Saccharomyces pastorianus
ctgctgacggtcaaactttgtttgc

SEQ ID NO: 144996 - DNA, 25 bp, Saccharomyces pastorianus
gatgacttgagaccagaatttgctg

SEQ ID NO: 144997 - DNA, 25 bp, Saccharomyces pastorianus
tttggcttggtctgctgacggtcaa

SEQ ID NO: 144998 - DNA, 25 bp, Saccharomyces pastorianus
tctttggacccacaatacttggtcg

SEQ ID NO: 144999 - DNA, 25 bp, Saccharomyces pastorianus
tgctggttacagcaaggccgctgaa

SEQ ID NO: 145000 - DNA, 25 bp, Saccharomyces pastorianus
agaaggctatgtacactttgtctgc

SEQ ID NO: 145001 - DNA, 25 bp, Saccharomyces pastorianus
cttggtctgctgacggtcaaacttt

SEQ ID NO: 145002 - DNA, 25 bp, Saccharomyces pastorianus
ctttggctttctctccaaacagata

SEQ ID NO: 145003 - DNA, 25 bp, Saccharomyces pastorianus
acagcaaggccgctgaaccacatgc

SEQ ID NO: 145004 - DNA, 25 bp, Saccharomyces pastorianus
gacccacaatacttggtcgatgact

SEQ ID NO: 145005 - DNA, 25 bp, Saccharomyces pastorianus
ttctctttggctttctctccaaaca

SEQ ID NO: 145006 - DNA, 25 bp, Saccharomyces pastorianus
ttgttgtccgcttcccgtgataaga

SEQ ID NO: 145007 - DNA, 25 bp, Saccharomyces pastorianus
gtgataagactttgatctcctggaa

SEQ ID NO: 145008 - DNA, 25 bp, Saccharomyces pastorianus
ggtgtcccagttagatctttcaagg

SEQ ID NO: 145009 - DNA, 25 bp, Saccharomyces pastorianus
actttgactgctgacggtgcttacg

SEQ ID NO: 145010 - DNA, 25 bp, Saccharomyces pastorianus
gttcccgtgacaagaccatcaaggt

SEQ ID NO: 145011 - DNA, 25 bp, Saccharomyces pastorianus
gatctcctggaagttgactggtgac

SEQ ID NO: 145012 - DNA, 25 bp, Saccharomyces pastorianus
ttacgctttgtctgcttcttgggac

SEQ ID NO: 145013 - DNA, 25 bp, Saccharomyces pastorianus
acaagtccgatgttatgtccgttga

SEQ ID NO: 145014 - DNA, 25 bp, Saccharomyces pastorianus
gatctttcaagggtcacagtcacat

SEQ ID NO: 145015 - DNA, 25 bp, Saccharomyces pastorianus
ggtttcccaagtcagagttgttcca

SEQ ID NO: 145016 - DNA, 25 bp, Saccharomyces pastorianus
tggctacttctgctggtcaaccaaa

SEQ ID NO: 145017 - DNA, 25 bp, Saccharomyces pastorianus
gattcttcgagtgtgtctttttctg

SEQ ID NO: 145018 - DNA, 25 bp, Saccharomyces pastorianus
gtaccgcatatggatggttcaccct

SEQ ID NO: 145019 - DNA, 25 bp, Saccharomyces pastorianus
acttccgccggatcaactagtggag

SEQ ID NO: 145020 - DNA, 25 bp, Saccharomyces pastorianus
aaatcagccccagttagctacgata

SEQ ID NO: 145021 - DNA, 25 bp, Saccharomyces pastorianus
ttagccaaaccgtatgaaccgttat

SEQ ID NO: 145022 - DNA, 25 bp, Saccharomyces pastorianus
gaagatagctctcagccaaagatga

SEQ ID NO: 145023 - DNA, 25 bp, Saccharomyces pastorianus
gatggttcaccctccaaaacaaaat

SEQ ID NO: 145024 - DNA, 25 bp, Saccharomyces pastorianus
agaggagacataacttccgccggat

SEQ ID NO: 145025 - DNA, 25 bp, Saccharomyces pastorianus
gaatctgataattttgtaccgcata

SEQ ID NO: 145026 - DNA, 25 bp, Saccharomyces pastorianus
aatggcaccaaaccaagttctatgg

SEQ ID NO: 145027 - DNA, 25 bp, Saccharomyces pastorianus
gcaccatcttttgacgattcttcga

SEQ ID NO: 145028 - DNA, 25 bp, Saccharomyces pastorianus
aatagagcgtccttgtcgactttct

SEQ ID NO: 145029 - DNA, 25 bp, Saccharomyces pastorianus
gtgaaagtgcagtcgccaatagagc

SEQ ID NO: 145030 - DNA, 25 bp, Saccharomyces pastorianus
agggcttctttgttacaatccatac

SEQ ID NO: 145031 - DNA, 25 bp, Saccharomyces pastorianus
aatccataccggaaagagatcccaa

SEQ ID NO: 145032 - DNA, 25 bp, Saccharomyces pastorianus
acgagtgcgctagagactggtttaa

SEQ ID NO: 145033 - DNA, 25 bp, Saccharomyces pastorianus
gaaatgtctcagatgctaccattaa

SEQ ID NO: 145034 - DNA, 25 bp, Saccharomyces pastorianus
aaatttaagacctacgagtgcgcta

SEQ ID NO: 145035 - DNA, 25 bp, Saccharomyces pastorianus
tcgactttctcatccacatttagtg

SEQ ID NO: 145036 - DNA, 25 bp, Saccharomyces pastorianus
atacgtgaccgcacaagaattcccc

SEQ ID NO: 145037 - DNA, 25 bp, Saccharomyces pastorianus
atgttttgcaattatccactcctca

SEQ ID NO: 145038 - DNA, 25 bp, Saccharomyces pastorianus
aacgaggtcgattttgatttcaata

SEQ ID NO: 145039 - DNA, 25 bp, Saccharomyces pastorianus
attccttccgtaactgtttctcaag

SEQ ID NO: 145040 - DNA, 25 bp, Saccharomyces pastorianus
ggatatccgcgaaggtgaccaggct

SEQ ID NO: 145041 - DNA, 25 bp, Saccharomyces pastorianus
cggtgtggcacctttcatgattaag

SEQ ID NO: 145042 - DNA, 25 bp, Saccharomyces pastorianus
gttaacagcctcatatctggaccgc

SEQ ID NO: 145043 - DNA, 25 bp, Saccharomyces pastorianus
gattagcatctgaaccgggcattat

SEQ ID NO: 145044 - DNA, 25 bp, Saccharomyces pastorianus
gatccttctaccgagtattgtgttg

SEQ ID NO: 145045 - DNA, 25 bp, Saccharomyces pastorianus
gcattgtcgactttacgaaccctaa

SEQ ID NO: 145046 - DNA, 25 bp, Saccharomyces pastorianus
tggaccgcgtaatcaaattcttgtg

SEQ ID NO: 145047 - DNA, 25 bp, Saccharomyces pastorianus
acgcagctcccaatttgttagatta

SEQ ID NO: 145048 - DNA, 25 bp, Saccharomyces pastorianus
gggcattatatctatcacttcttta

SEQ ID NO: 145049 - DNA, 25 bp, Saccharomyces pastorianus
ttaaacatacatcctattccttccg

SEQ ID NO: 145050 - DNA, 25 bp, Saccharomyces pastorianus
agaagatattcagtggtctcgcact

SEQ ID NO: 145051 - DNA, 25 bp, Saccharomyces pastorianus
gcaagcggtgacgataacggtacat

SEQ ID NO: 145052 - DNA, 25 bp, Saccharomyces pastorianus
aaccggttgctcaatatgacttcca

SEQ ID NO: 145053 - DNA, 25 bp, Saccharomyces pastorianus
gagtctatcgttgcggtaggctcag

SEQ ID NO: 145054 - DNA, 25 bp, Saccharomyces pastorianus
accgtttttgcaaccgcaggatgtg

SEQ ID NO: 145055 - DNA, 25 bp, Saccharomyces pastorianus
gccaagtaatgctgacgccgtccaa

SEQ ID NO: 145056 - DNA, 25 bp, Saccharomyces pastorianus
gagccattacttccattgcattcaa

SEQ ID NO: 145057 - DNA, 25 bp, Saccharomyces pastorianus
taagcaaatcccaggttgtttagta

SEQ ID NO: 145058 - DNA, 25 bp, Saccharomyces pastorianus
cacaattattgttcgttcactggca

SEQ ID NO: 145059 - DNA, 25 bp, Saccharomyces pastorianus
aaacctgctatctctgttaaagctt

SEQ ID NO: 145060 - DNA, 25 bp, Saccharomyces pastorianus
ggatttaagacagtttacgccaagt

SEQ ID NO: 145061 - DNA, 25 bp, Saccharomyces pastorianus
gatgatgttcaattatgtttcctga

SEQ ID NO: 145062 - DNA, 25 bp, Saccharomyces pastorianus
gcaagaaagtttacgatttccaacg

SEQ ID NO: 145063 - DNA, 25 bp, Saccharomyces pastorianus
tacgatttccaacggtgtcaaaatt

SEQ ID NO: 145064 - DNA, 25 bp, Saccharomyces pastorianus
gttcaattatgtttcctgaagattg

SEQ ID NO: 145065 - DNA, 25 bp, Saccharomyces pastorianus
tgatgttcaattatgtttcctgaag

SEQ ID NO: 145066 - DNA, 25 bp, Saccharomyces pastorianus
attatgtttcctgaagattgatacg

SEQ ID NO: 145067 - DNA, 25 bp, Saccharomyces pastorianus
cgatgatgttcaattatgtttcctg

SEQ ID NO: 145068 - DNA, 25 bp, Saccharomyces pastorianus
ttccaacggtgtcaaaatttacaat

SEQ ID NO: 145069 - DNA, 25 bp, Saccharomyces pastorianus
cggtgtcaaaatttacaatcataaa

SEQ ID NO: 145070 - DNA, 25 bp, Saccharomyces pastorianus
caacggtgtcaaaatttacaatcat

SEQ ID NO: 145071 - DNA, 25 bp, Saccharomyces pastorianus
gatgttcaattatgtttcctgaaga

SEQ ID NO: 145072 - DNA, 25 bp, Saccharomyces pastorianus
gatgggaaagaacttctgtccaccc

SEQ ID NO: 145073 - DNA, 25 bp, Saccharomyces pastorianus
gatagtggttggtacgcttgcattt

SEQ ID NO: 145074 - DNA, 25 bp, Saccharomyces pastorianus
gtggtaggataactctctttttgat

SEQ ID NO: 145075 - DNA, 25 bp, Saccharomyces pastorianus
acaggagttgccatatgttcatcaa

SEQ ID NO: 145076 - DNA, 25 bp, Saccharomyces pastorianus
aacgatcgaaatgagtcttctacaa

SEQ ID NO: 145077 - DNA, 25 bp, Saccharomyces pastorianus
ttctgtccaccccattaaaatttca

SEQ ID NO: 145078 - DNA, 25 bp, Saccharomyces pastorianus
actaccttgcgtgtattgaggctga

SEQ ID NO: 145079 - DNA, 25 bp, Saccharomyces pastorianus
tcatgttgaattttctccagaggat

SEQ ID NO: 145080 - DNA, 25 bp, Saccharomyces pastorianus
gaaagtctgaagcttcatcggatgt

SEQ ID NO: 145081 - DNA, 25 bp, Saccharomyces pastorianus
ggctgagactttaccactactttaa

SEQ ID NO: 145082 - DNA, 25 bp, Saccharomyces pastorianus
agacctgagtttggtactaccttgc

SEQ ID NO: 145083 - DNA, 25 bp, Saccharomyces pastorianus
gggccatctatctcccgatgaacta

SEQ ID NO: 145084 - DNA, 25 bp, Saccharomyces pastorianus
gaaagatttaatgctctacaatgcc

SEQ ID NO: 145085 - DNA, 25 bp, Saccharomyces pastorianus
aacaactgatttgaaattgctagag

SEQ ID NO: 145086 - DNA, 25 bp, Saccharomyces pastorianus
gcctgtgtagtccatattttgatga

SEQ ID NO: 145087 - DNA, 25 bp, Saccharomyces pastorianus
attgggccatctatctcccgatgaa

SEQ ID NO: 145088 - DNA, 25 bp, Saccharomyces pastorianus
acaatgcctgtgtagtccatatttt

SEQ ID NO: 145089 - DNA, 25 bp, Saccharomyces pastorianus
gaaaatgtcgaattgggccatctat

SEQ ID NO: 145090 - DNA, 25 bp, Saccharomyces pastorianus
gatttaatgctctacaatgcctgtg

SEQ ID NO: 145091 - DNA, 25 bp, Saccharomyces pastorianus
tcgaattgggccatctatctcccga

SEQ ID NO: 145092 - DNA, 25 bp, Saccharomyces pastorianus
ttgaaattgctagagttcgatgaaa

SEQ ID NO: 145093 - DNA, 25 bp, Saccharomyces pastorianus
aatgctctacaatgcctgtgtagtc

SEQ ID NO: 145094 - DNA, 25 bp, Saccharomyces pastorianus
attgaattacctccatcatttcgcg

SEQ ID NO: 145095 - DNA, 25 bp, Saccharomyces pastorianus
atcatttcgcgaacgtctgtcatag

SEQ ID NO: 145096 - DNA, 25 bp, Saccharomyces pastorianus
tctggctgcgtaatggcggaactgc

SEQ ID NO: 145097 - DNA, 25 bp, Saccharomyces pastorianus
tagtagatcctgagacctggtcctt

SEQ ID NO: 145098 - DNA, 25 bp, Saccharomyces pastorianus
ctgtggaatttctagctgacgtttt

SEQ ID NO: 145099 - DNA, 25 bp, Saccharomyces pastorianus
ttaggtactccatcaaagccagaaa

SEQ ID NO: 145100 - DNA, 25 bp, Saccharomyces pastorianus
aaatcgacatatggtcctctggctg

SEQ ID NO: 145101 - DNA, 25 bp, Saccharomyces pastorianus
cagagctaatcttcggcgcaacaaa

SEQ ID NO: 145102 - DNA, 25 bp, Saccharomyces pastorianus
gacctggtccttaaaactgtgcgat

SEQ ID NO: 145103 - DNA, 25 bp, Saccharomyces pastorianus
gcggaactgctattgggccaaccaa

SEQ ID NO: 145104 - DNA, 25 bp, Saccharomyces pastorianus
gaggttacgtcatttcgtccatcaa

SEQ ID NO: 145105 - DNA, 25 bp, Saccharomyces pastorianus
acctacgatagacccgaatgatccg

SEQ ID NO: 145106 - DNA, 25 bp, Saccharomyces pastorianus
tacgatagacccgaatgatccggtg

SEQ ID NO: 145107 - DNA, 25 bp, Saccharomyces pastorianus
ccaccgaagtagttgggcatggttc

SEQ ID NO: 145108 - DNA, 25 bp, Saccharomyces pastorianus
agcaataattctccgaatctcagta

SEQ ID NO: 145109 - DNA, 25 bp, Saccharomyces pastorianus
ccgaatctcagtaataacatagtgt

SEQ ID NO: 145110 - DNA, 25 bp, Saccharomyces pastorianus
tccctaccaccgaagtagttgggca

SEQ ID NO: 145111 - DNA, 25 bp, Saccharomyces pastorianus
tccacctacgatagacccgaatgat

SEQ ID NO: 145112 - DNA, 25 bp, Saccharomyces pastorianus
gatatctttccctaccaccgaagta

SEQ ID NO: 145113 - DNA, 25 bp, Saccharomyces pastorianus
aattctccgaatctcagtaataaca

SEQ ID NO: 145114 - DNA, 25 bp, Saccharomyces pastorianus
tctttccctaccaccgaagtagttg

SEQ ID NO: 145115 - DNA, 25 bp, Saccharomyces pastorianus
ggtgcagatatctttccctaccacc

SEQ ID NO: 145116 - DNA, 25 bp, Saccharomyces pastorianus
aagaccctccaattgcctaaaatga

SEQ ID NO: 145117 - DNA, 25 bp, Saccharomyces pastorianus
aatcaaacgattctgcaactggctg

SEQ ID NO: 145118 - DNA, 25 bp, Saccharomyces pastorianus
gatgaaattgacgatgattctggaa

SEQ ID NO: 145119 - DNA, 25 bp, Saccharomyces pastorianus
ttacgtgcagtcctgaaatgggaag

SEQ ID NO: 145120 - DNA, 25 bp, Saccharomyces pastorianus
ttctgcaactggctgcagggagtat

SEQ ID NO: 145121 - DNA, 25 bp, Saccharomyces pastorianus
ggaaattacgtgcagtcctgaaatg

SEQ ID NO: 145122 - DNA, 25 bp, Saccharomyces pastorianus
acacacaatcgaccaaatactaaag

SEQ ID NO: 145123 - DNA, 25 bp, Saccharomyces pastorianus
atgggaataagaccctccaattgcc

SEQ ID NO: 145124 - DNA, 25 bp, Saccharomyces pastorianus
gactattacacacaatcgaccaaat

SEQ ID NO: 145125 - DNA, 25 bp, Saccharomyces pastorianus
gagtcaattcaggattcacatggga

SEQ ID NO: 145126 - DNA, 25 bp, Saccharomyces pastorianus
gcagggagtataagcaacgattgta

SEQ ID NO: 145127 - DNA, 25 bp, Saccharomyces pastorianus
tagtccgatggattctgcgtacgcc

SEQ ID NO: 145128 - DNA, 25 bp, Saccharomyces pastorianus
cgtttgcgtcttcttatgcaagcaa

SEQ ID NO: 145129 - DNA, 25 bp, Saccharomyces pastorianus
gaaaacgccttcttcgactacaacg

SEQ ID NO: 145130 - DNA, 25 bp, Saccharomyces pastorianus
atggaagaagagcattcgcaacctt

SEQ ID NO: 145131 - DNA, 25 bp, Saccharomyces pastorianus
gtgtcagtttctattggaacgtcaa

SEQ ID NO: 145132 - DNA, 25 bp, Saccharomyces pastorianus
gttacgcatctgaaccaagctgtca

SEQ ID NO: 145133 - DNA, 25 bp, Saccharomyces pastorianus
agtaggcacatattctagtccgatg

SEQ ID NO: 145134 - DNA, 25 bp, Saccharomyces pastorianus
atgaacagggccgtttgcgtcttct

SEQ ID NO: 145135 - DNA, 25 bp, Saccharomyces pastorianus
tgaagtcggacatgttgaacacctt

SEQ ID NO: 145136 - DNA, 25 bp, Saccharomyces pastorianus
gcaatatctgatacctctcaaatag

SEQ ID NO: 145137 - DNA, 25 bp, Saccharomyces pastorianus
tcgcaaccttcatcttcacaagaga

SEQ ID NO: 145138 - DNA, 25 bp, Saccharomyces pastorianus
gaaacagagttcttgtcgctatgga

SEQ ID NO: 145139 - DNA, 25 bp, Saccharomyces pastorianus
gacccatgccaaagacgattcagaa

SEQ ID NO: 145140 - DNA, 25 bp, Saccharomyces pastorianus
gctcaagttgcccaccaagaaggtg

SEQ ID NO: 145141 - DNA, 25 bp, Saccharomyces pastorianus
gggtgctctggcttatattggttca

SEQ ID NO: 145142 - DNA, 25 bp, Saccharomyces pastorianus
caacttttgggtgctaagggatcta

SEQ ID NO: 145143 - DNA, 25 bp, Saccharomyces pastorianus
atttggcaatgtgtctatcctttag

SEQ ID NO: 145144 - DNA, 25 bp, Saccharomyces pastorianus
agggatctatttttgctatcggcga

SEQ ID NO: 145145 - DNA, 25 bp, Saccharomyces pastorianus
tgacgctaccactataactgccaaa

SEQ ID NO: 145146 - DNA, 25 bp, Saccharomyces pastorianus
ctcattcaccttcctattctggaaa

SEQ ID NO: 145147 - DNA, 25 bp, Saccharomyces pastorianus
tgctatcggcgattgtaccttccac

SEQ ID NO: 145148 - DNA, 25 bp, Saccharomyces pastorianus
ccaaatataggttagccggctcatt

SEQ ID NO: 145149 - DNA, 25 bp, Saccharomyces pastorianus
cattaatgaaaacagtgtgggctaa

SEQ ID NO: 145150 - DNA, 25 bp, Saccharomyces pastorianus
ttaatgaaaacagtgtgggctaact

SEQ ID NO: 145151 - DNA, 25 bp, Saccharomyces pastorianus
aatcattaatgaaaacagtgtgggc

SEQ ID NO: 145152 - DNA, 25 bp, Saccharomyces pastorianus
taatgaaaacagtgtgggctaactc

SEQ ID NO: 145153 - DNA, 25 bp, Saccharomyces pastorianus
attaatgaaaacagtgtgggctaac

SEQ ID NO: 145154 - DNA, 25 bp, Saccharomyces pastorianus
tgaaaacagtgtgggctaactcctc

SEQ ID NO: 145155 - DNA, 25 bp, Saccharomyces pastorianus
aatgaaaacagtgtgggctaactcc

SEQ ID NO: 145156 - DNA, 25 bp, Saccharomyces pastorianus
gaaaacagtgtgggctaactcctcc

SEQ ID NO: 145157 - DNA, 25 bp, Saccharomyces pastorianus
atgaaaacagtgtgggctaactcct

SEQ ID NO: 145158 - DNA, 25 bp, Saccharomyces pastorianus
tcattaatgaaaacagtgtgggcta

SEQ ID NO: 145159 - DNA, 25 bp, Saccharomyces pastorianus
atcattaatgaaaacagtgtgggct

SEQ ID NO: 145160 - DNA, 25 bp, Saccharomyces pastorianus
gatttcttccctgtcattgatcaat

SEQ ID NO: 145161 - DNA, 25 bp, Saccharomyces pastorianus
aaaaactacttcaacatcggcactg

SEQ ID NO: 145162 - DNA, 25 bp, Saccharomyces pastorianus
acctctgtgtcatatgcttttgtcc

SEQ ID NO: 145163 - DNA, 25 bp, Saccharomyces pastorianus
atcggcactgttgttggcatttgta

SEQ ID NO: 145164 - DNA, 25 bp, Saccharomyces pastorianus
attccgtctacgagtttgatcaata

SEQ ID NO: 145165 - DNA, 25 bp, Saccharomyces pastorianus
aagttctggttattggcgcttcaac

SEQ ID NO: 145166 - DNA, 25 bp, Saccharomyces pastorianus
ggttccctatgacgaaggatccatc

SEQ ID NO: 145167 - DNA, 25 bp, Saccharomyces pastorianus
gtgggtaaccatgatttcttccctg

SEQ ID NO: 145168 - DNA, 25 bp, Saccharomyces pastorianus
atacaactggcgctttggacaccct

SEQ ID NO: 145169 - DNA, 25 bp, Saccharomyces pastorianus
ttataagccgcctattgattccgtc

SEQ ID NO: 145170 - DNA, 25 bp, Saccharomyces pastorianus
ggatatgactacttggttccctatg

SEQ ID NO: 145171 - DNA, 25 bp, Saccharomyces pastorianus
ttcctcattcgattgctgatgcaac

SEQ ID NO: 145172 - DNA, 25 bp, Saccharomyces pastorianus
atgttggtcatgcttttgggtagat

SEQ ID NO: 145173 - DNA, 25 bp, Saccharomyces pastorianus
aagagaacttcaaggccggtgacaa

SEQ ID NO: 145174 - DNA, 25 bp, Saccharomyces pastorianus
gtagttgtgaactttcctcattcga

SEQ ID NO: 145175 - DNA, 25 bp, Saccharomyces pastorianus
caaggccggtgacaagctagtagtt

SEQ ID NO: 145176 - DNA, 25 bp, Saccharomyces pastorianus
ggtcatgcttttgggtagatatttc

SEQ ID NO: 145177 - DNA, 25 bp, Saccharomyces pastorianus
aaatgaggtttctatagtgtctaaa

SEQ ID NO: 145178 - DNA, 25 bp, Saccharomyces pastorianus
gagtggctctgacgtctgtaaatat

SEQ ID NO: 145179 - DNA, 25 bp, Saccharomyces pastorianus
tgttccgaggaaattgagtggctct

SEQ ID NO: 145180 - DNA, 25 bp, Saccharomyces pastorianus
gaactttcctcattcgattgctgat

SEQ ID NO: 145181 - DNA, 25 bp, Saccharomyces pastorianus
gtgtctaaaatctttgttccgagga

SEQ ID NO: 145182 - DNA, 25 bp, Saccharomyces pastorianus
ggatccacgcccaataaatctacaa

SEQ ID NO: 145183 - DNA, 25 bp, Saccharomyces pastorianus
aaatgcgtctgacctggtgggttcc

SEQ ID NO: 145184 - DNA, 25 bp, Saccharomyces pastorianus
tcaaggagagcatcttctgcagccg

SEQ ID NO: 145185 - DNA, 25 bp, Saccharomyces pastorianus
aaagctctctgtgtcaaaggccggc

SEQ ID NO: 145186 - DNA, 25 bp, Saccharomyces pastorianus
gcaaattcagtcaaaaccgccaagg

SEQ ID NO: 145187 - DNA, 25 bp, Saccharomyces pastorianus
gtgggttcccatagtagctcaggat

SEQ ID NO: 145188 - DNA, 25 bp, Saccharomyces pastorianus
tttggagctaggttctccacttgca

SEQ ID NO: 145189 - DNA, 25 bp, Saccharomyces pastorianus
tctgcagccgcgactagtatcgata

SEQ ID NO: 145190 - DNA, 25 bp, Saccharomyces pastorianus
caaggtcactaaagccccgcaaaga

SEQ ID NO: 145191 - DNA, 25 bp, Saccharomyces pastorianus
tttagccgcttcgtctgatgtagaa

SEQ ID NO: 145192 - DNA, 25 bp, Saccharomyces pastorianus
aaggccggcgctccaacaagaattg

SEQ ID NO: 145193 - DNA, 25 bp, Saccharomyces pastorianus
ggcagcaaactaccaaatgggcctg

SEQ ID NO: 145194 - DNA, 25 bp, Saccharomyces pastorianus
gggcctgtgattttatcacccgata

SEQ ID NO: 145195 - DNA, 25 bp, Saccharomyces pastorianus
atcacccgatagaacgatggctgcg

SEQ ID NO: 145196 - DNA, 25 bp, Saccharomyces pastorianus
actctatctaactgcaagaagtgct

SEQ ID NO: 145197 - DNA, 25 bp, Saccharomyces pastorianus
ggacgcacttgggtgtagccaagtt

SEQ ID NO: 145198 - DNA, 25 bp, Saccharomyces pastorianus
gttatttagcgagatctccaggaat

SEQ ID NO: 145199 - DNA, 25 bp, Saccharomyces pastorianus
ggacaagctgattccacgaggagtt

SEQ ID NO: 145200 - DNA, 25 bp, Saccharomyces pastorianus
gcgagatctccaggaatggctataa

SEQ ID NO: 145201 - DNA, 25 bp, Saccharomyces pastorianus
gaagtgctggacaagctgattccac

SEQ ID NO: 145202 - DNA, 25 bp, Saccharomyces pastorianus
ggctataatatactctatctaactg

SEQ ID NO: 145203 - DNA, 25 bp, Saccharomyces pastorianus
ccacgaggagttatttgcgatcaat

SEQ ID NO: 145204 - DNA, 25 bp, Saccharomyces pastorianus
agaggaagtttgttgagcagcgtac

SEQ ID NO: 145205 - DNA, 25 bp, Saccharomyces pastorianus
caccttctggttccgatactgagga

SEQ ID NO: 145206 - DNA, 25 bp, Saccharomyces pastorianus
tactgaatcctctacaacgacacca

SEQ ID NO: 145207 - DNA, 25 bp, Saccharomyces pastorianus
aattcgttatcttcttcaccttctg

SEQ ID NO: 145208 - DNA, 25 bp, Saccharomyces pastorianus
gtacgcctccaacaatggccacaag

SEQ ID NO: 145209 - DNA, 25 bp, Saccharomyces pastorianus
taacaatggcgacttactactagac

SEQ ID NO: 145210 - DNA, 25 bp, Saccharomyces pastorianus
tactgatttatctcctccaggtacg

SEQ ID NO: 145211 - DNA, 25 bp, Saccharomyces pastorianus
tggccacaagcggatcagttttagg

SEQ ID NO: 145212 - DNA, 25 bp, Saccharomyces pastorianus
gaaactacagggtcgctttctccta

SEQ ID NO: 145213 - DNA, 25 bp, Saccharomyces pastorianus
taaatccttacgagcaccttactga

SEQ ID NO: 145214 - DNA, 25 bp, Saccharomyces pastorianus
acgacaccaccagattcagttgaag

SEQ ID NO: 145215 - DNA, 25 bp, Saccharomyces pastorianus
tgaagctaaaatctctaccactact

SEQ ID NO: 145216 - DNA, 25 bp, Saccharomyces pastorianus
ggatgtcgtggaaatagccaacctt

SEQ ID NO: 145217 - DNA, 25 bp, Saccharomyces pastorianus
tatcctcattactagaacacgttct

SEQ ID NO: 145218 - DNA, 25 bp, Saccharomyces pastorianus
gcccctagacacattctcaaggatg

SEQ ID NO: 145219 - DNA, 25 bp, Saccharomyces pastorianus
gtcagaagacgaaaaagcccagttt

SEQ ID NO: 145220 - DNA, 25 bp, Saccharomyces pastorianus
tcaaacgaaggttcctggcccctag

SEQ ID NO: 145221 - DNA, 25 bp, Saccharomyces pastorianus
acctgatatggttccgaaagtcgat

SEQ ID NO: 145222 - DNA, 25 bp, Saccharomyces pastorianus
gattgcattactctatatacctgat

SEQ ID NO: 145223 - DNA, 25 bp, Saccharomyces pastorianus
gttctcttcccttgtatcaaacgaa

SEQ ID NO: 145224 - DNA, 25 bp, Saccharomyces pastorianus
aaaaggctacattccatctctggtc

SEQ ID NO: 145225 - DNA, 25 bp, Saccharomyces pastorianus
gatacatctgatgcatcgttgtcag

SEQ ID NO: 145226 - DNA, 25 bp, Saccharomyces pastorianus
gagctttgaacagcgtttactccaa

SEQ ID NO: 145227 - DNA, 25 bp, Saccharomyces pastorianus
atccggcggctgttgatgttaacgt

SEQ ID NO: 145228 - DNA, 25 bp, Saccharomyces pastorianus
gagtctccgacaagcccaagtggta

SEQ ID NO: 145229 - DNA, 25 bp, Saccharomyces pastorianus
gagagaggttcgtttcctgagccaa

SEQ ID NO: 145230 - DNA, 25 bp, Saccharomyces pastorianus
gatgttaacgttcacccgacaaaga

SEQ ID NO: 145231 - DNA, 25 bp, Saccharomyces pastorianus
gcgtttactccaattatctgccaaa

SEQ ID NO: 145232 - DNA, 25 bp, Saccharomyces pastorianus
gaattgttatagatccggcggctgt

SEQ ID NO: 145233 - DNA, 25 bp, Saccharomyces pastorianus
aattgcacgccgaattatctgccat

SEQ ID NO: 145234 - DNA, 25 bp, Saccharomyces pastorianus
gactagtgacatgtgatcctctaag

SEQ ID NO: 145235 - DNA, 25 bp, Saccharomyces pastorianus
tcacgtactttcaaggcttcttcaa

SEQ ID NO: 145236 - DNA, 25 bp, Saccharomyces pastorianus
atctgccattgatacttcacgtact

SEQ ID NO: 145237 - DNA, 25 bp, Saccharomyces pastorianus
ttgatcgatggctttcctcttattc

SEQ ID NO: 145238 - DNA, 25 bp, Saccharomyces pastorianus
tattccagtatcatactcttcccat

SEQ ID NO: 145239 - DNA, 25 bp, Saccharomyces pastorianus
agcctccacttgttaccatacttgg

SEQ ID NO: 145240 - DNA, 25 bp, Saccharomyces pastorianus
catacttggcctcaagatgcttgat

SEQ ID NO: 145241 - DNA, 25 bp, Saccharomyces pastorianus
tattgagcctccacttgttaccata

SEQ ID NO: 145242 - DNA, 25 bp, Saccharomyces pastorianus
gtacaatctttttcgccttgaaaag

SEQ ID NO: 145243 - DNA, 25 bp, Saccharomyces pastorianus
acttgtacaatctttttcgccttga

SEQ ID NO: 145244 - DNA, 25 bp, Saccharomyces pastorianus
gtatcatactcttcccatatagtct

SEQ ID NO: 145245 - DNA, 25 bp, Saccharomyces pastorianus
cttatttttattgagcctccacttg

SEQ ID NO: 145246 - DNA, 25 bp, Saccharomyces pastorianus
agatgcttgatcgatggctttcctc

SEQ ID NO: 145247 - DNA, 25 bp, Saccharomyces pastorianus
tggctttcctcttattccagtatca

SEQ ID NO: 145248 - DNA, 25 bp, Saccharomyces pastorianus
gaccctttcatttatctcaacgtta

SEQ ID NO: 145249 - DNA, 25 bp, Saccharomyces pastorianus
gagccagaaaccatattgcctctac

SEQ ID NO: 145250 - DNA, 25 bp, Saccharomyces pastorianus
ccagggtaaattggcttatctgatt

SEQ ID NO: 145251 - DNA, 25 bp, Saccharomyces pastorianus
acctgtcttagtattgtgaggccaa

SEQ ID NO: 145252 - DNA, 25 bp, Saccharomyces pastorianus
ttgcctctacttgcagaattttatg

SEQ ID NO: 145253 - DNA, 25 bp, Saccharomyces pastorianus
ggatttgatttacttccctttgagt

SEQ ID NO: 145254 - DNA, 25 bp, Saccharomyces pastorianus
agtgccgtacacttgatacatgatt

SEQ ID NO: 145255 - DNA, 25 bp, Saccharomyces pastorianus
aaaggacttacaacgctatgtgaat

SEQ ID NO: 145256 - DNA, 25 bp, Saccharomyces pastorianus
aattcgcgatatgctggattgtgta

SEQ ID NO: 145257 - DNA, 25 bp, Saccharomyces pastorianus
gggtgtctcggatagaattcgcgat

SEQ ID NO: 145258 - DNA, 25 bp, Saccharomyces pastorianus
gtatgtgccttcaaatcaacgccag

SEQ ID NO: 145259 - DNA, 25 bp, Saccharomyces pastorianus
atatgaaacgcctcgatggcacacc

SEQ ID NO: 145260 - DNA, 25 bp, Saccharomyces pastorianus
ttagggagccaatcctttcgaagtt

SEQ ID NO: 145261 - DNA, 25 bp, Saccharomyces pastorianus
ggtatagatgctaatttgtctccta

SEQ ID NO: 145262 - DNA, 25 bp, Saccharomyces pastorianus
aaggcagtgcttacgcaaacatttt

SEQ ID NO: 145263 - DNA, 25 bp, Saccharomyces pastorianus
ttgtctcctacgatgaaaattccat

SEQ ID NO: 145264 - DNA, 25 bp, Saccharomyces pastorianus
caacggaggctcatcgaaagtaaaa

SEQ ID NO: 145265 - DNA, 25 bp, Saccharomyces pastorianus
gattgtgttacatttgcagttgcct

SEQ ID NO: 145266 - DNA, 25 bp, Saccharomyces pastorianus
gcctaataggtactcttcacaaatg

SEQ ID NO: 145267 - DNA, 25 bp, Saccharomyces pastorianus
gagaggtcttctgactacctgagag

SEQ ID NO: 145268 - DNA, 25 bp, Saccharomyces pastorianus
cagcttgattgatttcgttttgggt

SEQ ID NO: 145269 - DNA, 25 bp, Saccharomyces pastorianus
aagtgacttattgcctatctcattg

SEQ ID NO: 145270 - DNA, 25 bp, Saccharomyces pastorianus
aatgccttagtagcaggtcaaccaa

SEQ ID NO: 145271 - DNA, 25 bp, Saccharomyces pastorianus
taaattctggcctactgtcgctaga

SEQ ID NO: 145272 - DNA, 25 bp, Saccharomyces pastorianus
gcttacccattaccctttttgagat

SEQ ID NO: 145273 - DNA, 25 bp, Saccharomyces pastorianus
tcgctagactggatgacacttatgg

SEQ ID NO: 145274 - DNA, 25 bp, Saccharomyces pastorianus
ctgttcccggaactttgatgataga

SEQ ID NO: 145275 - DNA, 25 bp, Saccharomyces pastorianus
gtgaagaagccgcttacccattacc

SEQ ID NO: 145276 - DNA, 25 bp, Saccharomyces pastorianus
gaaaaatgcccctcattcattggaa

SEQ ID NO: 145277 - DNA, 25 bp, Saccharomyces pastorianus
aaacactgcgctcatgaatttatag

SEQ ID NO: 145278 - DNA, 25 bp, Saccharomyces pastorianus
attgcaagactacggattccatgcc

SEQ ID NO: 145279 - DNA, 25 bp, Saccharomyces pastorianus
tgaagctatcgatgttgccaagaga

SEQ ID NO: 145280 - DNA, 25 bp, Saccharomyces pastorianus
agatcttattacttcctccaattgg

SEQ ID NO: 145281 - DNA, 25 bp, Saccharomyces pastorianus
gatatcgtacattcttttggtggac

SEQ ID NO: 145282 - DNA, 25 bp, Saccharomyces pastorianus
gtcaactgtttgcaggatggctcat

SEQ ID NO: 145283 - DNA, 25 bp, Saccharomyces pastorianus
aatgcgcaggttgggctaacttcac

SEQ ID NO: 145284 - DNA, 25 bp, Saccharomyces pastorianus
gtaatgatcacctatccttctactt

SEQ ID NO: 145285 - DNA, 25 bp, Saccharomyces pastorianus
atcttggtgcagatgtttgccactt

SEQ ID NO: 145286 - DNA, 25 bp, Saccharomyces pastorianus
ataagacattctccattcctcatgg

SEQ ID NO: 145287 - DNA, 25 bp, Saccharomyces pastorianus
tgatcactggaatcggcggtagcaa

SEQ ID NO: 145288 - DNA, 25 bp, Saccharomyces pastorianus
gagggattaccattttctagtgtga

SEQ ID NO: 145289 - DNA, 25 bp, Saccharomyces pastorianus
agctggagctcccatttgcgtcaaa

SEQ ID NO: 145290 - DNA, 25 bp, Saccharomyces pastorianus
ggctcattagatctggttgacttaa

SEQ ID NO: 145291 - DNA, 25 bp, Saccharomyces pastorianus
tagcaaatccatcgattcggtctcc

SEQ ID NO: 145292 - DNA, 25 bp, Saccharomyces pastorianus
aatttgtttgccgtggacaccacca

SEQ ID NO: 145293 - DNA, 25 bp, Saccharomyces pastorianus
gtaccgctcaagctttactggctaa

SEQ ID NO: 145294 - DNA, 25 bp, Saccharomyces pastorianus
cttcgcagtttctttctgaggacta

SEQ ID NO: 145295 - DNA, 25 bp, Saccharomyces pastorianus
acgaagtctttcacatgcaccatag

SEQ ID NO: 145296 - DNA, 25 bp, Saccharomyces pastorianus
gttgcttcgagctactgtgtttatc

SEQ ID NO: 145297 - DNA, 25 bp, Saccharomyces pastorianus
gactattctaacagtttcccaaggg

SEQ ID NO: 145298 - DNA, 25 bp, Saccharomyces pastorianus
cactatttccttggctcttgatgaa

SEQ ID NO: 145299 - DNA, 25 bp, Saccharomyces pastorianus
gcggttggccctccaaacaagagaa

SEQ ID NO: 145300 - DNA, 25 bp, Saccharomyces pastorianus
gtaatggcatatcctccgagcagtt

SEQ ID NO: 145301 - DNA, 25 bp, Saccharomyces pastorianus
tgtttatcacggtcctaagggccta

SEQ ID NO: 145302 - DNA, 25 bp, Saccharomyces pastorianus
gaaaatgacagttgccctcacgaac

SEQ ID NO: 145303 - DNA, 25 bp, Saccharomyces pastorianus
atgggattgcccaaagtactggaac

SEQ ID NO: 145304 - DNA, 25 bp, Saccharomyces pastorianus
gcagcaaatcaggtacaaggtccat

SEQ ID NO: 145305 - DNA, 25 bp, Saccharomyces pastorianus
atctaagttttttggcgccaatcca

SEQ ID NO: 145306 - DNA, 25 bp, Saccharomyces pastorianus
gcgccaatccaaacgaagccaaaga

SEQ ID NO: 145307 - DNA, 25 bp, Saccharomyces pastorianus
gaatttgtgaacagggccgcagctt

SEQ ID NO: 145308 - DNA, 25 bp, Saccharomyces pastorianus
aagtcgtccaagaagtctgctaatg

SEQ ID NO: 145309 - DNA, 25 bp, Saccharomyces pastorianus
aagccacgatagcagatcttagcaa

SEQ ID NO: 145310 - DNA, 25 bp, Saccharomyces pastorianus
gattcggcttttgcaactttaggca

SEQ ID NO: 145311 - DNA, 25 bp, Saccharomyces pastorianus
gtatcgccgaaggttcaagtacttt

SEQ ID NO: 145312 - DNA, 25 bp, Saccharomyces pastorianus
gccgcagcttccagcaatgggattg

SEQ ID NO: 145313 - DNA, 25 bp, Saccharomyces pastorianus
aggtccatcagtaagtcgtccaaga

SEQ ID NO: 145314 - DNA, 25 bp, Saccharomyces pastorianus
attgtgtttgctgtctttcttgttt

SEQ ID NO: 145315 - DNA, 25 bp, Saccharomyces pastorianus
atacctgtcttaacggccatttctt

SEQ ID NO: 145316 - DNA, 25 bp, Saccharomyces pastorianus
gaaaatcgtcataacccgttcagtt

SEQ ID NO: 145317 - DNA, 25 bp, Saccharomyces pastorianus
acggccatttcttattgtgtttgct

SEQ ID NO: 145318 - DNA, 25 bp, Saccharomyces pastorianus
cactcatgttcttctcgtatttggg

SEQ ID NO: 145319 - DNA, 25 bp, Saccharomyces pastorianus
atgcactcatgttcttctcgtattt

SEQ ID NO: 145320 - DNA, 25 bp, Saccharomyces pastorianus
tatgtctcacatacctgtcttaacg

SEQ ID NO: 145321 - DNA, 25 bp, Saccharomyces pastorianus
gctgtctttcttgtttctttgatac

SEQ ID NO: 145322 - DNA, 25 bp, Saccharomyces pastorianus
gttcagttccttgtttatgtctcac

SEQ ID NO: 145323 - DNA, 25 bp, Saccharomyces pastorianus
taacccgttcagttccttgtttatg

SEQ ID NO: 145324 - DNA, 25 bp, Saccharomyces pastorianus
gtcttaacggccatttcttattgtg

SEQ ID NO: 145325 - DNA, 25 bp, Saccharomyces pastorianus
ggcgttttcgcaatactattccttt

SEQ ID NO: 145326 - DNA, 25 bp, Saccharomyces pastorianus
ccatttgaaggcgttttcgcaatac

SEQ ID NO: 145327 - DNA, 25 bp, Saccharomyces pastorianus
gtaaaatggacctcatcttcaaaca

SEQ ID NO: 145328 - DNA, 25 bp, Saccharomyces pastorianus
attccttttgtaaaatggacctcat

SEQ ID NO: 145329 - DNA, 25 bp, Saccharomyces pastorianus
atgttccatttgaaggcgttttcgc

SEQ ID NO: 145330 - DNA, 25 bp, Saccharomyces pastorianus
gttttcgcaatactattccttttgt

SEQ ID NO: 145331 - DNA, 25 bp, Saccharomyces pastorianus
aatggacctcatcttcaaacacaat

SEQ ID NO: 145332 - DNA, 25 bp, Saccharomyces pastorianus
cctcatcttcaaacacaatattttt

SEQ ID NO: 145333 - DNA, 25 bp, Saccharomyces pastorianus
tcgcaatactattccttttgtaaaa

SEQ ID NO: 145334 - DNA, 25 bp, Saccharomyces pastorianus
gttccatttgaaggcgttttcgcaa

SEQ ID NO: 145335 - DNA, 25 bp, Saccharomyces pastorianus
ggacctcatcttcaaacacaatatt

SEQ ID NO: 145336 - DNA, 25 bp, Saccharomyces pastorianus
aggtgctgcttccaacagaaccaag

SEQ ID NO: 145337 - DNA, 25 bp, Saccharomyces pastorianus
gctccaaaaatctcttacaagaaag

SEQ ID NO: 145338 - DNA, 25 bp, Saccharomyces pastorianus
aagagagctagaaaggtcgccaaga

SEQ ID NO: 145339 - DNA, 25 bp, Saccharomyces pastorianus
ttacaagaaaggtgctgcttccaac

SEQ ID NO: 145340 - DNA, 25 bp, Saccharomyces pastorianus
agctccaaaaatctcttacaagaaa

SEQ ID NO: 145341 - DNA, 25 bp, Saccharomyces pastorianus
gctggtttgtctccatacgaaagaa

SEQ ID NO: 145342 - DNA, 25 bp, Saccharomyces pastorianus
agaaatcgctggtttgtctccatac

SEQ ID NO: 145343 - DNA, 25 bp, Saccharomyces pastorianus
tccaaaaatctcttacaagaaaggt

SEQ ID NO: 145344 - DNA, 25 bp, Saccharomyces pastorianus
caagttcgtaagatctttggtcaga

SEQ ID NO: 145345 - DNA, 25 bp, Saccharomyces pastorianus
atcgctggtttgtctccatacgaaa

SEQ ID NO: 145346 - DNA, 25 bp, Saccharomyces pastorianus
agattgggttctttcaccagagcca

SEQ ID NO: 145347 - DNA, 25 bp, Saccharomyces pastorianus
aactgtctacttgactgccagagat

SEQ ID NO: 145348 - DNA, 25 bp, Saccharomyces pastorianus
tggcggctccttcgctttagaattg

SEQ ID NO: 145349 - DNA, 25 bp, Saccharomyces pastorianus
cattcggattcttggatactttctc

SEQ ID NO: 145350 - DNA, 25 bp, Saccharomyces pastorianus
gctccttcgctttagaattggctca

SEQ ID NO: 145351 - DNA, 25 bp, Saccharomyces pastorianus
atgcatgttgccattcggattcttg

SEQ ID NO: 145352 - DNA, 25 bp, Saccharomyces pastorianus
ctacttgactgccagagatatgggt

SEQ ID NO: 145353 - DNA, 25 bp, Saccharomyces pastorianus
gcatgttgccattcggattcttgga

SEQ ID NO: 145354 - DNA, 25 bp, Saccharomyces pastorianus
attcttggatactttctccagtact

SEQ ID NO: 145355 - DNA, 25 bp, Saccharomyces pastorianus
ggattcttggatactttctccagta

SEQ ID NO: 145356 - DNA, 25 bp, Saccharomyces pastorianus
tccatgcatgttgccattcggattc

SEQ ID NO: 145357 - DNA, 25 bp, Saccharomyces pastorianus
gttgccattcggattcttggatact

SEQ ID NO: 145358 - DNA, 25 bp, Saccharomyces pastorianus
agtgttactcctcaattagctttag

SEQ ID NO: 145359 - DNA, 25 bp, Saccharomyces pastorianus
gaaactttatactccagaactgacg

SEQ ID NO: 145360 - DNA, 25 bp, Saccharomyces pastorianus
ggccaattgcaagccaacggtgctt

SEQ ID NO: 145361 - DNA, 25 bp, Saccharomyces pastorianus
tactgtcgagggttctaccactatt

SEQ ID NO: 145362 - DNA, 25 bp, Saccharomyces pastorianus
ggttcctattactgatccattgatg

SEQ ID NO: 145363 - DNA, 25 bp, Saccharomyces pastorianus
taccaagattggttgcggtctacaa

SEQ ID NO: 145364 - DNA, 25 bp, Saccharomyces pastorianus
gaaaagttctgccaactctgtccgt

SEQ ID NO: 145365 - DNA, 25 bp, Saccharomyces pastorianus
gttgctgttgcatcttttctacaaa

SEQ ID NO: 145366 - DNA, 25 bp, Saccharomyces pastorianus
aacggtgctttaattgcatcgctat

SEQ ID NO: 145367 - DNA, 25 bp, Saccharomyces pastorianus
gatgggcactccaattggtattcaa

SEQ ID NO: 145368 - DNA, 25 bp, Saccharomyces pastorianus
tgacggtagcgctccaggtgatgct

SEQ ID NO: 145369 - DNA, 25 bp, Saccharomyces pastorianus
aaatgaagtacgacgacctgttgaa

SEQ ID NO: 145370 - DNA, 25 bp, Saccharomyces pastorianus
atctcgctgttgatcgatgagctta

SEQ ID NO: 145371 - DNA, 25 bp, Saccharomyces pastorianus
aacgatctggatgttaatgatgaca

SEQ ID NO: 145372 - DNA, 25 bp, Saccharomyces pastorianus
gtacgacgacctgttgaaaatagtt

SEQ ID NO: 145373 - DNA, 25 bp, Saccharomyces pastorianus
gtcatggtataacgatctggatgtt

SEQ ID NO: 145374 - DNA, 25 bp, Saccharomyces pastorianus
atagttcagtcatggtataacgatc

SEQ ID NO: 145375 - DNA, 25 bp, Saccharomyces pastorianus
tgatgacagagcagtagtggagttc

SEQ ID NO: 145376 - DNA, 25 bp, Saccharomyces pastorianus
gggaaacattgtccttgaagagcta

SEQ ID NO: 145377 - DNA, 25 bp, Saccharomyces pastorianus
gaagagtttgagatctcgctgttga

SEQ ID NO: 145378 - DNA, 25 bp, Saccharomyces pastorianus
agagcagtagtggagttcatagaaa

SEQ ID NO: 145379 - DNA, 25 bp, Saccharomyces pastorianus
ctgttgatcgatgagcttaagaaaa

SEQ ID NO: 145380 - DNA, 25 bp, Saccharomyces pastorianus
atgaatgattgtaacgatggtgtgc

SEQ ID NO: 145381 - DNA, 25 bp, Saccharomyces pastorianus
gcgagtaccattgattatcttagcc

SEQ ID NO: 145382 - DNA, 25 bp, Saccharomyces pastorianus
acgatggtgtgcgagtaccattgat

SEQ ID NO: 145383 - DNA, 25 bp, Saccharomyces pastorianus
gattgtaacgatggtgtgcgagtac

SEQ ID NO: 145384 - DNA, 25 bp, Saccharomyces pastorianus
attgtaacgatggtgtgcgagtacc

SEQ ID NO: 145385 - DNA, 25 bp, Saccharomyces pastorianus
gtaacgatggtgtgcgagtaccatt

SEQ ID NO: 145386 - DNA, 25 bp, Saccharomyces pastorianus
gtgcgagtaccattgattatcttag

SEQ ID NO: 145387 - DNA, 25 bp, Saccharomyces pastorianus
gagtaccattgattatcttagccaa

SEQ ID NO: 145388 - DNA, 25 bp, Saccharomyces pastorianus
gtgtgcgagtaccattgattatctt

SEQ ID NO: 145389 - DNA, 25 bp, Saccharomyces pastorianus
gatggtgtgcgagtaccattgatta

SEQ ID NO: 145390 - DNA, 25 bp, Saccharomyces pastorianus
gtaccattgattatcttagccaatt

SEQ ID NO: 145391 - DNA, 25 bp, Saccharomyces pastorianus
gattcgattagactccacatatgga

SEQ ID NO: 145392 - DNA, 25 bp, Saccharomyces pastorianus
acattccgccctgtggtgaattaag

SEQ ID NO: 145393 - DNA, 25 bp, Saccharomyces pastorianus
atactgatatacattccgccctgtg

SEQ ID NO: 145394 - DNA, 25 bp, Saccharomyces pastorianus
gactacaaactacccatactgatat

SEQ ID NO: 145395 - DNA, 25 bp, Saccharomyces pastorianus
gaacctgacggagtagttagcataa

SEQ ID NO: 145396 - DNA, 25 bp, Saccharomyces pastorianus
ttgacgctctggttgactacaaact

SEQ ID NO: 145397 - DNA, 25 bp, Saccharomyces pastorianus
gactccacatatggacatttgagaa

SEQ ID NO: 145398 - DNA, 25 bp, Saccharomyces pastorianus
atgtatgccgatgttgaatctaggg

SEQ ID NO: 145399 - DNA, 25 bp, Saccharomyces pastorianus
atgggttgttatagatccaactatt

SEQ ID NO: 145400 - DNA, 25 bp, Saccharomyces pastorianus
gtacgggtcttttatcgttgacgct

SEQ ID NO: 145401 - DNA, 25 bp, Saccharomyces pastorianus
tatcgttgacgctctggttgactac

SEQ ID NO: 145402 - DNA, 25 bp, Saccharomyces pastorianus
agccacgatgttgataatgagccac

SEQ ID NO: 145403 - DNA, 25 bp, Saccharomyces pastorianus
gccaccacgcttgagaaacacgata

SEQ ID NO: 145404 - DNA, 25 bp, Saccharomyces pastorianus
gacagattcttatccctattcaaat

SEQ ID NO: 145405 - DNA, 25 bp, Saccharomyces pastorianus
tcagaacatttatctagccacgatg

SEQ ID NO: 145406 - DNA, 25 bp, Saccharomyces pastorianus
tgagccacacgataattccattaac

SEQ ID NO: 145407 - DNA, 25 bp, Saccharomyces pastorianus
aagagtgcgccaacatcaccagaag

SEQ ID NO: 145408 - DNA, 25 bp, Saccharomyces pastorianus
agacacgccaaatgaagtccctatg

SEQ ID NO: 145409 - DNA, 25 bp, Saccharomyces pastorianus
gcagttctgccgcatcaaatactaa

SEQ ID NO: 145410 - DNA, 25 bp, Saccharomyces pastorianus
ttaatgatgaaattcccgccaccac

SEQ ID NO: 145411 - DNA, 25 bp, Saccharomyces pastorianus
tctgatcctccgtctgataaggaag

SEQ ID NO: 145412 - DNA, 25 bp, Saccharomyces pastorianus
gtgaggagcccgaacatcaagcagt

SEQ ID NO: 145413 - DNA, 25 bp, Saccharomyces pastorianus
gaagcacacatttccattatcgaaa

SEQ ID NO: 145414 - DNA, 25 bp, Saccharomyces pastorianus
gaagacgacgaatcactcaagaagg

SEQ ID NO: 145415 - DNA, 25 bp, Saccharomyces pastorianus
agattatgcggatccagaaccaagc

SEQ ID NO: 145416 - DNA, 25 bp, Saccharomyces pastorianus
gacaacactgaattctcttctacta

SEQ ID NO: 145417 - DNA, 25 bp, Saccharomyces pastorianus
gaagccaatgtcagttcatccgtaa

SEQ ID NO: 145418 - DNA, 25 bp, Saccharomyces pastorianus
acagattcgccagacaattttcaag

SEQ ID NO: 145419 - DNA, 25 bp, Saccharomyces pastorianus
aagctgagatgtcttctggcgatga

SEQ ID NO: 145420 - DNA, 25 bp, Saccharomyces pastorianus
gcacaccgacgtcatcaatcaagag

SEQ ID NO: 145421 - DNA, 25 bp, Saccharomyces pastorianus
tacagatacggaggaagcacacatt

SEQ ID NO: 145422 - DNA, 25 bp, Saccharomyces pastorianus
aggacagagacatgcacaccgacgt

SEQ ID NO: 145423 - DNA, 25 bp, Saccharomyces pastorianus
ttcgttttcaacagattcgccagac

SEQ ID NO: 145424 - DNA, 25 bp, Saccharomyces pastorianus
gatccatcaaacatgaactttcagg

SEQ ID NO: 145425 - DNA, 25 bp, Saccharomyces pastorianus
gaactttcaggaattagccaatcat

SEQ ID NO: 145426 - DNA, 25 bp, Saccharomyces pastorianus
attccaccaacgcaacgaaacatgg

SEQ ID NO: 145427 - DNA, 25 bp, Saccharomyces pastorianus
ttacaataaagtcaagcctcttgtg

SEQ ID NO: 145428 - DNA, 25 bp, Saccharomyces pastorianus
gaaatggaagtcgatccatcaaaca

SEQ ID NO: 145429 - DNA, 25 bp, Saccharomyces pastorianus
gattcaatcggaaattatctcagat

SEQ ID NO: 145430 - DNA, 25 bp, Saccharomyces pastorianus
aagcctcttgtgaaagtaacctaca

SEQ ID NO: 145431 - DNA, 25 bp, Saccharomyces pastorianus
ttagtacttgctgccattccaccaa

SEQ ID NO: 145432 - DNA, 25 bp, Saccharomyces pastorianus
caatcatttcgaccgtcactcgaaa

SEQ ID NO: 145433 - DNA, 25 bp, Saccharomyces pastorianus
catgggcacgcagattcaatcggaa

SEQ ID NO: 145434 - DNA, 25 bp, Saccharomyces pastorianus
ttgctaggttagtacttgctgccat

SEQ ID NO: 145435 - DNA, 25 bp, Saccharomyces pastorianus
gcagaattgttcaaagctacagcta

SEQ ID NO: 145436 - DNA, 25 bp, Saccharomyces pastorianus
gtaatgctttgaaggccctaccaaa

SEQ ID NO: 145437 - DNA, 25 bp, Saccharomyces pastorianus
gaaggccctaccaaagcgtaatcat

SEQ ID NO: 145438 - DNA, 25 bp, Saccharomyces pastorianus
gcaagaggcacgtactattttaggt

SEQ ID NO: 145439 - DNA, 25 bp, Saccharomyces pastorianus
cagggcttgtcagtatatggactca

SEQ ID NO: 145440 - DNA, 25 bp, Saccharomyces pastorianus
attgacctgtggaacgtttacgtag

SEQ ID NO: 145441 - DNA, 25 bp, Saccharomyces pastorianus
tatcgaggttgtccgcaagtttgct

SEQ ID NO: 145442 - DNA, 25 bp, Saccharomyces pastorianus
gggtgattttttgatcagccacaat

SEQ ID NO: 145443 - DNA, 25 bp, Saccharomyces pastorianus
gaagcaggctaagtttttctttaat

SEQ ID NO: 145444 - DNA, 25 bp, Saccharomyces pastorianus
aaagtttctatctgggtatcgtggg

SEQ ID NO: 145445 - DNA, 25 bp, Saccharomyces pastorianus
gggtcggtcattattcgaaggtttg

SEQ ID NO: 145446 - DNA, 25 bp, Saccharomyces pastorianus
agattccgaggcctcatcagcaaac

SEQ ID NO: 145447 - DNA, 25 bp, Saccharomyces pastorianus
ggaagactccacaaagcagccctct

SEQ ID NO: 145448 - DNA, 25 bp, Saccharomyces pastorianus
gagatccacttctaaagattccgag

SEQ ID NO: 145449 - DNA, 25 bp, Saccharomyces pastorianus
aagtgtcaaagcatctgaaccagca

SEQ ID NO: 145450 - DNA, 25 bp, Saccharomyces pastorianus
gctagagctggactaattgaacatg

SEQ ID NO: 145451 - DNA, 25 bp, Saccharomyces pastorianus
ggtagcttccaccaaaagaaagaga

SEQ ID NO: 145452 - DNA, 25 bp, Saccharomyces pastorianus
agccctctacctcatcattagtaag

SEQ ID NO: 145453 - DNA, 25 bp, Saccharomyces pastorianus
acgaagctgcaagtgatgtgttatt

SEQ ID NO: 145454 - DNA, 25 bp, Saccharomyces pastorianus
tgaaccagcaagtagacccttgaaa

SEQ ID NO: 145455 - DNA, 25 bp, Saccharomyces pastorianus
gcaaactctgatgaagctagagctg

SEQ ID NO: 145456 - DNA, 25 bp, Saccharomyces pastorianus
actgaggaagtctcttttccaaggg

SEQ ID NO: 145457 - DNA, 25 bp, Saccharomyces pastorianus
gtagtagagaccgtttcaaagttat

SEQ ID NO: 145458 - DNA, 25 bp, Saccharomyces pastorianus
ataattaaagcgctatcccgtacaa

SEQ ID NO: 145459 - DNA, 25 bp, Saccharomyces pastorianus
attaattcagatcaacctctccacg

SEQ ID NO: 145460 - DNA, 25 bp, Saccharomyces pastorianus
atcccgtacaaatgtagcccacttt

SEQ ID NO: 145461 - DNA, 25 bp, Saccharomyces pastorianus
gtagactgacattggatattcctgt

SEQ ID NO: 145462 - DNA, 25 bp, Saccharomyces pastorianus
gagaaagctctttaaatgtcccaaa

SEQ ID NO: 145463 - DNA, 25 bp, Saccharomyces pastorianus
atgtcccaaatgcttggtggactta

SEQ ID NO: 145464 - DNA, 25 bp, Saccharomyces pastorianus
tggtggacttagaaacctccaacaa

SEQ ID NO: 145465 - DNA, 25 bp, Saccharomyces pastorianus
gtcacatttaccaccaacattgtct

SEQ ID NO: 145466 - DNA, 25 bp, Saccharomyces pastorianus
aaacgtgtttcatgtgtagactgac

SEQ ID NO: 145467 - DNA, 25 bp, Saccharomyces pastorianus
cccactttgggctgatacaagacat

SEQ ID NO: 145468 - DNA, 25 bp, Saccharomyces pastorianus
gaaaccctaagatgccttgtggcgt

SEQ ID NO: 145469 - DNA, 25 bp, Saccharomyces pastorianus
aagcgtctctcatacagacttgcaa

SEQ ID NO: 145470 - DNA, 25 bp, Saccharomyces pastorianus
gagtcagattttaagcgtctctcat

SEQ ID NO: 145471 - DNA, 25 bp, Saccharomyces pastorianus
gaatctattgcataaccctgtaaaa

SEQ ID NO: 145472 - DNA, 25 bp, Saccharomyces pastorianus
aggaggttcctgacccagagagtat

SEQ ID NO: 145473 - DNA, 25 bp, Saccharomyces pastorianus
acgcgatcatgttacccttttgtta

SEQ ID NO: 145474 - DNA, 25 bp, Saccharomyces pastorianus
gggaagttcaaaccatccacttttg

SEQ ID NO: 145475 - DNA, 25 bp, Saccharomyces pastorianus
gaattctatttctcaacgcgatcat

SEQ ID NO: 145476 - DNA, 25 bp, Saccharomyces pastorianus
gactatctgtggtctttgatcaaga

SEQ ID NO: 145477 - DNA, 25 bp, Saccharomyces pastorianus
aggaacttggctgactatctgtggt

SEQ ID NO: 145478 - DNA, 25 bp, Saccharomyces pastorianus
atgccttgtggcgtactcgaaaaaa

SEQ ID NO: 145479 - DNA, 25 bp, Saccharomyces pastorianus
gcgcagctacaatagtagatcctca

SEQ ID NO: 145480 - DNA, 25 bp, Saccharomyces pastorianus
gtagatcctcaaactctgatcatag

SEQ ID NO: 145481 - DNA, 25 bp, Saccharomyces pastorianus
gatcatagctgtaaattcaaatatt

SEQ ID NO: 145482 - DNA, 25 bp, Saccharomyces pastorianus
tattgtactcggacccaacactttg

SEQ ID NO: 145483 - DNA, 25 bp, Saccharomyces pastorianus
cctaattttggaggagattccctat

SEQ ID NO: 145484 - DNA, 25 bp, Saccharomyces pastorianus
ttccagcttttcgagaatattccca

SEQ ID NO: 145485 - DNA, 25 bp, Saccharomyces pastorianus
ggagattccctattgtactcggacc

SEQ ID NO: 145486 - DNA, 25 bp, Saccharomyces pastorianus
caacactttgcgcagctacaatagt

SEQ ID NO: 145487 - DNA, 25 bp, Saccharomyces pastorianus
tgtcaaattaaatcaatcgcaagta

SEQ ID NO: 145488 - DNA, 25 bp, Saccharomyces pastorianus
gaatattcccataaaagatcctaat

SEQ ID NO: 145489 - DNA, 25 bp, Saccharomyces pastorianus
agctcctggaggcaattccagcttt

SEQ ID NO: 145490 - DNA, 25 bp, Saccharomyces pastorianus
gaaaggcttgaaaaggaactgctag

SEQ ID NO: 145491 - DNA, 25 bp, Saccharomyces pastorianus
tacctgaattggaaaagctagaaat

SEQ ID NO: 145492 - DNA, 25 bp, Saccharomyces pastorianus
gaaacttacctgaattggaaaagct

SEQ ID NO: 145493 - DNA, 25 bp, Saccharomyces pastorianus
ggaactgctagaagtacaagtagat

SEQ ID NO: 145494 - DNA, 25 bp, Saccharomyces pastorianus
agtatccttcttaccggctatggaa

SEQ ID NO: 145495 - DNA, 25 bp, Saccharomyces pastorianus
aatttgatgatttagaggttgacga

SEQ ID NO: 145496 - DNA, 25 bp, Saccharomyces pastorianus
gatttagaggttgacgattttgaag

SEQ ID NO: 145497 - DNA, 25 bp, Saccharomyces pastorianus
atggctcaagaaaccattgaagtat

SEQ ID NO: 145498 - DNA, 25 bp, Saccharomyces pastorianus
attttgaagaggtcgatagtgaaga

SEQ ID NO: 145499 - DNA, 25 bp, Saccharomyces pastorianus
attgaagtatccttcttaccggcta

SEQ ID NO: 145500 - DNA, 25 bp, Saccharomyces pastorianus
tgaagtatccttcttaccggctatg

SEQ ID NO: 145501 - DNA, 25 bp, Saccharomyces pastorianus
agtttttattgcctgttctgttgaa

SEQ ID NO: 145502 - DNA, 25 bp, Saccharomyces pastorianus
gttctgttgaaatgtcctcacttgg

SEQ ID NO: 145503 - DNA, 25 bp, Saccharomyces pastorianus
gaacaagtttactccatctctggga

SEQ ID NO: 145504 - DNA, 25 bp, Saccharomyces pastorianus
ccatctctgggaaggcactcaagtt

SEQ ID NO: 145505 - DNA, 25 bp, Saccharomyces pastorianus
aatcggtactgaagcttcggaagca

SEQ ID NO: 145506 - DNA, 25 bp, Saccharomyces pastorianus
ttggtaaggccctatttcatctcgc

SEQ ID NO: 145507 - DNA, 25 bp, Saccharomyces pastorianus
tgtaccaaattagacctttcaggga

SEQ ID NO: 145508 - DNA, 25 bp, Saccharomyces pastorianus
tttgctgacttatacacttcgaggt

SEQ ID NO: 145509 - DNA, 25 bp, Saccharomyces pastorianus
gaagattacattgcacatgccgtga

SEQ ID NO: 145510 - DNA, 25 bp, Saccharomyces pastorianus
gtgacgatatcaaaccatacctgga

SEQ ID NO: 145511 - DNA, 25 bp, Saccharomyces pastorianus
aacctttctgataatgcgtttgggc

SEQ ID NO: 145512 - DNA, 25 bp, Saccharomyces pastorianus
ctgcgaaggctttccaaattgggct

SEQ ID NO: 145513 - DNA, 25 bp, Saccharomyces pastorianus
agatgctctgagtgttgcagtacaa

SEQ ID NO: 145514 - DNA, 25 bp, Saccharomyces pastorianus
tgggctttcccaaagattttctcca

SEQ ID NO: 145515 - DNA, 25 bp, Saccharomyces pastorianus
ttgctggaatcatcgttggtacatc

SEQ ID NO: 145516 - DNA, 25 bp, Saccharomyces pastorianus
cgacagctcaatcatcgatctagta

SEQ ID NO: 145517 - DNA, 25 bp, Saccharomyces pastorianus
gtatcaatgacatcgacagctcaat

SEQ ID NO: 145518 - DNA, 25 bp, Saccharomyces pastorianus
atcgttggtacatcgagttctcaat

SEQ ID NO: 145519 - DNA, 25 bp, Saccharomyces pastorianus
gattcagtctcagcaaactccgagt

SEQ ID NO: 145520 - DNA, 25 bp, Saccharomyces pastorianus
atgggaattattcggcctttgtgcg

SEQ ID NO: 145521 - DNA, 25 bp, Saccharomyces pastorianus
ctccgagttaacctcttctcaaata

SEQ ID NO: 145522 - DNA, 25 bp, Saccharomyces pastorianus
tagattttctgacccagtagcccaa

SEQ ID NO: 145523 - DNA, 25 bp, Saccharomyces pastorianus
gccattaccattggatgcctcaatt

SEQ ID NO: 145524 - DNA, 25 bp, Saccharomyces pastorianus
agccgacgattcaaagactagccat

SEQ ID NO: 145525 - DNA, 25 bp, Saccharomyces pastorianus
gaaaatcttcatctgccattaccat

SEQ ID NO: 145526 - DNA, 25 bp, Saccharomyces pastorianus
gaagacgagtaccaaggctccactt

SEQ ID NO: 145527 - DNA, 25 bp, Saccharomyces pastorianus
ggagatttcgtcattgaaccgcatg

SEQ ID NO: 145528 - DNA, 25 bp, Saccharomyces pastorianus
tatcgttaaacgcttgccccatgtc

SEQ ID NO: 145529 - DNA, 25 bp, Saccharomyces pastorianus
gaattgcgcctattacttcagatga

SEQ ID NO: 145530 - DNA, 25 bp, Saccharomyces pastorianus
ggctccacttcttccattgatgaag

SEQ ID NO: 145531 - DNA, 25 bp, Saccharomyces pastorianus
gtcaatctctctgcgtcaagtttaa

SEQ ID NO: 145532 - DNA, 25 bp, Saccharomyces pastorianus
atgccaaatgccttgctatcgttaa

SEQ ID NO: 145533 - DNA, 25 bp, Saccharomyces pastorianus
aaaagtccgcagatccaaacctagt

SEQ ID NO: 145534 - DNA, 25 bp, Saccharomyces pastorianus
tttctggtttcgaggaatgtgccat

SEQ ID NO: 145535 - DNA, 25 bp, Saccharomyces pastorianus
gacatgtccgacttgtaaaaataag

SEQ ID NO: 145536 - DNA, 25 bp, Saccharomyces pastorianus
gatcatcgggtaacaatacatgtcc

SEQ ID NO: 145537 - DNA, 25 bp, Saccharomyces pastorianus
gtgcacttacaattttctggtttcg

SEQ ID NO: 145538 - DNA, 25 bp, Saccharomyces pastorianus
actaccttcgaagacatgtccgact

SEQ ID NO: 145539 - DNA, 25 bp, Saccharomyces pastorianus
gttccacggagcatgtctttacaag

SEQ ID NO: 145540 - DNA, 25 bp, Saccharomyces pastorianus
gttactctatactacatgccgtgga

SEQ ID NO: 145541 - DNA, 25 bp, Saccharomyces pastorianus
tttacaagtggtttcgatcatcggg

SEQ ID NO: 145542 - DNA, 25 bp, Saccharomyces pastorianus
ttggattcgttggagttgtttacta

SEQ ID NO: 145543 - DNA, 25 bp, Saccharomyces pastorianus
gaatgtgccatatgttactctatac

SEQ ID NO: 145544 - DNA, 25 bp, Saccharomyces pastorianus
tgccgtggataggaaactaccttcg

SEQ ID NO: 145545 - DNA, 25 bp, Saccharomyces pastorianus
attttatacctttgatacttctcgg

SEQ ID NO: 145546 - DNA, 25 bp, Saccharomyces pastorianus
gagtgtttcaacaaagacccagcaa

SEQ ID NO: 145547 - DNA, 25 bp, Saccharomyces pastorianus
ttctaaaagtatgccctgttctccc

SEQ ID NO: 145548 - DNA, 25 bp, Saccharomyces pastorianus
gaagaatctgagtttagctaccaca

SEQ ID NO: 145549 - DNA, 25 bp, Saccharomyces pastorianus
gaacgtaattcttccagtcttaagg

SEQ ID NO: 145550 - DNA, 25 bp, Saccharomyces pastorianus
caagtgccgtattgctgctgattaa

SEQ ID NO: 145551 - DNA, 25 bp, Saccharomyces pastorianus
gttacatgccttcccacaaaaatat

SEQ ID NO: 145552 - DNA, 25 bp, Saccharomyces pastorianus
acttctcggtacatgcgaactcgat

SEQ ID NO: 145553 - DNA, 25 bp, Saccharomyces pastorianus
gtgtttccaaaccttctcttaatga

SEQ ID NO: 145554 - DNA, 25 bp, Saccharomyces pastorianus
cgccttatgggctgtttttcaagaa

SEQ ID NO: 145555 - DNA, 25 bp, Saccharomyces pastorianus
aatactgaaccttttagctaccttg

SEQ ID NO: 145556 - DNA, 25 bp, Saccharomyces pastorianus
ggcacagtactcaaactccaaattt

SEQ ID NO: 145557 - DNA, 25 bp, Saccharomyces pastorianus
tttaccgaagcgcagttgccaatgg

SEQ ID NO: 145558 - DNA, 25 bp, Saccharomyces pastorianus
tactgacgcgattacttcgttggaa

SEQ ID NO: 145559 - DNA, 25 bp, Saccharomyces pastorianus
ggaagacttttttatcgttgcgctt

SEQ ID NO: 145560 - DNA, 25 bp, Saccharomyces pastorianus
gccaatggccaagttgaacaatttt

SEQ ID NO: 145561 - DNA, 25 bp, Saccharomyces pastorianus
gaaattccaacgttggtccaagaat

SEQ ID NO: 145562 - DNA, 25 bp, Saccharomyces pastorianus
aactttgctggtatcatggcacagt

SEQ ID NO: 145563 - DNA, 25 bp, Saccharomyces pastorianus
ggactataaccacactttaccgaag

SEQ ID NO: 145564 - DNA, 25 bp, Saccharomyces pastorianus
taccgattttctttcttgtgcattg

SEQ ID NO: 145565 - DNA, 25 bp, Saccharomyces pastorianus
tcaacgttattgctgaataccgatt

SEQ ID NO: 145566 - DNA, 25 bp, Saccharomyces pastorianus
tatcgttgcgctttcttttaactta

SEQ ID NO: 145567 - DNA, 25 bp, Saccharomyces pastorianus
acttttgggccatacactttatcag

SEQ ID NO: 145568 - DNA, 25 bp, Saccharomyces pastorianus
ggcaagctatctgattgacgaccaa

SEQ ID NO: 145569 - DNA, 25 bp, Saccharomyces pastorianus
acaacgtcggttgtctaacgagtat

SEQ ID NO: 145570 - DNA, 25 bp, Saccharomyces pastorianus
gatggaccgcctgacttctaatgat

SEQ ID NO: 145571 - DNA, 25 bp, Saccharomyces pastorianus
atatccaagttaatggcgtctctag

SEQ ID NO: 145572 - DNA, 25 bp, Saccharomyces pastorianus
ttgtcggcaataatttctctcctta

SEQ ID NO: 145573 - DNA, 25 bp, Saccharomyces pastorianus
tggagatttccttcaaactaccaaa

SEQ ID NO: 145574 - DNA, 25 bp, Saccharomyces pastorianus
atcaattctaagatggaccgcctga

SEQ ID NO: 145575 - DNA, 25 bp, Saccharomyces pastorianus
agttcatctccccaattttgatcaa

SEQ ID NO: 145576 - DNA, 25 bp, Saccharomyces pastorianus
aagtttgtctcagagttcatctccc

SEQ ID NO: 145577 - DNA, 25 bp, Saccharomyces pastorianus
gagttttggaaacaggtcgacacca

SEQ ID NO: 145578 - DNA, 25 bp, Saccharomyces pastorianus
gaagaataccgtcaagtccgtctgg

SEQ ID NO: 145579 - DNA, 25 bp, Saccharomyces pastorianus
acaaggccggttttgcagaatgtgc

SEQ ID NO: 145580 - DNA, 25 bp, Saccharomyces pastorianus
ggtaacaagcctttttcagtatctt

SEQ ID NO: 145581 - DNA, 25 bp, Saccharomyces pastorianus
aattccgctgcgtttgatgagtttg

SEQ ID NO: 145582 - DNA, 25 bp, Saccharomyces pastorianus
gtacctgttctttgcgacttggaaa

SEQ ID NO: 145583 - DNA, 25 bp, Saccharomyces pastorianus
gaggcggacgtgagactctacccaa

SEQ ID NO: 145584 - DNA, 25 bp, Saccharomyces pastorianus
gtacctcggtctctagaggcacaga

SEQ ID NO: 145585 - DNA, 25 bp, Saccharomyces pastorianus
tagatcgctactttgccatcggaga

SEQ ID NO: 145586 - DNA, 25 bp, Saccharomyces pastorianus
gattattcccgtatacacacgtggc

SEQ ID NO: 145587 - DNA, 25 bp, Saccharomyces pastorianus
acttcaaatgcaatctggccaccat

SEQ ID NO: 145588 - DNA, 25 bp, Saccharomyces pastorianus
agggaagattcaccgtacctgttct

SEQ ID NO: 145589 - DNA, 25 bp, Saccharomyces pastorianus
gaactttattcaaactgcagactgg

SEQ ID NO: 145590 - DNA, 25 bp, Saccharomyces pastorianus
gattttaaagattccccactcggct

SEQ ID NO: 145591 - DNA, 25 bp, Saccharomyces pastorianus
aactgtacaacttcttatgggacga

SEQ ID NO: 145592 - DNA, 25 bp, Saccharomyces pastorianus
gaatatgatatgtttgctgccgaag

SEQ ID NO: 145593 - DNA, 25 bp, Saccharomyces pastorianus
gctggtgctctaatgctgaaatatt

SEQ ID NO: 145594 - DNA, 25 bp, Saccharomyces pastorianus
ggagcacttcaacaccgaggatttt

SEQ ID NO: 145595 - DNA, 25 bp, Saccharomyces pastorianus
atcggcgaagaattgtctatttact

SEQ ID NO: 145596 - DNA, 25 bp, Saccharomyces pastorianus
aacaccagtgtgaccgctcttatat

SEQ ID NO: 145597 - DNA, 25 bp, Saccharomyces pastorianus
gaatgtttaactgcttatccagaaa

SEQ ID NO: 145598 - DNA, 25 bp, Saccharomyces pastorianus
gattcaacattattctccttctgat

SEQ ID NO: 145599 - DNA, 25 bp, Saccharomyces pastorianus
tgacgtattcacaagttctgaggtg

SEQ ID NO: 145600 - DNA, 25 bp, Saccharomyces pastorianus
atattcacagtcatgggctctcaaa

SEQ ID NO: 145601 - DNA, 25 bp, Saccharomyces pastorianus
tattcgtcatagtggcgccttccaa

SEQ ID NO: 145602 - DNA, 25 bp, Saccharomyces pastorianus
atcggcgatctttttattgttcagc

SEQ ID NO: 145603 - DNA, 25 bp, Saccharomyces pastorianus
gctggagctaccgtatatgagttca

SEQ ID NO: 145604 - DNA, 25 bp, Saccharomyces pastorianus
atatgctaattgtggtgtaccggac

SEQ ID NO: 145605 - DNA, 25 bp, Saccharomyces pastorianus
tgttcagctttctactattcgtcat

SEQ ID NO: 145606 - DNA, 25 bp, Saccharomyces pastorianus
ctcactttgctgcactaagcttgat

SEQ ID NO: 145607 - DNA, 25 bp, Saccharomyces pastorianus
gttgtcaacttgaatttcccgctat

SEQ ID NO: 145608 - DNA, 25 bp, Saccharomyces pastorianus
agaaaattcaatcggtcctcacttt

SEQ ID NO: 145609 - DNA, 25 bp, Saccharomyces pastorianus
aaggcattttgtattcgttgtcaac

SEQ ID NO: 145610 - DNA, 25 bp, Saccharomyces pastorianus
gattctgcccatggaatactacctg

SEQ ID NO: 145611 - DNA, 25 bp, Saccharomyces pastorianus
gacccaagctgtatgaacatccctt

SEQ ID NO: 145612 - DNA, 25 bp, Saccharomyces pastorianus
gaacatcccttgtatataccgtgcg

SEQ ID NO: 145613 - DNA, 25 bp, Saccharomyces pastorianus
gaacccggtaaagatatccctgcac

SEQ ID NO: 145614 - DNA, 25 bp, Saccharomyces pastorianus
ttggttatatcctttgcacggcatc

SEQ ID NO: 145615 - DNA, 25 bp, Saccharomyces pastorianus
aacagatacactttcactctctttc

SEQ ID NO: 145616 - DNA, 25 bp, Saccharomyces pastorianus
gatatccctgcacttgaaatcgcta

SEQ ID NO: 145617 - DNA, 25 bp, Saccharomyces pastorianus
aatgacactcgcacgtttgattctg

SEQ ID NO: 145618 - DNA, 25 bp, Saccharomyces pastorianus
tattcactgggttccgttagacaat

SEQ ID NO: 145619 - DNA, 25 bp, Saccharomyces pastorianus
cggcatctcatcgtctattatcaat

SEQ ID NO: 145620 - DNA, 25 bp, Saccharomyces pastorianus
caagctctcagcacttcacaaaagt

SEQ ID NO: 145621 - DNA, 25 bp, Saccharomyces pastorianus
aacagcctgggaagtgcatcgtaca

SEQ ID NO: 145622 - DNA, 25 bp, Saccharomyces pastorianus
aatagttgcgcttgcgagttggccg

SEQ ID NO: 145623 - DNA, 25 bp, Saccharomyces pastorianus
tttgaggttcctgagcatgcgatta

SEQ ID NO: 145624 - DNA, 25 bp, Saccharomyces pastorianus
ggaggagtcatattctgccaaggat

SEQ ID NO: 145625 - DNA, 25 bp, Saccharomyces pastorianus
gatactatctcgatcgttttaacgg

SEQ ID NO: 145626 - DNA, 25 bp, Saccharomyces pastorianus
gattgagcatgctttacagacggca

SEQ ID NO: 145627 - DNA, 25 bp, Saccharomyces pastorianus
atttgttgacatcgagcacgctacc

SEQ ID NO: 145628 - DNA, 25 bp, Saccharomyces pastorianus
agcacgctaccgaatggaggctggt

SEQ ID NO: 145629 - DNA, 25 bp, Saccharomyces pastorianus
atacattatttgcaacgccgggtcc

SEQ ID NO: 145630 - DNA, 25 bp, Saccharomyces pastorianus
gagtttaggttccatgcagtttgcc

SEQ ID NO: 145631 - DNA, 25 bp, Saccharomyces pastorianus
agatgtggcaatcaccgtgtgctca

SEQ ID NO: 145632 - DNA, 25 bp, Saccharomyces pastorianus
acgccgggtcctacagagcaattgt

SEQ ID NO: 145633 - DNA, 25 bp, Saccharomyces pastorianus
ggttgcctgtagttgtgtaccacat

SEQ ID NO: 145634 - DNA, 25 bp, Saccharomyces pastorianus
tttgcatgtttcttgttctgtgtcg

SEQ ID NO: 145635 - DNA, 25 bp, Saccharomyces pastorianus
tggcgttacatcctggttttgggac

SEQ ID NO: 145636 - DNA, 25 bp, Saccharomyces pastorianus
gtaccgtttagttatgccacctact

SEQ ID NO: 145637 - DNA, 25 bp, Saccharomyces pastorianus
acaagttggtatttgctctgctgcc

SEQ ID NO: 145638 - DNA, 25 bp, Saccharomyces pastorianus
caccgtttcctatttcatttcgatg

SEQ ID NO: 145639 - DNA, 25 bp, Saccharomyces pastorianus
gcctcccttcatgcgtaagttgaaa

SEQ ID NO: 145640 - DNA, 25 bp, Saccharomyces pastorianus
tgggacgaagtttttggcacctact

SEQ ID NO: 145641 - DNA, 25 bp, Saccharomyces pastorianus
tgccccgctatttggtaatttcttg

SEQ ID NO: 145642 - DNA, 25 bp, Saccharomyces pastorianus
acgaatgtcatttcttcttgcacca

SEQ ID NO: 145643 - DNA, 25 bp, Saccharomyces pastorianus
atggttgccatcattacttgcccat

SEQ ID NO: 145644 - DNA, 25 bp, Saccharomyces pastorianus
actgccaatgactgctgggtcactt

SEQ ID NO: 145645 - DNA, 25 bp, Saccharomyces pastorianus
gactgctgggtcacttatcaaaaca

SEQ ID NO: 145646 - DNA, 25 bp, Saccharomyces pastorianus
atgtcgactaatacttccaagactt

SEQ ID NO: 145647 - DNA, 25 bp, Saccharomyces pastorianus
ggtacaagaacacaatactgccaat

SEQ ID NO: 145648 - DNA, 25 bp, Saccharomyces pastorianus
gaccaggtttttgagcgaacaccct

SEQ ID NO: 145649 - DNA, 25 bp, Saccharomyces pastorianus
tccaagactttggaactgttttcaa

SEQ ID NO: 145650 - DNA, 25 bp, Saccharomyces pastorianus
ggactatgctggtaaggacattact

SEQ ID NO: 145651 - DNA, 25 bp, Saccharomyces pastorianus
gacgagtccatcttggactatgctg

SEQ ID NO: 145652 - DNA, 25 bp, Saccharomyces pastorianus
tggtggtgacgagtccatcttggac

SEQ ID NO: 145653 - DNA, 25 bp, Saccharomyces pastorianus
tttttgagcgaacaccctggtggtg

SEQ ID NO: 145654 - DNA, 25 bp, Saccharomyces pastorianus
aacaccctggtggtgacgagtccat

SEQ ID NO: 145655 - DNA, 25 bp, Saccharomyces pastorianus
atggtgctgcataatcctgcatgcc

SEQ ID NO: 145656 - DNA, 25 bp, Saccharomyces pastorianus
agaacaggcgggaacctatggtgct

SEQ ID NO: 145657 - DNA, 25 bp, Saccharomyces pastorianus
tatacacaacactttttggagggtt

SEQ ID NO: 145658 - DNA, 25 bp, Saccharomyces pastorianus
gtagacaagaaagctggacgcattt

SEQ ID NO: 145659 - DNA, 25 bp, Saccharomyces pastorianus
ataagtgctacttcgcactgctggt

SEQ ID NO: 145660 - DNA, 25 bp, Saccharomyces pastorianus
cgcactgctggtccttggattaata

SEQ ID NO: 145661 - DNA, 25 bp, Saccharomyces pastorianus
agctggacgcatttccaaattggtc

SEQ ID NO: 145662 - DNA, 25 bp, Saccharomyces pastorianus
ggtttcctggtccttcaagattgaa

SEQ ID NO: 145663 - DNA, 25 bp, Saccharomyces pastorianus
attctgctgacaacatgcttccaaa

SEQ ID NO: 145664 - DNA, 25 bp, Saccharomyces pastorianus
tgcatgccctttgcaatatcatggg

SEQ ID NO: 145665 - DNA, 25 bp, Saccharomyces pastorianus
tgacaactgtttccattctgctgac

SEQ ID NO: 145666 - DNA, 25 bp, Saccharomyces pastorianus
aattctcaacatttctagtgctcct

SEQ ID NO: 145667 - DNA, 25 bp, Saccharomyces pastorianus
ggcaattcagccagttcgtgaaaga

SEQ ID NO: 145668 - DNA, 25 bp, Saccharomyces pastorianus
aggttattacgctgcattgccaaac

SEQ ID NO: 145669 - DNA, 25 bp, Saccharomyces pastorianus
gaagatttgtaccatgaattcctga

SEQ ID NO: 145670 - DNA, 25 bp, Saccharomyces pastorianus
ggcttaggtattatcccaggttatt

SEQ ID NO: 145671 - DNA, 25 bp, Saccharomyces pastorianus
gtgttgcgatgttattgaccttata

SEQ ID NO: 145672 - DNA, 25 bp, Saccharomyces pastorianus
tagtgctcctatacatctccatatc

SEQ ID NO: 145673 - DNA, 25 bp, Saccharomyces pastorianus
atatcctatgtgctaccgctatatg

SEQ ID NO: 145674 - DNA, 25 bp, Saccharomyces pastorianus
tgaccttatattgtggacccgtttt

SEQ ID NO: 145675 - DNA, 25 bp, Saccharomyces pastorianus
gctaccgctatatgcaacttcacaa

SEQ ID NO: 145676 - DNA, 25 bp, Saccharomyces pastorianus
tggtgccttttttacaatctcaatt

SEQ ID NO: 145677 - DNA, 25 bp, Saccharomyces pastorianus
ttcgcaactaagctatcaacagtta

SEQ ID NO: 145678 - DNA, 25 bp, Saccharomyces pastorianus
tacttaaacctaataccgcattcgc

SEQ ID NO: 145679 - DNA, 25 bp, Saccharomyces pastorianus
taccgcattcgcaactaagctatca

SEQ ID NO: 145680 - DNA, 25 bp, Saccharomyces pastorianus
tacgtacttaaacctaataccgcat

SEQ ID NO: 145681 - DNA, 25 bp, Saccharomyces pastorianus
gctatcaacagttattttggctacc

SEQ ID NO: 145682 - DNA, 25 bp, Saccharomyces pastorianus
tgcttttgactacgtacttaaacct

SEQ ID NO: 145683 - DNA, 25 bp, Saccharomyces pastorianus
agctatcaacagttattttggctac

SEQ ID NO: 145684 - DNA, 25 bp, Saccharomyces pastorianus
gcattcgcaactaagctatcaacag

SEQ ID NO: 145685 - DNA, 25 bp, Saccharomyces pastorianus
ataccgcattcgcaactaagctatc

SEQ ID NO: 145686 - DNA, 25 bp, Saccharomyces pastorianus
gtacttaaacctaataccgcattcg

SEQ ID NO: 145687 - DNA, 25 bp, Saccharomyces pastorianus
accgcattcgcaactaagctatcaa

SEQ ID NO: 145688 - DNA, 25 bp, Saccharomyces pastorianus
ggttaggattgctcctttacagtac

SEQ ID NO: 145689 - DNA, 25 bp, Saccharomyces pastorianus
gaaaaccatcttggcgtagcgaaga

SEQ ID NO: 145690 - DNA, 25 bp, Saccharomyces pastorianus
agctcgtctacttccctgaaattta

SEQ ID NO: 145691 - DNA, 25 bp, Saccharomyces pastorianus
gttagtgttcacaacttatccaaca

SEQ ID NO: 145692 - DNA, 25 bp, Saccharomyces pastorianus
gtaacggtagttcatcgtcgcccag

SEQ ID NO: 145693 - DNA, 25 bp, Saccharomyces pastorianus
caaagcacgcattatctgaggattc

SEQ ID NO: 145694 - DNA, 25 bp, Saccharomyces pastorianus
gattttattacttcacagctgttta

SEQ ID NO: 145695 - DNA, 25 bp, Saccharomyces pastorianus
tatttttacctagcggtagctcgtc

SEQ ID NO: 145696 - DNA, 25 bp, Saccharomyces pastorianus
ttaacgccagtaacttcttcatcca

SEQ ID NO: 145697 - DNA, 25 bp, Saccharomyces pastorianus
tccaagttttgaaagctgcctatgt

SEQ ID NO: 145698 - DNA, 25 bp, Saccharomyces pastorianus
gtcgcccagttcagcgtcattaacg

SEQ ID NO: 145699 - DNA, 25 bp, Saccharomyces pastorianus
ggatatacctcccatacttgatgac

SEQ ID NO: 145700 - DNA, 25 bp, Saccharomyces pastorianus
acgatggttctgtatttgggctaaa

SEQ ID NO: 145701 - DNA, 25 bp, Saccharomyces pastorianus
gacgacgaagcatgcacctatacca

SEQ ID NO: 145702 - DNA, 25 bp, Saccharomyces pastorianus
aaaaatgtccacacccatcgaaatc

SEQ ID NO: 145703 - DNA, 25 bp, Saccharomyces pastorianus
tagacttgagcgcttcttggtcata

SEQ ID NO: 145704 - DNA, 25 bp, Saccharomyces pastorianus
agcacatcaatcaaccgctgtcgat

SEQ ID NO: 145705 - DNA, 25 bp, Saccharomyces pastorianus
attcccgcagatgttgactacgatg

SEQ ID NO: 145706 - DNA, 25 bp, Saccharomyces pastorianus
cacacgttcttcgtcaacatcaaat

SEQ ID NO: 145707 - DNA, 25 bp, Saccharomyces pastorianus
gaacatcacagtattgcagcacatc

SEQ ID NO: 145708 - DNA, 25 bp, Saccharomyces pastorianus
ttctggaacccggagtcaagtacaa

SEQ ID NO: 145709 - DNA, 25 bp, Saccharomyces pastorianus
atcattgtccactgacgcattgggt

SEQ ID NO: 145710 - DNA, 25 bp, Saccharomyces pastorianus
atcccttttggttttgacgccaatg

SEQ ID NO: 145711 - DNA, 25 bp, Saccharomyces pastorianus
aacgatttgaagttgggccacgatt

SEQ ID NO: 145712 - DNA, 25 bp, Saccharomyces pastorianus
agaacccataacgaaccgcgacatt

SEQ ID NO: 145713 - DNA, 25 bp, Saccharomyces pastorianus
gacaacctttcgatcaattacacta

SEQ ID NO: 145714 - DNA, 25 bp, Saccharomyces pastorianus
taataccgatacttccagagcttgg

SEQ ID NO: 145715 - DNA, 25 bp, Saccharomyces pastorianus
gaaagaaccactatgagtcagctga

SEQ ID NO: 145716 - DNA, 25 bp, Saccharomyces pastorianus
gcgacattcacggtgcagacttgag

SEQ ID NO: 145717 - DNA, 25 bp, Saccharomyces pastorianus
gattctattgaatcagactcccaag

SEQ ID NO: 145718 - DNA, 25 bp, Saccharomyces pastorianus
gagtcagctgaatgatatcaccaaa

SEQ ID NO: 145719 - DNA, 25 bp, Saccharomyces pastorianus
gatcaaaaggcctctaaactgtata

SEQ ID NO: 145720 - DNA, 25 bp, Saccharomyces pastorianus
cgatttggacaatggccgcagtgga

SEQ ID NO: 145721 - DNA, 25 bp, Saccharomyces pastorianus
actcgcttctctcggtgttgtgatt

SEQ ID NO: 145722 - DNA, 25 bp, Saccharomyces pastorianus
atatctgggagttggactcgcttct

SEQ ID NO: 145723 - DNA, 25 bp, Saccharomyces pastorianus
aagttgaactttgcgatgcaggcta

SEQ ID NO: 145724 - DNA, 25 bp, Saccharomyces pastorianus
gtgacgggcttccaatgcagtatca

SEQ ID NO: 145725 - DNA, 25 bp, Saccharomyces pastorianus
cactaatggcatttgacgctggttc

SEQ ID NO: 145726 - DNA, 25 bp, Saccharomyces pastorianus
ggctggatcattagtaaacaccgtt

SEQ ID NO: 145727 - DNA, 25 bp, Saccharomyces pastorianus
atgttttggtatggacctgtccttc

SEQ ID NO: 145728 - DNA, 25 bp, Saccharomyces pastorianus
ttcccggcatcatccattatattga

SEQ ID NO: 145729 - DNA, 25 bp, Saccharomyces pastorianus
attattcagcgtctctatgtttagg

SEQ ID NO: 145730 - DNA, 25 bp, Saccharomyces pastorianus
ttaccgagcagctgtatatctggga

SEQ ID NO: 145731 - DNA, 25 bp, Saccharomyces pastorianus
tgggaggcactgttgaacaccaaat

SEQ ID NO: 145732 - DNA, 25 bp, Saccharomyces pastorianus
atattattggcggtattcctgggat

SEQ ID NO: 145733 - DNA, 25 bp, Saccharomyces pastorianus
atgcctttggtattgcaacgtttct

SEQ ID NO: 145734 - DNA, 25 bp, Saccharomyces pastorianus
caatcagtggccttgggtattttat

SEQ ID NO: 145735 - DNA, 25 bp, Saccharomyces pastorianus
tggctgggacaaaccttatatcatt

SEQ ID NO: 145736 - DNA, 25 bp, Saccharomyces pastorianus
attgttattagtttcatcggcgcat

SEQ ID NO: 145737 - DNA, 25 bp, Saccharomyces pastorianus
ttaatggcgtggtactccatcccaa

SEQ ID NO: 145738 - DNA, 25 bp, Saccharomyces pastorianus
atcgggctgattcttttcaactttg

SEQ ID NO: 145739 - DNA, 25 bp, Saccharomyces pastorianus
aattttcggatccatggctgcattc

SEQ ID NO: 145740 - DNA, 25 bp, Saccharomyces pastorianus
ggacattctattatgtttccttcca

SEQ ID NO: 145741 - DNA, 25 bp, Saccharomyces pastorianus
gcattacagtcctgtttggaccgga

SEQ ID NO: 145742 - DNA, 25 bp, Saccharomyces pastorianus
atgtgctccaacaggcggcatgttt

SEQ ID NO: 145743 - DNA, 25 bp, Saccharomyces pastorianus
gggatggtatcctccgtaagtacga

SEQ ID NO: 145744 - DNA, 25 bp, Saccharomyces pastorianus
caaagatctctttcatcgggcaatg

SEQ ID NO: 145745 - DNA, 25 bp, Saccharomyces pastorianus
aaggtgacagtagttctcaagagaa

SEQ ID NO: 145746 - DNA, 25 bp, Saccharomyces pastorianus
cgtggtccaagacggcctcagaaaa

SEQ ID NO: 145747 - DNA, 25 bp, Saccharomyces pastorianus
gagaagtattgaatcctaccgactc

SEQ ID NO: 145748 - DNA, 25 bp, Saccharomyces pastorianus
atgagaaggacctcttcagggccct

SEQ ID NO: 145749 - DNA, 25 bp, Saccharomyces pastorianus
gaatcctaccgactcaattttaagt

SEQ ID NO: 145750 - DNA, 25 bp, Saccharomyces pastorianus
tcaaagagtgcaactggcaaccagt

SEQ ID NO: 145751 - DNA, 25 bp, Saccharomyces pastorianus
ggcaaccagttggatacaccttcta

SEQ ID NO: 145752 - DNA, 25 bp, Saccharomyces pastorianus
gatacaccttctacactgtttcaaa

SEQ ID NO: 145753 - DNA, 25 bp, Saccharomyces pastorianus
gttctggtggcggaagttccaacac

SEQ ID NO: 145754 - DNA, 25 bp, Saccharomyces pastorianus
tcttacagaccggtagctccaatat

SEQ ID NO: 145755 - DNA, 25 bp, Saccharomyces pastorianus
tatggactctaaaccggaacaatta

SEQ ID NO: 145756 - DNA, 25 bp, Saccharomyces pastorianus
aaatgatcagaactccgcgtcagcg

SEQ ID NO: 145757 - DNA, 25 bp, Saccharomyces pastorianus
gttacaaatgcaggtgccaacttca

SEQ ID NO: 145758 - DNA, 25 bp, Saccharomyces pastorianus
gtaataccagccaaggcagtatcct

SEQ ID NO: 145759 - DNA, 25 bp, Saccharomyces pastorianus
cctttattagtggatacgcccgatt

SEQ ID NO: 145760 - DNA, 25 bp, Saccharomyces pastorianus
cgcgtcagcggatccgggaacaaat

SEQ ID NO: 145761 - DNA, 25 bp, Saccharomyces pastorianus
ttcaaatcaccttcaactggcagta

SEQ ID NO: 145762 - DNA, 25 bp, Saccharomyces pastorianus
ggatgcgatattcagtctaccaagt

SEQ ID NO: 145763 - DNA, 25 bp, Saccharomyces pastorianus
ataagcctatgcacatggatgcgat

SEQ ID NO: 145764 - DNA, 25 bp, Saccharomyces pastorianus
tgtagatgcatcacttgggttggct

SEQ ID NO: 145765 - DNA, 25 bp, Saccharomyces pastorianus
agatacggatggtggatattttcca

SEQ ID NO: 145766 - DNA, 25 bp, Saccharomyces pastorianus
gccactatgctaaatgctcacgaat

SEQ ID NO: 145767 - DNA, 25 bp, Saccharomyces pastorianus
gtactagcgtttgccactatgctaa

SEQ ID NO: 145768 - DNA, 25 bp, Saccharomyces pastorianus
caagttgtgtggtttagatacggat

SEQ ID NO: 145769 - DNA, 25 bp, Saccharomyces pastorianus
gtttgccactatgctaaatgctcac

SEQ ID NO: 145770 - DNA, 25 bp, Saccharomyces pastorianus
cacgaatcccaagttgtgtggttta

SEQ ID NO: 145771 - DNA, 25 bp, Saccharomyces pastorianus
tgctaaatgctcacgaatcccaagt

SEQ ID NO: 145772 - DNA, 25 bp, Saccharomyces pastorianus
aatgctcacgaatcccaagttgtgt

SEQ ID NO: 145773 - DNA, 25 bp, Saccharomyces pastorianus
gtggatattttccagatttgtcttc

SEQ ID NO: 145774 - DNA, 25 bp, Saccharomyces pastorianus
atacgtactagcgtttgccactatg

SEQ ID NO: 145775 - DNA, 25 bp, Saccharomyces pastorianus
tacacatgcacaatacgtactagcg

SEQ ID NO: 145776 - DNA, 25 bp, Saccharomyces pastorianus
gtcccatttaacataatctgcttat

SEQ ID NO: 145777 - DNA, 25 bp, Saccharomyces pastorianus
tgaattcgtactttccgagaaccgt

SEQ ID NO: 145778 - DNA, 25 bp, Saccharomyces pastorianus
ggcaacgccgaaggtcttggcgaaa

SEQ ID NO: 145779 - DNA, 25 bp, Saccharomyces pastorianus
gagaattaaatgagtcggccgcttt

SEQ ID NO: 145780 - DNA, 25 bp, Saccharomyces pastorianus
tcgtctcccgaaacaatgcatcatt

SEQ ID NO: 145781 - DNA, 25 bp, Saccharomyces pastorianus
atagcgcaccctgacgacgaagtta

SEQ ID NO: 145782 - DNA, 25 bp, Saccharomyces pastorianus
agagcagtctccgtacaggtgatgg

SEQ ID NO: 145783 - DNA, 25 bp, Saccharomyces pastorianus
cggccgctttattgctacacaatga

SEQ ID NO: 145784 - DNA, 25 bp, Saccharomyces pastorianus
atctgcttatcaaagggcaacgccg

SEQ ID NO: 145785 - DNA, 25 bp, Saccharomyces pastorianus
gaaatcaatttggtcatagcgcacc

SEQ ID NO: 145786 - DNA, 25 bp, Saccharomyces pastorianus
tctataacttcttctctttcacaaa

SEQ ID NO: 145787 - DNA, 25 bp, Saccharomyces pastorianus
ataattggtcccatactttctcacc

SEQ ID NO: 145788 - DNA, 25 bp, Saccharomyces pastorianus
agcaatcgctccaatagtagataaa

SEQ ID NO: 145789 - DNA, 25 bp, Saccharomyces pastorianus
cccagcaatcgctccaatagtagat

SEQ ID NO: 145790 - DNA, 25 bp, Saccharomyces pastorianus
cataattggtcccatactttctcac

SEQ ID NO: 145791 - DNA, 25 bp, Saccharomyces pastorianus
tcacccagcaatcgctccaatagta

SEQ ID NO: 145792 - DNA, 25 bp, Saccharomyces pastorianus
taattggtcccatactttctcaccc

SEQ ID NO: 145793 - DNA, 25 bp, Saccharomyces pastorianus
aattggtcccatactttctcaccca

SEQ ID NO: 145794 - DNA, 25 bp, Saccharomyces pastorianus
acccagcaatcgctccaatagtaga

SEQ ID NO: 145795 - DNA, 25 bp, Saccharomyces pastorianus
tggtcccatactttctcacccagca

SEQ ID NO: 145796 - DNA, 25 bp, Saccharomyces pastorianus
cccataattggtcccatactttctc

SEQ ID NO: 145797 - DNA, 25 bp, Saccharomyces pastorianus
attggtcccatactttctcacccag

SEQ ID NO: 145798 - DNA, 25 bp, Saccharomyces pastorianus
aagctgcaaaagttccgggatagac

SEQ ID NO: 145799 - DNA, 25 bp, Saccharomyces pastorianus
ggaagaagcttctcgaaacatatga

SEQ ID NO: 145800 - DNA, 25 bp, Saccharomyces pastorianus
gtgatcgaggtgtacgaaaccacga

SEQ ID NO: 145801 - DNA, 25 bp, Saccharomyces pastorianus
cactaccactgctggcggagaggat

SEQ ID NO: 145802 - DNA, 25 bp, Saccharomyces pastorianus
ccacgaaagggctggattcacaaat

SEQ ID NO: 145803 - DNA, 25 bp, Saccharomyces pastorianus
tccgggatagactcgtagaactgaa

SEQ ID NO: 145804 - DNA, 25 bp, Saccharomyces pastorianus
aagataccgtgatattgccaaacat

SEQ ID NO: 145805 - DNA, 25 bp, Saccharomyces pastorianus
attcctgatggaacgttttgttggc

SEQ ID NO: 145806 - DNA, 25 bp, Saccharomyces pastorianus
tatcaagattcactaccactgctgg

SEQ ID NO: 145807 - DNA, 25 bp, Saccharomyces pastorianus
tttgttggcataccagaagctttgg

SEQ ID NO: 145808 - DNA, 25 bp, Saccharomyces pastorianus
gatgacaccgtgagcaagcttgtta

SEQ ID NO: 145809 - DNA, 25 bp, Saccharomyces pastorianus
ggaaatcaggcctgccaaaccacta

SEQ ID NO: 145810 - DNA, 25 bp, Saccharomyces pastorianus
taaaagtgcacaagcctgggaatta

SEQ ID NO: 145811 - DNA, 25 bp, Saccharomyces pastorianus
aagccgcaccagaaacgggaatcat

SEQ ID NO: 145812 - DNA, 25 bp, Saccharomyces pastorianus
aagagccctcggaagcattagacaa

SEQ ID NO: 145813 - DNA, 25 bp, Saccharomyces pastorianus
gaccagattggactatttatccggt

SEQ ID NO: 145814 - DNA, 25 bp, Saccharomyces pastorianus
aagccattattcaaagccgcaccag

SEQ ID NO: 145815 - DNA, 25 bp, Saccharomyces pastorianus
tttatccggtaaaatcaatgccagt

SEQ ID NO: 145816 - DNA, 25 bp, Saccharomyces pastorianus
agggcagcattcacatacttgatca

SEQ ID NO: 145817 - DNA, 25 bp, Saccharomyces pastorianus
tgatcaacgatcctgaactcgcaaa

SEQ ID NO: 145818 - DNA, 25 bp, Saccharomyces pastorianus
gtcattccattccatgaaatcgtta

SEQ ID NO: 145819 - DNA, 25 bp, Saccharomyces pastorianus
tattgagtgcgaacccagtcattcc

SEQ ID NO: 145820 - DNA, 25 bp, Saccharomyces pastorianus
ttaatgctctctgctttcgagtcaa

SEQ ID NO: 145821 - DNA, 25 bp, Saccharomyces pastorianus
tatcctacttcttaatgctctctgc

SEQ ID NO: 145822 - DNA, 25 bp, Saccharomyces pastorianus
gaaatattttgaaactatcctactt

SEQ ID NO: 145823 - DNA, 25 bp, Saccharomyces pastorianus
gagtcaaaattcttttatgcgcgat

SEQ ID NO: 145824 - DNA, 25 bp, Saccharomyces pastorianus
atgctctctgctttcgagtcaaaat

SEQ ID NO: 145825 - DNA, 25 bp, Saccharomyces pastorianus
tttatgcgcgataatacttcttgga

SEQ ID NO: 145826 - DNA, 25 bp, Saccharomyces pastorianus
aaaaggagcacacctagcatcacaa

SEQ ID NO: 145827 - DNA, 25 bp, Saccharomyces pastorianus
gagcacacctagcatcacaaaatat

SEQ ID NO: 145828 - DNA, 25 bp, Saccharomyces pastorianus
acttcttaatgctctctgctttcga

SEQ ID NO: 145829 - DNA, 25 bp, Saccharomyces pastorianus
ctctgctttcgagtcaaaattcttt

SEQ ID NO: 145830 - DNA, 25 bp, Saccharomyces pastorianus
aactatcctacttcttaatgctctc

SEQ ID NO: 145831 - DNA, 25 bp, Saccharomyces pastorianus
tcaggtactcgtccgaagcatttcg

SEQ ID NO: 145832 - DNA, 25 bp, Saccharomyces pastorianus
atttcgagtaatgtaaccccacaag

SEQ ID NO: 145833 - DNA, 25 bp, Saccharomyces pastorianus
ggtactcgtccgaagcatttcgagt

SEQ ID NO: 145834 - DNA, 25 bp, Saccharomyces pastorianus
tcgtccgaagcatttcgagtaatgt

SEQ ID NO: 145835 - DNA, 25 bp, Saccharomyces pastorianus
gaatcaggtactcgtccgaagcatt

SEQ ID NO: 145836 - DNA, 25 bp, Saccharomyces pastorianus
tgtaaccccacaagtgtccctcaag

SEQ ID NO: 145837 - DNA, 25 bp, Saccharomyces pastorianus
taacgaatcaggtactcgtccgaag

SEQ ID NO: 145838 - DNA, 25 bp, Saccharomyces pastorianus
aagcatttcgagtaatgtaacccca

SEQ ID NO: 145839 - DNA, 25 bp, Saccharomyces pastorianus
tcgagtaatgtaaccccacaagtgt

SEQ ID NO: 145840 - DNA, 25 bp, Saccharomyces pastorianus
gtaatgtaaccccacaagtgtccct

SEQ ID NO: 145841 - DNA, 25 bp, Saccharomyces pastorianus
tatatgtttaacgaatcaggtactc

SEQ ID NO: 145842 - DNA, 25 bp, Saccharomyces pastorianus
gtatgagcaggctctgacacccgag

SEQ ID NO: 145843 - DNA, 25 bp, Saccharomyces pastorianus
gcaggctctgacacccgagttcttc

SEQ ID NO: 145844 - DNA, 25 bp, Saccharomyces pastorianus
agcaggctctgacacccgagttctt

SEQ ID NO: 145845 - DNA, 25 bp, Saccharomyces pastorianus
tatgagcaggctctgacacccgagt

SEQ ID NO: 145846 - DNA, 25 bp, Saccharomyces pastorianus
atgtatgagcaggctctgacacccg

SEQ ID NO: 145847 - DNA, 25 bp, Saccharomyces pastorianus
tgagcaggctctgacacccgagttc

SEQ ID NO: 145848 - DNA, 25 bp, Saccharomyces pastorianus
tgtatgagcaggctctgacacccga

SEQ ID NO: 145849 - DNA, 25 bp, Saccharomyces pastorianus
gagcaggctctgacacccgagttct

SEQ ID NO: 145850 - DNA, 25 bp, Saccharomyces pastorianus
atgagcaggctctgacacccgagtt

SEQ ID NO: 145851 - DNA, 25 bp, Saccharomyces pastorianus
tctttttttcatattctggcattgt

SEQ ID NO: 145852 - DNA, 25 bp, Saccharomyces pastorianus
tttcttctttttttcatattctggc

SEQ ID NO: 145853 - DNA, 25 bp, Saccharomyces pastorianus
tttttttcatattctggcattgtcc

SEQ ID NO: 145854 - DNA, 25 bp, Saccharomyces pastorianus
ttctttttttcatattctggcattg

SEQ ID NO: 145855 - DNA, 25 bp, Saccharomyces pastorianus
ctttttttcatattctggcattgtc

SEQ ID NO: 145856 - DNA, 25 bp, Saccharomyces pastorianus
cttctttttttcatattctggcatt

SEQ ID NO: 145857 - DNA, 25 bp, Saccharomyces pastorianus
agtttcttctttttttcatattctg

SEQ ID NO: 145858 - DNA, 25 bp, Saccharomyces pastorianus
tcttctttttttcatattctggcat

SEQ ID NO: 145859 - DNA, 25 bp, Saccharomyces pastorianus
ttcttctttttttcatattctggca

SEQ ID NO: 145860 - DNA, 25 bp, Saccharomyces pastorianus
gtttcttctttttttcatattctgg

SEQ ID NO: 145861 - DNA, 25 bp, Saccharomyces pastorianus
gaacatcctcatccgctaaacaaag

SEQ ID NO: 145862 - DNA, 25 bp, Saccharomyces pastorianus
cctacggcagcgattcatggaacat

SEQ ID NO: 145863 - DNA, 25 bp, Saccharomyces pastorianus
agcacaacatatactgtcagcacgg

SEQ ID NO: 145864 - DNA, 25 bp, Saccharomyces pastorianus
attgtctcgggccaaaagtcgctat

SEQ ID NO: 145865 - DNA, 25 bp, Saccharomyces pastorianus
aggagctcgtcatcttttgtcgaaa

SEQ ID NO: 145866 - DNA, 25 bp, Saccharomyces pastorianus
atcttcaactgaaagtccgatcggg

SEQ ID NO: 145867 - DNA, 25 bp, Saccharomyces pastorianus
acatcaactgttgcgaaatcttcaa

SEQ ID NO: 145868 - DNA, 25 bp, Saccharomyces pastorianus
gcgaaactacccttgaaacgataat

SEQ ID NO: 145869 - DNA, 25 bp, Saccharomyces pastorianus
aataccggtgcatccttgaacatta

SEQ ID NO: 145870 - DNA, 25 bp, Saccharomyces pastorianus
aacaacaaaggcttctccgtcaact

SEQ ID NO: 145871 - DNA, 25 bp, Saccharomyces pastorianus
aagctgcaggaaatacatccgttgc

SEQ ID NO: 145872 - DNA, 25 bp, Saccharomyces pastorianus
taccacatcgcatagtagcacgact

SEQ ID NO: 145873 - DNA, 25 bp, Saccharomyces pastorianus
atcatcggagtcattggtttccatt

SEQ ID NO: 145874 - DNA, 25 bp, Saccharomyces pastorianus
gttgtacccgagtttacttctagct

SEQ ID NO: 145875 - DNA, 25 bp, Saccharomyces pastorianus
tgtccagctccactacagagactga

SEQ ID NO: 145876 - DNA, 25 bp, Saccharomyces pastorianus
attagtttcttctgttgtacccgag

SEQ ID NO: 145877 - DNA, 25 bp, Saccharomyces pastorianus
aattgcctcaattctatcatcggag

SEQ ID NO: 145878 - DNA, 25 bp, Saccharomyces pastorianus
acatcatccgatatttctagcacat

SEQ ID NO: 145879 - DNA, 25 bp, Saccharomyces pastorianus
tcaaactcatacagtgcgccttcct

SEQ ID NO: 145880 - DNA, 25 bp, Saccharomyces pastorianus
ttttcttctctttcttacacatcat

SEQ ID NO: 145881 - DNA, 25 bp, Saccharomyces pastorianus
tagcacgaccagtacaactacgcct

SEQ ID NO: 145882 - DNA, 25 bp, Saccharomyces pastorianus
acgatgtcgaatcatcaacccctgg

SEQ ID NO: 145883 - DNA, 25 bp, Saccharomyces pastorianus
acggcactgcctcagcggtttatac

SEQ ID NO: 145884 - DNA, 25 bp, Saccharomyces pastorianus
tatatgcgttataccacttttacac

SEQ ID NO: 145885 - DNA, 25 bp, Saccharomyces pastorianus
gatcccgcaccacatcattatgcac

SEQ ID NO: 145886 - DNA, 25 bp, Saccharomyces pastorianus
tgctcttaatatatgcgttatacca

SEQ ID NO: 145887 - DNA, 25 bp, Saccharomyces pastorianus
gaggatcccgcaccacatcattatg

SEQ ID NO: 145888 - DNA, 25 bp, Saccharomyces pastorianus
ggcactgcctcagcggtttataccc

SEQ ID NO: 145889 - DNA, 25 bp, Saccharomyces pastorianus
aggatcccgcaccacatcattatgc

SEQ ID NO: 145890 - DNA, 25 bp, Saccharomyces pastorianus
tatgcgttataccacttttacaccg

SEQ ID NO: 145891 - DNA, 25 bp, Saccharomyces pastorianus
cggcactgcctcagcggtttatacc

SEQ ID NO: 145892 - DNA, 25 bp, Saccharomyces pastorianus
cccataacgcccatgattatctaca

SEQ ID NO: 145893 - DNA, 25 bp, Saccharomyces pastorianus
ggatcccgcaccacatcattatgca

SEQ ID NO: 145894 - DNA, 25 bp, Saccharomyces pastorianus
ggatttgactgggactggctacatt

SEQ ID NO: 145895 - DNA, 25 bp, Saccharomyces pastorianus
agtaactgaggccatcattcgtcac

SEQ ID NO: 145896 - DNA, 25 bp, Saccharomyces pastorianus
gaaactgctaggcttgttcgggaat

SEQ ID NO: 145897 - DNA, 25 bp, Saccharomyces pastorianus
gttgttccgcctccaaacagtgaaa

SEQ ID NO: 145898 - DNA, 25 bp, Saccharomyces pastorianus
gttctaaaccactctttgcgtgttt

SEQ ID NO: 145899 - DNA, 25 bp, Saccharomyces pastorianus
gggctcattctgcagattgctacta

SEQ ID NO: 145900 - DNA, 25 bp, Saccharomyces pastorianus
agaaaaggccattccagtggtgaat

SEQ ID NO: 145901 - DNA, 25 bp, Saccharomyces pastorianus
aagactgcactggttatcatgtttt

SEQ ID NO: 145902 - DNA, 25 bp, Saccharomyces pastorianus
ttgctactacgcttgacaatgtcgg

SEQ ID NO: 145903 - DNA, 25 bp, Saccharomyces pastorianus
gagaccaatttccagcatgggactt

SEQ ID NO: 145904 - DNA, 25 bp, Saccharomyces pastorianus
gtcacctgcttacttcatgatattg

SEQ ID NO: 145905 - DNA, 25 bp, Saccharomyces pastorianus
gggcaacactgtcactgtgcaaact

SEQ ID NO: 145906 - DNA, 25 bp, Saccharomyces pastorianus
caaactacttttgtccagcgtttct

SEQ ID NO: 145907 - DNA, 25 bp, Saccharomyces pastorianus
accgttgttagacagggcaacactg

SEQ ID NO: 145908 - DNA, 25 bp, Saccharomyces pastorianus
tctaggtatgagttcgtttacttca

SEQ ID NO: 145909 - DNA, 25 bp, Saccharomyces pastorianus
gtttcgcataatgaggcccagcatc

SEQ ID NO: 145910 - DNA, 25 bp, Saccharomyces pastorianus
tgaggcccagcatctaggtatgagt

SEQ ID NO: 145911 - DNA, 25 bp, Saccharomyces pastorianus
gtactgtaggcgttattaaatctgc

SEQ ID NO: 145912 - DNA, 25 bp, Saccharomyces pastorianus
actgtcactgtgcaaactacttttg

SEQ ID NO: 145913 - DNA, 25 bp, Saccharomyces pastorianus
taacagtcgcttctccctccgtggg

SEQ ID NO: 145914 - DNA, 25 bp, Saccharomyces pastorianus
aaacagtttcgcataatgaggccca

SEQ ID NO: 145915 - DNA, 25 bp, Saccharomyces pastorianus
tcccagtacgtaacagtcgcttctc

SEQ ID NO: 145916 - DNA, 25 bp, Saccharomyces pastorianus
gtgcttatgctttacaggtttgtct

SEQ ID NO: 145917 - DNA, 25 bp, Saccharomyces pastorianus
gggttccatgttgatattactatat

SEQ ID NO: 145918 - DNA, 25 bp, Saccharomyces pastorianus
cacctatttgtatgctgagggtaaa

SEQ ID NO: 145919 - DNA, 25 bp, Saccharomyces pastorianus
catgttcacctatttgtatgctgag

SEQ ID NO: 145920 - DNA, 25 bp, Saccharomyces pastorianus
gaaatcggtagtgcttatgctttac

SEQ ID NO: 145921 - DNA, 25 bp, Saccharomyces pastorianus
tccattttctatacgtggaatgtta

SEQ ID NO: 145922 - DNA, 25 bp, Saccharomyces pastorianus
aatcccatccttagtcatttattcc

SEQ ID NO: 145923 - DNA, 25 bp, Saccharomyces pastorianus
gatgttcccattagtctttccccgt

SEQ ID NO: 145924 - DNA, 25 bp, Saccharomyces pastorianus
aacacagatgttcccattagtcttt

SEQ ID NO: 145925 - DNA, 25 bp, Saccharomyces pastorianus
caggtttgtcttttacaaatcccat

SEQ ID NO: 145926 - DNA, 25 bp, Saccharomyces pastorianus
gtcatttattccattttctatacgt

SEQ ID NO: 145927 - DNA, 25 bp, Saccharomyces pastorianus
gtgccgttctattattaccaggtct

SEQ ID NO: 145928 - DNA, 25 bp, Saccharomyces pastorianus
atggcggctactcggtaaactgtgc

SEQ ID NO: 145929 - DNA, 25 bp, Saccharomyces pastorianus
taacgaccgtgactgtactttctcg

SEQ ID NO: 145930 - DNA, 25 bp, Saccharomyces pastorianus
acctatgtccatatctgtccagtgt

SEQ ID NO: 145931 - DNA, 25 bp, Saccharomyces pastorianus
aaacttccatgggtgtcggtgctgt

SEQ ID NO: 145932 - DNA, 25 bp, Saccharomyces pastorianus
attggttccattctaggtgccgttc

SEQ ID NO: 145933 - DNA, 25 bp, Saccharomyces pastorianus
gtgtctcttccgcattgttaatatt

SEQ ID NO: 145934 - DNA, 25 bp, Saccharomyces pastorianus
gaaattttcttgtactgcgttgcat

SEQ ID NO: 145935 - DNA, 25 bp, Saccharomyces pastorianus
gtggttcacgtacgaatcctcaata

SEQ ID NO: 145936 - DNA, 25 bp, Saccharomyces pastorianus
aaagatacaaccctgctagcgctgg

SEQ ID NO: 145937 - DNA, 25 bp, Saccharomyces pastorianus
accatcccactagcattttacattg

SEQ ID NO: 145938 - DNA, 25 bp, Saccharomyces pastorianus
gaaacagctgcccaattgcataagg

SEQ ID NO: 145939 - DNA, 25 bp, Saccharomyces pastorianus
gaagacactggattaccacgggtta

SEQ ID NO: 145940 - DNA, 25 bp, Saccharomyces pastorianus
atcataatacactcacatccgcaag

SEQ ID NO: 145941 - DNA, 25 bp, Saccharomyces pastorianus
gaatgttacttaagctccatggcag

SEQ ID NO: 145942 - DNA, 25 bp, Saccharomyces pastorianus
actctagaccattccatttggacga

SEQ ID NO: 145943 - DNA, 25 bp, Saccharomyces pastorianus
gaaccaatgcattcggtcatcaacg

SEQ ID NO: 145944 - DNA, 25 bp, Saccharomyces pastorianus
tcgtcaagatgaccctggttctttg

SEQ ID NO: 145945 - DNA, 25 bp, Saccharomyces pastorianus
ggattgttcttccacatctgaatca

SEQ ID NO: 145946 - DNA, 25 bp, Saccharomyces pastorianus
gcgacaacattctgcatttagccat

SEQ ID NO: 145947 - DNA, 25 bp, Saccharomyces pastorianus
atcaacggccgattgcgacaacatt

SEQ ID NO: 145948 - DNA, 25 bp, Saccharomyces pastorianus
gcagaaaaatttccgcaggtcacct

SEQ ID NO: 145949 - DNA, 25 bp, Saccharomyces pastorianus
gatgaaactaccgtcagaaactgct

SEQ ID NO: 145950 - DNA, 25 bp, Saccharomyces pastorianus
tgttcccattccattgatctcgcaa

SEQ ID NO: 145951 - DNA, 25 bp, Saccharomyces pastorianus
ttgatctcgcaatccttgaatttgg

SEQ ID NO: 145952 - DNA, 25 bp, Saccharomyces pastorianus
gactgaccagggttttatctaccca

SEQ ID NO: 145953 - DNA, 25 bp, Saccharomyces pastorianus
gagtgcatccaacaacaatgggcaa

SEQ ID NO: 145954 - DNA, 25 bp, Saccharomyces pastorianus
tacgaccttgactgaccagggtttt

SEQ ID NO: 145955 - DNA, 25 bp, Saccharomyces pastorianus
ggctccagtccgttacaaagaattc

SEQ ID NO: 145956 - DNA, 25 bp, Saccharomyces pastorianus
aagacgctaattcattcgctgttcc

SEQ ID NO: 145957 - DNA, 25 bp, Saccharomyces pastorianus
agaaactgctgtacgaccttgactg

SEQ ID NO: 145958 - DNA, 25 bp, Saccharomyces pastorianus
gaaacaacctttggagagtgcatcc

SEQ ID NO: 145959 - DNA, 25 bp, Saccharomyces pastorianus
tgataacgatacatcttccggctcc

SEQ ID NO: 145960 - DNA, 25 bp, Saccharomyces pastorianus
gaattttccggacgaatctctcatg

SEQ ID NO: 145961 - DNA, 25 bp, Saccharomyces pastorianus
attgcatccacctagtaacgtacct

SEQ ID NO: 145962 - DNA, 25 bp, Saccharomyces pastorianus
tcttccaacacttctgcgatagcaa

SEQ ID NO: 145963 - DNA, 25 bp, Saccharomyces pastorianus
gattctctcatatcaaaccttcagc

SEQ ID NO: 145964 - DNA, 25 bp, Saccharomyces pastorianus
ggagcgtcaaacacgtcagcttcaa

SEQ ID NO: 145965 - DNA, 25 bp, Saccharomyces pastorianus
tacctaccacgccttcaagagaatt

SEQ ID NO: 145966 - DNA, 25 bp, Saccharomyces pastorianus
aattccttctgttccagcgatggtg

SEQ ID NO: 145967 - DNA, 25 bp, Saccharomyces pastorianus
aacgggatcccgctcattgtaggac

SEQ ID NO: 145968 - DNA, 25 bp, Saccharomyces pastorianus
tccgcagtccactttcaaatctaat

SEQ ID NO: 145969 - DNA, 25 bp, Saccharomyces pastorianus
atggattctccatcactatacttga

SEQ ID NO: 145970 - DNA, 25 bp, Saccharomyces pastorianus
tctgcataatcttttcagcccttca

SEQ ID NO: 145971 - DNA, 25 bp, Saccharomyces pastorianus
attatgaagtgcagaaggaaccaaa

SEQ ID NO: 145972 - DNA, 25 bp, Saccharomyces pastorianus
ggaaccaaaaatatcatcgaaagaa

SEQ ID NO: 145973 - DNA, 25 bp, Saccharomyces pastorianus
gaaggagtacgtagagcgttactat

SEQ ID NO: 145974 - DNA, 25 bp, Saccharomyces pastorianus
gcagaaggaaccaaaaatatcatcg

SEQ ID NO: 145975 - DNA, 25 bp, Saccharomyces pastorianus
tatgaagtgcagaaggaaccaaaaa

SEQ ID NO: 145976 - DNA, 25 bp, Saccharomyces pastorianus
gaaggaaccaaaaatatcatcgaaa

SEQ ID NO: 145977 - DNA, 25 bp, Saccharomyces pastorianus
aggagtacgtagagcgttactattt

SEQ ID NO: 145978 - DNA, 25 bp, Saccharomyces pastorianus
tatcatcgaaagaaggagtacgtag

SEQ ID NO: 145979 - DNA, 25 bp, Saccharomyces pastorianus
ggagtacgtagagcgttactatttt

SEQ ID NO: 145980 - DNA, 25 bp, Saccharomyces pastorianus
aagaaggagtacgtagagcgttact

SEQ ID NO: 145981 - DNA, 25 bp, Saccharomyces pastorianus
cgaaagaaggagtacgtagagcgtt

SEQ ID NO: 145982 - DNA, 25 bp, Saccharomyces pastorianus
gattgtcatcgaaaccagaagtact

SEQ ID NO: 145983 - DNA, 25 bp, Saccharomyces pastorianus
taacccattatgatgtggtgcaaat

SEQ ID NO: 145984 - DNA, 25 bp, Saccharomyces pastorianus
taaccggttttttaatgtcatactg

SEQ ID NO: 145985 - DNA, 25 bp, Saccharomyces pastorianus
catactgtgggacactgcgggacaa

SEQ ID NO: 145986 - DNA, 25 bp, Saccharomyces pastorianus
tgcgaagtccttccaaagctgtatg

SEQ ID NO: 145987 - DNA, 25 bp, Saccharomyces pastorianus
ttcggaaacccgaacatcggtgatg

SEQ ID NO: 145988 - DNA, 25 bp, Saccharomyces pastorianus
caaccacgaaatggcggatcctaat

SEQ ID NO: 145989 - DNA, 25 bp, Saccharomyces pastorianus
ggtaccaaaacgcaatcattccatc

SEQ ID NO: 145990 - DNA, 25 bp, Saccharomyces pastorianus
gaaaacggtacagctctaacgattt

SEQ ID NO: 145991 - DNA, 25 bp, Saccharomyces pastorianus
gcaatcattccatcactgtacaaga

SEQ ID NO: 145992 - DNA, 25 bp, Saccharomyces pastorianus
gcaagattttttctggtgggtaaca

SEQ ID NO: 145993 - DNA, 25 bp, Saccharomyces pastorianus
gggcggtagaagaatctctgaaaac

SEQ ID NO: 145994 - DNA, 25 bp, Saccharomyces pastorianus
ggttctatcaacagaaaggtcttgc

SEQ ID NO: 145995 - DNA, 25 bp, Saccharomyces pastorianus
atgccaccacaagacgctgaaggtt

SEQ ID NO: 145996 - DNA, 25 bp, Saccharomyces pastorianus
tgtcagaccatacaagcacattgat

SEQ ID NO: 145997 - DNA, 25 bp, Saccharomyces pastorianus
cggtagaagaatctctgaaaacggt

SEQ ID NO: 145998 - DNA, 25 bp, Saccharomyces pastorianus
tgctgcctccgttgctagacacatt

SEQ ID NO: 145999 - DNA, 25 bp, Saccharomyces pastorianus
cagaaaggtcttgcaagctttggaa

SEQ ID NO: 146000 - DNA, 25 bp, Saccharomyces pastorianus
tgcctccgttgctagacacatttac

SEQ ID NO: 146001 - DNA, 25 bp, Saccharomyces pastorianus
aatcggtattgtcgaaatctctcca

SEQ ID NO: 146002 - DNA, 25 bp, Saccharomyces pastorianus
atcaacagaaaggtcttgcaagctt

SEQ ID NO: 146003 - DNA, 25 bp, Saccharomyces pastorianus
gcttccggttctatcaacagaaagg

SEQ ID NO: 146004 - DNA, 25 bp, Saccharomyces pastorianus
ggtaaggctccaagaatcttgtcca

SEQ ID NO: 146005 - DNA, 25 bp, Saccharomyces pastorianus
aggctccaagaatcttgtccaccgg

SEQ ID NO: 146006 - DNA, 25 bp, Saccharomyces pastorianus
gggtaaggctccaagaatcttgtcc

SEQ ID NO: 146007 - DNA, 25 bp, Saccharomyces pastorianus
gctccaagaatcttgtccaccggta

SEQ ID NO: 146008 - DNA, 25 bp, Saccharomyces pastorianus
gtaaggctccaagaatcttgtccac

SEQ ID NO: 146009 - DNA, 25 bp, Saccharomyces pastorianus
agggtaaggctccaagaatcttgtc

SEQ ID NO: 146010 - DNA, 25 bp, Saccharomyces pastorianus
aaggctccaagaatcttgtccaccg

SEQ ID NO: 146011 - DNA, 25 bp, Saccharomyces pastorianus
aagggtaaggctccaagaatcttgt

SEQ ID NO: 146012 - DNA, 25 bp, Saccharomyces pastorianus
ctccaagaatcttgtccaccggtag

SEQ ID NO: 146013 - DNA, 25 bp, Saccharomyces pastorianus
ggctccaagaatcttgtccaccggt

SEQ ID NO: 146014 - DNA, 25 bp, Saccharomyces pastorianus
aagaatcttgtccaccggtagaaag

SEQ ID NO: 146015 - DNA, 25 bp, Saccharomyces pastorianus
tcatagaaccgctccaaaatccgat

SEQ ID NO: 146016 - DNA, 25 bp, Saccharomyces pastorianus
taacgtctatttgaaattattggtc

SEQ ID NO: 146017 - DNA, 25 bp, Saccharomyces pastorianus
atccggtcatagaaccgctccaaaa

SEQ ID NO: 146018 - DNA, 25 bp, Saccharomyces pastorianus
caaaatccgataacgtctatttgaa

SEQ ID NO: 146019 - DNA, 25 bp, Saccharomyces pastorianus
accgctccaaaatccgataacgtct

SEQ ID NO: 146020 - DNA, 25 bp, Saccharomyces pastorianus
tagaaccgctccaaaatccgataac

SEQ ID NO: 146021 - DNA, 25 bp, Saccharomyces pastorianus
atccgataacgtctatttgaaatta

SEQ ID NO: 146022 - DNA, 25 bp, Saccharomyces pastorianus
ccgctccaaaatccgataacgtcta

SEQ ID NO: 146023 - DNA, 25 bp, Saccharomyces pastorianus
gaaccgctccaaaatccgataacgt

SEQ ID NO: 146024 - DNA, 25 bp, Saccharomyces pastorianus
gctccaaaatccgataacgtctatt

SEQ ID NO: 146025 - DNA, 25 bp, Saccharomyces pastorianus
gtcatagaaccgctccaaaatccga

SEQ ID NO: 146026 - DNA, 25 bp, Saccharomyces pastorianus
taacgtctatttgaaattattggtc

SEQ ID NO: 146027 - DNA, 25 bp, Saccharomyces pastorianus
atccggtcatagaaccgctccaaaa

SEQ ID NO: 146028 - DNA, 25 bp, Saccharomyces pastorianus
gggtattgatcacacttccaagcaa

SEQ ID NO: 146029 - DNA, 25 bp, Saccharomyces pastorianus
caagcaacacaaaagatccggtcat

SEQ ID NO: 146030 - DNA, 25 bp, Saccharomyces pastorianus
caaaatccgataacgtctatttgaa

SEQ ID NO: 146031 - DNA, 25 bp, Saccharomyces pastorianus
tagaaccgctccaaaatccgataac

SEQ ID NO: 146032 - DNA, 25 bp, Saccharomyces pastorianus
atccgataacgtctatttgaaatta

SEQ ID NO: 146033 - DNA, 25 bp, Saccharomyces pastorianus
ccgctccaaaatccgataacgtcta

SEQ ID NO: 146034 - DNA, 25 bp, Saccharomyces pastorianus
gaaccgctccaaaatccgataacgt

SEQ ID NO: 146035 - DNA, 25 bp, Saccharomyces pastorianus
gctccaaaatccgataacgtctatt

SEQ ID NO: 146036 - DNA, 25 bp, Saccharomyces pastorianus
gtcatagaaccgctccaaaatccga

SEQ ID NO: 146037 - DNA, 25 bp, Saccharomyces pastorianus
gacgtatggtctttgggtatcatga

SEQ ID NO: 146038 - DNA, 25 bp, Saccharomyces pastorianus
taccgattttgggttttgcgccaga

SEQ ID NO: 146039 - DNA, 25 bp, Saccharomyces pastorianus
ggtacaccaaagctcaagcatccag

SEQ ID NO: 146040 - DNA, 25 bp, Saccharomyces pastorianus
atagggcatcaaccgaagagctttt

SEQ ID NO: 146041 - DNA, 25 bp, Saccharomyces pastorianus
aatgtcttgctggacactagagcta

SEQ ID NO: 146042 - DNA, 25 bp, Saccharomyces pastorianus
gaagatccactaaaggcgttgtact

SEQ ID NO: 146043 - DNA, 25 bp, Saccharomyces pastorianus
ctaagcgtttgcctttgcgtagatg

SEQ ID NO: 146044 - DNA, 25 bp, Saccharomyces pastorianus
gatggcacctgaagttgtcaaacaa

SEQ ID NO: 146045 - DNA, 25 bp, Saccharomyces pastorianus
gataattcacattcaccactaacag

SEQ ID NO: 146046 - DNA, 25 bp, Saccharomyces pastorianus
gccactatggttgggacaccttact

SEQ ID NO: 146047 - DNA, 25 bp, Saccharomyces pastorianus
gagaatagtcccaccaacgataatt

SEQ ID NO: 146048 - DNA, 25 bp, Saccharomyces pastorianus
caacgatttccaaactatcggaccg

SEQ ID NO: 146049 - DNA, 25 bp, Saccharomyces pastorianus
gcacctagacctcccagttcaaata

SEQ ID NO: 146050 - DNA, 25 bp, Saccharomyces pastorianus
acctagacctcccagttcaaatagc

SEQ ID NO: 146051 - DNA, 25 bp, Saccharomyces pastorianus
tttccaaactatcggaccggcacct

SEQ ID NO: 146052 - DNA, 25 bp, Saccharomyces pastorianus
agacctcccagttcaaatagccagg

SEQ ID NO: 146053 - DNA, 25 bp, Saccharomyces pastorianus
tagacctcccagttcaaatagccag

SEQ ID NO: 146054 - DNA, 25 bp, Saccharomyces pastorianus
gacctcccagttcaaatagccaggc

SEQ ID NO: 146055 - DNA, 25 bp, Saccharomyces pastorianus
gatttccaaactatcggaccggcac

SEQ ID NO: 146056 - DNA, 25 bp, Saccharomyces pastorianus
caaactatcggaccggcacctagac

SEQ ID NO: 146057 - DNA, 25 bp, Saccharomyces pastorianus
gacaacgatttccaaactatcggac

SEQ ID NO: 146058 - DNA, 25 bp, Saccharomyces pastorianus
cgatttccaaactatcggaccggca

SEQ ID NO: 146059 - DNA, 25 bp, Saccharomyces pastorianus
aacaaattggagttgaaaatctaca

SEQ ID NO: 146060 - DNA, 25 bp, Saccharomyces pastorianus
aaatggatggcctccaagataaagt

SEQ ID NO: 146061 - DNA, 25 bp, Saccharomyces pastorianus
ctagatcaaaattccacccttggca

SEQ ID NO: 146062 - DNA, 25 bp, Saccharomyces pastorianus
tacaaacattaagtccgttgatttt

SEQ ID NO: 146063 - DNA, 25 bp, Saccharomyces pastorianus
gttgattttaagaacgatcccagta

SEQ ID NO: 146064 - DNA, 25 bp, Saccharomyces pastorianus
atcaaaattccacccttggcaacaa

SEQ ID NO: 146065 - DNA, 25 bp, Saccharomyces pastorianus
ttccacccttggcaacaaacaaatt

SEQ ID NO: 146066 - DNA, 25 bp, Saccharomyces pastorianus
gaacgatcccagtatctcataaaat

SEQ ID NO: 146067 - DNA, 25 bp, Saccharomyces pastorianus
tttaagaacgatcccagtatctcat

SEQ ID NO: 146068 - DNA, 25 bp, Saccharomyces pastorianus
tctcataaaatggatggcctccaag

SEQ ID NO: 146069 - DNA, 25 bp, Saccharomyces pastorianus
gaaaatctacaaacattaagtccgt

SEQ ID NO: 146070 - DNA, 25 bp, Saccharomyces pastorianus
atgtacctaataaggcacccgtagt

SEQ ID NO: 146071 - DNA, 25 bp, Saccharomyces pastorianus
aagaagttgttgctgtgttgctcaa

SEQ ID NO: 146072 - DNA, 25 bp, Saccharomyces pastorianus
taaggcgattccattgcttctacgt

SEQ ID NO: 146073 - DNA, 25 bp, Saccharomyces pastorianus
gggaagttcatctatgggccgcttt

SEQ ID NO: 146074 - DNA, 25 bp, Saccharomyces pastorianus
gactatggcctggaaatccttgaat

SEQ ID NO: 146075 - DNA, 25 bp, Saccharomyces pastorianus
gttgcatatcttcttcgagacactt

SEQ ID NO: 146076 - DNA, 25 bp, Saccharomyces pastorianus
gtgttgctcaaatctgctgcatgta

SEQ ID NO: 146077 - DNA, 25 bp, Saccharomyces pastorianus
gtagttggtactgcgagtgccactt

SEQ ID NO: 146078 - DNA, 25 bp, Saccharomyces pastorianus
agaggtcatcttgtcactgttaatc

SEQ ID NO: 146079 - DNA, 25 bp, Saccharomyces pastorianus
gagtgccactttacagcagcttatc

SEQ ID NO: 146080 - DNA, 25 bp, Saccharomyces pastorianus
caccgctgtaaggagttgtcgttgt

SEQ ID NO: 146081 - DNA, 25 bp, Saccharomyces pastorianus
gattctttacgtttatacacagtga

SEQ ID NO: 146082 - DNA, 25 bp, Saccharomyces pastorianus
gaggatactgatttttccgtgaatg

SEQ ID NO: 146083 - DNA, 25 bp, Saccharomyces pastorianus
acgcttgtcaatttcgtaagtcaga

SEQ ID NO: 146084 - DNA, 25 bp, Saccharomyces pastorianus
aattcgttattgatacgcttgtcaa

SEQ ID NO: 146085 - DNA, 25 bp, Saccharomyces pastorianus
aacatcattaattcaccattcgagt

SEQ ID NO: 146086 - DNA, 25 bp, Saccharomyces pastorianus
gaactgttaatgaactcttggacca

SEQ ID NO: 146087 - DNA, 25 bp, Saccharomyces pastorianus
acagagtttacctatgagtgtcatt

SEQ ID NO: 146088 - DNA, 25 bp, Saccharomyces pastorianus
gatccaagtgtcatacgatgttttt

SEQ ID NO: 146089 - DNA, 25 bp, Saccharomyces pastorianus
aatgaggttggtaattccgatgagc

SEQ ID NO: 146090 - DNA, 25 bp, Saccharomyces pastorianus
gagtttgatttccacctatatgatc

SEQ ID NO: 146091 - DNA, 25 bp, Saccharomyces pastorianus
ggaaaacttagtcatcgatagcttg

SEQ ID NO: 146092 - DNA, 25 bp, Saccharomyces pastorianus
tttcatgtatatttggatccaccac

SEQ ID NO: 146093 - DNA, 25 bp, Saccharomyces pastorianus
gtggtacgttttctgaattgtccca

SEQ ID NO: 146094 - DNA, 25 bp, Saccharomyces pastorianus
gtcccaaaaactatcttcgttcgat

SEQ ID NO: 146095 - DNA, 25 bp, Saccharomyces pastorianus
cacaaatcctcgctttcagacaaaa

SEQ ID NO: 146096 - DNA, 25 bp, Saccharomyces pastorianus
gacactttcatttatgccgtctggg

SEQ ID NO: 146097 - DNA, 25 bp, Saccharomyces pastorianus
aacccagagctcgataatttaaccg

SEQ ID NO: 146098 - DNA, 25 bp, Saccharomyces pastorianus
gccgtctgggattgttcatttttat

SEQ ID NO: 146099 - DNA, 25 bp, Saccharomyces pastorianus
agtgctctttagagtgcttgcaaga

SEQ ID NO: 146100 - DNA, 25 bp, Saccharomyces pastorianus
ctttgatgcaagactgtggtacgtt

SEQ ID NO: 146101 - DNA, 25 bp, Saccharomyces pastorianus
caattgcttctgtgatttgtcgaac

SEQ ID NO: 146102 - DNA, 25 bp, Saccharomyces pastorianus
gaaaatcgcttattacagggtcaga

SEQ ID NO: 146103 - DNA, 25 bp, Saccharomyces pastorianus
tatgttgttactaggagcggcgtga

SEQ ID NO: 146104 - DNA, 25 bp, Saccharomyces pastorianus
aggacgttcaagtcagcttcaatga

SEQ ID NO: 146105 - DNA, 25 bp, Saccharomyces pastorianus
gatacaccaagaggcacaatacctt

SEQ ID NO: 146106 - DNA, 25 bp, Saccharomyces pastorianus
gtatacgaggtatcccactaatttg

SEQ ID NO: 146107 - DNA, 25 bp, Saccharomyces pastorianus
gtgaggtatacgaggtatcccacta

SEQ ID NO: 146108 - DNA, 25 bp, Saccharomyces pastorianus
cggcgtgaggtatacgaggtatccc

SEQ ID NO: 146109 - DNA, 25 bp, Saccharomyces pastorianus
tcagcttcaatgacaagtatgttgt

SEQ ID NO: 146110 - DNA, 25 bp, Saccharomyces pastorianus
aataaggacgttcaagtcagcttca

SEQ ID NO: 146111 - DNA, 25 bp, Saccharomyces pastorianus
accaagaggcacaataccttttggg

SEQ ID NO: 146112 - DNA, 25 bp, Saccharomyces pastorianus
gttcaagtcagcttcaatgacaagt

SEQ ID NO: 146113 - DNA, 25 bp, Saccharomyces pastorianus
gaggtatacgaggtatcccactaat

SEQ ID NO: 146114 - DNA, 25 bp, Saccharomyces pastorianus
tgacgatgaatatgaagttggcagt

SEQ ID NO: 146115 - DNA, 25 bp, Saccharomyces pastorianus
gggattagacaaaccaggcatatac

SEQ ID NO: 146116 - DNA, 25 bp, Saccharomyces pastorianus
gaatatgaagttggcagtgaaggca

SEQ ID NO: 146117 - DNA, 25 bp, Saccharomyces pastorianus
ccaggcatatacatttattcgacaa

SEQ ID NO: 146118 - DNA, 25 bp, Saccharomyces pastorianus
aaaggatgtcgttttcaattcagat

SEQ ID NO: 146119 - DNA, 25 bp, Saccharomyces pastorianus
gtgaaggcaataacaatagctctgc

SEQ ID NO: 146120 - DNA, 25 bp, Saccharomyces pastorianus
aaaccaggcatatacatttattcga

SEQ ID NO: 146121 - DNA, 25 bp, Saccharomyces pastorianus
gacaaaggatgtcgttttcaattca

SEQ ID NO: 146122 - DNA, 25 bp, Saccharomyces pastorianus
aggatgtcgttttcaattcagatga

SEQ ID NO: 146123 - DNA, 25 bp, Saccharomyces pastorianus
gacaaaccaggcatatacatttatt

SEQ ID NO: 146124 - DNA, 25 bp, Saccharomyces pastorianus
ggcatatacatttattcgacaaagg

SEQ ID NO: 146125 - DNA, 25 bp, Saccharomyces pastorianus
gaacttgtggagacatagtccagaa

SEQ ID NO: 146126 - DNA, 25 bp, Saccharomyces pastorianus
ttctgctgtgaaagagtgcccgttt

SEQ ID NO: 146127 - DNA, 25 bp, Saccharomyces pastorianus
aattgcctctttatgacaattcggc

SEQ ID NO: 146128 - DNA, 25 bp, Saccharomyces pastorianus
gcccgtttatgtatctacggtgcta

SEQ ID NO: 146129 - DNA, 25 bp, Saccharomyces pastorianus
gctgtcatccaatgaagctaggttc

SEQ ID NO: 146130 - DNA, 25 bp, Saccharomyces pastorianus
atctacggtgctaagaaactcttcc

SEQ ID NO: 146131 - DNA, 25 bp, Saccharomyces pastorianus
acatagtccagaagaattggctgct

SEQ ID NO: 146132 - DNA, 25 bp, Saccharomyces pastorianus
aaagagtgcccgtttatgtatctac

SEQ ID NO: 146133 - DNA, 25 bp, Saccharomyces pastorianus
gacaattcggcagtatatgcagaag

SEQ ID NO: 146134 - DNA, 25 bp, Saccharomyces pastorianus
ggctgcttacaatagctgtcatcca

SEQ ID NO: 146135 - DNA, 25 bp, Saccharomyces pastorianus
attacttttaggagtttctgctgtg

SEQ ID NO: 146136 - DNA, 25 bp, Saccharomyces pastorianus
gactattcttgtggtgcttctatta

SEQ ID NO: 146137 - DNA, 25 bp, Saccharomyces pastorianus
gaaattaggctatgcgcgtgataaa

SEQ ID NO: 146138 - DNA, 25 bp, Saccharomyces pastorianus
tatcggtttgccaagtacgccttaa

SEQ ID NO: 146139 - DNA, 25 bp, Saccharomyces pastorianus
acttcgaccgtgatcacatgggagt

SEQ ID NO: 146140 - DNA, 25 bp, Saccharomyces pastorianus
ggagggaatctcaggacgcatcaac

SEQ ID NO: 146141 - DNA, 25 bp, Saccharomyces pastorianus
aatcgtccagaaaagcgtaggccac

SEQ ID NO: 146142 - DNA, 25 bp, Saccharomyces pastorianus
gacgcatcaacggatcggcacgata

SEQ ID NO: 146143 - DNA, 25 bp, Saccharomyces pastorianus
atgggtttacttacgctattgacta

SEQ ID NO: 146144 - DNA, 25 bp, Saccharomyces pastorianus
atttacagaccatatcacgctacga

SEQ ID NO: 146145 - DNA, 25 bp, Saccharomyces pastorianus
ttccttgccgatgtgtcgaacttat

SEQ ID NO: 146146 - DNA, 25 bp, Saccharomyces pastorianus
gacatgctatgtcacttcgaccgtg

SEQ ID NO: 146147 - DNA, 25 bp, Saccharomyces pastorianus
ggaagatcttctttatcaaagttac

SEQ ID NO: 146148 - DNA, 25 bp, Saccharomyces pastorianus
tcaattttcctgtccgaatgatctt

SEQ ID NO: 146149 - DNA, 25 bp, Saccharomyces pastorianus
tatggacactgactactcaacctgt

SEQ ID NO: 146150 - DNA, 25 bp, Saccharomyces pastorianus
gttacaatttctatatggacactga

SEQ ID NO: 146151 - DNA, 25 bp, Saccharomyces pastorianus
tacattagtacgaaattgcccaagc

SEQ ID NO: 146152 - DNA, 25 bp, Saccharomyces pastorianus
agcgattttcaattttcctgtccga

SEQ ID NO: 146153 - DNA, 25 bp, Saccharomyces pastorianus
ctgtaattatataggtaactcatcc

SEQ ID NO: 146154 - DNA, 25 bp, Saccharomyces pastorianus
ttcctgtccgaatgatcttactacg

SEQ ID NO: 146155 - DNA, 25 bp, Saccharomyces pastorianus
acgaaattgcccaagcgattttcaa

SEQ ID NO: 146156 - DNA, 25 bp, Saccharomyces pastorianus
atcttactacggaagatcttcttta

SEQ ID NO: 146157 - DNA, 25 bp, Saccharomyces pastorianus
gacactgactactcaacctgtaatt

SEQ ID NO: 146158 - DNA, 25 bp, Saccharomyces pastorianus
gaatgtcaccgcagacgccaaagtt

SEQ ID NO: 146159 - DNA, 25 bp, Saccharomyces pastorianus
ggactgaatgcctcaacaacttatg

SEQ ID NO: 146160 - DNA, 25 bp, Saccharomyces pastorianus
tgggcggcattttattttcacatgt

SEQ ID NO: 146161 - DNA, 25 bp, Saccharomyces pastorianus
gagcgtactgacttggcgattcaaa

SEQ ID NO: 146162 - DNA, 25 bp, Saccharomyces pastorianus
taaaactctcatggcgcagacatat

SEQ ID NO: 146163 - DNA, 25 bp, Saccharomyces pastorianus
gaggtcctggacactgatatgaatt

SEQ ID NO: 146164 - DNA, 25 bp, Saccharomyces pastorianus
cctacatcctcattttctgtgggta

SEQ ID NO: 146165 - DNA, 25 bp, Saccharomyces pastorianus
agtgacgtcgcttactctgttccta

SEQ ID NO: 146166 - DNA, 25 bp, Saccharomyces pastorianus
gaagtaccgatgtctgctctttgat

SEQ ID NO: 146167 - DNA, 25 bp, Saccharomyces pastorianus
gatctttggtttggacttctgcagt

SEQ ID NO: 146168 - DNA, 25 bp, Saccharomyces pastorianus
ggaccatatttagtgtcttcccaaa

SEQ ID NO: 146169 - DNA, 25 bp, Saccharomyces pastorianus
caatgtttctgtagtctgtacccct

SEQ ID NO: 146170 - DNA, 25 bp, Saccharomyces pastorianus
gaacagtagctgcttaccggtggaa

SEQ ID NO: 146171 - DNA, 25 bp, Saccharomyces pastorianus
gagttctttcactggtaacttctcc

SEQ ID NO: 146172 - DNA, 25 bp, Saccharomyces pastorianus
aagtacccaatttgctccaagtgat

SEQ ID NO: 146173 - DNA, 25 bp, Saccharomyces pastorianus
aaccctgacactaatgagccatttg

SEQ ID NO: 146174 - DNA, 25 bp, Saccharomyces pastorianus
taacttctccgctacatttgatgag

SEQ ID NO: 146175 - DNA, 25 bp, Saccharomyces pastorianus
agtctgtacccctgaaatttctgat

SEQ ID NO: 146176 - DNA, 25 bp, Saccharomyces pastorianus
ttaccatccgaggaagcagcttgtt

SEQ ID NO: 146177 - DNA, 25 bp, Saccharomyces pastorianus
aagtgattcaaactcccacaccttg

SEQ ID NO: 146178 - DNA, 25 bp, Saccharomyces pastorianus
gcagcttgttacgttgcattcaaaa

SEQ ID NO: 146179 - DNA, 25 bp, Saccharomyces pastorianus
gaagagctattcaccctacaagtgg

SEQ ID NO: 146180 - DNA, 25 bp, Saccharomyces pastorianus
gcctgacgctattagatcgctgact

SEQ ID NO: 146181 - DNA, 25 bp, Saccharomyces pastorianus
aacggttccgatttgattaagcctg

SEQ ID NO: 146182 - DNA, 25 bp, Saccharomyces pastorianus
gttgatggcaacctcttcaatcatg

SEQ ID NO: 146183 - DNA, 25 bp, Saccharomyces pastorianus
agggcgaaaccttcccacagaatga

SEQ ID NO: 146184 - DNA, 25 bp, Saccharomyces pastorianus
gtttgaaaactcgacctcgggcgat

SEQ ID NO: 146185 - DNA, 25 bp, Saccharomyces pastorianus
gacctcgggcgatttacctgataaa

SEQ ID NO: 146186 - DNA, 25 bp, Saccharomyces pastorianus
aagcaactgcattatttttctctat

SEQ ID NO: 146187 - DNA, 25 bp, Saccharomyces pastorianus
tgaatctactgctttttccgctgaa

SEQ ID NO: 146188 - DNA, 25 bp, Saccharomyces pastorianus
cgtttattgatttctcgcttgctga

SEQ ID NO: 146189 - DNA, 25 bp, Saccharomyces pastorianus
gcaggctgtttatttggcaatcaag

SEQ ID NO: 146190 - DNA, 25 bp, Saccharomyces pastorianus
tagacatccttcaatatcctcagca

SEQ ID NO: 146191 - DNA, 25 bp, Saccharomyces pastorianus
aatcttctcagcatgtggacttgga

SEQ ID NO: 146192 - DNA, 25 bp, Saccharomyces pastorianus
aaaggttcagtgctacttcgctgcc

SEQ ID NO: 146193 - DNA, 25 bp, Saccharomyces pastorianus
aagaagtcactttccctcggtggtg

SEQ ID NO: 146194 - DNA, 25 bp, Saccharomyces pastorianus
tcctctactagttctctcttaaacg

SEQ ID NO: 146195 - DNA, 25 bp, Saccharomyces pastorianus
taactggcacataccctctaggaat

SEQ ID NO: 146196 - DNA, 25 bp, Saccharomyces pastorianus
gctctggcgttattctttttcgtat

SEQ ID NO: 146197 - DNA, 25 bp, Saccharomyces pastorianus
gaatacagcgtctacttttgccact

SEQ ID NO: 146198 - DNA, 25 bp, Saccharomyces pastorianus
ttttgccacttatgatctgccgaca

SEQ ID NO: 146199 - DNA, 25 bp, Saccharomyces pastorianus
cgccgggcggcagagattctattat

SEQ ID NO: 146200 - DNA, 25 bp, Saccharomyces pastorianus
actcactgggtgatgctgacgctaa

SEQ ID NO: 146201 - DNA, 25 bp, Saccharomyces pastorianus
tggcgccatcgcaggtgtcgtagta

SEQ ID NO: 146202 - DNA, 25 bp, Saccharomyces pastorianus
agtccttcatcttagtgtggctcat

SEQ ID NO: 146203 - DNA, 25 bp, Saccharomyces pastorianus
atacgagccgcgttggctgaccaat

SEQ ID NO: 146204 - DNA, 25 bp, Saccharomyces pastorianus
gcgttggctgaccaattcacatata

SEQ ID NO: 146205 - DNA, 25 bp, Saccharomyces pastorianus
tgcagctagatctcatacacaagtc

SEQ ID NO: 146206 - DNA, 25 bp, Saccharomyces pastorianus
agatctcatacacaagtccttcatc

SEQ ID NO: 146207 - DNA, 25 bp, Saccharomyces pastorianus
gctattcagctagtgatatacgaaa

SEQ ID NO: 146208 - DNA, 25 bp, Saccharomyces pastorianus
catatatatacgagccgcgttggct

SEQ ID NO: 146209 - DNA, 25 bp, Saccharomyces pastorianus
gacttaccagggtgtttacgagtat

SEQ ID NO: 146210 - DNA, 25 bp, Saccharomyces pastorianus
aaagcttgctattcagctagtgata

SEQ ID NO: 146211 - DNA, 25 bp, Saccharomyces pastorianus
cttagtgtggctcatatatatacga

SEQ ID NO: 146212 - DNA, 25 bp, Saccharomyces pastorianus
gaccaattcacatataaagcttgct

SEQ ID NO: 146213 - DNA, 25 bp, Saccharomyces pastorianus
aaaccgtggtcggatgtgccattga

SEQ ID NO: 146214 - DNA, 25 bp, Saccharomyces pastorianus
ggaacactgctatataacccaatga

SEQ ID NO: 146215 - DNA, 25 bp, Saccharomyces pastorianus
agtggccaccatgatttctgatata

SEQ ID NO: 146216 - DNA, 25 bp, Saccharomyces pastorianus
aaggctcagctgcatatcccgagaa

SEQ ID NO: 146217 - DNA, 25 bp, Saccharomyces pastorianus
taaaaattctccgagcttaccaccg

SEQ ID NO: 146218 - DNA, 25 bp, Saccharomyces pastorianus
gaagtctagcactgccgtcgatata

SEQ ID NO: 146219 - DNA, 25 bp, Saccharomyces pastorianus
ctgggagaactcacggtagccttgg

SEQ ID NO: 146220 - DNA, 25 bp, Saccharomyces pastorianus
gagcttaccaccgtataactctggg

SEQ ID NO: 146221 - DNA, 25 bp, Saccharomyces pastorianus
gacttctaatgatggtgacggcgtt

SEQ ID NO: 146222 - DNA, 25 bp, Saccharomyces pastorianus
gtagccttggtcattcttgcggtgt

SEQ ID NO: 146223 - DNA, 25 bp, Saccharomyces pastorianus
gtgtggctcgtacaattgcccatag

SEQ ID NO: 146224 - DNA, 25 bp, Saccharomyces pastorianus
aaggacctcagtgatgtcatctact

SEQ ID NO: 146225 - DNA, 25 bp, Saccharomyces pastorianus
atctactctgtctcttgccaaatcg

SEQ ID NO: 146226 - DNA, 25 bp, Saccharomyces pastorianus
tcagggatggttgttggatggtaga

SEQ ID NO: 146227 - DNA, 25 bp, Saccharomyces pastorianus
gtagaaaggacctcagtgatgtcat

SEQ ID NO: 146228 - DNA, 25 bp, Saccharomyces pastorianus
tctactctgtctcttgccaaatcgt

SEQ ID NO: 146229 - DNA, 25 bp, Saccharomyces pastorianus
gttggatggtagaaaggacctcagt

SEQ ID NO: 146230 - DNA, 25 bp, Saccharomyces pastorianus
acctcagtgatgtcatctactctgt

SEQ ID NO: 146231 - DNA, 25 bp, Saccharomyces pastorianus
gaaaggacctcagtgatgtcatcta

SEQ ID NO: 146232 - DNA, 25 bp, Saccharomyces pastorianus
tcagtgatgtcatctactctgtctc

SEQ ID NO: 146233 - DNA, 25 bp, Saccharomyces pastorianus
ggacctcagtgatgtcatctactct

SEQ ID NO: 146234 - DNA, 25 bp, Saccharomyces pastorianus
tactctgtctcttgccaaatcgtgc

SEQ ID NO: 146235 - DNA, 25 bp, Saccharomyces pastorianus
gagattcaatgtttcctaagtgcga

SEQ ID NO: 146236 - DNA, 25 bp, Saccharomyces pastorianus
tcctaagtgcgacttcggtatgtgc

SEQ ID NO: 146237 - DNA, 25 bp, Saccharomyces pastorianus
ccaagctcttggagcggcatcggta

SEQ ID NO: 146238 - DNA, 25 bp, Saccharomyces pastorianus
aactccaataggaaggcatcgtggc

SEQ ID NO: 146239 - DNA, 25 bp, Saccharomyces pastorianus
gtaatggccttgcagttggttttta

SEQ ID NO: 146240 - DNA, 25 bp, Saccharomyces pastorianus
ttcggcctcaccaaagacagacgtc

SEQ ID NO: 146241 - DNA, 25 bp, Saccharomyces pastorianus
gcatcgtggccttcgggagattcaa

SEQ ID NO: 146242 - DNA, 25 bp, Saccharomyces pastorianus
gacagacgtcttcgtttcatcgtta

SEQ ID NO: 146243 - DNA, 25 bp, Saccharomyces pastorianus
ttcgtttcatcgttaccaacgtcgc

SEQ ID NO: 146244 - DNA, 25 bp, Saccharomyces pastorianus
taccagttggtaacttcttcggcct

SEQ ID NO: 146245 - DNA, 25 bp, Saccharomyces pastorianus
gagcggcatcggtaatggccttgca

SEQ ID NO: 146246 - DNA, 25 bp, Saccharomyces pastorianus
ttctttggaagcgaatgcagccgat

SEQ ID NO: 146247 - DNA, 25 bp, Saccharomyces pastorianus
gaacttgtttggtggatccatacca

SEQ ID NO: 146248 - DNA, 25 bp, Saccharomyces pastorianus
aagccacgtggcatctgaaatgtct

SEQ ID NO: 146249 - DNA, 25 bp, Saccharomyces pastorianus
aagtagttcctttgcgccagataga

SEQ ID NO: 146250 - DNA, 25 bp, Saccharomyces pastorianus
tttgccaaatttgccgcggaaagga

SEQ ID NO: 146251 - DNA, 25 bp, Saccharomyces pastorianus
gatgatgaacgacctcagaccgtta

SEQ ID NO: 146252 - DNA, 25 bp, Saccharomyces pastorianus
gaccgttagagaacgccatggcgta

SEQ ID NO: 146253 - DNA, 25 bp, Saccharomyces pastorianus
tagtttgggctcatcacagccatca

SEQ ID NO: 146254 - DNA, 25 bp, Saccharomyces pastorianus
aagcctcatttctttagcaagccac

SEQ ID NO: 146255 - DNA, 25 bp, Saccharomyces pastorianus
ggccatccgcctttttggcaaaaag

SEQ ID NO: 146256 - DNA, 25 bp, Saccharomyces pastorianus
gatgacgatgtcaactcggaatcaa

SEQ ID NO: 146257 - DNA, 25 bp, Saccharomyces pastorianus
aatacggttatttcctcattccata

SEQ ID NO: 146258 - DNA, 25 bp, Saccharomyces pastorianus
ggatgacatctctttaaatacggtt

SEQ ID NO: 146259 - DNA, 25 bp, Saccharomyces pastorianus
agctgaatatcgcatcttgacggat

SEQ ID NO: 146260 - DNA, 25 bp, Saccharomyces pastorianus
gacggatgatctgttacctattctc

SEQ ID NO: 146261 - DNA, 25 bp, Saccharomyces pastorianus
aatgtcattgctatagaacccggtg

SEQ ID NO: 146262 - DNA, 25 bp, Saccharomyces pastorianus
acatctatcgatactttgccaccaa

SEQ ID NO: 146263 - DNA, 25 bp, Saccharomyces pastorianus
aattgtctacaactattggtcctta

SEQ ID NO: 146264 - DNA, 25 bp, Saccharomyces pastorianus
tttgccaccaaacgtctctatggat

SEQ ID NO: 146265 - DNA, 25 bp, Saccharomyces pastorianus
gaccgattatcaagaactcctaggg

SEQ ID NO: 146266 - DNA, 25 bp, Saccharomyces pastorianus
tggtccttatgacttggcctttaat

SEQ ID NO: 146267 - DNA, 25 bp, Saccharomyces pastorianus
acaaatgttctcttgcagcaaagct

SEQ ID NO: 146268 - DNA, 25 bp, Saccharomyces pastorianus
tgtactcaacaacgaccctattttt

SEQ ID NO: 146269 - DNA, 25 bp, Saccharomyces pastorianus
aacgatccctacattgttccagatg

SEQ ID NO: 146270 - DNA, 25 bp, Saccharomyces pastorianus
ctgacctgactgtttcttgtgaact

SEQ ID NO: 146271 - DNA, 25 bp, Saccharomyces pastorianus
ttaagtcgtggctaaccgtaaatgt

SEQ ID NO: 146272 - DNA, 25 bp, Saccharomyces pastorianus
gataggatactccattccacgtaaa

SEQ ID NO: 146273 - DNA, 25 bp, Saccharomyces pastorianus
ttcttcctatcttctacgagttcgt

SEQ ID NO: 146274 - DNA, 25 bp, Saccharomyces pastorianus
gactacagggctttattgttgctga

SEQ ID NO: 146275 - DNA, 25 bp, Saccharomyces pastorianus
ggactgttgaagtttctgacctgac

SEQ ID NO: 146276 - DNA, 25 bp, Saccharomyces pastorianus
gcgacgcagcatacttcaaggattt

SEQ ID NO: 146277 - DNA, 25 bp, Saccharomyces pastorianus
gaaacagttaatccacccaatgaat

SEQ ID NO: 146278 - DNA, 25 bp, Saccharomyces pastorianus
actgctcaagcatataacccacaca

SEQ ID NO: 146279 - DNA, 25 bp, Saccharomyces pastorianus
cctagaaaaattgagggcccgcaag

SEQ ID NO: 146280 - DNA, 25 bp, Saccharomyces pastorianus
tgcaagcttgctgcctgcggtccta

SEQ ID NO: 146281 - DNA, 25 bp, Saccharomyces pastorianus
tagaaaaattgagggcccgcaagga

SEQ ID NO: 146282 - DNA, 25 bp, Saccharomyces pastorianus
tgctgcctgcggtcctagaaaaatt

SEQ ID NO: 146283 - DNA, 25 bp, Saccharomyces pastorianus
ctgcctgcggtcctagaaaaattga

SEQ ID NO: 146284 - DNA, 25 bp, Saccharomyces pastorianus
caagcttgctgcctgcggtcctaga

SEQ ID NO: 146285 - DNA, 25 bp, Saccharomyces pastorianus
ctagaaaaattgagggcccgcaagg

SEQ ID NO: 146286 - DNA, 25 bp, Saccharomyces pastorianus
ttgctgcctgcggtcctagaaaaat

SEQ ID NO: 146287 - DNA, 25 bp, Saccharomyces pastorianus
aagcttgctgcctgcggtcctagaa

SEQ ID NO: 146288 - DNA, 25 bp, Saccharomyces pastorianus
agcttgctgcctgcggtcctagaaa

SEQ ID NO: 146289 - DNA, 25 bp, Saccharomyces pastorianus
gctgcctgcggtcctagaaaaattg

SEQ ID NO: 146290 - DNA, 25 bp, Saccharomyces pastorianus
tgaagatttaccatcgccatccaag

SEQ ID NO: 146291 - DNA, 25 bp, Saccharomyces pastorianus
gaagggtctattctttattctccag

SEQ ID NO: 146292 - DNA, 25 bp, Saccharomyces pastorianus
aagataggcgcgctgttatggataa

SEQ ID NO: 146293 - DNA, 25 bp, Saccharomyces pastorianus
agaacagcaattcgccttcatctga

SEQ ID NO: 146294 - DNA, 25 bp, Saccharomyces pastorianus
gtcctgctaaaagtgacccatcttc

SEQ ID NO: 146295 - DNA, 25 bp, Saccharomyces pastorianus
actgccgatacagtgattcacgctg

SEQ ID NO: 146296 - DNA, 25 bp, Saccharomyces pastorianus
gccatccaagacatctgcgctggaa

SEQ ID NO: 146297 - DNA, 25 bp, Saccharomyces pastorianus
ttccgccagaaagagagccctagtg

SEQ ID NO: 146298 - DNA, 25 bp, Saccharomyces pastorianus
aacgctccacaattactcaacgatt

SEQ ID NO: 146299 - DNA, 25 bp, Saccharomyces pastorianus
agaagctatggaccctactgccgat

SEQ ID NO: 146300 - DNA, 25 bp, Saccharomyces pastorianus
gcatacgtacggtgaagattctggt

SEQ ID NO: 146301 - DNA, 25 bp, Saccharomyces pastorianus
gatggcgcagaagatctctctactc

SEQ ID NO: 146302 - DNA, 25 bp, Saccharomyces pastorianus
gactcagaaaatccaccgtgtcttc

SEQ ID NO: 146303 - DNA, 25 bp, Saccharomyces pastorianus
gtgtcttctgctccatatttagagg

SEQ ID NO: 146304 - DNA, 25 bp, Saccharomyces pastorianus
tcttttctcgatgccttatctcaaa

SEQ ID NO: 146305 - DNA, 25 bp, Saccharomyces pastorianus
ttcgggtattggacctctacatagt

SEQ ID NO: 146306 - DNA, 25 bp, Saccharomyces pastorianus
gcatcggctgcttttggagagaaca

SEQ ID NO: 146307 - DNA, 25 bp, Saccharomyces pastorianus
tcaaaatgttactgcatcggctgct

SEQ ID NO: 146308 - DNA, 25 bp, Saccharomyces pastorianus
atcaggtcctgggtcttttctcgat

SEQ ID NO: 146309 - DNA, 25 bp, Saccharomyces pastorianus
atctctctactcaatcatctgtact

SEQ ID NO: 146310 - DNA, 25 bp, Saccharomyces pastorianus
agttcccgccaaattgttcggtgat

SEQ ID NO: 146311 - DNA, 25 bp, Saccharomyces pastorianus
gaacactcagagctatcttcaggat

SEQ ID NO: 146312 - DNA, 25 bp, Saccharomyces pastorianus
ttaagtgccgcttactctggaagct

SEQ ID NO: 146313 - DNA, 25 bp, Saccharomyces pastorianus
tgttctatctacatccgtgttcgga

SEQ ID NO: 146314 - DNA, 25 bp, Saccharomyces pastorianus
tgcatcttttttcatcgctctaatt

SEQ ID NO: 146315 - DNA, 25 bp, Saccharomyces pastorianus
cgctctaattgttctgatccagggc

SEQ ID NO: 146316 - DNA, 25 bp, Saccharomyces pastorianus
agcctatagactttgtcgctgcata

SEQ ID NO: 146317 - DNA, 25 bp, Saccharomyces pastorianus
tatcgatatcgattctgaccgccgg

SEQ ID NO: 146318 - DNA, 25 bp, Saccharomyces pastorianus
tggcgccaaggttcttgtctaacgt

SEQ ID NO: 146319 - DNA, 25 bp, Saccharomyces pastorianus
taatcaccattctttccgcaggtaa

SEQ ID NO: 146320 - DNA, 25 bp, Saccharomyces pastorianus
ctttgcctggcttttgatttcattt

SEQ ID NO: 146321 - DNA, 25 bp, Saccharomyces pastorianus
agcggcaaggcctttaactggttat

SEQ ID NO: 146322 - DNA, 25 bp, Saccharomyces pastorianus
aacataactggtgtggccggtttct

SEQ ID NO: 146323 - DNA, 25 bp, Saccharomyces pastorianus
attcacccggctcagtgggctttga

SEQ ID NO: 146324 - DNA, 25 bp, Saccharomyces pastorianus
aaggctctgagaaagtatgctgatc

SEQ ID NO: 146325 - DNA, 25 bp, Saccharomyces pastorianus
ttatgctatcaaattcacccggctc

SEQ ID NO: 146326 - DNA, 25 bp, Saccharomyces pastorianus
gaggccgcaccattcaaattaactt

SEQ ID NO: 146327 - DNA, 25 bp, Saccharomyces pastorianus
actaaaagttcgttcaaggctctga

SEQ ID NO: 146328 - DNA, 25 bp, Saccharomyces pastorianus
gaaggccatgtaagtcacatcgatt

SEQ ID NO: 146329 - DNA, 25 bp, Saccharomyces pastorianus
caatatgcagccttgtttcgatgct

SEQ ID NO: 146330 - DNA, 25 bp, Saccharomyces pastorianus
agacaactttgcttcttcgttagcc

SEQ ID NO: 146331 - DNA, 25 bp, Saccharomyces pastorianus
acaagggtggtattgcctctttgaa

SEQ ID NO: 146332 - DNA, 25 bp, Saccharomyces pastorianus
gtcatttgctatctcttgcaggtta

SEQ ID NO: 146333 - DNA, 25 bp, Saccharomyces pastorianus
ttcgttagccgcatattctgtcatt

SEQ ID NO: 146334 - DNA, 25 bp, Saccharomyces pastorianus
tagctcaaatcgcagttcaactccg

SEQ ID NO: 146335 - DNA, 25 bp, Saccharomyces pastorianus
ttcaactccgacttctccaatagat

SEQ ID NO: 146336 - DNA, 25 bp, Saccharomyces pastorianus
gatgcatcattcaggaaatccagac

SEQ ID NO: 146337 - DNA, 25 bp, Saccharomyces pastorianus
ggacgcggacgctttaaactctgat

SEQ ID NO: 146338 - DNA, 25 bp, Saccharomyces pastorianus
ataccgcaaaggctctcgatggaaa

SEQ ID NO: 146339 - DNA, 25 bp, Saccharomyces pastorianus
tgatcacttcaccagttctatgcca

SEQ ID NO: 146340 - DNA, 25 bp, Saccharomyces pastorianus
gaatctcatcttcaatcaaactccc

SEQ ID NO: 146341 - DNA, 25 bp, Saccharomyces pastorianus
gacggaagcatttcaaataccgcaa

SEQ ID NO: 146342 - DNA, 25 bp, Saccharomyces pastorianus
ggtgattatatttctccaaagggac

SEQ ID NO: 146343 - DNA, 25 bp, Saccharomyces pastorianus
taagcgaagtgaccaaaccattagt

SEQ ID NO: 146344 - DNA, 25 bp, Saccharomyces pastorianus
gaacatgaccttgaaaaatacccta

SEQ ID NO: 146345 - DNA, 25 bp, Saccharomyces pastorianus
ggaattctccagcttactatatggc

SEQ ID NO: 146346 - DNA, 25 bp, Saccharomyces pastorianus
gaagataaggaattctccagcttac

SEQ ID NO: 146347 - DNA, 25 bp, Saccharomyces pastorianus
aaggaattctccagcttactatatg

SEQ ID NO: 146348 - DNA, 25 bp, Saccharomyces pastorianus
gacgaagataaggaattctccagct

SEQ ID NO: 146349 - DNA, 25 bp, Saccharomyces pastorianus
agataaggaattctccagcttacta

SEQ ID NO: 146350 - DNA, 25 bp, Saccharomyces pastorianus
taaggaattctccagcttactatat

SEQ ID NO: 146351 - DNA, 25 bp, Saccharomyces pastorianus
aggaattctccagcttactatatgg

SEQ ID NO: 146352 - DNA, 25 bp, Saccharomyces pastorianus
aagataaggaattctccagcttact

SEQ ID NO: 146353 - DNA, 25 bp, Saccharomyces pastorianus
ataaggaattctccagcttactata

SEQ ID NO: 146354 - DNA, 25 bp, Saccharomyces pastorianus
gataaggaattctccagcttactat

SEQ ID NO: 146355 - DNA, 25 bp, Saccharomyces pastorianus
gacgacgaagataaggaattctcca

SEQ ID NO: 146356 - DNA, 25 bp, Saccharomyces pastorianus
gcagatcatatcgatgtccctgaaa

SEQ ID NO: 146357 - DNA, 25 bp, Saccharomyces pastorianus
gaagaaaagcctattttagccttag

SEQ ID NO: 146358 - DNA, 25 bp, Saccharomyces pastorianus
aatctatgcgattcttttcgttgat

SEQ ID NO: 146359 - DNA, 25 bp, Saccharomyces pastorianus
gctctccctcagttccaaaagaaga

SEQ ID NO: 146360 - DNA, 25 bp, Saccharomyces pastorianus
gaagctatcagatccctaatctatg

SEQ ID NO: 146361 - DNA, 25 bp, Saccharomyces pastorianus
tggagaattccttatcttcgtcgtc

SEQ ID NO: 146362 - DNA, 25 bp, Saccharomyces pastorianus
atttcttcagactttagtgacccct

SEQ ID NO: 146363 - DNA, 25 bp, Saccharomyces pastorianus
tttagtgacccctcgggagatatcg

SEQ ID NO: 146364 - DNA, 25 bp, Saccharomyces pastorianus
gaacgagctcaagattccgaaagat

SEQ ID NO: 146365 - DNA, 25 bp, Saccharomyces pastorianus
atctccaccgaagaacagcttgtca

SEQ ID NO: 146366 - DNA, 25 bp, Saccharomyces pastorianus
atcttcgtcgtcttctaacatttct

SEQ ID NO: 146367 - DNA, 25 bp, Saccharomyces pastorianus
ttgaccctgccactaaggcgaaggc

SEQ ID NO: 146368 - DNA, 25 bp, Saccharomyces pastorianus
gaatcttcctttagacaagtccaag

SEQ ID NO: 146369 - DNA, 25 bp, Saccharomyces pastorianus
tatcccatggtttgcgtgggctttt

SEQ ID NO: 146370 - DNA, 25 bp, Saccharomyces pastorianus
gaaggctatctttgacgaaccattt

SEQ ID NO: 146371 - DNA, 25 bp, Saccharomyces pastorianus
gtgtgtcctgatcaatatcccatgg

SEQ ID NO: 146372 - DNA, 25 bp, Saccharomyces pastorianus
tccacccatctctattgctaggatg

SEQ ID NO: 146373 - DNA, 25 bp, Saccharomyces pastorianus
actgtagctccccaaggtgtagaaa

SEQ ID NO: 146374 - DNA, 25 bp, Saccharomyces pastorianus
acgtcatgcaagatcattaccctga

SEQ ID NO: 146375 - DNA, 25 bp, Saccharomyces pastorianus
ttatcactgataaagctccacccat

SEQ ID NO: 146376 - DNA, 25 bp, Saccharomyces pastorianus
aagatgatgtatccgttccttgacc

SEQ ID NO: 146377 - DNA, 25 bp, Saccharomyces pastorianus
atggaaactgcgacaactgtagctc

SEQ ID NO: 146378 - DNA, 25 bp, Saccharomyces pastorianus
cccttgagtgattgggagaagtttt

SEQ ID NO: 146379 - DNA, 25 bp, Saccharomyces pastorianus
tgattgggagaagttttggctttct

SEQ ID NO: 146380 - DNA, 25 bp, Saccharomyces pastorianus
gacccttgagtgattgggagaagtt

SEQ ID NO: 146381 - DNA, 25 bp, Saccharomyces pastorianus
agacccttgagtgattgggagaagt

SEQ ID NO: 146382 - DNA, 25 bp, Saccharomyces pastorianus
cagacccttgagtgattgggagaag

SEQ ID NO: 146383 - DNA, 25 bp, Saccharomyces pastorianus
caatgacagacccttgagtgattgg

SEQ ID NO: 146384 - DNA, 25 bp, Saccharomyces pastorianus
gtgattgggagaagttttggctttc

SEQ ID NO: 146385 - DNA, 25 bp, Saccharomyces pastorianus
aatgacagacccttgagtgattggg

SEQ ID NO: 146386 - DNA, 25 bp, Saccharomyces pastorianus
gccaatgacagacccttgagtgatt

SEQ ID NO: 146387 - DNA, 25 bp, Saccharomyces pastorianus
gacagacccttgagtgattgggaga

SEQ ID NO: 146388 - DNA, 25 bp, Saccharomyces pastorianus
atgacagacccttgagtgattggga

SEQ ID NO: 146389 - DNA, 25 bp, Saccharomyces pastorianus
tattccatgtgataagatattcttg

SEQ ID NO: 146390 - DNA, 25 bp, Saccharomyces pastorianus
tctactggaacccatctccgaagat

SEQ ID NO: 146391 - DNA, 25 bp, Saccharomyces pastorianus
ataagatattcttggaccctcctgc

SEQ ID NO: 146392 - DNA, 25 bp, Saccharomyces pastorianus
ttggaccctcctgccaagtttggtt

SEQ ID NO: 146393 - DNA, 25 bp, Saccharomyces pastorianus
tttggttacgcacctctactggaac

SEQ ID NO: 146394 - DNA, 25 bp, Saccharomyces pastorianus
atacgcctgctgtgcctaaagagaa

SEQ ID NO: 146395 - DNA, 25 bp, Saccharomyces pastorianus
caagtttggttacgcacctctactg

SEQ ID NO: 146396 - DNA, 25 bp, Saccharomyces pastorianus
tgccaagtttggttacgcacctcta

SEQ ID NO: 146397 - DNA, 25 bp, Saccharomyces pastorianus
ggaccatacgcctgctgtgcctaaa

SEQ ID NO: 146398 - DNA, 25 bp, Saccharomyces pastorianus
ttcaagaaaacgggaccatacgcct

SEQ ID NO: 146399 - DNA, 25 bp, Saccharomyces pastorianus
gcctgctgtgcctaaagagaaactt

SEQ ID NO: 146400 - DNA, 25 bp, Saccharomyces pastorianus
gtttcaagggccattgccggagaaa

SEQ ID NO: 146401 - DNA, 25 bp, Saccharomyces pastorianus
ccaagaaggttttctggagggccag

SEQ ID NO: 146402 - DNA, 25 bp, Saccharomyces pastorianus
aagcagagctttctagaaggtaaac

SEQ ID NO: 146403 - DNA, 25 bp, Saccharomyces pastorianus
tatacataccattcgtactttaatg

SEQ ID NO: 146404 - DNA, 25 bp, Saccharomyces pastorianus
ccccaccgtgacatttgaagtcttt

SEQ ID NO: 146405 - DNA, 25 bp, Saccharomyces pastorianus
gccattgccggagaaattagaggtt

SEQ ID NO: 146406 - DNA, 25 bp, Saccharomyces pastorianus
gtctttgaagacgtttcaagggcca

SEQ ID NO: 146407 - DNA, 25 bp, Saccharomyces pastorianus
accattctaataactcttcatcgat

SEQ ID NO: 146408 - DNA, 25 bp, Saccharomyces pastorianus
ggattgcatagtccaacactagaaa

SEQ ID NO: 146409 - DNA, 25 bp, Saccharomyces pastorianus
gatttacgctcctgggacaaatgga

SEQ ID NO: 146410 - DNA, 25 bp, Saccharomyces pastorianus
agtgggattccaaagatttacgctc

SEQ ID NO: 146411 - DNA, 25 bp, Saccharomyces pastorianus
ggtggtcggattattagcatctatt

SEQ ID NO: 146412 - DNA, 25 bp, Saccharomyces pastorianus
gtgccgtcaaataaccccatttttg

SEQ ID NO: 146413 - DNA, 25 bp, Saccharomyces pastorianus
atgtgctgaaaagttctcacggatt

SEQ ID NO: 146414 - DNA, 25 bp, Saccharomyces pastorianus
aaaagcatcagtgccctactggtca

SEQ ID NO: 146415 - DNA, 25 bp, Saccharomyces pastorianus
tgaaaaactgttccacgaccgtctt

SEQ ID NO: 146416 - DNA, 25 bp, Saccharomyces pastorianus
agtagtcaactgtcagtgccgtcaa

SEQ ID NO: 146417 - DNA, 25 bp, Saccharomyces pastorianus
tcttgtactatccttttcctagtgt

SEQ ID NO: 146418 - DNA, 25 bp, Saccharomyces pastorianus
cacgaccgtcttggatcagataaat

SEQ ID NO: 146419 - DNA, 25 bp, Saccharomyces pastorianus
aataaatgctcgatggtgtctatag

SEQ ID NO: 146420 - DNA, 25 bp, Saccharomyces pastorianus
gatgactgatctttggtttaatgac

SEQ ID NO: 146421 - DNA, 25 bp, Saccharomyces pastorianus
aagttcagcgaggacaatttcaata

SEQ ID NO: 146422 - DNA, 25 bp, Saccharomyces pastorianus
acgaattacgccgtcaagtgacaca

SEQ ID NO: 146423 - DNA, 25 bp, Saccharomyces pastorianus
agtgcctccaaaatcgcccgaaaag

SEQ ID NO: 146424 - DNA, 25 bp, Saccharomyces pastorianus
tccctagacctcataagtgccatat

SEQ ID NO: 146425 - DNA, 25 bp, Saccharomyces pastorianus
aaccgcgctattagaacttatgact

SEQ ID NO: 146426 - DNA, 25 bp, Saccharomyces pastorianus
atgactactgcaattgaaccctaca

SEQ ID NO: 146427 - DNA, 25 bp, Saccharomyces pastorianus
aaaccagtttagagccatcttctat

SEQ ID NO: 146428 - DNA, 25 bp, Saccharomyces pastorianus
atacattcctcgaagctgctatcaa

SEQ ID NO: 146429 - DNA, 25 bp, Saccharomyces pastorianus
atagatttatctccttgcattaatg

SEQ ID NO: 146430 - DNA, 25 bp, Saccharomyces pastorianus
gcccgaaaagtctgggtggatttat

SEQ ID NO: 146431 - DNA, 25 bp, Saccharomyces pastorianus
tcaaaggatacgcaagtgcctccaa

SEQ ID NO: 146432 - DNA, 25 bp, Saccharomyces pastorianus
atgacagtatgctggcatcctacca

SEQ ID NO: 146433 - DNA, 25 bp, Saccharomyces pastorianus
catgtccagggactgtcaaaatgac

SEQ ID NO: 146434 - DNA, 25 bp, Saccharomyces pastorianus
cggaattagtggattgaaatgttac

SEQ ID NO: 146435 - DNA, 25 bp, Saccharomyces pastorianus
tggccacatgtccagggactgtcaa

SEQ ID NO: 146436 - DNA, 25 bp, Saccharomyces pastorianus
aagctggccacatgtccagggactg

SEQ ID NO: 146437 - DNA, 25 bp, Saccharomyces pastorianus
ttgtggtcaagctggccacatgtcc

SEQ ID NO: 146438 - DNA, 25 bp, Saccharomyces pastorianus
gtcaaaatgacaggctttgttacaa

SEQ ID NO: 146439 - DNA, 25 bp, Saccharomyces pastorianus
gtcaagctggccacatgtccaggga

SEQ ID NO: 146440 - DNA, 25 bp, Saccharomyces pastorianus
ggactgtatgaaagaggacggaatt

SEQ ID NO: 146441 - DNA, 25 bp, Saccharomyces pastorianus
agctggccacatgtccagggactgt

SEQ ID NO: 146442 - DNA, 25 bp, Saccharomyces pastorianus
gccacatgtccagggactgtcaaaa

SEQ ID NO: 146443 - DNA, 25 bp, Saccharomyces pastorianus
aagaggacggaattagtggattgaa

SEQ ID NO: 146444 - DNA, 25 bp, Saccharomyces pastorianus
tcaaaaagcttgttacgtttgcggt

SEQ ID NO: 146445 - DNA, 25 bp, Saccharomyces pastorianus
tttgcggtaagattggccatttggc

SEQ ID NO: 146446 - DNA, 25 bp, Saccharomyces pastorianus
gattggccatttggcagaagactgt

SEQ ID NO: 146447 - DNA, 25 bp, Saccharomyces pastorianus
aagattggccatttggcagaagact

SEQ ID NO: 146448 - DNA, 25 bp, Saccharomyces pastorianus
tctcaaaaagcttgttacgtttgcg

SEQ ID NO: 146449 - DNA, 25 bp, Saccharomyces pastorianus
ccatttggcagaagactgtgattct

SEQ ID NO: 146450 - DNA, 25 bp, Saccharomyces pastorianus
tgcggtaagattggccatttggcag

SEQ ID NO: 146451 - DNA, 25 bp, Saccharomyces pastorianus
agcttgttacgtttgcggtaagatt

SEQ ID NO: 146452 - DNA, 25 bp, Saccharomyces pastorianus
ggccatttggcagaagactgtgatt

SEQ ID NO: 146453 - DNA, 25 bp, Saccharomyces pastorianus
ggcagaagactgtgattctgaaaga

SEQ ID NO: 146454 - DNA, 25 bp, Saccharomyces pastorianus
cgtttgcggtaagattggccatttg

SEQ ID NO: 146455 - DNA, 25 bp, Saccharomyces pastorianus
gcgagtccaccgatacatcaatgtt

SEQ ID NO: 146456 - DNA, 25 bp, Saccharomyces pastorianus
ataggactccttttgcagatccacg

SEQ ID NO: 146457 - DNA, 25 bp, Saccharomyces pastorianus
gcttacgtgcttgctaagtctgcaa

SEQ ID NO: 146458 - DNA, 25 bp, Saccharomyces pastorianus
gggtatcaaaggtgcttacgtgctt

SEQ ID NO: 146459 - DNA, 25 bp, Saccharomyces pastorianus
tggtctctcaattcatattcttacg

SEQ ID NO: 146460 - DNA, 25 bp, Saccharomyces pastorianus
tctcttgctgaataccgacttggaa

SEQ ID NO: 146461 - DNA, 25 bp, Saccharomyces pastorianus
gaacaaaccattcgtgacattgaga

SEQ ID NO: 146462 - DNA, 25 bp, Saccharomyces pastorianus
gatttccttggtcaacaacggtgta

SEQ ID NO: 146463 - DNA, 25 bp, Saccharomyces pastorianus
aagggttctttcattggcgagtcca

SEQ ID NO: 146464 - DNA, 25 bp, Saccharomyces pastorianus
gatatgtttttctacggtgattacg

SEQ ID NO: 146465 - DNA, 25 bp, Saccharomyces pastorianus
aaggatatctggtagtcaagcgaaa

SEQ ID NO: 146466 - DNA, 25 bp, Saccharomyces pastorianus
tatgcaatgtccacaacagcttttg

SEQ ID NO: 146467 - DNA, 25 bp, Saccharomyces pastorianus
tgggcgtccccaaattgaagtactt

SEQ ID NO: 146468 - DNA, 25 bp, Saccharomyces pastorianus
ggctggtcatcttcattttacaaaa

SEQ ID NO: 146469 - DNA, 25 bp, Saccharomyces pastorianus
aaatggcgcaggaaccagtcccata

SEQ ID NO: 146470 - DNA, 25 bp, Saccharomyces pastorianus
attgcttatgaactgagccgcttgt

SEQ ID NO: 146471 - DNA, 25 bp, Saccharomyces pastorianus
agaggtatctggctggtcatcttca

SEQ ID NO: 146472 - DNA, 25 bp, Saccharomyces pastorianus
aaagcccttcaaaagtgtcttcaga

SEQ ID NO: 146473 - DNA, 25 bp, Saccharomyces pastorianus
aagtaacatgctgataccgtatcca

SEQ ID NO: 146474 - DNA, 25 bp, Saccharomyces pastorianus
ttggatggactcttctgccgtaaac

SEQ ID NO: 146475 - DNA, 25 bp, Saccharomyces pastorianus
aaagtcatgtggtgtttctgcaacg

SEQ ID NO: 146476 - DNA, 25 bp, Saccharomyces pastorianus
gtttctgcaacgtgttcattagcta

SEQ ID NO: 146477 - DNA, 25 bp, Saccharomyces pastorianus
gaaattgtcaagctaaacgaggaga

SEQ ID NO: 146478 - DNA, 25 bp, Saccharomyces pastorianus
ttgggacgagcaaggccttccaaca

SEQ ID NO: 146479 - DNA, 25 bp, Saccharomyces pastorianus
aagacggtaatgatatcaccaagag

SEQ ID NO: 146480 - DNA, 25 bp, Saccharomyces pastorianus
gcagaaagctcaaattaaaccacaa

SEQ ID NO: 146481 - DNA, 25 bp, Saccharomyces pastorianus
gaggagaaacatgccaacgaactag

SEQ ID NO: 146482 - DNA, 25 bp, Saccharomyces pastorianus
ccacaagatatgttcaaggatgtca

SEQ ID NO: 146483 - DNA, 25 bp, Saccharomyces pastorianus
aaggatgtcacattgtacagtgctt

SEQ ID NO: 146484 - DNA, 25 bp, Saccharomyces pastorianus
gaaacatgccaacgaactagcaaag

SEQ ID NO: 146485 - DNA, 25 bp, Saccharomyces pastorianus
tccaacaaaggacaaagacggtaat

SEQ ID NO: 146486 - DNA, 25 bp, Saccharomyces pastorianus
acattgtacagtgcttgggacgagc

SEQ ID NO: 146487 - DNA, 25 bp, Saccharomyces pastorianus
gatatcaccaagagtatgaccaaga

SEQ ID NO: 146488 - DNA, 25 bp, Saccharomyces pastorianus
cgactcgataaacccggacttgatc

SEQ ID NO: 146489 - DNA, 25 bp, Saccharomyces pastorianus
aatccgggttaagcgcagatggcga

SEQ ID NO: 146490 - DNA, 25 bp, Saccharomyces pastorianus
aatggctggcattggagtctgaaat

SEQ ID NO: 146491 - DNA, 25 bp, Saccharomyces pastorianus
tggttcagatggaccggcctaaaac

SEQ ID NO: 146492 - DNA, 25 bp, Saccharomyces pastorianus
agagatctaccctttttgtgtgaag

SEQ ID NO: 146493 - DNA, 25 bp, Saccharomyces pastorianus
gtgaagtactatgctgaggcccaga

SEQ ID NO: 146494 - DNA, 25 bp, Saccharomyces pastorianus
gttccaattgagtggccccagagtt

SEQ ID NO: 146495 - DNA, 25 bp, Saccharomyces pastorianus
atactgactagtgagcccgttccaa

SEQ ID NO: 146496 - DNA, 25 bp, Saccharomyces pastorianus
gactcattggcgtcattgttcagtg

SEQ ID NO: 146497 - DNA, 25 bp, Saccharomyces pastorianus
aagagcagcaagtcaccaaggtgtt

SEQ ID NO: 146498 - DNA, 25 bp, Saccharomyces pastorianus
agtctcggtgaggtggacttgccac

SEQ ID NO: 146499 - DNA, 25 bp, Saccharomyces pastorianus
aactccagactcaacacaaaaaaga

SEQ ID NO: 146500 - DNA, 25 bp, Saccharomyces pastorianus
agaagaactccagactcaacacaaa

SEQ ID NO: 146501 - DNA, 25 bp, Saccharomyces pastorianus
aaaagagcaatgtcgcaacgaggga

SEQ ID NO: 146502 - DNA, 25 bp, Saccharomyces pastorianus
gaactccagactcaacacaaaaaag

SEQ ID NO: 146503 - DNA, 25 bp, Saccharomyces pastorianus
aagaactccagactcaacacaaaaa

SEQ ID NO: 146504 - DNA, 25 bp, Saccharomyces pastorianus
gaagaactccagactcaacacaaaa

SEQ ID NO: 146505 - DNA, 25 bp, Saccharomyces pastorianus
aagaagaactccagactcaacacaa

SEQ ID NO: 146506 - DNA, 25 bp, Saccharomyces pastorianus
aaagagcaatgtcgcaacgagggaa

SEQ ID NO: 146507 - DNA, 25 bp, Saccharomyces pastorianus
agagcaatgtcgcaacgagggaaac

SEQ ID NO: 146508 - DNA, 25 bp, Saccharomyces pastorianus
agcaatgtcgcaacgagggaaaccg

SEQ ID NO: 146509 - DNA, 25 bp, Saccharomyces pastorianus
aaaaaagagcaatgtcgcaacgagg

SEQ ID NO: 146510 - DNA, 25 bp, Saccharomyces pastorianus
gtcgggcgatttgaatctgttgaaa

SEQ ID NO: 146511 - DNA, 25 bp, Saccharomyces pastorianus
tctaattaccgaacagcagaagctt

SEQ ID NO: 146512 - DNA, 25 bp, Saccharomyces pastorianus
aagtatgggagaccgaacaggatct

SEQ ID NO: 146513 - DNA, 25 bp, Saccharomyces pastorianus
gaacaggatctaattaccgaacagc

SEQ ID NO: 146514 - DNA, 25 bp, Saccharomyces pastorianus
atgggagaccgaacaggatctaatt

SEQ ID NO: 146515 - DNA, 25 bp, Saccharomyces pastorianus
gaccgaacaggatctaattaccgaa

SEQ ID NO: 146516 - DNA, 25 bp, Saccharomyces pastorianus
gaatcccaagcttatgaaaaataga

SEQ ID NO: 146517 - DNA, 25 bp, Saccharomyces pastorianus
tctgttgaaatcatggaatcccaag

SEQ ID NO: 146518 - DNA, 25 bp, Saccharomyces pastorianus
acaggatctaattaccgaacagcag

SEQ ID NO: 146519 - DNA, 25 bp, Saccharomyces pastorianus
aggatctaattaccgaacagcagaa

SEQ ID NO: 146520 - DNA, 25 bp, Saccharomyces pastorianus
gagaccgaacaggatctaattaccg

SEQ ID NO: 146521 - DNA, 25 bp, Saccharomyces pastorianus
ttaacttcagggacacaggcgatat

SEQ ID NO: 146522 - DNA, 25 bp, Saccharomyces pastorianus
atgcatcgaaatttggctccgctga

SEQ ID NO: 146523 - DNA, 25 bp, Saccharomyces pastorianus
agtgagtctgtacgcagatcagccc

SEQ ID NO: 146524 - DNA, 25 bp, Saccharomyces pastorianus
gctccgctgatggtgcagacagtga

SEQ ID NO: 146525 - DNA, 25 bp, Saccharomyces pastorianus
agcgccgcagcagtttatgttgcta

SEQ ID NO: 146526 - DNA, 25 bp, Saccharomyces pastorianus
gagcccacggcagtagtcatcgata

SEQ ID NO: 146527 - DNA, 25 bp, Saccharomyces pastorianus
ttgctagagctgcacctgtggcaat

SEQ ID NO: 146528 - DNA, 25 bp, Saccharomyces pastorianus
ctgtggcaattattcggccgttaat

SEQ ID NO: 146529 - DNA, 25 bp, Saccharomyces pastorianus
actattcggtggtgttggttccaat

SEQ ID NO: 146530 - DNA, 25 bp, Saccharomyces pastorianus
tagtcatcgatatgtcttcaccggg

SEQ ID NO: 146531 - DNA, 25 bp, Saccharomyces pastorianus
ataagagatcatgagcccacggcag

SEQ ID NO: 146532 - DNA, 25 bp, Saccharomyces pastorianus
gcggagatgccgtgatttacttaaa

SEQ ID NO: 146533 - DNA, 25 bp, Saccharomyces pastorianus
aattgtggaactatcctgccatcgg

SEQ ID NO: 146534 - DNA, 25 bp, Saccharomyces pastorianus
gactcatgctatgttgatcactggc

SEQ ID NO: 146535 - DNA, 25 bp, Saccharomyces pastorianus
tgccatcggctataatttacctcag

SEQ ID NO: 146536 - DNA, 25 bp, Saccharomyces pastorianus
ggctgccacgtcgatgaaacgtcta

SEQ ID NO: 146537 - DNA, 25 bp, Saccharomyces pastorianus
ttccacgccagtctcattgatcaat

SEQ ID NO: 146538 - DNA, 25 bp, Saccharomyces pastorianus
ttcgctaccgcgttgaaaattcctg

SEQ ID NO: 146539 - DNA, 25 bp, Saccharomyces pastorianus
gttcatggacatacctccagtgcaa

SEQ ID NO: 146540 - DNA, 25 bp, Saccharomyces pastorianus
atacgcaaaattggacccttccacg

SEQ ID NO: 146541 - DNA, 25 bp, Saccharomyces pastorianus
aagctgtcttttttggatctcacac

SEQ ID NO: 146542 - DNA, 25 bp, Saccharomyces pastorianus
gactccgttagaatttgcctccaaa

SEQ ID NO: 146543 - DNA, 25 bp, Saccharomyces pastorianus
attatatttcctgctcttgtgacgg

SEQ ID NO: 146544 - DNA, 25 bp, Saccharomyces pastorianus
acatcgtcgtacagtaatttgctaa

SEQ ID NO: 146545 - DNA, 25 bp, Saccharomyces pastorianus
gatacactcagtttgtcacaggtta

SEQ ID NO: 146546 - DNA, 25 bp, Saccharomyces pastorianus
gcacctactgcatctcttaagtttc

SEQ ID NO: 146547 - DNA, 25 bp, Saccharomyces pastorianus
cagtcttgtatacatggttggccat

SEQ ID NO: 146548 - DNA, 25 bp, Saccharomyces pastorianus
tcttgtgacggaaccgcacctactg

SEQ ID NO: 146549 - DNA, 25 bp, Saccharomyces pastorianus
tcccatcggatatttctgatacact

SEQ ID NO: 146550 - DNA, 25 bp, Saccharomyces pastorianus
gtcacaggttacatcgtcgtacagt

SEQ ID NO: 146551 - DNA, 25 bp, Saccharomyces pastorianus
gggtacaatagtcttatcactcgat

SEQ ID NO: 146552 - DNA, 25 bp, Saccharomyces pastorianus
tgcatctcttaagtttcccatcgga

SEQ ID NO: 146553 - DNA, 25 bp, Saccharomyces pastorianus
tttggtttggatgctagtgggtaca

SEQ ID NO: 146554 - DNA, 25 bp, Saccharomyces pastorianus
ctctcatttctttttattaagtcga

SEQ ID NO: 146555 - DNA, 25 bp, Saccharomyces pastorianus
attccagacactgtcactctcattt

SEQ ID NO: 146556 - DNA, 25 bp, Saccharomyces pastorianus
ctcatttctttttattaagtcgaga

SEQ ID NO: 146557 - DNA, 25 bp, Saccharomyces pastorianus
gcgtacccttggtattctagaagaa

SEQ ID NO: 146558 - DNA, 25 bp, Saccharomyces pastorianus
ccagacactgtcactctcatttctt

SEQ ID NO: 146559 - DNA, 25 bp, Saccharomyces pastorianus
gaaattccagacactgtcactctca

SEQ ID NO: 146560 - DNA, 25 bp, Saccharomyces pastorianus
atgcgtacccttggtattctagaag

SEQ ID NO: 146561 - DNA, 25 bp, Saccharomyces pastorianus
gaaagaaattccagacactgtcact

SEQ ID NO: 146562 - DNA, 25 bp, Saccharomyces pastorianus
gtacccttggtattctagaagaaag

SEQ ID NO: 146563 - DNA, 25 bp, Saccharomyces pastorianus
gaagaaagaaattccagacactgtc

SEQ ID NO: 146564 - DNA, 25 bp, Saccharomyces pastorianus
gtcgagaagtgaaatgtttaaaaca

SEQ ID NO: 146565 - DNA, 25 bp, Saccharomyces pastorianus
gtcttcttccaggtgattttccaga

SEQ ID NO: 146566 - DNA, 25 bp, Saccharomyces pastorianus
atgtgctgcattcatcgacggtgaa

SEQ ID NO: 146567 - DNA, 25 bp, Saccharomyces pastorianus
aatctggatttgatggtcttcttcc

SEQ ID NO: 146568 - DNA, 25 bp, Saccharomyces pastorianus
tttcaaccctctacatctgatggat

SEQ ID NO: 146569 - DNA, 25 bp, Saccharomyces pastorianus
ggagccaatcaaccgaatcatgcaa

SEQ ID NO: 146570 - DNA, 25 bp, Saccharomyces pastorianus
tgcaggccaggcaatgtcacggata

SEQ ID NO: 146571 - DNA, 25 bp, Saccharomyces pastorianus
agccgtctacgagcaattttcttca

SEQ ID NO: 146572 - DNA, 25 bp, Saccharomyces pastorianus
attacacagctcctatagccgtcta

SEQ ID NO: 146573 - DNA, 25 bp, Saccharomyces pastorianus
tattttattgacatcgtcgccccaa

SEQ ID NO: 146574 - DNA, 25 bp, Saccharomyces pastorianus
gagcattttacgtaccggagccaat

SEQ ID NO: 146575 - DNA, 25 bp, Saccharomyces pastorianus
aagttctttcctgctgccagataat

SEQ ID NO: 146576 - DNA, 25 bp, Saccharomyces pastorianus
gggcacgatgcatccatgggactaa

SEQ ID NO: 146577 - DNA, 25 bp, Saccharomyces pastorianus
agtcaagtgcgttttgggcaatcat

SEQ ID NO: 146578 - DNA, 25 bp, Saccharomyces pastorianus
gcgtgagctctctgtcaaacatgaa

SEQ ID NO: 146579 - DNA, 25 bp, Saccharomyces pastorianus
gacgccccaaattaatgacaccttt

SEQ ID NO: 146580 - DNA, 25 bp, Saccharomyces pastorianus
agtcagctagcggaacattgttcta

SEQ ID NO: 146581 - DNA, 25 bp, Saccharomyces pastorianus
gcacatggacggttagctcgcgaac

SEQ ID NO: 146582 - DNA, 25 bp, Saccharomyces pastorianus
tacggagaccactttagtaacgcca

SEQ ID NO: 146583 - DNA, 25 bp, Saccharomyces pastorianus
gacacctttaactttcagtacggag

SEQ ID NO: 146584 - DNA, 25 bp, Saccharomyces pastorianus
atatactctttggtgcacatgcagg

SEQ ID NO: 146585 - DNA, 25 bp, Saccharomyces pastorianus
tagctcgcgaacttgggttttccaa

SEQ ID NO: 146586 - DNA, 25 bp, Saccharomyces pastorianus
ttcatgaagcccaaccaaattccgg

SEQ ID NO: 146587 - DNA, 25 bp, Saccharomyces pastorianus
attgcctacaattagcaccttgaag

SEQ ID NO: 146588 - DNA, 25 bp, Saccharomyces pastorianus
gttcatggtaactatgatgagttca

SEQ ID NO: 146589 - DNA, 25 bp, Saccharomyces pastorianus
accagtttccttattgcctacaatt

SEQ ID NO: 146590 - DNA, 25 bp, Saccharomyces pastorianus
gtacgtttttgttggtgacgttcat

SEQ ID NO: 146591 - DNA, 25 bp, Saccharomyces pastorianus
gacaagattggaggactaggagaaa

SEQ ID NO: 146592 - DNA, 25 bp, Saccharomyces pastorianus
ggcatgctgcgtttatacactatat

SEQ ID NO: 146593 - DNA, 25 bp, Saccharomyces pastorianus
gttggtgacgttcatggtaactatg

SEQ ID NO: 146594 - DNA, 25 bp, Saccharomyces pastorianus
attcaagtttgataaccctcggttg

SEQ ID NO: 146595 - DNA, 25 bp, Saccharomyces pastorianus
gttgtctccaccagtttccttattg

SEQ ID NO: 146596 - DNA, 25 bp, Saccharomyces pastorianus
gtttgataaccctcggttgtctcca

SEQ ID NO: 146597 - DNA, 25 bp, Saccharomyces pastorianus
tgatattatttgtggcatgctgcgt

SEQ ID NO: 146598 - DNA, 25 bp, Saccharomyces pastorianus
ccaatccgatttacgaaggcttatt

SEQ ID NO: 146599 - DNA, 25 bp, Saccharomyces pastorianus
gaacattcggcatcaatcttaacgt

SEQ ID NO: 146600 - DNA, 25 bp, Saccharomyces pastorianus
ggtccttatgcgatttcttggtcat

SEQ ID NO: 146601 - DNA, 25 bp, Saccharomyces pastorianus
gtcgttcccagccagtgaaaatgtt

SEQ ID NO: 146602 - DNA, 25 bp, Saccharomyces pastorianus
actattgttacatcgacgggtcctt

SEQ ID NO: 146603 - DNA, 25 bp, Saccharomyces pastorianus
ttggatttctgaagtcgttcccagc

SEQ ID NO: 146604 - DNA, 25 bp, Saccharomyces pastorianus
aagtttattactacctctgctgacg

SEQ ID NO: 146605 - DNA, 25 bp, Saccharomyces pastorianus
tataccttcactaggccaagcaatc

SEQ ID NO: 146606 - DNA, 25 bp, Saccharomyces pastorianus
agacgatgtctctctatcgaaagtg

SEQ ID NO: 146607 - DNA, 25 bp, Saccharomyces pastorianus
tattggcgacttgcgagagtactct

SEQ ID NO: 146608 - DNA, 25 bp, Saccharomyces pastorianus
gagtactctgcttcttatggatttg

SEQ ID NO: 146609 - DNA, 25 bp, Saccharomyces pastorianus
gattcaagctcagatgactttcaag

SEQ ID NO: 146610 - DNA, 25 bp, Saccharomyces pastorianus
ccaaactgtttaccgatgccaattc

SEQ ID NO: 146611 - DNA, 25 bp, Saccharomyces pastorianus
cgctgatgtgtcgttttctgatgtt

SEQ ID NO: 146612 - DNA, 25 bp, Saccharomyces pastorianus
aagacacctcttttgagcacgagaa

SEQ ID NO: 146613 - DNA, 25 bp, Saccharomyces pastorianus
gttgtttagtgatgtctagcctata

SEQ ID NO: 146614 - DNA, 25 bp, Saccharomyces pastorianus
attttgaagacgacaccatcagtgt

SEQ ID NO: 146615 - DNA, 25 bp, Saccharomyces pastorianus
aatttattctgcaggagcccgtggt

SEQ ID NO: 146616 - DNA, 25 bp, Saccharomyces pastorianus
tctcactgcctcagcagatgactta

SEQ ID NO: 146617 - DNA, 25 bp, Saccharomyces pastorianus
caatttgttgttgccgctgatgtgt

SEQ ID NO: 146618 - DNA, 25 bp, Saccharomyces pastorianus
gatcaaccaggctctttgttcaaga

SEQ ID NO: 146619 - DNA, 25 bp, Saccharomyces pastorianus
aataaaaaatcctctctcactgcct

SEQ ID NO: 146620 - DNA, 25 bp, Saccharomyces pastorianus
tatggtagacagttacctcgctcca

SEQ ID NO: 146621 - DNA, 25 bp, Saccharomyces pastorianus
cagttttgcaaccagagcgttagct

SEQ ID NO: 146622 - DNA, 25 bp, Saccharomyces pastorianus
gaagaggaggcagtggtaacccaaa

SEQ ID NO: 146623 - DNA, 25 bp, Saccharomyces pastorianus
acctcgctccactgtgagcagtaag

SEQ ID NO: 146624 - DNA, 25 bp, Saccharomyces pastorianus
cagagcgttagctgaattgtatggt

SEQ ID NO: 146625 - DNA, 25 bp, Saccharomyces pastorianus
taatgtaaatatgctttccagttac

SEQ ID NO: 146626 - DNA, 25 bp, Saccharomyces pastorianus
gaggcagtggtaacccaaatcctaa

SEQ ID NO: 146627 - DNA, 25 bp, Saccharomyces pastorianus
gcaaccagagcgttagctgaattgt

SEQ ID NO: 146628 - DNA, 25 bp, Saccharomyces pastorianus
gatgtcagttttgcaaccagagcgt

SEQ ID NO: 146629 - DNA, 25 bp, Saccharomyces pastorianus
gagcagtaagggaggtatcagatta

SEQ ID NO: 146630 - DNA, 25 bp, Saccharomyces pastorianus
gaattcgatgatgtcagttttgcaa

SEQ ID NO: 146631 - DNA, 25 bp, Saccharomyces pastorianus
gattcctccattagttaaacttttg

SEQ ID NO: 146632 - DNA, 25 bp, Saccharomyces pastorianus
aaagaagcgtgttggaccatttcca

SEQ ID NO: 146633 - DNA, 25 bp, Saccharomyces pastorianus
actatggctccacaaaatgccggta

SEQ ID NO: 146634 - DNA, 25 bp, Saccharomyces pastorianus
gacgccgtagacgaaactatggctc

SEQ ID NO: 146635 - DNA, 25 bp, Saccharomyces pastorianus
tggaccatttccaatattacggctg

SEQ ID NO: 146636 - DNA, 25 bp, Saccharomyces pastorianus
gtatctcaaggctgtataaaaccat

SEQ ID NO: 146637 - DNA, 25 bp, Saccharomyces pastorianus
aaaccattgtgtgatttgctagaaa

SEQ ID NO: 146638 - DNA, 25 bp, Saccharomyces pastorianus
gcgttaagacttctgctaagctctc

SEQ ID NO: 146639 - DNA, 25 bp, Saccharomyces pastorianus
attgacgcgaacttgattcctccat

SEQ ID NO: 146640 - DNA, 25 bp, Saccharomyces pastorianus
gaagttaccttagatgctcttgaaa

SEQ ID NO: 146641 - DNA, 25 bp, Saccharomyces pastorianus
aatgacttacagactcaggtcgtta

SEQ ID NO: 146642 - DNA, 25 bp, Saccharomyces pastorianus
gttgttgatgctgacgctgtacctc

SEQ ID NO: 146643 - DNA, 25 bp, Saccharomyces pastorianus
ttcaagccggtgttgttccaagatt

SEQ ID NO: 146644 - DNA, 25 bp, Saccharomyces pastorianus
tgatgtcgtcattcaagccggtgtt

SEQ ID NO: 146645 - DNA, 25 bp, Saccharomyces pastorianus
gtttctgcggaccaacaattttaca

SEQ ID NO: 146646 - DNA, 25 bp, Saccharomyces pastorianus
caattttacagccagttgcagcaag

SEQ ID NO: 146647 - DNA, 25 bp, Saccharomyces pastorianus
atcgccctccaattgatgtcgtcat

SEQ ID NO: 146648 - DNA, 25 bp, Saccharomyces pastorianus
actgactacagagactacgttttac

SEQ ID NO: 146649 - DNA, 25 bp, Saccharomyces pastorianus
ttttgtctagagaacatcgccctcc

SEQ ID NO: 146650 - DNA, 25 bp, Saccharomyces pastorianus
gccatggagccaattttgggtcttt

SEQ ID NO: 146651 - DNA, 25 bp, Saccharomyces pastorianus
agattggtcagtggtctcaccagcg

SEQ ID NO: 146652 - DNA, 25 bp, Saccharomyces pastorianus
gaagatgagagctccgtttctgcgg

SEQ ID NO: 146653 - DNA, 25 bp, Saccharomyces pastorianus
gttacgtgtacgttgtcagacgcaa

SEQ ID NO: 146654 - DNA, 25 bp, Saccharomyces pastorianus
tttacgatcggcgaaacctgcagca

SEQ ID NO: 146655 - DNA, 25 bp, Saccharomyces pastorianus
atccttacaagcgataacgggcgtt

SEQ ID NO: 146656 - DNA, 25 bp, Saccharomyces pastorianus
gaggatctctattgtgtggcagtta

SEQ ID NO: 146657 - DNA, 25 bp, Saccharomyces pastorianus
aggtgttccctcacacaatagtgtt

SEQ ID NO: 146658 - DNA, 25 bp, Saccharomyces pastorianus
tgattctactattcctgccacggta

SEQ ID NO: 146659 - DNA, 25 bp, Saccharomyces pastorianus
agtggcgcactaaccttgattctac

SEQ ID NO: 146660 - DNA, 25 bp, Saccharomyces pastorianus
gcacgagcttaacgtattgcgccta

SEQ ID NO: 146661 - DNA, 25 bp, Saccharomyces pastorianus
gtttcaggtagactgccgtcatcaa

SEQ ID NO: 146662 - DNA, 25 bp, Saccharomyces pastorianus
tagagagactgaactacacccgcac

SEQ ID NO: 146663 - DNA, 25 bp, Saccharomyces pastorianus
gtctatcccgccagagtcagagtgg

SEQ ID NO: 146664 - DNA, 25 bp, Saccharomyces pastorianus
gatggtacatcgtttgtttctgtgc

SEQ ID NO: 146665 - DNA, 25 bp, Saccharomyces pastorianus
gatacgagtatccacgactaggaga

SEQ ID NO: 146666 - DNA, 25 bp, Saccharomyces pastorianus
agggcattatgagtccttgaataga

SEQ ID NO: 146667 - DNA, 25 bp, Saccharomyces pastorianus
aaaggactcaaagtgatcgaagtgg

SEQ ID NO: 146668 - DNA, 25 bp, Saccharomyces pastorianus
acatcgtttgtttctgtgcataatg

SEQ ID NO: 146669 - DNA, 25 bp, Saccharomyces pastorianus
atatcttttggtcatgtgatggtac

SEQ ID NO: 146670 - DNA, 25 bp, Saccharomyces pastorianus
atgacagaggacttcagaatggaaa

SEQ ID NO: 146671 - DNA, 25 bp, Saccharomyces pastorianus
gactaggagaatcaccatatatcaa

SEQ ID NO: 146672 - DNA, 25 bp, Saccharomyces pastorianus
caattccgtattgcgacactggcga

SEQ ID NO: 146673 - DNA, 25 bp, Saccharomyces pastorianus
gttcgaggctgagacgatagcgaat

SEQ ID NO: 146674 - DNA, 25 bp, Saccharomyces pastorianus
acactggcgaagtgttcgaggctga

SEQ ID NO: 146675 - DNA, 25 bp, Saccharomyces pastorianus
aaccacaccataataatagtacaga

SEQ ID NO: 146676 - DNA, 25 bp, Saccharomyces pastorianus
aggaagcttacagcaggagaaggaa

SEQ ID NO: 146677 - DNA, 25 bp, Saccharomyces pastorianus
aagacaaaattcacgagcatcaaaa

SEQ ID NO: 146678 - DNA, 25 bp, Saccharomyces pastorianus
gtactcttccgaaaggaagcttaca

SEQ ID NO: 146679 - DNA, 25 bp, Saccharomyces pastorianus
gtacagatagtactcttccgaaagg

SEQ ID NO: 146680 - DNA, 25 bp, Saccharomyces pastorianus
attcacgagcatcaaaaagcaaagg

SEQ ID NO: 146681 - DNA, 25 bp, Saccharomyces pastorianus
gcttacagcaggagaaggaagatct

SEQ ID NO: 146682 - DNA, 25 bp, Saccharomyces pastorianus
ggaagatctcaatatcaaacccaca

SEQ ID NO: 146683 - DNA, 25 bp, Saccharomyces pastorianus
acagcaaccacaccataataatagt

SEQ ID NO: 146684 - DNA, 25 bp, Saccharomyces pastorianus
acagatagtactcttccgaaaggaa

SEQ ID NO: 146685 - DNA, 25 bp, Saccharomyces pastorianus
gggacaaaagacaaaattcacgagc

SEQ ID NO: 146686 - DNA, 25 bp, Saccharomyces pastorianus
accaaagcaggtgtccgggaagtct

SEQ ID NO: 146687 - DNA, 25 bp, Saccharomyces pastorianus
tgacctaagagatgatccggcaact

SEQ ID NO: 146688 - DNA, 25 bp, Saccharomyces pastorianus
gaatcccctaaccaaaaatcagcaa

SEQ ID NO: 146689 - DNA, 25 bp, Saccharomyces pastorianus
ataccgaatgttcagctgctaccaa

SEQ ID NO: 146690 - DNA, 25 bp, Saccharomyces pastorianus
gcaaactccgattacgtgtctcaag

SEQ ID NO: 146691 - DNA, 25 bp, Saccharomyces pastorianus
gaaggtacctctctttatactaagt

SEQ ID NO: 146692 - DNA, 25 bp, Saccharomyces pastorianus
gaccgttatgttatccccaaacaga

SEQ ID NO: 146693 - DNA, 25 bp, Saccharomyces pastorianus
ggtgaggtacgctatctacgaacca

SEQ ID NO: 146694 - DNA, 25 bp, Saccharomyces pastorianus
attaacgactgcaacaaccaacacc

SEQ ID NO: 146695 - DNA, 25 bp, Saccharomyces pastorianus
gtttatgggctataccgaatgttca

SEQ ID NO: 146696 - DNA, 25 bp, Saccharomyces pastorianus
gtttctcagtaagcgaacatgctag

SEQ ID NO: 146697 - DNA, 25 bp, Saccharomyces pastorianus
agcctcttttaggaacgtagaagat

SEQ ID NO: 146698 - DNA, 25 bp, Saccharomyces pastorianus
taatttaggtttgctgtgttcagat

SEQ ID NO: 146699 - DNA, 25 bp, Saccharomyces pastorianus
ataccacctcttcgcaactggttga

SEQ ID NO: 146700 - DNA, 25 bp, Saccharomyces pastorianus
tttggattgccaactcgaattgtgg

SEQ ID NO: 146701 - DNA, 25 bp, Saccharomyces pastorianus
gacaatggtagaactcgatactctt

SEQ ID NO: 146702 - DNA, 25 bp, Saccharomyces pastorianus
aacaaggaaataccacctcttcgca

SEQ ID NO: 146703 - DNA, 25 bp, Saccharomyces pastorianus
agaagatattcatgtggcactcaaa

SEQ ID NO: 146704 - DNA, 25 bp, Saccharomyces pastorianus
aagtgttttcgagaacaaagcctct

SEQ ID NO: 146705 - DNA, 25 bp, Saccharomyces pastorianus
actaaggactactcagcttctgatt

SEQ ID NO: 146706 - DNA, 25 bp, Saccharomyces pastorianus
actcgatactcttttgagtgcagga

SEQ ID NO: 146707 - DNA, 25 bp, Saccharomyces pastorianus
gtggcactcaaaagaaaggcagcag

SEQ ID NO: 146708 - DNA, 25 bp, Saccharomyces pastorianus
tattgaattggtggtcgaggaagac

SEQ ID NO: 146709 - DNA, 25 bp, Saccharomyces pastorianus
ctcggtgccttgttataaaggacat

SEQ ID NO: 146710 - DNA, 25 bp, Saccharomyces pastorianus
aaaggacatttccactggtgacgca

SEQ ID NO: 146711 - DNA, 25 bp, Saccharomyces pastorianus
cctgtagagcctcggtgccttgtta

SEQ ID NO: 146712 - DNA, 25 bp, Saccharomyces pastorianus
ggtgacgcagtaaacaacgttccta

SEQ ID NO: 146713 - DNA, 25 bp, Saccharomyces pastorianus
tagagcctcggtgccttgttataaa

SEQ ID NO: 146714 - DNA, 25 bp, Saccharomyces pastorianus
gtaaacaacgttcctattgaattgg

SEQ ID NO: 146715 - DNA, 25 bp, Saccharomyces pastorianus
agcctcggtgccttgttataaagga

SEQ ID NO: 146716 - DNA, 25 bp, Saccharomyces pastorianus
gacgcagtaaacaacgttcctattg

SEQ ID NO: 146717 - DNA, 25 bp, Saccharomyces pastorianus
acgttcctattgaattggtggtcga

SEQ ID NO: 146718 - DNA, 25 bp, Saccharomyces pastorianus
gacatttccactggtgacgcagtaa

SEQ ID NO: 146719 - DNA, 25 bp, Saccharomyces pastorianus
gaccaaatcttgcactgggttttct

SEQ ID NO: 146720 - DNA, 25 bp, Saccharomyces pastorianus
gtaagtttatttcgaccaaatcttg

SEQ ID NO: 146721 - DNA, 25 bp, Saccharomyces pastorianus
tgcactgggttttcttttccttggg

SEQ ID NO: 146722 - DNA, 25 bp, Saccharomyces pastorianus
tatttcgaccaaatcttgcactggg

SEQ ID NO: 146723 - DNA, 25 bp, Saccharomyces pastorianus
tttcgaccaaatcttgcactgggtt

SEQ ID NO: 146724 - DNA, 25 bp, Saccharomyces pastorianus
atcttgcactgggttttcttttcct

SEQ ID NO: 146725 - DNA, 25 bp, Saccharomyces pastorianus
gtttatttcgaccaaatcttgcact

SEQ ID NO: 146726 - DNA, 25 bp, Saccharomyces pastorianus
cttgcactgggttttcttttccttg

SEQ ID NO: 146727 - DNA, 25 bp, Saccharomyces pastorianus
accaaatcttgcactgggttttctt

SEQ ID NO: 146728 - DNA, 25 bp, Saccharomyces pastorianus
caaatcttgcactgggttttctttt

SEQ ID NO: 146729 - DNA, 25 bp, Saccharomyces pastorianus
tcgaccaaatcttgcactgggtttt

SEQ ID NO: 146730 - DNA, 25 bp, Saccharomyces pastorianus
gctgcttctctcgatgacgaaaggt

SEQ ID NO: 146731 - DNA, 25 bp, Saccharomyces pastorianus
tgcctctttatcagtacccaggaaa

SEQ ID NO: 146732 - DNA, 25 bp, Saccharomyces pastorianus
ctctcgttgataagtttctgcctct

SEQ ID NO: 146733 - DNA, 25 bp, Saccharomyces pastorianus
ggaatatactactttctctcgttga

SEQ ID NO: 146734 - DNA, 25 bp, Saccharomyces pastorianus
aatgtcatcgttgtttctttgagca

SEQ ID NO: 146735 - DNA, 25 bp, Saccharomyces pastorianus
ggtccatattcagacttatttcaag

SEQ ID NO: 146736 - DNA, 25 bp, Saccharomyces pastorianus
gtgccagtggcgatttagaagtttt

SEQ ID NO: 146737 - DNA, 25 bp, Saccharomyces pastorianus
gggtaggatcttagccatgggtatt

SEQ ID NO: 146738 - DNA, 25 bp, Saccharomyces pastorianus
cgaaaggtcctcaaatggcagtgat

SEQ ID NO: 146739 - DNA, 25 bp, Saccharomyces pastorianus
aagggttgatgagaccgctgcttct

SEQ ID NO: 146740 - DNA, 25 bp, Saccharomyces pastorianus
gacttcaaacactaacacacctgga

SEQ ID NO: 146741 - DNA, 25 bp, Saccharomyces pastorianus
agtttctcgagacttgttgcaaccg

SEQ ID NO: 146742 - DNA, 25 bp, Saccharomyces pastorianus
gattaccaagtcgttatacagcata

SEQ ID NO: 146743 - DNA, 25 bp, Saccharomyces pastorianus
gatgaaccgccatcgattaccaagt

SEQ ID NO: 146744 - DNA, 25 bp, Saccharomyces pastorianus
ggtcgaattacgcattactccaaga

SEQ ID NO: 146745 - DNA, 25 bp, Saccharomyces pastorianus
gttgcaaccgatacacaggtcgaat

SEQ ID NO: 146746 - DNA, 25 bp, Saccharomyces pastorianus
tatgaactcgtacactctccaaatt

SEQ ID NO: 146747 - DNA, 25 bp, Saccharomyces pastorianus
gagttacaaacatatcccttaggca

SEQ ID NO: 146748 - DNA, 25 bp, Saccharomyces pastorianus
gaagctctttgtctaagaagcccag

SEQ ID NO: 146749 - DNA, 25 bp, Saccharomyces pastorianus
tttaggcatcctttccagctttaaa

SEQ ID NO: 146750 - DNA, 25 bp, Saccharomyces pastorianus
aaaatcttgggcttgtatgaactcg

SEQ ID NO: 146751 - DNA, 25 bp, Saccharomyces pastorianus
acaaagtgccactcgccaagaatag

SEQ ID NO: 146752 - DNA, 25 bp, Saccharomyces pastorianus
gctactctgttactaatccattggt

SEQ ID NO: 146753 - DNA, 25 bp, Saccharomyces pastorianus
aacccaagggacgacatggatggcc

SEQ ID NO: 146754 - DNA, 25 bp, Saccharomyces pastorianus
ggacactaacgttgtcaaaagcgaa

SEQ ID NO: 146755 - DNA, 25 bp, Saccharomyces pastorianus
ggctgtccttccgttaattcaagac

SEQ ID NO: 146756 - DNA, 25 bp, Saccharomyces pastorianus
tccgatacccatgatactaataagc

SEQ ID NO: 146757 - DNA, 25 bp, Saccharomyces pastorianus
aaaagcgaaaatgcgggctgtcctt

SEQ ID NO: 146758 - DNA, 25 bp, Saccharomyces pastorianus
atggatggccaagaagacagcttca

SEQ ID NO: 146759 - DNA, 25 bp, Saccharomyces pastorianus
tgcaaattccgatacccatgatact

SEQ ID NO: 146760 - DNA, 25 bp, Saccharomyces pastorianus
aatcaattcatgctactctgttact

SEQ ID NO: 146761 - DNA, 25 bp, Saccharomyces pastorianus
gtccttccgttaattcaagaccaat

SEQ ID NO: 146762 - DNA, 25 bp, Saccharomyces pastorianus
aatactcactgaactctggagcaaa

SEQ ID NO: 146763 - DNA, 25 bp, Saccharomyces pastorianus
gcagagttcaatgccatcgagcact

SEQ ID NO: 146764 - DNA, 25 bp, Saccharomyces pastorianus
acgccgggattgagttctctgctaa

SEQ ID NO: 146765 - DNA, 25 bp, Saccharomyces pastorianus
gtccaaatctgggttgacacctaat

SEQ ID NO: 146766 - DNA, 25 bp, Saccharomyces pastorianus
ggatgtctagcacaagttctacttc

SEQ ID NO: 146767 - DNA, 25 bp, Saccharomyces pastorianus
gagcactccgctcataatcacaagg

SEQ ID NO: 146768 - DNA, 25 bp, Saccharomyces pastorianus
aatggtacaccacttacgccgggat

SEQ ID NO: 146769 - DNA, 25 bp, Saccharomyces pastorianus
tctctgctaaacttaccatctactg

SEQ ID NO: 146770 - DNA, 25 bp, Saccharomyces pastorianus
acaattatcccgtattgccgtcaat

SEQ ID NO: 146771 - DNA, 25 bp, Saccharomyces pastorianus
gaagtattgaaaaccaccctcatgt

SEQ ID NO: 146772 - DNA, 25 bp, Saccharomyces pastorianus
atacttcaacgaaagcggctgtcaa

SEQ ID NO: 146773 - DNA, 25 bp, Saccharomyces pastorianus
ttgacacccggtattcttacgcaat

SEQ ID NO: 146774 - DNA, 25 bp, Saccharomyces pastorianus
ctcagaacttaacttggatggcgaa

SEQ ID NO: 146775 - DNA, 25 bp, Saccharomyces pastorianus
gacgcagctcgtttgcatggagacg

SEQ ID NO: 146776 - DNA, 25 bp, Saccharomyces pastorianus
ggaaaaccgtgttccagatttctct

SEQ ID NO: 146777 - DNA, 25 bp, Saccharomyces pastorianus
tggtgaaccaccacgtaacatgata

SEQ ID NO: 146778 - DNA, 25 bp, Saccharomyces pastorianus
ccataaaagttgttgcccgcatcat

SEQ ID NO: 146779 - DNA, 25 bp, Saccharomyces pastorianus
agttaacgaatcaagtcccatgtgt

SEQ ID NO: 146780 - DNA, 25 bp, Saccharomyces pastorianus
gttacaatcgtatgccgaatccacc

SEQ ID NO: 146781 - DNA, 25 bp, Saccharomyces pastorianus
gtcccatgtgtttattttgcgagta

SEQ ID NO: 146782 - DNA, 25 bp, Saccharomyces pastorianus
cagatttctctgtcctagttaacga

SEQ ID NO: 146783 - DNA, 25 bp, Saccharomyces pastorianus
acggtcaacattccatatcttctag

SEQ ID NO: 146784 - DNA, 25 bp, Saccharomyces pastorianus
gatcatgataccgttgacgcagctc

SEQ ID NO: 146785 - DNA, 25 bp, Saccharomyces pastorianus
attctgttccgaaactccacaggaa

SEQ ID NO: 146786 - DNA, 25 bp, Saccharomyces pastorianus
gtttaatggcatattctaccgtagg

SEQ ID NO: 146787 - DNA, 25 bp, Saccharomyces pastorianus
ttttattggctacacttactccaga

SEQ ID NO: 146788 - DNA, 25 bp, Saccharomyces pastorianus
acgagtgtctgattggttggcctcc

SEQ ID NO: 146789 - DNA, 25 bp, Saccharomyces pastorianus
aaagttgagctccatcaccgatact

SEQ ID NO: 146790 - DNA, 25 bp, Saccharomyces pastorianus
aagtcatccattttttcgcggtgtt

SEQ ID NO: 146791 - DNA, 25 bp, Saccharomyces pastorianus
gagcaaactctacaatttcctgatg

SEQ ID NO: 146792 - DNA, 25 bp, Saccharomyces pastorianus
ggagaatgttccagattccccagct

SEQ ID NO: 146793 - DNA, 25 bp, Saccharomyces pastorianus
taggttcttcccaaccgatgagttg

SEQ ID NO: 146794 - DNA, 25 bp, Saccharomyces pastorianus
atccgtcgactattaactcatgcag

SEQ ID NO: 146795 - DNA, 25 bp, Saccharomyces pastorianus
gaagccgaagatctaatccgtcgac

SEQ ID NO: 146796 - DNA, 25 bp, Saccharomyces pastorianus
ttatcaccgggccaatattctatag

SEQ ID NO: 146797 - DNA, 25 bp, Saccharomyces pastorianus
ggcagcggttttacagacgttccag

SEQ ID NO: 146798 - DNA, 25 bp, Saccharomyces pastorianus
atgagggtgcacctacttcaggaca

SEQ ID NO: 146799 - DNA, 25 bp, Saccharomyces pastorianus
gccgtcgatgggtggtctttataga

SEQ ID NO: 146800 - DNA, 25 bp, Saccharomyces pastorianus
agacaggtaaccttggcagcggttt

SEQ ID NO: 146801 - DNA, 25 bp, Saccharomyces pastorianus
aatcagatgatcaataccccaccgc

SEQ ID NO: 146802 - DNA, 25 bp, Saccharomyces pastorianus
gtatcagcaaattcctagaccgcct

SEQ ID NO: 146803 - DNA, 25 bp, Saccharomyces pastorianus
gggaatgcacaattaccccaattat

SEQ ID NO: 146804 - DNA, 25 bp, Saccharomyces pastorianus
gacgttccagccctgaattatccag

SEQ ID NO: 146805 - DNA, 25 bp, Saccharomyces pastorianus
accaccaccgcataataattacgca

SEQ ID NO: 146806 - DNA, 25 bp, Saccharomyces pastorianus
atggcagttcttctagtagtccgtt

SEQ ID NO: 146807 - DNA, 25 bp, Saccharomyces pastorianus
gccgtggttgggatttgtcgataaa

SEQ ID NO: 146808 - DNA, 25 bp, Saccharomyces pastorianus
acaggtgccaatggtcaaactaaca

SEQ ID NO: 146809 - DNA, 25 bp, Saccharomyces pastorianus
atcaatattcatcacccgatcatca

SEQ ID NO: 146810 - DNA, 25 bp, Saccharomyces pastorianus
gcaacaggccaatcgttatcaatta

SEQ ID NO: 146811 - DNA, 25 bp, Saccharomyces pastorianus
gagaggcgtcgaagcttgatccaac

SEQ ID NO: 146812 - DNA, 25 bp, Saccharomyces pastorianus
gaagcttgatccaacttcgtatgaa

SEQ ID NO: 146813 - DNA, 25 bp, Saccharomyces pastorianus
acccgatcatcaccatcattacaat

SEQ ID NO: 146814 - DNA, 25 bp, Saccharomyces pastorianus
taatgcgcaaccaacggcgaacgac

SEQ ID NO: 146815 - DNA, 25 bp, Saccharomyces pastorianus
attacaaccatatgactcgcactat

SEQ ID NO: 146816 - DNA, 25 bp, Saccharomyces pastorianus
aacagtttgccaatacaggtgccaa

SEQ ID NO: 146817 - DNA, 25 bp, Saccharomyces pastorianus
aacaattgcaacaagcccaggccca

SEQ ID NO: 146818 - DNA, 25 bp, Saccharomyces pastorianus
tggttattgatctgcttggtccttc

SEQ ID NO: 146819 - DNA, 25 bp, Saccharomyces pastorianus
ctaaacaacatattccgtacaggga

SEQ ID NO: 146820 - DNA, 25 bp, Saccharomyces pastorianus
gatctgcttggtccttctttagaag

SEQ ID NO: 146821 - DNA, 25 bp, Saccharomyces pastorianus
agcgggaacacctggtataccacaa

SEQ ID NO: 146822 - DNA, 25 bp, Saccharomyces pastorianus
gaagccccacagctaaaggacgaat

SEQ ID NO: 146823 - DNA, 25 bp, Saccharomyces pastorianus
taccagttgctatcaagtttgaacc

SEQ ID NO: 146824 - DNA, 25 bp, Saccharomyces pastorianus
ttcttttatttcttgagaggccact

SEQ ID NO: 146825 - DNA, 25 bp, Saccharomyces pastorianus
gaagaccgggtcaaccagatgctaa

SEQ ID NO: 146826 - DNA, 25 bp, Saccharomyces pastorianus
atatggaagctatgggtcatgtctt

SEQ ID NO: 146827 - DNA, 25 bp, Saccharomyces pastorianus
agatttgcacgctcatgatttgata

SEQ ID NO: 146828 - DNA, 25 bp, Saccharomyces pastorianus
agaggccacttaccctggcagggtt

SEQ ID NO: 146829 - DNA, 25 bp, Saccharomyces pastorianus
gtttgaccgtcataagaggtactat

SEQ ID NO: 146830 - DNA, 25 bp, Saccharomyces pastorianus
gaaagctaggtttgaccgtcataag

SEQ ID NO: 146831 - DNA, 25 bp, Saccharomyces pastorianus
aactgatgaacttggtacttgatga

SEQ ID NO: 146832 - DNA, 25 bp, Saccharomyces pastorianus
tgaactgatttctaaaaacgcaaga

SEQ ID NO: 146833 - DNA, 25 bp, Saccharomyces pastorianus
acttggtacttgatgatacagtaga

SEQ ID NO: 146834 - DNA, 25 bp, Saccharomyces pastorianus
aatcctgatgatgaaaacaacactg

SEQ ID NO: 146835 - DNA, 25 bp, Saccharomyces pastorianus
acgcaagaaagctaggtttgaccgt

SEQ ID NO: 146836 - DNA, 25 bp, Saccharomyces pastorianus
gatgaaaacaacactgaactgattt

SEQ ID NO: 146837 - DNA, 25 bp, Saccharomyces pastorianus
gaatatatgtctaatcctgatgatg

SEQ ID NO: 146838 - DNA, 25 bp, Saccharomyces pastorianus
gatgaacttggtacttgatgataca

SEQ ID NO: 146839 - DNA, 25 bp, Saccharomyces pastorianus
gaggtactattttggtctctttaag

SEQ ID NO: 146840 - DNA, 25 bp, Saccharomyces pastorianus
gatggccgacatgaattacgtcgtt

SEQ ID NO: 146841 - DNA, 25 bp, Saccharomyces pastorianus
gtcgtttccaagaacagaagcttaa

SEQ ID NO: 146842 - DNA, 25 bp, Saccharomyces pastorianus
atttcgatggccgacatgaattacg

SEQ ID NO: 146843 - DNA, 25 bp, Saccharomyces pastorianus
ctattacaaagccaggaatgatttc

SEQ ID NO: 146844 - DNA, 25 bp, Saccharomyces pastorianus
ggaatgatttcgatggccgacatga

SEQ ID NO: 146845 - DNA, 25 bp, Saccharomyces pastorianus
ttcgatggccgacatgaattacgtc

SEQ ID NO: 146846 - DNA, 25 bp, Saccharomyces pastorianus
gacatgaattacgtcgtttccaaga

SEQ ID NO: 146847 - DNA, 25 bp, Saccharomyces pastorianus
tacaaagccaggaatgatttcgatg

SEQ ID NO: 146848 - DNA, 25 bp, Saccharomyces pastorianus
aatgatttcgatggccgacatgaat

SEQ ID NO: 146849 - DNA, 25 bp, Saccharomyces pastorianus
ccaggaatgatttcgatggccgaca

SEQ ID NO: 146850 - DNA, 25 bp, Saccharomyces pastorianus
ggccgacatgaattacgtcgtttcc

SEQ ID NO: 146851 - DNA, 25 bp, Saccharomyces pastorianus
agatgtcttatcttatctttcttat

SEQ ID NO: 146852 - DNA, 25 bp, Saccharomyces pastorianus
ttatcttaaagacctaccatttgtt

SEQ ID NO: 146853 - DNA, 25 bp, Saccharomyces pastorianus
tgttccttttctattttggcagccc

SEQ ID NO: 146854 - DNA, 25 bp, Saccharomyces pastorianus
tccttttctattttggcagcccggg

SEQ ID NO: 146855 - DNA, 25 bp, Saccharomyces pastorianus
atcttatctttcttatcttaaagac

SEQ ID NO: 146856 - DNA, 25 bp, Saccharomyces pastorianus
tctattttggcagcccgggtattcg

SEQ ID NO: 146857 - DNA, 25 bp, Saccharomyces pastorianus
tcttaaagacctaccatttgttcct

SEQ ID NO: 146858 - DNA, 25 bp, Saccharomyces pastorianus
ttccttttctattttggcagcccgg

SEQ ID NO: 146859 - DNA, 25 bp, Saccharomyces pastorianus
tttctattttggcagcccgggtatt

SEQ ID NO: 146860 - DNA, 25 bp, Saccharomyces pastorianus
gttccttttctattttggcagcccg

SEQ ID NO: 146861 - DNA, 25 bp, Saccharomyces pastorianus
ttctattttggcagcccgggtattc

SEQ ID NO: 146862 - DNA, 25 bp, Saccharomyces pastorianus
tggtttgtgttcaggtatcatcgct

SEQ ID NO: 146863 - DNA, 25 bp, Saccharomyces pastorianus
gcactagcctggactgttactgtca

SEQ ID NO: 146864 - DNA, 25 bp, Saccharomyces pastorianus
ggtggctggatcaatcatcactata

SEQ ID NO: 146865 - DNA, 25 bp, Saccharomyces pastorianus
gaaaagaattctacgccttccgacg

SEQ ID NO: 146866 - DNA, 25 bp, Saccharomyces pastorianus
gttcgtgccaatctggtcagccgtt

SEQ ID NO: 146867 - DNA, 25 bp, Saccharomyces pastorianus
atcatcgctggcctagtgggtatca

SEQ ID NO: 146868 - DNA, 25 bp, Saccharomyces pastorianus
cagccgttgtcattggtgtggttac

SEQ ID NO: 146869 - DNA, 25 bp, Saccharomyces pastorianus
taaagagtctattgcgcatcgatga

SEQ ID NO: 146870 - DNA, 25 bp, Saccharomyces pastorianus
ggatgtaaccttgctgttgacttaa

SEQ ID NO: 146871 - DNA, 25 bp, Saccharomyces pastorianus
ctgcaggctcttacattagtccaat

SEQ ID NO: 146872 - DNA, 25 bp, Saccharomyces pastorianus
ggaagaattaggtaccgacgctgct

SEQ ID NO: 146873 - DNA, 25 bp, Saccharomyces pastorianus
acgactagctcatattctgaagctt

SEQ ID NO: 146874 - DNA, 25 bp, Saccharomyces pastorianus
atcaagtaggtacagcggaaatgct

SEQ ID NO: 146875 - DNA, 25 bp, Saccharomyces pastorianus
attctgaagcttctgctcctgaata

SEQ ID NO: 146876 - DNA, 25 bp, Saccharomyces pastorianus
aagcttctgctcctgaatataccaa

SEQ ID NO: 146877 - DNA, 25 bp, Saccharomyces pastorianus
tgaagcttctgctcctgaatatacc

SEQ ID NO: 146878 - DNA, 25 bp, Saccharomyces pastorianus
ctgctcctgaatataccaaaagatc

SEQ ID NO: 146879 - DNA, 25 bp, Saccharomyces pastorianus
caaaagatcaagtaggtacagcgga

SEQ ID NO: 146880 - DNA, 25 bp, Saccharomyces pastorianus
gcttctgctcctgaatataccaaaa

SEQ ID NO: 146881 - DNA, 25 bp, Saccharomyces pastorianus
gtacagcggaaatgctggaggcaaa

SEQ ID NO: 146882 - DNA, 25 bp, Saccharomyces pastorianus
atattctgaagcttctgctcctgaa

SEQ ID NO: 146883 - DNA, 25 bp, Saccharomyces pastorianus
gctcatattctgaagcttctgctcc

SEQ ID NO: 146884 - DNA, 25 bp, Saccharomyces pastorianus
ctgagcttgttgtttacaccacgaa

SEQ ID NO: 146885 - DNA, 25 bp, Saccharomyces pastorianus
aatctctacaaatccattggcctca

SEQ ID NO: 146886 - DNA, 25 bp, Saccharomyces pastorianus
tggcctcactggtaccagcagttaa

SEQ ID NO: 146887 - DNA, 25 bp, Saccharomyces pastorianus
gagtctctgcatgttacgattgata

SEQ ID NO: 146888 - DNA, 25 bp, Saccharomyces pastorianus
agaaccacggttctgagtctctgca

SEQ ID NO: 146889 - DNA, 25 bp, Saccharomyces pastorianus
aaattcatttttccagctacctcgc

SEQ ID NO: 146890 - DNA, 25 bp, Saccharomyces pastorianus
tacgcttaacttataacaggcctgc

SEQ ID NO: 146891 - DNA, 25 bp, Saccharomyces pastorianus
agaattcctacgcttttgagtaaga

SEQ ID NO: 146892 - DNA, 25 bp, Saccharomyces pastorianus
agctacctcgctattgcagaacaat

SEQ ID NO: 146893 - DNA, 25 bp, Saccharomyces pastorianus
attctaccgcttaaggtgagcttca

SEQ ID NO: 146894 - DNA, 25 bp, Saccharomyces pastorianus
ggccatttggcccagagattatcaa

SEQ ID NO: 146895 - DNA, 25 bp, Saccharomyces pastorianus
atccaacaagtttggcattcaagtt

SEQ ID NO: 146896 - DNA, 25 bp, Saccharomyces pastorianus
gaaatctacacttcgtgctcaactg

SEQ ID NO: 146897 - DNA, 25 bp, Saccharomyces pastorianus
attacgtagaattcccaatccctga

SEQ ID NO: 146898 - DNA, 25 bp, Saccharomyces pastorianus
gaatccttgaatactgaaatctaca

SEQ ID NO: 146899 - DNA, 25 bp, Saccharomyces pastorianus
aatcggcgaggacgatgattacgta

SEQ ID NO: 146900 - DNA, 25 bp, Saccharomyces pastorianus
cattgataaatctgacggcggtaac

SEQ ID NO: 146901 - DNA, 25 bp, Saccharomyces pastorianus
ttccctacctcaaatctccattgat

SEQ ID NO: 146902 - DNA, 25 bp, Saccharomyces pastorianus
gtgctcaactgctattaacgtcaac

SEQ ID NO: 146903 - DNA, 25 bp, Saccharomyces pastorianus
taacgtcaacttaccaatcggcgag

SEQ ID NO: 146904 - DNA, 25 bp, Saccharomyces pastorianus
gaagcatagcttcgctgatggtaag

SEQ ID NO: 146905 - DNA, 25 bp, Saccharomyces pastorianus
agaattcccaatccctgaacagatg

SEQ ID NO: 146906 - DNA, 25 bp, Saccharomyces pastorianus
aaggacgcagcacagttttggacta

SEQ ID NO: 146907 - DNA, 25 bp, Saccharomyces pastorianus
caaaggcggtattggcgcggtcttc

SEQ ID NO: 146908 - DNA, 25 bp, Saccharomyces pastorianus
acggtatggattttgctgacgcgat

SEQ ID NO: 146909 - DNA, 25 bp, Saccharomyces pastorianus
ttgttctcctgggttgcagtggaca

SEQ ID NO: 146910 - DNA, 25 bp, Saccharomyces pastorianus
gagagtctgatcctaatgctgttga

SEQ ID NO: 146911 - DNA, 25 bp, Saccharomyces pastorianus
agaatacgggtgctacttcatctcc

SEQ ID NO: 146912 - DNA, 25 bp, Saccharomyces pastorianus
aatacttcgcatatttgagcgcttt

SEQ ID NO: 146913 - DNA, 25 bp, Saccharomyces pastorianus
gattattcttctcaaactttcgctg

SEQ ID NO: 146914 - DNA, 25 bp, Saccharomyces pastorianus
gaaatttttggcctctttcgataat

SEQ ID NO: 146915 - DNA, 25 bp, Saccharomyces pastorianus
actcccgtgtctatggtcacagatt

SEQ ID NO: 146916 - DNA, 25 bp, Saccharomyces pastorianus
ggtcttcgccgaactaaatcagggt

SEQ ID NO: 146917 - DNA, 25 bp, Saccharomyces pastorianus
gagcgtgaaaaatccacctcttatg

SEQ ID NO: 146918 - DNA, 25 bp, Saccharomyces pastorianus
ggcattcatcatccacaggtaatac

SEQ ID NO: 146919 - DNA, 25 bp, Saccharomyces pastorianus
tctcgtaaaaatagccctcctgcca

SEQ ID NO: 146920 - DNA, 25 bp, Saccharomyces pastorianus
gtacaaataaaacagcagctccagt

SEQ ID NO: 146921 - DNA, 25 bp, Saccharomyces pastorianus
aaggcggaaggcaggctctcgtaaa

SEQ ID NO: 146922 - DNA, 25 bp, Saccharomyces pastorianus
tgaaccattagcaaagagaaccagg

SEQ ID NO: 146923 - DNA, 25 bp, Saccharomyces pastorianus
ggagccaaaaataacccacaatgaa

SEQ ID NO: 146924 - DNA, 25 bp, Saccharomyces pastorianus
aataccaatggctctgaaagcgaag

SEQ ID NO: 146925 - DNA, 25 bp, Saccharomyces pastorianus
aactgggatacgagtctgaacgtga

SEQ ID NO: 146926 - DNA, 25 bp, Saccharomyces pastorianus
agagaaccaggcattcatcatccac

SEQ ID NO: 146927 - DNA, 25 bp, Saccharomyces pastorianus
agcagctccagtaagaaaatctcaa

SEQ ID NO: 146928 - DNA, 25 bp, Saccharomyces pastorianus
tgggcatctgaattcaaaccgggcg

SEQ ID NO: 146929 - DNA, 25 bp, Saccharomyces pastorianus
gcatctgaattcaaaccgggcggaa

SEQ ID NO: 146930 - DNA, 25 bp, Saccharomyces pastorianus
ttggacaattgtggatgaaatacga

SEQ ID NO: 146931 - DNA, 25 bp, Saccharomyces pastorianus
aatacgacttcttagatgggcatct

SEQ ID NO: 146932 - DNA, 25 bp, Saccharomyces pastorianus
atctgaattcaaaccgggcggaatc

SEQ ID NO: 146933 - DNA, 25 bp, Saccharomyces pastorianus
gggcatctgaattcaaaccgggcgg

SEQ ID NO: 146934 - DNA, 25 bp, Saccharomyces pastorianus
atgggcatctgaattcaaaccgggc

SEQ ID NO: 146935 - DNA, 25 bp, Saccharomyces pastorianus
ggcatctgaattcaaaccgggcgga

SEQ ID NO: 146936 - DNA, 25 bp, Saccharomyces pastorianus
tctgaattcaaaccgggcggaatca

SEQ ID NO: 146937 - DNA, 25 bp, Saccharomyces pastorianus
gatgggcatctgaattcaaaccggg

SEQ ID NO: 146938 - DNA, 25 bp, Saccharomyces pastorianus
ggtagtacattggacaattgtggat

SEQ ID NO: 146939 - DNA, 25 bp, Saccharomyces pastorianus
gccttcgtagttggtcggatgatta

SEQ ID NO: 146940 - DNA, 25 bp, Saccharomyces pastorianus
aaagtagcgcaattctcctggcaag

SEQ ID NO: 146941 - DNA, 25 bp, Saccharomyces pastorianus
atttaaccatgcaaccattcccaat

SEQ ID NO: 146942 - DNA, 25 bp, Saccharomyces pastorianus
atgacatcactacctttctggatat

SEQ ID NO: 146943 - DNA, 25 bp, Saccharomyces pastorianus
gaatttacggacctcaaaccatctg

SEQ ID NO: 146944 - DNA, 25 bp, Saccharomyces pastorianus
tttggatgggactcggcttgacact

SEQ ID NO: 146945 - DNA, 25 bp, Saccharomyces pastorianus
gaatcccaatcgaccaaatctgcaa

SEQ ID NO: 146946 - DNA, 25 bp, Saccharomyces pastorianus
tatcgattggtttttcggttgcctt

SEQ ID NO: 146947 - DNA, 25 bp, Saccharomyces pastorianus
gcttgacacttgctatccatggaat

SEQ ID NO: 146948 - DNA, 25 bp, Saccharomyces pastorianus
gaaaccgttcatctaatgtatgcat

SEQ ID NO: 146949 - DNA, 25 bp, Saccharomyces pastorianus
tcccatttttaatcccaactatcca

SEQ ID NO: 146950 - DNA, 25 bp, Saccharomyces pastorianus
ggtttacctttatgaaaagctggag

SEQ ID NO: 146951 - DNA, 25 bp, Saccharomyces pastorianus
ggaccttggatatggacactgtaat

SEQ ID NO: 146952 - DNA, 25 bp, Saccharomyces pastorianus
ctgtaatagttccagccaagatctg

SEQ ID NO: 146953 - DNA, 25 bp, Saccharomyces pastorianus
gttgagcgatgcttgtggtcaagaa

SEQ ID NO: 146954 - DNA, 25 bp, Saccharomyces pastorianus
ggacactgtaatagttccagccaag

SEQ ID NO: 146955 - DNA, 25 bp, Saccharomyces pastorianus
agaaattgcactccgggccttgctt

SEQ ID NO: 146956 - DNA, 25 bp, Saccharomyces pastorianus
tatggaggaccttggatatggacac

SEQ ID NO: 146957 - DNA, 25 bp, Saccharomyces pastorianus
caacactatgaaatatctatggagg

SEQ ID NO: 146958 - DNA, 25 bp, Saccharomyces pastorianus
ggtcaagaaattgcactccgggcct

SEQ ID NO: 146959 - DNA, 25 bp, Saccharomyces pastorianus
ctggagttaactgataattgggtaa

SEQ ID NO: 146960 - DNA, 25 bp, Saccharomyces pastorianus
gccttgcttcaattttacaattttc

SEQ ID NO: 146961 - DNA, 25 bp, Saccharomyces pastorianus
ctctccatcggcattctatttaaac

SEQ ID NO: 146962 - DNA, 25 bp, Saccharomyces pastorianus
taaacgctattatcggctcttcaac

SEQ ID NO: 146963 - DNA, 25 bp, Saccharomyces pastorianus
tgccttcgtttgcatatctgttaag

SEQ ID NO: 146964 - DNA, 25 bp, Saccharomyces pastorianus
gaaggagtgttctctctctaacgag

SEQ ID NO: 146965 - DNA, 25 bp, Saccharomyces pastorianus
caaaggttaaaggagctgcccctct

SEQ ID NO: 146966 - DNA, 25 bp, Saccharomyces pastorianus
gtcgacacggagattatgccttcgt

SEQ ID NO: 146967 - DNA, 25 bp, Saccharomyces pastorianus
aactctcttgtttttgtcttactgc

SEQ ID NO: 146968 - DNA, 25 bp, Saccharomyces pastorianus
gcgatacatcaacacatgcgcatct

SEQ ID NO: 146969 - DNA, 25 bp, Saccharomyces pastorianus
aacacttggcggtagttattcacga

SEQ ID NO: 146970 - DNA, 25 bp, Saccharomyces pastorianus
ggaattgtccctaaagtcagcagcg

SEQ ID NO: 146971 - DNA, 25 bp, Saccharomyces pastorianus
aatatgctgacaccccaattggaga

SEQ ID NO: 146972 - DNA, 25 bp, Saccharomyces pastorianus
gatcacgaagcatctaacggattat

SEQ ID NO: 146973 - DNA, 25 bp, Saccharomyces pastorianus
tcaattccagcaattcaactcgaag

SEQ ID NO: 146974 - DNA, 25 bp, Saccharomyces pastorianus
gtgtacataacacgttcttgacgaa

SEQ ID NO: 146975 - DNA, 25 bp, Saccharomyces pastorianus
gttcttgacgaatattctttctcat

SEQ ID NO: 146976 - DNA, 25 bp, Saccharomyces pastorianus
taagcgttggtgattattctgggca

SEQ ID NO: 146977 - DNA, 25 bp, Saccharomyces pastorianus
agacagactgtatatttttagggca

SEQ ID NO: 146978 - DNA, 25 bp, Saccharomyces pastorianus
gaaatgacccggaaactgcaacgca

SEQ ID NO: 146979 - DNA, 25 bp, Saccharomyces pastorianus
ggcaaccatacccaacttcattggt

SEQ ID NO: 146980 - DNA, 25 bp, Saccharomyces pastorianus
aaagtcttcaagcagtaaacctcaa

SEQ ID NO: 146981 - DNA, 25 bp, Saccharomyces pastorianus
gtaaacctcaaaaacacgcaatcga

SEQ ID NO: 146982 - DNA, 25 bp, Saccharomyces pastorianus
tctttctcataagctttttgcaact

SEQ ID NO: 146983 - DNA, 25 bp, Saccharomyces pastorianus
tatacattattagctacgacatcgg

SEQ ID NO: 146984 - DNA, 25 bp, Saccharomyces pastorianus
gtgcgggctccaagtatatatacag

SEQ ID NO: 146985 - DNA, 25 bp, Saccharomyces pastorianus
tccgtctaagatacccaattttgag

SEQ ID NO: 146986 - DNA, 25 bp, Saccharomyces pastorianus
aacatggaccgattttctgaaagaa

SEQ ID NO: 146987 - DNA, 25 bp, Saccharomyces pastorianus
gtatcttcgcctaatcgttacgttc

SEQ ID NO: 146988 - DNA, 25 bp, Saccharomyces pastorianus
catttgtgaacaatctggtctcttc

SEQ ID NO: 146989 - DNA, 25 bp, Saccharomyces pastorianus
aatattttcaaatcccacggagatc

SEQ ID NO: 146990 - DNA, 25 bp, Saccharomyces pastorianus
cctacagttctgttactttgagaca

SEQ ID NO: 146991 - DNA, 25 bp, Saccharomyces pastorianus
gaaggtccatggtatcttcgcctaa

SEQ ID NO: 146992 - DNA, 25 bp, Saccharomyces pastorianus
gacatcggcactatttccgtttgat

SEQ ID NO: 146993 - DNA, 25 bp, Saccharomyces pastorianus
gagacagttgtcaaatccttattat

SEQ ID NO: 146994 - DNA, 25 bp, Saccharomyces pastorianus
gcagcaccaaaacagccctataatg

SEQ ID NO: 146995 - DNA, 25 bp, Saccharomyces pastorianus
gacggatattccttggcatctgata

SEQ ID NO: 146996 - DNA, 25 bp, Saccharomyces pastorianus
ctacttaaagcccaagcctcttaat

SEQ ID NO: 146997 - DNA, 25 bp, Saccharomyces pastorianus
gcgaatgcaagcgaacttttgggaa

SEQ ID NO: 146998 - DNA, 25 bp, Saccharomyces pastorianus
ataaatgagcccaacttcgacgtcc

SEQ ID NO: 146999 - DNA, 25 bp, Saccharomyces pastorianus
tcgcactgagggtggaccgtcaagt

SEQ ID NO: 147000 - DNA, 25 bp, Saccharomyces pastorianus
ggaattctgtgtcaaaacctcaaaa

SEQ ID NO: 147001 - DNA, 25 bp, Saccharomyces pastorianus
taatgttgactcatactcgcagaaa

SEQ ID NO: 147002 - DNA, 25 bp, Saccharomyces pastorianus
aacagcagcgccttcaataataatg

SEQ ID NO: 147003 - DNA, 25 bp, Saccharomyces pastorianus
ttcgacgtccgttcgaatggaactt

SEQ ID NO: 147004 - DNA, 25 bp, Saccharomyces pastorianus
gagaattcctcaaacaaactactaa

SEQ ID NO: 147005 - DNA, 25 bp, Saccharomyces pastorianus
ggaccagcagtatctcaaccgtttt

SEQ ID NO: 147006 - DNA, 25 bp, Saccharomyces pastorianus
tcccctgggcagttgttagatatac

SEQ ID NO: 147007 - DNA, 25 bp, Saccharomyces pastorianus
caacaaccttcaatatttccatctc

SEQ ID NO: 147008 - DNA, 25 bp, Saccharomyces pastorianus
taattttaatgctcctccgaatccg

SEQ ID NO: 147009 - DNA, 25 bp, Saccharomyces pastorianus
taatgcggtctccaacggacaggta

SEQ ID NO: 147010 - DNA, 25 bp, Saccharomyces pastorianus
atgttataccacctactatgccaat

SEQ ID NO: 147011 - DNA, 25 bp, Saccharomyces pastorianus
gagggactctggttacagcagctcc

SEQ ID NO: 147012 - DNA, 25 bp, Saccharomyces pastorianus
gaatccgatggcttttggtgttcca

SEQ ID NO: 147013 - DNA, 25 bp, Saccharomyces pastorianus
atctctttctgaaccgtttgctaac

SEQ ID NO: 147014 - DNA, 25 bp, Saccharomyces pastorianus
atgcataacctttctggaccagcag

SEQ ID NO: 147015 - DNA, 25 bp, Saccharomyces pastorianus
tcagcagtcatcgttttcttctcaa

SEQ ID NO: 147016 - DNA, 25 bp, Saccharomyces pastorianus
gaaagcgtgacgagttcaattctaa

SEQ ID NO: 147017 - DNA, 25 bp, Saccharomyces pastorianus
ggatggctgcaaccatgataagact

SEQ ID NO: 147018 - DNA, 25 bp, Saccharomyces pastorianus
gataagacttggttaccttcggaga

SEQ ID NO: 147019 - DNA, 25 bp, Saccharomyces pastorianus
atcaagggcgtttcttgcgttccaa

SEQ ID NO: 147020 - DNA, 25 bp, Saccharomyces pastorianus
attcaaagattactacctccaggcc

SEQ ID NO: 147021 - DNA, 25 bp, Saccharomyces pastorianus
gacaagcatcgttagctctaaggaa

SEQ ID NO: 147022 - DNA, 25 bp, Saccharomyces pastorianus
ggagattacagacttcatggttact

SEQ ID NO: 147023 - DNA, 25 bp, Saccharomyces pastorianus
tacctccaggccgtggtgatggcga

SEQ ID NO: 147024 - DNA, 25 bp, Saccharomyces pastorianus
acgatggcgacgatggcaatggtaa

SEQ ID NO: 147025 - DNA, 25 bp, Saccharomyces pastorianus
tatggtctgggcaaacaacaaactc

SEQ ID NO: 147026 - DNA, 25 bp, Saccharomyces pastorianus
atggttactagctcatcatgggtct

SEQ ID NO: 147027 - DNA, 25 bp, Saccharomyces pastorianus
atctctattgcgatggttgcggaat

SEQ ID NO: 147028 - DNA, 25 bp, Saccharomyces pastorianus
aatgggtatccattgggttcaggaa

SEQ ID NO: 147029 - DNA, 25 bp, Saccharomyces pastorianus
tgagccattggaggaacgcagaatt

SEQ ID NO: 147030 - DNA, 25 bp, Saccharomyces pastorianus
tttctgccacctggattgaggaact

SEQ ID NO: 147031 - DNA, 25 bp, Saccharomyces pastorianus
attcaccctgaatacacttttaacg

SEQ ID NO: 147032 - DNA, 25 bp, Saccharomyces pastorianus
gcgttccattacgtagatgccgcta

SEQ ID NO: 147033 - DNA, 25 bp, Saccharomyces pastorianus
aatattcttcgctttattcaccctg

SEQ ID NO: 147034 - DNA, 25 bp, Saccharomyces pastorianus
atgatactggttacctttctgccac

SEQ ID NO: 147035 - DNA, 25 bp, Saccharomyces pastorianus
aagccaatatggctctgggtcgcca

SEQ ID NO: 147036 - DNA, 25 bp, Saccharomyces pastorianus
gatgccgctaaaacctatcagttgc

SEQ ID NO: 147037 - DNA, 25 bp, Saccharomyces pastorianus
gctcgcagctggtccaaaacaaaca

SEQ ID NO: 147038 - DNA, 25 bp, Saccharomyces pastorianus
gtttaggtgctaaattaatctctat

SEQ ID NO: 147039 - DNA, 25 bp, Saccharomyces pastorianus
actggcactgctatatctttcttca

SEQ ID NO: 147040 - DNA, 25 bp, Saccharomyces pastorianus
ttatggtggcggtcacccaagatac

SEQ ID NO: 147041 - DNA, 25 bp, Saccharomyces pastorianus
gagatcttatggtggcggtcaccca

SEQ ID NO: 147042 - DNA, 25 bp, Saccharomyces pastorianus
gcaggtgctactggcactgctatat

SEQ ID NO: 147043 - DNA, 25 bp, Saccharomyces pastorianus
gctatatctttcttcaccgaacaaa

SEQ ID NO: 147044 - DNA, 25 bp, Saccharomyces pastorianus
tggctatggccgtagaggtggttac

SEQ ID NO: 147045 - DNA, 25 bp, Saccharomyces pastorianus
gctaatcaaaatattcctcccgaat

SEQ ID NO: 147046 - DNA, 25 bp, Saccharomyces pastorianus
aatattcctcccgaattattgaaat

SEQ ID NO: 147047 - DNA, 25 bp, Saccharomyces pastorianus
atacgacaggagatcttatggtggc

SEQ ID NO: 147048 - DNA, 25 bp, Saccharomyces pastorianus
cactgctatatctttcttcaccgaa

SEQ ID NO: 147049 - DNA, 25 bp, Saccharomyces pastorianus
gaaacagcctctcaagacaacgaat

SEQ ID NO: 147050 - DNA, 25 bp, Saccharomyces pastorianus
ccgccttggctattcatggtgacaa

SEQ ID NO: 147051 - DNA, 25 bp, Saccharomyces pastorianus
gctactccaggtcgactaattgata

SEQ ID NO: 147052 - DNA, 25 bp, Saccharomyces pastorianus
gacattaatctttgcttctacgaaa

SEQ ID NO: 147053 - DNA, 25 bp, Saccharomyces pastorianus
aagagaagatggatggcccgccttg

SEQ ID NO: 147054 - DNA, 25 bp, Saccharomyces pastorianus
gaactatctgcctcccataatatta

SEQ ID NO: 147055 - DNA, 25 bp, Saccharomyces pastorianus
acaaaccttgatgtggtctgccact

SEQ ID NO: 147056 - DNA, 25 bp, Saccharomyces pastorianus
aactagccgctgattacttgaatga

SEQ ID NO: 147057 - DNA, 25 bp, Saccharomyces pastorianus
gagagtcacttacctggttcttgat

SEQ ID NO: 147058 - DNA, 25 bp, Saccharomyces pastorianus
gagatttatctcgtggctctgaaat

SEQ ID NO: 147059 - DNA, 25 bp, Saccharomyces pastorianus
gaaattgttattgctactccaggtc

SEQ ID NO: 147060 - DNA, 25 bp, Saccharomyces pastorianus
ggtgtgtccactacagaagatcctg

SEQ ID NO: 147061 - DNA, 25 bp, Saccharomyces pastorianus
ggacgaaatctctacatctaccaaa

SEQ ID NO: 147062 - DNA, 25 bp, Saccharomyces pastorianus
aataagctcaatgtgcttcctccgc

SEQ ID NO: 147063 - DNA, 25 bp, Saccharomyces pastorianus
aacctgagaagccaccagttgtcaa

SEQ ID NO: 147064 - DNA, 25 bp, Saccharomyces pastorianus
tgctgctaacaagcttaacacctct

SEQ ID NO: 147065 - DNA, 25 bp, Saccharomyces pastorianus
gaaaattgttcctcgaccttgtcct

SEQ ID NO: 147066 - DNA, 25 bp, Saccharomyces pastorianus
tttcccctaccaaagagatttccat

SEQ ID NO: 147067 - DNA, 25 bp, Saccharomyces pastorianus
agatttccattgtcagcgtatcgcc

SEQ ID NO: 147068 - DNA, 25 bp, Saccharomyces pastorianus
agtgcccgctttatctttatctaag

SEQ ID NO: 147069 - DNA, 25 bp, Saccharomyces pastorianus
gtttccccgtcgaattcaaaatctg

SEQ ID NO: 147070 - DNA, 25 bp, Saccharomyces pastorianus
gagcaatcttcctgccttagagaga

SEQ ID NO: 147071 - DNA, 25 bp, Saccharomyces pastorianus
aaggcgagaactccgtcttggactg

SEQ ID NO: 147072 - DNA, 25 bp, Saccharomyces pastorianus
cctataaacatgattatggcacaga

SEQ ID NO: 147073 - DNA, 25 bp, Saccharomyces pastorianus
gtccgacctataaacatgattatgg

SEQ ID NO: 147074 - DNA, 25 bp, Saccharomyces pastorianus
tccgtccgacctataaacatgatta

SEQ ID NO: 147075 - DNA, 25 bp, Saccharomyces pastorianus
ttctgaaaaggcgagaactccgtct

SEQ ID NO: 147076 - DNA, 25 bp, Saccharomyces pastorianus
aaaggcgagaactccgtcttggact

SEQ ID NO: 147077 - DNA, 25 bp, Saccharomyces pastorianus
gagaactccgtcttggactgataga

SEQ ID NO: 147078 - DNA, 25 bp, Saccharomyces pastorianus
atggcacagataattatgatacttc

SEQ ID NO: 147079 - DNA, 25 bp, Saccharomyces pastorianus
gcgagaactccgtcttggactgata

SEQ ID NO: 147080 - DNA, 25 bp, Saccharomyces pastorianus
attccgtccgacctataaacatgat

SEQ ID NO: 147081 - DNA, 25 bp, Saccharomyces pastorianus
gaaaaggcgagaactccgtcttgga

SEQ ID NO: 147082 - DNA, 25 bp, Saccharomyces pastorianus
acgttaatacgcatttatcagcagg

SEQ ID NO: 147083 - DNA, 25 bp, Saccharomyces pastorianus
ggaaaaattcaccactcattctaac

SEQ ID NO: 147084 - DNA, 25 bp, Saccharomyces pastorianus
attcaaacctgatgtcgttgtgtta

SEQ ID NO: 147085 - DNA, 25 bp, Saccharomyces pastorianus
gaccgcagggtctatcttgaatgca

SEQ ID NO: 147086 - DNA, 25 bp, Saccharomyces pastorianus
actaccgcaccagcaagttgttgaa

SEQ ID NO: 147087 - DNA, 25 bp, Saccharomyces pastorianus
gggcaacttcatactgttacgttaa

SEQ ID NO: 147088 - DNA, 25 bp, Saccharomyces pastorianus
ataaaggtgccgtagccattagata

SEQ ID NO: 147089 - DNA, 25 bp, Saccharomyces pastorianus
gaactttatgatccaatctgcgaat

SEQ ID NO: 147090 - DNA, 25 bp, Saccharomyces pastorianus
tgacacacttttgggcaaactaccg

SEQ ID NO: 147091 - DNA, 25 bp, Saccharomyces pastorianus
gaacagatgtcctctcttttgatac

SEQ ID NO: 147092 - DNA, 25 bp, Saccharomyces pastorianus
aagttatagagttgaccgcagggtc

SEQ ID NO: 147093 - DNA, 25 bp, Saccharomyces pastorianus
gcattgtgagcaactttttactcct

SEQ ID NO: 147094 - DNA, 25 bp, Saccharomyces pastorianus
gcacacatttccttatattacgcag

SEQ ID NO: 147095 - DNA, 25 bp, Saccharomyces pastorianus
cgattgtggacgtcgctacgttgat

SEQ ID NO: 147096 - DNA, 25 bp, Saccharomyces pastorianus
atatctacccgatgatctcgactac

SEQ ID NO: 147097 - DNA, 25 bp, Saccharomyces pastorianus
aattaagttgcccatcatgcgataa

SEQ ID NO: 147098 - DNA, 25 bp, Saccharomyces pastorianus
cggccggagcgttgttcaaaaatat

SEQ ID NO: 147099 - DNA, 25 bp, Saccharomyces pastorianus
ttgaatgacggctgcacgggtgtca

SEQ ID NO: 147100 - DNA, 25 bp, Saccharomyces pastorianus
actcctcttcaattaactagccaaa

SEQ ID NO: 147101 - DNA, 25 bp, Saccharomyces pastorianus
gacaagtctccgtttttggtaagcg

SEQ ID NO: 147102 - DNA, 25 bp, Saccharomyces pastorianus
gactaccccaaggaacagctgacag

SEQ ID NO: 147103 - DNA, 25 bp, Saccharomyces pastorianus
atcttcaaattactatcgcgtgtca

SEQ ID NO: 147104 - DNA, 25 bp, Saccharomyces pastorianus
gtaagtcttcgcagagcaacaccga

SEQ ID NO: 147105 - DNA, 25 bp, Saccharomyces pastorianus
cggaacgcccatcggtcttacagga

SEQ ID NO: 147106 - DNA, 25 bp, Saccharomyces pastorianus
gtcttcgcagagcaacaccgatgtt

SEQ ID NO: 147107 - DNA, 25 bp, Saccharomyces pastorianus
catcggtcttacaggactaactcca

SEQ ID NO: 147108 - DNA, 25 bp, Saccharomyces pastorianus
gactcaagaagtaacccttcaactt

SEQ ID NO: 147109 - DNA, 25 bp, Saccharomyces pastorianus
gaagtgtgacaacaactagacgcgt

SEQ ID NO: 147110 - DNA, 25 bp, Saccharomyces pastorianus
agacgcgtgaatatagactcaagaa

SEQ ID NO: 147111 - DNA, 25 bp, Saccharomyces pastorianus
ttcaacttcaccgtttgtcacagca

SEQ ID NO: 147112 - DNA, 25 bp, Saccharomyces pastorianus
actaactccaagtaagtcttcgcag

SEQ ID NO: 147113 - DNA, 25 bp, Saccharomyces pastorianus
accgtttgtcacagcacccggaacg

SEQ ID NO: 147114 - DNA, 25 bp, Saccharomyces pastorianus
gtgacaacaactagacgcgtgaata

SEQ ID NO: 147115 - DNA, 25 bp, Saccharomyces pastorianus
ctgaaattgtcggtaaaagagttag

SEQ ID NO: 147116 - DNA, 25 bp, Saccharomyces pastorianus
atgttcaacaaatcgactacaagtt

SEQ ID NO: 147117 - DNA, 25 bp, Saccharomyces pastorianus
ccaactgaaattgtcggtaaaagag

SEQ ID NO: 147118 - DNA, 25 bp, Saccharomyces pastorianus
aaggttttgttagactccaaggatg

SEQ ID NO: 147119 - DNA, 25 bp, Saccharomyces pastorianus
ggatgttcaacaaatcgactacaag

SEQ ID NO: 147120 - DNA, 25 bp, Saccharomyces pastorianus
tcccaactgaaattgtcggtaaaag

SEQ ID NO: 147121 - DNA, 25 bp, Saccharomyces pastorianus
gatgttcaacaaatcgactacaagt

SEQ ID NO: 147122 - DNA, 25 bp, Saccharomyces pastorianus
tgttcaacaaatcgactacaagttg

SEQ ID NO: 147123 - DNA, 25 bp, Saccharomyces pastorianus
ggttttgttagactccaaggatgtt

SEQ ID NO: 147124 - DNA, 25 bp, Saccharomyces pastorianus
gctgtctacaacaagttgactggca

SEQ ID NO: 147125 - DNA, 25 bp, Saccharomyces pastorianus
tttgttagactccaaggatgttcaa

SEQ ID NO: 147126 - DNA, 25 bp, Saccharomyces pastorianus
gctcctctccagaactaaaggctga

SEQ ID NO: 147127 - DNA, 25 bp, Saccharomyces pastorianus
ttcatcgatctagaaagctcctctc

SEQ ID NO: 147128 - DNA, 25 bp, Saccharomyces pastorianus
gtccaatccaagatcttatcccaag

SEQ ID NO: 147129 - DNA, 25 bp, Saccharomyces pastorianus
caatccaagatcttatcccaagctc

SEQ ID NO: 147130 - DNA, 25 bp, Saccharomyces pastorianus
atcgatctagaaagctcctctccag

SEQ ID NO: 147131 - DNA, 25 bp, Saccharomyces pastorianus
ccaagatcttatcccaagctccaag

SEQ ID NO: 147132 - DNA, 25 bp, Saccharomyces pastorianus
tccagaactaaaggctgacttgaga

SEQ ID NO: 147133 - DNA, 25 bp, Saccharomyces pastorianus
gccaagaccttcatcgatctagaaa

SEQ ID NO: 147134 - DNA, 25 bp, Saccharomyces pastorianus
agaaagctcctctccagaactaaag

SEQ ID NO: 147135 - DNA, 25 bp, Saccharomyces pastorianus
tctgtccaatccaagatcttatccc

SEQ ID NO: 147136 - DNA, 25 bp, Saccharomyces pastorianus
gatctagaaagctcctctccagaac

SEQ ID NO: 147137 - DNA, 25 bp, Saccharomyces pastorianus
tgcaatacccgctaatggttgttag

SEQ ID NO: 147138 - DNA, 25 bp, Saccharomyces pastorianus
ctaccatatatatttaccgcagttt

SEQ ID NO: 147139 - DNA, 25 bp, Saccharomyces pastorianus
ggttgttagcttgccatttttagtg

SEQ ID NO: 147140 - DNA, 25 bp, Saccharomyces pastorianus
taccgcagttttacgccgccagaaa

SEQ ID NO: 147141 - DNA, 25 bp, Saccharomyces pastorianus
atggagtgtgtttcatttttcttaa

SEQ ID NO: 147142 - DNA, 25 bp, Saccharomyces pastorianus
tatatttaccgcagttttacgccgc

SEQ ID NO: 147143 - DNA, 25 bp, Saccharomyces pastorianus
tatttaccgcagttttacgccgcca

SEQ ID NO: 147144 - DNA, 25 bp, Saccharomyces pastorianus
aatgctgcaatacccgctaatggtt

SEQ ID NO: 147145 - DNA, 25 bp, Saccharomyces pastorianus
cttaatgctgcaatacccgctaatg

SEQ ID NO: 147146 - DNA, 25 bp, Saccharomyces pastorianus
acccgctaatggttgttagcttgcc

SEQ ID NO: 147147 - DNA, 25 bp, Saccharomyces pastorianus
gtgtttcatttttcttaatgctgca

SEQ ID NO: 147148 - DNA, 25 bp, Saccharomyces pastorianus
gatttgcgagacaaactcccgctgg

SEQ ID NO: 147149 - DNA, 25 bp, Saccharomyces pastorianus
atcgaacttctatctgggacagcag

SEQ ID NO: 147150 - DNA, 25 bp, Saccharomyces pastorianus
aataaatccgagctttccggtcgca

SEQ ID NO: 147151 - DNA, 25 bp, Saccharomyces pastorianus
tacttatttagctatttccccacaa

SEQ ID NO: 147152 - DNA, 25 bp, Saccharomyces pastorianus
tacaccatttacgtcaaggcctcat

SEQ ID NO: 147153 - DNA, 25 bp, Saccharomyces pastorianus
tagccctgcgttcatggcatcaaat

SEQ ID NO: 147154 - DNA, 25 bp, Saccharomyces pastorianus
ggacttaacttggattactcgacgt

SEQ ID NO: 147155 - DNA, 25 bp, Saccharomyces pastorianus
aatggatccattacccacgttcgat

SEQ ID NO: 147156 - DNA, 25 bp, Saccharomyces pastorianus
atgctgctcgcacctacattaggaa

SEQ ID NO: 147157 - DNA, 25 bp, Saccharomyces pastorianus
gattgaacgatccaactgctacacc

SEQ ID NO: 147158 - DNA, 25 bp, Saccharomyces pastorianus
agcagcaccactccgatgatgaata

SEQ ID NO: 147159 - DNA, 25 bp, Saccharomyces pastorianus
ttctcactgggaatcattatcgcca

SEQ ID NO: 147160 - DNA, 25 bp, Saccharomyces pastorianus
ggacgatcatagttgtagttgctct

SEQ ID NO: 147161 - DNA, 25 bp, Saccharomyces pastorianus
acggcggataatacctcattacttg

SEQ ID NO: 147162 - DNA, 25 bp, Saccharomyces pastorianus
gaacgtacggcgaatttgactcata

SEQ ID NO: 147163 - DNA, 25 bp, Saccharomyces pastorianus
tggacgccgccatttagcaatggat

SEQ ID NO: 147164 - DNA, 25 bp, Saccharomyces pastorianus
attctgcttcttccttagcttttac

SEQ ID NO: 147165 - DNA, 25 bp, Saccharomyces pastorianus
aagaccctgaaaccaatcctatcaa

SEQ ID NO: 147166 - DNA, 25 bp, Saccharomyces pastorianus
agcttttactctagattctcactgg

SEQ ID NO: 147167 - DNA, 25 bp, Saccharomyces pastorianus
ctttcgtcaagtacagttggctctt

SEQ ID NO: 147168 - DNA, 25 bp, Saccharomyces pastorianus
atacaatacactttatgccatggat

SEQ ID NO: 147169 - DNA, 25 bp, Saccharomyces pastorianus
tagttgctctgtttgtggacgccgc

SEQ ID NO: 147170 - DNA, 25 bp, Saccharomyces pastorianus
aatggcccttgcaacttgtttcgca

SEQ ID NO: 147171 - DNA, 25 bp, Saccharomyces pastorianus
ccatttcgtccttgcgttaattagt

SEQ ID NO: 147172 - DNA, 25 bp, Saccharomyces pastorianus
gacaatatcgtaatgcctcatccgc

SEQ ID NO: 147173 - DNA, 25 bp, Saccharomyces pastorianus
accagtcagtgcactacattccatg

SEQ ID NO: 147174 - DNA, 25 bp, Saccharomyces pastorianus
aaactggttcttgtagctacttcaa

SEQ ID NO: 147175 - DNA, 25 bp, Saccharomyces pastorianus
gtaaacgttcatattcctcttgtcc

SEQ ID NO: 147176 - DNA, 25 bp, Saccharomyces pastorianus
catttcatcggtagcattctcttta

SEQ ID NO: 147177 - DNA, 25 bp, Saccharomyces pastorianus
cctggttccttcttcataagcaaac

SEQ ID NO: 147178 - DNA, 25 bp, Saccharomyces pastorianus
gcttcttgcctcaaatcttttttca

SEQ ID NO: 147179 - DNA, 25 bp, Saccharomyces pastorianus
aacttgtttcgcatcttcaatggga

SEQ ID NO: 147180 - DNA, 25 bp, Saccharomyces pastorianus
attccatgtatttcttggccccaat

SEQ ID NO: 147181 - DNA, 25 bp, Saccharomyces pastorianus
aagagaatgctccttcttccacgag

SEQ ID NO: 147182 - DNA, 25 bp, Saccharomyces pastorianus
aaaatgggttcaacttccgctacat

SEQ ID NO: 147183 - DNA, 25 bp, Saccharomyces pastorianus
gaacaggacgatgtagccactaaaa

SEQ ID NO: 147184 - DNA, 25 bp, Saccharomyces pastorianus
gctgcgtcggttcctaagaaatctt

SEQ ID NO: 147185 - DNA, 25 bp, Saccharomyces pastorianus
gagaaaacgccttctgtttcagaaa

SEQ ID NO: 147186 - DNA, 25 bp, Saccharomyces pastorianus
ttccacgagttcttcttctattttc

SEQ ID NO: 147187 - DNA, 25 bp, Saccharomyces pastorianus
ggaactatctggtgaaagcgaccta

SEQ ID NO: 147188 - DNA, 25 bp, Saccharomyces pastorianus
gaagatgatgctataccacaacgat

SEQ ID NO: 147189 - DNA, 25 bp, Saccharomyces pastorianus
gtaaccaaaagcaaggcgcctacaa

SEQ ID NO: 147190 - DNA, 25 bp, Saccharomyces pastorianus
aagatcgtcgagagctgcgtcggtt

SEQ ID NO: 147191 - DNA, 25 bp, Saccharomyces pastorianus
acagctgtgaaacctaaattggcca

SEQ ID NO: 147192 - DNA, 25 bp, Saccharomyces pastorianus
tcaccctgctgatgatccattatac

SEQ ID NO: 147193 - DNA, 25 bp, Saccharomyces pastorianus
taacggtgctttcggtaccagagcc

SEQ ID NO: 147194 - DNA, 25 bp, Saccharomyces pastorianus
gtggtatttaccaattcttcctatg

SEQ ID NO: 147195 - DNA, 25 bp, Saccharomyces pastorianus
tattggcactggctggagtacttac

SEQ ID NO: 147196 - DNA, 25 bp, Saccharomyces pastorianus
actcgtaagatatttcaccctgctg

SEQ ID NO: 147197 - DNA, 25 bp, Saccharomyces pastorianus
gtagctcaacttgcaccatacgtga

SEQ ID NO: 147198 - DNA, 25 bp, Saccharomyces pastorianus
gcagcggcagcgagatatatctaca

SEQ ID NO: 147199 - DNA, 25 bp, Saccharomyces pastorianus
tatacggtcgattcccaatgtttta

SEQ ID NO: 147200 - DNA, 25 bp, Saccharomyces pastorianus
ggagtacttacattcctccattcaa

SEQ ID NO: 147201 - DNA, 25 bp, Saccharomyces pastorianus
tttacttgctattacctaacggtgc

SEQ ID NO: 147202 - DNA, 25 bp, Saccharomyces pastorianus
gaatgtacggcatatcaccatggtg

SEQ ID NO: 147203 - DNA, 25 bp, Saccharomyces pastorianus
aaagaccctgaacctaccacaagat

SEQ ID NO: 147204 - DNA, 25 bp, Saccharomyces pastorianus
cctggttgtacttccaatgggtgca

SEQ ID NO: 147205 - DNA, 25 bp, Saccharomyces pastorianus
tgtacttccaatgggtgcattcagt

SEQ ID NO: 147206 - DNA, 25 bp, Saccharomyces pastorianus
gagcttctgttgtttatccaatcaa

SEQ ID NO: 147207 - DNA, 25 bp, Saccharomyces pastorianus
cctaccacaagatcaggtcactcta

SEQ ID NO: 147208 - DNA, 25 bp, Saccharomyces pastorianus
ggtcactctaagcaacctggttgta

SEQ ID NO: 147209 - DNA, 25 bp, Saccharomyces pastorianus
agcaacctggttgtacttccaatgg

SEQ ID NO: 147210 - DNA, 25 bp, Saccharomyces pastorianus
gttgtttatccaatcaatcttttaa

SEQ ID NO: 147211 - DNA, 25 bp, Saccharomyces pastorianus
caatgggtgcattcagtggaactgt

SEQ ID NO: 147212 - DNA, 25 bp, Saccharomyces pastorianus
actgtaggagcttctgttgtttatc

SEQ ID NO: 147213 - DNA, 25 bp, Saccharomyces pastorianus
tcagtggaactgtaggagcttctgt

SEQ ID NO: 147214 - DNA, 25 bp, Saccharomyces pastorianus
tgaccaaattagaaggctgccgcga

SEQ ID NO: 147215 - DNA, 25 bp, Saccharomyces pastorianus
ggaataatttgctttttcagactgc

SEQ ID NO: 147216 - DNA, 25 bp, Saccharomyces pastorianus
gagggtgggctcagattattttaca

SEQ ID NO: 147217 - DNA, 25 bp, Saccharomyces pastorianus
aaagttctctacttacattgctggt

SEQ ID NO: 147218 - DNA, 25 bp, Saccharomyces pastorianus
gtttggttctttcgaggtcaccaag

SEQ ID NO: 147219 - DNA, 25 bp, Saccharomyces pastorianus
tatggcagctcagttttccgtttat

SEQ ID NO: 147220 - DNA, 25 bp, Saccharomyces pastorianus
ggtatagtgggcatatttccctatg

SEQ ID NO: 147221 - DNA, 25 bp, Saccharomyces pastorianus
tttacagaggtgtcacagtcggtat

SEQ ID NO: 147222 - DNA, 25 bp, Saccharomyces pastorianus
gcagtgcgctcctttggacacaaag

SEQ ID NO: 147223 - DNA, 25 bp, Saccharomyces pastorianus
ttgaaattcagggtgcagtgcgctc

SEQ ID NO: 147224 - DNA, 25 bp, Saccharomyces pastorianus
tatcatctccattagcaaaggctgt

SEQ ID NO: 147225 - DNA, 25 bp, Saccharomyces pastorianus
atttcgaaacactgcaggccgtgac

SEQ ID NO: 147226 - DNA, 25 bp, Saccharomyces pastorianus
aggccgtgacagtttttaaatcgca

SEQ ID NO: 147227 - DNA, 25 bp, Saccharomyces pastorianus
tgtccccatggacgtccaacaatga

SEQ ID NO: 147228 - DNA, 25 bp, Saccharomyces pastorianus
gaccagagtcgttcataatctcagt

SEQ ID NO: 147229 - DNA, 25 bp, Saccharomyces pastorianus
agattcgttctatgtttgctatgag

SEQ ID NO: 147230 - DNA, 25 bp, Saccharomyces pastorianus
gctgttaagcttacctacgtccaaa

SEQ ID NO: 147231 - DNA, 25 bp, Saccharomyces pastorianus
gtttggctccagagttaggctgtta

SEQ ID NO: 147232 - DNA, 25 bp, Saccharomyces pastorianus
atcagatgttccaagattcgttcta

SEQ ID NO: 147233 - DNA, 25 bp, Saccharomyces pastorianus
acctcagccggtagaattaagtgtc

SEQ ID NO: 147234 - DNA, 25 bp, Saccharomyces pastorianus
cattgatgaacttgtggtgctggac

SEQ ID NO: 147235 - DNA, 25 bp, Saccharomyces pastorianus
gataagccttggaattgtccccatg

SEQ ID NO: 147236 - DNA, 25 bp, Saccharomyces pastorianus
atatacagcaataggcaagcccatg

SEQ ID NO: 147237 - DNA, 25 bp, Saccharomyces pastorianus
gaattagcaacccagacgcctttat

SEQ ID NO: 147238 - DNA, 25 bp, Saccharomyces pastorianus
gttatcctccgatcatgagttaaga

SEQ ID NO: 147239 - DNA, 25 bp, Saccharomyces pastorianus
cagacgcctttatcgacatcttcgt

SEQ ID NO: 147240 - DNA, 25 bp, Saccharomyces pastorianus
taagttcgtctttgcgttcaagtgc

SEQ ID NO: 147241 - DNA, 25 bp, Saccharomyces pastorianus
gacatcttcgtcatatacagcaata

SEQ ID NO: 147242 - DNA, 25 bp, Saccharomyces pastorianus
atgctagatccttcctttccgttaa

SEQ ID NO: 147243 - DNA, 25 bp, Saccharomyces pastorianus
gtcttcttctaatacgttatcctcc

SEQ ID NO: 147244 - DNA, 25 bp, Saccharomyces pastorianus
acttggcaagtaatcccgaattagc

SEQ ID NO: 147245 - DNA, 25 bp, Saccharomyces pastorianus
aacagatccttcttacgtgtcttct

SEQ ID NO: 147246 - DNA, 25 bp, Saccharomyces pastorianus
gcccatgcctttatcaacagatcct

SEQ ID NO: 147247 - DNA, 25 bp, Saccharomyces pastorianus
aagaaggccttcctctgctgtgagc

SEQ ID NO: 147248 - DNA, 25 bp, Saccharomyces pastorianus
agagtacatcttgaaccccatttgc

SEQ ID NO: 147249 - DNA, 25 bp, Saccharomyces pastorianus
ttagaaaactcggtggctccagctt

SEQ ID NO: 147250 - DNA, 25 bp, Saccharomyces pastorianus
agattctactcttacgtcgatatgt

SEQ ID NO: 147251 - DNA, 25 bp, Saccharomyces pastorianus
tttcgagatctcattcgcattctgc

SEQ ID NO: 147252 - DNA, 25 bp, Saccharomyces pastorianus
gggatgaccaccacaacttcaaatg

SEQ ID NO: 147253 - DNA, 25 bp, Saccharomyces pastorianus
aagcctattcttcatcgtcagcaac

SEQ ID NO: 147254 - DNA, 25 bp, Saccharomyces pastorianus
gaacactgacctgagcgatgtcgat

SEQ ID NO: 147255 - DNA, 25 bp, Saccharomyces pastorianus
agaccacctatgaaatcccaagcgt

SEQ ID NO: 147256 - DNA, 25 bp, Saccharomyces pastorianus
aacatggccctgttggctagaacga

SEQ ID NO: 147257 - DNA, 25 bp, Saccharomyces pastorianus
cagcatcgccagatcttaaactttc

SEQ ID NO: 147258 - DNA, 25 bp, Saccharomyces pastorianus
gagaaaggtcagatccgccgaatat

SEQ ID NO: 147259 - DNA, 25 bp, Saccharomyces pastorianus
acaagagaaaggtcagatccgccga

SEQ ID NO: 147260 - DNA, 25 bp, Saccharomyces pastorianus
gaaaggtcagatccgccgaatatta

SEQ ID NO: 147261 - DNA, 25 bp, Saccharomyces pastorianus
cgaatattacgccaagaagagagct

SEQ ID NO: 147262 - DNA, 25 bp, Saccharomyces pastorianus
gatccgccgaatattacgccaagaa

SEQ ID NO: 147263 - DNA, 25 bp, Saccharomyces pastorianus
gtcagatccgccgaatattacgcca

SEQ ID NO: 147264 - DNA, 25 bp, Saccharomyces pastorianus
ttcaccaagaaggtctcctctgctt

SEQ ID NO: 147265 - DNA, 25 bp, Saccharomyces pastorianus
accaagaaggtctcctctgcttctg

SEQ ID NO: 147266 - DNA, 25 bp, Saccharomyces pastorianus
aagagaaaggtcagatccgccgaat

SEQ ID NO: 147267 - DNA, 25 bp, Saccharomyces pastorianus
cagatccgccgaatattacgccaag

SEQ ID NO: 147268 - DNA, 25 bp, Saccharomyces pastorianus
tccgccgaatattacgccaagaaga

SEQ ID NO: 147269 - DNA, 25 bp, Saccharomyces pastorianus
agaaaggtcagatccgccgaatatt

SEQ ID NO: 147270 - DNA, 25 bp, Saccharomyces pastorianus
tgctgctgcttctgaatccgatgtt

SEQ ID NO: 147271 - DNA, 25 bp, Saccharomyces pastorianus
cgaatattacgccaagaagagagct

SEQ ID NO: 147272 - DNA, 25 bp, Saccharomyces pastorianus
agatccgccgaatattacgccaaga

SEQ ID NO: 147273 - DNA, 25 bp, Saccharomyces pastorianus
agatcttcgaaggtattccacctcc

SEQ ID NO: 147274 - DNA, 25 bp, Saccharomyces pastorianus
gtcagatccgccgaatattacgcca

SEQ ID NO: 147275 - DNA, 25 bp, Saccharomyces pastorianus
ttcaccaagaaggtctcctctgctt

SEQ ID NO: 147276 - DNA, 25 bp, Saccharomyces pastorianus
accaagaaggtctcctctgcttctg

SEQ ID NO: 147277 - DNA, 25 bp, Saccharomyces pastorianus
agagttgtcgttcctcaagctttga

SEQ ID NO: 147278 - DNA, 25 bp, Saccharomyces pastorianus
atccgccgaatattacgccaagaag

SEQ ID NO: 147279 - DNA, 25 bp, Saccharomyces pastorianus
aagagaaaggtcagatccgccgaat

SEQ ID NO: 147280 - DNA, 25 bp, Saccharomyces pastorianus
gtttctgagagaccacacaagagtt

SEQ ID NO: 147281 - DNA, 25 bp, Saccharomyces pastorianus
taaaggtcggtattgttccaggtga

SEQ ID NO: 147282 - DNA, 25 bp, Saccharomyces pastorianus
aaggtgaagctgaccaagccccaga

SEQ ID NO: 147283 - DNA, 25 bp, Saccharomyces pastorianus
aatacaacagaacacgggcctccag

SEQ ID NO: 147284 - DNA, 25 bp, Saccharomyces pastorianus
gtggtgcaaactatgattccgatga

SEQ ID NO: 147285 - DNA, 25 bp, Saccharomyces pastorianus
gaagatcctagaagtccatgtcgaa

SEQ ID NO: 147286 - DNA, 25 bp, Saccharomyces pastorianus
aattgtcccagccattccaaagaaa

SEQ ID NO: 147287 - DNA, 25 bp, Saccharomyces pastorianus
gaagtccatgtcgaaccaggtatga

SEQ ID NO: 147288 - DNA, 25 bp, Saccharomyces pastorianus
attttgcctccaagaattgtcccag

SEQ ID NO: 147289 - DNA, 25 bp, Saccharomyces pastorianus
agctactgtggacgaatgtgtactc

SEQ ID NO: 147290 - DNA, 25 bp, Saccharomyces pastorianus
gatgttgtcttcatagtttctgaga

SEQ ID NO: 147291 - DNA, 25 bp, Saccharomyces pastorianus
cgatattctaggtgtttcagtcact

SEQ ID NO: 147292 - DNA, 25 bp, Saccharomyces pastorianus
agtcactgccactgatgtcgaaatt

SEQ ID NO: 147293 - DNA, 25 bp, Saccharomyces pastorianus
gaagcttcagcagcctatgaaattt

SEQ ID NO: 147294 - DNA, 25 bp, Saccharomyces pastorianus
ctgccactgatgtcgaaattaagaa

SEQ ID NO: 147295 - DNA, 25 bp, Saccharomyces pastorianus
gcagcctatgaaattttatcagatt

SEQ ID NO: 147296 - DNA, 25 bp, Saccharomyces pastorianus
gaatccaagtgaggaagctgcagaa

SEQ ID NO: 147297 - DNA, 25 bp, Saccharomyces pastorianus
gaaagcttatagaaaatgcgcctta

SEQ ID NO: 147298 - DNA, 25 bp, Saccharomyces pastorianus
aaggtctaagtggtgctggtggcgc

SEQ ID NO: 147299 - DNA, 25 bp, Saccharomyces pastorianus
gttcaaagaagcttcagcagcctat

SEQ ID NO: 147300 - DNA, 25 bp, Saccharomyces pastorianus
aaaatgcgccttaaaataccatcca

SEQ ID NO: 147301 - DNA, 25 bp, Saccharomyces pastorianus
taggtgtttcagtcactgccactga

SEQ ID NO: 147302 - DNA, 25 bp, Saccharomyces pastorianus
gacctcatgatagcgaaaatataca

SEQ ID NO: 147303 - DNA, 25 bp, Saccharomyces pastorianus
acatcgtggaactggagggactact

SEQ ID NO: 147304 - DNA, 25 bp, Saccharomyces pastorianus
gtttttaagaggacctagacctcat

SEQ ID NO: 147305 - DNA, 25 bp, Saccharomyces pastorianus
gaacacgatccaaactttactgaag

SEQ ID NO: 147306 - DNA, 25 bp, Saccharomyces pastorianus
gatacgctggaagcacagtacgatt

SEQ ID NO: 147307 - DNA, 25 bp, Saccharomyces pastorianus
ttctatcctccacctgtttttaaga

SEQ ID NO: 147308 - DNA, 25 bp, Saccharomyces pastorianus
gtgatatttcaaccgacaatgggcg

SEQ ID NO: 147309 - DNA, 25 bp, Saccharomyces pastorianus
gaagaagcattagagtacgagtaca

SEQ ID NO: 147310 - DNA, 25 bp, Saccharomyces pastorianus
acgtataagggtaccagaagtgata

SEQ ID NO: 147311 - DNA, 25 bp, Saccharomyces pastorianus
ggagaaattctatcctccacctgtt

SEQ ID NO: 147312 - DNA, 25 bp, Saccharomyces pastorianus
gagggactacttttagaacacgatc

SEQ ID NO: 147313 - DNA, 25 bp, Saccharomyces pastorianus
agaagcccctttgacggaccatttg

SEQ ID NO: 147314 - DNA, 25 bp, Saccharomyces pastorianus
gcaggattcgttaaccatgctaccc

SEQ ID NO: 147315 - DNA, 25 bp, Saccharomyces pastorianus
gactggcaactgttcaatcacaacg

SEQ ID NO: 147316 - DNA, 25 bp, Saccharomyces pastorianus
tgaacagtcagcttacaatccccag

SEQ ID NO: 147317 - DNA, 25 bp, Saccharomyces pastorianus
gcagtagtgatagacgaccctccat

SEQ ID NO: 147318 - DNA, 25 bp, Saccharomyces pastorianus
ctctttgactcctcttaaggcagta

SEQ ID NO: 147319 - DNA, 25 bp, Saccharomyces pastorianus
gtcgcccattgccattgattttgga

SEQ ID NO: 147320 - DNA, 25 bp, Saccharomyces pastorianus
ggactacacttttcatcatttggga

SEQ ID NO: 147321 - DNA, 25 bp, Saccharomyces pastorianus
tacccctacacatatttttccgaat

SEQ ID NO: 147322 - DNA, 25 bp, Saccharomyces pastorianus
gttggatcaagctgtgcgttcgcaa

SEQ ID NO: 147323 - DNA, 25 bp, Saccharomyces pastorianus
atgtaccaggcgttactttcggaat

SEQ ID NO: 147324 - DNA, 25 bp, Saccharomyces pastorianus
agatccttcattggatgcctggaag

SEQ ID NO: 147325 - DNA, 25 bp, Saccharomyces pastorianus
atatgtcttcagatccttcattgga

SEQ ID NO: 147326 - DNA, 25 bp, Saccharomyces pastorianus
gattccttcctaccggtaccaatat

SEQ ID NO: 147327 - DNA, 25 bp, Saccharomyces pastorianus
atatcactgtaaatatgtcttcaga

SEQ ID NO: 147328 - DNA, 25 bp, Saccharomyces pastorianus
ttattaccggcggtaatgctaaggt

SEQ ID NO: 147329 - DNA, 25 bp, Saccharomyces pastorianus
ccaggattgaaagaacgtattgtga

SEQ ID NO: 147330 - DNA, 25 bp, Saccharomyces pastorianus
atgcctggaagggtatggcagctct

SEQ ID NO: 147331 - DNA, 25 bp, Saccharomyces pastorianus
ggcagctctagcacgaaacgaagaa

SEQ ID NO: 147332 - DNA, 25 bp, Saccharomyces pastorianus
ggaattcactggattccttcctacc

SEQ ID NO: 147333 - DNA, 25 bp, Saccharomyces pastorianus
gaagggtatggcagctctagcacga

SEQ ID NO: 147334 - DNA, 25 bp, Saccharomyces pastorianus
tcctaccggtaccaatatcactgta

SEQ ID NO: 147335 - DNA, 25 bp, Saccharomyces pastorianus
gtgccctttttcaatacgcaaaaat

SEQ ID NO: 147336 - DNA, 25 bp, Saccharomyces pastorianus
tacgcaaaaatctacggctattcaa

SEQ ID NO: 147337 - DNA, 25 bp, Saccharomyces pastorianus
tgaggtgccctttttcaatacgcaa

SEQ ID NO: 147338 - DNA, 25 bp, Saccharomyces pastorianus
gtatgaggtgccctttttcaatacg

SEQ ID NO: 147339 - DNA, 25 bp, Saccharomyces pastorianus
gaagtatgaggtgccctttttcaat

SEQ ID NO: 147340 - DNA, 25 bp, Saccharomyces pastorianus
atgaggtgccctttttcaatacgca

SEQ ID NO: 147341 - DNA, 25 bp, Saccharomyces pastorianus
tcaatacgcaaaaatctacggctat

SEQ ID NO: 147342 - DNA, 25 bp, Saccharomyces pastorianus
tttcaatacgcaaaaatctacggct

SEQ ID NO: 147343 - DNA, 25 bp, Saccharomyces pastorianus
atgaagtatgaggtgccctttttca

SEQ ID NO: 147344 - DNA, 25 bp, Saccharomyces pastorianus
gaggtgccctttttcaatacgcaaa

SEQ ID NO: 147345 - DNA, 25 bp, Saccharomyces pastorianus
tatgaggtgccctttttcaatacgc

SEQ ID NO: 147346 - DNA, 25 bp, Saccharomyces pastorianus
gtgattctaatggtgactgtacagt

SEQ ID NO: 147347 - DNA, 25 bp, Saccharomyces pastorianus
agttcttacctgaagtgtgattcta

SEQ ID NO: 147348 - DNA, 25 bp, Saccharomyces pastorianus
caaggaagtccccatttgtgaaagt

SEQ ID NO: 147349 - DNA, 25 bp, Saccharomyces pastorianus
gtaagtgcttttaatccaggattct

SEQ ID NO: 147350 - DNA, 25 bp, Saccharomyces pastorianus
gtataagcgtttcccaagtcgattt

SEQ ID NO: 147351 - DNA, 25 bp, Saccharomyces pastorianus
actacgattttatggttggcaacaa

SEQ ID NO: 147352 - DNA, 25 bp, Saccharomyces pastorianus
tcaccgcacaacttttactcaagga

SEQ ID NO: 147353 - DNA, 25 bp, Saccharomyces pastorianus
gatgacgttacccattccaatatca

SEQ ID NO: 147354 - DNA, 25 bp, Saccharomyces pastorianus
atgtgatttcaagttcggacgagtt

SEQ ID NO: 147355 - DNA, 25 bp, Saccharomyces pastorianus
gacgagttgatcttcgacatcacag

SEQ ID NO: 147356 - DNA, 25 bp, Saccharomyces pastorianus
gatattgttggttactcaccgcaca

SEQ ID NO: 147357 - DNA, 25 bp, Saccharomyces pastorianus
gagacctggtcaaaagcaacgtgca

SEQ ID NO: 147358 - DNA, 25 bp, Saccharomyces pastorianus
gagctctatcgactctgatgtgata

SEQ ID NO: 147359 - DNA, 25 bp, Saccharomyces pastorianus
attctggaggatgatctacgtattc

SEQ ID NO: 147360 - DNA, 25 bp, Saccharomyces pastorianus
actactttgcaagctattctgcaga

SEQ ID NO: 147361 - DNA, 25 bp, Saccharomyces pastorianus
tacctttgaacccactggcaaaagc

SEQ ID NO: 147362 - DNA, 25 bp, Saccharomyces pastorianus
gaaaggcccaaagactactactttg

SEQ ID NO: 147363 - DNA, 25 bp, Saccharomyces pastorianus
gctgcaattccaacagagctctatc

SEQ ID NO: 147364 - DNA, 25 bp, Saccharomyces pastorianus
gtgcagccaaaaaactggcacttga

SEQ ID NO: 147365 - DNA, 25 bp, Saccharomyces pastorianus
ctacgtattcgtgataaatggccat

SEQ ID NO: 147366 - DNA, 25 bp, Saccharomyces pastorianus
tagatctgtataagcacaatgcgag

SEQ ID NO: 147367 - DNA, 25 bp, Saccharomyces pastorianus
ggccatattgccagggtcgaataat

SEQ ID NO: 147368 - DNA, 25 bp, Saccharomyces pastorianus
aagatgacggtgaaactactggttt

SEQ ID NO: 147369 - DNA, 25 bp, Saccharomyces pastorianus
gttactccatgggatgccaacggga

SEQ ID NO: 147370 - DNA, 25 bp, Saccharomyces pastorianus
agatcctctgagataccccaatttg

SEQ ID NO: 147371 - DNA, 25 bp, Saccharomyces pastorianus
gggtccactagatccaagcaagatg

SEQ ID NO: 147372 - DNA, 25 bp, Saccharomyces pastorianus
atctactttcggtgttaatgccatg

SEQ ID NO: 147373 - DNA, 25 bp, Saccharomyces pastorianus
ggtttgatccccatagttcatgcct

SEQ ID NO: 147374 - DNA, 25 bp, Saccharomyces pastorianus
tcggaaaagctccaccacaatggga

SEQ ID NO: 147375 - DNA, 25 bp, Saccharomyces pastorianus
aactggactatgactgcctaagggt

SEQ ID NO: 147376 - DNA, 25 bp, Saccharomyces pastorianus
taaagagccgagtgatcctgattat

SEQ ID NO: 147377 - DNA, 25 bp, Saccharomyces pastorianus
tcggcgggcccattgttagatatag

SEQ ID NO: 147378 - DNA, 25 bp, Saccharomyces pastorianus
gggcgcaagaaaccagcagtattca

SEQ ID NO: 147379 - DNA, 25 bp, Saccharomyces pastorianus
aatccgttctccaaaaaatcttcat

SEQ ID NO: 147380 - DNA, 25 bp, Saccharomyces pastorianus
gatacttggtggattcttcaacatg

SEQ ID NO: 147381 - DNA, 25 bp, Saccharomyces pastorianus
gttcgattacgacttggattcggat

SEQ ID NO: 147382 - DNA, 25 bp, Saccharomyces pastorianus
ggagaattcctatcgtcacatatac

SEQ ID NO: 147383 - DNA, 25 bp, Saccharomyces pastorianus
gtaccctttcagctatcctattata

SEQ ID NO: 147384 - DNA, 25 bp, Saccharomyces pastorianus
tgaatccattattcagtgtccacct

SEQ ID NO: 147385 - DNA, 25 bp, Saccharomyces pastorianus
gaagcatttcacgttgattggacaa

SEQ ID NO: 147386 - DNA, 25 bp, Saccharomyces pastorianus
ttaaggttctcacgtggatcttccg

SEQ ID NO: 147387 - DNA, 25 bp, Saccharomyces pastorianus
agagcagttgcctcctgtggtgaga

SEQ ID NO: 147388 - DNA, 25 bp, Saccharomyces pastorianus
gtgtattccagcttgaatccgttct

SEQ ID NO: 147389 - DNA, 25 bp, Saccharomyces pastorianus
ggatcaatgattctcgcatttgaat

SEQ ID NO: 147390 - DNA, 25 bp, Saccharomyces pastorianus
aaagccttatcaagtttgcccaact

SEQ ID NO: 147391 - DNA, 25 bp, Saccharomyces pastorianus
aaatccaactcagagcagggcaaga

SEQ ID NO: 147392 - DNA, 25 bp, Saccharomyces pastorianus
ttatgtcctcactccaagcttttta

SEQ ID NO: 147393 - DNA, 25 bp, Saccharomyces pastorianus
atactcacgtgggttttatgtcctc

SEQ ID NO: 147394 - DNA, 25 bp, Saccharomyces pastorianus
atagggttcctgaattttacataga

SEQ ID NO: 147395 - DNA, 25 bp, Saccharomyces pastorianus
taacaccacgtcatcgataccggaa

SEQ ID NO: 147396 - DNA, 25 bp, Saccharomyces pastorianus
caattttcccttgaattccattcca

SEQ ID NO: 147397 - DNA, 25 bp, Saccharomyces pastorianus
atgtgagtagtagcaattttccctt

SEQ ID NO: 147398 - DNA, 25 bp, Saccharomyces pastorianus
gcataaattttccacaccgttaatg

SEQ ID NO: 147399 - DNA, 25 bp, Saccharomyces pastorianus
attgcgtacgaattctaacggacta

SEQ ID NO: 147400 - DNA, 25 bp, Saccharomyces pastorianus
atgtactgtcactgagcattccaaa

SEQ ID NO: 147401 - DNA, 25 bp, Saccharomyces pastorianus
actgaacctttcatgctaacgctgg

SEQ ID NO: 147402 - DNA, 25 bp, Saccharomyces pastorianus
aggacattttaatcccgcctatcaa

SEQ ID NO: 147403 - DNA, 25 bp, Saccharomyces pastorianus
gctaacgctggccaaaatgtcttta

SEQ ID NO: 147404 - DNA, 25 bp, Saccharomyces pastorianus
ttgcgcaacgcaatcctatacctta

SEQ ID NO: 147405 - DNA, 25 bp, Saccharomyces pastorianus
ctatcccggctcagttgaacgtata

SEQ ID NO: 147406 - DNA, 25 bp, Saccharomyces pastorianus
tacgacgcactctttgaactctaat

SEQ ID NO: 147407 - DNA, 25 bp, Saccharomyces pastorianus
ataccttaccctatcgacgctgtga

SEQ ID NO: 147408 - DNA, 25 bp, Saccharomyces pastorianus
aattcgatggtcgatgctgcggctg

SEQ ID NO: 147409 - DNA, 25 bp, Saccharomyces pastorianus
acggaacagtgcaagagcctctctt

SEQ ID NO: 147410 - DNA, 25 bp, Saccharomyces pastorianus
aagagcctctcttgacctcagaagt

SEQ ID NO: 147411 - DNA, 25 bp, Saccharomyces pastorianus
caataatgttggttccttcactgaa

SEQ ID NO: 147412 - DNA, 25 bp, Saccharomyces pastorianus
tgccaccaaggcctcattttattac

SEQ ID NO: 147413 - DNA, 25 bp, Saccharomyces pastorianus
tactttgtatgagttctatcccgaa

SEQ ID NO: 147414 - DNA, 25 bp, Saccharomyces pastorianus
gcatttggccgattggttgggaact

SEQ ID NO: 147415 - DNA, 25 bp, Saccharomyces pastorianus
caagtttcccgtggcatctagggca

SEQ ID NO: 147416 - DNA, 25 bp, Saccharomyces pastorianus
gattggcacttgcaactttcgacaa

SEQ ID NO: 147417 - DNA, 25 bp, Saccharomyces pastorianus
tacggctttggctgataatgtttat

SEQ ID NO: 147418 - DNA, 25 bp, Saccharomyces pastorianus
ggatttccggtctgaatttaacgct

SEQ ID NO: 147419 - DNA, 25 bp, Saccharomyces pastorianus
aatttcagatctttgccaagctgca

SEQ ID NO: 147420 - DNA, 25 bp, Saccharomyces pastorianus
aaactctgtagaccgtcgattggca

SEQ ID NO: 147421 - DNA, 25 bp, Saccharomyces pastorianus
tagaatgaagtttgtccgtcccggt

SEQ ID NO: 147422 - DNA, 25 bp, Saccharomyces pastorianus
gacaagtgggtcgaaatggctcaac

SEQ ID NO: 147423 - DNA, 25 bp, Saccharomyces pastorianus
gagctcgtaactccatttggttctt

SEQ ID NO: 147424 - DNA, 25 bp, Saccharomyces pastorianus
acttgttgctactctttgttattgt

SEQ ID NO: 147425 - DNA, 25 bp, Saccharomyces pastorianus
agcgttttcggacatgcatcattga

SEQ ID NO: 147426 - DNA, 25 bp, Saccharomyces pastorianus
actggtttgtgttgctgtgccaata

SEQ ID NO: 147427 - DNA, 25 bp, Saccharomyces pastorianus
ttagcttcgccaatctcaactttgc

SEQ ID NO: 147428 - DNA, 25 bp, Saccharomyces pastorianus
gaccaaccaactatacaccggactg

SEQ ID NO: 147429 - DNA, 25 bp, Saccharomyces pastorianus
tgtgccaataggtttcttagcttcg

SEQ ID NO: 147430 - DNA, 25 bp, Saccharomyces pastorianus
gttattgttctagtcgtagctggta

SEQ ID NO: 147431 - DNA, 25 bp, Saccharomyces pastorianus
gagtggcgtataacctgaagtactt

SEQ ID NO: 147432 - DNA, 25 bp, Saccharomyces pastorianus
atctaaattagcaacccttcgcacc

SEQ ID NO: 147433 - DNA, 25 bp, Saccharomyces pastorianus
aagagcgagttccaatccttgcaat

SEQ ID NO: 147434 - DNA, 25 bp, Saccharomyces pastorianus
aattacatccatttcgaatgccgag

SEQ ID NO: 147435 - DNA, 25 bp, Saccharomyces pastorianus
tacggaacattggaactgttgctac

SEQ ID NO: 147436 - DNA, 25 bp, Saccharomyces pastorianus
gctgctaacttaggttcgatactac

SEQ ID NO: 147437 - DNA, 25 bp, Saccharomyces pastorianus
agacaaacgaacactggctcactgc

SEQ ID NO: 147438 - DNA, 25 bp, Saccharomyces pastorianus
actgttgctacagatccacaaggaa

SEQ ID NO: 147439 - DNA, 25 bp, Saccharomyces pastorianus
tgccaatttggctgctaacttaggt

SEQ ID NO: 147440 - DNA, 25 bp, Saccharomyces pastorianus
tggctcactgctaattctttcggaa

SEQ ID NO: 147441 - DNA, 25 bp, Saccharomyces pastorianus
atttcgaatgccgagtttgccgccc

SEQ ID NO: 147442 - DNA, 25 bp, Saccharomyces pastorianus
tgctaattctttcggaatcgggtga

SEQ ID NO: 147443 - DNA, 25 bp, Saccharomyces pastorianus
tcgatactacaaaacctaaaaggcg

SEQ ID NO: 147444 - DNA, 25 bp, Saccharomyces pastorianus
ggttacgaaattatcctatgcggtt

SEQ ID NO: 147445 - DNA, 25 bp, Saccharomyces pastorianus
gtgccattctggaacgcaactacaa

SEQ ID NO: 147446 - DNA, 25 bp, Saccharomyces pastorianus
cacgtttctcgtttcggtttacatg

SEQ ID NO: 147447 - DNA, 25 bp, Saccharomyces pastorianus
aaacctgttctagagcctagcgact

SEQ ID NO: 147448 - DNA, 25 bp, Saccharomyces pastorianus
ctcaaggctctatttcatgtgtggg

SEQ ID NO: 147449 - DNA, 25 bp, Saccharomyces pastorianus
aagtaggcactgtatcttggtcgat

SEQ ID NO: 147450 - DNA, 25 bp, Saccharomyces pastorianus
ttccactttaattcttcccaatcaa

SEQ ID NO: 147451 - DNA, 25 bp, Saccharomyces pastorianus
aaggtgttctacgtactatccacat

SEQ ID NO: 147452 - DNA, 25 bp, Saccharomyces pastorianus
aatgactacattgagcccggaacaa

SEQ ID NO: 147453 - DNA, 25 bp, Saccharomyces pastorianus
aaattccagacgattacgacctctc

SEQ ID NO: 147454 - DNA, 25 bp, Saccharomyces pastorianus
gttgatcatcaactttcctcaggaa

SEQ ID NO: 147455 - DNA, 25 bp, Saccharomyces pastorianus
gaagcgggtttctctgtatgcaaaa

SEQ ID NO: 147456 - DNA, 25 bp, Saccharomyces pastorianus
acacactttttggagattatacgat

SEQ ID NO: 147457 - DNA, 25 bp, Saccharomyces pastorianus
gagagaccggcctaaccagacgtta

SEQ ID NO: 147458 - DNA, 25 bp, Saccharomyces pastorianus
aactcttaacagagaggactggcag

SEQ ID NO: 147459 - DNA, 25 bp, Saccharomyces pastorianus
gcatcactaaactggcttcaactct

SEQ ID NO: 147460 - DNA, 25 bp, Saccharomyces pastorianus
aactggcttcaactcttaacagaga

SEQ ID NO: 147461 - DNA, 25 bp, Saccharomyces pastorianus
gtaagcgaactatacacactttttg

SEQ ID NO: 147462 - DNA, 25 bp, Saccharomyces pastorianus
ttttatcgagagaccggcctaacca

SEQ ID NO: 147463 - DNA, 25 bp, Saccharomyces pastorianus
ggttcgcggttttatcgagagaccg

SEQ ID NO: 147464 - DNA, 25 bp, Saccharomyces pastorianus
agtactgggcggcatcactaaactg

SEQ ID NO: 147465 - DNA, 25 bp, Saccharomyces pastorianus
gcgaactatacacactttttggaga

SEQ ID NO: 147466 - DNA, 25 bp, Saccharomyces pastorianus
ggcggcatcactaaactggcttcaa

SEQ ID NO: 147467 - DNA, 25 bp, Saccharomyces pastorianus
aagactgttacttctttggatgtcg

SEQ ID NO: 147468 - DNA, 25 bp, Saccharomyces pastorianus
cttctttggatgtcgtttatgcttt

SEQ ID NO: 147469 - DNA, 25 bp, Saccharomyces pastorianus
acttctttggatgtcgtttatgctt

SEQ ID NO: 147470 - DNA, 25 bp, Saccharomyces pastorianus
ttacttctttggatgtcgtttatgc

SEQ ID NO: 147471 - DNA, 25 bp, Saccharomyces pastorianus
ctgttacttctttggatgtcgttta

SEQ ID NO: 147472 - DNA, 25 bp, Saccharomyces pastorianus
ctttggatgtcgtttatgctttgaa

SEQ ID NO: 147473 - DNA, 25 bp, Saccharomyces pastorianus
actgttacttctttggatgtcgttt

SEQ ID NO: 147474 - DNA, 25 bp, Saccharomyces pastorianus
agactgttacttctttggatgtcgt

SEQ ID NO: 147475 - DNA, 25 bp, Saccharomyces pastorianus
tctttggatgtcgtttatgctttga

SEQ ID NO: 147476 - DNA, 25 bp, Saccharomyces pastorianus
tttggatgtcgtttatgctttgaag

SEQ ID NO: 147477 - DNA, 25 bp, Saccharomyces pastorianus
tacttctttggatgtcgtttatgct

SEQ ID NO: 147478 - DNA, 25 bp, Saccharomyces pastorianus
aacgccacgtcgaagtactcaacgg

SEQ ID NO: 147479 - DNA, 25 bp, Saccharomyces pastorianus
gtcgaagtactcaacggcaatgaaa

SEQ ID NO: 147480 - DNA, 25 bp, Saccharomyces pastorianus
tgcttaatcaacagagaggacacga

SEQ ID NO: 147481 - DNA, 25 bp, Saccharomyces pastorianus
ttctgcgtgaatatttgggtaaatc

SEQ ID NO: 147482 - DNA, 25 bp, Saccharomyces pastorianus
atgggtttctgcgtgaatatttggg

SEQ ID NO: 147483 - DNA, 25 bp, Saccharomyces pastorianus
aacggcaatgaaatggaggagcaca

SEQ ID NO: 147484 - DNA, 25 bp, Saccharomyces pastorianus
gccacgtcgaagtactcaacggcaa

SEQ ID NO: 147485 - DNA, 25 bp, Saccharomyces pastorianus
gagaggacacgaacgccacgtcgaa

SEQ ID NO: 147486 - DNA, 25 bp, Saccharomyces pastorianus
acgaacgccacgtcgaagtactcaa

SEQ ID NO: 147487 - DNA, 25 bp, Saccharomyces pastorianus
atttgggtaaatctgcttaatcaac

SEQ ID NO: 147488 - DNA, 25 bp, Saccharomyces pastorianus
ggacacgaacgccacgtcgaagtac

SEQ ID NO: 147489 - DNA, 25 bp, Saccharomyces pastorianus
gtagaagatgcatcactcccttgta

SEQ ID NO: 147490 - DNA, 25 bp, Saccharomyces pastorianus
tagaagatgcatcactcccttgtac

SEQ ID NO: 147491 - DNA, 25 bp, Saccharomyces pastorianus
agtggtagaagatgcatcactccct

SEQ ID NO: 147492 - DNA, 25 bp, Saccharomyces pastorianus
aagatgcatcactcccttgtacgaa

SEQ ID NO: 147493 - DNA, 25 bp, Saccharomyces pastorianus
gaagatgcatcactcccttgtacga

SEQ ID NO: 147494 - DNA, 25 bp, Saccharomyces pastorianus
tggtagaagatgcatcactcccttg

SEQ ID NO: 147495 - DNA, 25 bp, Saccharomyces pastorianus
agaagatgcatcactcccttgtacg

SEQ ID NO: 147496 - DNA, 25 bp, Saccharomyces pastorianus
ggtagaagatgcatcactcccttgt

SEQ ID NO: 147497 - DNA, 25 bp, Saccharomyces pastorianus
aagtggtagaagatgcatcactccc

SEQ ID NO: 147498 - DNA, 25 bp, Saccharomyces pastorianus
aactgaaagtggtagaagatgcatc

SEQ ID NO: 147499 - DNA, 25 bp, Saccharomyces pastorianus
gtggtagaagatgcatcactccctt

SEQ ID NO: 147500 - DNA, 25 bp, Saccharomyces pastorianus
aggaaaaatcctgcgaatttcgctt

SEQ ID NO: 147501 - DNA, 25 bp, Saccharomyces pastorianus
gatcttggcatacttctagacatag

SEQ ID NO: 147502 - DNA, 25 bp, Saccharomyces pastorianus
agtgatgctcttggtaggcatttta

SEQ ID NO: 147503 - DNA, 25 bp, Saccharomyces pastorianus
actgaatcgggcattgtcaatatta

SEQ ID NO: 147504 - DNA, 25 bp, Saccharomyces pastorianus
gatgacactagcaaagatcttggca

SEQ ID NO: 147505 - DNA, 25 bp, Saccharomyces pastorianus
gtcacacttaagaacgcatacaaat

SEQ ID NO: 147506 - DNA, 25 bp, Saccharomyces pastorianus
tataacaccattaacagtagcaatt

SEQ ID NO: 147507 - DNA, 25 bp, Saccharomyces pastorianus
gcttgggccaatttgagcagaaagt

SEQ ID NO: 147508 - DNA, 25 bp, Saccharomyces pastorianus
gtaaaccaaaaactgaatcgggcat

SEQ ID NO: 147509 - DNA, 25 bp, Saccharomyces pastorianus
ctagacatagatagcttgggccaat

SEQ ID NO: 147510 - DNA, 25 bp, Saccharomyces pastorianus
aatttcgcttgtgatgtatgtggta

SEQ ID NO: 147511 - DNA, 25 bp, Saccharomyces pastorianus
agcagaagcttacccactatatgaa

SEQ ID NO: 147512 - DNA, 25 bp, Saccharomyces pastorianus
ggagcttttggttggacacttcgat

SEQ ID NO: 147513 - DNA, 25 bp, Saccharomyces pastorianus
aagaggcatttttggccgattccat

SEQ ID NO: 147514 - DNA, 25 bp, Saccharomyces pastorianus
ggacacttcgattttatggccaaag

SEQ ID NO: 147515 - DNA, 25 bp, Saccharomyces pastorianus
gccgattccatttcgttgtgttcaa

SEQ ID NO: 147516 - DNA, 25 bp, Saccharomyces pastorianus
tttggttgctggaaatactgccgaa

SEQ ID NO: 147517 - DNA, 25 bp, Saccharomyces pastorianus
agtgaatcctcaatacctaatcctt

SEQ ID NO: 147518 - DNA, 25 bp, Saccharomyces pastorianus
ataccgaacgtgacatggagctttt

SEQ ID NO: 147519 - DNA, 25 bp, Saccharomyces pastorianus
ttcatccgtgaactagccaaagctt

SEQ ID NO: 147520 - DNA, 25 bp, Saccharomyces pastorianus
tttcaaacctatgaggcctcctcaa

SEQ ID NO: 147521 - DNA, 25 bp, Saccharomyces pastorianus
acggcctatattccgagtctcagga

SEQ ID NO: 147522 - DNA, 25 bp, Saccharomyces pastorianus
gtgggataccactctcttactgtta

SEQ ID NO: 147523 - DNA, 25 bp, Saccharomyces pastorianus
gtggcgaatctacgtgtggtcataa

SEQ ID NO: 147524 - DNA, 25 bp, Saccharomyces pastorianus
aatgtcacccaggaaagtgtccgcc

SEQ ID NO: 147525 - DNA, 25 bp, Saccharomyces pastorianus
atacctgtcattccttggatgtgtc

SEQ ID NO: 147526 - DNA, 25 bp, Saccharomyces pastorianus
ttgtggcacgaagctaccaacatgt

SEQ ID NO: 147527 - DNA, 25 bp, Saccharomyces pastorianus
tgattcgaacgatctggtctgccca

SEQ ID NO: 147528 - DNA, 25 bp, Saccharomyces pastorianus
gtgtccgccctgtttagagagtgat

SEQ ID NO: 147529 - DNA, 25 bp, Saccharomyces pastorianus
gatttaccttgtgccacgctagtga

SEQ ID NO: 147530 - DNA, 25 bp, Saccharomyces pastorianus
gaatgtcctaaaccgtgccatggta

SEQ ID NO: 147531 - DNA, 25 bp, Saccharomyces pastorianus
ctcttactgttatcatacctgccaa

SEQ ID NO: 147532 - DNA, 25 bp, Saccharomyces pastorianus
aaaccgtgtaatttgaccctatcat

SEQ ID NO: 147533 - DNA, 25 bp, Saccharomyces pastorianus
gagatggagtcacctatgaccctca

SEQ ID NO: 147534 - DNA, 25 bp, Saccharomyces pastorianus
gaaagtagcgccaaaaagagaagtt

SEQ ID NO: 147535 - DNA, 25 bp, Saccharomyces pastorianus
gaacgagtcgtcatagaccttcttt

SEQ ID NO: 147536 - DNA, 25 bp, Saccharomyces pastorianus
agagaagttattccttcttggccta

SEQ ID NO: 147537 - DNA, 25 bp, Saccharomyces pastorianus
agaccttcttttagataagtcagtt

SEQ ID NO: 147538 - DNA, 25 bp, Saccharomyces pastorianus
tgcaatgagtttcccagcggctaaa

SEQ ID NO: 147539 - DNA, 25 bp, Saccharomyces pastorianus
aacagcttgccgagggttgtatcag

SEQ ID NO: 147540 - DNA, 25 bp, Saccharomyces pastorianus
tatgaccctcaacagcttgccgagg

SEQ ID NO: 147541 - DNA, 25 bp, Saccharomyces pastorianus
aagcatgcaatgagtttcccagcgg

SEQ ID NO: 147542 - DNA, 25 bp, Saccharomyces pastorianus
gagggttgtatcagggcactaccaa

SEQ ID NO: 147543 - DNA, 25 bp, Saccharomyces pastorianus
ggcactaccaaaaagtgacggtggt

SEQ ID NO: 147544 - DNA, 25 bp, Saccharomyces pastorianus
atgatacttctgatatctgggcaaa

SEQ ID NO: 147545 - DNA, 25 bp, Saccharomyces pastorianus
gggacttgacaggaaatacggcatc

SEQ ID NO: 147546 - DNA, 25 bp, Saccharomyces pastorianus
agtattttccttctgttgccaaaat

SEQ ID NO: 147547 - DNA, 25 bp, Saccharomyces pastorianus
acctctaactctgtttgaacctgac

SEQ ID NO: 147548 - DNA, 25 bp, Saccharomyces pastorianus
aggtatcgtacatctgcttggtcac

SEQ ID NO: 147549 - DNA, 25 bp, Saccharomyces pastorianus
ggtacaattgacttatcctcatcag

SEQ ID NO: 147550 - DNA, 25 bp, Saccharomyces pastorianus
gaatggtacttcaaaaactcactta

SEQ ID NO: 147551 - DNA, 25 bp, Saccharomyces pastorianus
agaggctacagactttatactggat

SEQ ID NO: 147552 - DNA, 25 bp, Saccharomyces pastorianus
gcagttaaagccactagttcctcta

SEQ ID NO: 147553 - DNA, 25 bp, Saccharomyces pastorianus
tgcttggtcacagggatactagggc

SEQ ID NO: 147554 - DNA, 25 bp, Saccharomyces pastorianus
taggagactcatactcaggtatcgt

SEQ ID NO: 147555 - DNA, 25 bp, Saccharomyces pastorianus
agtactggaaaatccagaccatgat

SEQ ID NO: 147556 - DNA, 25 bp, Saccharomyces pastorianus
aatccagaccatgatttaaaaagaa

SEQ ID NO: 147557 - DNA, 25 bp, Saccharomyces pastorianus
gaaaatccagaccatgatttaaaaa

SEQ ID NO: 147558 - DNA, 25 bp, Saccharomyces pastorianus
tggaaaatccagaccatgatttaaa

SEQ ID NO: 147559 - DNA, 25 bp, Saccharomyces pastorianus
gtactggaaaatccagaccatgatt

SEQ ID NO: 147560 - DNA, 25 bp, Saccharomyces pastorianus
actggaaaatccagaccatgattta

SEQ ID NO: 147561 - DNA, 25 bp, Saccharomyces pastorianus
ctggaaaatccagaccatgatttaa

SEQ ID NO: 147562 - DNA, 25 bp, Saccharomyces pastorianus
tccagaccatgatttaaaaagaaag

SEQ ID NO: 147563 - DNA, 25 bp, Saccharomyces pastorianus
gaagtactggaaaatccagaccatg

SEQ ID NO: 147564 - DNA, 25 bp, Saccharomyces pastorianus
gaccatgatttaaaaagaaagctag

SEQ ID NO: 147565 - DNA, 25 bp, Saccharomyces pastorianus
taatggttaagaaagaagtactgga

SEQ ID NO: 147566 - DNA, 25 bp, Saccharomyces pastorianus
ttgagagggcgtttcaggcactgat

SEQ ID NO: 147567 - DNA, 25 bp, Saccharomyces pastorianus
gaaaaggaaacatcactctcgatac

SEQ ID NO: 147568 - DNA, 25 bp, Saccharomyces pastorianus
atctggttcttgatcacattcattt

SEQ ID NO: 147569 - DNA, 25 bp, Saccharomyces pastorianus
gatgtcggcgagaagaagtctttaa

SEQ ID NO: 147570 - DNA, 25 bp, Saccharomyces pastorianus
aagccgtatcagatttttccgtcca

SEQ ID NO: 147571 - DNA, 25 bp, Saccharomyces pastorianus
tcctaacattcagatcaagccgtat

SEQ ID NO: 147572 - DNA, 25 bp, Saccharomyces pastorianus
tagacagtaaggtcgatcctaacat

SEQ ID NO: 147573 - DNA, 25 bp, Saccharomyces pastorianus
tttccgtccaacaacctagtatacg

SEQ ID NO: 147574 - DNA, 25 bp, Saccharomyces pastorianus
gaagtgaccgtaccaatgcatcctt

SEQ ID NO: 147575 - DNA, 25 bp, Saccharomyces pastorianus
ttgttcgtgagtctcgcacagcaac

SEQ ID NO: 147576 - DNA, 25 bp, Saccharomyces pastorianus
attcatttttctctcgatgtcggcg

SEQ ID NO: 147577 - DNA, 25 bp, Saccharomyces pastorianus
aacaaccggttatgtctgagcaaca

SEQ ID NO: 147578 - DNA, 25 bp, Saccharomyces pastorianus
gggcggtcagccacttataatgaat

SEQ ID NO: 147579 - DNA, 25 bp, Saccharomyces pastorianus
tatgacactcatgaacaggccgctg

SEQ ID NO: 147580 - DNA, 25 bp, Saccharomyces pastorianus
aaatcctcaagctgttgaccacatc

SEQ ID NO: 147581 - DNA, 25 bp, Saccharomyces pastorianus
aaattttatgccacagcagcagcaa

SEQ ID NO: 147582 - DNA, 25 bp, Saccharomyces pastorianus
ggaatgccaattggcgccatgccat

SEQ ID NO: 147583 - DNA, 25 bp, Saccharomyces pastorianus
ggcaaacttcccatttcaaggcaga

SEQ ID NO: 147584 - DNA, 25 bp, Saccharomyces pastorianus
agagttactactgcctatatcggta

SEQ ID NO: 147585 - DNA, 25 bp, Saccharomyces pastorianus
ttatcaacagcgtcgtaactacggt

SEQ ID NO: 147586 - DNA, 25 bp, Saccharomyces pastorianus
taatattccgcactttgccactgaa

SEQ ID NO: 147587 - DNA, 25 bp, Saccharomyces pastorianus
agaagtgccccaccaagagttacta

SEQ ID NO: 147588 - DNA, 25 bp, Saccharomyces pastorianus
tgctattaccggtggtagggaaact

SEQ ID NO: 147589 - DNA, 25 bp, Saccharomyces pastorianus
gtcgaaactccctcggcagttgaag

SEQ ID NO: 147590 - DNA, 25 bp, Saccharomyces pastorianus
cgtcgctgtcgaaggcaattctgaa

SEQ ID NO: 147591 - DNA, 25 bp, Saccharomyces pastorianus
gcaatatttccaagttggcggacca

SEQ ID NO: 147592 - DNA, 25 bp, Saccharomyces pastorianus
agcatcagcagatccttcttctgaa

SEQ ID NO: 147593 - DNA, 25 bp, Saccharomyces pastorianus
gttggcggaccaattgctaacatca

SEQ ID NO: 147594 - DNA, 25 bp, Saccharomyces pastorianus
gggtgaaaatgatccttccgtagtt

SEQ ID NO: 147595 - DNA, 25 bp, Saccharomyces pastorianus
gttggtaacctagacaaagctatca

SEQ ID NO: 147596 - DNA, 25 bp, Saccharomyces pastorianus
ttcttctgaacagagcgtcgctgtc

SEQ ID NO: 147597 - DNA, 25 bp, Saccharomyces pastorianus
ggcagttgaagctccagcatcagca

SEQ ID NO: 147598 - DNA, 25 bp, Saccharomyces pastorianus
aacagcaacctgttgccgtcgaaac

SEQ ID NO: 147599 - DNA, 25 bp, Saccharomyces pastorianus
ggaaacgcatctaatacgtcgacat

SEQ ID NO: 147600 - DNA, 25 bp, Saccharomyces pastorianus
ggacatgattcatttttgccaatta

SEQ ID NO: 147601 - DNA, 25 bp, Saccharomyces pastorianus
tgacaactatccaaacggctccaag

SEQ ID NO: 147602 - DNA, 25 bp, Saccharomyces pastorianus
tgtaaaaacattcactcaccccatt

SEQ ID NO: 147603 - DNA, 25 bp, Saccharomyces pastorianus
ttttgttctggattctagttcggat

SEQ ID NO: 147604 - DNA, 25 bp, Saccharomyces pastorianus
actcaccccattgttataggatgca

SEQ ID NO: 147605 - DNA, 25 bp, Saccharomyces pastorianus
atttataccttgtagacggcggaga

SEQ ID NO: 147606 - DNA, 25 bp, Saccharomyces pastorianus
gacggcgagaatattccactcagaa

SEQ ID NO: 147607 - DNA, 25 bp, Saccharomyces pastorianus
gagaacgttcattaccaatttccga

SEQ ID NO: 147608 - DNA, 25 bp, Saccharomyces pastorianus
acagactatgccgtatatcaaccca

SEQ ID NO: 147609 - DNA, 25 bp, Saccharomyces pastorianus
tcaacccaatcccttttatctttat

SEQ ID NO: 147610 - DNA, 25 bp, Saccharomyces pastorianus
tggtgacggtgtttctgatctaagt

SEQ ID NO: 147611 - DNA, 25 bp, Saccharomyces pastorianus
caaagacatcttggctagcatgaaa

SEQ ID NO: 147612 - DNA, 25 bp, Saccharomyces pastorianus
gtggaaatcgatgcacatgatcaat

SEQ ID NO: 147613 - DNA, 25 bp, Saccharomyces pastorianus
aagaatgtgatttgctatttgccaa

SEQ ID NO: 147614 - DNA, 25 bp, Saccharomyces pastorianus
tctaccttgaaagctggtgaacaaa

SEQ ID NO: 147615 - DNA, 25 bp, Saccharomyces pastorianus
gctggtgaacaaagacccgtttact

SEQ ID NO: 147616 - DNA, 25 bp, Saccharomyces pastorianus
ataaggatgaaagtcccttcggaca

SEQ ID NO: 147617 - DNA, 25 bp, Saccharomyces pastorianus
aaacgtcccatttcatgaattcgat

SEQ ID NO: 147618 - DNA, 25 bp, Saccharomyces pastorianus
gcatgaaacaagttctggctggtga

SEQ ID NO: 147619 - DNA, 25 bp, Saccharomyces pastorianus
gtcccttcggacatgacaaatccag

SEQ ID NO: 147620 - DNA, 25 bp, Saccharomyces pastorianus
gtgtttctgatctaagtgctgcaaa

SEQ ID NO: 147621 - DNA, 25 bp, Saccharomyces pastorianus
cgttactttggaagattctaacgat

SEQ ID NO: 147622 - DNA, 25 bp, Saccharomyces pastorianus
tctgaccgatactttaggtttcggt

SEQ ID NO: 147623 - DNA, 25 bp, Saccharomyces pastorianus
gtcttttaggcaaggtttcatggaa

SEQ ID NO: 147624 - DNA, 25 bp, Saccharomyces pastorianus
ttatctgaccgatactttaggtttc

SEQ ID NO: 147625 - DNA, 25 bp, Saccharomyces pastorianus
ttcgaaggcgtgttagatgatacta

SEQ ID NO: 147626 - DNA, 25 bp, Saccharomyces pastorianus
tttccctgagtgtatcaagatctta

SEQ ID NO: 147627 - DNA, 25 bp, Saccharomyces pastorianus
gatgatactaagtcttttaggcaag

SEQ ID NO: 147628 - DNA, 25 bp, Saccharomyces pastorianus
aaaggtcttcgaaggcgtgttagat

SEQ ID NO: 147629 - DNA, 25 bp, Saccharomyces pastorianus
ccctttccctgagtgtatcaagatc

SEQ ID NO: 147630 - DNA, 25 bp, Saccharomyces pastorianus
acccctttccctgagtgtatcaaga

SEQ ID NO: 147631 - DNA, 25 bp, Saccharomyces pastorianus
ctaagtcttttaggcaaggtttcat

SEQ ID NO: 147632 - DNA, 25 bp, Saccharomyces pastorianus
atagatcatcatatgtaaccacaga

SEQ ID NO: 147633 - DNA, 25 bp, Saccharomyces pastorianus
gaggcttcaaaacatgacgctcagc

SEQ ID NO: 147634 - DNA, 25 bp, Saccharomyces pastorianus
catcatatgtaaccacagaagagtt

SEQ ID NO: 147635 - DNA, 25 bp, Saccharomyces pastorianus
agaaaaggctactttggacacagtt

SEQ ID NO: 147636 - DNA, 25 bp, Saccharomyces pastorianus
ttcaaaacatgacgctcagctccaa

SEQ ID NO: 147637 - DNA, 25 bp, Saccharomyces pastorianus
tgcttggaaagactaatagatcatc

SEQ ID NO: 147638 - DNA, 25 bp, Saccharomyces pastorianus
tgggcggaaaaatgaccaaggattt

SEQ ID NO: 147639 - DNA, 25 bp, Saccharomyces pastorianus
agcattgatgcttggaaagactaat

SEQ ID NO: 147640 - DNA, 25 bp, Saccharomyces pastorianus
cagaagagtttattgatgaggttgc

SEQ ID NO: 147641 - DNA, 25 bp, Saccharomyces pastorianus
gatgaggttgctaagaggcttcaaa

SEQ ID NO: 147642 - DNA, 25 bp, Saccharomyces pastorianus
tggacacagttcaagtgggcggaaa

SEQ ID NO: 147643 - DNA, 25 bp, Saccharomyces pastorianus
aaagcaggcaaactaaggttacagt

SEQ ID NO: 147644 - DNA, 25 bp, Saccharomyces pastorianus
atttcctaaaagtggtgggatcgca

SEQ ID NO: 147645 - DNA, 25 bp, Saccharomyces pastorianus
aacatcgatttaaaggtttatgaat

SEQ ID NO: 147646 - DNA, 25 bp, Saccharomyces pastorianus
gaaggtacagaaaacatcgatttaa

SEQ ID NO: 147647 - DNA, 25 bp, Saccharomyces pastorianus
gttacagtttagctcagatgaaggt

SEQ ID NO: 147648 - DNA, 25 bp, Saccharomyces pastorianus
gtgggatcgcaatggcaatgtttaa

SEQ ID NO: 147649 - DNA, 25 bp, Saccharomyces pastorianus
gatcgcaatggcaatgtttaataca

SEQ ID NO: 147650 - DNA, 25 bp, Saccharomyces pastorianus
taaggttacagtttagctcagatga

SEQ ID NO: 147651 - DNA, 25 bp, Saccharomyces pastorianus
gtttagctcagatgaaggtacagaa

SEQ ID NO: 147652 - DNA, 25 bp, Saccharomyces pastorianus
aaagtggtgggatcgcaatggcaat

SEQ ID NO: 147653 - DNA, 25 bp, Saccharomyces pastorianus
ttatgaatttcctaaaagtggtggg

SEQ ID NO: 147654 - DNA, 25 bp, Saccharomyces pastorianus
catggtacggtgaccaggcatttta

SEQ ID NO: 147655 - DNA, 25 bp, Saccharomyces pastorianus
taaagggttcgcaaaggcatccttc

SEQ ID NO: 147656 - DNA, 25 bp, Saccharomyces pastorianus
gatgctaaaatcaaagggcgggttt

SEQ ID NO: 147657 - DNA, 25 bp, Saccharomyces pastorianus
taaaacgtttgaaagcgaggctgcc

SEQ ID NO: 147658 - DNA, 25 bp, Saccharomyces pastorianus
acattgtggcacaaggatttgggtc

SEQ ID NO: 147659 - DNA, 25 bp, Saccharomyces pastorianus
gtccagtctgacattgtggcacaag

SEQ ID NO: 147660 - DNA, 25 bp, Saccharomyces pastorianus
gggtctcttggtttaatgacgtcca

SEQ ID NO: 147661 - DNA, 25 bp, Saccharomyces pastorianus
aatgattccattaaagggttcgcaa

SEQ ID NO: 147662 - DNA, 25 bp, Saccharomyces pastorianus
atgacgtccatattgattacacctg

SEQ ID NO: 147663 - DNA, 25 bp, Saccharomyces pastorianus
gattacacctgatggtaaaacgttt

SEQ ID NO: 147664 - DNA, 25 bp, Saccharomyces pastorianus
ttatgatggcgatgtccagtctgac

SEQ ID NO: 147665 - DNA, 25 bp, Saccharomyces pastorianus
gatttgctacatgcgtcagctgtga

SEQ ID NO: 147666 - DNA, 25 bp, Saccharomyces pastorianus
ctggaacatttccatgtggtctatt

SEQ ID NO: 147667 - DNA, 25 bp, Saccharomyces pastorianus
gttaatggaccgttgactagatcac

SEQ ID NO: 147668 - DNA, 25 bp, Saccharomyces pastorianus
gtcgatgttgttattgaacgccttc

SEQ ID NO: 147669 - DNA, 25 bp, Saccharomyces pastorianus
aaacccacaaggtgtactagtcgat

SEQ ID NO: 147670 - DNA, 25 bp, Saccharomyces pastorianus
ttgaacgccttctgcatcatacaaa

SEQ ID NO: 147671 - DNA, 25 bp, Saccharomyces pastorianus
gaggaaatggatctctcctgcctaa

SEQ ID NO: 147672 - DNA, 25 bp, Saccharomyces pastorianus
gattgtaggatatctctgggttata

SEQ ID NO: 147673 - DNA, 25 bp, Saccharomyces pastorianus
caagtaatgctgtcgattctgatga

SEQ ID NO: 147674 - DNA, 25 bp, Saccharomyces pastorianus
ttggccctgtagatgccttgcatta

SEQ ID NO: 147675 - DNA, 25 bp, Saccharomyces pastorianus
ctctcctgcctaatctgcaaagtta

SEQ ID NO: 147676 - DNA, 25 bp, Saccharomyces pastorianus
gataacacaactcagaaaccggaag

SEQ ID NO: 147677 - DNA, 25 bp, Saccharomyces pastorianus
gatgtatttagcttttttcacaaca

SEQ ID NO: 147678 - DNA, 25 bp, Saccharomyces pastorianus
tctcctattcggtaagtaagtatgc

SEQ ID NO: 147679 - DNA, 25 bp, Saccharomyces pastorianus
gactcttttcaagcattgatggaga

SEQ ID NO: 147680 - DNA, 25 bp, Saccharomyces pastorianus
tagtaccgccattattttgaatagg

SEQ ID NO: 147681 - DNA, 25 bp, Saccharomyces pastorianus
ggtaacttcaccactttgcaactag

SEQ ID NO: 147682 - DNA, 25 bp, Saccharomyces pastorianus
aggttgactgtaatgtcttcattga

SEQ ID NO: 147683 - DNA, 25 bp, Saccharomyces pastorianus
tctatgttttagtaccgccattatt

SEQ ID NO: 147684 - DNA, 25 bp, Saccharomyces pastorianus
cccaactttggactcttttcaagca

SEQ ID NO: 147685 - DNA, 25 bp, Saccharomyces pastorianus
tctacaatagtttcagccccaactt

SEQ ID NO: 147686 - DNA, 25 bp, Saccharomyces pastorianus
gaatgtttttctcctattcggtaag

SEQ ID NO: 147687 - DNA, 25 bp, Saccharomyces pastorianus
tactaggagcggtttttcacaggtt

SEQ ID NO: 147688 - DNA, 25 bp, Saccharomyces pastorianus
tcactaggacctatttgaacggatt

SEQ ID NO: 147689 - DNA, 25 bp, Saccharomyces pastorianus
gggcagcagcatattggcgataatg

SEQ ID NO: 147690 - DNA, 25 bp, Saccharomyces pastorianus
ctcattcacaattatttccctggct

SEQ ID NO: 147691 - DNA, 25 bp, Saccharomyces pastorianus
atatttccaccatattactggcgtc

SEQ ID NO: 147692 - DNA, 25 bp, Saccharomyces pastorianus
atatcatatccaaaatgcccgcggg

SEQ ID NO: 147693 - DNA, 25 bp, Saccharomyces pastorianus
tatttgtagctctgtctgactgcat

SEQ ID NO: 147694 - DNA, 25 bp, Saccharomyces pastorianus
catattactggcgtctataggcatt

SEQ ID NO: 147695 - DNA, 25 bp, Saccharomyces pastorianus
tttttaccgcattcgtcactaggac

SEQ ID NO: 147696 - DNA, 25 bp, Saccharomyces pastorianus
acgttccttcattaatatgctctga

SEQ ID NO: 147697 - DNA, 25 bp, Saccharomyces pastorianus
ttcttcaacgacgaacgttccttca

SEQ ID NO: 147698 - DNA, 25 bp, Saccharomyces pastorianus
cttttaccgtcgaatgactatgtaa

SEQ ID NO: 147699 - DNA, 25 bp, Saccharomyces pastorianus
gcaatagctctttcattgtgtctac

SEQ ID NO: 147700 - DNA, 25 bp, Saccharomyces pastorianus
tgtaatatttcaccaatcagacaac

SEQ ID NO: 147701 - DNA, 25 bp, Saccharomyces pastorianus
tgtgtctacttttaccgtcgaatga

SEQ ID NO: 147702 - DNA, 25 bp, Saccharomyces pastorianus
cattgtgtctacttttaccgtcgaa

SEQ ID NO: 147703 - DNA, 25 bp, Saccharomyces pastorianus
tagcgcaatagctctttcattgtgt

SEQ ID NO: 147704 - DNA, 25 bp, Saccharomyces pastorianus
tctacttttaccgtcgaatgactat

SEQ ID NO: 147705 - DNA, 25 bp, Saccharomyces pastorianus
gactatgtaatatttcaccaatcag

SEQ ID NO: 147706 - DNA, 25 bp, Saccharomyces pastorianus
aatggagaagaggagtttagcgcaa

SEQ ID NO: 147707 - DNA, 25 bp, Saccharomyces pastorianus
agctctttcattgtgtctactttta

SEQ ID NO: 147708 - DNA, 25 bp, Saccharomyces pastorianus
gagtttagcgcaatagctctttcat

SEQ ID NO: 147709 - DNA, 25 bp, Saccharomyces pastorianus
gctgtcgttgaatacgataacgtcg

SEQ ID NO: 147710 - DNA, 25 bp, Saccharomyces pastorianus
gaagtagctgtcgttgaatacgata

SEQ ID NO: 147711 - DNA, 25 bp, Saccharomyces pastorianus
cgataacgtcgatgatgcagatgtt

SEQ ID NO: 147712 - DNA, 25 bp, Saccharomyces pastorianus
accaactggaagtagctgtcgttga

SEQ ID NO: 147713 - DNA, 25 bp, Saccharomyces pastorianus
ggcaccaactggaagtagctgtcgt

SEQ ID NO: 147714 - DNA, 25 bp, Saccharomyces pastorianus
cgatgatgcagatgtttgtattgaa

SEQ ID NO: 147715 - DNA, 25 bp, Saccharomyces pastorianus
gaatacgataacgtcgatgatgcag

SEQ ID NO: 147716 - DNA, 25 bp, Saccharomyces pastorianus
acgtcgatgatgcagatgtttgtat

SEQ ID NO: 147717 - DNA, 25 bp, Saccharomyces pastorianus
gatgcagatgtttgtattgaaagat

SEQ ID NO: 147718 - DNA, 25 bp, Saccharomyces pastorianus
actggaagtagctgtcgttgaatac

SEQ ID NO: 147719 - DNA, 25 bp, Saccharomyces pastorianus
gcaccaactggaagtagctgtcgtt

SEQ ID NO: 147720 - DNA, 25 bp, Saccharomyces pastorianus
gtactcgttcggctattccaagaat

SEQ ID NO: 147721 - DNA, 25 bp, Saccharomyces pastorianus
aaagcaagcaacctgtattcctcac

SEQ ID NO: 147722 - DNA, 25 bp, Saccharomyces pastorianus
gaaacaccagccagatcgatttgat

SEQ ID NO: 147723 - DNA, 25 bp, Saccharomyces pastorianus
agcggtaatggcgatctcgtcgagc

SEQ ID NO: 147724 - DNA, 25 bp, Saccharomyces pastorianus
gaagctccccacatgaaaatctatt

SEQ ID NO: 147725 - DNA, 25 bp, Saccharomyces pastorianus
aggatgactcctctgctctgaattt

SEQ ID NO: 147726 - DNA, 25 bp, Saccharomyces pastorianus
gaacacgtagacatcctcggcagcg

SEQ ID NO: 147727 - DNA, 25 bp, Saccharomyces pastorianus
ctcgtggcgcattcaatgtgtcaca

SEQ ID NO: 147728 - DNA, 25 bp, Saccharomyces pastorianus
atcgatatcacctgaatggctccaa

SEQ ID NO: 147729 - DNA, 25 bp, Saccharomyces pastorianus
gctctgaatttgaccatcgactacg

SEQ ID NO: 147730 - DNA, 25 bp, Saccharomyces pastorianus
tcgagccacgccaattgtctaattt

SEQ ID NO: 147731 - DNA, 25 bp, Saccharomyces pastorianus
aagcgagagagcagaaaccacattc

SEQ ID NO: 147732 - DNA, 25 bp, Saccharomyces pastorianus
atcaacagggattaggccataagag

SEQ ID NO: 147733 - DNA, 25 bp, Saccharomyces pastorianus
gggttctgttcataacaagcgagag

SEQ ID NO: 147734 - DNA, 25 bp, Saccharomyces pastorianus
tcatcatcaacagggattaggccat

SEQ ID NO: 147735 - DNA, 25 bp, Saccharomyces pastorianus
gcgtggcaaagatttcgacaggaaa

SEQ ID NO: 147736 - DNA, 25 bp, Saccharomyces pastorianus
gagagcagaaaccacattcatcatc

SEQ ID NO: 147737 - DNA, 25 bp, Saccharomyces pastorianus
aatgagcgtggcaaagatttcgaca

SEQ ID NO: 147738 - DNA, 25 bp, Saccharomyces pastorianus
cagggattaggccataagagaagaa

SEQ ID NO: 147739 - DNA, 25 bp, Saccharomyces pastorianus
ggtattagtggcagtgcaaaaagaa

SEQ ID NO: 147740 - DNA, 25 bp, Saccharomyces pastorianus
tcgacaggaaaagagatcgggatac

SEQ ID NO: 147741 - DNA, 25 bp, Saccharomyces pastorianus
aaaccacattcatcatcaacaggga

SEQ ID NO: 147742 - DNA, 25 bp, Saccharomyces pastorianus
aattcgatcaagttacagctgttaa

SEQ ID NO: 147743 - DNA, 25 bp, Saccharomyces pastorianus
attagcgtggtggtttatttggcca

SEQ ID NO: 147744 - DNA, 25 bp, Saccharomyces pastorianus
taaattgcgcggactttgttttcta

SEQ ID NO: 147745 - DNA, 25 bp, Saccharomyces pastorianus
acgaacataattacacctggtgagc

SEQ ID NO: 147746 - DNA, 25 bp, Saccharomyces pastorianus
gagaaagacgatccccaatatcaca

SEQ ID NO: 147747 - DNA, 25 bp, Saccharomyces pastorianus
gacattcctgtagcacatacgaaca

SEQ ID NO: 147748 - DNA, 25 bp, Saccharomyces pastorianus
tgggcacttgatgacattcctgtag

SEQ ID NO: 147749 - DNA, 25 bp, Saccharomyces pastorianus
catttttgctggtatgatcatctcc

SEQ ID NO: 147750 - DNA, 25 bp, Saccharomyces pastorianus
aacgttgttgcctgtcaattcgatc

SEQ ID NO: 147751 - DNA, 25 bp, Saccharomyces pastorianus
cactgaagttggtatccgacgtata

SEQ ID NO: 147752 - DNA, 25 bp, Saccharomyces pastorianus
gccatccaggtgcttttagatcatg

SEQ ID NO: 147753 - DNA, 25 bp, Saccharomyces pastorianus
ttttacaatccattaggcccagagg

SEQ ID NO: 147754 - DNA, 25 bp, Saccharomyces pastorianus
gtggtgcttcaggttcaggcaagac

SEQ ID NO: 147755 - DNA, 25 bp, Saccharomyces pastorianus
tacgatcgtcgattgctggatttga

SEQ ID NO: 147756 - DNA, 25 bp, Saccharomyces pastorianus
cgaagggatctacgccctttacgat

SEQ ID NO: 147757 - DNA, 25 bp, Saccharomyces pastorianus
cgttgctgctaagattgtgtcgtca

SEQ ID NO: 147758 - DNA, 25 bp, Saccharomyces pastorianus
ggacagagccagagcctttaaaaat

SEQ ID NO: 147759 - DNA, 25 bp, Saccharomyces pastorianus
ttgtgtcgtcaattaatgttccctg

SEQ ID NO: 147760 - DNA, 25 bp, Saccharomyces pastorianus
cgatttcgacgagccaaatgccatc

SEQ ID NO: 147761 - DNA, 25 bp, Saccharomyces pastorianus
tcgtccaccacaatagagttcctga

SEQ ID NO: 147762 - DNA, 25 bp, Saccharomyces pastorianus
atatcccagtttatagcttcgtcca

SEQ ID NO: 147763 - DNA, 25 bp, Saccharomyces pastorianus
gacgctgatttggatgtctgcttag

SEQ ID NO: 147764 - DNA, 25 bp, Saccharomyces pastorianus
gactattgatcgttatagccgccct

SEQ ID NO: 147765 - DNA, 25 bp, Saccharomyces pastorianus
aaatctccggtatctttggtgaaat

SEQ ID NO: 147766 - DNA, 25 bp, Saccharomyces pastorianus
gagaggtgtaccagccagtttgtta

SEQ ID NO: 147767 - DNA, 25 bp, Saccharomyces pastorianus
gtgagatcggttccaatctaccttc

SEQ ID NO: 147768 - DNA, 25 bp, Saccharomyces pastorianus
ggtgtctttcaaaccaaatctccgg

SEQ ID NO: 147769 - DNA, 25 bp, Saccharomyces pastorianus
ttgtaatggccacttttgtctccca

SEQ ID NO: 147770 - DNA, 25 bp, Saccharomyces pastorianus
atagccgccctattatgctctagtg

SEQ ID NO: 147771 - DNA, 25 bp, Saccharomyces pastorianus
agtagtcttcttcggtacaggtctt

SEQ ID NO: 147772 - DNA, 25 bp, Saccharomyces pastorianus
tgctctagtgctatgggtcttccaa

SEQ ID NO: 147773 - DNA, 25 bp, Saccharomyces pastorianus
attgtgttgatcttcggtctagtga

SEQ ID NO: 147774 - DNA, 25 bp, Saccharomyces pastorianus
gacaatcgttgttttggccatggga

SEQ ID NO: 147775 - DNA, 25 bp, Saccharomyces pastorianus
agcgtgaattatcctctcatttgag

SEQ ID NO: 147776 - DNA, 25 bp, Saccharomyces pastorianus
cgggttctccaagatctgcaagaaa

SEQ ID NO: 147777 - DNA, 25 bp, Saccharomyces pastorianus
ttgaacaagggcacgcgtcgaccat

SEQ ID NO: 147778 - DNA, 25 bp, Saccharomyces pastorianus
agttgagttccagtcaattgcgccc

SEQ ID NO: 147779 - DNA, 25 bp, Saccharomyces pastorianus
gaagtcctcgatttccaggatgctg

SEQ ID NO: 147780 - DNA, 25 bp, Saccharomyces pastorianus
aattccattcgcatgtcttcaatcc

SEQ ID NO: 147781 - DNA, 25 bp, Saccharomyces pastorianus
ggtattatcgctccatcaacggact

SEQ ID NO: 147782 - DNA, 25 bp, Saccharomyces pastorianus
tgaactcatgcatttaccacccaag

SEQ ID NO: 147783 - DNA, 25 bp, Saccharomyces pastorianus
cgtttaatttggacgctgaccgaat

SEQ ID NO: 147784 - DNA, 25 bp, Saccharomyces pastorianus
gattcagcatcacattaccgagacc

SEQ ID NO: 147785 - DNA, 25 bp, Saccharomyces pastorianus
tcctcacttacgctagcttgaacaa

SEQ ID NO: 147786 - DNA, 25 bp, Saccharomyces pastorianus
gttcttcttccaaatgctgcaaatg

SEQ ID NO: 147787 - DNA, 25 bp, Saccharomyces pastorianus
gttagttgggcagacttcagtagaa

SEQ ID NO: 147788 - DNA, 25 bp, Saccharomyces pastorianus
caatgagagcattggctgtgcgcaa

SEQ ID NO: 147789 - DNA, 25 bp, Saccharomyces pastorianus
tggattgctcgttgatatcgtccca

SEQ ID NO: 147790 - DNA, 25 bp, Saccharomyces pastorianus
ttctggcttggtatctgcatgggac

SEQ ID NO: 147791 - DNA, 25 bp, Saccharomyces pastorianus
tggctgtgcgcaattctgaatggac

SEQ ID NO: 147792 - DNA, 25 bp, Saccharomyces pastorianus
tttttcttaagttccgtcgttcatg

SEQ ID NO: 147793 - DNA, 25 bp, Saccharomyces pastorianus
caaatcttgatgtatcctgtagcaa

SEQ ID NO: 147794 - DNA, 25 bp, Saccharomyces pastorianus
agcaactttgatgacctttttctta

SEQ ID NO: 147795 - DNA, 25 bp, Saccharomyces pastorianus
tcgtcccagggtttatcgtgatgta

SEQ ID NO: 147796 - DNA, 25 bp, Saccharomyces pastorianus
ttagaaaagatctgcgccatcttcg

SEQ ID NO: 147797 - DNA, 25 bp, Saccharomyces pastorianus
attgggaatcctattgtgccagaac

SEQ ID NO: 147798 - DNA, 25 bp, Saccharomyces pastorianus
gaagcatcatgcatgttctgaaatc

SEQ ID NO: 147799 - DNA, 25 bp, Saccharomyces pastorianus
aatcagagcctcttcgttaagtggg

SEQ ID NO: 147800 - DNA, 25 bp, Saccharomyces pastorianus
gcatttagaggatacgctttcgcat

SEQ ID NO: 147801 - DNA, 25 bp, Saccharomyces pastorianus
gacgattcgaagatcatctgcgatt

SEQ ID NO: 147802 - DNA, 25 bp, Saccharomyces pastorianus
aagtttgggacagttgcttcgccga

SEQ ID NO: 147803 - DNA, 25 bp, Saccharomyces pastorianus
attactgtcccgactggaagggcgg

SEQ ID NO: 147804 - DNA, 25 bp, Saccharomyces pastorianus
tagtgtttcagggaaccccaactgc

SEQ ID NO: 147805 - DNA, 25 bp, Saccharomyces pastorianus
aagggcggtggctttcatcctgaat

SEQ ID NO: 147806 - DNA, 25 bp, Saccharomyces pastorianus
tcccacagttcgctttatggtacaa

SEQ ID NO: 147807 - DNA, 25 bp, Saccharomyces pastorianus
gatgcttaaatactctcccacagtt

SEQ ID NO: 147808 - DNA, 25 bp, Saccharomyces pastorianus
gcagccaacactatccacataataa

SEQ ID NO: 147809 - DNA, 25 bp, Saccharomyces pastorianus
tctccggactctacatatgtggcga

SEQ ID NO: 147810 - DNA, 25 bp, Saccharomyces pastorianus
gcattccatgcttttcaattacgcg

SEQ ID NO: 147811 - DNA, 25 bp, Saccharomyces pastorianus
atgacaattccatagctcttgtgaa

SEQ ID NO: 147812 - DNA, 25 bp, Saccharomyces pastorianus
aacttcatccttattgtgctgcttt

SEQ ID NO: 147813 - DNA, 25 bp, Saccharomyces pastorianus
tctgtacctagcgtagattccataa

SEQ ID NO: 147814 - DNA, 25 bp, Saccharomyces pastorianus
gtggcgagtgtttcggcagccaaca

SEQ ID NO: 147815 - DNA, 25 bp, Saccharomyces pastorianus
ctcttcgccctacgtagttgatgaa

SEQ ID NO: 147816 - DNA, 25 bp, Saccharomyces pastorianus
ttacagaggtcactatctctccgga

SEQ ID NO: 147817 - DNA, 25 bp, Saccharomyces pastorianus
tttacagttctcctataagcacaat

SEQ ID NO: 147818 - DNA, 25 bp, Saccharomyces pastorianus
gtgctgctttcttacattttacagt

SEQ ID NO: 147819 - DNA, 25 bp, Saccharomyces pastorianus
ggagaccagtgagacgccacttgaa

SEQ ID NO: 147820 - DNA, 25 bp, Saccharomyces pastorianus
ataggttacatttcatcccaggaac

SEQ ID NO: 147821 - DNA, 25 bp, Saccharomyces pastorianus
tgttggctccaaaactcccggaaga

SEQ ID NO: 147822 - DNA, 25 bp, Saccharomyces pastorianus
taggccaggcagagtttccatgatt

SEQ ID NO: 147823 - DNA, 25 bp, Saccharomyces pastorianus
gattatgcttggtatttcggtattg

SEQ ID NO: 147824 - DNA, 25 bp, Saccharomyces pastorianus
atagaaggtagctccgtttcttcct

SEQ ID NO: 147825 - DNA, 25 bp, Saccharomyces pastorianus
gttactcgccagaacgcgattttga

SEQ ID NO: 147826 - DNA, 25 bp, Saccharomyces pastorianus
ttttctacgttttggccaagtacag

SEQ ID NO: 147827 - DNA, 25 bp, Saccharomyces pastorianus
atataatcagcttcaccatccttta

SEQ ID NO: 147828 - DNA, 25 bp, Saccharomyces pastorianus
aggcttcaagattaccaaaacggcg

SEQ ID NO: 147829 - DNA, 25 bp, Saccharomyces pastorianus
gtgtttggccaagttaccgccggat

SEQ ID NO: 147830 - DNA, 25 bp, Saccharomyces pastorianus
tgcataacggctctgccattacctg

SEQ ID NO: 147831 - DNA, 25 bp, Saccharomyces pastorianus
taacggctctgccattacctgtgga

SEQ ID NO: 147832 - DNA, 25 bp, Saccharomyces pastorianus
tatgtggcattcatgtttagttgca

SEQ ID NO: 147833 - DNA, 25 bp, Saccharomyces pastorianus
gtggcattcatgtttagttgcataa

SEQ ID NO: 147834 - DNA, 25 bp, Saccharomyces pastorianus
atctttatgtggcattcatgtttag

SEQ ID NO: 147835 - DNA, 25 bp, Saccharomyces pastorianus
ttagttgcataacggctctgccatt

SEQ ID NO: 147836 - DNA, 25 bp, Saccharomyces pastorianus
tttctttatctttatgtggcattca

SEQ ID NO: 147837 - DNA, 25 bp, Saccharomyces pastorianus
gttgcataacggctctgccattacc

SEQ ID NO: 147838 - DNA, 25 bp, Saccharomyces pastorianus
cttttttctttatctttatgtggca

SEQ ID NO: 147839 - DNA, 25 bp, Saccharomyces pastorianus
gtttagttgcataacggctctgcca

SEQ ID NO: 147840 - DNA, 25 bp, Saccharomyces pastorianus
tcatgtttagttgcataacggctct

SEQ ID NO: 147841 - DNA, 25 bp, Saccharomyces pastorianus
taaacccgaaaacatcctactagat

SEQ ID NO: 147842 - DNA, 25 bp, Saccharomyces pastorianus
cataccccacaatttcctactaagg

SEQ ID NO: 147843 - DNA, 25 bp, Saccharomyces pastorianus
atcactggtagacggccatgggcta

SEQ ID NO: 147844 - DNA, 25 bp, Saccharomyces pastorianus
atggctccagaatccatcactggat

SEQ ID NO: 147845 - DNA, 25 bp, Saccharomyces pastorianus
gaactcctatgtacatggctccaga

SEQ ID NO: 147846 - DNA, 25 bp, Saccharomyces pastorianus
gatgttacccatgtttctgattcaa

SEQ ID NO: 147847 - DNA, 25 bp, Saccharomyces pastorianus
gtatgttgattttggtgctgctaaa

SEQ ID NO: 147848 - DNA, 25 bp, Saccharomyces pastorianus
atttgcatgaatccggcattgttca

SEQ ID NO: 147849 - DNA, 25 bp, Saccharomyces pastorianus
atgaagtgtcgtctgctggtatgaa

SEQ ID NO: 147850 - DNA, 25 bp, Saccharomyces pastorianus
tcatgtaccatgttgctgcaggaca

SEQ ID NO: 147851 - DNA, 25 bp, Saccharomyces pastorianus
atcactggatctaccaccaaagaca

SEQ ID NO: 147852 - DNA, 25 bp, Saccharomyces pastorianus
ataatactaattcgcctatcttacg

SEQ ID NO: 147853 - DNA, 25 bp, Saccharomyces pastorianus
atacagaatccaaccttgatgatga

SEQ ID NO: 147854 - DNA, 25 bp, Saccharomyces pastorianus
aaagatataatactaattcgcctat

SEQ ID NO: 147855 - DNA, 25 bp, Saccharomyces pastorianus
ctaattcgcctatcttacgcgaaga

SEQ ID NO: 147856 - DNA, 25 bp, Saccharomyces pastorianus
actaattcgcctatcttacgcgaag

SEQ ID NO: 147857 - DNA, 25 bp, Saccharomyces pastorianus
atactaattcgcctatcttacgcga

SEQ ID NO: 147858 - DNA, 25 bp, Saccharomyces pastorianus
tcgcctatcttacgcgaagaaaata

SEQ ID NO: 147859 - DNA, 25 bp, Saccharomyces pastorianus
aatacagaatccaaccttgatgatg

SEQ ID NO: 147860 - DNA, 25 bp, Saccharomyces pastorianus
attcgcctatcttacgcgaagaaaa

SEQ ID NO: 147861 - DNA, 25 bp, Saccharomyces pastorianus
cttacgcgaagaaaatacagaatcc

SEQ ID NO: 147862 - DNA, 25 bp, Saccharomyces pastorianus
aattcgcctatcttacgcgaagaaa

SEQ ID NO: 147863 - DNA, 25 bp, Saccharomyces pastorianus
ctctgaggatttttagggattctac

SEQ ID NO: 147864 - DNA, 25 bp, Saccharomyces pastorianus
gataacaccaccgtgaatttggatg

SEQ ID NO: 147865 - DNA, 25 bp, Saccharomyces pastorianus
gaggctgcagagactatcaaatcac

SEQ ID NO: 147866 - DNA, 25 bp, Saccharomyces pastorianus
agaaatcatggcctttaaactagaa

SEQ ID NO: 147867 - DNA, 25 bp, Saccharomyces pastorianus
gagtcttaaatctatggcctaacat

SEQ ID NO: 147868 - DNA, 25 bp, Saccharomyces pastorianus
tttcgccactaattgtaaacgcttt

SEQ ID NO: 147869 - DNA, 25 bp, Saccharomyces pastorianus
tattctttccattagcaccatggat

SEQ ID NO: 147870 - DNA, 25 bp, Saccharomyces pastorianus
aagagctagaaagcactaccgaagt

SEQ ID NO: 147871 - DNA, 25 bp, Saccharomyces pastorianus
atttggatgatccagccgttttcgc

SEQ ID NO: 147872 - DNA, 25 bp, Saccharomyces pastorianus
atatgagtgctgacgaggctgcaga

SEQ ID NO: 147873 - DNA, 25 bp, Saccharomyces pastorianus
ggattctactgactccgtatttcaa

SEQ ID NO: 147874 - DNA, 25 bp, Saccharomyces pastorianus
gacctttacgagttggttcctgacg

SEQ ID NO: 147875 - DNA, 25 bp, Saccharomyces pastorianus
gaaccagctggcaactcggtgcagg

SEQ ID NO: 147876 - DNA, 25 bp, Saccharomyces pastorianus
aagaatatgccaccgtttaccaact

SEQ ID NO: 147877 - DNA, 25 bp, Saccharomyces pastorianus
gcttcctccgggatctatgacggga

SEQ ID NO: 147878 - DNA, 25 bp, Saccharomyces pastorianus
attgatgtccttaaacactcgcttc

SEQ ID NO: 147879 - DNA, 25 bp, Saccharomyces pastorianus
cacgtggtgtttacagcggtgtcac

SEQ ID NO: 147880 - DNA, 25 bp, Saccharomyces pastorianus
gcacatggattgacctctgccagta

SEQ ID NO: 147881 - DNA, 25 bp, Saccharomyces pastorianus
atgtatgtattcctacaacggcgga

SEQ ID NO: 147882 - DNA, 25 bp, Saccharomyces pastorianus
gggcataacagtcttaagcacacta

SEQ ID NO: 147883 - DNA, 25 bp, Saccharomyces pastorianus
aactcgttagcgtcgtaaaggcaca

SEQ ID NO: 147884 - DNA, 25 bp, Saccharomyces pastorianus
ggcaaaagccacacgaatcctgaag

SEQ ID NO: 147885 - DNA, 25 bp, Saccharomyces pastorianus
tggtacaaagaaacccggctccatt

SEQ ID NO: 147886 - DNA, 25 bp, Saccharomyces pastorianus
tgcccgataaacttgactacgctaa

SEQ ID NO: 147887 - DNA, 25 bp, Saccharomyces pastorianus
ggcccaagtatcttccagaggagat

SEQ ID NO: 147888 - DNA, 25 bp, Saccharomyces pastorianus
gcctggctcccttgaggtaatacat

SEQ ID NO: 147889 - DNA, 25 bp, Saccharomyces pastorianus
atgatgagaattcccttgttcccga

SEQ ID NO: 147890 - DNA, 25 bp, Saccharomyces pastorianus
caaagttgtaccatctgcggtgata

SEQ ID NO: 147891 - DNA, 25 bp, Saccharomyces pastorianus
aggtcagtacattgcatgcggccgt

SEQ ID NO: 147892 - DNA, 25 bp, Saccharomyces pastorianus
gtcaagattcggatttgcctggctc

SEQ ID NO: 147893 - DNA, 25 bp, Saccharomyces pastorianus
atgtgtctcacaacgcaaaccaaag

SEQ ID NO: 147894 - DNA, 25 bp, Saccharomyces pastorianus
gatattaagcaatccctgtcctggc

SEQ ID NO: 147895 - DNA, 25 bp, Saccharomyces pastorianus
ggaggatttccagaccttggtacaa

SEQ ID NO: 147896 - DNA, 25 bp, Saccharomyces pastorianus
catgctttgtagacgacgatgcttt

SEQ ID NO: 147897 - DNA, 25 bp, Saccharomyces pastorianus
gtgtttcatgctttgtagacgacga

SEQ ID NO: 147898 - DNA, 25 bp, Saccharomyces pastorianus
cgatgctttgaaagatgtctttgta

SEQ ID NO: 147899 - DNA, 25 bp, Saccharomyces pastorianus
gccggtcgtgtttcatgctttgtag

SEQ ID NO: 147900 - DNA, 25 bp, Saccharomyces pastorianus
gaaagatgtctttgtaattaagaag

SEQ ID NO: 147901 - DNA, 25 bp, Saccharomyces pastorianus
cggtcgtgtttcatgctttgtagac

SEQ ID NO: 147902 - DNA, 25 bp, Saccharomyces pastorianus
cgccggtcgtgtttcatgctttgta

SEQ ID NO: 147903 - DNA, 25 bp, Saccharomyces pastorianus
ctttgtagacgacgatgctttgaaa

SEQ ID NO: 147904 - DNA, 25 bp, Saccharomyces pastorianus
ccgccggtcgtgtttcatgctttgt

SEQ ID NO: 147905 - DNA, 25 bp, Saccharomyces pastorianus
gccgccggtcgtgtttcatgctttg

SEQ ID NO: 147906 - DNA, 25 bp, Saccharomyces pastorianus
ccggtcgtgtttcatgctttgtaga

SEQ ID NO: 147907 - DNA, 25 bp, Saccharomyces pastorianus
atctacctctgtggaatcgactgtt

SEQ ID NO: 147908 - DNA, 25 bp, Saccharomyces pastorianus
ggtacctcaaccatttcaactagtg

SEQ ID NO: 147909 - DNA, 25 bp, Saccharomyces pastorianus
gaatcttcatcattgactccgacgg

SEQ ID NO: 147910 - DNA, 25 bp, Saccharomyces pastorianus
tgactccgacggtatcttctatttc

SEQ ID NO: 147911 - DNA, 25 bp, Saccharomyces pastorianus
catcagagattttgcaacccacttc

SEQ ID NO: 147912 - DNA, 25 bp, Saccharomyces pastorianus
cacttcttccacagttattgctaca

SEQ ID NO: 147913 - DNA, 25 bp, Saccharomyces pastorianus
atgggcagtggatcgcaaacgcgtt

SEQ ID NO: 147914 - DNA, 25 bp, Saccharomyces pastorianus
gcacgctaccggtaagtatcatgta

SEQ ID NO: 147915 - DNA, 25 bp, Saccharomyces pastorianus
gtgtcgaacagtcaccagttaccac

SEQ ID NO: 147916 - DNA, 25 bp, Saccharomyces pastorianus
ttattatcgacatcggtcccttcat

SEQ ID NO: 147917 - DNA, 25 bp, Saccharomyces pastorianus
aagtttccactacttcaatctccat

SEQ ID NO: 147918 - DNA, 25 bp, Saccharomyces pastorianus
tgccgccgaaataactccttcaata

SEQ ID NO: 147919 - DNA, 25 bp, Saccharomyces pastorianus
acatccactatcgttcaagctgaca

SEQ ID NO: 147920 - DNA, 25 bp, Saccharomyces pastorianus
tgtccattgacggtatccacttcat

SEQ ID NO: 147921 - DNA, 25 bp, Saccharomyces pastorianus
tgttacaactacagtttcacccgcg

SEQ ID NO: 147922 - DNA, 25 bp, Saccharomyces pastorianus
tacgctactaccctatccagattta

SEQ ID NO: 147923 - DNA, 25 bp, Saccharomyces pastorianus
gttcaagctgacactacgacattgt

SEQ ID NO: 147924 - DNA, 25 bp, Saccharomyces pastorianus
actccttcaatatcgtacgctacta

SEQ ID NO: 147925 - DNA, 25 bp, Saccharomyces pastorianus
tattgccttggcatctgatccagaa

SEQ ID NO: 147926 - DNA, 25 bp, Saccharomyces pastorianus
gaaacgattctagtgacgataacca

SEQ ID NO: 147927 - DNA, 25 bp, Saccharomyces pastorianus
gacattatctttcgctcattttacc

SEQ ID NO: 147928 - DNA, 25 bp, Saccharomyces pastorianus
ctcattttacctacctgttcacaat

SEQ ID NO: 147929 - DNA, 25 bp, Saccharomyces pastorianus
ttctgccaattgagcaagctgtcta

SEQ ID NO: 147930 - DNA, 25 bp, Saccharomyces pastorianus
ggaccagcagcttgccgatgagtta

SEQ ID NO: 147931 - DNA, 25 bp, Saccharomyces pastorianus
tacggatttcgccaagtaccaaggt

SEQ ID NO: 147932 - DNA, 25 bp, Saccharomyces pastorianus
cacaagcagggacggcagcagcaat

SEQ ID NO: 147933 - DNA, 25 bp, Saccharomyces pastorianus
gataatccaggagttgcagaaccgt

SEQ ID NO: 147934 - DNA, 25 bp, Saccharomyces pastorianus
gttgtacgacttagacctggtgtat

SEQ ID NO: 147935 - DNA, 25 bp, Saccharomyces pastorianus
gaatggcggacaatcttgcacaagc

SEQ ID NO: 147936 - DNA, 25 bp, Saccharomyces pastorianus
gcagcaatagttcagcggaccagca

SEQ ID NO: 147937 - DNA, 25 bp, Saccharomyces pastorianus
agtagcatgcgcaagttgtacgact

SEQ ID NO: 147938 - DNA, 25 bp, Saccharomyces pastorianus
agctgtctatgcataagttcccaaa

SEQ ID NO: 147939 - DNA, 25 bp, Saccharomyces pastorianus
gtgggtccatcgagtagcatgcgca

SEQ ID NO: 147940 - DNA, 25 bp, Saccharomyces pastorianus
tttccttgagtgacgccaacggcaa

SEQ ID NO: 147941 - DNA, 25 bp, Saccharomyces pastorianus
atacatgcccaatttctacgactta

SEQ ID NO: 147942 - DNA, 25 bp, Saccharomyces pastorianus
gtccctcaacgtggcagttcaattt

SEQ ID NO: 147943 - DNA, 25 bp, Saccharomyces pastorianus
aatacaacttggtctttccttgagt

SEQ ID NO: 147944 - DNA, 25 bp, Saccharomyces pastorianus
ggtcgattaccactatcagacaatg

SEQ ID NO: 147945 - DNA, 25 bp, Saccharomyces pastorianus
gaattttcgcagcttctaatggact

SEQ ID NO: 147946 - DNA, 25 bp, Saccharomyces pastorianus
gcagcaatattcactaaccacactt

SEQ ID NO: 147947 - DNA, 25 bp, Saccharomyces pastorianus
atgagggccaacgtagacttcttaa

SEQ ID NO: 147948 - DNA, 25 bp, Saccharomyces pastorianus
acttggatcacataccatgcggcat

SEQ ID NO: 147949 - DNA, 25 bp, Saccharomyces pastorianus
ggccgatcggcactttcaggtcgaa

SEQ ID NO: 147950 - DNA, 25 bp, Saccharomyces pastorianus
gcggcatatgatctaggtttcctga

SEQ ID NO: 147951 - DNA, 25 bp, Saccharomyces pastorianus
ttggttcgtccttccacctgaaaag

SEQ ID NO: 147952 - DNA, 25 bp, Saccharomyces pastorianus
gtaaagactccgaagaagacatttt

SEQ ID NO: 147953 - DNA, 25 bp, Saccharomyces pastorianus
cattttattcagaggtgttgtcaga

SEQ ID NO: 147954 - DNA, 25 bp, Saccharomyces pastorianus
ggaaagaacttacgagatctcagga

SEQ ID NO: 147955 - DNA, 25 bp, Saccharomyces pastorianus
gatgccacggagtttattgaaattc

SEQ ID NO: 147956 - DNA, 25 bp, Saccharomyces pastorianus
gagtctggtgtttctaagcaaatat

SEQ ID NO: 147957 - DNA, 25 bp, Saccharomyces pastorianus
acgtcacacacccagaacaatatat

SEQ ID NO: 147958 - DNA, 25 bp, Saccharomyces pastorianus
ttgattgtccaggtattgtgccgcc

SEQ ID NO: 147959 - DNA, 25 bp, Saccharomyces pastorianus
gttgtcagagtcgaacacgtcacac

SEQ ID NO: 147960 - DNA, 25 bp, Saccharomyces pastorianus
ttgtgccgccttctagtaaagactc

SEQ ID NO: 147961 - DNA, 25 bp, Saccharomyces pastorianus
gagcctgatgagtctggtgtttcta

SEQ ID NO: 147962 - DNA, 25 bp, Saccharomyces pastorianus
gatgaatccccaaaagccagaattt

SEQ ID NO: 147963 - DNA, 25 bp, Saccharomyces pastorianus
attcgtctgacgtggtaatacatgt

SEQ ID NO: 147964 - DNA, 25 bp, Saccharomyces pastorianus
cagatcgtcgttggttcggtaacac

SEQ ID NO: 147965 - DNA, 25 bp, Saccharomyces pastorianus
gatatctcaggacgcactgcagcat

SEQ ID NO: 147966 - DNA, 25 bp, Saccharomyces pastorianus
gcaagggatccattgggtacccgtt

SEQ ID NO: 147967 - DNA, 25 bp, Saccharomyces pastorianus
ataccggatgcgagggtccaaccag

SEQ ID NO: 147968 - DNA, 25 bp, Saccharomyces pastorianus
gaaagagaccacgtcttgctgcatc

SEQ ID NO: 147969 - DNA, 25 bp, Saccharomyces pastorianus
tacccgttgtaagtccgtggaagag

SEQ ID NO: 147970 - DNA, 25 bp, Saccharomyces pastorianus
tatgctgatgcgtttgggcccaaag

SEQ ID NO: 147971 - DNA, 25 bp, Saccharomyces pastorianus
aaatgggtggacctccgcagcaaaa

SEQ ID NO: 147972 - DNA, 25 bp, Saccharomyces pastorianus
aaataagcttcccatgtcattgttg

SEQ ID NO: 147973 - DNA, 25 bp, Saccharomyces pastorianus
aatgtactacggcacatgatcagga

SEQ ID NO: 147974 - DNA, 25 bp, Saccharomyces pastorianus
caggatatggcgttgcatgaactgc

SEQ ID NO: 147975 - DNA, 25 bp, Saccharomyces pastorianus
ggttgcacaatgtactacggcacat

SEQ ID NO: 147976 - DNA, 25 bp, Saccharomyces pastorianus
gtactacggcacatgatcaggatat

SEQ ID NO: 147977 - DNA, 25 bp, Saccharomyces pastorianus
cggcacatgatcaggatatggcgtt

SEQ ID NO: 147978 - DNA, 25 bp, Saccharomyces pastorianus
tgcacaatgtactacggcacatgat

SEQ ID NO: 147979 - DNA, 25 bp, Saccharomyces pastorianus
ctacggcacatgatcaggatatggc

SEQ ID NO: 147980 - DNA, 25 bp, Saccharomyces pastorianus
ggatatggcgttgcatgaactgcca

SEQ ID NO: 147981 - DNA, 25 bp, Saccharomyces pastorianus
ggcgttgcatgaactgccatcggtg

SEQ ID NO: 147982 - DNA, 25 bp, Saccharomyces pastorianus
acaggttgcacaatgtactacggca

SEQ ID NO: 147983 - DNA, 25 bp, Saccharomyces pastorianus
acatgatcaggatatggcgttgcat

SEQ ID NO: 147984 - DNA, 25 bp, Saccharomyces pastorianus
tatctccgctccaggccatggagta

SEQ ID NO: 147985 - DNA, 25 bp, Saccharomyces pastorianus
cgtagttcctgaagagtggagcgca

SEQ ID NO: 147986 - DNA, 25 bp, Saccharomyces pastorianus
acttatgcgctgcagaagcctctat

SEQ ID NO: 147987 - DNA, 25 bp, Saccharomyces pastorianus
tggaaacccgtacaaactggaattg

SEQ ID NO: 147988 - DNA, 25 bp, Saccharomyces pastorianus
gtacgaacctaatgtcgacatcagg

SEQ ID NO: 147989 - DNA, 25 bp, Saccharomyces pastorianus
gtcgacatcaggttgttggatttcg

SEQ ID NO: 147990 - DNA, 25 bp, Saccharomyces pastorianus
gtatcaacattattggtacacaaat

SEQ ID NO: 147991 - DNA, 25 bp, Saccharomyces pastorianus
ttggatttcgtagttcctgaagagt

SEQ ID NO: 147992 - DNA, 25 bp, Saccharomyces pastorianus
gatgttggtaaaacctttgtatcaa

SEQ ID NO: 147993 - DNA, 25 bp, Saccharomyces pastorianus
caggccatggagtacgaacctaatg

SEQ ID NO: 147994 - DNA, 25 bp, Saccharomyces pastorianus
accggtacagacactgatgttggta

SEQ ID NO: 147995 - DNA, 25 bp, Saccharomyces pastorianus
tagagtttacagattctcaaaagaa

SEQ ID NO: 147996 - DNA, 25 bp, Saccharomyces pastorianus
tataggaagggacagtacggaaaat

SEQ ID NO: 147997 - DNA, 25 bp, Saccharomyces pastorianus
tacagctattgcacacattatagga

SEQ ID NO: 147998 - DNA, 25 bp, Saccharomyces pastorianus
ttgcacacattataggaagggacag

SEQ ID NO: 147999 - DNA, 25 bp, Saccharomyces pastorianus
gaagggacagtacggaaaattgata

SEQ ID NO: 148000 - DNA, 25 bp, Saccharomyces pastorianus
gacagtacggaaaattgatagagtt

SEQ ID NO: 148001 - DNA, 25 bp, Saccharomyces pastorianus
cagctattgcacacattataggaag

SEQ ID NO: 148002 - DNA, 25 bp, Saccharomyces pastorianus
gatagagtttacagattctcaaaag

SEQ ID NO: 148003 - DNA, 25 bp, Saccharomyces pastorianus
cacacattataggaagggacagtac

SEQ ID NO: 148004 - DNA, 25 bp, Saccharomyces pastorianus
acattataggaagggacagtacgga

SEQ ID NO: 148005 - DNA, 25 bp, Saccharomyces pastorianus
tattgcacacattataggaagggac

SEQ ID NO: 148006 - DNA, 25 bp, Saccharomyces pastorianus
tgacgctccgcgttaactgggacac

SEQ ID NO: 148007 - DNA, 25 bp, Saccharomyces pastorianus
ggtacaactttttggcttcgagcat

SEQ ID NO: 148008 - DNA, 25 bp, Saccharomyces pastorianus
gaagctatttcgctccaaagttaat

SEQ ID NO: 148009 - DNA, 25 bp, Saccharomyces pastorianus
attggagcatccgaagccttgaagc

SEQ ID NO: 148010 - DNA, 25 bp, Saccharomyces pastorianus
attttatgccactattcctgacgct

SEQ ID NO: 148011 - DNA, 25 bp, Saccharomyces pastorianus
ggcaccgattgtattagcagctctt

SEQ ID NO: 148012 - DNA, 25 bp, Saccharomyces pastorianus
tatggtcgcatctatacttggtgtg

SEQ ID NO: 148013 - DNA, 25 bp, Saccharomyces pastorianus
aggtccagttgatgccttcaattgg

SEQ ID NO: 148014 - DNA, 25 bp, Saccharomyces pastorianus
agcccttttttccatgtacatcgac

SEQ ID NO: 148015 - DNA, 25 bp, Saccharomyces pastorianus
aataaacgtcgggtgctcctgcggc

SEQ ID NO: 148016 - DNA, 25 bp, Saccharomyces pastorianus
agcggtcaagtttttctgtccatct

SEQ ID NO: 148017 - DNA, 25 bp, Saccharomyces pastorianus
agaccagcctgccactagcaatatt

SEQ ID NO: 148018 - DNA, 25 bp, Saccharomyces pastorianus
gaaaaggtcctacttactcttcgct

SEQ ID NO: 148019 - DNA, 25 bp, Saccharomyces pastorianus
aagaagatgcttacagacccgaaca

SEQ ID NO: 148020 - DNA, 25 bp, Saccharomyces pastorianus
taccaagtctgcatttcaacgcacg

SEQ ID NO: 148021 - DNA, 25 bp, Saccharomyces pastorianus
tatccagtttcacaagtcaagacag

SEQ ID NO: 148022 - DNA, 25 bp, Saccharomyces pastorianus
gcaggtgtagcacgcttttcttcaa

SEQ ID NO: 148023 - DNA, 25 bp, Saccharomyces pastorianus
gacgcattgccagcacgtagtgcta

SEQ ID NO: 148024 - DNA, 25 bp, Saccharomyces pastorianus
gctgcttcagggtcagttttcagat

SEQ ID NO: 148025 - DNA, 25 bp, Saccharomyces pastorianus
gaacaagagcacacgtcacagatag

SEQ ID NO: 148026 - DNA, 25 bp, Saccharomyces pastorianus
agcacgtagtgctattcacaagcct

SEQ ID NO: 148027 - DNA, 25 bp, Saccharomyces pastorianus
atttcaacgcacgaaggcaggtgta

SEQ ID NO: 148028 - DNA, 25 bp, Saccharomyces pastorianus
actcttcgacccagtagattcgtat

SEQ ID NO: 148029 - DNA, 25 bp, Saccharomyces pastorianus
tcatatgctacctatcacaccagtt

SEQ ID NO: 148030 - DNA, 25 bp, Saccharomyces pastorianus
tatatccacggtattcatatgctac

SEQ ID NO: 148031 - DNA, 25 bp, Saccharomyces pastorianus
gacaacacagttgagcctgaagaaa

SEQ ID NO: 148032 - DNA, 25 bp, Saccharomyces pastorianus
gtgattcaacttttgattcatccac

SEQ ID NO: 148033 - DNA, 25 bp, Saccharomyces pastorianus
aagctgaatcaagcactcttcgacc

SEQ ID NO: 148034 - DNA, 25 bp, Saccharomyces pastorianus
gattcgtatgcatttttcagtgatt

SEQ ID NO: 148035 - DNA, 25 bp, Saccharomyces pastorianus
gaaagcggctggacaggcatattga

SEQ ID NO: 148036 - DNA, 25 bp, Saccharomyces pastorianus
agtttcttctaatattcgttctgag

SEQ ID NO: 148037 - DNA, 25 bp, Saccharomyces pastorianus
ggatgcaatgaacgactatttctat

SEQ ID NO: 148038 - DNA, 25 bp, Saccharomyces pastorianus
tcgttctgagactttcgtcgaagaa

SEQ ID NO: 148039 - DNA, 25 bp, Saccharomyces pastorianus
aatcggcctttgatattctgctaca

SEQ ID NO: 148040 - DNA, 25 bp, Saccharomyces pastorianus
ttagctgaagttgccaattccgaat

SEQ ID NO: 148041 - DNA, 25 bp, Saccharomyces pastorianus
tgaatggtacttgggctgccgacaa

SEQ ID NO: 148042 - DNA, 25 bp, Saccharomyces pastorianus
atgggcagctggactttatgaaaac

SEQ ID NO: 148043 - DNA, 25 bp, Saccharomyces pastorianus
tccaccagcacgcaatacgattttg

SEQ ID NO: 148044 - DNA, 25 bp, Saccharomyces pastorianus
aacggtctccgaaatcatccaagat

SEQ ID NO: 148045 - DNA, 25 bp, Saccharomyces pastorianus
gctgtcatcggctatgttgactcta

SEQ ID NO: 148046 - DNA, 25 bp, Saccharomyces pastorianus
aagttcaacggtttggtcagttcag

SEQ ID NO: 148047 - DNA, 25 bp, Saccharomyces pastorianus
cttacattctattaacggtctccga

SEQ ID NO: 148048 - DNA, 25 bp, Saccharomyces pastorianus
gttcaacggtcattcatgggcagct

SEQ ID NO: 148049 - DNA, 25 bp, Saccharomyces pastorianus
atgaacagacgtatccactaattta

SEQ ID NO: 148050 - DNA, 25 bp, Saccharomyces pastorianus
taaacttacttcttgccgatgacgc

SEQ ID NO: 148051 - DNA, 25 bp, Saccharomyces pastorianus
tatgctcgaggtcatatttcctccg

SEQ ID NO: 148052 - DNA, 25 bp, Saccharomyces pastorianus
aaaagtgtgcctgttacttcttctc

SEQ ID NO: 148053 - DNA, 25 bp, Saccharomyces pastorianus
atccagcataattcctcgaacttct

SEQ ID NO: 148054 - DNA, 25 bp, Saccharomyces pastorianus
tatttcctccgcgtaaaacttcatt

SEQ ID NO: 148055 - DNA, 25 bp, Saccharomyces pastorianus
tacttcttctcctatatccagcata

SEQ ID NO: 148056 - DNA, 25 bp, Saccharomyces pastorianus
accattcggtactttcacatcggaa

SEQ ID NO: 148057 - DNA, 25 bp, Saccharomyces pastorianus
gaagcatatcgcgatgagttcacta

SEQ ID NO: 148058 - DNA, 25 bp, Saccharomyces pastorianus
agatcgctcgatttttctgatttaa

SEQ ID NO: 148059 - DNA, 25 bp, Saccharomyces pastorianus
aagctaccatagtgccaagttttga

SEQ ID NO: 148060 - DNA, 25 bp, Saccharomyces pastorianus
taaggacgtacaggttttagccaat

SEQ ID NO: 148061 - DNA, 25 bp, Saccharomyces pastorianus
atgtggaaactatccccttacacgt

SEQ ID NO: 148062 - DNA, 25 bp, Saccharomyces pastorianus
ggtgatgaatacttggcgcgcataa

SEQ ID NO: 148063 - DNA, 25 bp, Saccharomyces pastorianus
atgccatactttttcaactttacta

SEQ ID NO: 148064 - DNA, 25 bp, Saccharomyces pastorianus
tgggtgtctttaccgaagcctctag

SEQ ID NO: 148065 - DNA, 25 bp, Saccharomyces pastorianus
gcagattgcgcctattgtcagtaca

SEQ ID NO: 148066 - DNA, 25 bp, Saccharomyces pastorianus
ctctttaatgcctggtttctggaca

SEQ ID NO: 148067 - DNA, 25 bp, Saccharomyces pastorianus
gtctccaaatctacaatctgccaat

SEQ ID NO: 148068 - DNA, 25 bp, Saccharomyces pastorianus
aatgattctgtacatgtctccaaat

SEQ ID NO: 148069 - DNA, 25 bp, Saccharomyces pastorianus
gaagttcgtgagtccaaatctaata

SEQ ID NO: 148070 - DNA, 25 bp, Saccharomyces pastorianus
gaagcctctaggtcaagtgtttttt

SEQ ID NO: 148071 - DNA, 25 bp, Saccharomyces pastorianus
gtttcattatatttccctctgggtg

SEQ ID NO: 148072 - DNA, 25 bp, Saccharomyces pastorianus
acttcagctctgattcgatcgactt

SEQ ID NO: 148073 - DNA, 25 bp, Saccharomyces pastorianus
aagaagtgaagttgatgcgtcttcc

SEQ ID NO: 148074 - DNA, 25 bp, Saccharomyces pastorianus
aacgctgaagacgaatccaaggacc

SEQ ID NO: 148075 - DNA, 25 bp, Saccharomyces pastorianus
ctcatcgtttaagttggaattcgga

SEQ ID NO: 148076 - DNA, 25 bp, Saccharomyces pastorianus
gaagacgaatccaaggaccccaact

SEQ ID NO: 148077 - DNA, 25 bp, Saccharomyces pastorianus
gattcgatcgacttcacgattccaa

SEQ ID NO: 148078 - DNA, 25 bp, Saccharomyces pastorianus
tcgacttcacgattccaaacaatag

SEQ ID NO: 148079 - DNA, 25 bp, Saccharomyces pastorianus
tggaattcggaaactacccaagaag

SEQ ID NO: 148080 - DNA, 25 bp, Saccharomyces pastorianus
gattccaaacaatagctcatcgttt

SEQ ID NO: 148081 - DNA, 25 bp, Saccharomyces pastorianus
ctgctttgaacttcagctctgattc

SEQ ID NO: 148082 - DNA, 25 bp, Saccharomyces pastorianus
gaaactgttcagcttcacaaagaaa

SEQ ID NO: 148083 - DNA, 25 bp, Saccharomyces pastorianus
ttccaagggtgccatgctcatgaga

SEQ ID NO: 148084 - DNA, 25 bp, Saccharomyces pastorianus
ggcttgtgtgcagctaatccaaact

SEQ ID NO: 148085 - DNA, 25 bp, Saccharomyces pastorianus
tattacgctggtcatcaccgtcaat

SEQ ID NO: 148086 - DNA, 25 bp, Saccharomyces pastorianus
gtcaatctgctccagctgaaactgt

SEQ ID NO: 148087 - DNA, 25 bp, Saccharomyces pastorianus
atgttacatcgttacttgcacgtcc

SEQ ID NO: 148088 - DNA, 25 bp, Saccharomyces pastorianus
ggtactattgtcgatgtcggtccaa

SEQ ID NO: 148089 - DNA, 25 bp, Saccharomyces pastorianus
gaagttgtggactacgcccagaaca

SEQ ID NO: 148090 - DNA, 25 bp, Saccharomyces pastorianus
tgcacgtccctaccatgagtatgga

SEQ ID NO: 148091 - DNA, 25 bp, Saccharomyces pastorianus
gacaactatctttactatctcgctg

SEQ ID NO: 148092 - DNA, 25 bp, Saccharomyces pastorianus
ggtgtcgatgacgtttactacaaaa

SEQ ID NO: 148093 - DNA, 25 bp, Saccharomyces pastorianus
aggataccgctgaaatcaccgctta

SEQ ID NO: 148094 - DNA, 25 bp, Saccharomyces pastorianus
gtgctcctgtcacttacgacaccaa

SEQ ID NO: 148095 - DNA, 25 bp, Saccharomyces pastorianus
gcaactattgcttctctagctttga

SEQ ID NO: 148096 - DNA, 25 bp, Saccharomyces pastorianus
ctcttccggcaaatctatcatcttt

SEQ ID NO: 148097 - DNA, 25 bp, Saccharomyces pastorianus
tctctagctttgagtgctcctgtca

SEQ ID NO: 148098 - DNA, 25 bp, Saccharomyces pastorianus
atctttgcaactattgcttctctag

SEQ ID NO: 148099 - DNA, 25 bp, Saccharomyces pastorianus
aatctatcatctttgcaactattgc

SEQ ID NO: 148100 - DNA, 25 bp, Saccharomyces pastorianus
attgcttctctagctttgagtgctc

SEQ ID NO: 148101 - DNA, 25 bp, Saccharomyces pastorianus
tgaagttctcttccggcaaatctat

SEQ ID NO: 148102 - DNA, 25 bp, Saccharomyces pastorianus
gttctcttccggcaaatctatcatc

SEQ ID NO: 148103 - DNA, 25 bp, Saccharomyces pastorianus
ttgagtgctcctgtcacttacgaca

SEQ ID NO: 148104 - DNA, 25 bp, Saccharomyces pastorianus
tagctttgagtgctcctgtcactta

SEQ ID NO: 148105 - DNA, 25 bp, Saccharomyces pastorianus
caattgtaggtggtgacgacgctct

SEQ ID NO: 148106 - DNA, 25 bp, Saccharomyces pastorianus
gccgccagacatgttttctacgagg

SEQ ID NO: 148107 - DNA, 25 bp, Saccharomyces pastorianus
tgaagagcccatgccctttgttgaa

SEQ ID NO: 148108 - DNA, 25 bp, Saccharomyces pastorianus
tttgttgaacttttgccgccagaca

SEQ ID NO: 148109 - DNA, 25 bp, Saccharomyces pastorianus
cgaagctaaatctaccactgtggtt

SEQ ID NO: 148110 - DNA, 25 bp, Saccharomyces pastorianus
tgtggtcagcgagttgcttctacaa

SEQ ID NO: 148111 - DNA, 25 bp, Saccharomyces pastorianus
acgggcgcaggaactcaatcatcat

SEQ ID NO: 148112 - DNA, 25 bp, Saccharomyces pastorianus
aattcgcattttttcagtttggcca

SEQ ID NO: 148113 - DNA, 25 bp, Saccharomyces pastorianus
atgtgctggcagacgcgacggactt

SEQ ID NO: 148114 - DNA, 25 bp, Saccharomyces pastorianus
atgatatcccgggtttaggctacct

SEQ ID NO: 148115 - DNA, 25 bp, Saccharomyces pastorianus
gacattaatgctgattccgttggga

SEQ ID NO: 148116 - DNA, 25 bp, Saccharomyces pastorianus
tccaggagcgagaagccatggccat

SEQ ID NO: 148117 - DNA, 25 bp, Saccharomyces pastorianus
gaggcacaaaagttaatccaggagc

SEQ ID NO: 148118 - DNA, 25 bp, Saccharomyces pastorianus
ctcaaatgagcggttcggaacaaaa

SEQ ID NO: 148119 - DNA, 25 bp, Saccharomyces pastorianus
gtatacaattgggtgaaactactat

SEQ ID NO: 148120 - DNA, 25 bp, Saccharomyces pastorianus
gaagccaggcgtttgaagttagaaa

SEQ ID NO: 148121 - DNA, 25 bp, Saccharomyces pastorianus
gaagccatggccataagtgaacata

SEQ ID NO: 148122 - DNA, 25 bp, Saccharomyces pastorianus
gggcaaaaaatctcaactatcgaat

SEQ ID NO: 148123 - DNA, 25 bp, Saccharomyces pastorianus
gatgatgtggtgaaaaagccttctc

SEQ ID NO: 148124 - DNA, 25 bp, Saccharomyces pastorianus
aaagccttctcacaataagggcaaa

SEQ ID NO: 148125 - DNA, 25 bp, Saccharomyces pastorianus
attagaacgttccttgaatgagcaa

SEQ ID NO: 148126 - DNA, 25 bp, Saccharomyces pastorianus
aaaactctttccgacagcgacgagg

SEQ ID NO: 148127 - DNA, 25 bp, Saccharomyces pastorianus
ctttaaagttctctgccactggaga

SEQ ID NO: 148128 - DNA, 25 bp, Saccharomyces pastorianus
ctctgccactggagaaagacattta

SEQ ID NO: 148129 - DNA, 25 bp, Saccharomyces pastorianus
gtagcaaccaacattgcacatattg

SEQ ID NO: 148130 - DNA, 25 bp, Saccharomyces pastorianus
ttctctttaaagttctctgccactg

SEQ ID NO: 148131 - DNA, 25 bp, Saccharomyces pastorianus
agacatttagtagcaaccaacattg

SEQ ID NO: 148132 - DNA, 25 bp, Saccharomyces pastorianus
gtctattgtgggtttcatcttctcc

SEQ ID NO: 148133 - DNA, 25 bp, Saccharomyces pastorianus
attgcacatattgaagcccatacgt

SEQ ID NO: 148134 - DNA, 25 bp, Saccharomyces pastorianus
ttgtgggtttcatcttctccctctt

SEQ ID NO: 148135 - DNA, 25 bp, Saccharomyces pastorianus
tctccctcttcacacctttaaaaga

SEQ ID NO: 148136 - DNA, 25 bp, Saccharomyces pastorianus
tattgaagcccatacgtctattgtg

SEQ ID NO: 148137 - DNA, 25 bp, Saccharomyces pastorianus
catacgtctattgtgggtttcatct

SEQ ID NO: 148138 - DNA, 25 bp, Saccharomyces pastorianus
caacagctatatcccatgaccaaaa

SEQ ID NO: 148139 - DNA, 25 bp, Saccharomyces pastorianus
gcctttggctggcattcaatgcatg

SEQ ID NO: 148140 - DNA, 25 bp, Saccharomyces pastorianus
ggcattcaatgcatggttccattat

SEQ ID NO: 148141 - DNA, 25 bp, Saccharomyces pastorianus
gccactgcggtccatttcttaattt

SEQ ID NO: 148142 - DNA, 25 bp, Saccharomyces pastorianus
actgcggtccatttcttaatttcaa

SEQ ID NO: 148143 - DNA, 25 bp, Saccharomyces pastorianus
tggttccattatatggttcctgcaa

SEQ ID NO: 148144 - DNA, 25 bp, Saccharomyces pastorianus
atatcccatgaccaaaacgccactg

SEQ ID NO: 148145 - DNA, 25 bp, Saccharomyces pastorianus
gcggtccatttcttaatttcaaatc

SEQ ID NO: 148146 - DNA, 25 bp, Saccharomyces pastorianus
tgaccaaaacgccactgcggtccat

SEQ ID NO: 148147 - DNA, 25 bp, Saccharomyces pastorianus
atggttcctgcaaatagcacagttg

SEQ ID NO: 148148 - DNA, 25 bp, Saccharomyces pastorianus
agctatatcccatgaccaaaacgcc

SEQ ID NO: 148149 - DNA, 25 bp, Saccharomyces pastorianus
agctaaactattaggccgctttcct

SEQ ID NO: 148150 - DNA, 25 bp, Saccharomyces pastorianus
gtttatgcattggtttccctctata

SEQ ID NO: 148151 - DNA, 25 bp, Saccharomyces pastorianus
aggccagccactttttaaaggcgat

SEQ ID NO: 148152 - DNA, 25 bp, Saccharomyces pastorianus
gcgatagcgctaactcacaactgga

SEQ ID NO: 148153 - DNA, 25 bp, Saccharomyces pastorianus
atatgccatggcgatctgaaaccga

SEQ ID NO: 148154 - DNA, 25 bp, Saccharomyces pastorianus
gctcggcacagcgactggatgataa

SEQ ID NO: 148155 - DNA, 25 bp, Saccharomyces pastorianus
aaatacttcgagcacttctgacctt

SEQ ID NO: 148156 - DNA, 25 bp, Saccharomyces pastorianus
aagtatgtgactttggctcggcaca

SEQ ID NO: 148157 - DNA, 25 bp, Saccharomyces pastorianus
gcacctgaacttctcctaaattcga

SEQ ID NO: 148158 - DNA, 25 bp, Saccharomyces pastorianus
gaattgaagacctatttttgctcga

SEQ ID NO: 148159 - DNA, 25 bp, Saccharomyces pastorianus
acttctgaccttacattccatgagt

SEQ ID NO: 148160 - DNA, 25 bp, Saccharomyces pastorianus
gatgaccacaatagcggttatggct

SEQ ID NO: 148161 - DNA, 25 bp, Saccharomyces pastorianus
atggctacaactgtgatcgcggtga

SEQ ID NO: 148162 - DNA, 25 bp, Saccharomyces pastorianus
gactttaaaccaaccacagcaagat

SEQ ID NO: 148163 - DNA, 25 bp, Saccharomyces pastorianus
tacatcaaacactgactctggttcc

SEQ ID NO: 148164 - DNA, 25 bp, Saccharomyces pastorianus
catgccacctaatgcaatgacttta

SEQ ID NO: 148165 - DNA, 25 bp, Saccharomyces pastorianus
ttccccgccattgaatttacctaat

SEQ ID NO: 148166 - DNA, 25 bp, Saccharomyces pastorianus
tgatcgcggtgatcgtgatcgtaac

SEQ ID NO: 148167 - DNA, 25 bp, Saccharomyces pastorianus
cagcaccttctgattccgataataa

SEQ ID NO: 148168 - DNA, 25 bp, Saccharomyces pastorianus
gattcaaatgccactcaaggttccc

SEQ ID NO: 148169 - DNA, 25 bp, Saccharomyces pastorianus
cgtgaccgcgattacaatcaccgta

SEQ ID NO: 148170 - DNA, 25 bp, Saccharomyces pastorianus
gatcgtaacgatcgtgaccgcgatt

SEQ ID NO: 148171 - DNA, 25 bp, Saccharomyces pastorianus
gaaacaacatgaatcgtcgtggcgg

SEQ ID NO: 148172 - DNA, 25 bp, Saccharomyces pastorianus
gtaagtatggtaccgtcactgattt

SEQ ID NO: 148173 - DNA, 25 bp, Saccharomyces pastorianus
ttgttggtggtattggtcctgatat

SEQ ID NO: 148174 - DNA, 25 bp, Saccharomyces pastorianus
aaatcatgaaagaccctgcaacagg

SEQ ID NO: 148175 - DNA, 25 bp, Saccharomyces pastorianus
cgctgacgccgttgacagagtttgt

SEQ ID NO: 148176 - DNA, 25 bp, Saccharomyces pastorianus
tcgacccaaaaagagctatcccaag

SEQ ID NO: 148177 - DNA, 25 bp, Saccharomyces pastorianus
gaacgttcgaaagcagatttgtcta

SEQ ID NO: 148178 - DNA, 25 bp, Saccharomyces pastorianus
ttggtggtctgaattgggacactac

SEQ ID NO: 148179 - DNA, 25 bp, Saccharomyces pastorianus
gtacgattatcgatgctcaactgat

SEQ ID NO: 148180 - DNA, 25 bp, Saccharomyces pastorianus
gatctagagggttcggtttcttatc

SEQ ID NO: 148181 - DNA, 25 bp, Saccharomyces pastorianus
ttttgtgacgtatgactccgctgac

SEQ ID NO: 148182 - DNA, 25 bp, Saccharomyces pastorianus
aattggattatcactgttattgcta

SEQ ID NO: 148183 - DNA, 25 bp, Saccharomyces pastorianus
aaataacaacgatagacctgcaggt

SEQ ID NO: 148184 - DNA, 25 bp, Saccharomyces pastorianus
ctttactgaacgtttatgccattgt

SEQ ID NO: 148185 - DNA, 25 bp, Saccharomyces pastorianus
agatggttctagtggcatggagata

SEQ ID NO: 148186 - DNA, 25 bp, Saccharomyces pastorianus
accgaaattaccgtcgaccatactg

SEQ ID NO: 148187 - DNA, 25 bp, Saccharomyces pastorianus
ttgctataattgtgtggcttttctt

SEQ ID NO: 148188 - DNA, 25 bp, Saccharomyces pastorianus
gtgtggcttttcttatctttactga

SEQ ID NO: 148189 - DNA, 25 bp, Saccharomyces pastorianus
taccgtcgaccatactgaagaagat

SEQ ID NO: 148190 - DNA, 25 bp, Saccharomyces pastorianus
gaagaagatagccataaccatcaaa

SEQ ID NO: 148191 - DNA, 25 bp, Saccharomyces pastorianus
agcgtaatccagcaagatggttcta

SEQ ID NO: 148192 - DNA, 25 bp, Saccharomyces pastorianus
gacctgcaggtagcgtaatccagca

SEQ ID NO: 148193 - DNA, 25 bp, Saccharomyces pastorianus
aattaagcataactctcttcaccct

SEQ ID NO: 148194 - DNA, 25 bp, Saccharomyces pastorianus
tagcgcttttcgtcaattgtgccat

SEQ ID NO: 148195 - DNA, 25 bp, Saccharomyces pastorianus
agaggatttgttccatctgcccaaa

SEQ ID NO: 148196 - DNA, 25 bp, Saccharomyces pastorianus
aggtacaattttcatgctcgcactt

SEQ ID NO: 148197 - DNA, 25 bp, Saccharomyces pastorianus
tatcccgaagagtacgtccgtcaaa

SEQ ID NO: 148198 - DNA, 25 bp, Saccharomyces pastorianus
tttgggttccgcattagtgcagcca

SEQ ID NO: 148199 - DNA, 25 bp, Saccharomyces pastorianus
ataccgctatttccatcttaggtgc

SEQ ID NO: 148200 - DNA, 25 bp, Saccharomyces pastorianus
ggtgctactgttatgccacattcgt

SEQ ID NO: 148201 - DNA, 25 bp, Saccharomyces pastorianus
taattatagacccacgaacgctgct

SEQ ID NO: 148202 - DNA, 25 bp, Saccharomyces pastorianus
attgtgccatcctagttgttgcagg

SEQ ID NO: 148203 - DNA, 25 bp, Saccharomyces pastorianus
attaagtggtcaatccgcaggtgta

SEQ ID NO: 148204 - DNA, 25 bp, Saccharomyces pastorianus
tagaccatacaaacacattgacgct

SEQ ID NO: 148205 - DNA, 25 bp, Saccharomyces pastorianus
tacaaacacattgacgcttccggtt

SEQ ID NO: 148206 - DNA, 25 bp, Saccharomyces pastorianus
ccaccacaagatgccgaaggttggt

SEQ ID NO: 148207 - DNA, 25 bp, Saccharomyces pastorianus
ttagaccatacaaacacattgacgc

SEQ ID NO: 148208 - DNA, 25 bp, Saccharomyces pastorianus
acgcttccggttctatcaacagaaa

SEQ ID NO: 148209 - DNA, 25 bp, Saccharomyces pastorianus
aacacattgacgcttccggttctat

SEQ ID NO: 148210 - DNA, 25 bp, Saccharomyces pastorianus
gattggtatcgtcgaaatctctcca

SEQ ID NO: 148211 - DNA, 25 bp, Saccharomyces pastorianus
acaagatgccgaaggttggttctac

SEQ ID NO: 148212 - DNA, 25 bp, Saccharomyces pastorianus
ctatcaacagaaaggttttgcaagc

SEQ ID NO: 148213 - DNA, 25 bp, Saccharomyces pastorianus
gttagaccatacaaacacattgacg

SEQ ID NO: 148214 - DNA, 25 bp, Saccharomyces pastorianus
tgcctctgttgccagacacatttac

SEQ ID NO: 148215 - DNA, 25 bp, Saccharomyces pastorianus
ggtaaggctccaagaatcttgtcca

SEQ ID NO: 148216 - DNA, 25 bp, Saccharomyces pastorianus
aggctccaagaatcttgtccaccgg

SEQ ID NO: 148217 - DNA, 25 bp, Saccharomyces pastorianus
gggtaaggctccaagaatcttgtcc

SEQ ID NO: 148218 - DNA, 25 bp, Saccharomyces pastorianus
gctccaagaatcttgtccaccggta

SEQ ID NO: 148219 - DNA, 25 bp, Saccharomyces pastorianus
gtaaggctccaagaatcttgtccac

SEQ ID NO: 148220 - DNA, 25 bp, Saccharomyces pastorianus
agggtaaggctccaagaatcttgtc

SEQ ID NO: 148221 - DNA, 25 bp, Saccharomyces pastorianus
aaggctccaagaatcttgtccaccg

SEQ ID NO: 148222 - DNA, 25 bp, Saccharomyces pastorianus
aagggtaaggctccaagaatcttgt

SEQ ID NO: 148223 - DNA, 25 bp, Saccharomyces pastorianus
ctccaagaatcttgtccaccggtag

SEQ ID NO: 148224 - DNA, 25 bp, Saccharomyces pastorianus
ggctccaagaatcttgtccaccggt

SEQ ID NO: 148225 - DNA, 25 bp, Saccharomyces pastorianus
aagaatcttgtccaccggtagaaag

SEQ ID NO: 148226 - DNA, 25 bp, Saccharomyces pastorianus
aggtgcggcatgttatataatatca

SEQ ID NO: 148227 - DNA, 25 bp, Saccharomyces pastorianus
cggcatgttatataatatcaaggca

SEQ ID NO: 148228 - DNA, 25 bp, Saccharomyces pastorianus
ggtgcggcatgttatataatatcaa

SEQ ID NO: 148229 - DNA, 25 bp, Saccharomyces pastorianus
gcatgttatataatatcaaggcata

SEQ ID NO: 148230 - DNA, 25 bp, Saccharomyces pastorianus
ggcaggtgcggcatgttatataata

SEQ ID NO: 148231 - DNA, 25 bp, Saccharomyces pastorianus
gcaggtgcggcatgttatataatat

SEQ ID NO: 148232 - DNA, 25 bp, Saccharomyces pastorianus
gtgcggcatgttatataatatcaag

SEQ ID NO: 148233 - DNA, 25 bp, Saccharomyces pastorianus
gcggcatgttatataatatcaaggc

SEQ ID NO: 148234 - DNA, 25 bp, Saccharomyces pastorianus
ggcatgttatataatatcaaggcat

SEQ ID NO: 148235 - DNA, 25 bp, Saccharomyces pastorianus
caggtgcggcatgttatataatatc

SEQ ID NO: 148236 - DNA, 25 bp, Saccharomyces pastorianus
cggcaggtgcggcatgttatataat

SEQ ID NO: 148237 - DNA, 25 bp, Saccharomyces pastorianus
taattttgtcatgtggctgccattt

SEQ ID NO: 148238 - DNA, 25 bp, Saccharomyces pastorianus
tactttgggcgtacgtttgtttgtg

SEQ ID NO: 148239 - DNA, 25 bp, Saccharomyces pastorianus
gacacccgtttgcatcgggcagata

SEQ ID NO: 148240 - DNA, 25 bp, Saccharomyces pastorianus
gttttcgacgggttctatcctatca

SEQ ID NO: 148241 - DNA, 25 bp, Saccharomyces pastorianus
ggcgcttcttttgcagaaagctccc

SEQ ID NO: 148242 - DNA, 25 bp, Saccharomyces pastorianus
cagtcgttcaaccattcaaatccaa

SEQ ID NO: 148243 - DNA, 25 bp, Saccharomyces pastorianus
cactgcttcgaatgctgttggtata

SEQ ID NO: 148244 - DNA, 25 bp, Saccharomyces pastorianus
gtatataccaggctattttgcggat

SEQ ID NO: 148245 - DNA, 25 bp, Saccharomyces pastorianus
aatggctgccttatttaattttgtc

SEQ ID NO: 148246 - DNA, 25 bp, Saccharomyces pastorianus
taacatgcctcatttgtgcttcagt

SEQ ID NO: 148247 - DNA, 25 bp, Saccharomyces pastorianus
aattcttgttcgtcgcaataggcgc

SEQ ID NO: 148248 - DNA, 25 bp, Saccharomyces pastorianus
tttcgagaacgatcaggctgcggtt

SEQ ID NO: 148249 - DNA, 25 bp, Saccharomyces pastorianus
gaacccgaagccgagaaatccacta

SEQ ID NO: 148250 - DNA, 25 bp, Saccharomyces pastorianus
gagcatgatattcagcccatcagat

SEQ ID NO: 148251 - DNA, 25 bp, Saccharomyces pastorianus
agaaaattcaagctcccagttctcc

SEQ ID NO: 148252 - DNA, 25 bp, Saccharomyces pastorianus
taagccgaatccgactatatctaag

SEQ ID NO: 148253 - DNA, 25 bp, Saccharomyces pastorianus
tgaagggcaaagtcctccacgataa

SEQ ID NO: 148254 - DNA, 25 bp, Saccharomyces pastorianus
ggatttgaaggtcacgcctgccaat

SEQ ID NO: 148255 - DNA, 25 bp, Saccharomyces pastorianus
gggatgacatcgaggctcttctgaa

SEQ ID NO: 148256 - DNA, 25 bp, Saccharomyces pastorianus
gaaaaggcctcccacataagcgaga

SEQ ID NO: 148257 - DNA, 25 bp, Saccharomyces pastorianus
aggacctcactgtgccctgggatga

SEQ ID NO: 148258 - DNA, 25 bp, Saccharomyces pastorianus
tgccaattccacaatcacagtcatg

SEQ ID NO: 148259 - DNA, 25 bp, Saccharomyces pastorianus
gagttcgttagtaaattcttgacct

SEQ ID NO: 148260 - DNA, 25 bp, Saccharomyces pastorianus
acctctgaaagatgttaccaattct

SEQ ID NO: 148261 - DNA, 25 bp, Saccharomyces pastorianus
agtaaattcttgaccttagccactt

SEQ ID NO: 148262 - DNA, 25 bp, Saccharomyces pastorianus
aaaagctatactaaacctctgaaag

SEQ ID NO: 148263 - DNA, 25 bp, Saccharomyces pastorianus
ttagccactttaactgaaccgaagc

SEQ ID NO: 148264 - DNA, 25 bp, Saccharomyces pastorianus
gttagtaaattcttgaccttagcca

SEQ ID NO: 148265 - DNA, 25 bp, Saccharomyces pastorianus
taactgaaccgaagctaccaaaaag

SEQ ID NO: 148266 - DNA, 25 bp, Saccharomyces pastorianus
gaccttagccactttaactgaaccg

SEQ ID NO: 148267 - DNA, 25 bp, Saccharomyces pastorianus
gccactttaactgaaccgaagctac

SEQ ID NO: 148268 - DNA, 25 bp, Saccharomyces pastorianus
gaaccgaagctaccaaaaagctata

SEQ ID NO: 148269 - DNA, 25 bp, Saccharomyces pastorianus
gctatactaaacctctgaaagatgt

SEQ ID NO: 148270 - DNA, 25 bp, Saccharomyces pastorianus
atctatatttctatgtaccaatatt

SEQ ID NO: 148271 - DNA, 25 bp, Saccharomyces pastorianus
tatatttctatgtaccaatattacg

SEQ ID NO: 148272 - DNA, 25 bp, Saccharomyces pastorianus
acagcttctataataacttatgtca

SEQ ID NO: 148273 - DNA, 25 bp, Saccharomyces pastorianus
cggtgacagcttctataataactta

SEQ ID NO: 148274 - DNA, 25 bp, Saccharomyces pastorianus
ttcggtgacagcttctataataact

SEQ ID NO: 148275 - DNA, 25 bp, Saccharomyces pastorianus
gtgacagcttctataataacttatg

SEQ ID NO: 148276 - DNA, 25 bp, Saccharomyces pastorianus
tgacagcttctataataacttatgt

SEQ ID NO: 148277 - DNA, 25 bp, Saccharomyces pastorianus
gacagcttctataataacttatgtc

SEQ ID NO: 148278 - DNA, 25 bp, Saccharomyces pastorianus
cagcttctataataacttatgtcac

SEQ ID NO: 148279 - DNA, 25 bp, Saccharomyces pastorianus
tcggtgacagcttctataataactt

SEQ ID NO: 148280 - DNA, 25 bp, Saccharomyces pastorianus
ggtgacagcttctataataacttat

SEQ ID NO: 148281 - DNA, 25 bp, Saccharomyces pastorianus
atgtttttcactttttcggcgatat

SEQ ID NO: 148282 - DNA, 25 bp, Saccharomyces pastorianus
acggtccatcagaacattccgaatg

SEQ ID NO: 148283 - DNA, 25 bp, Saccharomyces pastorianus
gagcttattttacatgacctgttgg

SEQ ID NO: 148284 - DNA, 25 bp, Saccharomyces pastorianus
ttgagtctcttggacgttttcagaa

SEQ ID NO: 148285 - DNA, 25 bp, Saccharomyces pastorianus
ggtattttacattccaaccttcata

SEQ ID NO: 148286 - DNA, 25 bp, Saccharomyces pastorianus
aattaactcagccaaatgccacggt

SEQ ID NO: 148287 - DNA, 25 bp, Saccharomyces pastorianus
ttccgaatgttctcagggaactcgt

SEQ ID NO: 148288 - DNA, 25 bp, Saccharomyces pastorianus
ttacgctaactggtcaaaactcatt

SEQ ID NO: 148289 - DNA, 25 bp, Saccharomyces pastorianus
aggccagcacatctcttggtattgg

SEQ ID NO: 148290 - DNA, 25 bp, Saccharomyces pastorianus
atacctagaatttgttcctttgaca

SEQ ID NO: 148291 - DNA, 25 bp, Saccharomyces pastorianus
gtgaaatcctttgtcaggccagcac

SEQ ID NO: 148292 - DNA, 25 bp, Saccharomyces pastorianus
tatattttcatcgactgccattctc

SEQ ID NO: 148293 - DNA, 25 bp, Saccharomyces pastorianus
tgaagcgtcgcagttaccacaggaa

SEQ ID NO: 148294 - DNA, 25 bp, Saccharomyces pastorianus
aaatcatgtccatttatcgccaggg

SEQ ID NO: 148295 - DNA, 25 bp, Saccharomyces pastorianus
gaggttctcgtaccaattactgaag

SEQ ID NO: 148296 - DNA, 25 bp, Saccharomyces pastorianus
ttaagcagcagtattcccgttgaat

SEQ ID NO: 148297 - DNA, 25 bp, Saccharomyces pastorianus
aatcgattcagccatcagatgaggt

SEQ ID NO: 148298 - DNA, 25 bp, Saccharomyces pastorianus
gaaaatgttcaggtcgctcaataat

SEQ ID NO: 148299 - DNA, 25 bp, Saccharomyces pastorianus
tatcgccagggatgttgcacgcgaa

SEQ ID NO: 148300 - DNA, 25 bp, Saccharomyces pastorianus
ggatctgtgctactcagggacattc

SEQ ID NO: 148301 - DNA, 25 bp, Saccharomyces pastorianus
tgccattctccattattctttcata

SEQ ID NO: 148302 - DNA, 25 bp, Saccharomyces pastorianus
gaatccggagcaatatcaccaatga

SEQ ID NO: 148303 - DNA, 25 bp, Saccharomyces pastorianus
tactccttgtatctaatattctgac

SEQ ID NO: 148304 - DNA, 25 bp, Saccharomyces pastorianus
aatccaatcagaattccagcactcc

SEQ ID NO: 148305 - DNA, 25 bp, Saccharomyces pastorianus
attctgacatgttatcggttcttac

SEQ ID NO: 148306 - DNA, 25 bp, Saccharomyces pastorianus
atcggttcttactgccaagtgatac

SEQ ID NO: 148307 - DNA, 25 bp, Saccharomyces pastorianus
actgttgattgagtgtcatggttca

SEQ ID NO: 148308 - DNA, 25 bp, Saccharomyces pastorianus
gaaccatgtgtcttcttctgacgag

SEQ ID NO: 148309 - DNA, 25 bp, Saccharomyces pastorianus
gaattccagcactccgtataaacaa

SEQ ID NO: 148310 - DNA, 25 bp, Saccharomyces pastorianus
gagcctccagcggagtactcgaaaa

SEQ ID NO: 148311 - DNA, 25 bp, Saccharomyces pastorianus
gaataattcactttcgaaccatgtg

SEQ ID NO: 148312 - DNA, 25 bp, Saccharomyces pastorianus
tggttcatattctctactccttgta

SEQ ID NO: 148313 - DNA, 25 bp, Saccharomyces pastorianus
tactgaattgaatacctctacgaaa

SEQ ID NO: 148314 - DNA, 25 bp, Saccharomyces pastorianus
aacaatgacagttacctcgcgtagt

SEQ ID NO: 148315 - DNA, 25 bp, Saccharomyces pastorianus
acctcgcgtagttctgaagactcta

SEQ ID NO: 148316 - DNA, 25 bp, Saccharomyces pastorianus
gatacacataaggacggcgacacaa

SEQ ID NO: 148317 - DNA, 25 bp, Saccharomyces pastorianus
gaagactctagttgtatctcaaatc

SEQ ID NO: 148318 - DNA, 25 bp, Saccharomyces pastorianus
gaaaagtaaccagagcctcgtttca

SEQ ID NO: 148319 - DNA, 25 bp, Saccharomyces pastorianus
acgttcttctacaacatctcagaca

SEQ ID NO: 148320 - DNA, 25 bp, Saccharomyces pastorianus
tttcaaactttccaaatctccagct

SEQ ID NO: 148321 - DNA, 25 bp, Saccharomyces pastorianus
aatgattactcttctatctgtggta

SEQ ID NO: 148322 - DNA, 25 bp, Saccharomyces pastorianus
tgtggtaacagccttccatctgcag

SEQ ID NO: 148323 - DNA, 25 bp, Saccharomyces pastorianus
catctgcaggcttgagtcgttcgaa

SEQ ID NO: 148324 - DNA, 25 bp, Saccharomyces pastorianus
gttgccatattagcacgttcttcta

SEQ ID NO: 148325 - DNA, 25 bp, Saccharomyces pastorianus
tcatgccatggtcttctgttggtgg

SEQ ID NO: 148326 - DNA, 25 bp, Saccharomyces pastorianus
aatctcagggtgacatagttctaga

SEQ ID NO: 148327 - DNA, 25 bp, Saccharomyces pastorianus
ggtaatgaagccgtttccccatcaa

SEQ ID NO: 148328 - DNA, 25 bp, Saccharomyces pastorianus
acctagtctttggttggatctacta

SEQ ID NO: 148329 - DNA, 25 bp, Saccharomyces pastorianus
gatagtagcgatagcagccttggaa

SEQ ID NO: 148330 - DNA, 25 bp, Saccharomyces pastorianus
ctctgaggcgaatgtcaagctggtt

SEQ ID NO: 148331 - DNA, 25 bp, Saccharomyces pastorianus
accagcgagcaggagttaaacccca

SEQ ID NO: 148332 - DNA, 25 bp, Saccharomyces pastorianus
tatgctaaagtttggccgtccgaag

SEQ ID NO: 148333 - DNA, 25 bp, Saccharomyces pastorianus
aaattaaactttacgtcgctgacag

SEQ ID NO: 148334 - DNA, 25 bp, Saccharomyces pastorianus
taaaccccacagatttaccgagaat

SEQ ID NO: 148335 - DNA, 25 bp, Saccharomyces pastorianus
gccctactggtttgcaaaagcctta

SEQ ID NO: 148336 - DNA, 25 bp, Saccharomyces pastorianus
ggattcttccatatggtgtgtccaa

SEQ ID NO: 148337 - DNA, 25 bp, Saccharomyces pastorianus
gggatatcgtttcatgtgagctttt

SEQ ID NO: 148338 - DNA, 25 bp, Saccharomyces pastorianus
gaagctcactgctaaccaacaggag

SEQ ID NO: 148339 - DNA, 25 bp, Saccharomyces pastorianus
gttaaggtcggtatgctgttcgtaa

SEQ ID NO: 148340 - DNA, 25 bp, Saccharomyces pastorianus
aaactgaaatttatggatccgcgct

SEQ ID NO: 148341 - DNA, 25 bp, Saccharomyces pastorianus
gtggtatccttgatattgccctttt

SEQ ID NO: 148342 - DNA, 25 bp, Saccharomyces pastorianus
gaattttcaagcctgatcatcacca

SEQ ID NO: 148343 - DNA, 25 bp, Saccharomyces pastorianus
gtattttggtgactctcagggcaat

SEQ ID NO: 148344 - DNA, 25 bp, Saccharomyces pastorianus
ggaaattctatctcattggtgtact

SEQ ID NO: 148345 - DNA, 25 bp, Saccharomyces pastorianus
ctcattggtgtactgtttccgttaa

SEQ ID NO: 148346 - DNA, 25 bp, Saccharomyces pastorianus
aggtgggttcgcactgaccagaagc

SEQ ID NO: 148347 - DNA, 25 bp, Saccharomyces pastorianus
aagatcccattgtgtggtgctgtaa

SEQ ID NO: 148348 - DNA, 25 bp, Saccharomyces pastorianus
acgaatctacttttgttccagaggg

SEQ ID NO: 148349 - DNA, 25 bp, Saccharomyces pastorianus
aaggtgccgtgccagtaaacgctga

SEQ ID NO: 148350 - DNA, 25 bp, Saccharomyces pastorianus
gaatatttgagctctgcctataccg

SEQ ID NO: 148351 - DNA, 25 bp, Saccharomyces pastorianus
gacgcgggagtcatttacagtgatc

SEQ ID NO: 148352 - DNA, 25 bp, Saccharomyces pastorianus
gaattctgcaattcttcaacccaag

SEQ ID NO: 148353 - DNA, 25 bp, Saccharomyces pastorianus
gtcaggatgagattcccacttgttt

SEQ ID NO: 148354 - DNA, 25 bp, Saccharomyces pastorianus
gcctataccgatccatgtgtcagag

SEQ ID NO: 148355 - DNA, 25 bp, Saccharomyces pastorianus
gcaagtttcactacagcgatgttga

SEQ ID NO: 148356 - DNA, 25 bp, Saccharomyces pastorianus
cagtgatccggcagctgtcatgaaa

SEQ ID NO: 148357 - DNA, 25 bp, Saccharomyces pastorianus
caggcatttcctccggatgttgtgg

SEQ ID NO: 148358 - DNA, 25 bp, Saccharomyces pastorianus
atgacggactgctgtcttctaggac

SEQ ID NO: 148359 - DNA, 25 bp, Saccharomyces pastorianus
tcgtggatcttttttggcctgttca

SEQ ID NO: 148360 - DNA, 25 bp, Saccharomyces pastorianus
ggcctgttcatctatgtcatctaca

SEQ ID NO: 148361 - DNA, 25 bp, Saccharomyces pastorianus
cagcgttcatttcaaccctgattat

SEQ ID NO: 148362 - DNA, 25 bp, Saccharomyces pastorianus
tacgagccacggtctcttaaggaca

SEQ ID NO: 148363 - DNA, 25 bp, Saccharomyces pastorianus
acagttcttcgacttcagcgttcat

SEQ ID NO: 148364 - DNA, 25 bp, Saccharomyces pastorianus
ctttttgctattgcggcccaagaat

SEQ ID NO: 148365 - DNA, 25 bp, Saccharomyces pastorianus
tgaatatctactctcgaaaccgcac

SEQ ID NO: 148366 - DNA, 25 bp, Saccharomyces pastorianus
tgggctgtttgcttcttttaccgat

SEQ ID NO: 148367 - DNA, 25 bp, Saccharomyces pastorianus
gcgtggacggctattttctgttaag

SEQ ID NO: 148368 - DNA, 25 bp, Saccharomyces pastorianus
ttttaccgatattgcttcccgtgaa

SEQ ID NO: 148369 - DNA, 25 bp, Saccharomyces pastorianus
gttccacttgctttcgatattttaa

SEQ ID NO: 148370 - DNA, 25 bp, Saccharomyces pastorianus
gtgcattgcgtttttacagtgttat

SEQ ID NO: 148371 - DNA, 25 bp, Saccharomyces pastorianus
gaatccattgaacgtctgaccaaaa

SEQ ID NO: 148372 - DNA, 25 bp, Saccharomyces pastorianus
aaagaaacccatttgtgcattgcgt

SEQ ID NO: 148373 - DNA, 25 bp, Saccharomyces pastorianus
gaggtttatcaattgtgacttcttc

SEQ ID NO: 148374 - DNA, 25 bp, Saccharomyces pastorianus
aatgcaaacattaccctctatcaag

SEQ ID NO: 148375 - DNA, 25 bp, Saccharomyces pastorianus
atcaaggtgcttttctgttcaaatg

SEQ ID NO: 148376 - DNA, 25 bp, Saccharomyces pastorianus
gtgacttcttctggtatatttgcga

SEQ ID NO: 148377 - DNA, 25 bp, Saccharomyces pastorianus
aaacttcggattgtgttccacttgc

SEQ ID NO: 148378 - DNA, 25 bp, Saccharomyces pastorianus
gacgcattcagagtctaattcctta

SEQ ID NO: 148379 - DNA, 25 bp, Saccharomyces pastorianus
gaattccgacatgatgataccgtta

SEQ ID NO: 148380 - DNA, 25 bp, Saccharomyces pastorianus
gagtacgatggagcacacgcctgac

SEQ ID NO: 148381 - DNA, 25 bp, Saccharomyces pastorianus
ggcaaagcagcattcgtcatcaagt

SEQ ID NO: 148382 - DNA, 25 bp, Saccharomyces pastorianus
gagtgtactgagatcgtgacgcgat

SEQ ID NO: 148383 - DNA, 25 bp, Saccharomyces pastorianus
acacgcctgacactccaaatggagt

SEQ ID NO: 148384 - DNA, 25 bp, Saccharomyces pastorianus
tagtggaagtgtttcaacggctggc

SEQ ID NO: 148385 - DNA, 25 bp, Saccharomyces pastorianus
gcatgggacactgcagtttcataat

SEQ ID NO: 148386 - DNA, 25 bp, Saccharomyces pastorianus
gctgccattcctgaaaacacgaaag

SEQ ID NO: 148387 - DNA, 25 bp, Saccharomyces pastorianus
aaatcctctttgcatgggacactgc

SEQ ID NO: 148388 - DNA, 25 bp, Saccharomyces pastorianus
aagatctttttaccggagcgtatca

SEQ ID NO: 148389 - DNA, 25 bp, Saccharomyces pastorianus
aagcagtttcaggtcaagagtgtac

SEQ ID NO: 148390 - DNA, 25 bp, Saccharomyces pastorianus
cccggagggacgtatacattggcat

SEQ ID NO: 148391 - DNA, 25 bp, Saccharomyces pastorianus
tgttgcctgaactagagtctccacc

SEQ ID NO: 148392 - DNA, 25 bp, Saccharomyces pastorianus
tatatgaactcagacggcgtaagcc

SEQ ID NO: 148393 - DNA, 25 bp, Saccharomyces pastorianus
gcgtaagcctgttgcctgaactaga

SEQ ID NO: 148394 - DNA, 25 bp, Saccharomyces pastorianus
gcagtgcttagattcttctatccgt

SEQ ID NO: 148395 - DNA, 25 bp, Saccharomyces pastorianus
gagtgtgtccggagaaagaccaaat

SEQ ID NO: 148396 - DNA, 25 bp, Saccharomyces pastorianus
actgcgggctcagtttctacgagtg

SEQ ID NO: 148397 - DNA, 25 bp, Saccharomyces pastorianus
gatgaattcaacacagagcagtgct

SEQ ID NO: 148398 - DNA, 25 bp, Saccharomyces pastorianus
cagtttctacgagtgtgtccggaga

SEQ ID NO: 148399 - DNA, 25 bp, Saccharomyces pastorianus
gagtctccaccggtatctaaggatt

SEQ ID NO: 148400 - DNA, 25 bp, Saccharomyces pastorianus
aaaccgtacatacccgtagatgaat

SEQ ID NO: 148401 - DNA, 25 bp, Saccharomyces pastorianus
gacggtattaaatgaactgcgggct

SEQ ID NO: 148402 - DNA, 25 bp, Saccharomyces pastorianus
ggcaaccttaaaaacactagacagt

SEQ ID NO: 148403 - DNA, 25 bp, Saccharomyces pastorianus
actaatcaaaaactccctgaaggag

SEQ ID NO: 148404 - DNA, 25 bp, Saccharomyces pastorianus
aaacggaacaaataagtgcgctctt

SEQ ID NO: 148405 - DNA, 25 bp, Saccharomyces pastorianus
aactggatggtatcccatacttacc

SEQ ID NO: 148406 - DNA, 25 bp, Saccharomyces pastorianus
atagagacttttccatattagatga

SEQ ID NO: 148407 - DNA, 25 bp, Saccharomyces pastorianus
aaacttccatcaactaaccttgaag

SEQ ID NO: 148408 - DNA, 25 bp, Saccharomyces pastorianus
tatcccatacttacctcactaaaat

SEQ ID NO: 148409 - DNA, 25 bp, Saccharomyces pastorianus
ttctaggttgatgaaagtcccaata

SEQ ID NO: 148410 - DNA, 25 bp, Saccharomyces pastorianus
gtggagtcagcgtcatttctgattt

SEQ ID NO: 148411 - DNA, 25 bp, Saccharomyces pastorianus
gaacttattattgaagctttgccaa

SEQ ID NO: 148412 - DNA, 25 bp, Saccharomyces pastorianus
ttacctcactaaaatggcaacctta

SEQ ID NO: 148413 - DNA, 25 bp, Saccharomyces pastorianus
ctggcaagttcgactacaataagct

SEQ ID NO: 148414 - DNA, 25 bp, Saccharomyces pastorianus
ttagacttgaaaccattccaaaatg

SEQ ID NO: 148415 - DNA, 25 bp, Saccharomyces pastorianus
aaaattttgcttctccaggctagcg

SEQ ID NO: 148416 - DNA, 25 bp, Saccharomyces pastorianus
gatcccaagaaaattttgcttctcc

SEQ ID NO: 148417 - DNA, 25 bp, Saccharomyces pastorianus
aagaaaattttgcttctccaggcta

SEQ ID NO: 148418 - DNA, 25 bp, Saccharomyces pastorianus
gaaaattttgcttctccaggctagc

SEQ ID NO: 148419 - DNA, 25 bp, Saccharomyces pastorianus
acctggcaagttcgactacaataag

SEQ ID NO: 148420 - DNA, 25 bp, Saccharomyces pastorianus
aaattttgcttctccaggctagcgc

SEQ ID NO: 148421 - DNA, 25 bp, Saccharomyces pastorianus
tcagatcccaagaaaattttgcttc

SEQ ID NO: 148422 - DNA, 25 bp, Saccharomyces pastorianus
caagttcgactacaataagctgcta

SEQ ID NO: 148423 - DNA, 25 bp, Saccharomyces pastorianus
gacttgaaaccattccaaaatgttc

SEQ ID NO: 148424 - DNA, 25 bp, Saccharomyces pastorianus
acttgtgaatttgcgaatggccatg

SEQ ID NO: 148425 - DNA, 25 bp, Saccharomyces pastorianus
gtgcgtagccataatttatcgcctt

SEQ ID NO: 148426 - DNA, 25 bp, Saccharomyces pastorianus
aaaatccagacggtacttgtgaatt

SEQ ID NO: 148427 - DNA, 25 bp, Saccharomyces pastorianus
atgtcagggttaatgtcactaggca

SEQ ID NO: 148428 - DNA, 25 bp, Saccharomyces pastorianus
aattaacctgcgaagatggcgggaa

SEQ ID NO: 148429 - DNA, 25 bp, Saccharomyces pastorianus
aaggccaggctttgtcgttaactgc

SEQ ID NO: 148430 - DNA, 25 bp, Saccharomyces pastorianus
ggctttgtcgttaactgcatttcca

SEQ ID NO: 148431 - DNA, 25 bp, Saccharomyces pastorianus
tcatcattaatttcgcattcccaga

SEQ ID NO: 148432 - DNA, 25 bp, Saccharomyces pastorianus
gtagggtatacatctatgatcatca

SEQ ID NO: 148433 - DNA, 25 bp, Saccharomyces pastorianus
acctgggaatcattgtgtgcgtagc

SEQ ID NO: 148434 - DNA, 25 bp, Saccharomyces pastorianus
atggccatgatgtgttggtttctta

SEQ ID NO: 148435 - DNA, 25 bp, Saccharomyces pastorianus
gaacgctagctacgaagggagttat

SEQ ID NO: 148436 - DNA, 25 bp, Saccharomyces pastorianus
gaagatgtcctctagacttcggtaa

SEQ ID NO: 148437 - DNA, 25 bp, Saccharomyces pastorianus
tgtcctctagacttcggtaacggta

SEQ ID NO: 148438 - DNA, 25 bp, Saccharomyces pastorianus
agctacgaagggagttatagcgtca

SEQ ID NO: 148439 - DNA, 25 bp, Saccharomyces pastorianus
tatagcgtcaagtggccctcgcgag

SEQ ID NO: 148440 - DNA, 25 bp, Saccharomyces pastorianus
atccccgaagatgtcctctagactt

SEQ ID NO: 148441 - DNA, 25 bp, Saccharomyces pastorianus
ttcggtaacggtagaacgctagcta

SEQ ID NO: 148442 - DNA, 25 bp, Saccharomyces pastorianus
gtaacggtagaacgctagctacgaa

SEQ ID NO: 148443 - DNA, 25 bp, Saccharomyces pastorianus
gatgtcctctagacttcggtaacgg

SEQ ID NO: 148444 - DNA, 25 bp, Saccharomyces pastorianus
tagacttcggtaacggtagaacgct

SEQ ID NO: 148445 - DNA, 25 bp, Saccharomyces pastorianus
aggatccccgaagatgtcctctaga

SEQ ID NO: 148446 - DNA, 25 bp, Saccharomyces pastorianus
aattcccattattcgaggcagtcta

SEQ ID NO: 148447 - DNA, 25 bp, Saccharomyces pastorianus
gaagttcacgagtggctacgaacat

SEQ ID NO: 148448 - DNA, 25 bp, Saccharomyces pastorianus
agttgacccaagaattcccattatt

SEQ ID NO: 148449 - DNA, 25 bp, Saccharomyces pastorianus
gggtaacaatgcctccgcagccatt

SEQ ID NO: 148450 - DNA, 25 bp, Saccharomyces pastorianus
gaccggtaagtcagccttggaagca

SEQ ID NO: 148451 - DNA, 25 bp, Saccharomyces pastorianus
gtttttcccagaatccaaagtcgag

SEQ ID NO: 148452 - DNA, 25 bp, Saccharomyces pastorianus
ttaacggtcaatccgcccaagggat

SEQ ID NO: 148453 - DNA, 25 bp, Saccharomyces pastorianus
gaggcagtctaccagatagtctaca

SEQ ID NO: 148454 - DNA, 25 bp, Saccharomyces pastorianus
gctacgaacatgtgagttgacccaa

SEQ ID NO: 148455 - DNA, 25 bp, Saccharomyces pastorianus
aaacgtcaaggttgccacatacatg

SEQ ID NO: 148456 - DNA, 25 bp, Saccharomyces pastorianus
atccgctggtgttgcagatctgatc

SEQ ID NO: 148457 - DNA, 25 bp, Saccharomyces pastorianus
tgccatccaggccattagaattaaa

SEQ ID NO: 148458 - DNA, 25 bp, Saccharomyces pastorianus
tgagttgaccggattcttacctacc

SEQ ID NO: 148459 - DNA, 25 bp, Saccharomyces pastorianus
ataccaccggtttcattgccatcca

SEQ ID NO: 148460 - DNA, 25 bp, Saccharomyces pastorianus
atccaaccatcccaaaatagcgtta

SEQ ID NO: 148461 - DNA, 25 bp, Saccharomyces pastorianus
aagggtaacgtcatcattctgggca

SEQ ID NO: 148462 - DNA, 25 bp, Saccharomyces pastorianus
cattctgggcagatctacaaagact

SEQ ID NO: 148463 - DNA, 25 bp, Saccharomyces pastorianus
ggtactgtcagggttagactgtata

SEQ ID NO: 148464 - DNA, 25 bp, Saccharomyces pastorianus
atcctctatggatgagttgaccgga

SEQ ID NO: 148465 - DNA, 25 bp, Saccharomyces pastorianus
gtatgatccaacagaatcctctatg

SEQ ID NO: 148466 - DNA, 25 bp, Saccharomyces pastorianus
atagcgttaacggtactgtcagggt

SEQ ID NO: 148467 - DNA, 25 bp, Saccharomyces pastorianus
gattcttacctaccgataccaccgg

SEQ ID NO: 148468 - DNA, 25 bp, Saccharomyces pastorianus
attctatttccagctgtacaggtca

SEQ ID NO: 148469 - DNA, 25 bp, Saccharomyces pastorianus
gaacgtggtcttccagtccagttga

SEQ ID NO: 148470 - DNA, 25 bp, Saccharomyces pastorianus
cctttggatgttttcttggccgcat

SEQ ID NO: 148471 - DNA, 25 bp, Saccharomyces pastorianus
gggtacctctttggcaagacctgtt

SEQ ID NO: 148472 - DNA, 25 bp, Saccharomyces pastorianus
gacgtttatctgttgggtacctctt

SEQ ID NO: 148473 - DNA, 25 bp, Saccharomyces pastorianus
acaggagggctgtttcgcggtctct

SEQ ID NO: 148474 - DNA, 25 bp, Saccharomyces pastorianus
ggtctctcatggttgtaccggtaaa

SEQ ID NO: 148475 - DNA, 25 bp, Saccharomyces pastorianus
aaccaagcccacatttcttacgagg

SEQ ID NO: 148476 - DNA, 25 bp, Saccharomyces pastorianus
aagacctgttattgccaaagcccaa

SEQ ID NO: 148477 - DNA, 25 bp, Saccharomyces pastorianus
gtttccgttaccaagcctttggatg

SEQ ID NO: 148478 - DNA, 25 bp, Saccharomyces pastorianus
gaattgtcattttacgctctgaagc

SEQ ID NO: 148479 - DNA, 25 bp, Saccharomyces pastorianus
tgtccactttggttcattcatcatc

SEQ ID NO: 148480 - DNA, 25 bp, Saccharomyces pastorianus
ttctcctgatgacccattcatgaca

SEQ ID NO: 148481 - DNA, 25 bp, Saccharomyces pastorianus
aagcccgcaagattcgatagcctcg

SEQ ID NO: 148482 - DNA, 25 bp, Saccharomyces pastorianus
tgatcacatcaacggctctggcaaa

SEQ ID NO: 148483 - DNA, 25 bp, Saccharomyces pastorianus
ggtcgtattcgatagcgttgtccaa

SEQ ID NO: 148484 - DNA, 25 bp, Saccharomyces pastorianus
atgcactatcccaaaggctgtggtt

SEQ ID NO: 148485 - DNA, 25 bp, Saccharomyces pastorianus
cgttgtccaatgtagctgctatatt

SEQ ID NO: 148486 - DNA, 25 bp, Saccharomyces pastorianus
gagatgcttacgtcatgcactatcc

SEQ ID NO: 148487 - DNA, 25 bp, Saccharomyces pastorianus
agggctcgcgatcaagattccattg

SEQ ID NO: 148488 - DNA, 25 bp, Saccharomyces pastorianus
tcgccgtccacatcttctaatatgg

SEQ ID NO: 148489 - DNA, 25 bp, Saccharomyces pastorianus
tacgctgggtgattgcttaggtatc

SEQ ID NO: 148490 - DNA, 25 bp, Saccharomyces pastorianus
aaggtcacatcgtttgggtggcctc

SEQ ID NO: 148491 - DNA, 25 bp, Saccharomyces pastorianus
taccgatttcgttcttttcacacgt

SEQ ID NO: 148492 - DNA, 25 bp, Saccharomyces pastorianus
cgcagtaggtgcttcgctttggata

SEQ ID NO: 148493 - DNA, 25 bp, Saccharomyces pastorianus
acgataattttcacgccctttgtct

SEQ ID NO: 148494 - DNA, 25 bp, Saccharomyces pastorianus
ttctggtacatcttcatagccttta

SEQ ID NO: 148495 - DNA, 25 bp, Saccharomyces pastorianus
aagtggctcctttactcgatatcca

SEQ ID NO: 148496 - DNA, 25 bp, Saccharomyces pastorianus
gacgtgctacatttggattcgcgca

SEQ ID NO: 148497 - DNA, 25 bp, Saccharomyces pastorianus
ttttgagccctattttgttgacgtg

SEQ ID NO: 148498 - DNA, 25 bp, Saccharomyces pastorianus
attagagtctattcccattctgggt

SEQ ID NO: 148499 - DNA, 25 bp, Saccharomyces pastorianus
aatatgctaccatttagccccggaa

SEQ ID NO: 148500 - DNA, 25 bp, Saccharomyces pastorianus
gtttcttttattgttgctcgttcca

SEQ ID NO: 148501 - DNA, 25 bp, Saccharomyces pastorianus
agaatgctatgcttgttaaagacaa

SEQ ID NO: 148502 - DNA, 25 bp, Saccharomyces pastorianus
atgtcgactagaccccaacctgatt

SEQ ID NO: 148503 - DNA, 25 bp, Saccharomyces pastorianus
caagaccaagggaaccataagaaat

SEQ ID NO: 148504 - DNA, 25 bp, Saccharomyces pastorianus
accatagacatccatatgcctctac

SEQ ID NO: 148505 - DNA, 25 bp, Saccharomyces pastorianus
caatttttggaaagacctagagtcg

SEQ ID NO: 148506 - DNA, 25 bp, Saccharomyces pastorianus
atgcctctacgccactggcagaagg

SEQ ID NO: 148507 - DNA, 25 bp, Saccharomyces pastorianus
gcatacaaggctccgatagttcgat

SEQ ID NO: 148508 - DNA, 25 bp, Saccharomyces pastorianus
gaccccaacctgattggtattacca

SEQ ID NO: 148509 - DNA, 25 bp, Saccharomyces pastorianus
gactagaccccaacctgattggtat

SEQ ID NO: 148510 - DNA, 25 bp, Saccharomyces pastorianus
tcgatggtacaagaatgctatgctt

SEQ ID NO: 148511 - DNA, 25 bp, Saccharomyces pastorianus
aggctccgatagttcgatggtacaa

SEQ ID NO: 148512 - DNA, 25 bp, Saccharomyces pastorianus
gggcgctttgcaaaacattacctaa

SEQ ID NO: 148513 - DNA, 25 bp, Saccharomyces pastorianus
ggctgtcctgaagcatcatttcaca

SEQ ID NO: 148514 - DNA, 25 bp, Saccharomyces pastorianus
aaatacaccattttcacgagcctat

SEQ ID NO: 148515 - DNA, 25 bp, Saccharomyces pastorianus
gatattactgttctggctggttcat

SEQ ID NO: 148516 - DNA, 25 bp, Saccharomyces pastorianus
gtttaatcaacgcacctctactgat

SEQ ID NO: 148517 - DNA, 25 bp, Saccharomyces pastorianus
cattacctaagttatctccaaccct

SEQ ID NO: 148518 - DNA, 25 bp, Saccharomyces pastorianus
aaccctcaccgaatatgtattgggc

SEQ ID NO: 148519 - DNA, 25 bp, Saccharomyces pastorianus
gctggttcattttgggctgtcctga

SEQ ID NO: 148520 - DNA, 25 bp, Saccharomyces pastorianus
ggtctgctgctactcttatgtttga

SEQ ID NO: 148521 - DNA, 25 bp, Saccharomyces pastorianus
attttcaaacatgttccagcggcct

SEQ ID NO: 148522 - DNA, 25 bp, Saccharomyces pastorianus
caaaaacggacttctgctcacaggt

SEQ ID NO: 148523 - DNA, 25 bp, Saccharomyces pastorianus
tgatattaccgttttcaagtccaac

SEQ ID NO: 148524 - DNA, 25 bp, Saccharomyces pastorianus
gtcagcgcctgtgatattatgccca

SEQ ID NO: 148525 - DNA, 25 bp, Saccharomyces pastorianus
tgaacaatctgcctatgcattccct

SEQ ID NO: 148526 - DNA, 25 bp, Saccharomyces pastorianus
tattttcacgttagatacccctcaa

SEQ ID NO: 148527 - DNA, 25 bp, Saccharomyces pastorianus
caagaatgtgtgaaccttttcataa

SEQ ID NO: 148528 - DNA, 25 bp, Saccharomyces pastorianus
gaccaagtcggtaaatgatcagagg

SEQ ID NO: 148529 - DNA, 25 bp, Saccharomyces pastorianus
ctcgattcttctctaagggatttac

SEQ ID NO: 148530 - DNA, 25 bp, Saccharomyces pastorianus
gttttcaagtccaaccctatgatat

SEQ ID NO: 148531 - DNA, 25 bp, Saccharomyces pastorianus
ttatgcccagctttaccaaattagg

SEQ ID NO: 148532 - DNA, 25 bp, Saccharomyces pastorianus
caaattaggtttaacactgcagagt

SEQ ID NO: 148533 - DNA, 25 bp, Saccharomyces pastorianus
ttagatttatttgtcagcgcctgtg

SEQ ID NO: 148534 - DNA, 25 bp, Saccharomyces pastorianus
ttggattccaaacccttctgaggat

SEQ ID NO: 148535 - DNA, 25 bp, Saccharomyces pastorianus
cggttcctcagcagtcgaaagactt

SEQ ID NO: 148536 - DNA, 25 bp, Saccharomyces pastorianus
agatcacgcagttttggagcccaaa

SEQ ID NO: 148537 - DNA, 25 bp, Saccharomyces pastorianus
atacactgtgtcatggctggttctt

SEQ ID NO: 148538 - DNA, 25 bp, Saccharomyces pastorianus
agagtttacctctgcaccatttaga

SEQ ID NO: 148539 - DNA, 25 bp, Saccharomyces pastorianus
attttggatcaagtcacagccgaac

SEQ ID NO: 148540 - DNA, 25 bp, Saccharomyces pastorianus
gatttgcgcgcttattcaacaatgt

SEQ ID NO: 148541 - DNA, 25 bp, Saccharomyces pastorianus
attgactggcttgcattatcatgaa

SEQ ID NO: 148542 - DNA, 25 bp, Saccharomyces pastorianus
gagagttggagcacacggttcctca

SEQ ID NO: 148543 - DNA, 25 bp, Saccharomyces pastorianus
gtgctggtgcggttcgtctagaaaa

SEQ ID NO: 148544 - DNA, 25 bp, Saccharomyces pastorianus
aacgcgtgtgccgaaaacacttctc

SEQ ID NO: 148545 - DNA, 25 bp, Saccharomyces pastorianus
agaccaaatcccttacaacaactga

SEQ ID NO: 148546 - DNA, 25 bp, Saccharomyces pastorianus
gtgtctgccattaacgctcaatttg

SEQ ID NO: 148547 - DNA, 25 bp, Saccharomyces pastorianus
aaaaccgatgagttcctgaaagcaa

SEQ ID NO: 148548 - DNA, 25 bp, Saccharomyces pastorianus
gaaggcgaacgctattaatcatgag

SEQ ID NO: 148549 - DNA, 25 bp, Saccharomyces pastorianus
gaaccgccaataatgaccgtgtctg

SEQ ID NO: 148550 - DNA, 25 bp, Saccharomyces pastorianus
gtccgtgatgctgtgttgatggtta

SEQ ID NO: 148551 - DNA, 25 bp, Saccharomyces pastorianus
acaggccaccattattagtacaaag

SEQ ID NO: 148552 - DNA, 25 bp, Saccharomyces pastorianus
aagccttgactgttgtagattctga

SEQ ID NO: 148553 - DNA, 25 bp, Saccharomyces pastorianus
attagcacaaacacatcttcctgag

SEQ ID NO: 148554 - DNA, 25 bp, Saccharomyces pastorianus
cggtatcttaaatcaggaccaggat

SEQ ID NO: 148555 - DNA, 25 bp, Saccharomyces pastorianus
gattctgattcttacaagctatttg

SEQ ID NO: 148556 - DNA, 25 bp, Saccharomyces pastorianus
gaacaactcattgatcttgtcaaga

SEQ ID NO: 148557 - DNA, 25 bp, Saccharomyces pastorianus
attggccgccaaaatcgttcagcat

SEQ ID NO: 148558 - DNA, 25 bp, Saccharomyces pastorianus
gatgctcagggaaacgtgcccatca

SEQ ID NO: 148559 - DNA, 25 bp, Saccharomyces pastorianus
ggcacaagtttacccttcattgaca

SEQ ID NO: 148560 - DNA, 25 bp, Saccharomyces pastorianus
gaaggccagcatgaatgccgaagca

SEQ ID NO: 148561 - DNA, 25 bp, Saccharomyces pastorianus
aattcgaaatattaccacggcaggg

SEQ ID NO: 148562 - DNA, 25 bp, Saccharomyces pastorianus
cacggcagggcagttggcacaagtt

SEQ ID NO: 148563 - DNA, 25 bp, Saccharomyces pastorianus
ctgatccgtttactgacaccaatgg

SEQ ID NO: 148564 - DNA, 25 bp, Saccharomyces pastorianus
gatcttgtcaagacctaacttagga

SEQ ID NO: 148565 - DNA, 25 bp, Saccharomyces pastorianus
ttatcagggttcctagatgctcagg

SEQ ID NO: 148566 - DNA, 25 bp, Saccharomyces pastorianus
gaaacgtgcccatcaagaggtttga

SEQ ID NO: 148567 - DNA, 25 bp, Saccharomyces pastorianus
gcaactatcggtagaagtccccaat

SEQ ID NO: 148568 - DNA, 25 bp, Saccharomyces pastorianus
atcggtagaagtccccaattcaaat

SEQ ID NO: 148569 - DNA, 25 bp, Saccharomyces pastorianus
tcaggaaatccattgcaactatcgg

SEQ ID NO: 148570 - DNA, 25 bp, Saccharomyces pastorianus
ggaaatccattgcaactatcggtag

SEQ ID NO: 148571 - DNA, 25 bp, Saccharomyces pastorianus
gtagaagtccccaattcaaatgggt

SEQ ID NO: 148572 - DNA, 25 bp, Saccharomyces pastorianus
tatcggtagaagtccccaattcaaa

SEQ ID NO: 148573 - DNA, 25 bp, Saccharomyces pastorianus
agtccccaattcaaatgggttacag

SEQ ID NO: 148574 - DNA, 25 bp, Saccharomyces pastorianus
actatcggtagaagtccccaattca

SEQ ID NO: 148575 - DNA, 25 bp, Saccharomyces pastorianus
gaaatccattgcaactatcggtaga

SEQ ID NO: 148576 - DNA, 25 bp, Saccharomyces pastorianus
aatccattgcaactatcggtagaag

SEQ ID NO: 148577 - DNA, 25 bp, Saccharomyces pastorianus
caattcaaatgggttacagcataca

SEQ ID NO: 148578 - DNA, 25 bp, Saccharomyces pastorianus
gtatccaagaacaactaaatcctga

SEQ ID NO: 148579 - DNA, 25 bp, Saccharomyces pastorianus
caaaaaatccgtcaacatacgcaaa

SEQ ID NO: 148580 - DNA, 25 bp, Saccharomyces pastorianus
gcgttagagaacattgcatctggat

SEQ ID NO: 148581 - DNA, 25 bp, Saccharomyces pastorianus
gcatctggattgcacgttcgtggac

SEQ ID NO: 148582 - DNA, 25 bp, Saccharomyces pastorianus
tctgccgatcagttacacatatcaa

SEQ ID NO: 148583 - DNA, 25 bp, Saccharomyces pastorianus
tgcacgttcgtggacagaaagtaga

SEQ ID NO: 148584 - DNA, 25 bp, Saccharomyces pastorianus
atgaatgcggcttccgatgcaaaga

SEQ ID NO: 148585 - DNA, 25 bp, Saccharomyces pastorianus
gattcaacttcgatctcatcagcgt

SEQ ID NO: 148586 - DNA, 25 bp, Saccharomyces pastorianus
ggcttccgatgcaaagaggtatctg

SEQ ID NO: 148587 - DNA, 25 bp, Saccharomyces pastorianus
aacttcgatctcatcagcgttagag

SEQ ID NO: 148588 - DNA, 25 bp, Saccharomyces pastorianus
gaggtatctgccgatcagttacaca

SEQ ID NO: 148589 - DNA, 25 bp, Saccharomyces pastorianus
acagtgcgttgtcaccggatctaaa

SEQ ID NO: 148590 - DNA, 25 bp, Saccharomyces pastorianus
atgtagttcaagctctttctcttcc

SEQ ID NO: 148591 - DNA, 25 bp, Saccharomyces pastorianus
caatatcgaaatgctgtggagacaa

SEQ ID NO: 148592 - DNA, 25 bp, Saccharomyces pastorianus
gaaaccagtaacatgttgcaaccaa

SEQ ID NO: 148593 - DNA, 25 bp, Saccharomyces pastorianus
tggatacctggaagctgcaagcaat

SEQ ID NO: 148594 - DNA, 25 bp, Saccharomyces pastorianus
gataacgagaatagaccgatcacta

SEQ ID NO: 148595 - DNA, 25 bp, Saccharomyces pastorianus
tagtccccgtttgctgttcagaaaa

SEQ ID NO: 148596 - DNA, 25 bp, Saccharomyces pastorianus
taacataatgccatccttagtcccc

SEQ ID NO: 148597 - DNA, 25 bp, Saccharomyces pastorianus
gaacaacaaactgacgcgaattaca

SEQ ID NO: 148598 - DNA, 25 bp, Saccharomyces pastorianus
tttctcttccaacagtgcgttgtca

SEQ ID NO: 148599 - DNA, 25 bp, Saccharomyces pastorianus
ggaatttttgtcaatcactttcgaa

SEQ ID NO: 148600 - DNA, 25 bp, Saccharomyces pastorianus
acaacagaattacccactcacaatg

SEQ ID NO: 148601 - DNA, 25 bp, Saccharomyces pastorianus
gtgagagatctgtccttccaattgc

SEQ ID NO: 148602 - DNA, 25 bp, Saccharomyces pastorianus
attcccactggattactctatgcta

SEQ ID NO: 148603 - DNA, 25 bp, Saccharomyces pastorianus
atactttgtcgttgcaatccggttc

SEQ ID NO: 148604 - DNA, 25 bp, Saccharomyces pastorianus
ggttccgaattgtctgttctacagc

SEQ ID NO: 148605 - DNA, 25 bp, Saccharomyces pastorianus
tttctctactactacaactattccc

SEQ ID NO: 148606 - DNA, 25 bp, Saccharomyces pastorianus
gaggttattgatcatctgctggtta

SEQ ID NO: 148607 - DNA, 25 bp, Saccharomyces pastorianus
actcgtggcgagcaatttcaattga

SEQ ID NO: 148608 - DNA, 25 bp, Saccharomyces pastorianus
gctggaccaaattctacgcacatac

SEQ ID NO: 148609 - DNA, 25 bp, Saccharomyces pastorianus
gattttacccactattgcgcgatat

SEQ ID NO: 148610 - DNA, 25 bp, Saccharomyces pastorianus
gtacgttagcgcatactttgtcgtt

SEQ ID NO: 148611 - DNA, 25 bp, Saccharomyces pastorianus
acctagtatcgtttcaagtgctccc

SEQ ID NO: 148612 - DNA, 25 bp, Saccharomyces pastorianus
tcccggtattggtcgaagaacaaga

SEQ ID NO: 148613 - DNA, 25 bp, Saccharomyces pastorianus
ctcttgttaacgaattgctgctccc

SEQ ID NO: 148614 - DNA, 25 bp, Saccharomyces pastorianus
ttgcacattagtaaactgattgagc

SEQ ID NO: 148615 - DNA, 25 bp, Saccharomyces pastorianus
gctgctcccggtattggtcgaagaa

SEQ ID NO: 148616 - DNA, 25 bp, Saccharomyces pastorianus
ggacaatgaccttaaatatatgctt

SEQ ID NO: 148617 - DNA, 25 bp, Saccharomyces pastorianus
atcgttccactaaggacaatgacct

SEQ ID NO: 148618 - DNA, 25 bp, Saccharomyces pastorianus
gtttcaagtgctccccgatttagtt

SEQ ID NO: 148619 - DNA, 25 bp, Saccharomyces pastorianus
atggaaattctcaacctagtatcgt

SEQ ID NO: 148620 - DNA, 25 bp, Saccharomyces pastorianus
ttaacgaattgctgctcccggtatt

SEQ ID NO: 148621 - DNA, 25 bp, Saccharomyces pastorianus
gattgagcaatatcgttccactaag

SEQ ID NO: 148622 - DNA, 25 bp, Saccharomyces pastorianus
gagcttattcttatcctgactttag

SEQ ID NO: 148623 - DNA, 25 bp, Saccharomyces pastorianus
tacacacatttcacatcacctatta

SEQ ID NO: 148624 - DNA, 25 bp, Saccharomyces pastorianus
catgtcgactcgctgtatgatggca

SEQ ID NO: 148625 - DNA, 25 bp, Saccharomyces pastorianus
ggtatagtcgtactggttcccaagt

SEQ ID NO: 148626 - DNA, 25 bp, Saccharomyces pastorianus
attggttcgtatcatgtcgactcgc

SEQ ID NO: 148627 - DNA, 25 bp, Saccharomyces pastorianus
acagaaacgcccaattcgccggtag

SEQ ID NO: 148628 - DNA, 25 bp, Saccharomyces pastorianus
cagccgcttttgatgaggtggaata

SEQ ID NO: 148629 - DNA, 25 bp, Saccharomyces pastorianus
gatggcagcccagtatttttattct

SEQ ID NO: 148630 - DNA, 25 bp, Saccharomyces pastorianus
tactgtgatgttgtggcccatagac

SEQ ID NO: 148631 - DNA, 25 bp, Saccharomyces pastorianus
tgaggatcctaactcagccgctttt

SEQ ID NO: 148632 - DNA, 25 bp, Saccharomyces pastorianus
gaacccctaagtttgactcatcgtg

SEQ ID NO: 148633 - DNA, 25 bp, Saccharomyces pastorianus
aatacccattaggtcactttgtgag

SEQ ID NO: 148634 - DNA, 25 bp, Saccharomyces pastorianus
gtacaattgaatctgctcaagctga

SEQ ID NO: 148635 - DNA, 25 bp, Saccharomyces pastorianus
gataagaggattgtcatttccattg

SEQ ID NO: 148636 - DNA, 25 bp, Saccharomyces pastorianus
cagaggccttattgttggagcatga

SEQ ID NO: 148637 - DNA, 25 bp, Saccharomyces pastorianus
tcatttccattgattcgtggcccac

SEQ ID NO: 148638 - DNA, 25 bp, Saccharomyces pastorianus
gctgctgaattattggataagagga

SEQ ID NO: 148639 - DNA, 25 bp, Saccharomyces pastorianus
attcgtggcccaccactcataaata

SEQ ID NO: 148640 - DNA, 25 bp, Saccharomyces pastorianus
ggccttattgttggagcatgatgtt

SEQ ID NO: 148641 - DNA, 25 bp, Saccharomyces pastorianus
ctgctcaagctgaaacagaggcctt

SEQ ID NO: 148642 - DNA, 25 bp, Saccharomyces pastorianus
gtcactttgtgagagacctcggtac

SEQ ID NO: 148643 - DNA, 25 bp, Saccharomyces pastorianus
gacctcggtacaattgaatctgctc

SEQ ID NO: 148644 - DNA, 25 bp, Saccharomyces pastorianus
tagagcattcaacggtgaccaggtt

SEQ ID NO: 148645 - DNA, 25 bp, Saccharomyces pastorianus
gcaccctcatccattgtcttggatt

SEQ ID NO: 148646 - DNA, 25 bp, Saccharomyces pastorianus
cttggattctgaacatttcgacgtt

SEQ ID NO: 148647 - DNA, 25 bp, Saccharomyces pastorianus
caatcagaatggaaggcaccctcat

SEQ ID NO: 148648 - DNA, 25 bp, Saccharomyces pastorianus
attttcagatttcacgttcccggag

SEQ ID NO: 148649 - DNA, 25 bp, Saccharomyces pastorianus
ggttatcgtggaactgctactcaat

SEQ ID NO: 148650 - DNA, 25 bp, Saccharomyces pastorianus
aatggcgttttgtaccagggcaata

SEQ ID NO: 148651 - DNA, 25 bp, Saccharomyces pastorianus
gttcccggagtactattctacagca

SEQ ID NO: 148652 - DNA, 25 bp, Saccharomyces pastorianus
agcttggtacagtatatcgagttac

SEQ ID NO: 148653 - DNA, 25 bp, Saccharomyces pastorianus
atcgagttactaccaaatgcagacg

SEQ ID NO: 148654 - DNA, 25 bp, Saccharomyces pastorianus
gataaccccgatattgaggctggcg

SEQ ID NO: 148655 - DNA, 25 bp, Saccharomyces pastorianus
atacggatcacatttcgcagaaaac

SEQ ID NO: 148656 - DNA, 25 bp, Saccharomyces pastorianus
aaatgcgaccacatcacttttttgt

SEQ ID NO: 148657 - DNA, 25 bp, Saccharomyces pastorianus
gaatcagattttgcaacgttgacta

SEQ ID NO: 148658 - DNA, 25 bp, Saccharomyces pastorianus
aaactgctgggcatgcggtacagaa

SEQ ID NO: 148659 - DNA, 25 bp, Saccharomyces pastorianus
ggctattcctcttcaattaacgtgg

SEQ ID NO: 148660 - DNA, 25 bp, Saccharomyces pastorianus
atgaccatgtctgaatacggatcac

SEQ ID NO: 148661 - DNA, 25 bp, Saccharomyces pastorianus
aaaggttccagggaccacattctca

SEQ ID NO: 148662 - DNA, 25 bp, Saccharomyces pastorianus
acatctacttggtatagtgtcctgg

SEQ ID NO: 148663 - DNA, 25 bp, Saccharomyces pastorianus
cacaaccacattttctacttcatta

SEQ ID NO: 148664 - DNA, 25 bp, Saccharomyces pastorianus
atagtgtcctggattgcggctattc

SEQ ID NO: 148665 - DNA, 25 bp, Saccharomyces pastorianus
gaccacattctcagctaatatgcca

SEQ ID NO: 148666 - DNA, 25 bp, Saccharomyces pastorianus
agctctactgcaagtgtactgcctg

SEQ ID NO: 148667 - DNA, 25 bp, Saccharomyces pastorianus
gaaggcattccgcacgagaaactga

SEQ ID NO: 148668 - DNA, 25 bp, Saccharomyces pastorianus
atgtaacatcgtatgctctgccaca

SEQ ID NO: 148669 - DNA, 25 bp, Saccharomyces pastorianus
tagtaaagacgagtgctggcaacca

SEQ ID NO: 148670 - DNA, 25 bp, Saccharomyces pastorianus
gaaggcatctctgtatcgacattga

SEQ ID NO: 148671 - DNA, 25 bp, Saccharomyces pastorianus
aagtgtactgcctgcatccattact

SEQ ID NO: 148672 - DNA, 25 bp, Saccharomyces pastorianus
atgctctgccacatccaacagaagg

SEQ ID NO: 148673 - DNA, 25 bp, Saccharomyces pastorianus
gcctataacctaccaactgcatatt

SEQ ID NO: 148674 - DNA, 25 bp, Saccharomyces pastorianus
ttaagatccagcctataacctacca

SEQ ID NO: 148675 - DNA, 25 bp, Saccharomyces pastorianus
gcatccattactactgtaccacaag

SEQ ID NO: 148676 - DNA, 25 bp, Saccharomyces pastorianus
cggataatttggacagctctactgc

SEQ ID NO: 148677 - DNA, 25 bp, Saccharomyces pastorianus
gcgagcagctaataaggaccagact

SEQ ID NO: 148678 - DNA, 25 bp, Saccharomyces pastorianus
acttccctggccaccagatggaggt

SEQ ID NO: 148679 - DNA, 25 bp, Saccharomyces pastorianus
cgtcttcaatcatggcagctcaaca

SEQ ID NO: 148680 - DNA, 25 bp, Saccharomyces pastorianus
acaaacaccgtcttcaatcatggca

SEQ ID NO: 148681 - DNA, 25 bp, Saccharomyces pastorianus
attggaagaccacatcctttcactt

SEQ ID NO: 148682 - DNA, 25 bp, Saccharomyces pastorianus
ggcagctcaacaatagagatgcgta

SEQ ID NO: 148683 - DNA, 25 bp, Saccharomyces pastorianus
atggcagacatgcttctcgtgagaa

SEQ ID NO: 148684 - DNA, 25 bp, Saccharomyces pastorianus
aggctaactcctcattggaagacca

SEQ ID NO: 148685 - DNA, 25 bp, Saccharomyces pastorianus
ggaccagacttcctcaaaatggcag

SEQ ID NO: 148686 - DNA, 25 bp, Saccharomyces pastorianus
gcgtaatgaaagtggcgagcagcta

SEQ ID NO: 148687 - DNA, 25 bp, Saccharomyces pastorianus
ccatatggtgttcctaagggagatg

SEQ ID NO: 148688 - DNA, 25 bp, Saccharomyces pastorianus
atccaggaaggcctttgcccaacta

SEQ ID NO: 148689 - DNA, 25 bp, Saccharomyces pastorianus
acgatgaattgcgtcggctttgcaa

SEQ ID NO: 148690 - DNA, 25 bp, Saccharomyces pastorianus
taaattcttttgtcctactaacgat

SEQ ID NO: 148691 - DNA, 25 bp, Saccharomyces pastorianus
gacgactagtgttttattttgcata

SEQ ID NO: 148692 - DNA, 25 bp, Saccharomyces pastorianus
cttgcctggctacttcttcaaaaaa

SEQ ID NO: 148693 - DNA, 25 bp, Saccharomyces pastorianus
atatatccagagtcgaggtcgtttc

SEQ ID NO: 148694 - DNA, 25 bp, Saccharomyces pastorianus
actatccgcatttccttagattctt

SEQ ID NO: 148695 - DNA, 25 bp, Saccharomyces pastorianus
cccctgatatctggcggaatttctg

SEQ ID NO: 148696 - DNA, 25 bp, Saccharomyces pastorianus
tgatatggctctcctattacttggc

SEQ ID NO: 148697 - DNA, 25 bp, Saccharomyces pastorianus
gtcggctttgcaaactatccgcatt

SEQ ID NO: 148698 - DNA, 25 bp, Saccharomyces pastorianus
gctagaatctttgttcaactccgga

SEQ ID NO: 148699 - DNA, 25 bp, Saccharomyces pastorianus
atttggacccaaattcagctctttt

SEQ ID NO: 148700 - DNA, 25 bp, Saccharomyces pastorianus
gagtcactccttaagaattgctacc

SEQ ID NO: 148701 - DNA, 25 bp, Saccharomyces pastorianus
ctgagtagctcctttcattgtctaa

SEQ ID NO: 148702 - DNA, 25 bp, Saccharomyces pastorianus
tggtaatcgacctcttttattcggg

SEQ ID NO: 148703 - DNA, 25 bp, Saccharomyces pastorianus
gttattgcggcattgtgccacttga

SEQ ID NO: 148704 - DNA, 25 bp, Saccharomyces pastorianus
ttctcaccaacttttccattttcta

SEQ ID NO: 148705 - DNA, 25 bp, Saccharomyces pastorianus
attttccctattttgcctatttgcg

SEQ ID NO: 148706 - DNA, 25 bp, Saccharomyces pastorianus
tattccaatattcagcggcctttac

SEQ ID NO: 148707 - DNA, 25 bp, Saccharomyces pastorianus
attggcgctgttctttatggaatgc

SEQ ID NO: 148708 - DNA, 25 bp, Saccharomyces pastorianus
gcggcctttactgctatagtttttc

SEQ ID NO: 148709 - DNA, 25 bp, Saccharomyces pastorianus
gagaccttacagagctgggctattt

SEQ ID NO: 148710 - DNA, 25 bp, Saccharomyces pastorianus
cgcagaggtcgctaaagctaaaaaa

SEQ ID NO: 148711 - DNA, 25 bp, Saccharomyces pastorianus
ctaagagtgtgcaagagctgaagaa

SEQ ID NO: 148712 - DNA, 25 bp, Saccharomyces pastorianus
aaatcccgcagaggtcgctaaagct

SEQ ID NO: 148713 - DNA, 25 bp, Saccharomyces pastorianus
atcccgcagaggtcgctaaagctaa

SEQ ID NO: 148714 - DNA, 25 bp, Saccharomyces pastorianus
aggactaagagtgtgcaagagctga

SEQ ID NO: 148715 - DNA, 25 bp, Saccharomyces pastorianus
gcaaatcccgcagaggtcgctaaag

SEQ ID NO: 148716 - DNA, 25 bp, Saccharomyces pastorianus
gtcaactttattagaaaggactaag

SEQ ID NO: 148717 - DNA, 25 bp, Saccharomyces pastorianus
cgcaaatcccgcagaggtcgctaaa

SEQ ID NO: 148718 - DNA, 25 bp, Saccharomyces pastorianus
gcaagagctgaagaagagagctgca

SEQ ID NO: 148719 - DNA, 25 bp, Saccharomyces pastorianus
tcccgcagaggtcgctaaagctaaa

SEQ ID NO: 148720 - DNA, 25 bp, Saccharomyces pastorianus
gctaaaaaagtactaagaaggctat

SEQ ID NO: 148721 - DNA, 25 bp, Saccharomyces pastorianus
agtagaccctgtgagcgcacctaat

SEQ ID NO: 148722 - DNA, 25 bp, Saccharomyces pastorianus
tctcgttgttcctgtcaagctagag

SEQ ID NO: 148723 - DNA, 25 bp, Saccharomyces pastorianus
gcaatatttccaagagccgagccaa

SEQ ID NO: 148724 - DNA, 25 bp, Saccharomyces pastorianus
tagagaaacctctcgttgttcctgt

SEQ ID NO: 148725 - DNA, 25 bp, Saccharomyces pastorianus
gaagatatcaggatccgagcacaaa

SEQ ID NO: 148726 - DNA, 25 bp, Saccharomyces pastorianus
cacctaatcactcgcctgagattga

SEQ ID NO: 148727 - DNA, 25 bp, Saccharomyces pastorianus
gattcgacccatcatctagcgatag

SEQ ID NO: 148728 - DNA, 25 bp, Saccharomyces pastorianus
attttaccacgtgaggagcatgata

SEQ ID NO: 148729 - DNA, 25 bp, Saccharomyces pastorianus
aagtctgccttagcaaacttggagg

SEQ ID NO: 148730 - DNA, 25 bp, Saccharomyces pastorianus
ctaattcttctattctgttgggtaa

SEQ ID NO: 148731 - DNA, 25 bp, Saccharomyces pastorianus
gagccaagcctgtcactaattcttc

SEQ ID NO: 148732 - DNA, 25 bp, Saccharomyces pastorianus
ttgtcgcatatacacctactgatgt

SEQ ID NO: 148733 - DNA, 25 bp, Saccharomyces pastorianus
aatgaggaagctactcccattccat

SEQ ID NO: 148734 - DNA, 25 bp, Saccharomyces pastorianus
gtccgccagaatgcaaaactattag

SEQ ID NO: 148735 - DNA, 25 bp, Saccharomyces pastorianus
gactataagtgttcctcaaattcgt

SEQ ID NO: 148736 - DNA, 25 bp, Saccharomyces pastorianus
aagtatagaccactgacaccttctt

SEQ ID NO: 148737 - DNA, 25 bp, Saccharomyces pastorianus
gtgttgtttctttgaccaatggcgt

SEQ ID NO: 148738 - DNA, 25 bp, Saccharomyces pastorianus
caaaacccatgacggcatatgccag

SEQ ID NO: 148739 - DNA, 25 bp, Saccharomyces pastorianus
gtacaacataccacctgagagggaa

SEQ ID NO: 148740 - DNA, 25 bp, Saccharomyces pastorianus
gaatcgccacgatttgttatgccaa

SEQ ID NO: 148741 - DNA, 25 bp, Saccharomyces pastorianus
agttattggctgcacttgtcgcata

SEQ ID NO: 148742 - DNA, 25 bp, Saccharomyces pastorianus
gcgtaactgaacatgtccgccagaa

SEQ ID NO: 148743 - DNA, 25 bp, Saccharomyces pastorianus
gtttatcaggtacttccatggcgtc

SEQ ID NO: 148744 - DNA, 25 bp, Saccharomyces pastorianus
gatagagcattcttttcgaactggg

SEQ ID NO: 148745 - DNA, 25 bp, Saccharomyces pastorianus
ctttttatcattacagcctgcacca

SEQ ID NO: 148746 - DNA, 25 bp, Saccharomyces pastorianus
ggtgtccattttgctattgcggcag

SEQ ID NO: 148747 - DNA, 25 bp, Saccharomyces pastorianus
tatgtccacctatattggttcaagg

SEQ ID NO: 148748 - DNA, 25 bp, Saccharomyces pastorianus
agtgaatttttcaacgacgctccct

SEQ ID NO: 148749 - DNA, 25 bp, Saccharomyces pastorianus
atcggtgatgatactcctaacaaat

SEQ ID NO: 148750 - DNA, 25 bp, Saccharomyces pastorianus
gaagatgcttgtctcagttcaccag

SEQ ID NO: 148751 - DNA, 25 bp, Saccharomyces pastorianus
attacggtcggtgcttcgacattta

SEQ ID NO: 148752 - DNA, 25 bp, Saccharomyces pastorianus
gtttgctcccggtataaatattatg

SEQ ID NO: 148753 - DNA, 25 bp, Saccharomyces pastorianus
gcagctgtagatagcggtgtccatt

SEQ ID NO: 148754 - DNA, 25 bp, Saccharomyces pastorianus
gaaggatcatagtacctcagtaggt

SEQ ID NO: 148755 - DNA, 25 bp, Saccharomyces pastorianus
gtatgatcatccctgaattcgacgg

SEQ ID NO: 148756 - DNA, 25 bp, Saccharomyces pastorianus
agatatttccctccagcagattcaa

SEQ ID NO: 148757 - DNA, 25 bp, Saccharomyces pastorianus
aggtttgggacagcatgatcctgga

SEQ ID NO: 148758 - DNA, 25 bp, Saccharomyces pastorianus
agaatattgatggtactcgcagtgt

SEQ ID NO: 148759 - DNA, 25 bp, Saccharomyces pastorianus
taaaacagagtttctaccttatcgg

SEQ ID NO: 148760 - DNA, 25 bp, Saccharomyces pastorianus
accttatcggtatgtcatagtcttt

SEQ ID NO: 148761 - DNA, 25 bp, Saccharomyces pastorianus
aatcgcatatgcaagtggtacagaa

SEQ ID NO: 148762 - DNA, 25 bp, Saccharomyces pastorianus
gatcctggaaattttcacactgaac

SEQ ID NO: 148763 - DNA, 25 bp, Saccharomyces pastorianus
attgctgtctttgtatgatcatccc

SEQ ID NO: 148764 - DNA, 25 bp, Saccharomyces pastorianus
actgaacatcaacatgtcgctcata

SEQ ID NO: 148765 - DNA, 25 bp, Saccharomyces pastorianus
tttaaagatccaaagtcacctgcgg

SEQ ID NO: 148766 - DNA, 25 bp, Saccharomyces pastorianus
agaagaaagtcaactcgcccagcga

SEQ ID NO: 148767 - DNA, 25 bp, Saccharomyces pastorianus
caggtatgtggttgcttctcaggac

SEQ ID NO: 148768 - DNA, 25 bp, Saccharomyces pastorianus
gttatggaacctctcagtacggcga

SEQ ID NO: 148769 - DNA, 25 bp, Saccharomyces pastorianus
aagtcacctgcggagtgcatcgaaa

SEQ ID NO: 148770 - DNA, 25 bp, Saccharomyces pastorianus
aagcgtcgttaatattagcggtgca

SEQ ID NO: 148771 - DNA, 25 bp, Saccharomyces pastorianus
ggtgttccattaatccatttaacca

SEQ ID NO: 148772 - DNA, 25 bp, Saccharomyces pastorianus
tcgcccagcgatgaggtgaaagaca

SEQ ID NO: 148773 - DNA, 25 bp, Saccharomyces pastorianus
gaaagcttggtccaaaggctcctaa

SEQ ID NO: 148774 - DNA, 25 bp, Saccharomyces pastorianus
aaggctcctaatcctttgagcgtaa

SEQ ID NO: 148775 - DNA, 25 bp, Saccharomyces pastorianus
ctcagtacggcgagtgccaaggcaa

SEQ ID NO: 148776 - DNA, 25 bp, Saccharomyces pastorianus
gctcccgatatacctaacatgcttc

SEQ ID NO: 148777 - DNA, 25 bp, Saccharomyces pastorianus
cgctcccgatatacctaacatgctt

SEQ ID NO: 148778 - DNA, 25 bp, Saccharomyces pastorianus
tgcttcaaaagagggctaagtcata

SEQ ID NO: 148779 - DNA, 25 bp, Saccharomyces pastorianus
gatatacctaacatgcttcaaaaga

SEQ ID NO: 148780 - DNA, 25 bp, Saccharomyces pastorianus
tcccgatatacctaacatgcttcaa

SEQ ID NO: 148781 - DNA, 25 bp, Saccharomyces pastorianus
acatgcttcaaaagagggctaagtc

SEQ ID NO: 148782 - DNA, 25 bp, Saccharomyces pastorianus
cccgatatacctaacatgcttcaaa

SEQ ID NO: 148783 - DNA, 25 bp, Saccharomyces pastorianus
atatacctaacatgcttcaaaagag

SEQ ID NO: 148784 - DNA, 25 bp, Saccharomyces pastorianus
ccgatatacctaacatgcttcaaaa

SEQ ID NO: 148785 - DNA, 25 bp, Saccharomyces pastorianus
tacctaacatgcttcaaaagagggc

SEQ ID NO: 148786 - DNA, 25 bp, Saccharomyces pastorianus
ctaacatgcttcaaaagagggctaa

SEQ ID NO: 148787 - DNA, 25 bp, Saccharomyces pastorianus
agccagggtcgttgcccctgaatgg

SEQ ID NO: 148788 - DNA, 25 bp, Saccharomyces pastorianus
gactgcatgaatgaggtacacgaaa

SEQ ID NO: 148789 - DNA, 25 bp, Saccharomyces pastorianus
agatcagcagtcactttgtaactta

SEQ ID NO: 148790 - DNA, 25 bp, Saccharomyces pastorianus
cctattttgaggaaagactgcatga

SEQ ID NO: 148791 - DNA, 25 bp, Saccharomyces pastorianus
cagcagtcactttgtaacttaataa

SEQ ID NO: 148792 - DNA, 25 bp, Saccharomyces pastorianus
aaataacagatcagcagtcactttg

SEQ ID NO: 148793 - DNA, 25 bp, Saccharomyces pastorianus
aacttaataatcataccatatactg

SEQ ID NO: 148794 - DNA, 25 bp, Saccharomyces pastorianus
gatactataccgaaaatagccaggg

SEQ ID NO: 148795 - DNA, 25 bp, Saccharomyces pastorianus
aacaagtaaaggcttctgatactat

SEQ ID NO: 148796 - DNA, 25 bp, Saccharomyces pastorianus
accatatactgatcctattttgagg

SEQ ID NO: 148797 - DNA, 25 bp, Saccharomyces pastorianus
aaatagccagggtcgttgcccctga

SEQ ID NO: 148798 - DNA, 25 bp, Saccharomyces pastorianus
attgctaaactgctggcatcctgat

SEQ ID NO: 148799 - DNA, 25 bp, Saccharomyces pastorianus
ttcgcgccccaattagccaaaaaag

SEQ ID NO: 148800 - DNA, 25 bp, Saccharomyces pastorianus
agtggagacaggttcgcttccggac

SEQ ID NO: 148801 - DNA, 25 bp, Saccharomyces pastorianus
acggagcgagcttatcatcaggaac

SEQ ID NO: 148802 - DNA, 25 bp, Saccharomyces pastorianus
tatgccgtacactacatgatgattt

SEQ ID NO: 148803 - DNA, 25 bp, Saccharomyces pastorianus
gagtcttgtcaagtccgaacctttc

SEQ ID NO: 148804 - DNA, 25 bp, Saccharomyces pastorianus
atacttctttgatatcgtgcttaaa

SEQ ID NO: 148805 - DNA, 25 bp, Saccharomyces pastorianus
gttcgcttccggacgaggatttaag

SEQ ID NO: 148806 - DNA, 25 bp, Saccharomyces pastorianus
gatgctcaggattatcttagcgtga

SEQ ID NO: 148807 - DNA, 25 bp, Saccharomyces pastorianus
gaacctttcctgcactgtgtggaga

SEQ ID NO: 148808 - DNA, 25 bp, Saccharomyces pastorianus
gggcatcgactatacctatttgtac

SEQ ID NO: 148809 - DNA, 25 bp, Saccharomyces pastorianus
ttgtactttgtacggcggctattgt

SEQ ID NO: 148810 - DNA, 25 bp, Saccharomyces pastorianus
gaccccagtgaatcaattgttctag

SEQ ID NO: 148811 - DNA, 25 bp, Saccharomyces pastorianus
gagtacttatttcagacagctttca

SEQ ID NO: 148812 - DNA, 25 bp, Saccharomyces pastorianus
ttatgttctctctgactatgtcacg

SEQ ID NO: 148813 - DNA, 25 bp, Saccharomyces pastorianus
gtaggacggctaaatctaaccccag

SEQ ID NO: 148814 - DNA, 25 bp, Saccharomyces pastorianus
aactaccacggaatgcaaggcttta

SEQ ID NO: 148815 - DNA, 25 bp, Saccharomyces pastorianus
tcaaacatctttgccggattacttt

SEQ ID NO: 148816 - DNA, 25 bp, Saccharomyces pastorianus
aaatcacggtctttggataacacag

SEQ ID NO: 148817 - DNA, 25 bp, Saccharomyces pastorianus
aatacctgccgaatggattgacccc

SEQ ID NO: 148818 - DNA, 25 bp, Saccharomyces pastorianus
gggacgttcggttaatcagctgtaa

SEQ ID NO: 148819 - DNA, 25 bp, Saccharomyces pastorianus
atctaaccccagctatcaagcggaa

SEQ ID NO: 148820 - DNA, 25 bp, Saccharomyces pastorianus
atttcggaaaccaaactgtcatcat

SEQ ID NO: 148821 - DNA, 25 bp, Saccharomyces pastorianus
aagtctaccaccgatgggcgaactc

SEQ ID NO: 148822 - DNA, 25 bp, Saccharomyces pastorianus
acaactaagtctaccaccgatgggc

SEQ ID NO: 148823 - DNA, 25 bp, Saccharomyces pastorianus
atcacaactaagtctaccaccgatg

SEQ ID NO: 148824 - DNA, 25 bp, Saccharomyces pastorianus
ggaaaccaaactgtcatcattgtat

SEQ ID NO: 148825 - DNA, 25 bp, Saccharomyces pastorianus
gtcatcattgtataaatcacaacta

SEQ ID NO: 148826 - DNA, 25 bp, Saccharomyces pastorianus
aatgacatttcggaaaccaaactgt

SEQ ID NO: 148827 - DNA, 25 bp, Saccharomyces pastorianus
agattgtttgggtgatagttttgaa

SEQ ID NO: 148828 - DNA, 25 bp, Saccharomyces pastorianus
tctaccaccgatgggcgaactcgag

SEQ ID NO: 148829 - DNA, 25 bp, Saccharomyces pastorianus
actaagtctaccaccgatgggcgaa

SEQ ID NO: 148830 - DNA, 25 bp, Saccharomyces pastorianus
aaactgtcatcattgtataaatcac

SEQ ID NO: 148831 - DNA, 25 bp, Saccharomyces pastorianus
atgaaaagcagggaaacgcaatctg

SEQ ID NO: 148832 - DNA, 25 bp, Saccharomyces pastorianus
gggaaacgcaatctgaggaatcaga

SEQ ID NO: 148833 - DNA, 25 bp, Saccharomyces pastorianus
gcagggaaacgcaatctgaggaatc

SEQ ID NO: 148834 - DNA, 25 bp, Saccharomyces pastorianus
agcagggaaacgcaatctgaggaat

SEQ ID NO: 148835 - DNA, 25 bp, Saccharomyces pastorianus
agggaaacgcaatctgaggaatcag

SEQ ID NO: 148836 - DNA, 25 bp, Saccharomyces pastorianus
aacgcaatctgaggaatcagaagac

SEQ ID NO: 148837 - DNA, 25 bp, Saccharomyces pastorianus
gaaacgcaatctgaggaatcagaag

SEQ ID NO: 148838 - DNA, 25 bp, Saccharomyces pastorianus
caatctgaggaatcagaagacgagg

SEQ ID NO: 148839 - DNA, 25 bp, Saccharomyces pastorianus
cagggaaacgcaatctgaggaatca

SEQ ID NO: 148840 - DNA, 25 bp, Saccharomyces pastorianus
gaagacgaggaaagtggttcaaaag

SEQ ID NO: 148841 - DNA, 25 bp, Saccharomyces pastorianus
ggaaacgcaatctgaggaatcagaa

SEQ ID NO: 148842 - DNA, 25 bp, Saccharomyces pastorianus
gcagtactagctctcaatcacagga

SEQ ID NO: 148843 - DNA, 25 bp, Saccharomyces pastorianus
ggtacagctggatctgactctacga

SEQ ID NO: 148844 - DNA, 25 bp, Saccharomyces pastorianus
gatattaaccctttcgacgactcaa

SEQ ID NO: 148845 - DNA, 25 bp, Saccharomyces pastorianus
tatacgcctcttcattttcatctaa

SEQ ID NO: 148846 - DNA, 25 bp, Saccharomyces pastorianus
agctcgctaacttcggatactttgg

SEQ ID NO: 148847 - DNA, 25 bp, Saccharomyces pastorianus
tagccattgctctttgtatcttgtt

SEQ ID NO: 148848 - DNA, 25 bp, Saccharomyces pastorianus
gagggcggttccacaatttttgtca

SEQ ID NO: 148849 - DNA, 25 bp, Saccharomyces pastorianus
atttttgtcacgaacaccatcacgg

SEQ ID NO: 148850 - DNA, 25 bp, Saccharomyces pastorianus
gacgccacttcgataatctattcca

SEQ ID NO: 148851 - DNA, 25 bp, Saccharomyces pastorianus
attccactacttttcacactgaggg

SEQ ID NO: 148852 - DNA, 25 bp, Saccharomyces pastorianus
ttcaggatcggccacaggtacagct

SEQ ID NO: 148853 - DNA, 25 bp, Saccharomyces pastorianus
gttattatccattttatcgcaagcg

SEQ ID NO: 148854 - DNA, 25 bp, Saccharomyces pastorianus
gaccgaacaaaacaagtctgcttct

SEQ ID NO: 148855 - DNA, 25 bp, Saccharomyces pastorianus
tctgcttctggcgttattatccatt

SEQ ID NO: 148856 - DNA, 25 bp, Saccharomyces pastorianus
gcaagcgaacgcctatgaatacgtg

SEQ ID NO: 148857 - DNA, 25 bp, Saccharomyces pastorianus
gcgaacgcctatgaatacgtgaatt

SEQ ID NO: 148858 - DNA, 25 bp, Saccharomyces pastorianus
aagtctgcttctggcgttattatcc

SEQ ID NO: 148859 - DNA, 25 bp, Saccharomyces pastorianus
attatccattttatcgcaagcgaac

SEQ ID NO: 148860 - DNA, 25 bp, Saccharomyces pastorianus
gaattgttttagctcactaccctct

SEQ ID NO: 148861 - DNA, 25 bp, Saccharomyces pastorianus
cgcctatgaatacgtgaattgtttt

SEQ ID NO: 148862 - DNA, 25 bp, Saccharomyces pastorianus
gcttctggcgttattatccatttta

SEQ ID NO: 148863 - DNA, 25 bp, Saccharomyces pastorianus
ttatcgcaagcgaacgcctatgaat

SEQ ID NO: 148864 - DNA, 25 bp, Saccharomyces pastorianus
gcaagacagtttacacagcagcgct

SEQ ID NO: 148865 - DNA, 25 bp, Saccharomyces pastorianus
ttctcttctttatgacaccaaggat

SEQ ID NO: 148866 - DNA, 25 bp, Saccharomyces pastorianus
gtattaaatattatctctccgctta

SEQ ID NO: 148867 - DNA, 25 bp, Saccharomyces pastorianus
aaacatattgtcctgtaccggtact

SEQ ID NO: 148868 - DNA, 25 bp, Saccharomyces pastorianus
gatcttatcttgtttttctcttctt

SEQ ID NO: 148869 - DNA, 25 bp, Saccharomyces pastorianus
atctctccgcttataatttttgtca

SEQ ID NO: 148870 - DNA, 25 bp, Saccharomyces pastorianus
gtaccggtactaaggtcaatggcag

SEQ ID NO: 148871 - DNA, 25 bp, Saccharomyces pastorianus
tacacagcagcgcttgttacgcaaa

SEQ ID NO: 148872 - DNA, 25 bp, Saccharomyces pastorianus
ccgcttataatttttgtcagtccta

SEQ ID NO: 148873 - DNA, 25 bp, Saccharomyces pastorianus
ttgtcagtcctattaaaaagcaaga

SEQ ID NO: 148874 - DNA, 25 bp, Saccharomyces pastorianus
gcgcttgttacgcaaatttgacgtt

SEQ ID NO: 148875 - DNA, 25 bp, Saccharomyces pastorianus
tcttttccgtaaaccttgcctatct

SEQ ID NO: 148876 - DNA, 25 bp, Saccharomyces pastorianus
ctatttattttgcactccactcttt

SEQ ID NO: 148877 - DNA, 25 bp, Saccharomyces pastorianus
tttgcactccactcttttccgtaaa

SEQ ID NO: 148878 - DNA, 25 bp, Saccharomyces pastorianus
tattatttctatacttttctccaaa

SEQ ID NO: 148879 - DNA, 25 bp, Saccharomyces pastorianus
acttttctccaaatatatcttcgtt

SEQ ID NO: 148880 - DNA, 25 bp, Saccharomyces pastorianus
ttcctctatttattttgcactccac

SEQ ID NO: 148881 - DNA, 25 bp, Saccharomyces pastorianus
cctttcctctatttattttgcactc

SEQ ID NO: 148882 - DNA, 25 bp, Saccharomyces pastorianus
tatatcttcgtttttcttttcgctt

SEQ ID NO: 148883 - DNA, 25 bp, Saccharomyces pastorianus
ttctgcctttcctctatttattttg

SEQ ID NO: 148884 - DNA, 25 bp, Saccharomyces pastorianus
atttattttgcactccactcttttc

SEQ ID NO: 148885 - DNA, 25 bp, Saccharomyces pastorianus
ttttccttctgcctttcctctattt

SEQ ID NO: 148886 - DNA, 25 bp, Saccharomyces pastorianus
cccgaatattcgaacaaaactatag

SEQ ID NO: 148887 - DNA, 25 bp, Saccharomyces pastorianus
gaaaccaaagatagaatccccgaat

SEQ ID NO: 148888 - DNA, 25 bp, Saccharomyces pastorianus
gaactggtaaatggggtcaacttgt

SEQ ID NO: 148889 - DNA, 25 bp, Saccharomyces pastorianus
agagcagcagtatatgaagagcaaa

SEQ ID NO: 148890 - DNA, 25 bp, Saccharomyces pastorianus
tagaatccccgaatattcgaacaaa

SEQ ID NO: 148891 - DNA, 25 bp, Saccharomyces pastorianus
caaaactatagcaaagataagccac

SEQ ID NO: 148892 - DNA, 25 bp, Saccharomyces pastorianus
caaagatagaatccccgaatattcg

SEQ ID NO: 148893 - DNA, 25 bp, Saccharomyces pastorianus
ggtcaacttgttgaagaaaccaaag

SEQ ID NO: 148894 - DNA, 25 bp, Saccharomyces pastorianus
gaatattcgaacaaaactatagcaa

SEQ ID NO: 148895 - DNA, 25 bp, Saccharomyces pastorianus
accaaagatagaatccccgaatatt

SEQ ID NO: 148896 - DNA, 25 bp, Saccharomyces pastorianus
atagaatccccgaatattcgaacaa

SEQ ID NO: 148897 - DNA, 25 bp, Saccharomyces pastorianus
agcggatcctcagtatcattgcagc

SEQ ID NO: 148898 - DNA, 25 bp, Saccharomyces pastorianus
taaatctctctttcacttcagcaaa

SEQ ID NO: 148899 - DNA, 25 bp, Saccharomyces pastorianus
gattggtgaggatcttccaccggct

SEQ ID NO: 148900 - DNA, 25 bp, Saccharomyces pastorianus
tccaggctcgagcaagagttccaat

SEQ ID NO: 148901 - DNA, 25 bp, Saccharomyces pastorianus
gaaaggccacaaattcttcatcaca

SEQ ID NO: 148902 - DNA, 25 bp, Saccharomyces pastorianus
gagcgcaacccacaatcgaaggtca

SEQ ID NO: 148903 - DNA, 25 bp, Saccharomyces pastorianus
acgttcatcgtcagttcggagcaac

SEQ ID NO: 148904 - DNA, 25 bp, Saccharomyces pastorianus
cagagttccctcgtatgataaagca

SEQ ID NO: 148905 - DNA, 25 bp, Saccharomyces pastorianus
aactgattctacatctgacgctaat

SEQ ID NO: 148906 - DNA, 25 bp, Saccharomyces pastorianus
tcacaagtctacatcctctttgttg

SEQ ID NO: 148907 - DNA, 25 bp, Saccharomyces pastorianus
tagtaggacacacttatcccactct

SEQ ID NO: 148908 - DNA, 25 bp, Saccharomyces pastorianus
taattacgaattccctttcagcgcg

SEQ ID NO: 148909 - DNA, 25 bp, Saccharomyces pastorianus
aaaaaagccctttctactgcatcat

SEQ ID NO: 148910 - DNA, 25 bp, Saccharomyces pastorianus
aagcagcccgacttgatctgtaaaa

SEQ ID NO: 148911 - DNA, 25 bp, Saccharomyces pastorianus
tgctgccgtcacttatgctctggaa

SEQ ID NO: 148912 - DNA, 25 bp, Saccharomyces pastorianus
tagaaggcctaccaaatgctgccgt

SEQ ID NO: 148913 - DNA, 25 bp, Saccharomyces pastorianus
tatgctctggaagctactatcgaga

SEQ ID NO: 148914 - DNA, 25 bp, Saccharomyces pastorianus
ctttggctttgagactttttggtag

SEQ ID NO: 148915 - DNA, 25 bp, Saccharomyces pastorianus
gagagacttaagcagcccgacttga

SEQ ID NO: 148916 - DNA, 25 bp, Saccharomyces pastorianus
ttacaaactgttcatgggccgcata

SEQ ID NO: 148917 - DNA, 25 bp, Saccharomyces pastorianus
ttcagcgcgattattcctgggtcat

SEQ ID NO: 148918 - DNA, 25 bp, Saccharomyces pastorianus
gccgcataagcgatactcaaagttt

SEQ ID NO: 148919 - DNA, 25 bp, Saccharomyces pastorianus
acgccggacgtctagattatgctat

SEQ ID NO: 148920 - DNA, 25 bp, Saccharomyces pastorianus
gaaatggctcattacgaacaaactt

SEQ ID NO: 148921 - DNA, 25 bp, Saccharomyces pastorianus
ttatgctatgtctccaagtctgcta

SEQ ID NO: 148922 - DNA, 25 bp, Saccharomyces pastorianus
aattaaccgtacagagaccgcaatg

SEQ ID NO: 148923 - DNA, 25 bp, Saccharomyces pastorianus
gacaacctgttctttattggctcac

SEQ ID NO: 148924 - DNA, 25 bp, Saccharomyces pastorianus
taatgtttaccacgtctgtgatccc

SEQ ID NO: 148925 - DNA, 25 bp, Saccharomyces pastorianus
gatattgcagcgtttatcctaaaag

SEQ ID NO: 148926 - DNA, 25 bp, Saccharomyces pastorianus
attggctcaccaattggattgttaa

SEQ ID NO: 148927 - DNA, 25 bp, Saccharomyces pastorianus
tacaggtttgaattacgccggacgt

SEQ ID NO: 148928 - DNA, 25 bp, Saccharomyces pastorianus
gaaagatttgccaggtactgatgaa

SEQ ID NO: 148929 - DNA, 25 bp, Saccharomyces pastorianus
atcttacgagaatgcttacaggttt

SEQ ID NO: 148930 - DNA, 25 bp, Saccharomyces pastorianus
ctatctaaggtctaatctggctcaa

SEQ ID NO: 148931 - DNA, 25 bp, Saccharomyces pastorianus
aaaacgcctcaaacggaagtagcag

SEQ ID NO: 148932 - DNA, 25 bp, Saccharomyces pastorianus
gatcatacaaatatccatcctccgc

SEQ ID NO: 148933 - DNA, 25 bp, Saccharomyces pastorianus
gacatccacatcttttaaggcagca

SEQ ID NO: 148934 - DNA, 25 bp, Saccharomyces pastorianus
atctggctcaatccttaccgattaa

SEQ ID NO: 148935 - DNA, 25 bp, Saccharomyces pastorianus
gtttcaaacctcttcaatttatcgg

SEQ ID NO: 148936 - DNA, 25 bp, Saccharomyces pastorianus
ggaaaactgcaattagcctatctaa

SEQ ID NO: 148937 - DNA, 25 bp, Saccharomyces pastorianus
atcggactttttacagttgttcaat

SEQ ID NO: 148938 - DNA, 25 bp, Saccharomyces pastorianus
taagcagctcaaattcgacgacagt

SEQ ID NO: 148939 - DNA, 25 bp, Saccharomyces pastorianus
agtaatgatgatccgaccacgacgc

SEQ ID NO: 148940 - DNA, 25 bp, Saccharomyces pastorianus
gacgcctcctgcagaatcgcaagat

SEQ ID NO: 148941 - DNA, 25 bp, Saccharomyces pastorianus
gccatcactgcgaaaaagccttatt

SEQ ID NO: 148942 - DNA, 25 bp, Saccharomyces pastorianus
aactactaagtcaagccaagctcgg

SEQ ID NO: 148943 - DNA, 25 bp, Saccharomyces pastorianus
attcatcatcattcagcggagttaa

SEQ ID NO: 148944 - DNA, 25 bp, Saccharomyces pastorianus
gatggcgatactagcgaggattata

SEQ ID NO: 148945 - DNA, 25 bp, Saccharomyces pastorianus
aatagacaaccactatttcctcggc

SEQ ID NO: 148946 - DNA, 25 bp, Saccharomyces pastorianus
aagccttattggtgccaggtcacag

SEQ ID NO: 148947 - DNA, 25 bp, Saccharomyces pastorianus
atttcccgggtcatcccagaggagt

SEQ ID NO: 148948 - DNA, 25 bp, Saccharomyces pastorianus
aagctcggccggcagtcagatctat

SEQ ID NO: 148949 - DNA, 25 bp, Saccharomyces pastorianus
aagaatcaaatcacgcaaaggccat

SEQ ID NO: 148950 - DNA, 25 bp, Saccharomyces pastorianus
atcaagagttcccacgagcagcacc

SEQ ID NO: 148951 - DNA, 25 bp, Saccharomyces pastorianus
ctatttcctcggcacgttaatcaaa

SEQ ID NO: 148952 - DNA, 25 bp, Saccharomyces pastorianus
gaaggtccaagtgcgaccaccatta

SEQ ID NO: 148953 - DNA, 25 bp, Saccharomyces pastorianus
gaggttgactactacgagctatacg

SEQ ID NO: 148954 - DNA, 25 bp, Saccharomyces pastorianus
gaatcacgactcctgaattgttcat

SEQ ID NO: 148955 - DNA, 25 bp, Saccharomyces pastorianus
ggttccacaacaacatcacagttca

SEQ ID NO: 148956 - DNA, 25 bp, Saccharomyces pastorianus
gcccttgtggcaacgatttttctat

SEQ ID NO: 148957 - DNA, 25 bp, Saccharomyces pastorianus
atgttgattgtccagttcttccaga

SEQ ID NO: 148958 - DNA, 25 bp, Saccharomyces pastorianus
gaaccaagaaataggcgccgcgcca

SEQ ID NO: 148959 - DNA, 25 bp, Saccharomyces pastorianus
ccattcttagcgcttgcttttcaat

SEQ ID NO: 148960 - DNA, 25 bp, Saccharomyces pastorianus
atctgatacccttcgaaaactctac

SEQ ID NO: 148961 - DNA, 25 bp, Saccharomyces pastorianus
ttctaattacgatccctctaccttt

SEQ ID NO: 148962 - DNA, 25 bp, Saccharomyces pastorianus
gtaggtataacccacattttgcatg

SEQ ID NO: 148963 - DNA, 25 bp, Saccharomyces pastorianus
tgcttctcaaacatggcgctgatcc

SEQ ID NO: 148964 - DNA, 25 bp, Saccharomyces pastorianus
tatctacattgttgacctgcttctc

SEQ ID NO: 148965 - DNA, 25 bp, Saccharomyces pastorianus
gtgacttaatacttagcggtgcaaa

SEQ ID NO: 148966 - DNA, 25 bp, Saccharomyces pastorianus
ggagcaaatcctaaccaggcggcag

SEQ ID NO: 148967 - DNA, 25 bp, Saccharomyces pastorianus
gcgctgatccgacgctcaaagatga

SEQ ID NO: 148968 - DNA, 25 bp, Saccharomyces pastorianus
gcactgggccgcaaggtacggtaat

SEQ ID NO: 148969 - DNA, 25 bp, Saccharomyces pastorianus
cctactttgggctgcttatcaagga

SEQ ID NO: 148970 - DNA, 25 bp, Saccharomyces pastorianus
aatgctctccattgtgctctagttg

SEQ ID NO: 148971 - DNA, 25 bp, Saccharomyces pastorianus
gactgttttgatctagccgaaggaa

SEQ ID NO: 148972 - DNA, 25 bp, Saccharomyces pastorianus
aatttggcgccacagttacatggac

SEQ ID NO: 148973 - DNA, 25 bp, Saccharomyces pastorianus
gagcagggtcttaacatcatgcatt

SEQ ID NO: 148974 - DNA, 25 bp, Saccharomyces pastorianus
tttgcagcagtatcacttgggtaac

SEQ ID NO: 148975 - DNA, 25 bp, Saccharomyces pastorianus
tgagcagtgcatcttcacaggcgac

SEQ ID NO: 148976 - DNA, 25 bp, Saccharomyces pastorianus
tgaagtacccgataatttgcagcag

SEQ ID NO: 148977 - DNA, 25 bp, Saccharomyces pastorianus
ttcacaggcgacactttattcattg

SEQ ID NO: 148978 - DNA, 25 bp, Saccharomyces pastorianus
agcgctttatagtatcttgtgccaa

SEQ ID NO: 148979 - DNA, 25 bp, Saccharomyces pastorianus
gtattaggactccatgccatacaaa

SEQ ID NO: 148980 - DNA, 25 bp, Saccharomyces pastorianus
aattggtggatcgaagtcctccccg

SEQ ID NO: 148981 - DNA, 25 bp, Saccharomyces pastorianus
gatcgtgccgttagactagcagtcg

SEQ ID NO: 148982 - DNA, 25 bp, Saccharomyces pastorianus
gtcggcgatactgctgggacttatc

SEQ ID NO: 148983 - DNA, 25 bp, Saccharomyces pastorianus
ggacttatcccagatccgtagtgat

SEQ ID NO: 148984 - DNA, 25 bp, Saccharomyces pastorianus
ctggtcacttcaccctgagagatga

SEQ ID NO: 148985 - DNA, 25 bp, Saccharomyces pastorianus
acaggtggtgtcaattatagttatt

SEQ ID NO: 148986 - DNA, 25 bp, Saccharomyces pastorianus
gaccctgcagaaccacttgaggtgt

SEQ ID NO: 148987 - DNA, 25 bp, Saccharomyces pastorianus
gaaatatgcatgttaagcctataaa

SEQ ID NO: 148988 - DNA, 25 bp, Saccharomyces pastorianus
gaaactcatggctgattgaccctgc

SEQ ID NO: 148989 - DNA, 25 bp, Saccharomyces pastorianus
agcctataaaaatgcgatggttgac

SEQ ID NO: 148990 - DNA, 25 bp, Saccharomyces pastorianus
agcactgaagacaggagaaactcat

SEQ ID NO: 148991 - DNA, 25 bp, Saccharomyces pastorianus
tgattgaccctgcagaaccacttga

SEQ ID NO: 148992 - DNA, 25 bp, Saccharomyces pastorianus
gaaccacttgaggtgtcgccaaaat

SEQ ID NO: 148993 - DNA, 25 bp, Saccharomyces pastorianus
ggtgtcgccaaaattaagcgccgaa

SEQ ID NO: 148994 - DNA, 25 bp, Saccharomyces pastorianus
gttatttactaagcactgaagacag

SEQ ID NO: 148995 - DNA, 25 bp, Saccharomyces pastorianus
aaaaatgcgatggttgacaggtggt

SEQ ID NO: 148996 - DNA, 25 bp, Saccharomyces pastorianus
tgtccgattcaaggtgggtcactgc

SEQ ID NO: 148997 - DNA, 25 bp, Saccharomyces pastorianus
aactggtggctatcgagcattcttt

SEQ ID NO: 148998 - DNA, 25 bp, Saccharomyces pastorianus
ataaccaaaattactcccgtcgctg

SEQ ID NO: 148999 - DNA, 25 bp, Saccharomyces pastorianus
agattaattccgttgccatcgagaa

SEQ ID NO: 149000 - DNA, 25 bp, Saccharomyces pastorianus
actgccaaatttatctaccaccttg

SEQ ID NO: 149001 - DNA, 25 bp, Saccharomyces pastorianus
cattcttttattttgctgagctcag

SEQ ID NO: 149002 - DNA, 25 bp, Saccharomyces pastorianus
gtcagaaccggtactaacagcatat

SEQ ID NO: 149003 - DNA, 25 bp, Saccharomyces pastorianus
gtagaaataatgtccaacccgccca

SEQ ID NO: 149004 - DNA, 25 bp, Saccharomyces pastorianus
gtcaacccggcttcaacaatagcag

SEQ ID NO: 149005 - DNA, 25 bp, Saccharomyces pastorianus
gcggcaacagctactctcggaataa

SEQ ID NO: 149006 - DNA, 25 bp, Saccharomyces pastorianus
ggaatagctacaacagtcaacccgg

SEQ ID NO: 149007 - DNA, 25 bp, Saccharomyces pastorianus
gctgagttatgggttccgggtcttc

SEQ ID NO: 149008 - DNA, 25 bp, Saccharomyces pastorianus
gaatataatcccaacacaacgcact

SEQ ID NO: 149009 - DNA, 25 bp, Saccharomyces pastorianus
agggaatacttgtccgctgagttat

SEQ ID NO: 149010 - DNA, 25 bp, Saccharomyces pastorianus
cttgccactcatgaaccacatttta

SEQ ID NO: 149011 - DNA, 25 bp, Saccharomyces pastorianus
accgtcccaggtgaaggtgagcaca

SEQ ID NO: 149012 - DNA, 25 bp, Saccharomyces pastorianus
acaacgcactgtatatacggtttgg

SEQ ID NO: 149013 - DNA, 25 bp, Saccharomyces pastorianus
tccgggtcttccatttacatttgat

SEQ ID NO: 149014 - DNA, 25 bp, Saccharomyces pastorianus
tgactttttaccacatttaccatgc

SEQ ID NO: 149015 - DNA, 25 bp, Saccharomyces pastorianus
gaacctcccttctgttgaaacgcta

SEQ ID NO: 149016 - DNA, 25 bp, Saccharomyces pastorianus
gaacaacctttcttgtggctgcaca

SEQ ID NO: 149017 - DNA, 25 bp, Saccharomyces pastorianus
acatgacctgcgacggtgtcttgaa

SEQ ID NO: 149018 - DNA, 25 bp, Saccharomyces pastorianus
ttccaccctggatttgcgtttaaag

SEQ ID NO: 149019 - DNA, 25 bp, Saccharomyces pastorianus
gttgttgttaccgtttggctgaatt

SEQ ID NO: 149020 - DNA, 25 bp, Saccharomyces pastorianus
tggaacgtccacaacaaccggcaat

SEQ ID NO: 149021 - DNA, 25 bp, Saccharomyces pastorianus
ttctagacctatctcattgagcctc

SEQ ID NO: 149022 - DNA, 25 bp, Saccharomyces pastorianus
atcgatggccatctttcttatgtta

SEQ ID NO: 149023 - DNA, 25 bp, Saccharomyces pastorianus
ggtagaagcacctcgattccaatca

SEQ ID NO: 149024 - DNA, 25 bp, Saccharomyces pastorianus
gatggctatctgatcacacacgagt

SEQ ID NO: 149025 - DNA, 25 bp, Saccharomyces pastorianus
gctggtttggccattcaagttgcat

SEQ ID NO: 149026 - DNA, 25 bp, Saccharomyces pastorianus
gaaactttaccacatactgacgatg

SEQ ID NO: 149027 - DNA, 25 bp, Saccharomyces pastorianus
gtttcacttccttttccgtatatat

SEQ ID NO: 149028 - DNA, 25 bp, Saccharomyces pastorianus
cgggccatgttgatcctgaaacttt

SEQ ID NO: 149029 - DNA, 25 bp, Saccharomyces pastorianus
gaagaacgatactggtggtaaagat

SEQ ID NO: 149030 - DNA, 25 bp, Saccharomyces pastorianus
taaacggtgacatcgggttaagtgg

SEQ ID NO: 149031 - DNA, 25 bp, Saccharomyces pastorianus
gatgccttgggtaactgtatttaaa

SEQ ID NO: 149032 - DNA, 25 bp, Saccharomyces pastorianus
aaccgtcagaaaaagtcatgggcat

SEQ ID NO: 149033 - DNA, 25 bp, Saccharomyces pastorianus
ggtacgttcaattccataatgacta

SEQ ID NO: 149034 - DNA, 25 bp, Saccharomyces pastorianus
ctaggtggttatcccgatgtttctg

SEQ ID NO: 149035 - DNA, 25 bp, Saccharomyces pastorianus
attgttggcaagatagtcgtcaaac

SEQ ID NO: 149036 - DNA, 25 bp, Saccharomyces pastorianus
gtagcggtacgttcaattccataat

SEQ ID NO: 149037 - DNA, 25 bp, Saccharomyces pastorianus
gttatcccgatgtttctgcgggaaa

SEQ ID NO: 149038 - DNA, 25 bp, Saccharomyces pastorianus
tcatgggcataaacggtgacatcgg

SEQ ID NO: 149039 - DNA, 25 bp, Saccharomyces pastorianus
cgtcaaactaggtggttatcccgat

SEQ ID NO: 149040 - DNA, 25 bp, Saccharomyces pastorianus
gaagacgtcttcaaactcagcggct

SEQ ID NO: 149041 - DNA, 25 bp, Saccharomyces pastorianus
ttaaccgcaaacacgttggccaaga

SEQ ID NO: 149042 - DNA, 25 bp, Saccharomyces pastorianus
aaatggcctctactactggatttcc

SEQ ID NO: 149043 - DNA, 25 bp, Saccharomyces pastorianus
ggatttccttcgacacttggtggta

SEQ ID NO: 149044 - DNA, 25 bp, Saccharomyces pastorianus
aactcagcggcttctcagacaaata

SEQ ID NO: 149045 - DNA, 25 bp, Saccharomyces pastorianus
gtcgtacgtacagcaactcttcaaa

SEQ ID NO: 149046 - DNA, 25 bp, Saccharomyces pastorianus
atacttctttcaacagcaccaattc

SEQ ID NO: 149047 - DNA, 25 bp, Saccharomyces pastorianus
ttagttgtcgcaccattaaccgcaa

SEQ ID NO: 149048 - DNA, 25 bp, Saccharomyces pastorianus
gcaccaattctaatgctggcaatat

SEQ ID NO: 149049 - DNA, 25 bp, Saccharomyces pastorianus
gattgcccttggtttatgtgacaac

SEQ ID NO: 149050 - DNA, 25 bp, Saccharomyces pastorianus
gttgtatcgcaacatcctcaaattg

SEQ ID NO: 149051 - DNA, 25 bp, Saccharomyces pastorianus
ttgactctctgtgggttggcatcgt

SEQ ID NO: 149052 - DNA, 25 bp, Saccharomyces pastorianus
gttaccaatcgtcaccgtattacaa

SEQ ID NO: 149053 - DNA, 25 bp, Saccharomyces pastorianus
atcaggtcttagcagtacttccact

SEQ ID NO: 149054 - DNA, 25 bp, Saccharomyces pastorianus
gtaccgtttatgttagttgcctcag

SEQ ID NO: 149055 - DNA, 25 bp, Saccharomyces pastorianus
agctggttatgtttccttgtatcct

SEQ ID NO: 149056 - DNA, 25 bp, Saccharomyces pastorianus
tataatcagctcgtggtttgcctta

SEQ ID NO: 149057 - DNA, 25 bp, Saccharomyces pastorianus
tggcatcgtttttgttcgggtggca

SEQ ID NO: 149058 - DNA, 25 bp, Saccharomyces pastorianus
atgctagtcatcattccgttcacat

SEQ ID NO: 149059 - DNA, 25 bp, Saccharomyces pastorianus
aagatttgttggctcgttgactctc

SEQ ID NO: 149060 - DNA, 25 bp, Saccharomyces pastorianus
acttccacttttgtttgatccatcg

SEQ ID NO: 149061 - DNA, 25 bp, Saccharomyces pastorianus
tatcctcttctgtacaaaggccaag

SEQ ID NO: 149062 - DNA, 25 bp, Saccharomyces pastorianus
ataaatactcactacggtaatgttg

SEQ ID NO: 149063 - DNA, 25 bp, Saccharomyces pastorianus
taaatactcactacggtaatgttga

SEQ ID NO: 149064 - DNA, 25 bp, Saccharomyces pastorianus
aaatactcactacggtaatgttgaa

SEQ ID NO: 149065 - DNA, 25 bp, Saccharomyces pastorianus
tactcactacggtaatgttgaaatt

SEQ ID NO: 149066 - DNA, 25 bp, Saccharomyces pastorianus
aatactcactacggtaatgttgaaa

SEQ ID NO: 149067 - DNA, 25 bp, Saccharomyces pastorianus
ctcactacggtaatgttgaaattac

SEQ ID NO: 149068 - DNA, 25 bp, Saccharomyces pastorianus
tcactacggtaatgttgaaattacc

SEQ ID NO: 149069 - DNA, 25 bp, Saccharomyces pastorianus
cactacggtaatgttgaaattaccg

SEQ ID NO: 149070 - DNA, 25 bp, Saccharomyces pastorianus
actcactacggtaatgttgaaatta

SEQ ID NO: 149071 - DNA, 25 bp, Saccharomyces pastorianus
atactcactacggtaatgttgaaat

SEQ ID NO: 149072 - DNA, 25 bp, Saccharomyces pastorianus
aggttttgaagactgccgcgaccga

SEQ ID NO: 149073 - DNA, 25 bp, Saccharomyces pastorianus
ttcgaggcaaaatatggctgtgaca

SEQ ID NO: 149074 - DNA, 25 bp, Saccharomyces pastorianus
actgccgcgaccgaaaaaggtgagg

SEQ ID NO: 149075 - DNA, 25 bp, Saccharomyces pastorianus
ggttttgaagactgccgcgaccgaa

SEQ ID NO: 149076 - DNA, 25 bp, Saccharomyces pastorianus
gaagactgccgcgaccgaaaaaggt

SEQ ID NO: 149077 - DNA, 25 bp, Saccharomyces pastorianus
cgaggcaaaatatggctgtgacaaa

SEQ ID NO: 149078 - DNA, 25 bp, Saccharomyces pastorianus
gttttgaagactgccgcgaccgaaa

SEQ ID NO: 149079 - DNA, 25 bp, Saccharomyces pastorianus
agactgccgcgaccgaaaaaggtga

SEQ ID NO: 149080 - DNA, 25 bp, Saccharomyces pastorianus
ctgtgacaaagaagccaaagttaaa

SEQ ID NO: 149081 - DNA, 25 bp, Saccharomyces pastorianus
aaggttttgaagactgccgcgaccg

SEQ ID NO: 149082 - DNA, 25 bp, Saccharomyces pastorianus
gatcgttcgaggcaaaatatggctg

SEQ ID NO: 149083 - DNA, 25 bp, Saccharomyces pastorianus
caagagactttgacgatgggtgtga

SEQ ID NO: 149084 - DNA, 25 bp, Saccharomyces pastorianus
gaaatatcactagaagcggccattg

SEQ ID NO: 149085 - DNA, 25 bp, Saccharomyces pastorianus
aaatctttggaaatggtcgacacct

SEQ ID NO: 149086 - DNA, 25 bp, Saccharomyces pastorianus
gaaaccctagcgtctttgaacgtga

SEQ ID NO: 149087 - DNA, 25 bp, Saccharomyces pastorianus
gggtgtgatgctggacgactatatt

SEQ ID NO: 149088 - DNA, 25 bp, Saccharomyces pastorianus
gtcgacacctcaagaaacaccctgg

SEQ ID NO: 149089 - DNA, 25 bp, Saccharomyces pastorianus
gagtgaacctaattcggaactgctg

SEQ ID NO: 149090 - DNA, 25 bp, Saccharomyces pastorianus
agaaacactcacaattgggcaaatt

SEQ ID NO: 149091 - DNA, 25 bp, Saccharomyces pastorianus
ctatattaggtcattggcaagcgta

SEQ ID NO: 149092 - DNA, 25 bp, Saccharomyces pastorianus
aacaccctggctgcatcaacagaag

SEQ ID NO: 149093 - DNA, 25 bp, Saccharomyces pastorianus
gaattccaaggtttctctactgata

SEQ ID NO: 149094 - DNA, 25 bp, Saccharomyces pastorianus
ttctttggtgattccggaacaccct

SEQ ID NO: 149095 - DNA, 25 bp, Saccharomyces pastorianus
tacttcaatagttatgaacccggag

SEQ ID NO: 149096 - DNA, 25 bp, Saccharomyces pastorianus
gtgattccggaacaccctcaaccgt

SEQ ID NO: 149097 - DNA, 25 bp, Saccharomyces pastorianus
gacagtaacagtggcgttctttggt

SEQ ID NO: 149098 - DNA, 25 bp, Saccharomyces pastorianus
aaccgtctccaatgctacttcaata

SEQ ID NO: 149099 - DNA, 25 bp, Saccharomyces pastorianus
gacttgacagtaacagtggcgttct

SEQ ID NO: 149100 - DNA, 25 bp, Saccharomyces pastorianus
gtctccaatgctacttcaatagtta

SEQ ID NO: 149101 - DNA, 25 bp, Saccharomyces pastorianus
aacagtggcgttctttggtgattcc

SEQ ID NO: 149102 - DNA, 25 bp, Saccharomyces pastorianus
ggcgttctttggtgattccggaaca

SEQ ID NO: 149103 - DNA, 25 bp, Saccharomyces pastorianus
ttggtgattccggaacaccctcaac

SEQ ID NO: 149104 - DNA, 25 bp, Saccharomyces pastorianus
agtggcgttctttggtgattccgga

SEQ ID NO: 149105 - DNA, 25 bp, Saccharomyces pastorianus
tcaccatcaggatcaaacccagagt

SEQ ID NO: 149106 - DNA, 25 bp, Saccharomyces pastorianus
gaagacaaggaagcgcaaagaccgg

SEQ ID NO: 149107 - DNA, 25 bp, Saccharomyces pastorianus
tcgatgtatctgaagacaaggaagc

SEQ ID NO: 149108 - DNA, 25 bp, Saccharomyces pastorianus
caaggataataattcgagctcacca

SEQ ID NO: 149109 - DNA, 25 bp, Saccharomyces pastorianus
gagctcaccatcaggatcaaaccca

SEQ ID NO: 149110 - DNA, 25 bp, Saccharomyces pastorianus
gtatctgaagacaaggaagcgcaaa

SEQ ID NO: 149111 - DNA, 25 bp, Saccharomyces pastorianus
catcaggatcaaacccagagtatct

SEQ ID NO: 149112 - DNA, 25 bp, Saccharomyces pastorianus
tcgagctcaccatcaggatcaaacc

SEQ ID NO: 149113 - DNA, 25 bp, Saccharomyces pastorianus
attcgagctcaccatcaggatcaaa

SEQ ID NO: 149114 - DNA, 25 bp, Saccharomyces pastorianus
accatcaggatcaaacccagagtat

SEQ ID NO: 149115 - DNA, 25 bp, Saccharomyces pastorianus
ggcattcaggtacaaggataataat

SEQ ID NO: 149116 - DNA, 25 bp, Saccharomyces pastorianus
acatggtggtcctttcacttcggaa

SEQ ID NO: 149117 - DNA, 25 bp, Saccharomyces pastorianus
accccaaccaattaatcgattctgc

SEQ ID NO: 149118 - DNA, 25 bp, Saccharomyces pastorianus
aaagtggctgtcactggagactcaa

SEQ ID NO: 149119 - DNA, 25 bp, Saccharomyces pastorianus
ggacggtaaagtcgctatccaccga

SEQ ID NO: 149120 - DNA, 25 bp, Saccharomyces pastorianus
gtttatacaactccactaactcaat

SEQ ID NO: 149121 - DNA, 25 bp, Saccharomyces pastorianus
gaacatccaggagaaccgaacgtta

SEQ ID NO: 149122 - DNA, 25 bp, Saccharomyces pastorianus
agcgatttctggttcttgtgcacta

SEQ ID NO: 149123 - DNA, 25 bp, Saccharomyces pastorianus
gatctagtccgttatgtagcctatc

SEQ ID NO: 149124 - DNA, 25 bp, Saccharomyces pastorianus
agggcatttggagactatcgctaca

SEQ ID NO: 149125 - DNA, 25 bp, Saccharomyces pastorianus
gcaaacactttaccagcgatttctg

SEQ ID NO: 149126 - DNA, 25 bp, Saccharomyces pastorianus
gttcattacaaccatccagggcatt

SEQ ID NO: 149127 - DNA, 25 bp, Saccharomyces pastorianus
acatcttatgttggagccgcttcag

SEQ ID NO: 149128 - DNA, 25 bp, Saccharomyces pastorianus
tgccaatctttggtgtcttgtggtg

SEQ ID NO: 149129 - DNA, 25 bp, Saccharomyces pastorianus
taaggccttgttccatggctgttat

SEQ ID NO: 149130 - DNA, 25 bp, Saccharomyces pastorianus
taccctggtttctggaaatccgcag

SEQ ID NO: 149131 - DNA, 25 bp, Saccharomyces pastorianus
gattatcgcttttattccctgggta

SEQ ID NO: 149132 - DNA, 25 bp, Saccharomyces pastorianus
ggtttgattcttttaggcgctactc

SEQ ID NO: 149133 - DNA, 25 bp, Saccharomyces pastorianus
gcacctgctctaactttcattatgg

SEQ ID NO: 149134 - DNA, 25 bp, Saccharomyces pastorianus
aatccgcagtggtattagtctttct

SEQ ID NO: 149135 - DNA, 25 bp, Saccharomyces pastorianus
cactgcaagttatacccctgaggac

SEQ ID NO: 149136 - DNA, 25 bp, Saccharomyces pastorianus
ggaacttaccaacaatgaccacctt

SEQ ID NO: 149137 - DNA, 25 bp, Saccharomyces pastorianus
atgaccaccttaatctacttcactg

SEQ ID NO: 149138 - DNA, 25 bp, Saccharomyces pastorianus
tatcctttgatggtcgttagtttac

SEQ ID NO: 149139 - DNA, 25 bp, Saccharomyces pastorianus
acctctttctttttgatgcttcaat

SEQ ID NO: 149140 - DNA, 25 bp, Saccharomyces pastorianus
gtacctctttctttttgatgcttca

SEQ ID NO: 149141 - DNA, 25 bp, Saccharomyces pastorianus
tacctctttctttttgatgcttcaa

SEQ ID NO: 149142 - DNA, 25 bp, Saccharomyces pastorianus
atggaatgtacctctttctttttga

SEQ ID NO: 149143 - DNA, 25 bp, Saccharomyces pastorianus
gaatgtacctctttctttttgatgc

SEQ ID NO: 149144 - DNA, 25 bp, Saccharomyces pastorianus
ggaatgtacctctttctttttgatg

SEQ ID NO: 149145 - DNA, 25 bp, Saccharomyces pastorianus
aatgtacctctttctttttgatgct

SEQ ID NO: 149146 - DNA, 25 bp, Saccharomyces pastorianus
atgtacctctttctttttgatgctt

SEQ ID NO: 149147 - DNA, 25 bp, Saccharomyces pastorianus
tttgatgcttcaatatcctttgatg

SEQ ID NO: 149148 - DNA, 25 bp, Saccharomyces pastorianus
ctctttctttttgatgcttcaatat

SEQ ID NO: 149149 - DNA, 25 bp, Saccharomyces pastorianus
cagggagaggtcgtcaatttgaact

SEQ ID NO: 149150 - DNA, 25 bp, Saccharomyces pastorianus
gcattcgactactttgtgtgtaaca

SEQ ID NO: 149151 - DNA, 25 bp, Saccharomyces pastorianus
gagcatcgataatgcaagcctggtt

SEQ ID NO: 149152 - DNA, 25 bp, Saccharomyces pastorianus
ggaacgacataatcccatcttgggt

SEQ ID NO: 149153 - DNA, 25 bp, Saccharomyces pastorianus
aaagatccctttatcacagaacaat

SEQ ID NO: 149154 - DNA, 25 bp, Saccharomyces pastorianus
tcccatcttgggtaacctaacgact

SEQ ID NO: 149155 - DNA, 25 bp, Saccharomyces pastorianus
tgcaagcctggtttgatcagaaaat

SEQ ID NO: 149156 - DNA, 25 bp, Saccharomyces pastorianus
gttcacagtgacattggtagttgtt

SEQ ID NO: 149157 - DNA, 25 bp, Saccharomyces pastorianus
aactggtgacctgggctttatcaaa

SEQ ID NO: 149158 - DNA, 25 bp, Saccharomyces pastorianus
taagctatttgagaactggtgacct

SEQ ID NO: 149159 - DNA, 25 bp, Saccharomyces pastorianus
taagttgcacgaattcacagggaga

SEQ ID NO: 149160 - DNA, 25 bp, Saccharomyces pastorianus
tatatttggtgcgaatgctgcctct

SEQ ID NO: 149161 - DNA, 25 bp, Saccharomyces pastorianus
ggtgcagcttctaatcaatcttcat

SEQ ID NO: 149162 - DNA, 25 bp, Saccharomyces pastorianus
aatacaaacagctcattcacgccat

SEQ ID NO: 149163 - DNA, 25 bp, Saccharomyces pastorianus
ggtctcaatccttttacatcagcaa

SEQ ID NO: 149164 - DNA, 25 bp, Saccharomyces pastorianus
gtgtttgccggctctaataaccaac

SEQ ID NO: 149165 - DNA, 25 bp, Saccharomyces pastorianus
aatgtgccctctgcttttaatttta

SEQ ID NO: 149166 - DNA, 25 bp, Saccharomyces pastorianus
atgctgcctctggttctaattcaaa

SEQ ID NO: 149167 - DNA, 25 bp, Saccharomyces pastorianus
ttattcaataaacctccttccacga

SEQ ID NO: 149168 - DNA, 25 bp, Saccharomyces pastorianus
ctggtggcggctctgtatttaatat

SEQ ID NO: 149169 - DNA, 25 bp, Saccharomyces pastorianus
gacaacttcttttgggcagccgcag

SEQ ID NO: 149170 - DNA, 25 bp, Saccharomyces pastorianus
tcacgccatcaacagttcctaatat

SEQ ID NO: 149171 - DNA, 25 bp, Saccharomyces pastorianus
agcaatattgactcctctgcacaat

SEQ ID NO: 149172 - DNA, 25 bp, Saccharomyces pastorianus
caagctttgtctttggtgcaagtga

SEQ ID NO: 149173 - DNA, 25 bp, Saccharomyces pastorianus
gacgcatcagggaaaccaagctttg

SEQ ID NO: 149174 - DNA, 25 bp, Saccharomyces pastorianus
agaagcctactttacttttgggcag

SEQ ID NO: 149175 - DNA, 25 bp, Saccharomyces pastorianus
gaggatacaaacaccaagcctttat

SEQ ID NO: 149176 - DNA, 25 bp, Saccharomyces pastorianus
tggtaaagccgccaccgcgaaagaa

SEQ ID NO: 149177 - DNA, 25 bp, Saccharomyces pastorianus
gaaacacacaccaaaccatctgaga

SEQ ID NO: 149178 - DNA, 25 bp, Saccharomyces pastorianus
aaggcgtttacctgttagcgaggat

SEQ ID NO: 149179 - DNA, 25 bp, Saccharomyces pastorianus
catctgagacacctgccacaatagt

SEQ ID NO: 149180 - DNA, 25 bp, Saccharomyces pastorianus
aagcctttattcgatttcggcaaga

SEQ ID NO: 149181 - DNA, 25 bp, Saccharomyces pastorianus
gaggtacaccattatttacattcgg

SEQ ID NO: 149182 - DNA, 25 bp, Saccharomyces pastorianus
cgctgtttttggaccgctctgaaat

SEQ ID NO: 149183 - DNA, 25 bp, Saccharomyces pastorianus
ctccagcatactccgcatattttga

SEQ ID NO: 149184 - DNA, 25 bp, Saccharomyces pastorianus
gttgcactgtgatatcgactacgat

SEQ ID NO: 149185 - DNA, 25 bp, Saccharomyces pastorianus
ttattaccatgttccatttcactcc

SEQ ID NO: 149186 - DNA, 25 bp, Saccharomyces pastorianus
gttagcgacgatcagggactttcat

SEQ ID NO: 149187 - DNA, 25 bp, Saccharomyces pastorianus
agctactatccccactttatgggag

SEQ ID NO: 149188 - DNA, 25 bp, Saccharomyces pastorianus
gggactttcatacaatttgtgccat

SEQ ID NO: 149189 - DNA, 25 bp, Saccharomyces pastorianus
tcccatcctgagcttatccatgaaa

SEQ ID NO: 149190 - DNA, 25 bp, Saccharomyces pastorianus
agttcattctattggtgctgcgctg

SEQ ID NO: 149191 - DNA, 25 bp, Saccharomyces pastorianus
gaaaaagtatgcctttgccatttcc

SEQ ID NO: 149192 - DNA, 25 bp, Saccharomyces pastorianus
gctctgaaatccatcactttggtga

SEQ ID NO: 149193 - DNA, 25 bp, Saccharomyces pastorianus
gggatgcatctattaaggcggtatt

SEQ ID NO: 149194 - DNA, 25 bp, Saccharomyces pastorianus
cattccttgggttctggttccgcaa

SEQ ID NO: 149195 - DNA, 25 bp, Saccharomyces pastorianus
aaactactctgaacattccttgggt

SEQ ID NO: 149196 - DNA, 25 bp, Saccharomyces pastorianus
atctcttctttgatggatgcgctat

SEQ ID NO: 149197 - DNA, 25 bp, Saccharomyces pastorianus
acccaagcggcatctttcataaatc

SEQ ID NO: 149198 - DNA, 25 bp, Saccharomyces pastorianus
tacgtcaccttgttgaattacgaag

SEQ ID NO: 149199 - DNA, 25 bp, Saccharomyces pastorianus
tagacgtaccaagaccaatgcaagt

SEQ ID NO: 149200 - DNA, 25 bp, Saccharomyces pastorianus
acggaaatggtcctatctcttcttt

SEQ ID NO: 149201 - DNA, 25 bp, Saccharomyces pastorianus
agttgtcaacatcgaaggctacgga

SEQ ID NO: 149202 - DNA, 25 bp, Saccharomyces pastorianus
aaattgaacccagagcgtagagctt

SEQ ID NO: 149203 - DNA, 25 bp, Saccharomyces pastorianus
gttgatttctccaatactctacaga

SEQ ID NO: 149204 - DNA, 25 bp, Saccharomyces pastorianus
gggcgtttgctccaccaaaaatggt

SEQ ID NO: 149205 - DNA, 25 bp, Saccharomyces pastorianus
cattcgttcatagagctagctgagc

SEQ ID NO: 149206 - DNA, 25 bp, Saccharomyces pastorianus
cacgttggctgtctactgacttgag

SEQ ID NO: 149207 - DNA, 25 bp, Saccharomyces pastorianus
tattcaaaaggctccacgttggctg

SEQ ID NO: 149208 - DNA, 25 bp, Saccharomyces pastorianus
taatcaatctttaccggacccaatg

SEQ ID NO: 149209 - DNA, 25 bp, Saccharomyces pastorianus
ggatttggcctgacaaaactattca

SEQ ID NO: 149210 - DNA, 25 bp, Saccharomyces pastorianus
aaaatatagggcgtttgctccacca

SEQ ID NO: 149211 - DNA, 25 bp, Saccharomyces pastorianus
aatatgctacgggacccatcggtaa

SEQ ID NO: 149212 - DNA, 25 bp, Saccharomyces pastorianus
tcccacccgtcaaactgacttataa

SEQ ID NO: 149213 - DNA, 25 bp, Saccharomyces pastorianus
tctactgacttgagggacggtaatc

SEQ ID NO: 149214 - DNA, 25 bp, Saccharomyces pastorianus
taagaaggtctatcccacccgtcaa

SEQ ID NO: 149215 - DNA, 25 bp, Saccharomyces pastorianus
tgaaccagttaacgttgtcaccgct

SEQ ID NO: 149216 - DNA, 25 bp, Saccharomyces pastorianus
aattggtaccattccgagatgaaac

SEQ ID NO: 149217 - DNA, 25 bp, Saccharomyces pastorianus
taacgtagttggtttaccgctcaat

SEQ ID NO: 149218 - DNA, 25 bp, Saccharomyces pastorianus
ggatatgtgtgcgatactagctggc

SEQ ID NO: 149219 - DNA, 25 bp, Saccharomyces pastorianus
atgggagaatctacgagaagcctaa

SEQ ID NO: 149220 - DNA, 25 bp, Saccharomyces pastorianus
taagcttatcatatgtgcagacaca

SEQ ID NO: 149221 - DNA, 25 bp, Saccharomyces pastorianus
tactagctggcataaagcgcagaat

SEQ ID NO: 149222 - DNA, 25 bp, Saccharomyces pastorianus
gtcaccgctgtgactttaattaaat

SEQ ID NO: 149223 - DNA, 25 bp, Saccharomyces pastorianus
tgaattattctaccgatccgattgg

SEQ ID NO: 149224 - DNA, 25 bp, Saccharomyces pastorianus
aacaatggtttctacttttgaagag

SEQ ID NO: 149225 - DNA, 25 bp, Saccharomyces pastorianus
aagggcaaggtgctattctaattga

SEQ ID NO: 149226 - DNA, 25 bp, Saccharomyces pastorianus
gagcgaaattgattccgcccaggac

SEQ ID NO: 149227 - DNA, 25 bp, Saccharomyces pastorianus
tgaaagcggcccatcgaaggtgcct

SEQ ID NO: 149228 - DNA, 25 bp, Saccharomyces pastorianus
tttacgtttaaattctccctcagca

SEQ ID NO: 149229 - DNA, 25 bp, Saccharomyces pastorianus
aacgttggcaaaatccatcgctcct

SEQ ID NO: 149230 - DNA, 25 bp, Saccharomyces pastorianus
gtggatgggacgacctcagcgatac

SEQ ID NO: 149231 - DNA, 25 bp, Saccharomyces pastorianus
gaaaacaacgatcctagcgccaaga

SEQ ID NO: 149232 - DNA, 25 bp, Saccharomyces pastorianus
aactctactgttaccaccaaatcgt

SEQ ID NO: 149233 - DNA, 25 bp, Saccharomyces pastorianus
ctataagtagtatccgcggctcggt

SEQ ID NO: 149234 - DNA, 25 bp, Saccharomyces pastorianus
atggtaccacagaatccttcgatga

SEQ ID NO: 149235 - DNA, 25 bp, Saccharomyces pastorianus
aaatcgtcgctgtccaataaaactg

SEQ ID NO: 149236 - DNA, 25 bp, Saccharomyces pastorianus
cagcgataccgatggctttattaca

SEQ ID NO: 149237 - DNA, 25 bp, Saccharomyces pastorianus
gaacgagtagttccatttccttggg

SEQ ID NO: 149238 - DNA, 25 bp, Saccharomyces pastorianus
aatttgccagtagagcgaggtcata

SEQ ID NO: 149239 - DNA, 25 bp, Saccharomyces pastorianus
gagatttccgtaaatttaacgcctg

SEQ ID NO: 149240 - DNA, 25 bp, Saccharomyces pastorianus
tttccttgggataatctaggctctt

SEQ ID NO: 149241 - DNA, 25 bp, Saccharomyces pastorianus
tccttcttgtctgcccaaagattgg

SEQ ID NO: 149242 - DNA, 25 bp, Saccharomyces pastorianus
gagtgggtactatttgggctagaac

SEQ ID NO: 149243 - DNA, 25 bp, Saccharomyces pastorianus
atctaggctctttatctcaaaacaa

SEQ ID NO: 149244 - DNA, 25 bp, Saccharomyces pastorianus
gattaagtgcgtttgaatttgccag

SEQ ID NO: 149245 - DNA, 25 bp, Saccharomyces pastorianus
tttgtccttggtacgctttctaaag

SEQ ID NO: 149246 - DNA, 25 bp, Saccharomyces pastorianus
agtcttatggctccttcttgtctgc

SEQ ID NO: 149247 - DNA, 25 bp, Saccharomyces pastorianus
acagttgccctgtgaagatccgaat

SEQ ID NO: 149248 - DNA, 25 bp, Saccharomyces pastorianus
tgtgaacagttcgaatccgtccaac

SEQ ID NO: 149249 - DNA, 25 bp, Saccharomyces pastorianus
taaactacaattacaccacacttcc

SEQ ID NO: 149250 - DNA, 25 bp, Saccharomyces pastorianus
gctccgggtgtattaatggcgccaa

SEQ ID NO: 149251 - DNA, 25 bp, Saccharomyces pastorianus
agacatgggtacgttgcaatcacaa

SEQ ID NO: 149252 - DNA, 25 bp, Saccharomyces pastorianus
gcaacttttcggtaggtgcagctcc

SEQ ID NO: 149253 - DNA, 25 bp, Saccharomyces pastorianus
acatagtatgatttcgccgacgcaa

SEQ ID NO: 149254 - DNA, 25 bp, Saccharomyces pastorianus
gcgccaaccaccaataatgacttca

SEQ ID NO: 149255 - DNA, 25 bp, Saccharomyces pastorianus
gagcggcaacttttggagtactttg

SEQ ID NO: 149256 - DNA, 25 bp, Saccharomyces pastorianus
tagtaacagcaatccgggctcacat

SEQ ID NO: 149257 - DNA, 25 bp, Saccharomyces pastorianus
gaacattccacttgaagagcggcaa

SEQ ID NO: 149258 - DNA, 25 bp, Saccharomyces pastorianus
gaaaaccatcctgcgagcacaattt

SEQ ID NO: 149259 - DNA, 25 bp, Saccharomyces pastorianus
tcaagaccccttcattttcgacggg

SEQ ID NO: 149260 - DNA, 25 bp, Saccharomyces pastorianus
aatgataatacttcgcagccacctt

SEQ ID NO: 149261 - DNA, 25 bp, Saccharomyces pastorianus
gccctactcctattcttaatcaaag

SEQ ID NO: 149262 - DNA, 25 bp, Saccharomyces pastorianus
acgcctctatcaactcattcttgaa

SEQ ID NO: 149263 - DNA, 25 bp, Saccharomyces pastorianus
ttaatcaaagtcaaccggcctcttc

SEQ ID NO: 149264 - DNA, 25 bp, Saccharomyces pastorianus
gggaagttcttctcaatatcaattt

SEQ ID NO: 149265 - DNA, 25 bp, Saccharomyces pastorianus
ccacgattatccacttcaagtacac

SEQ ID NO: 149266 - DNA, 25 bp, Saccharomyces pastorianus
aactgcacagttcatgggccctacg

SEQ ID NO: 149267 - DNA, 25 bp, Saccharomyces pastorianus
aaaccaggagcatgggcaaggccct

SEQ ID NO: 149268 - DNA, 25 bp, Saccharomyces pastorianus
tacaggaggacctagttctggcggc

SEQ ID NO: 149269 - DNA, 25 bp, Saccharomyces pastorianus
gcctattccaatcttccacgattat

SEQ ID NO: 149270 - DNA, 25 bp, Saccharomyces pastorianus
gacctattcaatcattttctttgga

SEQ ID NO: 149271 - DNA, 25 bp, Saccharomyces pastorianus
gtagatatcatacgttctcataact

SEQ ID NO: 149272 - DNA, 25 bp, Saccharomyces pastorianus
gaggttatttgcttggcgtctttta

SEQ ID NO: 149273 - DNA, 25 bp, Saccharomyces pastorianus
aatatcaggcgatgttatcagttct

SEQ ID NO: 149274 - DNA, 25 bp, Saccharomyces pastorianus
gaaccgtttttggagatacctgtgg

SEQ ID NO: 149275 - DNA, 25 bp, Saccharomyces pastorianus
gtcttccttaggttattcatctgaa

SEQ ID NO: 149276 - DNA, 25 bp, Saccharomyces pastorianus
ggaacgttttaccttcttgattatg

SEQ ID NO: 149277 - DNA, 25 bp, Saccharomyces pastorianus
gttctgatagcaatgtaacttccga

SEQ ID NO: 149278 - DNA, 25 bp, Saccharomyces pastorianus
gcgtcttttatcgacaggccaacag

SEQ ID NO: 149279 - DNA, 25 bp, Saccharomyces pastorianus
taggcctaaaacagcttttcccaag

SEQ ID NO: 149280 - DNA, 25 bp, Saccharomyces pastorianus
agaggtgtgttgtcttccttaggtt

SEQ ID NO: 149281 - DNA, 25 bp, Saccharomyces pastorianus
tccactaacggaacaacaagagcac

SEQ ID NO: 149282 - DNA, 25 bp, Saccharomyces pastorianus
acaacaagagcacaacagcaatatc

SEQ ID NO: 149283 - DNA, 25 bp, Saccharomyces pastorianus
actaacggaacaacaagagcacaac

SEQ ID NO: 149284 - DNA, 25 bp, Saccharomyces pastorianus
caaggtccactaacggaacaacaag

SEQ ID NO: 149285 - DNA, 25 bp, Saccharomyces pastorianus
ggtccactaacggaacaacaagagc

SEQ ID NO: 149286 - DNA, 25 bp, Saccharomyces pastorianus
cactaacggaacaacaagagcacaa

SEQ ID NO: 149287 - DNA, 25 bp, Saccharomyces pastorianus
aacggaacaacaagagcacaacagc

SEQ ID NO: 149288 - DNA, 25 bp, Saccharomyces pastorianus
ccactaacggaacaacaagagcaca

SEQ ID NO: 149289 - DNA, 25 bp, Saccharomyces pastorianus
taacggaacaacaagagcacaacag

SEQ ID NO: 149290 - DNA, 25 bp, Saccharomyces pastorianus
gtccactaacggaacaacaagagca

SEQ ID NO: 149291 - DNA, 25 bp, Saccharomyces pastorianus
acggaacaacaagagcacaacagca

SEQ ID NO: 149292 - DNA, 25 bp, Saccharomyces pastorianus
atgagtgtcgatccacgtcatatcc

SEQ ID NO: 149293 - DNA, 25 bp, Saccharomyces pastorianus
ttgcagctagcctccttcgaaaaga

SEQ ID NO: 149294 - DNA, 25 bp, Saccharomyces pastorianus
ttacggcctgcgagatgtgatgtgt

SEQ ID NO: 149295 - DNA, 25 bp, Saccharomyces pastorianus
tgaccatttattcgatgcggccttt

SEQ ID NO: 149296 - DNA, 25 bp, Saccharomyces pastorianus
ttccgttttgggtatcgaagctgca

SEQ ID NO: 149297 - DNA, 25 bp, Saccharomyces pastorianus
ggatctggttcctaagcgatgtcta

SEQ ID NO: 149298 - DNA, 25 bp, Saccharomyces pastorianus
tacctgatatttctcgtgcggttat

SEQ ID NO: 149299 - DNA, 25 bp, Saccharomyces pastorianus
gagggactctgttttgcagctagcc

SEQ ID NO: 149300 - DNA, 25 bp, Saccharomyces pastorianus
gatgtcgatcggtaccggttccttt

SEQ ID NO: 149301 - DNA, 25 bp, Saccharomyces pastorianus
tgcaacagttacgtcgtgcgcttcc

SEQ ID NO: 149302 - DNA, 25 bp, Saccharomyces pastorianus
gtgcgcttcctgatgttgttgttaa

SEQ ID NO: 149303 - DNA, 25 bp, Saccharomyces pastorianus
gttaccgcatttccccaagaattcg

SEQ ID NO: 149304 - DNA, 25 bp, Saccharomyces pastorianus
gaaggtttagttgacacagctgtta

SEQ ID NO: 149305 - DNA, 25 bp, Saccharomyces pastorianus
gttccatgctatttcgggtcgtgaa

SEQ ID NO: 149306 - DNA, 25 bp, Saccharomyces pastorianus
aatcgtgttccagatggttttcaag

SEQ ID NO: 149307 - DNA, 25 bp, Saccharomyces pastorianus
ggtaatgcacaaccggtcaatttca

SEQ ID NO: 149308 - DNA, 25 bp, Saccharomyces pastorianus
ggtcagaacttcagccaacggtatc

SEQ ID NO: 149309 - DNA, 25 bp, Saccharomyces pastorianus
gttttcaagatcgttcgttaccgca

SEQ ID NO: 149310 - DNA, 25 bp, Saccharomyces pastorianus
ggcttactaccctatgcaattatgg

SEQ ID NO: 149311 - DNA, 25 bp, Saccharomyces pastorianus
aacggtatcgtccaattcacatatg

SEQ ID NO: 149312 - DNA, 25 bp, Saccharomyces pastorianus
gagagagatttttaccattccttga

SEQ ID NO: 149313 - DNA, 25 bp, Saccharomyces pastorianus
tgacgggttggatcccctggaaatg

SEQ ID NO: 149314 - DNA, 25 bp, Saccharomyces pastorianus
ctactgatgagtttaatggtgccca

SEQ ID NO: 149315 - DNA, 25 bp, Saccharomyces pastorianus
tggtgcccagttaaaggcggtaact

SEQ ID NO: 149316 - DNA, 25 bp, Saccharomyces pastorianus
gctccgatgatcgtgtcaaagtctt

SEQ ID NO: 149317 - DNA, 25 bp, Saccharomyces pastorianus
tggcggctaccaatagagttgatgt

SEQ ID NO: 149318 - DNA, 25 bp, Saccharomyces pastorianus
gcaagaacttgccaggtctactgat

SEQ ID NO: 149319 - DNA, 25 bp, Saccharomyces pastorianus
gaaaaattgaattcccactcccatc

SEQ ID NO: 149320 - DNA, 25 bp, Saccharomyces pastorianus
gagttgatgttttagatcctgcttt

SEQ ID NO: 149321 - DNA, 25 bp, Saccharomyces pastorianus
atcgtgtcaaagtcttggcggctac

SEQ ID NO: 149322 - DNA, 25 bp, Saccharomyces pastorianus
aatgggcaatcttccgttaaacacg

SEQ ID NO: 149323 - DNA, 25 bp, Saccharomyces pastorianus
actcgagagctcaaattttacaaat

SEQ ID NO: 149324 - DNA, 25 bp, Saccharomyces pastorianus
actcccatccgaagactcgagagct

SEQ ID NO: 149325 - DNA, 25 bp, Saccharomyces pastorianus
gtaccttgtggctaacgttgtcgag

SEQ ID NO: 149326 - DNA, 25 bp, Saccharomyces pastorianus
tgtcaacttagataacaccgctgtt

SEQ ID NO: 149327 - DNA, 25 bp, Saccharomyces pastorianus
cttgcccatggtcggtttagtagat

SEQ ID NO: 149328 - DNA, 25 bp, Saccharomyces pastorianus
tagacagactgttttcttgcccatg

SEQ ID NO: 149329 - DNA, 25 bp, Saccharomyces pastorianus
tctgaattgcaaagactgtcccatg

SEQ ID NO: 149330 - DNA, 25 bp, Saccharomyces pastorianus
caccgctgttggcaaagctgctgta

SEQ ID NO: 149331 - DNA, 25 bp, Saccharomyces pastorianus
gattttggatactttaccctctgaa

SEQ ID NO: 149332 - DNA, 25 bp, Saccharomyces pastorianus
tagacagttaccgtaccttgtggct

SEQ ID NO: 149333 - DNA, 25 bp, Saccharomyces pastorianus
gctgctgtagtcaagacttcttcta

SEQ ID NO: 149334 - DNA, 25 bp, Saccharomyces pastorianus
acagaaacttactcggacgtgggtg

SEQ ID NO: 149335 - DNA, 25 bp, Saccharomyces pastorianus
aactttattagctcgtgcttgcgcg

SEQ ID NO: 149336 - DNA, 25 bp, Saccharomyces pastorianus
gctgacgatagaagtatctacggta

SEQ ID NO: 149337 - DNA, 25 bp, Saccharomyces pastorianus
gtgaggccaccaagattgtcgagca

SEQ ID NO: 149338 - DNA, 25 bp, Saccharomyces pastorianus
tatctacggtagacatgatgctgag

SEQ ID NO: 149339 - DNA, 25 bp, Saccharomyces pastorianus
attatccaccaaccgtacaagccgg

SEQ ID NO: 149340 - DNA, 25 bp, Saccharomyces pastorianus
gtacaagccggtgaggccaccaaga

SEQ ID NO: 149341 - DNA, 25 bp, Saccharomyces pastorianus
ggccaccaagattgtcgagcaattg

SEQ ID NO: 149342 - DNA, 25 bp, Saccharomyces pastorianus
ctgagggagttgtttgtgtaagaac

SEQ ID NO: 149343 - DNA, 25 bp, Saccharomyces pastorianus
aaaccgttattattgctcattatcc

SEQ ID NO: 149344 - DNA, 25 bp, Saccharomyces pastorianus
tattgctcattatccaccaaccgta

SEQ ID NO: 149345 - DNA, 25 bp, Saccharomyces pastorianus
gtgtaagaactaagcaaaccgttat

SEQ ID NO: 149346 - DNA, 25 bp, Saccharomyces pastorianus
gttgagagctgacgatagaagtatc

SEQ ID NO: 149347 - DNA, 25 bp, Saccharomyces pastorianus
atttgcccttcacaaaatctctgtc

SEQ ID NO: 149348 - DNA, 25 bp, Saccharomyces pastorianus
gggcgtcaaaaatctgctatgctat

SEQ ID NO: 149349 - DNA, 25 bp, Saccharomyces pastorianus
atgtcatcccataggtatggccctt

SEQ ID NO: 149350 - DNA, 25 bp, Saccharomyces pastorianus
aagggagattcgaccaacacttcct

SEQ ID NO: 149351 - DNA, 25 bp, Saccharomyces pastorianus
attgcatcatcatctttcgctggcg

SEQ ID NO: 149352 - DNA, 25 bp, Saccharomyces pastorianus
aagggcttctcctctactagaaaga

SEQ ID NO: 149353 - DNA, 25 bp, Saccharomyces pastorianus
atccccacggtgttatagtatcagc

SEQ ID NO: 149354 - DNA, 25 bp, Saccharomyces pastorianus
gaagtatctccacagtcaattgcga

SEQ ID NO: 149355 - DNA, 25 bp, Saccharomyces pastorianus
catctgttcctctatcttcaaacga

SEQ ID NO: 149356 - DNA, 25 bp, Saccharomyces pastorianus
gatatcttggcgtttttcctcacat

SEQ ID NO: 149357 - DNA, 25 bp, Saccharomyces pastorianus
tacaactgagtacacgccctaatat

SEQ ID NO: 149358 - DNA, 25 bp, Saccharomyces pastorianus
gacctatgcgcttttattttgtcat

SEQ ID NO: 149359 - DNA, 25 bp, Saccharomyces pastorianus
ttgtgacttttcatgaccaactcat

SEQ ID NO: 149360 - DNA, 25 bp, Saccharomyces pastorianus
aagatttcagccaaagacgctcccg

SEQ ID NO: 149361 - DNA, 25 bp, Saccharomyces pastorianus
gcgggcgtatgtagcatcgaatagt

SEQ ID NO: 149362 - DNA, 25 bp, Saccharomyces pastorianus
tatggacatttctcttgttgacggt

SEQ ID NO: 149363 - DNA, 25 bp, Saccharomyces pastorianus
tcttgttgacggtttgcgggcgtat

SEQ ID NO: 149364 - DNA, 25 bp, Saccharomyces pastorianus
attttgtcattagccaacataacgg

SEQ ID NO: 149365 - DNA, 25 bp, Saccharomyces pastorianus
agtgctacactctatccatgacgaa

SEQ ID NO: 149366 - DNA, 25 bp, Saccharomyces pastorianus
aatgctgcgttgatttttccctata

SEQ ID NO: 149367 - DNA, 25 bp, Saccharomyces pastorianus
gctagcgatccacaatcatacttca

SEQ ID NO: 149368 - DNA, 25 bp, Saccharomyces pastorianus
ataacggcaacttatgctagcgatc

SEQ ID NO: 149369 - DNA, 25 bp, Saccharomyces pastorianus
gatagtctgtatcccaaacctagaa

SEQ ID NO: 149370 - DNA, 25 bp, Saccharomyces pastorianus
ggagcggtgcttattctttactgaa

SEQ ID NO: 149371 - DNA, 25 bp, Saccharomyces pastorianus
aaatccagtatttcgggcacgtctt

SEQ ID NO: 149372 - DNA, 25 bp, Saccharomyces pastorianus
gcagggattgcttcgctcattaaac

SEQ ID NO: 149373 - DNA, 25 bp, Saccharomyces pastorianus
agtcctctaaagctgacaccgagat

SEQ ID NO: 149374 - DNA, 25 bp, Saccharomyces pastorianus
attagactcgtctgtcttgacgggc

SEQ ID NO: 149375 - DNA, 25 bp, Saccharomyces pastorianus
caattcggtactctcagcagggatt

SEQ ID NO: 149376 - DNA, 25 bp, Saccharomyces pastorianus
gcaaattgtgctccagattcggtaa

SEQ ID NO: 149377 - DNA, 25 bp, Saccharomyces pastorianus
tcctcttttacactagttgccaaca

SEQ ID NO: 149378 - DNA, 25 bp, Saccharomyces pastorianus
gattcggtaactccattagactcgt

SEQ ID NO: 149379 - DNA, 25 bp, Saccharomyces pastorianus
gcacgtctagtgctgatcctaaaac

SEQ ID NO: 149380 - DNA, 25 bp, Saccharomyces pastorianus
ttttgttcacagagtttcaccttca

SEQ ID NO: 149381 - DNA, 25 bp, Saccharomyces pastorianus
gaagagcttcttcccgtaataactc

SEQ ID NO: 149382 - DNA, 25 bp, Saccharomyces pastorianus
gatgacagcaatactcacgatgata

SEQ ID NO: 149383 - DNA, 25 bp, Saccharomyces pastorianus
gaaaacgcaaaccatgttccgctgg

SEQ ID NO: 149384 - DNA, 25 bp, Saccharomyces pastorianus
aattccgggcgccaataactctatc

SEQ ID NO: 149385 - DNA, 25 bp, Saccharomyces pastorianus
aactacgatatagattccggtgcaa

SEQ ID NO: 149386 - DNA, 25 bp, Saccharomyces pastorianus
tggtaatttcgttccgcaaattccg

SEQ ID NO: 149387 - DNA, 25 bp, Saccharomyces pastorianus
tccaccagttccaattcctttggta

SEQ ID NO: 149388 - DNA, 25 bp, Saccharomyces pastorianus
gttccgctggaatccaataacccgg

SEQ ID NO: 149389 - DNA, 25 bp, Saccharomyces pastorianus
agagcaaaacagacctccgaacttt

SEQ ID NO: 149390 - DNA, 25 bp, Saccharomyces pastorianus
gagtaagaccctcttcaattcaaga

SEQ ID NO: 149391 - DNA, 25 bp, Saccharomyces pastorianus
aatcgctaaaagtgacgccaatgtc

SEQ ID NO: 149392 - DNA, 25 bp, Saccharomyces pastorianus
gagattgatctgctgagcgccacaa

SEQ ID NO: 149393 - DNA, 25 bp, Saccharomyces pastorianus
gaaactctgaacgaaaatgccgaga

SEQ ID NO: 149394 - DNA, 25 bp, Saccharomyces pastorianus
tatgaccatcttcagtcggcaagaa

SEQ ID NO: 149395 - DNA, 25 bp, Saccharomyces pastorianus
aacgtatggttcaacgctgatccga

SEQ ID NO: 149396 - DNA, 25 bp, Saccharomyces pastorianus
gctgagcgccacaactcaacaaatt

SEQ ID NO: 149397 - DNA, 25 bp, Saccharomyces pastorianus
atcagttgtcacaagagggtgtctt

SEQ ID NO: 149398 - DNA, 25 bp, Saccharomyces pastorianus
aacgctgatccgagcatagtcgtga

SEQ ID NO: 149399 - DNA, 25 bp, Saccharomyces pastorianus
agatttggtctatcagttgtcacaa

SEQ ID NO: 149400 - DNA, 25 bp, Saccharomyces pastorianus
gcggaaatcaatcccttcgtttttg

SEQ ID NO: 149401 - DNA, 25 bp, Saccharomyces pastorianus
tttggcgtcaagaataccgaagtat

SEQ ID NO: 149402 - DNA, 25 bp, Saccharomyces pastorianus
attagtacacccacagtctatgcgt

SEQ ID NO: 149403 - DNA, 25 bp, Saccharomyces pastorianus
acgctcaatcgttccatggttagac

SEQ ID NO: 149404 - DNA, 25 bp, Saccharomyces pastorianus
aatagattctaccacaatgacccca

SEQ ID NO: 149405 - DNA, 25 bp, Saccharomyces pastorianus
gactggcttcgcgatgttgtaaaac

SEQ ID NO: 149406 - DNA, 25 bp, Saccharomyces pastorianus
gttcctagtgaacttattgccttag

SEQ ID NO: 149407 - DNA, 25 bp, Saccharomyces pastorianus
aagtttgtgacgactggcttcgcga

SEQ ID NO: 149408 - DNA, 25 bp, Saccharomyces pastorianus
aaggcccctcgtattgacttgtaag

SEQ ID NO: 149409 - DNA, 25 bp, Saccharomyces pastorianus
ggtcctaacatcaactcttggttca

SEQ ID NO: 149410 - DNA, 25 bp, Saccharomyces pastorianus
tgtgaattttcacgaaggcccctcg

SEQ ID NO: 149411 - DNA, 25 bp, Saccharomyces pastorianus
atgttattggtcaagcaacgctcaa

SEQ ID NO: 149412 - DNA, 25 bp, Saccharomyces pastorianus
caatcaactgatctactctccataa

SEQ ID NO: 149413 - DNA, 25 bp, Saccharomyces pastorianus
gagattgaccaattccataatctgg

SEQ ID NO: 149414 - DNA, 25 bp, Saccharomyces pastorianus
gggtactacctttgcatcccaatta

SEQ ID NO: 149415 - DNA, 25 bp, Saccharomyces pastorianus
actggttgaaagacggccaagttga

SEQ ID NO: 149416 - DNA, 25 bp, Saccharomyces pastorianus
ctggaactcgccaaatgtatcgatt

SEQ ID NO: 149417 - DNA, 25 bp, Saccharomyces pastorianus
aaattctacttctcatctatcatcg

SEQ ID NO: 149418 - DNA, 25 bp, Saccharomyces pastorianus
tccagtattatcgacaggtgacagt

SEQ ID NO: 149419 - DNA, 25 bp, Saccharomyces pastorianus
aaacttgtcagatttacagcttatt

SEQ ID NO: 149420 - DNA, 25 bp, Saccharomyces pastorianus
atcggagtcgaaatatgcagtggtg

SEQ ID NO: 149421 - DNA, 25 bp, Saccharomyces pastorianus
ggacttgaagacaactttccctcag

SEQ ID NO: 149422 - DNA, 25 bp, Saccharomyces pastorianus
caaaagtcacttccaattccacgaa

SEQ ID NO: 149423 - DNA, 25 bp, Saccharomyces pastorianus
tttccctcaggaacctccagtatta

SEQ ID NO: 149424 - DNA, 25 bp, Saccharomyces pastorianus
gatttgcgtcaagaagtattaaaac

SEQ ID NO: 149425 - DNA, 25 bp, Saccharomyces pastorianus
aaaacaaaaggcacatacagattat

SEQ ID NO: 149426 - DNA, 25 bp, Saccharomyces pastorianus
cagtagatttgcgtcaagaagtatt

SEQ ID NO: 149427 - DNA, 25 bp, Saccharomyces pastorianus
aaacaaaaggcacatacagattatc

SEQ ID NO: 149428 - DNA, 25 bp, Saccharomyces pastorianus
aacaaaaggcacatacagattatca

SEQ ID NO: 149429 - DNA, 25 bp, Saccharomyces pastorianus
gacagtagatttgcgtcaagaagta

SEQ ID NO: 149430 - DNA, 25 bp, Saccharomyces pastorianus
agtagatttgcgtcaagaagtatta

SEQ ID NO: 149431 - DNA, 25 bp, Saccharomyces pastorianus
attaaaacaaaaggcacatacagat

SEQ ID NO: 149432 - DNA, 25 bp, Saccharomyces pastorianus
gtagatttgcgtcaagaagtattaa

SEQ ID NO: 149433 - DNA, 25 bp, Saccharomyces pastorianus
atttgcgtcaagaagtattaaaaca

SEQ ID NO: 149434 - DNA, 25 bp, Saccharomyces pastorianus
gttgacagtagatttgcgtcaagaa

SEQ ID NO: 149435 - DNA, 25 bp, Saccharomyces pastorianus
aattgagaagcaacggttagaccgc

SEQ ID NO: 149436 - DNA, 25 bp, Saccharomyces pastorianus
tagcggtatgttgcctaaaaataat

SEQ ID NO: 149437 - DNA, 25 bp, Saccharomyces pastorianus
cgcttaaaagttttcgatggaagtg

SEQ ID NO: 149438 - DNA, 25 bp, Saccharomyces pastorianus
tgagaagcaacggttagaccgctta

SEQ ID NO: 149439 - DNA, 25 bp, Saccharomyces pastorianus
agtagtagcggtatgttgcctaaaa

SEQ ID NO: 149440 - DNA, 25 bp, Saccharomyces pastorianus
gagaagcaacggttagaccgcttaa

SEQ ID NO: 149441 - DNA, 25 bp, Saccharomyces pastorianus
attgagaagcaacggttagaccgct

SEQ ID NO: 149442 - DNA, 25 bp, Saccharomyces pastorianus
ttagaccgcttaaaagttttcgatg

SEQ ID NO: 149443 - DNA, 25 bp, Saccharomyces pastorianus
ttcgatggaagtgaaaacccttata

SEQ ID NO: 149444 - DNA, 25 bp, Saccharomyces pastorianus
gaaaaagtagtagcggtatgttgcc

SEQ ID NO: 149445 - DNA, 25 bp, Saccharomyces pastorianus
tagaccgcttaaaagttttcgatgg

SEQ ID NO: 149446 - DNA, 25 bp, Saccharomyces pastorianus
tcgcagaagattggacacagtggct

SEQ ID NO: 149447 - DNA, 25 bp, Saccharomyces pastorianus
acacagtggcttggcttttgcgcgt

SEQ ID NO: 149448 - DNA, 25 bp, Saccharomyces pastorianus
ttgcgcgtctttggcaccatgtcga

SEQ ID NO: 149449 - DNA, 25 bp, Saccharomyces pastorianus
acaagactgtggagactacgtagta

SEQ ID NO: 149450 - DNA, 25 bp, Saccharomyces pastorianus
accatgtcgacgttgcccgtgataa

SEQ ID NO: 149451 - DNA, 25 bp, Saccharomyces pastorianus
ctacgtagtagtgactaattgccaa

SEQ ID NO: 149452 - DNA, 25 bp, Saccharomyces pastorianus
gcagaagacttactggtctcattca

SEQ ID NO: 149453 - DNA, 25 bp, Saccharomyces pastorianus
gacattgggtagattggcttcagca

SEQ ID NO: 149454 - DNA, 25 bp, Saccharomyces pastorianus
ataagccggtctatcatccgtcaca

SEQ ID NO: 149455 - DNA, 25 bp, Saccharomyces pastorianus
ggtctatcatccgtcacaagactgt

SEQ ID NO: 149456 - DNA, 25 bp, Saccharomyces pastorianus
gacgttgcccgtgataagaggacat

SEQ ID NO: 149457 - DNA, 25 bp, Saccharomyces pastorianus
gcatccgatgcctttagagtccata

SEQ ID NO: 149458 - DNA, 25 bp, Saccharomyces pastorianus
aagtcgcggcactatctggtaatga

SEQ ID NO: 149459 - DNA, 25 bp, Saccharomyces pastorianus
tatgattgctcatggtgctgcctca

SEQ ID NO: 149460 - DNA, 25 bp, Saccharomyces pastorianus
ggtgctgcctcattcttgaaggaga

SEQ ID NO: 149461 - DNA, 25 bp, Saccharomyces pastorianus
tccatatttgtggtatttgcgggct

SEQ ID NO: 149462 - DNA, 25 bp, Saccharomyces pastorianus
cgtatgactgttgcccatttaattg

SEQ ID NO: 149463 - DNA, 25 bp, Saccharomyces pastorianus
gcaagtattgacgagacagcctgta

SEQ ID NO: 149464 - DNA, 25 bp, Saccharomyces pastorianus
aaattcatattccatacgccgcgaa

SEQ ID NO: 149465 - DNA, 25 bp, Saccharomyces pastorianus
atacatgccagagcacgtggtccaa

SEQ ID NO: 149466 - DNA, 25 bp, Saccharomyces pastorianus
ggtatatccaaactactgcgtgaac

SEQ ID NO: 149467 - DNA, 25 bp, Saccharomyces pastorianus
atacgccgcgaagttattattccaa

SEQ ID NO: 149468 - DNA, 25 bp, Saccharomyces pastorianus
gaagacgatgaatcactaggccata

SEQ ID NO: 149469 - DNA, 25 bp, Saccharomyces pastorianus
tggaaccactggaagattacgtacc

SEQ ID NO: 149470 - DNA, 25 bp, Saccharomyces pastorianus
attacgtaccacatcaatcacctga

SEQ ID NO: 149471 - DNA, 25 bp, Saccharomyces pastorianus
atcacctgacgcgacaagggtcttc

SEQ ID NO: 149472 - DNA, 25 bp, Saccharomyces pastorianus
gaacaaacactcctattggtcgtga

SEQ ID NO: 149473 - DNA, 25 bp, Saccharomyces pastorianus
gatggctaccgaataccaagatatt

SEQ ID NO: 149474 - DNA, 25 bp, Saccharomyces pastorianus
gggtgatatcaatccggaagtttct

SEQ ID NO: 149475 - DNA, 25 bp, Saccharomyces pastorianus
gaaactcctgaaggccaagcgtgtg

SEQ ID NO: 149476 - DNA, 25 bp, Saccharomyces pastorianus
gaaagggtcatattgccaaactgat

SEQ ID NO: 149477 - DNA, 25 bp, Saccharomyces pastorianus
gtcactgatgtcttgtatttctgtt

SEQ ID NO: 149478 - DNA, 25 bp, Saccharomyces pastorianus
caagggtcttcgtcaatggtgtgtg

SEQ ID NO: 149479 - DNA, 25 bp, Saccharomyces pastorianus
tatatcgctggtgtctttttctact

SEQ ID NO: 149480 - DNA, 25 bp, Saccharomyces pastorianus
ctctgttggctgttggtgttgctaa

SEQ ID NO: 149481 - DNA, 25 bp, Saccharomyces pastorianus
gctaacttagcctctttgttgttta

SEQ ID NO: 149482 - DNA, 25 bp, Saccharomyces pastorianus
ttatgttggttctatgggtctgctt

SEQ ID NO: 149483 - DNA, 25 bp, Saccharomyces pastorianus
gggtgctttattttggttgttctct

SEQ ID NO: 149484 - DNA, 25 bp, Saccharomyces pastorianus
gacttatttcattcaggctctgttg

SEQ ID NO: 149485 - DNA, 25 bp, Saccharomyces pastorianus
ttctcttgtgctttctacgtttatg

SEQ ID NO: 149486 - DNA, 25 bp, Saccharomyces pastorianus
gaaaatgccactgacacctgtagtt

SEQ ID NO: 149487 - DNA, 25 bp, Saccharomyces pastorianus
gggtctgcttgtcatttctttcaac

SEQ ID NO: 149488 - DNA, 25 bp, Saccharomyces pastorianus
gtgttatgactaccccaagtgccat

SEQ ID NO: 149489 - DNA, 25 bp, Saccharomyces pastorianus
gtacagggtttcacctttgacttat

SEQ ID NO: 149490 - DNA, 25 bp, Saccharomyces pastorianus
ttctacattctatttccgtggttct

SEQ ID NO: 149491 - DNA, 25 bp, Saccharomyces pastorianus
aacattgtcgcggttttctccatgt

SEQ ID NO: 149492 - DNA, 25 bp, Saccharomyces pastorianus
ttcaatgcattttcttctctgttag

SEQ ID NO: 149493 - DNA, 25 bp, Saccharomyces pastorianus
gttataccatccaagtgctgacgct

SEQ ID NO: 149494 - DNA, 25 bp, Saccharomyces pastorianus
gttaatcatcactgtttgcttcaat

SEQ ID NO: 149495 - DNA, 25 bp, Saccharomyces pastorianus
gacgcttttgcatcagttctatcag

SEQ ID NO: 149496 - DNA, 25 bp, Saccharomyces pastorianus
gtatggctttattcttgggttcaat

SEQ ID NO: 149497 - DNA, 25 bp, Saccharomyces pastorianus
gtataccggttttgctattcctaag

SEQ ID NO: 149498 - DNA, 25 bp, Saccharomyces pastorianus
gttggctctatccatgtataccggt

SEQ ID NO: 149499 - DNA, 25 bp, Saccharomyces pastorianus
aaatcttttcgttatatgaggccag

SEQ ID NO: 149500 - DNA, 25 bp, Saccharomyces pastorianus
atttgcagaagctatggttcccgct

SEQ ID NO: 149501 - DNA, 25 bp, Saccharomyces pastorianus
tcatttgtcgccttcgtagggttga

SEQ ID NO: 149502 - DNA, 25 bp, Saccharomyces pastorianus
aataacgagagagctttactttgaa

SEQ ID NO: 149503 - DNA, 25 bp, Saccharomyces pastorianus
gagagcaaaaatggcgctattgaaa

SEQ ID NO: 149504 - DNA, 25 bp, Saccharomyces pastorianus
tgatatcctatctattaataacgag

SEQ ID NO: 149505 - DNA, 25 bp, Saccharomyces pastorianus
gctgaataactttgccaatcaattg

SEQ ID NO: 149506 - DNA, 25 bp, Saccharomyces pastorianus
agagctttactttgaagatttcgaa

SEQ ID NO: 149507 - DNA, 25 bp, Saccharomyces pastorianus
gagtaatctagatctgctgaataac

SEQ ID NO: 149508 - DNA, 25 bp, Saccharomyces pastorianus
aattgtttatgcgtcatttgtcgcc

SEQ ID NO: 149509 - DNA, 25 bp, Saccharomyces pastorianus
actaaccgtcatttattgcatttgg

SEQ ID NO: 149510 - DNA, 25 bp, Saccharomyces pastorianus
ggagaatgacaaatttactaaccgt

SEQ ID NO: 149511 - DNA, 25 bp, Saccharomyces pastorianus
gtcgccttcgtagggttgatatcct

SEQ ID NO: 149512 - DNA, 25 bp, Saccharomyces pastorianus
gactccaaacacaagcaatctctca

SEQ ID NO: 149513 - DNA, 25 bp, Saccharomyces pastorianus
gtatttactgaatccctgttcagct

SEQ ID NO: 149514 - DNA, 25 bp, Saccharomyces pastorianus
aaagctcatccctttgaagttcgat

SEQ ID NO: 149515 - DNA, 25 bp, Saccharomyces pastorianus
gaattttattgtcccatatccttaa

SEQ ID NO: 149516 - DNA, 25 bp, Saccharomyces pastorianus
gctggtgcattatcatgtacttcaa

SEQ ID NO: 149517 - DNA, 25 bp, Saccharomyces pastorianus
ttcttttcctcgaccttcaagagat

SEQ ID NO: 149518 - DNA, 25 bp, Saccharomyces pastorianus
gctaattacgaattcttttcctcga

SEQ ID NO: 149519 - DNA, 25 bp, Saccharomyces pastorianus
tagaaacgcgtttagagactccaaa

SEQ ID NO: 149520 - DNA, 25 bp, Saccharomyces pastorianus
ttaatgcatccttttgtccttccaa

SEQ ID NO: 149521 - DNA, 25 bp, Saccharomyces pastorianus
aatctctcagacttagctggtgcat

SEQ ID NO: 149522 - DNA, 25 bp, Saccharomyces pastorianus
ttcagctccgcagcaattcattgtt

SEQ ID NO: 149523 - DNA, 25 bp, Saccharomyces pastorianus
atcgaaggtgatttgcctccaatcc

SEQ ID NO: 149524 - DNA, 25 bp, Saccharomyces pastorianus
aatgactttaacacatcggctcaag

SEQ ID NO: 149525 - DNA, 25 bp, Saccharomyces pastorianus
ttcttgaaccaaggcgctactacga

SEQ ID NO: 149526 - DNA, 25 bp, Saccharomyces pastorianus
cactattaccggctgttctacaaaa

SEQ ID NO: 149527 - DNA, 25 bp, Saccharomyces pastorianus
cagtattaattccttcgttacggcg

SEQ ID NO: 149528 - DNA, 25 bp, Saccharomyces pastorianus
aatagagggccatcaacgccactat

SEQ ID NO: 149529 - DNA, 25 bp, Saccharomyces pastorianus
atacgccacccttatgaaacggaga

SEQ ID NO: 149530 - DNA, 25 bp, Saccharomyces pastorianus
atatatacacttgagcaccagcggc

SEQ ID NO: 149531 - DNA, 25 bp, Saccharomyces pastorianus
aactctggcccaaactaatgacttt

SEQ ID NO: 149532 - DNA, 25 bp, Saccharomyces pastorianus
ggaagcgcagagaaacccctacgga

SEQ ID NO: 149533 - DNA, 25 bp, Saccharomyces pastorianus
aacaaggaccacatcggcggcacat

SEQ ID NO: 149534 - DNA, 25 bp, Saccharomyces pastorianus
ggtaatcctgcaaatttaacgcctt

SEQ ID NO: 149535 - DNA, 25 bp, Saccharomyces pastorianus
aagacgggtgcgttcaagcatcctg

SEQ ID NO: 149536 - DNA, 25 bp, Saccharomyces pastorianus
gtaccgaccgagatgaatcacctag

SEQ ID NO: 149537 - DNA, 25 bp, Saccharomyces pastorianus
gtgacagctctccagagtactgcat

SEQ ID NO: 149538 - DNA, 25 bp, Saccharomyces pastorianus
ttagcatattcctttacctcaccgt

SEQ ID NO: 149539 - DNA, 25 bp, Saccharomyces pastorianus
tgttttctggcttttcaataccgtt

SEQ ID NO: 149540 - DNA, 25 bp, Saccharomyces pastorianus
gaggcaatagatttcccgtatccct

SEQ ID NO: 149541 - DNA, 25 bp, Saccharomyces pastorianus
tattcccaacaacaggccttagcat

SEQ ID NO: 149542 - DNA, 25 bp, Saccharomyces pastorianus
agagtactgcattgccaccttattc

SEQ ID NO: 149543 - DNA, 25 bp, Saccharomyces pastorianus
gccttatcttaaagtaccgaccgag

SEQ ID NO: 149544 - DNA, 25 bp, Saccharomyces pastorianus
ccgtatccctgtgaactagtgtcta

SEQ ID NO: 149545 - DNA, 25 bp, Saccharomyces pastorianus
accgattcataatagttcggccgtt

SEQ ID NO: 149546 - DNA, 25 bp, Saccharomyces pastorianus
accagttgaagatttccgaatttgt

SEQ ID NO: 149547 - DNA, 25 bp, Saccharomyces pastorianus
gtccctacatggcagtgtccgattt

SEQ ID NO: 149548 - DNA, 25 bp, Saccharomyces pastorianus
gatggctcatggaaaccgattcata

SEQ ID NO: 149549 - DNA, 25 bp, Saccharomyces pastorianus
tggtttcttcactctcagtcacaag

SEQ ID NO: 149550 - DNA, 25 bp, Saccharomyces pastorianus
gaagtatccggcgaagactgaccaa

SEQ ID NO: 149551 - DNA, 25 bp, Saccharomyces pastorianus
ctctcagtcacaagtccctacatgg

SEQ ID NO: 149552 - DNA, 25 bp, Saccharomyces pastorianus
gactgaccaatgtaagcatatccaa

SEQ ID NO: 149553 - DNA, 25 bp, Saccharomyces pastorianus
tgtccgatttgtcaacaccctataa

SEQ ID NO: 149554 - DNA, 25 bp, Saccharomyces pastorianus
tctgttgatggctcatggaaaccga

SEQ ID NO: 149555 - DNA, 25 bp, Saccharomyces pastorianus
acaccctataaaattcgaccagttg

SEQ ID NO: 149556 - DNA, 25 bp, Saccharomyces pastorianus
gttcataccacaacgaacccgaaat

SEQ ID NO: 149557 - DNA, 25 bp, Saccharomyces pastorianus
tgacagccgaaatgccttcgatact

SEQ ID NO: 149558 - DNA, 25 bp, Saccharomyces pastorianus
agccgaaatgccttcgatactgatt

SEQ ID NO: 149559 - DNA, 25 bp, Saccharomyces pastorianus
ggcgtaatggttcataccacaacga

SEQ ID NO: 149560 - DNA, 25 bp, Saccharomyces pastorianus
aagagcaagattatgacagccgaaa

SEQ ID NO: 149561 - DNA, 25 bp, Saccharomyces pastorianus
aacgaacccgaaataatatctctgg

SEQ ID NO: 149562 - DNA, 25 bp, Saccharomyces pastorianus
actgattggcgtaatggttcatacc

SEQ ID NO: 149563 - DNA, 25 bp, Saccharomyces pastorianus
aacccgaaataatatctctggatag

SEQ ID NO: 149564 - DNA, 25 bp, Saccharomyces pastorianus
aagattatgacagccgaaatgcctt

SEQ ID NO: 149565 - DNA, 25 bp, Saccharomyces pastorianus
ggcactgtcaaacaagagcaagatt

SEQ ID NO: 149566 - DNA, 25 bp, Saccharomyces pastorianus
aatgccttcgatactgattggcgta

SEQ ID NO: 149567 - DNA, 25 bp, Saccharomyces pastorianus
gtaacttctaacttcacgcaatttg

SEQ ID NO: 149568 - DNA, 25 bp, Saccharomyces pastorianus
aaacggaggaattcactgatgccta

SEQ ID NO: 149569 - DNA, 25 bp, Saccharomyces pastorianus
ttattaaacctctaccatgtcgcta

SEQ ID NO: 149570 - DNA, 25 bp, Saccharomyces pastorianus
gttgttgaactttcaggcgcacaag

SEQ ID NO: 149571 - DNA, 25 bp, Saccharomyces pastorianus
gaggctaggctattacacaaacacg

SEQ ID NO: 149572 - DNA, 25 bp, Saccharomyces pastorianus
tattactttcaggtaacaccaccct

SEQ ID NO: 149573 - DNA, 25 bp, Saccharomyces pastorianus
gaattcatcgttacagaatcccaac

SEQ ID NO: 149574 - DNA, 25 bp, Saccharomyces pastorianus
actgatgcctatgatgtaacttcta

SEQ ID NO: 149575 - DNA, 25 bp, Saccharomyces pastorianus
gaattacattcgatcgttgttgaac

SEQ ID NO: 149576 - DNA, 25 bp, Saccharomyces pastorianus
aatgatgtctcaacctcttttaagg

SEQ ID NO: 149577 - DNA, 25 bp, Saccharomyces pastorianus
aataatgggctctttgtcaaacgaa

SEQ ID NO: 149578 - DNA, 25 bp, Saccharomyces pastorianus
ccgtgtcaacaggtcatcgagatgt

SEQ ID NO: 149579 - DNA, 25 bp, Saccharomyces pastorianus
atattagtgtattcatcgggctggt

SEQ ID NO: 149580 - DNA, 25 bp, Saccharomyces pastorianus
catcgggctggttactacttttgaa

SEQ ID NO: 149581 - DNA, 25 bp, Saccharomyces pastorianus
aaaacaccgctcattcagatgccat

SEQ ID NO: 149582 - DNA, 25 bp, Saccharomyces pastorianus
caacttggccaagtaacccttaatg

SEQ ID NO: 149583 - DNA, 25 bp, Saccharomyces pastorianus
gccactatttgcatcgattggattt

SEQ ID NO: 149584 - DNA, 25 bp, Saccharomyces pastorianus
gtgatagcccacgtaaccaatgata

SEQ ID NO: 149585 - DNA, 25 bp, Saccharomyces pastorianus
gcaaacaacaacgatgccactattt

SEQ ID NO: 149586 - DNA, 25 bp, Saccharomyces pastorianus
gggttcaaatccaccgtgtcaacag

SEQ ID NO: 149587 - DNA, 25 bp, Saccharomyces pastorianus
gatgccatcagttgtattgtaaaat

SEQ ID NO: 149588 - DNA, 25 bp, Saccharomyces pastorianus
attgccctgatgtttaaactggaaa

SEQ ID NO: 149589 - DNA, 25 bp, Saccharomyces pastorianus
gagatttcatgtattttgcgagcca

SEQ ID NO: 149590 - DNA, 25 bp, Saccharomyces pastorianus
ggtgacgatgaatcattccccatat

SEQ ID NO: 149591 - DNA, 25 bp, Saccharomyces pastorianus
tatctgtggtgttctggttccctta

SEQ ID NO: 149592 - DNA, 25 bp, Saccharomyces pastorianus
ttctaggccccgtactgaatgttgc

SEQ ID NO: 149593 - DNA, 25 bp, Saccharomyces pastorianus
gaatgttgccctcgagtgtgttaat

SEQ ID NO: 149594 - DNA, 25 bp, Saccharomyces pastorianus
gagccaatattaccttctgttgccg

SEQ ID NO: 149595 - DNA, 25 bp, Saccharomyces pastorianus
tatccccgagtctgaaagatgctgt

SEQ ID NO: 149596 - DNA, 25 bp, Saccharomyces pastorianus
gatgctgtctggaaatttgccctct

SEQ ID NO: 149597 - DNA, 25 bp, Saccharomyces pastorianus
tatcctggcgcatttttgaattcaa

SEQ ID NO: 149598 - DNA, 25 bp, Saccharomyces pastorianus
gaattcaacagagcttctaggcccc

SEQ ID NO: 149599 - DNA, 25 bp, Saccharomyces pastorianus
aacgactggattcggttcctatctg

SEQ ID NO: 149600 - DNA, 25 bp, Saccharomyces pastorianus
actttctttgttgctcttggtaata

SEQ ID NO: 149601 - DNA, 25 bp, Saccharomyces pastorianus
atccggtactgcaactttctttgtt

SEQ ID NO: 149602 - DNA, 25 bp, Saccharomyces pastorianus
ggcattctcatttgttattgcttta

SEQ ID NO: 149603 - DNA, 25 bp, Saccharomyces pastorianus
gaagccattagatccggtactgcaa

SEQ ID NO: 149604 - DNA, 25 bp, Saccharomyces pastorianus
gttcttgtatctaaggtttacctcg

SEQ ID NO: 149605 - DNA, 25 bp, Saccharomyces pastorianus
gaccgctttgttcacgttcttgtat

SEQ ID NO: 149606 - DNA, 25 bp, Saccharomyces pastorianus
taataacccggaggtcttccatcat

SEQ ID NO: 149607 - DNA, 25 bp, Saccharomyces pastorianus
ttccatcattcttaccctcataggt

SEQ ID NO: 149608 - DNA, 25 bp, Saccharomyces pastorianus
aacggcgccctaatggcattctcat

SEQ ID NO: 149609 - DNA, 25 bp, Saccharomyces pastorianus
gtttacctcgcctcaatacaattcg

SEQ ID NO: 149610 - DNA, 25 bp, Saccharomyces pastorianus
atacaattcgaacggcgcttacaac

SEQ ID NO: 149611 - DNA, 25 bp, Saccharomyces pastorianus
gcagctgttcgcattccaaattgat

SEQ ID NO: 149612 - DNA, 25 bp, Saccharomyces pastorianus
ggcgtctttggcagctggtattata

SEQ ID NO: 149613 - DNA, 25 bp, Saccharomyces pastorianus
gatcagacacgatgttacctccagc

SEQ ID NO: 149614 - DNA, 25 bp, Saccharomyces pastorianus
actcgttcatcgctctttatggtaa

SEQ ID NO: 149615 - DNA, 25 bp, Saccharomyces pastorianus
acattgtgttatttctggcgtcttt

SEQ ID NO: 149616 - DNA, 25 bp, Saccharomyces pastorianus
gagagccatgacttactcgttcggt

SEQ ID NO: 149617 - DNA, 25 bp, Saccharomyces pastorianus
ggtggcccgcatttggagcattgaa

SEQ ID NO: 149618 - DNA, 25 bp, Saccharomyces pastorianus
ggaatggacgccctaatcaatgata

SEQ ID NO: 149619 - DNA, 25 bp, Saccharomyces pastorianus
ttttctgcggctattatatctctga

SEQ ID NO: 149620 - DNA, 25 bp, Saccharomyces pastorianus
ttatcggctttctgaagtggctcgc

SEQ ID NO: 149621 - DNA, 25 bp, Saccharomyces pastorianus
tttgggtttctcttctcagcagtca

SEQ ID NO: 149622 - DNA, 25 bp, Saccharomyces pastorianus
ggcagggcttttttccaaaacattg

SEQ ID NO: 149623 - DNA, 25 bp, Saccharomyces pastorianus
tgttctctgatctactttaagttga

SEQ ID NO: 149624 - DNA, 25 bp, Saccharomyces pastorianus
gatcgcttgttcacggccggaaata

SEQ ID NO: 149625 - DNA, 25 bp, Saccharomyces pastorianus
atgagcttgtactcgtcaatcttcg

SEQ ID NO: 149626 - DNA, 25 bp, Saccharomyces pastorianus
cctataggactattcttggcaacgt

SEQ ID NO: 149627 - DNA, 25 bp, Saccharomyces pastorianus
gaccgaggaaacatggctagcacaa

SEQ ID NO: 149628 - DNA, 25 bp, Saccharomyces pastorianus
gacgaaattgactgttcctttagac

SEQ ID NO: 149629 - DNA, 25 bp, Saccharomyces pastorianus
ggactatgtctatccaacgatatgg

SEQ ID NO: 149630 - DNA, 25 bp, Saccharomyces pastorianus
atccgcagagcgataatccatcatc

SEQ ID NO: 149631 - DNA, 25 bp, Saccharomyces pastorianus
ggcagcgggatctcagccttgcagt

SEQ ID NO: 149632 - DNA, 25 bp, Saccharomyces pastorianus
acgccctcaataattccaatgtcac

SEQ ID NO: 149633 - DNA, 25 bp, Saccharomyces pastorianus
tacggttactacaatagggttgcat

SEQ ID NO: 149634 - DNA, 25 bp, Saccharomyces pastorianus
gtagaagaagaacttggcccacttg

SEQ ID NO: 149635 - DNA, 25 bp, Saccharomyces pastorianus
ggcagtcggactattattgtcgttt

SEQ ID NO: 149636 - DNA, 25 bp, Saccharomyces pastorianus
tggcccacttggacattacacaggt

SEQ ID NO: 149637 - DNA, 25 bp, Saccharomyces pastorianus
atattcattcggtggagatggctcc

SEQ ID NO: 149638 - DNA, 25 bp, Saccharomyces pastorianus
tatcttgtaacgttggtagaccctt

SEQ ID NO: 149639 - DNA, 25 bp, Saccharomyces pastorianus
gagatggctccgatttggttaatat

SEQ ID NO: 149640 - DNA, 25 bp, Saccharomyces pastorianus
cccggatttgaaagcttattccaag

SEQ ID NO: 149641 - DNA, 25 bp, Saccharomyces pastorianus
gagcgtgcacaaatgttaatacttt

SEQ ID NO: 149642 - DNA, 25 bp, Saccharomyces pastorianus
aggccaatgttgttaactctttatg

SEQ ID NO: 149643 - DNA, 25 bp, Saccharomyces pastorianus
taatacttttctactactatcgtga

SEQ ID NO: 149644 - DNA, 25 bp, Saccharomyces pastorianus
acgaaggtgtgtttcattcccgtcg

SEQ ID NO: 149645 - DNA, 25 bp, Saccharomyces pastorianus
tcgtttcgcacacatcttgactgaa

SEQ ID NO: 149646 - DNA, 25 bp, Saccharomyces pastorianus
ttttgaggttctttcacttgctgta

SEQ ID NO: 149647 - DNA, 25 bp, Saccharomyces pastorianus
ttattcctgatgtaccaatggctga

SEQ ID NO: 149648 - DNA, 25 bp, Saccharomyces pastorianus
gggccctgttgttaatgttgttcaa

SEQ ID NO: 149649 - DNA, 25 bp, Saccharomyces pastorianus
agaacatgccctggaagtttttgag

SEQ ID NO: 149650 - DNA, 25 bp, Saccharomyces pastorianus
tcgtggctgtcataagaaacccctt

SEQ ID NO: 149651 - DNA, 25 bp, Saccharomyces pastorianus
ccaccttggatttacgttttgctag

SEQ ID NO: 149652 - DNA, 25 bp, Saccharomyces pastorianus
gttttagatcaattccgtaggcaga

SEQ ID NO: 149653 - DNA, 25 bp, Saccharomyces pastorianus
actagaacgcatattccaccttgga

SEQ ID NO: 149654 - DNA, 25 bp, Saccharomyces pastorianus
gtaacccttaccttgatcttaggtg

SEQ ID NO: 149655 - DNA, 25 bp, Saccharomyces pastorianus
ctcgagtttgagtgattccgttacg

SEQ ID NO: 149656 - DNA, 25 bp, Saccharomyces pastorianus
atttaaagtttgtcgggctagctca

SEQ ID NO: 149657 - DNA, 25 bp, Saccharomyces pastorianus
gatgaatcgattgctcctttaaagg

SEQ ID NO: 149658 - DNA, 25 bp, Saccharomyces pastorianus
gatcacaaggtgctgttactttttg

SEQ ID NO: 149659 - DNA, 25 bp, Saccharomyces pastorianus
gggctagctcataagttgttgcaag

SEQ ID NO: 149660 - DNA, 25 bp, Saccharomyces pastorianus
acctgctggttgtgagggttctagc

SEQ ID NO: 149661 - DNA, 25 bp, Saccharomyces pastorianus
aggatctttaacatctcagctagtg

SEQ ID NO: 149662 - DNA, 25 bp, Saccharomyces pastorianus
aggtcaatctttccctatttggcaa

SEQ ID NO: 149663 - DNA, 25 bp, Saccharomyces pastorianus
ggttctagcctgtatgattatttcg

SEQ ID NO: 149664 - DNA, 25 bp, Saccharomyces pastorianus
atcatgtaggtgtgactccactctc

SEQ ID NO: 149665 - DNA, 25 bp, Saccharomyces pastorianus
gatttagatcttccaactcagcaaa

SEQ ID NO: 149666 - DNA, 25 bp, Saccharomyces pastorianus
aaacgacttcactttctgggttgat

SEQ ID NO: 149667 - DNA, 25 bp, Saccharomyces pastorianus
agaagatggattttcagatttgaac

SEQ ID NO: 149668 - DNA, 25 bp, Saccharomyces pastorianus
ttataaacgacttcactttctgggt

SEQ ID NO: 149669 - DNA, 25 bp, Saccharomyces pastorianus
caagaagccttcaggatgagaagat

SEQ ID NO: 149670 - DNA, 25 bp, Saccharomyces pastorianus
ttccatgacagattctttataaacg

SEQ ID NO: 149671 - DNA, 25 bp, Saccharomyces pastorianus
tgaacaattggttgtaaaccctagt

SEQ ID NO: 149672 - DNA, 25 bp, Saccharomyces pastorianus
cactttctgggttgatgtccttcaa

SEQ ID NO: 149673 - DNA, 25 bp, Saccharomyces pastorianus
gtccttcaagaagccttcaggatga

SEQ ID NO: 149674 - DNA, 25 bp, Saccharomyces pastorianus
tgggttgatgtccttcaagaagcct

SEQ ID NO: 149675 - DNA, 25 bp, Saccharomyces pastorianus
gatgtccttcaagaagccttcagga

SEQ ID NO: 149676 - DNA, 25 bp, Saccharomyces pastorianus
gacttcactttctgggttgatgtcc

SEQ ID NO: 149677 - DNA, 25 bp, Saccharomyces pastorianus
ataatgcccatgttatgcaagacgt

SEQ ID NO: 149678 - DNA, 25 bp, Saccharomyces pastorianus
gaatgacaccaattttattatcctt

SEQ ID NO: 149679 - DNA, 25 bp, Saccharomyces pastorianus
tttcctttggaacccttgcaagtgg

SEQ ID NO: 149680 - DNA, 25 bp, Saccharomyces pastorianus
atgcaagaatcccagtgacaagaat

SEQ ID NO: 149681 - DNA, 25 bp, Saccharomyces pastorianus
tggagtcaggtttattttcagtgga

SEQ ID NO: 149682 - DNA, 25 bp, Saccharomyces pastorianus
ggatggtaccattgatttagtcata

SEQ ID NO: 149683 - DNA, 25 bp, Saccharomyces pastorianus
atgccgtatattgctaaggacacca

SEQ ID NO: 149684 - DNA, 25 bp, Saccharomyces pastorianus
gagccagaagttattcactcaaaaa

SEQ ID NO: 149685 - DNA, 25 bp, Saccharomyces pastorianus
gctgctttaccagcggatggtacca

SEQ ID NO: 149686 - DNA, 25 bp, Saccharomyces pastorianus
ggacaccaaattttttcccgctgct

SEQ ID NO: 149687 - DNA, 25 bp, Saccharomyces pastorianus
aaggttctcatgtattagagccaga

SEQ ID NO: 149688 - DNA, 25 bp, Saccharomyces pastorianus
gggtgtagcattcaacattatccaa

SEQ ID NO: 149689 - DNA, 25 bp, Saccharomyces pastorianus
tgaacgaatggccaagattatcctt

SEQ ID NO: 149690 - DNA, 25 bp, Saccharomyces pastorianus
gagtcagacgtacggcgttattgca

SEQ ID NO: 149691 - DNA, 25 bp, Saccharomyces pastorianus
gtacggcgttattgcagaatctgat

SEQ ID NO: 149692 - DNA, 25 bp, Saccharomyces pastorianus
cagatggatgggtcccgttaggttt

SEQ ID NO: 149693 - DNA, 25 bp, Saccharomyces pastorianus
ctctgtgccttgtcaaatccattga

SEQ ID NO: 149694 - DNA, 25 bp, Saccharomyces pastorianus
aagattatcctttttgagtcagacg

SEQ ID NO: 149695 - DNA, 25 bp, Saccharomyces pastorianus
aataacccatcgtacgccgctctgt

SEQ ID NO: 149696 - DNA, 25 bp, Saccharomyces pastorianus
cgaagttttcgtcaaatatgctgcc

SEQ ID NO: 149697 - DNA, 25 bp, Saccharomyces pastorianus
ggtaagaaatatccctgcgaagttt

SEQ ID NO: 149698 - DNA, 25 bp, Saccharomyces pastorianus
gttcccaaccttcttatatgaacga

SEQ ID NO: 149699 - DNA, 25 bp, Saccharomyces pastorianus
gataaggctcctgtaagcgaatcac

SEQ ID NO: 149700 - DNA, 25 bp, Saccharomyces pastorianus
gtgtctcccgatgattcacaggatt

SEQ ID NO: 149701 - DNA, 25 bp, Saccharomyces pastorianus
ggatgattccctggaactgttgcct

SEQ ID NO: 149702 - DNA, 25 bp, Saccharomyces pastorianus
gaacactgtgaaggtgtctcccgat

SEQ ID NO: 149703 - DNA, 25 bp, Saccharomyces pastorianus
acaggattactcacccatctttagg

SEQ ID NO: 149704 - DNA, 25 bp, Saccharomyces pastorianus
ggaactgttgcctcttaatactacc

SEQ ID NO: 149705 - DNA, 25 bp, Saccharomyces pastorianus
agcgaatcacagtcatttcccaaaa

SEQ ID NO: 149706 - DNA, 25 bp, Saccharomyces pastorianus
gaaaatctgagttcttcgtctgaaa

SEQ ID NO: 149707 - DNA, 25 bp, Saccharomyces pastorianus
aatactaccattccgttcaacagaa

SEQ ID NO: 149708 - DNA, 25 bp, Saccharomyces pastorianus
agggcctgatgttataccacaaata

SEQ ID NO: 149709 - DNA, 25 bp, Saccharomyces pastorianus
gattctttatccttgttgagctgct

SEQ ID NO: 149710 - DNA, 25 bp, Saccharomyces pastorianus
aagagtttccgcaacctgtcagaga

SEQ ID NO: 149711 - DNA, 25 bp, Saccharomyces pastorianus
gttttattgttttccgcacattctc

SEQ ID NO: 149712 - DNA, 25 bp, Saccharomyces pastorianus
gaaggcatggcagatctcgtcaaaa

SEQ ID NO: 149713 - DNA, 25 bp, Saccharomyces pastorianus
tggcaagtccaatgatcctgtaaag

SEQ ID NO: 149714 - DNA, 25 bp, Saccharomyces pastorianus
atgtttattcctatcgcctttacct

SEQ ID NO: 149715 - DNA, 25 bp, Saccharomyces pastorianus
actacctcttgattttgcacttggc

SEQ ID NO: 149716 - DNA, 25 bp, Saccharomyces pastorianus
gtagctgcgacggtttacaacatca

SEQ ID NO: 149717 - DNA, 25 bp, Saccharomyces pastorianus
tgttaacaccggtgatgcctaccca

SEQ ID NO: 149718 - DNA, 25 bp, Saccharomyces pastorianus
ggtcggttattgatcgttggcctac

SEQ ID NO: 149719 - DNA, 25 bp, Saccharomyces pastorianus
aaccatggttgggagcgcagacagc

SEQ ID NO: 149720 - DNA, 25 bp, Saccharomyces pastorianus
aaggccttctccgaaaatatcacca

SEQ ID NO: 149721 - DNA, 25 bp, Saccharomyces pastorianus
gatcattttcggttacattcaacat

SEQ ID NO: 149722 - DNA, 25 bp, Saccharomyces pastorianus
ctgaccattacaagatcattttcgg

SEQ ID NO: 149723 - DNA, 25 bp, Saccharomyces pastorianus
tttcggttacattcaacatgcagaa

SEQ ID NO: 149724 - DNA, 25 bp, Saccharomyces pastorianus
gtacacaaggttccttcctaagaag

SEQ ID NO: 149725 - DNA, 25 bp, Saccharomyces pastorianus
aaggttccttcctaagaagatcaca

SEQ ID NO: 149726 - DNA, 25 bp, Saccharomyces pastorianus
acaagatcattttcggttacattca

SEQ ID NO: 149727 - DNA, 25 bp, Saccharomyces pastorianus
gaagatcacaactgaccattacaag

SEQ ID NO: 149728 - DNA, 25 bp, Saccharomyces pastorianus
gaacaatccgtacacaaggttcctt

SEQ ID NO: 149729 - DNA, 25 bp, Saccharomyces pastorianus
tgctttccagaacaatccgtacaca

SEQ ID NO: 149730 - DNA, 25 bp, Saccharomyces pastorianus
aaagagatcacccacaggaattgtt

SEQ ID NO: 149731 - DNA, 25 bp, Saccharomyces pastorianus
catgcagaatgcacaaaagagatca

SEQ ID NO: 149732 - DNA, 25 bp, Saccharomyces pastorianus
aattaatgacccctcttgttctgag

SEQ ID NO: 149733 - DNA, 25 bp, Saccharomyces pastorianus
agaaggcccattactctcagaaaga

SEQ ID NO: 149734 - DNA, 25 bp, Saccharomyces pastorianus
agcttctcaactgcaatgatccaag

SEQ ID NO: 149735 - DNA, 25 bp, Saccharomyces pastorianus
gatgcccatttgaaggatcgctatc

SEQ ID NO: 149736 - DNA, 25 bp, Saccharomyces pastorianus
atgtcacgagtttcaggagttgcaa

SEQ ID NO: 149737 - DNA, 25 bp, Saccharomyces pastorianus
gcttcagactcaatttaccgctcaa

SEQ ID NO: 149738 - DNA, 25 bp, Saccharomyces pastorianus
aaagtatgttactgactcaccaaga

SEQ ID NO: 149739 - DNA, 25 bp, Saccharomyces pastorianus
aacatttggagaggtcgcttcagac

SEQ ID NO: 149740 - DNA, 25 bp, Saccharomyces pastorianus
gttctgaggcagaggcacttgataa

SEQ ID NO: 149741 - DNA, 25 bp, Saccharomyces pastorianus
gaggaaggcccgaaagatgcccatt

SEQ ID NO: 149742 - DNA, 25 bp, Saccharomyces pastorianus
atttaccgctcaaaacagcttctca

SEQ ID NO: 149743 - DNA, 25 bp, Saccharomyces pastorianus
tccttcgaggagtattacaacgatt

SEQ ID NO: 149744 - DNA, 25 bp, Saccharomyces pastorianus
gaagatacaagctatagcaactcct

SEQ ID NO: 149745 - DNA, 25 bp, Saccharomyces pastorianus
agatacaagctatagcaactccttc

SEQ ID NO: 149746 - DNA, 25 bp, Saccharomyces pastorianus
cgaggagtattacaacgattctcac

SEQ ID NO: 149747 - DNA, 25 bp, Saccharomyces pastorianus
ctccttcgaggagtattacaacgat

SEQ ID NO: 149748 - DNA, 25 bp, Saccharomyces pastorianus
ttcgaggagtattacaacgattctc

SEQ ID NO: 149749 - DNA, 25 bp, Saccharomyces pastorianus
ccttcgaggagtattacaacgattc

SEQ ID NO: 149750 - DNA, 25 bp, Saccharomyces pastorianus
gcaactccttcgaggagtattacaa

SEQ ID NO: 149751 - DNA, 25 bp, Saccharomyces pastorianus
gatacaagctatagcaactccttcg

SEQ ID NO: 149752 - DNA, 25 bp, Saccharomyces pastorianus
tagcaactccttcgaggagtattac

SEQ ID NO: 149753 - DNA, 25 bp, Saccharomyces pastorianus
cttcgaggagtattacaacgattct

SEQ ID NO: 149754 - DNA, 25 bp, Saccharomyces pastorianus
ggcctttatccgaaaagtgtactag

SEQ ID NO: 149755 - DNA, 25 bp, Saccharomyces pastorianus
gtacaccagttctgtttaaagaatt

SEQ ID NO: 149756 - DNA, 25 bp, Saccharomyces pastorianus
gaaagaattgttacacagtgaaatg

SEQ ID NO: 149757 - DNA, 25 bp, Saccharomyces pastorianus
cagaagcttatcaaagcacaagcaa

SEQ ID NO: 149758 - DNA, 25 bp, Saccharomyces pastorianus
aaagttcttcaggacataaagcaga

SEQ ID NO: 149759 - DNA, 25 bp, Saccharomyces pastorianus
attttcagtacaccagttctgttta

SEQ ID NO: 149760 - DNA, 25 bp, Saccharomyces pastorianus
atccgaaaagtgtactaggtatgaa

SEQ ID NO: 149761 - DNA, 25 bp, Saccharomyces pastorianus
gcagaatttagaaggcctttatccg

SEQ ID NO: 149762 - DNA, 25 bp, Saccharomyces pastorianus
atcaactgacaaatactgaaacatt

SEQ ID NO: 149763 - DNA, 25 bp, Saccharomyces pastorianus
gcacaagcaatggagactaacggaa

SEQ ID NO: 149764 - DNA, 25 bp, Saccharomyces pastorianus
cagtgaaatgaaacagaagcttatc

SEQ ID NO: 149765 - DNA, 25 bp, Saccharomyces pastorianus
gaggattttgtatacattgcactat

SEQ ID NO: 149766 - DNA, 25 bp, Saccharomyces pastorianus
aaacgatattgattctgtcttgtat

SEQ ID NO: 149767 - DNA, 25 bp, Saccharomyces pastorianus
attgatccaaaacttttgaactctt

SEQ ID NO: 149768 - DNA, 25 bp, Saccharomyces pastorianus
gattctgtcttgtatactagttcta

SEQ ID NO: 149769 - DNA, 25 bp, Saccharomyces pastorianus
gtatacattgcactattactgcata

SEQ ID NO: 149770 - DNA, 25 bp, Saccharomyces pastorianus
gcactattactgcataaggcaaacg

SEQ ID NO: 149771 - DNA, 25 bp, Saccharomyces pastorianus
gatattgattctgtcttgtatacta

SEQ ID NO: 149772 - DNA, 25 bp, Saccharomyces pastorianus
tttgaactctttaactttcgaggat

SEQ ID NO: 149773 - DNA, 25 bp, Saccharomyces pastorianus
aaggcaaacgatattgattctgtct

SEQ ID NO: 149774 - DNA, 25 bp, Saccharomyces pastorianus
taactttcgaggattttgtatacat

SEQ ID NO: 149775 - DNA, 25 bp, Saccharomyces pastorianus
tgtcttgtatactagttctacaaag

SEQ ID NO: 149776 - DNA, 25 bp, Saccharomyces pastorianus
caaattctcctcaggctaaagttca

SEQ ID NO: 149777 - DNA, 25 bp, Saccharomyces pastorianus
aaattctcctcaggctaaagttcac

SEQ ID NO: 149778 - DNA, 25 bp, Saccharomyces pastorianus
ttttcaaattctcctcaggctaaag

SEQ ID NO: 149779 - DNA, 25 bp, Saccharomyces pastorianus
tcaaattctcctcaggctaaagttc

SEQ ID NO: 149780 - DNA, 25 bp, Saccharomyces pastorianus
tttttcaaattctcctcaggctaaa

SEQ ID NO: 149781 - DNA, 25 bp, Saccharomyces pastorianus
ttttttcaaattctcctcaggctaa

SEQ ID NO: 149782 - DNA, 25 bp, Saccharomyces pastorianus
ttcaaattctcctcaggctaaagtt

SEQ ID NO: 149783 - DNA, 25 bp, Saccharomyces pastorianus
tttcaaattctcctcaggctaaagt

SEQ ID NO: 149784 - DNA, 25 bp, Saccharomyces pastorianus
attctcctcaggctaaagttcacgg

SEQ ID NO: 149785 - DNA, 25 bp, Saccharomyces pastorianus
aaccaaagggtcgtgcttacaagag

SEQ ID NO: 149786 - DNA, 25 bp, Saccharomyces pastorianus
ttctcctcaggctaaagttcacggt

SEQ ID NO: 149787 - DNA, 25 bp, Saccharomyces pastorianus
gtaagcaatttttcgcgtaccacca

SEQ ID NO: 149788 - DNA, 25 bp, Saccharomyces pastorianus
aaatgcgaattacgtgttcaacgtc

SEQ ID NO: 149789 - DNA, 25 bp, Saccharomyces pastorianus
gccacagtgcgggtaagcaattttt

SEQ ID NO: 149790 - DNA, 25 bp, Saccharomyces pastorianus
taagcaatttttcgcgtaccaccac

SEQ ID NO: 149791 - DNA, 25 bp, Saccharomyces pastorianus
ttttttcaccgccacagtgcgggta

SEQ ID NO: 149792 - DNA, 25 bp, Saccharomyces pastorianus
caatttggcttataaatgttcgaga

SEQ ID NO: 149793 - DNA, 25 bp, Saccharomyces pastorianus
gcaattttcgaaactcaatttggct

SEQ ID NO: 149794 - DNA, 25 bp, Saccharomyces pastorianus
gcaaccaagcaattttcgaaactca

SEQ ID NO: 149795 - DNA, 25 bp, Saccharomyces pastorianus
gtaccaccaccattacacatgtata

SEQ ID NO: 149796 - DNA, 25 bp, Saccharomyces pastorianus
atgctatgtataacgcaaccaagca

SEQ ID NO: 149797 - DNA, 25 bp, Saccharomyces pastorianus
taacgcaaccaagcaattttcgaaa

SEQ ID NO: 149798 - DNA, 25 bp, Saccharomyces pastorianus
aaactttagagctaccgccattcat

SEQ ID NO: 149799 - DNA, 25 bp, Saccharomyces pastorianus
gatctggtgccgctactttattggt

SEQ ID NO: 149800 - DNA, 25 bp, Saccharomyces pastorianus
ggtgaccgtacccaatctgagagag

SEQ ID NO: 149801 - DNA, 25 bp, Saccharomyces pastorianus
ggtttcggtcgcaacaacaacagag

SEQ ID NO: 149802 - DNA, 25 bp, Saccharomyces pastorianus
tcttgccactgcctttttcaacagt

SEQ ID NO: 149803 - DNA, 25 bp, Saccharomyces pastorianus
agattaccgtaaggccggaggcgct

SEQ ID NO: 149804 - DNA, 25 bp, Saccharomyces pastorianus
aagaagtcccatcattcttgaagga

SEQ ID NO: 149805 - DNA, 25 bp, Saccharomyces pastorianus
ttattggttgccacagctgtcgcag

SEQ ID NO: 149806 - DNA, 25 bp, Saccharomyces pastorianus
gcagatcaattgaccgatttcctga

SEQ ID NO: 149807 - DNA, 25 bp, Saccharomyces pastorianus
gtagcgattccaagtcttctggctg

SEQ ID NO: 149808 - DNA, 25 bp, Saccharomyces pastorianus
aactctttcagaggcggtagtggct

SEQ ID NO: 149809 - DNA, 25 bp, Saccharomyces pastorianus
tcgttaccttggatttcctactaag

SEQ ID NO: 149810 - DNA, 25 bp, Saccharomyces pastorianus
gactcaggaccttatctttatcata

SEQ ID NO: 149811 - DNA, 25 bp, Saccharomyces pastorianus
gccactattagtccattgttctgca

SEQ ID NO: 149812 - DNA, 25 bp, Saccharomyces pastorianus
gcaaagttttattacaagcctcgaa

SEQ ID NO: 149813 - DNA, 25 bp, Saccharomyces pastorianus
aagattgtgaccttccgcataatgg

SEQ ID NO: 149814 - DNA, 25 bp, Saccharomyces pastorianus
aattggttagattcatgcggcgtag

SEQ ID NO: 149815 - DNA, 25 bp, Saccharomyces pastorianus
ataatggtgaccttacttccactac

SEQ ID NO: 149816 - DNA, 25 bp, Saccharomyces pastorianus
atggctgtgttctcagagtctttca

SEQ ID NO: 149817 - DNA, 25 bp, Saccharomyces pastorianus
tatccgagccgtttattgtttacca

SEQ ID NO: 149818 - DNA, 25 bp, Saccharomyces pastorianus
gatacagcaaattcatcgccactat

SEQ ID NO: 149819 - DNA, 25 bp, Saccharomyces pastorianus
ttccactaccatggctgtatccgag

SEQ ID NO: 149820 - DNA, 25 bp, Saccharomyces pastorianus
cgctatatcggaaaagggccacata

SEQ ID NO: 149821 - DNA, 25 bp, Saccharomyces pastorianus
cgacgttaacatacggcggacaact

SEQ ID NO: 149822 - DNA, 25 bp, Saccharomyces pastorianus
tgcaaagatttggacgacgttaaca

SEQ ID NO: 149823 - DNA, 25 bp, Saccharomyces pastorianus
gcaatagaatggcttcttccgctat

SEQ ID NO: 149824 - DNA, 25 bp, Saccharomyces pastorianus
gaatggcttcttccgctatatcgga

SEQ ID NO: 149825 - DNA, 25 bp, Saccharomyces pastorianus
tctgtctaaccttccccaaaatcaa

SEQ ID NO: 149826 - DNA, 25 bp, Saccharomyces pastorianus
aagggccacatacaagtcaatcaaa

SEQ ID NO: 149827 - DNA, 25 bp, Saccharomyces pastorianus
gtcaaatgcccgtctatagaggtga

SEQ ID NO: 149828 - DNA, 25 bp, Saccharomyces pastorianus
tagaacacctggtcaaatgcccgtc

SEQ ID NO: 149829 - DNA, 25 bp, Saccharomyces pastorianus
gtcaatcaaactagaacacctggtc

SEQ ID NO: 149830 - DNA, 25 bp, Saccharomyces pastorianus
tataaatctgtctaaccttccccaa

SEQ ID NO: 149831 - DNA, 25 bp, Saccharomyces pastorianus
attttgggtcagacgcgacacataa

SEQ ID NO: 149832 - DNA, 25 bp, Saccharomyces pastorianus
tatagccgatttgccctggattaaa

SEQ ID NO: 149833 - DNA, 25 bp, Saccharomyces pastorianus
atgtctcttcgtatagccgatttgc

SEQ ID NO: 149834 - DNA, 25 bp, Saccharomyces pastorianus
atattgaatgatcctgcagtacaga

SEQ ID NO: 149835 - DNA, 25 bp, Saccharomyces pastorianus
gccctggattaaaagccttgcgctt

SEQ ID NO: 149836 - DNA, 25 bp, Saccharomyces pastorianus
cccaggagggagcagttttttatgt

SEQ ID NO: 149837 - DNA, 25 bp, Saccharomyces pastorianus
atgtttataacacaactaccagatg

SEQ ID NO: 149838 - DNA, 25 bp, Saccharomyces pastorianus
aagccttgcgcttatagatgaggat

SEQ ID NO: 149839 - DNA, 25 bp, Saccharomyces pastorianus
caggcatttttgaaattaccgaaca

SEQ ID NO: 149840 - DNA, 25 bp, Saccharomyces pastorianus
gagcaattgaaaatcatcccaggag

SEQ ID NO: 149841 - DNA, 25 bp, Saccharomyces pastorianus
gatgacagacgtggttcagatgata

SEQ ID NO: 149842 - DNA, 25 bp, Saccharomyces pastorianus
cattgtgcacggaactttcgatgat

SEQ ID NO: 149843 - DNA, 25 bp, Saccharomyces pastorianus
aaagcgtcttttcattgtgcacgga

SEQ ID NO: 149844 - DNA, 25 bp, Saccharomyces pastorianus
atgaaccaaccatcggaaaaccatg

SEQ ID NO: 149845 - DNA, 25 bp, Saccharomyces pastorianus
tccggtaccacaacgctcaaagaat

SEQ ID NO: 149846 - DNA, 25 bp, Saccharomyces pastorianus
gtatccaccatccaaaatttcaaat

SEQ ID NO: 149847 - DNA, 25 bp, Saccharomyces pastorianus
gaaggctattttgaagtatccacca

SEQ ID NO: 149848 - DNA, 25 bp, Saccharomyces pastorianus
gttaagggatgcctttgctgaacgc

SEQ ID NO: 149849 - DNA, 25 bp, Saccharomyces pastorianus
ggattgacgaactatgacatgcaca

SEQ ID NO: 149850 - DNA, 25 bp, Saccharomyces pastorianus
agactctgatcattccatccggtac

SEQ ID NO: 149851 - DNA, 25 bp, Saccharomyces pastorianus
acatgcacatttttccagactctga

SEQ ID NO: 149852 - DNA, 25 bp, Saccharomyces pastorianus
ggacattgtatgattccgtttacac

SEQ ID NO: 149853 - DNA, 25 bp, Saccharomyces pastorianus
aaagagcctatccagttgaccaaag

SEQ ID NO: 149854 - DNA, 25 bp, Saccharomyces pastorianus
gatgattcaatcttgcaactgacga

SEQ ID NO: 149855 - DNA, 25 bp, Saccharomyces pastorianus
acacctttatagtatcagccttacg

SEQ ID NO: 149856 - DNA, 25 bp, Saccharomyces pastorianus
gggcctgatacacctattaaagtag

SEQ ID NO: 149857 - DNA, 25 bp, Saccharomyces pastorianus
cagccttacggattctacaactcag

SEQ ID NO: 149858 - DNA, 25 bp, Saccharomyces pastorianus
agaactacgatttacctatcacaag

SEQ ID NO: 149859 - DNA, 25 bp, Saccharomyces pastorianus
aatgagattggtgtcatgtcacaac

SEQ ID NO: 149860 - DNA, 25 bp, Saccharomyces pastorianus
aaccatggtcctagacgatggcgta

SEQ ID NO: 149861 - DNA, 25 bp, Saccharomyces pastorianus
gaacgttgccgaaattcacgatgat

SEQ ID NO: 149862 - DNA, 25 bp, Saccharomyces pastorianus
tcagtcatctcttttattacccaac

SEQ ID NO: 149863 - DNA, 25 bp, Saccharomyces pastorianus
tagctggtccgcttacaagggtttt

SEQ ID NO: 149864 - DNA, 25 bp, Saccharomyces pastorianus
tgaaatgtgggcactctcttctccg

SEQ ID NO: 149865 - DNA, 25 bp, Saccharomyces pastorianus
tggcccgggcaatgtgatttataat

SEQ ID NO: 149866 - DNA, 25 bp, Saccharomyces pastorianus
ttcatcatgccctagatagattcgt

SEQ ID NO: 149867 - DNA, 25 bp, Saccharomyces pastorianus
tagcactgtgttgaggcccgttcag

SEQ ID NO: 149868 - DNA, 25 bp, Saccharomyces pastorianus
taagagtatttgctttggcccgggc

SEQ ID NO: 149869 - DNA, 25 bp, Saccharomyces pastorianus
agcaggactgtgcaattcaccatgt

SEQ ID NO: 149870 - DNA, 25 bp, Saccharomyces pastorianus
tccgagggccacagatttaccgcaa

SEQ ID NO: 149871 - DNA, 25 bp, Saccharomyces pastorianus
gataccataaactctggaaccccag

SEQ ID NO: 149872 - DNA, 25 bp, Saccharomyces pastorianus
atccccttccataatagcactgtgt

SEQ ID NO: 149873 - DNA, 25 bp, Saccharomyces pastorianus
cgttcaggaaccactctatgactac

SEQ ID NO: 149874 - DNA, 25 bp, Saccharomyces pastorianus
aatgtgtagtcaccggtctagttga

SEQ ID NO: 149875 - DNA, 25 bp, Saccharomyces pastorianus
aaggcgcatttcaacctccgatgga

SEQ ID NO: 149876 - DNA, 25 bp, Saccharomyces pastorianus
gaggaagtaaactgagtatcgaact

SEQ ID NO: 149877 - DNA, 25 bp, Saccharomyces pastorianus
atgacaaggcgcatttcaacctccg

SEQ ID NO: 149878 - DNA, 25 bp, Saccharomyces pastorianus
aactgagtatcgaactcaaggataa

SEQ ID NO: 149879 - DNA, 25 bp, Saccharomyces pastorianus
tcttttggccgtatgacaaggcgca

SEQ ID NO: 149880 - DNA, 25 bp, Saccharomyces pastorianus
ggccgtatgacaaggcgcatttcaa

SEQ ID NO: 149881 - DNA, 25 bp, Saccharomyces pastorianus
tttcaacctccgatggaggaagtaa

SEQ ID NO: 149882 - DNA, 25 bp, Saccharomyces pastorianus
caaggataaaacaaagcttaccagt

SEQ ID NO: 149883 - DNA, 25 bp, Saccharomyces pastorianus
tttggccgtatgacaaggcgcattt

SEQ ID NO: 149884 - DNA, 25 bp, Saccharomyces pastorianus
gcgcatttcaacctccgatggagga

SEQ ID NO: 149885 - DNA, 25 bp, Saccharomyces pastorianus
gacaaggcgcatttcaacctccgat

SEQ ID NO: 149886 - DNA, 25 bp, Saccharomyces pastorianus
aagtttgatggattgttcaacagac

SEQ ID NO: 149887 - DNA, 25 bp, Saccharomyces pastorianus
atgaagtttgatggattgttcaaca

SEQ ID NO: 149888 - DNA, 25 bp, Saccharomyces pastorianus
acagacggcaaaaaatggcgatttt

SEQ ID NO: 149889 - DNA, 25 bp, Saccharomyces pastorianus
gattgttcaacagacggcaaaaaat

SEQ ID NO: 149890 - DNA, 25 bp, Saccharomyces pastorianus
aacagacggcaaaaaatggcgattt

SEQ ID NO: 149891 - DNA, 25 bp, Saccharomyces pastorianus
gcaaaaaatggcgatttttgccggt

SEQ ID NO: 149892 - DNA, 25 bp, Saccharomyces pastorianus
atggattgttcaacagacggcaaaa

SEQ ID NO: 149893 - DNA, 25 bp, Saccharomyces pastorianus
ggattgttcaacagacggcaaaaaa

SEQ ID NO: 149894 - DNA, 25 bp, Saccharomyces pastorianus
gatggattgttcaacagacggcaaa

SEQ ID NO: 149895 - DNA, 25 bp, Saccharomyces pastorianus
tgatggattgttcaacagacggcaa

SEQ ID NO: 149896 - DNA, 25 bp, Saccharomyces pastorianus
tttgatggattgttcaacagacggc

SEQ ID NO: 149897 - DNA, 25 bp, Saccharomyces pastorianus
aattgccgtttactactcattcggt

SEQ ID NO: 149898 - DNA, 25 bp, Saccharomyces pastorianus
gtttactactcattcggtggcctct

SEQ ID NO: 149899 - DNA, 25 bp, Saccharomyces pastorianus
gtaagcaaggatctaattgccgttt

SEQ ID NO: 149900 - DNA, 25 bp, Saccharomyces pastorianus
cggtggcctcttaatgagattagaa

SEQ ID NO: 149901 - DNA, 25 bp, Saccharomyces pastorianus
ttactactcattcggtggcctctta

SEQ ID NO: 149902 - DNA, 25 bp, Saccharomyces pastorianus
ttgccgtttactactcattcggtgg

SEQ ID NO: 149903 - DNA, 25 bp, Saccharomyces pastorianus
tactcattcggtggcctcttaatga

SEQ ID NO: 149904 - DNA, 25 bp, Saccharomyces pastorianus
gatctaattgccgtttactactcat

SEQ ID NO: 149905 - DNA, 25 bp, Saccharomyces pastorianus
tatggtaccgcttacaagtttgagg

SEQ ID NO: 149906 - DNA, 25 bp, Saccharomyces pastorianus
cattcggtggcctcttaatgagatt

SEQ ID NO: 149907 - DNA, 25 bp, Saccharomyces pastorianus
tggtaccgcttacaagtttgaggaa

SEQ ID NO: 149908 - DNA, 25 bp, Saccharomyces pastorianus
actgggttcagcacgggtgtcatca

SEQ ID NO: 149909 - DNA, 25 bp, Saccharomyces pastorianus
gcggacaaaccgctttggacgctaa

SEQ ID NO: 149910 - DNA, 25 bp, Saccharomyces pastorianus
acgaagttcgagtggctgctccgga

SEQ ID NO: 149911 - DNA, 25 bp, Saccharomyces pastorianus
gtgctgtgcaactggctactactga

SEQ ID NO: 149912 - DNA, 25 bp, Saccharomyces pastorianus
aagaggaacactgtggcgctacacc

SEQ ID NO: 149913 - DNA, 25 bp, Saccharomyces pastorianus
cgctacaccccgtaatcaatgattt

SEQ ID NO: 149914 - DNA, 25 bp, Saccharomyces pastorianus
gttgtcgatatcctgttctcacaaa

SEQ ID NO: 149915 - DNA, 25 bp, Saccharomyces pastorianus
gctccggaggaacttcagggtcaat

SEQ ID NO: 149916 - DNA, 25 bp, Saccharomyces pastorianus
gaagatcgagcaacccattcgggaa

SEQ ID NO: 149917 - DNA, 25 bp, Saccharomyces pastorianus
aagttgttccattctggcggcgatt

SEQ ID NO: 149918 - DNA, 25 bp, Saccharomyces pastorianus
gttactgcctacaaaccatttctgg

SEQ ID NO: 149919 - DNA, 25 bp, Saccharomyces pastorianus
aagggcaccttgacgactagtcttt

SEQ ID NO: 149920 - DNA, 25 bp, Saccharomyces pastorianus
agtggagcacgccataaaccggcac

SEQ ID NO: 149921 - DNA, 25 bp, Saccharomyces pastorianus
aaggttcccgttcatatcgtacagg

SEQ ID NO: 149922 - DNA, 25 bp, Saccharomyces pastorianus
attccagacaaatccaagggcacct

SEQ ID NO: 149923 - DNA, 25 bp, Saccharomyces pastorianus
aatgatgggccctgctactagatac

SEQ ID NO: 149924 - DNA, 25 bp, Saccharomyces pastorianus
tacggcgatcgcgatgtccaagaac

SEQ ID NO: 149925 - DNA, 25 bp, Saccharomyces pastorianus
attgcgcccaaagtggatttaccag

SEQ ID NO: 149926 - DNA, 25 bp, Saccharomyces pastorianus
aagacattctatgacgacgacgacg

SEQ ID NO: 149927 - DNA, 25 bp, Saccharomyces pastorianus
agccaccccaaatccagagtatggt

SEQ ID NO: 149928 - DNA, 25 bp, Saccharomyces pastorianus
aaagctcagacgacagtacggcgat

SEQ ID NO: 149929 - DNA, 25 bp, Saccharomyces pastorianus
caagaacggctctttggcatggttc

SEQ ID NO: 149930 - DNA, 25 bp, Saccharomyces pastorianus
gatccaaataaacacgaagcaacgt

SEQ ID NO: 149931 - DNA, 25 bp, Saccharomyces pastorianus
aacaccctaagaaagcacggtattg

SEQ ID NO: 149932 - DNA, 25 bp, Saccharomyces pastorianus
gttttccatgtacaacaattaggtt

SEQ ID NO: 149933 - DNA, 25 bp, Saccharomyces pastorianus
gaatgacagagttatcagaccagca

SEQ ID NO: 149934 - DNA, 25 bp, Saccharomyces pastorianus
aacgttcgagttgccacaacctgat

SEQ ID NO: 149935 - DNA, 25 bp, Saccharomyces pastorianus
cgggtactgttttccatgtacaaca

SEQ ID NO: 149936 - DNA, 25 bp, Saccharomyces pastorianus
attaggtttcaccttgaatgacaga

SEQ ID NO: 149937 - DNA, 25 bp, Saccharomyces pastorianus
tgggagaaccatttgatccaaataa

SEQ ID NO: 149938 - DNA, 25 bp, Saccharomyces pastorianus
tttgaaaacaccctaagaaagcacg

SEQ ID NO: 149939 - DNA, 25 bp, Saccharomyces pastorianus
agacccattgggagaaccatttgat

SEQ ID NO: 149940 - DNA, 25 bp, Saccharomyces pastorianus
gaagcaacgttcgagttgccacaac

SEQ ID NO: 149941 - DNA, 25 bp, Saccharomyces pastorianus
ttgtgactccatcatttacaaagag

SEQ ID NO: 149942 - DNA, 25 bp, Saccharomyces pastorianus
atgagattttattctgatgaagcca

SEQ ID NO: 149943 - DNA, 25 bp, Saccharomyces pastorianus
gttagggccacaactaggaagtcgt

SEQ ID NO: 149944 - DNA, 25 bp, Saccharomyces pastorianus
agaactccttttgtgactccatcat

SEQ ID NO: 149945 - DNA, 25 bp, Saccharomyces pastorianus
agagccagttaagcgcgaagactaa

SEQ ID NO: 149946 - DNA, 25 bp, Saccharomyces pastorianus
ttttcagcagccaccgttagggcca

SEQ ID NO: 149947 - DNA, 25 bp, Saccharomyces pastorianus
atgagagctttttcagcagccaccg

SEQ ID NO: 149948 - DNA, 25 bp, Saccharomyces pastorianus
aggaagtcgttcatcccaatggcac

SEQ ID NO: 149949 - DNA, 25 bp, Saccharomyces pastorianus
tcgttcatcccaatggcaccaagaa

SEQ ID NO: 149950 - DNA, 25 bp, Saccharomyces pastorianus
ggcaccaagaactccttttgtgact

SEQ ID NO: 149951 - DNA, 25 bp, Saccharomyces pastorianus
aaattagagagccagttaagcgcga

SEQ ID NO: 149952 - DNA, 25 bp, Saccharomyces pastorianus
ttagagctacctttagaaacaactt

SEQ ID NO: 149953 - DNA, 25 bp, Saccharomyces pastorianus
gcaaagtcaccagaactcacggtaa

SEQ ID NO: 149954 - DNA, 25 bp, Saccharomyces pastorianus
caaagtcaccagaactcacggtaac

SEQ ID NO: 149955 - DNA, 25 bp, Saccharomyces pastorianus
gggcaaagtcaccagaactcacggt

SEQ ID NO: 149956 - DNA, 25 bp, Saccharomyces pastorianus
gctacctttagaaacaacttgccag

SEQ ID NO: 149957 - DNA, 25 bp, Saccharomyces pastorianus
agccaagactttcggtgcctctgtc

SEQ ID NO: 149958 - DNA, 25 bp, Saccharomyces pastorianus
gagctacctttagaaacaacttgcc

SEQ ID NO: 149959 - DNA, 25 bp, Saccharomyces pastorianus
tacctttagaaacaacttgccagcc

SEQ ID NO: 149960 - DNA, 25 bp, Saccharomyces pastorianus
ggcaaagtcaccagaactcacggta

SEQ ID NO: 149961 - DNA, 25 bp, Saccharomyces pastorianus
gttagagctacctttagaaacaact

SEQ ID NO: 149962 - DNA, 25 bp, Saccharomyces pastorianus
aactctggtgtcgttagagctacct

SEQ ID NO: 149963 - DNA, 25 bp, Saccharomyces pastorianus
gaagcccacaagagcatagtcataa

SEQ ID NO: 149964 - DNA, 25 bp, Saccharomyces pastorianus
aatctctggccaatggtcaggtgtt

SEQ ID NO: 149965 - DNA, 25 bp, Saccharomyces pastorianus
tgcctttaggaaattggcgtccaaa

SEQ ID NO: 149966 - DNA, 25 bp, Saccharomyces pastorianus
aagactcgcaagtttcacatcagtt

SEQ ID NO: 149967 - DNA, 25 bp, Saccharomyces pastorianus
catcggaaactcctactgaacattt

SEQ ID NO: 149968 - DNA, 25 bp, Saccharomyces pastorianus
cacatcagttttacgattcatcgga

SEQ ID NO: 149969 - DNA, 25 bp, Saccharomyces pastorianus
aatcgaagaacaacatcctctggaa

SEQ ID NO: 149970 - DNA, 25 bp, Saccharomyces pastorianus
gaaagatgtttcaaccgcattgcat

SEQ ID NO: 149971 - DNA, 25 bp, Saccharomyces pastorianus
gaaaatgcgctatacctaatctctg

SEQ ID NO: 149972 - DNA, 25 bp, Saccharomyces pastorianus
caagtgggacattgattggcggcaa

SEQ ID NO: 149973 - DNA, 25 bp, Saccharomyces pastorianus
gcgtccaaactgcagctttctgtga

SEQ ID NO: 149974 - DNA, 25 bp, Saccharomyces pastorianus
gctccaagagccgtcgaattagtta

SEQ ID NO: 149975 - DNA, 25 bp, Saccharomyces pastorianus
gcgtcgaacctcattctgtggatat

SEQ ID NO: 149976 - DNA, 25 bp, Saccharomyces pastorianus
aatagccacagattttgctccaaga

SEQ ID NO: 149977 - DNA, 25 bp, Saccharomyces pastorianus
gtgctttagcaccaaaccaatggga

SEQ ID NO: 149978 - DNA, 25 bp, Saccharomyces pastorianus
atttccaatcttatacgcatctacc

SEQ ID NO: 149979 - DNA, 25 bp, Saccharomyces pastorianus
gacgcagaacccgttacaatatttg

SEQ ID NO: 149980 - DNA, 25 bp, Saccharomyces pastorianus
gtacggccacgcaacagtatgggat

SEQ ID NO: 149981 - DNA, 25 bp, Saccharomyces pastorianus
gatcttcgtttttagtgctttagca

SEQ ID NO: 149982 - DNA, 25 bp, Saccharomyces pastorianus
aatttacctgatggcgtcgaacctc

SEQ ID NO: 149983 - DNA, 25 bp, Saccharomyces pastorianus
gatttggccaatcctgacggtaatt

SEQ ID NO: 149984 - DNA, 25 bp, Saccharomyces pastorianus
ggatcaagccatggataaccttcac

SEQ ID NO: 149985 - DNA, 25 bp, Saccharomyces pastorianus
acaacctccgccattcaagaagtga

SEQ ID NO: 149986 - DNA, 25 bp, Saccharomyces pastorianus
tgtcgacgacagcaccaaaaccggt

SEQ ID NO: 149987 - DNA, 25 bp, Saccharomyces pastorianus
gctgacatcgagcaatctaatggca

SEQ ID NO: 149988 - DNA, 25 bp, Saccharomyces pastorianus
taacaccaacgctaatgtcgacgac

SEQ ID NO: 149989 - DNA, 25 bp, Saccharomyces pastorianus
gatggctctacaagtaccacgactt

SEQ ID NO: 149990 - DNA, 25 bp, Saccharomyces pastorianus
gaagagggctccatcagcgagaata

SEQ ID NO: 149991 - DNA, 25 bp, Saccharomyces pastorianus
gaagggattgctactcctaaacaaa

SEQ ID NO: 149992 - DNA, 25 bp, Saccharomyces pastorianus
gaaaatgccgaaaacgcttctcaac

SEQ ID NO: 149993 - DNA, 25 bp, Saccharomyces pastorianus
aatgatgatacaaccggcgacacca

SEQ ID NO: 149994 - DNA, 25 bp, Saccharomyces pastorianus
ataatgcatctgaaccagccgaaga

SEQ ID NO: 149995 - DNA, 25 bp, Saccharomyces pastorianus
aatactggcgctgaagttcttgcaa

SEQ ID NO: 149996 - DNA, 25 bp, Saccharomyces pastorianus
tggaagaatacgaacaaaagggctc

SEQ ID NO: 149997 - DNA, 25 bp, Saccharomyces pastorianus
atgagagctatggaagaatacgaac

SEQ ID NO: 149998 - DNA, 25 bp, Saccharomyces pastorianus
gagagctatggaagaatacgaacaa

SEQ ID NO: 149999 - DNA, 25 bp, Saccharomyces pastorianus
gctatggaagaatacgaacaaaagg

SEQ ID NO: 150000 - DNA, 25 bp, Saccharomyces pastorianus
tgagagctatggaagaatacgaaca

SEQ ID NO: 150001 - DNA, 25 bp, Saccharomyces pastorianus
atggaagaatacgaacaaaagggct

SEQ ID NO: 150002 - DNA, 25 bp, Saccharomyces pastorianus
agagctatggaagaatacgaacaaa

SEQ ID NO: 150003 - DNA, 25 bp, Saccharomyces pastorianus
agctatggaagaatacgaacaaaag

SEQ ID NO: 150004 - DNA, 25 bp, Saccharomyces pastorianus
ggaagaatacgaacaaaagggctca

SEQ ID NO: 150005 - DNA, 25 bp, Saccharomyces pastorianus
gaagaatacgaacaaaagggctcat

SEQ ID NO: 150006 - DNA, 25 bp, Saccharomyces pastorianus
gagctatggaagaatacgaacaaaa

SEQ ID NO: 150007 - DNA, 25 bp, Saccharomyces pastorianus
gtgaagctcagttcattcgtgcaaa

SEQ ID NO: 150008 - DNA, 25 bp, Saccharomyces pastorianus
gaagatgtcgtgttaccatcgccgg

SEQ ID NO: 150009 - DNA, 25 bp, Saccharomyces pastorianus
gtgaacactgatttggacatcctga

SEQ ID NO: 150010 - DNA, 25 bp, Saccharomyces pastorianus
accatcgccgggttttgatgtgctt

SEQ ID NO: 150011 - DNA, 25 bp, Saccharomyces pastorianus
accactaatttctgggattgacgat

SEQ ID NO: 150012 - DNA, 25 bp, Saccharomyces pastorianus
gaagcttgagacttctcgccgtggc

SEQ ID NO: 150013 - DNA, 25 bp, Saccharomyces pastorianus
tgatgtgctttatccttccaacgaa

SEQ ID NO: 150014 - DNA, 25 bp, Saccharomyces pastorianus
tgccaccatggcattacgtgaactc

SEQ ID NO: 150015 - DNA, 25 bp, Saccharomyces pastorianus
aattaggaacctccgcatatgccac

SEQ ID NO: 150016 - DNA, 25 bp, Saccharomyces pastorianus
tgatccttctcaacaattggtgaac

SEQ ID NO: 150017 - DNA, 25 bp, Saccharomyces pastorianus
ttcgcgatttttcattggctggctc

SEQ ID NO: 150018 - DNA, 25 bp, Saccharomyces pastorianus
tagaggccaaattaagcagcgttat

SEQ ID NO: 150019 - DNA, 25 bp, Saccharomyces pastorianus
agcaacgtactcaggcagatggtat

SEQ ID NO: 150020 - DNA, 25 bp, Saccharomyces pastorianus
gtaggaccttccgaaaatgctgcaa

SEQ ID NO: 150021 - DNA, 25 bp, Saccharomyces pastorianus
atgtctgactcctcagaagccactg

SEQ ID NO: 150022 - DNA, 25 bp, Saccharomyces pastorianus
gttcttatctccagaattgccagga

SEQ ID NO: 150023 - DNA, 25 bp, Saccharomyces pastorianus
gaagccactgtaaagagaccccttg

SEQ ID NO: 150024 - DNA, 25 bp, Saccharomyces pastorianus
gagaccccttgatgctcacgtagga

SEQ ID NO: 150025 - DNA, 25 bp, Saccharomyces pastorianus
ggtattactttgttcttatctccag

SEQ ID NO: 150026 - DNA, 25 bp, Saccharomyces pastorianus
gcagcgttatactgactttttggtc

SEQ ID NO: 150027 - DNA, 25 bp, Saccharomyces pastorianus
gtcgaccccgaattaagacatcaat

SEQ ID NO: 150028 - DNA, 25 bp, Saccharomyces pastorianus
gacaagaattcaacgtcgaccccga

SEQ ID NO: 150029 - DNA, 25 bp, Saccharomyces pastorianus
gcgcctatcaatgttgttgttggaa

SEQ ID NO: 150030 - DNA, 25 bp, Saccharomyces pastorianus
tacgatttcggtttgttgccattta

SEQ ID NO: 150031 - DNA, 25 bp, Saccharomyces pastorianus
taccattcccattttttctacgcaa

SEQ ID NO: 150032 - DNA, 25 bp, Saccharomyces pastorianus
ccattttttctacgcaagaggatta

SEQ ID NO: 150033 - DNA, 25 bp, Saccharomyces pastorianus
ttggaaggcctatatacgttgaaaa

SEQ ID NO: 150034 - DNA, 25 bp, Saccharomyces pastorianus
caatgttgttgttggaaggcctata

SEQ ID NO: 150035 - DNA, 25 bp, Saccharomyces pastorianus
ggattattcaattacgatttcggtt

SEQ ID NO: 150036 - DNA, 25 bp, Saccharomyces pastorianus
ttctacgcaagaggattattcaatt

SEQ ID NO: 150037 - DNA, 25 bp, Saccharomyces pastorianus
ttagagcgcctatcaatgttgttgt

SEQ ID NO: 150038 - DNA, 25 bp, Saccharomyces pastorianus
gttgccatttagagcgcctatcaat

SEQ ID NO: 150039 - DNA, 25 bp, Saccharomyces pastorianus
ggtttgttgccatttagagcgccta

SEQ ID NO: 150040 - DNA, 25 bp, Saccharomyces pastorianus
atctgcattgttgttggtggcgcta

SEQ ID NO: 150041 - DNA, 25 bp, Saccharomyces pastorianus
gggaatattaacctagtgcctgtgt

SEQ ID NO: 150042 - DNA, 25 bp, Saccharomyces pastorianus
gtacagggccaacgtacttatttgg

SEQ ID NO: 150043 - DNA, 25 bp, Saccharomyces pastorianus
gacactggtcacacaatttcatatc

SEQ ID NO: 150044 - DNA, 25 bp, Saccharomyces pastorianus
atttggttaccatccacacggcata

SEQ ID NO: 150045 - DNA, 25 bp, Saccharomyces pastorianus
agcacttggtgcgtttggagcgttt

SEQ ID NO: 150046 - DNA, 25 bp, Saccharomyces pastorianus
ggtattcctatttctctgatgacac

SEQ ID NO: 150047 - DNA, 25 bp, Saccharomyces pastorianus
ggtggcgctagggaatctttattaa

SEQ ID NO: 150048 - DNA, 25 bp, Saccharomyces pastorianus
tattccaagattttcccaggtattc

SEQ ID NO: 150049 - DNA, 25 bp, Saccharomyces pastorianus
tactattgactatcgcaaccaggaa

SEQ ID NO: 150050 - DNA, 25 bp, Saccharomyces pastorianus
ggcgttaggtatttcttcagtatct

SEQ ID NO: 150051 - DNA, 25 bp, Saccharomyces pastorianus
gaattcccatttgtaaggaagaaga

SEQ ID NO: 150052 - DNA, 25 bp, Saccharomyces pastorianus
gtaacctatcaaccattctagaatt

SEQ ID NO: 150053 - DNA, 25 bp, Saccharomyces pastorianus
cattctagaattcccatttgtaagg

SEQ ID NO: 150054 - DNA, 25 bp, Saccharomyces pastorianus
gaggcagagtgcttgatcagctgta

SEQ ID NO: 150055 - DNA, 25 bp, Saccharomyces pastorianus
gtgcttgatcagctgtaacctatca

SEQ ID NO: 150056 - DNA, 25 bp, Saccharomyces pastorianus
gatcagctgtaacctatcaaccatt

SEQ ID NO: 150057 - DNA, 25 bp, Saccharomyces pastorianus
agagtgcttgatcagctgtaaccta

SEQ ID NO: 150058 - DNA, 25 bp, Saccharomyces pastorianus
tgagcttttggaatctcttagtgtt

SEQ ID NO: 150059 - DNA, 25 bp, Saccharomyces pastorianus
cagctgtaacctatcaaccattcta

SEQ ID NO: 150060 - DNA, 25 bp, Saccharomyces pastorianus
accattctagaattcccatttgtaa

SEQ ID NO: 150061 - DNA, 25 bp, Saccharomyces pastorianus
agatgagcttttggaatctcttagt

SEQ ID NO: 150062 - DNA, 25 bp, Saccharomyces pastorianus
aactgctgaagtttctagttcactt

SEQ ID NO: 150063 - DNA, 25 bp, Saccharomyces pastorianus
ggaactacgactcttctattatcaa

SEQ ID NO: 150064 - DNA, 25 bp, Saccharomyces pastorianus
gatacgaatccatatccgatgtata

SEQ ID NO: 150065 - DNA, 25 bp, Saccharomyces pastorianus
ataaacttcatagaggtgcacccgg

SEQ ID NO: 150066 - DNA, 25 bp, Saccharomyces pastorianus
tatcactttgcagaacgtgccttct

SEQ ID NO: 150067 - DNA, 25 bp, Saccharomyces pastorianus
taaaggtagctttcaaggcacttga

SEQ ID NO: 150068 - DNA, 25 bp, Saccharomyces pastorianus
gaaattcatggctatcactttgcag

SEQ ID NO: 150069 - DNA, 25 bp, Saccharomyces pastorianus
gccaatattttcagtaacgcctaca

SEQ ID NO: 150070 - DNA, 25 bp, Saccharomyces pastorianus
taaaacatcctcttcctctttaagg

SEQ ID NO: 150071 - DNA, 25 bp, Saccharomyces pastorianus
gaacgtgccttctcaaaactttgat

SEQ ID NO: 150072 - DNA, 25 bp, Saccharomyces pastorianus
gaatcactgaaactagactacgacc

SEQ ID NO: 150073 - DNA, 25 bp, Saccharomyces pastorianus
gcaggatgtagttaactctgataca

SEQ ID NO: 150074 - DNA, 25 bp, Saccharomyces pastorianus
aagaaactggaatggcacttttggc

SEQ ID NO: 150075 - DNA, 25 bp, Saccharomyces pastorianus
gaagaggaggtcaaacaggccacca

SEQ ID NO: 150076 - DNA, 25 bp, Saccharomyces pastorianus
gtgctactgcaacaaaggagggatc

SEQ ID NO: 150077 - DNA, 25 bp, Saccharomyces pastorianus
gcaaccaatatttgatcacgcccac

SEQ ID NO: 150078 - DNA, 25 bp, Saccharomyces pastorianus
gatcacgcccacacaagagagttta

SEQ ID NO: 150079 - DNA, 25 bp, Saccharomyces pastorianus
ctgatacattcaaagggcaaccaat

SEQ ID NO: 150080 - DNA, 25 bp, Saccharomyces pastorianus
ctgtccagacttgagtgatgcgaag

SEQ ID NO: 150081 - DNA, 25 bp, Saccharomyces pastorianus
gcacttttggccttttgaatactct

SEQ ID NO: 150082 - DNA, 25 bp, Saccharomyces pastorianus
acaggccaccaagcaatagacaagt

SEQ ID NO: 150083 - DNA, 25 bp, Saccharomyces pastorianus
aagagtccacgaactagctcgggta

SEQ ID NO: 150084 - DNA, 25 bp, Saccharomyces pastorianus
tggcttatctatccggttgaccaac

SEQ ID NO: 150085 - DNA, 25 bp, Saccharomyces pastorianus
atttgccttgtactattgaggccga

SEQ ID NO: 150086 - DNA, 25 bp, Saccharomyces pastorianus
agacgtacgtgatcaagcagcaggt

SEQ ID NO: 150087 - DNA, 25 bp, Saccharomyces pastorianus
gtggtgacaaagaagcaactgcgcc

SEQ ID NO: 150088 - DNA, 25 bp, Saccharomyces pastorianus
aaagacgtttctacatttgccttgt

SEQ ID NO: 150089 - DNA, 25 bp, Saccharomyces pastorianus
aaatctcggaacacctgatgatgac

SEQ ID NO: 150090 - DNA, 25 bp, Saccharomyces pastorianus
gtttaccaacagatgcatatgtcgc

SEQ ID NO: 150091 - DNA, 25 bp, Saccharomyces pastorianus
gcaagctacaagatgttttcaacct

SEQ ID NO: 150092 - DNA, 25 bp, Saccharomyces pastorianus
agcagcaggtggcttatctatccgg

SEQ ID NO: 150093 - DNA, 25 bp, Saccharomyces pastorianus
gcatatgtcgcgattgagcaagtta

SEQ ID NO: 150094 - DNA, 25 bp, Saccharomyces pastorianus
ggaattaccgataaaccacactata

SEQ ID NO: 150095 - DNA, 25 bp, Saccharomyces pastorianus
aaagaaacactcgtcaagctgattt

SEQ ID NO: 150096 - DNA, 25 bp, Saccharomyces pastorianus
aagccctagaggagctgttgtctaa

SEQ ID NO: 150097 - DNA, 25 bp, Saccharomyces pastorianus
gagcgatagctatttccaatgactt

SEQ ID NO: 150098 - DNA, 25 bp, Saccharomyces pastorianus
atacttactggatgccactgacctt

SEQ ID NO: 150099 - DNA, 25 bp, Saccharomyces pastorianus
tcaaagaattcttaccgtggctaac

SEQ ID NO: 150100 - DNA, 25 bp, Saccharomyces pastorianus
actgacctttctcaatgggacacga

SEQ ID NO: 150101 - DNA, 25 bp, Saccharomyces pastorianus
tgggacacgaatgcatctcaaagag

SEQ ID NO: 150102 - DNA, 25 bp, Saccharomyces pastorianus
atacttgcaacgtctgtcgtaacgc

SEQ ID NO: 150103 - DNA, 25 bp, Saccharomyces pastorianus
attagcaatcgacccatcaagcaag

SEQ ID NO: 150104 - DNA, 25 bp, Saccharomyces pastorianus
aaagaggcgccttgcaagaaatcaa

SEQ ID NO: 150105 - DNA, 25 bp, Saccharomyces pastorianus
ggacgattggacacattatacttgc

SEQ ID NO: 150106 - DNA, 25 bp, Saccharomyces pastorianus
agggcattcctcaccatgtaatgaa

SEQ ID NO: 150107 - DNA, 25 bp, Saccharomyces pastorianus
ataaacatccgcttcaagaaagaga

SEQ ID NO: 150108 - DNA, 25 bp, Saccharomyces pastorianus
ttcctcaccatgtaatgaatcacgt

SEQ ID NO: 150109 - DNA, 25 bp, Saccharomyces pastorianus
gaccgcttaaaggttgcttaaatat

SEQ ID NO: 150110 - DNA, 25 bp, Saccharomyces pastorianus
tcagttgtccatacaattggcacaa

SEQ ID NO: 150111 - DNA, 25 bp, Saccharomyces pastorianus
ggaaagtctcagttgtccatacaat

SEQ ID NO: 150112 - DNA, 25 bp, Saccharomyces pastorianus
aatcacgtagattggtcagaagaat

SEQ ID NO: 150113 - DNA, 25 bp, Saccharomyces pastorianus
ggcgaagttatcaattcggattcta

SEQ ID NO: 150114 - DNA, 25 bp, Saccharomyces pastorianus
ggcacaaaaatttaatggcgaagtt

SEQ ID NO: 150115 - DNA, 25 bp, Saccharomyces pastorianus
ataacaaataaacatccgcttcaag

SEQ ID NO: 150116 - DNA, 25 bp, Saccharomyces pastorianus
gttatagtgattgctggtacaacag

SEQ ID NO: 150117 - DNA, 25 bp, Saccharomyces pastorianus
taagtgccggcacagcattttacga

SEQ ID NO: 150118 - DNA, 25 bp, Saccharomyces pastorianus
gaaaatttaattacttctaccagca

SEQ ID NO: 150119 - DNA, 25 bp, Saccharomyces pastorianus
ctaccagcaatctgtacaatgaggt

SEQ ID NO: 150120 - DNA, 25 bp, Saccharomyces pastorianus
ttacttctaccagcaatctgtacaa

SEQ ID NO: 150121 - DNA, 25 bp, Saccharomyces pastorianus
ccttcaaactgcttgatgaggtgaa

SEQ ID NO: 150122 - DNA, 25 bp, Saccharomyces pastorianus
gatatccttcaaactgcttgatgag

SEQ ID NO: 150123 - DNA, 25 bp, Saccharomyces pastorianus
ttaattacttctaccagcaatctgt

SEQ ID NO: 150124 - DNA, 25 bp, Saccharomyces pastorianus
gaggatcccgagatatccttcaaac

SEQ ID NO: 150125 - DNA, 25 bp, Saccharomyces pastorianus
gtgccggcacagcattttacgaaaa

SEQ ID NO: 150126 - DNA, 25 bp, Saccharomyces pastorianus
gaaagaaaatttaagtgccggcaca

SEQ ID NO: 150127 - DNA, 25 bp, Saccharomyces pastorianus
gaggtacaggaatatgatacagcaa

SEQ ID NO: 150128 - DNA, 25 bp, Saccharomyces pastorianus
agcatctttaccctcaattagtgaa

SEQ ID NO: 150129 - DNA, 25 bp, Saccharomyces pastorianus
gtggccatgtggatattgacagttt

SEQ ID NO: 150130 - DNA, 25 bp, Saccharomyces pastorianus
gatcaaactcatcagctgatatcag

SEQ ID NO: 150131 - DNA, 25 bp, Saccharomyces pastorianus
gaatattcaggtgagaacactccta

SEQ ID NO: 150132 - DNA, 25 bp, Saccharomyces pastorianus
gtacgagatctcgagctattcaaag

SEQ ID NO: 150133 - DNA, 25 bp, Saccharomyces pastorianus
aagaagttggcgaaccaatccctcg

SEQ ID NO: 150134 - DNA, 25 bp, Saccharomyces pastorianus
aacactcctacaactactggtgctg

SEQ ID NO: 150135 - DNA, 25 bp, Saccharomyces pastorianus
gtgaattgccatttccaattccaat

SEQ ID NO: 150136 - DNA, 25 bp, Saccharomyces pastorianus
aaatagtctaccagcatctttaccc

SEQ ID NO: 150137 - DNA, 25 bp, Saccharomyces pastorianus
tggtgctgccagtcgaagaagacgt

SEQ ID NO: 150138 - DNA, 25 bp, Saccharomyces pastorianus
aaagacgttcacagtctagactggg

SEQ ID NO: 150139 - DNA, 25 bp, Saccharomyces pastorianus
gtcaaggactccaagcagtttattg

SEQ ID NO: 150140 - DNA, 25 bp, Saccharomyces pastorianus
gactccaagcagtttattgtgagac

SEQ ID NO: 150141 - DNA, 25 bp, Saccharomyces pastorianus
gaggtgctatccagaatgattttac

SEQ ID NO: 150142 - DNA, 25 bp, Saccharomyces pastorianus
gtgctatccagaatgattttacaat

SEQ ID NO: 150143 - DNA, 25 bp, Saccharomyces pastorianus
gaaaatcatcaagctcataagatca

SEQ ID NO: 150144 - DNA, 25 bp, Saccharomyces pastorianus
gattacgtcaaggactccaagcagt

SEQ ID NO: 150145 - DNA, 25 bp, Saccharomyces pastorianus
gtcactatagtggattacgtcaagg

SEQ ID NO: 150146 - DNA, 25 bp, Saccharomyces pastorianus
tcaagctcataagatcattgttttc

SEQ ID NO: 150147 - DNA, 25 bp, Saccharomyces pastorianus
acctctgtcactatagtggattacg

SEQ ID NO: 150148 - DNA, 25 bp, Saccharomyces pastorianus
tgagacgtgtcggaaacacccaaca

SEQ ID NO: 150149 - DNA, 25 bp, Saccharomyces pastorianus
cagtttattgtgagacgtgtcggaa

SEQ ID NO: 150150 - DNA, 25 bp, Saccharomyces pastorianus
aagatacctcgatcaatcctacggg

SEQ ID NO: 150151 - DNA, 25 bp, Saccharomyces pastorianus
tcctacgggagaagaacaagccact

SEQ ID NO: 150152 - DNA, 25 bp, Saccharomyces pastorianus
taggcatggacaaacagaacacaat

SEQ ID NO: 150153 - DNA, 25 bp, Saccharomyces pastorianus
gttaactggatgtgtcgaagccgca

SEQ ID NO: 150154 - DNA, 25 bp, Saccharomyces pastorianus
acatggtgaaggctcttttagaaat

SEQ ID NO: 150155 - DNA, 25 bp, Saccharomyces pastorianus
tgacgataacaacatcatcagatta

SEQ ID NO: 150156 - DNA, 25 bp, Saccharomyces pastorianus
ggaagtaccatattattgcgataat

SEQ ID NO: 150157 - DNA, 25 bp, Saccharomyces pastorianus
aaaatgtgcctacttcctatacttc

SEQ ID NO: 150158 - DNA, 25 bp, Saccharomyces pastorianus
cttgcgttcaagaggtattcatttt

SEQ ID NO: 150159 - DNA, 25 bp, Saccharomyces pastorianus
gtgtaggcaaactacggctttagtt

SEQ ID NO: 150160 - DNA, 25 bp, Saccharomyces pastorianus
gaagccgcagtagctgcagcatcta

SEQ ID NO: 150161 - DNA, 25 bp, Saccharomyces pastorianus
gtcttgcctcctgttgttacgtcaa

SEQ ID NO: 150162 - DNA, 25 bp, Saccharomyces pastorianus
aactcaccactcgactttactgtat

SEQ ID NO: 150163 - DNA, 25 bp, Saccharomyces pastorianus
atggacgataactcaccactcgact

SEQ ID NO: 150164 - DNA, 25 bp, Saccharomyces pastorianus
gcgtggctgaatctttcacagatga

SEQ ID NO: 150165 - DNA, 25 bp, Saccharomyces pastorianus
ttgatgaacagtatggcaccagacc

SEQ ID NO: 150166 - DNA, 25 bp, Saccharomyces pastorianus
aacagtatggcaccagacccctcgt

SEQ ID NO: 150167 - DNA, 25 bp, Saccharomyces pastorianus
gttacgtcaagcgtggctgaatctt

SEQ ID NO: 150168 - DNA, 25 bp, Saccharomyces pastorianus
tgcctcctgttgttacgtcaagcgt

SEQ ID NO: 150169 - DNA, 25 bp, Saccharomyces pastorianus
caccactcgactttactgtatttga

SEQ ID NO: 150170 - DNA, 25 bp, Saccharomyces pastorianus
tcctgttgttacgtcaagcgtggct

SEQ ID NO: 150171 - DNA, 25 bp, Saccharomyces pastorianus
gtcaagcgtggctgaatctttcaca

SEQ ID NO: 150172 - DNA, 25 bp, Saccharomyces pastorianus
aacttgtatgtcattaaggctttac

SEQ ID NO: 150173 - DNA, 25 bp, Saccharomyces pastorianus
tttttatacagaaggtgttgttgtc

SEQ ID NO: 150174 - DNA, 25 bp, Saccharomyces pastorianus
tgtcattaaggctttacaatccttg

SEQ ID NO: 150175 - DNA, 25 bp, Saccharomyces pastorianus
gtatgtcattaaggctttacaatcc

SEQ ID NO: 150176 - DNA, 25 bp, Saccharomyces pastorianus
cagaaggtgttgttgtcgccaagaa

SEQ ID NO: 150177 - DNA, 25 bp, Saccharomyces pastorianus
gtcattaaggctttacaatccttga

SEQ ID NO: 150178 - DNA, 25 bp, Saccharomyces pastorianus
cttgtatgtcattaaggctttacaa

SEQ ID NO: 150179 - DNA, 25 bp, Saccharomyces pastorianus
tcattaaggctttacaatccttgac

SEQ ID NO: 150180 - DNA, 25 bp, Saccharomyces pastorianus
atgtcattaaggctttacaatcctt

SEQ ID NO: 150181 - DNA, 25 bp, Saccharomyces pastorianus
ggctttacaatccttgacttctaag

SEQ ID NO: 150182 - DNA, 25 bp, Saccharomyces pastorianus
acttgtatgtcattaaggctttaca

SEQ ID NO: 150183 - DNA, 25 bp, Saccharomyces pastorianus
gagctcaccaaggaaattaccgtaa

SEQ ID NO: 150184 - DNA, 25 bp, Saccharomyces pastorianus
atctcgtgaggatctgctaaaggaa

SEQ ID NO: 150185 - DNA, 25 bp, Saccharomyces pastorianus
aagcgcataatctgcagaatcctaa

SEQ ID NO: 150186 - DNA, 25 bp, Saccharomyces pastorianus
aggaccgaagtagtacgacgactct

SEQ ID NO: 150187 - DNA, 25 bp, Saccharomyces pastorianus
aaaataagcgactgtcctcctctta

SEQ ID NO: 150188 - DNA, 25 bp, Saccharomyces pastorianus
gtacgacgactctgggcatatatta

SEQ ID NO: 150189 - DNA, 25 bp, Saccharomyces pastorianus
gaaaggccgcgcttcgaaagatctc

SEQ ID NO: 150190 - DNA, 25 bp, Saccharomyces pastorianus
gctactttggcgattgagctcacca

SEQ ID NO: 150191 - DNA, 25 bp, Saccharomyces pastorianus
tcctcttatccaagaagtccgcaga

SEQ ID NO: 150192 - DNA, 25 bp, Saccharomyces pastorianus
gtaagtcacctatttcaacacgaaa

SEQ ID NO: 150193 - DNA, 25 bp, Saccharomyces pastorianus
cgcagaaaggaaaagcccatcgttt

SEQ ID NO: 150194 - DNA, 25 bp, Saccharomyces pastorianus
ttcttctctctgatatggatttgga

SEQ ID NO: 150195 - DNA, 25 bp, Saccharomyces pastorianus
tctctctgatatggatttggaaacg

SEQ ID NO: 150196 - DNA, 25 bp, Saccharomyces pastorianus
tcgatattcttctctctgatatgga

SEQ ID NO: 150197 - DNA, 25 bp, Saccharomyces pastorianus
gatgatcgatattcttctctctgat

SEQ ID NO: 150198 - DNA, 25 bp, Saccharomyces pastorianus
gctgaattaaacgattatagtacga

SEQ ID NO: 150199 - DNA, 25 bp, Saccharomyces pastorianus
tggatttggaaacggtcacaactaa

SEQ ID NO: 150200 - DNA, 25 bp, Saccharomyces pastorianus
acgatgatcgatattcttctctctg

SEQ ID NO: 150201 - DNA, 25 bp, Saccharomyces pastorianus
gtacgatgatcgatattcttctctc

SEQ ID NO: 150202 - DNA, 25 bp, Saccharomyces pastorianus
gatattcttctctctgatatggatt

SEQ ID NO: 150203 - DNA, 25 bp, Saccharomyces pastorianus
tatggatttggaaacggtcacaact

SEQ ID NO: 150204 - DNA, 25 bp, Saccharomyces pastorianus
gatcgatattcttctctctgatatg

SEQ ID NO: 150205 - DNA, 25 bp, Saccharomyces pastorianus
aatcgaggctgtattcaaatggctt

SEQ ID NO: 150206 - DNA, 25 bp, Saccharomyces pastorianus
tcttctacctgcattgaatagcgct

SEQ ID NO: 150207 - DNA, 25 bp, Saccharomyces pastorianus
gaagttcagcgattgattcccctat

SEQ ID NO: 150208 - DNA, 25 bp, Saccharomyces pastorianus
ggccaacatgattacgttcatcgaa

SEQ ID NO: 150209 - DNA, 25 bp, Saccharomyces pastorianus
tgctgatcccagctttttatgataa

SEQ ID NO: 150210 - DNA, 25 bp, Saccharomyces pastorianus
aaatggcttgatgcgctgtgtgtag

SEQ ID NO: 150211 - DNA, 25 bp, Saccharomyces pastorianus
gaacgctgatttacttcttctacct

SEQ ID NO: 150212 - DNA, 25 bp, Saccharomyces pastorianus
ggtatcaggatacggtcgtcctttg

SEQ ID NO: 150213 - DNA, 25 bp, Saccharomyces pastorianus
aatccgctggaacaatatctcgaaa

SEQ ID NO: 150214 - DNA, 25 bp, Saccharomyces pastorianus
atattgatcgcgaaaggccaacatg

SEQ ID NO: 150215 - DNA, 25 bp, Saccharomyces pastorianus
ggtcgtcctttgactcaagcggaaa

SEQ ID NO: 150216 - DNA, 25 bp, Saccharomyces pastorianus
atgctttcatactcagctcaactaa

SEQ ID NO: 150217 - DNA, 25 bp, Saccharomyces pastorianus
gaaagctcagacactcgatcttcac

SEQ ID NO: 150218 - DNA, 25 bp, Saccharomyces pastorianus
acgtgcgtactgctaaatgatcttg

SEQ ID NO: 150219 - DNA, 25 bp, Saccharomyces pastorianus
aactccgaagatggtagctcctgct

SEQ ID NO: 150220 - DNA, 25 bp, Saccharomyces pastorianus
gtgatgaaccatcctactctttaga

SEQ ID NO: 150221 - DNA, 25 bp, Saccharomyces pastorianus
gctcctgctccatatcagttcaaga

SEQ ID NO: 150222 - DNA, 25 bp, Saccharomyces pastorianus
gcaagatcgattactcccaaatggg

SEQ ID NO: 150223 - DNA, 25 bp, Saccharomyces pastorianus
gtttgtgtttgagtctccattcgga

SEQ ID NO: 150224 - DNA, 25 bp, Saccharomyces pastorianus
agtaccactcctcccataatttaga

SEQ ID NO: 150225 - DNA, 25 bp, Saccharomyces pastorianus
tttcaaactcctacgtttccatgag

SEQ ID NO: 150226 - DNA, 25 bp, Saccharomyces pastorianus
atacccttcgaattatcggtgctga

SEQ ID NO: 150227 - DNA, 25 bp, Saccharomyces pastorianus
gctcacattgaatccgcagggaact

SEQ ID NO: 150228 - DNA, 25 bp, Saccharomyces pastorianus
ttcgctcacattgaatccgcaggga

SEQ ID NO: 150229 - DNA, 25 bp, Saccharomyces pastorianus
gaaattcactccgagaaagctcaag

SEQ ID NO: 150230 - DNA, 25 bp, Saccharomyces pastorianus
ggtttcctatcgatatttcgctcac

SEQ ID NO: 150231 - DNA, 25 bp, Saccharomyces pastorianus
gatgatgggtttcctatcgatattt

SEQ ID NO: 150232 - DNA, 25 bp, Saccharomyces pastorianus
aagccaatatgaaattcactccgag

SEQ ID NO: 150233 - DNA, 25 bp, Saccharomyces pastorianus
atgggtttcctatcgatatttcgct

SEQ ID NO: 150234 - DNA, 25 bp, Saccharomyces pastorianus
aagatgatctatgtggaaaagccaa

SEQ ID NO: 150235 - DNA, 25 bp, Saccharomyces pastorianus
cactccgagaaagctcaaggatgat

SEQ ID NO: 150236 - DNA, 25 bp, Saccharomyces pastorianus
gatatttcgctcacattgaatccgc

SEQ ID NO: 150237 - DNA, 25 bp, Saccharomyces pastorianus
aaagacttagcggaagatgatctat

SEQ ID NO: 150238 - DNA, 25 bp, Saccharomyces pastorianus
tattggtagcagagcaagagctggt

SEQ ID NO: 150239 - DNA, 25 bp, Saccharomyces pastorianus
tcaaggccaaattaatgctgcaaga

SEQ ID NO: 150240 - DNA, 25 bp, Saccharomyces pastorianus
caagagctggtggttctggcccaag

SEQ ID NO: 150241 - DNA, 25 bp, Saccharomyces pastorianus
aagggccaacgttgccagatctcaa

SEQ ID NO: 150242 - DNA, 25 bp, Saccharomyces pastorianus
gttgccagatctcaaggccaaatta

SEQ ID NO: 150243 - DNA, 25 bp, Saccharomyces pastorianus
aacgttgccagatctcaaggccaaa

SEQ ID NO: 150244 - DNA, 25 bp, Saccharomyces pastorianus
aatactattattggtagcagagcaa

SEQ ID NO: 150245 - DNA, 25 bp, Saccharomyces pastorianus
gttgtttccgttgacaagaagtacg

SEQ ID NO: 150246 - DNA, 25 bp, Saccharomyces pastorianus
agcaagagctggtggttctggccca

SEQ ID NO: 150247 - DNA, 25 bp, Saccharomyces pastorianus
ttggttgtttccgttgacaagaagt

SEQ ID NO: 150248 - DNA, 25 bp, Saccharomyces pastorianus
tggttctggcccaagggccaacgtt

SEQ ID NO: 150249 - DNA, 25 bp, Saccharomyces pastorianus
ggccttccagaacggtttatcgcag

SEQ ID NO: 150250 - DNA, 25 bp, Saccharomyces pastorianus
gtcgactgggccatttccctgaggc

SEQ ID NO: 150251 - DNA, 25 bp, Saccharomyces pastorianus
aattcgcatgacatggtccctgaaa

SEQ ID NO: 150252 - DNA, 25 bp, Saccharomyces pastorianus
tttataagctcacctaattcgcatg

SEQ ID NO: 150253 - DNA, 25 bp, Saccharomyces pastorianus
atagcattatcgacctttgcgtgaa

SEQ ID NO: 150254 - DNA, 25 bp, Saccharomyces pastorianus
gcctctgagggctaaacggctgtgt

SEQ ID NO: 150255 - DNA, 25 bp, Saccharomyces pastorianus
gtgcgcgaggaaactgctggaatat

SEQ ID NO: 150256 - DNA, 25 bp, Saccharomyces pastorianus
gtccctgaaatagtaagctcacgca

SEQ ID NO: 150257 - DNA, 25 bp, Saccharomyces pastorianus
acggctgtgtgaacgatggttagac

SEQ ID NO: 150258 - DNA, 25 bp, Saccharomyces pastorianus
tgggtctgaccaaagtttcgaatga

SEQ ID NO: 150259 - DNA, 25 bp, Saccharomyces pastorianus
atgctgctggaaccaccgttggtat

SEQ ID NO: 150260 - DNA, 25 bp, Saccharomyces pastorianus
attcatgccctatgtctccattaaa

SEQ ID NO: 150261 - DNA, 25 bp, Saccharomyces pastorianus
aatagtcttcatttgccattgccaa

SEQ ID NO: 150262 - DNA, 25 bp, Saccharomyces pastorianus
agctccgttgccttcgaataatagt

SEQ ID NO: 150263 - DNA, 25 bp, Saccharomyces pastorianus
gccattgccaattgacgttgtactg

SEQ ID NO: 150264 - DNA, 25 bp, Saccharomyces pastorianus
gttctcccagtgaatttagaccttg

SEQ ID NO: 150265 - DNA, 25 bp, Saccharomyces pastorianus
gctcacatacgatatgctttcgcag

SEQ ID NO: 150266 - DNA, 25 bp, Saccharomyces pastorianus
ctatagtttaccataagggcccatt

SEQ ID NO: 150267 - DNA, 25 bp, Saccharomyces pastorianus
gggagctccgtattatattaccaat

SEQ ID NO: 150268 - DNA, 25 bp, Saccharomyces pastorianus
agaatctggctactgacaaccctga

SEQ ID NO: 150269 - DNA, 25 bp, Saccharomyces pastorianus
aaggcaggattacagcttggcgcaa

SEQ ID NO: 150270 - DNA, 25 bp, Saccharomyces pastorianus
agaggcagtcaattgttctcccagt

SEQ ID NO: 150271 - DNA, 25 bp, Saccharomyces pastorianus
gtatacattatggcaaaccgaacaa

SEQ ID NO: 150272 - DNA, 25 bp, Saccharomyces pastorianus
gatgtatacattatggcaaaccgaa

SEQ ID NO: 150273 - DNA, 25 bp, Saccharomyces pastorianus
tgtatacattatggcaaaccgaaca

SEQ ID NO: 150274 - DNA, 25 bp, Saccharomyces pastorianus
ggatgcacagaataacaaccacaat

SEQ ID NO: 150275 - DNA, 25 bp, Saccharomyces pastorianus
aagatgtatacattatggcaaaccg

SEQ ID NO: 150276 - DNA, 25 bp, Saccharomyces pastorianus
tacatggatgcacagaataacaacc

SEQ ID NO: 150277 - DNA, 25 bp, Saccharomyces pastorianus
atgtatacattatggcaaaccgaac

SEQ ID NO: 150278 - DNA, 25 bp, Saccharomyces pastorianus
caactgtacatggatgcacagaata

SEQ ID NO: 150279 - DNA, 25 bp, Saccharomyces pastorianus
agatgtatacattatggcaaaccga

SEQ ID NO: 150280 - DNA, 25 bp, Saccharomyces pastorianus
aactgtacatggatgcacagaataa

SEQ ID NO: 150281 - DNA, 25 bp, Saccharomyces pastorianus
gtacatggatgcacagaataacaac

SEQ ID NO: 150282 - DNA, 25 bp, Saccharomyces pastorianus
gagtatgagcaacctgacgcaaata

SEQ ID NO: 150283 - DNA, 25 bp, Saccharomyces pastorianus
gagtccatacgctattaactttaat

SEQ ID NO: 150284 - DNA, 25 bp, Saccharomyces pastorianus
aaatctcccgacgacgatggtgaca

SEQ ID NO: 150285 - DNA, 25 bp, Saccharomyces pastorianus
agcactagagcttcaacggttccaa

SEQ ID NO: 150286 - DNA, 25 bp, Saccharomyces pastorianus
gacaagaacggtgcatgagctatca

SEQ ID NO: 150287 - DNA, 25 bp, Saccharomyces pastorianus
gaacttcagcgactagagaggatac

SEQ ID NO: 150288 - DNA, 25 bp, Saccharomyces pastorianus
acaagtacggacttcgtgctgacaa

SEQ ID NO: 150289 - DNA, 25 bp, Saccharomyces pastorianus
gtaaacatccattacatgagctgat

SEQ ID NO: 150290 - DNA, 25 bp, Saccharomyces pastorianus
gacttcgtgctgacaagctctatga

SEQ ID NO: 150291 - DNA, 25 bp, Saccharomyces pastorianus
gagctgataatacagtatccaccta

SEQ ID NO: 150292 - DNA, 25 bp, Saccharomyces pastorianus
gagaggatactcctttatcccaaaa

SEQ ID NO: 150293 - DNA, 25 bp, Saccharomyces pastorianus
tagaccaccagaatattgggctcaa

SEQ ID NO: 150294 - DNA, 25 bp, Saccharomyces pastorianus
gattctgatgcaaacaaactttcca

SEQ ID NO: 150295 - DNA, 25 bp, Saccharomyces pastorianus
gatgtagatccaaaatacgccaagc

SEQ ID NO: 150296 - DNA, 25 bp, Saccharomyces pastorianus
aaatcacacagcaccgtcagttcgt

SEQ ID NO: 150297 - DNA, 25 bp, Saccharomyces pastorianus
gagactatcaagttcaaggcttaaa

SEQ ID NO: 150298 - DNA, 25 bp, Saccharomyces pastorianus
aaactggttaatatcgttgcacgaa

SEQ ID NO: 150299 - DNA, 25 bp, Saccharomyces pastorianus
tattaggcgtcacagaccttttccg

SEQ ID NO: 150300 - DNA, 25 bp, Saccharomyces pastorianus
aactatctggtatcttggccgatga

SEQ ID NO: 150301 - DNA, 25 bp, Saccharomyces pastorianus
aacaatttcattcctaggttatttg

SEQ ID NO: 150302 - DNA, 25 bp, Saccharomyces pastorianus
agttcgtcatcacgtcaccatagaa

SEQ ID NO: 150303 - DNA, 25 bp, Saccharomyces pastorianus
tccctccttcgtcaagtcaggaaaa

SEQ ID NO: 150304 - DNA, 25 bp, Saccharomyces pastorianus
aagctagggcctacaatgcagatgc

SEQ ID NO: 150305 - DNA, 25 bp, Saccharomyces pastorianus
tccaaaggttgttcgtgaggctaag

SEQ ID NO: 150306 - DNA, 25 bp, Saccharomyces pastorianus
aatagtcgaatttgccgcttacaga

SEQ ID NO: 150307 - DNA, 25 bp, Saccharomyces pastorianus
tggtttgctatatcatgcctctctt

SEQ ID NO: 150308 - DNA, 25 bp, Saccharomyces pastorianus
gaagaacgtgtcaaaaccgctgctg

SEQ ID NO: 150309 - DNA, 25 bp, Saccharomyces pastorianus
aggctattgctccaaacttgactca

SEQ ID NO: 150310 - DNA, 25 bp, Saccharomyces pastorianus
tcaggttccttaatttccttggcca

SEQ ID NO: 150311 - DNA, 25 bp, Saccharomyces pastorianus
atgcctctcttgttggtcaagctac

SEQ ID NO: 150312 - DNA, 25 bp, Saccharomyces pastorianus
gaacagttgtccaattacttgtctg

SEQ ID NO: 150313 - DNA, 25 bp, Saccharomyces pastorianus
tagacttatcgctcattcaggttcc

SEQ ID NO: 150314 - DNA, 25 bp, Saccharomyces pastorianus
aaaccgctgctgaagtgtctatggg

SEQ ID NO: 150315 - DNA, 25 bp, Saccharomyces pastorianus
tgttccattcttccattggctttat

SEQ ID NO: 150316 - DNA, 25 bp, Saccharomyces pastorianus
gctacgtcaacaaacctggcgagat

SEQ ID NO: 150317 - DNA, 25 bp, Saccharomyces pastorianus
tggtgttatcacctgctgggtattt

SEQ ID NO: 150318 - DNA, 25 bp, Saccharomyces pastorianus
tgaaattccccgtaaggtgttccat

SEQ ID NO: 150319 - DNA, 25 bp, Saccharomyces pastorianus
taaatcccttgcaggttcgatagct

SEQ ID NO: 150320 - DNA, 25 bp, Saccharomyces pastorianus
acagccgccgcaactattggaagaa

SEQ ID NO: 150321 - DNA, 25 bp, Saccharomyces pastorianus
tggcctttgatatacgccttcatca

SEQ ID NO: 150322 - DNA, 25 bp, Saccharomyces pastorianus
tttactgtagaactgtgggtgcgct

SEQ ID NO: 150323 - DNA, 25 bp, Saccharomyces pastorianus
gatgacgatgcacacgttccagtga

SEQ ID NO: 150324 - DNA, 25 bp, Saccharomyces pastorianus
atttttgctaagttggtccgataca

SEQ ID NO: 150325 - DNA, 25 bp, Saccharomyces pastorianus
atggctattttgttcctgcctacag

SEQ ID NO: 150326 - DNA, 25 bp, Saccharomyces pastorianus
tgaagtcatcgccaagtctcgttac

SEQ ID NO: 150327 - DNA, 25 bp, Saccharomyces pastorianus
gtatccagagttgctgccgtcgaaa

SEQ ID NO: 150328 - DNA, 25 bp, Saccharomyces pastorianus
aatcagagacgtatccagagttgct

SEQ ID NO: 150329 - DNA, 25 bp, Saccharomyces pastorianus
caagcaattcttgaccaaggattta

SEQ ID NO: 150330 - DNA, 25 bp, Saccharomyces pastorianus
tttaaaattcccattacctcacaga

SEQ ID NO: 150331 - DNA, 25 bp, Saccharomyces pastorianus
gcttcaaatgaagtcatcgccaagt

SEQ ID NO: 150332 - DNA, 25 bp, Saccharomyces pastorianus
ggctgctagacacagagctagattt

SEQ ID NO: 150333 - DNA, 25 bp, Saccharomyces pastorianus
atttaaaattcccattacctcacag

SEQ ID NO: 150334 - DNA, 25 bp, Saccharomyces pastorianus
ccaaggtcaagaacttcggtgtttg

SEQ ID NO: 150335 - DNA, 25 bp, Saccharomyces pastorianus
aaagactgctgatgtcaagagacaa

SEQ ID NO: 150336 - DNA, 25 bp, Saccharomyces pastorianus
aaatgaagtcatcgccaagtctcgt

SEQ ID NO: 150337 - DNA, 25 bp, Saccharomyces pastorianus
gagactcccaaggtgatcatctaca

SEQ ID NO: 150338 - DNA, 25 bp, Saccharomyces pastorianus
atgacccgctttcattaaggccaaa

SEQ ID NO: 150339 - DNA, 25 bp, Saccharomyces pastorianus
atacagatccgcttgtctcattgat

SEQ ID NO: 150340 - DNA, 25 bp, Saccharomyces pastorianus
ggtataattttttcctctgcgcttc

SEQ ID NO: 150341 - DNA, 25 bp, Saccharomyces pastorianus
aggttccacttgtcttatcgacgac

SEQ ID NO: 150342 - DNA, 25 bp, Saccharomyces pastorianus
catcggcgttatgttgtctgcattt

SEQ ID NO: 150343 - DNA, 25 bp, Saccharomyces pastorianus
ttttgggcgatgctcttggcaacat

SEQ ID NO: 150344 - DNA, 25 bp, Saccharomyces pastorianus
aaaacttcaccgctatggcattcac

SEQ ID NO: 150345 - DNA, 25 bp, Saccharomyces pastorianus
tccgctactttgcaacctgaattta

SEQ ID NO: 150346 - DNA, 25 bp, Saccharomyces pastorianus
ggaacaatttactgacctggccaaa

SEQ ID NO: 150347 - DNA, 25 bp, Saccharomyces pastorianus
tggtactggcatttcaggttccact

SEQ ID NO: 150348 - DNA, 25 bp, Saccharomyces pastorianus
tatgcgagattgaatgagagcggct

SEQ ID NO: 150349 - DNA, 25 bp, Saccharomyces pastorianus
atggatatgcttctggagcttcttc

SEQ ID NO: 150350 - DNA, 25 bp, Saccharomyces pastorianus
gtgcacaccagggtaatcaatttcc

SEQ ID NO: 150351 - DNA, 25 bp, Saccharomyces pastorianus
tcaacaaatgagacagggtccatct

SEQ ID NO: 150352 - DNA, 25 bp, Saccharomyces pastorianus
agtactaaggagtcagtgcacacca

SEQ ID NO: 150353 - DNA, 25 bp, Saccharomyces pastorianus
tccatgatgtgtacgaagctgtgaa

SEQ ID NO: 150354 - DNA, 25 bp, Saccharomyces pastorianus
atatgcttctggagcttcttcttcc

SEQ ID NO: 150355 - DNA, 25 bp, Saccharomyces pastorianus
cggctggttgctatggtttgtcttc

SEQ ID NO: 150356 - DNA, 25 bp, Saccharomyces pastorianus
ttcttcttccagtctatgcgagatt

SEQ ID NO: 150357 - DNA, 25 bp, Saccharomyces pastorianus
ggtttgtcttccatgatgtgtacga

SEQ ID NO: 150358 - DNA, 25 bp, Saccharomyces pastorianus
atttccctgatattttgtcaactca

SEQ ID NO: 150359 - DNA, 25 bp, Saccharomyces pastorianus
ggcgactgtgagttcttcgtattca

SEQ ID NO: 150360 - DNA, 25 bp, Saccharomyces pastorianus
gaaccttatatgcaatccaccggga

SEQ ID NO: 150361 - DNA, 25 bp, Saccharomyces pastorianus
gccaatgctagtgtcgtttgttcca

SEQ ID NO: 150362 - DNA, 25 bp, Saccharomyces pastorianus
aaattgttcctccaagcggtatgac

SEQ ID NO: 150363 - DNA, 25 bp, Saccharomyces pastorianus
gacatacctcattgatgctctgcta

SEQ ID NO: 150364 - DNA, 25 bp, Saccharomyces pastorianus
accgggacgggttatctgctcgatg

SEQ ID NO: 150365 - DNA, 25 bp, Saccharomyces pastorianus
atgtcattatctttctgcggtgttc

SEQ ID NO: 150366 - DNA, 25 bp, Saccharomyces pastorianus
gcggtgttctggctacgccaaatat

SEQ ID NO: 150367 - DNA, 25 bp, Saccharomyces pastorianus
tctgctatcggtaggactggccaat

SEQ ID NO: 150368 - DNA, 25 bp, Saccharomyces pastorianus
tagagtatcgccactgacatacctc

SEQ ID NO: 150369 - DNA, 25 bp, Saccharomyces pastorianus
aatctcgcttcacttttctttataa

SEQ ID NO: 150370 - DNA, 25 bp, Saccharomyces pastorianus
actcttcataggcttcacttttttc

SEQ ID NO: 150371 - DNA, 25 bp, Saccharomyces pastorianus
tatttcgaagctcatggtgcccata

SEQ ID NO: 150372 - DNA, 25 bp, Saccharomyces pastorianus
atttaccacttttcgttcagcagag

SEQ ID NO: 150373 - DNA, 25 bp, Saccharomyces pastorianus
gtttgctacgtcaactttgtaccag

SEQ ID NO: 150374 - DNA, 25 bp, Saccharomyces pastorianus
accagatgccaatccagccgaatgg

SEQ ID NO: 150375 - DNA, 25 bp, Saccharomyces pastorianus
ggaactcacgctagtcaagattatt

SEQ ID NO: 150376 - DNA, 25 bp, Saccharomyces pastorianus
gaatacatcattacagggcctacag

SEQ ID NO: 150377 - DNA, 25 bp, Saccharomyces pastorianus
aggccatcaagaaccttttcgtgga

SEQ ID NO: 150378 - DNA, 25 bp, Saccharomyces pastorianus
caacaattgtgtctgaactcttcat

SEQ ID NO: 150379 - DNA, 25 bp, Saccharomyces pastorianus
ggtgagttatcgattattccatcaa

SEQ ID NO: 150380 - DNA, 25 bp, Saccharomyces pastorianus
taggtgctgcaccaggaactcacgc

SEQ ID NO: 150381 - DNA, 25 bp, Saccharomyces pastorianus
atgctgtatcggatggtgcgtggcc

SEQ ID NO: 150382 - DNA, 25 bp, Saccharomyces pastorianus
tgcgtggcctgttctgtgcctcttt

SEQ ID NO: 150383 - DNA, 25 bp, Saccharomyces pastorianus
tctgtgcctcttttgtaaaacagtt

SEQ ID NO: 150384 - DNA, 25 bp, Saccharomyces pastorianus
gttctgtgcctcttttgtaaaacag

SEQ ID NO: 150385 - DNA, 25 bp, Saccharomyces pastorianus
gtgcctcttttgtaaaacagttaca

SEQ ID NO: 150386 - DNA, 25 bp, Saccharomyces pastorianus
cctgttctgtgcctcttttgtaaaa

SEQ ID NO: 150387 - DNA, 25 bp, Saccharomyces pastorianus
tggcctgttctgtgcctcttttgta

SEQ ID NO: 150388 - DNA, 25 bp, Saccharomyces pastorianus
ctgttctgtgcctcttttgtaaaac

SEQ ID NO: 150389 - DNA, 25 bp, Saccharomyces pastorianus
tgtgcctcttttgtaaaacagttac

SEQ ID NO: 150390 - DNA, 25 bp, Saccharomyces pastorianus
tgttctgtgcctcttttgtaaaaca

SEQ ID NO: 150391 - DNA, 25 bp, Saccharomyces pastorianus
tggtgcgtggcctgttctgtgcctc

SEQ ID NO: 150392 - DNA, 25 bp, Saccharomyces pastorianus
gttgcgaaagcatggccttcttcaa

SEQ ID NO: 150393 - DNA, 25 bp, Saccharomyces pastorianus
tcaagagccttgacaatcgccttag

SEQ ID NO: 150394 - DNA, 25 bp, Saccharomyces pastorianus
gaatatcccgtctagcgactgttca

SEQ ID NO: 150395 - DNA, 25 bp, Saccharomyces pastorianus
aacttgctcttgaagttgccgtcaa

SEQ ID NO: 150396 - DNA, 25 bp, Saccharomyces pastorianus
tggcaattcctgacaacttttcctt

SEQ ID NO: 150397 - DNA, 25 bp, Saccharomyces pastorianus
tacgatgttggtcttctcgatttcg

SEQ ID NO: 150398 - DNA, 25 bp, Saccharomyces pastorianus
gattaaatcgacgtctctttcaaga

SEQ ID NO: 150399 - DNA, 25 bp, Saccharomyces pastorianus
tcgccttaggttccaacaacttcaa

SEQ ID NO: 150400 - DNA, 25 bp, Saccharomyces pastorianus
gtcagccttcaattggatttccttc

SEQ ID NO: 150401 - DNA, 25 bp, Saccharomyces pastorianus
gtactcgtcccggttgttggcaatt

SEQ ID NO: 150402 - DNA, 25 bp, Saccharomyces pastorianus
gaaccttcaacctcattttgtttgc

SEQ ID NO: 150403 - DNA, 25 bp, Saccharomyces pastorianus
gagaatgctccatacctagttaaat

SEQ ID NO: 150404 - DNA, 25 bp, Saccharomyces pastorianus
aggtgtccagtatcatcggcggtaa

SEQ ID NO: 150405 - DNA, 25 bp, Saccharomyces pastorianus
gctatcactgaagcgatcaactaca

SEQ ID NO: 150406 - DNA, 25 bp, Saccharomyces pastorianus
ggttctgcgcttgccaaaaaggtgt

SEQ ID NO: 150407 - DNA, 25 bp, Saccharomyces pastorianus
ccaatgctgctttagccaagggtat

SEQ ID NO: 150408 - DNA, 25 bp, Saccharomyces pastorianus
aagtcaatctatctattggcaggta

SEQ ID NO: 150409 - DNA, 25 bp, Saccharomyces pastorianus
ggttgttacatctccaatgctgctt

SEQ ID NO: 150410 - DNA, 25 bp, Saccharomyces pastorianus
tgggtgataaaccagccgctataaa

SEQ ID NO: 150411 - DNA, 25 bp, Saccharomyces pastorianus
gatatttctccaaatgctaaagcta

SEQ ID NO: 150412 - DNA, 25 bp, Saccharomyces pastorianus
agccgctataaaggatgcagttgat

SEQ ID NO: 150413 - DNA, 25 bp, Saccharomyces pastorianus
aacttggtcaactttcaatttctgt

SEQ ID NO: 150414 - DNA, 25 bp, Saccharomyces pastorianus
attggacttggccaaatccattgat

SEQ ID NO: 150415 - DNA, 25 bp, Saccharomyces pastorianus
gacgctgctgagtttaatgttgaaa

SEQ ID NO: 150416 - DNA, 25 bp, Saccharomyces pastorianus
acccagatccagttcgtgtagtttc

SEQ ID NO: 150417 - DNA, 25 bp, Saccharomyces pastorianus
gatttctctcataaaaaggctgtgt

SEQ ID NO: 150418 - DNA, 25 bp, Saccharomyces pastorianus
agaattgttggccaacccagctaac

SEQ ID NO: 150419 - DNA, 25 bp, Saccharomyces pastorianus
gataaaacatgtttctacgccgaac

SEQ ID NO: 150420 - DNA, 25 bp, Saccharomyces pastorianus
aaattgttattgatgacgctgctga

SEQ ID NO: 150421 - DNA, 25 bp, Saccharomyces pastorianus
tggtgagacttacccagatccagtt

SEQ ID NO: 150422 - DNA, 25 bp, Saccharomyces pastorianus
tcgtgtagtttctgttggtaagcca

SEQ ID NO: 150423 - DNA, 25 bp, Saccharomyces pastorianus
gtcggtgacaagattatcgcttcat

SEQ ID NO: 150424 - DNA, 25 bp, Saccharomyces pastorianus
ttccacaccgggtctttagaagaag

SEQ ID NO: 150425 - DNA, 25 bp, Saccharomyces pastorianus
cttcgtcattttaacagagagcggt

SEQ ID NO: 150426 - DNA, 25 bp, Saccharomyces pastorianus
ctgttaatggaactgaagcctgtga

SEQ ID NO: 150427 - DNA, 25 bp, Saccharomyces pastorianus
tacttcgtcattttaacagagagcg

SEQ ID NO: 150428 - DNA, 25 bp, Saccharomyces pastorianus
cagagagcggtattgcaaagggtat

SEQ ID NO: 150429 - DNA, 25 bp, Saccharomyces pastorianus
tggaactgaagcctgtgaagctcaa

SEQ ID NO: 150430 - DNA, 25 bp, Saccharomyces pastorianus
cgtcattttaacagagagcggtatt

SEQ ID NO: 150431 - DNA, 25 bp, Saccharomyces pastorianus
gaattgttgctgttaatggaactga

SEQ ID NO: 150432 - DNA, 25 bp, Saccharomyces pastorianus
aatacttcgtcattttaacagagag

SEQ ID NO: 150433 - DNA, 25 bp, Saccharomyces pastorianus
gttgctgttaatggaactgaagcct

SEQ ID NO: 150434 - DNA, 25 bp, Saccharomyces pastorianus
aatggaactgaagcctgtgaagctc

SEQ ID NO: 150435 - DNA, 25 bp, Saccharomyces pastorianus
cattttaacagagagcggtattgca

SEQ ID NO: 150436 - DNA, 25 bp, Saccharomyces pastorianus
gttcttggatgtccttttacctcaa

SEQ ID NO: 150437 - DNA, 25 bp, Saccharomyces pastorianus
tatgagtccaactgaagtaccgctg

SEQ ID NO: 150438 - DNA, 25 bp, Saccharomyces pastorianus
gggatgtctctagatttctgttctt

SEQ ID NO: 150439 - DNA, 25 bp, Saccharomyces pastorianus
tctcctggcgatgaagacgtacctg

SEQ ID NO: 150440 - DNA, 25 bp, Saccharomyces pastorianus
agtaccgctggatccttttgacatt

SEQ ID NO: 150441 - DNA, 25 bp, Saccharomyces pastorianus
catgtctcttgtcaatatcggccaa

SEQ ID NO: 150442 - DNA, 25 bp, Saccharomyces pastorianus
aatttcaaggcctcaaacgtgcacc

SEQ ID NO: 150443 - DNA, 25 bp, Saccharomyces pastorianus
ggattcactatcaacgtatttctac

SEQ ID NO: 150444 - DNA, 25 bp, Saccharomyces pastorianus
taaataagttcgcatcctctcctgg

SEQ ID NO: 150445 - DNA, 25 bp, Saccharomyces pastorianus
gtatttctacagacgccatgtctct

SEQ ID NO: 150446 - DNA, 25 bp, Saccharomyces pastorianus
gtgcacctctaggactattccgaat

SEQ ID NO: 150447 - DNA, 25 bp, Saccharomyces pastorianus
ggaaaggctctccaatggacttgaa

SEQ ID NO: 150448 - DNA, 25 bp, Saccharomyces pastorianus
cattggcctcacagggcgtagtgaa

SEQ ID NO: 150449 - DNA, 25 bp, Saccharomyces pastorianus
gtgaactcagaagctctgcccaaga

SEQ ID NO: 150450 - DNA, 25 bp, Saccharomyces pastorianus
gaatcatgatcctctcaaacagcgt

SEQ ID NO: 150451 - DNA, 25 bp, Saccharomyces pastorianus
ggcgtagtgaataatgtccccaagt

SEQ ID NO: 150452 - DNA, 25 bp, Saccharomyces pastorianus
gcagaactagttctcgcacagattc

SEQ ID NO: 150453 - DNA, 25 bp, Saccharomyces pastorianus
gttccagttagatcagtgactccga

SEQ ID NO: 150454 - DNA, 25 bp, Saccharomyces pastorianus
gaaaagttgccggattactcacctc

SEQ ID NO: 150455 - DNA, 25 bp, Saccharomyces pastorianus
acagattctgagacttccatgtgat

SEQ ID NO: 150456 - DNA, 25 bp, Saccharomyces pastorianus
tcctcttcacactttgccgaatagt

SEQ ID NO: 150457 - DNA, 25 bp, Saccharomyces pastorianus
gtccccaagtatattccaagcatgt

SEQ ID NO: 150458 - DNA, 25 bp, Saccharomyces pastorianus
gcgaccatagggagctgatcatgtt

SEQ ID NO: 150459 - DNA, 25 bp, Saccharomyces pastorianus
agcaccggaacatcctcaattgaat

SEQ ID NO: 150460 - DNA, 25 bp, Saccharomyces pastorianus
tcgatgacttcctaataccttcacc

SEQ ID NO: 150461 - DNA, 25 bp, Saccharomyces pastorianus
tcacctccattatcgccaaagctga

SEQ ID NO: 150462 - DNA, 25 bp, Saccharomyces pastorianus
gcaatgccccataataagccagcct

SEQ ID NO: 150463 - DNA, 25 bp, Saccharomyces pastorianus
cagcctcagctggttaatgtggaaa

SEQ ID NO: 150464 - DNA, 25 bp, Saccharomyces pastorianus
gttgtccgtgctatcgatgcaagta

SEQ ID NO: 150465 - DNA, 25 bp, Saccharomyces pastorianus
gatatccgatagtagcgttgtccgt

SEQ ID NO: 150466 - DNA, 25 bp, Saccharomyces pastorianus
gcaatttcattctccagcaccggaa

SEQ ID NO: 150467 - DNA, 25 bp, Saccharomyces pastorianus
caagtgcagagattggctgtggtca

SEQ ID NO: 150468 - DNA, 25 bp, Saccharomyces pastorianus
gaactcgatggaatcctcacacgga

SEQ ID NO: 150469 - DNA, 25 bp, Saccharomyces pastorianus
gctaccgccaagatcagcatgtaat

SEQ ID NO: 150470 - DNA, 25 bp, Saccharomyces pastorianus
atgggtgaatcttcgctaccgccaa

SEQ ID NO: 150471 - DNA, 25 bp, Saccharomyces pastorianus
taaatcttaaagtacctgcagttgg

SEQ ID NO: 150472 - DNA, 25 bp, Saccharomyces pastorianus
gctggctaaggcaattgtttttatc

SEQ ID NO: 150473 - DNA, 25 bp, Saccharomyces pastorianus
aagccgtcggtctttgctgttaaat

SEQ ID NO: 150474 - DNA, 25 bp, Saccharomyces pastorianus
agagtattccaaatcgctgtctaat

SEQ ID NO: 150475 - DNA, 25 bp, Saccharomyces pastorianus
atcattgacactttgctggctaagg

SEQ ID NO: 150476 - DNA, 25 bp, Saccharomyces pastorianus
tcaggtgtttccctatttatagagt

SEQ ID NO: 150477 - DNA, 25 bp, Saccharomyces pastorianus
cagcatgtaattcatcacagctaat

SEQ ID NO: 150478 - DNA, 25 bp, Saccharomyces pastorianus
aaagaccttgcattcaagccgtcgg

SEQ ID NO: 150479 - DNA, 25 bp, Saccharomyces pastorianus
ggaatcatcgcttaacgtagataga

SEQ ID NO: 150480 - DNA, 25 bp, Saccharomyces pastorianus
gctgaaagtactatcgcccatttgg

SEQ ID NO: 150481 - DNA, 25 bp, Saccharomyces pastorianus
gcgaccgctctgattgctgaaagta

SEQ ID NO: 150482 - DNA, 25 bp, Saccharomyces pastorianus
atttgcgcgactcagatgctggatt

SEQ ID NO: 150483 - DNA, 25 bp, Saccharomyces pastorianus
aggtgttttcccatttctgtatgaa

SEQ ID NO: 150484 - DNA, 25 bp, Saccharomyces pastorianus
ttatgacgatctcagtgacgccact

SEQ ID NO: 150485 - DNA, 25 bp, Saccharomyces pastorianus
gcccatttggctctttatgacgatc

SEQ ID NO: 150486 - DNA, 25 bp, Saccharomyces pastorianus
gaaccgaaacgcctagacgactggg

SEQ ID NO: 150487 - DNA, 25 bp, Saccharomyces pastorianus
gaccaagctgccctatcatattagt

SEQ ID NO: 150488 - DNA, 25 bp, Saccharomyces pastorianus
agttaatattatggcggcgaccgct

SEQ ID NO: 150489 - DNA, 25 bp, Saccharomyces pastorianus
tgcagctaccgcagcaatcttggag

SEQ ID NO: 150490 - DNA, 25 bp, Saccharomyces pastorianus
ggaacacggcaaggctactgtcgaa

SEQ ID NO: 150491 - DNA, 25 bp, Saccharomyces pastorianus
taggaactccgcagcagctcagacg

SEQ ID NO: 150492 - DNA, 25 bp, Saccharomyces pastorianus
aatagctgcgaggttattactgctc

SEQ ID NO: 150493 - DNA, 25 bp, Saccharomyces pastorianus
atgccagagtccagattgcagagac

SEQ ID NO: 150494 - DNA, 25 bp, Saccharomyces pastorianus
cattgggcccaagacaaatagctgc

SEQ ID NO: 150495 - DNA, 25 bp, Saccharomyces pastorianus
taataggtaccattgggcccaagac

SEQ ID NO: 150496 - DNA, 25 bp, Saccharomyces pastorianus
gacgcacctccataataggtaccat

SEQ ID NO: 150497 - DNA, 25 bp, Saccharomyces pastorianus
gccagagtccagattgcagagacta

SEQ ID NO: 150498 - DNA, 25 bp, Saccharomyces pastorianus
gcgaggttattactgctcggagaaa

SEQ ID NO: 150499 - DNA, 25 bp, Saccharomyces pastorianus
gaaaataggaactccgcagcagctc

SEQ ID NO: 150500 - DNA, 25 bp, Saccharomyces pastorianus
ctccataataggtaccattgggccc

SEQ ID NO: 150501 - DNA, 25 bp, Saccharomyces pastorianus
agctcagacgcacctccataatagg

SEQ ID NO: 150502 - DNA, 25 bp, Saccharomyces pastorianus
tataggcatcatcaccattaccaac

SEQ ID NO: 150503 - DNA, 25 bp, Saccharomyces pastorianus
gagattccgcaaggctattttctac

SEQ ID NO: 150504 - DNA, 25 bp, Saccharomyces pastorianus
ccttcttgtgttcttgtttggcata

SEQ ID NO: 150505 - DNA, 25 bp, Saccharomyces pastorianus
aatgggtgcatcttgaccagcgcgt

SEQ ID NO: 150506 - DNA, 25 bp, Saccharomyces pastorianus
aatatcagcaccatttccgggtttc

SEQ ID NO: 150507 - DNA, 25 bp, Saccharomyces pastorianus
ggattaaggttcttccccacattat

SEQ ID NO: 150508 - DNA, 25 bp, Saccharomyces pastorianus
tattttctacaatggcctctacgac

SEQ ID NO: 150509 - DNA, 25 bp, Saccharomyces pastorianus
gtggttctctctcattgttataggc

SEQ ID NO: 150510 - DNA, 25 bp, Saccharomyces pastorianus
gccgccaatgcgtttatgtttgcga

SEQ ID NO: 150511 - DNA, 25 bp, Saccharomyces pastorianus
gagatcactgttgaccatggcgcaa

SEQ ID NO: 150512 - DNA, 25 bp, Saccharomyces pastorianus
ggtatgccattttcatccctaagta

SEQ ID NO: 150513 - DNA, 25 bp, Saccharomyces pastorianus
ttgtctccttcacaacagctggaat

SEQ ID NO: 150514 - DNA, 25 bp, Saccharomyces pastorianus
ttcagggtgttttcgccaagttcta

SEQ ID NO: 150515 - DNA, 25 bp, Saccharomyces pastorianus
gtatactacagatctttgtctcctt

SEQ ID NO: 150516 - DNA, 25 bp, Saccharomyces pastorianus
aatctgggttggttgttctacatcc

SEQ ID NO: 150517 - DNA, 25 bp, Saccharomyces pastorianus
ttaggtgtcaccaggcaactccaag

SEQ ID NO: 150518 - DNA, 25 bp, Saccharomyces pastorianus
gattctcagcttacttcatcaatag

SEQ ID NO: 150519 - DNA, 25 bp, Saccharomyces pastorianus
aaattcttcccgttcttggcaatat

SEQ ID NO: 150520 - DNA, 25 bp, Saccharomyces pastorianus
acaaggatccgttgacaggtggtat

SEQ ID NO: 150521 - DNA, 25 bp, Saccharomyces pastorianus
gtaagcgtgatcaaattcttcccgt

SEQ ID NO: 150522 - DNA, 25 bp, Saccharomyces pastorianus
gtcgctttacaaggtatgttccaga

SEQ ID NO: 150523 - DNA, 25 bp, Saccharomyces pastorianus
aagctctacaagtggcctgccagaa

SEQ ID NO: 150524 - DNA, 25 bp, Saccharomyces pastorianus
tagacaccatactaccgagatgcgt

SEQ ID NO: 150525 - DNA, 25 bp, Saccharomyces pastorianus
aagtatcttccaggttcgagactac

SEQ ID NO: 150526 - DNA, 25 bp, Saccharomyces pastorianus
gtcgttcttttgtatgtcacagcgt

SEQ ID NO: 150527 - DNA, 25 bp, Saccharomyces pastorianus
agcgatgtcttgtgcgtctatctaa

SEQ ID NO: 150528 - DNA, 25 bp, Saccharomyces pastorianus
taagcgtcattctgctttcacctta

SEQ ID NO: 150529 - DNA, 25 bp, Saccharomyces pastorianus
agatgcgtgcctcttttgaccaagt

SEQ ID NO: 150530 - DNA, 25 bp, Saccharomyces pastorianus
tgcggagcttttctacaatcttgac

SEQ ID NO: 150531 - DNA, 25 bp, Saccharomyces pastorianus
agatgcctttgaccagctaccggaa

SEQ ID NO: 150532 - DNA, 25 bp, Saccharomyces pastorianus
aagatgatcctgcacttctagacac

SEQ ID NO: 150533 - DNA, 25 bp, Saccharomyces pastorianus
aagatctcccactcaaaagtcctta

SEQ ID NO: 150534 - DNA, 25 bp, Saccharomyces pastorianus
taaacctttcttggctaagcgtcat

SEQ ID NO: 150535 - DNA, 25 bp, Saccharomyces pastorianus
atgactttaccaccatcgaagagat

SEQ ID NO: 150536 - DNA, 25 bp, Saccharomyces pastorianus
gttaccgcatggtcaagttctttga

SEQ ID NO: 150537 - DNA, 25 bp, Saccharomyces pastorianus
gttcaaccagaagatgccagcgatg

SEQ ID NO: 150538 - DNA, 25 bp, Saccharomyces pastorianus
atatcacttgggatccatctggtag

SEQ ID NO: 150539 - DNA, 25 bp, Saccharomyces pastorianus
tgacaccgccatgagagatttgatt

SEQ ID NO: 150540 - DNA, 25 bp, Saccharomyces pastorianus
gctggcttcaagaactttgcctgga

SEQ ID NO: 150541 - DNA, 25 bp, Saccharomyces pastorianus
ggagaccaaggccagcttccatttt

SEQ ID NO: 150542 - DNA, 25 bp, Saccharomyces pastorianus
gaaagatgttgctcatcctacctac

SEQ ID NO: 150543 - DNA, 25 bp, Saccharomyces pastorianus
gagatttgattctacaccaacgtga

SEQ ID NO: 150544 - DNA, 25 bp, Saccharomyces pastorianus
gtaggtgctttagtgggtccaaaca

SEQ ID NO: 150545 - DNA, 25 bp, Saccharomyces pastorianus
gcttccattttgtctaacgccgaaa

SEQ ID NO: 150546 - DNA, 25 bp, Saccharomyces pastorianus
gacattaagctagaggacatccctg

SEQ ID NO: 150547 - DNA, 25 bp, Saccharomyces pastorianus
gaagccactggtaagacgaaaggtt

SEQ ID NO: 150548 - DNA, 25 bp, Saccharomyces pastorianus
agtacatcgtcgttaatggtgcccc

SEQ ID NO: 150549 - DNA, 25 bp, Saccharomyces pastorianus
aggacatccctgttgacgacattga

SEQ ID NO: 150550 - DNA, 25 bp, Saccharomyces pastorianus
tatagtatctcgcaacacacagctc

SEQ ID NO: 150551 - DNA, 25 bp, Saccharomyces pastorianus
atcccatccgccaaagttcctgttt

SEQ ID NO: 150552 - DNA, 25 bp, Saccharomyces pastorianus
ttttctcttcgtggaatgtggctca

SEQ ID NO: 150553 - DNA, 25 bp, Saccharomyces pastorianus
gaaaaattttcttccacgcacattg

SEQ ID NO: 150554 - DNA, 25 bp, Saccharomyces pastorianus
gacttctttgttttccaaagctggt

SEQ ID NO: 150555 - DNA, 25 bp, Saccharomyces pastorianus
acgacattgatttttccgacctgga

SEQ ID NO: 150556 - DNA, 25 bp, Saccharomyces pastorianus
aatgactaccgagactttcgaagac

SEQ ID NO: 150557 - DNA, 25 bp, Saccharomyces pastorianus
aaatgctccagtggctacgaatgca

SEQ ID NO: 150558 - DNA, 25 bp, Saccharomyces pastorianus
gatgatgaaaatgctccagtggcta

SEQ ID NO: 150559 - DNA, 25 bp, Saccharomyces pastorianus
tccagtggctacgaatgcaaacgct

SEQ ID NO: 150560 - DNA, 25 bp, Saccharomyces pastorianus
atgctccagtggctacgaatgcaaa

SEQ ID NO: 150561 - DNA, 25 bp, Saccharomyces pastorianus
ccagtggctacgaatgcaaacgcta

SEQ ID NO: 150562 - DNA, 25 bp, Saccharomyces pastorianus
tgatgaaaatgctccagtggctacg

SEQ ID NO: 150563 - DNA, 25 bp, Saccharomyces pastorianus
agtggctacgaatgcaaacgctacc

SEQ ID NO: 150564 - DNA, 25 bp, Saccharomyces pastorianus
gctccagtggctacgaatgcaaacg

SEQ ID NO: 150565 - DNA, 25 bp, Saccharomyces pastorianus
atgaaaatgctccagtggctacgaa

SEQ ID NO: 150566 - DNA, 25 bp, Saccharomyces pastorianus
aaaatgctccagtggctacgaatgc

SEQ ID NO: 150567 - DNA, 25 bp, Saccharomyces pastorianus
gaaaatgctccagtggctacgaatg

SEQ ID NO: 150568 - DNA, 25 bp, Saccharomyces pastorianus
tttacccttgatcaattccaccaaa

SEQ ID NO: 150569 - DNA, 25 bp, Saccharomyces pastorianus
gacatatccatggatgttcccgata

SEQ ID NO: 150570 - DNA, 25 bp, Saccharomyces pastorianus
ggctccacttatagcttagcacaca

SEQ ID NO: 150571 - DNA, 25 bp, Saccharomyces pastorianus
gtgccgctcctaatctaaactttat

SEQ ID NO: 150572 - DNA, 25 bp, Saccharomyces pastorianus
aatctcactgttaactttacccttg

SEQ ID NO: 150573 - DNA, 25 bp, Saccharomyces pastorianus
gaaaacatgcctccgtcaattggtt

SEQ ID NO: 150574 - DNA, 25 bp, Saccharomyces pastorianus
ttcgagtgaaagtaaccgtgccgct

SEQ ID NO: 150575 - DNA, 25 bp, Saccharomyces pastorianus
ttaaaaactactatgaccctcccat

SEQ ID NO: 150576 - DNA, 25 bp, Saccharomyces pastorianus
aaaacatcggtgttgctgacccaca

SEQ ID NO: 150577 - DNA, 25 bp, Saccharomyces pastorianus
gaaaatgagagcgtaccaccgtaca

SEQ ID NO: 150578 - DNA, 25 bp, Saccharomyces pastorianus
ttcccgatatttttggtagccttga

SEQ ID NO: 150579 - DNA, 25 bp, Saccharomyces pastorianus
ggagaatctgtgtatcttactgtta

SEQ ID NO: 150580 - DNA, 25 bp, Saccharomyces pastorianus
acgagtttacggacaggctactaca

SEQ ID NO: 150581 - DNA, 25 bp, Saccharomyces pastorianus
tatttagaggatacatgccccaccg

SEQ ID NO: 150582 - DNA, 25 bp, Saccharomyces pastorianus
gaggatcgcgtatatctctttgaca

SEQ ID NO: 150583 - DNA, 25 bp, Saccharomyces pastorianus
gcttactctatatctggtgtgcatt

SEQ ID NO: 150584 - DNA, 25 bp, Saccharomyces pastorianus
gaggtacgactatcgatgggcacaa

SEQ ID NO: 150585 - DNA, 25 bp, Saccharomyces pastorianus
tgggcacaacccttatacgaaataa

SEQ ID NO: 150586 - DNA, 25 bp, Saccharomyces pastorianus
gaagtaattttcctagcgcagcaga

SEQ ID NO: 150587 - DNA, 25 bp, Saccharomyces pastorianus
attgaacagtacctctctcatttct

SEQ ID NO: 150588 - DNA, 25 bp, Saccharomyces pastorianus
ttgagcatattttccacctaatccc

SEQ ID NO: 150589 - DNA, 25 bp, Saccharomyces pastorianus
acctaatcccttttgccagcaagga

SEQ ID NO: 150590 - DNA, 25 bp, Saccharomyces pastorianus
atgatgcggtttacgaatcggtccc

SEQ ID NO: 150591 - DNA, 25 bp, Saccharomyces pastorianus
gtgctggatgcaaccttacatggat

SEQ ID NO: 150592 - DNA, 25 bp, Saccharomyces pastorianus
gacctctgcacacatgcttattagg

SEQ ID NO: 150593 - DNA, 25 bp, Saccharomyces pastorianus
ttcggctttctttactctcaattta

SEQ ID NO: 150594 - DNA, 25 bp, Saccharomyces pastorianus
aggtctatactagtgggttctctac

SEQ ID NO: 150595 - DNA, 25 bp, Saccharomyces pastorianus
gtaacttatttcagcagcccatagc

SEQ ID NO: 150596 - DNA, 25 bp, Saccharomyces pastorianus
aatcggtcccggaactgcacgaaat

SEQ ID NO: 150597 - DNA, 25 bp, Saccharomyces pastorianus
agcccatagctgtgtcttcttttat

SEQ ID NO: 150598 - DNA, 25 bp, Saccharomyces pastorianus
tgggttctctacaagcgcacggaaa

SEQ ID NO: 150599 - DNA, 25 bp, Saccharomyces pastorianus
ctggtggttaatggcgacctctgca

SEQ ID NO: 150600 - DNA, 25 bp, Saccharomyces pastorianus
gcagcgttttctttgtatctcttca

SEQ ID NO: 150601 - DNA, 25 bp, Saccharomyces pastorianus
taatgtgcgatcgtgccatcgggaa

SEQ ID NO: 150602 - DNA, 25 bp, Saccharomyces pastorianus
agcattttccttgggtgtttgttcg

SEQ ID NO: 150603 - DNA, 25 bp, Saccharomyces pastorianus
gttggtagtcaagaatctctcgaag

SEQ ID NO: 150604 - DNA, 25 bp, Saccharomyces pastorianus
gcatttggccaatttcaaggatcct

SEQ ID NO: 150605 - DNA, 25 bp, Saccharomyces pastorianus
ggccacttattgagcactaccatga

SEQ ID NO: 150606 - DNA, 25 bp, Saccharomyces pastorianus
aaggatcctggcaccaagcattttc

SEQ ID NO: 150607 - DNA, 25 bp, Saccharomyces pastorianus
gggttcaatatacaaggcttcgttc

SEQ ID NO: 150608 - DNA, 25 bp, Saccharomyces pastorianus
aatcagttagaggagcccgatgcca

SEQ ID NO: 150609 - DNA, 25 bp, Saccharomyces pastorianus
ggagcccgatgccaaatattctata

SEQ ID NO: 150610 - DNA, 25 bp, Saccharomyces pastorianus
gcatctccatggcttagggttcaat

SEQ ID NO: 150611 - DNA, 25 bp, Saccharomyces pastorianus
gatatggcgctaacgttggatttat

SEQ ID NO: 150612 - DNA, 25 bp, Saccharomyces pastorianus
gttccgaatactattcacggccaca

SEQ ID NO: 150613 - DNA, 25 bp, Saccharomyces pastorianus
ggcggctaatttgtcttccagaaga

SEQ ID NO: 150614 - DNA, 25 bp, Saccharomyces pastorianus
tactttggaccaacaggaccgagtt

SEQ ID NO: 150615 - DNA, 25 bp, Saccharomyces pastorianus
ggtcttcgatccacttttttcatga

SEQ ID NO: 150616 - DNA, 25 bp, Saccharomyces pastorianus
cggccacatccagtgcatgattata

SEQ ID NO: 150617 - DNA, 25 bp, Saccharomyces pastorianus
aaacccgatgatgttgtcaccgaga

SEQ ID NO: 150618 - DNA, 25 bp, Saccharomyces pastorianus
aagtcacttctttcgggtttcatct

SEQ ID NO: 150619 - DNA, 25 bp, Saccharomyces pastorianus
gaggaaacttccagaaccgatcgaa

SEQ ID NO: 150620 - DNA, 25 bp, Saccharomyces pastorianus
accactttgactattccttactttg

SEQ ID NO: 150621 - DNA, 25 bp, Saccharomyces pastorianus
gcatgtctgatggtcggtcttcgat

SEQ ID NO: 150622 - DNA, 25 bp, Saccharomyces pastorianus
tagaccaccgtacttgtttattccg

SEQ ID NO: 150623 - DNA, 25 bp, Saccharomyces pastorianus
gtggttgttgcagaacaagtccaaa

SEQ ID NO: 150624 - DNA, 25 bp, Saccharomyces pastorianus
gccttgcttgcttatccaaacagtg

SEQ ID NO: 150625 - DNA, 25 bp, Saccharomyces pastorianus
ccgacattcttgagtctctacatca

SEQ ID NO: 150626 - DNA, 25 bp, Saccharomyces pastorianus
gtgcccgtatcattggtggttgttg

SEQ ID NO: 150627 - DNA, 25 bp, Saccharomyces pastorianus
ttcttaggaatcaactgcgtcagct

SEQ ID NO: 150628 - DNA, 25 bp, Saccharomyces pastorianus
gacttgggcgacaaaataaatccta

SEQ ID NO: 150629 - DNA, 25 bp, Saccharomyces pastorianus
agtacattagcagcggtgcccgtat

SEQ ID NO: 150630 - DNA, 25 bp, Saccharomyces pastorianus
atcaactgcgtcagcttcaaccaat

SEQ ID NO: 150631 - DNA, 25 bp, Saccharomyces pastorianus
aaccaatcacccgacattcttgagt

SEQ ID NO: 150632 - DNA, 25 bp, Saccharomyces pastorianus
gggatacggttgttaaacagtacat

SEQ ID NO: 150633 - DNA, 25 bp, Saccharomyces pastorianus
ccaaatatggccttgcttgcttatc

SEQ ID NO: 150634 - DNA, 25 bp, Saccharomyces pastorianus
gtcatcgttgatccagactactacg

SEQ ID NO: 150635 - DNA, 25 bp, Saccharomyces pastorianus
gcatgcggcggttcttgtgcctgct

SEQ ID NO: 150636 - DNA, 25 bp, Saccharomyces pastorianus
tgccctgccggaacctgaagatgat

SEQ ID NO: 150637 - DNA, 25 bp, Saccharomyces pastorianus
cggttcttgtgcctgctccacctgt

SEQ ID NO: 150638 - DNA, 25 bp, Saccharomyces pastorianus
gctccacctgtcacgtcatcgttga

SEQ ID NO: 150639 - DNA, 25 bp, Saccharomyces pastorianus
aaacgatatgctcgatcttgcttac

SEQ ID NO: 150640 - DNA, 25 bp, Saccharomyces pastorianus
acctgtcacgtcatcgttgatccag

SEQ ID NO: 150641 - DNA, 25 bp, Saccharomyces pastorianus
gaaaacgatatgctcgatcttgctt

SEQ ID NO: 150642 - DNA, 25 bp, Saccharomyces pastorianus
gtcacgtcatcgttgatccagacta

SEQ ID NO: 150643 - DNA, 25 bp, Saccharomyces pastorianus
agactactacgatgccctgccggaa

SEQ ID NO: 150644 - DNA, 25 bp, Saccharomyces pastorianus
gatgccctgccggaacctgaagatg

SEQ ID NO: 150645 - DNA, 25 bp, Saccharomyces pastorianus
atgggattagagtcgctctgcccca

SEQ ID NO: 150646 - DNA, 25 bp, Saccharomyces pastorianus
gatatcgatgggattagagtcgctc

SEQ ID NO: 150647 - DNA, 25 bp, Saccharomyces pastorianus
attagagtcgctctgccccagatga

SEQ ID NO: 150648 - DNA, 25 bp, Saccharomyces pastorianus
atcgatgggattagagtcgctctgc

SEQ ID NO: 150649 - DNA, 25 bp, Saccharomyces pastorianus
ttgcttacgggctaacagagacaag

SEQ ID NO: 150650 - DNA, 25 bp, Saccharomyces pastorianus
acgggctaacagagacaagcaggct

SEQ ID NO: 150651 - DNA, 25 bp, Saccharomyces pastorianus
ggattagagtcgctctgccccagat

SEQ ID NO: 150652 - DNA, 25 bp, Saccharomyces pastorianus
ttagagtcgctctgccccagatgac

SEQ ID NO: 150653 - DNA, 25 bp, Saccharomyces pastorianus
tcgatcttgcttacgggctaacaga

SEQ ID NO: 150654 - DNA, 25 bp, Saccharomyces pastorianus
ctcgatcttgcttacgggctaacag

SEQ ID NO: 150655 - DNA, 25 bp, Saccharomyces pastorianus
cgatgggattagagtcgctctgccc

SEQ ID NO: 150656 - DNA, 25 bp, Saccharomyces pastorianus
ctacaagaagggtgctgcctccaac

SEQ ID NO: 150657 - DNA, 25 bp, Saccharomyces pastorianus
cgatttgatcagaaactccggtgaa

SEQ ID NO: 150658 - DNA, 25 bp, Saccharomyces pastorianus
gatttgatcagaaactccggtgaaa

SEQ ID NO: 150659 - DNA, 25 bp, Saccharomyces pastorianus
ccggtttgtccccatatgaaagaag

SEQ ID NO: 150660 - DNA, 25 bp, Saccharomyces pastorianus
atcgatttgatcagaaactccggtg

SEQ ID NO: 150661 - DNA, 25 bp, Saccharomyces pastorianus
ttgatcagaaactccggtgaaaaga

SEQ ID NO: 150662 - DNA, 25 bp, Saccharomyces pastorianus
tcgatttgatcagaaactccggtga

SEQ ID NO: 150663 - DNA, 25 bp, Saccharomyces pastorianus
tgatcagaaactccggtgaaaagag

SEQ ID NO: 150664 - DNA, 25 bp, Saccharomyces pastorianus
gatcgatttgatcagaaactccggt

SEQ ID NO: 150665 - DNA, 25 bp, Saccharomyces pastorianus
atttgatcagaaactccggtgaaaa

SEQ ID NO: 150666 - DNA, 25 bp, Saccharomyces pastorianus
agaaatcgccggtttgtccccatat

SEQ ID NO: 150667 - DNA, 25 bp, Saccharomyces pastorianus
ctctcgtaactctccagtgacaata

SEQ ID NO: 150668 - DNA, 25 bp, Saccharomyces pastorianus
agctgcaatcattagtgccactgac

SEQ ID NO: 150669 - DNA, 25 bp, Saccharomyces pastorianus
agtcacgccttttctagggcaacag

SEQ ID NO: 150670 - DNA, 25 bp, Saccharomyces pastorianus
agggccttcacctgtgccattgaaa

SEQ ID NO: 150671 - DNA, 25 bp, Saccharomyces pastorianus
gttaaatatgtttctcctggctcag

SEQ ID NO: 150672 - DNA, 25 bp, Saccharomyces pastorianus
gagcaagtttcagtgatctagtcaa

SEQ ID NO: 150673 - DNA, 25 bp, Saccharomyces pastorianus
taccctactcttccggaggaaaatg

SEQ ID NO: 150674 - DNA, 25 bp, Saccharomyces pastorianus
gtcaagctgttatctaaccgtccac

SEQ ID NO: 150675 - DNA, 25 bp, Saccharomyces pastorianus
tggtggcgccaattttaatcaaagt

SEQ ID NO: 150676 - DNA, 25 bp, Saccharomyces pastorianus
actgaccccgtctgctttgtttggt

SEQ ID NO: 150677 - DNA, 25 bp, Saccharomyces pastorianus
tgtccttcactttcactaacaatag

SEQ ID NO: 150678 - DNA, 25 bp, Saccharomyces pastorianus
aaccgctccagaagcttctaccgaa

SEQ ID NO: 150679 - DNA, 25 bp, Saccharomyces pastorianus
cagaagcttctaccgaagctccagt

SEQ ID NO: 150680 - DNA, 25 bp, Saccharomyces pastorianus
taccgaagctccagttgaagaggtt

SEQ ID NO: 150681 - DNA, 25 bp, Saccharomyces pastorianus
aacagaaaccgctccagaagcttct

SEQ ID NO: 150682 - DNA, 25 bp, Saccharomyces pastorianus
aaaccgctccagaagcttctaccga

SEQ ID NO: 150683 - DNA, 25 bp, Saccharomyces pastorianus
agaaaccgctccagaagcttctacc

SEQ ID NO: 150684 - DNA, 25 bp, Saccharomyces pastorianus
aaacagaaaccgctccagaagcttc

SEQ ID NO: 150685 - DNA, 25 bp, Saccharomyces pastorianus
gctccagaagcttctaccgaagctc

SEQ ID NO: 150686 - DNA, 25 bp, Saccharomyces pastorianus
acagaaaccgctccagaagcttcta

SEQ ID NO: 150687 - DNA, 25 bp, Saccharomyces pastorianus
gcttctaccgaagctccagttgaag

SEQ ID NO: 150688 - DNA, 25 bp, Saccharomyces pastorianus
tagattgatttctttaggtttgaac

SEQ ID NO: 150689 - DNA, 25 bp, Saccharomyces pastorianus
tcgagggtaaaactttggttgacat

SEQ ID NO: 150690 - DNA, 25 bp, Saccharomyces pastorianus
agatgctccagctgccatcagaact

SEQ ID NO: 150691 - DNA, 25 bp, Saccharomyces pastorianus
ttgctagatgctccagctgccatca

SEQ ID NO: 150692 - DNA, 25 bp, Saccharomyces pastorianus
aattgctagatgctccagctgccat

SEQ ID NO: 150693 - DNA, 25 bp, Saccharomyces pastorianus
cttgaaggatatcttgggtgaccaa

SEQ ID NO: 150694 - DNA, 25 bp, Saccharomyces pastorianus
acaaattgctagatgctccagctgc

SEQ ID NO: 150695 - DNA, 25 bp, Saccharomyces pastorianus
gacattactaaagatttcgaattgg

SEQ ID NO: 150696 - DNA, 25 bp, Saccharomyces pastorianus
ctagatgctccagctgccatcagaa

SEQ ID NO: 150697 - DNA, 25 bp, Saccharomyces pastorianus
aaattgctagatgctccagctgcca

SEQ ID NO: 150698 - DNA, 25 bp, Saccharomyces pastorianus
ggccttgaaggatatcttgggtgac

SEQ ID NO: 150699 - DNA, 25 bp, Saccharomyces pastorianus
gaaggatatcttgggtgaccaagtg

SEQ ID NO: 150700 - DNA, 25 bp, Saccharomyces pastorianus
agatgctccagctgccatcagaact

SEQ ID NO: 150701 - DNA, 25 bp, Saccharomyces pastorianus
gaactggtcaattcggctggtctgc

SEQ ID NO: 150702 - DNA, 25 bp, Saccharomyces pastorianus
gcagctccggttgaagaggtcccag

SEQ ID NO: 150703 - DNA, 25 bp, Saccharomyces pastorianus
aattgctagatgctccagctgccat

SEQ ID NO: 150704 - DNA, 25 bp, Saccharomyces pastorianus
gctagatgctccagctgccatcaga

SEQ ID NO: 150705 - DNA, 25 bp, Saccharomyces pastorianus
cttgaaggatatcttgggtgaccaa

SEQ ID NO: 150706 - DNA, 25 bp, Saccharomyces pastorianus
acaaattgctagatgctccagctgc

SEQ ID NO: 150707 - DNA, 25 bp, Saccharomyces pastorianus
gacattactaaagatttcgaattgg

SEQ ID NO: 150708 - DNA, 25 bp, Saccharomyces pastorianus
gaggtcccagttgacaccgaaatgg

SEQ ID NO: 150709 - DNA, 25 bp, Saccharomyces pastorianus
ggccttgaaggatatcttgggtgac

SEQ ID NO: 150710 - DNA, 25 bp, Saccharomyces pastorianus
tcgagggtaaaactttggttgacat

SEQ ID NO: 150711 - DNA, 25 bp, Saccharomyces pastorianus
taaagctttcatggaagctctatct

SEQ ID NO: 150712 - DNA, 25 bp, Saccharomyces pastorianus
agtctggtactaaagctttcatgga

SEQ ID NO: 150713 - DNA, 25 bp, Saccharomyces pastorianus
tctttcaccgttactttggacgaag

SEQ ID NO: 150714 - DNA, 25 bp, Saccharomyces pastorianus
gaggacgaacaatatatttgggaat

SEQ ID NO: 150715 - DNA, 25 bp, Saccharomyces pastorianus
tactctttattcttagtcgccgaca

SEQ ID NO: 150716 - DNA, 25 bp, Saccharomyces pastorianus
taccattgctaagtctggtactaaa

SEQ ID NO: 150717 - DNA, 25 bp, Saccharomyces pastorianus
aattggtagaggtaccgtcttgaga

SEQ ID NO: 150718 - DNA, 25 bp, Saccharomyces pastorianus
atttgggaatctaatgccggtggtt

SEQ ID NO: 150719 - DNA, 25 bp, Saccharomyces pastorianus
gacagagttcaagttatttccaaga

SEQ ID NO: 150720 - DNA, 25 bp, Saccharomyces pastorianus
taatgccggtggttctttcaccgtt

SEQ ID NO: 150721 - DNA, 25 bp, Saccharomyces pastorianus
ttagtcgccgacagagttcaagtta

SEQ ID NO: 150722 - DNA, 25 bp, Saccharomyces pastorianus
aattgaacaagtcgccaaggaagcc

SEQ ID NO: 150723 - DNA, 25 bp, Saccharomyces pastorianus
aaggaagccaccgaggctttaagag

SEQ ID NO: 150724 - DNA, 25 bp, Saccharomyces pastorianus
caagtcgccaaggaagccaccgagg

SEQ ID NO: 150725 - DNA, 25 bp, Saccharomyces pastorianus
acaagtcgccaaggaagccaccgag

SEQ ID NO: 150726 - DNA, 25 bp, Saccharomyces pastorianus
agtcgccaaggaagccaccgaggct

SEQ ID NO: 150727 - DNA, 25 bp, Saccharomyces pastorianus
tgaacaagtcgccaaggaagccacc

SEQ ID NO: 150728 - DNA, 25 bp, Saccharomyces pastorianus
gaacaagtcgccaaggaagccaccg

SEQ ID NO: 150729 - DNA, 25 bp, Saccharomyces pastorianus
ggaagccaccgaggctttaagagaa

SEQ ID NO: 150730 - DNA, 25 bp, Saccharomyces pastorianus
gccaaggaagccaccgaggctttaa

SEQ ID NO: 150731 - DNA, 25 bp, Saccharomyces pastorianus
gaaattgaacaagtcgccaaggaag

SEQ ID NO: 150732 - DNA, 25 bp, Saccharomyces pastorianus
aagtcgccaaggaagccaccgaggc

SEQ ID NO: 150733 - DNA, 25 bp, Saccharomyces pastorianus
ggtttctcgcgcaaatagtgccgaa

SEQ ID NO: 150734 - DNA, 25 bp, Saccharomyces pastorianus
atgggcctacacagtgaaccgttag

SEQ ID NO: 150735 - DNA, 25 bp, Saccharomyces pastorianus
agaccgttcggtatatactggagac

SEQ ID NO: 150736 - DNA, 25 bp, Saccharomyces pastorianus
gaatctgattctacggctttacata

SEQ ID NO: 150737 - DNA, 25 bp, Saccharomyces pastorianus
attcggccacgatgctatctttgag

SEQ ID NO: 150738 - DNA, 25 bp, Saccharomyces pastorianus
cggctttacattgggcgtcgttgaa

SEQ ID NO: 150739 - DNA, 25 bp, Saccharomyces pastorianus
gagtatgaggcagacccctttatta

SEQ ID NO: 150740 - DNA, 25 bp, Saccharomyces pastorianus
agacgtggtcaagctactgtgtgat

SEQ ID NO: 150741 - DNA, 25 bp, Saccharomyces pastorianus
tggctgctgccaacggtcatataga

SEQ ID NO: 150742 - DNA, 25 bp, Saccharomyces pastorianus
gtcagtcccaagttactttcgactt

SEQ ID NO: 150743 - DNA, 25 bp, Saccharomyces pastorianus
atttaccactttagtcagtcccaag

SEQ ID NO: 150744 - DNA, 25 bp, Saccharomyces pastorianus
aacggcaaactggacgtggtcagat

SEQ ID NO: 150745 - DNA, 25 bp, Saccharomyces pastorianus
tgtgacgaatatgaggccgacccct

SEQ ID NO: 150746 - DNA, 25 bp, Saccharomyces pastorianus
gtttctcgcgagaacagtgctgaag

SEQ ID NO: 150747 - DNA, 25 bp, Saccharomyces pastorianus
gtttggccacgatgccatctttgaa

SEQ ID NO: 150748 - DNA, 25 bp, Saccharomyces pastorianus
aacggccatgttgagacagtccagt

SEQ ID NO: 150749 - DNA, 25 bp, Saccharomyces pastorianus
aaatacgatgttgagcccgaggatg

SEQ ID NO: 150750 - DNA, 25 bp, Saccharomyces pastorianus
ttcattgggcctcgttgaacggcaa

SEQ ID NO: 150751 - DNA, 25 bp, Saccharomyces pastorianus
gacaagctggcgttcaaatcacaaa

SEQ ID NO: 150752 - DNA, 25 bp, Saccharomyces pastorianus
aggccgaccccttcatcagaaataa

SEQ ID NO: 150753 - DNA, 25 bp, Saccharomyces pastorianus
gaaacaggcaacaccgcacttcatt

SEQ ID NO: 150754 - DNA, 25 bp, Saccharomyces pastorianus
accaaggaggccactgatgctttaa

SEQ ID NO: 150755 - DNA, 25 bp, Saccharomyces pastorianus
agcgcgcagcctagtgtgcaaagct

SEQ ID NO: 150756 - DNA, 25 bp, Saccharomyces pastorianus
ggtatctatttctcacgatgacctc

SEQ ID NO: 150757 - DNA, 25 bp, Saccharomyces pastorianus
ccttaggcggtggtgctgcattgaa

SEQ ID NO: 150758 - DNA, 25 bp, Saccharomyces pastorianus
gtgcctacaaattcttccataatgg

SEQ ID NO: 150759 - DNA, 25 bp, Saccharomyces pastorianus
agaggatgtttacttggacccatta

SEQ ID NO: 150760 - DNA, 25 bp, Saccharomyces pastorianus
aaagctctttcgctgggacatggtc

SEQ ID NO: 150761 - DNA, 25 bp, Saccharomyces pastorianus
gctgttttcaagtccttaggcgtca

SEQ ID NO: 150762 - DNA, 25 bp, Saccharomyces pastorianus
aggctccttgactttcaactctaaa

SEQ ID NO: 150763 - DNA, 25 bp, Saccharomyces pastorianus
atggtccgccaaagaggctgttttc

SEQ ID NO: 150764 - DNA, 25 bp, Saccharomyces pastorianus
gagcatgctccatacactgatgaat

SEQ ID NO: 150765 - DNA, 25 bp, Saccharomyces pastorianus
gagaaagtctctaacggtggcgtcg

SEQ ID NO: 150766 - DNA, 25 bp, Saccharomyces pastorianus
ctggaactgggctaaacaatcttta

SEQ ID NO: 150767 - DNA, 25 bp, Saccharomyces pastorianus
ttaacggtgttgctacttctttctc

SEQ ID NO: 150768 - DNA, 25 bp, Saccharomyces pastorianus
aaggacactgttgctgaacttcaag

SEQ ID NO: 150769 - DNA, 25 bp, Saccharomyces pastorianus
tcgatgctggcgctctggaagaaat

SEQ ID NO: 150770 - DNA, 25 bp, Saccharomyces pastorianus
gaaccttcgattcttcctggaactg

SEQ ID NO: 150771 - DNA, 25 bp, Saccharomyces pastorianus
tggcgcgtcaacaactgcaagtatt

SEQ ID NO: 150772 - DNA, 25 bp, Saccharomyces pastorianus
gcaagtattggctcgttatctaaaa

SEQ ID NO: 150773 - DNA, 25 bp, Saccharomyces pastorianus
gaacagatccaacgatgctttgatt

SEQ ID NO: 150774 - DNA, 25 bp, Saccharomyces pastorianus
gaccacaaggttttggcgcgtcaac

SEQ ID NO: 150775 - DNA, 25 bp, Saccharomyces pastorianus
ttgacttatcatcagctgctagcgc

SEQ ID NO: 150776 - DNA, 25 bp, Saccharomyces pastorianus
atacgcttccattgttggtgttgac

SEQ ID NO: 150777 - DNA, 25 bp, Saccharomyces pastorianus
aatggctttcaacttattgggtcta

SEQ ID NO: 150778 - DNA, 25 bp, Saccharomyces pastorianus
aaccgtttgcggtgctcttattggt

SEQ ID NO: 150779 - DNA, 25 bp, Saccharomyces pastorianus
ccagaagtcgtagagttgtgccaaa

SEQ ID NO: 150780 - DNA, 25 bp, Saccharomyces pastorianus
gggttctactttgattgttgttccg

SEQ ID NO: 150781 - DNA, 25 bp, Saccharomyces pastorianus
atcctgggccaatcaattaaccgtt

SEQ ID NO: 150782 - DNA, 25 bp, Saccharomyces pastorianus
attgggtctattgactccagaagtc

SEQ ID NO: 150783 - DNA, 25 bp, Saccharomyces pastorianus
agaccagctcaagtcattctaccaa

SEQ ID NO: 150784 - DNA, 25 bp, Saccharomyces pastorianus
gaggtactggtttaatgagcgctaa

SEQ ID NO: 150785 - DNA, 25 bp, Saccharomyces pastorianus
cgccaaatatggtgctaagggttct

SEQ ID NO: 150786 - DNA, 25 bp, Saccharomyces pastorianus
agtcattctaccaatgtctccaaac

SEQ ID NO: 150787 - DNA, 25 bp, Saccharomyces pastorianus
gattgttgttccgttcaaccaaggt

SEQ ID NO: 150788 - DNA, 25 bp, Saccharomyces pastorianus
gaattttcgttggaaggttgcgttg

SEQ ID NO: 150789 - DNA, 25 bp, Saccharomyces pastorianus
taatttgaagggtcgtccatacact

SEQ ID NO: 150790 - DNA, 25 bp, Saccharomyces pastorianus
tggcttggattatgggcttcatttc

SEQ ID NO: 150791 - DNA, 25 bp, Saccharomyces pastorianus
aaatggcttggattatgggcttcat

SEQ ID NO: 150792 - DNA, 25 bp, Saccharomyces pastorianus
tttgaagggtcgtccatacactggt

SEQ ID NO: 150793 - DNA, 25 bp, Saccharomyces pastorianus
ttatgggcttcatttcataccataa

SEQ ID NO: 150794 - DNA, 25 bp, Saccharomyces pastorianus
ggaagcttttggtgaattttcgttg

SEQ ID NO: 150795 - DNA, 25 bp, Saccharomyces pastorianus
ggattatgggcttcatttcatacca

SEQ ID NO: 150796 - DNA, 25 bp, Saccharomyces pastorianus
gttgcgttgaaatggcttggattat

SEQ ID NO: 150797 - DNA, 25 bp, Saccharomyces pastorianus
aggttgcgttgaaatggcttggatt

SEQ ID NO: 150798 - DNA, 25 bp, Saccharomyces pastorianus
gcttttggtgaattttcgttggaag

SEQ ID NO: 150799 - DNA, 25 bp, Saccharomyces pastorianus
gaattttcgttggaaggttgcgttg

SEQ ID NO: 150800 - DNA, 25 bp, Saccharomyces pastorianus
taatttgaagggtcgtccatacact

SEQ ID NO: 150801 - DNA, 25 bp, Saccharomyces pastorianus
catacactggttgggttgattccaa

SEQ ID NO: 150802 - DNA, 25 bp, Saccharomyces pastorianus
tggcttggattatgggcttcatttc

SEQ ID NO: 150803 - DNA, 25 bp, Saccharomyces pastorianus
aaatggcttggattatgggcttcat

SEQ ID NO: 150804 - DNA, 25 bp, Saccharomyces pastorianus
tttgaagggtcgtccatacactggt

SEQ ID NO: 150805 - DNA, 25 bp, Saccharomyces pastorianus
aagggtcgtccatacactggttggg

SEQ ID NO: 150806 - DNA, 25 bp, Saccharomyces pastorianus
gggcttcatttcataccataacggt

SEQ ID NO: 150807 - DNA, 25 bp, Saccharomyces pastorianus
ggaagcttttggtgaattttcgttg

SEQ ID NO: 150808 - DNA, 25 bp, Saccharomyces pastorianus
ggattatgggcttcatttcatacca

SEQ ID NO: 150809 - DNA, 25 bp, Saccharomyces pastorianus
aggttgcgttgaaatggcttggatt

SEQ ID NO: 150810 - DNA, 25 bp, Saccharomyces pastorianus
gagtggttgtcatcgccaaaaggta

SEQ ID NO: 150811 - DNA, 25 bp, Saccharomyces pastorianus
gaattaattccttcagttatcacca

SEQ ID NO: 150812 - DNA, 25 bp, Saccharomyces pastorianus
aaagggctctgcacaagttgaccaa

SEQ ID NO: 150813 - DNA, 25 bp, Saccharomyces pastorianus
tcgtcgtctacgttacattgagtgg

SEQ ID NO: 150814 - DNA, 25 bp, Saccharomyces pastorianus
gttggtgctttatgtcctgaacaat

SEQ ID NO: 150815 - DNA, 25 bp, Saccharomyces pastorianus
gttaaagtcgttattgccggtgcta

SEQ ID NO: 150816 - DNA, 25 bp, Saccharomyces pastorianus
gatgacgatgattctccagctaaca

SEQ ID NO: 150817 - DNA, 25 bp, Saccharomyces pastorianus
ggtaatgctgatgccgttggtctaa

SEQ ID NO: 150818 - DNA, 25 bp, Saccharomyces pastorianus
aagaagctgcaagccgaacgtcgtc

SEQ ID NO: 150819 - DNA, 25 bp, Saccharomyces pastorianus
cgacgatcacgaagcctccagagaa

SEQ ID NO: 150820 - DNA, 25 bp, Saccharomyces pastorianus
accatactccattaggttctttatc

SEQ ID NO: 150821 - DNA, 25 bp, Saccharomyces pastorianus
ggattacttatcatctggtgccaaa

SEQ ID NO: 150822 - DNA, 25 bp, Saccharomyces pastorianus
gaatacagtcaaacgtgccgcgcaa

SEQ ID NO: 150823 - DNA, 25 bp, Saccharomyces pastorianus
gaatctgccatgctaataatttcca

SEQ ID NO: 150824 - DNA, 25 bp, Saccharomyces pastorianus
agcatacttgctaccattcttcaat

SEQ ID NO: 150825 - DNA, 25 bp, Saccharomyces pastorianus
ggccagggctatcaaaaatctactt

SEQ ID NO: 150826 - DNA, 25 bp, Saccharomyces pastorianus
ttctactacatctttgacctctttg

SEQ ID NO: 150827 - DNA, 25 bp, Saccharomyces pastorianus
tttaacctgttttgtactgcctacg

SEQ ID NO: 150828 - DNA, 25 bp, Saccharomyces pastorianus
actgcctacgattttggattactta

SEQ ID NO: 150829 - DNA, 25 bp, Saccharomyces pastorianus
gctgtgacgcccaaccaaagtggaa

SEQ ID NO: 150830 - DNA, 25 bp, Saccharomyces pastorianus
acccatctctcaattcttgtcaaag

SEQ ID NO: 150831 - DNA, 25 bp, Saccharomyces pastorianus
gacaatcgtcgatgttctatctaaa

SEQ ID NO: 150832 - DNA, 25 bp, Saccharomyces pastorianus
tgtgaacgactggaaaagacttgaa

SEQ ID NO: 150833 - DNA, 25 bp, Saccharomyces pastorianus
cgccgtttttggtggttcagattca

SEQ ID NO: 150834 - DNA, 25 bp, Saccharomyces pastorianus
acgaaggtattgagattgtcaacac

SEQ ID NO: 150835 - DNA, 25 bp, Saccharomyces pastorianus
caaatcttcgtctcctaaagggtca

SEQ ID NO: 150836 - DNA, 25 bp, Saccharomyces pastorianus
gtcaaacaagactttatccataact

SEQ ID NO: 150837 - DNA, 25 bp, Saccharomyces pastorianus
tctcctaaagggtcatcgttacggt

SEQ ID NO: 150838 - DNA, 25 bp, Saccharomyces pastorianus
tggtggttcagattcacaaagagaa

SEQ ID NO: 150839 - DNA, 25 bp, Saccharomyces pastorianus
gaatgacgaaactgttatcaagtat

SEQ ID NO: 150840 - DNA, 25 bp, Saccharomyces pastorianus
gaccgtggattctaatgtgaacgac

SEQ ID NO: 150841 - DNA, 25 bp, Saccharomyces pastorianus
gagcaagattttgaccgtggattct

SEQ ID NO: 150842 - DNA, 25 bp, Saccharomyces pastorianus
gtctactttaatgagagcaattgct

SEQ ID NO: 150843 - DNA, 25 bp, Saccharomyces pastorianus
catgctatgccagcccgagatttga

SEQ ID NO: 150844 - DNA, 25 bp, Saccharomyces pastorianus
ggaagacgctgctagttccacccaa

SEQ ID NO: 150845 - DNA, 25 bp, Saccharomyces pastorianus
ggaaccaagcatactggaagacgct

SEQ ID NO: 150846 - DNA, 25 bp, Saccharomyces pastorianus
aaatgcatgctatgccagcccgaga

SEQ ID NO: 150847 - DNA, 25 bp, Saccharomyces pastorianus
gttgcaaacgcccaagatgttacta

SEQ ID NO: 150848 - DNA, 25 bp, Saccharomyces pastorianus
atgccagcccgagatttgagcttga

SEQ ID NO: 150849 - DNA, 25 bp, Saccharomyces pastorianus
gcttgagcagtgttgcaaacgccca

SEQ ID NO: 150850 - DNA, 25 bp, Saccharomyces pastorianus
gcccgagatttgagcttgagcagtg

SEQ ID NO: 150851 - DNA, 25 bp, Saccharomyces pastorianus
gagcagtgttgcaaacgcccaagat

SEQ ID NO: 150852 - DNA, 25 bp, Saccharomyces pastorianus
agttccacccaaatgcatgctatgc

SEQ ID NO: 150853 - DNA, 25 bp, Saccharomyces pastorianus
gctagttccacccaaatgcatgcta

SEQ ID NO: 150854 - DNA, 25 bp, Saccharomyces pastorianus
atttgtcggattcgcacaggcatca

SEQ ID NO: 150855 - DNA, 25 bp, Saccharomyces pastorianus
tatttgcactgtcaccttggtcaac

SEQ ID NO: 150856 - DNA, 25 bp, Saccharomyces pastorianus
tgactccaggttcaagccagcaaag

SEQ ID NO: 150857 - DNA, 25 bp, Saccharomyces pastorianus
gtattttgttgccatcatccgttat

SEQ ID NO: 150858 - DNA, 25 bp, Saccharomyces pastorianus
ggcctttaccacaatcattctgttt

SEQ ID NO: 150859 - DNA, 25 bp, Saccharomyces pastorianus
gttttctaagaatcctgactccagg

SEQ ID NO: 150860 - DNA, 25 bp, Saccharomyces pastorianus
gctattcctcatgaaggtgccttga

SEQ ID NO: 150861 - DNA, 25 bp, Saccharomyces pastorianus
ccatcatgggctgggtgtttttcat

SEQ ID NO: 150862 - DNA, 25 bp, Saccharomyces pastorianus
aatgctgcgttttctttgcttctac

SEQ ID NO: 150863 - DNA, 25 bp, Saccharomyces pastorianus
actgttgatgattctggcctttacc

SEQ ID NO: 150864 - DNA, 25 bp, Saccharomyces pastorianus
aaaagtatgctgtctctgccatcat

SEQ ID NO: 150865 - DNA, 25 bp, Saccharomyces pastorianus
tccaaacgccgtttctgaagcggag

SEQ ID NO: 150866 - DNA, 25 bp, Saccharomyces pastorianus
agaactggctattggtaacattaag

SEQ ID NO: 150867 - DNA, 25 bp, Saccharomyces pastorianus
gaagcggagctacgttctgctttag

SEQ ID NO: 150868 - DNA, 25 bp, Saccharomyces pastorianus
gttaatggtatcgtctttttagtcg

SEQ ID NO: 150869 - DNA, 25 bp, Saccharomyces pastorianus
attgccgaattgaaggacgttcctt

SEQ ID NO: 150870 - DNA, 25 bp, Saccharomyces pastorianus
tcgatttgggtggtcatattcaagc

SEQ ID NO: 150871 - DNA, 25 bp, Saccharomyces pastorianus
gaataccactggctctcaaagaatt

SEQ ID NO: 150872 - DNA, 25 bp, Saccharomyces pastorianus
agatttgatgaagcacgtgtcgaat

SEQ ID NO: 150873 - DNA, 25 bp, Saccharomyces pastorianus
ggattattgaataccactggctctc

SEQ ID NO: 150874 - DNA, 25 bp, Saccharomyces pastorianus
gattggcaaccttacaaccaacatg

SEQ ID NO: 150875 - DNA, 25 bp, Saccharomyces pastorianus
agatgctttattcaacattgccgaa

SEQ ID NO: 150876 - DNA, 25 bp, Saccharomyces pastorianus
aatacttcgcccagaatggtaaaag

SEQ ID NO: 150877 - DNA, 25 bp, Saccharomyces pastorianus
aaagaaagaatacttcgcccagaat

SEQ ID NO: 150878 - DNA, 25 bp, Saccharomyces pastorianus
gaatacttcgcccagaatggtaaaa

SEQ ID NO: 150879 - DNA, 25 bp, Saccharomyces pastorianus
aagaaagaatacttcgcccagaatg

SEQ ID NO: 150880 - DNA, 25 bp, Saccharomyces pastorianus
tacttcgcccagaatggtaaaagaa

SEQ ID NO: 150881 - DNA, 25 bp, Saccharomyces pastorianus
agaaagaatacttcgcccagaatgg

SEQ ID NO: 150882 - DNA, 25 bp, Saccharomyces pastorianus
aagaatacttcgcccagaatggtaa

SEQ ID NO: 150883 - DNA, 25 bp, Saccharomyces pastorianus
gaggaagaaaaatcacaaagggata

SEQ ID NO: 150884 - DNA, 25 bp, Saccharomyces pastorianus
gaaagaatacttcgcccagaatggt

SEQ ID NO: 150885 - DNA, 25 bp, Saccharomyces pastorianus
aagaacaactatggacggtgacgat

SEQ ID NO: 150886 - DNA, 25 bp, Saccharomyces pastorianus
atacttcgcccagaatggtaaaaga

SEQ ID NO: 150887 - DNA, 25 bp, Saccharomyces pastorianus
taagatcatggtatcctgtccgcgt

SEQ ID NO: 150888 - DNA, 25 bp, Saccharomyces pastorianus
atcctgtccgcgtcaagaaattcta

SEQ ID NO: 150889 - DNA, 25 bp, Saccharomyces pastorianus
gcaggcaaggcaaccagcacaggct

SEQ ID NO: 150890 - DNA, 25 bp, Saccharomyces pastorianus
tgagggtcactatagggcagccttt

SEQ ID NO: 150891 - DNA, 25 bp, Saccharomyces pastorianus
agggtgcgcagatcaaaactgtctc

SEQ ID NO: 150892 - DNA, 25 bp, Saccharomyces pastorianus
ggcactttcaaagcctgagggtcac

SEQ ID NO: 150893 - DNA, 25 bp, Saccharomyces pastorianus
ctataatcctgttacctcactattg

SEQ ID NO: 150894 - DNA, 25 bp, Saccharomyces pastorianus
aactgtctcgggtatccgtggtgaa

SEQ ID NO: 150895 - DNA, 25 bp, Saccharomyces pastorianus
tcgaatccggacagtgcatatcata

SEQ ID NO: 150896 - DNA, 25 bp, Saccharomyces pastorianus
aagtattgacgcatttcgcaaagcc

SEQ ID NO: 150897 - DNA, 25 bp, Saccharomyces pastorianus
gctatgaacctggaaacaccgtcga

SEQ ID NO: 150898 - DNA, 25 bp, Saccharomyces pastorianus
atatgttctaagcaggttatcagac

SEQ ID NO: 150899 - DNA, 25 bp, Saccharomyces pastorianus
ggttatcagacagagagtttgccac

SEQ ID NO: 150900 - DNA, 25 bp, Saccharomyces pastorianus
tgacaccaaagcaagaggaagagtt

SEQ ID NO: 150901 - DNA, 25 bp, Saccharomyces pastorianus
gtctgttgtgagatacatttattct

SEQ ID NO: 150902 - DNA, 25 bp, Saccharomyces pastorianus
attctcaactatatgttctaagcag

SEQ ID NO: 150903 - DNA, 25 bp, Saccharomyces pastorianus
gacagagagtttgccacaggtaaat

SEQ ID NO: 150904 - DNA, 25 bp, Saccharomyces pastorianus
gtttgccacaggtaaattcaagttt

SEQ ID NO: 150905 - DNA, 25 bp, Saccharomyces pastorianus
gaagctctagacaaggatcctaaaa

SEQ ID NO: 150906 - DNA, 25 bp, Saccharomyces pastorianus
gtgaaggtcgaaaaactgacaccaa

SEQ ID NO: 150907 - DNA, 25 bp, Saccharomyces pastorianus
atggttcatttagagtctgttgtga

SEQ ID NO: 150908 - DNA, 25 bp, Saccharomyces pastorianus
atatgaagctctagacaaggatcct

SEQ ID NO: 150909 - DNA, 25 bp, Saccharomyces pastorianus
gtacagaaccttacattatcgaata

SEQ ID NO: 150910 - DNA, 25 bp, Saccharomyces pastorianus
cggtcgcctattgcctatgaatgta

SEQ ID NO: 150911 - DNA, 25 bp, Saccharomyces pastorianus
gagcgcccaggacgttgaagaatct

SEQ ID NO: 150912 - DNA, 25 bp, Saccharomyces pastorianus
gtaccgcatttagagactttagact

SEQ ID NO: 150913 - DNA, 25 bp, Saccharomyces pastorianus
tacattactgttgggccgaaacaat

SEQ ID NO: 150914 - DNA, 25 bp, Saccharomyces pastorianus
aaaggttgtgtagagcgcccaggac

SEQ ID NO: 150915 - DNA, 25 bp, Saccharomyces pastorianus
ctttccaaggcaggcggacggcgat

SEQ ID NO: 150916 - DNA, 25 bp, Saccharomyces pastorianus
gacggcgatacgttgggcccagtaa

SEQ ID NO: 150917 - DNA, 25 bp, Saccharomyces pastorianus
tatcgttgaagtagacggtcgccta

SEQ ID NO: 150918 - DNA, 25 bp, Saccharomyces pastorianus
agagcgcaatgagctttccaaggca

SEQ ID NO: 150919 - DNA, 25 bp, Saccharomyces pastorianus
acttcgattagtaccgcatttagag

SEQ ID NO: 150920 - DNA, 25 bp, Saccharomyces pastorianus
gagtatcttcgaattcttgacagct

SEQ ID NO: 150921 - DNA, 25 bp, Saccharomyces pastorianus
tgaaatatccagcaccactcagagc

SEQ ID NO: 150922 - DNA, 25 bp, Saccharomyces pastorianus
gtcaggcttacggacagcagaagat

SEQ ID NO: 150923 - DNA, 25 bp, Saccharomyces pastorianus
tggcaaccttaattacccgttgtgg

SEQ ID NO: 150924 - DNA, 25 bp, Saccharomyces pastorianus
ccgtcgaacgcattagtcaggctta

SEQ ID NO: 150925 - DNA, 25 bp, Saccharomyces pastorianus
gtttggttacaaggcgatcgatttt

SEQ ID NO: 150926 - DNA, 25 bp, Saccharomyces pastorianus
taatattccgaaggcacctgcatta

SEQ ID NO: 150927 - DNA, 25 bp, Saccharomyces pastorianus
aggtcttactgatgcgcccgagagc

SEQ ID NO: 150928 - DNA, 25 bp, Saccharomyces pastorianus
gataaatcgggacctgctgtgcaaa

SEQ ID NO: 150929 - DNA, 25 bp, Saccharomyces pastorianus
agctaagggtatcccaggtcttact

SEQ ID NO: 150930 - DNA, 25 bp, Saccharomyces pastorianus
gttattggcgatgcccaaacagaat

SEQ ID NO: 150931 - DNA, 25 bp, Saccharomyces pastorianus
acctccaaattacctgatcctgaaa

SEQ ID NO: 150932 - DNA, 25 bp, Saccharomyces pastorianus
agaacaggcccttgacatatcaaag

SEQ ID NO: 150933 - DNA, 25 bp, Saccharomyces pastorianus
gagttgtttcgtcagattctttgga

SEQ ID NO: 150934 - DNA, 25 bp, Saccharomyces pastorianus
aattaggctccgtgagagtccaatt

SEQ ID NO: 150935 - DNA, 25 bp, Saccharomyces pastorianus
acgtcgggtttgaattattgtccat

SEQ ID NO: 150936 - DNA, 25 bp, Saccharomyces pastorianus
gatcctgaaaggtggctgccattaa

SEQ ID NO: 150937 - DNA, 25 bp, Saccharomyces pastorianus
aggcgatgcagatgtccttgttgac

SEQ ID NO: 150938 - DNA, 25 bp, Saccharomyces pastorianus
gaatcgaaggctttactcagagaga

SEQ ID NO: 150939 - DNA, 25 bp, Saccharomyces pastorianus
gtgaaacccttagaatcgtcagcaa

SEQ ID NO: 150940 - DNA, 25 bp, Saccharomyces pastorianus
gagacaggtctacttataggccaaa

SEQ ID NO: 150941 - DNA, 25 bp, Saccharomyces pastorianus
tttttacaaggtcgcgacacctcca

SEQ ID NO: 150942 - DNA, 25 bp, Saccharomyces pastorianus
gacttgcgtgaaactattggattct

SEQ ID NO: 150943 - DNA, 25 bp, Saccharomyces pastorianus
actaatttgctctctcaattgaaca

SEQ ID NO: 150944 - DNA, 25 bp, Saccharomyces pastorianus
tttaactaatttgctctctcaattg

SEQ ID NO: 150945 - DNA, 25 bp, Saccharomyces pastorianus
taactaatttgctctctcaattgaa

SEQ ID NO: 150946 - DNA, 25 bp, Saccharomyces pastorianus
gtcgaacagacttgcgtgaaactat

SEQ ID NO: 150947 - DNA, 25 bp, Saccharomyces pastorianus
gaacagacttgcgtgaaactattgg

SEQ ID NO: 150948 - DNA, 25 bp, Saccharomyces pastorianus
taatttgctctctcaattgaacatt

SEQ ID NO: 150949 - DNA, 25 bp, Saccharomyces pastorianus
attgtctcaagacgagcattcgcag

SEQ ID NO: 150950 - DNA, 25 bp, Saccharomyces pastorianus
cagacttgcgtgaaactattggatt

SEQ ID NO: 150951 - DNA, 25 bp, Saccharomyces pastorianus
gataatttaactaatttgctctctc

SEQ ID NO: 150952 - DNA, 25 bp, Saccharomyces pastorianus
tcgaacagacttgcgtgaaactatt

SEQ ID NO: 150953 - DNA, 25 bp, Saccharomyces pastorianus
gacttgcgtgaaactattggattct

SEQ ID NO: 150954 - DNA, 25 bp, Saccharomyces pastorianus
actaatttgctctctcaattgaaca

SEQ ID NO: 150955 - DNA, 25 bp, Saccharomyces pastorianus
gtcgaacagacttgcgtgaaactat

SEQ ID NO: 150956 - DNA, 25 bp, Saccharomyces pastorianus
gaacagacttgcgtgaaactattgg

SEQ ID NO: 150957 - DNA, 25 bp, Saccharomyces pastorianus
taatttgctctctcaattgaacatt

SEQ ID NO: 150958 - DNA, 25 bp, Saccharomyces pastorianus
attgtctcaagacgagcattcgcag

SEQ ID NO: 150959 - DNA, 25 bp, Saccharomyces pastorianus
cagacttgcgtgaaactattggatt

SEQ ID NO: 150960 - DNA, 25 bp, Saccharomyces pastorianus
gacgagcattcgcaggtcgaacaga

SEQ ID NO: 150961 - DNA, 25 bp, Saccharomyces pastorianus
gataatttaactaatttgctctctc

SEQ ID NO: 150962 - DNA, 25 bp, Saccharomyces pastorianus
tgaacattcaattgtctcaagacga

SEQ ID NO: 150963 - DNA, 25 bp, Saccharomyces pastorianus
ttaactaatttgctctctcaattga

SEQ ID NO: 150964 - DNA, 25 bp, Saccharomyces pastorianus
cggacccttcaacgatattttagca

SEQ ID NO: 150965 - DNA, 25 bp, Saccharomyces pastorianus
tattgaggttacacggacccttcaa

SEQ ID NO: 150966 - DNA, 25 bp, Saccharomyces pastorianus
gagtgtacctgctaatggaatactt

SEQ ID NO: 150967 - DNA, 25 bp, Saccharomyces pastorianus
gaccccaaagatagaatgcgccttg

SEQ ID NO: 150968 - DNA, 25 bp, Saccharomyces pastorianus
tggcgtttgaactactgaccggtgc

SEQ ID NO: 150969 - DNA, 25 bp, Saccharomyces pastorianus
acaattgactacctttctccagaaa

SEQ ID NO: 150970 - DNA, 25 bp, Saccharomyces pastorianus
attgccaatgccctagattatatgc

SEQ ID NO: 150971 - DNA, 25 bp, Saccharomyces pastorianus
gtaacatttctcaggatgcgcaaga

SEQ ID NO: 150972 - DNA, 25 bp, Saccharomyces pastorianus
atgcgccttggagacgtaaaaatgc

SEQ ID NO: 150973 - DNA, 25 bp, Saccharomyces pastorianus
gtgcccctccgttcgaagaagaaat

SEQ ID NO: 150974 - DNA, 25 bp, Saccharomyces pastorianus
agatgcatgggctcttggcgtcctg

SEQ ID NO: 150975 - DNA, 25 bp, Saccharomyces pastorianus
gtagtagacaattcctttaccagaa

SEQ ID NO: 150976 - DNA, 25 bp, Saccharomyces pastorianus
gagtctattgtgctgacgtttatac

SEQ ID NO: 150977 - DNA, 25 bp, Saccharomyces pastorianus
gaattaccttcgctgttcagcaacg

SEQ ID NO: 150978 - DNA, 25 bp, Saccharomyces pastorianus
ttaagaatgaccctgcttttgcaga

SEQ ID NO: 150979 - DNA, 25 bp, Saccharomyces pastorianus
agagcccgtttgcagggtatacaaa

SEQ ID NO: 150980 - DNA, 25 bp, Saccharomyces pastorianus
gatctacacgatttgagagcccgtt

SEQ ID NO: 150981 - DNA, 25 bp, Saccharomyces pastorianus
ttactggaccacctgcaactgatga

SEQ ID NO: 150982 - DNA, 25 bp, Saccharomyces pastorianus
tttggccgaagtagatcatgcgatt

SEQ ID NO: 150983 - DNA, 25 bp, Saccharomyces pastorianus
gaattcttaccccaccaaatatgaa

SEQ ID NO: 150984 - DNA, 25 bp, Saccharomyces pastorianus
gactcttatgcaattgatccttaca

SEQ ID NO: 150985 - DNA, 25 bp, Saccharomyces pastorianus
gatgccaaggctttccatactgcat

SEQ ID NO: 150986 - DNA, 25 bp, Saccharomyces pastorianus
gatgcgttaaaagcactacttcagt

SEQ ID NO: 150987 - DNA, 25 bp, Saccharomyces pastorianus
actatcgtggacaatgttcgtgtga

SEQ ID NO: 150988 - DNA, 25 bp, Saccharomyces pastorianus
accttacttggatgcattgccttcc

SEQ ID NO: 150989 - DNA, 25 bp, Saccharomyces pastorianus
attcctcccgagattgtcatttcaa

SEQ ID NO: 150990 - DNA, 25 bp, Saccharomyces pastorianus
gcgagttgaagcgtttatcatctac

SEQ ID NO: 150991 - DNA, 25 bp, Saccharomyces pastorianus
aggaatctgcccatgaagttttttg

SEQ ID NO: 150992 - DNA, 25 bp, Saccharomyces pastorianus
gtgcgtcatttggtgtaatagtgcc

SEQ ID NO: 150993 - DNA, 25 bp, Saccharomyces pastorianus
ggatggctgaagttgttcttcgcaa

SEQ ID NO: 150994 - DNA, 25 bp, Saccharomyces pastorianus
tggtctggaacccaagcgagttgaa

SEQ ID NO: 150995 - DNA, 25 bp, Saccharomyces pastorianus
taccgatcttaagggcattatttgc

SEQ ID NO: 150996 - DNA, 25 bp, Saccharomyces pastorianus
gacaatcccagcatcaagattcctc

SEQ ID NO: 150997 - DNA, 25 bp, Saccharomyces pastorianus
tccatatatgtggtcgtgtttcaac

SEQ ID NO: 150998 - DNA, 25 bp, Saccharomyces pastorianus
accaaatgctttcctcgagtgtcga

SEQ ID NO: 150999 - DNA, 25 bp, Saccharomyces pastorianus
agaaattcaaacgtgggctgcctat

SEQ ID NO: 151000 - DNA, 25 bp, Saccharomyces pastorianus
aaatgctttcctcgagtgtcgaacc

SEQ ID NO: 151001 - DNA, 25 bp, Saccharomyces pastorianus
tgttttcaccaccaaatgctttcct

SEQ ID NO: 151002 - DNA, 25 bp, Saccharomyces pastorianus
aatcacgttccatatatgtggtcgt

SEQ ID NO: 151003 - DNA, 25 bp, Saccharomyces pastorianus
aaattcaaacgtgggctgcctatta

SEQ ID NO: 151004 - DNA, 25 bp, Saccharomyces pastorianus
ctttgtatttcaatcacgttccata

SEQ ID NO: 151005 - DNA, 25 bp, Saccharomyces pastorianus
tttcctcgagtgtcgaacctttctt

SEQ ID NO: 151006 - DNA, 25 bp, Saccharomyces pastorianus
gaacctttcttctctttgtatttca

SEQ ID NO: 151007 - DNA, 25 bp, Saccharomyces pastorianus
tgtcgaacctttcttctctttgtat

SEQ ID NO: 151008 - DNA, 25 bp, Saccharomyces pastorianus
gtacaaactgtcacatggacgcttt

SEQ ID NO: 151009 - DNA, 25 bp, Saccharomyces pastorianus
cacatcaggtatcggtgacacgtct

SEQ ID NO: 151010 - DNA, 25 bp, Saccharomyces pastorianus
ccgacgtcgtggatctactaagcaa

SEQ ID NO: 151011 - DNA, 25 bp, Saccharomyces pastorianus
acccttttacgatactactccaatg

SEQ ID NO: 151012 - DNA, 25 bp, Saccharomyces pastorianus
acgctttgtgggactcctgattaca

SEQ ID NO: 151013 - DNA, 25 bp, Saccharomyces pastorianus
tgggttcgccaaagaggtacaaact

SEQ ID NO: 151014 - DNA, 25 bp, Saccharomyces pastorianus
ggtgacacgtctttattcgatcaat

SEQ ID NO: 151015 - DNA, 25 bp, Saccharomyces pastorianus
aactgatcactgcagatttgacaag

SEQ ID NO: 151016 - DNA, 25 bp, Saccharomyces pastorianus
gatcaatatcccgaggagcagctag

SEQ ID NO: 151017 - DNA, 25 bp, Saccharomyces pastorianus
cggttccagggacatcaaagctcac

SEQ ID NO: 151018 - DNA, 25 bp, Saccharomyces pastorianus
ttttacgctgcggaagtcatactgg

SEQ ID NO: 151019 - DNA, 25 bp, Saccharomyces pastorianus
tgcaaacgaaaactcccaacttttg

SEQ ID NO: 151020 - DNA, 25 bp, Saccharomyces pastorianus
tcccaacttttggactttataagag

SEQ ID NO: 151021 - DNA, 25 bp, Saccharomyces pastorianus
aagatgtactttttgggagctctga

SEQ ID NO: 151022 - DNA, 25 bp, Saccharomyces pastorianus
tcaagtgcagagaggaaatccgaag

SEQ ID NO: 151023 - DNA, 25 bp, Saccharomyces pastorianus
gtactttttgggagctctgaagata

SEQ ID NO: 151024 - DNA, 25 bp, Saccharomyces pastorianus
aacctagcattttcaaagagtcaag

SEQ ID NO: 151025 - DNA, 25 bp, Saccharomyces pastorianus
gagccaacctagcattttcaaagag

SEQ ID NO: 151026 - DNA, 25 bp, Saccharomyces pastorianus
gattacttgaatatgagctatctca

SEQ ID NO: 151027 - DNA, 25 bp, Saccharomyces pastorianus
gatacagcgagaatttgcaaacgaa

SEQ ID NO: 151028 - DNA, 25 bp, Saccharomyces pastorianus
gaagatgaactgaagagccaaccta

SEQ ID NO: 151029 - DNA, 25 bp, Saccharomyces pastorianus
aatccgaagattgacttgaacttga

SEQ ID NO: 151030 - DNA, 25 bp, Saccharomyces pastorianus
ccctcctatgagtaccaattacaat

SEQ ID NO: 151031 - DNA, 25 bp, Saccharomyces pastorianus
agaccttccacctaacgttgtatcg

SEQ ID NO: 151032 - DNA, 25 bp, Saccharomyces pastorianus
gaatttgctttcaatggcccaacaa

SEQ ID NO: 151033 - DNA, 25 bp, Saccharomyces pastorianus
gcaacagcaacctgctggcaataat

SEQ ID NO: 151034 - DNA, 25 bp, Saccharomyces pastorianus
gaccagcaacaactattatctgcca

SEQ ID NO: 151035 - DNA, 25 bp, Saccharomyces pastorianus
acaacagttgggtggatattcctct

SEQ ID NO: 151036 - DNA, 25 bp, Saccharomyces pastorianus
aatatatctgcaaaaccctctgccc

SEQ ID NO: 151037 - DNA, 25 bp, Saccharomyces pastorianus
cctaacgttgtatcgaatttgcttt

SEQ ID NO: 151038 - DNA, 25 bp, Saccharomyces pastorianus
gatattcctctatgaactcatcctc

SEQ ID NO: 151039 - DNA, 25 bp, Saccharomyces pastorianus
attatctgccattcaagaccttcca

SEQ ID NO: 151040 - DNA, 25 bp, Saccharomyces pastorianus
aacaacctcatgctcagcagcaatt

SEQ ID NO: 151041 - DNA, 25 bp, Saccharomyces pastorianus
gaaccgcagatcgtacgtatgccat

SEQ ID NO: 151042 - DNA, 25 bp, Saccharomyces pastorianus
gattaccgtgctatgagccatcagc

SEQ ID NO: 151043 - DNA, 25 bp, Saccharomyces pastorianus
gaatgctcgtcctcaatttgatcat

SEQ ID NO: 151044 - DNA, 25 bp, Saccharomyces pastorianus
ataattctcgtcctactgattaccg

SEQ ID NO: 151045 - DNA, 25 bp, Saccharomyces pastorianus
gaaagcttatcaatgatgccgcata

SEQ ID NO: 151046 - DNA, 25 bp, Saccharomyces pastorianus
agacacaccgtttcttgcaacattt

SEQ ID NO: 151047 - DNA, 25 bp, Saccharomyces pastorianus
gatcctggaagtttctagctcgaat

SEQ ID NO: 151048 - DNA, 25 bp, Saccharomyces pastorianus
gttctacttttatttcttctgcaaa

SEQ ID NO: 151049 - DNA, 25 bp, Saccharomyces pastorianus
atgacgacaatggtgctggctacaa

SEQ ID NO: 151050 - DNA, 25 bp, Saccharomyces pastorianus
gtttgacaaccctcaaagcgttaga

SEQ ID NO: 151051 - DNA, 25 bp, Saccharomyces pastorianus
atatccgctgatgacgcagttgcca

SEQ ID NO: 151052 - DNA, 25 bp, Saccharomyces pastorianus
acaggtttgtttgcggtatcggtgc

SEQ ID NO: 151053 - DNA, 25 bp, Saccharomyces pastorianus
atctctatggattttgcttgggtgc

SEQ ID NO: 151054 - DNA, 25 bp, Saccharomyces pastorianus
gactgcggtaatggtaagcctattt

SEQ ID NO: 151055 - DNA, 25 bp, Saccharomyces pastorianus
agctttgccgtattctcatttgtag

SEQ ID NO: 151056 - DNA, 25 bp, Saccharomyces pastorianus
ggcatgacatccaattacgagtgtt

SEQ ID NO: 151057 - DNA, 25 bp, Saccharomyces pastorianus
ggcgaaacctacattactaactgtt

SEQ ID NO: 151058 - DNA, 25 bp, Saccharomyces pastorianus
acaattcacatagtccggagttttt

SEQ ID NO: 151059 - DNA, 25 bp, Saccharomyces pastorianus
ggagagcctggcatacaagttttaa

SEQ ID NO: 151060 - DNA, 25 bp, Saccharomyces pastorianus
tctatgttccatttggcgggtccaa

SEQ ID NO: 151061 - DNA, 25 bp, Saccharomyces pastorianus
gggtaatccgttacatctatgttcc

SEQ ID NO: 151062 - DNA, 25 bp, Saccharomyces pastorianus
tggaacttttgatcccatggaggct

SEQ ID NO: 151063 - DNA, 25 bp, Saccharomyces pastorianus
gtgggcccaattatcacttttaatg

SEQ ID NO: 151064 - DNA, 25 bp, Saccharomyces pastorianus
gaaaataagcttccttcgctaacga

SEQ ID NO: 151065 - DNA, 25 bp, Saccharomyces pastorianus
tgagccgccaaccttcgatagatta

SEQ ID NO: 151066 - DNA, 25 bp, Saccharomyces pastorianus
tacgcatgcttttattttcttcact

SEQ ID NO: 151067 - DNA, 25 bp, Saccharomyces pastorianus
ataggcttctatgccctcaaagtat

SEQ ID NO: 151068 - DNA, 25 bp, Saccharomyces pastorianus
atattgctatcatcctaagtcccat

SEQ ID NO: 151069 - DNA, 25 bp, Saccharomyces pastorianus
aagggtatcgttcctcgatgggatt

SEQ ID NO: 151070 - DNA, 25 bp, Saccharomyces pastorianus
gatagccgcttttgcgatttggtcc

SEQ ID NO: 151071 - DNA, 25 bp, Saccharomyces pastorianus
gcgccattgtttttagtgggcccaa

SEQ ID NO: 151072 - DNA, 25 bp, Saccharomyces pastorianus
tggtcctatggtatctttacactat

SEQ ID NO: 151073 - DNA, 25 bp, Saccharomyces pastorianus
tcttcactttggcacattcgctaaa

SEQ ID NO: 151074 - DNA, 25 bp, Saccharomyces pastorianus
gacgctgaagcttggcattggttgc

SEQ ID NO: 151075 - DNA, 25 bp, Saccharomyces pastorianus
cgctgaagcttggcattggctgcaa

SEQ ID NO: 151076 - DNA, 25 bp, Saccharomyces pastorianus
tgcagttaaagcctggccaaccaat

SEQ ID NO: 151077 - DNA, 25 bp, Saccharomyces pastorianus
gtacaagagagaagccgacgctgaa

SEQ ID NO: 151078 - DNA, 25 bp, Saccharomyces pastorianus
tggctgcaactaaagcctggccaac

SEQ ID NO: 151079 - DNA, 25 bp, Saccharomyces pastorianus
ttggcattggctgcaactaaagcct

SEQ ID NO: 151080 - DNA, 25 bp, Saccharomyces pastorianus
attggttgcaactaaaacctggcca

SEQ ID NO: 151081 - DNA, 25 bp, Saccharomyces pastorianus
gtacaaaagagaagccgacgctgaa

SEQ ID NO: 151082 - DNA, 25 bp, Saccharomyces pastorianus
cattggttgcagttaaagcctggcc

SEQ ID NO: 151083 - DNA, 25 bp, Saccharomyces pastorianus
gttgcaactaaaacctggccaacca

SEQ ID NO: 151084 - DNA, 25 bp, Saccharomyces pastorianus
gttgcagttaaagcctggccaacca

SEQ ID NO: 151085 - DNA, 25 bp, Saccharomyces pastorianus
attagctgctccagtcaacactaca

SEQ ID NO: 151086 - DNA, 25 bp, Saccharomyces pastorianus
gctccagtcaacactacaacagaag

SEQ ID NO: 151087 - DNA, 25 bp, Saccharomyces pastorianus
ttagctgctccagtcaacactacaa

SEQ ID NO: 151088 - DNA, 25 bp, Saccharomyces pastorianus
agctgctccagtcaacactacaaca

SEQ ID NO: 151089 - DNA, 25 bp, Saccharomyces pastorianus
ccagtcaacactacaacagaagatg

SEQ ID NO: 151090 - DNA, 25 bp, Saccharomyces pastorianus
tgctccagtcaacactacaacagaa

SEQ ID NO: 151091 - DNA, 25 bp, Saccharomyces pastorianus
acaacagaagatgataacggcacaa

SEQ ID NO: 151092 - DNA, 25 bp, Saccharomyces pastorianus
tagctgctccagtcaacactacaac

SEQ ID NO: 151093 - DNA, 25 bp, Saccharomyces pastorianus
gcattagctgctccagtcaacacta

SEQ ID NO: 151094 - DNA, 25 bp, Saccharomyces pastorianus
aacagaagatgataacggcacaaat

SEQ ID NO: 151095 - DNA, 25 bp, Saccharomyces pastorianus
gctgctccagtcaacactacaacag

SEQ ID NO: 151096 - DNA, 25 bp, Saccharomyces pastorianus
taatgctacaagaacttccgccaca

SEQ ID NO: 151097 - DNA, 25 bp, Saccharomyces pastorianus
gcacctgtagtgcagttgccggtac

SEQ ID NO: 151098 - DNA, 25 bp, Saccharomyces pastorianus
gctgcagcagcttcttcgacaataa

SEQ ID NO: 151099 - DNA, 25 bp, Saccharomyces pastorianus
acaagtgactttatcgctgcagcag

SEQ ID NO: 151100 - DNA, 25 bp, Saccharomyces pastorianus
aattaccgcaggcaagctttcactg

SEQ ID NO: 151101 - DNA, 25 bp, Saccharomyces pastorianus
aacgtcgtatttattgcgctgaaag

SEQ ID NO: 151102 - DNA, 25 bp, Saccharomyces pastorianus
actggaccctactatctcaaatctt

SEQ ID NO: 151103 - DNA, 25 bp, Saccharomyces pastorianus
agagcttcttgttgtcatttcacca

SEQ ID NO: 151104 - DNA, 25 bp, Saccharomyces pastorianus
tttggttgaccacaaactggaccct

SEQ ID NO: 151105 - DNA, 25 bp, Saccharomyces pastorianus
gttgccggtacatcaatctggtatc

SEQ ID NO: 151106 - DNA, 25 bp, Saccharomyces pastorianus
gtaccattttccgttgatccgattt

SEQ ID NO: 151107 - DNA, 25 bp, Saccharomyces pastorianus
cagccgactacgagggcagtgaatc

SEQ ID NO: 151108 - DNA, 25 bp, Saccharomyces pastorianus
tctgcagccgactacgagggcagtg

SEQ ID NO: 151109 - DNA, 25 bp, Saccharomyces pastorianus
ttgcaccaccaacgcgtcattaact

SEQ ID NO: 151110 - DNA, 25 bp, Saccharomyces pastorianus
taactctctgcagccgactacgagg

SEQ ID NO: 151111 - DNA, 25 bp, Saccharomyces pastorianus
ccaacgcgtcattaactctctgcag

SEQ ID NO: 151112 - DNA, 25 bp, Saccharomyces pastorianus
ttaactctctgcagccgactacgag

SEQ ID NO: 151113 - DNA, 25 bp, Saccharomyces pastorianus
gactttgcaccaccaacgcgtcatt

SEQ ID NO: 151114 - DNA, 25 bp, Saccharomyces pastorianus
ctacgagggcagtgaatcgcaggat

SEQ ID NO: 151115 - DNA, 25 bp, Saccharomyces pastorianus
gaatcgcaggatggaaaatgtgggc

SEQ ID NO: 151116 - DNA, 25 bp, Saccharomyces pastorianus
accaacgcgtcattaactctctgca

SEQ ID NO: 151117 - DNA, 25 bp, Saccharomyces pastorianus
ggttccagcacgactttgcaccacc

SEQ ID NO: 151118 - DNA, 25 bp, Saccharomyces pastorianus
gatctttatccacatcttgcaagtg

SEQ ID NO: 151119 - DNA, 25 bp, Saccharomyces pastorianus
gattcaggcagtgttgtccggtata

SEQ ID NO: 151120 - DNA, 25 bp, Saccharomyces pastorianus
gagtacaaaccacagcgttggccac

SEQ ID NO: 151121 - DNA, 25 bp, Saccharomyces pastorianus
ttcgcccagttccttaaatcagatg

SEQ ID NO: 151122 - DNA, 25 bp, Saccharomyces pastorianus
tcagtcaatcgcacattctagcagt

SEQ ID NO: 151123 - DNA, 25 bp, Saccharomyces pastorianus
gtacgaactccggtagcgatgcaaa

SEQ ID NO: 151124 - DNA, 25 bp, Saccharomyces pastorianus
gtccaacgaacatatcacatctagt

SEQ ID NO: 151125 - DNA, 25 bp, Saccharomyces pastorianus
gacaatccaactcaggtgccaaatt

SEQ ID NO: 151126 - DNA, 25 bp, Saccharomyces pastorianus
gtagtgactctatctttatggcagg

SEQ ID NO: 151127 - DNA, 25 bp, Saccharomyces pastorianus
ggacgattgctctttactaactatg

SEQ ID NO: 151128 - DNA, 25 bp, Saccharomyces pastorianus
aatttaatagcttcgcccagttcct

SEQ ID NO: 151129 - DNA, 25 bp, Saccharomyces pastorianus
tcgaaactatcggtcctgaacgggt

SEQ ID NO: 151130 - DNA, 25 bp, Saccharomyces pastorianus
ttggcctttgtgcaccttgttgaac

SEQ ID NO: 151131 - DNA, 25 bp, Saccharomyces pastorianus
tggaagggtccaatcatcagagctg

SEQ ID NO: 151132 - DNA, 25 bp, Saccharomyces pastorianus
ggtaattacgctcttcatccagaag

SEQ ID NO: 151133 - DNA, 25 bp, Saccharomyces pastorianus
tccaacccagatttagtctaccgtt

SEQ ID NO: 151134 - DNA, 25 bp, Saccharomyces pastorianus
agggcccgctttacactggaggttg

SEQ ID NO: 151135 - DNA, 25 bp, Saccharomyces pastorianus
gtttgaggttgtcgccatacggcac

SEQ ID NO: 151136 - DNA, 25 bp, Saccharomyces pastorianus
gaaggttataccgactacccaacat

SEQ ID NO: 151137 - DNA, 25 bp, Saccharomyces pastorianus
gctgaaccaggtattatcgctcaat

SEQ ID NO: 151138 - DNA, 25 bp, Saccharomyces pastorianus
taccgtttagaagagggcctgccat

SEQ ID NO: 151139 - DNA, 25 bp, Saccharomyces pastorianus
gggtactaacgattttgcctactct

SEQ ID NO: 151140 - DNA, 25 bp, Saccharomyces pastorianus
taaaaggttttgagccgatctccct

SEQ ID NO: 151141 - DNA, 25 bp, Saccharomyces pastorianus
tttgagccgatctccctaagagaca

SEQ ID NO: 151142 - DNA, 25 bp, Saccharomyces pastorianus
tgccatttgtaaaaggttttgagcc

SEQ ID NO: 151143 - DNA, 25 bp, Saccharomyces pastorianus
tccctaagagacacaaacctttttg

SEQ ID NO: 151144 - DNA, 25 bp, Saccharomyces pastorianus
gagacacaaacctttttgaaccaat

SEQ ID NO: 151145 - DNA, 25 bp, Saccharomyces pastorianus
gttttgagccgatctccctaagaga

SEQ ID NO: 151146 - DNA, 25 bp, Saccharomyces pastorianus
ttgagccgatctccctaagagacac

SEQ ID NO: 151147 - DNA, 25 bp, Saccharomyces pastorianus
gatctccctaagagacacaaacctt

SEQ ID NO: 151148 - DNA, 25 bp, Saccharomyces pastorianus
aggttttgagccgatctccctaaga

SEQ ID NO: 151149 - DNA, 25 bp, Saccharomyces pastorianus
gagccgatctccctaagagacacaa

SEQ ID NO: 151150 - DNA, 25 bp, Saccharomyces pastorianus
tgtaaaaggttttgagccgatctcc

SEQ ID NO: 151151 - DNA, 25 bp, Saccharomyces pastorianus
gaacccaaatataacgacaccaccg

SEQ ID NO: 151152 - DNA, 25 bp, Saccharomyces pastorianus
ggcaagcctgaactggaatccaata

SEQ ID NO: 151153 - DNA, 25 bp, Saccharomyces pastorianus
tttgcaactacctccagatgtccag

SEQ ID NO: 151154 - DNA, 25 bp, Saccharomyces pastorianus
gtgtcataatcgcatctgatctgtt

SEQ ID NO: 151155 - DNA, 25 bp, Saccharomyces pastorianus
agagcgtattccacaggcgcttgga

SEQ ID NO: 151156 - DNA, 25 bp, Saccharomyces pastorianus
cagatgtccagtcgcggctaaatcc

SEQ ID NO: 151157 - DNA, 25 bp, Saccharomyces pastorianus
gtcctaccacaggtcgcaagcatga

SEQ ID NO: 151158 - DNA, 25 bp, Saccharomyces pastorianus
ggcgcttggaaaactgcatctattg

SEQ ID NO: 151159 - DNA, 25 bp, Saccharomyces pastorianus
gggttcgttattacgttgcacggat

SEQ ID NO: 151160 - DNA, 25 bp, Saccharomyces pastorianus
tattgcaatagcacagcctccacag

SEQ ID NO: 151161 - DNA, 25 bp, Saccharomyces pastorianus
gcaccccaaggagccatggtcatgg

SEQ ID NO: 151162 - DNA, 25 bp, Saccharomyces pastorianus
ggaaggacctttagttattggatat

SEQ ID NO: 151163 - DNA, 25 bp, Saccharomyces pastorianus
ggctcaacagcagatgcaacaaaat

SEQ ID NO: 151164 - DNA, 25 bp, Saccharomyces pastorianus
tggcagaatgcaaccatgaacgatt

SEQ ID NO: 151165 - DNA, 25 bp, Saccharomyces pastorianus
gattagcgtgaggaactggcagaat

SEQ ID NO: 151166 - DNA, 25 bp, Saccharomyces pastorianus
tatgacgctcatgtggaaggacctt

SEQ ID NO: 151167 - DNA, 25 bp, Saccharomyces pastorianus
atatgtcaactcaaaggcagaagca

SEQ ID NO: 151168 - DNA, 25 bp, Saccharomyces pastorianus
aaggcagaagcagaatcgttaacga

SEQ ID NO: 151169 - DNA, 25 bp, Saccharomyces pastorianus
aacggtgtccggtttgcaggcagta

SEQ ID NO: 151170 - DNA, 25 bp, Saccharomyces pastorianus
ttataagccgcaacgctcgagtagc

SEQ ID NO: 151171 - DNA, 25 bp, Saccharomyces pastorianus
atgagcggatttcacaatgttggaa

SEQ ID NO: 151172 - DNA, 25 bp, Saccharomyces pastorianus
gctcgagtagctgtttatgacgctc

SEQ ID NO: 151173 - DNA, 25 bp, Saccharomyces pastorianus
gtaggaacttctgcaacatgttgta

SEQ ID NO: 151174 - DNA, 25 bp, Saccharomyces pastorianus
gaagcaccacaaccttatcatttct

SEQ ID NO: 151175 - DNA, 25 bp, Saccharomyces pastorianus
aagaccgtgtgcaggacgtgcagtt

SEQ ID NO: 151176 - DNA, 25 bp, Saccharomyces pastorianus
aaattctgatacctcctcttgatag

SEQ ID NO: 151177 - DNA, 25 bp, Saccharomyces pastorianus
gagcgtataccttaccttgttgtta

SEQ ID NO: 151178 - DNA, 25 bp, Saccharomyces pastorianus
gtattttactctcgtgtcaaagcag

SEQ ID NO: 151179 - DNA, 25 bp, Saccharomyces pastorianus
aagggcgagcacaactactacaaaa

SEQ ID NO: 151180 - DNA, 25 bp, Saccharomyces pastorianus
gcaaggacaactgcttcgggaaaga

SEQ ID NO: 151181 - DNA, 25 bp, Saccharomyces pastorianus
gatgcgtatcaccagaagagttctt

SEQ ID NO: 151182 - DNA, 25 bp, Saccharomyces pastorianus
aagaccatagagcagaaccccaata

SEQ ID NO: 151183 - DNA, 25 bp, Saccharomyces pastorianus
acgtgcagttatcgttacacttccg

SEQ ID NO: 151184 - DNA, 25 bp, Saccharomyces pastorianus
gcagatctgtatcgattattccggg

SEQ ID NO: 151185 - DNA, 25 bp, Saccharomyces pastorianus
gggcgaagcctcagacagcagagaa

SEQ ID NO: 151186 - DNA, 25 bp, Saccharomyces pastorianus
tgggtatttccagaagcctcctatt

SEQ ID NO: 151187 - DNA, 25 bp, Saccharomyces pastorianus
ggatcctcagtgcataacataccga

SEQ ID NO: 151188 - DNA, 25 bp, Saccharomyces pastorianus
tagaatgctctccataccgctattg

SEQ ID NO: 151189 - DNA, 25 bp, Saccharomyces pastorianus
ttggccgacagttggttttttgatt

SEQ ID NO: 151190 - DNA, 25 bp, Saccharomyces pastorianus
caaccactcttgtaaccccaatata

SEQ ID NO: 151191 - DNA, 25 bp, Saccharomyces pastorianus
ggataccgcgcatcaacaacatgaa

SEQ ID NO: 151192 - DNA, 25 bp, Saccharomyces pastorianus
aaatttcctgtcttactgcactttc

SEQ ID NO: 151193 - DNA, 25 bp, Saccharomyces pastorianus
aggtaattcaatgctattcactgtg

SEQ ID NO: 151194 - DNA, 25 bp, Saccharomyces pastorianus
aattaccacccacttgcgaagatga

SEQ ID NO: 151195 - DNA, 25 bp, Saccharomyces pastorianus
gatgccataacccattcgaatgcgc

SEQ ID NO: 151196 - DNA, 25 bp, Saccharomyces pastorianus
agttgatcaacatgcttgcgatgag

SEQ ID NO: 151197 - DNA, 25 bp, Saccharomyces pastorianus
attgcccactattagttctagttga

SEQ ID NO: 151198 - DNA, 25 bp, Saccharomyces pastorianus
aatggtcttgctgcaacatgcacat

SEQ ID NO: 151199 - DNA, 25 bp, Saccharomyces pastorianus
gaagtactcaagctgcgttccaacg

SEQ ID NO: 151200 - DNA, 25 bp, Saccharomyces pastorianus
gttgatcgtactgaggctgacttat

SEQ ID NO: 151201 - DNA, 25 bp, Saccharomyces pastorianus
cactgcctgagatgttgacttccaa

SEQ ID NO: 151202 - DNA, 25 bp, Saccharomyces pastorianus
caatggaaacctcacttttggaaat

SEQ ID NO: 151203 - DNA, 25 bp, Saccharomyces pastorianus
taattagcaagctctcgcgatgcca

SEQ ID NO: 151204 - DNA, 25 bp, Saccharomyces pastorianus
ggaacttttgttgcacgagacctca

SEQ ID NO: 151205 - DNA, 25 bp, Saccharomyces pastorianus
gcgttccaacggtctttcatgaaat

SEQ ID NO: 151206 - DNA, 25 bp, Saccharomyces pastorianus
gaaaatttccatccaaaagcgtcat

SEQ ID NO: 151207 - DNA, 25 bp, Saccharomyces pastorianus
ataccatactcccaatagatccttt

SEQ ID NO: 151208 - DNA, 25 bp, Saccharomyces pastorianus
ataatttacctgtccggcgcagaat

SEQ ID NO: 151209 - DNA, 25 bp, Saccharomyces pastorianus
gacttaaatctcaggcatgcacggt

SEQ ID NO: 151210 - DNA, 25 bp, Saccharomyces pastorianus
gcatgcacggtatcgctagcatcag

SEQ ID NO: 151211 - DNA, 25 bp, Saccharomyces pastorianus
ggagacgccctatatagcatttcta

SEQ ID NO: 151212 - DNA, 25 bp, Saccharomyces pastorianus
acgctaccactatcgacgtcatgat

SEQ ID NO: 151213 - DNA, 25 bp, Saccharomyces pastorianus
tgatcgacctccctaatttgagctt

SEQ ID NO: 151214 - DNA, 25 bp, Saccharomyces pastorianus
gtctctaatctgtttgtttgttcca

SEQ ID NO: 151215 - DNA, 25 bp, Saccharomyces pastorianus
tggagccgaacaaagtctggtactg

SEQ ID NO: 151216 - DNA, 25 bp, Saccharomyces pastorianus
attctgtagatgcacacgctaccac

SEQ ID NO: 151217 - DNA, 25 bp, Saccharomyces pastorianus
agctgctgcagttacccaagtggtt

SEQ ID NO: 151218 - DNA, 25 bp, Saccharomyces pastorianus
gtatgttacagttacagctgctgca

SEQ ID NO: 151219 - DNA, 25 bp, Saccharomyces pastorianus
atgattcaaaccacatccgccgatg

SEQ ID NO: 151220 - DNA, 25 bp, Saccharomyces pastorianus
atccgccgatgaacagtactgtagt

SEQ ID NO: 151221 - DNA, 25 bp, Saccharomyces pastorianus
aacagtactgtagtgcgtctaccaa

SEQ ID NO: 151222 - DNA, 25 bp, Saccharomyces pastorianus
tataactgccgatgctagtaatgtt

SEQ ID NO: 151223 - DNA, 25 bp, Saccharomyces pastorianus
tacggcggagcctgttgttaattac

SEQ ID NO: 151224 - DNA, 25 bp, Saccharomyces pastorianus
ttacgttactataactgccgatgct

SEQ ID NO: 151225 - DNA, 25 bp, Saccharomyces pastorianus
tgcgtctaccaagtatgttacagtt

SEQ ID NO: 151226 - DNA, 25 bp, Saccharomyces pastorianus
ggagcctgttgttaattacgttact

SEQ ID NO: 151227 - DNA, 25 bp, Saccharomyces pastorianus
agtggttactactacggcggagcct

SEQ ID NO: 151228 - DNA, 25 bp, Saccharomyces pastorianus
cttcgcttctgccttatatgtcaat

SEQ ID NO: 151229 - DNA, 25 bp, Saccharomyces pastorianus
tacctcccaatcagctgctattatt

SEQ ID NO: 151230 - DNA, 25 bp, Saccharomyces pastorianus
atctactttttactctacctactgg

SEQ ID NO: 151231 - DNA, 25 bp, Saccharomyces pastorianus
cgtacagcgatgaaacaaccacctt

SEQ ID NO: 151232 - DNA, 25 bp, Saccharomyces pastorianus
cacaaatgaatacaccaccacctat

SEQ ID NO: 151233 - DNA, 25 bp, Saccharomyces pastorianus
ctagcctaactacgtccacaaatga

SEQ ID NO: 151234 - DNA, 25 bp, Saccharomyces pastorianus
ttactactggtaacctccaacttcg

SEQ ID NO: 151235 - DNA, 25 bp, Saccharomyces pastorianus
tgaaactacgagctatacaccatac

SEQ ID NO: 151236 - DNA, 25 bp, Saccharomyces pastorianus
caacatactctgtttcacctcaaga

SEQ ID NO: 151237 - DNA, 25 bp, Saccharomyces pastorianus
gcaagtacacctactgcaagcacgc

SEQ ID NO: 151238 - DNA, 25 bp, Saccharomyces pastorianus
accaccttctacataacatctactt

SEQ ID NO: 151239 - DNA, 25 bp, Saccharomyces pastorianus
tgagctactgagacgccaattggaa

SEQ ID NO: 151240 - DNA, 25 bp, Saccharomyces pastorianus
gcgggatagggctttgaaaccactc

SEQ ID NO: 151241 - DNA, 25 bp, Saccharomyces pastorianus
gtagaaatgcttccctttgaggtcg

SEQ ID NO: 151242 - DNA, 25 bp, Saccharomyces pastorianus
agtggtcatactgcaatgtcgctaa

SEQ ID NO: 151243 - DNA, 25 bp, Saccharomyces pastorianus
aaccgttcaaacattggcgagccct

SEQ ID NO: 151244 - DNA, 25 bp, Saccharomyces pastorianus
agcccttaaccaaatcttccaatga

SEQ ID NO: 151245 - DNA, 25 bp, Saccharomyces pastorianus
gtcgctaactgggtgtgacggcact

SEQ ID NO: 151246 - DNA, 25 bp, Saccharomyces pastorianus
agagtgccaaacgactgcgggatag

SEQ ID NO: 151247 - DNA, 25 bp, Saccharomyces pastorianus
ggtgatccgaatttggctctaatga

SEQ ID NO: 151248 - DNA, 25 bp, Saccharomyces pastorianus
aagatcgcaccattgagctactgag

SEQ ID NO: 151249 - DNA, 25 bp, Saccharomyces pastorianus
taaagacattaaagccaccggcaat

SEQ ID NO: 151250 - DNA, 25 bp, Saccharomyces pastorianus
aatcactgtgaccatccggccgaaa

SEQ ID NO: 151251 - DNA, 25 bp, Saccharomyces pastorianus
gagacccctggtttattactaatga

SEQ ID NO: 151252 - DNA, 25 bp, Saccharomyces pastorianus
aattcgggttctcagtcgatttctg

SEQ ID NO: 151253 - DNA, 25 bp, Saccharomyces pastorianus
aggtactctcaaccaagatccaact

SEQ ID NO: 151254 - DNA, 25 bp, Saccharomyces pastorianus
gaggccatcaacgaggtctagttct

SEQ ID NO: 151255 - DNA, 25 bp, Saccharomyces pastorianus
aagatccgtatcagccaaatccgat

SEQ ID NO: 151256 - DNA, 25 bp, Saccharomyces pastorianus
ggagcgttggaacttcccgtgacca

SEQ ID NO: 151257 - DNA, 25 bp, Saccharomyces pastorianus
aatacatttgttagagacccctggt

SEQ ID NO: 151258 - DNA, 25 bp, Saccharomyces pastorianus
atacggagcacctctaattcgggtt

SEQ ID NO: 151259 - DNA, 25 bp, Saccharomyces pastorianus
atccaactcacatcacggtagcaat

SEQ ID NO: 151260 - DNA, 25 bp, Saccharomyces pastorianus
gaagtaactccccactaagatccgt

SEQ ID NO: 151261 - DNA, 25 bp, Saccharomyces pastorianus
ttcggtaagtttatcgcaatcacaa

SEQ ID NO: 151262 - DNA, 25 bp, Saccharomyces pastorianus
gaagccgccagttagcgatacaaat

SEQ ID NO: 151263 - DNA, 25 bp, Saccharomyces pastorianus
taaacgacttggtagagtcaccgat

SEQ ID NO: 151264 - DNA, 25 bp, Saccharomyces pastorianus
gcaataattcggtactaaacgactt

SEQ ID NO: 151265 - DNA, 25 bp, Saccharomyces pastorianus
atgtcggctaagaagccgccagtta

SEQ ID NO: 151266 - DNA, 25 bp, Saccharomyces pastorianus
agagtcaccgattaatgcgaatacg

SEQ ID NO: 151267 - DNA, 25 bp, Saccharomyces pastorianus
tagcgatacaaataataacggcaat

SEQ ID NO: 151268 - DNA, 25 bp, Saccharomyces pastorianus
taataacggcaataattcggtacta

SEQ ID NO: 151269 - DNA, 25 bp, Saccharomyces pastorianus
atacattcggtaagtttatcgcaat

SEQ ID NO: 151270 - DNA, 25 bp, Saccharomyces pastorianus
ggtagagtcaccgattaatgcgaat

SEQ ID NO: 151271 - DNA, 25 bp, Saccharomyces pastorianus
ctaagaagccgccagttagcgatac

SEQ ID NO: 151272 - DNA, 25 bp, Saccharomyces pastorianus
gaaggacatgttcatactacttggg

SEQ ID NO: 151273 - DNA, 25 bp, Saccharomyces pastorianus
ttagcgagtttttgccttgtccgga

SEQ ID NO: 151274 - DNA, 25 bp, Saccharomyces pastorianus
tataaagttaccgagcgctattgcg

SEQ ID NO: 151275 - DNA, 25 bp, Saccharomyces pastorianus
ccgagcgctattgcggctactgaga

SEQ ID NO: 151276 - DNA, 25 bp, Saccharomyces pastorianus
ataaggccaagtcatccgcctcctt

SEQ ID NO: 151277 - DNA, 25 bp, Saccharomyces pastorianus
ttcgctcatcggtacttatattttg

SEQ ID NO: 151278 - DNA, 25 bp, Saccharomyces pastorianus
cttgagatggcattctcctatgcta

SEQ ID NO: 151279 - DNA, 25 bp, Saccharomyces pastorianus
catgcaacatttttactttagcgag

SEQ ID NO: 151280 - DNA, 25 bp, Saccharomyces pastorianus
gaggccacatacatgatgggactga

SEQ ID NO: 151281 - DNA, 25 bp, Saccharomyces pastorianus
ttgccttgtccggatggtgtatctc

SEQ ID NO: 151282 - DNA, 25 bp, Saccharomyces pastorianus
agtccttagtaaattgcccatcatg

SEQ ID NO: 151283 - DNA, 25 bp, Saccharomyces pastorianus
ggtccaggtcatgaatccaactcca

SEQ ID NO: 151284 - DNA, 25 bp, Saccharomyces pastorianus
gatatcactcagaagcacccagtaa

SEQ ID NO: 151285 - DNA, 25 bp, Saccharomyces pastorianus
agatcttacattccgaatttccctc

SEQ ID NO: 151286 - DNA, 25 bp, Saccharomyces pastorianus
gagactattgactccagacgatatg

SEQ ID NO: 151287 - DNA, 25 bp, Saccharomyces pastorianus
ggaagaatccccaacaagagctcat

SEQ ID NO: 151288 - DNA, 25 bp, Saccharomyces pastorianus
tgaatccaactccatgtgtacactt

SEQ ID NO: 151289 - DNA, 25 bp, Saccharomyces pastorianus
cagaagaatcgatcatggtccaggt

SEQ ID NO: 151290 - DNA, 25 bp, Saccharomyces pastorianus
aatttccctctctcacagatgagca

SEQ ID NO: 151291 - DNA, 25 bp, Saccharomyces pastorianus
gacgaagtttcacggaattccagga

SEQ ID NO: 151292 - DNA, 25 bp, Saccharomyces pastorianus
gatgcagatagctcgagatttggta

SEQ ID NO: 151293 - DNA, 25 bp, Saccharomyces pastorianus
agtatgatgaacttgctttcgcaaa

SEQ ID NO: 151294 - DNA, 25 bp, Saccharomyces pastorianus
tattcgctggcggtgacaatggtgt

SEQ ID NO: 151295 - DNA, 25 bp, Saccharomyces pastorianus
agtgtactccagtagaccctcaagt

SEQ ID NO: 151296 - DNA, 25 bp, Saccharomyces pastorianus
gagagctacagcgttgcatcctaag

SEQ ID NO: 151297 - DNA, 25 bp, Saccharomyces pastorianus
catcgactgatgctacggtaaggtt

SEQ ID NO: 151298 - DNA, 25 bp, Saccharomyces pastorianus
cctgttattacactagttgggcata

SEQ ID NO: 151299 - DNA, 25 bp, Saccharomyces pastorianus
tcctaaggagttttcggtggcttct

SEQ ID NO: 151300 - DNA, 25 bp, Saccharomyces pastorianus
gtggcttctgcgtgtactgatgaca

SEQ ID NO: 151301 - DNA, 25 bp, Saccharomyces pastorianus
gcaggccgagatagcgttatcaaac

SEQ ID NO: 151302 - DNA, 25 bp, Saccharomyces pastorianus
aatggtaggctctctggaaggtgaa

SEQ ID NO: 151303 - DNA, 25 bp, Saccharomyces pastorianus
aatggtgtgctttccttttatgatt

SEQ ID NO: 151304 - DNA, 25 bp, Saccharomyces pastorianus
tgttctttgtagcactttcgataaa

SEQ ID NO: 151305 - DNA, 25 bp, Saccharomyces pastorianus
aaagcgaaatggaaggtcagaaatc

SEQ ID NO: 151306 - DNA, 25 bp, Saccharomyces pastorianus
cccacctacaaagcgaaatggaagg

SEQ ID NO: 151307 - DNA, 25 bp, Saccharomyces pastorianus
aatggaaggtcagaaatcattgcta

SEQ ID NO: 151308 - DNA, 25 bp, Saccharomyces pastorianus
aagcgaaatggaaggtcagaaatca

SEQ ID NO: 151309 - DNA, 25 bp, Saccharomyces pastorianus
agcgaaatggaaggtcagaaatcat

SEQ ID NO: 151310 - DNA, 25 bp, Saccharomyces pastorianus
gccccacctacaaagcgaaatggaa

SEQ ID NO: 151311 - DNA, 25 bp, Saccharomyces pastorianus
acaaagcgaaatggaaggtcagaaa

SEQ ID NO: 151312 - DNA, 25 bp, Saccharomyces pastorianus
tacaaagcgaaatggaaggtcagaa

SEQ ID NO: 151313 - DNA, 25 bp, Saccharomyces pastorianus
ctacaaagcgaaatggaaggtcaga

SEQ ID NO: 151314 - DNA, 25 bp, Saccharomyces pastorianus
cgccccacctacaaagcgaaatgga

SEQ ID NO: 151315 - DNA, 25 bp, Saccharomyces pastorianus
ccccacctacaaagcgaaatggaag

SEQ ID NO: 151316 - DNA, 25 bp, Saccharomyces pastorianus
aacttacctagatgccattgccgat

SEQ ID NO: 151317 - DNA, 25 bp, Saccharomyces pastorianus
gacatggaagactatctgttcaatc

SEQ ID NO: 151318 - DNA, 25 bp, Saccharomyces pastorianus
agaggcgttggcttaacttacctag

SEQ ID NO: 151319 - DNA, 25 bp, Saccharomyces pastorianus
tacagattcaatttcatttccatat
